United States Patent Application Publication US 2005/0255487 A1 - sequence listing, part 94

SEQ ID NO: 2585680 - RNA, 19 nt, Homo sapiens
  misc_RNA (1)...(19): siRNA sense strand
aggaagaaggcaagaaauu

SEQ ID NO: 2585681 - RNA, 19 nt, Homo sapiens
  misc_RNA (1)...(19): siRNA sense strand
gggugaagagggacaguua

SEQ ID NO: 2585682 - RNA, 19 nt, Homo sapiens
  misc_RNA (1)...(19): siRNA sense strand
gcgaaauacgagaagagaa

SEQ ID NO: 2585683 - RNA, 19 nt, Homo sapiens
  misc_RNA (1)...(19): siRNA sense strand
agaaauugaagaagaggua

SEQ ID NO: 2585684 - RNA, 19 nt, Homo sapiens
  misc_RNA (1)...(19): siRNA sense strand
ccaaagaggaucuggacuu

SEQ ID NO: 2585685 - RNA, 19 nt, Homo sapiens
  misc_RNA (1)...(19): siRNA sense strand
ugucagauaccgaggaaau

SEQ ID NO: 2585686 - RNA, 19 nt, Homo sapiens
  misc_RNA (1)...(19): siRNA sense strand
cggaaagccuacaagaaga

SEQ ID NO: 2585687 - RNA, 19 nt, Homo sapiens
  misc_RNA (1)...(19): siRNA sense strand
ccuccaaggaagaaggcaa

SEQ ID NO: 2585688 - RNA, 19 nt, Homo sapiens
  misc_RNA (1)...(19): siRNA sense strand
cgaaauacgagaagagaag

SEQ ID NO: 2585689 - RNA, 19 nt, Homo sapiens
  misc_RNA (1)...(19): siRNA sense strand
aggaagaggcggaggaauc

SEQ ID NO: 2585690 - RNA, 19 nt, Homo sapiens
  misc_RNA (1)...(19): siRNA sense strand
gagcaaacugccagcggaa

SEQ ID NO: 2585691 - RNA, 19 nt, Homo sapiens
  misc_RNA (1)...(19): siRNA sense strand
gagcagaggaugagcagga

SEQ ID NO: 2585692 - RNA, 19 nt, Homo sapiens
  misc_RNA (1)...(19): siRNA sense strand
gggaacugcagcugauuaa

SEQ ID NO: 2585693 - RNA, 19 nt, Homo sapiens
  misc_RNA (1)...(19): siRNA sense strand
gaagacaguccgaggccaa

SEQ ID NO: 2585694 - RNA, 19 nt, Homo sapiens
  misc_RNA (1)...(19): siRNA sense strand
gggcagaaacugaccugaa

SEQ ID NO: 2585695 - RNA, 19 nt, Homo sapiens
  misc_RNA (1)...(19): siRNA sense strand
agaagaagcugauggccuu

SEQ ID NO: 2585696 - RNA, 19 nt, Homo sapiens
  misc_RNA (1)...(19): siRNA sense strand
ugaauaagcugaaccgaga

SEQ ID NO: 2585697 - RNA, 19 nt, Homo sapiens
  misc_RNA (1)...(19): siRNA sense strand
uggcugagcucaagggcuu

SEQ ID NO: 2585698 - RNA, 19 nt, Homo sapiens
  misc_RNA (1)...(19): siRNA sense strand
cauuacugaugaagaggaa

SEQ ID NO: 2585699 - RNA, 19 nt, Homo sapiens
  misc_RNA (1)...(19): siRNA sense strand
caauaagccuggagcaaac

SEQ ID NO: 2585700 - RNA, 19 nt, Homo sapiens
  misc_RNA (1)...(19): siRNA sense strand
ccaacaagcaagagcagga

SEQ ID NO: 2585701 - RNA, 19 nt, Homo sapiens
  misc_RNA (1)...(19): siRNA sense strand
auaaacagcuggugaggca

SEQ ID NO: 2585702 - RNA, 19 nt, Homo sapiens
  misc_RNA (1)...(19): siRNA sense strand
cuuugauauucgagcaauu

SEQ ID NO: 2585703 - RNA, 19 nt, Homo sapiens
  misc_RNA (1)...(19): siRNA sense strand
gcaaacugccagcggaaga

SEQ ID NO: 2585704 - RNA, 19 nt, Homo sapiens
  misc_RNA (1)...(19): siRNA sense strand
acgaugaggaggaaagaga

SEQ ID NO: 2585705 - RNA, 19 nt, Homo sapiens
  misc_RNA (1)...(19): siRNA sense strand
agaaagugccuguggagca

SEQ ID NO: 2585706 - RNA, 19 nt, Homo sapiens
  misc_RNA (1)...(19): siRNA sense strand
gguaaagaacccagugcca

SEQ ID NO: 2585707 - RNA, 19 nt, Homo sapiens
  misc_RNA (1)...(19): siRNA sense strand
ggaacauugcccagcacua

SEQ ID NO: 2585708 - RNA, 19 nt, Homo sapiens
  misc_RNA (1)...(19): siRNA sense strand
uggccgaguuccugggaga

SEQ ID NO: 2585709 - RNA, 19 nt, Homo sapiens
  misc_RNA (1)...(19): siRNA sense strand
gcagaggaugagcaggaaa

SEQ ID NO: 2585710 - RNA, 19 nt, Homo sapiens
  misc_RNA (1)...(19): siRNA sense strand
ucaucaaauacgugugcaa

SEQ ID NO: 2585711 - RNA, 19 nt, Homo sapiens
  misc_RNA (1)...(19): siRNA sense strand
agcaagagcaggaguucaa

SEQ ID NO: 2585712 - RNA, 19 nt, Homo sapiens
  misc_RNA (1)...(19): siRNA sense strand
ucaauaagcugacggacga

SEQ ID NO: 2585713 - RNA, 19 nt, Homo sapiens
  misc_RNA (1)...(19): siRNA sense strand
guguguguguggucaauaa

SEQ ID NO: 2585714 - RNA, 19 nt, Homo sapiens
  misc_RNA (1)...(19): siRNA sense strand
cccuugaggaagaggagaa

SEQ ID NO: 2585715 - RNA, 19 nt, Homo sapiens
  misc_RNA (1)...(19): siRNA sense strand
ccaacaucauccugaccaa

SEQ ID NO: 2585716 - RNA, 19 nt, Homo sapiens
  misc_RNA (1)...(19): siRNA sense strand
ggucaaggaugcagggcug

SEQ ID NO: 2585717 - RNA, 19 nt, Homo sapiens
  misc_RNA (1)...(19): siRNA sense strand
gaggcuggccagugaaauu

SEQ ID NO: 2585718 - RNA, 19 nt, Homo sapiens
  misc_RNA (1)...(19): siRNA sense strand
gaagaaagucacaggcucu

SEQ ID NO: 2585719 - RNA, 19 nt, Homo sapiens
  misc_RNA (1)...(19): siRNA sense strand
cgaaauuacaucaggcugu

SEQ ID NO: 2585720 - RNA, 19 nt, Homo sapiens
  misc_RNA (1)...(19): siRNA sense strand
aggugugugaugagauuaa

SEQ ID NO: 2585721 - RNA, 19 nt, Homo sapiens
  misc_RNA (1)...(19): siRNA sense strand
gcaagaacauggaggugcu

SEQ ID NO: 2585722 - RNA, 19 nt, Homo sapiens
  misc_RNA (1)...(19): siRNA sense strand
gugaagaggaagcgaguuc

SEQ ID NO: 2585723 - RNA, 19 nt, Homo sapiens
  misc_RNA (1)...(19): siRNA sense strand
cagaggaugagcaggaaaa

SEQ ID NO: 2585724 - RNA, 19 nt, Homo sapiens
  misc_RNA (1)...(19): siRNA sense strand
guggaggauuuacuggaaa

SEQ ID NO: 2585725 - RNA, 19 nt, Homo sapiens
  misc_RNA (1)...(19): siRNA sense strand
uggagaagaaugaugucua

SEQ ID NO: 2585726 - RNA, 19 nt, Homo sapiens
  misc_RNA (1)...(19): siRNA sense strand
aaagaagcgccguguggaa

SEQ ID NO: 2585727 - RNA, 19 nt, Homo sapiens
  misc_RNA (1)...(19): siRNA sense strand
uggcggaaucaaaggaaaa

SEQ ID NO: 2585728 - RNA, 19 nt, Homo sapiens
  misc_RNA (1)...(19): siRNA sense strand
agaacagggagcaggauca

SEQ ID NO: 2585729 - RNA, 19 nt, Homo sapiens
  misc_RNA (1)...(19): siRNA sense strand
auucagugccagaggacau

SEQ ID NO: 2585730 - RNA, 19 nt, Homo sapiens
  misc_RNA (1)...(19): siRNA sense strand
ucgcuuacguggaguacau

SEQ ID NO: 2585731 - RNA, 19 nt, Homo sapiens
  misc_RNA (1)...(19): siRNA sense strand
ucuacaagcagaagaagau

SEQ ID NO: 2585732 - RNA, 19 nt, Homo sapiens
  misc_RNA (1)...(19): siRNA sense strand
cccuggaguucaucaaaua

SEQ ID NO: 2585733 - RNA, 19 nt, Homo sapiens
  misc_RNA (1)...(19): siRNA sense strand
ccauugaccugaagaucca

SEQ ID NO: 2585734 - RNA, 19 nt, Homo sapiens
  misc_RNA (1)...(19): siRNA sense strand
aaggcaagaaauugaagaa

SEQ ID NO: 2585735 - RNA, 19 nt, Homo sapiens
  misc_RNA (1)...(19): siRNA sense strand
ggaaccuaccagaggacau

SEQ ID NO: 2585736 - RNA, 19 nt, Homo sapiens
  misc_RNA (1)...(19): siRNA sense strand
guggaaaggaggcugauga

SEQ ID NO: 2585737 - RNA, 19 nt, Homo sapiens
  misc_RNA (1)...(19): siRNA sense strand
uggaggauuuacuggaaaa

SEQ ID NO: 2585738 - RNA, 19 nt, Homo sapiens
  misc_RNA (1)...(19): siRNA sense strand
aggauuuacuggaaaacaa

SEQ ID NO: 2585739 - RNA, 19 nt, Homo sapiens
  misc_RNA (1)...(19): siRNA sense strand
ugguggguuugaagcgaaa

SEQ ID NO: 2585740 - RNA, 19 nt, Homo sapiens
  misc_RNA (1)...(19): siRNA sense strand
gggagauuguuucagaaga

SEQ ID NO: 2585741 - RNA, 19 nt, Homo sapiens
  misc_RNA (1)...(19): siRNA sense strand
agaggugugugaugagauu

SEQ ID NO: 2585742 - RNA, 19 nt, Homo sapiens
  misc_RNA (1)...(19): siRNA sense strand
agaagaaugaugucuacaa

SEQ ID NO: 2585743 - RNA, 19 nt, Homo sapiens
  misc_RNA (1)...(19): siRNA sense strand
ucagaagauucagaagaaa

SEQ ID NO: 2585744 - RNA, 19 nt, Homo sapiens
  misc_RNA (1)...(19): siRNA sense strand
cagaagaagcugauggccu

SEQ ID NO: 2585745 - RNA, 19 nt, Homo sapiens
  misc_RNA (1)...(19): siRNA sense strand
gcagauuuaagguggcuuu

SEQ ID NO: 2585746 - RNA, 19 nt, Homo sapiens
  misc_RNA (1)...(19): siRNA sense strand
uagcugaccaguuggacaa

SEQ ID NO: 2585747 - RNA, 19 nt, Homo sapiens
  misc_RNA (1)...(19): siRNA sense strand
caagaaguuucagggcaaa

SEQ ID NO: 2585748 - RNA, 19 nt, Homo sapiens
  misc_RNA (1)...(19): siRNA sense strand
cuuacuaccuguacaugaa

SEQ ID NO: 2585749 - RNA, 19 nt, Homo sapiens
  misc_RNA (1)...(19): siRNA sense strand
ggaaagccuacaagaagau

SEQ ID NO: 2585750 - RNA, 19 nt, Homo sapiens
  misc_RNA (1)...(19): siRNA sense strand
gcugggaagcagagaccuu

SEQ ID NO: 2585751 - RNA, 19 nt, Homo sapiens
  misc_RNA (1)...(19): siRNA sense strand
acucagaagauucagaaga

SEQ ID NO: 2585752 - RNA, 19 nt, Homo sapiens
  misc_RNA (1)...(19): siRNA sense strand
gagcaugcagcaggagaua

SEQ ID NO: 2585753 - RNA, 19 nt, Homo sapiens
  misc_RNA (1)...(19): siRNA sense strand
aggaacugcugaggaggaa

SEQ ID NO: 2585754 - RNA, 19 nt, Homo sapiens
  misc_RNA (1)...(19): siRNA sense strand
gcccagggucagaggucaa

SEQ ID NO: 2585755 - RNA, 19 nt, Homo sapiens
  misc_RNA (1)...(19): siRNA sense strand
agguuaagaacauggacau

SEQ ID NO: 2585756 - RNA, 19 nt, Homo sapiens
  misc_RNA (1)...(19): siRNA sense strand
cugagcuaccugagcguaa

SEQ ID NO: 2585757 - RNA, 19 nt, Homo sapiens
  misc_RNA (1)...(19): siRNA sense strand
gggcaagaacaacgggaag

SEQ ID NO: 2585758 - RNA, 19 nt, Homo sapiens
  misc_RNA (1)...(19): siRNA sense strand
gagguuaagaacauggaca

SEQ ID NO: 2585759 - RNA, 19 nt, Homo sapiens
  misc_RNA (1)...(19): siRNA sense strand
agugacaaauucaagguga

SEQ ID NO: 2585760 - RNA, 19 nt, Homo sapiens
  misc_RNA (1)...(19): siRNA sense strand
ggcaagaacaacgggaaga

SEQ ID NO: 2585761 - RNA, 19 nt, Homo sapiens
  misc_RNA (1)...(19): siRNA sense strand
gcuucaagaacaugugcaa

SEQ ID NO: 2585762 - RNA, 19 nt, Homo sapiens
  misc_RNA (1)...(19): siRNA sense strand
ucaagaugguccagagcga

SEQ ID NO: 2585763 - RNA, 19 nt, Homo sapiens
  misc_RNA (1)...(19): siRNA sense strand
cgcaagaagcggaccucua

SEQ ID NO: 2585764 - RNA, 19 nt, Homo sapiens
  misc_RNA (1)...(19): siRNA sense strand
agaaggagguggugcgggu

SEQ ID NO: 2585765 - RNA, 19 nt, Homo sapiens
  misc_RNA (1)...(19): siRNA sense strand
gccaaaaggagaagcgcau

SEQ ID NO: 2585766 - RNA, 19 nt, Homo sapiens
  misc_RNA (1)...(19): siRNA sense strand
agaaagaugccgaggcgga

SEQ ID NO: 2585767 - RNA, 19 nt, Homo sapiens
  misc_RNA (1)...(19): siRNA sense strand
uggaguacuaccagagcaa

SEQ ID NO: 2585768 - RNA, 19 nt, Homo sapiens
  misc_RNA (1)...(19): siRNA sense strand
cgcagaaggaccagcagaa

SEQ ID NO: 2585769 - RNA, 19 nt, Homo sapiens
  misc_RNA (1)...(19): siRNA sense strand
agugaagauuggagaacau

SEQ ID NO: 2585770 - RNA, 19 nt, Homo sapiens
  misc_RNA (1)...(19): siRNA sense strand
augaugaggcugugaaaga

SEQ ID NO: 2585771 - RNA, 19 nt, Homo sapiens
  misc_RNA (1)...(19): siRNA sense strand
gauuacugucauaggcaua

SEQ ID NO: 2585772 - RNA, 19 nt, Homo sapiens
  misc_RNA (1)...(19): siRNA sense strand
acauuauggcugaaguuua

SEQ ID NO: 2585773 - RNA, 19 nt, Homo sapiens
  misc_RNA (1)...(19): siRNA sense strand
gcaaagugaagauuggaga

SEQ ID NO: 2585774 - RNA, 19 nt, Homo sapiens
  misc_RNA (1)...(19): siRNA sense strand
gcuaugaagcagcuggauu

SEQ ID NO: 2585775 - RNA, 19 nt, Homo sapiens
  misc_RNA (1)...(19): siRNA sense strand
caaagugaagauuggagaa

SEQ ID NO: 2585776 - RNA, 19 nt, Homo sapiens
  misc_RNA (1)...(19): siRNA sense strand
agaccugaaaccagagaau

SEQ ID NO: 2585777 - RNA, 19 nt, Homo sapiens
  misc_RNA (1)...(19): siRNA sense strand
cugugaaagaaguguguga

SEQ ID NO: 2585778 - RNA, 19 nt, Homo sapiens
  misc_RNA (1)...(19): siRNA sense strand
ccacaacugcagagagcca

SEQ ID NO: 2585779 - RNA, 19 nt, Homo sapiens
  misc_RNA (1)...(19): siRNA sense strand
cguaugacauuauggcuga

SEQ ID NO: 2585780 - RNA, 19 nt, Homo sapiens
  misc_RNA (1)...(19): siRNA sense strand
cuaucaaagacauaagaga

SEQ ID NO: 2585781 - RNA, 19 nt, Homo sapiens
  misc_RNA (1)...(19): siRNA sense strand
augaugaaguaguggagca

SEQ ID NO: 2585782 - RNA, 19 nt, Homo sapiens
  misc_RNA (1)...(19): siRNA sense strand
caaagacauaagagagcau

SEQ ID NO: 2585783 - RNA, 19 nt, Homo sapiens
  misc_RNA (1)...(19): siRNA sense strand
cagaaucagaaguaaugaa

SEQ ID NO: 2585784 - RNA, 19 nt, Homo sapiens
  misc_RNA (1)...(19): siRNA sense strand
auaugugucuggaggugaa

SEQ ID NO: 2585785 - RNA, 19 nt, Homo sapiens
  misc_RNA (1)...(19): siRNA sense strand
ugaugaugaggcugugaaa

SEQ ID NO: 2585786 - RNA, 19 nt, Homo sapiens
  misc_RNA (1)...(19): siRNA sense strand
cugagaagcagaagcacga

SEQ ID NO: 2585787 - RNA, 19 nt, Homo sapiens
  misc_RNA (1)...(19): siRNA sense strand
cuguaagcauggacggguu

SEQ ID NO: 2585788 - RNA, 19 nt, Homo sapiens
  misc_RNA (1)...(19): siRNA sense strand
auguacagaaucagaagua

SEQ ID NO: 2585789 - RNA, 19 nt, Homo sapiens
  misc_RNA (1)...(19): siRNA sense strand
aaucagaaguaaugaacag

SEQ ID NO: 2585790 - RNA, 19 nt, Homo sapiens
  misc_RNA (1)...(19): siRNA sense strand
cagaauaucucaaucguuc

SEQ ID NO: 2585791 - RNA, 19 nt, Homo sapiens
  misc_RNA (1)...(19): siRNA sense strand
gcagacagccccaaagcaa

SEQ ID NO: 2585792 - RNA, 19 nt, Homo sapiens
  misc_RNA (1)...(19): siRNA sense strand
ugaauggaagguagugaau

SEQ ID NO: 2585793 - RNA, 19 nt, Homo sapiens
  misc_RNA (1)...(19): siRNA sense strand
cgagcaacuaucaaagaca

SEQ ID NO: 2585794 - RNA, 19 nt, Homo sapiens
  misc_RNA (1)...(19): siRNA sense strand
cugaaaccucauccagaaa

SEQ ID NO: 2585795 - RNA, 19 nt, Homo sapiens
  misc_RNA (1)...(19): siRNA sense strand
agagcaaaccguaugacau

SEQ ID NO: 2585796 - RNA, 19 nt, Homo sapiens
  misc_RNA (1)...(19): siRNA sense strand
augccaagauagccgauuu

SEQ ID NO: 2585797 - RNA, 19 nt, Homo sapiens
  misc_RNA (1)...(19): siRNA sense strand
cggaagaggagcaggaaau

SEQ ID NO: 2585798 - RNA, 19 nt, Homo sapiens
  misc_RNA (1)...(19): siRNA sense strand
gaucgaauuaagagagaaa

SEQ ID NO: 2585799 - RNA, 19 nt, Homo sapiens
  misc_RNA (1)...(19): siRNA sense strand
ggauauggagauagaacaa

SEQ ID NO: 2585800 - RNA, 19 nt, Homo sapiens
  misc_RNA (1)...(19): siRNA sense strand
cgucaaaguaugauaucua

SEQ ID NO: 2585801 - RNA, 19 nt, Homo sapiens
  misc_RNA (1)...(19): siRNA sense strand
ccaagauauccuagagaau

SEQ ID NO: 2585802 - RNA, 19 nt, Homo sapiens
  misc_RNA (1)...(19): siRNA sense strand
auacaauggugcagcagaa

SEQ ID NO: 2585803 - RNA, 19 nt, Homo sapiens
  misc_RNA (1)...(19): siRNA sense strand
uggccaaacuagcuggaaa

SEQ ID NO: 2585804 - RNA, 19 nt, Homo sapiens
  misc_RNA (1)...(19): siRNA sense strand
gaaaaguaacagacagaaa

SEQ ID NO: 2585805 - RNA, 19 nt, Homo sapiens
  misc_RNA (1)...(19): siRNA sense strand
aaucaaagaaggagcugaa

SEQ ID NO: 2585806 - RNA, 19 nt, Homo sapiens
  misc_RNA (1)...(19): siRNA sense strand
gcuaguaagaagagcuauu

SEQ ID NO: 2585807 - RNA, 19 nt, Homo sapiens
  misc_RNA (1)...(19): siRNA sense strand
aggaaagucacaacagaua

SEQ ID NO: 2585808 - RNA, 19 nt, Homo sapiens
  misc_RNA (1)...(19): siRNA sense strand
aaaacaaggugcagagaau

SEQ ID NO: 2585809 - RNA, 19 nt, Homo sapiens
  misc_RNA (1)...(19): siRNA sense strand
cggaaguagucgaaaucuu

SEQ ID NO: 2585810 - RNA, 19 nt, Homo sapiens
  misc_RNA (1)...(19): siRNA sense strand
agaaagaugcagaggaugu

SEQ ID NO: 2585811 - RNA, 19 nt, Homo sapiens
  misc_RNA (1)...(19): siRNA sense strand
uuucaaagcaacaaggcaa

SEQ ID NO: 2585812 - RNA, 19 nt, Homo sapiens
  misc_RNA (1)...(19): siRNA sense strand
uggugaugaugaagaggaa

SEQ ID NO: 2585813 - RNA, 19 nt, Homo sapiens
  misc_RNA (1)...(19): siRNA sense strand
gagcaaagauuaaacgaag

SEQ ID NO: 2585814 - RNA, 19 nt, Homo sapiens
  misc_RNA (1)...(19): siRNA sense strand
augaaaugcuuguugguga

SEQ ID NO: 2585815 - RNA, 19 nt, Homo sapiens
  misc_RNA (1)...(19): siRNA sense strand
gugcagagaauaugauaca

SEQ ID NO: 2585816 - RNA, 19 nt, Homo sapiens
  misc_RNA (1)...(19): siRNA sense strand
acgagaagauguuaguaau

SEQ ID NO: 2585817 - RNA, 19 nt, Homo sapiens
  misc_RNA (1)...(19): siRNA sense strand
cgagaagauguuaguaauu

SEQ ID NO: 2585818 - RNA, 19 nt, Homo sapiens
  misc_RNA (1)...(19): siRNA sense strand
caaagaaggagcugaaaau

SEQ ID NO: 2585819 - RNA, 19 nt, Homo sapiens
  misc_RNA (1)...(19): siRNA sense strand
ccagaagauauuacagauu

SEQ ID NO: 2585820 - RNA, 19 nt, Homo sapiens
  misc_RNA (1)...(19): siRNA sense strand
aagcggaaguagucgaaau

SEQ ID NO: 2585821 - RNA, 19 nt, Homo sapiens
  misc_RNA (1)...(19): siRNA sense strand
agcagaaggugcaaagaau

SEQ ID NO: 2585822 - RNA, 19 nt, Homo sapiens
  misc_RNA (1)...(19): siRNA sense strand
cuacagugccagugguuga

SEQ ID NO: 2585823 - RNA, 19 nt, Homo sapiens
  misc_RNA (1)...(19): siRNA sense strand
aguaaaaguaaaagcggaa

SEQ ID NO: 2585824 - RNA, 19 nt, Homo sapiens
  misc_RNA (1)...(19): siRNA sense strand
caaacuagcuggaaaccca

SEQ ID NO: 2585825 - RNA, 19 nt, Homo sapiens
  misc_RNA (1)...(19): siRNA sense strand
caaagaaggaaugggauau

SEQ ID NO: 2585826 - RNA, 19 nt, Homo sapiens
  misc_RNA (1)...(19): siRNA sense strand
gggaaggcuaguaagaaga

SEQ ID NO: 2585827 - RNA, 19 nt, Homo sapiens
  misc_RNA (1)...(19): siRNA sense strand
caauggugcagcagaaauu

SEQ ID NO: 2585828 - RNA, 19 nt, Homo sapiens
  misc_RNA (1)...(19): siRNA sense strand
augagaaggcuguuaagaa

SEQ ID NO: 2585829 - RNA, 19 nt, Homo sapiens
  misc_RNA (1)...(19): siRNA sense strand
aucacaagcugcaggaauu

SEQ ID NO: 2585830 - RNA, 19 nt, Homo sapiens
  misc_RNA (1)...(19): siRNA sense strand
agcagaaauuggaugauau

SEQ ID NO: 2585831 - RNA, 19 nt, Homo sapiens
  misc_RNA (1)...(19): siRNA sense strand
aggaaugggauauggagau

SEQ ID NO: 2585832 - RNA, 19 nt, Homo sapiens
  misc_RNA (1)...(19): siRNA sense strand
ugugaauaguguaaggcau

SEQ ID NO: 2585833 - RNA, 19 nt, Homo sapiens
  misc_RNA (1)...(19): siRNA sense strand
acuuauugcuagauacaga

SEQ ID NO: 2585834 - RNA, 19 nt, Homo sapiens
  misc_RNA (1)...(19): siRNA sense strand
caucacaagcugcaggaau

SEQ ID NO: 2585835 - RNA, 19 nt, Homo sapiens
  misc_RNA (1)...(19): siRNA sense strand
cuguaaaauuucugagguu

SEQ ID NO: 2585836 - RNA, 19 nt, Homo sapiens
  misc_RNA (1)...(19): siRNA sense strand
ccuuggggcuagcgagaaa

SEQ ID NO: 2585837 - RNA, 19 nt, Homo sapiens
  misc_RNA (1)...(19): siRNA sense strand
gauugaaggccuuacaaaa

SEQ ID NO: 2585838 - RNA, 19 nt, Homo sapiens
  misc_RNA (1)...(19): siRNA sense strand
agacuaaugaauuggcuuu

SEQ ID NO: 2585839 - RNA, 19 nt, Homo sapiens
  misc_RNA (1)...(19): siRNA sense strand
agucaugggaccagaaguu

SEQ ID NO: 2585840 - RNA, 19 nt, Homo sapiens
  misc_RNA (1)...(19): siRNA sense strand
gggauauggagauagaaca

SEQ ID NO: 2585841 - RNA, 19 nt, Homo sapiens
  misc_RNA (1)...(19): siRNA sense strand
aggaaaaguaacagacaga

SEQ ID NO: 2585842 - RNA, 19 nt, Homo sapiens
  misc_RNA (1)...(19): siRNA sense strand
ggacuuugaucuugagccu

SEQ ID NO: 2585843 - RNA, 19 nt, Homo sapiens
  misc_RNA (1)...(19): siRNA sense strand
gagaugaaguagacagccu

SEQ ID NO: 2585844 - RNA, 19 nt, Homo sapiens
  misc_RNA (1)...(19): siRNA sense strand
agauagaacaagcacauuu

SEQ ID NO: 2585845 - RNA, 19 nt, Homo sapiens
  misc_RNA (1)...(19): siRNA sense strand
aagauauccuagagaaugu

SEQ ID NO: 2585846 - RNA, 19 nt, Homo sapiens
  misc_RNA (1)...(19): siRNA sense strand
gaagaggacauuuuggaaa

SEQ ID NO: 2585847 - RNA, 19 nt, Homo sapiens
  misc_RNA (1)...(19): siRNA sense strand
gugaugaugaagaggaagu

SEQ ID NO: 2585848 - RNA, 19 nt, Homo sapiens
  misc_RNA (1)...(19): siRNA sense strand
agagcuauuccuacaguaa

SEQ ID NO: 2585849 - RNA, 19 nt, Homo sapiens
  misc_RNA (1)...(19): siRNA sense strand
aggacaggauucagagacu

SEQ ID NO: 2585850 - RNA, 19 nt, Homo sapiens
  misc_RNA (1)...(19): siRNA sense strand
uaccauaagaggacgagaa

SEQ ID NO: 2585851 - RNA, 19 nt, Homo sapiens
  misc_RNA (1)...(19): siRNA sense strand
ucggaagaggagcaggaaa

SEQ ID NO: 2585852 - RNA, 19 nt, Homo sapiens
  misc_RNA (1)...(19): siRNA sense strand
uagcagaaggugcaaagaa

SEQ ID NO: 2585853 - RNA, 19 nt, Homo sapiens
  misc_RNA (1)...(19): siRNA sense strand
guuauugaaagaagaccaa

SEQ ID NO: 2585854 - RNA, 19 nt, Homo sapiens
  misc_RNA (1)...(19): siRNA sense strand
ccaaaacuucaaagacaaa

SEQ ID NO: 2585855 - RNA, 19 nt, Homo sapiens
  misc_RNA (1)...(19): siRNA sense strand
aggcuaguaagaagagcua

SEQ ID NO: 2585856 - RNA, 19 nt, Homo sapiens
  misc_RNA (1)...(19): siRNA sense strand
aggaucgaauuaagagaga

SEQ ID NO: 2585857 - RNA, 19 nt, Homo sapiens
  misc_RNA (1)...(19): siRNA sense strand
agaaauaaggaaagaacug

SEQ ID NO: 2585858 - RNA, 19 nt, Homo sapiens
  misc_RNA (1)...(19): siRNA sense strand
gaggaaagucacaacagau

SEQ ID NO: 2585859 - RNA, 19 nt, Homo sapiens
  misc_RNA (1)...(19): siRNA sense strand
cagaacgaguaaaaguaaa

SEQ ID NO: 2585860 - RNA, 19 nt, Homo sapiens
  misc_RNA (1)...(19): siRNA sense strand
gaacuugaggacagaagau

SEQ ID NO: 2585861 - RNA, 19 nt, Homo sapiens
  misc_RNA (1)...(19): siRNA sense strand
gggaggaacuugaacggaa

SEQ ID NO: 2585862 - RNA, 19 nt, Homo sapiens
  misc_RNA (1)...(19): siRNA sense strand
gaucauugugaaaggcaaa

SEQ ID NO: 2585863 - RNA, 19 nt, Homo sapiens
  misc_RNA (1)...(19): siRNA sense strand
cguuggaugagguggauaa

SEQ ID NO: 2585864 - RNA, 19 nt, Homo sapiens
  misc_RNA (1)...(19): siRNA sense strand
gcacaaaauguuggggaaa

SEQ ID NO: 2585865 - RNA, 19 nt, Homo sapiens
  misc_RNA (1)...(19): siRNA sense strand
gcugaaaccucaaggccga

SEQ ID NO: 2585866 - RNA, 19 nt, Homo sapiens
  misc_RNA (1)...(19): siRNA sense strand
uggaaaugagugacacaaa

SEQ ID NO: 2585867 - RNA, 19 nt, Homo sapiens
  misc_RNA (1)...(19): siRNA sense strand
aaagagagccucagggcau

SEQ ID NO: 2585868 - RNA, 19 nt, Homo sapiens
  misc_RNA (1)...(19): siRNA sense strand
gggcagauguauauccaga

SEQ ID NO: 2585869 - RNA, 19 nt, Homo sapiens
  misc_RNA (1)...(19): siRNA sense strand
aggagaacauguuaggaga

SEQ ID NO: 2585870 - RNA, 19 nt, Homo sapiens
  misc_RNA (1)...(19): siRNA sense strand
gaacuugaacggaaggaga

SEQ ID NO: 2585871 - RNA, 19 nt, Homo sapiens
  misc_RNA (1)...(19): siRNA sense strand
gcaggaagaacaacgggaa

SEQ ID NO: 2585872 - RNA, 19 nt, Homo sapiens
  misc_RNA (1)...(19): siRNA sense strand
gagaagaggcugggcguga

SEQ ID NO: 2585873 - RNA, 19 nt, Homo sapiens
  misc_RNA (1)...(19): siRNA sense strand
ugaaugaauuugagacgga

SEQ ID NO: 2585874 - RNA, 19 nt, Homo sapiens
  misc_RNA (1)...(19): siRNA sense strand
acgaauaccuucuguggga

SEQ ID NO: 2585875 - RNA, 19 nt, Homo sapiens
  misc_RNA (1)...(19): siRNA sense strand
ccgacagagcacugaucaa

SEQ ID NO: 2585876 - RNA, 19 nt, Homo sapiens
  misc_RNA (1)...(19): siRNA sense strand
augaaaugcugauugguca

SEQ ID NO: 2585877 - RNA, 19 nt, Homo sapiens
  misc_RNA (1)...(19): siRNA sense strand
uggaugagguggauaaaau

SEQ ID NO: 2585878 - RNA, 19 nt, Homo sapiens
  misc_RNA (1)...(19): siRNA sense strand
agaucauugugaaaggcaa

SEQ ID NO: 2585879 - RNA, 19 nt, Homo sapiens
  misc_RNA (1)...(19): siRNA sense strand
gcccauaucaacaagggaa

SEQ ID NO: 2585880 - RNA, 19 nt, Homo sapiens
  misc_RNA (1)...(19): siRNA sense strand
agggaagagucaugcagau

SEQ ID NO: 2585881 - RNA, 19 nt, Homo sapiens
  misc_RNA (1)...(19): siRNA sense strand
gagaggugcaggaagaaca

SEQ ID NO: 2585882 - RNA, 19 nt, Homo sapiens
  misc_RNA (1)...(19): siRNA sense strand
ugaacugaacaaagaaaga

SEQ ID NO: 2585883 - RNA, 19 nt, Homo sapiens
  misc_RNA (1)...(19): siRNA sense strand
ggcuggagaaggaagcaaa

SEQ ID NO: 2585884 - RNA, 19 nt, Homo sapiens
  misc_RNA (1)...(19): siRNA sense strand
caugcagaucauugugaaa

SEQ ID NO: 2585885 - RNA, 19 nt, Homo sapiens
  misc_RNA (1)...(19): siRNA sense strand
cagagaucuugcuggguca

SEQ ID NO: 2585886 - RNA, 19 nt, Homo sapiens
  misc_RNA (1)...(19): siRNA sense strand
agaacaacgggaagacaga

SEQ ID NO: 2585887 - RNA, 19 nt, Homo sapiens
  misc_RNA (1)...(19): siRNA sense strand
ccugaacugaacaaagaaa

SEQ ID NO: 2585888 - RNA, 19 nt, Homo sapiens
  misc_RNA (1)...(19): siRNA sense strand
ggagaacauguuaggagau

SEQ ID NO: 2585889 - RNA, 19 nt, Homo sapiens
  misc_RNA (1)...(19): siRNA sense strand
aggaagaacaacgggaaga

SEQ ID NO: 2585890 - RNA, 19 nt, Homo sapiens
  misc_RNA (1)...(19): siRNA sense strand
gcuaauggcugaagcgcug

SEQ ID NO: 2585891 - RNA, 19 nt, Homo sapiens
  misc_RNA (1)...(19): siRNA sense strand
ggucagaaauacaaccacu

SEQ ID NO: 2585892 - RNA, 19 nt, Homo sapiens
  misc_RNA (1)...(19): siRNA sense strand
gaucuugcugggucagaaa

SEQ ID NO: 2585893 - RNA, 19 nt, Homo sapiens
  misc_RNA (1)...(19): siRNA sense strand
gcaaggucuuccuggcaga

SEQ ID NO: 2585894 - RNA, 19 nt, Homo sapiens
  misc_RNA (1)...(19): siRNA sense strand
uguuagacaaagauggaca

SEQ ID NO: 2585895 - RNA, 19 nt, Homo sapiens
  misc_RNA (1)...(19): siRNA sense strand
acaaagauggacauaucaa

SEQ ID NO: 2585896 - RNA, 19 nt, Homo sapiens
  misc_RNA (1)...(19): siRNA sense strand
cuuaagagauacugaacag

SEQ ID NO: 2585897 - RNA, 19 nt, Homo sapiens
  misc_RNA (1)...(19): siRNA sense strand
aggaugaggaggagcucuu

SEQ ID NO: 2585898 - RNA, 19 nt, Homo sapiens
  misc_RNA (1)...(19): siRNA sense strand
aggcaaagguccaccacgu

SEQ ID NO: 2585899 - RNA, 19 nt, Homo sapiens
  misc_RNA (1)...(19): siRNA sense strand
cgagaaaccauguuccaca

SEQ ID NO: 2585900 - RNA, 19 nt, Homo sapiens
  misc_RNA (1)...(19): siRNA sense strand
uggcagaauucaagaaaac

SEQ ID NO: 2585901 - RNA, 19 nt, Homo sapiens
  misc_RNA (1)...(19): siRNA sense strand
cgaugguagagaagagagu

SEQ ID NO: 2585902 - RNA, 19 nt, Homo sapiens
  misc_RNA (1)...(19): siRNA sense strand
aaggaauagucuacaggga

SEQ ID NO: 2585903 - RNA, 19 nt, Homo sapiens
  misc_RNA (1)...(19): siRNA sense strand
uaggagaugccaagacgaa

SEQ ID NO: 2585904 - RNA, 19 nt, Homo sapiens
  misc_RNA (1)...(19): siRNA sense strand
acagcauggaccagaauau

SEQ ID NO: 2585905 - RNA, 19 nt, Homo sapiens
  misc_RNA (1)...(19): siRNA sense strand
accagaagcuaauggcuga

SEQ ID NO: 2585906 - RNA, 19 nt, Homo sapiens
  misc_RNA (1)...(19): siRNA sense strand
ggaaaggaaguuuuggcaa

SEQ ID NO: 2585907 - RNA, 19 nt, Homo sapiens
  misc_RNA (1)...(19): siRNA sense strand
ugcuaaugaaugcaagaua

SEQ ID NO: 2585908 - RNA, 19 nt, Homo sapiens
  misc_RNA (1)...(19): siRNA sense strand
gcuuaagagauacugaaca

SEQ ID NO: 2585909 - RNA, 19 nt, Homo sapiens
  misc_RNA (1)...(19): siRNA sense strand
agaaauaugguuagagcug

SEQ ID NO: 2585910 - RNA, 19 nt, Homo sapiens
  misc_RNA (1)...(19): siRNA sense strand
agaagguccgguugaaauu

SEQ ID NO: 2585911 - RNA, 19 nt, Homo sapiens
  misc_RNA (1)...(19): siRNA sense strand
gggauggagcggcugauau

SEQ ID NO: 2585912 - RNA, 19 nt, Homo sapiens
  misc_RNA (1)...(19): siRNA sense strand
aacaacgggaagacagaaa

SEQ ID NO: 2585913 - RNA, 19 nt, Homo sapiens
  misc_RNA (1)...(19): siRNA sense strand
uggcauaaaccagaagcua

SEQ ID NO: 2585914 - RNA, 19 nt, Homo sapiens
  misc_RNA (1)...(19): siRNA sense strand
ggacgaugauguugagugc

SEQ ID NO: 2585915 - RNA, 19 nt, Homo sapiens
  misc_RNA (1)...(19): siRNA sense strand
augcagaagcuaaagcaaa

SEQ ID NO: 2585916 - RNA, 19 nt, Homo sapiens
  misc_RNA (1)...(19): siRNA sense strand
gcucagagaagcagaucau

SEQ ID NO: 2585917 - RNA, 19 nt, Homo sapiens
  misc_RNA (1)...(19): siRNA sense strand
aggaaaaguguuuggggaa

SEQ ID NO: 2585918 - RNA, 19 nt, Homo sapiens
  misc_RNA (1)...(19): siRNA sense strand
augaagaugcagaagcuaa

SEQ ID NO: 2585919 - RNA, 19 nt, Homo sapiens
  misc_RNA (1)...(19): siRNA sense strand
ggaaagaaaacauggacuu

SEQ ID NO: 2585920 - RNA, 19 nt, Homo sapiens
  misc_RNA (1)...(19): siRNA sense strand
caucagaaagauuagggaa

SEQ ID NO: 2585921 - RNA, 19 nt, Homo sapiens
  misc_RNA (1)...(19): siRNA sense strand
cguaauugcugcagaagcu

SEQ ID NO: 2585922 - RNA, 19 nt, Homo sapiens
  misc_RNA (1)...(19): siRNA sense strand
aggagaagaucgaggagcu

SEQ ID NO: 2585923 - RNA, 19 nt, Homo sapiens
  misc_RNA (1)...(19): siRNA sense strand
ugguguaugucauggaaga

SEQ ID NO: 2585924 - RNA, 19 nt, Homo sapiens
  misc_RNA (1)...(19): siRNA sense strand
gguugaaguuacaaaagaa

SEQ ID NO: 2585925 - RNA, 19 nt, Homo sapiens
  misc_RNA (1)...(19): siRNA sense strand
ggaaaaguguuuggggaau

SEQ ID NO: 2585926 - RNA, 19 nt, Homo sapiens
  misc_RNA (1)...(19): siRNA sense strand
gagaauauauuaucaggca

SEQ ID NO: 2585927 - RNA, 19 nt, Homo sapiens
  misc_RNA (1)...(19): siRNA sense strand
aguccaaggaucuuauaaa

SEQ ID NO: 2585928 - RNA, 19 nt, Homo sapiens
  misc_RNA (1)...(19): siRNA sense strand
ugcagaagcuaaagcaaaa

SEQ ID NO: 2585929 - RNA, 19 nt, Homo sapiens
  misc_RNA (1)...(19): siRNA sense strand
aucagaaagauuagggaau

SEQ ID NO: 2585930 - RNA, 19 nt, Homo sapiens
  misc_RNA (1)...(19): siRNA sense strand
cagcaaaggaacgguaaau

SEQ ID NO: 2585931 - RNA, 19 nt, Homo sapiens
  misc_RNA (1)...(19): siRNA sense strand
acacaagacagcaggagca

SEQ ID NO: 2585932 - RNA, 19 nt, Homo sapiens
  misc_RNA (1)...(19): siRNA sense strand
uaccauggguccaggaaaa

SEQ ID NO: 2585933 - RNA, 19 nt, Homo sapiens
  misc_RNA (1)...(19): siRNA sense strand
ccuagaucaccgagguuau

SEQ ID NO: 2585934 - RNA, 19 nt, Homo sapiens
  misc_RNA (1)...(19): siRNA sense strand
agggacaauccaucagaaa

SEQ ID NO: 2585935 - RNA, 19 nt, Homo sapiens
  misc_RNA (1)...(19): siRNA sense strand
caaggaucuuauaaaggaa

SEQ ID NO: 2585936 - RNA, 19 nt, Homo sapiens
  misc_RNA (1)...(19): siRNA sense strand
cugggaaggcuuaagaaaa

SEQ ID NO: 2585937 - RNA, 19 nt, Homo sapiens
  misc_RNA (1)...(19): siRNA sense strand
acaguuucccugaggacaa

SEQ ID NO: 2585938 - RNA, 19 nt, Homo sapiens
  misc_RNA (1)...(19): siRNA sense strand
uggaagaugguaagguuga

SEQ ID NO: 2585939 - RNA, 19 nt, Homo sapiens
  misc_RNA (1)...(19): siRNA sense strand
ccgauuucauagugagacu

SEQ ID NO: 2585940 - RNA, 19 nt, Homo sapiens
  misc_RNA (1)...(19): siRNA sense strand
acugggaaggcuuaagaaa

SEQ ID NO: 2585941 - RNA, 19 nt, Homo sapiens
  misc_RNA (1)...(19): siRNA sense strand
augucauggaagaugguaa

SEQ ID NO: 2585942 - RNA, 19 nt, Homo sapiens
  misc_RNA (1)...(19): siRNA sense strand
gcaucaucaaagaaggaga

SEQ ID NO: 2585943 - RNA, 19 nt, Homo sapiens
  misc_RNA (1)...(19): siRNA sense strand
uggaccauucucagggaua

SEQ ID NO: 2585944 - RNA, 19 nt, Homo sapiens
  misc_RNA (1)...(19): siRNA sense strand
ggacaacgaugaaccacca

SEQ ID NO: 2585945 - RNA, 19 nt, Homo sapiens
  misc_RNA (1)...(19): siRNA sense strand
ggaagcuauccuugacaau

SEQ ID NO: 2585946 - RNA, 19 nt, Homo sapiens
  misc_RNA (1)...(19): siRNA sense strand
aggagauuguggauuguau

SEQ ID NO: 2585947 - RNA, 19 nt, Homo sapiens
  misc_RNA (1)...(19): siRNA sense strand
guaccauggguccaggaaa

SEQ ID NO: 2585948 - RNA, 19 nt, Homo sapiens
  misc_RNA (1)...(19): siRNA sense strand
aaacaauaaugaugaggac

SEQ ID NO: 2585949 - RNA, 19 nt, Homo sapiens
  misc_RNA (1)...(19): siRNA sense strand
ccuuggaguuggagguuuc

SEQ ID NO: 2585950 - RNA, 19 nt, Homo sapiens
  misc_RNA (1)...(19): siRNA sense strand
aguuggagguuucggacga

SEQ ID NO: 2585951 - RNA, 19 nt, Homo sapiens
  misc_RNA (1)...(19): siRNA sense strand
cagcaggcgcagaagcaga

SEQ ID NO: 2585952 - RNA, 19 nt, Homo sapiens
  misc_RNA (1)...(19): siRNA sense strand
ccaagagcccacaguccaa

SEQ ID NO: 2585953 - RNA, 19 nt, Homo sapiens
  misc_RNA (1)...(19): siRNA sense strand
ggucacugguguaugucau

SEQ ID NO: 2585954 - RNA, 19 nt, Homo sapiens
  misc_RNA (1)...(19): siRNA sense strand
ucagcaaaggaacgguaaa

SEQ ID NO: 2585955 - RNA, 19 nt, Homo sapiens
  misc_RNA (1)...(19): siRNA sense strand
cauugauacccuuggaguu

SEQ ID NO: 2585956 - RNA, 19 nt, Homo sapiens
  misc_RNA (1)...(19): siRNA sense strand
aggcccagauccuaugaaa

SEQ ID NO: 2585957 - RNA, 19 nt, Homo sapiens
  misc_RNA (1)...(19): siRNA sense strand
cugcagaacgagcuggaca

SEQ ID NO: 2585958 - RNA, 19 nt, Homo sapiens
  misc_RNA (1)...(19): siRNA sense strand
caucaaagaaggagacgug

SEQ ID NO: 2585959 - RNA, 19 nt, Homo sapiens
  misc_RNA (1)...(19): siRNA sense strand
gaauauauuaucaggcaag

SEQ ID NO: 2585960 - RNA, 19 nt, Homo sapiens
  misc_RNA (1)...(19): siRNA sense strand
acuacuggucacugggaau

SEQ ID NO: 2585961 - RNA, 19 nt, Homo sapiens
  misc_RNA (1)...(19): siRNA sense strand
gcuuuaacugggaaggcuu

SEQ ID NO: 2585962 - RNA, 19 nt, Homo sapiens
  misc_RNA (1)...(19): siRNA sense strand
gugagacuguacagaacau

SEQ ID NO: 2585963 - RNA, 19 nt, Homo sapiens
  misc_RNA (1)...(19): siRNA sense strand
ucucaagaaacgucacauu

SEQ ID NO: 2585964 - RNA, 19 nt, Homo sapiens
  misc_RNA (1)...(19): siRNA sense strand
gagagagaguugaggagga

SEQ ID NO: 2585965 - RNA, 19 nt, Homo sapiens
  misc_RNA (1)...(19): siRNA sense strand
ggaccuaugaccugaacaa

SEQ ID NO: 2585966 - RNA, 19 nt, Homo sapiens
  misc_RNA (1)...(19): siRNA sense strand
aggcaaaauccaacagaaa

SEQ ID NO: 2585967 - RNA, 19 nt, Homo sapiens
  misc_RNA (1)...(19): siRNA sense strand
aagaaacacaggugguuaa

SEQ ID NO: 2585968 - RNA, 19 nt, Homo sapiens
  misc_RNA (1)...(19): siRNA sense strand
uggcaaaaggaaagguaaa

SEQ ID NO: 2585969 - RNA, 19 nt, Homo sapiens
  misc_RNA (1)...(19): siRNA sense strand
cagaauauaaugaggagga

SEQ ID NO: 2585970 - RNA, 19 nt, Homo sapiens
  misc_RNA (1)...(19): siRNA sense strand
cauuagagagggcgaggaa

SEQ ID NO: 2585971 - RNA, 19 nt, Homo sapiens
  misc_RNA (1)...(19): siRNA sense strand
agcccaagcuagagaugaa

SEQ ID NO: 2585972 - RNA, 19 nt, Homo sapiens
  misc_RNA (1)...(19): siRNA sense strand
agaaaagacuccagugaga

SEQ ID NO: 2585973 - RNA, 19 nt, Homo sapiens
  misc_RNA (1)...(19): siRNA sense strand
uggaguauauuaagggaca

SEQ ID NO: 2585974 - RNA, 19 nt, Homo sapiens
  misc_RNA (1)...(19): siRNA sense strand
aggagaauacuuuggagaa

SEQ ID NO: 2585975 - RNA, 19 nt, Homo sapiens
  misc_RNA (1)...(19): siRNA sense strand
cauuauuaagcaaggagaa

SEQ ID NO: 2585976 - RNA, 19 nt, Homo sapiens
  misc_RNA (1)...(19): siRNA sense strand
uugaaggauauguggcaaa

SEQ ID NO: 2585977 - RNA, 19 nt, Homo sapiens
  misc_RNA (1)...(19): siRNA sense strand
uggcaaaccugaaccguga

SEQ ID NO: 2585978 - RNA, 19 nt, Homo sapiens
  misc_RNA (1)...(19): siRNA sense strand
ggacagaaaacauggacau

SEQ ID NO: 2585979 - RNA, 19 nt, Homo sapiens
  misc_RNA (1)...(19): siRNA sense strand
gagaauacuuuggagaaaa

SEQ ID NO: 2585980 - RNA, 19 nt, Homo sapiens
  misc_RNA (1)...(19): siRNA sense strand
agagagaguugaggaggaa

SEQ ID NO: 2585981 - RNA, 19 nt, Homo sapiens
  misc_RNA (1)...(19): siRNA sense strand
agaaagcaagagucagaaa

SEQ ID NO: 2585982 - RNA, 19 nt, Homo sapiens
  misc_RNA (1)...(19): siRNA sense strand
aagcuagagaugaacaaua

SEQ ID NO: 2585983 - RNA, 19 nt, Homo sapiens
  misc_RNA (1)...(19): siRNA sense strand
uucuagaugcugaggguua

SEQ ID NO: 2585984 - RNA, 19 nt, Homo sapiens
  misc_RNA (1)...(19): siRNA sense strand
cugugggacuccagaauau

SEQ ID NO: 2585985 - RNA, 19 nt, Homo sapiens
  misc_RNA (1)...(19): siRNA sense strand
guauaaggaagaagcacau

SEQ ID NO: 2585986 - RNA, 19 nt, Homo sapiens
  misc_RNA (1)...(19): siRNA sense strand
cacagaaggccaugaucaa

SEQ ID NO: 2585987 - RNA, 19 nt, Homo sapiens
  misc_RNA (1)...(19): siRNA sense strand
ccuuaaauugguugacuuu

SEQ ID NO: 2585988 - RNA, 19 nt, Homo sapiens
  misc_RNA (1)...(19): siRNA sense strand
gcaaggagaaccaggaaac

SEQ ID NO: 2585989 - RNA, 19 nt, Homo sapiens
  misc_RNA (1)...(19): siRNA sense strand
cugcguugcuugugugaca

SEQ ID NO: 2585990 - RNA, 19 nt, Homo sapiens
  misc_RNA (1)...(19): siRNA sense strand
guucggaagaguugagcuu

SEQ ID NO: 2585991 - RNA, 19 nt, Homo sapiens
  misc_RNA (1)...(19): siRNA sense strand
acugcuuggaaguggaaua

SEQ ID NO: 2585992 - RNA, 19 nt, Homo sapiens
  misc_RNA (1)...(19): siRNA sense strand
ccacugaugcucugcggaa

SEQ ID NO: 2585993 - RNA, 19 nt, Homo sapiens
  misc_RNA (1)...(19): siRNA sense strand
ccuugagauuauugcaaca

SEQ ID NO: 2585994 - RNA, 19 nt, Homo sapiens
  misc_RNA (1)...(19): siRNA sense strand
augaaguguauaaggaaga

SEQ ID NO: 2585995 - RNA, 19 nt, Homo sapiens
  misc_RNA (1)...(19): siRNA sense strand
guguauccuugcugaagaa

SEQ ID NO: 2585996 - RNA, 19 nt, Homo sapiens
  misc_RNA (1)...(19): siRNA sense strand
uguauaaggaagaagcaca

SEQ ID NO: 2585997 - RNA, 19 nt, Homo sapiens
  misc_RNA (1)...(19): siRNA sense strand
acugggaauucuaguguau

SEQ ID NO: 2585998 - RNA, 19 nt, Homo sapiens
  misc_RNA (1)...(19): siRNA sense strand
aguggaauacuaugacaaa

SEQ ID NO: 2585999 - RNA, 19 nt, Homo sapiens
  misc_RNA (1)...(19): siRNA sense strand
ugggagaaacuaucagcaa

SEQ ID NO: 2586000 - RNA, 19 nt, Homo sapiens
  misc_RNA (1)...(19): siRNA sense strand
ugggaauucuaguguauga

SEQ ID NO: 2586001 - RNA, 19 nt, Homo sapiens
  misc_RNA (1)...(19): siRNA sense strand
gauuugauucggaggcuuu

SEQ ID NO: 2586002 - RNA, 19 nt, Homo sapiens
  misc_RNA (1)...(19): siRNA sense strand
cugaagucauucucaacaa

SEQ ID NO: 2586003 - RNA, 19 nt, Homo sapiens
  misc_RNA (1)...(19): siRNA sense strand
cuaugaaguguauaaggaa

SEQ ID NO: 2586004 - RNA, 19 nt, Homo sapiens
  misc_RNA (1)...(19): siRNA sense strand
ccugaaccgugaugaugaa

SEQ ID NO: 2586005 - RNA, 19 nt, Homo sapiens
  misc_RNA (1)...(19): siRNA sense strand
gcaaagagagcucaaggga

SEQ ID NO: 2586006 - RNA, 19 nt, Homo sapiens
  misc_RNA (1)...(19): siRNA sense strand
ccaagcuagagaugaacaa

SEQ ID NO: 2586007 - RNA, 19 nt, Homo sapiens
  misc_RNA (1)...(19): siRNA sense strand
acaccaagcagcaggagca

SEQ ID NO: 2586008 - RNA, 19 nt, Homo sapiens
  misc_RNA (1)...(19): siRNA sense strand
cuuucaaggacaauaagua

SEQ ID NO: 2586009 - RNA, 19 nt, Homo sapiens
  misc_RNA (1)...(19): siRNA sense strand
gaagauaacacgacgaccu

SEQ ID NO: 2586010 - RNA, 19 nt, Homo sapiens
  misc_RNA (1)...(19): siRNA sense strand
gagcagcugucgaagcaga

SEQ ID NO: 2586011 - RNA, 19 nt, Homo sapiens
  misc_RNA (1)...(19): siRNA sense strand
gaauauaaugaggaggaca

SEQ ID NO: 2586012 - RNA, 19 nt, Homo sapiens
  misc_RNA (1)...(19): siRNA sense strand
cacuagaucgagagguauu

SEQ ID NO: 2586013 - RNA, 19 nt, Homo sapiens
  misc_RNA (1)...(19): siRNA sense strand
acuuuggauuugcgaagaa

SEQ ID NO: 2586014 - RNA, 19 nt, Homo sapiens
  misc_RNA (1)...(19): siRNA sense strand
gacaaauauccuccugaaa

SEQ ID NO: 2586015 - RNA, 19 nt, Homo sapiens
  misc_RNA (1)...(19): siRNA sense strand
cgaagcagacuguggccau

SEQ ID NO: 2586016 - RNA, 19 nt, Homo sapiens
  misc_RNA (1)...(19): siRNA sense strand
gaagaauuuaccugaagau

SEQ ID NO: 2586017 - RNA, 19 nt, Homo sapiens
  misc_RNA (1)...(19): siRNA sense strand
auuccagaaccuugagauu

SEQ ID NO: 2586018 - RNA, 19 nt, Homo sapiens
  misc_RNA (1)...(19): siRNA sense strand
acuuaauucuagaugcuga

SEQ ID NO: 2586019 - RNA, 19 nt, Homo sapiens
  misc_RNA (1)...(19): siRNA sense strand
gcccagugcaguuggaaca

SEQ ID NO: 2586020 - RNA, 19 nt, Homo sapiens
  misc_RNA (1)...(19): siRNA sense strand
gccuguugccugagagaca

SEQ ID NO: 2586021 - RNA, 19 nt, Homo sapiens
  misc_RNA (1)...(19): siRNA sense strand
gggaaaggcuguuugcgaa

SEQ ID NO: 2586022 - RNA, 19 nt, Homo sapiens
  misc_RNA (1)...(19): siRNA sense strand
uggagaaagaggcggaaga

SEQ ID NO: 2586023 - RNA, 19 nt, Homo sapiens
  misc_RNA (1)...(19): siRNA sense strand
uuggagagcgagcgggaaa

SEQ ID NO: 2586024 - RNA, 19 nt, Homo sapiens
  misc_RNA (1)...(19): siRNA sense strand
ccgagaaucaggagggacu

SEQ ID NO: 2586025 - RNA, 19 nt, Homo sapiens
  misc_RNA (1)...(19): siRNA sense strand
ucaaagacccuauuggaga

SEQ ID NO: 2586026 - RNA, 19 nt, Homo sapiens
  misc_RNA (1)...(19): siRNA sense strand
ggauacugauuauggcuca

SEQ ID NO: 2586027 - RNA, 19 nt, Homo sapiens
  misc_RNA (1)...(19): siRNA sense strand
cgggaaaggcuguuugcga

SEQ ID NO: 2586028 - RNA, 19 nt, Homo sapiens
  misc_RNA (1)...(19): siRNA sense strand
cggucaaggccaaagcaga

SEQ ID NO: 2586029 - RNA, 19 nt, Homo sapiens
  misc_RNA (1)...(19): siRNA sense strand
cggaagauguuauauggga

SEQ ID NO: 2586030 - RNA, 19 nt, Homo sapiens
  misc_RNA (1)...(19): siRNA sense strand
acucagcauccgagaauca

SEQ ID NO: 2586031 - RNA, 19 nt, Homo sapiens
  misc_RNA (1)...(19): siRNA sense strand
cccaaugaucccaagacaa

SEQ ID NO: 2586032 - RNA, 19 nt, Homo sapiens
  misc_RNA (1)...(19): siRNA sense strand
cguagggaugccagagaca

SEQ ID NO: 2586033 - RNA, 19 nt, Homo sapiens
  misc_RNA (1)...(19): siRNA sense strand
cgagcuggagagagacaau

SEQ ID NO: 2586034 - RNA, 19 nt, Homo sapiens
  misc_RNA (1)...(19): siRNA sense strand
gggucaaauacaaccugaa

SEQ ID NO: 2586035 - RNA, 19 nt, Homo sapiens
  misc_RNA (1)...(19): siRNA sense strand
aagaaagacuggaagggau

SEQ ID NO: 2586036 - RNA, 19 nt, Homo sapiens
  misc_RNA (1)...(19): siRNA sense strand
aacagaugucauagagaaa

SEQ ID NO: 2586037 - RNA, 19 nt, Homo sapiens
  misc_RNA (1)...(19): siRNA sense strand
gagucacagaauagauuaa

SEQ ID NO: 2586038 - RNA, 19 nt, Homo sapiens
  misc_RNA (1)...(19): siRNA sense strand
acucaaaggccugggaaaa

SEQ ID NO: 2586039 - RNA, 19 nt, Homo sapiens
  misc_RNA (1)...(19): siRNA sense strand
gcaaauucucugaagacca

SEQ ID NO: 2586040 - RNA, 19 nt, Homo sapiens
  misc_RNA (1)...(19): siRNA sense strand
cagaauagauuaaggccug

SEQ ID NO: 2586041 - RNA, 19 nt, Homo sapiens
  misc_RNA (1)...(19): siRNA sense strand
augaucagggagagauuua

SEQ ID NO: 2586042 - RNA, 19 nt, Homo sapiens
  misc_RNA (1)...(19): siRNA sense strand
cagaugucauagagaaaau

SEQ ID NO: 2586043 - RNA, 19 nt, Homo sapiens
  misc_RNA (1)...(19): siRNA sense strand
uacucaaaggccugggaaa

SEQ ID NO: 2586044 - RNA, 19 nt, Homo sapiens
  misc_RNA (1)...(19): siRNA sense strand
agacuggaagggauguaaa

SEQ ID NO: 2586045 - RNA, 19 nt, Homo sapiens
  misc_RNA (1)...(19): siRNA sense strand
agaaagacuggaagggaug

SEQ ID NO: 2586046 - RNA, 19 nt, Homo sapiens
  misc_RNA (1)...(19): siRNA sense strand
gaauaaaggaagaggacgu

SEQ ID NO: 2586047 - RNA, 19 nt, Homo sapiens
  misc_RNA (1)...(19): siRNA sense strand
ggcaaaagacgcaggcaaa

SEQ ID NO: 2586048 - RNA, 19 nt, Homo sapiens
  misc_RNA (1)...(19): siRNA sense strand
aggaaaaugaagagaaaga

SEQ ID NO: 2586049 - RNA, 19 nt, Homo sapiens
  misc_RNA (1)...(19): siRNA sense strand
aaguaaagaaggugaugau

SEQ ID NO: 2586050 - RNA, 19 nt, Homo sapiens
  misc_RNA (1)...(19): siRNA sense strand
cugaagaaagacaagauau

SEQ ID NO: 2586051 - RNA, 19 nt, Homo sapiens
  misc_RNA (1)...(19): siRNA sense strand
augaagaagagcaagaaga

SEQ ID NO: 2586052 - RNA, 19 nt, Homo sapiens
  misc_RNA (1)...(19): siRNA sense strand
agaagagcaagaagaggaa

SEQ ID NO: 2586053 - RNA, 19 nt, Homo sapiens
  misc_RNA (1)...(19): siRNA sense strand
ccaagagagaugaugccaa

SEQ ID NO: 2586054 - RNA, 19 nt, Homo sapiens
  misc_RNA (1)...(19): siRNA sense strand
aagaagagcaagaagagga

SEQ ID NO: 2586055 - RNA, 19 nt, Homo sapiens
  misc_RNA (1)...(19): siRNA sense strand
gggaauaaaggaagaggac

SEQ ID NO: 2586056 - RNA, 19 nt, Homo sapiens
  misc_RNA (1)...(19): siRNA sense strand
aggcaaaagacgcaggcaa

SEQ ID NO: 2586057 - RNA, 19 nt, Homo sapiens
  misc_RNA (1)...(19): siRNA sense strand
augaugaagaagagcaaga

SEQ ID NO: 2586058 - RNA, 19 nt, Homo sapiens
  misc_RNA (1)...(19): siRNA sense strand
auaugaugaagaagagcaa

SEQ ID NO: 2586059 - RNA, 19 nt, Homo sapiens
  misc_RNA (1)...(19): siRNA sense strand
aagagcaagaagaggaaaa

SEQ ID NO: 2586060 - RNA, 19 nt, Homo sapiens
  misc_RNA (1)...(19): siRNA sense strand
aggaggaauaugaugaaga

SEQ ID NO: 2586061 - RNA, 19 nt, Homo sapiens
  misc_RNA (1)...(19): siRNA sense strand
ccuuuaauauugaggcugu

SEQ ID NO: 2586062 - RNA, 19 nt, Homo sapiens
  misc_RNA (1)...(19): siRNA sense strand
uggauuuagcaaaggugaa

SEQ ID NO: 2586063 - RNA, 19 nt, Homo sapiens
  misc_RNA (1)...(19): siRNA sense strand
auauugaggcuguuggauu

SEQ ID NO: 2586064 - RNA, 19 nt, Homo sapiens
  misc_RNA (1)...(19): siRNA sense strand
ggcugggaauaaaggaaga

SEQ ID NO: 2586065 - RNA, 19 nt, Homo sapiens
  misc_RNA (1)...(19): siRNA sense strand
ugaagguauaccaggaaga

SEQ ID NO: 2586066 - RNA, 19 nt, Homo sapiens
  misc_RNA (1)...(19): siRNA sense strand
agagaaaaguaaagaaggu

SEQ ID NO: 2586067 - RNA, 19 nt, Homo sapiens
  misc_RNA (1)...(19): siRNA sense strand
aagaagaggaaaaugacua

SEQ ID NO: 2586068 - RNA, 19 nt, Homo sapiens
  misc_RNA (1)...(19): siRNA sense strand
acaugaagguauaccagga

SEQ ID NO: 2586069 - RNA, 19 nt, Homo sapiens
  misc_RNA (1)...(19): siRNA sense strand
agagaugaugccaagaaau

SEQ ID NO: 2586070 - RNA, 19 nt, Homo sapiens
  misc_RNA (1)...(19): siRNA sense strand
aaaugguggaauuggaaaa

SEQ ID NO: 2586071 - RNA, 19 nt, Homo sapiens
  misc_RNA (1)...(19): siRNA sense strand
aagagaaagaaggaagcaa

SEQ ID NO: 2586072 - RNA, 19 nt, Homo sapiens
  misc_RNA (1)...(19): siRNA sense strand
agguauaccaggaagaaug

SEQ ID NO: 2586073 - RNA, 19 nt, Homo sapiens
  misc_RNA (1)...(19): siRNA sense strand
augaagagaaagaaggaag

SEQ ID NO: 2586074 - RNA, 19 nt, Homo sapiens
  misc_RNA (1)...(19): siRNA sense strand
gcaacaagcgggacaggca

SEQ ID NO: 2586075 - RNA, 19 nt, Homo sapiens
  misc_RNA (1)...(19): siRNA sense strand
aggaguggccagacgcuaa

SEQ ID NO: 2586076 - RNA, 19 nt, Homo sapiens
  misc_RNA (1)...(19): siRNA sense strand
ccgucuacgacuugagcau

SEQ ID NO: 2586077 - RNA, 19 nt, Homo sapiens
  misc_RNA (1)...(19): siRNA sense strand
guggcuacuucguggacaa

SEQ ID NO: 2586078 - RNA, 19 nt, Homo sapiens
  misc_RNA (1)...(19): siRNA sense strand
gugacuacgaggagggcau

SEQ ID NO: 2586079 - RNA, 19 nt, Homo sapiens
  misc_RNA (1)...(19): siRNA sense strand
aggcuaaccggcuggagaa

SEQ ID NO: 2586080 - RNA, 19 nt, Homo sapiens
  misc_RNA (1)...(19): siRNA sense strand
uggagcaguacgagggaga

SEQ ID NO: 2586081 - RNA, 19 nt, Homo sapiens
  misc_RNA (1)...(19): siRNA sense strand
aggccaugcucuaccacaa

SEQ ID NO: 2586082 - RNA, 19 nt, Homo sapiens
  misc_RNA (1)...(19): siRNA sense strand
agucagaugaugagaugga

SEQ ID NO: 2586083 - RNA, 19 nt, Homo sapiens
  misc_RNA (1)...(19): siRNA sense strand
agauggagcuggaggagac

SEQ ID NO: 2586084 - RNA, 19 nt, Homo sapiens
  misc_RNA (1)...(19): siRNA sense strand
agguggacuucaaggacuu

SEQ ID NO: 2586085 - RNA, 19 nt, Homo sapiens
  misc_RNA (1)...(19): siRNA sense strand
gccuggaagaggaggacuu

SEQ ID NO: 2586086 - RNA, 19 nt, Homo sapiens
  misc_RNA (1)...(19): siRNA sense strand
gagcaguacgagggagaga

SEQ ID NO: 2586087 - RNA, 19 nt, Homo sapiens
  misc_RNA (1)...(19): siRNA sense strand
uagcagaucucuuugcaga

SEQ ID NO: 2586088 - RNA, 19 nt, Homo sapiens
  misc_RNA (1)...(19): siRNA sense strand
ucacggaccuagaggccca

SEQ ID NO: 2586089 - RNA, 19 nt, Homo sapiens
  misc_RNA (1)...(19): siRNA sense strand
gcagcagcacggaggacau

SEQ ID NO: 2586090 - RNA, 19 nt, Homo sapiens
  misc_RNA (1)...(19): siRNA sense strand
cccaugagcagguggacuu

SEQ ID NO: 2586091 - RNA, 19 nt, Homo sapiens
  misc_RNA (1)...(19): siRNA sense strand
acgcgcuguucaaggcuaa

SEQ ID NO: 2586092 - RNA, 19 nt, Homo sapiens
  misc_RNA (1)...(19): siRNA sense strand
ggaugauguuugugcgcaa

SEQ ID NO: 2586093 - RNA, 19 nt, Homo sapiens
  misc_RNA (1)...(19): siRNA sense strand
aggacaugguggugugaua

SEQ ID NO: 2586094 - RNA, 19 nt, Homo sapiens
  misc_RNA (1)...(19): siRNA sense strand
ccaauagagagcagagcaa

SEQ ID NO: 2586095 - RNA, 19 nt, Homo sapiens
  misc_RNA (1)...(19): siRNA sense strand
ggaaguagcagaauggaca

SEQ ID NO: 2586096 - RNA, 19 nt, Homo sapiens
  misc_RNA (1)...(19): siRNA sense strand
aggaggaagaagaggauga

SEQ ID NO: 2586097 - RNA, 19 nt, Homo sapiens
  misc_RNA (1)...(19): siRNA sense strand
gaacacacauggugcccaa

SEQ ID NO: 2586098 - RNA, 19 nt, Homo sapiens
  misc_RNA (1)...(19): siRNA sense strand
aaagaaaggaaguggaagu

SEQ ID NO: 2586099 - RNA, 19 nt, Homo sapiens
  misc_RNA (1)...(19): siRNA sense strand
cagcaaucacuauggagaa

SEQ ID NO: 2586100 - RNA, 19 nt, Homo sapiens
  misc_RNA (1)...(19): siRNA sense strand
guggguuaccugaaagaaa

SEQ ID NO: 2586101 - RNA, 19 nt, Homo sapiens
  misc_RNA (1)...(19): siRNA sense strand
auucaaacaaggagaacau

SEQ ID NO: 2586102 - RNA, 19 nt, Homo sapiens
  misc_RNA (1)...(19): siRNA sense strand
cgggauuaugucugugaaa

SEQ ID NO: 2586103 - RNA, 19 nt, Homo sapiens
  misc_RNA (1)...(19): siRNA sense strand
cgacagauggaauggcaga

SEQ ID NO: 2586104 - RNA, 19 nt, Homo sapiens
  misc_RNA (1)...(19): siRNA sense strand
aggaaguggaagugcucaa

SEQ ID NO: 2586105 - RNA, 19 nt, Homo sapiens
  misc_RNA (1)...(19): siRNA sense strand
cuguggauucugugagcaa

SEQ ID NO: 2586106 - RNA, 19 nt, Homo sapiens
  misc_RNA (1)...(19): siRNA sense strand
gguguauggacuggagaaa

SEQ ID NO: 2586107 - RNA, 19 nt, Homo sapiens
  misc_RNA (1)...(19): siRNA sense strand
uggauuagaaccaggcauu

SEQ ID NO: 2586108 - RNA, 19 nt, Homo sapiens
  misc_RNA (1)...(19): siRNA sense strand
ggaaccgggaagagcagaa

SEQ ID NO: 2586109 - RNA, 19 nt, Homo sapiens
  misc_RNA (1)...(19): siRNA sense strand
cucaagaacgccagaucaa

SEQ ID NO: 2586110 - RNA, 19 nt, Homo sapiens
  misc_RNA (1)...(19): siRNA sense strand
cuucauccucugugagcaa

SEQ ID NO: 2586111 - RNA, 19 nt, Homo sapiens
  misc_RNA (1)...(19): siRNA sense strand
acacagaguucaaagccca

SEQ ID NO: 2586112 - RNA, 19 nt, Homo sapiens
  misc_RNA (1)...(19): siRNA sense strand
cgucagcaccagaggagga

SEQ ID NO: 2586113 - RNA, 19 nt, Homo sapiens
  misc_RNA (1)...(19): siRNA sense strand
gagcagaauuugguggcuu

SEQ ID NO: 2586114 - RNA, 19 nt, Homo sapiens
  misc_RNA (1)...(19): siRNA sense strand
ggacauagcggcagccaug

SEQ ID NO: 2586115 - RNA, 19 nt, Homo sapiens
  misc_RNA (1)...(19): siRNA sense strand
acucagaagaggaagaucu

SEQ ID NO: 2586116 - RNA, 19 nt, Homo sapiens
  misc_RNA (1)...(19): siRNA sense strand
cagacaaggcaguuaacca

SEQ ID NO: 2586117 - RNA, 19 nt, Homo sapiens
  misc_RNA (1)...(19): siRNA sense strand
cagcaccagaggaggaaga

SEQ ID NO: 2586118 - RNA, 19 nt, Homo sapiens
  misc_RNA (1)...(19): siRNA sense strand
cagaggaggaagaagagga

SEQ ID NO: 2586119 - RNA, 19 nt, Homo sapiens
  misc_RNA (1)...(19): siRNA sense strand
gcauuaucuaucaccaaua

SEQ ID NO: 2586120 - RNA, 19 nt, Homo sapiens
  misc_RNA (1)...(19): siRNA sense strand
agacaaggcaguuaaccau

SEQ ID NO: 2586121 - RNA, 19 nt, Homo sapiens
  misc_RNA (1)...(19): siRNA sense strand
gaaaggaaguggaagugcu

SEQ ID NO: 2586122 - RNA, 19 nt, Homo sapiens
  misc_RNA (1)...(19): siRNA sense strand
gucaauugugggagcagaa

SEQ ID NO: 2586123 - RNA, 19 nt, Homo sapiens
  misc_RNA (1)...(19): siRNA sense strand
acuuaaagaagcaucucaa

SEQ ID NO: 2586124 - RNA, 19 nt, Homo sapiens
  misc_RNA (1)...(19): siRNA sense strand
cagcauuaucuaucaccaa

SEQ ID NO: 2586125 - RNA, 19 nt, Homo sapiens
  misc_RNA (1)...(19): siRNA sense strand
gagacagaccacauugcaa

SEQ ID NO: 2586126 - RNA, 19 nt, Homo sapiens
  misc_RNA (1)...(19): siRNA sense strand
agaaguugguguauggacu

SEQ ID NO: 2586127 - RNA, 19 nt, Homo sapiens
  misc_RNA (1)...(19): siRNA sense strand
ucuggaagauauaccacaa

SEQ ID NO: 2586128 - RNA, 19 nt, Homo sapiens
  misc_RNA (1)...(19): siRNA sense strand
gggccaagucacagcaaag

SEQ ID NO: 2586129 - RNA, 19 nt, Homo sapiens
  misc_RNA (1)...(19): siRNA sense strand
cgguguugcaggcgagcau

SEQ ID NO: 2586130 - RNA, 19 nt, Homo sapiens
  misc_RNA (1)...(19): siRNA sense strand
gccuagaaccuguggcugu

SEQ ID NO: 2586131 - RNA, 19 nt, Homo sapiens
  misc_RNA (1)...(19): siRNA sense strand
cgaacauggaccagugacu

SEQ ID NO: 2586132 - RNA, 19 nt, Homo sapiens
  misc_RNA (1)...(19): siRNA sense strand
gggauuaugucugugaaaa

SEQ ID NO: 2586133 - RNA, 19 nt, Homo sapiens
  misc_RNA (1)...(19): siRNA sense strand
caauuucgacagauggaau

SEQ ID NO: 2586134 - RNA, 19 nt, Homo sapiens
  misc_RNA (1)...(19): siRNA sense strand
agauaucccuccugaaaau

SEQ ID NO: 2586135 - RNA, 19 nt, Homo sapiens
  misc_RNA (1)...(19): siRNA sense strand
cuggagucccacaugguua

SEQ ID NO: 2586136 - RNA, 19 nt, Homo sapiens
  misc_RNA (1)...(19): siRNA sense strand
agucaagcucagaaagaaa

SEQ ID NO: 2586137 - RNA, 19 nt, Homo sapiens
  misc_RNA (1)...(19): siRNA sense strand
cagaaagaagagugggaga

SEQ ID NO: 2586138 - RNA, 19 nt, Homo sapiens
  misc_RNA (1)...(19): siRNA sense strand
agaaagaaaugacugggaa

SEQ ID NO: 2586139 - RNA, 19 nt, Homo sapiens
  misc_RNA (1)...(19): siRNA sense strand
agaaagggugagaggauca

SEQ ID NO: 2586140 - RNA, 19 nt, Homo sapiens
  misc_RNA (1)...(19): siRNA sense strand
cggaacacugagagaucaa

SEQ ID NO: 2586141 - RNA, 19 nt, Homo sapiens
  misc_RNA (1)...(19): siRNA sense strand
cuuuaauggugauacacaa

SEQ ID NO: 2586142 - RNA, 19 nt, Homo sapiens
  misc_RNA (1)...(19): siRNA sense strand
cagugcagguuuuggaaua

SEQ ID NO: 2586143 - RNA, 19 nt, Homo sapiens
  misc_RNA (1)...(19): siRNA sense strand
acacaaucgagaacagcaa

SEQ ID NO: 2586144 - RNA, 19 nt, Homo sapiens
  misc_RNA (1)...(19): siRNA sense strand
cugagaaggcacagcccaa

SEQ ID NO: 2586145 - RNA, 19 nt, Homo sapiens
  misc_RNA (1)...(19): siRNA sense strand
cgacaggagucaaaccuca

SEQ ID NO: 2586146 - RNA, 19 nt, Homo sapiens
  misc_RNA (1)...(19): siRNA sense strand
ccauggaugaagugggcau

SEQ ID NO: 2586147 - RNA, 19 nt, Homo sapiens
  misc_RNA (1)...(19): siRNA sense strand
ccuacguggaugugaucaa

SEQ ID NO: 2586148 - RNA, 19 nt, Homo sapiens
  misc_RNA (1)...(19): siRNA sense strand
gaaagaaaugacugggaac

SEQ ID NO: 2586149 - RNA, 19 nt, Homo sapiens
  misc_RNA (1)...(19): siRNA sense strand
ugguacaagacuauguuua

SEQ ID NO: 2586150 - RNA, 19 nt, Homo sapiens
  misc_RNA (1)...(19): siRNA sense strand
uggaauauggagaagcuau

SEQ ID NO: 2586151 - RNA, 19 nt, Homo sapiens
  misc_RNA (1)...(19): siRNA sense strand
ucguugaugucauggaaaa

SEQ ID NO: 2586152 - RNA, 19 nt, Homo sapiens
  misc_RNA (1)...(19): siRNA sense strand
gagaccugccagagccaaa

SEQ ID NO: 2586153 - RNA, 19 nt, Homo sapiens
  misc_RNA (1)...(19): siRNA sense strand
gaugagaacugguacgaag

SEQ ID NO: 2586154 - RNA, 19 nt, Homo sapiens
  misc_RNA (1)...(19): siRNA sense strand
ucagaaucgccaagacauu

SEQ ID NO: 2586155 - RNA, 19 nt, Homo sapiens
  misc_RNA (1)...(19): siRNA sense strand
agaacugguaugaaggaga

SEQ ID NO: 2586156 - RNA, 19 nt, Homo sapiens
  misc_RNA (1)...(19): siRNA sense strand
caaacugaacagagaugau

SEQ ID NO: 2586157 - RNA, 19 nt, Homo sapiens
  misc_RNA (1)...(19): siRNA sense strand
guuuaaacagauccacaaa

SEQ ID NO: 2586158 - RNA, 19 nt, Homo sapiens
  misc_RNA (1)...(19): siRNA sense strand
uuuaaagcucagacacuaa

SEQ ID NO: 2586159 - RNA, 19 nt, Homo sapiens
  misc_RNA (1)...(19): siRNA sense strand
ccggcaacacgaaagcaaa

SEQ ID NO: 2586160 - RNA, 19 nt, Homo sapiens
  misc_RNA (1)...(19): siRNA sense strand
gcagcaaugggcaagacaa

SEQ ID NO: 2586161 - RNA, 19 nt, Homo sapiens
  misc_RNA (1)...(19): siRNA sense strand
gugauacacaaguagaaau

SEQ ID NO: 2586162 - RNA, 19 nt, Homo sapiens
  misc_RNA (1)...(19): siRNA sense strand
gugaagagcacucaggacu

SEQ ID NO: 2586163 - RNA, 19 nt, Homo sapiens
  misc_RNA (1)...(19): siRNA sense strand
gauaaagagaugagaccug

SEQ ID NO: 2586164 - RNA, 19 nt, Homo sapiens
  misc_RNA (1)...(19): siRNA sense strand
acgaauaucagccuggcaa

SEQ ID NO: 2586165 - RNA, 19 nt, Homo sapiens
  misc_RNA (1)...(19): siRNA sense strand
auggagaagcuauugcuaa

SEQ ID NO: 2586166 - RNA, 19 nt, Homo sapiens
  misc_RNA (1)...(19): siRNA sense strand
gaagagugggagagcagga

SEQ ID NO: 2586167 - RNA, 19 nt, Homo sapiens
  misc_RNA (1)...(19): siRNA sense strand
gaucaaaagacugguacaa

SEQ ID NO: 2586168 - RNA, 19 nt, Homo sapiens
  misc_RNA (1)...(19): siRNA sense strand
uggugauacacaaguagaa

SEQ ID NO: 2586169 - RNA, 19 nt, Homo sapiens
  misc_RNA (1)...(19): siRNA sense strand
acucaggacuuaagcgaug

SEQ ID NO: 2586170 - RNA, 19 nt, Homo sapiens
  misc_RNA (1)...(19): siRNA sense strand
cagaaagaaaugacuggga

SEQ ID NO: 2586171 - RNA, 19 nt, Homo sapiens
  misc_RNA (1)...(19): siRNA sense strand
augugauggugguuccaaa

SEQ ID NO: 2586172 - RNA, 19 nt, Homo sapiens
  misc_RNA (1)...(19): siRNA sense strand
agggaaaccccaagcagua

SEQ ID NO: 2586173 - RNA, 19 nt, Homo sapiens
  misc_RNA (1)...(19): siRNA sense strand
gguaugaaggagaacacca

SEQ ID NO: 2586174 - RNA, 19 nt, Homo sapiens
  misc_RNA (1)...(19): siRNA sense strand
agucaagcucagaaagaaa

SEQ ID NO: 2586175 - RNA, 19 nt, Homo sapiens
  misc_RNA (1)...(19): siRNA sense strand
cagaaagaagagugggaga

SEQ ID NO: 2586176 - RNA, 19 nt, Homo sapiens
  misc_RNA (1)...(19): siRNA sense strand
agaaagaaaugacugggaa

SEQ ID NO: 2586177 - RNA, 19 nt, Homo sapiens
  misc_RNA (1)...(19): siRNA sense strand
agaaagggugagaggauca

SEQ ID NO: 2586178 - RNA, 19 nt, Homo sapiens
  misc_RNA (1)...(19): siRNA sense strand
cggaacacugagagaucaa

SEQ ID NO: 2586179 - RNA, 19 nt, Homo sapiens
  misc_RNA (1)...(19): siRNA sense strand
cuuuaauggugauacacaa

SEQ ID NO: 2586180 - RNA, 19 nt, Homo sapiens
  misc_RNA (1)...(19): siRNA sense strand
cagugcagguuuuggaaua

SEQ ID NO: 2586181 - RNA, 19 nt, Homo sapiens
  misc_RNA (1)...(19): siRNA sense strand
acacaaucgagaacagcaa

SEQ ID NO: 2586182 - RNA, 19 nt, Homo sapiens
  misc_RNA (1)...(19): siRNA sense strand
cugagaaggcacagcccaa

SEQ ID NO: 2586183 - RNA, 19 nt, Homo sapiens
  misc_RNA (1)...(19): siRNA sense strand
cgacaggagucaaaccuca

SEQ ID NO: 2586184 - RNA, 19 nt, Homo sapiens
  misc_RNA (1)...(19): siRNA sense strand
ccauggaugaagugggcau

SEQ ID NO: 2586185 - RNA, 19 nt, Homo sapiens
  misc_RNA (1)...(19): siRNA sense strand
ccuacguggaugugaucaa

SEQ ID NO: 2586186 - RNA, 19 nt, Homo sapiens
  misc_RNA (1)...(19): siRNA sense strand
gaaagaaaugacugggaac

SEQ ID NO: 2586187 - RNA, 19 nt, Homo sapiens
  misc_RNA (1)...(19): siRNA sense strand
ugguacaagacuauguuua

SEQ ID NO: 2586188 - RNA, 19 nt, Homo sapiens
  misc_RNA (1)...(19): siRNA sense strand
uggaauauggagaagcuau

SEQ ID NO: 2586189 - RNA, 19 nt, Homo sapiens
  misc_RNA (1)...(19): siRNA sense strand
ucguugaugucauggaaaa

SEQ ID NO: 2586190 - RNA, 19 nt, Homo sapiens
  misc_RNA (1)...(19): siRNA sense strand
gagaccugccagagccaaa

SEQ ID NO: 2586191 - RNA, 19 nt, Homo sapiens
  misc_RNA (1)...(19): siRNA sense strand
gaugagaacugguacgaag

SEQ ID NO: 2586192 - RNA, 19 nt, Homo sapiens
  misc_RNA (1)...(19): siRNA sense strand
ucagaaucgccaagacauu

SEQ ID NO: 2586193 - RNA, 19 nt, Homo sapiens
  misc_RNA (1)...(19): siRNA sense strand
agaacugguaugaaggaga

SEQ ID NO: 2586194 - RNA, 19 nt, Homo sapiens
  misc_RNA (1)...(19): siRNA sense strand
caaacugaacagagaugau

SEQ ID NO: 2586195 - RNA, 19 nt, Homo sapiens
  misc_RNA (1)...(19): siRNA sense strand
guuuaaacagauccacaaa

SEQ ID NO: 2586196 - RNA, 19 nt, Homo sapiens
  misc_RNA (1)...(19): siRNA sense strand
uuuaaagcucagacacuaa

SEQ ID NO: 2586197 - RNA, 19 nt, Homo sapiens
  misc_RNA (1)...(19): siRNA sense strand
ccggcaacacgaaagcaaa

SEQ ID NO: 2586198 - RNA, 19 nt, Homo sapiens
  misc_RNA (1)...(19): siRNA sense strand
gcagcaaugggcaagacaa

SEQ ID NO: 2586199 - RNA, 19 nt, Homo sapiens
  misc_RNA (1)...(19): siRNA sense strand
gugauacacaaguagaaau

SEQ ID NO: 2586200 - RNA, 19 nt, Homo sapiens
  misc_RNA (1)...(19): siRNA sense strand
gugaagagcacucaggacu

SEQ ID NO: 2586201 - RNA, 19 nt, Homo sapiens
  misc_RNA (1)...(19): siRNA sense strand
gauaaagagaugagaccug

SEQ ID NO: 2586202 - RNA, 19 nt, Homo sapiens
  misc_RNA (1)...(19): siRNA sense strand
acgaauaucagccuggcaa

SEQ ID NO: 2586203 - RNA, 19 nt, Homo sapiens
  misc_RNA (1)...(19): siRNA sense strand
auggagaagcuauugcuaa

SEQ ID NO: 2586204 - RNA, 19 nt, Homo sapiens
  misc_RNA (1)...(19): siRNA sense strand
gaagagugggagagcagga

SEQ ID NO: 2586205 - RNA, 19 nt, Homo sapiens
  misc_RNA (1)...(19): siRNA sense strand
gaucaaaagacugguacaa

SEQ ID NO: 2586206 - RNA, 19 nt, Homo sapiens
  misc_RNA (1)...(19): siRNA sense strand
uggugauacacaaguagaa

SEQ ID NO: 2586207 - RNA, 19 nt, Homo sapiens
  misc_RNA (1)...(19): siRNA sense strand
acucaggacuuaagcgaug

SEQ ID NO: 2586208 - RNA, 19 nt, Homo sapiens
  misc_RNA (1)...(19): siRNA sense strand
cagaaagaaaugacuggga

SEQ ID NO: 2586209 - RNA, 19 nt, Homo sapiens
  misc_RNA (1)...(19): siRNA sense strand
augugauggugguuccaaa

SEQ ID NO: 2586210 - RNA, 19 nt, Homo sapiens
  misc_RNA (1)...(19): siRNA sense strand
agggaaaccccaagcagua

SEQ ID NO: 2586211 - RNA, 19 nt, Homo sapiens
  misc_RNA (1)...(19): siRNA sense strand
gguaugaaggagaacacca

SEQ ID NO: 2586212 - RNA, 19 nt, Homo sapiens
  misc_RNA (1)...(19): siRNA sense strand
ccucuaagcucuuuggcaa

SEQ ID NO: 2586213 - RNA, 19 nt, Homo sapiens
  misc_RNA (1)...(19): siRNA sense strand
agggugaggcagagagcaa

SEQ ID NO: 2586214 - RNA, 19 nt, Homo sapiens
  misc_RNA (1)...(19): siRNA sense strand
gaggauuauuucuggguca

SEQ ID NO: 2586215 - RNA, 19 nt, Homo sapiens
  misc_RNA (1)...(19): siRNA sense strand
ggaacagcucacugggaga

SEQ ID NO: 2586216 - RNA, 19 nt, Homo sapiens
  misc_RNA (1)...(19): siRNA sense strand
gcuggaagcuccuggccau

SEQ ID NO: 2586217 - RNA, 19 nt, Homo sapiens
  misc_RNA (1)...(19): siRNA sense strand
ccaagaacauccagagccu

SEQ ID NO: 2586218 - RNA, 19 nt, Homo sapiens
  misc_RNA (1)...(19): siRNA sense strand
ccacggaagauuaagcaga

SEQ ID NO: 2586219 - RNA, 19 nt, Homo sapiens
  misc_RNA (1)...(19): siRNA sense strand
cuuucaaggcaauggacuu

SEQ ID NO: 2586220 - RNA, 19 nt, Homo sapiens
  misc_RNA (1)...(19): siRNA sense strand
acaacaagaagcagaccau

SEQ ID NO: 2586221 - RNA, 19 nt, Homo sapiens
  misc_RNA (1)...(19): siRNA sense strand
gcuguguggucguggggaa

SEQ ID NO: 2586222 - RNA, 19 nt, Homo sapiens
  misc_RNA (1)...(19): siRNA sense strand
cugacaaacugcugagccu

SEQ ID NO: 2586223 - RNA, 19 nt, Homo sapiens
  misc_RNA (1)...(19): siRNA sense strand
gauaagaagcgggugcgaa

SEQ ID NO: 2586224 - RNA, 19 nt, Homo sapiens
  misc_RNA (1)...(19): siRNA sense strand
acccagacgccuacaacaa

SEQ ID NO: 2586225 - RNA, 19 nt, Homo sapiens
  misc_RNA (1)...(19): siRNA sense strand
gcaaagaagugaagggcaa

SEQ ID NO: 2586226 - RNA, 19 nt, Homo sapiens
  misc_RNA (1)...(19): siRNA sense strand
ggaagauuuucgugggcaa

SEQ ID NO: 2586227 - RNA, 19 nt, Homo sapiens
  misc_RNA (1)...(19): siRNA sense strand
agaaggaagcagaugccaa

SEQ ID NO: 2586228 - RNA, 19 nt, Homo sapiens
  misc_RNA (1)...(19): siRNA sense strand
ccgcaaucgcgcagcucaa

SEQ ID NO: 2586229 - RNA, 19 nt, Homo sapiens
  misc_RNA (1)...(19): siRNA sense strand
gcgcgcucgugguggaaau

SEQ ID NO: 2586230 - RNA, 19 nt, Homo sapiens
  misc_RNA (1)...(19): siRNA sense strand
cgacaaaguccucgcugga

SEQ ID NO: 2586231 - RNA, 19 nt, Homo sapiens
  misc_RNA (1)...(19): siRNA sense strand
ucgcgcagcucaacggcaa

SEQ ID NO: 2586232 - RNA, 19 nt, Homo sapiens
  misc_RNA (1)...(19): siRNA sense strand
ccucuuuggguguuggcua

SEQ ID NO: 2586233 - RNA, 19 nt, Homo sapiens
  misc_RNA (1)...(19): siRNA sense strand
aagugaagggcaagcgcau

SEQ ID NO: 2586234 - RNA, 19 nt, Homo sapiens
  misc_RNA (1)...(19): siRNA sense strand
gggacaagaccaagaaacc

SEQ ID NO: 2586235 - RNA, 19 nt, Homo sapiens
  misc_RNA (1)...(19): siRNA sense strand
ggguagaagaaguaagauu

SEQ ID NO: 2586236 - RNA, 19 nt, Homo sapiens
  misc_RNA (1)...(19): siRNA sense strand
ccaaggagauuuaugggaa

SEQ ID NO: 2586237 - RNA, 19 nt, Homo sapiens
  misc_RNA (1)...(19): siRNA sense strand
gggacaacuugcaggagau

SEQ ID NO: 2586238 - RNA, 19 nt, Homo sapiens
  misc_RNA (1)...(19): siRNA sense strand
ugaugaagguaacgggaca

SEQ ID NO: 2586239 - RNA, 19 nt, Homo sapiens
  misc_RNA (1)...(19): siRNA sense strand
cuuaauuuggguagaagaa

SEQ ID NO: 2586240 - RNA, 19 nt, Homo sapiens
  misc_RNA (1)...(19): siRNA sense strand
gagccauggacgaggagau

SEQ ID NO: 2586241 - RNA, 19 nt, Homo sapiens
  misc_RNA (1)...(19): siRNA sense strand
ccuccucaauaguggcaua

SEQ ID NO: 2586242 - RNA, 19 nt, Homo sapiens
  misc_RNA (1)...(19): siRNA sense strand
cgggacaacuugcaggaga

SEQ ID NO: 2586243 - RNA, 19 nt, Homo sapiens
  misc_RNA (1)...(19): siRNA sense strand
guucaagucuauugggauc

SEQ ID NO: 2586244 - RNA, 19 nt, Homo sapiens
  misc_RNA (1)...(19): siRNA sense strand
gguuauagccugaaaagga

SEQ ID NO: 2586245 - RNA, 19 nt, Homo sapiens
  misc_RNA (1)...(19): siRNA sense strand
gagucucagcauagaacua

SEQ ID NO: 2586246 - RNA, 19 nt, Homo sapiens
  misc_RNA (1)...(19): siRNA sense strand
caaaugauguucagcacca

SEQ ID NO: 2586247 - RNA, 19 nt, Homo sapiens
  misc_RNA (1)...(19): siRNA sense strand
ccugaaaaugaaaggagaa

SEQ ID NO: 2586248 - RNA, 19 nt, Homo sapiens
  misc_RNA (1)...(19): siRNA sense strand
guaaauaaugugacccuga

SEQ ID NO: 2586249 - RNA, 19 nt, Homo sapiens
  misc_RNA (1)...(19): siRNA sense strand
ugaaaggagaacuaccaaa

SEQ ID NO: 2586250 - RNA, 19 nt, Homo sapiens
  misc_RNA (1)...(19): siRNA sense strand
ccaaauuacgggaguucca

SEQ ID NO: 2586251 - RNA, 19 nt, Homo sapiens
  misc_RNA (1)...(19): siRNA sense strand
agaaguaagauuggaucaa

SEQ ID NO: 2586252 - RNA, 19 nt, Homo sapiens
  misc_RNA (1)...(19): siRNA sense strand
agugacuguucuugcuaua

SEQ ID NO: 2586253 - RNA, 19 nt, Homo sapiens
  misc_RNA (1)...(19): siRNA sense strand
gugacaucaguuugacaua

SEQ ID NO: 2586254 - RNA, 19 nt, Homo sapiens
  misc_RNA (1)...(19): siRNA sense strand
ggcuaugauuuauggucuu

SEQ ID NO: 2586255 - RNA, 19 nt, Homo sapiens
  misc_RNA (1)...(19): siRNA sense strand
aagaaguaagauuggauca

SEQ ID NO: 2586256 - RNA, 19 nt, Homo sapiens
  misc_RNA (1)...(19): siRNA sense strand
ggucaauaauguauggcug

SEQ ID NO: 2586257 - RNA, 19 nt, Homo sapiens
  misc_RNA (1)...(19): siRNA sense strand
auuuguaguaggagcauuu

SEQ ID NO: 2586258 - RNA, 19 nt, Homo sapiens
  misc_RNA (1)...(19): siRNA sense strand
agaagaaguaagauuggau

SEQ ID NO: 2586259 - RNA, 19 nt, Homo sapiens
  misc_RNA (1)...(19): siRNA sense strand
cuauauuccacgagcuuca

SEQ ID NO: 2586260 - RNA, 19 nt, Homo sapiens
  misc_RNA (1)...(19): siRNA sense strand
guaccuuccucuuggcuga

SEQ ID NO: 2586261 - RNA, 19 nt, Homo sapiens
  misc_RNA (1)...(19): siRNA sense strand
cggcaaaugauguucagca

SEQ ID NO: 2586262 - RNA, 19 nt, Homo sapiens
  misc_RNA (1)...(19): siRNA sense strand
ccucaauaguggcauacca

SEQ ID NO: 2586263 - RNA, 19 nt, Homo sapiens
  misc_RNA (1)...(19): siRNA sense strand
accaggaacaguugaaaga

SEQ ID NO: 2586264 - RNA, 19 nt, Homo sapiens
  misc_RNA (1)...(19): siRNA sense strand
cggagaaggaggaggagaa

SEQ ID NO: 2586265 - RNA, 19 nt, Homo sapiens
  misc_RNA (1)...(19): siRNA sense strand
agauggagaaggagaggaa

SEQ ID NO: 2586266 - RNA, 19 nt, Homo sapiens
  misc_RNA (1)...(19): siRNA sense strand
gcggaaaugaggaggagau

SEQ ID NO: 2586267 - RNA, 19 nt, Homo sapiens
  misc_RNA (1)...(19): siRNA sense strand
gguccuacguggaggcaca

SEQ ID NO: 2586268 - RNA, 19 nt, Homo sapiens
  misc_RNA (1)...(19): siRNA sense strand
gagaaagaugagaaggaga

SEQ ID NO: 2586269 - RNA, 19 nt, Homo sapiens
  misc_RNA (1)...(19): siRNA sense strand
cgcucaaggcagagaagaa

SEQ ID NO: 2586270 - RNA, 19 nt, Homo sapiens
  misc_RNA (1)...(19): siRNA sense strand
aggagaaagaugagaagga

SEQ ID NO: 2586271 - RNA, 19 nt, Homo sapiens
  misc_RNA (1)...(19): siRNA sense strand
gcgcggaggaagaagaaga

SEQ ID NO: 2586272 - RNA, 19 nt, Homo sapiens
  misc_RNA (1)...(19): siRNA sense strand
cggaaacaauggaagcaga

SEQ ID NO: 2586273 - RNA, 19 nt, Homo sapiens
  misc_RNA (1)...(19): siRNA sense strand
aggaaaaggaggcggagaa

SEQ ID NO: 2586274 - RNA, 19 nt, Homo sapiens
  misc_RNA (1)...(19): siRNA sense strand
gcaagcugaccgagagcaa

SEQ ID NO: 2586275 - RNA, 19 nt, Homo sapiens
  misc_RNA (1)...(19): siRNA sense strand
ggccauaauuagaaaggca

SEQ ID NO: 2586276 - RNA, 19 nt, Homo sapiens
  misc_RNA (1)...(19): siRNA sense strand
gggagaaguucaugcagca

SEQ ID NO: 2586277 - RNA, 19 nt, Homo sapiens
  misc_RNA (1)...(19): siRNA sense strand
augagaaggagaaggaaaa

SEQ ID NO: 2586278 - RNA, 19 nt, Homo sapiens
  misc_RNA (1)...(19): siRNA sense strand
cagaagaagaaauggaaac

SEQ ID NO: 2586279 - RNA, 19 nt, Homo sapiens
  misc_RNA (1)...(19): siRNA sense strand
uggagaacgacaaggaaga

SEQ ID NO: 2586280 - RNA, 19 nt, Homo sapiens
  misc_RNA (1)...(19): siRNA sense strand
aggaggagaugguggagga

SEQ ID NO: 2586281 - RNA, 19 nt, Homo sapiens
  misc_RNA (1)...(19): siRNA sense strand
gggaggacaacgacgagaa

SEQ ID NO: 2586282 - RNA, 19 nt, Homo sapiens
  misc_RNA (1)...(19): siRNA sense strand
acagaagaagaaauggaaa

SEQ ID NO: 2586283 - RNA, 19 nt, Homo sapiens
  misc_RNA (1)...(19): siRNA sense strand
cugaagauggagaaggaga

SEQ ID NO: 2586284 - RNA, 19 nt, Homo sapiens
  misc_RNA (1)...(19): siRNA sense strand
gcagcagccaggaggagaa

SEQ ID NO: 2586285 - RNA, 19 nt, Homo sapiens
  misc_RNA (1)...(19): siRNA sense strand
aggagaagccggaggugga

SEQ ID NO: 2586286 - RNA, 19 nt, Homo sapiens
  misc_RNA (1)...(19): siRNA sense strand
ccaaggaggagaaggagga

SEQ ID NO: 2586287 - RNA, 19 nt, Homo sapiens
  misc_RNA (1)...(19): siRNA sense strand
gaggaaucacgcucggaaa

SEQ ID NO: 2586288 - RNA, 19 nt, Homo sapiens
  misc_RNA (1)...(19): siRNA sense strand
ucauggaggccuuggaaaa

SEQ ID NO: 2586289 - RNA, 19 nt, Homo sapiens
  misc_RNA (1)...(19): siRNA sense strand
cagccagggaagacgcaaa

SEQ ID NO: 2586290 - RNA, 19 nt, Homo sapiens
  misc_RNA (1)...(19): siRNA sense strand
ccgccauggucaaguccaa

SEQ ID NO: 2586291 - RNA, 19 nt, Homo sapiens
  misc_RNA (1)...(19): siRNA sense strand
guaaauaugaccaguggga

SEQ ID NO: 2586292 - RNA, 19 nt, Homo sapiens
  misc_RNA (1)...(19): siRNA sense strand
gaagaaggcugaagcugca

SEQ ID NO: 2586293 - RNA, 19 nt, Homo sapiens
  misc_RNA (1)...(19): siRNA sense strand
aggaggagaaagaugagaa

SEQ ID NO: 2586294 - RNA, 19 nt, Homo sapiens
  misc_RNA (1)...(19): siRNA sense strand
cuuacaugccucugggaau

SEQ ID NO: 2586295 - RNA, 19 nt, Homo sapiens
  misc_RNA (1)...(19): siRNA sense strand
aggacaacgacgagaagga

SEQ ID NO: 2586296 - RNA, 19 nt, Homo sapiens
  misc_RNA (1)...(19): siRNA sense strand
ggcuagagcugcugccuga

SEQ ID NO: 2586297 - RNA, 19 nt, Homo sapiens
  misc_RNA (1)...(19): siRNA sense strand
ggcaguaucaugagaacau

SEQ ID NO: 2586298 - RNA, 19 nt, Homo sapiens
  misc_RNA (1)...(19): siRNA sense strand
agcaacagcuggaggagga

SEQ ID NO: 2586299 - RNA, 19 nt, Homo sapiens
  misc_RNA (1)...(19): siRNA sense strand
ugguggaggaugaggagau

SEQ ID NO: 2586300 - RNA, 19 nt, Homo sapiens
  misc_RNA (1)...(19): siRNA sense strand
agaggaagacaguggcuga

SEQ ID NO: 2586301 - RNA, 19 nt, Homo sapiens
  misc_RNA (1)...(19): siRNA sense strand
aggaggagaaggaggagga

SEQ ID NO: 2586302 - RNA, 19 nt, Homo sapiens
  misc_RNA (1)...(19): siRNA sense strand
gggcggaagcaucaccaaa

SEQ ID NO: 2586303 - RNA, 19 nt, Homo sapiens
  misc_RNA (1)...(19): siRNA sense strand
caagaggucuccagagcca

SEQ ID NO: 2586304 - RNA, 19 nt, Homo sapiens
  misc_RNA (1)...(19): siRNA sense strand
agccggagguggagaacga

SEQ ID NO: 2586305 - RNA, 19 nt, Homo sapiens
  misc_RNA (1)...(19): siRNA sense strand
aaauaugaccagugggaag

SEQ ID NO: 2586306 - RNA, 19 nt, Homo sapiens
  misc_RNA (1)...(19): siRNA sense strand
aagaugagaaggagaagga

SEQ ID NO: 2586307 - RNA, 19 nt, Homo sapiens
  misc_RNA (1)...(19): siRNA sense strand
agcugaagauggagaagga

SEQ ID NO: 2586308 - RNA, 19 nt, Homo sapiens
  misc_RNA (1)...(19): siRNA sense strand
gcuccaagucuccaggcaa

SEQ ID NO: 2586309 - RNA, 19 nt, Homo sapiens
  misc_RNA (1)...(19): siRNA sense strand
cugacuaagaagaaugaga

SEQ ID NO: 2586310 - RNA, 19 nt, Homo sapiens
  misc_RNA (1)...(19): siRNA sense strand
gguccaacacacuugacaa

SEQ ID NO: 2586311 - RNA, 19 nt, Homo sapiens
  misc_RNA (1)...(19): siRNA sense strand
gcgaugcggaagaagcuaa

SEQ ID NO: 2586312 - RNA, 19 nt, Homo sapiens
  misc_RNA (1)...(19): siRNA sense strand
aggcaucccaggaccgaaa

SEQ ID NO: 2586313 - RNA, 19 nt, Homo sapiens
  misc_RNA (1)...(19): siRNA sense strand
ucuauuacuaccugacuaa

SEQ ID NO: 2586314 - RNA, 19 nt, Homo sapiens
  misc_RNA (1)...(19): siRNA sense strand
aggcggagaaggaggagga

SEQ ID NO: 2586315 - RNA, 19 nt, Homo sapiens
  misc_RNA (1)...(19): siRNA sense strand
cggagguggagaacgacaa

SEQ ID NO: 2586316 - RNA, 19 nt, Homo sapiens
  misc_RNA (1)...(19): siRNA sense strand
agaagaagaaauggaaaca

SEQ ID NO: 2586317 - RNA, 19 nt, Homo sapiens
  misc_RNA (1)...(19): siRNA sense strand
acaagaagcugaacaccca

SEQ ID NO: 2586318 - RNA, 19 nt, Homo sapiens
  misc_RNA (1)...(19): siRNA sense strand
aauggaaacagccaagaaa

SEQ ID NO: 2586319 - RNA, 19 nt, Homo sapiens
  misc_RNA (1)...(19): siRNA sense strand
agaaaggcacucaugggua

SEQ ID NO: 2586320 - RNA, 19 nt, Homo sapiens
  misc_RNA (1)...(19): siRNA sense strand
cggcaagagccagcagcaa

SEQ ID NO: 2586321 - RNA, 19 nt, Homo sapiens
  misc_RNA (1)...(19): siRNA sense strand
ucgcuggacagaagaagaa

SEQ ID NO: 2586322 - RNA, 19 nt, Homo sapiens
  misc_RNA (1)...(19): siRNA sense strand
cggaggaagaagaagaaag

SEQ ID NO: 2586323 - RNA, 19 nt, Homo sapiens
  misc_RNA (1)...(19): siRNA sense strand
aagcaucaccaaaggcauu

SEQ ID NO: 2586324 - RNA, 19 nt, Homo sapiens
  misc_RNA (1)...(19): siRNA sense strand
uggaggcacaggaggacua

SEQ ID NO: 2586325 - RNA, 19 nt, Homo sapiens
  misc_RNA (1)...(19): siRNA sense strand
aagcaagagaucaacaaga

SEQ ID NO: 2586326 - RNA, 19 nt, Homo sapiens
  misc_RNA (1)...(19): siRNA sense strand
uauaagaugugcacggaga

SEQ ID NO: 2586327 - RNA, 19 nt, Homo sapiens
  misc_RNA (1)...(19): siRNA sense strand
ggaagaugaauguggccuu

SEQ ID NO: 2586328 - RNA, 19 nt, Homo sapiens
  misc_RNA (1)...(19): siRNA sense strand
ggcaaaacgcagagcauga

SEQ ID NO: 2586329 - RNA, 19 nt, Homo sapiens
  misc_RNA (1)...(19): siRNA sense strand
gcgguacugcagaggcaaa

SEQ ID NO: 2586330 - RNA, 19 nt, Homo sapiens
  misc_RNA (1)...(19): siRNA sense strand
cccacgaugcagaggagaa

SEQ ID NO: 2586331 - RNA, 19 nt, Homo sapiens
  misc_RNA (1)...(19): siRNA sense strand
ggagcaagcugcagccaac

SEQ ID NO: 2586332 - RNA, 19 nt, Homo sapiens
  misc_RNA (1)...(19): siRNA sense strand
agagagaagcagcaguaca

SEQ ID NO: 2586333 - RNA, 19 nt, Homo sapiens
  misc_RNA (1)...(19): siRNA sense strand
agaaagaagacucgagcuc

SEQ ID NO: 2586334 - RNA, 19 nt, Homo sapiens
  misc_RNA (1)...(19): siRNA sense strand
guguaaaugcagugaugaa

SEQ ID NO: 2586335 - RNA, 19 nt, Homo sapiens
  misc_RNA (1)...(19): siRNA sense strand
cggcaugcccagggagaaa

SEQ ID NO: 2586336 - RNA, 19 nt, Homo sapiens
  misc_RNA (1)...(19): siRNA sense strand
agauauagaagcaggagau

SEQ ID NO: 2586337 - RNA, 19 nt, Homo sapiens
  misc_RNA (1)...(19): siRNA sense strand
ccaaaacagacauggauaa

SEQ ID NO: 2586338 - RNA, 19 nt, Homo sapiens
  misc_RNA (1)...(19): siRNA sense strand
gcugaugcuauuagaacaa

SEQ ID NO: 2586339 - RNA, 19 nt, Homo sapiens
  misc_RNA (1)...(19): siRNA sense strand
gaccaaaaggaauggauaa

SEQ ID NO: 2586340 - RNA, 19 nt, Homo sapiens
  misc_RNA (1)...(19): siRNA sense strand
uaagaagcuuggugggaca

SEQ ID NO: 2586341 - RNA, 19 nt, Homo sapiens
  misc_RNA (1)...(19): siRNA sense strand
ggaccaaaaggaauggaua

SEQ ID NO: 2586342 - RNA, 19 nt, Homo sapiens
  misc_RNA (1)...(19): siRNA sense strand
gugucaaauucuggcauaa

SEQ ID NO: 2586343 - RNA, 19 nt, Homo sapiens
  misc_RNA (1)...(19): siRNA sense strand
ggauaaucaaauagugguu

SEQ ID NO: 2586344 - RNA, 19 nt, Homo sapiens
  misc_RNA (1)...(19): siRNA sense strand
ggcucaagauauagaagca

SEQ ID NO: 2586345 - RNA, 19 nt, Homo sapiens
  misc_RNA (1)...(19): siRNA sense strand
ggauauugaaagagaagac

SEQ ID NO: 2586346 - RNA, 19 nt, Homo sapiens
  misc_RNA (1)...(19): siRNA sense strand
gaaccaagccaguugcuca

SEQ ID NO: 2586347 - RNA, 19 nt, Homo sapiens
  misc_RNA (1)...(19): siRNA sense strand
cugucuaaggcucaagaua

SEQ ID NO: 2586348 - RNA, 19 nt, Homo sapiens
  misc_RNA (1)...(19): siRNA sense strand
gcuaccauucugaaacaaa

SEQ ID NO: 2586349 - RNA, 19 nt, Homo sapiens
  misc_RNA (1)...(19): siRNA sense strand
uggcaaacugcucaagauu

SEQ ID NO: 2586350 - RNA, 19 nt, Homo sapiens
  misc_RNA (1)...(19): siRNA sense strand
uggaaaagggcauugaaau

SEQ ID NO: 2586351 - RNA, 19 nt, Homo sapiens
  misc_RNA (1)...(19): siRNA sense strand
uguaaaugcagugaugaaa

SEQ ID NO: 2586352 - RNA, 19 nt, Homo sapiens
  misc_RNA (1)...(19): siRNA sense strand
uugaaagagaagacauuga

SEQ ID NO: 2586353 - RNA, 19 nt, Homo sapiens
  misc_RNA (1)...(19): siRNA sense strand
cugaaacaaaugcaaguau

SEQ ID NO: 2586354 - RNA, 19 nt, Homo sapiens
  misc_RNA (1)...(19): siRNA sense strand
gagagaaacagaugaugaa

SEQ ID NO: 2586355 - RNA, 19 nt, Homo sapiens
  misc_RNA (1)...(19): siRNA sense strand
aggaugaagaggaggaaga

SEQ ID NO: 2586356 - RNA, 19 nt, Homo sapiens
  misc_RNA (1)...(19): siRNA sense strand
aaggagaagaugaggaaga

SEQ ID NO: 2586357 - RNA, 19 nt, Homo sapiens
  misc_RNA (1)...(19): siRNA sense strand
aaacagaugaugaaggaga

SEQ ID NO: 2586358 - RNA, 19 nt, Homo sapiens
  misc_RNA (1)...(19): siRNA sense strand
augaagaggaggaggacga

SEQ ID NO: 2586359 - RNA, 19 nt, Homo sapiens
  misc_RNA (1)...(19): siRNA sense strand
gugaaaagaggaagagaga

SEQ ID NO: 2586360 - RNA, 19 nt, Homo sapiens
  misc_RNA (1)...(19): siRNA sense strand
acgaagaaggagaagauga

SEQ ID NO: 2586361 - RNA, 19 nt, Homo sapiens
  misc_RNA (1)...(19): siRNA sense strand
augaagaagaugaugaaga

SEQ ID NO: 2586362 - RNA, 19 nt, Homo sapiens
  misc_RNA (1)...(19): siRNA sense strand
augaaggagaagaugauua

SEQ ID NO: 2586363 - RNA, 19 nt, Homo sapiens
  misc_RNA (1)...(19): siRNA sense strand
agaaacagaugaugaagga

SEQ ID NO: 2586364 - RNA, 19 nt, Homo sapiens
  misc_RNA (1)...(19): siRNA sense strand
gagaagaugaggaagacga

SEQ ID NO: 2586365 - RNA, 19 nt, Homo sapiens
  misc_RNA (1)...(19): siRNA sense strand
ggaaaggugaaaagaggaa

SEQ ID NO: 2586366 - RNA, 19 nt, Homo sapiens
  misc_RNA (1)...(19): siRNA sense strand
aggaagacgaggacgauga

SEQ ID NO: 2586367 - RNA, 19 nt, Homo sapiens
  misc_RNA (1)...(19): siRNA sense strand
agagagaaacagaugauga

SEQ ID NO: 2586368 - RNA, 19 nt, Homo sapiens
  misc_RNA (1)...(19): siRNA sense strand
gaagagagaaacagaugau

SEQ ID NO: 2586369 - RNA, 19 nt, Homo sapiens
  misc_RNA (1)...(19): siRNA sense strand
agaauuuggacuugaugaa

SEQ ID NO: 2586370 - RNA, 19 nt, Homo sapiens
  misc_RNA (1)...(19): siRNA sense strand
uggaugaagaggaggagga

SEQ ID NO: 2586371 - RNA, 19 nt, Homo sapiens
  misc_RNA (1)...(19): siRNA sense strand
gcuugaacucagugaaaau

SEQ ID NO: 2586372 - RNA, 19 nt, Homo sapiens
  misc_RNA (1)...(19): siRNA sense strand
agaugaugaaggagaagau

SEQ ID NO: 2586373 - RNA, 19 nt, Homo sapiens
  misc_RNA (1)...(19): siRNA sense strand
aggaggacgaagaaggaga

SEQ ID NO: 2586374 - RNA, 19 nt, Homo sapiens
  misc_RNA (1)...(19): siRNA sense strand
cagugaggaggaagaagaa

SEQ ID NO: 2586375 - RNA, 19 nt, Homo sapiens
  misc_RNA (1)...(19): siRNA sense strand
aaagaggaagagagaaaca

SEQ ID NO: 2586376 - RNA, 19 nt, Homo sapiens
  misc_RNA (1)...(19): siRNA sense strand
ugaugaaggagaagaugau

SEQ ID NO: 2586377 - RNA, 19 nt, Homo sapiens
  misc_RNA (1)...(19): siRNA sense strand
uuaccuacuuggauggcua

SEQ ID NO: 2586378 - RNA, 19 nt, Homo sapiens
  misc_RNA (1)...(19): siRNA sense strand
gcuaugaccgagaggacca

SEQ ID NO: 2586379 - RNA, 19 nt, Homo sapiens
  misc_RNA (1)...(19): siRNA sense strand
augaggaagacgaggacga

SEQ ID NO: 2586380 - RNA, 19 nt, Homo sapiens
  misc_RNA (1)...(19): siRNA sense strand
aggaagaagaauuuggacu

SEQ ID NO: 2586381 - RNA, 19 nt, Homo sapiens
  misc_RNA (1)...(19): siRNA sense strand
aacagaugaugaaggagaa

SEQ ID NO: 2586382 - RNA, 19 nt, Homo sapiens
  misc_RNA (1)...(19): siRNA sense strand
acucagaugccgaggugga

SEQ ID NO: 2586383 - RNA, 19 nt, Homo sapiens
  misc_RNA (1)...(19): siRNA sense strand
uggacuugaugaagaagau

SEQ ID NO: 2586384 - RNA, 19 nt, Homo sapiens
  misc_RNA (1)...(19): siRNA sense strand
agaagaugaagaugaggau

SEQ ID NO: 2586385 - RNA, 19 nt, Homo sapiens
  misc_RNA (1)...(19): siRNA sense strand
agacgaggacgaugaggau

SEQ ID NO: 2586386 - RNA, 19 nt, Homo sapiens
  misc_RNA (1)...(19): siRNA sense strand
auuuggacuugaugaagaa

SEQ ID NO: 2586387 - RNA, 19 nt, Homo sapiens
  misc_RNA (1)...(19): siRNA sense strand
ggaagagagaaacagauga

SEQ ID NO: 2586388 - RNA, 19 nt, Homo sapiens
  misc_RNA (1)...(19): siRNA sense strand
cgaugaagucagugaggag

SEQ ID NO: 2586389 - RNA, 19 nt, Homo sapiens
  misc_RNA (1)...(19): siRNA sense strand
aggaugaggaugaagagga

SEQ ID NO: 2586390 - RNA, 19 nt, Homo sapiens
  misc_RNA (1)...(19): siRNA sense strand
ggaugaggaugaagaggag

SEQ ID NO: 2586391 - RNA, 19 nt, Homo sapiens
  misc_RNA (1)...(19): siRNA sense strand
agaaggugggaaaggugaa

SEQ ID NO: 2586392 - RNA, 19 nt, Homo sapiens
  misc_RNA (1)...(19): siRNA sense strand
augaagaugaagauguaga

SEQ ID NO: 2586393 - RNA, 19 nt, Homo sapiens
  misc_RNA (1)...(19): siRNA sense strand
uugaugaagaagaugaaga

SEQ ID NO: 2586394 - RNA, 19 nt, Homo sapiens
  misc_RNA (1)...(19): siRNA sense strand
aaauagaaucuuuggaggu

SEQ ID NO: 2586395 - RNA, 19 nt, Homo sapiens
  misc_RNA (1)...(19): siRNA sense strand
aagaugaugaagaugaaga

SEQ ID NO: 2586396 - RNA, 19 nt, Homo sapiens
  misc_RNA (1)...(19): siRNA sense strand
aagucagugaggaggaaga

SEQ ID NO: 2586397 - RNA, 19 nt, Homo sapiens
  misc_RNA (1)...(19): siRNA sense strand
agacauaugugaaugggaa

SEQ ID NO: 2586398 - RNA, 19 nt, Homo sapiens
  misc_RNA (1)...(19): siRNA sense strand
ccugacuacacuagggaaa

SEQ ID NO: 2586399 - RNA, 19 nt, Homo sapiens
  misc_RNA (1)...(19): siRNA sense strand
cagcaaguguaucgggaca

SEQ ID NO: 2586400 - RNA, 19 nt, Homo sapiens
  misc_RNA (1)...(19): siRNA sense strand
gaggugagcuauauggaga

SEQ ID NO: 2586401 - RNA, 19 nt, Homo sapiens
  misc_RNA (1)...(19): siRNA sense strand
ccagauugggccugaggaa

SEQ ID NO: 2586402 - RNA, 19 nt, Homo sapiens
  misc_RNA (1)...(19): siRNA sense strand
gagaagagaugcugcucca

SEQ ID NO: 2586403 - RNA, 19 nt, Homo sapiens
  misc_RNA (1)...(19): siRNA sense strand
cccugaggauggagagaga

SEQ ID NO: 2586404 - RNA, 19 nt, Homo sapiens
  misc_RNA (1)...(19): siRNA sense strand
gggaacugcugauggcuca

SEQ ID NO: 2586405 - RNA, 19 nt, Homo sapiens
  misc_RNA (1)...(19): siRNA sense strand
aggcaaggcuggaacggga

SEQ ID NO: 2586406 - RNA, 19 nt, Homo sapiens
  misc_RNA (1)...(19): siRNA sense strand
ugaagaagguggugagguc

SEQ ID NO: 2586407 - RNA, 19 nt, Homo sapiens
  misc_RNA (1)...(19): siRNA sense strand
cagagaagauuauagcuga

SEQ ID NO: 2586408 - RNA, 19 nt, Homo sapiens
  misc_RNA (1)...(19): siRNA sense strand
uuagagagcugcaggagga

SEQ ID NO: 2586409 - RNA, 19 nt, Homo sapiens
  misc_RNA (1)...(19): siRNA sense strand
acucuguggaggugagcua

SEQ ID NO: 2586410 - RNA, 19 nt, Homo sapiens
  misc_RNA (1)...(19): siRNA sense strand
gagaagaggcugcaggauc

SEQ ID NO: 2586411 - RNA, 19 nt, Homo sapiens
  misc_RNA (1)...(19): siRNA sense strand
aggaaggagccaacaucaa

SEQ ID NO: 2586412 - RNA, 19 nt, Homo sapiens
  misc_RNA (1)...(19): siRNA sense strand
gggaggagaagcuacgcaa

SEQ ID NO: 2586413 - RNA, 19 nt, Homo sapiens
  misc_RNA (1)...(19): siRNA sense strand
caaucaaagaagcgaaagu

SEQ ID NO: 2586414 - RNA, 19 nt, Homo sapiens
  misc_RNA (1)...(19): siRNA sense strand
uggucagcaugcagggcaa

SEQ ID NO: 2586415 - RNA, 19 nt, Homo sapiens
  misc_RNA (1)...(19): siRNA sense strand
uggcaguggugguggcagu

SEQ ID NO: 2586416 - RNA, 19 nt, Homo sapiens
  misc_RNA (1)...(19): siRNA sense strand
ggauucugcaggaggugaa

SEQ ID NO: 2586417 - RNA, 19 nt, Homo sapiens
  misc_RNA (1)...(19): siRNA sense strand
gaucagaggcagcagagga

SEQ ID NO: 2586418 - RNA, 19 nt, Homo sapiens
  misc_RNA (1)...(19): siRNA sense strand
cggugaaggagaucugcua

SEQ ID NO: 2586419 - RNA, 19 nt, Homo sapiens
  misc_RNA (1)...(19): siRNA sense strand
agacaugggaggagaagcu

SEQ ID NO: 2586420 - RNA, 19 nt, Homo sapiens
  misc_RNA (1)...(19): siRNA sense strand
guaucgggacauuggagaa

SEQ ID NO: 2586421 - RNA, 19 nt, Homo sapiens
  misc_RNA (1)...(19): siRNA sense strand
ugaagaugcaggcggugaa

SEQ ID NO: 2586422 - RNA, 19 nt, Homo sapiens
  misc_RNA (1)...(19): siRNA sense strand
ggaggaaggagguggagcu

SEQ ID NO: 2586423 - RNA, 19 nt, Homo sapiens
  misc_RNA (1)...(19): siRNA sense strand
ggagaagcuacgcaagaca

SEQ ID NO: 2586424 - RNA, 19 nt, Homo sapiens
  misc_RNA (1)...(19): siRNA sense strand
uugugaaggagcugagaca

SEQ ID NO: 2586425 - RNA, 19 nt, Homo sapiens
  misc_RNA (1)...(19): siRNA sense strand
gaggauggagagagaagca

SEQ ID NO: 2586426 - RNA, 19 nt, Homo sapiens
  misc_RNA (1)...(19): siRNA sense strand
acaucaagcugaccggaca

SEQ ID NO: 2586427 - RNA, 19 nt, Homo sapiens
  misc_RNA (1)...(19): siRNA sense strand
ugaaaguggcagugagggu

SEQ ID NO: 2586428 - RNA, 19 nt, Homo sapiens
  misc_RNA (1)...(19): siRNA sense strand
auaggauugugaugggcaa

SEQ ID NO: 2586429 - RNA, 19 nt, Homo sapiens
  misc_RNA (1)...(19): siRNA sense strand
gccaaguagauauggacau

SEQ ID NO: 2586430 - RNA, 19 nt, Homo sapiens
  misc_RNA (1)...(19): siRNA sense strand
aggugaagcugcagaacag

SEQ ID NO: 2586431 - RNA, 19 nt, Homo sapiens
  misc_RNA (1)...(19): siRNA sense strand
ugcaaucaaagaagcgaaa

SEQ ID NO: 2586432 - RNA, 19 nt, Homo sapiens
  misc_RNA (1)...(19): siRNA sense strand
ggaacuuugcccagaagga

SEQ ID NO: 2586433 - RNA, 19 nt, Homo sapiens
  misc_RNA (1)...(19): siRNA sense strand
ucggagaaggucaguaaga

SEQ ID NO: 2586434 - RNA, 19 nt, Homo sapiens
  misc_RNA (1)...(19): siRNA sense strand
ucgacauaaagcuggaaau

SEQ ID NO: 2586435 - RNA, 19 nt, Homo sapiens
  misc_RNA (1)...(19): siRNA sense strand
ggcccaggaucaugaggau

SEQ ID NO: 2586436 - RNA, 19 nt, Homo sapiens
  misc_RNA (1)...(19): siRNA sense strand
ggaaagugaucucggcccu

SEQ ID NO: 2586437 - RNA, 19 nt, Homo sapiens
  misc_RNA (1)...(19): siRNA sense strand
acgagacaugggaggagaa

SEQ ID NO: 2586438 - RNA, 19 nt, Homo sapiens
  misc_RNA (1)...(19): siRNA sense strand
uggaaauggagaagaggcu

SEQ ID NO: 2586439 - RNA, 19 nt, Homo sapiens
  misc_RNA (1)...(19): siRNA sense strand
ccaccauggcugaccugaa

SEQ ID NO: 2586440 - RNA, 19 nt, Homo sapiens
  misc_RNA (1)...(19): siRNA sense strand
ggaaauaaagcacggacug

SEQ ID NO: 2586441 - RNA, 19 nt, Homo sapiens
  misc_RNA (1)...(19): siRNA sense strand
uggaaggccugaagacgga

SEQ ID NO: 2586442 - RNA, 19 nt, Homo sapiens
  misc_RNA (1)...(19): siRNA sense strand
acggaagaagggaguguca

SEQ ID NO: 2586443 - RNA, 19 nt, Homo sapiens
  misc_RNA (1)...(19): siRNA sense strand
gcugcaggaucuggagaau

SEQ ID NO: 2586444 - RNA, 19 nt, Homo sapiens
  misc_RNA (1)...(19): siRNA sense strand
uggagaaucaguaccggaa

SEQ ID NO: 2586445 - RNA, 19 nt, Homo sapiens
  misc_RNA (1)...(19): siRNA sense strand
agacauaugugaaugggaa

SEQ ID NO: 2586446 - RNA, 19 nt, Homo sapiens
  misc_RNA (1)...(19): siRNA sense strand
ccugacuacacuagggaaa

SEQ ID NO: 2586447 - RNA, 19 nt, Homo sapiens
  misc_RNA (1)...(19): siRNA sense strand
cagcaaguguaucgggaca

SEQ ID NO: 2586448 - RNA, 19 nt, Homo sapiens
  misc_RNA (1)...(19): siRNA sense strand
gaggugagcuauauggaga

SEQ ID NO: 2586449 - RNA, 19 nt, Homo sapiens
  misc_RNA (1)...(19): siRNA sense strand
ccagauugggccugaggaa

SEQ ID NO: 2586450 - RNA, 19 nt, Homo sapiens
  misc_RNA (1)...(19): siRNA sense strand
gagaagagaugcugcucca

SEQ ID NO: 2586451 - RNA, 19 nt, Homo sapiens
  misc_RNA (1)...(19): siRNA sense strand
cccugaggauggagagaga

SEQ ID NO: 2586452 - RNA, 19 nt, Homo sapiens
  misc_RNA (1)...(19): siRNA sense strand
gggaacugcugauggcuca

SEQ ID NO: 2586453 - RNA, 19 nt, Homo sapiens
  misc_RNA (1)...(19): siRNA sense strand
aggcaaggcuggaacggga

SEQ ID NO: 2586454 - RNA, 19 nt, Homo sapiens
  misc_RNA (1)...(19): siRNA sense strand
ugaagaagguggugagguc

SEQ ID NO: 2586455 - RNA, 19 nt, Homo sapiens
  misc_RNA (1)...(19): siRNA sense strand
cagagaagauuauagcuga

SEQ ID NO: 2586456 - RNA, 19 nt, Homo sapiens
  misc_RNA (1)...(19): siRNA sense strand
uuagagagcugcaggagga

SEQ ID NO: 2586457 - RNA, 19 nt, Homo sapiens
  misc_RNA (1)...(19): siRNA sense strand
acucuguggaggugagcua

SEQ ID NO: 2586458 - RNA, 19 nt, Homo sapiens
  misc_RNA (1)...(19): siRNA sense strand
gagaagaggcugcaggauc

SEQ ID NO: 2586459 - RNA, 19 nt, Homo sapiens
  misc_RNA (1)...(19): siRNA sense strand
aggaaggagccaacaucaa

SEQ ID NO: 2586460 - RNA, 19 nt, Homo sapiens
  misc_RNA (1)...(19): siRNA sense strand
gggaggagaagcuacgcaa

SEQ ID NO: 2586461 - RNA, 19 nt, Homo sapiens
  misc_RNA (1)...(19): siRNA sense strand
caaucaaagaagcgaaagu

SEQ ID NO: 2586462 - RNA, 19 nt, Homo sapiens
  misc_RNA (1)...(19): siRNA sense strand
uggucagcaugcagggcaa

SEQ ID NO: 2586463 - RNA, 19 nt, Homo sapiens
  misc_RNA (1)...(19): siRNA sense strand
uggcaguggugguggcagu

SEQ ID NO: 2586464 - RNA, 19 nt, Homo sapiens
  misc_RNA (1)...(19): siRNA sense strand
ggauucugcaggaggugaa

SEQ ID NO: 2586465 - RNA, 19 nt, Homo sapiens
  misc_RNA (1)...(19): siRNA sense strand
gaucagaggcagcagagga

SEQ ID NO: 2586466 - RNA, 19 nt, Homo sapiens
  misc_RNA (1)...(19): siRNA sense strand
cggugaaggagaucugcua

SEQ ID NO: 2586467 - RNA, 19 nt, Homo sapiens
  misc_RNA (1)...(19): siRNA sense strand
agacaugggaggagaagcu

SEQ ID NO: 2586468 - RNA, 19 nt, Homo sapiens
  misc_RNA (1)...(19): siRNA sense strand
guaucgggacauuggagaa

SEQ ID NO: 2586469 - RNA, 19 nt, Homo sapiens
  misc_RNA (1)...(19): siRNA sense strand
ugaagaugcaggcggugaa

SEQ ID NO: 2586470 - RNA, 19 nt, Homo sapiens
  misc_RNA (1)...(19): siRNA sense strand
ggaggaaggagguggagcu

SEQ ID NO: 2586471 - RNA, 19 nt, Homo sapiens
  misc_RNA (1)...(19): siRNA sense strand
ggagaagcuacgcaagaca

SEQ ID NO: 2586472 - RNA, 19 nt, Homo sapiens
  misc_RNA (1)...(19): siRNA sense strand
uugugaaggagcugagaca

SEQ ID NO: 2586473 - RNA, 19 nt, Homo sapiens
  misc_RNA (1)...(19): siRNA sense strand
gaggauggagagagaagca

SEQ ID NO: 2586474 - RNA, 19 nt, Homo sapiens
  misc_RNA (1)...(19): siRNA sense strand
acaucaagcugaccggaca

SEQ ID NO: 2586475 - RNA, 19 nt, Homo sapiens
  misc_RNA (1)...(19): siRNA sense strand
ugaaaguggcagugagggu

SEQ ID NO: 2586476 - RNA, 19 nt, Homo sapiens
  misc_RNA (1)...(19): siRNA sense strand
auaggauugugaugggcaa

SEQ ID NO: 2586477 - RNA, 19 nt, Homo sapiens
  misc_RNA (1)...(19): siRNA sense strand
gccaaguagauauggacau

SEQ ID NO: 2586478 - RNA, 19 nt, Homo sapiens
  misc_RNA (1)...(19): siRNA sense strand
aggugaagcugcagaacag

SEQ ID NO: 2586479 - RNA, 19 nt, Homo sapiens
  misc_RNA (1)...(19): siRNA sense strand
ugcaaucaaagaagcgaaa

SEQ ID NO: 2586480 - RNA, 19 nt, Homo sapiens
  misc_RNA (1)...(19): siRNA sense strand
ggaacuuugcccagaagga

SEQ ID NO: 2586481 - RNA, 19 nt, Homo sapiens
  misc_RNA (1)...(19): siRNA sense strand
ucggagaaggucaguaaga

SEQ ID NO: 2586482 - RNA, 19 nt, Homo sapiens
  misc_RNA (1)...(19): siRNA sense strand
ucgacauaaagcuggaaau

SEQ ID NO: 2586483 - RNA, 19 nt, Homo sapiens
  misc_RNA (1)...(19): siRNA sense strand
ggcccaggaucaugaggau

SEQ ID NO: 2586484 - RNA, 19 nt, Homo sapiens
  misc_RNA (1)...(19): siRNA sense strand
ggaaagugaucucggcccu

SEQ ID NO: 2586485 - RNA, 19 nt, Homo sapiens
  misc_RNA (1)...(19): siRNA sense strand
acgagacaugggaggagaa

SEQ ID NO: 2586486 - RNA, 19 nt, Homo sapiens
  misc_RNA (1)...(19): siRNA sense strand
uggaaauggagaagaggcu

SEQ ID NO: 2586487 - RNA, 19 nt, Homo sapiens
  misc_RNA (1)...(19): siRNA sense strand
ccaccauggcugaccugaa

SEQ ID NO: 2586488 - RNA, 19 nt, Homo sapiens
  misc_RNA (1)...(19): siRNA sense strand
ggaaauaaagcacggacug

SEQ ID NO: 2586489 - RNA, 19 nt, Homo sapiens
  misc_RNA (1)...(19): siRNA sense strand
uggaaggccugaagacgga

SEQ ID NO: 2586490 - RNA, 19 nt, Homo sapiens
  misc_RNA (1)...(19): siRNA sense strand
acggaagaagggaguguca

SEQ ID NO: 2586491 - RNA, 19 nt, Homo sapiens
  misc_RNA (1)...(19): siRNA sense strand
gcugcaggaucuggagaau

SEQ ID NO: 2586492 - RNA, 19 nt, Homo sapiens
  misc_RNA (1)...(19): siRNA sense strand
uggagaaucaguaccggaa

SEQ ID NO: 2586493 - RNA, 19 nt, Homo sapiens
  misc_RNA (1)...(19): siRNA sense strand
cugugaacacgaugaagaa

SEQ ID NO: 2586494 - RNA, 19 nt, Homo sapiens
  misc_RNA (1)...(19): siRNA sense strand
ucaaaggcuucgagcgcga

SEQ ID NO: 2586495 - RNA, 19 nt, Homo sapiens
  misc_RNA (1)...(19): siRNA sense strand
ccgccugagccaacacaaa

SEQ ID NO: 2586496 - RNA, 19 nt, Homo sapiens
  misc_RNA (1)...(19): siRNA sense strand
gagcugugaucaaaggcuu

SEQ ID NO: 2586497 - RNA, 19 nt, Homo sapiens
  misc_RNA (1)...(19): siRNA sense strand
gcaucgaauucuuggacag

SEQ ID NO: 2586498 - RNA, 19 nt, Homo sapiens
  misc_RNA (1)...(19): siRNA sense strand
gagaauuggaagaggaaga

SEQ ID NO: 2586499 - RNA, 19 nt, Homo sapiens
  misc_RNA (1)...(19): siRNA sense strand
ggugauaaacagugaggau

SEQ ID NO: 2586500 - RNA, 19 nt, Homo sapiens
  misc_RNA (1)...(19): siRNA sense strand
uggaagaggaagaagaaaa

SEQ ID NO: 2586501 - RNA, 19 nt, Homo sapiens
  misc_RNA (1)...(19): siRNA sense strand
aagaauaagagucacgaaa

SEQ ID NO: 2586502 - RNA, 19 nt, Homo sapiens
  misc_RNA (1)...(19): siRNA sense strand
ccucaauacagaaggacau

SEQ ID NO: 2586503 - RNA, 19 nt, Homo sapiens
  misc_RNA (1)...(19): siRNA sense strand
ggugaagacuaguguggga

SEQ ID NO: 2586504 - RNA, 19 nt, Homo sapiens
  misc_RNA (1)...(19): siRNA sense strand
cggucaaguugucgcaauu

SEQ ID NO: 2586505 - RNA, 19 nt, Homo sapiens
  misc_RNA (1)...(19): siRNA sense strand
cauugaaaggacuagaaua

SEQ ID NO: 2586506 - RNA, 19 nt, Homo sapiens
  misc_RNA (1)...(19): siRNA sense strand
acagugaggaugaggaaga

SEQ ID NO: 2586507 - RNA, 19 nt, Homo sapiens
  misc_RNA (1)...(19): siRNA sense strand
aggaugaggaagaagaaga

SEQ ID NO: 2586508 - RNA, 19 nt, Homo sapiens
  misc_RNA (1)...(19): siRNA sense strand
ggaagaggaagaagaaaau

SEQ ID NO: 2586509 - RNA, 19 nt, Homo sapiens
  misc_RNA (1)...(19): siRNA sense strand
agaaaagaaggcagcaaaa

SEQ ID NO: 2586510 - RNA, 19 nt, Homo sapiens
  misc_RNA (1)...(19): siRNA sense strand
aauccugagcagagagcua

SEQ ID NO: 2586511 - RNA, 19 nt, Homo sapiens
  misc_RNA (1)...(19): siRNA sense strand
gaaucagaucuucaggaaa

SEQ ID NO: 2586512 - RNA, 19 nt, Homo sapiens
  misc_RNA (1)...(19): siRNA sense strand
auacagaaggacaugcaaa

SEQ ID NO: 2586513 - RNA, 19 nt, Homo sapiens
  misc_RNA (1)...(19): siRNA sense strand
ggaugaggaagaagaagau

SEQ ID NO: 2586514 - RNA, 19 nt, Homo sapiens
  misc_RNA (1)...(19): siRNA sense strand
aaacagugaggaugaggaa

SEQ ID NO: 2586515 - RNA, 19 nt, Homo sapiens
  misc_RNA (1)...(19): siRNA sense strand
agaagauggaacuaugaaa

SEQ ID NO: 2586516 - RNA, 19 nt, Homo sapiens
  misc_RNA (1)...(19): siRNA sense strand
caugauggaacgggagaua

SEQ ID NO: 2586517 - RNA, 19 nt, Homo sapiens
  misc_RNA (1)...(19): siRNA sense strand
aggaagaagaagauggaac

SEQ ID NO: 2586518 - RNA, 19 nt, Homo sapiens
  misc_RNA (1)...(19): siRNA sense strand
ugauggaacgggagauaga

SEQ ID NO: 2586519 - RNA, 19 nt, Homo sapiens
  misc_RNA (1)...(19): siRNA sense strand
acgagaauuggaagaggaa

SEQ ID NO: 2586520 - RNA, 19 nt, Homo sapiens
  misc_RNA (1)...(19): siRNA sense strand
gcuauggagaucaaagcua

SEQ ID NO: 2586521 - RNA, 19 nt, Homo sapiens
  misc_RNA (1)...(19): siRNA sense strand
cgucagagauacacugcga

SEQ ID NO: 2586522 - RNA, 19 nt, Homo sapiens
  misc_RNA (1)...(19): siRNA sense strand
acuucaagaauaagaguca

SEQ ID NO: 2586523 - RNA, 19 nt, Homo sapiens
  misc_RNA (1)...(19): siRNA sense strand
ccacaaguacaaagaccau

SEQ ID NO: 2586524 - RNA, 19 nt, Homo sapiens
  misc_RNA (1)...(19): siRNA sense strand
acacaaggaauccggucaa

SEQ ID NO: 2586525 - RNA, 19 nt, Homo sapiens
  misc_RNA (1)...(19): siRNA sense strand
gugaggaugaggaagaaga

SEQ ID NO: 2586526 - RNA, 19 nt, Homo sapiens
  misc_RNA (1)...(19): siRNA sense strand
agaauaagagucacgaaaa

SEQ ID NO: 2586527 - RNA, 19 nt, Homo sapiens
  misc_RNA (1)...(19): siRNA sense strand
auacauccaaugagggcua

SEQ ID NO: 2586528 - RNA, 19 nt, Homo sapiens
  misc_RNA (1)...(19): siRNA sense strand
aagaacuucgucagagaua

SEQ ID NO: 2586529 - RNA, 19 nt, Homo sapiens
  misc_RNA (1)...(19): siRNA sense strand
aagaaaagaaggcagcaaa

SEQ ID NO: 2586530 - RNA, 19 nt, Homo sapiens
  misc_RNA (1)...(19): siRNA sense strand
cugaggugauucaagaaau

SEQ ID NO: 2586531 - RNA, 19 nt, Homo sapiens
  misc_RNA (1)...(19): siRNA sense strand
cggaugaagaugagcugga

SEQ ID NO: 2586532 - RNA, 19 nt, Homo sapiens
  misc_RNA (1)...(19): siRNA sense strand
aagcaauacacaaggaauc

SEQ ID NO: 2586533 - RNA, 19 nt, Homo sapiens
  misc_RNA (1)...(19): siRNA sense strand
aauuggaagaggaagaaga

SEQ ID NO: 2586534 - RNA, 19 nt, Homo sapiens
  misc_RNA (1)...(19): siRNA sense strand
agugaagacaguuugacua

SEQ ID NO: 2586535 - RNA, 19 nt, Homo sapiens
  misc_RNA (1)...(19): siRNA sense strand
auucagaaagccagaacuu

SEQ ID NO: 2586536 - RNA, 19 nt, Homo sapiens
  misc_RNA (1)...(19): siRNA sense strand
gccuaagaguaaacuaaaa

SEQ ID NO: 2586537 - RNA, 19 nt, Homo sapiens
  misc_RNA (1)...(19): siRNA sense strand
uccucaagauggagacuuu

SEQ ID NO: 2586538 - RNA, 19 nt, Homo sapiens
  misc_RNA (1)...(19): siRNA sense strand
gaaaagaaaugcaaccuca

SEQ ID NO: 2586539 - RNA, 19 nt, Homo sapiens
  misc_RNA (1)...(19): siRNA sense strand
gauuacgaaacaagacauu

SEQ ID NO: 2586540 - RNA, 19 nt, Homo sapiens
  misc_RNA (1)...(19): siRNA sense strand
cgcaauacuguaauaggaa

SEQ ID NO: 2586541 - RNA, 19 nt, Homo sapiens
  misc_RNA (1)...(19): siRNA sense strand
ccugaggugauucaagaaa

SEQ ID NO: 2586542 - RNA, 19 nt, Homo sapiens
  misc_RNA (1)...(19): siRNA sense strand
ggugaagaauccugagcag

SEQ ID NO: 2586543 - RNA, 19 nt, Homo sapiens
  misc_RNA (1)...(19): siRNA sense strand
gaauaagagucacgaaaac

SEQ ID NO: 2586544 - RNA, 19 nt, Homo sapiens
  misc_RNA (1)...(19): siRNA sense strand
aagaaaauucggaugaaga

SEQ ID NO: 2586545 - RNA, 19 nt, Homo sapiens
  misc_RNA (1)...(19): siRNA sense strand
auuggaagaggaagaagaa

SEQ ID NO: 2586546 - RNA, 19 nt, Homo sapiens
  misc_RNA (1)...(19): siRNA sense strand
ugaggaugaggaagaagaa

SEQ ID NO: 2586547 - RNA, 19 nt, Homo sapiens
  misc_RNA (1)...(19): siRNA sense strand
ucauggacuacuuugauaa

SEQ ID NO: 2586548 - RNA, 19 nt, Homo sapiens
  misc_RNA (1)...(19): siRNA sense strand
caagaauaagagucacgaa

SEQ ID NO: 2586549 - RNA, 19 nt, Homo sapiens
  misc_RNA (1)...(19): siRNA sense strand
gagaaaagaacuugagaaa

SEQ ID NO: 2586550 - RNA, 19 nt, Homo sapiens
  misc_RNA (1)...(19): siRNA sense strand
ccuuauggauugagguaua

SEQ ID NO: 2586551 - RNA, 19 nt, Homo sapiens
  misc_RNA (1)...(19): siRNA sense strand
gagcagaagaagaggaaaa

SEQ ID NO: 2586552 - RNA, 19 nt, Homo sapiens
  misc_RNA (1)...(19): siRNA sense strand
gaaaaugguaucagagaaa

SEQ ID NO: 2586553 - RNA, 19 nt, Homo sapiens
  misc_RNA (1)...(19): siRNA sense strand
gcuuaaacaaucuggacaa

SEQ ID NO: 2586554 - RNA, 19 nt, Homo sapiens
  misc_RNA (1)...(19): siRNA sense strand
aagcagaaauccaaggcaa

SEQ ID NO: 2586555 - RNA, 19 nt, Homo sapiens
  misc_RNA (1)...(19): siRNA sense strand
gcaugaacaagaagagaau

SEQ ID NO: 2586556 - RNA, 19 nt, Homo sapiens
  misc_RNA (1)...(19): siRNA sense strand
aagaagagaauguggucaa

SEQ ID NO: 2586557 - RNA, 19 nt, Homo sapiens
  misc_RNA (1)...(19): siRNA sense strand
ccagaagaaaugaagcaua

SEQ ID NO: 2586558 - RNA, 19 nt, Homo sapiens
  misc_RNA (1)...(19): siRNA sense strand
gguuaaugcucaaauucaa

SEQ ID NO: 2586559 - RNA, 19 nt, Homo sapiens
  misc_RNA (1)...(19): siRNA sense strand
ccacagaacaaguccacua

SEQ ID NO: 2586560 - RNA, 19 nt, Homo sapiens
  misc_RNA (1)...(19): siRNA sense strand
uagccaaaguacugaagaa

SEQ ID NO: 2586561 - RNA, 19 nt, Homo sapiens
  misc_RNA (1)...(19): siRNA sense strand
ccuuugaggacuuuagaaa

SEQ ID NO: 2586562 - RNA, 19 nt, Homo sapiens
  misc_RNA (1)...(19): siRNA sense strand
uaucaggaauucaggaaau

SEQ ID NO: 2586563 - RNA, 19 nt, Homo sapiens
  misc_RNA (1)...(19): siRNA sense strand
cugcagaggagauggauga

SEQ ID NO: 2586564 - RNA, 19 nt, Homo sapiens
  misc_RNA (1)...(19): siRNA sense strand
aaagagaguuccuggguca

SEQ ID NO: 2586565 - RNA, 19 nt, Homo sapiens
  misc_RNA (1)...(19): siRNA sense strand
ccagaagagaaguuuaaua

SEQ ID NO: 2586566 - RNA, 19 nt, Homo sapiens
  misc_RNA (1)...(19): siRNA sense strand
ccacuuagaggaagccaaa

SEQ ID NO: 2586567 - RNA, 19 nt, Homo sapiens
  misc_RNA (1)...(19): siRNA sense strand
cagaggaggaaaucaguaa

SEQ ID NO: 2586568 - RNA, 19 nt, Homo sapiens
  misc_RNA (1)...(19): siRNA sense strand
augaagaacugcugacaca

SEQ ID NO: 2586569 - RNA, 19 nt, Homo sapiens
  misc_RNA (1)...(19): siRNA sense strand
ccgcaauaggcuuaaacaa

SEQ ID NO: 2586570 - RNA, 19 nt, Homo sapiens
  misc_RNA (1)...(19): siRNA sense strand
ggauugagguauauagcca

SEQ ID NO: 2586571 - RNA, 19 nt, Homo sapiens
  misc_RNA (1)...(19): siRNA sense strand
aacuuaagcuggaaugaaa

SEQ ID NO: 2586572 - RNA, 19 nt, Homo sapiens
  misc_RNA (1)...(19): siRNA sense strand
cggagugugcugacaaaua

SEQ ID NO: 2586573 - RNA, 19 nt, Homo sapiens
  misc_RNA (1)...(19): siRNA sense strand
gacagaaaucuuagagaca

SEQ ID NO: 2586574 - RNA, 19 nt, Homo sapiens
  misc_RNA (1)...(19): siRNA sense strand
ggaagaagggcuccggaau

SEQ ID NO: 2586575 - RNA, 19 nt, Homo sapiens
  misc_RNA (1)...(19): siRNA sense strand
cgcaauaggcuuaaacaau

SEQ ID NO: 2586576 - RNA, 19 nt, Homo sapiens
  misc_RNA (1)...(19): siRNA sense strand
acgauuaagggaagaagua

SEQ ID NO: 2586577 - RNA, 19 nt, Homo sapiens
  misc_RNA (1)...(19): siRNA sense strand
aaugcaagacugaagaaua

SEQ ID NO: 2586578 - RNA, 19 nt, Homo sapiens
  misc_RNA (1)...(19): siRNA sense strand
gggaagaguuugaagcuag

SEQ ID NO: 2586579 - RNA, 19 nt, Homo sapiens
  misc_RNA (1)...(19): siRNA sense strand
cggaaggaguauaugcaca

SEQ ID NO: 2586580 - RNA, 19 nt, Homo sapiens
  misc_RNA (1)...(19): siRNA sense strand
ugaccaaaggagaaacuua

SEQ ID NO: 2586581 - RNA, 19 nt, Homo sapiens
  misc_RNA (1)...(19): siRNA sense strand
aagaagaaagagaugcuua

SEQ ID NO: 2586582 - RNA, 19 nt, Homo sapiens
  misc_RNA (1)...(19): siRNA sense strand
caagauaacuuaagcugga

SEQ ID NO: 2586583 - RNA, 19 nt, Homo sapiens
  misc_RNA (1)...(19): siRNA sense strand
aggaagucacaguagguua

SEQ ID NO: 2586584 - RNA, 19 nt, Homo sapiens
  misc_RNA (1)...(19): siRNA sense strand
cgaaaaugguaucagagaa

SEQ ID NO: 2586585 - RNA, 19 nt, Homo sapiens
  misc_RNA (1)...(19): siRNA sense strand
gcucaaauucaagaagaaa

SEQ ID NO: 2586586 - RNA, 19 nt, Homo sapiens
  misc_RNA (1)...(19): siRNA sense strand
cuaaucagcgagaagaaua

SEQ ID NO: 2586587 - RNA, 19 nt, Homo sapiens
  misc_RNA (1)...(19): siRNA sense strand
uaacuuuaguggaugacaa

SEQ ID NO: 2586588 - RNA, 19 nt, Homo sapiens
  misc_RNA (1)...(19): siRNA sense strand
ugauaugguuaaugcucaa

SEQ ID NO: 2586589 - RNA, 19 nt, Homo sapiens
  misc_RNA (1)...(19): siRNA sense strand
ccgaauggcaacugcaaga

SEQ ID NO: 2586590 - RNA, 19 nt, Homo sapiens
  misc_RNA (1)...(19): siRNA sense strand
gaauucgauccaugagaaa

SEQ ID NO: 2586591 - RNA, 19 nt, Homo sapiens
  misc_RNA (1)...(19): siRNA sense strand
aaggagaaacuuaggauca

SEQ ID NO: 2586592 - RNA, 19 nt, Homo sapiens
  misc_RNA (1)...(19): siRNA sense strand
cgaggacauuauugaggaa

SEQ ID NO: 2586593 - RNA, 19 nt, Homo sapiens
  misc_RNA (1)...(19): siRNA sense strand
acuagagguugcacgauua

SEQ ID NO: 2586594 - RNA, 19 nt, Homo sapiens
  misc_RNA (1)...(19): siRNA sense strand
uugaguaaggagaggagaa

SEQ ID NO: 2586595 - RNA, 19 nt, Homo sapiens
  misc_RNA (1)...(19): siRNA sense strand
ccgacaaaguccugaauuc

SEQ ID NO: 2586596 - RNA, 19 nt, Homo sapiens
  misc_RNA (1)...(19): siRNA sense strand
agaccaagaagcugauaau

SEQ ID NO: 2586597 - RNA, 19 nt, Homo sapiens
  misc_RNA (1)...(19): siRNA sense strand
caaccuugcaccagaauau

SEQ ID NO: 2586598 - RNA, 19 nt, Homo sapiens
  misc_RNA (1)...(19): siRNA sense strand
agaagaaagagaugcuuau

SEQ ID NO: 2586599 - RNA, 19 nt, Homo sapiens
  misc_RNA (1)...(19): siRNA sense strand
agaggaaaauccagaggaa

SEQ ID NO: 2586600 - RNA, 19 nt, Homo sapiens
  misc_RNA (1)...(19): siRNA sense strand
caaggauauucgaaaucaa

SEQ ID NO: 2586601 - RNA, 19 nt, Homo sapiens
  misc_RNA (1)...(19): siRNA sense strand
caccagaauaucagaaaga

SEQ ID NO: 2586602 - RNA, 19 nt, Homo sapiens
  misc_RNA (1)...(19): siRNA sense strand
ugaagaaaccagaggccca

SEQ ID NO: 2586603 - RNA, 19 nt, Homo sapiens
  misc_RNA (1)...(19): siRNA sense strand
cugaaagagugucuaguga

SEQ ID NO: 2586604 - RNA, 19 nt, Homo sapiens
  misc_RNA (1)...(19): siRNA sense strand
ggaucacacuagaggaugu

SEQ ID NO: 2586605 - RNA, 19 nt, Homo sapiens
  misc_RNA (1)...(19): siRNA sense strand
auaaacaacggaaggagua

SEQ ID NO: 2586606 - RNA, 19 nt, Homo sapiens
  misc_RNA (1)...(19): siRNA sense strand
cagcuggaggucagauaaa

SEQ ID NO: 2586607 - RNA, 19 nt, Homo sapiens
  misc_RNA (1)...(19): siRNA sense strand
cuguauuucagaagaagaa

SEQ ID NO: 2586608 - RNA, 19 nt, Homo sapiens
  misc_RNA (1)...(19): siRNA sense strand
cuacaguauuucagagauc

SEQ ID NO: 2586609 - RNA, 19 nt, Homo sapiens
  misc_RNA (1)...(19): siRNA sense strand
gcuaaauacagaaggacau

SEQ ID NO: 2586610 - RNA, 19 nt, Homo sapiens
  misc_RNA (1)...(19): siRNA sense strand
augcagaggaugaggaaga

SEQ ID NO: 2586611 - RNA, 19 nt, Homo sapiens
  misc_RNA (1)...(19): siRNA sense strand
acucagaagaggaugaaau

SEQ ID NO: 2586612 - RNA, 19 nt, Homo sapiens
  misc_RNA (1)...(19): siRNA sense strand
gaauacagugauaggaaca

SEQ ID NO: 2586613 - RNA, 19 nt, Homo sapiens
  misc_RNA (1)...(19): siRNA sense strand
gggaaguggaccaggacga

SEQ ID NO: 2586614 - RNA, 19 nt, Homo sapiens
  misc_RNA (1)...(19): siRNA sense strand
ugaucaaugcagaggauga

SEQ ID NO: 2586615 - RNA, 19 nt, Homo sapiens
  misc_RNA (1)...(19): siRNA sense strand
cguuaacagaagaugaaau

SEQ ID NO: 2586616 - RNA, 19 nt, Homo sapiens
  misc_RNA (1)...(19): siRNA sense strand
auacagaaggacaugcaaa

SEQ ID NO: 2586617 - RNA, 19 nt, Homo sapiens
  misc_RNA (1)...(19): siRNA sense strand
agaggaaggaacuaugaaa

SEQ ID NO: 2586618 - RNA, 19 nt, Homo sapiens
  misc_RNA (1)...(19): siRNA sense strand
gagauaucaaggcaggaaa

SEQ ID NO: 2586619 - RNA, 19 nt, Homo sapiens
  misc_RNA (1)...(19): siRNA sense strand
cggccagauuguugcuauu

SEQ ID NO: 2586620 - RNA, 19 nt, Homo sapiens
  misc_RNA (1)...(19): siRNA sense strand
agucaaauauuauggcagu

SEQ ID NO: 2586621 - RNA, 19 nt, Homo sapiens
  misc_RNA (1)...(19): siRNA sense strand
cuuagagaaacuuggagaa

SEQ ID NO: 2586622 - RNA, 19 nt, Homo sapiens
  misc_RNA (1)...(19): siRNA sense strand
gaggaaggaacuaugaaaa

SEQ ID NO: 2586623 - RNA, 19 nt, Homo sapiens
  misc_RNA (1)...(19): siRNA sense strand
aaagaagggaugagaccau

SEQ ID NO: 2586624 - RNA, 19 nt, Homo sapiens
  misc_RNA (1)...(19): siRNA sense strand
aaccaaacaaccagaagaa

SEQ ID NO: 2586625 - RNA, 19 nt, Homo sapiens
  misc_RNA (1)...(19): siRNA sense strand
ggcuaagaagagacggcaa

SEQ ID NO: 2586626 - RNA, 19 nt, Homo sapiens
  misc_RNA (1)...(19): siRNA sense strand
agacgguacagcugaggaa

SEQ ID NO: 2586627 - RNA, 19 nt, Homo sapiens
  misc_RNA (1)...(19): siRNA sense strand
cuucaugauuccuacaaau

SEQ ID NO: 2586628 - RNA, 19 nt, Homo sapiens
  misc_RNA (1)...(19): siRNA sense strand
agauaucaaggcaggaaau

SEQ ID NO: 2586629 - RNA, 19 nt, Homo sapiens
  misc_RNA (1)...(19): siRNA sense strand
gugccaaaggagugucaau

SEQ ID NO: 2586630 - RNA, 19 nt, Homo sapiens
  misc_RNA (1)...(19): siRNA sense strand
uuacagauaccauggccaa

SEQ ID NO: 2586631 - RNA, 19 nt, Homo sapiens
  misc_RNA (1)...(19): siRNA sense strand
uggaugccauagaggcuaa

SEQ ID NO: 2586632 - RNA, 19 nt, Homo sapiens
  misc_RNA (1)...(19): siRNA sense strand
gagcagugggugaugagau

SEQ ID NO: 2586633 - RNA, 19 nt, Homo sapiens
  misc_RNA (1)...(19): siRNA sense strand
auacuaugauugagcacga

SEQ ID NO: 2586634 - RNA, 19 nt, Homo sapiens
  misc_RNA (1)...(19): siRNA sense strand
cuauaaugcagcaauguga

SEQ ID NO: 2586635 - RNA, 19 nt, Homo sapiens
  misc_RNA (1)...(19): siRNA sense strand
agaggaugaggaagaggaa

SEQ ID NO: 2586636 - RNA, 19 nt, Homo sapiens
  misc_RNA (1)...(19): siRNA sense strand
auaccauggccaagcggaa

SEQ ID NO: 2586637 - RNA, 19 nt, Homo sapiens
  misc_RNA (1)...(19): siRNA sense strand
cggcagaaguaccagucca

SEQ ID NO: 2586638 - RNA, 19 nt, Homo sapiens
  misc_RNA (1)...(19): siRNA sense strand
ggcagaaguaccaguccaa

SEQ ID NO: 2586639 - RNA, 19 nt, Homo sapiens
  misc_RNA (1)...(19): siRNA sense strand
ugauucaggaaauuggaua

SEQ ID NO: 2586640 - RNA, 19 nt, Homo sapiens
  misc_RNA (1)...(19): siRNA sense strand
acagaagaugaaauagcua

SEQ ID NO: 2586641 - RNA, 19 nt, Homo sapiens
  misc_RNA (1)...(19): siRNA sense strand
agaagaugaaauagcuaca

SEQ ID NO: 2586642 - RNA, 19 nt, Homo sapiens
  misc_RNA (1)...(19): siRNA sense strand
ggaauacagugauaggaac

SEQ ID NO: 2586643 - RNA, 19 nt, Homo sapiens
  misc_RNA (1)...(19): siRNA sense strand
gaacacagacuuauggauc

SEQ ID NO: 2586644 - RNA, 19 nt, Homo sapiens
  misc_RNA (1)...(19): siRNA sense strand
agugauaggaacaccauuu

SEQ ID NO: 2586645 - RNA, 19 nt, Homo sapiens
  misc_RNA (1)...(19): siRNA sense strand
caugacugauggagccaau

SEQ ID NO: 2586646 - RNA, 19 nt, Homo sapiens
  misc_RNA (1)...(19): siRNA sense strand
caaugcagaggaugaggaa

SEQ ID NO: 2586647 - RNA, 19 nt, Homo sapiens
  misc_RNA (1)...(19): siRNA sense strand
gcuaagaagagacggcaac

SEQ ID NO: 2586648 - RNA, 19 nt, Homo sapiens
  misc_RNA (1)...(19): siRNA sense strand
ugcuaaauacagaaggaca

SEQ ID NO: 2586649 - RNA, 19 nt, Homo sapiens
  misc_RNA (1)...(19): siRNA sense strand
cauagaaauggcugaagga

SEQ ID NO: 2586650 - RNA, 19 nt, Homo sapiens
  misc_RNA (1)...(19): siRNA sense strand
aaucaacucuuaagggacu

SEQ ID NO: 2586651 - RNA, 19 nt, Homo sapiens
  misc_RNA (1)...(19): siRNA sense strand
guaaagagcccugagcaga

SEQ ID NO: 2586652 - RNA, 19 nt, Homo sapiens
  misc_RNA (1)...(19): siRNA sense strand
aaacguuaacagaagauga

SEQ ID NO: 2586653 - RNA, 19 nt, Homo sapiens
  misc_RNA (1)...(19): siRNA sense strand
cgagauaucaaggcaggaa

SEQ ID NO: 2586654 - RNA, 19 nt, Homo sapiens
  misc_RNA (1)...(19): siRNA sense strand
cagaagaacauuaggcgaa

SEQ ID NO: 2586655 - RNA, 19 nt, Homo sapiens
  misc_RNA (1)...(19): siRNA sense strand
guacuaaagcggaugggaa

SEQ ID NO: 2586656 - RNA, 19 nt, Homo sapiens
  misc_RNA (1)...(19): siRNA sense strand
agaaaguaaacgaagcaaa

SEQ ID NO: 2586657 - RNA, 19 nt, Homo sapiens
  misc_RNA (1)...(19): siRNA sense strand
ggaucugaaacuugcgaaa

SEQ ID NO: 2586658 - RNA, 19 nt, Homo sapiens
  misc_RNA (1)...(19): siRNA sense strand
gcuuaugaucagaagaaca

SEQ ID NO: 2586659 - RNA, 19 nt, Homo sapiens
  misc_RNA (1)...(19): siRNA sense strand
augaugaagaugaggaaga

SEQ ID NO: 2586660 - RNA, 19 nt, Homo sapiens
  misc_RNA (1)...(19): siRNA sense strand
aggaagaugaugaggagga

SEQ ID NO: 2586661 - RNA, 19 nt, Homo sapiens
  misc_RNA (1)...(19): siRNA sense strand
caaugaugaagaugaggaa

SEQ ID NO: 2586662 - RNA, 19 nt, Homo sapiens
  misc_RNA (1)...(19): siRNA sense strand
aggcuuaugaucagaagaa

SEQ ID NO: 2586663 - RNA, 19 nt, Homo sapiens
  misc_RNA (1)...(19): siRNA sense strand
cgacaaaaugagcagcaaa

SEQ ID NO: 2586664 - RNA, 19 nt, Homo sapiens
  misc_RNA (1)...(19): siRNA sense strand
gguuaugcuuggaugcaga

SEQ ID NO: 2586665 - RNA, 19 nt, Homo sapiens
  misc_RNA (1)...(19): siRNA sense strand
uagaaguacuaaagcggau

SEQ ID NO: 2586666 - RNA, 19 nt, Homo sapiens
  misc_RNA (1)...(19): siRNA sense strand
caucaauacaagcagaaaa

SEQ ID NO: 2586667 - RNA, 19 nt, Homo sapiens
  misc_RNA (1)...(19): siRNA sense strand
ugaaagugugugagaaagu

SEQ ID NO: 2586668 - RNA, 19 nt, Homo sapiens
  misc_RNA (1)...(19): siRNA sense strand
uacuaaagcggaugggaau

SEQ ID NO: 2586669 - RNA, 19 nt, Homo sapiens
  misc_RNA (1)...(19): siRNA sense strand
agaaaacgggcuagaaaau

SEQ ID NO: 2586670 - RNA, 19 nt, Homo sapiens
  misc_RNA (1)...(19): siRNA sense strand
gguacagagaaaucgacaa

SEQ ID NO: 2586671 - RNA, 19 nt, Homo sapiens
  misc_RNA (1)...(19): siRNA sense strand
augaagaugaggaagauga

SEQ ID NO: 2586672 - RNA, 19 nt, Homo sapiens
  misc_RNA (1)...(19): siRNA sense strand
gcaaaugcucucuggagga

SEQ ID NO: 2586673 - RNA, 19 nt, Homo sapiens
  misc_RNA (1)...(19): siRNA sense strand
aagcagaggcggauagaac

SEQ ID NO: 2586674 - RNA, 19 nt, Homo sapiens
  misc_RNA (1)...(19): siRNA sense strand
ggugauagaaaacgggcua

SEQ ID NO: 2586675 - RNA, 19 nt, Homo sapiens
  misc_RNA (1)...(19): siRNA sense strand
uagaaaacgggcuagaaaa

SEQ ID NO: 2586676 - RNA, 19 nt, Homo sapiens
  misc_RNA (1)...(19): siRNA sense strand
aaaaccugguacagagaaa

SEQ ID NO: 2586677 - RNA, 19 nt, Homo sapiens
  misc_RNA (1)...(19): siRNA sense strand
uuaaaugugcuaauggcaa

SEQ ID NO: 2586678 - RNA, 19 nt, Homo sapiens
  misc_RNA (1)...(19): siRNA sense strand
cauuaggcgaagaguuuau

SEQ ID NO: 2586679 - RNA, 19 nt, Homo sapiens
  misc_RNA (1)...(19): siRNA sense strand
auagagaagcagaggcgga

SEQ ID NO: 2586680 - RNA, 19 nt, Homo sapiens
  misc_RNA (1)...(19): siRNA sense strand
cuuaugaucagaagaacau

SEQ ID NO: 2586681 - RNA, 19 nt, Homo sapiens
  misc_RNA (1)...(19): siRNA sense strand
auagaaaacgggcuagaaa

SEQ ID NO: 2586682 - RNA, 19 nt, Homo sapiens
  misc_RNA (1)...(19): siRNA sense strand
augggaaaggcuugagaca

SEQ ID NO: 2586683 - RNA, 19 nt, Homo sapiens
  misc_RNA (1)...(19): siRNA sense strand
cagaaauaaggaugagaaa

SEQ ID NO: 2586684 - RNA, 19 nt, Homo sapiens
  misc_RNA (1)...(19): siRNA sense strand
guguaugaguucagagaca

SEQ ID NO: 2586685 - RNA, 19 nt, Homo sapiens
  misc_RNA (1)...(19): siRNA sense strand
gguacaaacugaugcucaa

SEQ ID NO: 2586686 - RNA, 19 nt, Homo sapiens
  misc_RNA (1)...(19): siRNA sense strand
auauugagacagaggguaa

SEQ ID NO: 2586687 - RNA, 19 nt, Homo sapiens
  misc_RNA (1)...(19): siRNA sense strand
aguacaaguuggaugcaaa

SEQ ID NO: 2586688 - RNA, 19 nt, Homo sapiens
  misc_RNA (1)...(19): siRNA sense strand
cagccauguuguugacuaa

SEQ ID NO: 2586689 - RNA, 19 nt, Homo sapiens
  misc_RNA (1)...(19): siRNA sense strand
uugacuaagcugaaggaaa

SEQ ID NO: 2586690 - RNA, 19 nt, Homo sapiens
  misc_RNA (1)...(19): siRNA sense strand
ggaaaagauauuagcacaa

SEQ ID NO: 2586691 - RNA, 19 nt, Homo sapiens
  misc_RNA (1)...(19): siRNA sense strand
augaaaaguuaguggaaca

SEQ ID NO: 2586692 - RNA, 19 nt, Homo sapiens
  misc_RNA (1)...(19): siRNA sense strand
agccagaggaugugcauua

SEQ ID NO: 2586693 - RNA, 19 nt, Homo sapiens
  misc_RNA (1)...(19): siRNA sense strand
aggaagaagauuuagaaga

SEQ ID NO: 2586694 - RNA, 19 nt, Homo sapiens
  misc_RNA (1)...(19): siRNA sense strand
caucuaugguggagaaagu

SEQ ID NO: 2586695 - RNA, 19 nt, Homo sapiens
  misc_RNA (1)...(19): siRNA sense strand
gaacuuaccucagaagaaa

SEQ ID NO: 2586696 - RNA, 19 nt, Homo sapiens
  misc_RNA (1)...(19): siRNA sense strand
auucaaaaggagaaggaaa

SEQ ID NO: 2586697 - RNA, 19 nt, Homo sapiens
  misc_RNA (1)...(19): siRNA sense strand
ggucuggcaguuagggaaa

SEQ ID NO: 2586698 - RNA, 19 nt, Homo sapiens
  misc_RNA (1)...(19): siRNA sense strand
aagaaaggaaugaugcuaa

SEQ ID NO: 2586699 - RNA, 19 nt, Homo sapiens
  misc_RNA (1)...(19): siRNA sense strand
ggaugagaaaccucggaua

SEQ ID NO: 2586700 - RNA, 19 nt, Homo sapiens
  misc_RNA (1)...(19): siRNA sense strand
uugacaaguuggaagaauu

SEQ ID NO: 2586701 - RNA, 19 nt, Homo sapiens
  misc_RNA (1)...(19): siRNA sense strand
agucauaucauuuggauca

SEQ ID NO: 2586702 - RNA, 19 nt, Homo sapiens
  misc_RNA (1)...(19): siRNA sense strand
ggucacaauuugaagaacu

SEQ ID NO: 2586703 - RNA, 19 nt, Homo sapiens
  misc_RNA (1)...(19): siRNA sense strand
gugcugaacuucugcaaaa

SEQ ID NO: 2586704 - RNA, 19 nt, Homo sapiens
  misc_RNA (1)...(19): siRNA sense strand
aaaugguggaguuggaaua

SEQ ID NO: 2586705 - RNA, 19 nt, Homo sapiens
  misc_RNA (1)...(19): siRNA sense strand
ugauggaauggaugaauaa

SEQ ID NO: 2586706 - RNA, 19 nt, Homo sapiens
  misc_RNA (1)...(19): siRNA sense strand
gcacaacacucaaugcaga

SEQ ID NO: 2586707 - RNA, 19 nt, Homo sapiens
  misc_RNA (1)...(19): siRNA sense strand
gaguuggaauaaagguaau

SEQ ID NO: 2586708 - RNA, 19 nt, Homo sapiens
  misc_RNA (1)...(19): siRNA sense strand
ccaacugaggagaaugaaa

SEQ ID NO: 2586709 - RNA, 19 nt, Homo sapiens
  misc_RNA (1)...(19): siRNA sense strand
guuaaugaagugauggaau

SEQ ID NO: 2586710 - RNA, 19 nt, Homo sapiens
  misc_RNA (1)...(19): siRNA sense strand
ucaugaaugcucaggcuaa

SEQ ID NO: 2586711 - RNA, 19 nt, Homo sapiens
  misc_RNA (1)...(19): siRNA sense strand
caacagugaagcuggaaca

SEQ ID NO: 2586712 - RNA, 19 nt, Homo sapiens
  misc_RNA (1)...(19): siRNA sense strand
agacagaggguaagaugau

SEQ ID NO: 2586713 - RNA, 19 nt, Homo sapiens
  misc_RNA (1)...(19): siRNA sense strand
ggguaagaugauaaugcaa

SEQ ID NO: 2586714 - RNA, 19 nt, Homo sapiens
  misc_RNA (1)...(19): siRNA sense strand
aggagaggaccaagcuaaa

SEQ ID NO: 2586715 - RNA, 19 nt, Homo sapiens
  misc_RNA (1)...(19): siRNA sense strand
uggcccaaauauugauaaa

SEQ ID NO: 2586716 - RNA, 19 nt, Homo sapiens
  misc_RNA (1)...(19): siRNA sense strand
ccaaaauaaagguggugaa

SEQ ID NO: 2586717 - RNA, 19 nt, Homo sapiens
  misc_RNA (1)...(19): siRNA sense strand
agguaauguacauggguga

SEQ ID NO: 2586718 - RNA, 19 nt, Homo sapiens
  misc_RNA (1)...(19): siRNA sense strand
ccucaagaaaccaguaaca

SEQ ID NO: 2586719 - RNA, 19 nt, Homo sapiens
  misc_RNA (1)...(19): siRNA sense strand
ugaacuuaccucagaagaa

SEQ ID NO: 2586720 - RNA, 19 nt, Homo sapiens
  misc_RNA (1)...(19): siRNA sense strand
acagaggguaagaugauaa

SEQ ID NO: 2586721 - RNA, 19 nt, Homo sapiens
  misc_RNA (1)...(19): siRNA sense strand
agaagauacugaagguguu

SEQ ID NO: 2586722 - RNA, 19 nt, Homo sapiens
  misc_RNA (1)...(19): siRNA sense strand
uucaaaaggagaaggaaaa

SEQ ID NO: 2586723 - RNA, 19 nt, Homo sapiens
  misc_RNA (1)...(19): siRNA sense strand
augaagaaggagaggacca

SEQ ID NO: 2586724 - RNA, 19 nt, Homo sapiens
  misc_RNA (1)...(19): siRNA sense strand
agaugaagcaguagccaga

SEQ ID NO: 2586725 - RNA, 19 nt, Homo sapiens
  misc_RNA (1)...(19): siRNA sense strand
uuaauauggacuuggacua

SEQ ID NO: 2586726 - RNA, 19 nt, Homo sapiens
  misc_RNA (1)...(19): siRNA sense strand
aaggagaggaccaagcuaa

SEQ ID NO: 2586727 - RNA, 19 nt, Homo sapiens
  misc_RNA (1)...(19): siRNA sense strand
ucagaaauaaggaugagaa

SEQ ID NO: 2586728 - RNA, 19 nt, Homo sapiens
  misc_RNA (1)...(19): siRNA sense strand
ugugagugcaguugagauu

SEQ ID NO: 2586729 - RNA, 19 nt, Homo sapiens
  misc_RNA (1)...(19): siRNA sense strand
ugaagaacucugugcugaa

SEQ ID NO: 2586730 - RNA, 19 nt, Homo sapiens
  misc_RNA (1)...(19): siRNA sense strand
cugacaaagcaaaugaaaa

SEQ ID NO: 2586731 - RNA, 19 nt, Homo sapiens
  misc_RNA (1)...(19): siRNA sense strand
auguuacccuaaugagaaa

SEQ ID NO: 2586732 - RNA, 19 nt, Homo sapiens
  misc_RNA (1)...(19): siRNA sense strand
aaauagaacaaucggaguu

SEQ ID NO: 2586733 - RNA, 19 nt, Homo sapiens
  misc_RNA (1)...(19): siRNA sense strand
cagaagauacugaaggugu

SEQ ID NO: 2586734 - RNA, 19 nt, Homo sapiens
  misc_RNA (1)...(19): siRNA sense strand
uggagaagucuguuaauga

SEQ ID NO: 2586735 - RNA, 19 nt, Homo sapiens
  misc_RNA (1)...(19): siRNA sense strand
gauaaagauguuuccggaa

SEQ ID NO: 2586736 - RNA, 19 nt, Homo sapiens
  misc_RNA (1)...(19): siRNA sense strand
cagcugugaaggaaagaau

SEQ ID NO: 2586737 - RNA, 19 nt, Homo sapiens
  misc_RNA (1)...(19): siRNA sense strand
ccucagaagaaaacaaaau

SEQ ID NO: 2586738 - RNA, 19 nt, Homo sapiens
  misc_RNA (1)...(19): siRNA sense strand
aauugaagguacugggaac

SEQ ID NO: 2586739 - RNA, 19 nt, Homo sapiens
  misc_RNA (1)...(19): siRNA sense strand
cuguaucaggaaugugaaa

SEQ ID NO: 2586740 - RNA, 19 nt, Homo sapiens
  misc_RNA (1)...(19): siRNA sense strand
cccaaagaagagaaagaaa

SEQ ID NO: 2586741 - RNA, 19 nt, Homo sapiens
  misc_RNA (1)...(19): siRNA sense strand
cgcccaaagaagagaaaga

SEQ ID NO: 2586742 - RNA, 19 nt, Homo sapiens
  misc_RNA (1)...(19): siRNA sense strand
cugaggauguggagcccaa

SEQ ID NO: 2586743 - RNA, 19 nt, Homo sapiens
  misc_RNA (1)...(19): siRNA sense strand
ugagaaccgugaagggaca

SEQ ID NO: 2586744 - RNA, 19 nt, Homo sapiens
  misc_RNA (1)...(19): siRNA sense strand
cuaacaaggugguuccaga

SEQ ID NO: 2586745 - RNA, 19 nt, Homo sapiens
  misc_RNA (1)...(19): siRNA sense strand
agucgggugcggaggcaaa

SEQ ID NO: 2586746 - RNA, 19 nt, Homo sapiens
  misc_RNA (1)...(19): siRNA sense strand
agucgggugcggaggcaaa

SEQ ID NO: 2586747 - RNA, 19 nt, Homo sapiens
  misc_RNA (1)...(19): siRNA sense strand
gcgcagaccacaaaagaca

SEQ ID NO: 2586748 - RNA, 19 nt, Homo sapiens
  misc_RNA (1)...(19): siRNA sense strand
aguuaagucuucagagccu

SEQ ID NO: 2586749 - RNA, 19 nt, Homo sapiens
  misc_RNA (1)...(19): siRNA sense strand
ggaaauggcagcgcggaga

SEQ ID NO: 2586750 - RNA, 19 nt, Homo sapiens
  misc_RNA (1)...(19): siRNA sense strand
gaagggacacuuucggauu

SEQ ID NO: 2586751 - RNA, 19 nt, Homo sapiens
  misc_RNA (1)...(19): siRNA sense strand
cggguagcgagaaggauga

SEQ ID NO: 2586752 - RNA, 19 nt, Homo sapiens
  misc_RNA (1)...(19): siRNA sense strand
agguggucuucgagggaua

SEQ ID NO: 2586753 - RNA, 19 nt, Homo sapiens
  misc_RNA (1)...(19): siRNA sense strand
aaugaauggucuucggcua

SEQ ID NO: 2586754 - RNA, 19 nt, Homo sapiens
  misc_RNA (1)...(19): siRNA sense strand
gaauauggugacuaggcaa

SEQ ID NO: 2586755 - RNA, 19 nt, Homo sapiens
  misc_RNA (1)...(19): siRNA sense strand
guauaaauguacagguggu

SEQ ID NO: 2586756 - RNA, 19 nt, Homo sapiens
  misc_RNA (1)...(19): siRNA sense strand
ggcuaauacucuagguucu

SEQ ID NO: 2586757 - RNA, 19 nt, Homo sapiens
  misc_RNA (1)...(19): siRNA sense strand
uggugucaucauugagaaa

SEQ ID NO: 2586758 - RNA, 19 nt, Homo sapiens
  misc_RNA (1)...(19): siRNA sense strand
ggcuaggauugaaggaaac

SEQ ID NO: 2586759 - RNA, 19 nt, Homo sapiens
  misc_RNA (1)...(19): siRNA sense strand
augacaggcauguuguaua

SEQ ID NO: 2586760 - RNA, 19 nt, Homo sapiens
  misc_RNA (1)...(19): siRNA sense strand
uauaauaacugggagcaca

SEQ ID NO: 2586761 - RNA, 19 nt, Homo sapiens
  misc_RNA (1)...(19): siRNA sense strand
guauaaucccugagaccca

SEQ ID NO: 2586762 - RNA, 19 nt, Homo sapiens
  misc_RNA (1)...(19): siRNA sense strand
uuauuguauuggaggguga

SEQ ID NO: 2586763 - RNA, 19 nt, Homo sapiens
  misc_RNA (1)...(19): siRNA sense strand
gugaaagcaaugaucgaga

SEQ ID NO: 2586764 - RNA, 19 nt, Homo sapiens
  misc_RNA (1)...(19): siRNA sense strand
auggaaagagacuggaaga

SEQ ID NO: 2586765 - RNA, 19 nt, Homo sapiens
  misc_RNA (1)...(19): siRNA sense strand
gaucuuaaagccacggaga

SEQ ID NO: 2586766 - RNA, 19 nt, Homo sapiens
  misc_RNA (1)...(19): siRNA sense strand
cccauaugacagcgugaaa

SEQ ID NO: 2586767 - RNA, 19 nt, Homo sapiens
  misc_RNA (1)...(19): siRNA sense strand
ggguauaaucccugagacc

SEQ ID NO: 2586768 - RNA, 19 nt, Homo sapiens
  misc_RNA (1)...(19): siRNA sense strand
cucaguggcacaagugaaa

SEQ ID NO: 2586769 - RNA, 19 nt, Homo sapiens
  misc_RNA (1)...(19): siRNA sense strand
uggaagaugggaagaugau

SEQ ID NO: 2586770 - RNA, 19 nt, Homo sapiens
  misc_RNA (1)...(19): siRNA sense strand
augggaagaugauggcaga

SEQ ID NO: 2586771 - RNA, 19 nt, Homo sapiens
  misc_RNA (1)...(19): siRNA sense strand
agaucaagauagugaggaa

SEQ ID NO: 2586772 - RNA, 19 nt, Homo sapiens
  misc_RNA (1)...(19): siRNA sense strand
cagagaaagauaauggaaa

SEQ ID NO: 2586773 - RNA, 19 nt, Homo sapiens
  misc_RNA (1)...(19): siRNA sense strand
agaaugaacaagagagaga

SEQ ID NO: 2586774 - RNA, 19 nt, Homo sapiens
  misc_RNA (1)...(19): siRNA sense strand
ugaucagagugguaagaaa

SEQ ID NO: 2586775 - RNA, 19 nt, Homo sapiens
  misc_RNA (1)...(19): siRNA sense strand
agaaacggacaaagggaaa

SEQ ID NO: 2586776 - RNA, 19 nt, Homo sapiens
  misc_RNA (1)...(19): siRNA sense strand
guucaaaccaguuggguca

SEQ ID NO: 2586777 - RNA, 19 nt, Homo sapiens
  misc_RNA (1)...(19): siRNA sense strand
agugaaagauaaagcugaa

SEQ ID NO: 2586778 - RNA, 19 nt, Homo sapiens
  misc_RNA (1)...(19): siRNA sense strand
gaacaaagguguaugaggu

SEQ ID NO: 2586779 - RNA, 19 nt, Homo sapiens
  misc_RNA (1)...(19): siRNA sense strand
gugaauguggaauggaaua

SEQ ID NO: 2586780 - RNA, 19 nt, Homo sapiens
  misc_RNA (1)...(19): siRNA sense strand
ggaagggagcaauggagaa

SEQ ID NO: 2586781 - RNA, 19 nt, Homo sapiens
  misc_RNA (1)...(19): siRNA sense strand
aagauaaagcugaagaaga

SEQ ID NO: 2586782 - RNA, 19 nt, Homo sapiens
  misc_RNA (1)...(19): siRNA sense strand
agagagaaaagaaggaaaa

SEQ ID NO: 2586783 - RNA, 19 nt, Homo sapiens
  misc_RNA (1)...(19): siRNA sense strand
cugaaaaguuggaugaaga

SEQ ID NO: 2586784 - RNA, 19 nt, Homo sapiens
  misc_RNA (1)...(19): siRNA sense strand
ggaugagagcagaagaaca

SEQ ID NO: 2586785 - RNA, 19 nt, Homo sapiens
  misc_RNA (1)...(19): siRNA sense strand
gaucagagugguaagaaaa

SEQ ID NO: 2586786 - RNA, 19 nt, Homo sapiens
  misc_RNA (1)...(19): siRNA sense strand
cgaaaguguaacugacaau

SEQ ID NO: 2586787 - RNA, 19 nt, Homo sapiens
  misc_RNA (1)...(19): siRNA sense strand
aaugaacaagagagagaaa

SEQ ID NO: 2586788 - RNA, 19 nt, Homo sapiens
  misc_RNA (1)...(19): siRNA sense strand
gagaaaagaaggaaaacau

SEQ ID NO: 2586789 - RNA, 19 nt, Homo sapiens
  misc_RNA (1)...(19): siRNA sense strand
auguaagaauguugcagaa

SEQ ID NO: 2586790 - RNA, 19 nt, Homo sapiens
  misc_RNA (1)...(19): siRNA sense strand
ccgugaaaggacucaguaa

SEQ ID NO: 2586791 - RNA, 19 nt, Homo sapiens
  misc_RNA (1)...(19): siRNA sense strand
uccaaagccagcagagaaa

SEQ ID NO: 2586792 - RNA, 19 nt, Homo sapiens
  misc_RNA (1)...(19): siRNA sense strand
agaaauaaaccuugagccu

SEQ ID NO: 2586793 - RNA, 19 nt, Homo sapiens
  misc_RNA (1)...(19): siRNA sense strand
gcaauggagaaguggacau

SEQ ID NO: 2586794 - RNA, 19 nt, Homo sapiens
  misc_RNA (1)...(19): siRNA sense strand
gguuguaaaugaagaucca

SEQ ID NO: 2586795 - RNA, 19 nt, Homo sapiens
  misc_RNA (1)...(19): siRNA sense strand
cagaagaacaccaaagagu

SEQ ID NO: 2586796 - RNA, 19 nt, Homo sapiens
  misc_RNA (1)...(19): siRNA sense strand
agacaguggaggaugaaga

SEQ ID NO: 2586797 - RNA, 19 nt, Homo sapiens
  misc_RNA (1)...(19): siRNA sense strand
uguaauggaccaaaggcaa

SEQ ID NO: 2586798 - RNA, 19 nt, Homo sapiens
  misc_RNA (1)...(19): siRNA sense strand
uaagaaugaacaagagaga

SEQ ID NO: 2586799 - RNA, 19 nt, Homo sapiens
  misc_RNA (1)...(19): siRNA sense strand
gagagagaaaagaaggaaa

SEQ ID NO: 2586800 - RNA, 19 nt, Homo sapiens
  misc_RNA (1)...(19): siRNA sense strand
aagcaaagaaacaagccaa

SEQ ID NO: 2586801 - RNA, 19 nt, Homo sapiens
  misc_RNA (1)...(19): siRNA sense strand
guucacccguaaugagaaa

SEQ ID NO: 2586802 - RNA, 19 nt, Homo sapiens
  misc_RNA (1)...(19): siRNA sense strand
caagauagugaggaagaaa

SEQ ID NO: 2586803 - RNA, 19 nt, Homo sapiens
  misc_RNA (1)...(19): siRNA sense strand
gugaauaugaagcugaaau

SEQ ID NO: 2586804 - RNA, 19 nt, Homo sapiens
  misc_RNA (1)...(19): siRNA sense strand
cugacaauaaagugaaaga

SEQ ID NO: 2586805 - RNA, 19 nt, Homo sapiens
  misc_RNA (1)...(19): siRNA sense strand
cgugaaaggacucaguaau

SEQ ID NO: 2586806 - RNA, 19 nt, Homo sapiens
  misc_RNA (1)...(19): siRNA sense strand
gugaaaaugucuggaacaa

SEQ ID NO: 2586807 - RNA, 19 nt, Homo sapiens
  misc_RNA (1)...(19): siRNA sense strand
ugggaugagagcagaagaa

SEQ ID NO: 2586808 - RNA, 19 nt, Homo sapiens
  misc_RNA (1)...(19): siRNA sense strand
aaggauuggaacaagguaa

SEQ ID NO: 2586809 - RNA, 19 nt, Homo sapiens
  misc_RNA (1)...(19): siRNA sense strand
agaagaaaauacaagggua

SEQ ID NO: 2586810 - RNA, 19 nt, Homo sapiens
  misc_RNA (1)...(19): siRNA sense strand
cagugaauaugaagcugaa

SEQ ID NO: 2586811 - RNA, 19 nt, Homo sapiens
  misc_RNA (1)...(19): siRNA sense strand
ccgcaucuuugguggugaa

SEQ ID NO: 2586812 - RNA, 19 nt, Homo sapiens
  misc_RNA (1)...(19): siRNA sense strand
gugcagacacauuagaaaa

SEQ ID NO: 2586813 - RNA, 19 nt, Homo sapiens
  misc_RNA (1)...(19): siRNA sense strand
ccaucagggcuguggcaga

SEQ ID NO: 2586814 - RNA, 19 nt, Homo sapiens
  misc_RNA (1)...(19): siRNA sense strand
agaaagauuugaauggcca

SEQ ID NO: 2586815 - RNA, 19 nt, Homo sapiens
  misc_RNA (1)...(19): siRNA sense strand
agaggaaguagauaugaaa

SEQ ID NO: 2586816 - RNA, 19 nt, Homo sapiens
  misc_RNA (1)...(19): siRNA sense strand
uuggacaacuggaguguau

SEQ ID NO: 2586817 - RNA, 19 nt, Homo sapiens
  misc_RNA (1)...(19): siRNA sense strand
ggaugggaugagagcagaa

SEQ ID NO: 2586818 - RNA, 19 nt, Homo sapiens
  misc_RNA (1)...(19): siRNA sense strand
agcaaagaaacaagccaaa

SEQ ID NO: 2586819 - RNA, 19 nt, Homo sapiens
  misc_RNA (1)...(19): siRNA sense strand
augagaugcaagagaccaa

SEQ ID NO: 2586820 - RNA, 19 nt, Homo sapiens
  misc_RNA (1)...(19): siRNA sense strand
caguggaggaugaagauca

SEQ ID NO: 2586821 - RNA, 19 nt, Homo sapiens
  misc_RNA (1)...(19): siRNA sense strand
aguggaggaugaagaucaa

SEQ ID NO: 2586822 - RNA, 19 nt, Homo sapiens
  misc_RNA (1)...(19): siRNA sense strand
acacauaaaguuuccggaa

SEQ ID NO: 2586823 - RNA, 19 nt, Homo sapiens
  misc_RNA (1)...(19): siRNA sense strand
aagaaacggacaaagggaa

SEQ ID NO: 2586824 - RNA, 19 nt, Homo sapiens
  misc_RNA (1)...(19): siRNA sense strand
uagugaauguggaauggaa

SEQ ID NO: 2586825 - RNA, 19 nt, Homo sapiens
  misc_RNA (1)...(19): siRNA sense strand
cugaagaagaaacagaaga

SEQ ID NO: 2586826 - RNA, 19 nt, Homo sapiens
  misc_RNA (1)...(19): siRNA sense strand
agagaguaagaaugaacaa

SEQ ID NO: 2586827 - RNA, 19 nt, Homo sapiens
  misc_RNA (1)...(19): siRNA sense strand
uuucaauacugaugagugu

SEQ ID NO: 2586828 - RNA, 19 nt, Homo sapiens
  misc_RNA (1)...(19): siRNA sense strand
cuccaaagccagcagagaa

SEQ ID NO: 2586829 - RNA, 19 nt, Homo sapiens
  misc_RNA (1)...(19): siRNA sense strand
cuuaaugagaugcaagaga

SEQ ID NO: 2586830 - RNA, 19 nt, Homo sapiens
  misc_RNA (1)...(19): siRNA sense strand
gagaauacauguucccgaa

SEQ ID NO: 2586831 - RNA, 19 nt, Homo sapiens
  misc_RNA (1)...(19): siRNA sense strand
ucauauuaucucagggaca

SEQ ID NO: 2586832 - RNA, 19 nt, Homo sapiens
  misc_RNA (1)...(19): siRNA sense strand
ggugagaaugagaugguga

SEQ ID NO: 2586833 - RNA, 19 nt, Homo sapiens
  misc_RNA (1)...(19): siRNA sense strand
guucagaagaucaggccuu

SEQ ID NO: 2586834 - RNA, 19 nt, Homo sapiens
  misc_RNA (1)...(19): siRNA sense strand
acucaagagacaaagaaaa

SEQ ID NO: 2586835 - RNA, 19 nt, Homo sapiens
  misc_RNA (1)...(19): siRNA sense strand
ugauaguggagguguguga

SEQ ID NO: 2586836 - RNA, 19 nt, Homo sapiens
  misc_RNA (1)...(19): siRNA sense strand
ccagccaacaggugagaau

SEQ ID NO: 2586837 - RNA, 19 nt, Homo sapiens
  misc_RNA (1)...(19): siRNA sense strand
ugucaaagccguuaggauc

SEQ ID NO: 2586838 - RNA, 19 nt, Homo sapiens
  misc_RNA (1)...(19): siRNA sense strand
ugucaauaccccugauuua

SEQ ID NO: 2586839 - RNA, 19 nt, Homo sapiens
  misc_RNA (1)...(19): siRNA sense strand
cgacuuauacugaggugga

SEQ ID NO: 2586840 - RNA, 19 nt, Homo sapiens
  misc_RNA (1)...(19): siRNA sense strand
cuggaaacaaauaugagua

SEQ ID NO: 2586841 - RNA, 19 nt, Homo sapiens
  misc_RNA (1)...(19): siRNA sense strand
gugucaaagccguuaggau

SEQ ID NO: 2586842 - RNA, 19 nt, Homo sapiens
  misc_RNA (1)...(19): siRNA sense strand
agccaacucaagagacaaa

SEQ ID NO: 2586843 - RNA, 19 nt, Homo sapiens
  misc_RNA (1)...(19): siRNA sense strand
ccaugcugacuuugagaau

SEQ ID NO: 2586844 - RNA, 19 nt, Homo sapiens
  misc_RNA (1)...(19): siRNA sense strand
cuucggaguaccugcgcua

SEQ ID NO: 2586845 - RNA, 19 nt, Homo sapiens
  misc_RNA (1)...(19): siRNA sense strand
uggcaagagccuucggguu

SEQ ID NO: 2586846 - RNA, 19 nt, Homo sapiens
  misc_RNA (1)...(19): siRNA sense strand
ggcaagagccuucggguuc

SEQ ID NO: 2586847 - RNA, 19 nt, Homo sapiens
  misc_RNA (1)...(19): siRNA sense strand
cauccuucgaguugaauau

SEQ ID NO: 2586848 - RNA, 19 nt, Homo sapiens
  misc_RNA (1)...(19): siRNA sense strand
uggcagcagaucaggucua

SEQ ID NO: 2586849 - RNA, 19 nt, Homo sapiens
  misc_RNA (1)...(19): siRNA sense strand
uggcagagauggaggagga

SEQ ID NO: 2586850 - RNA, 19 nt, Homo sapiens
  misc_RNA (1)...(19): siRNA sense strand
cuguagagaaugagcauau

SEQ ID NO: 2586851 - RNA, 19 nt, Homo sapiens
  misc_RNA (1)...(19): siRNA sense strand
ccgaagaaaagaagaaauu

SEQ ID NO: 2586852 - RNA, 19 nt, Homo sapiens
  misc_RNA (1)...(19): siRNA sense strand
aagaaauugaucagggauu

SEQ ID NO: 2586853 - RNA, 19 nt, Homo sapiens
  misc_RNA (1)...(19): siRNA sense strand
cuacagucucaaagggcaa

SEQ ID NO: 2586854 - RNA, 19 nt, Homo sapiens
  misc_RNA (1)...(19): siRNA sense strand
ggaccgaagaaaagaagaa

SEQ ID NO: 2586855 - RNA, 19 nt, Homo sapiens
  misc_RNA (1)...(19): siRNA sense strand
caaaugaaacgcuggcaga

SEQ ID NO: 2586856 - RNA, 19 nt, Homo sapiens
  misc_RNA (1)...(19): siRNA sense strand
agaagaaauugaucaggga

SEQ ID NO: 2586857 - RNA, 19 nt, Homo sapiens
  misc_RNA (1)...(19): siRNA sense strand
cagaaaucauagaagagcu

SEQ ID NO: 2586858 - RNA, 19 nt, Homo sapiens
  misc_RNA (1)...(19): siRNA sense strand
gugcaguaaaugugggaaa

SEQ ID NO: 2586859 - RNA, 19 nt, Homo sapiens
  misc_RNA (1)...(19): siRNA sense strand
ccucaauagccauaggaaa

SEQ ID NO: 2586860 - RNA, 19 nt, Homo sapiens
  misc_RNA (1)...(19): siRNA sense strand
gugcagucaaugugggaaa

SEQ ID NO: 2586861 - RNA, 19 nt, Homo sapiens
  misc_RNA (1)...(19): siRNA sense strand
ccuuaugaaugcagcgaau

SEQ ID NO: 2586862 - RNA, 19 nt, Homo sapiens
  misc_RNA (1)...(19): siRNA sense strand
gugcaaugaauguggaaaa

SEQ ID NO: 2586863 - RNA, 19 nt, Homo sapiens
  misc_RNA (1)...(19): siRNA sense strand
gggaaaucuuuuagccaaa

SEQ ID NO: 2586864 - RNA, 19 nt, Homo sapiens
  misc_RNA (1)...(19): siRNA sense strand
gggaaaucuuuuagccaaa

SEQ ID NO: 2586865 - RNA, 19 nt, Homo sapiens
  misc_RNA (1)...(19): siRNA sense strand
gggaaagcauguacgcgaa

SEQ ID NO: 2586866 - RNA, 19 nt, Homo sapiens
  misc_RNA (1)...(19): siRNA sense strand
ggaaaauccuuuagccgaa

SEQ ID NO: 2586867 - RNA, 19 nt, Homo sapiens
  misc_RNA (1)...(19): siRNA sense strand
gugcagugaauguagcaaa

SEQ ID NO: 2586868 - RNA, 19 nt, Homo sapiens
  misc_RNA (1)...(19): siRNA sense strand
augcaaugaauguggaaaa

SEQ ID NO: 2586869 - RNA, 19 nt, Homo sapiens
  misc_RNA (1)...(19): siRNA sense strand
augcagcgaaugugggaaa

SEQ ID NO: 2586870 - RNA, 19 nt, Homo sapiens
  misc_RNA (1)...(19): siRNA sense strand
aguucacacuggagaaaga

SEQ ID NO: 2586871 - RNA, 19 nt, Homo sapiens
  misc_RNA (1)...(19): siRNA sense strand
cccuaugagugcaguaaau

SEQ ID NO: 2586872 - RNA, 19 nt, Homo sapiens
  misc_RNA (1)...(19): siRNA sense strand
aguucacacuggagaaaga

SEQ ID NO: 2586873 - RNA, 19 nt, Homo sapiens
  misc_RNA (1)...(19): siRNA sense strand
gaguggaacaugaggaaac

SEQ ID NO: 2586874 - RNA, 19 nt, Homo sapiens
  misc_RNA (1)...(19): siRNA sense strand
augugaugcuggagaacuu

SEQ ID NO: 2586875 - RNA, 19 nt, Homo sapiens
  misc_RNA (1)...(19): siRNA sense strand
agccaaaguucuagccuca

SEQ ID NO: 2586876 - RNA, 19 nt, Homo sapiens
  misc_RNA (1)...(19): siRNA sense strand
ccacagacucggauggcga

SEQ ID NO: 2586877 - RNA, 19 nt, Homo sapiens
  misc_RNA (1)...(19): siRNA sense strand
acuucacacuggagaaaga

SEQ ID NO: 2586878 - RNA, 19 nt, Homo sapiens
  misc_RNA (1)...(19): siRNA sense strand
aguaaaugugggaaagcau

SEQ ID NO: 2586879 - RNA, 19 nt, Homo sapiens
  misc_RNA (1)...(19): siRNA sense strand
caguaaaugugggaaguca

SEQ ID NO: 2586880 - RNA, 19 nt, Homo sapiens
  misc_RNA (1)...(19): siRNA sense strand
ccuguugagugcagugaau

SEQ ID NO: 2586881 - RNA, 19 nt, Homo sapiens
  misc_RNA (1)...(19): siRNA sense strand
gagaguucacauuggagaa

SEQ ID NO: 2586882 - RNA, 19 nt, Homo sapiens
  misc_RNA (1)...(19): siRNA sense strand
gugcaaaucuucaacagca

SEQ ID NO: 2586883 - RNA, 19 nt, Homo sapiens
  misc_RNA (1)...(19): siRNA sense strand
gugcccugaaugugggaaa

SEQ ID NO: 2586884 - RNA, 19 nt, Homo sapiens
  misc_RNA (1)...(19): siRNA sense strand
ccuuaucagugcagucaau

SEQ ID NO: 2586885 - RNA, 19 nt, Homo sapiens
  misc_RNA (1)...(19): siRNA sense strand
ucgaugugaugcuggagaa

SEQ ID NO: 2586886 - RNA, 19 nt, Homo sapiens
  misc_RNA (1)...(19): siRNA sense strand
gguccaaccucaugcagca

SEQ ID NO: 2586887 - RNA, 19 nt, Homo sapiens
  misc_RNA (1)...(19): siRNA sense strand
cuucaguucacaucggaaa

SEQ ID NO: 2586888 - RNA, 19 nt, Homo sapiens
  misc_RNA (1)...(19): siRNA sense strand
agaaagaccuguugagugc

SEQ ID NO: 2586889 - RNA, 19 nt, Homo sapiens
  misc_RNA (1)...(19): siRNA sense strand
agcaaauccuuuagcugua

SEQ ID NO: 2586890 - RNA, 19 nt, Homo sapiens
  misc_RNA (1)...(19): siRNA sense strand
ucauuaaacaccugagagu

SEQ ID NO: 2586891 - RNA, 19 nt, Homo sapiens
  misc_RNA (1)...(19): siRNA sense strand
uggaguggaacaugaggaa

SEQ ID NO: 2586892 - RNA, 19 nt, Homo sapiens
  misc_RNA (1)...(19): siRNA sense strand
ggcugaacaccaaggaaca

SEQ ID NO: 2586893 - RNA, 19 nt, Homo sapiens
  misc_RNA (1)...(19): siRNA sense strand
cugcagggagaucaggaaa

SEQ ID NO: 2586894 - RNA, 19 nt, Homo sapiens
  misc_RNA (1)...(19): siRNA sense strand
agucagauauacagccuca

SEQ ID NO: 2586895 - RNA, 19 nt, Homo sapiens
  misc_RNA (1)...(19): siRNA sense strand
cucaauagccauaggaaag

SEQ ID NO: 2586896 - RNA, 19 nt, Homo sapiens
  misc_RNA (1)...(19): siRNA sense strand
agaaagaccucaugagugc

SEQ ID NO: 2586897 - RNA, 19 nt, Homo sapiens
  misc_RNA (1)...(19): siRNA sense strand
guguggggaaugugggaaa

SEQ ID NO: 2586898 - RNA, 19 nt, Homo sapiens
  misc_RNA (1)...(19): siRNA sense strand
ugggaaauccuuuagccaa

SEQ ID NO: 2586899 - RNA, 19 nt, Homo sapiens
  misc_RNA (1)...(19): siRNA sense strand
accagaaaguccacaguga

SEQ ID NO: 2586900 - RNA, 19 nt, Homo sapiens
  misc_RNA (1)...(19): siRNA sense strand
guggaaaauucuuuaccua

SEQ ID NO: 2586901 - RNA, 19 nt, Homo sapiens
  misc_RNA (1)...(19): siRNA sense strand
gugcaguaaaugugggaag

SEQ ID NO: 2586902 - RNA, 19 nt, Homo sapiens
  misc_RNA (1)...(19): siRNA sense strand
gugccacaguucaggacuu

SEQ ID NO: 2586903 - RNA, 19 nt, Homo sapiens
  misc_RNA (1)...(19): siRNA sense strand
gggcagaaacuacacacau

SEQ ID NO: 2586904 - RNA, 19 nt, Homo sapiens
  misc_RNA (1)...(19): siRNA sense strand
aaacaggggagaagccaaa

SEQ ID NO: 2586905 - RNA, 19 nt, Homo sapiens
  misc_RNA (1)...(19): siRNA sense strand
ggaaaguucacacuggaga

SEQ ID NO: 2586906 - RNA, 19 nt, Homo sapiens
  misc_RNA (1)...(19): siRNA sense strand
gagacuucacacuggagaa

SEQ ID NO: 2586907 - RNA, 19 nt, Homo sapiens
  misc_RNA (1)...(19): siRNA sense strand
ugggaagucauuuaagcaa

SEQ ID NO: 2586908 - RNA, 19 nt, Homo sapiens
  misc_RNA (1)...(19): siRNA sense strand
aagccaaauaacaguaaca

SEQ ID NO: 2586909 - RNA, 19 nt, Homo sapiens
  misc_RNA (1)...(19): siRNA sense strand
caucacaacuggggaaaau

SEQ ID NO: 2586910 - RNA, 19 nt, Homo sapiens
  misc_RNA (1)...(19): siRNA sense strand
ugggaaagcauguacgcga

SEQ ID NO: 2586911 - RNA, 19 nt, Homo sapiens
  misc_RNA (1)...(19): siRNA sense strand
cagaguucacacuggagaa

SEQ ID NO: 2586912 - RNA, 19 nt, Homo sapiens
  misc_RNA (1)...(19): siRNA sense strand
ccucacuagagaaggacuu

SEQ ID NO: 2586913 - RNA, 19 nt, Homo sapiens
  misc_RNA (1)...(19): siRNA sense strand
ccucauucagcaccagaaa

SEQ ID NO: 2586914 - RNA, 19 nt, Homo sapiens
  misc_RNA (1)...(19): siRNA sense strand
aguaaaugugggaagucau

SEQ ID NO: 2586915 - RNA, 19 nt, Homo sapiens
  misc_RNA (1)...(19): siRNA sense strand
ccuuaagaaccaccagaga

SEQ ID NO: 2586916 - RNA, 19 nt, Homo sapiens
  misc_RNA (1)...(19): siRNA sense strand
uuaagaaccaccagagagu

SEQ ID NO: 2586917 - RNA, 19 nt, Homo sapiens
  misc_RNA (1)...(19): siRNA sense strand
gugcaguaaaugugggaaa

SEQ ID NO: 2586918 - RNA, 19 nt, Homo sapiens
  misc_RNA (1)...(19): siRNA sense strand
ccucaauagccauaggaaa

SEQ ID NO: 2586919 - RNA, 19 nt, Homo sapiens
  misc_RNA (1)...(19): siRNA sense strand
gugcagucaaugugggaaa

SEQ ID NO: 2586920 - RNA, 19 nt, Homo sapiens
  misc_RNA (1)...(19): siRNA sense strand
ccuuaugaaugcagcgaau

SEQ ID NO: 2586921 - RNA, 19 nt, Homo sapiens
  misc_RNA (1)...(19): siRNA sense strand
gugcaaugaauguggaaaa

SEQ ID NO: 2586922 - RNA, 19 nt, Homo sapiens
  misc_RNA (1)...(19): siRNA sense strand
gggaaaucuuuuagccaaa

SEQ ID NO: 2586923 - RNA, 19 nt, Homo sapiens
  misc_RNA (1)...(19): siRNA sense strand
gggaaaucuuuuagccaaa

SEQ ID NO: 2586924 - RNA, 19 nt, Homo sapiens
  misc_RNA (1)...(19): siRNA sense strand
gggaaagcauguacgcgaa

SEQ ID NO: 2586925 - RNA, 19 nt, Homo sapiens
  misc_RNA (1)...(19): siRNA sense strand
ggaaaauccuuuagccgaa

SEQ ID NO: 2586926 - RNA, 19 nt, Homo sapiens
  misc_RNA (1)...(19): siRNA sense strand
gugcagugaauguagcaaa

SEQ ID NO: 2586927 - RNA, 19 nt, Homo sapiens
  misc_RNA (1)...(19): siRNA sense strand
augcaaugaauguggaaaa

SEQ ID NO: 2586928 - RNA, 19 nt, Homo sapiens
  misc_RNA (1)...(19): siRNA sense strand
augcagcgaaugugggaaa

SEQ ID NO: 2586929 - RNA, 19 nt, Homo sapiens
  misc_RNA (1)...(19): siRNA sense strand
aguucacacuggagaaaga

SEQ ID NO: 2586930 - RNA, 19 nt, Homo sapiens
  misc_RNA (1)...(19): siRNA sense strand
cccuaugagugcaguaaau

SEQ ID NO: 2586931 - RNA, 19 nt, Homo sapiens
  misc_RNA (1)...(19): siRNA sense strand
aguucacacuggagaaaga

SEQ ID NO: 2586932 - RNA, 19 nt, Homo sapiens
  misc_RNA (1)...(19): siRNA sense strand
gaguggaacaugaggaaac

SEQ ID NO: 2586933 - RNA, 19 nt, Homo sapiens
  misc_RNA (1)...(19): siRNA sense strand
augugaugcuggagaacuu

SEQ ID NO: 2586934 - RNA, 19 nt, Homo sapiens
  misc_RNA (1)...(19): siRNA sense strand
agccaaaguucuagccuca

SEQ ID NO: 2586935 - RNA, 19 nt, Homo sapiens
  misc_RNA (1)...(19): siRNA sense strand
ccacagacucggauggcga

SEQ ID NO: 2586936 - RNA, 19 nt, Homo sapiens
  misc_RNA (1)...(19): siRNA sense strand
acuucacacuggagaaaga

SEQ ID NO: 2586937 - RNA, 19 nt, Homo sapiens
  misc_RNA (1)...(19): siRNA sense strand
aguaaaugugggaaagcau

SEQ ID NO: 2586938 - RNA, 19 nt, Homo sapiens
  misc_RNA (1)...(19): siRNA sense strand
caguaaaugugggaaguca

SEQ ID NO: 2586939 - RNA, 19 nt, Homo sapiens
  misc_RNA (1)...(19): siRNA sense strand
ccuguugagugcagugaau

SEQ ID NO: 2586940 - RNA, 19 nt, Homo sapiens
  misc_RNA (1)...(19): siRNA sense strand
gagaguucacauuggagaa

SEQ ID NO: 2586941 - RNA, 19 nt, Homo sapiens
  misc_RNA (1)...(19): siRNA sense strand
gugcaaaucuucaacagca

SEQ ID NO: 2586942 - RNA, 19 nt, Homo sapiens
  misc_RNA (1)...(19): siRNA sense strand
gugcccugaaugugggaaa

SEQ ID NO: 2586943 - RNA, 19 nt, Homo sapiens
  misc_RNA (1)...(19): siRNA sense strand
ccuuaucagugcagucaau

SEQ ID NO: 2586944 - RNA, 19 nt, Homo sapiens
  misc_RNA (1)...(19): siRNA sense strand
ucgaugugaugcuggagaa

SEQ ID NO: 2586945 - RNA, 19 nt, Homo sapiens
  misc_RNA (1)...(19): siRNA sense strand
gguccaaccucaugcagca

SEQ ID NO: 2586946 - RNA, 19 nt, Homo sapiens
  misc_RNA (1)...(19): siRNA sense strand
cuucaguucacaucggaaa

SEQ ID NO: 2586947 - RNA, 19 nt, Homo sapiens
  misc_RNA (1)...(19): siRNA sense strand
agaaagaccuguugagugc

SEQ ID NO: 2586948 - RNA, 19 nt, Homo sapiens
  misc_RNA (1)...(19): siRNA sense strand
agcaaauccuuuagcugua

SEQ ID NO: 2586949 - RNA, 19 nt, Homo sapiens
  misc_RNA (1)...(19): siRNA sense strand
ucauuaaacaccugagagu

SEQ ID NO: 2586950 - RNA, 19 nt, Homo sapiens
  misc_RNA (1)...(19): siRNA sense strand
uggaguggaacaugaggaa

SEQ ID NO: 2586951 - RNA, 19 nt, Homo sapiens
  misc_RNA (1)...(19): siRNA sense strand
ggcugaacaccaaggaaca

SEQ ID NO: 2586952 - RNA, 19 nt, Homo sapiens
  misc_RNA (1)...(19): siRNA sense strand
cugcagggagaucaggaaa

SEQ ID NO: 2586953 - RNA, 19 nt, Homo sapiens
  misc_RNA (1)...(19): siRNA sense strand
agucagauauacagccuca

SEQ ID NO: 2586954 - RNA, 19 nt, Homo sapiens
  misc_RNA (1)...(19): siRNA sense strand
cucaauagccauaggaaag

SEQ ID NO: 2586955 - RNA, 19 nt, Homo sapiens
  misc_RNA (1)...(19): siRNA sense strand
agaaagaccucaugagugc

SEQ ID NO: 2586956 - RNA, 19 nt, Homo sapiens
  misc_RNA (1)...(19): siRNA sense strand
guguggggaaugugggaaa

SEQ ID NO: 2586957 - RNA, 19 nt, Homo sapiens
  misc_RNA (1)...(19): siRNA sense strand
ugggaaauccuuuagccaa

SEQ ID NO: 2586958 - RNA, 19 nt, Homo sapiens
  misc_RNA (1)...(19): siRNA sense strand
accagaaaguccacaguga

SEQ ID NO: 2586959 - RNA, 19 nt, Homo sapiens
  misc_RNA (1)...(19): siRNA sense strand
guggaaaauucuuuaccua

SEQ ID NO: 2586960 - RNA, 19 nt, Homo sapiens
  misc_RNA (1)...(19): siRNA sense strand
gugcaguaaaugugggaag

SEQ ID NO: 2586961 - RNA, 19 nt, Homo sapiens
  misc_RNA (1)...(19): siRNA sense strand
gugccacaguucaggacuu

SEQ ID NO: 2586962 - RNA, 19 nt, Homo sapiens
  misc_RNA (1)...(19): siRNA sense strand
gggcagaaacuacacacau

SEQ ID NO: 2586963 - RNA, 19 nt, Homo sapiens
  misc_RNA (1)...(19): siRNA sense strand
aaacaggggagaagccaaa

SEQ ID NO: 2586964 - RNA, 19 nt, Homo sapiens
  misc_RNA (1)...(19): siRNA sense strand
ggaaaguucacacuggaga

SEQ ID NO: 2586965 - RNA, 19 nt, Homo sapiens
  misc_RNA (1)...(19): siRNA sense strand
gagacuucacacuggagaa

SEQ ID NO: 2586966 - RNA, 19 nt, Homo sapiens
  misc_RNA (1)...(19): siRNA sense strand
ugggaagucauuuaagcaa

SEQ ID NO: 2586967 - RNA, 19 nt, Homo sapiens
  misc_RNA (1)...(19): siRNA sense strand
aagccaaauaacaguaaca

SEQ ID NO: 2586968 - RNA, 19 nt, Homo sapiens
  misc_RNA (1)...(19): siRNA sense strand
caucacaacuggggaaaau

SEQ ID NO: 2586969 - RNA, 19 nt, Homo sapiens
  misc_RNA (1)...(19): siRNA sense strand
ugggaaagcauguacgcga

SEQ ID NO: 2586970 - RNA, 19 nt, Homo sapiens
  misc_RNA (1)...(19): siRNA sense strand
cagaguucacacuggagaa

SEQ ID NO: 2586971 - RNA, 19 nt, Homo sapiens
  misc_RNA (1)...(19): siRNA sense strand
ccucacuagagaaggacuu

SEQ ID NO: 2586972 - RNA, 19 nt, Homo sapiens
  misc_RNA (1)...(19): siRNA sense strand
ccucauucagcaccagaaa

SEQ ID NO: 2586973 - RNA, 19 nt, Homo sapiens
  misc_RNA (1)...(19): siRNA sense strand
aguaaaugugggaagucau

SEQ ID NO: 2586974 - RNA, 19 nt, Homo sapiens
  misc_RNA (1)...(19): siRNA sense strand
ccuuaagaaccaccagaga

SEQ ID NO: 2586975 - RNA, 19 nt, Homo sapiens
  misc_RNA (1)...(19): siRNA sense strand
uuaagaaccaccagagagu

SEQ ID NO: 2586976 - RNA, 19 nt, Homo sapiens
  misc_RNA (1)...(19): siRNA sense strand
auguaaagaaugugggaaa

SEQ ID NO: 2586977 - RNA, 19 nt, Homo sapiens
  misc_RNA (1)...(19): siRNA sense strand
guguaaugugugugguaaa

SEQ ID NO: 2586978 - RNA, 19 nt, Homo sapiens
  misc_RNA (1)...(19): siRNA sense strand
auguaaugagugugggaaa

SEQ ID NO: 2586979 - RNA, 19 nt, Homo sapiens
  misc_RNA (1)...(19): siRNA sense strand
auguaaugagugugggaaa

SEQ ID NO: 2586980 - RNA, 19 nt, Homo sapiens
  misc_RNA (1)...(19): siRNA sense strand
cuguaaggaguguggcaaa

SEQ ID NO: 2586981 - RNA, 19 nt, Homo sapiens
  misc_RNA (1)...(19): siRNA sense strand
gugugaugagugugggaaa

SEQ ID NO: 2586982 - RNA, 19 nt, Homo sapiens
  misc_RNA (1)...(19): siRNA sense strand
uuggaaaggcagauugaua

SEQ ID NO: 2586983 - RNA, 19 nt, Homo sapiens
  misc_RNA (1)...(19): siRNA sense strand
acaagagagacgacauaaa

SEQ ID NO: 2586984 - RNA, 19 nt, Homo sapiens
  misc_RNA (1)...(19): siRNA sense strand
augugaugaaugugggaaa

SEQ ID NO: 2586985 - RNA, 19 nt, Homo sapiens
  misc_RNA (1)...(19): siRNA sense strand
ucgucaagguagaggagga

SEQ ID NO: 2586986 - RNA, 19 nt, Homo sapiens
  misc_RNA (1)...(19): siRNA sense strand
aggagugagaacagggaau

SEQ ID NO: 2586987 - RNA, 19 nt, Homo sapiens
  misc_RNA (1)...(19): siRNA sense strand
gggaaaaccuucaggcgga

SEQ ID NO: 2586988 - RNA, 19 nt, Homo sapiens
  misc_RNA (1)...(19): siRNA sense strand
ggucaagucucauucgaca

SEQ ID NO: 2586989 - RNA, 19 nt, Homo sapiens
  misc_RNA (1)...(19): siRNA sense strand
cuauuagaggauuuggaaa

SEQ ID NO: 2586990 - RNA, 19 nt, Homo sapiens
  misc_RNA (1)...(19): siRNA sense strand
gcucacaccucauuggaca

SEQ ID NO: 2586991 - RNA, 19 nt, Homo sapiens
  misc_RNA (1)...(19): siRNA sense strand
gagugagaacagggaauua

SEQ ID NO: 2586992 - RNA, 19 nt, Homo sapiens
  misc_RNA (1)...(19): siRNA sense strand
ccucauuggacaucagaga

SEQ ID NO: 2586993 - RNA, 19 nt, Homo sapiens
  misc_RNA (1)...(19): siRNA sense strand
uuguaaucgucaagguaga

SEQ ID NO: 2586994 - RNA, 19 nt, Homo sapiens
  misc_RNA (1)...(19): siRNA sense strand
caguguaauguguguggua

SEQ ID NO: 2586995 - RNA, 19 nt, Homo sapiens
  misc_RNA (1)...(19): siRNA sense strand
ggucaucagaggagccaca

SEQ ID NO: 2586996 - RNA, 19 nt, Homo sapiens
  misc_RNA (1)...(19): siRNA sense strand
aaguaacccucuuggccaa

SEQ ID NO: 2586997 - RNA, 19 nt, Homo sapiens
  misc_RNA (1)...(19): siRNA sense strand
gaaaggaaguucuggagac

SEQ ID NO: 2586998 - RNA, 19 nt, Homo sapiens
  misc_RNA (1)...(19): siRNA sense strand
ccagccacauggagagaca

SEQ ID NO: 2586999 - RNA, 19 nt, Homo sapiens
  misc_RNA (1)...(19): siRNA sense strand
ucauuggacaucagagaau

SEQ ID NO: 2587000 - RNA, 19 nt, Homo sapiens
  misc_RNA (1)...(19): siRNA sense strand
ucaagguagaggaggauca

SEQ ID NO: 2587001 - RNA, 19 nt, Homo sapiens
  misc_RNA (1)...(19): siRNA sense strand
gagaggagguggugacccu

SEQ ID NO: 2587002 - RNA, 19 nt, Homo sapiens
  misc_RNA (1)...(19): siRNA sense strand
acaacaaaguaaaacgcua

SEQ ID NO: 2587003 - RNA, 19 nt, Homo sapiens
  misc_RNA (1)...(19): siRNA sense strand
cguacauggacauagggua

SEQ ID NO: 2587004 - RNA, 19 nt, Homo sapiens
  misc_RNA (1)...(19): siRNA sense strand
gcucacaucuuauugguca

SEQ ID NO: 2587005 - RNA, 19 nt, Homo sapiens
  misc_RNA (1)...(19): siRNA sense strand
uggagaaagacccuauaaa

SEQ ID NO: 2587006 - RNA, 19 nt, Homo sapiens
  misc_RNA (1)...(19): siRNA sense strand
cugaggagcuccagacacu

SEQ ID NO: 2587007 - RNA, 19 nt, Homo sapiens
  misc_RNA (1)...(19): siRNA sense strand
gaccaggaaaugacagcua

SEQ ID NO: 2587008 - RNA, 19 nt, Homo sapiens
  misc_RNA (1)...(19): siRNA sense strand
uggagagacagcugccaaa

SEQ ID NO: 2587009 - RNA, 19 nt, Homo sapiens
  misc_RNA (1)...(19): siRNA sense strand
ugacccuauuagaggauuu

SEQ ID NO: 2587010 - RNA, 19 nt, Homo sapiens
  misc_RNA (1)...(19): siRNA sense strand
agacuuuggagaagauuga

SEQ ID NO: 2587011 - RNA, 19 nt, Homo sapiens
  misc_RNA (1)...(19): siRNA sense strand
ccuuauugaacaucagaga

SEQ ID NO: 2587012 - RNA, 19 nt, Homo sapiens
  misc_RNA (1)...(19): siRNA sense strand
gauugauauacuaggacga

SEQ ID NO: 2587013 - RNA, 19 nt, Homo sapiens
  misc_RNA (1)...(19): siRNA sense strand
caacaaaguaaaacgcuau

SEQ ID NO: 2587014 - RNA, 19 nt, Homo sapiens
  misc_RNA (1)...(19): siRNA sense strand
gccuuuauucagaggucaa

SEQ ID NO: 2587015 - RNA, 19 nt, Homo sapiens
  misc_RNA (1)...(19): siRNA sense strand
guguagagauaacaggcca

SEQ ID NO: 2587016 - RNA, 19 nt, Homo sapiens
  misc_RNA (1)...(19): siRNA sense strand
ccaaauacucagcuccaau

SEQ ID NO: 2587017 - RNA, 19 nt, Homo sapiens
  misc_RNA (1)...(19): siRNA sense strand
gugggaaggcuuucaguca

SEQ ID NO: 2587018 - RNA, 19 nt, Homo sapiens
  misc_RNA (1)...(19): siRNA sense strand
uauuagaggauuuggaaag

SEQ ID NO: 2587019 - RNA, 19 nt, Homo sapiens
  misc_RNA (1)...(19): siRNA sense strand
gaauguaaugaguguggga

SEQ ID NO: 2587020 - RNA, 19 nt, Homo sapiens
  misc_RNA (1)...(19): siRNA sense strand
auuugaacaccaaggaaca

SEQ ID NO: 2587021 - RNA, 19 nt, Homo sapiens
  misc_RNA (1)...(19): siRNA sense strand
ugauauacuaggacgacca

SEQ ID NO: 2587022 - RNA, 19 nt, Homo sapiens
  misc_RNA (1)...(19): siRNA sense strand
agguaauaucuacuggaau

SEQ ID NO: 2587023 - RNA, 19 nt, Homo sapiens
  misc_RNA (1)...(19): siRNA sense strand
uaucaggggucuugagcau

SEQ ID NO: 2587024 - RNA, 19 nt, Homo sapiens
  misc_RNA (1)...(19): siRNA sense strand
agucauagcucacaccuca

SEQ ID NO: 2587025 - RNA, 19 nt, Homo sapiens
  misc_RNA (1)...(19): siRNA sense strand
gcuacaaauacgugggaau

SEQ ID NO: 2587026 - RNA, 19 nt, Homo sapiens
  misc_RNA (1)...(19): siRNA sense strand
ccaauguggcuauggccua

SEQ ID NO: 2587027 - RNA, 19 nt, Homo sapiens
  misc_RNA (1)...(19): siRNA sense strand
ggcacugggcauucagaaa

SEQ ID NO: 2587028 - RNA, 19 nt, Homo sapiens
  misc_RNA (1)...(19): siRNA sense strand
uggccaagaacaagagcaa

SEQ ID NO: 2587029 - RNA, 19 nt, Homo sapiens
  misc_RNA (1)...(19): siRNA sense strand
uggaguuggccaagaacaa

SEQ ID NO: 2587030 - RNA, 19 nt, Homo sapiens
  misc_RNA (1)...(19): siRNA sense strand
ccaaguaccugcaggaccu

SEQ ID NO: 2587031 - RNA, 19 nt, Homo sapiens
  misc_RNA (1)...(19): siRNA sense strand
gagaagaccuccaaagcug

SEQ ID NO: 2587032 - RNA, 19 nt, Homo sapiens
  misc_RNA (1)...(19): siRNA sense strand
gcgcgagcguuaugggaag

SEQ ID NO: 2587033 - RNA, 19 nt, Homo sapiens
  misc_RNA (1)...(19): siRNA sense strand
ggguaaagcccaaggagcc

SEQ ID NO: 2587034 - RNA, 19 nt, Homo sapiens
  misc_RNA (1)...(19): siRNA sense strand
cugaaagcgcugugagcua

SEQ ID NO: 2587035 - RNA, 19 nt, Homo sapiens
  misc_RNA (1)...(19): siRNA sense strand
uggaaaguuuaauggccaa

SEQ ID NO: 2587036 - RNA, 19 nt, Homo sapiens
  misc_RNA (1)...(19): siRNA sense strand
cauccagagaacccagaaa

SEQ ID NO: 2587037 - RNA, 19 nt, Homo sapiens
  misc_RNA (1)...(19): siRNA sense strand
ugucaguuaaugagagguu

SEQ ID NO: 2587038 - RNA, 19 nt, Homo sapiens
  misc_RNA (1)...(19): siRNA sense strand
guuaaugagagguuggugu

SEQ ID NO: 2587039 - RNA, 19 nt, Homo sapiens
  misc_RNA (1)...(19): siRNA sense strand
uuggaaaguuuaauggcca

SEQ ID NO: 2587040 - RNA, 19 nt, Homo sapiens
  misc_RNA (1)...(19): siRNA sense strand
gggaaauauagcagcaauu

SEQ ID NO: 2587041 - RNA, 19 nt, Homo sapiens
  misc_RNA (1)...(19): siRNA sense strand
agaugugacuggugaagaa

SEQ ID NO: 2587042 - RNA, 19 nt, Homo sapiens
  misc_RNA (1)...(19): siRNA sense strand
ggcagaaaauggagagaau

SEQ ID NO: 2587043 - RNA, 19 nt, Homo sapiens
  misc_RNA (1)...(19): siRNA sense strand
uguuagagaacgagcaauu

SEQ ID NO: 2587044 - RNA, 19 nt, Homo sapiens
  misc_RNA (1)...(19): siRNA sense strand
gccaaauacuucaaggaga

SEQ ID NO: 2587045 - RNA, 19 nt, Homo sapiens
  misc_RNA (1)...(19): siRNA sense strand
aggaaguggaagagcuuau

SEQ ID NO: 2587046 - RNA, 19 nt, Homo sapiens
  misc_RNA (1)...(19): siRNA sense strand
uuguagaguugguggcuga

SEQ ID NO: 2587047 - RNA, 19 nt, Homo sapiens
  misc_RNA (1)...(19): siRNA sense strand
ccaaauacuucaaggagag

SEQ ID NO: 2587048 - RNA, 19 nt, Homo sapiens
  misc_RNA (1)...(19): siRNA sense strand
cagccaaacugaaugcaga

SEQ ID NO: 2587049 - RNA, 19 nt, Homo sapiens
  misc_RNA (1)...(19): siRNA sense strand
uagaggagcuuuaccgcaa

SEQ ID NO: 2587050 - RNA, 19 nt, Homo sapiens
  misc_RNA (1)...(19): siRNA sense strand
guacuaaggaaaagcgauu

SEQ ID NO: 2587051 - RNA, 19 nt, Homo sapiens
  misc_RNA (1)...(19): siRNA sense strand
cugugaggaugaagaugua

SEQ ID NO: 2587052 - RNA, 19 nt, Homo sapiens
  misc_RNA (1)...(19): siRNA sense strand
uggagagaaugcugguaau

SEQ ID NO: 2587053 - RNA, 19 nt, Homo sapiens
  misc_RNA (1)...(19): siRNA sense strand
augaagaacccaagcuaca

SEQ ID NO: 2587054 - RNA, 19 nt, Homo sapiens
  misc_RNA (1)...(19): siRNA sense strand
ucaauuugccacuggagaa

SEQ ID NO: 2587055 - RNA, 19 nt, Homo sapiens
  misc_RNA (1)...(19): siRNA sense strand
uuacagacagugaguggaa

SEQ ID NO: 2587056 - RNA, 19 nt, Homo sapiens
  misc_RNA (1)...(19): siRNA sense strand
agugaguggaagacagcaa

SEQ ID NO: 2587057 - RNA, 19 nt, Homo sapiens
  misc_RNA (1)...(19): siRNA sense strand
acgucaagcaauuaaagaa

SEQ ID NO: 2587058 - RNA, 19 nt, Homo sapiens
  misc_RNA (1)...(19): siRNA sense strand
guggaauguuuguuguaca

SEQ ID NO: 2587059 - RNA, 19 nt, Homo sapiens
  misc_RNA (1)...(19): siRNA sense strand
aaaggugguacuaaggaaa

SEQ ID NO: 2587060 - RNA, 19 nt, Homo sapiens
  misc_RNA (1)...(19): siRNA sense strand
caaaggaaguggaagagcu

SEQ ID NO: 2587061 - RNA, 19 nt, Homo sapiens
  misc_RNA (1)...(19): siRNA sense strand
gguggguuguucagccaaa

SEQ ID NO: 2587062 - RNA, 19 nt, Homo sapiens
  misc_RNA (1)...(19): siRNA sense strand
ugugacuggugaagaauuu

SEQ ID NO: 2587063 - RNA, 19 nt, Homo sapiens
  misc_RNA (1)...(19): siRNA sense strand
uuauaagagcacaguaaca

SEQ ID NO: 2587064 - RNA, 19 nt, Homo sapiens
  misc_RNA (1)...(19): siRNA sense strand
agcaagugggccagcauaa

SEQ ID NO: 2587065 - RNA, 19 nt, Homo sapiens
  misc_RNA (1)...(19): siRNA sense strand
cuuaacaaaggaaguggaa

SEQ ID NO: 2587066 - RNA, 19 nt, Homo sapiens
  misc_RNA (1)...(19): siRNA sense strand
auggagagaaugcugguaa

SEQ ID NO: 2587067 - RNA, 19 nt, Homo sapiens
  misc_RNA (1)...(19): siRNA sense strand
acuuaagacuuuaccagau

SEQ ID NO: 2587068 - RNA, 19 nt, Homo sapiens
  misc_RNA (1)...(19): siRNA sense strand
acagacagugaguggaaga

SEQ ID NO: 2587069 - RNA, 19 nt, Homo sapiens
  misc_RNA (1)...(19): siRNA sense strand
ccuggaaaccuguacaaaa

SEQ ID NO: 2587070 - RNA, 19 nt, Homo sapiens
  misc_RNA (1)...(19): siRNA sense strand
uauucgacgucaagcaauu

SEQ ID NO: 2587071 - RNA, 19 nt, Homo sapiens
  misc_RNA (1)...(19): siRNA sense strand
caauuaaagaacugccuca

SEQ ID NO: 2587072 - RNA, 19 nt, Homo sapiens
  misc_RNA (1)...(19): siRNA sense strand
caauuugccacuggagaaa

SEQ ID NO: 2587073 - RNA, 19 nt, Homo sapiens
  misc_RNA (1)...(19): siRNA sense strand
ugggaaauauagcagcaau

SEQ ID NO: 2587074 - RNA, 19 nt, Homo sapiens
  misc_RNA (1)...(19): siRNA sense strand
cuuaacagccaaacugaau

SEQ ID NO: 2587075 - RNA, 19 nt, Homo sapiens
  misc_RNA (1)...(19): siRNA sense strand
uagagaacgagcaauuaaa

SEQ ID NO: 2587076 - RNA, 19 nt, Homo sapiens
  misc_RNA (1)...(19): siRNA sense strand
aaaggaaguggaagagcuu

SEQ ID NO: 2587077 - RNA, 19 nt, Homo sapiens
  misc_RNA (1)...(19): siRNA sense strand
ccagaugaagucuuaacaa

SEQ ID NO: 2587078 - RNA, 19 nt, Homo sapiens
  misc_RNA (1)...(19): siRNA sense strand
uagaagaugugacugguga

SEQ ID NO: 2587079 - RNA, 19 nt, Homo sapiens
  misc_RNA (1)...(19): siRNA sense strand
agaagaugugacuggugaa

SEQ ID NO: 2587080 - RNA, 19 nt, Homo sapiens
  misc_RNA (1)...(19): siRNA sense strand
ccagauuucuuaacagcca

SEQ ID NO: 2587081 - RNA, 19 nt, Homo sapiens
  misc_RNA (1)...(19): siRNA sense strand
gagaaugugaagucggaaa

SEQ ID NO: 2587082 - RNA, 19 nt, Homo sapiens
  misc_RNA (1)...(19): siRNA sense strand
aggaagaacuauuugacau

SEQ ID NO: 2587083 - RNA, 19 nt, Homo sapiens
  misc_RNA (1)...(19): siRNA sense strand
ccgcagugaggaagaacua

SEQ ID NO: 2587084 - RNA, 19 nt, Homo sapiens
  misc_RNA (1)...(19): siRNA sense strand
acaucaaacuacagaaagu

SEQ ID NO: 2587085 - RNA, 19 nt, Homo sapiens
  misc_RNA (1)...(19): siRNA sense strand
uggugaaggagcugaagaa

SEQ ID NO: 2587086 - RNA, 19 nt, Homo sapiens
  misc_RNA (1)...(19): siRNA sense strand
cucaauggucugcgggaua

SEQ ID NO: 2587087 - RNA, 19 nt, Homo sapiens
  misc_RNA (1)...(19): siRNA sense strand
uaacagaguugcugggucu

SEQ ID NO: 2587088 - RNA, 19 nt, Homo sapiens
  misc_RNA (1)...(19): siRNA sense strand
ggaaauucugaaacaggaa

SEQ ID NO: 2587089 - RNA, 19 nt, Homo sapiens
  misc_RNA (1)...(19): siRNA sense strand
ggcagaaagaccugugaau

SEQ ID NO: 2587090 - RNA, 19 nt, Homo sapiens
  misc_RNA (1)...(19): siRNA sense strand
gagaacaaggagaggguac

SEQ ID NO: 2587091 - RNA, 19 nt, Homo sapiens
  misc_RNA (1)...(19): siRNA sense strand
cuuauguguuagaggacuu

SEQ ID NO: 2587092 - RNA, 19 nt, Homo sapiens
  misc_RNA (1)...(19): siRNA sense strand
cuguagauauuguccagaa

SEQ ID NO: 2587093 - RNA, 19 nt, Homo sapiens
  misc_RNA (1)...(19): siRNA sense strand
ccugaagagaacaaggaga

SEQ ID NO: 2587094 - RNA, 19 nt, Homo sapiens
  misc_RNA (1)...(19): siRNA sense strand
gcaagcacuuauuuggcua

SEQ ID NO: 2587095 - RNA, 19 nt, Homo sapiens
  misc_RNA (1)...(19): siRNA sense strand
ccaucaauacgcugugcaa

SEQ ID NO: 2587096 - RNA, 19 nt, Homo sapiens
  misc_RNA (1)...(19): siRNA sense strand
gagccuggaaacucagaaa

SEQ ID NO: 2587097 - RNA, 19 nt, Homo sapiens
  misc_RNA (1)...(19): siRNA sense strand
cagugguggugcagacuuu

SEQ ID NO: 2587098 - RNA, 19 nt, Homo sapiens
  misc_RNA (1)...(19): siRNA sense strand
guccagaagaaguugguuu

SEQ ID NO: 2587099 - RNA, 19 nt, Homo sapiens
  misc_RNA (1)...(19): siRNA sense strand
gaaacaggaaggaggcguu

SEQ ID NO: 2587100 - RNA, 19 nt, Homo sapiens
  misc_RNA (1)...(19): siRNA sense strand
ggugaugggagcuaccaaa

SEQ ID NO: 2587101 - RNA, 19 nt, Homo sapiens
  misc_RNA (1)...(19): siRNA sense strand
guauuacugcauagaggaa

SEQ ID NO: 2587102 - RNA, 19 nt, Homo sapiens
  misc_RNA (1)...(19): siRNA sense strand
gcaagaacggagacgcuga

SEQ ID NO: 2587103 - RNA, 19 nt, Homo sapiens
  misc_RNA (1)...(19): siRNA sense strand
uccagaagaaguugguuua

SEQ ID NO: 2587104 - RNA, 19 nt, Homo sapiens
  misc_RNA (1)...(19): siRNA sense strand
cuuaguuggcauugaugaa

SEQ ID NO: 2587105 - RNA, 19 nt, Homo sapiens
  misc_RNA (1)...(19): siRNA sense strand
uugaugaaguuaagcggau

SEQ ID NO: 2587106 - RNA, 19 nt, Homo sapiens
  misc_RNA (1)...(19): siRNA sense strand
ggaggauccggcagaaaga

SEQ ID NO: 2587107 - RNA, 19 nt, Homo sapiens
  misc_RNA (1)...(19): siRNA sense strand
ggaaugucauccagcgagu

SEQ ID NO: 2587108 - RNA, 19 nt, Homo sapiens
  misc_RNA (1)...(19): siRNA sense strand
auuacugcauagaggaaga

SEQ ID NO: 2587109 - RNA, 19 nt, Homo sapiens
  misc_RNA (1)...(19): siRNA sense strand
ccuugauuccugaagagaa

SEQ ID NO: 2587110 - RNA, 19 nt, Homo sapiens
  misc_RNA (1)...(19): siRNA sense strand
agaacggagacgcugaaua

SEQ ID NO: 2587111 - RNA, 19 nt, Homo sapiens
  misc_RNA (1)...(19): siRNA sense strand
uggugaacgaugagaaugu

SEQ ID NO: 2587112 - RNA, 19 nt, Homo sapiens
  misc_RNA (1)...(19): siRNA sense strand
aggacuuuguugagaaugu

SEQ ID NO: 2587113 - RNA, 19 nt, Homo sapiens
  misc_RNA (1)...(19): siRNA sense strand
gcauaaucuucauggagac

SEQ ID NO: 2587114 - RNA, 19 nt, Homo sapiens
  misc_RNA (1)...(19): siRNA sense strand
gcguugugacccagagcuu

SEQ ID NO: 2587115 - RNA, 19 nt, Homo sapiens
  misc_RNA (1)...(19): siRNA sense strand
cgacaagagcacauuacca

SEQ ID NO: 2587116 - RNA, 19 nt, Homo sapiens
  misc_RNA (1)...(19): siRNA sense strand
gguacaugacucaaggcuu

SEQ ID NO: 2587117 - RNA, 19 nt, Homo sapiens
  misc_RNA (1)...(19): siRNA sense strand
agagaacauucaagauagu

SEQ ID NO: 2587118 - RNA, 19 nt, Homo sapiens
  misc_RNA (1)...(19): siRNA sense strand
agaaacugugauuggaaca

SEQ ID NO: 2587119 - RNA, 19 nt, Homo sapiens
  misc_RNA (1)...(19): siRNA sense strand
cagcgagugauuagguaca

SEQ ID NO: 2587120 - RNA, 19 nt, Homo sapiens
  misc_RNA (1)...(19): siRNA sense strand
agaggacuuuguugagaau

SEQ ID NO: 2587121 - RNA, 19 nt, Homo sapiens
  misc_RNA (1)...(19): siRNA sense strand
ccucaagagcaguagccca

SEQ ID NO: 2587122 - RNA, 19 nt, Homo sapiens
  misc_RNA (1)...(19): siRNA sense strand
uguuagaggacuuuguuga

SEQ ID NO: 2587123 - RNA, 19 nt, Homo sapiens
  misc_RNA (1)...(19): siRNA sense strand
cggauucuguguagcccua

SEQ ID NO: 2587124 - RNA, 19 nt, Homo sapiens
  misc_RNA (1)...(19): siRNA sense strand
cuugauuccugaagagaac

SEQ ID NO: 2587125 - RNA, 19 nt, Homo sapiens
  misc_RNA (1)...(19): siRNA sense strand
aggagaggguacaagaacu

SEQ ID NO: 2587126 - RNA, 19 nt, Homo sapiens
  misc_RNA (1)...(19): siRNA sense strand
gcccagagacagagggaaa

SEQ ID NO: 2587127 - RNA, 19 nt, Homo sapiens
  misc_RNA (1)...(19): siRNA sense strand
cugccaaagucuauaguaa

SEQ ID NO: 2587128 - RNA, 19 nt, Homo sapiens
  misc_RNA (1)...(19): siRNA sense strand
ugauuaagcaggagggaga

SEQ ID NO: 2587129 - RNA, 19 nt, Homo sapiens
  misc_RNA (1)...(19): siRNA sense strand
ggucaugaauauagggcca

SEQ ID NO: 2587130 - RNA, 19 nt, Homo sapiens
  misc_RNA (1)...(19): siRNA sense strand
acacaguaucuaagguaua

SEQ ID NO: 2587131 - RNA, 19 nt, Homo sapiens
  misc_RNA (1)...(19): siRNA sense strand
cauaaauggcccaaaggaa

SEQ ID NO: 2587132 - RNA, 19 nt, Homo sapiens
  misc_RNA (1)...(19): siRNA sense strand
gcacaaacgaagagcaaac

SEQ ID NO: 2587133 - RNA, 19 nt, Homo sapiens
  misc_RNA (1)...(19): siRNA sense strand
ccaucaaagaagaaggaga

SEQ ID NO: 2587134 - RNA, 19 nt, Homo sapiens
  misc_RNA (1)...(19): siRNA sense strand
cugccauccuggagagcaa

SEQ ID NO: 2587135 - RNA, 19 nt, Homo sapiens
  misc_RNA (1)...(19): siRNA sense strand
ccaaggaaauuuagggaac

SEQ ID NO: 2587136 - RNA, 19 nt, Homo sapiens
  misc_RNA (1)...(19): siRNA sense strand
acaagaaagcgcaaggaau

SEQ ID NO: 2587137 - RNA, 19 nt, Homo sapiens
  misc_RNA (1)...(19): siRNA sense strand
auucagaagaggaggguca

SEQ ID NO: 2587138 - RNA, 19 nt, Homo sapiens
  misc_RNA (1)...(19): siRNA sense strand
ccuccaaacuacggaauaa

SEQ ID NO: 2587139 - RNA, 19 nt, Homo sapiens
  misc_RNA (1)...(19): siRNA sense strand
cugcacaaacgaagagcaa

SEQ ID NO: 2587140 - RNA, 19 nt, Homo sapiens
  misc_RNA (1)...(19): siRNA sense strand
aagaagaaggagaagauuu

SEQ ID NO: 2587141 - RNA, 19 nt, Homo sapiens
  misc_RNA (1)...(19): siRNA sense strand
agccaggaaugauggguaa

SEQ ID NO: 2587142 - RNA, 19 nt, Homo sapiens
  misc_RNA (1)...(19): siRNA sense strand
uagugaaccuggaaggcaa

SEQ ID NO: 2587143 - RNA, 19 nt, Homo sapiens
  misc_RNA (1)...(19): siRNA sense strand
ugauaggaaaccaaggaaa

SEQ ID NO: 2587144 - RNA, 19 nt, Homo sapiens
  misc_RNA (1)...(19): siRNA sense strand
cuggaauggauaugauuaa

SEQ ID NO: 2587145 - RNA, 19 nt, Homo sapiens
  misc_RNA (1)...(19): siRNA sense strand
cagcagaagccacaggcaa

SEQ ID NO: 2587146 - RNA, 19 nt, Homo sapiens
  misc_RNA (1)...(19): siRNA sense strand
acauagaugaagugcagaa

SEQ ID NO: 2587147 - RNA, 19 nt, Homo sapiens
  misc_RNA (1)...(19): siRNA sense strand
caagaagagcugaugaaca

SEQ ID NO: 2587148 - RNA, 19 nt, Homo sapiens
  misc_RNA (1)...(19): siRNA sense strand
gggaaugaaccauguguca

SEQ ID NO: 2587149 - RNA, 19 nt, Homo sapiens
  misc_RNA (1)...(19): siRNA sense strand
agcagaagccacaggcaaa

SEQ ID NO: 2587150 - RNA, 19 nt, Homo sapiens
  misc_RNA (1)...(19): siRNA sense strand
aaagaaacugugaagcaaa

SEQ ID NO: 2587151 - RNA, 19 nt, Homo sapiens
  misc_RNA (1)...(19): siRNA sense strand
caaaggaacaaaugggcau

SEQ ID NO: 2587152 - RNA, 19 nt, Homo sapiens
  misc_RNA (1)...(19): siRNA sense strand
uggacaacuuggaggagau

SEQ ID NO: 2587153 - RNA, 19 nt, Homo sapiens
  misc_RNA (1)...(19): siRNA sense strand
gggaacaguagcacaggaa

SEQ ID NO: 2587154 - RNA, 19 nt, Homo sapiens
  misc_RNA (1)...(19): siRNA sense strand
aggaagcucaucagaaaua

SEQ ID NO: 2587155 - RNA, 19 nt, Homo sapiens
  misc_RNA (1)...(19): siRNA sense strand
gggagacacaacacggaaa

SEQ ID NO: 2587156 - RNA, 19 nt, Homo sapiens
  misc_RNA (1)...(19): siRNA sense strand
acguaaucgugaacaggaa

SEQ ID NO: 2587157 - RNA, 19 nt, Homo sapiens
  misc_RNA (1)...(19): siRNA sense strand
cgcucaaggagaagcauaa

SEQ ID NO: 2587158 - RNA, 19 nt, Homo sapiens
  misc_RNA (1)...(19): siRNA sense strand
agucucaggucaugaauau

SEQ ID NO: 2587159 - RNA, 19 nt, Homo sapiens
  misc_RNA (1)...(19): siRNA sense strand
gcacaaauggcccagggua

SEQ ID NO: 2587160 - RNA, 19 nt, Homo sapiens
  misc_RNA (1)...(19): siRNA sense strand
aagaaacugugaagcaaau

SEQ ID NO: 2587161 - RNA, 19 nt, Homo sapiens
  misc_RNA (1)...(19): siRNA sense strand
agaucaaagaacaagagaa

SEQ ID NO: 2587162 - RNA, 19 nt, Homo sapiens
  misc_RNA (1)...(19): siRNA sense strand
agaaggaggagaugagcuu

SEQ ID NO: 2587163 - RNA, 19 nt, Homo sapiens
  misc_RNA (1)...(19): siRNA sense strand
cugaauuagagaugaacau

SEQ ID NO: 2587164 - RNA, 19 nt, Homo sapiens
  misc_RNA (1)...(19): siRNA sense strand
caucuucgacagagacaaa

SEQ ID NO: 2587165 - RNA, 19 nt, Homo sapiens
  misc_RNA (1)...(19): siRNA sense strand
gaggacaaggguugaauau

SEQ ID NO: 2587166 - RNA, 19 nt, Homo sapiens
  misc_RNA (1)...(19): siRNA sense strand
caacauagaugaagugcag

SEQ ID NO: 2587167 - RNA, 19 nt, Homo sapiens
  misc_RNA (1)...(19): siRNA sense strand
ugccaaagucuauaguaaa

SEQ ID NO: 2587168 - RNA, 19 nt, Homo sapiens
  misc_RNA (1)...(19): siRNA sense strand
aaacugagaaggaggagau

SEQ ID NO: 2587169 - RNA, 19 nt, Homo sapiens
  misc_RNA (1)...(19): siRNA sense strand
gagccaagcaguagaucca

SEQ ID NO: 2587170 - RNA, 19 nt, Homo sapiens
  misc_RNA (1)...(19): siRNA sense strand
gagacaaaugcaucagcaa

SEQ ID NO: 2587171 - RNA, 19 nt, Homo sapiens
  misc_RNA (1)...(19): siRNA sense strand
ggguugaauaugacaccaa

SEQ ID NO: 2587172 - RNA, 19 nt, Homo sapiens
  misc_RNA (1)...(19): siRNA sense strand
gcacauacacagaguccca

SEQ ID NO: 2587173 - RNA, 19 nt, Homo sapiens
  misc_RNA (1)...(19): siRNA sense strand
aggaaauagccauaguuau

SEQ ID NO: 2587174 - RNA, 19 nt, Homo sapiens
  misc_RNA (1)...(19): siRNA sense strand
gaacaguagcacaggaaug

SEQ ID NO: 2587175 - RNA, 19 nt, Homo sapiens
  misc_RNA (1)...(19): siRNA sense strand
aggcaaaugcacagcaguu

SEQ ID NO: 2587176 - RNA, 19 nt, Homo sapiens
  misc_RNA (1)...(19): siRNA sense strand
cuacggaauaagucagcaa

SEQ ID NO: 2587177 - RNA, 19 nt, Homo sapiens
  misc_RNA (1)...(19): siRNA sense strand
ccacucagcaagaugggaa

SEQ ID NO: 2587178 - RNA, 19 nt, Homo sapiens
  misc_RNA (1)...(19): siRNA sense strand
gacaaaugcaucagcaaca

SEQ ID NO: 2587179 - RNA, 19 nt, Homo sapiens
  misc_RNA (1)...(19): siRNA sense strand
aagaggagggucaugauaa

SEQ ID NO: 2587180 - RNA, 19 nt, Homo sapiens
  misc_RNA (1)...(19): siRNA sense strand
aggaaaccaaggaaauuua

SEQ ID NO: 2587181 - RNA, 19 nt, Homo sapiens
  misc_RNA (1)...(19): siRNA sense strand
ggccgugagcagugagaga

SEQ ID NO: 2587182 - RNA, 19 nt, Homo sapiens
  misc_RNA (1)...(19): siRNA sense strand
cagccagagccaagcagua

SEQ ID NO: 2587183 - RNA, 19 nt, Homo sapiens
  misc_RNA (1)...(19): siRNA sense strand
gccaggaucuccaaggcaa

SEQ ID NO: 2587184 - RNA, 19 nt, Homo sapiens
  misc_RNA (1)...(19): siRNA sense strand
ugaagguacaacuggacaa

SEQ ID NO: 2587185 - RNA, 19 nt, Homo sapiens
  misc_RNA (1)...(19): siRNA sense strand
uuggaugauuugcagaaua

SEQ ID NO: 2587186 - RNA, 19 nt, Homo sapiens
  misc_RNA (1)...(19): siRNA sense strand
aguccaaggagguaugauu

SEQ ID NO: 2587187 - RNA, 19 nt, Homo sapiens
  misc_RNA (1)...(19): siRNA sense strand
gaugagaggacaaggguug

SEQ ID NO: 2587188 - RNA, 19 nt, Homo sapiens
  misc_RNA (1)...(19): siRNA sense strand
ucaaagaacaagagaaagc

SEQ ID NO: 2587189 - RNA, 19 nt, Homo sapiens
  misc_RNA (1)...(19): siRNA sense strand
ccaaaaggaacacugaaaa

SEQ ID NO: 2587190 - RNA, 19 nt, Homo sapiens
  misc_RNA (1)...(19): siRNA sense strand
ggagaugagcuuugagccu

SEQ ID NO: 2587191 - RNA, 19 nt, Homo sapiens
  misc_RNA (1)...(19): siRNA sense strand
gcucagaaacagaugcaca

SEQ ID NO: 2587192 - RNA, 19 nt, Homo sapiens
  misc_RNA (1)...(19): siRNA sense strand
ggacuggagcucauggaca

SEQ ID NO: 2587193 - RNA, 19 nt, Homo sapiens
  misc_RNA (1)...(19): siRNA sense strand
ccuaaagggcagcuggcca

SEQ ID NO: 2587194 - RNA, 19 nt, Homo sapiens
  misc_RNA (1)...(19): siRNA sense strand
ccuccagauauccaggaaa

SEQ ID NO: 2587195 - RNA, 19 nt, Homo sapiens
  misc_RNA (1)...(19): siRNA sense strand
uccaagugcuccugggcau

SEQ ID NO: 2587196 - RNA, 19 nt, Homo sapiens
  misc_RNA (1)...(19): siRNA sense strand
gcucagaaacagaugcaca

SEQ ID NO: 2587197 - RNA, 19 nt, Homo sapiens
  misc_RNA (1)...(19): siRNA sense strand
ggacuggagcucauggaca

SEQ ID NO: 2587198 - RNA, 19 nt, Homo sapiens
  misc_RNA (1)...(19): siRNA sense strand
ccuaaagggcagcuggcca

SEQ ID NO: 2587199 - RNA, 19 nt, Homo sapiens
  misc_RNA (1)...(19): siRNA sense strand
ccuccagauauccaggaaa

SEQ ID NO: 2587200 - RNA, 19 nt, Homo sapiens
  misc_RNA (1)...(19): siRNA sense strand
uccaagugcuccugggcau

SEQ ID NO: 2587201 - RNA, 19 nt, Homo sapiens
  misc_RNA (1)...(19): siRNA sense strand
ugguaaaagcugaaagaaa

SEQ ID NO: 2587202 - RNA, 19 nt, Homo sapiens
  misc_RNA (1)...(19): siRNA sense strand
uaacagagguuguggugga

SEQ ID NO: 2587203 - RNA, 19 nt, Homo sapiens
  misc_RNA (1)...(19): siRNA sense strand
cugcagaagagaaagagaa

SEQ ID NO: 2587204 - RNA, 19 nt, Homo sapiens
  misc_RNA (1)...(19): siRNA sense strand
ugguagaaauaauggagau

SEQ ID NO: 2587205 - RNA, 19 nt, Homo sapiens
  misc_RNA (1)...(19): siRNA sense strand
aggaaguuaaagugacaaa

SEQ ID NO: 2587206 - RNA, 19 nt, Homo sapiens
  misc_RNA (1)...(19): siRNA sense strand
ugcagaagagaaagagaaa

SEQ ID NO: 2587207 - RNA, 19 nt, Homo sapiens
  misc_RNA (1)...(19): siRNA sense strand
ccuaaaggcaccaugaaaa

SEQ ID NO: 2587208 - RNA, 19 nt, Homo sapiens
  misc_RNA (1)...(19): siRNA sense strand
guauacauuaggugaagaa

SEQ ID NO: 2587209 - RNA, 19 nt, Homo sapiens
  misc_RNA (1)...(19): siRNA sense strand
gcaacguuucacuggaaua

SEQ ID NO: 2587210 - RNA, 19 nt, Homo sapiens
  misc_RNA (1)...(19): siRNA sense strand
gcauaaauuaggaacagau

SEQ ID NO: 2587211 - RNA, 19 nt, Homo sapiens
  misc_RNA (1)...(19): siRNA sense strand
augcaggaguuugggauaa

SEQ ID NO: 2587212 - RNA, 19 nt, Homo sapiens
  misc_RNA (1)...(19): siRNA sense strand
gugacaaaggagaugaaaa

SEQ ID NO: 2587213 - RNA, 19 nt, Homo sapiens
  misc_RNA (1)...(19): siRNA sense strand
cugagcaugucgagucaaa

SEQ ID NO: 2587214 - RNA, 19 nt, Homo sapiens
  misc_RNA (1)...(19): siRNA sense strand
guuaaagugacaaaggaga

SEQ ID NO: 2587215 - RNA, 19 nt, Homo sapiens
  misc_RNA (1)...(19): siRNA sense strand
gaagcauaaauuaggaaca

SEQ ID NO: 2587216 - RNA, 19 nt, Homo sapiens
  misc_RNA (1)...(19): siRNA sense strand
cgauaaaggccgucaacuc

SEQ ID NO: 2587217 - RNA, 19 nt, Homo sapiens
  misc_RNA (1)...(19): siRNA sense strand
ggacaaagucugugcucag

SEQ ID NO: 2587218 - RNA, 19 nt, Homo sapiens
  misc_RNA (1)...(19): siRNA sense strand
gguuaaaggaccaaauaag

SEQ ID NO: 2587219 - RNA, 19 nt, Homo sapiens
  misc_RNA (1)...(19): siRNA sense strand
auaauagaccugaaggaca

SEQ ID NO: 2587220 - RNA, 19 nt, Homo sapiens
  misc_RNA (1)...(19): siRNA sense strand
gaacaguauaaaaggaaga

SEQ ID NO: 2587221 - RNA, 19 nt, Homo sapiens
  misc_RNA (1)...(19): siRNA sense strand
uagaauaauagcugaagga

SEQ ID NO: 2587222 - RNA, 19 nt, Homo sapiens
  misc_RNA (1)...(19): siRNA sense strand
ccuuagauucucuugcaaa

SEQ ID NO: 2587223 - RNA, 19 nt, Homo sapiens
  misc_RNA (1)...(19): siRNA sense strand
auaauggagaugaagcaua

SEQ ID NO: 2587224 - RNA, 19 nt, Homo sapiens
  misc_RNA (1)...(19): siRNA sense strand
aaauaauagaccugaagga

SEQ ID NO: 2587225 - RNA, 19 nt, Homo sapiens
  misc_RNA (1)...(19): siRNA sense strand
cuguagauugcuugggaca

SEQ ID NO: 2587226 - RNA, 19 nt, Homo sapiens
  misc_RNA (1)...(19): siRNA sense strand
acaaaggagaugaaaagaa

SEQ ID NO: 2587227 - RNA, 19 nt, Homo sapiens
  misc_RNA (1)...(19): siRNA sense strand
aaauaauggagaugaagca

SEQ ID NO: 2587228 - RNA, 19 nt, Homo sapiens
  misc_RNA (1)...(19): siRNA sense strand
agacugcagaagagaaaga

SEQ ID NO: 2587229 - RNA, 19 nt, Homo sapiens
  misc_RNA (1)...(19): siRNA sense strand
gggccugcacccuagaaua

SEQ ID NO: 2587230 - RNA, 19 nt, Homo sapiens
  misc_RNA (1)...(19): siRNA sense strand
aauaguagcucuucgcaga

SEQ ID NO: 2587231 - RNA, 19 nt, Homo sapiens
  misc_RNA (1)...(19): siRNA sense strand
cuuagauucucuugcaaaa

SEQ ID NO: 2587232 - RNA, 19 nt, Homo sapiens
  misc_RNA (1)...(19): siRNA sense strand
ugaguauacauuaggugaa

SEQ ID NO: 2587233 - RNA, 19 nt, Homo sapiens
  misc_RNA (1)...(19): siRNA sense strand
cccuagaauaauagcugaa

SEQ ID NO: 2587234 - RNA, 19 nt, Homo sapiens
  misc_RNA (1)...(19): siRNA sense strand
uuaaagugacaaaggagau

SEQ ID NO: 2587235 - RNA, 19 nt, Homo sapiens
  misc_RNA (1)...(19): siRNA sense strand
ggaacagauacaaaguuga

SEQ ID NO: 2587236 - RNA, 19 nt, Homo sapiens
  misc_RNA (1)...(19): siRNA sense strand
agaugguacuacaacaaau

SEQ ID NO: 2587237 - RNA, 19 nt, Homo sapiens
  misc_RNA (1)...(19): siRNA sense strand
cuguuaccuuguugguuaa

SEQ ID NO: 2587238 - RNA, 19 nt, Homo sapiens
  misc_RNA (1)...(19): siRNA sense strand
gaagaugguuguaugguuc

SEQ ID NO: 2587239 - RNA, 19 nt, Homo sapiens
  misc_RNA (1)...(19): siRNA sense strand
cacaggaaacauuaguaaa

SEQ ID NO: 2587240 - RNA, 19 nt, Homo sapiens
  misc_RNA (1)...(19): siRNA sense strand
uugaagcugcaaagauaaa

SEQ ID NO: 2587241 - RNA, 19 nt, Homo sapiens
  misc_RNA (1)...(19): siRNA sense strand
uaugaagaagcgaguagaa

SEQ ID NO: 2587242 - RNA, 19 nt, Homo sapiens
  misc_RNA (1)...(19): siRNA sense strand
agaaauauggaaagacucu

SEQ ID NO: 2587243 - RNA, 19 nt, Homo sapiens
  misc_RNA (1)...(19): siRNA sense strand
acagcuuccuugauagcaa

SEQ ID NO: 2587244 - RNA, 19 nt, Homo sapiens
  misc_RNA (1)...(19): siRNA sense strand
ugacaaaggagaugaaaag

SEQ ID NO: 2587245 - RNA, 19 nt, Homo sapiens
  misc_RNA (1)...(19): siRNA sense strand
ucucuucaugguagaaaua

SEQ ID NO: 2587246 - RNA, 19 nt, Homo sapiens
  misc_RNA (1)...(19): siRNA sense strand
agaaauugguaaaagcuga

SEQ ID NO: 2587247 - RNA, 19 nt, Homo sapiens
  misc_RNA (1)...(19): siRNA sense strand
uuuauugaggaguguguua

SEQ ID NO: 2587248 - RNA, 19 nt, Homo sapiens
  misc_RNA (1)...(19): siRNA sense strand
caggaguuugggauaauua

SEQ ID NO: 2587249 - RNA, 19 nt, Homo sapiens
  misc_RNA (1)...(19): siRNA sense strand
aggagaugguacuacaaca

SEQ ID NO: 2587250 - RNA, 19 nt, Homo sapiens
  misc_RNA (1)...(19): siRNA sense strand
gauaugaagaagcgaguag

SEQ ID NO: 2587251 - RNA, 19 nt, Homo sapiens
  misc_RNA (1)...(19): siRNA sense strand
ccgucaacuccaaggcuga

SEQ ID NO: 2587252 - RNA, 19 nt, Homo sapiens
  misc_RNA (1)...(19): siRNA sense strand
auaaaggauuugucgucau

SEQ ID NO: 2587253 - RNA, 19 nt, Homo sapiens
  misc_RNA (1)...(19): siRNA sense strand
gacagaaguuuguuggaaa

SEQ ID NO: 2587254 - RNA, 19 nt, Homo sapiens
  misc_RNA (1)...(19): siRNA sense strand
acagaaguuuguuggaaaa

SEQ ID NO: 2587255 - RNA, 19 nt, Homo sapiens
  misc_RNA (1)...(19): siRNA sense strand
caucggaagagaacagcaa

SEQ ID NO: 2587256 - RNA, 19 nt, Homo sapiens
  misc_RNA (1)...(19): siRNA sense strand
gaagaaauauauugccagu

SEQ ID NO: 2587257 - RNA, 19 nt, Homo sapiens
  misc_RNA (1)...(19): siRNA sense strand
gugaauaucucuaucagga

SEQ ID NO: 2587258 - RNA, 19 nt, Homo sapiens
  misc_RNA (1)...(19): siRNA sense strand
aaaggauagcaaagaagaa

SEQ ID NO: 2587259 - RNA, 19 nt, Homo sapiens
  misc_RNA (1)...(19): siRNA sense strand
gaugaggaugaccgggaaa

SEQ ID NO: 2587260 - RNA, 19 nt, Homo sapiens
  misc_RNA (1)...(19): siRNA sense strand
gaagagaacagcaaggacu

SEQ ID NO: 2587261 - RNA, 19 nt, Homo sapiens
  misc_RNA (1)...(19): siRNA sense strand
ugaaagugaaguugagcca

SEQ ID NO: 2587262 - RNA, 19 nt, Homo sapiens
  misc_RNA (1)...(19): siRNA sense strand
ugccaguuaccaagagaua

SEQ ID NO: 2587263 - RNA, 19 nt, Homo sapiens
  misc_RNA (1)...(19): siRNA sense strand
agacagaaguuuguuggaa

SEQ ID NO: 2587264 - RNA, 19 nt, Homo sapiens
  misc_RNA (1)...(19): siRNA sense strand
aauugaagacuuugguaca

SEQ ID NO: 2587265 - RNA, 19 nt, Homo sapiens
  misc_RNA (1)...(19): siRNA sense strand
aggauagcaaagaagaaau

SEQ ID NO: 2587266 - RNA, 19 nt, Homo sapiens
  misc_RNA (1)...(19): siRNA sense strand
aauauuuacucuuggcuca

SEQ ID NO: 2587267 - RNA, 19 nt, Homo sapiens
  misc_RNA (1)...(19): siRNA sense strand
aaaugagacaagucaagaa

SEQ ID NO: 2587268 - RNA, 19 nt, Homo sapiens
  misc_RNA (1)...(19): siRNA sense strand
auauauugccaguuaccaa

SEQ ID NO: 2587269 - RNA, 19 nt, Homo sapiens
  misc_RNA (1)...(19): siRNA sense strand
ccuuagcugaugaggauga

SEQ ID NO: 2587270 - RNA, 19 nt, Homo sapiens
  misc_RNA (1)...(19): siRNA sense strand
aaguugagccaucggaaga

SEQ ID NO: 2587271 - RNA, 19 nt, Homo sapiens
  misc_RNA (1)...(19): siRNA sense strand
aagauaaagacaaaccgaa

SEQ ID NO: 2587272 - RNA, 19 nt, Homo sapiens
  misc_RNA (1)...(19): siRNA sense strand
ccauggugucagugauuca

SEQ ID NO: 2587273 - RNA, 19 nt, Homo sapiens
  misc_RNA (1)...(19): siRNA sense strand
agauaaagacaaaccgaag

SEQ ID NO: 2587274 - RNA, 19 nt, Homo sapiens
  misc_RNA (1)...(19): siRNA sense strand
uggcaaagugggugaaaca

SEQ ID NO: 2587275 - RNA, 19 nt, Homo sapiens
  misc_RNA (1)...(19): siRNA sense strand
gggaauuuaaauauggaga

SEQ ID NO: 2587276 - RNA, 19 nt, Homo sapiens
  misc_RNA (1)...(19): siRNA sense strand
uguucaaccaaauggcaaa

SEQ ID NO: 2587277 - RNA, 19 nt, Homo sapiens
  misc_RNA (1)...(19): siRNA sense strand
gaaccuacuuaucugggaa

SEQ ID NO: 2587278 - RNA, 19 nt, Homo sapiens
  misc_RNA (1)...(19): siRNA sense strand
caaauggcaaaguggguga

SEQ ID NO: 2587279 - RNA, 19 nt, Homo sapiens
  misc_RNA (1)...(19): siRNA sense strand
cuacacaauggaaugguau

SEQ ID NO: 2587280 - RNA, 19 nt, Homo sapiens
  misc_RNA (1)...(19): siRNA sense strand
ccuuuaacaaguuggcuga

SEQ ID NO: 2587281 - RNA, 19 nt, Homo sapiens
  misc_RNA (1)...(19): siRNA sense strand
ucccaguuauggaggguga

SEQ ID NO: 2587282 - RNA, 19 nt, Homo sapiens
  misc_RNA (1)...(19): siRNA sense strand
gcaagaugaucgaccgcaa

SEQ ID NO: 2587283 - RNA, 19 nt, Homo sapiens
  misc_RNA (1)...(19): siRNA sense strand
gccaaagaucagaacgaaa

SEQ ID NO: 2587284 - RNA, 19 nt, Homo sapiens
  misc_RNA (1)...(19): siRNA sense strand
cuuaaaggaauguggacuu

SEQ ID NO: 2587285 - RNA, 19 nt, Homo sapiens
  misc_RNA (1)...(19): siRNA sense strand
cugaggacgaggagaugaa

SEQ ID NO: 2587286 - RNA, 19 nt, Homo sapiens
  misc_RNA (1)...(19): siRNA sense strand
uggcugaggacgaggagau

SEQ ID NO: 2587287 - RNA, 19 nt, Homo sapiens
  misc_RNA (1)...(19): siRNA sense strand
ccaaagaagugaagcugcu

SEQ ID NO: 2587288 - RNA, 19 nt, Homo sapiens
  misc_RNA (1)...(19): siRNA sense strand
cguugagcgccgaagacaa

SEQ ID NO: 2587289 - RNA, 19 nt, Homo sapiens
  misc_RNA (1)...(19): siRNA sense strand
agugaagaccacaggcauu

SEQ ID NO: 2587290 - RNA, 19 nt, Homo sapiens
  misc_RNA (1)...(19): siRNA sense strand
caauacauaugaagaggca

SEQ ID NO: 2587291 - RNA, 19 nt, Homo sapiens
  misc_RNA (1)...(19): siRNA sense strand
gauuaaacgguuauggcga

SEQ ID NO: 2587292 - RNA, 19 nt, Homo sapiens
  misc_RNA (1)...(19): siRNA sense strand
uggccaaagaucagaacga

SEQ ID NO: 2587293 - RNA, 19 nt, Homo sapiens
  misc_RNA (1)...(19): siRNA sense strand
cugaacagaagaaaagaua

SEQ ID NO: 2587294 - RNA, 19 nt, Homo sapiens
  misc_RNA (1)...(19): siRNA sense strand
cuacauuccaacucagcaa

SEQ ID NO: 2587295 - RNA, 19 nt, Homo sapiens
  misc_RNA (1)...(19): siRNA sense strand
guuugauguagguggccaa

SEQ ID NO: 2587296 - RNA, 19 nt, Homo sapiens
  misc_RNA (1)...(19): siRNA sense strand
cggccaaagaagugaagcu

SEQ ID NO: 2587297 - RNA, 19 nt, Homo sapiens
  misc_RNA (1)...(19): siRNA sense strand
ccauugugaaacagaugaa

SEQ ID NO: 2587298 - RNA, 19 nt, Homo sapiens
  misc_RNA (1)...(19): siRNA sense strand
agaggaugaauguaaacaa

SEQ ID NO: 2587299 - RNA, 19 nt, Homo sapiens
  misc_RNA (1)...(19): siRNA sense strand
ggacgagagugaagaccac

SEQ ID NO: 2587300 - RNA, 19 nt, Homo sapiens
  misc_RNA (1)...(19): siRNA sense strand
acucggugcuggagaaucu

SEQ ID NO: 2587301 - RNA, 19 nt, Homo sapiens
  misc_RNA (1)...(19): siRNA sense strand
ccagggaauaucagcucaa

SEQ ID NO: 2587302 - RNA, 19 nt, Homo sapiens
  misc_RNA (1)...(19): siRNA sense strand
agaaaagauaccaaggaga

SEQ ID NO: 2587303 - RNA, 19 nt, Homo sapiens
  misc_RNA (1)...(19): siRNA sense strand
guuccaauacauaugaaga

SEQ ID NO: 2587304 - RNA, 19 nt, Homo sapiens
  misc_RNA (1)...(19): siRNA sense strand
augaagaggaggaggaaga

SEQ ID NO: 2587305 - RNA, 19 nt, Homo sapiens
  misc_RNA (1)...(19): siRNA sense strand
aggaagaggaggaugacaa

SEQ ID NO: 2587306 - RNA, 19 nt, Homo sapiens
  misc_RNA (1)...(19): siRNA sense strand
aggaggaagaggaggauga

SEQ ID NO: 2587307 - RNA, 19 nt, Homo sapiens
  misc_RNA (1)...(19): siRNA sense strand
cagaagaggugcugcagga

SEQ ID NO: 2587308 - RNA, 19 nt, Homo sapiens
  misc_RNA (1)...(19): siRNA sense strand
ucgaaggacuggaugguga

SEQ ID NO: 2587309 - RNA, 19 nt, Homo sapiens
  misc_RNA (1)...(19): siRNA sense strand
aggaggaggaagaggagga

SEQ ID NO: 2587310 - RNA, 19 nt, Homo sapiens
  misc_RNA (1)...(19): siRNA sense strand
gcaaaggugaccaggcuga

SEQ ID NO: 2587311 - RNA, 19 nt, Homo sapiens
  misc_RNA (1)...(19): siRNA sense strand
gcuaccugguggagaacau

SEQ ID NO: 2587312 - RNA, 19 nt, Homo sapiens
  misc_RNA (1)...(19): siRNA sense strand
uggaugaagaggaggagga

SEQ ID NO: 2587313 - RNA, 19 nt, Homo sapiens
  misc_RNA (1)...(19): siRNA sense strand
gagaauaccaagcugcgua

SEQ ID NO: 2587314 - RNA, 19 nt, Homo sapiens
  misc_RNA (1)...(19): siRNA sense strand
ccgaagagcuggugaaggg

SEQ ID NO: 2587315 - RNA, 19 nt, Homo sapiens
  misc_RNA (1)...(19): siRNA sense strand
aggccgaagagcuggugaa

SEQ ID NO: 2587316 - RNA, 19 nt, Homo sapiens
  misc_RNA (1)...(19): siRNA sense strand
cugcguaggaccaacaaau

SEQ ID NO: 2587317 - RNA, 19 nt, Homo sapiens
  misc_RNA (1)...(19): siRNA sense strand
agaccuagaagaugaaaau

SEQ ID NO: 2587318 - RNA, 19 nt, Homo sapiens
  misc_RNA (1)...(19): siRNA sense strand
uuaaaggaaaggagagaaa

SEQ ID NO: 2587319 - RNA, 19 nt, Homo sapiens
  misc_RNA (1)...(19): siRNA sense strand
ccgcagagggagaggaaga

SEQ ID NO: 2587320 - RNA, 19 nt, Homo sapiens
  misc_RNA (1)...(19): siRNA sense strand
gcccauaaacauaggagaa

SEQ ID NO: 2587321 - RNA, 19 nt, Homo sapiens
  misc_RNA (1)...(19): siRNA sense strand
ggaagauccuaguuggcaa

SEQ ID NO: 2587322 - RNA, 19 nt, Homo sapiens
  misc_RNA (1)...(19): siRNA sense strand
uuguaaauauggaggaaca

SEQ ID NO: 2587323 - RNA, 19 nt, Homo sapiens
  misc_RNA (1)...(19): siRNA sense strand
gguggagacacuagaacaa

SEQ ID NO: 2587324 - RNA, 19 nt, Homo sapiens
  misc_RNA (1)...(19): siRNA sense strand
guucaaauuuggaucguca

SEQ ID NO: 2587325 - RNA, 19 nt, Homo sapiens
  misc_RNA (1)...(19): siRNA sense strand
aaaggaaaggagagaaaga

SEQ ID NO: 2587326 - RNA, 19 nt, Homo sapiens
  misc_RNA (1)...(19): siRNA sense strand
agaugaagacugaaguaau

SEQ ID NO: 2587327 - RNA, 19 nt, Homo sapiens
  misc_RNA (1)...(19): siRNA sense strand
guuauacagaggagggcaa

SEQ ID NO: 2587328 - RNA, 19 nt, Homo sapiens
  misc_RNA (1)...(19): siRNA sense strand
gguuguaaauauggaggaa

SEQ ID NO: 2587329 - RNA, 19 nt, Homo sapiens
  misc_RNA (1)...(19): siRNA sense strand
ccguagaaauugaaccuga

SEQ ID NO: 2587330 - RNA, 19 nt, Homo sapiens
  misc_RNA (1)...(19): siRNA sense strand
cauaaacauaggagaacuu

SEQ ID NO: 2587331 - RNA, 19 nt, Homo sapiens
  misc_RNA (1)...(19): siRNA sense strand
acaaugaggaugaggagga

SEQ ID NO: 2587332 - RNA, 19 nt, Homo sapiens
  misc_RNA (1)...(19): siRNA sense strand
guguacagauggugaugau

SEQ ID NO: 2587333 - RNA, 19 nt, Homo sapiens
  misc_RNA (1)...(19): siRNA sense strand
aagaaugagaagcgcuuua

SEQ ID NO: 2587334 - RNA, 19 nt, Homo sapiens
  misc_RNA (1)...(19): siRNA sense strand
gauaagaccuuccgccaga

SEQ ID NO: 2587335 - RNA, 19 nt, Homo sapiens
  misc_RNA (1)...(19): siRNA sense strand
ggaggagaaacgaagaaga

SEQ ID NO: 2587336 - RNA, 19 nt, Homo sapiens
  misc_RNA (1)...(19): siRNA sense strand
cugaaaaggcacaugagaa

SEQ ID NO: 2587337 - RNA, 19 nt, Homo sapiens
  misc_RNA (1)...(19): siRNA sense strand
ggggaaaagccuuaugaau

SEQ ID NO: 2587338 - RNA, 19 nt, Homo sapiens
  misc_RNA (1)...(19): siRNA sense strand
uaaagagggccuugcggaa

SEQ ID NO: 2587339 - RNA, 19 nt, Homo sapiens
  misc_RNA (1)...(19): siRNA sense strand
agguuaaugcggagaaagu

SEQ ID NO: 2587340 - RNA, 19 nt, Homo sapiens
  misc_RNA (1)...(19): siRNA sense strand
gagaggaagaggaggccca

SEQ ID NO: 2587341 - RNA, 19 nt, Homo sapiens
  misc_RNA (1)...(19): siRNA sense strand
acacagucauagcccgaaa

SEQ ID NO: 2587342 - RNA, 19 nt, Homo sapiens
  misc_RNA (1)...(19): siRNA sense strand
gaaacgaagaagaguaaac

SEQ ID NO: 2587343 - RNA, 19 nt, Homo sapiens
  misc_RNA (1)...(19): siRNA sense strand
agaaauugaaccugagcca

SEQ ID NO: 2587344 - RNA, 19 nt, Homo sapiens
  misc_RNA (1)...(19): siRNA sense strand
auggagagguggagacacu

SEQ ID NO: 2587345 - RNA, 19 nt, Homo sapiens
  misc_RNA (1)...(19): siRNA sense strand
cuuugugaccaguggagaa

SEQ ID NO: 2587346 - RNA, 19 nt, Homo sapiens
  misc_RNA (1)...(19): siRNA sense strand
cgauuacgccaguguagaa

SEQ ID NO: 2587347 - RNA, 19 nt, Homo sapiens
  misc_RNA (1)...(19): siRNA sense strand
cgucggaauaccauggcaa

SEQ ID NO: 2587348 - RNA, 19 nt, Homo sapiens
  misc_RNA (1)...(19): siRNA sense strand
agauggugaugauggaaca

SEQ ID NO: 2587349 - RNA, 19 nt, Homo sapiens
  misc_RNA (1)...(19): siRNA sense strand
aagaacagcaggagggucu

SEQ ID NO: 2587350 - RNA, 19 nt, Homo sapiens
  misc_RNA (1)...(19): siRNA sense strand
aguuaugccagcagggaca

SEQ ID NO: 2587351 - RNA, 19 nt, Homo sapiens
  misc_RNA (1)...(19): siRNA sense strand
aagaagaguaaacguggaa

SEQ ID NO: 2587352 - RNA, 19 nt, Homo sapiens
  misc_RNA (1)...(19): siRNA sense strand
aaauugaaccugagccaga

SEQ ID NO: 2587353 - RNA, 19 nt, Homo sapiens
  misc_RNA (1)...(19): siRNA sense strand
cagaugaagacugaaguaa

SEQ ID NO: 2587354 - RNA, 19 nt, Homo sapiens
  misc_RNA (1)...(19): siRNA sense strand
cugaaguaauggagggcac

SEQ ID NO: 2587355 - RNA, 19 nt, Homo sapiens
  misc_RNA (1)...(19): siRNA sense strand
ggggaaaauggaggagaaa

SEQ ID NO: 2587356 - RNA, 19 nt, Homo sapiens
  misc_RNA (1)...(19): siRNA sense strand
caggagaggcacaugauca

SEQ ID NO: 2587357 - RNA, 19 nt, Homo sapiens
  misc_RNA (1)...(19): siRNA sense strand
caagaagcggagaggacga

SEQ ID NO: 2587358 - RNA, 19 nt, Homo sapiens
  misc_RNA (1)...(19): siRNA sense strand
gagagaaagacuuaccaga

SEQ ID NO: 2587359 - RNA, 19 nt, Homo sapiens
  misc_RNA (1)...(19): siRNA sense strand
aagaaagguguaaagaaga

SEQ ID NO: 2587360 - RNA, 19 nt, Homo sapiens
  misc_RNA (1)...(19): siRNA sense strand
gaagaagaguaaacgugga

SEQ ID NO: 2587361 - RNA, 19 nt, Homo sapiens
  misc_RNA (1)...(19): siRNA sense strand
agaguaaacguggaagaaa

SEQ ID NO: 2587362 - RNA, 19 nt, Homo sapiens
  misc_RNA (1)...(19): siRNA sense strand
uggacgacaaugaggauga

SEQ ID NO: 2587363 - RNA, 19 nt, Homo sapiens
  misc_RNA (1)...(19): siRNA sense strand
gccaagaagcggagaggac

SEQ ID NO: 2587364 - RNA, 19 nt, Homo sapiens
  misc_RNA (1)...(19): siRNA sense strand
agaggagggcaaagaugua

SEQ ID NO: 2587365 - RNA, 19 nt, Homo sapiens
  misc_RNA (1)...(19): siRNA sense strand
uauuaaaggaaaggagaga

SEQ ID NO: 2587366 - RNA, 19 nt, Homo sapiens
  misc_RNA (1)...(19): siRNA sense strand
gugaggugguccaggaugu

SEQ ID NO: 2587367 - RNA, 19 nt, Homo sapiens
  misc_RNA (1)...(19): siRNA sense strand
acaagaaugagaagcgcuu

SEQ ID NO: 2587368 - RNA, 19 nt, Homo sapiens
  misc_RNA (1)...(19): siRNA sense strand
aggaaaggagagaaagacu

SEQ ID NO: 2587369 - RNA, 19 nt, Homo sapiens
  misc_RNA (1)...(19): siRNA sense strand
ggugcaauugagaacauua

SEQ ID NO: 2587370 - RNA, 19 nt, Homo sapiens
  misc_RNA (1)...(19): siRNA sense strand
gguaauaugaagccuccaa

SEQ ID NO: 2587371 - RNA, 19 nt, Homo sapiens
  misc_RNA (1)...(19): siRNA sense strand
aagccacacugaugagaga

SEQ ID NO: 2587372 - RNA, 19 nt, Homo sapiens
  misc_RNA (1)...(19): siRNA sense strand
caguguagaagucagcaaa

SEQ ID NO: 2587373 - RNA, 19 nt, Homo sapiens
  misc_RNA (1)...(19): siRNA sense strand
agagguuaaugcggagaaa

SEQ ID NO: 2587374 - RNA, 19 nt, Homo sapiens
  misc_RNA (1)...(19): siRNA sense strand
ccuauauugagcaaggcaa

SEQ ID NO: 2587375 - RNA, 19 nt, Homo sapiens
  misc_RNA (1)...(19): siRNA sense strand
gaaggaagguccagaggga

SEQ ID NO: 2587376 - RNA, 19 nt, Homo sapiens
  misc_RNA (1)...(19): siRNA sense strand
agaacaaugcaguggaaga

SEQ ID NO: 2587377 - RNA, 19 nt, Homo sapiens
  misc_RNA (1)...(19): siRNA sense strand
caacaagagccauggcaca

SEQ ID NO: 2587378 - RNA, 19 nt, Homo sapiens
  misc_RNA (1)...(19): siRNA sense strand
guuuaugcccuuugggaau

SEQ ID NO: 2587379 - RNA, 19 nt, Homo sapiens
  misc_RNA (1)...(19): siRNA sense strand
gcugauacacagaaggaca

SEQ ID NO: 2587380 - RNA, 19 nt, Homo sapiens
  misc_RNA (1)...(19): siRNA sense strand
ggcuuaaagugcagcucaa

SEQ ID NO: 2587381 - RNA, 19 nt, Homo sapiens
  misc_RNA (1)...(19): siRNA sense strand
cuaagggauaggagccaaa

SEQ ID NO: 2587382 - RNA, 19 nt, Homo sapiens
  misc_RNA (1)...(19): siRNA sense strand
ucaagauguuugugggcca

SEQ ID NO: 2587383 - RNA, 19 nt, Homo sapiens
  misc_RNA (1)...(19): siRNA sense strand
cugcugacagugagaagaa

SEQ ID NO: 2587384 - RNA, 19 nt, Homo sapiens
  misc_RNA (1)...(19): siRNA sense strand
cugauacacagaaggacaa

SEQ ID NO: 2587385 - RNA, 19 nt, Homo sapiens
  misc_RNA (1)...(19): siRNA sense strand
augcaguggaagacaggaa

SEQ ID NO: 2587386 - RNA, 19 nt, Homo sapiens
  misc_RNA (1)...(19): siRNA sense strand
cugacagugagaagaacaa

SEQ ID NO: 2587387 - RNA, 19 nt, Homo sapiens
  misc_RNA (1)...(19): siRNA sense strand
gaaaaggacuugcgggaac

SEQ ID NO: 2587388 - RNA, 19 nt, Homo sapiens
  misc_RNA (1)...(19): siRNA sense strand
gaguauuggugcugcugga

SEQ ID NO: 2587389 - RNA, 19 nt, Homo sapiens
  misc_RNA (1)...(19): siRNA sense strand
aggcaaugcaccaagcaca

SEQ ID NO: 2587390 - RNA, 19 nt, Homo sapiens
  misc_RNA (1)...(19): siRNA sense strand
agaaggacaaagaacagaa

SEQ ID NO: 2587391 - RNA, 19 nt, Homo sapiens
  misc_RNA (1)...(19): siRNA sense strand
auugaagaaugccggauau

SEQ ID NO: 2587392 - RNA, 19 nt, Homo sapiens
  misc_RNA (1)...(19): siRNA sense strand
cacagaaggacaaagaaca

SEQ ID NO: 2587393 - RNA, 19 nt, Homo sapiens
  misc_RNA (1)...(19): siRNA sense strand
gcugacagugagaagaaca

SEQ ID NO: 2587394 - RNA, 19 nt, Homo sapiens
  misc_RNA (1)...(19): siRNA sense strand
guuuggacagauugaagaa

SEQ ID NO: 2587395 - RNA, 19 nt, Homo sapiens
  misc_RNA (1)...(19): siRNA sense strand
acacagaaggacaaagaac

SEQ ID NO: 2587396 - RNA, 19 nt, Homo sapiens
  misc_RNA (1)...(19): siRNA sense strand
cugaaaaggacuugcggga

SEQ ID NO: 2587397 - RNA, 19 nt, Homo sapiens
  misc_RNA (1)...(19): siRNA sense strand
acucaggccuacucgggua

SEQ ID NO: 2587398 - RNA, 19 nt, Homo sapiens
  misc_RNA (1)...(19): siRNA sense strand
caagaagugcacugaaaau

SEQ ID NO: 2587399 - RNA, 19 nt, Homo sapiens
  misc_RNA (1)...(19): siRNA sense strand
augggaggguugaaugcaa

SEQ ID NO: 2587400 - RNA, 19 nt, Homo sapiens
  misc_RNA (1)...(19): siRNA sense strand
gaaggaagguccagaggga

SEQ ID NO: 2587401 - RNA, 19 nt, Homo sapiens
  misc_RNA (1)...(19): siRNA sense strand
agaacaaugcaguggaaga

SEQ ID NO: 2587402 - RNA, 19 nt, Homo sapiens
  misc_RNA (1)...(19): siRNA sense strand
caacaagagccauggcaca

SEQ ID NO: 2587403 - RNA, 19 nt, Homo sapiens
  misc_RNA (1)...(19): siRNA sense strand
guuuaugcccuuugggaau

SEQ ID NO: 2587404 - RNA, 19 nt, Homo sapiens
  misc_RNA (1)...(19): siRNA sense strand
gcugauacacagaaggaca

SEQ ID NO: 2587405 - RNA, 19 nt, Homo sapiens
  misc_RNA (1)...(19): siRNA sense strand
ggcuuaaagugcagcucaa

SEQ ID NO: 2587406 - RNA, 19 nt, Homo sapiens
  misc_RNA (1)...(19): siRNA sense strand
cuaagggauaggagccaaa

SEQ ID NO: 2587407 - RNA, 19 nt, Homo sapiens
  misc_RNA (1)...(19): siRNA sense strand
ucaagauguuugugggcca

SEQ ID NO: 2587408 - RNA, 19 nt, Homo sapiens
  misc_RNA (1)...(19): siRNA sense strand
cugcugacagugagaagaa

SEQ ID NO: 2587409 - RNA, 19 nt, Homo sapiens
  misc_RNA (1)...(19): siRNA sense strand
cugauacacagaaggacaa

SEQ ID NO: 2587410 - RNA, 19 nt, Homo sapiens
  misc_RNA (1)...(19): siRNA sense strand
augcaguggaagacaggaa

SEQ ID NO: 2587411 - RNA, 19 nt, Homo sapiens
  misc_RNA (1)...(19): siRNA sense strand
cugacagugagaagaacaa

SEQ ID NO: 2587412 - RNA, 19 nt, Homo sapiens
  misc_RNA (1)...(19): siRNA sense strand
gaaaaggacuugcgggaac

SEQ ID NO: 2587413 - RNA, 19 nt, Homo sapiens
  misc_RNA (1)...(19): siRNA sense strand
gaguauuggugcugcugga

SEQ ID NO: 2587414 - RNA, 19 nt, Homo sapiens
  misc_RNA (1)...(19): siRNA sense strand
aggcaaugcaccaagcaca

SEQ ID NO: 2587415 - RNA, 19 nt, Homo sapiens
  misc_RNA (1)...(19): siRNA sense strand
agaaggacaaagaacagaa

SEQ ID NO: 2587416 - RNA, 19 nt, Homo sapiens
  misc_RNA (1)...(19): siRNA sense strand
auugaagaaugccggauau

SEQ ID NO: 2587417 - RNA, 19 nt, Homo sapiens
  misc_RNA (1)...(19): siRNA sense strand
cacagaaggacaaagaaca

SEQ ID NO: 2587418 - RNA, 19 nt, Homo sapiens
  misc_RNA (1)...(19): siRNA sense strand
gcugacagugagaagaaca

SEQ ID NO: 2587419 - RNA, 19 nt, Homo sapiens
  misc_RNA (1)...(19): siRNA sense strand
guuuggacagauugaagaa

SEQ ID NO: 2587420 - RNA, 19 nt, Homo sapiens
  misc_RNA (1)...(19): siRNA sense strand
acacagaaggacaaagaac

SEQ ID NO: 2587421 - RNA, 19 nt, Homo sapiens
  misc_RNA (1)...(19): siRNA sense strand
cugaaaaggacuugcggga

SEQ ID NO: 2587422 - RNA, 19 nt, Homo sapiens
  misc_RNA (1)...(19): siRNA sense strand
acucaggccuacucgggua

SEQ ID NO: 2587423 - RNA, 19 nt, Homo sapiens
  misc_RNA (1)...(19): siRNA sense strand
caagaagugcacugaaaau

SEQ ID NO: 2587424 - RNA, 19 nt, Homo sapiens
  misc_RNA (1)...(19): siRNA sense strand
augggaggguugaaugcaa

SEQ ID NO: 2587425 - RNA, 19 nt, Homo sapiens
  misc_RNA (1)...(19): siRNA sense strand
ugacuguagccgaggguaa

SEQ ID NO: 2587426 - RNA, 19 nt, Homo sapiens
  misc_RNA (1)...(19): siRNA sense strand
ggaugauacaagagaggau

SEQ ID NO: 2587427 - RNA, 19 nt, Homo sapiens
  misc_RNA (1)...(19): siRNA sense strand
aaggagaaggagagagaga

SEQ ID NO: 2587428 - RNA, 19 nt, Homo sapiens
  misc_RNA (1)...(19): siRNA sense strand
uaacagaaggagaaggaga

SEQ ID NO: 2587429 - RNA, 19 nt, Homo sapiens
  misc_RNA (1)...(19): siRNA sense strand
cuuuguggcuggagggaca

SEQ ID NO: 2587430 - RNA, 19 nt, Homo sapiens
  misc_RNA (1)...(19): siRNA sense strand
ggaacuuggcagaagguga

SEQ ID NO: 2587431 - RNA, 19 nt, Homo sapiens
  misc_RNA (1)...(19): siRNA sense strand
cugaagaugauguuggcua

SEQ ID NO: 2587432 - RNA, 19 nt, Homo sapiens
  misc_RNA (1)...(19): siRNA sense strand
caggcagugaggugggaaa

SEQ ID NO: 2587433 - RNA, 19 nt, Homo sapiens
  misc_RNA (1)...(19): siRNA sense strand
ccacagggaacuuggcaga

SEQ ID NO: 2587434 - RNA, 19 nt, Homo sapiens
  misc_RNA (1)...(19): siRNA sense strand
ggguaaaaccgauaaccaa

SEQ ID NO: 2587435 - RNA, 19 nt, Homo sapiens
  misc_RNA (1)...(19): siRNA sense strand
agacaaauagugagcaacu

SEQ ID NO: 2587436 - RNA, 19 nt, Homo sapiens
  misc_RNA (1)...(19): siRNA sense strand
cacggaagguggagcguca

SEQ ID NO: 2587437 - RNA, 19 nt, Homo sapiens
  misc_RNA (1)...(19): siRNA sense strand
cuuaacagaaggagaagga

SEQ ID NO: 2587438 - RNA, 19 nt, Homo sapiens
  misc_RNA (1)...(19): siRNA sense strand
gugaagaggugcuuuggca

SEQ ID NO: 2587439 - RNA, 19 nt, Homo sapiens
  misc_RNA (1)...(19): siRNA sense strand
cagcaggauuccauagcca

SEQ ID NO: 2587440 - RNA, 19 nt, Homo sapiens
  misc_RNA (1)...(19): siRNA sense strand
cggucaaccuaccaaucaa

SEQ ID NO: 2587441 - RNA, 19 nt, Homo sapiens
  misc_RNA (1)...(19): siRNA sense strand
caacuugguccauggcaga

SEQ ID NO: 2587442 - RNA, 19 nt, Homo sapiens
  misc_RNA (1)...(19): siRNA sense strand
ucauguauacagagcucua

SEQ ID NO: 2587443 - RNA, 19 nt, Homo sapiens
  misc_RNA (1)...(19): siRNA sense strand
uccaaguucccaagacaaa

SEQ ID NO: 2587444 - RNA, 19 nt, Homo sapiens
  misc_RNA (1)...(19): siRNA sense strand
gguaaaaccgauaaccaau

SEQ ID NO: 2587445 - RNA, 19 nt, Homo sapiens
  misc_RNA (1)...(19): siRNA sense strand
ucggaaugccucugaagau

SEQ ID NO: 2587446 - RNA, 19 nt, Homo sapiens
  misc_RNA (1)...(19): siRNA sense strand
aggugauacaggugguuca

SEQ ID NO: 2587447 - RNA, 19 nt, Homo sapiens
  misc_RNA (1)...(19): siRNA sense strand
acgugaagucugaggacca

SEQ ID NO: 2587448 - RNA, 19 nt, Homo sapiens
  misc_RNA (1)...(19): siRNA sense strand
acacaggggagaagccaua

SEQ ID NO: 2587449 - RNA, 19 nt, Homo sapiens
  misc_RNA (1)...(19): siRNA sense strand
aggagggcgugcuggagaa

SEQ ID NO: 2587450 - RNA, 19 nt, Homo sapiens
  misc_RNA (1)...(19): siRNA sense strand
gcaucaaggccguggagug

SEQ ID NO: 2587451 - RNA, 19 nt, Homo sapiens
  misc_RNA (1)...(19): siRNA sense strand
uguacaaggaugugcagaa

SEQ ID NO: 2587452 - RNA, 19 nt, Homo sapiens
  misc_RNA (1)...(19): siRNA sense strand
caggaagaguggugccagu

SEQ ID NO: 2587453 - RNA, 19 nt, Homo sapiens
  misc_RNA (1)...(19): siRNA sense strand
ggcagauuuugcaggaaua

SEQ ID NO: 2587454 - RNA, 19 nt, Homo sapiens
  misc_RNA (1)...(19): siRNA sense strand
cccaagaagaaguccaaga

SEQ ID NO: 2587455 - RNA, 19 nt, Homo sapiens
  misc_RNA (1)...(19): siRNA sense strand
aguccaagaagcacaaaga

SEQ ID NO: 2587456 - RNA, 19 nt, Homo sapiens
  misc_RNA (1)...(19): siRNA sense strand
uccaagaagcacaaagaca

SEQ ID NO: 2587457 - RNA, 19 nt, Homo sapiens
  misc_RNA (1)...(19): siRNA sense strand
ugggcagcauacaggacaa

SEQ ID NO: 2587458 - RNA, 19 nt, Homo sapiens
  misc_RNA (1)...(19): siRNA sense strand
agucaagagucgaguacca

SEQ ID NO: 2587459 - RNA, 19 nt, Homo sapiens
  misc_RNA (1)...(19): siRNA sense strand
acgaaugcuacgauggaua

SEQ ID NO: 2587460 - RNA, 19 nt, Homo sapiens
  misc_RNA (1)...(19): siRNA sense strand
augcaacagcagauggaaa

SEQ ID NO: 2587461 - RNA, 19 nt, Homo sapiens
  misc_RNA (1)...(19): siRNA sense strand
aauucaacauggaggucua

SEQ ID NO: 2587462 - RNA, 19 nt, Homo sapiens
  misc_RNA (1)...(19): siRNA sense strand
caagaugggugguugccaa

SEQ ID NO: 2587463 - RNA, 19 nt, Homo sapiens
  misc_RNA (1)...(19): siRNA sense strand
auuccagagccaagaguaa

SEQ ID NO: 2587464 - RNA, 19 nt, Homo sapiens
  misc_RNA (1)...(19): siRNA sense strand
gcucaaaaucagauauaga

SEQ ID NO: 2587465 - RNA, 19 nt, Homo sapiens
  misc_RNA (1)...(19): siRNA sense strand
ccucagaacaugcucaaaa

SEQ ID NO: 2587466 - RNA, 19 nt, Homo sapiens
  misc_RNA (1)...(19): siRNA sense strand
uuugagaauuccagagcca

SEQ ID NO: 2587467 - RNA, 19 nt, Homo sapiens
  misc_RNA (1)...(19): siRNA sense strand
cuaauggacaagaagugaa

SEQ ID NO: 2587468 - RNA, 19 nt, Homo sapiens
  misc_RNA (1)...(19): siRNA sense strand
gcuacgauggauaugaaau

SEQ ID NO: 2587469 - RNA, 19 nt, Homo sapiens
  misc_RNA (1)...(19): siRNA sense strand
gguuuaagcuccaugacac

SEQ ID NO: 2587470 - RNA, 19 nt, Homo sapiens
  misc_RNA (1)...(19): siRNA sense strand
guuuaagcuccaugacaca

SEQ ID NO: 2587471 - RNA, 19 nt, Homo sapiens
  misc_RNA (1)...(19): siRNA sense strand
ggaugaugagguaagggaa

SEQ ID NO: 2587472 - RNA, 19 nt, Homo sapiens
  misc_RNA (1)...(19): siRNA sense strand
agaaagaauaagacagaag

SEQ ID NO: 2587473 - RNA, 19 nt, Homo sapiens
  misc_RNA (1)...(19): siRNA sense strand
uggauuacagagugaauau

SEQ ID NO: 2587474 - RNA, 19 nt, Homo sapiens
  misc_RNA (1)...(19): siRNA sense strand
cguguauagaagugcgauu

SEQ ID NO: 2587475 - RNA, 19 nt, Homo sapiens
  misc_RNA (1)...(19): siRNA sense strand
gcgacaaaugggauacuau

SEQ ID NO: 2587476 - RNA, 19 nt, Homo sapiens
  misc_RNA (1)...(19): siRNA sense strand
uguauaaugcaacuggaaa

SEQ ID NO: 2587477 - RNA, 19 nt, Homo sapiens
  misc_RNA (1)...(19): siRNA sense strand
gaugaaaugaggaaggucu

SEQ ID NO: 2587478 - RNA, 19 nt, Homo sapiens
  misc_RNA (1)...(19): siRNA sense strand
guauaaugcaacuggaaag

SEQ ID NO: 2587479 - RNA, 19 nt, Homo sapiens
  misc_RNA (1)...(19): siRNA sense strand
ggaccaugucuacaagcaa

SEQ ID NO: 2587480 - RNA, 19 nt, Homo sapiens
  misc_RNA (1)...(19): siRNA sense strand
cguacaaguggcagaagga

SEQ ID NO: 2587481 - RNA, 19 nt, Homo sapiens
  misc_RNA (1)...(19): siRNA sense strand
aaggaaacagacagugcaa

SEQ ID NO: 2587482 - RNA, 19 nt, Homo sapiens
  misc_RNA (1)...(19): siRNA sense strand
ucgacgaaagagaaagaau

SEQ ID NO: 2587483 - RNA, 19 nt, Homo sapiens
  misc_RNA (1)...(19): siRNA sense strand
cuucugauuuucuggauaa

SEQ ID NO: 2587484 - RNA, 19 nt, Homo sapiens
  misc_RNA (1)...(19): siRNA sense strand
cuggauaaauuaaugggca

SEQ ID NO: 2587485 - RNA, 19 nt, Homo sapiens
  misc_RNA (1)...(19): siRNA sense strand
uggagcgacaaaugggaua

SEQ ID NO: 2587486 - RNA, 19 nt, Homo sapiens
  misc_RNA (1)...(19): siRNA sense strand
cuguccagguaaugccaaa

SEQ ID NO: 2587487 - RNA, 19 nt, Homo sapiens
  misc_RNA (1)...(19): siRNA sense strand
aagacaacacaaagaacuu

SEQ ID NO: 2587488 - RNA, 19 nt, Homo sapiens
  misc_RNA (1)...(19): siRNA sense strand
cgugagacacuuucggaca

SEQ ID NO: 2587489 - RNA, 19 nt, Homo sapiens
  misc_RNA (1)...(19): siRNA sense strand
ggggauaaccaccgugcua

SEQ ID NO: 2587490 - RNA, 19 nt, Homo sapiens
  misc_RNA (1)...(19): siRNA sense strand
uggaguaugcagcuguaaa

SEQ ID NO: 2587491 - RNA, 19 nt, Homo sapiens
  misc_RNA (1)...(19): siRNA sense strand
aaauuaaugggcaggacau

SEQ ID NO: 2587492 - RNA, 19 nt, Homo sapiens
  misc_RNA (1)...(19): siRNA sense strand
caugaagucacuacagaca

SEQ ID NO: 2587493 - RNA, 19 nt, Homo sapiens
  misc_RNA (1)...(19): siRNA sense strand
cgaccauggauuacagagu

SEQ ID NO: 2587494 - RNA, 19 nt, Homo sapiens
  misc_RNA (1)...(19): siRNA sense strand
augggaaagugcaggaaau

SEQ ID NO: 2587495 - RNA, 19 nt, Homo sapiens
  misc_RNA (1)...(19): siRNA sense strand
aggacuauguggaggcuau

SEQ ID NO: 2587496 - RNA, 19 nt, Homo sapiens
  misc_RNA (1)...(19): siRNA sense strand
cagcaaaacucuaugccua

SEQ ID NO: 2587497 - RNA, 19 nt, Homo sapiens
  misc_RNA (1)...(19): siRNA sense strand
aguuaagacuuguggccuu

SEQ ID NO: 2587498 - RNA, 19 nt, Homo sapiens
  misc_RNA (1)...(19): siRNA sense strand
gggaaaucuggaugccaaa

SEQ ID NO: 2587499 - RNA, 19 nt, Homo sapiens
  misc_RNA (1)...(19): siRNA sense strand
ugggaaaucuggaugccaa

SEQ ID NO: 2587500 - RNA, 19 nt, Homo sapiens
  misc_RNA (1)...(19): siRNA sense strand
ucgaugagcuggugaggga

SEQ ID NO: 2587501 - RNA, 19 nt, Homo sapiens
  misc_RNA (1)...(19): siRNA sense strand
ccauugugugggaaggaaa

SEQ ID NO: 2587502 - RNA, 19 nt, Homo sapiens
  misc_RNA (1)...(19): siRNA sense strand
ugggaaggaaagaaugaaa

SEQ ID NO: 2587503 - RNA, 19 nt, Homo sapiens
  misc_RNA (1)...(19): siRNA sense strand
ggagaaaggcuaugagguc

SEQ ID NO: 2587504 - RNA, 19 nt, Homo sapiens
  misc_RNA (1)...(19): siRNA sense strand
gggaaggaaagaaugaaaa

SEQ ID NO: 2587505 - RNA, 19 nt, Homo sapiens
  misc_RNA (1)...(19): siRNA sense strand
augaugagccggaggacuu

SEQ ID NO: 2587506 - RNA, 19 nt, Homo sapiens
  misc_RNA (1)...(19): siRNA sense strand
gggcagauguaaagagacc

SEQ ID NO: 2587507 - RNA, 19 nt, Homo sapiens
  misc_RNA (1)...(19): siRNA sense strand
auguaaagagaccggcaaa

SEQ ID NO: 2587508 - RNA, 19 nt, Homo sapiens
  misc_RNA (1)...(19): siRNA sense strand
ggaaggaaagaaugaaaau

SEQ ID NO: 2587509 - RNA, 19 nt, Homo sapiens
  misc_RNA (1)...(19): siRNA sense strand
cuaugagguccauggaauu

SEQ ID NO: 2587510 - RNA, 19 nt, Homo sapiens
  misc_RNA (1)...(19): siRNA sense strand
gguccauaguguccgggaa

SEQ ID NO: 2587511 - RNA, 19 nt, Homo sapiens
  misc_RNA (1)...(19): siRNA sense strand
ccauaguguccgggaauuu

SEQ ID NO: 2587512 - RNA, 19 nt, Homo sapiens
  misc_RNA (1)...(19): siRNA sense strand
ucccagaagaggagcuaau

SEQ ID NO: 2587513 - RNA, 19 nt, Homo sapiens
  misc_RNA (1)...(19): siRNA sense strand
cauucuugcacauuggaaa

SEQ ID NO: 2587514 - RNA, 19 nt, Homo sapiens
  misc_RNA (1)...(19): siRNA sense strand
aguaaagcccacagagauc

SEQ ID NO: 2587515 - RNA, 19 nt, Homo sapiens
  misc_RNA (1)...(19): siRNA sense strand
guggagcucaugaggacaa

SEQ ID NO: 2587516 - RNA, 19 nt, Homo sapiens
  misc_RNA (1)...(19): siRNA sense strand
guccauaguguccgggaau

SEQ ID NO: 2587517 - RNA, 19 nt, Homo sapiens
  misc_RNA (1)...(19): siRNA sense strand
gauguaaagagaccggcaa

SEQ ID NO: 2587518 - RNA, 19 nt, Homo sapiens
  misc_RNA (1)...(19): siRNA sense strand
aaacagaagcugaacugga

SEQ ID NO: 2587519 - RNA, 19 nt, Homo sapiens
  misc_RNA (1)...(19): siRNA sense strand
agaaaggcuaugaggucca

SEQ ID NO: 2587520 - RNA, 19 nt, Homo sapiens
  misc_RNA (1)...(19): siRNA sense strand
auuuaauacgggucgaauu

SEQ ID NO: 2587521 - RNA, 19 nt, Homo sapiens
  misc_RNA (1)...(19): siRNA sense strand
cugcggacguugacggagu

SEQ ID NO: 2587522 - RNA, 19 nt, Homo sapiens
  misc_RNA (1)...(19): siRNA sense strand
cguauaaucucuuugcagu

SEQ ID NO: 2587523 - RNA, 19 nt, Homo sapiens
  misc_RNA (1)...(19): siRNA sense strand
ggaguaaggaugucggaga

SEQ ID NO: 2587524 - RNA, 19 nt, Homo sapiens
  misc_RNA (1)...(19): siRNA sense strand
gggaggaggucauugccua

SEQ ID NO: 2587525 - RNA, 19 nt, Homo sapiens
  misc_RNA (1)...(19): siRNA sense strand
ccacugaagacaaggcuga

SEQ ID NO: 2587526 - RNA, 19 nt, Homo sapiens
  misc_RNA (1)...(19): siRNA sense strand
agaucaaggugaaggugga

SEQ ID NO: 2587527 - RNA, 19 nt, Homo sapiens
  misc_RNA (1)...(19): siRNA sense strand
gggaaggaggaguaaggau

SEQ ID NO: 2587528 - RNA, 19 nt, Homo sapiens
  misc_RNA (1)...(19): siRNA sense strand
ggagagaaaucaaacccau

SEQ ID NO: 2587529 - RNA, 19 nt, Homo sapiens
  misc_RNA (1)...(19): siRNA sense strand
ucaaggugaagguggacaa

SEQ ID NO: 2587530 - RNA, 19 nt, Homo sapiens
  misc_RNA (1)...(19): siRNA sense strand
ggaaggaggaguaaggaug

SEQ ID NO: 2587531 - RNA, 19 nt, Homo sapiens
  misc_RNA (1)...(19): siRNA sense strand
guggaggacaagugugaga

SEQ ID NO: 2587532 - RNA, 19 nt, Homo sapiens
  misc_RNA (1)...(19): siRNA sense strand
cuguggaggacaaguguga

SEQ ID NO: 2587533 - RNA, 19 nt, Homo sapiens
  misc_RNA (1)...(19): siRNA sense strand
cagacagaggagaggaacu

SEQ ID NO: 2587534 - RNA, 19 nt, Homo sapiens
  misc_RNA (1)...(19): siRNA sense strand
gcagugaaguaccggccau

SEQ ID NO: 2587535 - RNA, 19 nt, Homo sapiens
  misc_RNA (1)...(19): siRNA sense strand
cuguugaguccgugcugua

SEQ ID NO: 2587536 - RNA, 19 nt, Homo sapiens
  misc_RNA (1)...(19): siRNA sense strand
gugccuacccacuggacau

SEQ ID NO: 2587537 - RNA, 19 nt, Homo sapiens
  misc_RNA (1)...(19): siRNA sense strand
uuaaccugguguugaggaa

SEQ ID NO: 2587538 - RNA, 19 nt, Homo sapiens
  misc_RNA (1)...(19): siRNA sense strand
ccaucgaggugaaggccaa

SEQ ID NO: 2587539 - RNA, 19 nt, Homo sapiens
  misc_RNA (1)...(19): siRNA sense strand
cgacaaagccacugagccu

SEQ ID NO: 2587540 - RNA, 19 nt, Homo sapiens
  misc_RNA (1)...(19): siRNA sense strand
caagaaagcaggauggacu

SEQ ID NO: 2587541 - RNA, 19 nt, Homo sapiens
  misc_RNA (1)...(19): siRNA sense strand
ccuuagaggaagugauagu

SEQ ID NO: 2587542 - RNA, 19 nt, Homo sapiens
  misc_RNA (1)...(19): siRNA sense strand
ccagaagcaaggagggcau

SEQ ID NO: 2587543 - RNA, 19 nt, Homo sapiens
  misc_RNA (1)...(19): siRNA sense strand
guguuaugguggaugccaa

SEQ ID NO: 2587544 - RNA, 19 nt, Homo sapiens
  misc_RNA (1)...(19): siRNA sense strand
ccacugagccucugcccaa

SEQ ID NO: 2587545 - RNA, 19 nt, Homo sapiens
  misc_RNA (1)...(19): siRNA sense strand
uccugauaguugugggcaa

SEQ ID NO: 2587546 - RNA, 19 nt, Homo sapiens
  misc_RNA (1)...(19): siRNA sense strand
ugucuuaaugcuagaugaa

SEQ ID NO: 2587547 - RNA, 19 nt, Homo sapiens
  misc_RNA (1)...(19): siRNA sense strand
aguugugggcaaugagauu

SEQ ID NO: 2587548 - RNA, 19 nt, Homo sapiens
  misc_RNA (1)...(19): siRNA sense strand
caggaugggugcagcgaac

SEQ ID NO: 2587549 - RNA, 19 nt, Homo sapiens
  misc_RNA (1)...(19): siRNA sense strand
aggaagugauagugggcag

SEQ ID NO: 2587550 - RNA, 19 nt, Homo sapiens
  misc_RNA (1)...(19): siRNA sense strand
auucgagcuggaagagaua

SEQ ID NO: 2587551 - RNA, 19 nt, Homo sapiens
  misc_RNA (1)...(19): siRNA sense strand
ccacaauggcugaugagcu

SEQ ID NO: 2587552 - RNA, 19 nt, Homo sapiens
  misc_RNA (1)...(19): siRNA sense strand
agcuuuauaaccaggauua

SEQ ID NO: 2587553 - RNA, 19 nt, Homo sapiens
  misc_RNA (1)...(19): siRNA sense strand
caaauuggcugcucaggga

SEQ ID NO: 2587554 - RNA, 19 nt, Homo sapiens
  misc_RNA (1)...(19): siRNA sense strand
agucaaagguggaagacga

SEQ ID NO: 2587555 - RNA, 19 nt, Homo sapiens
  misc_RNA (1)...(19): siRNA sense strand
gcaaaggcuuccuggccaa

SEQ ID NO: 2587556 - RNA, 19 nt, Homo sapiens
  misc_RNA (1)...(19): siRNA sense strand
uguccgagggcaagggaaa

SEQ ID NO: 2587557 - RNA, 19 nt, Homo sapiens
  misc_RNA (1)...(19): siRNA sense strand
aagggaaagacgagucaaa

SEQ ID NO: 2587558 - RNA, 19 nt, Homo sapiens
  misc_RNA (1)...(19): siRNA sense strand
aagacgacccgaagggcaa

SEQ ID NO: 2587559 - RNA, 19 nt, Homo sapiens
  misc_RNA (1)...(19): siRNA sense strand
agggcaaggaggagagcuu

SEQ ID NO: 2587560 - RNA, 19 nt, Homo sapiens
  misc_RNA (1)...(19): siRNA sense strand
uggagagcgauguggacua

SEQ ID NO: 2587561 - RNA, 19 nt, Homo sapiens
  misc_RNA (1)...(19): siRNA sense strand
gcgaggugcaggugaaaau

SEQ ID NO: 2587562 - RNA, 19 nt, Homo sapiens
  misc_RNA (1)...(19): siRNA sense strand
cagcucacaaggaggaaga

SEQ ID NO: 2587563 - RNA, 19 nt, Homo sapiens
  misc_RNA (1)...(19): siRNA sense strand
gcaccacgucuacgggcaa

SEQ ID NO: 2587564 - RNA, 19 nt, Homo sapiens
  misc_RNA (1)...(19): siRNA sense strand
cugcaguaguggaggugaa

SEQ ID NO: 2587565 - RNA, 19 nt, Homo sapiens
  misc_RNA (1)...(19): siRNA sense strand
gcugagaaguggaaggauc

SEQ ID NO: 2587566 - RNA, 19 nt, Homo sapiens
  misc_RNA (1)...(19): siRNA sense strand
agauaaagacuaagugcca

SEQ ID NO: 2587567 - RNA, 19 nt, Homo sapiens
  misc_RNA (1)...(19): siRNA sense strand
aauauaucaucaugggcua

SEQ ID NO: 2587568 - RNA, 19 nt, Homo sapiens
  misc_RNA (1)...(19): siRNA sense strand
ccagauuacucuuggugga

SEQ ID NO: 2587569 - RNA, 19 nt, Homo sapiens
  misc_RNA (1)...(19): siRNA sense strand
caguaguggaggugaagga

SEQ ID NO: 2587570 - RNA, 19 nt, Homo sapiens
  misc_RNA (1)...(19): siRNA sense strand
aggugaaggagauucuaaa

SEQ ID NO: 2587571 - RNA, 19 nt, Homo sapiens
  misc_RNA (1)...(19): siRNA sense strand
uguaagccuauuagagcua

SEQ ID NO: 2587572 - RNA, 19 nt, Homo sapiens
  misc_RNA (1)...(19): siRNA sense strand
cgcuguaaauguaagccua

SEQ ID NO: 2587573 - RNA, 19 nt, Homo sapiens
  misc_RNA (1)...(19): siRNA sense strand
ccauugacuuccagcacga

SEQ ID NO: 2587574 - RNA, 19 nt, Homo sapiens
  misc_RNA (1)...(19): siRNA sense strand
guaaacauuccacgggaca

SEQ ID NO: 2587575 - RNA, 19 nt, Homo sapiens
  misc_RNA (1)...(19): siRNA sense strand
cggaaacuguagaggggca

SEQ ID NO: 2587576 - RNA, 19 nt, Homo sapiens
  misc_RNA (1)...(19): siRNA sense strand
cgggcuaaaguuaaagaga

SEQ ID NO: 2587577 - RNA, 19 nt, Homo sapiens
  misc_RNA (1)...(19): siRNA sense strand
aagcagugaacgcuguaaa

SEQ ID NO: 2587578 - RNA, 19 nt, Homo sapiens
  misc_RNA (1)...(19): siRNA sense strand
ccuguaagucugugugcga

SEQ ID NO: 2587579 - RNA, 19 nt, Homo sapiens
  misc_RNA (1)...(19): siRNA sense strand
cagaaaugaagaagggaaa

SEQ ID NO: 2587580 - RNA, 19 nt, Homo sapiens
  misc_RNA (1)...(19): siRNA sense strand
ugucaaaggaggaaagaau

SEQ ID NO: 2587581 - RNA, 19 nt, Homo sapiens
  misc_RNA (1)...(19): siRNA sense strand
gggaaaaggaagaaaagaa

SEQ ID NO: 2587582 - RNA, 19 nt, Homo sapiens
  misc_RNA (1)...(19): siRNA sense strand
cagacaacccagaaggaaa

SEQ ID NO: 2587583 - RNA, 19 nt, Homo sapiens
  misc_RNA (1)...(19): siRNA sense strand
gcagaaaugaagaagggaa

SEQ ID NO: 2587584 - RNA, 19 nt, Homo sapiens
  misc_RNA (1)...(19): siRNA sense strand
gggaagacucagaaaauaa

SEQ ID NO: 2587585 - RNA, 19 nt, Homo sapiens
  misc_RNA (1)...(19): siRNA sense strand
agagagaagaaaagggaaa

SEQ ID NO: 2587586 - RNA, 19 nt, Homo sapiens
  misc_RNA (1)...(19): siRNA sense strand
agacagugaaggagaaaca

SEQ ID NO: 2587587 - RNA, 19 nt, Homo sapiens
  misc_RNA (1)...(19): siRNA sense strand
cuucaagcaaggagagcaa

SEQ ID NO: 2587588 - RNA, 19 nt, Homo sapiens
  misc_RNA (1)...(19): siRNA sense strand
aggaaaaggaaaagggaga

SEQ ID NO: 2587589 - RNA, 19 nt, Homo sapiens
  misc_RNA (1)...(19): siRNA sense strand
aggaacagaaagagaaaga

SEQ ID NO: 2587590 - RNA, 19 nt, Homo sapiens
  misc_RNA (1)...(19): siRNA sense strand
caggaauacaagcaagaaa

SEQ ID NO: 2587591 - RNA, 19 nt, Homo sapiens
  misc_RNA (1)...(19): siRNA sense strand
gcaaaauaaaucaggaaga

SEQ ID NO: 2587592 - RNA, 19 nt, Homo sapiens
  misc_RNA (1)...(19): siRNA sense strand
aaaggaacagaaagagaaa

SEQ ID NO: 2587593 - RNA, 19 nt, Homo sapiens
  misc_RNA (1)...(19): siRNA sense strand
uggugaaauuagaguccua

SEQ ID NO: 2587594 - RNA, 19 nt, Homo sapiens
  misc_RNA (1)...(19): siRNA sense strand
uggaaacaguacuagcaaa

SEQ ID NO: 2587595 - RNA, 19 nt, Homo sapiens
  misc_RNA (1)...(19): siRNA sense strand
aagaagggaaauaugguua

SEQ ID NO: 2587596 - RNA, 19 nt, Homo sapiens
  misc_RNA (1)...(19): siRNA sense strand
agaaaagggaaaaggaaga

SEQ ID NO: 2587597 - RNA, 19 nt, Homo sapiens
  misc_RNA (1)...(19): siRNA sense strand
ugaugggauugaagaggaa

SEQ ID NO: 2587598 - RNA, 19 nt, Homo sapiens
  misc_RNA (1)...(19): siRNA sense strand
agagaugagucaaggaacu

SEQ ID NO: 2587599 - RNA, 19 nt, Homo sapiens
  misc_RNA (1)...(19): siRNA sense strand
ggaaaaugguugggcagaa

SEQ ID NO: 2587600 - RNA, 19 nt, Homo sapiens
  misc_RNA (1)...(19): siRNA sense strand
aggaaaagggagacaagaa

SEQ ID NO: 2587601 - RNA, 19 nt, Homo sapiens
  misc_RNA (1)...(19): siRNA sense strand
uggaaaucuagaugaggaa

SEQ ID NO: 2587602 - RNA, 19 nt, Homo sapiens
  misc_RNA (1)...(19): siRNA sense strand
aggaacuaauguuggaaaa

SEQ ID NO: 2587603 - RNA, 19 nt, Homo sapiens
  misc_RNA (1)...(19): siRNA sense strand
aagcuaagacagaagaaaa

SEQ ID NO: 2587604 - RNA, 19 nt, Homo sapiens
  misc_RNA (1)...(19): siRNA sense strand
gaagaaaagggaaaaggaa

SEQ ID NO: 2587605 - RNA, 19 nt, Homo sapiens
  misc_RNA (1)...(19): siRNA sense strand
ucaaaggaggaaagaauga

SEQ ID NO: 2587606 - RNA, 19 nt, Homo sapiens
  misc_RNA (1)...(19): siRNA sense strand
aagaugaccaagaaguaua

SEQ ID NO: 2587607 - RNA, 19 nt, Homo sapiens
  misc_RNA (1)...(19): siRNA sense strand
uugcagagcaggaugauau

SEQ ID NO: 2587608 - RNA, 19 nt, Homo sapiens
  misc_RNA (1)...(19): siRNA sense strand
cagcaauguaccuaaguuu

SEQ ID NO: 2587609 - RNA, 19 nt, Homo sapiens
  misc_RNA (1)...(19): siRNA sense strand
gaaaucuagaugaggaaca

SEQ ID NO: 2587610 - RNA, 19 nt, Homo sapiens
  misc_RNA (1)...(19): siRNA sense strand
ccaagaaguauaugaugau

SEQ ID NO: 2587611 - RNA, 19 nt, Homo sapiens
  misc_RNA (1)...(19): siRNA sense strand
guguaaaccaagaccauga

SEQ ID NO: 2587612 - RNA, 19 nt, Homo sapiens
  misc_RNA (1)...(19): siRNA sense strand
accaagaaguauaugauga

SEQ ID NO: 2587613 - RNA, 19 nt, Homo sapiens
  misc_RNA (1)...(19): siRNA sense strand
acaaugauggagagaucua

SEQ ID NO: 2587614 - RNA, 19 nt, Homo sapiens
  misc_RNA (1)...(19): siRNA sense strand
gagcaaaauaaaucaggaa

SEQ ID NO: 2587615 - RNA, 19 nt, Homo sapiens
  misc_RNA (1)...(19): siRNA sense strand
cuucagagucacagggcca

SEQ ID NO: 2587616 - RNA, 19 nt, Homo sapiens
  misc_RNA (1)...(19): siRNA sense strand
gggaaauuuaugucagcau

SEQ ID NO: 2587617 - RNA, 19 nt, Homo sapiens
  misc_RNA (1)...(19): siRNA sense strand
agaacaccuuccagagcaa

SEQ ID NO: 2587618 - RNA, 19 nt, Homo sapiens
  misc_RNA (1)...(19): siRNA sense strand
gagaaacauaugaagacau

SEQ ID NO: 2587619 - RNA, 19 nt, Homo sapiens
  misc_RNA (1)...(19): siRNA sense strand
agacaacccagaaggaaaa

SEQ ID NO: 2587620 - RNA, 19 nt, Homo sapiens
  misc_RNA (1)...(19): siRNA sense strand
gcaagggaagacucagaaa

SEQ ID NO: 2587621 - RNA, 19 nt, Homo sapiens
  misc_RNA (1)...(19): siRNA sense strand
ggaaaagggagacaagaau

SEQ ID NO: 2587622 - RNA, 19 nt, Homo sapiens
  misc_RNA (1)...(19): siRNA sense strand
aggaagauaggaagauaga

SEQ ID NO: 2587623 - RNA, 19 nt, Homo sapiens
  misc_RNA (1)...(19): siRNA sense strand
aggccaaagauucggaaca

SEQ ID NO: 2587624 - RNA, 19 nt, Homo sapiens
  misc_RNA (1)...(19): siRNA sense strand
agauagaugcugcuaagaa

SEQ ID NO: 2587625 - RNA, 19 nt, Homo sapiens
  misc_RNA (1)...(19): siRNA sense strand
auucaacaaccaaggaaau

SEQ ID NO: 2587626 - RNA, 19 nt, Homo sapiens
  misc_RNA (1)...(19): siRNA sense strand
cuggaaaucuagaugagga

SEQ ID NO: 2587627 - RNA, 19 nt, Homo sapiens
  misc_RNA (1)...(19): siRNA sense strand
acagugaaggagaaacaua

SEQ ID NO: 2587628 - RNA, 19 nt, Homo sapiens
  misc_RNA (1)...(19): siRNA sense strand
cagugaaggagaaacauau

SEQ ID NO: 2587629 - RNA, 19 nt, Homo sapiens
  misc_RNA (1)...(19): siRNA sense strand
acauagaagcauccaaaga

SEQ ID NO: 2587630 - RNA, 19 nt, Homo sapiens
  misc_RNA (1)...(19): siRNA sense strand
gcaucuaugacaaugacua

SEQ ID NO: 2587631 - RNA, 19 nt, Homo sapiens
  misc_RNA (1)...(19): siRNA sense strand
gagguuagagcuggagaaa

SEQ ID NO: 2587632 - RNA, 19 nt, Homo sapiens
  misc_RNA (1)...(19): siRNA sense strand
caaggagagcaaauugaaa

SEQ ID NO: 2587633 - RNA, 19 nt, Homo sapiens
  misc_RNA (1)...(19): siRNA sense strand
cagaaaugaagaagggaaa

SEQ ID NO: 2587634 - RNA, 19 nt, Homo sapiens
  misc_RNA (1)...(19): siRNA sense strand
ugucaaaggaggaaagaau

SEQ ID NO: 2587635 - RNA, 19 nt, Homo sapiens
  misc_RNA (1)...(19): siRNA sense strand
gggaaaaggaagaaaagaa

SEQ ID NO: 2587636 - RNA, 19 nt, Homo sapiens
  misc_RNA (1)...(19): siRNA sense strand
cagacaacccagaaggaaa

SEQ ID NO: 2587637 - RNA, 19 nt, Homo sapiens
  misc_RNA (1)...(19): siRNA sense strand
gcagaaaugaagaagggaa

SEQ ID NO: 2587638 - RNA, 19 nt, Homo sapiens
  misc_RNA (1)...(19): siRNA sense strand
gggaagacucagaaaauaa

SEQ ID NO: 2587639 - RNA, 19 nt, Homo sapiens
  misc_RNA (1)...(19): siRNA sense strand
agagagaagaaaagggaaa

SEQ ID NO: 2587640 - RNA, 19 nt, Homo sapiens
  misc_RNA (1)...(19): siRNA sense strand
agacagugaaggagaaaca

SEQ ID NO: 2587641 - RNA, 19 nt, Homo sapiens
  misc_RNA (1)...(19): siRNA sense strand
cuucaagcaaggagagcaa

SEQ ID NO: 2587642 - RNA, 19 nt, Homo sapiens
  misc_RNA (1)...(19): siRNA sense strand
aggaaaaggaaaagggaga

SEQ ID NO: 2587643 - RNA, 19 nt, Homo sapiens
  misc_RNA (1)...(19): siRNA sense strand
aggaacagaaagagaaaga

SEQ ID NO: 2587644 - RNA, 19 nt, Homo sapiens
  misc_RNA (1)...(19): siRNA sense strand
caggaauacaagcaagaaa

SEQ ID NO: 2587645 - RNA, 19 nt, Homo sapiens
  misc_RNA (1)...(19): siRNA sense strand
gcaaaauaaaucaggaaga

SEQ ID NO: 2587646 - RNA, 19 nt, Homo sapiens
  misc_RNA (1)...(19): siRNA sense strand
aaaggaacagaaagagaaa

SEQ ID NO: 2587647 - RNA, 19 nt, Homo sapiens
  misc_RNA (1)...(19): siRNA sense strand
uggugaaauuagaguccua

SEQ ID NO: 2587648 - RNA, 19 nt, Homo sapiens
  misc_RNA (1)...(19): siRNA sense strand
uggaaacaguacuagcaaa

SEQ ID NO: 2587649 - RNA, 19 nt, Homo sapiens
  misc_RNA (1)...(19): siRNA sense strand
aagaagggaaauaugguua

SEQ ID NO: 2587650 - RNA, 19 nt, Homo sapiens
  misc_RNA (1)...(19): siRNA sense strand
agaaaagggaaaaggaaga

SEQ ID NO: 2587651 - RNA, 19 nt, Homo sapiens
  misc_RNA (1)...(19): siRNA sense strand
ugaugggauugaagaggaa

SEQ ID NO: 2587652 - RNA, 19 nt, Homo sapiens
  misc_RNA (1)...(19): siRNA sense strand
agagaugagucaaggaacu

SEQ ID NO: 2587653 - RNA, 19 nt, Homo sapiens
  misc_RNA (1)...(19): siRNA sense strand
ggaaaaugguugggcagaa

SEQ ID NO: 2587654 - RNA, 19 nt, Homo sapiens
  misc_RNA (1)...(19): siRNA sense strand
aggaaaagggagacaagaa

SEQ ID NO: 2587655 - RNA, 19 nt, Homo sapiens
  misc_RNA (1)...(19): siRNA sense strand
uggaaaucuagaugaggaa

SEQ ID NO: 2587656 - RNA, 19 nt, Homo sapiens
  misc_RNA (1)...(19): siRNA sense strand
aggaacuaauguuggaaaa

SEQ ID NO: 2587657 - RNA, 19 nt, Homo sapiens
  misc_RNA (1)...(19): siRNA sense strand
aagcuaagacagaagaaaa

SEQ ID NO: 2587658 - RNA, 19 nt, Homo sapiens
  misc_RNA (1)...(19): siRNA sense strand
gaagaaaagggaaaaggaa

SEQ ID NO: 2587659 - RNA, 19 nt, Homo sapiens
  misc_RNA (1)...(19): siRNA sense strand
ucaaaggaggaaagaauga

SEQ ID NO: 2587660 - RNA, 19 nt, Homo sapiens
  misc_RNA (1)...(19): siRNA sense strand
aagaugaccaagaaguaua

SEQ ID NO: 2587661 - RNA, 19 nt, Homo sapiens
  misc_RNA (1)...(19): siRNA sense strand
uugcagagcaggaugauau

SEQ ID NO: 2587662 - RNA, 19 nt, Homo sapiens
  misc_RNA (1)...(19): siRNA sense strand
cagcaauguaccuaaguuu

SEQ ID NO: 2587663 - RNA, 19 nt, Homo sapiens
  misc_RNA (1)...(19): siRNA sense strand
gaaaucuagaugaggaaca

SEQ ID NO: 2587664 - RNA, 19 nt, Homo sapiens
  misc_RNA (1)...(19): siRNA sense strand
ccaagaaguauaugaugau

SEQ ID NO: 2587665 - RNA, 19 nt, Homo sapiens
  misc_RNA (1)...(19): siRNA sense strand
guguaaaccaagaccauga

SEQ ID NO: 2587666 - RNA, 19 nt, Homo sapiens
  misc_RNA (1)...(19): siRNA sense strand
accaagaaguauaugauga

SEQ ID NO: 2587667 - RNA, 19 nt, Homo sapiens
  misc_RNA (1)...(19): siRNA sense strand
acaaugauggagagaucua

SEQ ID NO: 2587668 - RNA, 19 nt, Homo sapiens
  misc_RNA (1)...(19): siRNA sense strand
gagcaaaauaaaucaggaa

SEQ ID NO: 2587669 - RNA, 19 nt, Homo sapiens
  misc_RNA (1)...(19): siRNA sense strand
cuucagagucacagggcca

SEQ ID NO: 2587670 - RNA, 19 nt, Homo sapiens
  misc_RNA (1)...(19): siRNA sense strand
gggaaauuuaugucagcau

SEQ ID NO: 2587671 - RNA, 19 nt, Homo sapiens
  misc_RNA (1)...(19): siRNA sense strand
agaacaccuuccagagcaa

SEQ ID NO: 2587672 - RNA, 19 nt, Homo sapiens
  misc_RNA (1)...(19): siRNA sense strand
gagaaacauaugaagacau

SEQ ID NO: 2587673 - RNA, 19 nt, Homo sapiens
  misc_RNA (1)...(19): siRNA sense strand
agacaacccagaaggaaaa

SEQ ID NO: 2587674 - RNA, 19 nt, Homo sapiens
  misc_RNA (1)...(19): siRNA sense strand
gcaagggaagacucagaaa

SEQ ID NO: 2587675 - RNA, 19 nt, Homo sapiens
  misc_RNA (1)...(19): siRNA sense strand
ggaaaagggagacaagaau

SEQ ID NO: 2587676 - RNA, 19 nt, Homo sapiens
  misc_RNA (1)...(19): siRNA sense strand
aggaagauaggaagauaga

SEQ ID NO: 2587677 - RNA, 19 nt, Homo sapiens
  misc_RNA (1)...(19): siRNA sense strand
aggccaaagauucggaaca

SEQ ID NO: 2587678 - RNA, 19 nt, Homo sapiens
  misc_RNA (1)...(19): siRNA sense strand
agauagaugcugcuaagaa

SEQ ID NO: 2587679 - RNA, 19 nt, Homo sapiens
  misc_RNA (1)...(19): siRNA sense strand
auucaacaaccaaggaaau

SEQ ID NO: 2587680 - RNA, 19 nt, Homo sapiens
  misc_RNA (1)...(19): siRNA sense strand
cuggaaaucuagaugagga

SEQ ID NO: 2587681 - RNA, 19 nt, Homo sapiens
  misc_RNA (1)...(19): siRNA sense strand
acagugaaggagaaacaua

SEQ ID NO: 2587682 - RNA, 19 nt, Homo sapiens
  misc_RNA (1)...(19): siRNA sense strand
cagugaaggagaaacauau

SEQ ID NO: 2587683 - RNA, 19 nt, Homo sapiens
  misc_RNA (1)...(19): siRNA sense strand
acauagaagcauccaaaga

SEQ ID NO: 2587684 - RNA, 19 nt, Homo sapiens
  misc_RNA (1)...(19): siRNA sense strand
gcaucuaugacaaugacua

SEQ ID NO: 2587685 - RNA, 19 nt, Homo sapiens
  misc_RNA (1)...(19): siRNA sense strand
gagguuagagcuggagaaa

SEQ ID NO: 2587686 - RNA, 19 nt, Homo sapiens
  misc_RNA (1)...(19): siRNA sense strand
caaggagagcaaauugaaa

SEQ ID NO: 2587687 - RNA, 19 nt, Homo sapiens
  misc_RNA (1)...(19): siRNA sense strand
ccaucagagucgaagauaa

SEQ ID NO: 2587688 - RNA, 19 nt, Homo sapiens
  misc_RNA (1)...(19): siRNA sense strand
ggaacaaagaggaggcaca

SEQ ID NO: 2587689 - RNA, 19 nt, Homo sapiens
  misc_RNA (1)...(19): siRNA sense strand
aagauaaauugcagagaca

SEQ ID NO: 2587690 - RNA, 19 nt, Homo sapiens
  misc_RNA (1)...(19): siRNA sense strand
uggcauaacuguugaggga

SEQ ID NO: 2587691 - RNA, 19 nt, Homo sapiens
  misc_RNA (1)...(19): siRNA sense strand
ggacaauggagauggcaca

SEQ ID NO: 2587692 - RNA, 19 nt, Homo sapiens
  misc_RNA (1)...(19): siRNA sense strand
cagugaaggauuuggauau

SEQ ID NO: 2587693 - RNA, 19 nt, Homo sapiens
  misc_RNA (1)...(19): siRNA sense strand
auacacacccuuugagaaa

SEQ ID NO: 2587694 - RNA, 19 nt, Homo sapiens
  misc_RNA (1)...(19): siRNA sense strand
ccagcaaagugaaggcaga

SEQ ID NO: 2587695 - RNA, 19 nt, Homo sapiens
  misc_RNA (1)...(19): siRNA sense strand
gguuggaagcuguagggaa

SEQ ID NO: 2587696 - RNA, 19 nt, Homo sapiens
  misc_RNA (1)...(19): siRNA sense strand
uggaguugcucguggaaga

SEQ ID NO: 2587697 - RNA, 19 nt, Homo sapiens
  misc_RNA (1)...(19): siRNA sense strand
agucuuuggaccaggaaua

SEQ ID NO: 2587698 - RNA, 19 nt, Homo sapiens
  misc_RNA (1)...(19): siRNA sense strand
ggaaacaccugaaggguac

SEQ ID NO: 2587699 - RNA, 19 nt, Homo sapiens
  misc_RNA (1)...(19): siRNA sense strand
ccacauaugaugccagcaa

SEQ ID NO: 2587700 - RNA, 19 nt, Homo sapiens
  misc_RNA (1)...(19): siRNA sense strand
guuaagugaagaugaggaa

SEQ ID NO: 2587701 - RNA, 19 nt, Homo sapiens
  misc_RNA (1)...(19): siRNA sense strand
gcaaagcagguguggaaaa

SEQ ID NO: 2587702 - RNA, 19 nt, Homo sapiens
  misc_RNA (1)...(19): siRNA sense strand
uaacggaccaagaaggaaa

SEQ ID NO: 2587703 - RNA, 19 nt, Homo sapiens
  misc_RNA (1)...(19): siRNA sense strand
ugacaauaaagaugggaca

SEQ ID NO: 2587704 - RNA, 19 nt, Homo sapiens
  misc_RNA (1)...(19): siRNA sense strand
aggaaacaccugaagggua

SEQ ID NO: 2587705 - RNA, 19 nt, Homo sapiens
  misc_RNA (1)...(19): siRNA sense strand
ccuuaaagauauuugcuca

SEQ ID NO: 2587706 - RNA, 19 nt, Homo sapiens
  misc_RNA (1)...(19): siRNA sense strand
gaccaggaauagaagggaa

SEQ ID NO: 2587707 - RNA, 19 nt, Homo sapiens
  misc_RNA (1)...(19): siRNA sense strand
ccgcagaagccuguggaua

SEQ ID NO: 2587708 - RNA, 19 nt, Homo sapiens
  misc_RNA (1)...(19): siRNA sense strand
ggagagaggagaagcggga

SEQ ID NO: 2587709 - RNA, 19 nt, Homo sapiens
  misc_RNA (1)...(19): siRNA sense strand
aaggcaagauugaugcaaa

SEQ ID NO: 2587710 - RNA, 19 nt, Homo sapiens
  misc_RNA (1)...(19): siRNA sense strand
ccugaaggguacaaaguca

SEQ ID NO: 2587711 - RNA, 19 nt, Homo sapiens
  misc_RNA (1)...(19): siRNA sense strand
ugugaaaacuggcgaagaa

SEQ ID NO: 2587712 - RNA, 19 nt, Homo sapiens
  misc_RNA (1)...(19): siRNA sense strand
ucguggaagacaaaggaaa

SEQ ID NO: 2587713 - RNA, 19 nt, Homo sapiens
  misc_RNA (1)...(19): siRNA sense strand
gggaguacuucgucaacau

SEQ ID NO: 2587714 - RNA, 19 nt, Homo sapiens
  misc_RNA (1)...(19): siRNA sense strand
uagcaaagccauuguggau

SEQ ID NO: 2587715 - RNA, 19 nt, Homo sapiens
  misc_RNA (1)...(19): siRNA sense strand
gccaagaagcagacgccaa

SEQ ID NO: 2587716 - RNA, 19 nt, Homo sapiens
  misc_RNA (1)...(19): siRNA sense strand
cuggaaacauggugaagca

SEQ ID NO: 2587717 - RNA, 19 nt, Homo sapiens
  misc_RNA (1)...(19): siRNA sense strand
guuggaagcuguagggaac

SEQ ID NO: 2587718 - RNA, 19 nt, Homo sapiens
  misc_RNA (1)...(19): siRNA sense strand
agaaguggucugaaggcaa

SEQ ID NO: 2587719 - RNA, 19 nt, Homo sapiens
  misc_RNA (1)...(19): siRNA sense strand
ccucuaaagucguggcauc

SEQ ID NO: 2587720 - RNA, 19 nt, Homo sapiens
  misc_RNA (1)...(19): siRNA sense strand
agacggaggaccuggaaga

SEQ ID NO: 2587721 - RNA, 19 nt, Homo sapiens
  misc_RNA (1)...(19): siRNA sense strand
gcgcaaaaggcaagauuga

SEQ ID NO: 2587722 - RNA, 19 nt, Homo sapiens
  misc_RNA (1)...(19): siRNA sense strand
cagcggacuucgugguaga

SEQ ID NO: 2587723 - RNA, 19 nt, Homo sapiens
  misc_RNA (1)...(19): siRNA sense strand
caugaaguaugguggcgaa

SEQ ID NO: 2587724 - RNA, 19 nt, Homo sapiens
  misc_RNA (1)...(19): siRNA sense strand
uugacaaggcccagggaga

SEQ ID NO: 2587725 - RNA, 19 nt, Homo sapiens
  misc_RNA (1)...(19): siRNA sense strand
uaagugaagaugaggaaga

SEQ ID NO: 2587726 - RNA, 19 nt, Homo sapiens
  misc_RNA (1)...(19): siRNA sense strand
augaggaagacguggauuu

SEQ ID NO: 2587727 - RNA, 19 nt, Homo sapiens
  misc_RNA (1)...(19): siRNA sense strand
accaggaauagaagggaaa

SEQ ID NO: 2587728 - RNA, 19 nt, Homo sapiens
  misc_RNA (1)...(19): siRNA sense strand
ucacagaggaugcaggaga

SEQ ID NO: 2587729 - RNA, 19 nt, Homo sapiens
  misc_RNA (1)...(19): siRNA sense strand
acaaaggaaaccaggugua

SEQ ID NO: 2587730 - RNA, 19 nt, Homo sapiens
  misc_RNA (1)...(19): siRNA sense strand
cgcaggaauuggugggcuu

SEQ ID NO: 2587731 - RNA, 19 nt, Homo sapiens
  misc_RNA (1)...(19): siRNA sense strand
uuacauggucucaguuaaa

SEQ ID NO: 2587732 - RNA, 19 nt, Homo sapiens
  misc_RNA (1)...(19): siRNA sense strand
uggaggaggcaccgguaaa

SEQ ID NO: 2587733 - RNA, 19 nt, Homo sapiens
  misc_RNA (1)...(19): siRNA sense strand
gcgaauaugcuguucacau

SEQ ID NO: 2587734 - RNA, 19 nt, Homo sapiens
  misc_RNA (1)...(19): siRNA sense strand
gaagagucaaagagagcau

SEQ ID NO: 2587735 - RNA, 19 nt, Homo sapiens
  misc_RNA (1)...(19): siRNA sense strand
ccaucgaugucaaguucaa

SEQ ID NO: 2587736 - RNA, 19 nt, Homo sapiens
  misc_RNA (1)...(19): siRNA sense strand
gcauguaggcaaccagcaa

SEQ ID NO: 2587737 - RNA, 19 nt, Homo sapiens
  misc_RNA (1)...(19): siRNA sense strand
aguacaacgaccagaauga

SEQ ID NO: 2587738 - RNA, 19 nt, Homo sapiens
  misc_RNA (1)...(19): siRNA sense strand
cgacaauggugaugggacc

SEQ ID NO: 2587739 - RNA, 19 nt, Homo sapiens
  misc_RNA (1)...(19): siRNA sense strand
uaccagaggcgcaggaauu

SEQ ID NO: 2587740 - RNA, 19 nt, Homo sapiens
  misc_RNA (1)...(19): siRNA sense strand
uggcgaagaaguaggcuuu

SEQ ID NO: 2587741 - RNA, 19 nt, Homo sapiens
  misc_RNA (1)...(19): siRNA sense strand
gggaagagucaaagagagc

SEQ ID NO: 2587742 - RNA, 19 nt, Homo sapiens
  misc_RNA (1)...(19): siRNA sense strand
agaacuggcaagacggcaa

SEQ ID NO: 2587743 - RNA, 19 nt, Homo sapiens
  misc_RNA (1)...(19): siRNA sense strand
cacagaggaugcaggagaa

SEQ ID NO: 2587744 - RNA, 19 nt, Homo sapiens
  misc_RNA (1)...(19): siRNA sense strand
agaugcagcucgagaaugu

SEQ ID NO: 2587745 - RNA, 19 nt, Homo sapiens
  misc_RNA (1)...(19): siRNA sense strand
agaaguaggcuuugugguu

SEQ ID NO: 2587746 - RNA, 19 nt, Homo sapiens
  misc_RNA (1)...(19): siRNA sense strand
gcuuugugguugaugccaa

SEQ ID NO: 2587747 - RNA, 19 nt, Homo sapiens
  misc_RNA (1)...(19): siRNA sense strand
ggaagauggcaccugcaaa

SEQ ID NO: 2587748 - RNA, 19 nt, Homo sapiens
  misc_RNA (1)...(19): siRNA sense strand
cgaagaaagccagggccua

SEQ ID NO: 2587749 - RNA, 19 nt, Homo sapiens
  misc_RNA (1)...(19): siRNA sense strand
ccagcaaggugaaggccca

SEQ ID NO: 2587750 - RNA, 19 nt, Homo sapiens
  misc_RNA (1)...(19): siRNA sense strand
gauaaauugcagagacaac

SEQ ID NO: 2587751 - RNA, 19 nt, Homo sapiens
  misc_RNA (1)...(19): siRNA sense strand
ggccgaugucauugagaau

SEQ ID NO: 2587752 - RNA, 19 nt, Homo sapiens
  misc_RNA (1)...(19): siRNA sense strand
gguccaagaugcaaggcuu

SEQ ID NO: 2587753 - RNA, 19 nt, Homo sapiens
  misc_RNA (1)...(19): siRNA sense strand
ccuccaaccugcaggacga

SEQ ID NO: 2587754 - RNA, 19 nt, Homo sapiens
  misc_RNA (1)...(19): siRNA sense strand
cagaagagagagaaggaaa

SEQ ID NO: 2587755 - RNA, 19 nt, Homo sapiens
  misc_RNA (1)...(19): siRNA sense strand
gcucauugaaggaaagaaa

SEQ ID NO: 2587756 - RNA, 19 nt, Homo sapiens
  misc_RNA (1)...(19): siRNA sense strand
gggagaagaagcagaggaa

SEQ ID NO: 2587757 - RNA, 19 nt, Homo sapiens
  misc_RNA (1)...(19): siRNA sense strand
agagagaagagaagguaaa

SEQ ID NO: 2587758 - RNA, 19 nt, Homo sapiens
  misc_RNA (1)...(19): siRNA sense strand
cuaaagaaguagcagaaaa

SEQ ID NO: 2587759 - RNA, 19 nt, Homo sapiens
  misc_RNA (1)...(19): siRNA sense strand
aagaaauggcucagaagaa

SEQ ID NO: 2587760 - RNA, 19 nt, Homo sapiens
  misc_RNA (1)...(19): siRNA sense strand
ucacaagaguggugguaca

SEQ ID NO: 2587761 - RNA, 19 nt, Homo sapiens
  misc_RNA (1)...(19): siRNA sense strand
agaacaggucuuagauaaa

SEQ ID NO: 2587762 - RNA, 19 nt, Homo sapiens
  misc_RNA (1)...(19): siRNA sense strand
aaacagugauccaggaaaa

SEQ ID NO: 2587763 - RNA, 19 nt, Homo sapiens
  misc_RNA (1)...(19): siRNA sense strand
aggaaagcccugagcagaa

SEQ ID NO: 2587764 - RNA, 19 nt, Homo sapiens
  misc_RNA (1)...(19): siRNA sense strand
gagagagaagagaagguaa

SEQ ID NO: 2587765 - RNA, 19 nt, Homo sapiens
  misc_RNA (1)...(19): siRNA sense strand
agacuaaggagcuggaaga

SEQ ID NO: 2587766 - RNA, 19 nt, Homo sapiens
  misc_RNA (1)...(19): siRNA sense strand
aggaggaagacgugggaga

SEQ ID NO: 2587767 - RNA, 19 nt, Homo sapiens
  misc_RNA (1)...(19): siRNA sense strand
auauaguggaggagaagaa

SEQ ID NO: 2587768 - RNA, 19 nt, Homo sapiens
  misc_RNA (1)...(19): siRNA sense strand
aggaagagccacagaaagu

SEQ ID NO: 2587769 - RNA, 19 nt, Homo sapiens
  misc_RNA (1)...(19): siRNA sense strand
gaguaaucacagaagaaau

SEQ ID NO: 2587770 - RNA, 19 nt, Homo sapiens
  misc_RNA (1)...(19): siRNA sense strand
ccaagguaguagagaggga

SEQ ID NO: 2587771 - RNA, 19 nt, Homo sapiens
  misc_RNA (1)...(19): siRNA sense strand
ccaaugagcugaaagcaga

SEQ ID NO: 2587772 - RNA, 19 nt, Homo sapiens
  misc_RNA (1)...(19): siRNA sense strand
uggaagagaagguggcaga

SEQ ID NO: 2587773 - RNA, 19 nt, Homo sapiens
  misc_RNA (1)...(19): siRNA sense strand
gguaaaagaaacacaggaa

SEQ ID NO: 2587774 - RNA, 19 nt, Homo sapiens
  misc_RNA (1)...(19): siRNA sense strand
ucagaagaaacaagagauu

SEQ ID NO: 2587775 - RNA, 19 nt, Homo sapiens
  misc_RNA (1)...(19): siRNA sense strand
caaauuagaaggaggagca

SEQ ID NO: 2587776 - RNA, 19 nt, Homo sapiens
  misc_RNA (1)...(19): siRNA sense strand
agauccugcuaaagaaaua

SEQ ID NO: 2587777 - RNA, 19 nt, Homo sapiens
  misc_RNA (1)...(19): siRNA sense strand
aagaguaaucacagaagaa

SEQ ID NO: 2587778 - RNA, 19 nt, Homo sapiens
  misc_RNA (1)...(19): siRNA sense strand
agaaacaugccaagggaca

SEQ ID NO: 2587779 - RNA, 19 nt, Homo sapiens
  misc_RNA (1)...(19): siRNA sense strand
uguuggaggaacuggauaa

SEQ ID NO: 2587780 - RNA, 19 nt, Homo sapiens
  misc_RNA (1)...(19): siRNA sense strand
agaaacacaggaagacaaa

SEQ ID NO: 2587781 - RNA, 19 nt, Homo sapiens
  misc_RNA (1)...(19): siRNA sense strand
acucagaagguguggacau

SEQ ID NO: 2587782 - RNA, 19 nt, Homo sapiens
  misc_RNA (1)...(19): siRNA sense strand
gcaauuuaauguuggagga

SEQ ID NO: 2587783 - RNA, 19 nt, Homo sapiens
  misc_RNA (1)...(19): siRNA sense strand
gcaagacaugggagaagaa

SEQ ID NO: 2587784 - RNA, 19 nt, Homo sapiens
  misc_RNA (1)...(19): siRNA sense strand
gcucagaagaaacaagaga

SEQ ID NO: 2587785 - RNA, 19 nt, Homo sapiens
  misc_RNA (1)...(19): siRNA sense strand
aagaaacacaggaagacaa

SEQ ID NO: 2587786 - RNA, 19 nt, Homo sapiens
  misc_RNA (1)...(19): siRNA sense strand
agacaaauuagaaggagga

SEQ ID NO: 2587787 - RNA, 19 nt, Homo sapiens
  misc_RNA (1)...(19): siRNA sense strand
ugacuaugacccagaagaa

SEQ ID NO: 2587788 - RNA, 19 nt, Homo sapiens
  misc_RNA (1)...(19): siRNA sense strand
uggaacaguuugagaguac

SEQ ID NO: 2587789 - RNA, 19 nt, Homo sapiens
  misc_RNA (1)...(19): siRNA sense strand
gagaaaccuuccauggcua

SEQ ID NO: 2587790 - RNA, 19 nt, Homo sapiens
  misc_RNA (1)...(19): siRNA sense strand
ggaaagugugcguggagca

SEQ ID NO: 2587791 - RNA, 19 nt, Homo sapiens
  misc_RNA (1)...(19): siRNA sense strand
aagcagaggaagagccaca

SEQ ID NO: 2587792 - RNA, 19 nt, Homo sapiens
  misc_RNA (1)...(19): siRNA sense strand
agaggaagagccacagaaa

SEQ ID NO: 2587793 - RNA, 19 nt, Homo sapiens
  misc_RNA (1)...(19): siRNA sense strand
agagacaggcuaaggguga

SEQ ID NO: 2587794 - RNA, 19 nt, Homo sapiens
  misc_RNA (1)...(19): siRNA sense strand
ggcuaagggugaugcugaa

SEQ ID NO: 2587795 - RNA, 19 nt, Homo sapiens
  misc_RNA (1)...(19): siRNA sense strand
guaaguaaggagagagaag

SEQ ID NO: 2587796 - RNA, 19 nt, Homo sapiens
  misc_RNA (1)...(19): siRNA sense strand
agaaggaggagcagcaaaa

SEQ ID NO: 2587797 - RNA, 19 nt, Homo sapiens
  misc_RNA (1)...(19): siRNA sense strand
gggcuuaucgccagcacaa

SEQ ID NO: 2587798 - RNA, 19 nt, Homo sapiens
  misc_RNA (1)...(19): siRNA sense strand
auuuaauguuggaggaacu

SEQ ID NO: 2587799 - RNA, 19 nt, Homo sapiens
  misc_RNA (1)...(19): siRNA sense strand
gugagagugaggaggaaga

SEQ ID NO: 2587800 - RNA, 19 nt, Homo sapiens
  misc_RNA (1)...(19): siRNA sense strand
ggaaaauguaggugcccaa

SEQ ID NO: 2587801 - RNA, 19 nt, Homo sapiens
  misc_RNA (1)...(19): siRNA sense strand
uaguaaguaaggagagaga

SEQ ID NO: 2587802 - RNA, 19 nt, Homo sapiens
  misc_RNA (1)...(19): siRNA sense strand
gagaagagaagguaaaaga

SEQ ID NO: 2587803 - RNA, 19 nt, Homo sapiens
  misc_RNA (1)...(19): siRNA sense strand
agugagaagcccaacuaaa

SEQ ID NO: 2587804 - RNA, 19 nt, Homo sapiens
  misc_RNA (1)...(19): siRNA sense strand
augaagaagagguggagga

SEQ ID NO: 2587805 - RNA, 19 nt, Homo sapiens
  misc_RNA (1)...(19): siRNA sense strand
caguagaaacagugaucca

SEQ ID NO: 2587806 - RNA, 19 nt, Homo sapiens
  misc_RNA (1)...(19): siRNA sense strand
cacagaaaguuaacggaga

SEQ ID NO: 2587807 - RNA, 19 nt, Homo sapiens
  misc_RNA (1)...(19): siRNA sense strand
ugccaagggacaaguguua

SEQ ID NO: 2587808 - RNA, 19 nt, Homo sapiens
  misc_RNA (1)...(19): siRNA sense strand
cauguaugguguugaccua

SEQ ID NO: 2587809 - RNA, 19 nt, Homo sapiens
  misc_RNA (1)...(19): siRNA sense strand
cggcaggagggaagugaga

SEQ ID NO: 2587810 - RNA, 19 nt, Homo sapiens
  misc_RNA (1)...(19): siRNA sense strand
aggaggacauacugaaaca

SEQ ID NO: 2587811 - RNA, 19 nt, Homo sapiens
  misc_RNA (1)...(19): siRNA sense strand
uuagugaacucaagcgcaa

SEQ ID NO: 2587812 - RNA, 19 nt, Homo sapiens
  misc_RNA (1)...(19): siRNA sense strand
cagaaaaucagcagaauca

SEQ ID NO: 2587813 - RNA, 19 nt, Homo sapiens
  misc_RNA (1)...(19): siRNA sense strand
agauggagauauugaucau

SEQ ID NO: 2587814 - RNA, 19 nt, Homo sapiens
  misc_RNA (1)...(19): siRNA sense strand
ccaaagauggaggagauaa

SEQ ID NO: 2587815 - RNA, 19 nt, Homo sapiens
  misc_RNA (1)...(19): siRNA sense strand
acaucaaacuagaaggcaa

SEQ ID NO: 2587816 - RNA, 19 nt, Homo sapiens
  misc_RNA (1)...(19): siRNA sense strand
aagaaauacaagagcauga

SEQ ID NO: 2587817 - RNA, 19 nt, Homo sapiens
  misc_RNA (1)...(19): siRNA sense strand
guaaagaaauacaagagca

SEQ ID NO: 2587818 - RNA, 19 nt, Homo sapiens
  misc_RNA (1)...(19): siRNA sense strand
gaggacaauucaaggcaau

SEQ ID NO: 2587819 - RNA, 19 nt, Homo sapiens
  misc_RNA (1)...(19): siRNA sense strand
cugcagaaugucaaacaaa

SEQ ID NO: 2587820 - RNA, 19 nt, Homo sapiens
  misc_RNA (1)...(19): siRNA sense strand
cggagaagaucuaugccau

SEQ ID NO: 2587821 - RNA, 19 nt, Homo sapiens
  misc_RNA (1)...(19): siRNA sense strand
gcagaaugucaaacaaaga

SEQ ID NO: 2587822 - RNA, 19 nt, Homo sapiens
  misc_RNA (1)...(19): siRNA sense strand
cacaaagcgcagacguaaa

SEQ ID NO: 2587823 - RNA, 19 nt, Homo sapiens
  misc_RNA (1)...(19): siRNA sense strand
cggcagaaguacaagcgca

SEQ ID NO: 2587824 - RNA, 19 nt, Homo sapiens
  misc_RNA (1)...(19): siRNA sense strand
ugacagaguacguggaggu

SEQ ID NO: 2587825 - RNA, 19 nt, Homo sapiens
  misc_RNA (1)...(19): siRNA sense strand
cuaccaaggccgugcagca

SEQ ID NO: 2587826 - RNA, 19 nt, Homo sapiens
  misc_RNA (1)...(19): siRNA sense strand
gccacgaaugaaugugaaa

SEQ ID NO: 2587827 - RNA, 19 nt, Homo sapiens
  misc_RNA (1)...(19): siRNA sense strand
auauaauggacgaagacca

SEQ ID NO: 2587828 - RNA, 19 nt, Homo sapiens
  misc_RNA (1)...(19): siRNA sense strand
ggacaauucaaggcaauau

SEQ ID NO: 2587829 - RNA, 19 nt, Homo sapiens
  misc_RNA (1)...(19): siRNA sense strand
ugacaucgcuucuggguac

SEQ ID NO: 2587830 - RNA, 19 nt, Homo sapiens
  misc_RNA (1)...(19): siRNA sense strand
acaucaaacuagaaggcaa

SEQ ID NO: 2587831 - RNA, 19 nt, Homo sapiens
  misc_RNA (1)...(19): siRNA sense strand
aagaaauacaagagcauga

SEQ ID NO: 2587832 - RNA, 19 nt, Homo sapiens
  misc_RNA (1)...(19): siRNA sense strand
guaaagaaauacaagagca

SEQ ID NO: 2587833 - RNA, 19 nt, Homo sapiens
  misc_RNA (1)...(19): siRNA sense strand
gaggacaauucaaggcaau

SEQ ID NO: 2587834 - RNA, 19 nt, Homo sapiens
  misc_RNA (1)...(19): siRNA sense strand
cggagaagaucuaugccau

SEQ ID NO: 2587835 - RNA, 19 nt, Homo sapiens
  misc_RNA (1)...(19): siRNA sense strand
cacaaagcgcagacguaaa

SEQ ID NO: 2587836 - RNA, 19 nt, Homo sapiens
  misc_RNA (1)...(19): siRNA sense strand
cggcagaaguacaagcgca

SEQ ID NO: 2587837 - RNA, 19 nt, Homo sapiens
  misc_RNA (1)...(19): siRNA sense strand
ugacagaguacguggaggu

SEQ ID NO: 2587838 - RNA, 19 nt, Homo sapiens
  misc_RNA (1)...(19): siRNA sense strand
cuaccaaggccgugcagca

SEQ ID NO: 2587839 - RNA, 19 nt, Homo sapiens
  misc_RNA (1)...(19): siRNA sense strand
gccacgaaugaaugugaaa

SEQ ID NO: 2587840 - RNA, 19 nt, Homo sapiens
  misc_RNA (1)...(19): siRNA sense strand
auauaauggacgaagacca

SEQ ID NO: 2587841 - RNA, 19 nt, Homo sapiens
  misc_RNA (1)...(19): siRNA sense strand
ggacaauucaaggcaauau

SEQ ID NO: 2587842 - RNA, 19 nt, Homo sapiens
  misc_RNA (1)...(19): siRNA sense strand
ugacaucgcuucuggguac

SEQ ID NO: 2587843 - RNA, 19 nt, Homo sapiens
  misc_RNA (1)...(19): siRNA sense strand
acaucaaacuagaaggcaa

SEQ ID NO: 2587844 - RNA, 19 nt, Homo sapiens
  misc_RNA (1)...(19): siRNA sense strand
aagaaauacaagagcauga

SEQ ID NO: 2587845 - RNA, 19 nt, Homo sapiens
  misc_RNA (1)...(19): siRNA sense strand
guaaagaaauacaagagca

SEQ ID NO: 2587846 - RNA, 19 nt, Homo sapiens
  misc_RNA (1)...(19): siRNA sense strand
gaggacaauucaaggcaau

SEQ ID NO: 2587847 - RNA, 19 nt, Homo sapiens
  misc_RNA (1)...(19): siRNA sense strand
cggagaagaucuaugccau

SEQ ID NO: 2587848 - RNA, 19 nt, Homo sapiens
  misc_RNA (1)...(19): siRNA sense strand
cacaaagcgcagacguaaa

SEQ ID NO: 2587849 - RNA, 19 nt, Homo sapiens
  misc_RNA (1)...(19): siRNA sense strand
cggcagaaguacaagcgca

SEQ ID NO: 2587850 - RNA, 19 nt, Homo sapiens
  misc_RNA (1)...(19): siRNA sense strand
ugacagaguacguggaggu

SEQ ID NO: 2587851 - RNA, 19 nt, Homo sapiens
  misc_RNA (1)...(19): siRNA sense strand
cuaccaaggccgugcagca

SEQ ID NO: 2587852 - RNA, 19 nt, Homo sapiens
  misc_RNA (1)...(19): siRNA sense strand
gccacgaaugaaugugaaa

SEQ ID NO: 2587853 - RNA, 19 nt, Homo sapiens
  misc_RNA (1)...(19): siRNA sense strand
auauaauggacgaagacca

SEQ ID NO: 2587854 - RNA, 19 nt, Homo sapiens
  misc_RNA (1)...(19): siRNA sense strand
ggacaauucaaggcaauau

SEQ ID NO: 2587855 - RNA, 19 nt, Homo sapiens
  misc_RNA (1)...(19): siRNA sense strand
ugacaucgcuucuggguac

SEQ ID NO: 2587856 - RNA, 19 nt, Homo sapiens
  misc_RNA (1)...(19): siRNA sense strand
gggaaaucaaagaagagaa

SEQ ID NO: 2587857 - RNA, 19 nt, Homo sapiens
  misc_RNA (1)...(19): siRNA sense strand
acaugaacuaugagacaau

SEQ ID NO: 2587858 - RNA, 19 nt, Homo sapiens
  misc_RNA (1)...(19): siRNA sense strand
agaaaucaaaggauggcaa

SEQ ID NO: 2587859 - RNA, 19 nt, Homo sapiens
  misc_RNA (1)...(19): siRNA sense strand
aggaagaaaucaaaggaug

SEQ ID NO: 2587860 - RNA, 19 nt, Homo sapiens
  misc_RNA (1)...(19): siRNA sense strand
uggccaaaguggaagggca

SEQ ID NO: 2587861 - RNA, 19 nt, Homo sapiens
  misc_RNA (1)...(19): siRNA sense strand
ugccaagaagacugggaaa

SEQ ID NO: 2587862 - RNA, 19 nt, Homo sapiens
  misc_RNA (1)...(19): siRNA sense strand
cgaaccagcuccagggucu

SEQ ID NO: 2587863 - RNA, 19 nt, Homo sapiens
  misc_RNA (1)...(19): siRNA sense strand
acuccaaagcuguguccaa

SEQ ID NO: 2587864 - RNA, 19 nt, Homo sapiens
  misc_RNA (1)...(19): siRNA sense strand
gccaagaagacugggaaau

SEQ ID NO: 2587865 - RNA, 19 nt, Homo sapiens
  misc_RNA (1)...(19): siRNA sense strand
aagaagacugggaaaucaa

SEQ ID NO: 2587866 - RNA, 19 nt, Homo sapiens
  misc_RNA (1)...(19): siRNA sense strand
cccauuaggaagaaaucaa

SEQ ID NO: 2587867 - RNA, 19 nt, Homo sapiens
  misc_RNA (1)...(19): siRNA sense strand
ucuuugaguucgcaagcaa

SEQ ID NO: 2587868 - RNA, 19 nt, Homo sapiens
  misc_RNA (1)...(19): siRNA sense strand
agagaauccggaagaccaa

SEQ ID NO: 2587869 - RNA, 19 nt, Homo sapiens
  misc_RNA (1)...(19): siRNA sense strand
aguuuaaggagaugcccaa

SEQ ID NO: 2587870 - RNA, 19 nt, Homo sapiens
  misc_RNA (1)...(19): siRNA sense strand
caaagaagagaauccggaa

SEQ ID NO: 2587871 - RNA, 19 nt, Homo sapiens
  misc_RNA (1)...(19): siRNA sense strand
cagcugugaucguggagca

SEQ ID NO: 2587872 - RNA, 19 nt, Homo sapiens
  misc_RNA (1)...(19): siRNA sense strand
caucaggacuucuggcacu

SEQ ID NO: 2587873 - RNA, 19 nt, Homo sapiens
  misc_RNA (1)...(19): siRNA sense strand
ggaagaaaucaaaggaugg

SEQ ID NO: 2587874 - RNA, 19 nt, Homo sapiens
  misc_RNA (1)...(19): siRNA sense strand
aaagaggcauacuggccaa

SEQ ID NO: 2587875 - RNA, 19 nt, Homo sapiens
  misc_RNA (1)...(19): siRNA sense strand
guguaccaguuuaaggaga

SEQ ID NO: 2587876 - RNA, 19 nt, Homo sapiens
  misc_RNA (1)...(19): siRNA sense strand
ucaaguggacccagcgaga

SEQ ID NO: 2587877 - RNA, 19 nt, Homo sapiens
  misc_RNA (1)...(19): siRNA sense strand
aggugaaagucuacaacaa

SEQ ID NO: 2587878 - RNA, 19 nt, Homo sapiens
  misc_RNA (1)...(19): siRNA sense strand
acacagaggccaaggacca

SEQ ID NO: 2587879 - RNA, 19 nt, Homo sapiens
  misc_RNA (1)...(19): siRNA sense strand
gcacagaguucuugggagc

SEQ ID NO: 2587880 - RNA, 19 nt, Homo sapiens
  misc_RNA (1)...(19): siRNA sense strand
ucaccaagcuaaaggagga

SEQ ID NO: 2587881 - RNA, 19 nt, Homo sapiens
  misc_RNA (1)...(19): siRNA sense strand
cggagaggaggaaggagaa

SEQ ID NO: 2587882 - RNA, 19 nt, Homo sapiens
  misc_RNA (1)...(19): siRNA sense strand
gcaagaagacagagcccga

SEQ ID NO: 2587883 - RNA, 19 nt, Homo sapiens
  misc_RNA (1)...(19): siRNA sense strand
ccauggacacagaggccaa

SEQ ID NO: 2587884 - RNA, 19 nt, Homo sapiens
  misc_RNA (1)...(19): siRNA sense strand
ucggagaggaggaaggaga

SEQ ID NO: 2587885 - RNA, 19 nt, Homo sapiens
  misc_RNA (1)...(19): siRNA sense strand
aggaugaagugcacgguca

SEQ ID NO: 2587886 - RNA, 19 nt, Homo sapiens
  misc_RNA (1)...(19): siRNA sense strand
caccagaacuugugcacca

SEQ ID NO: 2587887 - RNA, 19 nt, Homo sapiens
  misc_RNA (1)...(19): siRNA sense strand
cgcuagacuccgagaacau

SEQ ID NO: 2587888 - RNA, 19 nt, Homo sapiens
  misc_RNA (1)...(19): siRNA sense strand
ccacccaguaccaggacua

SEQ ID NO: 2587889 - RNA, 19 nt, Homo sapiens
  misc_RNA (1)...(19): siRNA sense strand
gggacuucuucaugaggau

SEQ ID NO: 2587890 - RNA, 19 nt, Homo sapiens
  misc_RNA (1)...(19): siRNA sense strand
agaagaaugacgugguguu

SEQ ID NO: 2587891 - RNA, 19 nt, Homo sapiens
  misc_RNA (1)...(19): siRNA sense strand
gcugacaaggagaagaaaa

SEQ ID NO: 2587892 - RNA, 19 nt, Homo sapiens
  misc_RNA (1)...(19): siRNA sense strand
gugagauugagaagaauga

SEQ ID NO: 2587893 - RNA, 19 nt, Homo sapiens
  misc_RNA (1)...(19): siRNA sense strand
uguggaaacggaugaagaa

SEQ ID NO: 2587894 - RNA, 19 nt, Homo sapiens
  misc_RNA (1)...(19): siRNA sense strand
gcaucaugugugucaacua

SEQ ID NO: 2587895 - RNA, 19 nt, Homo sapiens
  misc_RNA (1)...(19): siRNA sense strand
uggacaaguuucagcagca

SEQ ID NO: 2587896 - RNA, 19 nt, Homo sapiens
  misc_RNA (1)...(19): siRNA sense strand
uggauaacgaccugaagau

SEQ ID NO: 2587897 - RNA, 19 nt, Homo sapiens
  misc_RNA (1)...(19): siRNA sense strand
cugaccagcagauggacaa

SEQ ID NO: 2587898 - RNA, 19 nt, Homo sapiens
  misc_RNA (1)...(19): siRNA sense strand
aaggagaagaaaaggagua

SEQ ID NO: 2587899 - RNA, 19 nt, Homo sapiens
  misc_RNA (1)...(19): siRNA sense strand
ucagcaaguucaugggacu

SEQ ID NO: 2587900 - RNA, 19 nt, Homo sapiens
  misc_RNA (1)...(19): siRNA sense strand
agguggagcuaacaggaca

SEQ ID NO: 2587901 - RNA, 19 nt, Homo sapiens
  misc_RNA (1)...(19): siRNA sense strand
ugaggagauucgugagaac

SEQ ID NO: 2587902 - RNA, 19 nt, Homo sapiens
  misc_RNA (1)...(19): siRNA sense strand
uggcucugguuuugggaaa

SEQ ID NO: 2587903 - RNA, 19 nt, Homo sapiens
  misc_RNA (1)...(19): siRNA sense strand
gauugaagugauugagaag

SEQ ID NO: 2587904 - RNA, 19 nt, Homo sapiens
  misc_RNA (1)...(19): siRNA sense strand
gagaacagcaagagcaggu

SEQ ID NO: 2587905 - RNA, 19 nt, Homo sapiens
  misc_RNA (1)...(19): siRNA sense strand
agauaugacugugagguga

SEQ ID NO: 2587906 - RNA, 19 nt, Homo sapiens
  misc_RNA (1)...(19): siRNA sense strand
ugaagauugaagugauuga

SEQ ID NO: 2587907 - RNA, 19 nt, Homo sapiens
  misc_RNA (1)...(19): siRNA sense strand
ccaucaucucucuggauuu

SEQ ID NO: 2587908 - RNA, 19 nt, Homo sapiens
  misc_RNA (1)...(19): siRNA sense strand
ccaagaaguucaugaggga

SEQ ID NO: 2587909 - RNA, 19 nt, Homo sapiens
  misc_RNA (1)...(19): siRNA sense strand
cagaaucggucgaggugga

SEQ ID NO: 2587910 - RNA, 19 nt, Homo sapiens
  misc_RNA (1)...(19): siRNA sense strand
acaucaacguggaacgaga

SEQ ID NO: 2587911 - RNA, 19 nt, Homo sapiens
  misc_RNA (1)...(19): siRNA sense strand
aaggcgucaucgagaguaa

SEQ ID NO: 2587912 - RNA, 19 nt, Homo sapiens
  misc_RNA (1)...(19): siRNA sense strand
ugugauugcucaagcccaa

SEQ ID NO: 2587913 - RNA, 19 nt, Homo sapiens
  misc_RNA (1)...(19): siRNA sense strand
cagaagaagacaagaggac

SEQ ID NO: 2587914 - RNA, 19 nt, Homo sapiens
  misc_RNA (1)...(19): siRNA sense strand
uggaacgagaggaguggaa

SEQ ID NO: 2587915 - RNA, 19 nt, Homo sapiens
  misc_RNA (1)...(19): siRNA sense strand
aggaacgagacgugauuau

SEQ ID NO: 2587916 - RNA, 19 nt, Homo sapiens
  misc_RNA (1)...(19): siRNA sense strand
gaagaagacaagaggacuc

SEQ ID NO: 2587917 - RNA, 19 nt, Homo sapiens
  misc_RNA (1)...(19): siRNA sense strand
agauacagaagguggucau

SEQ ID NO: 2587918 - RNA, 19 nt, Homo sapiens
  misc_RNA (1)...(19): siRNA sense strand
ggucauggcacuaggagac

SEQ ID NO: 2587919 - RNA, 19 nt, Homo sapiens
  misc_RNA (1)...(19): siRNA sense strand
gagacgugauuaugaggga

SEQ ID NO: 2587920 - RNA, 19 nt, Homo sapiens
  misc_RNA (1)...(19): siRNA sense strand
agauguuuguacuggauga

SEQ ID NO: 2587921 - RNA, 19 nt, Homo sapiens
  misc_RNA (1)...(19): siRNA sense strand
aggcagucaucuucaucaa

SEQ ID NO: 2587922 - RNA, 19 nt, Homo sapiens
  misc_RNA (1)...(19): siRNA sense strand
ggaaugagauuguugacag

SEQ ID NO: 2587923 - RNA, 19 nt, Homo sapiens
  misc_RNA (1)...(19): siRNA sense strand
ccugcuggccagaggcauu

SEQ ID NO: 2587924 - RNA, 19 nt, Homo sapiens
  misc_RNA (1)...(19): siRNA sense strand
agauauggaccaaaaggaa

SEQ ID NO: 2587925 - RNA, 19 nt, Homo sapiens
  misc_RNA (1)...(19): siRNA sense strand
cagaaaugcacgaaggaga

SEQ ID NO: 2587926 - RNA, 19 nt, Homo sapiens
  misc_RNA (1)...(19): siRNA sense strand
gggagaagauuaugccgaa

SEQ ID NO: 2587927 - RNA, 19 nt, Homo sapiens
  misc_RNA (1)...(19): siRNA sense strand
cggaugaccuggaaggaga

SEQ ID NO: 2587928 - RNA, 19 nt, Homo sapiens
  misc_RNA (1)...(19): siRNA sense strand
ccggauaggcaguggcaga

SEQ ID NO: 2587929 - RNA, 19 nt, Homo sapiens
  misc_RNA (1)...(19): siRNA sense strand
agauaggaaagauggcaaa

SEQ ID NO: 2587930 - RNA, 19 nt, Homo sapiens
  misc_RNA (1)...(19): siRNA sense strand
cugaucaagcacaggauaa

SEQ ID NO: 2587931 - RNA, 19 nt, Homo sapiens
  misc_RNA (1)...(19): siRNA sense strand
aagagaaguugcagcguca

SEQ ID NO: 2587932 - RNA, 19 nt, Homo sapiens
  misc_RNA (1)...(19): siRNA sense strand
gccaaagaaaccugaggaa

SEQ ID NO: 2587933 - RNA, 19 nt, Homo sapiens
  misc_RNA (1)...(19): siRNA sense strand
gaggacaggaagugaguca

SEQ ID NO: 2587934 - RNA, 19 nt, Homo sapiens
  misc_RNA (1)...(19): siRNA sense strand
ggauaaagacagggaugau

SEQ ID NO: 2587935 - RNA, 19 nt, Homo sapiens
  misc_RNA (1)...(19): siRNA sense strand
cagaagagcauuuggcagu

SEQ ID NO: 2587936 - RNA, 19 nt, Homo sapiens
  misc_RNA (1)...(19): siRNA sense strand
ugcuagagaaagagaagua

SEQ ID NO: 2587937 - RNA, 19 nt, Homo sapiens
  misc_RNA (1)...(19): siRNA sense strand
agaaguagaagaacggcua

SEQ ID NO: 2587938 - RNA, 19 nt, Homo sapiens
  misc_RNA (1)...(19): siRNA sense strand
cagauaggaaagauggcaa

SEQ ID NO: 2587939 - RNA, 19 nt, Homo sapiens
  misc_RNA (1)...(19): siRNA sense strand
uguugauggugaagaugaa

SEQ ID NO: 2587940 - RNA, 19 nt, Homo sapiens
  misc_RNA (1)...(19): siRNA sense strand
gggcaaagccuguugacac

SEQ ID NO: 2587941 - RNA, 19 nt, Homo sapiens
  misc_RNA (1)...(19): siRNA sense strand
ccagcaauccagagagguu

SEQ ID NO: 2587942 - RNA, 19 nt, Homo sapiens
  misc_RNA (1)...(19): siRNA sense strand
aaauaaaguagaugggaug

SEQ ID NO: 2587943 - RNA, 19 nt, Homo sapiens
  misc_RNA (1)...(19): siRNA sense strand
caggaaggaaagaugaaaa

SEQ ID NO: 2587944 - RNA, 19 nt, Homo sapiens
  misc_RNA (1)...(19): siRNA sense strand
gcacaguaacgaugacgau

SEQ ID NO: 2587945 - RNA, 19 nt, Homo sapiens
  misc_RNA (1)...(19): siRNA sense strand
gguugaaagguuuugguua

SEQ ID NO: 2587946 - RNA, 19 nt, Homo sapiens
  misc_RNA (1)...(19): siRNA sense strand
gauacagacuggagggcuc

SEQ ID NO: 2587947 - RNA, 19 nt, Homo sapiens
  misc_RNA (1)...(19): siRNA sense strand
gacacagcugcuagagaaa

SEQ ID NO: 2587948 - RNA, 19 nt, Homo sapiens
  misc_RNA (1)...(19): siRNA sense strand
ggaacagagaccacuggaa

SEQ ID NO: 2587949 - RNA, 19 nt, Homo sapiens
  misc_RNA (1)...(19): siRNA sense strand
agacaaguaucgagaucgu

SEQ ID NO: 2587950 - RNA, 19 nt, Homo sapiens
  misc_RNA (1)...(19): siRNA sense strand
cuacagaaggaacaagaga

SEQ ID NO: 2587951 - RNA, 19 nt, Homo sapiens
  misc_RNA (1)...(19): siRNA sense strand
aaggagaaugcuuggguga

SEQ ID NO: 2587952 - RNA, 19 nt, Homo sapiens
  misc_RNA (1)...(19): siRNA sense strand
ugaucaagcacaggauaaa

SEQ ID NO: 2587953 - RNA, 19 nt, Homo sapiens
  misc_RNA (1)...(19): siRNA sense strand
aaaugagggagaagauuau

SEQ ID NO: 2587954 - RNA, 19 nt, Homo sapiens
  misc_RNA (1)...(19): siRNA sense strand
aauaagaaggggaagacua

SEQ ID NO: 2587955 - RNA, 19 nt, Homo sapiens
  misc_RNA (1)...(19): siRNA sense strand
agaagaauaagaaggggaa

SEQ ID NO: 2587956 - RNA, 19 nt, Homo sapiens
  misc_RNA (1)...(19): siRNA sense strand
cuagagaaagagaaguaga

SEQ ID NO: 2587957 - RNA, 19 nt, Homo sapiens
  misc_RNA (1)...(19): siRNA sense strand
ggagauguuucgaccacuu

SEQ ID NO: 2587958 - RNA, 19 nt, Homo sapiens
  misc_RNA (1)...(19): siRNA sense strand
ugauguuacagaagaguca

SEQ ID NO: 2587959 - RNA, 19 nt, Homo sapiens
  misc_RNA (1)...(19): siRNA sense strand
ccaccaaaggagaaugcuu

SEQ ID NO: 2587960 - RNA, 19 nt, Homo sapiens
  misc_RNA (1)...(19): siRNA sense strand
aagaugaaaaugagggaga

SEQ ID NO: 2587961 - RNA, 19 nt, Homo sapiens
  misc_RNA (1)...(19): siRNA sense strand
agaagagucaauuaaggaa

SEQ ID NO: 2587962 - RNA, 19 nt, Homo sapiens
  misc_RNA (1)...(19): siRNA sense strand
cgggauggguaucgggaug

SEQ ID NO: 2587963 - RNA, 19 nt, Homo sapiens
  misc_RNA (1)...(19): siRNA sense strand
cgggauggguaucgggaug

SEQ ID NO: 2587964 - RNA, 19 nt, Homo sapiens
  misc_RNA (1)...(19): siRNA sense strand
gaugauuacucucgggaug

SEQ ID NO: 2587965 - RNA, 19 nt, Homo sapiens
  misc_RNA (1)...(19): siRNA sense strand
gggcugaugaaacggauga

SEQ ID NO: 2587966 - RNA, 19 nt, Homo sapiens
  misc_RNA (1)...(19): siRNA sense strand
ugaaaaugagggagaagau

SEQ ID NO: 2587967 - RNA, 19 nt, Homo sapiens
  misc_RNA (1)...(19): siRNA sense strand
caggagaauucgaguggac

SEQ ID NO: 2587968 - RNA, 19 nt, Homo sapiens
  misc_RNA (1)...(19): siRNA sense strand
agcauuuggcaguggguau

SEQ ID NO: 2587969 - RNA, 19 nt, Homo sapiens
  misc_RNA (1)...(19): siRNA sense strand
ccgauaugacagacgggau

SEQ ID NO: 2587970 - RNA, 19 nt, Homo sapiens
  misc_RNA (1)...(19): siRNA sense strand
aggaaggaaagaugaaaau

SEQ ID NO: 2587971 - RNA, 19 nt, Homo sapiens
  misc_RNA (1)...(19): siRNA sense strand
cacuggaaggagucagaua

SEQ ID NO: 2587972 - RNA, 19 nt, Homo sapiens
  misc_RNA (1)...(19): siRNA sense strand
ggagaagauuaugccgaau

SEQ ID NO: 2587973 - RNA, 19 nt, Homo sapiens
  misc_RNA (1)...(19): siRNA sense strand
guaacgaugacgaugugua

SEQ ID NO: 2587974 - RNA, 19 nt, Homo sapiens
  misc_RNA (1)...(19): siRNA sense strand
ccgaggcagcagagacuau

SEQ ID NO: 2587975 - RNA, 19 nt, Homo sapiens
  misc_RNA (1)...(19): siRNA sense strand
cuggcgaagugaagaaacu

SEQ ID NO: 2587976 - RNA, 19 nt, Homo sapiens
  misc_RNA (1)...(19): siRNA sense strand
cacgaaggagagagaguga

SEQ ID NO: 2587977 - RNA, 19 nt, Homo sapiens
  misc_RNA (1)...(19): siRNA sense strand
ggccaaacugggaacucua

SEQ ID NO: 2587978 - RNA, 19 nt, Homo sapiens
  misc_RNA (1)...(19): siRNA sense strand
aggcaguggcagaagagca

SEQ ID NO: 2587979 - RNA, 19 nt, Homo sapiens
  misc_RNA (1)...(19): siRNA sense strand
ggcaguggcagaagagcau

SEQ ID NO: 2587980 - RNA, 19 nt, Homo sapiens
  misc_RNA (1)...(19): siRNA sense strand
cacagcugcuagagaaaga

SEQ ID NO: 2587981 - RNA, 19 nt, Homo sapiens
  misc_RNA (1)...(19): siRNA sense strand
caggauaaagacagggaug

SEQ ID NO: 2587982 - RNA, 19 nt, Homo sapiens
  misc_RNA (1)...(19): siRNA sense strand
aggauaaagacagggauga

SEQ ID NO: 2587983 - RNA, 19 nt, Homo sapiens
  misc_RNA (1)...(19): siRNA sense strand
ugagcgaggcagagagaaa

SEQ ID NO: 2587984 - RNA, 19 nt, Homo sapiens
  misc_RNA (1)...(19): siRNA sense strand
ugguagagcaguacagcaa

SEQ ID NO: 2587985 - RNA, 19 nt, Homo sapiens
  misc_RNA (1)...(19): siRNA sense strand
uggucuaugacaaggaaua

SEQ ID NO: 2587986 - RNA, 19 nt, Homo sapiens
  misc_RNA (1)...(19): siRNA sense strand
cgaaaaucagccaaggaaa

SEQ ID NO: 2587987 - RNA, 19 nt, Homo sapiens
  misc_RNA (1)...(19): siRNA sense strand
agugcaugguagagcagua

SEQ ID NO: 2587988 - RNA, 19 nt, Homo sapiens
  misc_RNA (1)...(19): siRNA sense strand
ucuggaaccuggugcggaa

SEQ ID NO: 2587989 - RNA, 19 nt, Homo sapiens
  misc_RNA (1)...(19): siRNA sense strand
cggccaugguggaagaacu

SEQ ID NO: 2587990 - RNA, 19 nt, Homo sapiens
  misc_RNA (1)...(19): siRNA sense strand
ugaucaaggacgggaguau

SEQ ID NO: 2587991 - RNA, 19 nt, Homo sapiens
  misc_RNA (1)...(19): siRNA sense strand
gggaacacaaccaagcaau

SEQ ID NO: 2587992 - RNA, 19 nt, Homo sapiens
  misc_RNA (1)...(19): siRNA sense strand
ccgagaucauccuggagau

SEQ ID NO: 2587993 - RNA, 19 nt, Homo sapiens
  misc_RNA (1)...(19): siRNA sense strand
aguaugacaaggacgggaa

SEQ ID NO: 2587994 - RNA, 19 nt, Homo sapiens
  misc_RNA (1)...(19): siRNA sense strand
cagaaaacaaccugggcuu

SEQ ID NO: 2587995 - RNA, 19 nt, Homo sapiens
  misc_RNA (1)...(19): siRNA sense strand
cagaacugggugaagaaga

SEQ ID NO: 2587996 - RNA, 19 nt, Homo sapiens
  misc_RNA (1)...(19): siRNA sense strand
ucaccaucccacaggagaa

SEQ ID NO: 2587997 - RNA, 19 nt, Homo sapiens
  misc_RNA (1)...(19): siRNA sense strand
ccgaggacagcaagagcau

SEQ ID NO: 2587998 - RNA, 19 nt, Homo sapiens
  misc_RNA (1)...(19): siRNA sense strand
gcauagccaccgagaucau

SEQ ID NO: 2587999 - RNA, 19 nt, Homo sapiens
  misc_RNA (1)...(19): siRNA sense strand
aggaaaaggccgaugccau

SEQ ID NO: 2588000 - RNA, 19 nt, Homo sapiens
  misc_RNA (1)...(19): siRNA sense strand
gacuauuaccugaacaaaa

SEQ ID NO: 2588001 - RNA, 19 nt, Homo sapiens
  misc_RNA (1)...(19): siRNA sense strand
agaccaggaucgaggagcu

SEQ ID NO: 2588002 - RNA, 19 nt, Homo sapiens
  misc_RNA (1)...(19): siRNA sense strand
uggaugaggaaacccgaaa

SEQ ID NO: 2588003 - RNA, 19 nt, Homo sapiens
  misc_RNA (1)...(19): siRNA sense strand
ucuccgagggcgacgcaua

SEQ ID NO: 2588004 - RNA, 19 nt, Homo sapiens
  misc_RNA (1)...(19): siRNA sense strand
ccuuaaacuuugguggcau

SEQ ID NO: 2588005 - RNA, 19 nt, Homo sapiens
  misc_RNA (1)...(19): siRNA sense strand
cugaaggaguuguugaaaa

SEQ ID NO: 2588006 - RNA, 19 nt, Homo sapiens
  misc_RNA (1)...(19): siRNA sense strand
gagauaaaggggagacaau

SEQ ID NO: 2588007 - RNA, 19 nt, Homo sapiens
  misc_RNA (1)...(19): siRNA sense strand
aguuuaaguauaaggcaga

SEQ ID NO: 2588008 - RNA, 19 nt, Homo sapiens
  misc_RNA (1)...(19): siRNA sense strand
uguugaaaacggaggaauu

SEQ ID NO: 2588009 - RNA, 19 nt, Homo sapiens
  misc_RNA (1)...(19): siRNA sense strand
caauauugacucacgccua

SEQ ID NO: 2588010 - RNA, 19 nt, Homo sapiens
  misc_RNA (1)...(19): siRNA sense strand
ucacagagucacagccuga

SEQ ID NO: 2588011 - RNA, 19 nt, Homo sapiens
  misc_RNA (1)...(19): siRNA sense strand
cggcuacaucauggagaaa

SEQ ID NO: 2588012 - RNA, 19 nt, Homo sapiens
  misc_RNA (1)...(19): siRNA sense strand
aguuggugcugaaggaguu

SEQ ID NO: 2588013 - RNA, 19 nt, Homo sapiens
  misc_RNA (1)...(19): siRNA sense strand
acgacaaggaguuaauuga

SEQ ID NO: 2588014 - RNA, 19 nt, Homo sapiens
  misc_RNA (1)...(19): siRNA sense strand
gcggccaagaagcgauuua

SEQ ID NO: 2588015 - RNA, 19 nt, Homo sapiens
  misc_RNA (1)...(19): siRNA sense strand
uggccaaggcagacagcua

SEQ ID NO: 2588016 - RNA, 19 nt, Homo sapiens
  misc_RNA (1)...(19): siRNA sense strand
ucaugauagccuuggccaa

SEQ ID NO: 2588017 - RNA, 19 nt, Homo sapiens
  misc_RNA (1)...(19): siRNA sense strand
ccaucuaccaagagucuau

SEQ ID NO: 2588018 - RNA, 19 nt, Homo sapiens
  misc_RNA (1)...(19): siRNA sense strand
ucccuaaggugcuggccaa

SEQ ID NO: 2588019 - RNA, 19 nt, Homo sapiens
  misc_RNA (1)...(19): siRNA sense strand
gcaaccaggaaguagccaa

SEQ ID NO: 2588020 - RNA, 19 nt, Homo sapiens
  misc_RNA (1)...(19): siRNA sense strand
caucacacugacuggaaau

SEQ ID NO: 2588021 - RNA, 19 nt, Homo sapiens
  misc_RNA (1)...(19): siRNA sense strand
acauuaugccuuugcugaa

SEQ ID NO: 2588022 - RNA, 19 nt, Homo sapiens
  misc_RNA (1)...(19): siRNA sense strand
ccuucaacauucagagcuu

SEQ ID NO: 2588023 - RNA, 19 nt, Homo sapiens
  misc_RNA (1)...(19): siRNA sense strand
cgaagauccuggcuggcua

SEQ ID NO: 2588024 - RNA, 19 nt, Homo sapiens
  misc_RNA (1)...(19): siRNA sense strand
gagcagaucaacagcgugu

SEQ ID NO: 2588025 - RNA, 19 nt, Homo sapiens
  misc_RNA (1)...(19): siRNA sense strand
gggaccaguacaaggagau

SEQ ID NO: 2588026 - RNA, 19 nt, Homo sapiens
  misc_RNA (1)...(19): siRNA sense strand
ggaaagacgcggugucggu

SEQ ID NO: 2588027 - RNA, 19 nt, Homo sapiens
  misc_RNA (1)...(19): siRNA sense strand
ccagaaagcaauugggaag

SEQ ID NO: 2588028 - RNA, 19 nt, Homo sapiens
  misc_RNA (1)...(19): siRNA sense strand
gagagugggcugaugggaa

SEQ ID NO: 2588029 - RNA, 19 nt, Homo sapiens
  misc_RNA (1)...(19): siRNA sense strand
gaaauguagucuuugguga

SEQ ID NO: 2588030 - RNA, 19 nt, Homo sapiens
  misc_RNA (1)...(19): siRNA sense strand
auuaaagcacggaggaaga

SEQ ID NO: 2588031 - RNA, 19 nt, Homo sapiens
  misc_RNA (1)...(19): siRNA sense strand
gcauuaaagcacggaggaa

SEQ ID NO: 2588032 - RNA, 19 nt, Homo sapiens
  misc_RNA (1)...(19): siRNA sense strand
aagcaauugggaaggacaa

SEQ ID NO: 2588033 - RNA, 19 nt, Homo sapiens
  misc_RNA (1)...(19): siRNA sense strand
ggaaaauggacgaaaacca

SEQ ID NO: 2588034 - RNA, 19 nt, Homo sapiens
  misc_RNA (1)...(19): siRNA sense strand
gaagaauaucuguggguuc

SEQ ID NO: 2588035 - RNA, 19 nt, Homo sapiens
  misc_RNA (1)...(19): siRNA sense strand
acccauuauuggagcaaga

SEQ ID NO: 2588036 - RNA, 19 nt, Homo sapiens
  misc_RNA (1)...(19): siRNA sense strand
ccauauaagggaaugacca

SEQ ID NO: 2588037 - RNA, 19 nt, Homo sapiens
  misc_RNA (1)...(19): siRNA sense strand
gccaaugggaagaugguga

SEQ ID NO: 2588038 - RNA, 19 nt, Homo sapiens
  misc_RNA (1)...(19): siRNA sense strand
cggcagaguacaacaucuu

SEQ ID NO: 2588039 - RNA, 19 nt, Homo sapiens
  misc_RNA (1)...(19): siRNA sense strand
ccuaccaaggcaagaagaa

SEQ ID NO: 2588040 - RNA, 19 nt, Homo sapiens
  misc_RNA (1)...(19): siRNA sense strand
cuggaggagugaagaccau

SEQ ID NO: 2588041 - RNA, 19 nt, Homo sapiens
  misc_RNA (1)...(19): siRNA sense strand
uaucuaacacagagcucua

SEQ ID NO: 2588042 - RNA, 19 nt, Homo sapiens
  misc_RNA (1)...(19): siRNA sense strand
gagccugaguccagccuga

SEQ ID NO: 2588043 - RNA, 19 nt, Homo sapiens
  misc_RNA (1)...(19): siRNA sense strand
ucaagcaggaagugcagaa

SEQ ID NO: 2588044 - RNA, 19 nt, Homo sapiens
  misc_RNA (1)...(19): siRNA sense strand
agaaccucaucaaggacaa

SEQ ID NO: 2588045 - RNA, 19 nt, Homo sapiens
  misc_RNA (1)...(19): siRNA sense strand
gggaagaauaucugugggu

SEQ ID NO: 2588046 - RNA, 19 nt, Homo sapiens
  misc_RNA (1)...(19): siRNA sense strand
cgaacccaccugugaggaa

SEQ ID NO: 2588047 - RNA, 19 nt, Homo sapiens
  misc_RNA (1)...(19): siRNA sense strand
acaacaucuuugaagggau

SEQ ID NO: 2588048 - RNA, 19 nt, Homo sapiens
  misc_RNA (1)...(19): siRNA sense strand
ccgcaagggaagaauaucu

SEQ ID NO: 2588049 - RNA, 19 nt, Homo sapiens
  misc_RNA (1)...(19): siRNA sense strand
gcgucaagcaggaagugca

SEQ ID NO: 2588050 - RNA, 19 nt, Homo sapiens
  misc_RNA (1)...(19): siRNA sense strand
caucaaggacaaagggguu

SEQ ID NO: 2588051 - RNA, 19 nt, Homo sapiens
  misc_RNA (1)...(19): siRNA sense strand
ccagagaggaaguggaaaa

SEQ ID NO: 2588052 - RNA, 19 nt, Homo sapiens
  misc_RNA (1)...(19): siRNA sense strand
acgcauggguggaagggaa

SEQ ID NO: 2588053 - RNA, 19 nt, Homo sapiens
  misc_RNA (1)...(19): siRNA sense strand
ccaugugaugagagagaaa

SEQ ID NO: 2588054 - RNA, 19 nt, Homo sapiens
  misc_RNA (1)...(19): siRNA sense strand
gcaagaaacuccacgacca

SEQ ID NO: 2588055 - RNA, 19 nt, Homo sapiens
  misc_RNA (1)...(19): siRNA sense strand
agggagacaaggagaaaga

SEQ ID NO: 2588056 - RNA, 19 nt, Homo sapiens
  misc_RNA (1)...(19): siRNA sense strand
ggggagaaaacaagaagaa

SEQ ID NO: 2588057 - RNA, 19 nt, Homo sapiens
  misc_RNA (1)...(19): siRNA sense strand
ccccaagaguggagggaga

SEQ ID NO: 2588058 - RNA, 19 nt, Homo sapiens
  misc_RNA (1)...(19): siRNA sense strand
caaugcaaguggauggaga

SEQ ID NO: 2588059 - RNA, 19 nt, Homo sapiens
  misc_RNA (1)...(19): siRNA sense strand
aggccuauauugaaggaga

SEQ ID NO: 2588060 - RNA, 19 nt, Homo sapiens
  misc_RNA (1)...(19): siRNA sense strand
ccaacagcgcagauacuaa

SEQ ID NO: 2588061 - RNA, 19 nt, Homo sapiens
  misc_RNA (1)...(19): siRNA sense strand
ggugaagaacggugggucu

SEQ ID NO: 2588062 - RNA, 19 nt, Homo sapiens
  misc_RNA (1)...(19): siRNA sense strand
gggaaagcaggaagggugu

SEQ ID NO: 2588063 - RNA, 19 nt, Homo sapiens
  misc_RNA (1)...(19): siRNA sense strand
uggagggagacaaggagaa

SEQ ID NO: 2588064 - RNA, 19 nt, Homo sapiens
  misc_RNA (1)...(19): siRNA sense strand
ccagcaacagugaggccaa

SEQ ID NO: 2588065 - RNA, 19 nt, Homo sapiens
  misc_RNA (1)...(19): siRNA sense strand
cggggaggccucaggauaa

SEQ ID NO: 2588066 - RNA, 19 nt, Homo sapiens
  misc_RNA (1)...(19): siRNA sense strand
ggccuauauugaaggagau

SEQ ID NO: 2588067 - RNA, 19 nt, Homo sapiens
  misc_RNA (1)...(19): siRNA sense strand
aggagaugcugcaagggau

SEQ ID NO: 2588068 - RNA, 19 nt, Homo sapiens
  misc_RNA (1)...(19): siRNA sense strand
ggaugacguuucaccgcaa

SEQ ID NO: 2588069 - RNA, 19 nt, Homo sapiens
  misc_RNA (1)...(19): siRNA sense strand
ccucaaacaauaugaccca

SEQ ID NO: 2588070 - RNA, 19 nt, Homo sapiens
  misc_RNA (1)...(19): siRNA sense strand
guaaauacacuguccacga

SEQ ID NO: 2588071 - RNA, 19 nt, Homo sapiens
  misc_RNA (1)...(19): siRNA sense strand
uagaaggagccauggagau

SEQ ID NO: 2588072 - RNA, 19 nt, Homo sapiens
  misc_RNA (1)...(19): siRNA sense strand
cccacagagcugaggccua

SEQ ID NO: 2588073 - RNA, 19 nt, Homo sapiens
  misc_RNA (1)...(19): siRNA sense strand
ugaaagacauugagcagag

SEQ ID NO: 2588074 - RNA, 19 nt, Homo sapiens
  misc_RNA (1)...(19): siRNA sense strand
ccucacuccagaagaauuu

SEQ ID NO: 2588075 - RNA, 19 nt, Homo sapiens
  misc_RNA (1)...(19): siRNA sense strand
cauuccugguugugucaaa

SEQ ID NO: 2588076 - RNA, 19 nt, Homo sapiens
  misc_RNA (1)...(19): siRNA sense strand
uguccugccucuuggaaca

SEQ ID NO: 2588077 - RNA, 19 nt, Homo sapiens
  misc_RNA (1)...(19): siRNA sense strand
ccugaaagacauugagcag

SEQ ID NO: 2588078 - RNA, 19 nt, Homo sapiens
  misc_RNA (1)...(19): siRNA sense strand
gagcagagccccuugguga

SEQ ID NO: 2588079 - RNA, 19 nt, Homo sapiens
  misc_RNA (1)...(19): siRNA sense strand
gaccaagcggagauggauu

SEQ ID NO: 2588080 - RNA, 19 nt, Homo sapiens
  misc_RNA (1)...(19): siRNA sense strand
gaagggaacuccuccguca

SEQ ID NO: 2588081 - RNA, 19 nt, Homo sapiens
  misc_RNA (1)...(19): siRNA sense strand
aagaacaagcugugguacu

SEQ ID NO: 2588082 - RNA, 19 nt, Homo sapiens
  misc_RNA (1)...(19): siRNA sense strand
gggugggagccucaaacaa

SEQ ID NO: 2588083 - RNA, 19 nt, Homo sapiens
  misc_RNA (1)...(19): siRNA sense strand
gaauuuggcaccucggaga

SEQ ID NO: 2588084 - RNA, 19 nt, Homo sapiens
  misc_RNA (1)...(19): siRNA sense strand
cgggaaagcaggaagggug

SEQ ID NO: 2588085 - RNA, 19 nt, Homo sapiens
  misc_RNA (1)...(19): siRNA sense strand
acaaacaagcugcugccaa

SEQ ID NO: 2588086 - RNA, 19 nt, Homo sapiens
  misc_RNA (1)...(19): siRNA sense strand
ucgccauggucaagggcua

SEQ ID NO: 2588087 - RNA, 19 nt, Homo sapiens
  misc_RNA (1)...(19): siRNA sense strand
cugcaaauucacaggcaau

SEQ ID NO: 2588088 - RNA, 19 nt, Homo sapiens
  misc_RNA (1)...(19): siRNA sense strand
cucuauaccuuguggguca

SEQ ID NO: 2588089 - RNA, 19 nt, Homo sapiens
  misc_RNA (1)...(19): siRNA sense strand
acaacuacaugaugggcau

SEQ ID NO: 2588090 - RNA, 19 nt, Homo sapiens
  misc_RNA (1)...(19): siRNA sense strand
augccaugguccuggucaa

SEQ ID NO: 2588091 - RNA, 19 nt, Homo sapiens
  misc_RNA (1)...(19): siRNA sense strand
ccaccuucgccauggucaa

SEQ ID NO: 2588092 - RNA, 19 nt, Homo sapiens
  misc_RNA (1)...(19): siRNA sense strand
ccaccuauaacgaggaaag

SEQ ID NO: 2588093 - RNA, 19 nt, Homo sapiens
  misc_RNA (1)...(19): siRNA sense strand
ggcaggaagcccaagguca

SEQ ID NO: 2588094 - RNA, 19 nt, Homo sapiens
  misc_RNA (1)...(19): siRNA sense strand
aggaauaugugcagcucca

SEQ ID NO: 2588095 - RNA, 19 nt, Homo sapiens
  misc_RNA (1)...(19): siRNA sense strand
ggccaagauccgucagaca

SEQ ID NO: 2588096 - RNA, 19 nt, Homo sapiens
  misc_RNA (1)...(19): siRNA sense strand
gcgaagagagaauggccua

SEQ ID NO: 2588097 - RNA, 19 nt, Homo sapiens
  misc_RNA (1)...(19): siRNA sense strand
gaggagaaguguaggcaag

SEQ ID NO: 2588098 - RNA, 19 nt, Homo sapiens
  misc_RNA (1)...(19): siRNA sense strand
agacagaggauguggccca

SEQ ID NO: 2588099 - RNA, 19 nt, Homo sapiens
  misc_RNA (1)...(19): siRNA sense strand
agguaaaggcagagcugga

SEQ ID NO: 2588100 - RNA, 19 nt, Homo sapiens
  misc_RNA (1)...(19): siRNA sense strand
ggagaaggccagucgggau

SEQ ID NO: 2588101 - RNA, 19 nt, Homo sapiens
  misc_RNA (1)...(19): siRNA sense strand
augagagagccaaggaaau

SEQ ID NO: 2588102 - RNA, 19 nt, Homo sapiens
  misc_RNA (1)...(19): siRNA sense strand
ugcagaagguaaaggcaga

SEQ ID NO: 2588103 - RNA, 19 nt, Homo sapiens
  misc_RNA (1)...(19): siRNA sense strand
ugauggaagaacaggugaa

SEQ ID NO: 2588104 - RNA, 19 nt, Homo sapiens
  misc_RNA (1)...(19): siRNA sense strand
ggaggagaaguguaggcaa

SEQ ID NO: 2588105 - RNA, 19 nt, Homo sapiens
  misc_RNA (1)...(19): siRNA sense strand
ccugcagcgaagagagaau

SEQ ID NO: 2588106 - RNA, 19 nt, Homo sapiens
  misc_RNA (1)...(19): siRNA sense strand
gccaaggaaauaugggaga

SEQ ID NO: 2588107 - RNA, 19 nt, Homo sapiens
  misc_RNA (1)...(19): siRNA sense strand
gggacagcugaaugagauu

SEQ ID NO: 2588108 - RNA, 19 nt, Homo sapiens
  misc_RNA (1)...(19): siRNA sense strand
gugcuuagagacagaggau

SEQ ID NO: 2588109 - RNA, 19 nt, Homo sapiens
  misc_RNA (1)...(19): siRNA sense strand
gggagaucacggagaccuu

SEQ ID NO: 2588110 - RNA, 19 nt, Homo sapiens
  misc_RNA (1)...(19): siRNA sense strand
aggcagagcuggaagaagc

SEQ ID NO: 2588111 - RNA, 19 nt, Homo sapiens
  misc_RNA (1)...(19): siRNA sense strand
uaucacagccuaaaggaga

SEQ ID NO: 2588112 - RNA, 19 nt, Homo sapiens
  misc_RNA (1)...(19): siRNA sense strand
auggcaacacugugagcua

SEQ ID NO: 2588113 - RNA, 19 nt, Homo sapiens
  misc_RNA (1)...(19): siRNA sense strand
gagaaguguaggcaagcau

SEQ ID NO: 2588114 - RNA, 19 nt, Homo sapiens
  misc_RNA (1)...(19): siRNA sense strand
aggcaagcauugauggaag

SEQ ID NO: 2588115 - RNA, 19 nt, Homo sapiens
  misc_RNA (1)...(19): siRNA sense strand
ccucaagcugguauccaaa

SEQ ID NO: 2588116 - RNA, 19 nt, Homo sapiens
  misc_RNA (1)...(19): siRNA sense strand
gcaaacaggaccagggcaa

SEQ ID NO: 2588117 - RNA, 19 nt, Homo sapiens
  misc_RNA (1)...(19): siRNA sense strand
ggggaaaggaagagaaguu

SEQ ID NO: 2588118 - RNA, 19 nt, Homo sapiens
  misc_RNA (1)...(19): siRNA sense strand
aggaagagaaguuggcuga

SEQ ID NO: 2588119 - RNA, 19 nt, Homo sapiens
  misc_RNA (1)...(19): siRNA sense strand
ccacuaagcaucaucguga

SEQ ID NO: 2588120 - RNA, 19 nt, Homo sapiens
  misc_RNA (1)...(19): siRNA sense strand
accggaggguggagggauu

SEQ ID NO: 2588121 - RNA, 19 nt, Homo sapiens
  misc_RNA (1)...(19): siRNA sense strand
agaacaaagcuguggagaa

SEQ ID NO: 2588122 - RNA, 19 nt, Homo sapiens
  misc_RNA (1)...(19): siRNA sense strand
agaaagaagaugaggagga

SEQ ID NO: 2588123 - RNA, 19 nt, Homo sapiens
  misc_RNA (1)...(19): siRNA sense strand
cuuaugaagaagagaacaa

SEQ ID NO: 2588124 - RNA, 19 nt, Homo sapiens
  misc_RNA (1)...(19): siRNA sense strand
cgcaagacgucaagggaga

SEQ ID NO: 2588125 - RNA, 19 nt, Homo sapiens
  misc_RNA (1)...(19): siRNA sense strand
cagaagugcagguggaaga

SEQ ID NO: 2588126 - RNA, 19 nt, Homo sapiens
  misc_RNA (1)...(19): siRNA sense strand
cggaggaaagggaggagaa

SEQ ID NO: 2588127 - RNA, 19 nt, Homo sapiens
  misc_RNA (1)...(19): siRNA sense strand
aggaagaggaagaggagga

SEQ ID NO: 2588128 - RNA, 19 nt, Homo sapiens
  misc_RNA (1)...(19): siRNA sense strand
aggaagaggaggaggagga

SEQ ID NO: 2588129 - RNA, 19 nt, Homo sapiens
  misc_RNA (1)...(19): siRNA sense strand
aggaggaggaagaggaaga

SEQ ID NO: 2588130 - RNA, 19 nt, Homo sapiens
  misc_RNA (1)...(19): siRNA sense strand
aggaggaggaggaggaaga

SEQ ID NO: 2588131 - RNA, 19 nt, Homo sapiens
  misc_RNA (1)...(19): siRNA sense strand
agcaagaguugguggaaca

SEQ ID NO: 2588132 - RNA, 19 nt, Homo sapiens
  misc_RNA (1)...(19): siRNA sense strand
cugaagagcucaaggcguu

SEQ ID NO: 2588133 - RNA, 19 nt, Homo sapiens
  misc_RNA (1)...(19): siRNA sense strand
cggugaaguacaugaauuu

SEQ ID NO: 2588134 - RNA, 19 nt, Homo sapiens
  misc_RNA (1)...(19): siRNA sense strand
agagaaagugaaggagaaa

SEQ ID NO: 2588135 - RNA, 19 nt, Homo sapiens
  misc_RNA (1)...(19): siRNA sense strand
cugaggaggccgagacaga

SEQ ID NO: 2588136 - RNA, 19 nt, Homo sapiens
  misc_RNA (1)...(19): siRNA sense strand
agaccaagaugcaggagga

SEQ ID NO: 2588137 - RNA, 19 nt, Homo sapiens
  misc_RNA (1)...(19): siRNA sense strand
acaauaagcccaaggagga

SEQ ID NO: 2588138 - RNA, 19 nt, Homo sapiens
  misc_RNA (1)...(19): siRNA sense strand
gagcagauccugucgguga

SEQ ID NO: 2588139 - RNA, 19 nt, Homo sapiens
  misc_RNA (1)...(19): siRNA sense strand
gugaagaugccggaggaaa

SEQ ID NO: 2588140 - RNA, 19 nt, Homo sapiens
  misc_RNA (1)...(19): siRNA sense strand
aggaaguggcuguggcaga

SEQ ID NO: 2588141 - RNA, 19 nt, Homo sapiens
  misc_RNA (1)...(19): siRNA sense strand
agaaagugaaggagaaacu

SEQ ID NO: 2588142 - RNA, 19 nt, Homo sapiens
  misc_RNA (1)...(19): siRNA sense strand
acuacaacaucguuagcaa

SEQ ID NO: 2588143 - RNA, 19 nt, Homo sapiens
  misc_RNA (1)...(19): siRNA sense strand
agacagaguccgaguccau

SEQ ID NO: 2588144 - RNA, 19 nt, Homo sapiens
  misc_RNA (1)...(19): siRNA sense strand
cauucaaggaggaggaagu

SEQ ID NO: 2588145 - RNA, 19 nt, Homo sapiens
  misc_RNA (1)...(19): siRNA sense strand
gaggacaaguggagccuga

SEQ ID NO: 2588146 - RNA, 19 nt, Homo sapiens
  misc_RNA (1)...(19): siRNA sense strand
caaggagcggacagagaaa

SEQ ID NO: 2588147 - RNA, 19 nt, Homo sapiens
  misc_RNA (1)...(19): siRNA sense strand
gggacaucauuacggacaa

SEQ ID NO: 2588148 - RNA, 19 nt, Homo sapiens
  misc_RNA (1)...(19): siRNA sense strand
caggaaagauggguggcaa

SEQ ID NO: 2588149 - RNA, 19 nt, Homo sapiens
  misc_RNA (1)...(19): siRNA sense strand
cagcuuaugaagaagagaa

SEQ ID NO: 2588150 - RNA, 19 nt, Homo sapiens
  misc_RNA (1)...(19): siRNA sense strand
aagccgagccaguggaaga

SEQ ID NO: 2588151 - RNA, 19 nt, Homo sapiens
  misc_RNA (1)...(19): siRNA sense strand
aagaagaugaggaggagga

SEQ ID NO: 2588152 - RNA, 19 nt, Homo sapiens
  misc_RNA (1)...(19): siRNA sense strand
aggcugaagagaaggccaa

SEQ ID NO: 2588153 - RNA, 19 nt, Homo sapiens
  misc_RNA (1)...(19): siRNA sense strand
ccaacgacuaugugugcaa

SEQ ID NO: 2588154 - RNA, 19 nt, Homo sapiens
  misc_RNA (1)...(19): siRNA sense strand
aggacugggcggagaccaa

SEQ ID NO: 2588155 - RNA, 19 nt, Homo sapiens
  misc_RNA (1)...(19): siRNA sense strand
acagagaaagugaaggaga

SEQ ID NO: 2588156 - RNA, 19 nt, Homo sapiens
  misc_RNA (1)...(19): siRNA sense strand
agaccaaggaggagccuga

SEQ ID NO: 2588157 - RNA, 19 nt, Homo sapiens
  misc_RNA (1)...(19): siRNA sense strand
guuuaaaguacauggccuu

SEQ ID NO: 2588158 - RNA, 19 nt, Homo sapiens
  misc_RNA (1)...(19): siRNA sense strand
uugaagaggagaaagaaga

SEQ ID NO: 2588159 - RNA, 19 nt, Homo sapiens
  misc_RNA (1)...(19): siRNA sense strand
aggaggaggaagaggagga

SEQ ID NO: 2588160 - RNA, 19 nt, Homo sapiens
  misc_RNA (1)...(19): siRNA sense strand
aggccaagaaggaggcuga

SEQ ID NO: 2588161 - RNA, 19 nt, Homo sapiens
  misc_RNA (1)...(19): siRNA sense strand
aagagaaggccaaggagga

SEQ ID NO: 2588162 - RNA, 19 nt, Homo sapiens
  misc_RNA (1)...(19): siRNA sense strand
cuacaacaucguuagcaaa

SEQ ID NO: 2588163 - RNA, 19 nt, Homo sapiens
  misc_RNA (1)...(19): siRNA sense strand
ucaugaaggguguagagaa

SEQ ID NO: 2588164 - RNA, 19 nt, Homo sapiens
  misc_RNA (1)...(19): siRNA sense strand
cugaagaggaggcugaaaa

SEQ ID NO: 2588165 - RNA, 19 nt, Homo sapiens
  misc_RNA (1)...(19): siRNA sense strand
ggaaguggaaccagagcca

SEQ ID NO: 2588166 - RNA, 19 nt, Homo sapiens
  misc_RNA (1)...(19): siRNA sense strand
caagaaagccccagagcca

SEQ ID NO: 2588167 - RNA, 19 nt, Homo sapiens
  misc_RNA (1)...(19): siRNA sense strand
uuuacgauggcgugggaaa

SEQ ID NO: 2588168 - RNA, 19 nt, Homo sapiens
  misc_RNA (1)...(19): siRNA sense strand
uggcugaagaggaggcuga

SEQ ID NO: 2588169 - RNA, 19 nt, Homo sapiens
  misc_RNA (1)...(19): siRNA sense strand
gaggagcacuauugcgaca

SEQ ID NO: 2588170 - RNA, 19 nt, Homo sapiens
  misc_RNA (1)...(19): siRNA sense strand
aagaggaagaggaggagga

SEQ ID NO: 2588171 - RNA, 19 nt, Homo sapiens
  misc_RNA (1)...(19): siRNA sense strand
aagaggaggaggaggagga

SEQ ID NO: 2588172 - RNA, 19 nt, Homo sapiens
  misc_RNA (1)...(19): siRNA sense strand
ccgaagagucauucaagga

SEQ ID NO: 2588173 - RNA, 19 nt, Homo sapiens
  misc_RNA (1)...(19): siRNA sense strand
ccggauugaagaggagaaa

SEQ ID NO: 2588174 - RNA, 19 nt, Homo sapiens
  misc_RNA (1)...(19): siRNA sense strand
ggagaaagaagaugaggag

SEQ ID NO: 2588175 - RNA, 19 nt, Homo sapiens
  misc_RNA (1)...(19): siRNA sense strand
gaucagaagcugugggagg

SEQ ID NO: 2588176 - RNA, 19 nt, Homo sapiens
  misc_RNA (1)...(19): siRNA sense strand
aauuggaacuguuggcuga

SEQ ID NO: 2588177 - RNA, 19 nt, Homo sapiens
  misc_RNA (1)...(19): siRNA sense strand
cggugaagaugccggagga

SEQ ID NO: 2588178 - RNA, 19 nt, Homo sapiens
  misc_RNA (1)...(19): siRNA sense strand
aagaggaggaggugacuga

SEQ ID NO: 2588179 - RNA, 19 nt, Homo sapiens
  misc_RNA (1)...(19): siRNA sense strand
aggcggagguggaaccaga

SEQ ID NO: 2588180 - RNA, 19 nt, Homo sapiens
  misc_RNA (1)...(19): siRNA sense strand
ccuuauagucccaagcuca

SEQ ID NO: 2588181 - RNA, 19 nt, Homo sapiens
  misc_RNA (1)...(19): siRNA sense strand
augaauagucccagccaca

SEQ ID NO: 2588182 - RNA, 19 nt, Homo sapiens
  misc_RNA (1)...(19): siRNA sense strand
uggccuucuucgaguuuaa

SEQ ID NO: 2588183 - RNA, 19 nt, Homo sapiens
  misc_RNA (1)...(19): siRNA sense strand
aagaggaaguggaaccaga

SEQ ID NO: 2588184 - RNA, 19 nt, Homo sapiens
  misc_RNA (1)...(19): siRNA sense strand
ccaaggaggagaagagcgu

SEQ ID NO: 2588185 - RNA, 19 nt, Homo sapiens
  misc_RNA (1)...(19): siRNA sense strand
agauggaggcggaggugga

SEQ ID NO: 2588186 - RNA, 19 nt, Homo sapiens
  misc_RNA (1)...(19): siRNA sense strand
agccagagauggaggcgga

SEQ ID NO: 2588187 - RNA, 19 nt, Homo sapiens
  misc_RNA (1)...(19): siRNA sense strand
cggaagaaagccaggcgca

SEQ ID NO: 2588188 - RNA, 19 nt, Homo sapiens
  misc_RNA (1)...(19): siRNA sense strand
ggaagaaagccaggcgcau

SEQ ID NO: 2588189 - RNA, 19 nt, Homo sapiens
  misc_RNA (1)...(19): siRNA sense strand
ugaagaugccggaggaaag

SEQ ID NO: 2588190 - RNA, 19 nt, Homo sapiens
  misc_RNA (1)...(19): siRNA sense strand
aagaggagaaagaagauga

SEQ ID NO: 2588191 - RNA, 19 nt, Homo sapiens
  misc_RNA (1)...(19): siRNA sense strand
aggagaaagaagaugagga

SEQ ID NO: 2588192 - RNA, 19 nt, Homo sapiens
  misc_RNA (1)...(19): siRNA sense strand
acagaugagagauguggua

SEQ ID NO: 2588193 - RNA, 19 nt, Homo sapiens
  misc_RNA (1)...(19): siRNA sense strand
acggugaaguacaugaauu

SEQ ID NO: 2588194 - RNA, 19 nt, Homo sapiens
  misc_RNA (1)...(19): siRNA sense strand
uggcagugugaaugggaaa

SEQ ID NO: 2588195 - RNA, 19 nt, Homo sapiens
  misc_RNA (1)...(19): siRNA sense strand
aaaugauggcagugugaau

SEQ ID NO: 2588196 - RNA, 19 nt, Homo sapiens
  misc_RNA (1)...(19): siRNA sense strand
cgauacagccgcagccuca

SEQ ID NO: 2588197 - RNA, 19 nt, Homo sapiens
  misc_RNA (1)...(19): siRNA sense strand
guguauggcgacuggacua

SEQ ID NO: 2588198 - RNA, 19 nt, Homo sapiens
  misc_RNA (1)...(19): siRNA sense strand
agacagaagcggacccaga

SEQ ID NO: 2588199 - RNA, 19 nt, Homo sapiens
  misc_RNA (1)...(19): siRNA sense strand
uggcaugaguggagaagac

SEQ ID NO: 2588200 - RNA, 19 nt, Homo sapiens
  misc_RNA (1)...(19): siRNA sense strand
ggaagaucaccaaggucau

SEQ ID NO: 2588201 - RNA, 19 nt, Homo sapiens
  misc_RNA (1)...(19): siRNA sense strand
uggaagaucaccaagguca

SEQ ID NO: 2588202 - RNA, 19 nt, Homo sapiens
  misc_RNA (1)...(19): siRNA sense strand
agucagaugaggagcagga

SEQ ID NO: 2588203 - RNA, 19 nt, Homo sapiens
  misc_RNA (1)...(19): siRNA sense strand
caaagccagcagaggacaa

SEQ ID NO: 2588204 - RNA, 19 nt, Homo sapiens
  misc_RNA (1)...(19): siRNA sense strand
ucaccaaggucauggacgu

SEQ ID NO: 2588205 - RNA, 19 nt, Homo sapiens
  misc_RNA (1)...(19): siRNA sense strand
uggcccugcuggagaccaa

SEQ ID NO: 2588206 - RNA, 19 nt, Homo sapiens
  misc_RNA (1)...(19): siRNA sense strand
ccacagagcguccagcaga

SEQ ID NO: 2588207 - RNA, 19 nt, Homo sapiens
  misc_RNA (1)...(19): siRNA sense strand
cagacuugggugagugaau

SEQ ID NO: 2588208 - RNA, 19 nt, Homo sapiens
  misc_RNA (1)...(19): siRNA sense strand
ccacaaguguagucccuca

SEQ ID NO: 2588209 - RNA, 19 nt, Homo sapiens
  misc_RNA (1)...(19): siRNA sense strand
gauaaccagacuuggguga

SEQ ID NO: 2588210 - RNA, 19 nt, Homo sapiens
  misc_RNA (1)...(19): siRNA sense strand
ccaccauccuaaagaucca

SEQ ID NO: 2588211 - RNA, 19 nt, Homo sapiens
  misc_RNA (1)...(19): siRNA sense strand
ccuaaggaauaaagaggug

SEQ ID NO: 2588212 - RNA, 19 nt, Homo sapiens
  misc_RNA (1)...(19): siRNA sense strand
acgaagaagugcaggagga

SEQ ID NO: 2588213 - RNA, 19 nt, Homo sapiens
  misc_RNA (1)...(19): siRNA sense strand
ccuucaaaauccugcaaaa

SEQ ID NO: 2588214 - RNA, 19 nt, Homo sapiens
  misc_RNA (1)...(19): siRNA sense strand
ccucaggaaccaaagguca

SEQ ID NO: 2588215 - RNA, 19 nt, Homo sapiens
  misc_RNA (1)...(19): siRNA sense strand
cguacuaugguuauggcua

SEQ ID NO: 2588216 - RNA, 19 nt, Homo sapiens
  misc_RNA (1)...(19): siRNA sense strand
aggaagaacugcucccuga

SEQ ID NO: 2588217 - RNA, 19 nt, Homo sapiens
  misc_RNA (1)...(19): siRNA sense strand
aggcauaguuucagaccac

SEQ ID NO: 2588218 - RNA, 19 nt, Homo sapiens
  misc_RNA (1)...(19): siRNA sense strand
gaaccaaaggucaccgaca

SEQ ID NO: 2588219 - RNA, 19 nt, Homo sapiens
  misc_RNA (1)...(19): siRNA sense strand
cagaaaucaagauacacaa

SEQ ID NO: 2588220 - RNA, 19 nt, Homo sapiens
  misc_RNA (1)...(19): siRNA sense strand
ccacaaacgacccagacga

SEQ ID NO: 2588221 - RNA, 19 nt, Homo sapiens
  misc_RNA (1)...(19): siRNA sense strand
ggucugcagaagaaggaga

SEQ ID NO: 2588222 - RNA, 19 nt, Homo sapiens
  misc_RNA (1)...(19): siRNA sense strand
cagacgaagaagugcagga

SEQ ID NO: 2588223 - RNA, 19 nt, Homo sapiens
  misc_RNA (1)...(19): siRNA sense strand
cugcauacuucuuucgguu

SEQ ID NO: 2588224 - RNA, 19 nt, Homo sapiens
  misc_RNA (1)...(19): siRNA sense strand
cugcagaagaaggagauuu

SEQ ID NO: 2588225 - RNA, 19 nt, Homo sapiens
  misc_RNA (1)...(19): siRNA sense strand
acgaagaagugcaggagga

SEQ ID NO: 2588226 - RNA, 19 nt, Homo sapiens
  misc_RNA (1)...(19): siRNA sense strand
ccuucaaaauccugcaaaa

SEQ ID NO: 2588227 - RNA, 19 nt, Homo sapiens
  misc_RNA (1)...(19): siRNA sense strand
ccucaggaaccaaagguca

SEQ ID NO: 2588228 - RNA, 19 nt, Homo sapiens
  misc_RNA (1)...(19): siRNA sense strand
cguacuaugguuauggcua

SEQ ID NO: 2588229 - RNA, 19 nt, Homo sapiens
  misc_RNA (1)...(19): siRNA sense strand
aggaagaacugcucccuga

SEQ ID NO: 2588230 - RNA, 19 nt, Homo sapiens
  misc_RNA (1)...(19): siRNA sense strand
aggcauaguuucagaccac

SEQ ID NO: 2588231 - RNA, 19 nt, Homo sapiens
  misc_RNA (1)...(19): siRNA sense strand
gaaccaaaggucaccgaca

SEQ ID NO: 2588232 - RNA, 19 nt, Homo sapiens
  misc_RNA (1)...(19): siRNA sense strand
cagaaaucaagauacacaa

SEQ ID NO: 2588233 - RNA, 19 nt, Homo sapiens
  misc_RNA (1)...(19): siRNA sense strand
ccacaaacgacccagacga

SEQ ID NO: 2588234 - RNA, 19 nt, Homo sapiens
  misc_RNA (1)...(19): siRNA sense strand
ggucugcagaagaaggaga

SEQ ID NO: 2588235 - RNA, 19 nt, Homo sapiens
  misc_RNA (1)...(19): siRNA sense strand
cagacgaagaagugcagga

SEQ ID NO: 2588236 - RNA, 19 nt, Homo sapiens
  misc_RNA (1)...(19): siRNA sense strand
cugcauacuucuuucgguu

SEQ ID NO: 2588237 - RNA, 19 nt, Homo sapiens
  misc_RNA (1)...(19): siRNA sense strand
cugcagaagaaggagauuu

SEQ ID NO: 2588238 - RNA, 19 nt, Homo sapiens
  misc_RNA (1)...(19): siRNA sense strand
acgaagaagugcaggagga

SEQ ID NO: 2588239 - RNA, 19 nt, Homo sapiens
  misc_RNA (1)...(19): siRNA sense strand
ccuucaaaauccugcaaaa

SEQ ID NO: 2588240 - RNA, 19 nt, Homo sapiens
  misc_RNA (1)...(19): siRNA sense strand
cguacuaugguuauggcua

SEQ ID NO: 2588241 - RNA, 19 nt, Homo sapiens
  misc_RNA (1)...(19): siRNA sense strand
aggaagaacugcucccuga

SEQ ID NO: 2588242 - RNA, 19 nt, Homo sapiens
  misc_RNA (1)...(19): siRNA sense strand
aggcauaguuucagaccac

SEQ ID NO: 2588243 - RNA, 19 nt, Homo sapiens
  misc_RNA (1)...(19): siRNA sense strand
ccacaaacgacccagacga

SEQ ID NO: 2588244 - RNA, 19 nt, Homo sapiens
  misc_RNA (1)...(19): siRNA sense strand
ggucugcagaagaaggaga

SEQ ID NO: 2588245 - RNA, 19 nt, Homo sapiens
  misc_RNA (1)...(19): siRNA sense strand
cagacgaagaagugcagga

SEQ ID NO: 2588246 - RNA, 19 nt, Homo sapiens
  misc_RNA (1)...(19): siRNA sense strand
cugcauacuucuuucgguu

SEQ ID NO: 2588247 - RNA, 19 nt, Homo sapiens
  misc_RNA (1)...(19): siRNA sense strand
cugcagaagaaggagauuu

SEQ ID NO: 2588248 - RNA, 19 nt, Homo sapiens
  misc_RNA (1)...(19): siRNA sense strand
agaacauugacgacgcuaa

SEQ ID NO: 2588249 - RNA, 19 nt, Homo sapiens
  misc_RNA (1)...(19): siRNA sense strand
ugaaagacagggagaccca

SEQ ID NO: 2588250 - RNA, 19 nt, Homo sapiens
  misc_RNA (1)...(19): siRNA sense strand
guugugaaagacagggaga

SEQ ID NO: 2588251 - RNA, 19 nt, Homo sapiens
  misc_RNA (1)...(19): siRNA sense strand
agguaacagugaagggauu

SEQ ID NO: 2588252 - RNA, 19 nt, Homo sapiens
  misc_RNA (1)...(19): siRNA sense strand
aauugaaaccagaggacuu

SEQ ID NO: 2588253 - RNA, 19 nt, Homo sapiens
  misc_RNA (1)...(19): siRNA sense strand
auaaggaauucauggcaga

SEQ ID NO: 2588254 - RNA, 19 nt, Homo sapiens
  misc_RNA (1)...(19): siRNA sense strand
aaauagugauugcugggaa

SEQ ID NO: 2588255 - RNA, 19 nt, Homo sapiens
  misc_RNA (1)...(19): siRNA sense strand
aaccagaggacuuugacaa

SEQ ID NO: 2588256 - RNA, 19 nt, Homo sapiens
  misc_RNA (1)...(19): siRNA sense strand
ccuuggaccccgugguuua

SEQ ID NO: 2588257 - RNA, 19 nt, Homo sapiens
  misc_RNA (1)...(19): siRNA sense strand
gggacaacgcaguguucaa

SEQ ID NO: 2588258 - RNA, 19 nt, Homo sapiens
  misc_RNA (1)...(19): siRNA sense strand
ugggaagcggacagggaga

SEQ ID NO: 2588259 - RNA, 19 nt, Homo sapiens
  misc_RNA (1)...(19): siRNA sense strand
cugccuggacccugaagaa

SEQ ID NO: 2588260 - RNA, 19 nt, Homo sapiens
  misc_RNA (1)...(19): siRNA sense strand
ucgugaugaaggaggcaaa

SEQ ID NO: 2588261 - RNA, 19 nt, Homo sapiens
  misc_RNA (1)...(19): siRNA sense strand
gggucaagcugcugcugca

SEQ ID NO: 2588262 - RNA, 19 nt, Homo sapiens
  misc_RNA (1)...(19): siRNA sense strand
cagucagggcgcaaaggaa

SEQ ID NO: 2588263 - RNA, 19 nt, Homo sapiens
  misc_RNA (1)...(19): siRNA sense strand
aggcauggguggugcuuuu

SEQ ID NO: 2588264 - RNA, 19 nt, Homo sapiens
  misc_RNA (1)...(19): siRNA sense strand
ugguuaagaucuacaaauc

SEQ ID NO: 2588265 - RNA, 19 nt, Homo sapiens
  misc_RNA (1)...(19): siRNA sense strand
cagaaggagcugaaggaga

SEQ ID NO: 2588266 - RNA, 19 nt, Homo sapiens
  misc_RNA (1)...(19): siRNA sense strand
cuacaaguuaggugggaau

SEQ ID NO: 2588267 - RNA, 19 nt, Homo sapiens
  misc_RNA (1)...(19): siRNA sense strand
uggaguugcuggagugcau

SEQ ID NO: 2588268 - RNA, 19 nt, Homo sapiens
  misc_RNA (1)...(19): siRNA sense strand
gcugaugguggaauggaau

SEQ ID NO: 2588269 - RNA, 19 nt, Homo sapiens
  misc_RNA (1)...(19): siRNA sense strand
guucaaaggcaaagaccag

SEQ ID NO: 2588270 - RNA, 19 nt, Homo sapiens
  misc_RNA (1)...(19): siRNA sense strand
aggagauccaguacggaau

SEQ ID NO: 2588271 - RNA, 19 nt, Homo sapiens
  misc_RNA (1)...(19): siRNA sense strand
ggcucaucgaaguggacaa

SEQ ID NO: 2588272 - RNA, 19 nt, Homo sapiens
  misc_RNA (1)...(19): siRNA sense strand
gagaagcaguacaaaggga

SEQ ID NO: 2588273 - RNA, 19 nt, Homo sapiens
  misc_RNA (1)...(19): siRNA sense strand
gggucaaacugcugcugca

SEQ ID NO: 2588274 - RNA, 19 nt, Homo sapiens
  misc_RNA (1)...(19): siRNA sense strand
ggaugauugcccagagugu

SEQ ID NO: 2588275 - RNA, 19 nt, Homo sapiens
  misc_RNA (1)...(19): siRNA sense strand
cagagaaggcaguggaacu

SEQ ID NO: 2588276 - RNA, 19 nt, Homo sapiens
  misc_RNA (1)...(19): siRNA sense strand
cuucaagggccgagggauc

SEQ ID NO: 2588277 - RNA, 19 nt, Homo sapiens
  misc_RNA (1)...(19): siRNA sense strand
ccgcagagaucauggcugu

SEQ ID NO: 2588278 - RNA, 19 nt, Homo sapiens
  misc_RNA (1)...(19): siRNA sense strand
gcguggaggagcugugcaa

SEQ ID NO: 2588279 - RNA, 19 nt, Homo sapiens
  misc_RNA (1)...(19): siRNA sense strand
aggugguccugaagagcaa

SEQ ID NO: 2588280 - RNA, 19 nt, Homo sapiens
  misc_RNA (1)...(19): siRNA sense strand
gcuacaaaguuggggacaa

SEQ ID NO: 2588281 - RNA, 19 nt, Homo sapiens
  misc_RNA (1)...(19): siRNA sense strand
uggacaaccucguggccau

SEQ ID NO: 2588282 - RNA, 19 nt, Homo sapiens
  misc_RNA (1)...(19): siRNA sense strand
gauaaggagucuuggcaug

SEQ ID NO: 2588283 - RNA, 19 nt, Homo sapiens
  misc_RNA (1)...(19): siRNA sense strand
caggagaucuacagccaga

SEQ ID NO: 2588284 - RNA, 19 nt, Homo sapiens
  misc_RNA (1)...(19): siRNA sense strand
ggguagaagauaaggaguc

SEQ ID NO: 2588285 - RNA, 19 nt, Homo sapiens
  misc_RNA (1)...(19): siRNA sense strand
agcagaacauggugagcau

SEQ ID NO: 2588286 - RNA, 19 nt, Homo sapiens
  misc_RNA (1)...(19): siRNA sense strand
auaacaacaaugaggacuu

SEQ ID NO: 2588287 - RNA, 19 nt, Homo sapiens
  misc_RNA (1)...(19): siRNA sense strand
gagcagaucauccaggaga

SEQ ID NO: 2588288 - RNA, 19 nt, Homo sapiens
  misc_RNA (1)...(19): siRNA sense strand
agccagauccagagcaaaa

SEQ ID NO: 2588289 - RNA, 19 nt, Homo sapiens
  misc_RNA (1)...(19): siRNA sense strand
cagggaugccauugcacaa

SEQ ID NO: 2588290 - RNA, 19 nt, Homo sapiens
  misc_RNA (1)...(19): siRNA sense strand
caguggaacuagccgccaa

SEQ ID NO: 2588291 - RNA, 19 nt, Homo sapiens
  misc_RNA (1)...(19): siRNA sense strand
cccuagaagaucuggcuau

SEQ ID NO: 2588292 - RNA, 19 nt, Homo sapiens
  misc_RNA (1)...(19): siRNA sense strand
ccggcaaauacuucgacaa

SEQ ID NO: 2588293 - RNA, 19 nt, Homo sapiens
  misc_RNA (1)...(19): siRNA sense strand
uggccauucuagacaucaa

SEQ ID NO: 2588294 - RNA, 19 nt, Homo sapiens
  misc_RNA (1)...(19): siRNA sense strand
ccucaguggacauugccaa

SEQ ID NO: 2588295 - RNA, 19 nt, Homo sapiens
  misc_RNA (1)...(19): siRNA sense strand
gcaacaggacggugcccuu

SEQ ID NO: 2588296 - RNA, 19 nt, Homo sapiens
  misc_RNA (1)...(19): siRNA sense strand
uggaagaggcugaaggaca

SEQ ID NO: 2588297 - RNA, 19 nt, Homo sapiens
  misc_RNA (1)...(19): siRNA sense strand
ggacacaaggagagagcca

SEQ ID NO: 2588298 - RNA, 19 nt, Homo sapiens
  misc_RNA (1)...(19): siRNA sense strand
cugaaggacauuaggaaaa

SEQ ID NO: 2588299 - RNA, 19 nt, Homo sapiens
  misc_RNA (1)...(19): siRNA sense strand
ggaaauauuuaaagagugc

SEQ ID NO: 2588300 - RNA, 19 nt, Homo sapiens
  misc_RNA (1)...(19): siRNA sense strand
acuuuggacccgagggcaa

SEQ ID NO: 2588301 - RNA, 19 nt, Homo sapiens
  misc_RNA (1)...(19): siRNA sense strand
gagaaguaugugacggaga

SEQ ID NO: 2588302 - RNA, 19 nt, Homo sapiens
  misc_RNA (1)...(19): siRNA sense strand
aggaaagacaacagcagau

SEQ ID NO: 2588303 - RNA, 19 nt, Homo sapiens
  misc_RNA (1)...(19): siRNA sense strand
cuggagaccuucauggaca

SEQ ID NO: 2588304 - RNA, 19 nt, Homo sapiens
  misc_RNA (1)...(19): siRNA sense strand
ggauauuacuaccgcgaug

SEQ ID NO: 2588305 - RNA, 19 nt, Homo sapiens
  misc_RNA (1)...(19): siRNA sense strand
ggaggagcauagaggcguu

SEQ ID NO: 2588306 - RNA, 19 nt, Homo sapiens
  misc_RNA (1)...(19): siRNA sense strand
gcugaaccacuuugggaga

SEQ ID NO: 2588307 - RNA, 19 nt, Homo sapiens
  misc_RNA (1)...(19): siRNA sense strand
ggcugaaggacauuaggaa

SEQ ID NO: 2588308 - RNA, 19 nt, Homo sapiens
  misc_RNA (1)...(19): siRNA sense strand
acaaagagcgguacgccuu

SEQ ID NO: 2588309 - RNA, 19 nt, Homo sapiens
  misc_RNA (1)...(19): siRNA sense strand
cagucuugggugcaggaaa

SEQ ID NO: 2588310 - RNA, 19 nt, Homo sapiens
  misc_RNA (1)...(19): siRNA sense strand
cugauugagaacagcauuu

SEQ ID NO: 2588311 - RNA, 19 nt, Homo sapiens
  misc_RNA (1)...(19): siRNA sense strand
uguggaaugcacuggagaa

SEQ ID NO: 2588312 - RNA, 19 nt, Homo sapiens
  misc_RNA (1)...(19): siRNA sense strand
uggagaaguaugugacgga

SEQ ID NO: 2588313 - RNA, 19 nt, Homo sapiens
  misc_RNA (1)...(19): siRNA sense strand
ggguauagagucaggcauc

SEQ ID NO: 2588314 - RNA, 19 nt, Homo sapiens
  misc_RNA (1)...(19): siRNA sense strand
ccagcuugucauucagaua

SEQ ID NO: 2588315 - RNA, 19 nt, Homo sapiens
  misc_RNA (1)...(19): siRNA sense strand
gugcagugcuggauuggga

SEQ ID NO: 2588316 - RNA, 19 nt, Homo sapiens
  misc_RNA (1)...(19): siRNA sense strand
auugcaggguauagaguca

SEQ ID NO: 2588317 - RNA, 19 nt, Homo sapiens
  misc_RNA (1)...(19): siRNA sense strand
ugaaacuagcagcagcaaa

SEQ ID NO: 2588318 - RNA, 19 nt, Homo sapiens
  misc_RNA (1)...(19): siRNA sense strand
ccacaggagaaaagggaaa

SEQ ID NO: 2588319 - RNA, 19 nt, Homo sapiens
  misc_RNA (1)...(19): siRNA sense strand
agucaaaagaagaggauuu

SEQ ID NO: 2588320 - RNA, 19 nt, Homo sapiens
  misc_RNA (1)...(19): siRNA sense strand
aaauacaggaacagaggaa

SEQ ID NO: 2588321 - RNA, 19 nt, Homo sapiens
  misc_RNA (1)...(19): siRNA sense strand
gaacagaaaccacaggaga

SEQ ID NO: 2588322 - RNA, 19 nt, Homo sapiens
  misc_RNA (1)...(19): siRNA sense strand
aauuagaaugugaggauga

SEQ ID NO: 2588323 - RNA, 19 nt, Homo sapiens
  misc_RNA (1)...(19): siRNA sense strand
aggcacaguuagaugaaga

SEQ ID NO: 2588324 - RNA, 19 nt, Homo sapiens
  misc_RNA (1)...(19): siRNA sense strand
gauuguuggauguggagaa

SEQ ID NO: 2588325 - RNA, 19 nt, Homo sapiens
  misc_RNA (1)...(19): siRNA sense strand
ccuuggacaugauggaaau

SEQ ID NO: 2588326 - RNA, 19 nt, Homo sapiens
  misc_RNA (1)...(19): siRNA sense strand
aauccauggcacugaaaua

SEQ ID NO: 2588327 - RNA, 19 nt, Homo sapiens
  misc_RNA (1)...(19): siRNA sense strand
ggauauugucauuggaauc

SEQ ID NO: 2588328 - RNA, 19 nt, Homo sapiens
  misc_RNA (1)...(19): siRNA sense strand
ccucacaagccgaacagaa

SEQ ID NO: 2588329 - RNA, 19 nt, Homo sapiens
  misc_RNA (1)...(19): siRNA sense strand
caggaacagaggaaacaaa

SEQ ID NO: 2588330 - RNA, 19 nt, Homo sapiens
  misc_RNA (1)...(19): siRNA sense strand
acuacuacucagagagaga

SEQ ID NO: 2588331 - RNA, 19 nt, Homo sapiens
  misc_RNA (1)...(19): siRNA sense strand
aguuagaugaagaaggaca

SEQ ID NO: 2588332 - RNA, 19 nt, Homo sapiens
  misc_RNA (1)...(19): siRNA sense strand
aggaaggauuguuggaugu

SEQ ID NO: 2588333 - RNA, 19 nt, Homo sapiens
  misc_RNA (1)...(19): siRNA sense strand
cucacaagccgaacagaaa

SEQ ID NO: 2588334 - RNA, 19 nt, Homo sapiens
  misc_RNA (1)...(19): siRNA sense strand
cagcaaagaaaugaagaau

SEQ ID NO: 2588335 - RNA, 19 nt, Homo sapiens
  misc_RNA (1)...(19): siRNA sense strand
ucagcaaagaaaugaagaa

SEQ ID NO: 2588336 - RNA, 19 nt, Homo sapiens
  misc_RNA (1)...(19): siRNA sense strand
cuacuuaccugaagcagau

SEQ ID NO: 2588337 - RNA, 19 nt, Homo sapiens
  misc_RNA (1)...(19): siRNA sense strand
gcuuacgucucaaggguca

SEQ ID NO: 2588338 - RNA, 19 nt, Homo sapiens
  misc_RNA (1)...(19): siRNA sense strand
aacagaaaccacaggagaa

SEQ ID NO: 2588339 - RNA, 19 nt, Homo sapiens
  misc_RNA (1)...(19): siRNA sense strand
aggaaacaaagcaggauga

SEQ ID NO: 2588340 - RNA, 19 nt, Homo sapiens
  misc_RNA (1)...(19): siRNA sense strand
agguuauucagcaaagaaa

SEQ ID NO: 2588341 - RNA, 19 nt, Homo sapiens
  misc_RNA (1)...(19): siRNA sense strand
ugagaagcaaggaaggauu

SEQ ID NO: 2588342 - RNA, 19 nt, Homo sapiens
  misc_RNA (1)...(19): siRNA sense strand
gguuauucagcaaagaaau

SEQ ID NO: 2588343 - RNA, 19 nt, Homo sapiens
  misc_RNA (1)...(19): siRNA sense strand
aggauauugucauuggaau

SEQ ID NO: 2588344 - RNA, 19 nt, Homo sapiens
  misc_RNA (1)...(19): siRNA sense strand
aaacaguggcacaacaaau

SEQ ID NO: 2588345 - RNA, 19 nt, Homo sapiens
  misc_RNA (1)...(19): siRNA sense strand
ugggagaacaauuuagaga

SEQ ID NO: 2588346 - RNA, 19 nt, Homo sapiens
  misc_RNA (1)...(19): siRNA sense strand
caagcaugcaucuggagaa

SEQ ID NO: 2588347 - RNA, 19 nt, Homo sapiens
  misc_RNA (1)...(19): siRNA sense strand
gccuuggacaugauggaaa

SEQ ID NO: 2588348 - RNA, 19 nt, Homo sapiens
  misc_RNA (1)...(19): siRNA sense strand
gggcuguaucuaagugaca

SEQ ID NO: 2588349 - RNA, 19 nt, Homo sapiens
  misc_RNA (1)...(19): siRNA sense strand
aggagagggcuguaucuaa

SEQ ID NO: 2588350 - RNA, 19 nt, Homo sapiens
  misc_RNA (1)...(19): siRNA sense strand
agguucaaguagaugguga

SEQ ID NO: 2588351 - RNA, 19 nt, Homo sapiens
  misc_RNA (1)...(19): siRNA sense strand
agaaaaugguacccaggaa

SEQ ID NO: 2588352 - RNA, 19 nt, Homo sapiens
  misc_RNA (1)...(19): siRNA sense strand
caguguccaugaagggcaa

SEQ ID NO: 2588353 - RNA, 19 nt, Homo sapiens
  misc_RNA (1)...(19): siRNA sense strand
auacaggaacagaggaaac

SEQ ID NO: 2588354 - RNA, 19 nt, Homo sapiens
  misc_RNA (1)...(19): siRNA sense strand
ucuuaugucuccagaaaau

SEQ ID NO: 2588355 - RNA, 19 nt, Homo sapiens
  misc_RNA (1)...(19): siRNA sense strand
acucagagagagaaggacu

SEQ ID NO: 2588356 - RNA, 19 nt, Homo sapiens
  misc_RNA (1)...(19): siRNA sense strand
ggaugaacugacugggacu

SEQ ID NO: 2588357 - RNA, 19 nt, Homo sapiens
  misc_RNA (1)...(19): siRNA sense strand
gccaaugagcugcggcaca

SEQ ID NO: 2588358 - RNA, 19 nt, Homo sapiens
  misc_RNA (1)...(19): siRNA sense strand
gacaaguauaugacaguga

SEQ ID NO: 2588359 - RNA, 19 nt, Homo sapiens
  misc_RNA (1)...(19): siRNA sense strand
agaaucugguuaugauaca

SEQ ID NO: 2588360 - RNA, 19 nt, Homo sapiens
  misc_RNA (1)...(19): siRNA sense strand
gggucaaaugaucuacuua

SEQ ID NO: 2588361 - RNA, 19 nt, Homo sapiens
  misc_RNA (1)...(19): siRNA sense strand
ggagaacaauuuagagagg

SEQ ID NO: 2588362 - RNA, 19 nt, Homo sapiens
  misc_RNA (1)...(19): siRNA sense strand
uaugacagugagugguuua

SEQ ID NO: 2588363 - RNA, 19 nt, Homo sapiens
  misc_RNA (1)...(19): siRNA sense strand
ccuaaugcuccaugcacaa

SEQ ID NO: 2588364 - RNA, 19 nt, Homo sapiens
  misc_RNA (1)...(19): siRNA sense strand
agcccaaagcugugcuaaa

SEQ ID NO: 2588365 - RNA, 19 nt, Homo sapiens
  misc_RNA (1)...(19): siRNA sense strand
ugcugaagauggagcccaa

SEQ ID NO: 2588366 - RNA, 19 nt, Homo sapiens
  misc_RNA (1)...(19): siRNA sense strand
aagacagacagcagaucua

SEQ ID NO: 2588367 - RNA, 19 nt, Homo sapiens
  misc_RNA (1)...(19): siRNA sense strand
aggagaagaggcuggacuu

SEQ ID NO: 2588368 - RNA, 19 nt, Homo sapiens
  misc_RNA (1)...(19): siRNA sense strand
gcuuuacggcucugggaga

SEQ ID NO: 2588369 - RNA, 19 nt, Homo sapiens
  misc_RNA (1)...(19): siRNA sense strand
ccagguauguggaggggau

SEQ ID NO: 2588370 - RNA, 19 nt, Homo sapiens
  misc_RNA (1)...(19): siRNA sense strand
gccuagaagacuuugauca

SEQ ID NO: 2588371 - RNA, 19 nt, Homo sapiens
  misc_RNA (1)...(19): siRNA sense strand
ggagacaaugcuuuggaca

SEQ ID NO: 2588372 - RNA, 19 nt, Homo sapiens
  misc_RNA (1)...(19): siRNA sense strand
ugaaagacagacagcagau

SEQ ID NO: 2588373 - RNA, 19 nt, Homo sapiens
  misc_RNA (1)...(19): siRNA sense strand
ggaauaaaccagaugccuu

SEQ ID NO: 2588374 - RNA, 19 nt, Homo sapiens
  misc_RNA (1)...(19): siRNA sense strand
uauuugagacaaugggaaa

SEQ ID NO: 2588375 - RNA, 19 nt, Homo sapiens
  misc_RNA (1)...(19): siRNA sense strand
cagugaaguuuuaggaaga

SEQ ID NO: 2588376 - RNA, 19 nt, Homo sapiens
  misc_RNA (1)...(19): siRNA sense strand
cuaccuuauuugagacaau

SEQ ID NO: 2588377 - RNA, 19 nt, Homo sapiens
  misc_RNA (1)...(19): siRNA sense strand
agaaaagggaagaagggaa

SEQ ID NO: 2588378 - RNA, 19 nt, Homo sapiens
  misc_RNA (1)...(19): siRNA sense strand
uggaugaauaugaagacaa

SEQ ID NO: 2588379 - RNA, 19 nt, Homo sapiens
  misc_RNA (1)...(19): siRNA sense strand
gauaugaagaagugggauc

SEQ ID NO: 2588380 - RNA, 19 nt, Homo sapiens
  misc_RNA (1)...(19): siRNA sense strand
ucaucaugcaacagguuaa

SEQ ID NO: 2588381 - RNA, 19 nt, Homo sapiens
  misc_RNA (1)...(19): siRNA sense strand
cuguguggcaacugugaua

SEQ ID NO: 2588382 - RNA, 19 nt, Homo sapiens
  misc_RNA (1)...(19): siRNA sense strand
acuuucauggagaggguaa

SEQ ID NO: 2588383 - RNA, 19 nt, Homo sapiens
  misc_RNA (1)...(19): siRNA sense strand
aggaaauggaggaguuugu

SEQ ID NO: 2588384 - RNA, 19 nt, Homo sapiens
  misc_RNA (1)...(19): siRNA sense strand
gcuacuuaacauacgguuu

SEQ ID NO: 2588385 - RNA, 19 nt, Homo sapiens
  misc_RNA (1)...(19): siRNA sense strand
uguggagauuugacgggaa

SEQ ID NO: 2588386 - RNA, 19 nt, Homo sapiens
  misc_RNA (1)...(19): siRNA sense strand
ccuucuaggucauccaaaa

SEQ ID NO: 2588387 - RNA, 19 nt, Homo sapiens
  misc_RNA (1)...(19): siRNA sense strand
ugaaaggcacaguggagga

SEQ ID NO: 2588388 - RNA, 19 nt, Homo sapiens
  misc_RNA (1)...(19): siRNA sense strand
cauccaaagaccagagcuu

SEQ ID NO: 2588389 - RNA, 19 nt, Homo sapiens
  misc_RNA (1)...(19): siRNA sense strand
ucaucaugcaacagauuaa

SEQ ID NO: 2588390 - RNA, 19 nt, Homo sapiens
  misc_RNA (1)...(19): siRNA sense strand
cuacguuaucugagacaau

SEQ ID NO: 2588391 - RNA, 19 nt, Homo sapiens
  misc_RNA (1)...(19): siRNA sense strand
aagaaagggccaacguaau

SEQ ID NO: 2588392 - RNA, 19 nt, Homo sapiens
  misc_RNA (1)...(19): siRNA sense strand
gcgccacaaaggagcuaaa

SEQ ID NO: 2588393 - RNA, 19 nt, Homo sapiens
  misc_RNA (1)...(19): siRNA sense strand
guagugagcugcuggcuga

SEQ ID NO: 2588394 - RNA, 19 nt, Homo sapiens
  misc_RNA (1)...(19): siRNA sense strand
caguaacaugacagaagaa

SEQ ID NO: 2588395 - RNA, 19 nt, Homo sapiens
  misc_RNA (1)...(19): siRNA sense strand
aaugcauugaagagaguaa

SEQ ID NO: 2588396 - RNA, 19 nt, Homo sapiens
  misc_RNA (1)...(19): siRNA sense strand
agccauuggaugaauauaa

SEQ ID NO: 2588397 - RNA, 19 nt, Homo sapiens
  misc_RNA (1)...(19): siRNA sense strand
gguucgaaauauuugacau

SEQ ID NO: 2588398 - RNA, 19 nt, Homo sapiens
  misc_RNA (1)...(19): siRNA sense strand
cuguguggcaacugugaua

SEQ ID NO: 2588399 - RNA, 19 nt, Homo sapiens
  misc_RNA (1)...(19): siRNA sense strand
acuuucauggagaggguaa

SEQ ID NO: 2588400 - RNA, 19 nt, Homo sapiens
  misc_RNA (1)...(19): siRNA sense strand
agaaaagcaaagaagggaa

SEQ ID NO: 2588401 - RNA, 19 nt, Homo sapiens
  misc_RNA (1)...(19): siRNA sense strand
gggucaauggucaguaaca

SEQ ID NO: 2588402 - RNA, 19 nt, Homo sapiens
  misc_RNA (1)...(19): siRNA sense strand
uguggagauuugaugggaa

SEQ ID NO: 2588403 - RNA, 19 nt, Homo sapiens
  misc_RNA (1)...(19): siRNA sense strand
aguacaagagucaagauuu

SEQ ID NO: 2588404 - RNA, 19 nt, Homo sapiens
  misc_RNA (1)...(19): siRNA sense strand
ugacagaagaaagggccaa

SEQ ID NO: 2588405 - RNA, 19 nt, Homo sapiens
  misc_RNA (1)...(19): siRNA sense strand
uggugugggcagcagaaua

SEQ ID NO: 2588406 - RNA, 19 nt, Homo sapiens
  misc_RNA (1)...(19): siRNA sense strand
gcuuauucagagaggucau

SEQ ID NO: 2588407 - RNA, 19 nt, Homo sapiens
  misc_RNA (1)...(19): siRNA sense strand
cuguuagaguggacuucaa

SEQ ID NO: 2588408 - RNA, 19 nt, Homo sapiens
  misc_RNA (1)...(19): siRNA sense strand
gagaguaauuaaugauccu

SEQ ID NO: 2588409 - RNA, 19 nt, Homo sapiens
  misc_RNA (1)...(19): siRNA sense strand
ugaaaagcauaguggagga

SEQ ID NO: 2588410 - RNA, 19 nt, Homo sapiens
  misc_RNA (1)...(19): siRNA sense strand
ugccuaaggaaauggaaga

SEQ ID NO: 2588411 - RNA, 19 nt, Homo sapiens
  misc_RNA (1)...(19): siRNA sense strand
caacagauuaagagauggu

SEQ ID NO: 2588412 - RNA, 19 nt, Homo sapiens
  misc_RNA (1)...(19): siRNA sense strand
gcaucuacgaggcaaucua

SEQ ID NO: 2588413 - RNA, 19 nt, Homo sapiens
  misc_RNA (1)...(19): siRNA sense strand
aaacaggaaagaagaagaa

SEQ ID NO: 2588414 - RNA, 19 nt, Homo sapiens
  misc_RNA (1)...(19): siRNA sense strand
ugaaacuacaagagucaaa

SEQ ID NO: 2588415 - RNA, 19 nt, Homo sapiens
  misc_RNA (1)...(19): siRNA sense strand
ugagaagaaugguggagga

SEQ ID NO: 2588416 - RNA, 19 nt, Homo sapiens
  misc_RNA (1)...(19): siRNA sense strand
ugucaaugccaguaaauca

SEQ ID NO: 2588417 - RNA, 19 nt, Homo sapiens
  misc_RNA (1)...(19): siRNA sense strand
acaggaaagaagaagaaaa

SEQ ID NO: 2588418 - RNA, 19 nt, Homo sapiens
  misc_RNA (1)...(19): siRNA sense strand
acaaaagguucuauggaga

SEQ ID NO: 2588419 - RNA, 19 nt, Homo sapiens
  misc_RNA (1)...(19): siRNA sense strand
caguaacaugucagaagaa

SEQ ID NO: 2588420 - RNA, 19 nt, Homo sapiens
  misc_RNA (1)...(19): siRNA sense strand
gcaucuaugaggcgaucua

SEQ ID NO: 2588421 - RNA, 19 nt, Homo sapiens
  misc_RNA (1)...(19): siRNA sense strand
cugcguggcaacugugaua

SEQ ID NO: 2588422 - RNA, 19 nt, Homo sapiens
  misc_RNA (1)...(19): siRNA sense strand
ccaaaacaggaaagaagaa

SEQ ID NO: 2588423 - RNA, 19 nt, Homo sapiens
  misc_RNA (1)...(19): siRNA sense strand
aagaauuguguugggaaua

SEQ ID NO: 2588424 - RNA, 19 nt, Homo sapiens
  misc_RNA (1)...(19): siRNA sense strand
guggugagcuacuggcuga

SEQ ID NO: 2588425 - RNA, 19 nt, Homo sapiens
  misc_RNA (1)...(19): siRNA sense strand
aggaaauggaagaguuugu

SEQ ID NO: 2588426 - RNA, 19 nt, Homo sapiens
  misc_RNA (1)...(19): siRNA sense strand
aauucucgauagauggaua

SEQ ID NO: 2588427 - RNA, 19 nt, Homo sapiens
  misc_RNA (1)...(19): siRNA sense strand
cauuaaugacccugucuau

SEQ ID NO: 2588428 - RNA, 19 nt, Homo sapiens
  misc_RNA (1)...(19): siRNA sense strand
agacaauccuggaagagcu

SEQ ID NO: 2588429 - RNA, 19 nt, Homo sapiens
  misc_RNA (1)...(19): siRNA sense strand
acuacaagagucaaaguuu

SEQ ID NO: 2588430 - RNA, 19 nt, Homo sapiens
  misc_RNA (1)...(19): siRNA sense strand
gagaagaaugguggaggau

SEQ ID NO: 2588431 - RNA, 19 nt, Homo sapiens
  misc_RNA (1)...(19): siRNA sense strand
cagaagaaagugccaacau

SEQ ID NO: 2588432 - RNA, 19 nt, Homo sapiens
  misc_RNA (1)...(19): siRNA sense strand
uauggagauuugauggcaa

SEQ ID NO: 2588433 - RNA, 19 nt, Homo sapiens
  misc_RNA (1)...(19): siRNA sense strand
caaguagagauuugcucaa

SEQ ID NO: 2588434 - RNA, 19 nt, Homo sapiens
  misc_RNA (1)...(19): siRNA sense strand
ugccuaaggaaauggaaga

SEQ ID NO: 2588435 - RNA, 19 nt, Homo sapiens
  misc_RNA (1)...(19): siRNA sense strand
gucagaauuaagugaucaa

SEQ ID NO: 2588436 - RNA, 19 nt, Homo sapiens
  misc_RNA (1)...(19): siRNA sense strand
uggaagaguuugugcagag

SEQ ID NO: 2588437 - RNA, 19 nt, Homo sapiens
  misc_RNA (1)...(19): siRNA sense strand
gggucgaugaucaguaaca

SEQ ID NO: 2588438 - RNA, 19 nt, Homo sapiens
  misc_RNA (1)...(19): siRNA sense strand
ggcugaacuauuuaacaua

SEQ ID NO: 2588439 - RNA, 19 nt, Homo sapiens
  misc_RNA (1)...(19): siRNA sense strand
cagccaaaccccugccuaa

SEQ ID NO: 2588440 - RNA, 19 nt, Homo sapiens
  misc_RNA (1)...(19): siRNA sense strand
gagaaaacuacaagaguca

SEQ ID NO: 2588441 - RNA, 19 nt, Homo sapiens
  misc_RNA (1)...(19): siRNA sense strand
aagaagaagaaaagggauu

SEQ ID NO: 2588442 - RNA, 19 nt, Homo sapiens
  misc_RNA (1)...(19): siRNA sense strand
ugagaagaaugguggagga

SEQ ID NO: 2588443 - RNA, 19 nt, Homo sapiens
  misc_RNA (1)...(19): siRNA sense strand
gcauaugaucugaagaagu

SEQ ID NO: 2588444 - RNA, 19 nt, Homo sapiens
  misc_RNA (1)...(19): siRNA sense strand
ugucaaugccaguaaauca

SEQ ID NO: 2588445 - RNA, 19 nt, Homo sapiens
  misc_RNA (1)...(19): siRNA sense strand
acaaaagguucuauggaga

SEQ ID NO: 2588446 - RNA, 19 nt, Homo sapiens
  misc_RNA (1)...(19): siRNA sense strand
caguaacaugucagaagaa

SEQ ID NO: 2588447 - RNA, 19 nt, Homo sapiens
  misc_RNA (1)...(19): siRNA sense strand
gcaucuaugaggcgaucua

SEQ ID NO: 2588448 - RNA, 19 nt, Homo sapiens
  misc_RNA (1)...(19): siRNA sense strand
gaaaacuacaagagucaaa

SEQ ID NO: 2588449 - RNA, 19 nt, Homo sapiens
  misc_RNA (1)...(19): siRNA sense strand
aagaauuguguugggaaua

SEQ ID NO: 2588450 - RNA, 19 nt, Homo sapiens
  misc_RNA (1)...(19): siRNA sense strand
uauaaagcucugugaagau

SEQ ID NO: 2588451 - RNA, 19 nt, Homo sapiens
  misc_RNA (1)...(19): siRNA sense strand
guggugagcugcuggcuga

SEQ ID NO: 2588452 - RNA, 19 nt, Homo sapiens
  misc_RNA (1)...(19): siRNA sense strand
aggaaauggaagaguuugu

SEQ ID NO: 2588453 - RNA, 19 nt, Homo sapiens
  misc_RNA (1)...(19): siRNA sense strand
agacaauccuggaagagcu

SEQ ID NO: 2588454 - RNA, 19 nt, Homo sapiens
  misc_RNA (1)...(19): siRNA sense strand
gagaagaaugguggaggau

SEQ ID NO: 2588455 - RNA, 19 nt, Homo sapiens
  misc_RNA (1)...(19): siRNA sense strand
cagaagaaagugccaacau

SEQ ID NO: 2588456 - RNA, 19 nt, Homo sapiens
  misc_RNA (1)...(19): siRNA sense strand
uauggagauuugauggcaa

SEQ ID NO: 2588457 - RNA, 19 nt, Homo sapiens
  misc_RNA (1)...(19): siRNA sense strand
caaguagagauuugcucaa

SEQ ID NO: 2588458 - RNA, 19 nt, Homo sapiens
  misc_RNA (1)...(19): siRNA sense strand
cccuaucuauaaagagaau

SEQ ID NO: 2588459 - RNA, 19 nt, Homo sapiens
  misc_RNA (1)...(19): siRNA sense strand
guggcaacuaugauauuua

SEQ ID NO: 2588460 - RNA, 19 nt, Homo sapiens
  misc_RNA (1)...(19): siRNA sense strand
ugccuaaggaaauggaaga

SEQ ID NO: 2588461 - RNA, 19 nt, Homo sapiens
  misc_RNA (1)...(19): siRNA sense strand
gucagaauuaagugaucaa

SEQ ID NO: 2588462 - RNA, 19 nt, Homo sapiens
  misc_RNA (1)...(19): siRNA sense strand
uggaagaguuugugcagag

SEQ ID NO: 2588463 - RNA, 19 nt, Homo sapiens
  misc_RNA (1)...(19): siRNA sense strand
gggucgaugaucaguaaca

SEQ ID NO: 2588464 - RNA, 19 nt, Homo sapiens
  misc_RNA (1)...(19): siRNA sense strand
ggcugaacuacuuaacaua

SEQ ID NO: 2588465 - RNA, 19 nt, Homo sapiens
  misc_RNA (1)...(19): siRNA sense strand
gagaagaaagcuauggcaa

SEQ ID NO: 2588466 - RNA, 19 nt, Homo sapiens
  misc_RNA (1)...(19): siRNA sense strand
cggaaaugcuuggggaaaa

SEQ ID NO: 2588467 - RNA, 19 nt, Homo sapiens
  misc_RNA (1)...(19): siRNA sense strand
gcuuauggcuaccggaaau

SEQ ID NO: 2588468 - RNA, 19 nt, Homo sapiens
  misc_RNA (1)...(19): siRNA sense strand
uguaagaagaggaaagacu

SEQ ID NO: 2588469 - RNA, 19 nt, Homo sapiens
  misc_RNA (1)...(19): siRNA sense strand
gacaaaaguuacaaggaga

SEQ ID NO: 2588470 - RNA, 19 nt, Homo sapiens
  misc_RNA (1)...(19): siRNA sense strand
gggcaaaaucccucagaca

SEQ ID NO: 2588471 - RNA, 19 nt, Homo sapiens
  misc_RNA (1)...(19): siRNA sense strand
cccugaauguucuggaaau

SEQ ID NO: 2588472 - RNA, 19 nt, Homo sapiens
  misc_RNA (1)...(19): siRNA sense strand
ccggaaaugcuuggggaaa

SEQ ID NO: 2588473 - RNA, 19 nt, Homo sapiens
  misc_RNA (1)...(19): siRNA sense strand
acaaaaguuacaaggagaa

SEQ ID NO: 2588474 - RNA, 19 nt, Homo sapiens
  misc_RNA (1)...(19): siRNA sense strand
aucaauggucucagaaauu

SEQ ID NO: 2588475 - RNA, 19 nt, Homo sapiens
  misc_RNA (1)...(19): siRNA sense strand
auuccagagaagaaagcua

SEQ ID NO: 2588476 - RNA, 19 nt, Homo sapiens
  misc_RNA (1)...(19): siRNA sense strand
cucaggaauuugaagccua

SEQ ID NO: 2588477 - RNA, 19 nt, Homo sapiens
  misc_RNA (1)...(19): siRNA sense strand
uggcaauugcugaugcuuu

SEQ ID NO: 2588478 - RNA, 19 nt, Homo sapiens
  misc_RNA (1)...(19): siRNA sense strand
gagaagaaagcuauggcaa

SEQ ID NO: 2588479 - RNA, 19 nt, Homo sapiens
  misc_RNA (1)...(19): siRNA sense strand
cggaaaugcuuggggaaaa

SEQ ID NO: 2588480 - RNA, 19 nt, Homo sapiens
  misc_RNA (1)...(19): siRNA sense strand
gcuuauggcuaccggaaau

SEQ ID NO: 2588481 - RNA, 19 nt, Homo sapiens
  misc_RNA (1)...(19): siRNA sense strand
uguaagaagaggaaagacu

SEQ ID NO: 2588482 - RNA, 19 nt, Homo sapiens
  misc_RNA (1)...(19): siRNA sense strand
gacaaaaguuacaaggaga

SEQ ID NO: 2588483 - RNA, 19 nt, Homo sapiens
  misc_RNA (1)...(19): siRNA sense strand
gggcaaaaucccucagaca

SEQ ID NO: 2588484 - RNA, 19 nt, Homo sapiens
  misc_RNA (1)...(19): siRNA sense strand
cccugaauguucuggaaau

SEQ ID NO: 2588485 - RNA, 19 nt, Homo sapiens
  misc_RNA (1)...(19): siRNA sense strand
ccggaaaugcuuggggaaa

SEQ ID NO: 2588486 - RNA, 19 nt, Homo sapiens
  misc_RNA (1)...(19): siRNA sense strand
acaaaaguuacaaggagaa

SEQ ID NO: 2588487 - RNA, 19 nt, Homo sapiens
  misc_RNA (1)...(19): siRNA sense strand
aucaauggucucagaaauu

SEQ ID NO: 2588488 - RNA, 19 nt, Homo sapiens
  misc_RNA (1)...(19): siRNA sense strand
auuccagagaagaaagcua

SEQ ID NO: 2588489 - RNA, 19 nt, Homo sapiens
  misc_RNA (1)...(19): siRNA sense strand
cucaggaauuugaagccua

SEQ ID NO: 2588490 - RNA, 19 nt, Homo sapiens
  misc_RNA (1)...(19): siRNA sense strand
uggcaauugcugaugcuuu

SEQ ID NO: 2588491 - RNA, 19 nt, Homo sapiens
  misc_RNA (1)...(19): siRNA sense strand
caagaaauccugugggcaa

SEQ ID NO: 2588492 - RNA, 19 nt, Homo sapiens
  misc_RNA (1)...(19): siRNA sense strand
cuacauuaucugagacaau

SEQ ID NO: 2588493 - RNA, 19 nt, Homo sapiens
  misc_RNA (1)...(19): siRNA sense strand
ggaauaaaccagaugccuu

SEQ ID NO: 2588494 - RNA, 19 nt, Homo sapiens
  misc_RNA (1)...(19): siRNA sense strand
cagugaaguuuuaggaaga

SEQ ID NO: 2588495 - RNA, 19 nt, Homo sapiens
  misc_RNA (1)...(19): siRNA sense strand
uggaugaauaugaagacaa

SEQ ID NO: 2588496 - RNA, 19 nt, Homo sapiens
  misc_RNA (1)...(19): siRNA sense strand
agaaaaggaaagaagggaa

SEQ ID NO: 2588497 - RNA, 19 nt, Homo sapiens
  misc_RNA (1)...(19): siRNA sense strand
aagaaagggccaacguaau

SEQ ID NO: 2588498 - RNA, 19 nt, Homo sapiens
  misc_RNA (1)...(19): siRNA sense strand
ucaucaugcaauugguuaa

SEQ ID NO: 2588499 - RNA, 19 nt, Homo sapiens
  misc_RNA (1)...(19): siRNA sense strand
uuggagauuugaugggaau

SEQ ID NO: 2588500 - RNA, 19 nt, Homo sapiens
  misc_RNA (1)...(19): siRNA sense strand
caguaacaugacagaagaa

SEQ ID NO: 2588501 - RNA, 19 nt, Homo sapiens
  misc_RNA (1)...(19): siRNA sense strand
gcgccacaaaggagccaaa

SEQ ID NO: 2588502 - RNA, 19 nt, Homo sapiens
  misc_RNA (1)...(19): siRNA sense strand
acuuucauggagaggguaa

SEQ ID NO: 2588503 - RNA, 19 nt, Homo sapiens
  misc_RNA (1)...(19): siRNA sense strand
guggugagcugcuggcuga

SEQ ID NO: 2588504 - RNA, 19 nt, Homo sapiens
  misc_RNA (1)...(19): siRNA sense strand
aggaaauggaggaguuugu

SEQ ID NO: 2588505 - RNA, 19 nt, Homo sapiens
  misc_RNA (1)...(19): siRNA sense strand
aaggcacaguggaggauuu

SEQ ID NO: 2588506 - RNA, 19 nt, Homo sapiens
  misc_RNA (1)...(19): siRNA sense strand
cguaauugcaacagcccuu

SEQ ID NO: 2588507 - RNA, 19 nt, Homo sapiens
  misc_RNA (1)...(19): siRNA sense strand
aaugaggaaagcugacaua

SEQ ID NO: 2588508 - RNA, 19 nt, Homo sapiens
  misc_RNA (1)...(19): siRNA sense strand
gggucaauggucaguaaca

SEQ ID NO: 2588509 - RNA, 19 nt, Homo sapiens
  misc_RNA (1)...(19): siRNA sense strand
ccuucuaggucauccaaaa

SEQ ID NO: 2588510 - RNA, 19 nt, Homo sapiens
  misc_RNA (1)...(19): siRNA sense strand
ugacagaagaaagggccaa

SEQ ID NO: 2588511 - RNA, 19 nt, Homo sapiens
  misc_RNA (1)...(19): siRNA sense strand
cuguuagaguggacuucaa

SEQ ID NO: 2588512 - RNA, 19 nt, Homo sapiens
  misc_RNA (1)...(19): siRNA sense strand
aagaaauccugugggcaau

SEQ ID NO: 2588513 - RNA, 19 nt, Homo sapiens
  misc_RNA (1)...(19): siRNA sense strand
ugaaaggcacaguggagga

SEQ ID NO: 2588514 - RNA, 19 nt, Homo sapiens
  misc_RNA (1)...(19): siRNA sense strand
aauaugaagaagugggauc

SEQ ID NO: 2588515 - RNA, 19 nt, Homo sapiens
  misc_RNA (1)...(19): siRNA sense strand
agagauugucagaaauuca

SEQ ID NO: 2588516 - RNA, 19 nt, Homo sapiens
  misc_RNA (1)...(19): siRNA sense strand
cgacuguacaaguggauac

SEQ ID NO: 2588517 - RNA, 19 nt, Homo sapiens
  misc_RNA (1)...(19): siRNA sense strand
ccaugaaggagguggacga

SEQ ID NO: 2588518 - RNA, 19 nt, Homo sapiens
  misc_RNA (1)...(19): siRNA sense strand
acaaugaggcugcugguaa

SEQ ID NO: 2588519 - RNA, 19 nt, Homo sapiens
  misc_RNA (1)...(19): siRNA sense strand
agggcgaggacgaggcuua

SEQ ID NO: 2588520 - RNA, 19 nt, Homo sapiens
  misc_RNA (1)...(19): siRNA sense strand
acacggugguggagcccua

SEQ ID NO: 2588521 - RNA, 19 nt, Homo sapiens
  misc_RNA (1)...(19): siRNA sense strand
ggaaggagucagagagcug

SEQ ID NO: 2588522 - RNA, 19 nt, Homo sapiens
  misc_RNA (1)...(19): siRNA sense strand
ccagaguggagccgggaau

SEQ ID NO: 2588523 - RNA, 19 nt, Homo sapiens
  misc_RNA (1)...(19): siRNA sense strand
ugaaggagguggacgagca

SEQ ID NO: 2588524 - RNA, 19 nt, Homo sapiens
  misc_RNA (1)...(19): siRNA sense strand
agagaaucaacguguacua

SEQ ID NO: 2588525 - RNA, 19 nt, Homo sapiens
  misc_RNA (1)...(19): siRNA sense strand
ugcucaacgugcagaacaa

SEQ ID NO: 2588526 - RNA, 19 nt, Homo sapiens
  misc_RNA (1)...(19): siRNA sense strand
gcuacuucguggaguggau

SEQ ID NO: 2588527 - RNA, 19 nt, Homo sapiens
  misc_RNA (1)...(19): siRNA sense strand
gugaggaaggagucagaga

SEQ ID NO: 2588528 - RNA, 19 nt, Homo sapiens
  misc_RNA (1)...(19): siRNA sense strand
cggugaacauggugcccuu

SEQ ID NO: 2588529 - RNA, 19 nt, Homo sapiens
  misc_RNA (1)...(19): siRNA sense strand
gugcagaacaagaacagca

SEQ ID NO: 2588530 - RNA, 19 nt, Homo sapiens
  misc_RNA (1)...(19): siRNA sense strand
gggaguucgaggaggagga

SEQ ID NO: 2588531 - RNA, 19 nt, Homo sapiens
  misc_RNA (1)...(19): siRNA sense strand
gugacugucuccagggcuu

SEQ ID NO: 2588532 - RNA, 19 nt, Homo sapiens
  misc_RNA (1)...(19): siRNA sense strand
gguggaaaacacagaugaa

SEQ ID NO: 2588533 - RNA, 19 nt, Homo sapiens
  misc_RNA (1)...(19): siRNA sense strand
caaugaggcugcugguaac

SEQ ID NO: 2588534 - RNA, 19 nt, Homo sapiens
  misc_RNA (1)...(19): siRNA sense strand
gaggaguugcugugguuua

SEQ ID NO: 2588535 - RNA, 19 nt, Homo sapiens
  misc_RNA (1)...(19): siRNA sense strand
ggggcagaauacagagaua

SEQ ID NO: 2588536 - RNA, 19 nt, Homo sapiens
  misc_RNA (1)...(19): siRNA sense strand
aaauucagcuucagcgaga

SEQ ID NO: 2588537 - RNA, 19 nt, Homo sapiens
  misc_RNA (1)...(19): siRNA sense strand
ccaacugcaaagagugauu

SEQ ID NO: 2588538 - RNA, 19 nt, Homo sapiens
  misc_RNA (1)...(19): siRNA sense strand
cguacaugauugcgcacau

SEQ ID NO: 2588539 - RNA, 19 nt, Homo sapiens
  misc_RNA (1)...(19): siRNA sense strand
cuuccaagggagugaaaau

SEQ ID NO: 2588540 - RNA, 19 nt, Homo sapiens
  misc_RNA (1)...(19): siRNA sense strand
ccacaaaugcuaaagagcu

SEQ ID NO: 2588541 - RNA, 19 nt, Homo sapiens
  misc_RNA (1)...(19): siRNA sense strand
cuuucaacaucgccagcua

SEQ ID NO: 2588542 - RNA, 19 nt, Homo sapiens
  misc_RNA (1)...(19): siRNA sense strand
ucuucgaaaaguugagaaa

SEQ ID NO: 2588543 - RNA, 19 nt, Homo sapiens
  misc_RNA (1)...(19): siRNA sense strand
uggaggaguugcugugguu

SEQ ID NO: 2588544 - RNA, 19 nt, Homo sapiens
  misc_RNA (1)...(19): siRNA sense strand
gcaaaugcuccgugggacu

SEQ ID NO: 2588545 - RNA, 19 nt, Homo sapiens
  misc_RNA (1)...(19): siRNA sense strand
gcgugaagaccucagggaa

SEQ ID NO: 2588546 - RNA, 19 nt, Homo sapiens
  misc_RNA (1)...(19): siRNA sense strand
gcacagacaccgugagcuc

SEQ ID NO: 2588547 - RNA, 19 nt, Homo sapiens
  misc_RNA (1)...(19): siRNA sense strand
gguacauggcacagaagca

SEQ ID NO: 2588548 - RNA, 19 nt, Homo sapiens
  misc_RNA (1)...(19): siRNA sense strand
cgugaagaccucagggaag

SEQ ID NO: 2588549 - RNA, 19 nt, Homo sapiens
  misc_RNA (1)...(19): siRNA sense strand
cgagaaggaccgugagcug

SEQ ID NO: 2588550 - RNA, 19 nt, Homo sapiens
  misc_RNA (1)...(19): siRNA sense strand
ggaagcaggaacuggccaa

SEQ ID NO: 2588551 - RNA, 19 nt, Homo sapiens
  misc_RNA (1)...(19): siRNA sense strand
gaacccaaccagacggaga

SEQ ID NO: 2588552 - RNA, 19 nt, Homo sapiens
  misc_RNA (1)...(19): siRNA sense strand
ugcuaaagguuaugggaaa

SEQ ID NO: 2588553 - RNA, 19 nt, Homo sapiens
  misc_RNA (1)...(19): siRNA sense strand
auucauugguggaaagaua

SEQ ID NO: 2588554 - RNA, 19 nt, Homo sapiens
  misc_RNA (1)...(19): siRNA sense strand
ccuccuaguucgugggaau

SEQ ID NO: 2588555 - RNA, 19 nt, Homo sapiens
  misc_RNA (1)...(19): siRNA sense strand
aggaaaucauugagccaua

SEQ ID NO: 2588556 - RNA, 19 nt, Homo sapiens
  misc_RNA (1)...(19): siRNA sense strand
ugaagaugauaaagagcaa

SEQ ID NO: 2588557 - RNA, 19 nt, Homo sapiens
  misc_RNA (1)...(19): siRNA sense strand
ggcuaaaggcagcgaggaa

SEQ ID NO: 2588558 - RNA, 19 nt, Homo sapiens
  misc_RNA (1)...(19): siRNA sense strand
ccgaauuauuggagccauu

SEQ ID NO: 2588559 - RNA, 19 nt, Homo sapiens
  misc_RNA (1)...(19): siRNA sense strand
cacacaaaguugaggaaga

SEQ ID NO: 2588560 - RNA, 19 nt, Homo sapiens
  misc_RNA (1)...(19): siRNA sense strand
ugucauggauuguggguca

SEQ ID NO: 2588561 - RNA, 19 nt, Homo sapiens
  misc_RNA (1)...(19): siRNA sense strand
ugguaguaaguguggaaua

SEQ ID NO: 2588562 - RNA, 19 nt, Homo sapiens
  misc_RNA (1)...(19): siRNA sense strand
gagcaaauaucucagguga

SEQ ID NO: 2588563 - RNA, 19 nt, Homo sapiens
  misc_RNA (1)...(19): siRNA sense strand
ugaacaacuuccagguaau

SEQ ID NO: 2588564 - RNA, 19 nt, Homo sapiens
  misc_RNA (1)...(19): siRNA sense strand
agacaagccaugaaagaga

SEQ ID NO: 2588565 - RNA, 19 nt, Homo sapiens
  misc_RNA (1)...(19): siRNA sense strand
uguaagaggaggaggagca

SEQ ID NO: 2588566 - RNA, 19 nt, Homo sapiens
  misc_RNA (1)...(19): siRNA sense strand
gaauggagugggaagcaaa

SEQ ID NO: 2588567 - RNA, 19 nt, Homo sapiens
  misc_RNA (1)...(19): siRNA sense strand
gcuaaagguuaugggaaaa

SEQ ID NO: 2588568 - RNA, 19 nt, Homo sapiens
  misc_RNA (1)...(19): siRNA sense strand
auaccaaaccaaagaaaga

SEQ ID NO: 2588569 - RNA, 19 nt, Homo sapiens
  misc_RNA (1)...(19): siRNA sense strand
gaguauggugucaggauuu

SEQ ID NO: 2588570 - RNA, 19 nt, Homo sapiens
  misc_RNA (1)...(19): siRNA sense strand
ccuauggccuaaugaacaa

SEQ ID NO: 2588571 - RNA, 19 nt, Homo sapiens
  misc_RNA (1)...(19): siRNA sense strand
aagaggaggaggagcauau

SEQ ID NO: 2588572 - RNA, 19 nt, Homo sapiens
  misc_RNA (1)...(19): siRNA sense strand
uaucaugguucuaggagau

SEQ ID NO: 2588573 - RNA, 19 nt, Homo sapiens
  misc_RNA (1)...(19): siRNA sense strand
cuauguaugugguuggauu

SEQ ID NO: 2588574 - RNA, 19 nt, Homo sapiens
  misc_RNA (1)...(19): siRNA sense strand
augcagaugacuugagaga

SEQ ID NO: 2588575 - RNA, 19 nt, Homo sapiens
  misc_RNA (1)...(19): siRNA sense strand
acauauggguccucgaaga

SEQ ID NO: 2588576 - RNA, 19 nt, Homo sapiens
  misc_RNA (1)...(19): siRNA sense strand
gaagaugaaccauggcgaa

SEQ ID NO: 2588577 - RNA, 19 nt, Homo sapiens
  misc_RNA (1)...(19): siRNA sense strand
uggcaagacugcaacucaa

SEQ ID NO: 2588578 - RNA, 19 nt, Homo sapiens
  misc_RNA (1)...(19): siRNA sense strand
gaguauucauugguggaaa

SEQ ID NO: 2588579 - RNA, 19 nt, Homo sapiens
  misc_RNA (1)...(19): siRNA sense strand
cuggagagcaagaagccaa

SEQ ID NO: 2588580 - RNA, 19 nt, Homo sapiens
  misc_RNA (1)...(19): siRNA sense strand
aauauggaguagugguuau

SEQ ID NO: 2588581 - RNA, 19 nt, Homo sapiens
  misc_RNA (1)...(19): siRNA sense strand
gauaaacagaauagaccau

SEQ ID NO: 2588582 - RNA, 19 nt, Homo sapiens
  misc_RNA (1)...(19): siRNA sense strand
gaccaugaccggagagcga

SEQ ID NO: 2588583 - RNA, 19 nt, Homo sapiens
  misc_RNA (1)...(19): siRNA sense strand
agauaaugagcuugaacuu

SEQ ID NO: 2588584 - RNA, 19 nt, Homo sapiens
  misc_RNA (1)...(19): siRNA sense strand
gguaaugaguaugguguca

SEQ ID NO: 2588585 - RNA, 19 nt, Homo sapiens
  misc_RNA (1)...(19): siRNA sense strand
gacuguaagaucagaguau

SEQ ID NO: 2588586 - RNA, 19 nt, Homo sapiens
  misc_RNA (1)...(19): siRNA sense strand
gaggauggcaagacugcaa

SEQ ID NO: 2588587 - RNA, 19 nt, Homo sapiens
  misc_RNA (1)...(19): siRNA sense strand
gguggaaagauaaacagaa

SEQ ID NO: 2588588 - RNA, 19 nt, Homo sapiens
  misc_RNA (1)...(19): siRNA sense strand
cggauagacuuuucugaua

SEQ ID NO: 2588589 - RNA, 19 nt, Homo sapiens
  misc_RNA (1)...(19): siRNA sense strand
cuuuauaagaccaagacau

SEQ ID NO: 2588590 - RNA, 19 nt, Homo sapiens
  misc_RNA (1)...(19): siRNA sense strand
uauucuggcuggagcaaau

SEQ ID NO: 2588591 - RNA, 19 nt, Homo sapiens
  misc_RNA (1)...(19): siRNA sense strand
agccauacccaaaggaaca

SEQ ID NO: 2588592 - RNA, 19 nt, Homo sapiens
  misc_RNA (1)...(19): siRNA sense strand
agaaaguacuccaaccaga

SEQ ID NO: 2588593 - RNA, 19 nt, Homo sapiens
  misc_RNA (1)...(19): siRNA sense strand
ucaugaugcuuuugacaua

SEQ ID NO: 2588594 - RNA, 19 nt, Homo sapiens
  misc_RNA (1)...(19): siRNA sense strand
gcauaguaauguucgucau

SEQ ID NO: 2588595 - RNA, 19 nt, Homo sapiens
  misc_RNA (1)...(19): siRNA sense strand
aagucuagggccagaauuu

SEQ ID NO: 2588596 - RNA, 19 nt, Homo sapiens
  misc_RNA (1)...(19): siRNA sense strand
agauguuugcuaaagguua

SEQ ID NO: 2588597 - RNA, 19 nt, Homo sapiens
  misc_RNA (1)...(19): siRNA sense strand
gggcuguauauuuauguua

SEQ ID NO: 2588598 - RNA, 19 nt, Homo sapiens
  misc_RNA (1)...(19): siRNA sense strand
uugaggaagaggauggcaa

SEQ ID NO: 2588599 - RNA, 19 nt, Homo sapiens
  misc_RNA (1)...(19): siRNA sense strand
uuacguaggaauugcagua

SEQ ID NO: 2588600 - RNA, 19 nt, Homo sapiens
  misc_RNA (1)...(19): siRNA sense strand
acuuccagguaaugaguau

SEQ ID NO: 2588601 - RNA, 19 nt, Homo sapiens
  misc_RNA (1)...(19): siRNA sense strand
uaaaagaaggucuggauau

SEQ ID NO: 2588602 - RNA, 19 nt, Homo sapiens
  misc_RNA (1)...(19): siRNA sense strand
cguaggaauugcaguaucu

SEQ ID NO: 2588603 - RNA, 19 nt, Homo sapiens
  misc_RNA (1)...(19): siRNA sense strand
ccuagugagugcucccaaa

SEQ ID NO: 2588604 - RNA, 19 nt, Homo sapiens
  misc_RNA (1)...(19): siRNA sense strand
aaugaaagaagaugaacca

SEQ ID NO: 2588605 - RNA, 19 nt, Homo sapiens
  misc_RNA (1)...(19): siRNA sense strand
ucuaucaguccuuguaaua

SEQ ID NO: 2588606 - RNA, 19 nt, Homo sapiens
  misc_RNA (1)...(19): siRNA sense strand
caauaccaaaccaaagaaa

SEQ ID NO: 2588607 - RNA, 19 nt, Homo sapiens
  misc_RNA (1)...(19): siRNA sense strand
ggucacguauacugcagaa

SEQ ID NO: 2588608 - RNA, 19 nt, Homo sapiens
  misc_RNA (1)...(19): siRNA sense strand
ccgugguggaguugcuuaa

SEQ ID NO: 2588609 - RNA, 19 nt, Homo sapiens
  misc_RNA (1)...(19): siRNA sense strand
gcaagaagccaaaaggguu

SEQ ID NO: 2588610 - RNA, 19 nt, Homo sapiens
  misc_RNA (1)...(19): siRNA sense strand
ggauagacuuuucugauau

SEQ ID NO: 2588611 - RNA, 19 nt, Homo sapiens
  misc_RNA (1)...(19): siRNA sense strand
uuuaaauguagcugaccaa

SEQ ID NO: 2588612 - RNA, 19 nt, Homo sapiens
  misc_RNA (1)...(19): siRNA sense strand
ugaggauggcuuugcaaau

SEQ ID NO: 2588613 - RNA, 19 nt, Homo sapiens
  misc_RNA (1)...(19): siRNA sense strand
caauagcaacuaauggauu

SEQ ID NO: 2588614 - RNA, 19 nt, Homo sapiens
  misc_RNA (1)...(19): siRNA sense strand
gguuauucgccuaaaagaa

SEQ ID NO: 2588615 - RNA, 19 nt, Homo sapiens
  misc_RNA (1)...(19): siRNA sense strand
cuuaagaguaccugaaacu

SEQ ID NO: 2588616 - RNA, 19 nt, Homo sapiens
  misc_RNA (1)...(19): siRNA sense strand
ugaaggaugagaagcggaa

SEQ ID NO: 2588617 - RNA, 19 nt, Homo sapiens
  misc_RNA (1)...(19): siRNA sense strand
agcggaagcuggagcguga

SEQ ID NO: 2588618 - RNA, 19 nt, Homo sapiens
  misc_RNA (1)...(19): siRNA sense strand
aggugauugaacagagcua

SEQ ID NO: 2588619 - RNA, 19 nt, Homo sapiens
  misc_RNA (1)...(19): siRNA sense strand
auuuagggccagaugagaa

SEQ ID NO: 2588620 - RNA, 19 nt, Homo sapiens
  misc_RNA (1)...(19): siRNA sense strand
gugauugaacagagcuaca

SEQ ID NO: 2588621 - RNA, 19 nt, Homo sapiens
  misc_RNA (1)...(19): siRNA sense strand
uuuuagagcaggaggugaa

SEQ ID NO: 2588622 - RNA, 19 nt, Homo sapiens
  misc_RNA (1)...(19): siRNA sense strand
gagagaagaucaaagccaa

SEQ ID NO: 2588623 - RNA, 19 nt, Homo sapiens
  misc_RNA (1)...(19): siRNA sense strand
gggaacagagauugagaca

SEQ ID NO: 2588624 - RNA, 19 nt, Homo sapiens
  misc_RNA (1)...(19): siRNA sense strand
agagaagaucaaagccaaa

SEQ ID NO: 2588625 - RNA, 19 nt, Homo sapiens
  misc_RNA (1)...(19): siRNA sense strand
auucaugcuuccagacaaa

SEQ ID NO: 2588626 - RNA, 19 nt, Homo sapiens
  misc_RNA (1)...(19): siRNA sense strand
gaacagagauugagacagc

SEQ ID NO: 2588627 - RNA, 19 nt, Homo sapiens
  misc_RNA (1)...(19): siRNA sense strand
ggagagaagaucaaagcca

SEQ ID NO: 2588628 - RNA, 19 nt, Homo sapiens
  misc_RNA (1)...(19): siRNA sense strand
agaugugggaacagagauu

SEQ ID NO: 2588629 - RNA, 19 nt, Homo sapiens
  misc_RNA (1)...(19): siRNA sense strand
augcaugggaauugcuaua

SEQ ID NO: 2588630 - RNA, 19 nt, Homo sapiens
  misc_RNA (1)...(19): siRNA sense strand
aagccaaaaucaagaagaa

SEQ ID NO: 2588631 - RNA, 19 nt, Homo sapiens
  misc_RNA (1)...(19): siRNA sense strand
acuccgucucagagggaaa

SEQ ID NO: 2588632 - RNA, 19 nt, Homo sapiens
  misc_RNA (1)...(19): siRNA sense strand
agaaaaucaacaugagcua

SEQ ID NO: 2588633 - RNA, 19 nt, Homo sapiens
  misc_RNA (1)...(19): siRNA sense strand
gacaaagaugguggagaaa

SEQ ID NO: 2588634 - RNA, 19 nt, Homo sapiens
  misc_RNA (1)...(19): siRNA sense strand
ucacagggaggaagcggaa

SEQ ID NO: 2588635 - RNA, 19 nt, Homo sapiens
  misc_RNA (1)...(19): siRNA sense strand
acagagauugagacagcaa

SEQ ID NO: 2588636 - RNA, 19 nt, Homo sapiens
  misc_RNA (1)...(19): siRNA sense strand
cauucaugcuuccagacaa

SEQ ID NO: 2588637 - RNA, 19 nt, Homo sapiens
  misc_RNA (1)...(19): siRNA sense strand
ccacuggagcuaaggugau

SEQ ID NO: 2588638 - RNA, 19 nt, Homo sapiens
  misc_RNA (1)...(19): siRNA sense strand
gaggagaaggaaugagaua

SEQ ID NO: 2588639 - RNA, 19 nt, Homo sapiens
  misc_RNA (1)...(19): siRNA sense strand
cauccaaguuauuaggaaa

SEQ ID NO: 2588640 - RNA, 19 nt, Homo sapiens
  misc_RNA (1)...(19): siRNA sense strand
gcaaaagacaacuggaaaa

SEQ ID NO: 2588641 - RNA, 19 nt, Homo sapiens
  misc_RNA (1)...(19): siRNA sense strand
ggagaaggaaugagauaca

SEQ ID NO: 2588642 - RNA, 19 nt, Homo sapiens
  misc_RNA (1)...(19): siRNA sense strand
agaugaaguuugaugguuu

SEQ ID NO: 2588643 - RNA, 19 nt, Homo sapiens
  misc_RNA (1)...(19): siRNA sense strand
uggagaaacuaaagauaca

SEQ ID NO: 2588644 - RNA, 19 nt, Homo sapiens
  misc_RNA (1)...(19): siRNA sense strand
ccaacuaaauacugcaaau

SEQ ID NO: 2588645 - RNA, 19 nt, Homo sapiens
  misc_RNA (1)...(19): siRNA sense strand
ugacaaaauaagaggagaa

SEQ ID NO: 2588646 - RNA, 19 nt, Homo sapiens
  misc_RNA (1)...(19): siRNA sense strand
ggauuacauuucagaacaa

SEQ ID NO: 2588647 - RNA, 19 nt, Homo sapiens
  misc_RNA (1)...(19): siRNA sense strand
gggaugauggagagaguau

SEQ ID NO: 2588648 - RNA, 19 nt, Homo sapiens
  misc_RNA (1)...(19): siRNA sense strand
guucaagacaugacaacaa

SEQ ID NO: 2588649 - RNA, 19 nt, Homo sapiens
  misc_RNA (1)...(19): siRNA sense strand
ccaacuaagucgcuggaau

SEQ ID NO: 2588650 - RNA, 19 nt, Homo sapiens
  misc_RNA (1)...(19): siRNA sense strand
gggaauuugugcacagaga

SEQ ID NO: 2588651 - RNA, 19 nt, Homo sapiens
  misc_RNA (1)...(19): siRNA sense strand
agauaaaacucuaacggaa

SEQ ID NO: 2588652 - RNA, 19 nt, Homo sapiens
  misc_RNA (1)...(19): siRNA sense strand
cuagaagaaccaauagaaa

SEQ ID NO: 2588653 - RNA, 19 nt, Homo sapiens
  misc_RNA (1)...(19): siRNA sense strand
ccauacaggcaaagauauu

SEQ ID NO: 2588654 - RNA, 19 nt, Homo sapiens
  misc_RNA (1)...(19): siRNA sense strand
gaaagaagugguaaggaga

SEQ ID NO: 2588655 - RNA, 19 nt, Homo sapiens
  misc_RNA (1)...(19): siRNA sense strand
aagaagugguaaggagaaa

SEQ ID NO: 2588656 - RNA, 19 nt, Homo sapiens
  misc_RNA (1)...(19): siRNA sense strand
ccauaauucugacggauau

SEQ ID NO: 2588657 - RNA, 19 nt, Homo sapiens
  misc_RNA (1)...(19): siRNA sense strand
acggagaagcaguggaaga

SEQ ID NO: 2588658 - RNA, 19 nt, Homo sapiens
  misc_RNA (1)...(19): siRNA sense strand
ugcaaauacuagaagacaa

SEQ ID NO: 2588659 - RNA, 19 nt, Homo sapiens
  misc_RNA (1)...(19): siRNA sense strand
gaguggugggccagagaaa

SEQ ID NO: 2588660 - RNA, 19 nt, Homo sapiens
  misc_RNA (1)...(19): siRNA sense strand
augcagaaaugacgaacua

SEQ ID NO: 2588661 - RNA, 19 nt, Homo sapiens
  misc_RNA (1)...(19): siRNA sense strand
caaaauaagaggagaagga

SEQ ID NO: 2588662 - RNA, 19 nt, Homo sapiens
  misc_RNA (1)...(19): siRNA sense strand
aaauaagaggagaaggaau

SEQ ID NO: 2588663 - RNA, 19 nt, Homo sapiens
  misc_RNA (1)...(19): siRNA sense strand
ccaacuuccuggugauaau

SEQ ID NO: 2588664 - RNA, 19 nt, Homo sapiens
  misc_RNA (1)...(19): siRNA sense strand
ccuaauaagagaagcuuca

SEQ ID NO: 2588665 - RNA, 19 nt, Homo sapiens
  misc_RNA (1)...(19): siRNA sense strand
ggcugaaaccacagaagaa

SEQ ID NO: 2588666 - RNA, 19 nt, Homo sapiens
  misc_RNA (1)...(19): siRNA sense strand
guuaaaugauccugucaau

SEQ ID NO: 2588667 - RNA, 19 nt, Homo sapiens
  misc_RNA (1)...(19): siRNA sense strand
aggagauacaccagaacaa

SEQ ID NO: 2588668 - RNA, 19 nt, Homo sapiens
  misc_RNA (1)...(19): siRNA sense strand
agacaguguuacagaaguu

SEQ ID NO: 2588669 - RNA, 19 nt, Homo sapiens
  misc_RNA (1)...(19): siRNA sense strand
uggagaaacaguagcaaga

SEQ ID NO: 2588670 - RNA, 19 nt, Homo sapiens
  misc_RNA (1)...(19): siRNA sense strand
ggaaaugaaacaaagacuu

SEQ ID NO: 2588671 - RNA, 19 nt, Homo sapiens
  misc_RNA (1)...(19): siRNA sense strand
gggaugauggagaaacuaa

SEQ ID NO: 2588672 - RNA, 19 nt, Homo sapiens
  misc_RNA (1)...(19): siRNA sense strand
gcauggaagcugagcagau

SEQ ID NO: 2588673 - RNA, 19 nt, Homo sapiens
  misc_RNA (1)...(19): siRNA sense strand
cgacggagaagcaguggaa

SEQ ID NO: 2588674 - RNA, 19 nt, Homo sapiens
  misc_RNA (1)...(19): siRNA sense strand
acauggaagacaagaaaga

SEQ ID NO: 2588675 - RNA, 19 nt, Homo sapiens
  misc_RNA (1)...(19): siRNA sense strand
ccguacaguuggagggauc

SEQ ID NO: 2588676 - RNA, 19 nt, Homo sapiens
  misc_RNA (1)...(19): siRNA sense strand
gggaauuauaugacgcuau

SEQ ID NO: 2588677 - RNA, 19 nt, Homo sapiens
  misc_RNA (1)...(19): siRNA sense strand
cggaagaugaagcuguuaa

SEQ ID NO: 2588678 - RNA, 19 nt, Homo sapiens
  misc_RNA (1)...(19): siRNA sense strand
gguuauaacguucaagaca

SEQ ID NO: 2588679 - RNA, 19 nt, Homo sapiens
  misc_RNA (1)...(19): siRNA sense strand
cuacauggaagacaagaaa

SEQ ID NO: 2588680 - RNA, 19 nt, Homo sapiens
  misc_RNA (1)...(19): siRNA sense strand
ggaugauggagaaacuaaa

SEQ ID NO: 2588681 - RNA, 19 nt, Homo sapiens
  misc_RNA (1)...(19): siRNA sense strand
gauggagaaacuaaagaua

SEQ ID NO: 2588682 - RNA, 19 nt, Homo sapiens
  misc_RNA (1)...(19): siRNA sense strand
gggauauauucaagcaguu

SEQ ID NO: 2588683 - RNA, 19 nt, Homo sapiens
  misc_RNA (1)...(19): siRNA sense strand
gcucauugguuaggagaca

SEQ ID NO: 2588684 - RNA, 19 nt, Homo sapiens
  misc_RNA (1)...(19): siRNA sense strand
guucaguuuguuuggaaua

SEQ ID NO: 2588685 - RNA, 19 nt, Homo sapiens
  misc_RNA (1)...(19): siRNA sense strand
cuucagagguucgggaauu

SEQ ID NO: 2588686 - RNA, 19 nt, Homo sapiens
  misc_RNA (1)...(19): siRNA sense strand
gaguugaagccaaauuaaa

SEQ ID NO: 2588687 - RNA, 19 nt, Homo sapiens
  misc_RNA (1)...(19): siRNA sense strand
gaaugaaacuuuugcugaa

SEQ ID NO: 2588688 - RNA, 19 nt, Homo sapiens
  misc_RNA (1)...(19): siRNA sense strand
uuaugguauuggagaacaa

SEQ ID NO: 2588689 - RNA, 19 nt, Homo sapiens
  misc_RNA (1)...(19): siRNA sense strand
uggcauaccauuugauaca

SEQ ID NO: 2588690 - RNA, 19 nt, Homo sapiens
  misc_RNA (1)...(19): siRNA sense strand
ccagauuucuucaggacuu

SEQ ID NO: 2588691 - RNA, 19 nt, Homo sapiens
  misc_RNA (1)...(19): siRNA sense strand
cgagaucugaacuggaaua

SEQ ID NO: 2588692 - RNA, 19 nt, Homo sapiens
  misc_RNA (1)...(19): siRNA sense strand
cuuauugggcuuugggauu

SEQ ID NO: 2588693 - RNA, 19 nt, Homo sapiens
  misc_RNA (1)...(19): siRNA sense strand
gauucuuagugauggaaca

SEQ ID NO: 2588694 - RNA, 19 nt, Homo sapiens
  misc_RNA (1)...(19): siRNA sense strand
guuauaacguucaagacau

SEQ ID NO: 2588695 - RNA, 19 nt, Homo sapiens
  misc_RNA (1)...(19): siRNA sense strand
agaagaacuuugcagaaga

SEQ ID NO: 2588696 - RNA, 19 nt, Homo sapiens
  misc_RNA (1)...(19): siRNA sense strand
cguuauggauaugcaaaua

SEQ ID NO: 2588697 - RNA, 19 nt, Homo sapiens
  misc_RNA (1)...(19): siRNA sense strand
gcucauuguugcugcagau

SEQ ID NO: 2588698 - RNA, 19 nt, Homo sapiens
  misc_RNA (1)...(19): siRNA sense strand
gcccauguguuuggagaaa

SEQ ID NO: 2588699 - RNA, 19 nt, Homo sapiens
  misc_RNA (1)...(19): siRNA sense strand
cuuuaguguucaauggaau

SEQ ID NO: 2588700 - RNA, 19 nt, Homo sapiens
  misc_RNA (1)...(19): siRNA sense strand
auguggaaaucaaggaaaa

SEQ ID NO: 2588701 - RNA, 19 nt, Homo sapiens
  misc_RNA (1)...(19): siRNA sense strand
acucuaacguauaacggaa

SEQ ID NO: 2588702 - RNA, 19 nt, Homo sapiens
  misc_RNA (1)...(19): siRNA sense strand
agagguauggccaggauua

SEQ ID NO: 2588703 - RNA, 19 nt, Homo sapiens
  misc_RNA (1)...(19): siRNA sense strand
ggguugacagacaguguua

SEQ ID NO: 2588704 - RNA, 19 nt, Homo sapiens
  misc_RNA (1)...(19): siRNA sense strand
acugcaaaugccagaauaa

SEQ ID NO: 2588705 - RNA, 19 nt, Homo sapiens
  misc_RNA (1)...(19): siRNA sense strand
cauccagauucgacggaga

SEQ ID NO: 2588706 - RNA, 19 nt, Homo sapiens
  misc_RNA (1)...(19): siRNA sense strand
uggaacaacuacuaaucaa

SEQ ID NO: 2588707 - RNA, 19 nt, Homo sapiens
  misc_RNA (1)...(19): siRNA sense strand
cagaaaugacgaacuaaau

SEQ ID NO: 2588708 - RNA, 19 nt, Homo sapiens
  misc_RNA (1)...(19): siRNA sense strand
cgucagaggacaauuucaa

SEQ ID NO: 2588709 - RNA, 19 nt, Homo sapiens
  misc_RNA (1)...(19): siRNA sense strand
caauacugcuucaugggaa

SEQ ID NO: 2588710 - RNA, 19 nt, Homo sapiens
  misc_RNA (1)...(19): siRNA sense strand
acagaagaacuuugcagaa

SEQ ID NO: 2588711 - RNA, 19 nt, Homo sapiens
  misc_RNA (1)...(19): siRNA sense strand
ggaugaaguacgagauaua

SEQ ID NO: 2588712 - RNA, 19 nt, Homo sapiens
  misc_RNA (1)...(19): siRNA sense strand
agacagaaucagugaauua

SEQ ID NO: 2588713 - RNA, 19 nt, Homo sapiens
  misc_RNA (1)...(19): siRNA sense strand
uggaagaaaucguggaauu

SEQ ID NO: 2588714 - RNA, 19 nt, Homo sapiens
  misc_RNA (1)...(19): siRNA sense strand
agacaaacauggaagaaau

SEQ ID NO: 2588715 - RNA, 19 nt, Homo sapiens
  misc_RNA (1)...(19): siRNA sense strand
ggagaaaucagaagggcaa

SEQ ID NO: 2588716 - RNA, 19 nt, Homo sapiens
  misc_RNA (1)...(19): siRNA sense strand
ugacagagcaggaggaauu

SEQ ID NO: 2588717 - RNA, 19 nt, Homo sapiens
  misc_RNA (1)...(19): siRNA sense strand
guuaauacaaacagggaua

SEQ ID NO: 2588718 - RNA, 19 nt, Homo sapiens
  misc_RNA (1)...(19): siRNA sense strand
auuaaaggccagugggaua

SEQ ID NO: 2588719 - RNA, 19 nt, Homo sapiens
  misc_RNA (1)...(19): siRNA sense strand
agaagaaauucgugaccaa

SEQ ID NO: 2588720 - RNA, 19 nt, Homo sapiens
  misc_RNA (1)...(19): siRNA sense strand
cagcagaggcaaaggagaa

SEQ ID NO: 2588721 - RNA, 19 nt, Homo sapiens
  misc_RNA (1)...(19): siRNA sense strand
gagaaugggcaaagaagaa

SEQ ID NO: 2588722 - RNA, 19 nt, Homo sapiens
  misc_RNA (1)...(19): siRNA sense strand
caguugaaggagagagaua

SEQ ID NO: 2588723 - RNA, 19 nt, Homo sapiens
  misc_RNA (1)...(19): siRNA sense strand
ggauggaaacagugauuua

SEQ ID NO: 2588724 - RNA, 19 nt, Homo sapiens
  misc_RNA (1)...(19): siRNA sense strand
gggaggagggagagaggaa

SEQ ID NO: 2588725 - RNA, 19 nt, Homo sapiens
  misc_RNA (1)...(19): siRNA sense strand
acucauggacaaagagaaa

SEQ ID NO: 2588726 - RNA, 19 nt, Homo sapiens
  misc_RNA (1)...(19): siRNA sense strand
ccaaggaagacaagggcaa

SEQ ID NO: 2588727 - RNA, 19 nt, Homo sapiens
  misc_RNA (1)...(19): siRNA sense strand
agaagaagccaaagaaaga

SEQ ID NO: 2588728 - RNA, 19 nt, Homo sapiens
  misc_RNA (1)...(19): siRNA sense strand
cguaaagaacagaagaaau

SEQ ID NO: 2588729 - RNA, 19 nt, Homo sapiens
  misc_RNA (1)...(19): siRNA sense strand
gggagaguguggaggaaaa

SEQ ID NO: 2588730 - RNA, 19 nt, Homo sapiens
  misc_RNA (1)...(19): siRNA sense strand
gaagaaagcgagaaggaga

SEQ ID NO: 2588731 - RNA, 19 nt, Homo sapiens
  misc_RNA (1)...(19): siRNA sense strand
aggcaaaagaagaagaaaa

SEQ ID NO: 2588732 - RNA, 19 nt, Homo sapiens
  misc_RNA (1)...(19): siRNA sense strand
cguauuaaccguuggcuua

SEQ ID NO: 2588733 - RNA, 19 nt, Homo sapiens
  misc_RNA (1)...(19): siRNA sense strand
aagaagacauggagaccaa

SEQ ID NO: 2588734 - RNA, 19 nt, Homo sapiens
  misc_RNA (1)...(19): siRNA sense strand
agagaaagcugauguaaaa

SEQ ID NO: 2588735 - RNA, 19 nt, Homo sapiens
  misc_RNA (1)...(19): siRNA sense strand
uggagaaacucauggaaga

SEQ ID NO: 2588736 - RNA, 19 nt, Homo sapiens
  misc_RNA (1)...(19): siRNA sense strand
ggaagaaaaugaagcgcaa

SEQ ID NO: 2588737 - RNA, 19 nt, Homo sapiens
  misc_RNA (1)...(19): siRNA sense strand
gcaggagagucuuggaaau

SEQ ID NO: 2588738 - RNA, 19 nt, Homo sapiens
  misc_RNA (1)...(19): siRNA sense strand
gggcaaggacgcaacaaua

SEQ ID NO: 2588739 - RNA, 19 nt, Homo sapiens
  misc_RNA (1)...(19): siRNA sense strand
gagaggagaaggugggaau

SEQ ID NO: 2588740 - RNA, 19 nt, Homo sapiens
  misc_RNA (1)...(19): siRNA sense strand
gcgcaaaggagaucgguau

SEQ ID NO: 2588741 - RNA, 19 nt, Homo sapiens
  misc_RNA (1)...(19): siRNA sense strand
uggaagauguaucaagaaa

SEQ ID NO: 2588742 - RNA, 19 nt, Homo sapiens
  misc_RNA (1)...(19): siRNA sense strand
ugacgauggugaagaggaa

SEQ ID NO: 2588743 - RNA, 19 nt, Homo sapiens
  misc_RNA (1)...(19): siRNA sense strand
aagaggaagugaagaguuu

SEQ ID NO: 2588744 - RNA, 19 nt, Homo sapiens
  misc_RNA (1)...(19): siRNA sense strand
gggauagacucguaaucaa

SEQ ID NO: 2588745 - RNA, 19 nt, Homo sapiens
  misc_RNA (1)...(19): siRNA sense strand
gggcaaagaagaagagaag

SEQ ID NO: 2588746 - RNA, 19 nt, Homo sapiens
  misc_RNA (1)...(19): siRNA sense strand
ggaugagguuagaggagau

SEQ ID NO: 2588747 - RNA, 19 nt, Homo sapiens
  misc_RNA (1)...(19): siRNA sense strand
uaugaaagaugcuggaaau

SEQ ID NO: 2588748 - RNA, 19 nt, Homo sapiens
  misc_RNA (1)...(19): siRNA sense strand
cggaauuucuccaaagcua

SEQ ID NO: 2588749 - RNA, 19 nt, Homo sapiens
  misc_RNA (1)...(19): siRNA sense strand
ugaaagauacugaggauga

SEQ ID NO: 2588750 - RNA, 19 nt, Homo sapiens
  misc_RNA (1)...(19): siRNA sense strand
aagagaaagcugauguaaa

SEQ ID NO: 2588751 - RNA, 19 nt, Homo sapiens
  misc_RNA (1)...(19): siRNA sense strand
cgggauuauucaagaguga

SEQ ID NO: 2588752 - RNA, 19 nt, Homo sapiens
  misc_RNA (1)...(19): siRNA sense strand
ccucaagaacagaucaaua

SEQ ID NO: 2588753 - RNA, 19 nt, Homo sapiens
  misc_RNA (1)...(19): siRNA sense strand
caaaugucguggugagauu

SEQ ID NO: 2588754 - RNA, 19 nt, Homo sapiens
  misc_RNA (1)...(19): siRNA sense strand
ccugaaagauacugaggau

SEQ ID NO: 2588755 - RNA, 19 nt, Homo sapiens
  misc_RNA (1)...(19): siRNA sense strand
gagaaaagaagaagccaaa

SEQ ID NO: 2588756 - RNA, 19 nt, Homo sapiens
  misc_RNA (1)...(19): siRNA sense strand
uggaaaugguguuggagau

SEQ ID NO: 2588757 - RNA, 19 nt, Homo sapiens
  misc_RNA (1)...(19): siRNA sense strand
uggcuaagcuccaagacaa

SEQ ID NO: 2588758 - RNA, 19 nt, Homo sapiens
  misc_RNA (1)...(19): siRNA sense strand
gaggaaggaucaggagaaa

SEQ ID NO: 2588759 - RNA, 19 nt, Homo sapiens
  misc_RNA (1)...(19): siRNA sense strand
ccaacaacguggagaugau

SEQ ID NO: 2588760 - RNA, 19 nt, Homo sapiens
  misc_RNA (1)...(19): siRNA sense strand
gaaaagaaguagauggcau

SEQ ID NO: 2588761 - RNA, 19 nt, Homo sapiens
  misc_RNA (1)...(19): siRNA sense strand
gcgagaagcaggagagucu

SEQ ID NO: 2588762 - RNA, 19 nt, Homo sapiens
  misc_RNA (1)...(19): siRNA sense strand
ccaacaaagagaaagaaau

SEQ ID NO: 2588763 - RNA, 19 nt, Homo sapiens
  misc_RNA (1)...(19): siRNA sense strand
ugauuagauuuguggacua

SEQ ID NO: 2588764 - RNA, 19 nt, Homo sapiens
  misc_RNA (1)...(19): siRNA sense strand
acgugaaauccgugagaau

SEQ ID NO: 2588765 - RNA, 19 nt, Homo sapiens
  misc_RNA (1)...(19): siRNA sense strand
gcaaagaagaagagaagcu

SEQ ID NO: 2588766 - RNA, 19 nt, Homo sapiens
  misc_RNA (1)...(19): siRNA sense strand
acugacagccaaagagaaa

SEQ ID NO: 2588767 - RNA, 19 nt, Homo sapiens
  misc_RNA (1)...(19): siRNA sense strand
cgaauaaggaagaaagcga

SEQ ID NO: 2588768 - RNA, 19 nt, Homo sapiens
  misc_RNA (1)...(19): siRNA sense strand
agacaaagaagcuacuaaa

SEQ ID NO: 2588769 - RNA, 19 nt, Homo sapiens
  misc_RNA (1)...(19): siRNA sense strand
ccaggaagacaaaggaauu

SEQ ID NO: 2588770 - RNA, 19 nt, Homo sapiens
  misc_RNA (1)...(19): siRNA sense strand
acaaauggucaauggacaa

SEQ ID NO: 2588771 - RNA, 19 nt, Homo sapiens
  misc_RNA (1)...(19): siRNA sense strand
aaugcaaacuggaggaaga

SEQ ID NO: 2588772 - RNA, 19 nt, Homo sapiens
  misc_RNA (1)...(19): siRNA sense strand
cugaagaagcagaugaaaa

SEQ ID NO: 2588773 - RNA, 19 nt, Homo sapiens
  misc_RNA (1)...(19): siRNA sense strand
aagagaaagccaaggaaga

SEQ ID NO: 2588774 - RNA, 19 nt, Homo sapiens
  misc_RNA (1)...(19): siRNA sense strand
ggugaagagcagcggagaa

SEQ ID NO: 2588775 - RNA, 19 nt, Homo sapiens
  misc_RNA (1)...(19): siRNA sense strand
ucgaauaagugaacgccaa

SEQ ID NO: 2588776 - RNA, 19 nt, Homo sapiens
  misc_RNA (1)...(19): siRNA sense strand
augcagauauuauggcaaa

SEQ ID NO: 2588777 - RNA, 19 nt, Homo sapiens
  misc_RNA (1)...(19): siRNA sense strand
gcggagagaaagagaagau

SEQ ID NO: 2588778 - RNA, 19 nt, Homo sapiens
  misc_RNA (1)...(19): siRNA sense strand
ggauggauuuauggagaaa

SEQ ID NO: 2588779 - RNA, 19 nt, Homo sapiens
  misc_RNA (1)...(19): siRNA sense strand
aggaagagggaaugaucaa

SEQ ID NO: 2588780 - RNA, 19 nt, Homo sapiens
  misc_RNA (1)...(19): siRNA sense strand
acggagaagcagaaagaau

SEQ ID NO: 2588781 - RNA, 19 nt, Homo sapiens
  misc_RNA (1)...(19): siRNA sense strand
ucacugguuucgugggcaa

SEQ ID NO: 2588782 - RNA, 19 nt, Homo sapiens
  misc_RNA (1)...(19): siRNA sense strand
agaagcagaaagaaugcaa

SEQ ID NO: 2588783 - RNA, 19 nt, Homo sapiens
  misc_RNA (1)...(19): siRNA sense strand
acggagaagcagaaagaau

SEQ ID NO: 2588784 - RNA, 19 nt, Homo sapiens
  misc_RNA (1)...(19): siRNA sense strand
ucacugguuucgugggcaa

SEQ ID NO: 2588785 - RNA, 19 nt, Homo sapiens
  misc_RNA (1)...(19): siRNA sense strand
agaagcagaaagaaugcaa

SEQ ID NO: 2588786 - RNA, 19 nt, Homo sapiens
  misc_RNA (1)...(19): siRNA sense strand
acggagaagcagaaagaau

SEQ ID NO: 2588787 - RNA, 19 nt, Homo sapiens
  misc_RNA (1)...(19): siRNA sense strand
ucacugguuucgugggcaa

SEQ ID NO: 2588788 - RNA, 19 nt, Homo sapiens
  misc_RNA (1)...(19): siRNA sense strand
agaagcagaaagaaugcaa

SEQ ID NO: 2588789 - RNA, 19 nt, Homo sapiens
  misc_RNA (1)...(19): siRNA sense strand
acggagaagcagaaagaau

SEQ ID NO: 2588790 - RNA, 19 nt, Homo sapiens
  misc_RNA (1)...(19): siRNA sense strand
ucacugguuucgugggcaa

SEQ ID NO: 2588791 - RNA, 19 nt, Homo sapiens
  misc_RNA (1)...(19): siRNA sense strand
agaagcagaaagaaugcaa

SEQ ID NO: 2588792 - RNA, 19 nt, Homo sapiens
  misc_RNA (1)...(19): siRNA sense strand
acggagaagcagaaagaau

SEQ ID NO: 2588793 - RNA, 19 nt, Homo sapiens
  misc_RNA (1)...(19): siRNA sense strand
ucacugguuucgugggcaa

SEQ ID NO: 2588794 - RNA, 19 nt, Homo sapiens
  misc_RNA (1)...(19): siRNA sense strand
agaagcagaaagaaugcaa

SEQ ID NO: 2588795 - RNA, 19 nt, Homo sapiens
  misc_RNA (1)...(19): siRNA sense strand
acggagaagcagaaagaau

SEQ ID NO: 2588796 - RNA, 19 nt, Homo sapiens
  misc_RNA (1)...(19): siRNA sense strand
ucacugguuucgugggcaa

SEQ ID NO: 2588797 - RNA, 19 nt, Homo sapiens
  misc_RNA (1)...(19): siRNA sense strand
agaagcagaaagaaugcaa

SEQ ID NO: 2588798 - RNA, 19 nt, Homo sapiens
  misc_RNA (1)...(19): siRNA sense strand
acggagaagcagaaagaau

SEQ ID NO: 2588799 - RNA, 19 nt, Homo sapiens
  misc_RNA (1)...(19): siRNA sense strand
ucacugguuucgugggcaa

SEQ ID NO: 2588800 - RNA, 19 nt, Homo sapiens
  misc_RNA (1)...(19): siRNA sense strand
agaagcagaaagaaugcaa

SEQ ID NO: 2588801 - RNA, 19 nt, Homo sapiens
  misc_RNA (1)...(19): siRNA sense strand
acggagaagcagaaagaau

SEQ ID NO: 2588802 - RNA, 19 nt, Homo sapiens
  misc_RNA (1)...(19): siRNA sense strand
ucacugguuucgugggcaa

SEQ ID NO: 2588803 - RNA, 19 nt, Homo sapiens
  misc_RNA (1)...(19): siRNA sense strand
agaagcagaaagaaugcaa

SEQ ID NO: 2588804 - RNA, 19 nt, Homo sapiens
  misc_RNA (1)...(19): siRNA sense strand
acggagaagcagaaagaau

SEQ ID NO: 2588805 - RNA, 19 nt, Homo sapiens
  misc_RNA (1)...(19): siRNA sense strand
ucacugguuucgugggcaa

SEQ ID NO: 2588806 - RNA, 19 nt, Homo sapiens
  misc_RNA (1)...(19): siRNA sense strand
agaagcagaaagaaugcaa

SEQ ID NO: 2588807 - RNA, 19 nt, Homo sapiens
  misc_RNA (1)...(19): siRNA sense strand
acggagaagcagaaagaau

SEQ ID NO: 2588808 - RNA, 19 nt, Homo sapiens
  misc_RNA (1)...(19): siRNA sense strand
ucacugguuucgugggcaa

SEQ ID NO: 2588809 - RNA, 19 nt, Homo sapiens
  misc_RNA (1)...(19): siRNA sense strand
agaagcagaaagaaugcaa

SEQ ID NO: 2588810 - RNA, 19 nt, Homo sapiens
  misc_RNA (1)...(19): siRNA sense strand
agaagaaggaggugcccaa

SEQ ID NO: 2588811 - RNA, 19 nt, Homo sapiens
  misc_RNA (1)...(19): siRNA sense strand
aggaaauguuggagaacuc

SEQ ID NO: 2588812 - RNA, 19 nt, Homo sapiens
  misc_RNA (1)...(19): siRNA sense strand
ucauugagaaggugcgcaa

SEQ ID NO: 2588813 - RNA, 19 nt, Homo sapiens
  misc_RNA (1)...(19): siRNA sense strand
ggcaaauacacuacgaaca

SEQ ID NO: 2588814 - RNA, 19 nt, Homo sapiens
  misc_RNA (1)...(19): siRNA sense strand
cugugagaaacgaccgaaa

SEQ ID NO: 2588815 - RNA, 19 nt, Homo sapiens
  misc_RNA (1)...(19): siRNA sense strand
cgcaaagcgcaccaggaaa

SEQ ID NO: 2588816 - RNA, 19 nt, Homo sapiens
  misc_RNA (1)...(19): siRNA sense strand
ucaacaaggugacccggaa

SEQ ID NO: 2588817 - RNA, 19 nt, Homo sapiens
  misc_RNA (1)...(19): siRNA sense strand
accgaaacaagaagaagaa

SEQ ID NO: 2588818 - RNA, 19 nt, Homo sapiens
  misc_RNA (1)...(19): siRNA sense strand
cugcgaagcaucagcgcca

SEQ ID NO: 2588819 - RNA, 19 nt, Homo sapiens
  misc_RNA (1)...(19): siRNA sense strand
caaaggagggcguggacga

SEQ ID NO: 2588820 - RNA, 19 nt, Homo sapiens
  misc_RNA (1)...(19): siRNA sense strand
acguggagauggugggcca

SEQ ID NO: 2588821 - RNA, 19 nt, Homo sapiens
  misc_RNA (1)...(19): siRNA sense strand
gaggagagcuggaccgaca

SEQ ID NO: 2588822 - RNA, 19 nt, Homo sapiens
  misc_RNA (1)...(19): siRNA sense strand
ucaacaaggagaagggcau

SEQ ID NO: 2588823 - RNA, 19 nt, Homo sapiens
  misc_RNA (1)...(19): siRNA sense strand
aguccaugguggugggcga

SEQ ID NO: 2588824 - RNA, 19 nt, Homo sapiens
  misc_RNA (1)...(19): siRNA sense strand
aguauuacaagaagggcau

SEQ ID NO: 2588825 - RNA, 19 nt, Homo sapiens
  misc_RNA (1)...(19): siRNA sense strand
caguauuacaagaagggca

SEQ ID NO: 2588826 - RNA, 19 nt, Homo sapiens
  misc_RNA (1)...(19): siRNA sense strand
ccgccaugaacuacgacaa

SEQ ID NO: 2588827 - RNA, 19 nt, Homo sapiens
  misc_RNA (1)...(19): siRNA sense strand
gcauaagcauggaaggcaa

SEQ ID NO: 2588828 - RNA, 19 nt, Homo sapiens
  misc_RNA (1)...(19): siRNA sense strand
agucuagagaagagggaaa

SEQ ID NO: 2588829 - RNA, 19 nt, Homo sapiens
  misc_RNA (1)...(19): siRNA sense strand
guugaaugaagcagguaaa

SEQ ID NO: 2588830 - RNA, 19 nt, Homo sapiens
  misc_RNA (1)...(19): siRNA sense strand
acagaaucaagcugagaaa

SEQ ID NO: 2588831 - RNA, 19 nt, Homo sapiens
  misc_RNA (1)...(19): siRNA sense strand
ccacauaccuggauccuga

SEQ ID NO: 2588832 - RNA, 19 nt, Homo sapiens
  misc_RNA (1)...(19): siRNA sense strand
ccuacauccaggacagaaa

SEQ ID NO: 2588833 - RNA, 19 nt, Homo sapiens
  misc_RNA (1)...(19): siRNA sense strand
cugagaaagcccuggccaa

SEQ ID NO: 2588834 - RNA, 19 nt, Homo sapiens
  misc_RNA (1)...(19): siRNA sense strand
cugagaacaauaaggagua

SEQ ID NO: 2588835 - RNA, 19 nt, Homo sapiens
  misc_RNA (1)...(19): siRNA sense strand
cagcagagggagguagaaa

SEQ ID NO: 2588836 - RNA, 19 nt, Homo sapiens
  misc_RNA (1)...(19): siRNA sense strand
acaauaaggaguaugccaa

SEQ ID NO: 2588837 - RNA, 19 nt, Homo sapiens
  misc_RNA (1)...(19): siRNA sense strand
cuaccaaaacagagagaga

SEQ ID NO: 2588838 - RNA, 19 nt, Homo sapiens
  misc_RNA (1)...(19): siRNA sense strand
agagaagagggaaaggcaa

SEQ ID NO: 2588839 - RNA, 19 nt, Homo sapiens
  misc_RNA (1)...(19): siRNA sense strand
cauaagcauggaaggcaaa

SEQ ID NO: 2588840 - RNA, 19 nt, Homo sapiens
  misc_RNA (1)...(19): siRNA sense strand
gagaagagggaaaggcaac

SEQ ID NO: 2588841 - RNA, 19 nt, Homo sapiens
  misc_RNA (1)...(19): siRNA sense strand
gccacuaaccagaugggaa

SEQ ID NO: 2588842 - RNA, 19 nt, Homo sapiens
  misc_RNA (1)...(19): siRNA sense strand
cauggauacuggagugcau

SEQ ID NO: 2588843 - RNA, 19 nt, Homo sapiens
  misc_RNA (1)...(19): siRNA sense strand
cauugagaagccagagaau

SEQ ID NO: 2588844 - RNA, 19 nt, Homo sapiens
  misc_RNA (1)...(19): siRNA sense strand
cggaugaacuuuaugugga

SEQ ID NO: 2588845 - RNA, 19 nt, Homo sapiens
  misc_RNA (1)...(19): siRNA sense strand
uagaaguagaugauaguga

SEQ ID NO: 2588846 - RNA, 19 nt, Homo sapiens
  misc_RNA (1)...(19): siRNA sense strand
guuuaagauucucagccua

SEQ ID NO: 2588847 - RNA, 19 nt, Homo sapiens
  misc_RNA (1)...(19): siRNA sense strand
uggaguauuuagaaguaga

SEQ ID NO: 2588848 - RNA, 19 nt, Homo sapiens
  misc_RNA (1)...(19): siRNA sense strand
ccugagaacaauaaggagu

SEQ ID NO: 2588849 - RNA, 19 nt, Homo sapiens
  misc_RNA (1)...(19): siRNA sense strand
uguugaaugaagcagguaa

SEQ ID NO: 2588850 - RNA, 19 nt, Homo sapiens
  misc_RNA (1)...(19): siRNA sense strand
cuggaaaaccugagaucuu

SEQ ID NO: 2588851 - RNA, 19 nt, Homo sapiens
  misc_RNA (1)...(19): siRNA sense strand
ccacuaaccagaugggaag

SEQ ID NO: 2588852 - RNA, 19 nt, Homo sapiens
  misc_RNA (1)...(19): siRNA sense strand
cugaagaacuacugagugc

SEQ ID NO: 2588853 - RNA, 19 nt, Homo sapiens
  misc_RNA (1)...(19): siRNA sense strand
accauuaagucuagagaag

SEQ ID NO: 2588854 - RNA, 19 nt, Homo sapiens
  misc_RNA (1)...(19): siRNA sense strand
uuuauguggacgugacuua

SEQ ID NO: 2588855 - RNA, 19 nt, Homo sapiens
  misc_RNA (1)...(19): siRNA sense strand
auuaaauggucuccaccua

SEQ ID NO: 2588856 - RNA, 19 nt, Homo sapiens
  misc_RNA (1)...(19): siRNA sense strand
cuuacauaguucagccaga

SEQ ID NO: 2588857 - RNA, 19 nt, Homo sapiens
  misc_RNA (1)...(19): siRNA sense strand
agaaagcagcugaguggga

SEQ ID NO: 2588858 - RNA, 19 nt, Homo sapiens
  misc_RNA (1)...(19): siRNA sense strand
ccagagaauccugaaacaa

SEQ ID NO: 2588859 - RNA, 19 nt, Homo sapiens
  misc_RNA (1)...(19): siRNA sense strand
caacauggcccuuaccaca

SEQ ID NO: 2588860 - RNA, 19 nt, Homo sapiens
  misc_RNA (1)...(19): siRNA sense strand
ucgauuaaaacccgagaaa

SEQ ID NO: 2588861 - RNA, 19 nt, Homo sapiens
  misc_RNA (1)...(19): siRNA sense strand
gauuaaaacccgagaaagc

SEQ ID NO: 2588862 - RNA, 19 nt, Homo sapiens
  misc_RNA (1)...(19): siRNA sense strand
ccgggacuccugagaacaa

SEQ ID NO: 2588863 - RNA, 19 nt, Homo sapiens
  misc_RNA (1)...(19): siRNA sense strand
uguccggggucauggauaa

SEQ ID NO: 2588864 - RNA, 19 nt, Homo sapiens
  misc_RNA (1)...(19): siRNA sense strand
ccuguaugaaauucgauua

SEQ ID NO: 2588865 - RNA, 19 nt, Homo sapiens
  misc_RNA (1)...(19): siRNA sense strand
cuucugacuaugaggacuu

SEQ ID NO: 2588866 - RNA, 19 nt, Homo sapiens
  misc_RNA (1)...(19): siRNA sense strand
uggagauucacaaggucaa

SEQ ID NO: 2588867 - RNA, 19 nt, Homo sapiens
  misc_RNA (1)...(19): siRNA sense strand
gugaggaaccccaggccaa

SEQ ID NO: 2588868 - RNA, 19 nt, Homo sapiens
  misc_RNA (1)...(19): siRNA sense strand
uugaagaaucagccaaaga

SEQ ID NO: 2588869 - RNA, 19 nt, Homo sapiens
  misc_RNA (1)...(19): siRNA sense strand
aagaaauaagacagggcaa

SEQ ID NO: 2588870 - RNA, 19 nt, Homo sapiens
  misc_RNA (1)...(19): siRNA sense strand
gcgugagugcaaagaagaa

SEQ ID NO: 2588871 - RNA, 19 nt, Homo sapiens
  misc_RNA (1)...(19): siRNA sense strand
cgcaacaaggggagaguaa

SEQ ID NO: 2588872 - RNA, 19 nt, Homo sapiens
  misc_RNA (1)...(19): siRNA sense strand
agggcaacauugagcguga

SEQ ID NO: 2588873 - RNA, 19 nt, Homo sapiens
  misc_RNA (1)...(19): siRNA sense strand
cauuugaagaagcaagaga

SEQ ID NO: 2588874 - RNA, 19 nt, Homo sapiens
  misc_RNA (1)...(19): siRNA sense strand
ggggagaguaaccgaggaa

SEQ ID NO: 2588875 - RNA, 19 nt, Homo sapiens
  misc_RNA (1)...(19): siRNA sense strand
gugagugcaaagaagaauu

SEQ ID NO: 2588876 - RNA, 19 nt, Homo sapiens
  misc_RNA (1)...(19): siRNA sense strand
ccacuaaugaagaggaaaa

SEQ ID NO: 2588877 - RNA, 19 nt, Homo sapiens
  misc_RNA (1)...(19): siRNA sense strand
gguauauucuggaaggaga

SEQ ID NO: 2588878 - RNA, 19 nt, Homo sapiens
  misc_RNA (1)...(19): siRNA sense strand
ccagcagauaucagaauaa

SEQ ID NO: 2588879 - RNA, 19 nt, Homo sapiens
  misc_RNA (1)...(19): siRNA sense strand
ugucaaacauagaaccaga

SEQ ID NO: 2588880 - RNA, 19 nt, Homo sapiens
  misc_RNA (1)...(19): siRNA sense strand
uggaaaaggagaugcagaa

SEQ ID NO: 2588881 - RNA, 19 nt, Homo sapiens
  misc_RNA (1)...(19): siRNA sense strand
cgguggagugauaaagaau

SEQ ID NO: 2588882 - RNA, 19 nt, Homo sapiens
  misc_RNA (1)...(19): siRNA sense strand
ccuucaacaaccagaguga

SEQ ID NO: 2588883 - RNA, 19 nt, Homo sapiens
  misc_RNA (1)...(19): siRNA sense strand
ggauaagauuuuagcccuu

SEQ ID NO: 2588884 - RNA, 19 nt, Homo sapiens
  misc_RNA (1)...(19): siRNA sense strand
cagcaaaggaaucaaucau

SEQ ID NO: 2588885 - RNA, 19 nt, Homo sapiens
  misc_RNA (1)...(19): siRNA sense strand
caagauugauauaggcgca

SEQ ID NO: 2588886 - RNA, 19 nt, Homo sapiens
  misc_RNA (1)...(19): siRNA sense strand
ccuaagugcuggacccuca

SEQ ID NO: 2588887 - RNA, 19 nt, Homo sapiens
  misc_RNA (1)...(19): siRNA sense strand
agaaaguagccagcagaua

SEQ ID NO: 2588888 - RNA, 19 nt, Homo sapiens
  misc_RNA (1)...(19): siRNA sense strand
aaauaaagaaagcugggau

SEQ ID NO: 2588889 - RNA, 19 nt, Homo sapiens
  misc_RNA (1)...(19): siRNA sense strand
agaacugguauuugacauu

SEQ ID NO: 2588890 - RNA, 19 nt, Homo sapiens
  misc_RNA (1)...(19): siRNA sense strand
aagcaucgucucuggguau

SEQ ID NO: 2588891 - RNA, 19 nt, Homo sapiens
  misc_RNA (1)...(19): siRNA sense strand
gaagaaaguagccagcaga

SEQ ID NO: 2588892 - RNA, 19 nt, Homo sapiens
  misc_RNA (1)...(19): siRNA sense strand
aagcugaaucugaugucaa

SEQ ID NO: 2588893 - RNA, 19 nt, Homo sapiens
  misc_RNA (1)...(19): siRNA sense strand
ugacaauggccauacgcau

SEQ ID NO: 2588894 - RNA, 19 nt, Homo sapiens
  misc_RNA (1)...(19): siRNA sense strand
ggcuggagugggagauuau

SEQ ID NO: 2588895 - RNA, 19 nt, Homo sapiens
  misc_RNA (1)...(19): siRNA sense strand
ggaaaaggagaugcagaaa

SEQ ID NO: 2588896 - RNA, 19 nt, Homo sapiens
  misc_RNA (1)...(19): siRNA sense strand
ccucaugacaauggccaua

SEQ ID NO: 2588897 - RNA, 19 nt, Homo sapiens
  misc_RNA (1)...(19): siRNA sense strand
gcuaccaauccuucaacaa

SEQ ID NO: 2588898 - RNA, 19 nt, Homo sapiens
  misc_RNA (1)...(19): siRNA sense strand
cuguagagauugaggagca

SEQ ID NO: 2588899 - RNA, 19 nt, Homo sapiens
  misc_RNA (1)...(19): siRNA sense strand
ccucagaaauguucagcga

SEQ ID NO: 2588900 - RNA, 19 nt, Homo sapiens
  misc_RNA (1)...(19): siRNA sense strand
agacaaggagcaagcccaa

SEQ ID NO: 2588901 - RNA, 19 nt, Homo sapiens
  misc_RNA (1)...(19): siRNA sense strand
gcgaauucgauaaacggua

SEQ ID NO: 2588902 - RNA, 19 nt, Homo sapiens
  misc_RNA (1)...(19): siRNA sense strand
ggagcaaaccaaacggcuu

SEQ ID NO: 2588903 - RNA, 19 nt, Homo sapiens
  misc_RNA (1)...(19): siRNA sense strand
agauugaggagcaaaccaa

SEQ ID NO: 2588904 - RNA, 19 nt, Homo sapiens
  misc_RNA (1)...(19): siRNA sense strand
uguagagauugaggagcaa

SEQ ID NO: 2588905 - RNA, 19 nt, Homo sapiens
  misc_RNA (1)...(19): siRNA sense strand
ggaaguacgucaugggcca

SEQ ID NO: 2588906 - RNA, 19 nt, Homo sapiens
  misc_RNA (1)...(19): siRNA sense strand
cgcccaaggacaagcgcua

SEQ ID NO: 2588907 - RNA, 19 nt, Homo sapiens
  misc_RNA (1)...(19): siRNA sense strand
cggccgagaagaaggacga

SEQ ID NO: 2588908 - RNA, 19 nt, Homo sapiens
  misc_RNA (1)...(19): siRNA sense strand
gggaaauggcgacgagcag

SEQ ID NO: 2588909 - RNA, 19 nt, Homo sapiens
  misc_RNA (1)...(19): siRNA sense strand
acaaagagugugaggccuu

SEQ ID NO: 2588910 - RNA, 19 nt, Homo sapiens
  misc_RNA (1)...(19): siRNA sense strand
ccguggaugaacuggacaa

SEQ ID NO: 2588911 - RNA, 19 nt, Homo sapiens
  misc_RNA (1)...(19): siRNA sense strand
gcaaucaccuguagcagca

SEQ ID NO: 2588912 - RNA, 19 nt, Homo sapiens
  misc_RNA (1)...(19): siRNA sense strand
gcaaaaugaucaagugcgu

SEQ ID NO: 2588913 - RNA, 19 nt, Homo sapiens
  misc_RNA (1)...(19): siRNA sense strand
gcacacaagaaccuggaca

SEQ ID NO: 2588914 - RNA, 19 nt, Homo sapiens
  misc_RNA (1)...(19): siRNA sense strand
ucgagaaggugacagggaa

SEQ ID NO: 2588915 - RNA, 19 nt, Homo sapiens
  misc_RNA (1)...(19): siRNA sense strand
cgagaaggugacagggaag

SEQ ID NO: 2588916 - RNA, 19 nt, Homo sapiens
  misc_RNA (1)...(19): siRNA sense strand
gcuacaacccacaguacca

SEQ ID NO: 2588917 - RNA, 19 nt, Homo sapiens
  misc_RNA (1)...(19): siRNA sense strand
aggcagaggaagaggauga

SEQ ID NO: 2588918 - RNA, 19 nt, Homo sapiens
  misc_RNA (1)...(19): siRNA sense strand
aggaagaggaugaggagga

SEQ ID NO: 2588919 - RNA, 19 nt, Homo sapiens
  misc_RNA (1)...(19): siRNA sense strand
ccaacaaguucaagcggau

SEQ ID NO: 2588920 - RNA, 19 nt, Homo sapiens
  misc_RNA (1)...(19): siRNA sense strand
uggaggaggcagaggaaga

SEQ ID NO: 2588921 - RNA, 19 nt, Homo sapiens
  misc_RNA (1)...(19): siRNA sense strand
aggaugaggaggaagaaga

SEQ ID NO: 2588922 - RNA, 19 nt, Homo sapiens
  misc_RNA (1)...(19): siRNA sense strand
aagaggaugaggaggaaga

SEQ ID NO: 2588923 - RNA, 19 nt, Homo sapiens
  misc_RNA (1)...(19): siRNA sense strand
guggagaccaagaagguga

SEQ ID NO: 2588924 - RNA, 19 nt, Homo sapiens
  misc_RNA (1)...(19): siRNA sense strand
aggacaaucgagaguggua

SEQ ID NO: 2588925 - RNA, 19 nt, Homo sapiens
  misc_RNA (1)...(19): siRNA sense strand
gagugguaccagagcaaga

SEQ ID NO: 2588926 - RNA, 19 nt, Homo sapiens
  misc_RNA (1)...(19): siRNA sense strand
aggaggagcaacuggccaa

SEQ ID NO: 2588927 - RNA, 19 nt, Homo sapiens
  misc_RNA (1)...(19): siRNA sense strand
ccaaggagcuagaagacac

SEQ ID NO: 2588928 - RNA, 19 nt, Homo sapiens
  misc_RNA (1)...(19): siRNA sense strand
cgaccuacauggagaggac

SEQ ID NO: 2588929 - RNA, 19 nt, Homo sapiens
  misc_RNA (1)...(19): siRNA sense strand
acuaugaacucucgcccaa

SEQ ID NO: 2588930 - RNA, 19 nt, Homo sapiens
  misc_RNA (1)...(19): siRNA sense strand
agacugaccaggaggagca

SEQ ID NO: 2588931 - RNA, 19 nt, Homo sapiens
  misc_RNA (1)...(19): siRNA sense strand
ugcugaugcuggaggguca

SEQ ID NO: 2588932 - RNA, 19 nt, Homo sapiens
  misc_RNA (1)...(19): siRNA sense strand
gcaucauggccgaguucuu

SEQ ID NO: 2588933 - RNA, 19 nt, Homo sapiens
  misc_RNA (1)...(19): siRNA sense strand
cuacaugggcucugccaca

SEQ ID NO: 2588934 - RNA, 19 nt, Homo sapiens
  misc_RNA (1)...(19): siRNA sense strand
ccagcgaccuacauggaga

SEQ ID NO: 2588935 - RNA, 19 nt, Homo sapiens
  misc_RNA (1)...(19): siRNA sense strand
uggccaaggagcuagaaga

SEQ ID NO: 2588936 - RNA, 19 nt, Homo sapiens
  misc_RNA (1)...(19): siRNA sense strand
ccagcaaugccuaggagca

SEQ ID NO: 2588937 - RNA, 19 nt, Homo sapiens
  misc_RNA (1)...(19): siRNA sense strand
cagaggaagaggaugagga

SEQ ID NO: 2588938 - RNA, 19 nt, Homo sapiens
  misc_RNA (1)...(19): siRNA sense strand
acaugaaccuccuggccga

SEQ ID NO: 2588939 - RNA, 19 nt, Homo sapiens
  misc_RNA (1)...(19): siRNA sense strand
ccaagaaggugacaagccu

SEQ ID NO: 2588940 - RNA, 19 nt, Homo sapiens
  misc_RNA (1)...(19): siRNA sense strand
uugaaugugaggugauaaa

SEQ ID NO: 2588941 - RNA, 19 nt, Homo sapiens
  misc_RNA (1)...(19): siRNA sense strand
aauagaaaggcaaggaaca

SEQ ID NO: 2588942 - RNA, 19 nt, Homo sapiens
  misc_RNA (1)...(19): siRNA sense strand
agucgagggcuguggaaga

SEQ ID NO: 2588943 - RNA, 19 nt, Homo sapiens
  misc_RNA (1)...(19): siRNA sense strand
uggaauugcuguaggugca

SEQ ID NO: 2588944 - RNA, 19 nt, Homo sapiens
  misc_RNA (1)...(19): siRNA sense strand
agaccaauggacauggaaa

SEQ ID NO: 2588945 - RNA, 19 nt, Homo sapiens
  misc_RNA (1)...(19): siRNA sense strand
cuacaugucugguggccuu

SEQ ID NO: 2588946 - RNA, 19 nt, Homo sapiens
  misc_RNA (1)...(19): siRNA sense strand
auucaagaccugugggcca

SEQ ID NO: 2588947 - RNA, 19 nt, Homo sapiens
  misc_RNA (1)...(19): siRNA sense strand
uggaaagagaugagaaggu

SEQ ID NO: 2588948 - RNA, 19 nt, Homo sapiens
  misc_RNA (1)...(19): siRNA sense strand
augcaaagauucuagagga

SEQ ID NO: 2588949 - RNA, 19 nt, Homo sapiens
  misc_RNA (1)...(19): siRNA sense strand
gcuuaaagguggucagucc

SEQ ID NO: 2588950 - RNA, 19 nt, Homo sapiens
  misc_RNA (1)...(19): siRNA sense strand
aaaucagccauucgggaua

SEQ ID NO: 2588951 - RNA, 19 nt, Homo sapiens
  misc_RNA (1)...(19): siRNA sense strand
guuuggaguaggagcugaa

SEQ ID NO: 2588952 - RNA, 19 nt, Homo sapiens
  misc_RNA (1)...(19): siRNA sense strand
gaguugaaugugaggugau

SEQ ID NO: 2588953 - RNA, 19 nt, Homo sapiens
  misc_RNA (1)...(19): siRNA sense strand
augcguaccauuagaccaa

SEQ ID NO: 2588954 - RNA, 19 nt, Homo sapiens
  misc_RNA (1)...(19): siRNA sense strand
aaggcaaggaacacauaua

SEQ ID NO: 2588955 - RNA, 19 nt, Homo sapiens
  misc_RNA (1)...(19): siRNA sense strand
augcuauaaaucaggguau

SEQ ID NO: 2588956 - RNA, 19 nt, Homo sapiens
  misc_RNA (1)...(19): siRNA sense strand
aucuaaagaaggaguugaa

SEQ ID NO: 2588957 - RNA, 19 nt, Homo sapiens
  misc_RNA (1)...(19): siRNA sense strand
ccaaccugguacugggaaa

SEQ ID NO: 2588958 - RNA, 19 nt, Homo sapiens
  misc_RNA (1)...(19): siRNA sense strand
ccaaagaaaaggacaggaa

SEQ ID NO: 2588959 - RNA, 19 nt, Homo sapiens
  misc_RNA (1)...(19): siRNA sense strand
gcacugaugccuuggcgua

SEQ ID NO: 2588960 - RNA, 19 nt, Homo sapiens
  misc_RNA (1)...(19): siRNA sense strand
ccuguaauguucauggcua

SEQ ID NO: 2588961 - RNA, 19 nt, Homo sapiens
  misc_RNA (1)...(19): siRNA sense strand
gguuacaaucccagaaacu

SEQ ID NO: 2588962 - RNA, 19 nt, Homo sapiens
  misc_RNA (1)...(19): siRNA sense strand
cugucaaggccuuagauuu

SEQ ID NO: 2588963 - RNA, 19 nt, Homo sapiens
  misc_RNA (1)...(19): siRNA sense strand
cgucagaacacuagagacc

SEQ ID NO: 2588964 - RNA, 19 nt, Homo sapiens
  misc_RNA (1)...(19): siRNA sense strand
gaacauggccauuuggaac

SEQ ID NO: 2588965 - RNA, 19 nt, Homo sapiens
  misc_RNA (1)...(19): siRNA sense strand
acuaaucaucagcuagaaa

SEQ ID NO: 2588966 - RNA, 19 nt, Homo sapiens
  misc_RNA (1)...(19): siRNA sense strand
agauacaccaagaugaaga

SEQ ID NO: 2588967 - RNA, 19 nt, Homo sapiens
  misc_RNA (1)...(19): siRNA sense strand
cucucuggcuccaaagaaa

SEQ ID NO: 2588968 - RNA, 19 nt, Homo sapiens
  misc_RNA (1)...(19): siRNA sense strand
agaugaagacugccaccaa

SEQ ID NO: 2588969 - RNA, 19 nt, Homo sapiens
  misc_RNA (1)...(19): siRNA sense strand
caggaaucuucgaaggauc

SEQ ID NO: 2588970 - RNA, 19 nt, Homo sapiens
  misc_RNA (1)...(19): siRNA sense strand
aauacaguggauagaacua

SEQ ID NO: 2588971 - RNA, 19 nt, Homo sapiens
  misc_RNA (1)...(19): siRNA sense strand
ccuaaugggaacauggcca

SEQ ID NO: 2588972 - RNA, 19 nt, Homo sapiens
  misc_RNA (1)...(19): siRNA sense strand
ggaacaagcccuaaggcaa

SEQ ID NO: 2588973 - RNA, 19 nt, Homo sapiens
  misc_RNA (1)...(19): siRNA sense strand
cgucaaagaccuagcaaaa

SEQ ID NO: 2588974 - RNA, 19 nt, Homo sapiens
  misc_RNA (1)...(19): siRNA sense strand
cgguauaucagcagggaga

SEQ ID NO: 2588975 - RNA, 19 nt, Homo sapiens
  misc_RNA (1)...(19): siRNA sense strand
aggacaaguuagaacaaau

SEQ ID NO: 2588976 - RNA, 19 nt, Homo sapiens
  misc_RNA (1)...(19): siRNA sense strand
aggaauuacagguagcaaa

SEQ ID NO: 2588977 - RNA, 19 nt, Homo sapiens
  misc_RNA (1)...(19): siRNA sense strand
ccuuguacguugucagaau

SEQ ID NO: 2588978 - RNA, 19 nt, Homo sapiens
  misc_RNA (1)...(19): siRNA sense strand
gcuaacuaguacagcgaca

SEQ ID NO: 2588979 - RNA, 19 nt, Homo sapiens
  misc_RNA (1)...(19): siRNA sense strand
caguggagaaggagauuau

SEQ ID NO: 2588980 - RNA, 19 nt, Homo sapiens
  misc_RNA (1)...(19): siRNA sense strand
agaaggauuuguugggcau

SEQ ID NO: 2588981 - RNA, 19 nt, Homo sapiens
  misc_RNA (1)...(19): siRNA sense strand
gagccgagcuacaguacau

SEQ ID NO: 2588982 - RNA, 19 nt, Homo sapiens
  misc_RNA (1)...(19): siRNA sense strand
aggcagaagaggacaaguu

SEQ ID NO: 2588983 - RNA, 19 nt, Homo sapiens
  misc_RNA (1)...(19): siRNA sense strand
gagagacagaaguacgaaa

SEQ ID NO: 2588984 - RNA, 19 nt, Homo sapiens
  misc_RNA (1)...(19): siRNA sense strand
aggaaauagaauugcuaca

SEQ ID NO: 2588985 - RNA, 19 nt, Homo sapiens
  misc_RNA (1)...(19): siRNA sense strand
guccagugcuaguuggcaa

SEQ ID NO: 2588986 - RNA, 19 nt, Homo sapiens
  misc_RNA (1)...(19): siRNA sense strand
cuauacagaagcagauuau

SEQ ID NO: 2588987 - RNA, 19 nt, Homo sapiens
  misc_RNA (1)...(19): siRNA sense strand
uaaucuuccaggagugaaa

SEQ ID NO: 2588988 - RNA, 19 nt, Homo sapiens
  misc_RNA (1)...(19): siRNA sense strand
guacagaguaucuaagagu

SEQ ID NO: 2588989 - RNA, 19 nt, Homo sapiens
  misc_RNA (1)...(19): siRNA sense strand
cagaaggauuuguugggca

SEQ ID NO: 2588990 - RNA, 19 nt, Homo sapiens
  misc_RNA (1)...(19): siRNA sense strand
gaacaagcccuaaggcaac

SEQ ID NO: 2588991 - RNA, 19 nt, Homo sapiens
  misc_RNA (1)...(19): siRNA sense strand
acaagaucuaacaggacua

SEQ ID NO: 2588992 - RNA, 19 nt, Homo sapiens
  misc_RNA (1)...(19): siRNA sense strand
gcaacaaauggguauccaa

SEQ ID NO: 2588993 - RNA, 19 nt, Homo sapiens
  misc_RNA (1)...(19): siRNA sense strand
agauuauaguacacggcau

SEQ ID NO: 2588994 - RNA, 19 nt, Homo sapiens
  misc_RNA (1)...(19): siRNA sense strand
ucgucaaagaccuagcaaa

SEQ ID NO: 2588995 - RNA, 19 nt, Homo sapiens
  misc_RNA (1)...(19): siRNA sense strand
acagcacaguacagaguau

SEQ ID NO: 2588996 - RNA, 19 nt, Homo sapiens
  misc_RNA (1)...(19): siRNA sense strand
ugccagagagacagaagua

SEQ ID NO: 2588997 - RNA, 19 nt, Homo sapiens
  misc_RNA (1)...(19): siRNA sense strand
agagacagaaguacgaaau

SEQ ID NO: 2588998 - RNA, 19 nt, Homo sapiens
  misc_RNA (1)...(19): siRNA sense strand
uggaguuggaggacaguau

SEQ ID NO: 2588999 - RNA, 19 nt, Homo sapiens
  misc_RNA (1)...(19): siRNA sense strand
gggcaaaguggccuauaca

SEQ ID NO: 2589000 - RNA, 19 nt, Homo sapiens
  misc_RNA (1)...(19): siRNA sense strand
uuugauccauacugagaaa

SEQ ID NO: 2589001 - RNA, 19 nt, Homo sapiens
  misc_RNA (1)...(19): siRNA sense strand
ccuauacagaagcagauua

SEQ ID NO: 2589002 - RNA, 19 nt, Homo sapiens
  misc_RNA (1)...(19): siRNA sense strand
cccuaaggcaacuggauga

SEQ ID NO: 2589003 - RNA, 19 nt, Homo sapiens
  misc_RNA (1)...(19): siRNA sense strand
gaucagaaaacuacaccaa

SEQ ID NO: 2589004 - RNA, 19 nt, Homo sapiens
  misc_RNA (1)...(19): siRNA sense strand
uggacaagaauuucgaaga

SEQ ID NO: 2589005 - RNA, 19 nt, Homo sapiens
  misc_RNA (1)...(19): siRNA sense strand
auauuaaggcagaagagga

SEQ ID NO: 2589006 - RNA, 19 nt, Homo sapiens
  misc_RNA (1)...(19): siRNA sense strand
aggcgagauuucuaccaua

SEQ ID NO: 2589007 - RNA, 19 nt, Homo sapiens
  misc_RNA (1)...(19): siRNA sense strand
gaguggagugaguuggaga

SEQ ID NO: 2589008 - RNA, 19 nt, Homo sapiens
  misc_RNA (1)...(19): siRNA sense strand
gugacuucucugaaagauu

SEQ ID NO: 2589009 - RNA, 19 nt, Homo sapiens
  misc_RNA (1)...(19): siRNA sense strand
gauuauuaccauacggaac

SEQ ID NO: 2589010 - RNA, 19 nt, Homo sapiens
  misc_RNA (1)...(19): siRNA sense strand
aauacugaguggagugagu

SEQ ID NO: 2589011 - RNA, 19 nt, Homo sapiens
  misc_RNA (1)...(19): siRNA sense strand
cggaacuguggauggaaca

SEQ ID NO: 2589012 - RNA, 19 nt, Homo sapiens
  misc_RNA (1)...(19): siRNA sense strand
uuaaggcagaagaggacaa

SEQ ID NO: 2589013 - RNA, 19 nt, Homo sapiens
  misc_RNA (1)...(19): siRNA sense strand
gggacaggaaauagaauug

SEQ ID NO: 2589014 - RNA, 19 nt, Homo sapiens
  misc_RNA (1)...(19): siRNA sense strand
guggauggaacaagcccua

SEQ ID NO: 2589015 - RNA, 19 nt, Homo sapiens
  misc_RNA (1)...(19): siRNA sense strand
gugccuggcucucuggcua

SEQ ID NO: 2589016 - RNA, 19 nt, Homo sapiens
  misc_RNA (1)...(19): siRNA sense strand
ucuguuugccaguggagaa

SEQ ID NO: 2589017 - RNA, 19 nt, Homo sapiens
  misc_RNA (1)...(19): siRNA sense strand
acgacaagcuggagcggaa

SEQ ID NO: 2589018 - RNA, 19 nt, Homo sapiens
  misc_RNA (1)...(19): siRNA sense strand
uggaagacaucgugcgcaa

SEQ ID NO: 2589019 - RNA, 19 nt, Homo sapiens
  misc_RNA (1)...(19): siRNA sense strand
cugcaaaucauguggccua

SEQ ID NO: 2589020 - RNA, 19 nt, Homo sapiens
  misc_RNA (1)...(19): siRNA sense strand
auggaagagaggagacaaa

SEQ ID NO: 2589021 - RNA, 19 nt, Homo sapiens
  misc_RNA (1)...(19): siRNA sense strand
agaaaguaaccuuggaaaa

SEQ ID NO: 2589022 - RNA, 19 nt, Homo sapiens
  misc_RNA (1)...(19): siRNA sense strand
ccauagaugccaacggaga

SEQ ID NO: 2589023 - RNA, 19 nt, Homo sapiens
  misc_RNA (1)...(19): siRNA sense strand
gcaagaagaaaguaaccuu

SEQ ID NO: 2589024 - RNA, 19 nt, Homo sapiens
  misc_RNA (1)...(19): siRNA sense strand
aagaaaguaaccuuggaaa

SEQ ID NO: 2589025 - RNA, 19 nt, Homo sapiens
  misc_RNA (1)...(19): siRNA sense strand
ccaagaugggcgagaugau

SEQ ID NO: 2589026 - RNA, 19 nt, Homo sapiens
  misc_RNA (1)...(19): siRNA sense strand
cagaauaaccauugagagg

SEQ ID NO: 2589027 - RNA, 19 nt, Homo sapiens
  misc_RNA (1)...(19): siRNA sense strand
uauccaggccagugagaga

SEQ ID NO: 2589028 - RNA, 19 nt, Homo sapiens
  misc_RNA (1)...(19): siRNA sense strand
auauggaggauuacguuaa

SEQ ID NO: 2589029 - RNA, 19 nt, Homo sapiens
  misc_RNA (1)...(19): siRNA sense strand
cccagcaagaagaaaguaa

SEQ ID NO: 2589030 - RNA, 19 nt, Homo sapiens
  misc_RNA (1)...(19): siRNA sense strand
gagaauagaugaaaaccga

SEQ ID NO: 2589031 - RNA, 19 nt, Homo sapiens
  misc_RNA (1)...(19): siRNA sense strand
ggauucagacugugggaac

SEQ ID NO: 2589032 - RNA, 19 nt, Homo sapiens
  misc_RNA (1)...(19): siRNA sense strand
gaagaaaguaaccuuggaa

SEQ ID NO: 2589033 - RNA, 19 nt, Homo sapiens
  misc_RNA (1)...(19): siRNA sense strand
cagacuuggaacagaacau

SEQ ID NO: 2589034 - RNA, 19 nt, Homo sapiens
  misc_RNA (1)...(19): siRNA sense strand
ccaggagguuauuggugau

SEQ ID NO: 2589035 - RNA, 19 nt, Homo sapiens
  misc_RNA (1)...(19): siRNA sense strand
acuuggaucuggaagacau

SEQ ID NO: 2589036 - RNA, 19 nt, Homo sapiens
  misc_RNA (1)...(19): siRNA sense strand
auacagcagacuuggaaca

SEQ ID NO: 2589037 - RNA, 19 nt, Homo sapiens
  misc_RNA (1)...(19): siRNA sense strand
augccaacggagaccgaua

SEQ ID NO: 2589038 - RNA, 19 nt, Homo sapiens
  misc_RNA (1)...(19): siRNA sense strand
ccgugaaggcuuuggacuu

SEQ ID NO: 2589039 - RNA, 19 nt, Homo sapiens
  misc_RNA (1)...(19): siRNA sense strand
ccgaaauacaguucaggau

SEQ ID NO: 2589040 - RNA, 19 nt, Homo sapiens
  misc_RNA (1)...(19): siRNA sense strand
cgauacacaaagaugaaga

SEQ ID NO: 2589041 - RNA, 19 nt, Homo sapiens
  misc_RNA (1)...(19): siRNA sense strand
acacaaagaugaagacagc

SEQ ID NO: 2589042 - RNA, 19 nt, Homo sapiens
  misc_RNA (1)...(19): siRNA sense strand
ccugcuuaccugagggaca

SEQ ID NO: 2589043 - RNA, 19 nt, Homo sapiens
  misc_RNA (1)...(19): siRNA sense strand
agaugaggauggagcggca

SEQ ID NO: 2589044 - RNA, 19 nt, Homo sapiens
  misc_RNA (1)...(19): siRNA sense strand
ucgugggcuuggugggcaa

SEQ ID NO: 2589045 - RNA, 19 nt, Homo sapiens
  misc_RNA (1)...(19): siRNA sense strand
agaugaagacagcaaccaa

SEQ ID NO: 2589046 - RNA, 19 nt, Homo sapiens
  misc_RNA (1)...(19): siRNA sense strand
uggucauguucgugaucau

SEQ ID NO: 2589047 - RNA, 19 nt, Homo sapiens
  misc_RNA (1)...(19): siRNA sense strand
cggcagagcacuagcagag

SEQ ID NO: 2589048 - RNA, 19 nt, Homo sapiens
  misc_RNA (1)...(19): siRNA sense strand
aagcaaaggucucuggcua

SEQ ID NO: 2589049 - RNA, 19 nt, Homo sapiens
  misc_RNA (1)...(19): siRNA sense strand
agacaggagucaauggaga

SEQ ID NO: 2589050 - RNA, 19 nt, Homo sapiens
  misc_RNA (1)...(19): siRNA sense strand
gggccacagacaaagauau

SEQ ID NO: 2589051 - RNA, 19 nt, Homo sapiens
  misc_RNA (1)...(19): siRNA sense strand
ccacuggcacuucgggcaa

SEQ ID NO: 2589052 - RNA, 19 nt, Homo sapiens
  misc_RNA (1)...(19): siRNA sense strand
auguagaaaugaagggcaa

SEQ ID NO: 2589053 - RNA, 19 nt, Homo sapiens
  misc_RNA (1)...(19): siRNA sense strand
cagcauauuauaagggcaa

SEQ ID NO: 2589054 - RNA, 19 nt, Homo sapiens
  misc_RNA (1)...(19): siRNA sense strand
uggaggaacugguggagga

SEQ ID NO: 2589055 - RNA, 19 nt, Homo sapiens
  misc_RNA (1)...(19): siRNA sense strand
aaaugaagggcaaaggcaa

SEQ ID NO: 2589056 - RNA, 19 nt, Homo sapiens
  misc_RNA (1)...(19): siRNA sense strand
cccaagagcugguggcugu

SEQ ID NO: 2589057 - RNA, 19 nt, Homo sapiens
  misc_RNA (1)...(19): siRNA sense strand
agggagaacagcagcaaca

SEQ ID NO: 2589058 - RNA, 19 nt, Homo sapiens
  misc_RNA (1)...(19): siRNA sense strand
aggagaagcgcaaggcuga

SEQ ID NO: 2589059 - RNA, 19 nt, Homo sapiens
  misc_RNA (1)...(19): siRNA sense strand
ccuggauaucuuugggcaa

SEQ ID NO: 2589060 - RNA, 19 nt, Homo sapiens
  misc_RNA (1)...(19): siRNA sense strand
gcauggagcaguacgcgaa

SEQ ID NO: 2589061 - RNA, 19 nt, Homo sapiens
  misc_RNA (1)...(19): siRNA sense strand
gaguagcacccgaggcuga

SEQ ID NO: 2589062 - RNA, 19 nt, Homo sapiens
  misc_RNA (1)...(19): siRNA sense strand
gugcuggaguggugggacu

SEQ ID NO: 2589063 - RNA, 19 nt, Homo sapiens
  misc_RNA (1)...(19): siRNA sense strand
aguuaaaacaccuggccua

SEQ ID NO: 2589064 - RNA, 19 nt, Homo sapiens
  misc_RNA (1)...(19): siRNA sense strand
aggaagaugcagcuggaga

SEQ ID NO: 2589065 - RNA, 19 nt, Homo sapiens
  misc_RNA (1)...(19): siRNA sense strand
cuguuugaacugaagcaua

SEQ ID NO: 2589066 - RNA, 19 nt, Homo sapiens
  misc_RNA (1)...(19): siRNA sense strand
cgcaaauuuaacagggaga

SEQ ID NO: 2589067 - RNA, 19 nt, Homo sapiens
  misc_RNA (1)...(19): siRNA sense strand
cuggagaaugagagcauca

SEQ ID NO: 2589068 - RNA, 19 nt, Homo sapiens
  misc_RNA (1)...(19): siRNA sense strand
acgaagacccagcaugcaa

SEQ ID NO: 2589069 - RNA, 19 nt, Homo sapiens
  misc_RNA (1)...(19): siRNA sense strand
cagcggauguggaaccgaa

SEQ ID NO: 2589070 - RNA, 19 nt, Homo sapiens
  misc_RNA (1)...(19): siRNA sense strand
ccacagagggccaguucca

SEQ ID NO: 2589071 - RNA, 19 nt, Homo sapiens
  misc_RNA (1)...(19): siRNA sense strand
agacaauuggcgaugccua

SEQ ID NO: 2589072 - RNA, 19 nt, Homo sapiens
  misc_RNA (1)...(19): siRNA sense strand
ccguaaacgcauugagcug

SEQ ID NO: 2589073 - RNA, 19 nt, Homo sapiens
  misc_RNA (1)...(19): siRNA sense strand
gggaugugcagaaugaaca

SEQ ID NO: 2589074 - RNA, 19 nt, Homo sapiens
  misc_RNA (1)...(19): siRNA sense strand
cgguggaccucaaguggga

SEQ ID NO: 2589075 - RNA, 19 nt, Homo sapiens
  misc_RNA (1)...(19): siRNA sense strand
aggcugaggcccugcucua

SEQ ID NO: 2589076 - RNA, 19 nt, Homo sapiens
  misc_RNA (1)...(19): siRNA sense strand
gggcaaagccugcaaggug

SEQ ID NO: 2589077 - RNA, 19 nt, Homo sapiens
  misc_RNA (1)...(19): siRNA sense strand
guacugaacuacaauggga

SEQ ID NO: 2589078 - RNA, 19 nt, Homo sapiens
  misc_RNA (1)...(19): siRNA sense strand
cauccaacugcgugguaga

SEQ ID NO: 2589079 - RNA, 19 nt, Homo sapiens
  misc_RNA (1)...(19): siRNA sense strand
gaaaugaagggcaaaggca

SEQ ID NO: 2589080 - RNA, 19 nt, Homo sapiens
  misc_RNA (1)...(19): siRNA sense strand
cugccaaaaucauuacaua

SEQ ID NO: 2589081 - RNA, 19 nt, Homo sapiens
  misc_RNA (1)...(19): siRNA sense strand
ugacggagacucuggcaca

SEQ ID NO: 2589082 - RNA, 19 nt, Homo sapiens
  misc_RNA (1)...(19): siRNA sense strand
uagcaguggcgaucgggaa

SEQ ID NO: 2589083 - RNA, 19 nt, Homo sapiens
  misc_RNA (1)...(19): siRNA sense strand
gugggagccugcaggacau

SEQ ID NO: 2589084 - RNA, 19 nt, Homo sapiens
  misc_RNA (1)...(19): siRNA sense strand
agucaaagaaguugggaaa

SEQ ID NO: 2589085 - RNA, 19 nt, Homo sapiens
  misc_RNA (1)...(19): siRNA sense strand
gagaauaacuacauggaga

SEQ ID NO: 2589086 - RNA, 19 nt, Homo sapiens
  misc_RNA (1)...(19): siRNA sense strand
ccgcaaugcugguggagau

SEQ ID NO: 2589087 - RNA, 19 nt, Homo sapiens
  misc_RNA (1)...(19): siRNA sense strand
cuacaggauuggugcucaa

SEQ ID NO: 2589088 - RNA, 19 nt, Homo sapiens
  misc_RNA (1)...(19): siRNA sense strand
acaucaaagaacugaggaa

SEQ ID NO: 2589089 - RNA, 19 nt, Homo sapiens
  misc_RNA (1)...(19): siRNA sense strand
agagaggaccgaugagaau

SEQ ID NO: 2589090 - RNA, 19 nt, Homo sapiens
  misc_RNA (1)...(19): siRNA sense strand
uggaaugaauuuaggagca

SEQ ID NO: 2589091 - RNA, 19 nt, Homo sapiens
  misc_RNA (1)...(19): siRNA sense strand
ggguauuaaacaagaacca

SEQ ID NO: 2589092 - RNA, 19 nt, Homo sapiens
  misc_RNA (1)...(19): siRNA sense strand
caaaagaacccucggucaa

SEQ ID NO: 2589093 - RNA, 19 nt, Homo sapiens
  misc_RNA (1)...(19): siRNA sense strand
gggaaaguuaaaagggauu

SEQ ID NO: 2589094 - RNA, 19 nt, Homo sapiens
  misc_RNA (1)...(19): siRNA sense strand
aaacauacgaacagccaau

SEQ ID NO: 2589095 - RNA, 19 nt, Homo sapiens
  misc_RNA (1)...(19): siRNA sense strand
uuugaagaaaugaggacaa

SEQ ID NO: 2589096 - RNA, 19 nt, Homo sapiens
  misc_RNA (1)...(19): siRNA sense strand
uugaagaaaugaggacaaa

SEQ ID NO: 2589097 - RNA, 19 nt, Homo sapiens
  misc_RNA (1)...(19): siRNA sense strand
cagagaggaccgaugagaa

SEQ ID NO: 2589098 - RNA, 19 nt, Homo sapiens
  misc_RNA (1)...(19): siRNA sense strand
ggaggaaauagcaaaauaa

SEQ ID NO: 2589099 - RNA, 19 nt, Homo sapiens
  misc_RNA (1)...(19): siRNA sense strand
ccagaugacgggagcuauu

SEQ ID NO: 2589100 - RNA, 19 nt, Homo sapiens
  misc_RNA (1)...(19): siRNA sense strand
ccguuaaguagcaugaaau

SEQ ID NO: 2589101 - RNA, 19 nt, Homo sapiens
  misc_RNA (1)...(19): siRNA sense strand
gauuggugcucaagguaca

SEQ ID NO: 2589102 - RNA, 19 nt, Homo sapiens
  misc_RNA (1)...(19): siRNA sense strand
cuucaaaagagcaguggaa

SEQ ID NO: 2589103 - RNA, 19 nt, Homo sapiens
  misc_RNA (1)...(19): siRNA sense strand
uuacaaaggaaauggccau

SEQ ID NO: 2589104 - RNA, 19 nt, Homo sapiens
  misc_RNA (1)...(19): siRNA sense strand
agaaguugggaaaguuaaa

SEQ ID NO: 2589105 - RNA, 19 nt, Homo sapiens
  misc_RNA (1)...(19): siRNA sense strand
agaggaccgaugagaauaa

SEQ ID NO: 2589106 - RNA, 19 nt, Homo sapiens
  misc_RNA (1)...(19): siRNA sense strand
uggagaucguacaaacaua

SEQ ID NO: 2589107 - RNA, 19 nt, Homo sapiens
  misc_RNA (1)...(19): siRNA sense strand
ccuaugagcagcagaacca

SEQ ID NO: 2589108 - RNA, 19 nt, Homo sapiens
  misc_RNA (1)...(19): siRNA sense strand
aggaggaaauagcaaaaua

SEQ ID NO: 2589109 - RNA, 19 nt, Homo sapiens
  misc_RNA (1)...(19): siRNA sense strand
aucaaagaacugaggaaga

SEQ ID NO: 2589110 - RNA, 19 nt, Homo sapiens
  misc_RNA (1)...(19): siRNA sense strand
guauuaaacaagaaccaga

SEQ ID NO: 2589111 - RNA, 19 nt, Homo sapiens
  misc_RNA (1)...(19): siRNA sense strand
guccagacacgcaggagaa

SEQ ID NO: 2589112 - RNA, 19 nt, Homo sapiens
  misc_RNA (1)...(19): siRNA sense strand
uggaagggcaacacaacua

SEQ ID NO: 2589113 - RNA, 19 nt, Homo sapiens
  misc_RNA (1)...(19): siRNA sense strand
agaauaacuacauggagau

SEQ ID NO: 2589114 - RNA, 19 nt, Homo sapiens
  misc_RNA (1)...(19): siRNA sense strand
cuagaagaagugaugggua

SEQ ID NO: 2589115 - RNA, 19 nt, Homo sapiens
  misc_RNA (1)...(19): siRNA sense strand
uuuaugugcuggaagaaau

SEQ ID NO: 2589116 - RNA, 19 nt, Homo sapiens
  misc_RNA (1)...(19): siRNA sense strand
aagucaaagaaguugggaa

SEQ ID NO: 2589117 - RNA, 19 nt, Homo sapiens
  misc_RNA (1)...(19): siRNA sense strand
gguucuaccaacugaccaa

SEQ ID NO: 2589118 - RNA, 19 nt, Homo sapiens
  misc_RNA (1)...(19): siRNA sense strand
uagcugaguccauggguuu

SEQ ID NO: 2589119 - RNA, 19 nt, Homo sapiens
  misc_RNA (1)...(19): siRNA sense strand
guacauaaaaccagaacca

SEQ ID NO: 2589120 - RNA, 19 nt, Homo sapiens
  misc_RNA (1)...(19): siRNA sense strand
ucaaggaagcagcaaagaa

SEQ ID NO: 2589121 - RNA, 19 nt, Homo sapiens
  misc_RNA (1)...(19): siRNA sense strand
accaauaaagcaagaauca

SEQ ID NO: 2589122 - RNA, 19 nt, Homo sapiens
  misc_RNA (1)...(19): siRNA sense strand
ccguuaugguccuugaaaa

SEQ ID NO: 2589123 - RNA, 19 nt, Homo sapiens
  misc_RNA (1)...(19): siRNA sense strand
caacaguacucaaggaagc

SEQ ID NO: 2589124 - RNA, 19 nt, Homo sapiens
  misc_RNA (1)...(19): siRNA sense strand
ucuaaggaacuuucagcaa

SEQ ID NO: 2589125 - RNA, 19 nt, Homo sapiens
  misc_RNA (1)...(19): siRNA sense strand
cuguaagagaugcugacua

SEQ ID NO: 2589126 - RNA, 19 nt, Homo sapiens
  misc_RNA (1)...(19): siRNA sense strand
caauaaagcaagaaucaac

SEQ ID NO: 2589127 - RNA, 19 nt, Homo sapiens
  misc_RNA (1)...(19): siRNA sense strand
cccgcaaagcccagaggaa

SEQ ID NO: 2589128 - RNA, 19 nt, Homo sapiens
  misc_RNA (1)...(19): siRNA sense strand
gcaggagaaaggugcucaa

SEQ ID NO: 2589129 - RNA, 19 nt, Homo sapiens
  misc_RNA (1)...(19): siRNA sense strand
ucuaggaggaaauagcaaa

SEQ ID NO: 2589130 - RNA, 19 nt, Homo sapiens
  misc_RNA (1)...(19): siRNA sense strand
cacgaaagucaaagaaguu

SEQ ID NO: 2589131 - RNA, 19 nt, Homo sapiens
  misc_RNA (1)...(19): siRNA sense strand
augaagagaagaugcauca

SEQ ID NO: 2589132 - RNA, 19 nt, Homo sapiens
  misc_RNA (1)...(19): siRNA sense strand
guaccaauaaagcaagaau

SEQ ID NO: 2589133 - RNA, 19 nt, Homo sapiens
  misc_RNA (1)...(19): siRNA sense strand
aagcacaauuccaaaggau

SEQ ID NO: 2589134 - RNA, 19 nt, Homo sapiens
  misc_RNA (1)...(19): siRNA sense strand
gaggaagggacaacguaca

SEQ ID NO: 2589135 - RNA, 19 nt, Homo sapiens
  misc_RNA (1)...(19): siRNA sense strand
gguacuuccaggauuuaaa

SEQ ID NO: 2589136 - RNA, 19 nt, Homo sapiens
  misc_RNA (1)...(19): siRNA sense strand
caauaaugucacucugaga

SEQ ID NO: 2589137 - RNA, 19 nt, Homo sapiens
  misc_RNA (1)...(19): siRNA sense strand
gaaaggugcucaagagguc

SEQ ID NO: 2589138 - RNA, 19 nt, Homo sapiens
  misc_RNA (1)...(19): siRNA sense strand
uuaguggagucauggaaau

SEQ ID NO: 2589139 - RNA, 19 nt, Homo sapiens
  misc_RNA (1)...(19): siRNA sense strand
aauuguauaugcaggcuau

SEQ ID NO: 2589140 - RNA, 19 nt, Homo sapiens
  misc_RNA (1)...(19): siRNA sense strand
caaugcugguggagaucau

SEQ ID NO: 2589141 - RNA, 19 nt, Homo sapiens
  misc_RNA (1)...(19): siRNA sense strand
gccuucagcaagacaauaa

SEQ ID NO: 2589142 - RNA, 19 nt, Homo sapiens
  misc_RNA (1)...(19): siRNA sense strand
cugaggaaguagagagugc

SEQ ID NO: 2589143 - RNA, 19 nt, Homo sapiens
  misc_RNA (1)...(19): siRNA sense strand
ccaauaaagcaagaaucaa

SEQ ID NO: 2589144 - RNA, 19 nt, Homo sapiens
  misc_RNA (1)...(19): siRNA sense strand
gcucaagguacaauaucuu

SEQ ID NO: 2589145 - RNA, 19 nt, Homo sapiens
  misc_RNA (1)...(19): siRNA sense strand
cugcaaaguuuucuucaaa

SEQ ID NO: 2589146 - RNA, 19 nt, Homo sapiens
  misc_RNA (1)...(19): siRNA sense strand
agguacaggaugaggagaa

SEQ ID NO: 2589147 - RNA, 19 nt, Homo sapiens
  misc_RNA (1)...(19): siRNA sense strand
gcccagauauuguggcuga

SEQ ID NO: 2589148 - RNA, 19 nt, Homo sapiens
  misc_RNA (1)...(19): siRNA sense strand
ccuggaaggauggaagaaa

SEQ ID NO: 2589149 - RNA, 19 nt, Homo sapiens
  misc_RNA (1)...(19): siRNA sense strand
aaacaagaaauuuggccuu

SEQ ID NO: 2589150 - RNA, 19 nt, Homo sapiens
  misc_RNA (1)...(19): siRNA sense strand
gaguaagaaggcagugcuu

SEQ ID NO: 2589151 - RNA, 19 nt, Homo sapiens
  misc_RNA (1)...(19): siRNA sense strand
cuggaaggauggaagaaac

SEQ ID NO: 2589152 - RNA, 19 nt, Homo sapiens
  misc_RNA (1)...(19): siRNA sense strand
uggaagaaacgccuggaga

SEQ ID NO: 2589153 - RNA, 19 nt, Homo sapiens
  misc_RNA (1)...(19): siRNA sense strand
acauauagcauugggcaca

SEQ ID NO: 2589154 - RNA, 19 nt, Homo sapiens
  misc_RNA (1)...(19): siRNA sense strand
caaccagaucaaagcuaga

SEQ ID NO: 2589155 - RNA, 19 nt, Homo sapiens
  misc_RNA (1)...(19): siRNA sense strand
cggugaauguacagauaau

SEQ ID NO: 2589156 - RNA, 19 nt, Homo sapiens
  misc_RNA (1)...(19): siRNA sense strand
ucacaaagcuuaaugcaga

SEQ ID NO: 2589157 - RNA, 19 nt, Homo sapiens
  misc_RNA (1)...(19): siRNA sense strand
aaucacaguccgaggaaau

SEQ ID NO: 2589158 - RNA, 19 nt, Homo sapiens
  misc_RNA (1)...(19): siRNA sense strand
agcuuaaugcagagaauaa

SEQ ID NO: 2589159 - RNA, 19 nt, Homo sapiens
  misc_RNA (1)...(19): siRNA sense strand
ccgaaagcugugagaccaa

SEQ ID NO: 2589160 - RNA, 19 nt, Homo sapiens
  misc_RNA (1)...(19): siRNA sense strand
ccgcauaacugaagccacu

SEQ ID NO: 2589161 - RNA, 19 nt, Homo sapiens
  misc_RNA (1)...(19): siRNA sense strand
ccuucaaguacgaaaucaa

SEQ ID NO: 2589162 - RNA, 19 nt, Homo sapiens
  misc_RNA (1)...(19): siRNA sense strand
agucaaaaccaaaguaaca

SEQ ID NO: 2589163 - RNA, 19 nt, Homo sapiens
  misc_RNA (1)...(19): siRNA sense strand
aaagcuuaaugcagagaau

SEQ ID NO: 2589164 - RNA, 19 nt, Homo sapiens
  misc_RNA (1)...(19): siRNA sense strand
aguacaaggaugcugcaaa

SEQ ID NO: 2589165 - RNA, 19 nt, Homo sapiens
  misc_RNA (1)...(19): siRNA sense strand
acgaauaggggaaauaaaa

SEQ ID NO: 2589166 - RNA, 19 nt, Homo sapiens
  misc_RNA (1)...(19): siRNA sense strand
cugcaagucccuuuggaau

SEQ ID NO: 2589167 - RNA, 19 nt, Homo sapiens
  misc_RNA (1)...(19): siRNA sense strand
guaaugaagaguugaccga

SEQ ID NO: 2589168 - RNA, 19 nt, Homo sapiens
  misc_RNA (1)...(19): siRNA sense strand
cugcaaugacaaggauuua

SEQ ID NO: 2589169 - RNA, 19 nt, Homo sapiens
  misc_RNA (1)...(19): siRNA sense strand
ugacauuuauccagggaag

SEQ ID NO: 2589170 - RNA, 19 nt, Homo sapiens
  misc_RNA (1)...(19): siRNA sense strand
agggaaggauuuuguacaa

SEQ ID NO: 2589171 - RNA, 19 nt, Homo sapiens
  misc_RNA (1)...(19): siRNA sense strand
gugcaaacgaauuguucca

SEQ ID NO: 2589172 - RNA, 19 nt, Homo sapiens
  misc_RNA (1)...(19): siRNA sense strand
aggaaaguaaugaagaguu

SEQ ID NO: 2589173 - RNA, 19 nt, Homo sapiens
  misc_RNA (1)...(19): siRNA sense strand
gaaugaucucacugaugaa

SEQ ID NO: 2589174 - RNA, 19 nt, Homo sapiens
  misc_RNA (1)...(19): siRNA sense strand
ugugguacccugggagaaa

SEQ ID NO: 2589175 - RNA, 19 nt, Homo sapiens
  misc_RNA (1)...(19): siRNA sense strand
cgaaauucuccguggcuac

SEQ ID NO: 2589176 - RNA, 19 nt, Homo sapiens
  misc_RNA (1)...(19): siRNA sense strand
ggcaggacugugaguacaa

SEQ ID NO: 2589177 - RNA, 19 nt, Homo sapiens
  misc_RNA (1)...(19): siRNA sense strand
acaccaucacaaagcuuaa

SEQ ID NO: 2589178 - RNA, 19 nt, Homo sapiens
  misc_RNA (1)...(19): siRNA sense strand
acugcaaugacaaggauuu

SEQ ID NO: 2589179 - RNA, 19 nt, Homo sapiens
  misc_RNA (1)...(19): siRNA sense strand
gcucuaagccuguccacga

SEQ ID NO: 2589180 - RNA, 19 nt, Homo sapiens
  misc_RNA (1)...(19): siRNA sense strand
caagagaggauccgagaac

SEQ ID NO: 2589181 - RNA, 19 nt, Homo sapiens
  misc_RNA (1)...(19): siRNA sense strand
aagaaggagaggagggaaa

SEQ ID NO: 2589182 - RNA, 19 nt, Homo sapiens
  misc_RNA (1)...(19): siRNA sense strand
ucauaaacuuugagugcaa

SEQ ID NO: 2589183 - RNA, 19 nt, Homo sapiens
  misc_RNA (1)...(19): siRNA sense strand
ccaugaaagagaaaggaaa

SEQ ID NO: 2589184 - RNA, 19 nt, Homo sapiens
  misc_RNA (1)...(19): siRNA sense strand
agucaaagcagcaggaaga

SEQ ID NO: 2589185 - RNA, 19 nt, Homo sapiens
  misc_RNA (1)...(19): siRNA sense strand
gcggaaaggauaagaccaa

SEQ ID NO: 2589186 - RNA, 19 nt, Homo sapiens
  misc_RNA (1)...(19): siRNA sense strand
gaauaaggaagaagagaca

SEQ ID NO: 2589187 - RNA, 19 nt, Homo sapiens
  misc_RNA (1)...(19): siRNA sense strand
ugagaaacgcacagagcaa

SEQ ID NO: 2589188 - RNA, 19 nt, Homo sapiens
  misc_RNA (1)...(19): siRNA sense strand
caacagaaugugugcacua

SEQ ID NO: 2589189 - RNA, 19 nt, Homo sapiens
  misc_RNA (1)...(19): siRNA sense strand
ggaacuugggucugaguaa

SEQ ID NO: 2589190 - RNA, 19 nt, Homo sapiens
  misc_RNA (1)...(19): siRNA sense strand
augcagaaccagagcagaa

SEQ ID NO: 2589191 - RNA, 19 nt, Homo sapiens
  misc_RNA (1)...(19): siRNA sense strand
cagcaaggccagucggaau

SEQ ID NO: 2589192 - RNA, 19 nt, Homo sapiens
  misc_RNA (1)...(19): siRNA sense strand
guguuaaggagaaggaaga

SEQ ID NO: 2589193 - RNA, 19 nt, Homo sapiens
  misc_RNA (1)...(19): siRNA sense strand
ugaaauacguugauggcga

SEQ ID NO: 2589194 - RNA, 19 nt, Homo sapiens
  misc_RNA (1)...(19): siRNA sense strand
ggucauggcaagaaaauua

SEQ ID NO: 2589195 - RNA, 19 nt, Homo sapiens
  misc_RNA (1)...(19): siRNA sense strand
acaaauacucaaaggugaa

SEQ ID NO: 2589196 - RNA, 19 nt, Homo sapiens
  misc_RNA (1)...(19): siRNA sense strand
uggcauaauuguccugaaa

SEQ ID NO: 2589197 - RNA, 19 nt, Homo sapiens
  misc_RNA (1)...(19): siRNA sense strand
gugcaaauucguccagaaa

SEQ ID NO: 2589198 - RNA, 19 nt, Homo sapiens
  misc_RNA (1)...(19): siRNA sense strand
aagaagagacagaugagaa

SEQ ID NO: 2589199 - RNA, 19 nt, Homo sapiens
  misc_RNA (1)...(19): siRNA sense strand
gcuuagugucagaaggcaa

SEQ ID NO: 2589200 - RNA, 19 nt, Homo sapiens
  misc_RNA (1)...(19): siRNA sense strand
gugaugaagaugaggacau

SEQ ID NO: 2589201 - RNA, 19 nt, Homo sapiens
  misc_RNA (1)...(19): siRNA sense strand
gcucccacccagugagaaa

SEQ ID NO: 2589202 - RNA, 19 nt, Homo sapiens
  misc_RNA (1)...(19): siRNA sense strand
gggcaagggauccgaaaca

SEQ ID NO: 2589203 - RNA, 19 nt, Homo sapiens
  misc_RNA (1)...(19): siRNA sense strand
agaagagacagaugagaau

SEQ ID NO: 2589204 - RNA, 19 nt, Homo sapiens
  misc_RNA (1)...(19): siRNA sense strand
cggacaagcauuucaacua

SEQ ID NO: 2589205 - RNA, 19 nt, Homo sapiens
  misc_RNA (1)...(19): siRNA sense strand
gggacaacugugaggugaa

SEQ ID NO: 2589206 - RNA, 19 nt, Homo sapiens
  misc_RNA (1)...(19): siRNA sense strand
ggugaaagacccaaggcau

SEQ ID NO: 2589207 - RNA, 19 nt, Homo sapiens
  misc_RNA (1)...(19): siRNA sense strand
gaggagggaaacagugaua

SEQ ID NO: 2589208 - RNA, 19 nt, Homo sapiens
  misc_RNA (1)...(19): siRNA sense strand
cuguggagaaacugaaaua

SEQ ID NO: 2589209 - RNA, 19 nt, Homo sapiens
  misc_RNA (1)...(19): siRNA sense strand
gcaauaaaaccgcagguaa

SEQ ID NO: 2589210 - RNA, 19 nt, Homo sapiens
  misc_RNA (1)...(19): siRNA sense strand
auucagacaacgacggaua

SEQ ID NO: 2589211 - RNA, 19 nt, Homo sapiens
  misc_RNA (1)...(19): siRNA sense strand
cuauaaauggcaagagcuu

SEQ ID NO: 2589212 - RNA, 19 nt, Homo sapiens
  misc_RNA (1)...(19): siRNA sense strand
gugccuacuugguggauga

SEQ ID NO: 2589213 - RNA, 19 nt, Homo sapiens
  misc_RNA (1)...(19): siRNA sense strand
aggcuuaugaugagaguga

SEQ ID NO: 2589214 - RNA, 19 nt, Homo sapiens
  misc_RNA (1)...(19): siRNA sense strand
gggcuuugacagcgagaau

SEQ ID NO: 2589215 - RNA, 19 nt, Homo sapiens
  misc_RNA (1)...(19): siRNA sense strand
cagugugugcaguggauaa

SEQ ID NO: 2589216 - RNA, 19 nt, Homo sapiens
  misc_RNA (1)...(19): siRNA sense strand
gcgagaagggguugguuua

SEQ ID NO: 2589217 - RNA, 19 nt, Homo sapiens
  misc_RNA (1)...(19): siRNA sense strand
uccaauagcaaaugagauu

SEQ ID NO: 2589218 - RNA, 19 nt, Homo sapiens
  misc_RNA (1)...(19): siRNA sense strand
gcaucauauuuaaguguga

SEQ ID NO: 2589219 - RNA, 19 nt, Homo sapiens
  misc_RNA (1)...(19): siRNA sense strand
guacaaagacggugggcag

SEQ ID NO: 2589220 - RNA, 19 nt, Homo sapiens
  misc_RNA (1)...(19): siRNA sense strand
ccaacguguccuacaaaua

SEQ ID NO: 2589221 - RNA, 19 nt, Homo sapiens
  misc_RNA (1)...(19): siRNA sense strand
gcucaggguuucagcggau

SEQ ID NO: 2589222 - RNA, 19 nt, Homo sapiens
  misc_RNA (1)...(19): siRNA sense strand
ccuauaacaaugaaagaca

SEQ ID NO: 2589223 - RNA, 19 nt, Homo sapiens
  misc_RNA (1)...(19): siRNA sense strand
cugacaagaccaaguacua

SEQ ID NO: 2589224 - RNA, 19 nt, Homo sapiens
  misc_RNA (1)...(19): siRNA sense strand
gcuauguguuugaugaaga

SEQ ID NO: 2589225 - RNA, 19 nt, Homo sapiens
  misc_RNA (1)...(19): siRNA sense strand
cuaaaggagacuucagauu

SEQ ID NO: 2589226 - RNA, 19 nt, Homo sapiens
  misc_RNA (1)...(19): siRNA sense strand
ucuaagugcggaaaggaua

SEQ ID NO: 2589227 - RNA, 19 nt, Homo sapiens
  misc_RNA (1)...(19): siRNA sense strand
gagacagaugagaaugaaa

SEQ ID NO: 2589228 - RNA, 19 nt, Homo sapiens
  misc_RNA (1)...(19): siRNA sense strand
gggaugaccaggacaguga

SEQ ID NO: 2589229 - RNA, 19 nt, Homo sapiens
  misc_RNA (1)...(19): siRNA sense strand
ggugagaaggcgaggaaag

SEQ ID NO: 2589230 - RNA, 19 nt, Homo sapiens
  misc_RNA (1)...(19): siRNA sense strand
guaagagaggugugagcau

SEQ ID NO: 2589231 - RNA, 19 nt, Homo sapiens
  misc_RNA (1)...(19): siRNA sense strand
gaugagaagacuuggaacu

SEQ ID NO: 2589232 - RNA, 19 nt, Homo sapiens
  misc_RNA (1)...(19): siRNA sense strand
gaacaugucacguggagga

SEQ ID NO: 2589233 - RNA, 19 nt, Homo sapiens
  misc_RNA (1)...(19): siRNA sense strand
caucaauauuugucagcca

SEQ ID NO: 2589234 - RNA, 19 nt, Homo sapiens
  misc_RNA (1)...(19): siRNA sense strand
acucaauccaauagcaaau

SEQ ID NO: 2589235 - RNA, 19 nt, Homo sapiens
  misc_RNA (1)...(19): siRNA sense strand
cuaagugcggaaaggauaa

SEQ ID NO: 2589236 - RNA, 19 nt, Homo sapiens
  misc_RNA (1)...(19): siRNA sense strand
ggaggaaacugguaugcca

SEQ ID NO: 2589237 - RNA, 19 nt, Homo sapiens
  misc_RNA (1)...(19): siRNA sense strand
ccacaagugacaaguccaa

SEQ ID NO: 2589238 - RNA, 19 nt, Homo sapiens
  misc_RNA (1)...(19): siRNA sense strand
auaaggaagaagagacaga

SEQ ID NO: 2589239 - RNA, 19 nt, Homo sapiens
  misc_RNA (1)...(19): siRNA sense strand
ggacagugaggaugagguu

SEQ ID NO: 2589240 - RNA, 19 nt, Homo sapiens
  misc_RNA (1)...(19): siRNA sense strand
uugaugaagaguugaggaa

SEQ ID NO: 2589241 - RNA, 19 nt, Homo sapiens
  misc_RNA (1)...(19): siRNA sense strand
aaguugagacaaagaagua

SEQ ID NO: 2589242 - RNA, 19 nt, Homo sapiens
  misc_RNA (1)...(19): siRNA sense strand
caugucacguggaggaaau

SEQ ID NO: 2589243 - RNA, 19 nt, Homo sapiens
  misc_RNA (1)...(19): siRNA sense strand
guaacuugggaauggcaaa

SEQ ID NO: 2589244 - RNA, 19 nt, Homo sapiens
  misc_RNA (1)...(19): siRNA sense strand
agauaucgacucugggcaa

SEQ ID NO: 2589245 - RNA, 19 nt, Homo sapiens
  misc_RNA (1)...(19): siRNA sense strand
gcagaagcugggugucaua

SEQ ID NO: 2589246 - RNA, 19 nt, Homo sapiens
  misc_RNA (1)...(19): siRNA sense strand
uugaaugucuguggagaaa

SEQ ID NO: 2589247 - RNA, 19 nt, Homo sapiens
  misc_RNA (1)...(19): siRNA sense strand
ccacauauaccacgaggau

SEQ ID NO: 2589248 - RNA, 19 nt, Homo sapiens
  misc_RNA (1)...(19): siRNA sense strand
cgaauggaucuuugagcau

SEQ ID NO: 2589249 - RNA, 19 nt, Homo sapiens
  misc_RNA (1)...(19): siRNA sense strand
ucacguacuccaaagguua

SEQ ID NO: 2589250 - RNA, 19 nt, Homo sapiens
  misc_RNA (1)...(19): siRNA sense strand
caaaggugaauaaggaaga

SEQ ID NO: 2589251 - RNA, 19 nt, Homo sapiens
  misc_RNA (1)...(19): siRNA sense strand
ggaaaggaagggcaggaga

SEQ ID NO: 2589252 - RNA, 19 nt, Homo sapiens
  misc_RNA (1)...(19): siRNA sense strand
gcacagcagaagacaguga

SEQ ID NO: 2589253 - RNA, 19 nt, Homo sapiens
  misc_RNA (1)...(19): siRNA sense strand
guggagaaacugaaauaca

SEQ ID NO: 2589254 - RNA, 19 nt, Homo sapiens
  misc_RNA (1)...(19): siRNA sense strand
ccagaugggauucggaaaa

SEQ ID NO: 2589255 - RNA, 19 nt, Homo sapiens
  misc_RNA (1)...(19): siRNA sense strand
aggaugagguucugaccau

SEQ ID NO: 2589256 - RNA, 19 nt, Homo sapiens
  misc_RNA (1)...(19): siRNA sense strand
acuuauaaacacagggaaa

SEQ ID NO: 2589257 - RNA, 19 nt, Homo sapiens
  misc_RNA (1)...(19): siRNA sense strand
caguguaggcagacagaaa

SEQ ID NO: 2589258 - RNA, 19 nt, Homo sapiens
  misc_RNA (1)...(19): siRNA sense strand
uggccaagcccgagaagaa

SEQ ID NO: 2589259 - RNA, 19 nt, Homo sapiens
  misc_RNA (1)...(19): siRNA sense strand
ucguaaagaaguugccaaa

SEQ ID NO: 2589260 - RNA, 19 nt, Homo sapiens
  misc_RNA (1)...(19): siRNA sense strand
uggacaacucauugauaaa

SEQ ID NO: 2589261 - RNA, 19 nt, Homo sapiens
  misc_RNA (1)...(19): siRNA sense strand
ccacacugcgagagaagaa

SEQ ID NO: 2589262 - RNA, 19 nt, Homo sapiens
  misc_RNA (1)...(19): siRNA sense strand
caugaaagugggagacaca

SEQ ID NO: 2589263 - RNA, 19 nt, Homo sapiens
  misc_RNA (1)...(19): siRNA sense strand
agguggaacuggaaguauu

SEQ ID NO: 2589264 - RNA, 19 nt, Homo sapiens
  misc_RNA (1)...(19): siRNA sense strand
gagagaagaagcaggcaca

SEQ ID NO: 2589265 - RNA, 19 nt, Homo sapiens
  misc_RNA (1)...(19): siRNA sense strand
ccuuauugccagugugaca

SEQ ID NO: 2589266 - RNA, 19 nt, Homo sapiens
  misc_RNA (1)...(19): siRNA sense strand
cgcuguaacccaagaacaa

SEQ ID NO: 2589267 - RNA, 19 nt, Homo sapiens
  misc_RNA (1)...(19): siRNA sense strand
aggacuacccgguggauuu

SEQ ID NO: 2589268 - RNA, 19 nt, Homo sapiens
  misc_RNA (1)...(19): siRNA sense strand
cuacagauaaugaggggaa

SEQ ID NO: 2589269 - RNA, 19 nt, Homo sapiens
  misc_RNA (1)...(19): siRNA sense strand
cgacugugacuguggugaa

SEQ ID NO: 2589270 - RNA, 19 nt, Homo sapiens
  misc_RNA (1)...(19): siRNA sense strand
ccaaaugucaccacgggaa

SEQ ID NO: 2589271 - RNA, 19 nt, Homo sapiens
  misc_RNA (1)...(19): siRNA sense strand
acuuauuccuggagcuaca

SEQ ID NO: 2589272 - RNA, 19 nt, Homo sapiens
  misc_RNA (1)...(19): siRNA sense strand
ggaaguauuaggagacacu

SEQ ID NO: 2589273 - RNA, 19 nt, Homo sapiens
  misc_RNA (1)...(19): siRNA sense strand
caucagugaagaagaagau

SEQ ID NO: 2589274 - RNA, 19 nt, Homo sapiens
  misc_RNA (1)...(19): siRNA sense strand
ugucuaaauuaaccagcaa

SEQ ID NO: 2589275 - RNA, 19 nt, Homo sapiens
  misc_RNA (1)...(19): siRNA sense strand
uggaauggacagcaaacua

SEQ ID NO: 2589276 - RNA, 19 nt, Homo sapiens
  misc_RNA (1)...(19): siRNA sense strand
aaugaauacuccaugucaa

SEQ ID NO: 2589277 - RNA, 19 nt, Homo sapiens
  misc_RNA (1)...(19): siRNA sense strand
ggucugagguggaacugga

SEQ ID NO: 2589278 - RNA, 19 nt, Homo sapiens
  misc_RNA (1)...(19): siRNA sense strand
agguggauuugaugcaauu

SEQ ID NO: 2589279 - RNA, 19 nt, Homo sapiens
  misc_RNA (1)...(19): siRNA sense strand
gacaauuucuccugcguga

SEQ ID NO: 2589280 - RNA, 19 nt, Homo sapiens
  misc_RNA (1)...(19): siRNA sense strand
uugccaaauuugaagcaga

SEQ ID NO: 2589281 - RNA, 19 nt, Homo sapiens
  misc_RNA (1)...(19): siRNA sense strand
caaauuugaagcagaacga

SEQ ID NO: 2589282 - RNA, 19 nt, Homo sapiens
  misc_RNA (1)...(19): siRNA sense strand
ggacuguguuuguggcaag

SEQ ID NO: 2589283 - RNA, 19 nt, Homo sapiens
  misc_RNA (1)...(19): siRNA sense strand
gucagaaagaaguggaagu

SEQ ID NO: 2589284 - RNA, 19 nt, Homo sapiens
  misc_RNA (1)...(19): siRNA sense strand
acagcaaacuagcaggcau

SEQ ID NO: 2589285 - RNA, 19 nt, Homo sapiens
  misc_RNA (1)...(19): siRNA sense strand
ucaugaucguaaagaaguu

SEQ ID NO: 2589286 - RNA, 19 nt, Homo sapiens
  misc_RNA (1)...(19): siRNA sense strand
guuuguggcaaguguguuu

SEQ ID NO: 2589287 - RNA, 19 nt, Homo sapiens
  misc_RNA (1)...(19): siRNA sense strand
ccaucagugaagaagaaga

SEQ ID NO: 2589288 - RNA, 19 nt, Homo sapiens
  misc_RNA (1)...(19): siRNA sense strand
cagcaaacuagcaggcauc

SEQ ID NO: 2589289 - RNA, 19 nt, Homo sapiens
  misc_RNA (1)...(19): siRNA sense strand
agaaaugcucucacaugaa

SEQ ID NO: 2589290 - RNA, 19 nt, Homo sapiens
  misc_RNA (1)...(19): siRNA sense strand
gugaagacugccugcuuau

SEQ ID NO: 2589291 - RNA, 19 nt, Homo sapiens
  misc_RNA (1)...(19): siRNA sense strand
caaacuagcuggugcgacc

SEQ ID NO: 2589292 - RNA, 19 nt, Homo sapiens
  misc_RNA (1)...(19): siRNA sense strand
uuuccaaagagaugucuaa

SEQ ID NO: 2589293 - RNA, 19 nt, Homo sapiens
  misc_RNA (1)...(19): siRNA sense strand
cuuccaacaccaaaagaaa

SEQ ID NO: 2589294 - RNA, 19 nt, Homo sapiens
  misc_RNA (1)...(19): siRNA sense strand
ccagaaugcaacugcgacu

SEQ ID NO: 2589295 - RNA, 19 nt, Homo sapiens
  misc_RNA (1)...(19): siRNA sense strand
cgagaagaauguguggaca

SEQ ID NO: 2589296 - RNA, 19 nt, Homo sapiens
  misc_RNA (1)...(19): siRNA sense strand
cgaccaucagugaagaaga

SEQ ID NO: 2589297 - RNA, 19 nt, Homo sapiens
  misc_RNA (1)...(19): siRNA sense strand
gagaagagcccgagggaca

SEQ ID NO: 2589298 - RNA, 19 nt, Homo sapiens
  misc_RNA (1)...(19): siRNA sense strand
ucaacguggaugagaagaa

SEQ ID NO: 2589299 - RNA, 19 nt, Homo sapiens
  misc_RNA (1)...(19): siRNA sense strand
cgggaguucagcauggaaa

SEQ ID NO: 2589300 - RNA, 19 nt, Homo sapiens
  misc_RNA (1)...(19): siRNA sense strand
ccaaauaucccguacgugu

SEQ ID NO: 2589301 - RNA, 19 nt, Homo sapiens
  misc_RNA (1)...(19): siRNA sense strand
ucauggacaucgugggcuu

SEQ ID NO: 2589302 - RNA, 19 nt, Homo sapiens
  misc_RNA (1)...(19): siRNA sense strand
aguggaacccugaggacuu

SEQ ID NO: 2589303 - RNA, 19 nt, Homo sapiens
  misc_RNA (1)...(19): siRNA sense strand
ggaaaccacugcagccaca

SEQ ID NO: 2589304 - RNA, 19 nt, Homo sapiens
  misc_RNA (1)...(19): siRNA sense strand
uuacacuccuccugggcua

SEQ ID NO: 2589305 - RNA, 19 nt, Homo sapiens
  misc_RNA (1)...(19): siRNA sense strand
acuacuaugcagaaaugaa

SEQ ID NO: 2589306 - RNA, 19 nt, Homo sapiens
  misc_RNA (1)...(19): siRNA sense strand
ggacucagacgcaggcuca

SEQ ID NO: 2589307 - RNA, 19 nt, Homo sapiens
  misc_RNA (1)...(19): siRNA sense strand
uugcaaaggaggaggugaa

SEQ ID NO: 2589308 - RNA, 19 nt, Homo sapiens
  misc_RNA (1)...(19): siRNA sense strand
guguauauugugagagaga

SEQ ID NO: 2589309 - RNA, 19 nt, Homo sapiens
  misc_RNA (1)...(19): siRNA sense strand
uuuggagaguggugagaaa

SEQ ID NO: 2589310 - RNA, 19 nt, Homo sapiens
  misc_RNA (1)...(19): siRNA sense strand
agguacaagagaacggaaa

SEQ ID NO: 2589311 - RNA, 19 nt, Homo sapiens
  misc_RNA (1)...(19): siRNA sense strand
gcaaagacauuauaccaca

SEQ ID NO: 2589312 - RNA, 19 nt, Homo sapiens
  misc_RNA (1)...(19): siRNA sense strand
auauagagcagcaaagaca

SEQ ID NO: 2589313 - RNA, 19 nt, Homo sapiens
  misc_RNA (1)...(19): siRNA sense strand
gcaaaagaucucagguaca

SEQ ID NO: 2589314 - RNA, 19 nt, Homo sapiens
  misc_RNA (1)...(19): siRNA sense strand
aaaucuuggagaaggcaaa

SEQ ID NO: 2589315 - RNA, 19 nt, Homo sapiens
  misc_RNA (1)...(19): siRNA sense strand
uuguguauauugugagaga

SEQ ID NO: 2589316 - RNA, 19 nt, Homo sapiens
  misc_RNA (1)...(19): siRNA sense strand
caaaauauauagagcagca

SEQ ID NO: 2589317 - RNA, 19 nt, Homo sapiens
  misc_RNA (1)...(19): siRNA sense strand
gggcaaguggucugugaca

SEQ ID NO: 2589318 - RNA, 19 nt, Homo sapiens
  misc_RNA (1)...(19): siRNA sense strand
gcaccaaggaacuagcaga

SEQ ID NO: 2589319 - RNA, 19 nt, Homo sapiens
  misc_RNA (1)...(19): siRNA sense strand
aggcaaaagaucucaggua

SEQ ID NO: 2589320 - RNA, 19 nt, Homo sapiens
  misc_RNA (1)...(19): siRNA sense strand
aggaggaggugaauggcca

SEQ ID NO: 2589321 - RNA, 19 nt, Homo sapiens
  misc_RNA (1)...(19): siRNA sense strand
aauucaagcaugagaaauc

SEQ ID NO: 2589322 - RNA, 19 nt, Homo sapiens
  misc_RNA (1)...(19): siRNA sense strand
ucaagaaagcauuccaaaa

SEQ ID NO: 2589323 - RNA, 19 nt, Homo sapiens
  misc_RNA (1)...(19): siRNA sense strand
ggugaauggccaaguccuu

SEQ ID NO: 2589324 - RNA, 19 nt, Homo sapiens
  misc_RNA (1)...(19): siRNA sense strand
aggaacuagcagagaugau

SEQ ID NO: 2589325 - RNA, 19 nt, Homo sapiens
  misc_RNA (1)...(19): siRNA sense strand
ggaggaggugaauggccaa

SEQ ID NO: 2589326 - RNA, 19 nt, Homo sapiens
  misc_RNA (1)...(19): siRNA sense strand
gcaugagaaaucuuggaga

SEQ ID NO: 2589327 - RNA, 19 nt, Homo sapiens
  misc_RNA (1)...(19): siRNA sense strand
guugaguaugccaggaaaa

SEQ ID NO: 2589328 - RNA, 19 nt, Homo sapiens
  misc_RNA (1)...(19): siRNA sense strand
caauauaacucacgggcua

SEQ ID NO: 2589329 - RNA, 19 nt, Homo sapiens
  misc_RNA (1)...(19): siRNA sense strand
aaucaauaccagaggaaau

SEQ ID NO: 2589330 - RNA, 19 nt, Homo sapiens
  misc_RNA (1)...(19): siRNA sense strand
ccucaaagguccuagggau

SEQ ID NO: 2589331 - RNA, 19 nt, Homo sapiens
  misc_RNA (1)...(19): siRNA sense strand
ugacaaaacugaagagcga

SEQ ID NO: 2589332 - RNA, 19 nt, Homo sapiens
  misc_RNA (1)...(19): siRNA sense strand
ugaaaaugaaggugacaaa

SEQ ID NO: 2589333 - RNA, 19 nt, Homo sapiens
  misc_RNA (1)...(19): siRNA sense strand
cucaaagguccuagggauu

SEQ ID NO: 2589334 - RNA, 19 nt, Homo sapiens
  misc_RNA (1)...(19): siRNA sense strand
cuguuucacuggagaagaa

SEQ ID NO: 2589335 - RNA, 19 nt, Homo sapiens
  misc_RNA (1)...(19): siRNA sense strand
uauuaaagggauagagacu

SEQ ID NO: 2589336 - RNA, 19 nt, Homo sapiens
  misc_RNA (1)...(19): siRNA sense strand
ggauagagacugaugugga

SEQ ID NO: 2589337 - RNA, 19 nt, Homo sapiens
  misc_RNA (1)...(19): siRNA sense strand
uggaauucgaaaugggauu

SEQ ID NO: 2589338 - RNA, 19 nt, Homo sapiens
  misc_RNA (1)...(19): siRNA sense strand
cuuuacagaagaaggcuua

SEQ ID NO: 2589339 - RNA, 19 nt, Homo sapiens
  misc_RNA (1)...(19): siRNA sense strand
agaaucaauaccagaggaa

SEQ ID NO: 2589340 - RNA, 19 nt, Homo sapiens
  misc_RNA (1)...(19): siRNA sense strand
gaugaaacacuuaugcgaa

SEQ ID NO: 2589341 - RNA, 19 nt, Homo sapiens
  misc_RNA (1)...(19): siRNA sense strand
acacuuaugcgaagaacau

SEQ ID NO: 2589342 - RNA, 19 nt, Homo sapiens
  misc_RNA (1)...(19): siRNA sense strand
caauaagacauuucgggau

SEQ ID NO: 2589343 - RNA, 19 nt, Homo sapiens
  misc_RNA (1)...(19): siRNA sense strand
aggacaaggcucugcccaa

SEQ ID NO: 2589344 - RNA, 19 nt, Homo sapiens
  misc_RNA (1)...(19): siRNA sense strand
uggcaaugcuggaugguuc

SEQ ID NO: 2589345 - RNA, 19 nt, Homo sapiens
  misc_RNA (1)...(19): siRNA sense strand
guugaggaacagggaaaua

SEQ ID NO: 2589346 - RNA, 19 nt, Homo sapiens
  misc_RNA (1)...(19): siRNA sense strand
ugauacucauggugauaau

SEQ ID NO: 2589347 - RNA, 19 nt, Homo sapiens
  misc_RNA (1)...(19): siRNA sense strand
uggagauauuuguguggau

SEQ ID NO: 2589348 - RNA, 19 nt, Homo sapiens
  misc_RNA (1)...(19): siRNA sense strand
acaauaauguuugaggcua

SEQ ID NO: 2589349 - RNA, 19 nt, Homo sapiens
  misc_RNA (1)...(19): siRNA sense strand
uaccagaggaaaugaaaca

SEQ ID NO: 2589350 - RNA, 19 nt, Homo sapiens
  misc_RNA (1)...(19): siRNA sense strand
ccagaggaaaugaaacaga

SEQ ID NO: 2589351 - RNA, 19 nt, Homo sapiens
  misc_RNA (1)...(19): siRNA sense strand
uggacaacccaaacaauau

SEQ ID NO: 2589352 - RNA, 19 nt, Homo sapiens
  misc_RNA (1)...(19): siRNA sense strand
agaaacauggaauucgaaa

SEQ ID NO: 2589353 - RNA, 19 nt, Homo sapiens
  misc_RNA (1)...(19): siRNA sense strand
aggaaaugaaacagauugu

SEQ ID NO: 2589354 - RNA, 19 nt, Homo sapiens
  misc_RNA (1)...(19): siRNA sense strand
agaggaaaugaaacagauu

SEQ ID NO: 2589355 - RNA, 19 nt, Homo sapiens
  misc_RNA (1)...(19): siRNA sense strand
agacagaaucaauaccaga

SEQ ID NO: 2589356 - RNA, 19 nt, Homo sapiens
  misc_RNA (1)...(19): siRNA sense strand
gguuaauuucaauaggcau

SEQ ID NO: 2589357 - RNA, 19 nt, Homo sapiens
  misc_RNA (1)...(19): siRNA sense strand
gguuauuucuugacguucu

SEQ ID NO: 2589358 - RNA, 19 nt, Homo sapiens
  misc_RNA (1)...(19): siRNA sense strand
aauaagacauuucgggaug

SEQ ID NO: 2589359 - RNA, 19 nt, Homo sapiens
  misc_RNA (1)...(19): siRNA sense strand
agauuacaguggugugguu

SEQ ID NO: 2589360 - RNA, 19 nt, Homo sapiens
  misc_RNA (1)...(19): siRNA sense strand
caacgaacagagagccuca

SEQ ID NO: 2589361 - RNA, 19 nt, Homo sapiens
  misc_RNA (1)...(19): siRNA sense strand
cggaaugcguggugaacac

SEQ ID NO: 2589362 - RNA, 19 nt, Homo sapiens
  misc_RNA (1)...(19): siRNA sense strand
aggcuaaggccgaagagga

SEQ ID NO: 2589363 - RNA, 19 nt, Homo sapiens
  misc_RNA (1)...(19): siRNA sense strand
ggacaucacuuguugcacu

SEQ ID NO: 2589364 - RNA, 19 nt, Homo sapiens
  misc_RNA (1)...(19): siRNA sense strand
ccaccaagacccuagggau

SEQ ID NO: 2589365 - RNA, 19 nt, Homo sapiens
  misc_RNA (1)...(19): siRNA sense strand
ucuauuaacucgcggguuc

SEQ ID NO: 2589366 - RNA, 19 nt, Homo sapiens
  misc_RNA (1)...(19): siRNA sense strand
caccaagacccuagggauc

SEQ ID NO: 2589367 - RNA, 19 nt, Homo sapiens
  misc_RNA (1)...(19): siRNA sense strand
ugucggaaugcguggugaa

SEQ ID NO: 2589368 - RNA, 19 nt, Homo sapiens
  misc_RNA (1)...(19): siRNA sense strand
cuuuauuguguguuggcua

SEQ ID NO: 2589369 - RNA, 19 nt, Homo sapiens
  misc_RNA (1)...(19): siRNA sense strand
cagcagaucucuagcacca

SEQ ID NO: 2589370 - RNA, 19 nt, Homo sapiens
  misc_RNA (1)...(19): siRNA sense strand
cuauaagacccaagaccau

SEQ ID NO: 2589371 - RNA, 19 nt, Homo sapiens
  misc_RNA (1)...(19): siRNA sense strand
gcuauaagacccaagacca

SEQ ID NO: 2589372 - RNA, 19 nt, Homo sapiens
  misc_RNA (1)...(19): siRNA sense strand
agaccaucacugagaagau

SEQ ID NO: 2589373 - RNA, 19 nt, Homo sapiens
  misc_RNA (1)...(19): siRNA sense strand
aagaguugauugugggucu

SEQ ID NO: 2589374 - RNA, 19 nt, Homo sapiens
  misc_RNA (1)...(19): siRNA sense strand
ugaacuuggcugugaucau

SEQ ID NO: 2589375 - RNA, 19 nt, Homo sapiens
  misc_RNA (1)...(19): siRNA sense strand
cuggacagguacugggcca

SEQ ID NO: 2589376 - RNA, 19 nt, Homo sapiens
  misc_RNA (1)...(19): siRNA sense strand
auugaauacgccaggaaga

SEQ ID NO: 2589377 - RNA, 19 nt, Homo sapiens
  misc_RNA (1)...(19): siRNA sense strand
acucaugggccgagggcua

SEQ ID NO: 2589378 - RNA, 19 nt, Homo sapiens
  misc_RNA (1)...(19): siRNA sense strand
gauggaagucaaaggacaa

SEQ ID NO: 2589379 - RNA, 19 nt, Homo sapiens
  misc_RNA (1)...(19): siRNA sense strand
ugauggaagucaaaggaca

SEQ ID NO: 2589380 - RNA, 19 nt, Homo sapiens
  misc_RNA (1)...(19): siRNA sense strand
ugaagaugucucaggaauu

SEQ ID NO: 2589381 - RNA, 19 nt, Homo sapiens
  misc_RNA (1)...(19): siRNA sense strand
ggcccuggaagaagagaaa

SEQ ID NO: 2589382 - RNA, 19 nt, Homo sapiens
  misc_RNA (1)...(19): siRNA sense strand
ccuugaagaugauggaacu

SEQ ID NO: 2589383 - RNA, 19 nt, Homo sapiens
  misc_RNA (1)...(19): siRNA sense strand
ucagaugaggauaggaauu

SEQ ID NO: 2589384 - RNA, 19 nt, Homo sapiens
  misc_RNA (1)...(19): siRNA sense strand
ugaagaaaaggauggauaa

SEQ ID NO: 2589385 - RNA, 19 nt, Homo sapiens
  misc_RNA (1)...(19): siRNA sense strand
cugcaggaaagaagaucua

SEQ ID NO: 2589386 - RNA, 19 nt, Homo sapiens
  misc_RNA (1)...(19): siRNA sense strand
gguggaaacaauaggugau

SEQ ID NO: 2589387 - RNA, 19 nt, Homo sapiens
  misc_RNA (1)...(19): siRNA sense strand
cguuauugccuguuuggaa

SEQ ID NO: 2589388 - RNA, 19 nt, Homo sapiens
  misc_RNA (1)...(19): siRNA sense strand
acaaggugauggaagucaa

SEQ ID NO: 2589389 - RNA, 19 nt, Homo sapiens
  misc_RNA (1)...(19): siRNA sense strand
aguacaggccagaaaguuu

SEQ ID NO: 2589390 - RNA, 19 nt, Homo sapiens
  misc_RNA (1)...(19): siRNA sense strand
uugaagaaaaggauggaua

SEQ ID NO: 2589391 - RNA, 19 nt, Homo sapiens
  misc_RNA (1)...(19): siRNA sense strand
uugaagaugucucaggaau

SEQ ID NO: 2589392 - RNA, 19 nt, Homo sapiens
  misc_RNA (1)...(19): siRNA sense strand
cgguuugaaguuugaggaa

SEQ ID NO: 2589393 - RNA, 19 nt, Homo sapiens
  misc_RNA (1)...(19): siRNA sense strand
gaaaauaaagacaagguga

SEQ ID NO: 2589394 - RNA, 19 nt, Homo sapiens
  misc_RNA (1)...(19): siRNA sense strand
auucagaugaggauaggaa

SEQ ID NO: 2589395 - RNA, 19 nt, Homo sapiens
  misc_RNA (1)...(19): siRNA sense strand
ccacaauaucucuaacaga

SEQ ID NO: 2589396 - RNA, 19 nt, Homo sapiens
  misc_RNA (1)...(19): siRNA sense strand
gaagaaaaggauggauaaa

SEQ ID NO: 2589397 - RNA, 19 nt, Homo sapiens
  misc_RNA (1)...(19): siRNA sense strand
uggauaaauuaaaggcaac

SEQ ID NO: 2589398 - RNA, 19 nt, Homo sapiens
  misc_RNA (1)...(19): siRNA sense strand
gugauguagcccagcaauu

SEQ ID NO: 2589399 - RNA, 19 nt, Homo sapiens
  misc_RNA (1)...(19): siRNA sense strand
aaguggaacagguugcaaa

SEQ ID NO: 2589400 - RNA, 19 nt, Homo sapiens
  misc_RNA (1)...(19): siRNA sense strand
acuccaacaaagaagaaau

SEQ ID NO: 2589401 - RNA, 19 nt, Homo sapiens
  misc_RNA (1)...(19): siRNA sense strand
uggauguggaaguggaaca

SEQ ID NO: 2589402 - RNA, 19 nt, Homo sapiens
  misc_RNA (1)...(19): siRNA sense strand
ccaagauggguugaagaaa

SEQ ID NO: 2589403 - RNA, 19 nt, Homo sapiens
  misc_RNA (1)...(19): siRNA sense strand
agcaaguacaggccagaaa

SEQ ID NO: 2589404 - RNA, 19 nt, Homo sapiens
  misc_RNA (1)...(19): siRNA sense strand
gguuacagggaugcagaaa

SEQ ID NO: 2589405 - RNA, 19 nt, Homo sapiens
  misc_RNA (1)...(19): siRNA sense strand
gaaagaagaucuaucggcu

SEQ ID NO: 2589406 - RNA, 19 nt, Homo sapiens
  misc_RNA (1)...(19): siRNA sense strand
agucaaaggacaaaugauc

SEQ ID NO: 2589407 - RNA, 19 nt, Homo sapiens
  misc_RNA (1)...(19): siRNA sense strand
aggaagauuucguccgagu

SEQ ID NO: 2589408 - RNA, 19 nt, Homo sapiens
  misc_RNA (1)...(19): siRNA sense strand
gcaaauucgagucgggaag

SEQ ID NO: 2589409 - RNA, 19 nt, Homo sapiens
  misc_RNA (1)...(19): siRNA sense strand
ggccagaaaguuugaugau

SEQ ID NO: 2589410 - RNA, 19 nt, Homo sapiens
  misc_RNA (1)...(19): siRNA sense strand
acaucaaguuauugguuac

SEQ ID NO: 2589411 - RNA, 19 nt, Homo sapiens
  misc_RNA (1)...(19): siRNA sense strand
auaaagacaaggugaugga

SEQ ID NO: 2589412 - RNA, 19 nt, Homo sapiens
  misc_RNA (1)...(19): siRNA sense strand
guguggacaaguuggauga

SEQ ID NO: 2589413 - RNA, 19 nt, Homo sapiens
  misc_RNA (1)...(19): siRNA sense strand
guuauugguuacagggaug

SEQ ID NO: 2589414 - RNA, 19 nt, Homo sapiens
  misc_RNA (1)...(19): siRNA sense strand
uuucagacauuguuggcuu

SEQ ID NO: 2589415 - RNA, 19 nt, Homo sapiens
  misc_RNA (1)...(19): siRNA sense strand
gggacaacucugugaagaa

SEQ ID NO: 2589416 - RNA, 19 nt, Homo sapiens
  misc_RNA (1)...(19): siRNA sense strand
acacuuuggcagagaguau

SEQ ID NO: 2589417 - RNA, 19 nt, Homo sapiens
  misc_RNA (1)...(19): siRNA sense strand
ucuacaagguggagaccau

SEQ ID NO: 2589418 - RNA, 19 nt, Homo sapiens
  misc_RNA (1)...(19): siRNA sense strand
uggcaaagcacaaaauaaa

SEQ ID NO: 2589419 - RNA, 19 nt, Homo sapiens
  misc_RNA (1)...(19): siRNA sense strand
uuacacaaagagagugaua

SEQ ID NO: 2589420 - RNA, 19 nt, Homo sapiens
  misc_RNA (1)...(19): siRNA sense strand
gauuacacaaagagaguga

SEQ ID NO: 2589421 - RNA, 19 nt, Homo sapiens
  misc_RNA (1)...(19): siRNA sense strand
cgagugaggagaugggaca

SEQ ID NO: 2589422 - RNA, 19 nt, Homo sapiens
  misc_RNA (1)...(19): siRNA sense strand
aagccaagaaguucaguaa

SEQ ID NO: 2589423 - RNA, 19 nt, Homo sapiens
  misc_RNA (1)...(19): siRNA sense strand
gggauuacacaaagagagu

SEQ ID NO: 2589424 - RNA, 19 nt, Homo sapiens
  misc_RNA (1)...(19): siRNA sense strand
agcaggaaaucuuuggaaa

SEQ ID NO: 2589425 - RNA, 19 nt, Homo sapiens
  misc_RNA (1)...(19): siRNA sense strand
aaauauguuacgaggaaga

SEQ ID NO: 2589426 - RNA, 19 nt, Homo sapiens
  misc_RNA (1)...(19): siRNA sense strand
cguauuauaugaaacggaa

SEQ ID NO: 2589427 - RNA, 19 nt, Homo sapiens
  misc_RNA (1)...(19): siRNA sense strand
cauaaugauugcagcgagu

SEQ ID NO: 2589428 - RNA, 19 nt, Homo sapiens
  misc_RNA (1)...(19): siRNA sense strand
acacaaagagagugauacu

SEQ ID NO: 2589429 - RNA, 19 nt, Homo sapiens
  misc_RNA (1)...(19): siRNA sense strand
cuucagagaacauuggcaa

SEQ ID NO: 2589430 - RNA, 19 nt, Homo sapiens
  misc_RNA (1)...(19): siRNA sense strand
cugaugaacaggagagacu

SEQ ID NO: 2589431 - RNA, 19 nt, Homo sapiens
  misc_RNA (1)...(19): siRNA sense strand
aaaagaaagauguggaaga

SEQ ID NO: 2589432 - RNA, 19 nt, Homo sapiens
  misc_RNA (1)...(19): siRNA sense strand
uggacagauuagaagauuu

SEQ ID NO: 2589433 - RNA, 19 nt, Homo sapiens
  misc_RNA (1)...(19): siRNA sense strand
cccuggaggaggagaagaa

SEQ ID NO: 2589434 - RNA, 19 nt, Homo sapiens
  misc_RNA (1)...(19): siRNA sense strand
aagacauuccugagaagaa

SEQ ID NO: 2589435 - RNA, 19 nt, Homo sapiens
  misc_RNA (1)...(19): siRNA sense strand
ugagaagaacauacaagaa

SEQ ID NO: 2589436 - RNA, 19 nt, Homo sapiens
  misc_RNA (1)...(19): siRNA sense strand
agggauuguagauggcuaa

SEQ ID NO: 2589437 - RNA, 19 nt, Homo sapiens
  misc_RNA (1)...(19): siRNA sense strand
guuacgaggaagaugaaaa

SEQ ID NO: 2589438 - RNA, 19 nt, Homo sapiens
  misc_RNA (1)...(19): siRNA sense strand
ccaaaagaaagauguggaa

SEQ ID NO: 2589439 - RNA, 19 nt, Homo sapiens
  misc_RNA (1)...(19): siRNA sense strand
auaugaaacggaaguggaa

SEQ ID NO: 2589440 - RNA, 19 nt, Homo sapiens
  misc_RNA (1)...(19): siRNA sense strand
ccaacaaggaacaaacuca

SEQ ID NO: 2589441 - RNA, 19 nt, Homo sapiens
  misc_RNA (1)...(19): siRNA sense strand
agauaugacaauucugcaa

SEQ ID NO: 2589442 - RNA, 19 nt, Homo sapiens
  misc_RNA (1)...(19): siRNA sense strand
cuucaaggguuauggaccu

SEQ ID NO: 2589443 - RNA, 19 nt, Homo sapiens
  misc_RNA (1)...(19): siRNA sense strand
gaaccuaucaagaugcgaa

SEQ ID NO: 2589444 - RNA, 19 nt, Homo sapiens
  misc_RNA (1)...(19): siRNA sense strand
ccaacaacuuacagauuac

SEQ ID NO: 2589445 - RNA, 19 nt, Homo sapiens
  misc_RNA (1)...(19): siRNA sense strand
gguuugacucauugaagau

SEQ ID NO: 2589446 - RNA, 19 nt, Homo sapiens
  misc_RNA (1)...(19): siRNA sense strand
gcaagggcaaguugugcaa

SEQ ID NO: 2589447 - RNA, 19 nt, Homo sapiens
  misc_RNA (1)...(19): siRNA sense strand
gugcaagccaagaaguuca

SEQ ID NO: 2589448 - RNA, 19 nt, Homo sapiens
  misc_RNA (1)...(19): siRNA sense strand
caagaucacaggagagugu

SEQ ID NO: 2589449 - RNA, 19 nt, Homo sapiens
  misc_RNA (1)...(19): siRNA sense strand
ggauaaggaggaugauuuu

SEQ ID NO: 2589450 - RNA, 19 nt, Homo sapiens
  misc_RNA (1)...(19): siRNA sense strand
ggaucaugacuauguugaa

SEQ ID NO: 2589451 - RNA, 19 nt, Homo sapiens
  misc_RNA (1)...(19): siRNA sense strand
uugaagauguguagagccu

SEQ ID NO: 2589452 - RNA, 19 nt, Homo sapiens
  misc_RNA (1)...(19): siRNA sense strand
uugccaagaagcaggaaaa

SEQ ID NO: 2589453 - RNA, 19 nt, Homo sapiens
  misc_RNA (1)...(19): siRNA sense strand
ucucagacaucguuggguu

SEQ ID NO: 2589454 - RNA, 19 nt, Homo sapiens
  misc_RNA (1)...(19): siRNA sense strand
uguggaagaugcaagccaa

SEQ ID NO: 2589455 - RNA, 19 nt, Homo sapiens
  misc_RNA (1)...(19): siRNA sense strand
cggaaguggaagugucguu

SEQ ID NO: 2589456 - RNA, 19 nt, Homo sapiens
  misc_RNA (1)...(19): siRNA sense strand
cauauuucccugugagguu

SEQ ID NO: 2589457 - RNA, 19 nt, Homo sapiens
  misc_RNA (1)...(19): siRNA sense strand
ggcaaguugugcaagccaa

SEQ ID NO: 2589458 - RNA, 19 nt, Homo sapiens
  misc_RNA (1)...(19): siRNA sense strand
gaguauuugcaaacugauu

SEQ ID NO: 2589459 - RNA, 19 nt, Homo sapiens
  misc_RNA (1)...(19): siRNA sense strand
ucauaaaggcagcugcuca

SEQ ID NO: 2589460 - RNA, 19 nt, Homo sapiens
  misc_RNA (1)...(19): siRNA sense strand
cugaaacagagcagccauu

SEQ ID NO: 2589461 - RNA, 19 nt, Homo sapiens
  misc_RNA (1)...(19): siRNA sense strand
gcagcuguggcaagggcaa

SEQ ID NO: 2589462 - RNA, 19 nt, Homo sapiens
  misc_RNA (1)...(19): siRNA sense strand
aaguggaagugucguuaau

SEQ ID NO: 2589463 - RNA, 19 nt, Homo sapiens
  misc_RNA (1)...(19): siRNA sense strand
ugaagaagaggcuggggaa

SEQ ID NO: 2589464 - RNA, 19 nt, Homo sapiens
  misc_RNA (1)...(19): siRNA sense strand
gcaaagcaaccgugcccau

SEQ ID NO: 2589465 - RNA, 19 nt, Homo sapiens
  misc_RNA (1)...(19): siRNA sense strand
agaaagauguggaagaugc

SEQ ID NO: 2589466 - RNA, 19 nt, Homo sapiens
  misc_RNA (1)...(19): siRNA sense strand
cugagaagaacauacaaga

SEQ ID NO: 2589467 - RNA, 19 nt, Homo sapiens
  misc_RNA (1)...(19): siRNA sense strand
cucaagauggccugaagaa

SEQ ID NO: 2589468 - RNA, 19 nt, Homo sapiens
  misc_RNA (1)...(19): siRNA sense strand
gagaauaucacgacgggcu

SEQ ID NO: 2589469 - RNA, 19 nt, Homo sapiens
  misc_RNA (1)...(19): siRNA sense strand
cagcagaggagaugcccaa

SEQ ID NO: 2589470 - RNA, 19 nt, Homo sapiens
  misc_RNA (1)...(19): siRNA sense strand
ggaacuacguccacaccca

SEQ ID NO: 2589471 - RNA, 19 nt, Homo sapiens
  misc_RNA (1)...(19): siRNA sense strand
cagagaaagaggagaguca

SEQ ID NO: 2589472 - RNA, 19 nt, Homo sapiens
  misc_RNA (1)...(19): siRNA sense strand
augaaaaugucgacagaaa

SEQ ID NO: 2589473 - RNA, 19 nt, Homo sapiens
  misc_RNA (1)...(19): siRNA sense strand
cuggaaauuuguagcucaa

SEQ ID NO: 2589474 - RNA, 19 nt, Homo sapiens
  misc_RNA (1)...(19): siRNA sense strand
cgauaacggagaaugggaa

SEQ ID NO: 2589475 - RNA, 19 nt, Homo sapiens
  misc_RNA (1)...(19): siRNA sense strand
gcucaaacaggaauggaca

SEQ ID NO: 2589476 - RNA, 19 nt, Homo sapiens
  misc_RNA (1)...(19): siRNA sense strand
aggaauggacagaccacaa

SEQ ID NO: 2589477 - RNA, 19 nt, Homo sapiens
  misc_RNA (1)...(19): siRNA sense strand
cagcuuagugauggagaaa

SEQ ID NO: 2589478 - RNA, 19 nt, Homo sapiens
  misc_RNA (1)...(19): siRNA sense strand
uuguagauguggaugaaaa

SEQ ID NO: 2589479 - RNA, 19 nt, Homo sapiens
  misc_RNA (1)...(19): siRNA sense strand
ugggaaauacugaacgcaa

SEQ ID NO: 2589480 - RNA, 19 nt, Homo sapiens
  misc_RNA (1)...(19): siRNA sense strand
caaaggggaugaaggggaa

SEQ ID NO: 2589481 - RNA, 19 nt, Homo sapiens
  misc_RNA (1)...(19): siRNA sense strand
acagcuuagugauggagaa

SEQ ID NO: 2589482 - RNA, 19 nt, Homo sapiens
  misc_RNA (1)...(19): siRNA sense strand
gcugauuccauuagauaca

SEQ ID NO: 2589483 - RNA, 19 nt, Homo sapiens
  misc_RNA (1)...(19): siRNA sense strand
ccacaaguuacgcuggaau

SEQ ID NO: 2589484 - RNA, 19 nt, Homo sapiens
  misc_RNA (1)...(19): siRNA sense strand
aaccaguagugaaaggcaa

SEQ ID NO: 2589485 - RNA, 19 nt, Homo sapiens
  misc_RNA (1)...(19): siRNA sense strand
uuucgagacaugugaagaa

SEQ ID NO: 2589486 - RNA, 19 nt, Homo sapiens
  misc_RNA (1)...(19): siRNA sense strand
ugaaaaugucgacagaaaa

SEQ ID NO: 2589487 - RNA, 19 nt, Homo sapiens
  misc_RNA (1)...(19): siRNA sense strand
agguaguacaagacuggaa

SEQ ID NO: 2589488 - RNA, 19 nt, Homo sapiens
  misc_RNA (1)...(19): siRNA sense strand
gagaaagaggagagucaac

SEQ ID NO: 2589489 - RNA, 19 nt, Homo sapiens
  misc_RNA (1)...(19): siRNA sense strand
accaguagugaaaggcaaa

SEQ ID NO: 2589490 - RNA, 19 nt, Homo sapiens
  misc_RNA (1)...(19): siRNA sense strand
gcaaaggggaugaagggga

SEQ ID NO: 2589491 - RNA, 19 nt, Homo sapiens
  misc_RNA (1)...(19): siRNA sense strand
cuacucauccccagagaaa

SEQ ID NO: 2589492 - RNA, 19 nt, Homo sapiens
  misc_RNA (1)...(19): siRNA sense strand
aaggcaaaguccucgaaaa

SEQ ID NO: 2589493 - RNA, 19 nt, Homo sapiens
  misc_RNA (1)...(19): siRNA sense strand
gggaugaaggggaacagaa

SEQ ID NO: 2589494 - RNA, 19 nt, Homo sapiens
  misc_RNA (1)...(19): siRNA sense strand
aguggaaagagcuggguua

SEQ ID NO: 2589495 - RNA, 19 nt, Homo sapiens
  misc_RNA (1)...(19): siRNA sense strand
cgaaggagagggaaggaga

SEQ ID NO: 2589496 - RNA, 19 nt, Homo sapiens
  misc_RNA (1)...(19): siRNA sense strand
ccaacuacauggaaggcau

SEQ ID NO: 2589497 - RNA, 19 nt, Homo sapiens
  misc_RNA (1)...(19): siRNA sense strand
ccaucaggauucagggcuu

SEQ ID NO: 2589498 - RNA, 19 nt, Homo sapiens
  misc_RNA (1)...(19): siRNA sense strand
cuuugaaaucuguguggaa

SEQ ID NO: 2589499 - RNA, 19 nt, Homo sapiens
  misc_RNA (1)...(19): siRNA sense strand
cggccaugcuugcggacau

SEQ ID NO: 2589500 - RNA, 19 nt, Homo sapiens
  misc_RNA (1)...(19): siRNA sense strand
cagacacguuugaggacau

SEQ ID NO: 2589501 - RNA, 19 nt, Homo sapiens
  misc_RNA (1)...(19): siRNA sense strand
gaggagugauccagggaag

SEQ ID NO: 2589502 - RNA, 19 nt, Homo sapiens
  misc_RNA (1)...(19): siRNA sense strand
cauggaaggcauugaggga

SEQ ID NO: 2589503 - RNA, 19 nt, Homo sapiens
  misc_RNA (1)...(19): siRNA sense strand
gggaaggagaugguggauu

SEQ ID NO: 2589504 - RNA, 19 nt, Homo sapiens
  misc_RNA (1)...(19): siRNA sense strand
aagugaauuccgaaggaga

SEQ ID NO: 2589505 - RNA, 19 nt, Homo sapiens
  misc_RNA (1)...(19): siRNA sense strand
cggcuaaaggguuccaaca

SEQ ID NO: 2589506 - RNA, 19 nt, Homo sapiens
  misc_RNA (1)...(19): siRNA sense strand
uggaacuaccaaaggcauu

SEQ ID NO: 2589507 - RNA, 19 nt, Homo sapiens
  misc_RNA (1)...(19): siRNA sense strand
ggagagagacaaagcggcu

SEQ ID NO: 2589508 - RNA, 19 nt, Homo sapiens
  misc_RNA (1)...(19): siRNA sense strand
ugagaaagcuggagaaggg

SEQ ID NO: 2589509 - RNA, 19 nt, Homo sapiens
  misc_RNA (1)...(19): siRNA sense strand
gggcagaagauuucgcucu

SEQ ID NO: 2589510 - RNA, 19 nt, Homo sapiens
  misc_RNA (1)...(19): siRNA sense strand
gcaagaauagaaaggccaa

SEQ ID NO: 2589511 - RNA, 19 nt, Homo sapiens
  misc_RNA (1)...(19): siRNA sense strand
ugugagaacugcauggaga

SEQ ID NO: 2589512 - RNA, 19 nt, Homo sapiens
  misc_RNA (1)...(19): siRNA sense strand
ggcaagagugugugagaac

SEQ ID NO: 2589513 - RNA, 19 nt, Homo sapiens
  misc_RNA (1)...(19): siRNA sense strand
cugaaauacuauggcaaca

SEQ ID NO: 2589514 - RNA, 19 nt, Homo sapiens
  misc_RNA (1)...(19): siRNA sense strand
gggugguauuacacagaca

SEQ ID NO: 2589515 - RNA, 19 nt, Homo sapiens
  misc_RNA (1)...(19): siRNA sense strand
cucuggaaccacaguaaua

SEQ ID NO: 2589516 - RNA, 19 nt, Homo sapiens
  misc_RNA (1)...(19): siRNA sense strand
auggcaacacaaugauaaa

SEQ ID NO: 2589517 - RNA, 19 nt, Homo sapiens
  misc_RNA (1)...(19): siRNA sense strand
uaucucuaccugagggcaa

SEQ ID NO: 2589518 - RNA, 19 nt, Homo sapiens
  misc_RNA (1)...(19): siRNA sense strand
cugaaggacuacugggaga

SEQ ID NO: 2589519 - RNA, 19 nt, Homo sapiens
  misc_RNA (1)...(19): siRNA sense strand
ggacuuaugacaaggccaa

SEQ ID NO: 2589520 - RNA, 19 nt, Homo sapiens
  misc_RNA (1)...(19): siRNA sense strand
aaacaggaguggagcgacu

SEQ ID NO: 2589521 - RNA, 19 nt, Homo sapiens
  misc_RNA (1)...(19): siRNA sense strand
cggugaaggaggacuggaa

SEQ ID NO: 2589522 - RNA, 19 nt, Homo sapiens
  misc_RNA (1)...(19): siRNA sense strand
ucgauguggaugagaagaa

SEQ ID NO: 2589523 - RNA, 19 nt, Homo sapiens
  misc_RNA (1)...(19): siRNA sense strand
guggaugagaagaaccaaa

SEQ ID NO: 2589524 - RNA, 19 nt, Homo sapiens
  misc_RNA (1)...(19): siRNA sense strand
aucacuggcuggagagcaa

SEQ ID NO: 2589525 - RNA, 19 nt, Homo sapiens
  misc_RNA (1)...(19): siRNA sense strand
gaggaggacagaugggcau

SEQ ID NO: 2589526 - RNA, 19 nt, Homo sapiens
  misc_RNA (1)...(19): siRNA sense strand
agguggugguggaggagga

SEQ ID NO: 2589527 - RNA, 19 nt, Homo sapiens
  misc_RNA (1)...(19): siRNA sense strand
agagggaggugguggugga

SEQ ID NO: 2589528 - RNA, 19 nt, Homo sapiens
  misc_RNA (1)...(19): siRNA sense strand
cagguggagaggaagcuaa

SEQ ID NO: 2589529 - RNA, 19 nt, Homo sapiens
  misc_RNA (1)...(19): siRNA sense strand
gugaaggaggacuggaagu

SEQ ID NO: 2589530 - RNA, 19 nt, Homo sapiens
  misc_RNA (1)...(19): siRNA sense strand
augacaaggccaagaucga

SEQ ID NO: 2589531 - RNA, 19 nt, Homo sapiens
  misc_RNA (1)...(19): siRNA sense strand
gcaaauaugaggacagcga

SEQ ID NO: 2589532 - RNA, 19 nt, Homo sapiens
  misc_RNA (1)...(19): siRNA sense strand
uugugaugaugguggcaua

SEQ ID NO: 2589533 - RNA, 19 nt, Homo sapiens
  misc_RNA (1)...(19): siRNA sense strand
gaauaaaauuugaggcuag

SEQ ID NO: 2589534 - RNA, 19 nt, Homo sapiens
  misc_RNA (1)...(19): siRNA sense strand
aagaagucugcuaaagaaa

SEQ ID NO: 2589535 - RNA, 19 nt, Homo sapiens
  misc_RNA (1)...(19): siRNA sense strand
gaaaggaaaccuagcacca

SEQ ID NO: 2589536 - RNA, 19 nt, Homo sapiens
  misc_RNA (1)...(19): siRNA sense strand
ggauuaaucucuuuggaac

SEQ ID NO: 2589537 - RNA, 19 nt, Homo sapiens
  misc_RNA (1)...(19): siRNA sense strand
ggaauaaaauuugaggcua

SEQ ID NO: 2589538 - RNA, 19 nt, Homo sapiens
  misc_RNA (1)...(19): siRNA sense strand
cuuuaaucugguagccaua

SEQ ID NO: 2589539 - RNA, 19 nt, Homo sapiens
  misc_RNA (1)...(19): siRNA sense strand
gauuaaucucuuuggaacu

SEQ ID NO: 2589540 - RNA, 19 nt, Homo sapiens
  misc_RNA (1)...(19): siRNA sense strand
caaaugauguuaugcagca

SEQ ID NO: 2589541 - RNA, 19 nt, Homo sapiens
  misc_RNA (1)...(19): siRNA sense strand
ccuuuaaucugguagccau

SEQ ID NO: 2589542 - RNA, 19 nt, Homo sapiens
  misc_RNA (1)...(19): siRNA sense strand
ucuacugcuucaugaacaa

SEQ ID NO: 2589543 - RNA, 19 nt, Homo sapiens
  misc_RNA (1)...(19): siRNA sense strand
gggaauaaaauuugaggcu

SEQ ID NO: 2589544 - RNA, 19 nt, Homo sapiens
  misc_RNA (1)...(19): siRNA sense strand
guguaaugggacagauaua

SEQ ID NO: 2589545 - RNA, 19 nt, Homo sapiens
  misc_RNA (1)...(19): siRNA sense strand
ucacauggguagagggaac

SEQ ID NO: 2589546 - RNA, 19 nt, Homo sapiens
  misc_RNA (1)...(19): siRNA sense strand
cagauauauacaaggacaa

SEQ ID NO: 2589547 - RNA, 19 nt, Homo sapiens
  misc_RNA (1)...(19): siRNA sense strand
agguguaaugggacagaua

SEQ ID NO: 2589548 - RNA, 19 nt, Homo sapiens
  misc_RNA (1)...(19): siRNA sense strand
acagauauauacaaggaca

SEQ ID NO: 2589549 - RNA, 19 nt, Homo sapiens
  misc_RNA (1)...(19): siRNA sense strand
auauauagguguaauggga

SEQ ID NO: 2589550 - RNA, 19 nt, Homo sapiens
  misc_RNA (1)...(19): siRNA sense strand
auauagguguaaugggaca

SEQ ID NO: 2589551 - RNA, 19 nt, Homo sapiens
  misc_RNA (1)...(19): siRNA sense strand
guguuugugaauugcaaua

SEQ ID NO: 2589552 - RNA, 19 nt, Homo sapiens
  misc_RNA (1)...(19): siRNA sense strand
aggacagaguguuugugaa

SEQ ID NO: 2589553 - RNA, 19 nt, Homo sapiens
  misc_RNA (1)...(19): siRNA sense strand
acuugaggacagaguguuu

SEQ ID NO: 2589554 - RNA, 19 nt, Homo sapiens
  misc_RNA (1)...(19): siRNA sense strand
uagaggaacuugaggacag

SEQ ID NO: 2589555 - RNA, 19 nt, Homo sapiens
  misc_RNA (1)...(19): siRNA sense strand
agaugauggcauaugauaa

SEQ ID NO: 2589556 - RNA, 19 nt, Homo sapiens
  misc_RNA (1)...(19): siRNA sense strand
gcggaagugcagagugaga

SEQ ID NO: 2589557 - RNA, 19 nt, Homo sapiens
  misc_RNA (1)...(19): siRNA sense strand
agagugagaucgagcgcau

SEQ ID NO: 2589558 - RNA, 19 nt, Homo sapiens
  misc_RNA (1)...(19): siRNA sense strand
gcauauuugagcuggccaa

SEQ ID NO: 2589559 - RNA, 19 nt, Homo sapiens
  misc_RNA (1)...(19): siRNA sense strand
gguuaugaggucacagaca

SEQ ID NO: 2589560 - RNA, 19 nt, Homo sapiens
  misc_RNA (1)...(19): siRNA sense strand
uagccaagcagaagcaaaa

SEQ ID NO: 2589561 - RNA, 19 nt, Homo sapiens
  misc_RNA (1)...(19): siRNA sense strand
aaacaggagcagaaggcca

SEQ ID NO: 2589562 - RNA, 19 nt, Homo sapiens
  misc_RNA (1)...(19): siRNA sense strand
ccaucaucgucuuugucaa

SEQ ID NO: 2589563 - RNA, 19 nt, Homo sapiens
  misc_RNA (1)...(19): siRNA sense strand
caaagguacuccagcgucu

SEQ ID NO: 2589564 - RNA, 19 nt, Homo sapiens
  misc_RNA (1)...(19): siRNA sense strand
ucugaaagguuaugagguc

SEQ ID NO: 2589565 - RNA, 19 nt, Homo sapiens
  misc_RNA (1)...(19): siRNA sense strand
ccuuccagccugagugaca

SEQ ID NO: 2589566 - RNA, 19 nt, Homo sapiens
  misc_RNA (1)...(19): siRNA sense strand
gccuagugcuaacgggcau

SEQ ID NO: 2589567 - RNA, 19 nt, Homo sapiens
  misc_RNA (1)...(19): siRNA sense strand
cuagccaagcagaagcaaa

SEQ ID NO: 2589568 - RNA, 19 nt, Homo sapiens
  misc_RNA (1)...(19): siRNA sense strand
gggaguaccuggaggcgua

SEQ ID NO: 2589569 - RNA, 19 nt, Homo sapiens
  misc_RNA (1)...(19): siRNA sense strand
agggaaaucaaguggaaau

SEQ ID NO: 2589570 - RNA, 19 nt, Homo sapiens
  misc_RNA (1)...(19): siRNA sense strand
ccauaggaaccgaggauca

SEQ ID NO: 2589571 - RNA, 19 nt, Homo sapiens
  misc_RNA (1)...(19): siRNA sense strand
agaaaugguaucugggaca

SEQ ID NO: 2589572 - RNA, 19 nt, Homo sapiens
  misc_RNA (1)...(19): siRNA sense strand
aggaaagucacaaaguaaa

SEQ ID NO: 2589573 - RNA, 19 nt, Homo sapiens
  misc_RNA (1)...(19): siRNA sense strand
caucaaucacccagcacaa

SEQ ID NO: 2589574 - RNA, 19 nt, Homo sapiens
  misc_RNA (1)...(19): siRNA sense strand
gaugggaggauuucaauaa

SEQ ID NO: 2589575 - RNA, 19 nt, Homo sapiens
  misc_RNA (1)...(19): siRNA sense strand
cggaggagcagguugaaaa

SEQ ID NO: 2589576 - RNA, 19 nt, Homo sapiens
  misc_RNA (1)...(19): siRNA sense strand
gguuacagagucagcgaau

SEQ ID NO: 2589577 - RNA, 19 nt, Homo sapiens
  misc_RNA (1)...(19): siRNA sense strand
ggauaggaaggcuggugaa

SEQ ID NO: 2589578 - RNA, 19 nt, Homo sapiens
  misc_RNA (1)...(19): siRNA sense strand
gggaaaucaaguggaaauu

SEQ ID NO: 2589579 - RNA, 19 nt, Homo sapiens
  misc_RNA (1)...(19): siRNA sense strand
cagacaggguucagcggau

SEQ ID NO: 2589580 - RNA, 19 nt, Homo sapiens
  misc_RNA (1)...(19): siRNA sense strand
aaucccagcaagagagcaa

SEQ ID NO: 2589581 - RNA, 19 nt, Homo sapiens
  misc_RNA (1)...(19): siRNA sense strand
aaugaaagggcucggaaga

SEQ ID NO: 2589582 - RNA, 19 nt, Homo sapiens
  misc_RNA (1)...(19): siRNA sense strand
ccacacaaccaguagcaca

SEQ ID NO: 2589583 - RNA, 19 nt, Homo sapiens
  misc_RNA (1)...(19): siRNA sense strand
aguccaaaccuguagcauu

SEQ ID NO: 2589584 - RNA, 19 nt, Homo sapiens
  misc_RNA (1)...(19): siRNA sense strand
caauucgacaggagagaga

SEQ ID NO: 2589585 - RNA, 19 nt, Homo sapiens
  misc_RNA (1)...(19): siRNA sense strand
gggaggauuucaauaacga

SEQ ID NO: 2589586 - RNA, 19 nt, Homo sapiens
  misc_RNA (1)...(19): siRNA sense strand
agguuugaugggaggauuu

SEQ ID NO: 2589587 - RNA, 19 nt, Homo sapiens
  misc_RNA (1)...(19): siRNA sense strand
aaauaaucccagcaagaga

SEQ ID NO: 2589588 - RNA, 19 nt, Homo sapiens
  misc_RNA (1)...(19): siRNA sense strand
guaacagacaugaugcaga

SEQ ID NO: 2589589 - RNA, 19 nt, Homo sapiens
  misc_RNA (1)...(19): siRNA sense strand
auuucaauaacgagaguga

SEQ ID NO: 2589590 - RNA, 19 nt, Homo sapiens
  misc_RNA (1)...(19): siRNA sense strand
gagcaaaguccaaaccugu

SEQ ID NO: 2589591 - RNA, 19 nt, Homo sapiens
  misc_RNA (1)...(19): siRNA sense strand
cacucagauuggagaacau

SEQ ID NO: 2589592 - RNA, 19 nt, Homo sapiens
  misc_RNA (1)...(19): siRNA sense strand
ggauccagcaagaacaaaa

SEQ ID NO: 2589593 - RNA, 19 nt, Homo sapiens
  misc_RNA (1)...(19): siRNA sense strand
uucaauaacgagagugaca

SEQ ID NO: 2589594 - RNA, 19 nt, Homo sapiens
  misc_RNA (1)...(19): siRNA sense strand
ucuagaggaaagucacaaa

SEQ ID NO: 2589595 - RNA, 19 nt, Homo sapiens
  misc_RNA (1)...(19): siRNA sense strand
uggaagaagauuacccuga

SEQ ID NO: 2589596 - RNA, 19 nt, Homo sapiens
  misc_RNA (1)...(19): siRNA sense strand
acugguggcagcugauaaa

SEQ ID NO: 2589597 - RNA, 19 nt, Homo sapiens
  misc_RNA (1)...(19): siRNA sense strand
ucauaaugguugagagcaa

SEQ ID NO: 2589598 - RNA, 19 nt, Homo sapiens
  misc_RNA (1)...(19): siRNA sense strand
augcagaguuagagaauga

SEQ ID NO: 2589599 - RNA, 19 nt, Homo sapiens
  misc_RNA (1)...(19): siRNA sense strand
gaauaauaucacagccaaa

SEQ ID NO: 2589600 - RNA, 19 nt, Homo sapiens
  misc_RNA (1)...(19): siRNA sense strand
ggauggaggagaagagaga

SEQ ID NO: 2589601 - RNA, 19 nt, Homo sapiens
  misc_RNA (1)...(19): siRNA sense strand
agacaaacuuaaagaacca

SEQ ID NO: 2589602 - RNA, 19 nt, Homo sapiens
  misc_RNA (1)...(19): siRNA sense strand
agccagggauauugagaaa

SEQ ID NO: 2589603 - RNA, 19 nt, Homo sapiens
  misc_RNA (1)...(19): siRNA sense strand
aagaaaacccagagacaua

SEQ ID NO: 2589604 - RNA, 19 nt, Homo sapiens
  misc_RNA (1)...(19): siRNA sense strand
gguuuuagcaggagacaaa

SEQ ID NO: 2589605 - RNA, 19 nt, Homo sapiens
  misc_RNA (1)...(19): siRNA sense strand
ccaggcagccagaggauaa

SEQ ID NO: 2589606 - RNA, 19 nt, Homo sapiens
  misc_RNA (1)...(19): siRNA sense strand
gggcauuaugguaagcaaa

SEQ ID NO: 2589607 - RNA, 19 nt, Homo sapiens
  misc_RNA (1)...(19): siRNA sense strand
uauaauguuuccagagcaa

SEQ ID NO: 2589608 - RNA, 19 nt, Homo sapiens
  misc_RNA (1)...(19): siRNA sense strand
ccaaacuagaagagacaau

SEQ ID NO: 2589609 - RNA, 19 nt, Homo sapiens
  misc_RNA (1)...(19): siRNA sense strand
gguugagagcaaagggaca

SEQ ID NO: 2589610 - RNA, 19 nt, Homo sapiens
  misc_RNA (1)...(19): siRNA sense strand
ucaaaucauggguggauaa

SEQ ID NO: 2589611 - RNA, 19 nt, Homo sapiens
  misc_RNA (1)...(19): siRNA sense strand
gcaagaaaacccagagaca

SEQ ID NO: 2589612 - RNA, 19 nt, Homo sapiens
  misc_RNA (1)...(19): siRNA sense strand
caaaagaaacagugacgua

SEQ ID NO: 2589613 - RNA, 19 nt, Homo sapiens
  misc_RNA (1)...(19): siRNA sense strand
gguccaaauccuugugaca

SEQ ID NO: 2589614 - RNA, 19 nt, Homo sapiens
  misc_RNA (1)...(19): siRNA sense strand
ggagaaaguucaagcagcu

SEQ ID NO: 2589615 - RNA, 19 nt, Homo sapiens
  misc_RNA (1)...(19): siRNA sense strand
gauuauaagaagggcuuua

SEQ ID NO: 2589616 - RNA, 19 nt, Homo sapiens
  misc_RNA (1)...(19): siRNA sense strand
gagaaaauuggcaagaaaa

SEQ ID NO: 2589617 - RNA, 19 nt, Homo sapiens
  misc_RNA (1)...(19): siRNA sense strand
ggagaaaagcuuaugaaca

SEQ ID NO: 2589618 - RNA, 19 nt, Homo sapiens
  misc_RNA (1)...(19): siRNA sense strand
ggacaaauguguaccugga

SEQ ID NO: 2589619 - RNA, 19 nt, Homo sapiens
  misc_RNA (1)...(19): siRNA sense strand
aaauaucaagggagugaaa

SEQ ID NO: 2589620 - RNA, 19 nt, Homo sapiens
  misc_RNA (1)...(19): siRNA sense strand
agacauaugaggacagcuu

SEQ ID NO: 2589621 - RNA, 19 nt, Homo sapiens
  misc_RNA (1)...(19): siRNA sense strand
ugacaaaggaaacaggaca

SEQ ID NO: 2589622 - RNA, 19 nt, Homo sapiens
  misc_RNA (1)...(19): siRNA sense strand
uggcauuggaagcggagaa

SEQ ID NO: 2589623 - RNA, 19 nt, Homo sapiens
  misc_RNA (1)...(19): siRNA sense strand
auccaaaucuucagccaaa

SEQ ID NO: 2589624 - RNA, 19 nt, Homo sapiens
  misc_RNA (1)...(19): siRNA sense strand
ccaaagaggcuggagaaaa

SEQ ID NO: 2589625 - RNA, 19 nt, Homo sapiens
  misc_RNA (1)...(19): siRNA sense strand
gagacaaagcuaagcaagu

SEQ ID NO: 2589626 - RNA, 19 nt, Homo sapiens
  misc_RNA (1)...(19): siRNA sense strand
uggugguguuucuggauua

SEQ ID NO: 2589627 - RNA, 19 nt, Homo sapiens
  misc_RNA (1)...(19): siRNA sense strand
cauuggaagcggagaaagu

SEQ ID NO: 2589628 - RNA, 19 nt, Homo sapiens
  misc_RNA (1)...(19): siRNA sense strand
auucacggauggaggagaa

SEQ ID NO: 2589629 - RNA, 19 nt, Homo sapiens
  misc_RNA (1)...(19): siRNA sense strand
uuuccuugaugcagaguua

SEQ ID NO: 2589630 - RNA, 19 nt, Homo sapiens
  misc_RNA (1)...(19): siRNA sense strand
gccaaaggaauuacagauu

SEQ ID NO: 2589631 - RNA, 19 nt, Homo sapiens
  misc_RNA (1)...(19): siRNA sense strand
ugaugagacaccugguuaa

SEQ ID NO: 2589632 - RNA, 19 nt, Homo sapiens
  misc_RNA (1)...(19): siRNA sense strand
caucaguagcagacauauu

SEQ ID NO: 2589633 - RNA, 19 nt, Homo sapiens
  misc_RNA (1)...(19): siRNA sense strand
cggaaacccugaagccaga

SEQ ID NO: 2589634 - RNA, 19 nt, Homo sapiens
  misc_RNA (1)...(19): siRNA sense strand
ccagaaucuuucauggaga

SEQ ID NO: 2589635 - RNA, 19 nt, Homo sapiens
  misc_RNA (1)...(19): siRNA sense strand
ggaugugaguggaaguguu

SEQ ID NO: 2589636 - RNA, 19 nt, Homo sapiens
  misc_RNA (1)...(19): siRNA sense strand
cgauaacgacaguaaauca

SEQ ID NO: 2589637 - RNA, 19 nt, Homo sapiens
  misc_RNA (1)...(19): siRNA sense strand
agccaaacuagaagagaca

SEQ ID NO: 2589638 - RNA, 19 nt, Homo sapiens
  misc_RNA (1)...(19): siRNA sense strand
gagcugcauuacugaacaa

SEQ ID NO: 2589639 - RNA, 19 nt, Homo sapiens
  misc_RNA (1)...(19): siRNA sense strand
ccagggauauugagaaacu

SEQ ID NO: 2589640 - RNA, 19 nt, Homo sapiens
  misc_RNA (1)...(19): siRNA sense strand
acuacaaugcaaaggauga

SEQ ID NO: 2589641 - RNA, 19 nt, Homo sapiens
  misc_RNA (1)...(19): siRNA sense strand
agaugaugauuucgugaau

SEQ ID NO: 2589642 - RNA, 19 nt, Homo sapiens
  misc_RNA (1)...(19): siRNA sense strand
uaagcaaagcuguagaaau

SEQ ID NO: 2589643 - RNA, 19 nt, Homo sapiens
  misc_RNA (1)...(19): siRNA sense strand
gcagaguuagagaaugaua

SEQ ID NO: 2589644 - RNA, 19 nt, Homo sapiens
  misc_RNA (1)...(19): siRNA sense strand
cccaaagaggcuggagaaa

SEQ ID NO: 2589645 - RNA, 19 nt, Homo sapiens
  misc_RNA (1)...(19): siRNA sense strand
ggaacugggacuugucauu

SEQ ID NO: 2589646 - RNA, 19 nt, Homo sapiens
  misc_RNA (1)...(19): siRNA sense strand
gacaaaggaaacaggacau

SEQ ID NO: 2589647 - RNA, 19 nt, Homo sapiens
  misc_RNA (1)...(19): siRNA sense strand
ggaaacaggacauacacau

SEQ ID NO: 2589648 - RNA, 19 nt, Homo sapiens
  misc_RNA (1)...(19): siRNA sense strand
ugugacugauggugggauu

SEQ ID NO: 2589649 - RNA, 19 nt, Homo sapiens
  misc_RNA (1)...(19): siRNA sense strand
ucuggaugaugguggguuu

SEQ ID NO: 2589650 - RNA, 19 nt, Homo sapiens
  misc_RNA (1)...(19): siRNA sense strand
cugaacaaacccaguauuu

SEQ ID NO: 2589651 - RNA, 19 nt, Homo sapiens
  misc_RNA (1)...(19): siRNA sense strand
cagauuauaagaagggcuu

SEQ ID NO: 2589652 - RNA, 19 nt, Homo sapiens
  misc_RNA (1)...(19): siRNA sense strand
auaacaaugucuuggagga

SEQ ID NO: 2589653 - RNA, 19 nt, Homo sapiens
  misc_RNA (1)...(19): siRNA sense strand
gagcaaacugcaauaagau

SEQ ID NO: 2589654 - RNA, 19 nt, Homo sapiens
  misc_RNA (1)...(19): siRNA sense strand
caguggauggccugugaaa

SEQ ID NO: 2589655 - RNA, 19 nt, Homo sapiens
  misc_RNA (1)...(19): siRNA sense strand
ccgacuaucuggaggccua

SEQ ID NO: 2589656 - RNA, 19 nt, Homo sapiens
  misc_RNA (1)...(19): siRNA sense strand
cagcaugaacagagagcca

SEQ ID NO: 2589657 - RNA, 19 nt, Homo sapiens
  misc_RNA (1)...(19): siRNA sense strand
guaaaagaaggcugugaaa

SEQ ID NO: 2589658 - RNA, 19 nt, Homo sapiens
  misc_RNA (1)...(19): siRNA sense strand
acgcaauaauagaaagauc

SEQ ID NO: 2589659 - RNA, 19 nt, Homo sapiens
  misc_RNA (1)...(19): siRNA sense strand
caaccaucgcagugggaca

SEQ ID NO: 2589660 - RNA, 19 nt, Homo sapiens
  misc_RNA (1)...(19): siRNA sense strand
ccaucucauucgaagcaaa

SEQ ID NO: 2589661 - RNA, 19 nt, Homo sapiens
  misc_RNA (1)...(19): siRNA sense strand
ccaguaaaucaggaggaaa

SEQ ID NO: 2589662 - RNA, 19 nt, Homo sapiens
  misc_RNA (1)...(19): siRNA sense strand
guguggaaccagucaagaa

SEQ ID NO: 2589663 - RNA, 19 nt, Homo sapiens
  misc_RNA (1)...(19): siRNA sense strand
ggacguggaucgagagcag

SEQ ID NO: 2589664 - RNA, 19 nt, Homo sapiens
  misc_RNA (1)...(19): siRNA sense strand
aauuaaucauccagcucaa

SEQ ID NO: 2589665 - RNA, 19 nt, Homo sapiens
  misc_RNA (1)...(19): siRNA sense strand
gcccaggcacaguuggaaa

SEQ ID NO: 2589666 - RNA, 19 nt, Homo sapiens
  misc_RNA (1)...(19): siRNA sense strand
cagucaaacuagaaaacau

SEQ ID NO: 2589667 - RNA, 19 nt, Homo sapiens
  misc_RNA (1)...(19): siRNA sense strand
gguaaaagaaggcugugaa

SEQ ID NO: 2589668 - RNA, 19 nt, Homo sapiens
  misc_RNA (1)...(19): siRNA sense strand
agauccaacacaaggucaa

SEQ ID NO: 2589669 - RNA, 19 nt, Homo sapiens
  misc_RNA (1)...(19): siRNA sense strand
gcauuugcgguucggacaa

SEQ ID NO: 2589670 - RNA, 19 nt, Homo sapiens
  misc_RNA (1)...(19): siRNA sense strand
agaugguagcagcugauaa

SEQ ID NO: 2589671 - RNA, 19 nt, Homo sapiens
  misc_RNA (1)...(19): siRNA sense strand
uguggaaccagucaagaaa

SEQ ID NO: 2589672 - RNA, 19 nt, Homo sapiens
  misc_RNA (1)...(19): siRNA sense strand
gagagccaagcaagggaaa

SEQ ID NO: 2589673 - RNA, 19 nt, Homo sapiens
  misc_RNA (1)...(19): siRNA sense strand
cauuccaagcccagucaaa

SEQ ID NO: 2589674 - RNA, 19 nt, Homo sapiens
  misc_RNA (1)...(19): siRNA sense strand
cauaguaccuaguuccaga

SEQ ID NO: 2589675 - RNA, 19 nt, Homo sapiens
  misc_RNA (1)...(19): siRNA sense strand
gaacauugcaguugguggu

SEQ ID NO: 2589676 - RNA, 19 nt, Homo sapiens
  misc_RNA (1)...(19): siRNA sense strand
ccgacuaucuggaggccua

SEQ ID NO: 2589677 - RNA, 19 nt, Homo sapiens
  misc_RNA (1)...(19): siRNA sense strand
acguagagccaaaggaaga

SEQ ID NO: 2589678 - RNA, 19 nt, Homo sapiens
  misc_RNA (1)...(19): siRNA sense strand
cugccuacguagagccaaa

SEQ ID NO: 2589679 - RNA, 19 nt, Homo sapiens
  misc_RNA (1)...(19): siRNA sense strand
cagcaugaacagagagcca

SEQ ID NO: 2589680 - RNA, 19 nt, Homo sapiens
  misc_RNA (1)...(19): siRNA sense strand
guaaaagaaggcugugaaa

SEQ ID NO: 2589681 - RNA, 19 nt, Homo sapiens
  misc_RNA (1)...(19): siRNA sense strand
acgcaauaauagaaagauc

SEQ ID NO: 2589682 - RNA, 19 nt, Homo sapiens
  misc_RNA (1)...(19): siRNA sense strand
caaccaucgcagugggaca

SEQ ID NO: 2589683 - RNA, 19 nt, Homo sapiens
  misc_RNA (1)...(19): siRNA sense strand
ccaucucauucgaagcaaa

SEQ ID NO: 2589684 - RNA, 19 nt, Homo sapiens
  misc_RNA (1)...(19): siRNA sense strand
ccaguaaaucaggaggaaa

SEQ ID NO: 2589685 - RNA, 19 nt, Homo sapiens
  misc_RNA (1)...(19): siRNA sense strand
guguggaaccagucaagaa

SEQ ID NO: 2589686 - RNA, 19 nt, Homo sapiens
  misc_RNA (1)...(19): siRNA sense strand
ggacguggaucgagagcag

SEQ ID NO: 2589687 - RNA, 19 nt, Homo sapiens
  misc_RNA (1)...(19): siRNA sense strand
aauuaaucauccagcucaa

SEQ ID NO: 2589688 - RNA, 19 nt, Homo sapiens
  misc_RNA (1)...(19): siRNA sense strand
cuacguagagccaaaggaa

SEQ ID NO: 2589689 - RNA, 19 nt, Homo sapiens
  misc_RNA (1)...(19): siRNA sense strand
gcccaggcacaguuggaaa

SEQ ID NO: 2589690 - RNA, 19 nt, Homo sapiens
  misc_RNA (1)...(19): siRNA sense strand
cagucaaacuagaaaacau

SEQ ID NO: 2589691 - RNA, 19 nt, Homo sapiens
  misc_RNA (1)...(19): siRNA sense strand
gguaaaagaaggcugugaa

SEQ ID NO: 2589692 - RNA, 19 nt, Homo sapiens
  misc_RNA (1)...(19): siRNA sense strand
agauccaacacaaggucaa

SEQ ID NO: 2589693 - RNA, 19 nt, Homo sapiens
  misc_RNA (1)...(19): siRNA sense strand
gcauuugcgguucggacaa

SEQ ID NO: 2589694 - RNA, 19 nt, Homo sapiens
  misc_RNA (1)...(19): siRNA sense strand
agaugguagcagcugauaa

SEQ ID NO: 2589695 - RNA, 19 nt, Homo sapiens
  misc_RNA (1)...(19): siRNA sense strand
uguggaaccagucaagaaa

SEQ ID NO: 2589696 - RNA, 19 nt, Homo sapiens
  misc_RNA (1)...(19): siRNA sense strand
gagagccaagcaagggaaa

SEQ ID NO: 2589697 - RNA, 19 nt, Homo sapiens
  misc_RNA (1)...(19): siRNA sense strand
cauuccaagcccagucaaa

SEQ ID NO: 2589698 - RNA, 19 nt, Homo sapiens
  misc_RNA (1)...(19): siRNA sense strand
cauaguaccuaguuccaga

SEQ ID NO: 2589699 - RNA, 19 nt, Homo sapiens
  misc_RNA (1)...(19): siRNA sense strand
gaacauugcaguugguggu

SEQ ID NO: 2589700 - RNA, 19 nt, Homo sapiens
  misc_RNA (1)...(19): siRNA sense strand
ccgacuaucuggaggccua

SEQ ID NO: 2589701 - RNA, 19 nt, Homo sapiens
  misc_RNA (1)...(19): siRNA sense strand
acguagagccaaaggaaga

SEQ ID NO: 2589702 - RNA, 19 nt, Homo sapiens
  misc_RNA (1)...(19): siRNA sense strand
cugccuacguagagccaaa

SEQ ID NO: 2589703 - RNA, 19 nt, Homo sapiens
  misc_RNA (1)...(19): siRNA sense strand
cagcaugaacagagagcca

SEQ ID NO: 2589704 - RNA, 19 nt, Homo sapiens
  misc_RNA (1)...(19): siRNA sense strand
guaaaagaaggcugugaaa

SEQ ID NO: 2589705 - RNA, 19 nt, Homo sapiens
  misc_RNA (1)...(19): siRNA sense strand
acgcaauaauagaaagauc

SEQ ID NO: 2589706 - RNA, 19 nt, Homo sapiens
  misc_RNA (1)...(19): siRNA sense strand
caaccaucgcagugggaca

SEQ ID NO: 2589707 - RNA, 19 nt, Homo sapiens
  misc_RNA (1)...(19): siRNA sense strand
ccaucucauucgaagcaaa

SEQ ID NO: 2589708 - RNA, 19 nt, Homo sapiens
  misc_RNA (1)...(19): siRNA sense strand
ccaguaaaucaggaggaaa

SEQ ID NO: 2589709 - RNA, 19 nt, Homo sapiens
  misc_RNA (1)...(19): siRNA sense strand
guguggaaccagucaagaa

SEQ ID NO: 2589710 - RNA, 19 nt, Homo sapiens
  misc_RNA (1)...(19): siRNA sense strand
ggacguggaucgagagcag

SEQ ID NO: 2589711 - RNA, 19 nt, Homo sapiens
  misc_RNA (1)...(19): siRNA sense strand
aauuaaucauccagcucaa

SEQ ID NO: 2589712 - RNA, 19 nt, Homo sapiens
  misc_RNA (1)...(19): siRNA sense strand
cuacguagagccaaaggaa

SEQ ID NO: 2589713 - RNA, 19 nt, Homo sapiens
  misc_RNA (1)...(19): siRNA sense strand
gcccaggcacaguuggaaa

SEQ ID NO: 2589714 - RNA, 19 nt, Homo sapiens
  misc_RNA (1)...(19): siRNA sense strand
cagucaaacuagaaaacau

SEQ ID NO: 2589715 - RNA, 19 nt, Homo sapiens
  misc_RNA (1)...(19): siRNA sense strand
gguaaaagaaggcugugaa

SEQ ID NO: 2589716 - RNA, 19 nt, Homo sapiens
  misc_RNA (1)...(19): siRNA sense strand
agauccaacacaaggucaa

SEQ ID NO: 2589717 - RNA, 19 nt, Homo sapiens
  misc_RNA (1)...(19): siRNA sense strand
gcauuugcgguucggacaa

SEQ ID NO: 2589718 - RNA, 19 nt, Homo sapiens
  misc_RNA (1)...(19): siRNA sense strand
agaugguagcagcugauaa

SEQ ID NO: 2589719 - RNA, 19 nt, Homo sapiens
  misc_RNA (1)...(19): siRNA sense strand
uguggaaccagucaagaaa

SEQ ID NO: 2589720 - RNA, 19 nt, Homo sapiens
  misc_RNA (1)...(19): siRNA sense strand
gagagccaagcaagggaaa

SEQ ID NO: 2589721 - RNA, 19 nt, Homo sapiens
  misc_RNA (1)...(19): siRNA sense strand
cauuccaagcccagucaaa

SEQ ID NO: 2589722 - RNA, 19 nt, Homo sapiens
  misc_RNA (1)...(19): siRNA sense strand
cauaguaccuaguuccaga

SEQ ID NO: 2589723 - RNA, 19 nt, Homo sapiens
  misc_RNA (1)...(19): siRNA sense strand
gaacauugcaguugguggu

SEQ ID NO: 2589724 - RNA, 19 nt, Homo sapiens
  misc_RNA (1)...(19): siRNA sense strand
ccgacuaucuggaggccua

SEQ ID NO: 2589725 - RNA, 19 nt, Homo sapiens
  misc_RNA (1)...(19): siRNA sense strand
acguagagccaaaggaaga

SEQ ID NO: 2589726 - RNA, 19 nt, Homo sapiens
  misc_RNA (1)...(19): siRNA sense strand
cugccuacguagagccaaa

SEQ ID NO: 2589727 - RNA, 19 nt, Homo sapiens
  misc_RNA (1)...(19): siRNA sense strand
cagcaugaacagagagcca

SEQ ID NO: 2589728 - RNA, 19 nt, Homo sapiens
  misc_RNA (1)...(19): siRNA sense strand
guaaaagaaggcugugaaa

SEQ ID NO: 2589729 - RNA, 19 nt, Homo sapiens
  misc_RNA (1)...(19): siRNA sense strand
acgcaauaauagaaagauc

SEQ ID NO: 2589730 - RNA, 19 nt, Homo sapiens
  misc_RNA (1)...(19): siRNA sense strand
caaccaucgcagugggaca

SEQ ID NO: 2589731 - RNA, 19 nt, Homo sapiens
  misc_RNA (1)...(19): siRNA sense strand
ccaucucauucgaagcaaa

SEQ ID NO: 2589732 - RNA, 19 nt, Homo sapiens
  misc_RNA (1)...(19): siRNA sense strand
ccaguaaaucaggaggaaa

SEQ ID NO: 2589733 - RNA, 19 nt, Homo sapiens
  misc_RNA (1)...(19): siRNA sense strand
guguggaaccagucaagaa

SEQ ID NO: 2589734 - RNA, 19 nt, Homo sapiens
  misc_RNA (1)...(19): siRNA sense strand
ggacguggaucgagagcag

SEQ ID NO: 2589735 - RNA, 19 nt, Homo sapiens
  misc_RNA (1)...(19): siRNA sense strand
aauuaaucauccagcucaa

SEQ ID NO: 2589736 - RNA, 19 nt, Homo sapiens
  misc_RNA (1)...(19): siRNA sense strand
cuacguagagccaaaggaa

SEQ ID NO: 2589737 - RNA, 19 nt, Homo sapiens
  misc_RNA (1)...(19): siRNA sense strand
gcccaggcacaguuggaaa

SEQ ID NO: 2589738 - RNA, 19 nt, Homo sapiens
  misc_RNA (1)...(19): siRNA sense strand
cagucaaacuagaaaacau

SEQ ID NO: 2589739 - RNA, 19 nt, Homo sapiens
  misc_RNA (1)...(19): siRNA sense strand
gguaaaagaaggcugugaa

SEQ ID NO: 2589740 - RNA, 19 nt, Homo sapiens
  misc_RNA (1)...(19): siRNA sense strand
agauccaacacaaggucaa

SEQ ID NO: 2589741 - RNA, 19 nt, Homo sapiens
  misc_RNA (1)...(19): siRNA sense strand
gcauuugcgguucggacaa

SEQ ID NO: 2589742 - RNA, 19 nt, Homo sapiens
  misc_RNA (1)...(19): siRNA sense strand
agaugguagcagcugauaa

SEQ ID NO: 2589743 - RNA, 19 nt, Homo sapiens
  misc_RNA (1)...(19): siRNA sense strand
uguggaaccagucaagaaa

SEQ ID NO: 2589744 - RNA, 19 nt, Homo sapiens
  misc_RNA (1)...(19): siRNA sense strand
gagagccaagcaagggaaa

SEQ ID NO: 2589745 - RNA, 19 nt, Homo sapiens
  misc_RNA (1)...(19): siRNA sense strand
cauuccaagcccagucaaa

SEQ ID NO: 2589746 - RNA, 19 nt, Homo sapiens
  misc_RNA (1)...(19): siRNA sense strand
cauaguaccuaguuccaga

SEQ ID NO: 2589747 - RNA, 19 nt, Homo sapiens
  misc_RNA (1)...(19): siRNA sense strand
gaacauugcaguugguggu

SEQ ID NO: 2589748 - RNA, 19 nt, Homo sapiens
  misc_RNA (1)...(19): siRNA sense strand
ccgacuaucuggaggccua

SEQ ID NO: 2589749 - RNA, 19 nt, Homo sapiens
  misc_RNA (1)...(19): siRNA sense strand
acguagagccaaaggaaga

SEQ ID NO: 2589750 - RNA, 19 nt, Homo sapiens
  misc_RNA (1)...(19): siRNA sense strand
cugccuacguagagccaaa

SEQ ID NO: 2589751 - RNA, 19 nt, Homo sapiens
  misc_RNA (1)...(19): siRNA sense strand
cagcaugaacagagagcca

SEQ ID NO: 2589752 - RNA, 19 nt, Homo sapiens
  misc_RNA (1)...(19): siRNA sense strand
guaaaagaaggcugugaaa

SEQ ID NO: 2589753 - RNA, 19 nt, Homo sapiens
  misc_RNA (1)...(19): siRNA sense strand
acgcaauaauagaaagauc

SEQ ID NO: 2589754 - RNA, 19 nt, Homo sapiens
  misc_RNA (1)...(19): siRNA sense strand
caaccaucgcagugggaca

SEQ ID NO: 2589755 - RNA, 19 nt, Homo sapiens
  misc_RNA (1)...(19): siRNA sense strand
ccaucucauucgaagcaaa

SEQ ID NO: 2589756 - RNA, 19 nt, Homo sapiens
  misc_RNA (1)...(19): siRNA sense strand
ccaguaaaucaggaggaaa

SEQ ID NO: 2589757 - RNA, 19 nt, Homo sapiens
  misc_RNA (1)...(19): siRNA sense strand
guguggaaccagucaagaa

SEQ ID NO: 2589758 - RNA, 19 nt, Homo sapiens
  misc_RNA (1)...(19): siRNA sense strand
ggacguggaucgagagcag

SEQ ID NO: 2589759 - RNA, 19 nt, Homo sapiens
  misc_RNA (1)...(19): siRNA sense strand
aauuaaucauccagcucaa

SEQ ID NO: 2589760 - RNA, 19 nt, Homo sapiens
  misc_RNA (1)...(19): siRNA sense strand
cuacguagagccaaaggaa

SEQ ID NO: 2589761 - RNA, 19 nt, Homo sapiens
  misc_RNA (1)...(19): siRNA sense strand
gcccaggcacaguuggaaa

SEQ ID NO: 2589762 - RNA, 19 nt, Homo sapiens
  misc_RNA (1)...(19): siRNA sense strand
cagucaaacuagaaaacau

SEQ ID NO: 2589763 - RNA, 19 nt, Homo sapiens
  misc_RNA (1)...(19): siRNA sense strand
gguaaaagaaggcugugaa

SEQ ID NO: 2589764 - RNA, 19 nt, Homo sapiens
  misc_RNA (1)...(19): siRNA sense strand
agauccaacacaaggucaa

SEQ ID NO: 2589765 - RNA, 19 nt, Homo sapiens
  misc_RNA (1)...(19): siRNA sense strand
gcauuugcgguucggacaa

SEQ ID NO: 2589766 - RNA, 19 nt, Homo sapiens
  misc_RNA (1)...(19): siRNA sense strand
agaugguagcagcugauaa

SEQ ID NO: 2589767 - RNA, 19 nt, Homo sapiens
  misc_RNA (1)...(19): siRNA sense strand
uguggaaccagucaagaaa

SEQ ID NO: 2589768 - RNA, 19 nt, Homo sapiens
  misc_RNA (1)...(19): siRNA sense strand
gagagccaagcaagggaaa

SEQ ID NO: 2589769 - RNA, 19 nt, Homo sapiens
  misc_RNA (1)...(19): siRNA sense strand
cauuccaagcccagucaaa

SEQ ID NO: 2589770 - RNA, 19 nt, Homo sapiens
  misc_RNA (1)...(19): siRNA sense strand
cauaguaccuaguuccaga

SEQ ID NO: 2589771 - RNA, 19 nt, Homo sapiens
  misc_RNA (1)...(19): siRNA sense strand
gaacauugcaguugguggu

SEQ ID NO: 2589772 - RNA, 19 nt, Homo sapiens
  misc_RNA (1)...(19): siRNA sense strand
ccgacuaucuggaggccua

SEQ ID NO: 2589773 - RNA, 19 nt, Homo sapiens
  misc_RNA (1)...(19): siRNA sense strand
acguagagccaaaggaaga

SEQ ID NO: 2589774 - RNA, 19 nt, Homo sapiens
  misc_RNA (1)...(19): siRNA sense strand
cugccuacguagagccaaa

SEQ ID NO: 2589775 - RNA, 19 nt, Homo sapiens
  misc_RNA (1)...(19): siRNA sense strand
cagcaugaacagagagcca

SEQ ID NO: 2589776 - RNA, 19 nt, Homo sapiens
  misc_RNA (1)...(19): siRNA sense strand
guaaaagaaggcugugaaa

SEQ ID NO: 2589777 - RNA, 19 nt, Homo sapiens
  misc_RNA (1)...(19): siRNA sense strand
acgcaauaauagaaagauc

SEQ ID NO: 2589778 - RNA, 19 nt, Homo sapiens
  misc_RNA (1)...(19): siRNA sense strand
caaccaucgcagugggaca

SEQ ID NO: 2589779 - RNA, 19 nt, Homo sapiens
  misc_RNA (1)...(19): siRNA sense strand
ccaucucauucgaagcaaa

SEQ ID NO: 2589780 - RNA, 19 nt, Homo sapiens
  misc_RNA (1)...(19): siRNA sense strand
ccaguaaaucaggaggaaa

SEQ ID NO: 2589781 - RNA, 19 nt, Homo sapiens
  misc_RNA (1)...(19): siRNA sense strand
guguggaaccagucaagaa

SEQ ID NO: 2589782 - RNA, 19 nt, Homo sapiens
  misc_RNA (1)...(19): siRNA sense strand
ggacguggaucgagagcag

SEQ ID NO: 2589783 - RNA, 19 nt, Homo sapiens
  misc_RNA (1)...(19): siRNA sense strand
aauuaaucauccagcucaa

SEQ ID NO: 2589784 - RNA, 19 nt, Homo sapiens
  misc_RNA (1)...(19): siRNA sense strand
cuacguagagccaaaggaa

SEQ ID NO: 2589785 - RNA, 19 nt, Homo sapiens
  misc_RNA (1)...(19): siRNA sense strand
gcccaggcacaguuggaaa

SEQ ID NO: 2589786 - RNA, 19 nt, Homo sapiens
  misc_RNA (1)...(19): siRNA sense strand
cagucaaacuagaaaacau

SEQ ID NO: 2589787 - RNA, 19 nt, Homo sapiens
  misc_RNA (1)...(19): siRNA sense strand
gguaaaagaaggcugugaa

SEQ ID NO: 2589788 - RNA, 19 nt, Homo sapiens
  misc_RNA (1)...(19): siRNA sense strand
agauccaacacaaggucaa

SEQ ID NO: 2589789 - RNA, 19 nt, Homo sapiens
  misc_RNA (1)...(19): siRNA sense strand
gcauuugcgguucggacaa

SEQ ID NO: 2589790 - RNA, 19 nt, Homo sapiens
  misc_RNA (1)...(19): siRNA sense strand
agaugguagcagcugauaa

SEQ ID NO: 2589791 - RNA, 19 nt, Homo sapiens
  misc_RNA (1)...(19): siRNA sense strand
uguggaaccagucaagaaa

SEQ ID NO: 2589792 - RNA, 19 nt, Homo sapiens
  misc_RNA (1)...(19): siRNA sense strand
gagagccaagcaagggaaa

SEQ ID NO: 2589793 - RNA, 19 nt, Homo sapiens
  misc_RNA (1)...(19): siRNA sense strand
cauuccaagcccagucaaa

SEQ ID NO: 2589794 - RNA, 19 nt, Homo sapiens
  misc_RNA (1)...(19): siRNA sense strand
cauaguaccuaguuccaga

SEQ ID NO: 2589795 - RNA, 19 nt, Homo sapiens
  misc_RNA (1)...(19): siRNA sense strand
gaacauugcaguugguggu

SEQ ID NO: 2589796 - RNA, 19 nt, Homo sapiens
  misc_RNA (1)...(19): siRNA sense strand
ccgacuaucuggaggccua

SEQ ID NO: 2589797 - RNA, 19 nt, Homo sapiens
  misc_RNA (1)...(19): siRNA sense strand
acguagagccaaaggaaga

SEQ ID NO: 2589798 - RNA, 19 nt, Homo sapiens
  misc_RNA (1)...(19): siRNA sense strand
cugccuacguagagccaaa

SEQ ID NO: 2589799 - RNA, 19 nt, Homo sapiens
  misc_RNA (1)...(19): siRNA sense strand
cagcaugaacagagagcca

SEQ ID NO: 2589800 - RNA, 19 nt, Homo sapiens
  misc_RNA (1)...(19): siRNA sense strand
guaaaagaaggcugugaaa

SEQ ID NO: 2589801 - RNA, 19 nt, Homo sapiens
  misc_RNA (1)...(19): siRNA sense strand
acgcaauaauagaaagauc

SEQ ID NO: 2589802 - RNA, 19 nt, Homo sapiens
  misc_RNA (1)...(19): siRNA sense strand
caaccaucgcagugggaca

SEQ ID NO: 2589803 - RNA, 19 nt, Homo sapiens
  misc_RNA (1)...(19): siRNA sense strand
ccaucucauucgaagcaaa

SEQ ID NO: 2589804 - RNA, 19 nt, Homo sapiens
  misc_RNA (1)...(19): siRNA sense strand
ccaguaaaucaggaggaaa

SEQ ID NO: 2589805 - RNA, 19 nt, Homo sapiens
  misc_RNA (1)...(19): siRNA sense strand
guguggaaccagucaagaa

SEQ ID NO: 2589806 - RNA, 19 nt, Homo sapiens
  misc_RNA (1)...(19): siRNA sense strand
ggacguggaucgagagcag

SEQ ID NO: 2589807 - RNA, 19 nt, Homo sapiens
  misc_RNA (1)...(19): siRNA sense strand
aauuaaucauccagcucaa

SEQ ID NO: 2589808 - RNA, 19 nt, Homo sapiens
  misc_RNA (1)...(19): siRNA sense strand
cuacguagagccaaaggaa

SEQ ID NO: 2589809 - RNA, 19 nt, Homo sapiens
  misc_RNA (1)...(19): siRNA sense strand
gcccaggcacaguuggaaa

SEQ ID NO: 2589810 - RNA, 19 nt, Homo sapiens
  misc_RNA (1)...(19): siRNA sense strand
cagucaaacuagaaaacau

SEQ ID NO: 2589811 - RNA, 19 nt, Homo sapiens
  misc_RNA (1)...(19): siRNA sense strand
gguaaaagaaggcugugaa

SEQ ID NO: 2589812 - RNA, 19 nt, Homo sapiens
  misc_RNA (1)...(19): siRNA sense strand
agauccaacacaaggucaa

SEQ ID NO: 2589813 - RNA, 19 nt, Homo sapiens
  misc_RNA (1)...(19): siRNA sense strand
gcauuugcgguucggacaa

SEQ ID NO: 2589814 - RNA, 19 nt, Homo sapiens
  misc_RNA (1)...(19): siRNA sense strand
agaugguagcagcugauaa

SEQ ID NO: 2589815 - RNA, 19 nt, Homo sapiens
  misc_RNA (1)...(19): siRNA sense strand
uguggaaccagucaagaaa

SEQ ID NO: 2589816 - RNA, 19 nt, Homo sapiens
  misc_RNA (1)...(19): siRNA sense strand
gagagccaagcaagggaaa

SEQ ID NO: 2589817 - RNA, 19 nt, Homo sapiens
  misc_RNA (1)...(19): siRNA sense strand
cauuccaagcccagucaaa

SEQ ID NO: 2589818 - RNA, 19 nt, Homo sapiens
  misc_RNA (1)...(19): siRNA sense strand
cauaguaccuaguuccaga

SEQ ID NO: 2589819 - RNA, 19 nt, Homo sapiens
  misc_RNA (1)...(19): siRNA sense strand
gaacauugcaguugguggu

SEQ ID NO: 2589820 - RNA, 19 nt, Homo sapiens
  misc_RNA (1)...(19): siRNA sense strand
ccgacuaucuggaggccua

SEQ ID NO: 2589821 - RNA, 19 nt, Homo sapiens
  misc_RNA (1)...(19): siRNA sense strand
acguagagccaaaggaaga

SEQ ID NO: 2589822 - RNA, 19 nt, Homo sapiens
  misc_RNA (1)...(19): siRNA sense strand
cugccuacguagagccaaa

SEQ ID NO: 2589823 - RNA, 19 nt, Homo sapiens
  misc_RNA (1)...(19): siRNA sense strand
cagcaugaacagagagcca

SEQ ID NO: 2589824 - RNA, 19 nt, Homo sapiens
  misc_RNA (1)...(19): siRNA sense strand
guaaaagaaggcugugaaa

SEQ ID NO: 2589825 - RNA, 19 nt, Homo sapiens
  misc_RNA (1)...(19): siRNA sense strand
acgcaauaauagaaagauc

SEQ ID NO: 2589826 - RNA, 19 nt, Homo sapiens
  misc_RNA (1)...(19): siRNA sense strand
caaccaucgcagugggaca

SEQ ID NO: 2589827 - RNA, 19 nt, Homo sapiens
  misc_RNA (1)...(19): siRNA sense strand
ccaucucauucgaagcaaa

SEQ ID NO: 2589828 - RNA, 19 nt, Homo sapiens
  misc_RNA (1)...(19): siRNA sense strand
ccaguaaaucaggaggaaa

SEQ ID NO: 2589829 - RNA, 19 nt, Homo sapiens
  misc_RNA (1)...(19): siRNA sense strand
guguggaaccagucaagaa

SEQ ID NO: 2589830 - RNA, 19 nt, Homo sapiens
  misc_RNA (1)...(19): siRNA sense strand
ggacguggaucgagagcag

SEQ ID NO: 2589831 - RNA, 19 nt, Homo sapiens
  misc_RNA (1)...(19): siRNA sense strand
aauuaaucauccagcucaa

SEQ ID NO: 2589832 - RNA, 19 nt, Homo sapiens
  misc_RNA (1)...(19): siRNA sense strand
cuacguagagccaaaggaa

SEQ ID NO: 2589833 - RNA, 19 nt, Homo sapiens
  misc_RNA (1)...(19): siRNA sense strand
gcccaggcacaguuggaaa

SEQ ID NO: 2589834 - RNA, 19 nt, Homo sapiens
  misc_RNA (1)...(19): siRNA sense strand
cagucaaacuagaaaacau

SEQ ID NO: 2589835 - RNA, 19 nt, Homo sapiens
  misc_RNA (1)...(19): siRNA sense strand
gguaaaagaaggcugugaa

SEQ ID NO: 2589836 - RNA, 19 nt, Homo sapiens
  misc_RNA (1)...(19): siRNA sense strand
agauccaacacaaggucaa

SEQ ID NO: 2589837 - RNA, 19 nt, Homo sapiens
  misc_RNA (1)...(19): siRNA sense strand
gcauuugcgguucggacaa

SEQ ID NO: 2589838 - RNA, 19 nt, Homo sapiens
  misc_RNA (1)...(19): siRNA sense strand
agaugguagcagcugauaa

SEQ ID NO: 2589839 - RNA, 19 nt, Homo sapiens
  misc_RNA (1)...(19): siRNA sense strand
uguggaaccagucaagaaa

SEQ ID NO: 2589840 - RNA, 19 nt, Homo sapiens
  misc_RNA (1)...(19): siRNA sense strand
gagagccaagcaagggaaa

SEQ ID NO: 2589841 - RNA, 19 nt, Homo sapiens
  misc_RNA (1)...(19): siRNA sense strand
cauuccaagcccagucaaa

SEQ ID NO: 2589842 - RNA, 19 nt, Homo sapiens
  misc_RNA (1)...(19): siRNA sense strand
cauaguaccuaguuccaga

SEQ ID NO: 2589843 - RNA, 19 nt, Homo sapiens
  misc_RNA (1)...(19): siRNA sense strand
gaacauugcaguugguggu

SEQ ID NO: 2589844 - RNA, 19 nt, Homo sapiens
  misc_RNA (1)...(19): siRNA sense strand
gaagaaaaggagaggaaaa

SEQ ID NO: 2589845 - RNA, 19 nt, Homo sapiens
  misc_RNA (1)...(19): siRNA sense strand
aggaagaggaggaggauga

SEQ ID NO: 2589846 - RNA, 19 nt, Homo sapiens
  misc_RNA (1)...(19): siRNA sense strand
gaguugaacaugaaggaaa

SEQ ID NO: 2589847 - RNA, 19 nt, Homo sapiens
  misc_RNA (1)...(19): siRNA sense strand
gggaagacccagagauaca

SEQ ID NO: 2589848 - RNA, 19 nt, Homo sapiens
  misc_RNA (1)...(19): siRNA sense strand
aggaaagagagaaggcaaa

SEQ ID NO: 2589849 - RNA, 19 nt, Homo sapiens
  misc_RNA (1)...(19): siRNA sense strand
ccgggaagacccagagaua

SEQ ID NO: 2589850 - RNA, 19 nt, Homo sapiens
  misc_RNA (1)...(19): siRNA sense strand
aacaaggacuggugggaaa

SEQ ID NO: 2589851 - RNA, 19 nt, Homo sapiens
  misc_RNA (1)...(19): siRNA sense strand
agaaagaagaagcggaaga

SEQ ID NO: 2589852 - RNA, 19 nt, Homo sapiens
  misc_RNA (1)...(19): siRNA sense strand
cggaagaaaaggagaggaa

SEQ ID NO: 2589853 - RNA, 19 nt, Homo sapiens
  misc_RNA (1)...(19): siRNA sense strand
caagaaacggaaagaacaa

SEQ ID NO: 2589854 - RNA, 19 nt, Homo sapiens
  misc_RNA (1)...(19): siRNA sense strand
cugcauuaguauaguggaa

SEQ ID NO: 2589855 - RNA, 19 nt, Homo sapiens
  misc_RNA (1)...(19): siRNA sense strand
cggccuagauucaaguaaa

SEQ ID NO: 2589856 - RNA, 19 nt, Homo sapiens
  misc_RNA (1)...(19): siRNA sense strand
ggaaaguugccaugagaga

SEQ ID NO: 2589857 - RNA, 19 nt, Homo sapiens
  misc_RNA (1)...(19): siRNA sense strand
gaggcaaagggaaggauaa

SEQ ID NO: 2589858 - RNA, 19 nt, Homo sapiens
  misc_RNA (1)...(19): siRNA sense strand
aagaagaagcggaagaaaa

SEQ ID NO: 2589859 - RNA, 19 nt, Homo sapiens
  misc_RNA (1)...(19): siRNA sense strand
aggaggaucuaaagggcua

SEQ ID NO: 2589860 - RNA, 19 nt, Homo sapiens
  misc_RNA (1)...(19): siRNA sense strand
ggaaacaaaacgagaagaa

SEQ ID NO: 2589861 - RNA, 19 nt, Homo sapiens
  misc_RNA (1)...(19): siRNA sense strand
aggaagaggaagaggagga

SEQ ID NO: 2589862 - RNA, 19 nt, Homo sapiens
  misc_RNA (1)...(19): siRNA sense strand
aauaugacccugaggcaaa

SEQ ID NO: 2589863 - RNA, 19 nt, Homo sapiens
  misc_RNA (1)...(19): siRNA sense strand
ugcaagugauacugagaaa

SEQ ID NO: 2589864 - RNA, 19 nt, Homo sapiens
  misc_RNA (1)...(19): siRNA sense strand
agcaauacgccaagagcaa

SEQ ID NO: 2589865 - RNA, 19 nt, Homo sapiens
  misc_RNA (1)...(19): siRNA sense strand
cuggguaaaugaugcgaua

SEQ ID NO: 2589866 - RNA, 19 nt, Homo sapiens
  misc_RNA (1)...(19): siRNA sense strand
gguuacaauugaugacuau

SEQ ID NO: 2589867 - RNA, 19 nt, Homo sapiens
  misc_RNA (1)...(19): siRNA sense strand
gagaggaaggcaaacgaaa

SEQ ID NO: 2589868 - RNA, 19 nt, Homo sapiens
  misc_RNA (1)...(19): siRNA sense strand
gagauaacaaccagaucaa

SEQ ID NO: 2589869 - RNA, 19 nt, Homo sapiens
  misc_RNA (1)...(19): siRNA sense strand
agaucaagaccgaagggaa

SEQ ID NO: 2589870 - RNA, 19 nt, Homo sapiens
  misc_RNA (1)...(19): siRNA sense strand
ucagaaagaagaagcggaa

SEQ ID NO: 2589871 - RNA, 19 nt, Homo sapiens
  misc_RNA (1)...(19): siRNA sense strand
acaacaaaccagaagucaa

SEQ ID NO: 2589872 - RNA, 19 nt, Homo sapiens
  misc_RNA (1)...(19): siRNA sense strand
guauuucaguagugaggaa

SEQ ID NO: 2589873 - RNA, 19 nt, Homo sapiens
  misc_RNA (1)...(19): siRNA sense strand
uaguauaguggaauggaaa

SEQ ID NO: 2589874 - RNA, 19 nt, Homo sapiens
  misc_RNA (1)...(19): siRNA sense strand
caggacuacuuuaggaaau

SEQ ID NO: 2589875 - RNA, 19 nt, Homo sapiens
  misc_RNA (1)...(19): siRNA sense strand
aaggaaagagagaaggcaa

SEQ ID NO: 2589876 - RNA, 19 nt, Homo sapiens
  misc_RNA (1)...(19): siRNA sense strand
ccugcgagaugcugguaaa

SEQ ID NO: 2589877 - RNA, 19 nt, Homo sapiens
  misc_RNA (1)...(19): siRNA sense strand
aguugaacaugaaggaaaa

SEQ ID NO: 2589878 - RNA, 19 nt, Homo sapiens
  misc_RNA (1)...(19): siRNA sense strand
gaucaagaccgaagggaac

SEQ ID NO: 2589879 - RNA, 19 nt, Homo sapiens
  misc_RNA (1)...(19): siRNA sense strand
uguuaggaauggauggaau

SEQ ID NO: 2589880 - RNA, 19 nt, Homo sapiens
  misc_RNA (1)...(19): siRNA sense strand
aggcaaagggaaggauaaa

SEQ ID NO: 2589881 - RNA, 19 nt, Homo sapiens
  misc_RNA (1)...(19): siRNA sense strand
gagaagaagaagaugaugu

SEQ ID NO: 2589882 - RNA, 19 nt, Homo sapiens
  misc_RNA (1)...(19): siRNA sense strand
ccaaagaaaacgucagcaa

SEQ ID NO: 2589883 - RNA, 19 nt, Homo sapiens
  misc_RNA (1)...(19): siRNA sense strand
aggaggagaggaaggcaaa

SEQ ID NO: 2589884 - RNA, 19 nt, Homo sapiens
  misc_RNA (1)...(19): siRNA sense strand
cggaugaagccaaaaguaa

SEQ ID NO: 2589885 - RNA, 19 nt, Homo sapiens
  misc_RNA (1)...(19): siRNA sense strand
aaaguugccaugagagaua

SEQ ID NO: 2589886 - RNA, 19 nt, Homo sapiens
  misc_RNA (1)...(19): siRNA sense strand
uguuaauagugauaggaga

SEQ ID NO: 2589887 - RNA, 19 nt, Homo sapiens
  misc_RNA (1)...(19): siRNA sense strand
acuaugagcuacaggacuu

SEQ ID NO: 2589888 - RNA, 19 nt, Homo sapiens
  misc_RNA (1)...(19): siRNA sense strand
cugaagagagcaauagaau

SEQ ID NO: 2589889 - RNA, 19 nt, Homo sapiens
  misc_RNA (1)...(19): siRNA sense strand
aggaaugcuacgaggauga

SEQ ID NO: 2589890 - RNA, 19 nt, Homo sapiens
  misc_RNA (1)...(19): siRNA sense strand
gugaagauucugagggucu

SEQ ID NO: 2589891 - RNA, 19 nt, Homo sapiens
  misc_RNA (1)...(19): siRNA sense strand
aaagaaaacgucagcaaua

SEQ ID NO: 2589892 - RNA, 19 nt, Homo sapiens
  misc_RNA (1)...(19): siRNA sense strand
acuauagagaagaggauga

SEQ ID NO: 2589893 - RNA, 19 nt, Homo sapiens
  misc_RNA (1)...(19): siRNA sense strand
caugaaauuacuugaccaa

SEQ ID NO: 2589894 - RNA, 19 nt, Homo sapiens
  misc_RNA (1)...(19): siRNA sense strand
ggaaauucaagaaacggaa

SEQ ID NO: 2589895 - RNA, 19 nt, Homo sapiens
  misc_RNA (1)...(19): siRNA sense strand
cgugaacggaucuggcaaa

SEQ ID NO: 2589896 - RNA, 19 nt, Homo sapiens
  misc_RNA (1)...(19): siRNA sense strand
ccaaagcugcccauggaaa

SEQ ID NO: 2589897 - RNA, 19 nt, Homo sapiens
  misc_RNA (1)...(19): siRNA sense strand
aauagugauaggagagauu

SEQ ID NO: 2589898 - RNA, 19 nt, Homo sapiens
  misc_RNA (1)...(19): siRNA sense strand
caacagagcaaaaggacuu

SEQ ID NO: 2589899 - RNA, 19 nt, Homo sapiens
  misc_RNA (1)...(19): siRNA sense strand
ggguagcgugcaagagauu

SEQ ID NO: 2589900 - RNA, 19 nt, Homo sapiens
  misc_RNA (1)...(19): siRNA sense strand
aagaagaugauguguucaa

SEQ ID NO: 2589901 - RNA, 19 nt, Homo sapiens
  misc_RNA (1)...(19): siRNA sense strand
cauuuaagccuaaggggua

SEQ ID NO: 2589902 - RNA, 19 nt, Homo sapiens
  misc_RNA (1)...(19): siRNA sense strand
uggcugucaucauggauaa

SEQ ID NO: 2589903 - RNA, 19 nt, Homo sapiens
  misc_RNA (1)...(19): siRNA sense strand
gggcugugauaaagaaaau

SEQ ID NO: 2589904 - RNA, 19 nt, Homo sapiens
  misc_RNA (1)...(19): siRNA sense strand
aaacaaaacgagaagaaga

SEQ ID NO: 2589905 - RNA, 19 nt, Homo sapiens
  misc_RNA (1)...(19): siRNA sense strand
cagcagauacccaggcaga

SEQ ID NO: 2589906 - RNA, 19 nt, Homo sapiens
  misc_RNA (1)...(19): siRNA sense strand
agucagaggcccuggacca

SEQ ID NO: 2589907 - RNA, 19 nt, Homo sapiens
  misc_RNA (1)...(19): siRNA sense strand
aggaggaccuggcggauga

SEQ ID NO: 2589908 - RNA, 19 nt, Homo sapiens
  misc_RNA (1)...(19): siRNA sense strand
agaggaaggcaaacgaaau

SEQ ID NO: 2589909 - RNA, 19 nt, Homo sapiens
  misc_RNA (1)...(19): siRNA sense strand
ccaaagagagagagagagu

SEQ ID NO: 2589910 - RNA, 19 nt, Homo sapiens
  misc_RNA (1)...(19): siRNA sense strand
ucauaaagcuccugcguca

SEQ ID NO: 2589911 - RNA, 19 nt, Homo sapiens
  misc_RNA (1)...(19): siRNA sense strand
gggauaagaugauggagga

SEQ ID NO: 2589912 - RNA, 19 nt, Homo sapiens
  misc_RNA (1)...(19): siRNA sense strand
aggaugaacaggaggaaga

SEQ ID NO: 2589913 - RNA, 19 nt, Homo sapiens
  misc_RNA (1)...(19): siRNA sense strand
uggagaaguucgaggagga

SEQ ID NO: 2589914 - RNA, 19 nt, Homo sapiens
  misc_RNA (1)...(19): siRNA sense strand
gagaagaagaagcagaaga

SEQ ID NO: 2589915 - RNA, 19 nt, Homo sapiens
  misc_RNA (1)...(19): siRNA sense strand
cgggauaagcguucaaauu

SEQ ID NO: 2589916 - RNA, 19 nt, Homo sapiens
  misc_RNA (1)...(19): siRNA sense strand
agagagagagaguggagaa

SEQ ID NO: 2589917 - RNA, 19 nt, Homo sapiens
  misc_RNA (1)...(19): siRNA sense strand
agauaacauugucaggaaa

SEQ ID NO: 2589918 - RNA, 19 nt, Homo sapiens
  misc_RNA (1)...(19): siRNA sense strand
aggaaaggcuucugcgcau

SEQ ID NO: 2589919 - RNA, 19 nt, Homo sapiens
  misc_RNA (1)...(19): siRNA sense strand
agaagaaggagaagcguga

SEQ ID NO: 2589920 - RNA, 19 nt, Homo sapiens
  misc_RNA (1)...(19): siRNA sense strand
acacagagaaggagugcau

SEQ ID NO: 2589921 - RNA, 19 nt, Homo sapiens
  misc_RNA (1)...(19): siRNA sense strand
aauuagacgaggagaguca

SEQ ID NO: 2589922 - RNA, 19 nt, Homo sapiens
  misc_RNA (1)...(19): siRNA sense strand
ugccaaagagagagagaga

SEQ ID NO: 2589923 - RNA, 19 nt, Homo sapiens
  misc_RNA (1)...(19): siRNA sense strand
guggagaaccgaagggcuu

SEQ ID NO: 2589924 - RNA, 19 nt, Homo sapiens
  misc_RNA (1)...(19): siRNA sense strand
aaaacaagauggaggugaa

SEQ ID NO: 2589925 - RNA, 19 nt, Homo sapiens
  misc_RNA (1)...(19): siRNA sense strand
ugaccaacucggagcgcaa

SEQ ID NO: 2589926 - RNA, 19 nt, Homo sapiens
  misc_RNA (1)...(19): siRNA sense strand
uggcaguaucacagaaauu

SEQ ID NO: 2589927 - RNA, 19 nt, Homo sapiens
  misc_RNA (1)...(19): siRNA sense strand
augaggaggagguggagaa

SEQ ID NO: 2589928 - RNA, 19 nt, Homo sapiens
  misc_RNA (1)...(19): siRNA sense strand
uggagaagaagaagcagaa

SEQ ID NO: 2589929 - RNA, 19 nt, Homo sapiens
  misc_RNA (1)...(19): siRNA sense strand
gagaagaaugagagggcgu

SEQ ID NO: 2589930 - RNA, 19 nt, Homo sapiens
  misc_RNA (1)...(19): siRNA sense strand
ggacauuaaaauugccaaa

SEQ ID NO: 2589931 - RNA, 19 nt, Homo sapiens
  misc_RNA (1)...(19): siRNA sense strand
acacggaagaagaugacaa

SEQ ID NO: 2589932 - RNA, 19 nt, Homo sapiens
  misc_RNA (1)...(19): siRNA sense strand
gcgucaggacagaaggcaa

SEQ ID NO: 2589933 - RNA, 19 nt, Homo sapiens
  misc_RNA (1)...(19): siRNA sense strand
cggaagaagaugacaaaug

SEQ ID NO: 2589934 - RNA, 19 nt, Homo sapiens
  misc_RNA (1)...(19): siRNA sense strand
uggagaagacagaaccuua

SEQ ID NO: 2589935 - RNA, 19 nt, Homo sapiens
  misc_RNA (1)...(19): siRNA sense strand
ucagagaggaugaggagga

SEQ ID NO: 2589936 - RNA, 19 nt, Homo sapiens
  misc_RNA (1)...(19): siRNA sense strand
uagacaaagcagaggaagu

SEQ ID NO: 2589937 - RNA, 19 nt, Homo sapiens
  misc_RNA (1)...(19): siRNA sense strand
gguuaugaaugcaaggacu

SEQ ID NO: 2589938 - RNA, 19 nt, Homo sapiens
  misc_RNA (1)...(19): siRNA sense strand
agugcagccuggagaagaa

SEQ ID NO: 2589939 - RNA, 19 nt, Homo sapiens
  misc_RNA (1)...(19): siRNA sense strand
ggagcgaagcagugaaaau

SEQ ID NO: 2589940 - RNA, 19 nt, Homo sapiens
  misc_RNA (1)...(19): siRNA sense strand
gauaacauugucaggaaau

SEQ ID NO: 2589941 - RNA, 19 nt, Homo sapiens
  misc_RNA (1)...(19): siRNA sense strand
aagagagagcccaggauuu

SEQ ID NO: 2589942 - RNA, 19 nt, Homo sapiens
  misc_RNA (1)...(19): siRNA sense strand
gauuuaaggaggaccaaca

SEQ ID NO: 2589943 - RNA, 19 nt, Homo sapiens
  misc_RNA (1)...(19): siRNA sense strand
cugaauguguucuuggcua

SEQ ID NO: 2589944 - RNA, 19 nt, Homo sapiens
  misc_RNA (1)...(19): siRNA sense strand
caacaagacggauggggaa

SEQ ID NO: 2589945 - RNA, 19 nt, Homo sapiens
  misc_RNA (1)...(19): siRNA sense strand
ccaaggacacagagaagga

SEQ ID NO: 2589946 - RNA, 19 nt, Homo sapiens
  misc_RNA (1)...(19): siRNA sense strand
gagaaggagugcauaggca

SEQ ID NO: 2589947 - RNA, 19 nt, Homo sapiens
  misc_RNA (1)...(19): siRNA sense strand
aggagguggagaagaagaa

SEQ ID NO: 2589948 - RNA, 19 nt, Homo sapiens
  misc_RNA (1)...(19): siRNA sense strand
guggagaagaagaagcaga

SEQ ID NO: 2589949 - RNA, 19 nt, Homo sapiens
  misc_RNA (1)...(19): siRNA sense strand
cagguauucuagaaggauu

SEQ ID NO: 2589950 - RNA, 19 nt, Homo sapiens
  misc_RNA (1)...(19): siRNA sense strand
ggacagaaggcaaggaguc

SEQ ID NO: 2589951 - RNA, 19 nt, Homo sapiens
  misc_RNA (1)...(19): siRNA sense strand
agaagcagaagaaggagaa

SEQ ID NO: 2589952 - RNA, 19 nt, Homo sapiens
  misc_RNA (1)...(19): siRNA sense strand
agauugagcgugagcugaa

SEQ ID NO: 2589953 - RNA, 19 nt, Homo sapiens
  misc_RNA (1)...(19): siRNA sense strand
gauagacaaagcagaggaa

SEQ ID NO: 2589954 - RNA, 19 nt, Homo sapiens
  misc_RNA (1)...(19): siRNA sense strand
gaaggagaagcgugagaca

SEQ ID NO: 2589955 - RNA, 19 nt, Homo sapiens
  misc_RNA (1)...(19): siRNA sense strand
acaaaggacgggacaucaa

SEQ ID NO: 2589956 - RNA, 19 nt, Homo sapiens
  misc_RNA (1)...(19): siRNA sense strand
caucagggcagaacgagaa

SEQ ID NO: 2589957 - RNA, 19 nt, Homo sapiens
  misc_RNA (1)...(19): siRNA sense strand
gccaagaagcucaucgauu

SEQ ID NO: 2589958 - RNA, 19 nt, Homo sapiens
  misc_RNA (1)...(19): siRNA sense strand
ugaauguguucuuggcuau

SEQ ID NO: 2589959 - RNA, 19 nt, Homo sapiens
  misc_RNA (1)...(19): siRNA sense strand
agucaugcucgcugaagaa

SEQ ID NO: 2589960 - RNA, 19 nt, Homo sapiens
  misc_RNA (1)...(19): siRNA sense strand
gcuccgaguucuaaggcca

SEQ ID NO: 2589961 - RNA, 19 nt, Homo sapiens
  misc_RNA (1)...(19): siRNA sense strand
gggcuauaccauacgcauu

SEQ ID NO: 2589962 - RNA, 19 nt, Homo sapiens
  misc_RNA (1)...(19): siRNA sense strand
agguauucuagaaggauuu

SEQ ID NO: 2589963 - RNA, 19 nt, Homo sapiens
  misc_RNA (1)...(19): siRNA sense strand
augaacaggaggaagaaga

SEQ ID NO: 2589964 - RNA, 19 nt, Homo sapiens
  misc_RNA (1)...(19): siRNA sense strand
aggaggaagaagaggccuu

SEQ ID NO: 2589965 - RNA, 19 nt, Homo sapiens
  misc_RNA (1)...(19): siRNA sense strand
gggaaugugcagcuagaca

SEQ ID NO: 2589966 - RNA, 19 nt, Homo sapiens
  misc_RNA (1)...(19): siRNA sense strand
ugacggagcaggagccaga

SEQ ID NO: 2589967 - RNA, 19 nt, Homo sapiens
  misc_RNA (1)...(19): siRNA sense strand
aagaagaugacaaaugcua

SEQ ID NO: 2589968 - RNA, 19 nt, Homo sapiens
  misc_RNA (1)...(19): siRNA sense strand
agaaggagugcauaggcaa

SEQ ID NO: 2589969 - RNA, 19 nt, Homo sapiens
  misc_RNA (1)...(19): siRNA sense strand
agagguugguccugaugaa

SEQ ID NO: 2589970 - RNA, 19 nt, Homo sapiens
  misc_RNA (1)...(19): siRNA sense strand
ggcagagaucagagaggau

SEQ ID NO: 2589971 - RNA, 19 nt, Homo sapiens
  misc_RNA (1)...(19): siRNA sense strand
uagaugugacagaggaaga

SEQ ID NO: 2589972 - RNA, 19 nt, Homo sapiens
  misc_RNA (1)...(19): siRNA sense strand
acauaaaauuagacgagga

SEQ ID NO: 2589973 - RNA, 19 nt, Homo sapiens
  misc_RNA (1)...(19): siRNA sense strand
ccaucagggcagaacgaga

SEQ ID NO: 2589974 - RNA, 19 nt, Homo sapiens
  misc_RNA (1)...(19): siRNA sense strand
cagacuguguugaggagga

SEQ ID NO: 2589975 - RNA, 19 nt, Homo sapiens
  misc_RNA (1)...(19): siRNA sense strand
aggaugaggaggaggugga

SEQ ID NO: 2589976 - RNA, 19 nt, Homo sapiens
  misc_RNA (1)...(19): siRNA sense strand
ugacagugcuggugcggga

SEQ ID NO: 2589977 - RNA, 19 nt, Homo sapiens
  misc_RNA (1)...(19): siRNA sense strand
ccgaugaguacgacggaca

SEQ ID NO: 2589978 - RNA, 19 nt, Homo sapiens
  misc_RNA (1)...(19): siRNA sense strand
aggcagccgauguggacaa

SEQ ID NO: 2589979 - RNA, 19 nt, Homo sapiens
  misc_RNA (1)...(19): siRNA sense strand
ccaaacaugaccugggcca

SEQ ID NO: 2589980 - RNA, 19 nt, Homo sapiens
  misc_RNA (1)...(19): siRNA sense strand
aggcggugcaagcagguua

SEQ ID NO: 2589981 - RNA, 19 nt, Homo sapiens
  misc_RNA (1)...(19): siRNA sense strand
gagaagaacgagagggcuu

SEQ ID NO: 2589982 - RNA, 19 nt, Homo sapiens
  misc_RNA (1)...(19): siRNA sense strand
ccaaggagcuggagaggga

SEQ ID NO: 2589983 - RNA, 19 nt, Homo sapiens
  misc_RNA (1)...(19): siRNA sense strand
caguauaagacguggacau

SEQ ID NO: 2589984 - RNA, 19 nt, Homo sapiens
  misc_RNA (1)...(19): siRNA sense strand
gcaaauacgcgaagcgcau

SEQ ID NO: 2589985 - RNA, 19 nt, Homo sapiens
  misc_RNA (1)...(19): siRNA sense strand
augaagaggagauggaaga

SEQ ID NO: 2589986 - RNA, 19 nt, Homo sapiens
  misc_RNA (1)...(19): siRNA sense strand
acaggaaugcagaggagaa

SEQ ID NO: 2589987 - RNA, 19 nt, Homo sapiens
  misc_RNA (1)...(19): siRNA sense strand
ccaaagggaaagacaucaa

SEQ ID NO: 2589988 - RNA, 19 nt, Homo sapiens
  misc_RNA (1)...(19): siRNA sense strand
ggaccauggcgcuguacaa

SEQ ID NO: 2589989 - RNA, 19 nt, Homo sapiens
  misc_RNA (1)...(19): siRNA sense strand
ccaaggaugaagaggagau

SEQ ID NO: 2589990 - RNA, 19 nt, Homo sapiens
  misc_RNA (1)...(19): siRNA sense strand
agaaggaggccacggagaa

SEQ ID NO: 2589991 - RNA, 19 nt, Homo sapiens
  misc_RNA (1)...(19): siRNA sense strand
ccacggagaaggaggcuga

SEQ ID NO: 2589992 - RNA, 19 nt, Homo sapiens
  misc_RNA (1)...(19): siRNA sense strand
agaaggaggcugagauagu

SEQ ID NO: 2589993 - RNA, 19 nt, Homo sapiens
  misc_RNA (1)...(19): siRNA sense strand
gcaugcagguguuugggaa

SEQ ID NO: 2589994 - RNA, 19 nt, Homo sapiens
  misc_RNA (1)...(19): siRNA sense strand
aggaggaaguggaagcuca

SEQ ID NO: 2589995 - RNA, 19 nt, Homo sapiens
  misc_RNA (1)...(19): siRNA sense strand
cggcagucguuccaguaua

SEQ ID NO: 2589996 - RNA, 19 nt, Homo sapiens
  misc_RNA (1)...(19): siRNA sense strand
cggaacggcuggaacguca

SEQ ID NO: 2589997 - RNA, 19 nt, Homo sapiens
  misc_RNA (1)...(19): siRNA sense strand
guggaagccgacaaggaaa

SEQ ID NO: 2589998 - RNA, 19 nt, Homo sapiens
  misc_RNA (1)...(19): siRNA sense strand
uggcugugaucauggacaa

SEQ ID NO: 2589999 - RNA, 19 nt, Homo sapiens
  misc_RNA (1)...(19): siRNA sense strand
ggaagaaggagguggaagc

SEQ ID NO: 2590000 - RNA, 19 nt, Homo sapiens
  misc_RNA (1)...(19): siRNA sense strand
cucaggauccaaagggaaa

SEQ ID NO: 2590001 - RNA, 19 nt, Homo sapiens
  misc_RNA (1)...(19): siRNA sense strand
uggaaugcgugcugaagau

SEQ ID NO: 2590002 - RNA, 19 nt, Homo sapiens
  misc_RNA (1)...(19): siRNA sense strand
aagcagaggucccuggaga

SEQ ID NO: 2590003 - RNA, 19 nt, Homo sapiens
  misc_RNA (1)...(19): siRNA sense strand
cgauauggauggcgcacca

SEQ ID NO: 2590004 - RNA, 19 nt, Homo sapiens
  misc_RNA (1)...(19): siRNA sense strand
ggacaggaaugcagaggag

SEQ ID NO: 2590005 - RNA, 19 nt, Homo sapiens
  misc_RNA (1)...(19): siRNA sense strand
gagaaggaggccacggaga

SEQ ID NO: 2590006 - RNA, 19 nt, Homo sapiens
  misc_RNA (1)...(19): siRNA sense strand
gcaucaaccgccacaacaa

SEQ ID NO: 2590007 - RNA, 19 nt, Homo sapiens
  misc_RNA (1)...(19): siRNA sense strand
gcagaaaugaccugaucca

SEQ ID NO: 2590008 - RNA, 19 nt, Homo sapiens
  misc_RNA (1)...(19): siRNA sense strand
ggcccauggugcugaaaca

SEQ ID NO: 2590009 - RNA, 19 nt, Homo sapiens
  misc_RNA (1)...(19): siRNA sense strand
uggccgaggaggacaggaa

SEQ ID NO: 2590010 - RNA, 19 nt, Homo sapiens
  misc_RNA (1)...(19): siRNA sense strand
uggaagaagcagccaauca

SEQ ID NO: 2590011 - RNA, 19 nt, Homo sapiens
  misc_RNA (1)...(19): siRNA sense strand
agaaggagguggaagcgga

SEQ ID NO: 2590012 - RNA, 19 nt, Homo sapiens
  misc_RNA (1)...(19): siRNA sense strand
cagcccaggcaguggaaga

SEQ ID NO: 2590013 - RNA, 19 nt, Homo sapiens
  misc_RNA (1)...(19): siRNA sense strand
uggccaucgcuguggacaa

SEQ ID NO: 2590014 - RNA, 19 nt, Homo sapiens
  misc_RNA (1)...(19): siRNA sense strand
guuugcagguggugcucaa

SEQ ID NO: 2590015 - RNA, 19 nt, Homo sapiens
  misc_RNA (1)...(19): siRNA sense strand
agcgagagcucaacgggua

SEQ ID NO: 2590016 - RNA, 19 nt, Homo sapiens
  misc_RNA (1)...(19): siRNA sense strand
aggaugaagaggagaugga

SEQ ID NO: 2590017 - RNA, 19 nt, Homo sapiens
  misc_RNA (1)...(19): siRNA sense strand
cucugaaauaccuggauua

SEQ ID NO: 2590018 - RNA, 19 nt, Homo sapiens
  misc_RNA (1)...(19): siRNA sense strand
uggugaacucccugaagaa

SEQ ID NO: 2590019 - RNA, 19 nt, Homo sapiens
  misc_RNA (1)...(19): siRNA sense strand
gggaaagacaucaauacca

SEQ ID NO: 2590020 - RNA, 19 nt, Homo sapiens
  misc_RNA (1)...(19): siRNA sense strand
aguaacagagauugcggaa

SEQ ID NO: 2590021 - RNA, 19 nt, Homo sapiens
  misc_RNA (1)...(19): siRNA sense strand
ccaccaagaagagcagaaa

SEQ ID NO: 2590022 - RNA, 19 nt, Homo sapiens
  misc_RNA (1)...(19): siRNA sense strand
cucacgaggcuguggagaa

SEQ ID NO: 2590023 - RNA, 19 nt, Homo sapiens
  misc_RNA (1)...(19): siRNA sense strand
ggaggaacagccagaggau

SEQ ID NO: 2590024 - RNA, 19 nt, Homo sapiens
  misc_RNA (1)...(19): siRNA sense strand
augcagacaaucagcggaa

SEQ ID NO: 2590025 - RNA, 19 nt, Homo sapiens
  misc_RNA (1)...(19): siRNA sense strand
ugagaaggaggaaguggaa

SEQ ID NO: 2590026 - RNA, 19 nt, Homo sapiens
  misc_RNA (1)...(19): siRNA sense strand
augcagguguuugggaaua

SEQ ID NO: 2590027 - RNA, 19 nt, Homo sapiens
  misc_RNA (1)...(19): siRNA sense strand
gcggaguugaggaaggaga

SEQ ID NO: 2590028 - RNA, 19 nt, Homo sapiens
  misc_RNA (1)...(19): siRNA sense strand
ccaaggagcgagagagggu

SEQ ID NO: 2590029 - RNA, 19 nt, Homo sapiens
  misc_RNA (1)...(19): siRNA sense strand
ugaccaaggaugaagagga

SEQ ID NO: 2590030 - RNA, 19 nt, Homo sapiens
  misc_RNA (1)...(19): siRNA sense strand
agauaguggaagccgacaa

SEQ ID NO: 2590031 - RNA, 19 nt, Homo sapiens
  misc_RNA (1)...(19): siRNA sense strand
cuggaaugucuuugacuuu

SEQ ID NO: 2590032 - RNA, 19 nt, Homo sapiens
  misc_RNA (1)...(19): siRNA sense strand
gauccaaagggaaagacau

SEQ ID NO: 2590033 - RNA, 19 nt, Homo sapiens
  misc_RNA (1)...(19): siRNA sense strand
ccaucaaacggcugcccaa

SEQ ID NO: 2590034 - RNA, 19 nt, Homo sapiens
  misc_RNA (1)...(19): siRNA sense strand
cuguggugcugaugaugaa

SEQ ID NO: 2590035 - RNA, 19 nt, Homo sapiens
  misc_RNA (1)...(19): siRNA sense strand
ccauggaaugcgugcugaa

SEQ ID NO: 2590036 - RNA, 19 nt, Homo sapiens
  misc_RNA (1)...(19): siRNA sense strand
gauggaagaagcagccaau

SEQ ID NO: 2590037 - RNA, 19 nt, Homo sapiens
  misc_RNA (1)...(19): siRNA sense strand
cagaggaugcagacaauca

SEQ ID NO: 2590038 - RNA, 19 nt, Homo sapiens
  misc_RNA (1)...(19): siRNA sense strand
ucaacaucuuuguggcuuu

SEQ ID NO: 2590039 - RNA, 19 nt, Homo sapiens
  misc_RNA (1)...(19): siRNA sense strand
cccagaagacuuuggacuu

SEQ ID NO: 2590040 - RNA, 19 nt, Homo sapiens
  misc_RNA (1)...(19): siRNA sense strand
cggagaaggaggcugagau

SEQ ID NO: 2590041 - RNA, 19 nt, Homo sapiens
  misc_RNA (1)...(19): siRNA sense strand
ucucaggauccaaagggaa

SEQ ID NO: 2590042 - RNA, 19 nt, Homo sapiens
  misc_RNA (1)...(19): siRNA sense strand
ucacaguguccacgggaga

SEQ ID NO: 2590043 - RNA, 19 nt, Homo sapiens
  misc_RNA (1)...(19): siRNA sense strand
ugacaguggggaagguuua

SEQ ID NO: 2590044 - RNA, 19 nt, Homo sapiens
  misc_RNA (1)...(19): siRNA sense strand
aggagaagauguuccgguu

SEQ ID NO: 2590045 - RNA, 19 nt, Homo sapiens
  misc_RNA (1)...(19): siRNA sense strand
agccagaggaugcagacaa

SEQ ID NO: 2590046 - RNA, 19 nt, Homo sapiens
  misc_RNA (1)...(19): siRNA sense strand
gugauaaagaugaucgacu

SEQ ID NO: 2590047 - RNA, 19 nt, Homo sapiens
  misc_RNA (1)...(19): siRNA sense strand
uuucagagaugccuggaau

SEQ ID NO: 2590048 - RNA, 19 nt, Homo sapiens
  misc_RNA (1)...(19): siRNA sense strand
gaagaaaugcccugcucga

SEQ ID NO: 2590049 - RNA, 19 nt, Homo sapiens
  misc_RNA (1)...(19): siRNA sense strand
agcgagagaggguggagaa

SEQ ID NO: 2590050 - RNA, 19 nt, Homo sapiens
  misc_RNA (1)...(19): siRNA sense strand
gcaguaugguagugggcua

SEQ ID NO: 2590051 - RNA, 19 nt, Homo sapiens
  misc_RNA (1)...(19): siRNA sense strand
gcaucgaugucuacggcuu

SEQ ID NO: 2590052 - RNA, 19 nt, Homo sapiens
  misc_RNA (1)...(19): siRNA sense strand
acacagcuguacaaggcaa

SEQ ID NO: 2590053 - RNA, 19 nt, Homo sapiens
  misc_RNA (1)...(19): siRNA sense strand
guggagggcccuauggaca

SEQ ID NO: 2590054 - RNA, 19 nt, Homo sapiens
  misc_RNA (1)...(19): siRNA sense strand
acacagagcugcagcaagc

SEQ ID NO: 2590055 - RNA, 19 nt, Homo sapiens
  misc_RNA (1)...(19): siRNA sense strand
acagaggccuuccgggaga

SEQ ID NO: 2590056 - RNA, 19 nt, Homo sapiens
  misc_RNA (1)...(19): siRNA sense strand
ccaugcagcuugaccgcuu

SEQ ID NO: 2590057 - RNA, 19 nt, Homo sapiens
  misc_RNA (1)...(19): siRNA sense strand
augaaaaggccgagaguga

SEQ ID NO: 2590058 - RNA, 19 nt, Homo sapiens
  misc_RNA (1)...(19): siRNA sense strand
cccaaaagucugcgagaua

SEQ ID NO: 2590059 - RNA, 19 nt, Homo sapiens
  misc_RNA (1)...(19): siRNA sense strand
guaagaacugcguggucaa

SEQ ID NO: 2590060 - RNA, 19 nt, Homo sapiens
  misc_RNA (1)...(19): siRNA sense strand
acguagaggccaugaacuu

SEQ ID NO: 2590061 - RNA, 19 nt, Homo sapiens
  misc_RNA (1)...(19): siRNA sense strand
acacauugaccaagaacau

SEQ ID NO: 2590062 - RNA, 19 nt, Homo sapiens
  misc_RNA (1)...(19): siRNA sense strand
gagaacaugaagaaggaga

SEQ ID NO: 2590063 - RNA, 19 nt, Homo sapiens
  misc_RNA (1)...(19): siRNA sense strand
cggagcuggaacagaaaua

SEQ ID NO: 2590064 - RNA, 19 nt, Homo sapiens
  misc_RNA (1)...(19): siRNA sense strand
ccgagaacuaugagcucua

SEQ ID NO: 2590065 - RNA, 19 nt, Homo sapiens
  misc_RNA (1)...(19): siRNA sense strand
gcgaccugguggagaugaa

SEQ ID NO: 2590066 - RNA, 19 nt, Homo sapiens
  misc_RNA (1)...(19): siRNA sense strand
gagaagacacccaucgcua

SEQ ID NO: 2590067 - RNA, 19 nt, Homo sapiens
  misc_RNA (1)...(19): siRNA sense strand
augaagaaggagauggaga

SEQ ID NO: 2590068 - RNA, 19 nt, Homo sapiens
  misc_RNA (1)...(19): siRNA sense strand
gaacagaaauaccagacca

SEQ ID NO: 2590069 - RNA, 19 nt, Homo sapiens
  misc_RNA (1)...(19): siRNA sense strand
cuacaagaucugcaggaca

SEQ ID NO: 2590070 - RNA, 19 nt, Homo sapiens
  misc_RNA (1)...(19): siRNA sense strand
guggcaagaggaaggagaa

SEQ ID NO: 2590071 - RNA, 19 nt, Homo sapiens
  misc_RNA (1)...(19): siRNA sense strand
ccuucgacguagaggccau

SEQ ID NO: 2590072 - RNA, 19 nt, Homo sapiens
  misc_RNA (1)...(19): siRNA sense strand
agaugagcaagaagaagaa

SEQ ID NO: 2590073 - RNA, 19 nt, Homo sapiens
  misc_RNA (1)...(19): siRNA sense strand
acaugaagaaggagaugga

SEQ ID NO: 2590074 - RNA, 19 nt, Homo sapiens
  misc_RNA (1)...(19): siRNA sense strand
caucugugucccuggcaua

SEQ ID NO: 2590075 - RNA, 19 nt, Homo sapiens
  misc_RNA (1)...(19): siRNA sense strand
ugggcaacgccaugggcua

SEQ ID NO: 2590076 - RNA, 19 nt, Homo sapiens
  misc_RNA (1)...(19): siRNA sense strand
ugaucaugguaacggguga

SEQ ID NO: 2590077 - RNA, 19 nt, Homo sapiens
  misc_RNA (1)...(19): siRNA sense strand
gcagcgagacaguggagga

SEQ ID NO: 2590078 - RNA, 19 nt, Homo sapiens
  misc_RNA (1)...(19): siRNA sense strand
agaacaugaagaaggagau

SEQ ID NO: 2590079 - RNA, 19 nt, Homo sapiens
  misc_RNA (1)...(19): siRNA sense strand
acgucaaguucgcgaggca

SEQ ID NO: 2590080 - RNA, 19 nt, Homo sapiens
  misc_RNA (1)...(19): siRNA sense strand
ugaagaagucuauugccua

SEQ ID NO: 2590081 - RNA, 19 nt, Homo sapiens
  misc_RNA (1)...(19): siRNA sense strand
augcagugccugugcccaa

SEQ ID NO: 2590082 - RNA, 19 nt, Homo sapiens
  misc_RNA (1)...(19): siRNA sense strand
cuuccagauuggugccauu

SEQ ID NO: 2590083 - RNA, 19 nt, Homo sapiens
  misc_RNA (1)...(19): siRNA sense strand
aggaaggagaagcuggaga

SEQ ID NO: 2590084 - RNA, 19 nt, Homo sapiens
  misc_RNA (1)...(19): siRNA sense strand
gguggcaagaggaaggaga

SEQ ID NO: 2590085 - RNA, 19 nt, Homo sapiens
  misc_RNA (1)...(19): siRNA sense strand
ccagaucaacgcugaccaa

SEQ ID NO: 2590086 - RNA, 19 nt, Homo sapiens
  misc_RNA (1)...(19): siRNA sense strand
cagcaaggcuucuucagga

SEQ ID NO: 2590087 - RNA, 19 nt, Homo sapiens
  misc_RNA (1)...(19): siRNA sense strand
agauggagauuaacgacca

SEQ ID NO: 2590088 - RNA, 19 nt, Homo sapiens
  misc_RNA (1)...(19): siRNA sense strand
ucaagaaccuggaggcggu

SEQ ID NO: 2590089 - RNA, 19 nt, Homo sapiens
  misc_RNA (1)...(19): siRNA sense strand
caucgugauuggagacgca

SEQ ID NO: 2590090 - RNA, 19 nt, Homo sapiens
  misc_RNA (1)...(19): siRNA sense strand
cugaagaagucuauugccu

SEQ ID NO: 2590091 - RNA, 19 nt, Homo sapiens
  misc_RNA (1)...(19): siRNA sense strand
gaaaaggccgagagugaca

SEQ ID NO: 2590092 - RNA, 19 nt, Homo sapiens
  misc_RNA (1)...(19): siRNA sense strand
cugacuacuucacggcaau

SEQ ID NO: 2590093 - RNA, 19 nt, Homo sapiens
  misc_RNA (1)...(19): siRNA sense strand
gggaggugugugagcucaa

SEQ ID NO: 2590094 - RNA, 19 nt, Homo sapiens
  misc_RNA (1)...(19): siRNA sense strand
uggaaggacuagaagauua

SEQ ID NO: 2590095 - RNA, 19 nt, Homo sapiens
  misc_RNA (1)...(19): siRNA sense strand
cugaacaauaccagaguaa

SEQ ID NO: 2590096 - RNA, 19 nt, Homo sapiens
  misc_RNA (1)...(19): siRNA sense strand
ggaagaaaguggaggaagc

SEQ ID NO: 2590097 - RNA, 19 nt, Homo sapiens
  misc_RNA (1)...(19): siRNA sense strand
ugugaaaggaacugaacaa

SEQ ID NO: 2590098 - RNA, 19 nt, Homo sapiens
  misc_RNA (1)...(19): siRNA sense strand
gagaaaacuuagaagauga

SEQ ID NO: 2590099 - RNA, 19 nt, Homo sapiens
  misc_RNA (1)...(19): siRNA sense strand
cugaaugaauuuagagcca

SEQ ID NO: 2590100 - RNA, 19 nt, Homo sapiens
  misc_RNA (1)...(19): siRNA sense strand
ggauauggaaggacuagaa

SEQ ID NO: 2590101 - RNA, 19 nt, Homo sapiens
  misc_RNA (1)...(19): siRNA sense strand
cuauaagugaugaagagaa

SEQ ID NO: 2590102 - RNA, 19 nt, Homo sapiens
  misc_RNA (1)...(19): siRNA sense strand
ucugaagggcauugguuua

SEQ ID NO: 2590103 - RNA, 19 nt, Homo sapiens
  misc_RNA (1)...(19): siRNA sense strand
uggagugagcuaugugaaa

SEQ ID NO: 2590104 - RNA, 19 nt, Homo sapiens
  misc_RNA (1)...(19): siRNA sense strand
acauaaagaaggaaccuau

SEQ ID NO: 2590105 - RNA, 19 nt, Homo sapiens
  misc_RNA (1)...(19): siRNA sense strand
ggaaauggauauggaagga

SEQ ID NO: 2590106 - RNA, 19 nt, Homo sapiens
  misc_RNA (1)...(19): siRNA sense strand
aggcaagaggacagacuau

SEQ ID NO: 2590107 - RNA, 19 nt, Homo sapiens
  misc_RNA (1)...(19): siRNA sense strand
guauuuuacccaaggauaa

SEQ ID NO: 2590108 - RNA, 19 nt, Homo sapiens
  misc_RNA (1)...(19): siRNA sense strand
cuaaauggugguaaagaca

SEQ ID NO: 2590109 - RNA, 19 nt, Homo sapiens
  misc_RNA (1)...(19): siRNA sense strand
acgaagaagagaucauauu

SEQ ID NO: 2590110 - RNA, 19 nt, Homo sapiens
  misc_RNA (1)...(19): siRNA sense strand
uggcaggugaccagaggaa

SEQ ID NO: 2590111 - RNA, 19 nt, Homo sapiens
  misc_RNA (1)...(19): siRNA sense strand
agaaaguggaggaagcuga

SEQ ID NO: 2590112 - RNA, 19 nt, Homo sapiens
  misc_RNA (1)...(19): siRNA sense strand
aaggaaagauggauccaga

SEQ ID NO: 2590113 - RNA, 19 nt, Homo sapiens
  misc_RNA (1)...(19): siRNA sense strand
cuggauuuguuucgaggaa

SEQ ID NO: 2590114 - RNA, 19 nt, Homo sapiens
  misc_RNA (1)...(19): siRNA sense strand
gugguaaagacauaaagaa

SEQ ID NO: 2590115 - RNA, 19 nt, Homo sapiens
  misc_RNA (1)...(19): siRNA sense strand
gccuauuucugaagggcau

SEQ ID NO: 2590116 - RNA, 19 nt, Homo sapiens
  misc_RNA (1)...(19): siRNA sense strand
auuacaguacccagggaaa

SEQ ID NO: 2590117 - RNA, 19 nt, Homo sapiens
  misc_RNA (1)...(19): siRNA sense strand
acauaaagccuugcgggaa

SEQ ID NO: 2590118 - RNA, 19 nt, Homo sapiens
  misc_RNA (1)...(19): siRNA sense strand
ugguaaagacauaaagaag

SEQ ID NO: 2590119 - RNA, 19 nt, Homo sapiens
  misc_RNA (1)...(19): siRNA sense strand
ccaaacuguccaaggcuuu

SEQ ID NO: 2590120 - RNA, 19 nt, Homo sapiens
  misc_RNA (1)...(19): siRNA sense strand
cagagaaaacuuagaagau

SEQ ID NO: 2590121 - RNA, 19 nt, Homo sapiens
  misc_RNA (1)...(19): siRNA sense strand
auaugaaccacgaagaaga

SEQ ID NO: 2590122 - RNA, 19 nt, Homo sapiens
  misc_RNA (1)...(19): siRNA sense strand
ccagggaaauguugggaag

SEQ ID NO: 2590123 - RNA, 19 nt, Homo sapiens
  misc_RNA (1)...(19): siRNA sense strand
agggaaauguugggaagau

SEQ ID NO: 2590124 - RNA, 19 nt, Homo sapiens
  misc_RNA (1)...(19): siRNA sense strand
aauugcaguuugaggcuau

SEQ ID NO: 2590125 - RNA, 19 nt, Homo sapiens
  misc_RNA (1)...(19): siRNA sense strand
ccgaaugcaguauggccua

SEQ ID NO: 2590126 - RNA, 19 nt, Homo sapiens
  misc_RNA (1)...(19): siRNA sense strand
uauggaaggacuagaagau

SEQ ID NO: 2590127 - RNA, 19 nt, Homo sapiens
  misc_RNA (1)...(19): siRNA sense strand
aggcauugcaguucuggaa

SEQ ID NO: 2590128 - RNA, 19 nt, Homo sapiens
  misc_RNA (1)...(19): siRNA sense strand
ggaaaggaaggcaagagga

SEQ ID NO: 2590129 - RNA, 19 nt, Homo sapiens
  misc_RNA (1)...(19): siRNA sense strand
acuuugagaugauacacaa

SEQ ID NO: 2590130 - RNA, 19 nt, Homo sapiens
  misc_RNA (1)...(19): siRNA sense strand
aaggaaagucuauuuggaa

SEQ ID NO: 2590131 - RNA, 19 nt, Homo sapiens
  misc_RNA (1)...(19): siRNA sense strand
aguuugaggcuauaaguga

SEQ ID NO: 2590132 - RNA, 19 nt, Homo sapiens
  misc_RNA (1)...(19): siRNA sense strand
uguggaugauuguggcuuu

SEQ ID NO: 2590133 - RNA, 19 nt, Homo sapiens
  misc_RNA (1)...(19): siRNA sense strand
uggaacaggcauugcaguu

SEQ ID NO: 2590134 - RNA, 19 nt, Homo sapiens
  misc_RNA (1)...(19): siRNA sense strand
agaagaugaauaugaacca

SEQ ID NO: 2590135 - RNA, 19 nt, Homo sapiens
  misc_RNA (1)...(19): siRNA sense strand
gcaucauaucagaggguaa

SEQ ID NO: 2590136 - RNA, 19 nt, Homo sapiens
  misc_RNA (1)...(19): siRNA sense strand
aggaagugguggugggaga

SEQ ID NO: 2590137 - RNA, 19 nt, Homo sapiens
  misc_RNA (1)...(19): siRNA sense strand
ggaaaaugagagacagaaa

SEQ ID NO: 2590138 - RNA, 19 nt, Homo sapiens
  misc_RNA (1)...(19): siRNA sense strand
ugaagaaggagguggcaau

SEQ ID NO: 2590139 - RNA, 19 nt, Homo sapiens
  misc_RNA (1)...(19): siRNA sense strand
aagaagaaacagaaggaga

SEQ ID NO: 2590140 - RNA, 19 nt, Homo sapiens
  misc_RNA (1)...(19): siRNA sense strand
cggaagaacugccugguga

SEQ ID NO: 2590141 - RNA, 19 nt, Homo sapiens
  misc_RNA (1)...(19): siRNA sense strand
aggcaggacaggagaacau

SEQ ID NO: 2590142 - RNA, 19 nt, Homo sapiens
  misc_RNA (1)...(19): siRNA sense strand
gcaaauaccaaguggaccu

SEQ ID NO: 2590143 - RNA, 19 nt, Homo sapiens
  misc_RNA (1)...(19): siRNA sense strand
aggagaaggaacuggauga

SEQ ID NO: 2590144 - RNA, 19 nt, Homo sapiens
  misc_RNA (1)...(19): siRNA sense strand
ggaccuaugagcagcggaa

SEQ ID NO: 2590145 - RNA, 19 nt, Homo sapiens
  misc_RNA (1)...(19): siRNA sense strand
ccuacuaccaggaggccaa

SEQ ID NO: 2590146 - RNA, 19 nt, Homo sapiens
  misc_RNA (1)...(19): siRNA sense strand
uggcaauggaugaccacaa

SEQ ID NO: 2590147 - RNA, 19 nt, Homo sapiens
  misc_RNA (1)...(19): siRNA sense strand
agaucaacgcagaggaagu

SEQ ID NO: 2590148 - RNA, 19 nt, Homo sapiens
  misc_RNA (1)...(19): siRNA sense strand
agccaaggccauugccaaa

SEQ ID NO: 2590149 - RNA, 19 nt, Homo sapiens
  misc_RNA (1)...(19): siRNA sense strand
guaacgagacuguggagga

SEQ ID NO: 2590150 - RNA, 19 nt, Homo sapiens
  misc_RNA (1)...(19): siRNA sense strand
gggcggacacccauagcaa

SEQ ID NO: 2590151 - RNA, 19 nt, Homo sapiens
  misc_RNA (1)...(19): siRNA sense strand
gaggaaaaugagagacaga

SEQ ID NO: 2590152 - RNA, 19 nt, Homo sapiens
  misc_RNA (1)...(19): siRNA sense strand
gugaggaaaaugagagaca

SEQ ID NO: 2590153 - RNA, 19 nt, Homo sapiens
  misc_RNA (1)...(19): siRNA sense strand
aaacagaaggagaaggaac

SEQ ID NO: 2590154 - RNA, 19 nt, Homo sapiens
  misc_RNA (1)...(19): siRNA sense strand
ucgacaaggagaugcaaga

SEQ ID NO: 2590155 - RNA, 19 nt, Homo sapiens
  misc_RNA (1)...(19): siRNA sense strand
cgaaacucccagacggaca

SEQ ID NO: 2590156 - RNA, 19 nt, Homo sapiens
  misc_RNA (1)...(19): siRNA sense strand
agaacaucuccgugucuaa

SEQ ID NO: 2590157 - RNA, 19 nt, Homo sapiens
  misc_RNA (1)...(19): siRNA sense strand
cagccaaggccauugccaa

SEQ ID NO: 2590158 - RNA, 19 nt, Homo sapiens
  misc_RNA (1)...(19): siRNA sense strand
cugcauugaagaaggcuga

SEQ ID NO: 2590159 - RNA, 19 nt, Homo sapiens
  misc_RNA (1)...(19): siRNA sense strand
gaggcagcugagagugaua

SEQ ID NO: 2590160 - RNA, 19 nt, Homo sapiens
  misc_RNA (1)...(19): siRNA sense strand
gcuucaaauucgacacgga

SEQ ID NO: 2590161 - RNA, 19 nt, Homo sapiens
  misc_RNA (1)...(19): siRNA sense strand
ccagagaagccaaggcaug

SEQ ID NO: 2590162 - RNA, 19 nt, Homo sapiens
  misc_RNA (1)...(19): siRNA sense strand
cucaagaaccacacagaga

SEQ ID NO: 2590163 - RNA, 19 nt, Homo sapiens
  misc_RNA (1)...(19): siRNA sense strand
aggaacuggaugagcugaa

SEQ ID NO: 2590164 - RNA, 19 nt, Homo sapiens
  misc_RNA (1)...(19): siRNA sense strand
ugaagaaauccaucgccua

SEQ ID NO: 2590165 - RNA, 19 nt, Homo sapiens
  misc_RNA (1)...(19): siRNA sense strand
guggcuggguggagaagga

SEQ ID NO: 2590166 - RNA, 19 nt, Homo sapiens
  misc_RNA (1)...(19): siRNA sense strand
ugaagaaccuggaggcggu

SEQ ID NO: 2590167 - RNA, 19 nt, Homo sapiens
  misc_RNA (1)...(19): siRNA sense strand
ucuaugaugagguccgaaa

SEQ ID NO: 2590168 - RNA, 19 nt, Homo sapiens
  misc_RNA (1)...(19): siRNA sense strand
acgagacuguggaggacau

SEQ ID NO: 2590169 - RNA, 19 nt, Homo sapiens
  misc_RNA (1)...(19): siRNA sense strand
agcggaaggugguggaguu

SEQ ID NO: 2590170 - RNA, 19 nt, Homo sapiens
  misc_RNA (1)...(19): siRNA sense strand
gcggcaagaagaaacagaa

SEQ ID NO: 2590171 - RNA, 19 nt, Homo sapiens
  misc_RNA (1)...(19): siRNA sense strand
ccaugaaugaucuggagga

SEQ ID NO: 2590172 - RNA, 19 nt, Homo sapiens
  misc_RNA (1)...(19): siRNA sense strand
aggagguggcaauggauga

SEQ ID NO: 2590173 - RNA, 19 nt, Homo sapiens
  misc_RNA (1)...(19): siRNA sense strand
ugucuauccacgagcgaga

SEQ ID NO: 2590174 - RNA, 19 nt, Homo sapiens
  misc_RNA (1)...(19): siRNA sense strand
ccaagagcuccaagaucau

SEQ ID NO: 2590175 - RNA, 19 nt, Homo sapiens
  misc_RNA (1)...(19): siRNA sense strand
uggugaugccucugaguca

SEQ ID NO: 2590176 - RNA, 19 nt, Homo sapiens
  misc_RNA (1)...(19): siRNA sense strand
ugaaugaucuggaggacag

SEQ ID NO: 2590177 - RNA, 19 nt, Homo sapiens
  misc_RNA (1)...(19): siRNA sense strand
ucaaauucgacacggauga

SEQ ID NO: 2590178 - RNA, 19 nt, Homo sapiens
  misc_RNA (1)...(19): siRNA sense strand
agaaggaacuggaugagcu

SEQ ID NO: 2590179 - RNA, 19 nt, Homo sapiens
  misc_RNA (1)...(19): siRNA sense strand
cugaagaaggagguggcaa

SEQ ID NO: 2590180 - RNA, 19 nt, Homo sapiens
  misc_RNA (1)...(19): siRNA sense strand
gcaugaagaacaagauccu

SEQ ID NO: 2590181 - RNA, 19 nt, Homo sapiens
  misc_RNA (1)...(19): siRNA sense strand
aauagaggucagugggaaa

SEQ ID NO: 2590182 - RNA, 19 nt, Homo sapiens
  misc_RNA (1)...(19): siRNA sense strand
caauagaggucagugggaa

SEQ ID NO: 2590183 - RNA, 19 nt, Homo sapiens
  misc_RNA (1)...(19): siRNA sense strand
gggacuugggugugaugaa

SEQ ID NO: 2590184 - RNA, 19 nt, Homo sapiens
  misc_RNA (1)...(19): siRNA sense strand
aggaauaaccagcgaugga

SEQ ID NO: 2590185 - RNA, 19 nt, Homo sapiens
  misc_RNA (1)...(19): siRNA sense strand
aagaaaaggugguugggau

SEQ ID NO: 2590186 - RNA, 19 nt, Homo sapiens
  misc_RNA (1)...(19): siRNA sense strand
gauuauaacaacaucccaa

SEQ ID NO: 2590187 - RNA, 19 nt, Homo sapiens
  misc_RNA (1)...(19): siRNA sense strand
gugcuaacaaggaagaaaa

SEQ ID NO: 2590188 - RNA, 19 nt, Homo sapiens
  misc_RNA (1)...(19): siRNA sense strand
aggaaaagcgggaugccua

SEQ ID NO: 2590189 - RNA, 19 nt, Homo sapiens
  misc_RNA (1)...(19): siRNA sense strand
cggugccagcuuaggaaua

SEQ ID NO: 2590190 - RNA, 19 nt, Homo sapiens
  misc_RNA (1)...(19): siRNA sense strand
auaccaacgucaaaggcau

SEQ ID NO: 2590191 - RNA, 19 nt, Homo sapiens
  misc_RNA (1)...(19): siRNA sense strand
accaagucccauauagaaa

SEQ ID NO: 2590192 - RNA, 19 nt, Homo sapiens
  misc_RNA (1)...(19): siRNA sense strand
cgucauuguuggugcaggu

SEQ ID NO: 2590193 - RNA, 19 nt, Homo sapiens
  misc_RNA (1)...(19): siRNA sense strand
agaaaucauccguggccau

SEQ ID NO: 2590194 - RNA, 19 nt, Homo sapiens
  misc_RNA (1)...(19): siRNA sense strand
ugcaauagcugcuggccga

SEQ ID NO: 2590195 - RNA, 19 nt, Homo sapiens
  misc_RNA (1)...(19): siRNA sense strand
uggcguguuauuaaggaaa

SEQ ID NO: 2590196 - RNA, 19 nt, Homo sapiens
  misc_RNA (1)...(19): siRNA sense strand
gaugaaaugcugcaggguu

SEQ ID NO: 2590197 - RNA, 19 nt, Homo sapiens
  misc_RNA (1)...(19): siRNA sense strand
uuccaaguugugaggguaa

SEQ ID NO: 2590198 - RNA, 19 nt, Homo sapiens
  misc_RNA (1)...(19): siRNA sense strand
cuaaagaaauaucgcggua

SEQ ID NO: 2590199 - RNA, 19 nt, Homo sapiens
  misc_RNA (1)...(19): siRNA sense strand
cggcaugguuucugcggua

SEQ ID NO: 2590200 - RNA, 19 nt, Homo sapiens
  misc_RNA (1)...(19): siRNA sense strand
ggucauugcugauggagga

SEQ ID NO: 2590201 - RNA, 19 nt, Homo sapiens
  misc_RNA (1)...(19): siRNA sense strand
ggccaaugaaguucggaaa

SEQ ID NO: 2590202 - RNA, 19 nt, Homo sapiens
  misc_RNA (1)...(19): siRNA sense strand
cggacagaccugaagaaga

SEQ ID NO: 2590203 - RNA, 19 nt, Homo sapiens
  misc_RNA (1)...(19): siRNA sense strand
gaagaaauaugaacaggga

SEQ ID NO: 2590204 - RNA, 19 nt, Homo sapiens
  misc_RNA (1)...(19): siRNA sense strand
agauaaugacaaagaggga

SEQ ID NO: 2590205 - RNA, 19 nt, Homo sapiens
  misc_RNA (1)...(19): siRNA sense strand
ucacacugaaggaggcaaa

SEQ ID NO: 2590206 - RNA, 19 nt, Homo sapiens
  misc_RNA (1)...(19): siRNA sense strand
cugaaggaggcaaaugaaa

SEQ ID NO: 2590207 - RNA, 19 nt, Homo sapiens
  misc_RNA (1)...(19): siRNA sense strand
aagcaacagcaguguacaa

SEQ ID NO: 2590208 - RNA, 19 nt, Homo sapiens
  misc_RNA (1)...(19): siRNA sense strand
augaugagcuuguggccau

SEQ ID NO: 2590209 - RNA, 19 nt, Homo sapiens
  misc_RNA (1)...(19): siRNA sense strand
ucaaaguggcccagggagu

SEQ ID NO: 2590210 - RNA, 19 nt, Homo sapiens
  misc_RNA (1)...(19): siRNA sense strand
cugaagaagaaucgggacu

SEQ ID NO: 2590211 - RNA, 19 nt, Homo sapiens
  misc_RNA (1)...(19): siRNA sense strand
cagcgcagcaagaagggaa

SEQ ID NO: 2590212 - RNA, 19 nt, Homo sapiens
  misc_RNA (1)...(19): siRNA sense strand
gggaagacuuggugguagc

SEQ ID NO: 2590213 - RNA, 19 nt, Homo sapiens
  misc_RNA (1)...(19): siRNA sense strand
ggacacagucacagaggcu

SEQ ID NO: 2590214 - RNA, 19 nt, Homo sapiens
  misc_RNA (1)...(19): siRNA sense strand
ugugggucauauugcgaaa

SEQ ID NO: 2590215 - RNA, 19 nt, Homo sapiens
  misc_RNA (1)...(19): siRNA sense strand
acaaagggucaauccacaa

SEQ ID NO: 2590216 - RNA, 19 nt, Homo sapiens
  misc_RNA (1)...(19): siRNA sense strand
gacaaagggucaauccaca

SEQ ID NO: 2590217 - RNA, 19 nt, Homo sapiens
  misc_RNA (1)...(19): siRNA sense strand
gcaugaaauuagauggcga

SEQ ID NO: 2590218 - RNA, 19 nt, Homo sapiens
  misc_RNA (1)...(19): siRNA sense strand
ggucagagaguguggccau

SEQ ID NO: 2590219 - RNA, 19 nt, Homo sapiens
  misc_RNA (1)...(19): siRNA sense strand
aaagaaagaugcuucgaga

SEQ ID NO: 2590220 - RNA, 19 nt, Homo sapiens
  misc_RNA (1)...(19): siRNA sense strand
aguuuauggucgaggagca

SEQ ID NO: 2590221 - RNA, 19 nt, Homo sapiens
  misc_RNA (1)...(19): siRNA sense strand
agaaauuuacacagagcau

SEQ ID NO: 2590222 - RNA, 19 nt, Homo sapiens
  misc_RNA (1)...(19): siRNA sense strand
gagaggagccagaaggcca

SEQ ID NO: 2590223 - RNA, 19 nt, Homo sapiens
  misc_RNA (1)...(19): siRNA sense strand
cgagacaagcagaacaaaa

SEQ ID NO: 2590224 - RNA, 19 nt, Homo sapiens
  misc_RNA (1)...(19): siRNA sense strand
ggacaagauccucagcaca

SEQ ID NO: 2590225 - RNA, 19 nt, Homo sapiens
  misc_RNA (1)...(19): siRNA sense strand
gaaauuagauggcgagcug

SEQ ID NO: 2590226 - RNA, 19 nt, Homo sapiens
  misc_RNA (1)...(19): siRNA sense strand
aggagaggauccaggagga

SEQ ID NO: 2590227 - RNA, 19 nt, Homo sapiens
  misc_RNA (1)...(19): siRNA sense strand
acuuacaacagaaugcaaa

SEQ ID NO: 2590228 - RNA, 19 nt, Homo sapiens
  misc_RNA (1)...(19): siRNA sense strand
gagauggggcugaggucua

SEQ ID NO: 2590229 - RNA, 19 nt, Homo sapiens
  misc_RNA (1)...(19): siRNA sense strand
aucuaaauguggucagaga

SEQ ID NO: 2590230 - RNA, 19 nt, Homo sapiens
  misc_RNA (1)...(19): siRNA sense strand
cguuuaacuacgccagcaa

SEQ ID NO: 2590231 - RNA, 19 nt, Homo sapiens
  misc_RNA (1)...(19): siRNA sense strand
acagaaugcaaaagaaaga

SEQ ID NO: 2590232 - RNA, 19 nt, Homo sapiens
  misc_RNA (1)...(19): siRNA sense strand
agaaaauggcggacaagau

SEQ ID NO: 2590233 - RNA, 19 nt, Homo sapiens
  misc_RNA (1)...(19): siRNA sense strand
cuaaauguggucagagagu

SEQ ID NO: 2590234 - RNA, 19 nt, Homo sapiens
  misc_RNA (1)...(19): siRNA sense strand
gcgacuucuucgugcacuu

SEQ ID NO: 2590235 - RNA, 19 nt, Homo sapiens
  misc_RNA (1)...(19): siRNA sense strand
cugaaggacugcaugcuca

SEQ ID NO: 2590236 - RNA, 19 nt, Homo sapiens
  misc_RNA (1)...(19): siRNA sense strand
gcuacuuccucauggacca

SEQ ID NO: 2590237 - RNA, 19 nt, Homo sapiens
  misc_RNA (1)...(19): siRNA sense strand
ggcacauguucuauugcaa

SEQ ID NO: 2590238 - RNA, 19 nt, Homo sapiens
  misc_RNA (1)...(19): siRNA sense strand
caggaggauuacaacgaca

SEQ ID NO: 2590239 - RNA, 19 nt, Homo sapiens
  misc_RNA (1)...(19): siRNA sense strand
cguccuuccugcagaaaau

SEQ ID NO: 2590240 - RNA, 19 nt, Homo sapiens
  misc_RNA (1)...(19): siRNA sense strand
ggaaagcccucacucgcua

SEQ ID NO: 2590241 - RNA, 19 nt, Homo sapiens
  misc_RNA (1)...(19): siRNA sense strand
cgucuggaucagcaacaaa

SEQ ID NO: 2590242 - RNA, 19 nt, Homo sapiens
  misc_RNA (1)...(19): siRNA sense strand
agaugaaagcgaaaguaaa

SEQ ID NO: 2590243 - RNA, 19 nt, Homo sapiens
  misc_RNA (1)...(19): siRNA sense strand
gugaagaacuacagcagga

SEQ ID NO: 2590244 - RNA, 19 nt, Homo sapiens
  misc_RNA (1)...(19): siRNA sense strand
gcgaugagucugucgggaa

SEQ ID NO: 2590245 - RNA, 19 nt, Homo sapiens
  misc_RNA (1)...(19): siRNA sense strand
aaguagaggucgacaucau

SEQ ID NO: 2590246 - RNA, 19 nt, Homo sapiens
  misc_RNA (1)...(19): siRNA sense strand
aaugaagaugaaagcgaaa

SEQ ID NO: 2590247 - RNA, 19 nt, Homo sapiens
  misc_RNA (1)...(19): siRNA sense strand
ugacgcuguaugugagaaa

SEQ ID NO: 2590248 - RNA, 19 nt, Homo sapiens
  misc_RNA (1)...(19): siRNA sense strand
uaaugaagaugaaagcgaa

SEQ ID NO: 2590249 - RNA, 19 nt, Homo sapiens
  misc_RNA (1)...(19): siRNA sense strand
cuaaugaagaugaaagcga

SEQ ID NO: 2590250 - RNA, 19 nt, Homo sapiens
  misc_RNA (1)...(19): siRNA sense strand
aagcugaagauaaggcaau

SEQ ID NO: 2590251 - RNA, 19 nt, Homo sapiens
  misc_RNA (1)...(19): siRNA sense strand
ccaaacuagccaagauuca

SEQ ID NO: 2590252 - RNA, 19 nt, Homo sapiens
  misc_RNA (1)...(19): siRNA sense strand
cagaauauuacuaguacca

SEQ ID NO: 2590253 - RNA, 19 nt, Homo sapiens
  misc_RNA (1)...(19): siRNA sense strand
aggcaauagugauacacau

SEQ ID NO: 2590254 - RNA, 19 nt, Homo sapiens
  misc_RNA (1)...(19): siRNA sense strand
agguguagaagaaaggauu

SEQ ID NO: 2590255 - RNA, 19 nt, Homo sapiens
  misc_RNA (1)...(19): siRNA sense strand
uauagaagucaguguccaa

SEQ ID NO: 2590256 - RNA, 19 nt, Homo sapiens
  misc_RNA (1)...(19): siRNA sense strand
uggaugaaaagcugaauaa

SEQ ID NO: 2590257 - RNA, 19 nt, Homo sapiens
  misc_RNA (1)...(19): siRNA sense strand
cugaauaaaagcaguguuu

SEQ ID NO: 2590258 - RNA, 19 nt, Homo sapiens
  misc_RNA (1)...(19): siRNA sense strand
ugucuauaguccaguacau

SEQ ID NO: 2590259 - RNA, 19 nt, Homo sapiens
  misc_RNA (1)...(19): siRNA sense strand
acauuuagaagcugaagau

SEQ ID NO: 2590260 - RNA, 19 nt, Homo sapiens
  misc_RNA (1)...(19): siRNA sense strand
guauauugugugaaagcca

SEQ ID NO: 2590261 - RNA, 19 nt, Homo sapiens
  misc_RNA (1)...(19): siRNA sense strand
aguuaaagcagcacuacuu

SEQ ID NO: 2590262 - RNA, 19 nt, Homo sapiens
  misc_RNA (1)...(19): siRNA sense strand
ucuaaaaguuaaagcagca

SEQ ID NO: 2590263 - RNA, 19 nt, Homo sapiens
  misc_RNA (1)...(19): siRNA sense strand
acuacuuacgucauggaaa

SEQ ID NO: 2590264 - RNA, 19 nt, Homo sapiens
  misc_RNA (1)...(19): siRNA sense strand
caguagaagaaacuaauca

SEQ ID NO: 2590265 - RNA, 19 nt, Homo sapiens
  misc_RNA (1)...(19): siRNA sense strand
gggaguugcuggaagccau

SEQ ID NO: 2590266 - RNA, 19 nt, Homo sapiens
  misc_RNA (1)...(19): siRNA sense strand
acugaaagauacauggcuu

SEQ ID NO: 2590267 - RNA, 19 nt, Homo sapiens
  misc_RNA (1)...(19): siRNA sense strand
gugaacaaccugaacguca

SEQ ID NO: 2590268 - RNA, 19 nt, Homo sapiens
  misc_RNA (1)...(19): siRNA sense strand
uggacaaaccucagcccua

SEQ ID NO: 2590269 - RNA, 19 nt, Homo sapiens
  misc_RNA (1)...(19): siRNA sense strand
agaaguaccaggaggcguu

SEQ ID NO: 2590270 - RNA, 19 nt, Homo sapiens
  misc_RNA (1)...(19): siRNA sense strand
ugggagaauguaacugaaa

SEQ ID NO: 2590271 - RNA, 19 nt, Homo sapiens
  misc_RNA (1)...(19): siRNA sense strand
uuugacaaguuuaaggaga

SEQ ID NO: 2590272 - RNA, 19 nt, Homo sapiens
  misc_RNA (1)...(19): siRNA sense strand
aggaagaaaggaagagcua

SEQ ID NO: 2590273 - RNA, 19 nt, Homo sapiens
  misc_RNA (1)...(19): siRNA sense strand
agaugaaagauaugggaau

SEQ ID NO: 2590274 - RNA, 19 nt, Homo sapiens
  misc_RNA (1)...(19): siRNA sense strand
gaucauaucuacagggaag

SEQ ID NO: 2590275 - RNA, 19 nt, Homo sapiens
  misc_RNA (1)...(19): siRNA sense strand
agaaguacgugcaggacau

SEQ ID NO: 2590276 - RNA, 19 nt, Homo sapiens
  misc_RNA (1)...(19): siRNA sense strand
acagagauuuggacggcaa

SEQ ID NO: 2590277 - RNA, 19 nt, Homo sapiens
  misc_RNA (1)...(19): siRNA sense strand
ggcuggaagaggugaacaa

SEQ ID NO: 2590278 - RNA, 19 nt, Homo sapiens
  misc_RNA (1)...(19): siRNA sense strand
ggagguacucagaggcauu

SEQ ID NO: 2590279 - RNA, 19 nt, Homo sapiens
  misc_RNA (1)...(19): siRNA sense strand
aggaaguggccaagaagau

SEQ ID NO: 2590280 - RNA, 19 nt, Homo sapiens
  misc_RNA (1)...(19): siRNA sense strand
ggacagacggcaagcacga

SEQ ID NO: 2590281 - RNA, 19 nt, Homo sapiens
  misc_RNA (1)...(19): siRNA sense strand
cuuuaggugucaucaguaa

SEQ ID NO: 2590282 - RNA, 19 nt, Homo sapiens
  misc_RNA (1)...(19): siRNA sense strand
gagaugaaagauaugggaa

SEQ ID NO: 2590283 - RNA, 19 nt, Homo sapiens
  misc_RNA (1)...(19): siRNA sense strand
gugcaggaagaaaggaaga

SEQ ID NO: 2590284 - RNA, 19 nt, Homo sapiens
  misc_RNA (1)...(19): siRNA sense strand
ggauacaggcugacgaacu

SEQ ID NO: 2590285 - RNA, 19 nt, Homo sapiens
  misc_RNA (1)...(19): siRNA sense strand
caaagaaguacgugcagga

SEQ ID NO: 2590286 - RNA, 19 nt, Homo sapiens
  misc_RNA (1)...(19): siRNA sense strand
gcuauggccaagaggguga

SEQ ID NO: 2590287 - RNA, 19 nt, Homo sapiens
  misc_RNA (1)...(19): siRNA sense strand
aggcaaaucgcaagcuuau

SEQ ID NO: 2590288 - RNA, 19 nt, Homo sapiens
  misc_RNA (1)...(19): siRNA sense strand
ccuaaauccagucggucaa

SEQ ID NO: 2590289 - RNA, 19 nt, Homo sapiens
  misc_RNA (1)...(19): siRNA sense strand
uggaggugcuggaggaguu

SEQ ID NO: 2590290 - RNA, 19 nt, Homo sapiens
  misc_RNA (1)...(19): siRNA sense strand
aaggcagagaugaaagaua

SEQ ID NO: 2590291 - RNA, 19 nt, Homo sapiens
  misc_RNA (1)...(19): siRNA sense strand
ugaacuuagacaugaggaa

SEQ ID NO: 2590292 - RNA, 19 nt, Homo sapiens
  misc_RNA (1)...(19): siRNA sense strand
aagaaagcaaccagaguca

SEQ ID NO: 2590293 - RNA, 19 nt, Homo sapiens
  misc_RNA (1)...(19): siRNA sense strand
cugucaaguucucggccaa

SEQ ID NO: 2590294 - RNA, 19 nt, Homo sapiens
  misc_RNA (1)...(19): siRNA sense strand
ggcugugcuuugauggaaa

SEQ ID NO: 2590295 - RNA, 19 nt, Homo sapiens
  misc_RNA (1)...(19): siRNA sense strand
aggcgcugguggagaucaa

SEQ ID NO: 2590296 - RNA, 19 nt, Homo sapiens
  misc_RNA (1)...(19): siRNA sense strand
ccuuaagagcacauuggaa

SEQ ID NO: 2590297 - RNA, 19 nt, Homo sapiens
  misc_RNA (1)...(19): siRNA sense strand
uggaaaggcuggaagaggu

SEQ ID NO: 2590298 - RNA, 19 nt, Homo sapiens
  misc_RNA (1)...(19): siRNA sense strand
gccaagagggugaaagcga

SEQ ID NO: 2590299 - RNA, 19 nt, Homo sapiens
  misc_RNA (1)...(19): siRNA sense strand
agacauguacccugaugaa

SEQ ID NO: 2590300 - RNA, 19 nt, Homo sapiens
  misc_RNA (1)...(19): siRNA sense strand
accgauaccaugaggauau

SEQ ID NO: 2590301 - RNA, 19 nt, Homo sapiens
  misc_RNA (1)...(19): siRNA sense strand
ucuauagcuuccagaguga

SEQ ID NO: 2590302 - RNA, 19 nt, Homo sapiens
  misc_RNA (1)...(19): siRNA sense strand
cuaccagcgagaaggagaa

SEQ ID NO: 2590303 - RNA, 19 nt, Homo sapiens
  misc_RNA (1)...(19): siRNA sense strand
gaguacgaggaauggaaau

SEQ ID NO: 2590304 - RNA, 19 nt, Homo sapiens
  misc_RNA (1)...(19): siRNA sense strand
ccuugguggaccugagcua

SEQ ID NO: 2590305 - RNA, 19 nt, Homo sapiens
  misc_RNA (1)...(19): siRNA sense strand
aggaguacgaggaauggaa

SEQ ID NO: 2590306 - RNA, 19 nt, Homo sapiens
  misc_RNA (1)...(19): siRNA sense strand
caggcaaaucgcaagcuua

SEQ ID NO: 2590307 - RNA, 19 nt, Homo sapiens
  misc_RNA (1)...(19): siRNA sense strand
ccauggaagaauaugacau

SEQ ID NO: 2590308 - RNA, 19 nt, Homo sapiens
  misc_RNA (1)...(19): siRNA sense strand
agaacaaugaacugcucaa

SEQ ID NO: 2590309 - RNA, 19 nt, Homo sapiens
  misc_RNA (1)...(19): siRNA sense strand
ggucaagaacugggagacu

SEQ ID NO: 2590310 - RNA, 19 nt, Homo sapiens
  misc_RNA (1)...(19): siRNA sense strand
gcacaaaaggacagcucuu

SEQ ID NO: 2590311 - RNA, 19 nt, Homo sapiens
  misc_RNA (1)...(19): siRNA sense strand
acgcaugucuggaaaggca

SEQ ID NO: 2590312 - RNA, 19 nt, Homo sapiens
  misc_RNA (1)...(19): siRNA sense strand
cugagaauggggagaaauu

SEQ ID NO: 2590313 - RNA, 19 nt, Homo sapiens
  misc_RNA (1)...(19): siRNA sense strand
gagacaacuuugagagugc

SEQ ID NO: 2590314 - RNA, 19 nt, Homo sapiens
  misc_RNA (1)...(19): siRNA sense strand
ucaagaacugggagacuga

SEQ ID NO: 2590315 - RNA, 19 nt, Homo sapiens
  misc_RNA (1)...(19): siRNA sense strand
cugaagacguccgcacaaa

SEQ ID NO: 2590316 - RNA, 19 nt, Homo sapiens
  misc_RNA (1)...(19): siRNA sense strand
uggccaagaagaugaacuu

SEQ ID NO: 2590317 - RNA, 19 nt, Homo sapiens
  misc_RNA (1)...(19): siRNA sense strand
aggugauguccauggaaga

SEQ ID NO: 2590318 - RNA, 19 nt, Homo sapiens
  misc_RNA (1)...(19): siRNA sense strand
agauggagaaggaccaauu

SEQ ID NO: 2590319 - RNA, 19 nt, Homo sapiens
  misc_RNA (1)...(19): siRNA sense strand
cgaagaaagcaaccagagu

SEQ ID NO: 2590320 - RNA, 19 nt, Homo sapiens
  misc_RNA (1)...(19): siRNA sense strand
augaacugcucaaggagau

SEQ ID NO: 2590321 - RNA, 19 nt, Homo sapiens
  misc_RNA (1)...(19): siRNA sense strand
gcacauuggaaacgggaug

SEQ ID NO: 2590322 - RNA, 19 nt, Homo sapiens
  misc_RNA (1)...(19): siRNA sense strand
acaucauucuugcggucaa

SEQ ID NO: 2590323 - RNA, 19 nt, Homo sapiens
  misc_RNA (1)...(19): siRNA sense strand
aaguggaacugcuggagga

SEQ ID NO: 2590324 - RNA, 19 nt, Homo sapiens
  misc_RNA (1)...(19): siRNA sense strand
gcaccaucuuccaggccuu

SEQ ID NO: 2590325 - RNA, 19 nt, Homo sapiens
  misc_RNA (1)...(19): siRNA sense strand
gcuaccagcgagaaggaga

SEQ ID NO: 2590326 - RNA, 19 nt, Homo sapiens
  misc_RNA (1)...(19): siRNA sense strand
ugggauuucuggugaagga

SEQ ID NO: 2590327 - RNA, 19 nt, Homo sapiens
  misc_RNA (1)...(19): siRNA sense strand
cggcaauccaagauagauc

SEQ ID NO: 2590328 - RNA, 19 nt, Homo sapiens
  misc_RNA (1)...(19): siRNA sense strand
ccaaggcagagaugaaaga

SEQ ID NO: 2590329 - RNA, 19 nt, Homo sapiens
  misc_RNA (1)...(19): siRNA sense strand
cgggaugcacugaguacau

SEQ ID NO: 2590330 - RNA, 19 nt, Homo sapiens
  misc_RNA (1)...(19): siRNA sense strand
aagaagaugaacuuagaca

SEQ ID NO: 2590331 - RNA, 19 nt, Homo sapiens
  misc_RNA (1)...(19): siRNA sense strand
ccagcgagaaggagaagca

SEQ ID NO: 2590332 - RNA, 19 nt, Homo sapiens
  misc_RNA (1)...(19): siRNA sense strand
ccggauacaggcugacgaa

SEQ ID NO: 2590333 - RNA, 19 nt, Homo sapiens
  misc_RNA (1)...(19): siRNA sense strand
acauggaaaggcuggaaga

SEQ ID NO: 2590334 - RNA, 19 nt, Homo sapiens
  misc_RNA (1)...(19): siRNA sense strand
agaaacaaguuccgccuca

SEQ ID NO: 2590335 - RNA, 19 nt, Homo sapiens
  misc_RNA (1)...(19): siRNA sense strand
cccuaaauccagucgguca

SEQ ID NO: 2590336 - RNA, 19 nt, Homo sapiens
  misc_RNA (1)...(19): siRNA sense strand
ucaaggagauagagccugu

SEQ ID NO: 2590337 - RNA, 19 nt, Homo sapiens
  misc_RNA (1)...(19): siRNA sense strand
cauuaagcacauggagaau

SEQ ID NO: 2590338 - RNA, 19 nt, Homo sapiens
  misc_RNA (1)...(19): siRNA sense strand
ggaccauaucaguagguau

SEQ ID NO: 2590339 - RNA, 19 nt, Homo sapiens
  misc_RNA (1)...(19): siRNA sense strand
auucaaagcaagaugccaa

SEQ ID NO: 2590340 - RNA, 19 nt, Homo sapiens
  misc_RNA (1)...(19): siRNA sense strand
uguaagugaucuuggcaca

SEQ ID NO: 2590341 - RNA, 19 nt, Homo sapiens
  misc_RNA (1)...(19): siRNA sense strand
gcuuacucgccgaugauaa

SEQ ID NO: 2590342 - RNA, 19 nt, Homo sapiens
  misc_RNA (1)...(19): siRNA sense strand
gcgacggagugaaugaaaa

SEQ ID NO: 2590343 - RNA, 19 nt, Homo sapiens
  misc_RNA (1)...(19): siRNA sense strand
aagcaagaugccaagacaa

SEQ ID NO: 2590344 - RNA, 19 nt, Homo sapiens
  misc_RNA (1)...(19): siRNA sense strand
caaugguugcucuaggaaa

SEQ ID NO: 2590345 - RNA, 19 nt, Homo sapiens
  misc_RNA (1)...(19): siRNA sense strand
ugccaagacaacagauaau

SEQ ID NO: 2590346 - RNA, 19 nt, Homo sapiens
  misc_RNA (1)...(19): siRNA sense strand
acagauaaugacugcucaa

SEQ ID NO: 2590347 - RNA, 19 nt, Homo sapiens
  misc_RNA (1)...(19): siRNA sense strand
guccaucagcaaugagcaa

SEQ ID NO: 2590348 - RNA, 19 nt, Homo sapiens
  misc_RNA (1)...(19): siRNA sense strand
ccaucagcaaugagcaaaa

SEQ ID NO: 2590349 - RNA, 19 nt, Homo sapiens
  misc_RNA (1)...(19): siRNA sense strand
ggacagucgacucugaaaa

SEQ ID NO: 2590350 - RNA, 19 nt, Homo sapiens
  misc_RNA (1)...(19): siRNA sense strand
aauaccagucuuugggcua

SEQ ID NO: 2590351 - RNA, 19 nt, Homo sapiens
  misc_RNA (1)...(19): siRNA sense strand
uggcagugucccuagagaa

SEQ ID NO: 2590352 - RNA, 19 nt, Homo sapiens
  misc_RNA (1)...(19): siRNA sense strand
ucacaaacaucauggccgu

SEQ ID NO: 2590353 - RNA, 19 nt, Homo sapiens
  misc_RNA (1)...(19): siRNA sense strand
augccaagacaacagauaa

SEQ ID NO: 2590354 - RNA, 19 nt, Homo sapiens
  misc_RNA (1)...(19): siRNA sense strand
cuuucuaacuaucaaguca

SEQ ID NO: 2590355 - RNA, 19 nt, Homo sapiens
  misc_RNA (1)...(19): siRNA sense strand
augaagaggaggagggaga

SEQ ID NO: 2590356 - RNA, 19 nt, Homo sapiens
  misc_RNA (1)...(19): siRNA sense strand
gggaugagagaguggagaa

SEQ ID NO: 2590357 - RNA, 19 nt, Homo sapiens
  misc_RNA (1)...(19): siRNA sense strand
gcaacaagcuuaaaggagu

SEQ ID NO: 2590358 - RNA, 19 nt, Homo sapiens
  misc_RNA (1)...(19): siRNA sense strand
cguucgagcccgucagaaa

SEQ ID NO: 2590359 - RNA, 19 nt, Homo sapiens
  misc_RNA (1)...(19): siRNA sense strand
guggaaaccuccugcggua

SEQ ID NO: 2590360 - RNA, 19 nt, Homo sapiens
  misc_RNA (1)...(19): siRNA sense strand
acgccaagcuccugcgcaa

SEQ ID NO: 2590361 - RNA, 19 nt, Homo sapiens
  misc_RNA (1)...(19): siRNA sense strand
agauacagaagaagaacua

SEQ ID NO: 2590362 - RNA, 19 nt, Homo sapiens
  misc_RNA (1)...(19): siRNA sense strand
gugaggaaauugaccgcaa

SEQ ID NO: 2590363 - RNA, 19 nt, Homo sapiens
  misc_RNA (1)...(19): siRNA sense strand
ggaugagagaguggagaaa

SEQ ID NO: 2590364 - RNA, 19 nt, Homo sapiens
  misc_RNA (1)...(19): siRNA sense strand
ugaagauacagaagaagaa

SEQ ID NO: 2590365 - RNA, 19 nt, Homo sapiens
  misc_RNA (1)...(19): siRNA sense strand
agacuagcaagcugggaaa

SEQ ID NO: 2590366 - RNA, 19 nt, Homo sapiens
  misc_RNA (1)...(19): siRNA sense strand
ggauauuaguucagcuacu

SEQ ID NO: 2590367 - RNA, 19 nt, Homo sapiens
  misc_RNA (1)...(19): siRNA sense strand
cugaagauacagaagaaga

SEQ ID NO: 2590368 - RNA, 19 nt, Homo sapiens
  misc_RNA (1)...(19): siRNA sense strand
caugaagagccuuggcaau

SEQ ID NO: 2590369 - RNA, 19 nt, Homo sapiens
  misc_RNA (1)...(19): siRNA sense strand
ccagaugauucgugaccuu

SEQ ID NO: 2590370 - RNA, 19 nt, Homo sapiens
  misc_RNA (1)...(19): siRNA sense strand
agacguuaccugugaucaa

SEQ ID NO: 2590371 - RNA, 19 nt, Homo sapiens
  misc_RNA (1)...(19): siRNA sense strand
cagcaggaacacagcacua

SEQ ID NO: 2590372 - RNA, 19 nt, Homo sapiens
  misc_RNA (1)...(19): siRNA sense strand
uccucaaacucuuggcaua

SEQ ID NO: 2590373 - RNA, 19 nt, Homo sapiens
  misc_RNA (1)...(19): siRNA sense strand
cagaagaagaacuaguaga

SEQ ID NO: 2590374 - RNA, 19 nt, Homo sapiens
  misc_RNA (1)...(19): siRNA sense strand
ccgcaagaggcuuugagaa

SEQ ID NO: 2590375 - RNA, 19 nt, Homo sapiens
  misc_RNA (1)...(19): siRNA sense strand
cagcauuuggagaaggcaa

SEQ ID NO: 2590376 - RNA, 19 nt, Homo sapiens
  misc_RNA (1)...(19): siRNA sense strand
agaagaagaacuaguagau

SEQ ID NO: 2590377 - RNA, 19 nt, Homo sapiens
  misc_RNA (1)...(19): siRNA sense strand
augaagagccuuggcaaua

SEQ ID NO: 2590378 - RNA, 19 nt, Homo sapiens
  misc_RNA (1)...(19): siRNA sense strand
cugcacagaagaugaagaa

SEQ ID NO: 2590379 - RNA, 19 nt, Homo sapiens
  misc_RNA (1)...(19): siRNA sense strand
aagaagaacuaguagauag

SEQ ID NO: 2590380 - RNA, 19 nt, Homo sapiens
  misc_RNA (1)...(19): siRNA sense strand
gcaauaaguucaugcaccu

SEQ ID NO: 2590381 - RNA, 19 nt, Homo sapiens
  misc_RNA (1)...(19): siRNA sense strand
acaucaugcuagacgaaaa

SEQ ID NO: 2590382 - RNA, 19 nt, Homo sapiens
  misc_RNA (1)...(19): siRNA sense strand
cgcuccagcuauaggcaaa

SEQ ID NO: 2590383 - RNA, 19 nt, Homo sapiens
  misc_RNA (1)...(19): siRNA sense strand
augagagaguggagaaacu

SEQ ID NO: 2590384 - RNA, 19 nt, Homo sapiens
  misc_RNA (1)...(19): siRNA sense strand
acucaaugccuucagcaaa

SEQ ID NO: 2590385 - RNA, 19 nt, Homo sapiens
  misc_RNA (1)...(19): siRNA sense strand
aggccaaugcagaugaaau

SEQ ID NO: 2590386 - RNA, 19 nt, Homo sapiens
  misc_RNA (1)...(19): siRNA sense strand
gagacuagcaagcugggaa

SEQ ID NO: 2590387 - RNA, 19 nt, Homo sapiens
  misc_RNA (1)...(19): siRNA sense strand
cgcaagaggcuuugagaag

SEQ ID NO: 2590388 - RNA, 19 nt, Homo sapiens
  misc_RNA (1)...(19): siRNA sense strand
cgagagcaucagaagcuaa

SEQ ID NO: 2590389 - RNA, 19 nt, Homo sapiens
  misc_RNA (1)...(19): siRNA sense strand
ccaugaagagccuuggcaa

SEQ ID NO: 2590390 - RNA, 19 nt, Homo sapiens
  misc_RNA (1)...(19): siRNA sense strand
gcuuaaaggaguagaucug

SEQ ID NO: 2590391 - RNA, 19 nt, Homo sapiens
  misc_RNA (1)...(19): siRNA sense strand
ggcugagacugaagauaca

SEQ ID NO: 2590392 - RNA, 19 nt, Homo sapiens
  misc_RNA (1)...(19): siRNA sense strand
cugaaggcuuuguggaacu

SEQ ID NO: 2590393 - RNA, 19 nt, Homo sapiens
  misc_RNA (1)...(19): siRNA sense strand
ucucaaaggaugacgugau

SEQ ID NO: 2590394 - RNA, 19 nt, Homo sapiens
  misc_RNA (1)...(19): siRNA sense strand
agauaaaggauguuguugu

SEQ ID NO: 2590395 - RNA, 19 nt, Homo sapiens
  misc_RNA (1)...(19): siRNA sense strand
agaaauaccauggcaacaa

SEQ ID NO: 2590396 - RNA, 19 nt, Homo sapiens
  misc_RNA (1)...(19): siRNA sense strand
gaagaagaacuaguagaua

SEQ ID NO: 2590397 - RNA, 19 nt, Homo sapiens
  misc_RNA (1)...(19): siRNA sense strand
cucaaugccuucagcaaau

SEQ ID NO: 2590398 - RNA, 19 nt, Homo sapiens
  misc_RNA (1)...(19): siRNA sense strand
ggauccaacuaaggagauu

SEQ ID NO: 2590399 - RNA, 19 nt, Homo sapiens
  misc_RNA (1)...(19): siRNA sense strand
cuacugaccuccagccaga

SEQ ID NO: 2590400 - RNA, 19 nt, Homo sapiens
  misc_RNA (1)...(19): siRNA sense strand
agcccaugcugaauaauaa

SEQ ID NO: 2590401 - RNA, 19 nt, Homo sapiens
  misc_RNA (1)...(19): siRNA sense strand
uggaagaugagcacaguga

SEQ ID NO: 2590402 - RNA, 19 nt, Homo sapiens
  misc_RNA (1)...(19): siRNA sense strand
cgccaaaaguggauuguga

SEQ ID NO: 2590403 - RNA, 19 nt, Homo sapiens
  misc_RNA (1)...(19): siRNA sense strand
cacugaaggcuuuguggaa

SEQ ID NO: 2590404 - RNA, 19 nt, Homo sapiens
  misc_RNA (1)...(19): siRNA sense strand
ggauucugguugagaugga

SEQ ID NO: 2590405 - RNA, 19 nt, Homo sapiens
  misc_RNA (1)...(19): siRNA sense strand
ugguauaaccggaauaacu

SEQ ID NO: 2590406 - RNA, 19 nt, Homo sapiens
  misc_RNA (1)...(19): siRNA sense strand
acugaggccgugaggaaau

SEQ ID NO: 2590407 - RNA, 19 nt, Homo sapiens
  misc_RNA (1)...(19): siRNA sense strand
cuagaagcuguauggaaau

SEQ ID NO: 2590408 - RNA, 19 nt, Homo sapiens
  misc_RNA (1)...(19): siRNA sense strand
agcaucagcucgaggcauu

SEQ ID NO: 2590409 - RNA, 19 nt, Homo sapiens
  misc_RNA (1)...(19): siRNA sense strand
agggauauuaguucagcua

SEQ ID NO: 2590410 - RNA, 19 nt, Homo sapiens
  misc_RNA (1)...(19): siRNA sense strand
uaguagauaguuuggaaga

SEQ ID NO: 2590411 - RNA, 19 nt, Homo sapiens
  misc_RNA (1)...(19): siRNA sense strand
ugauagggauauuaguuca

SEQ ID NO: 2590412 - RNA, 19 nt, Homo sapiens
  misc_RNA (1)...(19): siRNA sense strand
aaacaaagcuccugugagg

SEQ ID NO: 2590413 - RNA, 19 nt, Homo sapiens
  misc_RNA (1)...(19): siRNA sense strand
gggaggaaggaccggcuau

SEQ ID NO: 2590414 - RNA, 19 nt, Homo sapiens
  misc_RNA (1)...(19): siRNA sense strand
ucuggaagcuggaaaagaa

SEQ ID NO: 2590415 - RNA, 19 nt, Homo sapiens
  misc_RNA (1)...(19): siRNA sense strand
ugcccaaugcagaggauau

SEQ ID NO: 2590416 - RNA, 19 nt, Homo sapiens
  misc_RNA (1)...(19): siRNA sense strand
gaacagaaauaccauggca

SEQ ID NO: 2590417 - RNA, 19 nt, Homo sapiens
  misc_RNA (1)...(19): siRNA sense strand
cagaaauaccauggcaaca

SEQ ID NO: 2590418 - RNA, 19 nt, Homo sapiens
  misc_RNA (1)...(19): siRNA sense strand
acaugaaccugcugggcau

SEQ ID NO: 2590419 - RNA, 19 nt, Homo sapiens
  misc_RNA (1)...(19): siRNA sense strand
ucggaggacacgaagcaaa

SEQ ID NO: 2590420 - RNA, 19 nt, Homo sapiens
  misc_RNA (1)...(19): siRNA sense strand
aacaaagugcugagguaca

SEQ ID NO: 2590421 - RNA, 19 nt, Homo sapiens
  misc_RNA (1)...(19): siRNA sense strand
ggucagauucacagggauu

SEQ ID NO: 2590422 - RNA, 19 nt, Homo sapiens
  misc_RNA (1)...(19): siRNA sense strand
aagaagaguuccuggguca

SEQ ID NO: 2590423 - RNA, 19 nt, Homo sapiens
  misc_RNA (1)...(19): siRNA sense strand
guaauauucuucuggguga

SEQ ID NO: 2590424 - RNA, 19 nt, Homo sapiens
  misc_RNA (1)...(19): siRNA sense strand
ggaacaggugagaggcuau

SEQ ID NO: 2590425 - RNA, 19 nt, Homo sapiens
  misc_RNA (1)...(19): siRNA sense strand
auuacuaaguggagguuca

SEQ ID NO: 2590426 - RNA, 19 nt, Homo sapiens
  misc_RNA (1)...(19): siRNA sense strand
ugauguuacccgaaauaaa

SEQ ID NO: 2590427 - RNA, 19 nt, Homo sapiens
  misc_RNA (1)...(19): siRNA sense strand
cccgaaauaaaguaagaaa

SEQ ID NO: 2590428 - RNA, 19 nt, Homo sapiens
  misc_RNA (1)...(19): siRNA sense strand
gcuaugacuucaaggcuga

SEQ ID NO: 2590429 - RNA, 19 nt, Homo sapiens
  misc_RNA (1)...(19): siRNA sense strand
guucaauguuggauaucau

SEQ ID NO: 2590430 - RNA, 19 nt, Homo sapiens
  misc_RNA (1)...(19): siRNA sense strand
acagaagauuguagaugau

SEQ ID NO: 2590431 - RNA, 19 nt, Homo sapiens
  misc_RNA (1)...(19): siRNA sense strand
cggcaaguccuuuagaaaa

SEQ ID NO: 2590432 - RNA, 19 nt, Homo sapiens
  misc_RNA (1)...(19): siRNA sense strand
aggcaauaauagcaacaau

SEQ ID NO: 2590433 - RNA, 19 nt, Homo sapiens
  misc_RNA (1)...(19): siRNA sense strand
gggauuugaaagcugguaa

SEQ ID NO: 2590434 - RNA, 19 nt, Homo sapiens
  misc_RNA (1)...(19): siRNA sense strand
ggaugagaagagcgaagaa

SEQ ID NO: 2590435 - RNA, 19 nt, Homo sapiens
  misc_RNA (1)...(19): siRNA sense strand
acgaagaguaaaagaagaa

SEQ ID NO: 2590436 - RNA, 19 nt, Homo sapiens
  misc_RNA (1)...(19): siRNA sense strand
acggcaaguccuuuagaaa

SEQ ID NO: 2590437 - RNA, 19 nt, Homo sapiens
  misc_RNA (1)...(19): siRNA sense strand
ggcaaguccuuuagaaaau

SEQ ID NO: 2590438 - RNA, 19 nt, Homo sapiens
  misc_RNA (1)...(19): siRNA sense strand
cugcuaauuuacagaagau

SEQ ID NO: 2590439 - RNA, 19 nt, Homo sapiens
  misc_RNA (1)...(19): siRNA sense strand
agaagagcgaagaagggaa

SEQ ID NO: 2590440 - RNA, 19 nt, Homo sapiens
  misc_RNA (1)...(19): siRNA sense strand
ggauuugaaagcugguaau

SEQ ID NO: 2590441 - RNA, 19 nt, Homo sapiens
  misc_RNA (1)...(19): siRNA sense strand
ggaaacagggguagaggau

SEQ ID NO: 2590442 - RNA, 19 nt, Homo sapiens
  misc_RNA (1)...(19): siRNA sense strand
cauguggaguuuuggaaua

SEQ ID NO: 2590443 - RNA, 19 nt, Homo sapiens
  misc_RNA (1)...(19): siRNA sense strand
ugaauuagcaacaggagca

SEQ ID NO: 2590444 - RNA, 19 nt, Homo sapiens
  misc_RNA (1)...(19): siRNA sense strand
aagaaacuccagaaaggaa

SEQ ID NO: 2590445 - RNA, 19 nt, Homo sapiens
  misc_RNA (1)...(19): siRNA sense strand
cagaaagauccuuccaaaa

SEQ ID NO: 2590446 - RNA, 19 nt, Homo sapiens
  misc_RNA (1)...(19): siRNA sense strand
acagaaacggucagauuca

SEQ ID NO: 2590447 - RNA, 19 nt, Homo sapiens
  misc_RNA (1)...(19): siRNA sense strand
aaugaagacuacagagaag

SEQ ID NO: 2590448 - RNA, 19 nt, Homo sapiens
  misc_RNA (1)...(19): siRNA sense strand
cugaugaagugaagcugau

SEQ ID NO: 2590449 - RNA, 19 nt, Homo sapiens
  misc_RNA (1)...(19): siRNA sense strand
cguacgagcugcaggaggu

SEQ ID NO: 2590450 - RNA, 19 nt, Homo sapiens
  misc_RNA (1)...(19): siRNA sense strand
cuccugaagucauggaaca

SEQ ID NO: 2590451 - RNA, 19 nt, Homo sapiens
  misc_RNA (1)...(19): siRNA sense strand
aguuauaguggcugcuaau

SEQ ID NO: 2590452 - RNA, 19 nt, Homo sapiens
  misc_RNA (1)...(19): siRNA sense strand
agaugaucccaaagcuuua

SEQ ID NO: 2590453 - RNA, 19 nt, Homo sapiens
  misc_RNA (1)...(19): siRNA sense strand
cauugucaaccgaggagaa

SEQ ID NO: 2590454 - RNA, 19 nt, Homo sapiens
  misc_RNA (1)...(19): siRNA sense strand
gggguagaggauaaagaaa

SEQ ID NO: 2590455 - RNA, 19 nt, Homo sapiens
  misc_RNA (1)...(19): siRNA sense strand
cgauguaguuauaguggcu

SEQ ID NO: 2590456 - RNA, 19 nt, Homo sapiens
  misc_RNA (1)...(19): siRNA sense strand
ccgaggagaacacaagaau

SEQ ID NO: 2590457 - RNA, 19 nt, Homo sapiens
  misc_RNA (1)...(19): siRNA sense strand
gugacgacgagauggauga

SEQ ID NO: 2590458 - RNA, 19 nt, Homo sapiens
  misc_RNA (1)...(19): siRNA sense strand
aagugaagcugauuggguu

SEQ ID NO: 2590459 - RNA, 19 nt, Homo sapiens
  misc_RNA (1)...(19): siRNA sense strand
gaccaguauggaugaacua

SEQ ID NO: 2590460 - RNA, 19 nt, Homo sapiens
  misc_RNA (1)...(19): siRNA sense strand
agagaguaccugauugaga

SEQ ID NO: 2590461 - RNA, 19 nt, Homo sapiens
  misc_RNA (1)...(19): siRNA sense strand
uuuggaaggcuuagacuau

SEQ ID NO: 2590462 - RNA, 19 nt, Homo sapiens
  misc_RNA (1)...(19): siRNA sense strand
guagaugaucccaaagcuu

SEQ ID NO: 2590463 - RNA, 19 nt, Homo sapiens
  misc_RNA (1)...(19): siRNA sense strand
gaaauuacuaaguggaggu

SEQ ID NO: 2590464 - RNA, 19 nt, Homo sapiens
  misc_RNA (1)...(19): siRNA sense strand
agauggaugagaagagcga

SEQ ID NO: 2590465 - RNA, 19 nt, Homo sapiens
  misc_RNA (1)...(19): siRNA sense strand
aaguagagucugugggaaa

SEQ ID NO: 2590466 - RNA, 19 nt, Homo sapiens
  misc_RNA (1)...(19): siRNA sense strand
gggugaaggagauggugaa

SEQ ID NO: 2590467 - RNA, 19 nt, Homo sapiens
  misc_RNA (1)...(19): siRNA sense strand
cgacaagguaccagagauc

SEQ ID NO: 2590468 - RNA, 19 nt, Homo sapiens
  misc_RNA (1)...(19): siRNA sense strand
aggagauggugaaggaguu

SEQ ID NO: 2590469 - RNA, 19 nt, Homo sapiens
  misc_RNA (1)...(19): siRNA sense strand
cuguauaccagcaggugua

SEQ ID NO: 2590470 - RNA, 19 nt, Homo sapiens
  misc_RNA (1)...(19): siRNA sense strand
cuguggagaacguggagaa

SEQ ID NO: 2590471 - RNA, 19 nt, Homo sapiens
  misc_RNA (1)...(19): siRNA sense strand
gugaacaagaggcggguga

SEQ ID NO: 2590472 - RNA, 19 nt, Homo sapiens
  misc_RNA (1)...(19): siRNA sense strand
cugaugaggaauauggauu

SEQ ID NO: 2590473 - RNA, 19 nt, Homo sapiens
  misc_RNA (1)...(19): siRNA sense strand
ccuuugaggcagagaagca

SEQ ID NO: 2590474 - RNA, 19 nt, Homo sapiens
  misc_RNA (1)...(19): siRNA sense strand
ucaugaaggcccugagcuu

SEQ ID NO: 2590475 - RNA, 19 nt, Homo sapiens
  misc_RNA (1)...(19): siRNA sense strand
agaauaagaaccuggcuca

SEQ ID NO: 2590476 - RNA, 19 nt, Homo sapiens
  misc_RNA (1)...(19): siRNA sense strand
ccucagacgagaaggagca

SEQ ID NO: 2590477 - RNA, 19 nt, Homo sapiens
  misc_RNA (1)...(19): siRNA sense strand
gugaacgauuggaugucaa

SEQ ID NO: 2590478 - RNA, 19 nt, Homo sapiens
  misc_RNA (1)...(19): siRNA sense strand
ugggaaaggugguacagga

SEQ ID NO: 2590479 - RNA, 19 nt, Homo sapiens
  misc_RNA (1)...(19): siRNA sense strand
ggucggauguacagcacca

SEQ ID NO: 2590480 - RNA, 19 nt, Homo sapiens
  misc_RNA (1)...(19): siRNA sense strand
gagaaggagcaguuccgaa

SEQ ID NO: 2590481 - RNA, 19 nt, Homo sapiens
  misc_RNA (1)...(19): siRNA sense strand
ccgacaagguaccagagau

SEQ ID NO: 2590482 - RNA, 19 nt, Homo sapiens
  misc_RNA (1)...(19): siRNA sense strand
cagacgagaaggagcaguu

SEQ ID NO: 2590483 - RNA, 19 nt, Homo sapiens
  misc_RNA (1)...(19): siRNA sense strand
uggagaagcuggcagagga

SEQ ID NO: 2590484 - RNA, 19 nt, Homo sapiens
  misc_RNA (1)...(19): siRNA sense strand
ugaugaaacagauccacaa

SEQ ID NO: 2590485 - RNA, 19 nt, Homo sapiens
  misc_RNA (1)...(19): siRNA sense strand
ggaaguagagucuguggga

SEQ ID NO: 2590486 - RNA, 19 nt, Homo sapiens
  misc_RNA (1)...(19): siRNA sense strand
acaucaagaucucucgcua

SEQ ID NO: 2590487 - RNA, 19 nt, Homo sapiens
  misc_RNA (1)...(19): siRNA sense strand
acacacugcaggaugauau

SEQ ID NO: 2590488 - RNA, 19 nt, Homo sapiens
  misc_RNA (1)...(19): siRNA sense strand
gcaacgugcagcuggcaga

SEQ ID NO: 2590489 - RNA, 19 nt, Homo sapiens
  misc_RNA (1)...(19): siRNA sense strand
aagacaagccagugcaugu

SEQ ID NO: 2590490 - RNA, 19 nt, Homo sapiens
  misc_RNA (1)...(19): siRNA sense strand
uggcagaggagauacccaa

SEQ ID NO: 2590491 - RNA, 19 nt, Homo sapiens
  misc_RNA (1)...(19): siRNA sense strand
ugagcaaaugguugaauga

SEQ ID NO: 2590492 - RNA, 19 nt, Homo sapiens
  misc_RNA (1)...(19): siRNA sense strand
ccaacauugagaauaagaa

SEQ ID NO: 2590493 - RNA, 19 nt, Homo sapiens
  misc_RNA (1)...(19): siRNA sense strand
aggcagagaagcaggcugu

SEQ ID NO: 2590494 - RNA, 19 nt, Homo sapiens
  misc_RNA (1)...(19): siRNA sense strand
cgggugaaggagaugguga

SEQ ID NO: 2590495 - RNA, 19 nt, Homo sapiens
  misc_RNA (1)...(19): siRNA sense strand
uggacuucacuguggagaa

SEQ ID NO: 2590496 - RNA, 19 nt, Homo sapiens
  misc_RNA (1)...(19): siRNA sense strand
cugaauggcuggcugacca

SEQ ID NO: 2590497 - RNA, 19 nt, Homo sapiens
  misc_RNA (1)...(19): siRNA sense strand
uauggaagcaagagagaga

SEQ ID NO: 2590498 - RNA, 19 nt, Homo sapiens
  misc_RNA (1)...(19): siRNA sense strand
acagauucgaagagagaga

SEQ ID NO: 2590499 - RNA, 19 nt, Homo sapiens
  misc_RNA (1)...(19): siRNA sense strand
ucgaagagagagaggacga

SEQ ID NO: 2590500 - RNA, 19 nt, Homo sapiens
  misc_RNA (1)...(19): siRNA sense strand
gagagagcgccgagugaca

SEQ ID NO: 2590501 - RNA, 19 nt, Homo sapiens
  misc_RNA (1)...(19): siRNA sense strand
gccuaagaauacugaacau

SEQ ID NO: 2590502 - RNA, 19 nt, Homo sapiens
  misc_RNA (1)...(19): siRNA sense strand
uggaauuacguuacagauu

SEQ ID NO: 2590503 - RNA, 19 nt, Homo sapiens
  misc_RNA (1)...(19): siRNA sense strand
aaaccuaggcuaugcgaga

SEQ ID NO: 2590504 - RNA, 19 nt, Homo sapiens
  misc_RNA (1)...(19): siRNA sense strand
aggcuaugcgagaggcgua

SEQ ID NO: 2590505 - RNA, 19 nt, Homo sapiens
  misc_RNA (1)...(19): siRNA sense strand
agaccagagcagaguacau

SEQ ID NO: 2590506 - RNA, 19 nt, Homo sapiens
  misc_RNA (1)...(19): siRNA sense strand
guuauggaagcaagagaga

SEQ ID NO: 2590507 - RNA, 19 nt, Homo sapiens
  misc_RNA (1)...(19): siRNA sense strand
cccuaacagcuaaugauaa

SEQ ID NO: 2590508 - RNA, 19 nt, Homo sapiens
  misc_RNA (1)...(19): siRNA sense strand
auuacaagacugacaccua

SEQ ID NO: 2590509 - RNA, 19 nt, Homo sapiens
  misc_RNA (1)...(19): siRNA sense strand
acugggaaaccuaaagauu

SEQ ID NO: 2590510 - RNA, 19 nt, Homo sapiens
  misc_RNA (1)...(19): siRNA sense strand
ccuacaguguucagggaga

SEQ ID NO: 2590511 - RNA, 19 nt, Homo sapiens
  misc_RNA (1)...(19): siRNA sense strand
cuaggagggaagagggaga

SEQ ID NO: 2590512 - RNA, 19 nt, Homo sapiens
  misc_RNA (1)...(19): siRNA sense strand
uggaugaaggcauggacua

SEQ ID NO: 2590513 - RNA, 19 nt, Homo sapiens
  misc_RNA (1)...(19): siRNA sense strand
cuacagagauugagcagac

SEQ ID NO: 2590514 - RNA, 19 nt, Homo sapiens
  misc_RNA (1)...(19): siRNA sense strand
aggcauggacuaugagcga

SEQ ID NO: 2590515 - RNA, 19 nt, Homo sapiens
  misc_RNA (1)...(19): siRNA sense strand
ccagcaaggcagagcagga

SEQ ID NO: 2590516 - RNA, 19 nt, Homo sapiens
  misc_RNA (1)...(19): siRNA sense strand
gcacagcccucaagccaga

SEQ ID NO: 2590517 - RNA, 19 nt, Homo sapiens
  misc_RNA (1)...(19): siRNA sense strand
ccaaaaggcaaaagaggca

SEQ ID NO: 2590518 - RNA, 19 nt, Homo sapiens
  misc_RNA (1)...(19): siRNA sense strand
gagaagaagcagaagagug

SEQ ID NO: 2590519 - RNA, 19 nt, Homo sapiens
  misc_RNA (1)...(19): siRNA sense strand
agggagaagaagcagaaga

SEQ ID NO: 2590520 - RNA, 19 nt, Homo sapiens
  misc_RNA (1)...(19): siRNA sense strand
cagaacucuuugagaagca

SEQ ID NO: 2590521 - RNA, 19 nt, Homo sapiens
  misc_RNA (1)...(19): siRNA sense strand
aggcaaaagaggcaccaaa

SEQ ID NO: 2590522 - RNA, 19 nt, Homo sapiens
  misc_RNA (1)...(19): siRNA sense strand
gcgcacuggcauuggacga

SEQ ID NO: 2590523 - RNA, 19 nt, Homo sapiens
  misc_RNA (1)...(19): siRNA sense strand
gggaagagggagaagaagc

SEQ ID NO: 2590524 - RNA, 19 nt, Homo sapiens
  misc_RNA (1)...(19): siRNA sense strand
aggagaauggucagcaaca

SEQ ID NO: 2590525 - RNA, 19 nt, Homo sapiens
  misc_RNA (1)...(19): siRNA sense strand
acaucaucguggugcccua

SEQ ID NO: 2590526 - RNA, 19 nt, Homo sapiens
  misc_RNA (1)...(19): siRNA sense strand
agcuggaaguucuggccaa

SEQ ID NO: 2590527 - RNA, 19 nt, Homo sapiens
  misc_RNA (1)...(19): siRNA sense strand
aggaaauucaggaagcaaa

SEQ ID NO: 2590528 - RNA, 19 nt, Homo sapiens
  misc_RNA (1)...(19): siRNA sense strand
acugaugacuggagaggau

SEQ ID NO: 2590529 - RNA, 19 nt, Homo sapiens
  misc_RNA (1)...(19): siRNA sense strand
gggaggaagaagaggccuu

SEQ ID NO: 2590530 - RNA, 19 nt, Homo sapiens
  misc_RNA (1)...(19): siRNA sense strand
uggaauugcaagagaaguu

SEQ ID NO: 2590531 - RNA, 19 nt, Homo sapiens
  misc_RNA (1)...(19): siRNA sense strand
agauaauggaucagauuga

SEQ ID NO: 2590532 - RNA, 19 nt, Homo sapiens
  misc_RNA (1)...(19): siRNA sense strand
ucuccaaguuugaagaaaa

SEQ ID NO: 2590533 - RNA, 19 nt, Homo sapiens
  misc_RNA (1)...(19): siRNA sense strand
agauggaauugcaagagaa

SEQ ID NO: 2590534 - RNA, 19 nt, Homo sapiens
  misc_RNA (1)...(19): siRNA sense strand
ggaaauucaggaagcaaaa

SEQ ID NO: 2590535 - RNA, 19 nt, Homo sapiens
  misc_RNA (1)...(19): siRNA sense strand
gaggaauucauguggauca

SEQ ID NO: 2590536 - RNA, 19 nt, Homo sapiens
  misc_RNA (1)...(19): siRNA sense strand
guugaaugaacgacaagaa

SEQ ID NO: 2590537 - RNA, 19 nt, Homo sapiens
  misc_RNA (1)...(19): siRNA sense strand
gucugaacgccgaggaauu

SEQ ID NO: 2590538 - RNA, 19 nt, Homo sapiens
  misc_RNA (1)...(19): siRNA sense strand
ugaaugaagccaagaaacu

SEQ ID NO: 2590539 - RNA, 19 nt, Homo sapiens
  misc_RNA (1)...(19): siRNA sense strand
ggaaauuaagccuccgaau

SEQ ID NO: 2590540 - RNA, 19 nt, Homo sapiens
  misc_RNA (1)...(19): siRNA sense strand
ccgaggaauucauguggau

SEQ ID NO: 2590541 - RNA, 19 nt, Homo sapiens
  misc_RNA (1)...(19): siRNA sense strand
cugaugaugagaagaaaga

SEQ ID NO: 2590542 - RNA, 19 nt, Homo sapiens
  misc_RNA (1)...(19): siRNA sense strand
ggagggaagaguaccacaa

SEQ ID NO: 2590543 - RNA, 19 nt, Homo sapiens
  misc_RNA (1)...(19): siRNA sense strand
caugaaugaagccaagaaa

SEQ ID NO: 2590544 - RNA, 19 nt, Homo sapiens
  misc_RNA (1)...(19): siRNA sense strand
agacaggccaagaaaucua

SEQ ID NO: 2590545 - RNA, 19 nt, Homo sapiens
  misc_RNA (1)...(19): siRNA sense strand
gcauugaagaacagucaga

SEQ ID NO: 2590546 - RNA, 19 nt, Homo sapiens
  misc_RNA (1)...(19): siRNA sense strand
caucaagaucaccaagaau

SEQ ID NO: 2590547 - RNA, 19 nt, Homo sapiens
  misc_RNA (1)...(19): siRNA sense strand
ccaggaagcaagaagcuga

SEQ ID NO: 2590548 - RNA, 19 nt, Homo sapiens
  misc_RNA (1)...(19): siRNA sense strand
aagccaagaaacuggaaaa

SEQ ID NO: 2590549 - RNA, 19 nt, Homo sapiens
  misc_RNA (1)...(19): siRNA sense strand
gaaaagaaaaccaacgaga

SEQ ID NO: 2590550 - RNA, 19 nt, Homo sapiens
  misc_RNA (1)...(19): siRNA sense strand
uugaaugaacgacaagaaa

SEQ ID NO: 2590551 - RNA, 19 nt, Homo sapiens
  misc_RNA (1)...(19): siRNA sense strand
agauuggacagauggaauu

SEQ ID NO: 2590552 - RNA, 19 nt, Homo sapiens
  misc_RNA (1)...(19): siRNA sense strand
agcaagaagcugagaguug

SEQ ID NO: 2590553 - RNA, 19 nt, Homo sapiens
  misc_RNA (1)...(19): siRNA sense strand
aaagaaggaaauucaggaa

SEQ ID NO: 2590554 - RNA, 19 nt, Homo sapiens
  misc_RNA (1)...(19): siRNA sense strand
ugacuggagaggauggcua

SEQ ID NO: 2590555 - RNA, 19 nt, Homo sapiens
  misc_RNA (1)...(19): siRNA sense strand
agaagcagauucaggagga

SEQ ID NO: 2590556 - RNA, 19 nt, Homo sapiens
  misc_RNA (1)...(19): siRNA sense strand
aggccaagaaaucuauaaa

SEQ ID NO: 2590557 - RNA, 19 nt, Homo sapiens
  misc_RNA (1)...(19): siRNA sense strand
agaagauaauggaucagau

SEQ ID NO: 2590558 - RNA, 19 nt, Homo sapiens
  misc_RNA (1)...(19): siRNA sense strand
uguauaagaacuuggaucu

SEQ ID NO: 2590559 - RNA, 19 nt, Homo sapiens
  misc_RNA (1)...(19): siRNA sense strand
aaagagucgagaagauaau

SEQ ID NO: 2590560 - RNA, 19 nt, Homo sapiens
  misc_RNA (1)...(19): siRNA sense strand
uagauuggacagauggaau

SEQ ID NO: 2590561 - RNA, 19 nt, Homo sapiens
  misc_RNA (1)...(19): siRNA sense strand
aggaauucauguggaucaa

SEQ ID NO: 2590562 - RNA, 19 nt, Homo sapiens
  misc_RNA (1)...(19): siRNA sense strand
acaauguggccgaaaggau

SEQ ID NO: 2590563 - RNA, 19 nt, Homo sapiens
  misc_RNA (1)...(19): siRNA sense strand
gaagaguaccacaaagcca

SEQ ID NO: 2590564 - RNA, 19 nt, Homo sapiens
  misc_RNA (1)...(19): siRNA sense strand
gaugaugagaagaaagauc

SEQ ID NO: 2590565 - RNA, 19 nt, Homo sapiens
  misc_RNA (1)...(19): siRNA sense strand
ugagcaaggugcauggcaa

SEQ ID NO: 2590566 - RNA, 19 nt, Homo sapiens
  misc_RNA (1)...(19): siRNA sense strand
ccaacaugaacuacgacaa

SEQ ID NO: 2590567 - RNA, 19 nt, Homo sapiens
  misc_RNA (1)...(19): siRNA sense strand
acuacuacgacaagaacau

SEQ ID NO: 2590568 - RNA, 19 nt, Homo sapiens
  misc_RNA (1)...(19): siRNA sense strand
agauaaugcuguagugaaa

SEQ ID NO: 2590569 - RNA, 19 nt, Homo sapiens
  misc_RNA (1)...(19): siRNA sense strand
gcugaaauggagagaauua

SEQ ID NO: 2590570 - RNA, 19 nt, Homo sapiens
  misc_RNA (1)...(19): siRNA sense strand
gugaaugauuauagagaga

SEQ ID NO: 2590571 - RNA, 19 nt, Homo sapiens
  misc_RNA (1)...(19): siRNA sense strand
augaagaguuggaggaaga

SEQ ID NO: 2590572 - RNA, 19 nt, Homo sapiens
  misc_RNA (1)...(19): siRNA sense strand
cuucaugacuguugacaaa

SEQ ID NO: 2590573 - RNA, 19 nt, Homo sapiens
  misc_RNA (1)...(19): siRNA sense strand
ccaggaaaucauagaauua

SEQ ID NO: 2590574 - RNA, 19 nt, Homo sapiens
  misc_RNA (1)...(19): siRNA sense strand
ggauaagcaaaguaagaua

SEQ ID NO: 2590575 - RNA, 19 nt, Homo sapiens
  misc_RNA (1)...(19): siRNA sense strand
cugcugaaauggagagaau

SEQ ID NO: 2590576 - RNA, 19 nt, Homo sapiens
  misc_RNA (1)...(19): siRNA sense strand
aggaagagauagugcauuu

SEQ ID NO: 2590577 - RNA, 19 nt, Homo sapiens
  misc_RNA (1)...(19): siRNA sense strand
gauauaaggccaagagaca

SEQ ID NO: 2590578 - RNA, 19 nt, Homo sapiens
  misc_RNA (1)...(19): siRNA sense strand
gaagaaauagagagaacaa

SEQ ID NO: 2590579 - RNA, 19 nt, Homo sapiens
  misc_RNA (1)...(19): siRNA sense strand
uugaagaacaaaugggaaa

SEQ ID NO: 2590580 - RNA, 19 nt, Homo sapiens
  misc_RNA (1)...(19): siRNA sense strand
gcaaagggaugguggcaga

SEQ ID NO: 2590581 - RNA, 19 nt, Homo sapiens
  misc_RNA (1)...(19): siRNA sense strand
cuaaagaauccgaguguau

SEQ ID NO: 2590582 - RNA, 19 nt, Homo sapiens
  misc_RNA (1)...(19): siRNA sense strand
ccgcugagacuuugaguaa

SEQ ID NO: 2590583 - RNA, 19 nt, Homo sapiens
  misc_RNA (1)...(19): siRNA sense strand
ccaagaaaucagagacauu

SEQ ID NO: 2590584 - RNA, 19 nt, Homo sapiens
  misc_RNA (1)...(19): siRNA sense strand
cuuaaacagccuugagaua

SEQ ID NO: 2590585 - RNA, 19 nt, Homo sapiens
  misc_RNA (1)...(19): siRNA sense strand
aggaagaaauagagagaac

SEQ ID NO: 2590586 - RNA, 19 nt, Homo sapiens
  misc_RNA (1)...(19): siRNA sense strand
cugaagagaaggaaguaaa

SEQ ID NO: 2590587 - RNA, 19 nt, Homo sapiens
  misc_RNA (1)...(19): siRNA sense strand
gugcaaaggaguuagaaau

SEQ ID NO: 2590588 - RNA, 19 nt, Homo sapiens
  misc_RNA (1)...(19): siRNA sense strand
cggcaaguuuguaggaaaa

SEQ ID NO: 2590589 - RNA, 19 nt, Homo sapiens
  misc_RNA (1)...(19): siRNA sense strand
ucacagaacacuucggaaa

SEQ ID NO: 2590590 - RNA, 19 nt, Homo sapiens
  misc_RNA (1)...(19): siRNA sense strand
aguucgagguggacagaaa

SEQ ID NO: 2590591 - RNA, 19 nt, Homo sapiens
  misc_RNA (1)...(19): siRNA sense strand
agcaauggaucuugggaua

SEQ ID NO: 2590592 - RNA, 19 nt, Homo sapiens
  misc_RNA (1)...(19): siRNA sense strand
caguagaagacuuggauuu

SEQ ID NO: 2590593 - RNA, 19 nt, Homo sapiens
  misc_RNA (1)...(19): siRNA sense strand
gaagcaaagaagagaaaga

SEQ ID NO: 2590594 - RNA, 19 nt, Homo sapiens
  misc_RNA (1)...(19): siRNA sense strand
agacagaagcuuuaaggaa

SEQ ID NO: 2590595 - RNA, 19 nt, Homo sapiens
  misc_RNA (1)...(19): siRNA sense strand
ggugacaaauugagaccaa

SEQ ID NO: 2590596 - RNA, 19 nt, Homo sapiens
  misc_RNA (1)...(19): siRNA sense strand
ggaugguggcagaggaaau

SEQ ID NO: 2590597 - RNA, 19 nt, Homo sapiens
  misc_RNA (1)...(19): siRNA sense strand
aagcagagcagcugacaaa

SEQ ID NO: 2590598 - RNA, 19 nt, Homo sapiens
  misc_RNA (1)...(19): siRNA sense strand
cuugaaugucacagagaaa

SEQ ID NO: 2590599 - RNA, 19 nt, Homo sapiens
  misc_RNA (1)...(19): siRNA sense strand
gugaauguguccuggaaau

SEQ ID NO: 2590600 - RNA, 19 nt, Homo sapiens
  misc_RNA (1)...(19): siRNA sense strand
agaauaagacugggaguaa

SEQ ID NO: 2590601 - RNA, 19 nt, Homo sapiens
  misc_RNA (1)...(19): siRNA sense strand
cugaagagccagacagaga

SEQ ID NO: 2590602 - RNA, 19 nt, Homo sapiens
  misc_RNA (1)...(19): siRNA sense strand
gugaagcaaagaagagaaa

SEQ ID NO: 2590603 - RNA, 19 nt, Homo sapiens
  misc_RNA (1)...(19): siRNA sense strand
aagaagaccuggaagaaca

SEQ ID NO: 2590604 - RNA, 19 nt, Homo sapiens
  misc_RNA (1)...(19): siRNA sense strand
ccucaagccuauagcaaaa

SEQ ID NO: 2590605 - RNA, 19 nt, Homo sapiens
  misc_RNA (1)...(19): siRNA sense strand
ugauauugcugccaagaaa

SEQ ID NO: 2590606 - RNA, 19 nt, Homo sapiens
  misc_RNA (1)...(19): siRNA sense strand
augaggaagagaaggaaua

SEQ ID NO: 2590607 - RNA, 19 nt, Homo sapiens
  misc_RNA (1)...(19): siRNA sense strand
gcugagacuuugaguaaaa

SEQ ID NO: 2590608 - RNA, 19 nt, Homo sapiens
  misc_RNA (1)...(19): siRNA sense strand
gaggauaagcaaaguaaga

SEQ ID NO: 2590609 - RNA, 19 nt, Homo sapiens
  misc_RNA (1)...(19): siRNA sense strand
aagagaaggaagaggugaa

SEQ ID NO: 2590610 - RNA, 19 nt, Homo sapiens
  misc_RNA (1)...(19): siRNA sense strand
acgagauaguucagaguuu

SEQ ID NO: 2590611 - RNA, 19 nt, Homo sapiens
  misc_RNA (1)...(19): siRNA sense strand
caaggaagaaauagagaga

SEQ ID NO: 2590612 - RNA, 19 nt, Homo sapiens
  misc_RNA (1)...(19): siRNA sense strand
uggaagaaacugaagaaaa

SEQ ID NO: 2590613 - RNA, 19 nt, Homo sapiens
  misc_RNA (1)...(19): siRNA sense strand
ugaugaugcuguagucaaa

SEQ ID NO: 2590614 - RNA, 19 nt, Homo sapiens
  misc_RNA (1)...(19): siRNA sense strand
caguaaagagcuuggcauu

SEQ ID NO: 2590615 - RNA, 19 nt, Homo sapiens
  misc_RNA (1)...(19): siRNA sense strand
gguugugaaugaugaggaa

SEQ ID NO: 2590616 - RNA, 19 nt, Homo sapiens
  misc_RNA (1)...(19): siRNA sense strand
ucggcaaguuuguaggaaa

SEQ ID NO: 2590617 - RNA, 19 nt, Homo sapiens
  misc_RNA (1)...(19): siRNA sense strand
gcuaugaggaggagguuga

SEQ ID NO: 2590618 - RNA, 19 nt, Homo sapiens
  misc_RNA (1)...(19): siRNA sense strand
agaggaaaucgaagaggaa

SEQ ID NO: 2590619 - RNA, 19 nt, Homo sapiens
  misc_RNA (1)...(19): siRNA sense strand
gcgcuuaaauagacaacuu

SEQ ID NO: 2590620 - RNA, 19 nt, Homo sapiens
  misc_RNA (1)...(19): siRNA sense strand
cugaggagauccagauauu

SEQ ID NO: 2590621 - RNA, 19 nt, Homo sapiens
  misc_RNA (1)...(19): siRNA sense strand
cagagaaagacuauagaga

SEQ ID NO: 2590622 - RNA, 19 nt, Homo sapiens
  misc_RNA (1)...(19): siRNA sense strand
agccauagccugaaagauu

SEQ ID NO: 2590623 - RNA, 19 nt, Homo sapiens
  misc_RNA (1)...(19): siRNA sense strand
ugcaaaggaguuagaaaua

SEQ ID NO: 2590624 - RNA, 19 nt, Homo sapiens
  misc_RNA (1)...(19): siRNA sense strand
cagaagaagacuagaucca

SEQ ID NO: 2590625 - RNA, 19 nt, Homo sapiens
  misc_RNA (1)...(19): siRNA sense strand
agagaaagacuauagagaa

SEQ ID NO: 2590626 - RNA, 19 nt, Homo sapiens
  misc_RNA (1)...(19): siRNA sense strand
cgaaaauaauagaggaucu

SEQ ID NO: 2590627 - RNA, 19 nt, Homo sapiens
  misc_RNA (1)...(19): siRNA sense strand
uauaaggccaagagacaaa

SEQ ID NO: 2590628 - RNA, 19 nt, Homo sapiens
  misc_RNA (1)...(19): siRNA sense strand
caaagaagagaaagauaga

SEQ ID NO: 2590629 - RNA, 19 nt, Homo sapiens
  misc_RNA (1)...(19): siRNA sense strand
acaacuaauggaaggcaaa

SEQ ID NO: 2590630 - RNA, 19 nt, Homo sapiens
  misc_RNA (1)...(19): siRNA sense strand
aggaguugauuuugagaaa

SEQ ID NO: 2590631 - RNA, 19 nt, Homo sapiens
  misc_RNA (1)...(19): siRNA sense strand
uggaagugggacaaagaua

SEQ ID NO: 2590632 - RNA, 19 nt, Homo sapiens
  misc_RNA (1)...(19): siRNA sense strand
acagaagcuuuaaggaaga

SEQ ID NO: 2590633 - RNA, 19 nt, Homo sapiens
  misc_RNA (1)...(19): siRNA sense strand
ggauacagagguugauauu

SEQ ID NO: 2590634 - RNA, 19 nt, Homo sapiens
  misc_RNA (1)...(19): siRNA sense strand
cugcaaggccucaccaaua

SEQ ID NO: 2590635 - RNA, 19 nt, Homo sapiens
  misc_RNA (1)...(19): siRNA sense strand
acggagaagagaaggaaga

SEQ ID NO: 2590636 - RNA, 19 nt, Homo sapiens
  misc_RNA (1)...(19): siRNA sense strand
agagauuauuggagccauu

SEQ ID NO: 2590637 - RNA, 19 nt, Homo sapiens
  misc_RNA (1)...(19): siRNA sense strand
aauuagagcguguggauga

SEQ ID NO: 2590638 - RNA, 19 nt, Homo sapiens
  misc_RNA (1)...(19): siRNA sense strand
agaaggaaguaaagcagau

SEQ ID NO: 2590639 - RNA, 19 nt, Homo sapiens
  misc_RNA (1)...(19): siRNA sense strand
gaccaaauucccagaaaga

SEQ ID NO: 2590640 - RNA, 19 nt, Homo sapiens
  misc_RNA (1)...(19): siRNA sense strand
gcuuuaaggaagagauagu

SEQ ID NO: 2590641 - RNA, 19 nt, Homo sapiens
  misc_RNA (1)...(19): siRNA sense strand
gaagaaacuugcaaaacaa

SEQ ID NO: 2590642 - RNA, 19 nt, Homo sapiens
  misc_RNA (1)...(19): siRNA sense strand
ggaacuuuauugugaggau

SEQ ID NO: 2590643 - RNA, 19 nt, Homo sapiens
  misc_RNA (1)...(19): siRNA sense strand
uggaagaacaagaagcuuu

SEQ ID NO: 2590644 - RNA, 19 nt, Homo sapiens
  misc_RNA (1)...(19): siRNA sense strand
agcaaagaagagaaagaua

SEQ ID NO: 2590645 - RNA, 19 nt, Homo sapiens
  misc_RNA (1)...(19): siRNA sense strand
ccuaugaucuggaagccaa

SEQ ID NO: 2590646 - RNA, 19 nt, Homo sapiens
  misc_RNA (1)...(19): siRNA sense strand
agccaagaagagagcauua

SEQ ID NO: 2590647 - RNA, 19 nt, Homo sapiens
  misc_RNA (1)...(19): siRNA sense strand
auguagagacgcaggccaa

SEQ ID NO: 2590648 - RNA, 19 nt, Homo sapiens
  misc_RNA (1)...(19): siRNA sense strand
uugaagacucuguccgaaa

SEQ ID NO: 2590649 - RNA, 19 nt, Homo sapiens
  misc_RNA (1)...(19): siRNA sense strand
agacgcaggccaaggaaaa

SEQ ID NO: 2590650 - RNA, 19 nt, Homo sapiens
  misc_RNA (1)...(19): siRNA sense strand
gguacaauccugagaaccu

SEQ ID NO: 2590651 - RNA, 19 nt, Homo sapiens
  misc_RNA (1)...(19): siRNA sense strand
gaagagagcauuaaaccca

SEQ ID NO: 2590652 - RNA, 19 nt, Homo sapiens
  misc_RNA (1)...(19): siRNA sense strand
cuaaagguguggaugagca

SEQ ID NO: 2590653 - RNA, 19 nt, Homo sapiens
  misc_RNA (1)...(19): siRNA sense strand
gagcaaauacggcuggagu

SEQ ID NO: 2590654 - RNA, 19 nt, Homo sapiens
  misc_RNA (1)...(19): siRNA sense strand
caucaagaagaacggccaa

SEQ ID NO: 2590655 - RNA, 19 nt, Homo sapiens
  misc_RNA (1)...(19): siRNA sense strand
gagacgcaggccaaggaaa

SEQ ID NO: 2590656 - RNA, 19 nt, Homo sapiens
  misc_RNA (1)...(19): siRNA sense strand
gcaugaucgaccaggcaca

SEQ ID NO: 2590657 - RNA, 19 nt, Homo sapiens
  misc_RNA (1)...(19): siRNA sense strand
guagccaagaagagagcau

SEQ ID NO: 2590658 - RNA, 19 nt, Homo sapiens
  misc_RNA (1)...(19): siRNA sense strand
cuaccucgucacagggaua

SEQ ID NO: 2590659 - RNA, 19 nt, Homo sapiens
  misc_RNA (1)...(19): siRNA sense strand
aaggaaaacaagugagaaa

SEQ ID NO: 2590660 - RNA, 19 nt, Homo sapiens
  misc_RNA (1)...(19): siRNA sense strand
ggagaaagauguucgucca

SEQ ID NO: 2590661 - RNA, 19 nt, Homo sapiens
  misc_RNA (1)...(19): siRNA sense strand
aagucaagcugcugaaaau

SEQ ID NO: 2590662 - RNA, 19 nt, Homo sapiens
  misc_RNA (1)...(19): siRNA sense strand
ccaaggaaaccauggagga

SEQ ID NO: 2590663 - RNA, 19 nt, Homo sapiens
  misc_RNA (1)...(19): siRNA sense strand
aggaaaccauggaggagca

SEQ ID NO: 2590664 - RNA, 19 nt, Homo sapiens
  misc_RNA (1)...(19): siRNA sense strand
cgggaaaggggaaagaauu

SEQ ID NO: 2590665 - RNA, 19 nt, Homo sapiens
  misc_RNA (1)...(19): siRNA sense strand
acugcaagcuugagcacca

SEQ ID NO: 2590666 - RNA, 19 nt, Homo sapiens
  misc_RNA (1)...(19): siRNA sense strand
ccauggaggagcacugcaa

SEQ ID NO: 2590667 - RNA, 19 nt, Homo sapiens
  misc_RNA (1)...(19): siRNA sense strand
agauguucguccaaagaca

SEQ ID NO: 2590668 - RNA, 19 nt, Homo sapiens
  misc_RNA (1)...(19): siRNA sense strand
aagaaagcaccaagaagca

SEQ ID NO: 2590669 - RNA, 19 nt, Homo sapiens
  misc_RNA (1)...(19): siRNA sense strand
ggguaaauguuguccagac

SEQ ID NO: 2590670 - RNA, 19 nt, Homo sapiens
  misc_RNA (1)...(19): siRNA sense strand
aaggaaaacaagugagaaa

SEQ ID NO: 2590671 - RNA, 19 nt, Homo sapiens
  misc_RNA (1)...(19): siRNA sense strand
ggagaaagauguucgucca

SEQ ID NO: 2590672 - RNA, 19 nt, Homo sapiens
  misc_RNA (1)...(19): siRNA sense strand
aagucaagcugcugaaaau

SEQ ID NO: 2590673 - RNA, 19 nt, Homo sapiens
  misc_RNA (1)...(19): siRNA sense strand
ccaaggaaaccauggagga

SEQ ID NO: 2590674 - RNA, 19 nt, Homo sapiens
  misc_RNA (1)...(19): siRNA sense strand
aggaaaccauggaggagca

SEQ ID NO: 2590675 - RNA, 19 nt, Homo sapiens
  misc_RNA (1)...(19): siRNA sense strand
cgggaaaggggaaagaauu

SEQ ID NO: 2590676 - RNA, 19 nt, Homo sapiens
  misc_RNA (1)...(19): siRNA sense strand
acugcaagcuugagcacca

SEQ ID NO: 2590677 - RNA, 19 nt, Homo sapiens
  misc_RNA (1)...(19): siRNA sense strand
ccauggaggagcacugcaa

SEQ ID NO: 2590678 - RNA, 19 nt, Homo sapiens
  misc_RNA (1)...(19): siRNA sense strand
agauguucguccaaagaca

SEQ ID NO: 2590679 - RNA, 19 nt, Homo sapiens
  misc_RNA (1)...(19): siRNA sense strand
aagaaagcaccaagaagca

SEQ ID NO: 2590680 - RNA, 19 nt, Homo sapiens
  misc_RNA (1)...(19): siRNA sense strand
ggguaaauguuguccagac

SEQ ID NO: 2590681 - RNA, 19 nt, Homo sapiens
  misc_RNA (1)...(19): siRNA sense strand
ggacaaagauggagaggga

SEQ ID NO: 2590682 - RNA, 19 nt, Homo sapiens
  misc_RNA (1)...(19): siRNA sense strand
acaaagauggagagggaua

SEQ ID NO: 2590683 - RNA, 19 nt, Homo sapiens
  misc_RNA (1)...(19): siRNA sense strand
gcguauaggcaauggaaaa

SEQ ID NO: 2590684 - RNA, 19 nt, Homo sapiens
  misc_RNA (1)...(19): siRNA sense strand
gggauauacugguggaagu

SEQ ID NO: 2590685 - RNA, 19 nt, Homo sapiens
  misc_RNA (1)...(19): siRNA sense strand
ggacaauauuucagacgga

SEQ ID NO: 2590686 - RNA, 19 nt, Homo sapiens
  misc_RNA (1)...(19): siRNA sense strand
acgggaggcuagugauaua

SEQ ID NO: 2590687 - RNA, 19 nt, Homo sapiens
  misc_RNA (1)...(19): siRNA sense strand
ugaugaaggaguuguuaaa

SEQ ID NO: 2590688 - RNA, 19 nt, Homo sapiens
  misc_RNA (1)...(19): siRNA sense strand
agugaagaucauugacaaa

SEQ ID NO: 2590689 - RNA, 19 nt, Homo sapiens
  misc_RNA (1)...(19): siRNA sense strand
augaauugaaggaggauau

SEQ ID NO: 2590690 - RNA, 19 nt, Homo sapiens
  misc_RNA (1)...(19): siRNA sense strand
acacaauguuggcuggcua

SEQ ID NO: 2590691 - RNA, 19 nt, Homo sapiens
  misc_RNA (1)...(19): siRNA sense strand
augaucagccaaagagaaa

SEQ ID NO: 2590692 - RNA, 19 nt, Homo sapiens
  misc_RNA (1)...(19): siRNA sense strand
uugaaauauugaugcgcua

SEQ ID NO: 2590693 - RNA, 19 nt, Homo sapiens
  misc_RNA (1)...(19): siRNA sense strand
agccaauggaagagggaga

SEQ ID NO: 2590694 - RNA, 19 nt, Homo sapiens
  misc_RNA (1)...(19): siRNA sense strand
augcaaugaagguguuaaa

SEQ ID NO: 2590695 - RNA, 19 nt, Homo sapiens
  misc_RNA (1)...(19): siRNA sense strand
uuuaaaaguucgagacaga

SEQ ID NO: 2590696 - RNA, 19 nt, Homo sapiens
  misc_RNA (1)...(19): siRNA sense strand
aaaacaacuucgaggagaa

SEQ ID NO: 2590697 - RNA, 19 nt, Homo sapiens
  misc_RNA (1)...(19): siRNA sense strand
aaauggaaaugcugcacaa

SEQ ID NO: 2590698 - RNA, 19 nt, Homo sapiens
  misc_RNA (1)...(19): siRNA sense strand
cgagcagcggcgagguaaa

SEQ ID NO: 2590699 - RNA, 19 nt, Homo sapiens
  misc_RNA (1)...(19): siRNA sense strand
augaaggaguuguuaaaga

SEQ ID NO: 2590700 - RNA, 19 nt, Homo sapiens
  misc_RNA (1)...(19): siRNA sense strand
gcaacuaccaacauggaau

SEQ ID NO: 2590701 - RNA, 19 nt, Homo sapiens
  misc_RNA (1)...(19): siRNA sense strand
acagagaccaguugccaaa

SEQ ID NO: 2590702 - RNA, 19 nt, Homo sapiens
  misc_RNA (1)...(19): siRNA sense strand
ggaagagggagaagcagau

SEQ ID NO: 2590703 - RNA, 19 nt, Homo sapiens
  misc_RNA (1)...(19): siRNA sense strand
aguaaauaggagaggccau

SEQ ID NO: 2590704 - RNA, 19 nt, Homo sapiens
  misc_RNA (1)...(19): siRNA sense strand
aaguaagacaguugacuau

SEQ ID NO: 2590705 - RNA, 19 nt, Homo sapiens
  misc_RNA (1)...(19): siRNA sense strand
uggaagagggagaagcaga

SEQ ID NO: 2590706 - RNA, 19 nt, Homo sapiens
  misc_RNA (1)...(19): siRNA sense strand
uuacagaggaagaugugaa

SEQ ID NO: 2590707 - RNA, 19 nt, Homo sapiens
  misc_RNA (1)...(19): siRNA sense strand
auuucaagguaaagacaga

SEQ ID NO: 2590708 - RNA, 19 nt, Homo sapiens
  misc_RNA (1)...(19): siRNA sense strand
ccaaaugaucagccaaaga

SEQ ID NO: 2590709 - RNA, 19 nt, Homo sapiens
  misc_RNA (1)...(19): siRNA sense strand
ggauuuaaugaaaggagga

SEQ ID NO: 2590710 - RNA, 19 nt, Homo sapiens
  misc_RNA (1)...(19): siRNA sense strand
auuaaagcacucauggaua

SEQ ID NO: 2590711 - RNA, 19 nt, Homo sapiens
  misc_RNA (1)...(19): siRNA sense strand
guggaaacugggacaauau

SEQ ID NO: 2590712 - RNA, 19 nt, Homo sapiens
  misc_RNA (1)...(19): siRNA sense strand
cagacggagcaaaggauuu

SEQ ID NO: 2590713 - RNA, 19 nt, Homo sapiens
  misc_RNA (1)...(19): siRNA sense strand
gcuugaugaaauaggacau

SEQ ID NO: 2590714 - RNA, 19 nt, Homo sapiens
  misc_RNA (1)...(19): siRNA sense strand
gggaucagaaggaguugaa

SEQ ID NO: 2590715 - RNA, 19 nt, Homo sapiens
  misc_RNA (1)...(19): siRNA sense strand
uggaauuugcagugaagau

SEQ ID NO: 2590716 - RNA, 19 nt, Homo sapiens
  misc_RNA (1)...(19): siRNA sense strand
ugccaaaugaucagccaaa

SEQ ID NO: 2590717 - RNA, 19 nt, Homo sapiens
  misc_RNA (1)...(19): siRNA sense strand
ugcacaauuuggugaagua

SEQ ID NO: 2590718 - RNA, 19 nt, Homo sapiens
  misc_RNA (1)...(19): siRNA sense strand
cuuugaugaugguagauau

SEQ ID NO: 2590719 - RNA, 19 nt, Homo sapiens
  misc_RNA (1)...(19): siRNA sense strand
cgagacagaguucggacaa

SEQ ID NO: 2590720 - RNA, 19 nt, Homo sapiens
  misc_RNA (1)...(19): siRNA sense strand
ugaaguaguaaauaggaga

SEQ ID NO: 2590721 - RNA, 19 nt, Homo sapiens
  misc_RNA (1)...(19): siRNA sense strand
gugguacaguagaguauau

SEQ ID NO: 2590722 - RNA, 19 nt, Homo sapiens
  misc_RNA (1)...(19): siRNA sense strand
uugaugagccaauggaaga

SEQ ID NO: 2590723 - RNA, 19 nt, Homo sapiens
  misc_RNA (1)...(19): siRNA sense strand
ggauguuauucaaaaggaa

SEQ ID NO: 2590724 - RNA, 19 nt, Homo sapiens
  misc_RNA (1)...(19): siRNA sense strand
cagcaaauagauugggauc

SEQ ID NO: 2590725 - RNA, 19 nt, Homo sapiens
  misc_RNA (1)...(19): siRNA sense strand
caaauauugacugggauaa

SEQ ID NO: 2590726 - RNA, 19 nt, Homo sapiens
  misc_RNA (1)...(19): siRNA sense strand
uauaugaauugaaggagga

SEQ ID NO: 2590727 - RNA, 19 nt, Homo sapiens
  misc_RNA (1)...(19): siRNA sense strand
agucaguagaucaagaaaa

SEQ ID NO: 2590728 - RNA, 19 nt, Homo sapiens
  misc_RNA (1)...(19): siRNA sense strand
caguagaucaagaaaagaa

SEQ ID NO: 2590729 - RNA, 19 nt, Homo sapiens
  misc_RNA (1)...(19): siRNA sense strand
caaaccugcuucuggaaaa

SEQ ID NO: 2590730 - RNA, 19 nt, Homo sapiens
  misc_RNA (1)...(19): siRNA sense strand
aagauuauccaaagagguu

SEQ ID NO: 2590731 - RNA, 19 nt, Homo sapiens
  misc_RNA (1)...(19): siRNA sense strand
auagagaccugaagccaga

SEQ ID NO: 2590732 - RNA, 19 nt, Homo sapiens
  misc_RNA (1)...(19): siRNA sense strand
aucagaaggaguugaagaa

SEQ ID NO: 2590733 - RNA, 19 nt, Homo sapiens
  misc_RNA (1)...(19): siRNA sense strand
caaggagucaguagaucaa

SEQ ID NO: 2590734 - RNA, 19 nt, Homo sapiens
  misc_RNA (1)...(19): siRNA sense strand
gguaaauggucuuaaaaug

SEQ ID NO: 2590735 - RNA, 19 nt, Homo sapiens
  misc_RNA (1)...(19): siRNA sense strand
cacaauuuggugaaguaua

SEQ ID NO: 2590736 - RNA, 19 nt, Homo sapiens
  misc_RNA (1)...(19): siRNA sense strand
gggaagaaaagaaggggaa

SEQ ID NO: 2590737 - RNA, 19 nt, Homo sapiens
  misc_RNA (1)...(19): siRNA sense strand
gggaagaaaagaaggggaa

SEQ ID NO: 2590738 - RNA, 19 nt, Homo sapiens
  misc_RNA (1)...(19): siRNA sense strand
gggaagaaaagaaggggaa

SEQ ID NO: 2590739 - RNA, 19 nt, Homo sapiens
  misc_RNA (1)...(19): siRNA sense strand
gggaagaaaagaaggggaa

SEQ ID NO: 2590740 - RNA, 19 nt, Homo sapiens
  misc_RNA (1)...(19): siRNA sense strand
agaagaucaaagaaggaaa

SEQ ID NO: 2590741 - RNA, 19 nt, Homo sapiens
  misc_RNA (1)...(19): siRNA sense strand
agaagaucaaagaaggaaa

SEQ ID NO: 2590742 - RNA, 19 nt, Homo sapiens
  misc_RNA (1)...(19): siRNA sense strand
ccacauaggaaaaccaaaa

SEQ ID NO: 2590743 - RNA, 19 nt, Homo sapiens
  misc_RNA (1)...(19): siRNA sense strand
aagaagaaggggaagaaaa

SEQ ID NO: 2590744 - RNA, 19 nt, Homo sapiens
  misc_RNA (1)...(19): siRNA sense strand
aagaagaaggggaagaaaa

SEQ ID NO: 2590745 - RNA, 19 nt, Homo sapiens
  misc_RNA (1)...(19): siRNA sense strand
ggaagaagaccaagaccca

SEQ ID NO: 2590746 - RNA, 19 nt, Homo sapiens
  misc_RNA (1)...(19): siRNA sense strand
ggaagaagaccaagaccca

SEQ ID NO: 2590747 - RNA, 19 nt, Homo sapiens
  misc_RNA (1)...(19): siRNA sense strand
ggaagaagaccaagaccca

SEQ ID NO: 2590748 - RNA, 19 nt, Homo sapiens
  misc_RNA (1)...(19): siRNA sense strand
ggaagaagaccaaggccca

SEQ ID NO: 2590749 - RNA, 19 nt, Homo sapiens
  misc_RNA (1)...(19): siRNA sense strand
ggaagaagaccaaggccca

SEQ ID NO: 2590750 - RNA, 19 nt, Homo sapiens
  misc_RNA (1)...(19): siRNA sense strand
augaugaggaagaggaaga

SEQ ID NO: 2590751 - RNA, 19 nt, Homo sapiens
  misc_RNA (1)...(19): siRNA sense strand
cuguuaacauggaugaaau

SEQ ID NO: 2590752 - RNA, 19 nt, Homo sapiens
  misc_RNA (1)...(19): siRNA sense strand
cauuugaggaagagcauau

SEQ ID NO: 2590753 - RNA, 19 nt, Homo sapiens
  misc_RNA (1)...(19): siRNA sense strand
gggaaggggaagaaaagaa

SEQ ID NO: 2590754 - RNA, 19 nt, Homo sapiens
  misc_RNA (1)...(19): siRNA sense strand
gggaaggggaagaaaagaa

SEQ ID NO: 2590755 - RNA, 19 nt, Homo sapiens
  misc_RNA (1)...(19): siRNA sense strand
aguccugggaugaagguua

SEQ ID NO: 2590756 - RNA, 19 nt, Homo sapiens
  misc_RNA (1)...(19): siRNA sense strand
gggagaugcagaaggcuga

SEQ ID NO: 2590757 - RNA, 19 nt, Homo sapiens
  misc_RNA (1)...(19): siRNA sense strand
ucacauuugaggaagacaa

SEQ ID NO: 2590758 - RNA, 19 nt, Homo sapiens
  misc_RNA (1)...(19): siRNA sense strand
aagaagaggaagaagacca

SEQ ID NO: 2590759 - RNA, 19 nt, Homo sapiens
  misc_RNA (1)...(19): siRNA sense strand
ggaaagaagaaggggaaga

SEQ ID NO: 2590760 - RNA, 19 nt, Homo sapiens
  misc_RNA (1)...(19): siRNA sense strand
aagaagaggaagaagacca

SEQ ID NO: 2590761 - RNA, 19 nt, Homo sapiens
  misc_RNA (1)...(19): siRNA sense strand
ggaaagaagaaggggaaga

SEQ ID NO: 2590762 - RNA, 19 nt, Homo sapiens
  misc_RNA (1)...(19): siRNA sense strand
aguugagguggcugagaaa

SEQ ID NO: 2590763 - RNA, 19 nt, Homo sapiens
  misc_RNA (1)...(19): siRNA sense strand
ggauauauguuauucgacu

SEQ ID NO: 2590764 - RNA, 19 nt, Homo sapiens
  misc_RNA (1)...(19): siRNA sense strand
ggaugaagguuauucgacu

SEQ ID NO: 2590765 - RNA, 19 nt, Homo sapiens
  misc_RNA (1)...(19): siRNA sense strand
agucugaagaggaggaagu

SEQ ID NO: 2590766 - RNA, 19 nt, Homo sapiens
  misc_RNA (1)...(19): siRNA sense strand
accaagaagaggaagaaga

SEQ ID NO: 2590767 - RNA, 19 nt, Homo sapiens
  misc_RNA (1)...(19): siRNA sense strand
ugggagaaauugaaaagaa

SEQ ID NO: 2590768 - RNA, 19 nt, Homo sapiens
  misc_RNA (1)...(19): siRNA sense strand
cuguugacauggaugaaau

SEQ ID NO: 2590769 - RNA, 19 nt, Homo sapiens
  misc_RNA (1)...(19): siRNA sense strand
cuguugacauggaugaaau

SEQ ID NO: 2590770 - RNA, 19 nt, Homo sapiens
  misc_RNA (1)...(19): siRNA sense strand
accaagaagaggaagaaga

SEQ ID NO: 2590771 - RNA, 19 nt, Homo sapiens
  misc_RNA (1)...(19): siRNA sense strand
ugggagaaauugaaaagaa

SEQ ID NO: 2590772 - RNA, 19 nt, Homo sapiens
  misc_RNA (1)...(19): siRNA sense strand
aggaagagcauaucagcuu

SEQ ID NO: 2590773 - RNA, 19 nt, Homo sapiens
  misc_RNA (1)...(19): siRNA sense strand
agggagaaguugcgggaag

SEQ ID NO: 2590774 - RNA, 19 nt, Homo sapiens
  misc_RNA (1)...(19): siRNA sense strand
aggaccaagaagaggaaga

SEQ ID NO: 2590775 - RNA, 19 nt, Homo sapiens
  misc_RNA (1)...(19): siRNA sense strand
aggaccaagaagaggaaga

SEQ ID NO: 2590776 - RNA, 19 nt, Homo sapiens
  misc_RNA (1)...(19): siRNA sense strand
cauuagaggaacagcaagu

SEQ ID NO: 2590777 - RNA, 19 nt, Homo sapiens
  misc_RNA (1)...(19): siRNA sense strand
aaaagaaggggaaggggaa

SEQ ID NO: 2590778 - RNA, 19 nt, Homo sapiens
  misc_RNA (1)...(19): siRNA sense strand
aaggaaagaagaaggggaa

SEQ ID NO: 2590779 - RNA, 19 nt, Homo sapiens
  misc_RNA (1)...(19): siRNA sense strand
aaaagaaggggaaggggaa

SEQ ID NO: 2590780 - RNA, 19 nt, Homo sapiens
  misc_RNA (1)...(19): siRNA sense strand
aaggaaagaagaaggggaa

SEQ ID NO: 2590781 - RNA, 19 nt, Homo sapiens
  misc_RNA (1)...(19): siRNA sense strand
uggcugagaaagugcagaa

SEQ ID NO: 2590782 - RNA, 19 nt, Homo sapiens
  misc_RNA (1)...(19): siRNA sense strand
gagagcugcuggaugagaa

SEQ ID NO: 2590783 - RNA, 19 nt, Homo sapiens
  misc_RNA (1)...(19): siRNA sense strand
agaaguggaagaagaccaa

SEQ ID NO: 2590784 - RNA, 19 nt, Homo sapiens
  misc_RNA (1)...(19): siRNA sense strand
agaaguggaagaagaccaa

SEQ ID NO: 2590785 - RNA, 19 nt, Homo sapiens
  misc_RNA (1)...(19): siRNA sense strand
agaaguggaagaagaccaa

SEQ ID NO: 2590786 - RNA, 19 nt, Homo sapiens
  misc_RNA (1)...(19): siRNA sense strand
acucauuggaggaacagua

SEQ ID NO: 2590787 - RNA, 19 nt, Homo sapiens
  misc_RNA (1)...(19): siRNA sense strand
ggguagagaugaugcgcuu

SEQ ID NO: 2590788 - RNA, 19 nt, Homo sapiens
  misc_RNA (1)...(19): siRNA sense strand
ucgauaaaggauauggaaa

SEQ ID NO: 2590789 - RNA, 19 nt, Homo sapiens
  misc_RNA (1)...(19): siRNA sense strand
ucagaaauguccagggcau

SEQ ID NO: 2590790 - RNA, 19 nt, Homo sapiens
  misc_RNA (1)...(19): siRNA sense strand
ccacaaagcacaaagggca

SEQ ID NO: 2590791 - RNA, 19 nt, Homo sapiens
  misc_RNA (1)...(19): siRNA sense strand
agauggaagaauaggcgua

SEQ ID NO: 2590792 - RNA, 19 nt, Homo sapiens
  misc_RNA (1)...(19): siRNA sense strand
cacaaagcacaaagggcaa

SEQ ID NO: 2590793 - RNA, 19 nt, Homo sapiens
  misc_RNA (1)...(19): siRNA sense strand
aggcguaguuggaggcugu

SEQ ID NO: 2590794 - RNA, 19 nt, Homo sapiens
  misc_RNA (1)...(19): siRNA sense strand
uggcuuggguagagaugau

SEQ ID NO: 2590795 - RNA, 19 nt, Homo sapiens
  misc_RNA (1)...(19): siRNA sense strand
cagaaaggagagcgcgaca

SEQ ID NO: 2590796 - RNA, 19 nt, Homo sapiens
  misc_RNA (1)...(19): siRNA sense strand
cagccauggaucugugcua

SEQ ID NO: 2590797 - RNA, 19 nt, Homo sapiens
  misc_RNA (1)...(19): siRNA sense strand
caacauguauugugaggcu

SEQ ID NO: 2590798 - RNA, 19 nt, Homo sapiens
  misc_RNA (1)...(19): siRNA sense strand
gcucauaaccucucagccu

SEQ ID NO: 2590799 - RNA, 19 nt, Homo sapiens
  misc_RNA (1)...(19): siRNA sense strand
caagaaaaguggaggagca

SEQ ID NO: 2590800 - RNA, 19 nt, Homo sapiens
  misc_RNA (1)...(19): siRNA sense strand
cucaaauauagaagaggaa

SEQ ID NO: 2590801 - RNA, 19 nt, Homo sapiens
  misc_RNA (1)...(19): siRNA sense strand
uagaagaggaagacagcca

SEQ ID NO: 2590802 - RNA, 19 nt, Homo sapiens
  misc_RNA (1)...(19): siRNA sense strand
cugaugacaccuuggaaga

SEQ ID NO: 2590803 - RNA, 19 nt, Homo sapiens
  misc_RNA (1)...(19): siRNA sense strand
aauugaacagucagugaaa

SEQ ID NO: 2590804 - RNA, 19 nt, Homo sapiens
  misc_RNA (1)...(19): siRNA sense strand
ucagaauguuaaugaggca

SEQ ID NO: 2590805 - RNA, 19 nt, Homo sapiens
  misc_RNA (1)...(19): siRNA sense strand
ggaaauggcgugauggccu

SEQ ID NO: 2590806 - RNA, 19 nt, Homo sapiens
  misc_RNA (1)...(19): siRNA sense strand
gaaauggcgugauggccuu

SEQ ID NO: 2590807 - RNA, 19 nt, Homo sapiens
  misc_RNA (1)...(19): siRNA sense strand
cgccuagaucagaauguua

SEQ ID NO: 2590808 - RNA, 19 nt, Homo sapiens
  misc_RNA (1)...(19): siRNA sense strand
agaauguuaaugaggcaau

SEQ ID NO: 2590809 - RNA, 19 nt, Homo sapiens
  misc_RNA (1)...(19): siRNA sense strand
cccaaaugugaaugcuuua

SEQ ID NO: 2590810 - RNA, 19 nt, Homo sapiens
  misc_RNA (1)...(19): siRNA sense strand
uggcgauuauggagaacca

SEQ ID NO: 2590811 - RNA, 19 nt, Homo sapiens
  misc_RNA (1)...(19): siRNA sense strand
ggaccaaagacaugcacca

SEQ ID NO: 2590812 - RNA, 19 nt, Homo sapiens
  misc_RNA (1)...(19): siRNA sense strand
ucccaaagugcuagauaca

SEQ ID NO: 2590813 - RNA, 19 nt, Homo sapiens
  misc_RNA (1)...(19): siRNA sense strand
ggauuacaggcgugagcca

SEQ ID NO: 2590814 - RNA, 19 nt, Homo sapiens
  misc_RNA (1)...(19): siRNA sense strand
auguaguggugcuggauaa

SEQ ID NO: 2590815 - RNA, 19 nt, Homo sapiens
  misc_RNA (1)...(19): siRNA sense strand
gcaucuaaucccaggguca

SEQ ID NO: 2590816 - RNA, 19 nt, Homo sapiens
  misc_RNA (1)...(19): siRNA sense strand
agacagaauuaagggaaaa

SEQ ID NO: 2590817 - RNA, 19 nt, Homo sapiens
  misc_RNA (1)...(19): siRNA sense strand
ugggaagauaacacagaaa

SEQ ID NO: 2590818 - RNA, 19 nt, Homo sapiens
  misc_RNA (1)...(19): siRNA sense strand
gugaagaauacgaucaagu

SEQ ID NO: 2590819 - RNA, 19 nt, Homo sapiens
  misc_RNA (1)...(19): siRNA sense strand
ugagacagaauuaagggaa

SEQ ID NO: 2590820 - RNA, 19 nt, Homo sapiens
  misc_RNA (1)...(19): siRNA sense strand
uggaagaugcagagagcag

SEQ ID NO: 2590821 - RNA, 19 nt, Homo sapiens
  misc_RNA (1)...(19): siRNA sense strand
aagugaagaauacgaucaa

SEQ ID NO: 2590822 - RNA, 19 nt, Homo sapiens
  misc_RNA (1)...(19): siRNA sense strand
cuaugugggcucugcagaa

SEQ ID NO: 2590823 - RNA, 19 nt, Homo sapiens
  misc_RNA (1)...(19): siRNA sense strand
cguugaaacaggaaagaaa

SEQ ID NO: 2590824 - RNA, 19 nt, Homo sapiens
  misc_RNA (1)...(19): siRNA sense strand
guguauugaaugugggaaa

SEQ ID NO: 2590825 - RNA, 19 nt, Homo sapiens
  misc_RNA (1)...(19): siRNA sense strand
ugugaugagugcagggaaa

SEQ ID NO: 2590826 - RNA, 19 nt, Homo sapiens
  misc_RNA (1)...(19): siRNA sense strand
ccucuuugguauuaggaaa

SEQ ID NO: 2590827 - RNA, 19 nt, Homo sapiens
  misc_RNA (1)...(19): siRNA sense strand
auguagugacugugggaaa

SEQ ID NO: 2590828 - RNA, 19 nt, Homo sapiens
  misc_RNA (1)...(19): siRNA sense strand
guguagucagugugggaaa

SEQ ID NO: 2590829 - RNA, 19 nt, Homo sapiens
  misc_RNA (1)...(19): siRNA sense strand
gugcaaccugugugggaaa

SEQ ID NO: 2590830 - RNA, 19 nt, Homo sapiens
  misc_RNA (1)...(19): siRNA sense strand
gcgaauucacacuggagaa

SEQ ID NO: 2590831 - RNA, 19 nt, Homo sapiens
  misc_RNA (1)...(19): siRNA sense strand
gcgaauucacacuggagaa

SEQ ID NO: 2590832 - RNA, 19 nt, Homo sapiens
  misc_RNA (1)...(19): siRNA sense strand
acuguaaggauuauggaaa

SEQ ID NO: 2590833 - RNA, 19 nt, Homo sapiens
  misc_RNA (1)...(19): siRNA sense strand
guguguaaucaguguggaa

SEQ ID NO: 2590834 - RNA, 19 nt, Homo sapiens
  misc_RNA (1)...(19): siRNA sense strand
gguauuaggaaaagugcaa

SEQ ID NO: 2590835 - RNA, 19 nt, Homo sapiens
  misc_RNA (1)...(19): siRNA sense strand
gcuucgaggauguggcuau

SEQ ID NO: 2590836 - RNA, 19 nt, Homo sapiens
  misc_RNA (1)...(19): siRNA sense strand
agaucgagcuagggaagaa

SEQ ID NO: 2590837 - RNA, 19 nt, Homo sapiens
  misc_RNA (1)...(19): siRNA sense strand
guguaaucaguguggaaaa

SEQ ID NO: 2590838 - RNA, 19 nt, Homo sapiens
  misc_RNA (1)...(19): siRNA sense strand
gggaaauccuucacccaga

SEQ ID NO: 2590839 - RNA, 19 nt, Homo sapiens
  misc_RNA (1)...(19): siRNA sense strand
cuguaaggauuauggaaac

SEQ ID NO: 2590840 - RNA, 19 nt, Homo sapiens
  misc_RNA (1)...(19): siRNA sense strand
ccguaucaguguauugaau

SEQ ID NO: 2590841 - RNA, 19 nt, Homo sapiens
  misc_RNA (1)...(19): siRNA sense strand
ccguaucaguguauugaau

SEQ ID NO: 2590842 - RNA, 19 nt, Homo sapiens
  misc_RNA (1)...(19): siRNA sense strand
gguacucaccucagagaga

SEQ ID NO: 2590843 - RNA, 19 nt, Homo sapiens
  misc_RNA (1)...(19): siRNA sense strand
ggaagcacugugagaguca

SEQ ID NO: 2590844 - RNA, 19 nt, Homo sapiens
  misc_RNA (1)...(19): siRNA sense strand
caucagugugcuagagcuu

SEQ ID NO: 2590845 - RNA, 19 nt, Homo sapiens
  misc_RNA (1)...(19): siRNA sense strand
cgaauucacacuggagaaa

SEQ ID NO: 2590846 - RNA, 19 nt, Homo sapiens
  misc_RNA (1)...(19): siRNA sense strand
cgaauucacacuggagaaa

SEQ ID NO: 2590847 - RNA, 19 nt, Homo sapiens
  misc_RNA (1)...(19): siRNA sense strand
aagggaacauugugagcuu

SEQ ID NO: 2590848 - RNA, 19 nt, Homo sapiens
  misc_RNA (1)...(19): siRNA sense strand
ggagaaaagcccuucgaau

SEQ ID NO: 2590849 - RNA, 19 nt, Homo sapiens
  misc_RNA (1)...(19): siRNA sense strand
gggaaaucuuuuagccaga

SEQ ID NO: 2590850 - RNA, 19 nt, Homo sapiens
  misc_RNA (1)...(19): siRNA sense strand
ccuuguacaaacagaaaga

SEQ ID NO: 2590851 - RNA, 19 nt, Homo sapiens
  misc_RNA (1)...(19): siRNA sense strand
auggaaaccucuucaguca

SEQ ID NO: 2590852 - RNA, 19 nt, Homo sapiens
  misc_RNA (1)...(19): siRNA sense strand
ucauuguacaucagagaau

SEQ ID NO: 2590853 - RNA, 19 nt, Homo sapiens
  misc_RNA (1)...(19): siRNA sense strand
ggggagaagccguacaaau

SEQ ID NO: 2590854 - RNA, 19 nt, Homo sapiens
  misc_RNA (1)...(19): siRNA sense strand
acuuggaaacguugaaaca

SEQ ID NO: 2590855 - RNA, 19 nt, Homo sapiens
  misc_RNA (1)...(19): siRNA sense strand
agaaaagugaugacuguaa

SEQ ID NO: 2590856 - RNA, 19 nt, Homo sapiens
  misc_RNA (1)...(19): siRNA sense strand
ucgucauacaucagagaau

SEQ ID NO: 2590857 - RNA, 19 nt, Homo sapiens
  misc_RNA (1)...(19): siRNA sense strand
ccucauuguacaucagaga

SEQ ID NO: 2590858 - RNA, 19 nt, Homo sapiens
  misc_RNA (1)...(19): siRNA sense strand
cuaugaauguagugacugu

SEQ ID NO: 2590859 - RNA, 19 nt, Homo sapiens
  misc_RNA (1)...(19): siRNA sense strand
gggaaaagucaguaugagu

SEQ ID NO: 2590860 - RNA, 19 nt, Homo sapiens
  misc_RNA (1)...(19): siRNA sense strand
aagugcaagaucagagcaa

SEQ ID NO: 2590861 - RNA, 19 nt, Homo sapiens
  misc_RNA (1)...(19): siRNA sense strand
gugugaccugugugggaaa

SEQ ID NO: 2590862 - RNA, 19 nt, Homo sapiens
  misc_RNA (1)...(19): siRNA sense strand
guggaaaguccuucagcca

SEQ ID NO: 2590863 - RNA, 19 nt, Homo sapiens
  misc_RNA (1)...(19): siRNA sense strand
guggaaaguccuucagcca

SEQ ID NO: 2590864 - RNA, 19 nt, Homo sapiens
  misc_RNA (1)...(19): siRNA sense strand
gagagucaucagugugcua

SEQ ID NO: 2590865 - RNA, 19 nt, Homo sapiens
  misc_RNA (1)...(19): siRNA sense strand
cauacugacuacagagaag

SEQ ID NO: 2590866 - RNA, 19 nt, Homo sapiens
  misc_RNA (1)...(19): siRNA sense strand
gaguguagucaguguggga

SEQ ID NO: 2590867 - RNA, 19 nt, Homo sapiens
  misc_RNA (1)...(19): siRNA sense strand
gagcaaccaguuaagggaa

SEQ ID NO: 2590868 - RNA, 19 nt, Homo sapiens
  misc_RNA (1)...(19): siRNA sense strand
gggaacauugugagcuuga

SEQ ID NO: 2590869 - RNA, 19 nt, Homo sapiens
  misc_RNA (1)...(19): siRNA sense strand
guugaaacaggaaagaaaa

SEQ ID NO: 2590870 - RNA, 19 nt, Homo sapiens
  misc_RNA (1)...(19): siRNA sense strand
acacaggaggagugggaac

SEQ ID NO: 2590871 - RNA, 19 nt, Homo sapiens
  misc_RNA (1)...(19): siRNA sense strand
gggaacaccaggagaacuc

SEQ ID NO: 2590872 - RNA, 19 nt, Homo sapiens
  misc_RNA (1)...(19): siRNA sense strand
gaugggaagcacugugaga

SEQ ID NO: 2590873 - RNA, 19 nt, Homo sapiens
  misc_RNA (1)...(19): siRNA sense strand
gccagugcauuuugggaaa

SEQ ID NO: 2590874 - RNA, 19 nt, Homo sapiens
  misc_RNA (1)...(19): siRNA sense strand
agaacacacacuggagaaa

SEQ ID NO: 2590875 - RNA, 19 nt, Homo sapiens
  misc_RNA (1)...(19): siRNA sense strand
ucacacaggaggaguggga

SEQ ID NO: 2590876 - RNA, 19 nt, Homo sapiens
  misc_RNA (1)...(19): siRNA sense strand
gaaacguugaaacaggaaa

SEQ ID NO: 2590877 - RNA, 19 nt, Homo sapiens
  misc_RNA (1)...(19): siRNA sense strand
aauuugauguccaaggaua

SEQ ID NO: 2590878 - RNA, 19 nt, Homo sapiens
  misc_RNA (1)...(19): siRNA sense strand
uagaagaggaaguacagaa

SEQ ID NO: 2590879 - RNA, 19 nt, Homo sapiens
  misc_RNA (1)...(19): siRNA sense strand
aguucugccuugagcuaaa

SEQ ID NO: 2590880 - RNA, 19 nt, Homo sapiens
  misc_RNA (1)...(19): siRNA sense strand
caacagaacauaagagcag

SEQ ID NO: 2590881 - RNA, 19 nt, Homo sapiens
  misc_RNA (1)...(19): siRNA sense strand
auuugauguccaaggauaa

SEQ ID NO: 2590882 - RNA, 19 nt, Homo sapiens
  misc_RNA (1)...(19): siRNA sense strand
agaagaggaaguacagaau

SEQ ID NO: 2590883 - RNA, 19 nt, Homo sapiens
  misc_RNA (1)...(19): siRNA sense strand
aggguuagcauaaaggaau

SEQ ID NO: 2590884 - RNA, 19 nt, Homo sapiens
  misc_RNA (1)...(19): siRNA sense strand
aagaggaaguacagaauuc

SEQ ID NO: 2590885 - RNA, 19 nt, Homo sapiens
  misc_RNA (1)...(19): siRNA sense strand
ugaaccaccugaaggccaa

SEQ ID NO: 2590886 - RNA, 19 nt, Homo sapiens
  misc_RNA (1)...(19): siRNA sense strand
cuauaauuggccugaugaa

SEQ ID NO: 2590887 - RNA, 19 nt, Homo sapiens
  misc_RNA (1)...(19): siRNA sense strand
gaauucaguuucuggggaa

SEQ ID NO: 2590888 - RNA, 19 nt, Homo sapiens
  misc_RNA (1)...(19): siRNA sense strand
accugaaggccaagaugaa

SEQ ID NO: 2590889 - RNA, 19 nt, Homo sapiens
  misc_RNA (1)...(19): siRNA sense strand
caggguuagcauaaaggaa

SEQ ID NO: 2590890 - RNA, 19 nt, Homo sapiens
  misc_RNA (1)...(19): siRNA sense strand
aauuugauguccaaggaua

SEQ ID NO: 2590891 - RNA, 19 nt, Homo sapiens
  misc_RNA (1)...(19): siRNA sense strand
uagaagaggaaguacagaa

SEQ ID NO: 2590892 - RNA, 19 nt, Homo sapiens
  misc_RNA (1)...(19): siRNA sense strand
aguucugccuugagcuaaa

SEQ ID NO: 2590893 - RNA, 19 nt, Homo sapiens
  misc_RNA (1)...(19): siRNA sense strand
caacagaacauaagagcag

SEQ ID NO: 2590894 - RNA, 19 nt, Homo sapiens
  misc_RNA (1)...(19): siRNA sense strand
auuugauguccaaggauaa

SEQ ID NO: 2590895 - RNA, 19 nt, Homo sapiens
  misc_RNA (1)...(19): siRNA sense strand
agaagaggaaguacagaau

SEQ ID NO: 2590896 - RNA, 19 nt, Homo sapiens
  misc_RNA (1)...(19): siRNA sense strand
aggguuagcauaaaggaau

SEQ ID NO: 2590897 - RNA, 19 nt, Homo sapiens
  misc_RNA (1)...(19): siRNA sense strand
aagaggaaguacagaauuc

SEQ ID NO: 2590898 - RNA, 19 nt, Homo sapiens
  misc_RNA (1)...(19): siRNA sense strand
ugaaccaccugaaggccaa

SEQ ID NO: 2590899 - RNA, 19 nt, Homo sapiens
  misc_RNA (1)...(19): siRNA sense strand
gaauucaguuucuggggaa

SEQ ID NO: 2590900 - RNA, 19 nt, Homo sapiens
  misc_RNA (1)...(19): siRNA sense strand
accugaaggccaagaugaa

SEQ ID NO: 2590901 - RNA, 19 nt, Homo sapiens
  misc_RNA (1)...(19): siRNA sense strand
caggguuagcauaaaggaa

SEQ ID NO: 2590902 - RNA, 19 nt, Homo sapiens
  misc_RNA (1)...(19): siRNA sense strand
gguugagucaggaaagaau

SEQ ID NO: 2590903 - RNA, 19 nt, Homo sapiens
  misc_RNA (1)...(19): siRNA sense strand
gcaaaugaccacagcagcu

SEQ ID NO: 2590904 - RNA, 19 nt, Homo sapiens
  misc_RNA (1)...(19): siRNA sense strand
gcaaaguaauugagcggaa

SEQ ID NO: 2590905 - RNA, 19 nt, Homo sapiens
  misc_RNA (1)...(19): siRNA sense strand
gggaugaggaacaaggaga

SEQ ID NO: 2590906 - RNA, 19 nt, Homo sapiens
  misc_RNA (1)...(19): siRNA sense strand
gggaggaauggguggcgaa

SEQ ID NO: 2590907 - RNA, 19 nt, Homo sapiens
  misc_RNA (1)...(19): siRNA sense strand
cagucagggaugaggaaca

SEQ ID NO: 2590908 - RNA, 19 nt, Homo sapiens
  misc_RNA (1)...(19): siRNA sense strand
aagaguacaaggaguggaa

SEQ ID NO: 2590909 - RNA, 19 nt, Homo sapiens
  misc_RNA (1)...(19): siRNA sense strand
gaguacaaggaguggaagu

SEQ ID NO: 2590910 - RNA, 19 nt, Homo sapiens
  misc_RNA (1)...(19): siRNA sense strand
gcuccgagaaggaacucaa

SEQ ID NO: 2590911 - RNA, 19 nt, Homo sapiens
  misc_RNA (1)...(19): siRNA sense strand
ccaagaaauuagaguccac

SEQ ID NO: 2590912 - RNA, 19 nt, Homo sapiens
  misc_RNA (1)...(19): siRNA sense strand
aacucaaguccaagaaauu

SEQ ID NO: 2590913 - RNA, 19 nt, Homo sapiens
  misc_RNA (1)...(19): siRNA sense strand
cagcaaagaagaggcccaa

SEQ ID NO: 2590914 - RNA, 19 nt, Homo sapiens
  misc_RNA (1)...(19): siRNA sense strand
aaugaagaguuccaggaga

SEQ ID NO: 2590915 - RNA, 19 nt, Homo sapiens
  misc_RNA (1)...(19): siRNA sense strand
agaugcaagaugagaaacu

SEQ ID NO: 2590916 - RNA, 19 nt, Homo sapiens
  misc_RNA (1)...(19): siRNA sense strand
caacaacugugucaggcaa

SEQ ID NO: 2590917 - RNA, 19 nt, Homo sapiens
  misc_RNA (1)...(19): siRNA sense strand
aguccagagaagaggagau

SEQ ID NO: 2590918 - RNA, 19 nt, Homo sapiens
  misc_RNA (1)...(19): siRNA sense strand
ccagagaagaggagaucac

SEQ ID NO: 2590919 - RNA, 19 nt, Homo sapiens
  misc_RNA (1)...(19): siRNA sense strand
ucaaagagaaacagagaaa

SEQ ID NO: 2590920 - RNA, 19 nt, Homo sapiens
  misc_RNA (1)...(19): siRNA sense strand
gcccagaaacugagggaaa

SEQ ID NO: 2590921 - RNA, 19 nt, Homo sapiens
  misc_RNA (1)...(19): siRNA sense strand
ggaacuggaaggagagaaa

SEQ ID NO: 2590922 - RNA, 19 nt, Homo sapiens
  misc_RNA (1)...(19): siRNA sense strand
gggccaauguagagaagaa

SEQ ID NO: 2590923 - RNA, 19 nt, Homo sapiens
  misc_RNA (1)...(19): siRNA sense strand
aaacagagucagagagcaa

SEQ ID NO: 2590924 - RNA, 19 nt, Homo sapiens
  misc_RNA (1)...(19): siRNA sense strand
gaagaaacugaaagagaaa

SEQ ID NO: 2590925 - RNA, 19 nt, Homo sapiens
  misc_RNA (1)...(19): siRNA sense strand
gaagaaacugaaagagaaa

SEQ ID NO: 2590926 - RNA, 19 nt, Homo sapiens
  misc_RNA (1)...(19): siRNA sense strand
agguaaagcugcugaaaga

SEQ ID NO: 2590927 - RNA, 19 nt, Homo sapiens
  misc_RNA (1)...(19): siRNA sense strand
gagacagauuugaaagaaa

SEQ ID NO: 2590928 - RNA, 19 nt, Homo sapiens
  misc_RNA (1)...(19): siRNA sense strand
caucugaguaugagagaaa

SEQ ID NO: 2590929 - RNA, 19 nt, Homo sapiens
  misc_RNA (1)...(19): siRNA sense strand
cagcaagaaaugaaggaaa

SEQ ID NO: 2590930 - RNA, 19 nt, Homo sapiens
  misc_RNA (1)...(19): siRNA sense strand
agaauaaggaucagagcaa

SEQ ID NO: 2590931 - RNA, 19 nt, Homo sapiens
  misc_RNA (1)...(19): siRNA sense strand
uggagaaaguaaaggagaa

SEQ ID NO: 2590932 - RNA, 19 nt, Homo sapiens
  misc_RNA (1)...(19): siRNA sense strand
aagaaggguuggagaggaa

SEQ ID NO: 2590933 - RNA, 19 nt, Homo sapiens
  misc_RNA (1)...(19): siRNA sense strand
ggguaguuguauagaagaa

SEQ ID NO: 2590934 - RNA, 19 nt, Homo sapiens
  misc_RNA (1)...(19): siRNA sense strand
gguuaagccucuaggugaa

SEQ ID NO: 2590935 - RNA, 19 nt, Homo sapiens
  misc_RNA (1)...(19): siRNA sense strand
gguuaagccucuaggugaa

SEQ ID NO: 2590936 - RNA, 19 nt, Homo sapiens
  misc_RNA (1)...(19): siRNA sense strand
gagaagaaacaauggaaaa

SEQ ID NO: 2590937 - RNA, 19 nt, Homo sapiens
  misc_RNA (1)...(19): siRNA sense strand
gcggcagcauugagagaaa

SEQ ID NO: 2590938 - RNA, 19 nt, Homo sapiens
  misc_RNA (1)...(19): siRNA sense strand
ccaaauauaggaagaggaa

SEQ ID NO: 2590939 - RNA, 19 nt, Homo sapiens
  misc_RNA (1)...(19): siRNA sense strand
uggagaaaguaucaggaaa

SEQ ID NO: 2590940 - RNA, 19 nt, Homo sapiens
  misc_RNA (1)...(19): siRNA sense strand
auuuaaacgggaagagaaa

SEQ ID NO: 2590941 - RNA, 19 nt, Homo sapiens
  misc_RNA (1)...(19): siRNA sense strand
aggaagagguacuagagaa

SEQ ID NO: 2590942 - RNA, 19 nt, Homo sapiens
  misc_RNA (1)...(19): siRNA sense strand
uuacaacagcagagaauaa

SEQ ID NO: 2590943 - RNA, 19 nt, Homo sapiens
  misc_RNA (1)...(19): siRNA sense strand
gagacagauuugaaagcaa

SEQ ID NO: 2590944 - RNA, 19 nt, Homo sapiens
  misc_RNA (1)...(19): siRNA sense strand
gaggcagauuugaaagaaa

SEQ ID NO: 2590945 - RNA, 19 nt, Homo sapiens
  misc_RNA (1)...(19): siRNA sense strand
ugagagaaaucguggugaa

SEQ ID NO: 2590946 - RNA, 19 nt, Homo sapiens
  misc_RNA (1)...(19): siRNA sense strand
cuucagagaccgagaccaa

SEQ ID NO: 2590947 - RNA, 19 nt, Homo sapiens
  misc_RNA (1)...(19): siRNA sense strand
aggugaagccaaaggcaua

SEQ ID NO: 2590948 - RNA, 19 nt, Homo sapiens
  misc_RNA (1)...(19): siRNA sense strand
gagaauaagaaguaggcuu

SEQ ID NO: 2590949 - RNA, 19 nt, Homo sapiens
  misc_RNA (1)...(19): siRNA sense strand
auggaaacucaaagagaaa

SEQ ID NO: 2590950 - RNA, 19 nt, Homo sapiens
  misc_RNA (1)...(19): siRNA sense strand
cauugaggaaauagagaua

SEQ ID NO: 2590951 - RNA, 19 nt, Homo sapiens
  misc_RNA (1)...(19): siRNA sense strand
gcuaaugaacugggaguaa

SEQ ID NO: 2590952 - RNA, 19 nt, Homo sapiens
  misc_RNA (1)...(19): siRNA sense strand
uggaagaaacugaaagaga

SEQ ID NO: 2590953 - RNA, 19 nt, Homo sapiens
  misc_RNA (1)...(19): siRNA sense strand
uggaagaaacugaaagaga

SEQ ID NO: 2590954 - RNA, 19 nt, Homo sapiens
  misc_RNA (1)...(19): siRNA sense strand
uggaagaaacugaaagaga

SEQ ID NO: 2590955 - RNA, 19 nt, Homo sapiens
  misc_RNA (1)...(19): siRNA sense strand
aggucaagccuguagguaa

SEQ ID NO: 2590956 - RNA, 19 nt, Homo sapiens
  misc_RNA (1)...(19): siRNA sense strand
guucagugcuauaagggaa

SEQ ID NO: 2590957 - RNA, 19 nt, Homo sapiens
  misc_RNA (1)...(19): siRNA sense strand
caccagaggucguggauca

SEQ ID NO: 2590958 - RNA, 19 nt, Homo sapiens
  misc_RNA (1)...(19): siRNA sense strand
uugaagaaauggaggcaga

SEQ ID NO: 2590959 - RNA, 19 nt, Homo sapiens
  misc_RNA (1)...(19): siRNA sense strand
gaggcaaauaguagacaaa

SEQ ID NO: 2590960 - RNA, 19 nt, Homo sapiens
  misc_RNA (1)...(19): siRNA sense strand
gauugaugcuacugaggaa

SEQ ID NO: 2590961 - RNA, 19 nt, Homo sapiens
  misc_RNA (1)...(19): siRNA sense strand
cagcagagaauaaggauca

SEQ ID NO: 2590962 - RNA, 19 nt, Homo sapiens
  misc_RNA (1)...(19): siRNA sense strand
aagaauaaaugucaggcua

SEQ ID NO: 2590963 - RNA, 19 nt, Homo sapiens
  misc_RNA (1)...(19): siRNA sense strand
acaaaguuccagagaagaa

SEQ ID NO: 2590964 - RNA, 19 nt, Homo sapiens
  misc_RNA (1)...(19): siRNA sense strand
aaauauaggaagaggaacu

SEQ ID NO: 2590965 - RNA, 19 nt, Homo sapiens
  misc_RNA (1)...(19): siRNA sense strand
ggaaacuguaggagauaau

SEQ ID NO: 2590966 - RNA, 19 nt, Homo sapiens
  misc_RNA (1)...(19): siRNA sense strand
caagagaauaauaaggcaa

SEQ ID NO: 2590967 - RNA, 19 nt, Homo sapiens
  misc_RNA (1)...(19): siRNA sense strand
agaggaaacuguaggagau

SEQ ID NO: 2590968 - RNA, 19 nt, Homo sapiens
  misc_RNA (1)...(19): siRNA sense strand
aagaggaacuggaaggaga

SEQ ID NO: 2590969 - RNA, 19 nt, Homo sapiens
  misc_RNA (1)...(19): siRNA sense strand
ugaaauggaagaagagaca

SEQ ID NO: 2590970 - RNA, 19 nt, Homo sapiens
  misc_RNA (1)...(19): siRNA sense strand
ccugugaaggagugaauaa

SEQ ID NO: 2590971 - RNA, 19 nt, Homo sapiens
  misc_RNA (1)...(19): siRNA sense strand
gaagcuggaagaagagaaa

SEQ ID NO: 2590972 - RNA, 19 nt, Homo sapiens
  misc_RNA (1)...(19): siRNA sense strand
ggugaaaugcaaacagauu

SEQ ID NO: 2590973 - RNA, 19 nt, Homo sapiens
  misc_RNA (1)...(19): siRNA sense strand
agagaagaaacaauggaaa

SEQ ID NO: 2590974 - RNA, 19 nt, Homo sapiens
  misc_RNA (1)...(19): siRNA sense strand
ggucaaauaaagaaacaga

SEQ ID NO: 2590975 - RNA, 19 nt, Homo sapiens
  misc_RNA (1)...(19): siRNA sense strand
cugaagaagagaaaagaaa

SEQ ID NO: 2590976 - RNA, 19 nt, Homo sapiens
  misc_RNA (1)...(19): siRNA sense strand
aagaaaagaaggaggaaga

SEQ ID NO: 2590977 - RNA, 19 nt, Homo sapiens
  misc_RNA (1)...(19): siRNA sense strand
gagcauugugugaggugaa

SEQ ID NO: 2590978 - RNA, 19 nt, Homo sapiens
  misc_RNA (1)...(19): siRNA sense strand
cauauuacagccugagaaa

SEQ ID NO: 2590979 - RNA, 19 nt, Homo sapiens
  misc_RNA (1)...(19): siRNA sense strand
gggaaacaccuuugaugaa

SEQ ID NO: 2590980 - RNA, 19 nt, Homo sapiens
  misc_RNA (1)...(19): siRNA sense strand
ggacaggauuaaagcagca

SEQ ID NO: 2590981 - RNA, 19 nt, Homo sapiens
  misc_RNA (1)...(19): siRNA sense strand
ggauuaaagcagcagcuca

SEQ ID NO: 2590982 - RNA, 19 nt, Homo sapiens
  misc_RNA (1)...(19): siRNA sense strand
caucacaguuuaaggagca

SEQ ID NO: 2590983 - RNA, 19 nt, Homo sapiens
  misc_RNA (1)...(19): siRNA sense strand
ggggauaccagcagcaaga

SEQ ID NO: 2590984 - RNA, 19 nt, Homo sapiens
  misc_RNA (1)...(19): siRNA sense strand
gaaacaaagaagagcccaa

SEQ ID NO: 2590985 - RNA, 19 nt, Homo sapiens
  misc_RNA (1)...(19): siRNA sense strand
gaacagaaaguuaagccaa

SEQ ID NO: 2590986 - RNA, 19 nt, Homo sapiens
  misc_RNA (1)...(19): siRNA sense strand
cuaaagaagaggaaaggga

SEQ ID NO: 2590987 - RNA, 19 nt, Homo sapiens
  misc_RNA (1)...(19): siRNA sense strand
cagaacaagaagaaagaca

SEQ ID NO: 2590988 - RNA, 19 nt, Homo sapiens
  misc_RNA (1)...(19): siRNA sense strand
ucguggaacaugaggaaca

SEQ ID NO: 2590989 - RNA, 19 nt, Homo sapiens
  misc_RNA (1)...(19): siRNA sense strand
aagaagaaagacagcgaga

SEQ ID NO: 2590990 - RNA, 19 nt, Homo sapiens
  misc_RNA (1)...(19): siRNA sense strand
aggaaaggggcaaagauaa

SEQ ID NO: 2590991 - RNA, 19 nt, Homo sapiens
  misc_RNA (1)...(19): siRNA sense strand
cuuuaugaacuuccagaaa

SEQ ID NO: 2590992 - RNA, 19 nt, Homo sapiens
  misc_RNA (1)...(19): siRNA sense strand
gcaaagaagaccgaggaga

SEQ ID NO: 2590993 - RNA, 19 nt, Homo sapiens
  misc_RNA (1)...(19): siRNA sense strand
aaggaaaggggcaaagaua

SEQ ID NO: 2590994 - RNA, 19 nt, Homo sapiens
  misc_RNA (1)...(19): siRNA sense strand
acaagaagaaagacagcga

SEQ ID NO: 2590995 - RNA, 19 nt, Homo sapiens
  misc_RNA (1)...(19): siRNA sense strand
caaagaaugcagaggacug

SEQ ID NO: 2590996 - RNA, 19 nt, Homo sapiens
  misc_RNA (1)...(19): siRNA sense strand
ggaacagaaaguuaagcca

SEQ ID NO: 2590997 - RNA, 19 nt, Homo sapiens
  misc_RNA (1)...(19): siRNA sense strand
gaagaaagacagcgagacc

SEQ ID NO: 2590998 - RNA, 19 nt, Homo sapiens
  misc_RNA (1)...(19): siRNA sense strand
uggaacaugaggaacagaa

SEQ ID NO: 2590999 - RNA, 19 nt, Homo sapiens
  misc_RNA (1)...(19): siRNA sense strand
agcagaacaagaagaaaga

SEQ ID NO: 2591000 - RNA, 19 nt, Homo sapiens
  misc_RNA (1)...(19): siRNA sense strand
gaaacaaagaagagcccaa

SEQ ID NO: 2591001 - RNA, 19 nt, Homo sapiens
  misc_RNA (1)...(19): siRNA sense strand
gaacagaaaguuaagccaa

SEQ ID NO: 2591002 - RNA, 19 nt, Homo sapiens
  misc_RNA (1)...(19): siRNA sense strand
cggagaagccagagccuga

SEQ ID NO: 2591003 - RNA, 19 nt, Homo sapiens
  misc_RNA (1)...(19): siRNA sense strand
cuaaagaagaggaaaggga

SEQ ID NO: 2591004 - RNA, 19 nt, Homo sapiens
  misc_RNA (1)...(19): siRNA sense strand
cagaacaagaagaaagaca

SEQ ID NO: 2591005 - RNA, 19 nt, Homo sapiens
  misc_RNA (1)...(19): siRNA sense strand
uggccuugcuggugggaga

SEQ ID NO: 2591006 - RNA, 19 nt, Homo sapiens
  misc_RNA (1)...(19): siRNA sense strand
ucguggaacaugaggaaca

SEQ ID NO: 2591007 - RNA, 19 nt, Homo sapiens
  misc_RNA (1)...(19): siRNA sense strand
aagaagaaagacagcgaga

SEQ ID NO: 2591008 - RNA, 19 nt, Homo sapiens
  misc_RNA (1)...(19): siRNA sense strand
aggaaaggggcaaagauaa

SEQ ID NO: 2591009 - RNA, 19 nt, Homo sapiens
  misc_RNA (1)...(19): siRNA sense strand
cuuuaugaacuuccagaaa

SEQ ID NO: 2591010 - RNA, 19 nt, Homo sapiens
  misc_RNA (1)...(19): siRNA sense strand
gcaaagaagaccgaggaga

SEQ ID NO: 2591011 - RNA, 19 nt, Homo sapiens
  misc_RNA (1)...(19): siRNA sense strand
aaggaaaggggcaaagaua

SEQ ID NO: 2591012 - RNA, 19 nt, Homo sapiens
  misc_RNA (1)...(19): siRNA sense strand
cagaggaagaugagcagga

SEQ ID NO: 2591013 - RNA, 19 nt, Homo sapiens
  misc_RNA (1)...(19): siRNA sense strand
acaagaagaaagacagcga

SEQ ID NO: 2591014 - RNA, 19 nt, Homo sapiens
  misc_RNA (1)...(19): siRNA sense strand
ccugcuaacgagaaggcaa

SEQ ID NO: 2591015 - RNA, 19 nt, Homo sapiens
  misc_RNA (1)...(19): siRNA sense strand
agucagaggaagaugagca

SEQ ID NO: 2591016 - RNA, 19 nt, Homo sapiens
  misc_RNA (1)...(19): siRNA sense strand
cauuaugagaaguucaaga

SEQ ID NO: 2591017 - RNA, 19 nt, Homo sapiens
  misc_RNA (1)...(19): siRNA sense strand
gauuaaaacuggaagagac

SEQ ID NO: 2591018 - RNA, 19 nt, Homo sapiens
  misc_RNA (1)...(19): siRNA sense strand
caaagaaugcagaggacug

SEQ ID NO: 2591019 - RNA, 19 nt, Homo sapiens
  misc_RNA (1)...(19): siRNA sense strand
ggaacagaaaguuaagcca

SEQ ID NO: 2591020 - RNA, 19 nt, Homo sapiens
  misc_RNA (1)...(19): siRNA sense strand
gaagaaagacagcgagacc

SEQ ID NO: 2591021 - RNA, 19 nt, Homo sapiens
  misc_RNA (1)...(19): siRNA sense strand
uggaacaugaggaacagaa

SEQ ID NO: 2591022 - RNA, 19 nt, Homo sapiens
  misc_RNA (1)...(19): siRNA sense strand
agcagaacaagaagaaaga

SEQ ID NO: 2591023 - RNA, 19 nt, Homo sapiens
  misc_RNA (1)...(19): siRNA sense strand
ccacagaggaagaggagca

SEQ ID NO: 2591024 - RNA, 19 nt, Homo sapiens
  misc_RNA (1)...(19): siRNA sense strand
uggaagagaacgagcccua

SEQ ID NO: 2591025 - RNA, 19 nt, Homo sapiens
  misc_RNA (1)...(19): siRNA sense strand
ucuccgacguguugggcua

SEQ ID NO: 2591026 - RNA, 19 nt, Homo sapiens
  misc_RNA (1)...(19): siRNA sense strand
cagagauggaagagaacga

SEQ ID NO: 2591027 - RNA, 19 nt, Homo sapiens
  misc_RNA (1)...(19): siRNA sense strand
ugaaggagauugagccaga

SEQ ID NO: 2591028 - RNA, 19 nt, Homo sapiens
  misc_RNA (1)...(19): siRNA sense strand
ccgaugagaaacugggaga

SEQ ID NO: 2591029 - RNA, 19 nt, Homo sapiens
  misc_RNA (1)...(19): siRNA sense strand
caaucagauagcagaacua

SEQ ID NO: 2591030 - RNA, 19 nt, Homo sapiens
  misc_RNA (1)...(19): siRNA sense strand
cgaauaugaccgagccaca

SEQ ID NO: 2591031 - RNA, 19 nt, Homo sapiens
  misc_RNA (1)...(19): siRNA sense strand
agauugagccagagccaga

SEQ ID NO: 2591032 - RNA, 19 nt, Homo sapiens
  misc_RNA (1)...(19): siRNA sense strand
acacagugcuggaccgcau

SEQ ID NO: 2591033 - RNA, 19 nt, Homo sapiens
  misc_RNA (1)...(19): siRNA sense strand
cuacaaucagauagcagaa

SEQ ID NO: 2591034 - RNA, 19 nt, Homo sapiens
  misc_RNA (1)...(19): siRNA sense strand
aggcagcuguacuggaaau

SEQ ID NO: 2591035 - RNA, 19 nt, Homo sapiens
  misc_RNA (1)...(19): siRNA sense strand
ggagauugagccagagcca

SEQ ID NO: 2591036 - RNA, 19 nt, Homo sapiens
  misc_RNA (1)...(19): siRNA sense strand
uggaagaugugcugaccga

SEQ ID NO: 2591037 - RNA, 19 nt, Homo sapiens
  misc_RNA (1)...(19): siRNA sense strand
ugagaaacugggagaggca

SEQ ID NO: 2591038 - RNA, 19 nt, Homo sapiens
  misc_RNA (1)...(19): siRNA sense strand
ucuauaacucagucagcua

SEQ ID NO: 2591039 - RNA, 19 nt, Homo sapiens
  misc_RNA (1)...(19): siRNA sense strand
ucagagaggucuuuccaga

SEQ ID NO: 2591040 - RNA, 19 nt, Homo sapiens
  misc_RNA (1)...(19): siRNA sense strand
agagcacacugcagcgcua

SEQ ID NO: 2591041 - RNA, 19 nt, Homo sapiens
  misc_RNA (1)...(19): siRNA sense strand
ucuaugcugcuuugggaaa

SEQ ID NO: 2591042 - RNA, 19 nt, Homo sapiens
  misc_RNA (1)...(19): siRNA sense strand
ccauaagcgccauguucau

SEQ ID NO: 2591043 - RNA, 19 nt, Homo sapiens
  misc_RNA (1)...(19): siRNA sense strand
ccaagaacuaaaagcuaaa

SEQ ID NO: 2591044 - RNA, 19 nt, Homo sapiens
  misc_RNA (1)...(19): siRNA sense strand
gcugaugcugcccgagaaa

SEQ ID NO: 2591045 - RNA, 19 nt, Homo sapiens
  misc_RNA (1)...(19): siRNA sense strand
aauugaggccguuguacaa

SEQ ID NO: 2591046 - RNA, 19 nt, Homo sapiens
  misc_RNA (1)...(19): siRNA sense strand
ccaccggcuccucgauaaa

SEQ ID NO: 2591047 - RNA, 19 nt, Homo sapiens
  misc_RNA (1)...(19): siRNA sense strand
uggagaagcgagagggcua

SEQ ID NO: 2591048 - RNA, 19 nt, Homo sapiens
  misc_RNA (1)...(19): siRNA sense strand
agggauacacaguggagaa

SEQ ID NO: 2591049 - RNA, 19 nt, Homo sapiens
  misc_RNA (1)...(19): siRNA sense strand
caaucaaagaucugcgaga

SEQ ID NO: 2591050 - RNA, 19 nt, Homo sapiens
  misc_RNA (1)...(19): siRNA sense strand
gauaagaagcucauggcca

SEQ ID NO: 2591051 - RNA, 19 nt, Homo sapiens
  misc_RNA (1)...(19): siRNA sense strand
auaagaagcucauggccau

SEQ ID NO: 2591052 - RNA, 19 nt, Homo sapiens
  misc_RNA (1)...(19): siRNA sense strand
acacaguggagaagcgaga

SEQ ID NO: 2591053 - RNA, 19 nt, Homo sapiens
  misc_RNA (1)...(19): siRNA sense strand
gaacuuauugaaagcgcaa

SEQ ID NO: 2591054 - RNA, 19 nt, Homo sapiens
  misc_RNA (1)...(19): siRNA sense strand
cggccagaacuuauugaaa

SEQ ID NO: 2591055 - RNA, 19 nt, Homo sapiens
  misc_RNA (1)...(19): siRNA sense strand
gaggacuugaugagggaau

SEQ ID NO: 2591056 - RNA, 19 nt, Homo sapiens
  misc_RNA (1)...(19): siRNA sense strand
ccuccuagaacucggaaga

SEQ ID NO: 2591057 - RNA, 19 nt, Homo sapiens
  misc_RNA (1)...(19): siRNA sense strand
ccuagaacucggaagagau

SEQ ID NO: 2591058 - RNA, 19 nt, Homo sapiens
  misc_RNA (1)...(19): siRNA sense strand
acuuugaguacuuggugaa

SEQ ID NO: 2591059 - RNA, 19 nt, Homo sapiens
  misc_RNA (1)...(19): siRNA sense strand
auaucgggcuggucggcaa

SEQ ID NO: 2591060 - RNA, 19 nt, Homo sapiens
  misc_RNA (1)...(19): siRNA sense strand
gggagcgagucaaggccau

SEQ ID NO: 2591061 - RNA, 19 nt, Homo sapiens
  misc_RNA (1)...(19): siRNA sense strand
auaacaaagccauccggaa

SEQ ID NO: 2591062 - RNA, 19 nt, Homo sapiens
  misc_RNA (1)...(19): siRNA sense strand
uggaggacuugaugaggga

SEQ ID NO: 2591063 - RNA, 19 nt, Homo sapiens
  misc_RNA (1)...(19): siRNA sense strand
agaucaugaaagauggcaa

SEQ ID NO: 2591064 - RNA, 19 nt, Homo sapiens
  misc_RNA (1)...(19): siRNA sense strand
ggguaaucgcccuggccuu

SEQ ID NO: 2591065 - RNA, 19 nt, Homo sapiens
  misc_RNA (1)...(19): siRNA sense strand
gaaagauggcaaaugcuga

SEQ ID NO: 2591066 - RNA, 19 nt, Homo sapiens
  misc_RNA (1)...(19): siRNA sense strand
aggagauguuugugcguau

SEQ ID NO: 2591067 - RNA, 19 nt, Homo sapiens
  misc_RNA (1)...(19): siRNA sense strand
gggaaaagcugugugggaa

SEQ ID NO: 2591068 - RNA, 19 nt, Homo sapiens
  misc_RNA (1)...(19): siRNA sense strand
gugcguagguuucggggaa

SEQ ID NO: 2591069 - RNA, 19 nt, Homo sapiens
  misc_RNA (1)...(19): siRNA sense strand
ccagcgguacagugggaaa

SEQ ID NO: 2591070 - RNA, 19 nt, Homo sapiens
  misc_RNA (1)...(19): siRNA sense strand
aaacagaccuucuacguca

SEQ ID NO: 2591071 - RNA, 19 nt, Homo sapiens
  misc_RNA (1)...(19): siRNA sense strand
ggggaaaagcuguguggga

SEQ ID NO: 2591072 - RNA, 19 nt, Homo sapiens
  misc_RNA (1)...(19): siRNA sense strand
gugccucaugagugggaua

SEQ ID NO: 2591073 - RNA, 19 nt, Homo sapiens
  misc_RNA (1)...(19): siRNA sense strand
cgguacagugggaaacaga

SEQ ID NO: 2591074 - RNA, 19 nt, Homo sapiens
  misc_RNA (1)...(19): siRNA sense strand
ccuaagaggugggugggca

SEQ ID NO: 2591075 - RNA, 19 nt, Homo sapiens
  misc_RNA (1)...(19): siRNA sense strand
cuguagaauuguaguggau

SEQ ID NO: 2591076 - RNA, 19 nt, Homo sapiens
  misc_RNA (1)...(19): siRNA sense strand
auuuggagcccgagaagaa

SEQ ID NO: 2591077 - RNA, 19 nt, Homo sapiens
  misc_RNA (1)...(19): siRNA sense strand
cugaagaauuaccuggcaa

SEQ ID NO: 2591078 - RNA, 19 nt, Homo sapiens
  misc_RNA (1)...(19): siRNA sense strand
cagugaagaagaugugcaa

SEQ ID NO: 2591079 - RNA, 19 nt, Homo sapiens
  misc_RNA (1)...(19): siRNA sense strand
gaagaaaaugagaggagau

SEQ ID NO: 2591080 - RNA, 19 nt, Homo sapiens
  misc_RNA (1)...(19): siRNA sense strand
aguauggaugccaggaaua

SEQ ID NO: 2591081 - RNA, 19 nt, Homo sapiens
  misc_RNA (1)...(19): siRNA sense strand
caggaagaaugaaccggaa

SEQ ID NO: 2591082 - RNA, 19 nt, Homo sapiens
  misc_RNA (1)...(19): siRNA sense strand
cagacaagauggaggagac

SEQ ID NO: 2591083 - RNA, 19 nt, Homo sapiens
  misc_RNA (1)...(19): siRNA sense strand
cucccaaaguauugugauu

SEQ ID NO: 2591084 - RNA, 19 nt, Homo sapiens
  misc_RNA (1)...(19): siRNA sense strand
aagacaugcugcagcccaa

SEQ ID NO: 2591085 - RNA, 19 nt, Homo sapiens
  misc_RNA (1)...(19): siRNA sense strand
uggacggcgugcugaacaa

SEQ ID NO: 2591086 - RNA, 19 nt, Homo sapiens
  misc_RNA (1)...(19): siRNA sense strand
gcacucaggugaaagcuca

SEQ ID NO: 2591087 - RNA, 19 nt, Homo sapiens
  misc_RNA (1)...(19): siRNA sense strand
auuacagagucacgggaga

SEQ ID NO: 2591088 - RNA, 19 nt, Homo sapiens
  misc_RNA (1)...(19): siRNA sense strand
cagcucucccagacagaaa

SEQ ID NO: 2591089 - RNA, 19 nt, Homo sapiens
  misc_RNA (1)...(19): siRNA sense strand
ccuaucaguaucagcagaa

SEQ ID NO: 2591090 - RNA, 19 nt, Homo sapiens
  misc_RNA (1)...(19): siRNA sense strand
caccaguggaacagugauu

SEQ ID NO: 2591091 - RNA, 19 nt, Homo sapiens
  misc_RNA (1)...(19): siRNA sense strand
ucauugaacuggugggaca

SEQ ID NO: 2591092 - RNA, 19 nt, Homo sapiens
  misc_RNA (1)...(19): siRNA sense strand
augacuaccuacugagcaa

SEQ ID NO: 2591093 - RNA, 19 nt, Homo sapiens
  misc_RNA (1)...(19): siRNA sense strand
cugcauggaagaugggaga

SEQ ID NO: 2591094 - RNA, 19 nt, Homo sapiens
  misc_RNA (1)...(19): siRNA sense strand
acaaugaaguauaugcaga

SEQ ID NO: 2591095 - RNA, 19 nt, Homo sapiens
  misc_RNA (1)...(19): siRNA sense strand
cgucgggagcaaagggaca

SEQ ID NO: 2591096 - RNA, 19 nt, Homo sapiens
  misc_RNA (1)...(19): siRNA sense strand
ggaagaugggagauggagu

SEQ ID NO: 2591097 - RNA, 19 nt, Homo sapiens
  misc_RNA (1)...(19): siRNA sense strand
ugauugacaagcaggguau

SEQ ID NO: 2591098 - RNA, 19 nt, Homo sapiens
  misc_RNA (1)...(19): siRNA sense strand
ccuaugaagauuaacguca

SEQ ID NO: 2591099 - RNA, 19 nt, Homo sapiens
  misc_RNA (1)...(19): siRNA sense strand
aaguauaugcagaggaggu

SEQ ID NO: 2591100 - RNA, 19 nt, Homo sapiens
  misc_RNA (1)...(19): siRNA sense strand
acgaggaagaagaggauga

SEQ ID NO: 2591101 - RNA, 19 nt, Homo sapiens
  misc_RNA (1)...(19): siRNA sense strand
cggaugauggagaggucaa

SEQ ID NO: 2591102 - RNA, 19 nt, Homo sapiens
  misc_RNA (1)...(19): siRNA sense strand
agguggacauggaaggcaa

SEQ ID NO: 2591103 - RNA, 19 nt, Homo sapiens
  misc_RNA (1)...(19): siRNA sense strand
aggacauggacgagaugaa

SEQ ID NO: 2591104 - RNA, 19 nt, Homo sapiens
  misc_RNA (1)...(19): siRNA sense strand
acuaugaugacgaggaaga

SEQ ID NO: 2591105 - RNA, 19 nt, Homo sapiens
  misc_RNA (1)...(19): siRNA sense strand
aagaggacucagaggauga

SEQ ID NO: 2591106 - RNA, 19 nt, Homo sapiens
  misc_RNA (1)...(19): siRNA sense strand
ucgcggagaaagacaacaa

SEQ ID NO: 2591107 - RNA, 19 nt, Homo sapiens
  misc_RNA (1)...(19): siRNA sense strand
uggaagagacagagcugca

SEQ ID NO: 2591108 - RNA, 19 nt, Homo sapiens
  misc_RNA (1)...(19): siRNA sense strand
aggucaaugagguggacau

SEQ ID NO: 2591109 - RNA, 19 nt, Homo sapiens
  misc_RNA (1)...(19): siRNA sense strand
acgaacaggaucaggacca

SEQ ID NO: 2591110 - RNA, 19 nt, Homo sapiens
  misc_RNA (1)...(19): siRNA sense strand
aaagcaucgcggagaaaga

SEQ ID NO: 2591111 - RNA, 19 nt, Homo sapiens
  misc_RNA (1)...(19): siRNA sense strand
gugaagaggacucagagga

SEQ ID NO: 2591112 - RNA, 19 nt, Homo sapiens
  misc_RNA (1)...(19): siRNA sense strand
augaagaugaugaggauag

SEQ ID NO: 2591113 - RNA, 19 nt, Homo sapiens
  misc_RNA (1)...(19): siRNA sense strand
aggaugaugaagaugauga

SEQ ID NO: 2591114 - RNA, 19 nt, Homo sapiens
  misc_RNA (1)...(19): siRNA sense strand
augaggauaugcaggacau

SEQ ID NO: 2591115 - RNA, 19 nt, Homo sapiens
  misc_RNA (1)...(19): siRNA sense strand
aggccuggcuccaaagcau

SEQ ID NO: 2591116 - RNA, 19 nt, Homo sapiens
  misc_RNA (1)...(19): siRNA sense strand
gcaacgaacaggaucagga

SEQ ID NO: 2591117 - RNA, 19 nt, Homo sapiens
  misc_RNA (1)...(19): siRNA sense strand
gggaaaacuucguggacau

SEQ ID NO: 2591118 - RNA, 19 nt, Homo sapiens
  misc_RNA (1)...(19): siRNA sense strand
ggucaaugccucugggagu

SEQ ID NO: 2591119 - RNA, 19 nt, Homo sapiens
  misc_RNA (1)...(19): siRNA sense strand
gauccaaaucagagggccu

SEQ ID NO: 2591120 - RNA, 19 nt, Homo sapiens
  misc_RNA (1)...(19): siRNA sense strand
ggacauuguugaugccaag

SEQ ID NO: 2591121 - RNA, 19 nt, Homo sapiens
  misc_RNA (1)...(19): siRNA sense strand
guucaagcucaguggggaa

SEQ ID NO: 2591122 - RNA, 19 nt, Homo sapiens
  misc_RNA (1)...(19): siRNA sense strand
aagcucaucgacagggaaa

SEQ ID NO: 2591123 - RNA, 19 nt, Homo sapiens
  misc_RNA (1)...(19): siRNA sense strand
uggagcagcugcagagcca

SEQ ID NO: 2591124 - RNA, 19 nt, Homo sapiens
  misc_RNA (1)...(19): siRNA sense strand
gggaaaacggugaugaagu

SEQ ID NO: 2591125 - RNA, 19 nt, Homo sapiens
  misc_RNA (1)...(19): siRNA sense strand
gcucaaggauggucagcag

SEQ ID NO: 2591126 - RNA, 19 nt, Homo sapiens
  misc_RNA (1)...(19): siRNA sense strand
acaaguuggcaguggagca

SEQ ID NO: 2591127 - RNA, 19 nt, Homo sapiens
  misc_RNA (1)...(19): siRNA sense strand
uggacauuguugaugccaa

SEQ ID NO: 2591128 - RNA, 19 nt, Homo sapiens
  misc_RNA (1)...(19): siRNA sense strand
ccauuauaagacagggaua

SEQ ID NO: 2591129 - RNA, 19 nt, Homo sapiens
  misc_RNA (1)...(19): siRNA sense strand
gcaaaauggaccaguucaa

SEQ ID NO: 2591130 - RNA, 19 nt, Homo sapiens
  misc_RNA (1)...(19): siRNA sense strand
cauuauaagacagggauau

SEQ ID NO: 2591131 - RNA, 19 nt, Homo sapiens
  misc_RNA (1)...(19): siRNA sense strand
agacauguuaccagcacaa

SEQ ID NO: 2591132 - RNA, 19 nt, Homo sapiens
  misc_RNA (1)...(19): siRNA sense strand
aguucaagccauaaugcaa

SEQ ID NO: 2591133 - RNA, 19 nt, Homo sapiens
  misc_RNA (1)...(19): siRNA sense strand
gagaauggcuauuucagga

SEQ ID NO: 2591134 - RNA, 19 nt, Homo sapiens
  misc_RNA (1)...(19): siRNA sense strand
cuuggugguaccugagaaa

SEQ ID NO: 2591135 - RNA, 19 nt, Homo sapiens
  misc_RNA (1)...(19): siRNA sense strand
ugacuuuagaagaugguuu

SEQ ID NO: 2591136 - RNA, 19 nt, Homo sapiens
  misc_RNA (1)...(19): siRNA sense strand
gcuuauuucacuaggaauc

SEQ ID NO: 2591137 - RNA, 19 nt, Homo sapiens
  misc_RNA (1)...(19): siRNA sense strand
cauggaugcaauaguggaa

SEQ ID NO: 2591138 - RNA, 19 nt, Homo sapiens
  misc_RNA (1)...(19): siRNA sense strand
aagcaggucugaugggcga

SEQ ID NO: 2591139 - RNA, 19 nt, Homo sapiens
  misc_RNA (1)...(19): siRNA sense strand
ggaaagucauggggagaga

SEQ ID NO: 2591140 - RNA, 19 nt, Homo sapiens
  misc_RNA (1)...(19): siRNA sense strand
gauucuucgaggaguaaau

SEQ ID NO: 2591141 - RNA, 19 nt, Homo sapiens
  misc_RNA (1)...(19): siRNA sense strand
ggaguaaaugaguccgaca

SEQ ID NO: 2591142 - RNA, 19 nt, Homo sapiens
  misc_RNA (1)...(19): siRNA sense strand
gaguaaaugaguccgacau

SEQ ID NO: 2591143 - RNA, 19 nt, Homo sapiens
  misc_RNA (1)...(19): siRNA sense strand
gggcacacugagaggagca

SEQ ID NO: 2591144 - RNA, 19 nt, Homo sapiens
  misc_RNA (1)...(19): siRNA sense strand
aagagggaucaguaauuaa

SEQ ID NO: 2591145 - RNA, 19 nt, Homo sapiens
  misc_RNA (1)...(19): siRNA sense strand
cggcaugccacgaagccau

SEQ ID NO: 2591146 - RNA, 19 nt, Homo sapiens
  misc_RNA (1)...(19): siRNA sense strand
augaaugaaaugacagcuu

SEQ ID NO: 2591147 - RNA, 19 nt, Homo sapiens
  misc_RNA (1)...(19): siRNA sense strand
cagaaagaugggagaggaa

SEQ ID NO: 2591148 - RNA, 19 nt, Homo sapiens
  misc_RNA (1)...(19): siRNA sense strand
cugaaagauucuaugggaa

SEQ ID NO: 2591149 - RNA, 19 nt, Homo sapiens
  misc_RNA (1)...(19): siRNA sense strand
cggcaagaggagaagacua

SEQ ID NO: 2591150 - RNA, 19 nt, Homo sapiens
  misc_RNA (1)...(19): siRNA sense strand
gaaagaugggagaggaaaa

SEQ ID NO: 2591151 - RNA, 19 nt, Homo sapiens
  misc_RNA (1)...(19): siRNA sense strand
aacuaaaggaagaggaaaa

SEQ ID NO: 2591152 - RNA, 19 nt, Homo sapiens
  misc_RNA (1)...(19): siRNA sense strand
agacaaauauagccggaga

SEQ ID NO: 2591153 - RNA, 19 nt, Homo sapiens
  misc_RNA (1)...(19): siRNA sense strand
cagaauuuggaaagaggaa

SEQ ID NO: 2591154 - RNA, 19 nt, Homo sapiens
  misc_RNA (1)...(19): siRNA sense strand
gcgaacagagacugcgcaa

SEQ ID NO: 2591155 - RNA, 19 nt, Homo sapiens
  misc_RNA (1)...(19): siRNA sense strand
aguuguggaagaagauaaa

SEQ ID NO: 2591156 - RNA, 19 nt, Homo sapiens
  misc_RNA (1)...(19): siRNA sense strand
aagugaaguugcuggagau

SEQ ID NO: 2591157 - RNA, 19 nt, Homo sapiens
  misc_RNA (1)...(19): siRNA sense strand
aaguuguggaagaagauaa

SEQ ID NO: 2591158 - RNA, 19 nt, Homo sapiens
  misc_RNA (1)...(19): siRNA sense strand
aauuaaaucaccaggaagu

SEQ ID NO: 2591159 - RNA, 19 nt, Homo sapiens
  misc_RNA (1)...(19): siRNA sense strand
gcugaaagauucuauggga

SEQ ID NO: 2591160 - RNA, 19 nt, Homo sapiens
  misc_RNA (1)...(19): siRNA sense strand
gcagaaagaugggagagga

SEQ ID NO: 2591161 - RNA, 19 nt, Homo sapiens
  misc_RNA (1)...(19): siRNA sense strand
uggaaacauaugagagacu

SEQ ID NO: 2591162 - RNA, 19 nt, Homo sapiens
  misc_RNA (1)...(19): siRNA sense strand
gcuggagaucagugcagaa

SEQ ID NO: 2591163 - RNA, 19 nt, Homo sapiens
  misc_RNA (1)...(19): siRNA sense strand
guuuggagugggaacuaaa

SEQ ID NO: 2591164 - RNA, 19 nt, Homo sapiens
  misc_RNA (1)...(19): siRNA sense strand
ugccaaauucaacaagaaa

SEQ ID NO: 2591165 - RNA, 19 nt, Homo sapiens
  misc_RNA (1)...(19): siRNA sense strand
aaagugaaguugcuggaga

SEQ ID NO: 2591166 - RNA, 19 nt, Homo sapiens
  misc_RNA (1)...(19): siRNA sense strand
ugggaaauacacagcugaa

SEQ ID NO: 2591167 - RNA, 19 nt, Homo sapiens
  misc_RNA (1)...(19): siRNA sense strand
aaauauagccggagacguc

SEQ ID NO: 2591168 - RNA, 19 nt, Homo sapiens
  misc_RNA (1)...(19): siRNA sense strand
ggaaagaggaacagcuguc

SEQ ID NO: 2591169 - RNA, 19 nt, Homo sapiens
  misc_RNA (1)...(19): siRNA sense strand
cgagacaaauauagccgga

SEQ ID NO: 2591170 - RNA, 19 nt, Homo sapiens
  misc_RNA (1)...(19): siRNA sense strand
gcaaauuccgggagcugca

SEQ ID NO: 2591171 - RNA, 19 nt, Homo sapiens
  misc_RNA (1)...(19): siRNA sense strand
cauccgaggugcuggugga

SEQ ID NO: 2591172 - RNA, 19 nt, Homo sapiens
  misc_RNA (1)...(19): siRNA sense strand
gaugcagaaagaugggaga

SEQ ID NO: 2591173 - RNA, 19 nt, Homo sapiens
  misc_RNA (1)...(19): siRNA sense strand
uaaauaugaucuugggaga

SEQ ID NO: 2591174 - RNA, 19 nt, Homo sapiens
  misc_RNA (1)...(19): siRNA sense strand
ccgagagcuucgaggcaga

SEQ ID NO: 2591175 - RNA, 19 nt, Homo sapiens
  misc_RNA (1)...(19): siRNA sense strand
gggagauguggaagaaacu

SEQ ID NO: 2591176 - RNA, 19 nt, Homo sapiens
  misc_RNA (1)...(19): siRNA sense strand
aggcagauuacaugcuuau

SEQ ID NO: 2591177 - RNA, 19 nt, Homo sapiens
  misc_RNA (1)...(19): siRNA sense strand
acugugacuacuauagaaa

SEQ ID NO: 2591178 - RNA, 19 nt, Homo sapiens
  misc_RNA (1)...(19): siRNA sense strand
cgagguacacagagggcua

SEQ ID NO: 2591179 - RNA, 19 nt, Homo sapiens
  misc_RNA (1)...(19): siRNA sense strand
uugcaaaguuuuagccaaa

SEQ ID NO: 2591180 - RNA, 19 nt, Homo sapiens
  misc_RNA (1)...(19): siRNA sense strand
cggaaacagaagacgagaa

SEQ ID NO: 2591181 - RNA, 19 nt, Homo sapiens
  misc_RNA (1)...(19): siRNA sense strand
ggaugauguaauaaaggaa

SEQ ID NO: 2591182 - RNA, 19 nt, Homo sapiens
  misc_RNA (1)...(19): siRNA sense strand
ugaagagauugaacggcaa

SEQ ID NO: 2591183 - RNA, 19 nt, Homo sapiens
  misc_RNA (1)...(19): siRNA sense strand
ggcuauaaucagagaucga

SEQ ID NO: 2591184 - RNA, 19 nt, Homo sapiens
  misc_RNA (1)...(19): siRNA sense strand
gcuuuagagaaacaagaaa

SEQ ID NO: 2591185 - RNA, 19 nt, Homo sapiens
  misc_RNA (1)...(19): siRNA sense strand
ccguggaugauguaauaaa

SEQ ID NO: 2591186 - RNA, 19 nt, Homo sapiens
  misc_RNA (1)...(19): siRNA sense strand
agaagaaaaccguggauga

SEQ ID NO: 2591187 - RNA, 19 nt, Homo sapiens
  misc_RNA (1)...(19): siRNA sense strand
acaagaagauggauccaca

SEQ ID NO: 2591188 - RNA, 19 nt, Homo sapiens
  misc_RNA (1)...(19): siRNA sense strand
acuugugcaucuacggaaa

SEQ ID NO: 2591189 - RNA, 19 nt, Homo sapiens
  misc_RNA (1)...(19): siRNA sense strand
aggcuuuaggaguagauua

SEQ ID NO: 2591190 - RNA, 19 nt, Homo sapiens
  misc_RNA (1)...(19): siRNA sense strand
augaagagauugaacggca

SEQ ID NO: 2591191 - RNA, 19 nt, Homo sapiens
  misc_RNA (1)...(19): siRNA sense strand
aaucagagaucgagcagcu

SEQ ID NO: 2591192 - RNA, 19 nt, Homo sapiens
  misc_RNA (1)...(19): siRNA sense strand
cagaaggaaaacaugaaaa

SEQ ID NO: 2591193 - RNA, 19 nt, Homo sapiens
  misc_RNA (1)...(19): siRNA sense strand
cuacggaaacagaagacga

SEQ ID NO: 2591194 - RNA, 19 nt, Homo sapiens
  misc_RNA (1)...(19): siRNA sense strand
gcaaugucuaccacagcaa

SEQ ID NO: 2591195 - RNA, 19 nt, Homo sapiens
  misc_RNA (1)...(19): siRNA sense strand
ccaggaaggugguuggcaa

SEQ ID NO: 2591196 - RNA, 19 nt, Homo sapiens
  misc_RNA (1)...(19): siRNA sense strand
ucuuuaaggauguggacua

SEQ ID NO: 2591197 - RNA, 19 nt, Homo sapiens
  misc_RNA (1)...(19): siRNA sense strand
ccaucaggcucgugccgaa

SEQ ID NO: 2591198 - RNA, 19 nt, Homo sapiens
  misc_RNA (1)...(19): siRNA sense strand
ccggagaagagaggcgaaa

SEQ ID NO: 2591199 - RNA, 19 nt, Homo sapiens
  misc_RNA (1)...(19): siRNA sense strand
gacaauuacuggcugggaa

SEQ ID NO: 2591200 - RNA, 19 nt, Homo sapiens
  misc_RNA (1)...(19): siRNA sense strand
acauagaggaguuugccaa

SEQ ID NO: 2591201 - RNA, 19 nt, Homo sapiens
  misc_RNA (1)...(19): siRNA sense strand
ccacagaagaagaccgugu

SEQ ID NO: 2591202 - RNA, 19 nt, Homo sapiens
  misc_RNA (1)...(19): siRNA sense strand
acauuaagaaacucgcaaa

SEQ ID NO: 2591203 - RNA, 19 nt, Homo sapiens
  misc_RNA (1)...(19): siRNA sense strand
ggauaaacgcccuggaagc

SEQ ID NO: 2591204 - RNA, 19 nt, Homo sapiens
  misc_RNA (1)...(19): siRNA sense strand
acuuugacauagaggaguu

SEQ ID NO: 2591205 - RNA, 19 nt, Homo sapiens
  misc_RNA (1)...(19): siRNA sense strand
auaacuacauagagggaac

SEQ ID NO: 2591206 - RNA, 19 nt, Homo sapiens
  misc_RNA (1)...(19): siRNA sense strand
cauuaagaaacucgcaaaa

SEQ ID NO: 2591207 - RNA, 19 nt, Homo sapiens
  misc_RNA (1)...(19): siRNA sense strand
ugguggagcgagacggcaa

SEQ ID NO: 2591208 - RNA, 19 nt, Homo sapiens
  misc_RNA (1)...(19): siRNA sense strand
gcucggugcaugaggccau

SEQ ID NO: 2591209 - RNA, 19 nt, Homo sapiens
  misc_RNA (1)...(19): siRNA sense strand
ucgcaaaauggguggcuau

SEQ ID NO: 2591210 - RNA, 19 nt, Homo sapiens
  misc_RNA (1)...(19): siRNA sense strand
guauaacuacauagaggga

SEQ ID NO: 2591211 - RNA, 19 nt, Homo sapiens
  misc_RNA (1)...(19): siRNA sense strand
gagaaauagacuuggaaaa

SEQ ID NO: 2591212 - RNA, 19 nt, Homo sapiens
  misc_RNA (1)...(19): siRNA sense strand
agaccaagcuggaagcaga

SEQ ID NO: 2591213 - RNA, 19 nt, Homo sapiens
  misc_RNA (1)...(19): siRNA sense strand
ggguggaacagcagaccaa

SEQ ID NO: 2591214 - RNA, 19 nt, Homo sapiens
  misc_RNA (1)...(19): siRNA sense strand
gcguauucaugugggcaaa

SEQ ID NO: 2591215 - RNA, 19 nt, Homo sapiens
  misc_RNA (1)...(19): siRNA sense strand
uugcaaacuuagugcuaca

SEQ ID NO: 2591216 - RNA, 19 nt, Homo sapiens
  misc_RNA (1)...(19): siRNA sense strand
ggaaaaggagagugacaca

SEQ ID NO: 2591217 - RNA, 19 nt, Homo sapiens
  misc_RNA (1)...(19): siRNA sense strand
aagaacaaaggguggaaca

SEQ ID NO: 2591218 - RNA, 19 nt, Homo sapiens
  misc_RNA (1)...(19): siRNA sense strand
gcagagaaguugaaagugc

SEQ ID NO: 2591219 - RNA, 19 nt, Homo sapiens
  misc_RNA (1)...(19): siRNA sense strand
cagagaaguugaaagugca

SEQ ID NO: 2591220 - RNA, 19 nt, Homo sapiens
  misc_RNA (1)...(19): siRNA sense strand
ggugauauuccucgaggga

SEQ ID NO: 2591221 - RNA, 19 nt, Homo sapiens
  misc_RNA (1)...(19): siRNA sense strand
ucgaaaagcuaaagaggca

SEQ ID NO: 2591222 - RNA, 19 nt, Homo sapiens
  misc_RNA (1)...(19): siRNA sense strand
cugaagagcaggggaaaua

SEQ ID NO: 2591223 - RNA, 19 nt, Homo sapiens
  misc_RNA (1)...(19): siRNA sense strand
ccguuggaauagcggguuu

SEQ ID NO: 2591224 - RNA, 19 nt, Homo sapiens
  misc_RNA (1)...(19): siRNA sense strand
uaucgggaauucugggcaa

SEQ ID NO: 2591225 - RNA, 19 nt, Homo sapiens
  misc_RNA (1)...(19): siRNA sense strand
uauauaaacugaagagcag

SEQ ID NO: 2591226 - RNA, 19 nt, Homo sapiens
  misc_RNA (1)...(19): siRNA sense strand
aaacugaagagcaggggaa

SEQ ID NO: 2591227 - RNA, 19 nt, Homo sapiens
  misc_RNA (1)...(19): siRNA sense strand
aggcuuuguuguaggagca

SEQ ID NO: 2591228 - RNA, 19 nt, Homo sapiens
  misc_RNA (1)...(19): siRNA sense strand
aggcaggacaugugggaaa

SEQ ID NO: 2591229 - RNA, 19 nt, Homo sapiens
  misc_RNA (1)...(19): siRNA sense strand
aagucaccuuaaagagaaa

SEQ ID NO: 2591230 - RNA, 19 nt, Homo sapiens
  misc_RNA (1)...(19): siRNA sense strand
cucaagaagccgaacguga

SEQ ID NO: 2591231 - RNA, 19 nt, Homo sapiens
  misc_RNA (1)...(19): siRNA sense strand
caaagaugugagagagaaa

SEQ ID NO: 2591232 - RNA, 19 nt, Homo sapiens
  misc_RNA (1)...(19): siRNA sense strand
ccuucaaagaugugagaga

SEQ ID NO: 2591233 - RNA, 19 nt, Homo sapiens
  misc_RNA (1)...(19): siRNA sense strand
acuacagaauuuaggagaa

SEQ ID NO: 2591234 - RNA, 19 nt, Homo sapiens
  misc_RNA (1)...(19): siRNA sense strand
gauucaacuacuagggaga

SEQ ID NO: 2591235 - RNA, 19 nt, Homo sapiens
  misc_RNA (1)...(19): siRNA sense strand
auacaauggcaaugcacaa

SEQ ID NO: 2591236 - RNA, 19 nt, Homo sapiens
  misc_RNA (1)...(19): siRNA sense strand
guugaagcccucauggaaa

SEQ ID NO: 2591237 - RNA, 19 nt, Homo sapiens
  misc_RNA (1)...(19): siRNA sense strand
aggagagaaugaagugaga

SEQ ID NO: 2591238 - RNA, 19 nt, Homo sapiens
  misc_RNA (1)...(19): siRNA sense strand
gggagacagcauuggaaaa

SEQ ID NO: 2591239 - RNA, 19 nt, Homo sapiens
  misc_RNA (1)...(19): siRNA sense strand
cgggcaauuuggaacuaua

SEQ ID NO: 2591240 - RNA, 19 nt, Homo sapiens
  misc_RNA (1)...(19): siRNA sense strand
cuucggauggguugaauaa

SEQ ID NO: 2591241 - RNA, 19 nt, Homo sapiens
  misc_RNA (1)...(19): siRNA sense strand
agaagaggcaagucaggaa

SEQ ID NO: 2591242 - RNA, 19 nt, Homo sapiens
  misc_RNA (1)...(19): siRNA sense strand
caaagaacacauugaggga

SEQ ID NO: 2591243 - RNA, 19 nt, Homo sapiens
  misc_RNA (1)...(19): siRNA sense strand
uuggaaaacauuaggcaaa

SEQ ID NO: 2591244 - RNA, 19 nt, Homo sapiens
  misc_RNA (1)...(19): siRNA sense strand
aagaacacauugagggacu

SEQ ID NO: 2591245 - RNA, 19 nt, Homo sapiens
  misc_RNA (1)...(19): siRNA sense strand
caugguuauucuuugguaa

SEQ ID NO: 2591246 - RNA, 19 nt, Homo sapiens
  misc_RNA (1)...(19): siRNA sense strand
gaaugaagugagaugggau

SEQ ID NO: 2591247 - RNA, 19 nt, Homo sapiens
  misc_RNA (1)...(19): siRNA sense strand
uggaugagaugccggucaa

SEQ ID NO: 2591248 - RNA, 19 nt, Homo sapiens
  misc_RNA (1)...(19): siRNA sense strand
ccugaaaagguuaccaaaa

SEQ ID NO: 2591249 - RNA, 19 nt, Homo sapiens
  misc_RNA (1)...(19): siRNA sense strand
ugaauaagcuacuugcuca

SEQ ID NO: 2591250 - RNA, 19 nt, Homo sapiens
  misc_RNA (1)...(19): siRNA sense strand
cuucguucggugaaagaaa

SEQ ID NO: 2591251 - RNA, 19 nt, Homo sapiens
  misc_RNA (1)...(19): siRNA sense strand
aguuuauucugaagagcau

SEQ ID NO: 2591252 - RNA, 19 nt, Homo sapiens
  misc_RNA (1)...(19): siRNA sense strand
gcauguuuggaauaagaua

SEQ ID NO: 2591253 - RNA, 19 nt, Homo sapiens
  misc_RNA (1)...(19): siRNA sense strand
gagagagaaaagugaguuu

SEQ ID NO: 2591254 - RNA, 19 nt, Homo sapiens
  misc_RNA (1)...(19): siRNA sense strand
gugaagacgcacagaugca

SEQ ID NO: 2591255 - RNA, 19 nt, Homo sapiens
  misc_RNA (1)...(19): siRNA sense strand
cggaauugguacaugcagu

SEQ ID NO: 2591256 - RNA, 19 nt, Homo sapiens
  misc_RNA (1)...(19): siRNA sense strand
gagaugaagaagaggcaag

SEQ ID NO: 2591257 - RNA, 19 nt, Homo sapiens
  misc_RNA (1)...(19): siRNA sense strand
agaaguuacaccagcaaga

SEQ ID NO: 2591258 - RNA, 19 nt, Homo sapiens
  misc_RNA (1)...(19): siRNA sense strand
gugaaauuaaccagcuauu

SEQ ID NO: 2591259 - RNA, 19 nt, Homo sapiens
  misc_RNA (1)...(19): siRNA sense strand
cauuagaauuccucgacca

SEQ ID NO: 2591260 - RNA, 19 nt, Homo sapiens
  misc_RNA (1)...(19): siRNA sense strand
agggagacagcauuggaaa

SEQ ID NO: 2591261 - RNA, 19 nt, Homo sapiens
  misc_RNA (1)...(19): siRNA sense strand
acagaauuuaggagaacuu

SEQ ID NO: 2591262 - RNA, 19 nt, Homo sapiens
  misc_RNA (1)...(19): siRNA sense strand
augaagaagaggcaaguca

SEQ ID NO: 2591263 - RNA, 19 nt, Homo sapiens
  misc_RNA (1)...(19): siRNA sense strand
cgucacuacauuggaauaa

SEQ ID NO: 2591264 - RNA, 19 nt, Homo sapiens
  misc_RNA (1)...(19): siRNA sense strand
cuauuggaucguagcuuua

SEQ ID NO: 2591265 - RNA, 19 nt, Homo sapiens
  misc_RNA (1)...(19): siRNA sense strand
gguacaugcaguaguuuua

SEQ ID NO: 2591266 - RNA, 19 nt, Homo sapiens
  misc_RNA (1)...(19): siRNA sense strand
gaauaauggcugcggcaag

SEQ ID NO: 2591267 - RNA, 19 nt, Homo sapiens
  misc_RNA (1)...(19): siRNA sense strand
aggcaagucaggaagagau

SEQ ID NO: 2591268 - RNA, 19 nt, Homo sapiens
  misc_RNA (1)...(19): siRNA sense strand
cccacaauauuuagaaagu

SEQ ID NO: 2591269 - RNA, 19 nt, Homo sapiens
  misc_RNA (1)...(19): siRNA sense strand
aggaaugucgagaugaaga

SEQ ID NO: 2591270 - RNA, 19 nt, Homo sapiens
  misc_RNA (1)...(19): siRNA sense strand
ugauuaugacuauggugaa

SEQ ID NO: 2591271 - RNA, 19 nt, Homo sapiens
  misc_RNA (1)...(19): siRNA sense strand
cuacagaauuuaggagaac

SEQ ID NO: 2591272 - RNA, 19 nt, Homo sapiens
  misc_RNA (1)...(19): siRNA sense strand
ggucaacucagcagaaaau

SEQ ID NO: 2591273 - RNA, 19 nt, Homo sapiens
  misc_RNA (1)...(19): siRNA sense strand
gacaguugauugaugaaaa

SEQ ID NO: 2591274 - RNA, 19 nt, Homo sapiens
  misc_RNA (1)...(19): siRNA sense strand
gaauaagcuacuugcucau

SEQ ID NO: 2591275 - RNA, 19 nt, Homo sapiens
  misc_RNA (1)...(19): siRNA sense strand
gcuuauuaccaaagaacac

SEQ ID NO: 2591276 - RNA, 19 nt, Homo sapiens
  misc_RNA (1)...(19): siRNA sense strand
uucaaagaugugagagaga

SEQ ID NO: 2591277 - RNA, 19 nt, Homo sapiens
  misc_RNA (1)...(19): siRNA sense strand
gagagaaaagugaguuuau

SEQ ID NO: 2591278 - RNA, 19 nt, Homo sapiens
  misc_RNA (1)...(19): siRNA sense strand
ugaagagcauccaggaacu

SEQ ID NO: 2591279 - RNA, 19 nt, Homo sapiens
  misc_RNA (1)...(19): siRNA sense strand
cauccaggaacuuggcauu

SEQ ID NO: 2591280 - RNA, 19 nt, Homo sapiens
  misc_RNA (1)...(19): siRNA sense strand
gcuccuacuuagugaaccu

SEQ ID NO: 2591281 - RNA, 19 nt, Homo sapiens
  misc_RNA (1)...(19): siRNA sense strand
agaaauucauugugauggu

SEQ ID NO: 2591282 - RNA, 19 nt, Homo sapiens
  misc_RNA (1)...(19): siRNA sense strand
ggaaaagaugaggcaguua

SEQ ID NO: 2591283 - RNA, 19 nt, Homo sapiens
  misc_RNA (1)...(19): siRNA sense strand
gggacaguugauugaugaa

SEQ ID NO: 2591284 - RNA, 19 nt, Homo sapiens
  misc_RNA (1)...(19): siRNA sense strand
gaugaaaagaagaggaaaa

SEQ ID NO: 2591285 - RNA, 19 nt, Homo sapiens
  misc_RNA (1)...(19): siRNA sense strand
uugagaaggaccagauuau

SEQ ID NO: 2591286 - RNA, 19 nt, Homo sapiens
  misc_RNA (1)...(19): siRNA sense strand
uuaccaaggcagugaagga

SEQ ID NO: 2591287 - RNA, 19 nt, Homo sapiens
  misc_RNA (1)...(19): siRNA sense strand
aggcagugaaggagaguac

SEQ ID NO: 2591288 - RNA, 19 nt, Homo sapiens
  misc_RNA (1)...(19): siRNA sense strand
uuacauugcagcaggcaga

SEQ ID NO: 2591289 - RNA, 19 nt, Homo sapiens
  misc_RNA (1)...(19): siRNA sense strand
gaauaauugaugugagcac

SEQ ID NO: 2591290 - RNA, 19 nt, Homo sapiens
  misc_RNA (1)...(19): siRNA sense strand
ugaugugagcacuguuaaa

SEQ ID NO: 2591291 - RNA, 19 nt, Homo sapiens
  misc_RNA (1)...(19): siRNA sense strand
gaaaaugagaagaccguga

SEQ ID NO: 2591292 - RNA, 19 nt, Homo sapiens
  misc_RNA (1)...(19): siRNA sense strand
caggauuggacauugagaa

SEQ ID NO: 2591293 - RNA, 19 nt, Homo sapiens
  misc_RNA (1)...(19): siRNA sense strand
guauauaugacgaagggaa

SEQ ID NO: 2591294 - RNA, 19 nt, Homo sapiens
  misc_RNA (1)...(19): siRNA sense strand
ugauacuauaggagagaaa

SEQ ID NO: 2591295 - RNA, 19 nt, Homo sapiens
  misc_RNA (1)...(19): siRNA sense strand
uauuaauccuugaagccaa

SEQ ID NO: 2591296 - RNA, 19 nt, Homo sapiens
  misc_RNA (1)...(19): siRNA sense strand
aaagaagaacugagcccaa

SEQ ID NO: 2591297 - RNA, 19 nt, Homo sapiens
  misc_RNA (1)...(19): siRNA sense strand
gggcuaugggagaaguauu

SEQ ID NO: 2591298 - RNA, 19 nt, Homo sapiens
  misc_RNA (1)...(19): siRNA sense strand
gaaaagcauacgugggaau

SEQ ID NO: 2591299 - RNA, 19 nt, Homo sapiens
  misc_RNA (1)...(19): siRNA sense strand
acuuguaccuggaggaacu

SEQ ID NO: 2591300 - RNA, 19 nt, Homo sapiens
  misc_RNA (1)...(19): siRNA sense strand
cgugugggaauuacagaaa

SEQ ID NO: 2591301 - RNA, 19 nt, Homo sapiens
  misc_RNA (1)...(19): siRNA sense strand
agaaacuggagguuggaau

SEQ ID NO: 2591302 - RNA, 19 nt, Homo sapiens
  misc_RNA (1)...(19): siRNA sense strand
ugggagaaguauugcuguu

SEQ ID NO: 2591303 - RNA, 19 nt, Homo sapiens
  misc_RNA (1)...(19): siRNA sense strand
cauacgugggaauggcaaa

SEQ ID NO: 2591304 - RNA, 19 nt, Homo sapiens
  misc_RNA (1)...(19): siRNA sense strand
auuaauccuugaagccaaa

SEQ ID NO: 2591305 - RNA, 19 nt, Homo sapiens
  misc_RNA (1)...(19): siRNA sense strand
gcuuugaaauaucccggaa

SEQ ID NO: 2591306 - RNA, 19 nt, Homo sapiens
  misc_RNA (1)...(19): siRNA sense strand
ggaauacacaccaaggcuu

SEQ ID NO: 2591307 - RNA, 19 nt, Homo sapiens
  misc_RNA (1)...(19): siRNA sense strand
cuuuaguagcggucaucua

SEQ ID NO: 2591308 - RNA, 19 nt, Homo sapiens
  misc_RNA (1)...(19): siRNA sense strand
aagccaaagaucaacagaa

SEQ ID NO: 2591309 - RNA, 19 nt, Homo sapiens
  misc_RNA (1)...(19): siRNA sense strand
gggugauauugcaacacuu

SEQ ID NO: 2591310 - RNA, 19 nt, Homo sapiens
  misc_RNA (1)...(19): siRNA sense strand
gacagaaacuagagaccca

SEQ ID NO: 2591311 - RNA, 19 nt, Homo sapiens
  misc_RNA (1)...(19): siRNA sense strand
acauuaagaagauggccaa

SEQ ID NO: 2591312 - RNA, 19 nt, Homo sapiens
  misc_RNA (1)...(19): siRNA sense strand
uguggcugcuggugggaaa

SEQ ID NO: 2591313 - RNA, 19 nt, Homo sapiens
  misc_RNA (1)...(19): siRNA sense strand
cagaagaucaugauggagu

SEQ ID NO: 2591314 - RNA, 19 nt, Homo sapiens
  misc_RNA (1)...(19): siRNA sense strand
aacuagagacccaggagaa

SEQ ID NO: 2591315 - RNA, 19 nt, Homo sapiens
  misc_RNA (1)...(19): siRNA sense strand
auaugaaggaggagaugau

SEQ ID NO: 2591316 - RNA, 19 nt, Homo sapiens
  misc_RNA (1)...(19): siRNA sense strand
gggugaugaggaagaugaa

SEQ ID NO: 2591317 - RNA, 19 nt, Homo sapiens
  misc_RNA (1)...(19): siRNA sense strand
ugauggaguuugagcggca

SEQ ID NO: 2591318 - RNA, 19 nt, Homo sapiens
  misc_RNA (1)...(19): siRNA sense strand
ccaugggugaugaggaaga

SEQ ID NO: 2591319 - RNA, 19 nt, Homo sapiens
  misc_RNA (1)...(19): siRNA sense strand
ccaacaacucgauggcaca

SEQ ID NO: 2591320 - RNA, 19 nt, Homo sapiens
  misc_RNA (1)...(19): siRNA sense strand
gggccaacauccaggcugu

SEQ ID NO: 2591321 - RNA, 19 nt, Homo sapiens
  misc_RNA (1)...(19): siRNA sense strand
uggauaugaaggaggagau

SEQ ID NO: 2591322 - RNA, 19 nt, Homo sapiens
  misc_RNA (1)...(19): siRNA sense strand
caggcagagaucauggaua

SEQ ID NO: 2591323 - RNA, 19 nt, Homo sapiens
  misc_RNA (1)...(19): siRNA sense strand
ccaugaacagacagcugaa

SEQ ID NO: 2591324 - RNA, 19 nt, Homo sapiens
  misc_RNA (1)...(19): siRNA sense strand
gacagaaacuagagaccca

SEQ ID NO: 2591325 - RNA, 19 nt, Homo sapiens
  misc_RNA (1)...(19): siRNA sense strand
acauuaagaagauggccaa

SEQ ID NO: 2591326 - RNA, 19 nt, Homo sapiens
  misc_RNA (1)...(19): siRNA sense strand
uguggcugcuggugggaaa

SEQ ID NO: 2591327 - RNA, 19 nt, Homo sapiens
  misc_RNA (1)...(19): siRNA sense strand
cagaagaucaugauggagu

SEQ ID NO: 2591328 - RNA, 19 nt, Homo sapiens
  misc_RNA (1)...(19): siRNA sense strand
aacuagagacccaggagaa

SEQ ID NO: 2591329 - RNA, 19 nt, Homo sapiens
  misc_RNA (1)...(19): siRNA sense strand
auaugaaggaggagaugau

SEQ ID NO: 2591330 - RNA, 19 nt, Homo sapiens
  misc_RNA (1)...(19): siRNA sense strand
gggugaugaggaagaugaa

SEQ ID NO: 2591331 - RNA, 19 nt, Homo sapiens
  misc_RNA (1)...(19): siRNA sense strand
ugauggaguuugagcggca

SEQ ID NO: 2591332 - RNA, 19 nt, Homo sapiens
  misc_RNA (1)...(19): siRNA sense strand
ccaugggugaugaggaaga

SEQ ID NO: 2591333 - RNA, 19 nt, Homo sapiens
  misc_RNA (1)...(19): siRNA sense strand
ccaacaacucgauggcaca

SEQ ID NO: 2591334 - RNA, 19 nt, Homo sapiens
  misc_RNA (1)...(19): siRNA sense strand
gggccaacauccaggcugu

SEQ ID NO: 2591335 - RNA, 19 nt, Homo sapiens
  misc_RNA (1)...(19): siRNA sense strand
uggauaugaaggaggagau

SEQ ID NO: 2591336 - RNA, 19 nt, Homo sapiens
  misc_RNA (1)...(19): siRNA sense strand
caggcagagaucauggaua

SEQ ID NO: 2591337 - RNA, 19 nt, Homo sapiens
  misc_RNA (1)...(19): siRNA sense strand
ccaugaacagacagcugaa

SEQ ID NO: 2591338 - RNA, 19 nt, Homo sapiens
  misc_RNA (1)...(19): siRNA sense strand
aggcccaaauauugagaaa

SEQ ID NO: 2591339 - RNA, 19 nt, Homo sapiens
  misc_RNA (1)...(19): siRNA sense strand
aagccgagccacugggaaa

SEQ ID NO: 2591340 - RNA, 19 nt, Homo sapiens
  misc_RNA (1)...(19): siRNA sense strand
gcgucaugauuaaggaaga

SEQ ID NO: 2591341 - RNA, 19 nt, Homo sapiens
  misc_RNA (1)...(19): siRNA sense strand
augugaaugucaaggaaaa

SEQ ID NO: 2591342 - RNA, 19 nt, Homo sapiens
  misc_RNA (1)...(19): siRNA sense strand
agaagaaagcagaagaacu

SEQ ID NO: 2591343 - RNA, 19 nt, Homo sapiens
  misc_RNA (1)...(19): siRNA sense strand
cgucaugauuaaggaagaa

SEQ ID NO: 2591344 - RNA, 19 nt, Homo sapiens
  misc_RNA (1)...(19): siRNA sense strand
guaaauaugacgaggagcu

SEQ ID NO: 2591345 - RNA, 19 nt, Homo sapiens
  misc_RNA (1)...(19): siRNA sense strand
ggaaugaagccgagccacu

SEQ ID NO: 2591346 - RNA, 19 nt, Homo sapiens
  misc_RNA (1)...(19): siRNA sense strand
agaaagcagaagaacuaaa

SEQ ID NO: 2591347 - RNA, 19 nt, Homo sapiens
  misc_RNA (1)...(19): siRNA sense strand
aaagaagaagccauggaaa

SEQ ID NO: 2591348 - RNA, 19 nt, Homo sapiens
  misc_RNA (1)...(19): siRNA sense strand
cagacuacugcaacagaaa

SEQ ID NO: 2591349 - RNA, 19 nt, Homo sapiens
  misc_RNA (1)...(19): siRNA sense strand
cgcagcaaccucugggaaa

SEQ ID NO: 2591350 - RNA, 19 nt, Homo sapiens
  misc_RNA (1)...(19): siRNA sense strand
gugcaauucaaguucuaaa

SEQ ID NO: 2591351 - RNA, 19 nt, Homo sapiens
  misc_RNA (1)...(19): siRNA sense strand
ccaagcagcaucaaggcaa

SEQ ID NO: 2591352 - RNA, 19 nt, Homo sapiens
  misc_RNA (1)...(19): siRNA sense strand
aggcaacaaagaugcuaaa

SEQ ID NO: 2591353 - RNA, 19 nt, Homo sapiens
  misc_RNA (1)...(19): siRNA sense strand
gauuaaggaagaaguggau

SEQ ID NO: 2591354 - RNA, 19 nt, Homo sapiens
  misc_RNA (1)...(19): siRNA sense strand
cuaacuagauaucgcguca

SEQ ID NO: 2591355 - RNA, 19 nt, Homo sapiens
  misc_RNA (1)...(19): siRNA sense strand
cugaaggcaaagcggcaaa

SEQ ID NO: 2591356 - RNA, 19 nt, Homo sapiens
  misc_RNA (1)...(19): siRNA sense strand
uggauaguuccgugaagaa

SEQ ID NO: 2591357 - RNA, 19 nt, Homo sapiens
  misc_RNA (1)...(19): siRNA sense strand
ccacaguaucauaacaaca

SEQ ID NO: 2591358 - RNA, 19 nt, Homo sapiens
  misc_RNA (1)...(19): siRNA sense strand
caugugaaugucaaggaaa

SEQ ID NO: 2591359 - RNA, 19 nt, Homo sapiens
  misc_RNA (1)...(19): siRNA sense strand
ggguagugucgguaggguu

SEQ ID NO: 2591360 - RNA, 19 nt, Homo sapiens
  misc_RNA (1)...(19): siRNA sense strand
gagaauagaaguuuccaca

SEQ ID NO: 2591361 - RNA, 19 nt, Homo sapiens
  misc_RNA (1)...(19): siRNA sense strand
cggagaaauuacacaucca

SEQ ID NO: 2591362 - RNA, 19 nt, Homo sapiens
  misc_RNA (1)...(19): siRNA sense strand
cgaacucagggcagaaauu

SEQ ID NO: 2591363 - RNA, 19 nt, Homo sapiens
  misc_RNA (1)...(19): siRNA sense strand
gcuaaagacaagguggaga

SEQ ID NO: 2591364 - RNA, 19 nt, Homo sapiens
  misc_RNA (1)...(19): siRNA sense strand
ucgaacagcugaaggccca

SEQ ID NO: 2591365 - RNA, 19 nt, Homo sapiens
  misc_RNA (1)...(19): siRNA sense strand
auacauggaacaacagaga

SEQ ID NO: 2591366 - RNA, 19 nt, Homo sapiens
  misc_RNA (1)...(19): siRNA sense strand
ggaaaagaucuaugcaguu

SEQ ID NO: 2591367 - RNA, 19 nt, Homo sapiens
  misc_RNA (1)...(19): siRNA sense strand
aaucaugcucugcggagaa

SEQ ID NO: 2591368 - RNA, 19 nt, Homo sapiens
  misc_RNA (1)...(19): siRNA sense strand
cgugcaagccuuuguggau

SEQ ID NO: 2591369 - RNA, 19 nt, Homo sapiens
  misc_RNA (1)...(19): siRNA sense strand
aggcaacagacuacugcaa

SEQ ID NO: 2591370 - RNA, 19 nt, Homo sapiens
  misc_RNA (1)...(19): siRNA sense strand
agaugaguuggcaaagaaa

SEQ ID NO: 2591371 - RNA, 19 nt, Homo sapiens
  misc_RNA (1)...(19): siRNA sense strand
uugagaaaucagugaagga

SEQ ID NO: 2591372 - RNA, 19 nt, Homo sapiens
  misc_RNA (1)...(19): siRNA sense strand
agcagaagaacuaaagaga

SEQ ID NO: 2591373 - RNA, 19 nt, Homo sapiens
  misc_RNA (1)...(19): siRNA sense strand
ccaacaagcagaauggauc

SEQ ID NO: 2591374 - RNA, 19 nt, Homo sapiens
  misc_RNA (1)...(19): siRNA sense strand
cagugcaauucaaguucua

SEQ ID NO: 2591375 - RNA, 19 nt, Homo sapiens
  misc_RNA (1)...(19): siRNA sense strand
cauccaaagaacaacuauu

SEQ ID NO: 2591376 - RNA, 19 nt, Homo sapiens
  misc_RNA (1)...(19): siRNA sense strand
aggaaaagaucuaugcagu

SEQ ID NO: 2591377 - RNA, 19 nt, Homo sapiens
  misc_RNA (1)...(19): siRNA sense strand
acuuaaggaggcagagaaa

SEQ ID NO: 2591378 - RNA, 19 nt, Homo sapiens
  misc_RNA (1)...(19): siRNA sense strand
agaaggagcuugaggagga

SEQ ID NO: 2591379 - RNA, 19 nt, Homo sapiens
  misc_RNA (1)...(19): siRNA sense strand
aagaagaagaaaugagaca

SEQ ID NO: 2591380 - RNA, 19 nt, Homo sapiens
  misc_RNA (1)...(19): siRNA sense strand
agaaaguggaagacaagaa

SEQ ID NO: 2591381 - RNA, 19 nt, Homo sapiens
  misc_RNA (1)...(19): siRNA sense strand
ugagacaggcauuggcaaa

SEQ ID NO: 2591382 - RNA, 19 nt, Homo sapiens
  misc_RNA (1)...(19): siRNA sense strand
gauuuggagaccagauaaa

SEQ ID NO: 2591383 - RNA, 19 nt, Homo sapiens
  misc_RNA (1)...(19): siRNA sense strand
aguuaugagcuucaggaaa

SEQ ID NO: 2591384 - RNA, 19 nt, Homo sapiens
  misc_RNA (1)...(19): siRNA sense strand
ccaagaaugaacugcacaa

SEQ ID NO: 2591385 - RNA, 19 nt, Homo sapiens
  misc_RNA (1)...(19): siRNA sense strand
guuaaaagccagaaguuau

SEQ ID NO: 2591386 - RNA, 19 nt, Homo sapiens
  misc_RNA (1)...(19): siRNA sense strand
agccagaaguuaugagcuu

SEQ ID NO: 2591387 - RNA, 19 nt, Homo sapiens
  misc_RNA (1)...(19): siRNA sense strand
uuaugagagugaaggagaa

SEQ ID NO: 2591388 - RNA, 19 nt, Homo sapiens
  misc_RNA (1)...(19): siRNA sense strand
ccuuuguguuggugagaca

SEQ ID NO: 2591389 - RNA, 19 nt, Homo sapiens
  misc_RNA (1)...(19): siRNA sense strand
augaagaaacgguggcaga

SEQ ID NO: 2591390 - RNA, 19 nt, Homo sapiens
  misc_RNA (1)...(19): siRNA sense strand
uugaggaggaggugaacaa

SEQ ID NO: 2591391 - RNA, 19 nt, Homo sapiens
  misc_RNA (1)...(19): siRNA sense strand
ugagagugaaggagaaaga

SEQ ID NO: 2591392 - RNA, 19 nt, Homo sapiens
  misc_RNA (1)...(19): siRNA sense strand
aaguggaagacaagaagaa

SEQ ID NO: 2591393 - RNA, 19 nt, Homo sapiens
  misc_RNA (1)...(19): siRNA sense strand
aggcagagaaagagcuuca

SEQ ID NO: 2591394 - RNA, 19 nt, Homo sapiens
  misc_RNA (1)...(19): siRNA sense strand
agaagaaagcagcggcuca

SEQ ID NO: 2591395 - RNA, 19 nt, Homo sapiens
  misc_RNA (1)...(19): siRNA sense strand
cagaagaaagaagaagaaa

SEQ ID NO: 2591396 - RNA, 19 nt, Homo sapiens
  misc_RNA (1)...(19): siRNA sense strand
gagaaagagcuucacgaga

SEQ ID NO: 2591397 - RNA, 19 nt, Homo sapiens
  misc_RNA (1)...(19): siRNA sense strand
guuaugagagugaaggaga

SEQ ID NO: 2591398 - RNA, 19 nt, Homo sapiens
  misc_RNA (1)...(19): siRNA sense strand
accaagaaagacaaggaua

SEQ ID NO: 2591399 - RNA, 19 nt, Homo sapiens
  misc_RNA (1)...(19): siRNA sense strand
gguuaaaagccagaaguua

SEQ ID NO: 2591400 - RNA, 19 nt, Homo sapiens
  misc_RNA (1)...(19): siRNA sense strand
aaaagaagaaaguggaaga

SEQ ID NO: 2591401 - RNA, 19 nt, Homo sapiens
  misc_RNA (1)...(19): siRNA sense strand
acauggaggacuugcgaga

SEQ ID NO: 2591402 - RNA, 19 nt, Homo sapiens
  misc_RNA (1)...(19): siRNA sense strand
agaaacgguggcagagauu

SEQ ID NO: 2591403 - RNA, 19 nt, Homo sapiens
  misc_RNA (1)...(19): siRNA sense strand
gugcagguugagaaugaaa

SEQ ID NO: 2591404 - RNA, 19 nt, Homo sapiens
  misc_RNA (1)...(19): siRNA sense strand
aguaagaucaugagugaac

SEQ ID NO: 2591405 - RNA, 19 nt, Homo sapiens
  misc_RNA (1)...(19): siRNA sense strand
uggaagacaagaagaagga

SEQ ID NO: 2591406 - RNA, 19 nt, Homo sapiens
  misc_RNA (1)...(19): siRNA sense strand
ugcaagaggaauugaagau

SEQ ID NO: 2591407 - RNA, 19 nt, Homo sapiens
  misc_RNA (1)...(19): siRNA sense strand
cacaaauucaagaguaaga

SEQ ID NO: 2591408 - RNA, 19 nt, Homo sapiens
  misc_RNA (1)...(19): siRNA sense strand
ccuaccugcaagaggaauu

SEQ ID NO: 2591409 - RNA, 19 nt, Homo sapiens
  misc_RNA (1)...(19): siRNA sense strand
cuguaagcuugaagagaug

SEQ ID NO: 2591410 - RNA, 19 nt, Homo sapiens
  misc_RNA (1)...(19): siRNA sense strand
gggagaacugcagaagaaa

SEQ ID NO: 2591411 - RNA, 19 nt, Homo sapiens
  misc_RNA (1)...(19): siRNA sense strand
aggugaagauuggcaacaa

SEQ ID NO: 2591412 - RNA, 19 nt, Homo sapiens
  misc_RNA (1)...(19): siRNA sense strand
aggagacauaugaagcaaa

SEQ ID NO: 2591413 - RNA, 19 nt, Homo sapiens
  misc_RNA (1)...(19): siRNA sense strand
ucacaaugaaccagguguu

SEQ ID NO: 2591414 - RNA, 19 nt, Homo sapiens
  misc_RNA (1)...(19): siRNA sense strand
agaaaagaagaaaguggaa

SEQ ID NO: 2591415 - RNA, 19 nt, Homo sapiens
  misc_RNA (1)...(19): siRNA sense strand
uuguugacaccgugggauu

SEQ ID NO: 2591416 - RNA, 19 nt, Homo sapiens
  misc_RNA (1)...(19): siRNA sense strand
uuuggagaccagauaaaua

SEQ ID NO: 2591417 - RNA, 19 nt, Homo sapiens
  misc_RNA (1)...(19): siRNA sense strand
augcccaguucgaggccua

SEQ ID NO: 2591418 - RNA, 19 nt, Homo sapiens
  misc_RNA (1)...(19): siRNA sense strand
cugcaagaggaauugaaga

SEQ ID NO: 2591419 - RNA, 19 nt, Homo sapiens
  misc_RNA (1)...(19): siRNA sense strand
ugaaggagaaagaagcuga

SEQ ID NO: 2591420 - RNA, 19 nt, Homo sapiens
  misc_RNA (1)...(19): siRNA sense strand
accaagaagaaaagaagaa

SEQ ID NO: 2591421 - RNA, 19 nt, Homo sapiens
  misc_RNA (1)...(19): siRNA sense strand
agcuugaggaggaggugaa

SEQ ID NO: 2591422 - RNA, 19 nt, Homo sapiens
  misc_RNA (1)...(19): siRNA sense strand
cagcaaugggguccagaua

SEQ ID NO: 2591423 - RNA, 19 nt, Homo sapiens
  misc_RNA (1)...(19): siRNA sense strand
ugucuggccaugugggauu

SEQ ID NO: 2591424 - RNA, 19 nt, Homo sapiens
  misc_RNA (1)...(19): siRNA sense strand
uagaauauauugaugccca

SEQ ID NO: 2591425 - RNA, 19 nt, Homo sapiens
  misc_RNA (1)...(19): siRNA sense strand
aagaaugaacugcacaaau

SEQ ID NO: 2591426 - RNA, 19 nt, Homo sapiens
  misc_RNA (1)...(19): siRNA sense strand
cuggagagucuguggaaga

SEQ ID NO: 2591427 - RNA, 19 nt, Homo sapiens
  misc_RNA (1)...(19): siRNA sense strand
cggaucaggccuaugccaa

SEQ ID NO: 2591428 - RNA, 19 nt, Homo sapiens
  misc_RNA (1)...(19): siRNA sense strand
ucgagaaaaugcaggagaa

SEQ ID NO: 2591429 - RNA, 19 nt, Homo sapiens
  misc_RNA (1)...(19): siRNA sense strand
aagcaaugggaacgagcaa

SEQ ID NO: 2591430 - RNA, 19 nt, Homo sapiens
  misc_RNA (1)...(19): siRNA sense strand
aaaagaacgaggaggagaa

SEQ ID NO: 2591431 - RNA, 19 nt, Homo sapiens
  misc_RNA (1)...(19): siRNA sense strand
augcaggagaagcggcaaa

SEQ ID NO: 2591432 - RNA, 19 nt, Homo sapiens
  misc_RNA (1)...(19): siRNA sense strand
agcagagaguggaggacuu

SEQ ID NO: 2591433 - RNA, 19 nt, Homo sapiens
  misc_RNA (1)...(19): siRNA sense strand
aggacaaagacaaagcgaa

SEQ ID NO: 2591434 - RNA, 19 nt, Homo sapiens
  misc_RNA (1)...(19): siRNA sense strand
aaaagaaggacaaagacaa

SEQ ID NO: 2591435 - RNA, 19 nt, Homo sapiens
  misc_RNA (1)...(19): siRNA sense strand
cuaaagaaggcauccaaaa

SEQ ID NO: 2591436 - RNA, 19 nt, Homo sapiens
  misc_RNA (1)...(19): siRNA sense strand
acaaagacaaagcgaaacu

SEQ ID NO: 2591437 - RNA, 19 nt, Homo sapiens
  misc_RNA (1)...(19): siRNA sense strand
gugaccaagcggaagaaga

SEQ ID NO: 2591438 - RNA, 19 nt, Homo sapiens
  misc_RNA (1)...(19): siRNA sense strand
ugggagugaccaagcggaa

SEQ ID NO: 2591439 - RNA, 19 nt, Homo sapiens
  misc_RNA (1)...(19): siRNA sense strand
ggcucaaggugguaggcua

SEQ ID NO: 2591440 - RNA, 19 nt, Homo sapiens
  misc_RNA (1)...(19): siRNA sense strand
accgagaagcauuuggaaa

SEQ ID NO: 2591441 - RNA, 19 nt, Homo sapiens
  misc_RNA (1)...(19): siRNA sense strand
acaugaggcucgaagcuga

SEQ ID NO: 2591442 - RNA, 19 nt, Homo sapiens
  misc_RNA (1)...(19): siRNA sense strand
gugcggaugauguggccua

SEQ ID NO: 2591443 - RNA, 19 nt, Homo sapiens
  misc_RNA (1)...(19): siRNA sense strand
aagcaguaugucaggauuu

SEQ ID NO: 2591444 - RNA, 19 nt, Homo sapiens
  misc_RNA (1)...(19): siRNA sense strand
agcugaagcaguuguaaau

SEQ ID NO: 2591445 - RNA, 19 nt, Homo sapiens
  misc_RNA (1)...(19): siRNA sense strand
acauaaggguggagggcuu

SEQ ID NO: 2591446 - RNA, 19 nt, Homo sapiens
  misc_RNA (1)...(19): siRNA sense strand
acauaggaguuaagggaau

SEQ ID NO: 2591447 - RNA, 19 nt, Homo sapiens
  misc_RNA (1)...(19): siRNA sense strand
acgaaaugcuggagcgcuu

SEQ ID NO: 2591448 - RNA, 19 nt, Homo sapiens
  misc_RNA (1)...(19): siRNA sense strand
ggaugaagucagagaagca

SEQ ID NO: 2591449 - RNA, 19 nt, Homo sapiens
  misc_RNA (1)...(19): siRNA sense strand
cgacauaaguuguaagggu

SEQ ID NO: 2591450 - RNA, 19 nt, Homo sapiens
  misc_RNA (1)...(19): siRNA sense strand
gggacugggagaagaagaa

SEQ ID NO: 2591451 - RNA, 19 nt, Homo sapiens
  misc_RNA (1)...(19): siRNA sense strand
gggccuauuuccugagaca

SEQ ID NO: 2591452 - RNA, 19 nt, Homo sapiens
  misc_RNA (1)...(19): siRNA sense strand
agacaaggcugaugggaag

SEQ ID NO: 2591453 - RNA, 19 nt, Homo sapiens
  misc_RNA (1)...(19): siRNA sense strand
cagagguugucguuggaaa

SEQ ID NO: 2591454 - RNA, 19 nt, Homo sapiens
  misc_RNA (1)...(19): siRNA sense strand
aaucagacgccgagguuga

SEQ ID NO: 2591455 - RNA, 19 nt, Homo sapiens
  misc_RNA (1)...(19): siRNA sense strand
uagacaaggcugaugggaa

SEQ ID NO: 2591456 - RNA, 19 nt, Homo sapiens
  misc_RNA (1)...(19): siRNA sense strand
agguauauauugaagacga

SEQ ID NO: 2591457 - RNA, 19 nt, Homo sapiens
  misc_RNA (1)...(19): siRNA sense strand
uagacugggcagaggacaa

SEQ ID NO: 2591458 - RNA, 19 nt, Homo sapiens
  misc_RNA (1)...(19): siRNA sense strand
ugaaggaggugauggcuca

SEQ ID NO: 2591459 - RNA, 19 nt, Homo sapiens
  misc_RNA (1)...(19): siRNA sense strand
acgccgagguugagagauc

SEQ ID NO: 2591460 - RNA, 19 nt, Homo sapiens
  misc_RNA (1)...(19): siRNA sense strand
cggaaaaucuuguucguga

SEQ ID NO: 2591461 - RNA, 19 nt, Homo sapiens
  misc_RNA (1)...(19): siRNA sense strand
cugagagagcaaaggauga

SEQ ID NO: 2591462 - RNA, 19 nt, Homo sapiens
  misc_RNA (1)...(19): siRNA sense strand
agacaauaggugcagguau

SEQ ID NO: 2591463 - RNA, 19 nt, Homo sapiens
  misc_RNA (1)...(19): siRNA sense strand
gggauaacacggaaagaac

SEQ ID NO: 2591464 - RNA, 19 nt, Homo sapiens
  misc_RNA (1)...(19): siRNA sense strand
cucuagacguggacgaaau

SEQ ID NO: 2591465 - RNA, 19 nt, Homo sapiens
  misc_RNA (1)...(19): siRNA sense strand
aagacgaaguuccgggaga

SEQ ID NO: 2591466 - RNA, 19 nt, Homo sapiens
  misc_RNA (1)...(19): siRNA sense strand
gcuaacgagaagagagcca

SEQ ID NO: 2591467 - RNA, 19 nt, Homo sapiens
  misc_RNA (1)...(19): siRNA sense strand
agaagagagccaaggaguu

SEQ ID NO: 2591468 - RNA, 19 nt, Homo sapiens
  misc_RNA (1)...(19): siRNA sense strand
agguaauaaaggagaaucu

SEQ ID NO: 2591469 - RNA, 19 nt, Homo sapiens
  misc_RNA (1)...(19): siRNA sense strand
gcuaaguugcuguacacaa

SEQ ID NO: 2591470 - RNA, 19 nt, Homo sapiens
  misc_RNA (1)...(19): siRNA sense strand
ugugugaggcuuugaggaa

SEQ ID NO: 2591471 - RNA, 19 nt, Homo sapiens
  misc_RNA (1)...(19): siRNA sense strand
cuuaaaugcaguagacguu

SEQ ID NO: 2591472 - RNA, 19 nt, Homo sapiens
  misc_RNA (1)...(19): siRNA sense strand
ugaggaaaccacugugcaa

SEQ ID NO: 2591473 - RNA, 19 nt, Homo sapiens
  misc_RNA (1)...(19): siRNA sense strand
gagaagagagccaaggagu

SEQ ID NO: 2591474 - RNA, 19 nt, Homo sapiens
  misc_RNA (1)...(19): siRNA sense strand
ucacauaggaguuaaggga

SEQ ID NO: 2591475 - RNA, 19 nt, Homo sapiens
  misc_RNA (1)...(19): siRNA sense strand
aggaggaggagcuggugaa

SEQ ID NO: 2591476 - RNA, 19 nt, Homo sapiens
  misc_RNA (1)...(19): siRNA sense strand
gcuuuggaacugcgacaua

SEQ ID NO: 2591477 - RNA, 19 nt, Homo sapiens
  misc_RNA (1)...(19): siRNA sense strand
cccacaaggagguagacaa

SEQ ID NO: 2591478 - RNA, 19 nt, Homo sapiens
  misc_RNA (1)...(19): siRNA sense strand
cugaauugcaggaugacau

SEQ ID NO: 2591479 - RNA, 19 nt, Homo sapiens
  misc_RNA (1)...(19): siRNA sense strand
cggacaucaaacaggaauu

SEQ ID NO: 2591480 - RNA, 19 nt, Homo sapiens
  misc_RNA (1)...(19): siRNA sense strand
ccgcauugugugaggucuu

SEQ ID NO: 2591481 - RNA, 19 nt, Homo sapiens
  misc_RNA (1)...(19): siRNA sense strand
aguguaaacugcagaccuu

SEQ ID NO: 2591482 - RNA, 19 nt, Homo sapiens
  misc_RNA (1)...(19): siRNA sense strand
gugugaggcuuugaggaaa

SEQ ID NO: 2591483 - RNA, 19 nt, Homo sapiens
  misc_RNA (1)...(19): siRNA sense strand
gaucugucugagagagcaa

SEQ ID NO: 2591484 - RNA, 19 nt, Homo sapiens
  misc_RNA (1)...(19): siRNA sense strand
gccaggaugaguugagcaa

SEQ ID NO: 2591485 - RNA, 19 nt, Homo sapiens
  misc_RNA (1)...(19): siRNA sense strand
aggacaaccucauccacaa

SEQ ID NO: 2591486 - RNA, 19 nt, Homo sapiens
  misc_RNA (1)...(19): siRNA sense strand
gggaagcaacugguagaaa

SEQ ID NO: 2591487 - RNA, 19 nt, Homo sapiens
  misc_RNA (1)...(19): siRNA sense strand
ugacagaccugcaggagcu

SEQ ID NO: 2591488 - RNA, 19 nt, Homo sapiens
  misc_RNA (1)...(19): siRNA sense strand
ggcucaguucaaagaaaua

SEQ ID NO: 2591489 - RNA, 19 nt, Homo sapiens
  misc_RNA (1)...(19): siRNA sense strand
uuguaaggguggacauuca

SEQ ID NO: 2591490 - RNA, 19 nt, Homo sapiens
  misc_RNA (1)...(19): siRNA sense strand
gucgaaaccugcagaaaau

SEQ ID NO: 2591491 - RNA, 19 nt, Homo sapiens
  misc_RNA (1)...(19): siRNA sense strand
gagcaaaggaugaagucag

SEQ ID NO: 2591492 - RNA, 19 nt, Homo sapiens
  misc_RNA (1)...(19): siRNA sense strand
ugucacugcagguaauaaa

SEQ ID NO: 2591493 - RNA, 19 nt, Homo sapiens
  misc_RNA (1)...(19): siRNA sense strand
uggcucaguucaaagaaau

SEQ ID NO: 2591494 - RNA, 19 nt, Homo sapiens
  misc_RNA (1)...(19): siRNA sense strand
caguagacguugugccauc

SEQ ID NO: 2591495 - RNA, 19 nt, Homo sapiens
  misc_RNA (1)...(19): siRNA sense strand
ugucgaaaccugcagaaaa

SEQ ID NO: 2591496 - RNA, 19 nt, Homo sapiens
  misc_RNA (1)...(19): siRNA sense strand
gauaacacggaaagaacga

SEQ ID NO: 2591497 - RNA, 19 nt, Homo sapiens
  misc_RNA (1)...(19): siRNA sense strand
uacagaaacgaaaggaaau

SEQ ID NO: 2591498 - RNA, 19 nt, Homo sapiens
  misc_RNA (1)...(19): siRNA sense strand
uugaaaagaugcaccgaau

SEQ ID NO: 2591499 - RNA, 19 nt, Homo sapiens
  misc_RNA (1)...(19): siRNA sense strand
ugugugagggcuugaggua

SEQ ID NO: 2591500 - RNA, 19 nt, Homo sapiens
  misc_RNA (1)...(19): siRNA sense strand
caugcgugccuuugagcua

SEQ ID NO: 2591501 - RNA, 19 nt, Homo sapiens
  misc_RNA (1)...(19): siRNA sense strand
aagaaauaucccugcacuu

SEQ ID NO: 2591502 - RNA, 19 nt, Homo sapiens
  misc_RNA (1)...(19): siRNA sense strand
ccacaaggagguagacaag

SEQ ID NO: 2591503 - RNA, 19 nt, Homo sapiens
  misc_RNA (1)...(19): siRNA sense strand
ugagguaccccgaguguaa

SEQ ID NO: 2591504 - RNA, 19 nt, Homo sapiens
  misc_RNA (1)...(19): siRNA sense strand
ggucuaguggagugaagau

SEQ ID NO: 2591505 - RNA, 19 nt, Homo sapiens
  misc_RNA (1)...(19): siRNA sense strand
auaagcugcuggaagaaau

SEQ ID NO: 2591506 - RNA, 19 nt, Homo sapiens
  misc_RNA (1)...(19): siRNA sense strand
aaacagaagcacaagcguu

SEQ ID NO: 2591507 - RNA, 19 nt, Homo sapiens
  misc_RNA (1)...(19): siRNA sense strand
aacagaagcacaagcguuu

SEQ ID NO: 2591508 - RNA, 19 nt, Homo sapiens
  misc_RNA (1)...(19): siRNA sense strand
ggagaaugucacugcgucu

SEQ ID NO: 2591509 - RNA, 19 nt, Homo sapiens
  misc_RNA (1)...(19): siRNA sense strand
cagcaugaacauaaagaua

SEQ ID NO: 2591510 - RNA, 19 nt, Homo sapiens
  misc_RNA (1)...(19): siRNA sense strand
gaaucaaagaauuggguau

SEQ ID NO: 2591511 - RNA, 19 nt, Homo sapiens
  misc_RNA (1)...(19): siRNA sense strand
guuuaaaagaagagggcaa

SEQ ID NO: 2591512 - RNA, 19 nt, Homo sapiens
  misc_RNA (1)...(19): siRNA sense strand
ccaaagaacagaagagagu

SEQ ID NO: 2591513 - RNA, 19 nt, Homo sapiens
  misc_RNA (1)...(19): siRNA sense strand
gcaguagaccugagagaau

SEQ ID NO: 2591514 - RNA, 19 nt, Homo sapiens
  misc_RNA (1)...(19): siRNA sense strand
acuaaaagauguuggcuua

SEQ ID NO: 2591515 - RNA, 19 nt, Homo sapiens
  misc_RNA (1)...(19): siRNA sense strand
ugauaagugacauggguaa

SEQ ID NO: 2591516 - RNA, 19 nt, Homo sapiens
  misc_RNA (1)...(19): siRNA sense strand
ggguagaugcugaagaaaa

SEQ ID NO: 2591517 - RNA, 19 nt, Homo sapiens
  misc_RNA (1)...(19): siRNA sense strand
caguaaacacaguggauca

SEQ ID NO: 2591518 - RNA, 19 nt, Homo sapiens
  misc_RNA (1)...(19): siRNA sense strand
ccuuaaggauaaugaugua

SEQ ID NO: 2591519 - RNA, 19 nt, Homo sapiens
  misc_RNA (1)...(19): siRNA sense strand
gugcagaauauaaagcaua

SEQ ID NO: 2591520 - RNA, 19 nt, Homo sapiens
  misc_RNA (1)...(19): siRNA sense strand
ugagagaauacguggauau

SEQ ID NO: 2591521 - RNA, 19 nt, Homo sapiens
  misc_RNA (1)...(19): siRNA sense strand
cguuaauaguugugccuca

SEQ ID NO: 2591522 - RNA, 19 nt, Homo sapiens
  misc_RNA (1)...(19): siRNA sense strand
uugccgagcaugugggaaa

SEQ ID NO: 2591523 - RNA, 19 nt, Homo sapiens
  misc_RNA (1)...(19): siRNA sense strand
agaaacaagcuauggaaca

SEQ ID NO: 2591524 - RNA, 19 nt, Homo sapiens
  misc_RNA (1)...(19): siRNA sense strand
gauccugaccagacaguaa

SEQ ID NO: 2591525 - RNA, 19 nt, Homo sapiens
  misc_RNA (1)...(19): siRNA sense strand
caaugagacaggagauauu

SEQ ID NO: 2591526 - RNA, 19 nt, Homo sapiens
  misc_RNA (1)...(19): siRNA sense strand
aguuuagaccuuaaggaua

SEQ ID NO: 2591527 - RNA, 19 nt, Homo sapiens
  misc_RNA (1)...(19): siRNA sense strand
cuucagaccacuaacauaa

SEQ ID NO: 2591528 - RNA, 19 nt, Homo sapiens
  misc_RNA (1)...(19): siRNA sense strand
gggccagaccuaagcaauu

SEQ ID NO: 2591529 - RNA, 19 nt, Homo sapiens
  misc_RNA (1)...(19): siRNA sense strand
aaagaacagaagagaguau

SEQ ID NO: 2591530 - RNA, 19 nt, Homo sapiens
  misc_RNA (1)...(19): siRNA sense strand
guauacagaaugauggaau

SEQ ID NO: 2591531 - RNA, 19 nt, Homo sapiens
  misc_RNA (1)...(19): siRNA sense strand
aaauaaaacuggaagcaga

SEQ ID NO: 2591532 - RNA, 19 nt, Homo sapiens
  misc_RNA (1)...(19): siRNA sense strand
gagaguucccugaaugaaa

SEQ ID NO: 2591533 - RNA, 19 nt, Homo sapiens
  misc_RNA (1)...(19): siRNA sense strand
ucagagaacaacagaauga

SEQ ID NO: 2591534 - RNA, 19 nt, Homo sapiens
  misc_RNA (1)...(19): siRNA sense strand
aagacaagcuacaacacaa

SEQ ID NO: 2591535 - RNA, 19 nt, Homo sapiens
  misc_RNA (1)...(19): siRNA sense strand
agucauuaauugaagggau

SEQ ID NO: 2591536 - RNA, 19 nt, Homo sapiens
  misc_RNA (1)...(19): siRNA sense strand
ugucagagaacaacagaau

SEQ ID NO: 2591537 - RNA, 19 nt, Homo sapiens
  misc_RNA (1)...(19): siRNA sense strand
gcaaagaaggcuugguuuu

SEQ ID NO: 2591538 - RNA, 19 nt, Homo sapiens
  misc_RNA (1)...(19): siRNA sense strand
uggugaaguugcagauaca

SEQ ID NO: 2591539 - RNA, 19 nt, Homo sapiens
  misc_RNA (1)...(19): siRNA sense strand
acaaauaacuccagagacc

SEQ ID NO: 2591540 - RNA, 19 nt, Homo sapiens
  misc_RNA (1)...(19): siRNA sense strand
cuauaauuacaguggaaca

SEQ ID NO: 2591541 - RNA, 19 nt, Homo sapiens
  misc_RNA (1)...(19): siRNA sense strand
gagauaauucagaguccua

SEQ ID NO: 2591542 - RNA, 19 nt, Homo sapiens
  misc_RNA (1)...(19): siRNA sense strand
ugauacugucagagaacaa

SEQ ID NO: 2591543 - RNA, 19 nt, Homo sapiens
  misc_RNA (1)...(19): siRNA sense strand
gauucaaauucaagagaug

SEQ ID NO: 2591544 - RNA, 19 nt, Homo sapiens
  misc_RNA (1)...(19): siRNA sense strand
cuggguagaugcugaagaa

SEQ ID NO: 2591545 - RNA, 19 nt, Homo sapiens
  misc_RNA (1)...(19): siRNA sense strand
gauagauaugaaaggcuua

SEQ ID NO: 2591546 - RNA, 19 nt, Homo sapiens
  misc_RNA (1)...(19): siRNA sense strand
caggaagauaagacuguua

SEQ ID NO: 2591547 - RNA, 19 nt, Homo sapiens
  misc_RNA (1)...(19): siRNA sense strand
agauagauaugaaaggcuu

SEQ ID NO: 2591548 - RNA, 19 nt, Homo sapiens
  misc_RNA (1)...(19): siRNA sense strand
gcuccaaacuguaugaacu

SEQ ID NO: 2591549 - RNA, 19 nt, Homo sapiens
  misc_RNA (1)...(19): siRNA sense strand
gaguauguguagucugcua

SEQ ID NO: 2591550 - RNA, 19 nt, Homo sapiens
  misc_RNA (1)...(19): siRNA sense strand
uggcuuaaugguacaaaua

SEQ ID NO: 2591551 - RNA, 19 nt, Homo sapiens
  misc_RNA (1)...(19): siRNA sense strand
ccaucaagaacaaggaguu

SEQ ID NO: 2591552 - RNA, 19 nt, Homo sapiens
  misc_RNA (1)...(19): siRNA sense strand
acauagaaaacuuggacaa

SEQ ID NO: 2591553 - RNA, 19 nt, Homo sapiens
  misc_RNA (1)...(19): siRNA sense strand
agagaacaacagaaugaua

SEQ ID NO: 2591554 - RNA, 19 nt, Homo sapiens
  misc_RNA (1)...(19): siRNA sense strand
agaaaucggaggaaucaaa

SEQ ID NO: 2591555 - RNA, 19 nt, Homo sapiens
  misc_RNA (1)...(19): siRNA sense strand
ccaauagugaagaagauau

SEQ ID NO: 2591556 - RNA, 19 nt, Homo sapiens
  misc_RNA (1)...(19): siRNA sense strand
ccgaugagaagauuguaaa

SEQ ID NO: 2591557 - RNA, 19 nt, Homo sapiens
  misc_RNA (1)...(19): siRNA sense strand
gaauaaaauuggacucaga

SEQ ID NO: 2591558 - RNA, 19 nt, Homo sapiens
  misc_RNA (1)...(19): siRNA sense strand
acagaaagauagauccuga

SEQ ID NO: 2591559 - RNA, 19 nt, Homo sapiens
  misc_RNA (1)...(19): siRNA sense strand
uaugaaaggcuuagaugau

SEQ ID NO: 2591560 - RNA, 19 nt, Homo sapiens
  misc_RNA (1)...(19): siRNA sense strand
gaaaaggaagcaagaguau

SEQ ID NO: 2591561 - RNA, 19 nt, Homo sapiens
  misc_RNA (1)...(19): siRNA sense strand
gguucuaaucuuaagucua

SEQ ID NO: 2591562 - RNA, 19 nt, Homo sapiens
  misc_RNA (1)...(19): siRNA sense strand
gaucagugccuguaguaga

SEQ ID NO: 2591563 - RNA, 19 nt, Homo sapiens
  misc_RNA (1)...(19): siRNA sense strand
ggcaggaucugaaggccaa

SEQ ID NO: 2591564 - RNA, 19 nt, Homo sapiens
  misc_RNA (1)...(19): siRNA sense strand
ggacgauguaguaaaccua

SEQ ID NO: 2591565 - RNA, 19 nt, Homo sapiens
  misc_RNA (1)...(19): siRNA sense strand
guuccagauacaauagaaa

SEQ ID NO: 2591566 - RNA, 19 nt, Homo sapiens
  misc_RNA (1)...(19): siRNA sense strand
cuucgaaauuaccaguaua

SEQ ID NO: 2591567 - RNA, 19 nt, Homo sapiens
  misc_RNA (1)...(19): siRNA sense strand
gggacuuacuucuauacaa

SEQ ID NO: 2591568 - RNA, 19 nt, Homo sapiens
  misc_RNA (1)...(19): siRNA sense strand
uccuauaauuacaguggaa

SEQ ID NO: 2591569 - RNA, 19 nt, Homo sapiens
  misc_RNA (1)...(19): siRNA sense strand
aagggauggaagacagaaa

SEQ ID NO: 2591570 - RNA, 19 nt, Homo sapiens
  misc_RNA (1)...(19): siRNA sense strand
agaccuaagcaauuguuua

SEQ ID NO: 2591571 - RNA, 19 nt, Homo sapiens
  misc_RNA (1)...(19): siRNA sense strand
caaaauguuucaugccaaa

SEQ ID NO: 2591572 - RNA, 19 nt, Homo sapiens
  misc_RNA (1)...(19): siRNA sense strand
caaugauauggaugggcaa

SEQ ID NO: 2591573 - RNA, 19 nt, Homo sapiens
  misc_RNA (1)...(19): siRNA sense strand
uguaauaggaaguguaaac

SEQ ID NO: 2591574 - RNA, 19 nt, Homo sapiens
  misc_RNA (1)...(19): siRNA sense strand
gugucuuaguuaacagcaa

SEQ ID NO: 2591575 - RNA, 19 nt, Homo sapiens
  misc_RNA (1)...(19): siRNA sense strand
aaccaauagugaagaagau

SEQ ID NO: 2591576 - RNA, 19 nt, Homo sapiens
  misc_RNA (1)...(19): siRNA sense strand
gggauggaagacagaaaga

SEQ ID NO: 2591577 - RNA, 19 nt, Homo sapiens
  misc_RNA (1)...(19): siRNA sense strand
gcaaugauauggaugggca

SEQ ID NO: 2591578 - RNA, 19 nt, Homo sapiens
  misc_RNA (1)...(19): siRNA sense strand
acagaagagaguaugguuu

SEQ ID NO: 2591579 - RNA, 19 nt, Homo sapiens
  misc_RNA (1)...(19): siRNA sense strand
aguugugccucaucagaaa

SEQ ID NO: 2591580 - RNA, 19 nt, Homo sapiens
  misc_RNA (1)...(19): siRNA sense strand
agauaauggaguuggucuu

SEQ ID NO: 2591581 - RNA, 19 nt, Homo sapiens
  misc_RNA (1)...(19): siRNA sense strand
ugagaaaagucuacagcau

SEQ ID NO: 2591582 - RNA, 19 nt, Homo sapiens
  misc_RNA (1)...(19): siRNA sense strand
cgaucgaggacgacuucaa

SEQ ID NO: 2591583 - RNA, 19 nt, Homo sapiens
  misc_RNA (1)...(19): siRNA sense strand
ggucuuagccgcugcagga

SEQ ID NO: 2591584 - RNA, 19 nt, Homo sapiens
  misc_RNA (1)...(19): siRNA sense strand
agguuaaaguauugcacaa

SEQ ID NO: 2591585 - RNA, 19 nt, Homo sapiens
  misc_RNA (1)...(19): siRNA sense strand
cauuaaugacugugaaaca

SEQ ID NO: 2591586 - RNA, 19 nt, Homo sapiens
  misc_RNA (1)...(19): siRNA sense strand
gccagagaacacagacaaa

SEQ ID NO: 2591587 - RNA, 19 nt, Homo sapiens
  misc_RNA (1)...(19): siRNA sense strand
gaagcuaggccguggcuca

SEQ ID NO: 2591588 - RNA, 19 nt, Homo sapiens
  misc_RNA (1)...(19): siRNA sense strand
guacauacccaaaggcaac

SEQ ID NO: 2591589 - RNA, 19 nt, Homo sapiens
  misc_RNA (1)...(19): siRNA sense strand
gcucaagaacuguggaccu

SEQ ID NO: 2591590 - RNA, 19 nt, Homo sapiens
  misc_RNA (1)...(19): siRNA sense strand
ccgcuuacuuugcugggaa

SEQ ID NO: 2591591 - RNA, 19 nt, Homo sapiens
  misc_RNA (1)...(19): siRNA sense strand
agaacugaaucuuggacca

SEQ ID NO: 2591592 - RNA, 19 nt, Homo sapiens
  misc_RNA (1)...(19): siRNA sense strand
agugacuaguaauggagaa

SEQ ID NO: 2591593 - RNA, 19 nt, Homo sapiens
  misc_RNA (1)...(19): siRNA sense strand
ugacaauaccaaagagggu

SEQ ID NO: 2591594 - RNA, 19 nt, Homo sapiens
  misc_RNA (1)...(19): siRNA sense strand
cuugaagcucagauugaua

SEQ ID NO: 2591595 - RNA, 19 nt, Homo sapiens
  misc_RNA (1)...(19): siRNA sense strand
ggguguuauugaagcagga

SEQ ID NO: 2591596 - RNA, 19 nt, Homo sapiens
  misc_RNA (1)...(19): siRNA sense strand
auuucaagguggccagaga

SEQ ID NO: 2591597 - RNA, 19 nt, Homo sapiens
  misc_RNA (1)...(19): siRNA sense strand
aguuauucuagcagaugaa

SEQ ID NO: 2591598 - RNA, 19 nt, Homo sapiens
  misc_RNA (1)...(19): siRNA sense strand
ccaaggagaaggaagggaa

SEQ ID NO: 2591599 - RNA, 19 nt, Homo sapiens
  misc_RNA (1)...(19): siRNA sense strand
ccagauaacuucagcagca

SEQ ID NO: 2591600 - RNA, 19 nt, Homo sapiens
  misc_RNA (1)...(19): siRNA sense strand
aaggaagggaagaaauaaa

SEQ ID NO: 2591601 - RNA, 19 nt, Homo sapiens
  misc_RNA (1)...(19): siRNA sense strand
uggaggaguugaaggcaga

SEQ ID NO: 2591602 - RNA, 19 nt, Homo sapiens
  misc_RNA (1)...(19): siRNA sense strand
aggagaaggaagggaagaa

SEQ ID NO: 2591603 - RNA, 19 nt, Homo sapiens
  misc_RNA (1)...(19): siRNA sense strand
auaaagaaauccaggaccu

SEQ ID NO: 2591604 - RNA, 19 nt, Homo sapiens
  misc_RNA (1)...(19): siRNA sense strand
gacaaauacaccaaggaga

SEQ ID NO: 2591605 - RNA, 19 nt, Homo sapiens
  misc_RNA (1)...(19): siRNA sense strand
uuugaaagugauagaguca

SEQ ID NO: 2591606 - RNA, 19 nt, Homo sapiens
  misc_RNA (1)...(19): siRNA sense strand
ccauggagcagauacggua

SEQ ID NO: 2591607 - RNA, 19 nt, Homo sapiens
  misc_RNA (1)...(19): siRNA sense strand
ccacauuggagcagaagcu

SEQ ID NO: 2591608 - RNA, 19 nt, Homo sapiens
  misc_RNA (1)...(19): siRNA sense strand
ggucagaagcuggaggagu

SEQ ID NO: 2591609 - RNA, 19 nt, Homo sapiens
  misc_RNA (1)...(19): siRNA sense strand
ucagacacucacaggacaa

SEQ ID NO: 2591610 - RNA, 19 nt, Homo sapiens
  misc_RNA (1)...(19): siRNA sense strand
agcagaagcugaagcagga

SEQ ID NO: 2591611 - RNA, 19 nt, Homo sapiens
  misc_RNA (1)...(19): siRNA sense strand
gaaauaaagaaauccagga

SEQ ID NO: 2591612 - RNA, 19 nt, Homo sapiens
  misc_RNA (1)...(19): siRNA sense strand
acaaacaucucaugggcaa

SEQ ID NO: 2591613 - RNA, 19 nt, Homo sapiens
  misc_RNA (1)...(19): siRNA sense strand
caggaacuauucagggcaa

SEQ ID NO: 2591614 - RNA, 19 nt, Homo sapiens
  misc_RNA (1)...(19): siRNA sense strand
ugaaggaagcccagcaaaa

SEQ ID NO: 2591615 - RNA, 19 nt, Homo sapiens
  misc_RNA (1)...(19): siRNA sense strand
uguugaaucguuugaggaa

SEQ ID NO: 2591616 - RNA, 19 nt, Homo sapiens
  misc_RNA (1)...(19): siRNA sense strand
ggaucuuugucaaugccua

SEQ ID NO: 2591617 - RNA, 19 nt, Homo sapiens
  misc_RNA (1)...(19): siRNA sense strand
ggaacuauucagggcaaau

SEQ ID NO: 2591618 - RNA, 19 nt, Homo sapiens
  misc_RNA (1)...(19): siRNA sense strand
aucacaagaaacagagcaa

SEQ ID NO: 2591619 - RNA, 19 nt, Homo sapiens
  misc_RNA (1)...(19): siRNA sense strand
ugauaagcucauuguugaa

SEQ ID NO: 2591620 - RNA, 19 nt, Homo sapiens
  misc_RNA (1)...(19): siRNA sense strand
cagagaagcuuguugccau

SEQ ID NO: 2591621 - RNA, 19 nt, Homo sapiens
  misc_RNA (1)...(19): siRNA sense strand
acaucauugugguggccaa

SEQ ID NO: 2591622 - RNA, 19 nt, Homo sapiens
  misc_RNA (1)...(19): siRNA sense strand
ggguggaugauguugugaa

SEQ ID NO: 2591623 - RNA, 19 nt, Homo sapiens
  misc_RNA (1)...(19): siRNA sense strand
ugaucaagcaggaggcaga

SEQ ID NO: 2591624 - RNA, 19 nt, Homo sapiens
  misc_RNA (1)...(19): siRNA sense strand
ccagcaaauugguggagga

SEQ ID NO: 2591625 - RNA, 19 nt, Homo sapiens
  misc_RNA (1)...(19): siRNA sense strand
agcaggaggcagagaagua

SEQ ID NO: 2591626 - RNA, 19 nt, Homo sapiens
  misc_RNA (1)...(19): siRNA sense strand
aggaggagcacaagaacau

SEQ ID NO: 2591627 - RNA, 19 nt, Homo sapiens
  misc_RNA (1)...(19): siRNA sense strand
ugaagaaguacgcagacaa

SEQ ID NO: 2591628 - RNA, 19 nt, Homo sapiens
  misc_RNA (1)...(19): siRNA sense strand
gggcguuggcagaguacau

SEQ ID NO: 2591629 - RNA, 19 nt, Homo sapiens
  misc_RNA (1)...(19): siRNA sense strand
ggcugaacgugcuggccaa

SEQ ID NO: 2591630 - RNA, 19 nt, Homo sapiens
  misc_RNA (1)...(19): siRNA sense strand
ggugucaggaggagcacaa

SEQ ID NO: 2591631 - RNA, 19 nt, Homo sapiens
  misc_RNA (1)...(19): siRNA sense strand
ccuuugagggcaagacauu

SEQ ID NO: 2591632 - RNA, 19 nt, Homo sapiens
  misc_RNA (1)...(19): siRNA sense strand
cgagauggggauugagaau

SEQ ID NO: 2591633 - RNA, 19 nt, Homo sapiens
  misc_RNA (1)...(19): siRNA sense strand
gccaagugggugcggcaua

SEQ ID NO: 2591634 - RNA, 19 nt, Homo sapiens
  misc_RNA (1)...(19): siRNA sense strand
ggaucaaccgcgucaccaa

SEQ ID NO: 2591635 - RNA, 19 nt, Homo sapiens
  misc_RNA (1)...(19): siRNA sense strand
cggaccaagaccagcaaau

SEQ ID NO: 2591636 - RNA, 19 nt, Homo sapiens
  misc_RNA (1)...(19): siRNA sense strand
agcacaagaacaugggcua

SEQ ID NO: 2591637 - RNA, 19 nt, Homo sapiens
  misc_RNA (1)...(19): siRNA sense strand
ccuucaaucuccaggccuu

SEQ ID NO: 2591638 - RNA, 19 nt, Homo sapiens
  misc_RNA (1)...(19): siRNA sense strand
auggcagguccaaggauaa

SEQ ID NO: 2591639 - RNA, 19 nt, Homo sapiens
  misc_RNA (1)...(19): siRNA sense strand
cugaagaaguacgcagaca

SEQ ID NO: 2591640 - RNA, 19 nt, Homo sapiens
  misc_RNA (1)...(19): siRNA sense strand
uggcagaguacauggccuu

SEQ ID NO: 2591641 - RNA, 19 nt, Homo sapiens
  misc_RNA (1)...(19): siRNA sense strand
cugcauucaccaaggacuu

SEQ ID NO: 2591642 - RNA, 19 nt, Homo sapiens
  misc_RNA (1)...(19): siRNA sense strand
uggccaacgugauccgcaa

SEQ ID NO: 2591643 - RNA, 19 nt, Homo sapiens
  misc_RNA (1)...(19): siRNA sense strand
ucaaguaccaccugggcau

SEQ ID NO: 2591644 - RNA, 19 nt, Homo sapiens
  misc_RNA (1)...(19): siRNA sense strand
aguacggaguccugggcuu

SEQ ID NO: 2591645 - RNA, 19 nt, Homo sapiens
  misc_RNA (1)...(19): siRNA sense strand
aggaguuugaggaagaaau

SEQ ID NO: 2591646 - RNA, 19 nt, Homo sapiens
  misc_RNA (1)...(19): siRNA sense strand
caggaggagcacaagaaca

SEQ ID NO: 2591647 - RNA, 19 nt, Homo sapiens
  misc_RNA (1)...(19): siRNA sense strand
ccgaugacccagaggcugu

SEQ ID NO: 2591648 - RNA, 19 nt, Homo sapiens
  misc_RNA (1)...(19): siRNA sense strand
cagacaagcugauugccga

SEQ ID NO: 2591649 - RNA, 19 nt, Homo sapiens
  misc_RNA (1)...(19): siRNA sense strand
cuaaaucucugcugaggca

SEQ ID NO: 2591650 - RNA, 19 nt, Homo sapiens
  misc_RNA (1)...(19): siRNA sense strand
gcuacauguugaagggcga

SEQ ID NO: 2591651 - RNA, 19 nt, Homo sapiens
  misc_RNA (1)...(19): siRNA sense strand
caucauacgaggaggcugu

SEQ ID NO: 2591652 - RNA, 19 nt, Homo sapiens
  misc_RNA (1)...(19): siRNA sense strand
aggaguacacagaugauau

SEQ ID NO: 2591653 - RNA, 19 nt, Homo sapiens
  misc_RNA (1)...(19): siRNA sense strand
aagaauggcgaguggaaac

SEQ ID NO: 2591654 - RNA, 19 nt, Homo sapiens
  misc_RNA (1)...(19): siRNA sense strand
uguugaagggcgauuacaa

SEQ ID NO: 2591655 - RNA, 19 nt, Homo sapiens
  misc_RNA (1)...(19): siRNA sense strand
gauucagagaacagugaca

SEQ ID NO: 2591656 - RNA, 19 nt, Homo sapiens
  misc_RNA (1)...(19): siRNA sense strand
acacaaagaagaaggagga

SEQ ID NO: 2591657 - RNA, 19 nt, Homo sapiens
  misc_RNA (1)...(19): siRNA sense strand
accugaaacuagaggaaca

SEQ ID NO: 2591658 - RNA, 19 nt, Homo sapiens
  misc_RNA (1)...(19): siRNA sense strand
agauggacacaaagaagaa

SEQ ID NO: 2591659 - RNA, 19 nt, Homo sapiens
  misc_RNA (1)...(19): siRNA sense strand
acaccugaaacuagaggaa

SEQ ID NO: 2591660 - RNA, 19 nt, Homo sapiens
  misc_RNA (1)...(19): siRNA sense strand
cggccaagagggcgaacau

SEQ ID NO: 2591661 - RNA, 19 nt, Homo sapiens
  misc_RNA (1)...(19): siRNA sense strand
cgggauucaauguuuguaa

SEQ ID NO: 2591662 - RNA, 19 nt, Homo sapiens
  misc_RNA (1)...(19): siRNA sense strand
gagaaauauggcaucaaca

SEQ ID NO: 2591663 - RNA, 19 nt, Homo sapiens
  misc_RNA (1)...(19): siRNA sense strand
auacaaaaucacagcugaa

SEQ ID NO: 2591664 - RNA, 19 nt, Homo sapiens
  misc_RNA (1)...(19): siRNA sense strand
gcauuucagaagauggaca

SEQ ID NO: 2591665 - RNA, 19 nt, Homo sapiens
  misc_RNA (1)...(19): siRNA sense strand
gagcaggagcugaaggaca

SEQ ID NO: 2591666 - RNA, 19 nt, Homo sapiens
  misc_RNA (1)...(19): siRNA sense strand
ugaauuuagcagaaaggaa

SEQ ID NO: 2591667 - RNA, 19 nt, Homo sapiens
  misc_RNA (1)...(19): siRNA sense strand
agaagaagcuggagcggcu

SEQ ID NO: 2591668 - RNA, 19 nt, Homo sapiens
  misc_RNA (1)...(19): siRNA sense strand
aggaauuucuagauggcau

SEQ ID NO: 2591669 - RNA, 19 nt, Homo sapiens
  misc_RNA (1)...(19): siRNA sense strand
gcuaaaggcucuucugcca

SEQ ID NO: 2591670 - RNA, 19 nt, Homo sapiens
  misc_RNA (1)...(19): siRNA sense strand
uggagaagcuaaaggcucu

SEQ ID NO: 2591671 - RNA, 19 nt, Homo sapiens
  misc_RNA (1)...(19): siRNA sense strand
gcuaagaacccagggcaga

SEQ ID NO: 2591672 - RNA, 19 nt, Homo sapiens
  misc_RNA (1)...(19): siRNA sense strand
ucucaaugugaaagcuuua

SEQ ID NO: 2591673 - RNA, 19 nt, Homo sapiens
  misc_RNA (1)...(19): siRNA sense strand
aauuggagucgaugggauu

SEQ ID NO: 2591674 - RNA, 19 nt, Homo sapiens
  misc_RNA (1)...(19): siRNA sense strand
acgcuguggacaagaagaa

SEQ ID NO: 2591675 - RNA, 19 nt, Homo sapiens
  misc_RNA (1)...(19): siRNA sense strand
ccacaagaugaaaacaaaa

SEQ ID NO: 2591676 - RNA, 19 nt, Homo sapiens
  misc_RNA (1)...(19): siRNA sense strand
acagcauggagaagcuaaa

SEQ ID NO: 2591677 - RNA, 19 nt, Homo sapiens
  misc_RNA (1)...(19): siRNA sense strand
gcguggaaguucagggcag

SEQ ID NO: 2591678 - RNA, 19 nt, Homo sapiens
  misc_RNA (1)...(19): siRNA sense strand
ugccaagacuggagcagga

SEQ ID NO: 2591679 - RNA, 19 nt, Homo sapiens
  misc_RNA (1)...(19): siRNA sense strand
gggugugacagcauggaga

SEQ ID NO: 2591680 - RNA, 19 nt, Homo sapiens
  misc_RNA (1)...(19): siRNA sense strand
aggacacagccaaguuuaa

SEQ ID NO: 2591681 - RNA, 19 nt, Homo sapiens
  misc_RNA (1)...(19): siRNA sense strand
aaauuggagucgaugggau

SEQ ID NO: 2591682 - RNA, 19 nt, Homo sapiens
  misc_RNA (1)...(19): siRNA sense strand
guaucaguguauuggucau

SEQ ID NO: 2591683 - RNA, 19 nt, Homo sapiens
  misc_RNA (1)...(19): siRNA sense strand
acagggaguccaugcggaa

SEQ ID NO: 2591684 - RNA, 19 nt, Homo sapiens
  misc_RNA (1)...(19): siRNA sense strand
aggagaaguuggaggacau

SEQ ID NO: 2591685 - RNA, 19 nt, Homo sapiens
  misc_RNA (1)...(19): siRNA sense strand
acacaagggccaaagggaa

SEQ ID NO: 2591686 - RNA, 19 nt, Homo sapiens
  misc_RNA (1)...(19): siRNA sense strand
gcuauaaacacaagggcca

SEQ ID NO: 2591687 - RNA, 19 nt, Homo sapiens
  misc_RNA (1)...(19): siRNA sense strand
agagaaaagaugugcuaaa

SEQ ID NO: 2591688 - RNA, 19 nt, Homo sapiens
  misc_RNA (1)...(19): siRNA sense strand
acaggaagcugaagaggga

SEQ ID NO: 2591689 - RNA, 19 nt, Homo sapiens
  misc_RNA (1)...(19): siRNA sense strand
ucggcaggaucuagagcaa

SEQ ID NO: 2591690 - RNA, 19 nt, Homo sapiens
  misc_RNA (1)...(19): siRNA sense strand
uguugaaggaccaggugaa

SEQ ID NO: 2591691 - RNA, 19 nt, Homo sapiens
  misc_RNA (1)...(19): siRNA sense strand
cguuagaagccuuguugau

SEQ ID NO: 2591692 - RNA, 19 nt, Homo sapiens
  misc_RNA (1)...(19): siRNA sense strand
ucggaggauuccagaaaca

SEQ ID NO: 2591693 - RNA, 19 nt, Homo sapiens
  misc_RNA (1)...(19): siRNA sense strand
gccaaagggaagugaccau

SEQ ID NO: 2591694 - RNA, 19 nt, Homo sapiens
  misc_RNA (1)...(19): siRNA sense strand
gugcuaaacucccucgcua

SEQ ID NO: 2591695 - RNA, 19 nt, Homo sapiens
  misc_RNA (1)...(19): siRNA sense strand
gcaaagaguaucugagguc

SEQ ID NO: 2591696 - RNA, 19 nt, Homo sapiens
  misc_RNA (1)...(19): siRNA sense strand
ggacuaugacccugaggca

SEQ ID NO: 2591697 - RNA, 19 nt, Homo sapiens
  misc_RNA (1)...(19): siRNA sense strand
aaggagacgaugagaaagu

SEQ ID NO: 2591698 - RNA, 19 nt, Homo sapiens
  misc_RNA (1)...(19): siRNA sense strand
cgguaaaggaggaaacccu

SEQ ID NO: 2591699 - RNA, 19 nt, Homo sapiens
  misc_RNA (1)...(19): siRNA sense strand
ccuuguugaugcugauaga

SEQ ID NO: 2591700 - RNA, 19 nt, Homo sapiens
  misc_RNA (1)...(19): siRNA sense strand
cugacagaggagaagagaa

SEQ ID NO: 2591701 - RNA, 19 nt, Homo sapiens
  misc_RNA (1)...(19): siRNA sense strand
gguuagaugaacuggauuc

SEQ ID NO: 2591702 - RNA, 19 nt, Homo sapiens
  misc_RNA (1)...(19): siRNA sense strand
uccagaaacaugaaggaga

SEQ ID NO: 2591703 - RNA, 19 nt, Homo sapiens
  misc_RNA (1)...(19): siRNA sense strand
ugaaggagaaguuggagga

SEQ ID NO: 2591704 - RNA, 19 nt, Homo sapiens
  misc_RNA (1)...(19): siRNA sense strand
gauggaugcuggaggggau

SEQ ID NO: 2591705 - RNA, 19 nt, Homo sapiens
  misc_RNA (1)...(19): siRNA sense strand
aauaacaauuucaggcagu

SEQ ID NO: 2591706 - RNA, 19 nt, Homo sapiens
  misc_RNA (1)...(19): siRNA sense strand
aaggagaaguuggaggaca

SEQ ID NO: 2591707 - RNA, 19 nt, Homo sapiens
  misc_RNA (1)...(19): siRNA sense strand
aaagaaagcaucagccaua

SEQ ID NO: 2591708 - RNA, 19 nt, Homo sapiens
  misc_RNA (1)...(19): siRNA sense strand
gaagaauauuggaagggau

SEQ ID NO: 2591709 - RNA, 19 nt, Homo sapiens
  misc_RNA (1)...(19): siRNA sense strand
agauagugaaccagaggaa

SEQ ID NO: 2591710 - RNA, 19 nt, Homo sapiens
  misc_RNA (1)...(19): siRNA sense strand
auagugaaccagaggaaau

SEQ ID NO: 2591711 - RNA, 19 nt, Homo sapiens
  misc_RNA (1)...(19): siRNA sense strand
cugaagaagaagcagaaaa

SEQ ID NO: 2591712 - RNA, 19 nt, Homo sapiens
  misc_RNA (1)...(19): siRNA sense strand
cuucaauaaaggaaagcau

SEQ ID NO: 2591713 - RNA, 19 nt, Homo sapiens
  misc_RNA (1)...(19): siRNA sense strand
augaagaugaagauaguga

SEQ ID NO: 2591714 - RNA, 19 nt, Homo sapiens
  misc_RNA (1)...(19): siRNA sense strand
uaaaggaaagcauggguuu

SEQ ID NO: 2591715 - RNA, 19 nt, Homo sapiens
  misc_RNA (1)...(19): siRNA sense strand
cgccggaggaccugaagaa

SEQ ID NO: 2591716 - RNA, 19 nt, Homo sapiens
  misc_RNA (1)...(19): siRNA sense strand
gaauauuggaagggauaca

SEQ ID NO: 2591717 - RNA, 19 nt, Homo sapiens
  misc_RNA (1)...(19): siRNA sense strand
aggaugaagaauauuggaa

SEQ ID NO: 2591718 - RNA, 19 nt, Homo sapiens
  misc_RNA (1)...(19): siRNA sense strand
auagguagucagacgacaa

SEQ ID NO: 2591719 - RNA, 19 nt, Homo sapiens
  misc_RNA (1)...(19): siRNA sense strand
uagucagacgacaaagaaa

SEQ ID NO: 2591720 - RNA, 19 nt, Homo sapiens
  misc_RNA (1)...(19): siRNA sense strand
cgggagacgagaagccuga

SEQ ID NO: 2591721 - RNA, 19 nt, Homo sapiens
  misc_RNA (1)...(19): siRNA sense strand
cagaagaggacgaggagga

SEQ ID NO: 2591722 - RNA, 19 nt, Homo sapiens
  misc_RNA (1)...(19): siRNA sense strand
caaucgaguaucacggaaa

SEQ ID NO: 2591723 - RNA, 19 nt, Homo sapiens
  misc_RNA (1)...(19): siRNA sense strand
ugauugaggaagagaacau

SEQ ID NO: 2591724 - RNA, 19 nt, Homo sapiens
  misc_RNA (1)...(19): siRNA sense strand
aacaagaguuccuggguga

SEQ ID NO: 2591725 - RNA, 19 nt, Homo sapiens
  misc_RNA (1)...(19): siRNA sense strand
ccuauuuguuggagaaucu

SEQ ID NO: 2591726 - RNA, 19 nt, Homo sapiens
  misc_RNA (1)...(19): siRNA sense strand
caggaaaacaacugagaga

SEQ ID NO: 2591727 - RNA, 19 nt, Homo sapiens
  misc_RNA (1)...(19): siRNA sense strand
acggaaaggagcacaaaga

SEQ ID NO: 2591728 - RNA, 19 nt, Homo sapiens
  misc_RNA (1)...(19): siRNA sense strand
cccuacaaaugcagcgcaa

SEQ ID NO: 2591729 - RNA, 19 nt, Homo sapiens
  misc_RNA (1)...(19): siRNA sense strand
ggaaaacaacugagagaac

SEQ ID NO: 2591730 - RNA, 19 nt, Homo sapiens
  misc_RNA (1)...(19): siRNA sense strand
guucgaagugcacuggaaa

SEQ ID NO: 2591731 - RNA, 19 nt, Homo sapiens
  misc_RNA (1)...(19): siRNA sense strand
cuaagaaaucacauggcau

SEQ ID NO: 2591732 - RNA, 19 nt, Homo sapiens
  misc_RNA (1)...(19): siRNA sense strand
acgaggaggaucugggcau

SEQ ID NO: 2591733 - RNA, 19 nt, Homo sapiens
  misc_RNA (1)...(19): siRNA sense strand
gagaacuguuucaggccuu

SEQ ID NO: 2591734 - RNA, 19 nt, Homo sapiens
  misc_RNA (1)...(19): siRNA sense strand
cugugaugguuguaguaga

SEQ ID NO: 2591735 - RNA, 19 nt, Homo sapiens
  misc_RNA (1)...(19): siRNA sense strand
cugaagaucauuaaagacu

SEQ ID NO: 2591736 - RNA, 19 nt, Homo sapiens
  misc_RNA (1)...(19): siRNA sense strand
gggacugacaggaaaacaa

SEQ ID NO: 2591737 - RNA, 19 nt, Homo sapiens
  misc_RNA (1)...(19): siRNA sense strand
cagugaggguugcugaaaa

SEQ ID NO: 2591738 - RNA, 19 nt, Homo sapiens
  misc_RNA (1)...(19): siRNA sense strand
uccagauguuugagaauca

SEQ ID NO: 2591739 - RNA, 19 nt, Homo sapiens
  misc_RNA (1)...(19): siRNA sense strand
agucagcacacaagguauu

SEQ ID NO: 2591740 - RNA, 19 nt, Homo sapiens
  misc_RNA (1)...(19): siRNA sense strand
uguccagauguuugagaau

SEQ ID NO: 2591741 - RNA, 19 nt, Homo sapiens
  misc_RNA (1)...(19): siRNA sense strand
cgaaccagacugaugcaau

SEQ ID NO: 2591742 - RNA, 19 nt, Homo sapiens
  misc_RNA (1)...(19): siRNA sense strand
caaagaugcuacucaggca

SEQ ID NO: 2591743 - RNA, 19 nt, Homo sapiens
  misc_RNA (1)...(19): siRNA sense strand
uggaccagcaugaagaauu

SEQ ID NO: 2591744 - RNA, 19 nt, Homo sapiens
  misc_RNA (1)...(19): siRNA sense strand
caugcaaguucgaagguga

SEQ ID NO: 2591745 - RNA, 19 nt, Homo sapiens
  misc_RNA (1)...(19): siRNA sense strand
uaucaaauucugagagcaa

SEQ ID NO: 2591746 - RNA, 19 nt, Homo sapiens
  misc_RNA (1)...(19): siRNA sense strand
ccacaguccagcaaggaaa

SEQ ID NO: 2591747 - RNA, 19 nt, Homo sapiens
  misc_RNA (1)...(19): siRNA sense strand
auggauuaaaugugggaaa

SEQ ID NO: 2591748 - RNA, 19 nt, Homo sapiens
  misc_RNA (1)...(19): siRNA sense strand
guguauuguuucaaggaga

SEQ ID NO: 2591749 - RNA, 19 nt, Homo sapiens
  misc_RNA (1)...(19): siRNA sense strand
cagcaagggacaugaggau

SEQ ID NO: 2591750 - RNA, 19 nt, Homo sapiens
  misc_RNA (1)...(19): siRNA sense strand
cuauaggaucugugaaaca

SEQ ID NO: 2591751 - RNA, 19 nt, Homo sapiens
  misc_RNA (1)...(19): siRNA sense strand
acuaaaucccacugagcua

SEQ ID NO: 2591752 - RNA, 19 nt, Homo sapiens
  misc_RNA (1)...(19): siRNA sense strand
cgacauugccgauagccaa

SEQ ID NO: 2591753 - RNA, 19 nt, Homo sapiens
  misc_RNA (1)...(19): siRNA sense strand
ggugaaaagagaaggcauu

SEQ ID NO: 2591754 - RNA, 19 nt, Homo sapiens
  misc_RNA (1)...(19): siRNA sense strand
cagggugagcggagaggaa

SEQ ID NO: 2591755 - RNA, 19 nt, Homo sapiens
  misc_RNA (1)...(19): siRNA sense strand
agaccuggaaacagacaaa

SEQ ID NO: 2591756 - RNA, 19 nt, Homo sapiens
  misc_RNA (1)...(19): siRNA sense strand
auacacaggcaguggcauu

SEQ ID NO: 2591757 - RNA, 19 nt, Homo sapiens
  misc_RNA (1)...(19): siRNA sense strand
uggauuaaaugugggaaau

SEQ ID NO: 2591758 - RNA, 19 nt, Homo sapiens
  misc_RNA (1)...(19): siRNA sense strand
uguauuguuucaaggagaa

SEQ ID NO: 2591759 - RNA, 19 nt, Homo sapiens
  misc_RNA (1)...(19): siRNA sense strand
aagagaaggcauucaaaca

SEQ ID NO: 2591760 - RNA, 19 nt, Homo sapiens
  misc_RNA (1)...(19): siRNA sense strand
uggaaaggagccugguauu

SEQ ID NO: 2591761 - RNA, 19 nt, Homo sapiens
  misc_RNA (1)...(19): siRNA sense strand
ggaaaugcuaagauaucau

SEQ ID NO: 2591762 - RNA, 19 nt, Homo sapiens
  misc_RNA (1)...(19): siRNA sense strand
aaagugagucagauggcaa

SEQ ID NO: 2591763 - RNA, 19 nt, Homo sapiens
  misc_RNA (1)...(19): siRNA sense strand
aggccagacuauaggaucu

SEQ ID NO: 2591764 - RNA, 19 nt, Homo sapiens
  misc_RNA (1)...(19): siRNA sense strand
uggaugaagauaugcaaga

SEQ ID NO: 2591765 - RNA, 19 nt, Homo sapiens
  misc_RNA (1)...(19): siRNA sense strand
cugaagaugaauccagcaa

SEQ ID NO: 2591766 - RNA, 19 nt, Homo sapiens
  misc_RNA (1)...(19): siRNA sense strand
ccacugagcuaaaccgcga

SEQ ID NO: 2591767 - RNA, 19 nt, Homo sapiens
  misc_RNA (1)...(19): siRNA sense strand
ugguauacacgguuccuaa

SEQ ID NO: 2591768 - RNA, 19 nt, Homo sapiens
  misc_RNA (1)...(19): siRNA sense strand
gcuuaaugaugcuggacuc

SEQ ID NO: 2591769 - RNA, 19 nt, Homo sapiens
  misc_RNA (1)...(19): siRNA sense strand
ucaaggagaagucgcgcaa

SEQ ID NO: 2591770 - RNA, 19 nt, Homo sapiens
  misc_RNA (1)...(19): siRNA sense strand
caaauuaaccaguauggca

SEQ ID NO: 2591771 - RNA, 19 nt, Homo sapiens
  misc_RNA (1)...(19): siRNA sense strand
gguugauacugucugugaa

SEQ ID NO: 2591772 - RNA, 19 nt, Homo sapiens
  misc_RNA (1)...(19): siRNA sense strand
agucauauggagccaguau

SEQ ID NO: 2591773 - RNA, 19 nt, Homo sapiens
  misc_RNA (1)...(19): siRNA sense strand
ccuaauacaggccagacua

SEQ ID NO: 2591774 - RNA, 19 nt, Homo sapiens
  misc_RNA (1)...(19): siRNA sense strand
acagcauccucgagagcca

SEQ ID NO: 2591775 - RNA, 19 nt, Homo sapiens
  misc_RNA (1)...(19): siRNA sense strand
gguauauccaugacugaca

SEQ ID NO: 2591776 - RNA, 19 nt, Homo sapiens
  misc_RNA (1)...(19): siRNA sense strand
ucuacaagcagaaucgcua

SEQ ID NO: 2591777 - RNA, 19 nt, Homo sapiens
  misc_RNA (1)...(19): siRNA sense strand
ccuccgagacccaguccaa

SEQ ID NO: 2591778 - RNA, 19 nt, Homo sapiens
  misc_RNA (1)...(19): siRNA sense strand
ccaguauauaugcaacaaa

SEQ ID NO: 2591779 - RNA, 19 nt, Homo sapiens
  misc_RNA (1)...(19): siRNA sense strand
gcaucuaccccgagcucua

SEQ ID NO: 2591780 - RNA, 19 nt, Homo sapiens
  misc_RNA (1)...(19): siRNA sense strand
cugcgagacuugugggaca

SEQ ID NO: 2591781 - RNA, 19 nt, Homo sapiens
  misc_RNA (1)...(19): siRNA sense strand
cgucagagucgaagcccuu

SEQ ID NO: 2591782 - RNA, 19 nt, Homo sapiens
  misc_RNA (1)...(19): siRNA sense strand
gcucaggaugugucggaga

SEQ ID NO: 2591783 - RNA, 19 nt, Homo sapiens
  misc_RNA (1)...(19): siRNA sense strand
gguuuauauuccggaagaa

SEQ ID NO: 2591784 - RNA, 19 nt, Homo sapiens
  misc_RNA (1)...(19): siRNA sense strand
acuccuacccgguggugaa

SEQ ID NO: 2591785 - RNA, 19 nt, Homo sapiens
  misc_RNA (1)...(19): siRNA sense strand
agaaaguauaugugcagca

SEQ ID NO: 2591786 - RNA, 19 nt, Homo sapiens
  misc_RNA (1)...(19): siRNA sense strand
aggaugugucggagagacu

SEQ ID NO: 2591787 - RNA, 19 nt, Homo sapiens
  misc_RNA (1)...(19): siRNA sense strand
ccgacuaccuguuggaccu

SEQ ID NO: 2591788 - RNA, 19 nt, Homo sapiens
  misc_RNA (1)...(19): siRNA sense strand
ggacagugauccagacagc

SEQ ID NO: 2591789 - RNA, 19 nt, Homo sapiens
  misc_RNA (1)...(19): siRNA sense strand
gguucuaccacucuggaaa

SEQ ID NO: 2591790 - RNA, 19 nt, Homo sapiens
  misc_RNA (1)...(19): siRNA sense strand
ggaucauuggcuauguaaa

SEQ ID NO: 2591791 - RNA, 19 nt, Homo sapiens
  misc_RNA (1)...(19): siRNA sense strand
ggaaugagguucuaccacu

SEQ ID NO: 2591792 - RNA, 19 nt, Homo sapiens
  misc_RNA (1)...(19): siRNA sense strand
auguuaaacuggagagaaa

SEQ ID NO: 2591793 - RNA, 19 nt, Homo sapiens
  misc_RNA (1)...(19): siRNA sense strand
ccuuauaaguagaguacga

SEQ ID NO: 2591794 - RNA, 19 nt, Homo sapiens
  misc_RNA (1)...(19): siRNA sense strand
ccuuggaggauuagacaaa

SEQ ID NO: 2591795 - RNA, 19 nt, Homo sapiens
  misc_RNA (1)...(19): siRNA sense strand
agaugaagaacgaaagcua

SEQ ID NO: 2591796 - RNA, 19 nt, Homo sapiens
  misc_RNA (1)...(19): siRNA sense strand
ugucaguuccucagagaaa

SEQ ID NO: 2591797 - RNA, 19 nt, Homo sapiens
  misc_RNA (1)...(19): siRNA sense strand
ucauaaaagaggagaaaca

SEQ ID NO: 2591798 - RNA, 19 nt, Homo sapiens
  misc_RNA (1)...(19): siRNA sense strand
gguuaauuauccaggcaga

SEQ ID NO: 2591799 - RNA, 19 nt, Homo sapiens
  misc_RNA (1)...(19): siRNA sense strand
aagaggagaaacagauaaa

SEQ ID NO: 2591800 - RNA, 19 nt, Homo sapiens
  misc_RNA (1)...(19): siRNA sense strand
cagacagaguugaaugcaa

SEQ ID NO: 2591801 - RNA, 19 nt, Homo sapiens
  misc_RNA (1)...(19): siRNA sense strand
aaguagaguacgaggcuau

SEQ ID NO: 2591802 - RNA, 19 nt, Homo sapiens
  misc_RNA (1)...(19): siRNA sense strand
cuuccaggcccuaaagaaa

SEQ ID NO: 2591803 - RNA, 19 nt, Homo sapiens
  misc_RNA (1)...(19): siRNA sense strand
uaaagaaaguagacggacu

SEQ ID NO: 2591804 - RNA, 19 nt, Homo sapiens
  misc_RNA (1)...(19): siRNA sense strand
gaaugauauuacagcugaa

SEQ ID NO: 2591805 - RNA, 19 nt, Homo sapiens
  misc_RNA (1)...(19): siRNA sense strand
ccugggaauuaaagacaau

SEQ ID NO: 2591806 - RNA, 19 nt, Homo sapiens
  misc_RNA (1)...(19): siRNA sense strand
cguuuaaaucucugcaaga

SEQ ID NO: 2591807 - RNA, 19 nt, Homo sapiens
  misc_RNA (1)...(19): siRNA sense strand
gguuggaagaucugcagua

SEQ ID NO: 2591808 - RNA, 19 nt, Homo sapiens
  misc_RNA (1)...(19): siRNA sense strand
acgaggaaaugauggcaga

SEQ ID NO: 2591809 - RNA, 19 nt, Homo sapiens
  misc_RNA (1)...(19): siRNA sense strand
acuuugaagcuguggcaau

SEQ ID NO: 2591810 - RNA, 19 nt, Homo sapiens
  misc_RNA (1)...(19): siRNA sense strand
guugaucagaugaggaaga

SEQ ID NO: 2591811 - RNA, 19 nt, Homo sapiens
  misc_RNA (1)...(19): siRNA sense strand
ccuaaagaaaguagacgga

SEQ ID NO: 2591812 - RNA, 19 nt, Homo sapiens
  misc_RNA (1)...(19): siRNA sense strand
aggaaaugauggcagaguu

SEQ ID NO: 2591813 - RNA, 19 nt, Homo sapiens
  misc_RNA (1)...(19): siRNA sense strand
caucauaaaagaggagaaa

SEQ ID NO: 2591814 - RNA, 19 nt, Homo sapiens
  misc_RNA (1)...(19): siRNA sense strand
agggcaggcaggagagaga

SEQ ID NO: 2591815 - RNA, 19 nt, Homo sapiens
  misc_RNA (1)...(19): siRNA sense strand
ugauauuccucuucgucaa

SEQ ID NO: 2591816 - RNA, 19 nt, Homo sapiens
  misc_RNA (1)...(19): siRNA sense strand
aagagauccccuagaguaa

SEQ ID NO: 2591817 - RNA, 19 nt, Homo sapiens
  misc_RNA (1)...(19): siRNA sense strand
cgaccuuauaaguagagua

SEQ ID NO: 2591818 - RNA, 19 nt, Homo sapiens
  misc_RNA (1)...(19): siRNA sense strand
aaguagacggacugccaaa

SEQ ID NO: 2591819 - RNA, 19 nt, Homo sapiens
  misc_RNA (1)...(19): siRNA sense strand
agagcuaguucgauauaca

SEQ ID NO: 2591820 - RNA, 19 nt, Homo sapiens
  misc_RNA (1)...(19): siRNA sense strand
guuuauacagaccagguaa

SEQ ID NO: 2591821 - RNA, 19 nt, Homo sapiens
  misc_RNA (1)...(19): siRNA sense strand
agauguugcuuuuggauau

SEQ ID NO: 2591822 - RNA, 19 nt, Homo sapiens
  misc_RNA (1)...(19): siRNA sense strand
ucaaguuauagcugaggaa

SEQ ID NO: 2591823 - RNA, 19 nt, Homo sapiens
  misc_RNA (1)...(19): siRNA sense strand
gaaaguagacggacugcca

SEQ ID NO: 2591824 - RNA, 19 nt, Homo sapiens
  misc_RNA (1)...(19): siRNA sense strand
cugaaugagauguugcuuu

SEQ ID NO: 2591825 - RNA, 19 nt, Homo sapiens
  misc_RNA (1)...(19): siRNA sense strand
uuggaggauuagacaaauu

SEQ ID NO: 2591826 - RNA, 19 nt, Homo sapiens
  misc_RNA (1)...(19): siRNA sense strand
uaacagaguucucaccgaa

SEQ ID NO: 2591827 - RNA, 19 nt, Homo sapiens
  misc_RNA (1)...(19): siRNA sense strand
ccucagagaaauugacuac

SEQ ID NO: 2591828 - RNA, 19 nt, Homo sapiens
  misc_RNA (1)...(19): siRNA sense strand
cagaagaaguguuacagcu

SEQ ID NO: 2591829 - RNA, 19 nt, Homo sapiens
  misc_RNA (1)...(19): siRNA sense strand
gcuuguuuggaguugguaa

SEQ ID NO: 2591830 - RNA, 19 nt, Homo sapiens
  misc_RNA (1)...(19): siRNA sense strand
gcuucagaguaauccauau

SEQ ID NO: 2591831 - RNA, 19 nt, Homo sapiens
  misc_RNA (1)...(19): siRNA sense strand
agacagaguugaaugcaag

SEQ ID NO: 2591832 - RNA, 19 nt, Homo sapiens
  misc_RNA (1)...(19): siRNA sense strand
cagaguugaaugcaagcaa

SEQ ID NO: 2591833 - RNA, 19 nt, Homo sapiens
  misc_RNA (1)...(19): siRNA sense strand
ggucagagcuggagcccua

SEQ ID NO: 2591834 - RNA, 19 nt, Homo sapiens
  misc_RNA (1)...(19): siRNA sense strand
caaagaaaguacucaggga

SEQ ID NO: 2591835 - RNA, 19 nt, Homo sapiens
  misc_RNA (1)...(19): siRNA sense strand
ggccauauguugcugggaa

SEQ ID NO: 2591836 - RNA, 19 nt, Homo sapiens
  misc_RNA (1)...(19): siRNA sense strand
gaggaugacacgugccuga

SEQ ID NO: 2591837 - RNA, 19 nt, Homo sapiens
  misc_RNA (1)...(19): siRNA sense strand
gaguuuggacggagggucu

SEQ ID NO: 2591838 - RNA, 19 nt, Homo sapiens
  misc_RNA (1)...(19): siRNA sense strand
acugcugaauggagugcua

SEQ ID NO: 2591839 - RNA, 19 nt, Homo sapiens
  misc_RNA (1)...(19): siRNA sense strand
gccaggagcugcuagccaa

SEQ ID NO: 2591840 - RNA, 19 nt, Homo sapiens
  misc_RNA (1)...(19): siRNA sense strand
cggaaaggccugacagcug

SEQ ID NO: 2591841 - RNA, 19 nt, Homo sapiens
  misc_RNA (1)...(19): siRNA sense strand
ggauggaacugcaguggac

SEQ ID NO: 2591842 - RNA, 19 nt, Homo sapiens
  misc_RNA (1)...(19): siRNA sense strand
gcgaugaacuauaacgcga

SEQ ID NO: 2591843 - RNA, 19 nt, Homo sapiens
  misc_RNA (1)...(19): siRNA sense strand
gagauugauuauaccggaa

SEQ ID NO: 2591844 - RNA, 19 nt, Homo sapiens
  misc_RNA (1)...(19): siRNA sense strand
agaacgauuuaaagguaca

SEQ ID NO: 2591845 - RNA, 19 nt, Homo sapiens
  misc_RNA (1)...(19): siRNA sense strand
auugcuugguggacagaua

SEQ ID NO: 2591846 - RNA, 19 nt, Homo sapiens
  misc_RNA (1)...(19): siRNA sense strand
cgucuuauagaaaggaaaa

SEQ ID NO: 2591847 - RNA, 19 nt, Homo sapiens
  misc_RNA (1)...(19): siRNA sense strand
uaguaauacagcugacauu

SEQ ID NO: 2591848 - RNA, 19 nt, Homo sapiens
  misc_RNA (1)...(19): siRNA sense strand
agaaaugaagacaaaccaa

SEQ ID NO: 2591849 - RNA, 19 nt, Homo sapiens
  misc_RNA (1)...(19): siRNA sense strand
aaaagucauuugagggcaa

SEQ ID NO: 2591850 - RNA, 19 nt, Homo sapiens
  misc_RNA (1)...(19): siRNA sense strand
caguaaggaaugugaaccu

SEQ ID NO: 2591851 - RNA, 19 nt, Homo sapiens
  misc_RNA (1)...(19): siRNA sense strand
cgaugaacuauaacgcgaa

SEQ ID NO: 2591852 - RNA, 19 nt, Homo sapiens
  misc_RNA (1)...(19): siRNA sense strand
ccuuccagucccuguaaua

SEQ ID NO: 2591853 - RNA, 19 nt, Homo sapiens
  misc_RNA (1)...(19): siRNA sense strand
ucgucuuauagaaaggaaa

SEQ ID NO: 2591854 - RNA, 19 nt, Homo sapiens
  misc_RNA (1)...(19): siRNA sense strand
uggcaggauaauaggguaa

SEQ ID NO: 2591855 - RNA, 19 nt, Homo sapiens
  misc_RNA (1)...(19): siRNA sense strand
caaggaaggucuaugcaca

SEQ ID NO: 2591856 - RNA, 19 nt, Homo sapiens
  misc_RNA (1)...(19): siRNA sense strand
cugcaaacccagauggaau

SEQ ID NO: 2591857 - RNA, 19 nt, Homo sapiens
  misc_RNA (1)...(19): siRNA sense strand
auacaaugcaagaggugaa

SEQ ID NO: 2591858 - RNA, 19 nt, Homo sapiens
  misc_RNA (1)...(19): siRNA sense strand
cagauggaauggugggaga

SEQ ID NO: 2591859 - RNA, 19 nt, Homo sapiens
  misc_RNA (1)...(19): siRNA sense strand
agagaaagcgggugagcga

SEQ ID NO: 2591860 - RNA, 19 nt, Homo sapiens
  misc_RNA (1)...(19): siRNA sense strand
cgagcgggaagaagagaaa

SEQ ID NO: 2591861 - RNA, 19 nt, Homo sapiens
  misc_RNA (1)...(19): siRNA sense strand
aagaagagaaagcggguga

SEQ ID NO: 2591862 - RNA, 19 nt, Homo sapiens
  misc_RNA (1)...(19): siRNA sense strand
ccuccuuguggaagaauaa

SEQ ID NO: 2591863 - RNA, 19 nt, Homo sapiens
  misc_RNA (1)...(19): siRNA sense strand
gucacaacaaacagaguaa

SEQ ID NO: 2591864 - RNA, 19 nt, Homo sapiens
  misc_RNA (1)...(19): siRNA sense strand
guucaaagucccaggcugu

SEQ ID NO: 2591865 - RNA, 19 nt, Homo sapiens
  misc_RNA (1)...(19): siRNA sense strand
cuucacaggcacaguguau

SEQ ID NO: 2591866 - RNA, 19 nt, Homo sapiens
  misc_RNA (1)...(19): siRNA sense strand
auauuaagguggaggacac

SEQ ID NO: 2591867 - RNA, 19 nt, Homo sapiens
  misc_RNA (1)...(19): siRNA sense strand
ucauugaaagagugccaaa

SEQ ID NO: 2591868 - RNA, 19 nt, Homo sapiens
  misc_RNA (1)...(19): siRNA sense strand
ggucccugaaggauggaaa

SEQ ID NO: 2591869 - RNA, 19 nt, Homo sapiens
  misc_RNA (1)...(19): siRNA sense strand
ccauaucaucugcgacaau

SEQ ID NO: 2591870 - RNA, 19 nt, Homo sapiens
  misc_RNA (1)...(19): siRNA sense strand
ucauggaagagcuggugaa

SEQ ID NO: 2591871 - RNA, 19 nt, Homo sapiens
  misc_RNA (1)...(19): siRNA sense strand
ucauggagcucuggggaaa

SEQ ID NO: 2591872 - RNA, 19 nt, Homo sapiens
  misc_RNA (1)...(19): siRNA sense strand
cgagaugcucagagugcga

SEQ ID NO: 2591873 - RNA, 19 nt, Homo sapiens
  misc_RNA (1)...(19): siRNA sense strand
uguggaagaauaaggacau

SEQ ID NO: 2591874 - RNA, 19 nt, Homo sapiens
  misc_RNA (1)...(19): siRNA sense strand
uggaauggugggagaguuc

SEQ ID NO: 2591875 - RNA, 19 nt, Homo sapiens
  misc_RNA (1)...(19): siRNA sense strand
ggaagaagagaaagcgggu

SEQ ID NO: 2591876 - RNA, 19 nt, Homo sapiens
  misc_RNA (1)...(19): siRNA sense strand
ucaaggaugcaguggaagu

SEQ ID NO: 2591877 - RNA, 19 nt, Homo sapiens
  misc_RNA (1)...(19): siRNA sense strand
auuacgagaaagugucuua

SEQ ID NO: 2591878 - RNA, 19 nt, Homo sapiens
  misc_RNA (1)...(19): siRNA sense strand
gguguaucuuccagaacca

SEQ ID NO: 2591879 - RNA, 19 nt, Homo sapiens
  misc_RNA (1)...(19): siRNA sense strand
caccaaaggcucaaggaaa

SEQ ID NO: 2591880 - RNA, 19 nt, Homo sapiens
  misc_RNA (1)...(19): siRNA sense strand
ccaacaaaggcaagaggaa

SEQ ID NO: 2591881 - RNA, 19 nt, Homo sapiens
  misc_RNA (1)...(19): siRNA sense strand
gcagauaacuccagggaug

SEQ ID NO: 2591882 - RNA, 19 nt, Homo sapiens
  misc_RNA (1)...(19): siRNA sense strand
gcacagagugacagcacaa

SEQ ID NO: 2591883 - RNA, 19 nt, Homo sapiens
  misc_RNA (1)...(19): siRNA sense strand
agaagaagaccgaagggaa

SEQ ID NO: 2591884 - RNA, 19 nt, Homo sapiens
  misc_RNA (1)...(19): siRNA sense strand
ccauaauagugaaggagca

SEQ ID NO: 2591885 - RNA, 19 nt, Homo sapiens
  misc_RNA (1)...(19): siRNA sense strand
gggaaaucauagaaacaga

SEQ ID NO: 2591886 - RNA, 19 nt, Homo sapiens
  misc_RNA (1)...(19): siRNA sense strand
ugauacaaguggaccuaaa

SEQ ID NO: 2591887 - RNA, 19 nt, Homo sapiens
  misc_RNA (1)...(19): siRNA sense strand
cugaagauagaaagugaaa

SEQ ID NO: 2591888 - RNA, 19 nt, Homo sapiens
  misc_RNA (1)...(19): siRNA sense strand
acaaguggaccuaaagaaa

SEQ ID NO: 2591889 - RNA, 19 nt, Homo sapiens
  misc_RNA (1)...(19): siRNA sense strand
cguaugaaagaacgggaaa

SEQ ID NO: 2591890 - RNA, 19 nt, Homo sapiens
  misc_RNA (1)...(19): siRNA sense strand
aagacaaugccgaggagua

SEQ ID NO: 2591891 - RNA, 19 nt, Homo sapiens
  misc_RNA (1)...(19): siRNA sense strand
cugcaaaagaaaaggauuu

SEQ ID NO: 2591892 - RNA, 19 nt, Homo sapiens
  misc_RNA (1)...(19): siRNA sense strand
agagaagaacuguaggcaa

SEQ ID NO: 2591893 - RNA, 19 nt, Homo sapiens
  misc_RNA (1)...(19): siRNA sense strand
ccacaucaaagcagaagaa

SEQ ID NO: 2591894 - RNA, 19 nt, Homo sapiens
  misc_RNA (1)...(19): siRNA sense strand
acucaaagacacugacaga

SEQ ID NO: 2591895 - RNA, 19 nt, Homo sapiens
  misc_RNA (1)...(19): siRNA sense strand
acaucaaagcagaagaaga

SEQ ID NO: 2591896 - RNA, 19 nt, Homo sapiens
  misc_RNA (1)...(19): siRNA sense strand
gagaagaaugcucaggaau

SEQ ID NO: 2591897 - RNA, 19 nt, Homo sapiens
  misc_RNA (1)...(19): siRNA sense strand
ugcuacagcugcagauaaa

SEQ ID NO: 2591898 - RNA, 19 nt, Homo sapiens
  misc_RNA (1)...(19): siRNA sense strand
gccugaagauagaaaguga

SEQ ID NO: 2591899 - RNA, 19 nt, Homo sapiens
  misc_RNA (1)...(19): siRNA sense strand
cagaaaagcacacgagaga

SEQ ID NO: 2591900 - RNA, 19 nt, Homo sapiens
  misc_RNA (1)...(19): siRNA sense strand
cgugagucauauaacaaua

SEQ ID NO: 2591901 - RNA, 19 nt, Homo sapiens
  misc_RNA (1)...(19): siRNA sense strand
agagaagaaugcucaggaa

SEQ ID NO: 2591902 - RNA, 19 nt, Homo sapiens
  misc_RNA (1)...(19): siRNA sense strand
ccagugacagugaggcaaa

SEQ ID NO: 2591903 - RNA, 19 nt, Homo sapiens
  misc_RNA (1)...(19): siRNA sense strand
ugacuagaauaccaggaaa

SEQ ID NO: 2591904 - RNA, 19 nt, Homo sapiens
  misc_RNA (1)...(19): siRNA sense strand
gcguaugaaagaacgggaa

SEQ ID NO: 2591905 - RNA, 19 nt, Homo sapiens
  misc_RNA (1)...(19): siRNA sense strand
gaagaagaccgaagggaag

SEQ ID NO: 2591906 - RNA, 19 nt, Homo sapiens
  misc_RNA (1)...(19): siRNA sense strand
aggaaaaugcucugaagua

SEQ ID NO: 2591907 - RNA, 19 nt, Homo sapiens
  misc_RNA (1)...(19): siRNA sense strand
ccuuaaagucaagcaguaa

SEQ ID NO: 2591908 - RNA, 19 nt, Homo sapiens
  misc_RNA (1)...(19): siRNA sense strand
cagaaacaagccucagaaa

SEQ ID NO: 2591909 - RNA, 19 nt, Homo sapiens
  misc_RNA (1)...(19): siRNA sense strand
ucauauaacaauaguggga

SEQ ID NO: 2591910 - RNA, 19 nt, Homo sapiens
  misc_RNA (1)...(19): siRNA sense strand
aagggaaaucauagaaaca

SEQ ID NO: 2591911 - RNA, 19 nt, Homo sapiens
  misc_RNA (1)...(19): siRNA sense strand
caucaaagcagaagaagac

SEQ ID NO: 2591912 - RNA, 19 nt, Homo sapiens
  misc_RNA (1)...(19): siRNA sense strand
ggaaaggcggaaucaggaa

SEQ ID NO: 2591913 - RNA, 19 nt, Homo sapiens
  misc_RNA (1)...(19): siRNA sense strand
gggaacaggauugugauaa

SEQ ID NO: 2591914 - RNA, 19 nt, Homo sapiens
  misc_RNA (1)...(19): siRNA sense strand
ccaccaaaggcucaaggaa

SEQ ID NO: 2591915 - RNA, 19 nt, Homo sapiens
  misc_RNA (1)...(19): siRNA sense strand
gguuugagaaagcuguaua

SEQ ID NO: 2591916 - RNA, 19 nt, Homo sapiens
  misc_RNA (1)...(19): siRNA sense strand
aacaauagugggagcagua

SEQ ID NO: 2591917 - RNA, 19 nt, Homo sapiens
  misc_RNA (1)...(19): siRNA sense strand
ugaauaaagugaacccaca

SEQ ID NO: 2591918 - RNA, 19 nt, Homo sapiens
  misc_RNA (1)...(19): siRNA sense strand
aguaacagcaacaaggaga

SEQ ID NO: 2591919 - RNA, 19 nt, Homo sapiens
  misc_RNA (1)...(19): siRNA sense strand
gucugauagguuugagaaa

SEQ ID NO: 2591920 - RNA, 19 nt, Homo sapiens
  misc_RNA (1)...(19): siRNA sense strand
acaccauaauagugaagga

SEQ ID NO: 2591921 - RNA, 19 nt, Homo sapiens
  misc_RNA (1)...(19): siRNA sense strand
ccaaaagggaucagaaagu

SEQ ID NO: 2591922 - RNA, 19 nt, Homo sapiens
  misc_RNA (1)...(19): siRNA sense strand
agcacaacacagagaagaa

SEQ ID NO: 2591923 - RNA, 19 nt, Homo sapiens
  misc_RNA (1)...(19): siRNA sense strand
aggaaauucagcagggcga

SEQ ID NO: 2591924 - RNA, 19 nt, Homo sapiens
  misc_RNA (1)...(19): siRNA sense strand
gaaugaagaugauaaccga

SEQ ID NO: 2591925 - RNA, 19 nt, Homo sapiens
  misc_RNA (1)...(19): siRNA sense strand
gcugaacuggauaaaguaa

SEQ ID NO: 2591926 - RNA, 19 nt, Homo sapiens
  misc_RNA (1)...(19): siRNA sense strand
aguaaaucuucccagaaau

SEQ ID NO: 2591927 - RNA, 19 nt, Homo sapiens
  misc_RNA (1)...(19): siRNA sense strand
uccuuaaagucaagcagua

SEQ ID NO: 2591928 - RNA, 19 nt, Homo sapiens
  misc_RNA (1)...(19): siRNA sense strand
ccucuaugccaccgaaauu

SEQ ID NO: 2591929 - RNA, 19 nt, Homo sapiens
  misc_RNA (1)...(19): siRNA sense strand
cauaguagccagcggacca

SEQ ID NO: 2591930 - RNA, 19 nt, Homo sapiens
  misc_RNA (1)...(19): siRNA sense strand
agagcagggcacugggaau

SEQ ID NO: 2591931 - RNA, 19 nt, Homo sapiens
  misc_RNA (1)...(19): siRNA sense strand
ucaagggaaaucauagaaa

SEQ ID NO: 2591932 - RNA, 19 nt, Homo sapiens
  misc_RNA (1)...(19): siRNA sense strand
agaaacaagccucagaaaa

SEQ ID NO: 2591933 - RNA, 19 nt, Homo sapiens
  misc_RNA (1)...(19): siRNA sense strand
aaggcaagaggaagcauaa

SEQ ID NO: 2591934 - RNA, 19 nt, Homo sapiens
  misc_RNA (1)...(19): siRNA sense strand
cggaaugugcugcguauga

SEQ ID NO: 2591935 - RNA, 19 nt, Homo sapiens
  misc_RNA (1)...(19): siRNA sense strand
agauaaacgacucacagua

SEQ ID NO: 2591936 - RNA, 19 nt, Homo sapiens
  misc_RNA (1)...(19): siRNA sense strand
caguagugcuucugcaagu

SEQ ID NO: 2591937 - RNA, 19 nt, Homo sapiens
  misc_RNA (1)...(19): siRNA sense strand
gggcgugggaggcagaaau

SEQ ID NO: 2591938 - RNA, 19 nt, Homo sapiens
  misc_RNA (1)...(19): siRNA sense strand
accaaaggcucaaggaaac

SEQ ID NO: 2591939 - RNA, 19 nt, Homo sapiens
  misc_RNA (1)...(19): siRNA sense strand
ccaaaacggaggacaagaa

SEQ ID NO: 2591940 - RNA, 19 nt, Homo sapiens
  misc_RNA (1)...(19): siRNA sense strand
cauucauacuggagagaaa

SEQ ID NO: 2591941 - RNA, 19 nt, Homo sapiens
  misc_RNA (1)...(19): siRNA sense strand
aguucauacuggagagaaa

SEQ ID NO: 2591942 - RNA, 19 nt, Homo sapiens
  misc_RNA (1)...(19): siRNA sense strand
acuucauacuggagagaaa

SEQ ID NO: 2591943 - RNA, 19 nt, Homo sapiens
  misc_RNA (1)...(19): siRNA sense strand
cuugaaagacauaggagaa

SEQ ID NO: 2591944 - RNA, 19 nt, Homo sapiens
  misc_RNA (1)...(19): siRNA sense strand
acuucauacuggaaagaaa

SEQ ID NO: 2591945 - RNA, 19 nt, Homo sapiens
  misc_RNA (1)...(19): siRNA sense strand
cgaauuuccuguaggccaa

SEQ ID NO: 2591946 - RNA, 19 nt, Homo sapiens
  misc_RNA (1)...(19): siRNA sense strand
acguaaugagaguggcaaa

SEQ ID NO: 2591947 - RNA, 19 nt, Homo sapiens
  misc_RNA (1)...(19): siRNA sense strand
augugaagaaugugacaaa

SEQ ID NO: 2591948 - RNA, 19 nt, Homo sapiens
  misc_RNA (1)...(19): siRNA sense strand
gaugaguaguacagagcga

SEQ ID NO: 2591949 - RNA, 19 nt, Homo sapiens
  misc_RNA (1)...(19): siRNA sense strand
acacagggacauugcaaau

SEQ ID NO: 2591950 - RNA, 19 nt, Homo sapiens
  misc_RNA (1)...(19): siRNA sense strand
uggcaagaccuuuguucaa

SEQ ID NO: 2591951 - RNA, 19 nt, Homo sapiens
  misc_RNA (1)...(19): siRNA sense strand
ucucaggaggaguggaaau

SEQ ID NO: 2591952 - RNA, 19 nt, Homo sapiens
  misc_RNA (1)...(19): siRNA sense strand
ggcaagaaaaugaaacaaa

SEQ ID NO: 2591953 - RNA, 19 nt, Homo sapiens
  misc_RNA (1)...(19): siRNA sense strand
gcgacaugaucaaaggcau

SEQ ID NO: 2591954 - RNA, 19 nt, Homo sapiens
  misc_RNA (1)...(19): siRNA sense strand
ccuugaaagacauaggaga

SEQ ID NO: 2591955 - RNA, 19 nt, Homo sapiens
  misc_RNA (1)...(19): siRNA sense strand
agggaaaauugguaaucaa

SEQ ID NO: 2591956 - RNA, 19 nt, Homo sapiens
  misc_RNA (1)...(19): siRNA sense strand
agauaauccauuuaggaga

SEQ ID NO: 2591957 - RNA, 19 nt, Homo sapiens
  misc_RNA (1)...(19): siRNA sense strand
aaucaaaccuugcacguca

SEQ ID NO: 2591958 - RNA, 19 nt, Homo sapiens
  misc_RNA (1)...(19): siRNA sense strand
cuucauacuggaaagaaau

SEQ ID NO: 2591959 - RNA, 19 nt, Homo sapiens
  misc_RNA (1)...(19): siRNA sense strand
caucaacaggacaaggcaa

SEQ ID NO: 2591960 - RNA, 19 nt, Homo sapiens
  misc_RNA (1)...(19): siRNA sense strand
aggacaaggcaauacagaa

SEQ ID NO: 2591961 - RNA, 19 nt, Homo sapiens
  misc_RNA (1)...(19): siRNA sense strand
agucaucacauuggagaua

SEQ ID NO: 2591962 - RNA, 19 nt, Homo sapiens
  misc_RNA (1)...(19): siRNA sense strand
ccacacagggacauugcaa

SEQ ID NO: 2591963 - RNA, 19 nt, Homo sapiens
  misc_RNA (1)...(19): siRNA sense strand
aaauguaagguuugugaca

SEQ ID NO: 2591964 - RNA, 19 nt, Homo sapiens
  misc_RNA (1)...(19): siRNA sense strand
cuuccaaaugcaugaugaa

SEQ ID NO: 2591965 - RNA, 19 nt, Homo sapiens
  misc_RNA (1)...(19): siRNA sense strand
aaaugaaacaaauggccau

SEQ ID NO: 2591966 - RNA, 19 nt, Homo sapiens
  misc_RNA (1)...(19): siRNA sense strand
uguaaugaguguggcaaga

SEQ ID NO: 2591967 - RNA, 19 nt, Homo sapiens
  misc_RNA (1)...(19): siRNA sense strand
uguaaugaguguggcaaga

SEQ ID NO: 2591968 - RNA, 19 nt, Homo sapiens
  misc_RNA (1)...(19): siRNA sense strand
aucaaaggcaugcuggaaa

SEQ ID NO: 2591969 - RNA, 19 nt, Homo sapiens
  misc_RNA (1)...(19): siRNA sense strand
ccgaagggaaaauugguaa

SEQ ID NO: 2591970 - RNA, 19 nt, Homo sapiens
  misc_RNA (1)...(19): siRNA sense strand
caacguaaugagaguggca

SEQ ID NO: 2591971 - RNA, 19 nt, Homo sapiens
  misc_RNA (1)...(19): siRNA sense strand
uggagagaaaccauacaaa

SEQ ID NO: 2591972 - RNA, 19 nt, Homo sapiens
  misc_RNA (1)...(19): siRNA sense strand
ccuuacaaaugugaagaau

SEQ ID NO: 2591973 - RNA, 19 nt, Homo sapiens
  misc_RNA (1)...(19): siRNA sense strand
uccaaaugcaugaugaaga

SEQ ID NO: 2591974 - RNA, 19 nt, Homo sapiens
  misc_RNA (1)...(19): siRNA sense strand
guucucaucaacaggacaa

SEQ ID NO: 2591975 - RNA, 19 nt, Homo sapiens
  misc_RNA (1)...(19): siRNA sense strand
gcacagagaucgaaaccac

SEQ ID NO: 2591976 - RNA, 19 nt, Homo sapiens
  misc_RNA (1)...(19): siRNA sense strand
gugugaaguugggagguau

SEQ ID NO: 2591977 - RNA, 19 nt, Homo sapiens
  misc_RNA (1)...(19): siRNA sense strand
acuccaugugugucagaaa

SEQ ID NO: 2591978 - RNA, 19 nt, Homo sapiens
  misc_RNA (1)...(19): siRNA sense strand
auggcagaaucuaggaaga

SEQ ID NO: 2591979 - RNA, 19 nt, Homo sapiens
  misc_RNA (1)...(19): siRNA sense strand
aaacaacgcaagaaggguu

SEQ ID NO: 2591980 - RNA, 19 nt, Homo sapiens
  misc_RNA (1)...(19): siRNA sense strand
gcggcaguaagaagggcaa

SEQ ID NO: 2591981 - RNA, 19 nt, Homo sapiens
  misc_RNA (1)...(19): siRNA sense strand
cugcauggugugucggaga

SEQ ID NO: 2591982 - RNA, 19 nt, Homo sapiens
  misc_RNA (1)...(19): siRNA sense strand
guugggagguauugccaca

SEQ ID NO: 2591983 - RNA, 19 nt, Homo sapiens
  misc_RNA (1)...(19): siRNA sense strand
gcagaaucuaggaagacca

SEQ ID NO: 2591984 - RNA, 19 nt, Homo sapiens
  misc_RNA (1)...(19): siRNA sense strand
uaaaagggcaugaaggaga

SEQ ID NO: 2591985 - RNA, 19 nt, Homo sapiens
  misc_RNA (1)...(19): siRNA sense strand
aggaagaggaggagaucga

SEQ ID NO: 2591986 - RNA, 19 nt, Homo sapiens
  misc_RNA (1)...(19): siRNA sense strand
aagcugaacuugagggagu

SEQ ID NO: 2591987 - RNA, 19 nt, Homo sapiens
  misc_RNA (1)...(19): siRNA sense strand
agauugaggaagaccguaa

SEQ ID NO: 2591988 - RNA, 19 nt, Homo sapiens
  misc_RNA (1)...(19): siRNA sense strand
ggaagaaggugaugaggag

SEQ ID NO: 2591989 - RNA, 19 nt, Homo sapiens
  misc_RNA (1)...(19): siRNA sense strand
ccucaaucucugaccguaa

SEQ ID NO: 2591990 - RNA, 19 nt, Homo sapiens
  misc_RNA (1)...(19): siRNA sense strand
gggagaagaucgaccagga

SEQ ID NO: 2591991 - RNA, 19 nt, Homo sapiens
  misc_RNA (1)...(19): siRNA sense strand
gcuggaagcaggagaggga

SEQ ID NO: 2591992 - RNA, 19 nt, Homo sapiens
  misc_RNA (1)...(19): siRNA sense strand
augaagaaugggaggacau

SEQ ID NO: 2591993 - RNA, 19 nt, Homo sapiens
  misc_RNA (1)...(19): siRNA sense strand
ccgagaagaccgaugggau

SEQ ID NO: 2591994 - RNA, 19 nt, Homo sapiens
  misc_RNA (1)...(19): siRNA sense strand
agaagaugaaugaggagau

SEQ ID NO: 2591995 - RNA, 19 nt, Homo sapiens
  misc_RNA (1)...(19): siRNA sense strand
aggaggagaucgaggugga

SEQ ID NO: 2591996 - RNA, 19 nt, Homo sapiens
  misc_RNA (1)...(19): siRNA sense strand
caugaugaccgcugggaga

SEQ ID NO: 2591997 - RNA, 19 nt, Homo sapiens
  misc_RNA (1)...(19): siRNA sense strand
aggaugaggaagaggagga

SEQ ID NO: 2591998 - RNA, 19 nt, Homo sapiens
  misc_RNA (1)...(19): siRNA sense strand
ccguaagaaagcugaacuu

SEQ ID NO: 2591999 - RNA, 19 nt, Homo sapiens
  misc_RNA (1)...(19): siRNA sense strand
uggaagcaggagagggaga

SEQ ID NO: 2592000 - RNA, 19 nt, Homo sapiens
  misc_RNA (1)...(19): siRNA sense strand
ucgccgaguaugagcgcaa

SEQ ID NO: 2592001 - RNA, 19 nt, Homo sapiens
  misc_RNA (1)...(19): siRNA sense strand
aggagaucgagguggaaga

SEQ ID NO: 2592002 - RNA, 19 nt, Homo sapiens
  misc_RNA (1)...(19): siRNA sense strand
uggcaguggagucggagaa

SEQ ID NO: 2592003 - RNA, 19 nt, Homo sapiens
  misc_RNA (1)...(19): siRNA sense strand
cgagaagaccgaugggaug

SEQ ID NO: 2592004 - RNA, 19 nt, Homo sapiens
  misc_RNA (1)...(19): siRNA sense strand
augaggaagaggaggagau

SEQ ID NO: 2592005 - RNA, 19 nt, Homo sapiens
  misc_RNA (1)...(19): siRNA sense strand
cuaccaggagauugaggaa

SEQ ID NO: 2592006 - RNA, 19 nt, Homo sapiens
  misc_RNA (1)...(19): siRNA sense strand
aggacauaagugaggauga

SEQ ID NO: 2592007 - RNA, 19 nt, Homo sapiens
  misc_RNA (1)...(19): siRNA sense strand
augaaugaggagauggaga

SEQ ID NO: 2592008 - RNA, 19 nt, Homo sapiens
  misc_RNA (1)...(19): siRNA sense strand
uggaagaaggugaugagga

SEQ ID NO: 2592009 - RNA, 19 nt, Homo sapiens
  misc_RNA (1)...(19): siRNA sense strand
agaacauugagaagaugaa

SEQ ID NO: 2592010 - RNA, 19 nt, Homo sapiens
  misc_RNA (1)...(19): siRNA sense strand
agaugaaugaggagaugga

SEQ ID NO: 2592011 - RNA, 19 nt, Homo sapiens
  misc_RNA (1)...(19): siRNA sense strand
cugaguuggacaagaggau

SEQ ID NO: 2592012 - RNA, 19 nt, Homo sapiens
  misc_RNA (1)...(19): siRNA sense strand
agaaggagaacguggcagu

SEQ ID NO: 2592013 - RNA, 19 nt, Homo sapiens
  misc_RNA (1)...(19): siRNA sense strand
cagcagccgcagaaggaga

SEQ ID NO: 2592014 - RNA, 19 nt, Homo sapiens
  misc_RNA (1)...(19): siRNA sense strand
gaugaagaaugggaggaca

SEQ ID NO: 2592015 - RNA, 19 nt, Homo sapiens
  misc_RNA (1)...(19): siRNA sense strand
aagaaggugaugaggagga

SEQ ID NO: 2592016 - RNA, 19 nt, Homo sapiens
  misc_RNA (1)...(19): siRNA sense strand
ggacaagaggaucgaggcu

SEQ ID NO: 2592017 - RNA, 19 nt, Homo sapiens
  misc_RNA (1)...(19): siRNA sense strand
uggaggagucugagcggga

SEQ ID NO: 2592018 - RNA, 19 nt, Homo sapiens
  misc_RNA (1)...(19): siRNA sense strand
gagaagaugaaugaggaga

SEQ ID NO: 2592019 - RNA, 19 nt, Homo sapiens
  misc_RNA (1)...(19): siRNA sense strand
gguacguggugguggcuga

SEQ ID NO: 2592020 - RNA, 19 nt, Homo sapiens
  misc_RNA (1)...(19): siRNA sense strand
aggaaucccaagugccaaa

SEQ ID NO: 2592021 - RNA, 19 nt, Homo sapiens
  misc_RNA (1)...(19): siRNA sense strand
cggcuuacaaacuggauga

SEQ ID NO: 2592022 - RNA, 19 nt, Homo sapiens
  misc_RNA (1)...(19): siRNA sense strand
ccaugcugcaggaggagaa

SEQ ID NO: 2592023 - RNA, 19 nt, Homo sapiens
  misc_RNA (1)...(19): siRNA sense strand
caaugaaggagcugaccca

SEQ ID NO: 2592024 - RNA, 19 nt, Homo sapiens
  misc_RNA (1)...(19): siRNA sense strand
gagagagggcuucggacga

SEQ ID NO: 2592025 - RNA, 19 nt, Homo sapiens
  misc_RNA (1)...(19): siRNA sense strand
gagaagggccuguggcuga

SEQ ID NO: 2592026 - RNA, 19 nt, Homo sapiens
  misc_RNA (1)...(19): siRNA sense strand
ccuggaaggccgugagagu

SEQ ID NO: 2592027 - RNA, 19 nt, Homo sapiens
  misc_RNA (1)...(19): siRNA sense strand
uguuugacccggagcagaa

SEQ ID NO: 2592028 - RNA, 19 nt, Homo sapiens
  misc_RNA (1)...(19): siRNA sense strand
gaacacuccucuaggguug

SEQ ID NO: 2592029 - RNA, 19 nt, Homo sapiens
  misc_RNA (1)...(19): siRNA sense strand
cagccucaaagaugggaaa

SEQ ID NO: 2592030 - RNA, 19 nt, Homo sapiens
  misc_RNA (1)...(19): siRNA sense strand
gcgcagaggaacaagaaaa

SEQ ID NO: 2592031 - RNA, 19 nt, Homo sapiens
  misc_RNA (1)...(19): siRNA sense strand
ggaaguaccuggagcagca

SEQ ID NO: 2592032 - RNA, 19 nt, Homo sapiens
  misc_RNA (1)...(19): siRNA sense strand
aaccagacacauaggacaa

SEQ ID NO: 2592033 - RNA, 19 nt, Homo sapiens
  misc_RNA (1)...(19): siRNA sense strand
ucuauaaccuggaagacca

SEQ ID NO: 2592034 - RNA, 19 nt, Homo sapiens
  misc_RNA (1)...(19): siRNA sense strand
gugaagaagcucagccugu

SEQ ID NO: 2592035 - RNA, 19 nt, Homo sapiens
  misc_RNA (1)...(19): siRNA sense strand
ccucuugauguuuggguuu

SEQ ID NO: 2592036 - RNA, 19 nt, Homo sapiens
  misc_RNA (1)...(19): siRNA sense strand
acacaaguaaccuggacau

SEQ ID NO: 2592037 - RNA, 19 nt, Homo sapiens
  misc_RNA (1)...(19): siRNA sense strand
gaacucaagucuuacgcuu

SEQ ID NO: 2592038 - RNA, 19 nt, Homo sapiens
  misc_RNA (1)...(19): siRNA sense strand
cagcacagcaccuggcuca

SEQ ID NO: 2592039 - RNA, 19 nt, Homo sapiens
  misc_RNA (1)...(19): siRNA sense strand
agagaauacgagagaccca

SEQ ID NO: 2592040 - RNA, 19 nt, Homo sapiens
  misc_RNA (1)...(19): siRNA sense strand
agucuuacgcuuugggagu

SEQ ID NO: 2592041 - RNA, 19 nt, Homo sapiens
  misc_RNA (1)...(19): siRNA sense strand
cccgcaaaccagacacaua

SEQ ID NO: 2592042 - RNA, 19 nt, Homo sapiens
  misc_RNA (1)...(19): siRNA sense strand
cugcaauaauaacugugaa

SEQ ID NO: 2592043 - RNA, 19 nt, Homo sapiens
  misc_RNA (1)...(19): siRNA sense strand
uggaaagcgagcaggccau

SEQ ID NO: 2592044 - RNA, 19 nt, Homo sapiens
  misc_RNA (1)...(19): siRNA sense strand
gauuaaagcacaaggacga

SEQ ID NO: 2592045 - RNA, 19 nt, Homo sapiens
  misc_RNA (1)...(19): siRNA sense strand
aaagaaaguucaaaggaga

SEQ ID NO: 2592046 - RNA, 19 nt, Homo sapiens
  misc_RNA (1)...(19): siRNA sense strand
aagaaaguucaaaggagaa

SEQ ID NO: 2592047 - RNA, 19 nt, Homo sapiens
  misc_RNA (1)...(19): siRNA sense strand
ucgaagagauuaaagcaca

SEQ ID NO: 2592048 - RNA, 19 nt, Homo sapiens
  misc_RNA (1)...(19): siRNA sense strand
gaggcaucagagagaguaa

SEQ ID NO: 2592049 - RNA, 19 nt, Homo sapiens
  misc_RNA (1)...(19): siRNA sense strand
agaaaguucaaaggagaaa

SEQ ID NO: 2592050 - RNA, 19 nt, Homo sapiens
  misc_RNA (1)...(19): siRNA sense strand
augcaaguuuggagaagga

SEQ ID NO: 2592051 - RNA, 19 nt, Homo sapiens
  misc_RNA (1)...(19): siRNA sense strand
acgcugugguggagccaau

SEQ ID NO: 2592052 - RNA, 19 nt, Homo sapiens
  misc_RNA (1)...(19): siRNA sense strand
caaguuuggagaaggaaaa

SEQ ID NO: 2592053 - RNA, 19 nt, Homo sapiens
  misc_RNA (1)...(19): siRNA sense strand
ucaucaguuccaagagcaa

SEQ ID NO: 2592054 - RNA, 19 nt, Homo sapiens
  misc_RNA (1)...(19): siRNA sense strand
aucagagagaguaaagaaa

SEQ ID NO: 2592055 - RNA, 19 nt, Homo sapiens
  misc_RNA (1)...(19): siRNA sense strand
aagccaaggaauugaguua

SEQ ID NO: 2592056 - RNA, 19 nt, Homo sapiens
  misc_RNA (1)...(19): siRNA sense strand
gcuagaaaucucugaccaa

SEQ ID NO: 2592057 - RNA, 19 nt, Homo sapiens
  misc_RNA (1)...(19): siRNA sense strand
cgaacggaaugaugggaga

SEQ ID NO: 2592058 - RNA, 19 nt, Homo sapiens
  misc_RNA (1)...(19): siRNA sense strand
uuuagaaagccaaggaauu

SEQ ID NO: 2592059 - RNA, 19 nt, Homo sapiens
  misc_RNA (1)...(19): siRNA sense strand
ggauauguggacagagaca

SEQ ID NO: 2592060 - RNA, 19 nt, Homo sapiens
  misc_RNA (1)...(19): siRNA sense strand
cuccagaagcagaaagcaa

SEQ ID NO: 2592061 - RNA, 19 nt, Homo sapiens
  misc_RNA (1)...(19): siRNA sense strand
agacaacauucgugaggca

SEQ ID NO: 2592062 - RNA, 19 nt, Homo sapiens
  misc_RNA (1)...(19): siRNA sense strand
cuuuaaggacucuacgaaa

SEQ ID NO: 2592063 - RNA, 19 nt, Homo sapiens
  misc_RNA (1)...(19): siRNA sense strand
cggaaugaugggagagauc

SEQ ID NO: 2592064 - RNA, 19 nt, Homo sapiens
  misc_RNA (1)...(19): siRNA sense strand
uggaugauacgguggaaau

SEQ ID NO: 2592065 - RNA, 19 nt, Homo sapiens
  misc_RNA (1)...(19): siRNA sense strand
uggaugacuccuugguuaa

SEQ ID NO: 2592066 - RNA, 19 nt, Homo sapiens
  misc_RNA (1)...(19): siRNA sense strand
ccucagugugugcuagaaa

SEQ ID NO: 2592067 - RNA, 19 nt, Homo sapiens
  misc_RNA (1)...(19): siRNA sense strand
gguggaaauucgagagguc

SEQ ID NO: 2592068 - RNA, 19 nt, Homo sapiens
  misc_RNA (1)...(19): siRNA sense strand
ugauugaaguguuugguca

SEQ ID NO: 2592069 - RNA, 19 nt, Homo sapiens
  misc_RNA (1)...(19): siRNA sense strand
cguuguugacugugaccaa

SEQ ID NO: 2592070 - RNA, 19 nt, Homo sapiens
  misc_RNA (1)...(19): siRNA sense strand
uuuaaggacucuacgaaaa

SEQ ID NO: 2592071 - RNA, 19 nt, Homo sapiens
  misc_RNA (1)...(19): siRNA sense strand
gggaugauacagacagcau

SEQ ID NO: 2592072 - RNA, 19 nt, Homo sapiens
  misc_RNA (1)...(19): siRNA sense strand
gcaaagacaacauucguga

SEQ ID NO: 2592073 - RNA, 19 nt, Homo sapiens
  misc_RNA (1)...(19): siRNA sense strand
uggaaaaugcaaagaacuu

SEQ ID NO: 2592074 - RNA, 19 nt, Homo sapiens
  misc_RNA (1)...(19): siRNA sense strand
gaaccauguccgaaagcga

SEQ ID NO: 2592075 - RNA, 19 nt, Homo sapiens
  misc_RNA (1)...(19): siRNA sense strand
acugaaauuugaugccuau

SEQ ID NO: 2592076 - RNA, 19 nt, Homo sapiens
  misc_RNA (1)...(19): siRNA sense strand
aguuaaauccaccagagaa

SEQ ID NO: 2592077 - RNA, 19 nt, Homo sapiens
  misc_RNA (1)...(19): siRNA sense strand
guuaaauccaccagagaag

SEQ ID NO: 2592078 - RNA, 19 nt, Homo sapiens
  misc_RNA (1)...(19): siRNA sense strand
cauuuaugauugugaucca

SEQ ID NO: 2592079 - RNA, 19 nt, Homo sapiens
  misc_RNA (1)...(19): siRNA sense strand
gaagcagaaagcaagcaaa

SEQ ID NO: 2592080 - RNA, 19 nt, Homo sapiens
  misc_RNA (1)...(19): siRNA sense strand
gaguuaaauccaccagaga

SEQ ID NO: 2592081 - RNA, 19 nt, Homo sapiens
  misc_RNA (1)...(19): siRNA sense strand
uuauaacgguuuuggacua

SEQ ID NO: 2592082 - RNA, 19 nt, Homo sapiens
  misc_RNA (1)...(19): siRNA sense strand
uuggaaugguauacugcua

SEQ ID NO: 2592083 - RNA, 19 nt, Homo sapiens
  misc_RNA (1)...(19): siRNA sense strand
cagacagcauguaugguga

SEQ ID NO: 2592084 - RNA, 19 nt, Homo sapiens
  misc_RNA (1)...(19): siRNA sense strand
agacacaauucagaagcaa

SEQ ID NO: 2592085 - RNA, 19 nt, Homo sapiens
  misc_RNA (1)...(19): siRNA sense strand
ggaugauacgguggaaauu

SEQ ID NO: 2592086 - RNA, 19 nt, Homo sapiens
  misc_RNA (1)...(19): siRNA sense strand
ggaagcauuaauagacaca

SEQ ID NO: 2592087 - RNA, 19 nt, Homo sapiens
  misc_RNA (1)...(19): siRNA sense strand
acaucacaauuuauggcaa

SEQ ID NO: 2592088 - RNA, 19 nt, Homo sapiens
  misc_RNA (1)...(19): siRNA sense strand
ggugaaugucggaccuaca

SEQ ID NO: 2592089 - RNA, 19 nt, Homo sapiens
  misc_RNA (1)...(19): siRNA sense strand
cuaugucaacugaggaaca

SEQ ID NO: 2592090 - RNA, 19 nt, Homo sapiens
  misc_RNA (1)...(19): siRNA sense strand
gaggaauaaacaucacaau

SEQ ID NO: 2592091 - RNA, 19 nt, Homo sapiens
  misc_RNA (1)...(19): siRNA sense strand
guuuuggacuaguggaaga

SEQ ID NO: 2592092 - RNA, 19 nt, Homo sapiens
  misc_RNA (1)...(19): siRNA sense strand
ugaccauuaccauuggaaa

SEQ ID NO: 2592093 - RNA, 19 nt, Homo sapiens
  misc_RNA (1)...(19): siRNA sense strand
acucacuauccuugggaga

SEQ ID NO: 2592094 - RNA, 19 nt, Homo sapiens
  misc_RNA (1)...(19): siRNA sense strand
ccauuuacucgacgguauu

SEQ ID NO: 2592095 - RNA, 19 nt, Homo sapiens
  misc_RNA (1)...(19): siRNA sense strand
acaacauucgugaggcauu

SEQ ID NO: 2592096 - RNA, 19 nt, Homo sapiens
  misc_RNA (1)...(19): siRNA sense strand
uagaacagcucauaggaga

SEQ ID NO: 2592097 - RNA, 19 nt, Homo sapiens
  misc_RNA (1)...(19): siRNA sense strand
guaagaaguuugauagcug

SEQ ID NO: 2592098 - RNA, 19 nt, Homo sapiens
  misc_RNA (1)...(19): siRNA sense strand
uuugaaucacccagauaaa

SEQ ID NO: 2592099 - RNA, 19 nt, Homo sapiens
  misc_RNA (1)...(19): siRNA sense strand
acugguaagaaguuugaua

SEQ ID NO: 2592100 - RNA, 19 nt, Homo sapiens
  misc_RNA (1)...(19): siRNA sense strand
cugaagagacauuggagcu

SEQ ID NO: 2592101 - RNA, 19 nt, Homo sapiens
  misc_RNA (1)...(19): siRNA sense strand
gcuaguuucaccugguaau

SEQ ID NO: 2592102 - RNA, 19 nt, Homo sapiens
  misc_RNA (1)...(19): siRNA sense strand
cugaagagacauuggagcu

SEQ ID NO: 2592103 - RNA, 19 nt, Homo sapiens
  misc_RNA (1)...(19): siRNA sense strand
gcuaguuucaccugguaau

SEQ ID NO: 2592104 - RNA, 19 nt, Homo sapiens
  misc_RNA (1)...(19): siRNA sense strand
uggaguaccuggaagccaa

SEQ ID NO: 2592105 - RNA, 19 nt, Homo sapiens
  misc_RNA (1)...(19): siRNA sense strand
ucauugagcauuaugggaa

SEQ ID NO: 2592106 - RNA, 19 nt, Homo sapiens
  misc_RNA (1)...(19): siRNA sense strand
cucucaacauccaggacaa

SEQ ID NO: 2592107 - RNA, 19 nt, Homo sapiens
  misc_RNA (1)...(19): siRNA sense strand
gcuagagauugaagggaca

SEQ ID NO: 2592108 - RNA, 19 nt, Homo sapiens
  misc_RNA (1)...(19): siRNA sense strand
cgucgucgcuuucgggcaa

SEQ ID NO: 2592109 - RNA, 19 nt, Homo sapiens
  misc_RNA (1)...(19): siRNA sense strand
cggaauggccacaucaaaa

SEQ ID NO: 2592110 - RNA, 19 nt, Homo sapiens
  misc_RNA (1)...(19): siRNA sense strand
gcaaguaacuaccagagca

SEQ ID NO: 2592111 - RNA, 19 nt, Homo sapiens
  misc_RNA (1)...(19): siRNA sense strand
ccaauuacaucgagacccu

SEQ ID NO: 2592112 - RNA, 19 nt, Homo sapiens
  misc_RNA (1)...(19): siRNA sense strand
gggacaaauguaagcacca

SEQ ID NO: 2592113 - RNA, 19 nt, Homo sapiens
  misc_RNA (1)...(19): siRNA sense strand
auugaagggacaaauguaa

SEQ ID NO: 2592114 - RNA, 19 nt, Homo sapiens
  misc_RNA (1)...(19): siRNA sense strand
ccuucgaagugcagguacu

SEQ ID NO: 2592115 - RNA, 19 nt, Homo sapiens
  misc_RNA (1)...(19): siRNA sense strand
agguacuagaugacaagaa

SEQ ID NO: 2592116 - RNA, 19 nt, Homo sapiens
  misc_RNA (1)...(19): siRNA sense strand
ggagauaaacgcaagggaa

SEQ ID NO: 2592117 - RNA, 19 nt, Homo sapiens
  misc_RNA (1)...(19): siRNA sense strand
ugaaauugaagaagagcua

SEQ ID NO: 2592118 - RNA, 19 nt, Homo sapiens
  misc_RNA (1)...(19): siRNA sense strand
caacggagcuggagagaag

SEQ ID NO: 2592119 - RNA, 19 nt, Homo sapiens
  misc_RNA (1)...(19): siRNA sense strand
gacaagacguggucaagaa

SEQ ID NO: 2592120 - RNA, 19 nt, Homo sapiens
  misc_RNA (1)...(19): siRNA sense strand
gcuaaaaucucuggacaaa

SEQ ID NO: 2592121 - RNA, 19 nt, Homo sapiens
  misc_RNA (1)...(19): siRNA sense strand
ccagaaagcucaauggaag

SEQ ID NO: 2592122 - RNA, 19 nt, Homo sapiens
  misc_RNA (1)...(19): siRNA sense strand
cagaaagcucaauggaaga

SEQ ID NO: 2592123 - RNA, 19 nt, Homo sapiens
  misc_RNA (1)...(19): siRNA sense strand
gagaaggagauaaacgcaa

SEQ ID NO: 2592124 - RNA, 19 nt, Homo sapiens
  misc_RNA (1)...(19): siRNA sense strand
gagauaaacgcaagggaag

SEQ ID NO: 2592125 - RNA, 19 nt, Homo sapiens
  misc_RNA (1)...(19): siRNA sense strand
agagaagcugcaagagcaa

SEQ ID NO: 2592126 - RNA, 19 nt, Homo sapiens
  misc_RNA (1)...(19): siRNA sense strand
ugaaaagcuuagacagcaa

SEQ ID NO: 2592127 - RNA, 19 nt, Homo sapiens
  misc_RNA (1)...(19): siRNA sense strand
agaaagaagaggugcccga

SEQ ID NO: 2592128 - RNA, 19 nt, Homo sapiens
  misc_RNA (1)...(19): siRNA sense strand
cuacugaaguggaggaggu

SEQ ID NO: 2592129 - RNA, 19 nt, Homo sapiens
  misc_RNA (1)...(19): siRNA sense strand
uugaugaagaagaggugaa

SEQ ID NO: 2592130 - RNA, 19 nt, Homo sapiens
  misc_RNA (1)...(19): siRNA sense strand
ucaacuagauauagcuuca

SEQ ID NO: 2592131 - RNA, 19 nt, Homo sapiens
  misc_RNA (1)...(19): siRNA sense strand
acauugugcacguggagaa

SEQ ID NO: 2592132 - RNA, 19 nt, Homo sapiens
  misc_RNA (1)...(19): siRNA sense strand
gcucaauggaagacugcuu

SEQ ID NO: 2592133 - RNA, 19 nt, Homo sapiens
  misc_RNA (1)...(19): siRNA sense strand
cugaagaagugaaaagcuu

SEQ ID NO: 2592134 - RNA, 19 nt, Homo sapiens
  misc_RNA (1)...(19): siRNA sense strand
cuacugugccucugggauu

SEQ ID NO: 2592135 - RNA, 19 nt, Homo sapiens
  misc_RNA (1)...(19): siRNA sense strand
gcuggagagaagagugaga

SEQ ID NO: 2592136 - RNA, 19 nt, Homo sapiens
  misc_RNA (1)...(19): siRNA sense strand
agauaaacgcaagggaaga

SEQ ID NO: 2592137 - RNA, 19 nt, Homo sapiens
  misc_RNA (1)...(19): siRNA sense strand
ggauccugaagaagugaaa

SEQ ID NO: 2592138 - RNA, 19 nt, Homo sapiens
  misc_RNA (1)...(19): siRNA sense strand
aagagaagcugcaagagca

SEQ ID NO: 2592139 - RNA, 19 nt, Homo sapiens
  misc_RNA (1)...(19): siRNA sense strand
acgcaagggaagagagccu

SEQ ID NO: 2592140 - RNA, 19 nt, Homo sapiens
  misc_RNA (1)...(19): siRNA sense strand
uguguuuagucuugaguca

SEQ ID NO: 2592141 - RNA, 19 nt, Homo sapiens
  misc_RNA (1)...(19): siRNA sense strand
uccauaaagcauugcaaau

SEQ ID NO: 2592142 - RNA, 19 nt, Homo sapiens
  misc_RNA (1)...(19): siRNA sense strand
cugcugagugagaaggaga

SEQ ID NO: 2592143 - RNA, 19 nt, Homo sapiens
  misc_RNA (1)...(19): siRNA sense strand
cuucacaaucucuggauca

SEQ ID NO: 2592144 - RNA, 19 nt, Homo sapiens
  misc_RNA (1)...(19): siRNA sense strand
cagcgacaacucuggacaa

SEQ ID NO: 2592145 - RNA, 19 nt, Homo sapiens
  misc_RNA (1)...(19): siRNA sense strand
uugugcacguggagaaaga

SEQ ID NO: 2592146 - RNA, 19 nt, Homo sapiens
  misc_RNA (1)...(19): siRNA sense strand
ggaagaggcugcuguggcu

SEQ ID NO: 2592147 - RNA, 19 nt, Homo sapiens
  misc_RNA (1)...(19): siRNA sense strand
gcugagugagaaggagaua

SEQ ID NO: 2592148 - RNA, 19 nt, Homo sapiens
  misc_RNA (1)...(19): siRNA sense strand
agcuaaaaucucuggacaa

SEQ ID NO: 2592149 - RNA, 19 nt, Homo sapiens
  misc_RNA (1)...(19): siRNA sense strand
cagcaaggauucuggccaa

SEQ ID NO: 2592150 - RNA, 19 nt, Homo sapiens
  misc_RNA (1)...(19): siRNA sense strand
aguuagacaaugagaagaa

SEQ ID NO: 2592151 - RNA, 19 nt, Homo sapiens
  misc_RNA (1)...(19): siRNA sense strand
aggacaaggauaaggccaa

SEQ ID NO: 2592152 - RNA, 19 nt, Homo sapiens
  misc_RNA (1)...(19): siRNA sense strand
gacaaugagaagaaggauu

SEQ ID NO: 2592153 - RNA, 19 nt, Homo sapiens
  misc_RNA (1)...(19): siRNA sense strand
ucauuugggaucagcgaua

SEQ ID NO: 2592154 - RNA, 19 nt, Homo sapiens
  misc_RNA (1)...(19): siRNA sense strand
ggcagaagucagagcugua

SEQ ID NO: 2592155 - RNA, 19 nt, Homo sapiens
  misc_RNA (1)...(19): siRNA sense strand
gguugaagcuagggagacu

SEQ ID NO: 2592156 - RNA, 19 nt, Homo sapiens
  misc_RNA (1)...(19): siRNA sense strand
uggaaguagcucacggcaa

SEQ ID NO: 2592157 - RNA, 19 nt, Homo sapiens
  misc_RNA (1)...(19): siRNA sense strand
aggauaaggccaaggugga

SEQ ID NO: 2592158 - RNA, 19 nt, Homo sapiens
  misc_RNA (1)...(19): siRNA sense strand
cugaagaaggccauugcaa

SEQ ID NO: 2592159 - RNA, 19 nt, Homo sapiens
  misc_RNA (1)...(19): siRNA sense strand
aagacuaacagcaaggauu

SEQ ID NO: 2592160 - RNA, 19 nt, Homo sapiens
  misc_RNA (1)...(19): siRNA sense strand
aggcagaagccauccgaga

SEQ ID NO: 2592161 - RNA, 19 nt, Homo sapiens
  misc_RNA (1)...(19): siRNA sense strand
gaagaguuccggagggcca

SEQ ID NO: 2592162 - RNA, 19 nt, Homo sapiens
  misc_RNA (1)...(19): siRNA sense strand
ucacaauugaagaugaaga

SEQ ID NO: 2592163 - RNA, 19 nt, Homo sapiens
  misc_RNA (1)...(19): siRNA sense strand
gagcuguacaggaaaucaa

SEQ ID NO: 2592164 - RNA, 19 nt, Homo sapiens
  misc_RNA (1)...(19): siRNA sense strand
acccaacggaagauagaaa

SEQ ID NO: 2592165 - RNA, 19 nt, Homo sapiens
  misc_RNA (1)...(19): siRNA sense strand
gauuugauucagagugaca

SEQ ID NO: 2592166 - RNA, 19 nt, Homo sapiens
  misc_RNA (1)...(19): siRNA sense strand
guggaaauccggaagcuca

SEQ ID NO: 2592167 - RNA, 19 nt, Homo sapiens
  misc_RNA (1)...(19): siRNA sense strand
caauugaagaugaagaacu

SEQ ID NO: 2592168 - RNA, 19 nt, Homo sapiens
  misc_RNA (1)...(19): siRNA sense strand
ucggagacuguaagacuaa

SEQ ID NO: 2592169 - RNA, 19 nt, Homo sapiens
  misc_RNA (1)...(19): siRNA sense strand
acugcaauguggaguguca

SEQ ID NO: 2592170 - RNA, 19 nt, Homo sapiens
  misc_RNA (1)...(19): siRNA sense strand
gaguguaccaccaaggaca

SEQ ID NO: 2592171 - RNA, 19 nt, Homo sapiens
  misc_RNA (1)...(19): siRNA sense strand
ucaccaggaaagaaggauu

SEQ ID NO: 2592172 - RNA, 19 nt, Homo sapiens
  misc_RNA (1)...(19): siRNA sense strand
agagagaacaccuucggaa

SEQ ID NO: 2592173 - RNA, 19 nt, Homo sapiens
  misc_RNA (1)...(19): siRNA sense strand
agaaaaucauuaagcccua

SEQ ID NO: 2592174 - RNA, 19 nt, Homo sapiens
  misc_RNA (1)...(19): siRNA sense strand
cugagaucaaacaggaaau

SEQ ID NO: 2592175 - RNA, 19 nt, Homo sapiens
  misc_RNA (1)...(19): siRNA sense strand
aggaaaucaagccgggaga

SEQ ID NO: 2592176 - RNA, 19 nt, Homo sapiens
  misc_RNA (1)...(19): siRNA sense strand
agagaacaccuucggaaaa

SEQ ID NO: 2592177 - RNA, 19 nt, Homo sapiens
  misc_RNA (1)...(19): siRNA sense strand
gaagauuggcccaugcaca

SEQ ID NO: 2592178 - RNA, 19 nt, Homo sapiens
  misc_RNA (1)...(19): siRNA sense strand
caauauggacagaaaauca

SEQ ID NO: 2592179 - RNA, 19 nt, Homo sapiens
  misc_RNA (1)...(19): siRNA sense strand
ugugaaggaguuugaauca

SEQ ID NO: 2592180 - RNA, 19 nt, Homo sapiens
  misc_RNA (1)...(19): siRNA sense strand
acaugggccuggaacacaa

SEQ ID NO: 2592181 - RNA, 19 nt, Homo sapiens
  misc_RNA (1)...(19): siRNA sense strand
cagaaagaagauuggccca

SEQ ID NO: 2592182 - RNA, 19 nt, Homo sapiens
  misc_RNA (1)...(19): siRNA sense strand
ucugagaucaaacaggaaa

SEQ ID NO: 2592183 - RNA, 19 nt, Homo sapiens
  misc_RNA (1)...(19): siRNA sense strand
acgaggaagacgagaacaa

SEQ ID NO: 2592184 - RNA, 19 nt, Homo sapiens
  misc_RNA (1)...(19): siRNA sense strand
cuggagaggaggaggagaa

SEQ ID NO: 2592185 - RNA, 19 nt, Homo sapiens
  misc_RNA (1)...(19): siRNA sense strand
gaggaggagaagagggaga

SEQ ID NO: 2592186 - RNA, 19 nt, Homo sapiens
  misc_RNA (1)...(19): siRNA sense strand
cugagaaugucaagggcuu

SEQ ID NO: 2592187 - RNA, 19 nt, Homo sapiens
  misc_RNA (1)...(19): siRNA sense strand
agaacaaaccccaggagaa

SEQ ID NO: 2592188 - RNA, 19 nt, Homo sapiens
  misc_RNA (1)...(19): siRNA sense strand
cagcagugaaaauggaaaa

SEQ ID NO: 2592189 - RNA, 19 nt, Homo sapiens
  misc_RNA (1)...(19): siRNA sense strand
acuuggaucaggaggagaa

SEQ ID NO: 2592190 - RNA, 19 nt, Homo sapiens
  misc_RNA (1)...(19): siRNA sense strand
aggaggaggagaagaggga

SEQ ID NO: 2592191 - RNA, 19 nt, Homo sapiens
  misc_RNA (1)...(19): siRNA sense strand
cggccaggacugagaaugu

SEQ ID NO: 2592192 - RNA, 19 nt, Homo sapiens
  misc_RNA (1)...(19): siRNA sense strand
ggaggaacgaggaagacga

SEQ ID NO: 2592193 - RNA, 19 nt, Homo sapiens
  misc_RNA (1)...(19): siRNA sense strand
gugagaaugacaugggcga

SEQ ID NO: 2592194 - RNA, 19 nt, Homo sapiens
  misc_RNA (1)...(19): siRNA sense strand
gaucaggaggagaaagcca

SEQ ID NO: 2592195 - RNA, 19 nt, Homo sapiens
  misc_RNA (1)...(19): siRNA sense strand
ggacugaacaagaagcugu

SEQ ID NO: 2592196 - RNA, 19 nt, Homo sapiens
  misc_RNA (1)...(19): siRNA sense strand
uggaugaagagcaauacaa

SEQ ID NO: 2592197 - RNA, 19 nt, Homo sapiens
  misc_RNA (1)...(19): siRNA sense strand
gggaggacuuggaucagga

SEQ ID NO: 2592198 - RNA, 19 nt, Homo sapiens
  misc_RNA (1)...(19): siRNA sense strand
cugaagaacaccucggcca

SEQ ID NO: 2592199 - RNA, 19 nt, Homo sapiens
  misc_RNA (1)...(19): siRNA sense strand
ggccaggaggaacgaggaa

SEQ ID NO: 2592200 - RNA, 19 nt, Homo sapiens
  misc_RNA (1)...(19): siRNA sense strand
accuggaugaagagcaaua

SEQ ID NO: 2592201 - RNA, 19 nt, Homo sapiens
  misc_RNA (1)...(19): siRNA sense strand
cagccaaagaacagaucaa

SEQ ID NO: 2592202 - RNA, 19 nt, Homo sapiens
  misc_RNA (1)...(19): siRNA sense strand
agccagaugcugaggaaaa

SEQ ID NO: 2592203 - RNA, 19 nt, Homo sapiens
  misc_RNA (1)...(19): siRNA sense strand
caacaagacccaucggacu

SEQ ID NO: 2592204 - RNA, 19 nt, Homo sapiens
  misc_RNA (1)...(19): siRNA sense strand
ccauccugauucuggacaa

SEQ ID NO: 2592205 - RNA, 19 nt, Homo sapiens
  misc_RNA (1)...(19): siRNA sense strand
gaacagaucaaguggucac

SEQ ID NO: 2592206 - RNA, 19 nt, Homo sapiens
  misc_RNA (1)...(19): siRNA sense strand
acaauaaagaucugggaca

SEQ ID NO: 2592207 - RNA, 19 nt, Homo sapiens
  misc_RNA (1)...(19): siRNA sense strand
ccgaaaugagcuacauaau

SEQ ID NO: 2592208 - RNA, 19 nt, Homo sapiens
  misc_RNA (1)...(19): siRNA sense strand
cgucaaugucaucgcguca

SEQ ID NO: 2592209 - RNA, 19 nt, Homo sapiens
  misc_RNA (1)...(19): siRNA sense strand
cuugcaaagaaaaggauaa

SEQ ID NO: 2592210 - RNA, 19 nt, Homo sapiens
  misc_RNA (1)...(19): siRNA sense strand
gaagcaugugggagcggua

SEQ ID NO: 2592211 - RNA, 19 nt, Homo sapiens
  misc_RNA (1)...(19): siRNA sense strand
aggaagagauggagcugac

SEQ ID NO: 2592212 - RNA, 19 nt, Homo sapiens
  misc_RNA (1)...(19): siRNA sense strand
ggaaggaagagauggagcu

SEQ ID NO: 2592213 - RNA, 19 nt, Homo sapiens
  misc_RNA (1)...(19): siRNA sense strand
cugcaguacucgggcaaga

SEQ ID NO: 2592214 - RNA, 19 nt, Homo sapiens
  misc_RNA (1)...(19): siRNA sense strand
cagugcuagugcuuggaaa

SEQ ID NO: 2592215 - RNA, 19 nt, Homo sapiens
  misc_RNA (1)...(19): siRNA sense strand
augccuuggaugagaaaca

SEQ ID NO: 2592216 - RNA, 19 nt, Homo sapiens
  misc_RNA (1)...(19): siRNA sense strand
uggaugagaaacagcuaau

SEQ ID NO: 2592217 - RNA, 19 nt, Homo sapiens
  misc_RNA (1)...(19): siRNA sense strand
gugaaaagauagaagcuuc

SEQ ID NO: 2592218 - RNA, 19 nt, Homo sapiens
  misc_RNA (1)...(19): siRNA sense strand
ccaagaucucagagucaaa

SEQ ID NO: 2592219 - RNA, 19 nt, Homo sapiens
  misc_RNA (1)...(19): siRNA sense strand
cagcagaaucggagaggcu

SEQ ID NO: 2592220 - RNA, 19 nt, Homo sapiens
  misc_RNA (1)...(19): siRNA sense strand
agaacaagcugguggacug

SEQ ID NO: 2592221 - RNA, 19 nt, Homo sapiens
  misc_RNA (1)...(19): siRNA sense strand
cugugcaagcugauaaaua

SEQ ID NO: 2592222 - RNA, 19 nt, Homo sapiens
  misc_RNA (1)...(19): siRNA sense strand
cgccagggacagaacguaa

SEQ ID NO: 2592223 - RNA, 19 nt, Homo sapiens
  misc_RNA (1)...(19): siRNA sense strand
ggacaagagcccauaccca

SEQ ID NO: 2592224 - RNA, 19 nt, Homo sapiens
  misc_RNA (1)...(19): siRNA sense strand
cugcauuuccgccgagaau

SEQ ID NO: 2592225 - RNA, 19 nt, Homo sapiens
  misc_RNA (1)...(19): siRNA sense strand
cagaggacccugauggcuu

SEQ ID NO: 2592226 - RNA, 19 nt, Homo sapiens
  misc_RNA (1)...(19): siRNA sense strand
gacaagagcccauacccaa

SEQ ID NO: 2592227 - RNA, 19 nt, Homo sapiens
  misc_RNA (1)...(19): siRNA sense strand
acccaagaucucagaguca

SEQ ID NO: 2592228 - RNA, 19 nt, Homo sapiens
  misc_RNA (1)...(19): siRNA sense strand
gcuuaagccgagaggugca

SEQ ID NO: 2592229 - RNA, 19 nt, Homo sapiens
  misc_RNA (1)...(19): siRNA sense strand
guuuauacccaccaggaca

SEQ ID NO: 2592230 - RNA, 19 nt, Homo sapiens
  misc_RNA (1)...(19): siRNA sense strand
gggugaagaagcagaaacu

SEQ ID NO: 2592231 - RNA, 19 nt, Homo sapiens
  misc_RNA (1)...(19): siRNA sense strand
uguacauggcauuagaaua

SEQ ID NO: 2592232 - RNA, 19 nt, Homo sapiens
  misc_RNA (1)...(19): siRNA sense strand
uggaagauuggucgagaca

SEQ ID NO: 2592233 - RNA, 19 nt, Homo sapiens
  misc_RNA (1)...(19): siRNA sense strand
ccuuaaagauagccguuuu

SEQ ID NO: 2592234 - RNA, 19 nt, Homo sapiens
  misc_RNA (1)...(19): siRNA sense strand
acugauggguugugggaga

SEQ ID NO: 2592235 - RNA, 19 nt, Homo sapiens
  misc_RNA (1)...(19): siRNA sense strand
gggcauuuggagauguaaa

SEQ ID NO: 2592236 - RNA, 19 nt, Homo sapiens
  misc_RNA (1)...(19): siRNA sense strand
ugguuaggauuguggguga

SEQ ID NO: 2592237 - RNA, 19 nt, Homo sapiens
  misc_RNA (1)...(19): siRNA sense strand
gcaaucagcugccugcaaa

SEQ ID NO: 2592238 - RNA, 19 nt, Homo sapiens
  misc_RNA (1)...(19): siRNA sense strand
ccuucaaaagagagugaua

SEQ ID NO: 2592239 - RNA, 19 nt, Homo sapiens
  misc_RNA (1)...(19): siRNA sense strand
acagaaaggagaaccaaaa

SEQ ID NO: 2592240 - RNA, 19 nt, Homo sapiens
  misc_RNA (1)...(19): siRNA sense strand
auccaaagagugaggccaa

SEQ ID NO: 2592241 - RNA, 19 nt, Homo sapiens
  misc_RNA (1)...(19): siRNA sense strand
cgguauuugaggaucagaa

SEQ ID NO: 2592242 - RNA, 19 nt, Homo sapiens
  misc_RNA (1)...(19): siRNA sense strand
ccaggcagucagugaaaga

SEQ ID NO: 2592243 - RNA, 19 nt, Homo sapiens
  misc_RNA (1)...(19): siRNA sense strand
gcucaaaaugaaagagaac

SEQ ID NO: 2592244 - RNA, 19 nt, Homo sapiens
  misc_RNA (1)...(19): siRNA sense strand
ccaaaauguccucgguauu

SEQ ID NO: 2592245 - RNA, 19 nt, Homo sapiens
  misc_RNA (1)...(19): siRNA sense strand
agucaauagcauccuuaaa

SEQ ID NO: 2592246 - RNA, 19 nt, Homo sapiens
  misc_RNA (1)...(19): siRNA sense strand
caggauaaguuucuggugu

SEQ ID NO: 2592247 - RNA, 19 nt, Homo sapiens
  misc_RNA (1)...(19): siRNA sense strand
aacuagaacggcugaaauu

SEQ ID NO: 2592248 - RNA, 19 nt, Homo sapiens
  misc_RNA (1)...(19): siRNA sense strand
uuggagauguaaaguucaa

SEQ ID NO: 2592249 - RNA, 19 nt, Homo sapiens
  misc_RNA (1)...(19): siRNA sense strand
ucauuguaguucaguucaa

SEQ ID NO: 2592250 - RNA, 19 nt, Homo sapiens
  misc_RNA (1)...(19): siRNA sense strand
aaagagagugauagaaucu

SEQ ID NO: 2592251 - RNA, 19 nt, Homo sapiens
  misc_RNA (1)...(19): siRNA sense strand
acaaggugacucugggaca

SEQ ID NO: 2592252 - RNA, 19 nt, Homo sapiens
  misc_RNA (1)...(19): siRNA sense strand
caacaacgaguuugggacu

SEQ ID NO: 2592253 - RNA, 19 nt, Homo sapiens
  misc_RNA (1)...(19): siRNA sense strand
cagagucgacugagauaca

SEQ ID NO: 2592254 - RNA, 19 nt, Homo sapiens
  misc_RNA (1)...(19): siRNA sense strand
ggcaagagcuuauagaccu

SEQ ID NO: 2592255 - RNA, 19 nt, Homo sapiens
  misc_RNA (1)...(19): siRNA sense strand
cauuuagggcauuuggaga

SEQ ID NO: 2592256 - RNA, 19 nt, Homo sapiens
  misc_RNA (1)...(19): siRNA sense strand
cugcugagccagagguaac

SEQ ID NO: 2592257 - RNA, 19 nt, Homo sapiens
  misc_RNA (1)...(19): siRNA sense strand
ccgauuaaggccacaggau

SEQ ID NO: 2592258 - RNA, 19 nt, Homo sapiens
  misc_RNA (1)...(19): siRNA sense strand
guuugggacuguugaucau

SEQ ID NO: 2592259 - RNA, 19 nt, Homo sapiens
  misc_RNA (1)...(19): siRNA sense strand
cugaaauauuccagaagaa

SEQ ID NO: 2592260 - RNA, 19 nt, Homo sapiens
  misc_RNA (1)...(19): siRNA sense strand
ggagaagaguuaaggagga

SEQ ID NO: 2592261 - RNA, 19 nt, Homo sapiens
  misc_RNA (1)...(19): siRNA sense strand
gaagaguuaaggaggauaa

SEQ ID NO: 2592262 - RNA, 19 nt, Homo sapiens
  misc_RNA (1)...(19): siRNA sense strand
gcauagacuucauggcuga

SEQ ID NO: 2592263 - RNA, 19 nt, Homo sapiens
  misc_RNA (1)...(19): siRNA sense strand
gggaagaaaaggggagaaa

SEQ ID NO: 2592264 - RNA, 19 nt, Homo sapiens
  misc_RNA (1)...(19): siRNA sense strand
gagaaagaaaggagagaag

SEQ ID NO: 2592265 - RNA, 19 nt, Homo sapiens
  misc_RNA (1)...(19): siRNA sense strand
acaauaaaccagagaccau

SEQ ID NO: 2592266 - RNA, 19 nt, Homo sapiens
  misc_RNA (1)...(19): siRNA sense strand
gugaacagucagugcgaau

SEQ ID NO: 2592267 - RNA, 19 nt, Homo sapiens
  misc_RNA (1)...(19): siRNA sense strand
agaaaacggagaagaguua

SEQ ID NO: 2592268 - RNA, 19 nt, Homo sapiens
  misc_RNA (1)...(19): siRNA sense strand
ggguggagaaugaggcaga

SEQ ID NO: 2592269 - RNA, 19 nt, Homo sapiens
  misc_RNA (1)...(19): siRNA sense strand
ccaaacaagaagaaguaga

SEQ ID NO: 2592270 - RNA, 19 nt, Homo sapiens
  misc_RNA (1)...(19): siRNA sense strand
gagaagaguuaaggaggau

SEQ ID NO: 2592271 - RNA, 19 nt, Homo sapiens
  misc_RNA (1)...(19): siRNA sense strand
gauaaaaggaacaaaguca

SEQ ID NO: 2592272 - RNA, 19 nt, Homo sapiens
  misc_RNA (1)...(19): siRNA sense strand
ggucccucauacagagaaa

SEQ ID NO: 2592273 - RNA, 19 nt, Homo sapiens
  misc_RNA (1)...(19): siRNA sense strand
gagaccggguggagaauga

SEQ ID NO: 2592274 - RNA, 19 nt, Homo sapiens
  misc_RNA (1)...(19): siRNA sense strand
cgcugaaagcaguaacaaa

SEQ ID NO: 2592275 - RNA, 19 nt, Homo sapiens
  misc_RNA (1)...(19): siRNA sense strand
agaagaaguagaacagaca

SEQ ID NO: 2592276 - RNA, 19 nt, Homo sapiens
  misc_RNA (1)...(19): siRNA sense strand
caaaagaaauggagauuac

SEQ ID NO: 2592277 - RNA, 19 nt, Homo sapiens
  misc_RNA (1)...(19): siRNA sense strand
agccaaacaagaagaagua

SEQ ID NO: 2592278 - RNA, 19 nt, Homo sapiens
  misc_RNA (1)...(19): siRNA sense strand
aggaaagaauucagagccu

SEQ ID NO: 2592279 - RNA, 19 nt, Homo sapiens
  misc_RNA (1)...(19): siRNA sense strand
ccaugaaagaaaagaucaa

SEQ ID NO: 2592280 - RNA, 19 nt, Homo sapiens
  misc_RNA (1)...(19): siRNA sense strand
cagcaaaagaaauggagau

SEQ ID NO: 2592281 - RNA, 19 nt, Homo sapiens
  misc_RNA (1)...(19): siRNA sense strand
cucugaagaagcugaaaua

SEQ ID NO: 2592282 - RNA, 19 nt, Homo sapiens
  misc_RNA (1)...(19): siRNA sense strand
gaagaaaaggggagaaaac

SEQ ID NO: 2592283 - RNA, 19 nt, Homo sapiens
  misc_RNA (1)...(19): siRNA sense strand
agaucaagaacaaugacua

SEQ ID NO: 2592284 - RNA, 19 nt, Homo sapiens
  misc_RNA (1)...(19): siRNA sense strand
gauuacagaaguagagcca

SEQ ID NO: 2592285 - RNA, 19 nt, Homo sapiens
  misc_RNA (1)...(19): siRNA sense strand
cagaaagauggaacagaca

SEQ ID NO: 2592286 - RNA, 19 nt, Homo sapiens
  misc_RNA (1)...(19): siRNA sense strand
gcaaauaucagcaaggaug

SEQ ID NO: 2592287 - RNA, 19 nt, Homo sapiens
  misc_RNA (1)...(19): siRNA sense strand
guguggaccugguggaagu

SEQ ID NO: 2592288 - RNA, 19 nt, Homo sapiens
  misc_RNA (1)...(19): siRNA sense strand
agaaaggagagaagcagau

SEQ ID NO: 2592289 - RNA, 19 nt, Homo sapiens
  misc_RNA (1)...(19): siRNA sense strand
caaagaagcuguugcacuc

SEQ ID NO: 2592290 - RNA, 19 nt, Homo sapiens
  misc_RNA (1)...(19): siRNA sense strand
gcagaaagauggaacagac

SEQ ID NO: 2592291 - RNA, 19 nt, Homo sapiens
  misc_RNA (1)...(19): siRNA sense strand
ccauagaagaacuaaagga

SEQ ID NO: 2592292 - RNA, 19 nt, Homo sapiens
  misc_RNA (1)...(19): siRNA sense strand
acgaggaguauguagagaa

SEQ ID NO: 2592293 - RNA, 19 nt, Homo sapiens
  misc_RNA (1)...(19): siRNA sense strand
ugaaggaaucuggaggaaa

SEQ ID NO: 2592294 - RNA, 19 nt, Homo sapiens
  misc_RNA (1)...(19): siRNA sense strand
gcgaauuugaaagaagaaa

SEQ ID NO: 2592295 - RNA, 19 nt, Homo sapiens
  misc_RNA (1)...(19): siRNA sense strand
aauggagauuacagaagua

SEQ ID NO: 2592296 - RNA, 19 nt, Homo sapiens
  misc_RNA (1)...(19): siRNA sense strand
aagaaaaccagauggaaca

SEQ ID NO: 2592297 - RNA, 19 nt, Homo sapiens
  misc_RNA (1)...(19): siRNA sense strand
aguccauagaagaacuaaa

SEQ ID NO: 2592298 - RNA, 19 nt, Homo sapiens
  misc_RNA (1)...(19): siRNA sense strand
agaagaaacuugaugagac

SEQ ID NO: 2592299 - RNA, 19 nt, Homo sapiens
  misc_RNA (1)...(19): siRNA sense strand
gcagaaaacucgaaagcag

SEQ ID NO: 2592300 - RNA, 19 nt, Homo sapiens
  misc_RNA (1)...(19): siRNA sense strand
gagaaaugcaucuugcuga

SEQ ID NO: 2592301 - RNA, 19 nt, Homo sapiens
  misc_RNA (1)...(19): siRNA sense strand
uugcugaacaagugaccaa

SEQ ID NO: 2592302 - RNA, 19 nt, Homo sapiens
  misc_RNA (1)...(19): siRNA sense strand
gcagagagagagagaggac

SEQ ID NO: 2592303 - RNA, 19 nt, Homo sapiens
  misc_RNA (1)...(19): siRNA sense strand
caaagauaugcuugaagau

SEQ ID NO: 2592304 - RNA, 19 nt, Homo sapiens
  misc_RNA (1)...(19): siRNA sense strand
gcaaaagaaauggagauua

SEQ ID NO: 2592305 - RNA, 19 nt, Homo sapiens
  misc_RNA (1)...(19): siRNA sense strand
agaaauggagauuacagaa

SEQ ID NO: 2592306 - RNA, 19 nt, Homo sapiens
  misc_RNA (1)...(19): siRNA sense strand
gaagaaacuugaugagacc

SEQ ID NO: 2592307 - RNA, 19 nt, Homo sapiens
  misc_RNA (1)...(19): siRNA sense strand
agagaaagaaaggagagaa

SEQ ID NO: 2592308 - RNA, 19 nt, Homo sapiens
  misc_RNA (1)...(19): siRNA sense strand
aacaagaagaaguagaaca

SEQ ID NO: 2592309 - RNA, 19 nt, Homo sapiens
  misc_RNA (1)...(19): siRNA sense strand
aagaaaggagagaagcaga

SEQ ID NO: 2592310 - RNA, 19 nt, Homo sapiens
  misc_RNA (1)...(19): siRNA sense strand
ggaagaaaaggggagaaaa

SEQ ID NO: 2592311 - RNA, 19 nt, Homo sapiens
  misc_RNA (1)...(19): siRNA sense strand
gagaaaacggagaagaguu

SEQ ID NO: 2592312 - RNA, 19 nt, Homo sapiens
  misc_RNA (1)...(19): siRNA sense strand
gaaaauucuuagccaggaa

SEQ ID NO: 2592313 - RNA, 19 nt, Homo sapiens
  misc_RNA (1)...(19): siRNA sense strand
agucagugcgaauuugaaa

SEQ ID NO: 2592314 - RNA, 19 nt, Homo sapiens
  misc_RNA (1)...(19): siRNA sense strand
gaagaaaaccagauggaac

SEQ ID NO: 2592315 - RNA, 19 nt, Homo sapiens
  misc_RNA (1)...(19): siRNA sense strand
gcuggcagagagagagaga

SEQ ID NO: 2592316 - RNA, 19 nt, Homo sapiens
  misc_RNA (1)...(19): siRNA sense strand
cugaaagcaguaacaaauu

SEQ ID NO: 2592317 - RNA, 19 nt, Homo sapiens
  misc_RNA (1)...(19): siRNA sense strand
guggagaaugaggcagaaa

SEQ ID NO: 2592318 - RNA, 19 nt, Homo sapiens
  misc_RNA (1)...(19): siRNA sense strand
cagaagcaguauugggucu

SEQ ID NO: 2592319 - RNA, 19 nt, Homo sapiens
  misc_RNA (1)...(19): siRNA sense strand
cauuccaaggagagauuua

SEQ ID NO: 2592320 - RNA, 19 nt, Homo sapiens
  misc_RNA (1)...(19): siRNA sense strand
aggagagauuuaaagcaau

SEQ ID NO: 2592321 - RNA, 19 nt, Homo sapiens
  misc_RNA (1)...(19): siRNA sense strand
aguuauuugccgaggaucu

SEQ ID NO: 2592322 - RNA, 19 nt, Homo sapiens
  misc_RNA (1)...(19): siRNA sense strand
gagacugugaauacaacaa

SEQ ID NO: 2592323 - RNA, 19 nt, Homo sapiens
  misc_RNA (1)...(19): siRNA sense strand
ccauauuuacugaagcuca

SEQ ID NO: 2592324 - RNA, 19 nt, Homo sapiens
  misc_RNA (1)...(19): siRNA sense strand
gggccuauaauguggguaa

SEQ ID NO: 2592325 - RNA, 19 nt, Homo sapiens
  misc_RNA (1)...(19): siRNA sense strand
aaauggaaauucugggcaa

SEQ ID NO: 2592326 - RNA, 19 nt, Homo sapiens
  misc_RNA (1)...(19): siRNA sense strand
cguuggagcaguagaugaa

SEQ ID NO: 2592327 - RNA, 19 nt, Homo sapiens
  misc_RNA (1)...(19): siRNA sense strand
gagaaacaccagaugaaaa

SEQ ID NO: 2592328 - RNA, 19 nt, Homo sapiens
  misc_RNA (1)...(19): siRNA sense strand
cgacgaucaaugaaugaaa

SEQ ID NO: 2592329 - RNA, 19 nt, Homo sapiens
  misc_RNA (1)...(19): siRNA sense strand
agauaggacuagagcucau

SEQ ID NO: 2592330 - RNA, 19 nt, Homo sapiens
  misc_RNA (1)...(19): siRNA sense strand
agaacuuaaucuacagcaa

SEQ ID NO: 2592331 - RNA, 19 nt, Homo sapiens
  misc_RNA (1)...(19): siRNA sense strand
acaaagaggggaaggagaa

SEQ ID NO: 2592332 - RNA, 19 nt, Homo sapiens
  misc_RNA (1)...(19): siRNA sense strand
ucccaaugugugaggauaa

SEQ ID NO: 2592333 - RNA, 19 nt, Homo sapiens
  misc_RNA (1)...(19): siRNA sense strand
gaagauaggacuagagcuc

SEQ ID NO: 2592334 - RNA, 19 nt, Homo sapiens
  misc_RNA (1)...(19): siRNA sense strand
ugguuuaacuggaaagcga

SEQ ID NO: 2592335 - RNA, 19 nt, Homo sapiens
  misc_RNA (1)...(19): siRNA sense strand
ucccagacuucuuggacua

SEQ ID NO: 2592336 - RNA, 19 nt, Homo sapiens
  misc_RNA (1)...(19): siRNA sense strand
gaucagaagacucagccua

SEQ ID NO: 2592337 - RNA, 19 nt, Homo sapiens
  misc_RNA (1)...(19): siRNA sense strand
gagcaguagaugaagaagu

SEQ ID NO: 2592338 - RNA, 19 nt, Homo sapiens
  misc_RNA (1)...(19): siRNA sense strand
ccuugauauguuagaagaa

SEQ ID NO: 2592339 - RNA, 19 nt, Homo sapiens
  misc_RNA (1)...(19): siRNA sense strand
gaucccagcuccugcggaa

SEQ ID NO: 2592340 - RNA, 19 nt, Homo sapiens
  misc_RNA (1)...(19): siRNA sense strand
guggguaaggccaggagaa

SEQ ID NO: 2592341 - RNA, 19 nt, Homo sapiens
  misc_RNA (1)...(19): siRNA sense strand
cacaaggacaagcaggaaa

SEQ ID NO: 2592342 - RNA, 19 nt, Homo sapiens
  misc_RNA (1)...(19): siRNA sense strand
acccaaggacaaauaaaua

SEQ ID NO: 2592343 - RNA, 19 nt, Homo sapiens
  misc_RNA (1)...(19): siRNA sense strand
agaagcaugcacagagauu

SEQ ID NO: 2592344 - RNA, 19 nt, Homo sapiens
  misc_RNA (1)...(19): siRNA sense strand
acaaggacaagcaggaaaa

SEQ ID NO: 2592345 - RNA, 19 nt, Homo sapiens
  misc_RNA (1)...(19): siRNA sense strand
cuacagcagauaugccaaa

SEQ ID NO: 2592346 - RNA, 19 nt, Homo sapiens
  misc_RNA (1)...(19): siRNA sense strand
cuucaaaagacgacgauca

SEQ ID NO: 2592347 - RNA, 19 nt, Homo sapiens
  misc_RNA (1)...(19): siRNA sense strand
aacuggaaagcgagaauua

SEQ ID NO: 2592348 - RNA, 19 nt, Homo sapiens
  misc_RNA (1)...(19): siRNA sense strand
agaagacaugcgaggaaga

SEQ ID NO: 2592349 - RNA, 19 nt, Homo sapiens
  misc_RNA (1)...(19): siRNA sense strand
agaugaagaaguuggugau

SEQ ID NO: 2592350 - RNA, 19 nt, Homo sapiens
  misc_RNA (1)...(19): siRNA sense strand
ggguaaggccaggagaaca

SEQ ID NO: 2592351 - RNA, 19 nt, Homo sapiens
  misc_RNA (1)...(19): siRNA sense strand
acacaaucugcaagaacau

SEQ ID NO: 2592352 - RNA, 19 nt, Homo sapiens
  misc_RNA (1)...(19): siRNA sense strand
gcgggaaggcauucguuau

SEQ ID NO: 2592353 - RNA, 19 nt, Homo sapiens
  misc_RNA (1)...(19): siRNA sense strand
aagcaugcacagagauuca

SEQ ID NO: 2592354 - RNA, 19 nt, Homo sapiens
  misc_RNA (1)...(19): siRNA sense strand
gccgauuaaauuuggguau

SEQ ID NO: 2592355 - RNA, 19 nt, Homo sapiens
  misc_RNA (1)...(19): siRNA sense strand
guccaaugguggugcucuu

SEQ ID NO: 2592356 - RNA, 19 nt, Homo sapiens
  misc_RNA (1)...(19): siRNA sense strand
gcguacaguggguagauga

SEQ ID NO: 2592357 - RNA, 19 nt, Homo sapiens
  misc_RNA (1)...(19): siRNA sense strand
ggacuagagcucaugcuga

SEQ ID NO: 2592358 - RNA, 19 nt, Homo sapiens
  misc_RNA (1)...(19): siRNA sense strand
cguacaguggguagaugaa

SEQ ID NO: 2592359 - RNA, 19 nt, Homo sapiens
  misc_RNA (1)...(19): siRNA sense strand
cuggaaagcgagaauuaga

SEQ ID NO: 2592360 - RNA, 19 nt, Homo sapiens
  misc_RNA (1)...(19): siRNA sense strand
acuuuauucaugaggaaca

SEQ ID NO: 2592361 - RNA, 19 nt, Homo sapiens
  misc_RNA (1)...(19): siRNA sense strand
ggagaacagaugaucccua

SEQ ID NO: 2592362 - RNA, 19 nt, Homo sapiens
  misc_RNA (1)...(19): siRNA sense strand
agaaacaccagaugaaaau

SEQ ID NO: 2592363 - RNA, 19 nt, Homo sapiens
  misc_RNA (1)...(19): siRNA sense strand
agaaacaccgagaagacau

SEQ ID NO: 2592364 - RNA, 19 nt, Homo sapiens
  misc_RNA (1)...(19): siRNA sense strand
aauguguguuuguggguga

SEQ ID NO: 2592365 - RNA, 19 nt, Homo sapiens
  misc_RNA (1)...(19): siRNA sense strand
gauaagucucguuggagca

SEQ ID NO: 2592366 - RNA, 19 nt, Homo sapiens
  misc_RNA (1)...(19): siRNA sense strand
uagaugaagaaguugguga

SEQ ID NO: 2592367 - RNA, 19 nt, Homo sapiens
  misc_RNA (1)...(19): siRNA sense strand
gguaaggccaggagaacag

SEQ ID NO: 2592368 - RNA, 19 nt, Homo sapiens
  misc_RNA (1)...(19): siRNA sense strand
cccaaugugugaggauaaa

SEQ ID NO: 2592369 - RNA, 19 nt, Homo sapiens
  misc_RNA (1)...(19): siRNA sense strand
gaucucaagcacaaggaca

SEQ ID NO: 2592370 - RNA, 19 nt, Homo sapiens
  misc_RNA (1)...(19): siRNA sense strand
acaauuuggugaauggagu

SEQ ID NO: 2592371 - RNA, 19 nt, Homo sapiens
  misc_RNA (1)...(19): siRNA sense strand
cauucagaccgaagggaaa

SEQ ID NO: 2592372 - RNA, 19 nt, Homo sapiens
  misc_RNA (1)...(19): siRNA sense strand
gggaaaacugauagggcua

SEQ ID NO: 2592373 - RNA, 19 nt, Homo sapiens
  misc_RNA (1)...(19): siRNA sense strand
gggaaaaggaaauaaaaga

SEQ ID NO: 2592374 - RNA, 19 nt, Homo sapiens
  misc_RNA (1)...(19): siRNA sense strand
aaguaucagcugagagauu

SEQ ID NO: 2592375 - RNA, 19 nt, Homo sapiens
  misc_RNA (1)...(19): siRNA sense strand
aaacauucaccguggagaa

SEQ ID NO: 2592376 - RNA, 19 nt, Homo sapiens
  misc_RNA (1)...(19): siRNA sense strand
augagugaauuuagaggaa

SEQ ID NO: 2592377 - RNA, 19 nt, Homo sapiens
  misc_RNA (1)...(19): siRNA sense strand
cuuuagacaacauguguaa

SEQ ID NO: 2592378 - RNA, 19 nt, Homo sapiens
  misc_RNA (1)...(19): siRNA sense strand
ccuuggaagccuuaagcaa

SEQ ID NO: 2592379 - RNA, 19 nt, Homo sapiens
  misc_RNA (1)...(19): siRNA sense strand
agaccaggaugcugauaau

SEQ ID NO: 2592380 - RNA, 19 nt, Homo sapiens
  misc_RNA (1)...(19): siRNA sense strand
cuuggaagccuuaagcaaa

SEQ ID NO: 2592381 - RNA, 19 nt, Homo sapiens
  misc_RNA (1)...(19): siRNA sense strand
ugaauuuagaggaagacaa

SEQ ID NO: 2592382 - RNA, 19 nt, Homo sapiens
  misc_RNA (1)...(19): siRNA sense strand
acgaccaucacuagagaaa

SEQ ID NO: 2592383 - RNA, 19 nt, Homo sapiens
  misc_RNA (1)...(19): siRNA sense strand
gcauucagaccgaagggaa

SEQ ID NO: 2592384 - RNA, 19 nt, Homo sapiens
  misc_RNA (1)...(19): siRNA sense strand
ggauuaucgcagaaugcaa

SEQ ID NO: 2592385 - RNA, 19 nt, Homo sapiens
  misc_RNA (1)...(19): siRNA sense strand
agaguaagcuggaugcuga

SEQ ID NO: 2592386 - RNA, 19 nt, Homo sapiens
  misc_RNA (1)...(19): siRNA sense strand
ggaugcugagauugagaua

SEQ ID NO: 2592387 - RNA, 19 nt, Homo sapiens
  misc_RNA (1)...(19): siRNA sense strand
agaaagugaagcucugaaa

SEQ ID NO: 2592388 - RNA, 19 nt, Homo sapiens
  misc_RNA (1)...(19): siRNA sense strand
gcgaaaaugauaucagaau

SEQ ID NO: 2592389 - RNA, 19 nt, Homo sapiens
  misc_RNA (1)...(19): siRNA sense strand
auuuauuagacaagggaga

SEQ ID NO: 2592390 - RNA, 19 nt, Homo sapiens
  misc_RNA (1)...(19): siRNA sense strand
uuggaaaggagcuggaaaa

SEQ ID NO: 2592391 - RNA, 19 nt, Homo sapiens
  misc_RNA (1)...(19): siRNA sense strand
aaugaaggcuccugcaaaa

SEQ ID NO: 2592392 - RNA, 19 nt, Homo sapiens
  misc_RNA (1)...(19): siRNA sense strand
agagagaagccagaggaaa

SEQ ID NO: 2592393 - RNA, 19 nt, Homo sapiens
  misc_RNA (1)...(19): siRNA sense strand
cauugcaagucaugaguga

SEQ ID NO: 2592394 - RNA, 19 nt, Homo sapiens
  misc_RNA (1)...(19): siRNA sense strand
uagacaagggagagaagau

SEQ ID NO: 2592395 - RNA, 19 nt, Homo sapiens
  misc_RNA (1)...(19): siRNA sense strand
guaucagcugagagauuua

SEQ ID NO: 2592396 - RNA, 19 nt, Homo sapiens
  misc_RNA (1)...(19): siRNA sense strand
acaugaacaacgcuggaaa

SEQ ID NO: 2592397 - RNA, 19 nt, Homo sapiens
  misc_RNA (1)...(19): siRNA sense strand
uugcaagucaugagugaau

SEQ ID NO: 2592398 - RNA, 19 nt, Homo sapiens
  misc_RNA (1)...(19): siRNA sense strand
ggaaguucgcaaagaaagu

SEQ ID NO: 2592399 - RNA, 19 nt, Homo sapiens
  misc_RNA (1)...(19): siRNA sense strand
aaguuaaagcugagaucca

SEQ ID NO: 2592400 - RNA, 19 nt, Homo sapiens
  misc_RNA (1)...(19): siRNA sense strand
gcaaagaaagugaagcucu

SEQ ID NO: 2592401 - RNA, 19 nt, Homo sapiens
  misc_RNA (1)...(19): siRNA sense strand
ggaggaaauacgaccauca

SEQ ID NO: 2592402 - RNA, 19 nt, Homo sapiens
  misc_RNA (1)...(19): siRNA sense strand
ggcuuguagagguggcaaa

SEQ ID NO: 2592403 - RNA, 19 nt, Homo sapiens
  misc_RNA (1)...(19): siRNA sense strand
agugaagcucugaaaguau

SEQ ID NO: 2592404 - RNA, 19 nt, Homo sapiens
  misc_RNA (1)...(19): siRNA sense strand
guaucauagccuuaagaga

SEQ ID NO: 2592405 - RNA, 19 nt, Homo sapiens
  misc_RNA (1)...(19): siRNA sense strand
acugauagggcuaagauga

SEQ ID NO: 2592406 - RNA, 19 nt, Homo sapiens
  misc_RNA (1)...(19): siRNA sense strand
aagagagaagccagaggaa

SEQ ID NO: 2592407 - RNA, 19 nt, Homo sapiens
  misc_RNA (1)...(19): siRNA sense strand
agagaagauugcccaggaa

SEQ ID NO: 2592408 - RNA, 19 nt, Homo sapiens
  misc_RNA (1)...(19): siRNA sense strand
aggaguaauacccugaaua

SEQ ID NO: 2592409 - RNA, 19 nt, Homo sapiens
  misc_RNA (1)...(19): siRNA sense strand
uaagaagacaagagaccuu

SEQ ID NO: 2592410 - RNA, 19 nt, Homo sapiens
  misc_RNA (1)...(19): siRNA sense strand
cguacaugggagaaucaua

SEQ ID NO: 2592411 - RNA, 19 nt, Homo sapiens
  misc_RNA (1)...(19): siRNA sense strand
ugugaucuaugcagcgaaa

SEQ ID NO: 2592412 - RNA, 19 nt, Homo sapiens
  misc_RNA (1)...(19): siRNA sense strand
uggccaagaacauguguau

SEQ ID NO: 2592413 - RNA, 19 nt, Homo sapiens
  misc_RNA (1)...(19): siRNA sense strand
ccaguugugauguggagaa

SEQ ID NO: 2592414 - RNA, 19 nt, Homo sapiens
  misc_RNA (1)...(19): siRNA sense strand
ucgcaaagaaagugaagcu

SEQ ID NO: 2592415 - RNA, 19 nt, Homo sapiens
  misc_RNA (1)...(19): siRNA sense strand
ugaaauugcaggagcccga

SEQ ID NO: 2592416 - RNA, 19 nt, Homo sapiens
  misc_RNA (1)...(19): siRNA sense strand
cuuggaaaggagcuggaaa

SEQ ID NO: 2592417 - RNA, 19 nt, Homo sapiens
  misc_RNA (1)...(19): siRNA sense strand
caaaucagagagaugaaau

SEQ ID NO: 2592418 - RNA, 19 nt, Homo sapiens
  misc_RNA (1)...(19): siRNA sense strand
cugaauccacucacaguaa

SEQ ID NO: 2592419 - RNA, 19 nt, Homo sapiens
  misc_RNA (1)...(19): siRNA sense strand
agcaagaagauuaguggau

SEQ ID NO: 2592420 - RNA, 19 nt, Homo sapiens
  misc_RNA (1)...(19): siRNA sense strand
auuccauacugcauagcaa

SEQ ID NO: 2592421 - RNA, 19 nt, Homo sapiens
  misc_RNA (1)...(19): siRNA sense strand
uguauuugccagagcacau

SEQ ID NO: 2592422 - RNA, 19 nt, Homo sapiens
  misc_RNA (1)...(19): siRNA sense strand
cugcagggcccaaggucaa

SEQ ID NO: 2592423 - RNA, 19 nt, Homo sapiens
  misc_RNA (1)...(19): siRNA sense strand
caucgugaucacaggucua

SEQ ID NO: 2592424 - RNA, 19 nt, Homo sapiens
  misc_RNA (1)...(19): siRNA sense strand
ugaaaucagaagagacagu

SEQ ID NO: 2592425 - RNA, 19 nt, Homo sapiens
  misc_RNA (1)...(19): siRNA sense strand
aggaggugucauacgcaua

SEQ ID NO: 2592426 - RNA, 19 nt, Homo sapiens
  misc_RNA (1)...(19): siRNA sense strand
ccauugaaucauugaacaa

SEQ ID NO: 2592427 - RNA, 19 nt, Homo sapiens
  misc_RNA (1)...(19): siRNA sense strand
caguugaacaguacagaaa

SEQ ID NO: 2592428 - RNA, 19 nt, Homo sapiens
  misc_RNA (1)...(19): siRNA sense strand
ccuaguaagaaaaggaaaa

SEQ ID NO: 2592429 - RNA, 19 nt, Homo sapiens
  misc_RNA (1)...(19): siRNA sense strand
agaaauaaagcuagaacca

SEQ ID NO: 2592430 - RNA, 19 nt, Homo sapiens
  misc_RNA (1)...(19): siRNA sense strand
cuucagaaauaaagcuaga

SEQ ID NO: 2592431 - RNA, 19 nt, Homo sapiens
  misc_RNA (1)...(19): siRNA sense strand
aacucaaaccagugggaua

SEQ ID NO: 2592432 - RNA, 19 nt, Homo sapiens
  misc_RNA (1)...(19): siRNA sense strand
guacagaaacacagaccau

SEQ ID NO: 2592433 - RNA, 19 nt, Homo sapiens
  misc_RNA (1)...(19): siRNA sense strand
gauagaaaguccaacggau

SEQ ID NO: 2592434 - RNA, 19 nt, Homo sapiens
  misc_RNA (1)...(19): siRNA sense strand
acagauaaucagacccaaa

SEQ ID NO: 2592435 - RNA, 19 nt, Homo sapiens
  misc_RNA (1)...(19): siRNA sense strand
caguuuaguagcagagaca

SEQ ID NO: 2592436 - RNA, 19 nt, Homo sapiens
  misc_RNA (1)...(19): siRNA sense strand
guugaacaguacagaaaca

SEQ ID NO: 2592437 - RNA, 19 nt, Homo sapiens
  misc_RNA (1)...(19): siRNA sense strand
cagaaugagccuaagacuu

SEQ ID NO: 2592438 - RNA, 19 nt, Homo sapiens
  misc_RNA (1)...(19): siRNA sense strand
uuugaaaacuggaccgaaa

SEQ ID NO: 2592439 - RNA, 19 nt, Homo sapiens
  misc_RNA (1)...(19): siRNA sense strand
caaaccagugggauagaaa

SEQ ID NO: 2592440 - RNA, 19 nt, Homo sapiens
  misc_RNA (1)...(19): siRNA sense strand
ccgaacugggcacgagaua

SEQ ID NO: 2592441 - RNA, 19 nt, Homo sapiens
  misc_RNA (1)...(19): siRNA sense strand
cuagggaacacgugucaaa

SEQ ID NO: 2592442 - RNA, 19 nt, Homo sapiens
  misc_RNA (1)...(19): siRNA sense strand
gcacgagauaccugcagaa

SEQ ID NO: 2592443 - RNA, 19 nt, Homo sapiens
  misc_RNA (1)...(19): siRNA sense strand
aaauaaagcuagaaccauc

SEQ ID NO: 2592444 - RNA, 19 nt, Homo sapiens
  misc_RNA (1)...(19): siRNA sense strand
guacagaaugggaccugaa

SEQ ID NO: 2592445 - RNA, 19 nt, Homo sapiens
  misc_RNA (1)...(19): siRNA sense strand
gcugagaagaagcacaaau

SEQ ID NO: 2592446 - RNA, 19 nt, Homo sapiens
  misc_RNA (1)...(19): siRNA sense strand
gguaacauuauaagcaaca

SEQ ID NO: 2592447 - RNA, 19 nt, Homo sapiens
  misc_RNA (1)...(19): siRNA sense strand
acacacagacacagacaga

SEQ ID NO: 2592448 - RNA, 19 nt, Homo sapiens
  misc_RNA (1)...(19): siRNA sense strand
ugggaaguauucugaaaca

SEQ ID NO: 2592449 - RNA, 19 nt, Homo sapiens
  misc_RNA (1)...(19): siRNA sense strand
gcaggauggcauagucaau

SEQ ID NO: 2592450 - RNA, 19 nt, Homo sapiens
  misc_RNA (1)...(19): siRNA sense strand
cauagucaauccaacaaua

SEQ ID NO: 2592451 - RNA, 19 nt, Homo sapiens
  misc_RNA (1)...(19): siRNA sense strand
ucugggaaguauucugaaa

SEQ ID NO: 2592452 - RNA, 19 nt, Homo sapiens
  misc_RNA (1)...(19): siRNA sense strand
aaaugcaugcugagaagaa

SEQ ID NO: 2592453 - RNA, 19 nt, Homo sapiens
  misc_RNA (1)...(19): siRNA sense strand
gcaacaguuuaguagcaga

SEQ ID NO: 2592454 - RNA, 19 nt, Homo sapiens
  misc_RNA (1)...(19): siRNA sense strand
guuuaguagcagagacagu

SEQ ID NO: 2592455 - RNA, 19 nt, Homo sapiens
  misc_RNA (1)...(19): siRNA sense strand
guuuguuaccucagaauga

SEQ ID NO: 2592456 - RNA, 19 nt, Homo sapiens
  misc_RNA (1)...(19): siRNA sense strand
gaacuuagcaccaugacca

SEQ ID NO: 2592457 - RNA, 19 nt, Homo sapiens
  misc_RNA (1)...(19): siRNA sense strand
gcuacagguaacauuauaa

SEQ ID NO: 2592458 - RNA, 19 nt, Homo sapiens
  misc_RNA (1)...(19): siRNA sense strand
agaacaugacagauaauca

SEQ ID NO: 2592459 - RNA, 19 nt, Homo sapiens
  misc_RNA (1)...(19): siRNA sense strand
ucuuaggccuugagauguu

SEQ ID NO: 2592460 - RNA, 19 nt, Homo sapiens
  misc_RNA (1)...(19): siRNA sense strand
acacagacacagacagacu

SEQ ID NO: 2592461 - RNA, 19 nt, Homo sapiens
  misc_RNA (1)...(19): siRNA sense strand
acagaaacacagaccauga

SEQ ID NO: 2592462 - RNA, 19 nt, Homo sapiens
  misc_RNA (1)...(19): siRNA sense strand
cagagaaacucaaaccagu

SEQ ID NO: 2592463 - RNA, 19 nt, Homo sapiens
  misc_RNA (1)...(19): siRNA sense strand
ugguaaaaguccaucuaau

SEQ ID NO: 2592464 - RNA, 19 nt, Homo sapiens
  misc_RNA (1)...(19): siRNA sense strand
cuucuuaggccuugagaug

SEQ ID NO: 2592465 - RNA, 19 nt, Homo sapiens
  misc_RNA (1)...(19): siRNA sense strand
uggcauagucaauccaaca

SEQ ID NO: 2592466 - RNA, 19 nt, Homo sapiens
  misc_RNA (1)...(19): siRNA sense strand
gcucaguccuaugggugua

SEQ ID NO: 2592467 - RNA, 19 nt, Homo sapiens
  misc_RNA (1)...(19): siRNA sense strand
gcucuaacacugacaagca

SEQ ID NO: 2592468 - RNA, 19 nt, Homo sapiens
  misc_RNA (1)...(19): siRNA sense strand
uccuauugcuggugagcca

SEQ ID NO: 2592469 - RNA, 19 nt, Homo sapiens
  misc_RNA (1)...(19): siRNA sense strand
cuuuacaagaacuagggaa

SEQ ID NO: 2592470 - RNA, 19 nt, Homo sapiens
  misc_RNA (1)...(19): siRNA sense strand
ggaccaagcuggaaugugc

SEQ ID NO: 2592471 - RNA, 19 nt, Homo sapiens
  misc_RNA (1)...(19): siRNA sense strand
cuucacagaacaugacaga

SEQ ID NO: 2592472 - RNA, 19 nt, Homo sapiens
  misc_RNA (1)...(19): siRNA sense strand
ggugaaaucaggagagaga

SEQ ID NO: 2592473 - RNA, 19 nt, Homo sapiens
  misc_RNA (1)...(19): siRNA sense strand
cugcagugcgcaaggucaa

SEQ ID NO: 2592474 - RNA, 19 nt, Homo sapiens
  misc_RNA (1)...(19): siRNA sense strand
ccaagagccugcagggaac

SEQ ID NO: 2592475 - RNA, 19 nt, Homo sapiens
  misc_RNA (1)...(19): siRNA sense strand
acccugaggaggugacaua

SEQ ID NO: 2592476 - RNA, 19 nt, Homo sapiens
  misc_RNA (1)...(19): siRNA sense strand
ugaaaucaggagagagagu

SEQ ID NO: 2592477 - RNA, 19 nt, Homo sapiens
  misc_RNA (1)...(19): siRNA sense strand
acagaacauuccaggcaga

SEQ ID NO: 2592478 - RNA, 19 nt, Homo sapiens
  misc_RNA (1)...(19): siRNA sense strand
ccacagcacaugcagggaa

SEQ ID NO: 2592479 - RNA, 19 nt, Homo sapiens
  misc_RNA (1)...(19): siRNA sense strand
accaagagccugcagggaa

SEQ ID NO: 2592480 - RNA, 19 nt, Homo sapiens
  misc_RNA (1)...(19): siRNA sense strand
aaaucaggagagagaguca

SEQ ID NO: 2592481 - RNA, 19 nt, Homo sapiens
  misc_RNA (1)...(19): siRNA sense strand
ucacagguccauaugagaa

SEQ ID NO: 2592482 - RNA, 19 nt, Homo sapiens
  misc_RNA (1)...(19): siRNA sense strand
cacagguccauaugagaaa

SEQ ID NO: 2592483 - RNA, 19 nt, Homo sapiens
  misc_RNA (1)...(19): siRNA sense strand
caacagaacauuccaggca

SEQ ID NO: 2592484 - RNA, 19 nt, Homo sapiens
  misc_RNA (1)...(19): siRNA sense strand
auaucauguuugagcacuu

SEQ ID NO: 2592485 - RNA, 19 nt, Homo sapiens
  misc_RNA (1)...(19): siRNA sense strand
ccucacgccucguuggaca

SEQ ID NO: 2592486 - RNA, 19 nt, Homo sapiens
  misc_RNA (1)...(19): siRNA sense strand
cagcacaugcagggaacua

SEQ ID NO: 2592487 - RNA, 19 nt, Homo sapiens
  misc_RNA (1)...(19): siRNA sense strand
ggggaaacauggugagaaa

SEQ ID NO: 2592488 - RNA, 19 nt, Homo sapiens
  misc_RNA (1)...(19): siRNA sense strand
cagaaauaugggagaaaga

SEQ ID NO: 2592489 - RNA, 19 nt, Homo sapiens
  misc_RNA (1)...(19): siRNA sense strand
aagcuuggauagagauaaa

SEQ ID NO: 2592490 - RNA, 19 nt, Homo sapiens
  misc_RNA (1)...(19): siRNA sense strand
cgaaauaacucaagaggug

SEQ ID NO: 2592491 - RNA, 19 nt, Homo sapiens
  misc_RNA (1)...(19): siRNA sense strand
agaagaaacuaaaggaacu

SEQ ID NO: 2592492 - RNA, 19 nt, Homo sapiens
  misc_RNA (1)...(19): siRNA sense strand
uaugaagagcugaggcaaa

SEQ ID NO: 2592493 - RNA, 19 nt, Homo sapiens
  misc_RNA (1)...(19): siRNA sense strand
ucaacaugccacagaguua

SEQ ID NO: 2592494 - RNA, 19 nt, Homo sapiens
  misc_RNA (1)...(19): siRNA sense strand
cagcaauucaacagaacaa

SEQ ID NO: 2592495 - RNA, 19 nt, Homo sapiens
  misc_RNA (1)...(19): siRNA sense strand
gcuuauuacuagaaguuga

SEQ ID NO: 2592496 - RNA, 19 nt, Homo sapiens
  misc_RNA (1)...(19): siRNA sense strand
gcuuggugcuaaugagaau

SEQ ID NO: 2592497 - RNA, 19 nt, Homo sapiens
  misc_RNA (1)...(19): siRNA sense strand
aguuagaaccugaaguauu

SEQ ID NO: 2592498 - RNA, 19 nt, Homo sapiens
  misc_RNA (1)...(19): siRNA sense strand
cugaaagcuuggauagaga

SEQ ID NO: 2592499 - RNA, 19 nt, Homo sapiens
  misc_RNA (1)...(19): siRNA sense strand
aggauagagucaaagaauu

SEQ ID NO: 2592500 - RNA, 19 nt, Homo sapiens
  misc_RNA (1)...(19): siRNA sense strand
gaaauaugggagaaagaga

SEQ ID NO: 2592501 - RNA, 19 nt, Homo sapiens
  misc_RNA (1)...(19): siRNA sense strand
gaagauaugagaagcaaaa

SEQ ID NO: 2592502 - RNA, 19 nt, Homo sapiens
  misc_RNA (1)...(19): siRNA sense strand
caacagucuaagucaaaua

SEQ ID NO: 2592503 - RNA, 19 nt, Homo sapiens
  misc_RNA (1)...(19): siRNA sense strand
uguugaagagacugaaaua

SEQ ID NO: 2592504 - RNA, 19 nt, Homo sapiens
  misc_RNA (1)...(19): siRNA sense strand
caaaggaucacguggaaca

SEQ ID NO: 2592505 - RNA, 19 nt, Homo sapiens
  misc_RNA (1)...(19): siRNA sense strand
aaacauggugagaaacaaa

SEQ ID NO: 2592506 - RNA, 19 nt, Homo sapiens
  misc_RNA (1)...(19): siRNA sense strand
augaagaagaagagagugu

SEQ ID NO: 2592507 - RNA, 19 nt, Homo sapiens
  misc_RNA (1)...(19): siRNA sense strand
ucaacaaagccuuaggauu

SEQ ID NO: 2592508 - RNA, 19 nt, Homo sapiens
  misc_RNA (1)...(19): siRNA sense strand
ccgggaaccaguagaagaa

SEQ ID NO: 2592509 - RNA, 19 nt, Homo sapiens
  misc_RNA (1)...(19): siRNA sense strand
gagaaagagaccaaaggau

SEQ ID NO: 2592510 - RNA, 19 nt, Homo sapiens
  misc_RNA (1)...(19): siRNA sense strand
gccauauucacaagagaaa

SEQ ID NO: 2592511 - RNA, 19 nt, Homo sapiens
  misc_RNA (1)...(19): siRNA sense strand
aggagaggcaugagagcau

SEQ ID NO: 2592512 - RNA, 19 nt, Homo sapiens
  misc_RNA (1)...(19): siRNA sense strand
gauucagugucgaaaggaa

SEQ ID NO: 2592513 - RNA, 19 nt, Homo sapiens
  misc_RNA (1)...(19): siRNA sense strand
guguagugauccuuugaaa

SEQ ID NO: 2592514 - RNA, 19 nt, Homo sapiens
  misc_RNA (1)...(19): siRNA sense strand
caguagaagaaacaacaaa

SEQ ID NO: 2592515 - RNA, 19 nt, Homo sapiens
  misc_RNA (1)...(19): siRNA sense strand
ccuugauucugaagagaga

SEQ ID NO: 2592516 - RNA, 19 nt, Homo sapiens
  misc_RNA (1)...(19): siRNA sense strand
aagcauaguuacuucacaa

SEQ ID NO: 2592517 - RNA, 19 nt, Homo sapiens
  misc_RNA (1)...(19): siRNA sense strand
agaagaaacaucugguuga

SEQ ID NO: 2592518 - RNA, 19 nt, Homo sapiens
  misc_RNA (1)...(19): siRNA sense strand
acuaaaggaacuaggcaga

SEQ ID NO: 2592519 - RNA, 19 nt, Homo sapiens
  misc_RNA (1)...(19): siRNA sense strand
uccaauuacaggagggaau

SEQ ID NO: 2592520 - RNA, 19 nt, Homo sapiens
  misc_RNA (1)...(19): siRNA sense strand
ucauaugucaguagaguuu

SEQ ID NO: 2592521 - RNA, 19 nt, Homo sapiens
  misc_RNA (1)...(19): siRNA sense strand
cgauucuggugcuaagaua

SEQ ID NO: 2592522 - RNA, 19 nt, Homo sapiens
  misc_RNA (1)...(19): siRNA sense strand
acucagacacagaagauau

SEQ ID NO: 2592523 - RNA, 19 nt, Homo sapiens
  misc_RNA (1)...(19): siRNA sense strand
ggaaccaguagaagaaaca

SEQ ID NO: 2592524 - RNA, 19 nt, Homo sapiens
  misc_RNA (1)...(19): siRNA sense strand
ugaaaaggaugaagaggau

SEQ ID NO: 2592525 - RNA, 19 nt, Homo sapiens
  misc_RNA (1)...(19): siRNA sense strand
cucaagaggugaagccauu

SEQ ID NO: 2592526 - RNA, 19 nt, Homo sapiens
  misc_RNA (1)...(19): siRNA sense strand
ggaagauagaagagauuuu

SEQ ID NO: 2592527 - RNA, 19 nt, Homo sapiens
  misc_RNA (1)...(19): siRNA sense strand
aggaaaauggcaauggaaa

SEQ ID NO: 2592528 - RNA, 19 nt, Homo sapiens
  misc_RNA (1)...(19): siRNA sense strand
uuguuaaaccuuugggaga

SEQ ID NO: 2592529 - RNA, 19 nt, Homo sapiens
  misc_RNA (1)...(19): siRNA sense strand
uaugauaaggauagaguca

SEQ ID NO: 2592530 - RNA, 19 nt, Homo sapiens
  misc_RNA (1)...(19): siRNA sense strand
agaagauaugagaagcaaa

SEQ ID NO: 2592531 - RNA, 19 nt, Homo sapiens
  misc_RNA (1)...(19): siRNA sense strand
agauaauggaauagugguu

SEQ ID NO: 2592532 - RNA, 19 nt, Homo sapiens
  misc_RNA (1)...(19): siRNA sense strand
cugaaggagagaacagcaa

SEQ ID NO: 2592533 - RNA, 19 nt, Homo sapiens
  misc_RNA (1)...(19): siRNA sense strand
gucaagaagaagaaaugaa

SEQ ID NO: 2592534 - RNA, 19 nt, Homo sapiens
  misc_RNA (1)...(19): siRNA sense strand
acacagaagauaugagaag

SEQ ID NO: 2592535 - RNA, 19 nt, Homo sapiens
  misc_RNA (1)...(19): siRNA sense strand
uaucagaaacacuagcaaa

SEQ ID NO: 2592536 - RNA, 19 nt, Homo sapiens
  misc_RNA (1)...(19): siRNA sense strand
cuaggaagauagaagagau

SEQ ID NO: 2592537 - RNA, 19 nt, Homo sapiens
  misc_RNA (1)...(19): siRNA sense strand
uaggaagauagaagagauu

SEQ ID NO: 2592538 - RNA, 19 nt, Homo sapiens
  misc_RNA (1)...(19): siRNA sense strand
gaaagcuuggauagagaua

SEQ ID NO: 2592539 - RNA, 19 nt, Homo sapiens
  misc_RNA (1)...(19): siRNA sense strand
cgccaaaaccaguaauuua

SEQ ID NO: 2592540 - RNA, 19 nt, Homo sapiens
  misc_RNA (1)...(19): siRNA sense strand
ccauaagcuacauuugaaa

SEQ ID NO: 2592541 - RNA, 19 nt, Homo sapiens
  misc_RNA (1)...(19): siRNA sense strand
acauggauuucguagacaa

SEQ ID NO: 2592542 - RNA, 19 nt, Homo sapiens
  misc_RNA (1)...(19): siRNA sense strand
ucagaagaaacuaaaggaa

SEQ ID NO: 2592543 - RNA, 19 nt, Homo sapiens
  misc_RNA (1)...(19): siRNA sense strand
ggaacuuaguacuccagaa

SEQ ID NO: 2592544 - RNA, 19 nt, Homo sapiens
  misc_RNA (1)...(19): siRNA sense strand
cagaagaaacuaaaggaac

SEQ ID NO: 2592545 - RNA, 19 nt, Homo sapiens
  misc_RNA (1)...(19): siRNA sense strand
aggcagauugaaugcuaaa

SEQ ID NO: 2592546 - RNA, 19 nt, Homo sapiens
  misc_RNA (1)...(19): siRNA sense strand
caauucaaucacagaagaa

SEQ ID NO: 2592547 - RNA, 19 nt, Homo sapiens
  misc_RNA (1)...(19): siRNA sense strand
agaaagagaccaaaggauc

SEQ ID NO: 2592548 - RNA, 19 nt, Homo sapiens
  misc_RNA (1)...(19): siRNA sense strand
cagaagaccagcuggggaa

SEQ ID NO: 2592549 - RNA, 19 nt, Homo sapiens
  misc_RNA (1)...(19): siRNA sense strand
gaucagagauuaaggccaa

SEQ ID NO: 2592550 - RNA, 19 nt, Homo sapiens
  misc_RNA (1)...(19): siRNA sense strand
ccguuauagcagaggaaau

SEQ ID NO: 2592551 - RNA, 19 nt, Homo sapiens
  misc_RNA (1)...(19): siRNA sense strand
gguuaauagugaaguccau

SEQ ID NO: 2592552 - RNA, 19 nt, Homo sapiens
  misc_RNA (1)...(19): siRNA sense strand
gaacagauaucccaggaga

SEQ ID NO: 2592553 - RNA, 19 nt, Homo sapiens
  misc_RNA (1)...(19): siRNA sense strand
uguggaauuuacaggaaga

SEQ ID NO: 2592554 - RNA, 19 nt, Homo sapiens
  misc_RNA (1)...(19): siRNA sense strand
agauggaagaaauggagau

SEQ ID NO: 2592555 - RNA, 19 nt, Homo sapiens
  misc_RNA (1)...(19): siRNA sense strand
ccauauagugaucagagau

SEQ ID NO: 2592556 - RNA, 19 nt, Homo sapiens
  misc_RNA (1)...(19): siRNA sense strand
caucugaaaacaugaggaa

SEQ ID NO: 2592557 - RNA, 19 nt, Homo sapiens
  misc_RNA (1)...(19): siRNA sense strand
cauaaugaagauggaagaa

SEQ ID NO: 2592558 - RNA, 19 nt, Homo sapiens
  misc_RNA (1)...(19): siRNA sense strand
ggugaaaucaggagagaga

SEQ ID NO: 2592559 - RNA, 19 nt, Homo sapiens
  misc_RNA (1)...(19): siRNA sense strand
gaacagaagugaacagcga

SEQ ID NO: 2592560 - RNA, 19 nt, Homo sapiens
  misc_RNA (1)...(19): siRNA sense strand
gaauauuccaggagggcuu

SEQ ID NO: 2592561 - RNA, 19 nt, Homo sapiens
  misc_RNA (1)...(19): siRNA sense strand
cugcagugcgcaaggucaa

SEQ ID NO: 2592562 - RNA, 19 nt, Homo sapiens
  misc_RNA (1)...(19): siRNA sense strand
ccaagagccugcagggaac

SEQ ID NO: 2592563 - RNA, 19 nt, Homo sapiens
  misc_RNA (1)...(19): siRNA sense strand
ugaaaucaggagagagagu

SEQ ID NO: 2592564 - RNA, 19 nt, Homo sapiens
  misc_RNA (1)...(19): siRNA sense strand
acagaacauuccaggcaga

SEQ ID NO: 2592565 - RNA, 19 nt, Homo sapiens
  misc_RNA (1)...(19): siRNA sense strand
ccacagcacaugcagggaa

SEQ ID NO: 2592566 - RNA, 19 nt, Homo sapiens
  misc_RNA (1)...(19): siRNA sense strand
accaagagccugcagggaa

SEQ ID NO: 2592567 - RNA, 19 nt, Homo sapiens
  misc_RNA (1)...(19): siRNA sense strand
caggagggcuucaacauga

SEQ ID NO: 2592568 - RNA, 19 nt, Homo sapiens
  misc_RNA (1)...(19): siRNA sense strand
aaaucaggagagagaguca

SEQ ID NO: 2592569 - RNA, 19 nt, Homo sapiens
  misc_RNA (1)...(19): siRNA sense strand
caucguggucacaggucua

SEQ ID NO: 2592570 - RNA, 19 nt, Homo sapiens
  misc_RNA (1)...(19): siRNA sense strand
caacagaacauuccaggca

SEQ ID NO: 2592571 - RNA, 19 nt, Homo sapiens
  misc_RNA (1)...(19): siRNA sense strand
auaucauguuugagcacuu

SEQ ID NO: 2592572 - RNA, 19 nt, Homo sapiens
  misc_RNA (1)...(19): siRNA sense strand
ccucacgccucguuggaca

SEQ ID NO: 2592573 - RNA, 19 nt, Homo sapiens
  misc_RNA (1)...(19): siRNA sense strand
cagcacaugcagggaacua

SEQ ID NO: 2592574 - RNA, 19 nt, Homo sapiens
  misc_RNA (1)...(19): siRNA sense strand
cuuuaaagcaaguggauga

SEQ ID NO: 2592575 - RNA, 19 nt, Homo sapiens
  misc_RNA (1)...(19): siRNA sense strand
caguagaaguaguguuuau

SEQ ID NO: 2592576 - RNA, 19 nt, Homo sapiens
  misc_RNA (1)...(19): siRNA sense strand
ccuuagaagcugaagauau

SEQ ID NO: 2592577 - RNA, 19 nt, Homo sapiens
  misc_RNA (1)...(19): siRNA sense strand
ugugaagaccugugauaaa

SEQ ID NO: 2592578 - RNA, 19 nt, Homo sapiens
  misc_RNA (1)...(19): siRNA sense strand
ugguauaacuaaagcugaa

SEQ ID NO: 2592579 - RNA, 19 nt, Homo sapiens
  misc_RNA (1)...(19): siRNA sense strand
uggauauaaaucagggaaa

SEQ ID NO: 2592580 - RNA, 19 nt, Homo sapiens
  misc_RNA (1)...(19): siRNA sense strand
cagcuuuaccauagugaaa

SEQ ID NO: 2592581 - RNA, 19 nt, Homo sapiens
  misc_RNA (1)...(19): siRNA sense strand
ugaaugaaccaguggaaaa

SEQ ID NO: 2592582 - RNA, 19 nt, Homo sapiens
  misc_RNA (1)...(19): siRNA sense strand
ggacagccgaagagaagaa

SEQ ID NO: 2592583 - RNA, 19 nt, Homo sapiens
  misc_RNA (1)...(19): siRNA sense strand
gaauauguuccauggcaaa

SEQ ID NO: 2592584 - RNA, 19 nt, Homo sapiens
  misc_RNA (1)...(19): siRNA sense strand
ggaccagaagauacagaaa

SEQ ID NO: 2592585 - RNA, 19 nt, Homo sapiens
  misc_RNA (1)...(19): siRNA sense strand
cagaaagcaauguacgaaa

SEQ ID NO: 2592586 - RNA, 19 nt, Homo sapiens
  misc_RNA (1)...(19): siRNA sense strand
ggaacuuagaugugucaua

SEQ ID NO: 2592587 - RNA, 19 nt, Homo sapiens
  misc_RNA (1)...(19): siRNA sense strand
gaacaguggaaacgagcua

SEQ ID NO: 2592588 - RNA, 19 nt, Homo sapiens
  misc_RNA (1)...(19): siRNA sense strand
cuucagaaagacagagauu

SEQ ID NO: 2592589 - RNA, 19 nt, Homo sapiens
  misc_RNA (1)...(19): siRNA sense strand
gugaaacauuggagcuuau

SEQ ID NO: 2592590 - RNA, 19 nt, Homo sapiens
  misc_RNA (1)...(19): siRNA sense strand
acaagauaggagagaagua

SEQ ID NO: 2592591 - RNA, 19 nt, Homo sapiens
  misc_RNA (1)...(19): siRNA sense strand
ggaacgagacagugaagga

SEQ ID NO: 2592592 - RNA, 19 nt, Homo sapiens
  misc_RNA (1)...(19): siRNA sense strand
gaaauauuguaaugcgaga

SEQ ID NO: 2592593 - RNA, 19 nt, Homo sapiens
  misc_RNA (1)...(19): siRNA sense strand
agacuguauuagagaugua

SEQ ID NO: 2592594 - RNA, 19 nt, Homo sapiens
  misc_RNA (1)...(19): siRNA sense strand
cagaaauaaauccuggaaa

SEQ ID NO: 2592595 - RNA, 19 nt, Homo sapiens
  misc_RNA (1)...(19): siRNA sense strand
ggauagugauagugacucu

SEQ ID NO: 2592596 - RNA, 19 nt, Homo sapiens
  misc_RNA (1)...(19): siRNA sense strand
cagugaaagucauguacau

SEQ ID NO: 2592597 - RNA, 19 nt, Homo sapiens
  misc_RNA (1)...(19): siRNA sense strand
ugauaaugaugaugaacca

SEQ ID NO: 2592598 - RNA, 19 nt, Homo sapiens
  misc_RNA (1)...(19): siRNA sense strand
agaucuaggaagacggcua

SEQ ID NO: 2592599 - RNA, 19 nt, Homo sapiens
  misc_RNA (1)...(19): siRNA sense strand
caguaguaguauuugaaga

SEQ ID NO: 2592600 - RNA, 19 nt, Homo sapiens
  misc_RNA (1)...(19): siRNA sense strand
ugaaaauggaagugagaca

SEQ ID NO: 2592601 - RNA, 19 nt, Homo sapiens
  misc_RNA (1)...(19): siRNA sense strand
gggaagaucauguagaagu

SEQ ID NO: 2592602 - RNA, 19 nt, Homo sapiens
  misc_RNA (1)...(19): siRNA sense strand
gcauagauggcuuugaauu

SEQ ID NO: 2592603 - RNA, 19 nt, Homo sapiens
  misc_RNA (1)...(19): siRNA sense strand
cagaaacgcaugaacacaa

SEQ ID NO: 2592604 - RNA, 19 nt, Homo sapiens
  misc_RNA (1)...(19): siRNA sense strand
guaaaaucccugacauaua

SEQ ID NO: 2592605 - RNA, 19 nt, Homo sapiens
  misc_RNA (1)...(19): siRNA sense strand
acggaagaccgcugaaauu

SEQ ID NO: 2592606 - RNA, 19 nt, Homo sapiens
  misc_RNA (1)...(19): siRNA sense strand
uauuagagauguaugguca

SEQ ID NO: 2592607 - RNA, 19 nt, Homo sapiens
  misc_RNA (1)...(19): siRNA sense strand
ggaauaaaucguaagguuc

SEQ ID NO: 2592608 - RNA, 19 nt, Homo sapiens
  misc_RNA (1)...(19): siRNA sense strand
ccugugaagaccugugaua

SEQ ID NO: 2592609 - RNA, 19 nt, Homo sapiens
  misc_RNA (1)...(19): siRNA sense strand
agauaggagagaaguauau

SEQ ID NO: 2592610 - RNA, 19 nt, Homo sapiens
  misc_RNA (1)...(19): siRNA sense strand
aagauuggcaguagaagua

SEQ ID NO: 2592611 - RNA, 19 nt, Homo sapiens
  misc_RNA (1)...(19): siRNA sense strand
ucuuauggagcuagggcaa

SEQ ID NO: 2592612 - RNA, 19 nt, Homo sapiens
  misc_RNA (1)...(19): siRNA sense strand
agaccagcuuccagagaga

SEQ ID NO: 2592613 - RNA, 19 nt, Homo sapiens
  misc_RNA (1)...(19): siRNA sense strand
ugaaaagugugauggauau

SEQ ID NO: 2592614 - RNA, 19 nt, Homo sapiens
  misc_RNA (1)...(19): siRNA sense strand
cacuaaagcaagcagcaaa

SEQ ID NO: 2592615 - RNA, 19 nt, Homo sapiens
  misc_RNA (1)...(19): siRNA sense strand
ccaugaaguauuaugauga

SEQ ID NO: 2592616 - RNA, 19 nt, Homo sapiens
  misc_RNA (1)...(19): siRNA sense strand
uugaaaagugugauggaua

SEQ ID NO: 2592617 - RNA, 19 nt, Homo sapiens
  misc_RNA (1)...(19): siRNA sense strand
aaacagaaacgcaugaaca

SEQ ID NO: 2592618 - RNA, 19 nt, Homo sapiens
  misc_RNA (1)...(19): siRNA sense strand
aggaaauucuugaacggau

SEQ ID NO: 2592619 - RNA, 19 nt, Homo sapiens
  misc_RNA (1)...(19): siRNA sense strand
agaaagauuggcaguagaa

SEQ ID NO: 2592620 - RNA, 19 nt, Homo sapiens
  misc_RNA (1)...(19): siRNA sense strand
gcgagaacuugcuccacaa

SEQ ID NO: 2592621 - RNA, 19 nt, Homo sapiens
  misc_RNA (1)...(19): siRNA sense strand
ggcugaagaacuuggaaga

SEQ ID NO: 2592622 - RNA, 19 nt, Homo sapiens
  misc_RNA (1)...(19): siRNA sense strand
aggagauuaugcaggauuu

SEQ ID NO: 2592623 - RNA, 19 nt, Homo sapiens
  misc_RNA (1)...(19): siRNA sense strand
cagcaacgugugaaggcaa

SEQ ID NO: 2592624 - RNA, 19 nt, Homo sapiens
  misc_RNA (1)...(19): siRNA sense strand
uaguaaaaucccugacaua

SEQ ID NO: 2592625 - RNA, 19 nt, Homo sapiens
  misc_RNA (1)...(19): siRNA sense strand
ccucaggaauaugguauaa

SEQ ID NO: 2592626 - RNA, 19 nt, Homo sapiens
  misc_RNA (1)...(19): siRNA sense strand
gcucagaccuucagaggac

SEQ ID NO: 2592627 - RNA, 19 nt, Homo sapiens
  misc_RNA (1)...(19): siRNA sense strand
agaaagcaauguacgaaaa

SEQ ID NO: 2592628 - RNA, 19 nt, Homo sapiens
  misc_RNA (1)...(19): siRNA sense strand
acgagacagugaaggaaaa

SEQ ID NO: 2592629 - RNA, 19 nt, Homo sapiens
  misc_RNA (1)...(19): siRNA sense strand
agauauugcacgacagcuu

SEQ ID NO: 2592630 - RNA, 19 nt, Homo sapiens
  misc_RNA (1)...(19): siRNA sense strand
caaaggaugaacaguggaa

SEQ ID NO: 2592631 - RNA, 19 nt, Homo sapiens
  misc_RNA (1)...(19): siRNA sense strand
cagugaaggaaaagaagua

SEQ ID NO: 2592632 - RNA, 19 nt, Homo sapiens
  misc_RNA (1)...(19): siRNA sense strand
ucagaaagacagagauuuu

SEQ ID NO: 2592633 - RNA, 19 nt, Homo sapiens
  misc_RNA (1)...(19): siRNA sense strand
ucacaggucuauuugggaa

SEQ ID NO: 2592634 - RNA, 19 nt, Homo sapiens
  misc_RNA (1)...(19): siRNA sense strand
agucaggccuugaggggau

SEQ ID NO: 2592635 - RNA, 19 nt, Homo sapiens
  misc_RNA (1)...(19): siRNA sense strand
ugugaugacuauauggcaa

SEQ ID NO: 2592636 - RNA, 19 nt, Homo sapiens
  misc_RNA (1)...(19): siRNA sense strand
agauaucaacagaaggaga

SEQ ID NO: 2592637 - RNA, 19 nt, Homo sapiens
  misc_RNA (1)...(19): siRNA sense strand
caacagaaggagagccaug

SEQ ID NO: 2592638 - RNA, 19 nt, Homo sapiens
  misc_RNA (1)...(19): siRNA sense strand
gugucaaguugcagcugau

SEQ ID NO: 2592639 - RNA, 19 nt, Homo sapiens
  misc_RNA (1)...(19): siRNA sense strand
ucgccgaggaggaggauuu

SEQ ID NO: 2592640 - RNA, 19 nt, Homo sapiens
  misc_RNA (1)...(19): siRNA sense strand
ucucaguggaggacaagaa

SEQ ID NO: 2592641 - RNA, 19 nt, Homo sapiens
  misc_RNA (1)...(19): siRNA sense strand
ucaacaacgucacgggcau

SEQ ID NO: 2592642 - RNA, 19 nt, Homo sapiens
  misc_RNA (1)...(19): siRNA sense strand
ucuucuuccugcagagcaa

SEQ ID NO: 2592643 - RNA, 19 nt, Homo sapiens
  misc_RNA (1)...(19): siRNA sense strand
acaucaugguggaggacgu

SEQ ID NO: 2592644 - RNA, 19 nt, Homo sapiens
  misc_RNA (1)...(19): siRNA sense strand
gagacggaccaguggacca

SEQ ID NO: 2592645 - RNA, 19 nt, Homo sapiens
  misc_RNA (1)...(19): siRNA sense strand
cagcauuagcagaccgaaa

SEQ ID NO: 2592646 - RNA, 19 nt, Homo sapiens
  misc_RNA (1)...(19): siRNA sense strand
ggaaggaagugguaaccca

SEQ ID NO: 2592647 - RNA, 19 nt, Homo sapiens
  misc_RNA (1)...(19): siRNA sense strand
agaagaacgaguauggauu

SEQ ID NO: 2592648 - RNA, 19 nt, Homo sapiens
  misc_RNA (1)...(19): siRNA sense strand
ccgauauggugaagaccuu

SEQ ID NO: 2592649 - RNA, 19 nt, Homo sapiens
  misc_RNA (1)...(19): siRNA sense strand
ccaucuggaauaugacaaa

SEQ ID NO: 2592650 - RNA, 19 nt, Homo sapiens
  misc_RNA (1)...(19): siRNA sense strand
ggagauaaaaguucaacaa

SEQ ID NO: 2592651 - RNA, 19 nt, Homo sapiens
  misc_RNA (1)...(19): siRNA sense strand
gggcaaguuuauacgggca

SEQ ID NO: 2592652 - RNA, 19 nt, Homo sapiens
  misc_RNA (1)...(19): siRNA sense strand
uaucagggcagcagagaca

SEQ ID NO: 2592653 - RNA, 19 nt, Homo sapiens
  misc_RNA (1)...(19): siRNA sense strand
acaaagugcacuaggccuu

SEQ ID NO: 2592654 - RNA, 19 nt, Homo sapiens
  misc_RNA (1)...(19): siRNA sense strand
caguuaaaucgcagcuuau

SEQ ID NO: 2592655 - RNA, 19 nt, Homo sapiens
  misc_RNA (1)...(19): siRNA sense strand
uggaacagacggaagugaa

SEQ ID NO: 2592656 - RNA, 19 nt, Homo sapiens
  misc_RNA (1)...(19): siRNA sense strand
cgaaacaggagggaaggaa

SEQ ID NO: 2592657 - RNA, 19 nt, Homo sapiens
  misc_RNA (1)...(19): siRNA sense strand
uggucagggcauuggaauu

SEQ ID NO: 2592658 - RNA, 19 nt, Homo sapiens
  misc_RNA (1)...(19): siRNA sense strand
gugacuaccaugacgaaaa

SEQ ID NO: 2592659 - RNA, 19 nt, Homo sapiens
  misc_RNA (1)...(19): siRNA sense strand
cgggcaacaaagugcacua

SEQ ID NO: 2592660 - RNA, 19 nt, Homo sapiens
  misc_RNA (1)...(19): siRNA sense strand
gguaacaaaaccagcaaau

SEQ ID NO: 2592661 - RNA, 19 nt, Homo sapiens
  misc_RNA (1)...(19): siRNA sense strand
ucucaauacacaaugaaga

SEQ ID NO: 2592662 - RNA, 19 nt, Homo sapiens
  misc_RNA (1)...(19): siRNA sense strand
uaacauuccucaagggaug

SEQ ID NO: 2592663 - RNA, 19 nt, Homo sapiens
  misc_RNA (1)...(19): siRNA sense strand
ccuuauguuggaaugguaa

SEQ ID NO: 2592664 - RNA, 19 nt, Homo sapiens
  misc_RNA (1)...(19): siRNA sense strand
cccaaauucccuggagaua

SEQ ID NO: 2592665 - RNA, 19 nt, Homo sapiens
  misc_RNA (1)...(19): siRNA sense strand
ggacaaauagcaugagcag

SEQ ID NO: 2592666 - RNA, 19 nt, Homo sapiens
  misc_RNA (1)...(19): siRNA sense strand
gaacauucacauuagggau

SEQ ID NO: 2592667 - RNA, 19 nt, Homo sapiens
  misc_RNA (1)...(19): siRNA sense strand
gaccgaaacaggagggaag

SEQ ID NO: 2592668 - RNA, 19 nt, Homo sapiens
  misc_RNA (1)...(19): siRNA sense strand
ugaacaggaaucaggcauu

SEQ ID NO: 2592669 - RNA, 19 nt, Homo sapiens
  misc_RNA (1)...(19): siRNA sense strand
aaacaggagggaaggaagu

SEQ ID NO: 2592670 - RNA, 19 nt, Homo sapiens
  misc_RNA (1)...(19): siRNA sense strand
cugaaaaucucuaccccaa

SEQ ID NO: 2592671 - RNA, 19 nt, Homo sapiens
  misc_RNA (1)...(19): siRNA sense strand
gagggaaggaagugguaac

SEQ ID NO: 2592672 - RNA, 19 nt, Homo sapiens
  misc_RNA (1)...(19): siRNA sense strand
ugaagauuuuccagcauua

SEQ ID NO: 2592673 - RNA, 19 nt, Homo sapiens
  misc_RNA (1)...(19): siRNA sense strand
cugaguacuuaacgaacau

SEQ ID NO: 2592674 - RNA, 19 nt, Homo sapiens
  misc_RNA (1)...(19): siRNA sense strand
aacauucacauuagggaua

SEQ ID NO: 2592675 - RNA, 19 nt, Homo sapiens
  misc_RNA (1)...(19): siRNA sense strand
augaacaaucccaggacuu

SEQ ID NO: 2592676 - RNA, 19 nt, Homo sapiens
  misc_RNA (1)...(19): siRNA sense strand
aagaagaacgaguauggau

SEQ ID NO: 2592677 - RNA, 19 nt, Homo sapiens
  misc_RNA (1)...(19): siRNA sense strand
ccaacaaugaaaaccaaua

SEQ ID NO: 2592678 - RNA, 19 nt, Homo sapiens
  misc_RNA (1)...(19): siRNA sense strand
cugcaaugacugugagaaa

SEQ ID NO: 2592679 - RNA, 19 nt, Homo sapiens
  misc_RNA (1)...(19): siRNA sense strand
cuuucagagaagagaggaa

SEQ ID NO: 2592680 - RNA, 19 nt, Homo sapiens
  misc_RNA (1)...(19): siRNA sense strand
ugugagagaccuggagaaa

SEQ ID NO: 2592681 - RNA, 19 nt, Homo sapiens
  misc_RNA (1)...(19): siRNA sense strand
ccuaaaguauacugcccaa

SEQ ID NO: 2592682 - RNA, 19 nt, Homo sapiens
  misc_RNA (1)...(19): siRNA sense strand
ccgcauugacauggauaaa

SEQ ID NO: 2592683 - RNA, 19 nt, Homo sapiens
  misc_RNA (1)...(19): siRNA sense strand
agaugggcuuugugagaga

SEQ ID NO: 2592684 - RNA, 19 nt, Homo sapiens
  misc_RNA (1)...(19): siRNA sense strand
gguaguugacauugaggau

SEQ ID NO: 2592685 - RNA, 19 nt, Homo sapiens
  misc_RNA (1)...(19): siRNA sense strand
aggauauuugugagggcua

SEQ ID NO: 2592686 - RNA, 19 nt, Homo sapiens
  misc_RNA (1)...(19): siRNA sense strand
agaaaagucccuaagcaaa

SEQ ID NO: 2592687 - RNA, 19 nt, Homo sapiens
  misc_RNA (1)...(19): siRNA sense strand
ggaacauugaagauaucua

SEQ ID NO: 2592688 - RNA, 19 nt, Homo sapiens
  misc_RNA (1)...(19): siRNA sense strand
uggauaaauaugagguagu

SEQ ID NO: 2592689 - RNA, 19 nt, Homo sapiens
  misc_RNA (1)...(19): siRNA sense strand
cgaugaggagggaugguuu

SEQ ID NO: 2592690 - RNA, 19 nt, Homo sapiens
  misc_RNA (1)...(19): siRNA sense strand
ugaagguaaucuuugggaa

SEQ ID NO: 2592691 - RNA, 19 nt, Homo sapiens
  misc_RNA (1)...(19): siRNA sense strand
gauaaugagcacugagcgu

SEQ ID NO: 2592692 - RNA, 19 nt, Homo sapiens
  misc_RNA (1)...(19): siRNA sense strand
cuuuggcugucaugagaaa

SEQ ID NO: 2592693 - RNA, 19 nt, Homo sapiens
  misc_RNA (1)...(19): siRNA sense strand
gaagguaaucuuugggaac

SEQ ID NO: 2592694 - RNA, 19 nt, Homo sapiens
  misc_RNA (1)...(19): siRNA sense strand
gaggaaaaugguacaggaa

SEQ ID NO: 2592695 - RNA, 19 nt, Homo sapiens
  misc_RNA (1)...(19): siRNA sense strand
ugguacaggaagaugaaaa

SEQ ID NO: 2592696 - RNA, 19 nt, Homo sapiens
  misc_RNA (1)...(19): siRNA sense strand
caucguuagugcugaggca

SEQ ID NO: 2592697 - RNA, 19 nt, Homo sapiens
  misc_RNA (1)...(19): siRNA sense strand
cauggauaaauaugaggua

SEQ ID NO: 2592698 - RNA, 19 nt, Homo sapiens
  misc_RNA (1)...(19): siRNA sense strand
gcgaugugcagaacggaca

SEQ ID NO: 2592699 - RNA, 19 nt, Homo sapiens
  misc_RNA (1)...(19): siRNA sense strand
ugacauugaggauggcaga

SEQ ID NO: 2592700 - RNA, 19 nt, Homo sapiens
  misc_RNA (1)...(19): siRNA sense strand
cagucaccauucuggcaaa

SEQ ID NO: 2592701 - RNA, 19 nt, Homo sapiens
  misc_RNA (1)...(19): siRNA sense strand
cugaaaaccagaagaggca

SEQ ID NO: 2592702 - RNA, 19 nt, Homo sapiens
  misc_RNA (1)...(19): siRNA sense strand
cuggagaaacaguauaaca

SEQ ID NO: 2592703 - RNA, 19 nt, Homo sapiens
  misc_RNA (1)...(19): siRNA sense strand
gggccaagaacgugcggaa

SEQ ID NO: 2592704 - RNA, 19 nt, Homo sapiens
  misc_RNA (1)...(19): siRNA sense strand
gggacaacugggaggauga

SEQ ID NO: 2592705 - RNA, 19 nt, Homo sapiens
  misc_RNA (1)...(19): siRNA sense strand
agaaauugaccuucggcaa

SEQ ID NO: 2592706 - RNA, 19 nt, Homo sapiens
  misc_RNA (1)...(19): siRNA sense strand
uggacagagucuugaggau

SEQ ID NO: 2592707 - RNA, 19 nt, Homo sapiens
  misc_RNA (1)...(19): siRNA sense strand
gggaaacacucaugggcag

SEQ ID NO: 2592708 - RNA, 19 nt, Homo sapiens
  misc_RNA (1)...(19): siRNA sense strand
acagaugaacuuugggcau

SEQ ID NO: 2592709 - RNA, 19 nt, Homo sapiens
  misc_RNA (1)...(19): siRNA sense strand
cggacaggacggugaagca

SEQ ID NO: 2592710 - RNA, 19 nt, Homo sapiens
  misc_RNA (1)...(19): siRNA sense strand
ccugcagggcucugaggaa

SEQ ID NO: 2592711 - RNA, 19 nt, Homo sapiens
  misc_RNA (1)...(19): siRNA sense strand
auguguggauucugggauu

SEQ ID NO: 2592712 - RNA, 19 nt, Homo sapiens
  misc_RNA (1)...(19): siRNA sense strand
aggaagaagaagaagaaga

SEQ ID NO: 2592713 - RNA, 19 nt, Homo sapiens
  misc_RNA (1)...(19): siRNA sense strand
ugaaauuugcagaggucua

SEQ ID NO: 2592714 - RNA, 19 nt, Homo sapiens
  misc_RNA (1)...(19): siRNA sense strand
cgggauuggagaagaaaga

SEQ ID NO: 2592715 - RNA, 19 nt, Homo sapiens
  misc_RNA (1)...(19): siRNA sense strand
uggugaaggacuuggauau

SEQ ID NO: 2592716 - RNA, 19 nt, Homo sapiens
  misc_RNA (1)...(19): siRNA sense strand
gguacaaugaggagaccuu

SEQ ID NO: 2592717 - RNA, 19 nt, Homo sapiens
  misc_RNA (1)...(19): siRNA sense strand
agaauaugaugaagggucu

SEQ ID NO: 2592718 - RNA, 19 nt, Homo sapiens
  misc_RNA (1)...(19): siRNA sense strand
aagaggaagaagaagaaga

SEQ ID NO: 2592719 - RNA, 19 nt, Homo sapiens
  misc_RNA (1)...(19): siRNA sense strand
guuccaacccugaggacca

SEQ ID NO: 2592720 - RNA, 19 nt, Homo sapiens
  misc_RNA (1)...(19): siRNA sense strand
uaccaaagcuucagccuca

SEQ ID NO: 2592721 - RNA, 19 nt, Homo sapiens
  misc_RNA (1)...(19): siRNA sense strand
uguaucaaacugagcggua

SEQ ID NO: 2592722 - RNA, 19 nt, Homo sapiens
  misc_RNA (1)...(19): siRNA sense strand
ggaugauguaccaaagcuu

SEQ ID NO: 2592723 - RNA, 19 nt, Homo sapiens
  misc_RNA (1)...(19): siRNA sense strand
guggugaaggacuuggaua

SEQ ID NO: 2592724 - RNA, 19 nt, Homo sapiens
  misc_RNA (1)...(19): siRNA sense strand
cuuugaucguguugggcau

SEQ ID NO: 2592725 - RNA, 19 nt, Homo sapiens
  misc_RNA (1)...(19): siRNA sense strand
uggagaagaaagaagagga

SEQ ID NO: 2592726 - RNA, 19 nt, Homo sapiens
  misc_RNA (1)...(19): siRNA sense strand
acgugcuggucuugaaauu

SEQ ID NO: 2592727 - RNA, 19 nt, Homo sapiens
  misc_RNA (1)...(19): siRNA sense strand
caguggaugauguaccaaa

SEQ ID NO: 2592728 - RNA, 19 nt, Homo sapiens
  misc_RNA (1)...(19): siRNA sense strand
agguauuugauguacgauu

SEQ ID NO: 2592729 - RNA, 19 nt, Homo sapiens
  misc_RNA (1)...(19): siRNA sense strand
uggcugggacaguggauga

SEQ ID NO: 2592730 - RNA, 19 nt, Homo sapiens
  misc_RNA (1)...(19): siRNA sense strand
aggaagaagaagaagaaga

SEQ ID NO: 2592731 - RNA, 19 nt, Homo sapiens
  misc_RNA (1)...(19): siRNA sense strand
ugaaauuugcagaggucua

SEQ ID NO: 2592732 - RNA, 19 nt, Homo sapiens
  misc_RNA (1)...(19): siRNA sense strand
cgggauuggagaagaaaga

SEQ ID NO: 2592733 - RNA, 19 nt, Homo sapiens
  misc_RNA (1)...(19): siRNA sense strand
uggugaaggacuuggauau

SEQ ID NO: 2592734 - RNA, 19 nt, Homo sapiens
  misc_RNA (1)...(19): siRNA sense strand
gguacaaugaggagaccuu

SEQ ID NO: 2592735 - RNA, 19 nt, Homo sapiens
  misc_RNA (1)...(19): siRNA sense strand
agaauaugaugaagggucu

SEQ ID NO: 2592736 - RNA, 19 nt, Homo sapiens
  misc_RNA (1)...(19): siRNA sense strand
aagaggaagaagaagaaga

SEQ ID NO: 2592737 - RNA, 19 nt, Homo sapiens
  misc_RNA (1)...(19): siRNA sense strand
guuccaacccugaggacca

SEQ ID NO: 2592738 - RNA, 19 nt, Homo sapiens
  misc_RNA (1)...(19): siRNA sense strand
uaccaaagcuucagccuca

SEQ ID NO: 2592739 - RNA, 19 nt, Homo sapiens
  misc_RNA (1)...(19): siRNA sense strand
uguaucaaacugagcggua

SEQ ID NO: 2592740 - RNA, 19 nt, Homo sapiens
  misc_RNA (1)...(19): siRNA sense strand
ggaugauguaccaaagcuu

SEQ ID NO: 2592741 - RNA, 19 nt, Homo sapiens
  misc_RNA (1)...(19): siRNA sense strand
guggugaaggacuuggaua

SEQ ID NO: 2592742 - RNA, 19 nt, Homo sapiens
  misc_RNA (1)...(19): siRNA sense strand
cuuugaucguguugggcau

SEQ ID NO: 2592743 - RNA, 19 nt, Homo sapiens
  misc_RNA (1)...(19): siRNA sense strand
uggagaagaaagaagagga

SEQ ID NO: 2592744 - RNA, 19 nt, Homo sapiens
  misc_RNA (1)...(19): siRNA sense strand
acgugcuggucuugaaauu

SEQ ID NO: 2592745 - RNA, 19 nt, Homo sapiens
  misc_RNA (1)...(19): siRNA sense strand
caguggaugauguaccaaa

SEQ ID NO: 2592746 - RNA, 19 nt, Homo sapiens
  misc_RNA (1)...(19): siRNA sense strand
agguauuugauguacgauu

SEQ ID NO: 2592747 - RNA, 19 nt, Homo sapiens
  misc_RNA (1)...(19): siRNA sense strand
uggcugggacaguggauga

SEQ ID NO: 2592748 - RNA, 19 nt, Homo sapiens
  misc_RNA (1)...(19): siRNA sense strand
cgagaugugagcugcaaaa

SEQ ID NO: 2592749 - RNA, 19 nt, Homo sapiens
  misc_RNA (1)...(19): siRNA sense strand
gugagggcuuugaggagca

SEQ ID NO: 2592750 - RNA, 19 nt, Homo sapiens
  misc_RNA (1)...(19): siRNA sense strand
cggacaaagccaaggucau

SEQ ID NO: 2592751 - RNA, 19 nt, Homo sapiens
  misc_RNA (1)...(19): siRNA sense strand
uggauaagcucgugugcca

SEQ ID NO: 2592752 - RNA, 19 nt, Homo sapiens
  misc_RNA (1)...(19): siRNA sense strand
ccgaacugccggaaggaau

SEQ ID NO: 2592753 - RNA, 19 nt, Homo sapiens
  misc_RNA (1)...(19): siRNA sense strand
agcugaaggcagaggagua

SEQ ID NO: 2592754 - RNA, 19 nt, Homo sapiens
  misc_RNA (1)...(19): siRNA sense strand
gagaagaaccugcgcccau

SEQ ID NO: 2592755 - RNA, 19 nt, Homo sapiens
  misc_RNA (1)...(19): siRNA sense strand
aggcagaggaguauguuca

SEQ ID NO: 2592756 - RNA, 19 nt, Homo sapiens
  misc_RNA (1)...(19): siRNA sense strand
gagaaguccuggagggagc

SEQ ID NO: 2592757 - RNA, 19 nt, Homo sapiens
  misc_RNA (1)...(19): siRNA sense strand
gggaauguggugguggaaa

SEQ ID NO: 2592758 - RNA, 19 nt, Homo sapiens
  misc_RNA (1)...(19): siRNA sense strand
uacagaagcugaaggcaga

SEQ ID NO: 2592759 - RNA, 19 nt, Homo sapiens
  misc_RNA (1)...(19): siRNA sense strand
gagggaaugugguggugga

SEQ ID NO: 2592760 - RNA, 19 nt, Homo sapiens
  misc_RNA (1)...(19): siRNA sense strand
ugaccaagccccagcgcaa

SEQ ID NO: 2592761 - RNA, 19 nt, Homo sapiens
  misc_RNA (1)...(19): siRNA sense strand
ggcacaaggagaugagcca

SEQ ID NO: 2592762 - RNA, 19 nt, Homo sapiens
  misc_RNA (1)...(19): siRNA sense strand
gcccgagaacagcaagaaa

SEQ ID NO: 2592763 - RNA, 19 nt, Homo sapiens
  misc_RNA (1)...(19): siRNA sense strand
agcugaucuacgugagaaa

SEQ ID NO: 2592764 - RNA, 19 nt, Homo sapiens
  misc_RNA (1)...(19): siRNA sense strand
agugaaggagggacgagaa

SEQ ID NO: 2592765 - RNA, 19 nt, Homo sapiens
  misc_RNA (1)...(19): siRNA sense strand
cuacagaagcugaaggcag

SEQ ID NO: 2592766 - RNA, 19 nt, Homo sapiens
  misc_RNA (1)...(19): siRNA sense strand
ccgagaacagcaagaaacu

SEQ ID NO: 2592767 - RNA, 19 nt, Homo sapiens
  misc_RNA (1)...(19): siRNA sense strand
aggagggacgagaagggaa

SEQ ID NO: 2592768 - RNA, 19 nt, Homo sapiens
  misc_RNA (1)...(19): siRNA sense strand
gaggauacccugugcugga

SEQ ID NO: 2592769 - RNA, 19 nt, Homo sapiens
  misc_RNA (1)...(19): siRNA sense strand
accuaaagaaggagauuaa

SEQ ID NO: 2592770 - RNA, 19 nt, Homo sapiens
  misc_RNA (1)...(19): siRNA sense strand
cccagaaggagaaggaaga

SEQ ID NO: 2592771 - RNA, 19 nt, Homo sapiens
  misc_RNA (1)...(19): siRNA sense strand
cggaaaacucugaagauga

SEQ ID NO: 2592772 - RNA, 19 nt, Homo sapiens
  misc_RNA (1)...(19): siRNA sense strand
ucaaaguuguggaacgaga

SEQ ID NO: 2592773 - RNA, 19 nt, Homo sapiens
  misc_RNA (1)...(19): siRNA sense strand
ccucugacucugagcguau

SEQ ID NO: 2592774 - RNA, 19 nt, Homo sapiens
  misc_RNA (1)...(19): siRNA sense strand
aagaaaaguaugaggcuga

SEQ ID NO: 2592775 - RNA, 19 nt, Homo sapiens
  misc_RNA (1)...(19): siRNA sense strand
gcgacaaggauaagcagga

SEQ ID NO: 2592776 - RNA, 19 nt, Homo sapiens
  misc_RNA (1)...(19): siRNA sense strand
agaucaaggacaagaggca

SEQ ID NO: 2592777 - RNA, 19 nt, Homo sapiens
  misc_RNA (1)...(19): siRNA sense strand
acucugaagaugauaagaa

SEQ ID NO: 2592778 - RNA, 19 nt, Homo sapiens
  misc_RNA (1)...(19): siRNA sense strand
acauggaggaugagaucuu

SEQ ID NO: 2592779 - RNA, 19 nt, Homo sapiens
  misc_RNA (1)...(19): siRNA sense strand
acucggacacuguggaauu

SEQ ID NO: 2592780 - RNA, 19 nt, Homo sapiens
  misc_RNA (1)...(19): siRNA sense strand
aggauaagcaggaccggau

SEQ ID NO: 2592781 - RNA, 19 nt, Homo sapiens
  misc_RNA (1)...(19): siRNA sense strand
acgaggagcccaagaccau

SEQ ID NO: 2592782 - RNA, 19 nt, Homo sapiens
  misc_RNA (1)...(19): siRNA sense strand
aacgcgaaccagaaagaaa

SEQ ID NO: 2592783 - RNA, 19 nt, Homo sapiens
  misc_RNA (1)...(19): siRNA sense strand
acgcgaaccagaaagaaaa

SEQ ID NO: 2592784 - RNA, 19 nt, Homo sapiens
  misc_RNA (1)...(19): siRNA sense strand
ccaaaucaagacaugggua

SEQ ID NO: 2592785 - RNA, 19 nt, Homo sapiens
  misc_RNA (1)...(19): siRNA sense strand
gaaggaacccagugcggca

SEQ ID NO: 2592786 - RNA, 19 nt, Homo sapiens
  misc_RNA (1)...(19): siRNA sense strand
aggacaagaggcagcuuau

SEQ ID NO: 2592787 - RNA, 19 nt, Homo sapiens
  misc_RNA (1)...(19): siRNA sense strand
uuguggaacgagagaccaa

SEQ ID NO: 2592788 - RNA, 19 nt, Homo sapiens
  misc_RNA (1)...(19): siRNA sense strand
agaccaaaaccaaagcuua

SEQ ID NO: 2592789 - RNA, 19 nt, Homo sapiens
  misc_RNA (1)...(19): siRNA sense strand
agaaggaagagguuggcca

SEQ ID NO: 2592790 - RNA, 19 nt, Homo sapiens
  misc_RNA (1)...(19): siRNA sense strand
ugaugugguuccagaggca

SEQ ID NO: 2592791 - RNA, 19 nt, Homo sapiens
  misc_RNA (1)...(19): siRNA sense strand
agaagaaaguggaagcuga

SEQ ID NO: 2592792 - RNA, 19 nt, Homo sapiens
  misc_RNA (1)...(19): siRNA sense strand
gcaaagagguuuaugugga

SEQ ID NO: 2592793 - RNA, 19 nt, Homo sapiens
  misc_RNA (1)...(19): siRNA sense strand
agguuuauguggagggaca

SEQ ID NO: 2592794 - RNA, 19 nt, Homo sapiens
  misc_RNA (1)...(19): siRNA sense strand
ugaaaugguaacagggauu

SEQ ID NO: 2592795 - RNA, 19 nt, Homo sapiens
  misc_RNA (1)...(19): siRNA sense strand
cugaaguuuuagagggaaa

SEQ ID NO: 2592796 - RNA, 19 nt, Homo sapiens
  misc_RNA (1)...(19): siRNA sense strand
acugagagauggugaaaau

SEQ ID NO: 2592797 - RNA, 19 nt, Homo sapiens
  misc_RNA (1)...(19): siRNA sense strand
gagagaggucagaugggaa

SEQ ID NO: 2592798 - RNA, 19 nt, Homo sapiens
  misc_RNA (1)...(19): siRNA sense strand
cgggaguggaggaggacuu

SEQ ID NO: 2592799 - RNA, 19 nt, Homo sapiens
  misc_RNA (1)...(19): siRNA sense strand
gaguguaauaucugugcaa

SEQ ID NO: 2592800 - RNA, 19 nt, Homo sapiens
  misc_RNA (1)...(19): siRNA sense strand
cacaagagucagagagauc

SEQ ID NO: 2592801 - RNA, 19 nt, Homo sapiens
  misc_RNA (1)...(19): siRNA sense strand
agagaggucagaugggaau

SEQ ID NO: 2592802 - RNA, 19 nt, Homo sapiens
  misc_RNA (1)...(19): siRNA sense strand
cgaccuacgacgagcacca

SEQ ID NO: 2592803 - RNA, 19 nt, Homo sapiens
  misc_RNA (1)...(19): siRNA sense strand
agauguggcaugugguaga

SEQ ID NO: 2592804 - RNA, 19 nt, Homo sapiens
  misc_RNA (1)...(19): siRNA sense strand
cuucgggaguggaggagga

SEQ ID NO: 2592805 - RNA, 19 nt, Homo sapiens
  misc_RNA (1)...(19): siRNA sense strand
gggucugcgguaagaaauu

SEQ ID NO: 2592806 - RNA, 19 nt, Homo sapiens
  misc_RNA (1)...(19): siRNA sense strand
acacaggcauaaagccgua

SEQ ID NO: 2592807 - RNA, 19 nt, Homo sapiens
  misc_RNA (1)...(19): siRNA sense strand
guggcaugugguagacaaa

SEQ ID NO: 2592808 - RNA, 19 nt, Homo sapiens
  misc_RNA (1)...(19): siRNA sense strand
agaacugagagauggugaa

SEQ ID NO: 2592809 - RNA, 19 nt, Homo sapiens
  misc_RNA (1)...(19): siRNA sense strand
gaagcuaaaucauggcagu

SEQ ID NO: 2592810 - RNA, 19 nt, Homo sapiens
  misc_RNA (1)...(19): siRNA sense strand
gggagaagaaaguggaagc

SEQ ID NO: 2592811 - RNA, 19 nt, Homo sapiens
  misc_RNA (1)...(19): siRNA sense strand
guuauaauggccugguaga

SEQ ID NO: 2592812 - RNA, 19 nt, Homo sapiens
  misc_RNA (1)...(19): siRNA sense strand
cagaauacaacugaggcua

SEQ ID NO: 2592813 - RNA, 19 nt, Homo sapiens
  misc_RNA (1)...(19): siRNA sense strand
ccacagagcaugaccgccu

SEQ ID NO: 2592814 - RNA, 19 nt, Homo sapiens
  misc_RNA (1)...(19): siRNA sense strand
aaguggaagcugaguuuga

SEQ ID NO: 2592815 - RNA, 19 nt, Homo sapiens
  misc_RNA (1)...(19): siRNA sense strand
gcaauuaugaugagcaggu

SEQ ID NO: 2592816 - RNA, 19 nt, Homo sapiens
  misc_RNA (1)...(19): siRNA sense strand
guguaauaucugugcaaag

SEQ ID NO: 2592817 - RNA, 19 nt, Homo sapiens
  misc_RNA (1)...(19): siRNA sense strand
cuacgaagcugcaaaggcu

SEQ ID NO: 2592818 - RNA, 19 nt, Homo sapiens
  misc_RNA (1)...(19): siRNA sense strand
agaagaaaguggaagcuga

SEQ ID NO: 2592819 - RNA, 19 nt, Homo sapiens
  misc_RNA (1)...(19): siRNA sense strand
gcaaagagguuuaugugga

SEQ ID NO: 2592820 - RNA, 19 nt, Homo sapiens
  misc_RNA (1)...(19): siRNA sense strand
agguuuauguggagggaca

SEQ ID NO: 2592821 - RNA, 19 nt, Homo sapiens
  misc_RNA (1)...(19): siRNA sense strand
ugaaaugguaacagggauu

SEQ ID NO: 2592822 - RNA, 19 nt, Homo sapiens
  misc_RNA (1)...(19): siRNA sense strand
cugaaguuuuagagggaaa

SEQ ID NO: 2592823 - RNA, 19 nt, Homo sapiens
  misc_RNA (1)...(19): siRNA sense strand
acugagagauggugaaaau

SEQ ID NO: 2592824 - RNA, 19 nt, Homo sapiens
  misc_RNA (1)...(19): siRNA sense strand
gagagaggucagaugggaa

SEQ ID NO: 2592825 - RNA, 19 nt, Homo sapiens
  misc_RNA (1)...(19): siRNA sense strand
cgggaguggaggaggacuu

SEQ ID NO: 2592826 - RNA, 19 nt, Homo sapiens
  misc_RNA (1)...(19): siRNA sense strand
gaguguaauaucugugcaa

SEQ ID NO: 2592827 - RNA, 19 nt, Homo sapiens
  misc_RNA (1)...(19): siRNA sense strand
cacaagagucagagagauc

SEQ ID NO: 2592828 - RNA, 19 nt, Homo sapiens
  misc_RNA (1)...(19): siRNA sense strand
agagaggucagaugggaau

SEQ ID NO: 2592829 - RNA, 19 nt, Homo sapiens
  misc_RNA (1)...(19): siRNA sense strand
cgaccuacgacgagcacca

SEQ ID NO: 2592830 - RNA, 19 nt, Homo sapiens
  misc_RNA (1)...(19): siRNA sense strand
agauguggcaugugguaga

SEQ ID NO: 2592831 - RNA, 19 nt, Homo sapiens
  misc_RNA (1)...(19): siRNA sense strand
cuucgggaguggaggagga

SEQ ID NO: 2592832 - RNA, 19 nt, Homo sapiens
  misc_RNA (1)...(19): siRNA sense strand
gggucugcgguaagaaauu

SEQ ID NO: 2592833 - RNA, 19 nt, Homo sapiens
  misc_RNA (1)...(19): siRNA sense strand
acacaggcauaaagccgua

SEQ ID NO: 2592834 - RNA, 19 nt, Homo sapiens
  misc_RNA (1)...(19): siRNA sense strand
guggcaugugguagacaaa

SEQ ID NO: 2592835 - RNA, 19 nt, Homo sapiens
  misc_RNA (1)...(19): siRNA sense strand
agaacugagagauggugaa

SEQ ID NO: 2592836 - RNA, 19 nt, Homo sapiens
  misc_RNA (1)...(19): siRNA sense strand
gaagcuaaaucauggcagu

SEQ ID NO: 2592837 - RNA, 19 nt, Homo sapiens
  misc_RNA (1)...(19): siRNA sense strand
gggagaagaaaguggaagc

SEQ ID NO: 2592838 - RNA, 19 nt, Homo sapiens
  misc_RNA (1)...(19): siRNA sense strand
guuauaauggccugguaga

SEQ ID NO: 2592839 - RNA, 19 nt, Homo sapiens
  misc_RNA (1)...(19): siRNA sense strand
cagaauacaacugaggcua

SEQ ID NO: 2592840 - RNA, 19 nt, Homo sapiens
  misc_RNA (1)...(19): siRNA sense strand
ccacagagcaugaccgccu

SEQ ID NO: 2592841 - RNA, 19 nt, Homo sapiens
  misc_RNA (1)...(19): siRNA sense strand
aaguggaagcugaguuuga

SEQ ID NO: 2592842 - RNA, 19 nt, Homo sapiens
  misc_RNA (1)...(19): siRNA sense strand
gcaauuaugaugagcaggu

SEQ ID NO: 2592843 - RNA, 19 nt, Homo sapiens
  misc_RNA (1)...(19): siRNA sense strand
guguaauaucugugcaaag

SEQ ID NO: 2592844 - RNA, 19 nt, Homo sapiens
  misc_RNA (1)...(19): siRNA sense strand
cuacgaagcugcaaaggcu

SEQ ID NO: 2592845 - RNA, 19 nt, Homo sapiens
  misc_RNA (1)...(19): siRNA sense strand
gggaaauagaggagcaaga

SEQ ID NO: 2592846 - RNA, 19 nt, Homo sapiens
  misc_RNA (1)...(19): siRNA sense strand
cagcaaaggaggcgggaga

SEQ ID NO: 2592847 - RNA, 19 nt, Homo sapiens
  misc_RNA (1)...(19): siRNA sense strand
gaagagaaguggagcacca

SEQ ID NO: 2592848 - RNA, 19 nt, Homo sapiens
  misc_RNA (1)...(19): siRNA sense strand
cuuugaagguauuggaaga

SEQ ID NO: 2592849 - RNA, 19 nt, Homo sapiens
  misc_RNA (1)...(19): siRNA sense strand
gauuagaagaccuggaaca

SEQ ID NO: 2592850 - RNA, 19 nt, Homo sapiens
  misc_RNA (1)...(19): siRNA sense strand
agaccuggaacaagagaaa

SEQ ID NO: 2592851 - RNA, 19 nt, Homo sapiens
  misc_RNA (1)...(19): siRNA sense strand
cugagaaaccggaggcaga

SEQ ID NO: 2592852 - RNA, 19 nt, Homo sapiens
  misc_RNA (1)...(19): siRNA sense strand
cauuaacaucagagagaga

SEQ ID NO: 2592853 - RNA, 19 nt, Homo sapiens
  misc_RNA (1)...(19): siRNA sense strand
cuguagaagaugagaggca

SEQ ID NO: 2592854 - RNA, 19 nt, Homo sapiens
  misc_RNA (1)...(19): siRNA sense strand
gaagggaaauagaggagca

SEQ ID NO: 2592855 - RNA, 19 nt, Homo sapiens
  misc_RNA (1)...(19): siRNA sense strand
gguguguaugagugagaaa

SEQ ID NO: 2592856 - RNA, 19 nt, Homo sapiens
  misc_RNA (1)...(19): siRNA sense strand
aggaagaugcaguugagaa

SEQ ID NO: 2592857 - RNA, 19 nt, Homo sapiens
  misc_RNA (1)...(19): siRNA sense strand
ggaacguggagaagcagaa

SEQ ID NO: 2592858 - RNA, 19 nt, Homo sapiens
  misc_RNA (1)...(19): siRNA sense strand
ccacgaagcacaagccuga

SEQ ID NO: 2592859 - RNA, 19 nt, Homo sapiens
  misc_RNA (1)...(19): siRNA sense strand
cuccagauggugaaggaaa

SEQ ID NO: 2592860 - RNA, 19 nt, Homo sapiens
  misc_RNA (1)...(19): siRNA sense strand
guagaagaugagaggcaga

SEQ ID NO: 2592861 - RNA, 19 nt, Homo sapiens
  misc_RNA (1)...(19): siRNA sense strand
ggaaagugugggaagcuga

SEQ ID NO: 2592862 - RNA, 19 nt, Homo sapiens
  misc_RNA (1)...(19): siRNA sense strand
ugcuggaggugaacagaaa

SEQ ID NO: 2592863 - RNA, 19 nt, Homo sapiens
  misc_RNA (1)...(19): siRNA sense strand
gagaaaagugugaagacau

SEQ ID NO: 2592864 - RNA, 19 nt, Homo sapiens
  misc_RNA (1)...(19): siRNA sense strand
agguauuggaagaauggaa

SEQ ID NO: 2592865 - RNA, 19 nt, Homo sapiens
  misc_RNA (1)...(19): siRNA sense strand
cugcagaacuuggagaaaa

SEQ ID NO: 2592866 - RNA, 19 nt, Homo sapiens
  misc_RNA (1)...(19): siRNA sense strand
aggugaacagaaagaggaa

SEQ ID NO: 2592867 - RNA, 19 nt, Homo sapiens
  misc_RNA (1)...(19): siRNA sense strand
augauaaagcugagacguu

SEQ ID NO: 2592868 - RNA, 19 nt, Homo sapiens
  misc_RNA (1)...(19): siRNA sense strand
acccugaggaagaaaguua

SEQ ID NO: 2592869 - RNA, 19 nt, Homo sapiens
  misc_RNA (1)...(19): siRNA sense strand
ccaggagaugggagccaaa

SEQ ID NO: 2592870 - RNA, 19 nt, Homo sapiens
  misc_RNA (1)...(19): siRNA sense strand
uggaagaauggaagacuca

SEQ ID NO: 2592871 - RNA, 19 nt, Homo sapiens
  misc_RNA (1)...(19): siRNA sense strand
gugaacagaaagaggaauc

SEQ ID NO: 2592872 - RNA, 19 nt, Homo sapiens
  misc_RNA (1)...(19): siRNA sense strand
ccagagaggcugaguccca

SEQ ID NO: 2592873 - RNA, 19 nt, Homo sapiens
  misc_RNA (1)...(19): siRNA sense strand
gggagaaagagaagcugca

SEQ ID NO: 2592874 - RNA, 19 nt, Homo sapiens
  misc_RNA (1)...(19): siRNA sense strand
agacguuacaacaaagauu

SEQ ID NO: 2592875 - RNA, 19 nt, Homo sapiens
  misc_RNA (1)...(19): siRNA sense strand
ugagaagagaaguggagca

SEQ ID NO: 2592876 - RNA, 19 nt, Homo sapiens
  misc_RNA (1)...(19): siRNA sense strand
cgauauugaaacccaacua

SEQ ID NO: 2592877 - RNA, 19 nt, Homo sapiens
  misc_RNA (1)...(19): siRNA sense strand
gaugagaggcagauggaug

SEQ ID NO: 2592878 - RNA, 19 nt, Homo sapiens
  misc_RNA (1)...(19): siRNA sense strand
ggcuccacuccgaggauaa

SEQ ID NO: 2592879 - RNA, 19 nt, Homo sapiens
  misc_RNA (1)...(19): siRNA sense strand
uguguaugagugagaaauu

SEQ ID NO: 2592880 - RNA, 19 nt, Homo sapiens
  misc_RNA (1)...(19): siRNA sense strand
uguuugugcuggaagccaa

SEQ ID NO: 2592881 - RNA, 19 nt, Homo sapiens
  misc_RNA (1)...(19): siRNA sense strand
gaauaaaaucccucaacuu

SEQ ID NO: 2592882 - RNA, 19 nt, Homo sapiens
  misc_RNA (1)...(19): siRNA sense strand
aaccauuucuggacggcua

SEQ ID NO: 2592883 - RNA, 19 nt, Homo sapiens
  misc_RNA (1)...(19): siRNA sense strand
aggaaacucugcaggccau

SEQ ID NO: 2592884 - RNA, 19 nt, Homo sapiens
  misc_RNA (1)...(19): siRNA sense strand
aaauagaggagcaagagca

SEQ ID NO: 2592885 - RNA, 19 nt, Homo sapiens
  misc_RNA (1)...(19): siRNA sense strand
acuacuaagguguguauga

SEQ ID NO: 2592886 - RNA, 19 nt, Homo sapiens
  misc_RNA (1)...(19): siRNA sense strand
caggagacugccuaugaaa

SEQ ID NO: 2592887 - RNA, 19 nt, Homo sapiens
  misc_RNA (1)...(19): siRNA sense strand
gaucaacuucacacagcaa

SEQ ID NO: 2592888 - RNA, 19 nt, Homo sapiens
  misc_RNA (1)...(19): siRNA sense strand
aaagcugggaaguguuaaa

SEQ ID NO: 2592889 - RNA, 19 nt, Homo sapiens
  misc_RNA (1)...(19): siRNA sense strand
cuaugaaacaagugugaag

SEQ ID NO: 2592890 - RNA, 19 nt, Homo sapiens
  misc_RNA (1)...(19): siRNA sense strand
cuaugaaguacauggaaac

SEQ ID NO: 2592891 - RNA, 19 nt, Homo sapiens
  misc_RNA (1)...(19): siRNA sense strand
guguccacugcuugggaaa

SEQ ID NO: 2592892 - RNA, 19 nt, Homo sapiens
  misc_RNA (1)...(19): siRNA sense strand
cggggaacguggagaagca

SEQ ID NO: 2592893 - RNA, 19 nt, Homo sapiens
  misc_RNA (1)...(19): siRNA sense strand
acaacaaagauuagaagac

SEQ ID NO: 2592894 - RNA, 19 nt, Homo sapiens
  misc_RNA (1)...(19): siRNA sense strand
aucauuaacaucagagaga

SEQ ID NO: 2592895 - RNA, 19 nt, Homo sapiens
  misc_RNA (1)...(19): siRNA sense strand
agugugaagacauaggcaa

SEQ ID NO: 2592896 - RNA, 19 nt, Homo sapiens
  misc_RNA (1)...(19): siRNA sense strand
ccucguaaccaaaugggaa

SEQ ID NO: 2592897 - RNA, 19 nt, Homo sapiens
  misc_RNA (1)...(19): siRNA sense strand
uaaaggaaauuguagccua

SEQ ID NO: 2592898 - RNA, 19 nt, Homo sapiens
  misc_RNA (1)...(19): siRNA sense strand
cugcggaguaugaugaaga

SEQ ID NO: 2592899 - RNA, 19 nt, Homo sapiens
  misc_RNA (1)...(19): siRNA sense strand
aggaaaugcaggcggguaa

SEQ ID NO: 2592900 - RNA, 19 nt, Homo sapiens
  misc_RNA (1)...(19): siRNA sense strand
aagaauaugcaguguccaa

SEQ ID NO: 2592901 - RNA, 19 nt, Homo sapiens
  misc_RNA (1)...(19): siRNA sense strand
gggcaguaacagagucaca

SEQ ID NO: 2592902 - RNA, 19 nt, Homo sapiens
  misc_RNA (1)...(19): siRNA sense strand
gcugcaaaggauaaagaau

SEQ ID NO: 2592903 - RNA, 19 nt, Homo sapiens
  misc_RNA (1)...(19): siRNA sense strand
cuaaacaaccagagggaug

SEQ ID NO: 2592904 - RNA, 19 nt, Homo sapiens
  misc_RNA (1)...(19): siRNA sense strand
cgccaaagguccaggcucu

SEQ ID NO: 2592905 - RNA, 19 nt, Homo sapiens
  misc_RNA (1)...(19): siRNA sense strand
guagaaagccauauccaga

SEQ ID NO: 2592906 - RNA, 19 nt, Homo sapiens
  misc_RNA (1)...(19): siRNA sense strand
ccauacagugugucaacaa

SEQ ID NO: 2592907 - RNA, 19 nt, Homo sapiens
  misc_RNA (1)...(19): siRNA sense strand
cguuauucucagacaauuu

SEQ ID NO: 2592908 - RNA, 19 nt, Homo sapiens
  misc_RNA (1)...(19): siRNA sense strand
ggugauaauucccagcaga

SEQ ID NO: 2592909 - RNA, 19 nt, Homo sapiens
  misc_RNA (1)...(19): siRNA sense strand
gguccaagugccagugcuu

SEQ ID NO: 2592910 - RNA, 19 nt, Homo sapiens
  misc_RNA (1)...(19): siRNA sense strand
gcagaacacuuaaggcauc

SEQ ID NO: 2592911 - RNA, 19 nt, Homo sapiens
  misc_RNA (1)...(19): siRNA sense strand
ucgaauucgcacugaugaa

SEQ ID NO: 2592912 - RNA, 19 nt, Homo sapiens
  misc_RNA (1)...(19): siRNA sense strand
ugggaaguuugguaaaaua

SEQ ID NO: 2592913 - RNA, 19 nt, Homo sapiens
  misc_RNA (1)...(19): siRNA sense strand
agagggaugacuuggguuu

SEQ ID NO: 2592914 - RNA, 19 nt, Homo sapiens
  misc_RNA (1)...(19): siRNA sense strand
uggcagaacacuuaaggca

SEQ ID NO: 2592915 - RNA, 19 nt, Homo sapiens
  misc_RNA (1)...(19): siRNA sense strand
accaagaauaugaacagaa

SEQ ID NO: 2592916 - RNA, 19 nt, Homo sapiens
  misc_RNA (1)...(19): siRNA sense strand
cugcauguagaaagccaua

SEQ ID NO: 2592917 - RNA, 19 nt, Homo sapiens
  misc_RNA (1)...(19): siRNA sense strand
cuucagauucucucaguau

SEQ ID NO: 2592918 - RNA, 19 nt, Homo sapiens
  misc_RNA (1)...(19): siRNA sense strand
acagaaacaaaaugagaga

SEQ ID NO: 2592919 - RNA, 19 nt, Homo sapiens
  misc_RNA (1)...(19): siRNA sense strand
uagcagacccagagguuuu

SEQ ID NO: 2592920 - RNA, 19 nt, Homo sapiens
  misc_RNA (1)...(19): siRNA sense strand
caguauagggaacggugau

SEQ ID NO: 2592921 - RNA, 19 nt, Homo sapiens
  misc_RNA (1)...(19): siRNA sense strand
gugauaauucccagcagau

SEQ ID NO: 2592922 - RNA, 19 nt, Homo sapiens
  misc_RNA (1)...(19): siRNA sense strand
guucaacacuggaccgcca

SEQ ID NO: 2592923 - RNA, 19 nt, Homo sapiens
  misc_RNA (1)...(19): siRNA sense strand
ugaugaaguaguugagaaa

SEQ ID NO: 2592924 - RNA, 19 nt, Homo sapiens
  misc_RNA (1)...(19): siRNA sense strand
gaaacaaauucacgaggaa

SEQ ID NO: 2592925 - RNA, 19 nt, Homo sapiens
  misc_RNA (1)...(19): siRNA sense strand
ccagagaagacacgaauaa

SEQ ID NO: 2592926 - RNA, 19 nt, Homo sapiens
  misc_RNA (1)...(19): siRNA sense strand
caaacaaccaucagcguua

SEQ ID NO: 2592927 - RNA, 19 nt, Homo sapiens
  misc_RNA (1)...(19): siRNA sense strand
agaaaggauuugaagauga

SEQ ID NO: 2592928 - RNA, 19 nt, Homo sapiens
  misc_RNA (1)...(19): siRNA sense strand
gaacagcaucugaaacaaa

SEQ ID NO: 2592929 - RNA, 19 nt, Homo sapiens
  misc_RNA (1)...(19): siRNA sense strand
ugagaaaggauuugaagau

SEQ ID NO: 2592930 - RNA, 19 nt, Homo sapiens
  misc_RNA (1)...(19): siRNA sense strand
cagaaaugacagauaucaa

SEQ ID NO: 2592931 - RNA, 19 nt, Homo sapiens
  misc_RNA (1)...(19): siRNA sense strand
gcucagacacccugggaca

SEQ ID NO: 2592932 - RNA, 19 nt, Homo sapiens
  misc_RNA (1)...(19): siRNA sense strand
ggugauaauaugagguguu

SEQ ID NO: 2592933 - RNA, 19 nt, Homo sapiens
  misc_RNA (1)...(19): siRNA sense strand
cgaugaggccagaugacaa

SEQ ID NO: 2592934 - RNA, 19 nt, Homo sapiens
  misc_RNA (1)...(19): siRNA sense strand
acgaggaagcacugagcaa

SEQ ID NO: 2592935 - RNA, 19 nt, Homo sapiens
  misc_RNA (1)...(19): siRNA sense strand
cauacagaaauucgagaaa

SEQ ID NO: 2592936 - RNA, 19 nt, Homo sapiens
  misc_RNA (1)...(19): siRNA sense strand
gaggaagcacugagcaaau

SEQ ID NO: 2592937 - RNA, 19 nt, Homo sapiens
  misc_RNA (1)...(19): siRNA sense strand
ugggacaagccuagggaau

SEQ ID NO: 2592938 - RNA, 19 nt, Homo sapiens
  misc_RNA (1)...(19): siRNA sense strand
cggugaauuacguggguga

SEQ ID NO: 2592939 - RNA, 19 nt, Homo sapiens
  misc_RNA (1)...(19): siRNA sense strand
gggacaagccuagggaauu

SEQ ID NO: 2592940 - RNA, 19 nt, Homo sapiens
  misc_RNA (1)...(19): siRNA sense strand
gaaaggauuugaagaugau

SEQ ID NO: 2592941 - RNA, 19 nt, Homo sapiens
  misc_RNA (1)...(19): siRNA sense strand
aguauaaacuaggagacaa

SEQ ID NO: 2592942 - RNA, 19 nt, Homo sapiens
  misc_RNA (1)...(19): siRNA sense strand
agaaagacauugagaccgu

SEQ ID NO: 2592943 - RNA, 19 nt, Homo sapiens
  misc_RNA (1)...(19): siRNA sense strand
uuacaugggagcagcuuaa

SEQ ID NO: 2592944 - RNA, 19 nt, Homo sapiens
  misc_RNA (1)...(19): siRNA sense strand
gauuugaagaugaucgaau

SEQ ID NO: 2592945 - RNA, 19 nt, Homo sapiens
  misc_RNA (1)...(19): siRNA sense strand
gcuuugaagaagaggagca

SEQ ID NO: 2592946 - RNA, 19 nt, Homo sapiens
  misc_RNA (1)...(19): siRNA sense strand
uugaagaagaggagcacuu

SEQ ID NO: 2592947 - RNA, 19 nt, Homo sapiens
  misc_RNA (1)...(19): siRNA sense strand
uuacagacaaugagaggau

SEQ ID NO: 2592948 - RNA, 19 nt, Homo sapiens
  misc_RNA (1)...(19): siRNA sense strand
gggagcagcuuaagcaguu

SEQ ID NO: 2592949 - RNA, 19 nt, Homo sapiens
  misc_RNA (1)...(19): siRNA sense strand
uugaugaaguaguugagaa

SEQ ID NO: 2592950 - RNA, 19 nt, Homo sapiens
  misc_RNA (1)...(19): siRNA sense strand
guauaaacuaggagacaag

SEQ ID NO: 2592951 - RNA, 19 nt, Homo sapiens
  misc_RNA (1)...(19): siRNA sense strand
ccaaggacuuucagaaucu

SEQ ID NO: 2592952 - RNA, 19 nt, Homo sapiens
  misc_RNA (1)...(19): siRNA sense strand
acagacaaugagaggauau

SEQ ID NO: 2592953 - RNA, 19 nt, Homo sapiens
  misc_RNA (1)...(19): siRNA sense strand
ggagaaagacauugagacc

SEQ ID NO: 2592954 - RNA, 19 nt, Homo sapiens
  misc_RNA (1)...(19): siRNA sense strand
agaauuacggagucaacaa

SEQ ID NO: 2592955 - RNA, 19 nt, Homo sapiens
  misc_RNA (1)...(19): siRNA sense strand
acagaucccucuaaacaaa

SEQ ID NO: 2592956 - RNA, 19 nt, Homo sapiens
  misc_RNA (1)...(19): siRNA sense strand
caguauaaacuaggagaca

SEQ ID NO: 2592957 - RNA, 19 nt, Homo sapiens
  misc_RNA (1)...(19): siRNA sense strand
ccguaaaccaggugacauc

SEQ ID NO: 2592958 - RNA, 19 nt, Homo sapiens
  misc_RNA (1)...(19): siRNA sense strand
uagaacagcaucugaaaca

SEQ ID NO: 2592959 - RNA, 19 nt, Homo sapiens
  misc_RNA (1)...(19): siRNA sense strand
ugagcaaauuccagaaaau

SEQ ID NO: 2592960 - RNA, 19 nt, Homo sapiens
  misc_RNA (1)...(19): siRNA sense strand
augaagaggauugcagaaa

SEQ ID NO: 2592961 - RNA, 19 nt, Homo sapiens
  misc_RNA (1)...(19): siRNA sense strand
caggagaccuucagcggga

SEQ ID NO: 2592962 - RNA, 19 nt, Homo sapiens
  misc_RNA (1)...(19): siRNA sense strand
ggacaguacugguguuccu

SEQ ID NO: 2592963 - RNA, 19 nt, Homo sapiens
  misc_RNA (1)...(19): siRNA sense strand
ugagaugaagggagcguuu

SEQ ID NO: 2592964 - RNA, 19 nt, Homo sapiens
  misc_RNA (1)...(19): siRNA sense strand
ggacaagccuagggaauuc

SEQ ID NO: 2592965 - RNA, 19 nt, Homo sapiens
  misc_RNA (1)...(19): siRNA sense strand
ccuagggaauuccagauaa

SEQ ID NO: 2592966 - RNA, 19 nt, Homo sapiens
  misc_RNA (1)...(19): siRNA sense strand
gguucuucacguacgguaa

SEQ ID NO: 2592967 - RNA, 19 nt, Homo sapiens
  misc_RNA (1)...(19): siRNA sense strand
acgagaaaggucuagaauu

SEQ ID NO: 2592968 - RNA, 19 nt, Homo sapiens
  misc_RNA (1)...(19): siRNA sense strand
cgaauaaucuguucagcgu

SEQ ID NO: 2592969 - RNA, 19 nt, Homo sapiens
  misc_RNA (1)...(19): siRNA sense strand
cagacaaaggaauggacca

SEQ ID NO: 2592970 - RNA, 19 nt, Homo sapiens
  misc_RNA (1)...(19): siRNA sense strand
gcggcuggaacaugagaau

SEQ ID NO: 2592971 - RNA, 19 nt, Homo sapiens
  misc_RNA (1)...(19): siRNA sense strand
gcagagacccuuucuucaa

SEQ ID NO: 2592972 - RNA, 19 nt, Homo sapiens
  misc_RNA (1)...(19): siRNA sense strand
cauuagaacagcaucugaa

SEQ ID NO: 2592973 - RNA, 19 nt, Homo sapiens
  misc_RNA (1)...(19): siRNA sense strand
uuuacaaagccuugauuga

SEQ ID NO: 2592974 - RNA, 19 nt, Homo sapiens
  misc_RNA (1)...(19): siRNA sense strand
ggauauaauggcuacacga

SEQ ID NO: 2592975 - RNA, 19 nt, Homo sapiens
  misc_RNA (1)...(19): siRNA sense strand
agcagaaggucgaggcucu

SEQ ID NO: 2592976 - RNA, 19 nt, Homo sapiens
  misc_RNA (1)...(19): siRNA sense strand
agaucaugccagucuuaaa

SEQ ID NO: 2592977 - RNA, 19 nt, Homo sapiens
  misc_RNA (1)...(19): siRNA sense strand
gagaagacacgaauaaucu

SEQ ID NO: 2592978 - RNA, 19 nt, Homo sapiens
  misc_RNA (1)...(19): siRNA sense strand
cgaggaagcacugagcaaa

SEQ ID NO: 2592979 - RNA, 19 nt, Homo sapiens
  misc_RNA (1)...(19): siRNA sense strand
cuacagaucccucuaaaca

SEQ ID NO: 2592980 - RNA, 19 nt, Homo sapiens
  misc_RNA (1)...(19): siRNA sense strand
cagaugccucagacagaaa

SEQ ID NO: 2592981 - RNA, 19 nt, Homo sapiens
  misc_RNA (1)...(19): siRNA sense strand
aguaguugagaaaggauuu

SEQ ID NO: 2592982 - RNA, 19 nt, Homo sapiens
  misc_RNA (1)...(19): siRNA sense strand
ucaacaaagcaaaccucaa

SEQ ID NO: 2592983 - RNA, 19 nt, Homo sapiens
  misc_RNA (1)...(19): siRNA sense strand
uggaaaauucacacagcaa

SEQ ID NO: 2592984 - RNA, 19 nt, Homo sapiens
  misc_RNA (1)...(19): siRNA sense strand
aggcaagggaagaaggaau

SEQ ID NO: 2592985 - RNA, 19 nt, Homo sapiens
  misc_RNA (1)...(19): siRNA sense strand
aggaaugagaaguacgaua

SEQ ID NO: 2592986 - RNA, 19 nt, Homo sapiens
  misc_RNA (1)...(19): siRNA sense strand
ggaagaaagaggaggaggu

SEQ ID NO: 2592987 - RNA, 19 nt, Homo sapiens
  misc_RNA (1)...(19): siRNA sense strand
ggaccaaaggcaagggaag

SEQ ID NO: 2592988 - RNA, 19 nt, Homo sapiens
  misc_RNA (1)...(19): siRNA sense strand
gagaaguacgauaugguga

SEQ ID NO: 2592989 - RNA, 19 nt, Homo sapiens
  misc_RNA (1)...(19): siRNA sense strand
uggcagagaaggagcggga

SEQ ID NO: 2592990 - RNA, 19 nt, Homo sapiens
  misc_RNA (1)...(19): siRNA sense strand
acacagagcagcaguggga

SEQ ID NO: 2592991 - RNA, 19 nt, Homo sapiens
  misc_RNA (1)...(19): siRNA sense strand
acaccaugucccagagaga

SEQ ID NO: 2592992 - RNA, 19 nt, Homo sapiens
  misc_RNA (1)...(19): siRNA sense strand
aagcuggagaugaggaaga

SEQ ID NO: 2592993 - RNA, 19 nt, Homo sapiens
  misc_RNA (1)...(19): siRNA sense strand
gaacagugguggacagcuc

SEQ ID NO: 2592994 - RNA, 19 nt, Homo sapiens
  misc_RNA (1)...(19): siRNA sense strand
ugaggaagaaagaggagga

SEQ ID NO: 2592995 - RNA, 19 nt, Homo sapiens
  misc_RNA (1)...(19): siRNA sense strand
acagagcagcagugggaca

SEQ ID NO: 2592996 - RNA, 19 nt, Homo sapiens
  misc_RNA (1)...(19): siRNA sense strand
uggagaugaggaagaaaga

SEQ ID NO: 2592997 - RNA, 19 nt, Homo sapiens
  misc_RNA (1)...(19): siRNA sense strand
agaaggagcgggaggcacu

SEQ ID NO: 2592998 - RNA, 19 nt, Homo sapiens
  misc_RNA (1)...(19): siRNA sense strand
guuagaugggacacagaau

SEQ ID NO: 2592999 - RNA, 19 nt, Homo sapiens
  misc_RNA (1)...(19): siRNA sense strand
uagacuaucuggagaccca

SEQ ID NO: 2593000 - RNA, 19 nt, Homo sapiens
  misc_RNA (1)...(19): siRNA sense strand
agaacaagaugcugccacu

SEQ ID NO: 2593001 - RNA, 19 nt, Homo sapiens
  misc_RNA (1)...(19): siRNA sense strand
gagguagacuaucuggaga

SEQ ID NO: 2593002 - RNA, 19 nt, Homo sapiens
  misc_RNA (1)...(19): siRNA sense strand
agaaaggcgaacagauaaa

SEQ ID NO: 2593003 - RNA, 19 nt, Homo sapiens
  misc_RNA (1)...(19): siRNA sense strand
gaauauucccagauggaca

SEQ ID NO: 2593004 - RNA, 19 nt, Homo sapiens
  misc_RNA (1)...(19): siRNA sense strand
cugauaagaaggcggguuu

SEQ ID NO: 2593005 - RNA, 19 nt, Homo sapiens
  misc_RNA (1)...(19): siRNA sense strand
ucaaggaaguugugcgguu

SEQ ID NO: 2593006 - RNA, 19 nt, Homo sapiens
  misc_RNA (1)...(19): siRNA sense strand
uagauaagaaacaccgaaa

SEQ ID NO: 2593007 - RNA, 19 nt, Homo sapiens
  misc_RNA (1)...(19): siRNA sense strand
cuugaaaagcugauaagaa

SEQ ID NO: 2593008 - RNA, 19 nt, Homo sapiens
  misc_RNA (1)...(19): siRNA sense strand
aggaaguaaaugaguggau

SEQ ID NO: 2593009 - RNA, 19 nt, Homo sapiens
  misc_RNA (1)...(19): siRNA sense strand
guaaaugaguggauggcuc

SEQ ID NO: 2593010 - RNA, 19 nt, Homo sapiens
  misc_RNA (1)...(19): siRNA sense strand
uagaaaggagacagcagua

SEQ ID NO: 2593011 - RNA, 19 nt, Homo sapiens
  misc_RNA (1)...(19): siRNA sense strand
uguucaacugcaaaggaaa

SEQ ID NO: 2593012 - RNA, 19 nt, Homo sapiens
  misc_RNA (1)...(19): siRNA sense strand
agaacaggaacuaugguuu

SEQ ID NO: 2593013 - RNA, 19 nt, Homo sapiens
  misc_RNA (1)...(19): siRNA sense strand
ucguuauguacgugaucua

SEQ ID NO: 2593014 - RNA, 19 nt, Homo sapiens
  misc_RNA (1)...(19): siRNA sense strand
cguucuauuucucuagcua

SEQ ID NO: 2593015 - RNA, 19 nt, Homo sapiens
  misc_RNA (1)...(19): siRNA sense strand
ccauaauagggucguuaga

SEQ ID NO: 2593016 - RNA, 19 nt, Homo sapiens
  misc_RNA (1)...(19): siRNA sense strand
gauaacauuacaacagaca

SEQ ID NO: 2593017 - RNA, 19 nt, Homo sapiens
  misc_RNA (1)...(19): siRNA sense strand
aggcacagauagaacagga

SEQ ID NO: 2593018 - RNA, 19 nt, Homo sapiens
  misc_RNA (1)...(19): siRNA sense strand
agaaaggcgaacagauaaa

SEQ ID NO: 2593019 - RNA, 19 nt, Homo sapiens
  misc_RNA (1)...(19): siRNA sense strand
gaauauucccagauggaca

SEQ ID NO: 2593020 - RNA, 19 nt, Homo sapiens
  misc_RNA (1)...(19): siRNA sense strand
cugauaagaaggcggguuu

SEQ ID NO: 2593021 - RNA, 19 nt, Homo sapiens
  misc_RNA (1)...(19): siRNA sense strand
ucaaggaaguugugcgguu

SEQ ID NO: 2593022 - RNA, 19 nt, Homo sapiens
  misc_RNA (1)...(19): siRNA sense strand
uagauaagaaacaccgaaa

SEQ ID NO: 2593023 - RNA, 19 nt, Homo sapiens
  misc_RNA (1)...(19): siRNA sense strand
cuugaaaagcugauaagaa

SEQ ID NO: 2593024 - RNA, 19 nt, Homo sapiens
  misc_RNA (1)...(19): siRNA sense strand
aggaaguaaaugaguggau

SEQ ID NO: 2593025 - RNA, 19 nt, Homo sapiens
  misc_RNA (1)...(19): siRNA sense strand
guaaaugaguggauggcuc

SEQ ID NO: 2593026 - RNA, 19 nt, Homo sapiens
  misc_RNA (1)...(19): siRNA sense strand
uagaaaggagacagcagua

SEQ ID NO: 2593027 - RNA, 19 nt, Homo sapiens
  misc_RNA (1)...(19): siRNA sense strand
uguucaacugcaaaggaaa

SEQ ID NO: 2593028 - RNA, 19 nt, Homo sapiens
  misc_RNA (1)...(19): siRNA sense strand
agaacaggaacuaugguuu

SEQ ID NO: 2593029 - RNA, 19 nt, Homo sapiens
  misc_RNA (1)...(19): siRNA sense strand
ucguuauguacgugaucua

SEQ ID NO: 2593030 - RNA, 19 nt, Homo sapiens
  misc_RNA (1)...(19): siRNA sense strand
cguucuauuucucuagcua

SEQ ID NO: 2593031 - RNA, 19 nt, Homo sapiens
  misc_RNA (1)...(19): siRNA sense strand
ccauaauagggucguuaga

SEQ ID NO: 2593032 - RNA, 19 nt, Homo sapiens
  misc_RNA (1)...(19): siRNA sense strand
gauaacauuacaacagaca

SEQ ID NO: 2593033 - RNA, 19 nt, Homo sapiens
  misc_RNA (1)...(19): siRNA sense strand
aggcacagauagaacagga

SEQ ID NO: 2593034 - RNA, 19 nt, Homo sapiens
  misc_RNA (1)...(19): siRNA sense strand
agaaaggcgaacagauaaa

SEQ ID NO: 2593035 - RNA, 19 nt, Homo sapiens
  misc_RNA (1)...(19): siRNA sense strand
gaauauucccagauggaca

SEQ ID NO: 2593036 - RNA, 19 nt, Homo sapiens
  misc_RNA (1)...(19): siRNA sense strand
cugauaagaaggcggguuu

SEQ ID NO: 2593037 - RNA, 19 nt, Homo sapiens
  misc_RNA (1)...(19): siRNA sense strand
ucaaggaaguugugcgguu

SEQ ID NO: 2593038 - RNA, 19 nt, Homo sapiens
  misc_RNA (1)...(19): siRNA sense strand
uagauaagaaacaccgaaa

SEQ ID NO: 2593039 - RNA, 19 nt, Homo sapiens
  misc_RNA (1)...(19): siRNA sense strand
cuugaaaagcugauaagaa

SEQ ID NO: 2593040 - RNA, 19 nt, Homo sapiens
  misc_RNA (1)...(19): siRNA sense strand
aggaaguaaaugaguggau

SEQ ID NO: 2593041 - RNA, 19 nt, Homo sapiens
  misc_RNA (1)...(19): siRNA sense strand
guaaaugaguggauggcuc

SEQ ID NO: 2593042 - RNA, 19 nt, Homo sapiens
  misc_RNA (1)...(19): siRNA sense strand
uagaaaggagacagcagua

SEQ ID NO: 2593043 - RNA, 19 nt, Homo sapiens
  misc_RNA (1)...(19): siRNA sense strand
uguucaacugcaaaggaaa

SEQ ID NO: 2593044 - RNA, 19 nt, Homo sapiens
  misc_RNA (1)...(19): siRNA sense strand
agaacaggaacuaugguuu

SEQ ID NO: 2593045 - RNA, 19 nt, Homo sapiens
  misc_RNA (1)...(19): siRNA sense strand
ucguuauguacgugaucua

SEQ ID NO: 2593046 - RNA, 19 nt, Homo sapiens
  misc_RNA (1)...(19): siRNA sense strand
cguucuauuucucuagcua

SEQ ID NO: 2593047 - RNA, 19 nt, Homo sapiens
  misc_RNA (1)...(19): siRNA sense strand
ccauaauagggucguuaga

SEQ ID NO: 2593048 - RNA, 19 nt, Homo sapiens
  misc_RNA (1)...(19): siRNA sense strand
gauaacauuacaacagaca

SEQ ID NO: 2593049 - RNA, 19 nt, Homo sapiens
  misc_RNA (1)...(19): siRNA sense strand
aggcacagauagaacagga

SEQ ID NO: 2593050 - RNA, 19 nt, Homo sapiens
  misc_RNA (1)...(19): siRNA sense strand
agaaaggcgaacagauaaa

SEQ ID NO: 2593051 - RNA, 19 nt, Homo sapiens
  misc_RNA (1)...(19): siRNA sense strand
gaauauucccagauggaca

SEQ ID NO: 2593052 - RNA, 19 nt, Homo sapiens
  misc_RNA (1)...(19): siRNA sense strand
cugauaagaaggcggguuu

SEQ ID NO: 2593053 - RNA, 19 nt, Homo sapiens
  misc_RNA (1)...(19): siRNA sense strand
ucaaggaaguugugcgguu

SEQ ID NO: 2593054 - RNA, 19 nt, Homo sapiens
  misc_RNA (1)...(19): siRNA sense strand
uagauaagaaacaccgaaa

SEQ ID NO: 2593055 - RNA, 19 nt, Homo sapiens
  misc_RNA (1)...(19): siRNA sense strand
cuugaaaagcugauaagaa

SEQ ID NO: 2593056 - RNA, 19 nt, Homo sapiens
  misc_RNA (1)...(19): siRNA sense strand
aggaaguaaaugaguggau

SEQ ID NO: 2593057 - RNA, 19 nt, Homo sapiens
  misc_RNA (1)...(19): siRNA sense strand
guaaaugaguggauggcuc

SEQ ID NO: 2593058 - RNA, 19 nt, Homo sapiens
  misc_RNA (1)...(19): siRNA sense strand
uagaaaggagacagcagua

SEQ ID NO: 2593059 - RNA, 19 nt, Homo sapiens
  misc_RNA (1)...(19): siRNA sense strand
uguucaacugcaaaggaaa

SEQ ID NO: 2593060 - RNA, 19 nt, Homo sapiens
  misc_RNA (1)...(19): siRNA sense strand
agaacaggaacuaugguuu

SEQ ID NO: 2593061 - RNA, 19 nt, Homo sapiens
  misc_RNA (1)...(19): siRNA sense strand
ucguuauguacgugaucua

SEQ ID NO: 2593062 - RNA, 19 nt, Homo sapiens
  misc_RNA (1)...(19): siRNA sense strand
ccauaauagggucguuaga

SEQ ID NO: 2593063 - RNA, 19 nt, Homo sapiens
  misc_RNA (1)...(19): siRNA sense strand
gauaacauuacaacagaca

SEQ ID NO: 2593064 - RNA, 19 nt, Homo sapiens
  misc_RNA (1)...(19): siRNA sense strand
aggcacagauagaacagga

SEQ ID NO: 2593065 - RNA, 19 nt, Homo sapiens
  misc_RNA (1)...(19): siRNA sense strand
aaaucauacuggagagaaa

SEQ ID NO: 2593066 - RNA, 19 nt, Homo sapiens
  misc_RNA (1)...(19): siRNA sense strand
augcaaugaaugugggaaa

SEQ ID NO: 2593067 - RNA, 19 nt, Homo sapiens
  misc_RNA (1)...(19): siRNA sense strand
aaaucauacaggagagaaa

SEQ ID NO: 2593068 - RNA, 19 nt, Homo sapiens
  misc_RNA (1)...(19): siRNA sense strand
cuguagugaaugugggaaa

SEQ ID NO: 2593069 - RNA, 19 nt, Homo sapiens
  misc_RNA (1)...(19): siRNA sense strand
augcagugaaugugggaaa

SEQ ID NO: 2593070 - RNA, 19 nt, Homo sapiens
  misc_RNA (1)...(19): siRNA sense strand
augcagugaaugugggaaa

SEQ ID NO: 2593071 - RNA, 19 nt, Homo sapiens
  misc_RNA (1)...(19): siRNA sense strand
ccuuacaggugcagugaau

SEQ ID NO: 2593072 - RNA, 19 nt, Homo sapiens
  misc_RNA (1)...(19): siRNA sense strand
aacucauacuggagagaaa

SEQ ID NO: 2593073 - RNA, 19 nt, Homo sapiens
  misc_RNA (1)...(19): siRNA sense strand
aacucauacuggagagaaa

SEQ ID NO: 2593074 - RNA, 19 nt, Homo sapiens
  misc_RNA (1)...(19): siRNA sense strand
aacucauacuggagagaaa

SEQ ID NO: 2593075 - RNA, 19 nt, Homo sapiens
  misc_RNA (1)...(19): siRNA sense strand
aacucauacuggagagaaa

SEQ ID NO: 2593076 - RNA, 19 nt, Homo sapiens
  misc_RNA (1)...(19): siRNA sense strand
auuuaguggagaugggaaa

SEQ ID NO: 2593077 - RNA, 19 nt, Homo sapiens
  misc_RNA (1)...(19): siRNA sense strand
ccuuauggauguaaugaau

SEQ ID NO: 2593078 - RNA, 19 nt, Homo sapiens
  misc_RNA (1)...(19): siRNA sense strand
ggaacgaggagaagaacca

SEQ ID NO: 2593079 - RNA, 19 nt, Homo sapiens
  misc_RNA (1)...(19): siRNA sense strand
gcugaagaguguggaacaa

SEQ ID NO: 2593080 - RNA, 19 nt, Homo sapiens
  misc_RNA (1)...(19): siRNA sense strand
uccagaaaguccaggcuaa

SEQ ID NO: 2593081 - RNA, 19 nt, Homo sapiens
  misc_RNA (1)...(19): siRNA sense strand
gugcagugaauguggaaaa

SEQ ID NO: 2593082 - RNA, 19 nt, Homo sapiens
  misc_RNA (1)...(19): siRNA sense strand
guuggaacgaggagaagaa

SEQ ID NO: 2593083 - RNA, 19 nt, Homo sapiens
  misc_RNA (1)...(19): siRNA sense strand
gggaugugauguuggagau

SEQ ID NO: 2593084 - RNA, 19 nt, Homo sapiens
  misc_RNA (1)...(19): siRNA sense strand
augcaaugaauguggaaaa

SEQ ID NO: 2593085 - RNA, 19 nt, Homo sapiens
  misc_RNA (1)...(19): siRNA sense strand
augcaaugaauguggaaaa

SEQ ID NO: 2593086 - RNA, 19 nt, Homo sapiens
  misc_RNA (1)...(19): siRNA sense strand
ggacaauggaagaugaaag

SEQ ID NO: 2593087 - RNA, 19 nt, Homo sapiens
  misc_RNA (1)...(19): siRNA sense strand
uguuggagaucuacagcaa

SEQ ID NO: 2593088 - RNA, 19 nt, Homo sapiens
  misc_RNA (1)...(19): siRNA sense strand
caaguuggaacgaggagaa

SEQ ID NO: 2593089 - RNA, 19 nt, Homo sapiens
  misc_RNA (1)...(19): siRNA sense strand
gggaaaaucaugauacauu

SEQ ID NO: 2593090 - RNA, 19 nt, Homo sapiens
  misc_RNA (1)...(19): siRNA sense strand
ggauguaaugaauguggua

SEQ ID NO: 2593091 - RNA, 19 nt, Homo sapiens
  misc_RNA (1)...(19): siRNA sense strand
aaucaaaggaugcugaaga

SEQ ID NO: 2593092 - RNA, 19 nt, Homo sapiens
  misc_RNA (1)...(19): siRNA sense strand
ccagaaaguccaggcuaaa

SEQ ID NO: 2593093 - RNA, 19 nt, Homo sapiens
  misc_RNA (1)...(19): siRNA sense strand
augugauguuggagaucua

SEQ ID NO: 2593094 - RNA, 19 nt, Homo sapiens
  misc_RNA (1)...(19): siRNA sense strand
cugcaggaucacuuggaaa

SEQ ID NO: 2593095 - RNA, 19 nt, Homo sapiens
  misc_RNA (1)...(19): siRNA sense strand
aacucauacaggagagaaa

SEQ ID NO: 2593096 - RNA, 19 nt, Homo sapiens
  misc_RNA (1)...(19): siRNA sense strand
auacaguagagaagucaua

SEQ ID NO: 2593097 - RNA, 19 nt, Homo sapiens
  misc_RNA (1)...(19): siRNA sense strand
aacucauacaggagagaaa

SEQ ID NO: 2593098 - RNA, 19 nt, Homo sapiens
  misc_RNA (1)...(19): siRNA sense strand
guuuagucaaccagaacaa

SEQ ID NO: 2593099 - RNA, 19 nt, Homo sapiens
  misc_RNA (1)...(19): siRNA sense strand
ucauuguacaucagcgaaa

SEQ ID NO: 2593100 - RNA, 19 nt, Homo sapiens
  misc_RNA (1)...(19): siRNA sense strand
ccgucuaauuguucaucaa

SEQ ID NO: 2593101 - RNA, 19 nt, Homo sapiens
  misc_RNA (1)...(19): siRNA sense strand
ccacguaugcagugaaugu

SEQ ID NO: 2593102 - RNA, 19 nt, Homo sapiens
  misc_RNA (1)...(19): siRNA sense strand
augcagugaauguggaaaa

SEQ ID NO: 2593103 - RNA, 19 nt, Homo sapiens
  misc_RNA (1)...(19): siRNA sense strand
augcagugaauguggaaaa

SEQ ID NO: 2593104 - RNA, 19 nt, Homo sapiens
  misc_RNA (1)...(19): siRNA sense strand
aggagaagaaccauggaca

SEQ ID NO: 2593105 - RNA, 19 nt, Homo sapiens
  misc_RNA (1)...(19): siRNA sense strand
ugaauguggaagaggcuuu

SEQ ID NO: 2593106 - RNA, 19 nt, Homo sapiens
  misc_RNA (1)...(19): siRNA sense strand
cagaacaaaagcugugaaa

SEQ ID NO: 2593107 - RNA, 19 nt, Homo sapiens
  misc_RNA (1)...(19): siRNA sense strand
auguagugaauguggaaga

SEQ ID NO: 2593108 - RNA, 19 nt, Homo sapiens
  misc_RNA (1)...(19): siRNA sense strand
auguagugaauguggaaaa

SEQ ID NO: 2593109 - RNA, 19 nt, Homo sapiens
  misc_RNA (1)...(19): siRNA sense strand
auguagugaauguggaaaa

SEQ ID NO: 2593110 - RNA, 19 nt, Homo sapiens
  misc_RNA (1)...(19): siRNA sense strand
aggagagaaaccauauaua

SEQ ID NO: 2593111 - RNA, 19 nt, Homo sapiens
  misc_RNA (1)...(19): siRNA sense strand
caauggaagaugaaaggca

SEQ ID NO: 2593112 - RNA, 19 nt, Homo sapiens
  misc_RNA (1)...(19): siRNA sense strand
caggcuaaaugaacaucaa

SEQ ID NO: 2593113 - RNA, 19 nt, Homo sapiens
  misc_RNA (1)...(19): siRNA sense strand
guggaaaagucuucacuau

SEQ ID NO: 2593114 - RNA, 19 nt, Homo sapiens
  misc_RNA (1)...(19): siRNA sense strand
ccacaaaacacuaugucau

SEQ ID NO: 2593115 - RNA, 19 nt, Homo sapiens
  misc_RNA (1)...(19): siRNA sense strand
acaaaagccaauagcacua

SEQ ID NO: 2593116 - RNA, 19 nt, Homo sapiens
  misc_RNA (1)...(19): siRNA sense strand
gcguaaucucauuguacau

SEQ ID NO: 2593117 - RNA, 19 nt, Homo sapiens
  misc_RNA (1)...(19): siRNA sense strand
cagcgaacucauaauggaa

SEQ ID NO: 2593118 - RNA, 19 nt, Homo sapiens
  misc_RNA (1)...(19): siRNA sense strand
ucacugaucaugagagagu

SEQ ID NO: 2593119 - RNA, 19 nt, Homo sapiens
  misc_RNA (1)...(19): siRNA sense strand
ucaucauacaucaacgaaa

SEQ ID NO: 2593120 - RNA, 19 nt, Homo sapiens
  misc_RNA (1)...(19): siRNA sense strand
gugaaugugggaaagguuu

SEQ ID NO: 2593121 - RNA, 19 nt, Homo sapiens
  misc_RNA (1)...(19): siRNA sense strand
aaaucauacuggagagaaa

SEQ ID NO: 2593122 - RNA, 19 nt, Homo sapiens
  misc_RNA (1)...(19): siRNA sense strand
augcaaugaaugugggaaa

SEQ ID NO: 2593123 - RNA, 19 nt, Homo sapiens
  misc_RNA (1)...(19): siRNA sense strand
aaaucauacaggagagaaa

SEQ ID NO: 2593124 - RNA, 19 nt, Homo sapiens
  misc_RNA (1)...(19): siRNA sense strand
cuguagugaaugugggaaa

SEQ ID NO: 2593125 - RNA, 19 nt, Homo sapiens
  misc_RNA (1)...(19): siRNA sense strand
augcagugaaugugggaaa

SEQ ID NO: 2593126 - RNA, 19 nt, Homo sapiens
  misc_RNA (1)...(19): siRNA sense strand
augcagugaaugugggaaa

SEQ ID NO: 2593127 - RNA, 19 nt, Homo sapiens
  misc_RNA (1)...(19): siRNA sense strand
ccuuacaggugcagugaau

SEQ ID NO: 2593128 - RNA, 19 nt, Homo sapiens
  misc_RNA (1)...(19): siRNA sense strand
aacucauacuggagagaaa

SEQ ID NO: 2593129 - RNA, 19 nt, Homo sapiens
  misc_RNA (1)...(19): siRNA sense strand
aacucauacuggagagaaa

SEQ ID NO: 2593130 - RNA, 19 nt, Homo sapiens
  misc_RNA (1)...(19): siRNA sense strand
aacucauacuggagagaaa

SEQ ID NO: 2593131 - RNA, 19 nt, Homo sapiens
  misc_RNA (1)...(19): siRNA sense strand
aacucauacuggagagaaa

SEQ ID NO: 2593132 - RNA, 19 nt, Homo sapiens
  misc_RNA (1)...(19): siRNA sense strand
auuuaguggagaugggaaa

SEQ ID NO: 2593133 - RNA, 19 nt, Homo sapiens
  misc_RNA (1)...(19): siRNA sense strand
ccuuauggauguaaugaau

SEQ ID NO: 2593134 - RNA, 19 nt, Homo sapiens
  misc_RNA (1)...(19): siRNA sense strand
ggaacgaggagaagaacca

SEQ ID NO: 2593135 - RNA, 19 nt, Homo sapiens
  misc_RNA (1)...(19): siRNA sense strand
gcugaagaguguggaacaa

SEQ ID NO: 2593136 - RNA, 19 nt, Homo sapiens
  misc_RNA (1)...(19): siRNA sense strand
uccagaaaguccaggcuaa

SEQ ID NO: 2593137 - RNA, 19 nt, Homo sapiens
  misc_RNA (1)...(19): siRNA sense strand
gugcagugaauguggaaaa

SEQ ID NO: 2593138 - RNA, 19 nt, Homo sapiens
  misc_RNA (1)...(19): siRNA sense strand
guuggaacgaggagaagaa

SEQ ID NO: 2593139 - RNA, 19 nt, Homo sapiens
  misc_RNA (1)...(19): siRNA sense strand
gggaugugauguuggagau

SEQ ID NO: 2593140 - RNA, 19 nt, Homo sapiens
  misc_RNA (1)...(19): siRNA sense strand
augcaaugaauguggaaaa

SEQ ID NO: 2593141 - RNA, 19 nt, Homo sapiens
  misc_RNA (1)...(19): siRNA sense strand
augcaaugaauguggaaaa

SEQ ID NO: 2593142 - RNA, 19 nt, Homo sapiens
  misc_RNA (1)...(19): siRNA sense strand
ggacaauggaagaugaaag

SEQ ID NO: 2593143 - RNA, 19 nt, Homo sapiens
  misc_RNA (1)...(19): siRNA sense strand
uguuggagaucuacagcaa

SEQ ID NO: 2593144 - RNA, 19 nt, Homo sapiens
  misc_RNA (1)...(19): siRNA sense strand
caaguuggaacgaggagaa

SEQ ID NO: 2593145 - RNA, 19 nt, Homo sapiens
  misc_RNA (1)...(19): siRNA sense strand
gggaaaaucaugauacauu

SEQ ID NO: 2593146 - RNA, 19 nt, Homo sapiens
  misc_RNA (1)...(19): siRNA sense strand
ggauguaaugaauguggua

SEQ ID NO: 2593147 - RNA, 19 nt, Homo sapiens
  misc_RNA (1)...(19): siRNA sense strand
aaucaaaggaugcugaaga

SEQ ID NO: 2593148 - RNA, 19 nt, Homo sapiens
  misc_RNA (1)...(19): siRNA sense strand
ccagaaaguccaggcuaaa

SEQ ID NO: 2593149 - RNA, 19 nt, Homo sapiens
  misc_RNA (1)...(19): siRNA sense strand
augugauguuggagaucua

SEQ ID NO: 2593150 - RNA, 19 nt, Homo sapiens
  misc_RNA (1)...(19): siRNA sense strand
cugcaggaucacuuggaaa

SEQ ID NO: 2593151 - RNA, 19 nt, Homo sapiens
  misc_RNA (1)...(19): siRNA sense strand
aacucauacaggagagaaa

SEQ ID NO: 2593152 - RNA, 19 nt, Homo sapiens
  misc_RNA (1)...(19): siRNA sense strand
auacaguagagaagucaua

SEQ ID NO: 2593153 - RNA, 19 nt, Homo sapiens
  misc_RNA (1)...(19): siRNA sense strand
aacucauacaggagagaaa

SEQ ID NO: 2593154 - RNA, 19 nt, Homo sapiens
  misc_RNA (1)...(19): siRNA sense strand
guuuagucaaccagaacaa

SEQ ID NO: 2593155 - RNA, 19 nt, Homo sapiens
  misc_RNA (1)...(19): siRNA sense strand
ucauuguacaucagcgaaa

SEQ ID NO: 2593156 - RNA, 19 nt, Homo sapiens
  misc_RNA (1)...(19): siRNA sense strand
ccgucuaauuguucaucaa

SEQ ID NO: 2593157 - RNA, 19 nt, Homo sapiens
  misc_RNA (1)...(19): siRNA sense strand
ccacguaugcagugaaugu

SEQ ID NO: 2593158 - RNA, 19 nt, Homo sapiens
  misc_RNA (1)...(19): siRNA sense strand
augcagugaauguggaaaa

SEQ ID NO: 2593159 - RNA, 19 nt, Homo sapiens
  misc_RNA (1)...(19): siRNA sense strand
augcagugaauguggaaaa

SEQ ID NO: 2593160 - RNA, 19 nt, Homo sapiens
  misc_RNA (1)...(19): siRNA sense strand
aggagaagaaccauggaca

SEQ ID NO: 2593161 - RNA, 19 nt, Homo sapiens
  misc_RNA (1)...(19): siRNA sense strand
ugaauguggaagaggcuuu

SEQ ID NO: 2593162 - RNA, 19 nt, Homo sapiens
  misc_RNA (1)...(19): siRNA sense strand
cagaacaaaagcugugaaa

SEQ ID NO: 2593163 - RNA, 19 nt, Homo sapiens
  misc_RNA (1)...(19): siRNA sense strand
auguagugaauguggaaga

SEQ ID NO: 2593164 - RNA, 19 nt, Homo sapiens
  misc_RNA (1)...(19): siRNA sense strand
auguagugaauguggaaaa

SEQ ID NO: 2593165 - RNA, 19 nt, Homo sapiens
  misc_RNA (1)...(19): siRNA sense strand
auguagugaauguggaaaa

SEQ ID NO: 2593166 - RNA, 19 nt, Homo sapiens
  misc_RNA (1)...(19): siRNA sense strand
aggagagaaaccauauaua

SEQ ID NO: 2593167 - RNA, 19 nt, Homo sapiens
  misc_RNA (1)...(19): siRNA sense strand
caauggaagaugaaaggca

SEQ ID NO: 2593168 - RNA, 19 nt, Homo sapiens
  misc_RNA (1)...(19): siRNA sense strand
caggcuaaaugaacaucaa

SEQ ID NO: 2593169 - RNA, 19 nt, Homo sapiens
  misc_RNA (1)...(19): siRNA sense strand
guggaaaagucuucacuau

SEQ ID NO: 2593170 - RNA, 19 nt, Homo sapiens
  misc_RNA (1)...(19): siRNA sense strand
ccacaaaacacuaugucau

SEQ ID NO: 2593171 - RNA, 19 nt, Homo sapiens
  misc_RNA (1)...(19): siRNA sense strand
acaaaagccaauagcacua

SEQ ID NO: 2593172 - RNA, 19 nt, Homo sapiens
  misc_RNA (1)...(19): siRNA sense strand
gcguaaucucauuguacau

SEQ ID NO: 2593173 - RNA, 19 nt, Homo sapiens
  misc_RNA (1)...(19): siRNA sense strand
cagcgaacucauaauggaa

SEQ ID NO: 2593174 - RNA, 19 nt, Homo sapiens
  misc_RNA (1)...(19): siRNA sense strand
ucacugaucaugagagagu

SEQ ID NO: 2593175 - RNA, 19 nt, Homo sapiens
  misc_RNA (1)...(19): siRNA sense strand
ucaucauacaucaacgaaa

SEQ ID NO: 2593176 - RNA, 19 nt, Homo sapiens
  misc_RNA (1)...(19): siRNA sense strand
gugaaugugggaaagguuu

SEQ ID NO: 2593177 - RNA, 19 nt, Homo sapiens
  misc_RNA (1)...(19): siRNA sense strand
gguccacacaggagagaaa

SEQ ID NO: 2593178 - RNA, 19 nt, Homo sapiens
  misc_RNA (1)...(19): siRNA sense strand
acauagaagagaagccaua

SEQ ID NO: 2593179 - RNA, 19 nt, Homo sapiens
  misc_RNA (1)...(19): siRNA sense strand
cccuauaauuguaaggaau

SEQ ID NO: 2593180 - RNA, 19 nt, Homo sapiens
  misc_RNA (1)...(19): siRNA sense strand
cccuauaauuguaaggaau

SEQ ID NO: 2593181 - RNA, 19 nt, Homo sapiens
  misc_RNA (1)...(19): siRNA sense strand
acaaauugcaagugaccua

SEQ ID NO: 2593182 - RNA, 19 nt, Homo sapiens
  misc_RNA (1)...(19): siRNA sense strand
aagccaaagagaagggaau

SEQ ID NO: 2593183 - RNA, 19 nt, Homo sapiens
  misc_RNA (1)...(19): siRNA sense strand
ucccugaaguagaaggaaa

SEQ ID NO: 2593184 - RNA, 19 nt, Homo sapiens
  misc_RNA (1)...(19): siRNA sense strand
uggaagaugaagacaacaa

SEQ ID NO: 2593185 - RNA, 19 nt, Homo sapiens
  misc_RNA (1)...(19): siRNA sense strand
gaucaagacuuaauaggca

SEQ ID NO: 2593186 - RNA, 19 nt, Homo sapiens
  misc_RNA (1)...(19): siRNA sense strand
gagugugggaagagaucua

SEQ ID NO: 2593187 - RNA, 19 nt, Homo sapiens
  misc_RNA (1)...(19): siRNA sense strand
ggagaaaagccauugaaau

SEQ ID NO: 2593188 - RNA, 19 nt, Homo sapiens
  misc_RNA (1)...(19): siRNA sense strand
ccuuauaauugugaggaau

SEQ ID NO: 2593189 - RNA, 19 nt, Homo sapiens
  misc_RNA (1)...(19): siRNA sense strand
uugugaggaaugugggaaa

SEQ ID NO: 2593190 - RNA, 19 nt, Homo sapiens
  misc_RNA (1)...(19): siRNA sense strand
agaggaagcuguaccgaga

SEQ ID NO: 2593191 - RNA, 19 nt, Homo sapiens
  misc_RNA (1)...(19): siRNA sense strand
augaagacaacaagccaaa

SEQ ID NO: 2593192 - RNA, 19 nt, Homo sapiens
  misc_RNA (1)...(19): siRNA sense strand
ggagaaaagcuauacaaau

SEQ ID NO: 2593193 - RNA, 19 nt, Homo sapiens
  misc_RNA (1)...(19): siRNA sense strand
aguaagucuaugugggaga

SEQ ID NO: 2593194 - RNA, 19 nt, Homo sapiens
  misc_RNA (1)...(19): siRNA sense strand
aagaaugugggaagggauu

SEQ ID NO: 2593195 - RNA, 19 nt, Homo sapiens
  misc_RNA (1)...(19): siRNA sense strand
acaacaagccaaagagaag

SEQ ID NO: 2593196 - RNA, 19 nt, Homo sapiens
  misc_RNA (1)...(19): siRNA sense strand
cuauaagucacgugcaaca

SEQ ID NO: 2593197 - RNA, 19 nt, Homo sapiens
  misc_RNA (1)...(19): siRNA sense strand
ccguuguaaugaauguaaa

SEQ ID NO: 2593198 - RNA, 19 nt, Homo sapiens
  misc_RNA (1)...(19): siRNA sense strand
acaaauucccugaaguaga

SEQ ID NO: 2593199 - RNA, 19 nt, Homo sapiens
  misc_RNA (1)...(19): siRNA sense strand
auucaaagaggcagugaca

SEQ ID NO: 2593200 - RNA, 19 nt, Homo sapiens
  misc_RNA (1)...(19): siRNA sense strand
ccauaguagaucagcacuu

SEQ ID NO: 2593201 - RNA, 19 nt, Homo sapiens
  misc_RNA (1)...(19): siRNA sense strand
gaagaaugugggaagggau

SEQ ID NO: 2593202 - RNA, 19 nt, Homo sapiens
  misc_RNA (1)...(19): siRNA sense strand
ccauauaacugugaggagu

SEQ ID NO: 2593203 - RNA, 19 nt, Homo sapiens
  misc_RNA (1)...(19): siRNA sense strand
gaugaagacaacaagccaa

SEQ ID NO: 2593204 - RNA, 19 nt, Homo sapiens
  misc_RNA (1)...(19): siRNA sense strand
accuuauaauugugaggaa

SEQ ID NO: 2593205 - RNA, 19 nt, Homo sapiens
  misc_RNA (1)...(19): siRNA sense strand
gguccacacgggugagaga

SEQ ID NO: 2593206 - RNA, 19 nt, Homo sapiens
  misc_RNA (1)...(19): siRNA sense strand
ucauacauguggugagugu

SEQ ID NO: 2593207 - RNA, 19 nt, Homo sapiens
  misc_RNA (1)...(19): siRNA sense strand
uuguaaagaaugugggaag

SEQ ID NO: 2593208 - RNA, 19 nt, Homo sapiens
  misc_RNA (1)...(19): siRNA sense strand
ccagauugaggcaagacua

SEQ ID NO: 2593209 - RNA, 19 nt, Homo sapiens
  misc_RNA (1)...(19): siRNA sense strand
gguaaggacuauaaaagga

SEQ ID NO: 2593210 - RNA, 19 nt, Homo sapiens
  misc_RNA (1)...(19): siRNA sense strand
aggaauguggcaagagcuu

SEQ ID NO: 2593211 - RNA, 19 nt, Homo sapiens
  misc_RNA (1)...(19): siRNA sense strand
acaaaugugagcaguguga

SEQ ID NO: 2593212 - RNA, 19 nt, Homo sapiens
  misc_RNA (1)...(19): siRNA sense strand
ggagacuguuccagaagca

SEQ ID NO: 2593213 - RNA, 19 nt, Homo sapiens
  misc_RNA (1)...(19): siRNA sense strand
auugcacacaggagagaaa

SEQ ID NO: 2593214 - RNA, 19 nt, Homo sapiens
  misc_RNA (1)...(19): siRNA sense strand
aaaccauucagaugugaua

SEQ ID NO: 2593215 - RNA, 19 nt, Homo sapiens
  misc_RNA (1)...(19): siRNA sense strand
aggaauguggaaagagcuu

SEQ ID NO: 2593216 - RNA, 19 nt, Homo sapiens
  misc_RNA (1)...(19): siRNA sense strand
cccugaaguagaaggaaaa

SEQ ID NO: 2593217 - RNA, 19 nt, Homo sapiens
  misc_RNA (1)...(19): siRNA sense strand
ccacauucaaagaggcagu

SEQ ID NO: 2593218 - RNA, 19 nt, Homo sapiens
  misc_RNA (1)...(19): siRNA sense strand
cagauugaggcaagacuau

SEQ ID NO: 2593219 - RNA, 19 nt, Homo sapiens
  misc_RNA (1)...(19): siRNA sense strand
agagaguccauaugggaga

SEQ ID NO: 2593220 - RNA, 19 nt, Homo sapiens
  misc_RNA (1)...(19): siRNA sense strand
agaagagaagccauacaaa

SEQ ID NO: 2593221 - RNA, 19 nt, Homo sapiens
  misc_RNA (1)...(19): siRNA sense strand
aucuauaagucacgugcaa

SEQ ID NO: 2593222 - RNA, 19 nt, Homo sapiens
  misc_RNA (1)...(19): siRNA sense strand
gccauacaaaugugagcaa

SEQ ID NO: 2593223 - RNA, 19 nt, Homo sapiens
  misc_RNA (1)...(19): siRNA sense strand
ugugaagaguguggaaaga

SEQ ID NO: 2593224 - RNA, 19 nt, Homo sapiens
  misc_RNA (1)...(19): siRNA sense strand
aaaugugagcagugugaga

SEQ ID NO: 2593225 - RNA, 19 nt, Homo sapiens
  misc_RNA (1)...(19): siRNA sense strand
agacaacaagccaaagaga

SEQ ID NO: 2593226 - RNA, 19 nt, Homo sapiens
  misc_RNA (1)...(19): siRNA sense strand
ccuucauauucaucagaga

SEQ ID NO: 2593227 - RNA, 19 nt, Homo sapiens
  misc_RNA (1)...(19): siRNA sense strand
cuucagaaauugaggacga

SEQ ID NO: 2593228 - RNA, 19 nt, Homo sapiens
  misc_RNA (1)...(19): siRNA sense strand
cagaaauggcugugcaaga

SEQ ID NO: 2593229 - RNA, 19 nt, Homo sapiens
  misc_RNA (1)...(19): siRNA sense strand
ccaaagugauucagcaaaa

SEQ ID NO: 2593230 - RNA, 19 nt, Homo sapiens
  misc_RNA (1)...(19): siRNA sense strand
ugucagauucagaggcaaa

SEQ ID NO: 2593231 - RNA, 19 nt, Homo sapiens
  misc_RNA (1)...(19): siRNA sense strand
cugcaaugguccuggucaa

SEQ ID NO: 2593232 - RNA, 19 nt, Homo sapiens
  misc_RNA (1)...(19): siRNA sense strand
cguaaauuaagcuggauua

SEQ ID NO: 2593233 - RNA, 19 nt, Homo sapiens
  misc_RNA (1)...(19): siRNA sense strand
uuguaaagcaagaguguau

SEQ ID NO: 2593234 - RNA, 19 nt, Homo sapiens
  misc_RNA (1)...(19): siRNA sense strand
uggaaauacugcagagacu

SEQ ID NO: 2593235 - RNA, 19 nt, Homo sapiens
  misc_RNA (1)...(19): siRNA sense strand
ggaacugggaagaagcuaa

SEQ ID NO: 2593236 - RNA, 19 nt, Homo sapiens
  misc_RNA (1)...(19): siRNA sense strand
ccaaauuagaguaugaaga

SEQ ID NO: 2593237 - RNA, 19 nt, Homo sapiens
  misc_RNA (1)...(19): siRNA sense strand
ccgcaauggccaaugggaa

SEQ ID NO: 2593238 - RNA, 19 nt, Homo sapiens
  misc_RNA (1)...(19): siRNA sense strand
gggaaguaaagcagaagau

SEQ ID NO: 2593239 - RNA, 19 nt, Homo sapiens
  misc_RNA (1)...(19): siRNA sense strand
aaauugaggacgaggauca

SEQ ID NO: 2593240 - RNA, 19 nt, Homo sapiens
  misc_RNA (1)...(19): siRNA sense strand
ggauuggaacagacugaaa

SEQ ID NO: 2593241 - RNA, 19 nt, Homo sapiens
  misc_RNA (1)...(19): siRNA sense strand
gauuucacucuuaggaaua

SEQ ID NO: 2593242 - RNA, 19 nt, Homo sapiens
  misc_RNA (1)...(19): siRNA sense strand
ggccaaagugauucagcaa

SEQ ID NO: 2593243 - RNA, 19 nt, Homo sapiens
  misc_RNA (1)...(19): siRNA sense strand
cugagaaaucguaguguga

SEQ ID NO: 2593244 - RNA, 19 nt, Homo sapiens
  misc_RNA (1)...(19): siRNA sense strand
caggaugacaguugcuuaa

SEQ ID NO: 2593245 - RNA, 19 nt, Homo sapiens
  misc_RNA (1)...(19): siRNA sense strand
caagaauaagccuggaauu

SEQ ID NO: 2593246 - RNA, 19 nt, Homo sapiens
  misc_RNA (1)...(19): siRNA sense strand
gcacaugcugagugacauu

SEQ ID NO: 2593247 - RNA, 19 nt, Homo sapiens
  misc_RNA (1)...(19): siRNA sense strand
acucaauggaagaugaaga

SEQ ID NO: 2593248 - RNA, 19 nt, Homo sapiens
  misc_RNA (1)...(19): siRNA sense strand
aucaagaugagcugagaaa

SEQ ID NO: 2593249 - RNA, 19 nt, Homo sapiens
  misc_RNA (1)...(19): siRNA sense strand
uggauuaagaugaccaaau

SEQ ID NO: 2593250 - RNA, 19 nt, Homo sapiens
  misc_RNA (1)...(19): siRNA sense strand
ugauugaagaauugacgaa

SEQ ID NO: 2593251 - RNA, 19 nt, Homo sapiens
  misc_RNA (1)...(19): siRNA sense strand
ggcaugucauugugaagaa

SEQ ID NO: 2593252 - RNA, 19 nt, Homo sapiens
  misc_RNA (1)...(19): siRNA sense strand
ggagaagggaauuguaacu

SEQ ID NO: 2593253 - RNA, 19 nt, Homo sapiens
  misc_RNA (1)...(19): siRNA sense strand
caacguaaauuaagcugga

SEQ ID NO: 2593254 - RNA, 19 nt, Homo sapiens
  misc_RNA (1)...(19): siRNA sense strand
agauaaugcgaucauguua

SEQ ID NO: 2593255 - RNA, 19 nt, Homo sapiens
  misc_RNA (1)...(19): siRNA sense strand
cuuccaagacagagaugau

SEQ ID NO: 2593256 - RNA, 19 nt, Homo sapiens
  misc_RNA (1)...(19): siRNA sense strand
ccacaguuguuaagagccu

SEQ ID NO: 2593257 - RNA, 19 nt, Homo sapiens
  misc_RNA (1)...(19): siRNA sense strand
ccaaaaggcuacccgggaa

SEQ ID NO: 2593258 - RNA, 19 nt, Homo sapiens
  misc_RNA (1)...(19): siRNA sense strand
guggauuuauacaaggauu

SEQ ID NO: 2593259 - RNA, 19 nt, Homo sapiens
  misc_RNA (1)...(19): siRNA sense strand
cuugaugaaaugugugcua

SEQ ID NO: 2593260 - RNA, 19 nt, Homo sapiens
  misc_RNA (1)...(19): siRNA sense strand
agaaaauacguaaaggcua

SEQ ID NO: 2593261 - RNA, 19 nt, Homo sapiens
  misc_RNA (1)...(19): siRNA sense strand
agauuucacucuuaggaau

SEQ ID NO: 2593262 - RNA, 19 nt, Homo sapiens
  misc_RNA (1)...(19): siRNA sense strand
caguguuaccuuagaagau

SEQ ID NO: 2593263 - RNA, 19 nt, Homo sapiens
  misc_RNA (1)...(19): siRNA sense strand
ucagagaacuugaaagccu

SEQ ID NO: 2593264 - RNA, 19 nt, Homo sapiens
  misc_RNA (1)...(19): siRNA sense strand
gcuucugcauggaguaaca

SEQ ID NO: 2593265 - RNA, 19 nt, Homo sapiens
  misc_RNA (1)...(19): siRNA sense strand
acgcacaugcugagugaca

SEQ ID NO: 2593266 - RNA, 19 nt, Homo sapiens
  misc_RNA (1)...(19): siRNA sense strand
acuuaacaccugugauuga

SEQ ID NO: 2593267 - RNA, 19 nt, Homo sapiens
  misc_RNA (1)...(19): siRNA sense strand
ccuuucugcuccugaacua

SEQ ID NO: 2593268 - RNA, 19 nt, Homo sapiens
  misc_RNA (1)...(19): siRNA sense strand
ccgacuaucaagugcauca

SEQ ID NO: 2593269 - RNA, 19 nt, Homo sapiens
  misc_RNA (1)...(19): siRNA sense strand
ccgaccuggugguguggaa

SEQ ID NO: 2593270 - RNA, 19 nt, Homo sapiens
  misc_RNA (1)...(19): siRNA sense strand
cgacucaauggaagaugaa

SEQ ID NO: 2593271 - RNA, 19 nt, Homo sapiens
  misc_RNA (1)...(19): siRNA sense strand
augagcaggagaagggaau

SEQ ID NO: 2593272 - RNA, 19 nt, Homo sapiens
  misc_RNA (1)...(19): siRNA sense strand
acguaaauuaagcuggauu

SEQ ID NO: 2593273 - RNA, 19 nt, Homo sapiens
  misc_RNA (1)...(19): siRNA sense strand
ugucucgguuuguggaaau

SEQ ID NO: 2593274 - RNA, 19 nt, Homo sapiens
  misc_RNA (1)...(19): siRNA sense strand
augaggaagccgucagaga

SEQ ID NO: 2593275 - RNA, 19 nt, Homo sapiens
  misc_RNA (1)...(19): siRNA sense strand
augucauugugaagaagua

SEQ ID NO: 2593276 - RNA, 19 nt, Homo sapiens
  misc_RNA (1)...(19): siRNA sense strand
gcuacuggucagaaguuau

SEQ ID NO: 2593277 - RNA, 19 nt, Homo sapiens
  misc_RNA (1)...(19): siRNA sense strand
ugacaguugcuuaaacaau

SEQ ID NO: 2593278 - RNA, 19 nt, Homo sapiens
  misc_RNA (1)...(19): siRNA sense strand
cagaaauugaggacgagga

SEQ ID NO: 2593279 - RNA, 19 nt, Homo sapiens
  misc_RNA (1)...(19): siRNA sense strand
cuguaaagaccaacaaaga

SEQ ID NO: 2593280 - RNA, 19 nt, Homo sapiens
  misc_RNA (1)...(19): siRNA sense strand
gagaaaugugggaaggcuu

SEQ ID NO: 2593281 - RNA, 19 nt, Homo sapiens
  misc_RNA (1)...(19): siRNA sense strand
gauucauaugggacagaaa

SEQ ID NO: 2593282 - RNA, 19 nt, Homo sapiens
  misc_RNA (1)...(19): siRNA sense strand
agaggaagcuguaccgaga

SEQ ID NO: 2593283 - RNA, 19 nt, Homo sapiens
  misc_RNA (1)...(19): siRNA sense strand
gguccacaugggagugaaa

SEQ ID NO: 2593284 - RNA, 19 nt, Homo sapiens
  misc_RNA (1)...(19): siRNA sense strand
ggucaagucuuaauaggca

SEQ ID NO: 2593285 - RNA, 19 nt, Homo sapiens
  misc_RNA (1)...(19): siRNA sense strand
ccagauuaaagcaagacua

SEQ ID NO: 2593286 - RNA, 19 nt, Homo sapiens
  misc_RNA (1)...(19): siRNA sense strand
acaguucacacaagagaaa

SEQ ID NO: 2593287 - RNA, 19 nt, Homo sapiens
  misc_RNA (1)...(19): siRNA sense strand
aaauuacacaugagagaga

SEQ ID NO: 2593288 - RNA, 19 nt, Homo sapiens
  misc_RNA (1)...(19): siRNA sense strand
cgggaagagcuuuagacau

SEQ ID NO: 2593289 - RNA, 19 nt, Homo sapiens
  misc_RNA (1)...(19): siRNA sense strand
auuacacaugagagagaaa

SEQ ID NO: 2593290 - RNA, 19 nt, Homo sapiens
  misc_RNA (1)...(19): siRNA sense strand
ucucaagauaccaccauaa

SEQ ID NO: 2593291 - RNA, 19 nt, Homo sapiens
  misc_RNA (1)...(19): siRNA sense strand
uuguaaagaaugugggaag

SEQ ID NO: 2593292 - RNA, 19 nt, Homo sapiens
  misc_RNA (1)...(19): siRNA sense strand
gggaaggcuuucaugcaca

SEQ ID NO: 2593293 - RNA, 19 nt, Homo sapiens
  misc_RNA (1)...(19): siRNA sense strand
augugagcagugugggaaa

SEQ ID NO: 2593294 - RNA, 19 nt, Homo sapiens
  misc_RNA (1)...(19): siRNA sense strand
agcaggaacacaugaagaa

SEQ ID NO: 2593295 - RNA, 19 nt, Homo sapiens
  misc_RNA (1)...(19): siRNA sense strand
gggacagaaaccauauaau

SEQ ID NO: 2593296 - RNA, 19 nt, Homo sapiens
  misc_RNA (1)...(19): siRNA sense strand
cugcaagcaaauuugggaa

SEQ ID NO: 2593297 - RNA, 19 nt, Homo sapiens
  misc_RNA (1)...(19): siRNA sense strand
ggugaaaauuguaaacagu

SEQ ID NO: 2593298 - RNA, 19 nt, Homo sapiens
  misc_RNA (1)...(19): siRNA sense strand
cugugaugaguguggaaaa

SEQ ID NO: 2593299 - RNA, 19 nt, Homo sapiens
  misc_RNA (1)...(19): siRNA sense strand
acaugggagugaaaugcua

SEQ ID NO: 2593300 - RNA, 19 nt, Homo sapiens
  misc_RNA (1)...(19): siRNA sense strand
gugguaaggaauuuaguca

SEQ ID NO: 2593301 - RNA, 19 nt, Homo sapiens
  misc_RNA (1)...(19): siRNA sense strand
aagaaugugggaagagcuu

SEQ ID NO: 2593302 - RNA, 19 nt, Homo sapiens
  misc_RNA (1)...(19): siRNA sense strand
ccucauaucuuuuggucca

SEQ ID NO: 2593303 - RNA, 19 nt, Homo sapiens
  misc_RNA (1)...(19): siRNA sense strand
aggagugugggaagggcua

SEQ ID NO: 2593304 - RNA, 19 nt, Homo sapiens
  misc_RNA (1)...(19): siRNA sense strand
aagaaacuccacugccaaa

SEQ ID NO: 2593305 - RNA, 19 nt, Homo sapiens
  misc_RNA (1)...(19): siRNA sense strand
cuucagaaacaucacagaa

SEQ ID NO: 2593306 - RNA, 19 nt, Homo sapiens
  misc_RNA (1)...(19): siRNA sense strand
gcgggaagagcuuuagaca

SEQ ID NO: 2593307 - RNA, 19 nt, Homo sapiens
  misc_RNA (1)...(19): siRNA sense strand
ggacagaaacacuggccua

SEQ ID NO: 2593308 - RNA, 19 nt, Homo sapiens
  misc_RNA (1)...(19): siRNA sense strand
uguacagacucgaggauca

SEQ ID NO: 2593309 - RNA, 19 nt, Homo sapiens
  misc_RNA (1)...(19): siRNA sense strand
acaaaagcuugaagaacaa

SEQ ID NO: 2593310 - RNA, 19 nt, Homo sapiens
  misc_RNA (1)...(19): siRNA sense strand
ucuugaauguggauggauu

SEQ ID NO: 2593311 - RNA, 19 nt, Homo sapiens
  misc_RNA (1)...(19): siRNA sense strand
cugcacagccagagguuca

SEQ ID NO: 2593312 - RNA, 19 nt, Homo sapiens
  misc_RNA (1)...(19): siRNA sense strand
gggacaaaagcuugaagaa

SEQ ID NO: 2593313 - RNA, 19 nt, Homo sapiens
  misc_RNA (1)...(19): siRNA sense strand
agacaagauuccauagacu

SEQ ID NO: 2593314 - RNA, 19 nt, Homo sapiens
  misc_RNA (1)...(19): siRNA sense strand
caacauaugauuugaccca

SEQ ID NO: 2593315 - RNA, 19 nt, Homo sapiens
  misc_RNA (1)...(19): siRNA sense strand
cggaaggccaugcagcuaa

SEQ ID NO: 2593316 - RNA, 19 nt, Homo sapiens
  misc_RNA (1)...(19): siRNA sense strand
cgauggauuuagacaagau

SEQ ID NO: 2593317 - RNA, 19 nt, Homo sapiens
  misc_RNA (1)...(19): siRNA sense strand
gcaaaguagcaaaucacau

SEQ ID NO: 2593318 - RNA, 19 nt, Homo sapiens
  misc_RNA (1)...(19): siRNA sense strand
cgcuauuauguaagaggaa

SEQ ID NO: 2593319 - RNA, 19 nt, Homo sapiens
  misc_RNA (1)...(19): siRNA sense strand
agaccaaaccucaaguaca

SEQ ID NO: 2593320 - RNA, 19 nt, Homo sapiens
  misc_RNA (1)...(19): siRNA sense strand
aguccugaauuccaagaaa

SEQ ID NO: 2593321 - RNA, 19 nt, Homo sapiens
  misc_RNA (1)...(19): siRNA sense strand
agauagaaccaaugugauc

SEQ ID NO: 2593322 - RNA, 19 nt, Homo sapiens
  misc_RNA (1)...(19): siRNA sense strand
gguccagaaagaaaagaua

SEQ ID NO: 2593323 - RNA, 19 nt, Homo sapiens
  misc_RNA (1)...(19): siRNA sense strand
guccugaauuccaagaaau

SEQ ID NO: 2593324 - RNA, 19 nt, Homo sapiens
  misc_RNA (1)...(19): siRNA sense strand
cagcuaacuuuguagaaac

SEQ ID NO: 2593325 - RNA, 19 nt, Homo sapiens
  misc_RNA (1)...(19): siRNA sense strand
aguggaaugaugagauaca

SEQ ID NO: 2593326 - RNA, 19 nt, Homo sapiens
  misc_RNA (1)...(19): siRNA sense strand
cuggaaagcaacagauuuu

SEQ ID NO: 2593327 - RNA, 19 nt, Homo sapiens
  misc_RNA (1)...(19): siRNA sense strand
uggaucagguagcagaaau

SEQ ID NO: 2593328 - RNA, 19 nt, Homo sapiens
  misc_RNA (1)...(19): siRNA sense strand
auggauggcuggaacucaa

SEQ ID NO: 2593329 - RNA, 19 nt, Homo sapiens
  misc_RNA (1)...(19): siRNA sense strand
cggccuacgagcagcugaa

SEQ ID NO: 2593330 - RNA, 19 nt, Homo sapiens
  misc_RNA (1)...(19): siRNA sense strand
cuugaauguggauggauuu

SEQ ID NO: 2593331 - RNA, 19 nt, Homo sapiens
  misc_RNA (1)...(19): siRNA sense strand
guacagacucgaggaucaa

SEQ ID NO: 2593332 - RNA, 19 nt, Homo sapiens
  misc_RNA (1)...(19): siRNA sense strand
cuaacuuuguagaaacaga

SEQ ID NO: 2593333 - RNA, 19 nt, Homo sapiens
  misc_RNA (1)...(19): siRNA sense strand
uggcaaaccaggaaggcgu

SEQ ID NO: 2593334 - RNA, 19 nt, Homo sapiens
  misc_RNA (1)...(19): siRNA sense strand
aguacaaaccacugccaca

SEQ ID NO: 2593335 - RNA, 19 nt, Homo sapiens
  misc_RNA (1)...(19): siRNA sense strand
cggagaagccacuugagca

SEQ ID NO: 2593336 - RNA, 19 nt, Homo sapiens
  misc_RNA (1)...(19): siRNA sense strand
agaaugaguacguagaaaa

SEQ ID NO: 2593337 - RNA, 19 nt, Homo sapiens
  misc_RNA (1)...(19): siRNA sense strand
ugagaaaaugccugaagaa

SEQ ID NO: 2593338 - RNA, 19 nt, Homo sapiens
  misc_RNA (1)...(19): siRNA sense strand
guaaugauguugaucggga

SEQ ID NO: 2593339 - RNA, 19 nt, Homo sapiens
  misc_RNA (1)...(19): siRNA sense strand
uugaucgggaguugagaaa

SEQ ID NO: 2593340 - RNA, 19 nt, Homo sapiens
  misc_RNA (1)...(19): siRNA sense strand
cguccauacaggagagaaa

SEQ ID NO: 2593341 - RNA, 19 nt, Homo sapiens
  misc_RNA (1)...(19): siRNA sense strand
augugaagaaugugggaaa

SEQ ID NO: 2593342 - RNA, 19 nt, Homo sapiens
  misc_RNA (1)...(19): siRNA sense strand
gagugugggaagagauuua

SEQ ID NO: 2593343 - RNA, 19 nt, Homo sapiens
  misc_RNA (1)...(19): siRNA sense strand
augugaagagugugggaaa

SEQ ID NO: 2593344 - RNA, 19 nt, Homo sapiens
  misc_RNA (1)...(19): siRNA sense strand
cgaugugauacgugugaua

SEQ ID NO: 2593345 - RNA, 19 nt, Homo sapiens
  misc_RNA (1)...(19): siRNA sense strand
gguccacaugggagagaaa

SEQ ID NO: 2593346 - RNA, 19 nt, Homo sapiens
  misc_RNA (1)...(19): siRNA sense strand
acauggaaguguagggagu

SEQ ID NO: 2593347 - RNA, 19 nt, Homo sapiens
  misc_RNA (1)...(19): siRNA sense strand
aaguguagggagugugaua

SEQ ID NO: 2593348 - RNA, 19 nt, Homo sapiens
  misc_RNA (1)...(19): siRNA sense strand
gaucaagacuuaauaggca

SEQ ID NO: 2593349 - RNA, 19 nt, Homo sapiens
  misc_RNA (1)...(19): siRNA sense strand
gguucacacggcagagaaa

SEQ ID NO: 2593350 - RNA, 19 nt, Homo sapiens
  misc_RNA (1)...(19): siRNA sense strand
gggaaaggauuuuacacaa

SEQ ID NO: 2593351 - RNA, 19 nt, Homo sapiens
  misc_RNA (1)...(19): siRNA sense strand
aauccaaagggaagggaau

SEQ ID NO: 2593352 - RNA, 19 nt, Homo sapiens
  misc_RNA (1)...(19): siRNA sense strand
ucucuaaagugcaagaaaa

SEQ ID NO: 2593353 - RNA, 19 nt, Homo sapiens
  misc_RNA (1)...(19): siRNA sense strand
auuacacacaggagagaaa

SEQ ID NO: 2593354 - RNA, 19 nt, Homo sapiens
  misc_RNA (1)...(19): siRNA sense strand
gguccacacaggagagaga

SEQ ID NO: 2593355 - RNA, 19 nt, Homo sapiens
  misc_RNA (1)...(19): siRNA sense strand
caagcauuccacagggaua

SEQ ID NO: 2593356 - RNA, 19 nt, Homo sapiens
  misc_RNA (1)...(19): siRNA sense strand
ccuuauaauugugaggaau

SEQ ID NO: 2593357 - RNA, 19 nt, Homo sapiens
  misc_RNA (1)...(19): siRNA sense strand
agaggaagcuguaucgaga

SEQ ID NO: 2593358 - RNA, 19 nt, Homo sapiens
  misc_RNA (1)...(19): siRNA sense strand
auguguggaaugugggaaa

SEQ ID NO: 2593359 - RNA, 19 nt, Homo sapiens
  misc_RNA (1)...(19): siRNA sense strand
uguaaagagugugggaaga

SEQ ID NO: 2593360 - RNA, 19 nt, Homo sapiens
  misc_RNA (1)...(19): siRNA sense strand
aggaaugugggaagaguuu

SEQ ID NO: 2593361 - RNA, 19 nt, Homo sapiens
  misc_RNA (1)...(19): siRNA sense strand
aguccacaugggagagaaa

SEQ ID NO: 2593362 - RNA, 19 nt, Homo sapiens
  misc_RNA (1)...(19): siRNA sense strand
acacaaauucacaaugcua

SEQ ID NO: 2593363 - RNA, 19 nt, Homo sapiens
  misc_RNA (1)...(19): siRNA sense strand
agaaaucuucccagggcaa

SEQ ID NO: 2593364 - RNA, 19 nt, Homo sapiens
  misc_RNA (1)...(19): siRNA sense strand
uucaagaacaucagagaau

SEQ ID NO: 2593365 - RNA, 19 nt, Homo sapiens
  misc_RNA (1)...(19): siRNA sense strand
gggcaauggauauaaacca

SEQ ID NO: 2593366 - RNA, 19 nt, Homo sapiens
  misc_RNA (1)...(19): siRNA sense strand
gggaagggaauucaggaga

SEQ ID NO: 2593367 - RNA, 19 nt, Homo sapiens
  misc_RNA (1)...(19): siRNA sense strand
gagugugauaugugcuuua

SEQ ID NO: 2593368 - RNA, 19 nt, Homo sapiens
  misc_RNA (1)...(19): siRNA sense strand
gaagaaugugggaaaggau

SEQ ID NO: 2593369 - RNA, 19 nt, Homo sapiens
  misc_RNA (1)...(19): siRNA sense strand
uggaugaugaagacagcaa

SEQ ID NO: 2593370 - RNA, 19 nt, Homo sapiens
  misc_RNA (1)...(19): siRNA sense strand
agaaugugggaaaggauuu

SEQ ID NO: 2593371 - RNA, 19 nt, Homo sapiens
  misc_RNA (1)...(19): siRNA sense strand
agaaaugcuauaaguguga

SEQ ID NO: 2593372 - RNA, 19 nt, Homo sapiens
  misc_RNA (1)...(19): siRNA sense strand
accuuauaauugugaggaa

SEQ ID NO: 2593373 - RNA, 19 nt, Homo sapiens
  misc_RNA (1)...(19): siRNA sense strand
auuacacucaggagagaaa

SEQ ID NO: 2593374 - RNA, 19 nt, Homo sapiens
  misc_RNA (1)...(19): siRNA sense strand
gcuucaagaacaucagaga

SEQ ID NO: 2593375 - RNA, 19 nt, Homo sapiens
  misc_RNA (1)...(19): siRNA sense strand
ccacguucaaggaggcaau

SEQ ID NO: 2593376 - RNA, 19 nt, Homo sapiens
  misc_RNA (1)...(19): siRNA sense strand
agaaguguggaaagggcua

SEQ ID NO: 2593377 - RNA, 19 nt, Homo sapiens
  misc_RNA (1)...(19): siRNA sense strand
aggagagaaaccauacaaa

SEQ ID NO: 2593378 - RNA, 19 nt, Homo sapiens
  misc_RNA (1)...(19): siRNA sense strand
aggaaugugggaagagcuu

SEQ ID NO: 2593379 - RNA, 19 nt, Homo sapiens
  misc_RNA (1)...(19): siRNA sense strand
ggcuacaauaguaaguuua

SEQ ID NO: 2593380 - RNA, 19 nt, Homo sapiens
  misc_RNA (1)...(19): siRNA sense strand
agagaguccacaugggaga

SEQ ID NO: 2593381 - RNA, 19 nt, Homo sapiens
  misc_RNA (1)...(19): siRNA sense strand
aaaugugagaaguguggaa

SEQ ID NO: 2593382 - RNA, 19 nt, Homo sapiens
  misc_RNA (1)...(19): siRNA sense strand
guagaaaagccauacaaau

SEQ ID NO: 2593383 - RNA, 19 nt, Homo sapiens
  misc_RNA (1)...(19): siRNA sense strand
aggcaggacuaucuguaau

SEQ ID NO: 2593384 - RNA, 19 nt, Homo sapiens
  misc_RNA (1)...(19): siRNA sense strand
cuucaagaacaucagagaa

SEQ ID NO: 2593385 - RNA, 19 nt, Homo sapiens
  misc_RNA (1)...(19): siRNA sense strand
uguaaggaaugugggaaga

SEQ ID NO: 2593386 - RNA, 19 nt, Homo sapiens
  misc_RNA (1)...(19): siRNA sense strand
uguaaggaaugugggaaga

SEQ ID NO: 2593387 - RNA, 19 nt, Homo sapiens
  misc_RNA (1)...(19): siRNA sense strand
ccuucgacuucaucagaau

SEQ ID NO: 2593388 - RNA, 19 nt, Homo sapiens
  misc_RNA (1)...(19): siRNA sense strand
cagcagagauugagggaac

SEQ ID NO: 2593389 - RNA, 19 nt, Homo sapiens
  misc_RNA (1)...(19): siRNA sense strand
aggaggagcaagagaggaa

SEQ ID NO: 2593390 - RNA, 19 nt, Homo sapiens
  misc_RNA (1)...(19): siRNA sense strand
ggaacgagcugcuggagga

SEQ ID NO: 2593391 - RNA, 19 nt, Homo sapiens
  misc_RNA (1)...(19): siRNA sense strand
ugaaagaccuugaagagga

SEQ ID NO: 2593392 - RNA, 19 nt, Homo sapiens
  misc_RNA (1)...(19): siRNA sense strand
agucguuguugaagaagaa

SEQ ID NO: 2593393 - RNA, 19 nt, Homo sapiens
  misc_RNA (1)...(19): siRNA sense strand
cugaagaaccuccggaaca

SEQ ID NO: 2593394 - RNA, 19 nt, Homo sapiens
  misc_RNA (1)...(19): siRNA sense strand
uggaggagcagguggaaca

SEQ ID NO: 2593395 - RNA, 19 nt, Homo sapiens
  misc_RNA (1)...(19): siRNA sense strand
gugaaggagcugagggaug

SEQ ID NO: 2593396 - RNA, 19 nt, Homo sapiens
  misc_RNA (1)...(19): siRNA sense strand
ucucagaggaacuggccaa

SEQ ID NO: 2593397 - RNA, 19 nt, Homo sapiens
  misc_RNA (1)...(19): siRNA sense strand
gcgugaaggagcugaggga

SEQ ID NO: 2593398 - RNA, 19 nt, Homo sapiens
  misc_RNA (1)...(19): siRNA sense strand
aggcagccgaccugggaaa

SEQ ID NO: 2593399 - RNA, 19 nt, Homo sapiens
  misc_RNA (1)...(19): siRNA sense strand
acaaguacgcagagugcau

SEQ ID NO: 2593400 - RNA, 19 nt, Homo sapiens
  misc_RNA (1)...(19): siRNA sense strand
cgcaggaggagcugaagaa

SEQ ID NO: 2593401 - RNA, 19 nt, Homo sapiens
  misc_RNA (1)...(19): siRNA sense strand
ccuaugaggagaaggagca

SEQ ID NO: 2593402 - RNA, 19 nt, Homo sapiens
  misc_RNA (1)...(19): siRNA sense strand
ggagguucuuugaggagga

SEQ ID NO: 2593403 - RNA, 19 nt, Homo sapiens
  misc_RNA (1)...(19): siRNA sense strand
aggaggagcugaagaaccu

SEQ ID NO: 2593404 - RNA, 19 nt, Homo sapiens
  misc_RNA (1)...(19): siRNA sense strand
acgcagagugcauggagau

SEQ ID NO: 2593405 - RNA, 19 nt, Homo sapiens
  misc_RNA (1)...(19): siRNA sense strand
acaacaagaccaacagcau

SEQ ID NO: 2593406 - RNA, 19 nt, Homo sapiens
  misc_RNA (1)...(19): siRNA sense strand
ggaacaaaaccaugcccaa

SEQ ID NO: 2593407 - RNA, 19 nt, Homo sapiens
  misc_RNA (1)...(19): siRNA sense strand
agacccuaaccgagaggaa

SEQ ID NO: 2593408 - RNA, 19 nt, Homo sapiens
  misc_RNA (1)...(19): siRNA sense strand
augaagaacuuguccagca

SEQ ID NO: 2593409 - RNA, 19 nt, Homo sapiens
  misc_RNA (1)...(19): siRNA sense strand
ggccagaugacuaagacau

SEQ ID NO: 2593410 - RNA, 19 nt, Homo sapiens
  misc_RNA (1)...(19): siRNA sense strand
ccaucaccuaugaggagaa

SEQ ID NO: 2593411 - RNA, 19 nt, Homo sapiens
  misc_RNA (1)...(19): siRNA sense strand
cagucguuguugaagaaga

SEQ ID NO: 2593412 - RNA, 19 nt, Homo sapiens
  misc_RNA (1)...(19): siRNA sense strand
uggccaagaagacggaaga

SEQ ID NO: 2593413 - RNA, 19 nt, Homo sapiens
  misc_RNA (1)...(19): siRNA sense strand
cuucuacggcagcgacaua

SEQ ID NO: 2593414 - RNA, 19 nt, Homo sapiens
  misc_RNA (1)...(19): siRNA sense strand
cuuugaagaagaugacaca

SEQ ID NO: 2593415 - RNA, 19 nt, Homo sapiens
  misc_RNA (1)...(19): siRNA sense strand
aagcuugcgcaguggaaaa

SEQ ID NO: 2593416 - RNA, 19 nt, Homo sapiens
  misc_RNA (1)...(19): siRNA sense strand
gcgcaggaggagcugaaga

SEQ ID NO: 2593417 - RNA, 19 nt, Homo sapiens
  misc_RNA (1)...(19): siRNA sense strand
aggagaaagagcgggauuu

SEQ ID NO: 2593418 - RNA, 19 nt, Homo sapiens
  misc_RNA (1)...(19): siRNA sense strand
ucaccuaugaggagaagga

SEQ ID NO: 2593419 - RNA, 19 nt, Homo sapiens
  misc_RNA (1)...(19): siRNA sense strand
agacaguaagaaacaucaa

SEQ ID NO: 2593420 - RNA, 19 nt, Homo sapiens
  misc_RNA (1)...(19): siRNA sense strand
cagcagagauugagggaac

SEQ ID NO: 2593421 - RNA, 19 nt, Homo sapiens
  misc_RNA (1)...(19): siRNA sense strand
aggaggagcaagagaggaa

SEQ ID NO: 2593422 - RNA, 19 nt, Homo sapiens
  misc_RNA (1)...(19): siRNA sense strand
ggaacgagcugcuggagga

SEQ ID NO: 2593423 - RNA, 19 nt, Homo sapiens
  misc_RNA (1)...(19): siRNA sense strand
ugaaagaccuugaagagga

SEQ ID NO: 2593424 - RNA, 19 nt, Homo sapiens
  misc_RNA (1)...(19): siRNA sense strand
agucguuguugaagaagaa

SEQ ID NO: 2593425 - RNA, 19 nt, Homo sapiens
  misc_RNA (1)...(19): siRNA sense strand
cugaagaaccuccggaaca

SEQ ID NO: 2593426 - RNA, 19 nt, Homo sapiens
  misc_RNA (1)...(19): siRNA sense strand
uggaggagcagguggaaca

SEQ ID NO: 2593427 - RNA, 19 nt, Homo sapiens
  misc_RNA (1)...(19): siRNA sense strand
gugaaggagcugagggaug

SEQ ID NO: 2593428 - RNA, 19 nt, Homo sapiens
  misc_RNA (1)...(19): siRNA sense strand
ucucagaggaacuggccaa

SEQ ID NO: 2593429 - RNA, 19 nt, Homo sapiens
  misc_RNA (1)...(19): siRNA sense strand
gcgugaaggagcugaggga

SEQ ID NO: 2593430 - RNA, 19 nt, Homo sapiens
  misc_RNA (1)...(19): siRNA sense strand
aggcagccgaccugggaaa

SEQ ID NO: 2593431 - RNA, 19 nt, Homo sapiens
  misc_RNA (1)...(19): siRNA sense strand
acaaguacgcagagugcau

SEQ ID NO: 2593432 - RNA, 19 nt, Homo sapiens
  misc_RNA (1)...(19): siRNA sense strand
cgcaggaggagcugaagaa

SEQ ID NO: 2593433 - RNA, 19 nt, Homo sapiens
  misc_RNA (1)...(19): siRNA sense strand
ccuaugaggagaaggagca

SEQ ID NO: 2593434 - RNA, 19 nt, Homo sapiens
  misc_RNA (1)...(19): siRNA sense strand
ggagguucuuugaggagga

SEQ ID NO: 2593435 - RNA, 19 nt, Homo sapiens
  misc_RNA (1)...(19): siRNA sense strand
aggaggagcugaagaaccu

SEQ ID NO: 2593436 - RNA, 19 nt, Homo sapiens
  misc_RNA (1)...(19): siRNA sense strand
acgcagagugcauggagau

SEQ ID NO: 2593437 - RNA, 19 nt, Homo sapiens
  misc_RNA (1)...(19): siRNA sense strand
acaacaagaccaacagcau

SEQ ID NO: 2593438 - RNA, 19 nt, Homo sapiens
  misc_RNA (1)...(19): siRNA sense strand
ggaacaaaaccaugcccaa

SEQ ID NO: 2593439 - RNA, 19 nt, Homo sapiens
  misc_RNA (1)...(19): siRNA sense strand
augaagaacuuguccagca

SEQ ID NO: 2593440 - RNA, 19 nt, Homo sapiens
  misc_RNA (1)...(19): siRNA sense strand
ggccagaugacuaagacau

SEQ ID NO: 2593441 - RNA, 19 nt, Homo sapiens
  misc_RNA (1)...(19): siRNA sense strand
ccaucaccuaugaggagaa

SEQ ID NO: 2593442 - RNA, 19 nt, Homo sapiens
  misc_RNA (1)...(19): siRNA sense strand
cagucguuguugaagaaga

SEQ ID NO: 2593443 - RNA, 19 nt, Homo sapiens
  misc_RNA (1)...(19): siRNA sense strand
uggccaagaagacggaaga

SEQ ID NO: 2593444 - RNA, 19 nt, Homo sapiens
  misc_RNA (1)...(19): siRNA sense strand
cuucuacggcagcgacaua

SEQ ID NO: 2593445 - RNA, 19 nt, Homo sapiens
  misc_RNA (1)...(19): siRNA sense strand
cuuugaagaagaugacaca

SEQ ID NO: 2593446 - RNA, 19 nt, Homo sapiens
  misc_RNA (1)...(19): siRNA sense strand
aagcuugcgcaguggaaaa

SEQ ID NO: 2593447 - RNA, 19 nt, Homo sapiens
  misc_RNA (1)...(19): siRNA sense strand
gcgcaggaggagcugaaga

SEQ ID NO: 2593448 - RNA, 19 nt, Homo sapiens
  misc_RNA (1)...(19): siRNA sense strand
ucaccuaugaggagaagga

SEQ ID NO: 2593449 - RNA, 19 nt, Homo sapiens
  misc_RNA (1)...(19): siRNA sense strand
aggagaaagagcgggauuu

SEQ ID NO: 2593450 - RNA, 19 nt, Homo sapiens
  misc_RNA (1)...(19): siRNA sense strand
agacaguaagaaacaucaa

SEQ ID NO: 2593451 - RNA, 19 nt, Homo sapiens
  misc_RNA (1)...(19): siRNA sense strand
ggaaagaggcugaagagca

SEQ ID NO: 2593452 - RNA, 19 nt, Homo sapiens
  misc_RNA (1)...(19): siRNA sense strand
ugaaaagacaccaggaaaa

SEQ ID NO: 2593453 - RNA, 19 nt, Homo sapiens
  misc_RNA (1)...(19): siRNA sense strand
augaaagacacaagaagua

SEQ ID NO: 2593454 - RNA, 19 nt, Homo sapiens
  misc_RNA (1)...(19): siRNA sense strand
cugaagacuuggaugaaaa

SEQ ID NO: 2593455 - RNA, 19 nt, Homo sapiens
  misc_RNA (1)...(19): siRNA sense strand
ucaaagugcacauggacaa

SEQ ID NO: 2593456 - RNA, 19 nt, Homo sapiens
  misc_RNA (1)...(19): siRNA sense strand
caggagaaaaggagaaaau

SEQ ID NO: 2593457 - RNA, 19 nt, Homo sapiens
  misc_RNA (1)...(19): siRNA sense strand
gcagagugcgaaaggguga

SEQ ID NO: 2593458 - RNA, 19 nt, Homo sapiens
  misc_RNA (1)...(19): siRNA sense strand
guucauauccggagccaca

SEQ ID NO: 2593459 - RNA, 19 nt, Homo sapiens
  misc_RNA (1)...(19): siRNA sense strand
gagaaagaauuuaagugca

SEQ ID NO: 2593460 - RNA, 19 nt, Homo sapiens
  misc_RNA (1)...(19): siRNA sense strand
cuaaaggagucuucgcgaa

SEQ ID NO: 2593461 - RNA, 19 nt, Homo sapiens
  misc_RNA (1)...(19): siRNA sense strand
aggaggaagaacagcaaau

SEQ ID NO: 2593462 - RNA, 19 nt, Homo sapiens
  misc_RNA (1)...(19): siRNA sense strand
cugaaaagacaccaggaaa

SEQ ID NO: 2593463 - RNA, 19 nt, Homo sapiens
  misc_RNA (1)...(19): siRNA sense strand
agagaaugccugaagacuu

SEQ ID NO: 2593464 - RNA, 19 nt, Homo sapiens
  misc_RNA (1)...(19): siRNA sense strand
gugcaagaacugugggaag

SEQ ID NO: 2593465 - RNA, 19 nt, Homo sapiens
  misc_RNA (1)...(19): siRNA sense strand
cauaacagugagaggacuu

SEQ ID NO: 2593466 - RNA, 19 nt, Homo sapiens
  misc_RNA (1)...(19): siRNA sense strand
aggcugaggaggaagaaca

SEQ ID NO: 2593467 - RNA, 19 nt, Homo sapiens
  misc_RNA (1)...(19): siRNA sense strand
gccuacaggaacauagaaa

SEQ ID NO: 2593468 - RNA, 19 nt, Homo sapiens
  misc_RNA (1)...(19): siRNA sense strand
gucaagaauguaugaagaa

SEQ ID NO: 2593469 - RNA, 19 nt, Homo sapiens
  misc_RNA (1)...(19): siRNA sense strand
acauggaggcugaggagga

SEQ ID NO: 2593470 - RNA, 19 nt, Homo sapiens
  misc_RNA (1)...(19): siRNA sense strand
aggugugagcuauguaaua

SEQ ID NO: 2593471 - RNA, 19 nt, Homo sapiens
  misc_RNA (1)...(19): siRNA sense strand
agggauuugcccacagaaa

SEQ ID NO: 2593472 - RNA, 19 nt, Homo sapiens
  misc_RNA (1)...(19): siRNA sense strand
caucucaggagcagaagaa

SEQ ID NO: 2593473 - RNA, 19 nt, Homo sapiens
  misc_RNA (1)...(19): siRNA sense strand
ccaaugugaagaauguaaa

SEQ ID NO: 2593474 - RNA, 19 nt, Homo sapiens
  misc_RNA (1)...(19): siRNA sense strand
ggagaaaaucuguccauau

SEQ ID NO: 2593475 - RNA, 19 nt, Homo sapiens
  misc_RNA (1)...(19): siRNA sense strand
augccagguuugugugcaa

SEQ ID NO: 2593476 - RNA, 19 nt, Homo sapiens
  misc_RNA (1)...(19): siRNA sense strand
ugugaagaauguaaagcuu

SEQ ID NO: 2593477 - RNA, 19 nt, Homo sapiens
  misc_RNA (1)...(19): siRNA sense strand
aagaggaaggauacauuaa

SEQ ID NO: 2593478 - RNA, 19 nt, Homo sapiens
  misc_RNA (1)...(19): siRNA sense strand
gagcacaagaggacgcaca

SEQ ID NO: 2593479 - RNA, 19 nt, Homo sapiens
  misc_RNA (1)...(19): siRNA sense strand
acaaaguaauacacagcga

SEQ ID NO: 2593480 - RNA, 19 nt, Homo sapiens
  misc_RNA (1)...(19): siRNA sense strand
aauacacagcgaagacaaa

SEQ ID NO: 2593481 - RNA, 19 nt, Homo sapiens
  misc_RNA (1)...(19): siRNA sense strand
aagaaggggaaguugaaaa

SEQ ID NO: 2593482 - RNA, 19 nt, Homo sapiens
  misc_RNA (1)...(19): siRNA sense strand
caugaaagacacaagaagu

SEQ ID NO: 2593483 - RNA, 19 nt, Homo sapiens
  misc_RNA (1)...(19): siRNA sense strand
gugggagguucgugggagu

SEQ ID NO: 2593484 - RNA, 19 nt, Homo sapiens
  misc_RNA (1)...(19): siRNA sense strand
ggagaaaaggagaaaaucu

SEQ ID NO: 2593485 - RNA, 19 nt, Homo sapiens
  misc_RNA (1)...(19): siRNA sense strand
agaacugugggaagaaauu

SEQ ID NO: 2593486 - RNA, 19 nt, Homo sapiens
  misc_RNA (1)...(19): siRNA sense strand
cguacucacaccagggaga

SEQ ID NO: 2593487 - RNA, 19 nt, Homo sapiens
  misc_RNA (1)...(19): siRNA sense strand
agaaacccacagaggagaa

SEQ ID NO: 2593488 - RNA, 19 nt, Homo sapiens
  misc_RNA (1)...(19): siRNA sense strand
gagagaagagaaugccuga

SEQ ID NO: 2593489 - RNA, 19 nt, Homo sapiens
  misc_RNA (1)...(19): siRNA sense strand
ccguacaagugcucagagu

SEQ ID NO: 2593490 - RNA, 19 nt, Homo sapiens
  misc_RNA (1)...(19): siRNA sense strand
agaaaaugcugauucgaca

SEQ ID NO: 2593491 - RNA, 19 nt, Homo sapiens
  misc_RNA (1)...(19): siRNA sense strand
gggagguucgugggaguaa

SEQ ID NO: 2593492 - RNA, 19 nt, Homo sapiens
  misc_RNA (1)...(19): siRNA sense strand
uuauauguucagugugcaa

SEQ ID NO: 2593493 - RNA, 19 nt, Homo sapiens
  misc_RNA (1)...(19): siRNA sense strand
acccuauaauugcgagauu

SEQ ID NO: 2593494 - RNA, 19 nt, Homo sapiens
  misc_RNA (1)...(19): siRNA sense strand
gcagcaaggccuucagcca

SEQ ID NO: 2593495 - RNA, 19 nt, Homo sapiens
  misc_RNA (1)...(19): siRNA sense strand
ucuucagugcacagcgaaa

SEQ ID NO: 2593496 - RNA, 19 nt, Homo sapiens
  misc_RNA (1)...(19): siRNA sense strand
uugcuggagagaagagaau

SEQ ID NO: 2593497 - RNA, 19 nt, Homo sapiens
  misc_RNA (1)...(19): siRNA sense strand
agggagaaguuuuguacau

SEQ ID NO: 2593498 - RNA, 19 nt, Homo sapiens
  misc_RNA (1)...(19): siRNA sense strand
cuauuuggcaguugaagau

SEQ ID NO: 2593499 - RNA, 19 nt, Homo sapiens
  misc_RNA (1)...(19): siRNA sense strand
ccagaaacccacagaggag

SEQ ID NO: 2593500 - RNA, 19 nt, Homo sapiens
  misc_RNA (1)...(19): siRNA sense strand
auacaggagaaaaggagaa

SEQ ID NO: 2593501 - RNA, 19 nt, Homo sapiens
  misc_RNA (1)...(19): siRNA sense strand
ugccauaagaaguuuacaa

SEQ ID NO: 2593502 - RNA, 19 nt, Homo sapiens
  misc_RNA (1)...(19): siRNA sense strand
ggauggaaccuguggccaa

SEQ ID NO: 2593503 - RNA, 19 nt, Homo sapiens
  misc_RNA (1)...(19): siRNA sense strand
gggagaaggaggauggaac

SEQ ID NO: 2593504 - RNA, 19 nt, Homo sapiens
  misc_RNA (1)...(19): siRNA sense strand
ccuuacagccagugacaca

SEQ ID NO: 2593505 - RNA, 19 nt, Homo sapiens
  misc_RNA (1)...(19): siRNA sense strand
cauauuagauggagaggag

SEQ ID NO: 2593506 - RNA, 19 nt, Homo sapiens
  misc_RNA (1)...(19): siRNA sense strand
cugucgacuugguggucaa

SEQ ID NO: 2593507 - RNA, 19 nt, Homo sapiens
  misc_RNA (1)...(19): siRNA sense strand
ccugcaaaggcuugaguga

SEQ ID NO: 2593508 - RNA, 19 nt, Homo sapiens
  misc_RNA (1)...(19): siRNA sense strand
uggcaguagcagaggaugu

SEQ ID NO: 2593509 - RNA, 19 nt, Homo sapiens
  misc_RNA (1)...(19): siRNA sense strand
gggaaagggaagacgcugu

SEQ ID NO: 2593510 - RNA, 19 nt, Homo sapiens
  misc_RNA (1)...(19): siRNA sense strand
uggugaacaacucgcgaaa

SEQ ID NO: 2593511 - RNA, 19 nt, Homo sapiens
  misc_RNA (1)...(19): siRNA sense strand
guucaaagaaagugauccu

SEQ ID NO: 2593512 - RNA, 19 nt, Homo sapiens
  misc_RNA (1)...(19): siRNA sense strand
gcucagggcaaguggcagu

SEQ ID NO: 2593513 - RNA, 19 nt, Homo sapiens
  misc_RNA (1)...(19): siRNA sense strand
ggaacaaaccagaggcagc

SEQ ID NO: 2593514 - RNA, 19 nt, Homo sapiens
  misc_RNA (1)...(19): siRNA sense strand
cguaauggagaaacgguca

SEQ ID NO: 2593515 - RNA, 19 nt, Homo sapiens
  misc_RNA (1)...(19): siRNA sense strand
ugggagaaagucugggaca

SEQ ID NO: 2593516 - RNA, 19 nt, Homo sapiens
  misc_RNA (1)...(19): siRNA sense strand
caagagaggcacugcagga

SEQ ID NO: 2593517 - RNA, 19 nt, Homo sapiens
  misc_RNA (1)...(19): siRNA sense strand
ugucguagugauaccguaa

SEQ ID NO: 2593518 - RNA, 19 nt, Homo sapiens
  misc_RNA (1)...(19): siRNA sense strand
cugagaacugggagaaagu

SEQ ID NO: 2593519 - RNA, 19 nt, Homo sapiens
  misc_RNA (1)...(19): siRNA sense strand
aagacagagaagucaggua

SEQ ID NO: 2593520 - RNA, 19 nt, Homo sapiens
  misc_RNA (1)...(19): siRNA sense strand
ggcaaguggcaguagcaga

SEQ ID NO: 2593521 - RNA, 19 nt, Homo sapiens
  misc_RNA (1)...(19): siRNA sense strand
cagcgaugucagggaacaa

SEQ ID NO: 2593522 - RNA, 19 nt, Homo sapiens
  misc_RNA (1)...(19): siRNA sense strand
agcaauggcugaagcggga

SEQ ID NO: 2593523 - RNA, 19 nt, Homo sapiens
  misc_RNA (1)...(19): siRNA sense strand
gguccacacaggagagaaa

SEQ ID NO: 2593524 - RNA, 19 nt, Homo sapiens
  misc_RNA (1)...(19): siRNA sense strand
gguccacagaggagagaaa

SEQ ID NO: 2593525 - RNA, 19 nt, Homo sapiens
  misc_RNA (1)...(19): siRNA sense strand
augugaagaaugugggaaa

SEQ ID NO: 2593526 - RNA, 19 nt, Homo sapiens
  misc_RNA (1)...(19): siRNA sense strand
gagugugggaagagauuua

SEQ ID NO: 2593527 - RNA, 19 nt, Homo sapiens
  misc_RNA (1)...(19): siRNA sense strand
cccuauaauuguaaggaau

SEQ ID NO: 2593528 - RNA, 19 nt, Homo sapiens
  misc_RNA (1)...(19): siRNA sense strand
augugaagagugugggaaa

SEQ ID NO: 2593529 - RNA, 19 nt, Homo sapiens
  misc_RNA (1)...(19): siRNA sense strand
ccuuaaagaccaacaaaga

SEQ ID NO: 2593530 - RNA, 19 nt, Homo sapiens
  misc_RNA (1)...(19): siRNA sense strand
gguucacaugcgagagaaa

SEQ ID NO: 2593531 - RNA, 19 nt, Homo sapiens
  misc_RNA (1)...(19): siRNA sense strand
gagcaaaucuuaauaggca

SEQ ID NO: 2593532 - RNA, 19 nt, Homo sapiens
  misc_RNA (1)...(19): siRNA sense strand
gguccacaccggagagaga

SEQ ID NO: 2593533 - RNA, 19 nt, Homo sapiens
  misc_RNA (1)...(19): siRNA sense strand
agaccaacaaagagaccaa

SEQ ID NO: 2593534 - RNA, 19 nt, Homo sapiens
  misc_RNA (1)...(19): siRNA sense strand
agaggaaacuguaccgaga

SEQ ID NO: 2593535 - RNA, 19 nt, Homo sapiens
  misc_RNA (1)...(19): siRNA sense strand
cuuccguaguagagcaaau

SEQ ID NO: 2593536 - RNA, 19 nt, Homo sapiens
  misc_RNA (1)...(19): siRNA sense strand
caaucacuccacagagaua

SEQ ID NO: 2593537 - RNA, 19 nt, Homo sapiens
  misc_RNA (1)...(19): siRNA sense strand
gaggguaggacguguaaaa

SEQ ID NO: 2593538 - RNA, 19 nt, Homo sapiens
  misc_RNA (1)...(19): siRNA sense strand
cagcaaauucaucagagaa

SEQ ID NO: 2593539 - RNA, 19 nt, Homo sapiens
  misc_RNA (1)...(19): siRNA sense strand
ugaugaauguggaaagagu

SEQ ID NO: 2593540 - RNA, 19 nt, Homo sapiens
  misc_RNA (1)...(19): siRNA sense strand
gguacaaaugugaggaaug

SEQ ID NO: 2593541 - RNA, 19 nt, Homo sapiens
  misc_RNA (1)...(19): siRNA sense strand
aagaaugugggaagggauu

SEQ ID NO: 2593542 - RNA, 19 nt, Homo sapiens
  misc_RNA (1)...(19): siRNA sense strand
gcaaaucuuaauaggcauu

SEQ ID NO: 2593543 - RNA, 19 nt, Homo sapiens
  misc_RNA (1)...(19): siRNA sense strand
uuaaagaccaacaaagaga

SEQ ID NO: 2593544 - RNA, 19 nt, Homo sapiens
  misc_RNA (1)...(19): siRNA sense strand
ucuccaaacaagaugauau

SEQ ID NO: 2593545 - RNA, 19 nt, Homo sapiens
  misc_RNA (1)...(19): siRNA sense strand
aggcuuuagucguagauca

SEQ ID NO: 2593546 - RNA, 19 nt, Homo sapiens
  misc_RNA (1)...(19): siRNA sense strand
gcaagaucuuuauaagcau

SEQ ID NO: 2593547 - RNA, 19 nt, Homo sapiens
  misc_RNA (1)...(19): siRNA sense strand
gaagaaugugggaagggau

SEQ ID NO: 2593548 - RNA, 19 nt, Homo sapiens
  misc_RNA (1)...(19): siRNA sense strand
ggggaaaagccauacaaau

SEQ ID NO: 2593549 - RNA, 19 nt, Homo sapiens
  misc_RNA (1)...(19): siRNA sense strand
ugugagaaguguggaaaga

SEQ ID NO: 2593550 - RNA, 19 nt, Homo sapiens
  misc_RNA (1)...(19): siRNA sense strand
agacuccacaguagagaaa

SEQ ID NO: 2593551 - RNA, 19 nt, Homo sapiens
  misc_RNA (1)...(19): siRNA sense strand
gcuucaacaguaaguuuaa

SEQ ID NO: 2593552 - RNA, 19 nt, Homo sapiens
  misc_RNA (1)...(19): siRNA sense strand
aacccaaagagaagggaau

SEQ ID NO: 2593553 - RNA, 19 nt, Homo sapiens
  misc_RNA (1)...(19): siRNA sense strand
ucaucaaaccugggaacaa

SEQ ID NO: 2593554 - RNA, 19 nt, Homo sapiens
  misc_RNA (1)...(19): siRNA sense strand
gaaugugggaaaagauuua

SEQ ID NO: 2593555 - RNA, 19 nt, Homo sapiens
  misc_RNA (1)...(19): siRNA sense strand
auuacacacaggagugaaa

SEQ ID NO: 2593556 - RNA, 19 nt, Homo sapiens
  misc_RNA (1)...(19): siRNA sense strand
uuguaaagaaugugggaag

SEQ ID NO: 2593557 - RNA, 19 nt, Homo sapiens
  misc_RNA (1)...(19): siRNA sense strand
acacaggagagaaacggua

SEQ ID NO: 2593558 - RNA, 19 nt, Homo sapiens
  misc_RNA (1)...(19): siRNA sense strand
uuguaaagaauguggaaag

SEQ ID NO: 2593559 - RNA, 19 nt, Homo sapiens
  misc_RNA (1)...(19): siRNA sense strand
auaagagacuccaugguga

SEQ ID NO: 2593560 - RNA, 19 nt, Homo sapiens
  misc_RNA (1)...(19): siRNA sense strand
ggaccuugcccagaggaaa

SEQ ID NO: 2593561 - RNA, 19 nt, Homo sapiens
  misc_RNA (1)...(19): siRNA sense strand
augaauguggaaagaguuu

SEQ ID NO: 2593562 - RNA, 19 nt, Homo sapiens
  misc_RNA (1)...(19): siRNA sense strand
augugagcagugugggaaa

SEQ ID NO: 2593563 - RNA, 19 nt, Homo sapiens
  misc_RNA (1)...(19): siRNA sense strand
aaaccauucagaugugaua

SEQ ID NO: 2593564 - RNA, 19 nt, Homo sapiens
  misc_RNA (1)...(19): siRNA sense strand
ggaaagagcuucagauggg

SEQ ID NO: 2593565 - RNA, 19 nt, Homo sapiens
  misc_RNA (1)...(19): siRNA sense strand
ccauauagaugugaggagu

SEQ ID NO: 2593566 - RNA, 19 nt, Homo sapiens
  misc_RNA (1)...(19): siRNA sense strand
aggaaugugggaagagcuu

SEQ ID NO: 2593567 - RNA, 19 nt, Homo sapiens
  misc_RNA (1)...(19): siRNA sense strand
uggaguaaagccauacaaa

SEQ ID NO: 2593568 - RNA, 19 nt, Homo sapiens
  misc_RNA (1)...(19): siRNA sense strand
ggaaagagcuucagauggg

SEQ ID NO: 2593569 - RNA, 19 nt, Homo sapiens
  misc_RNA (1)...(19): siRNA sense strand
aaaugugagaaguguggaa

SEQ ID NO: 2593570 - RNA, 19 nt, Homo sapiens
  misc_RNA (1)...(19): siRNA sense strand
ccuaaaggaagaaaaguuu

SEQ ID NO: 2593571 - RNA, 19 nt, Homo sapiens
  misc_RNA (1)...(19): siRNA sense strand
ucagcaaauucaucagaga

SEQ ID NO: 2593572 - RNA, 19 nt, Homo sapiens
  misc_RNA (1)...(19): siRNA sense strand
cgguacaaaugugaggaau

SEQ ID NO: 2593573 - RNA, 19 nt, Homo sapiens
  misc_RNA (1)...(19): siRNA sense strand
ggaagaagcaagugggcau

SEQ ID NO: 2593574 - RNA, 19 nt, Homo sapiens
  misc_RNA (1)...(19): siRNA sense strand
gcaaauacgacaugggcau

SEQ ID NO: 2593575 - RNA, 19 nt, Homo sapiens
  misc_RNA (1)...(19): siRNA sense strand
uggacaagcgggagggcaa

SEQ ID NO: 2593576 - RNA, 19 nt, Homo sapiens
  misc_RNA (1)...(19): siRNA sense strand
aggaggugcuggaggacau

SEQ ID NO: 2593577 - RNA, 19 nt, Homo sapiens
  misc_RNA (1)...(19): siRNA sense strand
aggaggaggacgaggcuga

SEQ ID NO: 2593578 - RNA, 19 nt, Homo sapiens
  misc_RNA (1)...(19): siRNA sense strand
cggcugaagaccaaggaca

SEQ ID NO: 2593579 - RNA, 19 nt, Homo sapiens
  misc_RNA (1)...(19): siRNA sense strand
gagucauccuggagaacca

SEQ ID NO: 2593580 - RNA, 19 nt, Homo sapiens
  misc_RNA (1)...(19): siRNA sense strand
aggacgaggcugaggagga

SEQ ID NO: 2593581 - RNA, 19 nt, Homo sapiens
  misc_RNA (1)...(19): siRNA sense strand
gagacaagugcguggucau

SEQ ID NO: 2593582 - RNA, 19 nt, Homo sapiens
  misc_RNA (1)...(19): siRNA sense strand
ucaaggaggugcuggagga

SEQ ID NO: 2593583 - RNA, 19 nt, Homo sapiens
  misc_RNA (1)...(19): siRNA sense strand
agccagaggaggaggacga

SEQ ID NO: 2593584 - RNA, 19 nt, Homo sapiens
  misc_RNA (1)...(19): siRNA sense strand
ccaccaucugggacgauaa

SEQ ID NO: 2593585 - RNA, 19 nt, Homo sapiens
  misc_RNA (1)...(19): siRNA sense strand
agaucuacgaggagagcca

SEQ ID NO: 2593586 - RNA, 19 nt, Homo sapiens
  misc_RNA (1)...(19): siRNA sense strand
uugcaggcuucgaggacuu

SEQ ID NO: 2593587 - RNA, 19 nt, Homo sapiens
  misc_RNA (1)...(19): siRNA sense strand
gggaggacgccuuugccaa

SEQ ID NO: 2593588 - RNA, 19 nt, Homo sapiens
  misc_RNA (1)...(19): siRNA sense strand
ccgguaucgaggagaucua

SEQ ID NO: 2593589 - RNA, 19 nt, Homo sapiens
  misc_RNA (1)...(19): siRNA sense strand
agaccaaggacaggaagaa

SEQ ID NO: 2593590 - RNA, 19 nt, Homo sapiens
  misc_RNA (1)...(19): siRNA sense strand
ccaccaaagaccugcgacu

SEQ ID NO: 2593591 - RNA, 19 nt, Homo sapiens
  misc_RNA (1)...(19): siRNA sense strand
accaagagaaagcgggaca

SEQ ID NO: 2593592 - RNA, 19 nt, Homo sapiens
  misc_RNA (1)...(19): siRNA sense strand
gcauugugguucagcgucu

SEQ ID NO: 2593593 - RNA, 19 nt, Homo sapiens
  misc_RNA (1)...(19): siRNA sense strand
gcaagaucaaguacgguga

SEQ ID NO: 2593594 - RNA, 19 nt, Homo sapiens
  misc_RNA (1)...(19): siRNA sense strand
gcgcaggaggguaaggacu

SEQ ID NO: 2593595 - RNA, 19 nt, Homo sapiens
  misc_RNA (1)...(19): siRNA sense strand
ccaccaagagaaagcggga

SEQ ID NO: 2593596 - RNA, 19 nt, Homo sapiens
  misc_RNA (1)...(19): siRNA sense strand
ccgccauggacagggauua

SEQ ID NO: 2593597 - RNA, 19 nt, Homo sapiens
  misc_RNA (1)...(19): siRNA sense strand
acaugagccgcuuggguau

SEQ ID NO: 2593598 - RNA, 19 nt, Homo sapiens
  misc_RNA (1)...(19): siRNA sense strand
acgugaaccucagggagaa

SEQ ID NO: 2593599 - RNA, 19 nt, Homo sapiens
  misc_RNA (1)...(19): siRNA sense strand
uggaggugcacaagcagaa

SEQ ID NO: 2593600 - RNA, 19 nt, Homo sapiens
  misc_RNA (1)...(19): siRNA sense strand
gaggagagccagcaggugu

SEQ ID NO: 2593601 - RNA, 19 nt, Homo sapiens
  misc_RNA (1)...(19): siRNA sense strand
aguacgagcagauggucaa

SEQ ID NO: 2593602 - RNA, 19 nt, Homo sapiens
  misc_RNA (1)...(19): siRNA sense strand
cagaaauugcugaggcacu

SEQ ID NO: 2593603 - RNA, 19 nt, Homo sapiens
  misc_RNA (1)...(19): siRNA sense strand
gccagaaauugcugaggca

SEQ ID NO: 2593604 - RNA, 19 nt, Homo sapiens
  misc_RNA (1)...(19): siRNA sense strand
acgaggaguacgagcagau

SEQ ID NO: 2593605 - RNA, 19 nt, Homo sapiens
  misc_RNA (1)...(19): siRNA sense strand
cggaguucacagaggacga

SEQ ID NO: 2593606 - RNA, 19 nt, Homo sapiens
  misc_RNA (1)...(19): siRNA sense strand
gaguacgagcagaugguca

SEQ ID NO: 2593607 - RNA, 19 nt, Homo sapiens
  misc_RNA (1)...(19): siRNA sense strand
aagaaaaggcacugaccau

SEQ ID NO: 2593608 - RNA, 19 nt, Homo sapiens
  misc_RNA (1)...(19): siRNA sense strand
uccucaacuuccagaacaa

SEQ ID NO: 2593609 - RNA, 19 nt, Homo sapiens
  misc_RNA (1)...(19): siRNA sense strand
agaugcugccagagaguga

SEQ ID NO: 2593610 - RNA, 19 nt, Homo sapiens
  misc_RNA (1)...(19): siRNA sense strand
cuuaaauagugcagcaaau

SEQ ID NO: 2593611 - RNA, 19 nt, Homo sapiens
  misc_RNA (1)...(19): siRNA sense strand
gcaaauaaacugaucccaa

SEQ ID NO: 2593612 - RNA, 19 nt, Homo sapiens
  misc_RNA (1)...(19): siRNA sense strand
accaguagguagaggaaga

SEQ ID NO: 2593613 - RNA, 19 nt, Homo sapiens
  misc_RNA (1)...(19): siRNA sense strand
gugaaaaggauuuggugaa

SEQ ID NO: 2593614 - RNA, 19 nt, Homo sapiens
  misc_RNA (1)...(19): siRNA sense strand
ccucaugauggaagaagaa

SEQ ID NO: 2593615 - RNA, 19 nt, Homo sapiens
  misc_RNA (1)...(19): siRNA sense strand
aggcaaaaguagaugcauu

SEQ ID NO: 2593616 - RNA, 19 nt, Homo sapiens
  misc_RNA (1)...(19): siRNA sense strand
cagaacugcagaagggcaa

SEQ ID NO: 2593617 - RNA, 19 nt, Homo sapiens
  misc_RNA (1)...(19): siRNA sense strand
ccuaauuaucucauggcua

SEQ ID NO: 2593618 - RNA, 19 nt, Homo sapiens
  misc_RNA (1)...(19): siRNA sense strand
guaaacaaccuucaggcaa

SEQ ID NO: 2593619 - RNA, 19 nt, Homo sapiens
  misc_RNA (1)...(19): siRNA sense strand
aagaagaaauggaacgagu

SEQ ID NO: 2593620 - RNA, 19 nt, Homo sapiens
  misc_RNA (1)...(19): siRNA sense strand
guaaagguacugaaggaga

SEQ ID NO: 2593621 - RNA, 19 nt, Homo sapiens
  misc_RNA (1)...(19): siRNA sense strand
gaguaaaacagaaaaguga

SEQ ID NO: 2593622 - RNA, 19 nt, Homo sapiens
  misc_RNA (1)...(19): siRNA sense strand
uggaauuggcuaugaagau

SEQ ID NO: 2593623 - RNA, 19 nt, Homo sapiens
  misc_RNA (1)...(19): siRNA sense strand
gguuggaguuauagauuuu

SEQ ID NO: 2593624 - RNA, 19 nt, Homo sapiens
  misc_RNA (1)...(19): siRNA sense strand
agaagaacuauguagaaga

SEQ ID NO: 2593625 - RNA, 19 nt, Homo sapiens
  misc_RNA (1)...(19): siRNA sense strand
ccuuaaauagugcagcaaa

SEQ ID NO: 2593626 - RNA, 19 nt, Homo sapiens
  misc_RNA (1)...(19): siRNA sense strand
guaugaaaggagaagacuu

SEQ ID NO: 2593627 - RNA, 19 nt, Homo sapiens
  misc_RNA (1)...(19): siRNA sense strand
cggucagauuacugcaauu

SEQ ID NO: 2593628 - RNA, 19 nt, Homo sapiens
  misc_RNA (1)...(19): siRNA sense strand
gcauuuaaaagaagagaca

SEQ ID NO: 2593629 - RNA, 19 nt, Homo sapiens
  misc_RNA (1)...(19): siRNA sense strand
ccauuaaacaacuugaaca

SEQ ID NO: 2593630 - RNA, 19 nt, Homo sapiens
  misc_RNA (1)...(19): siRNA sense strand
aagugaagcaagaaagcau

SEQ ID NO: 2593631 - RNA, 19 nt, Homo sapiens
  misc_RNA (1)...(19): siRNA sense strand
agaacuauguagaagaacu

SEQ ID NO: 2593632 - RNA, 19 nt, Homo sapiens
  misc_RNA (1)...(19): siRNA sense strand
guacugaaggagacgguca

SEQ ID NO: 2593633 - RNA, 19 nt, Homo sapiens
  misc_RNA (1)...(19): siRNA sense strand
gaguuaaagaggaaaguuc

SEQ ID NO: 2593634 - RNA, 19 nt, Homo sapiens
  misc_RNA (1)...(19): siRNA sense strand
gcuaugaagaugcuggaga

SEQ ID NO: 2593635 - RNA, 19 nt, Homo sapiens
  misc_RNA (1)...(19): siRNA sense strand
aguucagacuuaggaguaa

SEQ ID NO: 2593636 - RNA, 19 nt, Homo sapiens
  misc_RNA (1)...(19): siRNA sense strand
ucggaagggucccaagcaa

SEQ ID NO: 2593637 - RNA, 19 nt, Homo sapiens
  misc_RNA (1)...(19): siRNA sense strand
aggagauggaauuggcuau

SEQ ID NO: 2593638 - RNA, 19 nt, Homo sapiens
  misc_RNA (1)...(19): siRNA sense strand
uguuaaagaucuuccagga

SEQ ID NO: 2593639 - RNA, 19 nt, Homo sapiens
  misc_RNA (1)...(19): siRNA sense strand
aagaagaaggagccauaau

SEQ ID NO: 2593640 - RNA, 19 nt, Homo sapiens
  misc_RNA (1)...(19): siRNA sense strand
aaaaggauuuggugaaaca

SEQ ID NO: 2593641 - RNA, 19 nt, Homo sapiens
  misc_RNA (1)...(19): siRNA sense strand
cucucagguuggaguuaua

SEQ ID NO: 2593642 - RNA, 19 nt, Homo sapiens
  misc_RNA (1)...(19): siRNA sense strand
cuuacaagaagaaauggaa

SEQ ID NO: 2593643 - RNA, 19 nt, Homo sapiens
  misc_RNA (1)...(19): siRNA sense strand
agauggaauuggcuaugaa

SEQ ID NO: 2593644 - RNA, 19 nt, Homo sapiens
  misc_RNA (1)...(19): siRNA sense strand
uggagaaggaugucuguga

SEQ ID NO: 2593645 - RNA, 19 nt, Homo sapiens
  misc_RNA (1)...(19): siRNA sense strand
ugaacaaagugaaaaggau

SEQ ID NO: 2593646 - RNA, 19 nt, Homo sapiens
  misc_RNA (1)...(19): siRNA sense strand
gcaaauuccgaguguccau

SEQ ID NO: 2593647 - RNA, 19 nt, Homo sapiens
  misc_RNA (1)...(19): siRNA sense strand
uagaaaagcuuguuccaga

SEQ ID NO: 2593648 - RNA, 19 nt, Homo sapiens
  misc_RNA (1)...(19): siRNA sense strand
agguuggaguuauagauuu

SEQ ID NO: 2593649 - RNA, 19 nt, Homo sapiens
  misc_RNA (1)...(19): siRNA sense strand
acaccaguagguagaggaa

SEQ ID NO: 2593650 - RNA, 19 nt, Homo sapiens
  misc_RNA (1)...(19): siRNA sense strand
acacuaaacugacagagga

SEQ ID NO: 2593651 - RNA, 19 nt, Homo sapiens
  misc_RNA (1)...(19): siRNA sense strand
gugaauucuacgaacccaa

SEQ ID NO: 2593652 - RNA, 19 nt, Homo sapiens
  misc_RNA (1)...(19): siRNA sense strand
uugagaaagaacuggagau

SEQ ID NO: 2593653 - RNA, 19 nt, Homo sapiens
  misc_RNA (1)...(19): siRNA sense strand
ugcgagagcuggaugacau

SEQ ID NO: 2593654 - RNA, 19 nt, Homo sapiens
  misc_RNA (1)...(19): siRNA sense strand
cuuaggaguaaaacagaaa

SEQ ID NO: 2593655 - RNA, 19 nt, Homo sapiens
  misc_RNA (1)...(19): siRNA sense strand
ugaccacgcugcugggcaa

SEQ ID NO: 2593656 - RNA, 19 nt, Homo sapiens
  misc_RNA (1)...(19): siRNA sense strand
acacaguggcggagaaggu

SEQ ID NO: 2593657 - RNA, 19 nt, Homo sapiens
  misc_RNA (1)...(19): siRNA sense strand
aggagaagcucgcggagac

SEQ ID NO: 2593658 - RNA, 19 nt, Homo sapiens
  misc_RNA (1)...(19): siRNA sense strand
agguaaacaacgaggguga

SEQ ID NO: 2593659 - RNA, 19 nt, Homo sapiens
  misc_RNA (1)...(19): siRNA sense strand
cgggagaagcugauggaga

SEQ ID NO: 2593660 - RNA, 19 nt, Homo sapiens
  misc_RNA (1)...(19): siRNA sense strand
ggacgaacccggauggcau

SEQ ID NO: 2593661 - RNA, 19 nt, Homo sapiens
  misc_RNA (1)...(19): siRNA sense strand
uggcugaaguggacggaca

SEQ ID NO: 2593662 - RNA, 19 nt, Homo sapiens
  misc_RNA (1)...(19): siRNA sense strand
acaacgagggugaggguga

SEQ ID NO: 2593663 - RNA, 19 nt, Homo sapiens
  misc_RNA (1)...(19): siRNA sense strand
ccaucgugcagaagguaaa

SEQ ID NO: 2593664 - RNA, 19 nt, Homo sapiens
  misc_RNA (1)...(19): siRNA sense strand
cggaggagcgagagcauga

SEQ ID NO: 2593665 - RNA, 19 nt, Homo sapiens
  misc_RNA (1)...(19): siRNA sense strand
caaugagcucaaagugaaa

SEQ ID NO: 2593666 - RNA, 19 nt, Homo sapiens
  misc_RNA (1)...(19): siRNA sense strand
aggcagggaaggagaacau

SEQ ID NO: 2593667 - RNA, 19 nt, Homo sapiens
  misc_RNA (1)...(19): siRNA sense strand
acaccaugucggagauaau

SEQ ID NO: 2593668 - RNA, 19 nt, Homo sapiens
  misc_RNA (1)...(19): siRNA sense strand
ucgugaaagaggagcucaa

SEQ ID NO: 2593669 - RNA, 19 nt, Homo sapiens
  misc_RNA (1)...(19): siRNA sense strand
cugagaagaacaagcguga

SEQ ID NO: 2593670 - RNA, 19 nt, Homo sapiens
  misc_RNA (1)...(19): siRNA sense strand
auggagauguugaagguga

SEQ ID NO: 2593671 - RNA, 19 nt, Homo sapiens
  misc_RNA (1)...(19): siRNA sense strand
gcgagagcaugaagcugua

SEQ ID NO: 2593672 - RNA, 19 nt, Homo sapiens
  misc_RNA (1)...(19): siRNA sense strand
aggacgugaucgaggagau

SEQ ID NO: 2593673 - RNA, 19 nt, Homo sapiens
  misc_RNA (1)...(19): siRNA sense strand
augccaugcuggaggaguu

SEQ ID NO: 2593674 - RNA, 19 nt, Homo sapiens
  misc_RNA (1)...(19): siRNA sense strand
agucggagauccuggacga

SEQ ID NO: 2593675 - RNA, 19 nt, Homo sapiens
  misc_RNA (1)...(19): siRNA sense strand
ucgaagacgagcaguccaa

SEQ ID NO: 2593676 - RNA, 19 nt, Homo sapiens
  misc_RNA (1)...(19): siRNA sense strand
aguuugacgagcacaauaa

SEQ ID NO: 2593677 - RNA, 19 nt, Homo sapiens
  misc_RNA (1)...(19): siRNA sense strand
gggaaggagaacaugaagu

SEQ ID NO: 2593678 - RNA, 19 nt, Homo sapiens
  misc_RNA (1)...(19): siRNA sense strand
ccgagaaggagaggcgcua

SEQ ID NO: 2593679 - RNA, 19 nt, Homo sapiens
  misc_RNA (1)...(19): siRNA sense strand
gggugucugagaagaacaa

SEQ ID NO: 2593680 - RNA, 19 nt, Homo sapiens
  misc_RNA (1)...(19): siRNA sense strand
ugaaggugacggagcccua

SEQ ID NO: 2593681 - RNA, 19 nt, Homo sapiens
  misc_RNA (1)...(19): siRNA sense strand
agauauucucuacgucaaa

SEQ ID NO: 2593682 - RNA, 19 nt, Homo sapiens
  misc_RNA (1)...(19): siRNA sense strand
gcaacaaguuugacgguga

SEQ ID NO: 2593683 - RNA, 19 nt, Homo sapiens
  misc_RNA (1)...(19): siRNA sense strand
cgguuuaggagaagagcaa

SEQ ID NO: 2593684 - RNA, 19 nt, Homo sapiens
  misc_RNA (1)...(19): siRNA sense strand
gcaugaagaugaaggcgau

SEQ ID NO: 2593685 - RNA, 19 nt, Homo sapiens
  misc_RNA (1)...(19): siRNA sense strand
guuuaggagaagagcaaaa

SEQ ID NO: 2593686 - RNA, 19 nt, Homo sapiens
  misc_RNA (1)...(19): siRNA sense strand
aagaagaagaagaaggauc

SEQ ID NO: 2593687 - RNA, 19 nt, Homo sapiens
  misc_RNA (1)...(19): siRNA sense strand
ccaccaugcagcaaggauu

SEQ ID NO: 2593688 - RNA, 19 nt, Homo sapiens
  misc_RNA (1)...(19): siRNA sense strand
agaagaagaaggaucccaa

SEQ ID NO: 2593689 - RNA, 19 nt, Homo sapiens
  misc_RNA (1)...(19): siRNA sense strand
gcgaagaaggaguaccuga

SEQ ID NO: 2593690 - RNA, 19 nt, Homo sapiens
  misc_RNA (1)...(19): siRNA sense strand
cuucaaugugggacgguuu

SEQ ID NO: 2593691 - RNA, 19 nt, Homo sapiens
  misc_RNA (1)...(19): siRNA sense strand
gguuugaauaugggaggaa

SEQ ID NO: 2593692 - RNA, 19 nt, Homo sapiens
  misc_RNA (1)...(19): siRNA sense strand
gggcaugcagagggacaaa

SEQ ID NO: 2593693 - RNA, 19 nt, Homo sapiens
  misc_RNA (1)...(19): siRNA sense strand
gagaacauguauaugagca

SEQ ID NO: 2593694 - RNA, 19 nt, Homo sapiens
  misc_RNA (1)...(19): siRNA sense strand
agaacauguauaugagcau

SEQ ID NO: 2593695 - RNA, 19 nt, Homo sapiens
  misc_RNA (1)...(19): siRNA sense strand
ccuggaagcaagucugcaa

SEQ ID NO: 2593696 - RNA, 19 nt, Homo sapiens
  misc_RNA (1)...(19): siRNA sense strand
aguuugacggugagaacau

SEQ ID NO: 2593697 - RNA, 19 nt, Homo sapiens
  misc_RNA (1)...(19): siRNA sense strand
ccugaaugaaguugagucu

SEQ ID NO: 2593698 - RNA, 19 nt, Homo sapiens
  misc_RNA (1)...(19): siRNA sense strand
ggccaaaauccaaacgcua

SEQ ID NO: 2593699 - RNA, 19 nt, Homo sapiens
  misc_RNA (1)...(19): siRNA sense strand
agaaggaguaccugaagca

SEQ ID NO: 2593700 - RNA, 19 nt, Homo sapiens
  misc_RNA (1)...(19): siRNA sense strand
cagagcaugcagugaacaa

SEQ ID NO: 2593701 - RNA, 19 nt, Homo sapiens
  misc_RNA (1)...(19): siRNA sense strand
ucaagauggacgugcacau

SEQ ID NO: 2593702 - RNA, 19 nt, Homo sapiens
  misc_RNA (1)...(19): siRNA sense strand
aguugaacguaguagagca

SEQ ID NO: 2593703 - RNA, 19 nt, Homo sapiens
  misc_RNA (1)...(19): siRNA sense strand
aaguguggacagcaagaaa

SEQ ID NO: 2593704 - RNA, 19 nt, Homo sapiens
  misc_RNA (1)...(19): siRNA sense strand
gcgaggaaggugaggacaa

SEQ ID NO: 2593705 - RNA, 19 nt, Homo sapiens
  misc_RNA (1)...(19): siRNA sense strand
aagaagaggaacaggacaa

SEQ ID NO: 2593706 - RNA, 19 nt, Homo sapiens
  misc_RNA (1)...(19): siRNA sense strand
aguaagaagcggaagaaaa

SEQ ID NO: 2593707 - RNA, 19 nt, Homo sapiens
  misc_RNA (1)...(19): siRNA sense strand
ggguagaggugcuggugga

SEQ ID NO: 2593708 - RNA, 19 nt, Homo sapiens
  misc_RNA (1)...(19): siRNA sense strand
gugcagaggacaagagcga

SEQ ID NO: 2593709 - RNA, 19 nt, Homo sapiens
  misc_RNA (1)...(19): siRNA sense strand
ucaagaagcuggugggauc

SEQ ID NO: 2593710 - RNA, 19 nt, Homo sapiens
  misc_RNA (1)...(19): siRNA sense strand
ggcaggaagaagaggaaca

SEQ ID NO: 2593711 - RNA, 19 nt, Homo sapiens
  misc_RNA (1)...(19): siRNA sense strand
ggaagcagcugaugggcca

SEQ ID NO: 2593712 - RNA, 19 nt, Homo sapiens
  misc_RNA (1)...(19): siRNA sense strand
ugaaggagcuggaggccca

SEQ ID NO: 2593713 - RNA, 19 nt, Homo sapiens
  misc_RNA (1)...(19): siRNA sense strand
aggaacaggacaaaggcua

SEQ ID NO: 2593714 - RNA, 19 nt, Homo sapiens
  misc_RNA (1)...(19): siRNA sense strand
cggcugaggaaauggauca

SEQ ID NO: 2593715 - RNA, 19 nt, Homo sapiens
  misc_RNA (1)...(19): siRNA sense strand
ggcgagacgagaagaacaa

SEQ ID NO: 2593716 - RNA, 19 nt, Homo sapiens
  misc_RNA (1)...(19): siRNA sense strand
uggaggugcuagugaccaa

SEQ ID NO: 2593717 - RNA, 19 nt, Homo sapiens
  misc_RNA (1)...(19): siRNA sense strand
acagaagcucagagaguga

SEQ ID NO: 2593718 - RNA, 19 nt, Homo sapiens
  misc_RNA (1)...(19): siRNA sense strand
ccaaaacugcagaagaaaa

SEQ ID NO: 2593719 - RNA, 19 nt, Homo sapiens
  misc_RNA (1)...(19): siRNA sense strand
caucaggugaagaaggcaa

SEQ ID NO: 2593720 - RNA, 19 nt, Homo sapiens
  misc_RNA (1)...(19): siRNA sense strand
agaccaaggcgcagcauca

SEQ ID NO: 2593721 - RNA, 19 nt, Homo sapiens
  misc_RNA (1)...(19): siRNA sense strand
ugaagggugcagaggacaa

SEQ ID NO: 2593722 - RNA, 19 nt, Homo sapiens
  misc_RNA (1)...(19): siRNA sense strand
cccagaucccugagacaaa

SEQ ID NO: 2593723 - RNA, 19 nt, Homo sapiens
  misc_RNA (1)...(19): siRNA sense strand
gcugugaccugcuggguga

SEQ ID NO: 2593724 - RNA, 19 nt, Homo sapiens
  misc_RNA (1)...(19): siRNA sense strand
gcucagagagugaagagga

SEQ ID NO: 2593725 - RNA, 19 nt, Homo sapiens
  misc_RNA (1)...(19): siRNA sense strand
gauucuugccagagacgaa

SEQ ID NO: 2593726 - RNA, 19 nt, Homo sapiens
  misc_RNA (1)...(19): siRNA sense strand
gagaagaacaagcugcaga

SEQ ID NO: 2593727 - RNA, 19 nt, Homo sapiens
  misc_RNA (1)...(19): siRNA sense strand
agagugaagaggagagcga

SEQ ID NO: 2593728 - RNA, 19 nt, Homo sapiens
  misc_RNA (1)...(19): siRNA sense strand
gagacgaagaagcgcaaga

SEQ ID NO: 2593729 - RNA, 19 nt, Homo sapiens
  misc_RNA (1)...(19): siRNA sense strand
uggagaagaaggaugccaa

SEQ ID NO: 2593730 - RNA, 19 nt, Homo sapiens
  misc_RNA (1)...(19): siRNA sense strand
caguaagaagcggaagaaa

SEQ ID NO: 2593731 - RNA, 19 nt, Homo sapiens
  misc_RNA (1)...(19): siRNA sense strand
aggaagaagaggaacagga

SEQ ID NO: 2593732 - RNA, 19 nt, Homo sapiens
  misc_RNA (1)...(19): siRNA sense strand
gcacugaugaagucgguga

SEQ ID NO: 2593733 - RNA, 19 nt, Homo sapiens
  misc_RNA (1)...(19): siRNA sense strand
cugugaagaaggaccgcaa

SEQ ID NO: 2593734 - RNA, 19 nt, Homo sapiens
  misc_RNA (1)...(19): siRNA sense strand
gggaacagcugaugaccgu

SEQ ID NO: 2593735 - RNA, 19 nt, Homo sapiens
  misc_RNA (1)...(19): siRNA sense strand
cggcgagacgagaagaaca

SEQ ID NO: 2593736 - RNA, 19 nt, Homo sapiens
  misc_RNA (1)...(19): siRNA sense strand
agaaggaugccaaggagau

SEQ ID NO: 2593737 - RNA, 19 nt, Homo sapiens
  misc_RNA (1)...(19): siRNA sense strand
uggugaaugugcugaagau

SEQ ID NO: 2593738 - RNA, 19 nt, Homo sapiens
  misc_RNA (1)...(19): siRNA sense strand
gggacguggaucagggcuu

SEQ ID NO: 2593739 - RNA, 19 nt, Homo sapiens
  misc_RNA (1)...(19): siRNA sense strand
gggccaagaagaaagcaca

SEQ ID NO: 2593740 - RNA, 19 nt, Homo sapiens
  misc_RNA (1)...(19): siRNA sense strand
gcugaagggugcagaggac

SEQ ID NO: 2593741 - RNA, 19 nt, Homo sapiens
  misc_RNA (1)...(19): siRNA sense strand
gugaagaaggcaaugcuga

SEQ ID NO: 2593742 - RNA, 19 nt, Homo sapiens
  misc_RNA (1)...(19): siRNA sense strand
aggaaaagucugggagaga

SEQ ID NO: 2593743 - RNA, 19 nt, Homo sapiens
  misc_RNA (1)...(19): siRNA sense strand
gaccagugaggaugagaau

SEQ ID NO: 2593744 - RNA, 19 nt, Homo sapiens
  misc_RNA (1)...(19): siRNA sense strand
acgaagaagcgcaagaaac

SEQ ID NO: 2593745 - RNA, 19 nt, Homo sapiens
  misc_RNA (1)...(19): siRNA sense strand
cgaagggguccgagaugaa

SEQ ID NO: 2593746 - RNA, 19 nt, Homo sapiens
  misc_RNA (1)...(19): siRNA sense strand
gcacugagcuccuuccuga

SEQ ID NO: 2593747 - RNA, 19 nt, Homo sapiens
  misc_RNA (1)...(19): siRNA sense strand
acaagagcgaggaagguga

SEQ ID NO: 2593748 - RNA, 19 nt, Homo sapiens
  misc_RNA (1)...(19): siRNA sense strand
ccaaacaggagcaggaccu

SEQ ID NO: 2593749 - RNA, 19 nt, Homo sapiens
  misc_RNA (1)...(19): siRNA sense strand
gugcaugagacacaggaga

SEQ ID NO: 2593750 - RNA, 19 nt, Homo sapiens
  misc_RNA (1)...(19): siRNA sense strand
cagagacgaagaagcgcaa

SEQ ID NO: 2593751 - RNA, 19 nt, Homo sapiens
  misc_RNA (1)...(19): siRNA sense strand
uggagauggaggaggccuu

SEQ ID NO: 2593752 - RNA, 19 nt, Homo sapiens
  misc_RNA (1)...(19): siRNA sense strand
ugcaugagacacaggagaa

SEQ ID NO: 2593753 - RNA, 19 nt, Homo sapiens
  misc_RNA (1)...(19): siRNA sense strand
acagugagaacgaggagga

SEQ ID NO: 2593754 - RNA, 19 nt, Homo sapiens
  misc_RNA (1)...(19): siRNA sense strand
gaagaagaggaacaggaca

SEQ ID NO: 2593755 - RNA, 19 nt, Homo sapiens
  misc_RNA (1)...(19): siRNA sense strand
cacggaaccugcaggccaa

SEQ ID NO: 2593756 - RNA, 19 nt, Homo sapiens
  misc_RNA (1)...(19): siRNA sense strand
gauaauaggcaaauggcau

SEQ ID NO: 2593757 - RNA, 19 nt, Homo sapiens
  misc_RNA (1)...(19): siRNA sense strand
ggguuacgucacugggaua

SEQ ID NO: 2593758 - RNA, 19 nt, Homo sapiens
  misc_RNA (1)...(19): siRNA sense strand
gcaaauggcaucuuggaca

SEQ ID NO: 2593759 - RNA, 19 nt, Homo sapiens
  misc_RNA (1)...(19): siRNA sense strand
agaaagagguggugcggag

SEQ ID NO: 2593760 - RNA, 19 nt, Homo sapiens
  misc_RNA (1)...(19): siRNA sense strand
gggcagaaacaaaggacac

SEQ ID NO: 2593761 - RNA, 19 nt, Homo sapiens
  misc_RNA (1)...(19): siRNA sense strand
uguuaagcgugcuggacau

SEQ ID NO: 2593762 - RNA, 19 nt, Homo sapiens
  misc_RNA (1)...(19): siRNA sense strand
aaacaaaggacacugccaa

SEQ ID NO: 2593763 - RNA, 19 nt, Homo sapiens
  misc_RNA (1)...(19): siRNA sense strand
gcaauggagucacacgcaa

SEQ ID NO: 2593764 - RNA, 19 nt, Homo sapiens
  misc_RNA (1)...(19): siRNA sense strand
acaagaggacagaagccaa

SEQ ID NO: 2593765 - RNA, 19 nt, Homo sapiens
  misc_RNA (1)...(19): siRNA sense strand
ucacugggauaauaggcaa

SEQ ID NO: 2593766 - RNA, 19 nt, Homo sapiens
  misc_RNA (1)...(19): siRNA sense strand
cuucaaagagacuguuaca

SEQ ID NO: 2593767 - RNA, 19 nt, Homo sapiens
  misc_RNA (1)...(19): siRNA sense strand
ugggccagaucaaggacaa

SEQ ID NO: 2593768 - RNA, 19 nt, Homo sapiens
  misc_RNA (1)...(19): siRNA sense strand
ggauaauaggcaaauggca

SEQ ID NO: 2593769 - RNA, 19 nt, Homo sapiens
  misc_RNA (1)...(19): siRNA sense strand
uggacagucuggugggcca

SEQ ID NO: 2593770 - RNA, 19 nt, Homo sapiens
  misc_RNA (1)...(19): siRNA sense strand
cugguuuacaggagacaau

SEQ ID NO: 2593771 - RNA, 19 nt, Homo sapiens
  misc_RNA (1)...(19): siRNA sense strand
gggccagaucaaggacaaa

SEQ ID NO: 2593772 - RNA, 19 nt, Homo sapiens
  misc_RNA (1)...(19): siRNA sense strand
cuguccgccuggagcguua

SEQ ID NO: 2593773 - RNA, 19 nt, Homo sapiens
  misc_RNA (1)...(19): siRNA sense strand
cagcguguccacaggguga

SEQ ID NO: 2593774 - RNA, 19 nt, Homo sapiens
  misc_RNA (1)...(19): siRNA sense strand
gauaauaggcaaauggcau

SEQ ID NO: 2593775 - RNA, 19 nt, Homo sapiens
  misc_RNA (1)...(19): siRNA sense strand
ggguuacgucacugggaua

SEQ ID NO: 2593776 - RNA, 19 nt, Homo sapiens
  misc_RNA (1)...(19): siRNA sense strand
gcaaauggcaucuuggaca

SEQ ID NO: 2593777 - RNA, 19 nt, Homo sapiens
  misc_RNA (1)...(19): siRNA sense strand
agaaagagguggugcggag

SEQ ID NO: 2593778 - RNA, 19 nt, Homo sapiens
  misc_RNA (1)...(19): siRNA sense strand
gggcagaaacaaaggacac

SEQ ID NO: 2593779 - RNA, 19 nt, Homo sapiens
  misc_RNA (1)...(19): siRNA sense strand
uguuaagcgugcuggacau

SEQ ID NO: 2593780 - RNA, 19 nt, Homo sapiens
  misc_RNA (1)...(19): siRNA sense strand
aaacaaaggacacugccaa

SEQ ID NO: 2593781 - RNA, 19 nt, Homo sapiens
  misc_RNA (1)...(19): siRNA sense strand
gcaauggagucacacgcaa

SEQ ID NO: 2593782 - RNA, 19 nt, Homo sapiens
  misc_RNA (1)...(19): siRNA sense strand
acaagaggacagaagccaa

SEQ ID NO: 2593783 - RNA, 19 nt, Homo sapiens
  misc_RNA (1)...(19): siRNA sense strand
ucacugggauaauaggcaa

SEQ ID NO: 2593784 - RNA, 19 nt, Homo sapiens
  misc_RNA (1)...(19): siRNA sense strand
cuucaaagagacuguuaca

SEQ ID NO: 2593785 - RNA, 19 nt, Homo sapiens
  misc_RNA (1)...(19): siRNA sense strand
ugggccagaucaaggacaa

SEQ ID NO: 2593786 - RNA, 19 nt, Homo sapiens
  misc_RNA (1)...(19): siRNA sense strand
ggauaauaggcaaauggca

SEQ ID NO: 2593787 - RNA, 19 nt, Homo sapiens
  misc_RNA (1)...(19): siRNA sense strand
uggacagucuggugggcca

SEQ ID NO: 2593788 - RNA, 19 nt, Homo sapiens
  misc_RNA (1)...(19): siRNA sense strand
cugguuuacaggagacaau

SEQ ID NO: 2593789 - RNA, 19 nt, Homo sapiens
  misc_RNA (1)...(19): siRNA sense strand
gggccagaucaaggacaaa

SEQ ID NO: 2593790 - RNA, 19 nt, Homo sapiens
  misc_RNA (1)...(19): siRNA sense strand
cuguccgccuggagcguua

SEQ ID NO: 2593791 - RNA, 19 nt, Homo sapiens
  misc_RNA (1)...(19): siRNA sense strand
cagcguguccacaggguga

SEQ ID NO: 2593792 - RNA, 19 nt, Homo sapiens
  misc_RNA (1)...(19): siRNA sense strand
ggauaaugcaauagaagcu

SEQ ID NO: 2593793 - RNA, 19 nt, Homo sapiens
  misc_RNA (1)...(19): siRNA sense strand
cuggaagguacuuuagauu

SEQ ID NO: 2593794 - RNA, 19 nt, Homo sapiens
  misc_RNA (1)...(19): siRNA sense strand
aggaagagcaggaggaaac

SEQ ID NO: 2593795 - RNA, 19 nt, Homo sapiens
  misc_RNA (1)...(19): siRNA sense strand
agacugaggaacugggaca

SEQ ID NO: 2593796 - RNA, 19 nt, Homo sapiens
  misc_RNA (1)...(19): siRNA sense strand
gaggaagagcaggaggaaa

SEQ ID NO: 2593797 - RNA, 19 nt, Homo sapiens
  misc_RNA (1)...(19): siRNA sense strand
ccaugggcccugagcguau

SEQ ID NO: 2593798 - RNA, 19 nt, Homo sapiens
  misc_RNA (1)...(19): siRNA sense strand
gugaagaugaagaugagga

SEQ ID NO: 2593799 - RNA, 19 nt, Homo sapiens
  misc_RNA (1)...(19): siRNA sense strand
cugaacaagaggaggugga

SEQ ID NO: 2593800 - RNA, 19 nt, Homo sapiens
  misc_RNA (1)...(19): siRNA sense strand
cagugaggagccugaggaa

SEQ ID NO: 2593801 - RNA, 19 nt, Homo sapiens
  misc_RNA (1)...(19): siRNA sense strand
ggagggagcuacagcguug

SEQ ID NO: 2593802 - RNA, 19 nt, Homo sapiens
  misc_RNA (1)...(19): siRNA sense strand
aggacaauggcuggaguaa

SEQ ID NO: 2593803 - RNA, 19 nt, Homo sapiens
  misc_RNA (1)...(19): siRNA sense strand
aacaagaggagguggaacu

SEQ ID NO: 2593804 - RNA, 19 nt, Homo sapiens
  misc_RNA (1)...(19): siRNA sense strand
cugaggaagagcaggagga

SEQ ID NO: 2593805 - RNA, 19 nt, Homo sapiens
  misc_RNA (1)...(19): siRNA sense strand
agugggaagaugugguaca

SEQ ID NO: 2593806 - RNA, 19 nt, Homo sapiens
  misc_RNA (1)...(19): siRNA sense strand
cuuaagaaucgaaaggaga

SEQ ID NO: 2593807 - RNA, 19 nt, Homo sapiens
  misc_RNA (1)...(19): siRNA sense strand
cggucuaagcauaagagaa

SEQ ID NO: 2593808 - RNA, 19 nt, Homo sapiens
  misc_RNA (1)...(19): siRNA sense strand
agaauauauuuguggcuca

SEQ ID NO: 2593809 - RNA, 19 nt, Homo sapiens
  misc_RNA (1)...(19): siRNA sense strand
aagaaaggacagaggagga

SEQ ID NO: 2593810 - RNA, 19 nt, Homo sapiens
  misc_RNA (1)...(19): siRNA sense strand
aggaaauugacuuagacaa

SEQ ID NO: 2593811 - RNA, 19 nt, Homo sapiens
  misc_RNA (1)...(19): siRNA sense strand
uagacaaacacaagagcau

SEQ ID NO: 2593812 - RNA, 19 nt, Homo sapiens
  misc_RNA (1)...(19): siRNA sense strand
auacaucagaagaggaaaa

SEQ ID NO: 2593813 - RNA, 19 nt, Homo sapiens
  misc_RNA (1)...(19): siRNA sense strand
agaaaacagagguggaaau

SEQ ID NO: 2593814 - RNA, 19 nt, Homo sapiens
  misc_RNA (1)...(19): siRNA sense strand
augcaauauuccacaaaca

SEQ ID NO: 2593815 - RNA, 19 nt, Homo sapiens
  misc_RNA (1)...(19): siRNA sense strand
agaaaggacagaggaggaa

SEQ ID NO: 2593816 - RNA, 19 nt, Homo sapiens
  misc_RNA (1)...(19): siRNA sense strand
gaaagaaaacagaggugga

SEQ ID NO: 2593817 - RNA, 19 nt, Homo sapiens
  misc_RNA (1)...(19): siRNA sense strand
gcuuaagaaucgaaaggag

SEQ ID NO: 2593818 - RNA, 19 nt, Homo sapiens
  misc_RNA (1)...(19): siRNA sense strand
aggaaaugcuuugggacca

SEQ ID NO: 2593819 - RNA, 19 nt, Homo sapiens
  misc_RNA (1)...(19): siRNA sense strand
gagguuaauuccagaccca

SEQ ID NO: 2593820 - RNA, 19 nt, Homo sapiens
  misc_RNA (1)...(19): siRNA sense strand
aaaggacagaggaggaaau

SEQ ID NO: 2593821 - RNA, 19 nt, Homo sapiens
  misc_RNA (1)...(19): siRNA sense strand
cucacaugguguagaacau

SEQ ID NO: 2593822 - RNA, 19 nt, Homo sapiens
  misc_RNA (1)...(19): siRNA sense strand
acagagguggaaauagaaa

SEQ ID NO: 2593823 - RNA, 19 nt, Homo sapiens
  misc_RNA (1)...(19): siRNA sense strand
cguauagaauguuugacca

SEQ ID NO: 2593824 - RNA, 19 nt, Homo sapiens
  misc_RNA (1)...(19): siRNA sense strand
uaagaaucgaaaggagaaa

SEQ ID NO: 2593825 - RNA, 19 nt, Homo sapiens
  misc_RNA (1)...(19): siRNA sense strand
ccucugagauguugggaga

SEQ ID NO: 2593826 - RNA, 19 nt, Homo sapiens
  misc_RNA (1)...(19): siRNA sense strand
guacuuaaggccagggcaa

SEQ ID NO: 2593827 - RNA, 19 nt, Homo sapiens
  misc_RNA (1)...(19): siRNA sense strand
gcaacaaagucaagagguc

SEQ ID NO: 2593828 - RNA, 19 nt, Homo sapiens
  misc_RNA (1)...(19): siRNA sense strand
ggauuauaggugugagcca

SEQ ID NO: 2593829 - RNA, 19 nt, Homo sapiens
  misc_RNA (1)...(19): siRNA sense strand
cuuagcacgcagugaggaa

SEQ ID NO: 2593830 - RNA, 19 nt, Homo sapiens
  misc_RNA (1)...(19): siRNA sense strand
caacaaagucaagagguca

SEQ ID NO: 2593831 - RNA, 19 nt, Homo sapiens
  misc_RNA (1)...(19): siRNA sense strand
aacaaagucaagaggucaa

SEQ ID NO: 2593832 - RNA, 19 nt, Homo sapiens
  misc_RNA (1)...(19): siRNA sense strand
uuuaguagagacaggguuu

SEQ ID NO: 2593833 - RNA, 19 nt, Homo sapiens
  misc_RNA (1)...(19): siRNA sense strand
cugccugcguugugcuaaa

SEQ ID NO: 2593834 - RNA, 19 nt, Homo sapiens
  misc_RNA (1)...(19): siRNA sense strand
gaaauagaggcgaggccga

SEQ ID NO: 2593835 - RNA, 19 nt, Homo sapiens
  misc_RNA (1)...(19): siRNA sense strand
gccuguuguugcagaggaa

SEQ ID NO: 2593836 - RNA, 19 nt, Homo sapiens
  misc_RNA (1)...(19): siRNA sense strand
ccgccauccugcuggugaa

SEQ ID NO: 2593837 - RNA, 19 nt, Homo sapiens
  misc_RNA (1)...(19): siRNA sense strand
ugguggaugcguugaagaa

SEQ ID NO: 2593838 - RNA, 19 nt, Homo sapiens
  misc_RNA (1)...(19): siRNA sense strand
cugaggacgcugaggcuga

SEQ ID NO: 2593839 - RNA, 19 nt, Homo sapiens
  misc_RNA (1)...(19): siRNA sense strand
cguugaagaacuaugagau

SEQ ID NO: 2593840 - RNA, 19 nt, Homo sapiens
  misc_RNA (1)...(19): siRNA sense strand
ccguguacgccgucaccaa

SEQ ID NO: 2593841 - RNA, 19 nt, Homo sapiens
  misc_RNA (1)...(19): siRNA sense strand
aauaguagcucaaguggca

SEQ ID NO: 2593842 - RNA, 19 nt, Homo sapiens
  misc_RNA (1)...(19): siRNA sense strand
ugggaauaagccacaguaa

SEQ ID NO: 2593843 - RNA, 19 nt, Homo sapiens
  misc_RNA (1)...(19): siRNA sense strand
acgcugaauaguagcucaa

SEQ ID NO: 2593844 - RNA, 19 nt, Homo sapiens
  misc_RNA (1)...(19): siRNA sense strand
ggaaugggaauaagccaca

SEQ ID NO: 2593845 - RNA, 19 nt, Homo sapiens
  misc_RNA (1)...(19): siRNA sense strand
gggcgaugagguugggaaa

SEQ ID NO: 2593846 - RNA, 19 nt, Homo sapiens
  misc_RNA (1)...(19): siRNA sense strand
ccagagaacacgaagagga

SEQ ID NO: 2593847 - RNA, 19 nt, Homo sapiens
  misc_RNA (1)...(19): siRNA sense strand
aggugguacaagacagaaa

SEQ ID NO: 2593848 - RNA, 19 nt, Homo sapiens
  misc_RNA (1)...(19): siRNA sense strand
acgaagaggagcuggacca

SEQ ID NO: 2593849 - RNA, 19 nt, Homo sapiens
  misc_RNA (1)...(19): siRNA sense strand
gcaagaaagcacagacccu

SEQ ID NO: 2593850 - RNA, 19 nt, Homo sapiens
  misc_RNA (1)...(19): siRNA sense strand
ucaaacagaugcagcagca

SEQ ID NO: 2593851 - RNA, 19 nt, Homo sapiens
  misc_RNA (1)...(19): siRNA sense strand
ugggagucacuguggagaa

SEQ ID NO: 2593852 - RNA, 19 nt, Homo sapiens
  misc_RNA (1)...(19): siRNA sense strand
cuuaggaggacuggcguua

SEQ ID NO: 2593853 - RNA, 19 nt, Homo sapiens
  misc_RNA (1)...(19): siRNA sense strand
cagcaagcccagagagaaa

SEQ ID NO: 2593854 - RNA, 19 nt, Homo sapiens
  misc_RNA (1)...(19): siRNA sense strand
acucaaaggacaucaguaa

SEQ ID NO: 2593855 - RNA, 19 nt, Homo sapiens
  misc_RNA (1)...(19): siRNA sense strand
caauaaagauggauccaga

SEQ ID NO: 2593856 - RNA, 19 nt, Homo sapiens
  misc_RNA (1)...(19): siRNA sense strand
gagagaaagucaaaagcaa

SEQ ID NO: 2593857 - RNA, 19 nt, Homo sapiens
  misc_RNA (1)...(19): siRNA sense strand
gugaaagagucaagaucca

SEQ ID NO: 2593858 - RNA, 19 nt, Homo sapiens
  misc_RNA (1)...(19): siRNA sense strand
cgggaaggcucuugcccaa

SEQ ID NO: 2593859 - RNA, 19 nt, Homo sapiens
  misc_RNA (1)...(19): siRNA sense strand
cuauaaauccaaagcgaca

SEQ ID NO: 2593860 - RNA, 19 nt, Homo sapiens
  misc_RNA (1)...(19): siRNA sense strand
gcuucauauuggagcagaa

SEQ ID NO: 2593861 - RNA, 19 nt, Homo sapiens
  misc_RNA (1)...(19): siRNA sense strand
ccacagacucaaaggacau

SEQ ID NO: 2593862 - RNA, 19 nt, Homo sapiens
  misc_RNA (1)...(19): siRNA sense strand
cgucaguggucaagcggau

SEQ ID NO: 2593863 - RNA, 19 nt, Homo sapiens
  misc_RNA (1)...(19): siRNA sense strand
ugggaagaauggacaacua

SEQ ID NO: 2593864 - RNA, 19 nt, Homo sapiens
  misc_RNA (1)...(19): siRNA sense strand
aagcaauccgagaggaaau

SEQ ID NO: 2593865 - RNA, 19 nt, Homo sapiens
  misc_RNA (1)...(19): siRNA sense strand
cugcaaagcaaguuguuau

SEQ ID NO: 2593866 - RNA, 19 nt, Homo sapiens
  misc_RNA (1)...(19): siRNA sense strand
gagaaagucaaaagcaaaa

SEQ ID NO: 2593867 - RNA, 19 nt, Homo sapiens
  misc_RNA (1)...(19): siRNA sense strand
cagaugaaggugaaaguau

SEQ ID NO: 2593868 - RNA, 19 nt, Homo sapiens
  misc_RNA (1)...(19): siRNA sense strand
gauaauggagcuuggguca

SEQ ID NO: 2593869 - RNA, 19 nt, Homo sapiens
  misc_RNA (1)...(19): siRNA sense strand
augaagaauuccuggcaga

SEQ ID NO: 2593870 - RNA, 19 nt, Homo sapiens
  misc_RNA (1)...(19): siRNA sense strand
aagcauacccacaguacua

SEQ ID NO: 2593871 - RNA, 19 nt, Homo sapiens
  misc_RNA (1)...(19): siRNA sense strand
cuuugcagcuggacgaaua

SEQ ID NO: 2593872 - RNA, 19 nt, Homo sapiens
  misc_RNA (1)...(19): siRNA sense strand
gaacaaguauguaggcacu

SEQ ID NO: 2593873 - RNA, 19 nt, Homo sapiens
  misc_RNA (1)...(19): siRNA sense strand
aauuagaggcuuucagauu

SEQ ID NO: 2593874 - RNA, 19 nt, Homo sapiens
  misc_RNA (1)...(19): siRNA sense strand
gguuguagauggagugaag

SEQ ID NO: 2593875 - RNA, 19 nt, Homo sapiens
  misc_RNA (1)...(19): siRNA sense strand
uagauggagugaagcuaaa

SEQ ID NO: 2593876 - RNA, 19 nt, Homo sapiens
  misc_RNA (1)...(19): siRNA sense strand
uguggaagcuggcgggaca

SEQ ID NO: 2593877 - RNA, 19 nt, Homo sapiens
  misc_RNA (1)...(19): siRNA sense strand
gguagagguuguagaugga

SEQ ID NO: 2593878 - RNA, 19 nt, Homo sapiens
  misc_RNA (1)...(19): siRNA sense strand
acaagauucugcaaagcaa

SEQ ID NO: 2593879 - RNA, 19 nt, Homo sapiens
  misc_RNA (1)...(19): siRNA sense strand
gugacagcuuauagugaau

SEQ ID NO: 2593880 - RNA, 19 nt, Homo sapiens
  misc_RNA (1)...(19): siRNA sense strand
uuauaaaggaggauacaga

SEQ ID NO: 2593881 - RNA, 19 nt, Homo sapiens
  misc_RNA (1)...(19): siRNA sense strand
gcccagagagaaagucaaa

SEQ ID NO: 2593882 - RNA, 19 nt, Homo sapiens
  misc_RNA (1)...(19): siRNA sense strand
agacaugagagcugagguu

SEQ ID NO: 2593883 - RNA, 19 nt, Homo sapiens
  misc_RNA (1)...(19): siRNA sense strand
gcagaaaaucagugccaau

SEQ ID NO: 2593884 - RNA, 19 nt, Homo sapiens
  misc_RNA (1)...(19): siRNA sense strand
cgagauaaaguguuuggaa

SEQ ID NO: 2593885 - RNA, 19 nt, Homo sapiens
  misc_RNA (1)...(19): siRNA sense strand
ggucaaagucaaagaaacc

SEQ ID NO: 2593886 - RNA, 19 nt, Homo sapiens
  misc_RNA (1)...(19): siRNA sense strand
caaagaaagcaauccgaga

SEQ ID NO: 2593887 - RNA, 19 nt, Homo sapiens
  misc_RNA (1)...(19): siRNA sense strand
agagaaagucaaaagcaaa

SEQ ID NO: 2593888 - RNA, 19 nt, Homo sapiens
  misc_RNA (1)...(19): siRNA sense strand
ggaagaugguauugaacag

SEQ ID NO: 2593889 - RNA, 19 nt, Homo sapiens
  misc_RNA (1)...(19): siRNA sense strand
cucacaggaugcuggaaua

SEQ ID NO: 2593890 - RNA, 19 nt, Homo sapiens
  misc_RNA (1)...(19): siRNA sense strand
cgugagaaacuaugaaaau

SEQ ID NO: 2593891 - RNA, 19 nt, Homo sapiens
  misc_RNA (1)...(19): siRNA sense strand
gcugcugacccaagggaau

SEQ ID NO: 2593892 - RNA, 19 nt, Homo sapiens
  misc_RNA (1)...(19): siRNA sense strand
cgaauaugguugucccaga

SEQ ID NO: 2593893 - RNA, 19 nt, Homo sapiens
  misc_RNA (1)...(19): siRNA sense strand
gcagaagagaccuggaacu

SEQ ID NO: 2593894 - RNA, 19 nt, Homo sapiens
  misc_RNA (1)...(19): siRNA sense strand
gucaaaagcaaaagagaca

SEQ ID NO: 2593895 - RNA, 19 nt, Homo sapiens
  misc_RNA (1)...(19): siRNA sense strand
gggacaaauggcuugcuaa

SEQ ID NO: 2593896 - RNA, 19 nt, Homo sapiens
  misc_RNA (1)...(19): siRNA sense strand
gcucacaggaugcuggaau

SEQ ID NO: 2593897 - RNA, 19 nt, Homo sapiens
  misc_RNA (1)...(19): siRNA sense strand
auaaagauggauccagaaa

SEQ ID NO: 2593898 - RNA, 19 nt, Homo sapiens
  misc_RNA (1)...(19): siRNA sense strand
aauugaaacacauggguca

SEQ ID NO: 2593899 - RNA, 19 nt, Homo sapiens
  misc_RNA (1)...(19): siRNA sense strand
ggauuauaaaggaggauac

SEQ ID NO: 2593900 - RNA, 19 nt, Homo sapiens
  misc_RNA (1)...(19): siRNA sense strand
ggugauaagaacuccauau

SEQ ID NO: 2593901 - RNA, 19 nt, Homo sapiens
  misc_RNA (1)...(19): siRNA sense strand
cauuacacgagaugaguau

SEQ ID NO: 2593902 - RNA, 19 nt, Homo sapiens
  misc_RNA (1)...(19): siRNA sense strand
ggugaaaguaugccaacau

SEQ ID NO: 2593903 - RNA, 19 nt, Homo sapiens
  misc_RNA (1)...(19): siRNA sense strand
cgaacauuacccaggaaca

SEQ ID NO: 2593904 - RNA, 19 nt, Homo sapiens
  misc_RNA (1)...(19): siRNA sense strand
gauagguacagcagugcaa

SEQ ID NO: 2593905 - RNA, 19 nt, Homo sapiens
  misc_RNA (1)...(19): siRNA sense strand
guugagcacaagaggagaa

SEQ ID NO: 2593906 - RNA, 19 nt, Homo sapiens
  misc_RNA (1)...(19): siRNA sense strand
ggcuuuaguuggugucauu

SEQ ID NO: 2593907 - RNA, 19 nt, Homo sapiens
  misc_RNA (1)...(19): siRNA sense strand
gaccagaagccucgaacau

SEQ ID NO: 2593908 - RNA, 19 nt, Homo sapiens
  misc_RNA (1)...(19): siRNA sense strand
cggaaggcaucguggacgu

SEQ ID NO: 2593909 - RNA, 19 nt, Homo sapiens
  misc_RNA (1)...(19): siRNA sense strand
aaggagaaguggaggacuc

SEQ ID NO: 2593910 - RNA, 19 nt, Homo sapiens
  misc_RNA (1)...(19): siRNA sense strand
ccauccaagcuguguaaau

SEQ ID NO: 2593911 - RNA, 19 nt, Homo sapiens
  misc_RNA (1)...(19): siRNA sense strand
guacagacauggagcacuc

SEQ ID NO: 2593912 - RNA, 19 nt, Homo sapiens
  misc_RNA (1)...(19): siRNA sense strand
aaaauaugcuccagaugaa

SEQ ID NO: 2593913 - RNA, 19 nt, Homo sapiens
  misc_RNA (1)...(19): siRNA sense strand
cgauagaugaugaggaaga

SEQ ID NO: 2593914 - RNA, 19 nt, Homo sapiens
  misc_RNA (1)...(19): siRNA sense strand
agacagaggcagagccauu

SEQ ID NO: 2593915 - RNA, 19 nt, Homo sapiens
  misc_RNA (1)...(19): siRNA sense strand
ggcgauagaugaugaggaa

SEQ ID NO: 2593916 - RNA, 19 nt, Homo sapiens
  misc_RNA (1)...(19): siRNA sense strand
gggacuuuggugugggaua

SEQ ID NO: 2593917 - RNA, 19 nt, Homo sapiens
  misc_RNA (1)...(19): siRNA sense strand
ugagcaugguggagaagaa

SEQ ID NO: 2593918 - RNA, 19 nt, Homo sapiens
  misc_RNA (1)...(19): siRNA sense strand
agaaggagcugguggagca

SEQ ID NO: 2593919 - RNA, 19 nt, Homo sapiens
  misc_RNA (1)...(19): siRNA sense strand
gcucagaagagaaucaaau

SEQ ID NO: 2593920 - RNA, 19 nt, Homo sapiens
  misc_RNA (1)...(19): siRNA sense strand
uaacaaaggcgauagauga

SEQ ID NO: 2593921 - RNA, 19 nt, Homo sapiens
  misc_RNA (1)...(19): siRNA sense strand
ucgaugaucuccaggacaa

SEQ ID NO: 2593922 - RNA, 19 nt, Homo sapiens
  misc_RNA (1)...(19): siRNA sense strand
gauguugaguugauugaua

SEQ ID NO: 2593923 - RNA, 19 nt, Homo sapiens
  misc_RNA (1)...(19): siRNA sense strand
ccaguuauauugugucuaa

SEQ ID NO: 2593924 - RNA, 19 nt, Homo sapiens
  misc_RNA (1)...(19): siRNA sense strand
ucugcuaaccugaaaguaa

SEQ ID NO: 2593925 - RNA, 19 nt, Homo sapiens
  misc_RNA (1)...(19): siRNA sense strand
caacuugagauuacugaaa

SEQ ID NO: 2593926 - RNA, 19 nt, Homo sapiens
  misc_RNA (1)...(19): siRNA sense strand
cugcuaaccugaaaguaau

SEQ ID NO: 2593927 - RNA, 19 nt, Homo sapiens
  misc_RNA (1)...(19): siRNA sense strand
gauaagagcacaaacagau

SEQ ID NO: 2593928 - RNA, 19 nt, Homo sapiens
  misc_RNA (1)...(19): siRNA sense strand
aaguaaugcccaaggaguu

SEQ ID NO: 2593929 - RNA, 19 nt, Homo sapiens
  misc_RNA (1)...(19): siRNA sense strand
cuggagaaauucagcacuu

SEQ ID NO: 2593930 - RNA, 19 nt, Homo sapiens
  misc_RNA (1)...(19): siRNA sense strand
aaggaaauguggauguuga

SEQ ID NO: 2593931 - RNA, 19 nt, Homo sapiens
  misc_RNA (1)...(19): siRNA sense strand
aggugaagccaguggaucu

SEQ ID NO: 2593932 - RNA, 19 nt, Homo sapiens
  misc_RNA (1)...(19): siRNA sense strand
ccgaagauauuaaguucca

SEQ ID NO: 2593933 - RNA, 19 nt, Homo sapiens
  misc_RNA (1)...(19): siRNA sense strand
ugauaagagcacaaacaga

SEQ ID NO: 2593934 - RNA, 19 nt, Homo sapiens
  misc_RNA (1)...(19): siRNA sense strand
cuuccaacacauugaucua

SEQ ID NO: 2593935 - RNA, 19 nt, Homo sapiens
  misc_RNA (1)...(19): siRNA sense strand
ugcccaaggaguugaaauu

SEQ ID NO: 2593936 - RNA, 19 nt, Homo sapiens
  misc_RNA (1)...(19): siRNA sense strand
auaagagcacaaacagaua

SEQ ID NO: 2593937 - RNA, 19 nt, Homo sapiens
  misc_RNA (1)...(19): siRNA sense strand
cagaagagaaucaaauagu

SEQ ID NO: 2593938 - RNA, 19 nt, Homo sapiens
  misc_RNA (1)...(19): siRNA sense strand
cugaaggaaauguggaugu

SEQ ID NO: 2593939 - RNA, 19 nt, Homo sapiens
  misc_RNA (1)...(19): siRNA sense strand
guuuugagaucgaagaaga

SEQ ID NO: 2593940 - RNA, 19 nt, Homo sapiens
  misc_RNA (1)...(19): siRNA sense strand
uugagaucgaagaagauua

SEQ ID NO: 2593941 - RNA, 19 nt, Homo sapiens
  misc_RNA (1)...(19): siRNA sense strand
gaguugaaauuguccuaca

SEQ ID NO: 2593942 - RNA, 19 nt, Homo sapiens
  misc_RNA (1)...(19): siRNA sense strand
acaaugagguucuuacuga

SEQ ID NO: 2593943 - RNA, 19 nt, Homo sapiens
  misc_RNA (1)...(19): siRNA sense strand
gagcaugguggagaagaaa

SEQ ID NO: 2593944 - RNA, 19 nt, Homo sapiens
  misc_RNA (1)...(19): siRNA sense strand
ccaacacauugaucuauua

SEQ ID NO: 2593945 - RNA, 19 nt, Homo sapiens
  misc_RNA (1)...(19): siRNA sense strand
agagcaagaaugaggccuu

SEQ ID NO: 2593946 - RNA, 19 nt, Homo sapiens
  misc_RNA (1)...(19): siRNA sense strand
gcacaaacagauacagcgu

SEQ ID NO: 2593947 - RNA, 19 nt, Homo sapiens
  misc_RNA (1)...(19): siRNA sense strand
caaaggcgauagaugauga

SEQ ID NO: 2593948 - RNA, 19 nt, Homo sapiens
  misc_RNA (1)...(19): siRNA sense strand
uuacugagaaugagaagga

SEQ ID NO: 2593949 - RNA, 19 nt, Homo sapiens
  misc_RNA (1)...(19): siRNA sense strand
uugauugauaagagcacaa

SEQ ID NO: 2593950 - RNA, 19 nt, Homo sapiens
  misc_RNA (1)...(19): siRNA sense strand
cggaggaggaagaggaaga

SEQ ID NO: 2593951 - RNA, 19 nt, Homo sapiens
  misc_RNA (1)...(19): siRNA sense strand
aggaagaggaagaggagau

SEQ ID NO: 2593952 - RNA, 19 nt, Homo sapiens
  misc_RNA (1)...(19): siRNA sense strand
augagaagccugaggucaa

SEQ ID NO: 2593953 - RNA, 19 nt, Homo sapiens
  misc_RNA (1)...(19): siRNA sense strand
gggcaugauggaugaggaa

SEQ ID NO: 2593954 - RNA, 19 nt, Homo sapiens
  misc_RNA (1)...(19): siRNA sense strand
ggaaccaguuuguggccua

SEQ ID NO: 2593955 - RNA, 19 nt, Homo sapiens
  misc_RNA (1)...(19): siRNA sense strand
gaguacaacuggaacguga

SEQ ID NO: 2593956 - RNA, 19 nt, Homo sapiens
  misc_RNA (1)...(19): siRNA sense strand
aggaggaggagauggacua

SEQ ID NO: 2593957 - RNA, 19 nt, Homo sapiens
  misc_RNA (1)...(19): siRNA sense strand
auauacaaagacagggaua

SEQ ID NO: 2593958 - RNA, 19 nt, Homo sapiens
  misc_RNA (1)...(19): siRNA sense strand
agaaggaacuggaagcuca

SEQ ID NO: 2593959 - RNA, 19 nt, Homo sapiens
  misc_RNA (1)...(19): siRNA sense strand
ccaagguggcagugacaau

SEQ ID NO: 2593960 - RNA, 19 nt, Homo sapiens
  misc_RNA (1)...(19): siRNA sense strand
agauggagacagaagagaa

SEQ ID NO: 2593961 - RNA, 19 nt, Homo sapiens
  misc_RNA (1)...(19): siRNA sense strand
ggacaugaaugagaaggaa

SEQ ID NO: 2593962 - RNA, 19 nt, Homo sapiens
  misc_RNA (1)...(19): siRNA sense strand
ggacgagagcagcgaggau

SEQ ID NO: 2593963 - RNA, 19 nt, Homo sapiens
  misc_RNA (1)...(19): siRNA sense strand
aaucaaucucacagcauua

SEQ ID NO: 2593964 - RNA, 19 nt, Homo sapiens
  misc_RNA (1)...(19): siRNA sense strand
gcaagggcuaugaggaaaa

SEQ ID NO: 2593965 - RNA, 19 nt, Homo sapiens
  misc_RNA (1)...(19): siRNA sense strand
gggacaugaaugagaagga

SEQ ID NO: 2593966 - RNA, 19 nt, Homo sapiens
  misc_RNA (1)...(19): siRNA sense strand
gaggaagaggagauggaga

SEQ ID NO: 2593967 - RNA, 19 nt, Homo sapiens
  misc_RNA (1)...(19): siRNA sense strand
acaacuggaacgugaagaa

SEQ ID NO: 2593968 - RNA, 19 nt, Homo sapiens
  misc_RNA (1)...(19): siRNA sense strand
augagaaacuuuuggaaga

SEQ ID NO: 2593969 - RNA, 19 nt, Homo sapiens
  misc_RNA (1)...(19): siRNA sense strand
gggaccaggaggaggagau

SEQ ID NO: 2593970 - RNA, 19 nt, Homo sapiens
  misc_RNA (1)...(19): siRNA sense strand
ggacagaggacaggcccaa

SEQ ID NO: 2593971 - RNA, 19 nt, Homo sapiens
  misc_RNA (1)...(19): siRNA sense strand
ccuuggagaaacagcacaa

SEQ ID NO: 2593972 - RNA, 19 nt, Homo sapiens
  misc_RNA (1)...(19): siRNA sense strand
gacuuuaagauguggauca

SEQ ID NO: 2593973 - RNA, 19 nt, Homo sapiens
  misc_RNA (1)...(19): siRNA sense strand
uggagacagaagagaaaga

SEQ ID NO: 2593974 - RNA, 19 nt, Homo sapiens
  misc_RNA (1)...(19): siRNA sense strand
uggagaaacagcacaaaca

SEQ ID NO: 2593975 - RNA, 19 nt, Homo sapiens
  misc_RNA (1)...(19): siRNA sense strand
ugauggaugaggaagggaa

SEQ ID NO: 2593976 - RNA, 19 nt, Homo sapiens
  misc_RNA (1)...(19): siRNA sense strand
gggcagcagcagugagaag

SEQ ID NO: 2593977 - RNA, 19 nt, Homo sapiens
  misc_RNA (1)...(19): siRNA sense strand
gggaggaaggugacaggga

SEQ ID NO: 2593978 - RNA, 19 nt, Homo sapiens
  misc_RNA (1)...(19): siRNA sense strand
gugccauggaugcgaaaga

SEQ ID NO: 2593979 - RNA, 19 nt, Homo sapiens
  misc_RNA (1)...(19): siRNA sense strand
ugagaagacuuuugaggau

SEQ ID NO: 2593980 - RNA, 19 nt, Homo sapiens
  misc_RNA (1)...(19): siRNA sense strand
ccgaggaagaaauauacaa

SEQ ID NO: 2593981 - RNA, 19 nt, Homo sapiens
  misc_RNA (1)...(19): siRNA sense strand
cagcaaaccccgagucaca

SEQ ID NO: 2593982 - RNA, 19 nt, Homo sapiens
  misc_RNA (1)...(19): siRNA sense strand
gugaacgggaggaagguga

SEQ ID NO: 2593983 - RNA, 19 nt, Homo sapiens
  misc_RNA (1)...(19): siRNA sense strand
cgagagugaacgggaggaa

SEQ ID NO: 2593984 - RNA, 19 nt, Homo sapiens
  misc_RNA (1)...(19): siRNA sense strand
acuuuaagauguggaucaa

SEQ ID NO: 2593985 - RNA, 19 nt, Homo sapiens
  misc_RNA (1)...(19): siRNA sense strand
ugaagaacaaagcuagcaa

SEQ ID NO: 2593986 - RNA, 19 nt, Homo sapiens
  misc_RNA (1)...(19): siRNA sense strand
ugaagaaacgaaagcggga

SEQ ID NO: 2593987 - RNA, 19 nt, Homo sapiens
  misc_RNA (1)...(19): siRNA sense strand
ggagauggacuaugcacca

SEQ ID NO: 2593988 - RNA, 19 nt, Homo sapiens
  misc_RNA (1)...(19): siRNA sense strand
aaauauacaaagacaggga

SEQ ID NO: 2593989 - RNA, 19 nt, Homo sapiens
  misc_RNA (1)...(19): siRNA sense strand
aagaggaagaggagaugga

SEQ ID NO: 2593990 - RNA, 19 nt, Homo sapiens
  misc_RNA (1)...(19): siRNA sense strand
agcaagggcuaugaggaaa

SEQ ID NO: 2593991 - RNA, 19 nt, Homo sapiens
  misc_RNA (1)...(19): siRNA sense strand
ggucaaacaucgggacaug

SEQ ID NO: 2593992 - RNA, 19 nt, Homo sapiens
  misc_RNA (1)...(19): siRNA sense strand
acgaaccggaggaggaaga

SEQ ID NO: 2593993 - RNA, 19 nt, Homo sapiens
  misc_RNA (1)...(19): siRNA sense strand
aggaggaagaggaagagga

SEQ ID NO: 2593994 - RNA, 19 nt, Homo sapiens
  misc_RNA (1)...(19): siRNA sense strand
cuguagaagagacguugaa

SEQ ID NO: 2593995 - RNA, 19 nt, Homo sapiens
  misc_RNA (1)...(19): siRNA sense strand
acaaagacagggauagcca

SEQ ID NO: 2593996 - RNA, 19 nt, Homo sapiens
  misc_RNA (1)...(19): siRNA sense strand
ggacacgaguggugcagcu

SEQ ID NO: 2593997 - RNA, 19 nt, Homo sapiens
  misc_RNA (1)...(19): siRNA sense strand
gaacaaagcuagcaagggc

SEQ ID NO: 2593998 - RNA, 19 nt, Homo sapiens
  misc_RNA (1)...(19): siRNA sense strand
acaugaaugagaaggaacu

SEQ ID NO: 2593999 - RNA, 19 nt, Homo sapiens
  misc_RNA (1)...(19): siRNA sense strand
gcugauagugacagugacu

SEQ ID NO: 2594000 - RNA, 19 nt, Homo sapiens
  misc_RNA (1)...(19): siRNA sense strand
caucaagccuuccgggcaa

SEQ ID NO: 2594001 - RNA, 19 nt, Homo sapiens
  misc_RNA (1)...(19): siRNA sense strand
agaagaacgaagucgggaa

SEQ ID NO: 2594002 - RNA, 19 nt, Homo sapiens
  misc_RNA (1)...(19): siRNA sense strand
ggucaaagccagcgagcag

SEQ ID NO: 2594003 - RNA, 19 nt, Homo sapiens
  misc_RNA (1)...(19): siRNA sense strand
uagaaaagcugaaggagga

SEQ ID NO: 2594004 - RNA, 19 nt, Homo sapiens
  misc_RNA (1)...(19): siRNA sense strand
aagugucagccgagauaaa

SEQ ID NO: 2594005 - RNA, 19 nt, Homo sapiens
  misc_RNA (1)...(19): siRNA sense strand
ugaccugagcgaaggguuu

SEQ ID NO: 2594006 - RNA, 19 nt, Homo sapiens
  misc_RNA (1)...(19): siRNA sense strand
acaagaagggcgacgggau

SEQ ID NO: 2594007 - RNA, 19 nt, Homo sapiens
  misc_RNA (1)...(19): siRNA sense strand
cugagaacaaagaacggaa

SEQ ID NO: 2594008 - RNA, 19 nt, Homo sapiens
  misc_RNA (1)...(19): siRNA sense strand
ucggaaaugcaaaggaagu

SEQ ID NO: 2594009 - RNA, 19 nt, Homo sapiens
  misc_RNA (1)...(19): siRNA sense strand
ccaaagacgcuccugguca

SEQ ID NO: 2594010 - RNA, 19 nt, Homo sapiens
  misc_RNA (1)...(19): siRNA sense strand
agcugaaggaggacuguaa

SEQ ID NO: 2594011 - RNA, 19 nt, Homo sapiens
  misc_RNA (1)...(19): siRNA sense strand
ggggauggacagaugacaa

SEQ ID NO: 2594012 - RNA, 19 nt, Homo sapiens
  misc_RNA (1)...(19): siRNA sense strand
acgaauagcacuggcaaca

SEQ ID NO: 2594013 - RNA, 19 nt, Homo sapiens
  misc_RNA (1)...(19): siRNA sense strand
cggcagaacaagaaccacu

SEQ ID NO: 2594014 - RNA, 19 nt, Homo sapiens
  misc_RNA (1)...(19): siRNA sense strand
caaaggaagugauugcgau

SEQ ID NO: 2594015 - RNA, 19 nt, Homo sapiens
  misc_RNA (1)...(19): siRNA sense strand
gcccagacgagguagccaa

SEQ ID NO: 2594016 - RNA, 19 nt, Homo sapiens
  misc_RNA (1)...(19): siRNA sense strand
agaacgaagucgggaaaau

SEQ ID NO: 2594017 - RNA, 19 nt, Homo sapiens
  misc_RNA (1)...(19): siRNA sense strand
acuaccugcuggaguacaa

SEQ ID NO: 2594018 - RNA, 19 nt, Homo sapiens
  misc_RNA (1)...(19): siRNA sense strand
ccaagaacgugcugguggu

SEQ ID NO: 2594019 - RNA, 19 nt, Homo sapiens
  misc_RNA (1)...(19): siRNA sense strand
acagcgaggccauguggaa

SEQ ID NO: 2594020 - RNA, 19 nt, Homo sapiens
  misc_RNA (1)...(19): siRNA sense strand
ccuugaaaccagagcuaaa

SEQ ID NO: 2594021 - RNA, 19 nt, Homo sapiens
  misc_RNA (1)...(19): siRNA sense strand
ugaagaagaaagaggagaa

SEQ ID NO: 2594022 - RNA, 19 nt, Homo sapiens
  misc_RNA (1)...(19): siRNA sense strand
ggaaagaagcuguggcaac

SEQ ID NO: 2594023 - RNA, 19 nt, Homo sapiens
  misc_RNA (1)...(19): siRNA sense strand
agauagaggcuucggagaa

SEQ ID NO: 2594024 - RNA, 19 nt, Homo sapiens
  misc_RNA (1)...(19): siRNA sense strand
gcuccauauaugaggacaa

SEQ ID NO: 2594025 - RNA, 19 nt, Homo sapiens
  misc_RNA (1)...(19): siRNA sense strand
cgucaacacccaagccaaa

SEQ ID NO: 2594026 - RNA, 19 nt, Homo sapiens
  misc_RNA (1)...(19): siRNA sense strand
cacuaaaggccauggaaga

SEQ ID NO: 2594027 - RNA, 19 nt, Homo sapiens
  misc_RNA (1)...(19): siRNA sense strand
aagaaagacaagaaggaca

SEQ ID NO: 2594028 - RNA, 19 nt, Homo sapiens
  misc_RNA (1)...(19): siRNA sense strand
cccaaguacucgagcaaga

SEQ ID NO: 2594029 - RNA, 19 nt, Homo sapiens
  misc_RNA (1)...(19): siRNA sense strand
cggcacagggagcaggaaa

SEQ ID NO: 2594030 - RNA, 19 nt, Homo sapiens
  misc_RNA (1)...(19): siRNA sense strand
agaagugacaguugaggaa

SEQ ID NO: 2594031 - RNA, 19 nt, Homo sapiens
  misc_RNA (1)...(19): siRNA sense strand
cugcagaaacugagagaag

SEQ ID NO: 2594032 - RNA, 19 nt, Homo sapiens
  misc_RNA (1)...(19): siRNA sense strand
aggaaaagaaagacaagaa

SEQ ID NO: 2594033 - RNA, 19 nt, Homo sapiens
  misc_RNA (1)...(19): siRNA sense strand
aaaccaaugaggaggauga

SEQ ID NO: 2594034 - RNA, 19 nt, Homo sapiens
  misc_RNA (1)...(19): siRNA sense strand
aggaugaggaggaaaguga

SEQ ID NO: 2594035 - RNA, 19 nt, Homo sapiens
  misc_RNA (1)...(19): siRNA sense strand
ggaaggaggcagaggagcu

SEQ ID NO: 2594036 - RNA, 19 nt, Homo sapiens
  misc_RNA (1)...(19): siRNA sense strand
uggacaagaugaaggagga

SEQ ID NO: 2594037 - RNA, 19 nt, Homo sapiens
  misc_RNA (1)...(19): siRNA sense strand
gagugaagguguaucgcuu

SEQ ID NO: 2594038 - RNA, 19 nt, Homo sapiens
  misc_RNA (1)...(19): siRNA sense strand
aauccaagcaagagaagau

SEQ ID NO: 2594039 - RNA, 19 nt, Homo sapiens
  misc_RNA (1)...(19): siRNA sense strand
ggaccauccaugugacgaa

SEQ ID NO: 2594040 - RNA, 19 nt, Homo sapiens
  misc_RNA (1)...(19): siRNA sense strand
aggaaaaugagaagaguga

SEQ ID NO: 2594041 - RNA, 19 nt, Homo sapiens
  misc_RNA (1)...(19): siRNA sense strand
aagauuaugaugagaccua

SEQ ID NO: 2594042 - RNA, 19 nt, Homo sapiens
  misc_RNA (1)...(19): siRNA sense strand
auugaggaccugaggaaau

SEQ ID NO: 2594043 - RNA, 19 nt, Homo sapiens
  misc_RNA (1)...(19): siRNA sense strand
aagaggaggaagaggagau

SEQ ID NO: 2594044 - RNA, 19 nt, Homo sapiens
  misc_RNA (1)...(19): siRNA sense strand
gcagaaagccauugaggag

SEQ ID NO: 2594045 - RNA, 19 nt, Homo sapiens
  misc_RNA (1)...(19): siRNA sense strand
ggaugagagaggaggaaag

SEQ ID NO: 2594046 - RNA, 19 nt, Homo sapiens
  misc_RNA (1)...(19): siRNA sense strand
aagugacaguugaggaaaa

SEQ ID NO: 2594047 - RNA, 19 nt, Homo sapiens
  misc_RNA (1)...(19): siRNA sense strand
gagaagaaaccaaugagga

SEQ ID NO: 2594048 - RNA, 19 nt, Homo sapiens
  misc_RNA (1)...(19): siRNA sense strand
uggaagaggcaguggccca

SEQ ID NO: 2594049 - RNA, 19 nt, Homo sapiens
  misc_RNA (1)...(19): siRNA sense strand
caugagaggagguuggaca

SEQ ID NO: 2594050 - RNA, 19 nt, Homo sapiens
  misc_RNA (1)...(19): siRNA sense strand
ggagguuggacaagaugaa

SEQ ID NO: 2594051 - RNA, 19 nt, Homo sapiens
  misc_RNA (1)...(19): siRNA sense strand
aagacaagaaggacagaga

SEQ ID NO: 2594052 - RNA, 19 nt, Homo sapiens
  misc_RNA (1)...(19): siRNA sense strand
uggcaaagggcgacaggga

SEQ ID NO: 2594053 - RNA, 19 nt, Homo sapiens
  misc_RNA (1)...(19): siRNA sense strand
cgacagggaaguggagcaa

SEQ ID NO: 2594054 - RNA, 19 nt, Homo sapiens
  misc_RNA (1)...(19): siRNA sense strand
ccagaagaagauacaggaa

SEQ ID NO: 2594055 - RNA, 19 nt, Homo sapiens
  misc_RNA (1)...(19): siRNA sense strand
agaugaaggaggagcacca

SEQ ID NO: 2594056 - RNA, 19 nt, Homo sapiens
  misc_RNA (1)...(19): siRNA sense strand
gggccauuaagaagaagaa

SEQ ID NO: 2594057 - RNA, 19 nt, Homo sapiens
  misc_RNA (1)...(19): siRNA sense strand
gccauuaagaagaagaaaa

SEQ ID NO: 2594058 - RNA, 19 nt, Homo sapiens
  misc_RNA (1)...(19): siRNA sense strand
caagccagccagaggagaa

SEQ ID NO: 2594059 - RNA, 19 nt, Homo sapiens
  misc_RNA (1)...(19): siRNA sense strand
gcacacaagcagaugagga

SEQ ID NO: 2594060 - RNA, 19 nt, Homo sapiens
  misc_RNA (1)...(19): siRNA sense strand
auauugaggaccugaggaa

SEQ ID NO: 2594061 - RNA, 19 nt, Homo sapiens
  misc_RNA (1)...(19): siRNA sense strand
agaagaaagaggagaagcu

SEQ ID NO: 2594062 - RNA, 19 nt, Homo sapiens
  misc_RNA (1)...(19): siRNA sense strand
agggcauaauugaggccaa

SEQ ID NO: 2594063 - RNA, 19 nt, Homo sapiens
  misc_RNA (1)...(19): siRNA sense strand
gggccagcuuggaacagaa

SEQ ID NO: 2594064 - RNA, 19 nt, Homo sapiens
  misc_RNA (1)...(19): siRNA sense strand
cugcaaaggagaaggcucu

SEQ ID NO: 2594065 - RNA, 19 nt, Homo sapiens
  misc_RNA (1)...(19): siRNA sense strand
acagggagcaggaaaggaa

SEQ ID NO: 2594066 - RNA, 19 nt, Homo sapiens
  misc_RNA (1)...(19): siRNA sense strand
gcaaagggcgacagggaag

SEQ ID NO: 2594067 - RNA, 19 nt, Homo sapiens
  misc_RNA (1)...(19): siRNA sense strand
ccagcagcuccgagaaauu

SEQ ID NO: 2594068 - RNA, 19 nt, Homo sapiens
  misc_RNA (1)...(19): siRNA sense strand
acgacuuccuguuggagaa

SEQ ID NO: 2594069 - RNA, 19 nt, Homo sapiens
  misc_RNA (1)...(19): siRNA sense strand
ggcccaaguacucgagcaa

SEQ ID NO: 2594070 - RNA, 19 nt, Homo sapiens
  misc_RNA (1)...(19): siRNA sense strand
agagcaaggaggacuuaua

SEQ ID NO: 2594071 - RNA, 19 nt, Homo sapiens
  misc_RNA (1)...(19): siRNA sense strand
gugagaagggcaaggagca

SEQ ID NO: 2594072 - RNA, 19 nt, Homo sapiens
  misc_RNA (1)...(19): siRNA sense strand
ugagagaggaggaaagcca

SEQ ID NO: 2594073 - RNA, 19 nt, Homo sapiens
  misc_RNA (1)...(19): siRNA sense strand
cagccuggccacugaagaa

SEQ ID NO: 2594074 - RNA, 19 nt, Homo sapiens
  misc_RNA (1)...(19): siRNA sense strand
ccgaguggaaggaggcaga

SEQ ID NO: 2594075 - RNA, 19 nt, Homo sapiens
  misc_RNA (1)...(19): siRNA sense strand
aagagaagaugcagcaacu

SEQ ID NO: 2594076 - RNA, 19 nt, Homo sapiens
  misc_RNA (1)...(19): siRNA sense strand
agaaagccauugaggagga

SEQ ID NO: 2594077 - RNA, 19 nt, Homo sapiens
  misc_RNA (1)...(19): siRNA sense strand
ucuccagccuccagaagaa

SEQ ID NO: 2594078 - RNA, 19 nt, Homo sapiens
  misc_RNA (1)...(19): siRNA sense strand
ccuggaggcugaagcucaa

SEQ ID NO: 2594079 - RNA, 19 nt, Homo sapiens
  misc_RNA (1)...(19): siRNA sense strand
ccgcaagauccacgggcuu

SEQ ID NO: 2594080 - RNA, 19 nt, Homo sapiens
  misc_RNA (1)...(19): siRNA sense strand
ccaaugaggaggaugagga

SEQ ID NO: 2594081 - RNA, 19 nt, Homo sapiens
  misc_RNA (1)...(19): siRNA sense strand
ccaaaggccuggaggagag

SEQ ID NO: 2594082 - RNA, 19 nt, Homo sapiens
  misc_RNA (1)...(19): siRNA sense strand
gccaagaggaggaagagga

SEQ ID NO: 2594083 - RNA, 19 nt, Homo sapiens
  misc_RNA (1)...(19): siRNA sense strand
aagcagaugaggaccaaau

SEQ ID NO: 2594084 - RNA, 19 nt, Homo sapiens
  misc_RNA (1)...(19): siRNA sense strand
gcagaaaccucaaguccca

SEQ ID NO: 2594085 - RNA, 19 nt, Homo sapiens
  misc_RNA (1)...(19): siRNA sense strand
aggaacagcuucaggucga

SEQ ID NO: 2594086 - RNA, 19 nt, Homo sapiens
  misc_RNA (1)...(19): siRNA sense strand
aggcgaguauauagacaau

SEQ ID NO: 2594087 - RNA, 19 nt, Homo sapiens
  misc_RNA (1)...(19): siRNA sense strand
gaucauuucuuauucggaa

SEQ ID NO: 2594088 - RNA, 19 nt, Homo sapiens
  misc_RNA (1)...(19): siRNA sense strand
cuuuggaaguguugcugaa

SEQ ID NO: 2594089 - RNA, 19 nt, Homo sapiens
  misc_RNA (1)...(19): siRNA sense strand
ccgaugacuuugacagcga

SEQ ID NO: 2594090 - RNA, 19 nt, Homo sapiens
  misc_RNA (1)...(19): siRNA sense strand
caacauaguccuuugguuc

SEQ ID NO: 2594091 - RNA, 19 nt, Homo sapiens
  misc_RNA (1)...(19): siRNA sense strand
ccuccugcccagaaacaaa

SEQ ID NO: 2594092 - RNA, 19 nt, Homo sapiens
  misc_RNA (1)...(19): siRNA sense strand
agucagaaguugaggcagc

SEQ ID NO: 2594093 - RNA, 19 nt, Homo sapiens
  misc_RNA (1)...(19): siRNA sense strand
acucggacucagagaugua

SEQ ID NO: 2594094 - RNA, 19 nt, Homo sapiens
  misc_RNA (1)...(19): siRNA sense strand
auaauauuccugugcgauu

SEQ ID NO: 2594095 - RNA, 19 nt, Homo sapiens
  misc_RNA (1)...(19): siRNA sense strand
ccguggaagauaaugauga

SEQ ID NO: 2594096 - RNA, 19 nt, Homo sapiens
  misc_RNA (1)...(19): siRNA sense strand
caacaaaacaauaugccuu

SEQ ID NO: 2594097 - RNA, 19 nt, Homo sapiens
  misc_RNA (1)...(19): siRNA sense strand
gugaagaguacuuuggaag

SEQ ID NO: 2594098 - RNA, 19 nt, Homo sapiens
  misc_RNA (1)...(19): siRNA sense strand
gcaaagaagucacuggaca

SEQ ID NO: 2594099 - RNA, 19 nt, Homo sapiens
  misc_RNA (1)...(19): siRNA sense strand
ggaagaacguggcuggaga

SEQ ID NO: 2594100 - RNA, 19 nt, Homo sapiens
  misc_RNA (1)...(19): siRNA sense strand
ucaagaaacugaagcccaa

SEQ ID NO: 2594101 - RNA, 19 nt, Homo sapiens
  misc_RNA (1)...(19): siRNA sense strand
uggaagagauggagcagga

SEQ ID NO: 2594102 - RNA, 19 nt, Homo sapiens
  misc_RNA (1)...(19): siRNA sense strand
agauggagcaggagcgaau

SEQ ID NO: 2594103 - RNA, 19 nt, Homo sapiens
  misc_RNA (1)...(19): siRNA sense strand
cuagaaaacaugaggaaga

SEQ ID NO: 2594104 - RNA, 19 nt, Homo sapiens
  misc_RNA (1)...(19): siRNA sense strand
cugcauacuguguggagaa

SEQ ID NO: 2594105 - RNA, 19 nt, Homo sapiens
  misc_RNA (1)...(19): siRNA sense strand
acugaugaggagaaagaaa

SEQ ID NO: 2594106 - RNA, 19 nt, Homo sapiens
  misc_RNA (1)...(19): siRNA sense strand
gcaccaucauuaaggccaa

SEQ ID NO: 2594107 - RNA, 19 nt, Homo sapiens
  misc_RNA (1)...(19): siRNA sense strand
ccgaauucaaugaggaguu

SEQ ID NO: 2594108 - RNA, 19 nt, Homo sapiens
  misc_RNA (1)...(19): siRNA sense strand
cugaugaggagaaagaaau

SEQ ID NO: 2594109 - RNA, 19 nt, Homo sapiens
  misc_RNA (1)...(19): siRNA sense strand
aggaggaagaggaagccaa

SEQ ID NO: 2594110 - RNA, 19 nt, Homo sapiens
  misc_RNA (1)...(19): siRNA sense strand
gggacuaugacaucggcaa

SEQ ID NO: 2594111 - RNA, 19 nt, Homo sapiens
  misc_RNA (1)...(19): siRNA sense strand
aggaagacccucaggaucu

SEQ ID NO: 2594112 - RNA, 19 nt, Homo sapiens
  misc_RNA (1)...(19): siRNA sense strand
ccgucugugaugaggacaa

SEQ ID NO: 2594113 - RNA, 19 nt, Homo sapiens
  misc_RNA (1)...(19): siRNA sense strand
gugaggacuguaagaagaa

SEQ ID NO: 2594114 - RNA, 19 nt, Homo sapiens
  misc_RNA (1)...(19): siRNA sense strand
aggccaaacacaagacuca

SEQ ID NO: 2594115 - RNA, 19 nt, Homo sapiens
  misc_RNA (1)...(19): siRNA sense strand
aggagaaagaaaucaucaa

SEQ ID NO: 2594116 - RNA, 19 nt, Homo sapiens
  misc_RNA (1)...(19): siRNA sense strand
ccccagaggaggaggaaga

SEQ ID NO: 2594117 - RNA, 19 nt, Homo sapiens
  misc_RNA (1)...(19): siRNA sense strand
gaaaucaucaacaggguga

SEQ ID NO: 2594118 - RNA, 19 nt, Homo sapiens
  misc_RNA (1)...(19): siRNA sense strand
gagccagagaggaccgaau

SEQ ID NO: 2594119 - RNA, 19 nt, Homo sapiens
  misc_RNA (1)...(19): siRNA sense strand
agugcggaguggagaccaa

SEQ ID NO: 2594120 - RNA, 19 nt, Homo sapiens
  misc_RNA (1)...(19): siRNA sense strand
cugccaagggagagcgcuu

SEQ ID NO: 2594121 - RNA, 19 nt, Homo sapiens
  misc_RNA (1)...(19): siRNA sense strand
aagcccaaccagaggaaga

SEQ ID NO: 2594122 - RNA, 19 nt, Homo sapiens
  misc_RNA (1)...(19): siRNA sense strand
acaagaagauagagcgcug

SEQ ID NO: 2594123 - RNA, 19 nt, Homo sapiens
  misc_RNA (1)...(19): siRNA sense strand
cagaggaggaggaagagga

SEQ ID NO: 2594124 - RNA, 19 nt, Homo sapiens
  misc_RNA (1)...(19): siRNA sense strand
agaggaggaggaagaggaa

SEQ ID NO: 2594125 - RNA, 19 nt, Homo sapiens
  misc_RNA (1)...(19): siRNA sense strand
ggcagaggaagcaggaaga

SEQ ID NO: 2594126 - RNA, 19 nt, Homo sapiens
  misc_RNA (1)...(19): siRNA sense strand
ccaaacagguccucccaca

SEQ ID NO: 2594127 - RNA, 19 nt, Homo sapiens
  misc_RNA (1)...(19): siRNA sense strand
acucagacccauucgucaa

SEQ ID NO: 2594128 - RNA, 19 nt, Homo sapiens
  misc_RNA (1)...(19): siRNA sense strand
agaaaauggaagagaugga

SEQ ID NO: 2594129 - RNA, 19 nt, Homo sapiens
  misc_RNA (1)...(19): siRNA sense strand
uaguaugugaggacuguaa

SEQ ID NO: 2594130 - RNA, 19 nt, Homo sapiens
  misc_RNA (1)...(19): siRNA sense strand
cugagaaaauggaagagau

SEQ ID NO: 2594131 - RNA, 19 nt, Homo sapiens
  misc_RNA (1)...(19): siRNA sense strand
ugggaaagaaggccaaaca

SEQ ID NO: 2594132 - RNA, 19 nt, Homo sapiens
  misc_RNA (1)...(19): siRNA sense strand
gccuagaaaacaugaggaa

SEQ ID NO: 2594133 - RNA, 19 nt, Homo sapiens
  misc_RNA (1)...(19): siRNA sense strand
gauugcucgagcugagaaa

SEQ ID NO: 2594134 - RNA, 19 nt, Homo sapiens
  misc_RNA (1)...(19): siRNA sense strand
augcaaaggaagacccuca

SEQ ID NO: 2594135 - RNA, 19 nt, Homo sapiens
  misc_RNA (1)...(19): siRNA sense strand
gagcugagaaaauggaaga

SEQ ID NO: 2594136 - RNA, 19 nt, Homo sapiens
  misc_RNA (1)...(19): siRNA sense strand
gcaaagaagucacuggaca

SEQ ID NO: 2594137 - RNA, 19 nt, Homo sapiens
  misc_RNA (1)...(19): siRNA sense strand
ggaagaacguggcuggaga

SEQ ID NO: 2594138 - RNA, 19 nt, Homo sapiens
  misc_RNA (1)...(19): siRNA sense strand
ucaagaaacugaagcccaa

SEQ ID NO: 2594139 - RNA, 19 nt, Homo sapiens
  misc_RNA (1)...(19): siRNA sense strand
uggaagagauggagcagga

SEQ ID NO: 2594140 - RNA, 19 nt, Homo sapiens
  misc_RNA (1)...(19): siRNA sense strand
agauggagcaggagcgaau

SEQ ID NO: 2594141 - RNA, 19 nt, Homo sapiens
  misc_RNA (1)...(19): siRNA sense strand
cuagaaaacaugaggaaga

SEQ ID NO: 2594142 - RNA, 19 nt, Homo sapiens
  misc_RNA (1)...(19): siRNA sense strand
cugcauacuguguggagaa

SEQ ID NO: 2594143 - RNA, 19 nt, Homo sapiens
  misc_RNA (1)...(19): siRNA sense strand
acugaugaggagaaagaaa

SEQ ID NO: 2594144 - RNA, 19 nt, Homo sapiens
  misc_RNA (1)...(19): siRNA sense strand
gcaccaucauuaaggccaa

SEQ ID NO: 2594145 - RNA, 19 nt, Homo sapiens
  misc_RNA (1)...(19): siRNA sense strand
ccgaauucaaugaggaguu

SEQ ID NO: 2594146 - RNA, 19 nt, Homo sapiens
  misc_RNA (1)...(19): siRNA sense strand
cugaugaggagaaagaaau

SEQ ID NO: 2594147 - RNA, 19 nt, Homo sapiens
  misc_RNA (1)...(19): siRNA sense strand
aggaggaagaggaagccaa

SEQ ID NO: 2594148 - RNA, 19 nt, Homo sapiens
  misc_RNA (1)...(19): siRNA sense strand
gggacuaugacaucggcaa

SEQ ID NO: 2594149 - RNA, 19 nt, Homo sapiens
  misc_RNA (1)...(19): siRNA sense strand
aggaagacccucaggaucu

SEQ ID NO: 2594150 - RNA, 19 nt, Homo sapiens
  misc_RNA (1)...(19): siRNA sense strand
ccgucugugaugaggacaa

SEQ ID NO: 2594151 - RNA, 19 nt, Homo sapiens
  misc_RNA (1)...(19): siRNA sense strand
gugaggacuguaagaagaa

SEQ ID NO: 2594152 - RNA, 19 nt, Homo sapiens
  misc_RNA (1)...(19): siRNA sense strand
aggccaaacacaagacuca

SEQ ID NO: 2594153 - RNA, 19 nt, Homo sapiens
  misc_RNA (1)...(19): siRNA sense strand
aggagaaagaaaucaucaa

SEQ ID NO: 2594154 - RNA, 19 nt, Homo sapiens
  misc_RNA (1)...(19): siRNA sense strand
ccccagaggaggaggaaga

SEQ ID NO: 2594155 - RNA, 19 nt, Homo sapiens
  misc_RNA (1)...(19): siRNA sense strand
gaaaucaucaacaggguga

SEQ ID NO: 2594156 - RNA, 19 nt, Homo sapiens
  misc_RNA (1)...(19): siRNA sense strand
gagccagagaggaccgaau

SEQ ID NO: 2594157 - RNA, 19 nt, Homo sapiens
  misc_RNA (1)...(19): siRNA sense strand
agugcggaguggagaccaa

SEQ ID NO: 2594158 - RNA, 19 nt, Homo sapiens
  misc_RNA (1)...(19): siRNA sense strand
cugccaagggagagcgcuu

SEQ ID NO: 2594159 - RNA, 19 nt, Homo sapiens
  misc_RNA (1)...(19): siRNA sense strand
aagcccaaccagaggaaga

SEQ ID NO: 2594160 - RNA, 19 nt, Homo sapiens
  misc_RNA (1)...(19): siRNA sense strand
acaagaagauagagcgcug

SEQ ID NO: 2594161 - RNA, 19 nt, Homo sapiens
  misc_RNA (1)...(19): siRNA sense strand
cagaggaggaggaagagga

SEQ ID NO: 2594162 - RNA, 19 nt, Homo sapiens
  misc_RNA (1)...(19): siRNA sense strand
agaggaggaggaagaggaa

SEQ ID NO: 2594163 - RNA, 19 nt, Homo sapiens
  misc_RNA (1)...(19): siRNA sense strand
ggcagaggaagcaggaaga

SEQ ID NO: 2594164 - RNA, 19 nt, Homo sapiens
  misc_RNA (1)...(19): siRNA sense strand
ccaaacagguccucccaca

SEQ ID NO: 2594165 - RNA, 19 nt, Homo sapiens
  misc_RNA (1)...(19): siRNA sense strand
acucagacccauucgucaa

SEQ ID NO: 2594166 - RNA, 19 nt, Homo sapiens
  misc_RNA (1)...(19): siRNA sense strand
agaaaauggaagagaugga

SEQ ID NO: 2594167 - RNA, 19 nt, Homo sapiens
  misc_RNA (1)...(19): siRNA sense strand
uaguaugugaggacuguaa

SEQ ID NO: 2594168 - RNA, 19 nt, Homo sapiens
  misc_RNA (1)...(19): siRNA sense strand
cugagaaaauggaagagau

SEQ ID NO: 2594169 - RNA, 19 nt, Homo sapiens
  misc_RNA (1)...(19): siRNA sense strand
ugggaaagaaggccaaaca

SEQ ID NO: 2594170 - RNA, 19 nt, Homo sapiens
  misc_RNA (1)...(19): siRNA sense strand
gccuagaaaacaugaggaa

SEQ ID NO: 2594171 - RNA, 19 nt, Homo sapiens
  misc_RNA (1)...(19): siRNA sense strand
gauugcucgagcugagaaa

SEQ ID NO: 2594172 - RNA, 19 nt, Homo sapiens
  misc_RNA (1)...(19): siRNA sense strand
augcaaaggaagacccuca

SEQ ID NO: 2594173 - RNA, 19 nt, Homo sapiens
  misc_RNA (1)...(19): siRNA sense strand
gagcugagaaaauggaaga

SEQ ID NO: 2594174 - RNA, 19 nt, Homo sapiens
  misc_RNA (1)...(19): siRNA sense strand
gcucaguacaagagaucaa

SEQ ID NO: 2594175 - RNA, 19 nt, Homo sapiens
  misc_RNA (1)...(19): siRNA sense strand
auuuagaagcugcuagaaa

SEQ ID NO: 2594176 - RNA, 19 nt, Homo sapiens
  misc_RNA (1)...(19): siRNA sense strand
ccaaggaucucaaggggua

SEQ ID NO: 2594177 - RNA, 19 nt, Homo sapiens
  misc_RNA (1)...(19): siRNA sense strand
cggaaauacuggagccgcu

SEQ ID NO: 2594178 - RNA, 19 nt, Homo sapiens
  misc_RNA (1)...(19): siRNA sense strand
acauggaugcacugaaaga

SEQ ID NO: 2594179 - RNA, 19 nt, Homo sapiens
  misc_RNA (1)...(19): siRNA sense strand
uggccaaucaucaagacaa

SEQ ID NO: 2594180 - RNA, 19 nt, Homo sapiens
  misc_RNA (1)...(19): siRNA sense strand
accaugaagcuguaagaau

SEQ ID NO: 2594181 - RNA, 19 nt, Homo sapiens
  misc_RNA (1)...(19): siRNA sense strand
cguuucuguacauggauua

SEQ ID NO: 2594182 - RNA, 19 nt, Homo sapiens
  misc_RNA (1)...(19): siRNA sense strand
cagacaaagaagagcccaa

SEQ ID NO: 2594183 - RNA, 19 nt, Homo sapiens
  misc_RNA (1)...(19): siRNA sense strand
aggcauuagcaguguggua

SEQ ID NO: 2594184 - RNA, 19 nt, Homo sapiens
  misc_RNA (1)...(19): siRNA sense strand
aggaggugaacuugaauaa

SEQ ID NO: 2594185 - RNA, 19 nt, Homo sapiens
  misc_RNA (1)...(19): siRNA sense strand
ugacauguugcgugagaau

SEQ ID NO: 2594186 - RNA, 19 nt, Homo sapiens
  misc_RNA (1)...(19): siRNA sense strand
auucagcccaagagggaaa

SEQ ID NO: 2594187 - RNA, 19 nt, Homo sapiens
  misc_RNA (1)...(19): siRNA sense strand
gcugaaggcaguucgggaa

SEQ ID NO: 2594188 - RNA, 19 nt, Homo sapiens
  misc_RNA (1)...(19): siRNA sense strand
acaaggagcuggaggaggu

SEQ ID NO: 2594189 - RNA, 19 nt, Homo sapiens
  misc_RNA (1)...(19): siRNA sense strand
agauggauccugagaacau

SEQ ID NO: 2594190 - RNA, 19 nt, Homo sapiens
  misc_RNA (1)...(19): siRNA sense strand
cugaaggcaguucgggaaa

SEQ ID NO: 2594191 - RNA, 19 nt, Homo sapiens
  misc_RNA (1)...(19): siRNA sense strand
acugaugaguaacaagcaa

SEQ ID NO: 2594192 - RNA, 19 nt, Homo sapiens
  misc_RNA (1)...(19): siRNA sense strand
acauagaugaagaugagau

SEQ ID NO: 2594193 - RNA, 19 nt, Homo sapiens
  misc_RNA (1)...(19): siRNA sense strand
uggcugacauguugcguga

SEQ ID NO: 2594194 - RNA, 19 nt, Homo sapiens
  misc_RNA (1)...(19): siRNA sense strand
gcgaacuacaggagaugga

SEQ ID NO: 2594195 - RNA, 19 nt, Homo sapiens
  misc_RNA (1)...(19): siRNA sense strand
aggagauacuaaagagggu

SEQ ID NO: 2594196 - RNA, 19 nt, Homo sapiens
  misc_RNA (1)...(19): siRNA sense strand
gcuccugccagcuggacua

SEQ ID NO: 2594197 - RNA, 19 nt, Homo sapiens
  misc_RNA (1)...(19): siRNA sense strand
acugcgaacuacaggagau

SEQ ID NO: 2594198 - RNA, 19 nt, Homo sapiens
  misc_RNA (1)...(19): siRNA sense strand
uggaggaggcacuggcaca

SEQ ID NO: 2594199 - RNA, 19 nt, Homo sapiens
  misc_RNA (1)...(19): siRNA sense strand
uagaagucaaagagcguga

SEQ ID NO: 2594200 - RNA, 19 nt, Homo sapiens
  misc_RNA (1)...(19): siRNA sense strand
gcauuagcagugugguaca

SEQ ID NO: 2594201 - RNA, 19 nt, Homo sapiens
  misc_RNA (1)...(19): siRNA sense strand
aaagaggguccgaagcaau

SEQ ID NO: 2594202 - RNA, 19 nt, Homo sapiens
  misc_RNA (1)...(19): siRNA sense strand
ugcaguacuuggagcaaca

SEQ ID NO: 2594203 - RNA, 19 nt, Homo sapiens
  misc_RNA (1)...(19): siRNA sense strand
aguauaagccagugccgga

SEQ ID NO: 2594204 - RNA, 19 nt, Homo sapiens
  misc_RNA (1)...(19): siRNA sense strand
ggcccaaggucaauggcaa

SEQ ID NO: 2594205 - RNA, 19 nt, Homo sapiens
  misc_RNA (1)...(19): siRNA sense strand
ccaaaguggcccaagguca

SEQ ID NO: 2594206 - RNA, 19 nt, Homo sapiens
  misc_RNA (1)...(19): siRNA sense strand
ggaccuuggaggaggaagu

SEQ ID NO: 2594207 - RNA, 19 nt, Homo sapiens
  misc_RNA (1)...(19): siRNA sense strand
uggccugcauugaggagaa

SEQ ID NO: 2594208 - RNA, 19 nt, Homo sapiens
  misc_RNA (1)...(19): siRNA sense strand
aggucaauggcaagaacua

SEQ ID NO: 2594209 - RNA, 19 nt, Homo sapiens
  misc_RNA (1)...(19): siRNA sense strand
gcaccugucuccagagcca

SEQ ID NO: 2594210 - RNA, 19 nt, Homo sapiens
  misc_RNA (1)...(19): siRNA sense strand
cagccauccgaaagagcua

SEQ ID NO: 2594211 - RNA, 19 nt, Homo sapiens
  misc_RNA (1)...(19): siRNA sense strand
acacacacucggagaaagu

SEQ ID NO: 2594212 - RNA, 19 nt, Homo sapiens
  misc_RNA (1)...(19): siRNA sense strand
ccaugcuuccugagggcaa

SEQ ID NO: 2594213 - RNA, 19 nt, Homo sapiens
  misc_RNA (1)...(19): siRNA sense strand
cagugaagacccuggccuu

SEQ ID NO: 2594214 - RNA, 19 nt, Homo sapiens
  misc_RNA (1)...(19): siRNA sense strand
ggagaaagucccuucccau

SEQ ID NO: 2594215 - RNA, 19 nt, Homo sapiens
  misc_RNA (1)...(19): siRNA sense strand
ccgcacuaauggcugggua

SEQ ID NO: 2594216 - RNA, 19 nt, Homo sapiens
  misc_RNA (1)...(19): siRNA sense strand
uguacaugcugguggagau

SEQ ID NO: 2594217 - RNA, 19 nt, Homo sapiens
  misc_RNA (1)...(19): siRNA sense strand
ggaaaaguggaaaccgaaa

SEQ ID NO: 2594218 - RNA, 19 nt, Homo sapiens
  misc_RNA (1)...(19): siRNA sense strand
aggagaagaacgccaacaa

SEQ ID NO: 2594219 - RNA, 19 nt, Homo sapiens
  misc_RNA (1)...(19): siRNA sense strand
ccuauggggcucuggaaaa

SEQ ID NO: 2594220 - RNA, 19 nt, Homo sapiens
  misc_RNA (1)...(19): siRNA sense strand
acaacauuucugagaucua

SEQ ID NO: 2594221 - RNA, 19 nt, Homo sapiens
  misc_RNA (1)...(19): siRNA sense strand
acgugauguucgugugcau

SEQ ID NO: 2594222 - RNA, 19 nt, Homo sapiens
  misc_RNA (1)...(19): siRNA sense strand
ugugauagcuagugccauc

SEQ ID NO: 2594223 - RNA, 19 nt, Homo sapiens
  misc_RNA (1)...(19): siRNA sense strand
gagaagaugacaggcgaga

SEQ ID NO: 2594224 - RNA, 19 nt, Homo sapiens
  misc_RNA (1)...(19): siRNA sense strand
cuccagaaguacugccaca

SEQ ID NO: 2594225 - RNA, 19 nt, Homo sapiens
  misc_RNA (1)...(19): siRNA sense strand
cguaacaggaagaagccca

SEQ ID NO: 2594226 - RNA, 19 nt, Homo sapiens
  misc_RNA (1)...(19): siRNA sense strand
ugguagaggcacugaaaga

SEQ ID NO: 2594227 - RNA, 19 nt, Homo sapiens
  misc_RNA (1)...(19): siRNA sense strand
agaugagcuucuuggcaaa

SEQ ID NO: 2594228 - RNA, 19 nt, Homo sapiens
  misc_RNA (1)...(19): siRNA sense strand
agaaagacagagaggacuu

SEQ ID NO: 2594229 - RNA, 19 nt, Homo sapiens
  misc_RNA (1)...(19): siRNA sense strand
agaagagaguugaagcaga

SEQ ID NO: 2594230 - RNA, 19 nt, Homo sapiens
  misc_RNA (1)...(19): siRNA sense strand
uggagaaauacaagaacau

SEQ ID NO: 2594231 - RNA, 19 nt, Homo sapiens
  misc_RNA (1)...(19): siRNA sense strand
cuggagaaauacaagaaca

SEQ ID NO: 2594232 - RNA, 19 nt, Homo sapiens
  misc_RNA (1)...(19): siRNA sense strand
gcaaugacccuguggccau

SEQ ID NO: 2594233 - RNA, 19 nt, Homo sapiens
  misc_RNA (1)...(19): siRNA sense strand
cugccaucacaaagaauaa

SEQ ID NO: 2594234 - RNA, 19 nt, Homo sapiens
  misc_RNA (1)...(19): siRNA sense strand
gaaauguugucaaagguga

SEQ ID NO: 2594235 - RNA, 19 nt, Homo sapiens
  misc_RNA (1)...(19): siRNA sense strand
gccuauagaaacucguaaa

SEQ ID NO: 2594236 - RNA, 19 nt, Homo sapiens
  misc_RNA (1)...(19): siRNA sense strand
agaaaagccuauagaaacu

SEQ ID NO: 2594237 - RNA, 19 nt, Homo sapiens
  misc_RNA (1)...(19): siRNA sense strand
uggaacagaaagacagaga

SEQ ID NO: 2594238 - RNA, 19 nt, Homo sapiens
  misc_RNA (1)...(19): siRNA sense strand
cagcuguagagauggaaau

SEQ ID NO: 2594239 - RNA, 19 nt, Homo sapiens
  misc_RNA (1)...(19): siRNA sense strand
augaagaaacagccaacaa

SEQ ID NO: 2594240 - RNA, 19 nt, Homo sapiens
  misc_RNA (1)...(19): siRNA sense strand
acagaaagacagagaggac

SEQ ID NO: 2594241 - RNA, 19 nt, Homo sapiens
  misc_RNA (1)...(19): siRNA sense strand
gacagaaagaccagacaca

SEQ ID NO: 2594242 - RNA, 19 nt, Homo sapiens
  misc_RNA (1)...(19): siRNA sense strand
guucguaagaagagaguug

SEQ ID NO: 2594243 - RNA, 19 nt, Homo sapiens
  misc_RNA (1)...(19): siRNA sense strand
gagaggacuuugugcccuu

SEQ ID NO: 2594244 - RNA, 19 nt, Homo sapiens
  misc_RNA (1)...(19): siRNA sense strand
ugaaaguaaacaagaccuu

SEQ ID NO: 2594245 - RNA, 19 nt, Homo sapiens
  misc_RNA (1)...(19): siRNA sense strand
gaagagaguugaagcagac

SEQ ID NO: 2594246 - RNA, 19 nt, Homo sapiens
  misc_RNA (1)...(19): siRNA sense strand
ggaagaagcuuuggccagu

SEQ ID NO: 2594247 - RNA, 19 nt, Homo sapiens
  misc_RNA (1)...(19): siRNA sense strand
ucguaagaagagaguugaa

SEQ ID NO: 2594248 - RNA, 19 nt, Homo sapiens
  misc_RNA (1)...(19): siRNA sense strand
gggaauuugcaaaggcucu

SEQ ID NO: 2594249 - RNA, 19 nt, Homo sapiens
  misc_RNA (1)...(19): siRNA sense strand
ggaaaauguucuagaugac

SEQ ID NO: 2594250 - RNA, 19 nt, Homo sapiens
  misc_RNA (1)...(19): siRNA sense strand
gaguacacaauuugcucaa

SEQ ID NO: 2594251 - RNA, 19 nt, Homo sapiens
  misc_RNA (1)...(19): siRNA sense strand
ccaaaguucgaugaagaaa

SEQ ID NO: 2594252 - RNA, 19 nt, Homo sapiens
  misc_RNA (1)...(19): siRNA sense strand
agaacauugaugaagauga

SEQ ID NO: 2594253 - RNA, 19 nt, Homo sapiens
  misc_RNA (1)...(19): siRNA sense strand
aaauguugucaaaggugaa

SEQ ID NO: 2594254 - RNA, 19 nt, Homo sapiens
  misc_RNA (1)...(19): siRNA sense strand
gaggagaauucaaggaucc

SEQ ID NO: 2594255 - RNA, 19 nt, Homo sapiens
  misc_RNA (1)...(19): siRNA sense strand
ggaacuaagcagagagagu

SEQ ID NO: 2594256 - RNA, 19 nt, Homo sapiens
  misc_RNA (1)...(19): siRNA sense strand
gcuacuaaagaaugagaaa

SEQ ID NO: 2594257 - RNA, 19 nt, Homo sapiens
  misc_RNA (1)...(19): siRNA sense strand
ccaaagguaaagagacaaa

SEQ ID NO: 2594258 - RNA, 19 nt, Homo sapiens
  misc_RNA (1)...(19): siRNA sense strand
augaagaauccaaagguaa

SEQ ID NO: 2594259 - RNA, 19 nt, Homo sapiens
  misc_RNA (1)...(19): siRNA sense strand
acucaaaacuuaaggaaca

SEQ ID NO: 2594260 - RNA, 19 nt, Homo sapiens
  misc_RNA (1)...(19): siRNA sense strand
caauguaagaacaggaauu

SEQ ID NO: 2594261 - RNA, 19 nt, Homo sapiens
  misc_RNA (1)...(19): siRNA sense strand
agagacaaagagagaguua

SEQ ID NO: 2594262 - RNA, 19 nt, Homo sapiens
  misc_RNA (1)...(19): siRNA sense strand
gccugggauuggagagaaa

SEQ ID NO: 2594263 - RNA, 19 nt, Homo sapiens
  misc_RNA (1)...(19): siRNA sense strand
auccaaagguaaagagaca

SEQ ID NO: 2594264 - RNA, 19 nt, Homo sapiens
  misc_RNA (1)...(19): siRNA sense strand
aaaucagguuggaggagaa

SEQ ID NO: 2594265 - RNA, 19 nt, Homo sapiens
  misc_RNA (1)...(19): siRNA sense strand
agaaagaugaggugcaaaa

SEQ ID NO: 2594266 - RNA, 19 nt, Homo sapiens
  misc_RNA (1)...(19): siRNA sense strand
acgacaagaccaugaacaa

SEQ ID NO: 2594267 - RNA, 19 nt, Homo sapiens
  misc_RNA (1)...(19): siRNA sense strand
auucagcaguguaaagaaa

SEQ ID NO: 2594268 - RNA, 19 nt, Homo sapiens
  misc_RNA (1)...(19): siRNA sense strand
agguaaagagacaaagaga

SEQ ID NO: 2594269 - RNA, 19 nt, Homo sapiens
  misc_RNA (1)...(19): siRNA sense strand
ucucaauauaccucagaaa

SEQ ID NO: 2594270 - RNA, 19 nt, Homo sapiens
  misc_RNA (1)...(19): siRNA sense strand
ccugugaaacugugagaga

SEQ ID NO: 2594271 - RNA, 19 nt, Homo sapiens
  misc_RNA (1)...(19): siRNA sense strand
ucaauauaccucagaaaca

SEQ ID NO: 2594272 - RNA, 19 nt, Homo sapiens
  misc_RNA (1)...(19): siRNA sense strand
ggaacgucucaaagaagaa

SEQ ID NO: 2594273 - RNA, 19 nt, Homo sapiens
  misc_RNA (1)...(19): siRNA sense strand
augaauaucgucagaaaca

SEQ ID NO: 2594274 - RNA, 19 nt, Homo sapiens
  misc_RNA (1)...(19): siRNA sense strand
agaaagaguagaugauagu

SEQ ID NO: 2594275 - RNA, 19 nt, Homo sapiens
  misc_RNA (1)...(19): siRNA sense strand
ccaggaaugaagaugaaau

SEQ ID NO: 2594276 - RNA, 19 nt, Homo sapiens
  misc_RNA (1)...(19): siRNA sense strand
gguuaaagcagcaguuucu

SEQ ID NO: 2594277 - RNA, 19 nt, Homo sapiens
  misc_RNA (1)...(19): siRNA sense strand
gcugaagaaauuaaaccaa

SEQ ID NO: 2594278 - RNA, 19 nt, Homo sapiens
  misc_RNA (1)...(19): siRNA sense strand
gggaaaugauugggcuuca

SEQ ID NO: 2594279 - RNA, 19 nt, Homo sapiens
  misc_RNA (1)...(19): siRNA sense strand
guagaugauaguacaggaa

SEQ ID NO: 2594280 - RNA, 19 nt, Homo sapiens
  misc_RNA (1)...(19): siRNA sense strand
ucgggagagcugauggaaa

SEQ ID NO: 2594281 - RNA, 19 nt, Homo sapiens
  misc_RNA (1)...(19): siRNA sense strand
agaugauaguacaggaacu

SEQ ID NO: 2594282 - RNA, 19 nt, Homo sapiens
  misc_RNA (1)...(19): siRNA sense strand
uggaaaaugcagaacuuaa

SEQ ID NO: 2594283 - RNA, 19 nt, Homo sapiens
  misc_RNA (1)...(19): siRNA sense strand
ggacaaucuuauagugcac

SEQ ID NO: 2594284 - RNA, 19 nt, Homo sapiens
  misc_RNA (1)...(19): siRNA sense strand
aaagagacaaagagagagu

SEQ ID NO: 2594285 - RNA, 19 nt, Homo sapiens
  misc_RNA (1)...(19): siRNA sense strand
gcuucaggaaagagacaga

SEQ ID NO: 2594286 - RNA, 19 nt, Homo sapiens
  misc_RNA (1)...(19): siRNA sense strand
uagagaaagaguagaugau

SEQ ID NO: 2594287 - RNA, 19 nt, Homo sapiens
  misc_RNA (1)...(19): siRNA sense strand
cuuaaggaacaacuggaaa

SEQ ID NO: 2594288 - RNA, 19 nt, Homo sapiens
  misc_RNA (1)...(19): siRNA sense strand
agaaaauagcuauggacau

SEQ ID NO: 2594289 - RNA, 19 nt, Homo sapiens
  misc_RNA (1)...(19): siRNA sense strand
agccaggaaugaagaugaa

SEQ ID NO: 2594290 - RNA, 19 nt, Homo sapiens
  misc_RNA (1)...(19): siRNA sense strand
gcaucagcuacuaaagaau

SEQ ID NO: 2594291 - RNA, 19 nt, Homo sapiens
  misc_RNA (1)...(19): siRNA sense strand
ggaaguucugauugggaca

SEQ ID NO: 2594292 - RNA, 19 nt, Homo sapiens
  misc_RNA (1)...(19): siRNA sense strand
acacaaauucucauguaga

SEQ ID NO: 2594293 - RNA, 19 nt, Homo sapiens
  misc_RNA (1)...(19): siRNA sense strand
cuaaagaaugagaaagaug

SEQ ID NO: 2594294 - RNA, 19 nt, Homo sapiens
  misc_RNA (1)...(19): siRNA sense strand
gauuggagagaaaggcauu

SEQ ID NO: 2594295 - RNA, 19 nt, Homo sapiens
  misc_RNA (1)...(19): siRNA sense strand
gagggaaaugauugggcuu

SEQ ID NO: 2594296 - RNA, 19 nt, Homo sapiens
  misc_RNA (1)...(19): siRNA sense strand
cuagagaaagaguagauga

SEQ ID NO: 2594297 - RNA, 19 nt, Homo sapiens
  misc_RNA (1)...(19): siRNA sense strand
acuguuauuuguuggaaga

SEQ ID NO: 2594298 - RNA, 19 nt, Homo sapiens
  misc_RNA (1)...(19): siRNA sense strand
uuugagagggagagacgaa

SEQ ID NO: 2594299 - RNA, 19 nt, Homo sapiens
  misc_RNA (1)...(19): siRNA sense strand
gggcuucaggaaagagaca

SEQ ID NO: 2594300 - RNA, 19 nt, Homo sapiens
  misc_RNA (1)...(19): siRNA sense strand
ggcauuugaagaagaaaga

SEQ ID NO: 2594301 - RNA, 19 nt, Homo sapiens
  misc_RNA (1)...(19): siRNA sense strand
ccaccagaacucagaaaau

SEQ ID NO: 2594302 - RNA, 19 nt, Homo sapiens
  misc_RNA (1)...(19): siRNA sense strand
gagacaaagagagaguuaa

SEQ ID NO: 2594303 - RNA, 19 nt, Homo sapiens
  misc_RNA (1)...(19): siRNA sense strand
cagaauuugaagcugggaa

SEQ ID NO: 2594304 - RNA, 19 nt, Homo sapiens
  misc_RNA (1)...(19): siRNA sense strand
augauugggcuucaggaaa

SEQ ID NO: 2594305 - RNA, 19 nt, Homo sapiens
  misc_RNA (1)...(19): siRNA sense strand
cagaagaggaagaggagga

SEQ ID NO: 2594306 - RNA, 19 nt, Homo sapiens
  misc_RNA (1)...(19): siRNA sense strand
aggaagaggaggaggagga

SEQ ID NO: 2594307 - RNA, 19 nt, Homo sapiens
  misc_RNA (1)...(19): siRNA sense strand
aggaggaggaggaggaaga

SEQ ID NO: 2594308 - RNA, 19 nt, Homo sapiens
  misc_RNA (1)...(19): siRNA sense strand
cgccaaaccuccaagggaa

SEQ ID NO: 2594309 - RNA, 19 nt, Homo sapiens
  misc_RNA (1)...(19): siRNA sense strand
gggugagggagauggaaau

SEQ ID NO: 2594310 - RNA, 19 nt, Homo sapiens
  misc_RNA (1)...(19): siRNA sense strand
ggguggaaaugcugagcga

SEQ ID NO: 2594311 - RNA, 19 nt, Homo sapiens
  misc_RNA (1)...(19): siRNA sense strand
guggaaaugcugagcgagu

SEQ ID NO: 2594312 - RNA, 19 nt, Homo sapiens
  misc_RNA (1)...(19): siRNA sense strand
aggaggaggaggaggagga

SEQ ID NO: 2594313 - RNA, 19 nt, Homo sapiens
  misc_RNA (1)...(19): siRNA sense strand
aggaggaggaggaggagga

SEQ ID NO: 2594314 - RNA, 19 nt, Homo sapiens
  misc_RNA (1)...(19): siRNA sense strand
aggaggaggaggaggagga

SEQ ID NO: 2594315 - RNA, 19 nt, Homo sapiens
  misc_RNA (1)...(19): siRNA sense strand
ccgccuuggugaaugggaa

SEQ ID NO: 2594316 - RNA, 19 nt, Homo sapiens
  misc_RNA (1)...(19): siRNA sense strand
ccguaggauuggaggcugu

SEQ ID NO: 2594317 - RNA, 19 nt, Homo sapiens
  misc_RNA (1)...(19): siRNA sense strand
gguggauucagaagaggaa

SEQ ID NO: 2594318 - RNA, 19 nt, Homo sapiens
  misc_RNA (1)...(19): siRNA sense strand
aagaggaagaggaggagga

SEQ ID NO: 2594319 - RNA, 19 nt, Homo sapiens
  misc_RNA (1)...(19): siRNA sense strand
aagaggaggaggaggagga

SEQ ID NO: 2594320 - RNA, 19 nt, Homo sapiens
  misc_RNA (1)...(19): siRNA sense strand
ggggugagggagauggaaa

SEQ ID NO: 2594321 - RNA, 19 nt, Homo sapiens
  misc_RNA (1)...(19): siRNA sense strand
gccugggagaugagggaau

SEQ ID NO: 2594322 - RNA, 19 nt, Homo sapiens
  misc_RNA (1)...(19): siRNA sense strand
ggccauuaucucagggcuu

SEQ ID NO: 2594323 - RNA, 19 nt, Homo sapiens
  misc_RNA (1)...(19): siRNA sense strand
aagaaauaccuaagcagga

SEQ ID NO: 2594324 - RNA, 19 nt, Homo sapiens
  misc_RNA (1)...(19): siRNA sense strand
ccuaucagauugaggucca

SEQ ID NO: 2594325 - RNA, 19 nt, Homo sapiens
  misc_RNA (1)...(19): siRNA sense strand
uggauucagaagaggaaga

SEQ ID NO: 2594326 - RNA, 19 nt, Homo sapiens
  misc_RNA (1)...(19): siRNA sense strand
ggaacaacucggagccugu

SEQ ID NO: 2594327 - RNA, 19 nt, Homo sapiens
  misc_RNA (1)...(19): siRNA sense strand
aggaccuggaugagggcua

SEQ ID NO: 2594328 - RNA, 19 nt, Homo sapiens
  misc_RNA (1)...(19): siRNA sense strand
ccuugaaucagcucagcaa

SEQ ID NO: 2594329 - RNA, 19 nt, Homo sapiens
  misc_RNA (1)...(19): siRNA sense strand
auucagaagaggaagagga

SEQ ID NO: 2594330 - RNA, 19 nt, Homo sapiens
  misc_RNA (1)...(19): siRNA sense strand
agggagcacgugagagaga

SEQ ID NO: 2594331 - RNA, 19 nt, Homo sapiens
  misc_RNA (1)...(19): siRNA sense strand
gagguguaaucguggggaa

SEQ ID NO: 2594332 - RNA, 19 nt, Homo sapiens
  misc_RNA (1)...(19): siRNA sense strand
gaggaguugccaaaagaaa

SEQ ID NO: 2594333 - RNA, 19 nt, Homo sapiens
  misc_RNA (1)...(19): siRNA sense strand
gagagagaggaguugccaa

SEQ ID NO: 2594334 - RNA, 19 nt, Homo sapiens
  misc_RNA (1)...(19): siRNA sense strand
agugaggagcaaagugaca

SEQ ID NO: 2594335 - RNA, 19 nt, Homo sapiens
  misc_RNA (1)...(19): siRNA sense strand
ccuguuuagccuugaauca

SEQ ID NO: 2594336 - RNA, 19 nt, Homo sapiens
  misc_RNA (1)...(19): siRNA sense strand
ggccagaacuccacccuca

SEQ ID NO: 2594337 - RNA, 19 nt, Homo sapiens
  misc_RNA (1)...(19): siRNA sense strand
cccuagaguccaagagaau

SEQ ID NO: 2594338 - RNA, 19 nt, Homo sapiens
  misc_RNA (1)...(19): siRNA sense strand
ugaaaaggcagcagauaua

SEQ ID NO: 2594339 - RNA, 19 nt, Homo sapiens
  misc_RNA (1)...(19): siRNA sense strand
gugaaaaggcagcagauau

SEQ ID NO: 2594340 - RNA, 19 nt, Homo sapiens
  misc_RNA (1)...(19): siRNA sense strand
cacugcagguugaggacaa

SEQ ID NO: 2594341 - RNA, 19 nt, Homo sapiens
  misc_RNA (1)...(19): siRNA sense strand
ccaagagaauccuggugau

SEQ ID NO: 2594342 - RNA, 19 nt, Homo sapiens
  misc_RNA (1)...(19): siRNA sense strand
gggaagaagcacagaccac

SEQ ID NO: 2594343 - RNA, 19 nt, Homo sapiens
  misc_RNA (1)...(19): siRNA sense strand
agauauagcaccagggcag

SEQ ID NO: 2594344 - RNA, 19 nt, Homo sapiens
  misc_RNA (1)...(19): siRNA sense strand
caugagaagaacaaggcau

SEQ ID NO: 2594345 - RNA, 19 nt, Homo sapiens
  misc_RNA (1)...(19): siRNA sense strand
augcacagcaggagacaca

SEQ ID NO: 2594346 - RNA, 19 nt, Homo sapiens
  misc_RNA (1)...(19): siRNA sense strand
ccucaguuccucaaagaca

SEQ ID NO: 2594347 - RNA, 19 nt, Homo sapiens
  misc_RNA (1)...(19): siRNA sense strand
gcaccagggcagacacuca

SEQ ID NO: 2594348 - RNA, 19 nt, Homo sapiens
  misc_RNA (1)...(19): siRNA sense strand
agacagaccuccaugccca

SEQ ID NO: 2594349 - RNA, 19 nt, Homo sapiens
  misc_RNA (1)...(19): siRNA sense strand
gcgggcaugagaagaacaa

SEQ ID NO: 2594350 - RNA, 19 nt, Homo sapiens
  misc_RNA (1)...(19): siRNA sense strand
gugugaaggaggagcccaa

SEQ ID NO: 2594351 - RNA, 19 nt, Homo sapiens
  misc_RNA (1)...(19): siRNA sense strand
gcagcaugacccugggcaa

SEQ ID NO: 2594352 - RNA, 19 nt, Homo sapiens
  misc_RNA (1)...(19): siRNA sense strand
gggaaaugagagugagggu

SEQ ID NO: 2594353 - RNA, 19 nt, Homo sapiens
  misc_RNA (1)...(19): siRNA sense strand
agaaggaacuguacuggga

SEQ ID NO: 2594354 - RNA, 19 nt, Homo sapiens
  misc_RNA (1)...(19): siRNA sense strand
ccauggacaccaagaacca

SEQ ID NO: 2594355 - RNA, 19 nt, Homo sapiens
  misc_RNA (1)...(19): siRNA sense strand
aggcacaggcccagucaga

SEQ ID NO: 2594356 - RNA, 19 nt, Homo sapiens
  misc_RNA (1)...(19): siRNA sense strand
gaggcagagaccaggguuu

SEQ ID NO: 2594357 - RNA, 19 nt, Homo sapiens
  misc_RNA (1)...(19): siRNA sense strand
uggaagcuauggaggcaga

SEQ ID NO: 2594358 - RNA, 19 nt, Homo sapiens
  misc_RNA (1)...(19): siRNA sense strand
aggaaauacugaggagaaa

SEQ ID NO: 2594359 - RNA, 19 nt, Homo sapiens
  misc_RNA (1)...(19): siRNA sense strand
ugaugaaagaggugguuua

SEQ ID NO: 2594360 - RNA, 19 nt, Homo sapiens
  misc_RNA (1)...(19): siRNA sense strand
aagaggugguuuagagaau

SEQ ID NO: 2594361 - RNA, 19 nt, Homo sapiens
  misc_RNA (1)...(19): siRNA sense strand
gcugagaggaaaaggauua

SEQ ID NO: 2594362 - RNA, 19 nt, Homo sapiens
  misc_RNA (1)...(19): siRNA sense strand
agauauuccuacagaugaa

SEQ ID NO: 2594363 - RNA, 19 nt, Homo sapiens
  misc_RNA (1)...(19): siRNA sense strand
gguaaauacaccacauaau

SEQ ID NO: 2594364 - RNA, 19 nt, Homo sapiens
  misc_RNA (1)...(19): siRNA sense strand
aauagcaagcgaagagaaa

SEQ ID NO: 2594365 - RNA, 19 nt, Homo sapiens
  misc_RNA (1)...(19): siRNA sense strand
caugaauggguuaggaaau

SEQ ID NO: 2594366 - RNA, 19 nt, Homo sapiens
  misc_RNA (1)...(19): siRNA sense strand
uaggaaauacugaggagaa

SEQ ID NO: 2594367 - RNA, 19 nt, Homo sapiens
  misc_RNA (1)...(19): siRNA sense strand
aggcauggccaguggugaa

SEQ ID NO: 2594368 - RNA, 19 nt, Homo sapiens
  misc_RNA (1)...(19): siRNA sense strand
caugaaaauuagugcagaa

SEQ ID NO: 2594369 - RNA, 19 nt, Homo sapiens
  misc_RNA (1)...(19): siRNA sense strand
ggacaaauacagaggagac

SEQ ID NO: 2594370 - RNA, 19 nt, Homo sapiens
  misc_RNA (1)...(19): siRNA sense strand
agaugaaccugaagagcca

SEQ ID NO: 2594371 - RNA, 19 nt, Homo sapiens
  misc_RNA (1)...(19): siRNA sense strand
agauggagccagaagauau

SEQ ID NO: 2594372 - RNA, 19 nt, Homo sapiens
  misc_RNA (1)...(19): siRNA sense strand
uuaaaguggcaaugaacua

SEQ ID NO: 2594373 - RNA, 19 nt, Homo sapiens
  misc_RNA (1)...(19): siRNA sense strand
ccugaugagcaguccgaaa

SEQ ID NO: 2594374 - RNA, 19 nt, Homo sapiens
  misc_RNA (1)...(19): siRNA sense strand
cugaaaaucuagugguuga

SEQ ID NO: 2594375 - RNA, 19 nt, Homo sapiens
  misc_RNA (1)...(19): siRNA sense strand
agaaaauggacuuggaaga

SEQ ID NO: 2594376 - RNA, 19 nt, Homo sapiens
  misc_RNA (1)...(19): siRNA sense strand
ccagcaaacagaacagcaa

SEQ ID NO: 2594377 - RNA, 19 nt, Homo sapiens
  misc_RNA (1)...(19): siRNA sense strand
uuauuaagauggagccaga

SEQ ID NO: 2594378 - RNA, 19 nt, Homo sapiens
  misc_RNA (1)...(19): siRNA sense strand
aguuuaaaguggcaaugaa

SEQ ID NO: 2594379 - RNA, 19 nt, Homo sapiens
  misc_RNA (1)...(19): siRNA sense strand
cgguaaauacaccacauaa

SEQ ID NO: 2594380 - RNA, 19 nt, Homo sapiens
  misc_RNA (1)...(19): siRNA sense strand
auagagaggcugaugaaga

SEQ ID NO: 2594381 - RNA, 19 nt, Homo sapiens
  misc_RNA (1)...(19): siRNA sense strand
cugugauagcuguggauuu

SEQ ID NO: 2594382 - RNA, 19 nt, Homo sapiens
  misc_RNA (1)...(19): siRNA sense strand
uuacaauaaccgaggagga

SEQ ID NO: 2594383 - RNA, 19 nt, Homo sapiens
  misc_RNA (1)...(19): siRNA sense strand
uaucugugcaugugguaaa

SEQ ID NO: 2594384 - RNA, 19 nt, Homo sapiens
  misc_RNA (1)...(19): siRNA sense strand
gaacauaugucuagcugcu

SEQ ID NO: 2594385 - RNA, 19 nt, Homo sapiens
  misc_RNA (1)...(19): siRNA sense strand
caaauacagaggagacaca

SEQ ID NO: 2594386 - RNA, 19 nt, Homo sapiens
  misc_RNA (1)...(19): siRNA sense strand
cagcaaacagaacagcaaa

SEQ ID NO: 2594387 - RNA, 19 nt, Homo sapiens
  misc_RNA (1)...(19): siRNA sense strand
uggaagaaaaugaaagaga

SEQ ID NO: 2594388 - RNA, 19 nt, Homo sapiens
  misc_RNA (1)...(19): siRNA sense strand
ugaaagagaucacagacga

SEQ ID NO: 2594389 - RNA, 19 nt, Homo sapiens
  misc_RNA (1)...(19): siRNA sense strand
aguagauauuagagaugga

SEQ ID NO: 2594390 - RNA, 19 nt, Homo sapiens
  misc_RNA (1)...(19): siRNA sense strand
ggaaaagacaguaacauca

SEQ ID NO: 2594391 - RNA, 19 nt, Homo sapiens
  misc_RNA (1)...(19): siRNA sense strand
acaagaggaugcugaaaau

SEQ ID NO: 2594392 - RNA, 19 nt, Homo sapiens
  misc_RNA (1)...(19): siRNA sense strand
uugaagaagaugucagcau

SEQ ID NO: 2594393 - RNA, 19 nt, Homo sapiens
  misc_RNA (1)...(19): siRNA sense strand
cuguguggacuuacaauaa

SEQ ID NO: 2594394 - RNA, 19 nt, Homo sapiens
  misc_RNA (1)...(19): siRNA sense strand
ggaaauacugaggagaaaa

SEQ ID NO: 2594395 - RNA, 19 nt, Homo sapiens
  misc_RNA (1)...(19): siRNA sense strand
ccaaauuaucuacuccaaa

SEQ ID NO: 2594396 - RNA, 19 nt, Homo sapiens
  misc_RNA (1)...(19): siRNA sense strand
uguaaugaauccacugaca

SEQ ID NO: 2594397 - RNA, 19 nt, Homo sapiens
  misc_RNA (1)...(19): siRNA sense strand
ucuaaaaccucgaauguca

SEQ ID NO: 2594398 - RNA, 19 nt, Homo sapiens
  misc_RNA (1)...(19): siRNA sense strand
caguccgaaauaagagaua

SEQ ID NO: 2594399 - RNA, 19 nt, Homo sapiens
  misc_RNA (1)...(19): siRNA sense strand
cuggaugauuuuagggaca

SEQ ID NO: 2594400 - RNA, 19 nt, Homo sapiens
  misc_RNA (1)...(19): siRNA sense strand
gagauggaaaagacaguaa

SEQ ID NO: 2594401 - RNA, 19 nt, Homo sapiens
  misc_RNA (1)...(19): siRNA sense strand
uaaugaauccacugacaau

SEQ ID NO: 2594402 - RNA, 19 nt, Homo sapiens
  misc_RNA (1)...(19): siRNA sense strand
uuguugaaaugcuggauga

SEQ ID NO: 2594403 - RNA, 19 nt, Homo sapiens
  misc_RNA (1)...(19): siRNA sense strand
ucagcauaguacugcacaa

SEQ ID NO: 2594404 - RNA, 19 nt, Homo sapiens
  misc_RNA (1)...(19): siRNA sense strand
caguaacaucaaagcugaa

SEQ ID NO: 2594405 - RNA, 19 nt, Homo sapiens
  misc_RNA (1)...(19): siRNA sense strand
gaaauacugaggagaaaau

SEQ ID NO: 2594406 - RNA, 19 nt, Homo sapiens
  misc_RNA (1)...(19): siRNA sense strand
gcuuagaucaagauauguu

SEQ ID NO: 2594407 - RNA, 19 nt, Homo sapiens
  misc_RNA (1)...(19): siRNA sense strand
auacaauguuccugacugu

SEQ ID NO: 2594408 - RNA, 19 nt, Homo sapiens
  misc_RNA (1)...(19): siRNA sense strand
ugugguaaauguggacaaa

SEQ ID NO: 2594409 - RNA, 19 nt, Homo sapiens
  misc_RNA (1)...(19): siRNA sense strand
ggguaggcagcuucaggaa

SEQ ID NO: 2594410 - RNA, 19 nt, Homo sapiens
  misc_RNA (1)...(19): siRNA sense strand
gcacaaaggcauggccagu

SEQ ID NO: 2594411 - RNA, 19 nt, Homo sapiens
  misc_RNA (1)...(19): siRNA sense strand
aauuagaagaugaaccuga

SEQ ID NO: 2594412 - RNA, 19 nt, Homo sapiens
  misc_RNA (1)...(19): siRNA sense strand
guacaagaggaugcugaaa

SEQ ID NO: 2594413 - RNA, 19 nt, Homo sapiens
  misc_RNA (1)...(19): siRNA sense strand
gcuguguggacuuacaaua

SEQ ID NO: 2594414 - RNA, 19 nt, Homo sapiens
  misc_RNA (1)...(19): siRNA sense strand
uguuuggaguggagggaaa

SEQ ID NO: 2594415 - RNA, 19 nt, Homo sapiens
  misc_RNA (1)...(19): siRNA sense strand
gcacaaagauucaggagcu

SEQ ID NO: 2594416 - RNA, 19 nt, Homo sapiens
  misc_RNA (1)...(19): siRNA sense strand
cugcacagcaagugggaga

SEQ ID NO: 2594417 - RNA, 19 nt, Homo sapiens
  misc_RNA (1)...(19): siRNA sense strand
acagcaagugggagagaca

SEQ ID NO: 2594418 - RNA, 19 nt, Homo sapiens
  misc_RNA (1)...(19): siRNA sense strand
uggagaagagggagaagca

SEQ ID NO: 2594419 - RNA, 19 nt, Homo sapiens
  misc_RNA (1)...(19): siRNA sense strand
cccaaaggucacugcacaa

SEQ ID NO: 2594420 - RNA, 19 nt, Homo sapiens
  misc_RNA (1)...(19): siRNA sense strand
gcccaaaggucacugcaca

SEQ ID NO: 2594421 - RNA, 19 nt, Homo sapiens
  misc_RNA (1)...(19): siRNA sense strand
agagacaggacuacgaaaa

SEQ ID NO: 2594422 - RNA, 19 nt, Homo sapiens
  misc_RNA (1)...(19): siRNA sense strand
cccagaagagggagcguga

SEQ ID NO: 2594423 - RNA, 19 nt, Homo sapiens
  misc_RNA (1)...(19): siRNA sense strand
aggaaugggcugaacgugu

SEQ ID NO: 2594424 - RNA, 19 nt, Homo sapiens
  misc_RNA (1)...(19): siRNA sense strand
cugcaguacuuccuggaga

SEQ ID NO: 2594425 - RNA, 19 nt, Homo sapiens
  misc_RNA (1)...(19): siRNA sense strand
cacugugguuguaggaaca

SEQ ID NO: 2594426 - RNA, 19 nt, Homo sapiens
  misc_RNA (1)...(19): siRNA sense strand
gggaaacagcgaugagcuc

SEQ ID NO: 2594427 - RNA, 19 nt, Homo sapiens
  misc_RNA (1)...(19): siRNA sense strand
agugggagagacaggacua

SEQ ID NO: 2594428 - RNA, 19 nt, Homo sapiens
  misc_RNA (1)...(19): siRNA sense strand
cuuugagagcagucagaaa

SEQ ID NO: 2594429 - RNA, 19 nt, Homo sapiens
  misc_RNA (1)...(19): siRNA sense strand
agucagaaauauaaggaag

SEQ ID NO: 2594430 - RNA, 19 nt, Homo sapiens
  misc_RNA (1)...(19): siRNA sense strand
ggaaauacgagcaugccuu

SEQ ID NO: 2594431 - RNA, 19 nt, Homo sapiens
  misc_RNA (1)...(19): siRNA sense strand
cagaaauauaaggaaggaa

SEQ ID NO: 2594432 - RNA, 19 nt, Homo sapiens
  misc_RNA (1)...(19): siRNA sense strand
gcagagcacaccuggccaa

SEQ ID NO: 2594433 - RNA, 19 nt, Homo sapiens
  misc_RNA (1)...(19): siRNA sense strand
cucauaugaucaaagacaa

SEQ ID NO: 2594434 - RNA, 19 nt, Homo sapiens
  misc_RNA (1)...(19): siRNA sense strand
gcaaagagagagagaggga

SEQ ID NO: 2594435 - RNA, 19 nt, Homo sapiens
  misc_RNA (1)...(19): siRNA sense strand
ggaacauggaggucauaaa

SEQ ID NO: 2594436 - RNA, 19 nt, Homo sapiens
  misc_RNA (1)...(19): siRNA sense strand
cugaugaagaggaggaaca

SEQ ID NO: 2594437 - RNA, 19 nt, Homo sapiens
  misc_RNA (1)...(19): siRNA sense strand
ggaggaacauggaggucau

SEQ ID NO: 2594438 - RNA, 19 nt, Homo sapiens
  misc_RNA (1)...(19): siRNA sense strand
aaagagagagagagggaca

SEQ ID NO: 2594439 - RNA, 19 nt, Homo sapiens
  misc_RNA (1)...(19): siRNA sense strand
ccucaggcaaagagagaga

SEQ ID NO: 2594440 - RNA, 19 nt, Homo sapiens
  misc_RNA (1)...(19): siRNA sense strand
gggcaaagguucaggcugc

SEQ ID NO: 2594441 - RNA, 19 nt, Homo sapiens
  misc_RNA (1)...(19): siRNA sense strand
gauuuggcuugguggcuua

SEQ ID NO: 2594442 - RNA, 19 nt, Homo sapiens
  misc_RNA (1)...(19): siRNA sense strand
gaugaaaacuacagagaag

SEQ ID NO: 2594443 - RNA, 19 nt, Homo sapiens
  misc_RNA (1)...(19): siRNA sense strand
ccaauauccuucaucacaa

SEQ ID NO: 2594444 - RNA, 19 nt, Homo sapiens
  misc_RNA (1)...(19): siRNA sense strand
gccaagaagaugaaaacua

SEQ ID NO: 2594445 - RNA, 19 nt, Homo sapiens
  misc_RNA (1)...(19): siRNA sense strand
gggaauuaguggacagagc

SEQ ID NO: 2594446 - RNA, 19 nt, Homo sapiens
  misc_RNA (1)...(19): siRNA sense strand
gcuaccagaugaacgggaa

SEQ ID NO: 2594447 - RNA, 19 nt, Homo sapiens
  misc_RNA (1)...(19): siRNA sense strand
cuuuuaaugucaaggagaa

SEQ ID NO: 2594448 - RNA, 19 nt, Homo sapiens
  misc_RNA (1)...(19): siRNA sense strand
cgaugaaaggaaugggucu

SEQ ID NO: 2594449 - RNA, 19 nt, Homo sapiens
  misc_RNA (1)...(19): siRNA sense strand
aaacuacagagaagggauu

SEQ ID NO: 2594450 - RNA, 19 nt, Homo sapiens
  misc_RNA (1)...(19): siRNA sense strand
gaaugagauugaaggugca

SEQ ID NO: 2594451 - RNA, 19 nt, Homo sapiens
  misc_RNA (1)...(19): siRNA sense strand
cuaaacaacagaugccauu

SEQ ID NO: 2594452 - RNA, 19 nt, Homo sapiens
  misc_RNA (1)...(19): siRNA sense strand
gggucuagaacaugcugua

SEQ ID NO: 2594453 - RNA, 19 nt, Homo sapiens
  misc_RNA (1)...(19): siRNA sense strand
uaacagggagccaugauua

SEQ ID NO: 2594454 - RNA, 19 nt, Homo sapiens
  misc_RNA (1)...(19): siRNA sense strand
auuugugggucuagaacau

SEQ ID NO: 2594455 - RNA, 19 nt, Homo sapiens
  misc_RNA (1)...(19): siRNA sense strand
ggcuuaugcugcagauuca

SEQ ID NO: 2594456 - RNA, 19 nt, Homo sapiens
  misc_RNA (1)...(19): siRNA sense strand
cuguaaaccggaucaaaga

SEQ ID NO: 2594457 - RNA, 19 nt, Homo sapiens
  misc_RNA (1)...(19): siRNA sense strand
cagcaaguuccucaggcaa

SEQ ID NO: 2594458 - RNA, 19 nt, Homo sapiens
  misc_RNA (1)...(19): siRNA sense strand
agcaaguuccucaggcaaa

SEQ ID NO: 2594459 - RNA, 19 nt, Homo sapiens
  misc_RNA (1)...(19): siRNA sense strand
agggcuggaguuugggaua

SEQ ID NO: 2594460 - RNA, 19 nt, Homo sapiens
  misc_RNA (1)...(19): siRNA sense strand
aggcaaagagagagagagg

SEQ ID NO: 2594461 - RNA, 19 nt, Homo sapiens
  misc_RNA (1)...(19): siRNA sense strand
cagagaagggauuuggcuu

SEQ ID NO: 2594462 - RNA, 19 nt, Homo sapiens
  misc_RNA (1)...(19): siRNA sense strand
ucaugacaacugaggaaaa

SEQ ID NO: 2594463 - RNA, 19 nt, Homo sapiens
  misc_RNA (1)...(19): siRNA sense strand
uggcaaaagggaagcugaa

SEQ ID NO: 2594464 - RNA, 19 nt, Homo sapiens
  misc_RNA (1)...(19): siRNA sense strand
agaaauuaaugaugugccu

SEQ ID NO: 2594465 - RNA, 19 nt, Homo sapiens
  misc_RNA (1)...(19): siRNA sense strand
ccgagaagcuuuugaaccu

SEQ ID NO: 2594466 - RNA, 19 nt, Homo sapiens
  misc_RNA (1)...(19): siRNA sense strand
aucacaaccacgagcuaaa

SEQ ID NO: 2594467 - RNA, 19 nt, Homo sapiens
  misc_RNA (1)...(19): siRNA sense strand
gaauauugcuagaggacaa

SEQ ID NO: 2594468 - RNA, 19 nt, Homo sapiens
  misc_RNA (1)...(19): siRNA sense strand
gggaagaguggaagggaua

SEQ ID NO: 2594469 - RNA, 19 nt, Homo sapiens
  misc_RNA (1)...(19): siRNA sense strand
cagacaagauagagagaau

SEQ ID NO: 2594470 - RNA, 19 nt, Homo sapiens
  misc_RNA (1)...(19): siRNA sense strand
auguaaagcuggagaguuu

SEQ ID NO: 2594471 - RNA, 19 nt, Homo sapiens
  misc_RNA (1)...(19): siRNA sense strand
cuauaagcuuggagugaaa

SEQ ID NO: 2594472 - RNA, 19 nt, Homo sapiens
  misc_RNA (1)...(19): siRNA sense strand
cuguaaagaucaagaugaa

SEQ ID NO: 2594473 - RNA, 19 nt, Homo sapiens
  misc_RNA (1)...(19): siRNA sense strand
gggaauaccucuugaacca

SEQ ID NO: 2594474 - RNA, 19 nt, Homo sapiens
  misc_RNA (1)...(19): siRNA sense strand
cguuuauacuggacagaua

SEQ ID NO: 2594475 - RNA, 19 nt, Homo sapiens
  misc_RNA (1)...(19): siRNA sense strand
ccuugagacuggagggaau

SEQ ID NO: 2594476 - RNA, 19 nt, Homo sapiens
  misc_RNA (1)...(19): siRNA sense strand
ggacagacugggaggaaga

SEQ ID NO: 2594477 - RNA, 19 nt, Homo sapiens
  misc_RNA (1)...(19): siRNA sense strand
cuuaagauguaaugggcaa

SEQ ID NO: 2594478 - RNA, 19 nt, Homo sapiens
  misc_RNA (1)...(19): siRNA sense strand
ugagagaaauugugagaca

SEQ ID NO: 2594479 - RNA, 19 nt, Homo sapiens
  misc_RNA (1)...(19): siRNA sense strand
ccaagauagcugaugaaua

SEQ ID NO: 2594480 - RNA, 19 nt, Homo sapiens
  misc_RNA (1)...(19): siRNA sense strand
cuacuggacugaugggaaa

SEQ ID NO: 2594481 - RNA, 19 nt, Homo sapiens
  misc_RNA (1)...(19): siRNA sense strand
ggucagaaauaguacaaga

SEQ ID NO: 2594482 - RNA, 19 nt, Homo sapiens
  misc_RNA (1)...(19): siRNA sense strand
uaaccgaguaagagagaaa

SEQ ID NO: 2594483 - RNA, 19 nt, Homo sapiens
  misc_RNA (1)...(19): siRNA sense strand
ucagaaagauugugaggau

SEQ ID NO: 2594484 - RNA, 19 nt, Homo sapiens
  misc_RNA (1)...(19): siRNA sense strand
cugugaaagaggaggaaau

SEQ ID NO: 2594485 - RNA, 19 nt, Homo sapiens
  misc_RNA (1)...(19): siRNA sense strand
gcaaaugugcaaugggauu

SEQ ID NO: 2594486 - RNA, 19 nt, Homo sapiens
  misc_RNA (1)...(19): siRNA sense strand
ccgaggagguagaaaucaa

SEQ ID NO: 2594487 - RNA, 19 nt, Homo sapiens
  misc_RNA (1)...(19): siRNA sense strand
ggacagacugggaugcaaa

SEQ ID NO: 2594488 - RNA, 19 nt, Homo sapiens
  misc_RNA (1)...(19): siRNA sense strand
cagcauuuguggugccaua

SEQ ID NO: 2594489 - RNA, 19 nt, Homo sapiens
  misc_RNA (1)...(19): siRNA sense strand
uggauaauguagagggcau

SEQ ID NO: 2594490 - RNA, 19 nt, Homo sapiens
  misc_RNA (1)...(19): siRNA sense strand
guacuaaagaagagauuca

SEQ ID NO: 2594491 - RNA, 19 nt, Homo sapiens
  misc_RNA (1)...(19): siRNA sense strand
gaauaagacuucuggggua

SEQ ID NO: 2594492 - RNA, 19 nt, Homo sapiens
  misc_RNA (1)...(19): siRNA sense strand
aaucauagcuguugccaau

SEQ ID NO: 2594493 - RNA, 19 nt, Homo sapiens
  misc_RNA (1)...(19): siRNA sense strand
ugaagaugguagugaugaa

SEQ ID NO: 2594494 - RNA, 19 nt, Homo sapiens
  misc_RNA (1)...(19): siRNA sense strand
cuggauagcaggaaacaua

SEQ ID NO: 2594495 - RNA, 19 nt, Homo sapiens
  misc_RNA (1)...(19): siRNA sense strand
ccaaguaucaugagaucua

SEQ ID NO: 2594496 - RNA, 19 nt, Homo sapiens
  misc_RNA (1)...(19): siRNA sense strand
gaugaagagaacugugaaa

SEQ ID NO: 2594497 - RNA, 19 nt, Homo sapiens
  misc_RNA (1)...(19): siRNA sense strand
uaagagagacaguggcaua

SEQ ID NO: 2594498 - RNA, 19 nt, Homo sapiens
  misc_RNA (1)...(19): siRNA sense strand
cagacuauuuccaguguaa

SEQ ID NO: 2594499 - RNA, 19 nt, Homo sapiens
  misc_RNA (1)...(19): siRNA sense strand
gcagaaugucagugugauu

SEQ ID NO: 2594500 - RNA, 19 nt, Homo sapiens
  misc_RNA (1)...(19): siRNA sense strand
ugauaaagaagcacagcaa

SEQ ID NO: 2594501 - RNA, 19 nt, Homo sapiens
  misc_RNA (1)...(19): siRNA sense strand
caauaaggccauaugagaa

SEQ ID NO: 2594502 - RNA, 19 nt, Homo sapiens
  misc_RNA (1)...(19): siRNA sense strand
ggaaauauauguagagcug

SEQ ID NO: 2594503 - RNA, 19 nt, Homo sapiens
  misc_RNA (1)...(19): siRNA sense strand
ggugguaagcugacauaua

SEQ ID NO: 2594504 - RNA, 19 nt, Homo sapiens
  misc_RNA (1)...(19): siRNA sense strand
guauaaauguggaaggauc

SEQ ID NO: 2594505 - RNA, 19 nt, Homo sapiens
  misc_RNA (1)...(19): siRNA sense strand
gcaaaagaccaaagaauga

SEQ ID NO: 2594506 - RNA, 19 nt, Homo sapiens
  misc_RNA (1)...(19): siRNA sense strand
caucaugagauaaggaaaa

SEQ ID NO: 2594507 - RNA, 19 nt, Homo sapiens
  misc_RNA (1)...(19): siRNA sense strand
ucaaagaugcuguggccaa

SEQ ID NO: 2594508 - RNA, 19 nt, Homo sapiens
  misc_RNA (1)...(19): siRNA sense strand
guacacaggaggagauaca

SEQ ID NO: 2594509 - RNA, 19 nt, Homo sapiens
  misc_RNA (1)...(19): siRNA sense strand
cuacuauacucguuagcaa

SEQ ID NO: 2594510 - RNA, 19 nt, Homo sapiens
  misc_RNA (1)...(19): siRNA sense strand
cuuaggaaguguugaugaa

SEQ ID NO: 2594511 - RNA, 19 nt, Homo sapiens
  misc_RNA (1)...(19): siRNA sense strand
aacaaaagcaggaggauua

SEQ ID NO: 2594512 - RNA, 19 nt, Homo sapiens
  misc_RNA (1)...(19): siRNA sense strand
gauagauggcacagagaga

SEQ ID NO: 2594513 - RNA, 19 nt, Homo sapiens
  misc_RNA (1)...(19): siRNA sense strand
ggacuggauuggaaauaau

SEQ ID NO: 2594514 - RNA, 19 nt, Homo sapiens
  misc_RNA (1)...(19): siRNA sense strand
caaugauggccauaggaaa

SEQ ID NO: 2594515 - RNA, 19 nt, Homo sapiens
  misc_RNA (1)...(19): siRNA sense strand
caauaugugccgaguaaau

SEQ ID NO: 2594516 - RNA, 19 nt, Homo sapiens
  misc_RNA (1)...(19): siRNA sense strand
gaguuugcuuguaguaaua

SEQ ID NO: 2594517 - RNA, 19 nt, Homo sapiens
  misc_RNA (1)...(19): siRNA sense strand
gggcacugcauuauaaaua

SEQ ID NO: 2594518 - RNA, 19 nt, Homo sapiens
  misc_RNA (1)...(19): siRNA sense strand
aguaauugguuuagugcuu

SEQ ID NO: 2594519 - RNA, 19 nt, Homo sapiens
  misc_RNA (1)...(19): siRNA sense strand
guuaaugguuggauguauu

SEQ ID NO: 2594520 - RNA, 19 nt, Homo sapiens
  misc_RNA (1)...(19): siRNA sense strand
ggauguagacggugaaagu

SEQ ID NO: 2594521 - RNA, 19 nt, Homo sapiens
  misc_RNA (1)...(19): siRNA sense strand
cuggauugcugguaacaua

SEQ ID NO: 2594522 - RNA, 19 nt, Homo sapiens
  misc_RNA (1)...(19): siRNA sense strand
caaucagaguguugucaua

SEQ ID NO: 2594523 - RNA, 19 nt, Homo sapiens
  misc_RNA (1)...(19): siRNA sense strand
gaaauugguauaagagaga

SEQ ID NO: 2594524 - RNA, 19 nt, Homo sapiens
  misc_RNA (1)...(19): siRNA sense strand
gcucagaauuugaugaaac

SEQ ID NO: 2594525 - RNA, 19 nt, Homo sapiens
  misc_RNA (1)...(19): siRNA sense strand
gagaaagaugugaagucaa

SEQ ID NO: 2594526 - RNA, 19 nt, Homo sapiens
  misc_RNA (1)...(19): siRNA sense strand
cgauuuaaugggacugaua

SEQ ID NO: 2594527 - RNA, 19 nt, Homo sapiens
  misc_RNA (1)...(19): siRNA sense strand
acacaaagucccuaaucaa

SEQ ID NO: 2594528 - RNA, 19 nt, Homo sapiens
  misc_RNA (1)...(19): siRNA sense strand
uguacaauggucagaaaua

SEQ ID NO: 2594529 - RNA, 19 nt, Homo sapiens
  misc_RNA (1)...(19): siRNA sense strand
ccauagaaaaucugguaaa

SEQ ID NO: 2594530 - RNA, 19 nt, Homo sapiens
  misc_RNA (1)...(19): siRNA sense strand
gagagaaaccauccugaaa

SEQ ID NO: 2594531 - RNA, 19 nt, Homo sapiens
  misc_RNA (1)...(19): siRNA sense strand
gggaggaagaugaaauaga

SEQ ID NO: 2594532 - RNA, 19 nt, Homo sapiens
  misc_RNA (1)...(19): siRNA sense strand
gggcagaaugucaguguga

SEQ ID NO: 2594533 - RNA, 19 nt, Homo sapiens
  misc_RNA (1)...(19): siRNA sense strand
caaccuggauggugguaau

SEQ ID NO: 2594534 - RNA, 19 nt, Homo sapiens
  misc_RNA (1)...(19): siRNA sense strand
augucaagguauagaauca

SEQ ID NO: 2594535 - RNA, 19 nt, Homo sapiens
  misc_RNA (1)...(19): siRNA sense strand
gaugaaaagaacugcaaua

SEQ ID NO: 2594536 - RNA, 19 nt, Homo sapiens
  misc_RNA (1)...(19): siRNA sense strand
gggagagggaggugggaau

SEQ ID NO: 2594537 - RNA, 19 nt, Homo sapiens
  misc_RNA (1)...(19): siRNA sense strand
cagcaaagguaguugacca

SEQ ID NO: 2594538 - RNA, 19 nt, Homo sapiens
  misc_RNA (1)...(19): siRNA sense strand
ugaccaagcucaaaggaga

SEQ ID NO: 2594539 - RNA, 19 nt, Homo sapiens
  misc_RNA (1)...(19): siRNA sense strand
gagcugaaccugaggacca

SEQ ID NO: 2594540 - RNA, 19 nt, Homo sapiens
  misc_RNA (1)...(19): siRNA sense strand
aagccauuaaggagaaaua

SEQ ID NO: 2594541 - RNA, 19 nt, Homo sapiens
  misc_RNA (1)...(19): siRNA sense strand
uggaaagguucauggagca

SEQ ID NO: 2594542 - RNA, 19 nt, Homo sapiens
  misc_RNA (1)...(19): siRNA sense strand
ggaaagguucauggagcaa

SEQ ID NO: 2594543 - RNA, 19 nt, Homo sapiens
  misc_RNA (1)...(19): siRNA sense strand
gcaaaagccauuaaggaga

SEQ ID NO: 2594544 - RNA, 19 nt, Homo sapiens
  misc_RNA (1)...(19): siRNA sense strand
uggcagaagguuauguaau

SEQ ID NO: 2594545 - RNA, 19 nt, Homo sapiens
  misc_RNA (1)...(19): siRNA sense strand
caacagcugcuaagggaga

SEQ ID NO: 2594546 - RNA, 19 nt, Homo sapiens
  misc_RNA (1)...(19): siRNA sense strand
cugcagagggauuugaaga

SEQ ID NO: 2594547 - RNA, 19 nt, Homo sapiens
  misc_RNA (1)...(19): siRNA sense strand
ucccaguggcagaagguua

SEQ ID NO: 2594548 - RNA, 19 nt, Homo sapiens
  misc_RNA (1)...(19): siRNA sense strand
aggaauuugccaaguauga

SEQ ID NO: 2594549 - RNA, 19 nt, Homo sapiens
  misc_RNA (1)...(19): siRNA sense strand
auuccugggaccugaaaua

SEQ ID NO: 2594550 - RNA, 19 nt, Homo sapiens
  misc_RNA (1)...(19): siRNA sense strand
gcgggaggaucaagccgaa

SEQ ID NO: 2594551 - RNA, 19 nt, Homo sapiens
  misc_RNA (1)...(19): siRNA sense strand
agcaaagguaguugaccaa

SEQ ID NO: 2594552 - RNA, 19 nt, Homo sapiens
  misc_RNA (1)...(19): siRNA sense strand
ggaucaagccgaagccugu

SEQ ID NO: 2594553 - RNA, 19 nt, Homo sapiens
  misc_RNA (1)...(19): siRNA sense strand
ccaucagagagucagcaaa

SEQ ID NO: 2594554 - RNA, 19 nt, Homo sapiens
  misc_RNA (1)...(19): siRNA sense strand
uuguuauagacguugguua

SEQ ID NO: 2594555 - RNA, 19 nt, Homo sapiens
  misc_RNA (1)...(19): siRNA sense strand
cucagauguuguugaugaa

SEQ ID NO: 2594556 - RNA, 19 nt, Homo sapiens
  misc_RNA (1)...(19): siRNA sense strand
cagcaagauucacaagcga

SEQ ID NO: 2594557 - RNA, 19 nt, Homo sapiens
  misc_RNA (1)...(19): siRNA sense strand
cagcaagauucacaagcga

SEQ ID NO: 2594558 - RNA, 19 nt, Homo sapiens
  misc_RNA (1)...(19): siRNA sense strand
ccuauuggccagaaggaaa

SEQ ID NO: 2594559 - RNA, 19 nt, Homo sapiens
  misc_RNA (1)...(19): siRNA sense strand
ggaaggagcaggagcgcau

SEQ ID NO: 2594560 - RNA, 19 nt, Homo sapiens
  misc_RNA (1)...(19): siRNA sense strand
ggucggaaccuguggguca

SEQ ID NO: 2594561 - RNA, 19 nt, Homo sapiens
  misc_RNA (1)...(19): siRNA sense strand
gcgaagugaagaaggaaaa

SEQ ID NO: 2594562 - RNA, 19 nt, Homo sapiens
  misc_RNA (1)...(19): siRNA sense strand
uggcaauggaggaccgaua

SEQ ID NO: 2594563 - RNA, 19 nt, Homo sapiens
  misc_RNA (1)...(19): siRNA sense strand
acagaaagcuugcggagga

SEQ ID NO: 2594564 - RNA, 19 nt, Homo sapiens
  misc_RNA (1)...(19): siRNA sense strand
aggaaggcacagaagauaa

SEQ ID NO: 2594565 - RNA, 19 nt, Homo sapiens
  misc_RNA (1)...(19): siRNA sense strand
gaacaaagggagagagagc

SEQ ID NO: 2594566 - RNA, 19 nt, Homo sapiens
  misc_RNA (1)...(19): siRNA sense strand
aaggaaagcguguggcaau

SEQ ID NO: 2594567 - RNA, 19 nt, Homo sapiens
  misc_RNA (1)...(19): siRNA sense strand
uuaagaaggaagagaagau

SEQ ID NO: 2594568 - RNA, 19 nt, Homo sapiens
  misc_RNA (1)...(19): siRNA sense strand
uugagaagaaggaggaaaa

SEQ ID NO: 2594569 - RNA, 19 nt, Homo sapiens
  misc_RNA (1)...(19): siRNA sense strand
aagaacaaagggagagaga

SEQ ID NO: 2594570 - RNA, 19 nt, Homo sapiens
  misc_RNA (1)...(19): siRNA sense strand
aggaagagaagauugagaa

SEQ ID NO: 2594571 - RNA, 19 nt, Homo sapiens
  misc_RNA (1)...(19): siRNA sense strand
agccaagagauguguuaaa

SEQ ID NO: 2594572 - RNA, 19 nt, Homo sapiens
  misc_RNA (1)...(19): siRNA sense strand
gggaaggauuuaagaacac

SEQ ID NO: 2594573 - RNA, 19 nt, Homo sapiens
  misc_RNA (1)...(19): siRNA sense strand
gacugaagauggaggagga

SEQ ID NO: 2594574 - RNA, 19 nt, Homo sapiens
  misc_RNA (1)...(19): siRNA sense strand
uggauaaaucgaaaggaga

SEQ ID NO: 2594575 - RNA, 19 nt, Homo sapiens
  misc_RNA (1)...(19): siRNA sense strand
ccgacaagaggcugaguga

SEQ ID NO: 2594576 - RNA, 19 nt, Homo sapiens
  misc_RNA (1)...(19): siRNA sense strand
ccuaaagaguccucaacca

SEQ ID NO: 2594577 - RNA, 19 nt, Homo sapiens
  misc_RNA (1)...(19): siRNA sense strand
gggcaagauccugaugaaa

SEQ ID NO: 2594578 - RNA, 19 nt, Homo sapiens
  misc_RNA (1)...(19): siRNA sense strand
gagacgggcaggaggacau

SEQ ID NO: 2594579 - RNA, 19 nt, Homo sapiens
  misc_RNA (1)...(19): siRNA sense strand
ggggaaggauuuaagaaca

SEQ ID NO: 2594580 - RNA, 19 nt, Homo sapiens
  misc_RNA (1)...(19): siRNA sense strand
agucagaaagcaaagaaaa

SEQ ID NO: 2594581 - RNA, 19 nt, Homo sapiens
  misc_RNA (1)...(19): siRNA sense strand
aguuagaagccaccagcaa

SEQ ID NO: 2594582 - RNA, 19 nt, Homo sapiens
  misc_RNA (1)...(19): siRNA sense strand
cagaaagcuugcggaggaa

SEQ ID NO: 2594583 - RNA, 19 nt, Homo sapiens
  misc_RNA (1)...(19): siRNA sense strand
ggcucaagaaggcgguuaa

SEQ ID NO: 2594584 - RNA, 19 nt, Homo sapiens
  misc_RNA (1)...(19): siRNA sense strand
aagcagguccaaagagaga

SEQ ID NO: 2594585 - RNA, 19 nt, Homo sapiens
  misc_RNA (1)...(19): siRNA sense strand
agagaagcuccaagaguca

SEQ ID NO: 2594586 - RNA, 19 nt, Homo sapiens
  misc_RNA (1)...(19): siRNA sense strand
cuguaauuaagaaggaaga

SEQ ID NO: 2594587 - RNA, 19 nt, Homo sapiens
  misc_RNA (1)...(19): siRNA sense strand
ucgcaagucagaaagcaaa

SEQ ID NO: 2594588 - RNA, 19 nt, Homo sapiens
  misc_RNA (1)...(19): siRNA sense strand
cggaggaagaggaccuauu

SEQ ID NO: 2594589 - RNA, 19 nt, Homo sapiens
  misc_RNA (1)...(19): siRNA sense strand
aaagaagacgggaggaagu

SEQ ID NO: 2594590 - RNA, 19 nt, Homo sapiens
  misc_RNA (1)...(19): siRNA sense strand
aaaucaggaagcagaggaa

SEQ ID NO: 2594591 - RNA, 19 nt, Homo sapiens
  misc_RNA (1)...(19): siRNA sense strand
aagcaagucuggagaaccu

SEQ ID NO: 2594592 - RNA, 19 nt, Homo sapiens
  misc_RNA (1)...(19): siRNA sense strand
agagagagcgccagaggca

SEQ ID NO: 2594593 - RNA, 19 nt, Homo sapiens
  misc_RNA (1)...(19): siRNA sense strand
agccagaaaaugagaaaau

SEQ ID NO: 2594594 - RNA, 19 nt, Homo sapiens
  misc_RNA (1)...(19): siRNA sense strand
cggacggucgugauggaua

SEQ ID NO: 2594595 - RNA, 19 nt, Homo sapiens
  misc_RNA (1)...(19): siRNA sense strand
aagucagaaagcaaagaaa

SEQ ID NO: 2594596 - RNA, 19 nt, Homo sapiens
  misc_RNA (1)...(19): siRNA sense strand
caaagaacaaagggagaga

SEQ ID NO: 2594597 - RNA, 19 nt, Homo sapiens
  misc_RNA (1)...(19): siRNA sense strand
guguuaaaggacugaagau

SEQ ID NO: 2594598 - RNA, 19 nt, Homo sapiens
  misc_RNA (1)...(19): siRNA sense strand
ggggcaagauccugaugaa

SEQ ID NO: 2594599 - RNA, 19 nt, Homo sapiens
  misc_RNA (1)...(19): siRNA sense strand
gcacagaagauaauggccu

SEQ ID NO: 2594600 - RNA, 19 nt, Homo sapiens
  misc_RNA (1)...(19): siRNA sense strand
gcguggggccagacagaaa

SEQ ID NO: 2594601 - RNA, 19 nt, Homo sapiens
  misc_RNA (1)...(19): siRNA sense strand
gguuaaagaagaggggcaa

SEQ ID NO: 2594602 - RNA, 19 nt, Homo sapiens
  misc_RNA (1)...(19): siRNA sense strand
aagaauacguggcugcaca

SEQ ID NO: 2594603 - RNA, 19 nt, Homo sapiens
  misc_RNA (1)...(19): siRNA sense strand
aagagugcgaagugaagaa

SEQ ID NO: 2594604 - RNA, 19 nt, Homo sapiens
  misc_RNA (1)...(19): siRNA sense strand
ccaagagucaggaucgcaa

SEQ ID NO: 2594605 - RNA, 19 nt, Homo sapiens
  misc_RNA (1)...(19): siRNA sense strand
aagauaauggccuggaaga

SEQ ID NO: 2594606 - RNA, 19 nt, Homo sapiens
  misc_RNA (1)...(19): siRNA sense strand
gacauuaagaaggaagaaa

SEQ ID NO: 2594607 - RNA, 19 nt, Homo sapiens
  misc_RNA (1)...(19): siRNA sense strand
ggauaaaucgaaaggagag

SEQ ID NO: 2594608 - RNA, 19 nt, Homo sapiens
  misc_RNA (1)...(19): siRNA sense strand
cgguuaaagaagaggggca

SEQ ID NO: 2594609 - RNA, 19 nt, Homo sapiens
  misc_RNA (1)...(19): siRNA sense strand
ggaagagaagauugagaag

SEQ ID NO: 2594610 - RNA, 19 nt, Homo sapiens
  misc_RNA (1)...(19): siRNA sense strand
agauuuggccagcgaguca

SEQ ID NO: 2594611 - RNA, 19 nt, Homo sapiens
  misc_RNA (1)...(19): siRNA sense strand
guaauuaagaaggaagaga

SEQ ID NO: 2594612 - RNA, 19 nt, Homo sapiens
  misc_RNA (1)...(19): siRNA sense strand
aucaaagaacaaagggaga

SEQ ID NO: 2594613 - RNA, 19 nt, Homo sapiens
  misc_RNA (1)...(19): siRNA sense strand
uguaaaucugagccaguaa

SEQ ID NO: 2594614 - RNA, 19 nt, Homo sapiens
  misc_RNA (1)...(19): siRNA sense strand
ugcgaagugaagaaggaaa

SEQ ID NO: 2594615 - RNA, 19 nt, Homo sapiens
  misc_RNA (1)...(19): siRNA sense strand
caccaaaucaggaagcaga

SEQ ID NO: 2594616 - RNA, 19 nt, Homo sapiens
  misc_RNA (1)...(19): siRNA sense strand
gagagaagcuccaagaguc

SEQ ID NO: 2594617 - RNA, 19 nt, Homo sapiens
  misc_RNA (1)...(19): siRNA sense strand
agacaaaggaagagagcua

SEQ ID NO: 2594618 - RNA, 19 nt, Homo sapiens
  misc_RNA (1)...(19): siRNA sense strand
ccauuaaaguugaggugaa

SEQ ID NO: 2594619 - RNA, 19 nt, Homo sapiens
  misc_RNA (1)...(19): siRNA sense strand
gccaauuggucgagacaaa

SEQ ID NO: 2594620 - RNA, 19 nt, Homo sapiens
  misc_RNA (1)...(19): siRNA sense strand
ucacgaaauuacugagaaa

SEQ ID NO: 2594621 - RNA, 19 nt, Homo sapiens
  misc_RNA (1)...(19): siRNA sense strand
cagaaaaggaagaggagaa

SEQ ID NO: 2594622 - RNA, 19 nt, Homo sapiens
  misc_RNA (1)...(19): siRNA sense strand
gguaaaacccaaaggcaaa

SEQ ID NO: 2594623 - RNA, 19 nt, Homo sapiens
  misc_RNA (1)...(19): siRNA sense strand
aagcaagagaagacagaaa

SEQ ID NO: 2594624 - RNA, 19 nt, Homo sapiens
  misc_RNA (1)...(19): siRNA sense strand
gagaagaugagguggaaga

SEQ ID NO: 2594625 - RNA, 19 nt, Homo sapiens
  misc_RNA (1)...(19): siRNA sense strand
cagaagaggaggaagaaaa

SEQ ID NO: 2594626 - RNA, 19 nt, Homo sapiens
  misc_RNA (1)...(19): siRNA sense strand
gggcaugggagauggagaa

SEQ ID NO: 2594627 - RNA, 19 nt, Homo sapiens
  misc_RNA (1)...(19): siRNA sense strand
caagaggaacagaaagaaa

SEQ ID NO: 2594628 - RNA, 19 nt, Homo sapiens
  misc_RNA (1)...(19): siRNA sense strand
uggagaaguuagugaugaa

SEQ ID NO: 2594629 - RNA, 19 nt, Homo sapiens
  misc_RNA (1)...(19): siRNA sense strand
cagaagaggaggaagauga

SEQ ID NO: 2594630 - RNA, 19 nt, Homo sapiens
  misc_RNA (1)...(19): siRNA sense strand
agaugaaagugaagaagau

SEQ ID NO: 2594631 - RNA, 19 nt, Homo sapiens
  misc_RNA (1)...(19): siRNA sense strand
ggaggaagaggaaggcaaa

SEQ ID NO: 2594632 - RNA, 19 nt, Homo sapiens
  misc_RNA (1)...(19): siRNA sense strand
guagaaugccagaguacaa

SEQ ID NO: 2594633 - RNA, 19 nt, Homo sapiens
  misc_RNA (1)...(19): siRNA sense strand
aggaacaguugcaggauuu

SEQ ID NO: 2594634 - RNA, 19 nt, Homo sapiens
  misc_RNA (1)...(19): siRNA sense strand
aggaggaaucugaggagaa

SEQ ID NO: 2594635 - RNA, 19 nt, Homo sapiens
  misc_RNA (1)...(19): siRNA sense strand
gaucgaauuugguggcaau

SEQ ID NO: 2594636 - RNA, 19 nt, Homo sapiens
  misc_RNA (1)...(19): siRNA sense strand
caggauaucaagucggaaa

SEQ ID NO: 2594637 - RNA, 19 nt, Homo sapiens
  misc_RNA (1)...(19): siRNA sense strand
cuaaaguaagcaagguaaa

SEQ ID NO: 2594638 - RNA, 19 nt, Homo sapiens
  misc_RNA (1)...(19): siRNA sense strand
aggcaaaguucgauggacu

SEQ ID NO: 2594639 - RNA, 19 nt, Homo sapiens
  misc_RNA (1)...(19): siRNA sense strand
aagaagagagcgaggauga

SEQ ID NO: 2594640 - RNA, 19 nt, Homo sapiens
  misc_RNA (1)...(19): siRNA sense strand
caaagguagaaauggauaa

SEQ ID NO: 2594641 - RNA, 19 nt, Homo sapiens
  misc_RNA (1)...(19): siRNA sense strand
auuugaagcugaugaggaa

SEQ ID NO: 2594642 - RNA, 19 nt, Homo sapiens
  misc_RNA (1)...(19): siRNA sense strand
cagaauguacauagaagaa

SEQ ID NO: 2594643 - RNA, 19 nt, Homo sapiens
  misc_RNA (1)...(19): siRNA sense strand
cugaagaaacugagaaacu

SEQ ID NO: 2594644 - RNA, 19 nt, Homo sapiens
  misc_RNA (1)...(19): siRNA sense strand
cagaaccaauagagacaaa

SEQ ID NO: 2594645 - RNA, 19 nt, Homo sapiens
  misc_RNA (1)...(19): siRNA sense strand
ccaugaaaggugaagagaa

SEQ ID NO: 2594646 - RNA, 19 nt, Homo sapiens
  misc_RNA (1)...(19): siRNA sense strand
ucaacaagaacaaggaaau

SEQ ID NO: 2594647 - RNA, 19 nt, Homo sapiens
  misc_RNA (1)...(19): siRNA sense strand
caccagaagaggaggaaga

SEQ ID NO: 2594648 - RNA, 19 nt, Homo sapiens
  misc_RNA (1)...(19): siRNA sense strand
cugugugacucuugcgaua

SEQ ID NO: 2594649 - RNA, 19 nt, Homo sapiens
  misc_RNA (1)...(19): siRNA sense strand
gugaaaagaugaaaaguga

SEQ ID NO: 2594650 - RNA, 19 nt, Homo sapiens
  misc_RNA (1)...(19): siRNA sense strand
cagcaaugaugaaagugaa

SEQ ID NO: 2594651 - RNA, 19 nt, Homo sapiens
  misc_RNA (1)...(19): siRNA sense strand
acaaaggaagagagcuaua

SEQ ID NO: 2594652 - RNA, 19 nt, Homo sapiens
  misc_RNA (1)...(19): siRNA sense strand
gaagaaagagcgugccgaa

SEQ ID NO: 2594653 - RNA, 19 nt, Homo sapiens
  misc_RNA (1)...(19): siRNA sense strand
agaaagaccccaaagaaaa

SEQ ID NO: 2594654 - RNA, 19 nt, Homo sapiens
  misc_RNA (1)...(19): siRNA sense strand
cagagagugaagagagcua

SEQ ID NO: 2594655 - RNA, 19 nt, Homo sapiens
  misc_RNA (1)...(19): siRNA sense strand
aggaggaagaggaaggcaa

SEQ ID NO: 2594656 - RNA, 19 nt, Homo sapiens
  misc_RNA (1)...(19): siRNA sense strand
agauaugccaagaguuuaa

SEQ ID NO: 2594657 - RNA, 19 nt, Homo sapiens
  misc_RNA (1)...(19): siRNA sense strand
gugaugaggaagaggacuu

SEQ ID NO: 2594658 - RNA, 19 nt, Homo sapiens
  misc_RNA (1)...(19): siRNA sense strand
agauggagaagaagggcua

SEQ ID NO: 2594659 - RNA, 19 nt, Homo sapiens
  misc_RNA (1)...(19): siRNA sense strand
uagaaagugaugaggaaga

SEQ ID NO: 2594660 - RNA, 19 nt, Homo sapiens
  misc_RNA (1)...(19): siRNA sense strand
ugaugaaagugaagggucu

SEQ ID NO: 2594661 - RNA, 19 nt, Homo sapiens
  misc_RNA (1)...(19): siRNA sense strand
agaaaaggaaagugaagaa

SEQ ID NO: 2594662 - RNA, 19 nt, Homo sapiens
  misc_RNA (1)...(19): siRNA sense strand
ugaugaagcaauugaugaa

SEQ ID NO: 2594663 - RNA, 19 nt, Homo sapiens
  misc_RNA (1)...(19): siRNA sense strand
uaaacaagaggaacagaaa

SEQ ID NO: 2594664 - RNA, 19 nt, Homo sapiens
  misc_RNA (1)...(19): siRNA sense strand
ugaaaaggaacuugugaaa

SEQ ID NO: 2594665 - RNA, 19 nt, Homo sapiens
  misc_RNA (1)...(19): siRNA sense strand
caaagaagccgauggagga

SEQ ID NO: 2594666 - RNA, 19 nt, Homo sapiens
  misc_RNA (1)...(19): siRNA sense strand
aggaguuggccgaggaaaa

SEQ ID NO: 2594667 - RNA, 19 nt, Homo sapiens
  misc_RNA (1)...(19): siRNA sense strand
gaguuugcgacgugguaaa

SEQ ID NO: 2594668 - RNA, 19 nt, Homo sapiens
  misc_RNA (1)...(19): siRNA sense strand
ccaagaacucugaagauga

SEQ ID NO: 2594669 - RNA, 19 nt, Homo sapiens
  misc_RNA (1)...(19): siRNA sense strand
aggaagaggacuuugaaaa

SEQ ID NO: 2594670 - RNA, 19 nt, Homo sapiens
  misc_RNA (1)...(19): siRNA sense strand
cugaagaucaagaagaaaa

SEQ ID NO: 2594671 - RNA, 19 nt, Homo sapiens
  misc_RNA (1)...(19): siRNA sense strand
gagaaauuaaacugaguga

SEQ ID NO: 2594672 - RNA, 19 nt, Homo sapiens
  misc_RNA (1)...(19): siRNA sense strand
agaagaaguuccaaagagu

SEQ ID NO: 2594673 - RNA, 19 nt, Homo sapiens
  misc_RNA (1)...(19): siRNA sense strand
aagaaagaccccaaagaaa

SEQ ID NO: 2594674 - RNA, 19 nt, Homo sapiens
  misc_RNA (1)...(19): siRNA sense strand
caccuaaacaagaggaaca

SEQ ID NO: 2594675 - RNA, 19 nt, Homo sapiens
  misc_RNA (1)...(19): siRNA sense strand
auaucaucacggagggaaa

SEQ ID NO: 2594676 - RNA, 19 nt, Homo sapiens
  misc_RNA (1)...(19): siRNA sense strand
agguaaaacccaaaggcaa

SEQ ID NO: 2594677 - RNA, 19 nt, Homo sapiens
  misc_RNA (1)...(19): siRNA sense strand
cugaagaauuggaggguga

SEQ ID NO: 2594678 - RNA, 19 nt, Homo sapiens
  misc_RNA (1)...(19): siRNA sense strand
agacaaaagcagagaagau

SEQ ID NO: 2594679 - RNA, 19 nt, Homo sapiens
  misc_RNA (1)...(19): siRNA sense strand
ccaaaugcucaaaggcgaa

SEQ ID NO: 2594680 - RNA, 19 nt, Homo sapiens
  misc_RNA (1)...(19): siRNA sense strand
uggugaacauggacgacaa

SEQ ID NO: 2594681 - RNA, 19 nt, Homo sapiens
  misc_RNA (1)...(19): siRNA sense strand
ccaugacaagauugggaaa

SEQ ID NO: 2594682 - RNA, 19 nt, Homo sapiens
  misc_RNA (1)...(19): siRNA sense strand
caguuaaggcauuggaagu

SEQ ID NO: 2594683 - RNA, 19 nt, Homo sapiens
  misc_RNA (1)...(19): siRNA sense strand
agacagaaacccagccaca

SEQ ID NO: 2594684 - RNA, 19 nt, Homo sapiens
  misc_RNA (1)...(19): siRNA sense strand
acaagggagcugagcggaa

SEQ ID NO: 2594685 - RNA, 19 nt, Homo sapiens
  misc_RNA (1)...(19): siRNA sense strand
agaacgaaagcaaagcaaa

SEQ ID NO: 2594686 - RNA, 19 nt, Homo sapiens
  misc_RNA (1)...(19): siRNA sense strand
gggccuacugccagaucaa

SEQ ID NO: 2594687 - RNA, 19 nt, Homo sapiens
  misc_RNA (1)...(19): siRNA sense strand
cccaaaugcucaaaggcga

SEQ ID NO: 2594688 - RNA, 19 nt, Homo sapiens
  misc_RNA (1)...(19): siRNA sense strand
aagcuaucucagacaaaua

SEQ ID NO: 2594689 - RNA, 19 nt, Homo sapiens
  misc_RNA (1)...(19): siRNA sense strand
gagaagaucaguuaaggca

SEQ ID NO: 2594690 - RNA, 19 nt, Homo sapiens
  misc_RNA (1)...(19): siRNA sense strand
cagcaaaguucgaagugug

SEQ ID NO: 2594691 - RNA, 19 nt, Homo sapiens
  misc_RNA (1)...(19): siRNA sense strand
ccaugacguaccugaacaa

SEQ ID NO: 2594692 - RNA, 19 nt, Homo sapiens
  misc_RNA (1)...(19): siRNA sense strand
aguuaaggcauuggaagua

SEQ ID NO: 2594693 - RNA, 19 nt, Homo sapiens
  misc_RNA (1)...(19): siRNA sense strand
ucagggaugaagaacgaaa

SEQ ID NO: 2594694 - RNA, 19 nt, Homo sapiens
  misc_RNA (1)...(19): siRNA sense strand
ggaaaaucagggaugaaga

SEQ ID NO: 2594695 - RNA, 19 nt, Homo sapiens
  misc_RNA (1)...(19): siRNA sense strand
gcuccagauacgacaguca

SEQ ID NO: 2594696 - RNA, 19 nt, Homo sapiens
  misc_RNA (1)...(19): siRNA sense strand
cgcuaaacaaagaugcauu

SEQ ID NO: 2594697 - RNA, 19 nt, Homo sapiens
  misc_RNA (1)...(19): siRNA sense strand
ugaacauggacgacaacau

SEQ ID NO: 2594698 - RNA, 19 nt, Homo sapiens
  misc_RNA (1)...(19): siRNA sense strand
ggugagcagcagugaagga

SEQ ID NO: 2594699 - RNA, 19 nt, Homo sapiens
  misc_RNA (1)...(19): siRNA sense strand
ccaucaagacagaaaccca

SEQ ID NO: 2594700 - RNA, 19 nt, Homo sapiens
  misc_RNA (1)...(19): siRNA sense strand
aagcaaagcaaaagaaaag

SEQ ID NO: 2594701 - RNA, 19 nt, Homo sapiens
  misc_RNA (1)...(19): siRNA sense strand
cugaagaauuggaggguga

SEQ ID NO: 2594702 - RNA, 19 nt, Homo sapiens
  misc_RNA (1)...(19): siRNA sense strand
agacaaaagcagagaagau

SEQ ID NO: 2594703 - RNA, 19 nt, Homo sapiens
  misc_RNA (1)...(19): siRNA sense strand
ccaaaugcucaaaggcgaa

SEQ ID NO: 2594704 - RNA, 19 nt, Homo sapiens
  misc_RNA (1)...(19): siRNA sense strand
uggugaacauggacgacaa

SEQ ID NO: 2594705 - RNA, 19 nt, Homo sapiens
  misc_RNA (1)...(19): siRNA sense strand
ccaugacaagauugggaaa

SEQ ID NO: 2594706 - RNA, 19 nt, Homo sapiens
  misc_RNA (1)...(19): siRNA sense strand
caguuaaggcauuggaagu

SEQ ID NO: 2594707 - RNA, 19 nt, Homo sapiens
  misc_RNA (1)...(19): siRNA sense strand
acaagggagcugagcggaa

SEQ ID NO: 2594708 - RNA, 19 nt, Homo sapiens
  misc_RNA (1)...(19): siRNA sense strand
agaacgaaagcaaagcaaa

SEQ ID NO: 2594709 - RNA, 19 nt, Homo sapiens
  misc_RNA (1)...(19): siRNA sense strand
gggccuacugccagaucaa

SEQ ID NO: 2594710 - RNA, 19 nt, Homo sapiens
  misc_RNA (1)...(19): siRNA sense strand
cccaaaugcucaaaggcga

SEQ ID NO: 2594711 - RNA, 19 nt, Homo sapiens
  misc_RNA (1)...(19): siRNA sense strand
aagcuaucucagacaaaua

SEQ ID NO: 2594712 - RNA, 19 nt, Homo sapiens
  misc_RNA (1)...(19): siRNA sense strand
gagaagaucaguuaaggca

SEQ ID NO: 2594713 - RNA, 19 nt, Homo sapiens
  misc_RNA (1)...(19): siRNA sense strand
cagcaaaguucgaagugug

SEQ ID NO: 2594714 - RNA, 19 nt, Homo sapiens
  misc_RNA (1)...(19): siRNA sense strand
ccaugacguaccugaacaa

SEQ ID NO: 2594715 - RNA, 19 nt, Homo sapiens
  misc_RNA (1)...(19): siRNA sense strand
aguuaaggcauuggaagua

SEQ ID NO: 2594716 - RNA, 19 nt, Homo sapiens
  misc_RNA (1)...(19): siRNA sense strand
ucagggaugaagaacgaaa

SEQ ID NO: 2594717 - RNA, 19 nt, Homo sapiens
  misc_RNA (1)...(19): siRNA sense strand
ggaaaaucagggaugaaga

SEQ ID NO: 2594718 - RNA, 19 nt, Homo sapiens
  misc_RNA (1)...(19): siRNA sense strand
cgcuaaacaaagaugcauu

SEQ ID NO: 2594719 - RNA, 19 nt, Homo sapiens
  misc_RNA (1)...(19): siRNA sense strand
ugaacauggacgacaacau

SEQ ID NO: 2594720 - RNA, 19 nt, Homo sapiens
  misc_RNA (1)...(19): siRNA sense strand
ggugagcagcagugaagga

SEQ ID NO: 2594721 - RNA, 19 nt, Homo sapiens
  misc_RNA (1)...(19): siRNA sense strand
aagcaaagcaaaagaaaag

SEQ ID NO: 2594722 - RNA, 19 nt, Homo sapiens
  misc_RNA (1)...(19): siRNA sense strand
aggaagugauagacagcau

SEQ ID NO: 2594723 - RNA, 19 nt, Homo sapiens
  misc_RNA (1)...(19): siRNA sense strand
ggaagauagagcaggcuga

SEQ ID NO: 2594724 - RNA, 19 nt, Homo sapiens
  misc_RNA (1)...(19): siRNA sense strand
gcaacaagauaucagcuga

SEQ ID NO: 2594725 - RNA, 19 nt, Homo sapiens
  misc_RNA (1)...(19): siRNA sense strand
aggaugugccugaggaguu

SEQ ID NO: 2594726 - RNA, 19 nt, Homo sapiens
  misc_RNA (1)...(19): siRNA sense strand
gcuaagaaaaugaaagcca

SEQ ID NO: 2594727 - RNA, 19 nt, Homo sapiens
  misc_RNA (1)...(19): siRNA sense strand
ggaaagugacugugacccu

SEQ ID NO: 2594728 - RNA, 19 nt, Homo sapiens
  misc_RNA (1)...(19): siRNA sense strand
guuucaggacagaguauuu

SEQ ID NO: 2594729 - RNA, 19 nt, Homo sapiens
  misc_RNA (1)...(19): siRNA sense strand
gcucccaggaagugauaga

SEQ ID NO: 2594730 - RNA, 19 nt, Homo sapiens
  misc_RNA (1)...(19): siRNA sense strand
ccucagagaaccugccuca

SEQ ID NO: 2594731 - RNA, 19 nt, Homo sapiens
  misc_RNA (1)...(19): siRNA sense strand
gguaauaaaucuuugccuc

SEQ ID NO: 2594732 - RNA, 19 nt, Homo sapiens
  misc_RNA (1)...(19): siRNA sense strand
gggagagcacagacggcau

SEQ ID NO: 2594733 - RNA, 19 nt, Homo sapiens
  misc_RNA (1)...(19): siRNA sense strand
ccaucacccuggagaucau

SEQ ID NO: 2594734 - RNA, 19 nt, Homo sapiens
  misc_RNA (1)...(19): siRNA sense strand
aggaagugauagacagcau

SEQ ID NO: 2594735 - RNA, 19 nt, Homo sapiens
  misc_RNA (1)...(19): siRNA sense strand
ggaagauagagcaggcuga

SEQ ID NO: 2594736 - RNA, 19 nt, Homo sapiens
  misc_RNA (1)...(19): siRNA sense strand
gcaacaagauaucagcuga

SEQ ID NO: 2594737 - RNA, 19 nt, Homo sapiens
  misc_RNA (1)...(19): siRNA sense strand
aggaugugccugaggaguu

SEQ ID NO: 2594738 - RNA, 19 nt, Homo sapiens
  misc_RNA (1)...(19): siRNA sense strand
gcuaagaaaaugaaagcca

SEQ ID NO: 2594739 - RNA, 19 nt, Homo sapiens
  misc_RNA (1)...(19): siRNA sense strand
ggaaagugacugugacccu

SEQ ID NO: 2594740 - RNA, 19 nt, Homo sapiens
  misc_RNA (1)...(19): siRNA sense strand
guuucaggacagaguauuu

SEQ ID NO: 2594741 - RNA, 19 nt, Homo sapiens
  misc_RNA (1)...(19): siRNA sense strand
gcucccaggaagugauaga

SEQ ID NO: 2594742 - RNA, 19 nt, Homo sapiens
  misc_RNA (1)...(19): siRNA sense strand
ccucagagaaccugccuca

SEQ ID NO: 2594743 - RNA, 19 nt, Homo sapiens
  misc_RNA (1)...(19): siRNA sense strand
gguaauaaaucuuugccuc

SEQ ID NO: 2594744 - RNA, 19 nt, Homo sapiens
  misc_RNA (1)...(19): siRNA sense strand
gggagagcacagacggcau

SEQ ID NO: 2594745 - RNA, 19 nt, Homo sapiens
  misc_RNA (1)...(19): siRNA sense strand
ccaucacccuggagaucau

SEQ ID NO: 2594746 - RNA, 19 nt, Homo sapiens
  misc_RNA (1)...(19): siRNA sense strand
aggaagaggaagaggaaga

SEQ ID NO: 2594747 - RNA, 19 nt, Homo sapiens
  misc_RNA (1)...(19): siRNA sense strand
aggaagaggaagaagaaga

SEQ ID NO: 2594748 - RNA, 19 nt, Homo sapiens
  misc_RNA (1)...(19): siRNA sense strand
gauugaaguuagucgggaa

SEQ ID NO: 2594749 - RNA, 19 nt, Homo sapiens
  misc_RNA (1)...(19): siRNA sense strand
aggaagaggaggaggagga

SEQ ID NO: 2594750 - RNA, 19 nt, Homo sapiens
  misc_RNA (1)...(19): siRNA sense strand
aggaggaggaggaggaaga

SEQ ID NO: 2594751 - RNA, 19 nt, Homo sapiens
  misc_RNA (1)...(19): siRNA sense strand
aggaggaggaagaggaaga

SEQ ID NO: 2594752 - RNA, 19 nt, Homo sapiens
  misc_RNA (1)...(19): siRNA sense strand
aagaagaagaccaggacau

SEQ ID NO: 2594753 - RNA, 19 nt, Homo sapiens
  misc_RNA (1)...(19): siRNA sense strand
acucagaugaaauggacua

SEQ ID NO: 2594754 - RNA, 19 nt, Homo sapiens
  misc_RNA (1)...(19): siRNA sense strand
auacgaagaaaguggauca

SEQ ID NO: 2594755 - RNA, 19 nt, Homo sapiens
  misc_RNA (1)...(19): siRNA sense strand
acaucgacauucugggcua

SEQ ID NO: 2594756 - RNA, 19 nt, Homo sapiens
  misc_RNA (1)...(19): siRNA sense strand
aggaggaagaggaggagga

SEQ ID NO: 2594757 - RNA, 19 nt, Homo sapiens
  misc_RNA (1)...(19): siRNA sense strand
aagaggaagaggaagaaga

SEQ ID NO: 2594758 - RNA, 19 nt, Homo sapiens
  misc_RNA (1)...(19): siRNA sense strand
augacagaguggugguaga

SEQ ID NO: 2594759 - RNA, 19 nt, Homo sapiens
  misc_RNA (1)...(19): siRNA sense strand
gcauaguaggcuagguguu

SEQ ID NO: 2594760 - RNA, 19 nt, Homo sapiens
  misc_RNA (1)...(19): siRNA sense strand
ucguauaaacaucgacauu

SEQ ID NO: 2594761 - RNA, 19 nt, Homo sapiens
  misc_RNA (1)...(19): siRNA sense strand
aagaggaggaagaggagga

SEQ ID NO: 2594762 - RNA, 19 nt, Homo sapiens
  misc_RNA (1)...(19): siRNA sense strand
aagaggaggaggaggagga

SEQ ID NO: 2594763 - RNA, 19 nt, Homo sapiens
  misc_RNA (1)...(19): siRNA sense strand
aggaagaagaagaccagga

SEQ ID NO: 2594764 - RNA, 19 nt, Homo sapiens
  misc_RNA (1)...(19): siRNA sense strand
cgaagaaaguggaucacag

SEQ ID NO: 2594765 - RNA, 19 nt, Homo sapiens
  misc_RNA (1)...(19): siRNA sense strand
ccaaaagaagagccgguua

SEQ ID NO: 2594766 - RNA, 19 nt, Homo sapiens
  misc_RNA (1)...(19): siRNA sense strand
uugaagaggaggaagagga

SEQ ID NO: 2594767 - RNA, 19 nt, Homo sapiens
  misc_RNA (1)...(19): siRNA sense strand
ugaugugcauaguaggcua

SEQ ID NO: 2594768 - RNA, 19 nt, Homo sapiens
  misc_RNA (1)...(19): siRNA sense strand
aaauuauggaggcaugaaa

SEQ ID NO: 2594769 - RNA, 19 nt, Homo sapiens
  misc_RNA (1)...(19): siRNA sense strand
auugaaguuagucgggaaa

SEQ ID NO: 2594770 - RNA, 19 nt, Homo sapiens
  misc_RNA (1)...(19): siRNA sense strand
aggaggaggaggaagagga

SEQ ID NO: 2594771 - RNA, 19 nt, Homo sapiens
  misc_RNA (1)...(19): siRNA sense strand
aggaggaagaggaagagga

SEQ ID NO: 2594772 - RNA, 19 nt, Homo sapiens
  misc_RNA (1)...(19): siRNA sense strand
guaaaggccucuacgccga

SEQ ID NO: 2594773 - RNA, 19 nt, Homo sapiens
  misc_RNA (1)...(19): siRNA sense strand
cugcauucauucagguaca

SEQ ID NO: 2594774 - RNA, 19 nt, Homo sapiens
  misc_RNA (1)...(19): siRNA sense strand
ggagaaaagaacugcccaa

SEQ ID NO: 2594775 - RNA, 19 nt, Homo sapiens
  misc_RNA (1)...(19): siRNA sense strand
cgaagggagccgaucggaa

SEQ ID NO: 2594776 - RNA, 19 nt, Homo sapiens
  misc_RNA (1)...(19): siRNA sense strand
uccaugugguggugagcaa

SEQ ID NO: 2594777 - RNA, 19 nt, Homo sapiens
  misc_RNA (1)...(19): siRNA sense strand
aggccaaagaugaccauuu

SEQ ID NO: 2594778 - RNA, 19 nt, Homo sapiens
  misc_RNA (1)...(19): siRNA sense strand
cagaagacugaccgggaga

SEQ ID NO: 2594779 - RNA, 19 nt, Homo sapiens
  misc_RNA (1)...(19): siRNA sense strand
guuuaagcagaacgagaau

SEQ ID NO: 2594780 - RNA, 19 nt, Homo sapiens
  misc_RNA (1)...(19): siRNA sense strand
cugcccaagagaaggagaa

SEQ ID NO: 2594781 - RNA, 19 nt, Homo sapiens
  misc_RNA (1)...(19): siRNA sense strand
ucaagguguucaagccgaa

SEQ ID NO: 2594782 - RNA, 19 nt, Homo sapiens
  misc_RNA (1)...(19): siRNA sense strand
uguuugaaguugugagaaa

SEQ ID NO: 2594783 - RNA, 19 nt, Homo sapiens
  misc_RNA (1)...(19): siRNA sense strand
aggaagagcaguugaggaa

SEQ ID NO: 2594784 - RNA, 19 nt, Homo sapiens
  misc_RNA (1)...(19): siRNA sense strand
ggaugaugcaagaggauau

SEQ ID NO: 2594785 - RNA, 19 nt, Homo sapiens
  misc_RNA (1)...(19): siRNA sense strand
ccauaaaauuugcuggaaa

SEQ ID NO: 2594786 - RNA, 19 nt, Homo sapiens
  misc_RNA (1)...(19): siRNA sense strand
ggagaaucccauugagaau

SEQ ID NO: 2594787 - RNA, 19 nt, Homo sapiens
  misc_RNA (1)...(19): siRNA sense strand
aggaagaggaagaagaaga

SEQ ID NO: 2594788 - RNA, 19 nt, Homo sapiens
  misc_RNA (1)...(19): siRNA sense strand
cagccagaauggugaggaa

SEQ ID NO: 2594789 - RNA, 19 nt, Homo sapiens
  misc_RNA (1)...(19): siRNA sense strand
gaucagaggaaggaagaaa

SEQ ID NO: 2594790 - RNA, 19 nt, Homo sapiens
  misc_RNA (1)...(19): siRNA sense strand
uugacaaagugaaggagaa

SEQ ID NO: 2594791 - RNA, 19 nt, Homo sapiens
  misc_RNA (1)...(19): siRNA sense strand
cacugaaagaggaaagaaa

SEQ ID NO: 2594792 - RNA, 19 nt, Homo sapiens
  misc_RNA (1)...(19): siRNA sense strand
cagaaaucauacagaggau

SEQ ID NO: 2594793 - RNA, 19 nt, Homo sapiens
  misc_RNA (1)...(19): siRNA sense strand
aggaauugcucuacaguca

SEQ ID NO: 2594794 - RNA, 19 nt, Homo sapiens
  misc_RNA (1)...(19): siRNA sense strand
cugaaagaggaaagaaaga

SEQ ID NO: 2594795 - RNA, 19 nt, Homo sapiens
  misc_RNA (1)...(19): siRNA sense strand
gcgucaaauccaugcuaaa

SEQ ID NO: 2594796 - RNA, 19 nt, Homo sapiens
  misc_RNA (1)...(19): siRNA sense strand
gcagaaacuagcagagcuu

SEQ ID NO: 2594797 - RNA, 19 nt, Homo sapiens
  misc_RNA (1)...(19): siRNA sense strand
caagaaccuuaaagagcaa

SEQ ID NO: 2594798 - RNA, 19 nt, Homo sapiens
  misc_RNA (1)...(19): siRNA sense strand
uugaagaacaccaguuaua

SEQ ID NO: 2594799 - RNA, 19 nt, Homo sapiens
  misc_RNA (1)...(19): siRNA sense strand
ugaaggaugcuuauggaaa

SEQ ID NO: 2594800 - RNA, 19 nt, Homo sapiens
  misc_RNA (1)...(19): siRNA sense strand
caguaauccagaugaggaa

SEQ ID NO: 2594801 - RNA, 19 nt, Homo sapiens
  misc_RNA (1)...(19): siRNA sense strand
agaaacuagcagagcuuua

SEQ ID NO: 2594802 - RNA, 19 nt, Homo sapiens
  misc_RNA (1)...(19): siRNA sense strand
aauuaaaggcugcgguaga

SEQ ID NO: 2594803 - RNA, 19 nt, Homo sapiens
  misc_RNA (1)...(19): siRNA sense strand
agaaaggaacuuacagauu

SEQ ID NO: 2594804 - RNA, 19 nt, Homo sapiens
  misc_RNA (1)...(19): siRNA sense strand
gugaaaaugaucagaguuu

SEQ ID NO: 2594805 - RNA, 19 nt, Homo sapiens
  misc_RNA (1)...(19): siRNA sense strand
caucuagagcagacugaaa

SEQ ID NO: 2594806 - RNA, 19 nt, Homo sapiens
  misc_RNA (1)...(19): siRNA sense strand
aguuacagaaugaggaaga

SEQ ID NO: 2594807 - RNA, 19 nt, Homo sapiens
  misc_RNA (1)...(19): siRNA sense strand
ggagaaacugaaaaggaaa

SEQ ID NO: 2594808 - RNA, 19 nt, Homo sapiens
  misc_RNA (1)...(19): siRNA sense strand
caguuaaugugcaguaaaa

SEQ ID NO: 2594809 - RNA, 19 nt, Homo sapiens
  misc_RNA (1)...(19): siRNA sense strand
aguaaaaguugcuguguuu

SEQ ID NO: 2594810 - RNA, 19 nt, Homo sapiens
  misc_RNA (1)...(19): siRNA sense strand
uuacagugucguagggauu

SEQ ID NO: 2594811 - RNA, 19 nt, Homo sapiens
  misc_RNA (1)...(19): siRNA sense strand
acagcaaaccagaaaggaa

SEQ ID NO: 2594812 - RNA, 19 nt, Homo sapiens
  misc_RNA (1)...(19): siRNA sense strand
caucaugaauugggagaga

SEQ ID NO: 2594813 - RNA, 19 nt, Homo sapiens
  misc_RNA (1)...(19): siRNA sense strand
cuguggaggaucagaggaa

SEQ ID NO: 2594814 - RNA, 19 nt, Homo sapiens
  misc_RNA (1)...(19): siRNA sense strand
gccagaauggugaggaaau

SEQ ID NO: 2594815 - RNA, 19 nt, Homo sapiens
  misc_RNA (1)...(19): siRNA sense strand
agauacaguuugcagaaau

SEQ ID NO: 2594816 - RNA, 19 nt, Homo sapiens
  misc_RNA (1)...(19): siRNA sense strand
ggaaguuaagaguaaacaa

SEQ ID NO: 2594817 - RNA, 19 nt, Homo sapiens
  misc_RNA (1)...(19): siRNA sense strand
acuacagacuauggagaaa

SEQ ID NO: 2594818 - RNA, 19 nt, Homo sapiens
  misc_RNA (1)...(19): siRNA sense strand
agaccgaagaucaguuuaa

SEQ ID NO: 2594819 - RNA, 19 nt, Homo sapiens
  misc_RNA (1)...(19): siRNA sense strand
ucaugaauugggagagaau

SEQ ID NO: 2594820 - RNA, 19 nt, Homo sapiens
  misc_RNA (1)...(19): siRNA sense strand
acagaaugaggaagaagaa

SEQ ID NO: 2594821 - RNA, 19 nt, Homo sapiens
  misc_RNA (1)...(19): siRNA sense strand
ggacacaguacaaugaaca

SEQ ID NO: 2594822 - RNA, 19 nt, Homo sapiens
  misc_RNA (1)...(19): siRNA sense strand
gcaguugaggaaagaacaa

SEQ ID NO: 2594823 - RNA, 19 nt, Homo sapiens
  misc_RNA (1)...(19): siRNA sense strand
cuggaaagcacaaugaaaa

SEQ ID NO: 2594824 - RNA, 19 nt, Homo sapiens
  misc_RNA (1)...(19): siRNA sense strand
gcucagugcauuagaccau

SEQ ID NO: 2594825 - RNA, 19 nt, Homo sapiens
  misc_RNA (1)...(19): siRNA sense strand
cuuuaacagccgaggugua

SEQ ID NO: 2594826 - RNA, 19 nt, Homo sapiens
  misc_RNA (1)...(19): siRNA sense strand
uggagaaacugaaaaggaa

SEQ ID NO: 2594827 - RNA, 19 nt, Homo sapiens
  misc_RNA (1)...(19): siRNA sense strand
cagaagaauucccugguca

SEQ ID NO: 2594828 - RNA, 19 nt, Homo sapiens
  misc_RNA (1)...(19): siRNA sense strand
gaacauucaagcuggcaau

SEQ ID NO: 2594829 - RNA, 19 nt, Homo sapiens
  misc_RNA (1)...(19): siRNA sense strand
cugcagacauccugagacu

SEQ ID NO: 2594830 - RNA, 19 nt, Homo sapiens
  misc_RNA (1)...(19): siRNA sense strand
ugacaaagugaaggagaau

SEQ ID NO: 2594831 - RNA, 19 nt, Homo sapiens
  misc_RNA (1)...(19): siRNA sense strand
ugaggaaagaacaagcaaa

SEQ ID NO: 2594832 - RNA, 19 nt, Homo sapiens
  misc_RNA (1)...(19): siRNA sense strand
ugaggaagaggaagaagaa

SEQ ID NO: 2594833 - RNA, 19 nt, Homo sapiens
  misc_RNA (1)...(19): siRNA sense strand
acugagaauaagcuagaaa

SEQ ID NO: 2594834 - RNA, 19 nt, Homo sapiens
  misc_RNA (1)...(19): siRNA sense strand
ggaagaagaacuaagucca

SEQ ID NO: 2594835 - RNA, 19 nt, Homo sapiens
  misc_RNA (1)...(19): siRNA sense strand
aagacaacugaaagcaaua

SEQ ID NO: 2594836 - RNA, 19 nt, Homo sapiens
  misc_RNA (1)...(19): siRNA sense strand
auaaugaagcagacgauuu

SEQ ID NO: 2594837 - RNA, 19 nt, Homo sapiens
  misc_RNA (1)...(19): siRNA sense strand
ucaacaaggaauugcucua

SEQ ID NO: 2594838 - RNA, 19 nt, Homo sapiens
  misc_RNA (1)...(19): siRNA sense strand
caauggaagacaaguucua

SEQ ID NO: 2594839 - RNA, 19 nt, Homo sapiens
  misc_RNA (1)...(19): siRNA sense strand
caaacuaugcagagagaag

SEQ ID NO: 2594840 - RNA, 19 nt, Homo sapiens
  misc_RNA (1)...(19): siRNA sense strand
cauagauccuacagaagau

SEQ ID NO: 2594841 - RNA, 19 nt, Homo sapiens
  misc_RNA (1)...(19): siRNA sense strand
uuaccuagauugugaacga

SEQ ID NO: 2594842 - RNA, 19 nt, Homo sapiens
  misc_RNA (1)...(19): siRNA sense strand
aggcauaccaguaccagaa

SEQ ID NO: 2594843 - RNA, 19 nt, Homo sapiens
  misc_RNA (1)...(19): siRNA sense strand
cagcaggagugaagagcaa

SEQ ID NO: 2594844 - RNA, 19 nt, Homo sapiens
  misc_RNA (1)...(19): siRNA sense strand
aggauaaacugcaggugaa

SEQ ID NO: 2594845 - RNA, 19 nt, Homo sapiens
  misc_RNA (1)...(19): siRNA sense strand
gagaaagcauagaggggaa

SEQ ID NO: 2594846 - RNA, 19 nt, Homo sapiens
  misc_RNA (1)...(19): siRNA sense strand
gugaagaagcugaagcaau

SEQ ID NO: 2594847 - RNA, 19 nt, Homo sapiens
  misc_RNA (1)...(19): siRNA sense strand
agacagaagagauggguga

SEQ ID NO: 2594848 - RNA, 19 nt, Homo sapiens
  misc_RNA (1)...(19): siRNA sense strand
aggcuaaagaagaaacaaa

SEQ ID NO: 2594849 - RNA, 19 nt, Homo sapiens
  misc_RNA (1)...(19): siRNA sense strand
agacaauugacgagggaga

SEQ ID NO: 2594850 - RNA, 19 nt, Homo sapiens
  misc_RNA (1)...(19): siRNA sense strand
aaacaaagaggcaggaaaa

SEQ ID NO: 2594851 - RNA, 19 nt, Homo sapiens
  misc_RNA (1)...(19): siRNA sense strand
ccaaaagcuacaagagaua

SEQ ID NO: 2594852 - RNA, 19 nt, Homo sapiens
  misc_RNA (1)...(19): siRNA sense strand
ccucagugguagaaaauaa

SEQ ID NO: 2594853 - RNA, 19 nt, Homo sapiens
  misc_RNA (1)...(19): siRNA sense strand
gcauaaaaguagcagaaga

SEQ ID NO: 2594854 - RNA, 19 nt, Homo sapiens
  misc_RNA (1)...(19): siRNA sense strand
aaggaaagaagaagagaga

SEQ ID NO: 2594855 - RNA, 19 nt, Homo sapiens
  misc_RNA (1)...(19): siRNA sense strand
cgggagagaauucaagaaa

SEQ ID NO: 2594856 - RNA, 19 nt, Homo sapiens
  misc_RNA (1)...(19): siRNA sense strand
agauagaagaguugguaca

SEQ ID NO: 2594857 - RNA, 19 nt, Homo sapiens
  misc_RNA (1)...(19): siRNA sense strand
ggggugaaguagacaguaa

SEQ ID NO: 2594858 - RNA, 19 nt, Homo sapiens
  misc_RNA (1)...(19): siRNA sense strand
augugaugcugauggauaa

SEQ ID NO: 2594859 - RNA, 19 nt, Homo sapiens
  misc_RNA (1)...(19): siRNA sense strand
cacaagaggcacagaaaga

SEQ ID NO: 2594860 - RNA, 19 nt, Homo sapiens
  misc_RNA (1)...(19): siRNA sense strand
guucaaggucacaggguca

SEQ ID NO: 2594861 - RNA, 19 nt, Homo sapiens
  misc_RNA (1)...(19): siRNA sense strand
gcaaagugaagaagcugaa

SEQ ID NO: 2594862 - RNA, 19 nt, Homo sapiens
  misc_RNA (1)...(19): siRNA sense strand
cugcaggaacugugcuaua

SEQ ID NO: 2594863 - RNA, 19 nt, Homo sapiens
  misc_RNA (1)...(19): siRNA sense strand
caaaauacauccuggccaa

SEQ ID NO: 2594864 - RNA, 19 nt, Homo sapiens
  misc_RNA (1)...(19): siRNA sense strand
ccaaggaugcagagaagau

SEQ ID NO: 2594865 - RNA, 19 nt, Homo sapiens
  misc_RNA (1)...(19): siRNA sense strand
acaaauuauuccuggcaca

SEQ ID NO: 2594866 - RNA, 19 nt, Homo sapiens
  misc_RNA (1)...(19): siRNA sense strand
uggcauuuguggagaaagu

SEQ ID NO: 2594867 - RNA, 19 nt, Homo sapiens
  misc_RNA (1)...(19): siRNA sense strand
ccugaaaguuggccaguca

SEQ ID NO: 2594868 - RNA, 19 nt, Homo sapiens
  misc_RNA (1)...(19): siRNA sense strand
guugauaacagcagaagau

SEQ ID NO: 2594869 - RNA, 19 nt, Homo sapiens
  misc_RNA (1)...(19): siRNA sense strand
uggagaagaacaaggccaa

SEQ ID NO: 2594870 - RNA, 19 nt, Homo sapiens
  misc_RNA (1)...(19): siRNA sense strand
agaacaaggccaagagaac

SEQ ID NO: 2594871 - RNA, 19 nt, Homo sapiens
  misc_RNA (1)...(19): siRNA sense strand
gggcaaaagcaaagggaag

SEQ ID NO: 2594872 - RNA, 19 nt, Homo sapiens
  misc_RNA (1)...(19): siRNA sense strand
gaggauucaugauggaaaa

SEQ ID NO: 2594873 - RNA, 19 nt, Homo sapiens
  misc_RNA (1)...(19): siRNA sense strand
ggauagaucuagagaccuc

SEQ ID NO: 2594874 - RNA, 19 nt, Homo sapiens
  misc_RNA (1)...(19): siRNA sense strand
caacaaaaccgaagggucu

SEQ ID NO: 2594875 - RNA, 19 nt, Homo sapiens
  misc_RNA (1)...(19): siRNA sense strand
caugcugcacugagagaaa

SEQ ID NO: 2594876 - RNA, 19 nt, Homo sapiens
  misc_RNA (1)...(19): siRNA sense strand
cugcacaagugucgugaau

SEQ ID NO: 2594877 - RNA, 19 nt, Homo sapiens
  misc_RNA (1)...(19): siRNA sense strand
ggguaaaaguucaugcuga

SEQ ID NO: 2594878 - RNA, 19 nt, Homo sapiens
  misc_RNA (1)...(19): siRNA sense strand
agaagaagagagaaagcau

SEQ ID NO: 2594879 - RNA, 19 nt, Homo sapiens
  misc_RNA (1)...(19): siRNA sense strand
cagaaggaagugaaggaga

SEQ ID NO: 2594880 - RNA, 19 nt, Homo sapiens
  misc_RNA (1)...(19): siRNA sense strand
cuguuaaugugauggugua

SEQ ID NO: 2594881 - RNA, 19 nt, Homo sapiens
  misc_RNA (1)...(19): siRNA sense strand
caugugaugcugauggaua

SEQ ID NO: 2594882 - RNA, 19 nt, Homo sapiens
  misc_RNA (1)...(19): siRNA sense strand
cagaauauaccaaacgaga

SEQ ID NO: 2594883 - RNA, 19 nt, Homo sapiens
  misc_RNA (1)...(19): siRNA sense strand
gaggauaaacugcagguga

SEQ ID NO: 2594884 - RNA, 19 nt, Homo sapiens
  misc_RNA (1)...(19): siRNA sense strand
aagagguacucaagacaau

SEQ ID NO: 2594885 - RNA, 19 nt, Homo sapiens
  misc_RNA (1)...(19): siRNA sense strand
gggaugguuucgagaucau

SEQ ID NO: 2594886 - RNA, 19 nt, Homo sapiens
  misc_RNA (1)...(19): siRNA sense strand
uuaaggaacaggagcaaga

SEQ ID NO: 2594887 - RNA, 19 nt, Homo sapiens
  misc_RNA (1)...(19): siRNA sense strand
auaaacugcaggugaagaa

SEQ ID NO: 2594888 - RNA, 19 nt, Homo sapiens
  misc_RNA (1)...(19): siRNA sense strand
aagacaggccugaagggaa

SEQ ID NO: 2594889 - RNA, 19 nt, Homo sapiens
  misc_RNA (1)...(19): siRNA sense strand
cagccaaggaugcagagaa

SEQ ID NO: 2594890 - RNA, 19 nt, Homo sapiens
  misc_RNA (1)...(19): siRNA sense strand
auguaagcaaagugaagaa

SEQ ID NO: 2594891 - RNA, 19 nt, Homo sapiens
  misc_RNA (1)...(19): siRNA sense strand
ucguaaugucugagaagga

SEQ ID NO: 2594892 - RNA, 19 nt, Homo sapiens
  misc_RNA (1)...(19): siRNA sense strand
cuuuguaucuccagaacau

SEQ ID NO: 2594893 - RNA, 19 nt, Homo sapiens
  misc_RNA (1)...(19): siRNA sense strand
ccacuuacaccaaagaaaa

SEQ ID NO: 2594894 - RNA, 19 nt, Homo sapiens
  misc_RNA (1)...(19): siRNA sense strand
agaagagaugggugaugaa

SEQ ID NO: 2594895 - RNA, 19 nt, Homo sapiens
  misc_RNA (1)...(19): siRNA sense strand
ggggaagauuuucgagaca

SEQ ID NO: 2594896 - RNA, 19 nt, Homo sapiens
  misc_RNA (1)...(19): siRNA sense strand
agaggauucaugauggaaa

SEQ ID NO: 2594897 - RNA, 19 nt, Homo sapiens
  misc_RNA (1)...(19): siRNA sense strand
cauuuaccaugcagugaaa

SEQ ID NO: 2594898 - RNA, 19 nt, Homo sapiens
  misc_RNA (1)...(19): siRNA sense strand
aaagauggccggaggagga

SEQ ID NO: 2594899 - RNA, 19 nt, Homo sapiens
  misc_RNA (1)...(19): siRNA sense strand
ggcuaaagaagaaacaaaa

SEQ ID NO: 2594900 - RNA, 19 nt, Homo sapiens
  misc_RNA (1)...(19): siRNA sense strand
cagaagaugggcagccaau

SEQ ID NO: 2594901 - RNA, 19 nt, Homo sapiens
  misc_RNA (1)...(19): siRNA sense strand
gagcgauggaggugaggca

SEQ ID NO: 2594902 - RNA, 19 nt, Homo sapiens
  misc_RNA (1)...(19): siRNA sense strand
aaaacaaagaggcaggaaa

SEQ ID NO: 2594903 - RNA, 19 nt, Homo sapiens
  misc_RNA (1)...(19): siRNA sense strand
ccgaugaggugacgaagca

SEQ ID NO: 2594904 - RNA, 19 nt, Homo sapiens
  misc_RNA (1)...(19): siRNA sense strand
uuucagaugggaacagaua

SEQ ID NO: 2594905 - RNA, 19 nt, Homo sapiens
  misc_RNA (1)...(19): siRNA sense strand
agagguggguggagccgaa

SEQ ID NO: 2594906 - RNA, 19 nt, Homo sapiens
  misc_RNA (1)...(19): siRNA sense strand
ggguggagccgaaaacaaa

SEQ ID NO: 2594907 - RNA, 19 nt, Homo sapiens
  misc_RNA (1)...(19): siRNA sense strand
augcaaacgacuacgguca

SEQ ID NO: 2594908 - RNA, 19 nt, Homo sapiens
  misc_RNA (1)...(19): siRNA sense strand
acagauggucacagggaaa

SEQ ID NO: 2594909 - RNA, 19 nt, Homo sapiens
  misc_RNA (1)...(19): siRNA sense strand
cugaaauuacagaggaaau

SEQ ID NO: 2594910 - RNA, 19 nt, Homo sapiens
  misc_RNA (1)...(19): siRNA sense strand
cgagaaagauugcgccaga

SEQ ID NO: 2594911 - RNA, 19 nt, Homo sapiens
  misc_RNA (1)...(19): siRNA sense strand
aggaaauggagaaagaaau

SEQ ID NO: 2594912 - RNA, 19 nt, Homo sapiens
  misc_RNA (1)...(19): siRNA sense strand
uuacagaggaaauggagaa

SEQ ID NO: 2594913 - RNA, 19 nt, Homo sapiens
  misc_RNA (1)...(19): siRNA sense strand
gaaguaaagagaagggcuu

SEQ ID NO: 2594914 - RNA, 19 nt, Homo sapiens
  misc_RNA (1)...(19): siRNA sense strand
caagaagaagaaagagaga

SEQ ID NO: 2594915 - RNA, 19 nt, Homo sapiens
  misc_RNA (1)...(19): siRNA sense strand
gcugauggagcgaaguaaa

SEQ ID NO: 2594916 - RNA, 19 nt, Homo sapiens
  misc_RNA (1)...(19): siRNA sense strand
caagaaaaggaaagaguuu

SEQ ID NO: 2594917 - RNA, 19 nt, Homo sapiens
  misc_RNA (1)...(19): siRNA sense strand
acaguuuacuauagccaaa

SEQ ID NO: 2594918 - RNA, 19 nt, Homo sapiens
  misc_RNA (1)...(19): siRNA sense strand
uugaagaacagaaggcauu

SEQ ID NO: 2594919 - RNA, 19 nt, Homo sapiens
  misc_RNA (1)...(19): siRNA sense strand
aguucaagaagaagaaaga

SEQ ID NO: 2594920 - RNA, 19 nt, Homo sapiens
  misc_RNA (1)...(19): siRNA sense strand
ugucuuaguuccaguaaaa

SEQ ID NO: 2594921 - RNA, 19 nt, Homo sapiens
  misc_RNA (1)...(19): siRNA sense strand
uguauuucguaaugggaau

SEQ ID NO: 2594922 - RNA, 19 nt, Homo sapiens
  misc_RNA (1)...(19): siRNA sense strand
acauguuaguacagcagaa

SEQ ID NO: 2594923 - RNA, 19 nt, Homo sapiens
  misc_RNA (1)...(19): siRNA sense strand
aguacaugauucaguagaa

SEQ ID NO: 2594924 - RNA, 19 nt, Homo sapiens
  misc_RNA (1)...(19): siRNA sense strand
ccagagugcaaauggccaa

SEQ ID NO: 2594925 - RNA, 19 nt, Homo sapiens
  misc_RNA (1)...(19): siRNA sense strand
uaguacagcagaagagaca

SEQ ID NO: 2594926 - RNA, 19 nt, Homo sapiens
  misc_RNA (1)...(19): siRNA sense strand
agacaguucaagaagaaga

SEQ ID NO: 2594927 - RNA, 19 nt, Homo sapiens
  misc_RNA (1)...(19): siRNA sense strand
acaugauucaguagaacua

SEQ ID NO: 2594928 - RNA, 19 nt, Homo sapiens
  misc_RNA (1)...(19): siRNA sense strand
cauuacacgcaaagauauu

SEQ ID NO: 2594929 - RNA, 19 nt, Homo sapiens
  misc_RNA (1)...(19): siRNA sense strand
gaaacguuggacaaagaaa

SEQ ID NO: 2594930 - RNA, 19 nt, Homo sapiens
  misc_RNA (1)...(19): siRNA sense strand
cgggaaagucaaaccauca

SEQ ID NO: 2594931 - RNA, 19 nt, Homo sapiens
  misc_RNA (1)...(19): siRNA sense strand
gagcuguggaucaaagaau

SEQ ID NO: 2594932 - RNA, 19 nt, Homo sapiens
  misc_RNA (1)...(19): siRNA sense strand
accuaaagcaagaaagcau

SEQ ID NO: 2594933 - RNA, 19 nt, Homo sapiens
  misc_RNA (1)...(19): siRNA sense strand
aauggaaacucuugugcau

SEQ ID NO: 2594934 - RNA, 19 nt, Homo sapiens
  misc_RNA (1)...(19): siRNA sense strand
cagugaaacguuggacaaa

SEQ ID NO: 2594935 - RNA, 19 nt, Homo sapiens
  misc_RNA (1)...(19): siRNA sense strand
cuguuguggacuuuagaaa

SEQ ID NO: 2594936 - RNA, 19 nt, Homo sapiens
  misc_RNA (1)...(19): siRNA sense strand
agaaagauugcgccagauu

SEQ ID NO: 2594937 - RNA, 19 nt, Homo sapiens
  misc_RNA (1)...(19): siRNA sense strand
caaauggccaauggagaaa

SEQ ID NO: 2594938 - RNA, 19 nt, Homo sapiens
  misc_RNA (1)...(19): siRNA sense strand
uucaagaagaagaaagaga

SEQ ID NO: 2594939 - RNA, 19 nt, Homo sapiens
  misc_RNA (1)...(19): siRNA sense strand
agagauugcaggagcggga

SEQ ID NO: 2594940 - RNA, 19 nt, Homo sapiens
  misc_RNA (1)...(19): siRNA sense strand
ccuaaagcaagaaagcauu

SEQ ID NO: 2594941 - RNA, 19 nt, Homo sapiens
  misc_RNA (1)...(19): siRNA sense strand
caggcagagcuguggauca

SEQ ID NO: 2594942 - RNA, 19 nt, Homo sapiens
  misc_RNA (1)...(19): siRNA sense strand
cgacuccaugggugggaua

SEQ ID NO: 2594943 - RNA, 19 nt, Homo sapiens
  misc_RNA (1)...(19): siRNA sense strand
gaugaauggaagugacugu

SEQ ID NO: 2594944 - RNA, 19 nt, Homo sapiens
  misc_RNA (1)...(19): siRNA sense strand
ccgaaagaccucaagugga

SEQ ID NO: 2594945 - RNA, 19 nt, Homo sapiens
  misc_RNA (1)...(19): siRNA sense strand
ccucagcagaugaauggaa

SEQ ID NO: 2594946 - RNA, 19 nt, Homo sapiens
  misc_RNA (1)...(19): siRNA sense strand
ccucaaguggauuaucaaa

SEQ ID NO: 2594947 - RNA, 19 nt, Homo sapiens
  misc_RNA (1)...(19): siRNA sense strand
gggaacauucaguacauga

SEQ ID NO: 2594948 - RNA, 19 nt, Homo sapiens
  misc_RNA (1)...(19): siRNA sense strand
ccugaaauuacagaggaaa

SEQ ID NO: 2594949 - RNA, 19 nt, Homo sapiens
  misc_RNA (1)...(19): siRNA sense strand
acucuaaaccaucugaauu

SEQ ID NO: 2594950 - RNA, 19 nt, Homo sapiens
  misc_RNA (1)...(19): siRNA sense strand
gcugauaggaugaggaugg

SEQ ID NO: 2594951 - RNA, 19 nt, Homo sapiens
  misc_RNA (1)...(19): siRNA sense strand
uggaagugacugugggaug

SEQ ID NO: 2594952 - RNA, 19 nt, Homo sapiens
  misc_RNA (1)...(19): siRNA sense strand
gauauugcugauaggauga

SEQ ID NO: 2594953 - RNA, 19 nt, Homo sapiens
  misc_RNA (1)...(19): siRNA sense strand
aaaucaagaaacagccgaa

SEQ ID NO: 2594954 - RNA, 19 nt, Homo sapiens
  misc_RNA (1)...(19): siRNA sense strand
guacagcagaagagacagu

SEQ ID NO: 2594955 - RNA, 19 nt, Homo sapiens
  misc_RNA (1)...(19): siRNA sense strand
cuacuuucuuccaggcaga

SEQ ID NO: 2594956 - RNA, 19 nt, Homo sapiens
  misc_RNA (1)...(19): siRNA sense strand
cugauagugaagaugaauu

SEQ ID NO: 2594957 - RNA, 19 nt, Homo sapiens
  misc_RNA (1)...(19): siRNA sense strand
accauuacacgcaaagaua

SEQ ID NO: 2594958 - RNA, 19 nt, Homo sapiens
  misc_RNA (1)...(19): siRNA sense strand
agaaaaggaaagaguuuga

SEQ ID NO: 2594959 - RNA, 19 nt, Homo sapiens
  misc_RNA (1)...(19): siRNA sense strand
acacauuggaacaggaaau

SEQ ID NO: 2594960 - RNA, 19 nt, Homo sapiens
  misc_RNA (1)...(19): siRNA sense strand
ccaugaaccagcagcacau

SEQ ID NO: 2594961 - RNA, 19 nt, Homo sapiens
  misc_RNA (1)...(19): siRNA sense strand
ggaacaggaaauuuguaca

SEQ ID NO: 2594962 - RNA, 19 nt, Homo sapiens
  misc_RNA (1)...(19): siRNA sense strand
agauauuugacuuggagaa

SEQ ID NO: 2594963 - RNA, 19 nt, Homo sapiens
  misc_RNA (1)...(19): siRNA sense strand
ucaagcaauauguggcaaa

SEQ ID NO: 2594964 - RNA, 19 nt, Homo sapiens
  misc_RNA (1)...(19): siRNA sense strand
aggaggaggaggaggagga

SEQ ID NO: 2594965 - RNA, 19 nt, Homo sapiens
  misc_RNA (1)...(19): siRNA sense strand
cggucauguaccugggcua

SEQ ID NO: 2594966 - RNA, 19 nt, Homo sapiens
  misc_RNA (1)...(19): siRNA sense strand
cggucuuccugcugguuau

SEQ ID NO: 2594967 - RNA, 19 nt, Homo sapiens
  misc_RNA (1)...(19): siRNA sense strand
cagacaaacugcugcccua

SEQ ID NO: 2594968 - RNA, 19 nt, Homo sapiens
  misc_RNA (1)...(19): siRNA sense strand
gcagaaaguaccaggcacu

SEQ ID NO: 2594969 - RNA, 19 nt, Homo sapiens
  misc_RNA (1)...(19): siRNA sense strand
gggagaucgagcaggugaa

SEQ ID NO: 2594970 - RNA, 19 nt, Homo sapiens
  misc_RNA (1)...(19): siRNA sense strand
agaucgagcaggugaacga

SEQ ID NO: 2594971 - RNA, 19 nt, Homo sapiens
  misc_RNA (1)...(19): siRNA sense strand
agagcgagcuggagacgga

SEQ ID NO: 2594972 - RNA, 19 nt, Homo sapiens
  misc_RNA (1)...(19): siRNA sense strand
gccacauccuggagagcga

SEQ ID NO: 2594973 - RNA, 19 nt, Homo sapiens
  misc_RNA (1)...(19): siRNA sense strand
agaugaagaggaagaggca

SEQ ID NO: 2594974 - RNA, 19 nt, Homo sapiens
  misc_RNA (1)...(19): siRNA sense strand
agcgagaugaagaggaaga

SEQ ID NO: 2594975 - RNA, 19 nt, Homo sapiens
  misc_RNA (1)...(19): siRNA sense strand
ccgugggcuuugaggaguu

SEQ ID NO: 2594976 - RNA, 19 nt, Homo sapiens
  misc_RNA (1)...(19): siRNA sense strand
ggugcaaggaggagaucaa

SEQ ID NO: 2594977 - RNA, 19 nt, Homo sapiens
  misc_RNA (1)...(19): siRNA sense strand
caucaagauucguggacca

SEQ ID NO: 2594978 - RNA, 19 nt, Homo sapiens
  misc_RNA (1)...(19): siRNA sense strand
guuaaagcauagacggaca

SEQ ID NO: 2594979 - RNA, 19 nt, Homo sapiens
  misc_RNA (1)...(19): siRNA sense strand
ucaccgaaggagaggaaau

SEQ ID NO: 2594980 - RNA, 19 nt, Homo sapiens
  misc_RNA (1)...(19): siRNA sense strand
guaaagaaugugugugcca

SEQ ID NO: 2594981 - RNA, 19 nt, Homo sapiens
  misc_RNA (1)...(19): siRNA sense strand
ggugacuacaagaggaaga

SEQ ID NO: 2594982 - RNA, 19 nt, Homo sapiens
  misc_RNA (1)...(19): siRNA sense strand
aaagaaugugugugccaaa

SEQ ID NO: 2594983 - RNA, 19 nt, Homo sapiens
  misc_RNA (1)...(19): siRNA sense strand
cuggaggagaggaggauga

SEQ ID NO: 2594984 - RNA, 19 nt, Homo sapiens
  misc_RNA (1)...(19): siRNA sense strand
gaagaaaccgacugcccaa

SEQ ID NO: 2594985 - RNA, 19 nt, Homo sapiens
  misc_RNA (1)...(19): siRNA sense strand
aggcaggagggaagcacua

SEQ ID NO: 2594986 - RNA, 19 nt, Homo sapiens
  misc_RNA (1)...(19): siRNA sense strand
cgggcagagaagaaguuaa

SEQ ID NO: 2594987 - RNA, 19 nt, Homo sapiens
  misc_RNA (1)...(19): siRNA sense strand
agaggaaugaacugaagaa

SEQ ID NO: 2594988 - RNA, 19 nt, Homo sapiens
  misc_RNA (1)...(19): siRNA sense strand
cuacaaacggcauggugau

SEQ ID NO: 2594989 - RNA, 19 nt, Homo sapiens
  misc_RNA (1)...(19): siRNA sense strand
ggcugauucugaaggaaga

SEQ ID NO: 2594990 - RNA, 19 nt, Homo sapiens
  misc_RNA (1)...(19): siRNA sense strand
acaaagaccuggcggcucu

SEQ ID NO: 2594991 - RNA, 19 nt, Homo sapiens
  misc_RNA (1)...(19): siRNA sense strand
gcuggagagauguggcuau

SEQ ID NO: 2594992 - RNA, 19 nt, Homo sapiens
  misc_RNA (1)...(19): siRNA sense strand
caguaacaucuaccggaaa

SEQ ID NO: 2594993 - RNA, 19 nt, Homo sapiens
  misc_RNA (1)...(19): siRNA sense strand
guucaccgaaggagaggaa

SEQ ID NO: 2594994 - RNA, 19 nt, Homo sapiens
  misc_RNA (1)...(19): siRNA sense strand
acaguaacaucuaccggaa

SEQ ID NO: 2594995 - RNA, 19 nt, Homo sapiens
  misc_RNA (1)...(19): siRNA sense strand
acagcaaccaagagcaaaa

SEQ ID NO: 2594996 - RNA, 19 nt, Homo sapiens
  misc_RNA (1)...(19): siRNA sense strand
ggacuucaucacaggcgaa

SEQ ID NO: 2594997 - RNA, 19 nt, Homo sapiens
  misc_RNA (1)...(19): siRNA sense strand
ugccagaccugcagcguca

SEQ ID NO: 2594998 - RNA, 19 nt, Homo sapiens
  misc_RNA (1)...(19): siRNA sense strand
agagaagaaguuaaagcau

SEQ ID NO: 2594999 - RNA, 19 nt, Homo sapiens
  misc_RNA (1)...(19): siRNA sense strand
aaguuaaagcauagacgga

SEQ ID NO: 2595000 - RNA, 19 nt, Homo sapiens
  misc_RNA (1)...(19): siRNA sense strand
cuaaaguggauaaugagau

SEQ ID NO: 2595001 - RNA, 19 nt, Homo sapiens
  misc_RNA (1)...(19): siRNA sense strand
cggcauggugauuugucua

SEQ ID NO: 2595002 - RNA, 19 nt, Homo sapiens
  misc_RNA (1)...(19): siRNA sense strand
gagcaaaacaagugaagac

SEQ ID NO: 2595003 - RNA, 19 nt, Homo sapiens
  misc_RNA (1)...(19): siRNA sense strand
cuggugacuacaagaggaa

SEQ ID NO: 2595004 - RNA, 19 nt, Homo sapiens
  misc_RNA (1)...(19): siRNA sense strand
ggugcaaggaggagaucaa

SEQ ID NO: 2595005 - RNA, 19 nt, Homo sapiens
  misc_RNA (1)...(19): siRNA sense strand
caucaagauucguggacca

SEQ ID NO: 2595006 - RNA, 19 nt, Homo sapiens
  misc_RNA (1)...(19): siRNA sense strand
guuaaagcauagacggaca

SEQ ID NO: 2595007 - RNA, 19 nt, Homo sapiens
  misc_RNA (1)...(19): siRNA sense strand
ucaccgaaggagaggaaau

SEQ ID NO: 2595008 - RNA, 19 nt, Homo sapiens
  misc_RNA (1)...(19): siRNA sense strand
guaaagaaugugugugcca

SEQ ID NO: 2595009 - RNA, 19 nt, Homo sapiens
  misc_RNA (1)...(19): siRNA sense strand
ggugacuacaagaggaaga

SEQ ID NO: 2595010 - RNA, 19 nt, Homo sapiens
  misc_RNA (1)...(19): siRNA sense strand
aaagaaugugugugccaaa

SEQ ID NO: 2595011 - RNA, 19 nt, Homo sapiens
  misc_RNA (1)...(19): siRNA sense strand
cuggaggagaggaggauga

SEQ ID NO: 2595012 - RNA, 19 nt, Homo sapiens
  misc_RNA (1)...(19): siRNA sense strand
gaagaaaccgacugcccaa

SEQ ID NO: 2595013 - RNA, 19 nt, Homo sapiens
  misc_RNA (1)...(19): siRNA sense strand
aggcaggagggaagcacua

SEQ ID NO: 2595014 - RNA, 19 nt, Homo sapiens
  misc_RNA (1)...(19): siRNA sense strand
cgggcagagaagaaguuaa

SEQ ID NO: 2595015 - RNA, 19 nt, Homo sapiens
  misc_RNA (1)...(19): siRNA sense strand
agaggaaugaacugaagaa

SEQ ID NO: 2595016 - RNA, 19 nt, Homo sapiens
  misc_RNA (1)...(19): siRNA sense strand
cuacaaacggcauggugau

SEQ ID NO: 2595017 - RNA, 19 nt, Homo sapiens
  misc_RNA (1)...(19): siRNA sense strand
ggcugauucugaaggaaga

SEQ ID NO: 2595018 - RNA, 19 nt, Homo sapiens
  misc_RNA (1)...(19): siRNA sense strand
acaaagaccuggcggcucu

SEQ ID NO: 2595019 - RNA, 19 nt, Homo sapiens
  misc_RNA (1)...(19): siRNA sense strand
gcuggagagauguggcuau

SEQ ID NO: 2595020 - RNA, 19 nt, Homo sapiens
  misc_RNA (1)...(19): siRNA sense strand
caguaacaucuaccggaaa

SEQ ID NO: 2595021 - RNA, 19 nt, Homo sapiens
  misc_RNA (1)...(19): siRNA sense strand
guucaccgaaggagaggaa

SEQ ID NO: 2595022 - RNA, 19 nt, Homo sapiens
  misc_RNA (1)...(19): siRNA sense strand
acaguaacaucuaccggaa

SEQ ID NO: 2595023 - RNA, 19 nt, Homo sapiens
  misc_RNA (1)...(19): siRNA sense strand
acagcaaccaagagcaaaa

SEQ ID NO: 2595024 - RNA, 19 nt, Homo sapiens
  misc_RNA (1)...(19): siRNA sense strand
ggacuucaucacaggcgaa

SEQ ID NO: 2595025 - RNA, 19 nt, Homo sapiens
  misc_RNA (1)...(19): siRNA sense strand
ugccagaccugcagcguca

SEQ ID NO: 2595026 - RNA, 19 nt, Homo sapiens
  misc_RNA (1)...(19): siRNA sense strand
agagaagaaguuaaagcau

SEQ ID NO: 2595027 - RNA, 19 nt, Homo sapiens
  misc_RNA (1)...(19): siRNA sense strand
aaguuaaagcauagacgga

SEQ ID NO: 2595028 - RNA, 19 nt, Homo sapiens
  misc_RNA (1)...(19): siRNA sense strand
cuaaaguggauaaugagau

SEQ ID NO: 2595029 - RNA, 19 nt, Homo sapiens
  misc_RNA (1)...(19): siRNA sense strand
cggcauggugauuugucua

SEQ ID NO: 2595030 - RNA, 19 nt, Homo sapiens
  misc_RNA (1)...(19): siRNA sense strand
gagcaaaacaagugaagac

SEQ ID NO: 2595031 - RNA, 19 nt, Homo sapiens
  misc_RNA (1)...(19): siRNA sense strand
cuggugacuacaagaggaa

SEQ ID NO: 2595032 - RNA, 19 nt, Homo sapiens
  misc_RNA (1)...(19): siRNA sense strand
cugcagcaucagaggcuaa

SEQ ID NO: 2595033 - RNA, 19 nt, Homo sapiens
  misc_RNA (1)...(19): siRNA sense strand
acucacagagcaagccaaa

SEQ ID NO: 2595034 - RNA, 19 nt, Homo sapiens
  misc_RNA (1)...(19): siRNA sense strand
gcagcagaugggagcagaa

SEQ ID NO: 2595035 - RNA, 19 nt, Homo sapiens
  misc_RNA (1)...(19): siRNA sense strand
gggcaaaagacuuggggcu

SEQ ID NO: 2595036 - RNA, 19 nt, Homo sapiens
  misc_RNA (1)...(19): siRNA sense strand
gaggcuaacagaauggaga

SEQ ID NO: 2595037 - RNA, 19 nt, Homo sapiens
  misc_RNA (1)...(19): siRNA sense strand
gcaucagaggcuaacagaa

SEQ ID NO: 2595038 - RNA, 19 nt, Homo sapiens
  misc_RNA (1)...(19): siRNA sense strand
gggaugaacaacuggguag

SEQ ID NO: 2595039 - RNA, 19 nt, Homo sapiens
  misc_RNA (1)...(19): siRNA sense strand
gguacaaaggaaaggacua

SEQ ID NO: 2595040 - RNA, 19 nt, Homo sapiens
  misc_RNA (1)...(19): siRNA sense strand
cccaagaacuucagcggaa

SEQ ID NO: 2595041 - RNA, 19 nt, Homo sapiens
  misc_RNA (1)...(19): siRNA sense strand
gcggaaagugccuggaaca

SEQ ID NO: 2595042 - RNA, 19 nt, Homo sapiens
  misc_RNA (1)...(19): siRNA sense strand
gcaaugagucccaagguga

SEQ ID NO: 2595043 - RNA, 19 nt, Homo sapiens
  misc_RNA (1)...(19): siRNA sense strand
cuaaagaacugcaugagca

SEQ ID NO: 2595044 - RNA, 19 nt, Homo sapiens
  misc_RNA (1)...(19): siRNA sense strand
aggccuucuuagaggaaau

SEQ ID NO: 2595045 - RNA, 19 nt, Homo sapiens
  misc_RNA (1)...(19): siRNA sense strand
aggcagaggcccugaucau

SEQ ID NO: 2595046 - RNA, 19 nt, Homo sapiens
  misc_RNA (1)...(19): siRNA sense strand
ggcucaacuuccagggaga

SEQ ID NO: 2595047 - RNA, 19 nt, Homo sapiens
  misc_RNA (1)...(19): siRNA sense strand
ccuccagguucauggccua

SEQ ID NO: 2595048 - RNA, 19 nt, Homo sapiens
  misc_RNA (1)...(19): siRNA sense strand
ccagggagacacaggcaau

SEQ ID NO: 2595049 - RNA, 19 nt, Homo sapiens
  misc_RNA (1)...(19): siRNA sense strand
ugcaguauuuccagaacaa

SEQ ID NO: 2595050 - RNA, 19 nt, Homo sapiens
  misc_RNA (1)...(19): siRNA sense strand
gguucauggccuaucacaa

SEQ ID NO: 2595051 - RNA, 19 nt, Homo sapiens
  misc_RNA (1)...(19): siRNA sense strand
ccucccaagucgacuggaa

SEQ ID NO: 2595052 - RNA, 19 nt, Homo sapiens
  misc_RNA (1)...(19): siRNA sense strand
ccuccuggguggaugacuu

SEQ ID NO: 2595053 - RNA, 19 nt, Homo sapiens
  misc_RNA (1)...(19): siRNA sense strand
ccacagaguucccugagca

SEQ ID NO: 2595054 - RNA, 19 nt, Homo sapiens
  misc_RNA (1)...(19): siRNA sense strand
gcaagaugguggaccccaa

SEQ ID NO: 2595055 - RNA, 19 nt, Homo sapiens
  misc_RNA (1)...(19): siRNA sense strand
agccaagcccggagugaga

SEQ ID NO: 2595056 - RNA, 19 nt, Homo sapiens
  misc_RNA (1)...(19): siRNA sense strand
cagagugagccuuacacaa

SEQ ID NO: 2595057 - RNA, 19 nt, Homo sapiens
  misc_RNA (1)...(19): siRNA sense strand
cucuggaagacgagaucaa

SEQ ID NO: 2595058 - RNA, 19 nt, Homo sapiens
  misc_RNA (1)...(19): siRNA sense strand
cagaagauccaguaugcca

SEQ ID NO: 2595059 - RNA, 19 nt, Homo sapiens
  misc_RNA (1)...(19): siRNA sense strand
ccaagcccggagugagaaa

SEQ ID NO: 2595060 - RNA, 19 nt, Homo sapiens
  misc_RNA (1)...(19): siRNA sense strand
aagaacugcaugagcauca

SEQ ID NO: 2595061 - RNA, 19 nt, Homo sapiens
  misc_RNA (1)...(19): siRNA sense strand
ccauauugucggaccuuau

SEQ ID NO: 2595062 - RNA, 19 nt, Homo sapiens
  misc_RNA (1)...(19): siRNA sense strand
cuuuauaagcagauuggca

SEQ ID NO: 2595063 - RNA, 19 nt, Homo sapiens
  misc_RNA (1)...(19): siRNA sense strand
gcacaggacugguggagca

SEQ ID NO: 2595064 - RNA, 19 nt, Homo sapiens
  misc_RNA (1)...(19): siRNA sense strand
uggaaauggaugagaugau

SEQ ID NO: 2595065 - RNA, 19 nt, Homo sapiens
  misc_RNA (1)...(19): siRNA sense strand
agucggacgcaguggaaau

SEQ ID NO: 2595066 - RNA, 19 nt, Homo sapiens
  misc_RNA (1)...(19): siRNA sense strand
acagcuggauggaggguca

SEQ ID NO: 2595067 - RNA, 19 nt, Homo sapiens
  misc_RNA (1)...(19): siRNA sense strand
acgcaguggaaauggauga

SEQ ID NO: 2595068 - RNA, 19 nt, Homo sapiens
  misc_RNA (1)...(19): siRNA sense strand
gcaucaaacgacacgucaa

SEQ ID NO: 2595069 - RNA, 19 nt, Homo sapiens
  misc_RNA (1)...(19): siRNA sense strand
cagccugggcagaagguuu

SEQ ID NO: 2595070 - RNA, 19 nt, Homo sapiens
  misc_RNA (1)...(19): siRNA sense strand
aguucaagcgggaggagga

SEQ ID NO: 2595071 - RNA, 19 nt, Homo sapiens
  misc_RNA (1)...(19): siRNA sense strand
ggucaagagugcacaggac

SEQ ID NO: 2595072 - RNA, 19 nt, Homo sapiens
  misc_RNA (1)...(19): siRNA sense strand
ucgaugucccaaagaggaa

SEQ ID NO: 2595073 - RNA, 19 nt, Homo sapiens
  misc_RNA (1)...(19): siRNA sense strand
gugaagaagcacaaggaga

SEQ ID NO: 2595074 - RNA, 19 nt, Homo sapiens
  misc_RNA (1)...(19): siRNA sense strand
gagaggaagcaguuggcua

SEQ ID NO: 2595075 - RNA, 19 nt, Homo sapiens
  misc_RNA (1)...(19): siRNA sense strand
ggagaaggacaguagggau

SEQ ID NO: 2595076 - RNA, 19 nt, Homo sapiens
  misc_RNA (1)...(19): siRNA sense strand
cuuacauguccgaggaaga

SEQ ID NO: 2595077 - RNA, 19 nt, Homo sapiens
  misc_RNA (1)...(19): siRNA sense strand
cgguacuaacucagagauu

SEQ ID NO: 2595078 - RNA, 19 nt, Homo sapiens
  misc_RNA (1)...(19): siRNA sense strand
ccgacaaacacgagccuca

SEQ ID NO: 2595079 - RNA, 19 nt, Homo sapiens
  misc_RNA (1)...(19): siRNA sense strand
acucaauggcauauaucaa

SEQ ID NO: 2595080 - RNA, 19 nt, Homo sapiens
  misc_RNA (1)...(19): siRNA sense strand
uugaagagguggugcccau

SEQ ID NO: 2595081 - RNA, 19 nt, Homo sapiens
  misc_RNA (1)...(19): siRNA sense strand
ggccaagacauaaugggaa

SEQ ID NO: 2595082 - RNA, 19 nt, Homo sapiens
  misc_RNA (1)...(19): siRNA sense strand
gguguaugaccgagagguu

SEQ ID NO: 2595083 - RNA, 19 nt, Homo sapiens
  misc_RNA (1)...(19): siRNA sense strand
cagaggauguguugcgcau

SEQ ID NO: 2595084 - RNA, 19 nt, Homo sapiens
  misc_RNA (1)...(19): siRNA sense strand
ccaagauccugcuggcuga

SEQ ID NO: 2595085 - RNA, 19 nt, Homo sapiens
  misc_RNA (1)...(19): siRNA sense strand
gcuucauuaccacgagaua

SEQ ID NO: 2595086 - RNA, 19 nt, Homo sapiens
  misc_RNA (1)...(19): siRNA sense strand
aggaagaagcugccaagau

SEQ ID NO: 2595087 - RNA, 19 nt, Homo sapiens
  misc_RNA (1)...(19): siRNA sense strand
gccaagacauaaugggaac

SEQ ID NO: 2595088 - RNA, 19 nt, Homo sapiens
  misc_RNA (1)...(19): siRNA sense strand
gcucaggauuacuguggca

SEQ ID NO: 2595089 - RNA, 19 nt, Homo sapiens
  misc_RNA (1)...(19): siRNA sense strand
augacuugcuggacaucaa

SEQ ID NO: 2595090 - RNA, 19 nt, Homo sapiens
  misc_RNA (1)...(19): siRNA sense strand
ggaagaggagacugggugu

SEQ ID NO: 2595091 - RNA, 19 nt, Homo sapiens
  misc_RNA (1)...(19): siRNA sense strand
ccagaacaugccagugauu

SEQ ID NO: 2595092 - RNA, 19 nt, Homo sapiens
  misc_RNA (1)...(19): siRNA sense strand
cugaagacccaaaucugaa

SEQ ID NO: 2595093 - RNA, 19 nt, Homo sapiens
  misc_RNA (1)...(19): siRNA sense strand
aagucuuacaugaaggauu

SEQ ID NO: 2595094 - RNA, 19 nt, Homo sapiens
  misc_RNA (1)...(19): siRNA sense strand
agaucgaggagcagauaaa

SEQ ID NO: 2595095 - RNA, 19 nt, Homo sapiens
  misc_RNA (1)...(19): siRNA sense strand
ugaaacagaucgaggagca

SEQ ID NO: 2595096 - RNA, 19 nt, Homo sapiens
  misc_RNA (1)...(19): siRNA sense strand
aagacgaggaugaggaaga

SEQ ID NO: 2595097 - RNA, 19 nt, Homo sapiens
  misc_RNA (1)...(19): siRNA sense strand
ggucaaacuccaaggcguu

SEQ ID NO: 2595098 - RNA, 19 nt, Homo sapiens
  misc_RNA (1)...(19): siRNA sense strand
agaggaaagggcaggagaa

SEQ ID NO: 2595099 - RNA, 19 nt, Homo sapiens
  misc_RNA (1)...(19): siRNA sense strand
cuggaaagccgucggguca

SEQ ID NO: 2595100 - RNA, 19 nt, Homo sapiens
  misc_RNA (1)...(19): siRNA sense strand
gcgccgaguuacaggcuca

SEQ ID NO: 2595101 - RNA, 19 nt, Homo sapiens
  misc_RNA (1)...(19): siRNA sense strand
cggcaggcaaagauggcaa

SEQ ID NO: 2595102 - RNA, 19 nt, Homo sapiens
  misc_RNA (1)...(19): siRNA sense strand
ccgaaauggaagacgagga

SEQ ID NO: 2595103 - RNA, 19 nt, Homo sapiens
  misc_RNA (1)...(19): siRNA sense strand
cggucacggccaagaagaa

SEQ ID NO: 2595104 - RNA, 19 nt, Homo sapiens
  misc_RNA (1)...(19): siRNA sense strand
aggagaaucuaaagacgga

SEQ ID NO: 2595105 - RNA, 19 nt, Homo sapiens
  misc_RNA (1)...(19): siRNA sense strand
gggucaaacuccaaggcgu

SEQ ID NO: 2595106 - RNA, 19 nt, Homo sapiens
  misc_RNA (1)...(19): siRNA sense strand
caguguuggcuguggcuau

SEQ ID NO: 2595107 - RNA, 19 nt, Homo sapiens
  misc_RNA (1)...(19): siRNA sense strand
uggccuuccuucagggaga

SEQ ID NO: 2595108 - RNA, 19 nt, Homo sapiens
  misc_RNA (1)...(19): siRNA sense strand
gagaacagcccguuggugu

SEQ ID NO: 2595109 - RNA, 19 nt, Homo sapiens
  misc_RNA (1)...(19): siRNA sense strand
agucgcugcuggugaaaca

SEQ ID NO: 2595110 - RNA, 19 nt, Homo sapiens
  misc_RNA (1)...(19): siRNA sense strand
ugucagaacaagucuccaa

SEQ ID NO: 2595111 - RNA, 19 nt, Homo sapiens
  misc_RNA (1)...(19): siRNA sense strand
agaggaacgcggcaggcaa

SEQ ID NO: 2595112 - RNA, 19 nt, Homo sapiens
  misc_RNA (1)...(19): siRNA sense strand
gcgaggacgaagacagcga

SEQ ID NO: 2595113 - RNA, 19 nt, Homo sapiens
  misc_RNA (1)...(19): siRNA sense strand
gagaggaaagggcaggaga

SEQ ID NO: 2595114 - RNA, 19 nt, Homo sapiens
  misc_RNA (1)...(19): siRNA sense strand
cuggacaaucggacaggua

SEQ ID NO: 2595115 - RNA, 19 nt, Homo sapiens
  misc_RNA (1)...(19): siRNA sense strand
uggaagacgaggaugagga

SEQ ID NO: 2595116 - RNA, 19 nt, Homo sapiens
  misc_RNA (1)...(19): siRNA sense strand
ggaugcuaucaaugaguuu

SEQ ID NO: 2595117 - RNA, 19 nt, Homo sapiens
  misc_RNA (1)...(19): siRNA sense strand
ggacaaucggacagguaag

SEQ ID NO: 2595118 - RNA, 19 nt, Homo sapiens
  misc_RNA (1)...(19): siRNA sense strand
gggccaaauaucauaaacu

SEQ ID NO: 2595119 - RNA, 19 nt, Homo sapiens
  misc_RNA (1)...(19): siRNA sense strand
gccaaauaucauaaacuga

SEQ ID NO: 2595120 - RNA, 19 nt, Homo sapiens
  misc_RNA (1)...(19): siRNA sense strand
gagacauguuagaaggaca

SEQ ID NO: 2595121 - RNA, 19 nt, Homo sapiens
  misc_RNA (1)...(19): siRNA sense strand
aaacaaaacagaagcgcaa

SEQ ID NO: 2595122 - RNA, 19 nt, Homo sapiens
  misc_RNA (1)...(19): siRNA sense strand
cugcauugcuacaagaaaa

SEQ ID NO: 2595123 - RNA, 19 nt, Homo sapiens
  misc_RNA (1)...(19): siRNA sense strand
agacauguuagaaggacaa

SEQ ID NO: 2595124 - RNA, 19 nt, Homo sapiens
  misc_RNA (1)...(19): siRNA sense strand
gagcauagagacagggaag

SEQ ID NO: 2595125 - RNA, 19 nt, Homo sapiens
  misc_RNA (1)...(19): siRNA sense strand
cggcaaaccuguacgacgu

SEQ ID NO: 2595126 - RNA, 19 nt, Homo sapiens
  misc_RNA (1)...(19): siRNA sense strand
caauguaugugucggccaa

SEQ ID NO: 2595127 - RNA, 19 nt, Homo sapiens
  misc_RNA (1)...(19): siRNA sense strand
gcuguggagcauagagaca

SEQ ID NO: 2595128 - RNA, 19 nt, Homo sapiens
  misc_RNA (1)...(19): siRNA sense strand
gcgcaaaucccauagccuu

SEQ ID NO: 2595129 - RNA, 19 nt, Homo sapiens
  misc_RNA (1)...(19): siRNA sense strand
cuuagaauuacguagagaa

SEQ ID NO: 2595130 - RNA, 19 nt, Homo sapiens
  misc_RNA (1)...(19): siRNA sense strand
ugacaucccucaagagcca

SEQ ID NO: 2595131 - RNA, 19 nt, Homo sapiens
  misc_RNA (1)...(19): siRNA sense strand
uggucaaauagaaagagaa

SEQ ID NO: 2595132 - RNA, 19 nt, Homo sapiens
  misc_RNA (1)...(19): siRNA sense strand
cugaaggacaagcgauuga

SEQ ID NO: 2595133 - RNA, 19 nt, Homo sapiens
  misc_RNA (1)...(19): siRNA sense strand
ccgacaagugagacuguuu

SEQ ID NO: 2595134 - RNA, 19 nt, Homo sapiens
  misc_RNA (1)...(19): siRNA sense strand
ccguguucaccgugggaga

SEQ ID NO: 2595135 - RNA, 19 nt, Homo sapiens
  misc_RNA (1)...(19): siRNA sense strand
cggcauggagugaagacca

SEQ ID NO: 2595136 - RNA, 19 nt, Homo sapiens
  misc_RNA (1)...(19): siRNA sense strand
gggccaacucaaaacaaaa

SEQ ID NO: 2595137 - RNA, 19 nt, Homo sapiens
  misc_RNA (1)...(19): siRNA sense strand
ggagauacgcggugcagcu

SEQ ID NO: 2595138 - RNA, 19 nt, Homo sapiens
  misc_RNA (1)...(19): siRNA sense strand
gggaugucagcguggccaa

SEQ ID NO: 2595139 - RNA, 19 nt, Homo sapiens
  misc_RNA (1)...(19): siRNA sense strand
auggagcagagcugaguaa

SEQ ID NO: 2595140 - RNA, 19 nt, Homo sapiens
  misc_RNA (1)...(19): siRNA sense strand
cugacaaggacgagcccga

SEQ ID NO: 2595141 - RNA, 19 nt, Homo sapiens
  misc_RNA (1)...(19): siRNA sense strand
cgcaaaucccauagccuuu

SEQ ID NO: 2595142 - RNA, 19 nt, Homo sapiens
  misc_RNA (1)...(19): siRNA sense strand
ugcugaaggacaagcgauu

SEQ ID NO: 2595143 - RNA, 19 nt, Homo sapiens
  misc_RNA (1)...(19): siRNA sense strand
caacagaggcaucagccaa

SEQ ID NO: 2595144 - RNA, 19 nt, Homo sapiens
  misc_RNA (1)...(19): siRNA sense strand
gagugaaggaguacagcca

SEQ ID NO: 2595145 - RNA, 19 nt, Homo sapiens
  misc_RNA (1)...(19): siRNA sense strand
gagcgcuagcugagcacaa

SEQ ID NO: 2595146 - RNA, 19 nt, Homo sapiens
  misc_RNA (1)...(19): siRNA sense strand
acaugaagagagugaagga

SEQ ID NO: 2595147 - RNA, 19 nt, Homo sapiens
  misc_RNA (1)...(19): siRNA sense strand
cacugaggacuuagagauu

SEQ ID NO: 2595148 - RNA, 19 nt, Homo sapiens
  misc_RNA (1)...(19): siRNA sense strand
augauuuguuccagagcuu

SEQ ID NO: 2595149 - RNA, 19 nt, Homo sapiens
  misc_RNA (1)...(19): siRNA sense strand
cuuauggcucagaggagua

SEQ ID NO: 2595150 - RNA, 19 nt, Homo sapiens
  misc_RNA (1)...(19): siRNA sense strand
gacagagacuacauggaga

SEQ ID NO: 2595151 - RNA, 19 nt, Homo sapiens
  misc_RNA (1)...(19): siRNA sense strand
uggacuaccuguugccaga

SEQ ID NO: 2595152 - RNA, 19 nt, Homo sapiens
  misc_RNA (1)...(19): siRNA sense strand
acugacaugaagagaguga

SEQ ID NO: 2595153 - RNA, 19 nt, Homo sapiens
  misc_RNA (1)...(19): siRNA sense strand
augaagagagugaaggagu

SEQ ID NO: 2595154 - RNA, 19 nt, Homo sapiens
  misc_RNA (1)...(19): siRNA sense strand
uccgagaagaucugggcaa

SEQ ID NO: 2595155 - RNA, 19 nt, Homo sapiens
  misc_RNA (1)...(19): siRNA sense strand
gaggaguacuugcagcuga

SEQ ID NO: 2595156 - RNA, 19 nt, Homo sapiens
  misc_RNA (1)...(19): siRNA sense strand
gggcuuuaccagaugcuca

SEQ ID NO: 2595157 - RNA, 19 nt, Homo sapiens
  misc_RNA (1)...(19): siRNA sense strand
gggaagaggaacaggaaca

SEQ ID NO: 2595158 - RNA, 19 nt, Homo sapiens
  misc_RNA (1)...(19): siRNA sense strand
acaaagagaugaugcggaa

SEQ ID NO: 2595159 - RNA, 19 nt, Homo sapiens
  misc_RNA (1)...(19): siRNA sense strand
aggaagaaacagaagagaa

SEQ ID NO: 2595160 - RNA, 19 nt, Homo sapiens
  misc_RNA (1)...(19): siRNA sense strand
augaagaggaggaggaaca

SEQ ID NO: 2595161 - RNA, 19 nt, Homo sapiens
  misc_RNA (1)...(19): siRNA sense strand
gggagaaugcugaggacuu

SEQ ID NO: 2595162 - RNA, 19 nt, Homo sapiens
  misc_RNA (1)...(19): siRNA sense strand
uggcaagagcucugugaua

SEQ ID NO: 2595163 - RNA, 19 nt, Homo sapiens
  misc_RNA (1)...(19): siRNA sense strand
ccaaugacucagagggaca

SEQ ID NO: 2595164 - RNA, 19 nt, Homo sapiens
  misc_RNA (1)...(19): siRNA sense strand
gaaagaagcggaaggcaca

SEQ ID NO: 2595165 - RNA, 19 nt, Homo sapiens
  misc_RNA (1)...(19): siRNA sense strand
cagaagcagcccagaacaa

SEQ ID NO: 2595166 - RNA, 19 nt, Homo sapiens
  misc_RNA (1)...(19): siRNA sense strand
cacaaagggaagaggaaca

SEQ ID NO: 2595167 - RNA, 19 nt, Homo sapiens
  misc_RNA (1)...(19): siRNA sense strand
aagcaaagcaaguuaccaa

SEQ ID NO: 2595168 - RNA, 19 nt, Homo sapiens
  misc_RNA (1)...(19): siRNA sense strand
gggacugagugaaaagaua

SEQ ID NO: 2595169 - RNA, 19 nt, Homo sapiens
  misc_RNA (1)...(19): siRNA sense strand
uggaagaagauguagauga

SEQ ID NO: 2595170 - RNA, 19 nt, Homo sapiens
  misc_RNA (1)...(19): siRNA sense strand
ggaaagaagcggaaggcac

SEQ ID NO: 2595171 - RNA, 19 nt, Homo sapiens
  misc_RNA (1)...(19): siRNA sense strand
gcggaaggcacaaagggaa

SEQ ID NO: 2595172 - RNA, 19 nt, Homo sapiens
  misc_RNA (1)...(19): siRNA sense strand
gcuaaaaggaguuguucaa

SEQ ID NO: 2595173 - RNA, 19 nt, Homo sapiens
  misc_RNA (1)...(19): siRNA sense strand
aggaggaaaaugugggaaa

SEQ ID NO: 2595174 - RNA, 19 nt, Homo sapiens
  misc_RNA (1)...(19): siRNA sense strand
acucagagggacagaaaca

SEQ ID NO: 2595175 - RNA, 19 nt, Homo sapiens
  misc_RNA (1)...(19): siRNA sense strand
gcacaaacccagaucgagu

SEQ ID NO: 2595176 - RNA, 19 nt, Homo sapiens
  misc_RNA (1)...(19): siRNA sense strand
ggcacaaagggaagaggaa

SEQ ID NO: 2595177 - RNA, 19 nt, Homo sapiens
  misc_RNA (1)...(19): siRNA sense strand
gcccuaagucacagaggaa

SEQ ID NO: 2595178 - RNA, 19 nt, Homo sapiens
  misc_RNA (1)...(19): siRNA sense strand
aggaggaacaggagcaaca

SEQ ID NO: 2595179 - RNA, 19 nt, Homo sapiens
  misc_RNA (1)...(19): siRNA sense strand
caucauuaaggaagaaaca

SEQ ID NO: 2595180 - RNA, 19 nt, Homo sapiens
  misc_RNA (1)...(19): siRNA sense strand
ggaugagaagauugccaaa

SEQ ID NO: 2595181 - RNA, 19 nt, Homo sapiens
  misc_RNA (1)...(19): siRNA sense strand
acagaaacacaaacgcaaa

SEQ ID NO: 2595182 - RNA, 19 nt, Homo sapiens
  misc_RNA (1)...(19): siRNA sense strand
ugcaaaaccugaagaacaa

SEQ ID NO: 2595183 - RNA, 19 nt, Homo sapiens
  misc_RNA (1)...(19): siRNA sense strand
ggaggaagucacagaaacu

SEQ ID NO: 2595184 - RNA, 19 nt, Homo sapiens
  misc_RNA (1)...(19): siRNA sense strand
guuucuagacaaagccaaa

SEQ ID NO: 2595185 - RNA, 19 nt, Homo sapiens
  misc_RNA (1)...(19): siRNA sense strand
uccaagggacugagugaaa

SEQ ID NO: 2595186 - RNA, 19 nt, Homo sapiens
  misc_RNA (1)...(19): siRNA sense strand
ucacagaggaaacgaccaa

SEQ ID NO: 2595187 - RNA, 19 nt, Homo sapiens
  misc_RNA (1)...(19): siRNA sense strand
acuugcagacuguggguaa

SEQ ID NO: 2595188 - RNA, 19 nt, Homo sapiens
  misc_RNA (1)...(19): siRNA sense strand
aggaguuguucaaguagaa

SEQ ID NO: 2595189 - RNA, 19 nt, Homo sapiens
  misc_RNA (1)...(19): siRNA sense strand
ccagaauauaucagcaaaa

SEQ ID NO: 2595190 - RNA, 19 nt, Homo sapiens
  misc_RNA (1)...(19): siRNA sense strand
cuacaaggugauagauuca

SEQ ID NO: 2595191 - RNA, 19 nt, Homo sapiens
  misc_RNA (1)...(19): siRNA sense strand
cugaugaagaggaggagga

SEQ ID NO: 2595192 - RNA, 19 nt, Homo sapiens
  misc_RNA (1)...(19): siRNA sense strand
gcgagcaguacgacagcaa

SEQ ID NO: 2595193 - RNA, 19 nt, Homo sapiens
  misc_RNA (1)...(19): siRNA sense strand
caaaaggagcgcaggaaca

SEQ ID NO: 2595194 - RNA, 19 nt, Homo sapiens
  misc_RNA (1)...(19): siRNA sense strand
ccucauaacuugaaggugc

SEQ ID NO: 2595195 - RNA, 19 nt, Homo sapiens
  misc_RNA (1)...(19): siRNA sense strand
ucauuaaggaagaaacaga

SEQ ID NO: 2595196 - RNA, 19 nt, Homo sapiens
  misc_RNA (1)...(19): siRNA sense strand
ugacucagagggacagaaa

SEQ ID NO: 2595197 - RNA, 19 nt, Homo sapiens
  misc_RNA (1)...(19): siRNA sense strand
agagcuaugaccagggcaa

SEQ ID NO: 2595198 - RNA, 19 nt, Homo sapiens
  misc_RNA (1)...(19): siRNA sense strand
gcuagagauccaaugggua

SEQ ID NO: 2595199 - RNA, 19 nt, Homo sapiens
  misc_RNA (1)...(19): siRNA sense strand
cggacugggaaguuacuaa

SEQ ID NO: 2595200 - RNA, 19 nt, Homo sapiens
  misc_RNA (1)...(19): siRNA sense strand
uuauuaaagcacuggauga

SEQ ID NO: 2595201 - RNA, 19 nt, Homo sapiens
  misc_RNA (1)...(19): siRNA sense strand
ggacagaaacacaaacgca

SEQ ID NO: 2595202 - RNA, 19 nt, Homo sapiens
  misc_RNA (1)...(19): siRNA sense strand
uaauuaaaccccugcaaua

SEQ ID NO: 2595203 - RNA, 19 nt, Homo sapiens
  misc_RNA (1)...(19): siRNA sense strand
ggaaguugucccagaagca

SEQ ID NO: 2595204 - RNA, 19 nt, Homo sapiens
  misc_RNA (1)...(19): siRNA sense strand
cauuaaggaagaaacagaa

SEQ ID NO: 2595205 - RNA, 19 nt, Homo sapiens
  misc_RNA (1)...(19): siRNA sense strand
ggagcaacaaagagaugau

SEQ ID NO: 2595206 - RNA, 19 nt, Homo sapiens
  misc_RNA (1)...(19): siRNA sense strand
aaagagaugaugcggaaga

SEQ ID NO: 2595207 - RNA, 19 nt, Homo sapiens
  misc_RNA (1)...(19): siRNA sense strand
cagcaaaacauacaagauu

SEQ ID NO: 2595208 - RNA, 19 nt, Homo sapiens
  misc_RNA (1)...(19): siRNA sense strand
gacagaaacacaaacgcaa

SEQ ID NO: 2595209 - RNA, 19 nt, Homo sapiens
  misc_RNA (1)...(19): siRNA sense strand
caugaagcaaagcaaguua

SEQ ID NO: 2595210 - RNA, 19 nt, Homo sapiens
  misc_RNA (1)...(19): siRNA sense strand
aagcucaagaagagaucua

SEQ ID NO: 2595211 - RNA, 19 nt, Homo sapiens
  misc_RNA (1)...(19): siRNA sense strand
gaauauggggugagcucua

SEQ ID NO: 2595212 - RNA, 19 nt, Homo sapiens
  misc_RNA (1)...(19): siRNA sense strand
cugaggacuccgagacaga

SEQ ID NO: 2595213 - RNA, 19 nt, Homo sapiens
  misc_RNA (1)...(19): siRNA sense strand
aggaagaggaagaggaaga

SEQ ID NO: 2595214 - RNA, 19 nt, Homo sapiens
  misc_RNA (1)...(19): siRNA sense strand
augcagugguaguggauaa

SEQ ID NO: 2595215 - RNA, 19 nt, Homo sapiens
  misc_RNA (1)...(19): siRNA sense strand
cgagagaaguggagccuga

SEQ ID NO: 2595216 - RNA, 19 nt, Homo sapiens
  misc_RNA (1)...(19): siRNA sense strand
gcgauuugcaggugagauu

SEQ ID NO: 2595217 - RNA, 19 nt, Homo sapiens
  misc_RNA (1)...(19): siRNA sense strand
gcgaagaagaggaugacau

SEQ ID NO: 2595218 - RNA, 19 nt, Homo sapiens
  misc_RNA (1)...(19): siRNA sense strand
aggaggaggaagaggaaga

SEQ ID NO: 2595219 - RNA, 19 nt, Homo sapiens
  misc_RNA (1)...(19): siRNA sense strand
cggcauagucacagagaac

SEQ ID NO: 2595220 - RNA, 19 nt, Homo sapiens
  misc_RNA (1)...(19): siRNA sense strand
aauuuaagguggaagugaa

SEQ ID NO: 2595221 - RNA, 19 nt, Homo sapiens
  misc_RNA (1)...(19): siRNA sense strand
aggaagaggaagaggaaag

SEQ ID NO: 2595222 - RNA, 19 nt, Homo sapiens
  misc_RNA (1)...(19): siRNA sense strand
aggugagauuuguggauuu

SEQ ID NO: 2595223 - RNA, 19 nt, Homo sapiens
  misc_RNA (1)...(19): siRNA sense strand
gggaauuggauaaggccau

SEQ ID NO: 2595224 - RNA, 19 nt, Homo sapiens
  misc_RNA (1)...(19): siRNA sense strand
agaaauuaaacuacgggaa

SEQ ID NO: 2595225 - RNA, 19 nt, Homo sapiens
  misc_RNA (1)...(19): siRNA sense strand
ccucgaagacaguggcaga

SEQ ID NO: 2595226 - RNA, 19 nt, Homo sapiens
  misc_RNA (1)...(19): siRNA sense strand
cggaauucgcagacucaaa

SEQ ID NO: 2595227 - RNA, 19 nt, Homo sapiens
  misc_RNA (1)...(19): siRNA sense strand
cggauaagaaggugaucga

SEQ ID NO: 2595228 - RNA, 19 nt, Homo sapiens
  misc_RNA (1)...(19): siRNA sense strand
gcaacgaauuuaaggugga

SEQ ID NO: 2595229 - RNA, 19 nt, Homo sapiens
  misc_RNA (1)...(19): siRNA sense strand
gcauagucacagagaacga

SEQ ID NO: 2595230 - RNA, 19 nt, Homo sapiens
  misc_RNA (1)...(19): siRNA sense strand
aggugaacgacgugaauga

SEQ ID NO: 2595231 - RNA, 19 nt, Homo sapiens
  misc_RNA (1)...(19): siRNA sense strand
cauccauccaagauagaaa

SEQ ID NO: 2595232 - RNA, 19 nt, Homo sapiens
  misc_RNA (1)...(19): siRNA sense strand
aggucacgguggagggaga

SEQ ID NO: 2595233 - RNA, 19 nt, Homo sapiens
  misc_RNA (1)...(19): siRNA sense strand
gcagugaggaggaggagga

SEQ ID NO: 2595234 - RNA, 19 nt, Homo sapiens
  misc_RNA (1)...(19): siRNA sense strand
gggagaagaccucggggaa

SEQ ID NO: 2595235 - RNA, 19 nt, Homo sapiens
  misc_RNA (1)...(19): siRNA sense strand
gaacaucaauauaagcuga

SEQ ID NO: 2595236 - RNA, 19 nt, Homo sapiens
  misc_RNA (1)...(19): siRNA sense strand
gcacccaggcagugaggau

SEQ ID NO: 2595237 - RNA, 19 nt, Homo sapiens
  misc_RNA (1)...(19): siRNA sense strand
gcgaggacggcgaagaaga

SEQ ID NO: 2595238 - RNA, 19 nt, Homo sapiens
  misc_RNA (1)...(19): siRNA sense strand
cuguugacaaagaugguua

SEQ ID NO: 2595239 - RNA, 19 nt, Homo sapiens
  misc_RNA (1)...(19): siRNA sense strand
gagaagaaauacagaccug

SEQ ID NO: 2595240 - RNA, 19 nt, Homo sapiens
  misc_RNA (1)...(19): siRNA sense strand
gauaagaaggugaucgacu

SEQ ID NO: 2595241 - RNA, 19 nt, Homo sapiens
  misc_RNA (1)...(19): siRNA sense strand
ucauaaagcaacuguucau

SEQ ID NO: 2595242 - RNA, 19 nt, Homo sapiens
  misc_RNA (1)...(19): siRNA sense strand
ccacggucaucgaggggaa

SEQ ID NO: 2595243 - RNA, 19 nt, Homo sapiens
  misc_RNA (1)...(19): siRNA sense strand
ggaagcaguacgacagcau

SEQ ID NO: 2595244 - RNA, 19 nt, Homo sapiens
  misc_RNA (1)...(19): siRNA sense strand
ggaaaggcugcgaccgaga

SEQ ID NO: 2595245 - RNA, 19 nt, Homo sapiens
  misc_RNA (1)...(19): siRNA sense strand
aggcaaucuggcuggcuua

SEQ ID NO: 2595246 - RNA, 19 nt, Homo sapiens
  misc_RNA (1)...(19): siRNA sense strand
agguggaagugaauguuau

SEQ ID NO: 2595247 - RNA, 19 nt, Homo sapiens
  misc_RNA (1)...(19): siRNA sense strand
agggaaaggcugcgaccga

SEQ ID NO: 2595248 - RNA, 19 nt, Homo sapiens
  misc_RNA (1)...(19): siRNA sense strand
gagaggagcugaaccacga

SEQ ID NO: 2595249 - RNA, 19 nt, Homo sapiens
  misc_RNA (1)...(19): siRNA sense strand
acggcgaagaagaggauga

SEQ ID NO: 2595250 - RNA, 19 nt, Homo sapiens
  misc_RNA (1)...(19): siRNA sense strand
acgggaaagaacaucaaua

SEQ ID NO: 2595251 - RNA, 19 nt, Homo sapiens
  misc_RNA (1)...(19): siRNA sense strand
agggagaggagcugaacca

SEQ ID NO: 2595252 - RNA, 19 nt, Homo sapiens
  misc_RNA (1)...(19): siRNA sense strand
gggccauucggcaggaaga

SEQ ID NO: 2595253 - RNA, 19 nt, Homo sapiens
  misc_RNA (1)...(19): siRNA sense strand
aggagagccuggaggugga

SEQ ID NO: 2595254 - RNA, 19 nt, Homo sapiens
  misc_RNA (1)...(19): siRNA sense strand
aagcgaggacggcgaagaa

SEQ ID NO: 2595255 - RNA, 19 nt, Homo sapiens
  misc_RNA (1)...(19): siRNA sense strand
cgcccguguucaaggagaa

SEQ ID NO: 2595256 - RNA, 19 nt, Homo sapiens
  misc_RNA (1)...(19): siRNA sense strand
ggagacaugugacgagcca

SEQ ID NO: 2595257 - RNA, 19 nt, Homo sapiens
  misc_RNA (1)...(19): siRNA sense strand
aggaaagcgaggacggcga

SEQ ID NO: 2595258 - RNA, 19 nt, Homo sapiens
  misc_RNA (1)...(19): siRNA sense strand
ucuuugcaguucugauaaa

SEQ ID NO: 2595259 - RNA, 19 nt, Homo sapiens
  misc_RNA (1)...(19): siRNA sense strand
aagaggaagaggaaagcga

SEQ ID NO: 2595260 - RNA, 19 nt, Homo sapiens
  misc_RNA (1)...(19): siRNA sense strand
cauucgcuccaaagagaaa

SEQ ID NO: 2595261 - RNA, 19 nt, Homo sapiens
  misc_RNA (1)...(19): siRNA sense strand
ccaaagagaaacuggacug

SEQ ID NO: 2595262 - RNA, 19 nt, Homo sapiens
  misc_RNA (1)...(19): siRNA sense strand
aauuaaacuacgggaaaga

SEQ ID NO: 2595263 - RNA, 19 nt, Homo sapiens
  misc_RNA (1)...(19): siRNA sense strand
aggaagaaggagacaauuc

SEQ ID NO: 2595264 - RNA, 19 nt, Homo sapiens
  misc_RNA (1)...(19): siRNA sense strand
auuuaagguggaagugaau

SEQ ID NO: 2595265 - RNA, 19 nt, Homo sapiens
  misc_RNA (1)...(19): siRNA sense strand
gaggaagaggaagaggaaa

SEQ ID NO: 2595266 - RNA, 19 nt, Homo sapiens
  misc_RNA (1)...(19): siRNA sense strand
ggccuaugauugugggaag

SEQ ID NO: 2595267 - RNA, 19 nt, Homo sapiens
  misc_RNA (1)...(19): siRNA sense strand
aagcaguacgacagcauuu

SEQ ID NO: 2595268 - RNA, 19 nt, Homo sapiens
  misc_RNA (1)...(19): siRNA sense strand
uuggugaagaucagcauua

SEQ ID NO: 2595269 - RNA, 19 nt, Homo sapiens
  misc_RNA (1)...(19): siRNA sense strand
aggaggaggaggaagagga

SEQ ID NO: 2595270 - RNA, 19 nt, Homo sapiens
  misc_RNA (1)...(19): siRNA sense strand
aggaggaagaggaagagga

SEQ ID NO: 2595271 - RNA, 19 nt, Homo sapiens
  misc_RNA (1)...(19): siRNA sense strand
gccuaugacugugggaaga

SEQ ID NO: 2595272 - RNA, 19 nt, Homo sapiens
  misc_RNA (1)...(19): siRNA sense strand
guggaugagacaugggcca

SEQ ID NO: 2595273 - RNA, 19 nt, Homo sapiens
  misc_RNA (1)...(19): siRNA sense strand
cugacaaauaugagaauga

SEQ ID NO: 2595274 - RNA, 19 nt, Homo sapiens
  misc_RNA (1)...(19): siRNA sense strand
cgguggacgagaagaacua

SEQ ID NO: 2595275 - RNA, 19 nt, Homo sapiens
  misc_RNA (1)...(19): siRNA sense strand
acgugaaauuucuggcaca

SEQ ID NO: 2595276 - RNA, 19 nt, Homo sapiens
  misc_RNA (1)...(19): siRNA sense strand
acuggaagcuggaugcuga

SEQ ID NO: 2595277 - RNA, 19 nt, Homo sapiens
  misc_RNA (1)...(19): siRNA sense strand
gagaagggagacaugguga

SEQ ID NO: 2595278 - RNA, 19 nt, Homo sapiens
  misc_RNA (1)...(19): siRNA sense strand
uguucuacgaggagcauuu

SEQ ID NO: 2595279 - RNA, 19 nt, Homo sapiens
  misc_RNA (1)...(19): siRNA sense strand
gagaagaacuacacgaagg

SEQ ID NO: 2595280 - RNA, 19 nt, Homo sapiens
  misc_RNA (1)...(19): siRNA sense strand
gguacuucgacgugaggga

SEQ ID NO: 2595281 - RNA, 19 nt, Homo sapiens
  misc_RNA (1)...(19): siRNA sense strand
agcuggaugcugacaaaua

SEQ ID NO: 2595282 - RNA, 19 nt, Homo sapiens
  misc_RNA (1)...(19): siRNA sense strand
cgguguggacagcguacaa

SEQ ID NO: 2595283 - RNA, 19 nt, Homo sapiens
  misc_RNA (1)...(19): siRNA sense strand
ccucaaagaagaagcgagu

SEQ ID NO: 2595284 - RNA, 19 nt, Homo sapiens
  misc_RNA (1)...(19): siRNA sense strand
cggucgugugggagaauaa

SEQ ID NO: 2595285 - RNA, 19 nt, Homo sapiens
  misc_RNA (1)...(19): siRNA sense strand
gaggaaagcaagacgcuga

SEQ ID NO: 2595286 - RNA, 19 nt, Homo sapiens
  misc_RNA (1)...(19): siRNA sense strand
gagaagaagccaaagccau

SEQ ID NO: 2595287 - RNA, 19 nt, Homo sapiens
  misc_RNA (1)...(19): siRNA sense strand
gcuaccaggaggaaagcaa

SEQ ID NO: 2595288 - RNA, 19 nt, Homo sapiens
  misc_RNA (1)...(19): siRNA sense strand
ugguguuccuggugaagaa

SEQ ID NO: 2595289 - RNA, 19 nt, Homo sapiens
  misc_RNA (1)...(19): siRNA sense strand
uggacuucaugguggacaa

SEQ ID NO: 2595290 - RNA, 19 nt, Homo sapiens
  misc_RNA (1)...(19): siRNA sense strand
ucaacaacagcgagcgcaa

SEQ ID NO: 2595291 - RNA, 19 nt, Homo sapiens
  misc_RNA (1)...(19): siRNA sense strand
gcauuucgcugcugcgcua

SEQ ID NO: 2595292 - RNA, 19 nt, Homo sapiens
  misc_RNA (1)...(19): siRNA sense strand
cuacauuguccaaguguca

SEQ ID NO: 2595293 - RNA, 19 nt, Homo sapiens
  misc_RNA (1)...(19): siRNA sense strand
ucgagagagaugagcggua

SEQ ID NO: 2595294 - RNA, 19 nt, Homo sapiens
  misc_RNA (1)...(19): siRNA sense strand
ucgaggauauuuauggcua

SEQ ID NO: 2595295 - RNA, 19 nt, Homo sapiens
  misc_RNA (1)...(19): siRNA sense strand
uggaugacgaggaggagau

SEQ ID NO: 2595296 - RNA, 19 nt, Homo sapiens
  misc_RNA (1)...(19): siRNA sense strand
gcaugacuggcgaggagaa

SEQ ID NO: 2595297 - RNA, 19 nt, Homo sapiens
  misc_RNA (1)...(19): siRNA sense strand
cagacauaauccuggacga

SEQ ID NO: 2595298 - RNA, 19 nt, Homo sapiens
  misc_RNA (1)...(19): siRNA sense strand
ccaugcaggagaagaccua

SEQ ID NO: 2595299 - RNA, 19 nt, Homo sapiens
  misc_RNA (1)...(19): siRNA sense strand
ugaucagcgucaagaacuu

SEQ ID NO: 2595300 - RNA, 19 nt, Homo sapiens
  misc_RNA (1)...(19): siRNA sense strand
acgccgaggcucugaccaa

SEQ ID NO: 2595301 - RNA, 19 nt, Homo sapiens
  misc_RNA (1)...(19): siRNA sense strand
acguggagucuaaggugua

SEQ ID NO: 2595302 - RNA, 19 nt, Homo sapiens
  misc_RNA (1)...(19): siRNA sense strand
guuugagaccaucgagaga

SEQ ID NO: 2595303 - RNA, 19 nt, Homo sapiens
  misc_RNA (1)...(19): siRNA sense strand
ccgacgucaugaagagcau

SEQ ID NO: 2595304 - RNA, 19 nt, Homo sapiens
  misc_RNA (1)...(19): siRNA sense strand
gugacagcauccugaacau

SEQ ID NO: 2595305 - RNA, 19 nt, Homo sapiens
  misc_RNA (1)...(19): siRNA sense strand
ggaucgagcugcaggagug

SEQ ID NO: 2595306 - RNA, 19 nt, Homo sapiens
  misc_RNA (1)...(19): siRNA sense strand
gagcaggaacccagcacca

SEQ ID NO: 2595307 - RNA, 19 nt, Homo sapiens
  misc_RNA (1)...(19): siRNA sense strand
ugauugagguggugcccga

SEQ ID NO: 2595308 - RNA, 19 nt, Homo sapiens
  misc_RNA (1)...(19): siRNA sense strand
uuuacgagaaggagcagaa

SEQ ID NO: 2595309 - RNA, 19 nt, Homo sapiens
  misc_RNA (1)...(19): siRNA sense strand
caguggaugacgaggagga

SEQ ID NO: 2595310 - RNA, 19 nt, Homo sapiens
  misc_RNA (1)...(19): siRNA sense strand
uugagaccaucgagagaga

SEQ ID NO: 2595311 - RNA, 19 nt, Homo sapiens
  misc_RNA (1)...(19): siRNA sense strand
acgacuugcuggagacgga

SEQ ID NO: 2595312 - RNA, 19 nt, Homo sapiens
  misc_RNA (1)...(19): siRNA sense strand
aaagaagaagcgaguggau

SEQ ID NO: 2595313 - RNA, 19 nt, Homo sapiens
  misc_RNA (1)...(19): siRNA sense strand
agucggugccgcaggauga

SEQ ID NO: 2595314 - RNA, 19 nt, Homo sapiens
  misc_RNA (1)...(19): siRNA sense strand
cauccaagaagaaagcaga

SEQ ID NO: 2595315 - RNA, 19 nt, Homo sapiens
  misc_RNA (1)...(19): siRNA sense strand
agucuaagguguaugcugu

SEQ ID NO: 2595316 - RNA, 19 nt, Homo sapiens
  misc_RNA (1)...(19): siRNA sense strand
gggcgaagccugaggaaaa

SEQ ID NO: 2595317 - RNA, 19 nt, Homo sapiens
  misc_RNA (1)...(19): siRNA sense strand
gagagaggcucaaggaaga

SEQ ID NO: 2595318 - RNA, 19 nt, Homo sapiens
  misc_RNA (1)...(19): siRNA sense strand
cuacuguggaggagauaaa

SEQ ID NO: 2595319 - RNA, 19 nt, Homo sapiens
  misc_RNA (1)...(19): siRNA sense strand
ugaagaagcacgaagccaa

SEQ ID NO: 2595320 - RNA, 19 nt, Homo sapiens
  misc_RNA (1)...(19): siRNA sense strand
aaggaugacaggaggagaa

SEQ ID NO: 2595321 - RNA, 19 nt, Homo sapiens
  misc_RNA (1)...(19): siRNA sense strand
aggagaaagucaaggccca

SEQ ID NO: 2595322 - RNA, 19 nt, Homo sapiens
  misc_RNA (1)...(19): siRNA sense strand
auggaaaagugguaugaaa

SEQ ID NO: 2595323 - RNA, 19 nt, Homo sapiens
  misc_RNA (1)...(19): siRNA sense strand
ugagaaacgucaaggucca

SEQ ID NO: 2595324 - RNA, 19 nt, Homo sapiens
  misc_RNA (1)...(19): siRNA sense strand
agaagaggaacuugccaaa

SEQ ID NO: 2595325 - RNA, 19 nt, Homo sapiens
  misc_RNA (1)...(19): siRNA sense strand
cauuaaagcaggagccaac

SEQ ID NO: 2595326 - RNA, 19 nt, Homo sapiens
  misc_RNA (1)...(19): siRNA sense strand
gacaagacaaggaugggaa

SEQ ID NO: 2595327 - RNA, 19 nt, Homo sapiens
  misc_RNA (1)...(19): siRNA sense strand
gcaaaggaugacaggagga

SEQ ID NO: 2595328 - RNA, 19 nt, Homo sapiens
  misc_RNA (1)...(19): siRNA sense strand
gagaaucaguuggaggcua

SEQ ID NO: 2595329 - RNA, 19 nt, Homo sapiens
  misc_RNA (1)...(19): siRNA sense strand
acuagggugcagaaggaaa

SEQ ID NO: 2595330 - RNA, 19 nt, Homo sapiens
  misc_RNA (1)...(19): siRNA sense strand
gagcaaaggaugacaggag

SEQ ID NO: 2595331 - RNA, 19 nt, Homo sapiens
  misc_RNA (1)...(19): siRNA sense strand
agaauaagacccagcacca

SEQ ID NO: 2595332 - RNA, 19 nt, Homo sapiens
  misc_RNA (1)...(19): siRNA sense strand
acucagacacagagaagca

SEQ ID NO: 2595333 - RNA, 19 nt, Homo sapiens
  misc_RNA (1)...(19): siRNA sense strand
gagccaacgugcuugccaa

SEQ ID NO: 2595334 - RNA, 19 nt, Homo sapiens
  misc_RNA (1)...(19): siRNA sense strand
cugcagagcuaaauccaca

SEQ ID NO: 2595335 - RNA, 19 nt, Homo sapiens
  misc_RNA (1)...(19): siRNA sense strand
gggagaaacgacagauauc

SEQ ID NO: 2595336 - RNA, 19 nt, Homo sapiens
  misc_RNA (1)...(19): siRNA sense strand
aggcuacauugaaggaaca

SEQ ID NO: 2595337 - RNA, 19 nt, Homo sapiens
  misc_RNA (1)...(19): siRNA sense strand
cagaaaagaagaagccaga

SEQ ID NO: 2595338 - RNA, 19 nt, Homo sapiens
  misc_RNA (1)...(19): siRNA sense strand
aaggaagauugaagaagca

SEQ ID NO: 2595339 - RNA, 19 nt, Homo sapiens
  misc_RNA (1)...(19): siRNA sense strand
ggagaaagucaaggcccaa

SEQ ID NO: 2595340 - RNA, 19 nt, Homo sapiens
  misc_RNA (1)...(19): siRNA sense strand
agaagaaccugcaugcuca

SEQ ID NO: 2595341 - RNA, 19 nt, Homo sapiens
  misc_RNA (1)...(19): siRNA sense strand
gggcagugucucagcagga

SEQ ID NO: 2595342 - RNA, 19 nt, Homo sapiens
  misc_RNA (1)...(19): siRNA sense strand
cguacaaaggccaaacaga

SEQ ID NO: 2595343 - RNA, 19 nt, Homo sapiens
  misc_RNA (1)...(19): siRNA sense strand
aagcaagggcagugucuca

SEQ ID NO: 2595344 - RNA, 19 nt, Homo sapiens
  misc_RNA (1)...(19): siRNA sense strand
uggggcagauggagaauaa

SEQ ID NO: 2595345 - RNA, 19 nt, Homo sapiens
  misc_RNA (1)...(19): siRNA sense strand
gguuaggcccaaagagaag

SEQ ID NO: 2595346 - RNA, 19 nt, Homo sapiens
  misc_RNA (1)...(19): siRNA sense strand
uagaagaggaacuugccaa

SEQ ID NO: 2595347 - RNA, 19 nt, Homo sapiens
  misc_RNA (1)...(19): siRNA sense strand
gaagauugaagaagcacga

SEQ ID NO: 2595348 - RNA, 19 nt, Homo sapiens
  misc_RNA (1)...(19): siRNA sense strand
cuacauugaaggaacacau

SEQ ID NO: 2595349 - RNA, 19 nt, Homo sapiens
  misc_RNA (1)...(19): siRNA sense strand
acuggaagccggagcagau

SEQ ID NO: 2595350 - RNA, 19 nt, Homo sapiens
  misc_RNA (1)...(19): siRNA sense strand
ggcaaggaugggaaaguga

SEQ ID NO: 2595351 - RNA, 19 nt, Homo sapiens
  misc_RNA (1)...(19): siRNA sense strand
uaaucaacaagcuggagaa

SEQ ID NO: 2595352 - RNA, 19 nt, Homo sapiens
  misc_RNA (1)...(19): siRNA sense strand
ccuugguggaugaauuaaa

SEQ ID NO: 2595353 - RNA, 19 nt, Homo sapiens
  misc_RNA (1)...(19): siRNA sense strand
ugguuaggcccaaagagaa

SEQ ID NO: 2595354 - RNA, 19 nt, Homo sapiens
  misc_RNA (1)...(19): siRNA sense strand
aaacuaagaagucugggaa

SEQ ID NO: 2595355 - RNA, 19 nt, Homo sapiens
  misc_RNA (1)...(19): siRNA sense strand
gagagagaggcucaaggaa

SEQ ID NO: 2595356 - RNA, 19 nt, Homo sapiens
  misc_RNA (1)...(19): siRNA sense strand
agaaugugguucagcucau

SEQ ID NO: 2595357 - RNA, 19 nt, Homo sapiens
  misc_RNA (1)...(19): siRNA sense strand
aggcuacuguggaggagau

SEQ ID NO: 2595358 - RNA, 19 nt, Homo sapiens
  misc_RNA (1)...(19): siRNA sense strand
gggugcagaaggaaaauua

SEQ ID NO: 2595359 - RNA, 19 nt, Homo sapiens
  misc_RNA (1)...(19): siRNA sense strand
caagagaugagguggccca

SEQ ID NO: 2595360 - RNA, 19 nt, Homo sapiens
  misc_RNA (1)...(19): siRNA sense strand
ggcccaaggugucagcauu

SEQ ID NO: 2595361 - RNA, 19 nt, Homo sapiens
  misc_RNA (1)...(19): siRNA sense strand
gcccaaggugucagcauuu

SEQ ID NO: 2595362 - RNA, 19 nt, Homo sapiens
  misc_RNA (1)...(19): siRNA sense strand
gcucauaaucacccuaaaa

SEQ ID NO: 2595363 - RNA, 19 nt, Homo sapiens
  misc_RNA (1)...(19): siRNA sense strand
gcaugaagcauccuggcau

SEQ ID NO: 2595364 - RNA, 19 nt, Homo sapiens
  misc_RNA (1)...(19): siRNA sense strand
aaacaaacagagagggcaa

SEQ ID NO: 2595365 - RNA, 19 nt, Homo sapiens
  misc_RNA (1)...(19): siRNA sense strand
cgauauucaccaagcgcuu

SEQ ID NO: 2595366 - RNA, 19 nt, Homo sapiens
  misc_RNA (1)...(19): siRNA sense strand
uggcaauaccaguagaagu

SEQ ID NO: 2595367 - RNA, 19 nt, Homo sapiens
  misc_RNA (1)...(19): siRNA sense strand
cuucaugacggcuggccaa

SEQ ID NO: 2595368 - RNA, 19 nt, Homo sapiens
  misc_RNA (1)...(19): siRNA sense strand
aagcaguacacgaaacaga

SEQ ID NO: 2595369 - RNA, 19 nt, Homo sapiens
  misc_RNA (1)...(19): siRNA sense strand
augugaaagaagcaaacaa

SEQ ID NO: 2595370 - RNA, 19 nt, Homo sapiens
  misc_RNA (1)...(19): siRNA sense strand
gcagacugguguugggaug

SEQ ID NO: 2595371 - RNA, 19 nt, Homo sapiens
  misc_RNA (1)...(19): siRNA sense strand
cgguggaagcccugcauga

SEQ ID NO: 2595372 - RNA, 19 nt, Homo sapiens
  misc_RNA (1)...(19): siRNA sense strand
aggaaaugauggaggaaaa

SEQ ID NO: 2595373 - RNA, 19 nt, Homo sapiens
  misc_RNA (1)...(19): siRNA sense strand
cuuuaagagaugaggguaa

SEQ ID NO: 2595374 - RNA, 19 nt, Homo sapiens
  misc_RNA (1)...(19): siRNA sense strand
aaagagaagcuaaggaaaa

SEQ ID NO: 2595375 - RNA, 19 nt, Homo sapiens
  misc_RNA (1)...(19): siRNA sense strand
caguaaagaaguaagugaa

SEQ ID NO: 2595376 - RNA, 19 nt, Homo sapiens
  misc_RNA (1)...(19): siRNA sense strand
aggaacgagacaaggguaa

SEQ ID NO: 2595377 - RNA, 19 nt, Homo sapiens
  misc_RNA (1)...(19): siRNA sense strand
cuaagaaagaacacguaaa

SEQ ID NO: 2595378 - RNA, 19 nt, Homo sapiens
  misc_RNA (1)...(19): siRNA sense strand
gagcaaauauuaaagagca

SEQ ID NO: 2595379 - RNA, 19 nt, Homo sapiens
  misc_RNA (1)...(19): siRNA sense strand
uggagaaauaugaaagaga

SEQ ID NO: 2595380 - RNA, 19 nt, Homo sapiens
  misc_RNA (1)...(19): siRNA sense strand
aggaaaggagaguuugaaa

SEQ ID NO: 2595381 - RNA, 19 nt, Homo sapiens
  misc_RNA (1)...(19): siRNA sense strand
auuggagcaucgagagaua

SEQ ID NO: 2595382 - RNA, 19 nt, Homo sapiens
  misc_RNA (1)...(19): siRNA sense strand
acugaagggaauugaagaa

SEQ ID NO: 2595383 - RNA, 19 nt, Homo sapiens
  misc_RNA (1)...(19): siRNA sense strand
auuaaagagcagucagauu

SEQ ID NO: 2595384 - RNA, 19 nt, Homo sapiens
  misc_RNA (1)...(19): siRNA sense strand
uauugaggaaguugagaua

SEQ ID NO: 2595385 - RNA, 19 nt, Homo sapiens
  misc_RNA (1)...(19): siRNA sense strand
aagaaaguggccaggaaau

SEQ ID NO: 2595386 - RNA, 19 nt, Homo sapiens
  misc_RNA (1)...(19): siRNA sense strand
caucgagagauaugaagaa

SEQ ID NO: 2595387 - RNA, 19 nt, Homo sapiens
  misc_RNA (1)...(19): siRNA sense strand
gaauugaagaagaagagau

SEQ ID NO: 2595388 - RNA, 19 nt, Homo sapiens
  misc_RNA (1)...(19): siRNA sense strand
caggaaaugauggaggaaa

SEQ ID NO: 2595389 - RNA, 19 nt, Homo sapiens
  misc_RNA (1)...(19): siRNA sense strand
aggacugaccggagcaaau

SEQ ID NO: 2595390 - RNA, 19 nt, Homo sapiens
  misc_RNA (1)...(19): siRNA sense strand
uggaaauggcccuagaaga

SEQ ID NO: 2595391 - RNA, 19 nt, Homo sapiens
  misc_RNA (1)...(19): siRNA sense strand
cguuaaucuccuugguaga

SEQ ID NO: 2595392 - RNA, 19 nt, Homo sapiens
  misc_RNA (1)...(19): siRNA sense strand
gaccauugcaauuggaaaa

SEQ ID NO: 2595393 - RNA, 19 nt, Homo sapiens
  misc_RNA (1)...(19): siRNA sense strand
gagaaauaugaaagagaag

SEQ ID NO: 2595394 - RNA, 19 nt, Homo sapiens
  misc_RNA (1)...(19): siRNA sense strand
guaaauuggagcaucgaga

SEQ ID NO: 2595395 - RNA, 19 nt, Homo sapiens
  misc_RNA (1)...(19): siRNA sense strand
acaguaaagaaguaaguga

SEQ ID NO: 2595396 - RNA, 19 nt, Homo sapiens
  misc_RNA (1)...(19): siRNA sense strand
uggacagacaagagaacau

SEQ ID NO: 2595397 - RNA, 19 nt, Homo sapiens
  misc_RNA (1)...(19): siRNA sense strand
acaaaagaacacuggagaa

SEQ ID NO: 2595398 - RNA, 19 nt, Homo sapiens
  misc_RNA (1)...(19): siRNA sense strand
agauacaaaucaggaggaa

SEQ ID NO: 2595399 - RNA, 19 nt, Homo sapiens
  misc_RNA (1)...(19): siRNA sense strand
guacaaagauaugggcacu

SEQ ID NO: 2595400 - RNA, 19 nt, Homo sapiens
  misc_RNA (1)...(19): siRNA sense strand
ccaggaaaggagaguuuga

SEQ ID NO: 2595401 - RNA, 19 nt, Homo sapiens
  misc_RNA (1)...(19): siRNA sense strand
uagugauuauugagcacaa

SEQ ID NO: 2595402 - RNA, 19 nt, Homo sapiens
  misc_RNA (1)...(19): siRNA sense strand
ccaaacuucaacagaucaa

SEQ ID NO: 2595403 - RNA, 19 nt, Homo sapiens
  misc_RNA (1)...(19): siRNA sense strand
agaccauugcaauuggaaa

SEQ ID NO: 2595404 - RNA, 19 nt, Homo sapiens
  misc_RNA (1)...(19): siRNA sense strand
caaaucaggaggaacgaga

SEQ ID NO: 2595405 - RNA, 19 nt, Homo sapiens
  misc_RNA (1)...(19): siRNA sense strand
ugccaggaaaggagaguuu

SEQ ID NO: 2595406 - RNA, 19 nt, Homo sapiens
  misc_RNA (1)...(19): siRNA sense strand
gaaauaugaaagagaagcu

SEQ ID NO: 2595407 - RNA, 19 nt, Homo sapiens
  misc_RNA (1)...(19): siRNA sense strand
gcaucgagagauaugaaga

SEQ ID NO: 2595408 - RNA, 19 nt, Homo sapiens
  misc_RNA (1)...(19): siRNA sense strand
agggaauugaagaagaaga

SEQ ID NO: 2595409 - RNA, 19 nt, Homo sapiens
  misc_RNA (1)...(19): siRNA sense strand
cguuugauguucagauagu

SEQ ID NO: 2595410 - RNA, 19 nt, Homo sapiens
  misc_RNA (1)...(19): siRNA sense strand
uugaggaaguugagauaac

SEQ ID NO: 2595411 - RNA, 19 nt, Homo sapiens
  misc_RNA (1)...(19): siRNA sense strand
gacuggaaugguugacaaa

SEQ ID NO: 2595412 - RNA, 19 nt, Homo sapiens
  misc_RNA (1)...(19): siRNA sense strand
cggcagggguaaaacauuu

SEQ ID NO: 2595413 - RNA, 19 nt, Homo sapiens
  misc_RNA (1)...(19): siRNA sense strand
uuucagaaccuguuguaga

SEQ ID NO: 2595414 - RNA, 19 nt, Homo sapiens
  misc_RNA (1)...(19): siRNA sense strand
aaccaucggaggacagaua

SEQ ID NO: 2595415 - RNA, 19 nt, Homo sapiens
  misc_RNA (1)...(19): siRNA sense strand
acacuggagaaauaugaaa

SEQ ID NO: 2595416 - RNA, 19 nt, Homo sapiens
  misc_RNA (1)...(19): siRNA sense strand
gccaggaaaugauggagga

SEQ ID NO: 2595417 - RNA, 19 nt, Homo sapiens
  misc_RNA (1)...(19): siRNA sense strand
gggaauugaagaagaagag

SEQ ID NO: 2595418 - RNA, 19 nt, Homo sapiens
  misc_RNA (1)...(19): siRNA sense strand
guauugaggaaguugagau

SEQ ID NO: 2595419 - RNA, 19 nt, Homo sapiens
  misc_RNA (1)...(19): siRNA sense strand
cuucgugaaacaagaucaa

SEQ ID NO: 2595420 - RNA, 19 nt, Homo sapiens
  misc_RNA (1)...(19): siRNA sense strand
gaggguaagaccauugcaa

SEQ ID NO: 2595421 - RNA, 19 nt, Homo sapiens
  misc_RNA (1)...(19): siRNA sense strand
caauugaagaacagggaga

SEQ ID NO: 2595422 - RNA, 19 nt, Homo sapiens
  misc_RNA (1)...(19): siRNA sense strand
uuugguggccagugagaaa

SEQ ID NO: 2595423 - RNA, 19 nt, Homo sapiens
  misc_RNA (1)...(19): siRNA sense strand
ugagaaacaaagaagggau

SEQ ID NO: 2595424 - RNA, 19 nt, Homo sapiens
  misc_RNA (1)...(19): siRNA sense strand
agauguuaaugaagaggca

SEQ ID NO: 2595425 - RNA, 19 nt, Homo sapiens
  misc_RNA (1)...(19): siRNA sense strand
uuuuagaagaccaaggaaa

SEQ ID NO: 2595426 - RNA, 19 nt, Homo sapiens
  misc_RNA (1)...(19): siRNA sense strand
ggauggaggcagaggacca

SEQ ID NO: 2595427 - RNA, 19 nt, Homo sapiens
  misc_RNA (1)...(19): siRNA sense strand
gcaucgaggaccuggagga

SEQ ID NO: 2595428 - RNA, 19 nt, Homo sapiens
  misc_RNA (1)...(19): siRNA sense strand
ggagaaacuucgaggagcc

SEQ ID NO: 2595429 - RNA, 19 nt, Homo sapiens
  misc_RNA (1)...(19): siRNA sense strand
gcucugaugaacagcguca

SEQ ID NO: 2595430 - RNA, 19 nt, Homo sapiens
  misc_RNA (1)...(19): siRNA sense strand
ggcaauaagaugugagaaa

SEQ ID NO: 2595431 - RNA, 19 nt, Homo sapiens
  misc_RNA (1)...(19): siRNA sense strand
aggcauacguuguggaaga

SEQ ID NO: 2595432 - RNA, 19 nt, Homo sapiens
  misc_RNA (1)...(19): siRNA sense strand
auucagacauacagagaua

SEQ ID NO: 2595433 - RNA, 19 nt, Homo sapiens
  misc_RNA (1)...(19): siRNA sense strand
ccaaauaacuuuagagcuc

SEQ ID NO: 2595434 - RNA, 19 nt, Homo sapiens
  misc_RNA (1)...(19): siRNA sense strand
ccuaaagauuucaguggaa

SEQ ID NO: 2595435 - RNA, 19 nt, Homo sapiens
  misc_RNA (1)...(19): siRNA sense strand
ccaguagggagaagggaaa

SEQ ID NO: 2595436 - RNA, 19 nt, Homo sapiens
  misc_RNA (1)...(19): siRNA sense strand
caauaagaugugagaaaga

SEQ ID NO: 2595437 - RNA, 19 nt, Homo sapiens
  misc_RNA (1)...(19): siRNA sense strand
ugaaaugauuggagcugaa

SEQ ID NO: 2595438 - RNA, 19 nt, Homo sapiens
  misc_RNA (1)...(19): siRNA sense strand
cuaucauacugcaaagaaa

SEQ ID NO: 2595439 - RNA, 19 nt, Homo sapiens
  misc_RNA (1)...(19): siRNA sense strand
cuuaauuaauggcgaagaa

SEQ ID NO: 2595440 - RNA, 19 nt, Homo sapiens
  misc_RNA (1)...(19): siRNA sense strand
ucauguaagucuugaucaa

SEQ ID NO: 2595441 - RNA, 19 nt, Homo sapiens
  misc_RNA (1)...(19): siRNA sense strand
gauuacagcaggagauuau

SEQ ID NO: 2595442 - RNA, 19 nt, Homo sapiens
  misc_RNA (1)...(19): siRNA sense strand
caacacaaaagaagagaaa

SEQ ID NO: 2595443 - RNA, 19 nt, Homo sapiens
  misc_RNA (1)...(19): siRNA sense strand
cagaggaugcugugagauu

SEQ ID NO: 2595444 - RNA, 19 nt, Homo sapiens
  misc_RNA (1)...(19): siRNA sense strand
ccauaaucacagaagaaau

SEQ ID NO: 2595445 - RNA, 19 nt, Homo sapiens
  misc_RNA (1)...(19): siRNA sense strand
cuuuggaaaugaacagaua

SEQ ID NO: 2595446 - RNA, 19 nt, Homo sapiens
  misc_RNA (1)...(19): siRNA sense strand
aagcaggcguuaaggaauu

SEQ ID NO: 2595447 - RNA, 19 nt, Homo sapiens
  misc_RNA (1)...(19): siRNA sense strand
caugaaacaaagaaaggaa

SEQ ID NO: 2595448 - RNA, 19 nt, Homo sapiens
  misc_RNA (1)...(19): siRNA sense strand
uguaagugcaggagaugaa

SEQ ID NO: 2595449 - RNA, 19 nt, Homo sapiens
  misc_RNA (1)...(19): siRNA sense strand
gguuaacaaaggaguaauu

SEQ ID NO: 2595450 - RNA, 19 nt, Homo sapiens
  misc_RNA (1)...(19): siRNA sense strand
gggaagcaggauuuagaaa

SEQ ID NO: 2595451 - RNA, 19 nt, Homo sapiens
  misc_RNA (1)...(19): siRNA sense strand
ugauguaagugcaggagau

SEQ ID NO: 2595452 - RNA, 19 nt, Homo sapiens
  misc_RNA (1)...(19): siRNA sense strand
guucuuaauuaauggcgaa

SEQ ID NO: 2595453 - RNA, 19 nt, Homo sapiens
  misc_RNA (1)...(19): siRNA sense strand
gagaaaacaauuaggcaau

SEQ ID NO: 2595454 - RNA, 19 nt, Homo sapiens
  misc_RNA (1)...(19): siRNA sense strand
agaauaugguguuggcuga

SEQ ID NO: 2595455 - RNA, 19 nt, Homo sapiens
  misc_RNA (1)...(19): siRNA sense strand
guggaaaggauaaugaaga

SEQ ID NO: 2595456 - RNA, 19 nt, Homo sapiens
  misc_RNA (1)...(19): siRNA sense strand
ccgaaaagcauauguagaa

SEQ ID NO: 2595457 - RNA, 19 nt, Homo sapiens
  misc_RNA (1)...(19): siRNA sense strand
ugaagauagcaguaagcaa

SEQ ID NO: 2595458 - RNA, 19 nt, Homo sapiens
  misc_RNA (1)...(19): siRNA sense strand
aauuaauggcgaagaauca

SEQ ID NO: 2595459 - RNA, 19 nt, Homo sapiens
  misc_RNA (1)...(19): siRNA sense strand
aguaucaaguaguagcaaa

SEQ ID NO: 2595460 - RNA, 19 nt, Homo sapiens
  misc_RNA (1)...(19): siRNA sense strand
aagcugaaccuguggaaca

SEQ ID NO: 2595461 - RNA, 19 nt, Homo sapiens
  misc_RNA (1)...(19): siRNA sense strand
gauuagauaacgaagucaa

SEQ ID NO: 2595462 - RNA, 19 nt, Homo sapiens
  misc_RNA (1)...(19): siRNA sense strand
ggauacagcaauucagaca

SEQ ID NO: 2595463 - RNA, 19 nt, Homo sapiens
  misc_RNA (1)...(19): siRNA sense strand
uaguaaagcagggcagaaa

SEQ ID NO: 2595464 - RNA, 19 nt, Homo sapiens
  misc_RNA (1)...(19): siRNA sense strand
ccuuggaacuccuagggua

SEQ ID NO: 2595465 - RNA, 19 nt, Homo sapiens
  misc_RNA (1)...(19): siRNA sense strand
caucguuacaugaaacaaa

SEQ ID NO: 2595466 - RNA, 19 nt, Homo sapiens
  misc_RNA (1)...(19): siRNA sense strand
gcgagaacuugaggaacaa

SEQ ID NO: 2595467 - RNA, 19 nt, Homo sapiens
  misc_RNA (1)...(19): siRNA sense strand
uugaacaguuacucagaua

SEQ ID NO: 2595468 - RNA, 19 nt, Homo sapiens
  misc_RNA (1)...(19): siRNA sense strand
ugguaauacugcuguucua

SEQ ID NO: 2595469 - RNA, 19 nt, Homo sapiens
  misc_RNA (1)...(19): siRNA sense strand
gguuugagucuuacagaga

SEQ ID NO: 2595470 - RNA, 19 nt, Homo sapiens
  misc_RNA (1)...(19): siRNA sense strand
uuugagucuuacagagaaa

SEQ ID NO: 2595471 - RNA, 19 nt, Homo sapiens
  misc_RNA (1)...(19): siRNA sense strand
acacaaaagaagagaaaac

SEQ ID NO: 2595472 - RNA, 19 nt, Homo sapiens
  misc_RNA (1)...(19): siRNA sense strand
aaacaggagccaccagaaa

SEQ ID NO: 2595473 - RNA, 19 nt, Homo sapiens
  misc_RNA (1)...(19): siRNA sense strand
gauaauaaguucagcaagc

SEQ ID NO: 2595474 - RNA, 19 nt, Homo sapiens
  misc_RNA (1)...(19): siRNA sense strand
acaacuaguuacaagugaa

SEQ ID NO: 2595475 - RNA, 19 nt, Homo sapiens
  misc_RNA (1)...(19): siRNA sense strand
uugcagaggaucacauuaa

SEQ ID NO: 2595476 - RNA, 19 nt, Homo sapiens
  misc_RNA (1)...(19): siRNA sense strand
ucccauaaucacagaagaa

SEQ ID NO: 2595477 - RNA, 19 nt, Homo sapiens
  misc_RNA (1)...(19): siRNA sense strand
agagaaaacaauuaggcaa

SEQ ID NO: 2595478 - RNA, 19 nt, Homo sapiens
  misc_RNA (1)...(19): siRNA sense strand
augaaaagucccaugguua

SEQ ID NO: 2595479 - RNA, 19 nt, Homo sapiens
  misc_RNA (1)...(19): siRNA sense strand
gcaaguuuacaaaggaaaa

SEQ ID NO: 2595480 - RNA, 19 nt, Homo sapiens
  misc_RNA (1)...(19): siRNA sense strand
acuugcaguuguagaagaa

SEQ ID NO: 2595481 - RNA, 19 nt, Homo sapiens
  misc_RNA (1)...(19): siRNA sense strand
gugagguagauuugaauau

SEQ ID NO: 2595482 - RNA, 19 nt, Homo sapiens
  misc_RNA (1)...(19): siRNA sense strand
caaagauggcuuaccaaau

SEQ ID NO: 2595483 - RNA, 19 nt, Homo sapiens
  misc_RNA (1)...(19): siRNA sense strand
caguaaaguuccagaaaag

SEQ ID NO: 2595484 - RNA, 19 nt, Homo sapiens
  misc_RNA (1)...(19): siRNA sense strand
acucuuagacagcuggaua

SEQ ID NO: 2595485 - RNA, 19 nt, Homo sapiens
  misc_RNA (1)...(19): siRNA sense strand
cagauaauaaguucagcaa

SEQ ID NO: 2595486 - RNA, 19 nt, Homo sapiens
  misc_RNA (1)...(19): siRNA sense strand
aaucagugcaggagcuaau

SEQ ID NO: 2595487 - RNA, 19 nt, Homo sapiens
  misc_RNA (1)...(19): siRNA sense strand
agaagguguccaugaaauu

SEQ ID NO: 2595488 - RNA, 19 nt, Homo sapiens
  misc_RNA (1)...(19): siRNA sense strand
ccacauauagagaaaacaa

SEQ ID NO: 2595489 - RNA, 19 nt, Homo sapiens
  misc_RNA (1)...(19): siRNA sense strand
ucugagaauuguagugcuu

SEQ ID NO: 2595490 - RNA, 19 nt, Homo sapiens
  misc_RNA (1)...(19): siRNA sense strand
aagaagguguccaugaaau

SEQ ID NO: 2595491 - RNA, 19 nt, Homo sapiens
  misc_RNA (1)...(19): siRNA sense strand
cguuaaggaauuccacaua

SEQ ID NO: 2595492 - RNA, 19 nt, Homo sapiens
  misc_RNA (1)...(19): siRNA sense strand
caauuaaacgaucagcuaa

SEQ ID NO: 2595493 - RNA, 19 nt, Homo sapiens
  misc_RNA (1)...(19): siRNA sense strand
agaaccaauuacaguggaa

SEQ ID NO: 2595494 - RNA, 19 nt, Homo sapiens
  misc_RNA (1)...(19): siRNA sense strand
gccaguagggagaagggaa

SEQ ID NO: 2595495 - RNA, 19 nt, Homo sapiens
  misc_RNA (1)...(19): siRNA sense strand
gauuaugaccuuaacauca

SEQ ID NO: 2595496 - RNA, 19 nt, Homo sapiens
  misc_RNA (1)...(19): siRNA sense strand
ggcaauaagaugugagaaa

SEQ ID NO: 2595497 - RNA, 19 nt, Homo sapiens
  misc_RNA (1)...(19): siRNA sense strand
aggcauacguuguggaaga

SEQ ID NO: 2595498 - RNA, 19 nt, Homo sapiens
  misc_RNA (1)...(19): siRNA sense strand
auucagacauacagagaua

SEQ ID NO: 2595499 - RNA, 19 nt, Homo sapiens
  misc_RNA (1)...(19): siRNA sense strand
ccaaauaacuuuagagcuc

SEQ ID NO: 2595500 - RNA, 19 nt, Homo sapiens
  misc_RNA (1)...(19): siRNA sense strand
ccuaaagauuucaguggaa

SEQ ID NO: 2595501 - RNA, 19 nt, Homo sapiens
  misc_RNA (1)...(19): siRNA sense strand
ccaguagggagaagggaaa

SEQ ID NO: 2595502 - RNA, 19 nt, Homo sapiens
  misc_RNA (1)...(19): siRNA sense strand
caauaagaugugagaaaga

SEQ ID NO: 2595503 - RNA, 19 nt, Homo sapiens
  misc_RNA (1)...(19): siRNA sense strand
ugaaaugauuggagcugaa

SEQ ID NO: 2595504 - RNA, 19 nt, Homo sapiens
  misc_RNA (1)...(19): siRNA sense strand
cuaucauacugcaaagaaa

SEQ ID NO: 2595505 - RNA, 19 nt, Homo sapiens
  misc_RNA (1)...(19): siRNA sense strand
cuuaauuaauggcgaagaa

SEQ ID NO: 2595506 - RNA, 19 nt, Homo sapiens
  misc_RNA (1)...(19): siRNA sense strand
ucauguaagucuugaucaa

SEQ ID NO: 2595507 - RNA, 19 nt, Homo sapiens
  misc_RNA (1)...(19): siRNA sense strand
gauuacagcaggagauuau

SEQ ID NO: 2595508 - RNA, 19 nt, Homo sapiens
  misc_RNA (1)...(19): siRNA sense strand
caacacaaaagaagagaaa

SEQ ID NO: 2595509 - RNA, 19 nt, Homo sapiens
  misc_RNA (1)...(19): siRNA sense strand
cagaggaugcugugagauu

SEQ ID NO: 2595510 - RNA, 19 nt, Homo sapiens
  misc_RNA (1)...(19): siRNA sense strand
ccauaaucacagaagaaau

SEQ ID NO: 2595511 - RNA, 19 nt, Homo sapiens
  misc_RNA (1)...(19): siRNA sense strand
cuuuggaaaugaacagaua

SEQ ID NO: 2595512 - RNA, 19 nt, Homo sapiens
  misc_RNA (1)...(19): siRNA sense strand
aagcaggcguuaaggaauu

SEQ ID NO: 2595513 - RNA, 19 nt, Homo sapiens
  misc_RNA (1)...(19): siRNA sense strand
caugaaacaaagaaaggaa

SEQ ID NO: 2595514 - RNA, 19 nt, Homo sapiens
  misc_RNA (1)...(19): siRNA sense strand
uguaagugcaggagaugaa

SEQ ID NO: 2595515 - RNA, 19 nt, Homo sapiens
  misc_RNA (1)...(19): siRNA sense strand
gguuaacaaaggaguaauu

SEQ ID NO: 2595516 - RNA, 19 nt, Homo sapiens
  misc_RNA (1)...(19): siRNA sense strand
gggaagcaggauuuagaaa

SEQ ID NO: 2595517 - RNA, 19 nt, Homo sapiens
  misc_RNA (1)...(19): siRNA sense strand
ugauguaagugcaggagau

SEQ ID NO: 2595518 - RNA, 19 nt, Homo sapiens
  misc_RNA (1)...(19): siRNA sense strand
guucuuaauuaauggcgaa

SEQ ID NO: 2595519 - RNA, 19 nt, Homo sapiens
  misc_RNA (1)...(19): siRNA sense strand
gagaaaacaauuaggcaau

SEQ ID NO: 2595520 - RNA, 19 nt, Homo sapiens
  misc_RNA (1)...(19): siRNA sense strand
agaauaugguguuggcuga

SEQ ID NO: 2595521 - RNA, 19 nt, Homo sapiens
  misc_RNA (1)...(19): siRNA sense strand
guggaaaggauaaugaaga

SEQ ID NO: 2595522 - RNA, 19 nt, Homo sapiens
  misc_RNA (1)...(19): siRNA sense strand
ccgaaaagcauauguagaa

SEQ ID NO: 2595523 - RNA, 19 nt, Homo sapiens
  misc_RNA (1)...(19): siRNA sense strand
ugaagauagcaguaagcaa

SEQ ID NO: 2595524 - RNA, 19 nt, Homo sapiens
  misc_RNA (1)...(19): siRNA sense strand
aauuaauggcgaagaauca

SEQ ID NO: 2595525 - RNA, 19 nt, Homo sapiens
  misc_RNA (1)...(19): siRNA sense strand
aguaucaaguaguagcaaa

SEQ ID NO: 2595526 - RNA, 19 nt, Homo sapiens
  misc_RNA (1)...(19): siRNA sense strand
aagcugaaccuguggaaca

SEQ ID NO: 2595527 - RNA, 19 nt, Homo sapiens
  misc_RNA (1)...(19): siRNA sense strand
gauuagauaacgaagucaa

SEQ ID NO: 2595528 - RNA, 19 nt, Homo sapiens
  misc_RNA (1)...(19): siRNA sense strand
ggauacagcaauucagaca

SEQ ID NO: 2595529 - RNA, 19 nt, Homo sapiens
  misc_RNA (1)...(19): siRNA sense strand
uaguaaagcagggcagaaa

SEQ ID NO: 2595530 - RNA, 19 nt, Homo sapiens
  misc_RNA (1)...(19): siRNA sense strand
ccuuggaacuccuagggua

SEQ ID NO: 2595531 - RNA, 19 nt, Homo sapiens
  misc_RNA (1)...(19): siRNA sense strand
caucguuacaugaaacaaa

SEQ ID NO: 2595532 - RNA, 19 nt, Homo sapiens
  misc_RNA (1)...(19): siRNA sense strand
gcgagaacuugaggaacaa

SEQ ID NO: 2595533 - RNA, 19 nt, Homo sapiens
  misc_RNA (1)...(19): siRNA sense strand
uugaacaguuacucagaua

SEQ ID NO: 2595534 - RNA, 19 nt, Homo sapiens
  misc_RNA (1)...(19): siRNA sense strand
ugguaauacugcuguucua

SEQ ID NO: 2595535 - RNA, 19 nt, Homo sapiens
  misc_RNA (1)...(19): siRNA sense strand
gguuugagucuuacagaga

SEQ ID NO: 2595536 - RNA, 19 nt, Homo sapiens
  misc_RNA (1)...(19): siRNA sense strand
uuugagucuuacagagaaa

SEQ ID NO: 2595537 - RNA, 19 nt, Homo sapiens
  misc_RNA (1)...(19): siRNA sense strand
acacaaaagaagagaaaac

SEQ ID NO: 2595538 - RNA, 19 nt, Homo sapiens
  misc_RNA (1)...(19): siRNA sense strand
aaacaggagccaccagaaa

SEQ ID NO: 2595539 - RNA, 19 nt, Homo sapiens
  misc_RNA (1)...(19): siRNA sense strand
gauaauaaguucagcaagc

SEQ ID NO: 2595540 - RNA, 19 nt, Homo sapiens
  misc_RNA (1)...(19): siRNA sense strand
acaacuaguuacaagugaa

SEQ ID NO: 2595541 - RNA, 19 nt, Homo sapiens
  misc_RNA (1)...(19): siRNA sense strand
uugcagaggaucacauuaa

SEQ ID NO: 2595542 - RNA, 19 nt, Homo sapiens
  misc_RNA (1)...(19): siRNA sense strand
ucccauaaucacagaagaa

SEQ ID NO: 2595543 - RNA, 19 nt, Homo sapiens
  misc_RNA (1)...(19): siRNA sense strand
agagaaaacaauuaggcaa

SEQ ID NO: 2595544 - RNA, 19 nt, Homo sapiens
  misc_RNA (1)...(19): siRNA sense strand
augaaaagucccaugguua

SEQ ID NO: 2595545 - RNA, 19 nt, Homo sapiens
  misc_RNA (1)...(19): siRNA sense strand
gcaaguuuacaaaggaaaa

SEQ ID NO: 2595546 - RNA, 19 nt, Homo sapiens
  misc_RNA (1)...(19): siRNA sense strand
acuugcaguuguagaagaa

SEQ ID NO: 2595547 - RNA, 19 nt, Homo sapiens
  misc_RNA (1)...(19): siRNA sense strand
gugagguagauuugaauau

SEQ ID NO: 2595548 - RNA, 19 nt, Homo sapiens
  misc_RNA (1)...(19): siRNA sense strand
caaagauggcuuaccaaau

SEQ ID NO: 2595549 - RNA, 19 nt, Homo sapiens
  misc_RNA (1)...(19): siRNA sense strand
caguaaaguuccagaaaag

SEQ ID NO: 2595550 - RNA, 19 nt, Homo sapiens
  misc_RNA (1)...(19): siRNA sense strand
acucuuagacagcuggaua

SEQ ID NO: 2595551 - RNA, 19 nt, Homo sapiens
  misc_RNA (1)...(19): siRNA sense strand
cagauaauaaguucagcaa

SEQ ID NO: 2595552 - RNA, 19 nt, Homo sapiens
  misc_RNA (1)...(19): siRNA sense strand
aaucagugcaggagcuaau

SEQ ID NO: 2595553 - RNA, 19 nt, Homo sapiens
  misc_RNA (1)...(19): siRNA sense strand
agaagguguccaugaaauu

SEQ ID NO: 2595554 - RNA, 19 nt, Homo sapiens
  misc_RNA (1)...(19): siRNA sense strand
ccacauauagagaaaacaa

SEQ ID NO: 2595555 - RNA, 19 nt, Homo sapiens
  misc_RNA (1)...(19): siRNA sense strand
ucugagaauuguagugcuu

SEQ ID NO: 2595556 - RNA, 19 nt, Homo sapiens
  misc_RNA (1)...(19): siRNA sense strand
aagaagguguccaugaaau

SEQ ID NO: 2595557 - RNA, 19 nt, Homo sapiens
  misc_RNA (1)...(19): siRNA sense strand
cguuaaggaauuccacaua

SEQ ID NO: 2595558 - RNA, 19 nt, Homo sapiens
  misc_RNA (1)...(19): siRNA sense strand
caauuaaacgaucagcuaa

SEQ ID NO: 2595559 - RNA, 19 nt, Homo sapiens
  misc_RNA (1)...(19): siRNA sense strand
agaaccaauuacaguggaa

SEQ ID NO: 2595560 - RNA, 19 nt, Homo sapiens
  misc_RNA (1)...(19): siRNA sense strand
gccaguagggagaagggaa

SEQ ID NO: 2595561 - RNA, 19 nt, Homo sapiens
  misc_RNA (1)...(19): siRNA sense strand
gauuaugaccuuaacauca

SEQ ID NO: 2595562 - RNA, 19 nt, Homo sapiens
  misc_RNA (1)...(19): siRNA sense strand
aggacaagaucaaagcaaa

SEQ ID NO: 2595563 - RNA, 19 nt, Homo sapiens
  misc_RNA (1)...(19): siRNA sense strand
uguugaaagaggagaaauu

SEQ ID NO: 2595564 - RNA, 19 nt, Homo sapiens
  misc_RNA (1)...(19): siRNA sense strand
ccguaugacuggaggacca

SEQ ID NO: 2595565 - RNA, 19 nt, Homo sapiens
  misc_RNA (1)...(19): siRNA sense strand
cagccaaggaauuguuaaa

SEQ ID NO: 2595566 - RNA, 19 nt, Homo sapiens
  misc_RNA (1)...(19): siRNA sense strand
aaucgagcuuaaagggaaa

SEQ ID NO: 2595567 - RNA, 19 nt, Homo sapiens
  misc_RNA (1)...(19): siRNA sense strand
auuuguacuuggaaggaaa

SEQ ID NO: 2595568 - RNA, 19 nt, Homo sapiens
  misc_RNA (1)...(19): siRNA sense strand
agaaagaaagcuagaucau

SEQ ID NO: 2595569 - RNA, 19 nt, Homo sapiens
  misc_RNA (1)...(19): siRNA sense strand
gcuucagacugcaaagaau

SEQ ID NO: 2595570 - RNA, 19 nt, Homo sapiens
  misc_RNA (1)...(19): siRNA sense strand
uauucauggcaaagagaaa

SEQ ID NO: 2595571 - RNA, 19 nt, Homo sapiens
  misc_RNA (1)...(19): siRNA sense strand
augauaagggcuugguuua

SEQ ID NO: 2595572 - RNA, 19 nt, Homo sapiens
  misc_RNA (1)...(19): siRNA sense strand
cagcuauggaaauuagaaa

SEQ ID NO: 2595573 - RNA, 19 nt, Homo sapiens
  misc_RNA (1)...(19): siRNA sense strand
cguacuggcggcagauaaa

SEQ ID NO: 2595574 - RNA, 19 nt, Homo sapiens
  misc_RNA (1)...(19): siRNA sense strand
auuagcaagcuuaggaaua

SEQ ID NO: 2595575 - RNA, 19 nt, Homo sapiens
  misc_RNA (1)...(19): siRNA sense strand
agugauuguucauggauuu

SEQ ID NO: 2595576 - RNA, 19 nt, Homo sapiens
  misc_RNA (1)...(19): siRNA sense strand
gcuauggaaauuagaaaga

SEQ ID NO: 2595577 - RNA, 19 nt, Homo sapiens
  misc_RNA (1)...(19): siRNA sense strand
ugaauauaauccugagcau

SEQ ID NO: 2595578 - RNA, 19 nt, Homo sapiens
  misc_RNA (1)...(19): siRNA sense strand
cagccaaaccacugagcau

SEQ ID NO: 2595579 - RNA, 19 nt, Homo sapiens
  misc_RNA (1)...(19): siRNA sense strand
guggagagugcgugugcaa

SEQ ID NO: 2595580 - RNA, 19 nt, Homo sapiens
  misc_RNA (1)...(19): siRNA sense strand
cugcaaaucaugugaccau

SEQ ID NO: 2595581 - RNA, 19 nt, Homo sapiens
  misc_RNA (1)...(19): siRNA sense strand
aggaugaauacuugaucaa

SEQ ID NO: 2595582 - RNA, 19 nt, Homo sapiens
  misc_RNA (1)...(19): siRNA sense strand
uaaucgagcuuaaagggaa

SEQ ID NO: 2595583 - RNA, 19 nt, Homo sapiens
  misc_RNA (1)...(19): siRNA sense strand
agaaguugucaguggaaaa

SEQ ID NO: 2595584 - RNA, 19 nt, Homo sapiens
  misc_RNA (1)...(19): siRNA sense strand
gagaaaagggagaaaagau

SEQ ID NO: 2595585 - RNA, 19 nt, Homo sapiens
  misc_RNA (1)...(19): siRNA sense strand
cguuaauggaggacaagau

SEQ ID NO: 2595586 - RNA, 19 nt, Homo sapiens
  misc_RNA (1)...(19): siRNA sense strand
ugggaaguaugaagccaaa

SEQ ID NO: 2595587 - RNA, 19 nt, Homo sapiens
  misc_RNA (1)...(19): siRNA sense strand
ggacaagaucaaagcaaag

SEQ ID NO: 2595588 - RNA, 19 nt, Homo sapiens
  misc_RNA (1)...(19): siRNA sense strand
gcucaggaaccacgagaga

SEQ ID NO: 2595589 - RNA, 19 nt, Homo sapiens
  misc_RNA (1)...(19): siRNA sense strand
uggauuuacccuuggagaa

SEQ ID NO: 2595590 - RNA, 19 nt, Homo sapiens
  misc_RNA (1)...(19): siRNA sense strand
gaggacaagaucaaagcaa

SEQ ID NO: 2595591 - RNA, 19 nt, Homo sapiens
  misc_RNA (1)...(19): siRNA sense strand
uaauggaggacaagaucaa

SEQ ID NO: 2595592 - RNA, 19 nt, Homo sapiens
  misc_RNA (1)...(19): siRNA sense strand
cagcugaguacaagguuau

SEQ ID NO: 2595593 - RNA, 19 nt, Homo sapiens
  misc_RNA (1)...(19): siRNA sense strand
ccagagaugauauuagcaa

SEQ ID NO: 2595594 - RNA, 19 nt, Homo sapiens
  misc_RNA (1)...(19): siRNA sense strand
caacuuagaagguggugau

SEQ ID NO: 2595595 - RNA, 19 nt, Homo sapiens
  misc_RNA (1)...(19): siRNA sense strand
aagcagccauugagaaaca

SEQ ID NO: 2595596 - RNA, 19 nt, Homo sapiens
  misc_RNA (1)...(19): siRNA sense strand
ugauauucgugaagagucu

SEQ ID NO: 2595597 - RNA, 19 nt, Homo sapiens
  misc_RNA (1)...(19): siRNA sense strand
ugguagagaagcucagaau

SEQ ID NO: 2595598 - RNA, 19 nt, Homo sapiens
  misc_RNA (1)...(19): siRNA sense strand
acagcggagucuucagaua

SEQ ID NO: 2595599 - RNA, 19 nt, Homo sapiens
  misc_RNA (1)...(19): siRNA sense strand
uggauuaguacuaguucua

SEQ ID NO: 2595600 - RNA, 19 nt, Homo sapiens
  misc_RNA (1)...(19): siRNA sense strand
aauaauggcagauuggaau

SEQ ID NO: 2595601 - RNA, 19 nt, Homo sapiens
  misc_RNA (1)...(19): siRNA sense strand
gccagcaagcagugguuua

SEQ ID NO: 2595602 - RNA, 19 nt, Homo sapiens
  misc_RNA (1)...(19): siRNA sense strand
augccgacuacgaaagaaa

SEQ ID NO: 2595603 - RNA, 19 nt, Homo sapiens
  misc_RNA (1)...(19): siRNA sense strand
aggagaaauuggugcauag

SEQ ID NO: 2595604 - RNA, 19 nt, Homo sapiens
  misc_RNA (1)...(19): siRNA sense strand
uggaauaugugccagguca

SEQ ID NO: 2595605 - RNA, 19 nt, Homo sapiens
  misc_RNA (1)...(19): siRNA sense strand
uggaagcaucccuggcaaa

SEQ ID NO: 2595606 - RNA, 19 nt, Homo sapiens
  misc_RNA (1)...(19): siRNA sense strand
ucuuaaagccuucuccaaa

SEQ ID NO: 2595607 - RNA, 19 nt, Homo sapiens
  misc_RNA (1)...(19): siRNA sense strand
cagaaguugucaguggaaa

SEQ ID NO: 2595608 - RNA, 19 nt, Homo sapiens
  misc_RNA (1)...(19): siRNA sense strand
uuugaaagacauagccaau

SEQ ID NO: 2595609 - RNA, 19 nt, Homo sapiens
  misc_RNA (1)...(19): siRNA sense strand
gcagcaaggaagagagcac

SEQ ID NO: 2595610 - RNA, 19 nt, Homo sapiens
  misc_RNA (1)...(19): siRNA sense strand
gcagaaguugucaguggaa

SEQ ID NO: 2595611 - RNA, 19 nt, Homo sapiens
  misc_RNA (1)...(19): siRNA sense strand
gcauuuauucguuggggaa

SEQ ID NO: 2595612 - RNA, 19 nt, Homo sapiens
  misc_RNA (1)...(19): siRNA sense strand
acuauacauuugaugggaa

SEQ ID NO: 2595613 - RNA, 19 nt, Homo sapiens
  misc_RNA (1)...(19): siRNA sense strand
agaccaaggaugaauacuu

SEQ ID NO: 2595614 - RNA, 19 nt, Homo sapiens
  misc_RNA (1)...(19): siRNA sense strand
gcaccuuauaagacaguga

SEQ ID NO: 2595615 - RNA, 19 nt, Homo sapiens
  misc_RNA (1)...(19): siRNA sense strand
cugaagagguguuccagca

SEQ ID NO: 2595616 - RNA, 19 nt, Homo sapiens
  misc_RNA (1)...(19): siRNA sense strand
agcuagaucauuugcuaaa

SEQ ID NO: 2595617 - RNA, 19 nt, Homo sapiens
  misc_RNA (1)...(19): siRNA sense strand
cugaagcagaacuugaaua

SEQ ID NO: 2595618 - RNA, 19 nt, Homo sapiens
  misc_RNA (1)...(19): siRNA sense strand
gggaggagaucgaggagcu

SEQ ID NO: 2595619 - RNA, 19 nt, Homo sapiens
  misc_RNA (1)...(19): siRNA sense strand
ggaagaauuucaagggccu

SEQ ID NO: 2595620 - RNA, 19 nt, Homo sapiens
  misc_RNA (1)...(19): siRNA sense strand
gcaagaauccugugugcca

SEQ ID NO: 2595621 - RNA, 19 nt, Homo sapiens
  misc_RNA (1)...(19): siRNA sense strand
ggaaauagcacaucuggga

SEQ ID NO: 2595622 - RNA, 19 nt, Homo sapiens
  misc_RNA (1)...(19): siRNA sense strand
gcacuaaagaaccggcaga

SEQ ID NO: 2595623 - RNA, 19 nt, Homo sapiens
  misc_RNA (1)...(19): siRNA sense strand
uggaagagccgcaucgaga

SEQ ID NO: 2595624 - RNA, 19 nt, Homo sapiens
  misc_RNA (1)...(19): siRNA sense strand
ugaaagacauguuugacga

SEQ ID NO: 2595625 - RNA, 19 nt, Homo sapiens
  misc_RNA (1)...(19): siRNA sense strand
agagauugggagaguccua

SEQ ID NO: 2595626 - RNA, 19 nt, Homo sapiens
  misc_RNA (1)...(19): siRNA sense strand
cagaacaacugcucaggga

SEQ ID NO: 2595627 - RNA, 19 nt, Homo sapiens
  misc_RNA (1)...(19): siRNA sense strand
aggagaucgaggagcucaa

SEQ ID NO: 2595628 - RNA, 19 nt, Homo sapiens
  misc_RNA (1)...(19): siRNA sense strand
ccaggauuggcaagagauu

SEQ ID NO: 2595629 - RNA, 19 nt, Homo sapiens
  misc_RNA (1)...(19): siRNA sense strand
agaaaaggcuacagcagca

SEQ ID NO: 2595630 - RNA, 19 nt, Homo sapiens
  misc_RNA (1)...(19): siRNA sense strand
gggccugguacaugcagua

SEQ ID NO: 2595631 - RNA, 19 nt, Homo sapiens
  misc_RNA (1)...(19): siRNA sense strand
aguuugaucacaugaaaga

SEQ ID NO: 2595632 - RNA, 19 nt, Homo sapiens
  misc_RNA (1)...(19): siRNA sense strand
ggugacagaucucggccau

SEQ ID NO: 2595633 - RNA, 19 nt, Homo sapiens
  misc_RNA (1)...(19): siRNA sense strand
cagaaaaggcgcuucaaca

SEQ ID NO: 2595634 - RNA, 19 nt, Homo sapiens
  misc_RNA (1)...(19): siRNA sense strand
auuugggaguuaagagaaa

SEQ ID NO: 2595635 - RNA, 19 nt, Homo sapiens
  misc_RNA (1)...(19): siRNA sense strand
agacaauaggugaagaaca

SEQ ID NO: 2595636 - RNA, 19 nt, Homo sapiens
  misc_RNA (1)...(19): siRNA sense strand
uggaagagucagcaaacaa

SEQ ID NO: 2595637 - RNA, 19 nt, Homo sapiens
  misc_RNA (1)...(19): siRNA sense strand
ugguacaguuagaugacua

SEQ ID NO: 2595638 - RNA, 19 nt, Homo sapiens
  misc_RNA (1)...(19): siRNA sense strand
aguuagaugacuacagauu

SEQ ID NO: 2595639 - RNA, 19 nt, Homo sapiens
  misc_RNA (1)...(19): siRNA sense strand
gagacuagauguuuggcuu

SEQ ID NO: 2595640 - RNA, 19 nt, Homo sapiens
  misc_RNA (1)...(19): siRNA sense strand
acagacaauaggugaagaa

SEQ ID NO: 2595641 - RNA, 19 nt, Homo sapiens
  misc_RNA (1)...(19): siRNA sense strand
gaacaguuauuguguggga

SEQ ID NO: 2595642 - RNA, 19 nt, Homo sapiens
  misc_RNA (1)...(19): siRNA sense strand
acucaaaagauaacagcua

SEQ ID NO: 2595643 - RNA, 19 nt, Homo sapiens
  misc_RNA (1)...(19): siRNA sense strand
ugugauugccugccagaaa

SEQ ID NO: 2595644 - RNA, 19 nt, Homo sapiens
  misc_RNA (1)...(19): siRNA sense strand
acacccaacaagaaauaaa

SEQ ID NO: 2595645 - RNA, 19 nt, Homo sapiens
  misc_RNA (1)...(19): siRNA sense strand
aauuagaggagaaugguga

SEQ ID NO: 2595646 - RNA, 19 nt, Homo sapiens
  misc_RNA (1)...(19): siRNA sense strand
cuuccaaacaggcaguuaa

SEQ ID NO: 2595647 - RNA, 19 nt, Homo sapiens
  misc_RNA (1)...(19): siRNA sense strand
ggaucacuagaaugggaua

SEQ ID NO: 2595648 - RNA, 19 nt, Homo sapiens
  misc_RNA (1)...(19): siRNA sense strand
cugaauggacacacucaaa

SEQ ID NO: 2595649 - RNA, 19 nt, Homo sapiens
  misc_RNA (1)...(19): siRNA sense strand
gcuuauuggagauuugauu

SEQ ID NO: 2595650 - RNA, 19 nt, Homo sapiens
  misc_RNA (1)...(19): siRNA sense strand
guguaagacuagccaccuu

SEQ ID NO: 2595651 - RNA, 19 nt, Homo sapiens
  misc_RNA (1)...(19): siRNA sense strand
cagcaaacaagccagccaa

SEQ ID NO: 2595652 - RNA, 19 nt, Homo sapiens
  misc_RNA (1)...(19): siRNA sense strand
uggacacacucaaaagaua

SEQ ID NO: 2595653 - RNA, 19 nt, Homo sapiens
  misc_RNA (1)...(19): siRNA sense strand
gagacagagcugagggaga

SEQ ID NO: 2595654 - RNA, 19 nt, Homo sapiens
  misc_RNA (1)...(19): siRNA sense strand
gagagaugauccaggccua

SEQ ID NO: 2595655 - RNA, 19 nt, Homo sapiens
  misc_RNA (1)...(19): siRNA sense strand
gggagaaucuugaggacuc

SEQ ID NO: 2595656 - RNA, 19 nt, Homo sapiens
  misc_RNA (1)...(19): siRNA sense strand
aggaagaacagcuuggaga

SEQ ID NO: 2595657 - RNA, 19 nt, Homo sapiens
  misc_RNA (1)...(19): siRNA sense strand
ucaaagucuacgagaucaa

SEQ ID NO: 2595658 - RNA, 19 nt, Homo sapiens
  misc_RNA (1)...(19): siRNA sense strand
gagaagagugacuuggaga

SEQ ID NO: 2595659 - RNA, 19 nt, Homo sapiens
  misc_RNA (1)...(19): siRNA sense strand
ggugaaaagaguuggggau

SEQ ID NO: 2595660 - RNA, 19 nt, Homo sapiens
  misc_RNA (1)...(19): siRNA sense strand
ccaaccagucggagcgaga

SEQ ID NO: 2595661 - RNA, 19 nt, Homo sapiens
  misc_RNA (1)...(19): siRNA sense strand
augaguuacagaagaacaa

SEQ ID NO: 2595662 - RNA, 19 nt, Homo sapiens
  misc_RNA (1)...(19): siRNA sense strand
cgagacauggcguggguga

SEQ ID NO: 2595663 - RNA, 19 nt, Homo sapiens
  misc_RNA (1)...(19): siRNA sense strand
agaagaacaaggagcagga

SEQ ID NO: 2595664 - RNA, 19 nt, Homo sapiens
  misc_RNA (1)...(19): siRNA sense strand
ugaauuuggcgcuggccua

SEQ ID NO: 2595665 - RNA, 19 nt, Homo sapiens
  misc_RNA (1)...(19): siRNA sense strand
gccucaaagucuacgagau

SEQ ID NO: 2595666 - RNA, 19 nt, Homo sapiens
  misc_RNA (1)...(19): siRNA sense strand
agaaacucugcguggagaa

SEQ ID NO: 2595667 - RNA, 19 nt, Homo sapiens
  misc_RNA (1)...(19): siRNA sense strand
cugauuuagaccugcacua

SEQ ID NO: 2595668 - RNA, 19 nt, Homo sapiens
  misc_RNA (1)...(19): siRNA sense strand
agcccaaggugguggucaa

SEQ ID NO: 2595669 - RNA, 19 nt, Homo sapiens
  misc_RNA (1)...(19): siRNA sense strand
cauuauuggcccaugcaaa

SEQ ID NO: 2595670 - RNA, 19 nt, Homo sapiens
  misc_RNA (1)...(19): siRNA sense strand
aaagaugggaaaagggaaa

SEQ ID NO: 2595671 - RNA, 19 nt, Homo sapiens
  misc_RNA (1)...(19): siRNA sense strand
ucaaacuguccuagggauu

SEQ ID NO: 2595672 - RNA, 19 nt, Homo sapiens
  misc_RNA (1)...(19): siRNA sense strand
augacuuaaagaugggaaa

SEQ ID NO: 2595673 - RNA, 19 nt, Homo sapiens
  misc_RNA (1)...(19): siRNA sense strand
ccaaaagcaagacgagcaa

SEQ ID NO: 2595674 - RNA, 19 nt, Homo sapiens
  misc_RNA (1)...(19): siRNA sense strand
aagcaagacgagcaagaca

SEQ ID NO: 2595675 - RNA, 19 nt, Homo sapiens
  misc_RNA (1)...(19): siRNA sense strand
gccuacaagcagauucaaa

SEQ ID NO: 2595676 - RNA, 19 nt, Homo sapiens
  misc_RNA (1)...(19): siRNA sense strand
cgaaaugacuuaaagaugg

SEQ ID NO: 2595677 - RNA, 19 nt, Homo sapiens
  misc_RNA (1)...(19): siRNA sense strand
guguaaggaaugugggaaa

SEQ ID NO: 2595678 - RNA, 19 nt, Homo sapiens
  misc_RNA (1)...(19): siRNA sense strand
ccguauaaguguaaugaau

SEQ ID NO: 2595679 - RNA, 19 nt, Homo sapiens
  misc_RNA (1)...(19): siRNA sense strand
guguaaugaauguggcaaa

SEQ ID NO: 2595680 - RNA, 19 nt, Homo sapiens
  misc_RNA (1)...(19): siRNA sense strand
ccaugaaagcccagccaaa

SEQ ID NO: 2595681 - RNA, 19 nt, Homo sapiens
  misc_RNA (1)...(19): siRNA sense strand
cuguaaugacuguggcaaa

SEQ ID NO: 2595682 - RNA, 19 nt, Homo sapiens
  misc_RNA (1)...(19): siRNA sense strand
uggaggauuuagagagaga

SEQ ID NO: 2595683 - RNA, 19 nt, Homo sapiens
  misc_RNA (1)...(19): siRNA sense strand
gcagagaggucuuccguca

SEQ ID NO: 2595684 - RNA, 19 nt, Homo sapiens
  misc_RNA (1)...(19): siRNA sense strand
ggagauagacccuacaaau

SEQ ID NO: 2595685 - RNA, 19 nt, Homo sapiens
  misc_RNA (1)...(19): siRNA sense strand
uuacagaacaucagcgaau

SEQ ID NO: 2595686 - RNA, 19 nt, Homo sapiens
  misc_RNA (1)...(19): siRNA sense strand
gcgaauucacacuggagaa

SEQ ID NO: 2595687 - RNA, 19 nt, Homo sapiens
  misc_RNA (1)...(19): siRNA sense strand
uggaaaugaguaugggaau

SEQ ID NO: 2595688 - RNA, 19 nt, Homo sapiens
  misc_RNA (1)...(19): siRNA sense strand
ucauagaacaucagaggau

SEQ ID NO: 2595689 - RNA, 19 nt, Homo sapiens
  misc_RNA (1)...(19): siRNA sense strand
gauccacacaagagacaaa

SEQ ID NO: 2595690 - RNA, 19 nt, Homo sapiens
  misc_RNA (1)...(19): siRNA sense strand
agacagaggaagaagacca

SEQ ID NO: 2595691 - RNA, 19 nt, Homo sapiens
  misc_RNA (1)...(19): siRNA sense strand
cugaagaaauggaaccaca

SEQ ID NO: 2595692 - RNA, 19 nt, Homo sapiens
  misc_RNA (1)...(19): siRNA sense strand
gagaaaccguauaagugua

SEQ ID NO: 2595693 - RNA, 19 nt, Homo sapiens
  misc_RNA (1)...(19): siRNA sense strand
aggaagaagaccagcuaca

SEQ ID NO: 2595694 - RNA, 19 nt, Homo sapiens
  misc_RNA (1)...(19): siRNA sense strand
cgucaguacuucagacagu

SEQ ID NO: 2595695 - RNA, 19 nt, Homo sapiens
  misc_RNA (1)...(19): siRNA sense strand
aggaaauguucuugcagga

SEQ ID NO: 2595696 - RNA, 19 nt, Homo sapiens
  misc_RNA (1)...(19): siRNA sense strand
aggauugggaccugcguaa

SEQ ID NO: 2595697 - RNA, 19 nt, Homo sapiens
  misc_RNA (1)...(19): siRNA sense strand
uggagaaacucgugaaccu

SEQ ID NO: 2595698 - RNA, 19 nt, Homo sapiens
  misc_RNA (1)...(19): siRNA sense strand
augcgaagaauguggaaaa

SEQ ID NO: 2595699 - RNA, 19 nt, Homo sapiens
  misc_RNA (1)...(19): siRNA sense strand
cuggaaaugaguaugggaa

SEQ ID NO: 2595700 - RNA, 19 nt, Homo sapiens
  misc_RNA (1)...(19): siRNA sense strand
gugugaugagugugggaau

SEQ ID NO: 2595701 - RNA, 19 nt, Homo sapiens
  misc_RNA (1)...(19): siRNA sense strand
uaaagauagaggaagagaa

SEQ ID NO: 2595702 - RNA, 19 nt, Homo sapiens
  misc_RNA (1)...(19): siRNA sense strand
gugcaacgaguguggaaaa

SEQ ID NO: 2595703 - RNA, 19 nt, Homo sapiens
  misc_RNA (1)...(19): siRNA sense strand
gagccgacuccgagaacuu

SEQ ID NO: 2595704 - RNA, 19 nt, Homo sapiens
  misc_RNA (1)...(19): siRNA sense strand
gaagagaaauauaccacca

SEQ ID NO: 2595705 - RNA, 19 nt, Homo sapiens
  misc_RNA (1)...(19): siRNA sense strand
aauucacacuggagaaaga

SEQ ID NO: 2595706 - RNA, 19 nt, Homo sapiens
  misc_RNA (1)...(19): siRNA sense strand
aggaugaaccuuuggaagu

SEQ ID NO: 2595707 - RNA, 19 nt, Homo sapiens
  misc_RNA (1)...(19): siRNA sense strand
ucugcuagguguggagaaa

SEQ ID NO: 2595708 - RNA, 19 nt, Homo sapiens
  misc_RNA (1)...(19): siRNA sense strand
cgaauucacacuggagaaa

SEQ ID NO: 2595709 - RNA, 19 nt, Homo sapiens
  misc_RNA (1)...(19): siRNA sense strand
ggaugaaccaggagagcag

SEQ ID NO: 2595710 - RNA, 19 nt, Homo sapiens
  misc_RNA (1)...(19): siRNA sense strand
gcuccagagaagauaaaca

SEQ ID NO: 2595711 - RNA, 19 nt, Homo sapiens
  misc_RNA (1)...(19): siRNA sense strand
ggagagaaaccguauaagu

SEQ ID NO: 2595712 - RNA, 19 nt, Homo sapiens
  misc_RNA (1)...(19): siRNA sense strand
gaaauguucuugcaggaga

SEQ ID NO: 2595713 - RNA, 19 nt, Homo sapiens
  misc_RNA (1)...(19): siRNA sense strand
cuggagagaaaccguauaa

SEQ ID NO: 2595714 - RNA, 19 nt, Homo sapiens
  misc_RNA (1)...(19): siRNA sense strand
aggaaauccaccacaaaga

SEQ ID NO: 2595715 - RNA, 19 nt, Homo sapiens
  misc_RNA (1)...(19): siRNA sense strand
aaaugugacguaugugaaa

SEQ ID NO: 2595716 - RNA, 19 nt, Homo sapiens
  misc_RNA (1)...(19): siRNA sense strand
gagacuucacacaggagaa

SEQ ID NO: 2595717 - RNA, 19 nt, Homo sapiens
  misc_RNA (1)...(19): siRNA sense strand
uggagaaagacccuauaaa

SEQ ID NO: 2595718 - RNA, 19 nt, Homo sapiens
  misc_RNA (1)...(19): siRNA sense strand
agaccagcuacaaggaaau

SEQ ID NO: 2595719 - RNA, 19 nt, Homo sapiens
  misc_RNA (1)...(19): siRNA sense strand
aaauggaaccacaugggaa

SEQ ID NO: 2595720 - RNA, 19 nt, Homo sapiens
  misc_RNA (1)...(19): siRNA sense strand
agaaaccguauaaguguaa

SEQ ID NO: 2595721 - RNA, 19 nt, Homo sapiens
  misc_RNA (1)...(19): siRNA sense strand
ccguaugagugcaacgagu

SEQ ID NO: 2595722 - RNA, 19 nt, Homo sapiens
  misc_RNA (1)...(19): siRNA sense strand
gacaagucuuacagaacau

SEQ ID NO: 2595723 - RNA, 19 nt, Homo sapiens
  misc_RNA (1)...(19): siRNA sense strand
ccacaugggaagacaucca

SEQ ID NO: 2595724 - RNA, 19 nt, Homo sapiens
  misc_RNA (1)...(19): siRNA sense strand
gaacugugcuuauucgaca

SEQ ID NO: 2595725 - RNA, 19 nt, Homo sapiens
  misc_RNA (1)...(19): siRNA sense strand
gagaauucacacuggggaa

SEQ ID NO: 2595726 - RNA, 19 nt, Homo sapiens
  misc_RNA (1)...(19): siRNA sense strand
aaucuguccaggagaagaa

SEQ ID NO: 2595727 - RNA, 19 nt, Homo sapiens
  misc_RNA (1)...(19): siRNA sense strand
guggaaaagccuucagaca

SEQ ID NO: 2595728 - RNA, 19 nt, Homo sapiens
  misc_RNA (1)...(19): siRNA sense strand
ggauuuagagagagaacug

SEQ ID NO: 2595729 - RNA, 19 nt, Homo sapiens
  misc_RNA (1)...(19): siRNA sense strand
guguaaggaaugugggaaa

SEQ ID NO: 2595730 - RNA, 19 nt, Homo sapiens
  misc_RNA (1)...(19): siRNA sense strand
ccaugaaagcccagccaaa

SEQ ID NO: 2595731 - RNA, 19 nt, Homo sapiens
  misc_RNA (1)...(19): siRNA sense strand
cuguaaugacuguggcaaa

SEQ ID NO: 2595732 - RNA, 19 nt, Homo sapiens
  misc_RNA (1)...(19): siRNA sense strand
uggaggauuuagagagaga

SEQ ID NO: 2595733 - RNA, 19 nt, Homo sapiens
  misc_RNA (1)...(19): siRNA sense strand
gcagagaggucuuccguca

SEQ ID NO: 2595734 - RNA, 19 nt, Homo sapiens
  misc_RNA (1)...(19): siRNA sense strand
ggagauagacccuacaaau

SEQ ID NO: 2595735 - RNA, 19 nt, Homo sapiens
  misc_RNA (1)...(19): siRNA sense strand
uuacagaacaucagcgaau

SEQ ID NO: 2595736 - RNA, 19 nt, Homo sapiens
  misc_RNA (1)...(19): siRNA sense strand
gcgaauucacacuggagaa

SEQ ID NO: 2595737 - RNA, 19 nt, Homo sapiens
  misc_RNA (1)...(19): siRNA sense strand
uggaaaugaguaugggaau

SEQ ID NO: 2595738 - RNA, 19 nt, Homo sapiens
  misc_RNA (1)...(19): siRNA sense strand
gauccacacaagagacaaa

SEQ ID NO: 2595739 - RNA, 19 nt, Homo sapiens
  misc_RNA (1)...(19): siRNA sense strand
agacagaggaagaagacca

SEQ ID NO: 2595740 - RNA, 19 nt, Homo sapiens
  misc_RNA (1)...(19): siRNA sense strand
cugaagaaauggaaccaca

SEQ ID NO: 2595741 - RNA, 19 nt, Homo sapiens
  misc_RNA (1)...(19): siRNA sense strand
aggaagaagaccagcuaca

SEQ ID NO: 2595742 - RNA, 19 nt, Homo sapiens
  misc_RNA (1)...(19): siRNA sense strand
cgucaguacuucagacagu

SEQ ID NO: 2595743 - RNA, 19 nt, Homo sapiens
  misc_RNA (1)...(19): siRNA sense strand
aggaaauguucuugcagga

SEQ ID NO: 2595744 - RNA, 19 nt, Homo sapiens
  misc_RNA (1)...(19): siRNA sense strand
aggauugggaccugcguaa

SEQ ID NO: 2595745 - RNA, 19 nt, Homo sapiens
  misc_RNA (1)...(19): siRNA sense strand
uggagaaacucgugaaccu

SEQ ID NO: 2595746 - RNA, 19 nt, Homo sapiens
  misc_RNA (1)...(19): siRNA sense strand
augcgaagaauguggaaaa

SEQ ID NO: 2595747 - RNA, 19 nt, Homo sapiens
  misc_RNA (1)...(19): siRNA sense strand
cuggaaaugaguaugggaa

SEQ ID NO: 2595748 - RNA, 19 nt, Homo sapiens
  misc_RNA (1)...(19): siRNA sense strand
uaaagauagaggaagagaa

SEQ ID NO: 2595749 - RNA, 19 nt, Homo sapiens
  misc_RNA (1)...(19): siRNA sense strand
gugugaugagugugggaau

SEQ ID NO: 2595750 - RNA, 19 nt, Homo sapiens
  misc_RNA (1)...(19): siRNA sense strand
gugcaacgaguguggaaaa

SEQ ID NO: 2595751 - RNA, 19 nt, Homo sapiens
  misc_RNA (1)...(19): siRNA sense strand
gagccgacuccgagaacuu

SEQ ID NO: 2595752 - RNA, 19 nt, Homo sapiens
  misc_RNA (1)...(19): siRNA sense strand
gaagagaaauauaccacca

SEQ ID NO: 2595753 - RNA, 19 nt, Homo sapiens
  misc_RNA (1)...(19): siRNA sense strand
aauucacacuggagaaaga

SEQ ID NO: 2595754 - RNA, 19 nt, Homo sapiens
  misc_RNA (1)...(19): siRNA sense strand
ucugcuagguguggagaaa

SEQ ID NO: 2595755 - RNA, 19 nt, Homo sapiens
  misc_RNA (1)...(19): siRNA sense strand
aggaugaaccuuuggaagu

SEQ ID NO: 2595756 - RNA, 19 nt, Homo sapiens
  misc_RNA (1)...(19): siRNA sense strand
cgaauucacacuggagaaa

SEQ ID NO: 2595757 - RNA, 19 nt, Homo sapiens
  misc_RNA (1)...(19): siRNA sense strand
ggaugaaccaggagagcag

SEQ ID NO: 2595758 - RNA, 19 nt, Homo sapiens
  misc_RNA (1)...(19): siRNA sense strand
gcuccagagaagauaaaca

SEQ ID NO: 2595759 - RNA, 19 nt, Homo sapiens
  misc_RNA (1)...(19): siRNA sense strand
gaaauguucuugcaggaga

SEQ ID NO: 2595760 - RNA, 19 nt, Homo sapiens
  misc_RNA (1)...(19): siRNA sense strand
cuggagagaaaccguauaa

SEQ ID NO: 2595761 - RNA, 19 nt, Homo sapiens
  misc_RNA (1)...(19): siRNA sense strand
aggaaauccaccacaaaga

SEQ ID NO: 2595762 - RNA, 19 nt, Homo sapiens
  misc_RNA (1)...(19): siRNA sense strand
aaaugugacguaugugaaa

SEQ ID NO: 2595763 - RNA, 19 nt, Homo sapiens
  misc_RNA (1)...(19): siRNA sense strand
gagacuucacacaggagaa

SEQ ID NO: 2595764 - RNA, 19 nt, Homo sapiens
  misc_RNA (1)...(19): siRNA sense strand
uggagaaagacccuauaaa

SEQ ID NO: 2595765 - RNA, 19 nt, Homo sapiens
  misc_RNA (1)...(19): siRNA sense strand
agaccagcuacaaggaaau

SEQ ID NO: 2595766 - RNA, 19 nt, Homo sapiens
  misc_RNA (1)...(19): siRNA sense strand
aaauggaaccacaugggaa

SEQ ID NO: 2595767 - RNA, 19 nt, Homo sapiens
  misc_RNA (1)...(19): siRNA sense strand
gacaagucuuacagaacau

SEQ ID NO: 2595768 - RNA, 19 nt, Homo sapiens
  misc_RNA (1)...(19): siRNA sense strand
ccacaugggaagacaucca

SEQ ID NO: 2595769 - RNA, 19 nt, Homo sapiens
  misc_RNA (1)...(19): siRNA sense strand
gaacugugcuuauucgaca

SEQ ID NO: 2595770 - RNA, 19 nt, Homo sapiens
  misc_RNA (1)...(19): siRNA sense strand
aaucuguccaggagaagaa

SEQ ID NO: 2595771 - RNA, 19 nt, Homo sapiens
  misc_RNA (1)...(19): siRNA sense strand
guggaaaagccuucagaca

SEQ ID NO: 2595772 - RNA, 19 nt, Homo sapiens
  misc_RNA (1)...(19): siRNA sense strand
ggauuuagagagagaacug

SEQ ID NO: 2595773 - RNA, 19 nt, Homo sapiens
  misc_RNA (1)...(19): siRNA sense strand
caaugugaugaguguggaa

SEQ ID NO: 2595774 - RNA, 19 nt, Homo sapiens
  misc_RNA (1)...(19): siRNA sense strand
cuccagagaagauaaacaa

SEQ ID NO: 2595775 - RNA, 19 nt, Homo sapiens
  misc_RNA (1)...(19): siRNA sense strand
ggaugugaugacuguggaa

SEQ ID NO: 2595776 - RNA, 19 nt, Homo sapiens
  misc_RNA (1)...(19): siRNA sense strand
augugaugacuguggaaaa

SEQ ID NO: 2595777 - RNA, 19 nt, Homo sapiens
  misc_RNA (1)...(19): siRNA sense strand
gagugcaacgaguguggaa

SEQ ID NO: 2595778 - RNA, 19 nt, Homo sapiens
  misc_RNA (1)...(19): siRNA sense strand
gagagaacuggaugaacca

SEQ ID NO: 2595779 - RNA, 19 nt, Homo sapiens
  misc_RNA (1)...(19): siRNA sense strand
agauguugagacuggaaau

SEQ ID NO: 2595780 - RNA, 19 nt, Homo sapiens
  misc_RNA (1)...(19): siRNA sense strand
cagagaagauaaacaaccu

SEQ ID NO: 2595781 - RNA, 19 nt, Homo sapiens
  misc_RNA (1)...(19): siRNA sense strand
cagaagugaugaaggccau

SEQ ID NO: 2595782 - RNA, 19 nt, Homo sapiens
  misc_RNA (1)...(19): siRNA sense strand
augaggaggaggaggaaga

SEQ ID NO: 2595783 - RNA, 19 nt, Homo sapiens
  misc_RNA (1)...(19): siRNA sense strand
aggaugaggaggaggagga

SEQ ID NO: 2595784 - RNA, 19 nt, Homo sapiens
  misc_RNA (1)...(19): siRNA sense strand
ggaucauagaggagauguu

SEQ ID NO: 2595785 - RNA, 19 nt, Homo sapiens
  misc_RNA (1)...(19): siRNA sense strand
aggaagaagcagaaaugga

SEQ ID NO: 2595786 - RNA, 19 nt, Homo sapiens
  misc_RNA (1)...(19): siRNA sense strand
uguccaaagaaaugaugaa

SEQ ID NO: 2595787 - RNA, 19 nt, Homo sapiens
  misc_RNA (1)...(19): siRNA sense strand
gagaguuguugacaggcaa

SEQ ID NO: 2595788 - RNA, 19 nt, Homo sapiens
  misc_RNA (1)...(19): siRNA sense strand
aagaagcagaaauggaaau

SEQ ID NO: 2595789 - RNA, 19 nt, Homo sapiens
  misc_RNA (1)...(19): siRNA sense strand
aaggagaugaucaggucaa

SEQ ID NO: 2595790 - RNA, 19 nt, Homo sapiens
  misc_RNA (1)...(19): siRNA sense strand
cagaggaugaggaggagga

SEQ ID NO: 2595791 - RNA, 19 nt, Homo sapiens
  misc_RNA (1)...(19): siRNA sense strand
gcacagaagugaugaaggc

SEQ ID NO: 2595792 - RNA, 19 nt, Homo sapiens
  misc_RNA (1)...(19): siRNA sense strand
uggacgaucaggaagaaau

SEQ ID NO: 2595793 - RNA, 19 nt, Homo sapiens
  misc_RNA (1)...(19): siRNA sense strand
cgcccaaagaacuggucaa

SEQ ID NO: 2595794 - RNA, 19 nt, Homo sapiens
  misc_RNA (1)...(19): siRNA sense strand
ccaugagggaguuguccaa

SEQ ID NO: 2595795 - RNA, 19 nt, Homo sapiens
  misc_RNA (1)...(19): siRNA sense strand
uggaggaagaagcagaaau

SEQ ID NO: 2595796 - RNA, 19 nt, Homo sapiens
  misc_RNA (1)...(19): siRNA sense strand
uccaaagagaagaagaaaa

SEQ ID NO: 2595797 - RNA, 19 nt, Homo sapiens
  misc_RNA (1)...(19): siRNA sense strand
agggauauccaaagagaag

SEQ ID NO: 2595798 - RNA, 19 nt, Homo sapiens
  misc_RNA (1)...(19): siRNA sense strand
aaauggaggaagaagcaga

SEQ ID NO: 2595799 - RNA, 19 nt, Homo sapiens
  misc_RNA (1)...(19): siRNA sense strand
ccaaagaaaugaugaaggc

SEQ ID NO: 2595800 - RNA, 19 nt, Homo sapiens
  misc_RNA (1)...(19): siRNA sense strand
gggccauggaggagcgaua

SEQ ID NO: 2595801 - RNA, 19 nt, Homo sapiens
  misc_RNA (1)...(19): siRNA sense strand
aggcauggcuccagggcau

SEQ ID NO: 2595802 - RNA, 19 nt, Homo sapiens
  misc_RNA (1)...(19): siRNA sense strand
gccgcaaccuggaggaaaa

SEQ ID NO: 2595803 - RNA, 19 nt, Homo sapiens
  misc_RNA (1)...(19): siRNA sense strand
gcagaagcuucaugaggca

SEQ ID NO: 2595804 - RNA, 19 nt, Homo sapiens
  misc_RNA (1)...(19): siRNA sense strand
gggaguacauugaggagcu

SEQ ID NO: 2595805 - RNA, 19 nt, Homo sapiens
  misc_RNA (1)...(19): siRNA sense strand
caccagagacguauggcaa

SEQ ID NO: 2595806 - RNA, 19 nt, Homo sapiens
  misc_RNA (1)...(19): siRNA sense strand
aggaccacauccagagaau

SEQ ID NO: 2595807 - RNA, 19 nt, Homo sapiens
  misc_RNA (1)...(19): siRNA sense strand
ggucccaacuggaagcuga

SEQ ID NO: 2595808 - RNA, 19 nt, Homo sapiens
  misc_RNA (1)...(19): siRNA sense strand
agucggugacaaaggagaa

SEQ ID NO: 2595809 - RNA, 19 nt, Homo sapiens
  misc_RNA (1)...(19): siRNA sense strand
gcaagagaaugcagggcug

SEQ ID NO: 2595810 - RNA, 19 nt, Homo sapiens
  misc_RNA (1)...(19): siRNA sense strand
agcaguugcaggaggagaa

SEQ ID NO: 2595811 - RNA, 19 nt, Homo sapiens
  misc_RNA (1)...(19): siRNA sense strand
acaacuggaggaugagcua

SEQ ID NO: 2595812 - RNA, 19 nt, Homo sapiens
  misc_RNA (1)...(19): siRNA sense strand
cagaagagcaucucccaga

SEQ ID NO: 2595813 - RNA, 19 nt, Homo sapiens
  misc_RNA (1)...(19): siRNA sense strand
ggagaguggcagggaggau

SEQ ID NO: 2595814 - RNA, 19 nt, Homo sapiens
  misc_RNA (1)...(19): siRNA sense strand
agaaagcccugcaggagca

SEQ ID NO: 2595815 - RNA, 19 nt, Homo sapiens
  misc_RNA (1)...(19): siRNA sense strand
uugcagaggaagcgggagu

SEQ ID NO: 2595816 - RNA, 19 nt, Homo sapiens
  misc_RNA (1)...(19): siRNA sense strand
aaguaugagucggugacaa

SEQ ID NO: 2595817 - RNA, 19 nt, Homo sapiens
  misc_RNA (1)...(19): siRNA sense strand
uggagauggacuuugagaa

SEQ ID NO: 2595818 - RNA, 19 nt, Homo sapiens
  misc_RNA (1)...(19): siRNA sense strand
ggaaagaaauucagaccca

SEQ ID NO: 2595819 - RNA, 19 nt, Homo sapiens
  misc_RNA (1)...(19): siRNA sense strand
aggaaggccaagagagcaa

SEQ ID NO: 2595820 - RNA, 19 nt, Homo sapiens
  misc_RNA (1)...(19): siRNA sense strand
gaggcaagauugaaggaga

SEQ ID NO: 2595821 - RNA, 19 nt, Homo sapiens
  misc_RNA (1)...(19): siRNA sense strand
uggaggagaucgagggcuu

SEQ ID NO: 2595822 - RNA, 19 nt, Homo sapiens
  misc_RNA (1)...(19): siRNA sense strand
aggcaagauugaaggagau

SEQ ID NO: 2595823 - RNA, 19 nt, Homo sapiens
  misc_RNA (1)...(19): siRNA sense strand
ccucacaagaagcggaaga

SEQ ID NO: 2595824 - RNA, 19 nt, Homo sapiens
  misc_RNA (1)...(19): siRNA sense strand
ccaucgagcuggcaggaca

SEQ ID NO: 2595825 - RNA, 19 nt, Homo sapiens
  misc_RNA (1)...(19): siRNA sense strand
cgcuaacaacccaggcaua

SEQ ID NO: 2595826 - RNA, 19 nt, Homo sapiens
  misc_RNA (1)...(19): siRNA sense strand
agcacaaaggaaagaaauu

SEQ ID NO: 2595827 - RNA, 19 nt, Homo sapiens
  misc_RNA (1)...(19): siRNA sense strand
gggauguccgaguggccaa

SEQ ID NO: 2595828 - RNA, 19 nt, Homo sapiens
  misc_RNA (1)...(19): siRNA sense strand
ucugagaagcuuaagacau

SEQ ID NO: 2595829 - RNA, 19 nt, Homo sapiens
  misc_RNA (1)...(19): siRNA sense strand
aggcaagauugaggagcuu

SEQ ID NO: 2595830 - RNA, 19 nt, Homo sapiens
  misc_RNA (1)...(19): siRNA sense strand
ccuuuggcuuugaagaaga

SEQ ID NO: 2595831 - RNA, 19 nt, Homo sapiens
  misc_RNA (1)...(19): siRNA sense strand
cggcaagcacaguccauga

SEQ ID NO: 2595832 - RNA, 19 nt, Homo sapiens
  misc_RNA (1)...(19): siRNA sense strand
aagcacaaaggaaagaaau

SEQ ID NO: 2595833 - RNA, 19 nt, Homo sapiens
  misc_RNA (1)...(19): siRNA sense strand
accaaguggcacaggaaau

SEQ ID NO: 2595834 - RNA, 19 nt, Homo sapiens
  misc_RNA (1)...(19): siRNA sense strand
cuaccaaguggcacaggaa

SEQ ID NO: 2595835 - RNA, 19 nt, Homo sapiens
  misc_RNA (1)...(19): siRNA sense strand
ccuccaaggugucaagcca

SEQ ID NO: 2595836 - RNA, 19 nt, Homo sapiens
  misc_RNA (1)...(19): siRNA sense strand
aguuuagucccuuggguuu

SEQ ID NO: 2595837 - RNA, 19 nt, Homo sapiens
  misc_RNA (1)...(19): siRNA sense strand
cauucuaccaaguggcaca

SEQ ID NO: 2595838 - RNA, 19 nt, Homo sapiens
  misc_RNA (1)...(19): siRNA sense strand
cucugaaacuggagcacuu

SEQ ID NO: 2595839 - RNA, 19 nt, Homo sapiens
  misc_RNA (1)...(19): siRNA sense strand
acacaggaggaauuggauu

SEQ ID NO: 2595840 - RNA, 19 nt, Homo sapiens
  misc_RNA (1)...(19): siRNA sense strand
aguacguggcucugggaga

SEQ ID NO: 2595841 - RNA, 19 nt, Homo sapiens
  misc_RNA (1)...(19): siRNA sense strand
acucaagauguuagggcua

SEQ ID NO: 2595842 - RNA, 19 nt, Homo sapiens
  misc_RNA (1)...(19): siRNA sense strand
auguuagggcuaugggaaa

SEQ ID NO: 2595843 - RNA, 19 nt, Homo sapiens
  misc_RNA (1)...(19): siRNA sense strand
gggaagaaccagaugcaag

SEQ ID NO: 2595844 - RNA, 19 nt, Homo sapiens
  misc_RNA (1)...(19): siRNA sense strand
ugaucuuaucggugacuua

SEQ ID NO: 2595845 - RNA, 19 nt, Homo sapiens
  misc_RNA (1)...(19): siRNA sense strand
gcuacaagaagaugaugau

SEQ ID NO: 2595846 - RNA, 19 nt, Homo sapiens
  misc_RNA (1)...(19): siRNA sense strand
ugaugcagucacaaagaaa

SEQ ID NO: 2595847 - RNA, 19 nt, Homo sapiens
  misc_RNA (1)...(19): siRNA sense strand
gauguuagggcuaugggaa

SEQ ID NO: 2595848 - RNA, 19 nt, Homo sapiens
  misc_RNA (1)...(19): siRNA sense strand
cugcauuucacaaaggcua

SEQ ID NO: 2595849 - RNA, 19 nt, Homo sapiens
  misc_RNA (1)...(19): siRNA sense strand
uguaugaugcagucacaaa

SEQ ID NO: 2595850 - RNA, 19 nt, Homo sapiens
  misc_RNA (1)...(19): siRNA sense strand
ucauuugaggaaagacuaa

SEQ ID NO: 2595851 - RNA, 19 nt, Homo sapiens
  misc_RNA (1)...(19): siRNA sense strand
augcaaguggccacaaaua

SEQ ID NO: 2595852 - RNA, 19 nt, Homo sapiens
  misc_RNA (1)...(19): siRNA sense strand
ggucauacuaagugcuugu

SEQ ID NO: 2595853 - RNA, 19 nt, Homo sapiens
  misc_RNA (1)...(19): siRNA sense strand
cccagaagccaucgcgauu

SEQ ID NO: 2595854 - RNA, 19 nt, Homo sapiens
  misc_RNA (1)...(19): siRNA sense strand
aauuaggugaccaugguua

SEQ ID NO: 2595855 - RNA, 19 nt, Homo sapiens
  misc_RNA (1)...(19): siRNA sense strand
gcugauuaucugaagaacu

SEQ ID NO: 2595856 - RNA, 19 nt, Homo sapiens
  misc_RNA (1)...(19): siRNA sense strand
uguuagggcuaugggaaaa

SEQ ID NO: 2595857 - RNA, 19 nt, Homo sapiens
  misc_RNA (1)...(19): siRNA sense strand
aggcuggacaauugugcua

SEQ ID NO: 2595858 - RNA, 19 nt, Homo sapiens
  misc_RNA (1)...(19): siRNA sense strand
ugaaagagauggaugguca

SEQ ID NO: 2595859 - RNA, 19 nt, Homo sapiens
  misc_RNA (1)...(19): siRNA sense strand
gaagaguauuugagcccaa

SEQ ID NO: 2595860 - RNA, 19 nt, Homo sapiens
  misc_RNA (1)...(19): siRNA sense strand
agucgugcuuaaagacaaa

SEQ ID NO: 2595861 - RNA, 19 nt, Homo sapiens
  misc_RNA (1)...(19): siRNA sense strand
uuaaagacaaagaggacau

SEQ ID NO: 2595862 - RNA, 19 nt, Homo sapiens
  misc_RNA (1)...(19): siRNA sense strand
gcuuaaagacaaagaggac

SEQ ID NO: 2595863 - RNA, 19 nt, Homo sapiens
  misc_RNA (1)...(19): siRNA sense strand
cagcaguguucgaguugau

SEQ ID NO: 2595864 - RNA, 19 nt, Homo sapiens
  misc_RNA (1)...(19): siRNA sense strand
aagacaaagaggacaucua

SEQ ID NO: 2595865 - RNA, 19 nt, Homo sapiens
  misc_RNA (1)...(19): siRNA sense strand
gguuacacagcuugaauau

SEQ ID NO: 2595866 - RNA, 19 nt, Homo sapiens
  misc_RNA (1)...(19): siRNA sense strand
ccuagagaaagaugaugaa

SEQ ID NO: 2595867 - RNA, 19 nt, Homo sapiens
  misc_RNA (1)...(19): siRNA sense strand
gcugauacuuuauugggau

SEQ ID NO: 2595868 - RNA, 19 nt, Homo sapiens
  misc_RNA (1)...(19): siRNA sense strand
cuccaagcccuguguuaaa

SEQ ID NO: 2595869 - RNA, 19 nt, Homo sapiens
  misc_RNA (1)...(19): siRNA sense strand
cagaacaucaagaucacaa

SEQ ID NO: 2595870 - RNA, 19 nt, Homo sapiens
  misc_RNA (1)...(19): siRNA sense strand
cugcaaaacagaacaucaa

SEQ ID NO: 2595871 - RNA, 19 nt, Homo sapiens
  misc_RNA (1)...(19): siRNA sense strand
ucuggaagagacugugaaa

SEQ ID NO: 2595872 - RNA, 19 nt, Homo sapiens
  misc_RNA (1)...(19): siRNA sense strand
guuaccaugaggaggauuu

SEQ ID NO: 2595873 - RNA, 19 nt, Homo sapiens
  misc_RNA (1)...(19): siRNA sense strand
gaggaggauuucuggccuu

SEQ ID NO: 2595874 - RNA, 19 nt, Homo sapiens
  misc_RNA (1)...(19): siRNA sense strand
cagccucuuauaagggaaa

SEQ ID NO: 2595875 - RNA, 19 nt, Homo sapiens
  misc_RNA (1)...(19): siRNA sense strand
cuucaaacugcgaugagau

SEQ ID NO: 2595876 - RNA, 19 nt, Homo sapiens
  misc_RNA (1)...(19): siRNA sense strand
ggagagacuucgaugacuc

SEQ ID NO: 2595877 - RNA, 19 nt, Homo sapiens
  misc_RNA (1)...(19): siRNA sense strand
ugaugaacuggaacugaaa

SEQ ID NO: 2595878 - RNA, 19 nt, Homo sapiens
  misc_RNA (1)...(19): siRNA sense strand
cagguuaccaugaggagga

SEQ ID NO: 2595879 - RNA, 19 nt, Homo sapiens
  misc_RNA (1)...(19): siRNA sense strand
caucaagaucacaaaagaa

SEQ ID NO: 2595880 - RNA, 19 nt, Homo sapiens
  misc_RNA (1)...(19): siRNA sense strand
ugaaaucacaucaggcuca

SEQ ID NO: 2595881 - RNA, 19 nt, Homo sapiens
  misc_RNA (1)...(19): siRNA sense strand
uugagaacagcauggacaa

SEQ ID NO: 2595882 - RNA, 19 nt, Homo sapiens
  misc_RNA (1)...(19): siRNA sense strand
aggacaagaaggagcggaa

SEQ ID NO: 2595883 - RNA, 19 nt, Homo sapiens
  misc_RNA (1)...(19): siRNA sense strand
ccuccaaggacaagaagga

SEQ ID NO: 2595884 - RNA, 19 nt, Homo sapiens
  misc_RNA (1)...(19): siRNA sense strand
gggaagcccaagaaggaga

SEQ ID NO: 2595885 - RNA, 19 nt, Homo sapiens
  misc_RNA (1)...(19): siRNA sense strand
uauaguaacugcugggcaa

SEQ ID NO: 2595886 - RNA, 19 nt, Homo sapiens
  misc_RNA (1)...(19): siRNA sense strand
caaagaaugaaaagggaua

SEQ ID NO: 2595887 - RNA, 19 nt, Homo sapiens
  misc_RNA (1)...(19): siRNA sense strand
ugucuacaguugagggcua

SEQ ID NO: 2595888 - RNA, 19 nt, Homo sapiens
  misc_RNA (1)...(19): siRNA sense strand
guggauaugcuaaggaaaa

SEQ ID NO: 2595889 - RNA, 19 nt, Homo sapiens
  misc_RNA (1)...(19): siRNA sense strand
agugaaagcgggagaacga

SEQ ID NO: 2595890 - RNA, 19 nt, Homo sapiens
  misc_RNA (1)...(19): siRNA sense strand
accagaaacuaaagggaca

SEQ ID NO: 2595891 - RNA, 19 nt, Homo sapiens
  misc_RNA (1)...(19): siRNA sense strand
cagccaguguuauaggaaa

SEQ ID NO: 2595892 - RNA, 19 nt, Homo sapiens
  misc_RNA (1)...(19): siRNA sense strand
ccacagugaaagcgggaga

SEQ ID NO: 2595893 - RNA, 19 nt, Homo sapiens
  misc_RNA (1)...(19): siRNA sense strand
ggauacagauucaggguug

SEQ ID NO: 2595894 - RNA, 19 nt, Homo sapiens
  misc_RNA (1)...(19): siRNA sense strand
ggagcauuccagugacuaa

SEQ ID NO: 2595895 - RNA, 19 nt, Homo sapiens
  misc_RNA (1)...(19): siRNA sense strand
gguggauaugcuaaggaaa

SEQ ID NO: 2595896 - RNA, 19 nt, Homo sapiens
  misc_RNA (1)...(19): siRNA sense strand
cugaaguugaugaaacaua

SEQ ID NO: 2595897 - RNA, 19 nt, Homo sapiens
  misc_RNA (1)...(19): siRNA sense strand
aagauacagcaaugaguua

SEQ ID NO: 2595898 - RNA, 19 nt, Homo sapiens
  misc_RNA (1)...(19): siRNA sense strand
agucguugguuauggaaaa

SEQ ID NO: 2595899 - RNA, 19 nt, Homo sapiens
  misc_RNA (1)...(19): siRNA sense strand
gauacaauaaacagcacaa

SEQ ID NO: 2595900 - RNA, 19 nt, Homo sapiens
  misc_RNA (1)...(19): siRNA sense strand
guaccaaaucugaaguuga

SEQ ID NO: 2595901 - RNA, 19 nt, Homo sapiens
  misc_RNA (1)...(19): siRNA sense strand
caagcaagucguugguuau

SEQ ID NO: 2595902 - RNA, 19 nt, Homo sapiens
  misc_RNA (1)...(19): siRNA sense strand
acaagauaauccaagucaa

SEQ ID NO: 2595903 - RNA, 19 nt, Homo sapiens
  misc_RNA (1)...(19): siRNA sense strand
uaucagauucucaggaaga

SEQ ID NO: 2595904 - RNA, 19 nt, Homo sapiens
  misc_RNA (1)...(19): siRNA sense strand
ccaaauaugcaaggaguca

SEQ ID NO: 2595905 - RNA, 19 nt, Homo sapiens
  misc_RNA (1)...(19): siRNA sense strand
gcaucucaaagguaggaaa

SEQ ID NO: 2595906 - RNA, 19 nt, Homo sapiens
  misc_RNA (1)...(19): siRNA sense strand
aauucaagaccaagaccaa

SEQ ID NO: 2595907 - RNA, 19 nt, Homo sapiens
  misc_RNA (1)...(19): siRNA sense strand
ggcaguuguuaaagaugaa

SEQ ID NO: 2595908 - RNA, 19 nt, Homo sapiens
  misc_RNA (1)...(19): siRNA sense strand
cugugaugguaccagaaua

SEQ ID NO: 2595909 - RNA, 19 nt, Homo sapiens
  misc_RNA (1)...(19): siRNA sense strand
acgaaagcgaagauucaaa

SEQ ID NO: 2595910 - RNA, 19 nt, Homo sapiens
  misc_RNA (1)...(19): siRNA sense strand
acagcuugcuuaagaaaca

SEQ ID NO: 2595911 - RNA, 19 nt, Homo sapiens
  misc_RNA (1)...(19): siRNA sense strand
gggauauggaccagcuaca

SEQ ID NO: 2595912 - RNA, 19 nt, Homo sapiens
  misc_RNA (1)...(19): siRNA sense strand
ggauggacccucacagaca

SEQ ID NO: 2595913 - RNA, 19 nt, Homo sapiens
  misc_RNA (1)...(19): siRNA sense strand
cugaacagccagccacaaa

SEQ ID NO: 2595914 - RNA, 19 nt, Homo sapiens
  misc_RNA (1)...(19): siRNA sense strand
ugugaugguaccagaauau

SEQ ID NO: 2595915 - RNA, 19 nt, Homo sapiens
  misc_RNA (1)...(19): siRNA sense strand
gguugaauauggaagauac

SEQ ID NO: 2595916 - RNA, 19 nt, Homo sapiens
  misc_RNA (1)...(19): siRNA sense strand
agcgaagauucaaacaaua

SEQ ID NO: 2595917 - RNA, 19 nt, Homo sapiens
  misc_RNA (1)...(19): siRNA sense strand
caucucaaagguaggaaau

SEQ ID NO: 2595918 - RNA, 19 nt, Homo sapiens
  misc_RNA (1)...(19): siRNA sense strand
ugaugguaccagaauauua

SEQ ID NO: 2595919 - RNA, 19 nt, Homo sapiens
  misc_RNA (1)...(19): siRNA sense strand
uuuaugaguuggagcuaca

SEQ ID NO: 2595920 - RNA, 19 nt, Homo sapiens
  misc_RNA (1)...(19): siRNA sense strand
aacaguaauuccugaaaca

SEQ ID NO: 2595921 - RNA, 19 nt, Homo sapiens
  misc_RNA (1)...(19): siRNA sense strand
uuuaaagcacugacggauu

SEQ ID NO: 2595922 - RNA, 19 nt, Homo sapiens
  misc_RNA (1)...(19): siRNA sense strand
cuaacaacauucaguacca

SEQ ID NO: 2595923 - RNA, 19 nt, Homo sapiens
  misc_RNA (1)...(19): siRNA sense strand
gggaaaauacugagacuuc

SEQ ID NO: 2595924 - RNA, 19 nt, Homo sapiens
  misc_RNA (1)...(19): siRNA sense strand
gauacaacagaguggacca

SEQ ID NO: 2595925 - RNA, 19 nt, Homo sapiens
  misc_RNA (1)...(19): siRNA sense strand
gcacacaaacuaugguaac

SEQ ID NO: 2595926 - RNA, 19 nt, Homo sapiens
  misc_RNA (1)...(19): siRNA sense strand
gggagaacgacaauggugu

SEQ ID NO: 2595927 - RNA, 19 nt, Homo sapiens
  misc_RNA (1)...(19): siRNA sense strand
agaucuuguuccaggcaca

SEQ ID NO: 2595928 - RNA, 19 nt, Homo sapiens
  misc_RNA (1)...(19): siRNA sense strand
ggcacaggauacagauuca

SEQ ID NO: 2595929 - RNA, 19 nt, Homo sapiens
  misc_RNA (1)...(19): siRNA sense strand
guugaauauggaagauaca

SEQ ID NO: 2595930 - RNA, 19 nt, Homo sapiens
  misc_RNA (1)...(19): siRNA sense strand
cagucagaauuucaaagaa

SEQ ID NO: 2595931 - RNA, 19 nt, Homo sapiens
  misc_RNA (1)...(19): siRNA sense strand
aaagaauguugaagguauc

SEQ ID NO: 2595932 - RNA, 19 nt, Homo sapiens
  misc_RNA (1)...(19): siRNA sense strand
ggaguggaagagauggcua

SEQ ID NO: 2595933 - RNA, 19 nt, Homo sapiens
  misc_RNA (1)...(19): siRNA sense strand
caccaaauaugcaaggagu

SEQ ID NO: 2595934 - RNA, 19 nt, Homo sapiens
  misc_RNA (1)...(19): siRNA sense strand
cuggauguaagaacaguaa

SEQ ID NO: 2595935 - RNA, 19 nt, Homo sapiens
  misc_RNA (1)...(19): siRNA sense strand
aaucugaaguugaugaaac

SEQ ID NO: 2595936 - RNA, 19 nt, Homo sapiens
  misc_RNA (1)...(19): siRNA sense strand
gcaaagaaugaaaagggau

SEQ ID NO: 2595937 - RNA, 19 nt, Homo sapiens
  misc_RNA (1)...(19): siRNA sense strand
gcuucucuuuauaugguaa

SEQ ID NO: 2595938 - RNA, 19 nt, Homo sapiens
  misc_RNA (1)...(19): siRNA sense strand
aguaucagauucucaggaa

SEQ ID NO: 2595939 - RNA, 19 nt, Homo sapiens
  misc_RNA (1)...(19): siRNA sense strand
cugacuacagcuugcuuaa

SEQ ID NO: 2595940 - RNA, 19 nt, Homo sapiens
  misc_RNA (1)...(19): siRNA sense strand
cuacagcuugcuuaagaaa

SEQ ID NO: 2595941 - RNA, 19 nt, Homo sapiens
  misc_RNA (1)...(19): siRNA sense strand
gagcagaacuugauggaga

SEQ ID NO: 2595942 - RNA, 19 nt, Homo sapiens
  misc_RNA (1)...(19): siRNA sense strand
gcagaaaacaaaagaggaa

SEQ ID NO: 2595943 - RNA, 19 nt, Homo sapiens
  misc_RNA (1)...(19): siRNA sense strand
cgggaagaacacagugaaa

SEQ ID NO: 2595944 - RNA, 19 nt, Homo sapiens
  misc_RNA (1)...(19): siRNA sense strand
gggaaaaugaacagaaauu

SEQ ID NO: 2595945 - RNA, 19 nt, Homo sapiens
  misc_RNA (1)...(19): siRNA sense strand
gcuguaaaauugaggagaa

SEQ ID NO: 2595946 - RNA, 19 nt, Homo sapiens
  misc_RNA (1)...(19): siRNA sense strand
ggggauuaaugcagauaua

SEQ ID NO: 2595947 - RNA, 19 nt, Homo sapiens
  misc_RNA (1)...(19): siRNA sense strand
cauaagcaagaaagagaaa

SEQ ID NO: 2595948 - RNA, 19 nt, Homo sapiens
  misc_RNA (1)...(19): siRNA sense strand
acuaagggacuaagaacaa

SEQ ID NO: 2595949 - RNA, 19 nt, Homo sapiens
  misc_RNA (1)...(19): siRNA sense strand
agacaacugauuagacaaa

SEQ ID NO: 2595950 - RNA, 19 nt, Homo sapiens
  misc_RNA (1)...(19): siRNA sense strand
ccugucacauauagagaaa

SEQ ID NO: 2595951 - RNA, 19 nt, Homo sapiens
  misc_RNA (1)...(19): siRNA sense strand
gguggaaagaagaagaaaa

SEQ ID NO: 2595952 - RNA, 19 nt, Homo sapiens
  misc_RNA (1)...(19): siRNA sense strand
aggaauaugaaaugcagaa

SEQ ID NO: 2595953 - RNA, 19 nt, Homo sapiens
  misc_RNA (1)...(19): siRNA sense strand
gggaaagaacagaaggaac

SEQ ID NO: 2595954 - RNA, 19 nt, Homo sapiens
  misc_RNA (1)...(19): siRNA sense strand
gaaaaggauagaagagcua

SEQ ID NO: 2595955 - RNA, 19 nt, Homo sapiens
  misc_RNA (1)...(19): siRNA sense strand
cuguaaaauugaggagaaa

SEQ ID NO: 2595956 - RNA, 19 nt, Homo sapiens
  misc_RNA (1)...(19): siRNA sense strand
aggagaacaucaugaacau

SEQ ID NO: 2595957 - RNA, 19 nt, Homo sapiens
  misc_RNA (1)...(19): siRNA sense strand
gcgccaucgacguggacaa

SEQ ID NO: 2595958 - RNA, 19 nt, Homo sapiens
  misc_RNA (1)...(19): siRNA sense strand
guucagaggaggagcagga

SEQ ID NO: 2595959 - RNA, 19 nt, Homo sapiens
  misc_RNA (1)...(19): siRNA sense strand
aguccaauaugcagaucaa

SEQ ID NO: 2595960 - RNA, 19 nt, Homo sapiens
  misc_RNA (1)...(19): siRNA sense strand
aagaagaagaaaaggagaa

SEQ ID NO: 2595961 - RNA, 19 nt, Homo sapiens
  misc_RNA (1)...(19): siRNA sense strand
gugacugauuggagcgaca

SEQ ID NO: 2595962 - RNA, 19 nt, Homo sapiens
  misc_RNA (1)...(19): siRNA sense strand
ggaaagaagaagaaaagga

SEQ ID NO: 2595963 - RNA, 19 nt, Homo sapiens
  misc_RNA (1)...(19): siRNA sense strand
ggaaagaacagaaggaacc

SEQ ID NO: 2595964 - RNA, 19 nt, Homo sapiens
  misc_RNA (1)...(19): siRNA sense strand
agaacuugauggagaaacu

SEQ ID NO: 2595965 - RNA, 19 nt, Homo sapiens
  misc_RNA (1)...(19): siRNA sense strand
aggaggagcaggaggacga

SEQ ID NO: 2595966 - RNA, 19 nt, Homo sapiens
  misc_RNA (1)...(19): siRNA sense strand
guuaaaacaccuacugaaa

SEQ ID NO: 2595967 - RNA, 19 nt, Homo sapiens
  misc_RNA (1)...(19): siRNA sense strand
cgcucaaggaagagugcaa

SEQ ID NO: 2595968 - RNA, 19 nt, Homo sapiens
  misc_RNA (1)...(19): siRNA sense strand
aggccaaagccaacuauua

SEQ ID NO: 2595969 - RNA, 19 nt, Homo sapiens
  misc_RNA (1)...(19): siRNA sense strand
aguucaagcuauucaucaa

SEQ ID NO: 2595970 - RNA, 19 nt, Homo sapiens
  misc_RNA (1)...(19): siRNA sense strand
ggauagaagagcuagggca

SEQ ID NO: 2595971 - RNA, 19 nt, Homo sapiens
  misc_RNA (1)...(19): siRNA sense strand
gcuuaguaacugugacuga

SEQ ID NO: 2595972 - RNA, 19 nt, Homo sapiens
  misc_RNA (1)...(19): siRNA sense strand
gccaaagggagaaggacuu

SEQ ID NO: 2595973 - RNA, 19 nt, Homo sapiens
  misc_RNA (1)...(19): siRNA sense strand
cagaaauccagaaguccaa

SEQ ID NO: 2595974 - RNA, 19 nt, Homo sapiens
  misc_RNA (1)...(19): siRNA sense strand
gcuucuugauagucaggaa

SEQ ID NO: 2595975 - RNA, 19 nt, Homo sapiens
  misc_RNA (1)...(19): siRNA sense strand
gaacaaaccagucggugga

SEQ ID NO: 2595976 - RNA, 19 nt, Homo sapiens
  misc_RNA (1)...(19): siRNA sense strand
ggccaaagggagaaggacu

SEQ ID NO: 2595977 - RNA, 19 nt, Homo sapiens
  misc_RNA (1)...(19): siRNA sense strand
gugacaaggccuuuaugaa

SEQ ID NO: 2595978 - RNA, 19 nt, Homo sapiens
  misc_RNA (1)...(19): siRNA sense strand
ggaauaugaaaugcagaaa

SEQ ID NO: 2595979 - RNA, 19 nt, Homo sapiens
  misc_RNA (1)...(19): siRNA sense strand
aucaagaacacaagaaaga

SEQ ID NO: 2595980 - RNA, 19 nt, Homo sapiens
  misc_RNA (1)...(19): siRNA sense strand
guguggaaucagaaagaca

SEQ ID NO: 2595981 - RNA, 19 nt, Homo sapiens
  misc_RNA (1)...(19): siRNA sense strand
guggaaucagaaagacaua

SEQ ID NO: 2595982 - RNA, 19 nt, Homo sapiens
  misc_RNA (1)...(19): siRNA sense strand
gcgaaaucgaggacacuga

SEQ ID NO: 2595983 - RNA, 19 nt, Homo sapiens
  misc_RNA (1)...(19): siRNA sense strand
aaacaaaagaggaagacuu

SEQ ID NO: 2595984 - RNA, 19 nt, Homo sapiens
  misc_RNA (1)...(19): siRNA sense strand
ugacagguggaaagaagaa

SEQ ID NO: 2595985 - RNA, 19 nt, Homo sapiens
  misc_RNA (1)...(19): siRNA sense strand
ucaucaagaacacaagaaa

SEQ ID NO: 2595986 - RNA, 19 nt, Homo sapiens
  misc_RNA (1)...(19): siRNA sense strand
ugauuauaacucagagaca

SEQ ID NO: 2595987 - RNA, 19 nt, Homo sapiens
  misc_RNA (1)...(19): siRNA sense strand
acuggaaccaauagaagaa

SEQ ID NO: 2595988 - RNA, 19 nt, Homo sapiens
  misc_RNA (1)...(19): siRNA sense strand
agagauaucuuugggaaaa

SEQ ID NO: 2595989 - RNA, 19 nt, Homo sapiens
  misc_RNA (1)...(19): siRNA sense strand
caggagaacaucaugaaca

SEQ ID NO: 2595990 - RNA, 19 nt, Homo sapiens
  misc_RNA (1)...(19): siRNA sense strand
auggacagcucgaguucaa

SEQ ID NO: 2595991 - RNA, 19 nt, Homo sapiens
  misc_RNA (1)...(19): siRNA sense strand
agagaaacuucgaaccuca

SEQ ID NO: 2595992 - RNA, 19 nt, Homo sapiens
  misc_RNA (1)...(19): siRNA sense strand
agcagaacuugauggagaa

SEQ ID NO: 2595993 - RNA, 19 nt, Homo sapiens
  misc_RNA (1)...(19): siRNA sense strand
ccugagauguuuaucaaaa

SEQ ID NO: 2595994 - RNA, 19 nt, Homo sapiens
  misc_RNA (1)...(19): siRNA sense strand
agaaaacaaaagaggaaga

SEQ ID NO: 2595995 - RNA, 19 nt, Homo sapiens
  misc_RNA (1)...(19): siRNA sense strand
ggaaccaauagaagaacuu

SEQ ID NO: 2595996 - RNA, 19 nt, Homo sapiens
  misc_RNA (1)...(19): siRNA sense strand
cuggaaaccuuggggauua

SEQ ID NO: 2595997 - RNA, 19 nt, Homo sapiens
  misc_RNA (1)...(19): siRNA sense strand
ucuccaaggaauaugaaau

SEQ ID NO: 2595998 - RNA, 19 nt, Homo sapiens
  misc_RNA (1)...(19): siRNA sense strand
ugaucuaaaugcaagcaau

SEQ ID NO: 2595999 - RNA, 19 nt, Homo sapiens
  misc_RNA (1)...(19): siRNA sense strand
aagggaaaaugaacagaaa

SEQ ID NO: 2596000 - RNA, 19 nt, Homo sapiens
  misc_RNA (1)...(19): siRNA sense strand
gggaccgagggaagcgaaa

SEQ ID NO: 2596001 - RNA, 19 nt, Homo sapiens
  misc_RNA (1)...(19): siRNA sense strand
cggauguggaggaugaaga

SEQ ID NO: 2596002 - RNA, 19 nt, Homo sapiens
  misc_RNA (1)...(19): siRNA sense strand
gagcagaacuugauggaga

SEQ ID NO: 2596003 - RNA, 19 nt, Homo sapiens
  misc_RNA (1)...(19): siRNA sense strand
gcagaaaacaaaagaggaa

SEQ ID NO: 2596004 - RNA, 19 nt, Homo sapiens
  misc_RNA (1)...(19): siRNA sense strand
cgggaagaacacagugaaa

SEQ ID NO: 2596005 - RNA, 19 nt, Homo sapiens
  misc_RNA (1)...(19): siRNA sense strand
gggaaaaugaacagaaauu

SEQ ID NO: 2596006 - RNA, 19 nt, Homo sapiens
  misc_RNA (1)...(19): siRNA sense strand
gcuguaaaauugaggagaa

SEQ ID NO: 2596007 - RNA, 19 nt, Homo sapiens
  misc_RNA (1)...(19): siRNA sense strand
ggggauuaaugcagauaua

SEQ ID NO: 2596008 - RNA, 19 nt, Homo sapiens
  misc_RNA (1)...(19): siRNA sense strand
cauaagcaagaaagagaaa

SEQ ID NO: 2596009 - RNA, 19 nt, Homo sapiens
  misc_RNA (1)...(19): siRNA sense strand
acuaagggacuaagaacaa

SEQ ID NO: 2596010 - RNA, 19 nt, Homo sapiens
  misc_RNA (1)...(19): siRNA sense strand
agacaacugauuagacaaa

SEQ ID NO: 2596011 - RNA, 19 nt, Homo sapiens
  misc_RNA (1)...(19): siRNA sense strand
ccugucacauauagagaaa

SEQ ID NO: 2596012 - RNA, 19 nt, Homo sapiens
  misc_RNA (1)...(19): siRNA sense strand
gguggaaagaagaagaaaa

SEQ ID NO: 2596013 - RNA, 19 nt, Homo sapiens
  misc_RNA (1)...(19): siRNA sense strand
aggaauaugaaaugcagaa

SEQ ID NO: 2596014 - RNA, 19 nt, Homo sapiens
  misc_RNA (1)...(19): siRNA sense strand
gggaaagaacagaaggaac

SEQ ID NO: 2596015 - RNA, 19 nt, Homo sapiens
  misc_RNA (1)...(19): siRNA sense strand
gaaaaggauagaagagcua

SEQ ID NO: 2596016 - RNA, 19 nt, Homo sapiens
  misc_RNA (1)...(19): siRNA sense strand
cuguaaaauugaggagaaa

SEQ ID NO: 2596017 - RNA, 19 nt, Homo sapiens
  misc_RNA (1)...(19): siRNA sense strand
aggagaacaucaugaacau

SEQ ID NO: 2596018 - RNA, 19 nt, Homo sapiens
  misc_RNA (1)...(19): siRNA sense strand
gcgccaucgacguggacaa

SEQ ID NO: 2596019 - RNA, 19 nt, Homo sapiens
  misc_RNA (1)...(19): siRNA sense strand
guucagaggaggagcagga

SEQ ID NO: 2596020 - RNA, 19 nt, Homo sapiens
  misc_RNA (1)...(19): siRNA sense strand
aguccaauaugcagaucaa

SEQ ID NO: 2596021 - RNA, 19 nt, Homo sapiens
  misc_RNA (1)...(19): siRNA sense strand
aagaagaagaaaaggagaa

SEQ ID NO: 2596022 - RNA, 19 nt, Homo sapiens
  misc_RNA (1)...(19): siRNA sense strand
gugacugauuggagcgaca

SEQ ID NO: 2596023 - RNA, 19 nt, Homo sapiens
  misc_RNA (1)...(19): siRNA sense strand
ggaaagaagaagaaaagga

SEQ ID NO: 2596024 - RNA, 19 nt, Homo sapiens
  misc_RNA (1)...(19): siRNA sense strand
ggaaagaacagaaggaacc

SEQ ID NO: 2596025 - RNA, 19 nt, Homo sapiens
  misc_RNA (1)...(19): siRNA sense strand
agaacuugauggagaaacu

SEQ ID NO: 2596026 - RNA, 19 nt, Homo sapiens
  misc_RNA (1)...(19): siRNA sense strand
aggaggagcaggaggacga

SEQ ID NO: 2596027 - RNA, 19 nt, Homo sapiens
  misc_RNA (1)...(19): siRNA sense strand
guuaaaacaccuacugaaa

SEQ ID NO: 2596028 - RNA, 19 nt, Homo sapiens
  misc_RNA (1)...(19): siRNA sense strand
cgcucaaggaagagugcaa

SEQ ID NO: 2596029 - RNA, 19 nt, Homo sapiens
  misc_RNA (1)...(19): siRNA sense strand
aggccaaagccaacuauua

SEQ ID NO: 2596030 - RNA, 19 nt, Homo sapiens
  misc_RNA (1)...(19): siRNA sense strand
aguucaagcuauucaucaa

SEQ ID NO: 2596031 - RNA, 19 nt, Homo sapiens
  misc_RNA (1)...(19): siRNA sense strand
ggauagaagagcuagggca

SEQ ID NO: 2596032 - RNA, 19 nt, Homo sapiens
  misc_RNA (1)...(19): siRNA sense strand
gcuuaguaacugugacuga

SEQ ID NO: 2596033 - RNA, 19 nt, Homo sapiens
  misc_RNA (1)...(19): siRNA sense strand
gccaaagggagaaggacuu

SEQ ID NO: 2596034 - RNA, 19 nt, Homo sapiens
  misc_RNA (1)...(19): siRNA sense strand
cagaaauccagaaguccaa

SEQ ID NO: 2596035 - RNA, 19 nt, Homo sapiens
  misc_RNA (1)...(19): siRNA sense strand
gcuucuugauagucaggaa

SEQ ID NO: 2596036 - RNA, 19 nt, Homo sapiens
  misc_RNA (1)...(19): siRNA sense strand
gaacaaaccagucggugga

SEQ ID NO: 2596037 - RNA, 19 nt, Homo sapiens
  misc_RNA (1)...(19): siRNA sense strand
ggccaaagggagaaggacu

SEQ ID NO: 2596038 - RNA, 19 nt, Homo sapiens
  misc_RNA (1)...(19): siRNA sense strand
gugacaaggccuuuaugaa

SEQ ID NO: 2596039 - RNA, 19 nt, Homo sapiens
  misc_RNA (1)...(19): siRNA sense strand
ggaauaugaaaugcagaaa

SEQ ID NO: 2596040 - RNA, 19 nt, Homo sapiens
  misc_RNA (1)...(19): siRNA sense strand
aucaagaacacaagaaaga

SEQ ID NO: 2596041 - RNA, 19 nt, Homo sapiens
  misc_RNA (1)...(19): siRNA sense strand
guguggaaucagaaagaca

SEQ ID NO: 2596042 - RNA, 19 nt, Homo sapiens
  misc_RNA (1)...(19): siRNA sense strand
guggaaucagaaagacaua

SEQ ID NO: 2596043 - RNA, 19 nt, Homo sapiens
  misc_RNA (1)...(19): siRNA sense strand
gcgaaaucgaggacacuga

SEQ ID NO: 2596044 - RNA, 19 nt, Homo sapiens
  misc_RNA (1)...(19): siRNA sense strand
aaacaaaagaggaagacuu

SEQ ID NO: 2596045 - RNA, 19 nt, Homo sapiens
  misc_RNA (1)...(19): siRNA sense strand
ugacagguggaaagaagaa

SEQ ID NO: 2596046 - RNA, 19 nt, Homo sapiens
  misc_RNA (1)...(19): siRNA sense strand
ucaucaagaacacaagaaa

SEQ ID NO: 2596047 - RNA, 19 nt, Homo sapiens
  misc_RNA (1)...(19): siRNA sense strand
ugauuauaacucagagaca

SEQ ID NO: 2596048 - RNA, 19 nt, Homo sapiens
  misc_RNA (1)...(19): siRNA sense strand
acuggaaccaauagaagaa

SEQ ID NO: 2596049 - RNA, 19 nt, Homo sapiens
  misc_RNA (1)...(19): siRNA sense strand
agagauaucuuugggaaaa

SEQ ID NO: 2596050 - RNA, 19 nt, Homo sapiens
  misc_RNA (1)...(19): siRNA sense strand
caggagaacaucaugaaca

SEQ ID NO: 2596051 - RNA, 19 nt, Homo sapiens
  misc_RNA (1)...(19): siRNA sense strand
auggacagcucgaguucaa

SEQ ID NO: 2596052 - RNA, 19 nt, Homo sapiens
  misc_RNA (1)...(19): siRNA sense strand
agagaaacuucgaaccuca

SEQ ID NO: 2596053 - RNA, 19 nt, Homo sapiens
  misc_RNA (1)...(19): siRNA sense strand
agcagaacuugauggagaa

SEQ ID NO: 2596054 - RNA, 19 nt, Homo sapiens
  misc_RNA (1)...(19): siRNA sense strand
ccugagauguuuaucaaaa

SEQ ID NO: 2596055 - RNA, 19 nt, Homo sapiens
  misc_RNA (1)...(19): siRNA sense strand
agaaaacaaaagaggaaga

SEQ ID NO: 2596056 - RNA, 19 nt, Homo sapiens
  misc_RNA (1)...(19): siRNA sense strand
ggaaccaauagaagaacuu

SEQ ID NO: 2596057 - RNA, 19 nt, Homo sapiens
  misc_RNA (1)...(19): siRNA sense strand
cuggaaaccuuggggauua

SEQ ID NO: 2596058 - RNA, 19 nt, Homo sapiens
  misc_RNA (1)...(19): siRNA sense strand
ucuccaaggaauaugaaau

SEQ ID NO: 2596059 - RNA, 19 nt, Homo sapiens
  misc_RNA (1)...(19): siRNA sense strand
ugaucuaaaugcaagcaau

SEQ ID NO: 2596060 - RNA, 19 nt, Homo sapiens
  misc_RNA (1)...(19): siRNA sense strand
aagggaaaaugaacagaaa

SEQ ID NO: 2596061 - RNA, 19 nt, Homo sapiens
  misc_RNA (1)...(19): siRNA sense strand
gggaccgagggaagcgaaa

SEQ ID NO: 2596062 - RNA, 19 nt, Homo sapiens
  misc_RNA (1)...(19): siRNA sense strand
cggauguggaggaugaaga

SEQ ID NO: 2596063 - RNA, 19 nt, Homo sapiens
  misc_RNA (1)...(19): siRNA sense strand
cggaaaugcgcgagaugga

SEQ ID NO: 2596064 - RNA, 19 nt, Homo sapiens
  misc_RNA (1)...(19): siRNA sense strand
gggaagagcaaauggcauc

SEQ ID NO: 2596065 - RNA, 19 nt, Homo sapiens
  misc_RNA (1)...(19): siRNA sense strand
gagaagguucaguuggcaa

SEQ ID NO: 2596066 - RNA, 19 nt, Homo sapiens
  misc_RNA (1)...(19): siRNA sense strand
agaagguucaguuggcaaa

SEQ ID NO: 2596067 - RNA, 19 nt, Homo sapiens
  misc_RNA (1)...(19): siRNA sense strand
aaaccugaguggagggaag

SEQ ID NO: 2596068 - RNA, 19 nt, Homo sapiens
  misc_RNA (1)...(19): siRNA sense strand
uggaaaugauugagcagcu

SEQ ID NO: 2596069 - RNA, 19 nt, Homo sapiens
  misc_RNA (1)...(19): siRNA sense strand
aguggagggaagagcaaau

SEQ ID NO: 2596070 - RNA, 19 nt, Homo sapiens
  misc_RNA (1)...(19): siRNA sense strand
agaacaaagagucagugaa

SEQ ID NO: 2596071 - RNA, 19 nt, Homo sapiens
  misc_RNA (1)...(19): siRNA sense strand
augcagaugagaagguuca

SEQ ID NO: 2596072 - RNA, 19 nt, Homo sapiens
  misc_RNA (1)...(19): siRNA sense strand
ugaguggagggaagagcaa

SEQ ID NO: 2596073 - RNA, 19 nt, Homo sapiens
  misc_RNA (1)...(19): siRNA sense strand
cggaaaugcgcgagaugga

SEQ ID NO: 2596074 - RNA, 19 nt, Homo sapiens
  misc_RNA (1)...(19): siRNA sense strand
gggaagagcaaauggcauc

SEQ ID NO: 2596075 - RNA, 19 nt, Homo sapiens
  misc_RNA (1)...(19): siRNA sense strand
gagaagguucaguuggcaa

SEQ ID NO: 2596076 - RNA, 19 nt, Homo sapiens
  misc_RNA (1)...(19): siRNA sense strand
agaagguucaguuggcaaa

SEQ ID NO: 2596077 - RNA, 19 nt, Homo sapiens
  misc_RNA (1)...(19): siRNA sense strand
aaaccugaguggagggaag

SEQ ID NO: 2596078 - RNA, 19 nt, Homo sapiens
  misc_RNA (1)...(19): siRNA sense strand
uggaaaugauugagcagcu

SEQ ID NO: 2596079 - RNA, 19 nt, Homo sapiens
  misc_RNA (1)...(19): siRNA sense strand
aguggagggaagagcaaau

SEQ ID NO: 2596080 - RNA, 19 nt, Homo sapiens
  misc_RNA (1)...(19): siRNA sense strand
agaacaaagagucagugaa

SEQ ID NO: 2596081 - RNA, 19 nt, Homo sapiens
  misc_RNA (1)...(19): siRNA sense strand
augcagaugagaagguuca

SEQ ID NO: 2596082 - RNA, 19 nt, Homo sapiens
  misc_RNA (1)...(19): siRNA sense strand
ugaguggagggaagagcaa

SEQ ID NO: 2596083 - RNA, 19 nt, Homo sapiens
  misc_RNA (1)...(19): siRNA sense strand
cggaaaugcgcgagaugga

SEQ ID NO: 2596084 - RNA, 19 nt, Homo sapiens
  misc_RNA (1)...(19): siRNA sense strand
gggaagagcaaauggcauc

SEQ ID NO: 2596085 - RNA, 19 nt, Homo sapiens
  misc_RNA (1)...(19): siRNA sense strand
gagaagguucaguuggcaa

SEQ ID NO: 2596086 - RNA, 19 nt, Homo sapiens
  misc_RNA (1)...(19): siRNA sense strand
agaagguucaguuggcaaa

SEQ ID NO: 2596087 - RNA, 19 nt, Homo sapiens
  misc_RNA (1)...(19): siRNA sense strand
aaaccugaguggagggaag

SEQ ID NO: 2596088 - RNA, 19 nt, Homo sapiens
  misc_RNA (1)...(19): siRNA sense strand
uggaaaugauugagcagcu

SEQ ID NO: 2596089 - RNA, 19 nt, Homo sapiens
  misc_RNA (1)...(19): siRNA sense strand
aguggagggaagagcaaau

SEQ ID NO: 2596090 - RNA, 19 nt, Homo sapiens
  misc_RNA (1)...(19): siRNA sense strand
agaacaaagagucagugaa

SEQ ID NO: 2596091 - RNA, 19 nt, Homo sapiens
  misc_RNA (1)...(19): siRNA sense strand
augcagaugagaagguuca

SEQ ID NO: 2596092 - RNA, 19 nt, Homo sapiens
  misc_RNA (1)...(19): siRNA sense strand
ugaguggagggaagagcaa

SEQ ID NO: 2596093 - RNA, 19 nt, Homo sapiens
  misc_RNA (1)...(19): siRNA sense strand
ggauugaggaggagugcca

SEQ ID NO: 2596094 - RNA, 19 nt, Homo sapiens
  misc_RNA (1)...(19): siRNA sense strand
ccauggaagaggaggagga

SEQ ID NO: 2596095 - RNA, 19 nt, Homo sapiens
  misc_RNA (1)...(19): siRNA sense strand
acaagaagcuggagacgcu

SEQ ID NO: 2596096 - RNA, 19 nt, Homo sapiens
  misc_RNA (1)...(19): siRNA sense strand
aggacuggauugaggagga

SEQ ID NO: 2596097 - RNA, 19 nt, Homo sapiens
  misc_RNA (1)...(19): siRNA sense strand
acacagagauugaugaccu

SEQ ID NO: 2596098 - RNA, 19 nt, Homo sapiens
  misc_RNA (1)...(19): siRNA sense strand
gaaaggagaucaagcagcu

SEQ ID NO: 2596099 - RNA, 19 nt, Homo sapiens
  misc_RNA (1)...(19): siRNA sense strand
cagaacaagaagcuggaga

SEQ ID NO: 2596100 - RNA, 19 nt, Homo sapiens
  misc_RNA (1)...(19): siRNA sense strand
aguacuucguggacaucaa

SEQ ID NO: 2596101 - RNA, 19 nt, Homo sapiens
  misc_RNA (1)...(19): siRNA sense strand
agacaguggcuuugcagca

SEQ ID NO: 2596102 - RNA, 19 nt, Homo sapiens
  misc_RNA (1)...(19): siRNA sense strand
agaaagugacccaggccca

SEQ ID NO: 2596103 - RNA, 19 nt, Homo sapiens
  misc_RNA (1)...(19): siRNA sense strand
ggaucaugaacgaaaggaa

SEQ ID NO: 2596104 - RNA, 19 nt, Homo sapiens
  misc_RNA (1)...(19): siRNA sense strand
cugacagcuuugugagaca

SEQ ID NO: 2596105 - RNA, 19 nt, Homo sapiens
  misc_RNA (1)...(19): siRNA sense strand
ugagacagcaggaggcaca

SEQ ID NO: 2596106 - RNA, 19 nt, Homo sapiens
  misc_RNA (1)...(19): siRNA sense strand
gucaaggauaugugggaca

SEQ ID NO: 2596107 - RNA, 19 nt, Homo sapiens
  misc_RNA (1)...(19): siRNA sense strand
gaucaacaccagcgggacu

SEQ ID NO: 2596108 - RNA, 19 nt, Homo sapiens
  misc_RNA (1)...(19): siRNA sense strand
gaagaaacuuuuaccccaa

SEQ ID NO: 2596109 - RNA, 19 nt, Homo sapiens
  misc_RNA (1)...(19): siRNA sense strand
uuggagaagaugagggauc

SEQ ID NO: 2596110 - RNA, 19 nt, Homo sapiens
  misc_RNA (1)...(19): siRNA sense strand
auguagaaaaguuggagaa

SEQ ID NO: 2596111 - RNA, 19 nt, Homo sapiens
  misc_RNA (1)...(19): siRNA sense strand
ucccgaaggcagacgaaau

SEQ ID NO: 2596112 - RNA, 19 nt, Homo sapiens
  misc_RNA (1)...(19): siRNA sense strand
aggaagacgaggagggcau

SEQ ID NO: 2596113 - RNA, 19 nt, Homo sapiens
  misc_RNA (1)...(19): siRNA sense strand
acgaagaagaggaggacga

SEQ ID NO: 2596114 - RNA, 19 nt, Homo sapiens
  misc_RNA (1)...(19): siRNA sense strand
acgaggaggaggaggaaga

SEQ ID NO: 2596115 - RNA, 19 nt, Homo sapiens
  misc_RNA (1)...(19): siRNA sense strand
gcacagacagugaggacga

SEQ ID NO: 2596116 - RNA, 19 nt, Homo sapiens
  misc_RNA (1)...(19): siRNA sense strand
ggaaaggcuacauggguca

SEQ ID NO: 2596117 - RNA, 19 nt, Homo sapiens
  misc_RNA (1)...(19): siRNA sense strand
ucagcaaggucaugggcau

SEQ ID NO: 2596118 - RNA, 19 nt, Homo sapiens
  misc_RNA (1)...(19): siRNA sense strand
gcuucaaugaugaggaguu

SEQ ID NO: 2596119 - RNA, 19 nt, Homo sapiens
  misc_RNA (1)...(19): siRNA sense strand
aggaagaggaggacgagga

SEQ ID NO: 2596120 - RNA, 19 nt, Homo sapiens
  misc_RNA (1)...(19): siRNA sense strand
cgccaaccuacuugagaua

SEQ ID NO: 2596121 - RNA, 19 nt, Homo sapiens
  misc_RNA (1)...(19): siRNA sense strand
aggaagacgugcugcagga

SEQ ID NO: 2596122 - RNA, 19 nt, Homo sapiens
  misc_RNA (1)...(19): siRNA sense strand
caguguggccugcgagauu

SEQ ID NO: 2596123 - RNA, 19 nt, Homo sapiens
  misc_RNA (1)...(19): siRNA sense strand
gcaaggucgucaaccgcaa

SEQ ID NO: 2596124 - RNA, 19 nt, Homo sapiens
  misc_RNA (1)...(19): siRNA sense strand
cagcaggagcagugggaag

SEQ ID NO: 2596125 - RNA, 19 nt, Homo sapiens
  misc_RNA (1)...(19): siRNA sense strand
aggacgaagaagaggagga

SEQ ID NO: 2596126 - RNA, 19 nt, Homo sapiens
  misc_RNA (1)...(19): siRNA sense strand
aagaagaggaggacgagga

SEQ ID NO: 2596127 - RNA, 19 nt, Homo sapiens
  misc_RNA (1)...(19): siRNA sense strand
aagaggaggacgaggagga

SEQ ID NO: 2596128 - RNA, 19 nt, Homo sapiens
  misc_RNA (1)...(19): siRNA sense strand
aggacgaggaggaggagga

SEQ ID NO: 2596129 - RNA, 19 nt, Homo sapiens
  misc_RNA (1)...(19): siRNA sense strand
agaccaacaagaagaacau

SEQ ID NO: 2596130 - RNA, 19 nt, Homo sapiens
  misc_RNA (1)...(19): siRNA sense strand
agaagaacaugguggaccu

SEQ ID NO: 2596131 - RNA, 19 nt, Homo sapiens
  misc_RNA (1)...(19): siRNA sense strand
uugaugaugaugaggaaga

SEQ ID NO: 2596132 - RNA, 19 nt, Homo sapiens
  misc_RNA (1)...(19): siRNA sense strand
gagaccaacaagaagaaca

SEQ ID NO: 2596133 - RNA, 19 nt, Homo sapiens
  misc_RNA (1)...(19): siRNA sense strand
augaggaagaggaggacga

SEQ ID NO: 2596134 - RNA, 19 nt, Homo sapiens
  misc_RNA (1)...(19): siRNA sense strand
ccagugacgaugaggacga

SEQ ID NO: 2596135 - RNA, 19 nt, Homo sapiens
  misc_RNA (1)...(19): siRNA sense strand
augaugaggaagaggagga

SEQ ID NO: 2596136 - RNA, 19 nt, Homo sapiens
  misc_RNA (1)...(19): siRNA sense strand
ggcucaacgaggagaagau

SEQ ID NO: 2596137 - RNA, 19 nt, Homo sapiens
  misc_RNA (1)...(19): siRNA sense strand
cggagaccaacaagaagaa

SEQ ID NO: 2596138 - RNA, 19 nt, Homo sapiens
  misc_RNA (1)...(19): siRNA sense strand
aggaggacgaggaggagga

SEQ ID NO: 2596139 - RNA, 19 nt, Homo sapiens
  misc_RNA (1)...(19): siRNA sense strand
aggaggaggaggaagacga

SEQ ID NO: 2596140 - RNA, 19 nt, Homo sapiens
  misc_RNA (1)...(19): siRNA sense strand
cggaaaggcuacauggguc

SEQ ID NO: 2596141 - RNA, 19 nt, Homo sapiens
  misc_RNA (1)...(19): siRNA sense strand
acaagaagaacauggugga

SEQ ID NO: 2596142 - RNA, 19 nt, Homo sapiens
  misc_RNA (1)...(19): siRNA sense strand
aggacgaggaagaggccca

SEQ ID NO: 2596143 - RNA, 19 nt, Homo sapiens
  misc_RNA (1)...(19): siRNA sense strand
aagauggcuacgaggguaa

SEQ ID NO: 2596144 - RNA, 19 nt, Homo sapiens
  misc_RNA (1)...(19): siRNA sense strand
uggcagagcuauaagcguu

SEQ ID NO: 2596145 - RNA, 19 nt, Homo sapiens
  misc_RNA (1)...(19): siRNA sense strand
ucauggagcugaaggagga

SEQ ID NO: 2596146 - RNA, 19 nt, Homo sapiens
  misc_RNA (1)...(19): siRNA sense strand
ucacugaacucucuggcaa

SEQ ID NO: 2596147 - RNA, 19 nt, Homo sapiens
  misc_RNA (1)...(19): siRNA sense strand
ugacaggagaagagguguu

SEQ ID NO: 2596148 - RNA, 19 nt, Homo sapiens
  misc_RNA (1)...(19): siRNA sense strand
gaauaaaggccaucaggcu

SEQ ID NO: 2596149 - RNA, 19 nt, Homo sapiens
  misc_RNA (1)...(19): siRNA sense strand
ccugguugaugucgggcaa

SEQ ID NO: 2596150 - RNA, 19 nt, Homo sapiens
  misc_RNA (1)...(19): siRNA sense strand
uggaagacuggguguucaa

SEQ ID NO: 2596151 - RNA, 19 nt, Homo sapiens
  misc_RNA (1)...(19): siRNA sense strand
aggaguuccaggaggccaa

SEQ ID NO: 2596152 - RNA, 19 nt, Homo sapiens
  misc_RNA (1)...(19): siRNA sense strand
ggagagagcuuccaccuga

SEQ ID NO: 2596153 - RNA, 19 nt, Homo sapiens
  misc_RNA (1)...(19): siRNA sense strand
ggagaagagguguuccgaa

SEQ ID NO: 2596154 - RNA, 19 nt, Homo sapiens
  misc_RNA (1)...(19): siRNA sense strand
gucuggaagugguggcuga

SEQ ID NO: 2596155 - RNA, 19 nt, Homo sapiens
  misc_RNA (1)...(19): siRNA sense strand
gcaaccaggucuucgcuga

SEQ ID NO: 2596156 - RNA, 19 nt, Homo sapiens
  misc_RNA (1)...(19): siRNA sense strand
gaggagagcaagagggaga

SEQ ID NO: 2596157 - RNA, 19 nt, Homo sapiens
  misc_RNA (1)...(19): siRNA sense strand
uggcaaucgaggagagcaa

SEQ ID NO: 2596158 - RNA, 19 nt, Homo sapiens
  misc_RNA (1)...(19): siRNA sense strand
cgugaacgugcgugagaaa

SEQ ID NO: 2596159 - RNA, 19 nt, Homo sapiens
  misc_RNA (1)...(19): siRNA sense strand
gugcagacgcugaaggacu

SEQ ID NO: 2596160 - RNA, 19 nt, Homo sapiens
  misc_RNA (1)...(19): siRNA sense strand
cgcucaagaccaaggaaaa

SEQ ID NO: 2596161 - RNA, 19 nt, Homo sapiens
  misc_RNA (1)...(19): siRNA sense strand
ccuugaggcgccagaugaa

SEQ ID NO: 2596162 - RNA, 19 nt, Homo sapiens
  misc_RNA (1)...(19): siRNA sense strand
ucgcagcagugcaaggaga

SEQ ID NO: 2596163 - RNA, 19 nt, Homo sapiens
  misc_RNA (1)...(19): siRNA sense strand
gaucaagguucgagaggcc

SEQ ID NO: 2596164 - RNA, 19 nt, Homo sapiens
  misc_RNA (1)...(19): siRNA sense strand
gcucaaugaccauggcaag

SEQ ID NO: 2596165 - RNA, 19 nt, Homo sapiens
  misc_RNA (1)...(19): siRNA sense strand
guguaauaaaugugggaaa

SEQ ID NO: 2596166 - RNA, 19 nt, Homo sapiens
  misc_RNA (1)...(19): siRNA sense strand
cgguaauguaugugagaau

SEQ ID NO: 2596167 - RNA, 19 nt, Homo sapiens
  misc_RNA (1)...(19): siRNA sense strand
ggaagaaauuuguccggaa

SEQ ID NO: 2596168 - RNA, 19 nt, Homo sapiens
  misc_RNA (1)...(19): siRNA sense strand
auguaaugaaugugggaaa

SEQ ID NO: 2596169 - RNA, 19 nt, Homo sapiens
  misc_RNA (1)...(19): siRNA sense strand
cuacagaggaagagaaagu

SEQ ID NO: 2596170 - RNA, 19 nt, Homo sapiens
  misc_RNA (1)...(19): siRNA sense strand
augcaaugaauaugggaaa

SEQ ID NO: 2596171 - RNA, 19 nt, Homo sapiens
  misc_RNA (1)...(19): siRNA sense strand
ucuuaaucaaugugggaaa

SEQ ID NO: 2596172 - RNA, 19 nt, Homo sapiens
  misc_RNA (1)...(19): siRNA sense strand
auguagugaaugugggaaa

SEQ ID NO: 2596173 - RNA, 19 nt, Homo sapiens
  misc_RNA (1)...(19): siRNA sense strand
ccucuaaagaugaugaauu

SEQ ID NO: 2596174 - RNA, 19 nt, Homo sapiens
  misc_RNA (1)...(19): siRNA sense strand
augugaugcuggagaacua

SEQ ID NO: 2596175 - RNA, 19 nt, Homo sapiens
  misc_RNA (1)...(19): siRNA sense strand
aacucagacuggagagaaa

SEQ ID NO: 2596176 - RNA, 19 nt, Homo sapiens
  misc_RNA (1)...(19): siRNA sense strand
acucaugggaagugaauuu

SEQ ID NO: 2596177 - RNA, 19 nt, Homo sapiens
  misc_RNA (1)...(19): siRNA sense strand
auguaacgaaugugggaaa

SEQ ID NO: 2596178 - RNA, 19 nt, Homo sapiens
  misc_RNA (1)...(19): siRNA sense strand
aagagaaaguuuuggggaa

SEQ ID NO: 2596179 - RNA, 19 nt, Homo sapiens
  misc_RNA (1)...(19): siRNA sense strand
agagaaaguuuuggggaaa

SEQ ID NO: 2596180 - RNA, 19 nt, Homo sapiens
  misc_RNA (1)...(19): siRNA sense strand
agacaaacacuuggagcaa

SEQ ID NO: 2596181 - RNA, 19 nt, Homo sapiens
  misc_RNA (1)...(19): siRNA sense strand
agaacacagacuuggguua

SEQ ID NO: 2596182 - RNA, 19 nt, Homo sapiens
  misc_RNA (1)...(19): siRNA sense strand
cagaauacaucaaaggacu

SEQ ID NO: 2596183 - RNA, 19 nt, Homo sapiens
  misc_RNA (1)...(19): siRNA sense strand
cauucaaggacgugacuau

SEQ ID NO: 2596184 - RNA, 19 nt, Homo sapiens
  misc_RNA (1)...(19): siRNA sense strand
gacuacagaggaagagaaa

SEQ ID NO: 2596185 - RNA, 19 nt, Homo sapiens
  misc_RNA (1)...(19): siRNA sense strand
caguguaaugaaugugaaa

SEQ ID NO: 2596186 - RNA, 19 nt, Homo sapiens
  misc_RNA (1)...(19): siRNA sense strand
cuguggaggaauauaauaa

SEQ ID NO: 2596187 - RNA, 19 nt, Homo sapiens
  misc_RNA (1)...(19): siRNA sense strand
cccuaugaauguagugaau

SEQ ID NO: 2596188 - RNA, 19 nt, Homo sapiens
  misc_RNA (1)...(19): siRNA sense strand
ccucagaauacaucagaga

SEQ ID NO: 2596189 - RNA, 19 nt, Homo sapiens
  misc_RNA (1)...(19): siRNA sense strand
aagaauucacacaggagaa

SEQ ID NO: 2596190 - RNA, 19 nt, Homo sapiens
  misc_RNA (1)...(19): siRNA sense strand
gguucucagaggaggaauu

SEQ ID NO: 2596191 - RNA, 19 nt, Homo sapiens
  misc_RNA (1)...(19): siRNA sense strand
ugaucaagcagaacaagaa

SEQ ID NO: 2596192 - RNA, 19 nt, Homo sapiens
  misc_RNA (1)...(19): siRNA sense strand
ccacaggagaacuggcaca

SEQ ID NO: 2596193 - RNA, 19 nt, Homo sapiens
  misc_RNA (1)...(19): siRNA sense strand
ggggagaaaucuuaugaau

SEQ ID NO: 2596194 - RNA, 19 nt, Homo sapiens
  misc_RNA (1)...(19): siRNA sense strand
augcaaucaauguggaaaa

SEQ ID NO: 2596195 - RNA, 19 nt, Homo sapiens
  misc_RNA (1)...(19): siRNA sense strand
ccucagagugcaucaaaga

SEQ ID NO: 2596196 - RNA, 19 nt, Homo sapiens
  misc_RNA (1)...(19): siRNA sense strand
cagcugucauagaagagaa

SEQ ID NO: 2596197 - RNA, 19 nt, Homo sapiens
  misc_RNA (1)...(19): siRNA sense strand
aacauugacuacagaggaa

SEQ ID NO: 2596198 - RNA, 19 nt, Homo sapiens
  misc_RNA (1)...(19): siRNA sense strand
acucaaugaugaaacccua

SEQ ID NO: 2596199 - RNA, 19 nt, Homo sapiens
  misc_RNA (1)...(19): siRNA sense strand
guucagaaguccacccuca

SEQ ID NO: 2596200 - RNA, 19 nt, Homo sapiens
  misc_RNA (1)...(19): siRNA sense strand
cagaggaggaauucucaaa

SEQ ID NO: 2596201 - RNA, 19 nt, Homo sapiens
  misc_RNA (1)...(19): siRNA sense strand
auguagugaauguggaaaa

SEQ ID NO: 2596202 - RNA, 19 nt, Homo sapiens
  misc_RNA (1)...(19): siRNA sense strand
augaaugugggaagaaauu

SEQ ID NO: 2596203 - RNA, 19 nt, Homo sapiens
  misc_RNA (1)...(19): siRNA sense strand
ggccagaagucaaaccuca

SEQ ID NO: 2596204 - RNA, 19 nt, Homo sapiens
  misc_RNA (1)...(19): siRNA sense strand
aggaggaguggcagcaaau

SEQ ID NO: 2596205 - RNA, 19 nt, Homo sapiens
  misc_RNA (1)...(19): siRNA sense strand
ucucauucaacaucagaaa

SEQ ID NO: 2596206 - RNA, 19 nt, Homo sapiens
  misc_RNA (1)...(19): siRNA sense strand
aauaagaaauccuaccaga

SEQ ID NO: 2596207 - RNA, 19 nt, Homo sapiens
  misc_RNA (1)...(19): siRNA sense strand
gggccaacuugcagaaggu

SEQ ID NO: 2596208 - RNA, 19 nt, Homo sapiens
  misc_RNA (1)...(19): siRNA sense strand
aagacaaacacuuggagca

SEQ ID NO: 2596209 - RNA, 19 nt, Homo sapiens
  misc_RNA (1)...(19): siRNA sense strand
acauuuggccagaagucaa

SEQ ID NO: 2596210 - RNA, 19 nt, Homo sapiens
  misc_RNA (1)...(19): siRNA sense strand
cagcagaaaaugaacauau

SEQ ID NO: 2596211 - RNA, 19 nt, Homo sapiens
  misc_RNA (1)...(19): siRNA sense strand
ucagagugcaucaaagaau

SEQ ID NO: 2596212 - RNA, 19 nt, Homo sapiens
  misc_RNA (1)...(19): siRNA sense strand
aaugaaugugggaagaaau

SEQ ID NO: 2596213 - RNA, 19 nt, Homo sapiens
  misc_RNA (1)...(19): siRNA sense strand
gugggaaauccuuugagaa

SEQ ID NO: 2596214 - RNA, 19 nt, Homo sapiens
  misc_RNA (1)...(19): siRNA sense strand
guaaugaaugugggaagaa

SEQ ID NO: 2596215 - RNA, 19 nt, Homo sapiens
  misc_RNA (1)...(19): siRNA sense strand
aaauuuguccggaaagcaa

SEQ ID NO: 2596216 - RNA, 19 nt, Homo sapiens
  misc_RNA (1)...(19): siRNA sense strand
ggagaggagccuugguucu

SEQ ID NO: 2596217 - RNA, 19 nt, Homo sapiens
  misc_RNA (1)...(19): siRNA sense strand
agaaaucaaaccucagaau

SEQ ID NO: 2596218 - RNA, 19 nt, Homo sapiens
  misc_RNA (1)...(19): siRNA sense strand
aagcagaacaagaaaauca

SEQ ID NO: 2596219 - RNA, 19 nt, Homo sapiens
  misc_RNA (1)...(19): siRNA sense strand
ugacuacagaggaagagaa

SEQ ID NO: 2596220 - RNA, 19 nt, Homo sapiens
  misc_RNA (1)...(19): siRNA sense strand
gcgacaagcuggacggcaa

SEQ ID NO: 2596221 - RNA, 19 nt, Homo sapiens
  misc_RNA (1)...(19): siRNA sense strand
ggaaguagaacgugaggca

SEQ ID NO: 2596222 - RNA, 19 nt, Homo sapiens
  misc_RNA (1)...(19): siRNA sense strand
caguguaagcagugugcaa

SEQ ID NO: 2596223 - RNA, 19 nt, Homo sapiens
  misc_RNA (1)...(19): siRNA sense strand
aggcagagaagaagcguga

SEQ ID NO: 2596224 - RNA, 19 nt, Homo sapiens
  misc_RNA (1)...(19): siRNA sense strand
aaguagaacgugaggcaga

SEQ ID NO: 2596225 - RNA, 19 nt, Homo sapiens
  misc_RNA (1)...(19): siRNA sense strand
ugguuggaccugaaggaua

SEQ ID NO: 2596226 - RNA, 19 nt, Homo sapiens
  misc_RNA (1)...(19): siRNA sense strand
gagaagaagcgugaggcua

SEQ ID NO: 2596227 - RNA, 19 nt, Homo sapiens
  misc_RNA (1)...(19): siRNA sense strand
aggcagaucaggagcggga

SEQ ID NO: 2596228 - RNA, 19 nt, Homo sapiens
  misc_RNA (1)...(19): siRNA sense strand
ugaagcuagaccugaguaa

SEQ ID NO: 2596229 - RNA, 19 nt, Homo sapiens
  misc_RNA (1)...(19): siRNA sense strand
ggcuggaaguagaacguga

SEQ ID NO: 2596230 - RNA, 19 nt, Homo sapiens
  misc_RNA (1)...(19): siRNA sense strand
gcagaucaggagcgggaga

SEQ ID NO: 2596231 - RNA, 19 nt, Homo sapiens
  misc_RNA (1)...(19): siRNA sense strand
ccaagcgggagcaggagaa

SEQ ID NO: 2596232 - RNA, 19 nt, Homo sapiens
  misc_RNA (1)...(19): siRNA sense strand
agcgggagcaggagaagaa

SEQ ID NO: 2596233 - RNA, 19 nt, Homo sapiens
  misc_RNA (1)...(19): siRNA sense strand
aacgugaggcagagaagaa

SEQ ID NO: 2596234 - RNA, 19 nt, Homo sapiens
  misc_RNA (1)...(19): siRNA sense strand
gagaagcaguguaagcagu

SEQ ID NO: 2596235 - RNA, 19 nt, Homo sapiens
  misc_RNA (1)...(19): siRNA sense strand
gaacugcggaagcgggaga

SEQ ID NO: 2596236 - RNA, 19 nt, Homo sapiens
  misc_RNA (1)...(19): siRNA sense strand
acaagguguuacagcacau

SEQ ID NO: 2596237 - RNA, 19 nt, Homo sapiens
  misc_RNA (1)...(19): siRNA sense strand
gguacaaggagcugggaca

SEQ ID NO: 2596238 - RNA, 19 nt, Homo sapiens
  misc_RNA (1)...(19): siRNA sense strand
ucucauacuaucagagcaa

SEQ ID NO: 2596239 - RNA, 19 nt, Homo sapiens
  misc_RNA (1)...(19): siRNA sense strand
ugaccaaagaugagaaagu

SEQ ID NO: 2596240 - RNA, 19 nt, Homo sapiens
  misc_RNA (1)...(19): siRNA sense strand
gcacagagcccuuccggau

SEQ ID NO: 2596241 - RNA, 19 nt, Homo sapiens
  misc_RNA (1)...(19): siRNA sense strand
ccgagaugguggugccuga

SEQ ID NO: 2596242 - RNA, 19 nt, Homo sapiens
  misc_RNA (1)...(19): siRNA sense strand
gccugaaggagcugggcua

SEQ ID NO: 2596243 - RNA, 19 nt, Homo sapiens
  misc_RNA (1)...(19): siRNA sense strand
guacaaggaguuugagcca

SEQ ID NO: 2596244 - RNA, 19 nt, Homo sapiens
  misc_RNA (1)...(19): siRNA sense strand
gagaagaaauuugggagca

SEQ ID NO: 2596245 - RNA, 19 nt, Homo sapiens
  misc_RNA (1)...(19): siRNA sense strand
ucgaauuccagaagaucaa

SEQ ID NO: 2596246 - RNA, 19 nt, Homo sapiens
  misc_RNA (1)...(19): siRNA sense strand
agaagugggaggagcugaa

SEQ ID NO: 2596247 - RNA, 19 nt, Homo sapiens
  misc_RNA (1)...(19): siRNA sense strand
ccuacgaugcccuggagaa

SEQ ID NO: 2596248 - RNA, 19 nt, Homo sapiens
  misc_RNA (1)...(19): siRNA sense strand
gcaucugccacgugaucaa

SEQ ID NO: 2596249 - RNA, 19 nt, Homo sapiens
  misc_RNA (1)...(19): siRNA sense strand
aggagcaguucguggacuu

SEQ ID NO: 2596250 - RNA, 19 nt, Homo sapiens
  misc_RNA (1)...(19): siRNA sense strand
aagaaauuugggagcaaca

SEQ ID NO: 2596251 - RNA, 19 nt, Homo sapiens
  misc_RNA (1)...(19): siRNA sense strand
aggcacuggcccuggagua

SEQ ID NO: 2596252 - RNA, 19 nt, Homo sapiens
  misc_RNA (1)...(19): siRNA sense strand
cccacaugauccaggucua

SEQ ID NO: 2596253 - RNA, 19 nt, Homo sapiens
  misc_RNA (1)...(19): siRNA sense strand
cagcagcagaugcggaaca

SEQ ID NO: 2596254 - RNA, 19 nt, Homo sapiens
  misc_RNA (1)...(19): siRNA sense strand
ucaacacaucccagggcaa

SEQ ID NO: 2596255 - RNA, 19 nt, Homo sapiens
  misc_RNA (1)...(19): siRNA sense strand
aguuuggccucguggacau

SEQ ID NO: 2596256 - RNA, 19 nt, Homo sapiens
  misc_RNA (1)...(19): siRNA sense strand
accaaagaugagaaaguau

SEQ ID NO: 2596257 - RNA, 19 nt, Homo sapiens
  misc_RNA (1)...(19): siRNA sense strand
gccucaaguucgucggcuu

SEQ ID NO: 2596258 - RNA, 19 nt, Homo sapiens
  misc_RNA (1)...(19): siRNA sense strand
uggucaugaucacgggaga

SEQ ID NO: 2596259 - RNA, 19 nt, Homo sapiens
  misc_RNA (1)...(19): siRNA sense strand
acaaggaguuugagccaag

SEQ ID NO: 2596260 - RNA, 19 nt, Homo sapiens
  misc_RNA (1)...(19): siRNA sense strand
gagcagaagaugaucgaga

SEQ ID NO: 2596261 - RNA, 19 nt, Homo sapiens
  misc_RNA (1)...(19): siRNA sense strand
cugcaaaagaagugcugaa

SEQ ID NO: 2596262 - RNA, 19 nt, Homo sapiens
  misc_RNA (1)...(19): siRNA sense strand
ugcaguaccugguggguga

SEQ ID NO: 2596263 - RNA, 19 nt, Homo sapiens
  misc_RNA (1)...(19): siRNA sense strand
cagccaagagugaggagca

SEQ ID NO: 2596264 - RNA, 19 nt, Homo sapiens
  misc_RNA (1)...(19): siRNA sense strand
agugaggagcagaagauga

SEQ ID NO: 2596265 - RNA, 19 nt, Homo sapiens
  misc_RNA (1)...(19): siRNA sense strand
gcugaaagaacaugggcag

SEQ ID NO: 2596266 - RNA, 19 nt, Homo sapiens
  misc_RNA (1)...(19): siRNA sense strand
ucgagaaggcgauggaaag

SEQ ID NO: 2596267 - RNA, 19 nt, Homo sapiens
  misc_RNA (1)...(19): siRNA sense strand
augaaagccuugagggaau

SEQ ID NO: 2596268 - RNA, 19 nt, Homo sapiens
  misc_RNA (1)...(19): siRNA sense strand
gaugaaguguauuggaaaa

SEQ ID NO: 2596269 - RNA, 19 nt, Homo sapiens
  misc_RNA (1)...(19): siRNA sense strand
guguuucaguggagagcaa

SEQ ID NO: 2596270 - RNA, 19 nt, Homo sapiens
  misc_RNA (1)...(19): siRNA sense strand
uggacaaacuagagaugga

SEQ ID NO: 2596271 - RNA, 19 nt, Homo sapiens
  misc_RNA (1)...(19): siRNA sense strand
ucucaaaggaugugcacuu

SEQ ID NO: 2596272 - RNA, 19 nt, Homo sapiens
  misc_RNA (1)...(19): siRNA sense strand
agaugaaagccuugaggga

SEQ ID NO: 2596273 - RNA, 19 nt, Homo sapiens
  misc_RNA (1)...(19): siRNA sense strand
ugaugaaguguauuggaaa

SEQ ID NO: 2596274 - RNA, 19 nt, Homo sapiens
  misc_RNA (1)...(19): siRNA sense strand
ugagagaagccaagaucau

SEQ ID NO: 2596275 - RNA, 19 nt, Homo sapiens
  misc_RNA (1)...(19): siRNA sense strand
ucuacaaaugccagaacaa

SEQ ID NO: 2596276 - RNA, 19 nt, Homo sapiens
  misc_RNA (1)...(19): siRNA sense strand
cugaugaugaauugaagaa

SEQ ID NO: 2596277 - RNA, 19 nt, Homo sapiens
  misc_RNA (1)...(19): siRNA sense strand
aauacuaguugaucagcaa

SEQ ID NO: 2596278 - RNA, 19 nt, Homo sapiens
  misc_RNA (1)...(19): siRNA sense strand
guuucaacaagcagaacua

SEQ ID NO: 2596279 - RNA, 19 nt, Homo sapiens
  misc_RNA (1)...(19): siRNA sense strand
aagcagaacuaugaggcua

SEQ ID NO: 2596280 - RNA, 19 nt, Homo sapiens
  misc_RNA (1)...(19): siRNA sense strand
cuacagauauucaaagagu

SEQ ID NO: 2596281 - RNA, 19 nt, Homo sapiens
  misc_RNA (1)...(19): siRNA sense strand
uggaaaagaugcaccgauu

SEQ ID NO: 2596282 - RNA, 19 nt, Homo sapiens
  misc_RNA (1)...(19): siRNA sense strand
gaugaaagccuugagggaa

SEQ ID NO: 2596283 - RNA, 19 nt, Homo sapiens
  misc_RNA (1)...(19): siRNA sense strand
cagacuuugcugaggguga

SEQ ID NO: 2596284 - RNA, 19 nt, Homo sapiens
  misc_RNA (1)...(19): siRNA sense strand
guggagagcaaaaugaaua

SEQ ID NO: 2596285 - RNA, 19 nt, Homo sapiens
  misc_RNA (1)...(19): siRNA sense strand
gauggaagaugcagucaca

SEQ ID NO: 2596286 - RNA, 19 nt, Homo sapiens
  misc_RNA (1)...(19): siRNA sense strand
ccauagugaagcuuggaau

SEQ ID NO: 2596287 - RNA, 19 nt, Homo sapiens
  misc_RNA (1)...(19): siRNA sense strand
acuuauuggaugcaguaua

SEQ ID NO: 2596288 - RNA, 19 nt, Homo sapiens
  misc_RNA (1)...(19): siRNA sense strand
uggaagaugcagucacauu

SEQ ID NO: 2596289 - RNA, 19 nt, Homo sapiens
  misc_RNA (1)...(19): siRNA sense strand
cgucacauacaaaugcaaa

SEQ ID NO: 2596290 - RNA, 19 nt, Homo sapiens
  misc_RNA (1)...(19): siRNA sense strand
acaaacuagagauggaaga

SEQ ID NO: 2596291 - RNA, 19 nt, Homo sapiens
  misc_RNA (1)...(19): siRNA sense strand
ccguaucagcaguagaaaa

SEQ ID NO: 2596292 - RNA, 19 nt, Homo sapiens
  misc_RNA (1)...(19): siRNA sense strand
guuuaauggaccuguuuau

SEQ ID NO: 2596293 - RNA, 19 nt, Homo sapiens
  misc_RNA (1)...(19): siRNA sense strand
aaacaaaaccaaaccguau

SEQ ID NO: 2596294 - RNA, 19 nt, Homo sapiens
  misc_RNA (1)...(19): siRNA sense strand
gcuuauuguuuggguucaa

SEQ ID NO: 2596295 - RNA, 19 nt, Homo sapiens
  misc_RNA (1)...(19): siRNA sense strand
gugauguguuagaugcauu

SEQ ID NO: 2596296 - RNA, 19 nt, Homo sapiens
  misc_RNA (1)...(19): siRNA sense strand
cuuaagaggaaacuggaga

SEQ ID NO: 2596297 - RNA, 19 nt, Homo sapiens
  misc_RNA (1)...(19): siRNA sense strand
auaacugggagauggacaa

SEQ ID NO: 2596298 - RNA, 19 nt, Homo sapiens
  misc_RNA (1)...(19): siRNA sense strand
gaucagcaaguuuggaaaa

SEQ ID NO: 2596299 - RNA, 19 nt, Homo sapiens
  misc_RNA (1)...(19): siRNA sense strand
augugaucuuggucaauaa

SEQ ID NO: 2596300 - RNA, 19 nt, Homo sapiens
  misc_RNA (1)...(19): siRNA sense strand
agaucaugcaguauaagua

SEQ ID NO: 2596301 - RNA, 19 nt, Homo sapiens
  misc_RNA (1)...(19): siRNA sense strand
cauaacagaaugcaaucaa

SEQ ID NO: 2596302 - RNA, 19 nt, Homo sapiens
  misc_RNA (1)...(19): siRNA sense strand
ugaagagaauaguagagga

SEQ ID NO: 2596303 - RNA, 19 nt, Homo sapiens
  misc_RNA (1)...(19): siRNA sense strand
agagaauaguagaggaucc

SEQ ID NO: 2596304 - RNA, 19 nt, Homo sapiens
  misc_RNA (1)...(19): siRNA sense strand
ggaagaugcagucacauuu

SEQ ID NO: 2596305 - RNA, 19 nt, Homo sapiens
  misc_RNA (1)...(19): siRNA sense strand
aaguugugaugaaguguau

SEQ ID NO: 2596306 - RNA, 19 nt, Homo sapiens
  misc_RNA (1)...(19): siRNA sense strand
auuugaaugcaauggguuu

SEQ ID NO: 2596307 - RNA, 19 nt, Homo sapiens
  misc_RNA (1)...(19): siRNA sense strand
uuucaaacaaagggcauaa

SEQ ID NO: 2596308 - RNA, 19 nt, Homo sapiens
  misc_RNA (1)...(19): siRNA sense strand
gaauaguagaggauccuga

SEQ ID NO: 2596309 - RNA, 19 nt, Homo sapiens
  misc_RNA (1)...(19): siRNA sense strand
gggagauggacaaacuaga

SEQ ID NO: 2596310 - RNA, 19 nt, Homo sapiens
  misc_RNA (1)...(19): siRNA sense strand
ggacaaacuagagauggaa

SEQ ID NO: 2596311 - RNA, 19 nt, Homo sapiens
  misc_RNA (1)...(19): siRNA sense strand
ucuugucccuguugauaaa

SEQ ID NO: 2596312 - RNA, 19 nt, Homo sapiens
  misc_RNA (1)...(19): siRNA sense strand
ggaacguaucaaugagugu

SEQ ID NO: 2596313 - RNA, 19 nt, Homo sapiens
  misc_RNA (1)...(19): siRNA sense strand
aggugguccuagauaauau

SEQ ID NO: 2596314 - RNA, 19 nt, Homo sapiens
  misc_RNA (1)...(19): siRNA sense strand
uagaaaacugucugaggaa

SEQ ID NO: 2596315 - RNA, 19 nt, Homo sapiens
  misc_RNA (1)...(19): siRNA sense strand
augaaagccuugagggaau

SEQ ID NO: 2596316 - RNA, 19 nt, Homo sapiens
  misc_RNA (1)...(19): siRNA sense strand
gaugaaguguauuggaaaa

SEQ ID NO: 2596317 - RNA, 19 nt, Homo sapiens
  misc_RNA (1)...(19): siRNA sense strand
uggacaaacuagagaugga

SEQ ID NO: 2596318 - RNA, 19 nt, Homo sapiens
  misc_RNA (1)...(19): siRNA sense strand
ucucaaaggaugugcacuu

SEQ ID NO: 2596319 - RNA, 19 nt, Homo sapiens
  misc_RNA (1)...(19): siRNA sense strand
agaugaaagccuugaggga

SEQ ID NO: 2596320 - RNA, 19 nt, Homo sapiens
  misc_RNA (1)...(19): siRNA sense strand
ugaugaaguguauuggaaa

SEQ ID NO: 2596321 - RNA, 19 nt, Homo sapiens
  misc_RNA (1)...(19): siRNA sense strand
ugagagaagccaagaucau

SEQ ID NO: 2596322 - RNA, 19 nt, Homo sapiens
  misc_RNA (1)...(19): siRNA sense strand
ucuacaaaugccagaacaa

SEQ ID NO: 2596323 - RNA, 19 nt, Homo sapiens
  misc_RNA (1)...(19): siRNA sense strand
cugaugaugaauugaagaa

SEQ ID NO: 2596324 - RNA, 19 nt, Homo sapiens
  misc_RNA (1)...(19): siRNA sense strand
aauacuaguugaucagcaa

SEQ ID NO: 2596325 - RNA, 19 nt, Homo sapiens
  misc_RNA (1)...(19): siRNA sense strand
guuucaacaagcagaacua

SEQ ID NO: 2596326 - RNA, 19 nt, Homo sapiens
  misc_RNA (1)...(19): siRNA sense strand
aagcagaacuaugaggcua

SEQ ID NO: 2596327 - RNA, 19 nt, Homo sapiens
  misc_RNA (1)...(19): siRNA sense strand
cuacagauauucaaagagu

SEQ ID NO: 2596328 - RNA, 19 nt, Homo sapiens
  misc_RNA (1)...(19): siRNA sense strand
uggaaaagaugcaccgauu

SEQ ID NO: 2596329 - RNA, 19 nt, Homo sapiens
  misc_RNA (1)...(19): siRNA sense strand
gaugaaagccuugagggaa

SEQ ID NO: 2596330 - RNA, 19 nt, Homo sapiens
  misc_RNA (1)...(19): siRNA sense strand
cagacuuugcugaggguga

SEQ ID NO: 2596331 - RNA, 19 nt, Homo sapiens
  misc_RNA (1)...(19): siRNA sense strand
gauggaagaugcagucaca

SEQ ID NO: 2596332 - RNA, 19 nt, Homo sapiens
  misc_RNA (1)...(19): siRNA sense strand
ccauagugaagcuuggaau

SEQ ID NO: 2596333 - RNA, 19 nt, Homo sapiens
  misc_RNA (1)...(19): siRNA sense strand
acuuauuggaugcaguaua

SEQ ID NO: 2596334 - RNA, 19 nt, Homo sapiens
  misc_RNA (1)...(19): siRNA sense strand
uggaagaugcagucacauu

SEQ ID NO: 2596335 - RNA, 19 nt, Homo sapiens
  misc_RNA (1)...(19): siRNA sense strand
cgucacauacaaaugcaaa

SEQ ID NO: 2596336 - RNA, 19 nt, Homo sapiens
  misc_RNA (1)...(19): siRNA sense strand
acaaacuagagauggaaga

SEQ ID NO: 2596337 - RNA, 19 nt, Homo sapiens
  misc_RNA (1)...(19): siRNA sense strand
ccguaucagcaguagaaaa

SEQ ID NO: 2596338 - RNA, 19 nt, Homo sapiens
  misc_RNA (1)...(19): siRNA sense strand
guuuaauggaccuguuuau

SEQ ID NO: 2596339 - RNA, 19 nt, Homo sapiens
  misc_RNA (1)...(19): siRNA sense strand
aaacaaaaccaaaccguau

SEQ ID NO: 2596340 - RNA, 19 nt, Homo sapiens
  misc_RNA (1)...(19): siRNA sense strand
gcuuauuguuuggguucaa

SEQ ID NO: 2596341 - RNA, 19 nt, Homo sapiens
  misc_RNA (1)...(19): siRNA sense strand
gugauguguuagaugcauu

SEQ ID NO: 2596342 - RNA, 19 nt, Homo sapiens
  misc_RNA (1)...(19): siRNA sense strand
cuuaagaggaaacuggaga

SEQ ID NO: 2596343 - RNA, 19 nt, Homo sapiens
  misc_RNA (1)...(19): siRNA sense strand
auaacugggagauggacaa

SEQ ID NO: 2596344 - RNA, 19 nt, Homo sapiens
  misc_RNA (1)...(19): siRNA sense strand
gaucagcaaguuuggaaaa

SEQ ID NO: 2596345 - RNA, 19 nt, Homo sapiens
  misc_RNA (1)...(19): siRNA sense strand
augugaucuuggucaauaa

SEQ ID NO: 2596346 - RNA, 19 nt, Homo sapiens
  misc_RNA (1)...(19): siRNA sense strand
agaucaugcaguauaagua

SEQ ID NO: 2596347 - RNA, 19 nt, Homo sapiens
  misc_RNA (1)...(19): siRNA sense strand
cauaacagaaugcaaucaa

SEQ ID NO: 2596348 - RNA, 19 nt, Homo sapiens
  misc_RNA (1)...(19): siRNA sense strand
ugaagagaauaguagagga

SEQ ID NO: 2596349 - RNA, 19 nt, Homo sapiens
  misc_RNA (1)...(19): siRNA sense strand
agagaauaguagaggaucc

SEQ ID NO: 2596350 - RNA, 19 nt, Homo sapiens
  misc_RNA (1)...(19): siRNA sense strand
ggaagaugcagucacauuu

SEQ ID NO: 2596351 - RNA, 19 nt, Homo sapiens
  misc_RNA (1)...(19): siRNA sense strand
aaguugugaugaaguguau

SEQ ID NO: 2596352 - RNA, 19 nt, Homo sapiens
  misc_RNA (1)...(19): siRNA sense strand
auuugaaugcaauggguuu

SEQ ID NO: 2596353 - RNA, 19 nt, Homo sapiens
  misc_RNA (1)...(19): siRNA sense strand
uuucaaacaaagggcauaa

SEQ ID NO: 2596354 - RNA, 19 nt, Homo sapiens
  misc_RNA (1)...(19): siRNA sense strand
gaauaguagaggauccuga

SEQ ID NO: 2596355 - RNA, 19 nt, Homo sapiens
  misc_RNA (1)...(19): siRNA sense strand
gggagauggacaaacuaga

SEQ ID NO: 2596356 - RNA, 19 nt, Homo sapiens
  misc_RNA (1)...(19): siRNA sense strand
ggacaaacuagagauggaa

SEQ ID NO: 2596357 - RNA, 19 nt, Homo sapiens
  misc_RNA (1)...(19): siRNA sense strand
ucuugucccuguugauaaa

SEQ ID NO: 2596358 - RNA, 19 nt, Homo sapiens
  misc_RNA (1)...(19): siRNA sense strand
ggaacguaucaaugagugu

SEQ ID NO: 2596359 - RNA, 19 nt, Homo sapiens
  misc_RNA (1)...(19): siRNA sense strand
aggugguccuagauaauau

SEQ ID NO: 2596360 - RNA, 19 nt, Homo sapiens
  misc_RNA (1)...(19): siRNA sense strand
uagaaaacugucugaggaa

SEQ ID NO: 2596361 - RNA, 19 nt, Homo sapiens
  misc_RNA (1)...(19): siRNA sense strand
auucaaaguccaagacaca

SEQ ID NO: 2596362 - RNA, 19 nt, Homo sapiens
  misc_RNA (1)...(19): siRNA sense strand
gcguggagagcaugaucaa

SEQ ID NO: 2596363 - RNA, 19 nt, Homo sapiens
  misc_RNA (1)...(19): siRNA sense strand
uggucuuccugcagcguua

SEQ ID NO: 2596364 - RNA, 19 nt, Homo sapiens
  misc_RNA (1)...(19): siRNA sense strand
ccauggucuucgugggcuu

SEQ ID NO: 2596365 - RNA, 19 nt, Homo sapiens
  misc_RNA (1)...(19): siRNA sense strand
cuguggaucuucuggccua

SEQ ID NO: 2596366 - RNA, 19 nt, Homo sapiens
  misc_RNA (1)...(19): siRNA sense strand
cgucacaggccaugcacca

SEQ ID NO: 2596367 - RNA, 19 nt, Homo sapiens
  misc_RNA (1)...(19): siRNA sense strand
cccaugaagcuuacggaga

SEQ ID NO: 2596368 - RNA, 19 nt, Homo sapiens
  misc_RNA (1)...(19): siRNA sense strand
ccauuaugacacacggaaa

SEQ ID NO: 2596369 - RNA, 19 nt, Homo sapiens
  misc_RNA (1)...(19): siRNA sense strand
gcucaaugggacacaggaa

SEQ ID NO: 2596370 - RNA, 19 nt, Homo sapiens
  misc_RNA (1)...(19): siRNA sense strand
gggcaggugugucaggaga

SEQ ID NO: 2596371 - RNA, 19 nt, Homo sapiens
  misc_RNA (1)...(19): siRNA sense strand
cagcauguguggaaggugu

SEQ ID NO: 2596372 - RNA, 19 nt, Homo sapiens
  misc_RNA (1)...(19): siRNA sense strand
cucaaugggacacaggaaa

SEQ ID NO: 2596373 - RNA, 19 nt, Homo sapiens
  misc_RNA (1)...(19): siRNA sense strand
augacugagaacugcaaua

SEQ ID NO: 2596374 - RNA, 19 nt, Homo sapiens
  misc_RNA (1)...(19): siRNA sense strand
gagagaaagucaagcaggu

SEQ ID NO: 2596375 - RNA, 19 nt, Homo sapiens
  misc_RNA (1)...(19): siRNA sense strand
gcaauuucauccaggacga

SEQ ID NO: 2596376 - RNA, 19 nt, Homo sapiens
  misc_RNA (1)...(19): siRNA sense strand
ugaccaacugugugagaga

SEQ ID NO: 2596377 - RNA, 19 nt, Homo sapiens
  misc_RNA (1)...(19): siRNA sense strand
gagaaagucaagcagguga

SEQ ID NO: 2596378 - RNA, 19 nt, Homo sapiens
  misc_RNA (1)...(19): siRNA sense strand
gccuugagguauugaaaau

SEQ ID NO: 2596379 - RNA, 19 nt, Homo sapiens
  misc_RNA (1)...(19): siRNA sense strand
acacaugaugcuggauaaa

SEQ ID NO: 2596380 - RNA, 19 nt, Homo sapiens
  misc_RNA (1)...(19): siRNA sense strand
uggaaacggucaaugcaca

SEQ ID NO: 2596381 - RNA, 19 nt, Homo sapiens
  misc_RNA (1)...(19): siRNA sense strand
guucaagguuaggggaauu

SEQ ID NO: 2596382 - RNA, 19 nt, Homo sapiens
  misc_RNA (1)...(19): siRNA sense strand
cagucggaguauaugucaa

SEQ ID NO: 2596383 - RNA, 19 nt, Homo sapiens
  misc_RNA (1)...(19): siRNA sense strand
cgauaaaguccuagacaau

SEQ ID NO: 2596384 - RNA, 19 nt, Homo sapiens
  misc_RNA (1)...(19): siRNA sense strand
aagugaaagcagagaagaa

SEQ ID NO: 2596385 - RNA, 19 nt, Homo sapiens
  misc_RNA (1)...(19): siRNA sense strand
caaccaagauggaauacaa

SEQ ID NO: 2596386 - RNA, 19 nt, Homo sapiens
  misc_RNA (1)...(19): siRNA sense strand
aggaauaucgaaagagauu

SEQ ID NO: 2596387 - RNA, 19 nt, Homo sapiens
  misc_RNA (1)...(19): siRNA sense strand
agucaaggaagacgagaaa

SEQ ID NO: 2596388 - RNA, 19 nt, Homo sapiens
  misc_RNA (1)...(19): siRNA sense strand
gauaagaguaauagcccaa

SEQ ID NO: 2596389 - RNA, 19 nt, Homo sapiens
  misc_RNA (1)...(19): siRNA sense strand
cgguauaugagcaaugaaa

SEQ ID NO: 2596390 - RNA, 19 nt, Homo sapiens
  misc_RNA (1)...(19): siRNA sense strand
aggaagaggaggaggagga

SEQ ID NO: 2596391 - RNA, 19 nt, Homo sapiens
  misc_RNA (1)...(19): siRNA sense strand
gaggacauauggugggcaa

SEQ ID NO: 2596392 - RNA, 19 nt, Homo sapiens
  misc_RNA (1)...(19): siRNA sense strand
uaauggaaccggugagcaa

SEQ ID NO: 2596393 - RNA, 19 nt, Homo sapiens
  misc_RNA (1)...(19): siRNA sense strand
ucgauaaaguccuagacaa

SEQ ID NO: 2596394 - RNA, 19 nt, Homo sapiens
  misc_RNA (1)...(19): siRNA sense strand
gggaaaacauaggagaaaa

SEQ ID NO: 2596395 - RNA, 19 nt, Homo sapiens
  misc_RNA (1)...(19): siRNA sense strand
ggauaugcagaaagagaga

SEQ ID NO: 2596396 - RNA, 19 nt, Homo sapiens
  misc_RNA (1)...(19): siRNA sense strand
caaaugacccacugaguau

SEQ ID NO: 2596397 - RNA, 19 nt, Homo sapiens
  misc_RNA (1)...(19): siRNA sense strand
ugggcaagccagugcauaa

SEQ ID NO: 2596398 - RNA, 19 nt, Homo sapiens
  misc_RNA (1)...(19): siRNA sense strand
caggauaugcagaaagaga

SEQ ID NO: 2596399 - RNA, 19 nt, Homo sapiens
  misc_RNA (1)...(19): siRNA sense strand
agaagggugauaagaguaa

SEQ ID NO: 2596400 - RNA, 19 nt, Homo sapiens
  misc_RNA (1)...(19): siRNA sense strand
ccccagagguggaggaaga

SEQ ID NO: 2596401 - RNA, 19 nt, Homo sapiens
  misc_RNA (1)...(19): siRNA sense strand
ugcaagugcuaaauggaaa

SEQ ID NO: 2596402 - RNA, 19 nt, Homo sapiens
  misc_RNA (1)...(19): siRNA sense strand
ggggaaaacauaggagaaa

SEQ ID NO: 2596403 - RNA, 19 nt, Homo sapiens
  misc_RNA (1)...(19): siRNA sense strand
ccgcauuggccaucaggaa

SEQ ID NO: 2596404 - RNA, 19 nt, Homo sapiens
  misc_RNA (1)...(19): siRNA sense strand
gauccaaauaagaugaaga

SEQ ID NO: 2596405 - RNA, 19 nt, Homo sapiens
  misc_RNA (1)...(19): siRNA sense strand
cagaaagagagaggauuaa

SEQ ID NO: 2596406 - RNA, 19 nt, Homo sapiens
  misc_RNA (1)...(19): siRNA sense strand
uuaagaacuuugagaggga

SEQ ID NO: 2596407 - RNA, 19 nt, Homo sapiens
  misc_RNA (1)...(19): siRNA sense strand
aggaagaucaaguagucaa

SEQ ID NO: 2596408 - RNA, 19 nt, Homo sapiens
  misc_RNA (1)...(19): siRNA sense strand
gggacuaugaagauccaaa

SEQ ID NO: 2596409 - RNA, 19 nt, Homo sapiens
  misc_RNA (1)...(19): siRNA sense strand
guugaaugcaucugccaaa

SEQ ID NO: 2596410 - RNA, 19 nt, Homo sapiens
  misc_RNA (1)...(19): siRNA sense strand
augaagagagauaguagaa

SEQ ID NO: 2596411 - RNA, 19 nt, Homo sapiens
  misc_RNA (1)...(19): siRNA sense strand
auauuaaugaggaggauga

SEQ ID NO: 2596412 - RNA, 19 nt, Homo sapiens
  misc_RNA (1)...(19): siRNA sense strand
augcagaaagagagaggau

SEQ ID NO: 2596413 - RNA, 19 nt, Homo sapiens
  misc_RNA (1)...(19): siRNA sense strand
gugacaaggaagaagcaga

SEQ ID NO: 2596414 - RNA, 19 nt, Homo sapiens
  misc_RNA (1)...(19): siRNA sense strand
agaggaugcaagugcuaaa

SEQ ID NO: 2596415 - RNA, 19 nt, Homo sapiens
  misc_RNA (1)...(19): siRNA sense strand
gcaagugcuaaauggaaau

SEQ ID NO: 2596416 - RNA, 19 nt, Homo sapiens
  misc_RNA (1)...(19): siRNA sense strand
aggaggaggaggaggagga

SEQ ID NO: 2596417 - RNA, 19 nt, Homo sapiens
  misc_RNA (1)...(19): siRNA sense strand
aggaggaggaggaggagga

SEQ ID NO: 2596418 - RNA, 19 nt, Homo sapiens
  misc_RNA (1)...(19): siRNA sense strand
agugaaagcagagaagaaa

SEQ ID NO: 2596419 - RNA, 19 nt, Homo sapiens
  misc_RNA (1)...(19): siRNA sense strand
cuauagcaggcaagagcaa

SEQ ID NO: 2596420 - RNA, 19 nt, Homo sapiens
  misc_RNA (1)...(19): siRNA sense strand
aagcagagaagaaaaguua

SEQ ID NO: 2596421 - RNA, 19 nt, Homo sapiens
  misc_RNA (1)...(19): siRNA sense strand
cauugaaacgcaugucuaa

SEQ ID NO: 2596422 - RNA, 19 nt, Homo sapiens
  misc_RNA (1)...(19): siRNA sense strand
gugcauaagggaucugaau

SEQ ID NO: 2596423 - RNA, 19 nt, Homo sapiens
  misc_RNA (1)...(19): siRNA sense strand
uguaauuacuggaaccaca

SEQ ID NO: 2596424 - RNA, 19 nt, Homo sapiens
  misc_RNA (1)...(19): siRNA sense strand
ccaaauaagaugaagagag

SEQ ID NO: 2596425 - RNA, 19 nt, Homo sapiens
  misc_RNA (1)...(19): siRNA sense strand
ggaacaagauuacuggagu

SEQ ID NO: 2596426 - RNA, 19 nt, Homo sapiens
  misc_RNA (1)...(19): siRNA sense strand
gugaaagcagagaagaaaa

SEQ ID NO: 2596427 - RNA, 19 nt, Homo sapiens
  misc_RNA (1)...(19): siRNA sense strand
gagaagaaaaguuaggaga

SEQ ID NO: 2596428 - RNA, 19 nt, Homo sapiens
  misc_RNA (1)...(19): siRNA sense strand
agcacaaaucaaagaagaa

SEQ ID NO: 2596429 - RNA, 19 nt, Homo sapiens
  misc_RNA (1)...(19): siRNA sense strand
gagagaggauuaagcagga

SEQ ID NO: 2596430 - RNA, 19 nt, Homo sapiens
  misc_RNA (1)...(19): siRNA sense strand
guaaugauccuguaaugaa

SEQ ID NO: 2596431 - RNA, 19 nt, Homo sapiens
  misc_RNA (1)...(19): siRNA sense strand
aucaaguagucaaggaaga

SEQ ID NO: 2596432 - RNA, 19 nt, Homo sapiens
  misc_RNA (1)...(19): siRNA sense strand
uggaggaagaggaggagga

SEQ ID NO: 2596433 - RNA, 19 nt, Homo sapiens
  misc_RNA (1)...(19): siRNA sense strand
gugagagugacaaggaaga

SEQ ID NO: 2596434 - RNA, 19 nt, Homo sapiens
  misc_RNA (1)...(19): siRNA sense strand
aagaggaggaggaggagga

SEQ ID NO: 2596435 - RNA, 19 nt, Homo sapiens
  misc_RNA (1)...(19): siRNA sense strand
uagucaaggaagacgagaa

SEQ ID NO: 2596436 - RNA, 19 nt, Homo sapiens
  misc_RNA (1)...(19): siRNA sense strand
ugacaaggaagaagcagau

SEQ ID NO: 2596437 - RNA, 19 nt, Homo sapiens
  misc_RNA (1)...(19): siRNA sense strand
cauuucuggaucaggaaua

SEQ ID NO: 2596438 - RNA, 19 nt, Homo sapiens
  misc_RNA (1)...(19): siRNA sense strand
gaaguagccauuaucgaua

SEQ ID NO: 2596439 - RNA, 19 nt, Homo sapiens
  misc_RNA (1)...(19): siRNA sense strand
aauccagacuugacaucua

SEQ ID NO: 2596440 - RNA, 19 nt, Homo sapiens
  misc_RNA (1)...(19): siRNA sense strand
gaacaagauuacuggagug

SEQ ID NO: 2596441 - RNA, 19 nt, Homo sapiens
  misc_RNA (1)...(19): siRNA sense strand
agguggaggaagaggagga

SEQ ID NO: 2596442 - RNA, 19 nt, Homo sapiens
  misc_RNA (1)...(19): siRNA sense strand
gacuugacaucuaaagaau

SEQ ID NO: 2596443 - RNA, 19 nt, Homo sapiens
  misc_RNA (1)...(19): siRNA sense strand
cauuaugaugggaggacca

SEQ ID NO: 2596444 - RNA, 19 nt, Homo sapiens
  misc_RNA (1)...(19): siRNA sense strand
aauccaugcuggcgaugaa

SEQ ID NO: 2596445 - RNA, 19 nt, Homo sapiens
  misc_RNA (1)...(19): siRNA sense strand
ggcaagagcaaaagacgaa

SEQ ID NO: 2596446 - RNA, 19 nt, Homo sapiens
  misc_RNA (1)...(19): siRNA sense strand
gguauauuaaugaggagga

SEQ ID NO: 2596447 - RNA, 19 nt, Homo sapiens
  misc_RNA (1)...(19): siRNA sense strand
uggcaagcuacgaccuaua

SEQ ID NO: 2596448 - RNA, 19 nt, Homo sapiens
  misc_RNA (1)...(19): siRNA sense strand
ugaaaagauugcucaagaa

SEQ ID NO: 2596449 - RNA, 19 nt, Homo sapiens
  misc_RNA (1)...(19): siRNA sense strand
ucaagauaguagagcacau

SEQ ID NO: 2596450 - RNA, 19 nt, Homo sapiens
  misc_RNA (1)...(19): siRNA sense strand
ugguggaggcuguggcaau

SEQ ID NO: 2596451 - RNA, 19 nt, Homo sapiens
  misc_RNA (1)...(19): siRNA sense strand
auggaacaggcuugagaaa

SEQ ID NO: 2596452 - RNA, 19 nt, Homo sapiens
  misc_RNA (1)...(19): siRNA sense strand
gaacauggguccuacagca

SEQ ID NO: 2596453 - RNA, 19 nt, Homo sapiens
  misc_RNA (1)...(19): siRNA sense strand
ugguagugcuauuggccuu

SEQ ID NO: 2596454 - RNA, 19 nt, Homo sapiens
  misc_RNA (1)...(19): siRNA sense strand
ucgcaaugaaguagaaugu

SEQ ID NO: 2596455 - RNA, 19 nt, Homo sapiens
  misc_RNA (1)...(19): siRNA sense strand
ucaucaagauaguagagca

SEQ ID NO: 2596456 - RNA, 19 nt, Homo sapiens
  misc_RNA (1)...(19): siRNA sense strand
caucaagauaguagagcac

SEQ ID NO: 2596457 - RNA, 19 nt, Homo sapiens
  misc_RNA (1)...(19): siRNA sense strand
aggcuguggcaauggaaca

SEQ ID NO: 2596458 - RNA, 19 nt, Homo sapiens
  misc_RNA (1)...(19): siRNA sense strand
agauguuuauauagagcca

SEQ ID NO: 2596459 - RNA, 19 nt, Homo sapiens
  misc_RNA (1)...(19): siRNA sense strand
ccaucaaagcacugaagaa

SEQ ID NO: 2596460 - RNA, 19 nt, Homo sapiens
  misc_RNA (1)...(19): siRNA sense strand
acgagaugcugguggguga

SEQ ID NO: 2596461 - RNA, 19 nt, Homo sapiens
  misc_RNA (1)...(19): siRNA sense strand
guucaaggggacagggaaa

SEQ ID NO: 2596462 - RNA, 19 nt, Homo sapiens
  misc_RNA (1)...(19): siRNA sense strand
gggacgagauagagagccu

SEQ ID NO: 2596463 - RNA, 19 nt, Homo sapiens
  misc_RNA (1)...(19): siRNA sense strand
ggaccaaggccaagcacca

SEQ ID NO: 2596464 - RNA, 19 nt, Homo sapiens
  misc_RNA (1)...(19): siRNA sense strand
ggagaacacaggaccgcaa

SEQ ID NO: 2596465 - RNA, 19 nt, Homo sapiens
  misc_RNA (1)...(19): siRNA sense strand
gggaccugaaguuggauaa

SEQ ID NO: 2596466 - RNA, 19 nt, Homo sapiens
  misc_RNA (1)...(19): siRNA sense strand
ccgaggagaucaaggucca

SEQ ID NO: 2596467 - RNA, 19 nt, Homo sapiens
  misc_RNA (1)...(19): siRNA sense strand
aggaugagaaggaggugau

SEQ ID NO: 2596468 - RNA, 19 nt, Homo sapiens
  misc_RNA (1)...(19): siRNA sense strand
ccaguaauuuccugcccaa

SEQ ID NO: 2596469 - RNA, 19 nt, Homo sapiens
  misc_RNA (1)...(19): siRNA sense strand
gcugagaacaugacccaca

SEQ ID NO: 2596470 - RNA, 19 nt, Homo sapiens
  misc_RNA (1)...(19): siRNA sense strand
cugcuuaguagccggagaa

SEQ ID NO: 2596471 - RNA, 19 nt, Homo sapiens
  misc_RNA (1)...(19): siRNA sense strand
cgccaagaacguggugaaa

SEQ ID NO: 2596472 - RNA, 19 nt, Homo sapiens
  misc_RNA (1)...(19): siRNA sense strand
gcaaggaagggaucggcuu

SEQ ID NO: 2596473 - RNA, 19 nt, Homo sapiens
  misc_RNA (1)...(19): siRNA sense strand
cuuaguagccggagaacac

SEQ ID NO: 2596474 - RNA, 19 nt, Homo sapiens
  misc_RNA (1)...(19): siRNA sense strand
ggaagguccuccuggucca

SEQ ID NO: 2596475 - RNA, 19 nt, Homo sapiens
  misc_RNA (1)...(19): siRNA sense strand
cgacuuugugucagagcga

SEQ ID NO: 2596476 - RNA, 19 nt, Homo sapiens
  misc_RNA (1)...(19): siRNA sense strand
gggcugagaacaugaccca

SEQ ID NO: 2596477 - RNA, 19 nt, Homo sapiens
  misc_RNA (1)...(19): siRNA sense strand
cagccauucuucaggacca

SEQ ID NO: 2596478 - RNA, 19 nt, Homo sapiens
  misc_RNA (1)...(19): siRNA sense strand
acuuugugucagagcgauu

SEQ ID NO: 2596479 - RNA, 19 nt, Homo sapiens
  misc_RNA (1)...(19): siRNA sense strand
ggaaauagguuaaagguuc

SEQ ID NO: 2596480 - RNA, 19 nt, Homo sapiens
  misc_RNA (1)...(19): siRNA sense strand
cauuaaacguauugagagu

SEQ ID NO: 2596481 - RNA, 19 nt, Homo sapiens
  misc_RNA (1)...(19): siRNA sense strand
ccuuaauggcaacgauaua

SEQ ID NO: 2596482 - RNA, 19 nt, Homo sapiens
  misc_RNA (1)...(19): siRNA sense strand
aggaauucuaugaggaaau

SEQ ID NO: 2596483 - RNA, 19 nt, Homo sapiens
  misc_RNA (1)...(19): siRNA sense strand
ccucaaauaaacagccuaa

SEQ ID NO: 2596484 - RNA, 19 nt, Homo sapiens
  misc_RNA (1)...(19): siRNA sense strand
ccauagugacggugaauca

SEQ ID NO: 2596485 - RNA, 19 nt, Homo sapiens
  misc_RNA (1)...(19): siRNA sense strand
cuaaguaaauugaggguuc

SEQ ID NO: 2596486 - RNA, 19 nt, Homo sapiens
  misc_RNA (1)...(19): siRNA sense strand
cuacguggaaauagguuaa

SEQ ID NO: 2596487 - RNA, 19 nt, Homo sapiens
  misc_RNA (1)...(19): siRNA sense strand
uggaaaggaccuacgagaa

SEQ ID NO: 2596488 - RNA, 19 nt, Homo sapiens
  misc_RNA (1)...(19): siRNA sense strand
uagaggacucagaggaaau

SEQ ID NO: 2596489 - RNA, 19 nt, Homo sapiens
  misc_RNA (1)...(19): siRNA sense strand
gauaauucuucuaagcaca

SEQ ID NO: 2596490 - RNA, 19 nt, Homo sapiens
  misc_RNA (1)...(19): siRNA sense strand
aauagaggacucagaggaa

SEQ ID NO: 2596491 - RNA, 19 nt, Homo sapiens
  misc_RNA (1)...(19): siRNA sense strand
gaagaaaacccuuggaacu

SEQ ID NO: 2596492 - RNA, 19 nt, Homo sapiens
  misc_RNA (1)...(19): siRNA sense strand
gagaaaucaggaagacaga

SEQ ID NO: 2596493 - RNA, 19 nt, Homo sapiens
  misc_RNA (1)...(19): siRNA sense strand
cgucaucaaguaaggagaa

SEQ ID NO: 2596494 - RNA, 19 nt, Homo sapiens
  misc_RNA (1)...(19): siRNA sense strand
cuucaaaccaagccggauu

SEQ ID NO: 2596495 - RNA, 19 nt, Homo sapiens
  misc_RNA (1)...(19): siRNA sense strand
agaggaauucuaugaggaa

SEQ ID NO: 2596496 - RNA, 19 nt, Homo sapiens
  misc_RNA (1)...(19): siRNA sense strand
gugaaauuguacaacugaa

SEQ ID NO: 2596497 - RNA, 19 nt, Homo sapiens
  misc_RNA (1)...(19): siRNA sense strand
cuacgagaaaucaggaaga

SEQ ID NO: 2596498 - RNA, 19 nt, Homo sapiens
  misc_RNA (1)...(19): siRNA sense strand
acucagaggaaauagauga

SEQ ID NO: 2596499 - RNA, 19 nt, Homo sapiens
  misc_RNA (1)...(19): siRNA sense strand
cuguaucugcagaggaauu

SEQ ID NO: 2596500 - RNA, 19 nt, Homo sapiens
  misc_RNA (1)...(19): siRNA sense strand
ccgaaggcgucgaaagaag

SEQ ID NO: 2596501 - RNA, 19 nt, Homo sapiens
  misc_RNA (1)...(19): siRNA sense strand
gcugagacacccaaggaga

SEQ ID NO: 2596502 - RNA, 19 nt, Homo sapiens
  misc_RNA (1)...(19): siRNA sense strand
gcuacuagaucgagagagg

SEQ ID NO: 2596503 - RNA, 19 nt, Homo sapiens
  misc_RNA (1)...(19): siRNA sense strand
uggaacuguacaugugaaa

SEQ ID NO: 2596504 - RNA, 19 nt, Homo sapiens
  misc_RNA (1)...(19): siRNA sense strand
uggcaacgauauagagaag

SEQ ID NO: 2596505 - RNA, 19 nt, Homo sapiens
  misc_RNA (1)...(19): siRNA sense strand
cugagacacccaaggagaa

SEQ ID NO: 2596506 - RNA, 19 nt, Homo sapiens
  misc_RNA (1)...(19): siRNA sense strand
ccaacuaagccuuccucaa

SEQ ID NO: 2596507 - RNA, 19 nt, Homo sapiens
  misc_RNA (1)...(19): siRNA sense strand
cagaggaauucuaugagga

SEQ ID NO: 2596508 - RNA, 19 nt, Homo sapiens
  misc_RNA (1)...(19): siRNA sense strand
uggaaauagguuaaagguu

SEQ ID NO: 2596509 - RNA, 19 nt, Homo sapiens
  misc_RNA (1)...(19): siRNA sense strand
ggacugucucuauggaaca

SEQ ID NO: 2596510 - RNA, 19 nt, Homo sapiens
  misc_RNA (1)...(19): siRNA sense strand
guucaaugucauccgggaa

SEQ ID NO: 2596511 - RNA, 19 nt, Homo sapiens
  misc_RNA (1)...(19): siRNA sense strand
ccaauuuauuuaaggcugu

SEQ ID NO: 2596512 - RNA, 19 nt, Homo sapiens
  misc_RNA (1)...(19): siRNA sense strand
aacuguaucugcagaggaa

SEQ ID NO: 2596513 - RNA, 19 nt, Homo sapiens
  misc_RNA (1)...(19): siRNA sense strand
cugaagaguuggcuggaac

SEQ ID NO: 2596514 - RNA, 19 nt, Homo sapiens
  misc_RNA (1)...(19): siRNA sense strand
agaagcagggagugcagaa

SEQ ID NO: 2596515 - RNA, 19 nt, Homo sapiens
  misc_RNA (1)...(19): siRNA sense strand
ugguaguggcaguaugcua

SEQ ID NO: 2596516 - RNA, 19 nt, Homo sapiens
  misc_RNA (1)...(19): siRNA sense strand
ugucugacucugagguaga

SEQ ID NO: 2596517 - RNA, 19 nt, Homo sapiens
  misc_RNA (1)...(19): siRNA sense strand
gguagaggcuaguuuggga

SEQ ID NO: 2596518 - RNA, 19 nt, Homo sapiens
  misc_RNA (1)...(19): siRNA sense strand
cugcagaggaauucuauga

SEQ ID NO: 2596519 - RNA, 19 nt, Homo sapiens
  misc_RNA (1)...(19): siRNA sense strand
uuucggaaccuaaguaaau

SEQ ID NO: 2596520 - RNA, 19 nt, Homo sapiens
  misc_RNA (1)...(19): siRNA sense strand
gcagaagccugauggagcu

SEQ ID NO: 2596521 - RNA, 19 nt, Homo sapiens
  misc_RNA (1)...(19): siRNA sense strand
aaggagaaugcauggccaa

SEQ ID NO: 2596522 - RNA, 19 nt, Homo sapiens
  misc_RNA (1)...(19): siRNA sense strand
aaugagaauccuugggacu

SEQ ID NO: 2596523 - RNA, 19 nt, Homo sapiens
  misc_RNA (1)...(19): siRNA sense strand
gcuagaucacauuggcaga

SEQ ID NO: 2596524 - RNA, 19 nt, Homo sapiens
  misc_RNA (1)...(19): siRNA sense strand
ccuguaauuugcacaucaa

SEQ ID NO: 2596525 - RNA, 19 nt, Homo sapiens
  misc_RNA (1)...(19): siRNA sense strand
ggaaagggcuucacagacc

SEQ ID NO: 2596526 - RNA, 19 nt, Homo sapiens
  misc_RNA (1)...(19): siRNA sense strand
accucgaaguccuggagaa

SEQ ID NO: 2596527 - RNA, 19 nt, Homo sapiens
  misc_RNA (1)...(19): siRNA sense strand
ggauaauucuucuaagcac

SEQ ID NO: 2596528 - RNA, 19 nt, Homo sapiens
  misc_RNA (1)...(19): siRNA sense strand
aaggagaaccauaguaacu

SEQ ID NO: 2596529 - RNA, 19 nt, Homo sapiens
  misc_RNA (1)...(19): siRNA sense strand
auagaggacucagaggaaa

SEQ ID NO: 2596530 - RNA, 19 nt, Homo sapiens
  misc_RNA (1)...(19): siRNA sense strand
cgggaaugggugaggcucu

SEQ ID NO: 2596531 - RNA, 19 nt, Homo sapiens
  misc_RNA (1)...(19): siRNA sense strand
cuggaaagggcuucacaga

SEQ ID NO: 2596532 - RNA, 19 nt, Homo sapiens
  misc_RNA (1)...(19): siRNA sense strand
aagugauuaccucgaguua

SEQ ID NO: 2596533 - RNA, 19 nt, Homo sapiens
  misc_RNA (1)...(19): siRNA sense strand
gccaaagaccugagggcua

SEQ ID NO: 2596534 - RNA, 19 nt, Homo sapiens
  misc_RNA (1)...(19): siRNA sense strand
ccuuaaagagcuaggauuu

SEQ ID NO: 2596535 - RNA, 19 nt, Homo sapiens
  misc_RNA (1)...(19): siRNA sense strand
cugcaaaguagcuggguuu

SEQ ID NO: 2596536 - RNA, 19 nt, Homo sapiens
  misc_RNA (1)...(19): siRNA sense strand
caugcaaacacuugauaaa

SEQ ID NO: 2596537 - RNA, 19 nt, Homo sapiens
  misc_RNA (1)...(19): siRNA sense strand
aacugaaacuugugggcaa

SEQ ID NO: 2596538 - RNA, 19 nt, Homo sapiens
  misc_RNA (1)...(19): siRNA sense strand
caaucuaccaagaguuaaa

SEQ ID NO: 2596539 - RNA, 19 nt, Homo sapiens
  misc_RNA (1)...(19): siRNA sense strand
gaaagaagccuuagcagca

SEQ ID NO: 2596540 - RNA, 19 nt, Homo sapiens
  misc_RNA (1)...(19): siRNA sense strand
ccaaauuguuuauaggcuu

SEQ ID NO: 2596541 - RNA, 19 nt, Homo sapiens
  misc_RNA (1)...(19): siRNA sense strand
gugaauauuuacugggaag

SEQ ID NO: 2596542 - RNA, 19 nt, Homo sapiens
  misc_RNA (1)...(19): siRNA sense strand
gcgacguguuaccaagaaa

SEQ ID NO: 2596543 - RNA, 19 nt, Homo sapiens
  misc_RNA (1)...(19): siRNA sense strand
caaaagaugcuuaggacuu

SEQ ID NO: 2596544 - RNA, 19 nt, Homo sapiens
  misc_RNA (1)...(19): siRNA sense strand
ugauuaugcagaugaagaa

SEQ ID NO: 2596545 - RNA, 19 nt, Homo sapiens
  misc_RNA (1)...(19): siRNA sense strand
gguacaaagauaagcagca

SEQ ID NO: 2596546 - RNA, 19 nt, Homo sapiens
  misc_RNA (1)...(19): siRNA sense strand
accaagaguuaaagacuga

SEQ ID NO: 2596547 - RNA, 19 nt, Homo sapiens
  misc_RNA (1)...(19): siRNA sense strand
cuguaacguuagugcuauu

SEQ ID NO: 2596548 - RNA, 19 nt, Homo sapiens
  misc_RNA (1)...(19): siRNA sense strand
ugggcuaaaucaacugaaa

SEQ ID NO: 2596549 - RNA, 19 nt, Homo sapiens
  misc_RNA (1)...(19): siRNA sense strand
aguuuaaagaagacuggaa

SEQ ID NO: 2596550 - RNA, 19 nt, Homo sapiens
  misc_RNA (1)...(19): siRNA sense strand
agcuaggauuucauaguaa

SEQ ID NO: 2596551 - RNA, 19 nt, Homo sapiens
  misc_RNA (1)...(19): siRNA sense strand
ccucaggucuuuaucggua

SEQ ID NO: 2596552 - RNA, 19 nt, Homo sapiens
  misc_RNA (1)...(19): siRNA sense strand
ccgaaauaaugaagucugu

SEQ ID NO: 2596553 - RNA, 19 nt, Homo sapiens
  misc_RNA (1)...(19): siRNA sense strand
ggacaguuuugaaggacuu

SEQ ID NO: 2596554 - RNA, 19 nt, Homo sapiens
  misc_RNA (1)...(19): siRNA sense strand
caguagagcuuuugccaca

SEQ ID NO: 2596555 - RNA, 19 nt, Homo sapiens
  misc_RNA (1)...(19): siRNA sense strand
ggucuuuaucgguaccaua

SEQ ID NO: 2596556 - RNA, 19 nt, Homo sapiens
  misc_RNA (1)...(19): siRNA sense strand
gcuuaucagugcugugcau

SEQ ID NO: 2596557 - RNA, 19 nt, Homo sapiens
  misc_RNA (1)...(19): siRNA sense strand
cugauuaugcagaugaaga

SEQ ID NO: 2596558 - RNA, 19 nt, Homo sapiens
  misc_RNA (1)...(19): siRNA sense strand
cgaaagaagcuuaucugca

SEQ ID NO: 2596559 - RNA, 19 nt, Homo sapiens
  misc_RNA (1)...(19): siRNA sense strand
aggugaaacgccaucauua

SEQ ID NO: 2596560 - RNA, 19 nt, Homo sapiens
  misc_RNA (1)...(19): siRNA sense strand
auggagcauuugaugguaa

SEQ ID NO: 2596561 - RNA, 19 nt, Homo sapiens
  misc_RNA (1)...(19): siRNA sense strand
cuauuaaacucacuagcau

SEQ ID NO: 2596562 - RNA, 19 nt, Homo sapiens
  misc_RNA (1)...(19): siRNA sense strand
uauuaauggccguuaucua

SEQ ID NO: 2596563 - RNA, 19 nt, Homo sapiens
  misc_RNA (1)...(19): siRNA sense strand
cuauacugcaacuuggaaa

SEQ ID NO: 2596564 - RNA, 19 nt, Homo sapiens
  misc_RNA (1)...(19): siRNA sense strand
gcuugauuucugugucuaa

SEQ ID NO: 2596565 - RNA, 19 nt, Homo sapiens
  misc_RNA (1)...(19): siRNA sense strand
ucuucaacccaaaguuuaa

SEQ ID NO: 2596566 - RNA, 19 nt, Homo sapiens
  misc_RNA (1)...(19): siRNA sense strand
guuuagaugccaaccauau

SEQ ID NO: 2596567 - RNA, 19 nt, Homo sapiens
  misc_RNA (1)...(19): siRNA sense strand
gccuuaaagagcuaggauu

SEQ ID NO: 2596568 - RNA, 19 nt, Homo sapiens
  misc_RNA (1)...(19): siRNA sense strand
ggcuaaaucaacugaaacu

SEQ ID NO: 2596569 - RNA, 19 nt, Homo sapiens
  misc_RNA (1)...(19): siRNA sense strand
ccucagaaagugccauauu

SEQ ID NO: 2596570 - RNA, 19 nt, Homo sapiens
  misc_RNA (1)...(19): siRNA sense strand
cuggauaucaguaugaaca

SEQ ID NO: 2596571 - RNA, 19 nt, Homo sapiens
  misc_RNA (1)...(19): siRNA sense strand
aaagaagcuuaucugcaaa

SEQ ID NO: 2596572 - RNA, 19 nt, Homo sapiens
  misc_RNA (1)...(19): siRNA sense strand
gccauuuccuacaggugaa

SEQ ID NO: 2596573 - RNA, 19 nt, Homo sapiens
  misc_RNA (1)...(19): siRNA sense strand
cguaaucaaaucuaccaaa

SEQ ID NO: 2596574 - RNA, 19 nt, Homo sapiens
  misc_RNA (1)...(19): siRNA sense strand
cgucuuacugugugguuca

SEQ ID NO: 2596575 - RNA, 19 nt, Homo sapiens
  misc_RNA (1)...(19): siRNA sense strand
uuuggcauuuggugggaaa

SEQ ID NO: 2596576 - RNA, 19 nt, Homo sapiens
  misc_RNA (1)...(19): siRNA sense strand
gcugcaaaguagcuggguu

SEQ ID NO: 2596577 - RNA, 19 nt, Homo sapiens
  misc_RNA (1)...(19): siRNA sense strand
caauaaaauuagaggccug

SEQ ID NO: 2596578 - RNA, 19 nt, Homo sapiens
  misc_RNA (1)...(19): siRNA sense strand
caagcauggugcagcaguu

SEQ ID NO: 2596579 - RNA, 19 nt, Homo sapiens
  misc_RNA (1)...(19): siRNA sense strand
uugacagguacaaagauaa

SEQ ID NO: 2596580 - RNA, 19 nt, Homo sapiens
  misc_RNA (1)...(19): siRNA sense strand
gacaugagcuggaggcuga

SEQ ID NO: 2596581 - RNA, 19 nt, Homo sapiens
  misc_RNA (1)...(19): siRNA sense strand
uggaggagguggaugguca

SEQ ID NO: 2596582 - RNA, 19 nt, Homo sapiens
  misc_RNA (1)...(19): siRNA sense strand
gagcacagccagagggaug

SEQ ID NO: 2596583 - RNA, 19 nt, Homo sapiens
  misc_RNA (1)...(19): siRNA sense strand
aggaugaggaagaugaaga

SEQ ID NO: 2596584 - RNA, 19 nt, Homo sapiens
  misc_RNA (1)...(19): siRNA sense strand
acgaauguguggaggaggu

SEQ ID NO: 2596585 - RNA, 19 nt, Homo sapiens
  misc_RNA (1)...(19): siRNA sense strand
ggacggagaugccugggau

SEQ ID NO: 2596586 - RNA, 19 nt, Homo sapiens
  misc_RNA (1)...(19): siRNA sense strand
ggagaugaguugcuggaug

SEQ ID NO: 2596587 - RNA, 19 nt, Homo sapiens
  misc_RNA (1)...(19): siRNA sense strand
guuauuguagcgagggaca

SEQ ID NO: 2596588 - RNA, 19 nt, Homo sapiens
  misc_RNA (1)...(19): siRNA sense strand
gaaaagaggcggaggcuga

SEQ ID NO: 2596589 - RNA, 19 nt, Homo sapiens
  misc_RNA (1)...(19): siRNA sense strand
ccgagaacuaagaguguuu

SEQ ID NO: 2596590 - RNA, 19 nt, Homo sapiens
  misc_RNA (1)...(19): siRNA sense strand
aggcggaggcugauggaau

SEQ ID NO: 2596591 - RNA, 19 nt, Homo sapiens
  misc_RNA (1)...(19): siRNA sense strand
uggugaagcuccugcguga

SEQ ID NO: 2596592 - RNA, 19 nt, Homo sapiens
  misc_RNA (1)...(19): siRNA sense strand
cugcaguugagucgggaaa

SEQ ID NO: 2596593 - RNA, 19 nt, Homo sapiens
  misc_RNA (1)...(19): siRNA sense strand
gggaacugggcuugggaca

SEQ ID NO: 2596594 - RNA, 19 nt, Homo sapiens
  misc_RNA (1)...(19): siRNA sense strand
ggaaacgggaacugggcuu

SEQ ID NO: 2596595 - RNA, 19 nt, Homo sapiens
  misc_RNA (1)...(19): siRNA sense strand
uguuuaggagggaggagaa

SEQ ID NO: 2596596 - RNA, 19 nt, Homo sapiens
  misc_RNA (1)...(19): siRNA sense strand
aggaugaguuugaggagac

SEQ ID NO: 2596597 - RNA, 19 nt, Homo sapiens
  misc_RNA (1)...(19): siRNA sense strand
acaucaggguacagugcau

SEQ ID NO: 2596598 - RNA, 19 nt, Homo sapiens
  misc_RNA (1)...(19): siRNA sense strand
cugcuauagcuguggggaa

SEQ ID NO: 2596599 - RNA, 19 nt, Homo sapiens
  misc_RNA (1)...(19): siRNA sense strand
uggcacaagauaucgacua

SEQ ID NO: 2596600 - RNA, 19 nt, Homo sapiens
  misc_RNA (1)...(19): siRNA sense strand
gaggaugaguuugaggaga

SEQ ID NO: 2596601 - RNA, 19 nt, Homo sapiens
  misc_RNA (1)...(19): siRNA sense strand
aguaucuagcuuuguguua

SEQ ID NO: 2596602 - RNA, 19 nt, Homo sapiens
  misc_RNA (1)...(19): siRNA sense strand
uccaaagagcuguagaaaa

SEQ ID NO: 2596603 - RNA, 19 nt, Homo sapiens
  misc_RNA (1)...(19): siRNA sense strand
cugacauggagcagaguaa

SEQ ID NO: 2596604 - RNA, 19 nt, Homo sapiens
  misc_RNA (1)...(19): siRNA sense strand
aggagaagauucagaggca

SEQ ID NO: 2596605 - RNA, 19 nt, Homo sapiens
  misc_RNA (1)...(19): siRNA sense strand
ggaaaugaagaaauggaga

SEQ ID NO: 2596606 - RNA, 19 nt, Homo sapiens
  misc_RNA (1)...(19): siRNA sense strand
aguaaagacgggugugaga

SEQ ID NO: 2596607 - RNA, 19 nt, Homo sapiens
  misc_RNA (1)...(19): siRNA sense strand
gagcagaccuugaggaguc

SEQ ID NO: 2596608 - RNA, 19 nt, Homo sapiens
  misc_RNA (1)...(19): siRNA sense strand
gcuggguggaggagaagaa

SEQ ID NO: 2596609 - RNA, 19 nt, Homo sapiens
  misc_RNA (1)...(19): siRNA sense strand
ccuccagcacugugagcaa

SEQ ID NO: 2596610 - RNA, 19 nt, Homo sapiens
  misc_RNA (1)...(19): siRNA sense strand
cuugaggaguccauggaau

SEQ ID NO: 2596611 - RNA, 19 nt, Homo sapiens
  misc_RNA (1)...(19): siRNA sense strand
cauuaugagcgucuggcaa

SEQ ID NO: 2596612 - RNA, 19 nt, Homo sapiens
  misc_RNA (1)...(19): siRNA sense strand
cagcagugcaggugggaug

SEQ ID NO: 2596613 - RNA, 19 nt, Homo sapiens
  misc_RNA (1)...(19): siRNA sense strand
gcagaaauuuacucgagca

SEQ ID NO: 2596614 - RNA, 19 nt, Homo sapiens
  misc_RNA (1)...(19): siRNA sense strand
uggaagucucccagaguca

SEQ ID NO: 2596615 - RNA, 19 nt, Homo sapiens
  misc_RNA (1)...(19): siRNA sense strand
cagugaauuuuguggcgaa

SEQ ID NO: 2596616 - RNA, 19 nt, Homo sapiens
  misc_RNA (1)...(19): siRNA sense strand
gagaugagcgcgucagcga

SEQ ID NO: 2596617 - RNA, 19 nt, Homo sapiens
  misc_RNA (1)...(19): siRNA sense strand
gaaauuuacucgagcagug

SEQ ID NO: 2596618 - RNA, 19 nt, Homo sapiens
  misc_RNA (1)...(19): siRNA sense strand
aaaccaaggaaaagaauca

SEQ ID NO: 2596619 - RNA, 19 nt, Homo sapiens
  misc_RNA (1)...(19): siRNA sense strand
cagaaguagaaguagaaga

SEQ ID NO: 2596620 - RNA, 19 nt, Homo sapiens
  misc_RNA (1)...(19): siRNA sense strand
gcuuaaagggcaagaacgu

SEQ ID NO: 2596621 - RNA, 19 nt, Homo sapiens
  misc_RNA (1)...(19): siRNA sense strand
uggaaaagaacuacacaaa

SEQ ID NO: 2596622 - RNA, 19 nt, Homo sapiens
  misc_RNA (1)...(19): siRNA sense strand
cugaagaggaagauguuga

SEQ ID NO: 2596623 - RNA, 19 nt, Homo sapiens
  misc_RNA (1)...(19): siRNA sense strand
ggagaaaauaagagauguu

SEQ ID NO: 2596624 - RNA, 19 nt, Homo sapiens
  misc_RNA (1)...(19): siRNA sense strand
cauugaugacugugccaaa

SEQ ID NO: 2596625 - RNA, 19 nt, Homo sapiens
  misc_RNA (1)...(19): siRNA sense strand
cuuacaggauugugaggau

SEQ ID NO: 2596626 - RNA, 19 nt, Homo sapiens
  misc_RNA (1)...(19): siRNA sense strand
agaauaucggugaaaguau

SEQ ID NO: 2596627 - RNA, 19 nt, Homo sapiens
  misc_RNA (1)...(19): siRNA sense strand
agaggcagaaugaggaaau

SEQ ID NO: 2596628 - RNA, 19 nt, Homo sapiens
  misc_RNA (1)...(19): siRNA sense strand
auuacagaccgaagaagua

SEQ ID NO: 2596629 - RNA, 19 nt, Homo sapiens
  misc_RNA (1)...(19): siRNA sense strand
uugaaugcuccuuggcuua

SEQ ID NO: 2596630 - RNA, 19 nt, Homo sapiens
  misc_RNA (1)...(19): siRNA sense strand
ucagaauaucggugaaagu

SEQ ID NO: 2596631 - RNA, 19 nt, Homo sapiens
  misc_RNA (1)...(19): siRNA sense strand
acaucuaugccuacagaau

SEQ ID NO: 2596632 - RNA, 19 nt, Homo sapiens
  misc_RNA (1)...(19): siRNA sense strand
uguugaaugugaagaugau

SEQ ID NO: 2596633 - RNA, 19 nt, Homo sapiens
  misc_RNA (1)...(19): siRNA sense strand
uauuagaauuagcgacgau

SEQ ID NO: 2596634 - RNA, 19 nt, Homo sapiens
  misc_RNA (1)...(19): siRNA sense strand
guugaaugcuccuuggcuu

SEQ ID NO: 2596635 - RNA, 19 nt, Homo sapiens
  misc_RNA (1)...(19): siRNA sense strand
acacuuugcuugcagguga

SEQ ID NO: 2596636 - RNA, 19 nt, Homo sapiens
  misc_RNA (1)...(19): siRNA sense strand
gaggagucaucuaaggcuu

SEQ ID NO: 2596637 - RNA, 19 nt, Homo sapiens
  misc_RNA (1)...(19): siRNA sense strand
ccagaggcagaaugaggaa

SEQ ID NO: 2596638 - RNA, 19 nt, Homo sapiens
  misc_RNA (1)...(19): siRNA sense strand
agaaaacugaagaggaaga

SEQ ID NO: 2596639 - RNA, 19 nt, Homo sapiens
  misc_RNA (1)...(19): siRNA sense strand
agauguugaaugugaagau

SEQ ID NO: 2596640 - RNA, 19 nt, Homo sapiens
  misc_RNA (1)...(19): siRNA sense strand
ccagaaacauacuagugga

SEQ ID NO: 2596641 - RNA, 19 nt, Homo sapiens
  misc_RNA (1)...(19): siRNA sense strand
gggcagaagcacugaaaca

SEQ ID NO: 2596642 - RNA, 19 nt, Homo sapiens
  misc_RNA (1)...(19): siRNA sense strand
gcucaugaacacaaagaaa

SEQ ID NO: 2596643 - RNA, 19 nt, Homo sapiens
  misc_RNA (1)...(19): siRNA sense strand
cuguaaacgcuguggucaa

SEQ ID NO: 2596644 - RNA, 19 nt, Homo sapiens
  misc_RNA (1)...(19): siRNA sense strand
acuucaagcuacugacaaa

SEQ ID NO: 2596645 - RNA, 19 nt, Homo sapiens
  misc_RNA (1)...(19): siRNA sense strand
ggagaauggcagaagauga

SEQ ID NO: 2596646 - RNA, 19 nt, Homo sapiens
  misc_RNA (1)...(19): siRNA sense strand
cuucaggguucuuuggaaa

SEQ ID NO: 2596647 - RNA, 19 nt, Homo sapiens
  misc_RNA (1)...(19): siRNA sense strand
guuagagaguauugccaaa

SEQ ID NO: 2596648 - RNA, 19 nt, Homo sapiens
  misc_RNA (1)...(19): siRNA sense strand
gaguauugccaaagaugaa

SEQ ID NO: 2596649 - RNA, 19 nt, Homo sapiens
  misc_RNA (1)...(19): siRNA sense strand
gaaaauaaguugcuggaga

SEQ ID NO: 2596650 - RNA, 19 nt, Homo sapiens
  misc_RNA (1)...(19): siRNA sense strand
gaaagaaagauaaugguga

SEQ ID NO: 2596651 - RNA, 19 nt, Homo sapiens
  misc_RNA (1)...(19): siRNA sense strand
uagauugguuagagaguau

SEQ ID NO: 2596652 - RNA, 19 nt, Homo sapiens
  misc_RNA (1)...(19): siRNA sense strand
caaagaugaaauuggagaa

SEQ ID NO: 2596653 - RNA, 19 nt, Homo sapiens
  misc_RNA (1)...(19): siRNA sense strand
auauagacgcauuuggaaa

SEQ ID NO: 2596654 - RNA, 19 nt, Homo sapiens
  misc_RNA (1)...(19): siRNA sense strand
cugcugaugugaaggagaa

SEQ ID NO: 2596655 - RNA, 19 nt, Homo sapiens
  misc_RNA (1)...(19): siRNA sense strand
gguggauguuagagaggau

SEQ ID NO: 2596656 - RNA, 19 nt, Homo sapiens
  misc_RNA (1)...(19): siRNA sense strand
cugcagaagcucagagagu

SEQ ID NO: 2596657 - RNA, 19 nt, Homo sapiens
  misc_RNA (1)...(19): siRNA sense strand
ggauuuugguauuuggaaa

SEQ ID NO: 2596658 - RNA, 19 nt, Homo sapiens
  misc_RNA (1)...(19): siRNA sense strand
aauagauacgagagagcaa

SEQ ID NO: 2596659 - RNA, 19 nt, Homo sapiens
  misc_RNA (1)...(19): siRNA sense strand
gcuguuaaugccagugaaa

SEQ ID NO: 2596660 - RNA, 19 nt, Homo sapiens
  misc_RNA (1)...(19): siRNA sense strand
gcguuauuucagagggauu

SEQ ID NO: 2596661 - RNA, 19 nt, Homo sapiens
  misc_RNA (1)...(19): siRNA sense strand
auggaugaguuuagcaaau

SEQ ID NO: 2596662 - RNA, 19 nt, Homo sapiens
  misc_RNA (1)...(19): siRNA sense strand
aaaauaaguugcuggagaa

SEQ ID NO: 2596663 - RNA, 19 nt, Homo sapiens
  misc_RNA (1)...(19): siRNA sense strand
aaauggucuuacugagaaa

SEQ ID NO: 2596664 - RNA, 19 nt, Homo sapiens
  misc_RNA (1)...(19): siRNA sense strand
aauagugagucgagcaaca

SEQ ID NO: 2596665 - RNA, 19 nt, Homo sapiens
  misc_RNA (1)...(19): siRNA sense strand
gcuucuuuguauagagaca

SEQ ID NO: 2596666 - RNA, 19 nt, Homo sapiens
  misc_RNA (1)...(19): siRNA sense strand
cauuagaagaggaaagugu

SEQ ID NO: 2596667 - RNA, 19 nt, Homo sapiens
  misc_RNA (1)...(19): siRNA sense strand
uggaagagaaucaagaaca

SEQ ID NO: 2596668 - RNA, 19 nt, Homo sapiens
  misc_RNA (1)...(19): siRNA sense strand
ccaugaaagaacacaucaa

SEQ ID NO: 2596669 - RNA, 19 nt, Homo sapiens
  misc_RNA (1)...(19): siRNA sense strand
ccacaguauaacagaagau

SEQ ID NO: 2596670 - RNA, 19 nt, Homo sapiens
  misc_RNA (1)...(19): siRNA sense strand
ggucaagcauggagagcug

SEQ ID NO: 2596671 - RNA, 19 nt, Homo sapiens
  misc_RNA (1)...(19): siRNA sense strand
ugguagaacaggagaucca

SEQ ID NO: 2596672 - RNA, 19 nt, Homo sapiens
  misc_RNA (1)...(19): siRNA sense strand
uguuagagaggaugccaaa

SEQ ID NO: 2596673 - RNA, 19 nt, Homo sapiens
  misc_RNA (1)...(19): siRNA sense strand
agaaaguggcucaugaaca

SEQ ID NO: 2596674 - RNA, 19 nt, Homo sapiens
  misc_RNA (1)...(19): siRNA sense strand
cuaaggaagagcuaaggaa

SEQ ID NO: 2596675 - RNA, 19 nt, Homo sapiens
  misc_RNA (1)...(19): siRNA sense strand
guuaauggaggaacagaau

SEQ ID NO: 2596676 - RNA, 19 nt, Homo sapiens
  misc_RNA (1)...(19): siRNA sense strand
guugagaauauucgaaaga

SEQ ID NO: 2596677 - RNA, 19 nt, Homo sapiens
  misc_RNA (1)...(19): siRNA sense strand
gcauaugaauucaguucca

SEQ ID NO: 2596678 - RNA, 19 nt, Homo sapiens
  misc_RNA (1)...(19): siRNA sense strand
gggugaugguggacagucu

SEQ ID NO: 2596679 - RNA, 19 nt, Homo sapiens
  misc_RNA (1)...(19): siRNA sense strand
agaaccuguugaagggaau

SEQ ID NO: 2596680 - RNA, 19 nt, Homo sapiens
  misc_RNA (1)...(19): siRNA sense strand
gaggaacaaggaauggaaa

SEQ ID NO: 2596681 - RNA, 19 nt, Homo sapiens
  misc_RNA (1)...(19): siRNA sense strand
uggaaugacagaagaggca

SEQ ID NO: 2596682 - RNA, 19 nt, Homo sapiens
  misc_RNA (1)...(19): siRNA sense strand
agagaauaucugggagcaa

SEQ ID NO: 2596683 - RNA, 19 nt, Homo sapiens
  misc_RNA (1)...(19): siRNA sense strand
gaaacaaucuaccuggaca

SEQ ID NO: 2596684 - RNA, 19 nt, Homo sapiens
  misc_RNA (1)...(19): siRNA sense strand
cuauaaucagugcgaggaa

SEQ ID NO: 2596685 - RNA, 19 nt, Homo sapiens
  misc_RNA (1)...(19): siRNA sense strand
ggaugguggauguuagaga

SEQ ID NO: 2596686 - RNA, 19 nt, Homo sapiens
  misc_RNA (1)...(19): siRNA sense strand
ccaaagaagaccaugaaag

SEQ ID NO: 2596687 - RNA, 19 nt, Homo sapiens
  misc_RNA (1)...(19): siRNA sense strand
cugcauuagaagaggaaag

SEQ ID NO: 2596688 - RNA, 19 nt, Homo sapiens
  misc_RNA (1)...(19): siRNA sense strand
gguuagagaguauugccaa

SEQ ID NO: 2596689 - RNA, 19 nt, Homo sapiens
  misc_RNA (1)...(19): siRNA sense strand
cuaaucuggaugacaguaa

SEQ ID NO: 2596690 - RNA, 19 nt, Homo sapiens
  misc_RNA (1)...(19): siRNA sense strand
cccauuaggguaugaaauu

SEQ ID NO: 2596691 - RNA, 19 nt, Homo sapiens
  misc_RNA (1)...(19): siRNA sense strand
agaauuagaaccuguugaa

SEQ ID NO: 2596692 - RNA, 19 nt, Homo sapiens
  misc_RNA (1)...(19): siRNA sense strand
cuacugaggaggaucguuu

SEQ ID NO: 2596693 - RNA, 19 nt, Homo sapiens
  misc_RNA (1)...(19): siRNA sense strand
aggcaaugcaauuaugaga

SEQ ID NO: 2596694 - RNA, 19 nt, Homo sapiens
  misc_RNA (1)...(19): siRNA sense strand
cagaagaggcacaacgacu

SEQ ID NO: 2596695 - RNA, 19 nt, Homo sapiens
  misc_RNA (1)...(19): siRNA sense strand
cgaggaacaaggaauggaa

SEQ ID NO: 2596696 - RNA, 19 nt, Homo sapiens
  misc_RNA (1)...(19): siRNA sense strand
acacagagccccacaguau

SEQ ID NO: 2596697 - RNA, 19 nt, Homo sapiens
  misc_RNA (1)...(19): siRNA sense strand
cuguaauccgggaggcaga

SEQ ID NO: 2596698 - RNA, 19 nt, Homo sapiens
  misc_RNA (1)...(19): siRNA sense strand
gcaagggucugaagcggaa

SEQ ID NO: 2596699 - RNA, 19 nt, Homo sapiens
  misc_RNA (1)...(19): siRNA sense strand
ggaaacgggaggaggagga

SEQ ID NO: 2596700 - RNA, 19 nt, Homo sapiens
  misc_RNA (1)...(19): siRNA sense strand
aggaggaggaggagaagga

SEQ ID NO: 2596701 - RNA, 19 nt, Homo sapiens
  misc_RNA (1)...(19): siRNA sense strand
gcugacaacuuacuggcaa

SEQ ID NO: 2596702 - RNA, 19 nt, Homo sapiens
  misc_RNA (1)...(19): siRNA sense strand
acauugagggccugaguca

SEQ ID NO: 2596703 - RNA, 19 nt, Homo sapiens
  misc_RNA (1)...(19): siRNA sense strand
ccucuauguaugacaauga

SEQ ID NO: 2596704 - RNA, 19 nt, Homo sapiens
  misc_RNA (1)...(19): siRNA sense strand
aggaggaguacccgagaaa

SEQ ID NO: 2596705 - RNA, 19 nt, Homo sapiens
  misc_RNA (1)...(19): siRNA sense strand
gagaacgggcuguggguca

SEQ ID NO: 2596706 - RNA, 19 nt, Homo sapiens
  misc_RNA (1)...(19): siRNA sense strand
ugguggagacaguggacaa

SEQ ID NO: 2596707 - RNA, 19 nt, Homo sapiens
  misc_RNA (1)...(19): siRNA sense strand
uggcccaccuggaggacaa

SEQ ID NO: 2596708 - RNA, 19 nt, Homo sapiens
  misc_RNA (1)...(19): siRNA sense strand
cugugaagcugauggagca

SEQ ID NO: 2596709 - RNA, 19 nt, Homo sapiens
  misc_RNA (1)...(19): siRNA sense strand
acuauuucguggugcgcua

SEQ ID NO: 2596710 - RNA, 19 nt, Homo sapiens
  misc_RNA (1)...(19): siRNA sense strand
acaagaugcacaagcgaga

SEQ ID NO: 2596711 - RNA, 19 nt, Homo sapiens
  misc_RNA (1)...(19): siRNA sense strand
gggcagaugcagcugguca

SEQ ID NO: 2596712 - RNA, 19 nt, Homo sapiens
  misc_RNA (1)...(19): siRNA sense strand
uggagguguuugagagcga

SEQ ID NO: 2596713 - RNA, 19 nt, Homo sapiens
  misc_RNA (1)...(19): siRNA sense strand
acgucaucaugguggagaa

SEQ ID NO: 2596714 - RNA, 19 nt, Homo sapiens
  misc_RNA (1)...(19): siRNA sense strand
ccggcaagaacuacaacaa

SEQ ID NO: 2596715 - RNA, 19 nt, Homo sapiens
  misc_RNA (1)...(19): siRNA sense strand
acaaggagucgguggucau

SEQ ID NO: 2596716 - RNA, 19 nt, Homo sapiens
  misc_RNA (1)...(19): siRNA sense strand
ccuucaagaucaugucaca

SEQ ID NO: 2596717 - RNA, 19 nt, Homo sapiens
  misc_RNA (1)...(19): siRNA sense strand
agucgguggucauggccua

SEQ ID NO: 2596718 - RNA, 19 nt, Homo sapiens
  misc_RNA (1)...(19): siRNA sense strand
gggagacggguuacgacaa

SEQ ID NO: 2596719 - RNA, 19 nt, Homo sapiens
  misc_RNA (1)...(19): siRNA sense strand
cuggcaaccgcguggacua

SEQ ID NO: 2596720 - RNA, 19 nt, Homo sapiens
  misc_RNA (1)...(19): siRNA sense strand
acacagagggccaggugca

SEQ ID NO: 2596721 - RNA, 19 nt, Homo sapiens
  misc_RNA (1)...(19): siRNA sense strand
ucuauaaggcccuggagga

SEQ ID NO: 2596722 - RNA, 19 nt, Homo sapiens
  misc_RNA (1)...(19): siRNA sense strand
acuacaacaagaugcacaa

SEQ ID NO: 2596723 - RNA, 19 nt, Homo sapiens
  misc_RNA (1)...(19): siRNA sense strand
ccuucguuaucguggucaa

SEQ ID NO: 2596724 - RNA, 19 nt, Homo sapiens
  misc_RNA (1)...(19): siRNA sense strand
caagaugauccgaagcuca

SEQ ID NO: 2596725 - RNA, 19 nt, Homo sapiens
  misc_RNA (1)...(19): siRNA sense strand
uuugagggcacgugggaga

SEQ ID NO: 2596726 - RNA, 19 nt, Homo sapiens
  misc_RNA (1)...(19): siRNA sense strand
ugcacaaggaguacagcaa

SEQ ID NO: 2596727 - RNA, 19 nt, Homo sapiens
  misc_RNA (1)...(19): siRNA sense strand
gugaggaaacagacggagu

SEQ ID NO: 2596728 - RNA, 19 nt, Homo sapiens
  misc_RNA (1)...(19): siRNA sense strand
uacagaagaaggugcacaa

SEQ ID NO: 2596729 - RNA, 19 nt, Homo sapiens
  misc_RNA (1)...(19): siRNA sense strand
ucgccgagucagugggcuu

SEQ ID NO: 2596730 - RNA, 19 nt, Homo sapiens
  misc_RNA (1)...(19): siRNA sense strand
cguggauggcacaggcuuu

SEQ ID NO: 2596731 - RNA, 19 nt, Homo sapiens
  misc_RNA (1)...(19): siRNA sense strand
gagcagaaacacagccaca

SEQ ID NO: 2596732 - RNA, 19 nt, Homo sapiens
  misc_RNA (1)...(19): siRNA sense strand
ggaugaaguaagugcaaac

SEQ ID NO: 2596733 - RNA, 19 nt, Homo sapiens
  misc_RNA (1)...(19): siRNA sense strand
caggaugaaguaagugcaa

SEQ ID NO: 2596734 - RNA, 19 nt, Homo sapiens
  misc_RNA (1)...(19): siRNA sense strand
cagcaugccuucugcgcca

SEQ ID NO: 2596735 - RNA, 19 nt, Homo sapiens
  misc_RNA (1)...(19): siRNA sense strand
cagcuuggugggagaggau

SEQ ID NO: 2596736 - RNA, 19 nt, Homo sapiens
  misc_RNA (1)...(19): siRNA sense strand
aggaugaaguaagugcaaa

SEQ ID NO: 2596737 - RNA, 19 nt, Homo sapiens
  misc_RNA (1)...(19): siRNA sense strand
ucgaaaucauggagaguau

SEQ ID NO: 2596738 - RNA, 19 nt, Homo sapiens
  misc_RNA (1)...(19): siRNA sense strand
gagaagaagcaguggccuu

SEQ ID NO: 2596739 - RNA, 19 nt, Homo sapiens
  misc_RNA (1)...(19): siRNA sense strand
ugucuaacgaugaguguaa

SEQ ID NO: 2596740 - RNA, 19 nt, Homo sapiens
  misc_RNA (1)...(19): siRNA sense strand
cagaugaaagcuugcgaaa

SEQ ID NO: 2596741 - RNA, 19 nt, Homo sapiens
  misc_RNA (1)...(19): siRNA sense strand
uguccagaaucgagaagaa

SEQ ID NO: 2596742 - RNA, 19 nt, Homo sapiens
  misc_RNA (1)...(19): siRNA sense strand
cagcaagcuuccugaucaa

SEQ ID NO: 2596743 - RNA, 19 nt, Homo sapiens
  misc_RNA (1)...(19): siRNA sense strand
uguuggaagaagagcauaa

SEQ ID NO: 2596744 - RNA, 19 nt, Homo sapiens
  misc_RNA (1)...(19): siRNA sense strand
ugagaaggacaguggagua

SEQ ID NO: 2596745 - RNA, 19 nt, Homo sapiens
  misc_RNA (1)...(19): siRNA sense strand
caaagagacccgugcgaga

SEQ ID NO: 2596746 - RNA, 19 nt, Homo sapiens
  misc_RNA (1)...(19): siRNA sense strand
ccagaugaggacugugaaa

SEQ ID NO: 2596747 - RNA, 19 nt, Homo sapiens
  misc_RNA (1)...(19): siRNA sense strand
ggggaaagcuagaugacau

SEQ ID NO: 2596748 - RNA, 19 nt, Homo sapiens
  misc_RNA (1)...(19): siRNA sense strand
gcgcugaaagcaaggagaa

SEQ ID NO: 2596749 - RNA, 19 nt, Homo sapiens
  misc_RNA (1)...(19): siRNA sense strand
ccaacaaccaugagaagga

SEQ ID NO: 2596750 - RNA, 19 nt, Homo sapiens
  misc_RNA (1)...(19): siRNA sense strand
gugcagguguuaaggcgaa

SEQ ID NO: 2596751 - RNA, 19 nt, Homo sapiens
  misc_RNA (1)...(19): siRNA sense strand
aaugaagaacugagaaaca

SEQ ID NO: 2596752 - RNA, 19 nt, Homo sapiens
  misc_RNA (1)...(19): siRNA sense strand
acuuggagauguuggaaga

SEQ ID NO: 2596753 - RNA, 19 nt, Homo sapiens
  misc_RNA (1)...(19): siRNA sense strand
agaagaagaagaaggcaca

SEQ ID NO: 2596754 - RNA, 19 nt, Homo sapiens
  misc_RNA (1)...(19): siRNA sense strand
aguaggacguacagaugaa

SEQ ID NO: 2596755 - RNA, 19 nt, Homo sapiens
  misc_RNA (1)...(19): siRNA sense strand
agaugaggacugugaaaga

SEQ ID NO: 2596756 - RNA, 19 nt, Homo sapiens
  misc_RNA (1)...(19): siRNA sense strand
acgaugaguguaagagaau

SEQ ID NO: 2596757 - RNA, 19 nt, Homo sapiens
  misc_RNA (1)...(19): siRNA sense strand
gggaguggagcaugagcua

SEQ ID NO: 2596758 - RNA, 19 nt, Homo sapiens
  misc_RNA (1)...(19): siRNA sense strand
uggagauguuggaagaaga

SEQ ID NO: 2596759 - RNA, 19 nt, Homo sapiens
  misc_RNA (1)...(19): siRNA sense strand
ugacagaccaguauggaga

SEQ ID NO: 2596760 - RNA, 19 nt, Homo sapiens
  misc_RNA (1)...(19): siRNA sense strand
agggcaagaaggagaucaa

SEQ ID NO: 2596761 - RNA, 19 nt, Homo sapiens
  misc_RNA (1)...(19): siRNA sense strand
aaagcaagaagaagaagaa

SEQ ID NO: 2596762 - RNA, 19 nt, Homo sapiens
  misc_RNA (1)...(19): siRNA sense strand
ggacaguggaguaggacgu

SEQ ID NO: 2596763 - RNA, 19 nt, Homo sapiens
  misc_RNA (1)...(19): siRNA sense strand
cuuugaagagcaagagaga

SEQ ID NO: 2596764 - RNA, 19 nt, Homo sapiens
  misc_RNA (1)...(19): siRNA sense strand
uugcaaggccagagauuca

SEQ ID NO: 2596765 - RNA, 19 nt, Homo sapiens
  misc_RNA (1)...(19): siRNA sense strand
gaguggagcaugagcuaca

SEQ ID NO: 2596766 - RNA, 19 nt, Homo sapiens
  misc_RNA (1)...(19): siRNA sense strand
augaauucuuagaggaguu

SEQ ID NO: 2596767 - RNA, 19 nt, Homo sapiens
  misc_RNA (1)...(19): siRNA sense strand
aagagggaguggagcauga

SEQ ID NO: 2596768 - RNA, 19 nt, Homo sapiens
  misc_RNA (1)...(19): siRNA sense strand
agaaagugacagaccagua

SEQ ID NO: 2596769 - RNA, 19 nt, Homo sapiens
  misc_RNA (1)...(19): siRNA sense strand
ggcuggaagaugaaaggaa

SEQ ID NO: 2596770 - RNA, 19 nt, Homo sapiens
  misc_RNA (1)...(19): siRNA sense strand
cggcauuaucaaagcuaca

SEQ ID NO: 2596771 - RNA, 19 nt, Homo sapiens
  misc_RNA (1)...(19): siRNA sense strand
acugagaaacauugagcuu

SEQ ID NO: 2596772 - RNA, 19 nt, Homo sapiens
  misc_RNA (1)...(19): siRNA sense strand
uggaauggaaggugaaaau

SEQ ID NO: 2596773 - RNA, 19 nt, Homo sapiens
  misc_RNA (1)...(19): siRNA sense strand
ccacagacgaugacaccau

SEQ ID NO: 2596774 - RNA, 19 nt, Homo sapiens
  misc_RNA (1)...(19): siRNA sense strand
agaaaagagaggaacacua

SEQ ID NO: 2596775 - RNA, 19 nt, Homo sapiens
  misc_RNA (1)...(19): siRNA sense strand
agccaaaaccacugagcaa

SEQ ID NO: 2596776 - RNA, 19 nt, Homo sapiens
  misc_RNA (1)...(19): siRNA sense strand
gaugacaccaugagcgaga

SEQ ID NO: 2596777 - RNA, 19 nt, Homo sapiens
  misc_RNA (1)...(19): siRNA sense strand
cuguauuacucaagcagca

SEQ ID NO: 2596778 - RNA, 19 nt, Homo sapiens
  misc_RNA (1)...(19): siRNA sense strand
aagauggaauggaagguga

SEQ ID NO: 2596779 - RNA, 19 nt, Homo sapiens
  misc_RNA (1)...(19): siRNA sense strand
uuggacaacuggaugacaa

SEQ ID NO: 2596780 - RNA, 19 nt, Homo sapiens
  misc_RNA (1)...(19): siRNA sense strand
gagcaagguuguagcgcug

SEQ ID NO: 2596781 - RNA, 19 nt, Homo sapiens
  misc_RNA (1)...(19): siRNA sense strand
gcuuaaugaagaacugaga

SEQ ID NO: 2596782 - RNA, 19 nt, Homo sapiens
  misc_RNA (1)...(19): siRNA sense strand
ucgaguaugcucagaguca

SEQ ID NO: 2596783 - RNA, 19 nt, Homo sapiens
  misc_RNA (1)...(19): siRNA sense strand
acaccaugagcgagaugaa

SEQ ID NO: 2596784 - RNA, 19 nt, Homo sapiens
  misc_RNA (1)...(19): siRNA sense strand
gcaccugguuagggccaaa

SEQ ID NO: 2596785 - RNA, 19 nt, Homo sapiens
  misc_RNA (1)...(19): siRNA sense strand
agugagggcaagaaggaga

SEQ ID NO: 2596786 - RNA, 19 nt, Homo sapiens
  misc_RNA (1)...(19): siRNA sense strand
ucaugaagaggcaguggaa

SEQ ID NO: 2596787 - RNA, 19 nt, Homo sapiens
  misc_RNA (1)...(19): siRNA sense strand
uaucaaagcuacaugcagu

SEQ ID NO: 2596788 - RNA, 19 nt, Homo sapiens
  misc_RNA (1)...(19): siRNA sense strand
agauggaauggaaggugaa

SEQ ID NO: 2596789 - RNA, 19 nt, Homo sapiens
  misc_RNA (1)...(19): siRNA sense strand
gggacacgguacaucacaa

SEQ ID NO: 2596790 - RNA, 19 nt, Homo sapiens
  misc_RNA (1)...(19): siRNA sense strand
ucaaaugcaagauucgaaa

SEQ ID NO: 2596791 - RNA, 19 nt, Homo sapiens
  misc_RNA (1)...(19): siRNA sense strand
agaauaucaugcaggcuca

SEQ ID NO: 2596792 - RNA, 19 nt, Homo sapiens
  misc_RNA (1)...(19): siRNA sense strand
aguaaagagucgaccucca

SEQ ID NO: 2596793 - RNA, 19 nt, Homo sapiens
  misc_RNA (1)...(19): siRNA sense strand
uugaauaugaggaggucga

SEQ ID NO: 2596794 - RNA, 19 nt, Homo sapiens
  misc_RNA (1)...(19): siRNA sense strand
aaagagaggaacacuacaa

SEQ ID NO: 2596795 - RNA, 19 nt, Homo sapiens
  misc_RNA (1)...(19): siRNA sense strand
ccauuguggugcagguguu

SEQ ID NO: 2596796 - RNA, 19 nt, Homo sapiens
  misc_RNA (1)...(19): siRNA sense strand
aagagaaggcagucagcga

SEQ ID NO: 2596797 - RNA, 19 nt, Homo sapiens
  misc_RNA (1)...(19): siRNA sense strand
agcccaagauggaauggaa

SEQ ID NO: 2596798 - RNA, 19 nt, Homo sapiens
  misc_RNA (1)...(19): siRNA sense strand
caugaugcgaagcagguua

SEQ ID NO: 2596799 - RNA, 19 nt, Homo sapiens
  misc_RNA (1)...(19): siRNA sense strand
accaagaaacucagagauu

SEQ ID NO: 2596800 - RNA, 19 nt, Homo sapiens
  misc_RNA (1)...(19): siRNA sense strand
guguaugacaacagcaaau

SEQ ID NO: 2596801 - RNA, 19 nt, Homo sapiens
  misc_RNA (1)...(19): siRNA sense strand
gcacaacacuacaggucca

SEQ ID NO: 2596802 - RNA, 19 nt, Homo sapiens
  misc_RNA (1)...(19): siRNA sense strand
agguccagacugugggaaa

SEQ ID NO: 2596803 - RNA, 19 nt, Homo sapiens
  misc_RNA (1)...(19): siRNA sense strand
accaaaugauccuggagaa

SEQ ID NO: 2596804 - RNA, 19 nt, Homo sapiens
  misc_RNA (1)...(19): siRNA sense strand
ccucagugaugcagcccua

SEQ ID NO: 2596805 - RNA, 19 nt, Homo sapiens
  misc_RNA (1)...(19): siRNA sense strand
cuguauguguguaugacaa

SEQ ID NO: 2596806 - RNA, 19 nt, Homo sapiens
  misc_RNA (1)...(19): siRNA sense strand
uuacacggaagaagggaaa

SEQ ID NO: 2596807 - RNA, 19 nt, Homo sapiens
  misc_RNA (1)...(19): siRNA sense strand
gugggaaaugcaagaagaa

SEQ ID NO: 2596808 - RNA, 19 nt, Homo sapiens
  misc_RNA (1)...(19): siRNA sense strand
ggauauuaccuguggagac

SEQ ID NO: 2596809 - RNA, 19 nt, Homo sapiens
  misc_RNA (1)...(19): siRNA sense strand
ggauaaggcuguuaagacc

SEQ ID NO: 2596810 - RNA, 19 nt, Homo sapiens
  misc_RNA (1)...(19): siRNA sense strand
acggaagaagggaaaguuu

SEQ ID NO: 2596811 - RNA, 19 nt, Homo sapiens
  misc_RNA (1)...(19): siRNA sense strand
guguguaugacaacagcaa

SEQ ID NO: 2596812 - RNA, 19 nt, Homo sapiens
  misc_RNA (1)...(19): siRNA sense strand
gcuggauacaaccaagaaa

SEQ ID NO: 2596813 - RNA, 19 nt, Homo sapiens
  misc_RNA (1)...(19): siRNA sense strand
cguucugugcaaugggcaa

SEQ ID NO: 2596814 - RNA, 19 nt, Homo sapiens
  misc_RNA (1)...(19): siRNA sense strand
acgcgaucucagacauaaa

SEQ ID NO: 2596815 - RNA, 19 nt, Homo sapiens
  misc_RNA (1)...(19): siRNA sense strand
ccccaaaggcacugcaaau

SEQ ID NO: 2596816 - RNA, 19 nt, Homo sapiens
  misc_RNA (1)...(19): siRNA sense strand
cagcaaauugacaugcgaa

SEQ ID NO: 2596817 - RNA, 19 nt, Homo sapiens
  misc_RNA (1)...(19): siRNA sense strand
caugaaagugggaaggaga

SEQ ID NO: 2596818 - RNA, 19 nt, Homo sapiens
  misc_RNA (1)...(19): siRNA sense strand
gggccaaagcagaaagaac

SEQ ID NO: 2596819 - RNA, 19 nt, Homo sapiens
  misc_RNA (1)...(19): siRNA sense strand
ggaaggagauaguggacug

SEQ ID NO: 2596820 - RNA, 19 nt, Homo sapiens
  misc_RNA (1)...(19): siRNA sense strand
gaguuaaaucugugcgacu

SEQ ID NO: 2596821 - RNA, 19 nt, Homo sapiens
  misc_RNA (1)...(19): siRNA sense strand
aaguaugagagacgggaau

SEQ ID NO: 2596822 - RNA, 19 nt, Homo sapiens
  misc_RNA (1)...(19): siRNA sense strand
gugagaaggaacagcagga

SEQ ID NO: 2596823 - RNA, 19 nt, Homo sapiens
  misc_RNA (1)...(19): siRNA sense strand
agacagagaagauagggca

SEQ ID NO: 2596824 - RNA, 19 nt, Homo sapiens
  misc_RNA (1)...(19): siRNA sense strand
ccuacgaagaccugcccaa

SEQ ID NO: 2596825 - RNA, 19 nt, Homo sapiens
  misc_RNA (1)...(19): siRNA sense strand
guucgaagccagaguccca

SEQ ID NO: 2596826 - RNA, 19 nt, Homo sapiens
  misc_RNA (1)...(19): siRNA sense strand
gggaacaaggagcagggau

SEQ ID NO: 2596827 - RNA, 19 nt, Homo sapiens
  misc_RNA (1)...(19): siRNA sense strand
gagcuaaguaugagagacg

SEQ ID NO: 2596828 - RNA, 19 nt, Homo sapiens
  misc_RNA (1)...(19): siRNA sense strand
aggagauaguggacugguu

SEQ ID NO: 2596829 - RNA, 19 nt, Homo sapiens
  misc_RNA (1)...(19): siRNA sense strand
uggaaaagacugggccaaa

SEQ ID NO: 2596830 - RNA, 19 nt, Homo sapiens
  misc_RNA (1)...(19): siRNA sense strand
acgacaguauuguggaguu

SEQ ID NO: 2596831 - RNA, 19 nt, Homo sapiens
  misc_RNA (1)...(19): siRNA sense strand
ucuuaaaggaacaauggau

SEQ ID NO: 2596832 - RNA, 19 nt, Homo sapiens
  misc_RNA (1)...(19): siRNA sense strand
cgaggaaaucgcuggaaag

SEQ ID NO: 2596833 - RNA, 19 nt, Homo sapiens
  misc_RNA (1)...(19): siRNA sense strand
cggcaguauuagaaaggaa

SEQ ID NO: 2596834 - RNA, 19 nt, Homo sapiens
  misc_RNA (1)...(19): siRNA sense strand
aggaacaggcagaagauaa

SEQ ID NO: 2596835 - RNA, 19 nt, Homo sapiens
  misc_RNA (1)...(19): siRNA sense strand
aggcagaagauaagaaaga

SEQ ID NO: 2596836 - RNA, 19 nt, Homo sapiens
  misc_RNA (1)...(19): siRNA sense strand
ccuuggaaauggaggaaaa

SEQ ID NO: 2596837 - RNA, 19 nt, Homo sapiens
  misc_RNA (1)...(19): siRNA sense strand
agaaugaagaagaggaaca

SEQ ID NO: 2596838 - RNA, 19 nt, Homo sapiens
  misc_RNA (1)...(19): siRNA sense strand
gcagaagauaagaaagaga

SEQ ID NO: 2596839 - RNA, 19 nt, Homo sapiens
  misc_RNA (1)...(19): siRNA sense strand
aagaagagaggcaggaaau

SEQ ID NO: 2596840 - RNA, 19 nt, Homo sapiens
  misc_RNA (1)...(19): siRNA sense strand
agcgacaaauuuagagaaa

SEQ ID NO: 2596841 - RNA, 19 nt, Homo sapiens
  misc_RNA (1)...(19): siRNA sense strand
ccaaagaggagcuggggaa

SEQ ID NO: 2596842 - RNA, 19 nt, Homo sapiens
  misc_RNA (1)...(19): siRNA sense strand
gcuacaagcucgaaggauc

SEQ ID NO: 2596843 - RNA, 19 nt, Homo sapiens
  misc_RNA (1)...(19): siRNA sense strand
cgacaaauuuagagaaacc

SEQ ID NO: 2596844 - RNA, 19 nt, Homo sapiens
  misc_RNA (1)...(19): siRNA sense strand
agcaauaaggaaagaacua

SEQ ID NO: 2596845 - RNA, 19 nt, Homo sapiens
  misc_RNA (1)...(19): siRNA sense strand
aaagaaugaagaagaggaa

SEQ ID NO: 2596846 - RNA, 19 nt, Homo sapiens
  misc_RNA (1)...(19): siRNA sense strand
ggagcagaacacaggcaaa

SEQ ID NO: 2596847 - RNA, 19 nt, Homo sapiens
  misc_RNA (1)...(19): siRNA sense strand
cugaagaauuagagcaaag

SEQ ID NO: 2596848 - RNA, 19 nt, Homo sapiens
  misc_RNA (1)...(19): siRNA sense strand
ggggagugcuuaaggaauu

SEQ ID NO: 2596849 - RNA, 19 nt, Homo sapiens
  misc_RNA (1)...(19): siRNA sense strand
aagaaagagaacacugaaa

SEQ ID NO: 2596850 - RNA, 19 nt, Homo sapiens
  misc_RNA (1)...(19): siRNA sense strand
aagaggaacaagaagcaaa

SEQ ID NO: 2596851 - RNA, 19 nt, Homo sapiens
  misc_RNA (1)...(19): siRNA sense strand
ccucagaagaugaaggcca

SEQ ID NO: 2596852 - RNA, 19 nt, Homo sapiens
  misc_RNA (1)...(19): siRNA sense strand
gcugaagagccgacgaaca

SEQ ID NO: 2596853 - RNA, 19 nt, Homo sapiens
  misc_RNA (1)...(19): siRNA sense strand
gcuucaaaggagacaguuu

SEQ ID NO: 2596854 - RNA, 19 nt, Homo sapiens
  misc_RNA (1)...(19): siRNA sense strand
agagaggagcugauaagaa

SEQ ID NO: 2596855 - RNA, 19 nt, Homo sapiens
  misc_RNA (1)...(19): siRNA sense strand
aaaauacgccggagggaua

SEQ ID NO: 2596856 - RNA, 19 nt, Homo sapiens
  misc_RNA (1)...(19): siRNA sense strand
augaagaagaggaacaaga

SEQ ID NO: 2596857 - RNA, 19 nt, Homo sapiens
  misc_RNA (1)...(19): siRNA sense strand
caucugaagaagagaggca

SEQ ID NO: 2596858 - RNA, 19 nt, Homo sapiens
  misc_RNA (1)...(19): siRNA sense strand
gguuaacaccugcagacaa

SEQ ID NO: 2596859 - RNA, 19 nt, Homo sapiens
  misc_RNA (1)...(19): siRNA sense strand
aggaauugccugaucaaga

SEQ ID NO: 2596860 - RNA, 19 nt, Homo sapiens
  misc_RNA (1)...(19): siRNA sense strand
cuugaggaucagugcauua

SEQ ID NO: 2596861 - RNA, 19 nt, Homo sapiens
  misc_RNA (1)...(19): siRNA sense strand
ugaggauggcaguggagaa

SEQ ID NO: 2596862 - RNA, 19 nt, Homo sapiens
  misc_RNA (1)...(19): siRNA sense strand
cuucaaaagaaaggggaaa

SEQ ID NO: 2596863 - RNA, 19 nt, Homo sapiens
  misc_RNA (1)...(19): siRNA sense strand
cagaaauggaaguucauga

SEQ ID NO: 2596864 - RNA, 19 nt, Homo sapiens
  misc_RNA (1)...(19): siRNA sense strand
ugaagaagguaauggcucu

SEQ ID NO: 2596865 - RNA, 19 nt, Homo sapiens
  misc_RNA (1)...(19): siRNA sense strand
cauccgaccugaaaggaga

SEQ ID NO: 2596866 - RNA, 19 nt, Homo sapiens
  misc_RNA (1)...(19): siRNA sense strand
aggacgaagacgaagauga

SEQ ID NO: 2596867 - RNA, 19 nt, Homo sapiens
  misc_RNA (1)...(19): siRNA sense strand
gcguugacggacuggacaa

SEQ ID NO: 2596868 - RNA, 19 nt, Homo sapiens
  misc_RNA (1)...(19): siRNA sense strand
aacugaagaauuagagcaa

SEQ ID NO: 2596869 - RNA, 19 nt, Homo sapiens
  misc_RNA (1)...(19): siRNA sense strand
acgacaaaguagagaggag

SEQ ID NO: 2596870 - RNA, 19 nt, Homo sapiens
  misc_RNA (1)...(19): siRNA sense strand
uguaguaaagucugaagaa

SEQ ID NO: 2596871 - RNA, 19 nt, Homo sapiens
  misc_RNA (1)...(19): siRNA sense strand
agaugaaggccacagggaa

SEQ ID NO: 2596872 - RNA, 19 nt, Homo sapiens
  misc_RNA (1)...(19): siRNA sense strand
gauaagaaggggagugcuu

SEQ ID NO: 2596873 - RNA, 19 nt, Homo sapiens
  misc_RNA (1)...(19): siRNA sense strand
gagaggaaaauguaguaaa

SEQ ID NO: 2596874 - RNA, 19 nt, Homo sapiens
  misc_RNA (1)...(19): siRNA sense strand
agaaagagaacacugaaaa

SEQ ID NO: 2596875 - RNA, 19 nt, Homo sapiens
  misc_RNA (1)...(19): siRNA sense strand
cccaaagcuucaaaggaga

SEQ ID NO: 2596876 - RNA, 19 nt, Homo sapiens
  misc_RNA (1)...(19): siRNA sense strand
ccgaugaugaggacgaaga

SEQ ID NO: 2596877 - RNA, 19 nt, Homo sapiens
  misc_RNA (1)...(19): siRNA sense strand
cuuuagugccucagaagau

SEQ ID NO: 2596878 - RNA, 19 nt, Homo sapiens
  misc_RNA (1)...(19): siRNA sense strand
gcaaaauguuucacaacca

SEQ ID NO: 2596879 - RNA, 19 nt, Homo sapiens
  misc_RNA (1)...(19): siRNA sense strand
ugaugaggacgaagacgaa

SEQ ID NO: 2596880 - RNA, 19 nt, Homo sapiens
  misc_RNA (1)...(19): siRNA sense strand
gcagcguacaucugaagaa

SEQ ID NO: 2596881 - RNA, 19 nt, Homo sapiens
  misc_RNA (1)...(19): siRNA sense strand
cacaacaacuucuggcaca

SEQ ID NO: 2596882 - RNA, 19 nt, Homo sapiens
  misc_RNA (1)...(19): siRNA sense strand
gauuuaacgaguauguaga

SEQ ID NO: 2596883 - RNA, 19 nt, Homo sapiens
  misc_RNA (1)...(19): siRNA sense strand
ggguguacuaugugaguga

SEQ ID NO: 2596884 - RNA, 19 nt, Homo sapiens
  misc_RNA (1)...(19): siRNA sense strand
gugucauguuugagaagau

SEQ ID NO: 2596885 - RNA, 19 nt, Homo sapiens
  misc_RNA (1)...(19): siRNA sense strand
ggauaaagccuggugcaga

SEQ ID NO: 2596886 - RNA, 19 nt, Homo sapiens
  misc_RNA (1)...(19): siRNA sense strand
agaagauagcgaaguacau

SEQ ID NO: 2596887 - RNA, 19 nt, Homo sapiens
  misc_RNA (1)...(19): siRNA sense strand
gcagaaaaguagaccccau

SEQ ID NO: 2596888 - RNA, 19 nt, Homo sapiens
  misc_RNA (1)...(19): siRNA sense strand
cggcaugaagagacguuga

SEQ ID NO: 2596889 - RNA, 19 nt, Homo sapiens
  misc_RNA (1)...(19): siRNA sense strand
gggucgaaucacugaaaau

SEQ ID NO: 2596890 - RNA, 19 nt, Homo sapiens
  misc_RNA (1)...(19): siRNA sense strand
acgucacagcucuggauua

SEQ ID NO: 2596891 - RNA, 19 nt, Homo sapiens
  misc_RNA (1)...(19): siRNA sense strand
gauaaagccuggugcagag

SEQ ID NO: 2596892 - RNA, 19 nt, Homo sapiens
  misc_RNA (1)...(19): siRNA sense strand
caugaagagacguugacuu

SEQ ID NO: 2596893 - RNA, 19 nt, Homo sapiens
  misc_RNA (1)...(19): siRNA sense strand
agaaagaaugaaaggugaa

SEQ ID NO: 2596894 - RNA, 19 nt, Homo sapiens
  misc_RNA (1)...(19): siRNA sense strand
gggaaagacaaauggccau

SEQ ID NO: 2596895 - RNA, 19 nt, Homo sapiens
  misc_RNA (1)...(19): siRNA sense strand
gugaaaugagggaaagaca

SEQ ID NO: 2596896 - RNA, 19 nt, Homo sapiens
  misc_RNA (1)...(19): siRNA sense strand
uagaaagaaugaaagguga

SEQ ID NO: 2596897 - RNA, 19 nt, Homo sapiens
  misc_RNA (1)...(19): siRNA sense strand
uggaaacagaaaagaguaa

SEQ ID NO: 2596898 - RNA, 19 nt, Homo sapiens
  misc_RNA (1)...(19): siRNA sense strand
gaaugaaaggugaagcuga

SEQ ID NO: 2596899 - RNA, 19 nt, Homo sapiens
  misc_RNA (1)...(19): siRNA sense strand
ccauuaagcuuuauccuca

SEQ ID NO: 2596900 - RNA, 19 nt, Homo sapiens
  misc_RNA (1)...(19): siRNA sense strand
aggacauacuggaaacaga

SEQ ID NO: 2596901 - RNA, 19 nt, Homo sapiens
  misc_RNA (1)...(19): siRNA sense strand
aaggugaagcugaggacau

SEQ ID NO: 2596902 - RNA, 19 nt, Homo sapiens
  misc_RNA (1)...(19): siRNA sense strand
gacaaauggccaugcggau

SEQ ID NO: 2596903 - RNA, 19 nt, Homo sapiens
  misc_RNA (1)...(19): siRNA sense strand
gagugaaaugagggaaaga

SEQ ID NO: 2596904 - RNA, 19 nt, Homo sapiens
  misc_RNA (1)...(19): siRNA sense strand
agggaaagacaaauggcca

SEQ ID NO: 2596905 - RNA, 19 nt, Homo sapiens
  misc_RNA (1)...(19): siRNA sense strand
agaaugagcuccugggcuu

SEQ ID NO: 2596906 - RNA, 19 nt, Homo sapiens
  misc_RNA (1)...(19): siRNA sense strand
ucuuaauacugaaggugaa

SEQ ID NO: 2596907 - RNA, 19 nt, Homo sapiens
  misc_RNA (1)...(19): siRNA sense strand
gggaaacacaacagcagaa

SEQ ID NO: 2596908 - RNA, 19 nt, Homo sapiens
  misc_RNA (1)...(19): siRNA sense strand
gguaggaaauagaagccau

SEQ ID NO: 2596909 - RNA, 19 nt, Homo sapiens
  misc_RNA (1)...(19): siRNA sense strand
cuaugauaucagugcuaaa

SEQ ID NO: 2596910 - RNA, 19 nt, Homo sapiens
  misc_RNA (1)...(19): siRNA sense strand
ugucugaggagaaggauuu

SEQ ID NO: 2596911 - RNA, 19 nt, Homo sapiens
  misc_RNA (1)...(19): siRNA sense strand
auacauuaucggaggcuuu

SEQ ID NO: 2596912 - RNA, 19 nt, Homo sapiens
  misc_RNA (1)...(19): siRNA sense strand
ggaugaggaugucugggaa

SEQ ID NO: 2596913 - RNA, 19 nt, Homo sapiens
  misc_RNA (1)...(19): siRNA sense strand
ucuuagugguggugcugaa

SEQ ID NO: 2596914 - RNA, 19 nt, Homo sapiens
  misc_RNA (1)...(19): siRNA sense strand
auaaauuacuggaccgcau

SEQ ID NO: 2596915 - RNA, 19 nt, Homo sapiens
  misc_RNA (1)...(19): siRNA sense strand
ugaagaacuacguagagaa

SEQ ID NO: 2596916 - RNA, 19 nt, Homo sapiens
  misc_RNA (1)...(19): siRNA sense strand
cucaagaacuucaugaaaa

SEQ ID NO: 2596917 - RNA, 19 nt, Homo sapiens
  misc_RNA (1)...(19): siRNA sense strand
cuaacaaaucagagcacca

SEQ ID NO: 2596918 - RNA, 19 nt, Homo sapiens
  misc_RNA (1)...(19): siRNA sense strand
uggaaacugucgaagccaa

SEQ ID NO: 2596919 - RNA, 19 nt, Homo sapiens
  misc_RNA (1)...(19): siRNA sense strand
ggaaacugucgaagccaau

SEQ ID NO: 2596920 - RNA, 19 nt, Homo sapiens
  misc_RNA (1)...(19): siRNA sense strand
gguuguaguacgauuauau

SEQ ID NO: 2596921 - RNA, 19 nt, Homo sapiens
  misc_RNA (1)...(19): siRNA sense strand
ccgccuucauggagaacuu

SEQ ID NO: 2596922 - RNA, 19 nt, Homo sapiens
  misc_RNA (1)...(19): siRNA sense strand
ugaggaagauggauggguu

SEQ ID NO: 2596923 - RNA, 19 nt, Homo sapiens
  misc_RNA (1)...(19): siRNA sense strand
gaugaggaugucugggaau

SEQ ID NO: 2596924 - RNA, 19 nt, Homo sapiens
  misc_RNA (1)...(19): siRNA sense strand
cuuugaauuuguugguaca

SEQ ID NO: 2596925 - RNA, 19 nt, Homo sapiens
  misc_RNA (1)...(19): siRNA sense strand
caacagauauugacagggu

SEQ ID NO: 2596926 - RNA, 19 nt, Homo sapiens
  misc_RNA (1)...(19): siRNA sense strand
cuaauaugccaguggaaac

SEQ ID NO: 2596927 - RNA, 19 nt, Homo sapiens
  misc_RNA (1)...(19): siRNA sense strand
cugagguggugcuggauca

SEQ ID NO: 2596928 - RNA, 19 nt, Homo sapiens
  misc_RNA (1)...(19): siRNA sense strand
ccgaguggcgguggagaaa

SEQ ID NO: 2596929 - RNA, 19 nt, Homo sapiens
  misc_RNA (1)...(19): siRNA sense strand
aggaagugcugcaggcaac

SEQ ID NO: 2596930 - RNA, 19 nt, Homo sapiens
  misc_RNA (1)...(19): siRNA sense strand
uuaucaccaucuugggaaa

SEQ ID NO: 2596931 - RNA, 19 nt, Homo sapiens
  misc_RNA (1)...(19): siRNA sense strand
aaacacaacagcagaaaau

SEQ ID NO: 2596932 - RNA, 19 nt, Homo sapiens
  misc_RNA (1)...(19): siRNA sense strand
aggaaggguuugcucacua

SEQ ID NO: 2596933 - RNA, 19 nt, Homo sapiens
  misc_RNA (1)...(19): siRNA sense strand
gauaccugucugaggagaa

SEQ ID NO: 2596934 - RNA, 19 nt, Homo sapiens
  misc_RNA (1)...(19): siRNA sense strand
cagcaacaggaacagaaua

SEQ ID NO: 2596935 - RNA, 19 nt, Homo sapiens
  misc_RNA (1)...(19): siRNA sense strand
augcaagaccugaugcuau

SEQ ID NO: 2596936 - RNA, 19 nt, Homo sapiens
  misc_RNA (1)...(19): siRNA sense strand
aauaauuacccaacagcau

SEQ ID NO: 2596937 - RNA, 19 nt, Homo sapiens
  misc_RNA (1)...(19): siRNA sense strand
uggcagauuccauuaacua

SEQ ID NO: 2596938 - RNA, 19 nt, Homo sapiens
  misc_RNA (1)...(19): siRNA sense strand
aaauagaagccaugugucu

SEQ ID NO: 2596939 - RNA, 19 nt, Homo sapiens
  misc_RNA (1)...(19): siRNA sense strand
caucaaucaaacuggcuau

SEQ ID NO: 2596940 - RNA, 19 nt, Homo sapiens
  misc_RNA (1)...(19): siRNA sense strand
caggaagugcugcaggcaa

SEQ ID NO: 2596941 - RNA, 19 nt, Homo sapiens
  misc_RNA (1)...(19): siRNA sense strand
gcugcaggcaacagauauu

SEQ ID NO: 2596942 - RNA, 19 nt, Homo sapiens
  misc_RNA (1)...(19): siRNA sense strand
ggacaaaggaagcuggcug

SEQ ID NO: 2596943 - RNA, 19 nt, Homo sapiens
  misc_RNA (1)...(19): siRNA sense strand
caguggugucacagaauuu

SEQ ID NO: 2596944 - RNA, 19 nt, Homo sapiens
  misc_RNA (1)...(19): siRNA sense strand
gccaaugugcgcuggaaaa

SEQ ID NO: 2596945 - RNA, 19 nt, Homo sapiens
  misc_RNA (1)...(19): siRNA sense strand
gcgcagaggaauuacaauc

SEQ ID NO: 2596946 - RNA, 19 nt, Homo sapiens
  misc_RNA (1)...(19): siRNA sense strand
uuaauaagaaugcuggcua

SEQ ID NO: 2596947 - RNA, 19 nt, Homo sapiens
  misc_RNA (1)...(19): siRNA sense strand
uuacuggaccgcauggaaa

SEQ ID NO: 2596948 - RNA, 19 nt, Homo sapiens
  misc_RNA (1)...(19): siRNA sense strand
acaugaagaacuacguaga

SEQ ID NO: 2596949 - RNA, 19 nt, Homo sapiens
  misc_RNA (1)...(19): siRNA sense strand
ucuaauaugccaguggaaa

SEQ ID NO: 2596950 - RNA, 19 nt, Homo sapiens
  misc_RNA (1)...(19): siRNA sense strand
gcaacuucacauacagaga

SEQ ID NO: 2596951 - RNA, 19 nt, Homo sapiens
  misc_RNA (1)...(19): siRNA sense strand
gaccuaaggaacuggagau

SEQ ID NO: 2596952 - RNA, 19 nt, Homo sapiens
  misc_RNA (1)...(19): siRNA sense strand
acucaucaguggugucaca

SEQ ID NO: 2596953 - RNA, 19 nt, Homo sapiens
  misc_RNA (1)...(19): siRNA sense strand
aggaauuacaaucugaaga

SEQ ID NO: 2596954 - RNA, 19 nt, Homo sapiens
  misc_RNA (1)...(19): siRNA sense strand
gaagcuggcugcuggggaa

SEQ ID NO: 2596955 - RNA, 19 nt, Homo sapiens
  misc_RNA (1)...(19): siRNA sense strand
aggaaaagcucuaagacac

SEQ ID NO: 2596956 - RNA, 19 nt, Homo sapiens
  misc_RNA (1)...(19): siRNA sense strand
aacuucacauacagagaaa

SEQ ID NO: 2596957 - RNA, 19 nt, Homo sapiens
  misc_RNA (1)...(19): siRNA sense strand
ugggaagacguguggcuga

SEQ ID NO: 2596958 - RNA, 19 nt, Homo sapiens
  misc_RNA (1)...(19): siRNA sense strand
ugacuggaucgcauauaaa

SEQ ID NO: 2596959 - RNA, 19 nt, Homo sapiens
  misc_RNA (1)...(19): siRNA sense strand
ugguaaugcagccagaaau

SEQ ID NO: 2596960 - RNA, 19 nt, Homo sapiens
  misc_RNA (1)...(19): siRNA sense strand
acuacguagagaaguuaua

SEQ ID NO: 2596961 - RNA, 19 nt, Homo sapiens
  misc_RNA (1)...(19): siRNA sense strand
auggagaagcauuguuuau

SEQ ID NO: 2596962 - RNA, 19 nt, Homo sapiens
  misc_RNA (1)...(19): siRNA sense strand
cuguaaggacccagaaaua

SEQ ID NO: 2596963 - RNA, 19 nt, Homo sapiens
  misc_RNA (1)...(19): siRNA sense strand
gcgaugacuucgagacaca

SEQ ID NO: 2596964 - RNA, 19 nt, Homo sapiens
  misc_RNA (1)...(19): siRNA sense strand
ccaagucauuagagagaga

SEQ ID NO: 2596965 - RNA, 19 nt, Homo sapiens
  misc_RNA (1)...(19): siRNA sense strand
gcuacgaaacagagaacuu

SEQ ID NO: 2596966 - RNA, 19 nt, Homo sapiens
  misc_RNA (1)...(19): siRNA sense strand
gcucugaagccgaacacaa

SEQ ID NO: 2596967 - RNA, 19 nt, Homo sapiens
  misc_RNA (1)...(19): siRNA sense strand
cauuagagagagagacaca

SEQ ID NO: 2596968 - RNA, 19 nt, Homo sapiens
  misc_RNA (1)...(19): siRNA sense strand
gaggacuggaagaaggaaa

SEQ ID NO: 2596969 - RNA, 19 nt, Homo sapiens
  misc_RNA (1)...(19): siRNA sense strand
acauacaggaaauuggaaa

SEQ ID NO: 2596970 - RNA, 19 nt, Homo sapiens
  misc_RNA (1)...(19): siRNA sense strand
ccagcaaagaacacauaaa

SEQ ID NO: 2596971 - RNA, 19 nt, Homo sapiens
  misc_RNA (1)...(19): siRNA sense strand
gugaaggaguuaaaagcaa

SEQ ID NO: 2596972 - RNA, 19 nt, Homo sapiens
  misc_RNA (1)...(19): siRNA sense strand
gugccaacccaaaggaaca

SEQ ID NO: 2596973 - RNA, 19 nt, Homo sapiens
  misc_RNA (1)...(19): siRNA sense strand
cggaagaccaucacaguca

SEQ ID NO: 2596974 - RNA, 19 nt, Homo sapiens
  misc_RNA (1)...(19): siRNA sense strand
cgaacgaacuccuugccua

SEQ ID NO: 2596975 - RNA, 19 nt, Homo sapiens
  misc_RNA (1)...(19): siRNA sense strand
cauacaggaaauuggaaau

SEQ ID NO: 2596976 - RNA, 19 nt, Homo sapiens
  misc_RNA (1)...(19): siRNA sense strand
gggcacuagcguagcaaga

SEQ ID NO: 2596977 - RNA, 19 nt, Homo sapiens
  misc_RNA (1)...(19): siRNA sense strand
cggaacugggacaggaauu

SEQ ID NO: 2596978 - RNA, 19 nt, Homo sapiens
  misc_RNA (1)...(19): siRNA sense strand
gggccugagcuucgaguau

SEQ ID NO: 2596979 - RNA, 19 nt, Homo sapiens
  misc_RNA (1)...(19): siRNA sense strand
gcucaauucuaaagacgca

SEQ ID NO: 2596980 - RNA, 19 nt, Homo sapiens
  misc_RNA (1)...(19): siRNA sense strand
agacaguggcuacgaaaca

SEQ ID NO: 2596981 - RNA, 19 nt, Homo sapiens
  misc_RNA (1)...(19): siRNA sense strand
ccagaaagagccagccaga

SEQ ID NO: 2596982 - RNA, 19 nt, Homo sapiens
  misc_RNA (1)...(19): siRNA sense strand
gcguugaacuugaggaguc

SEQ ID NO: 2596983 - RNA, 19 nt, Homo sapiens
  misc_RNA (1)...(19): siRNA sense strand
ccgccuugguguugguaca

SEQ ID NO: 2596984 - RNA, 19 nt, Homo sapiens
  misc_RNA (1)...(19): siRNA sense strand
uagcaagagucaucgugaa

SEQ ID NO: 2596985 - RNA, 19 nt, Homo sapiens
  misc_RNA (1)...(19): siRNA sense strand
ugucuuuguugcaggaaaa

SEQ ID NO: 2596986 - RNA, 19 nt, Homo sapiens
  misc_RNA (1)...(19): siRNA sense strand
gcagcgagcaggagcacau

SEQ ID NO: 2596987 - RNA, 19 nt, Homo sapiens
  misc_RNA (1)...(19): siRNA sense strand
acugaagcuauguuagaaa

SEQ ID NO: 2596988 - RNA, 19 nt, Homo sapiens
  misc_RNA (1)...(19): siRNA sense strand
acguaagcacaaaggguga

SEQ ID NO: 2596989 - RNA, 19 nt, Homo sapiens
  misc_RNA (1)...(19): siRNA sense strand
caggaaaacguaagcacaa

SEQ ID NO: 2596990 - RNA, 19 nt, Homo sapiens
  misc_RNA (1)...(19): siRNA sense strand
gagauuacggaauaggauu

SEQ ID NO: 2596991 - RNA, 19 nt, Homo sapiens
  misc_RNA (1)...(19): siRNA sense strand
gucauuagagagagagaca

SEQ ID NO: 2596992 - RNA, 19 nt, Homo sapiens
  misc_RNA (1)...(19): siRNA sense strand
agaaaagccccguaagauu

SEQ ID NO: 2596993 - RNA, 19 nt, Homo sapiens
  misc_RNA (1)...(19): siRNA sense strand
gauuuagcccugcggaauu

SEQ ID NO: 2596994 - RNA, 19 nt, Homo sapiens
  misc_RNA (1)...(19): siRNA sense strand
augugaaagugggagauua

SEQ ID NO: 2596995 - RNA, 19 nt, Homo sapiens
  misc_RNA (1)...(19): siRNA sense strand
uuagagagagagacacaaa

SEQ ID NO: 2596996 - RNA, 19 nt, Homo sapiens
  misc_RNA (1)...(19): siRNA sense strand
cggaagauuugcccaguca

SEQ ID NO: 2596997 - RNA, 19 nt, Homo sapiens
  misc_RNA (1)...(19): siRNA sense strand
cggcgaugacuucgagaca

SEQ ID NO: 2596998 - RNA, 19 nt, Homo sapiens
  misc_RNA (1)...(19): siRNA sense strand
gagucaucgugaaggaguu

SEQ ID NO: 2596999 - RNA, 19 nt, Homo sapiens
  misc_RNA (1)...(19): siRNA sense strand
gugauuuagcccugcggaa

SEQ ID NO: 2597000 - RNA, 19 nt, Homo sapiens
  misc_RNA (1)...(19): siRNA sense strand
cagaauuaguaaccagcuu

SEQ ID NO: 2597001 - RNA, 19 nt, Homo sapiens
  misc_RNA (1)...(19): siRNA sense strand
gcagacaguggcuacgaaa

SEQ ID NO: 2597002 - RNA, 19 nt, Homo sapiens
  misc_RNA (1)...(19): siRNA sense strand
cuaaacuacauacaggaaa

SEQ ID NO: 2597003 - RNA, 19 nt, Homo sapiens
  misc_RNA (1)...(19): siRNA sense strand
uaaaugugaaagugggaga

SEQ ID NO: 2597004 - RNA, 19 nt, Homo sapiens
  misc_RNA (1)...(19): siRNA sense strand
ccgcuaagcacgaccacuu

SEQ ID NO: 2597005 - RNA, 19 nt, Homo sapiens
  misc_RNA (1)...(19): siRNA sense strand
ccaaagagucagucauaac

SEQ ID NO: 2597006 - RNA, 19 nt, Homo sapiens
  misc_RNA (1)...(19): siRNA sense strand
ggagagauuuacacgggca

SEQ ID NO: 2597007 - RNA, 19 nt, Homo sapiens
  misc_RNA (1)...(19): siRNA sense strand
cagggugaguguagggagu

SEQ ID NO: 2597008 - RNA, 19 nt, Homo sapiens
  misc_RNA (1)...(19): siRNA sense strand
auucuaaagacgcagcaaa

SEQ ID NO: 2597009 - RNA, 19 nt, Homo sapiens
  misc_RNA (1)...(19): siRNA sense strand
cagaaauagacuuuaagga

SEQ ID NO: 2597010 - RNA, 19 nt, Homo sapiens
  misc_RNA (1)...(19): siRNA sense strand
acuuugaacagcaguggaa

SEQ ID NO: 2597011 - RNA, 19 nt, Homo sapiens
  misc_RNA (1)...(19): siRNA sense strand
agucauaacaggccacuuu

SEQ ID NO: 2597012 - RNA, 19 nt, Homo sapiens
  misc_RNA (1)...(19): siRNA sense strand
ccgagagcccuuucaacaa

SEQ ID NO: 2597013 - RNA, 19 nt, Homo sapiens
  misc_RNA (1)...(19): siRNA sense strand
aggacuggaagaaggaaaa

SEQ ID NO: 2597014 - RNA, 19 nt, Homo sapiens
  misc_RNA (1)...(19): siRNA sense strand
ggagauuacggaauaggau

SEQ ID NO: 2597015 - RNA, 19 nt, Homo sapiens
  misc_RNA (1)...(19): siRNA sense strand
gcuguaaggacccagaaau

SEQ ID NO: 2597016 - RNA, 19 nt, Homo sapiens
  misc_RNA (1)...(19): siRNA sense strand
cuuucaagacagacugcua

SEQ ID NO: 2597017 - RNA, 19 nt, Homo sapiens
  misc_RNA (1)...(19): siRNA sense strand
aaccaagucauuagagaga

SEQ ID NO: 2597018 - RNA, 19 nt, Homo sapiens
  misc_RNA (1)...(19): siRNA sense strand
gaguucaagccgacuuuaa

SEQ ID NO: 2597019 - RNA, 19 nt, Homo sapiens
  misc_RNA (1)...(19): siRNA sense strand
ugggacaggaauugcacaa

SEQ ID NO: 2597020 - RNA, 19 nt, Homo sapiens
  misc_RNA (1)...(19): siRNA sense strand
gggcauagauggaggcguc

SEQ ID NO: 2597021 - RNA, 19 nt, Homo sapiens
  misc_RNA (1)...(19): siRNA sense strand
ggaaagaaggcauggacgu

SEQ ID NO: 2597022 - RNA, 19 nt, Homo sapiens
  misc_RNA (1)...(19): siRNA sense strand
gcaaagaucccauacguca

SEQ ID NO: 2597023 - RNA, 19 nt, Homo sapiens
  misc_RNA (1)...(19): siRNA sense strand
cccaagagguagaggaggu

SEQ ID NO: 2597024 - RNA, 19 nt, Homo sapiens
  misc_RNA (1)...(19): siRNA sense strand
ggugccagguggaaggaga

SEQ ID NO: 2597025 - RNA, 19 nt, Homo sapiens
  misc_RNA (1)...(19): siRNA sense strand
cagaaaucagccaggcauu

SEQ ID NO: 2597026 - RNA, 19 nt, Homo sapiens
  misc_RNA (1)...(19): siRNA sense strand
ggaaggagaagaaaggacu

SEQ ID NO: 2597027 - RNA, 19 nt, Homo sapiens
  misc_RNA (1)...(19): siRNA sense strand
auacccaccagaagagaaa

SEQ ID NO: 2597028 - RNA, 19 nt, Homo sapiens
  misc_RNA (1)...(19): siRNA sense strand
ggccauaccuguuuggagu

SEQ ID NO: 2597029 - RNA, 19 nt, Homo sapiens
  misc_RNA (1)...(19): siRNA sense strand
ccuccuuccucuacggcua

SEQ ID NO: 2597030 - RNA, 19 nt, Homo sapiens
  misc_RNA (1)...(19): siRNA sense strand
gugccagguggaaggagaa

SEQ ID NO: 2597031 - RNA, 19 nt, Homo sapiens
  misc_RNA (1)...(19): siRNA sense strand
uaagauaaauggaaggccu

SEQ ID NO: 2597032 - RNA, 19 nt, Homo sapiens
  misc_RNA (1)...(19): siRNA sense strand
gaacaaagcauacccacca

SEQ ID NO: 2597033 - RNA, 19 nt, Homo sapiens
  misc_RNA (1)...(19): siRNA sense strand
gcagaaaucagccaggcau

SEQ ID NO: 2597034 - RNA, 19 nt, Homo sapiens
  misc_RNA (1)...(19): siRNA sense strand
aggaagaagaagaaaguga

SEQ ID NO: 2597035 - RNA, 19 nt, Homo sapiens
  misc_RNA (1)...(19): siRNA sense strand
ugcugaaguuggaggacaa

SEQ ID NO: 2597036 - RNA, 19 nt, Homo sapiens
  misc_RNA (1)...(19): siRNA sense strand
gagaacaaggccaggguca

SEQ ID NO: 2597037 - RNA, 19 nt, Homo sapiens
  misc_RNA (1)...(19): siRNA sense strand
ggcgagaagaggugaauca

SEQ ID NO: 2597038 - RNA, 19 nt, Homo sapiens
  misc_RNA (1)...(19): siRNA sense strand
acuacaagcugcaggagga

SEQ ID NO: 2597039 - RNA, 19 nt, Homo sapiens
  misc_RNA (1)...(19): siRNA sense strand
ugacaacagcaguggacau

SEQ ID NO: 2597040 - RNA, 19 nt, Homo sapiens
  misc_RNA (1)...(19): siRNA sense strand
ccugaugccaaaugagaau

SEQ ID NO: 2597041 - RNA, 19 nt, Homo sapiens
  misc_RNA (1)...(19): siRNA sense strand
gucgagaagagcagaagaa

SEQ ID NO: 2597042 - RNA, 19 nt, Homo sapiens
  misc_RNA (1)...(19): siRNA sense strand
cugacauuaaagagaacaa

SEQ ID NO: 2597043 - RNA, 19 nt, Homo sapiens
  misc_RNA (1)...(19): siRNA sense strand
cgagaagagcagaagaauc

SEQ ID NO: 2597044 - RNA, 19 nt, Homo sapiens
  misc_RNA (1)...(19): siRNA sense strand
cuucuuugcaccagaguau

SEQ ID NO: 2597045 - RNA, 19 nt, Homo sapiens
  misc_RNA (1)...(19): siRNA sense strand
aggaagguguagagguugu

SEQ ID NO: 2597046 - RNA, 19 nt, Homo sapiens
  misc_RNA (1)...(19): siRNA sense strand
ugcuggagauucagggcaa

SEQ ID NO: 2597047 - RNA, 19 nt, Homo sapiens
  misc_RNA (1)...(19): siRNA sense strand
ccaucuucauccagcacaa

SEQ ID NO: 2597048 - RNA, 19 nt, Homo sapiens
  misc_RNA (1)...(19): siRNA sense strand
agucugagauuuuggaaga

SEQ ID NO: 2597049 - RNA, 19 nt, Homo sapiens
  misc_RNA (1)...(19): siRNA sense strand
acacaugaucccagagaac

SEQ ID NO: 2597050 - RNA, 19 nt, Homo sapiens
  misc_RNA (1)...(19): siRNA sense strand
uggcagaagaggcgagaag

SEQ ID NO: 2597051 - RNA, 19 nt, Homo sapiens
  misc_RNA (1)...(19): siRNA sense strand
gcauggaagcguuggugca

SEQ ID NO: 2597052 - RNA, 19 nt, Homo sapiens
  misc_RNA (1)...(19): siRNA sense strand
agaaagugaagaugagucu

SEQ ID NO: 2597053 - RNA, 19 nt, Homo sapiens
  misc_RNA (1)...(19): siRNA sense strand
cauggauacuagugccgua

SEQ ID NO: 2597054 - RNA, 19 nt, Homo sapiens
  misc_RNA (1)...(19): siRNA sense strand
ugaaaucccugcaggacca

SEQ ID NO: 2597055 - RNA, 19 nt, Homo sapiens
  misc_RNA (1)...(19): siRNA sense strand
cccagaggaagaagaagaa

SEQ ID NO: 2597056 - RNA, 19 nt, Homo sapiens
  misc_RNA (1)...(19): siRNA sense strand
accaacagccagagaacuu

SEQ ID NO: 2597057 - RNA, 19 nt, Homo sapiens
  misc_RNA (1)...(19): siRNA sense strand
acauugagucgguggagga

SEQ ID NO: 2597058 - RNA, 19 nt, Homo sapiens
  misc_RNA (1)...(19): siRNA sense strand
acaagcugcaggaggaaaa

SEQ ID NO: 2597059 - RNA, 19 nt, Homo sapiens
  misc_RNA (1)...(19): siRNA sense strand
aguauggagaagucacuaa

SEQ ID NO: 2597060 - RNA, 19 nt, Homo sapiens
  misc_RNA (1)...(19): siRNA sense strand
gguuguguggaaugaggua

SEQ ID NO: 2597061 - RNA, 19 nt, Homo sapiens
  misc_RNA (1)...(19): siRNA sense strand
cugcauugugggacaccaa

SEQ ID NO: 2597062 - RNA, 19 nt, Homo sapiens
  misc_RNA (1)...(19): siRNA sense strand
cagaggaagaagaagaaag

SEQ ID NO: 2597063 - RNA, 19 nt, Homo sapiens
  misc_RNA (1)...(19): siRNA sense strand
gaagaaaagaagagcaaua

SEQ ID NO: 2597064 - RNA, 19 nt, Homo sapiens
  misc_RNA (1)...(19): siRNA sense strand
agaaagagcaagacaggaa

SEQ ID NO: 2597065 - RNA, 19 nt, Homo sapiens
  misc_RNA (1)...(19): siRNA sense strand
gguugaagaagaaaggaaa

SEQ ID NO: 2597066 - RNA, 19 nt, Homo sapiens
  misc_RNA (1)...(19): siRNA sense strand
gugaaauagaugaggauga

SEQ ID NO: 2597067 - RNA, 19 nt, Homo sapiens
  misc_RNA (1)...(19): siRNA sense strand
gagaaguuguugugagaca

SEQ ID NO: 2597068 - RNA, 19 nt, Homo sapiens
  misc_RNA (1)...(19): siRNA sense strand
ccagagagcaagagaugaa

SEQ ID NO: 2597069 - RNA, 19 nt, Homo sapiens
  misc_RNA (1)...(19): siRNA sense strand
uggaaagcaucaagagaau

SEQ ID NO: 2597070 - RNA, 19 nt, Homo sapiens
  misc_RNA (1)...(19): siRNA sense strand
caucagaagaagagcaaga

SEQ ID NO: 2597071 - RNA, 19 nt, Homo sapiens
  misc_RNA (1)...(19): siRNA sense strand
acucaauagccuagaaauu

SEQ ID NO: 2597072 - RNA, 19 nt, Homo sapiens
  misc_RNA (1)...(19): siRNA sense strand
aagagaagacagugauuaa

SEQ ID NO: 2597073 - RNA, 19 nt, Homo sapiens
  misc_RNA (1)...(19): siRNA sense strand
aagaaagaguggagaaacu

SEQ ID NO: 2597074 - RNA, 19 nt, Homo sapiens
  misc_RNA (1)...(19): siRNA sense strand
gcuuaaaccaagaagaaga

SEQ ID NO: 2597075 - RNA, 19 nt, Homo sapiens
  misc_RNA (1)...(19): siRNA sense strand
cugagaagucauauagaaa

SEQ ID NO: 2597076 - RNA, 19 nt, Homo sapiens
  misc_RNA (1)...(19): siRNA sense strand
aggauuaggacaagaggaa

SEQ ID NO: 2597077 - RNA, 19 nt, Homo sapiens
  misc_RNA (1)...(19): siRNA sense strand
agagaugcccucagagaaa

SEQ ID NO: 2597078 - RNA, 19 nt, Homo sapiens
  misc_RNA (1)...(19): siRNA sense strand
gauuaggacaagaggaaga

SEQ ID NO: 2597079 - RNA, 19 nt, Homo sapiens
  misc_RNA (1)...(19): siRNA sense strand
cagcaguuuaagugaaaua

SEQ ID NO: 2597080 - RNA, 19 nt, Homo sapiens
  misc_RNA (1)...(19): siRNA sense strand
aggaaggccuacuaagaaa

SEQ ID NO: 2597081 - RNA, 19 nt, Homo sapiens
  misc_RNA (1)...(19): siRNA sense strand
aggaaagacuggaagcaga

SEQ ID NO: 2597082 - RNA, 19 nt, Homo sapiens
  misc_RNA (1)...(19): siRNA sense strand
ggaaagacuggaagcagaa

SEQ ID NO: 2597083 - RNA, 19 nt, Homo sapiens
  misc_RNA (1)...(19): siRNA sense strand
gaucaaagugagacaucaa

SEQ ID NO: 2597084 - RNA, 19 nt, Homo sapiens
  misc_RNA (1)...(19): siRNA sense strand
ccacuagagcaaacaaaua

SEQ ID NO: 2597085 - RNA, 19 nt, Homo sapiens
  misc_RNA (1)...(19): siRNA sense strand
aggacaagaggaagauaua

SEQ ID NO: 2597086 - RNA, 19 nt, Homo sapiens
  misc_RNA (1)...(19): siRNA sense strand
aagaagagcaauauaggaa

SEQ ID NO: 2597087 - RNA, 19 nt, Homo sapiens
  misc_RNA (1)...(19): siRNA sense strand
aguauaaacaggagauuga

SEQ ID NO: 2597088 - RNA, 19 nt, Homo sapiens
  misc_RNA (1)...(19): siRNA sense strand
aaauaaagcaggaggaaug

SEQ ID NO: 2597089 - RNA, 19 nt, Homo sapiens
  misc_RNA (1)...(19): siRNA sense strand
cgcauuaggauuaggacaa

SEQ ID NO: 2597090 - RNA, 19 nt, Homo sapiens
  misc_RNA (1)...(19): siRNA sense strand
gcaagaaagggaagggagu

SEQ ID NO: 2597091 - RNA, 19 nt, Homo sapiens
  misc_RNA (1)...(19): siRNA sense strand
gauugaagaaagagcaaga

SEQ ID NO: 2597092 - RNA, 19 nt, Homo sapiens
  misc_RNA (1)...(19): siRNA sense strand
auaauagcauggagaacua

SEQ ID NO: 2597093 - RNA, 19 nt, Homo sapiens
  misc_RNA (1)...(19): siRNA sense strand
aaauggaagacaagguuaa

SEQ ID NO: 2597094 - RNA, 19 nt, Homo sapiens
  misc_RNA (1)...(19): siRNA sense strand
agggaacaguuaagaagaa

SEQ ID NO: 2597095 - RNA, 19 nt, Homo sapiens
  misc_RNA (1)...(19): siRNA sense strand
gggaacaguuaagaagaaa

SEQ ID NO: 2597096 - RNA, 19 nt, Homo sapiens
  misc_RNA (1)...(19): siRNA sense strand
acagaaugccagaauguua

SEQ ID NO: 2597097 - RNA, 19 nt, Homo sapiens
  misc_RNA (1)...(19): siRNA sense strand
aagagaaguuguugugaga

SEQ ID NO: 2597098 - RNA, 19 nt, Homo sapiens
  misc_RNA (1)...(19): siRNA sense strand
ccaaacuucuuguggaaaa

SEQ ID NO: 2597099 - RNA, 19 nt, Homo sapiens
  misc_RNA (1)...(19): siRNA sense strand
aagaugaaguugugguuga

SEQ ID NO: 2597100 - RNA, 19 nt, Homo sapiens
  misc_RNA (1)...(19): siRNA sense strand
caaucaaaguccagugcuu

SEQ ID NO: 2597101 - RNA, 19 nt, Homo sapiens
  misc_RNA (1)...(19): siRNA sense strand
aggaaaugaacaagcagaa

SEQ ID NO: 2597102 - RNA, 19 nt, Homo sapiens
  misc_RNA (1)...(19): siRNA sense strand
gagaauauguacagguuuu

SEQ ID NO: 2597103 - RNA, 19 nt, Homo sapiens
  misc_RNA (1)...(19): siRNA sense strand
uggcuaaacuagaggauac

SEQ ID NO: 2597104 - RNA, 19 nt, Homo sapiens
  misc_RNA (1)...(19): siRNA sense strand
gaagaaagaaauaaggagu

SEQ ID NO: 2597105 - RNA, 19 nt, Homo sapiens
  misc_RNA (1)...(19): siRNA sense strand
uggaacaagaagugaucaa

SEQ ID NO: 2597106 - RNA, 19 nt, Homo sapiens
  misc_RNA (1)...(19): siRNA sense strand
caccaaacuucuuguggaa

SEQ ID NO: 2597107 - RNA, 19 nt, Homo sapiens
  misc_RNA (1)...(19): siRNA sense strand
gcaguagauaaguuggaaa

SEQ ID NO: 2597108 - RNA, 19 nt, Homo sapiens
  misc_RNA (1)...(19): siRNA sense strand
cugcuagaagaaagaaaua

SEQ ID NO: 2597109 - RNA, 19 nt, Homo sapiens
  misc_RNA (1)...(19): siRNA sense strand
gaggauagagauuccgaua

SEQ ID NO: 2597110 - RNA, 19 nt, Homo sapiens
  misc_RNA (1)...(19): siRNA sense strand
gcauguugcaggaagaaau

SEQ ID NO: 2597111 - RNA, 19 nt, Homo sapiens
  misc_RNA (1)...(19): siRNA sense strand
uggagaacuacuugagcaa

SEQ ID NO: 2597112 - RNA, 19 nt, Homo sapiens
  misc_RNA (1)...(19): siRNA sense strand
gggaagggagugaaaauaa

SEQ ID NO: 2597113 - RNA, 19 nt, Homo sapiens
  misc_RNA (1)...(19): siRNA sense strand
acacaggauuuaaagaaga

SEQ ID NO: 2597114 - RNA, 19 nt, Homo sapiens
  misc_RNA (1)...(19): siRNA sense strand
gagauugaagaaagagcaa

SEQ ID NO: 2597115 - RNA, 19 nt, Homo sapiens
  misc_RNA (1)...(19): siRNA sense strand
agaagaaaggauaccuaaa

SEQ ID NO: 2597116 - RNA, 19 nt, Homo sapiens
  misc_RNA (1)...(19): siRNA sense strand
gagcaaacaaauaaugaca

SEQ ID NO: 2597117 - RNA, 19 nt, Homo sapiens
  misc_RNA (1)...(19): siRNA sense strand
ccaaauaaagcaggaggaa

SEQ ID NO: 2597118 - RNA, 19 nt, Homo sapiens
  misc_RNA (1)...(19): siRNA sense strand
uagcuuaaaccaagaagaa

SEQ ID NO: 2597119 - RNA, 19 nt, Homo sapiens
  misc_RNA (1)...(19): siRNA sense strand
ucaaauaauagcauggaga

SEQ ID NO: 2597120 - RNA, 19 nt, Homo sapiens
  misc_RNA (1)...(19): siRNA sense strand
ggaagaauggcuugaacga

SEQ ID NO: 2597121 - RNA, 19 nt, Homo sapiens
  misc_RNA (1)...(19): siRNA sense strand
aagaagaaaagaagagcaa

SEQ ID NO: 2597122 - RNA, 19 nt, Homo sapiens
  misc_RNA (1)...(19): siRNA sense strand
gacuagaaauagacacaau

SEQ ID NO: 2597123 - RNA, 19 nt, Homo sapiens
  misc_RNA (1)...(19): siRNA sense strand
aaaugaaggaaauggaaca

SEQ ID NO: 2597124 - RNA, 19 nt, Homo sapiens
  misc_RNA (1)...(19): siRNA sense strand
ugaaggaaauggaacaaaa

SEQ ID NO: 2597125 - RNA, 19 nt, Homo sapiens
  misc_RNA (1)...(19): siRNA sense strand
ggaucaagaaaugaagaaa

SEQ ID NO: 2597126 - RNA, 19 nt, Homo sapiens
  misc_RNA (1)...(19): siRNA sense strand
gcaucagaguggagagccu

SEQ ID NO: 2597127 - RNA, 19 nt, Homo sapiens
  misc_RNA (1)...(19): siRNA sense strand
ugcuaagcucuguggauua

SEQ ID NO: 2597128 - RNA, 19 nt, Homo sapiens
  misc_RNA (1)...(19): siRNA sense strand
guggauuaggccuggcuua

SEQ ID NO: 2597129 - RNA, 19 nt, Homo sapiens
  misc_RNA (1)...(19): siRNA sense strand
gcaucuccaaagaaggaaa

SEQ ID NO: 2597130 - RNA, 19 nt, Homo sapiens
  misc_RNA (1)...(19): siRNA sense strand
acaaagaacucaacagcag

SEQ ID NO: 2597131 - RNA, 19 nt, Homo sapiens
  misc_RNA (1)...(19): siRNA sense strand
cagagaacaaagaacucaa

SEQ ID NO: 2597132 - RNA, 19 nt, Homo sapiens
  misc_RNA (1)...(19): siRNA sense strand
ucuauaugguguuggagga

SEQ ID NO: 2597133 - RNA, 19 nt, Homo sapiens
  misc_RNA (1)...(19): siRNA sense strand
ggaagcaggacauggagga

SEQ ID NO: 2597134 - RNA, 19 nt, Homo sapiens
  misc_RNA (1)...(19): siRNA sense strand
gauggugacucuaggagca

SEQ ID NO: 2597135 - RNA, 19 nt, Homo sapiens
  misc_RNA (1)...(19): siRNA sense strand
aagcaggacauggaggaaa

SEQ ID NO: 2597136 - RNA, 19 nt, Homo sapiens
  misc_RNA (1)...(19): siRNA sense strand
aggagacauccguggaaaa

SEQ ID NO: 2597137 - RNA, 19 nt, Homo sapiens
  misc_RNA (1)...(19): siRNA sense strand
cucuaugaucucacagaaa

SEQ ID NO: 2597138 - RNA, 19 nt, Homo sapiens
  misc_RNA (1)...(19): siRNA sense strand
cugcagaugacgaggcugu

SEQ ID NO: 2597139 - RNA, 19 nt, Homo sapiens
  misc_RNA (1)...(19): siRNA sense strand
ucucugaaguucuggagca

SEQ ID NO: 2597140 - RNA, 19 nt, Homo sapiens
  misc_RNA (1)...(19): siRNA sense strand
ugacagugcugcagggaga

SEQ ID NO: 2597141 - RNA, 19 nt, Homo sapiens
  misc_RNA (1)...(19): siRNA sense strand
gggagagaucuuugaggga

SEQ ID NO: 2597142 - RNA, 19 nt, Homo sapiens
  misc_RNA (1)...(19): siRNA sense strand
ccuacaugccuccggguuu

SEQ ID NO: 2597143 - RNA, 19 nt, Homo sapiens
  misc_RNA (1)...(19): siRNA sense strand
gcacauauguccaggagga

SEQ ID NO: 2597144 - RNA, 19 nt, Homo sapiens
  misc_RNA (1)...(19): siRNA sense strand
cugaagaacaagaagaaaa

SEQ ID NO: 2597145 - RNA, 19 nt, Homo sapiens
  misc_RNA (1)...(19): siRNA sense strand
gugccaaguacgagcagaa

SEQ ID NO: 2597146 - RNA, 19 nt, Homo sapiens
  misc_RNA (1)...(19): siRNA sense strand
guugaagcgaaguggcaaa

SEQ ID NO: 2597147 - RNA, 19 nt, Homo sapiens
  misc_RNA (1)...(19): siRNA sense strand
ggagaaacaauaaccggaa

SEQ ID NO: 2597148 - RNA, 19 nt, Homo sapiens
  misc_RNA (1)...(19): siRNA sense strand
cguugaauaaagaguggaa

SEQ ID NO: 2597149 - RNA, 19 nt, Homo sapiens
  misc_RNA (1)...(19): siRNA sense strand
gcucagggauccaccggaa

SEQ ID NO: 2597150 - RNA, 19 nt, Homo sapiens
  misc_RNA (1)...(19): siRNA sense strand
ccagaagauuguugccaca

SEQ ID NO: 2597151 - RNA, 19 nt, Homo sapiens
  misc_RNA (1)...(19): siRNA sense strand
gcgagagcagcaagaacaa

SEQ ID NO: 2597152 - RNA, 19 nt, Homo sapiens
  misc_RNA (1)...(19): siRNA sense strand
aaguaauggaggugggagu

SEQ ID NO: 2597153 - RNA, 19 nt, Homo sapiens
  misc_RNA (1)...(19): siRNA sense strand
gguucaagaaagagauugu

SEQ ID NO: 2597154 - RNA, 19 nt, Homo sapiens
  misc_RNA (1)...(19): siRNA sense strand
acccagacaaagagaagaa

SEQ ID NO: 2597155 - RNA, 19 nt, Homo sapiens
  misc_RNA (1)...(19): siRNA sense strand
uaucggaacacgagcgaga

SEQ ID NO: 2597156 - RNA, 19 nt, Homo sapiens
  misc_RNA (1)...(19): siRNA sense strand
ccacaaggaagaagcagca

SEQ ID NO: 2597157 - RNA, 19 nt, Homo sapiens
  misc_RNA (1)...(19): siRNA sense strand
cgacguaugaggagcggga

SEQ ID NO: 2597158 - RNA, 19 nt, Homo sapiens
  misc_RNA (1)...(19): siRNA sense strand
ggaacacagcucuggccua

SEQ ID NO: 2597159 - RNA, 19 nt, Homo sapiens
  misc_RNA (1)...(19): siRNA sense strand
gcugaagaacaagaagaaa

SEQ ID NO: 2597160 - RNA, 19 nt, Homo sapiens
  misc_RNA (1)...(19): siRNA sense strand
ggugggaguuuaagcgacu

SEQ ID NO: 2597161 - RNA, 19 nt, Homo sapiens
  misc_RNA (1)...(19): siRNA sense strand
ggaaugugguccuggcgca

SEQ ID NO: 2597162 - RNA, 19 nt, Homo sapiens
  misc_RNA (1)...(19): siRNA sense strand
ggaaagggagcgacccaga

SEQ ID NO: 2597163 - RNA, 19 nt, Homo sapiens
  misc_RNA (1)...(19): siRNA sense strand
agggagcgacccagacaaa

SEQ ID NO: 2597164 - RNA, 19 nt, Homo sapiens
  misc_RNA (1)...(19): siRNA sense strand
gagaagaaaggccuggaga

SEQ ID NO: 2597165 - RNA, 19 nt, Homo sapiens
  misc_RNA (1)...(19): siRNA sense strand
agaaacaauaaccggaaca

SEQ ID NO: 2597166 - RNA, 19 nt, Homo sapiens
  misc_RNA (1)...(19): siRNA sense strand
cggaacaacagcaguggga

SEQ ID NO: 2597167 - RNA, 19 nt, Homo sapiens
  misc_RNA (1)...(19): siRNA sense strand
gcugcugaucagagaugaa

SEQ ID NO: 2597168 - RNA, 19 nt, Homo sapiens
  misc_RNA (1)...(19): siRNA sense strand
cugcugaagaacaagaaga

SEQ ID NO: 2597169 - RNA, 19 nt, Homo sapiens
  misc_RNA (1)...(19): siRNA sense strand
ugcugaagaacaagaagaa

SEQ ID NO: 2597170 - RNA, 19 nt, Homo sapiens
  misc_RNA (1)...(19): siRNA sense strand
ccuaauucucccagccauu

SEQ ID NO: 2597171 - RNA, 19 nt, Homo sapiens
  misc_RNA (1)...(19): siRNA sense strand
ucuucagcuuggaggauga

SEQ ID NO: 2597172 - RNA, 19 nt, Homo sapiens
  misc_RNA (1)...(19): siRNA sense strand
aagaaaagcacuagcaacu

SEQ ID NO: 2597173 - RNA, 19 nt, Homo sapiens
  misc_RNA (1)...(19): siRNA sense strand
aagaacaagucccggcuga

SEQ ID NO: 2597174 - RNA, 19 nt, Homo sapiens
  misc_RNA (1)...(19): siRNA sense strand
gcacccaucuccagcccua

SEQ ID NO: 2597175 - RNA, 19 nt, Homo sapiens
  misc_RNA (1)...(19): siRNA sense strand
ggcugaauguggagagggu

SEQ ID NO: 2597176 - RNA, 19 nt, Homo sapiens
  misc_RNA (1)...(19): siRNA sense strand
caucgaaugcucagggauc

SEQ ID NO: 2597177 - RNA, 19 nt, Homo sapiens
  misc_RNA (1)...(19): siRNA sense strand
ccgugaagaaagugggaaa

SEQ ID NO: 2597178 - RNA, 19 nt, Homo sapiens
  misc_RNA (1)...(19): siRNA sense strand
uaagaaauggagagguaaa

SEQ ID NO: 2597179 - RNA, 19 nt, Homo sapiens
  misc_RNA (1)...(19): siRNA sense strand
ccaagugagccaaggacaa

SEQ ID NO: 2597180 - RNA, 19 nt, Homo sapiens
  misc_RNA (1)...(19): siRNA sense strand
cagacaucuuugcgggaaa

SEQ ID NO: 2597181 - RNA, 19 nt, Homo sapiens
  misc_RNA (1)...(19): siRNA sense strand
gcagauaagaagaaagcca

SEQ ID NO: 2597182 - RNA, 19 nt, Homo sapiens
  misc_RNA (1)...(19): siRNA sense strand
aagcaaggaaauugaacua

SEQ ID NO: 2597183 - RNA, 19 nt, Homo sapiens
  misc_RNA (1)...(19): siRNA sense strand
gauucaagguggaguucau

SEQ ID NO: 2597184 - RNA, 19 nt, Homo sapiens
  misc_RNA (1)...(19): siRNA sense strand
aaauggagagguaaagaaa

SEQ ID NO: 2597185 - RNA, 19 nt, Homo sapiens
  misc_RNA (1)...(19): siRNA sense strand
uugcaaacauagacccuaa

SEQ ID NO: 2597186 - RNA, 19 nt, Homo sapiens
  misc_RNA (1)...(19): siRNA sense strand
cgggaaagauauaacucau

SEQ ID NO: 2597187 - RNA, 19 nt, Homo sapiens
  misc_RNA (1)...(19): siRNA sense strand
gagaaggacaaaagaagaa

SEQ ID NO: 2597188 - RNA, 19 nt, Homo sapiens
  misc_RNA (1)...(19): siRNA sense strand
aggaggaauuucggaguua

SEQ ID NO: 2597189 - RNA, 19 nt, Homo sapiens
  misc_RNA (1)...(19): siRNA sense strand
augcaaugguagcuguuaa

SEQ ID NO: 2597190 - RNA, 19 nt, Homo sapiens
  misc_RNA (1)...(19): siRNA sense strand
uacugaaacaacagggaaa

SEQ ID NO: 2597191 - RNA, 19 nt, Homo sapiens
  misc_RNA (1)...(19): siRNA sense strand
cagagaacaugaugcccaa

SEQ ID NO: 2597192 - RNA, 19 nt, Homo sapiens
  misc_RNA (1)...(19): siRNA sense strand
aggaaguacugaaacaaca

SEQ ID NO: 2597193 - RNA, 19 nt, Homo sapiens
  misc_RNA (1)...(19): siRNA sense strand
aaguaucgauuaaggaaca

SEQ ID NO: 2597194 - RNA, 19 nt, Homo sapiens
  misc_RNA (1)...(19): siRNA sense strand
augcaacagaaguggaauu

SEQ ID NO: 2597195 - RNA, 19 nt, Homo sapiens
  misc_RNA (1)...(19): siRNA sense strand
auggagagguaaagaaacu

SEQ ID NO: 2597196 - RNA, 19 nt, Homo sapiens
  misc_RNA (1)...(19): siRNA sense strand
caucaguguaucagauuau

SEQ ID NO: 2597197 - RNA, 19 nt, Homo sapiens
  misc_RNA (1)...(19): siRNA sense strand
ggguuguccacgaggaaca

SEQ ID NO: 2597198 - RNA, 19 nt, Homo sapiens
  misc_RNA (1)...(19): siRNA sense strand
guaccaacgagaugacauu

SEQ ID NO: 2597199 - RNA, 19 nt, Homo sapiens
  misc_RNA (1)...(19): siRNA sense strand
ugucauaggaaguacugaa

SEQ ID NO: 2597200 - RNA, 19 nt, Homo sapiens
  misc_RNA (1)...(19): siRNA sense strand
ugggaaagguuggcgcuaa

SEQ ID NO: 2597201 - RNA, 19 nt, Homo sapiens
  misc_RNA (1)...(19): siRNA sense strand
uguuaagagaagaguacau

SEQ ID NO: 2597202 - RNA, 19 nt, Homo sapiens
  misc_RNA (1)...(19): siRNA sense strand
gcaacgaacaggugaccca

SEQ ID NO: 2597203 - RNA, 19 nt, Homo sapiens
  misc_RNA (1)...(19): siRNA sense strand
caaagaugucauugcuaau

SEQ ID NO: 2597204 - RNA, 19 nt, Homo sapiens
  misc_RNA (1)...(19): siRNA sense strand
cauuacuucuucagagaga

SEQ ID NO: 2597205 - RNA, 19 nt, Homo sapiens
  misc_RNA (1)...(19): siRNA sense strand
ccuugaagcugguguuacu

SEQ ID NO: 2597206 - RNA, 19 nt, Homo sapiens
  misc_RNA (1)...(19): siRNA sense strand
gggaaagauauaacucauu

SEQ ID NO: 2597207 - RNA, 19 nt, Homo sapiens
  misc_RNA (1)...(19): siRNA sense strand
gagugugagugguacaaaa

SEQ ID NO: 2597208 - RNA, 19 nt, Homo sapiens
  misc_RNA (1)...(19): siRNA sense strand
gcuucaugcuuaauguauu

SEQ ID NO: 2597209 - RNA, 19 nt, Homo sapiens
  misc_RNA (1)...(19): siRNA sense strand
gaaaauuguuccaaguaca

SEQ ID NO: 2597210 - RNA, 19 nt, Homo sapiens
  misc_RNA (1)...(19): siRNA sense strand
ccauugauucagagcccaa

SEQ ID NO: 2597211 - RNA, 19 nt, Homo sapiens
  misc_RNA (1)...(19): siRNA sense strand
gcuucuuguuuuaagguua

SEQ ID NO: 2597212 - RNA, 19 nt, Homo sapiens
  misc_RNA (1)...(19): siRNA sense strand
ggaagagcuugaaaaguau

SEQ ID NO: 2597213 - RNA, 19 nt, Homo sapiens
  misc_RNA (1)...(19): siRNA sense strand
gcagagaacaugaugccca

SEQ ID NO: 2597214 - RNA, 19 nt, Homo sapiens
  misc_RNA (1)...(19): siRNA sense strand
ccaugcaacagaaguggaa

SEQ ID NO: 2597215 - RNA, 19 nt, Homo sapiens
  misc_RNA (1)...(19): siRNA sense strand
cagccaaacagcaaauaca

SEQ ID NO: 2597216 - RNA, 19 nt, Homo sapiens
  misc_RNA (1)...(19): siRNA sense strand
ggaccuggacaguggugau

SEQ ID NO: 2597217 - RNA, 19 nt, Homo sapiens
  misc_RNA (1)...(19): siRNA sense strand
caaaagaagaagauccaau

SEQ ID NO: 2597218 - RNA, 19 nt, Homo sapiens
  misc_RNA (1)...(19): siRNA sense strand
aagaagaggccuugaagcu

SEQ ID NO: 2597219 - RNA, 19 nt, Homo sapiens
  misc_RNA (1)...(19): siRNA sense strand
caguggugauguuaagaga

SEQ ID NO: 2597220 - RNA, 19 nt, Homo sapiens
  misc_RNA (1)...(19): siRNA sense strand
uuugaaacccagagaagga

SEQ ID NO: 2597221 - RNA, 19 nt, Homo sapiens
  misc_RNA (1)...(19): siRNA sense strand
guuacuggcauuagaagau

SEQ ID NO: 2597222 - RNA, 19 nt, Homo sapiens
  misc_RNA (1)...(19): siRNA sense strand
ggacagauucauuguuacu

SEQ ID NO: 2597223 - RNA, 19 nt, Homo sapiens
  misc_RNA (1)...(19): siRNA sense strand
ggauauuauucgguggcuu

SEQ ID NO: 2597224 - RNA, 19 nt, Homo sapiens
  misc_RNA (1)...(19): siRNA sense strand
cuccagagucauuugcaaa

SEQ ID NO: 2597225 - RNA, 19 nt, Homo sapiens
  misc_RNA (1)...(19): siRNA sense strand
guacugaaacaacagggaa

SEQ ID NO: 2597226 - RNA, 19 nt, Homo sapiens
  misc_RNA (1)...(19): siRNA sense strand
agauaagaagaaagccaga

SEQ ID NO: 2597227 - RNA, 19 nt, Homo sapiens
  misc_RNA (1)...(19): siRNA sense strand
ugcaaagaguguccaggaa

SEQ ID NO: 2597228 - RNA, 19 nt, Homo sapiens
  misc_RNA (1)...(19): siRNA sense strand
cagcuaacuuaaauagacu

SEQ ID NO: 2597229 - RNA, 19 nt, Homo sapiens
  misc_RNA (1)...(19): siRNA sense strand
agcauuacgcagagaacau

SEQ ID NO: 2597230 - RNA, 19 nt, Homo sapiens
  misc_RNA (1)...(19): siRNA sense strand
gauguuaagagaagaguac

SEQ ID NO: 2597231 - RNA, 19 nt, Homo sapiens
  misc_RNA (1)...(19): siRNA sense strand
ucacaaccacagccggaaa

SEQ ID NO: 2597232 - RNA, 19 nt, Homo sapiens
  misc_RNA (1)...(19): siRNA sense strand
cucuggagaccgugaagaa

SEQ ID NO: 2597233 - RNA, 19 nt, Homo sapiens
  misc_RNA (1)...(19): siRNA sense strand
agucauuugcaaagagugu

SEQ ID NO: 2597234 - RNA, 19 nt, Homo sapiens
  misc_RNA (1)...(19): siRNA sense strand
ccagagaaggacaaaagaa

SEQ ID NO: 2597235 - RNA, 19 nt, Homo sapiens
  misc_RNA (1)...(19): siRNA sense strand
aagaagaggcagugggacu

SEQ ID NO: 2597236 - RNA, 19 nt, Homo sapiens
  misc_RNA (1)...(19): siRNA sense strand
aggaagugguucuggagga

SEQ ID NO: 2597237 - RNA, 19 nt, Homo sapiens
  misc_RNA (1)...(19): siRNA sense strand
ggaagaagaggcaguggga

SEQ ID NO: 2597238 - RNA, 19 nt, Homo sapiens
  misc_RNA (1)...(19): siRNA sense strand
aggacaaugacaaggugua

SEQ ID NO: 2597239 - RNA, 19 nt, Homo sapiens
  misc_RNA (1)...(19): siRNA sense strand
aggcagaggaugggaccua

SEQ ID NO: 2597240 - RNA, 19 nt, Homo sapiens
  misc_RNA (1)...(19): siRNA sense strand
gcaccaaggacuacccaga

SEQ ID NO: 2597241 - RNA, 19 nt, Homo sapiens
  misc_RNA (1)...(19): siRNA sense strand
acucagggucugugcucaa

SEQ ID NO: 2597242 - RNA, 19 nt, Homo sapiens
  misc_RNA (1)...(19): siRNA sense strand
gagcauggcuucucccaga

SEQ ID NO: 2597243 - RNA, 19 nt, Homo sapiens
  misc_RNA (1)...(19): siRNA sense strand
ggaguguguucgaaaggga

SEQ ID NO: 2597244 - RNA, 19 nt, Homo sapiens
  misc_RNA (1)...(19): siRNA sense strand
guucgaaagggaagagauc

SEQ ID NO: 2597245 - RNA, 19 nt, Homo sapiens
  misc_RNA (1)...(19): siRNA sense strand
gugccguguuccagggcuu

SEQ ID NO: 2597246 - RNA, 19 nt, Homo sapiens
  misc_RNA (1)...(19): siRNA sense strand
gcaagaagaugaagagccg

SEQ ID NO: 2597247 - RNA, 19 nt, Homo sapiens
  misc_RNA (1)...(19): siRNA sense strand
gggccagagccaggaagaa

SEQ ID NO: 2597248 - RNA, 19 nt, Homo sapiens
  misc_RNA (1)...(19): siRNA sense strand
gcuucaugacauaagacaa

SEQ ID NO: 2597249 - RNA, 19 nt, Homo sapiens
  misc_RNA (1)...(19): siRNA sense strand
aggcagaauccaaagacga

SEQ ID NO: 2597250 - RNA, 19 nt, Homo sapiens
  misc_RNA (1)...(19): siRNA sense strand
acuugaaaacuguggacaa

SEQ ID NO: 2597251 - RNA, 19 nt, Homo sapiens
  misc_RNA (1)...(19): siRNA sense strand
uaagacaagaagauggaau

SEQ ID NO: 2597252 - RNA, 19 nt, Homo sapiens
  misc_RNA (1)...(19): siRNA sense strand
guucauagcucaugcugcu

SEQ ID NO: 2597253 - RNA, 19 nt, Homo sapiens
  misc_RNA (1)...(19): siRNA sense strand
cuggaaagaaagugagaua

SEQ ID NO: 2597254 - RNA, 19 nt, Homo sapiens
  misc_RNA (1)...(19): siRNA sense strand
cuaaaguggaugagagaga

SEQ ID NO: 2597255 - RNA, 19 nt, Homo sapiens
  misc_RNA (1)...(19): siRNA sense strand
ccauauugccaaaggagaa

SEQ ID NO: 2597256 - RNA, 19 nt, Homo sapiens
  misc_RNA (1)...(19): siRNA sense strand
gugagaaacuugagccuga

SEQ ID NO: 2597257 - RNA, 19 nt, Homo sapiens
  misc_RNA (1)...(19): siRNA sense strand
gggaagaagaaguugccua

SEQ ID NO: 2597258 - RNA, 19 nt, Homo sapiens
  misc_RNA (1)...(19): siRNA sense strand
ggaaacaagugaaugggau

SEQ ID NO: 2597259 - RNA, 19 nt, Homo sapiens
  misc_RNA (1)...(19): siRNA sense strand
gccuaagaacugaggaaau

SEQ ID NO: 2597260 - RNA, 19 nt, Homo sapiens
  misc_RNA (1)...(19): siRNA sense strand
cguuaaagaugaggagaca

SEQ ID NO: 2597261 - RNA, 19 nt, Homo sapiens
  misc_RNA (1)...(19): siRNA sense strand
acacaaaccaggugcucaa

SEQ ID NO: 2597262 - RNA, 19 nt, Homo sapiens
  misc_RNA (1)...(19): siRNA sense strand
cuuugauccaggagagaaa

SEQ ID NO: 2597263 - RNA, 19 nt, Homo sapiens
  misc_RNA (1)...(19): siRNA sense strand
gaacugaggaaauggguga

SEQ ID NO: 2597264 - RNA, 19 nt, Homo sapiens
  misc_RNA (1)...(19): siRNA sense strand
gcgcauaagcacagcgagu

SEQ ID NO: 2597265 - RNA, 19 nt, Homo sapiens
  misc_RNA (1)...(19): siRNA sense strand
gggaaagaccguuaaagau

SEQ ID NO: 2597266 - RNA, 19 nt, Homo sapiens
  misc_RNA (1)...(19): siRNA sense strand
agaacuacacagugaauau

SEQ ID NO: 2597267 - RNA, 19 nt, Homo sapiens
  misc_RNA (1)...(19): siRNA sense strand
acaucagaaaggugcgaaa

SEQ ID NO: 2597268 - RNA, 19 nt, Homo sapiens
  misc_RNA (1)...(19): siRNA sense strand
ugaggaaaugggugagcaa

SEQ ID NO: 2597269 - RNA, 19 nt, Homo sapiens
  misc_RNA (1)...(19): siRNA sense strand
aauuagaugucgaugccaa

SEQ ID NO: 2597270 - RNA, 19 nt, Homo sapiens
  misc_RNA (1)...(19): siRNA sense strand
aaaguggaugagagagaaa

SEQ ID NO: 2597271 - RNA, 19 nt, Homo sapiens
  misc_RNA (1)...(19): siRNA sense strand
uggccuaagaacugaggaa

SEQ ID NO: 2597272 - RNA, 19 nt, Homo sapiens
  misc_RNA (1)...(19): siRNA sense strand
caaaggaaugaaagcagaa

SEQ ID NO: 2597273 - RNA, 19 nt, Homo sapiens
  misc_RNA (1)...(19): siRNA sense strand
ggaauaggcaccuggggaa

SEQ ID NO: 2597274 - RNA, 19 nt, Homo sapiens
  misc_RNA (1)...(19): siRNA sense strand
ggggaaagaccguuaaaga

SEQ ID NO: 2597275 - RNA, 19 nt, Homo sapiens
  misc_RNA (1)...(19): siRNA sense strand
ggaaagaccguuaaagaug

SEQ ID NO: 2597276 - RNA, 19 nt, Homo sapiens
  misc_RNA (1)...(19): siRNA sense strand
ccacauggagguagcgcau

SEQ ID NO: 2597277 - RNA, 19 nt, Homo sapiens
  misc_RNA (1)...(19): siRNA sense strand
acaaaggaaugaaagcaga

SEQ ID NO: 2597278 - RNA, 19 nt, Homo sapiens
  misc_RNA (1)...(19): siRNA sense strand
uggaaaaucuugacaacau

SEQ ID NO: 2597279 - RNA, 19 nt, Homo sapiens
  misc_RNA (1)...(19): siRNA sense strand
aggaagagcuuauacacca

SEQ ID NO: 2597280 - RNA, 19 nt, Homo sapiens
  misc_RNA (1)...(19): siRNA sense strand
ugaagaugaaauugaccaa

SEQ ID NO: 2597281 - RNA, 19 nt, Homo sapiens
  misc_RNA (1)...(19): siRNA sense strand
uccggaaaguccagaacua

SEQ ID NO: 2597282 - RNA, 19 nt, Homo sapiens
  misc_RNA (1)...(19): siRNA sense strand
gugcuuggucucugaggaa

SEQ ID NO: 2597283 - RNA, 19 nt, Homo sapiens
  misc_RNA (1)...(19): siRNA sense strand
cggaaaguccagaacuaca

SEQ ID NO: 2597284 - RNA, 19 nt, Homo sapiens
  misc_RNA (1)...(19): siRNA sense strand
gaacauauuaagaggacug

SEQ ID NO: 2597285 - RNA, 19 nt, Homo sapiens
  misc_RNA (1)...(19): siRNA sense strand
cagucggaccugucaauaa

SEQ ID NO: 2597286 - RNA, 19 nt, Homo sapiens
  misc_RNA (1)...(19): siRNA sense strand
aagguauucuuguggauau

SEQ ID NO: 2597287 - RNA, 19 nt, Homo sapiens
  misc_RNA (1)...(19): siRNA sense strand
ggugaaacuaaaucaucua

SEQ ID NO: 2597288 - RNA, 19 nt, Homo sapiens
  misc_RNA (1)...(19): siRNA sense strand
gagcugcauuugaaggaga

SEQ ID NO: 2597289 - RNA, 19 nt, Homo sapiens
  misc_RNA (1)...(19): siRNA sense strand
gaaagaccguuaaagauga

SEQ ID NO: 2597290 - RNA, 19 nt, Homo sapiens
  misc_RNA (1)...(19): siRNA sense strand
cagcggagccucagagucu

SEQ ID NO: 2597291 - RNA, 19 nt, Homo sapiens
  misc_RNA (1)...(19): siRNA sense strand
gauuuggagaauaagcuua

SEQ ID NO: 2597292 - RNA, 19 nt, Homo sapiens
  misc_RNA (1)...(19): siRNA sense strand
gcuuggucucugaggaaga

SEQ ID NO: 2597293 - RNA, 19 nt, Homo sapiens
  misc_RNA (1)...(19): siRNA sense strand
aagaaguugccuauggauu

SEQ ID NO: 2597294 - RNA, 19 nt, Homo sapiens
  misc_RNA (1)...(19): siRNA sense strand
ggugggagauggacgacca

SEQ ID NO: 2597295 - RNA, 19 nt, Homo sapiens
  misc_RNA (1)...(19): siRNA sense strand
gcuuuuagucaguggugaa

SEQ ID NO: 2597296 - RNA, 19 nt, Homo sapiens
  misc_RNA (1)...(19): siRNA sense strand
ccguuaaagaugaggagac

SEQ ID NO: 2597297 - RNA, 19 nt, Homo sapiens
  misc_RNA (1)...(19): siRNA sense strand
caaccgaaaacuaacgaua

SEQ ID NO: 2597298 - RNA, 19 nt, Homo sapiens
  misc_RNA (1)...(19): siRNA sense strand
cuguguugcccuugaguca

SEQ ID NO: 2597299 - RNA, 19 nt, Homo sapiens
  misc_RNA (1)...(19): siRNA sense strand
ggccuaagaacugaggaaa

SEQ ID NO: 2597300 - RNA, 19 nt, Homo sapiens
  misc_RNA (1)...(19): siRNA sense strand
gggugugaauucugguguu

SEQ ID NO: 2597301 - RNA, 19 nt, Homo sapiens
  misc_RNA (1)...(19): siRNA sense strand
cuacagggaaacaagugaa

SEQ ID NO: 2597302 - RNA, 19 nt, Homo sapiens
  misc_RNA (1)...(19): siRNA sense strand
gcaccuuccaugauaucaa

SEQ ID NO: 2597303 - RNA, 19 nt, Homo sapiens
  misc_RNA (1)...(19): siRNA sense strand
agucaguggugaagugaug

SEQ ID NO: 2597304 - RNA, 19 nt, Homo sapiens
  misc_RNA (1)...(19): siRNA sense strand
ucagacauacacagagauu

SEQ ID NO: 2597305 - RNA, 19 nt, Homo sapiens
  misc_RNA (1)...(19): siRNA sense strand
ccaugauaucaaaggucuu

SEQ ID NO: 2597306 - RNA, 19 nt, Homo sapiens
  misc_RNA (1)...(19): siRNA sense strand
ugguuaauggagagaauuu

SEQ ID NO: 2597307 - RNA, 19 nt, Homo sapiens
  misc_RNA (1)...(19): siRNA sense strand
uagaagagucccagcccaa

SEQ ID NO: 2597308 - RNA, 19 nt, Homo sapiens
  misc_RNA (1)...(19): siRNA sense strand
cuacugagcagcaaggaca

SEQ ID NO: 2597309 - RNA, 19 nt, Homo sapiens
  misc_RNA (1)...(19): siRNA sense strand
ucaugauagccuuggguaa

SEQ ID NO: 2597310 - RNA, 19 nt, Homo sapiens
  misc_RNA (1)...(19): siRNA sense strand
ccaccaagggcgugcucaa

SEQ ID NO: 2597311 - RNA, 19 nt, Homo sapiens
  misc_RNA (1)...(19): siRNA sense strand
gcaaccaggaaguggccaa

SEQ ID NO: 2597312 - RNA, 19 nt, Homo sapiens
  misc_RNA (1)...(19): siRNA sense strand
ucaucuacagucugagaaa

SEQ ID NO: 2597313 - RNA, 19 nt, Homo sapiens
  misc_RNA (1)...(19): siRNA sense strand
cggucuuguaucuggcuua

SEQ ID NO: 2597314 - RNA, 19 nt, Homo sapiens
  misc_RNA (1)...(19): siRNA sense strand
cgguugucucuuuguauua

SEQ ID NO: 2597315 - RNA, 19 nt, Homo sapiens
  misc_RNA (1)...(19): siRNA sense strand
uggguaacacagacagcua

SEQ ID NO: 2597316 - RNA, 19 nt, Homo sapiens
  misc_RNA (1)...(19): siRNA sense strand
agucugagaaaucgggaca

SEQ ID NO: 2597317 - RNA, 19 nt, Homo sapiens
  misc_RNA (1)...(19): siRNA sense strand
ucccuaagaugcuggccaa

SEQ ID NO: 2597318 - RNA, 19 nt, Homo sapiens
  misc_RNA (1)...(19): siRNA sense strand
gauauaauguggaggaauc

SEQ ID NO: 2597319 - RNA, 19 nt, Homo sapiens
  misc_RNA (1)...(19): siRNA sense strand
gggaacgaguagaacgcua

SEQ ID NO: 2597320 - RNA, 19 nt, Homo sapiens
  misc_RNA (1)...(19): siRNA sense strand
aggacaagccagugcaaau

SEQ ID NO: 2597321 - RNA, 19 nt, Homo sapiens
  misc_RNA (1)...(19): siRNA sense strand
gccuagaagaagaugggaa

SEQ ID NO: 2597322 - RNA, 19 nt, Homo sapiens
  misc_RNA (1)...(19): siRNA sense strand
augauuuacugauggacaa

SEQ ID NO: 2597323 - RNA, 19 nt, Homo sapiens
  misc_RNA (1)...(19): siRNA sense strand
cucacaaagcugaaagcaa

SEQ ID NO: 2597324 - RNA, 19 nt, Homo sapiens
  misc_RNA (1)...(19): siRNA sense strand
ucacaaagcugaaagcaag

SEQ ID NO: 2597325 - RNA, 19 nt, Homo sapiens
  misc_RNA (1)...(19): siRNA sense strand
gcugauauaauguggagga

SEQ ID NO: 2597326 - RNA, 19 nt, Homo sapiens
  misc_RNA (1)...(19): siRNA sense strand
ugugaauacugcugggcga

SEQ ID NO: 2597327 - RNA, 19 nt, Homo sapiens
  misc_RNA (1)...(19): siRNA sense strand
ggaugauagccauggugau

SEQ ID NO: 2597328 - RNA, 19 nt, Homo sapiens
  misc_RNA (1)...(19): siRNA sense strand
cugauauaauguggaggaa

SEQ ID NO: 2597329 - RNA, 19 nt, Homo sapiens
  misc_RNA (1)...(19): siRNA sense strand
ccaaugaguuucgcugaua

SEQ ID NO: 2597330 - RNA, 19 nt, Homo sapiens
  misc_RNA (1)...(19): siRNA sense strand
ccaccaacgcgguagagga

SEQ ID NO: 2597331 - RNA, 19 nt, Homo sapiens
  misc_RNA (1)...(19): siRNA sense strand
ugauauaauguggaggaau

SEQ ID NO: 2597332 - RNA, 19 nt, Homo sapiens
  misc_RNA (1)...(19): siRNA sense strand
gaugauuuacugauggaca

SEQ ID NO: 2597333 - RNA, 19 nt, Homo sapiens
  misc_RNA (1)...(19): siRNA sense strand
auacggacccagagcugaa

SEQ ID NO: 2597334 - RNA, 19 nt, Homo sapiens
  misc_RNA (1)...(19): siRNA sense strand
ugguaagccaggugggcaa

SEQ ID NO: 2597335 - RNA, 19 nt, Homo sapiens
  misc_RNA (1)...(19): siRNA sense strand
gcaaagaacuacugcgccu

SEQ ID NO: 2597336 - RNA, 19 nt, Homo sapiens
  misc_RNA (1)...(19): siRNA sense strand
augccuagccaguugguaa

SEQ ID NO: 2597337 - RNA, 19 nt, Homo sapiens
  misc_RNA (1)...(19): siRNA sense strand
auuaaguccaucugagaaa

SEQ ID NO: 2597338 - RNA, 19 nt, Homo sapiens
  misc_RNA (1)...(19): siRNA sense strand
cuguugacauucagcacaa

SEQ ID NO: 2597339 - RNA, 19 nt, Homo sapiens
  misc_RNA (1)...(19): siRNA sense strand
cugagaaacuagagccuug

SEQ ID NO: 2597340 - RNA, 19 nt, Homo sapiens
  misc_RNA (1)...(19): siRNA sense strand
cagagaacaagaagccaca

SEQ ID NO: 2597341 - RNA, 19 nt, Homo sapiens
  misc_RNA (1)...(19): siRNA sense strand
uggaaaaccuaaagaguaa

SEQ ID NO: 2597342 - RNA, 19 nt, Homo sapiens
  misc_RNA (1)...(19): siRNA sense strand
ggacaagauaacagucaaa

SEQ ID NO: 2597343 - RNA, 19 nt, Homo sapiens
  misc_RNA (1)...(19): siRNA sense strand
guacaugagaccugcgaaa

SEQ ID NO: 2597344 - RNA, 19 nt, Homo sapiens
  misc_RNA (1)...(19): siRNA sense strand
cggccuuaauccagaguua

SEQ ID NO: 2597345 - RNA, 19 nt, Homo sapiens
  misc_RNA (1)...(19): siRNA sense strand
agacaaaggaagaucagaa

SEQ ID NO: 2597346 - RNA, 19 nt, Homo sapiens
  misc_RNA (1)...(19): siRNA sense strand
guucagaaggagagacaau

SEQ ID NO: 2597347 - RNA, 19 nt, Homo sapiens
  misc_RNA (1)...(19): siRNA sense strand
ggacgggcucaaagagaaa

SEQ ID NO: 2597348 - RNA, 19 nt, Homo sapiens
  misc_RNA (1)...(19): siRNA sense strand
auuauuaggaggagaacaa

SEQ ID NO: 2597349 - RNA, 19 nt, Homo sapiens
  misc_RNA (1)...(19): siRNA sense strand
ugcaaaaccuucagagaaa

SEQ ID NO: 2597350 - RNA, 19 nt, Homo sapiens
  misc_RNA (1)...(19): siRNA sense strand
accaaaggcuacagaggaa

SEQ ID NO: 2597351 - RNA, 19 nt, Homo sapiens
  misc_RNA (1)...(19): siRNA sense strand
gaucagaagaugucaccaa

SEQ ID NO: 2597352 - RNA, 19 nt, Homo sapiens
  misc_RNA (1)...(19): siRNA sense strand
cagauuauuaggaggagaa

SEQ ID NO: 2597353 - RNA, 19 nt, Homo sapiens
  misc_RNA (1)...(19): siRNA sense strand
ccaucaaagaggagcccaa

SEQ ID NO: 2597354 - RNA, 19 nt, Homo sapiens
  misc_RNA (1)...(19): siRNA sense strand
agacaaugaccaagacaga

SEQ ID NO: 2597355 - RNA, 19 nt, Homo sapiens
  misc_RNA (1)...(19): siRNA sense strand
ccaaguggaagaagagauu

SEQ ID NO: 2597356 - RNA, 19 nt, Homo sapiens
  misc_RNA (1)...(19): siRNA sense strand
gagaaaguuuggaccgaga

SEQ ID NO: 2597357 - RNA, 19 nt, Homo sapiens
  misc_RNA (1)...(19): siRNA sense strand
cuaccaaauccuugccaaa

SEQ ID NO: 2597358 - RNA, 19 nt, Homo sapiens
  misc_RNA (1)...(19): siRNA sense strand
ugauuaagcacuuccgaaa

SEQ ID NO: 2597359 - RNA, 19 nt, Homo sapiens
  misc_RNA (1)...(19): siRNA sense strand
gcacccaagagcagacaaa

SEQ ID NO: 2597360 - RNA, 19 nt, Homo sapiens
  misc_RNA (1)...(19): siRNA sense strand
ugucaaacaagaagcaaau

SEQ ID NO: 2597361 - RNA, 19 nt, Homo sapiens
  misc_RNA (1)...(19): siRNA sense strand
cugaaagucaccagagaga

SEQ ID NO: 2597362 - RNA, 19 nt, Homo sapiens
  misc_RNA (1)...(19): siRNA sense strand
cgcaaagagcagaggcaga

SEQ ID NO: 2597363 - RNA, 19 nt, Homo sapiens
  misc_RNA (1)...(19): siRNA sense strand
cuggaaagaacaaagaauu

SEQ ID NO: 2597364 - RNA, 19 nt, Homo sapiens
  misc_RNA (1)...(19): siRNA sense strand
caaaggaagaucagaagau

SEQ ID NO: 2597365 - RNA, 19 nt, Homo sapiens
  misc_RNA (1)...(19): siRNA sense strand
cugacuuacuggugaauga

SEQ ID NO: 2597366 - RNA, 19 nt, Homo sapiens
  misc_RNA (1)...(19): siRNA sense strand
agagagagaagcuggaaga

SEQ ID NO: 2597367 - RNA, 19 nt, Homo sapiens
  misc_RNA (1)...(19): siRNA sense strand
gacaaagacucuaagggau

SEQ ID NO: 2597368 - RNA, 19 nt, Homo sapiens
  misc_RNA (1)...(19): siRNA sense strand
ccaccgaauuagaacaaca

SEQ ID NO: 2597369 - RNA, 19 nt, Homo sapiens
  misc_RNA (1)...(19): siRNA sense strand
auaauaugguaacgagcua

SEQ ID NO: 2597370 - RNA, 19 nt, Homo sapiens
  misc_RNA (1)...(19): siRNA sense strand
caguaagggaggaaacuuu

SEQ ID NO: 2597371 - RNA, 19 nt, Homo sapiens
  misc_RNA (1)...(19): siRNA sense strand
cuguggaaaccaagggauu

SEQ ID NO: 2597372 - RNA, 19 nt, Homo sapiens
  misc_RNA (1)...(19): siRNA sense strand
cuccagagcuucaggacuu

SEQ ID NO: 2597373 - RNA, 19 nt, Homo sapiens
  misc_RNA (1)...(19): siRNA sense strand
agaguguggugaagagaga

SEQ ID NO: 2597374 - RNA, 19 nt, Homo sapiens
  misc_RNA (1)...(19): siRNA sense strand
auccguaucugaagggaaa

SEQ ID NO: 2597375 - RNA, 19 nt, Homo sapiens
  misc_RNA (1)...(19): siRNA sense strand
gagccuauagguacagaaa

SEQ ID NO: 2597376 - RNA, 19 nt, Homo sapiens
  misc_RNA (1)...(19): siRNA sense strand
gagcagauuauuaggagga

SEQ ID NO: 2597377 - RNA, 19 nt, Homo sapiens
  misc_RNA (1)...(19): siRNA sense strand
agacaaagacucuaaggga

SEQ ID NO: 2597378 - RNA, 19 nt, Homo sapiens
  misc_RNA (1)...(19): siRNA sense strand
agaacaagaaagcgccuua

SEQ ID NO: 2597379 - RNA, 19 nt, Homo sapiens
  misc_RNA (1)...(19): siRNA sense strand
gggaaaggaaguucugaga

SEQ ID NO: 2597380 - RNA, 19 nt, Homo sapiens
  misc_RNA (1)...(19): siRNA sense strand
auaaugacuuccagaguga

SEQ ID NO: 2597381 - RNA, 19 nt, Homo sapiens
  misc_RNA (1)...(19): siRNA sense strand
ugauagaaguacucaagau

SEQ ID NO: 2597382 - RNA, 19 nt, Homo sapiens
  misc_RNA (1)...(19): siRNA sense strand
augucaaacaagaagcaaa

SEQ ID NO: 2597383 - RNA, 19 nt, Homo sapiens
  misc_RNA (1)...(19): siRNA sense strand
auucuggagacuugggaaa

SEQ ID NO: 2597384 - RNA, 19 nt, Homo sapiens
  misc_RNA (1)...(19): siRNA sense strand
cagccuaaguaaauacgaa

SEQ ID NO: 2597385 - RNA, 19 nt, Homo sapiens
  misc_RNA (1)...(19): siRNA sense strand
gauccaucuucuagcagua

SEQ ID NO: 2597386 - RNA, 19 nt, Homo sapiens
  misc_RNA (1)...(19): siRNA sense strand
acuuaaacugcuagaacau

SEQ ID NO: 2597387 - RNA, 19 nt, Homo sapiens
  misc_RNA (1)...(19): siRNA sense strand
acagaguggucaagccaau

SEQ ID NO: 2597388 - RNA, 19 nt, Homo sapiens
  misc_RNA (1)...(19): siRNA sense strand
cuauagguacagaaagcaa

SEQ ID NO: 2597389 - RNA, 19 nt, Homo sapiens
  misc_RNA (1)...(19): siRNA sense strand
cauuggcauuggacggaaa

SEQ ID NO: 2597390 - RNA, 19 nt, Homo sapiens
  misc_RNA (1)...(19): siRNA sense strand
cucgauuccucuagacaaa

SEQ ID NO: 2597391 - RNA, 19 nt, Homo sapiens
  misc_RNA (1)...(19): siRNA sense strand
cagcagucugucaaggaaa

SEQ ID NO: 2597392 - RNA, 19 nt, Homo sapiens
  misc_RNA (1)...(19): siRNA sense strand
agucaauggaagcccguua

SEQ ID NO: 2597393 - RNA, 19 nt, Homo sapiens
  misc_RNA (1)...(19): siRNA sense strand
ucaggaaaguacuggagau

SEQ ID NO: 2597394 - RNA, 19 nt, Homo sapiens
  misc_RNA (1)...(19): siRNA sense strand
aggaaauaguucauccgua

SEQ ID NO: 2597395 - RNA, 19 nt, Homo sapiens
  misc_RNA (1)...(19): siRNA sense strand
ccgaauuagaacaacauuu

SEQ ID NO: 2597396 - RNA, 19 nt, Homo sapiens
  misc_RNA (1)...(19): siRNA sense strand
aaggagagacaaugaccaa

SEQ ID NO: 2597397 - RNA, 19 nt, Homo sapiens
  misc_RNA (1)...(19): siRNA sense strand
acaaagaauucucugcaga

SEQ ID NO: 2597398 - RNA, 19 nt, Homo sapiens
  misc_RNA (1)...(19): siRNA sense strand
cagaaaagcaccuuggaga

SEQ ID NO: 2597399 - RNA, 19 nt, Homo sapiens
  misc_RNA (1)...(19): siRNA sense strand
gccaauugccugaccacaa

SEQ ID NO: 2597400 - RNA, 19 nt, Homo sapiens
  misc_RNA (1)...(19): siRNA sense strand
gguacagaaagcaagguau

SEQ ID NO: 2597401 - RNA, 19 nt, Homo sapiens
  misc_RNA (1)...(19): siRNA sense strand
agaaaagcaccuuggagaa

SEQ ID NO: 2597402 - RNA, 19 nt, Homo sapiens
  misc_RNA (1)...(19): siRNA sense strand
aggacgggcucaaagagaa

SEQ ID NO: 2597403 - RNA, 19 nt, Homo sapiens
  misc_RNA (1)...(19): siRNA sense strand
uguugaaagcagugaaauu

SEQ ID NO: 2597404 - RNA, 19 nt, Homo sapiens
  misc_RNA (1)...(19): siRNA sense strand
aaaccaaggaagaggugaa

SEQ ID NO: 2597405 - RNA, 19 nt, Homo sapiens
  misc_RNA (1)...(19): siRNA sense strand
agggaaaggagcuggucaa

SEQ ID NO: 2597406 - RNA, 19 nt, Homo sapiens
  misc_RNA (1)...(19): siRNA sense strand
uggcagggcugaaggccua

SEQ ID NO: 2597407 - RNA, 19 nt, Homo sapiens
  misc_RNA (1)...(19): siRNA sense strand
agguaaagaccaagaagga

SEQ ID NO: 2597408 - RNA, 19 nt, Homo sapiens
  misc_RNA (1)...(19): siRNA sense strand
ggacaguaccauucgccua

SEQ ID NO: 2597409 - RNA, 19 nt, Homo sapiens
  misc_RNA (1)...(19): siRNA sense strand
ugguguggacaaugggaua

SEQ ID NO: 2597410 - RNA, 19 nt, Homo sapiens
  misc_RNA (1)...(19): siRNA sense strand
auuaggaacaagagugcaa

SEQ ID NO: 2597411 - RNA, 19 nt, Homo sapiens
  misc_RNA (1)...(19): siRNA sense strand
acacagacccugcggcuga

SEQ ID NO: 2597412 - RNA, 19 nt, Homo sapiens
  misc_RNA (1)...(19): siRNA sense strand
guucggauacccagggaga

SEQ ID NO: 2597413 - RNA, 19 nt, Homo sapiens
  misc_RNA (1)...(19): siRNA sense strand
gugcaagauucaaugccau

SEQ ID NO: 2597414 - RNA, 19 nt, Homo sapiens
  misc_RNA (1)...(19): siRNA sense strand
gaacauaaauacuugacuc

SEQ ID NO: 2597415 - RNA, 19 nt, Homo sapiens
  misc_RNA (1)...(19): siRNA sense strand
uggguuacaugauggaaaa

SEQ ID NO: 2597416 - RNA, 19 nt, Homo sapiens
  misc_RNA (1)...(19): siRNA sense strand
cauaaauacuugacuccca

SEQ ID NO: 2597417 - RNA, 19 nt, Homo sapiens
  misc_RNA (1)...(19): siRNA sense strand
gccuacagcaccugggaga

SEQ ID NO: 2597418 - RNA, 19 nt, Homo sapiens
  misc_RNA (1)...(19): siRNA sense strand
ugaagaucauugagcacca

SEQ ID NO: 2597419 - RNA, 19 nt, Homo sapiens
  misc_RNA (1)...(19): siRNA sense strand
auggguuacaugauggaaa

SEQ ID NO: 2597420 - RNA, 19 nt, Homo sapiens
  misc_RNA (1)...(19): siRNA sense strand
aaggaagaggugaagauca

SEQ ID NO: 2597421 - RNA, 19 nt, Homo sapiens
  misc_RNA (1)...(19): siRNA sense strand
ggaacauagccaagaauua

SEQ ID NO: 2597422 - RNA, 19 nt, Homo sapiens
  misc_RNA (1)...(19): siRNA sense strand
gaaagaaggagguuauaaa

SEQ ID NO: 2597423 - RNA, 19 nt, Homo sapiens
  misc_RNA (1)...(19): siRNA sense strand
aagaaaaggaucaggaaaa

SEQ ID NO: 2597424 - RNA, 19 nt, Homo sapiens
  misc_RNA (1)...(19): siRNA sense strand
uguacaaggcccagaauaa

SEQ ID NO: 2597425 - RNA, 19 nt, Homo sapiens
  misc_RNA (1)...(19): siRNA sense strand
uuaaaggaguggagagaga

SEQ ID NO: 2597426 - RNA, 19 nt, Homo sapiens
  misc_RNA (1)...(19): siRNA sense strand
cagcaguaaucaaggagaa

SEQ ID NO: 2597427 - RNA, 19 nt, Homo sapiens
  misc_RNA (1)...(19): siRNA sense strand
ccaggaaacuacaggaaca

SEQ ID NO: 2597428 - RNA, 19 nt, Homo sapiens
  misc_RNA (1)...(19): siRNA sense strand
cgagaaggaaacagagcaa

SEQ ID NO: 2597429 - RNA, 19 nt, Homo sapiens
  misc_RNA (1)...(19): siRNA sense strand
acaagaaacaagaagacaa

SEQ ID NO: 2597430 - RNA, 19 nt, Homo sapiens
  misc_RNA (1)...(19): siRNA sense strand
aggaacaacugaaggugaa

SEQ ID NO: 2597431 - RNA, 19 nt, Homo sapiens
  misc_RNA (1)...(19): siRNA sense strand
ggucgaaguaggccagaaa

SEQ ID NO: 2597432 - RNA, 19 nt, Homo sapiens
  misc_RNA (1)...(19): siRNA sense strand
agagagagugccugaauaa

SEQ ID NO: 2597433 - RNA, 19 nt, Homo sapiens
  misc_RNA (1)...(19): siRNA sense strand
gcucaugaaacgcaggaaa

SEQ ID NO: 2597434 - RNA, 19 nt, Homo sapiens
  misc_RNA (1)...(19): siRNA sense strand
aaggagaacaagagaaaga

SEQ ID NO: 2597435 - RNA, 19 nt, Homo sapiens
  misc_RNA (1)...(19): siRNA sense strand
gaaauugagaccuaggaaa

SEQ ID NO: 2597436 - RNA, 19 nt, Homo sapiens
  misc_RNA (1)...(19): siRNA sense strand
uagaaauggcugagauaga

SEQ ID NO: 2597437 - RNA, 19 nt, Homo sapiens
  misc_RNA (1)...(19): siRNA sense strand
agaaggaaacagagcaaau

SEQ ID NO: 2597438 - RNA, 19 nt, Homo sapiens
  misc_RNA (1)...(19): siRNA sense strand
aauagaaauggcugagaua

SEQ ID NO: 2597439 - RNA, 19 nt, Homo sapiens
  misc_RNA (1)...(19): siRNA sense strand
gugaaggaaaagagaauaa

SEQ ID NO: 2597440 - RNA, 19 nt, Homo sapiens
  misc_RNA (1)...(19): siRNA sense strand
uggcaaagaggaagaugaa

SEQ ID NO: 2597441 - RNA, 19 nt, Homo sapiens
  misc_RNA (1)...(19): siRNA sense strand
cguuacaaucaaagacuua

SEQ ID NO: 2597442 - RNA, 19 nt, Homo sapiens
  misc_RNA (1)...(19): siRNA sense strand
gaagaaaagaggcagaaaa

SEQ ID NO: 2597443 - RNA, 19 nt, Homo sapiens
  misc_RNA (1)...(19): siRNA sense strand
ugaagauggcaaagaggaa

SEQ ID NO: 2597444 - RNA, 19 nt, Homo sapiens
  misc_RNA (1)...(19): siRNA sense strand
agcaggaaaugaugaguaa

SEQ ID NO: 2597445 - RNA, 19 nt, Homo sapiens
  misc_RNA (1)...(19): siRNA sense strand
gacaauaugaccaggaaau

SEQ ID NO: 2597446 - RNA, 19 nt, Homo sapiens
  misc_RNA (1)...(19): siRNA sense strand
aagaagaguuugccaggaa

SEQ ID NO: 2597447 - RNA, 19 nt, Homo sapiens
  misc_RNA (1)...(19): siRNA sense strand
agaagaagaagaagcagua

SEQ ID NO: 2597448 - RNA, 19 nt, Homo sapiens
  misc_RNA (1)...(19): siRNA sense strand
cuuuagaugcauugaacua

SEQ ID NO: 2597449 - RNA, 19 nt, Homo sapiens
  misc_RNA (1)...(19): siRNA sense strand
gaagaggaggaaacagaaa

SEQ ID NO: 2597450 - RNA, 19 nt, Homo sapiens
  misc_RNA (1)...(19): siRNA sense strand
gcuaauauugagagagagu

SEQ ID NO: 2597451 - RNA, 19 nt, Homo sapiens
  misc_RNA (1)...(19): siRNA sense strand
caacugaaggugaagaaau

SEQ ID NO: 2597452 - RNA, 19 nt, Homo sapiens
  misc_RNA (1)...(19): siRNA sense strand
caggaaaugaugaguaaaa

SEQ ID NO: 2597453 - RNA, 19 nt, Homo sapiens
  misc_RNA (1)...(19): siRNA sense strand
cacccaaagagcugagaaa

SEQ ID NO: 2597454 - RNA, 19 nt, Homo sapiens
  misc_RNA (1)...(19): siRNA sense strand
acacuaaaucugaagaaga

SEQ ID NO: 2597455 - RNA, 19 nt, Homo sapiens
  misc_RNA (1)...(19): siRNA sense strand
ggagcgagaagaagaagaa

SEQ ID NO: 2597456 - RNA, 19 nt, Homo sapiens
  misc_RNA (1)...(19): siRNA sense strand
cugaggauacgcagaguaa

SEQ ID NO: 2597457 - RNA, 19 nt, Homo sapiens
  misc_RNA (1)...(19): siRNA sense strand
ucugagaauccaaaggaaa

SEQ ID NO: 2597458 - RNA, 19 nt, Homo sapiens
  misc_RNA (1)...(19): siRNA sense strand
cgacaauaugaccaggaaa

SEQ ID NO: 2597459 - RNA, 19 nt, Homo sapiens
  misc_RNA (1)...(19): siRNA sense strand
caguaaucaaggagaauga

SEQ ID NO: 2597460 - RNA, 19 nt, Homo sapiens
  misc_RNA (1)...(19): siRNA sense strand
aggcagaguuagcuaauau

SEQ ID NO: 2597461 - RNA, 19 nt, Homo sapiens
  misc_RNA (1)...(19): siRNA sense strand
gaacauagccaagaauuaa

SEQ ID NO: 2597462 - RNA, 19 nt, Homo sapiens
  misc_RNA (1)...(19): siRNA sense strand
ggagaaugaaagagagaag

SEQ ID NO: 2597463 - RNA, 19 nt, Homo sapiens
  misc_RNA (1)...(19): siRNA sense strand
agaaggagguuauaaauga

SEQ ID NO: 2597464 - RNA, 19 nt, Homo sapiens
  misc_RNA (1)...(19): siRNA sense strand
cagagaacauaauggacau

SEQ ID NO: 2597465 - RNA, 19 nt, Homo sapiens
  misc_RNA (1)...(19): siRNA sense strand
gcaucagaaacaugagaau

SEQ ID NO: 2597466 - RNA, 19 nt, Homo sapiens
  misc_RNA (1)...(19): siRNA sense strand
agaagaagcaguacgaaca

SEQ ID NO: 2597467 - RNA, 19 nt, Homo sapiens
  misc_RNA (1)...(19): siRNA sense strand
gguguagaagugaguguaa

SEQ ID NO: 2597468 - RNA, 19 nt, Homo sapiens
  misc_RNA (1)...(19): siRNA sense strand
cgucaggaacuucgggaau

SEQ ID NO: 2597469 - RNA, 19 nt, Homo sapiens
  misc_RNA (1)...(19): siRNA sense strand
ggaaagaggagcuugcaca

SEQ ID NO: 2597470 - RNA, 19 nt, Homo sapiens
  misc_RNA (1)...(19): siRNA sense strand
ugugaaacaucuaaggaca

SEQ ID NO: 2597471 - RNA, 19 nt, Homo sapiens
  misc_RNA (1)...(19): siRNA sense strand
ugaagaaaucacugaguca

SEQ ID NO: 2597472 - RNA, 19 nt, Homo sapiens
  misc_RNA (1)...(19): siRNA sense strand
cugaaguagucauguguga

SEQ ID NO: 2597473 - RNA, 19 nt, Homo sapiens
  misc_RNA (1)...(19): siRNA sense strand
uaacagaagaaguugaaga

SEQ ID NO: 2597474 - RNA, 19 nt, Homo sapiens
  misc_RNA (1)...(19): siRNA sense strand
acgcaucaaaggagaacaa

SEQ ID NO: 2597475 - RNA, 19 nt, Homo sapiens
  misc_RNA (1)...(19): siRNA sense strand
gcagcagaaggcagaguua

SEQ ID NO: 2597476 - RNA, 19 nt, Homo sapiens
  misc_RNA (1)...(19): siRNA sense strand
aaauugagaccuaggaaaa

SEQ ID NO: 2597477 - RNA, 19 nt, Homo sapiens
  misc_RNA (1)...(19): siRNA sense strand
gcgagaagaagaagaagca

SEQ ID NO: 2597478 - RNA, 19 nt, Homo sapiens
  misc_RNA (1)...(19): siRNA sense strand
aggaagaugaagaggagga

SEQ ID NO: 2597479 - RNA, 19 nt, Homo sapiens
  misc_RNA (1)...(19): siRNA sense strand
cugagaauccaaaggaaaa

SEQ ID NO: 2597480 - RNA, 19 nt, Homo sapiens
  misc_RNA (1)...(19): siRNA sense strand
agaaacaacagcaagaauu

SEQ ID NO: 2597481 - RNA, 19 nt, Homo sapiens
  misc_RNA (1)...(19): siRNA sense strand
aauaaagagaccaguguuu

SEQ ID NO: 2597482 - RNA, 19 nt, Homo sapiens
  misc_RNA (1)...(19): siRNA sense strand
ugaagaagaacuugaagau

SEQ ID NO: 2597483 - RNA, 19 nt, Homo sapiens
  misc_RNA (1)...(19): siRNA sense strand
ggaggauauuaaugaacau

SEQ ID NO: 2597484 - RNA, 19 nt, Homo sapiens
  misc_RNA (1)...(19): siRNA sense strand
gaagaaaaggaucaggaaa

SEQ ID NO: 2597485 - RNA, 19 nt, Homo sapiens
  misc_RNA (1)...(19): siRNA sense strand
agaacauaauggacaucaa

SEQ ID NO: 2597486 - RNA, 19 nt, Homo sapiens
  misc_RNA (1)...(19): siRNA sense strand
caacaaaugaaguagccca

SEQ ID NO: 2597487 - RNA, 19 nt, Homo sapiens
  misc_RNA (1)...(19): siRNA sense strand
cuuugacauucaugagauu

SEQ ID NO: 2597488 - RNA, 19 nt, Homo sapiens
  misc_RNA (1)...(19): siRNA sense strand
cgauauaagcauaaggaaa

SEQ ID NO: 2597489 - RNA, 19 nt, Homo sapiens
  misc_RNA (1)...(19): siRNA sense strand
ggucaaaagagaagagaaa

SEQ ID NO: 2597490 - RNA, 19 nt, Homo sapiens
  misc_RNA (1)...(19): siRNA sense strand
cuuaauaaacagagaggaa

SEQ ID NO: 2597491 - RNA, 19 nt, Homo sapiens
  misc_RNA (1)...(19): siRNA sense strand
ggaaaguaucuaagacaaa

SEQ ID NO: 2597492 - RNA, 19 nt, Homo sapiens
  misc_RNA (1)...(19): siRNA sense strand
aacuaaagauccugggaaa

SEQ ID NO: 2597493 - RNA, 19 nt, Homo sapiens
  misc_RNA (1)...(19): siRNA sense strand
gauaaaugucagcaagaaa

SEQ ID NO: 2597494 - RNA, 19 nt, Homo sapiens
  misc_RNA (1)...(19): siRNA sense strand
caauaaggacucugugaaa

SEQ ID NO: 2597495 - RNA, 19 nt, Homo sapiens
  misc_RNA (1)...(19): siRNA sense strand
ggauugauaaagagguaaa

SEQ ID NO: 2597496 - RNA, 19 nt, Homo sapiens
  misc_RNA (1)...(19): siRNA sense strand
ggaacuaguguaacagaaa

SEQ ID NO: 2597497 - RNA, 19 nt, Homo sapiens
  misc_RNA (1)...(19): siRNA sense strand
acucagauguggagcacua

SEQ ID NO: 2597498 - RNA, 19 nt, Homo sapiens
  misc_RNA (1)...(19): siRNA sense strand
agaaagagaagcuggagua

SEQ ID NO: 2597499 - RNA, 19 nt, Homo sapiens
  misc_RNA (1)...(19): siRNA sense strand
agagagaaguagagcuaga

SEQ ID NO: 2597500 - RNA, 19 nt, Homo sapiens
  misc_RNA (1)...(19): siRNA sense strand
agagaaagucuaagcacaa

SEQ ID NO: 2597501 - RNA, 19 nt, Homo sapiens
  misc_RNA (1)...(19): siRNA sense strand
caagagaaacaauggacaa

SEQ ID NO: 2597502 - RNA, 19 nt, Homo sapiens
  misc_RNA (1)...(19): siRNA sense strand
ggucaguaagagagaagua

SEQ ID NO: 2597503 - RNA, 19 nt, Homo sapiens
  misc_RNA (1)...(19): siRNA sense strand
ugguauuguuccagguuua

SEQ ID NO: 2597504 - RNA, 19 nt, Homo sapiens
  misc_RNA (1)...(19): siRNA sense strand
cagacagggcagagaaauu

SEQ ID NO: 2597505 - RNA, 19 nt, Homo sapiens
  misc_RNA (1)...(19): siRNA sense strand
aggaaagaagcuaggaauu

SEQ ID NO: 2597506 - RNA, 19 nt, Homo sapiens
  misc_RNA (1)...(19): siRNA sense strand
ggacuaaagugguggcaag

SEQ ID NO: 2597507 - RNA, 19 nt, Homo sapiens
  misc_RNA (1)...(19): siRNA sense strand
uaauaaagggaaagugcaa

SEQ ID NO: 2597508 - RNA, 19 nt, Homo sapiens
  misc_RNA (1)...(19): siRNA sense strand
uaagagagaaguagagcua

SEQ ID NO: 2597509 - RNA, 19 nt, Homo sapiens
  misc_RNA (1)...(19): siRNA sense strand
uuuaaaggacagagcauua

SEQ ID NO: 2597510 - RNA, 19 nt, Homo sapiens
  misc_RNA (1)...(19): siRNA sense strand
cggaagaaauuaacugaca

SEQ ID NO: 2597511 - RNA, 19 nt, Homo sapiens
  misc_RNA (1)...(19): siRNA sense strand
aggaaaguaucuaagacaa

SEQ ID NO: 2597512 - RNA, 19 nt, Homo sapiens
  misc_RNA (1)...(19): siRNA sense strand
ccaaaggaguaaaggagca

SEQ ID NO: 2597513 - RNA, 19 nt, Homo sapiens
  misc_RNA (1)...(19): siRNA sense strand
cagcaggauugguuagcaa

SEQ ID NO: 2597514 - RNA, 19 nt, Homo sapiens
  misc_RNA (1)...(19): siRNA sense strand
agggauugauaaagaggua

SEQ ID NO: 2597515 - RNA, 19 nt, Homo sapiens
  misc_RNA (1)...(19): siRNA sense strand
agagaaauuuugugggcaa

SEQ ID NO: 2597516 - RNA, 19 nt, Homo sapiens
  misc_RNA (1)...(19): siRNA sense strand
agggaauaacuuugugaaa

SEQ ID NO: 2597517 - RNA, 19 nt, Homo sapiens
  misc_RNA (1)...(19): siRNA sense strand
aggaagaagagcaagagaa

SEQ ID NO: 2597518 - RNA, 19 nt, Homo sapiens
  misc_RNA (1)...(19): siRNA sense strand
agaggaaaguagucaagaa

SEQ ID NO: 2597519 - RNA, 19 nt, Homo sapiens
  misc_RNA (1)...(19): siRNA sense strand
aagcaaagauucaggaaag

SEQ ID NO: 2597520 - RNA, 19 nt, Homo sapiens
  misc_RNA (1)...(19): siRNA sense strand
uugcagagcuggaggaacu

SEQ ID NO: 2597521 - RNA, 19 nt, Homo sapiens
  misc_RNA (1)...(19): siRNA sense strand
ugagaaaugucgaggaauc

SEQ ID NO: 2597522 - RNA, 19 nt, Homo sapiens
  misc_RNA (1)...(19): siRNA sense strand
ucacauuaaccgacauaaa

SEQ ID NO: 2597523 - RNA, 19 nt, Homo sapiens
  misc_RNA (1)...(19): siRNA sense strand
gcagaauaaagaaagcaua

SEQ ID NO: 2597524 - RNA, 19 nt, Homo sapiens
  misc_RNA (1)...(19): siRNA sense strand
uggaagaacagaccagaaa

SEQ ID NO: 2597525 - RNA, 19 nt, Homo sapiens
  misc_RNA (1)...(19): siRNA sense strand
acacaaaggaggaagagga

SEQ ID NO: 2597526 - RNA, 19 nt, Homo sapiens
  misc_RNA (1)...(19): siRNA sense strand
uaauaaacagagaggaaca

SEQ ID NO: 2597527 - RNA, 19 nt, Homo sapiens
  misc_RNA (1)...(19): siRNA sense strand
cagaacuaaucgaagaaau

SEQ ID NO: 2597528 - RNA, 19 nt, Homo sapiens
  misc_RNA (1)...(19): siRNA sense strand
ugagauggaaccagauaaa

SEQ ID NO: 2597529 - RNA, 19 nt, Homo sapiens
  misc_RNA (1)...(19): siRNA sense strand
cagaggaagaagagcaaga

SEQ ID NO: 2597530 - RNA, 19 nt, Homo sapiens
  misc_RNA (1)...(19): siRNA sense strand
cugccgagaugaugggaau

SEQ ID NO: 2597531 - RNA, 19 nt, Homo sapiens
  misc_RNA (1)...(19): siRNA sense strand
aaacaucgaagcugggaaa

SEQ ID NO: 2597532 - RNA, 19 nt, Homo sapiens
  misc_RNA (1)...(19): siRNA sense strand
gcagaaacgaaaacggaaa

SEQ ID NO: 2597533 - RNA, 19 nt, Homo sapiens
  misc_RNA (1)...(19): siRNA sense strand
ccuuagacccuuugcacua

SEQ ID NO: 2597534 - RNA, 19 nt, Homo sapiens
  misc_RNA (1)...(19): siRNA sense strand
uugaugagauugugggaga

SEQ ID NO: 2597535 - RNA, 19 nt, Homo sapiens
  misc_RNA (1)...(19): siRNA sense strand
cagacaacuacaagaggaa

SEQ ID NO: 2597536 - RNA, 19 nt, Homo sapiens
  misc_RNA (1)...(19): siRNA sense strand
caagaggaauggaggacga

SEQ ID NO: 2597537 - RNA, 19 nt, Homo sapiens
  misc_RNA (1)...(19): siRNA sense strand
ggaaagaugacggaugaaa

SEQ ID NO: 2597538 - RNA, 19 nt, Homo sapiens
  misc_RNA (1)...(19): siRNA sense strand
guuggaugguugagcacaa

SEQ ID NO: 2597539 - RNA, 19 nt, Homo sapiens
  misc_RNA (1)...(19): siRNA sense strand
cagaaauggcagauuauau

SEQ ID NO: 2597540 - RNA, 19 nt, Homo sapiens
  misc_RNA (1)...(19): siRNA sense strand
uggaggaacuaguguaaca

SEQ ID NO: 2597541 - RNA, 19 nt, Homo sapiens
  misc_RNA (1)...(19): siRNA sense strand
caggaaagaagcuaggaau

SEQ ID NO: 2597542 - RNA, 19 nt, Homo sapiens
  misc_RNA (1)...(19): siRNA sense strand
gugcaguaggagaaagcaa

SEQ ID NO: 2597543 - RNA, 19 nt, Homo sapiens
  misc_RNA (1)...(19): siRNA sense strand
aggccuaaaucuaaggaga

SEQ ID NO: 2597544 - RNA, 19 nt, Homo sapiens
  misc_RNA (1)...(19): siRNA sense strand
cauagaaguagcagugauu

SEQ ID NO: 2597545 - RNA, 19 nt, Homo sapiens
  misc_RNA (1)...(19): siRNA sense strand
aaagagaagaggucgcaaa

SEQ ID NO: 2597546 - RNA, 19 nt, Homo sapiens
  misc_RNA (1)...(19): siRNA sense strand
uggaauuggaacagauaau

SEQ ID NO: 2597547 - RNA, 19 nt, Homo sapiens
  misc_RNA (1)...(19): siRNA sense strand
ucugaaucccugaaagaua

SEQ ID NO: 2597548 - RNA, 19 nt, Homo sapiens
  misc_RNA (1)...(19): siRNA sense strand
gcaaacagcucaacaggca

SEQ ID NO: 2597549 - RNA, 19 nt, Homo sapiens
  misc_RNA (1)...(19): siRNA sense strand
cuauagauuuggaaaggau

SEQ ID NO: 2597550 - RNA, 19 nt, Homo sapiens
  misc_RNA (1)...(19): siRNA sense strand
ccuucaaaguuguacaaga

SEQ ID NO: 2597551 - RNA, 19 nt, Homo sapiens
  misc_RNA (1)...(19): siRNA sense strand
agacaaaaccgaagaaguu

SEQ ID NO: 2597552 - RNA, 19 nt, Homo sapiens
  misc_RNA (1)...(19): siRNA sense strand
gcaaagaagauuguagcaa

SEQ ID NO: 2597553 - RNA, 19 nt, Homo sapiens
  misc_RNA (1)...(19): siRNA sense strand
gauuuaaaggacagagcau

SEQ ID NO: 2597554 - RNA, 19 nt, Homo sapiens
  misc_RNA (1)...(19): siRNA sense strand
ccauaaaccuuaaagccga

SEQ ID NO: 2597555 - RNA, 19 nt, Homo sapiens
  misc_RNA (1)...(19): siRNA sense strand
cgcaaacggaaucgagaaa

SEQ ID NO: 2597556 - RNA, 19 nt, Homo sapiens
  misc_RNA (1)...(19): siRNA sense strand
gggaagaguccuauggaga

SEQ ID NO: 2597557 - RNA, 19 nt, Homo sapiens
  misc_RNA (1)...(19): siRNA sense strand
uggucacggugcugggaaa

SEQ ID NO: 2597558 - RNA, 19 nt, Homo sapiens
  misc_RNA (1)...(19): siRNA sense strand
aggcugaggaacaaagaca

SEQ ID NO: 2597559 - RNA, 19 nt, Homo sapiens
  misc_RNA (1)...(19): siRNA sense strand
ccuuggugacccuggacaa

SEQ ID NO: 2597560 - RNA, 19 nt, Homo sapiens
  misc_RNA (1)...(19): siRNA sense strand
ugaaagagcacgaggguga

SEQ ID NO: 2597561 - RNA, 19 nt, Homo sapiens
  misc_RNA (1)...(19): siRNA sense strand
gaaucaaccagcaaagaaa

SEQ ID NO: 2597562 - RNA, 19 nt, Homo sapiens
  misc_RNA (1)...(19): siRNA sense strand
cugaaauggaagaagggaa

SEQ ID NO: 2597563 - RNA, 19 nt, Homo sapiens
  misc_RNA (1)...(19): siRNA sense strand
cuggagcaguucagagaaa

SEQ ID NO: 2597564 - RNA, 19 nt, Homo sapiens
  misc_RNA (1)...(19): siRNA sense strand
gagagaaaggacagaccaa

SEQ ID NO: 2597565 - RNA, 19 nt, Homo sapiens
  misc_RNA (1)...(19): siRNA sense strand
gaaacaugcaagugaccaa

SEQ ID NO: 2597566 - RNA, 19 nt, Homo sapiens
  misc_RNA (1)...(19): siRNA sense strand
ggaaagacucaauuaaaga

SEQ ID NO: 2597567 - RNA, 19 nt, Homo sapiens
  misc_RNA (1)...(19): siRNA sense strand
ggaaaaccacagaaagaaa

SEQ ID NO: 2597568 - RNA, 19 nt, Homo sapiens
  misc_RNA (1)...(19): siRNA sense strand
acgugauaguggagcgauu

SEQ ID NO: 2597569 - RNA, 19 nt, Homo sapiens
  misc_RNA (1)...(19): siRNA sense strand
gggaaggaccugagccuga

SEQ ID NO: 2597570 - RNA, 19 nt, Homo sapiens
  misc_RNA (1)...(19): siRNA sense strand
cagaaugaagggaaggcua

SEQ ID NO: 2597571 - RNA, 19 nt, Homo sapiens
  misc_RNA (1)...(19): siRNA sense strand
uaagcaagauaguggaaaa

SEQ ID NO: 2597572 - RNA, 19 nt, Homo sapiens
  misc_RNA (1)...(19): siRNA sense strand
gugauacagcugauggaaa

SEQ ID NO: 2597573 - RNA, 19 nt, Homo sapiens
  misc_RNA (1)...(19): siRNA sense strand
cagcagagaauguugaaaa

SEQ ID NO: 2597574 - RNA, 19 nt, Homo sapiens
  misc_RNA (1)...(19): siRNA sense strand
gagaaaggacagaccaaaa

SEQ ID NO: 2597575 - RNA, 19 nt, Homo sapiens
  misc_RNA (1)...(19): siRNA sense strand
ggugaaugaccaugacaau

SEQ ID NO: 2597576 - RNA, 19 nt, Homo sapiens
  misc_RNA (1)...(19): siRNA sense strand
gugcaagcagugugaagaa

SEQ ID NO: 2597577 - RNA, 19 nt, Homo sapiens
  misc_RNA (1)...(19): siRNA sense strand
gaacaaguaaacaaggcua

SEQ ID NO: 2597578 - RNA, 19 nt, Homo sapiens
  misc_RNA (1)...(19): siRNA sense strand
caauacagcucuaaacaca

SEQ ID NO: 2597579 - RNA, 19 nt, Homo sapiens
  misc_RNA (1)...(19): siRNA sense strand
caagaauauaccagugcaa

SEQ ID NO: 2597580 - RNA, 19 nt, Homo sapiens
  misc_RNA (1)...(19): siRNA sense strand
ugaggaaccaugagagaga

SEQ ID NO: 2597581 - RNA, 19 nt, Homo sapiens
  misc_RNA (1)...(19): siRNA sense strand
agucaaaggcaaguagaua

SEQ ID NO: 2597582 - RNA, 19 nt, Homo sapiens
  misc_RNA (1)...(19): siRNA sense strand
ugucagaugggcagguuaa

SEQ ID NO: 2597583 - RNA, 19 nt, Homo sapiens
  misc_RNA (1)...(19): siRNA sense strand
gcagaaauggguaggagga

SEQ ID NO: 2597584 - RNA, 19 nt, Homo sapiens
  misc_RNA (1)...(19): siRNA sense strand
aagaaaugcuagaagugau

SEQ ID NO: 2597585 - RNA, 19 nt, Homo sapiens
  misc_RNA (1)...(19): siRNA sense strand
gcuuacaucagcacagaaa

SEQ ID NO: 2597586 - RNA, 19 nt, Homo sapiens
  misc_RNA (1)...(19): siRNA sense strand
agauacuagucaaaggcaa

SEQ ID NO: 2597587 - RNA, 19 nt, Homo sapiens
  misc_RNA (1)...(19): siRNA sense strand
cuggaaagacucaauuaaa

SEQ ID NO: 2597588 - RNA, 19 nt, Homo sapiens
  misc_RNA (1)...(19): siRNA sense strand
ccaacgagaaugagaaacu

SEQ ID NO: 2597589 - RNA, 19 nt, Homo sapiens
  misc_RNA (1)...(19): siRNA sense strand
ccucuuggaucauaugaaa

SEQ ID NO: 2597590 - RNA, 19 nt, Homo sapiens
  misc_RNA (1)...(19): siRNA sense strand
ccagaaguuaagcaagaua

SEQ ID NO: 2597591 - RNA, 19 nt, Homo sapiens
  misc_RNA (1)...(19): siRNA sense strand
gagugcagaaagaggagua

SEQ ID NO: 2597592 - RNA, 19 nt, Homo sapiens
  misc_RNA (1)...(19): siRNA sense strand
aggaagaaaugcuagaagu

SEQ ID NO: 2597593 - RNA, 19 nt, Homo sapiens
  misc_RNA (1)...(19): siRNA sense strand
agaaaugcuagaagugauu

SEQ ID NO: 2597594 - RNA, 19 nt, Homo sapiens
  misc_RNA (1)...(19): siRNA sense strand
gauccagauacuagucaaa

SEQ ID NO: 2597595 - RNA, 19 nt, Homo sapiens
  misc_RNA (1)...(19): siRNA sense strand
aaggaauggaugauguuua

SEQ ID NO: 2597596 - RNA, 19 nt, Homo sapiens
  misc_RNA (1)...(19): siRNA sense strand
gcgagcacauagcggacaa

SEQ ID NO: 2597597 - RNA, 19 nt, Homo sapiens
  misc_RNA (1)...(19): siRNA sense strand
ggaaaagagccgggagaga

SEQ ID NO: 2597598 - RNA, 19 nt, Homo sapiens
  misc_RNA (1)...(19): siRNA sense strand
aaacugagcccuacaagua

SEQ ID NO: 2597599 - RNA, 19 nt, Homo sapiens
  misc_RNA (1)...(19): siRNA sense strand
cugaauaaggaccacaaua

SEQ ID NO: 2597600 - RNA, 19 nt, Homo sapiens
  misc_RNA (1)...(19): siRNA sense strand
agaaugaagggaaggcuau

SEQ ID NO: 2597601 - RNA, 19 nt, Homo sapiens
  misc_RNA (1)...(19): siRNA sense strand
uugaaagaguugcaggaca

SEQ ID NO: 2597602 - RNA, 19 nt, Homo sapiens
  misc_RNA (1)...(19): siRNA sense strand
gcacgagggugaaauugua

SEQ ID NO: 2597603 - RNA, 19 nt, Homo sapiens
  misc_RNA (1)...(19): siRNA sense strand
ccgcagauauggaagaaag

SEQ ID NO: 2597604 - RNA, 19 nt, Homo sapiens
  misc_RNA (1)...(19): siRNA sense strand
ggguaggaggaaaugguau

SEQ ID NO: 2597605 - RNA, 19 nt, Homo sapiens
  misc_RNA (1)...(19): siRNA sense strand
gagagagugaacugaguau

SEQ ID NO: 2597606 - RNA, 19 nt, Homo sapiens
  misc_RNA (1)...(19): siRNA sense strand
acaacuacgaacaaguaaa

SEQ ID NO: 2597607 - RNA, 19 nt, Homo sapiens
  misc_RNA (1)...(19): siRNA sense strand
auccagaaguuaagcaaga

SEQ ID NO: 2597608 - RNA, 19 nt, Homo sapiens
  misc_RNA (1)...(19): siRNA sense strand
cagaaagaaaugaaaccau

SEQ ID NO: 2597609 - RNA, 19 nt, Homo sapiens
  misc_RNA (1)...(19): siRNA sense strand
acuacgaacaaguaaacaa

SEQ ID NO: 2597610 - RNA, 19 nt, Homo sapiens
  misc_RNA (1)...(19): siRNA sense strand
ucagcaaaaugaagugaua

SEQ ID NO: 2597611 - RNA, 19 nt, Homo sapiens
  misc_RNA (1)...(19): siRNA sense strand
gggaauaagucuucagucc

SEQ ID NO: 2597612 - RNA, 19 nt, Homo sapiens
  misc_RNA (1)...(19): siRNA sense strand
aaugagaaacugagcccua

SEQ ID NO: 2597613 - RNA, 19 nt, Homo sapiens
  misc_RNA (1)...(19): siRNA sense strand
ggaccacaauacagcucua

SEQ ID NO: 2597614 - RNA, 19 nt, Homo sapiens
  misc_RNA (1)...(19): siRNA sense strand
uggacaaucuacagacuca

SEQ ID NO: 2597615 - RNA, 19 nt, Homo sapiens
  misc_RNA (1)...(19): siRNA sense strand
ccacuguaagacaagaaua

SEQ ID NO: 2597616 - RNA, 19 nt, Homo sapiens
  misc_RNA (1)...(19): siRNA sense strand
aagaauuuccagugauaca

SEQ ID NO: 2597617 - RNA, 19 nt, Homo sapiens
  misc_RNA (1)...(19): siRNA sense strand
guaccaacgagaaugagaa

SEQ ID NO: 2597618 - RNA, 19 nt, Homo sapiens
  misc_RNA (1)...(19): siRNA sense strand
cacuguaagacaagaauau

SEQ ID NO: 2597619 - RNA, 19 nt, Homo sapiens
  misc_RNA (1)...(19): siRNA sense strand
ucacaaaguggcagaguuc

SEQ ID NO: 2597620 - RNA, 19 nt, Homo sapiens
  misc_RNA (1)...(19): siRNA sense strand
ucggaaaaccacagaaaga

SEQ ID NO: 2597621 - RNA, 19 nt, Homo sapiens
  misc_RNA (1)...(19): siRNA sense strand
cagaaauggguaggaggaa

SEQ ID NO: 2597622 - RNA, 19 nt, Homo sapiens
  misc_RNA (1)...(19): siRNA sense strand
cugagaugucacaaacaaa

SEQ ID NO: 2597623 - RNA, 19 nt, Homo sapiens
  misc_RNA (1)...(19): siRNA sense strand
gcccauuguugaaagccaa

SEQ ID NO: 2597624 - RNA, 19 nt, Homo sapiens
  misc_RNA (1)...(19): siRNA sense strand
gugugugauuauacaagua

SEQ ID NO: 2597625 - RNA, 19 nt, Homo sapiens
  misc_RNA (1)...(19): siRNA sense strand
gggugaaauuguaaacauc

SEQ ID NO: 2597626 - RNA, 19 nt, Homo sapiens
  misc_RNA (1)...(19): siRNA sense strand
caguaaguguggacaaucu

SEQ ID NO: 2597627 - RNA, 19 nt, Homo sapiens
  misc_RNA (1)...(19): siRNA sense strand
agucuucaguccagaaaca

SEQ ID NO: 2597628 - RNA, 19 nt, Homo sapiens
  misc_RNA (1)...(19): siRNA sense strand
gucagaaaccacaggcgaa

SEQ ID NO: 2597629 - RNA, 19 nt, Homo sapiens
  misc_RNA (1)...(19): siRNA sense strand
cgucauugcuauuggagag

SEQ ID NO: 2597630 - RNA, 19 nt, Homo sapiens
  misc_RNA (1)...(19): siRNA sense strand
ugaaauggaagaagggaag

SEQ ID NO: 2597631 - RNA, 19 nt, Homo sapiens
  misc_RNA (1)...(19): siRNA sense strand
cggaaacaaugugguggaa

SEQ ID NO: 2597632 - RNA, 19 nt, Homo sapiens
  misc_RNA (1)...(19): siRNA sense strand
ccgacuaugagguggaaga

SEQ ID NO: 2597633 - RNA, 19 nt, Homo sapiens
  misc_RNA (1)...(19): siRNA sense strand
gucacaaagaucuggagaa

SEQ ID NO: 2597634 - RNA, 19 nt, Homo sapiens
  misc_RNA (1)...(19): siRNA sense strand
acaacgagaaggagaucuu

SEQ ID NO: 2597635 - RNA, 19 nt, Homo sapiens
  misc_RNA (1)...(19): siRNA sense strand
gcaugaaacagcugcggca

SEQ ID NO: 2597636 - RNA, 19 nt, Homo sapiens
  misc_RNA (1)...(19): siRNA sense strand
agaaggagaucuugaggcu

SEQ ID NO: 2597637 - RNA, 19 nt, Homo sapiens
  misc_RNA (1)...(19): siRNA sense strand
aguacaacgagaaggagau

SEQ ID NO: 2597638 - RNA, 19 nt, Homo sapiens
  misc_RNA (1)...(19): siRNA sense strand
accugaagcugcuggccaa

SEQ ID NO: 2597639 - RNA, 19 nt, Homo sapiens
  misc_RNA (1)...(19): siRNA sense strand
aaguacaacgagaaggaga

SEQ ID NO: 2597640 - RNA, 19 nt, Homo sapiens
  misc_RNA (1)...(19): siRNA sense strand
acugccagguggaaagcaa

SEQ ID NO: 2597641 - RNA, 19 nt, Homo sapiens
  misc_RNA (1)...(19): siRNA sense strand
gcaaguaccuggccggucu

SEQ ID NO: 2597642 - RNA, 19 nt, Homo sapiens
  misc_RNA (1)...(19): siRNA sense strand
agaaacugccagguggaaa

SEQ ID NO: 2597643 - RNA, 19 nt, Homo sapiens
  misc_RNA (1)...(19): siRNA sense strand
ggaguuaaccuaagggaca

SEQ ID NO: 2597644 - RNA, 19 nt, Homo sapiens
  misc_RNA (1)...(19): siRNA sense strand
ggaaagagagcuugaggca

SEQ ID NO: 2597645 - RNA, 19 nt, Homo sapiens
  misc_RNA (1)...(19): siRNA sense strand
uucaauuacaggugggaaa

SEQ ID NO: 2597646 - RNA, 19 nt, Homo sapiens
  misc_RNA (1)...(19): siRNA sense strand
acguagaguaugaagauga

SEQ ID NO: 2597647 - RNA, 19 nt, Homo sapiens
  misc_RNA (1)...(19): siRNA sense strand
uggagaaggaguucgacaa

SEQ ID NO: 2597648 - RNA, 19 nt, Homo sapiens
  misc_RNA (1)...(19): siRNA sense strand
agaaaguuguuuuggagaa

SEQ ID NO: 2597649 - RNA, 19 nt, Homo sapiens
  misc_RNA (1)...(19): siRNA sense strand
augaaaacguagaguauga

SEQ ID NO: 2597650 - RNA, 19 nt, Homo sapiens
  misc_RNA (1)...(19): siRNA sense strand
ggaagaucaugaaggccuu

SEQ ID NO: 2597651 - RNA, 19 nt, Homo sapiens
  misc_RNA (1)...(19): siRNA sense strand
accacaagcuggaggcaca

SEQ ID NO: 2597652 - RNA, 19 nt, Homo sapiens
  misc_RNA (1)...(19): siRNA sense strand
aggcacaguugguggaucu

SEQ ID NO: 2597653 - RNA, 19 nt, Homo sapiens
  misc_RNA (1)...(19): siRNA sense strand
ucagcagagaggagagauu

SEQ ID NO: 2597654 - RNA, 19 nt, Homo sapiens
  misc_RNA (1)...(19): siRNA sense strand
ugaugaaaacguagaguau

SEQ ID NO: 2597655 - RNA, 19 nt, Homo sapiens
  misc_RNA (1)...(19): siRNA sense strand
aagcacaacuugaagcuga

SEQ ID NO: 2597656 - RNA, 19 nt, Homo sapiens
  misc_RNA (1)...(19): siRNA sense strand
ggaaccaauuagaagcuga

SEQ ID NO: 2597657 - RNA, 19 nt, Homo sapiens
  misc_RNA (1)...(19): siRNA sense strand
ugacagaaacccaagcaga

SEQ ID NO: 2597658 - RNA, 19 nt, Homo sapiens
  misc_RNA (1)...(19): siRNA sense strand
gggcgagacuagcugccaa

SEQ ID NO: 2597659 - RNA, 19 nt, Homo sapiens
  misc_RNA (1)...(19): siRNA sense strand
agaaacccaagcagagaaa

SEQ ID NO: 2597660 - RNA, 19 nt, Homo sapiens
  misc_RNA (1)...(19): siRNA sense strand
cagaagaugaccagccuga

SEQ ID NO: 2597661 - RNA, 19 nt, Homo sapiens
  misc_RNA (1)...(19): siRNA sense strand
gugaaauuguugagaaaag

SEQ ID NO: 2597662 - RNA, 19 nt, Homo sapiens
  misc_RNA (1)...(19): siRNA sense strand
ccuaagggacacaaagcau

SEQ ID NO: 2597663 - RNA, 19 nt, Homo sapiens
  misc_RNA (1)...(19): siRNA sense strand
uggagaaagaaguacauga

SEQ ID NO: 2597664 - RNA, 19 nt, Homo sapiens
  misc_RNA (1)...(19): siRNA sense strand
gcugcagcuucaugcuaaa

SEQ ID NO: 2597665 - RNA, 19 nt, Homo sapiens
  misc_RNA (1)...(19): siRNA sense strand
cuugaaacgaccaaugcaa

SEQ ID NO: 2597666 - RNA, 19 nt, Homo sapiens
  misc_RNA (1)...(19): siRNA sense strand
aguuagaaggaggugguaa

SEQ ID NO: 2597667 - RNA, 19 nt, Homo sapiens
  misc_RNA (1)...(19): siRNA sense strand
gauacaauugcuaggacga

SEQ ID NO: 2597668 - RNA, 19 nt, Homo sapiens
  misc_RNA (1)...(19): siRNA sense strand
ugggagagaucgauccaga

SEQ ID NO: 2597669 - RNA, 19 nt, Homo sapiens
  misc_RNA (1)...(19): siRNA sense strand
ugaagaugagaguggacau

SEQ ID NO: 2597670 - RNA, 19 nt, Homo sapiens
  misc_RNA (1)...(19): siRNA sense strand
gggaaaucaaaguauuaca

SEQ ID NO: 2597671 - RNA, 19 nt, Homo sapiens
  misc_RNA (1)...(19): siRNA sense strand
gcuagaugacggugcuuca

SEQ ID NO: 2597672 - RNA, 19 nt, Homo sapiens
  misc_RNA (1)...(19): siRNA sense strand
gaaagagagcuugaggcaa

SEQ ID NO: 2597673 - RNA, 19 nt, Homo sapiens
  misc_RNA (1)...(19): siRNA sense strand
ccuuaaggaagaucaugaa

SEQ ID NO: 2597674 - RNA, 19 nt, Homo sapiens
  misc_RNA (1)...(19): siRNA sense strand
ucguagacauauagcuguu

SEQ ID NO: 2597675 - RNA, 19 nt, Homo sapiens
  misc_RNA (1)...(19): siRNA sense strand
cguaaugacuugaaacgac

SEQ ID NO: 2597676 - RNA, 19 nt, Homo sapiens
  misc_RNA (1)...(19): siRNA sense strand
caaagacacaaguggggaa

SEQ ID NO: 2597677 - RNA, 19 nt, Homo sapiens
  misc_RNA (1)...(19): siRNA sense strand
agagaggagagauugaauu

SEQ ID NO: 2597678 - RNA, 19 nt, Homo sapiens
  misc_RNA (1)...(19): siRNA sense strand
ccagaugggcaguacgaga

SEQ ID NO: 2597679 - RNA, 19 nt, Homo sapiens
  misc_RNA (1)...(19): siRNA sense strand
ggggcuggauggaggacua

SEQ ID NO: 2597680 - RNA, 19 nt, Homo sapiens
  misc_RNA (1)...(19): siRNA sense strand
aggacaugguggagagggu

SEQ ID NO: 2597681 - RNA, 19 nt, Homo sapiens
  misc_RNA (1)...(19): siRNA sense strand
gagcaggacgaguacgaca

SEQ ID NO: 2597682 - RNA, 19 nt, Homo sapiens
  misc_RNA (1)...(19): siRNA sense strand
aggaggaguuugagaagac

SEQ ID NO: 2597683 - RNA, 19 nt, Homo sapiens
  misc_RNA (1)...(19): siRNA sense strand
gcgcacagcaaguucguca

SEQ ID NO: 2597684 - RNA, 19 nt, Homo sapiens
  misc_RNA (1)...(19): siRNA sense strand
ccuccuuccugcacggcaa

SEQ ID NO: 2597685 - RNA, 19 nt, Homo sapiens
  misc_RNA (1)...(19): siRNA sense strand
aguuugaacgacuggaaca

SEQ ID NO: 2597686 - RNA, 19 nt, Homo sapiens
  misc_RNA (1)...(19): siRNA sense strand
agauggaggacgugcacca

SEQ ID NO: 2597687 - RNA, 19 nt, Homo sapiens
  misc_RNA (1)...(19): siRNA sense strand
ccaagaucuuuguggcgca

SEQ ID NO: 2597688 - RNA, 19 nt, Homo sapiens
  misc_RNA (1)...(19): siRNA sense strand
cggagcaggacgaguacga

SEQ ID NO: 2597689 - RNA, 19 nt, Homo sapiens
  misc_RNA (1)...(19): siRNA sense strand
aguauggccaggaggugua

SEQ ID NO: 2597690 - RNA, 19 nt, Homo sapiens
  misc_RNA (1)...(19): siRNA sense strand
gggaagaggaccugcgaga

SEQ ID NO: 2597691 - RNA, 19 nt, Homo sapiens
  misc_RNA (1)...(19): siRNA sense strand
guacaaucacacagggaca

SEQ ID NO: 2597692 - RNA, 19 nt, Homo sapiens
  misc_RNA (1)...(19): siRNA sense strand
ugggaaaggauguggaaac

SEQ ID NO: 2597693 - RNA, 19 nt, Homo sapiens
  misc_RNA (1)...(19): siRNA sense strand
uggccaaggaaaugaccaa

SEQ ID NO: 2597694 - RNA, 19 nt, Homo sapiens
  misc_RNA (1)...(19): siRNA sense strand
uguggaaacacguggccaa

SEQ ID NO: 2597695 - RNA, 19 nt, Homo sapiens
  misc_RNA (1)...(19): siRNA sense strand
agagagaugaggagccaga

SEQ ID NO: 2597696 - RNA, 19 nt, Homo sapiens
  misc_RNA (1)...(19): siRNA sense strand
aagccgugauccugggaau

SEQ ID NO: 2597697 - RNA, 19 nt, Homo sapiens
  misc_RNA (1)...(19): siRNA sense strand
gaaauuaagaagagcagac

SEQ ID NO: 2597698 - RNA, 19 nt, Homo sapiens
  misc_RNA (1)...(19): siRNA sense strand
agaccuacuucucagggaa

SEQ ID NO: 2597699 - RNA, 19 nt, Homo sapiens
  misc_RNA (1)...(19): siRNA sense strand
ugccagaccuuaacgggua

SEQ ID NO: 2597700 - RNA, 19 nt, Homo sapiens
  misc_RNA (1)...(19): siRNA sense strand
ccagagagaugaggagcca

SEQ ID NO: 2597701 - RNA, 19 nt, Homo sapiens
  misc_RNA (1)...(19): siRNA sense strand
ugacagggcugauggaccu

SEQ ID NO: 2597702 - RNA, 19 nt, Homo sapiens
  misc_RNA (1)...(19): siRNA sense strand
ggaugaggccaccugggaa

SEQ ID NO: 2597703 - RNA, 19 nt, Homo sapiens
  misc_RNA (1)...(19): siRNA sense strand
cagaagaggaaggggaaga

SEQ ID NO: 2597704 - RNA, 19 nt, Homo sapiens
  misc_RNA (1)...(19): siRNA sense strand
aagaagaagcgauuggcaa

SEQ ID NO: 2597705 - RNA, 19 nt, Homo sapiens
  misc_RNA (1)...(19): siRNA sense strand
ggccauugguaaagggagu

SEQ ID NO: 2597706 - RNA, 19 nt, Homo sapiens
  misc_RNA (1)...(19): siRNA sense strand
aagcagaagugcaucgaga

SEQ ID NO: 2597707 - RNA, 19 nt, Homo sapiens
  misc_RNA (1)...(19): siRNA sense strand
ggcuggaggccguacgaaa

SEQ ID NO: 2597708 - RNA, 19 nt, Homo sapiens
  misc_RNA (1)...(19): siRNA sense strand
uguucaagguggagcgugu

SEQ ID NO: 2597709 - RNA, 19 nt, Homo sapiens
  misc_RNA (1)...(19): siRNA sense strand
agaagugcaucgagaggga

SEQ ID NO: 2597710 - RNA, 19 nt, Homo sapiens
  misc_RNA (1)...(19): siRNA sense strand
acgagaaugaggaagucaa

SEQ ID NO: 2597711 - RNA, 19 nt, Homo sapiens
  misc_RNA (1)...(19): siRNA sense strand
acagagacaucaagccaga

SEQ ID NO: 2597712 - RNA, 19 nt, Homo sapiens
  misc_RNA (1)...(19): siRNA sense strand
gagagaagcucaggaggca

SEQ ID NO: 2597713 - RNA, 19 nt, Homo sapiens
  misc_RNA (1)...(19): siRNA sense strand
agacuguccgggaggaauu

SEQ ID NO: 2597714 - RNA, 19 nt, Homo sapiens
  misc_RNA (1)...(19): siRNA sense strand
ccacagagacaucaagcca

SEQ ID NO: 2597715 - RNA, 19 nt, Homo sapiens
  misc_RNA (1)...(19): siRNA sense strand
gcaucgugcagaagcgaga

SEQ ID NO: 2597716 - RNA, 19 nt, Homo sapiens
  misc_RNA (1)...(19): siRNA sense strand
ccguguuugacgagaauga

SEQ ID NO: 2597717 - RNA, 19 nt, Homo sapiens
  misc_RNA (1)...(19): siRNA sense strand
cugcagcacuguuuggaga

SEQ ID NO: 2597718 - RNA, 19 nt, Homo sapiens
  misc_RNA (1)...(19): siRNA sense strand
aguacaugaacaagcagaa

SEQ ID NO: 2597719 - RNA, 19 nt, Homo sapiens
  misc_RNA (1)...(19): siRNA sense strand
agggauggcacaaaggaca

SEQ ID NO: 2597720 - RNA, 19 nt, Homo sapiens
  misc_RNA (1)...(19): siRNA sense strand
ccuacuuggccgacaugaa

SEQ ID NO: 2597721 - RNA, 19 nt, Homo sapiens
  misc_RNA (1)...(19): siRNA sense strand
gguaaagggaguuuuggaa

SEQ ID NO: 2597722 - RNA, 19 nt, Homo sapiens
  misc_RNA (1)...(19): siRNA sense strand
ucaucauauucaacagaga

SEQ ID NO: 2597723 - RNA, 19 nt, Homo sapiens
  misc_RNA (1)...(19): siRNA sense strand
uggcacuggcccuggagua

SEQ ID NO: 2597724 - RNA, 19 nt, Homo sapiens
  misc_RNA (1)...(19): siRNA sense strand
aagcgagacacuaagaaaa

SEQ ID NO: 2597725 - RNA, 19 nt, Homo sapiens
  misc_RNA (1)...(19): siRNA sense strand
augcaaugaaguacaugaa

SEQ ID NO: 2597726 - RNA, 19 nt, Homo sapiens
  misc_RNA (1)...(19): siRNA sense strand
aagaggaagaagagacaaa

SEQ ID NO: 2597727 - RNA, 19 nt, Homo sapiens
  misc_RNA (1)...(19): siRNA sense strand
cagcaaaccugaagcggca

SEQ ID NO: 2597728 - RNA, 19 nt, Homo sapiens
  misc_RNA (1)...(19): siRNA sense strand
gugaaacugaagaggaaga

SEQ ID NO: 2597729 - RNA, 19 nt, Homo sapiens
  misc_RNA (1)...(19): siRNA sense strand
aagaagaggaagaagagau

SEQ ID NO: 2597730 - RNA, 19 nt, Homo sapiens
  misc_RNA (1)...(19): siRNA sense strand
auugggaccaggagagaaa

SEQ ID NO: 2597731 - RNA, 19 nt, Homo sapiens
  misc_RNA (1)...(19): siRNA sense strand
ggaaagauuugaagcacuc

SEQ ID NO: 2597732 - RNA, 19 nt, Homo sapiens
  misc_RNA (1)...(19): siRNA sense strand
accaagaagaggaagaaga

SEQ ID NO: 2597733 - RNA, 19 nt, Homo sapiens
  misc_RNA (1)...(19): siRNA sense strand
ggaacagagucgacaccca

SEQ ID NO: 2597734 - RNA, 19 nt, Homo sapiens
  misc_RNA (1)...(19): siRNA sense strand
aggaaagauuugaagcacu

SEQ ID NO: 2597735 - RNA, 19 nt, Homo sapiens
  misc_RNA (1)...(19): siRNA sense strand
cugugaaagugaaacugaa

SEQ ID NO: 2597736 - RNA, 19 nt, Homo sapiens
  misc_RNA (1)...(19): siRNA sense strand
cugaccaagaagaggaaga

SEQ ID NO: 2597737 - RNA, 19 nt, Homo sapiens
  misc_RNA (1)...(19): siRNA sense strand
aagaggaagaagagaugau

SEQ ID NO: 2597738 - RNA, 19 nt, Homo sapiens
  misc_RNA (1)...(19): siRNA sense strand
aggaagaagagaugauuuu

SEQ ID NO: 2597739 - RNA, 19 nt, Homo sapiens
  misc_RNA (1)...(19): siRNA sense strand
augcgaugccuguuauaaa

SEQ ID NO: 2597740 - RNA, 19 nt, Homo sapiens
  misc_RNA (1)...(19): siRNA sense strand
gcacugaccaagaagagga

SEQ ID NO: 2597741 - RNA, 19 nt, Homo sapiens
  misc_RNA (1)...(19): siRNA sense strand
gcuuuagaagagucagaau

SEQ ID NO: 2597742 - RNA, 19 nt, Homo sapiens
  misc_RNA (1)...(19): siRNA sense strand
aaacagacuucaaugggca

SEQ ID NO: 2597743 - RNA, 19 nt, Homo sapiens
  misc_RNA (1)...(19): siRNA sense strand
agaugauggauuuaaguga

SEQ ID NO: 2597744 - RNA, 19 nt, Homo sapiens
  misc_RNA (1)...(19): siRNA sense strand
cguccaugaagcaguguuu

SEQ ID NO: 2597745 - RNA, 19 nt, Homo sapiens
  misc_RNA (1)...(19): siRNA sense strand
ugggaccaggagagaaaua

SEQ ID NO: 2597746 - RNA, 19 nt, Homo sapiens
  misc_RNA (1)...(19): siRNA sense strand
aggagagaaauaugaacuu

SEQ ID NO: 2597747 - RNA, 19 nt, Homo sapiens
  misc_RNA (1)...(19): siRNA sense strand
gcaucaagccuuuggguca

SEQ ID NO: 2597748 - RNA, 19 nt, Homo sapiens
  misc_RNA (1)...(19): siRNA sense strand
ugauauugcugauggccua

SEQ ID NO: 2597749 - RNA, 19 nt, Homo sapiens
  misc_RNA (1)...(19): siRNA sense strand
ggaugguacucaugggcau

SEQ ID NO: 2597750 - RNA, 19 nt, Homo sapiens
  misc_RNA (1)...(19): siRNA sense strand
gcaucuaccuccuagccua

SEQ ID NO: 2597751 - RNA, 19 nt, Homo sapiens
  misc_RNA (1)...(19): siRNA sense strand
ccuucuacguccaauacaa

SEQ ID NO: 2597752 - RNA, 19 nt, Homo sapiens
  misc_RNA (1)...(19): siRNA sense strand
ugaacgagacaguggacca

SEQ ID NO: 2597753 - RNA, 19 nt, Homo sapiens
  misc_RNA (1)...(19): siRNA sense strand
caaccguaugggaccgaua

SEQ ID NO: 2597754 - RNA, 19 nt, Homo sapiens
  misc_RNA (1)...(19): siRNA sense strand
guggaucggugcuggcaga

SEQ ID NO: 2597755 - RNA, 19 nt, Homo sapiens
  misc_RNA (1)...(19): siRNA sense strand
cggcaguaguguuugcagu

SEQ ID NO: 2597756 - RNA, 19 nt, Homo sapiens
  misc_RNA (1)...(19): siRNA sense strand
cuauauuugcgcagaucau

SEQ ID NO: 2597757 - RNA, 19 nt, Homo sapiens
  misc_RNA (1)...(19): siRNA sense strand
augaaggagcggugccaga

SEQ ID NO: 2597758 - RNA, 19 nt, Homo sapiens
  misc_RNA (1)...(19): siRNA sense strand
ugacuuagcugaugggcca

SEQ ID NO: 2597759 - RNA, 19 nt, Homo sapiens
  misc_RNA (1)...(19): siRNA sense strand
ccuuagugacaaaguuuaa

SEQ ID NO: 2597760 - RNA, 19 nt, Homo sapiens
  misc_RNA (1)...(19): siRNA sense strand
auaagaagcuaaaaggcaa

SEQ ID NO: 2597761 - RNA, 19 nt, Homo sapiens
  misc_RNA (1)...(19): siRNA sense strand
guacaaaagcguuggcgau

SEQ ID NO: 2597762 - RNA, 19 nt, Homo sapiens
  misc_RNA (1)...(19): siRNA sense strand
agaugguaacucagaggaa

SEQ ID NO: 2597763 - RNA, 19 nt, Homo sapiens
  misc_RNA (1)...(19): siRNA sense strand
aaguagagaugaaaggugu

SEQ ID NO: 2597764 - RNA, 19 nt, Homo sapiens
  misc_RNA (1)...(19): siRNA sense strand
ggaaagcacacuggggaaa

SEQ ID NO: 2597765 - RNA, 19 nt, Homo sapiens
  misc_RNA (1)...(19): siRNA sense strand
uaagauugcuccauggcau

SEQ ID NO: 2597766 - RNA, 19 nt, Homo sapiens
  misc_RNA (1)...(19): siRNA sense strand
gcuaaaaggcaaaagucca

SEQ ID NO: 2597767 - RNA, 19 nt, Homo sapiens
  misc_RNA (1)...(19): siRNA sense strand
cugcauaagguuugauuac

SEQ ID NO: 2597768 - RNA, 19 nt, Homo sapiens
  misc_RNA (1)...(19): siRNA sense strand
uuggaaguucagaugguaa

SEQ ID NO: 2597769 - RNA, 19 nt, Homo sapiens
  misc_RNA (1)...(19): siRNA sense strand
guaccuuggcauacaucaa

SEQ ID NO: 2597770 - RNA, 19 nt, Homo sapiens
  misc_RNA (1)...(19): siRNA sense strand
ccuuaaucgaccagaccuu

SEQ ID NO: 2597771 - RNA, 19 nt, Homo sapiens
  misc_RNA (1)...(19): siRNA sense strand
aggaaagcacacuggggaa

SEQ ID NO: 2597772 - RNA, 19 nt, Homo sapiens
  misc_RNA (1)...(19): siRNA sense strand
gggaagaggaugaagcaau

SEQ ID NO: 2597773 - RNA, 19 nt, Homo sapiens
  misc_RNA (1)...(19): siRNA sense strand
cugagaaggcuaagacuaa

SEQ ID NO: 2597774 - RNA, 19 nt, Homo sapiens
  misc_RNA (1)...(19): siRNA sense strand
gcauggaagaagaggaaga

SEQ ID NO: 2597775 - RNA, 19 nt, Homo sapiens
  misc_RNA (1)...(19): siRNA sense strand
gggagaagucugucaacaa

SEQ ID NO: 2597776 - RNA, 19 nt, Homo sapiens
  misc_RNA (1)...(19): siRNA sense strand
ggucaaaaucacugagcua

SEQ ID NO: 2597777 - RNA, 19 nt, Homo sapiens
  misc_RNA (1)...(19): siRNA sense strand
aagaagaagaugaggcaga

SEQ ID NO: 2597778 - RNA, 19 nt, Homo sapiens
  misc_RNA (1)...(19): siRNA sense strand
gcuaaaagcaagaagaaga

SEQ ID NO: 2597779 - RNA, 19 nt, Homo sapiens
  misc_RNA (1)...(19): siRNA sense strand
aauccaaggcugagaaaga

SEQ ID NO: 2597780 - RNA, 19 nt, Homo sapiens
  misc_RNA (1)...(19): siRNA sense strand
ggaagagaucacuggagaa

SEQ ID NO: 2597781 - RNA, 19 nt, Homo sapiens
  misc_RNA (1)...(19): siRNA sense strand
gccagugaguggaggacua

SEQ ID NO: 2597782 - RNA, 19 nt, Homo sapiens
  misc_RNA (1)...(19): siRNA sense strand
gcccaaacggagagggaga

SEQ ID NO: 2597783 - RNA, 19 nt, Homo sapiens
  misc_RNA (1)...(19): siRNA sense strand
aggaagaagaggagucuau

SEQ ID NO: 2597784 - RNA, 19 nt, Homo sapiens
  misc_RNA (1)...(19): siRNA sense strand
uggcauggaagaagaggaa

SEQ ID NO: 2597785 - RNA, 19 nt, Homo sapiens
  misc_RNA (1)...(19): siRNA sense strand
ugugaauguuaauggcuua

SEQ ID NO: 2597786 - RNA, 19 nt, Homo sapiens
  misc_RNA (1)...(19): siRNA sense strand
uaaagaaacuggaggccca

SEQ ID NO: 2597787 - RNA, 19 nt, Homo sapiens
  misc_RNA (1)...(19): siRNA sense strand
cgucgaggauucaggcaau

SEQ ID NO: 2597788 - RNA, 19 nt, Homo sapiens
  misc_RNA (1)...(19): siRNA sense strand
cggcagaagcagcagauga

SEQ ID NO: 2597789 - RNA, 19 nt, Homo sapiens
  misc_RNA (1)...(19): siRNA sense strand
gcaagaagaagaugaggca

SEQ ID NO: 2597790 - RNA, 19 nt, Homo sapiens
  misc_RNA (1)...(19): siRNA sense strand
ggguagaggagcuggagca

SEQ ID NO: 2597791 - RNA, 19 nt, Homo sapiens
  misc_RNA (1)...(19): siRNA sense strand
gagauuauccugauggaga

SEQ ID NO: 2597792 - RNA, 19 nt, Homo sapiens
  misc_RNA (1)...(19): siRNA sense strand
agaagaaauccaaggcuga

SEQ ID NO: 2597793 - RNA, 19 nt, Homo sapiens
  misc_RNA (1)...(19): siRNA sense strand
aaaagaaggagaagguuaa

SEQ ID NO: 2597794 - RNA, 19 nt, Homo sapiens
  misc_RNA (1)...(19): siRNA sense strand
gaggugauaaagaaggaaa

SEQ ID NO: 2597795 - RNA, 19 nt, Homo sapiens
  misc_RNA (1)...(19): siRNA sense strand
ccguaugccuguuggagau

SEQ ID NO: 2597796 - RNA, 19 nt, Homo sapiens
  misc_RNA (1)...(19): siRNA sense strand
cgaaacacugagaaggcua

SEQ ID NO: 2597797 - RNA, 19 nt, Homo sapiens
  misc_RNA (1)...(19): siRNA sense strand
guggaggacuauaugguau

SEQ ID NO: 2597798 - RNA, 19 nt, Homo sapiens
  misc_RNA (1)...(19): siRNA sense strand
acgcugaacaggaagaaau

SEQ ID NO: 2597799 - RNA, 19 nt, Homo sapiens
  misc_RNA (1)...(19): siRNA sense strand
cuagagcgccagauagaaa

SEQ ID NO: 2597800 - RNA, 19 nt, Homo sapiens
  misc_RNA (1)...(19): siRNA sense strand
gaauaaugguagugacgcu

SEQ ID NO: 2597801 - RNA, 19 nt, Homo sapiens
  misc_RNA (1)...(19): siRNA sense strand
ggaagaaauggaaacucaa

SEQ ID NO: 2597802 - RNA, 19 nt, Homo sapiens
  misc_RNA (1)...(19): siRNA sense strand
uggaagagaucacuggaga

SEQ ID NO: 2597803 - RNA, 19 nt, Homo sapiens
  misc_RNA (1)...(19): siRNA sense strand
agaaauaagcggaaacaag

SEQ ID NO: 2597804 - RNA, 19 nt, Homo sapiens
  misc_RNA (1)...(19): siRNA sense strand
gggaaaagaaggagaaggu

SEQ ID NO: 2597805 - RNA, 19 nt, Homo sapiens
  misc_RNA (1)...(19): siRNA sense strand
gaugggaaggccagaggaa

SEQ ID NO: 2597806 - RNA, 19 nt, Homo sapiens
  misc_RNA (1)...(19): siRNA sense strand
uggaagaagaacagccaga

SEQ ID NO: 2597807 - RNA, 19 nt, Homo sapiens
  misc_RNA (1)...(19): siRNA sense strand
ggccagaaauaagcggaaa

SEQ ID NO: 2597808 - RNA, 19 nt, Homo sapiens
  misc_RNA (1)...(19): siRNA sense strand
aagaagaggaagaagagga

SEQ ID NO: 2597809 - RNA, 19 nt, Homo sapiens
  misc_RNA (1)...(19): siRNA sense strand
cuguugaagggccgagaaa

SEQ ID NO: 2597810 - RNA, 19 nt, Homo sapiens
  misc_RNA (1)...(19): siRNA sense strand
aggcuaagacuaaggaagu

SEQ ID NO: 2597811 - RNA, 19 nt, Homo sapiens
  misc_RNA (1)...(19): siRNA sense strand
cagaggaguuugcggcuga

SEQ ID NO: 2597812 - RNA, 19 nt, Homo sapiens
  misc_RNA (1)...(19): siRNA sense strand
cuauugaacaagacagaca

SEQ ID NO: 2597813 - RNA, 19 nt, Homo sapiens
  misc_RNA (1)...(19): siRNA sense strand
cgaggaugacucugaagua

SEQ ID NO: 2597814 - RNA, 19 nt, Homo sapiens
  misc_RNA (1)...(19): siRNA sense strand
acugagaaggcuaagacua

SEQ ID NO: 2597815 - RNA, 19 nt, Homo sapiens
  misc_RNA (1)...(19): siRNA sense strand
gaaagacaaagcaggaaaa

SEQ ID NO: 2597816 - RNA, 19 nt, Homo sapiens
  misc_RNA (1)...(19): siRNA sense strand
gcuacuggguauugccgua

SEQ ID NO: 2597817 - RNA, 19 nt, Homo sapiens
  misc_RNA (1)...(19): siRNA sense strand
agagaagacauacgagaca

SEQ ID NO: 2597818 - RNA, 19 nt, Homo sapiens
  misc_RNA (1)...(19): siRNA sense strand
agucuguccugcaagauaa

SEQ ID NO: 2597819 - RNA, 19 nt, Homo sapiens
  misc_RNA (1)...(19): siRNA sense strand
gagacacgccagagggcuu

SEQ ID NO: 2597820 - RNA, 19 nt, Homo sapiens
  misc_RNA (1)...(19): siRNA sense strand
agccagacucagagccaua

SEQ ID NO: 2597821 - RNA, 19 nt, Homo sapiens
  misc_RNA (1)...(19): siRNA sense strand
ggaggauaaagcaaagauu

SEQ ID NO: 2597822 - RNA, 19 nt, Homo sapiens
  misc_RNA (1)...(19): siRNA sense strand
ggggagaaggugucugaaa

SEQ ID NO: 2597823 - RNA, 19 nt, Homo sapiens
  misc_RNA (1)...(19): siRNA sense strand
ccucgguacucggaagaaa

SEQ ID NO: 2597824 - RNA, 19 nt, Homo sapiens
  misc_RNA (1)...(19): siRNA sense strand
augaggaggauaaagcaaa

SEQ ID NO: 2597825 - RNA, 19 nt, Homo sapiens
  misc_RNA (1)...(19): siRNA sense strand
aggagaagguuaaaaugaa

SEQ ID NO: 2597826 - RNA, 19 nt, Homo sapiens
  misc_RNA (1)...(19): siRNA sense strand
ccugauagcaguccgggaa

SEQ ID NO: 2597827 - RNA, 19 nt, Homo sapiens
  misc_RNA (1)...(19): siRNA sense strand
ccgagaaagcccagcagca

SEQ ID NO: 2597828 - RNA, 19 nt, Homo sapiens
  misc_RNA (1)...(19): siRNA sense strand
ccaaaagccucucccguaa

SEQ ID NO: 2597829 - RNA, 19 nt, Homo sapiens
  misc_RNA (1)...(19): siRNA sense strand
gaagaagccgacagaggau

SEQ ID NO: 2597830 - RNA, 19 nt, Homo sapiens
  misc_RNA (1)...(19): siRNA sense strand
cucagcagguggagggaga

SEQ ID NO: 2597831 - RNA, 19 nt, Homo sapiens
  misc_RNA (1)...(19): siRNA sense strand
aacaagagaccaagagcuu

SEQ ID NO: 2597832 - RNA, 19 nt, Homo sapiens
  misc_RNA (1)...(19): siRNA sense strand
ucccagagcuagagcgcca

SEQ ID NO: 2597833 - RNA, 19 nt, Homo sapiens
  misc_RNA (1)...(19): siRNA sense strand
aagccaaugaauagaccua

SEQ ID NO: 2597834 - RNA, 19 nt, Homo sapiens
  misc_RNA (1)...(19): siRNA sense strand
uagaaggaacagaggggaa

SEQ ID NO: 2597835 - RNA, 19 nt, Homo sapiens
  misc_RNA (1)...(19): siRNA sense strand
cacuacuacuucagggauu

SEQ ID NO: 2597836 - RNA, 19 nt, Homo sapiens
  misc_RNA (1)...(19): siRNA sense strand
cugcugacguggaagagau

SEQ ID NO: 2597837 - RNA, 19 nt, Homo sapiens
  misc_RNA (1)...(19): siRNA sense strand
ucuucaaacagauggaaca

SEQ ID NO: 2597838 - RNA, 19 nt, Homo sapiens
  misc_RNA (1)...(19): siRNA sense strand
aggcaaagacaucaagaaa

SEQ ID NO: 2597839 - RNA, 19 nt, Homo sapiens
  misc_RNA (1)...(19): siRNA sense strand
cggaagagucugagaaagu

SEQ ID NO: 2597840 - RNA, 19 nt, Homo sapiens
  misc_RNA (1)...(19): siRNA sense strand
cuacaaaggaagagccaca

SEQ ID NO: 2597841 - RNA, 19 nt, Homo sapiens
  misc_RNA (1)...(19): siRNA sense strand
gccaagacccugaggaaaa

SEQ ID NO: 2597842 - RNA, 19 nt, Homo sapiens
  misc_RNA (1)...(19): siRNA sense strand
cugccaggcucaagaacaa

SEQ ID NO: 2597843 - RNA, 19 nt, Homo sapiens
  misc_RNA (1)...(19): siRNA sense strand
aggaagagccacaaggaca

SEQ ID NO: 2597844 - RNA, 19 nt, Homo sapiens
  misc_RNA (1)...(19): siRNA sense strand
guguagacgacgugugcua

SEQ ID NO: 2597845 - RNA, 19 nt, Homo sapiens
  misc_RNA (1)...(19): siRNA sense strand
aagugaugaauguggaaua

SEQ ID NO: 2597846 - RNA, 19 nt, Homo sapiens
  misc_RNA (1)...(19): siRNA sense strand
ccgaaacaugaaaggcaaa

SEQ ID NO: 2597847 - RNA, 19 nt, Homo sapiens
  misc_RNA (1)...(19): siRNA sense strand
cagaauaaggccagcacuu

SEQ ID NO: 2597848 - RNA, 19 nt, Homo sapiens
  misc_RNA (1)...(19): siRNA sense strand
ggaauaaauccaggagaga

SEQ ID NO: 2597849 - RNA, 19 nt, Homo sapiens
  misc_RNA (1)...(19): siRNA sense strand
agggagaccaagagcacaa

SEQ ID NO: 2597850 - RNA, 19 nt, Homo sapiens
  misc_RNA (1)...(19): siRNA sense strand
ggaggagagaagcgggauu

SEQ ID NO: 2597851 - RNA, 19 nt, Homo sapiens
  misc_RNA (1)...(19): siRNA sense strand
gagacagagaaguuacaaa

SEQ ID NO: 2597852 - RNA, 19 nt, Homo sapiens
  misc_RNA (1)...(19): siRNA sense strand
gcuaaaucgaccugcgaga

SEQ ID NO: 2597853 - RNA, 19 nt, Homo sapiens
  misc_RNA (1)...(19): siRNA sense strand
caacaagcgcaccggguau

SEQ ID NO: 2597854 - RNA, 19 nt, Homo sapiens
  misc_RNA (1)...(19): siRNA sense strand
uggaagagcaguacagcau

SEQ ID NO: 2597855 - RNA, 19 nt, Homo sapiens
  misc_RNA (1)...(19): siRNA sense strand
gggugaagaaauaugccaa

SEQ ID NO: 2597856 - RNA, 19 nt, Homo sapiens
  misc_RNA (1)...(19): siRNA sense strand
acacaaccgugaaggacau

SEQ ID NO: 2597857 - RNA, 19 nt, Homo sapiens
  misc_RNA (1)...(19): siRNA sense strand
cacaguaaagauagacaaa

SEQ ID NO: 2597858 - RNA, 19 nt, Homo sapiens
  misc_RNA (1)...(19): siRNA sense strand
gaguacagcuucccggcaa

SEQ ID NO: 2597859 - RNA, 19 nt, Homo sapiens
  misc_RNA (1)...(19): siRNA sense strand
agugaugaauguggaauaa

SEQ ID NO: 2597860 - RNA, 19 nt, Homo sapiens
  misc_RNA (1)...(19): siRNA sense strand
agagaaagacuggggaaua

SEQ ID NO: 2597861 - RNA, 19 nt, Homo sapiens
  misc_RNA (1)...(19): siRNA sense strand
gcuuacucuuagaaggcaa

SEQ ID NO: 2597862 - RNA, 19 nt, Homo sapiens
  misc_RNA (1)...(19): siRNA sense strand
gcuccagggcacugagaca

SEQ ID NO: 2597863 - RNA, 19 nt, Homo sapiens
  misc_RNA (1)...(19): siRNA sense strand
gggaacgagcagucgauau

SEQ ID NO: 2597864 - RNA, 19 nt, Homo sapiens
  misc_RNA (1)...(19): siRNA sense strand
guaaagauagacaaagaca

SEQ ID NO: 2597865 - RNA, 19 nt, Homo sapiens
  misc_RNA (1)...(19): siRNA sense strand
ccauggacgcucuggaaga

SEQ ID NO: 2597866 - RNA, 19 nt, Homo sapiens
  misc_RNA (1)...(19): siRNA sense strand
augccaagacccugaggaa

SEQ ID NO: 2597867 - RNA, 19 nt, Homo sapiens
  misc_RNA (1)...(19): siRNA sense strand
ugugacagggcaagauaua

SEQ ID NO: 2597868 - RNA, 19 nt, Homo sapiens
  misc_RNA (1)...(19): siRNA sense strand
uagaaagggaggagucaca

SEQ ID NO: 2597869 - RNA, 19 nt, Homo sapiens
  misc_RNA (1)...(19): siRNA sense strand
guggacacagccaggguaa

SEQ ID NO: 2597870 - RNA, 19 nt, Homo sapiens
  misc_RNA (1)...(19): siRNA sense strand
cggaaagcacauagaauag

SEQ ID NO: 2597871 - RNA, 19 nt, Homo sapiens
  misc_RNA (1)...(19): siRNA sense strand
cuuagaaacuucaaaccau

SEQ ID NO: 2597872 - RNA, 19 nt, Homo sapiens
  misc_RNA (1)...(19): siRNA sense strand
caugaaaggcaaagacauc

SEQ ID NO: 2597873 - RNA, 19 nt, Homo sapiens
  misc_RNA (1)...(19): siRNA sense strand
uggaagaggaugacuuaga

SEQ ID NO: 2597874 - RNA, 19 nt, Homo sapiens
  misc_RNA (1)...(19): siRNA sense strand
agaaccaaccauagagcau

SEQ ID NO: 2597875 - RNA, 19 nt, Homo sapiens
  misc_RNA (1)...(19): siRNA sense strand
acacaguaaagauagacaa

SEQ ID NO: 2597876 - RNA, 19 nt, Homo sapiens
  misc_RNA (1)...(19): siRNA sense strand
ccaacaauaaagagaauuc

SEQ ID NO: 2597877 - RNA, 19 nt, Homo sapiens
  misc_RNA (1)...(19): siRNA sense strand
ucguagaguuggauuuaga

SEQ ID NO: 2597878 - RNA, 19 nt, Homo sapiens
  misc_RNA (1)...(19): siRNA sense strand
aauaaauccaggagagaag

SEQ ID NO: 2597879 - RNA, 19 nt, Homo sapiens
  misc_RNA (1)...(19): siRNA sense strand
cuagagacccucaaggaca

SEQ ID NO: 2597880 - RNA, 19 nt, Homo sapiens
  misc_RNA (1)...(19): siRNA sense strand
ggauuagccagguuaucaa

SEQ ID NO: 2597881 - RNA, 19 nt, Homo sapiens
  misc_RNA (1)...(19): siRNA sense strand
agccugagacagaggaaga

SEQ ID NO: 2597882 - RNA, 19 nt, Homo sapiens
  misc_RNA (1)...(19): siRNA sense strand
cuuuaauguuacaggauag

SEQ ID NO: 2597883 - RNA, 19 nt, Homo sapiens
  misc_RNA (1)...(19): siRNA sense strand
caacagugcaaaagaccua

SEQ ID NO: 2597884 - RNA, 19 nt, Homo sapiens
  misc_RNA (1)...(19): siRNA sense strand
ccaacguauuucaggagga

SEQ ID NO: 2597885 - RNA, 19 nt, Homo sapiens
  misc_RNA (1)...(19): siRNA sense strand
uaacagggaccgagcagau

SEQ ID NO: 2597886 - RNA, 19 nt, Homo sapiens
  misc_RNA (1)...(19): siRNA sense strand
ccaaaugaacaaugagccu

SEQ ID NO: 2597887 - RNA, 19 nt, Homo sapiens
  misc_RNA (1)...(19): siRNA sense strand
uggagaauggacagaccaa

SEQ ID NO: 2597888 - RNA, 19 nt, Homo sapiens
  misc_RNA (1)...(19): siRNA sense strand
agaaagugagcgucgucaa

SEQ ID NO: 2597889 - RNA, 19 nt, Homo sapiens
  misc_RNA (1)...(19): siRNA sense strand
agcacauagaauagaacaa

SEQ ID NO: 2597890 - RNA, 19 nt, Homo sapiens
  misc_RNA (1)...(19): siRNA sense strand
cagaagaaggcuaugaauc

SEQ ID NO: 2597891 - RNA, 19 nt, Homo sapiens
  misc_RNA (1)...(19): siRNA sense strand
agaccaaagcuuucaaguu

SEQ ID NO: 2597892 - RNA, 19 nt, Homo sapiens
  misc_RNA (1)...(19): siRNA sense strand
gguagaaagggaggaguca

SEQ ID NO: 2597893 - RNA, 19 nt, Homo sapiens
  misc_RNA (1)...(19): siRNA sense strand
uccgaaacaugaaaggcaa

SEQ ID NO: 2597894 - RNA, 19 nt, Homo sapiens
  misc_RNA (1)...(19): siRNA sense strand
gaaacagggugaagaccga

SEQ ID NO: 2597895 - RNA, 19 nt, Homo sapiens
  misc_RNA (1)...(19): siRNA sense strand
cguccgagucccuggagaa

SEQ ID NO: 2597896 - RNA, 19 nt, Homo sapiens
  misc_RNA (1)...(19): siRNA sense strand
cggagaagaaccugcacuu

SEQ ID NO: 2597897 - RNA, 19 nt, Homo sapiens
  misc_RNA (1)...(19): siRNA sense strand
gcagaaaugccaacgagga

SEQ ID NO: 2597898 - RNA, 19 nt, Homo sapiens
  misc_RNA (1)...(19): siRNA sense strand
gugcugaaaugguccguca

SEQ ID NO: 2597899 - RNA, 19 nt, Homo sapiens
  misc_RNA (1)...(19): siRNA sense strand
gcagaaacuucgaggggcu

SEQ ID NO: 2597900 - RNA, 19 nt, Homo sapiens
  misc_RNA (1)...(19): siRNA sense strand
uggagggcucggagaagaa

SEQ ID NO: 2597901 - RNA, 19 nt, Homo sapiens
  misc_RNA (1)...(19): siRNA sense strand
ccuaugaagacgagagcuc

SEQ ID NO: 2597902 - RNA, 19 nt, Homo sapiens
  misc_RNA (1)...(19): siRNA sense strand
agaagaugacgcugcccaa

SEQ ID NO: 2597903 - RNA, 19 nt, Homo sapiens
  misc_RNA (1)...(19): siRNA sense strand
agggaaguccagagaaaua

SEQ ID NO: 2597904 - RNA, 19 nt, Homo sapiens
  misc_RNA (1)...(19): siRNA sense strand
aaagauaagaugaagggua

SEQ ID NO: 2597905 - RNA, 19 nt, Homo sapiens
  misc_RNA (1)...(19): siRNA sense strand
ugaagaaagcagcgaaaca

SEQ ID NO: 2597906 - RNA, 19 nt, Homo sapiens
  misc_RNA (1)...(19): siRNA sense strand
ggaaaaucccggacagcaa

SEQ ID NO: 2597907 - RNA, 19 nt, Homo sapiens
  misc_RNA (1)...(19): siRNA sense strand
ugaaagagugacuggaaaa

SEQ ID NO: 2597908 - RNA, 19 nt, Homo sapiens
  misc_RNA (1)...(19): siRNA sense strand
uuguaaggguaauggaaga

SEQ ID NO: 2597909 - RNA, 19 nt, Homo sapiens
  misc_RNA (1)...(19): siRNA sense strand
cuauaauucagcugggcaa

SEQ ID NO: 2597910 - RNA, 19 nt, Homo sapiens
  misc_RNA (1)...(19): siRNA sense strand
acuuaucaaugaaggacaa

SEQ ID NO: 2597911 - RNA, 19 nt, Homo sapiens
  misc_RNA (1)...(19): siRNA sense strand
ccaaaaggcaaaaguggua

SEQ ID NO: 2597912 - RNA, 19 nt, Homo sapiens
  misc_RNA (1)...(19): siRNA sense strand
augacaucuuugaggacaa

SEQ ID NO: 2597913 - RNA, 19 nt, Homo sapiens
  misc_RNA (1)...(19): siRNA sense strand
gugaaaaucgccaggacua

SEQ ID NO: 2597914 - RNA, 19 nt, Homo sapiens
  misc_RNA (1)...(19): siRNA sense strand
agaugaaauccaaaccaaa

SEQ ID NO: 2597915 - RNA, 19 nt, Homo sapiens
  misc_RNA (1)...(19): siRNA sense strand
ucacagugcuccaagccaa

SEQ ID NO: 2597916 - RNA, 19 nt, Homo sapiens
  misc_RNA (1)...(19): siRNA sense strand
agaaaguggaagucucaaa

SEQ ID NO: 2597917 - RNA, 19 nt, Homo sapiens
  misc_RNA (1)...(19): siRNA sense strand
aaugaagaccucaggaaaa

SEQ ID NO: 2597918 - RNA, 19 nt, Homo sapiens
  misc_RNA (1)...(19): siRNA sense strand
aggcaaaagugguaccaau

SEQ ID NO: 2597919 - RNA, 19 nt, Homo sapiens
  misc_RNA (1)...(19): siRNA sense strand
aagauaagaugaaggguag

SEQ ID NO: 2597920 - RNA, 19 nt, Homo sapiens
  misc_RNA (1)...(19): siRNA sense strand
gccaaagaucugaagccaa

SEQ ID NO: 2597921 - RNA, 19 nt, Homo sapiens
  misc_RNA (1)...(19): siRNA sense strand
gugaaauacagaugaaauc

SEQ ID NO: 2597922 - RNA, 19 nt, Homo sapiens
  misc_RNA (1)...(19): siRNA sense strand
ggugaauuguguuucggaa

SEQ ID NO: 2597923 - RNA, 19 nt, Homo sapiens
  misc_RNA (1)...(19): siRNA sense strand
gcauuguggaugaagguga

SEQ ID NO: 2597924 - RNA, 19 nt, Homo sapiens
  misc_RNA (1)...(19): siRNA sense strand
cugacagcauuguggauga

SEQ ID NO: 2597925 - RNA, 19 nt, Homo sapiens
  misc_RNA (1)...(19): siRNA sense strand
uuugaagaaagcagcgaaa

SEQ ID NO: 2597926 - RNA, 19 nt, Homo sapiens
  misc_RNA (1)...(19): siRNA sense strand
ggggugagauaaaggucaa

SEQ ID NO: 2597927 - RNA, 19 nt, Homo sapiens
  misc_RNA (1)...(19): siRNA sense strand
aggaacaauaugaccgcaa

SEQ ID NO: 2597928 - RNA, 19 nt, Homo sapiens
  misc_RNA (1)...(19): siRNA sense strand
aaaacaggggugagauaaa

SEQ ID NO: 2597929 - RNA, 19 nt, Homo sapiens
  misc_RNA (1)...(19): siRNA sense strand
uccgggaacucgaggacua

SEQ ID NO: 2597930 - RNA, 19 nt, Homo sapiens
  misc_RNA (1)...(19): siRNA sense strand
gacaaacaaagaaggaaaa

SEQ ID NO: 2597931 - RNA, 19 nt, Homo sapiens
  misc_RNA (1)...(19): siRNA sense strand
gugagauaaaggucaauau

SEQ ID NO: 2597932 - RNA, 19 nt, Homo sapiens
  misc_RNA (1)...(19): siRNA sense strand
ugagaaaacccuugagcca

SEQ ID NO: 2597933 - RNA, 19 nt, Homo sapiens
  misc_RNA (1)...(19): siRNA sense strand
gagagaaaagggagaaagu

SEQ ID NO: 2597934 - RNA, 19 nt, Homo sapiens
  misc_RNA (1)...(19): siRNA sense strand
acaauaugaccgcaaguau

SEQ ID NO: 2597935 - RNA, 19 nt, Homo sapiens
  misc_RNA (1)...(19): siRNA sense strand
ccuggugggucuggauaaa

SEQ ID NO: 2597936 - RNA, 19 nt, Homo sapiens
  misc_RNA (1)...(19): siRNA sense strand
auaugaaccauccaggaaa

SEQ ID NO: 2597937 - RNA, 19 nt, Homo sapiens
  misc_RNA (1)...(19): siRNA sense strand
uagaauccaaacaaggaaa

SEQ ID NO: 2597938 - RNA, 19 nt, Homo sapiens
  misc_RNA (1)...(19): siRNA sense strand
aaacacaucuucucggaca

SEQ ID NO: 2597939 - RNA, 19 nt, Homo sapiens
  misc_RNA (1)...(19): siRNA sense strand
ggugaaacacaaagaacuc

SEQ ID NO: 2597940 - RNA, 19 nt, Homo sapiens
  misc_RNA (1)...(19): siRNA sense strand
auucaguuuaugaggaaca

SEQ ID NO: 2597941 - RNA, 19 nt, Homo sapiens
  misc_RNA (1)...(19): siRNA sense strand
acagaagaacauuaagcuu

SEQ ID NO: 2597942 - RNA, 19 nt, Homo sapiens
  misc_RNA (1)...(19): siRNA sense strand
gcccaaaagugguuuccaa

SEQ ID NO: 2597943 - RNA, 19 nt, Homo sapiens
  misc_RNA (1)...(19): siRNA sense strand
agaucaacgcagaaggaga

SEQ ID NO: 2597944 - RNA, 19 nt, Homo sapiens
  misc_RNA (1)...(19): siRNA sense strand
caagggaagcugugaggga

SEQ ID NO: 2597945 - RNA, 19 nt, Homo sapiens
  misc_RNA (1)...(19): siRNA sense strand
ggcccuuugcagugauaua

SEQ ID NO: 2597946 - RNA, 19 nt, Homo sapiens
  misc_RNA (1)...(19): siRNA sense strand
agaucaacgcagaaggaga

SEQ ID NO: 2597947 - RNA, 19 nt, Homo sapiens
  misc_RNA (1)...(19): siRNA sense strand
caagggaagcugugaggga

SEQ ID NO: 2597948 - RNA, 19 nt, Homo sapiens
  misc_RNA (1)...(19): siRNA sense strand
ggcccuuugcagugauaua

SEQ ID NO: 2597949 - RNA, 19 nt, Homo sapiens
  misc_RNA (1)...(19): siRNA sense strand
ugaaauuacacgagaguau

SEQ ID NO: 2597950 - RNA, 19 nt, Homo sapiens
  misc_RNA (1)...(19): siRNA sense strand
caugcaugcuuuagggaaa

SEQ ID NO: 2597951 - RNA, 19 nt, Homo sapiens
  misc_RNA (1)...(19): siRNA sense strand
caugagaaugugaaagaaa

SEQ ID NO: 2597952 - RNA, 19 nt, Homo sapiens
  misc_RNA (1)...(19): siRNA sense strand
ugagaaggacaaagcgaaa

SEQ ID NO: 2597953 - RNA, 19 nt, Homo sapiens
  misc_RNA (1)...(19): siRNA sense strand
caucaaacucugaggcaca

SEQ ID NO: 2597954 - RNA, 19 nt, Homo sapiens
  misc_RNA (1)...(19): siRNA sense strand
ugacaaauaaagaggcaga

SEQ ID NO: 2597955 - RNA, 19 nt, Homo sapiens
  misc_RNA (1)...(19): siRNA sense strand
gccuaaaguugaagcugaa

SEQ ID NO: 2597956 - RNA, 19 nt, Homo sapiens
  misc_RNA (1)...(19): siRNA sense strand
ccaagagaauguaguucaa

SEQ ID NO: 2597957 - RNA, 19 nt, Homo sapiens
  misc_RNA (1)...(19): siRNA sense strand
cuucaaaugcccaggccaa

SEQ ID NO: 2597958 - RNA, 19 nt, Homo sapiens
  misc_RNA (1)...(19): siRNA sense strand
gaaucaacccagugcagaa

SEQ ID NO: 2597959 - RNA, 19 nt, Homo sapiens
  misc_RNA (1)...(19): siRNA sense strand
cagagaacacagaagacaa

SEQ ID NO: 2597960 - RNA, 19 nt, Homo sapiens
  misc_RNA (1)...(19): siRNA sense strand
agaagguaguugacaguau

SEQ ID NO: 2597961 - RNA, 19 nt, Homo sapiens
  misc_RNA (1)...(19): siRNA sense strand
guaaauaagcaccgcccaa

SEQ ID NO: 2597962 - RNA, 19 nt, Homo sapiens
  misc_RNA (1)...(19): siRNA sense strand
ugauauggaaguugagaga

SEQ ID NO: 2597963 - RNA, 19 nt, Homo sapiens
  misc_RNA (1)...(19): siRNA sense strand
uguaaauaccucaagggaa

SEQ ID NO: 2597964 - RNA, 19 nt, Homo sapiens
  misc_RNA (1)...(19): siRNA sense strand
gggcccaaaccaagagaau

SEQ ID NO: 2597965 - RNA, 19 nt, Homo sapiens
  misc_RNA (1)...(19): siRNA sense strand
aguugaagaaugugugcaa

SEQ ID NO: 2597966 - RNA, 19 nt, Homo sapiens
  misc_RNA (1)...(19): siRNA sense strand
agaagagaguaucggguca

SEQ ID NO: 2597967 - RNA, 19 nt, Homo sapiens
  misc_RNA (1)...(19): siRNA sense strand
acacagaagacaauaugaa

SEQ ID NO: 2597968 - RNA, 19 nt, Homo sapiens
  misc_RNA (1)...(19): siRNA sense strand
acaaauaaagaggcagaaa

SEQ ID NO: 2597969 - RNA, 19 nt, Homo sapiens
  misc_RNA (1)...(19): siRNA sense strand
uuauagccuugaagagaua

SEQ ID NO: 2597970 - RNA, 19 nt, Homo sapiens
  misc_RNA (1)...(19): siRNA sense strand
ccuugaagagauagaugaa

SEQ ID NO: 2597971 - RNA, 19 nt, Homo sapiens
  misc_RNA (1)...(19): siRNA sense strand
agagauagaugaaaaggaa

SEQ ID NO: 2597972 - RNA, 19 nt, Homo sapiens
  misc_RNA (1)...(19): siRNA sense strand
ccuuggaaauaucgaaaga

SEQ ID NO: 2597973 - RNA, 19 nt, Homo sapiens
  misc_RNA (1)...(19): siRNA sense strand
auaaagaggcagaaaggga

SEQ ID NO: 2597974 - RNA, 19 nt, Homo sapiens
  misc_RNA (1)...(19): siRNA sense strand
gcccaaaccaagagaaugu

SEQ ID NO: 2597975 - RNA, 19 nt, Homo sapiens
  misc_RNA (1)...(19): siRNA sense strand
cuccaaaguugaagaaugu

SEQ ID NO: 2597976 - RNA, 19 nt, Homo sapiens
  misc_RNA (1)...(19): siRNA sense strand
uguagauaggauugacaaa

SEQ ID NO: 2597977 - RNA, 19 nt, Homo sapiens
  misc_RNA (1)...(19): siRNA sense strand
acuacaaucccaagccaaa

SEQ ID NO: 2597978 - RNA, 19 nt, Homo sapiens
  misc_RNA (1)...(19): siRNA sense strand
ggagugaagaaaacagaaa

SEQ ID NO: 2597979 - RNA, 19 nt, Homo sapiens
  misc_RNA (1)...(19): siRNA sense strand
auaaagaugaucaggacau

SEQ ID NO: 2597980 - RNA, 19 nt, Homo sapiens
  misc_RNA (1)...(19): siRNA sense strand
uaacaguuuugaugggaaa

SEQ ID NO: 2597981 - RNA, 19 nt, Homo sapiens
  misc_RNA (1)...(19): siRNA sense strand
aaauuuaaaucucgggcuu

SEQ ID NO: 2597982 - RNA, 19 nt, Homo sapiens
  misc_RNA (1)...(19): siRNA sense strand
aaagaggcagaaagggaua

SEQ ID NO: 2597983 - RNA, 19 nt, Homo sapiens
  misc_RNA (1)...(19): siRNA sense strand
aucagaaaccauagaguau

SEQ ID NO: 2597984 - RNA, 19 nt, Homo sapiens
  misc_RNA (1)...(19): siRNA sense strand
caaugguaguggagaguuc

SEQ ID NO: 2597985 - RNA, 19 nt, Homo sapiens
  misc_RNA (1)...(19): siRNA sense strand
agucagguauccacacaaa

SEQ ID NO: 2597986 - RNA, 19 nt, Homo sapiens
  misc_RNA (1)...(19): siRNA sense strand
gauacaagcaauggaaaga

SEQ ID NO: 2597987 - RNA, 19 nt, Homo sapiens
  misc_RNA (1)...(19): siRNA sense strand
gaaagaagguaguugacag

SEQ ID NO: 2597988 - RNA, 19 nt, Homo sapiens
  misc_RNA (1)...(19): siRNA sense strand
acacaaaaucugaagacuu

SEQ ID NO: 2597989 - RNA, 19 nt, Homo sapiens
  misc_RNA (1)...(19): siRNA sense strand
gccaaauugaaaaggguua

SEQ ID NO: 2597990 - RNA, 19 nt, Homo sapiens
  misc_RNA (1)...(19): siRNA sense strand
agauaagagucccugugaa

SEQ ID NO: 2597991 - RNA, 19 nt, Homo sapiens
  misc_RNA (1)...(19): siRNA sense strand
agagaacacagaagacaau

SEQ ID NO: 2597992 - RNA, 19 nt, Homo sapiens
  misc_RNA (1)...(19): siRNA sense strand
cacagaagacaauaugaaa

SEQ ID NO: 2597993 - RNA, 19 nt, Homo sapiens
  misc_RNA (1)...(19): siRNA sense strand
caucaguaccagaucaaaa

SEQ ID NO: 2597994 - RNA, 19 nt, Homo sapiens
  misc_RNA (1)...(19): siRNA sense strand
caaaugaaauuacacgaga

SEQ ID NO: 2597995 - RNA, 19 nt, Homo sapiens
  misc_RNA (1)...(19): siRNA sense strand
cagacgcagaagagaguau

SEQ ID NO: 2597996 - RNA, 19 nt, Homo sapiens
  misc_RNA (1)...(19): siRNA sense strand
ugcucuugcuguagugaaa

SEQ ID NO: 2597997 - RNA, 19 nt, Homo sapiens
  misc_RNA (1)...(19): siRNA sense strand
agauagaugaaaaggaaga

SEQ ID NO: 2597998 - RNA, 19 nt, Homo sapiens
  misc_RNA (1)...(19): siRNA sense strand
ugcuauaaguuacaaggaa

SEQ ID NO: 2597999 - RNA, 19 nt, Homo sapiens
  misc_RNA (1)...(19): siRNA sense strand
caauuugugcacaugguaa

SEQ ID NO: 2598000 - RNA, 19 nt, Homo sapiens
  misc_RNA (1)...(19): siRNA sense strand
gacaagagacacuggcaca

SEQ ID NO: 2598001 - RNA, 19 nt, Homo sapiens
  misc_RNA (1)...(19): siRNA sense strand
gugaagugccuaaaguuga

SEQ ID NO: 2598002 - RNA, 19 nt, Homo sapiens
  misc_RNA (1)...(19): siRNA sense strand
ccugaugaugccaugguua

SEQ ID NO: 2598003 - RNA, 19 nt, Homo sapiens
  misc_RNA (1)...(19): siRNA sense strand
cuccaaaagaacugacaaa

SEQ ID NO: 2598004 - RNA, 19 nt, Homo sapiens
  misc_RNA (1)...(19): siRNA sense strand
ggaaaauaacucugcacau

SEQ ID NO: 2598005 - RNA, 19 nt, Homo sapiens
  misc_RNA (1)...(19): siRNA sense strand
acuccaaaguugaagaaug

SEQ ID NO: 2598006 - RNA, 19 nt, Homo sapiens
  misc_RNA (1)...(19): siRNA sense strand
guucacaagauucuguaaa

SEQ ID NO: 2598007 - RNA, 19 nt, Homo sapiens
  misc_RNA (1)...(19): siRNA sense strand
guauaaagaugaucaggac

SEQ ID NO: 2598008 - RNA, 19 nt, Homo sapiens
  misc_RNA (1)...(19): siRNA sense strand
cagaauucccaaauaccaa

SEQ ID NO: 2598009 - RNA, 19 nt, Homo sapiens
  misc_RNA (1)...(19): siRNA sense strand
uggcaaugguaguggagag

SEQ ID NO: 2598010 - RNA, 19 nt, Homo sapiens
  misc_RNA (1)...(19): siRNA sense strand
ugggaaacaccaagaucau

SEQ ID NO: 2598011 - RNA, 19 nt, Homo sapiens
  misc_RNA (1)...(19): siRNA sense strand
cagaggaagggaagacuca

SEQ ID NO: 2598012 - RNA, 19 nt, Homo sapiens
  misc_RNA (1)...(19): siRNA sense strand
aaaucaauguagaaggugu

SEQ ID NO: 2598013 - RNA, 19 nt, Homo sapiens
  misc_RNA (1)...(19): siRNA sense strand
gggagaaguuucaugggaa

SEQ ID NO: 2598014 - RNA, 19 nt, Homo sapiens
  misc_RNA (1)...(19): siRNA sense strand
aggaggaggaggaggaaga

SEQ ID NO: 2598015 - RNA, 19 nt, Homo sapiens
  misc_RNA (1)...(19): siRNA sense strand
aggaggagguggaggacga

SEQ ID NO: 2598016 - RNA, 19 nt, Homo sapiens
  misc_RNA (1)...(19): siRNA sense strand
ggaaaugccggaagcgcua

SEQ ID NO: 2598017 - RNA, 19 nt, Homo sapiens
  misc_RNA (1)...(19): siRNA sense strand
aggaagaggaggaggugga

SEQ ID NO: 2598018 - RNA, 19 nt, Homo sapiens
  misc_RNA (1)...(19): siRNA sense strand
cagaagauaugaagcagga

SEQ ID NO: 2598019 - RNA, 19 nt, Homo sapiens
  misc_RNA (1)...(19): siRNA sense strand
ugaaggaggaggaggagga

SEQ ID NO: 2598020 - RNA, 19 nt, Homo sapiens
  misc_RNA (1)...(19): siRNA sense strand
aggaggaggaagaggagga

SEQ ID NO: 2598021 - RNA, 19 nt, Homo sapiens
  misc_RNA (1)...(19): siRNA sense strand
ggagaaguuucaugggaag

SEQ ID NO: 2598022 - RNA, 19 nt, Homo sapiens
  misc_RNA (1)...(19): siRNA sense strand
cccaagagccggaagcaga

SEQ ID NO: 2598023 - RNA, 19 nt, Homo sapiens
  misc_RNA (1)...(19): siRNA sense strand
aaaagauggccaagaacua

SEQ ID NO: 2598024 - RNA, 19 nt, Homo sapiens
  misc_RNA (1)...(19): siRNA sense strand
uggaggaccugaaggagga

SEQ ID NO: 2598025 - RNA, 19 nt, Homo sapiens
  misc_RNA (1)...(19): siRNA sense strand
aagaggaggagguggagga

SEQ ID NO: 2598026 - RNA, 19 nt, Homo sapiens
  misc_RNA (1)...(19): siRNA sense strand
uguacgggguaaagcaaaa

SEQ ID NO: 2598027 - RNA, 19 nt, Homo sapiens
  misc_RNA (1)...(19): siRNA sense strand
aggaagguguggagcugga

SEQ ID NO: 2598028 - RNA, 19 nt, Homo sapiens
  misc_RNA (1)...(19): siRNA sense strand
aggaggaggaggaagagga

SEQ ID NO: 2598029 - RNA, 19 nt, Homo sapiens
  misc_RNA (1)...(19): siRNA sense strand
cugugguggucgugcacua

SEQ ID NO: 2598030 - RNA, 19 nt, Homo sapiens
  misc_RNA (1)...(19): siRNA sense strand
ucauuuaccugaagcccaa

SEQ ID NO: 2598031 - RNA, 19 nt, Homo sapiens
  misc_RNA (1)...(19): siRNA sense strand
uggccaaaggcgugggcuu

SEQ ID NO: 2598032 - RNA, 19 nt, Homo sapiens
  misc_RNA (1)...(19): siRNA sense strand
ggagacaccuugaugggca

SEQ ID NO: 2598033 - RNA, 19 nt, Homo sapiens
  misc_RNA (1)...(19): siRNA sense strand
uguucacgcugcugggcaa

SEQ ID NO: 2598034 - RNA, 19 nt, Homo sapiens
  misc_RNA (1)...(19): siRNA sense strand
cuuaaaggcugaagcguca

SEQ ID NO: 2598035 - RNA, 19 nt, Homo sapiens
  misc_RNA (1)...(19): siRNA sense strand
gggacauauuugacaguga

SEQ ID NO: 2598036 - RNA, 19 nt, Homo sapiens
  misc_RNA (1)...(19): siRNA sense strand
gauuaauugccuaaggaau

SEQ ID NO: 2598037 - RNA, 19 nt, Homo sapiens
  misc_RNA (1)...(19): siRNA sense strand
acacauuccaccaggacaa

SEQ ID NO: 2598038 - RNA, 19 nt, Homo sapiens
  misc_RNA (1)...(19): siRNA sense strand
uggaagaagauaucaggaa

SEQ ID NO: 2598039 - RNA, 19 nt, Homo sapiens
  misc_RNA (1)...(19): siRNA sense strand
ggccagugcguuugggaau

SEQ ID NO: 2598040 - RNA, 19 nt, Homo sapiens
  misc_RNA (1)...(19): siRNA sense strand
gccuuaaaucagaagacaa

SEQ ID NO: 2598041 - RNA, 19 nt, Homo sapiens
  misc_RNA (1)...(19): siRNA sense strand
aggaaagauuaauugccua

SEQ ID NO: 2598042 - RNA, 19 nt, Homo sapiens
  misc_RNA (1)...(19): siRNA sense strand
gguaauuacauggaagcaa

SEQ ID NO: 2598043 - RNA, 19 nt, Homo sapiens
  misc_RNA (1)...(19): siRNA sense strand
cguuuaugguguuuccaaa

SEQ ID NO: 2598044 - RNA, 19 nt, Homo sapiens
  misc_RNA (1)...(19): siRNA sense strand
agaaaguuguagaggccca

SEQ ID NO: 2598045 - RNA, 19 nt, Homo sapiens
  misc_RNA (1)...(19): siRNA sense strand
ggaagaagauaucaggaag

SEQ ID NO: 2598046 - RNA, 19 nt, Homo sapiens
  misc_RNA (1)...(19): siRNA sense strand
guaucaggccagugcguuu

SEQ ID NO: 2598047 - RNA, 19 nt, Homo sapiens
  misc_RNA (1)...(19): siRNA sense strand
gcuguugguaccagacaaa

SEQ ID NO: 2598048 - RNA, 19 nt, Homo sapiens
  misc_RNA (1)...(19): siRNA sense strand
uuggaggaguguuggagua

SEQ ID NO: 2598049 - RNA, 19 nt, Homo sapiens
  misc_RNA (1)...(19): siRNA sense strand
gugaagagucccacugaca

SEQ ID NO: 2598050 - RNA, 19 nt, Homo sapiens
  misc_RNA (1)...(19): siRNA sense strand
cgauguugucuucgaaauu

SEQ ID NO: 2598051 - RNA, 19 nt, Homo sapiens
  misc_RNA (1)...(19): siRNA sense strand
cgaaauucaagguacgaca

SEQ ID NO: 2598052 - RNA, 19 nt, Homo sapiens
  misc_RNA (1)...(19): siRNA sense strand
guugaaagauucuggggau

SEQ ID NO: 2598053 - RNA, 19 nt, Homo sapiens
  misc_RNA (1)...(19): siRNA sense strand
ucgagaaaguuaaaugcau

SEQ ID NO: 2598054 - RNA, 19 nt, Homo sapiens
  misc_RNA (1)...(19): siRNA sense strand
gagcaugccaagcagggaa

SEQ ID NO: 2598055 - RNA, 19 nt, Homo sapiens
  misc_RNA (1)...(19): siRNA sense strand
cacagauggccgucgaaua

SEQ ID NO: 2598056 - RNA, 19 nt, Homo sapiens
  misc_RNA (1)...(19): siRNA sense strand
cgaauauguacuugaagca

SEQ ID NO: 2598057 - RNA, 19 nt, Homo sapiens
  misc_RNA (1)...(19): siRNA sense strand
guauauucacucccggaaa

SEQ ID NO: 2598058 - RNA, 19 nt, Homo sapiens
  misc_RNA (1)...(19): siRNA sense strand
agugggaagaauuggaaga

SEQ ID NO: 2598059 - RNA, 19 nt, Homo sapiens
  misc_RNA (1)...(19): siRNA sense strand
uaguacaacugaagggauc

SEQ ID NO: 2598060 - RNA, 19 nt, Homo sapiens
  misc_RNA (1)...(19): siRNA sense strand
ccgauguugucuucgaaau

SEQ ID NO: 2598061 - RNA, 19 nt, Homo sapiens
  misc_RNA (1)...(19): siRNA sense strand
acauggaagcaaagagugu

SEQ ID NO: 2598062 - RNA, 19 nt, Homo sapiens
  misc_RNA (1)...(19): siRNA sense strand
auccaugaaccuugauaua

SEQ ID NO: 2598063 - RNA, 19 nt, Homo sapiens
  misc_RNA (1)...(19): siRNA sense strand
ccaacuugcaaaagaacua

SEQ ID NO: 2598064 - RNA, 19 nt, Homo sapiens
  misc_RNA (1)...(19): siRNA sense strand
augucaagcugguggucca

SEQ ID NO: 2598065 - RNA, 19 nt, Homo sapiens
  misc_RNA (1)...(19): siRNA sense strand
ccuuaaaucagaagacaag

SEQ ID NO: 2598066 - RNA, 19 nt, Homo sapiens
  misc_RNA (1)...(19): siRNA sense strand
auucaggauuccaguauca

SEQ ID NO: 2598067 - RNA, 19 nt, Homo sapiens
  misc_RNA (1)...(19): siRNA sense strand
aguaauuauugcugcuguu

SEQ ID NO: 2598068 - RNA, 19 nt, Homo sapiens
  misc_RNA (1)...(19): siRNA sense strand
gggagaagcccucuggucu

SEQ ID NO: 2598069 - RNA, 19 nt, Homo sapiens
  misc_RNA (1)...(19): siRNA sense strand
uguccagacugcagcacau

SEQ ID NO: 2598070 - RNA, 19 nt, Homo sapiens
  misc_RNA (1)...(19): siRNA sense strand
agguggagguggagcguau

SEQ ID NO: 2598071 - RNA, 19 nt, Homo sapiens
  misc_RNA (1)...(19): siRNA sense strand
gggcugagguuguccggaa

SEQ ID NO: 2598072 - RNA, 19 nt, Homo sapiens
  misc_RNA (1)...(19): siRNA sense strand
aggaagacuuggaggcuca

SEQ ID NO: 2598073 - RNA, 19 nt, Homo sapiens
  misc_RNA (1)...(19): siRNA sense strand
ggacaaagccgcagaggug

SEQ ID NO: 2598074 - RNA, 19 nt, Homo sapiens
  misc_RNA (1)...(19): siRNA sense strand
aagaaaauauguuggggaa

SEQ ID NO: 2598075 - RNA, 19 nt, Homo sapiens
  misc_RNA (1)...(19): siRNA sense strand
caugggaacuggagcgaca

SEQ ID NO: 2598076 - RNA, 19 nt, Homo sapiens
  misc_RNA (1)...(19): siRNA sense strand
uggaagagguucagaggcu

SEQ ID NO: 2598077 - RNA, 19 nt, Homo sapiens
  misc_RNA (1)...(19): siRNA sense strand
aggcugagggcuuggagaa

SEQ ID NO: 2598078 - RNA, 19 nt, Homo sapiens
  misc_RNA (1)...(19): siRNA sense strand
gcaggaacucuacgggcaa

SEQ ID NO: 2598079 - RNA, 19 nt, Homo sapiens
  misc_RNA (1)...(19): siRNA sense strand
cagcagaagaugaggcuag

SEQ ID NO: 2598080 - RNA, 19 nt, Homo sapiens
  misc_RNA (1)...(19): siRNA sense strand
uuaagcagcugaagggaca

SEQ ID NO: 2598081 - RNA, 19 nt, Homo sapiens
  misc_RNA (1)...(19): siRNA sense strand
agaugaggcuagaggccca

SEQ ID NO: 2598082 - RNA, 19 nt, Homo sapiens
  misc_RNA (1)...(19): siRNA sense strand
cgggauguuuccagugaca

SEQ ID NO: 2598083 - RNA, 19 nt, Homo sapiens
  misc_RNA (1)...(19): siRNA sense strand
caggagcuagagagggaua

SEQ ID NO: 2598084 - RNA, 19 nt, Homo sapiens
  misc_RNA (1)...(19): siRNA sense strand
cccucauggugcagcuaaa

SEQ ID NO: 2598085 - RNA, 19 nt, Homo sapiens
  misc_RNA (1)...(19): siRNA sense strand
ugcaggagcuagagaggga

SEQ ID NO: 2598086 - RNA, 19 nt, Homo sapiens
  misc_RNA (1)...(19): siRNA sense strand
cuacuggauaagaagaaau

SEQ ID NO: 2598087 - RNA, 19 nt, Homo sapiens
  misc_RNA (1)...(19): siRNA sense strand
guuacaagcagcagcgacu

SEQ ID NO: 2598088 - RNA, 19 nt, Homo sapiens
  misc_RNA (1)...(19): siRNA sense strand
gggagcuggaagagguuca

SEQ ID NO: 2598089 - RNA, 19 nt, Homo sapiens
  misc_RNA (1)...(19): siRNA sense strand
ucucugaguagucuggaaa

SEQ ID NO: 2598090 - RNA, 19 nt, Homo sapiens
  misc_RNA (1)...(19): siRNA sense strand
cuucugagguccacagcca

SEQ ID NO: 2598091 - RNA, 19 nt, Homo sapiens
  misc_RNA (1)...(19): siRNA sense strand
agcuagagagggauaagaa

SEQ ID NO: 2598092 - RNA, 19 nt, Homo sapiens
  misc_RNA (1)...(19): siRNA sense strand
cgauggaggaggagacgca

SEQ ID NO: 2598093 - RNA, 19 nt, Homo sapiens
  misc_RNA (1)...(19): siRNA sense strand
ccuacauccaagcaagaaa

SEQ ID NO: 2598094 - RNA, 19 nt, Homo sapiens
  misc_RNA (1)...(19): siRNA sense strand
uggacagcguggaacggaa

SEQ ID NO: 2598095 - RNA, 19 nt, Homo sapiens
  misc_RNA (1)...(19): siRNA sense strand
ccaaaauccgugcugaaaa

SEQ ID NO: 2598096 - RNA, 19 nt, Homo sapiens
  misc_RNA (1)...(19): siRNA sense strand
ccgaggugaaggucagcaa

SEQ ID NO: 2598097 - RNA, 19 nt, Homo sapiens
  misc_RNA (1)...(19): siRNA sense strand
cgccaaaauccgugcugaa

SEQ ID NO: 2598098 - RNA, 19 nt, Homo sapiens
  misc_RNA (1)...(19): siRNA sense strand
gagaaacagaacaggaaaa

SEQ ID NO: 2598099 - RNA, 19 nt, Homo sapiens
  misc_RNA (1)...(19): siRNA sense strand
agugaaugcuugaugaaaa

SEQ ID NO: 2598100 - RNA, 19 nt, Homo sapiens
  misc_RNA (1)...(19): siRNA sense strand
ugaugauggcccaggaauu

SEQ ID NO: 2598101 - RNA, 19 nt, Homo sapiens
  misc_RNA (1)...(19): siRNA sense strand
gggacugugaccagggcaa

SEQ ID NO: 2598102 - RNA, 19 nt, Homo sapiens
  misc_RNA (1)...(19): siRNA sense strand
gcuacaagugauagucaau

SEQ ID NO: 2598103 - RNA, 19 nt, Homo sapiens
  misc_RNA (1)...(19): siRNA sense strand
cgacaguggcagugauaag

SEQ ID NO: 2598104 - RNA, 19 nt, Homo sapiens
  misc_RNA (1)...(19): siRNA sense strand
acacagagcaggaugccau

SEQ ID NO: 2598105 - RNA, 19 nt, Homo sapiens
  misc_RNA (1)...(19): siRNA sense strand
agacaugacuauugggcag

SEQ ID NO: 2598106 - RNA, 19 nt, Homo sapiens
  misc_RNA (1)...(19): siRNA sense strand
ugcaaguagaaguggagaa

SEQ ID NO: 2598107 - RNA, 19 nt, Homo sapiens
  misc_RNA (1)...(19): siRNA sense strand
augccaugcugguggacau

SEQ ID NO: 2598108 - RNA, 19 nt, Homo sapiens
  misc_RNA (1)...(19): siRNA sense strand
gggagcaggagguacggaa

SEQ ID NO: 2598109 - RNA, 19 nt, Homo sapiens
  misc_RNA (1)...(19): siRNA sense strand
aagaggaggacgagcgcga

SEQ ID NO: 2598110 - RNA, 19 nt, Homo sapiens
  misc_RNA (1)...(19): siRNA sense strand
cagugauuaccgagaggau

SEQ ID NO: 2598111 - RNA, 19 nt, Homo sapiens
  misc_RNA (1)...(19): siRNA sense strand
ggccaaaaugcaaguagaa

SEQ ID NO: 2598112 - RNA, 19 nt, Homo sapiens
  misc_RNA (1)...(19): siRNA sense strand
ugggauggaucuaggcagu

SEQ ID NO: 2598113 - RNA, 19 nt, Homo sapiens
  misc_RNA (1)...(19): siRNA sense strand
ugaaugaagaguuggucca

SEQ ID NO: 2598114 - RNA, 19 nt, Homo sapiens
  misc_RNA (1)...(19): siRNA sense strand
ccaaaaugcaaguagaagu

SEQ ID NO: 2598115 - RNA, 19 nt, Homo sapiens
  misc_RNA (1)...(19): siRNA sense strand
gggagaaagaagggaaaga

SEQ ID NO: 2598116 - RNA, 19 nt, Homo sapiens
  misc_RNA (1)...(19): siRNA sense strand
aaaacagaaaagagggaaa

SEQ ID NO: 2598117 - RNA, 19 nt, Homo sapiens
  misc_RNA (1)...(19): siRNA sense strand
agaguggaaucuugggcaa

SEQ ID NO: 2598118 - RNA, 19 nt, Homo sapiens
  misc_RNA (1)...(19): siRNA sense strand
aggagagauucuugauaca

SEQ ID NO: 2598119 - RNA, 19 nt, Homo sapiens
  misc_RNA (1)...(19): siRNA sense strand
ccagacugauaaaggaaaa

SEQ ID NO: 2598120 - RNA, 19 nt, Homo sapiens
  misc_RNA (1)...(19): siRNA sense strand
ggaaagaagccaaagagac

SEQ ID NO: 2598121 - RNA, 19 nt, Homo sapiens
  misc_RNA (1)...(19): siRNA sense strand
ugaugaugacauugaaaga

SEQ ID NO: 2598122 - RNA, 19 nt, Homo sapiens
  misc_RNA (1)...(19): siRNA sense strand
gugaccaagcagaguggaa

SEQ ID NO: 2598123 - RNA, 19 nt, Homo sapiens
  misc_RNA (1)...(19): siRNA sense strand
ugagagaggaaaacaguaa

SEQ ID NO: 2598124 - RNA, 19 nt, Homo sapiens
  misc_RNA (1)...(19): siRNA sense strand
agaagggaaagaagccaaa

SEQ ID NO: 2598125 - RNA, 19 nt, Homo sapiens
  misc_RNA (1)...(19): siRNA sense strand
acacaaggaaaaugaagaa

SEQ ID NO: 2598126 - RNA, 19 nt, Homo sapiens
  misc_RNA (1)...(19): siRNA sense strand
gaauaaaucuaaugcuccu

SEQ ID NO: 2598127 - RNA, 19 nt, Homo sapiens
  misc_RNA (1)...(19): siRNA sense strand
aagaagggaaagaagccaa

SEQ ID NO: 2598128 - RNA, 19 nt, Homo sapiens
  misc_RNA (1)...(19): siRNA sense strand
uugggagaaagaagggaaa

SEQ ID NO: 2598129 - RNA, 19 nt, Homo sapiens
  misc_RNA (1)...(19): siRNA sense strand
gaugacauugaaagagcaa

SEQ ID NO: 2598130 - RNA, 19 nt, Homo sapiens
  misc_RNA (1)...(19): siRNA sense strand
ucuccuaggaagcggguuu

SEQ ID NO: 2598131 - RNA, 19 nt, Homo sapiens
  misc_RNA (1)...(19): siRNA sense strand
gcugcaaagagcuuggauu

SEQ ID NO: 2598132 - RNA, 19 nt, Homo sapiens
  misc_RNA (1)...(19): siRNA sense strand
ucuaaugcuccuagugaga

SEQ ID NO: 2598133 - RNA, 19 nt, Homo sapiens
  misc_RNA (1)...(19): siRNA sense strand
caugcaaagcugggacuaa

SEQ ID NO: 2598134 - RNA, 19 nt, Homo sapiens
  misc_RNA (1)...(19): siRNA sense strand
agggaaacacuaagccaga

SEQ ID NO: 2598135 - RNA, 19 nt, Homo sapiens
  misc_RNA (1)...(19): siRNA sense strand
gcuccaugaaguaguguca

SEQ ID NO: 2598136 - RNA, 19 nt, Homo sapiens
  misc_RNA (1)...(19): siRNA sense strand
augaugaagaugaugauga

SEQ ID NO: 2598137 - RNA, 19 nt, Homo sapiens
  misc_RNA (1)...(19): siRNA sense strand
augaagaugaugaugacau

SEQ ID NO: 2598138 - RNA, 19 nt, Homo sapiens
  misc_RNA (1)...(19): siRNA sense strand
cuugggagaaagaagggaa

SEQ ID NO: 2598139 - RNA, 19 nt, Homo sapiens
  misc_RNA (1)...(19): siRNA sense strand
uaaugcuccuagugagaau

SEQ ID NO: 2598140 - RNA, 19 nt, Homo sapiens
  misc_RNA (1)...(19): siRNA sense strand
ccagauugaugcagccaga

SEQ ID NO: 2598141 - RNA, 19 nt, Homo sapiens
  misc_RNA (1)...(19): siRNA sense strand
gaucgacagugcaggacga

SEQ ID NO: 2598142 - RNA, 19 nt, Homo sapiens
  misc_RNA (1)...(19): siRNA sense strand
aggcuguguuagagggugu

SEQ ID NO: 2598143 - RNA, 19 nt, Homo sapiens
  misc_RNA (1)...(19): siRNA sense strand
gcauuuagguaccagcuca

SEQ ID NO: 2598144 - RNA, 19 nt, Homo sapiens
  misc_RNA (1)...(19): siRNA sense strand
uggaguaucccuauggaga

SEQ ID NO: 2598145 - RNA, 19 nt, Homo sapiens
  misc_RNA (1)...(19): siRNA sense strand
aggaagaggaagagaguga

SEQ ID NO: 2598146 - RNA, 19 nt, Homo sapiens
  misc_RNA (1)...(19): siRNA sense strand
agaucauaguggagguaaa

SEQ ID NO: 2598147 - RNA, 19 nt, Homo sapiens
  misc_RNA (1)...(19): siRNA sense strand
aggaagagagugaggaaga

SEQ ID NO: 2598148 - RNA, 19 nt, Homo sapiens
  misc_RNA (1)...(19): siRNA sense strand
agcuaagugugaagagaaa

SEQ ID NO: 2598149 - RNA, 19 nt, Homo sapiens
  misc_RNA (1)...(19): siRNA sense strand
gagaagugcuuucggguga

SEQ ID NO: 2598150 - RNA, 19 nt, Homo sapiens
  misc_RNA (1)...(19): siRNA sense strand
gugaggaggaagaggaaga

SEQ ID NO: 2598151 - RNA, 19 nt, Homo sapiens
  misc_RNA (1)...(19): siRNA sense strand
cugugaaaucuguggcaaa

SEQ ID NO: 2598152 - RNA, 19 nt, Homo sapiens
  misc_RNA (1)...(19): siRNA sense strand
agaagauaguagagaaagu

SEQ ID NO: 2598153 - RNA, 19 nt, Homo sapiens
  misc_RNA (1)...(19): siRNA sense strand
gugaaauuugugagaagaa

SEQ ID NO: 2598154 - RNA, 19 nt, Homo sapiens
  misc_RNA (1)...(19): siRNA sense strand
cagccauauuucagggaga

SEQ ID NO: 2598155 - RNA, 19 nt, Homo sapiens
  misc_RNA (1)...(19): siRNA sense strand
augcgaaaccuguggaaaa

SEQ ID NO: 2598156 - RNA, 19 nt, Homo sapiens
  misc_RNA (1)...(19): siRNA sense strand
agaggaagagagugaggaa

SEQ ID NO: 2598157 - RNA, 19 nt, Homo sapiens
  misc_RNA (1)...(19): siRNA sense strand
aggaauggcacaagaagau

SEQ ID NO: 2598158 - RNA, 19 nt, Homo sapiens
  misc_RNA (1)...(19): siRNA sense strand
acaagaggucguaggaaga

SEQ ID NO: 2598159 - RNA, 19 nt, Homo sapiens
  misc_RNA (1)...(19): siRNA sense strand
gagaagugccccaggguau

SEQ ID NO: 2598160 - RNA, 19 nt, Homo sapiens
  misc_RNA (1)...(19): siRNA sense strand
agauagccgucguggucaa

SEQ ID NO: 2598161 - RNA, 19 nt, Homo sapiens
  misc_RNA (1)...(19): siRNA sense strand
acacagaggaggaagagga

SEQ ID NO: 2598162 - RNA, 19 nt, Homo sapiens
  misc_RNA (1)...(19): siRNA sense strand
uaggaagaguguagagcca

SEQ ID NO: 2598163 - RNA, 19 nt, Homo sapiens
  misc_RNA (1)...(19): siRNA sense strand
cugugaaauuugugagaag

SEQ ID NO: 2598164 - RNA, 19 nt, Homo sapiens
  misc_RNA (1)...(19): siRNA sense strand
ggaaacacaugguugcaca

SEQ ID NO: 2598165 - RNA, 19 nt, Homo sapiens
  misc_RNA (1)...(19): siRNA sense strand
cgaacaugcuuaaggccca

SEQ ID NO: 2598166 - RNA, 19 nt, Homo sapiens
  misc_RNA (1)...(19): siRNA sense strand
aagcuaagugugaagagaa

SEQ ID NO: 2598167 - RNA, 19 nt, Homo sapiens
  misc_RNA (1)...(19): siRNA sense strand
cuaagugugaagagaaaga

SEQ ID NO: 2598168 - RNA, 19 nt, Homo sapiens
  misc_RNA (1)...(19): siRNA sense strand
cgugcaugcuguuaaggaa

SEQ ID NO: 2598169 - RNA, 19 nt, Homo sapiens
  misc_RNA (1)...(19): siRNA sense strand
caggaauggcacaagaaga

SEQ ID NO: 2598170 - RNA, 19 nt, Homo sapiens
  misc_RNA (1)...(19): siRNA sense strand
cagugaggaggaagaggaa

SEQ ID NO: 2598171 - RNA, 19 nt, Homo sapiens
  misc_RNA (1)...(19): siRNA sense strand
aggaagaccgggagaauuc

SEQ ID NO: 2598172 - RNA, 19 nt, Homo sapiens
  misc_RNA (1)...(19): siRNA sense strand
aaauguaucuaaaggggaa

SEQ ID NO: 2598173 - RNA, 19 nt, Homo sapiens
  misc_RNA (1)...(19): siRNA sense strand
gacuauggagagaaugaaa

SEQ ID NO: 2598174 - RNA, 19 nt, Homo sapiens
  misc_RNA (1)...(19): siRNA sense strand
agagaaagucagcguuaca

SEQ ID NO: 2598175 - RNA, 19 nt, Homo sapiens
  misc_RNA (1)...(19): siRNA sense strand
gcaagaaguuuguccugga

SEQ ID NO: 2598176 - RNA, 19 nt, Homo sapiens
  misc_RNA (1)...(19): siRNA sense strand
agacaagcagugaggagga

SEQ ID NO: 2598177 - RNA, 19 nt, Homo sapiens
  misc_RNA (1)...(19): siRNA sense strand
ggucguaggaagaguguag

SEQ ID NO: 2598178 - RNA, 19 nt, Homo sapiens
  misc_RNA (1)...(19): siRNA sense strand
acucauaggcgcaugcaga

SEQ ID NO: 2598179 - RNA, 19 nt, Homo sapiens
  misc_RNA (1)...(19): siRNA sense strand
agaaugaaaagcagaagaa

SEQ ID NO: 2598180 - RNA, 19 nt, Homo sapiens
  misc_RNA (1)...(19): siRNA sense strand
cguccauggauaugcagaa

SEQ ID NO: 2598181 - RNA, 19 nt, Homo sapiens
  misc_RNA (1)...(19): siRNA sense strand
acacaaaagacaugccauu

SEQ ID NO: 2598182 - RNA, 19 nt, Homo sapiens
  misc_RNA (1)...(19): siRNA sense strand
acaaacaguucaugugcca

SEQ ID NO: 2598183 - RNA, 19 nt, Homo sapiens
  misc_RNA (1)...(19): siRNA sense strand
caagcagugaggaggaaga

SEQ ID NO: 2598184 - RNA, 19 nt, Homo sapiens
  misc_RNA (1)...(19): siRNA sense strand
acacaaaggagaaccagga

SEQ ID NO: 2598185 - RNA, 19 nt, Homo sapiens
  misc_RNA (1)...(19): siRNA sense strand
uggauaugcagaaaagaaa

SEQ ID NO: 2598186 - RNA, 19 nt, Homo sapiens
  misc_RNA (1)...(19): siRNA sense strand
gcagugaggaggaagagga

SEQ ID NO: 2598187 - RNA, 19 nt, Homo sapiens
  misc_RNA (1)...(19): siRNA sense strand
gugugaagagaaagagacu

SEQ ID NO: 2598188 - RNA, 19 nt, Homo sapiens
  misc_RNA (1)...(19): siRNA sense strand
augaagagacaccgcagaa

SEQ ID NO: 2598189 - RNA, 19 nt, Homo sapiens
  misc_RNA (1)...(19): siRNA sense strand
aggaggaagaggaagaagu

SEQ ID NO: 2598190 - RNA, 19 nt, Homo sapiens
  misc_RNA (1)...(19): siRNA sense strand
gcauguagcaggaauggca

SEQ ID NO: 2598191 - RNA, 19 nt, Homo sapiens
  misc_RNA (1)...(19): siRNA sense strand
gagagaaugaaaagcagaa

SEQ ID NO: 2598192 - RNA, 19 nt, Homo sapiens
  misc_RNA (1)...(19): siRNA sense strand
gaggccagagugaggacaa

SEQ ID NO: 2598193 - RNA, 19 nt, Homo sapiens
  misc_RNA (1)...(19): siRNA sense strand
cagcguuacacaaaggaga

SEQ ID NO: 2598194 - RNA, 19 nt, Homo sapiens
  misc_RNA (1)...(19): siRNA sense strand
gauaaauguggcaagaagu

SEQ ID NO: 2598195 - RNA, 19 nt, Homo sapiens
  misc_RNA (1)...(19): siRNA sense strand
auucaaacgcaguauguca

SEQ ID NO: 2598196 - RNA, 19 nt, Homo sapiens
  misc_RNA (1)...(19): siRNA sense strand
gagcauucauauugggcac

SEQ ID NO: 2598197 - RNA, 19 nt, Homo sapiens
  misc_RNA (1)...(19): siRNA sense strand
ccaugaaacagaagaacag

SEQ ID NO: 2598198 - RNA, 19 nt, Homo sapiens
  misc_RNA (1)...(19): siRNA sense strand
cugaugacacagaggagga

SEQ ID NO: 2598199 - RNA, 19 nt, Homo sapiens
  misc_RNA (1)...(19): siRNA sense strand
augacuauggagagaauga

SEQ ID NO: 2598200 - RNA, 19 nt, Homo sapiens
  misc_RNA (1)...(19): siRNA sense strand
cuuaaggcccacaaggaga

SEQ ID NO: 2598201 - RNA, 19 nt, Homo sapiens
  misc_RNA (1)...(19): siRNA sense strand
ucuccaugaaacagaagaa

SEQ ID NO: 2598202 - RNA, 19 nt, Homo sapiens
  misc_RNA (1)...(19): siRNA sense strand
aguuuguccuggaaaguga

SEQ ID NO: 2598203 - RNA, 19 nt, Homo sapiens
  misc_RNA (1)...(19): siRNA sense strand
guuaaggaagaccgggaga

SEQ ID NO: 2598204 - RNA, 19 nt, Homo sapiens
  misc_RNA (1)...(19): siRNA sense strand
uaaggaagaccgggagaau

SEQ ID NO: 2598205 - RNA, 19 nt, Homo sapiens
  misc_RNA (1)...(19): siRNA sense strand
agcaaugacuauggagaga

SEQ ID NO: 2598206 - RNA, 19 nt, Homo sapiens
  misc_RNA (1)...(19): siRNA sense strand
ggaauagggcacagccaca

SEQ ID NO: 2598207 - RNA, 19 nt, Homo sapiens
  misc_RNA (1)...(19): siRNA sense strand
uguuaauuucucagaggaa

SEQ ID NO: 2598208 - RNA, 19 nt, Homo sapiens
  misc_RNA (1)...(19): siRNA sense strand
cagacaaagcagcagaaaa

SEQ ID NO: 2598209 - RNA, 19 nt, Homo sapiens
  misc_RNA (1)...(19): siRNA sense strand
acacacagcugcaugccua

SEQ ID NO: 2598210 - RNA, 19 nt, Homo sapiens
  misc_RNA (1)...(19): siRNA sense strand
uggcuauguuggugggaug

SEQ ID NO: 2598211 - RNA, 19 nt, Homo sapiens
  misc_RNA (1)...(19): siRNA sense strand
ugaaagaagaauugaggaa

SEQ ID NO: 2598212 - RNA, 19 nt, Homo sapiens
  misc_RNA (1)...(19): siRNA sense strand
cagcaaaucagaauggaaa

SEQ ID NO: 2598213 - RNA, 19 nt, Homo sapiens
  misc_RNA (1)...(19): siRNA sense strand
aagaaaggcaagaagguaa

SEQ ID NO: 2598214 - RNA, 19 nt, Homo sapiens
  misc_RNA (1)...(19): siRNA sense strand
gugaaggacuagaagaaau

SEQ ID NO: 2598215 - RNA, 19 nt, Homo sapiens
  misc_RNA (1)...(19): siRNA sense strand
gaggagaagcggaagcaaa

SEQ ID NO: 2598216 - RNA, 19 nt, Homo sapiens
  misc_RNA (1)...(19): siRNA sense strand
ugauaaagaccaagaugaa

SEQ ID NO: 2598217 - RNA, 19 nt, Homo sapiens
  misc_RNA (1)...(19): siRNA sense strand
cagagagagacaagaauaa

SEQ ID NO: 2598218 - RNA, 19 nt, Homo sapiens
  misc_RNA (1)...(19): siRNA sense strand
cagaaaguguccagaucaa

SEQ ID NO: 2598219 - RNA, 19 nt, Homo sapiens
  misc_RNA (1)...(19): siRNA sense strand
ggaacaauucagaggaaca

SEQ ID NO: 2598220 - RNA, 19 nt, Homo sapiens
  misc_RNA (1)...(19): siRNA sense strand
ggaaggucguagaggaaga

SEQ ID NO: 2598221 - RNA, 19 nt, Homo sapiens
  misc_RNA (1)...(19): siRNA sense strand
gcugaauguuggugugaau

SEQ ID NO: 2598222 - RNA, 19 nt, Homo sapiens
  misc_RNA (1)...(19): siRNA sense strand
cgagaaacgaauaaaggaa

SEQ ID NO: 2598223 - RNA, 19 nt, Homo sapiens
  misc_RNA (1)...(19): siRNA sense strand
cgacaagaacauugauuau

SEQ ID NO: 2598224 - RNA, 19 nt, Homo sapiens
  misc_RNA (1)...(19): siRNA sense strand
gagaaaaggcauuacaaaa

SEQ ID NO: 2598225 - RNA, 19 nt, Homo sapiens
  misc_RNA (1)...(19): siRNA sense strand
gaucagaagaagaagauga

SEQ ID NO: 2598226 - RNA, 19 nt, Homo sapiens
  misc_RNA (1)...(19): siRNA sense strand
aggaagaaagcaauggaaa

SEQ ID NO: 2598227 - RNA, 19 nt, Homo sapiens
  misc_RNA (1)...(19): siRNA sense strand
ggaaagaaacuuaggcagu

SEQ ID NO: 2598228 - RNA, 19 nt, Homo sapiens
  misc_RNA (1)...(19): siRNA sense strand
acaacgagcaagagaggaa

SEQ ID NO: 2598229 - RNA, 19 nt, Homo sapiens
  misc_RNA (1)...(19): siRNA sense strand
agacaauguuuccgagauu

SEQ ID NO: 2598230 - RNA, 19 nt, Homo sapiens
  misc_RNA (1)...(19): siRNA sense strand
agaaaugagaagacaacaa

SEQ ID NO: 2598231 - RNA, 19 nt, Homo sapiens
  misc_RNA (1)...(19): siRNA sense strand
gcagauggacagaaagcaa

SEQ ID NO: 2598232 - RNA, 19 nt, Homo sapiens
  misc_RNA (1)...(19): siRNA sense strand
caucacaguuaaagaaaca

SEQ ID NO: 2598233 - RNA, 19 nt, Homo sapiens
  misc_RNA (1)...(19): siRNA sense strand
ugauacugaaggagagaaa

SEQ ID NO: 2598234 - RNA, 19 nt, Homo sapiens
  misc_RNA (1)...(19): siRNA sense strand
gagugaagcacaacauaaa

SEQ ID NO: 2598235 - RNA, 19 nt, Homo sapiens
  misc_RNA (1)...(19): siRNA sense strand
cagaagaagaagaugauga

SEQ ID NO: 2598236 - RNA, 19 nt, Homo sapiens
  misc_RNA (1)...(19): siRNA sense strand
ccagauagacaacgagcaa

SEQ ID NO: 2598237 - RNA, 19 nt, Homo sapiens
  misc_RNA (1)...(19): siRNA sense strand
gggaggagacagugauuau

SEQ ID NO: 2598238 - RNA, 19 nt, Homo sapiens
  misc_RNA (1)...(19): siRNA sense strand
aggaggaaucugugaacaa

SEQ ID NO: 2598239 - RNA, 19 nt, Homo sapiens
  misc_RNA (1)...(19): siRNA sense strand
ugaagaagaagaugaggaa

SEQ ID NO: 2598240 - RNA, 19 nt, Homo sapiens
  misc_RNA (1)...(19): siRNA sense strand
agcaaauucuagaggcuaa

SEQ ID NO: 2598241 - RNA, 19 nt, Homo sapiens
  misc_RNA (1)...(19): siRNA sense strand
uggugaaggacuagaagaa

SEQ ID NO: 2598242 - RNA, 19 nt, Homo sapiens
  misc_RNA (1)...(19): siRNA sense strand
gcaaggagcaugauggaga

SEQ ID NO: 2598243 - RNA, 19 nt, Homo sapiens
  misc_RNA (1)...(19): siRNA sense strand
aaaccaaggaagaaagcaa

SEQ ID NO: 2598244 - RNA, 19 nt, Homo sapiens
  misc_RNA (1)...(19): siRNA sense strand
ugaagaaagugaagaugau

SEQ ID NO: 2598245 - RNA, 19 nt, Homo sapiens
  misc_RNA (1)...(19): siRNA sense strand
guuaaagaaacaagaguca

SEQ ID NO: 2598246 - RNA, 19 nt, Homo sapiens
  misc_RNA (1)...(19): siRNA sense strand
ugaagaagaagaagaucaa

SEQ ID NO: 2598247 - RNA, 19 nt, Homo sapiens
  misc_RNA (1)...(19): siRNA sense strand
agaaggaagaagcggcaaa

SEQ ID NO: 2598248 - RNA, 19 nt, Homo sapiens
  misc_RNA (1)...(19): siRNA sense strand
uagaagaagaugaagaaga

SEQ ID NO: 2598249 - RNA, 19 nt, Homo sapiens
  misc_RNA (1)...(19): siRNA sense strand
aguacaagugggagaagaa

SEQ ID NO: 2598250 - RNA, 19 nt, Homo sapiens
  misc_RNA (1)...(19): siRNA sense strand
aaaugaggaugaagaggaa

SEQ ID NO: 2598251 - RNA, 19 nt, Homo sapiens
  misc_RNA (1)...(19): siRNA sense strand
caggaugagacgucggaaa

SEQ ID NO: 2598252 - RNA, 19 nt, Homo sapiens
  misc_RNA (1)...(19): siRNA sense strand
caacagagucaguacagaa

SEQ ID NO: 2598253 - RNA, 19 nt, Homo sapiens
  misc_RNA (1)...(19): siRNA sense strand
aagcucagguggaggaaau

SEQ ID NO: 2598254 - RNA, 19 nt, Homo sapiens
  misc_RNA (1)...(19): siRNA sense strand
aggaacagauucagacauu

SEQ ID NO: 2598255 - RNA, 19 nt, Homo sapiens
  misc_RNA (1)...(19): siRNA sense strand
uggcaaaggaacuaaagaa

SEQ ID NO: 2598256 - RNA, 19 nt, Homo sapiens
  misc_RNA (1)...(19): siRNA sense strand
aggagauacugaagaugaa

SEQ ID NO: 2598257 - RNA, 19 nt, Homo sapiens
  misc_RNA (1)...(19): siRNA sense strand
uuccacaauuagagagaaa

SEQ ID NO: 2598258 - RNA, 19 nt, Homo sapiens
  misc_RNA (1)...(19): siRNA sense strand
auggaaaguucuagcaaca

SEQ ID NO: 2598259 - RNA, 19 nt, Homo sapiens
  misc_RNA (1)...(19): siRNA sense strand
aaacuaaaaugcagagcaa

SEQ ID NO: 2598260 - RNA, 19 nt, Homo sapiens
  misc_RNA (1)...(19): siRNA sense strand
caguuugguugguggagaa

SEQ ID NO: 2598261 - RNA, 19 nt, Homo sapiens
  misc_RNA (1)...(19): siRNA sense strand
caucagaaagggaggacuu

SEQ ID NO: 2598262 - RNA, 19 nt, Homo sapiens
  misc_RNA (1)...(19): siRNA sense strand
agacauucccaguaguaaa

SEQ ID NO: 2598263 - RNA, 19 nt, Homo sapiens
  misc_RNA (1)...(19): siRNA sense strand
aaacuugaggagagauaaa

SEQ ID NO: 2598264 - RNA, 19 nt, Homo sapiens
  misc_RNA (1)...(19): siRNA sense strand
aagaagaguaacagaugaa

SEQ ID NO: 2598265 - RNA, 19 nt, Homo sapiens
  misc_RNA (1)...(19): siRNA sense strand
ggaagaaagcaauggaaag

SEQ ID NO: 2598266 - RNA, 19 nt, Homo sapiens
  misc_RNA (1)...(19): siRNA sense strand
gagauaaaugggugguaga

SEQ ID NO: 2598267 - RNA, 19 nt, Homo sapiens
  misc_RNA (1)...(19): siRNA sense strand
caacaaucccagauggaga

SEQ ID NO: 2598268 - RNA, 19 nt, Homo sapiens
  misc_RNA (1)...(19): siRNA sense strand
ggacaaacuaaaaguacaa

SEQ ID NO: 2598269 - RNA, 19 nt, Homo sapiens
  misc_RNA (1)...(19): siRNA sense strand
guggaacaauucagaggaa

SEQ ID NO: 2598270 - RNA, 19 nt, Homo sapiens
  misc_RNA (1)...(19): siRNA sense strand
aggaagaugaugaagaaga

SEQ ID NO: 2598271 - RNA, 19 nt, Homo sapiens
  misc_RNA (1)...(19): siRNA sense strand
agauagacaacgagcaaga

SEQ ID NO: 2598272 - RNA, 19 nt, Homo sapiens
  misc_RNA (1)...(19): siRNA sense strand
caaaagaagaagaguaaca

SEQ ID NO: 2598273 - RNA, 19 nt, Homo sapiens
  misc_RNA (1)...(19): siRNA sense strand
gagauggaccgcaggaaau

SEQ ID NO: 2598274 - RNA, 19 nt, Homo sapiens
  misc_RNA (1)...(19): siRNA sense strand
aagccugccucaagaauaa

SEQ ID NO: 2598275 - RNA, 19 nt, Homo sapiens
  misc_RNA (1)...(19): siRNA sense strand
aguucuagcaacagugaua

SEQ ID NO: 2598276 - RNA, 19 nt, Homo sapiens
  misc_RNA (1)...(19): siRNA sense strand
augaagaugaugaggauga

SEQ ID NO: 2598277 - RNA, 19 nt, Homo sapiens
  misc_RNA (1)...(19): siRNA sense strand
aagaacaagcaauggaaau

SEQ ID NO: 2598278 - RNA, 19 nt, Homo sapiens
  misc_RNA (1)...(19): siRNA sense strand
auuaagaagccuauggauu

SEQ ID NO: 2598279 - RNA, 19 nt, Homo sapiens
  misc_RNA (1)...(19): siRNA sense strand
agaaaguggccgaaagaaa

SEQ ID NO: 2598280 - RNA, 19 nt, Homo sapiens
  misc_RNA (1)...(19): siRNA sense strand
ucagagagaaauagagaaa

SEQ ID NO: 2598281 - RNA, 19 nt, Homo sapiens
  misc_RNA (1)...(19): siRNA sense strand
uagaagaacaagaggagaa

SEQ ID NO: 2598282 - RNA, 19 nt, Homo sapiens
  misc_RNA (1)...(19): siRNA sense strand
cagaaaugacugagaauga

SEQ ID NO: 2598283 - RNA, 19 nt, Homo sapiens
  misc_RNA (1)...(19): siRNA sense strand
ggaaaugagacaugcacaa

SEQ ID NO: 2598284 - RNA, 19 nt, Homo sapiens
  misc_RNA (1)...(19): siRNA sense strand
acaaaugagaguauggaaa

SEQ ID NO: 2598285 - RNA, 19 nt, Homo sapiens
  misc_RNA (1)...(19): siRNA sense strand
ggagaaagaacuagaaaau

SEQ ID NO: 2598286 - RNA, 19 nt, Homo sapiens
  misc_RNA (1)...(19): siRNA sense strand
agaacaaggagaagaaauu

SEQ ID NO: 2598287 - RNA, 19 nt, Homo sapiens
  misc_RNA (1)...(19): siRNA sense strand
ccaaaguagcugaacuaaa

SEQ ID NO: 2598288 - RNA, 19 nt, Homo sapiens
  misc_RNA (1)...(19): siRNA sense strand
cuaaagaaacaacaggaaa

SEQ ID NO: 2598289 - RNA, 19 nt, Homo sapiens
  misc_RNA (1)...(19): siRNA sense strand
aagcugaucuggagggcaa

SEQ ID NO: 2598290 - RNA, 19 nt, Homo sapiens
  misc_RNA (1)...(19): siRNA sense strand
ccaaaaugcaguagaaaau

SEQ ID NO: 2598291 - RNA, 19 nt, Homo sapiens
  misc_RNA (1)...(19): siRNA sense strand
uaucaagagcucagugaaa

SEQ ID NO: 2598292 - RNA, 19 nt, Homo sapiens
  misc_RNA (1)...(19): siRNA sense strand
agagagaaauagagaaacu

SEQ ID NO: 2598293 - RNA, 19 nt, Homo sapiens
  misc_RNA (1)...(19): siRNA sense strand
gugagaacaaggagaagaa

SEQ ID NO: 2598294 - RNA, 19 nt, Homo sapiens
  misc_RNA (1)...(19): siRNA sense strand
gagaaugaaaugacaggaa

SEQ ID NO: 2598295 - RNA, 19 nt, Homo sapiens
  misc_RNA (1)...(19): siRNA sense strand
ggacacauuagaagaacaa

SEQ ID NO: 2598296 - RNA, 19 nt, Homo sapiens
  misc_RNA (1)...(19): siRNA sense strand
gagaagcaaaugaggaaau

SEQ ID NO: 2598297 - RNA, 19 nt, Homo sapiens
  misc_RNA (1)...(19): siRNA sense strand
gagaauuccaaaucagaaa

SEQ ID NO: 2598298 - RNA, 19 nt, Homo sapiens
  misc_RNA (1)...(19): siRNA sense strand
aagaacaagaggagaaaga

SEQ ID NO: 2598299 - RNA, 19 nt, Homo sapiens
  misc_RNA (1)...(19): siRNA sense strand
ccaaacaggaagaagaaaa

SEQ ID NO: 2598300 - RNA, 19 nt, Homo sapiens
  misc_RNA (1)...(19): siRNA sense strand
guuggaagaacuaaagaaa

SEQ ID NO: 2598301 - RNA, 19 nt, Homo sapiens
  misc_RNA (1)...(19): siRNA sense strand
caaacuugagauugagaaa

SEQ ID NO: 2598302 - RNA, 19 nt, Homo sapiens
  misc_RNA (1)...(19): siRNA sense strand
cggcagaagauacgcuuaa

SEQ ID NO: 2598303 - RNA, 19 nt, Homo sapiens
  misc_RNA (1)...(19): siRNA sense strand
caguggaauuuauggagaa

SEQ ID NO: 2598304 - RNA, 19 nt, Homo sapiens
  misc_RNA (1)...(19): siRNA sense strand
cucaaagggcagagaggaa

SEQ ID NO: 2598305 - RNA, 19 nt, Homo sapiens
  misc_RNA (1)...(19): siRNA sense strand
gagaacaaggagaagaaau

SEQ ID NO: 2598306 - RNA, 19 nt, Homo sapiens
  misc_RNA (1)...(19): siRNA sense strand
caguagaggagcugaugaa

SEQ ID NO: 2598307 - RNA, 19 nt, Homo sapiens
  misc_RNA (1)...(19): siRNA sense strand
augaagaacuggcugcaaa

SEQ ID NO: 2598308 - RNA, 19 nt, Homo sapiens
  misc_RNA (1)...(19): siRNA sense strand
ccaaaagggcaaagaaaga

SEQ ID NO: 2598309 - RNA, 19 nt, Homo sapiens
  misc_RNA (1)...(19): siRNA sense strand
aguaagacucaaugaagaa

SEQ ID NO: 2598310 - RNA, 19 nt, Homo sapiens
  misc_RNA (1)...(19): siRNA sense strand
cuucagaggacauuauaaa

SEQ ID NO: 2598311 - RNA, 19 nt, Homo sapiens
  misc_RNA (1)...(19): siRNA sense strand
uagagaagcaaaugaggaa

SEQ ID NO: 2598312 - RNA, 19 nt, Homo sapiens
  misc_RNA (1)...(19): siRNA sense strand
ccgaaauagacguucuuaa

SEQ ID NO: 2598313 - RNA, 19 nt, Homo sapiens
  misc_RNA (1)...(19): siRNA sense strand
gaaugaaaugacaggaaca

SEQ ID NO: 2598314 - RNA, 19 nt, Homo sapiens
  misc_RNA (1)...(19): siRNA sense strand
ggauuauaugcgucaguua

SEQ ID NO: 2598315 - RNA, 19 nt, Homo sapiens
  misc_RNA (1)...(19): siRNA sense strand
cggauggcacagaaagaaa

SEQ ID NO: 2598316 - RNA, 19 nt, Homo sapiens
  misc_RNA (1)...(19): siRNA sense strand
aauuaaagcccuagagaag

SEQ ID NO: 2598317 - RNA, 19 nt, Homo sapiens
  misc_RNA (1)...(19): siRNA sense strand
aguaguagaaacugagcaa

SEQ ID NO: 2598318 - RNA, 19 nt, Homo sapiens
  misc_RNA (1)...(19): siRNA sense strand
uaguagaaacugagcaaaa

SEQ ID NO: 2598319 - RNA, 19 nt, Homo sapiens
  misc_RNA (1)...(19): siRNA sense strand
augaagaacuggcagaaaa

SEQ ID NO: 2598320 - RNA, 19 nt, Homo sapiens
  misc_RNA (1)...(19): siRNA sense strand
auucagagcccacaagaaa

SEQ ID NO: 2598321 - RNA, 19 nt, Homo sapiens
  misc_RNA (1)...(19): siRNA sense strand
gagcucaggcuauggcaaa

SEQ ID NO: 2598322 - RNA, 19 nt, Homo sapiens
  misc_RNA (1)...(19): siRNA sense strand
cugauagcuuagaaacaaa

SEQ ID NO: 2598323 - RNA, 19 nt, Homo sapiens
  misc_RNA (1)...(19): siRNA sense strand
gcccaaacaggaagaagaa

SEQ ID NO: 2598324 - RNA, 19 nt, Homo sapiens
  misc_RNA (1)...(19): siRNA sense strand
ggagaugaagacaaacaaa

SEQ ID NO: 2598325 - RNA, 19 nt, Homo sapiens
  misc_RNA (1)...(19): siRNA sense strand
aauacaagaacaagagaca

SEQ ID NO: 2598326 - RNA, 19 nt, Homo sapiens
  misc_RNA (1)...(19): siRNA sense strand
agaaaucagucgucugcaa

SEQ ID NO: 2598327 - RNA, 19 nt, Homo sapiens
  misc_RNA (1)...(19): siRNA sense strand
gccaaaaugcaguagaaaa

SEQ ID NO: 2598328 - RNA, 19 nt, Homo sapiens
  misc_RNA (1)...(19): siRNA sense strand
cugaauuagacgucaagaa

SEQ ID NO: 2598329 - RNA, 19 nt, Homo sapiens
  misc_RNA (1)...(19): siRNA sense strand
aaaaugagcuagaaggauu

SEQ ID NO: 2598330 - RNA, 19 nt, Homo sapiens
  misc_RNA (1)...(19): siRNA sense strand
agaauugagagaagccaaa

SEQ ID NO: 2598331 - RNA, 19 nt, Homo sapiens
  misc_RNA (1)...(19): siRNA sense strand
acaugagaaugaaucgaaa

SEQ ID NO: 2598332 - RNA, 19 nt, Homo sapiens
  misc_RNA (1)...(19): siRNA sense strand
caaaugagaguauggaaaa

SEQ ID NO: 2598333 - RNA, 19 nt, Homo sapiens
  misc_RNA (1)...(19): siRNA sense strand
uaguaagacucaaugaaga

SEQ ID NO: 2598334 - RNA, 19 nt, Homo sapiens
  misc_RNA (1)...(19): siRNA sense strand
aaugaaugcaccagaguau

SEQ ID NO: 2598335 - RNA, 19 nt, Homo sapiens
  misc_RNA (1)...(19): siRNA sense strand
gaacaagaggagaaagaac

SEQ ID NO: 2598336 - RNA, 19 nt, Homo sapiens
  misc_RNA (1)...(19): siRNA sense strand
cuacuaaagaugaagagau

SEQ ID NO: 2598337 - RNA, 19 nt, Homo sapiens
  misc_RNA (1)...(19): siRNA sense strand
ggcucaugcuaaagcuaaa

SEQ ID NO: 2598338 - RNA, 19 nt, Homo sapiens
  misc_RNA (1)...(19): siRNA sense strand
ugagagaagccaaagaaaa

SEQ ID NO: 2598339 - RNA, 19 nt, Homo sapiens
  misc_RNA (1)...(19): siRNA sense strand
auugggagaugaagacaaa

SEQ ID NO: 2598340 - RNA, 19 nt, Homo sapiens
  misc_RNA (1)...(19): siRNA sense strand
aucaggaacuucuggauaa

SEQ ID NO: 2598341 - RNA, 19 nt, Homo sapiens
  misc_RNA (1)...(19): siRNA sense strand
gggcaaagaaagauguuuu

SEQ ID NO: 2598342 - RNA, 19 nt, Homo sapiens
  misc_RNA (1)...(19): siRNA sense strand
gaauaaagguugaagcuga

SEQ ID NO: 2598343 - RNA, 19 nt, Homo sapiens
  misc_RNA (1)...(19): siRNA sense strand
ggaagaugaaagaggcaau

SEQ ID NO: 2598344 - RNA, 19 nt, Homo sapiens
  misc_RNA (1)...(19): siRNA sense strand
ggucgugaugacagaguua

SEQ ID NO: 2598345 - RNA, 19 nt, Homo sapiens
  misc_RNA (1)...(19): siRNA sense strand
gaugaaaaccugacagcaa

SEQ ID NO: 2598346 - RNA, 19 nt, Homo sapiens
  misc_RNA (1)...(19): siRNA sense strand
aggaaauaaugauggaacu

SEQ ID NO: 2598347 - RNA, 19 nt, Homo sapiens
  misc_RNA (1)...(19): siRNA sense strand
ugaaaaggcaucugauaaa

SEQ ID NO: 2598348 - RNA, 19 nt, Homo sapiens
  misc_RNA (1)...(19): siRNA sense strand
ggcuggaaggauugaauaa

SEQ ID NO: 2598349 - RNA, 19 nt, Homo sapiens
  misc_RNA (1)...(19): siRNA sense strand
acccaauaguaguaaacaa

SEQ ID NO: 2598350 - RNA, 19 nt, Homo sapiens
  misc_RNA (1)...(19): siRNA sense strand
agguugaagcugaagagaa

SEQ ID NO: 2598351 - RNA, 19 nt, Homo sapiens
  misc_RNA (1)...(19): siRNA sense strand
gaaggauugaauaaggaaa

SEQ ID NO: 2598352 - RNA, 19 nt, Homo sapiens
  misc_RNA (1)...(19): siRNA sense strand
cuuuaacagagaagggaau

SEQ ID NO: 2598353 - RNA, 19 nt, Homo sapiens
  misc_RNA (1)...(19): siRNA sense strand
ggcccaggaaggagugaaa

SEQ ID NO: 2598354 - RNA, 19 nt, Homo sapiens
  misc_RNA (1)...(19): siRNA sense strand
caacuguauccuuggaaau

SEQ ID NO: 2598355 - RNA, 19 nt, Homo sapiens
  misc_RNA (1)...(19): siRNA sense strand
cuguauccuuggaaauaua

SEQ ID NO: 2598356 - RNA, 19 nt, Homo sapiens
  misc_RNA (1)...(19): siRNA sense strand
guacaaggucccuggucau

SEQ ID NO: 2598357 - RNA, 19 nt, Homo sapiens
  misc_RNA (1)...(19): siRNA sense strand
ugguuugcuucuagaggaa

SEQ ID NO: 2598358 - RNA, 19 nt, Homo sapiens
  misc_RNA (1)...(19): siRNA sense strand
gcagaaauuaagaagaacu

SEQ ID NO: 2598359 - RNA, 19 nt, Homo sapiens
  misc_RNA (1)...(19): siRNA sense strand
cagaguuauuggugaucau

SEQ ID NO: 2598360 - RNA, 19 nt, Homo sapiens
  misc_RNA (1)...(19): siRNA sense strand
aggaaguaauucagcaguu

SEQ ID NO: 2598361 - RNA, 19 nt, Homo sapiens
  misc_RNA (1)...(19): siRNA sense strand
cccaauaguaguaaacaau

SEQ ID NO: 2598362 - RNA, 19 nt, Homo sapiens
  misc_RNA (1)...(19): siRNA sense strand
ugaaauccuaucagagcaa

SEQ ID NO: 2598363 - RNA, 19 nt, Homo sapiens
  misc_RNA (1)...(19): siRNA sense strand
cuauugaaaaggagacuaa

SEQ ID NO: 2598364 - RNA, 19 nt, Homo sapiens
  misc_RNA (1)...(19): siRNA sense strand
cugaagagaaugacacuca

SEQ ID NO: 2598365 - RNA, 19 nt, Homo sapiens
  misc_RNA (1)...(19): siRNA sense strand
cuacccagccuguggaaga

SEQ ID NO: 2598366 - RNA, 19 nt, Homo sapiens
  misc_RNA (1)...(19): siRNA sense strand
uuguaucagugguagcaaa

SEQ ID NO: 2598367 - RNA, 19 nt, Homo sapiens
  misc_RNA (1)...(19): siRNA sense strand
gccaccuacaagagagaua

SEQ ID NO: 2598368 - RNA, 19 nt, Homo sapiens
  misc_RNA (1)...(19): siRNA sense strand
gcauugauuccaugguuau

SEQ ID NO: 2598369 - RNA, 19 nt, Homo sapiens
  misc_RNA (1)...(19): siRNA sense strand
gguaguucucacuggaauu

SEQ ID NO: 2598370 - RNA, 19 nt, Homo sapiens
  misc_RNA (1)...(19): siRNA sense strand
caauguguuucuauggaau

SEQ ID NO: 2598371 - RNA, 19 nt, Homo sapiens
  misc_RNA (1)...(19): siRNA sense strand
agagaagggaauaaacaga

SEQ ID NO: 2598372 - RNA, 19 nt, Homo sapiens
  misc_RNA (1)...(19): siRNA sense strand
cuauggaagaacugcagaa

SEQ ID NO: 2598373 - RNA, 19 nt, Homo sapiens
  misc_RNA (1)...(19): siRNA sense strand
augaaaaggcaucugauaa

SEQ ID NO: 2598374 - RNA, 19 nt, Homo sapiens
  misc_RNA (1)...(19): siRNA sense strand
gaaauuaagaagaacucga

SEQ ID NO: 2598375 - RNA, 19 nt, Homo sapiens
  misc_RNA (1)...(19): siRNA sense strand
uggaaaagaagcaagauuu

SEQ ID NO: 2598376 - RNA, 19 nt, Homo sapiens
  misc_RNA (1)...(19): siRNA sense strand
agagaaugacacucaaauu

SEQ ID NO: 2598377 - RNA, 19 nt, Homo sapiens
  misc_RNA (1)...(19): siRNA sense strand
gaagaaaagaccaugccaa

SEQ ID NO: 2598378 - RNA, 19 nt, Homo sapiens
  misc_RNA (1)...(19): siRNA sense strand
gggacuaaaggaacuacaa

SEQ ID NO: 2598379 - RNA, 19 nt, Homo sapiens
  misc_RNA (1)...(19): siRNA sense strand
ugauaaauguggacggcuc

SEQ ID NO: 2598380 - RNA, 19 nt, Homo sapiens
  misc_RNA (1)...(19): siRNA sense strand
aaacaucuggauuggcaaa

SEQ ID NO: 2598381 - RNA, 19 nt, Homo sapiens
  misc_RNA (1)...(19): siRNA sense strand
acagagaagggaauaaaca

SEQ ID NO: 2598382 - RNA, 19 nt, Homo sapiens
  misc_RNA (1)...(19): siRNA sense strand
gugugauaggaaagcaaau

SEQ ID NO: 2598383 - RNA, 19 nt, Homo sapiens
  misc_RNA (1)...(19): siRNA sense strand
aguacaaggucccugguca

SEQ ID NO: 2598384 - RNA, 19 nt, Homo sapiens
  misc_RNA (1)...(19): siRNA sense strand
uaaauaugauguugccaca

SEQ ID NO: 2598385 - RNA, 19 nt, Homo sapiens
  misc_RNA (1)...(19): siRNA sense strand
guacacaugaaggaaguaa

SEQ ID NO: 2598386 - RNA, 19 nt, Homo sapiens
  misc_RNA (1)...(19): siRNA sense strand
guguuuaccuagggaugaa

SEQ ID NO: 2598387 - RNA, 19 nt, Homo sapiens
  misc_RNA (1)...(19): siRNA sense strand
augaaaaccugacagcaaa

SEQ ID NO: 2598388 - RNA, 19 nt, Homo sapiens
  misc_RNA (1)...(19): siRNA sense strand
guuugcuucuagaggaauu

SEQ ID NO: 2598389 - RNA, 19 nt, Homo sapiens
  misc_RNA (1)...(19): siRNA sense strand
acgugugauaggaaagcaa

SEQ ID NO: 2598390 - RNA, 19 nt, Homo sapiens
  misc_RNA (1)...(19): siRNA sense strand
ccacaagcugcauuggaga

SEQ ID NO: 2598391 - RNA, 19 nt, Homo sapiens
  misc_RNA (1)...(19): siRNA sense strand
gggacccaauaguaguaaa

SEQ ID NO: 2598392 - RNA, 19 nt, Homo sapiens
  misc_RNA (1)...(19): siRNA sense strand
ggaugauagcauuggcugu

SEQ ID NO: 2598393 - RNA, 19 nt, Homo sapiens
  misc_RNA (1)...(19): siRNA sense strand
uuaacagagaagggaauaa

SEQ ID NO: 2598394 - RNA, 19 nt, Homo sapiens
  misc_RNA (1)...(19): siRNA sense strand
aauuggugcagaugagcaa

SEQ ID NO: 2598395 - RNA, 19 nt, Homo sapiens
  misc_RNA (1)...(19): siRNA sense strand
cuacaugaguggaggagca

SEQ ID NO: 2598396 - RNA, 19 nt, Homo sapiens
  misc_RNA (1)...(19): siRNA sense strand
agaugauaauggacagaau

SEQ ID NO: 2598397 - RNA, 19 nt, Homo sapiens
  misc_RNA (1)...(19): siRNA sense strand
gggagaagauuuaagccuu

SEQ ID NO: 2598398 - RNA, 19 nt, Homo sapiens
  misc_RNA (1)...(19): siRNA sense strand
cagagauaccauuggaaaa

SEQ ID NO: 2598399 - RNA, 19 nt, Homo sapiens
  misc_RNA (1)...(19): siRNA sense strand
ccucuguggaucagcaaua

SEQ ID NO: 2598400 - RNA, 19 nt, Homo sapiens
  misc_RNA (1)...(19): siRNA sense strand
caaaagugaaguuaggaaa

SEQ ID NO: 2598401 - RNA, 19 nt, Homo sapiens
  misc_RNA (1)...(19): siRNA sense strand
gagaaaagguugacaccca

SEQ ID NO: 2598402 - RNA, 19 nt, Homo sapiens
  misc_RNA (1)...(19): siRNA sense strand
aggauauguacuaagcaaa

SEQ ID NO: 2598403 - RNA, 19 nt, Homo sapiens
  misc_RNA (1)...(19): siRNA sense strand
gaaucaucuagaaggacaa

SEQ ID NO: 2598404 - RNA, 19 nt, Homo sapiens
  misc_RNA (1)...(19): siRNA sense strand
agaaucaucuagaaggaca

SEQ ID NO: 2598405 - RNA, 19 nt, Homo sapiens
  misc_RNA (1)...(19): siRNA sense strand
cccucaaaaccuagagaaa

SEQ ID NO: 2598406 - RNA, 19 nt, Homo sapiens
  misc_RNA (1)...(19): siRNA sense strand
aguuagaauaccucguuua

SEQ ID NO: 2598407 - RNA, 19 nt, Homo sapiens
  misc_RNA (1)...(19): siRNA sense strand
gccuaauguucuucauaau

SEQ ID NO: 2598408 - RNA, 19 nt, Homo sapiens
  misc_RNA (1)...(19): siRNA sense strand
ccucaaaaccuagagaaaa

SEQ ID NO: 2598409 - RNA, 19 nt, Homo sapiens
  misc_RNA (1)...(19): siRNA sense strand
aggaaauuagucaagcaaa

SEQ ID NO: 2598410 - RNA, 19 nt, Homo sapiens
  misc_RNA (1)...(19): siRNA sense strand
agaugagaacacagacauu

SEQ ID NO: 2598411 - RNA, 19 nt, Homo sapiens
  misc_RNA (1)...(19): siRNA sense strand
cuuauguaaagcagggcua

SEQ ID NO: 2598412 - RNA, 19 nt, Homo sapiens
  misc_RNA (1)...(19): siRNA sense strand
uagaaggacaaaugaacuu

SEQ ID NO: 2598413 - RNA, 19 nt, Homo sapiens
  misc_RNA (1)...(19): siRNA sense strand
caaccauguaugaguuaga

SEQ ID NO: 2598414 - RNA, 19 nt, Homo sapiens
  misc_RNA (1)...(19): siRNA sense strand
agaucaacuauacuggaaa

SEQ ID NO: 2598415 - RNA, 19 nt, Homo sapiens
  misc_RNA (1)...(19): siRNA sense strand
agguugacacccagccuaa

SEQ ID NO: 2598416 - RNA, 19 nt, Homo sapiens
  misc_RNA (1)...(19): siRNA sense strand
cuaccuuaccugaacguau

SEQ ID NO: 2598417 - RNA, 19 nt, Homo sapiens
  misc_RNA (1)...(19): siRNA sense strand
ugaacguauacuaaaggaa

SEQ ID NO: 2598418 - RNA, 19 nt, Homo sapiens
  misc_RNA (1)...(19): siRNA sense strand
ggaaugagcucaaggacga

SEQ ID NO: 2598419 - RNA, 19 nt, Homo sapiens
  misc_RNA (1)...(19): siRNA sense strand
guacggagcuggugcccua

SEQ ID NO: 2598420 - RNA, 19 nt, Homo sapiens
  misc_RNA (1)...(19): siRNA sense strand
agaacaacgugaaggcaca

SEQ ID NO: 2598421 - RNA, 19 nt, Homo sapiens
  misc_RNA (1)...(19): siRNA sense strand
gggacaacgaggagaagga

SEQ ID NO: 2598422 - RNA, 19 nt, Homo sapiens
  misc_RNA (1)...(19): siRNA sense strand
ccgacuggaauuugaggaa

SEQ ID NO: 2598423 - RNA, 19 nt, Homo sapiens
  misc_RNA (1)...(19): siRNA sense strand
ggugaaauuugcaugcaga

SEQ ID NO: 2598424 - RNA, 19 nt, Homo sapiens
  misc_RNA (1)...(19): siRNA sense strand
ugcuuaacucggaggauua

SEQ ID NO: 2598425 - RNA, 19 nt, Homo sapiens
  misc_RNA (1)...(19): siRNA sense strand
agaaguggaaugagcucaa

SEQ ID NO: 2598426 - RNA, 19 nt, Homo sapiens
  misc_RNA (1)...(19): siRNA sense strand
gccucauccucaagaacaa

SEQ ID NO: 2598427 - RNA, 19 nt, Homo sapiens
  misc_RNA (1)...(19): siRNA sense strand
gcuguagccuccuggguga

SEQ ID NO: 2598428 - RNA, 19 nt, Homo sapiens
  misc_RNA (1)...(19): siRNA sense strand
gcaccaaccugaacccaga

SEQ ID NO: 2598429 - RNA, 19 nt, Homo sapiens
  misc_RNA (1)...(19): siRNA sense strand
ucagggacaacgaggagaa

SEQ ID NO: 2598430 - RNA, 19 nt, Homo sapiens
  misc_RNA (1)...(19): siRNA sense strand
gaauacauccagaagcuga

SEQ ID NO: 2598431 - RNA, 19 nt, Homo sapiens
  misc_RNA (1)...(19): siRNA sense strand
agcucaaggacgaagacaa

SEQ ID NO: 2598432 - RNA, 19 nt, Homo sapiens
  misc_RNA (1)...(19): siRNA sense strand
agucagaagaugagccaac

SEQ ID NO: 2598433 - RNA, 19 nt, Homo sapiens
  misc_RNA (1)...(19): siRNA sense strand
acgcggaggaugacgauga

SEQ ID NO: 2598434 - RNA, 19 nt, Homo sapiens
  misc_RNA (1)...(19): siRNA sense strand
gcaacaagaagguacagga

SEQ ID NO: 2598435 - RNA, 19 nt, Homo sapiens
  misc_RNA (1)...(19): siRNA sense strand
gcagcaguucucugagcaa

SEQ ID NO: 2598436 - RNA, 19 nt, Homo sapiens
  misc_RNA (1)...(19): siRNA sense strand
uggugaaugggaugaagua

SEQ ID NO: 2598437 - RNA, 19 nt, Homo sapiens
  misc_RNA (1)...(19): siRNA sense strand
gugaaugggaugaaguacu

SEQ ID NO: 2598438 - RNA, 19 nt, Homo sapiens
  misc_RNA (1)...(19): siRNA sense strand
aggaugacgaugaugauga

SEQ ID NO: 2598439 - RNA, 19 nt, Homo sapiens
  misc_RNA (1)...(19): siRNA sense strand
acucggaaauugacaucau

SEQ ID NO: 2598440 - RNA, 19 nt, Homo sapiens
  misc_RNA (1)...(19): siRNA sense strand
guucaagaccagacagaca

SEQ ID NO: 2598441 - RNA, 19 nt, Homo sapiens
  misc_RNA (1)...(19): siRNA sense strand
auucaguaccgaaggcaaa

SEQ ID NO: 2598442 - RNA, 19 nt, Homo sapiens
  misc_RNA (1)...(19): siRNA sense strand
cugaggaacugaagcccua

SEQ ID NO: 2598443 - RNA, 19 nt, Homo sapiens
  misc_RNA (1)...(19): siRNA sense strand
cagaguucacagaggagaa

SEQ ID NO: 2598444 - RNA, 19 nt, Homo sapiens
  misc_RNA (1)...(19): siRNA sense strand
ccaacaggugagauugaaa

SEQ ID NO: 2598445 - RNA, 19 nt, Homo sapiens
  misc_RNA (1)...(19): siRNA sense strand
cggcagccucugugaagaa

SEQ ID NO: 2598446 - RNA, 19 nt, Homo sapiens
  misc_RNA (1)...(19): siRNA sense strand
guuuccaaaugcaguauaa

SEQ ID NO: 2598447 - RNA, 19 nt, Homo sapiens
  misc_RNA (1)...(19): siRNA sense strand
ggguuuguggauauagaaa

SEQ ID NO: 2598448 - RNA, 19 nt, Homo sapiens
  misc_RNA (1)...(19): siRNA sense strand
ccacauuguuuaagaggac

SEQ ID NO: 2598449 - RNA, 19 nt, Homo sapiens
  misc_RNA (1)...(19): siRNA sense strand
caacagacuccaaagcaga

SEQ ID NO: 2598450 - RNA, 19 nt, Homo sapiens
  misc_RNA (1)...(19): siRNA sense strand
cuggaauuaaucagacuaa

SEQ ID NO: 2598451 - RNA, 19 nt, Homo sapiens
  misc_RNA (1)...(19): siRNA sense strand
ccuuaggguuagacagacu

SEQ ID NO: 2598452 - RNA, 19 nt, Homo sapiens
  misc_RNA (1)...(19): siRNA sense strand
gaaauuaagaacuucguga

SEQ ID NO: 2598453 - RNA, 19 nt, Homo sapiens
  misc_RNA (1)...(19): siRNA sense strand
gaagcugcccuuugaaauu

SEQ ID NO: 2598454 - RNA, 19 nt, Homo sapiens
  misc_RNA (1)...(19): siRNA sense strand
aauggagacccaagaggaa

SEQ ID NO: 2598455 - RNA, 19 nt, Homo sapiens
  misc_RNA (1)...(19): siRNA sense strand
caccuauggaacugauaaa

SEQ ID NO: 2598456 - RNA, 19 nt, Homo sapiens
  misc_RNA (1)...(19): siRNA sense strand
gauucaguaccgaaggcaa

SEQ ID NO: 2598457 - RNA, 19 nt, Homo sapiens
  misc_RNA (1)...(19): siRNA sense strand
caacaggugagauugaaau

SEQ ID NO: 2598458 - RNA, 19 nt, Homo sapiens
  misc_RNA (1)...(19): siRNA sense strand
cuguauuccuuaacgccaa

SEQ ID NO: 2598459 - RNA, 19 nt, Homo sapiens
  misc_RNA (1)...(19): siRNA sense strand
gcaagaagcugcccuuuga

SEQ ID NO: 2598460 - RNA, 19 nt, Homo sapiens
  misc_RNA (1)...(19): siRNA sense strand
cuguaaucugcauggguuu

SEQ ID NO: 2598461 - RNA, 19 nt, Homo sapiens
  misc_RNA (1)...(19): siRNA sense strand
cgcuuuggaaugaagauua

SEQ ID NO: 2598462 - RNA, 19 nt, Homo sapiens
  misc_RNA (1)...(19): siRNA sense strand
guacuucccuucuugguua

SEQ ID NO: 2598463 - RNA, 19 nt, Homo sapiens
  misc_RNA (1)...(19): siRNA sense strand
cugugaaagccauauguau

SEQ ID NO: 2598464 - RNA, 19 nt, Homo sapiens
  misc_RNA (1)...(19): siRNA sense strand
uacuaaaggaggaugugaa

SEQ ID NO: 2598465 - RNA, 19 nt, Homo sapiens
  misc_RNA (1)...(19): siRNA sense strand
uccuuaacgccaauagaaa

SEQ ID NO: 2598466 - RNA, 19 nt, Homo sapiens
  misc_RNA (1)...(19): siRNA sense strand
ccaucuaaccagacaagaa

SEQ ID NO: 2598467 - RNA, 19 nt, Homo sapiens
  misc_RNA (1)...(19): siRNA sense strand
cagaauuucaacagcgauu

SEQ ID NO: 2598468 - RNA, 19 nt, Homo sapiens
  misc_RNA (1)...(19): siRNA sense strand
ggaccagaugcuuggaaaa

SEQ ID NO: 2598469 - RNA, 19 nt, Homo sapiens
  misc_RNA (1)...(19): siRNA sense strand
cagacaagaaauaguauca

SEQ ID NO: 2598470 - RNA, 19 nt, Homo sapiens
  misc_RNA (1)...(19): siRNA sense strand
uguugaaaccauugauaga

SEQ ID NO: 2598471 - RNA, 19 nt, Homo sapiens
  misc_RNA (1)...(19): siRNA sense strand
ggacaagugaagagaacac

SEQ ID NO: 2598472 - RNA, 19 nt, Homo sapiens
  misc_RNA (1)...(19): siRNA sense strand
ucuacaagugugaaagaau

SEQ ID NO: 2598473 - RNA, 19 nt, Homo sapiens
  misc_RNA (1)...(19): siRNA sense strand
cugaagaggccguguccuu

SEQ ID NO: 2598474 - RNA, 19 nt, Homo sapiens
  misc_RNA (1)...(19): siRNA sense strand
ggucaagggacaagugaag

SEQ ID NO: 2598475 - RNA, 19 nt, Homo sapiens
  misc_RNA (1)...(19): siRNA sense strand
aaauucaggaugaggaaaa

SEQ ID NO: 2598476 - RNA, 19 nt, Homo sapiens
  misc_RNA (1)...(19): siRNA sense strand
uggaugaaucucugaguga

SEQ ID NO: 2598477 - RNA, 19 nt, Homo sapiens
  misc_RNA (1)...(19): siRNA sense strand
cacacaaacuaaaggagga

SEQ ID NO: 2598478 - RNA, 19 nt, Homo sapiens
  misc_RNA (1)...(19): siRNA sense strand
agugacuacuuuagguauu

SEQ ID NO: 2598479 - RNA, 19 nt, Homo sapiens
  misc_RNA (1)...(19): siRNA sense strand
agggacaagugaagagaac

SEQ ID NO: 2598480 - RNA, 19 nt, Homo sapiens
  misc_RNA (1)...(19): siRNA sense strand
acaaacuaaaggaggacuu

SEQ ID NO: 2598481 - RNA, 19 nt, Homo sapiens
  misc_RNA (1)...(19): siRNA sense strand
agaaaguggaccuaguuau

SEQ ID NO: 2598482 - RNA, 19 nt, Homo sapiens
  misc_RNA (1)...(19): siRNA sense strand
cugaagaagccaauaaucu

SEQ ID NO: 2598483 - RNA, 19 nt, Homo sapiens
  misc_RNA (1)...(19): siRNA sense strand
auucaacgcauuuggaaga

SEQ ID NO: 2598484 - RNA, 19 nt, Homo sapiens
  misc_RNA (1)...(19): siRNA sense strand
uggaaaauauggaauguca

SEQ ID NO: 2598485 - RNA, 19 nt, Homo sapiens
  misc_RNA (1)...(19): siRNA sense strand
gcuacaaguauucugaaga

SEQ ID NO: 2598486 - RNA, 19 nt, Homo sapiens
  misc_RNA (1)...(19): siRNA sense strand
ccagaugcuuggaaaauau

SEQ ID NO: 2598487 - RNA, 19 nt, Homo sapiens
  misc_RNA (1)...(19): siRNA sense strand
guuuuaagccacagacaau

SEQ ID NO: 2598488 - RNA, 19 nt, Homo sapiens
  misc_RNA (1)...(19): siRNA sense strand
auagcaaauaugccagaaa

SEQ ID NO: 2598489 - RNA, 19 nt, Homo sapiens
  misc_RNA (1)...(19): siRNA sense strand
ccuuuaaauccuuuggcuu

SEQ ID NO: 2598490 - RNA, 19 nt, Homo sapiens
  misc_RNA (1)...(19): siRNA sense strand
uuagaaaacuucaggaacu

SEQ ID NO: 2598491 - RNA, 19 nt, Homo sapiens
  misc_RNA (1)...(19): siRNA sense strand
gugaacaagcugaacgacu

SEQ ID NO: 2598492 - RNA, 19 nt, Homo sapiens
  misc_RNA (1)...(19): siRNA sense strand
uuaauagaacuaagggcuu

SEQ ID NO: 2598493 - RNA, 19 nt, Homo sapiens
  misc_RNA (1)...(19): siRNA sense strand
gaacuggacucuuaauaaa

SEQ ID NO: 2598494 - RNA, 19 nt, Homo sapiens
  misc_RNA (1)...(19): siRNA sense strand
cagugaacauggaggcgaa

SEQ ID NO: 2598495 - RNA, 19 nt, Homo sapiens
  misc_RNA (1)...(19): siRNA sense strand
ggaaggagguggcugguga

SEQ ID NO: 2598496 - RNA, 19 nt, Homo sapiens
  misc_RNA (1)...(19): siRNA sense strand
gcacccagcucaaggccaa

SEQ ID NO: 2598497 - RNA, 19 nt, Homo sapiens
  misc_RNA (1)...(19): siRNA sense strand
cgggagacaaagagccuaa

SEQ ID NO: 2598498 - RNA, 19 nt, Homo sapiens
  misc_RNA (1)...(19): siRNA sense strand
ggaacuggacucuuaauaa

SEQ ID NO: 2598499 - RNA, 19 nt, Homo sapiens
  misc_RNA (1)...(19): siRNA sense strand
acaaggagcaggaggagga

SEQ ID NO: 2598500 - RNA, 19 nt, Homo sapiens
  misc_RNA (1)...(19): siRNA sense strand
aggagcaggaggaggaaga

SEQ ID NO: 2598501 - RNA, 19 nt, Homo sapiens
  misc_RNA (1)...(19): siRNA sense strand
cugacaagcaccuggccaa

SEQ ID NO: 2598502 - RNA, 19 nt, Homo sapiens
  misc_RNA (1)...(19): siRNA sense strand
uggccaaccuacagggcuu

SEQ ID NO: 2598503 - RNA, 19 nt, Homo sapiens
  misc_RNA (1)...(19): siRNA sense strand
gggaaguccaccagaggca

SEQ ID NO: 2598504 - RNA, 19 nt, Homo sapiens
  misc_RNA (1)...(19): siRNA sense strand
gacaggaacuggacucuua

SEQ ID NO: 2598505 - RNA, 19 nt, Homo sapiens
  misc_RNA (1)...(19): siRNA sense strand
aggacaaggagcaggagga

SEQ ID NO: 2598506 - RNA, 19 nt, Homo sapiens
  misc_RNA (1)...(19): siRNA sense strand
ccaacagcaaggagaagau

SEQ ID NO: 2598507 - RNA, 19 nt, Homo sapiens
  misc_RNA (1)...(19): siRNA sense strand
aggcagaaguccaggcccu

SEQ ID NO: 2598508 - RNA, 19 nt, Homo sapiens
  misc_RNA (1)...(19): siRNA sense strand
aguccaacagcaaggagaa

SEQ ID NO: 2598509 - RNA, 19 nt, Homo sapiens
  misc_RNA (1)...(19): siRNA sense strand
uggaaaaggacaaggagca

SEQ ID NO: 2598510 - RNA, 19 nt, Homo sapiens
  misc_RNA (1)...(19): siRNA sense strand
agaagaggauggagggcuc

SEQ ID NO: 2598511 - RNA, 19 nt, Homo sapiens
  misc_RNA (1)...(19): siRNA sense strand
cagcuggaggugaggccua

SEQ ID NO: 2598512 - RNA, 19 nt, Homo sapiens
  misc_RNA (1)...(19): siRNA sense strand
cuacaaccaccaaaggcaa

SEQ ID NO: 2598513 - RNA, 19 nt, Homo sapiens
  misc_RNA (1)...(19): siRNA sense strand
acuuugaguccaacagcaa

SEQ ID NO: 2598514 - RNA, 19 nt, Homo sapiens
  misc_RNA (1)...(19): siRNA sense strand
gacaaagagccuaagacca

SEQ ID NO: 2598515 - RNA, 19 nt, Homo sapiens
  misc_RNA (1)...(19): siRNA sense strand
gaaaacagccaauucuaua

SEQ ID NO: 2598516 - RNA, 19 nt, Homo sapiens
  misc_RNA (1)...(19): siRNA sense strand
cuauaaaaggacaggaacu

SEQ ID NO: 2598517 - RNA, 19 nt, Homo sapiens
  misc_RNA (1)...(19): siRNA sense strand
ccaacauggcuuugaccca

SEQ ID NO: 2598518 - RNA, 19 nt, Homo sapiens
  misc_RNA (1)...(19): siRNA sense strand
gagccuaagaccaaaucau

SEQ ID NO: 2598519 - RNA, 19 nt, Homo sapiens
  misc_RNA (1)...(19): siRNA sense strand
gaggagauguugaaagaaa

SEQ ID NO: 2598520 - RNA, 19 nt, Homo sapiens
  misc_RNA (1)...(19): siRNA sense strand
gguuuggcuuugagagaaa

SEQ ID NO: 2598521 - RNA, 19 nt, Homo sapiens
  misc_RNA (1)...(19): siRNA sense strand
gugcauaucuguaauguaa

SEQ ID NO: 2598522 - RNA, 19 nt, Homo sapiens
  misc_RNA (1)...(19): siRNA sense strand
acacauugguagaggucuu

SEQ ID NO: 2598523 - RNA, 19 nt, Homo sapiens
  misc_RNA (1)...(19): siRNA sense strand
gauacauccucaaagauaa

SEQ ID NO: 2598524 - RNA, 19 nt, Homo sapiens
  misc_RNA (1)...(19): siRNA sense strand
cugaggagauguugaaaga

SEQ ID NO: 2598525 - RNA, 19 nt, Homo sapiens
  misc_RNA (1)...(19): siRNA sense strand
ggguauaagccaccagcua

SEQ ID NO: 2598526 - RNA, 19 nt, Homo sapiens
  misc_RNA (1)...(19): siRNA sense strand
aggaauugccugugcauau

SEQ ID NO: 2598527 - RNA, 19 nt, Homo sapiens
  misc_RNA (1)...(19): siRNA sense strand
aggagaagcaugugcagua

SEQ ID NO: 2598528 - RNA, 19 nt, Homo sapiens
  misc_RNA (1)...(19): siRNA sense strand
ccucaaagauaauucucaa

SEQ ID NO: 2598529 - RNA, 19 nt, Homo sapiens
  misc_RNA (1)...(19): siRNA sense strand
gaugauagcugcuuaugaa

SEQ ID NO: 2598530 - RNA, 19 nt, Homo sapiens
  misc_RNA (1)...(19): siRNA sense strand
agugacaaguggacagcaa

SEQ ID NO: 2598531 - RNA, 19 nt, Homo sapiens
  misc_RNA (1)...(19): siRNA sense strand
uugagagaaaggagaauua

SEQ ID NO: 2598532 - RNA, 19 nt, Homo sapiens
  misc_RNA (1)...(19): siRNA sense strand
gaaccuguuaaaugggaaa

SEQ ID NO: 2598533 - RNA, 19 nt, Homo sapiens
  misc_RNA (1)...(19): siRNA sense strand
cagaauaugaugauggcuu

SEQ ID NO: 2598534 - RNA, 19 nt, Homo sapiens
  misc_RNA (1)...(19): siRNA sense strand
acagguggauagugaggaa

SEQ ID NO: 2598535 - RNA, 19 nt, Homo sapiens
  misc_RNA (1)...(19): siRNA sense strand
cauuauaugacgaugaaca

SEQ ID NO: 2598536 - RNA, 19 nt, Homo sapiens
  misc_RNA (1)...(19): siRNA sense strand
aagaaccacuagaggguau

SEQ ID NO: 2598537 - RNA, 19 nt, Homo sapiens
  misc_RNA (1)...(19): siRNA sense strand
aggaauugcuuucggcuga

SEQ ID NO: 2598538 - RNA, 19 nt, Homo sapiens
  misc_RNA (1)...(19): siRNA sense strand
gagagaaaggagaauuaau

SEQ ID NO: 2598539 - RNA, 19 nt, Homo sapiens
  misc_RNA (1)...(19): siRNA sense strand
ggguuaauaagaagguaga

SEQ ID NO: 2598540 - RNA, 19 nt, Homo sapiens
  misc_RNA (1)...(19): siRNA sense strand
gagcgaagauuguugccau

SEQ ID NO: 2598541 - RNA, 19 nt, Homo sapiens
  misc_RNA (1)...(19): siRNA sense strand
uggugaugauggaacuaua

SEQ ID NO: 2598542 - RNA, 19 nt, Homo sapiens
  misc_RNA (1)...(19): siRNA sense strand
cugagaagauuuauguuca

SEQ ID NO: 2598543 - RNA, 19 nt, Homo sapiens
  misc_RNA (1)...(19): siRNA sense strand
aggagauguugaaagaaaa

SEQ ID NO: 2598544 - RNA, 19 nt, Homo sapiens
  misc_RNA (1)...(19): siRNA sense strand
acugcaaagcugacauuaa

SEQ ID NO: 2598545 - RNA, 19 nt, Homo sapiens
  misc_RNA (1)...(19): siRNA sense strand
auuaaugaccagcuaguua

SEQ ID NO: 2598546 - RNA, 19 nt, Homo sapiens
  misc_RNA (1)...(19): siRNA sense strand
guauaagccaccagcuauu

SEQ ID NO: 2598547 - RNA, 19 nt, Homo sapiens
  misc_RNA (1)...(19): siRNA sense strand
gggagaaauugucuauuca

SEQ ID NO: 2598548 - RNA, 19 nt, Homo sapiens
  misc_RNA (1)...(19): siRNA sense strand
gcauagugacacagaugau

SEQ ID NO: 2598549 - RNA, 19 nt, Homo sapiens
  misc_RNA (1)...(19): siRNA sense strand
ggcuuaugguauagagcga

SEQ ID NO: 2598550 - RNA, 19 nt, Homo sapiens
  misc_RNA (1)...(19): siRNA sense strand
ggccauuaccugugaaaau

SEQ ID NO: 2598551 - RNA, 19 nt, Homo sapiens
  misc_RNA (1)...(19): siRNA sense strand
ugacauuauaugacgauga

SEQ ID NO: 2598552 - RNA, 19 nt, Homo sapiens
  misc_RNA (1)...(19): siRNA sense strand
gcguguugauguuucuaaa

SEQ ID NO: 2598553 - RNA, 19 nt, Homo sapiens
  misc_RNA (1)...(19): siRNA sense strand
cugcagaggguuaauaaga

SEQ ID NO: 2598554 - RNA, 19 nt, Homo sapiens
  misc_RNA (1)...(19): siRNA sense strand
caacuuaaauccugugucu

SEQ ID NO: 2598555 - RNA, 19 nt, Homo sapiens
  misc_RNA (1)...(19): siRNA sense strand
aaucagaauccgagagccu

SEQ ID NO: 2598556 - RNA, 19 nt, Homo sapiens
  misc_RNA (1)...(19): siRNA sense strand
ugacauaaucagugaacag

SEQ ID NO: 2598557 - RNA, 19 nt, Homo sapiens
  misc_RNA (1)...(19): siRNA sense strand
ccaagaaccacuagagggu

SEQ ID NO: 2598558 - RNA, 19 nt, Homo sapiens
  misc_RNA (1)...(19): siRNA sense strand
agauuuauguucagugguu

SEQ ID NO: 2598559 - RNA, 19 nt, Homo sapiens
  misc_RNA (1)...(19): siRNA sense strand
gcaaccagaugcaauagaa

SEQ ID NO: 2598560 - RNA, 19 nt, Homo sapiens
  misc_RNA (1)...(19): siRNA sense strand
gguauagagcgaagauugu

SEQ ID NO: 2598561 - RNA, 19 nt, Homo sapiens
  misc_RNA (1)...(19): siRNA sense strand
uuacagacacauugguaga

SEQ ID NO: 2598562 - RNA, 19 nt, Homo sapiens
  misc_RNA (1)...(19): siRNA sense strand
acuaucagaauuugagcua

SEQ ID NO: 2598563 - RNA, 19 nt, Homo sapiens
  misc_RNA (1)...(19): siRNA sense strand
cugaacauacugaggagau

SEQ ID NO: 2598564 - RNA, 19 nt, Homo sapiens
  misc_RNA (1)...(19): siRNA sense strand
gcauauugaaguuugggau

SEQ ID NO: 2598565 - RNA, 19 nt, Homo sapiens
  misc_RNA (1)...(19): siRNA sense strand
ugaugauggcuuaugguau

SEQ ID NO: 2598566 - RNA, 19 nt, Homo sapiens
  misc_RNA (1)...(19): siRNA sense strand
ggaaccuguuaaaugggaa

SEQ ID NO: 2598567 - RNA, 19 nt, Homo sapiens
  misc_RNA (1)...(19): siRNA sense strand
uuucaaagagacaggaguu

SEQ ID NO: 2598568 - RNA, 19 nt, Homo sapiens
  misc_RNA (1)...(19): siRNA sense strand
cuauaaucuuacaggugga

SEQ ID NO: 2598569 - RNA, 19 nt, Homo sapiens
  misc_RNA (1)...(19): siRNA sense strand
aggguuuggcuuugagaga

SEQ ID NO: 2598570 - RNA, 19 nt, Homo sapiens
  misc_RNA (1)...(19): siRNA sense strand
cagcuguguuggugaugau

SEQ ID NO: 2598571 - RNA, 19 nt, Homo sapiens
  misc_RNA (1)...(19): siRNA sense strand
auaagaagguagaggcgcu

SEQ ID NO: 2598572 - RNA, 19 nt, Homo sapiens
  misc_RNA (1)...(19): siRNA sense strand
gguuacagacacauuggua

SEQ ID NO: 2598573 - RNA, 19 nt, Homo sapiens
  misc_RNA (1)...(19): siRNA sense strand
ugacaaguggacagcaaca

SEQ ID NO: 2598574 - RNA, 19 nt, Homo sapiens
  misc_RNA (1)...(19): siRNA sense strand
agguggauagugaggaaaa

SEQ ID NO: 2598575 - RNA, 19 nt, Homo sapiens
  misc_RNA (1)...(19): siRNA sense strand
gagacaggaguuaccuaaa

SEQ ID NO: 2598576 - RNA, 19 nt, Homo sapiens
  misc_RNA (1)...(19): siRNA sense strand
gggaaauaagguuugagga

SEQ ID NO: 2598577 - RNA, 19 nt, Homo sapiens
  misc_RNA (1)...(19): siRNA sense strand
caggagaacucuaugcugu

SEQ ID NO: 2598578 - RNA, 19 nt, Homo sapiens
  misc_RNA (1)...(19): siRNA sense strand
acuuugacccugacaagaa

SEQ ID NO: 2598579 - RNA, 19 nt, Homo sapiens
  misc_RNA (1)...(19): siRNA sense strand
auacuguacuucugaacau

SEQ ID NO: 2598580 - RNA, 19 nt, Homo sapiens
  misc_RNA (1)...(19): siRNA sense strand
guuggaaagcauugggcua

SEQ ID NO: 2598581 - RNA, 19 nt, Homo sapiens
  misc_RNA (1)...(19): siRNA sense strand
acaaagaauucuacaggca

SEQ ID NO: 2598582 - RNA, 19 nt, Homo sapiens
  misc_RNA (1)...(19): siRNA sense strand
ggcuaauggauuugacaau

SEQ ID NO: 2598583 - RNA, 19 nt, Homo sapiens
  misc_RNA (1)...(19): siRNA sense strand
caaagaauucuacaggcaa

SEQ ID NO: 2598584 - RNA, 19 nt, Homo sapiens
  misc_RNA (1)...(19): siRNA sense strand
gcuaacugucagaagucua

SEQ ID NO: 2598585 - RNA, 19 nt, Homo sapiens
  misc_RNA (1)...(19): siRNA sense strand
aggcauucgaagucgcuua

SEQ ID NO: 2598586 - RNA, 19 nt, Homo sapiens
  misc_RNA (1)...(19): siRNA sense strand
gagaaccaccugauggcua

SEQ ID NO: 2598587 - RNA, 19 nt, Homo sapiens
  misc_RNA (1)...(19): siRNA sense strand
cuuccaaagaugagaccca

SEQ ID NO: 2598588 - RNA, 19 nt, Homo sapiens
  misc_RNA (1)...(19): siRNA sense strand
gagacaggcugcacgacga

SEQ ID NO: 2598589 - RNA, 19 nt, Homo sapiens
  misc_RNA (1)...(19): siRNA sense strand
aggaaccaucagagagaca

SEQ ID NO: 2598590 - RNA, 19 nt, Homo sapiens
  misc_RNA (1)...(19): siRNA sense strand
cguaauaucuccugugcug

SEQ ID NO: 2598591 - RNA, 19 nt, Homo sapiens
  misc_RNA (1)...(19): siRNA sense strand
uagcacuacaagcaagaaa

SEQ ID NO: 2598592 - RNA, 19 nt, Homo sapiens
  misc_RNA (1)...(19): siRNA sense strand
gaaccaucagagagacaca

SEQ ID NO: 2598593 - RNA, 19 nt, Homo sapiens
  misc_RNA (1)...(19): siRNA sense strand
gaaugaagccacagccucu

SEQ ID NO: 2598594 - RNA, 19 nt, Homo sapiens
  misc_RNA (1)...(19): siRNA sense strand
guuggaaagcauugggcua

SEQ ID NO: 2598595 - RNA, 19 nt, Homo sapiens
  misc_RNA (1)...(19): siRNA sense strand
acaaagaauucuacaggca

SEQ ID NO: 2598596 - RNA, 19 nt, Homo sapiens
  misc_RNA (1)...(19): siRNA sense strand
ggcuaauggauuugacaau

SEQ ID NO: 2598597 - RNA, 19 nt, Homo sapiens
  misc_RNA (1)...(19): siRNA sense strand
caaagaauucuacaggcaa

SEQ ID NO: 2598598 - RNA, 19 nt, Homo sapiens
  misc_RNA (1)...(19): siRNA sense strand
gcuaacugucagaagucua

SEQ ID NO: 2598599 - RNA, 19 nt, Homo sapiens
  misc_RNA (1)...(19): siRNA sense strand
aggcauucgaagucgcuua

SEQ ID NO: 2598600 - RNA, 19 nt, Homo sapiens
  misc_RNA (1)...(19): siRNA sense strand
gagaaccaccugauggcua

SEQ ID NO: 2598601 - RNA, 19 nt, Homo sapiens
  misc_RNA (1)...(19): siRNA sense strand
cuuccaaagaugagaccca

SEQ ID NO: 2598602 - RNA, 19 nt, Homo sapiens
  misc_RNA (1)...(19): siRNA sense strand
gagacaggcugcacgacga

SEQ ID NO: 2598603 - RNA, 19 nt, Homo sapiens
  misc_RNA (1)...(19): siRNA sense strand
aggaaccaucagagagaca

SEQ ID NO: 2598604 - RNA, 19 nt, Homo sapiens
  misc_RNA (1)...(19): siRNA sense strand
cguaauaucuccugugcug

SEQ ID NO: 2598605 - RNA, 19 nt, Homo sapiens
  misc_RNA (1)...(19): siRNA sense strand
uagcacuacaagcaagaaa

SEQ ID NO: 2598606 - RNA, 19 nt, Homo sapiens
  misc_RNA (1)...(19): siRNA sense strand
gaaccaucagagagacaca

SEQ ID NO: 2598607 - RNA, 19 nt, Homo sapiens
  misc_RNA (1)...(19): siRNA sense strand
gaaugaagccacagccucu

SEQ ID NO: 2598608 - RNA, 19 nt, Homo sapiens
  misc_RNA (1)...(19): siRNA sense strand
ccaugaagcugcaggacuc

SEQ ID NO: 2598609 - RNA, 19 nt, Homo sapiens
  misc_RNA (1)...(19): siRNA sense strand
cgaaacugucagaggagga

SEQ ID NO: 2598610 - RNA, 19 nt, Homo sapiens
  misc_RNA (1)...(19): siRNA sense strand
cagaggaggaacagcccaa

SEQ ID NO: 2598611 - RNA, 19 nt, Homo sapiens
  misc_RNA (1)...(19): siRNA sense strand
gaggaacagcccaagaaaa

SEQ ID NO: 2598612 - RNA, 19 nt, Homo sapiens
  misc_RNA (1)...(19): siRNA sense strand
gaucuuacauggagggaac

SEQ ID NO: 2598613 - RNA, 19 nt, Homo sapiens
  misc_RNA (1)...(19): siRNA sense strand
gguaaaauccagggccuaa

SEQ ID NO: 2598614 - RNA, 19 nt, Homo sapiens
  misc_RNA (1)...(19): siRNA sense strand
gaacagaacaguaagaagc

SEQ ID NO: 2598615 - RNA, 19 nt, Homo sapiens
  misc_RNA (1)...(19): siRNA sense strand
cugucugugucauguuaaa

SEQ ID NO: 2598616 - RNA, 19 nt, Homo sapiens
  misc_RNA (1)...(19): siRNA sense strand
auucaugaacagaacagua

SEQ ID NO: 2598617 - RNA, 19 nt, Homo sapiens
  misc_RNA (1)...(19): siRNA sense strand
gaucuuacauggagggaac

SEQ ID NO: 2598618 - RNA, 19 nt, Homo sapiens
  misc_RNA (1)...(19): siRNA sense strand
gguaaaauccagggccuaa

SEQ ID NO: 2598619 - RNA, 19 nt, Homo sapiens
  misc_RNA (1)...(19): siRNA sense strand
gaacagaacaguaagaagc

SEQ ID NO: 2598620 - RNA, 19 nt, Homo sapiens
  misc_RNA (1)...(19): siRNA sense strand
cugucugugucauguuaaa

SEQ ID NO: 2598621 - RNA, 19 nt, Homo sapiens
  misc_RNA (1)...(19): siRNA sense strand
auucaugaacagaacagua

SEQ ID NO: 2598622 - RNA, 19 nt, Homo sapiens
  misc_RNA (1)...(19): siRNA sense strand
uagcaaaggacgugacacu

SEQ ID NO: 2598623 - RNA, 19 nt, Homo sapiens
  misc_RNA (1)...(19): siRNA sense strand
agcagauagcuaaggaaaa

SEQ ID NO: 2598624 - RNA, 19 nt, Homo sapiens
  misc_RNA (1)...(19): siRNA sense strand
cggaaauacaucagggaga

SEQ ID NO: 2598625 - RNA, 19 nt, Homo sapiens
  misc_RNA (1)...(19): siRNA sense strand
ugggauagaaugugaccua

SEQ ID NO: 2598626 - RNA, 19 nt, Homo sapiens
  misc_RNA (1)...(19): siRNA sense strand
ggaaagccauguagcccaa

SEQ ID NO: 2598627 - RNA, 19 nt, Homo sapiens
  misc_RNA (1)...(19): siRNA sense strand
gggaaugcacgcaagggua

SEQ ID NO: 2598628 - RNA, 19 nt, Homo sapiens
  misc_RNA (1)...(19): siRNA sense strand
gcgaaagaaguuugaccau

SEQ ID NO: 2598629 - RNA, 19 nt, Homo sapiens
  misc_RNA (1)...(19): siRNA sense strand
ggugaaacucuccaagcaa

SEQ ID NO: 2598630 - RNA, 19 nt, Homo sapiens
  misc_RNA (1)...(19): siRNA sense strand
ggauagaaugugaccuaca

SEQ ID NO: 2598631 - RNA, 19 nt, Homo sapiens
  misc_RNA (1)...(19): siRNA sense strand
auaggauagaggaguguua

SEQ ID NO: 2598632 - RNA, 19 nt, Homo sapiens
  misc_RNA (1)...(19): siRNA sense strand
agaacggacucuuagaaaa

SEQ ID NO: 2598633 - RNA, 19 nt, Homo sapiens
  misc_RNA (1)...(19): siRNA sense strand
acuucagcauuguggaauu

SEQ ID NO: 2598634 - RNA, 19 nt, Homo sapiens
  misc_RNA (1)...(19): siRNA sense strand
gaaauuaacuauagugacc

SEQ ID NO: 2598635 - RNA, 19 nt, Homo sapiens
  misc_RNA (1)...(19): siRNA sense strand
aagauaacccagcagcaaa

SEQ ID NO: 2598636 - RNA, 19 nt, Homo sapiens
  misc_RNA (1)...(19): siRNA sense strand
gaaucaucugggaaauaaa

SEQ ID NO: 2598637 - RNA, 19 nt, Homo sapiens
  misc_RNA (1)...(19): siRNA sense strand
ucugguugcuugaaggaau

SEQ ID NO: 2598638 - RNA, 19 nt, Homo sapiens
  misc_RNA (1)...(19): siRNA sense strand
cagggagaaucuuguaaaa

SEQ ID NO: 2598639 - RNA, 19 nt, Homo sapiens
  misc_RNA (1)...(19): siRNA sense strand
ggaauuuaucaggaacaaa

SEQ ID NO: 2598640 - RNA, 19 nt, Homo sapiens
  misc_RNA (1)...(19): siRNA sense strand
cuggaagagguuugagcuu

SEQ ID NO: 2598641 - RNA, 19 nt, Homo sapiens
  misc_RNA (1)...(19): siRNA sense strand
augugaaucaggaggcauu

SEQ ID NO: 2598642 - RNA, 19 nt, Homo sapiens
  misc_RNA (1)...(19): siRNA sense strand
accaauuucuacuggauau

SEQ ID NO: 2598643 - RNA, 19 nt, Homo sapiens
  misc_RNA (1)...(19): siRNA sense strand
guggaauuuaucaggaaca

SEQ ID NO: 2598644 - RNA, 19 nt, Homo sapiens
  misc_RNA (1)...(19): siRNA sense strand
uggaauuuaucaggaacaa

SEQ ID NO: 2598645 - RNA, 19 nt, Homo sapiens
  misc_RNA (1)...(19): siRNA sense strand
gaaauacaucagggagaau

SEQ ID NO: 2598646 - RNA, 19 nt, Homo sapiens
  misc_RNA (1)...(19): siRNA sense strand
agugagugucucuggaaga

SEQ ID NO: 2598647 - RNA, 19 nt, Homo sapiens
  misc_RNA (1)...(19): siRNA sense strand
agguucaauauguggaaaa

SEQ ID NO: 2598648 - RNA, 19 nt, Homo sapiens
  misc_RNA (1)...(19): siRNA sense strand
uguugucaccugugggaau

SEQ ID NO: 2598649 - RNA, 19 nt, Homo sapiens
  misc_RNA (1)...(19): siRNA sense strand
uuuccaagaaguugaauca

SEQ ID NO: 2598650 - RNA, 19 nt, Homo sapiens
  misc_RNA (1)...(19): siRNA sense strand
acaagaaacuggagcgcua

SEQ ID NO: 2598651 - RNA, 19 nt, Homo sapiens
  misc_RNA (1)...(19): siRNA sense strand
ugauaagaagagagccaaa

SEQ ID NO: 2598652 - RNA, 19 nt, Homo sapiens
  misc_RNA (1)...(19): siRNA sense strand
gcgcuauuugucagggaaa

SEQ ID NO: 2598653 - RNA, 19 nt, Homo sapiens
  misc_RNA (1)...(19): siRNA sense strand
ggacagauguuaaggaagc

SEQ ID NO: 2598654 - RNA, 19 nt, Homo sapiens
  misc_RNA (1)...(19): siRNA sense strand
acaagaucuaugagaagaa

SEQ ID NO: 2598655 - RNA, 19 nt, Homo sapiens
  misc_RNA (1)...(19): siRNA sense strand
agacuugaagauagagaau

SEQ ID NO: 2598656 - RNA, 19 nt, Homo sapiens
  misc_RNA (1)...(19): siRNA sense strand
auugauaagaagagagcca

SEQ ID NO: 2598657 - RNA, 19 nt, Homo sapiens
  misc_RNA (1)...(19): siRNA sense strand
gguccauaggugugaacau

SEQ ID NO: 2598658 - RNA, 19 nt, Homo sapiens
  misc_RNA (1)...(19): siRNA sense strand
agaacagcgacgugaucaa

SEQ ID NO: 2598659 - RNA, 19 nt, Homo sapiens
  misc_RNA (1)...(19): siRNA sense strand
ugguagacaaagaaaugaa

SEQ ID NO: 2598660 - RNA, 19 nt, Homo sapiens
  misc_RNA (1)...(19): siRNA sense strand
agaagaagcggcuggagga

SEQ ID NO: 2598661 - RNA, 19 nt, Homo sapiens
  misc_RNA (1)...(19): siRNA sense strand
gggcuuuguaccagaagau

SEQ ID NO: 2598662 - RNA, 19 nt, Homo sapiens
  misc_RNA (1)...(19): siRNA sense strand
gauccugugaagaggccaa

SEQ ID NO: 2598663 - RNA, 19 nt, Homo sapiens
  misc_RNA (1)...(19): siRNA sense strand
ccgcaauauuuuccgcaaa

SEQ ID NO: 2598664 - RNA, 19 nt, Homo sapiens
  misc_RNA (1)...(19): siRNA sense strand
ggggcaaccugaugcacaa

SEQ ID NO: 2598665 - RNA, 19 nt, Homo sapiens
  misc_RNA (1)...(19): siRNA sense strand
ucgcuggcuuaaugagaau

SEQ ID NO: 2598666 - RNA, 19 nt, Homo sapiens
  misc_RNA (1)...(19): siRNA sense strand
agaugguagacaaagaaau

SEQ ID NO: 2598667 - RNA, 19 nt, Homo sapiens
  misc_RNA (1)...(19): siRNA sense strand
agauagagaauuugcuacu

SEQ ID NO: 2598668 - RNA, 19 nt, Homo sapiens
  misc_RNA (1)...(19): siRNA sense strand
gacaauaauaucaagcuga

SEQ ID NO: 2598669 - RNA, 19 nt, Homo sapiens
  misc_RNA (1)...(19): siRNA sense strand
cggaaggccuccaagucca

SEQ ID NO: 2598670 - RNA, 19 nt, Homo sapiens
  misc_RNA (1)...(19): siRNA sense strand
ggauauagaugaagggcaa

SEQ ID NO: 2598671 - RNA, 19 nt, Homo sapiens
  misc_RNA (1)...(19): siRNA sense strand
guaaauacugagugggaaa

SEQ ID NO: 2598672 - RNA, 19 nt, Homo sapiens
  misc_RNA (1)...(19): siRNA sense strand
agagaaagaaagaggaaau

SEQ ID NO: 2598673 - RNA, 19 nt, Homo sapiens
  misc_RNA (1)...(19): siRNA sense strand
ugggagaggcaaagggaua

SEQ ID NO: 2598674 - RNA, 19 nt, Homo sapiens
  misc_RNA (1)...(19): siRNA sense strand
acauauauaccaugggaaa

SEQ ID NO: 2598675 - RNA, 19 nt, Homo sapiens
  misc_RNA (1)...(19): siRNA sense strand
ccuauagaaaccagggaaa

SEQ ID NO: 2598676 - RNA, 19 nt, Homo sapiens
  misc_RNA (1)...(19): siRNA sense strand
guacuaaacuuauggcaga

SEQ ID NO: 2598677 - RNA, 19 nt, Homo sapiens
  misc_RNA (1)...(19): siRNA sense strand
ccagagaaagggagaaaga

SEQ ID NO: 2598678 - RNA, 19 nt, Homo sapiens
  misc_RNA (1)...(19): siRNA sense strand
caagagaaagaaagaggaa

SEQ ID NO: 2598679 - RNA, 19 nt, Homo sapiens
  misc_RNA (1)...(19): siRNA sense strand
ggauauggcagccgggauu

SEQ ID NO: 2598680 - RNA, 19 nt, Homo sapiens
  misc_RNA (1)...(19): siRNA sense strand
ugaacaagaagcuaagaaa

SEQ ID NO: 2598681 - RNA, 19 nt, Homo sapiens
  misc_RNA (1)...(19): siRNA sense strand
gguagaaagcacagaaacu

SEQ ID NO: 2598682 - RNA, 19 nt, Homo sapiens
  misc_RNA (1)...(19): siRNA sense strand
agggcaagauggaguggaa

SEQ ID NO: 2598683 - RNA, 19 nt, Homo sapiens
  misc_RNA (1)...(19): siRNA sense strand
gggauagggaugacagaga

SEQ ID NO: 2598684 - RNA, 19 nt, Homo sapiens
  misc_RNA (1)...(19): siRNA sense strand
gugaaaauacagagagaca

SEQ ID NO: 2598685 - RNA, 19 nt, Homo sapiens
  misc_RNA (1)...(19): siRNA sense strand
ggggaugacaagaguaaaa

SEQ ID NO: 2598686 - RNA, 19 nt, Homo sapiens
  misc_RNA (1)...(19): siRNA sense strand
ggguugggcaaguggacaa

SEQ ID NO: 2598687 - RNA, 19 nt, Homo sapiens
  misc_RNA (1)...(19): siRNA sense strand
aagacaaagcguagacaau

SEQ ID NO: 2598688 - RNA, 19 nt, Homo sapiens
  misc_RNA (1)...(19): siRNA sense strand
cagagaaaugaauggaaau

SEQ ID NO: 2598689 - RNA, 19 nt, Homo sapiens
  misc_RNA (1)...(19): siRNA sense strand
gcguaaacacagaaagcga

SEQ ID NO: 2598690 - RNA, 19 nt, Homo sapiens
  misc_RNA (1)...(19): siRNA sense strand
ccaaaugugacaagcaauu

SEQ ID NO: 2598691 - RNA, 19 nt, Homo sapiens
  misc_RNA (1)...(19): siRNA sense strand
caggaaggagauagagauu

SEQ ID NO: 2598692 - RNA, 19 nt, Homo sapiens
  misc_RNA (1)...(19): siRNA sense strand
ugauauagaaagugaacca

SEQ ID NO: 2598693 - RNA, 19 nt, Homo sapiens
  misc_RNA (1)...(19): siRNA sense strand
gcguagacaauguuacuaa

SEQ ID NO: 2598694 - RNA, 19 nt, Homo sapiens
  misc_RNA (1)...(19): siRNA sense strand
cagcaacaggauauggaua

SEQ ID NO: 2598695 - RNA, 19 nt, Homo sapiens
  misc_RNA (1)...(19): siRNA sense strand
aaggauaccacuugggaau

SEQ ID NO: 2598696 - RNA, 19 nt, Homo sapiens
  misc_RNA (1)...(19): siRNA sense strand
acaugaagaaagagguaga

SEQ ID NO: 2598697 - RNA, 19 nt, Homo sapiens
  misc_RNA (1)...(19): siRNA sense strand
guucaagaucaccaagaaa

SEQ ID NO: 2598698 - RNA, 19 nt, Homo sapiens
  misc_RNA (1)...(19): siRNA sense strand
ggaugauuccauagauauu

SEQ ID NO: 2598699 - RNA, 19 nt, Homo sapiens
  misc_RNA (1)...(19): siRNA sense strand
ccgaggauuuggacaagaa

SEQ ID NO: 2598700 - RNA, 19 nt, Homo sapiens
  misc_RNA (1)...(19): siRNA sense strand
caagaaguucacagagauu

SEQ ID NO: 2598701 - RNA, 19 nt, Homo sapiens
  misc_RNA (1)...(19): siRNA sense strand
caagaaggcaacacagcaa

SEQ ID NO: 2598702 - RNA, 19 nt, Homo sapiens
  misc_RNA (1)...(19): siRNA sense strand
aggcaaagggauagggaug

SEQ ID NO: 2598703 - RNA, 19 nt, Homo sapiens
  misc_RNA (1)...(19): siRNA sense strand
ccacaaugccaauguuaga

SEQ ID NO: 2598704 - RNA, 19 nt, Homo sapiens
  misc_RNA (1)...(19): siRNA sense strand
ggcaagauggaguggaaga

SEQ ID NO: 2598705 - RNA, 19 nt, Homo sapiens
  misc_RNA (1)...(19): siRNA sense strand
gguacagaguguugagaag

SEQ ID NO: 2598706 - RNA, 19 nt, Homo sapiens
  misc_RNA (1)...(19): siRNA sense strand
cugcaugguucaucgacaa

SEQ ID NO: 2598707 - RNA, 19 nt, Homo sapiens
  misc_RNA (1)...(19): siRNA sense strand
ucuauaaacaugugguaca

SEQ ID NO: 2598708 - RNA, 19 nt, Homo sapiens
  misc_RNA (1)...(19): siRNA sense strand
caaugugguccaaggcuua

SEQ ID NO: 2598709 - RNA, 19 nt, Homo sapiens
  misc_RNA (1)...(19): siRNA sense strand
cgccaaaugugacaagcaa

SEQ ID NO: 2598710 - RNA, 19 nt, Homo sapiens
  misc_RNA (1)...(19): siRNA sense strand
acagaaugauccugaacuu

SEQ ID NO: 2598711 - RNA, 19 nt, Homo sapiens
  misc_RNA (1)...(19): siRNA sense strand
agugagaguacuaaacuua

SEQ ID NO: 2598712 - RNA, 19 nt, Homo sapiens
  misc_RNA (1)...(19): siRNA sense strand
uggcagaagaauaauguau

SEQ ID NO: 2598713 - RNA, 19 nt, Homo sapiens
  misc_RNA (1)...(19): siRNA sense strand
uggaugacuuggaagguuu

SEQ ID NO: 2598714 - RNA, 19 nt, Homo sapiens
  misc_RNA (1)...(19): siRNA sense strand
ggucuauggugguccaaaa

SEQ ID NO: 2598715 - RNA, 19 nt, Homo sapiens
  misc_RNA (1)...(19): siRNA sense strand
acucuggaauauugggaau

SEQ ID NO: 2598716 - RNA, 19 nt, Homo sapiens
  misc_RNA (1)...(19): siRNA sense strand
ugauaacauucaacaggaa

SEQ ID NO: 2598717 - RNA, 19 nt, Homo sapiens
  misc_RNA (1)...(19): siRNA sense strand
ccaagaaaacgaaggucua

SEQ ID NO: 2598718 - RNA, 19 nt, Homo sapiens
  misc_RNA (1)...(19): siRNA sense strand
cugugaaagauguuggauu

SEQ ID NO: 2598719 - RNA, 19 nt, Homo sapiens
  misc_RNA (1)...(19): siRNA sense strand
gucaaauaguucuggacuu

SEQ ID NO: 2598720 - RNA, 19 nt, Homo sapiens
  misc_RNA (1)...(19): siRNA sense strand
gggaagacucugagcauag

SEQ ID NO: 2598721 - RNA, 19 nt, Homo sapiens
  misc_RNA (1)...(19): siRNA sense strand
gcauagugaagaacccaaa

SEQ ID NO: 2598722 - RNA, 19 nt, Homo sapiens
  misc_RNA (1)...(19): siRNA sense strand
cagacaacucagagcccaa

SEQ ID NO: 2598723 - RNA, 19 nt, Homo sapiens
  misc_RNA (1)...(19): siRNA sense strand
cgcagaagacccugggaga

SEQ ID NO: 2598724 - RNA, 19 nt, Homo sapiens
  misc_RNA (1)...(19): siRNA sense strand
auaaugugccucagguuaa

SEQ ID NO: 2598725 - RNA, 19 nt, Homo sapiens
  misc_RNA (1)...(19): siRNA sense strand
agaggaggucuuugaacaa

SEQ ID NO: 2598726 - RNA, 19 nt, Homo sapiens
  misc_RNA (1)...(19): siRNA sense strand
agccagagaaagggagaaa

SEQ ID NO: 2598727 - RNA, 19 nt, Homo sapiens
  misc_RNA (1)...(19): siRNA sense strand
agagaaagggagaaagaac

SEQ ID NO: 2598728 - RNA, 19 nt, Homo sapiens
  misc_RNA (1)...(19): siRNA sense strand
aaucaaaggaugcccacaa

SEQ ID NO: 2598729 - RNA, 19 nt, Homo sapiens
  misc_RNA (1)...(19): siRNA sense strand
agaacaacuacaacagcaa

SEQ ID NO: 2598730 - RNA, 19 nt, Homo sapiens
  misc_RNA (1)...(19): siRNA sense strand
gagaaagaacgacagaaaa

SEQ ID NO: 2598731 - RNA, 19 nt, Homo sapiens
  misc_RNA (1)...(19): siRNA sense strand
gggagaauguggaggacgu

SEQ ID NO: 2598732 - RNA, 19 nt, Homo sapiens
  misc_RNA (1)...(19): siRNA sense strand
acaaggagcagcugcggaa

SEQ ID NO: 2598733 - RNA, 19 nt, Homo sapiens
  misc_RNA (1)...(19): siRNA sense strand
ccgccaaguuucgggagaa

SEQ ID NO: 2598734 - RNA, 19 nt, Homo sapiens
  misc_RNA (1)...(19): siRNA sense strand
acgacaacguccucaucaa

SEQ ID NO: 2598735 - RNA, 19 nt, Homo sapiens
  misc_RNA (1)...(19): siRNA sense strand
cgccaaguuucgggagaau

SEQ ID NO: 2598736 - RNA, 19 nt, Homo sapiens
  misc_RNA (1)...(19): siRNA sense strand
ugaggaaggacaaggagca

SEQ ID NO: 2598737 - RNA, 19 nt, Homo sapiens
  misc_RNA (1)...(19): siRNA sense strand
aggcgcaacggcagaagaa

SEQ ID NO: 2598738 - RNA, 19 nt, Homo sapiens
  misc_RNA (1)...(19): siRNA sense strand
gcuccaagguccuggccaa

SEQ ID NO: 2598739 - RNA, 19 nt, Homo sapiens
  misc_RNA (1)...(19): siRNA sense strand
aguccuaaacggaaagaaa

SEQ ID NO: 2598740 - RNA, 19 nt, Homo sapiens
  misc_RNA (1)...(19): siRNA sense strand
ccaagaaagagcuggccua

SEQ ID NO: 2598741 - RNA, 19 nt, Homo sapiens
  misc_RNA (1)...(19): siRNA sense strand
ccgugaggagcuugagaaa

SEQ ID NO: 2598742 - RNA, 19 nt, Homo sapiens
  misc_RNA (1)...(19): siRNA sense strand
cuuuauugccucagggcua

SEQ ID NO: 2598743 - RNA, 19 nt, Homo sapiens
  misc_RNA (1)...(19): siRNA sense strand
uccuaaacggaaagaaaua

SEQ ID NO: 2598744 - RNA, 19 nt, Homo sapiens
  misc_RNA (1)...(19): siRNA sense strand
gaaagaaauaccaugcaga

SEQ ID NO: 2598745 - RNA, 19 nt, Homo sapiens
  misc_RNA (1)...(19): siRNA sense strand
cucaaguaugggaaggaaa

SEQ ID NO: 2598746 - RNA, 19 nt, Homo sapiens
  misc_RNA (1)...(19): siRNA sense strand
ccuuucaggaggaguacua

SEQ ID NO: 2598747 - RNA, 19 nt, Homo sapiens
  misc_RNA (1)...(19): siRNA sense strand
ucaaguaugggaaggaaaa

SEQ ID NO: 2598748 - RNA, 19 nt, Homo sapiens
  misc_RNA (1)...(19): siRNA sense strand
cggagaagaagcaugagau

SEQ ID NO: 2598749 - RNA, 19 nt, Homo sapiens
  misc_RNA (1)...(19): siRNA sense strand
augauuggugugacggaaa

SEQ ID NO: 2598750 - RNA, 19 nt, Homo sapiens
  misc_RNA (1)...(19): siRNA sense strand
acaagcagcucuuccggaa

SEQ ID NO: 2598751 - RNA, 19 nt, Homo sapiens
  misc_RNA (1)...(19): siRNA sense strand
aagcagaaacugaaugacu

SEQ ID NO: 2598752 - RNA, 19 nt, Homo sapiens
  misc_RNA (1)...(19): siRNA sense strand
gggcaaagaaggaugcuga

SEQ ID NO: 2598753 - RNA, 19 nt, Homo sapiens
  misc_RNA (1)...(19): siRNA sense strand
gagcagagucgcagagcca

SEQ ID NO: 2598754 - RNA, 19 nt, Homo sapiens
  misc_RNA (1)...(19): siRNA sense strand
agacuggagaagaggagaa

SEQ ID NO: 2598755 - RNA, 19 nt, Homo sapiens
  misc_RNA (1)...(19): siRNA sense strand
uccuaaagcucaaggcaga

SEQ ID NO: 2598756 - RNA, 19 nt, Homo sapiens
  misc_RNA (1)...(19): siRNA sense strand
ggacguagcugugaagaga

SEQ ID NO: 2598757 - RNA, 19 nt, Homo sapiens
  misc_RNA (1)...(19): siRNA sense strand
agcucaaggcagagaagaa

SEQ ID NO: 2598758 - RNA, 19 nt, Homo sapiens
  misc_RNA (1)...(19): siRNA sense strand
caguggagaucauugggaa

SEQ ID NO: 2598759 - RNA, 19 nt, Homo sapiens
  misc_RNA (1)...(19): siRNA sense strand
gacagaaggcagaggucau

SEQ ID NO: 2598760 - RNA, 19 nt, Homo sapiens
  misc_RNA (1)...(19): siRNA sense strand
ccaugauccuggaacagua

SEQ ID NO: 2598761 - RNA, 19 nt, Homo sapiens
  misc_RNA (1)...(19): siRNA sense strand
ggaagaaucuggaaggcug

SEQ ID NO: 2598762 - RNA, 19 nt, Homo sapiens
  misc_RNA (1)...(19): siRNA sense strand
cggcaagaccucaggcacu

SEQ ID NO: 2598763 - RNA, 19 nt, Homo sapiens
  misc_RNA (1)...(19): siRNA sense strand
ccagaaugguacucgggau

SEQ ID NO: 2598764 - RNA, 19 nt, Homo sapiens
  misc_RNA (1)...(19): siRNA sense strand
ucuaugagaaugagggcuu

SEQ ID NO: 2598765 - RNA, 19 nt, Homo sapiens
  misc_RNA (1)...(19): siRNA sense strand
aggugcaggugcuggagaa

SEQ ID NO: 2598766 - RNA, 19 nt, Homo sapiens
  misc_RNA (1)...(19): siRNA sense strand
agugaggggucuaggagaa

SEQ ID NO: 2598767 - RNA, 19 nt, Homo sapiens
  misc_RNA (1)...(19): siRNA sense strand
caggcagaacgaaggcaaa

SEQ ID NO: 2598768 - RNA, 19 nt, Homo sapiens
  misc_RNA (1)...(19): siRNA sense strand
cugccaacccggaagaaga

SEQ ID NO: 2598769 - RNA, 19 nt, Homo sapiens
  misc_RNA (1)...(19): siRNA sense strand
gugaagagacugaagccca

SEQ ID NO: 2598770 - RNA, 19 nt, Homo sapiens
  misc_RNA (1)...(19): siRNA sense strand
gggaggugguggaugucau

SEQ ID NO: 2598771 - RNA, 19 nt, Homo sapiens
  misc_RNA (1)...(19): siRNA sense strand
gagaagaacgagagcggcu

SEQ ID NO: 2598772 - RNA, 19 nt, Homo sapiens
  misc_RNA (1)...(19): siRNA sense strand
caguggaggugauccggaa

SEQ ID NO: 2598773 - RNA, 19 nt, Homo sapiens
  misc_RNA (1)...(19): siRNA sense strand
cagccuuacaccagccaaa

SEQ ID NO: 2598774 - RNA, 19 nt, Homo sapiens
  misc_RNA (1)...(19): siRNA sense strand
gcaggcagaacgaaggcaa

SEQ ID NO: 2598775 - RNA, 19 nt, Homo sapiens
  misc_RNA (1)...(19): siRNA sense strand
aaucagacagccuggagaa

SEQ ID NO: 2598776 - RNA, 19 nt, Homo sapiens
  misc_RNA (1)...(19): siRNA sense strand
agaccaucuaugagaauga

SEQ ID NO: 2598777 - RNA, 19 nt, Homo sapiens
  misc_RNA (1)...(19): siRNA sense strand
aggcagaaauggggaagaa

SEQ ID NO: 2598778 - RNA, 19 nt, Homo sapiens
  misc_RNA (1)...(19): siRNA sense strand
cauacaucgauaagcgcaa

SEQ ID NO: 2598779 - RNA, 19 nt, Homo sapiens
  misc_RNA (1)...(19): siRNA sense strand
cagaaggaccccaagcaaa

SEQ ID NO: 2598780 - RNA, 19 nt, Homo sapiens
  misc_RNA (1)...(19): siRNA sense strand
cagcggugaagaugaggaa

SEQ ID NO: 2598781 - RNA, 19 nt, Homo sapiens
  misc_RNA (1)...(19): siRNA sense strand
aggauguggcccuggaaga

SEQ ID NO: 2598782 - RNA, 19 nt, Homo sapiens
  misc_RNA (1)...(19): siRNA sense strand
ugaagagacugaagcccau

SEQ ID NO: 2598783 - RNA, 19 nt, Homo sapiens
  misc_RNA (1)...(19): siRNA sense strand
aguacguggugguguccaa

SEQ ID NO: 2598784 - RNA, 19 nt, Homo sapiens
  misc_RNA (1)...(19): siRNA sense strand
gggucuaggagaagcucau

SEQ ID NO: 2598785 - RNA, 19 nt, Homo sapiens
  misc_RNA (1)...(19): siRNA sense strand
agaaggaugcugaugcgaa

SEQ ID NO: 2598786 - RNA, 19 nt, Homo sapiens
  misc_RNA (1)...(19): siRNA sense strand
ggacagaaggcagagguca

SEQ ID NO: 2598787 - RNA, 19 nt, Homo sapiens
  misc_RNA (1)...(19): siRNA sense strand
cuucaaggugggugagucu

SEQ ID NO: 2598788 - RNA, 19 nt, Homo sapiens
  misc_RNA (1)...(19): siRNA sense strand
agccaagagaagauggaca

SEQ ID NO: 2598789 - RNA, 19 nt, Homo sapiens
  misc_RNA (1)...(19): siRNA sense strand
ggaaacuccaccagccgaa

SEQ ID NO: 2598790 - RNA, 19 nt, Homo sapiens
  misc_RNA (1)...(19): siRNA sense strand
ccaccaagaaggaauggga

SEQ ID NO: 2598791 - RNA, 19 nt, Homo sapiens
  misc_RNA (1)...(19): siRNA sense strand
gaaggaaugggaagggcca

SEQ ID NO: 2598792 - RNA, 19 nt, Homo sapiens
  misc_RNA (1)...(19): siRNA sense strand
ggccauaugcagaggacac

SEQ ID NO: 2598793 - RNA, 19 nt, Homo sapiens
  misc_RNA (1)...(19): siRNA sense strand
gaaggaugcugaugcgaac

SEQ ID NO: 2598794 - RNA, 19 nt, Homo sapiens
  misc_RNA (1)...(19): siRNA sense strand
ggauaaguuucccauugaa

SEQ ID NO: 2598795 - RNA, 19 nt, Homo sapiens
  misc_RNA (1)...(19): siRNA sense strand
ccauagaacuggucagcca

SEQ ID NO: 2598796 - RNA, 19 nt, Homo sapiens
  misc_RNA (1)...(19): siRNA sense strand
gagucauugcuguggauaa

SEQ ID NO: 2598797 - RNA, 19 nt, Homo sapiens
  misc_RNA (1)...(19): siRNA sense strand
ggccagaaacagaggaacu

SEQ ID NO: 2598798 - RNA, 19 nt, Homo sapiens
  misc_RNA (1)...(19): siRNA sense strand
gggaggagggcauggacau

SEQ ID NO: 2598799 - RNA, 19 nt, Homo sapiens
  misc_RNA (1)...(19): siRNA sense strand
cagagaaaucagagagcca

SEQ ID NO: 2598800 - RNA, 19 nt, Homo sapiens
  misc_RNA (1)...(19): siRNA sense strand
uagacuuggaggugagcaa

SEQ ID NO: 2598801 - RNA, 19 nt, Homo sapiens
  misc_RNA (1)...(19): siRNA sense strand
gcaaaagaggccauggcaa

SEQ ID NO: 2598802 - RNA, 19 nt, Homo sapiens
  misc_RNA (1)...(19): siRNA sense strand
aagaaaugggucagcuaau

SEQ ID NO: 2598803 - RNA, 19 nt, Homo sapiens
  misc_RNA (1)...(19): siRNA sense strand
gggauaugccagagugaag

SEQ ID NO: 2598804 - RNA, 19 nt, Homo sapiens
  misc_RNA (1)...(19): siRNA sense strand
ccuuacagaugaaaacaaa

SEQ ID NO: 2598805 - RNA, 19 nt, Homo sapiens
  misc_RNA (1)...(19): siRNA sense strand
cugcagaagauccagagaa

SEQ ID NO: 2598806 - RNA, 19 nt, Homo sapiens
  misc_RNA (1)...(19): siRNA sense strand
guguagaauguaccugaaa

SEQ ID NO: 2598807 - RNA, 19 nt, Homo sapiens
  misc_RNA (1)...(19): siRNA sense strand
agauagaagcgguccagga

SEQ ID NO: 2598808 - RNA, 19 nt, Homo sapiens
  misc_RNA (1)...(19): siRNA sense strand
uggcagagagugagauuac

SEQ ID NO: 2598809 - RNA, 19 nt, Homo sapiens
  misc_RNA (1)...(19): siRNA sense strand
aauugaaguuccagauucu

SEQ ID NO: 2598810 - RNA, 19 nt, Homo sapiens
  misc_RNA (1)...(19): siRNA sense strand
ccgaacaaaaugcugaaaa

SEQ ID NO: 2598811 - RNA, 19 nt, Homo sapiens
  misc_RNA (1)...(19): siRNA sense strand
uuaauuuggaggcgcuaaa

SEQ ID NO: 2598812 - RNA, 19 nt, Homo sapiens
  misc_RNA (1)...(19): siRNA sense strand
cuacauaccuggaaggcaa

SEQ ID NO: 2598813 - RNA, 19 nt, Homo sapiens
  misc_RNA (1)...(19): siRNA sense strand
gggcaggaagagaggaaau

SEQ ID NO: 2598814 - RNA, 19 nt, Homo sapiens
  misc_RNA (1)...(19): siRNA sense strand
augcaaagguugagccaga

SEQ ID NO: 2598815 - RNA, 19 nt, Homo sapiens
  misc_RNA (1)...(19): siRNA sense strand
cugccugaauggaaggaaa

SEQ ID NO: 2598816 - RNA, 19 nt, Homo sapiens
  misc_RNA (1)...(19): siRNA sense strand
gggagaagagagucagaau

SEQ ID NO: 2598817 - RNA, 19 nt, Homo sapiens
  misc_RNA (1)...(19): siRNA sense strand
ccuuaugaauggugugaca

SEQ ID NO: 2598818 - RNA, 19 nt, Homo sapiens
  misc_RNA (1)...(19): siRNA sense strand
gaaaagggcugguuggcaa

SEQ ID NO: 2598819 - RNA, 19 nt, Homo sapiens
  misc_RNA (1)...(19): siRNA sense strand
gguugagccagaagugaaa

SEQ ID NO: 2598820 - RNA, 19 nt, Homo sapiens
  misc_RNA (1)...(19): siRNA sense strand
cuaccauggcuguguuaua

SEQ ID NO: 2598821 - RNA, 19 nt, Homo sapiens
  misc_RNA (1)...(19): siRNA sense strand
gaggaguggaagaggcgua

SEQ ID NO: 2598822 - RNA, 19 nt, Homo sapiens
  misc_RNA (1)...(19): siRNA sense strand
agccuuuccucuaggguua

SEQ ID NO: 2598823 - RNA, 19 nt, Homo sapiens
  misc_RNA (1)...(19): siRNA sense strand
agagaggaaauguggaaaa

SEQ ID NO: 2598824 - RNA, 19 nt, Homo sapiens
  misc_RNA (1)...(19): siRNA sense strand
guuauaaugggcaggaaga

SEQ ID NO: 2598825 - RNA, 19 nt, Homo sapiens
  misc_RNA (1)...(19): siRNA sense strand
ccacagaaaauguugacaa

SEQ ID NO: 2598826 - RNA, 19 nt, Homo sapiens
  misc_RNA (1)...(19): siRNA sense strand
uggccgaguuccagguuau

SEQ ID NO: 2598827 - RNA, 19 nt, Homo sapiens
  misc_RNA (1)...(19): siRNA sense strand
cagaagagaucccugccua

SEQ ID NO: 2598828 - RNA, 19 nt, Homo sapiens
  misc_RNA (1)...(19): siRNA sense strand
guucgggagaagagaguca

SEQ ID NO: 2598829 - RNA, 19 nt, Homo sapiens
  misc_RNA (1)...(19): siRNA sense strand
agguugagccagaagugaa

SEQ ID NO: 2598830 - RNA, 19 nt, Homo sapiens
  misc_RNA (1)...(19): siRNA sense strand
cugccgaccugaagauaca

SEQ ID NO: 2598831 - RNA, 19 nt, Homo sapiens
  misc_RNA (1)...(19): siRNA sense strand
gugacuggccauaagguau

SEQ ID NO: 2598832 - RNA, 19 nt, Homo sapiens
  misc_RNA (1)...(19): siRNA sense strand
cuaucaccgucgaggucaa

SEQ ID NO: 2598833 - RNA, 19 nt, Homo sapiens
  misc_RNA (1)...(19): siRNA sense strand
guugguuaguugugaagau

SEQ ID NO: 2598834 - RNA, 19 nt, Homo sapiens
  misc_RNA (1)...(19): siRNA sense strand
cgacgacagagaagagcuu

SEQ ID NO: 2598835 - RNA, 19 nt, Homo sapiens
  misc_RNA (1)...(19): siRNA sense strand
acaccagcaucgagcccaa

SEQ ID NO: 2598836 - RNA, 19 nt, Homo sapiens
  misc_RNA (1)...(19): siRNA sense strand
cccaccaagugcagaagaa

SEQ ID NO: 2598837 - RNA, 19 nt, Homo sapiens
  misc_RNA (1)...(19): siRNA sense strand
gaguggaugcaaagguuga

SEQ ID NO: 2598838 - RNA, 19 nt, Homo sapiens
  misc_RNA (1)...(19): siRNA sense strand
ccaaaauccucgagggcuc

SEQ ID NO: 2598839 - RNA, 19 nt, Homo sapiens
  misc_RNA (1)...(19): siRNA sense strand
aguacaggaaccagaccaa

SEQ ID NO: 2598840 - RNA, 19 nt, Homo sapiens
  misc_RNA (1)...(19): siRNA sense strand
gggucaaggaacugcagga

SEQ ID NO: 2598841 - RNA, 19 nt, Homo sapiens
  misc_RNA (1)...(19): siRNA sense strand
cgaccugaagauacagauu

SEQ ID NO: 2598842 - RNA, 19 nt, Homo sapiens
  misc_RNA (1)...(19): siRNA sense strand
uggucaaguucaugaaaug

SEQ ID NO: 2598843 - RNA, 19 nt, Homo sapiens
  misc_RNA (1)...(19): siRNA sense strand
caucagcauuacaagccaa

SEQ ID NO: 2598844 - RNA, 19 nt, Homo sapiens
  misc_RNA (1)...(19): siRNA sense strand
aaaaugaaucuguggguca

SEQ ID NO: 2598845 - RNA, 19 nt, Homo sapiens
  misc_RNA (1)...(19): siRNA sense strand
cugaauggaaggaaaauau

SEQ ID NO: 2598846 - RNA, 19 nt, Homo sapiens
  misc_RNA (1)...(19): siRNA sense strand
aauccaggcaccagauauu

SEQ ID NO: 2598847 - RNA, 19 nt, Homo sapiens
  misc_RNA (1)...(19): siRNA sense strand
aguagcaacccgagagaac

SEQ ID NO: 2598848 - RNA, 19 nt, Homo sapiens
  misc_RNA (1)...(19): siRNA sense strand
gggcauuccucgaagccgu

SEQ ID NO: 2598849 - RNA, 19 nt, Homo sapiens
  misc_RNA (1)...(19): siRNA sense strand
cuacauaccuggaaggcaa

SEQ ID NO: 2598850 - RNA, 19 nt, Homo sapiens
  misc_RNA (1)...(19): siRNA sense strand
gggcaggaagagaggaaau

SEQ ID NO: 2598851 - RNA, 19 nt, Homo sapiens
  misc_RNA (1)...(19): siRNA sense strand
augcaaagguugagccaga

SEQ ID NO: 2598852 - RNA, 19 nt, Homo sapiens
  misc_RNA (1)...(19): siRNA sense strand
cugccugaauggaaggaaa

SEQ ID NO: 2598853 - RNA, 19 nt, Homo sapiens
  misc_RNA (1)...(19): siRNA sense strand
gggagaagagagucagaau

SEQ ID NO: 2598854 - RNA, 19 nt, Homo sapiens
  misc_RNA (1)...(19): siRNA sense strand
ccuuaugaauggugugaca

SEQ ID NO: 2598855 - RNA, 19 nt, Homo sapiens
  misc_RNA (1)...(19): siRNA sense strand
gaaaagggcugguuggcaa

SEQ ID NO: 2598856 - RNA, 19 nt, Homo sapiens
  misc_RNA (1)...(19): siRNA sense strand
gguugagccagaagugaaa

SEQ ID NO: 2598857 - RNA, 19 nt, Homo sapiens
  misc_RNA (1)...(19): siRNA sense strand
cuaccauggcuguguuaua

SEQ ID NO: 2598858 - RNA, 19 nt, Homo sapiens
  misc_RNA (1)...(19): siRNA sense strand
gaggaguggaagaggcgua

SEQ ID NO: 2598859 - RNA, 19 nt, Homo sapiens
  misc_RNA (1)...(19): siRNA sense strand
agccuuuccucuaggguua

SEQ ID NO: 2598860 - RNA, 19 nt, Homo sapiens
  misc_RNA (1)...(19): siRNA sense strand
agagaggaaauguggaaaa

SEQ ID NO: 2598861 - RNA, 19 nt, Homo sapiens
  misc_RNA (1)...(19): siRNA sense strand
guuauaaugggcaggaaga

SEQ ID NO: 2598862 - RNA, 19 nt, Homo sapiens
  misc_RNA (1)...(19): siRNA sense strand
ccacagaaaauguugacaa

SEQ ID NO: 2598863 - RNA, 19 nt, Homo sapiens
  misc_RNA (1)...(19): siRNA sense strand
uggccgaguuccagguuau

SEQ ID NO: 2598864 - RNA, 19 nt, Homo sapiens
  misc_RNA (1)...(19): siRNA sense strand
cagaagagaucccugccua

SEQ ID NO: 2598865 - RNA, 19 nt, Homo sapiens
  misc_RNA (1)...(19): siRNA sense strand
guucgggagaagagaguca

SEQ ID NO: 2598866 - RNA, 19 nt, Homo sapiens
  misc_RNA (1)...(19): siRNA sense strand
agguugagccagaagugaa

SEQ ID NO: 2598867 - RNA, 19 nt, Homo sapiens
  misc_RNA (1)...(19): siRNA sense strand
cugccgaccugaagauaca

SEQ ID NO: 2598868 - RNA, 19 nt, Homo sapiens
  misc_RNA (1)...(19): siRNA sense strand
gugacuggccauaagguau

SEQ ID NO: 2598869 - RNA, 19 nt, Homo sapiens
  misc_RNA (1)...(19): siRNA sense strand
cuaucaccgucgaggucaa

SEQ ID NO: 2598870 - RNA, 19 nt, Homo sapiens
  misc_RNA (1)...(19): siRNA sense strand
guugguuaguugugaagau

SEQ ID NO: 2598871 - RNA, 19 nt, Homo sapiens
  misc_RNA (1)...(19): siRNA sense strand
cgacgacagagaagagcuu

SEQ ID NO: 2598872 - RNA, 19 nt, Homo sapiens
  misc_RNA (1)...(19): siRNA sense strand
acaccagcaucgagcccaa

SEQ ID NO: 2598873 - RNA, 19 nt, Homo sapiens
  misc_RNA (1)...(19): siRNA sense strand
cccaccaagugcagaagaa

SEQ ID NO: 2598874 - RNA, 19 nt, Homo sapiens
  misc_RNA (1)...(19): siRNA sense strand
gaguggaugcaaagguuga

SEQ ID NO: 2598875 - RNA, 19 nt, Homo sapiens
  misc_RNA (1)...(19): siRNA sense strand
ccaaaauccucgagggcuc

SEQ ID NO: 2598876 - RNA, 19 nt, Homo sapiens
  misc_RNA (1)...(19): siRNA sense strand
aguacaggaaccagaccaa

SEQ ID NO: 2598877 - RNA, 19 nt, Homo sapiens
  misc_RNA (1)...(19): siRNA sense strand
gggucaaggaacugcagga

SEQ ID NO: 2598878 - RNA, 19 nt, Homo sapiens
  misc_RNA (1)...(19): siRNA sense strand
cgaccugaagauacagauu

SEQ ID NO: 2598879 - RNA, 19 nt, Homo sapiens
  misc_RNA (1)...(19): siRNA sense strand
uggucaaguucaugaaaug

SEQ ID NO: 2598880 - RNA, 19 nt, Homo sapiens
  misc_RNA (1)...(19): siRNA sense strand
caucagcauuacaagccaa

SEQ ID NO: 2598881 - RNA, 19 nt, Homo sapiens
  misc_RNA (1)...(19): siRNA sense strand
aaaaugaaucuguggguca

SEQ ID NO: 2598882 - RNA, 19 nt, Homo sapiens
  misc_RNA (1)...(19): siRNA sense strand
cugaauggaaggaaaauau

SEQ ID NO: 2598883 - RNA, 19 nt, Homo sapiens
  misc_RNA (1)...(19): siRNA sense strand
aauccaggcaccagauauu

SEQ ID NO: 2598884 - RNA, 19 nt, Homo sapiens
  misc_RNA (1)...(19): siRNA sense strand
aguagcaacccgagagaac

SEQ ID NO: 2598885 - RNA, 19 nt, Homo sapiens
  misc_RNA (1)...(19): siRNA sense strand
gggcauuccucgaagccgu

SEQ ID NO: 2598886 - RNA, 19 nt, Homo sapiens
  misc_RNA (1)...(19): siRNA sense strand
cuacauaccuggaaggcaa

SEQ ID NO: 2598887 - RNA, 19 nt, Homo sapiens
  misc_RNA (1)...(19): siRNA sense strand
gggcaggaagagaggaaau

SEQ ID NO: 2598888 - RNA, 19 nt, Homo sapiens
  misc_RNA (1)...(19): siRNA sense strand
augcaaagguugagccaga

SEQ ID NO: 2598889 - RNA, 19 nt, Homo sapiens
  misc_RNA (1)...(19): siRNA sense strand
cugccugaauggaaggaaa

SEQ ID NO: 2598890 - RNA, 19 nt, Homo sapiens
  misc_RNA (1)...(19): siRNA sense strand
gggagaagagagucagaau

SEQ ID NO: 2598891 - RNA, 19 nt, Homo sapiens
  misc_RNA (1)...(19): siRNA sense strand
ccuuaugaauggugugaca

SEQ ID NO: 2598892 - RNA, 19 nt, Homo sapiens
  misc_RNA (1)...(19): siRNA sense strand
gaaaagggcugguuggcaa

SEQ ID NO: 2598893 - RNA, 19 nt, Homo sapiens
  misc_RNA (1)...(19): siRNA sense strand
gguugagccagaagugaaa

SEQ ID NO: 2598894 - RNA, 19 nt, Homo sapiens
  misc_RNA (1)...(19): siRNA sense strand
cuaccauggcuguguuaua

SEQ ID NO: 2598895 - RNA, 19 nt, Homo sapiens
  misc_RNA (1)...(19): siRNA sense strand
gaggaguggaagaggcgua

SEQ ID NO: 2598896 - RNA, 19 nt, Homo sapiens
  misc_RNA (1)...(19): siRNA sense strand
agccuuuccucuaggguua

SEQ ID NO: 2598897 - RNA, 19 nt, Homo sapiens
  misc_RNA (1)...(19): siRNA sense strand
agagaggaaauguggaaaa

SEQ ID NO: 2598898 - RNA, 19 nt, Homo sapiens
  misc_RNA (1)...(19): siRNA sense strand
guuauaaugggcaggaaga

SEQ ID NO: 2598899 - RNA, 19 nt, Homo sapiens
  misc_RNA (1)...(19): siRNA sense strand
ccacagaaaauguugacaa

SEQ ID NO: 2598900 - RNA, 19 nt, Homo sapiens
  misc_RNA (1)...(19): siRNA sense strand
uggccgaguuccagguuau

SEQ ID NO: 2598901 - RNA, 19 nt, Homo sapiens
  misc_RNA (1)...(19): siRNA sense strand
cagaagagaucccugccua

SEQ ID NO: 2598902 - RNA, 19 nt, Homo sapiens
  misc_RNA (1)...(19): siRNA sense strand
guucgggagaagagaguca

SEQ ID NO: 2598903 - RNA, 19 nt, Homo sapiens
  misc_RNA (1)...(19): siRNA sense strand
agguugagccagaagugaa

SEQ ID NO: 2598904 - RNA, 19 nt, Homo sapiens
  misc_RNA (1)...(19): siRNA sense strand
cugccgaccugaagauaca

SEQ ID NO: 2598905 - RNA, 19 nt, Homo sapiens
  misc_RNA (1)...(19): siRNA sense strand
gugacuggccauaagguau

SEQ ID NO: 2598906 - RNA, 19 nt, Homo sapiens
  misc_RNA (1)...(19): siRNA sense strand
cuaucaccgucgaggucaa

SEQ ID NO: 2598907 - RNA, 19 nt, Homo sapiens
  misc_RNA (1)...(19): siRNA sense strand
guugguuaguugugaagau

SEQ ID NO: 2598908 - RNA, 19 nt, Homo sapiens
  misc_RNA (1)...(19): siRNA sense strand
cgacgacagagaagagcuu

SEQ ID NO: 2598909 - RNA, 19 nt, Homo sapiens
  misc_RNA (1)...(19): siRNA sense strand
acaccagcaucgagcccaa

SEQ ID NO: 2598910 - RNA, 19 nt, Homo sapiens
  misc_RNA (1)...(19): siRNA sense strand
cccaccaagugcagaagaa

SEQ ID NO: 2598911 - RNA, 19 nt, Homo sapiens
  misc_RNA (1)...(19): siRNA sense strand
gaguggaugcaaagguuga

SEQ ID NO: 2598912 - RNA, 19 nt, Homo sapiens
  misc_RNA (1)...(19): siRNA sense strand
ccaaaauccucgagggcuc

SEQ ID NO: 2598913 - RNA, 19 nt, Homo sapiens
  misc_RNA (1)...(19): siRNA sense strand
aguacaggaaccagaccaa

SEQ ID NO: 2598914 - RNA, 19 nt, Homo sapiens
  misc_RNA (1)...(19): siRNA sense strand
gggucaaggaacugcagga

SEQ ID NO: 2598915 - RNA, 19 nt, Homo sapiens
  misc_RNA (1)...(19): siRNA sense strand
cgaccugaagauacagauu

SEQ ID NO: 2598916 - RNA, 19 nt, Homo sapiens
  misc_RNA (1)...(19): siRNA sense strand
uggucaaguucaugaaaug

SEQ ID NO: 2598917 - RNA, 19 nt, Homo sapiens
  misc_RNA (1)...(19): siRNA sense strand
caucagcauuacaagccaa

SEQ ID NO: 2598918 - RNA, 19 nt, Homo sapiens
  misc_RNA (1)...(19): siRNA sense strand
aaaaugaaucuguggguca

SEQ ID NO: 2598919 - RNA, 19 nt, Homo sapiens
  misc_RNA (1)...(19): siRNA sense strand
cugaauggaaggaaaauau

SEQ ID NO: 2598920 - RNA, 19 nt, Homo sapiens
  misc_RNA (1)...(19): siRNA sense strand
aauccaggcaccagauauu

SEQ ID NO: 2598921 - RNA, 19 nt, Homo sapiens
  misc_RNA (1)...(19): siRNA sense strand
aguagcaacccgagagaac

SEQ ID NO: 2598922 - RNA, 19 nt, Homo sapiens
  misc_RNA (1)...(19): siRNA sense strand
gggcauuccucgaagccgu

SEQ ID NO: 2598923 - RNA, 19 nt, Homo sapiens
  misc_RNA (1)...(19): siRNA sense strand
ugggaaaucaaaugagaaa

SEQ ID NO: 2598924 - RNA, 19 nt, Homo sapiens
  misc_RNA (1)...(19): siRNA sense strand
gugaaagguaacacagaaa

SEQ ID NO: 2598925 - RNA, 19 nt, Homo sapiens
  misc_RNA (1)...(19): siRNA sense strand
auacaaacucuguggaaga

SEQ ID NO: 2598926 - RNA, 19 nt, Homo sapiens
  misc_RNA (1)...(19): siRNA sense strand
cagccaagagagagauaau

SEQ ID NO: 2598927 - RNA, 19 nt, Homo sapiens
  misc_RNA (1)...(19): siRNA sense strand
acauaugagaccaaguaaa

SEQ ID NO: 2598928 - RNA, 19 nt, Homo sapiens
  misc_RNA (1)...(19): siRNA sense strand
gcuacaaaacccaguaaaa

SEQ ID NO: 2598929 - RNA, 19 nt, Homo sapiens
  misc_RNA (1)...(19): siRNA sense strand
acgaaagagccauuguuaa

SEQ ID NO: 2598930 - RNA, 19 nt, Homo sapiens
  misc_RNA (1)...(19): siRNA sense strand
ggaaggauguaaagccuca

SEQ ID NO: 2598931 - RNA, 19 nt, Homo sapiens
  misc_RNA (1)...(19): siRNA sense strand
cuggagaagagaagcagaa

SEQ ID NO: 2598932 - RNA, 19 nt, Homo sapiens
  misc_RNA (1)...(19): siRNA sense strand
gaagagaagcagaagccuu

SEQ ID NO: 2598933 - RNA, 19 nt, Homo sapiens
  misc_RNA (1)...(19): siRNA sense strand
agaaaaggacacagaaaga

SEQ ID NO: 2598934 - RNA, 19 nt, Homo sapiens
  misc_RNA (1)...(19): siRNA sense strand
aagauaagagacaggaaaa

SEQ ID NO: 2598935 - RNA, 19 nt, Homo sapiens
  misc_RNA (1)...(19): siRNA sense strand
acagaaaggaaguguggga

SEQ ID NO: 2598936 - RNA, 19 nt, Homo sapiens
  misc_RNA (1)...(19): siRNA sense strand
aaagaaaaggacacagaaa

SEQ ID NO: 2598937 - RNA, 19 nt, Homo sapiens
  misc_RNA (1)...(19): siRNA sense strand
ggacacagaaagacagcca

SEQ ID NO: 2598938 - RNA, 19 nt, Homo sapiens
  misc_RNA (1)...(19): siRNA sense strand
ucugaauagaguuggguuu

SEQ ID NO: 2598939 - RNA, 19 nt, Homo sapiens
  misc_RNA (1)...(19): siRNA sense strand
aguaauaaagcaucgaaga

SEQ ID NO: 2598940 - RNA, 19 nt, Homo sapiens
  misc_RNA (1)...(19): siRNA sense strand
aggaagcuucauaaagaua

SEQ ID NO: 2598941 - RNA, 19 nt, Homo sapiens
  misc_RNA (1)...(19): siRNA sense strand
uugucaaacccaaacgaaa

SEQ ID NO: 2598942 - RNA, 19 nt, Homo sapiens
  misc_RNA (1)...(19): siRNA sense strand
aggcagaagcauaaagaag

SEQ ID NO: 2598943 - RNA, 19 nt, Homo sapiens
  misc_RNA (1)...(19): siRNA sense strand
aagacagccaagagagaga

SEQ ID NO: 2598944 - RNA, 19 nt, Homo sapiens
  misc_RNA (1)...(19): siRNA sense strand
gagccauuguuaaagaaaa

SEQ ID NO: 2598945 - RNA, 19 nt, Homo sapiens
  misc_RNA (1)...(19): siRNA sense strand
gaguauuuacaaaggcaga

SEQ ID NO: 2598946 - RNA, 19 nt, Homo sapiens
  misc_RNA (1)...(19): siRNA sense strand
gcauaaagaagcuccgagu

SEQ ID NO: 2598947 - RNA, 19 nt, Homo sapiens
  misc_RNA (1)...(19): siRNA sense strand
aaacagauguaccuggaga

SEQ ID NO: 2598948 - RNA, 19 nt, Homo sapiens
  misc_RNA (1)...(19): siRNA sense strand
acaaaagaagacugguuaa

SEQ ID NO: 2598949 - RNA, 19 nt, Homo sapiens
  misc_RNA (1)...(19): siRNA sense strand
gcuccgaguaauaaagcau

SEQ ID NO: 2598950 - RNA, 19 nt, Homo sapiens
  misc_RNA (1)...(19): siRNA sense strand
gugggaaaucaaaugagaa

SEQ ID NO: 2598951 - RNA, 19 nt, Homo sapiens
  misc_RNA (1)...(19): siRNA sense strand
aagaacggaaggauguaaa

SEQ ID NO: 2598952 - RNA, 19 nt, Homo sapiens
  misc_RNA (1)...(19): siRNA sense strand
ugggaagcagccugauaaa

SEQ ID NO: 2598953 - RNA, 19 nt, Homo sapiens
  misc_RNA (1)...(19): siRNA sense strand
caaaagaagacugguuaaa

SEQ ID NO: 2598954 - RNA, 19 nt, Homo sapiens
  misc_RNA (1)...(19): siRNA sense strand
gcuucagugcagauggauu

SEQ ID NO: 2598955 - RNA, 19 nt, Homo sapiens
  misc_RNA (1)...(19): siRNA sense strand
aggaagugugggagcuaca

SEQ ID NO: 2598956 - RNA, 19 nt, Homo sapiens
  misc_RNA (1)...(19): siRNA sense strand
guacaaaagaagacugguu

SEQ ID NO: 2598957 - RNA, 19 nt, Homo sapiens
  misc_RNA (1)...(19): siRNA sense strand
caauauaagcaacgaagcu

SEQ ID NO: 2598958 - RNA, 19 nt, Homo sapiens
  misc_RNA (1)...(19): siRNA sense strand
uaaagauaagagacaggaa

SEQ ID NO: 2598959 - RNA, 19 nt, Homo sapiens
  misc_RNA (1)...(19): siRNA sense strand
cggugaaagguaacacaga

SEQ ID NO: 2598960 - RNA, 19 nt, Homo sapiens
  misc_RNA (1)...(19): siRNA sense strand
guuuaaaugcacugaacgu

SEQ ID NO: 2598961 - RNA, 19 nt, Homo sapiens
  misc_RNA (1)...(19): siRNA sense strand
acgaaagcgaguucaucua

SEQ ID NO: 2598962 - RNA, 19 nt, Homo sapiens
  misc_RNA (1)...(19): siRNA sense strand
cuacauucaaauuagguga

SEQ ID NO: 2598963 - RNA, 19 nt, Homo sapiens
  misc_RNA (1)...(19): siRNA sense strand
ucgagaagaugacaggcaa

SEQ ID NO: 2598964 - RNA, 19 nt, Homo sapiens
  misc_RNA (1)...(19): siRNA sense strand
agaacaaagagaaggaaaa

SEQ ID NO: 2598965 - RNA, 19 nt, Homo sapiens
  misc_RNA (1)...(19): siRNA sense strand
aagaacaaagagaaggaaa

SEQ ID NO: 2598966 - RNA, 19 nt, Homo sapiens
  misc_RNA (1)...(19): siRNA sense strand
aggcagaguaccagggcau

SEQ ID NO: 2598967 - RNA, 19 nt, Homo sapiens
  misc_RNA (1)...(19): siRNA sense strand
ggauugaggcagaguacca

SEQ ID NO: 2598968 - RNA, 19 nt, Homo sapiens
  misc_RNA (1)...(19): siRNA sense strand
aggagaagaacaaagagaa

SEQ ID NO: 2598969 - RNA, 19 nt, Homo sapiens
  misc_RNA (1)...(19): siRNA sense strand
ccuggauggcugugaaauu

SEQ ID NO: 2598970 - RNA, 19 nt, Homo sapiens
  misc_RNA (1)...(19): siRNA sense strand
augaagagauccugaggca

SEQ ID NO: 2598971 - RNA, 19 nt, Homo sapiens
  misc_RNA (1)...(19): siRNA sense strand
gggucaacgaugugaacga

SEQ ID NO: 2598972 - RNA, 19 nt, Homo sapiens
  misc_RNA (1)...(19): siRNA sense strand
cuauaaguuuacagugaca

SEQ ID NO: 2598973 - RNA, 19 nt, Homo sapiens
  misc_RNA (1)...(19): siRNA sense strand
gcaaaggcaugaaggucca

SEQ ID NO: 2598974 - RNA, 19 nt, Homo sapiens
  misc_RNA (1)...(19): siRNA sense strand
cuguaaacccagcuggcaa

SEQ ID NO: 2598975 - RNA, 19 nt, Homo sapiens
  misc_RNA (1)...(19): siRNA sense strand
agaagaacaaagagaagga

SEQ ID NO: 2598976 - RNA, 19 nt, Homo sapiens
  misc_RNA (1)...(19): siRNA sense strand
agccauggauugaggcaga

SEQ ID NO: 2598977 - RNA, 19 nt, Homo sapiens
  misc_RNA (1)...(19): siRNA sense strand
ggaagaagcgggcagcaga

SEQ ID NO: 2598978 - RNA, 19 nt, Homo sapiens
  misc_RNA (1)...(19): siRNA sense strand
aauucaucguggaggucaa

SEQ ID NO: 2598979 - RNA, 19 nt, Homo sapiens
  misc_RNA (1)...(19): siRNA sense strand
ccauagagcugcagaccag

SEQ ID NO: 2598980 - RNA, 19 nt, Homo sapiens
  misc_RNA (1)...(19): siRNA sense strand
gcgcuaugcaggugagauc

SEQ ID NO: 2598981 - RNA, 19 nt, Homo sapiens
  misc_RNA (1)...(19): siRNA sense strand
gggcacagugacagacaca

SEQ ID NO: 2598982 - RNA, 19 nt, Homo sapiens
  misc_RNA (1)...(19): siRNA sense strand
ccuggagaccugugaugaa

SEQ ID NO: 2598983 - RNA, 19 nt, Homo sapiens
  misc_RNA (1)...(19): siRNA sense strand
ccugcuggacugaggagaa

SEQ ID NO: 2598984 - RNA, 19 nt, Homo sapiens
  misc_RNA (1)...(19): siRNA sense strand
aagagaaggaaaagggaga

SEQ ID NO: 2598985 - RNA, 19 nt, Homo sapiens
  misc_RNA (1)...(19): siRNA sense strand
acgcaugucggaugagauu

SEQ ID NO: 2598986 - RNA, 19 nt, Homo sapiens
  misc_RNA (1)...(19): siRNA sense strand
cggaaaugaauggccguua

SEQ ID NO: 2598987 - RNA, 19 nt, Homo sapiens
  misc_RNA (1)...(19): siRNA sense strand
ggcaagaaggaagaggaaa

SEQ ID NO: 2598988 - RNA, 19 nt, Homo sapiens
  misc_RNA (1)...(19): siRNA sense strand
ccauggaguccuaccagaa

SEQ ID NO: 2598989 - RNA, 19 nt, Homo sapiens
  misc_RNA (1)...(19): siRNA sense strand
agaaggaagaggaaaccau

SEQ ID NO: 2598990 - RNA, 19 nt, Homo sapiens
  misc_RNA (1)...(19): siRNA sense strand
guaacaaagccaacaagca

SEQ ID NO: 2598991 - RNA, 19 nt, Homo sapiens
  misc_RNA (1)...(19): siRNA sense strand
gggcaucgucauggagaau

SEQ ID NO: 2598992 - RNA, 19 nt, Homo sapiens
  misc_RNA (1)...(19): siRNA sense strand
uggaugaagcauggcguaa

SEQ ID NO: 2598993 - RNA, 19 nt, Homo sapiens
  misc_RNA (1)...(19): siRNA sense strand
gaugagaguuggcagggca

SEQ ID NO: 2598994 - RNA, 19 nt, Homo sapiens
  misc_RNA (1)...(19): siRNA sense strand
cuguggacuuugagggaac

SEQ ID NO: 2598995 - RNA, 19 nt, Homo sapiens
  misc_RNA (1)...(19): siRNA sense strand
agggcaucgucauggagaa

SEQ ID NO: 2598996 - RNA, 19 nt, Homo sapiens
  misc_RNA (1)...(19): siRNA sense strand
cagaugaugcugaggugga

SEQ ID NO: 2598997 - RNA, 19 nt, Homo sapiens
  misc_RNA (1)...(19): siRNA sense strand
ccaaggagccuguggacug

SEQ ID NO: 2598998 - RNA, 19 nt, Homo sapiens
  misc_RNA (1)...(19): siRNA sense strand
cagcaggacucucggugca

SEQ ID NO: 2598999 - RNA, 19 nt, Homo sapiens
  misc_RNA (1)...(19): siRNA sense strand
ggagcaggucugugaugau

SEQ ID NO: 2599000 - RNA, 19 nt, Homo sapiens
  misc_RNA (1)...(19): siRNA sense strand
cugaggagaagaacaaaga

SEQ ID NO: 2599001 - RNA, 19 nt, Homo sapiens
  misc_RNA (1)...(19): siRNA sense strand
acagagaagcugcaguaca

SEQ ID NO: 2599002 - RNA, 19 nt, Homo sapiens
  misc_RNA (1)...(19): siRNA sense strand
gcuggacugaggagaagaa

SEQ ID NO: 2599003 - RNA, 19 nt, Homo sapiens
  misc_RNA (1)...(19): siRNA sense strand
ggcaagagaugaauggcaa

SEQ ID NO: 2599004 - RNA, 19 nt, Homo sapiens
  misc_RNA (1)...(19): siRNA sense strand
ucuccaaagucaaggggaa

SEQ ID NO: 2599005 - RNA, 19 nt, Homo sapiens
  misc_RNA (1)...(19): siRNA sense strand
gggcaagagaugaauggca

SEQ ID NO: 2599006 - RNA, 19 nt, Homo sapiens
  misc_RNA (1)...(19): siRNA sense strand
ccuacgaugccaaggugaa

SEQ ID NO: 2599007 - RNA, 19 nt, Homo sapiens
  misc_RNA (1)...(19): siRNA sense strand
cggcaagggcaagggcauu

SEQ ID NO: 2599008 - RNA, 19 nt, Homo sapiens
  misc_RNA (1)...(19): siRNA sense strand
gggaagucugcucggguca

SEQ ID NO: 2599009 - RNA, 19 nt, Homo sapiens
  misc_RNA (1)...(19): siRNA sense strand
ggcaagagaugaauggcaa

SEQ ID NO: 2599010 - RNA, 19 nt, Homo sapiens
  misc_RNA (1)...(19): siRNA sense strand
aggcaaagagccagccaau

SEQ ID NO: 2599011 - RNA, 19 nt, Homo sapiens
  misc_RNA (1)...(19): siRNA sense strand
ucuccaaagucaaggggaa

SEQ ID NO: 2599012 - RNA, 19 nt, Homo sapiens
  misc_RNA (1)...(19): siRNA sense strand
gggcaagagaugaauggca

SEQ ID NO: 2599013 - RNA, 19 nt, Homo sapiens
  misc_RNA (1)...(19): siRNA sense strand
ccuacgaugccaaggugaa

SEQ ID NO: 2599014 - RNA, 19 nt, Homo sapiens
  misc_RNA (1)...(19): siRNA sense strand
cggcaagggcaagggcauu

SEQ ID NO: 2599015 - RNA, 19 nt, Homo sapiens
  misc_RNA (1)...(19): siRNA sense strand
gggaagucugcucggguca

SEQ ID NO: 2599016 - RNA, 19 nt, Homo sapiens
  misc_RNA (1)...(19): siRNA sense strand
ccagcugguggcaggcaaa

SEQ ID NO: 2599017 - RNA, 19 nt, Homo sapiens
  misc_RNA (1)...(19): siRNA sense strand
ccaccugggcaaagcgaaa

SEQ ID NO: 2599018 - RNA, 19 nt, Homo sapiens
  misc_RNA (1)...(19): siRNA sense strand
gagaaggacaugaaggaca

SEQ ID NO: 2599019 - RNA, 19 nt, Homo sapiens
  misc_RNA (1)...(19): siRNA sense strand
ugaagaaggagaaggacau

SEQ ID NO: 2599020 - RNA, 19 nt, Homo sapiens
  misc_RNA (1)...(19): siRNA sense strand
ccggagaagcaguggcaca

SEQ ID NO: 2599021 - RNA, 19 nt, Homo sapiens
  misc_RNA (1)...(19): siRNA sense strand
gcagauggcuccaagcaga

SEQ ID NO: 2599022 - RNA, 19 nt, Homo sapiens
  misc_RNA (1)...(19): siRNA sense strand
cugggaacaugaaggagaa

SEQ ID NO: 2599023 - RNA, 19 nt, Homo sapiens
  misc_RNA (1)...(19): siRNA sense strand
ccaugaaaguccacggagu

SEQ ID NO: 2599024 - RNA, 19 nt, Homo sapiens
  misc_RNA (1)...(19): siRNA sense strand
aucaaagcauugugagcaa

SEQ ID NO: 2599025 - RNA, 19 nt, Homo sapiens
  misc_RNA (1)...(19): siRNA sense strand
aggccaaccaccugggcaa

SEQ ID NO: 2599026 - RNA, 19 nt, Homo sapiens
  misc_RNA (1)...(19): siRNA sense strand
ggagaaacccaguggcaag

SEQ ID NO: 2599027 - RNA, 19 nt, Homo sapiens
  misc_RNA (1)...(19): siRNA sense strand
uggacaagccgaugaacau

SEQ ID NO: 2599028 - RNA, 19 nt, Homo sapiens
  misc_RNA (1)...(19): siRNA sense strand
uugaagaaggagaaggaca

SEQ ID NO: 2599029 - RNA, 19 nt, Homo sapiens
  misc_RNA (1)...(19): siRNA sense strand
ucaaggagacucugggaga

SEQ ID NO: 2599030 - RNA, 19 nt, Homo sapiens
  misc_RNA (1)...(19): siRNA sense strand
ggaugagaugucaagcaaa

SEQ ID NO: 2599031 - RNA, 19 nt, Homo sapiens
  misc_RNA (1)...(19): siRNA sense strand
aggagaaggacaugaagga

SEQ ID NO: 2599032 - RNA, 19 nt, Homo sapiens
  misc_RNA (1)...(19): siRNA sense strand
gauaaggagaagcgggagu

SEQ ID NO: 2599033 - RNA, 19 nt, Homo sapiens
  misc_RNA (1)...(19): siRNA sense strand
ccugggaacaugaaggaga

SEQ ID NO: 2599034 - RNA, 19 nt, Homo sapiens
  misc_RNA (1)...(19): siRNA sense strand
agaggaaguccgagaaauc

SEQ ID NO: 2599035 - RNA, 19 nt, Homo sapiens
  misc_RNA (1)...(19): siRNA sense strand
guugaaaccgaaccggaaa

SEQ ID NO: 2599036 - RNA, 19 nt, Homo sapiens
  misc_RNA (1)...(19): siRNA sense strand
cccgaaaccacgaguaaga

SEQ ID NO: 2599037 - RNA, 19 nt, Homo sapiens
  misc_RNA (1)...(19): siRNA sense strand
agaaggaagcgcuggggaa

SEQ ID NO: 2599038 - RNA, 19 nt, Homo sapiens
  misc_RNA (1)...(19): siRNA sense strand
cguuacaaucaaacaaaga

SEQ ID NO: 2599039 - RNA, 19 nt, Homo sapiens
  misc_RNA (1)...(19): siRNA sense strand
agaagauggcccaagguca

SEQ ID NO: 2599040 - RNA, 19 nt, Homo sapiens
  misc_RNA (1)...(19): siRNA sense strand
cgugguuccucaaggguca

SEQ ID NO: 2599041 - RNA, 19 nt, Homo sapiens
  misc_RNA (1)...(19): siRNA sense strand
cugccaaggcugcggagau

SEQ ID NO: 2599042 - RNA, 19 nt, Homo sapiens
  misc_RNA (1)...(19): siRNA sense strand
ggguggacuugcagcaguu

SEQ ID NO: 2599043 - RNA, 19 nt, Homo sapiens
  misc_RNA (1)...(19): siRNA sense strand
caguaugccaugagucaga

SEQ ID NO: 2599044 - RNA, 19 nt, Homo sapiens
  misc_RNA (1)...(19): siRNA sense strand
gaggagaaacccaguggca

SEQ ID NO: 2599045 - RNA, 19 nt, Homo sapiens
  misc_RNA (1)...(19): siRNA sense strand
agucaacugcaaagaccaa

SEQ ID NO: 2599046 - RNA, 19 nt, Homo sapiens
  misc_RNA (1)...(19): siRNA sense strand
ucaucagccacguggagaa

SEQ ID NO: 2599047 - RNA, 19 nt, Homo sapiens
  misc_RNA (1)...(19): siRNA sense strand
agaacaacgaugaagagga

SEQ ID NO: 2599048 - RNA, 19 nt, Homo sapiens
  misc_RNA (1)...(19): siRNA sense strand
aggaggagcucaucagcca

SEQ ID NO: 2599049 - RNA, 19 nt, Homo sapiens
  misc_RNA (1)...(19): siRNA sense strand
gugaacagcuaccaggcuu

SEQ ID NO: 2599050 - RNA, 19 nt, Homo sapiens
  misc_RNA (1)...(19): siRNA sense strand
caaacaaagaccugggccu

SEQ ID NO: 2599051 - RNA, 19 nt, Homo sapiens
  misc_RNA (1)...(19): siRNA sense strand
ugagcgacaucgaggacga

SEQ ID NO: 2599052 - RNA, 19 nt, Homo sapiens
  misc_RNA (1)...(19): siRNA sense strand
uguugaaaccgaaccggaa

SEQ ID NO: 2599053 - RNA, 19 nt, Homo sapiens
  misc_RNA (1)...(19): siRNA sense strand
gcaucucagcaguggacau

SEQ ID NO: 2599054 - RNA, 19 nt, Homo sapiens
  misc_RNA (1)...(19): siRNA sense strand
gccaguaugccaugaguca

SEQ ID NO: 2599055 - RNA, 19 nt, Homo sapiens
  misc_RNA (1)...(19): siRNA sense strand
uggaugguggugaggagaa

SEQ ID NO: 2599056 - RNA, 19 nt, Homo sapiens
  misc_RNA (1)...(19): siRNA sense strand
cuggacaagccgaugaaca

SEQ ID NO: 2599057 - RNA, 19 nt, Homo sapiens
  misc_RNA (1)...(19): siRNA sense strand
acaagcugucggugaagaa

SEQ ID NO: 2599058 - RNA, 19 nt, Homo sapiens
  misc_RNA (1)...(19): siRNA sense strand
acaacgaugaagaggaugu

SEQ ID NO: 2599059 - RNA, 19 nt, Homo sapiens
  misc_RNA (1)...(19): siRNA sense strand
acgaugaagaggauguuga

SEQ ID NO: 2599060 - RNA, 19 nt, Homo sapiens
  misc_RNA (1)...(19): siRNA sense strand
ggaccaggacagagagaau

SEQ ID NO: 2599061 - RNA, 19 nt, Homo sapiens
  misc_RNA (1)...(19): siRNA sense strand
uggcaagacugcaggacca

SEQ ID NO: 2599062 - RNA, 19 nt, Homo sapiens
  misc_RNA (1)...(19): siRNA sense strand
aacaagaggcccagggaca

SEQ ID NO: 2599063 - RNA, 19 nt, Homo sapiens
  misc_RNA (1)...(19): siRNA sense strand
aggacaaugcacaaagcaa

SEQ ID NO: 2599064 - RNA, 19 nt, Homo sapiens
  misc_RNA (1)...(19): siRNA sense strand
cagcgagaagccaggacaa

SEQ ID NO: 2599065 - RNA, 19 nt, Homo sapiens
  misc_RNA (1)...(19): siRNA sense strand
cccaaauggaguuaaagaa

SEQ ID NO: 2599066 - RNA, 19 nt, Homo sapiens
  misc_RNA (1)...(19): siRNA sense strand
aggggaaagaugagaagaa

SEQ ID NO: 2599067 - RNA, 19 nt, Homo sapiens
  misc_RNA (1)...(19): siRNA sense strand
gugaggaccaggacagaga

SEQ ID NO: 2599068 - RNA, 19 nt, Homo sapiens
  misc_RNA (1)...(19): siRNA sense strand
acaaagagguagagacucc

SEQ ID NO: 2599069 - RNA, 19 nt, Homo sapiens
  misc_RNA (1)...(19): siRNA sense strand
acuggaacacagagaaaca

SEQ ID NO: 2599070 - RNA, 19 nt, Homo sapiens
  misc_RNA (1)...(19): siRNA sense strand
ggacagcuucucugggaca

SEQ ID NO: 2599071 - RNA, 19 nt, Homo sapiens
  misc_RNA (1)...(19): siRNA sense strand
agaaaagucuucauggaga

SEQ ID NO: 2599072 - RNA, 19 nt, Homo sapiens
  misc_RNA (1)...(19): siRNA sense strand
gagaagaagccacgagcac

SEQ ID NO: 2599073 - RNA, 19 nt, Homo sapiens
  misc_RNA (1)...(19): siRNA sense strand
ucuacagcauccagagaca

SEQ ID NO: 2599074 - RNA, 19 nt, Homo sapiens
  misc_RNA (1)...(19): siRNA sense strand
gcagguacuagaaaagaaa

SEQ ID NO: 2599075 - RNA, 19 nt, Homo sapiens
  misc_RNA (1)...(19): siRNA sense strand
ccggaaauucaaaggauac

SEQ ID NO: 2599076 - RNA, 19 nt, Homo sapiens
  misc_RNA (1)...(19): siRNA sense strand
guaaaagacaagaggccca

SEQ ID NO: 2599077 - RNA, 19 nt, Homo sapiens
  misc_RNA (1)...(19): siRNA sense strand
gugaauaacugcugucccu

SEQ ID NO: 2599078 - RNA, 19 nt, Homo sapiens
  misc_RNA (1)...(19): siRNA sense strand
ccuuaugaguguagugaau

SEQ ID NO: 2599079 - RNA, 19 nt, Homo sapiens
  misc_RNA (1)...(19): siRNA sense strand
ccuuaugaauguagugaau

SEQ ID NO: 2599080 - RNA, 19 nt, Homo sapiens
  misc_RNA (1)...(19): siRNA sense strand
guguagugaauguggcaaa

SEQ ID NO: 2599081 - RNA, 19 nt, Homo sapiens
  misc_RNA (1)...(19): siRNA sense strand
auguagugaaugugggaaa

SEQ ID NO: 2599082 - RNA, 19 nt, Homo sapiens
  misc_RNA (1)...(19): siRNA sense strand
auguagugaaugugggaaa

SEQ ID NO: 2599083 - RNA, 19 nt, Homo sapiens
  misc_RNA (1)...(19): siRNA sense strand
aguccacaccggagagaaa

SEQ ID NO: 2599084 - RNA, 19 nt, Homo sapiens
  misc_RNA (1)...(19): siRNA sense strand
acucagaagaaauggaaaa

SEQ ID NO: 2599085 - RNA, 19 nt, Homo sapiens
  misc_RNA (1)...(19): siRNA sense strand
aggacaaaccucagaugaa

SEQ ID NO: 2599086 - RNA, 19 nt, Homo sapiens
  misc_RNA (1)...(19): siRNA sense strand
cagcacagaaacaggaaau

SEQ ID NO: 2599087 - RNA, 19 nt, Homo sapiens
  misc_RNA (1)...(19): siRNA sense strand
ucaaggaguuagaaggaca

SEQ ID NO: 2599088 - RNA, 19 nt, Homo sapiens
  misc_RNA (1)...(19): siRNA sense strand
aggcauuuggucugaguaa

SEQ ID NO: 2599089 - RNA, 19 nt, Homo sapiens
  misc_RNA (1)...(19): siRNA sense strand
uggaaauaacagaugaaga

SEQ ID NO: 2599090 - RNA, 19 nt, Homo sapiens
  misc_RNA (1)...(19): siRNA sense strand
gggaaagcuuuuagugaca

SEQ ID NO: 2599091 - RNA, 19 nt, Homo sapiens
  misc_RNA (1)...(19): siRNA sense strand
gaauauaaugaguguggga

SEQ ID NO: 2599092 - RNA, 19 nt, Homo sapiens
  misc_RNA (1)...(19): siRNA sense strand
cggcuacacuucaggcaau

SEQ ID NO: 2599093 - RNA, 19 nt, Homo sapiens
  misc_RNA (1)...(19): siRNA sense strand
gaagauacuuucaaggagu

SEQ ID NO: 2599094 - RNA, 19 nt, Homo sapiens
  misc_RNA (1)...(19): siRNA sense strand
cuauaaaugcaaugagugu

SEQ ID NO: 2599095 - RNA, 19 nt, Homo sapiens
  misc_RNA (1)...(19): siRNA sense strand
uggagauguuugugaagau

SEQ ID NO: 2599096 - RNA, 19 nt, Homo sapiens
  misc_RNA (1)...(19): siRNA sense strand
caaugaguguggagaggca

SEQ ID NO: 2599097 - RNA, 19 nt, Homo sapiens
  misc_RNA (1)...(19): siRNA sense strand
augcaaugagugugggaga

SEQ ID NO: 2599098 - RNA, 19 nt, Homo sapiens
  misc_RNA (1)...(19): siRNA sense strand
gaacaugaugccagaaaau

SEQ ID NO: 2599099 - RNA, 19 nt, Homo sapiens
  misc_RNA (1)...(19): siRNA sense strand
ucauugaccaucagagaau

SEQ ID NO: 2599100 - RNA, 19 nt, Homo sapiens
  misc_RNA (1)...(19): siRNA sense strand
augcaaugaguguggaaaa

SEQ ID NO: 2599101 - RNA, 19 nt, Homo sapiens
  misc_RNA (1)...(19): siRNA sense strand
ccuuauuggccaucagaga

SEQ ID NO: 2599102 - RNA, 19 nt, Homo sapiens
  misc_RNA (1)...(19): siRNA sense strand
ggggaaaagccauacaaau

SEQ ID NO: 2599103 - RNA, 19 nt, Homo sapiens
  misc_RNA (1)...(19): siRNA sense strand
uggaacaugaugccagaaa

SEQ ID NO: 2599104 - RNA, 19 nt, Homo sapiens
  misc_RNA (1)...(19): siRNA sense strand
augugaugaauguggcaaa

SEQ ID NO: 2599105 - RNA, 19 nt, Homo sapiens
  misc_RNA (1)...(19): siRNA sense strand
uuacaaaugcaaugagugu

SEQ ID NO: 2599106 - RNA, 19 nt, Homo sapiens
  misc_RNA (1)...(19): siRNA sense strand
gcuccagccuuaugguaca

SEQ ID NO: 2599107 - RNA, 19 nt, Homo sapiens
  misc_RNA (1)...(19): siRNA sense strand
acuucaggcaauuguguua

SEQ ID NO: 2599108 - RNA, 19 nt, Homo sapiens
  misc_RNA (1)...(19): siRNA sense strand
uagacuacacucagaagaa

SEQ ID NO: 2599109 - RNA, 19 nt, Homo sapiens
  misc_RNA (1)...(19): siRNA sense strand
gagaacaugaugaaggguu

SEQ ID NO: 2599110 - RNA, 19 nt, Homo sapiens
  misc_RNA (1)...(19): siRNA sense strand
cuaugaaugcagugagugu

SEQ ID NO: 2599111 - RNA, 19 nt, Homo sapiens
  misc_RNA (1)...(19): siRNA sense strand
cccaggauacuguggcaua

SEQ ID NO: 2599112 - RNA, 19 nt, Homo sapiens
  misc_RNA (1)...(19): siRNA sense strand
cgaauucauacuggagaaa

SEQ ID NO: 2599113 - RNA, 19 nt, Homo sapiens
  misc_RNA (1)...(19): siRNA sense strand
ggugaaaagcccuauaaau

SEQ ID NO: 2599114 - RNA, 19 nt, Homo sapiens
  misc_RNA (1)...(19): siRNA sense strand
cuuggaaauaacagaugaa

SEQ ID NO: 2599115 - RNA, 19 nt, Homo sapiens
  misc_RNA (1)...(19): siRNA sense strand
agaaacccuaugaguguaa

SEQ ID NO: 2599116 - RNA, 19 nt, Homo sapiens
  misc_RNA (1)...(19): siRNA sense strand
ccuuaugguacaucagaga

SEQ ID NO: 2599117 - RNA, 19 nt, Homo sapiens
  misc_RNA (1)...(19): siRNA sense strand
caaggaguuagaaggacaa

SEQ ID NO: 2599118 - RNA, 19 nt, Homo sapiens
  misc_RNA (1)...(19): siRNA sense strand
aguuuuaaagggacagaaa

SEQ ID NO: 2599119 - RNA, 19 nt, Homo sapiens
  misc_RNA (1)...(19): siRNA sense strand
guguaaugagugugggaag

SEQ ID NO: 2599120 - RNA, 19 nt, Homo sapiens
  misc_RNA (1)...(19): siRNA sense strand
aggcaaaccucccagcuca

SEQ ID NO: 2599121 - RNA, 19 nt, Homo sapiens
  misc_RNA (1)...(19): siRNA sense strand
caggugagaacaugaugaa

SEQ ID NO: 2599122 - RNA, 19 nt, Homo sapiens
  misc_RNA (1)...(19): siRNA sense strand
uuuuaaaggaucagaguca

SEQ ID NO: 2599123 - RNA, 19 nt, Homo sapiens
  misc_RNA (1)...(19): siRNA sense strand
gugaggaggcuguggcugu

SEQ ID NO: 2599124 - RNA, 19 nt, Homo sapiens
  misc_RNA (1)...(19): siRNA sense strand
caaaagacagauaugacaa

SEQ ID NO: 2599125 - RNA, 19 nt, Homo sapiens
  misc_RNA (1)...(19): siRNA sense strand
auauaaggaaguuggggaa

SEQ ID NO: 2599126 - RNA, 19 nt, Homo sapiens
  misc_RNA (1)...(19): siRNA sense strand
gaaugcagugaguguggaa

SEQ ID NO: 2599127 - RNA, 19 nt, Homo sapiens
  misc_RNA (1)...(19): siRNA sense strand
agucggaguaaaugucuua

SEQ ID NO: 2599128 - RNA, 19 nt, Homo sapiens
  misc_RNA (1)...(19): siRNA sense strand
cugcgaaaucuuccggcua

SEQ ID NO: 2599129 - RNA, 19 nt, Homo sapiens
  misc_RNA (1)...(19): siRNA sense strand
ggagagaaguccucagguc

SEQ ID NO: 2599130 - RNA, 19 nt, Homo sapiens
  misc_RNA (1)...(19): siRNA sense strand
gagacuaucuggaggccaa

SEQ ID NO: 2599131 - RNA, 19 nt, Homo sapiens
  misc_RNA (1)...(19): siRNA sense strand
gcagaauuuaagugugaaa

SEQ ID NO: 2599132 - RNA, 19 nt, Homo sapiens
  misc_RNA (1)...(19): siRNA sense strand
aggagagggacgugcgcaa

SEQ ID NO: 2599133 - RNA, 19 nt, Homo sapiens
  misc_RNA (1)...(19): siRNA sense strand
ggacagaagcugguggaca

SEQ ID NO: 2599134 - RNA, 19 nt, Homo sapiens
  misc_RNA (1)...(19): siRNA sense strand
uggaugaagaugucagcaa

SEQ ID NO: 2599135 - RNA, 19 nt, Homo sapiens
  misc_RNA (1)...(19): siRNA sense strand
guggagauuccgagacuau

SEQ ID NO: 2599136 - RNA, 19 nt, Homo sapiens
  misc_RNA (1)...(19): siRNA sense strand
cugcuugaaacaaaggaaa

SEQ ID NO: 2599137 - RNA, 19 nt, Homo sapiens
  misc_RNA (1)...(19): siRNA sense strand
cugggaaggagcuggagaa

SEQ ID NO: 2599138 - RNA, 19 nt, Homo sapiens
  misc_RNA (1)...(19): siRNA sense strand
gugaaaaggaagagacugu

SEQ ID NO: 2599139 - RNA, 19 nt, Homo sapiens
  misc_RNA (1)...(19): siRNA sense strand
ccugagaggccuggaagaa

SEQ ID NO: 2599140 - RNA, 19 nt, Homo sapiens
  misc_RNA (1)...(19): siRNA sense strand
gagcaaauaucuguggaca

SEQ ID NO: 2599141 - RNA, 19 nt, Homo sapiens
  misc_RNA (1)...(19): siRNA sense strand
caaggaggugucagagaau

SEQ ID NO: 2599142 - RNA, 19 nt, Homo sapiens
  misc_RNA (1)...(19): siRNA sense strand
agaucaucacucagagcaa

SEQ ID NO: 2599143 - RNA, 19 nt, Homo sapiens
  misc_RNA (1)...(19): siRNA sense strand
ccaggaaaggccagcguca

SEQ ID NO: 2599144 - RNA, 19 nt, Homo sapiens
  misc_RNA (1)...(19): siRNA sense strand
aggaaaggccagcgucaga

SEQ ID NO: 2599145 - RNA, 19 nt, Homo sapiens
  misc_RNA (1)...(19): siRNA sense strand
gggaccagaugcagaccau

SEQ ID NO: 2599146 - RNA, 19 nt, Homo sapiens
  misc_RNA (1)...(19): siRNA sense strand
uggucaucauggugggaca

SEQ ID NO: 2599147 - RNA, 19 nt, Homo sapiens
  misc_RNA (1)...(19): siRNA sense strand
gaugaagaugucagcaaca

SEQ ID NO: 2599148 - RNA, 19 nt, Homo sapiens
  misc_RNA (1)...(19): siRNA sense strand
gacagaagcugguggacac

SEQ ID NO: 2599149 - RNA, 19 nt, Homo sapiens
  misc_RNA (1)...(19): siRNA sense strand
cugcccaagucuaugaauu

SEQ ID NO: 2599150 - RNA, 19 nt, Homo sapiens
  misc_RNA (1)...(19): siRNA sense strand
agcaaagggaagaugaaca

SEQ ID NO: 2599151 - RNA, 19 nt, Homo sapiens
  misc_RNA (1)...(19): siRNA sense strand
ugggaaggagcuggagaaa

SEQ ID NO: 2599152 - RNA, 19 nt, Homo sapiens
  misc_RNA (1)...(19): siRNA sense strand
uaagcaaagggaagaugaa

SEQ ID NO: 2599153 - RNA, 19 nt, Homo sapiens
  misc_RNA (1)...(19): siRNA sense strand
acucagagcaagcugguca

SEQ ID NO: 2599154 - RNA, 19 nt, Homo sapiens
  misc_RNA (1)...(19): siRNA sense strand
gcggcaguucagagggaca

SEQ ID NO: 2599155 - RNA, 19 nt, Homo sapiens
  misc_RNA (1)...(19): siRNA sense strand
auuaccaaauccucagaaa

SEQ ID NO: 2599156 - RNA, 19 nt, Homo sapiens
  misc_RNA (1)...(19): siRNA sense strand
cggaauggauuuaugacac

SEQ ID NO: 2599157 - RNA, 19 nt, Homo sapiens
  misc_RNA (1)...(19): siRNA sense strand
aagccaaggaggugucaga

SEQ ID NO: 2599158 - RNA, 19 nt, Homo sapiens
  misc_RNA (1)...(19): siRNA sense strand
guuuaugagcagaugagga

SEQ ID NO: 2599159 - RNA, 19 nt, Homo sapiens
  misc_RNA (1)...(19): siRNA sense strand
gcacauuaccaaauccuca

SEQ ID NO: 2599160 - RNA, 19 nt, Homo sapiens
  misc_RNA (1)...(19): siRNA sense strand
uuuaagcggaacugugaaa

SEQ ID NO: 2599161 - RNA, 19 nt, Homo sapiens
  misc_RNA (1)...(19): siRNA sense strand
ucaccagcuuugcggaaga

SEQ ID NO: 2599162 - RNA, 19 nt, Homo sapiens
  misc_RNA (1)...(19): siRNA sense strand
cagcagaacaccaagccca

SEQ ID NO: 2599163 - RNA, 19 nt, Homo sapiens
  misc_RNA (1)...(19): siRNA sense strand
uggagaaagccaaggaggu

SEQ ID NO: 2599164 - RNA, 19 nt, Homo sapiens
  misc_RNA (1)...(19): siRNA sense strand
cggcagaagcagaagcaca

SEQ ID NO: 2599165 - RNA, 19 nt, Homo sapiens
  misc_RNA (1)...(19): siRNA sense strand
cgccauuacugcugggaga

SEQ ID NO: 2599166 - RNA, 19 nt, Homo sapiens
  misc_RNA (1)...(19): siRNA sense strand
uguuugagcaggagcgcaa

SEQ ID NO: 2599167 - RNA, 19 nt, Homo sapiens
  misc_RNA (1)...(19): siRNA sense strand
ucgggagugcagagagaaa

SEQ ID NO: 2599168 - RNA, 19 nt, Homo sapiens
  misc_RNA (1)...(19): siRNA sense strand
gggagaugguucagaccca

SEQ ID NO: 2599169 - RNA, 19 nt, Homo sapiens
  misc_RNA (1)...(19): siRNA sense strand
gggcagugaaagugaagca

SEQ ID NO: 2599170 - RNA, 19 nt, Homo sapiens
  misc_RNA (1)...(19): siRNA sense strand
cgggagaagaagucugaga

SEQ ID NO: 2599171 - RNA, 19 nt, Homo sapiens
  misc_RNA (1)...(19): siRNA sense strand
acgccaaguaugagagcca

SEQ ID NO: 2599172 - RNA, 19 nt, Homo sapiens
  misc_RNA (1)...(19): siRNA sense strand
cagagagggcugaugccaa

SEQ ID NO: 2599173 - RNA, 19 nt, Homo sapiens
  misc_RNA (1)...(19): siRNA sense strand
aggagagcaacgaggguga

SEQ ID NO: 2599174 - RNA, 19 nt, Homo sapiens
  misc_RNA (1)...(19): siRNA sense strand
cugagaagaagaaggagga

SEQ ID NO: 2599175 - RNA, 19 nt, Homo sapiens
  misc_RNA (1)...(19): siRNA sense strand
cggcaucggcagaagcaga

SEQ ID NO: 2599176 - RNA, 19 nt, Homo sapiens
  misc_RNA (1)...(19): siRNA sense strand
ucacugagaagauggccaa

SEQ ID NO: 2599177 - RNA, 19 nt, Homo sapiens
  misc_RNA (1)...(19): siRNA sense strand
aggcugugcgcgaggauga

SEQ ID NO: 2599178 - RNA, 19 nt, Homo sapiens
  misc_RNA (1)...(19): siRNA sense strand
caugugaagcgucgggaga

SEQ ID NO: 2599179 - RNA, 19 nt, Homo sapiens
  misc_RNA (1)...(19): siRNA sense strand
ggauaaauggaaacaccca

SEQ ID NO: 2599180 - RNA, 19 nt, Homo sapiens
  misc_RNA (1)...(19): siRNA sense strand
agaaagaccccaagcuaga

SEQ ID NO: 2599181 - RNA, 19 nt, Homo sapiens
  misc_RNA (1)...(19): siRNA sense strand
uccaugagcuugaggccau

SEQ ID NO: 2599182 - RNA, 19 nt, Homo sapiens
  misc_RNA (1)...(19): siRNA sense strand
agucugagaagaagaagga

SEQ ID NO: 2599183 - RNA, 19 nt, Homo sapiens
  misc_RNA (1)...(19): siRNA sense strand
gugauuaccaugugggcua

SEQ ID NO: 2599184 - RNA, 19 nt, Homo sapiens
  misc_RNA (1)...(19): siRNA sense strand
gggcaguugcagcaggaaa

SEQ ID NO: 2599185 - RNA, 19 nt, Homo sapiens
  misc_RNA (1)...(19): siRNA sense strand
ucacaaaguaauugggcca

SEQ ID NO: 2599186 - RNA, 19 nt, Homo sapiens
  misc_RNA (1)...(19): siRNA sense strand
ucuuauugauggagaggga

SEQ ID NO: 2599187 - RNA, 19 nt, Homo sapiens
  misc_RNA (1)...(19): siRNA sense strand
cagaauguuaagggagaaa

SEQ ID NO: 2599188 - RNA, 19 nt, Homo sapiens
  misc_RNA (1)...(19): siRNA sense strand
aggaaauguuaaugcaguu

SEQ ID NO: 2599189 - RNA, 19 nt, Homo sapiens
  misc_RNA (1)...(19): siRNA sense strand
ugucaggcaaccagauaaa

SEQ ID NO: 2599190 - RNA, 19 nt, Homo sapiens
  misc_RNA (1)...(19): siRNA sense strand
ggacauuuaccuaugguca

SEQ ID NO: 2599191 - RNA, 19 nt, Homo sapiens
  misc_RNA (1)...(19): siRNA sense strand
ucucaaagggacagagugu

SEQ ID NO: 2599192 - RNA, 19 nt, Homo sapiens
  misc_RNA (1)...(19): siRNA sense strand
ccagaauguuaagggagaa

SEQ ID NO: 2599193 - RNA, 19 nt, Homo sapiens
  misc_RNA (1)...(19): siRNA sense strand
aggcaaccagauaaagaaa

SEQ ID NO: 2599194 - RNA, 19 nt, Homo sapiens
  misc_RNA (1)...(19): siRNA sense strand
uucuauaagacuugggcaa

SEQ ID NO: 2599195 - RNA, 19 nt, Homo sapiens
  misc_RNA (1)...(19): siRNA sense strand
aggauaugaugucaggcaa

SEQ ID NO: 2599196 - RNA, 19 nt, Homo sapiens
  misc_RNA (1)...(19): siRNA sense strand
ggagagggauucagcagca

SEQ ID NO: 2599197 - RNA, 19 nt, Homo sapiens
  misc_RNA (1)...(19): siRNA sense strand
uccagaauguuaagggaga

SEQ ID NO: 2599198 - RNA, 19 nt, Homo sapiens
  misc_RNA (1)...(19): siRNA sense strand
ggcaguugcagcaggaaau

SEQ ID NO: 2599199 - RNA, 19 nt, Homo sapiens
  misc_RNA (1)...(19): siRNA sense strand
ggguauaagaaccuuguau

SEQ ID NO: 2599200 - RNA, 19 nt, Homo sapiens
  misc_RNA (1)...(19): siRNA sense strand
guaaagaguugguagaagc

SEQ ID NO: 2599201 - RNA, 19 nt, Homo sapiens
  misc_RNA (1)...(19): siRNA sense strand
agggacagagugugaauau

SEQ ID NO: 2599202 - RNA, 19 nt, Homo sapiens
  misc_RNA (1)...(19): siRNA sense strand
ugacagauguaaaugggca

SEQ ID NO: 2599203 - RNA, 19 nt, Homo sapiens
  misc_RNA (1)...(19): siRNA sense strand
aguaauugggccagaacca

SEQ ID NO: 2599204 - RNA, 19 nt, Homo sapiens
  misc_RNA (1)...(19): siRNA sense strand
uuauugauggagagggauu

SEQ ID NO: 2599205 - RNA, 19 nt, Homo sapiens
  misc_RNA (1)...(19): siRNA sense strand
uuggauacauauuggacuu

SEQ ID NO: 2599206 - RNA, 19 nt, Homo sapiens
  misc_RNA (1)...(19): siRNA sense strand
gugcauagguuuuggcaac

SEQ ID NO: 2599207 - RNA, 19 nt, Homo sapiens
  misc_RNA (1)...(19): siRNA sense strand
cugaagaagaaaagaaagu

SEQ ID NO: 2599208 - RNA, 19 nt, Homo sapiens
  misc_RNA (1)...(19): siRNA sense strand
caggaaauguuaaugcagu

SEQ ID NO: 2599209 - RNA, 19 nt, Homo sapiens
  misc_RNA (1)...(19): siRNA sense strand
aggaugucuucuaguaaca

SEQ ID NO: 2599210 - RNA, 19 nt, Homo sapiens
  misc_RNA (1)...(19): siRNA sense strand
aguugguagaagcaggaua

SEQ ID NO: 2599211 - RNA, 19 nt, Homo sapiens
  misc_RNA (1)...(19): siRNA sense strand
aauucagauucuuggcuuu

SEQ ID NO: 2599212 - RNA, 19 nt, Homo sapiens
  misc_RNA (1)...(19): siRNA sense strand
ggaagaaguacgaggcgga

SEQ ID NO: 2599213 - RNA, 19 nt, Homo sapiens
  misc_RNA (1)...(19): siRNA sense strand
cgguagagcgcuuugggaa

SEQ ID NO: 2599214 - RNA, 19 nt, Homo sapiens
  misc_RNA (1)...(19): siRNA sense strand
ucgcagacugauaggagua

SEQ ID NO: 2599215 - RNA, 19 nt, Homo sapiens
  misc_RNA (1)...(19): siRNA sense strand
ggaccaugugugagcgcuu

SEQ ID NO: 2599216 - RNA, 19 nt, Homo sapiens
  misc_RNA (1)...(19): siRNA sense strand
auauauaaucagaagggca

SEQ ID NO: 2599217 - RNA, 19 nt, Homo sapiens
  misc_RNA (1)...(19): siRNA sense strand
agaaguacgaggcggacau

SEQ ID NO: 2599218 - RNA, 19 nt, Homo sapiens
  misc_RNA (1)...(19): siRNA sense strand
uauauaaucagaagggcau

SEQ ID NO: 2599219 - RNA, 19 nt, Homo sapiens
  misc_RNA (1)...(19): siRNA sense strand
cgucuuugccagcggauca

SEQ ID NO: 2599220 - RNA, 19 nt, Homo sapiens
  misc_RNA (1)...(19): siRNA sense strand
uaggaguaacugagauaga

SEQ ID NO: 2599221 - RNA, 19 nt, Homo sapiens
  misc_RNA (1)...(19): siRNA sense strand
auaaacuguaccaggagaa

SEQ ID NO: 2599222 - RNA, 19 nt, Homo sapiens
  misc_RNA (1)...(19): siRNA sense strand
uggaguucgcagacugaua

SEQ ID NO: 2599223 - RNA, 19 nt, Homo sapiens
  misc_RNA (1)...(19): siRNA sense strand
aggccacgguagagcgcuu

SEQ ID NO: 2599224 - RNA, 19 nt, Homo sapiens
  misc_RNA (1)...(19): siRNA sense strand
gguagagcgcuuugggaag

SEQ ID NO: 2599225 - RNA, 19 nt, Homo sapiens
  misc_RNA (1)...(19): siRNA sense strand
agugacaacuggagggaga

SEQ ID NO: 2599226 - RNA, 19 nt, Homo sapiens
  misc_RNA (1)...(19): siRNA sense strand
ggacacaguucgaggccag

SEQ ID NO: 2599227 - RNA, 19 nt, Homo sapiens
  misc_RNA (1)...(19): siRNA sense strand
acgcugugcgggagaugaa

SEQ ID NO: 2599228 - RNA, 19 nt, Homo sapiens
  misc_RNA (1)...(19): siRNA sense strand
uggccaagcccguggacaa

SEQ ID NO: 2599229 - RNA, 19 nt, Homo sapiens
  misc_RNA (1)...(19): siRNA sense strand
gcgaggucuucgugggcaa

SEQ ID NO: 2599230 - RNA, 19 nt, Homo sapiens
  misc_RNA (1)...(19): siRNA sense strand
gccacaagcacgaggccaa

SEQ ID NO: 2599231 - RNA, 19 nt, Homo sapiens
  misc_RNA (1)...(19): siRNA sense strand
ugauggacuuugacggcaa

SEQ ID NO: 2599232 - RNA, 19 nt, Homo sapiens
  misc_RNA (1)...(19): siRNA sense strand
cggccgacaagaugaagaa

SEQ ID NO: 2599233 - RNA, 19 nt, Homo sapiens
  misc_RNA (1)...(19): siRNA sense strand
aaugauugaagauggcaaa

SEQ ID NO: 2599234 - RNA, 19 nt, Homo sapiens
  misc_RNA (1)...(19): siRNA sense strand
aagagaacgggcagcgcaa

SEQ ID NO: 2599235 - RNA, 19 nt, Homo sapiens
  misc_RNA (1)...(19): siRNA sense strand
augaagaagcgcgaggaaa

SEQ ID NO: 2599236 - RNA, 19 nt, Homo sapiens
  misc_RNA (1)...(19): siRNA sense strand
ccguggacaaggagcagua

SEQ ID NO: 2599237 - RNA, 19 nt, Homo sapiens
  misc_RNA (1)...(19): siRNA sense strand
gcgacguguacgaggacga

SEQ ID NO: 2599238 - RNA, 19 nt, Homo sapiens
  misc_RNA (1)...(19): siRNA sense strand
ugauggagcgcacgggcua

SEQ ID NO: 2599239 - RNA, 19 nt, Homo sapiens
  misc_RNA (1)...(19): siRNA sense strand
cagcauggugcaagagaac

SEQ ID NO: 2599240 - RNA, 19 nt, Homo sapiens
  misc_RNA (1)...(19): siRNA sense strand
ccaagaugaagaagcgcga

SEQ ID NO: 2599241 - RNA, 19 nt, Homo sapiens
  misc_RNA (1)...(19): siRNA sense strand
gcuacauaccucaggccuu

SEQ ID NO: 2599242 - RNA, 19 nt, Homo sapiens
  misc_RNA (1)...(19): siRNA sense strand
aaaugauugaagauggcaa

SEQ ID NO: 2599243 - RNA, 19 nt, Homo sapiens
  misc_RNA (1)...(19): siRNA sense strand
agaaagaguaagagcagaa

SEQ ID NO: 2599244 - RNA, 19 nt, Homo sapiens
  misc_RNA (1)...(19): siRNA sense strand
aggaguaugcagaggaaau

SEQ ID NO: 2599245 - RNA, 19 nt, Homo sapiens
  misc_RNA (1)...(19): siRNA sense strand
caugaacagugaagggaau

SEQ ID NO: 2599246 - RNA, 19 nt, Homo sapiens
  misc_RNA (1)...(19): siRNA sense strand
gcacugaagaugagagcca

SEQ ID NO: 2599247 - RNA, 19 nt, Homo sapiens
  misc_RNA (1)...(19): siRNA sense strand
agacaaggcaagugagguu

SEQ ID NO: 2599248 - RNA, 19 nt, Homo sapiens
  misc_RNA (1)...(19): siRNA sense strand
aagaguaagagcagaacua

SEQ ID NO: 2599249 - RNA, 19 nt, Homo sapiens
  misc_RNA (1)...(19): siRNA sense strand
ccagaagaaguaaggcuaa

SEQ ID NO: 2599250 - RNA, 19 nt, Homo sapiens
  misc_RNA (1)...(19): siRNA sense strand
cccaagaagcaaaggaaaa

SEQ ID NO: 2599251 - RNA, 19 nt, Homo sapiens
  misc_RNA (1)...(19): siRNA sense strand
aagcaaaggaaaagaacua

SEQ ID NO: 2599252 - RNA, 19 nt, Homo sapiens
  misc_RNA (1)...(19): siRNA sense strand
gggaaagaaauuaaugaga

SEQ ID NO: 2599253 - RNA, 19 nt, Homo sapiens
  misc_RNA (1)...(19): siRNA sense strand
ggcacaaacugaaaagaaa

SEQ ID NO: 2599254 - RNA, 19 nt, Homo sapiens
  misc_RNA (1)...(19): siRNA sense strand
ugguagugaugaugaagaa

SEQ ID NO: 2599255 - RNA, 19 nt, Homo sapiens
  misc_RNA (1)...(19): siRNA sense strand
ggaaguacucagagaucau

SEQ ID NO: 2599256 - RNA, 19 nt, Homo sapiens
  misc_RNA (1)...(19): siRNA sense strand
ccaacacaucucaggguaa

SEQ ID NO: 2599257 - RNA, 19 nt, Homo sapiens
  misc_RNA (1)...(19): siRNA sense strand
aggagaaggcagaucuuaa

SEQ ID NO: 2599258 - RNA, 19 nt, Homo sapiens
  misc_RNA (1)...(19): siRNA sense strand
acuagaagaaccaggagua

SEQ ID NO: 2599259 - RNA, 19 nt, Homo sapiens
  misc_RNA (1)...(19): siRNA sense strand
ggcugaaaguuccgggcaa

SEQ ID NO: 2599260 - RNA, 19 nt, Homo sapiens
  misc_RNA (1)...(19): siRNA sense strand
ccuagaacuccuaaagcua

SEQ ID NO: 2599261 - RNA, 19 nt, Homo sapiens
  misc_RNA (1)...(19): siRNA sense strand
agaaacagaucguggguac

SEQ ID NO: 2599262 - RNA, 19 nt, Homo sapiens
  misc_RNA (1)...(19): siRNA sense strand
gaauaacagaugaggggaa

SEQ ID NO: 2599263 - RNA, 19 nt, Homo sapiens
  misc_RNA (1)...(19): siRNA sense strand
cgaaaaugaagaugaguuu

SEQ ID NO: 2599264 - RNA, 19 nt, Homo sapiens
  misc_RNA (1)...(19): siRNA sense strand
gucauuaaguggagacaca

SEQ ID NO: 2599265 - RNA, 19 nt, Homo sapiens
  misc_RNA (1)...(19): siRNA sense strand
guaacuaggagaaggcaga

SEQ ID NO: 2599266 - RNA, 19 nt, Homo sapiens
  misc_RNA (1)...(19): siRNA sense strand
aguuauaagugucagugaa

SEQ ID NO: 2599267 - RNA, 19 nt, Homo sapiens
  misc_RNA (1)...(19): siRNA sense strand
caucagaccaugacgaaaa

SEQ ID NO: 2599268 - RNA, 19 nt, Homo sapiens
  misc_RNA (1)...(19): siRNA sense strand
aagcaaaguuuaaucccua

SEQ ID NO: 2599269 - RNA, 19 nt, Homo sapiens
  misc_RNA (1)...(19): siRNA sense strand
agaggaaauuaaaggcaca

SEQ ID NO: 2599270 - RNA, 19 nt, Homo sapiens
  misc_RNA (1)...(19): siRNA sense strand
gauucagauaccagacaaa

SEQ ID NO: 2599271 - RNA, 19 nt, Homo sapiens
  misc_RNA (1)...(19): siRNA sense strand
cagcagugaugaaagccaa

SEQ ID NO: 2599272 - RNA, 19 nt, Homo sapiens
  misc_RNA (1)...(19): siRNA sense strand
uguaccaggaaaugagaaa

SEQ ID NO: 2599273 - RNA, 19 nt, Homo sapiens
  misc_RNA (1)...(19): siRNA sense strand
cagugagaaugaagaggau

SEQ ID NO: 2599274 - RNA, 19 nt, Homo sapiens
  misc_RNA (1)...(19): siRNA sense strand
guggaagacugcuggcuga

SEQ ID NO: 2599275 - RNA, 19 nt, Homo sapiens
  misc_RNA (1)...(19): siRNA sense strand
gaguaagagcagaacuaca

SEQ ID NO: 2599276 - RNA, 19 nt, Homo sapiens
  misc_RNA (1)...(19): siRNA sense strand
agaaauagugucugaagca

SEQ ID NO: 2599277 - RNA, 19 nt, Homo sapiens
  misc_RNA (1)...(19): siRNA sense strand
gccagaagaaguaaggcua

SEQ ID NO: 2599278 - RNA, 19 nt, Homo sapiens
  misc_RNA (1)...(19): siRNA sense strand
uccuaaagcuagaaagagu

SEQ ID NO: 2599279 - RNA, 19 nt, Homo sapiens
  misc_RNA (1)...(19): siRNA sense strand
cuaaagcuagaaagaguaa

SEQ ID NO: 2599280 - RNA, 19 nt, Homo sapiens
  misc_RNA (1)...(19): siRNA sense strand
agaugaguuuagugaugaa

SEQ ID NO: 2599281 - RNA, 19 nt, Homo sapiens
  misc_RNA (1)...(19): siRNA sense strand
ccuaaagcuagaaagagua

SEQ ID NO: 2599282 - RNA, 19 nt, Homo sapiens
  misc_RNA (1)...(19): siRNA sense strand
uaagauuguaccaggaaau

SEQ ID NO: 2599283 - RNA, 19 nt, Homo sapiens
  misc_RNA (1)...(19): siRNA sense strand
acuuggaagaggaagacaa

SEQ ID NO: 2599284 - RNA, 19 nt, Homo sapiens
  misc_RNA (1)...(19): siRNA sense strand
gcuagaaagaguaagagca

SEQ ID NO: 2599285 - RNA, 19 nt, Homo sapiens
  misc_RNA (1)...(19): siRNA sense strand
cugaaaacagugagaauga

SEQ ID NO: 2599286 - RNA, 19 nt, Homo sapiens
  misc_RNA (1)...(19): siRNA sense strand
aauuaaaggcacaaacuga

SEQ ID NO: 2599287 - RNA, 19 nt, Homo sapiens
  misc_RNA (1)...(19): siRNA sense strand
cugagauaaauaagccaaa

SEQ ID NO: 2599288 - RNA, 19 nt, Homo sapiens
  misc_RNA (1)...(19): siRNA sense strand
augaagaugccaauggaau

SEQ ID NO: 2599289 - RNA, 19 nt, Homo sapiens
  misc_RNA (1)...(19): siRNA sense strand
guaugaaagcuccagaaau

SEQ ID NO: 2599290 - RNA, 19 nt, Homo sapiens
  misc_RNA (1)...(19): siRNA sense strand
agauacaaccgaaggaagu

SEQ ID NO: 2599291 - RNA, 19 nt, Homo sapiens
  misc_RNA (1)...(19): siRNA sense strand
acuccuaaagcuagaaaga

SEQ ID NO: 2599292 - RNA, 19 nt, Homo sapiens
  misc_RNA (1)...(19): siRNA sense strand
acagaugaggggaaagaaa

SEQ ID NO: 2599293 - RNA, 19 nt, Homo sapiens
  misc_RNA (1)...(19): siRNA sense strand
gaagaggaagacaaggcaa

SEQ ID NO: 2599294 - RNA, 19 nt, Homo sapiens
  misc_RNA (1)...(19): siRNA sense strand
aagaggaagaggaugaaaa

SEQ ID NO: 2599295 - RNA, 19 nt, Homo sapiens
  misc_RNA (1)...(19): siRNA sense strand
cgaauucccaagaagcaaa

SEQ ID NO: 2599296 - RNA, 19 nt, Homo sapiens
  misc_RNA (1)...(19): siRNA sense strand
acaugaacagugaagggaa

SEQ ID NO: 2599297 - RNA, 19 nt, Homo sapiens
  misc_RNA (1)...(19): siRNA sense strand
gugagaaugaagaggauac

SEQ ID NO: 2599298 - RNA, 19 nt, Homo sapiens
  misc_RNA (1)...(19): siRNA sense strand
uguugaaaauaguggccaa

SEQ ID NO: 2599299 - RNA, 19 nt, Homo sapiens
  misc_RNA (1)...(19): siRNA sense strand
ugagguugccauugaggaa

SEQ ID NO: 2599300 - RNA, 19 nt, Homo sapiens
  misc_RNA (1)...(19): siRNA sense strand
uggaauugcaacuagaaga

SEQ ID NO: 2599301 - RNA, 19 nt, Homo sapiens
  misc_RNA (1)...(19): siRNA sense strand
cgaugauggagcaaccaaa

SEQ ID NO: 2599302 - RNA, 19 nt, Homo sapiens
  misc_RNA (1)...(19): siRNA sense strand
cugcaaaguuggugguagc

SEQ ID NO: 2599303 - RNA, 19 nt, Homo sapiens
  misc_RNA (1)...(19): siRNA sense strand
caaacaaauaugaaggaug

SEQ ID NO: 2599304 - RNA, 19 nt, Homo sapiens
  misc_RNA (1)...(19): siRNA sense strand
ugggaagggcauuaagaca

SEQ ID NO: 2599305 - RNA, 19 nt, Homo sapiens
  misc_RNA (1)...(19): siRNA sense strand
aggagaaguauuagacacu

SEQ ID NO: 2599306 - RNA, 19 nt, Homo sapiens
  misc_RNA (1)...(19): siRNA sense strand
uuguagaaauggaaggaug

SEQ ID NO: 2599307 - RNA, 19 nt, Homo sapiens
  misc_RNA (1)...(19): siRNA sense strand
augagugguguuaagaaua

SEQ ID NO: 2599308 - RNA, 19 nt, Homo sapiens
  misc_RNA (1)...(19): siRNA sense strand
aaacaaauaugaaggaugg

SEQ ID NO: 2599309 - RNA, 19 nt, Homo sapiens
  misc_RNA (1)...(19): siRNA sense strand
cugcaaaugguuagaggaa

SEQ ID NO: 2599310 - RNA, 19 nt, Homo sapiens
  misc_RNA (1)...(19): siRNA sense strand
guuuaaaauugguggugaa

SEQ ID NO: 2599311 - RNA, 19 nt, Homo sapiens
  misc_RNA (1)...(19): siRNA sense strand
cgguauuuggccugggaaa

SEQ ID NO: 2599312 - RNA, 19 nt, Homo sapiens
  misc_RNA (1)...(19): siRNA sense strand
ggguaugagauaugcggua

SEQ ID NO: 2599313 - RNA, 19 nt, Homo sapiens
  misc_RNA (1)...(19): siRNA sense strand
aagaacaaaucaaaggcua

SEQ ID NO: 2599314 - RNA, 19 nt, Homo sapiens
  misc_RNA (1)...(19): siRNA sense strand
ucaucaagacgcagggcaa

SEQ ID NO: 2599315 - RNA, 19 nt, Homo sapiens
  misc_RNA (1)...(19): siRNA sense strand
aggaacagcaggaagagaa

SEQ ID NO: 2599316 - RNA, 19 nt, Homo sapiens
  misc_RNA (1)...(19): siRNA sense strand
gcaaaugguuagaggaagc

SEQ ID NO: 2599317 - RNA, 19 nt, Homo sapiens
  misc_RNA (1)...(19): siRNA sense strand
aagaaaggcaaaugugaau

SEQ ID NO: 2599318 - RNA, 19 nt, Homo sapiens
  misc_RNA (1)...(19): siRNA sense strand
cguucagcgcaaaggauua

SEQ ID NO: 2599319 - RNA, 19 nt, Homo sapiens
  misc_RNA (1)...(19): siRNA sense strand
gcaaaggauuauauggcca

SEQ ID NO: 2599320 - RNA, 19 nt, Homo sapiens
  misc_RNA (1)...(19): siRNA sense strand
agaacaaaucaaaggcuau

SEQ ID NO: 2599321 - RNA, 19 nt, Homo sapiens
  misc_RNA (1)...(19): siRNA sense strand
gcgacugcgacgugguuaa

SEQ ID NO: 2599322 - RNA, 19 nt, Homo sapiens
  misc_RNA (1)...(19): siRNA sense strand
cagaaaggggagagaaaga

SEQ ID NO: 2599323 - RNA, 19 nt, Homo sapiens
  misc_RNA (1)...(19): siRNA sense strand
cagagaaagaacaaaucaa

SEQ ID NO: 2599324 - RNA, 19 nt, Homo sapiens
  misc_RNA (1)...(19): siRNA sense strand
agauagugguggaucaaaa

SEQ ID NO: 2599325 - RNA, 19 nt, Homo sapiens
  misc_RNA (1)...(19): siRNA sense strand
uaauguacccagagaucaa

SEQ ID NO: 2599326 - RNA, 19 nt, Homo sapiens
  misc_RNA (1)...(19): siRNA sense strand
gaaaugaucuugaaggaag

SEQ ID NO: 2599327 - RNA, 19 nt, Homo sapiens
  misc_RNA (1)...(19): siRNA sense strand
ugaagaaagaaaagagaga

SEQ ID NO: 2599328 - RNA, 19 nt, Homo sapiens
  misc_RNA (1)...(19): siRNA sense strand
gaggaaugaagauggugaa

SEQ ID NO: 2599329 - RNA, 19 nt, Homo sapiens
  misc_RNA (1)...(19): siRNA sense strand
aagcuuugcagguggacaa

SEQ ID NO: 2599330 - RNA, 19 nt, Homo sapiens
  misc_RNA (1)...(19): siRNA sense strand
auguugaagauuugggcaa

SEQ ID NO: 2599331 - RNA, 19 nt, Homo sapiens
  misc_RNA (1)...(19): siRNA sense strand
ggaggaaugaagaugguga

SEQ ID NO: 2599332 - RNA, 19 nt, Homo sapiens
  misc_RNA (1)...(19): siRNA sense strand
gguggugaaugguggacau

SEQ ID NO: 2599333 - RNA, 19 nt, Homo sapiens
  misc_RNA (1)...(19): siRNA sense strand
accugaaggguaugagaua

SEQ ID NO: 2599334 - RNA, 19 nt, Homo sapiens
  misc_RNA (1)...(19): siRNA sense strand
gcugcaggcacuucagaaa

SEQ ID NO: 2599335 - RNA, 19 nt, Homo sapiens
  misc_RNA (1)...(19): siRNA sense strand
cuggaacagcaaagggauu

SEQ ID NO: 2599336 - RNA, 19 nt, Homo sapiens
  misc_RNA (1)...(19): siRNA sense strand
agaaaagagagaaaaggaa

SEQ ID NO: 2599337 - RNA, 19 nt, Homo sapiens
  misc_RNA (1)...(19): siRNA sense strand
acaagacaucagagaaaga

SEQ ID NO: 2599338 - RNA, 19 nt, Homo sapiens
  misc_RNA (1)...(19): siRNA sense strand
acugaguggcgguggaaga

SEQ ID NO: 2599339 - RNA, 19 nt, Homo sapiens
  misc_RNA (1)...(19): siRNA sense strand
ggaagauggaccagccuga

SEQ ID NO: 2599340 - RNA, 19 nt, Homo sapiens
  misc_RNA (1)...(19): siRNA sense strand
ggcaugaggaagugguaca

SEQ ID NO: 2599341 - RNA, 19 nt, Homo sapiens
  misc_RNA (1)...(19): siRNA sense strand
aggagcucauccaggaaua

SEQ ID NO: 2599342 - RNA, 19 nt, Homo sapiens
  misc_RNA (1)...(19): siRNA sense strand
cugaaagugcagagugguu

SEQ ID NO: 2599343 - RNA, 19 nt, Homo sapiens
  misc_RNA (1)...(19): siRNA sense strand
gagaaaaggaacagcagga

SEQ ID NO: 2599344 - RNA, 19 nt, Homo sapiens
  misc_RNA (1)...(19): siRNA sense strand
gauggugaaagaagagcua

SEQ ID NO: 2599345 - RNA, 19 nt, Homo sapiens
  misc_RNA (1)...(19): siRNA sense strand
aaagacagccugaagaaaa

SEQ ID NO: 2599346 - RNA, 19 nt, Homo sapiens
  misc_RNA (1)...(19): siRNA sense strand
caacauggcucagaggaga

SEQ ID NO: 2599347 - RNA, 19 nt, Homo sapiens
  misc_RNA (1)...(19): siRNA sense strand
uagcauuagccuuuggauu

SEQ ID NO: 2599348 - RNA, 19 nt, Homo sapiens
  misc_RNA (1)...(19): siRNA sense strand
aggaagagaagucugguuu

SEQ ID NO: 2599349 - RNA, 19 nt, Homo sapiens
  misc_RNA (1)...(19): siRNA sense strand
agcagaacgcuuugaagaa

SEQ ID NO: 2599350 - RNA, 19 nt, Homo sapiens
  misc_RNA (1)...(19): siRNA sense strand
auaugaagauaguggugga

SEQ ID NO: 2599351 - RNA, 19 nt, Homo sapiens
  misc_RNA (1)...(19): siRNA sense strand
gagacaccgaggaggaaga

SEQ ID NO: 2599352 - RNA, 19 nt, Homo sapiens
  misc_RNA (1)...(19): siRNA sense strand
cauuguugauguugaagau

SEQ ID NO: 2599353 - RNA, 19 nt, Homo sapiens
  misc_RNA (1)...(19): siRNA sense strand
ggaaggaucucaugagcag

SEQ ID NO: 2599354 - RNA, 19 nt, Homo sapiens
  misc_RNA (1)...(19): siRNA sense strand
gaaugguggacauggauca

SEQ ID NO: 2599355 - RNA, 19 nt, Homo sapiens
  misc_RNA (1)...(19): siRNA sense strand
gaauugcaucauagagaca

SEQ ID NO: 2599356 - RNA, 19 nt, Homo sapiens
  misc_RNA (1)...(19): siRNA sense strand
ucuauggaauugagagcca

SEQ ID NO: 2599357 - RNA, 19 nt, Homo sapiens
  misc_RNA (1)...(19): siRNA sense strand
cagacugacgcucgugaaa

SEQ ID NO: 2599358 - RNA, 19 nt, Homo sapiens
  misc_RNA (1)...(19): siRNA sense strand
cgacauacacugacggccu

SEQ ID NO: 2599359 - RNA, 19 nt, Homo sapiens
  misc_RNA (1)...(19): siRNA sense strand
ggaagaacccuuugagagc

SEQ ID NO: 2599360 - RNA, 19 nt, Homo sapiens
  misc_RNA (1)...(19): siRNA sense strand
uuauggaucaugugaagaa

SEQ ID NO: 2599361 - RNA, 19 nt, Homo sapiens
  misc_RNA (1)...(19): siRNA sense strand
ugaaggaagccauugaaaa

SEQ ID NO: 2599362 - RNA, 19 nt, Homo sapiens
  misc_RNA (1)...(19): siRNA sense strand
ccucgugggagaaccaaua

SEQ ID NO: 2599363 - RNA, 19 nt, Homo sapiens
  misc_RNA (1)...(19): siRNA sense strand
gcgacgugguuaaaagcaa

SEQ ID NO: 2599364 - RNA, 19 nt, Homo sapiens
  misc_RNA (1)...(19): siRNA sense strand
gggcaaaauuauggaucau

SEQ ID NO: 2599365 - RNA, 19 nt, Homo sapiens
  misc_RNA (1)...(19): siRNA sense strand
agaagaggugacuaguaaa

SEQ ID NO: 2599366 - RNA, 19 nt, Homo sapiens
  misc_RNA (1)...(19): siRNA sense strand
gcauggaagaccaaguuca

SEQ ID NO: 2599367 - RNA, 19 nt, Homo sapiens
  misc_RNA (1)...(19): siRNA sense strand
ccaacagugugcugggcaa

SEQ ID NO: 2599368 - RNA, 19 nt, Homo sapiens
  misc_RNA (1)...(19): siRNA sense strand
gcuaaugccaagaaggaga

SEQ ID NO: 2599369 - RNA, 19 nt, Homo sapiens
  misc_RNA (1)...(19): siRNA sense strand
ggggagaagcagaggauca

SEQ ID NO: 2599370 - RNA, 19 nt, Homo sapiens
  misc_RNA (1)...(19): siRNA sense strand
ucuuugaggcugaggaaca

SEQ ID NO: 2599371 - RNA, 19 nt, Homo sapiens
  misc_RNA (1)...(19): siRNA sense strand
ccauguacgacgagaucuu

SEQ ID NO: 2599372 - RNA, 19 nt, Homo sapiens
  misc_RNA (1)...(19): siRNA sense strand
uggccaagguccacgccua

SEQ ID NO: 2599373 - RNA, 19 nt, Homo sapiens
  misc_RNA (1)...(19): siRNA sense strand
ugaagaggaugcaggacca

SEQ ID NO: 2599374 - RNA, 19 nt, Homo sapiens
  misc_RNA (1)...(19): siRNA sense strand
cuggagagcaucagcguca

SEQ ID NO: 2599375 - RNA, 19 nt, Homo sapiens
  misc_RNA (1)...(19): siRNA sense strand
uggaagagcauuaccgcuu

SEQ ID NO: 2599376 - RNA, 19 nt, Homo sapiens
  misc_RNA (1)...(19): siRNA sense strand
ggaagcucuuugaggcuga

SEQ ID NO: 2599377 - RNA, 19 nt, Homo sapiens
  misc_RNA (1)...(19): siRNA sense strand
cgguguucgggaaggacaa

SEQ ID NO: 2599378 - RNA, 19 nt, Homo sapiens
  misc_RNA (1)...(19): siRNA sense strand
augccgacuucgacaacaa

SEQ ID NO: 2599379 - RNA, 19 nt, Homo sapiens
  misc_RNA (1)...(19): siRNA sense strand
agggagacauggaggggau

SEQ ID NO: 2599380 - RNA, 19 nt, Homo sapiens
  misc_RNA (1)...(19): siRNA sense strand
ugcgaguggugcugaacaa

SEQ ID NO: 2599381 - RNA, 19 nt, Homo sapiens
  misc_RNA (1)...(19): siRNA sense strand
uggagguaguggacgacau

SEQ ID NO: 2599382 - RNA, 19 nt, Homo sapiens
  misc_RNA (1)...(19): siRNA sense strand
ugucaccgguggauggcaa

SEQ ID NO: 2599383 - RNA, 19 nt, Homo sapiens
  misc_RNA (1)...(19): siRNA sense strand
ucaucaaagucaagcugga

SEQ ID NO: 2599384 - RNA, 19 nt, Homo sapiens
  misc_RNA (1)...(19): siRNA sense strand
aagucaagcuggaggggca

SEQ ID NO: 2599385 - RNA, 19 nt, Homo sapiens
  misc_RNA (1)...(19): siRNA sense strand
gaacaggacuucccaggca

SEQ ID NO: 2599386 - RNA, 19 nt, Homo sapiens
  misc_RNA (1)...(19): siRNA sense strand
aagaagaaggagcugguca

SEQ ID NO: 2599387 - RNA, 19 nt, Homo sapiens
  misc_RNA (1)...(19): siRNA sense strand
uugcggugaugcagggaga

SEQ ID NO: 2599388 - RNA, 19 nt, Homo sapiens
  misc_RNA (1)...(19): siRNA sense strand
acaaccuggccgagaucua

SEQ ID NO: 2599389 - RNA, 19 nt, Homo sapiens
  misc_RNA (1)...(19): siRNA sense strand
ucuagaaacuuauuggcaa

SEQ ID NO: 2599390 - RNA, 19 nt, Homo sapiens
  misc_RNA (1)...(19): siRNA sense strand
agucagaguaggaaauaau

SEQ ID NO: 2599391 - RNA, 19 nt, Homo sapiens
  misc_RNA (1)...(19): siRNA sense strand
ccuacaagaaauucggcaa

SEQ ID NO: 2599392 - RNA, 19 nt, Homo sapiens
  misc_RNA (1)...(19): siRNA sense strand
cauccaauucagaagaaaa

SEQ ID NO: 2599393 - RNA, 19 nt, Homo sapiens
  misc_RNA (1)...(19): siRNA sense strand
ucucagucagaguaggaaa

SEQ ID NO: 2599394 - RNA, 19 nt, Homo sapiens
  misc_RNA (1)...(19): siRNA sense strand
guuggaaaggacuggaaca

SEQ ID NO: 2599395 - RNA, 19 nt, Homo sapiens
  misc_RNA (1)...(19): siRNA sense strand
gucacaagcuguuugguca

SEQ ID NO: 2599396 - RNA, 19 nt, Homo sapiens
  misc_RNA (1)...(19): siRNA sense strand
aagcaagaucucagucaga

SEQ ID NO: 2599397 - RNA, 19 nt, Homo sapiens
  misc_RNA (1)...(19): siRNA sense strand
caggauuuggaguggauca

SEQ ID NO: 2599398 - RNA, 19 nt, Homo sapiens
  misc_RNA (1)...(19): siRNA sense strand
uggaacaguacgggaaauu

SEQ ID NO: 2599399 - RNA, 19 nt, Homo sapiens
  misc_RNA (1)...(19): siRNA sense strand
ggacagaacugaucgguac

SEQ ID NO: 2599400 - RNA, 19 nt, Homo sapiens
  misc_RNA (1)...(19): siRNA sense strand
aggauguggucguggaaca

SEQ ID NO: 2599401 - RNA, 19 nt, Homo sapiens
  misc_RNA (1)...(19): siRNA sense strand
agauaugcuacaugacaaa

SEQ ID NO: 2599402 - RNA, 19 nt, Homo sapiens
  misc_RNA (1)...(19): siRNA sense strand
acucagacccagaggagau

SEQ ID NO: 2599403 - RNA, 19 nt, Homo sapiens
  misc_RNA (1)...(19): siRNA sense strand
gggaagaucaagugcacca

SEQ ID NO: 2599404 - RNA, 19 nt, Homo sapiens
  misc_RNA (1)...(19): siRNA sense strand
aggcuaaccacuuggaaga

SEQ ID NO: 2599405 - RNA, 19 nt, Homo sapiens
  misc_RNA (1)...(19): siRNA sense strand
cugaaaagaaugagagagu

SEQ ID NO: 2599406 - RNA, 19 nt, Homo sapiens
  misc_RNA (1)...(19): siRNA sense strand
cuguagguccagaggguga

SEQ ID NO: 2599407 - RNA, 19 nt, Homo sapiens
  misc_RNA (1)...(19): siRNA sense strand
ggaccgugcugaagccaga

SEQ ID NO: 2599408 - RNA, 19 nt, Homo sapiens
  misc_RNA (1)...(19): siRNA sense strand
uggaguggcuggaggagga

SEQ ID NO: 2599409 - RNA, 19 nt, Homo sapiens
  misc_RNA (1)...(19): siRNA sense strand
gcuacaugacaaagacaga

SEQ ID NO: 2599410 - RNA, 19 nt, Homo sapiens
  misc_RNA (1)...(19): siRNA sense strand
acgcugugguuguggaguu

SEQ ID NO: 2599411 - RNA, 19 nt, Homo sapiens
  misc_RNA (1)...(19): siRNA sense strand
cgaggugacuguaggucca

SEQ ID NO: 2599412 - RNA, 19 nt, Homo sapiens
  misc_RNA (1)...(19): siRNA sense strand
ccaggagauugcaagguca

SEQ ID NO: 2599413 - RNA, 19 nt, Homo sapiens
  misc_RNA (1)...(19): siRNA sense strand
ggacagaaggccuugguuc

SEQ ID NO: 2599414 - RNA, 19 nt, Homo sapiens
  misc_RNA (1)...(19): siRNA sense strand
ggauguggucguggaacaa

SEQ ID NO: 2599415 - RNA, 19 nt, Homo sapiens
  misc_RNA (1)...(19): siRNA sense strand
ggugaaggacagaggacag

SEQ ID NO: 2599416 - RNA, 19 nt, Homo sapiens
  misc_RNA (1)...(19): siRNA sense strand
gggaggauguggucgugga

SEQ ID NO: 2599417 - RNA, 19 nt, Homo sapiens
  misc_RNA (1)...(19): siRNA sense strand
ccguugacguggagagcug

SEQ ID NO: 2599418 - RNA, 19 nt, Homo sapiens
  misc_RNA (1)...(19): siRNA sense strand
ugacagaggaagaggaaga

SEQ ID NO: 2599419 - RNA, 19 nt, Homo sapiens
  misc_RNA (1)...(19): siRNA sense strand
ggaauuugucauugugaaa

SEQ ID NO: 2599420 - RNA, 19 nt, Homo sapiens
  misc_RNA (1)...(19): siRNA sense strand
ggagaguugaagagagcaa

SEQ ID NO: 2599421 - RNA, 19 nt, Homo sapiens
  misc_RNA (1)...(19): siRNA sense strand
gauuaugcuuugaggucua

SEQ ID NO: 2599422 - RNA, 19 nt, Homo sapiens
  misc_RNA (1)...(19): siRNA sense strand
cuaauaaagcaaaggccaa

SEQ ID NO: 2599423 - RNA, 19 nt, Homo sapiens
  misc_RNA (1)...(19): siRNA sense strand
gcuaagcagaugauggaaa

SEQ ID NO: 2599424 - RNA, 19 nt, Homo sapiens
  misc_RNA (1)...(19): siRNA sense strand
gucaaaagauggaggggaa

SEQ ID NO: 2599425 - RNA, 19 nt, Homo sapiens
  misc_RNA (1)...(19): siRNA sense strand
ucaugauaguagucagaaa

SEQ ID NO: 2599426 - RNA, 19 nt, Homo sapiens
  misc_RNA (1)...(19): siRNA sense strand
gaucacaguaucagagaau

SEQ ID NO: 2599427 - RNA, 19 nt, Homo sapiens
  misc_RNA (1)...(19): siRNA sense strand
augaaaugguccagcagaa

SEQ ID NO: 2599428 - RNA, 19 nt, Homo sapiens
  misc_RNA (1)...(19): siRNA sense strand
cugaaguuguccaggaaau

SEQ ID NO: 2599429 - RNA, 19 nt, Homo sapiens
  misc_RNA (1)...(19): siRNA sense strand
cgaauuugccagugauauu

SEQ ID NO: 2599430 - RNA, 19 nt, Homo sapiens
  misc_RNA (1)...(19): siRNA sense strand
acaagaaccagaugacaaa

SEQ ID NO: 2599431 - RNA, 19 nt, Homo sapiens
  misc_RNA (1)...(19): siRNA sense strand
cagaggaagaggaagacaa

SEQ ID NO: 2599432 - RNA, 19 nt, Homo sapiens
  misc_RNA (1)...(19): siRNA sense strand
cggaggagaacuugcuaua

SEQ ID NO: 2599433 - RNA, 19 nt, Homo sapiens
  misc_RNA (1)...(19): siRNA sense strand
ucaaauaaguacagcugau

SEQ ID NO: 2599434 - RNA, 19 nt, Homo sapiens
  misc_RNA (1)...(19): siRNA sense strand
agggaaugacagaggaaga

SEQ ID NO: 2599435 - RNA, 19 nt, Homo sapiens
  misc_RNA (1)...(19): siRNA sense strand
augcugaaugggagaguaa

SEQ ID NO: 2599436 - RNA, 19 nt, Homo sapiens
  misc_RNA (1)...(19): siRNA sense strand
aggcagaagauuacuuaaa

SEQ ID NO: 2599437 - RNA, 19 nt, Homo sapiens
  misc_RNA (1)...(19): siRNA sense strand
ccccaauaaugaagaaaua

SEQ ID NO: 2599438 - RNA, 19 nt, Homo sapiens
  misc_RNA (1)...(19): siRNA sense strand
aggcauaacugggagacaa

SEQ ID NO: 2599439 - RNA, 19 nt, Homo sapiens
  misc_RNA (1)...(19): siRNA sense strand
aaggagagccuaaggaaaa

SEQ ID NO: 2599440 - RNA, 19 nt, Homo sapiens
  misc_RNA (1)...(19): siRNA sense strand
agaggaagaggaagacaaa

SEQ ID NO: 2599441 - RNA, 19 nt, Homo sapiens
  misc_RNA (1)...(19): siRNA sense strand
aaaugauggcacagugaaa

SEQ ID NO: 2599442 - RNA, 19 nt, Homo sapiens
  misc_RNA (1)...(19): siRNA sense strand
ggacaucaagacugagaau

SEQ ID NO: 2599443 - RNA, 19 nt, Homo sapiens
  misc_RNA (1)...(19): siRNA sense strand
cagccgaauuggaggacga

SEQ ID NO: 2599444 - RNA, 19 nt, Homo sapiens
  misc_RNA (1)...(19): siRNA sense strand
cagaauaagcagaaaguag

SEQ ID NO: 2599445 - RNA, 19 nt, Homo sapiens
  misc_RNA (1)...(19): siRNA sense strand
ggugauucagacugggaaa

SEQ ID NO: 2599446 - RNA, 19 nt, Homo sapiens
  misc_RNA (1)...(19): siRNA sense strand
aacaagagcuggaggaacu

SEQ ID NO: 2599447 - RNA, 19 nt, Homo sapiens
  misc_RNA (1)...(19): siRNA sense strand
agugcaaugcugagagaau

SEQ ID NO: 2599448 - RNA, 19 nt, Homo sapiens
  misc_RNA (1)...(19): siRNA sense strand
ucuuagugaugcugaggaa

SEQ ID NO: 2599449 - RNA, 19 nt, Homo sapiens
  misc_RNA (1)...(19): siRNA sense strand
gaaaauaauugaaggcacu

SEQ ID NO: 2599450 - RNA, 19 nt, Homo sapiens
  misc_RNA (1)...(19): siRNA sense strand
uugugaagguguggaaaua

SEQ ID NO: 2599451 - RNA, 19 nt, Homo sapiens
  misc_RNA (1)...(19): siRNA sense strand
gggcaacauuauucacaau

SEQ ID NO: 2599452 - RNA, 19 nt, Homo sapiens
  misc_RNA (1)...(19): siRNA sense strand
acacagagcuccaagccuu

SEQ ID NO: 2599453 - RNA, 19 nt, Homo sapiens
  misc_RNA (1)...(19): siRNA sense strand
gauaaaagccuggggagua

SEQ ID NO: 2599454 - RNA, 19 nt, Homo sapiens
  misc_RNA (1)...(19): siRNA sense strand
gagaacaagaggagaguug

SEQ ID NO: 2599455 - RNA, 19 nt, Homo sapiens
  misc_RNA (1)...(19): siRNA sense strand
gcucaguguuuuaaaggaa

SEQ ID NO: 2599456 - RNA, 19 nt, Homo sapiens
  misc_RNA (1)...(19): siRNA sense strand
aggaagaggaagacaaacu

SEQ ID NO: 2599457 - RNA, 19 nt, Homo sapiens
  misc_RNA (1)...(19): siRNA sense strand
aacaagaaccagaugacaa

SEQ ID NO: 2599458 - RNA, 19 nt, Homo sapiens
  misc_RNA (1)...(19): siRNA sense strand
gcuauaaacaagagcugga

SEQ ID NO: 2599459 - RNA, 19 nt, Homo sapiens
  misc_RNA (1)...(19): siRNA sense strand
gggauuuaucacaguggua

SEQ ID NO: 2599460 - RNA, 19 nt, Homo sapiens
  misc_RNA (1)...(19): siRNA sense strand
ccagaaaacauguaaaaca

SEQ ID NO: 2599461 - RNA, 19 nt, Homo sapiens
  misc_RNA (1)...(19): siRNA sense strand
cuaagcagaugauggaaaa

SEQ ID NO: 2599462 - RNA, 19 nt, Homo sapiens
  misc_RNA (1)...(19): siRNA sense strand
ggauugugaagguguggaa

SEQ ID NO: 2599463 - RNA, 19 nt, Homo sapiens
  misc_RNA (1)...(19): siRNA sense strand
cuuaaauagcaaucagaga

SEQ ID NO: 2599464 - RNA, 19 nt, Homo sapiens
  misc_RNA (1)...(19): siRNA sense strand
aauagcaaucagagaacaa

SEQ ID NO: 2599465 - RNA, 19 nt, Homo sapiens
  misc_RNA (1)...(19): siRNA sense strand
ugaagaaauagaugagguu

SEQ ID NO: 2599466 - RNA, 19 nt, Homo sapiens
  misc_RNA (1)...(19): siRNA sense strand
cgaaggagagccuaaggaa

SEQ ID NO: 2599467 - RNA, 19 nt, Homo sapiens
  misc_RNA (1)...(19): siRNA sense strand
agccauagcaucugauaau

SEQ ID NO: 2599468 - RNA, 19 nt, Homo sapiens
  misc_RNA (1)...(19): siRNA sense strand
cuguaucaguccuggguga

SEQ ID NO: 2599469 - RNA, 19 nt, Homo sapiens
  misc_RNA (1)...(19): siRNA sense strand
gcaguaugugcgagacaau

SEQ ID NO: 2599470 - RNA, 19 nt, Homo sapiens
  misc_RNA (1)...(19): siRNA sense strand
gcugaagccuugaggacgu

SEQ ID NO: 2599471 - RNA, 19 nt, Homo sapiens
  misc_RNA (1)...(19): siRNA sense strand
cauggagacuggugacaga

SEQ ID NO: 2599472 - RNA, 19 nt, Homo sapiens
  misc_RNA (1)...(19): siRNA sense strand
gcagaaaguaggaccaagu

SEQ ID NO: 2599473 - RNA, 19 nt, Homo sapiens
  misc_RNA (1)...(19): siRNA sense strand
ccucguaaugauaucaaua

SEQ ID NO: 2599474 - RNA, 19 nt, Homo sapiens
  misc_RNA (1)...(19): siRNA sense strand
gcuaagugacccugaaaau

SEQ ID NO: 2599475 - RNA, 19 nt, Homo sapiens
  misc_RNA (1)...(19): siRNA sense strand
ugauaagaaugauuggcau

SEQ ID NO: 2599476 - RNA, 19 nt, Homo sapiens
  misc_RNA (1)...(19): siRNA sense strand
ccaaauggaaauuaugaca

SEQ ID NO: 2599477 - RNA, 19 nt, Homo sapiens
  misc_RNA (1)...(19): siRNA sense strand
guuauggugccgugggauu

SEQ ID NO: 2599478 - RNA, 19 nt, Homo sapiens
  misc_RNA (1)...(19): siRNA sense strand
ggccagaaaacauguaaaa

SEQ ID NO: 2599479 - RNA, 19 nt, Homo sapiens
  misc_RNA (1)...(19): siRNA sense strand
gcacugaaguuguccagga

SEQ ID NO: 2599480 - RNA, 19 nt, Homo sapiens
  misc_RNA (1)...(19): siRNA sense strand
ccuggaauuaguacaguua

SEQ ID NO: 2599481 - RNA, 19 nt, Homo sapiens
  misc_RNA (1)...(19): siRNA sense strand
aggccaauauaguggacca

SEQ ID NO: 2599482 - RNA, 19 nt, Homo sapiens
  misc_RNA (1)...(19): siRNA sense strand
cggaaggauuugggcaaca

SEQ ID NO: 2599483 - RNA, 19 nt, Homo sapiens
  misc_RNA (1)...(19): siRNA sense strand
aagccgaaggagagccuaa

SEQ ID NO: 2599484 - RNA, 19 nt, Homo sapiens
  misc_RNA (1)...(19): siRNA sense strand
augacaaacgggccagaaa

SEQ ID NO: 2599485 - RNA, 19 nt, Homo sapiens
  misc_RNA (1)...(19): siRNA sense strand
agagaauagcuaagcagau

SEQ ID NO: 2599486 - RNA, 19 nt, Homo sapiens
  misc_RNA (1)...(19): siRNA sense strand
ugaagagagcaauggacau

SEQ ID NO: 2599487 - RNA, 19 nt, Homo sapiens
  misc_RNA (1)...(19): siRNA sense strand
cuauauugcuccugaacgu

SEQ ID NO: 2599488 - RNA, 19 nt, Homo sapiens
  misc_RNA (1)...(19): siRNA sense strand
ggucagaagacgauagcaa

SEQ ID NO: 2599489 - RNA, 19 nt, Homo sapiens
  misc_RNA (1)...(19): siRNA sense strand
acaccaaacagcagagaaa

SEQ ID NO: 2599490 - RNA, 19 nt, Homo sapiens
  misc_RNA (1)...(19): siRNA sense strand
ggagaaaggagcaagccua

SEQ ID NO: 2599491 - RNA, 19 nt, Homo sapiens
  misc_RNA (1)...(19): siRNA sense strand
gauucgaagaagagaagaa

SEQ ID NO: 2599492 - RNA, 19 nt, Homo sapiens
  misc_RNA (1)...(19): siRNA sense strand
ccaggaaaugagagaagaa

SEQ ID NO: 2599493 - RNA, 19 nt, Homo sapiens
  misc_RNA (1)...(19): siRNA sense strand
cagacagaauggaagaaau

SEQ ID NO: 2599494 - RNA, 19 nt, Homo sapiens
  misc_RNA (1)...(19): siRNA sense strand
ugaugaaaggaaaggaaau

SEQ ID NO: 2599495 - RNA, 19 nt, Homo sapiens
  misc_RNA (1)...(19): siRNA sense strand
ccugaggacauuaaggaua

SEQ ID NO: 2599496 - RNA, 19 nt, Homo sapiens
  misc_RNA (1)...(19): siRNA sense strand
agauaaaggaagaagagga

SEQ ID NO: 2599497 - RNA, 19 nt, Homo sapiens
  misc_RNA (1)...(19): siRNA sense strand
ggacaaaugaccuugccaa

SEQ ID NO: 2599498 - RNA, 19 nt, Homo sapiens
  misc_RNA (1)...(19): siRNA sense strand
caaugaagauccaggagca

SEQ ID NO: 2599499 - RNA, 19 nt, Homo sapiens
  misc_RNA (1)...(19): siRNA sense strand
acauuaaggauaugaccaa

SEQ ID NO: 2599500 - RNA, 19 nt, Homo sapiens
  misc_RNA (1)...(19): siRNA sense strand
agaaaguggcucugcagaa

SEQ ID NO: 2599501 - RNA, 19 nt, Homo sapiens
  misc_RNA (1)...(19): siRNA sense strand
cugaugaaaggaaaggaaa

SEQ ID NO: 2599502 - RNA, 19 nt, Homo sapiens
  misc_RNA (1)...(19): siRNA sense strand
gaagaagagaagaaguaca

SEQ ID NO: 2599503 - RNA, 19 nt, Homo sapiens
  misc_RNA (1)...(19): siRNA sense strand
ggucuugugaauauggaaa

SEQ ID NO: 2599504 - RNA, 19 nt, Homo sapiens
  misc_RNA (1)...(19): siRNA sense strand
aagauagauucgaagaaga

SEQ ID NO: 2599505 - RNA, 19 nt, Homo sapiens
  misc_RNA (1)...(19): siRNA sense strand
aggaaaugagagaagaaaa

SEQ ID NO: 2599506 - RNA, 19 nt, Homo sapiens
  misc_RNA (1)...(19): siRNA sense strand
aguccaaggagcaggauga

SEQ ID NO: 2599507 - RNA, 19 nt, Homo sapiens
  misc_RNA (1)...(19): siRNA sense strand
ggaaguuugaagauagauu

SEQ ID NO: 2599508 - RNA, 19 nt, Homo sapiens
  misc_RNA (1)...(19): siRNA sense strand
ccggaaguuugaagauaga

SEQ ID NO: 2599509 - RNA, 19 nt, Homo sapiens
  misc_RNA (1)...(19): siRNA sense strand
ccuaugaugaugagcaaga

SEQ ID NO: 2599510 - RNA, 19 nt, Homo sapiens
  misc_RNA (1)...(19): siRNA sense strand
ugaaaggaaaggaaaugaa

SEQ ID NO: 2599511 - RNA, 19 nt, Homo sapiens
  misc_RNA (1)...(19): siRNA sense strand
aggacggucuugugaauau

SEQ ID NO: 2599512 - RNA, 19 nt, Homo sapiens
  misc_RNA (1)...(19): siRNA sense strand
cuucaaggagauaaaggaa

SEQ ID NO: 2599513 - RNA, 19 nt, Homo sapiens
  misc_RNA (1)...(19): siRNA sense strand
aagaaaaggauucgaaaga

SEQ ID NO: 2599514 - RNA, 19 nt, Homo sapiens
  misc_RNA (1)...(19): siRNA sense strand
gggagagacaagggacuua

SEQ ID NO: 2599515 - RNA, 19 nt, Homo sapiens
  misc_RNA (1)...(19): siRNA sense strand
guccuaugaugaugagcaa

SEQ ID NO: 2599516 - RNA, 19 nt, Homo sapiens
  misc_RNA (1)...(19): siRNA sense strand
ugaagauagauucgaagaa

SEQ ID NO: 2599517 - RNA, 19 nt, Homo sapiens
  misc_RNA (1)...(19): siRNA sense strand
uugagaaagaagaugagaa

SEQ ID NO: 2599518 - RNA, 19 nt, Homo sapiens
  misc_RNA (1)...(19): siRNA sense strand
ccaauuaucgagggcgaaa

SEQ ID NO: 2599519 - RNA, 19 nt, Homo sapiens
  misc_RNA (1)...(19): siRNA sense strand
ggagcaagccuaaacguca

SEQ ID NO: 2599520 - RNA, 19 nt, Homo sapiens
  misc_RNA (1)...(19): siRNA sense strand
cggagacaacuuaaagaau

SEQ ID NO: 2599521 - RNA, 19 nt, Homo sapiens
  misc_RNA (1)...(19): siRNA sense strand
aagcaagagcugguggaua

SEQ ID NO: 2599522 - RNA, 19 nt, Homo sapiens
  misc_RNA (1)...(19): siRNA sense strand
cuccuauggcugaagaaua

SEQ ID NO: 2599523 - RNA, 19 nt, Homo sapiens
  misc_RNA (1)...(19): siRNA sense strand
aagaugacgcugauggauu

SEQ ID NO: 2599524 - RNA, 19 nt, Homo sapiens
  misc_RNA (1)...(19): siRNA sense strand
ggucaaaguucagaggacu

SEQ ID NO: 2599525 - RNA, 19 nt, Homo sapiens
  misc_RNA (1)...(19): siRNA sense strand
ccggagacaacuuaaagaa

SEQ ID NO: 2599526 - RNA, 19 nt, Homo sapiens
  misc_RNA (1)...(19): siRNA sense strand
ugagaaagaagaugagaag

SEQ ID NO: 2599527 - RNA, 19 nt, Homo sapiens
  misc_RNA (1)...(19): siRNA sense strand
aauaaagcccaguguugaa

SEQ ID NO: 2599528 - RNA, 19 nt, Homo sapiens
  misc_RNA (1)...(19): siRNA sense strand
uaacaaagaacgaacggca

SEQ ID NO: 2599529 - RNA, 19 nt, Homo sapiens
  misc_RNA (1)...(19): siRNA sense strand
agacagaauggaagaaaug

SEQ ID NO: 2599530 - RNA, 19 nt, Homo sapiens
  misc_RNA (1)...(19): siRNA sense strand
aggagauaaaggaagaaga

SEQ ID NO: 2599531 - RNA, 19 nt, Homo sapiens
  misc_RNA (1)...(19): siRNA sense strand
ucugcaaaguucacaggaa

SEQ ID NO: 2599532 - RNA, 19 nt, Homo sapiens
  misc_RNA (1)...(19): siRNA sense strand
caggaaaugagagaagaaa

SEQ ID NO: 2599533 - RNA, 19 nt, Homo sapiens
  misc_RNA (1)...(19): siRNA sense strand
gugaccaggaggagagcuu

SEQ ID NO: 2599534 - RNA, 19 nt, Homo sapiens
  misc_RNA (1)...(19): siRNA sense strand
aagaagaugagaagaagca

SEQ ID NO: 2599535 - RNA, 19 nt, Homo sapiens
  misc_RNA (1)...(19): siRNA sense strand
ccaggagaagcgagcggaa

SEQ ID NO: 2599536 - RNA, 19 nt, Homo sapiens
  misc_RNA (1)...(19): siRNA sense strand
gagacaagggacuuaucaa

SEQ ID NO: 2599537 - RNA, 19 nt, Homo sapiens
  misc_RNA (1)...(19): siRNA sense strand
aagaugagaagaagcaaga

SEQ ID NO: 2599538 - RNA, 19 nt, Homo sapiens
  misc_RNA (1)...(19): siRNA sense strand
caggagaagcgagcggaaa

SEQ ID NO: 2599539 - RNA, 19 nt, Homo sapiens
  misc_RNA (1)...(19): siRNA sense strand
ggaaaugagagaagaaaag

SEQ ID NO: 2599540 - RNA, 19 nt, Homo sapiens
  misc_RNA (1)...(19): siRNA sense strand
acgaacggcaggugaugaa

SEQ ID NO: 2599541 - RNA, 19 nt, Homo sapiens
  misc_RNA (1)...(19): siRNA sense strand
agccaauuaucgagggcga

SEQ ID NO: 2599542 - RNA, 19 nt, Homo sapiens
  misc_RNA (1)...(19): siRNA sense strand
cugaagaauacagugaaua

SEQ ID NO: 2599543 - RNA, 19 nt, Homo sapiens
  misc_RNA (1)...(19): siRNA sense strand
ucugaugaaaggaaaggaa

SEQ ID NO: 2599544 - RNA, 19 nt, Homo sapiens
  misc_RNA (1)...(19): siRNA sense strand
gaagaaaagaaaaggauuc

SEQ ID NO: 2599545 - RNA, 19 nt, Homo sapiens
  misc_RNA (1)...(19): siRNA sense strand
cguuaugagaucaaggaua

SEQ ID NO: 2599546 - RNA, 19 nt, Homo sapiens
  misc_RNA (1)...(19): siRNA sense strand
gugaaagagucuaugcaga

SEQ ID NO: 2599547 - RNA, 19 nt, Homo sapiens
  misc_RNA (1)...(19): siRNA sense strand
gcagagauguccaggguac

SEQ ID NO: 2599548 - RNA, 19 nt, Homo sapiens
  misc_RNA (1)...(19): siRNA sense strand
ccugggugguggagcgaau

SEQ ID NO: 2599549 - RNA, 19 nt, Homo sapiens
  misc_RNA (1)...(19): siRNA sense strand
agaugcagguggaggcaga

SEQ ID NO: 2599550 - RNA, 19 nt, Homo sapiens
  misc_RNA (1)...(19): siRNA sense strand
cgacaauguaacucugcaa

SEQ ID NO: 2599551 - RNA, 19 nt, Homo sapiens
  misc_RNA (1)...(19): siRNA sense strand
ucaauguggcagaagggaa

SEQ ID NO: 2599552 - RNA, 19 nt, Homo sapiens
  misc_RNA (1)...(19): siRNA sense strand
cagaaaaggcugaacagau

SEQ ID NO: 2599553 - RNA, 19 nt, Homo sapiens
  misc_RNA (1)...(19): siRNA sense strand
cgauaugugcagagucuca

SEQ ID NO: 2599554 - RNA, 19 nt, Homo sapiens
  misc_RNA (1)...(19): siRNA sense strand
ugacacaacauaauggaga

SEQ ID NO: 2599555 - RNA, 19 nt, Homo sapiens
  misc_RNA (1)...(19): siRNA sense strand
acaacauaauggagaugca

SEQ ID NO: 2599556 - RNA, 19 nt, Homo sapiens
  misc_RNA (1)...(19): siRNA sense strand
aggagaggccagugcaguu

SEQ ID NO: 2599557 - RNA, 19 nt, Homo sapiens
  misc_RNA (1)...(19): siRNA sense strand
aggccaaggcuaaagcuga

SEQ ID NO: 2599558 - RNA, 19 nt, Homo sapiens
  misc_RNA (1)...(19): siRNA sense strand
acaauguaacucugcaaau

SEQ ID NO: 2599559 - RNA, 19 nt, Homo sapiens
  misc_RNA (1)...(19): siRNA sense strand
cugcagagauagaggccaa

SEQ ID NO: 2599560 - RNA, 19 nt, Homo sapiens
  misc_RNA (1)...(19): siRNA sense strand
agccagaguuugagagcaa

SEQ ID NO: 2599561 - RNA, 19 nt, Homo sapiens
  misc_RNA (1)...(19): siRNA sense strand
agauagaggccaaggaaaa

SEQ ID NO: 2599562 - RNA, 19 nt, Homo sapiens
  misc_RNA (1)...(19): siRNA sense strand
ugacagaagaacagaagaa

SEQ ID NO: 2599563 - RNA, 19 nt, Homo sapiens
  misc_RNA (1)...(19): siRNA sense strand
aagcaaugauggaagagaa

SEQ ID NO: 2599564 - RNA, 19 nt, Homo sapiens
  misc_RNA (1)...(19): siRNA sense strand
gggaaaugcauuaauggaa

SEQ ID NO: 2599565 - RNA, 19 nt, Homo sapiens
  misc_RNA (1)...(19): siRNA sense strand
cuagauaguaugaaagcaa

SEQ ID NO: 2599566 - RNA, 19 nt, Homo sapiens
  misc_RNA (1)...(19): siRNA sense strand
cauaugaggagcagaacaa

SEQ ID NO: 2599567 - RNA, 19 nt, Homo sapiens
  misc_RNA (1)...(19): siRNA sense strand
gagauagaggccaaggaaa

SEQ ID NO: 2599568 - RNA, 19 nt, Homo sapiens
  misc_RNA (1)...(19): siRNA sense strand
uggcauaugaggagcagaa

SEQ ID NO: 2599569 - RNA, 19 nt, Homo sapiens
  misc_RNA (1)...(19): siRNA sense strand
gauguugaauauagggaau

SEQ ID NO: 2599570 - RNA, 19 nt, Homo sapiens
  misc_RNA (1)...(19): siRNA sense strand
uggccuagauaguaugaaa

SEQ ID NO: 2599571 - RNA, 19 nt, Homo sapiens
  misc_RNA (1)...(19): siRNA sense strand
agaccagacaggagaagua

SEQ ID NO: 2599572 - RNA, 19 nt, Homo sapiens
  misc_RNA (1)...(19): siRNA sense strand
ccacagagaaagaacaaca

SEQ ID NO: 2599573 - RNA, 19 nt, Homo sapiens
  misc_RNA (1)...(19): siRNA sense strand
uuaaacagaaagaggacaa

SEQ ID NO: 2599574 - RNA, 19 nt, Homo sapiens
  misc_RNA (1)...(19): siRNA sense strand
agagaaaggaagaggaaag

SEQ ID NO: 2599575 - RNA, 19 nt, Homo sapiens
  misc_RNA (1)...(19): siRNA sense strand
gcucagagacccaggagga

SEQ ID NO: 2599576 - RNA, 19 nt, Homo sapiens
  misc_RNA (1)...(19): siRNA sense strand
ccaccaagagaaaggaaga

SEQ ID NO: 2599577 - RNA, 19 nt, Homo sapiens
  misc_RNA (1)...(19): siRNA sense strand
gcuaccaaauagugaaaca

SEQ ID NO: 2599578 - RNA, 19 nt, Homo sapiens
  misc_RNA (1)...(19): siRNA sense strand
acuuugacaaugugggaaa

SEQ ID NO: 2599579 - RNA, 19 nt, Homo sapiens
  misc_RNA (1)...(19): siRNA sense strand
agaaagaacaacagccaga

SEQ ID NO: 2599580 - RNA, 19 nt, Homo sapiens
  misc_RNA (1)...(19): siRNA sense strand
gaacaagaauguagcugca

SEQ ID NO: 2599581 - RNA, 19 nt, Homo sapiens
  misc_RNA (1)...(19): siRNA sense strand
guagcguggacaagagaaa

SEQ ID NO: 2599582 - RNA, 19 nt, Homo sapiens
  misc_RNA (1)...(19): siRNA sense strand
gggaauugacagaaguuca

SEQ ID NO: 2599583 - RNA, 19 nt, Homo sapiens
  misc_RNA (1)...(19): siRNA sense strand
gggaaaaguuugacccaga

SEQ ID NO: 2599584 - RNA, 19 nt, Homo sapiens
  misc_RNA (1)...(19): siRNA sense strand
ugucauuggaauagcgauu

SEQ ID NO: 2599585 - RNA, 19 nt, Homo sapiens
  misc_RNA (1)...(19): siRNA sense strand
cggaaaaccugcuaccaaa

SEQ ID NO: 2599586 - RNA, 19 nt, Homo sapiens
  misc_RNA (1)...(19): siRNA sense strand
acagaagaacagaagaaau

SEQ ID NO: 2599587 - RNA, 19 nt, Homo sapiens
  misc_RNA (1)...(19): siRNA sense strand
caauaugaauguaagcaca

SEQ ID NO: 2599588 - RNA, 19 nt, Homo sapiens
  misc_RNA (1)...(19): siRNA sense strand
gguaauaagaaaaggaagu

SEQ ID NO: 2599589 - RNA, 19 nt, Homo sapiens
  misc_RNA (1)...(19): siRNA sense strand
ccaugaaggaacaagaaaa

SEQ ID NO: 2599590 - RNA, 19 nt, Homo sapiens
  misc_RNA (1)...(19): siRNA sense strand
auggaaacuuagaaggaga

SEQ ID NO: 2599591 - RNA, 19 nt, Homo sapiens
  misc_RNA (1)...(19): siRNA sense strand
gaacaaaugucaaggucuc

SEQ ID NO: 2599592 - RNA, 19 nt, Homo sapiens
  misc_RNA (1)...(19): siRNA sense strand
aggaagaugacguugaauu

SEQ ID NO: 2599593 - RNA, 19 nt, Homo sapiens
  misc_RNA (1)...(19): siRNA sense strand
uggaauagcgauuguguca

SEQ ID NO: 2599594 - RNA, 19 nt, Homo sapiens
  misc_RNA (1)...(19): siRNA sense strand
uguugauuccacagagaaa

SEQ ID NO: 2599595 - RNA, 19 nt, Homo sapiens
  misc_RNA (1)...(19): siRNA sense strand
gagacacacucuugagcau

SEQ ID NO: 2599596 - RNA, 19 nt, Homo sapiens
  misc_RNA (1)...(19): siRNA sense strand
caaugauggaagagaaguu

SEQ ID NO: 2599597 - RNA, 19 nt, Homo sapiens
  misc_RNA (1)...(19): siRNA sense strand
acccaaaauccaagaauua

SEQ ID NO: 2599598 - RNA, 19 nt, Homo sapiens
  misc_RNA (1)...(19): siRNA sense strand
ggaucaaccagaaagucaa

SEQ ID NO: 2599599 - RNA, 19 nt, Homo sapiens
  misc_RNA (1)...(19): siRNA sense strand
cgacauuccucgugagcuc

SEQ ID NO: 2599600 - RNA, 19 nt, Homo sapiens
  misc_RNA (1)...(19): siRNA sense strand
uuugagagagucugggaaa

SEQ ID NO: 2599601 - RNA, 19 nt, Homo sapiens
  misc_RNA (1)...(19): siRNA sense strand
ucaucaucauuguguguua

SEQ ID NO: 2599602 - RNA, 19 nt, Homo sapiens
  misc_RNA (1)...(19): siRNA sense strand
agaacaacagccagaguuu

SEQ ID NO: 2599603 - RNA, 19 nt, Homo sapiens
  misc_RNA (1)...(19): siRNA sense strand
gaagagaaguucauggaag

SEQ ID NO: 2599604 - RNA, 19 nt, Homo sapiens
  misc_RNA (1)...(19): siRNA sense strand
uuaagaagguccugagaac

SEQ ID NO: 2599605 - RNA, 19 nt, Homo sapiens
  misc_RNA (1)...(19): siRNA sense strand
ggaaaugcauuaauggaac

SEQ ID NO: 2599606 - RNA, 19 nt, Homo sapiens
  misc_RNA (1)...(19): siRNA sense strand
cuucggauuuggaaaguau

SEQ ID NO: 2599607 - RNA, 19 nt, Homo sapiens
  misc_RNA (1)...(19): siRNA sense strand
cauuaauggaacagacuca

SEQ ID NO: 2599608 - RNA, 19 nt, Homo sapiens
  misc_RNA (1)...(19): siRNA sense strand
cuaccgaaaucauaagaca

SEQ ID NO: 2599609 - RNA, 19 nt, Homo sapiens
  misc_RNA (1)...(19): siRNA sense strand
uuagcaaugaggaaagaaa

SEQ ID NO: 2599610 - RNA, 19 nt, Homo sapiens
  misc_RNA (1)...(19): siRNA sense strand
ccaggaggagcuugguaua

SEQ ID NO: 2599611 - RNA, 19 nt, Homo sapiens
  misc_RNA (1)...(19): siRNA sense strand
aguucaaaguguggaaauu

SEQ ID NO: 2599612 - RNA, 19 nt, Homo sapiens
  misc_RNA (1)...(19): siRNA sense strand
gcucaauuccuuuagcaau

SEQ ID NO: 2599613 - RNA, 19 nt, Homo sapiens
  misc_RNA (1)...(19): siRNA sense strand
gggcacugauauuugaaga

SEQ ID NO: 2599614 - RNA, 19 nt, Homo sapiens
  misc_RNA (1)...(19): siRNA sense strand
uggaagacuuggacccauu

SEQ ID NO: 2599615 - RNA, 19 nt, Homo sapiens
  misc_RNA (1)...(19): siRNA sense strand
guucauggcuacagggccu

SEQ ID NO: 2599616 - RNA, 19 nt, Homo sapiens
  misc_RNA (1)...(19): siRNA sense strand
cugugaagaagcuggucaa

SEQ ID NO: 2599617 - RNA, 19 nt, Homo sapiens
  misc_RNA (1)...(19): siRNA sense strand
gaguucaaaguguggaaau

SEQ ID NO: 2599618 - RNA, 19 nt, Homo sapiens
  misc_RNA (1)...(19): siRNA sense strand
gagaaaggaagaggaaaga

SEQ ID NO: 2599619 - RNA, 19 nt, Homo sapiens
  misc_RNA (1)...(19): siRNA sense strand
gcauaugaggagcagaaca

SEQ ID NO: 2599620 - RNA, 19 nt, Homo sapiens
  misc_RNA (1)...(19): siRNA sense strand
gaaggagaggccaggaaaa

SEQ ID NO: 2599621 - RNA, 19 nt, Homo sapiens
  misc_RNA (1)...(19): siRNA sense strand
caguauacuaucagaaugu

SEQ ID NO: 2599622 - RNA, 19 nt, Homo sapiens
  misc_RNA (1)...(19): siRNA sense strand
gaauguaagcacaccaaaa

SEQ ID NO: 2599623 - RNA, 19 nt, Homo sapiens
  misc_RNA (1)...(19): siRNA sense strand
agaaggagaggccaggaaa

SEQ ID NO: 2599624 - RNA, 19 nt, Homo sapiens
  misc_RNA (1)...(19): siRNA sense strand
ggacugaauuuaauggcau

SEQ ID NO: 2599625 - RNA, 19 nt, Homo sapiens
  misc_RNA (1)...(19): siRNA sense strand
aguuauugugcaagagaau

SEQ ID NO: 2599626 - RNA, 19 nt, Homo sapiens
  misc_RNA (1)...(19): siRNA sense strand
agaauggaaaggagagaca

SEQ ID NO: 2599627 - RNA, 19 nt, Homo sapiens
  misc_RNA (1)...(19): siRNA sense strand
guguggaggcagagguuga

SEQ ID NO: 2599628 - RNA, 19 nt, Homo sapiens
  misc_RNA (1)...(19): siRNA sense strand
ggaugaaagaaaaggacau

SEQ ID NO: 2599629 - RNA, 19 nt, Homo sapiens
  misc_RNA (1)...(19): siRNA sense strand
ggauaucugcagagaaaau

SEQ ID NO: 2599630 - RNA, 19 nt, Homo sapiens
  misc_RNA (1)...(19): siRNA sense strand
caagagaauggaaaggaga

SEQ ID NO: 2599631 - RNA, 19 nt, Homo sapiens
  misc_RNA (1)...(19): siRNA sense strand
gaugcuagcuacaagccaa

SEQ ID NO: 2599632 - RNA, 19 nt, Homo sapiens
  misc_RNA (1)...(19): siRNA sense strand
agaggaaguaugugcaaca

SEQ ID NO: 2599633 - RNA, 19 nt, Homo sapiens
  misc_RNA (1)...(19): siRNA sense strand
agauaaaaguguucagacu

SEQ ID NO: 2599634 - RNA, 19 nt, Homo sapiens
  misc_RNA (1)...(19): siRNA sense strand
cguaacaagcugaugagga

SEQ ID NO: 2599635 - RNA, 19 nt, Homo sapiens
  misc_RNA (1)...(19): siRNA sense strand
aggcgacacauguggacua

SEQ ID NO: 2599636 - RNA, 19 nt, Homo sapiens
  misc_RNA (1)...(19): siRNA sense strand
caguuauugugcaagagaa

SEQ ID NO: 2599637 - RNA, 19 nt, Homo sapiens
  misc_RNA (1)...(19): siRNA sense strand
aggcuuaugaggagcuauu

SEQ ID NO: 2599638 - RNA, 19 nt, Homo sapiens
  misc_RNA (1)...(19): siRNA sense strand
gaggaaggcuuaugaggag

SEQ ID NO: 2599639 - RNA, 19 nt, Homo sapiens
  misc_RNA (1)...(19): siRNA sense strand
uuggaaaacuacggaaaua

SEQ ID NO: 2599640 - RNA, 19 nt, Homo sapiens
  misc_RNA (1)...(19): siRNA sense strand
gcaagagaauggaaaggag

SEQ ID NO: 2599641 - RNA, 19 nt, Homo sapiens
  misc_RNA (1)...(19): siRNA sense strand
agauauucagccagggcau

SEQ ID NO: 2599642 - RNA, 19 nt, Homo sapiens
  misc_RNA (1)...(19): siRNA sense strand
aagccaagccuuagacacu

SEQ ID NO: 2599643 - RNA, 19 nt, Homo sapiens
  misc_RNA (1)...(19): siRNA sense strand
agagaggaaguaugugcaa

SEQ ID NO: 2599644 - RNA, 19 nt, Homo sapiens
  misc_RNA (1)...(19): siRNA sense strand
ggagaauggcaaaaggcuu

SEQ ID NO: 2599645 - RNA, 19 nt, Homo sapiens
  misc_RNA (1)...(19): siRNA sense strand
ggaagggacaagagggaga

SEQ ID NO: 2599646 - RNA, 19 nt, Homo sapiens
  misc_RNA (1)...(19): siRNA sense strand
agaagagggcauaaagaca

SEQ ID NO: 2599647 - RNA, 19 nt, Homo sapiens
  misc_RNA (1)...(19): siRNA sense strand
caggaagggacaagaggga

SEQ ID NO: 2599648 - RNA, 19 nt, Homo sapiens
  misc_RNA (1)...(19): siRNA sense strand
cugcaauaccagaaaguuc

SEQ ID NO: 2599649 - RNA, 19 nt, Homo sapiens
  misc_RNA (1)...(19): siRNA sense strand
gcacacaugcagaaggaac

SEQ ID NO: 2599650 - RNA, 19 nt, Homo sapiens
  misc_RNA (1)...(19): siRNA sense strand
ucgauuaagaguaugccaa

SEQ ID NO: 2599651 - RNA, 19 nt, Homo sapiens
  misc_RNA (1)...(19): siRNA sense strand
cagaaaucuuccagcguug

SEQ ID NO: 2599652 - RNA, 19 nt, Homo sapiens
  misc_RNA (1)...(19): siRNA sense strand
ggaguaaagaggugcguga

SEQ ID NO: 2599653 - RNA, 19 nt, Homo sapiens
  misc_RNA (1)...(19): siRNA sense strand
cugcauacgaucagggaga

SEQ ID NO: 2599654 - RNA, 19 nt, Homo sapiens
  misc_RNA (1)...(19): siRNA sense strand
ccuuagucacucagacaua

SEQ ID NO: 2599655 - RNA, 19 nt, Homo sapiens
  misc_RNA (1)...(19): siRNA sense strand
cgacaguccuuuagcggca

SEQ ID NO: 2599656 - RNA, 19 nt, Homo sapiens
  misc_RNA (1)...(19): siRNA sense strand
ugugcauuguagagagauu

SEQ ID NO: 2599657 - RNA, 19 nt, Homo sapiens
  misc_RNA (1)...(19): siRNA sense strand
ggaaagugcucauggccuc

SEQ ID NO: 2599658 - RNA, 19 nt, Homo sapiens
  misc_RNA (1)...(19): siRNA sense strand
ggagaggaguaaagaggug

SEQ ID NO: 2599659 - RNA, 19 nt, Homo sapiens
  misc_RNA (1)...(19): siRNA sense strand
cucgagacugugaaagaaa

SEQ ID NO: 2599660 - RNA, 19 nt, Homo sapiens
  misc_RNA (1)...(19): siRNA sense strand
ggaccggguacuucgggaa

SEQ ID NO: 2599661 - RNA, 19 nt, Homo sapiens
  misc_RNA (1)...(19): siRNA sense strand
uaaagaggugcgugagcau

SEQ ID NO: 2599662 - RNA, 19 nt, Homo sapiens
  misc_RNA (1)...(19): siRNA sense strand
ggaguaaagaggugcguga

SEQ ID NO: 2599663 - RNA, 19 nt, Homo sapiens
  misc_RNA (1)...(19): siRNA sense strand
cugcauacgaucagggaga

SEQ ID NO: 2599664 - RNA, 19 nt, Homo sapiens
  misc_RNA (1)...(19): siRNA sense strand
ccuuagucacucagacaua

SEQ ID NO: 2599665 - RNA, 19 nt, Homo sapiens
  misc_RNA (1)...(19): siRNA sense strand
cgacaguccuuuagcggca

SEQ ID NO: 2599666 - RNA, 19 nt, Homo sapiens
  misc_RNA (1)...(19): siRNA sense strand
ugugcauuguagagagauu

SEQ ID NO: 2599667 - RNA, 19 nt, Homo sapiens
  misc_RNA (1)...(19): siRNA sense strand
ggaaagugcucauggccuc

SEQ ID NO: 2599668 - RNA, 19 nt, Homo sapiens
  misc_RNA (1)...(19): siRNA sense strand
ggagaggaguaaagaggug

SEQ ID NO: 2599669 - RNA, 19 nt, Homo sapiens
  misc_RNA (1)...(19): siRNA sense strand
cucgagacugugaaagaaa

SEQ ID NO: 2599670 - RNA, 19 nt, Homo sapiens
  misc_RNA (1)...(19): siRNA sense strand
ggaccggguacuucgggaa

SEQ ID NO: 2599671 - RNA, 19 nt, Homo sapiens
  misc_RNA (1)...(19): siRNA sense strand
uaaagaggugcgugagcau

SEQ ID NO: 2599672 - RNA, 19 nt, Homo sapiens
  misc_RNA (1)...(19): siRNA sense strand
gcuaaaagccaaagccgaa

SEQ ID NO: 2599673 - RNA, 19 nt, Homo sapiens
  misc_RNA (1)...(19): siRNA sense strand
aaauauggaaacaggaaca

SEQ ID NO: 2599674 - RNA, 19 nt, Homo sapiens
  misc_RNA (1)...(19): siRNA sense strand
guucaaacaacgaagacga

SEQ ID NO: 2599675 - RNA, 19 nt, Homo sapiens
  misc_RNA (1)...(19): siRNA sense strand
gcggaaacugcuuagaaaa

SEQ ID NO: 2599676 - RNA, 19 nt, Homo sapiens
  misc_RNA (1)...(19): siRNA sense strand
guuuagaugaaaagaggaa

SEQ ID NO: 2599677 - RNA, 19 nt, Homo sapiens
  misc_RNA (1)...(19): siRNA sense strand
guaaauuaugcaagcuuca

SEQ ID NO: 2599678 - RNA, 19 nt, Homo sapiens
  misc_RNA (1)...(19): siRNA sense strand
ggaaacaggaacaggacug

SEQ ID NO: 2599679 - RNA, 19 nt, Homo sapiens
  misc_RNA (1)...(19): siRNA sense strand
caccagaaagagucgguau

SEQ ID NO: 2599680 - RNA, 19 nt, Homo sapiens
  misc_RNA (1)...(19): siRNA sense strand
gacgaaagcuaaaagccaa

SEQ ID NO: 2599681 - RNA, 19 nt, Homo sapiens
  misc_RNA (1)...(19): siRNA sense strand
gcuuagaaaagucgaugua

SEQ ID NO: 2599682 - RNA, 19 nt, Homo sapiens
  misc_RNA (1)...(19): siRNA sense strand
caacaagacaggagaggug

SEQ ID NO: 2599683 - RNA, 19 nt, Homo sapiens
  misc_RNA (1)...(19): siRNA sense strand
ccgagaaugugguggcauc

SEQ ID NO: 2599684 - RNA, 19 nt, Homo sapiens
  misc_RNA (1)...(19): siRNA sense strand
ccaggauggaggagaagga

SEQ ID NO: 2599685 - RNA, 19 nt, Homo sapiens
  misc_RNA (1)...(19): siRNA sense strand
ccaugaugcugacgcccaa

SEQ ID NO: 2599686 - RNA, 19 nt, Homo sapiens
  misc_RNA (1)...(19): siRNA sense strand
aggagaaccaggagcacca

SEQ ID NO: 2599687 - RNA, 19 nt, Homo sapiens
  misc_RNA (1)...(19): siRNA sense strand
ggaacuaccacaaagagga

SEQ ID NO: 2599688 - RNA, 19 nt, Homo sapiens
  misc_RNA (1)...(19): siRNA sense strand
agacaggagaggugcugau

SEQ ID NO: 2599689 - RNA, 19 nt, Homo sapiens
  misc_RNA (1)...(19): siRNA sense strand
acaaagaggagaaccagga

SEQ ID NO: 2599690 - RNA, 19 nt, Homo sapiens
  misc_RNA (1)...(19): siRNA sense strand
gcucagagauccagaauaa

SEQ ID NO: 2599691 - RNA, 19 nt, Homo sapiens
  misc_RNA (1)...(19): siRNA sense strand
gagagaagaaggagagaaa

SEQ ID NO: 2599692 - RNA, 19 nt, Homo sapiens
  misc_RNA (1)...(19): siRNA sense strand
gaguagugauugugggaaa

SEQ ID NO: 2599693 - RNA, 19 nt, Homo sapiens
  misc_RNA (1)...(19): siRNA sense strand
ggaaagcaguaaagaauua

SEQ ID NO: 2599694 - RNA, 19 nt, Homo sapiens
  misc_RNA (1)...(19): siRNA sense strand
ggacagagguuuuaaauaa

SEQ ID NO: 2599695 - RNA, 19 nt, Homo sapiens
  misc_RNA (1)...(19): siRNA sense strand
gaagaagaguguagacaga

SEQ ID NO: 2599696 - RNA, 19 nt, Homo sapiens
  misc_RNA (1)...(19): siRNA sense strand
gaauaagaucccagagaga

SEQ ID NO: 2599697 - RNA, 19 nt, Homo sapiens
  misc_RNA (1)...(19): siRNA sense strand
gaagaaaggagccaagaua

SEQ ID NO: 2599698 - RNA, 19 nt, Homo sapiens
  misc_RNA (1)...(19): siRNA sense strand
gcauggaaguacaggauga

SEQ ID NO: 2599699 - RNA, 19 nt, Homo sapiens
  misc_RNA (1)...(19): siRNA sense strand
ggacaaagaaggauugaca

SEQ ID NO: 2599700 - RNA, 19 nt, Homo sapiens
  misc_RNA (1)...(19): siRNA sense strand
gguacaaggaugagacaga

SEQ ID NO: 2599701 - RNA, 19 nt, Homo sapiens
  misc_RNA (1)...(19): siRNA sense strand
gaaccaaggaguagugauu

SEQ ID NO: 2599702 - RNA, 19 nt, Homo sapiens
  misc_RNA (1)...(19): siRNA sense strand
ccuuauaggccuccagaua

SEQ ID NO: 2599703 - RNA, 19 nt, Homo sapiens
  misc_RNA (1)...(19): siRNA sense strand
ccagagagaaauuuggaaa

SEQ ID NO: 2599704 - RNA, 19 nt, Homo sapiens
  misc_RNA (1)...(19): siRNA sense strand
cgaaauagaugcucaacuu

SEQ ID NO: 2599705 - RNA, 19 nt, Homo sapiens
  misc_RNA (1)...(19): siRNA sense strand
auaagaucccagagagaaa

SEQ ID NO: 2599706 - RNA, 19 nt, Homo sapiens
  misc_RNA (1)...(19): siRNA sense strand
gggccaagguggaucauuu

SEQ ID NO: 2599707 - RNA, 19 nt, Homo sapiens
  misc_RNA (1)...(19): siRNA sense strand
cuggaugagcagagacaua

SEQ ID NO: 2599708 - RNA, 19 nt, Homo sapiens
  misc_RNA (1)...(19): siRNA sense strand
ggaugaggacuuugaagaa

SEQ ID NO: 2599709 - RNA, 19 nt, Homo sapiens
  misc_RNA (1)...(19): siRNA sense strand
agaagagaaugaagccaua

SEQ ID NO: 2599710 - RNA, 19 nt, Homo sapiens
  misc_RNA (1)...(19): siRNA sense strand
ggaccaguuuacaggaaau

SEQ ID NO: 2599711 - RNA, 19 nt, Homo sapiens
  misc_RNA (1)...(19): siRNA sense strand
uggauuaaaugaagcagaa

SEQ ID NO: 2599712 - RNA, 19 nt, Homo sapiens
  misc_RNA (1)...(19): siRNA sense strand
ggggaaagcaguaaagaau

SEQ ID NO: 2599713 - RNA, 19 nt, Homo sapiens
  misc_RNA (1)...(19): siRNA sense strand
caguaaagaauuaggaucu

SEQ ID NO: 2599714 - RNA, 19 nt, Homo sapiens
  misc_RNA (1)...(19): siRNA sense strand
cagcaucacuacagaguca

SEQ ID NO: 2599715 - RNA, 19 nt, Homo sapiens
  misc_RNA (1)...(19): siRNA sense strand
caucuugguuacacagaaa

SEQ ID NO: 2599716 - RNA, 19 nt, Homo sapiens
  misc_RNA (1)...(19): siRNA sense strand
gcucaaacuaauuguaaca

SEQ ID NO: 2599717 - RNA, 19 nt, Homo sapiens
  misc_RNA (1)...(19): siRNA sense strand
ggaucgacuagaagagaau

SEQ ID NO: 2599718 - RNA, 19 nt, Homo sapiens
  misc_RNA (1)...(19): siRNA sense strand
ugagcaagcugauggaaga

SEQ ID NO: 2599719 - RNA, 19 nt, Homo sapiens
  misc_RNA (1)...(19): siRNA sense strand
agagaaagucacagaaguu

SEQ ID NO: 2599720 - RNA, 19 nt, Homo sapiens
  misc_RNA (1)...(19): siRNA sense strand
gcaaucacccagcggauaa

SEQ ID NO: 2599721 - RNA, 19 nt, Homo sapiens
  misc_RNA (1)...(19): siRNA sense strand
aaacauuggauucggcaaa

SEQ ID NO: 2599722 - RNA, 19 nt, Homo sapiens
  misc_RNA (1)...(19): siRNA sense strand
ccaaacauguggaugccaa

SEQ ID NO: 2599723 - RNA, 19 nt, Homo sapiens
  misc_RNA (1)...(19): siRNA sense strand
ugcagaaacuuuugagaaa

SEQ ID NO: 2599724 - RNA, 19 nt, Homo sapiens
  misc_RNA (1)...(19): siRNA sense strand
cggaggaauuugcuacuaa

SEQ ID NO: 2599725 - RNA, 19 nt, Homo sapiens
  misc_RNA (1)...(19): siRNA sense strand
cggaagaagcagaaccuga

SEQ ID NO: 2599726 - RNA, 19 nt, Homo sapiens
  misc_RNA (1)...(19): siRNA sense strand
agguggaucauuuggauaa

SEQ ID NO: 2599727 - RNA, 19 nt, Homo sapiens
  misc_RNA (1)...(19): siRNA sense strand
ugaucauccuguugagcaa

SEQ ID NO: 2599728 - RNA, 19 nt, Homo sapiens
  misc_RNA (1)...(19): siRNA sense strand
ccaccuauagucugaauaa

SEQ ID NO: 2599729 - RNA, 19 nt, Homo sapiens
  misc_RNA (1)...(19): siRNA sense strand
agacauacaccuuugagaa

SEQ ID NO: 2599730 - RNA, 19 nt, Homo sapiens
  misc_RNA (1)...(19): siRNA sense strand
uuggaauggcggaggaauu

SEQ ID NO: 2599731 - RNA, 19 nt, Homo sapiens
  misc_RNA (1)...(19): siRNA sense strand
aagcagaaccugagccaca

SEQ ID NO: 2599732 - RNA, 19 nt, Homo sapiens
  misc_RNA (1)...(19): siRNA sense strand
gaggacagggcaaagaaua

SEQ ID NO: 2599733 - RNA, 19 nt, Homo sapiens
  misc_RNA (1)...(19): siRNA sense strand
gggaaagcaguaaagaauu

SEQ ID NO: 2599734 - RNA, 19 nt, Homo sapiens
  misc_RNA (1)...(19): siRNA sense strand
ggaaugcgcccuuuggaua

SEQ ID NO: 2599735 - RNA, 19 nt, Homo sapiens
  misc_RNA (1)...(19): siRNA sense strand
ccacagaccaugcugacaa

SEQ ID NO: 2599736 - RNA, 19 nt, Homo sapiens
  misc_RNA (1)...(19): siRNA sense strand
aggauauauucgaggagga

SEQ ID NO: 2599737 - RNA, 19 nt, Homo sapiens
  misc_RNA (1)...(19): siRNA sense strand
uuguaucguuucugaguaa

SEQ ID NO: 2599738 - RNA, 19 nt, Homo sapiens
  misc_RNA (1)...(19): siRNA sense strand
gaaaggcuaucuaguguua

SEQ ID NO: 2599739 - RNA, 19 nt, Homo sapiens
  misc_RNA (1)...(19): siRNA sense strand
gcuuacuaugcgagagcaa

SEQ ID NO: 2599740 - RNA, 19 nt, Homo sapiens
  misc_RNA (1)...(19): siRNA sense strand
ccuuagaggaccugaacga

SEQ ID NO: 2599741 - RNA, 19 nt, Homo sapiens
  misc_RNA (1)...(19): siRNA sense strand
auauauucgaggaggagua

SEQ ID NO: 2599742 - RNA, 19 nt, Homo sapiens
  misc_RNA (1)...(19): siRNA sense strand
ccacgaaauagaugcucaa

SEQ ID NO: 2599743 - RNA, 19 nt, Homo sapiens
  misc_RNA (1)...(19): siRNA sense strand
gcugaaaguaugagugucu

SEQ ID NO: 2599744 - RNA, 19 nt, Homo sapiens
  misc_RNA (1)...(19): siRNA sense strand
ccuugaaagcagagauagu

SEQ ID NO: 2599745 - RNA, 19 nt, Homo sapiens
  misc_RNA (1)...(19): siRNA sense strand
gagcacagaucaacagcuu

SEQ ID NO: 2599746 - RNA, 19 nt, Homo sapiens
  misc_RNA (1)...(19): siRNA sense strand
gaauuaggaucuggaggaa

SEQ ID NO: 2599747 - RNA, 19 nt, Homo sapiens
  misc_RNA (1)...(19): siRNA sense strand
ugaagaacaugcagaaacu

SEQ ID NO: 2599748 - RNA, 19 nt, Homo sapiens
  misc_RNA (1)...(19): siRNA sense strand
guggaugccucuucugaaa

SEQ ID NO: 2599749 - RNA, 19 nt, Homo sapiens
  misc_RNA (1)...(19): siRNA sense strand
gcccagauugugagaagua

SEQ ID NO: 2599750 - RNA, 19 nt, Homo sapiens
  misc_RNA (1)...(19): siRNA sense strand
cacuagaaugggaggauuu

SEQ ID NO: 2599751 - RNA, 19 nt, Homo sapiens
  misc_RNA (1)...(19): siRNA sense strand
gaaagguaaaguaaaggaa

SEQ ID NO: 2599752 - RNA, 19 nt, Homo sapiens
  misc_RNA (1)...(19): siRNA sense strand
agagagaaauuuggaaaca

SEQ ID NO: 2599753 - RNA, 19 nt, Homo sapiens
  misc_RNA (1)...(19): siRNA sense strand
cagcaggauuuaagaguuc

SEQ ID NO: 2599754 - RNA, 19 nt, Homo sapiens
  misc_RNA (1)...(19): siRNA sense strand
cuucaaaguucaaaugcca

SEQ ID NO: 2599755 - RNA, 19 nt, Homo sapiens
  misc_RNA (1)...(19): siRNA sense strand
gaggaguggucacacguua

SEQ ID NO: 2599756 - RNA, 19 nt, Homo sapiens
  misc_RNA (1)...(19): siRNA sense strand
cgaaaucuuaugaagcuua

SEQ ID NO: 2599757 - RNA, 19 nt, Homo sapiens
  misc_RNA (1)...(19): siRNA sense strand
cuacgaaugccaagacaga

SEQ ID NO: 2599758 - RNA, 19 nt, Homo sapiens
  misc_RNA (1)...(19): siRNA sense strand
cagcgugaaccaaggagua

SEQ ID NO: 2599759 - RNA, 19 nt, Homo sapiens
  misc_RNA (1)...(19): siRNA sense strand
gcuuaucuggagagaagaa

SEQ ID NO: 2599760 - RNA, 19 nt, Homo sapiens
  misc_RNA (1)...(19): siRNA sense strand
cauuuaaucagaagaccua

SEQ ID NO: 2599761 - RNA, 19 nt, Homo sapiens
  misc_RNA (1)...(19): siRNA sense strand
aagcagagauaguggcauc

SEQ ID NO: 2599762 - RNA, 19 nt, Homo sapiens
  misc_RNA (1)...(19): siRNA sense strand
gagaaaggcuaucuagugu

SEQ ID NO: 2599763 - RNA, 19 nt, Homo sapiens
  misc_RNA (1)...(19): siRNA sense strand
cuaaucaagcgcagagaca

SEQ ID NO: 2599764 - RNA, 19 nt, Homo sapiens
  misc_RNA (1)...(19): siRNA sense strand
ggagagaagaaggagagaa

SEQ ID NO: 2599765 - RNA, 19 nt, Homo sapiens
  misc_RNA (1)...(19): siRNA sense strand
gccacagcaugaagacaua

SEQ ID NO: 2599766 - RNA, 19 nt, Homo sapiens
  misc_RNA (1)...(19): siRNA sense strand
gagagaaagucacagaagu

SEQ ID NO: 2599767 - RNA, 19 nt, Homo sapiens
  misc_RNA (1)...(19): siRNA sense strand
uggaaguacaggaugaaaa

SEQ ID NO: 2599768 - RNA, 19 nt, Homo sapiens
  misc_RNA (1)...(19): siRNA sense strand
ggauuuaagaguucgcuuu

SEQ ID NO: 2599769 - RNA, 19 nt, Homo sapiens
  misc_RNA (1)...(19): siRNA sense strand
aaggcuaucuaguguuaaa

SEQ ID NO: 2599770 - RNA, 19 nt, Homo sapiens
  misc_RNA (1)...(19): siRNA sense strand
uggcuuaucuggagagaag

SEQ ID NO: 2599771 - RNA, 19 nt, Homo sapiens
  misc_RNA (1)...(19): siRNA sense strand
caucauugcuacauuaaca

SEQ ID NO: 2599772 - RNA, 19 nt, Homo sapiens
  misc_RNA (1)...(19): siRNA sense strand
cauuugaccucauagagaa

SEQ ID NO: 2599773 - RNA, 19 nt, Homo sapiens
  misc_RNA (1)...(19): siRNA sense strand
gagaagaaggagagaaaac

SEQ ID NO: 2599774 - RNA, 19 nt, Homo sapiens
  misc_RNA (1)...(19): siRNA sense strand
ugaagaaguucccuagaga

SEQ ID NO: 2599775 - RNA, 19 nt, Homo sapiens
  misc_RNA (1)...(19): siRNA sense strand
gccauuugcuggaggacga

SEQ ID NO: 2599776 - RNA, 19 nt, Homo sapiens
  misc_RNA (1)...(19): siRNA sense strand
agaauuaggaucuggagga

SEQ ID NO: 2599777 - RNA, 19 nt, Homo sapiens
  misc_RNA (1)...(19): siRNA sense strand
cugaauaagaucccagaga

SEQ ID NO: 2599778 - RNA, 19 nt, Homo sapiens
  misc_RNA (1)...(19): siRNA sense strand
gagcagagacauacaccuu

SEQ ID NO: 2599779 - RNA, 19 nt, Homo sapiens
  misc_RNA (1)...(19): siRNA sense strand
ugaguaaaaugaucggaaa

SEQ ID NO: 2599780 - RNA, 19 nt, Homo sapiens
  misc_RNA (1)...(19): siRNA sense strand
caauauuaauuaccggaca

SEQ ID NO: 2599781 - RNA, 19 nt, Homo sapiens
  misc_RNA (1)...(19): siRNA sense strand
cacaaaauaugcuggggaa

SEQ ID NO: 2599782 - RNA, 19 nt, Homo sapiens
  misc_RNA (1)...(19): siRNA sense strand
agagaaauuuggaaacagu

SEQ ID NO: 2599783 - RNA, 19 nt, Homo sapiens
  misc_RNA (1)...(19): siRNA sense strand
agaccaugcugacaagaau

SEQ ID NO: 2599784 - RNA, 19 nt, Homo sapiens
  misc_RNA (1)...(19): siRNA sense strand
aggaggaguaccuggaaca

SEQ ID NO: 2599785 - RNA, 19 nt, Homo sapiens
  misc_RNA (1)...(19): siRNA sense strand
cagcaggaaacaagcguca

SEQ ID NO: 2599786 - RNA, 19 nt, Homo sapiens
  misc_RNA (1)...(19): siRNA sense strand
cuguagaugaggcagcaaa

SEQ ID NO: 2599787 - RNA, 19 nt, Homo sapiens
  misc_RNA (1)...(19): siRNA sense strand
uuuauuuacuccagugcaa

SEQ ID NO: 2599788 - RNA, 19 nt, Homo sapiens
  misc_RNA (1)...(19): siRNA sense strand
gagcauaucuuccaggcca

SEQ ID NO: 2599789 - RNA, 19 nt, Homo sapiens
  misc_RNA (1)...(19): siRNA sense strand
cuuugaagaacaugcagaa

SEQ ID NO: 2599790 - RNA, 19 nt, Homo sapiens
  misc_RNA (1)...(19): siRNA sense strand
gggcaaagucuauggcgga

SEQ ID NO: 2599791 - RNA, 19 nt, Homo sapiens
  misc_RNA (1)...(19): siRNA sense strand
cugcagaccuaguggccau

SEQ ID NO: 2599792 - RNA, 19 nt, Homo sapiens
  misc_RNA (1)...(19): siRNA sense strand
cuguguaggauuuaguaau

SEQ ID NO: 2599793 - RNA, 19 nt, Homo sapiens
  misc_RNA (1)...(19): siRNA sense strand
cgacuuagaguauucggua

SEQ ID NO: 2599794 - RNA, 19 nt, Homo sapiens
  misc_RNA (1)...(19): siRNA sense strand
ccaaagaaccugcagaccu

SEQ ID NO: 2599795 - RNA, 19 nt, Homo sapiens
  misc_RNA (1)...(19): siRNA sense strand
gggaagaaaggaagagcaa

SEQ ID NO: 2599796 - RNA, 19 nt, Homo sapiens
  misc_RNA (1)...(19): siRNA sense strand
cggaagaugaccugagcaa

SEQ ID NO: 2599797 - RNA, 19 nt, Homo sapiens
  misc_RNA (1)...(19): siRNA sense strand
guguaauauauguggcaaa

SEQ ID NO: 2599798 - RNA, 19 nt, Homo sapiens
  misc_RNA (1)...(19): siRNA sense strand
acuucaaacaacagagaaa

SEQ ID NO: 2599799 - RNA, 19 nt, Homo sapiens
  misc_RNA (1)...(19): siRNA sense strand
caucaacagcaaagacaaa

SEQ ID NO: 2599800 - RNA, 19 nt, Homo sapiens
  misc_RNA (1)...(19): siRNA sense strand
guauuaugcaagugguuaa

SEQ ID NO: 2599801 - RNA, 19 nt, Homo sapiens
  misc_RNA (1)...(19): siRNA sense strand
ggauagugguaugggaaau

SEQ ID NO: 2599802 - RNA, 19 nt, Homo sapiens
  misc_RNA (1)...(19): siRNA sense strand
acacaagggaauggagaaa

SEQ ID NO: 2599803 - RNA, 19 nt, Homo sapiens
  misc_RNA (1)...(19): siRNA sense strand
agggcaaugucaagcguaa

SEQ ID NO: 2599804 - RNA, 19 nt, Homo sapiens
  misc_RNA (1)...(19): siRNA sense strand
ugguaugggaaaugauaua

SEQ ID NO: 2599805 - RNA, 19 nt, Homo sapiens
  misc_RNA (1)...(19): siRNA sense strand
uggaagaacauuaccuaaa

SEQ ID NO: 2599806 - RNA, 19 nt, Homo sapiens
  misc_RNA (1)...(19): siRNA sense strand
cuuugaagcuagagaucuu

SEQ ID NO: 2599807 - RNA, 19 nt, Homo sapiens
  misc_RNA (1)...(19): siRNA sense strand
cauuaaacaguguagcaaa

SEQ ID NO: 2599808 - RNA, 19 nt, Homo sapiens
  misc_RNA (1)...(19): siRNA sense strand
acauauuucaggaggagaa

SEQ ID NO: 2599809 - RNA, 19 nt, Homo sapiens
  misc_RNA (1)...(19): siRNA sense strand
ugagcagaauggagaggua

SEQ ID NO: 2599810 - RNA, 19 nt, Homo sapiens
  misc_RNA (1)...(19): siRNA sense strand
ugaccaaaguauuaugcaa

SEQ ID NO: 2599811 - RNA, 19 nt, Homo sapiens
  misc_RNA (1)...(19): siRNA sense strand
gucagaagucuuagagauu

SEQ ID NO: 2599812 - RNA, 19 nt, Homo sapiens
  misc_RNA (1)...(19): siRNA sense strand
gcuaagagaguauaggaga

SEQ ID NO: 2599813 - RNA, 19 nt, Homo sapiens
  misc_RNA (1)...(19): siRNA sense strand
uagcaaaugccaggagaaa

SEQ ID NO: 2599814 - RNA, 19 nt, Homo sapiens
  misc_RNA (1)...(19): siRNA sense strand
cagcaagcacuucaagaaa

SEQ ID NO: 2599815 - RNA, 19 nt, Homo sapiens
  misc_RNA (1)...(19): siRNA sense strand
cagcaggcaugcaggaaca

SEQ ID NO: 2599816 - RNA, 19 nt, Homo sapiens
  misc_RNA (1)...(19): siRNA sense strand
ugucagaagucuuagagau

SEQ ID NO: 2599817 - RNA, 19 nt, Homo sapiens
  misc_RNA (1)...(19): siRNA sense strand
gagaauugccagaagcuga

SEQ ID NO: 2599818 - RNA, 19 nt, Homo sapiens
  misc_RNA (1)...(19): siRNA sense strand
uggaagaaagauugguauu

SEQ ID NO: 2599819 - RNA, 19 nt, Homo sapiens
  misc_RNA (1)...(19): siRNA sense strand
gagccuuauagguguaaua

SEQ ID NO: 2599820 - RNA, 19 nt, Homo sapiens
  misc_RNA (1)...(19): siRNA sense strand
agaaaguaaugaaucggaa

SEQ ID NO: 2599821 - RNA, 19 nt, Homo sapiens
  misc_RNA (1)...(19): siRNA sense strand
gaggauagugguaugggaa

SEQ ID NO: 2599822 - RNA, 19 nt, Homo sapiens
  misc_RNA (1)...(19): siRNA sense strand
gugcuauaguuggaagaaa

SEQ ID NO: 2599823 - RNA, 19 nt, Homo sapiens
  misc_RNA (1)...(19): siRNA sense strand
ccaaggaacucaaguggca

SEQ ID NO: 2599824 - RNA, 19 nt, Homo sapiens
  misc_RNA (1)...(19): siRNA sense strand
cagcaaggacagaagcuau

SEQ ID NO: 2599825 - RNA, 19 nt, Homo sapiens
  misc_RNA (1)...(19): siRNA sense strand
ugccagaagcugagcagaa

SEQ ID NO: 2599826 - RNA, 19 nt, Homo sapiens
  misc_RNA (1)...(19): siRNA sense strand
aggauagugguaugggaaa

SEQ ID NO: 2599827 - RNA, 19 nt, Homo sapiens
  misc_RNA (1)...(19): siRNA sense strand
cagaacacauacuggugaa

SEQ ID NO: 2599828 - RNA, 19 nt, Homo sapiens
  misc_RNA (1)...(19): siRNA sense strand
gguagugacaggagaaacu

SEQ ID NO: 2599829 - RNA, 19 nt, Homo sapiens
  misc_RNA (1)...(19): siRNA sense strand
uguauuagcacaacagcaa

SEQ ID NO: 2599830 - RNA, 19 nt, Homo sapiens
  misc_RNA (1)...(19): siRNA sense strand
guacugguggcgagguaua

SEQ ID NO: 2599831 - RNA, 19 nt, Homo sapiens
  misc_RNA (1)...(19): siRNA sense strand
gagaagaguacaaagcuca

SEQ ID NO: 2599832 - RNA, 19 nt, Homo sapiens
  misc_RNA (1)...(19): siRNA sense strand
uaaagagaacacagaagaa

SEQ ID NO: 2599833 - RNA, 19 nt, Homo sapiens
  misc_RNA (1)...(19): siRNA sense strand
cugaaacaugaaagagcua

SEQ ID NO: 2599834 - RNA, 19 nt, Homo sapiens
  misc_RNA (1)...(19): siRNA sense strand
aaguagagguagcacauau

SEQ ID NO: 2599835 - RNA, 19 nt, Homo sapiens
  misc_RNA (1)...(19): siRNA sense strand
gggacuagaccuugaaucu

SEQ ID NO: 2599836 - RNA, 19 nt, Homo sapiens
  misc_RNA (1)...(19): siRNA sense strand
aaucuggagaagaaaguaa

SEQ ID NO: 2599837 - RNA, 19 nt, Homo sapiens
  misc_RNA (1)...(19): siRNA sense strand
uugaaggagaagaguacaa

SEQ ID NO: 2599838 - RNA, 19 nt, Homo sapiens
  misc_RNA (1)...(19): siRNA sense strand
guacauaagcuaauggaag

SEQ ID NO: 2599839 - RNA, 19 nt, Homo sapiens
  misc_RNA (1)...(19): siRNA sense strand
caguauauaagaagggcga

SEQ ID NO: 2599840 - RNA, 19 nt, Homo sapiens
  misc_RNA (1)...(19): siRNA sense strand
gaaacaugaaagagcuaga

SEQ ID NO: 2599841 - RNA, 19 nt, Homo sapiens
  misc_RNA (1)...(19): siRNA sense strand
ggcagaaccaagcgggaau

SEQ ID NO: 2599842 - RNA, 19 nt, Homo sapiens
  misc_RNA (1)...(19): siRNA sense strand
cuucaagaacauaugagua

SEQ ID NO: 2599843 - RNA, 19 nt, Homo sapiens
  misc_RNA (1)...(19): siRNA sense strand
guagcaaaugccaggagaa

SEQ ID NO: 2599844 - RNA, 19 nt, Homo sapiens
  misc_RNA (1)...(19): siRNA sense strand
ugaaaguguacauaagcua

SEQ ID NO: 2599845 - RNA, 19 nt, Homo sapiens
  misc_RNA (1)...(19): siRNA sense strand
aggcauguaaagaaagcua

SEQ ID NO: 2599846 - RNA, 19 nt, Homo sapiens
  misc_RNA (1)...(19): siRNA sense strand
cuggaacgggugugugaaa

SEQ ID NO: 2599847 - RNA, 19 nt, Homo sapiens
  misc_RNA (1)...(19): siRNA sense strand
augaaggaguuaagccauu

SEQ ID NO: 2599848 - RNA, 19 nt, Homo sapiens
  misc_RNA (1)...(19): siRNA sense strand
aagcagugguccucaagaa

SEQ ID NO: 2599849 - RNA, 19 nt, Homo sapiens
  misc_RNA (1)...(19): siRNA sense strand
cuuagagauuugugaaagu

SEQ ID NO: 2599850 - RNA, 19 nt, Homo sapiens
  misc_RNA (1)...(19): siRNA sense strand
gcaucaacagcaaagacaa

SEQ ID NO: 2599851 - RNA, 19 nt, Homo sapiens
  misc_RNA (1)...(19): siRNA sense strand
caaacugaaacaugaaaga

SEQ ID NO: 2599852 - RNA, 19 nt, Homo sapiens
  misc_RNA (1)...(19): siRNA sense strand
acguacugguggcgaggua

SEQ ID NO: 2599853 - RNA, 19 nt, Homo sapiens
  misc_RNA (1)...(19): siRNA sense strand
uggagaagaaaguaaugaa

SEQ ID NO: 2599854 - RNA, 19 nt, Homo sapiens
  misc_RNA (1)...(19): siRNA sense strand
ggauugugaaauuguacua

SEQ ID NO: 2599855 - RNA, 19 nt, Homo sapiens
  misc_RNA (1)...(19): siRNA sense strand
gaacaaacaucuuggugug

SEQ ID NO: 2599856 - RNA, 19 nt, Homo sapiens
  misc_RNA (1)...(19): siRNA sense strand
ccguaaacauaugacuaaa

SEQ ID NO: 2599857 - RNA, 19 nt, Homo sapiens
  misc_RNA (1)...(19): siRNA sense strand
aggaugagaucgagcgcaa

SEQ ID NO: 2599858 - RNA, 19 nt, Homo sapiens
  misc_RNA (1)...(19): siRNA sense strand
cagaagggaaggugggcua

SEQ ID NO: 2599859 - RNA, 19 nt, Homo sapiens
  misc_RNA (1)...(19): siRNA sense strand
cggucaaggagcugggcaa

SEQ ID NO: 2599860 - RNA, 19 nt, Homo sapiens
  misc_RNA (1)...(19): siRNA sense strand
uggacaagugcaagaacaa

SEQ ID NO: 2599861 - RNA, 19 nt, Homo sapiens
  misc_RNA (1)...(19): siRNA sense strand
ucggagagaucgaggagga

SEQ ID NO: 2599862 - RNA, 19 nt, Homo sapiens
  misc_RNA (1)...(19): siRNA sense strand
cagagaagaagguggcuga

SEQ ID NO: 2599863 - RNA, 19 nt, Homo sapiens
  misc_RNA (1)...(19): siRNA sense strand
ccgccaagaucaugggugu

SEQ ID NO: 2599864 - RNA, 19 nt, Homo sapiens
  misc_RNA (1)...(19): siRNA sense strand
gcaagacgcugucgggcuu

SEQ ID NO: 2599865 - RNA, 19 nt, Homo sapiens
  misc_RNA (1)...(19): siRNA sense strand
gugcaagaacaaugagaac

SEQ ID NO: 2599866 - RNA, 19 nt, Homo sapiens
  misc_RNA (1)...(19): siRNA sense strand
ggaguauaucagcaagcaa

SEQ ID NO: 2599867 - RNA, 19 nt, Homo sapiens
  misc_RNA (1)...(19): siRNA sense strand
gcaaauucgacaaguggca

SEQ ID NO: 2599868 - RNA, 19 nt, Homo sapiens
  misc_RNA (1)...(19): siRNA sense strand
agauguuugcugagauuau

SEQ ID NO: 2599869 - RNA, 19 nt, Homo sapiens
  misc_RNA (1)...(19): siRNA sense strand
cagcagaagaggaggaagg

SEQ ID NO: 2599870 - RNA, 19 nt, Homo sapiens
  misc_RNA (1)...(19): siRNA sense strand
cuggacaagugcaagaaca

SEQ ID NO: 2599871 - RNA, 19 nt, Homo sapiens
  misc_RNA (1)...(19): siRNA sense strand
cgaucgaggaugugcagga

SEQ ID NO: 2599872 - RNA, 19 nt, Homo sapiens
  misc_RNA (1)...(19): siRNA sense strand
agguaaacgaggccaccaa

SEQ ID NO: 2599873 - RNA, 19 nt, Homo sapiens
  misc_RNA (1)...(19): siRNA sense strand
cuggauggacagcggaaga

SEQ ID NO: 2599874 - RNA, 19 nt, Homo sapiens
  misc_RNA (1)...(19): siRNA sense strand
agaucgaggaggacgccua

SEQ ID NO: 2599875 - RNA, 19 nt, Homo sapiens
  misc_RNA (1)...(19): siRNA sense strand
acgagagcacagaagggaa

SEQ ID NO: 2599876 - RNA, 19 nt, Homo sapiens
  misc_RNA (1)...(19): siRNA sense strand
ucgaggaugugcaggagga

SEQ ID NO: 2599877 - RNA, 19 nt, Homo sapiens
  misc_RNA (1)...(19): siRNA sense strand
aggcagcagaagaggagga

SEQ ID NO: 2599878 - RNA, 19 nt, Homo sapiens
  misc_RNA (1)...(19): siRNA sense strand
cgucguauauggcgggaag

SEQ ID NO: 2599879 - RNA, 19 nt, Homo sapiens
  misc_RNA (1)...(19): siRNA sense strand
cuaccaagaaagagaugua

SEQ ID NO: 2599880 - RNA, 19 nt, Homo sapiens
  misc_RNA (1)...(19): siRNA sense strand
ccaacaacacgauggguau

SEQ ID NO: 2599881 - RNA, 19 nt, Homo sapiens
  misc_RNA (1)...(19): siRNA sense strand
ucaagaaagagaagagcuu

SEQ ID NO: 2599882 - RNA, 19 nt, Homo sapiens
  misc_RNA (1)...(19): siRNA sense strand
aagaaagagaagagcuuau

SEQ ID NO: 2599883 - RNA, 19 nt, Homo sapiens
  misc_RNA (1)...(19): siRNA sense strand
uguacaacauccaggaaaa

SEQ ID NO: 2599884 - RNA, 19 nt, Homo sapiens
  misc_RNA (1)...(19): siRNA sense strand
gaaacaaacacgacggagu

SEQ ID NO: 2599885 - RNA, 19 nt, Homo sapiens
  misc_RNA (1)...(19): siRNA sense strand
uugagaaggacuuggagaa

SEQ ID NO: 2599886 - RNA, 19 nt, Homo sapiens
  misc_RNA (1)...(19): siRNA sense strand
cagaaaguauuuuggagaa

SEQ ID NO: 2599887 - RNA, 19 nt, Homo sapiens
  misc_RNA (1)...(19): siRNA sense strand
ucuauguauucgaugguua

SEQ ID NO: 2599888 - RNA, 19 nt, Homo sapiens
  misc_RNA (1)...(19): siRNA sense strand
gguuuaaggauuaccgaga

SEQ ID NO: 2599889 - RNA, 19 nt, Homo sapiens
  misc_RNA (1)...(19): siRNA sense strand
gagaaaaugcuaaaggaga

SEQ ID NO: 2599890 - RNA, 19 nt, Homo sapiens
  misc_RNA (1)...(19): siRNA sense strand
cccuggaggaggagaggaa

SEQ ID NO: 2599891 - RNA, 19 nt, Homo sapiens
  misc_RNA (1)...(19): siRNA sense strand
aagagauguacgagaucaa

SEQ ID NO: 2599892 - RNA, 19 nt, Homo sapiens
  misc_RNA (1)...(19): siRNA sense strand
acaacuaucuggaugccaa

SEQ ID NO: 2599893 - RNA, 19 nt, Homo sapiens
  misc_RNA (1)...(19): siRNA sense strand
cuguaagaaccaaagauau

SEQ ID NO: 2599894 - RNA, 19 nt, Homo sapiens
  misc_RNA (1)...(19): siRNA sense strand
aagaaagagauguacgaga

SEQ ID NO: 2599895 - RNA, 19 nt, Homo sapiens
  misc_RNA (1)...(19): siRNA sense strand
augaggaugaugaagauaa

SEQ ID NO: 2599896 - RNA, 19 nt, Homo sapiens
  misc_RNA (1)...(19): siRNA sense strand
aggagcagcgggaggaauu

SEQ ID NO: 2599897 - RNA, 19 nt, Homo sapiens
  misc_RNA (1)...(19): siRNA sense strand
ccaagaaagagauguacga

SEQ ID NO: 2599898 - RNA, 19 nt, Homo sapiens
  misc_RNA (1)...(19): siRNA sense strand
agagcuuauuaguggauuu

SEQ ID NO: 2599899 - RNA, 19 nt, Homo sapiens
  misc_RNA (1)...(19): siRNA sense strand
ccaaaguucgagagaaaau

SEQ ID NO: 2599900 - RNA, 19 nt, Homo sapiens
  misc_RNA (1)...(19): siRNA sense strand
cggaguacauggaaaugau

SEQ ID NO: 2599901 - RNA, 19 nt, Homo sapiens
  misc_RNA (1)...(19): siRNA sense strand
ucaucaaccucguggucau

SEQ ID NO: 2599902 - RNA, 19 nt, Homo sapiens
  misc_RNA (1)...(19): siRNA sense strand
gggaagcaguugauccaga

SEQ ID NO: 2599903 - RNA, 19 nt, Homo sapiens
  misc_RNA (1)...(19): siRNA sense strand
gaucaaagcaggaggcagc

SEQ ID NO: 2599904 - RNA, 19 nt, Homo sapiens
  misc_RNA (1)...(19): siRNA sense strand
gccaacaacacgaugggua

SEQ ID NO: 2599905 - RNA, 19 nt, Homo sapiens
  misc_RNA (1)...(19): siRNA sense strand
guuccuaccaagaaagaga

SEQ ID NO: 2599906 - RNA, 19 nt, Homo sapiens
  misc_RNA (1)...(19): siRNA sense strand
uguaagaaccaaagauauc

SEQ ID NO: 2599907 - RNA, 19 nt, Homo sapiens
  misc_RNA (1)...(19): siRNA sense strand
acgauaugaaugacaggaa

SEQ ID NO: 2599908 - RNA, 19 nt, Homo sapiens
  misc_RNA (1)...(19): siRNA sense strand
ugugacaaguccugugauu

SEQ ID NO: 2599909 - RNA, 19 nt, Homo sapiens
  misc_RNA (1)...(19): siRNA sense strand
agcaguugauccagaacaa

SEQ ID NO: 2599910 - RNA, 19 nt, Homo sapiens
  misc_RNA (1)...(19): siRNA sense strand
cuguacaacauccaggaaa

SEQ ID NO: 2599911 - RNA, 19 nt, Homo sapiens
  misc_RNA (1)...(19): siRNA sense strand
gcuuauuaguggauuucuu

SEQ ID NO: 2599912 - RNA, 19 nt, Homo sapiens
  misc_RNA (1)...(19): siRNA sense strand
uggcauagaagaggaagaa

SEQ ID NO: 2599913 - RNA, 19 nt, Homo sapiens
  misc_RNA (1)...(19): siRNA sense strand
aggcuggacuggagcuuga

SEQ ID NO: 2599914 - RNA, 19 nt, Homo sapiens
  misc_RNA (1)...(19): siRNA sense strand
ccagagaggcagaauucuu

SEQ ID NO: 2599915 - RNA, 19 nt, Homo sapiens
  misc_RNA (1)...(19): siRNA sense strand
cuggcauagaagaggaaga

SEQ ID NO: 2599916 - RNA, 19 nt, Homo sapiens
  misc_RNA (1)...(19): siRNA sense strand
gcaucaucauguuggggaa

SEQ ID NO: 2599917 - RNA, 19 nt, Homo sapiens
  misc_RNA (1)...(19): siRNA sense strand
agaucaaaguuccuaccaa

SEQ ID NO: 2599918 - RNA, 19 nt, Homo sapiens
  misc_RNA (1)...(19): siRNA sense strand
gcaaagaaguucagcgcgg

SEQ ID NO: 2599919 - RNA, 19 nt, Homo sapiens
  misc_RNA (1)...(19): siRNA sense strand
cagaaauuggaaacaaaca

SEQ ID NO: 2599920 - RNA, 19 nt, Homo sapiens
  misc_RNA (1)...(19): siRNA sense strand
guaugaaaccaaaguucga

SEQ ID NO: 2599921 - RNA, 19 nt, Homo sapiens
  misc_RNA (1)...(19): siRNA sense strand
ggaguguggcgaugaggau

SEQ ID NO: 2599922 - RNA, 19 nt, Homo sapiens
  misc_RNA (1)...(19): siRNA sense strand
cgaaaacagaacagacuuu

SEQ ID NO: 2599923 - RNA, 19 nt, Homo sapiens
  misc_RNA (1)...(19): siRNA sense strand
ugagaaggacuuggagaau

SEQ ID NO: 2599924 - RNA, 19 nt, Homo sapiens
  misc_RNA (1)...(19): siRNA sense strand
caaaauugagguuccgaaa

SEQ ID NO: 2599925 - RNA, 19 nt, Homo sapiens
  misc_RNA (1)...(19): siRNA sense strand
caacagagauccuggccag

SEQ ID NO: 2599926 - RNA, 19 nt, Homo sapiens
  misc_RNA (1)...(19): siRNA sense strand
ggccugaguaugaaaccaa

SEQ ID NO: 2599927 - RNA, 19 nt, Homo sapiens
  misc_RNA (1)...(19): siRNA sense strand
aaacugaccuggaaggauc

SEQ ID NO: 2599928 - RNA, 19 nt, Homo sapiens
  misc_RNA (1)...(19): siRNA sense strand
acuacagcuuggaaccaua

SEQ ID NO: 2599929 - RNA, 19 nt, Homo sapiens
  misc_RNA (1)...(19): siRNA sense strand
gaucaaaguuccuaccaag

SEQ ID NO: 2599930 - RNA, 19 nt, Homo sapiens
  misc_RNA (1)...(19): siRNA sense strand
ugcaacaauugaagaagau

SEQ ID NO: 2599931 - RNA, 19 nt, Homo sapiens
  misc_RNA (1)...(19): siRNA sense strand
cggaaucugguuugacauu

SEQ ID NO: 2599932 - RNA, 19 nt, Homo sapiens
  misc_RNA (1)...(19): siRNA sense strand
cagaacacagcaacaacaa

SEQ ID NO: 2599933 - RNA, 19 nt, Homo sapiens
  misc_RNA (1)...(19): siRNA sense strand
gugacaaguccugugauua

SEQ ID NO: 2599934 - RNA, 19 nt, Homo sapiens
  misc_RNA (1)...(19): siRNA sense strand
gaagauaaacugaccugga

SEQ ID NO: 2599935 - RNA, 19 nt, Homo sapiens
  misc_RNA (1)...(19): siRNA sense strand
ucccgaagcuaaagaaacu

SEQ ID NO: 2599936 - RNA, 19 nt, Homo sapiens
  misc_RNA (1)...(19): siRNA sense strand
aguuugaccaggagguuca

SEQ ID NO: 2599937 - RNA, 19 nt, Homo sapiens
  misc_RNA (1)...(19): siRNA sense strand
acagcaacaacaagaugaa

SEQ ID NO: 2599938 - RNA, 19 nt, Homo sapiens
  misc_RNA (1)...(19): siRNA sense strand
gcaacaauugaagaagaua

SEQ ID NO: 2599939 - RNA, 19 nt, Homo sapiens
  misc_RNA (1)...(19): siRNA sense strand
gcagaaagcagaugacgga

SEQ ID NO: 2599940 - RNA, 19 nt, Homo sapiens
  misc_RNA (1)...(19): siRNA sense strand
gcagguaaugagagugcau

SEQ ID NO: 2599941 - RNA, 19 nt, Homo sapiens
  misc_RNA (1)...(19): siRNA sense strand
cgagacagggaguagaaca

SEQ ID NO: 2599942 - RNA, 19 nt, Homo sapiens
  misc_RNA (1)...(19): siRNA sense strand
gaguagaacacgaggccuc

SEQ ID NO: 2599943 - RNA, 19 nt, Homo sapiens
  misc_RNA (1)...(19): siRNA sense strand
gcugcaacgccaagcucaa

SEQ ID NO: 2599944 - RNA, 19 nt, Homo sapiens
  misc_RNA (1)...(19): siRNA sense strand
uaauaaaggcuguguggcu

SEQ ID NO: 2599945 - RNA, 19 nt, Homo sapiens
  misc_RNA (1)...(19): siRNA sense strand
ggauggaguaacaggccca

SEQ ID NO: 2599946 - RNA, 19 nt, Homo sapiens
  misc_RNA (1)...(19): siRNA sense strand
aguaacaggcccaggguuc

SEQ ID NO: 2599947 - RNA, 19 nt, Homo sapiens
  misc_RNA (1)...(19): siRNA sense strand
gccugaagcacgaggacaa

SEQ ID NO: 2599948 - RNA, 19 nt, Homo sapiens
  misc_RNA (1)...(19): siRNA sense strand
uggaagaagaccugaucaa

SEQ ID NO: 2599949 - RNA, 19 nt, Homo sapiens
  misc_RNA (1)...(19): siRNA sense strand
ggacaaacguggagguagc

SEQ ID NO: 2599950 - RNA, 19 nt, Homo sapiens
  misc_RNA (1)...(19): siRNA sense strand
uggaaugggccgaggagau

SEQ ID NO: 2599951 - RNA, 19 nt, Homo sapiens
  misc_RNA (1)...(19): siRNA sense strand
gaaagaaggaauaagacga

SEQ ID NO: 2599952 - RNA, 19 nt, Homo sapiens
  misc_RNA (1)...(19): siRNA sense strand
augaaguugaagagguaaa

SEQ ID NO: 2599953 - RNA, 19 nt, Homo sapiens
  misc_RNA (1)...(19): siRNA sense strand
gggcaguggaagaagggau

SEQ ID NO: 2599954 - RNA, 19 nt, Homo sapiens
  misc_RNA (1)...(19): siRNA sense strand
aggaauaagacgaguugga

SEQ ID NO: 2599955 - RNA, 19 nt, Homo sapiens
  misc_RNA (1)...(19): siRNA sense strand
uuggaugaguggaaggcua

SEQ ID NO: 2599956 - RNA, 19 nt, Homo sapiens
  misc_RNA (1)...(19): siRNA sense strand
cgugaauuugauaggcaua

SEQ ID NO: 2599957 - RNA, 19 nt, Homo sapiens
  misc_RNA (1)...(19): siRNA sense strand
cugaaaauaaggagaauga

SEQ ID NO: 2599958 - RNA, 19 nt, Homo sapiens
  misc_RNA (1)...(19): siRNA sense strand
caaaauaaggaccgggcaa

SEQ ID NO: 2599959 - RNA, 19 nt, Homo sapiens
  misc_RNA (1)...(19): siRNA sense strand
uuugauaggcauaguggaa

SEQ ID NO: 2599960 - RNA, 19 nt, Homo sapiens
  misc_RNA (1)...(19): siRNA sense strand
gggaacugucaaagacgaa

SEQ ID NO: 2599961 - RNA, 19 nt, Homo sapiens
  misc_RNA (1)...(19): siRNA sense strand
cgcuuaagaaagaaggaau

SEQ ID NO: 2599962 - RNA, 19 nt, Homo sapiens
  misc_RNA (1)...(19): siRNA sense strand
acaagaaagaggagacgca

SEQ ID NO: 2599963 - RNA, 19 nt, Homo sapiens
  misc_RNA (1)...(19): siRNA sense strand
gugaagaggcucaugcuga

SEQ ID NO: 2599964 - RNA, 19 nt, Homo sapiens
  misc_RNA (1)...(19): siRNA sense strand
caggcaaacagcugcgcaa

SEQ ID NO: 2599965 - RNA, 19 nt, Homo sapiens
  misc_RNA (1)...(19): siRNA sense strand
agaaugaaguugaagaggu

SEQ ID NO: 2599966 - RNA, 19 nt, Homo sapiens
  misc_RNA (1)...(19): siRNA sense strand
aggagaaugaaguugaaga

SEQ ID NO: 2599967 - RNA, 19 nt, Homo sapiens
  misc_RNA (1)...(19): siRNA sense strand
caaagagugaagaggcuca

SEQ ID NO: 2599968 - RNA, 19 nt, Homo sapiens
  misc_RNA (1)...(19): siRNA sense strand
aucaacaacuucaggguga

SEQ ID NO: 2599969 - RNA, 19 nt, Homo sapiens
  misc_RNA (1)...(19): siRNA sense strand
gaucaauuuuggagaccuu

SEQ ID NO: 2599970 - RNA, 19 nt, Homo sapiens
  misc_RNA (1)...(19): siRNA sense strand
gcgugguugacaagaaaga

SEQ ID NO: 2599971 - RNA, 19 nt, Homo sapiens
  misc_RNA (1)...(19): siRNA sense strand
agaaggaauaagacgaguu

SEQ ID NO: 2599972 - RNA, 19 nt, Homo sapiens
  misc_RNA (1)...(19): siRNA sense strand
gaauaagacgaguuggaag

SEQ ID NO: 2599973 - RNA, 19 nt, Homo sapiens
  misc_RNA (1)...(19): siRNA sense strand
acacugaaaauaaggagaa

SEQ ID NO: 2599974 - RNA, 19 nt, Homo sapiens
  misc_RNA (1)...(19): siRNA sense strand
uggaugaguggaaggcuau

SEQ ID NO: 2599975 - RNA, 19 nt, Homo sapiens
  misc_RNA (1)...(19): siRNA sense strand
ucgaaaagccacuugaaga

SEQ ID NO: 2599976 - RNA, 19 nt, Homo sapiens
  misc_RNA (1)...(19): siRNA sense strand
gcagcagagaacaagaaaa

SEQ ID NO: 2599977 - RNA, 19 nt, Homo sapiens
  misc_RNA (1)...(19): siRNA sense strand
cauaaaucaaagagugaag

SEQ ID NO: 2599978 - RNA, 19 nt, Homo sapiens
  misc_RNA (1)...(19): siRNA sense strand
ccuauaacauguucggaca

SEQ ID NO: 2599979 - RNA, 19 nt, Homo sapiens
  misc_RNA (1)...(19): siRNA sense strand
gcaccuaucagcuggccaa

SEQ ID NO: 2599980 - RNA, 19 nt, Homo sapiens
  misc_RNA (1)...(19): siRNA sense strand
guagaagggcagccggaga

SEQ ID NO: 2599981 - RNA, 19 nt, Homo sapiens
  misc_RNA (1)...(19): siRNA sense strand
guaauagcuuucaugguga

SEQ ID NO: 2599982 - RNA, 19 nt, Homo sapiens
  misc_RNA (1)...(19): siRNA sense strand
aggaaggaaguaggaguaa

SEQ ID NO: 2599983 - RNA, 19 nt, Homo sapiens
  misc_RNA (1)...(19): siRNA sense strand
gcauugugguggaccgagu

SEQ ID NO: 2599984 - RNA, 19 nt, Homo sapiens
  misc_RNA (1)...(19): siRNA sense strand
caacaguacaggacauaaa

SEQ ID NO: 2599985 - RNA, 19 nt, Homo sapiens
  misc_RNA (1)...(19): siRNA sense strand
ggguaugggugucuauaaa

SEQ ID NO: 2599986 - RNA, 19 nt, Homo sapiens
  misc_RNA (1)...(19): siRNA sense strand
cagcaacaguacaggacau

SEQ ID NO: 2599987 - RNA, 19 nt, Homo sapiens
  misc_RNA (1)...(19): siRNA sense strand
ggucauaucaccuuucaaa

SEQ ID NO: 2599988 - RNA, 19 nt, Homo sapiens
  misc_RNA (1)...(19): siRNA sense strand
ccuucaagugcgugaguga

SEQ ID NO: 2599989 - RNA, 19 nt, Homo sapiens
  misc_RNA (1)...(19): siRNA sense strand
ggauacagcugauuguuca

SEQ ID NO: 2599990 - RNA, 19 nt, Homo sapiens
  misc_RNA (1)...(19): siRNA sense strand
aagaugaccacuuuggaaa

SEQ ID NO: 2599991 - RNA, 19 nt, Homo sapiens
  misc_RNA (1)...(19): siRNA sense strand
ucaccaaacuuuagcagca

SEQ ID NO: 2599992 - RNA, 19 nt, Homo sapiens
  misc_RNA (1)...(19): siRNA sense strand
cagucaaaugagagcaaaa

SEQ ID NO: 2599993 - RNA, 19 nt, Homo sapiens
  misc_RNA (1)...(19): siRNA sense strand
caagauucauggaugguca

SEQ ID NO: 2599994 - RNA, 19 nt, Homo sapiens
  misc_RNA (1)...(19): siRNA sense strand
ggagauacuucaacaucga

SEQ ID NO: 2599995 - RNA, 19 nt, Homo sapiens
  misc_RNA (1)...(19): siRNA sense strand
gguucuaaacggaagcaga

SEQ ID NO: 2599996 - RNA, 19 nt, Homo sapiens
  misc_RNA (1)...(19): siRNA sense strand
uccagaaaccagagauuau

SEQ ID NO: 2599997 - RNA, 19 nt, Homo sapiens
  misc_RNA (1)...(19): siRNA sense strand
uaccaaggaugaagaauca

SEQ ID NO: 2599998 - RNA, 19 nt, Homo sapiens
  misc_RNA (1)...(19): siRNA sense strand
caaacagcggccacaguaa

SEQ ID NO: 2599999 - RNA, 19 nt, Homo sapiens
  misc_RNA (1)...(19): siRNA sense strand
ucacauuuaccaaggauga

SEQ ID NO: 2600000 - RNA, 19 nt, Homo sapiens
  misc_RNA (1)...(19): siRNA sense strand
cagugaagugggagccuau

SEQ ID NO: 2600001 - RNA, 19 nt, Homo sapiens
  misc_RNA (1)...(19): siRNA sense strand
ggcagucaaaugagagcaa

SEQ ID NO: 2600002 - RNA, 19 nt, Homo sapiens
  misc_RNA (1)...(19): siRNA sense strand
ccagcaaccagcuaagcaa

SEQ ID NO: 2600003 - RNA, 19 nt, Homo sapiens
  misc_RNA (1)...(19): siRNA sense strand
gaagaugaccacuuuggaa

SEQ ID NO: 2600004 - RNA, 19 nt, Homo sapiens
  misc_RNA (1)...(19): siRNA sense strand
caagacaaggagucgguuu

SEQ ID NO: 2600005 - RNA, 19 nt, Homo sapiens
  misc_RNA (1)...(19): siRNA sense strand
ccagacagcagucgggcau

SEQ ID NO: 2600006 - RNA, 19 nt, Homo sapiens
  misc_RNA (1)...(19): siRNA sense strand
ccgccuaaggugucaauca

SEQ ID NO: 2600007 - RNA, 19 nt, Homo sapiens
  misc_RNA (1)...(19): siRNA sense strand
gaaaacaaccgauguccaa

SEQ ID NO: 2600008 - RNA, 19 nt, Homo sapiens
  misc_RNA (1)...(19): siRNA sense strand
uguccaacuucaagccuuu

SEQ ID NO: 2600009 - RNA, 19 nt, Homo sapiens
  misc_RNA (1)...(19): siRNA sense strand
aaacuuuagcagcaagauu

SEQ ID NO: 2600010 - RNA, 19 nt, Homo sapiens
  misc_RNA (1)...(19): siRNA sense strand
cagcacagccagugggcaa

SEQ ID NO: 2600011 - RNA, 19 nt, Homo sapiens
  misc_RNA (1)...(19): siRNA sense strand
aggagauggaggacgauua

SEQ ID NO: 2600012 - RNA, 19 nt, Homo sapiens
  misc_RNA (1)...(19): siRNA sense strand
ggagagaaguccuacgagu

SEQ ID NO: 2600013 - RNA, 19 nt, Homo sapiens
  misc_RNA (1)...(19): siRNA sense strand
gcaccgagagugagcccaa

SEQ ID NO: 2600014 - RNA, 19 nt, Homo sapiens
  misc_RNA (1)...(19): siRNA sense strand
cgcagcagauggagcgcua

SEQ ID NO: 2600015 - RNA, 19 nt, Homo sapiens
  misc_RNA (1)...(19): siRNA sense strand
cugcuuggcuacagcgaca

SEQ ID NO: 2600016 - RNA, 19 nt, Homo sapiens
  misc_RNA (1)...(19): siRNA sense strand
acaaacugcugcuuggcua

SEQ ID NO: 2600017 - RNA, 19 nt, Homo sapiens
  misc_RNA (1)...(19): siRNA sense strand
gagugagcccaaaggugaa

SEQ ID NO: 2600018 - RNA, 19 nt, Homo sapiens
  misc_RNA (1)...(19): siRNA sense strand
agcaggagauggaggacga

SEQ ID NO: 2600019 - RNA, 19 nt, Homo sapiens
  misc_RNA (1)...(19): siRNA sense strand
agagugagcccaaagguga

SEQ ID NO: 2600020 - RNA, 19 nt, Homo sapiens
  misc_RNA (1)...(19): siRNA sense strand
ugucacagaacgugggcga

SEQ ID NO: 2600021 - RNA, 19 nt, Homo sapiens
  misc_RNA (1)...(19): siRNA sense strand
caguguaguaucugcaaca

SEQ ID NO: 2600022 - RNA, 19 nt, Homo sapiens
  misc_RNA (1)...(19): siRNA sense strand
uggaggacgauuacgacua

SEQ ID NO: 2600023 - RNA, 19 nt, Homo sapiens
  misc_RNA (1)...(19): siRNA sense strand
gcccaaaggugaaagcuuc

SEQ ID NO: 2600024 - RNA, 19 nt, Homo sapiens
  misc_RNA (1)...(19): siRNA sense strand
cuacaacagccuucgguca

SEQ ID NO: 2600025 - RNA, 19 nt, Homo sapiens
  misc_RNA (1)...(19): siRNA sense strand
ccgaggagugcacggaaga

SEQ ID NO: 2600026 - RNA, 19 nt, Homo sapiens
  misc_RNA (1)...(19): siRNA sense strand
gcaacgaauccgaggagug

SEQ ID NO: 2600027 - RNA, 19 nt, Homo sapiens
  misc_RNA (1)...(19): siRNA sense strand
ggaccuacgccuugggcaa

SEQ ID NO: 2600028 - RNA, 19 nt, Homo sapiens
  misc_RNA (1)...(19): siRNA sense strand
uggccaagacacaggagaa

SEQ ID NO: 2600029 - RNA, 19 nt, Homo sapiens
  misc_RNA (1)...(19): siRNA sense strand
uguuacaggagguggccaa

SEQ ID NO: 2600030 - RNA, 19 nt, Homo sapiens
  misc_RNA (1)...(19): siRNA sense strand
ucaaauuagcugugaccca

SEQ ID NO: 2600031 - RNA, 19 nt, Homo sapiens
  misc_RNA (1)...(19): siRNA sense strand
ggaaguggugcaagcccua

SEQ ID NO: 2600032 - RNA, 19 nt, Homo sapiens
  misc_RNA (1)...(19): siRNA sense strand
ggccaagacacaggagaau

SEQ ID NO: 2600033 - RNA, 19 nt, Homo sapiens
  misc_RNA (1)...(19): siRNA sense strand
ccacuagccucaaagggca

SEQ ID NO: 2600034 - RNA, 19 nt, Homo sapiens
  misc_RNA (1)...(19): siRNA sense strand
uggucaacuucuuggagga

SEQ ID NO: 2600035 - RNA, 19 nt, Homo sapiens
  misc_RNA (1)...(19): siRNA sense strand
ggagcagauccgauggaga

SEQ ID NO: 2600036 - RNA, 19 nt, Homo sapiens
  misc_RNA (1)...(19): siRNA sense strand
gcagcuaccuucugaggga

SEQ ID NO: 2600037 - RNA, 19 nt, Homo sapiens
  misc_RNA (1)...(19): siRNA sense strand
acagcaaugcagacaggaa

SEQ ID NO: 2600038 - RNA, 19 nt, Homo sapiens
  misc_RNA (1)...(19): siRNA sense strand
agauauuacgcuggaaauu

SEQ ID NO: 2600039 - RNA, 19 nt, Homo sapiens
  misc_RNA (1)...(19): siRNA sense strand
agaccggaguagaagcuga

SEQ ID NO: 2600040 - RNA, 19 nt, Homo sapiens
  misc_RNA (1)...(19): siRNA sense strand
aggaaugaacugaaauacu

SEQ ID NO: 2600041 - RNA, 19 nt, Homo sapiens
  misc_RNA (1)...(19): siRNA sense strand
aagauauuacgcuggaaau

SEQ ID NO: 2600042 - RNA, 19 nt, Homo sapiens
  misc_RNA (1)...(19): siRNA sense strand
ugucagaugaugauagaaa

SEQ ID NO: 2600043 - RNA, 19 nt, Homo sapiens
  misc_RNA (1)...(19): siRNA sense strand
aggcaauaugggauggaua

SEQ ID NO: 2600044 - RNA, 19 nt, Homo sapiens
  misc_RNA (1)...(19): siRNA sense strand
gguaguacuuuguugggaa

SEQ ID NO: 2600045 - RNA, 19 nt, Homo sapiens
  misc_RNA (1)...(19): siRNA sense strand
aggaagaagacauguauau

SEQ ID NO: 2600046 - RNA, 19 nt, Homo sapiens
  misc_RNA (1)...(19): siRNA sense strand
cacaagagucagacagcaa

SEQ ID NO: 2600047 - RNA, 19 nt, Homo sapiens
  misc_RNA (1)...(19): siRNA sense strand
gggaggaagaagacaugua

SEQ ID NO: 2600048 - RNA, 19 nt, Homo sapiens
  misc_RNA (1)...(19): siRNA sense strand
gaguauugccaguggagga

SEQ ID NO: 2600049 - RNA, 19 nt, Homo sapiens
  misc_RNA (1)...(19): siRNA sense strand
uuucagugccagaggagaa

SEQ ID NO: 2600050 - RNA, 19 nt, Homo sapiens
  misc_RNA (1)...(19): siRNA sense strand
ucugaauguugcaggaaaa

SEQ ID NO: 2600051 - RNA, 19 nt, Homo sapiens
  misc_RNA (1)...(19): siRNA sense strand
ggaauagaaaucuuggcaa

SEQ ID NO: 2600052 - RNA, 19 nt, Homo sapiens
  misc_RNA (1)...(19): siRNA sense strand
aggagaaggcagcagaauu

SEQ ID NO: 2600053 - RNA, 19 nt, Homo sapiens
  misc_RNA (1)...(19): siRNA sense strand
uaaacaaaccagaugucaa

SEQ ID NO: 2600054 - RNA, 19 nt, Homo sapiens
  misc_RNA (1)...(19): siRNA sense strand
gcagugacagagugggcaa

SEQ ID NO: 2600055 - RNA, 19 nt, Homo sapiens
  misc_RNA (1)...(19): siRNA sense strand
ccauaaaacagcagaucau

SEQ ID NO: 2600056 - RNA, 19 nt, Homo sapiens
  misc_RNA (1)...(19): siRNA sense strand
ggcucaagugauagaggaa

SEQ ID NO: 2600057 - RNA, 19 nt, Homo sapiens
  misc_RNA (1)...(19): siRNA sense strand
auucagacuuggauaaaca

SEQ ID NO: 2600058 - RNA, 19 nt, Homo sapiens
  misc_RNA (1)...(19): siRNA sense strand
aagugauagaggaaugaaa

SEQ ID NO: 2600059 - RNA, 19 nt, Homo sapiens
  misc_RNA (1)...(19): siRNA sense strand
aagaagaauacgacacaga

SEQ ID NO: 2600060 - RNA, 19 nt, Homo sapiens
  misc_RNA (1)...(19): siRNA sense strand
cuucaaugucagaugauga

SEQ ID NO: 2600061 - RNA, 19 nt, Homo sapiens
  misc_RNA (1)...(19): siRNA sense strand
gcagggaggaagaagacau

SEQ ID NO: 2600062 - RNA, 19 nt, Homo sapiens
  misc_RNA (1)...(19): siRNA sense strand
cagucugaauauagaagau

SEQ ID NO: 2600063 - RNA, 19 nt, Homo sapiens
  misc_RNA (1)...(19): siRNA sense strand
gcucaguauuauugcagca

SEQ ID NO: 2600064 - RNA, 19 nt, Homo sapiens
  misc_RNA (1)...(19): siRNA sense strand
gaguuugcacagucaguaa

SEQ ID NO: 2600065 - RNA, 19 nt, Homo sapiens
  misc_RNA (1)...(19): siRNA sense strand
ugaacaugguccuggcaca

SEQ ID NO: 2600066 - RNA, 19 nt, Homo sapiens
  misc_RNA (1)...(19): siRNA sense strand
gggaauuaaggaugaugau

SEQ ID NO: 2600067 - RNA, 19 nt, Homo sapiens
  misc_RNA (1)...(19): siRNA sense strand
cucugaauguugcaggaaa

SEQ ID NO: 2600068 - RNA, 19 nt, Homo sapiens
  misc_RNA (1)...(19): siRNA sense strand
gggaugaagaagaauacga

SEQ ID NO: 2600069 - RNA, 19 nt, Homo sapiens
  misc_RNA (1)...(19): siRNA sense strand
aucuugaaacguugagaaa

SEQ ID NO: 2600070 - RNA, 19 nt, Homo sapiens
  misc_RNA (1)...(19): siRNA sense strand
agugauagaggaaugaaau

SEQ ID NO: 2600071 - RNA, 19 nt, Homo sapiens
  misc_RNA (1)...(19): siRNA sense strand
cuucaggaauagaaaucuu

SEQ ID NO: 2600072 - RNA, 19 nt, Homo sapiens
  misc_RNA (1)...(19): siRNA sense strand
agagauccuucaagcgaau

SEQ ID NO: 2600073 - RNA, 19 nt, Homo sapiens
  misc_RNA (1)...(19): siRNA sense strand
acagcaaagaagaaguuau

SEQ ID NO: 2600074 - RNA, 19 nt, Homo sapiens
  misc_RNA (1)...(19): siRNA sense strand
ccuucaagcgaaucagcua

SEQ ID NO: 2600075 - RNA, 19 nt, Homo sapiens
  misc_RNA (1)...(19): siRNA sense strand
gcagaauuacuuuuggaua

SEQ ID NO: 2600076 - RNA, 19 nt, Homo sapiens
  misc_RNA (1)...(19): siRNA sense strand
aguacuuuguugggaauua

SEQ ID NO: 2600077 - RNA, 19 nt, Homo sapiens
  misc_RNA (1)...(19): siRNA sense strand
auguacuguuuaagggaga

SEQ ID NO: 2600078 - RNA, 19 nt, Homo sapiens
  misc_RNA (1)...(19): siRNA sense strand
gggagauuguuucacggaa

SEQ ID NO: 2600079 - RNA, 19 nt, Homo sapiens
  misc_RNA (1)...(19): siRNA sense strand
agcaggagguugugaucuu

SEQ ID NO: 2600080 - RNA, 19 nt, Homo sapiens
  misc_RNA (1)...(19): siRNA sense strand
uguugggaauuaaggauga

SEQ ID NO: 2600081 - RNA, 19 nt, Homo sapiens
  misc_RNA (1)...(19): siRNA sense strand
cagagauccuucaagcgaa

SEQ ID NO: 2600082 - RNA, 19 nt, Homo sapiens
  misc_RNA (1)...(19): siRNA sense strand
ccguuaaugucagggaaaa

SEQ ID NO: 2600083 - RNA, 19 nt, Homo sapiens
  misc_RNA (1)...(19): siRNA sense strand
aaacauucagacuuggaua

SEQ ID NO: 2600084 - RNA, 19 nt, Homo sapiens
  misc_RNA (1)...(19): siRNA sense strand
acucauuaccuucaaguau

SEQ ID NO: 2600085 - RNA, 19 nt, Homo sapiens
  misc_RNA (1)...(19): siRNA sense strand
agucagacagcaaagaaga

SEQ ID NO: 2600086 - RNA, 19 nt, Homo sapiens
  misc_RNA (1)...(19): siRNA sense strand
acagagugggcaagccuua

SEQ ID NO: 2600087 - RNA, 19 nt, Homo sapiens
  misc_RNA (1)...(19): siRNA sense strand
cagcauuggggaugaagaa

SEQ ID NO: 2600088 - RNA, 19 nt, Homo sapiens
  misc_RNA (1)...(19): siRNA sense strand
agaauacgacacagaugaa

SEQ ID NO: 2600089 - RNA, 19 nt, Homo sapiens
  misc_RNA (1)...(19): siRNA sense strand
caacuaaagccauaaaaca

SEQ ID NO: 2600090 - RNA, 19 nt, Homo sapiens
  misc_RNA (1)...(19): siRNA sense strand
aauuaaggaugaugaugca

SEQ ID NO: 2600091 - RNA, 19 nt, Homo sapiens
  misc_RNA (1)...(19): siRNA sense strand
uggauauggccauuggauu

SEQ ID NO: 2600092 - RNA, 19 nt, Homo sapiens
  misc_RNA (1)...(19): siRNA sense strand
auaaaaugacuguggcuuu

SEQ ID NO: 2600093 - RNA, 19 nt, Homo sapiens
  misc_RNA (1)...(19): siRNA sense strand
caugugagcagcagugaca

SEQ ID NO: 2600094 - RNA, 19 nt, Homo sapiens
  misc_RNA (1)...(19): siRNA sense strand
cgcugaauucuguaguuaa

SEQ ID NO: 2600095 - RNA, 19 nt, Homo sapiens
  misc_RNA (1)...(19): siRNA sense strand
ccucaguaugucaaggaua

SEQ ID NO: 2600096 - RNA, 19 nt, Homo sapiens
  misc_RNA (1)...(19): siRNA sense strand
guuaacaccuagcagggaa

SEQ ID NO: 2600097 - RNA, 19 nt, Homo sapiens
  misc_RNA (1)...(19): siRNA sense strand
ccaagaacucaaagaggca

SEQ ID NO: 2600098 - RNA, 19 nt, Homo sapiens
  misc_RNA (1)...(19): siRNA sense strand
caucagagcugcaugguac

SEQ ID NO: 2600099 - RNA, 19 nt, Homo sapiens
  misc_RNA (1)...(19): siRNA sense strand
gaucaauaccauaugacca

SEQ ID NO: 2600100 - RNA, 19 nt, Homo sapiens
  misc_RNA (1)...(19): siRNA sense strand
cccauuaacucgaugcuga

SEQ ID NO: 2600101 - RNA, 19 nt, Homo sapiens
  misc_RNA (1)...(19): siRNA sense strand
ucuaaugagauuggagcua

SEQ ID NO: 2600102 - RNA, 19 nt, Homo sapiens
  misc_RNA (1)...(19): siRNA sense strand
acgaagaaucaauggcugu

SEQ ID NO: 2600103 - RNA, 19 nt, Homo sapiens
  misc_RNA (1)...(19): siRNA sense strand
gcgugggagaacuggccaa

SEQ ID NO: 2600104 - RNA, 19 nt, Homo sapiens
  misc_RNA (1)...(19): siRNA sense strand
ugacaauuggugugaccuu

SEQ ID NO: 2600105 - RNA, 19 nt, Homo sapiens
  misc_RNA (1)...(19): siRNA sense strand
gguucuaccgcgacagcua

SEQ ID NO: 2600106 - RNA, 19 nt, Homo sapiens
  misc_RNA (1)...(19): siRNA sense strand
cccugaagaaccuggacaa

SEQ ID NO: 2600107 - RNA, 19 nt, Homo sapiens
  misc_RNA (1)...(19): siRNA sense strand
cuucagaccucccaggaca

SEQ ID NO: 2600108 - RNA, 19 nt, Homo sapiens
  misc_RNA (1)...(19): siRNA sense strand
uggugaugaaggacggcaa

SEQ ID NO: 2600109 - RNA, 19 nt, Homo sapiens
  misc_RNA (1)...(19): siRNA sense strand
uggaccaccuggaggagau

SEQ ID NO: 2600110 - RNA, 19 nt, Homo sapiens
  misc_RNA (1)...(19): siRNA sense strand
ugaagcuggugaacggcaa

SEQ ID NO: 2600111 - RNA, 19 nt, Homo sapiens
  misc_RNA (1)...(19): siRNA sense strand
aagagaagaaagagggaga

SEQ ID NO: 2600112 - RNA, 19 nt, Homo sapiens
  misc_RNA (1)...(19): siRNA sense strand
uggaauuuggccuggcaua

SEQ ID NO: 2600113 - RNA, 19 nt, Homo sapiens
  misc_RNA (1)...(19): siRNA sense strand
gcgccuacucuguguucaa

SEQ ID NO: 2600114 - RNA, 19 nt, Homo sapiens
  misc_RNA (1)...(19): siRNA sense strand
cagagcaguuggagcgcga

SEQ ID NO: 2600115 - RNA, 19 nt, Homo sapiens
  misc_RNA (1)...(19): siRNA sense strand
agaagaaagagggagagaa

SEQ ID NO: 2600116 - RNA, 19 nt, Homo sapiens
  misc_RNA (1)...(19): siRNA sense strand
aaaaggaagaagaggaaaa

SEQ ID NO: 2600117 - RNA, 19 nt, Homo sapiens
  misc_RNA (1)...(19): siRNA sense strand
cagcaaaagaacaacaaaa

SEQ ID NO: 2600118 - RNA, 19 nt, Homo sapiens
  misc_RNA (1)...(19): siRNA sense strand
acaaaaggaagaagaggaa

SEQ ID NO: 2600119 - RNA, 19 nt, Homo sapiens
  misc_RNA (1)...(19): siRNA sense strand
gagcaaagccaaaggaagg

SEQ ID NO: 2600120 - RNA, 19 nt, Homo sapiens
  misc_RNA (1)...(19): siRNA sense strand
aggaaggcuuugggaagaa

SEQ ID NO: 2600121 - RNA, 19 nt, Homo sapiens
  misc_RNA (1)...(19): siRNA sense strand
gaaaagagguuguugcuac

SEQ ID NO: 2600122 - RNA, 19 nt, Homo sapiens
  misc_RNA (1)...(19): siRNA sense strand
aagaacaacaaaaggaaga

SEQ ID NO: 2600123 - RNA, 19 nt, Homo sapiens
  misc_RNA (1)...(19): siRNA sense strand
cagcaaaggucuagccaca

SEQ ID NO: 2600124 - RNA, 19 nt, Homo sapiens
  misc_RNA (1)...(19): siRNA sense strand
gaaagaagcugauugggaa

SEQ ID NO: 2600125 - RNA, 19 nt, Homo sapiens
  misc_RNA (1)...(19): siRNA sense strand
ccaaauuuguagauggaga

SEQ ID NO: 2600126 - RNA, 19 nt, Homo sapiens
  misc_RNA (1)...(19): siRNA sense strand
agguggagguggagagcau

SEQ ID NO: 2600127 - RNA, 19 nt, Homo sapiens
  misc_RNA (1)...(19): siRNA sense strand
ccugaaugcccaagaguca

SEQ ID NO: 2600128 - RNA, 19 nt, Homo sapiens
  misc_RNA (1)...(19): siRNA sense strand
cgaaagaagcugauuggga

SEQ ID NO: 2600129 - RNA, 19 nt, Homo sapiens
  misc_RNA (1)...(19): siRNA sense strand
cugagaauauggagagacu

SEQ ID NO: 2600130 - RNA, 19 nt, Homo sapiens
  misc_RNA (1)...(19): siRNA sense strand
cagaaagugaucacagaau

SEQ ID NO: 2600131 - RNA, 19 nt, Homo sapiens
  misc_RNA (1)...(19): siRNA sense strand
caaauuuguagauggagaa

SEQ ID NO: 2600132 - RNA, 19 nt, Homo sapiens
  misc_RNA (1)...(19): siRNA sense strand
cagugaaacuccagagccu

SEQ ID NO: 2600133 - RNA, 19 nt, Homo sapiens
  misc_RNA (1)...(19): siRNA sense strand
aggauaagaacaagaaacu

SEQ ID NO: 2600134 - RNA, 19 nt, Homo sapiens
  misc_RNA (1)...(19): siRNA sense strand
ucaaugugacgguggacua

SEQ ID NO: 2600135 - RNA, 19 nt, Homo sapiens
  misc_RNA (1)...(19): siRNA sense strand
ccaaggaacuggugcugca

SEQ ID NO: 2600136 - RNA, 19 nt, Homo sapiens
  misc_RNA (1)...(19): siRNA sense strand
agguggagguggaggugga

SEQ ID NO: 2600137 - RNA, 19 nt, Homo sapiens
  misc_RNA (1)...(19): siRNA sense strand
caaccugaugcaaaggaua

SEQ ID NO: 2600138 - RNA, 19 nt, Homo sapiens
  misc_RNA (1)...(19): siRNA sense strand
gaagcagauggcagugaaa

SEQ ID NO: 2600139 - RNA, 19 nt, Homo sapiens
  misc_RNA (1)...(19): siRNA sense strand
acacccaggauaagaacaa

SEQ ID NO: 2600140 - RNA, 19 nt, Homo sapiens
  misc_RNA (1)...(19): siRNA sense strand
gcaugaucuaccuuggaaa

SEQ ID NO: 2600141 - RNA, 19 nt, Homo sapiens
  misc_RNA (1)...(19): siRNA sense strand
gccaaagagcgcaggcuga

SEQ ID NO: 2600142 - RNA, 19 nt, Homo sapiens
  misc_RNA (1)...(19): siRNA sense strand
cagaagaaagagaaggucu

SEQ ID NO: 2600143 - RNA, 19 nt, Homo sapiens
  misc_RNA (1)...(19): siRNA sense strand
cagaaucacugguugcaga

SEQ ID NO: 2600144 - RNA, 19 nt, Homo sapiens
  misc_RNA (1)...(19): siRNA sense strand
ggggagaacacccaggaua

SEQ ID NO: 2600145 - RNA, 19 nt, Homo sapiens
  misc_RNA (1)...(19): siRNA sense strand
gcaacauucgugcuggaaa

SEQ ID NO: 2600146 - RNA, 19 nt, Homo sapiens
  misc_RNA (1)...(19): siRNA sense strand
agaagcugauggagaacau

SEQ ID NO: 2600147 - RNA, 19 nt, Homo sapiens
  misc_RNA (1)...(19): siRNA sense strand
ugauggagaacaugcgcaa

SEQ ID NO: 2600148 - RNA, 19 nt, Homo sapiens
  misc_RNA (1)...(19): siRNA sense strand
agucgagucuccugccaaa

SEQ ID NO: 2600149 - RNA, 19 nt, Homo sapiens
  misc_RNA (1)...(19): siRNA sense strand
cagaauaccugaaugccca

SEQ ID NO: 2600150 - RNA, 19 nt, Homo sapiens
  misc_RNA (1)...(19): siRNA sense strand
gcugcagaggccagagcua

SEQ ID NO: 2600151 - RNA, 19 nt, Homo sapiens
  misc_RNA (1)...(19): siRNA sense strand
agguggagagcauggacaa

SEQ ID NO: 2600152 - RNA, 19 nt, Homo sapiens
  misc_RNA (1)...(19): siRNA sense strand
aggagaaacaguuccagaa

SEQ ID NO: 2600153 - RNA, 19 nt, Homo sapiens
  misc_RNA (1)...(19): siRNA sense strand
cugaugaugcagacgaauu

SEQ ID NO: 2600154 - RNA, 19 nt, Homo sapiens
  misc_RNA (1)...(19): siRNA sense strand
agcaaaggcagccaagaaa

SEQ ID NO: 2600155 - RNA, 19 nt, Homo sapiens
  misc_RNA (1)...(19): siRNA sense strand
ggauguggagugaggggaa

SEQ ID NO: 2600156 - RNA, 19 nt, Homo sapiens
  misc_RNA (1)...(19): siRNA sense strand
gcuuggugcaggaaggaga

SEQ ID NO: 2600157 - RNA, 19 nt, Homo sapiens
  misc_RNA (1)...(19): siRNA sense strand
aggcaugagagcuaauaau

SEQ ID NO: 2600158 - RNA, 19 nt, Homo sapiens
  misc_RNA (1)...(19): siRNA sense strand
cagcccagccacagagaca

SEQ ID NO: 2600159 - RNA, 19 nt, Homo sapiens
  misc_RNA (1)...(19): siRNA sense strand
cauuggaggaauaaacauu

SEQ ID NO: 2600160 - RNA, 19 nt, Homo sapiens
  misc_RNA (1)...(19): siRNA sense strand
augcagacgaauuuggcua

SEQ ID NO: 2600161 - RNA, 19 nt, Homo sapiens
  misc_RNA (1)...(19): siRNA sense strand
ccagaaagugaucacagaa

SEQ ID NO: 2600162 - RNA, 19 nt, Homo sapiens
  misc_RNA (1)...(19): siRNA sense strand
agcgagagguggaggugga

SEQ ID NO: 2600163 - RNA, 19 nt, Homo sapiens
  misc_RNA (1)...(19): siRNA sense strand
ccauuguugugaagcugaa

SEQ ID NO: 2600164 - RNA, 19 nt, Homo sapiens
  misc_RNA (1)...(19): siRNA sense strand
guucugaagcuguggugga

SEQ ID NO: 2600165 - RNA, 19 nt, Homo sapiens
  misc_RNA (1)...(19): siRNA sense strand
cagaucaaccucagcaaca

SEQ ID NO: 2600166 - RNA, 19 nt, Homo sapiens
  misc_RNA (1)...(19): siRNA sense strand
uggaggugcgcaaggagaa

SEQ ID NO: 2600167 - RNA, 19 nt, Homo sapiens
  misc_RNA (1)...(19): siRNA sense strand
ucaugguggaggugcgcaa

SEQ ID NO: 2600168 - RNA, 19 nt, Homo sapiens
  misc_RNA (1)...(19): siRNA sense strand
ggaggugcgcaaggagaaa

SEQ ID NO: 2600169 - RNA, 19 nt, Homo sapiens
  misc_RNA (1)...(19): siRNA sense strand
gggcgagaguauggcauga

SEQ ID NO: 2600170 - RNA, 19 nt, Homo sapiens
  misc_RNA (1)...(19): siRNA sense strand
cuuauugggaagaagguca

SEQ ID NO: 2600171 - RNA, 19 nt, Homo sapiens
  misc_RNA (1)...(19): siRNA sense strand
cgcgacugcuucagagaga

SEQ ID NO: 2600172 - RNA, 19 nt, Homo sapiens
  misc_RNA (1)...(19): siRNA sense strand
caggauaagaacaagaaac

SEQ ID NO: 2600173 - RNA, 19 nt, Homo sapiens
  misc_RNA (1)...(19): siRNA sense strand
ugccaaauuuguagaugga

SEQ ID NO: 2600174 - RNA, 19 nt, Homo sapiens
  misc_RNA (1)...(19): siRNA sense strand
aaaagauaccaauggggaa

SEQ ID NO: 2600175 - RNA, 19 nt, Homo sapiens
  misc_RNA (1)...(19): siRNA sense strand
gcuaauaauccugagcaga

SEQ ID NO: 2600176 - RNA, 19 nt, Homo sapiens
  misc_RNA (1)...(19): siRNA sense strand
gagcuauuaagaauggcaa

SEQ ID NO: 2600177 - RNA, 19 nt, Homo sapiens
  misc_RNA (1)...(19): siRNA sense strand
uuaagaauggcaaaggauu

SEQ ID NO: 2600178 - RNA, 19 nt, Homo sapiens
  misc_RNA (1)...(19): siRNA sense strand
aggaaagugcugaggccaa

SEQ ID NO: 2600179 - RNA, 19 nt, Homo sapiens
  misc_RNA (1)...(19): siRNA sense strand
gcaugcugcucaagagaau

SEQ ID NO: 2600180 - RNA, 19 nt, Homo sapiens
  misc_RNA (1)...(19): siRNA sense strand
aggacgacacugagggauu

SEQ ID NO: 2600181 - RNA, 19 nt, Homo sapiens
  misc_RNA (1)...(19): siRNA sense strand
ggguggaagacgaugaaga

SEQ ID NO: 2600182 - RNA, 19 nt, Homo sapiens
  misc_RNA (1)...(19): siRNA sense strand
augaagaggacgaggagga

SEQ ID NO: 2600183 - RNA, 19 nt, Homo sapiens
  misc_RNA (1)...(19): siRNA sense strand
gcuggagaucaguggcaaa

SEQ ID NO: 2600184 - RNA, 19 nt, Homo sapiens
  misc_RNA (1)...(19): siRNA sense strand
ccagagggcugaaggggaa

SEQ ID NO: 2600185 - RNA, 19 nt, Homo sapiens
  misc_RNA (1)...(19): siRNA sense strand
augucaaccugcaggagaa

SEQ ID NO: 2600186 - RNA, 19 nt, Homo sapiens
  misc_RNA (1)...(19): siRNA sense strand
cugcuaaacuucagcgacu

SEQ ID NO: 2600187 - RNA, 19 nt, Homo sapiens
  misc_RNA (1)...(19): siRNA sense strand
ugaacuucccugagaucaa

SEQ ID NO: 2600188 - RNA, 19 nt, Homo sapiens
  misc_RNA (1)...(19): siRNA sense strand
gggagugcaagguggccaa

SEQ ID NO: 2600189 - RNA, 19 nt, Homo sapiens
  misc_RNA (1)...(19): siRNA sense strand
gcuucuacccgcugcgaau

SEQ ID NO: 2600190 - RNA, 19 nt, Homo sapiens
  misc_RNA (1)...(19): siRNA sense strand
gcaaaggauagcagcagga

SEQ ID NO: 2600191 - RNA, 19 nt, Homo sapiens
  misc_RNA (1)...(19): siRNA sense strand
agugcaagguggccaacua

SEQ ID NO: 2600192 - RNA, 19 nt, Homo sapiens
  misc_RNA (1)...(19): siRNA sense strand
uggaagacgaugaagagga

SEQ ID NO: 2600193 - RNA, 19 nt, Homo sapiens
  misc_RNA (1)...(19): siRNA sense strand
ggaggaagccagugaggag

SEQ ID NO: 2600194 - RNA, 19 nt, Homo sapiens
  misc_RNA (1)...(19): siRNA sense strand
ucgccaugguugagagaug

SEQ ID NO: 2600195 - RNA, 19 nt, Homo sapiens
  misc_RNA (1)...(19): siRNA sense strand
ccaacaaauuccaggucac

SEQ ID NO: 2600196 - RNA, 19 nt, Homo sapiens
  misc_RNA (1)...(19): siRNA sense strand
augaagugguacaggcguu

SEQ ID NO: 2600197 - RNA, 19 nt, Homo sapiens
  misc_RNA (1)...(19): siRNA sense strand
gcaacucggaggauggaga

SEQ ID NO: 2600198 - RNA, 19 nt, Homo sapiens
  misc_RNA (1)...(19): siRNA sense strand
ggauggagacccagacgca

SEQ ID NO: 2600199 - RNA, 19 nt, Homo sapiens
  misc_RNA (1)...(19): siRNA sense strand
aggucgacuucaacaggaa

SEQ ID NO: 2600200 - RNA, 19 nt, Homo sapiens
  misc_RNA (1)...(19): siRNA sense strand
gggcugaaggggaagaaga

SEQ ID NO: 2600201 - RNA, 19 nt, Homo sapiens
  misc_RNA (1)...(19): siRNA sense strand
cugaaggggaagaagaauu

SEQ ID NO: 2600202 - RNA, 19 nt, Homo sapiens
  misc_RNA (1)...(19): siRNA sense strand
cggacagcucugaggagga

SEQ ID NO: 2600203 - RNA, 19 nt, Homo sapiens
  misc_RNA (1)...(19): siRNA sense strand
ggaugaggacaggaagcaa

SEQ ID NO: 2600204 - RNA, 19 nt, Homo sapiens
  misc_RNA (1)...(19): siRNA sense strand
cccgcaagaaggaaacaua

SEQ ID NO: 2600205 - RNA, 19 nt, Homo sapiens
  misc_RNA (1)...(19): siRNA sense strand
caguggaagccugggagaa

SEQ ID NO: 2600206 - RNA, 19 nt, Homo sapiens
  misc_RNA (1)...(19): siRNA sense strand
agagagaacuggagagcgu

SEQ ID NO: 2600207 - RNA, 19 nt, Homo sapiens
  misc_RNA (1)...(19): siRNA sense strand
agaaagaaauacacccaga

SEQ ID NO: 2600208 - RNA, 19 nt, Homo sapiens
  misc_RNA (1)...(19): siRNA sense strand
gcgagaagagggaacguga

SEQ ID NO: 2600209 - RNA, 19 nt, Homo sapiens
  misc_RNA (1)...(19): siRNA sense strand
agaaaaugugccaagauua

SEQ ID NO: 2600210 - RNA, 19 nt, Homo sapiens
  misc_RNA (1)...(19): siRNA sense strand
caauagugucucaggagga

SEQ ID NO: 2600211 - RNA, 19 nt, Homo sapiens
  misc_RNA (1)...(19): siRNA sense strand
gaagaaagaaauacaccca

SEQ ID NO: 2600212 - RNA, 19 nt, Homo sapiens
  misc_RNA (1)...(19): siRNA sense strand
aagaaauacacccagacaa

SEQ ID NO: 2600213 - RNA, 19 nt, Homo sapiens
  misc_RNA (1)...(19): siRNA sense strand
aggcaggacaccucggcaa

SEQ ID NO: 2600214 - RNA, 19 nt, Homo sapiens
  misc_RNA (1)...(19): siRNA sense strand
acuauugacugaagggugu

SEQ ID NO: 2600215 - RNA, 19 nt, Homo sapiens
  misc_RNA (1)...(19): siRNA sense strand
agccauacaacgacgguuu

SEQ ID NO: 2600216 - RNA, 19 nt, Homo sapiens
  misc_RNA (1)...(19): siRNA sense strand
agcguuuccuggagagaau

SEQ ID NO: 2600217 - RNA, 19 nt, Homo sapiens
  misc_RNA (1)...(19): siRNA sense strand
aggcagaggaaguggagga

SEQ ID NO: 2600218 - RNA, 19 nt, Homo sapiens
  misc_RNA (1)...(19): siRNA sense strand
cccaggaggcagaggaagu

SEQ ID NO: 2600219 - RNA, 19 nt, Homo sapiens
  misc_RNA (1)...(19): siRNA sense strand
gaaggaacuuggaaggaaa

SEQ ID NO: 2600220 - RNA, 19 nt, Homo sapiens
  misc_RNA (1)...(19): siRNA sense strand
aggaaaacuucgaggucaa

SEQ ID NO: 2600221 - RNA, 19 nt, Homo sapiens
  misc_RNA (1)...(19): siRNA sense strand
ggaaggaacuuggaaggaa

SEQ ID NO: 2600222 - RNA, 19 nt, Homo sapiens
  misc_RNA (1)...(19): siRNA sense strand
cuguuugauugaaaggaaa

SEQ ID NO: 2600223 - RNA, 19 nt, Homo sapiens
  misc_RNA (1)...(19): siRNA sense strand
gauugaaaggaaagaaacu

SEQ ID NO: 2600224 - RNA, 19 nt, Homo sapiens
  misc_RNA (1)...(19): siRNA sense strand
agaauuaccuccaaagcca

SEQ ID NO: 2600225 - RNA, 19 nt, Homo sapiens
  misc_RNA (1)...(19): siRNA sense strand
acgaaucaaugcaagaaaa

SEQ ID NO: 2600226 - RNA, 19 nt, Homo sapiens
  misc_RNA (1)...(19): siRNA sense strand
ccuccaaagccauugucaa

SEQ ID NO: 2600227 - RNA, 19 nt, Homo sapiens
  misc_RNA (1)...(19): siRNA sense strand
ucaagauauccgagcuuau

SEQ ID NO: 2600228 - RNA, 19 nt, Homo sapiens
  misc_RNA (1)...(19): siRNA sense strand
uugauuggugggaaggaaa

SEQ ID NO: 2600229 - RNA, 19 nt, Homo sapiens
  misc_RNA (1)...(19): siRNA sense strand
acaacgaaucaaugcaaga

SEQ ID NO: 2600230 - RNA, 19 nt, Homo sapiens
  misc_RNA (1)...(19): siRNA sense strand
cuguagaagcuuuugcaaa

SEQ ID NO: 2600231 - RNA, 19 nt, Homo sapiens
  misc_RNA (1)...(19): siRNA sense strand
ucaugagagaguuggcaau

SEQ ID NO: 2600232 - RNA, 19 nt, Homo sapiens
  misc_RNA (1)...(19): siRNA sense strand
cgacaagaacccauagcau

SEQ ID NO: 2600233 - RNA, 19 nt, Homo sapiens
  misc_RNA (1)...(19): siRNA sense strand
cuggagagugugaaacaaa

SEQ ID NO: 2600234 - RNA, 19 nt, Homo sapiens
  misc_RNA (1)...(19): siRNA sense strand
gaauagaggcuuagaggag

SEQ ID NO: 2600235 - RNA, 19 nt, Homo sapiens
  misc_RNA (1)...(19): siRNA sense strand
ugcucugagucuagaaaua

SEQ ID NO: 2600236 - RNA, 19 nt, Homo sapiens
  misc_RNA (1)...(19): siRNA sense strand
auagaggcuuagaggagaa

SEQ ID NO: 2600237 - RNA, 19 nt, Homo sapiens
  misc_RNA (1)...(19): siRNA sense strand
aaguaugggauuuacguaa

SEQ ID NO: 2600238 - RNA, 19 nt, Homo sapiens
  misc_RNA (1)...(19): siRNA sense strand
gcugauuggaacaugcaaa

SEQ ID NO: 2600239 - RNA, 19 nt, Homo sapiens
  misc_RNA (1)...(19): siRNA sense strand
ucaagaugucgauuagaaa

SEQ ID NO: 2600240 - RNA, 19 nt, Homo sapiens
  misc_RNA (1)...(19): siRNA sense strand
ugacugagcuugauggcca

SEQ ID NO: 2600241 - RNA, 19 nt, Homo sapiens
  misc_RNA (1)...(19): siRNA sense strand
cuacugugcuccuggguca

SEQ ID NO: 2600242 - RNA, 19 nt, Homo sapiens
  misc_RNA (1)...(19): siRNA sense strand
agaaagcuguggaacgcua

SEQ ID NO: 2600243 - RNA, 19 nt, Homo sapiens
  misc_RNA (1)...(19): siRNA sense strand
ccugagaaauggauggucu

SEQ ID NO: 2600244 - RNA, 19 nt, Homo sapiens
  misc_RNA (1)...(19): siRNA sense strand
agaaauagaguaaagagga

SEQ ID NO: 2600245 - RNA, 19 nt, Homo sapiens
  misc_RNA (1)...(19): siRNA sense strand
gaaauagaguaaagaggag

SEQ ID NO: 2600246 - RNA, 19 nt, Homo sapiens
  misc_RNA (1)...(19): siRNA sense strand
gaauaguuccccagagaau

SEQ ID NO: 2600247 - RNA, 19 nt, Homo sapiens
  misc_RNA (1)...(19): siRNA sense strand
ggaacauguacuagcaguu

SEQ ID NO: 2600248 - RNA, 19 nt, Homo sapiens
  misc_RNA (1)...(19): siRNA sense strand
auagaaagucccaggagga

SEQ ID NO: 2600249 - RNA, 19 nt, Homo sapiens
  misc_RNA (1)...(19): siRNA sense strand
ugggauaccaggugcaaca

SEQ ID NO: 2600250 - RNA, 19 nt, Homo sapiens
  misc_RNA (1)...(19): siRNA sense strand
ucgauuagaaacuggguga

SEQ ID NO: 2600251 - RNA, 19 nt, Homo sapiens
  misc_RNA (1)...(19): siRNA sense strand
ccuaccaaaucaagcaaaa

SEQ ID NO: 2600252 - RNA, 19 nt, Homo sapiens
  misc_RNA (1)...(19): siRNA sense strand
ggucaucaaugcagccuca

SEQ ID NO: 2600253 - RNA, 19 nt, Homo sapiens
  misc_RNA (1)...(19): siRNA sense strand
ucaaagaauggauggcuca

SEQ ID NO: 2600254 - RNA, 19 nt, Homo sapiens
  misc_RNA (1)...(19): siRNA sense strand
caaacggaaggcugagaau

SEQ ID NO: 2600255 - RNA, 19 nt, Homo sapiens
  misc_RNA (1)...(19): siRNA sense strand
agcuuggcguccugagaaa

SEQ ID NO: 2600256 - RNA, 19 nt, Homo sapiens
  misc_RNA (1)...(19): siRNA sense strand
aggcuuuguucgauuguau

SEQ ID NO: 2600257 - RNA, 19 nt, Homo sapiens
  misc_RNA (1)...(19): siRNA sense strand
guauaacacagaaucacaa

SEQ ID NO: 2600258 - RNA, 19 nt, Homo sapiens
  misc_RNA (1)...(19): siRNA sense strand
cugucuggagagugugaaa

SEQ ID NO: 2600259 - RNA, 19 nt, Homo sapiens
  misc_RNA (1)...(19): siRNA sense strand
gaaucaaaucaguggagcu

SEQ ID NO: 2600260 - RNA, 19 nt, Homo sapiens
  misc_RNA (1)...(19): siRNA sense strand
cccaauuccaggagacaga

SEQ ID NO: 2600261 - RNA, 19 nt, Homo sapiens
  misc_RNA (1)...(19): siRNA sense strand
uguacuagcaguugccaau

SEQ ID NO: 2600262 - RNA, 19 nt, Homo sapiens
  misc_RNA (1)...(19): siRNA sense strand
ccucaagucaguugccuuu

SEQ ID NO: 2600263 - RNA, 19 nt, Homo sapiens
  misc_RNA (1)...(19): siRNA sense strand
gcucacaauaccucagaca

SEQ ID NO: 2600264 - RNA, 19 nt, Homo sapiens
  misc_RNA (1)...(19): siRNA sense strand
cgauuguauaacacagaau

SEQ ID NO: 2600265 - RNA, 19 nt, Homo sapiens
  misc_RNA (1)...(19): siRNA sense strand
uuuauaggcaagugaauca

SEQ ID NO: 2600266 - RNA, 19 nt, Homo sapiens
  misc_RNA (1)...(19): siRNA sense strand
aacauuauggucugggaua

SEQ ID NO: 2600267 - RNA, 19 nt, Homo sapiens
  misc_RNA (1)...(19): siRNA sense strand
cccaagaagaaacagaauu

SEQ ID NO: 2600268 - RNA, 19 nt, Homo sapiens
  misc_RNA (1)...(19): siRNA sense strand
ucugaugacaauacacuaa

SEQ ID NO: 2600269 - RNA, 19 nt, Homo sapiens
  misc_RNA (1)...(19): siRNA sense strand
cuguacggguggaagagau

SEQ ID NO: 2600270 - RNA, 19 nt, Homo sapiens
  misc_RNA (1)...(19): siRNA sense strand
cugcagugguggagcccua

SEQ ID NO: 2600271 - RNA, 19 nt, Homo sapiens
  misc_RNA (1)...(19): siRNA sense strand
gaaaggaggaugcagccaa

SEQ ID NO: 2600272 - RNA, 19 nt, Homo sapiens
  misc_RNA (1)...(19): siRNA sense strand
aaaaugaaggggaggaauu

SEQ ID NO: 2600273 - RNA, 19 nt, Homo sapiens
  misc_RNA (1)...(19): siRNA sense strand
ggggauggaagaaggagaa

SEQ ID NO: 2600274 - RNA, 19 nt, Homo sapiens
  misc_RNA (1)...(19): siRNA sense strand
gcauugaccuggugcugga

SEQ ID NO: 2600275 - RNA, 19 nt, Homo sapiens
  misc_RNA (1)...(19): siRNA sense strand
ugauagaucuggagccuac

SEQ ID NO: 2600276 - RNA, 19 nt, Homo sapiens
  misc_RNA (1)...(19): siRNA sense strand
ccgagaaagccuaucacga

SEQ ID NO: 2600277 - RNA, 19 nt, Homo sapiens
  misc_RNA (1)...(19): siRNA sense strand
acagaaaggaaguagaaau

SEQ ID NO: 2600278 - RNA, 19 nt, Homo sapiens
  misc_RNA (1)...(19): siRNA sense strand
cugaauauguucuuggcaa

SEQ ID NO: 2600279 - RNA, 19 nt, Homo sapiens
  misc_RNA (1)...(19): siRNA sense strand
ucgaauuguucuuggagau

SEQ ID NO: 2600280 - RNA, 19 nt, Homo sapiens
  misc_RNA (1)...(19): siRNA sense strand
uggaaauucaagaugacua

SEQ ID NO: 2600281 - RNA, 19 nt, Homo sapiens
  misc_RNA (1)...(19): siRNA sense strand
aaucgaaaucugaaaccaa

SEQ ID NO: 2600282 - RNA, 19 nt, Homo sapiens
  misc_RNA (1)...(19): siRNA sense strand
ccgcaacaacacaugcaaa

SEQ ID NO: 2600283 - RNA, 19 nt, Homo sapiens
  misc_RNA (1)...(19): siRNA sense strand
ucacaacacaagaagucaa

SEQ ID NO: 2600284 - RNA, 19 nt, Homo sapiens
  misc_RNA (1)...(19): siRNA sense strand
ugguaaacccacauaugua

SEQ ID NO: 2600285 - RNA, 19 nt, Homo sapiens
  misc_RNA (1)...(19): siRNA sense strand
ccuucaacacauacuauaa

SEQ ID NO: 2600286 - RNA, 19 nt, Homo sapiens
  misc_RNA (1)...(19): siRNA sense strand
aaccaaaggcagcggagau

SEQ ID NO: 2600287 - RNA, 19 nt, Homo sapiens
  misc_RNA (1)...(19): siRNA sense strand
ccaaguacaaaaugagauu

SEQ ID NO: 2600288 - RNA, 19 nt, Homo sapiens
  misc_RNA (1)...(19): siRNA sense strand
cggagauuuggcugaacaa

SEQ ID NO: 2600289 - RNA, 19 nt, Homo sapiens
  misc_RNA (1)...(19): siRNA sense strand
ggcaaauauacuucugcaa

SEQ ID NO: 2600290 - RNA, 19 nt, Homo sapiens
  misc_RNA (1)...(19): siRNA sense strand
gaagagaaggcuuugacga

SEQ ID NO: 2600291 - RNA, 19 nt, Homo sapiens
  misc_RNA (1)...(19): siRNA sense strand
uuuauugcuuccugugaaa

SEQ ID NO: 2600292 - RNA, 19 nt, Homo sapiens
  misc_RNA (1)...(19): siRNA sense strand
aguagaaauuacaaccaca

SEQ ID NO: 2600293 - RNA, 19 nt, Homo sapiens
  misc_RNA (1)...(19): siRNA sense strand
auuuggaacuggcuagaau

SEQ ID NO: 2600294 - RNA, 19 nt, Homo sapiens
  misc_RNA (1)...(19): siRNA sense strand
gcuuaugcccaguuaggau

SEQ ID NO: 2600295 - RNA, 19 nt, Homo sapiens
  misc_RNA (1)...(19): siRNA sense strand
cagucuuugaugagugaau

SEQ ID NO: 2600296 - RNA, 19 nt, Homo sapiens
  misc_RNA (1)...(19): siRNA sense strand
cauaaguugcauuacagaa

SEQ ID NO: 2600297 - RNA, 19 nt, Homo sapiens
  misc_RNA (1)...(19): siRNA sense strand
uuaucagauugguggcaga

SEQ ID NO: 2600298 - RNA, 19 nt, Homo sapiens
  misc_RNA (1)...(19): siRNA sense strand
aauacaagauucaggcgau

SEQ ID NO: 2600299 - RNA, 19 nt, Homo sapiens
  misc_RNA (1)...(19): siRNA sense strand
uggacaaauacaagauuca

SEQ ID NO: 2600300 - RNA, 19 nt, Homo sapiens
  misc_RNA (1)...(19): siRNA sense strand
ggauuugaucacaugggua

SEQ ID NO: 2600301 - RNA, 19 nt, Homo sapiens
  misc_RNA (1)...(19): siRNA sense strand
gcuaauagaaaaugcagau

SEQ ID NO: 2600302 - RNA, 19 nt, Homo sapiens
  misc_RNA (1)...(19): siRNA sense strand
aaagaaacucccaugguca

SEQ ID NO: 2600303 - RNA, 19 nt, Homo sapiens
  misc_RNA (1)...(19): siRNA sense strand
guauaaagaaagucgggaa

SEQ ID NO: 2600304 - RNA, 19 nt, Homo sapiens
  misc_RNA (1)...(19): siRNA sense strand
cuacgaaggagaaggcgaa

SEQ ID NO: 2600305 - RNA, 19 nt, Homo sapiens
  misc_RNA (1)...(19): siRNA sense strand
cauugaagacccuggaaaa

SEQ ID NO: 2600306 - RNA, 19 nt, Homo sapiens
  misc_RNA (1)...(19): siRNA sense strand
ccauugaagacccuggaaa

SEQ ID NO: 2600307 - RNA, 19 nt, Homo sapiens
  misc_RNA (1)...(19): siRNA sense strand
ugucaagagcagaaacuau

SEQ ID NO: 2600308 - RNA, 19 nt, Homo sapiens
  misc_RNA (1)...(19): siRNA sense strand
acucauuaugcuucagaaa

SEQ ID NO: 2600309 - RNA, 19 nt, Homo sapiens
  misc_RNA (1)...(19): siRNA sense strand
cugcagaacuuggagguga

SEQ ID NO: 2600310 - RNA, 19 nt, Homo sapiens
  misc_RNA (1)...(19): siRNA sense strand
uggaaaacuuacuggccua

SEQ ID NO: 2600311 - RNA, 19 nt, Homo sapiens
  misc_RNA (1)...(19): siRNA sense strand
agaauaaagaucaggccca

SEQ ID NO: 2600312 - RNA, 19 nt, Homo sapiens
  misc_RNA (1)...(19): siRNA sense strand
gaauaaagaucaggcccau

SEQ ID NO: 2600313 - RNA, 19 nt, Homo sapiens
  misc_RNA (1)...(19): siRNA sense strand
ccgccuccaagaagagaaa

SEQ ID NO: 2600314 - RNA, 19 nt, Homo sapiens
  misc_RNA (1)...(19): siRNA sense strand
ccucuggagaugugggcuu

SEQ ID NO: 2600315 - RNA, 19 nt, Homo sapiens
  misc_RNA (1)...(19): siRNA sense strand
cgucacucuuauuguggua

SEQ ID NO: 2600316 - RNA, 19 nt, Homo sapiens
  misc_RNA (1)...(19): siRNA sense strand
aggcgaaccuucaaccgaa

SEQ ID NO: 2600317 - RNA, 19 nt, Homo sapiens
  misc_RNA (1)...(19): siRNA sense strand
gggagaggguggaaggaca

SEQ ID NO: 2600318 - RNA, 19 nt, Homo sapiens
  misc_RNA (1)...(19): siRNA sense strand
gggcagugcaggaggaaac

SEQ ID NO: 2600319 - RNA, 19 nt, Homo sapiens
  misc_RNA (1)...(19): siRNA sense strand
gauauaagcuggaaggcuc

SEQ ID NO: 2600320 - RNA, 19 nt, Homo sapiens
  misc_RNA (1)...(19): siRNA sense strand
aguccugggcagaugauaa

SEQ ID NO: 2600321 - RNA, 19 nt, Homo sapiens
  misc_RNA (1)...(19): siRNA sense strand
ucguauggagaaaggaaau

SEQ ID NO: 2600322 - RNA, 19 nt, Homo sapiens
  misc_RNA (1)...(19): siRNA sense strand
caacaggaguacacaggca

SEQ ID NO: 2600323 - RNA, 19 nt, Homo sapiens
  misc_RNA (1)...(19): siRNA sense strand
ccucaaacccucugguacu

SEQ ID NO: 2600324 - RNA, 19 nt, Homo sapiens
  misc_RNA (1)...(19): siRNA sense strand
gggaggaaagagagaucca

SEQ ID NO: 2600325 - RNA, 19 nt, Homo sapiens
  misc_RNA (1)...(19): siRNA sense strand
ggacagaagaguaaccgga

SEQ ID NO: 2600326 - RNA, 19 nt, Homo sapiens
  misc_RNA (1)...(19): siRNA sense strand
cguauggagaaaggaaaua

SEQ ID NO: 2600327 - RNA, 19 nt, Homo sapiens
  misc_RNA (1)...(19): siRNA sense strand
aggaaagagagauccagua

SEQ ID NO: 2600328 - RNA, 19 nt, Homo sapiens
  misc_RNA (1)...(19): siRNA sense strand
cggaaggauuacucgcuga

SEQ ID NO: 2600329 - RNA, 19 nt, Homo sapiens
  misc_RNA (1)...(19): siRNA sense strand
gggaaugauauaagcugga

SEQ ID NO: 2600330 - RNA, 19 nt, Homo sapiens
  misc_RNA (1)...(19): siRNA sense strand
ugaccgugcaagagggcau

SEQ ID NO: 2600331 - RNA, 19 nt, Homo sapiens
  misc_RNA (1)...(19): siRNA sense strand
uuucaguccuagagggcca

SEQ ID NO: 2600332 - RNA, 19 nt, Homo sapiens
  misc_RNA (1)...(19): siRNA sense strand
gaagaaaucggcaaggcca

SEQ ID NO: 2600333 - RNA, 19 nt, Homo sapiens
  misc_RNA (1)...(19): siRNA sense strand
gggagaggguggaaggaca

SEQ ID NO: 2600334 - RNA, 19 nt, Homo sapiens
  misc_RNA (1)...(19): siRNA sense strand
gggcagugcaggaggaaac

SEQ ID NO: 2600335 - RNA, 19 nt, Homo sapiens
  misc_RNA (1)...(19): siRNA sense strand
gauauaagcuggaaggcuc

SEQ ID NO: 2600336 - RNA, 19 nt, Homo sapiens
  misc_RNA (1)...(19): siRNA sense strand
ucguauggagaaaggaaau

SEQ ID NO: 2600337 - RNA, 19 nt, Homo sapiens
  misc_RNA (1)...(19): siRNA sense strand
caacaggaguacacaggca

SEQ ID NO: 2600338 - RNA, 19 nt, Homo sapiens
  misc_RNA (1)...(19): siRNA sense strand
ccucaaacccucugguacu

SEQ ID NO: 2600339 - RNA, 19 nt, Homo sapiens
  misc_RNA (1)...(19): siRNA sense strand
ggacagaagaguaaccgga

SEQ ID NO: 2600340 - RNA, 19 nt, Homo sapiens
  misc_RNA (1)...(19): siRNA sense strand
cguauggagaaaggaaaua

SEQ ID NO: 2600341 - RNA, 19 nt, Homo sapiens
  misc_RNA (1)...(19): siRNA sense strand
cggaaggauuacucgcuga

SEQ ID NO: 2600342 - RNA, 19 nt, Homo sapiens
  misc_RNA (1)...(19): siRNA sense strand
gggaaugauauaagcugga

SEQ ID NO: 2600343 - RNA, 19 nt, Homo sapiens
  misc_RNA (1)...(19): siRNA sense strand
ugaccgugcaagagggcau

SEQ ID NO: 2600344 - RNA, 19 nt, Homo sapiens
  misc_RNA (1)...(19): siRNA sense strand
uuucaguccuagagggcca

SEQ ID NO: 2600345 - RNA, 19 nt, Homo sapiens
  misc_RNA (1)...(19): siRNA sense strand
gaagaaaucggcaaggcca

SEQ ID NO: 2600346 - RNA, 19 nt, Homo sapiens
  misc_RNA (1)...(19): siRNA sense strand
acaaauccggagagagaua

SEQ ID NO: 2600347 - RNA, 19 nt, Homo sapiens
  misc_RNA (1)...(19): siRNA sense strand
gagagaagaacaauggcaa

SEQ ID NO: 2600348 - RNA, 19 nt, Homo sapiens
  misc_RNA (1)...(19): siRNA sense strand
ggggagaaacuuuaggaua

SEQ ID NO: 2600349 - RNA, 19 nt, Homo sapiens
  misc_RNA (1)...(19): siRNA sense strand
gcaggauaugcuagcaaua

SEQ ID NO: 2600350 - RNA, 19 nt, Homo sapiens
  misc_RNA (1)...(19): siRNA sense strand
uguccagacucuagugcaa

SEQ ID NO: 2600351 - RNA, 19 nt, Homo sapiens
  misc_RNA (1)...(19): siRNA sense strand
uagaauuggcagagacuga

SEQ ID NO: 2600352 - RNA, 19 nt, Homo sapiens
  misc_RNA (1)...(19): siRNA sense strand
ccuaauaacauugaagcaa

SEQ ID NO: 2600353 - RNA, 19 nt, Homo sapiens
  misc_RNA (1)...(19): siRNA sense strand
ccgaggugcuggugcuaau

SEQ ID NO: 2600354 - RNA, 19 nt, Homo sapiens
  misc_RNA (1)...(19): siRNA sense strand
ugguaauagccaaaggaga

SEQ ID NO: 2600355 - RNA, 19 nt, Homo sapiens
  misc_RNA (1)...(19): siRNA sense strand
gcaaaguguauuccagcaa

SEQ ID NO: 2600356 - RNA, 19 nt, Homo sapiens
  misc_RNA (1)...(19): siRNA sense strand
aggaagaugaggaugauga

SEQ ID NO: 2600357 - RNA, 19 nt, Homo sapiens
  misc_RNA (1)...(19): siRNA sense strand
caguagugguaauagccaa

SEQ ID NO: 2600358 - RNA, 19 nt, Homo sapiens
  misc_RNA (1)...(19): siRNA sense strand
aagaugaggaugaugaaga

SEQ ID NO: 2600359 - RNA, 19 nt, Homo sapiens
  misc_RNA (1)...(19): siRNA sense strand
agaugaggaugaugaagau

SEQ ID NO: 2600360 - RNA, 19 nt, Homo sapiens
  misc_RNA (1)...(19): siRNA sense strand
agguaaugaggaacagcaa

SEQ ID NO: 2600361 - RNA, 19 nt, Homo sapiens
  misc_RNA (1)...(19): siRNA sense strand
agugcaagaccaaggguga

SEQ ID NO: 2600362 - RNA, 19 nt, Homo sapiens
  misc_RNA (1)...(19): siRNA sense strand
aauaaaugagcaagacaga

SEQ ID NO: 2600363 - RNA, 19 nt, Homo sapiens
  misc_RNA (1)...(19): siRNA sense strand
aguagugguaauagccaaa

SEQ ID NO: 2600364 - RNA, 19 nt, Homo sapiens
  misc_RNA (1)...(19): siRNA sense strand
uugaacuggccaagagcaa

SEQ ID NO: 2600365 - RNA, 19 nt, Homo sapiens
  misc_RNA (1)...(19): siRNA sense strand
ccugucugauggagaggaa

SEQ ID NO: 2600366 - RNA, 19 nt, Homo sapiens
  misc_RNA (1)...(19): siRNA sense strand
agacagagcucgauggagg

SEQ ID NO: 2600367 - RNA, 19 nt, Homo sapiens
  misc_RNA (1)...(19): siRNA sense strand
ccuacuugauucaguucua

SEQ ID NO: 2600368 - RNA, 19 nt, Homo sapiens
  misc_RNA (1)...(19): siRNA sense strand
agauguacccagugcuuau

SEQ ID NO: 2600369 - RNA, 19 nt, Homo sapiens
  misc_RNA (1)...(19): siRNA sense strand
augaggugcuugauagaga

SEQ ID NO: 2600370 - RNA, 19 nt, Homo sapiens
  misc_RNA (1)...(19): siRNA sense strand
aaugaggaacagcaagaaa

SEQ ID NO: 2600371 - RNA, 19 nt, Homo sapiens
  misc_RNA (1)...(19): siRNA sense strand
ugucugauggagaggaaga

SEQ ID NO: 2600372 - RNA, 19 nt, Homo sapiens
  misc_RNA (1)...(19): siRNA sense strand
cggaaagcccugcaugaca

SEQ ID NO: 2600373 - RNA, 19 nt, Homo sapiens
  misc_RNA (1)...(19): siRNA sense strand
auuaagugggcuugugaau

SEQ ID NO: 2600374 - RNA, 19 nt, Homo sapiens
  misc_RNA (1)...(19): siRNA sense strand
agaccaagggugaaaucuu

SEQ ID NO: 2600375 - RNA, 19 nt, Homo sapiens
  misc_RNA (1)...(19): siRNA sense strand
ccgcagaugaaguacgcuu

SEQ ID NO: 2600376 - RNA, 19 nt, Homo sapiens
  misc_RNA (1)...(19): siRNA sense strand
cguggaauuaagugggcuu

SEQ ID NO: 2600377 - RNA, 19 nt, Homo sapiens
  misc_RNA (1)...(19): siRNA sense strand
uggcaagaagacugggcau

SEQ ID NO: 2600378 - RNA, 19 nt, Homo sapiens
  misc_RNA (1)...(19): siRNA sense strand
agugauguugguagagauu

SEQ ID NO: 2600379 - RNA, 19 nt, Homo sapiens
  misc_RNA (1)...(19): siRNA sense strand
acauauuugaacuggccaa

SEQ ID NO: 2600380 - RNA, 19 nt, Homo sapiens
  misc_RNA (1)...(19): siRNA sense strand
ccccaacaguccaagaaaa

SEQ ID NO: 2600381 - RNA, 19 nt, Homo sapiens
  misc_RNA (1)...(19): siRNA sense strand
gaggagacauugcacguca

SEQ ID NO: 2600382 - RNA, 19 nt, Homo sapiens
  misc_RNA (1)...(19): siRNA sense strand
aggcaggauaugcuagcaa

SEQ ID NO: 2600383 - RNA, 19 nt, Homo sapiens
  misc_RNA (1)...(19): siRNA sense strand
ggugcuugauagagacguu

SEQ ID NO: 2600384 - RNA, 19 nt, Homo sapiens
  misc_RNA (1)...(19): siRNA sense strand
ucuuagacgaccaauuaua

SEQ ID NO: 2600385 - RNA, 19 nt, Homo sapiens
  misc_RNA (1)...(19): siRNA sense strand
ucucaauaccgaugaugau

SEQ ID NO: 2600386 - RNA, 19 nt, Homo sapiens
  misc_RNA (1)...(19): siRNA sense strand
uuacauuggcagcagauau

SEQ ID NO: 2600387 - RNA, 19 nt, Homo sapiens
  misc_RNA (1)...(19): siRNA sense strand
uuaacugguccuuggaauu

SEQ ID NO: 2600388 - RNA, 19 nt, Homo sapiens
  misc_RNA (1)...(19): siRNA sense strand
gugcaagaccaagggugaa

SEQ ID NO: 2600389 - RNA, 19 nt, Homo sapiens
  misc_RNA (1)...(19): siRNA sense strand
cgcuggaaagauugggaau

SEQ ID NO: 2600390 - RNA, 19 nt, Homo sapiens
  misc_RNA (1)...(19): siRNA sense strand
ggcaagaagacugggcauu

SEQ ID NO: 2600391 - RNA, 19 nt, Homo sapiens
  misc_RNA (1)...(19): siRNA sense strand
gagcaaguuuggagcagac

SEQ ID NO: 2600392 - RNA, 19 nt, Homo sapiens
  misc_RNA (1)...(19): siRNA sense strand
gcacauauucuuagacgac

SEQ ID NO: 2600393 - RNA, 19 nt, Homo sapiens
  misc_RNA (1)...(19): siRNA sense strand
aaguugcaguagugguaau

SEQ ID NO: 2600394 - RNA, 19 nt, Homo sapiens
  misc_RNA (1)...(19): siRNA sense strand
acauauucuuagacgacca

SEQ ID NO: 2600395 - RNA, 19 nt, Homo sapiens
  misc_RNA (1)...(19): siRNA sense strand
ggguaugccacaagggaaa

SEQ ID NO: 2600396 - RNA, 19 nt, Homo sapiens
  misc_RNA (1)...(19): siRNA sense strand
ccucaaaagagaaaagaaa

SEQ ID NO: 2600397 - RNA, 19 nt, Homo sapiens
  misc_RNA (1)...(19): siRNA sense strand
gggaaaggcuccuggggua

SEQ ID NO: 2600398 - RNA, 19 nt, Homo sapiens
  misc_RNA (1)...(19): siRNA sense strand
gggcaagagaauaaaucaa

SEQ ID NO: 2600399 - RNA, 19 nt, Homo sapiens
  misc_RNA (1)...(19): siRNA sense strand
agaagaaaaugguggaaau

SEQ ID NO: 2600400 - RNA, 19 nt, Homo sapiens
  misc_RNA (1)...(19): siRNA sense strand
cauuugggcaagagaauaa

SEQ ID NO: 2600401 - RNA, 19 nt, Homo sapiens
  misc_RNA (1)...(19): siRNA sense strand
cagcaaacuacaugaccaa

SEQ ID NO: 2600402 - RNA, 19 nt, Homo sapiens
  misc_RNA (1)...(19): siRNA sense strand
gggaaguaguaaaucucaa

SEQ ID NO: 2600403 - RNA, 19 nt, Homo sapiens
  misc_RNA (1)...(19): siRNA sense strand
aagcacacucgaaggauaa

SEQ ID NO: 2600404 - RNA, 19 nt, Homo sapiens
  misc_RNA (1)...(19): siRNA sense strand
gggaagaaaacaaagagaa

SEQ ID NO: 2600405 - RNA, 19 nt, Homo sapiens
  misc_RNA (1)...(19): siRNA sense strand
uauaauaacacauggcaga

SEQ ID NO: 2600406 - RNA, 19 nt, Homo sapiens
  misc_RNA (1)...(19): siRNA sense strand
uguccaggaaagaaagaaa

SEQ ID NO: 2600407 - RNA, 19 nt, Homo sapiens
  misc_RNA (1)...(19): siRNA sense strand
ggaauaaggguaugccaca

SEQ ID NO: 2600408 - RNA, 19 nt, Homo sapiens
  misc_RNA (1)...(19): siRNA sense strand
cgaaagaggcagaugcugu

SEQ ID NO: 2600409 - RNA, 19 nt, Homo sapiens
  misc_RNA (1)...(19): siRNA sense strand
uggaagagaaggaaacaga

SEQ ID NO: 2600410 - RNA, 19 nt, Homo sapiens
  misc_RNA (1)...(19): siRNA sense strand
caguagugaugcagcugaa

SEQ ID NO: 2600411 - RNA, 19 nt, Homo sapiens
  misc_RNA (1)...(19): siRNA sense strand
cugaagccagugagaauaa

SEQ ID NO: 2600412 - RNA, 19 nt, Homo sapiens
  misc_RNA (1)...(19): siRNA sense strand
uggaaauaccauuggaacu

SEQ ID NO: 2600413 - RNA, 19 nt, Homo sapiens
  misc_RNA (1)...(19): siRNA sense strand
cauuccaacaggagguuua

SEQ ID NO: 2600414 - RNA, 19 nt, Homo sapiens
  misc_RNA (1)...(19): siRNA sense strand
aaacauaaucccagcaagu

SEQ ID NO: 2600415 - RNA, 19 nt, Homo sapiens
  misc_RNA (1)...(19): siRNA sense strand
uggcaaaggcaguaccaga

SEQ ID NO: 2600416 - RNA, 19 nt, Homo sapiens
  misc_RNA (1)...(19): siRNA sense strand
ucuaauaggaaccaagcaa

SEQ ID NO: 2600417 - RNA, 19 nt, Homo sapiens
  misc_RNA (1)...(19): siRNA sense strand
agaaggaaacagaguggau

SEQ ID NO: 2600418 - RNA, 19 nt, Homo sapiens
  misc_RNA (1)...(19): siRNA sense strand
uaagcaaagcuguguggaa

SEQ ID NO: 2600419 - RNA, 19 nt, Homo sapiens
  misc_RNA (1)...(19): siRNA sense strand
acuacaugaccaagaagaa

SEQ ID NO: 2600420 - RNA, 19 nt, Homo sapiens
  misc_RNA (1)...(19): siRNA sense strand
guuugaggauggagaugau

SEQ ID NO: 2600421 - RNA, 19 nt, Homo sapiens
  misc_RNA (1)...(19): siRNA sense strand
ggaauaaaggguuugagga

SEQ ID NO: 2600422 - RNA, 19 nt, Homo sapiens
  misc_RNA (1)...(19): siRNA sense strand
ggaagaaaacaaagagaac

SEQ ID NO: 2600423 - RNA, 19 nt, Homo sapiens
  misc_RNA (1)...(19): siRNA sense strand
guccugaccuagaaggcaa

SEQ ID NO: 2600424 - RNA, 19 nt, Homo sapiens
  misc_RNA (1)...(19): siRNA sense strand
caagugaagcugagaguac

SEQ ID NO: 2600425 - RNA, 19 nt, Homo sapiens
  misc_RNA (1)...(19): siRNA sense strand
gaucccagagagagaagaa

SEQ ID NO: 2600426 - RNA, 19 nt, Homo sapiens
  misc_RNA (1)...(19): siRNA sense strand
cuacacggaauaaggguau

SEQ ID NO: 2600427 - RNA, 19 nt, Homo sapiens
  misc_RNA (1)...(19): siRNA sense strand
uuucacaaauagacagaga

SEQ ID NO: 2600428 - RNA, 19 nt, Homo sapiens
  misc_RNA (1)...(19): siRNA sense strand
augagaucccagagagaga

SEQ ID NO: 2600429 - RNA, 19 nt, Homo sapiens
  misc_RNA (1)...(19): siRNA sense strand
ccuaagucaacugggaaua

SEQ ID NO: 2600430 - RNA, 19 nt, Homo sapiens
  misc_RNA (1)...(19): siRNA sense strand
uaaugagaucccagagaga

SEQ ID NO: 2600431 - RNA, 19 nt, Homo sapiens
  misc_RNA (1)...(19): siRNA sense strand
auauuguccaggaaagaaa

SEQ ID NO: 2600432 - RNA, 19 nt, Homo sapiens
  misc_RNA (1)...(19): siRNA sense strand
ucacaaauagacagagacu

SEQ ID NO: 2600433 - RNA, 19 nt, Homo sapiens
  misc_RNA (1)...(19): siRNA sense strand
auagacagagacugaauaa

SEQ ID NO: 2600434 - RNA, 19 nt, Homo sapiens
  misc_RNA (1)...(19): siRNA sense strand
acauaaucccagcaaguau

SEQ ID NO: 2600435 - RNA, 19 nt, Homo sapiens
  misc_RNA (1)...(19): siRNA sense strand
ccacagacugagaaaacua

SEQ ID NO: 2600436 - RNA, 19 nt, Homo sapiens
  misc_RNA (1)...(19): siRNA sense strand
gagaagaaaaugguggaaa

SEQ ID NO: 2600437 - RNA, 19 nt, Homo sapiens
  misc_RNA (1)...(19): siRNA sense strand
cauuggaacuagggaugaa

SEQ ID NO: 2600438 - RNA, 19 nt, Homo sapiens
  misc_RNA (1)...(19): siRNA sense strand
agguuuaguucccguagaa

SEQ ID NO: 2600439 - RNA, 19 nt, Homo sapiens
  misc_RNA (1)...(19): siRNA sense strand
agaaaauauuguccaggaa

SEQ ID NO: 2600440 - RNA, 19 nt, Homo sapiens
  misc_RNA (1)...(19): siRNA sense strand
ugguaaaggagaagcuacu

SEQ ID NO: 2600441 - RNA, 19 nt, Homo sapiens
  misc_RNA (1)...(19): siRNA sense strand
aaucaagagcuaucaucua

SEQ ID NO: 2600442 - RNA, 19 nt, Homo sapiens
  misc_RNA (1)...(19): siRNA sense strand
agaauaagggaaguaguaa

SEQ ID NO: 2600443 - RNA, 19 nt, Homo sapiens
  misc_RNA (1)...(19): siRNA sense strand
gcaacgauaucauggguag

SEQ ID NO: 2600444 - RNA, 19 nt, Homo sapiens
  misc_RNA (1)...(19): siRNA sense strand
ccaagaagaauauggcgca

SEQ ID NO: 2600445 - RNA, 19 nt, Homo sapiens
  misc_RNA (1)...(19): siRNA sense strand
gaaaagaaaagaaggcagu

SEQ ID NO: 2600446 - RNA, 19 nt, Homo sapiens
  misc_RNA (1)...(19): siRNA sense strand
acguaagggcagagauaaa

SEQ ID NO: 2600447 - RNA, 19 nt, Homo sapiens
  misc_RNA (1)...(19): siRNA sense strand
aagaaagaaaugaggaaga

SEQ ID NO: 2600448 - RNA, 19 nt, Homo sapiens
  misc_RNA (1)...(19): siRNA sense strand
aggauaaagggaaggacaa

SEQ ID NO: 2600449 - RNA, 19 nt, Homo sapiens
  misc_RNA (1)...(19): siRNA sense strand
agagaagaaaggaggaaga

SEQ ID NO: 2600450 - RNA, 19 nt, Homo sapiens
  misc_RNA (1)...(19): siRNA sense strand
agagaaaaggagaaggaua

SEQ ID NO: 2600451 - RNA, 19 nt, Homo sapiens
  misc_RNA (1)...(19): siRNA sense strand
gaagaaaggaggaagacca

SEQ ID NO: 2600452 - RNA, 19 nt, Homo sapiens
  misc_RNA (1)...(19): siRNA sense strand
ggagaaggauaaagggaag

SEQ ID NO: 2600453 - RNA, 19 nt, Homo sapiens
  misc_RNA (1)...(19): siRNA sense strand
aagaaaggaggaaggaaau

SEQ ID NO: 2600454 - RNA, 19 nt, Homo sapiens
  misc_RNA (1)...(19): siRNA sense strand
aggagaaggauaaagggaa

SEQ ID NO: 2600455 - RNA, 19 nt, Homo sapiens
  misc_RNA (1)...(19): siRNA sense strand
agaaaagagaaaaggagaa

SEQ ID NO: 2600456 - RNA, 19 nt, Homo sapiens
  misc_RNA (1)...(19): siRNA sense strand
aggaagaagcaaagagaag

SEQ ID NO: 2600457 - RNA, 19 nt, Homo sapiens
  misc_RNA (1)...(19): siRNA sense strand
aggacaaggaauuacauaa

SEQ ID NO: 2600458 - RNA, 19 nt, Homo sapiens
  misc_RNA (1)...(19): siRNA sense strand
aagggaaggacaaggaauu

SEQ ID NO: 2600459 - RNA, 19 nt, Homo sapiens
  misc_RNA (1)...(19): siRNA sense strand
aagaaaggaggaagaccaa

SEQ ID NO: 2600460 - RNA, 19 nt, Homo sapiens
  misc_RNA (1)...(19): siRNA sense strand
gaucaaguaaagaagucaa

SEQ ID NO: 2600461 - RNA, 19 nt, Homo sapiens
  misc_RNA (1)...(19): siRNA sense strand
gagaaaagagaaaaggaga

SEQ ID NO: 2600462 - RNA, 19 nt, Homo sapiens
  misc_RNA (1)...(19): siRNA sense strand
uucaaggggucgagggaaa

SEQ ID NO: 2600463 - RNA, 19 nt, Homo sapiens
  misc_RNA (1)...(19): siRNA sense strand
aagcugaugcugaggaaaa

SEQ ID NO: 2600464 - RNA, 19 nt, Homo sapiens
  misc_RNA (1)...(19): siRNA sense strand
ucuugaagcugcugcaaaa

SEQ ID NO: 2600465 - RNA, 19 nt, Homo sapiens
  misc_RNA (1)...(19): siRNA sense strand
aaagcagaagcaagagaaa

SEQ ID NO: 2600466 - RNA, 19 nt, Homo sapiens
  misc_RNA (1)...(19): siRNA sense strand
cgaucaagcaguagcucuu

SEQ ID NO: 2600467 - RNA, 19 nt, Homo sapiens
  misc_RNA (1)...(19): siRNA sense strand
aguagaacauacagccgaa

SEQ ID NO: 2600468 - RNA, 19 nt, Homo sapiens
  misc_RNA (1)...(19): siRNA sense strand
gagauaaagagaaaagaga

SEQ ID NO: 2600469 - RNA, 19 nt, Homo sapiens
  misc_RNA (1)...(19): siRNA sense strand
gaugaagcauugaaagcca

SEQ ID NO: 2600470 - RNA, 19 nt, Homo sapiens
  misc_RNA (1)...(19): siRNA sense strand
aaggauaaagggaaggaca

SEQ ID NO: 2600471 - RNA, 19 nt, Homo sapiens
  misc_RNA (1)...(19): siRNA sense strand
caagaaagacuaaugggca

SEQ ID NO: 2600472 - RNA, 19 nt, Homo sapiens
  misc_RNA (1)...(19): siRNA sense strand
ugauagaagacgcaggcau

SEQ ID NO: 2600473 - RNA, 19 nt, Homo sapiens
  misc_RNA (1)...(19): siRNA sense strand
cguucacauucuuaugaua

SEQ ID NO: 2600474 - RNA, 19 nt, Homo sapiens
  misc_RNA (1)...(19): siRNA sense strand
ccaaagaaagaaaugagga

SEQ ID NO: 2600475 - RNA, 19 nt, Homo sapiens
  misc_RNA (1)...(19): siRNA sense strand
agacauucagaucaaguaa

SEQ ID NO: 2600476 - RNA, 19 nt, Homo sapiens
  misc_RNA (1)...(19): siRNA sense strand
agggaaggacaaggaauua

SEQ ID NO: 2600477 - RNA, 19 nt, Homo sapiens
  misc_RNA (1)...(19): siRNA sense strand
aagaaagacuaaugggcag

SEQ ID NO: 2600478 - RNA, 19 nt, Homo sapiens
  misc_RNA (1)...(19): siRNA sense strand
ucgagaaagcugaugcuga

SEQ ID NO: 2600479 - RNA, 19 nt, Homo sapiens
  misc_RNA (1)...(19): siRNA sense strand
gauagaagacgcaggcauc

SEQ ID NO: 2600480 - RNA, 19 nt, Homo sapiens
  misc_RNA (1)...(19): siRNA sense strand
aaagagaagaaaggaggaa

SEQ ID NO: 2600481 - RNA, 19 nt, Homo sapiens
  misc_RNA (1)...(19): siRNA sense strand
cuaucaaguaccaagauga

SEQ ID NO: 2600482 - RNA, 19 nt, Homo sapiens
  misc_RNA (1)...(19): siRNA sense strand
agaacauacagccgaaaga

SEQ ID NO: 2600483 - RNA, 19 nt, Homo sapiens
  misc_RNA (1)...(19): siRNA sense strand
aagaaaugaggaagaagca

SEQ ID NO: 2600484 - RNA, 19 nt, Homo sapiens
  misc_RNA (1)...(19): siRNA sense strand
aacauacagccgaaagaaa

SEQ ID NO: 2600485 - RNA, 19 nt, Homo sapiens
  misc_RNA (1)...(19): siRNA sense strand
aggaaggaaaucaagauca

SEQ ID NO: 2600486 - RNA, 19 nt, Homo sapiens
  misc_RNA (1)...(19): siRNA sense strand
ccugguagaacaaguaaaa

SEQ ID NO: 2600487 - RNA, 19 nt, Homo sapiens
  misc_RNA (1)...(19): siRNA sense strand
cgagaaagcugaugcugag

SEQ ID NO: 2600488 - RNA, 19 nt, Homo sapiens
  misc_RNA (1)...(19): siRNA sense strand
agaagaaagcagaagcaag

SEQ ID NO: 2600489 - RNA, 19 nt, Homo sapiens
  misc_RNA (1)...(19): siRNA sense strand
ccgaaagaaaggaggaagg

SEQ ID NO: 2600490 - RNA, 19 nt, Homo sapiens
  misc_RNA (1)...(19): siRNA sense strand
gagggaaauccuauagagu

SEQ ID NO: 2600491 - RNA, 19 nt, Homo sapiens
  misc_RNA (1)...(19): siRNA sense strand
ccuauagaguucagagguc

SEQ ID NO: 2600492 - RNA, 19 nt, Homo sapiens
  misc_RNA (1)...(19): siRNA sense strand
caaagcuggauuagaacau

SEQ ID NO: 2600493 - RNA, 19 nt, Homo sapiens
  misc_RNA (1)...(19): siRNA sense strand
agaaagcagaagcaagaga

SEQ ID NO: 2600494 - RNA, 19 nt, Homo sapiens
  misc_RNA (1)...(19): siRNA sense strand
acugaagaagaaagcagaa

SEQ ID NO: 2600495 - RNA, 19 nt, Homo sapiens
  misc_RNA (1)...(19): siRNA sense strand
caaagagaagaaaggagga

SEQ ID NO: 2600496 - RNA, 19 nt, Homo sapiens
  misc_RNA (1)...(19): siRNA sense strand
ggaaagugcaggaagcgaa

SEQ ID NO: 2600497 - RNA, 19 nt, Homo sapiens
  misc_RNA (1)...(19): siRNA sense strand
cgugagacgaggaggagca

SEQ ID NO: 2600498 - RNA, 19 nt, Homo sapiens
  misc_RNA (1)...(19): siRNA sense strand
gugucgagauuguggaacu

SEQ ID NO: 2600499 - RNA, 19 nt, Homo sapiens
  misc_RNA (1)...(19): siRNA sense strand
gcucugcgaugguggguga

SEQ ID NO: 2600500 - RNA, 19 nt, Homo sapiens
  misc_RNA (1)...(19): siRNA sense strand
ggagagaacucaugggucc

SEQ ID NO: 2600501 - RNA, 19 nt, Homo sapiens
  misc_RNA (1)...(19): siRNA sense strand
ucagaaagcaggaacggga

SEQ ID NO: 2600502 - RNA, 19 nt, Homo sapiens
  misc_RNA (1)...(19): siRNA sense strand
aaacaagugugaagaggcu

SEQ ID NO: 2600503 - RNA, 19 nt, Homo sapiens
  misc_RNA (1)...(19): siRNA sense strand
uuucggaccaggaggguuu

SEQ ID NO: 2600504 - RNA, 19 nt, Homo sapiens
  misc_RNA (1)...(19): siRNA sense strand
gaagaaugccuguuggaag

SEQ ID NO: 2600505 - RNA, 19 nt, Homo sapiens
  misc_RNA (1)...(19): siRNA sense strand
cuggaugauuugagacaac

SEQ ID NO: 2600506 - RNA, 19 nt, Homo sapiens
  misc_RNA (1)...(19): siRNA sense strand
acgacaagauccaggagcu

SEQ ID NO: 2600507 - RNA, 19 nt, Homo sapiens
  misc_RNA (1)...(19): siRNA sense strand
ccgcuaagaaacagggaga

SEQ ID NO: 2600508 - RNA, 19 nt, Homo sapiens
  misc_RNA (1)...(19): siRNA sense strand
aaugaagagcagaaagaau

SEQ ID NO: 2600509 - RNA, 19 nt, Homo sapiens
  misc_RNA (1)...(19): siRNA sense strand
gaaaugaggaacagaggca

SEQ ID NO: 2600510 - RNA, 19 nt, Homo sapiens
  misc_RNA (1)...(19): siRNA sense strand
caguggaugugaugcggaa

SEQ ID NO: 2600511 - RNA, 19 nt, Homo sapiens
  misc_RNA (1)...(19): siRNA sense strand
gauugauagcuucggaaau

SEQ ID NO: 2600512 - RNA, 19 nt, Homo sapiens
  misc_RNA (1)...(19): siRNA sense strand
caaauauggcagaguggga

SEQ ID NO: 2600513 - RNA, 19 nt, Homo sapiens
  misc_RNA (1)...(19): siRNA sense strand
gugccgaacaggaggacca

SEQ ID NO: 2600514 - RNA, 19 nt, Homo sapiens
  misc_RNA (1)...(19): siRNA sense strand
gcuucggaaaugaggaaca

SEQ ID NO: 2600515 - RNA, 19 nt, Homo sapiens
  misc_RNA (1)...(19): siRNA sense strand
ggguggaacucccagccaa

SEQ ID NO: 2600516 - RNA, 19 nt, Homo sapiens
  misc_RNA (1)...(19): siRNA sense strand
gacuuaaugaagagcagaa

SEQ ID NO: 2600517 - RNA, 19 nt, Homo sapiens
  misc_RNA (1)...(19): siRNA sense strand
uggcagagugggaccagaa

SEQ ID NO: 2600518 - RNA, 19 nt, Homo sapiens
  misc_RNA (1)...(19): siRNA sense strand
gcuuuggcaagaaggagaa

SEQ ID NO: 2600519 - RNA, 19 nt, Homo sapiens
  misc_RNA (1)...(19): siRNA sense strand
gugcugucccuguggccaa

SEQ ID NO: 2600520 - RNA, 19 nt, Homo sapiens
  misc_RNA (1)...(19): siRNA sense strand
cugaacggagggaggauca

SEQ ID NO: 2600521 - RNA, 19 nt, Homo sapiens
  misc_RNA (1)...(19): siRNA sense strand
aagaagaaguucaaggagu

SEQ ID NO: 2600522 - RNA, 19 nt, Homo sapiens
  misc_RNA (1)...(19): siRNA sense strand
gggacuugcugcugggcau

SEQ ID NO: 2600523 - RNA, 19 nt, Homo sapiens
  misc_RNA (1)...(19): siRNA sense strand
gcaacuguaucgaggcgua

SEQ ID NO: 2600524 - RNA, 19 nt, Homo sapiens
  misc_RNA (1)...(19): siRNA sense strand
ucagaauacuucagcguga

SEQ ID NO: 2600525 - RNA, 19 nt, Homo sapiens
  misc_RNA (1)...(19): siRNA sense strand
aagaagaagaagaaguuca

SEQ ID NO: 2600526 - RNA, 19 nt, Homo sapiens
  misc_RNA (1)...(19): siRNA sense strand
acuuacaggcggaagagua

SEQ ID NO: 2600527 - RNA, 19 nt, Homo sapiens
  misc_RNA (1)...(19): siRNA sense strand
gaggcgaagaagaagaaga

SEQ ID NO: 2600528 - RNA, 19 nt, Homo sapiens
  misc_RNA (1)...(19): siRNA sense strand
agaagaaguucaaggaguc

SEQ ID NO: 2600529 - RNA, 19 nt, Homo sapiens
  misc_RNA (1)...(19): siRNA sense strand
auaaauacuuacaggcgga

SEQ ID NO: 2600530 - RNA, 19 nt, Homo sapiens
  misc_RNA (1)...(19): siRNA sense strand
caaucuuugcagagacuuu

SEQ ID NO: 2600531 - RNA, 19 nt, Homo sapiens
  misc_RNA (1)...(19): siRNA sense strand
cgacaaaccuugcgccgac

SEQ ID NO: 2600532 - RNA, 19 nt, Homo sapiens
  misc_RNA (1)...(19): siRNA sense strand
acgaaaggcuguaaggcug

SEQ ID NO: 2600533 - RNA, 19 nt, Homo sapiens
  misc_RNA (1)...(19): siRNA sense strand
uucuagaacuggugggaga

SEQ ID NO: 2600534 - RNA, 19 nt, Homo sapiens
  misc_RNA (1)...(19): siRNA sense strand
ugaagaaacaucaggagga

SEQ ID NO: 2600535 - RNA, 19 nt, Homo sapiens
  misc_RNA (1)...(19): siRNA sense strand
gggagauggaagagucuga

SEQ ID NO: 2600536 - RNA, 19 nt, Homo sapiens
  misc_RNA (1)...(19): siRNA sense strand
gugcgggucaugaggacaa

SEQ ID NO: 2600537 - RNA, 19 nt, Homo sapiens
  misc_RNA (1)...(19): siRNA sense strand
gagagaagcagaaaccaga

SEQ ID NO: 2600538 - RNA, 19 nt, Homo sapiens
  misc_RNA (1)...(19): siRNA sense strand
ggucaaaggagaaacgccu

SEQ ID NO: 2600539 - RNA, 19 nt, Homo sapiens
  misc_RNA (1)...(19): siRNA sense strand
gggagaguguagagcugca

SEQ ID NO: 2600540 - RNA, 19 nt, Homo sapiens
  misc_RNA (1)...(19): siRNA sense strand
gagugcagucccuggaaga

SEQ ID NO: 2600541 - RNA, 19 nt, Homo sapiens
  misc_RNA (1)...(19): siRNA sense strand
ccguagggagccaggaguu

SEQ ID NO: 2600542 - RNA, 19 nt, Homo sapiens
  misc_RNA (1)...(19): siRNA sense strand
cggaagaagcagacccaga

SEQ ID NO: 2600543 - RNA, 19 nt, Homo sapiens
  misc_RNA (1)...(19): siRNA sense strand
caggaagguccgaaggaga

SEQ ID NO: 2600544 - RNA, 19 nt, Homo sapiens
  misc_RNA (1)...(19): siRNA sense strand
cugaggaugaugacaggaa

SEQ ID NO: 2600545 - RNA, 19 nt, Homo sapiens
  misc_RNA (1)...(19): siRNA sense strand
cugacaagcuccaugagga

SEQ ID NO: 2600546 - RNA, 19 nt, Homo sapiens
  misc_RNA (1)...(19): siRNA sense strand
gcagcagagcccugaggau

SEQ ID NO: 2600547 - RNA, 19 nt, Homo sapiens
  misc_RNA (1)...(19): siRNA sense strand
cagaggagcugaagcaccu

SEQ ID NO: 2600548 - RNA, 19 nt, Homo sapiens
  misc_RNA (1)...(19): siRNA sense strand
gcacugaaggagcacgaga

SEQ ID NO: 2600549 - RNA, 19 nt, Homo sapiens
  misc_RNA (1)...(19): siRNA sense strand
guugaaaggagcagggaaa

SEQ ID NO: 2600550 - RNA, 19 nt, Homo sapiens
  misc_RNA (1)...(19): siRNA sense strand
cugcaaucgaagaggguaa

SEQ ID NO: 2600551 - RNA, 19 nt, Homo sapiens
  misc_RNA (1)...(19): siRNA sense strand
accuagaacuggugugaaa

SEQ ID NO: 2600552 - RNA, 19 nt, Homo sapiens
  misc_RNA (1)...(19): siRNA sense strand
gggaaaagauccagaagca

SEQ ID NO: 2600553 - RNA, 19 nt, Homo sapiens
  misc_RNA (1)...(19): siRNA sense strand
caggaauaucguucagaaa

SEQ ID NO: 2600554 - RNA, 19 nt, Homo sapiens
  misc_RNA (1)...(19): siRNA sense strand
gcauaguggcagaaauuau

SEQ ID NO: 2600555 - RNA, 19 nt, Homo sapiens
  misc_RNA (1)...(19): siRNA sense strand
ugucauuggaacaggagaa

SEQ ID NO: 2600556 - RNA, 19 nt, Homo sapiens
  misc_RNA (1)...(19): siRNA sense strand
gugaauuaccagucaguga

SEQ ID NO: 2600557 - RNA, 19 nt, Homo sapiens
  misc_RNA (1)...(19): siRNA sense strand
uuaugagaauggugaagaa

SEQ ID NO: 2600558 - RNA, 19 nt, Homo sapiens
  misc_RNA (1)...(19): siRNA sense strand
acacugacgaagaaugaaa

SEQ ID NO: 2600559 - RNA, 19 nt, Homo sapiens
  misc_RNA (1)...(19): siRNA sense strand
aaugauuacuggagauuca

SEQ ID NO: 2600560 - RNA, 19 nt, Homo sapiens
  misc_RNA (1)...(19): siRNA sense strand
gcccaaggcacaagaugaa

SEQ ID NO: 2600561 - RNA, 19 nt, Homo sapiens
  misc_RNA (1)...(19): siRNA sense strand
cagcuugacaggugagaca

SEQ ID NO: 2600562 - RNA, 19 nt, Homo sapiens
  misc_RNA (1)...(19): siRNA sense strand
acaaauaguaccaaagguu

SEQ ID NO: 2600563 - RNA, 19 nt, Homo sapiens
  misc_RNA (1)...(19): siRNA sense strand
aaucauuguuugugggacu

SEQ ID NO: 2600564 - RNA, 19 nt, Homo sapiens
  misc_RNA (1)...(19): siRNA sense strand
cagugaaguugcaagcauu

SEQ ID NO: 2600565 - RNA, 19 nt, Homo sapiens
  misc_RNA (1)...(19): siRNA sense strand
ccucgcaacuggaaagaca

SEQ ID NO: 2600566 - RNA, 19 nt, Homo sapiens
  misc_RNA (1)...(19): siRNA sense strand
cugcaguaauagaauguuu

SEQ ID NO: 2600567 - RNA, 19 nt, Homo sapiens
  misc_RNA (1)...(19): siRNA sense strand
cagaauggucuaaacaaau

SEQ ID NO: 2600568 - RNA, 19 nt, Homo sapiens
  misc_RNA (1)...(19): siRNA sense strand
ugguacagauguuugcaaa

SEQ ID NO: 2600569 - RNA, 19 nt, Homo sapiens
  misc_RNA (1)...(19): siRNA sense strand
gcuacgagacaaugugauu

SEQ ID NO: 2600570 - RNA, 19 nt, Homo sapiens
  misc_RNA (1)...(19): siRNA sense strand
ggaaaagauauccuggaaa

SEQ ID NO: 2600571 - RNA, 19 nt, Homo sapiens
  misc_RNA (1)...(19): siRNA sense strand
gggacaauuacuaguuauu

SEQ ID NO: 2600572 - RNA, 19 nt, Homo sapiens
  misc_RNA (1)...(19): siRNA sense strand
gguugaaaggagcagggaa

SEQ ID NO: 2600573 - RNA, 19 nt, Homo sapiens
  misc_RNA (1)...(19): siRNA sense strand
cauuggaacaggagaaaau

SEQ ID NO: 2600574 - RNA, 19 nt, Homo sapiens
  misc_RNA (1)...(19): siRNA sense strand
guacuacauaccagagcaa

SEQ ID NO: 2600575 - RNA, 19 nt, Homo sapiens
  misc_RNA (1)...(19): siRNA sense strand
aggcacaagaugaaaauua

SEQ ID NO: 2600576 - RNA, 19 nt, Homo sapiens
  misc_RNA (1)...(19): siRNA sense strand
uugccuuuguucaggaaua

SEQ ID NO: 2600577 - RNA, 19 nt, Homo sapiens
  misc_RNA (1)...(19): siRNA sense strand
gcaggacagaccagagauu

SEQ ID NO: 2600578 - RNA, 19 nt, Homo sapiens
  misc_RNA (1)...(19): siRNA sense strand
caugacaggagauggagua

SEQ ID NO: 2600579 - RNA, 19 nt, Homo sapiens
  misc_RNA (1)...(19): siRNA sense strand
agcaaaggguguugucauu

SEQ ID NO: 2600580 - RNA, 19 nt, Homo sapiens
  misc_RNA (1)...(19): siRNA sense strand
acuuuaaucucauuggcua

SEQ ID NO: 2600581 - RNA, 19 nt, Homo sapiens
  misc_RNA (1)...(19): siRNA sense strand
gcgugagcuacgagacaau

SEQ ID NO: 2600582 - RNA, 19 nt, Homo sapiens
  misc_RNA (1)...(19): siRNA sense strand
gugauuacaccucgagaca

SEQ ID NO: 2600583 - RNA, 19 nt, Homo sapiens
  misc_RNA (1)...(19): siRNA sense strand
aguagaaccaguggauaaa

SEQ ID NO: 2600584 - RNA, 19 nt, Homo sapiens
  misc_RNA (1)...(19): siRNA sense strand
ggcagaaauuauaaagaag

SEQ ID NO: 2600585 - RNA, 19 nt, Homo sapiens
  misc_RNA (1)...(19): siRNA sense strand
ggucuaaacaaaugugaag

SEQ ID NO: 2600586 - RNA, 19 nt, Homo sapiens
  misc_RNA (1)...(19): siRNA sense strand
cuugaagaauugaguaaac

SEQ ID NO: 2600587 - RNA, 19 nt, Homo sapiens
  misc_RNA (1)...(19): siRNA sense strand
aagcaaaggguguugucau

SEQ ID NO: 2600588 - RNA, 19 nt, Homo sapiens
  misc_RNA (1)...(19): siRNA sense strand
gguuacuggaguuggcuau

SEQ ID NO: 2600589 - RNA, 19 nt, Homo sapiens
  misc_RNA (1)...(19): siRNA sense strand
aggagaagaaauagaugca

SEQ ID NO: 2600590 - RNA, 19 nt, Homo sapiens
  misc_RNA (1)...(19): siRNA sense strand
guucagcagcuuucacaaa

SEQ ID NO: 2600591 - RNA, 19 nt, Homo sapiens
  misc_RNA (1)...(19): siRNA sense strand
ucgaagaggguaaagggau

SEQ ID NO: 2600592 - RNA, 19 nt, Homo sapiens
  misc_RNA (1)...(19): siRNA sense strand
gagcacgaguauagcagca

SEQ ID NO: 2600593 - RNA, 19 nt, Homo sapiens
  misc_RNA (1)...(19): siRNA sense strand
gcaacuggaaagacagcau

SEQ ID NO: 2600594 - RNA, 19 nt, Homo sapiens
  misc_RNA (1)...(19): siRNA sense strand
ugacauguucaaugcacua

SEQ ID NO: 2600595 - RNA, 19 nt, Homo sapiens
  misc_RNA (1)...(19): siRNA sense strand
uuggcugguuacugggaaa

SEQ ID NO: 2600596 - RNA, 19 nt, Homo sapiens
  misc_RNA (1)...(19): siRNA sense strand
agagcuagcccaaggcaca

SEQ ID NO: 2600597 - RNA, 19 nt, Homo sapiens
  misc_RNA (1)...(19): siRNA sense strand
agacuugguuccaggugau

SEQ ID NO: 2600598 - RNA, 19 nt, Homo sapiens
  misc_RNA (1)...(19): siRNA sense strand
ggugaaaaugagacaauga

SEQ ID NO: 2600599 - RNA, 19 nt, Homo sapiens
  misc_RNA (1)...(19): siRNA sense strand
aacaagacuacaucagaaa

SEQ ID NO: 2600600 - RNA, 19 nt, Homo sapiens
  misc_RNA (1)...(19): siRNA sense strand
acaaaugugaaguuaguca

SEQ ID NO: 2600601 - RNA, 19 nt, Homo sapiens
  misc_RNA (1)...(19): siRNA sense strand
guuccagaucccagaccaa

SEQ ID NO: 2600602 - RNA, 19 nt, Homo sapiens
  misc_RNA (1)...(19): siRNA sense strand
cagcaauuccugaaggucu

SEQ ID NO: 2600603 - RNA, 19 nt, Homo sapiens
  misc_RNA (1)...(19): siRNA sense strand
cgaacaaguaauuaaguac

SEQ ID NO: 2600604 - RNA, 19 nt, Homo sapiens
  misc_RNA (1)...(19): siRNA sense strand
aaauagaugcaauggaugu

SEQ ID NO: 2600605 - RNA, 19 nt, Homo sapiens
  misc_RNA (1)...(19): siRNA sense strand
gagccuuggaguagaacca

SEQ ID NO: 2600606 - RNA, 19 nt, Homo sapiens
  misc_RNA (1)...(19): siRNA sense strand
uaaagaagguugaaaggag

SEQ ID NO: 2600607 - RNA, 19 nt, Homo sapiens
  misc_RNA (1)...(19): siRNA sense strand
guggcaaagcaaagggugu

SEQ ID NO: 2600608 - RNA, 19 nt, Homo sapiens
  misc_RNA (1)...(19): siRNA sense strand
gugauguuguucauggauu

SEQ ID NO: 2600609 - RNA, 19 nt, Homo sapiens
  misc_RNA (1)...(19): siRNA sense strand
gagcaaaaguggauggcug

SEQ ID NO: 2600610 - RNA, 19 nt, Homo sapiens
  misc_RNA (1)...(19): siRNA sense strand
gcaguauuuuacagagcua

SEQ ID NO: 2600611 - RNA, 19 nt, Homo sapiens
  misc_RNA (1)...(19): siRNA sense strand
gcaggaagauggaggggau

SEQ ID NO: 2600612 - RNA, 19 nt, Homo sapiens
  misc_RNA (1)...(19): siRNA sense strand
auuuaggauugaaggagua

SEQ ID NO: 2600613 - RNA, 19 nt, Homo sapiens
  misc_RNA (1)...(19): siRNA sense strand
agguagaaggcguagaaca

SEQ ID NO: 2600614 - RNA, 19 nt, Homo sapiens
  misc_RNA (1)...(19): siRNA sense strand
cugaagaagaugaugaagu

SEQ ID NO: 2600615 - RNA, 19 nt, Homo sapiens
  misc_RNA (1)...(19): siRNA sense strand
ggaauuuacugaaaccaga

SEQ ID NO: 2600616 - RNA, 19 nt, Homo sapiens
  misc_RNA (1)...(19): siRNA sense strand
aagcaggaucugaagaaga

SEQ ID NO: 2600617 - RNA, 19 nt, Homo sapiens
  misc_RNA (1)...(19): siRNA sense strand
ucacaaaggaaaaugaaga

SEQ ID NO: 2600618 - RNA, 19 nt, Homo sapiens
  misc_RNA (1)...(19): siRNA sense strand
gauacuagaauacggccaa

SEQ ID NO: 2600619 - RNA, 19 nt, Homo sapiens
  misc_RNA (1)...(19): siRNA sense strand
aaguuguggcaaugauuaa

SEQ ID NO: 2600620 - RNA, 19 nt, Homo sapiens
  misc_RNA (1)...(19): siRNA sense strand
guggcaaugauuaaggaau

SEQ ID NO: 2600621 - RNA, 19 nt, Homo sapiens
  misc_RNA (1)...(19): siRNA sense strand
uaggauugaaggaguaaaa

SEQ ID NO: 2600622 - RNA, 19 nt, Homo sapiens
  misc_RNA (1)...(19): siRNA sense strand
aggaaacaccuucaggaga

SEQ ID NO: 2600623 - RNA, 19 nt, Homo sapiens
  misc_RNA (1)...(19): siRNA sense strand
ggaaagaagauguugccau

SEQ ID NO: 2600624 - RNA, 19 nt, Homo sapiens
  misc_RNA (1)...(19): siRNA sense strand
gcuuugagaaugagguuau

SEQ ID NO: 2600625 - RNA, 19 nt, Homo sapiens
  misc_RNA (1)...(19): siRNA sense strand
cuacauuuccugagagcau

SEQ ID NO: 2600626 - RNA, 19 nt, Homo sapiens
  misc_RNA (1)...(19): siRNA sense strand
gcgcagaggaagucagcca

SEQ ID NO: 2600627 - RNA, 19 nt, Homo sapiens
  misc_RNA (1)...(19): siRNA sense strand
uguugucacuggaaggaaa

SEQ ID NO: 2600628 - RNA, 19 nt, Homo sapiens
  misc_RNA (1)...(19): siRNA sense strand
ccuccagaaucaagacgaa

SEQ ID NO: 2600629 - RNA, 19 nt, Homo sapiens
  misc_RNA (1)...(19): siRNA sense strand
gaaagaagauguugccaug

SEQ ID NO: 2600630 - RNA, 19 nt, Homo sapiens
  misc_RNA (1)...(19): siRNA sense strand
ugugauuugcuuugagaau

SEQ ID NO: 2600631 - RNA, 19 nt, Homo sapiens
  misc_RNA (1)...(19): siRNA sense strand
cacugagagccaagacaaa

SEQ ID NO: 2600632 - RNA, 19 nt, Homo sapiens
  misc_RNA (1)...(19): siRNA sense strand
auuaaagcacugagagcca

SEQ ID NO: 2600633 - RNA, 19 nt, Homo sapiens
  misc_RNA (1)...(19): siRNA sense strand
cgauguaagcuuugaaggu

SEQ ID NO: 2600634 - RNA, 19 nt, Homo sapiens
  misc_RNA (1)...(19): siRNA sense strand
ccgccaggguuguaaaauu

SEQ ID NO: 2600635 - RNA, 19 nt, Homo sapiens
  misc_RNA (1)...(19): siRNA sense strand
gcauggaaugugccaacaa

SEQ ID NO: 2600636 - RNA, 19 nt, Homo sapiens
  misc_RNA (1)...(19): siRNA sense strand
ugaccgagcacgggaagaa

SEQ ID NO: 2600637 - RNA, 19 nt, Homo sapiens
  misc_RNA (1)...(19): siRNA sense strand
agaaagagcgucaacacca

SEQ ID NO: 2600638 - RNA, 19 nt, Homo sapiens
  misc_RNA (1)...(19): siRNA sense strand
gcucagaagaccuagcagu

SEQ ID NO: 2600639 - RNA, 19 nt, Homo sapiens
  misc_RNA (1)...(19): siRNA sense strand
caacaagaucugugaaaag

SEQ ID NO: 2600640 - RNA, 19 nt, Homo sapiens
  misc_RNA (1)...(19): siRNA sense strand
uggacaggcuggaggccau

SEQ ID NO: 2600641 - RNA, 19 nt, Homo sapiens
  misc_RNA (1)...(19): siRNA sense strand
ccugagaacuccauggacu

SEQ ID NO: 2600642 - RNA, 19 nt, Homo sapiens
  misc_RNA (1)...(19): siRNA sense strand
cuggagaacccgagcccuu

SEQ ID NO: 2600643 - RNA, 19 nt, Homo sapiens
  misc_RNA (1)...(19): siRNA sense strand
agacugaugccgugggugu

SEQ ID NO: 2600644 - RNA, 19 nt, Homo sapiens
  misc_RNA (1)...(19): siRNA sense strand
ucucccagcuccagcggaa

SEQ ID NO: 2600645 - RNA, 19 nt, Homo sapiens
  misc_RNA (1)...(19): siRNA sense strand
augccuaguuugagagaaa

SEQ ID NO: 2600646 - RNA, 19 nt, Homo sapiens
  misc_RNA (1)...(19): siRNA sense strand
gggccaauguguugaggaa

SEQ ID NO: 2600647 - RNA, 19 nt, Homo sapiens
  misc_RNA (1)...(19): siRNA sense strand
ggaauuuauccgagaacaa

SEQ ID NO: 2600648 - RNA, 19 nt, Homo sapiens
  misc_RNA (1)...(19): siRNA sense strand
cagaaguagaggaaaguaa

SEQ ID NO: 2600649 - RNA, 19 nt, Homo sapiens
  misc_RNA (1)...(19): siRNA sense strand
auguagagaaagugggaaa

SEQ ID NO: 2600650 - RNA, 19 nt, Homo sapiens
  misc_RNA (1)...(19): siRNA sense strand
ggauacagaaguagaggaa

SEQ ID NO: 2600651 - RNA, 19 nt, Homo sapiens
  misc_RNA (1)...(19): siRNA sense strand
agacaggauaacagagaua

SEQ ID NO: 2600652 - RNA, 19 nt, Homo sapiens
  misc_RNA (1)...(19): siRNA sense strand
cuuccaaguucaagugaua

SEQ ID NO: 2600653 - RNA, 19 nt, Homo sapiens
  misc_RNA (1)...(19): siRNA sense strand
ggaucuagaaauauggaaa

SEQ ID NO: 2600654 - RNA, 19 nt, Homo sapiens
  misc_RNA (1)...(19): siRNA sense strand
ccaaaagcuaagagaaaua

SEQ ID NO: 2600655 - RNA, 19 nt, Homo sapiens
  misc_RNA (1)...(19): siRNA sense strand
cacuaagacugaagagaau

SEQ ID NO: 2600656 - RNA, 19 nt, Homo sapiens
  misc_RNA (1)...(19): siRNA sense strand
gagaaugaaccuacagcaa

SEQ ID NO: 2600657 - RNA, 19 nt, Homo sapiens
  misc_RNA (1)...(19): siRNA sense strand
auacagaaguagaggaaag

SEQ ID NO: 2600658 - RNA, 19 nt, Homo sapiens
  misc_RNA (1)...(19): siRNA sense strand
ugggcaggaucuagaaaua

SEQ ID NO: 2600659 - RNA, 19 nt, Homo sapiens
  misc_RNA (1)...(19): siRNA sense strand
cgguacaggacuuggagaa

SEQ ID NO: 2600660 - RNA, 19 nt, Homo sapiens
  misc_RNA (1)...(19): siRNA sense strand
ggauguuguacuugagaau

SEQ ID NO: 2600661 - RNA, 19 nt, Homo sapiens
  misc_RNA (1)...(19): siRNA sense strand
gcugaugugacuagagcaa

SEQ ID NO: 2600662 - RNA, 19 nt, Homo sapiens
  misc_RNA (1)...(19): siRNA sense strand
aaguaaagaaucuggucaa

SEQ ID NO: 2600663 - RNA, 19 nt, Homo sapiens
  misc_RNA (1)...(19): siRNA sense strand
cgaaagagaaacucaaaca

SEQ ID NO: 2600664 - RNA, 19 nt, Homo sapiens
  misc_RNA (1)...(19): siRNA sense strand
gauaacagugacagaggaa

SEQ ID NO: 2600665 - RNA, 19 nt, Homo sapiens
  misc_RNA (1)...(19): siRNA sense strand
gaaucuagcaauuguggaa

SEQ ID NO: 2600666 - RNA, 19 nt, Homo sapiens
  misc_RNA (1)...(19): siRNA sense strand
agaguauuguggaggaauu

SEQ ID NO: 2600667 - RNA, 19 nt, Homo sapiens
  misc_RNA (1)...(19): siRNA sense strand
ggaaaagcagagugugaua

SEQ ID NO: 2600668 - RNA, 19 nt, Homo sapiens
  misc_RNA (1)...(19): siRNA sense strand
gugaugauguagagaaagu

SEQ ID NO: 2600669 - RNA, 19 nt, Homo sapiens
  misc_RNA (1)...(19): siRNA sense strand
ucccaaaagcuaagagaaa

SEQ ID NO: 2600670 - RNA, 19 nt, Homo sapiens
  misc_RNA (1)...(19): siRNA sense strand
ggaaaguaauggagucacu

SEQ ID NO: 2600671 - RNA, 19 nt, Homo sapiens
  misc_RNA (1)...(19): siRNA sense strand
uaacagugacagaggaaca

SEQ ID NO: 2600672 - RNA, 19 nt, Homo sapiens
  misc_RNA (1)...(19): siRNA sense strand
acauagaccacuuggaaca

SEQ ID NO: 2600673 - RNA, 19 nt, Homo sapiens
  misc_RNA (1)...(19): siRNA sense strand
agugauagacaauggauuu

SEQ ID NO: 2600674 - RNA, 19 nt, Homo sapiens
  misc_RNA (1)...(19): siRNA sense strand
gcucagaaucaaagauguu

SEQ ID NO: 2600675 - RNA, 19 nt, Homo sapiens
  misc_RNA (1)...(19): siRNA sense strand
gcucagacagagaaagaga

SEQ ID NO: 2600676 - RNA, 19 nt, Homo sapiens
  misc_RNA (1)...(19): siRNA sense strand
caacaguauugaugcugaa

SEQ ID NO: 2600677 - RNA, 19 nt, Homo sapiens
  misc_RNA (1)...(19): siRNA sense strand
gugccaauucugugaguau

SEQ ID NO: 2600678 - RNA, 19 nt, Homo sapiens
  misc_RNA (1)...(19): siRNA sense strand
ucagacagagaaagagaaa

SEQ ID NO: 2600679 - RNA, 19 nt, Homo sapiens
  misc_RNA (1)...(19): siRNA sense strand
uagcaauuguggaagaaga

SEQ ID NO: 2600680 - RNA, 19 nt, Homo sapiens
  misc_RNA (1)...(19): siRNA sense strand
acacauucuaacagcaaua

SEQ ID NO: 2600681 - RNA, 19 nt, Homo sapiens
  misc_RNA (1)...(19): siRNA sense strand
gagaaguuuaagaggcaau

SEQ ID NO: 2600682 - RNA, 19 nt, Homo sapiens
  misc_RNA (1)...(19): siRNA sense strand
agugaggaaucuaaagcaa

SEQ ID NO: 2600683 - RNA, 19 nt, Homo sapiens
  misc_RNA (1)...(19): siRNA sense strand
aguugaaguacaagccaaa

SEQ ID NO: 2600684 - RNA, 19 nt, Homo sapiens
  misc_RNA (1)...(19): siRNA sense strand
ggugaaaaugagaaacaua

SEQ ID NO: 2600685 - RNA, 19 nt, Homo sapiens
  misc_RNA (1)...(19): siRNA sense strand
gauaguaggaaaacagaua

SEQ ID NO: 2600686 - RNA, 19 nt, Homo sapiens
  misc_RNA (1)...(19): siRNA sense strand
ccaggaagcauguaauaau

SEQ ID NO: 2600687 - RNA, 19 nt, Homo sapiens
  misc_RNA (1)...(19): siRNA sense strand
auucagaagcuaccagaaa

SEQ ID NO: 2600688 - RNA, 19 nt, Homo sapiens
  misc_RNA (1)...(19): siRNA sense strand
gguccaggccauagcaaaa

SEQ ID NO: 2600689 - RNA, 19 nt, Homo sapiens
  misc_RNA (1)...(19): siRNA sense strand
uagagaaguuuaagaggca

SEQ ID NO: 2600690 - RNA, 19 nt, Homo sapiens
  misc_RNA (1)...(19): siRNA sense strand
gugcauggagccagccaaa

SEQ ID NO: 2600691 - RNA, 19 nt, Homo sapiens
  misc_RNA (1)...(19): siRNA sense strand
ggugaggauauuaaggaau

SEQ ID NO: 2600692 - RNA, 19 nt, Homo sapiens
  misc_RNA (1)...(19): siRNA sense strand
caguugaaguacaagccaa

SEQ ID NO: 2600693 - RNA, 19 nt, Homo sapiens
  misc_RNA (1)...(19): siRNA sense strand
cagcaauacaacagagaac

SEQ ID NO: 2600694 - RNA, 19 nt, Homo sapiens
  misc_RNA (1)...(19): siRNA sense strand
aagagaagccaaugaacuu

SEQ ID NO: 2600695 - RNA, 19 nt, Homo sapiens
  misc_RNA (1)...(19): siRNA sense strand
agaaagugggaaaucguua

SEQ ID NO: 2600696 - RNA, 19 nt, Homo sapiens
  misc_RNA (1)...(19): siRNA sense strand
ucacaaacagauugcauau

SEQ ID NO: 2600697 - RNA, 19 nt, Homo sapiens
  misc_RNA (1)...(19): siRNA sense strand
ggucccaccaguaggcaaa

SEQ ID NO: 2600698 - RNA, 19 nt, Homo sapiens
  misc_RNA (1)...(19): siRNA sense strand
guaaacacacagaguucua

SEQ ID NO: 2600699 - RNA, 19 nt, Homo sapiens
  misc_RNA (1)...(19): siRNA sense strand
gugcucagacagagaaaga

SEQ ID NO: 2600700 - RNA, 19 nt, Homo sapiens
  misc_RNA (1)...(19): siRNA sense strand
agagacaauuguagcauca

SEQ ID NO: 2600701 - RNA, 19 nt, Homo sapiens
  misc_RNA (1)...(19): siRNA sense strand
aaguuaugggcuagagaau

SEQ ID NO: 2600702 - RNA, 19 nt, Homo sapiens
  misc_RNA (1)...(19): siRNA sense strand
agacugaaggguuccgaaa

SEQ ID NO: 2600703 - RNA, 19 nt, Homo sapiens
  misc_RNA (1)...(19): siRNA sense strand
cugaaacugaagagucaaa

SEQ ID NO: 2600704 - RNA, 19 nt, Homo sapiens
  misc_RNA (1)...(19): siRNA sense strand
gccaauguguugaggaacu

SEQ ID NO: 2600705 - RNA, 19 nt, Homo sapiens
  misc_RNA (1)...(19): siRNA sense strand
agacaauggauuugggaug

SEQ ID NO: 2600706 - RNA, 19 nt, Homo sapiens
  misc_RNA (1)...(19): siRNA sense strand
caauuguggaagaagaaau

SEQ ID NO: 2600707 - RNA, 19 nt, Homo sapiens
  misc_RNA (1)...(19): siRNA sense strand
acugaaggguuccgaaaga

SEQ ID NO: 2600708 - RNA, 19 nt, Homo sapiens
  misc_RNA (1)...(19): siRNA sense strand
aggcagauuccuacgagaa

SEQ ID NO: 2600709 - RNA, 19 nt, Homo sapiens
  misc_RNA (1)...(19): siRNA sense strand
aggugaggauauuaaggaa

SEQ ID NO: 2600710 - RNA, 19 nt, Homo sapiens
  misc_RNA (1)...(19): siRNA sense strand
gggugaauauggaaaccuu

SEQ ID NO: 2600711 - RNA, 19 nt, Homo sapiens
  misc_RNA (1)...(19): siRNA sense strand
agaagauccgggaggacua

SEQ ID NO: 2600712 - RNA, 19 nt, Homo sapiens
  misc_RNA (1)...(19): siRNA sense strand
gggagcagcuggaaggagu

SEQ ID NO: 2600713 - RNA, 19 nt, Homo sapiens
  misc_RNA (1)...(19): siRNA sense strand
uccuggagaucgugggcaa

SEQ ID NO: 2600714 - RNA, 19 nt, Homo sapiens
  misc_RNA (1)...(19): siRNA sense strand
agguugaggccgacaugaa

SEQ ID NO: 2600715 - RNA, 19 nt, Homo sapiens
  misc_RNA (1)...(19): siRNA sense strand
ggacgaugcuguucggaag

SEQ ID NO: 2600716 - RNA, 19 nt, Homo sapiens
  misc_RNA (1)...(19): siRNA sense strand
uugaggagguugaggccga

SEQ ID NO: 2600717 - RNA, 19 nt, Homo sapiens
  misc_RNA (1)...(19): siRNA sense strand
ccaagaaggacgaugcugu

SEQ ID NO: 2600718 - RNA, 19 nt, Homo sapiens
  misc_RNA (1)...(19): siRNA sense strand
ccugcauggaccugggcua

SEQ ID NO: 2600719 - RNA, 19 nt, Homo sapiens
  misc_RNA (1)...(19): siRNA sense strand
gaauugaguuccagaggug

SEQ ID NO: 2600720 - RNA, 19 nt, Homo sapiens
  misc_RNA (1)...(19): siRNA sense strand
gcagcauugaggagguuga

SEQ ID NO: 2600721 - RNA, 19 nt, Homo sapiens
  misc_RNA (1)...(19): siRNA sense strand
auggaggagaugagagaaa

SEQ ID NO: 2600722 - RNA, 19 nt, Homo sapiens
  misc_RNA (1)...(19): siRNA sense strand
gagagaaaucagaagaaaa

SEQ ID NO: 2600723 - RNA, 19 nt, Homo sapiens
  misc_RNA (1)...(19): siRNA sense strand
uggaaauauucauggagga

SEQ ID NO: 2600724 - RNA, 19 nt, Homo sapiens
  misc_RNA (1)...(19): siRNA sense strand
gggagcugcaguugaggaa

SEQ ID NO: 2600725 - RNA, 19 nt, Homo sapiens
  misc_RNA (1)...(19): siRNA sense strand
augagagaaaucagaagaa

SEQ ID NO: 2600726 - RNA, 19 nt, Homo sapiens
  misc_RNA (1)...(19): siRNA sense strand
aggaaaacgaagagaugga

SEQ ID NO: 2600727 - RNA, 19 nt, Homo sapiens
  misc_RNA (1)...(19): siRNA sense strand
auggaggagaugagagaaa

SEQ ID NO: 2600728 - RNA, 19 nt, Homo sapiens
  misc_RNA (1)...(19): siRNA sense strand
gagagaaaucagaagaaaa

SEQ ID NO: 2600729 - RNA, 19 nt, Homo sapiens
  misc_RNA (1)...(19): siRNA sense strand
uggaaauauucauggagga

SEQ ID NO: 2600730 - RNA, 19 nt, Homo sapiens
  misc_RNA (1)...(19): siRNA sense strand
gggagcugcaguugaggaa

SEQ ID NO: 2600731 - RNA, 19 nt, Homo sapiens
  misc_RNA (1)...(19): siRNA sense strand
ugggauggguggagaugga

SEQ ID NO: 2600732 - RNA, 19 nt, Homo sapiens
  misc_RNA (1)...(19): siRNA sense strand
gauggagaugauauggaaa

SEQ ID NO: 2600733 - RNA, 19 nt, Homo sapiens
  misc_RNA (1)...(19): siRNA sense strand
auggagaugauauggaaau

SEQ ID NO: 2600734 - RNA, 19 nt, Homo sapiens
  misc_RNA (1)...(19): siRNA sense strand
augagagaaaucagaagaa

SEQ ID NO: 2600735 - RNA, 19 nt, Homo sapiens
  misc_RNA (1)...(19): siRNA sense strand
guggagauggagaugauau

SEQ ID NO: 2600736 - RNA, 19 nt, Homo sapiens
  misc_RNA (1)...(19): siRNA sense strand
aggaaaacgaagagaugga

SEQ ID NO: 2600737 - RNA, 19 nt, Homo sapiens
  misc_RNA (1)...(19): siRNA sense strand
auggaggagaugagagaaa

SEQ ID NO: 2600738 - RNA, 19 nt, Homo sapiens
  misc_RNA (1)...(19): siRNA sense strand
gagagaaaucagaagaaaa

SEQ ID NO: 2600739 - RNA, 19 nt, Homo sapiens
  misc_RNA (1)...(19): siRNA sense strand
uggaaauauucauggagga

SEQ ID NO: 2600740 - RNA, 19 nt, Homo sapiens
  misc_RNA (1)...(19): siRNA sense strand
gggagcugcaguugaggaa

SEQ ID NO: 2600741 - RNA, 19 nt, Homo sapiens
  misc_RNA (1)...(19): siRNA sense strand
ugggauggguggagaugga

SEQ ID NO: 2600742 - RNA, 19 nt, Homo sapiens
  misc_RNA (1)...(19): siRNA sense strand
gauggagaugauauggaaa

SEQ ID NO: 2600743 - RNA, 19 nt, Homo sapiens
  misc_RNA (1)...(19): siRNA sense strand
auggagaugauauggaaau

SEQ ID NO: 2600744 - RNA, 19 nt, Homo sapiens
  misc_RNA (1)...(19): siRNA sense strand
augagagaaaucagaagaa

SEQ ID NO: 2600745 - RNA, 19 nt, Homo sapiens
  misc_RNA (1)...(19): siRNA sense strand
guggagauggagaugauau

SEQ ID NO: 2600746 - RNA, 19 nt, Homo sapiens
  misc_RNA (1)...(19): siRNA sense strand
ccaaggagaccgugggcuu

SEQ ID NO: 2600747 - RNA, 19 nt, Homo sapiens
  misc_RNA (1)...(19): siRNA sense strand
agggaucacugcuggccua

SEQ ID NO: 2600748 - RNA, 19 nt, Homo sapiens
  misc_RNA (1)...(19): siRNA sense strand
agcuagaagacgaggccaa

SEQ ID NO: 2600749 - RNA, 19 nt, Homo sapiens
  misc_RNA (1)...(19): siRNA sense strand
uagaugagcuagaagacga

SEQ ID NO: 2600750 - RNA, 19 nt, Homo sapiens
  misc_RNA (1)...(19): siRNA sense strand
gggcccugguguuggcuau

SEQ ID NO: 2600751 - RNA, 19 nt, Homo sapiens
  misc_RNA (1)...(19): siRNA sense strand
gcgaagacagagugagcca

SEQ ID NO: 2600752 - RNA, 19 nt, Homo sapiens
  misc_RNA (1)...(19): siRNA sense strand
ggugaagauauuugggcca

SEQ ID NO: 2600753 - RNA, 19 nt, Homo sapiens
  misc_RNA (1)...(19): siRNA sense strand
gaguguagcaccaugccaa

SEQ ID NO: 2600754 - RNA, 19 nt, Homo sapiens
  misc_RNA (1)...(19): siRNA sense strand
ugucaggggcucagggaau

SEQ ID NO: 2600755 - RNA, 19 nt, Homo sapiens
  misc_RNA (1)...(19): siRNA sense strand
aguuauacugugagaucua

SEQ ID NO: 2600756 - RNA, 19 nt, Homo sapiens
  misc_RNA (1)...(19): siRNA sense strand
uuucauaaccuguugggaa

SEQ ID NO: 2600757 - RNA, 19 nt, Homo sapiens
  misc_RNA (1)...(19): siRNA sense strand
cuugaucauacuugggaaa

SEQ ID NO: 2600758 - RNA, 19 nt, Homo sapiens
  misc_RNA (1)...(19): siRNA sense strand
augucagcauucagaguua

SEQ ID NO: 2600759 - RNA, 19 nt, Homo sapiens
  misc_RNA (1)...(19): siRNA sense strand
augaauauucccugguuau

SEQ ID NO: 2600760 - RNA, 19 nt, Homo sapiens
  misc_RNA (1)...(19): siRNA sense strand
aguucagauuccagcauau

SEQ ID NO: 2600761 - RNA, 19 nt, Homo sapiens
  misc_RNA (1)...(19): siRNA sense strand
acuaggaaugagaagaaaa

SEQ ID NO: 2600762 - RNA, 19 nt, Homo sapiens
  misc_RNA (1)...(19): siRNA sense strand
uuguacuacuucagguaau

SEQ ID NO: 2600763 - RNA, 19 nt, Homo sapiens
  misc_RNA (1)...(19): siRNA sense strand
ccucagacuucgagcagga

SEQ ID NO: 2600764 - RNA, 19 nt, Homo sapiens
  misc_RNA (1)...(19): siRNA sense strand
cugacaagcaggaggaguu

SEQ ID NO: 2600765 - RNA, 19 nt, Homo sapiens
  misc_RNA (1)...(19): siRNA sense strand
agaguauccuggagcggaa

SEQ ID NO: 2600766 - RNA, 19 nt, Homo sapiens
  misc_RNA (1)...(19): siRNA sense strand
aggaggaguucuaugccua

SEQ ID NO: 2600767 - RNA, 19 nt, Homo sapiens
  misc_RNA (1)...(19): siRNA sense strand
ccaaugaggugguagcugu

SEQ ID NO: 2600768 - RNA, 19 nt, Homo sapiens
  misc_RNA (1)...(19): siRNA sense strand
ucacauaccagaagccuga

SEQ ID NO: 2600769 - RNA, 19 nt, Homo sapiens
  misc_RNA (1)...(19): siRNA sense strand
uauaaggaccacuggcgua

SEQ ID NO: 2600770 - RNA, 19 nt, Homo sapiens
  misc_RNA (1)...(19): siRNA sense strand
ggagucgggcauugagaca

SEQ ID NO: 2600771 - RNA, 19 nt, Homo sapiens
  misc_RNA (1)...(19): siRNA sense strand
ggaagaagaugaggcgcaa

SEQ ID NO: 2600772 - RNA, 19 nt, Homo sapiens
  misc_RNA (1)...(19): siRNA sense strand
acaucaagcccgagaacau

SEQ ID NO: 2600773 - RNA, 19 nt, Homo sapiens
  misc_RNA (1)...(19): siRNA sense strand
gcuccgacgacgaggaaca

SEQ ID NO: 2600774 - RNA, 19 nt, Homo sapiens
  misc_RNA (1)...(19): siRNA sense strand
aggaagaagaugaggcgca

SEQ ID NO: 2600775 - RNA, 19 nt, Homo sapiens
  misc_RNA (1)...(19): siRNA sense strand
cagcuguggaugagaucaa

SEQ ID NO: 2600776 - RNA, 19 nt, Homo sapiens
  misc_RNA (1)...(19): siRNA sense strand
acgacgaggaacaggaaga

SEQ ID NO: 2600777 - RNA, 19 nt, Homo sapiens
  misc_RNA (1)...(19): siRNA sense strand
acgagguacucauggaaaa

SEQ ID NO: 2600778 - RNA, 19 nt, Homo sapiens
  misc_RNA (1)...(19): siRNA sense strand
ugaagagcaucgugaggca

SEQ ID NO: 2600779 - RNA, 19 nt, Homo sapiens
  misc_RNA (1)...(19): siRNA sense strand
gcacaagcacuucacggaa

SEQ ID NO: 2600780 - RNA, 19 nt, Homo sapiens
  misc_RNA (1)...(19): siRNA sense strand
aggaagaccccaaagacua

SEQ ID NO: 2600781 - RNA, 19 nt, Homo sapiens
  misc_RNA (1)...(19): siRNA sense strand
ggaaacagcagaagcggcu

SEQ ID NO: 2600782 - RNA, 19 nt, Homo sapiens
  misc_RNA (1)...(19): siRNA sense strand
acaccaagugcaagaucau

SEQ ID NO: 2600783 - RNA, 19 nt, Homo sapiens
  misc_RNA (1)...(19): siRNA sense strand
gcacugagcuagaggacga

SEQ ID NO: 2600784 - RNA, 19 nt, Homo sapiens
  misc_RNA (1)...(19): siRNA sense strand
uggaaagccuggauggaga

SEQ ID NO: 2600785 - RNA, 19 nt, Homo sapiens
  misc_RNA (1)...(19): siRNA sense strand
agaccuagauccugggcuu

SEQ ID NO: 2600786 - RNA, 19 nt, Homo sapiens
  misc_RNA (1)...(19): siRNA sense strand
ccgccaaagaccucagcaa

SEQ ID NO: 2600787 - RNA, 19 nt, Homo sapiens
  misc_RNA (1)...(19): siRNA sense strand
aggcaaaggugcagcagcu

SEQ ID NO: 2600788 - RNA, 19 nt, Homo sapiens
  misc_RNA (1)...(19): siRNA sense strand
uggcuacaucggaggcaaa

SEQ ID NO: 2600789 - RNA, 19 nt, Homo sapiens
  misc_RNA (1)...(19): siRNA sense strand
ccaucaagucagaguucau

SEQ ID NO: 2600790 - RNA, 19 nt, Homo sapiens
  misc_RNA (1)...(19): siRNA sense strand
agagcugggcaaagaggaa

SEQ ID NO: 2600791 - RNA, 19 nt, Homo sapiens
  misc_RNA (1)...(19): siRNA sense strand
agaagaagcugcaggcgcu

SEQ ID NO: 2600792 - RNA, 19 nt, Homo sapiens
  misc_RNA (1)...(19): siRNA sense strand
uggccaaagcugcuaagaa

SEQ ID NO: 2600793 - RNA, 19 nt, Homo sapiens
  misc_RNA (1)...(19): siRNA sense strand
ccauggacguguaugacga

SEQ ID NO: 2600794 - RNA, 19 nt, Homo sapiens
  misc_RNA (1)...(19): siRNA sense strand
cugaagaaggcccuggcua

SEQ ID NO: 2600795 - RNA, 19 nt, Homo sapiens
  misc_RNA (1)...(19): siRNA sense strand
gacuaugagaacacgcaaa

SEQ ID NO: 2600796 - RNA, 19 nt, Homo sapiens
  misc_RNA (1)...(19): siRNA sense strand
cggaaaggcugguugagug

SEQ ID NO: 2600797 - RNA, 19 nt, Homo sapiens
  misc_RNA (1)...(19): siRNA sense strand
gggaagagguuucuagagc

SEQ ID NO: 2600798 - RNA, 19 nt, Homo sapiens
  misc_RNA (1)...(19): siRNA sense strand
caccaagaacauucaggaa

SEQ ID NO: 2600799 - RNA, 19 nt, Homo sapiens
  misc_RNA (1)...(19): siRNA sense strand
gguuucuagagcugggcaa

SEQ ID NO: 2600800 - RNA, 19 nt, Homo sapiens
  misc_RNA (1)...(19): siRNA sense strand
cggaaucaggggcgacaaa

SEQ ID NO: 2600801 - RNA, 19 nt, Homo sapiens
  misc_RNA (1)...(19): siRNA sense strand
agauuugggcauagagaaa

SEQ ID NO: 2600802 - RNA, 19 nt, Homo sapiens
  misc_RNA (1)...(19): siRNA sense strand
auacaagaggagagggcaa

SEQ ID NO: 2600803 - RNA, 19 nt, Homo sapiens
  misc_RNA (1)...(19): siRNA sense strand
acugaaugccggugacaaa

SEQ ID NO: 2600804 - RNA, 19 nt, Homo sapiens
  misc_RNA (1)...(19): siRNA sense strand
cugaagaacucauccguga

SEQ ID NO: 2600805 - RNA, 19 nt, Homo sapiens
  misc_RNA (1)...(19): siRNA sense strand
guuaagaagaauggaagaa

SEQ ID NO: 2600806 - RNA, 19 nt, Homo sapiens
  misc_RNA (1)...(19): siRNA sense strand
augaagaaaaugagggauu

SEQ ID NO: 2600807 - RNA, 19 nt, Homo sapiens
  misc_RNA (1)...(19): siRNA sense strand
aguuaagaagaauggaaga

SEQ ID NO: 2600808 - RNA, 19 nt, Homo sapiens
  misc_RNA (1)...(19): siRNA sense strand
aagaagaauggaagaaucu

SEQ ID NO: 2600809 - RNA, 19 nt, Homo sapiens
  misc_RNA (1)...(19): siRNA sense strand
cgcuagaagcugaagaacu

SEQ ID NO: 2600810 - RNA, 19 nt, Homo sapiens
  misc_RNA (1)...(19): siRNA sense strand
cagagaaagaaguagaaag

SEQ ID NO: 2600811 - RNA, 19 nt, Homo sapiens
  misc_RNA (1)...(19): siRNA sense strand
gauaacaggcagaacagca

SEQ ID NO: 2600812 - RNA, 19 nt, Homo sapiens
  misc_RNA (1)...(19): siRNA sense strand
ggauuguugcagacauauu

SEQ ID NO: 2600813 - RNA, 19 nt, Homo sapiens
  misc_RNA (1)...(19): siRNA sense strand
cuggaagauaacaggcaga

SEQ ID NO: 2600814 - RNA, 19 nt, Homo sapiens
  misc_RNA (1)...(19): siRNA sense strand
ucuuugacuuugugguuga

SEQ ID NO: 2600815 - RNA, 19 nt, Homo sapiens
  misc_RNA (1)...(19): siRNA sense strand
aggagauugugaagaccuu

SEQ ID NO: 2600816 - RNA, 19 nt, Homo sapiens
  misc_RNA (1)...(19): siRNA sense strand
cccaggagcaagacaggaa

SEQ ID NO: 2600817 - RNA, 19 nt, Homo sapiens
  misc_RNA (1)...(19): siRNA sense strand
ccagaggaguugaugguga

SEQ ID NO: 2600818 - RNA, 19 nt, Homo sapiens
  misc_RNA (1)...(19): siRNA sense strand
cuggaaagugugugugaau

SEQ ID NO: 2600819 - RNA, 19 nt, Homo sapiens
  misc_RNA (1)...(19): siRNA sense strand
augaagagaaacagcaaga

SEQ ID NO: 2600820 - RNA, 19 nt, Homo sapiens
  misc_RNA (1)...(19): siRNA sense strand
cuggcaaacaugaagagaa

SEQ ID NO: 2600821 - RNA, 19 nt, Homo sapiens
  misc_RNA (1)...(19): siRNA sense strand
acaugaagagaaacagcaa

SEQ ID NO: 2600822 - RNA, 19 nt, Homo sapiens
  misc_RNA (1)...(19): siRNA sense strand
acagcaagaagguggcauu

SEQ ID NO: 2600823 - RNA, 19 nt, Homo sapiens
  misc_RNA (1)...(19): siRNA sense strand
acguggaggugucuggcaa

SEQ ID NO: 2600824 - RNA, 19 nt, Homo sapiens
  misc_RNA (1)...(19): siRNA sense strand
cguggaggugucuggcaaa

SEQ ID NO: 2600825 - RNA, 19 nt, Homo sapiens
  misc_RNA (1)...(19): siRNA sense strand
cugcagagguggauccugu

SEQ ID NO: 2600826 - RNA, 19 nt, Homo sapiens
  misc_RNA (1)...(19): siRNA sense strand
guuuaagauagaagugcua

SEQ ID NO: 2600827 - RNA, 19 nt, Homo sapiens
  misc_RNA (1)...(19): siRNA sense strand
agucugaagagucaagcaa

SEQ ID NO: 2600828 - RNA, 19 nt, Homo sapiens
  misc_RNA (1)...(19): siRNA sense strand
gugaagaaucggaggccua

SEQ ID NO: 2600829 - RNA, 19 nt, Homo sapiens
  misc_RNA (1)...(19): siRNA sense strand
gagagaaggcugagagcga

SEQ ID NO: 2600830 - RNA, 19 nt, Homo sapiens
  misc_RNA (1)...(19): siRNA sense strand
ggaaauauuaagacgacca

SEQ ID NO: 2600831 - RNA, 19 nt, Homo sapiens
  misc_RNA (1)...(19): siRNA sense strand
cagaaaaggcucuugggaa

SEQ ID NO: 2600832 - RNA, 19 nt, Homo sapiens
  misc_RNA (1)...(19): siRNA sense strand
agacaaggauggaggagag

SEQ ID NO: 2600833 - RNA, 19 nt, Homo sapiens
  misc_RNA (1)...(19): siRNA sense strand
agaaaaggcucuugggaag

SEQ ID NO: 2600834 - RNA, 19 nt, Homo sapiens
  misc_RNA (1)...(19): siRNA sense strand
gguugagaaggucgacaaa

SEQ ID NO: 2600835 - RNA, 19 nt, Homo sapiens
  misc_RNA (1)...(19): siRNA sense strand
ccaaggaggauguggacgu

SEQ ID NO: 2600836 - RNA, 19 nt, Homo sapiens
  misc_RNA (1)...(19): siRNA sense strand
cagcaaugaaugagagcuc

SEQ ID NO: 2600837 - RNA, 19 nt, Homo sapiens
  misc_RNA (1)...(19): siRNA sense strand
agaaugugacagagcugaa

SEQ ID NO: 2600838 - RNA, 19 nt, Homo sapiens
  misc_RNA (1)...(19): siRNA sense strand
agccuugauucuagagaga

SEQ ID NO: 2600839 - RNA, 19 nt, Homo sapiens
  misc_RNA (1)...(19): siRNA sense strand
agguugagaaggucgacaa

SEQ ID NO: 2600840 - RNA, 19 nt, Homo sapiens
  misc_RNA (1)...(19): siRNA sense strand
gcaccaaggaggaugugga

SEQ ID NO: 2600841 - RNA, 19 nt, Homo sapiens
  misc_RNA (1)...(19): siRNA sense strand
aaggaaacacuaaagguga

SEQ ID NO: 2600842 - RNA, 19 nt, Homo sapiens
  misc_RNA (1)...(19): siRNA sense strand
gguccaucgcugacaguga

SEQ ID NO: 2600843 - RNA, 19 nt, Homo sapiens
  misc_RNA (1)...(19): siRNA sense strand
ugauaauccugccugggaa

SEQ ID NO: 2600844 - RNA, 19 nt, Homo sapiens
  misc_RNA (1)...(19): siRNA sense strand
gaaagagauaaaagcggaa

SEQ ID NO: 2600845 - RNA, 19 nt, Homo sapiens
  misc_RNA (1)...(19): siRNA sense strand
cugagagcgaagcuggaaa

SEQ ID NO: 2600846 - RNA, 19 nt, Homo sapiens
  misc_RNA (1)...(19): siRNA sense strand
gaacaauccccaagaggca

SEQ ID NO: 2600847 - RNA, 19 nt, Homo sapiens
  misc_RNA (1)...(19): siRNA sense strand
ucgacaaagaugcugaauu

SEQ ID NO: 2600848 - RNA, 19 nt, Homo sapiens
  misc_RNA (1)...(19): siRNA sense strand
uggacaaaucugcagaaaa

SEQ ID NO: 2600849 - RNA, 19 nt, Homo sapiens
  misc_RNA (1)...(19): siRNA sense strand
caaggauggaggagagaag

SEQ ID NO: 2600850 - RNA, 19 nt, Homo sapiens
  misc_RNA (1)...(19): siRNA sense strand
ccaaagaaacccaaggcag

SEQ ID NO: 2600851 - RNA, 19 nt, Homo sapiens
  misc_RNA (1)...(19): siRNA sense strand
uggucaagauuguggccaa

SEQ ID NO: 2600852 - RNA, 19 nt, Homo sapiens
  misc_RNA (1)...(19): siRNA sense strand
cagaggagauugacgccaa

SEQ ID NO: 2600853 - RNA, 19 nt, Homo sapiens
  misc_RNA (1)...(19): siRNA sense strand
cucuaaagaaauuggauga

SEQ ID NO: 2600854 - RNA, 19 nt, Homo sapiens
  misc_RNA (1)...(19): siRNA sense strand
aggcuggaaucgauggaga

SEQ ID NO: 2600855 - RNA, 19 nt, Homo sapiens
  misc_RNA (1)...(19): siRNA sense strand
cgccaacacuuguggggaa

SEQ ID NO: 2600856 - RNA, 19 nt, Homo sapiens
  misc_RNA (1)...(19): siRNA sense strand
cuguggaucugaaaagaaa

SEQ ID NO: 2600857 - RNA, 19 nt, Homo sapiens
  misc_RNA (1)...(19): siRNA sense strand
ggcuggaaucgauggagaa

SEQ ID NO: 2600858 - RNA, 19 nt, Homo sapiens
  misc_RNA (1)...(19): siRNA sense strand
uggccaagaaauaccgcaa

SEQ ID NO: 2600859 - RNA, 19 nt, Homo sapiens
  misc_RNA (1)...(19): siRNA sense strand
gugagaucgaguuggccua

SEQ ID NO: 2600860 - RNA, 19 nt, Homo sapiens
  misc_RNA (1)...(19): siRNA sense strand
gaaucgauggagaaagcau

SEQ ID NO: 2600861 - RNA, 19 nt, Homo sapiens
  misc_RNA (1)...(19): siRNA sense strand
agauauagcucauggaaaa

SEQ ID NO: 2600862 - RNA, 19 nt, Homo sapiens
  misc_RNA (1)...(19): siRNA sense strand
agauugaaguugagggauu

SEQ ID NO: 2600863 - RNA, 19 nt, Homo sapiens
  misc_RNA (1)...(19): siRNA sense strand
ccaaaugcccagagugaua

SEQ ID NO: 2600864 - RNA, 19 nt, Homo sapiens
  misc_RNA (1)...(19): siRNA sense strand
caguauacuugaagaacaa

SEQ ID NO: 2600865 - RNA, 19 nt, Homo sapiens
  misc_RNA (1)...(19): siRNA sense strand
uuacaggauuggugagaaa

SEQ ID NO: 2600866 - RNA, 19 nt, Homo sapiens
  misc_RNA (1)...(19): siRNA sense strand
gcacaaaguggaaagacaa

SEQ ID NO: 2600867 - RNA, 19 nt, Homo sapiens
  misc_RNA (1)...(19): siRNA sense strand
gaauuugggcagaaagaaa

SEQ ID NO: 2600868 - RNA, 19 nt, Homo sapiens
  misc_RNA (1)...(19): siRNA sense strand
gagacauguuauugugaaa

SEQ ID NO: 2600869 - RNA, 19 nt, Homo sapiens
  misc_RNA (1)...(19): siRNA sense strand
ccuaagagaaggauugaaa

SEQ ID NO: 2600870 - RNA, 19 nt, Homo sapiens
  misc_RNA (1)...(19): siRNA sense strand
ugaaagaagaucaggaaga

SEQ ID NO: 2600871 - RNA, 19 nt, Homo sapiens
  misc_RNA (1)...(19): siRNA sense strand
agaaagaggaacaaagcaa

SEQ ID NO: 2600872 - RNA, 19 nt, Homo sapiens
  misc_RNA (1)...(19): siRNA sense strand
agaugauguuagaggaauu

SEQ ID NO: 2600873 - RNA, 19 nt, Homo sapiens
  misc_RNA (1)...(19): siRNA sense strand
ccaaagaaacauugcaaaa

SEQ ID NO: 2600874 - RNA, 19 nt, Homo sapiens
  misc_RNA (1)...(19): siRNA sense strand
agagaaggauugaaaguau

SEQ ID NO: 2600875 - RNA, 19 nt, Homo sapiens
  misc_RNA (1)...(19): siRNA sense strand
gcagagaugaugaagcaaa

SEQ ID NO: 2600876 - RNA, 19 nt, Homo sapiens
  misc_RNA (1)...(19): siRNA sense strand
ggucggaagauuuggaauu

SEQ ID NO: 2600877 - RNA, 19 nt, Homo sapiens
  misc_RNA (1)...(19): siRNA sense strand
cuuuagaacucaacaggaa

SEQ ID NO: 2600878 - RNA, 19 nt, Homo sapiens
  misc_RNA (1)...(19): siRNA sense strand
cugaggagguagucauaaa

SEQ ID NO: 2600879 - RNA, 19 nt, Homo sapiens
  misc_RNA (1)...(19): siRNA sense strand
acaagaaguugaaagagaa

SEQ ID NO: 2600880 - RNA, 19 nt, Homo sapiens
  misc_RNA (1)...(19): siRNA sense strand
ucucagaacuugaugaaaa

SEQ ID NO: 2600881 - RNA, 19 nt, Homo sapiens
  misc_RNA (1)...(19): siRNA sense strand
acaaagaugcccugaggaa

SEQ ID NO: 2600882 - RNA, 19 nt, Homo sapiens
  misc_RNA (1)...(19): siRNA sense strand
gaaagaugacauugaagaa

SEQ ID NO: 2600883 - RNA, 19 nt, Homo sapiens
  misc_RNA (1)...(19): siRNA sense strand
auuaauagcuccugcauau

SEQ ID NO: 2600884 - RNA, 19 nt, Homo sapiens
  misc_RNA (1)...(19): siRNA sense strand
guucaggagucuacagaau

SEQ ID NO: 2600885 - RNA, 19 nt, Homo sapiens
  misc_RNA (1)...(19): siRNA sense strand
caucuugguugguguguaa

SEQ ID NO: 2600886 - RNA, 19 nt, Homo sapiens
  misc_RNA (1)...(19): siRNA sense strand
cuauaaagauucugggaac

SEQ ID NO: 2600887 - RNA, 19 nt, Homo sapiens
  misc_RNA (1)...(19): siRNA sense strand
aggacgaguugcaaaguua

SEQ ID NO: 2600888 - RNA, 19 nt, Homo sapiens
  misc_RNA (1)...(19): siRNA sense strand
ggauaaaaguaaaggauac

SEQ ID NO: 2600889 - RNA, 19 nt, Homo sapiens
  misc_RNA (1)...(19): siRNA sense strand
ugauaauguucgauccaaa

SEQ ID NO: 2600890 - RNA, 19 nt, Homo sapiens
  misc_RNA (1)...(19): siRNA sense strand
cucaauaucaagagguaaa

SEQ ID NO: 2600891 - RNA, 19 nt, Homo sapiens
  misc_RNA (1)...(19): siRNA sense strand
cauuaaaguugaugaccuu

SEQ ID NO: 2600892 - RNA, 19 nt, Homo sapiens
  misc_RNA (1)...(19): siRNA sense strand
aagaagagauguugguuca

SEQ ID NO: 2600893 - RNA, 19 nt, Homo sapiens
  misc_RNA (1)...(19): siRNA sense strand
acaaagccuuagaaagaua

SEQ ID NO: 2600894 - RNA, 19 nt, Homo sapiens
  misc_RNA (1)...(19): siRNA sense strand
gaugcaaaggcgacagaaa

SEQ ID NO: 2600895 - RNA, 19 nt, Homo sapiens
  misc_RNA (1)...(19): siRNA sense strand
guucgaagugacuggaaua

SEQ ID NO: 2600896 - RNA, 19 nt, Homo sapiens
  misc_RNA (1)...(19): siRNA sense strand
gagaaugucuauaggcuga

SEQ ID NO: 2600897 - RNA, 19 nt, Homo sapiens
  misc_RNA (1)...(19): siRNA sense strand
gagcaguauacuugaagaa

SEQ ID NO: 2600898 - RNA, 19 nt, Homo sapiens
  misc_RNA (1)...(19): siRNA sense strand
cagcaacagaacaaagaaa

SEQ ID NO: 2600899 - RNA, 19 nt, Homo sapiens
  misc_RNA (1)...(19): siRNA sense strand
ccaugaagaacguaagauu

SEQ ID NO: 2600900 - RNA, 19 nt, Homo sapiens
  misc_RNA (1)...(19): siRNA sense strand
gaagaugauguuagaggaa

SEQ ID NO: 2600901 - RNA, 19 nt, Homo sapiens
  misc_RNA (1)...(19): siRNA sense strand
agggaaagaccauggauuu

SEQ ID NO: 2600902 - RNA, 19 nt, Homo sapiens
  misc_RNA (1)...(19): siRNA sense strand
gcuuaagaugguuuggaaa

SEQ ID NO: 2600903 - RNA, 19 nt, Homo sapiens
  misc_RNA (1)...(19): siRNA sense strand
gagugagaguggaagaaga

SEQ ID NO: 2600904 - RNA, 19 nt, Homo sapiens
  misc_RNA (1)...(19): siRNA sense strand
uugcaaagcccuaagagaa

SEQ ID NO: 2600905 - RNA, 19 nt, Homo sapiens
  misc_RNA (1)...(19): siRNA sense strand
caugaagccuugaugcaaa

SEQ ID NO: 2600906 - RNA, 19 nt, Homo sapiens
  misc_RNA (1)...(19): siRNA sense strand
aaugauugcccuuggauaa

SEQ ID NO: 2600907 - RNA, 19 nt, Homo sapiens
  misc_RNA (1)...(19): siRNA sense strand
ucucaaagaugacagcaaa

SEQ ID NO: 2600908 - RNA, 19 nt, Homo sapiens
  misc_RNA (1)...(19): siRNA sense strand
acaaaaggacgauggaaua

SEQ ID NO: 2600909 - RNA, 19 nt, Homo sapiens
  misc_RNA (1)...(19): siRNA sense strand
gcuagaacgugcaguguca

SEQ ID NO: 2600910 - RNA, 19 nt, Homo sapiens
  misc_RNA (1)...(19): siRNA sense strand
gaugcuaacaguagacuaa

SEQ ID NO: 2600911 - RNA, 19 nt, Homo sapiens
  misc_RNA (1)...(19): siRNA sense strand
uggaugaagaaaugguaaa

SEQ ID NO: 2600912 - RNA, 19 nt, Homo sapiens
  misc_RNA (1)...(19): siRNA sense strand
gcaguauacuugaagaaca

SEQ ID NO: 2600913 - RNA, 19 nt, Homo sapiens
  misc_RNA (1)...(19): siRNA sense strand
cagcaaagaaauuagugaa

SEQ ID NO: 2600914 - RNA, 19 nt, Homo sapiens
  misc_RNA (1)...(19): siRNA sense strand
uagcagugagaaagagaaa

SEQ ID NO: 2600915 - RNA, 19 nt, Homo sapiens
  misc_RNA (1)...(19): siRNA sense strand
uggcaaacauguugaaaau

SEQ ID NO: 2600916 - RNA, 19 nt, Homo sapiens
  misc_RNA (1)...(19): siRNA sense strand
gagucuuaucgaugagaaa

SEQ ID NO: 2600917 - RNA, 19 nt, Homo sapiens
  misc_RNA (1)...(19): siRNA sense strand
gaaaucagugugagggcua

SEQ ID NO: 2600918 - RNA, 19 nt, Homo sapiens
  misc_RNA (1)...(19): siRNA sense strand
gaaaacugguccaaagaaa

SEQ ID NO: 2600919 - RNA, 19 nt, Homo sapiens
  misc_RNA (1)...(19): siRNA sense strand
gaggagugaucucgagaau

SEQ ID NO: 2600920 - RNA, 19 nt, Homo sapiens
  misc_RNA (1)...(19): siRNA sense strand
ugacaguuuaggagugaaa

SEQ ID NO: 2600921 - RNA, 19 nt, Homo sapiens
  misc_RNA (1)...(19): siRNA sense strand
agacauaccaguucaacaa

SEQ ID NO: 2600922 - RNA, 19 nt, Homo sapiens
  misc_RNA (1)...(19): siRNA sense strand
acaauuagaugaagagacu

SEQ ID NO: 2600923 - RNA, 19 nt, Homo sapiens
  misc_RNA (1)...(19): siRNA sense strand
aagagaagaugcugacaau

SEQ ID NO: 2600924 - RNA, 19 nt, Homo sapiens
  misc_RNA (1)...(19): siRNA sense strand
aaagaugacagcaaagaaa

SEQ ID NO: 2600925 - RNA, 19 nt, Homo sapiens
  misc_RNA (1)...(19): siRNA sense strand
ccaagaucucagugaacaa

SEQ ID NO: 2600926 - RNA, 19 nt, Homo sapiens
  misc_RNA (1)...(19): siRNA sense strand
ugaucaagaaagaggaaca

SEQ ID NO: 2600927 - RNA, 19 nt, Homo sapiens
  misc_RNA (1)...(19): siRNA sense strand
acgaauaaucagugaagga

SEQ ID NO: 2600928 - RNA, 19 nt, Homo sapiens
  misc_RNA (1)...(19): siRNA sense strand
gaauaaucagugaaggaau

SEQ ID NO: 2600929 - RNA, 19 nt, Homo sapiens
  misc_RNA (1)...(19): siRNA sense strand
cugaggacucugaaggaaa

SEQ ID NO: 2600930 - RNA, 19 nt, Homo sapiens
  misc_RNA (1)...(19): siRNA sense strand
ucacaagaaccaagauauu

SEQ ID NO: 2600931 - RNA, 19 nt, Homo sapiens
  misc_RNA (1)...(19): siRNA sense strand
uaucaagugcugaggaauu

SEQ ID NO: 2600932 - RNA, 19 nt, Homo sapiens
  misc_RNA (1)...(19): siRNA sense strand
aucaauaacugcagaaaca

SEQ ID NO: 2600933 - RNA, 19 nt, Homo sapiens
  misc_RNA (1)...(19): siRNA sense strand
gcgaggugacugagugcaa

SEQ ID NO: 2600934 - RNA, 19 nt, Homo sapiens
  misc_RNA (1)...(19): siRNA sense strand
agauaucggauguguacaa

SEQ ID NO: 2600935 - RNA, 19 nt, Homo sapiens
  misc_RNA (1)...(19): siRNA sense strand
agucaaacgugggaagaca

SEQ ID NO: 2600936 - RNA, 19 nt, Homo sapiens
  misc_RNA (1)...(19): siRNA sense strand
ugauaaaccuagggaaacu

SEQ ID NO: 2600937 - RNA, 19 nt, Homo sapiens
  misc_RNA (1)...(19): siRNA sense strand
ccaagauaucggaugugua

SEQ ID NO: 2600938 - RNA, 19 nt, Homo sapiens
  misc_RNA (1)...(19): siRNA sense strand
cuugaaggccucagacaga

SEQ ID NO: 2600939 - RNA, 19 nt, Homo sapiens
  misc_RNA (1)...(19): siRNA sense strand
gguucaaaaggaagaaauu

SEQ ID NO: 2600940 - RNA, 19 nt, Homo sapiens
  misc_RNA (1)...(19): siRNA sense strand
gaagaaagagagugagguc

SEQ ID NO: 2600941 - RNA, 19 nt, Homo sapiens
  misc_RNA (1)...(19): siRNA sense strand
ccaguaaagagguucaaaa

SEQ ID NO: 2600942 - RNA, 19 nt, Homo sapiens
  misc_RNA (1)...(19): siRNA sense strand
aaucgaggauggcggguca

SEQ ID NO: 2600943 - RNA, 19 nt, Homo sapiens
  misc_RNA (1)...(19): siRNA sense strand
agugcaacauagagacuca

SEQ ID NO: 2600944 - RNA, 19 nt, Homo sapiens
  misc_RNA (1)...(19): siRNA sense strand
ugcagaugacagagaagaa

SEQ ID NO: 2600945 - RNA, 19 nt, Homo sapiens
  misc_RNA (1)...(19): siRNA sense strand
agaugacagagaagaaaga

SEQ ID NO: 2600946 - RNA, 19 nt, Homo sapiens
  misc_RNA (1)...(19): siRNA sense strand
agaaagagagugagguccu

SEQ ID NO: 2600947 - RNA, 19 nt, Homo sapiens
  misc_RNA (1)...(19): siRNA sense strand
ugacgauccuguugggcca

SEQ ID NO: 2600948 - RNA, 19 nt, Homo sapiens
  misc_RNA (1)...(19): siRNA sense strand
ccugaaugugaacggacaa

SEQ ID NO: 2600949 - RNA, 19 nt, Homo sapiens
  misc_RNA (1)...(19): siRNA sense strand
uggcauggguguauggaag

SEQ ID NO: 2600950 - RNA, 19 nt, Homo sapiens
  misc_RNA (1)...(19): siRNA sense strand
gcucaaguccacugggaag

SEQ ID NO: 2600951 - RNA, 19 nt, Homo sapiens
  misc_RNA (1)...(19): siRNA sense strand
gcaaacaccucauggacug

SEQ ID NO: 2600952 - RNA, 19 nt, Homo sapiens
  misc_RNA (1)...(19): siRNA sense strand
ccagcaaaacugaguauau

SEQ ID NO: 2600953 - RNA, 19 nt, Homo sapiens
  misc_RNA (1)...(19): siRNA sense strand
augacagagaagaaagaga

SEQ ID NO: 2600954 - RNA, 19 nt, Homo sapiens
  misc_RNA (1)...(19): siRNA sense strand
acucaguuucuuaaggcua

SEQ ID NO: 2600955 - RNA, 19 nt, Homo sapiens
  misc_RNA (1)...(19): siRNA sense strand
agaaauacucgaagggaga

SEQ ID NO: 2600956 - RNA, 19 nt, Homo sapiens
  misc_RNA (1)...(19): siRNA sense strand
gcaaauaauaccagcgacu

SEQ ID NO: 2600957 - RNA, 19 nt, Homo sapiens
  misc_RNA (1)...(19): siRNA sense strand
gagaaauacucgaagggag

SEQ ID NO: 2600958 - RNA, 19 nt, Homo sapiens
  misc_RNA (1)...(19): siRNA sense strand
gcaagaaaguaucugaaga

SEQ ID NO: 2600959 - RNA, 19 nt, Homo sapiens
  misc_RNA (1)...(19): siRNA sense strand
guauaagaagccaggaaau

SEQ ID NO: 2600960 - RNA, 19 nt, Homo sapiens
  misc_RNA (1)...(19): siRNA sense strand
cauuaaaucucuauggagu

SEQ ID NO: 2600961 - RNA, 19 nt, Homo sapiens
  misc_RNA (1)...(19): siRNA sense strand
ccacuagaauugauuagaa

SEQ ID NO: 2600962 - RNA, 19 nt, Homo sapiens
  misc_RNA (1)...(19): siRNA sense strand
ugguauaagaagccaggaa

SEQ ID NO: 2600963 - RNA, 19 nt, Homo sapiens
  misc_RNA (1)...(19): siRNA sense strand
ugugauaaguccacuagaa

SEQ ID NO: 2600964 - RNA, 19 nt, Homo sapiens
  misc_RNA (1)...(19): siRNA sense strand
cagcaauguacugguauaa

SEQ ID NO: 2600965 - RNA, 19 nt, Homo sapiens
  misc_RNA (1)...(19): siRNA sense strand
gugauaaguccacuagaau

SEQ ID NO: 2600966 - RNA, 19 nt, Homo sapiens
  misc_RNA (1)...(19): siRNA sense strand
agagauuaucaaagugaca

SEQ ID NO: 2600967 - RNA, 19 nt, Homo sapiens
  misc_RNA (1)...(19): siRNA sense strand
ugauaaguccacuagaauu

SEQ ID NO: 2600968 - RNA, 19 nt, Homo sapiens
  misc_RNA (1)...(19): siRNA sense strand
ucgauuugucagcaagaaa

SEQ ID NO: 2600969 - RNA, 19 nt, Homo sapiens
  misc_RNA (1)...(19): siRNA sense strand
cggauuauuuucaggccua

SEQ ID NO: 2600970 - RNA, 19 nt, Homo sapiens
  misc_RNA (1)...(19): siRNA sense strand
ccuggauuauaaugaagaa

SEQ ID NO: 2600971 - RNA, 19 nt, Homo sapiens
  misc_RNA (1)...(19): siRNA sense strand
gugaagagggaggcaacaa

SEQ ID NO: 2600972 - RNA, 19 nt, Homo sapiens
  misc_RNA (1)...(19): siRNA sense strand
aggcaacaaacuaugguau

SEQ ID NO: 2600973 - RNA, 19 nt, Homo sapiens
  misc_RNA (1)...(19): siRNA sense strand
acguggaacugcaucgauu

SEQ ID NO: 2600974 - RNA, 19 nt, Homo sapiens
  misc_RNA (1)...(19): siRNA sense strand
cagcaagaaaguaucugaa

SEQ ID NO: 2600975 - RNA, 19 nt, Homo sapiens
  misc_RNA (1)...(19): siRNA sense strand
aauuagacuccaagcccaa

SEQ ID NO: 2600976 - RNA, 19 nt, Homo sapiens
  misc_RNA (1)...(19): siRNA sense strand
cuagaauugauuagaacca

SEQ ID NO: 2600977 - RNA, 19 nt, Homo sapiens
  misc_RNA (1)...(19): siRNA sense strand
agccaacauuuaugaucaa

SEQ ID NO: 2600978 - RNA, 19 nt, Homo sapiens
  misc_RNA (1)...(19): siRNA sense strand
gauaaguccacuagaauug

SEQ ID NO: 2600979 - RNA, 19 nt, Homo sapiens
  misc_RNA (1)...(19): siRNA sense strand
gacaaggggacaagagauu

SEQ ID NO: 2600980 - RNA, 19 nt, Homo sapiens
  misc_RNA (1)...(19): siRNA sense strand
agggaacauuggaugcauu

SEQ ID NO: 2600981 - RNA, 19 nt, Homo sapiens
  misc_RNA (1)...(19): siRNA sense strand
ucugaagaugguuggauuu

SEQ ID NO: 2600982 - RNA, 19 nt, Homo sapiens
  misc_RNA (1)...(19): siRNA sense strand
ccgaaacagagcagacaaa

SEQ ID NO: 2600983 - RNA, 19 nt, Homo sapiens
  misc_RNA (1)...(19): siRNA sense strand
aggaagaacuuguugcaga

SEQ ID NO: 2600984 - RNA, 19 nt, Homo sapiens
  misc_RNA (1)...(19): siRNA sense strand
guuacaaaaugcagaagaa

SEQ ID NO: 2600985 - RNA, 19 nt, Homo sapiens
  misc_RNA (1)...(19): siRNA sense strand
acaaaaugcagaagaagaa

SEQ ID NO: 2600986 - RNA, 19 nt, Homo sapiens
  misc_RNA (1)...(19): siRNA sense strand
aggaauacugcuacgacaa

SEQ ID NO: 2600987 - RNA, 19 nt, Homo sapiens
  misc_RNA (1)...(19): siRNA sense strand
caauaaacucaucaggaga

SEQ ID NO: 2600988 - RNA, 19 nt, Homo sapiens
  misc_RNA (1)...(19): siRNA sense strand
cugaaaugguauaaggaag

SEQ ID NO: 2600989 - RNA, 19 nt, Homo sapiens
  misc_RNA (1)...(19): siRNA sense strand
ccaggaaggaacugcagaa

SEQ ID NO: 2600990 - RNA, 19 nt, Homo sapiens
  misc_RNA (1)...(19): siRNA sense strand
aaucggaaggugaggaaaa

SEQ ID NO: 2600991 - RNA, 19 nt, Homo sapiens
  misc_RNA (1)...(19): siRNA sense strand
cggaaggugaggaaaauua

SEQ ID NO: 2600992 - RNA, 19 nt, Homo sapiens
  misc_RNA (1)...(19): siRNA sense strand
cgaaucggaaggugaggaa

SEQ ID NO: 2600993 - RNA, 19 nt, Homo sapiens
  misc_RNA (1)...(19): siRNA sense strand
uggagaaggcauuugaaga

SEQ ID NO: 2600994 - RNA, 19 nt, Homo sapiens
  misc_RNA (1)...(19): siRNA sense strand
gcgcauagaugauggugac

SEQ ID NO: 2600995 - RNA, 19 nt, Homo sapiens
  misc_RNA (1)...(19): siRNA sense strand
caggaauacugcuacgaca

SEQ ID NO: 2600996 - RNA, 19 nt, Homo sapiens
  misc_RNA (1)...(19): siRNA sense strand
gcaucagaagccagugcua

SEQ ID NO: 2600997 - RNA, 19 nt, Homo sapiens
  misc_RNA (1)...(19): siRNA sense strand
gcauagaugauggugacaa

SEQ ID NO: 2600998 - RNA, 19 nt, Homo sapiens
  misc_RNA (1)...(19): siRNA sense strand
aguauuuggagaaggcauu

SEQ ID NO: 2600999 - RNA, 19 nt, Homo sapiens
  misc_RNA (1)...(19): siRNA sense strand
gagcagacaaaguuggcga

SEQ ID NO: 2601000 - RNA, 19 nt, Homo sapiens
  misc_RNA (1)...(19): siRNA sense strand
ccgacagcuuagucaaaga

SEQ ID NO: 2601001 - RNA, 19 nt, Homo sapiens
  misc_RNA (1)...(19): siRNA sense strand
aggcucaagauuagauuau

SEQ ID NO: 2601002 - RNA, 19 nt, Homo sapiens
  misc_RNA (1)...(19): siRNA sense strand
cuucuguggacauguauaa

SEQ ID NO: 2601003 - RNA, 19 nt, Homo sapiens
  misc_RNA (1)...(19): siRNA sense strand
uuaccucgucuuugagaaa

SEQ ID NO: 2601004 - RNA, 19 nt, Homo sapiens
  misc_RNA (1)...(19): siRNA sense strand
gaagaaauuuguugagugg

SEQ ID NO: 2601005 - RNA, 19 nt, Homo sapiens
  misc_RNA (1)...(19): siRNA sense strand
aguggaacaagaaggaaga

SEQ ID NO: 2601006 - RNA, 19 nt, Homo sapiens
  misc_RNA (1)...(19): siRNA sense strand
cugaagcaccugaagcaau

SEQ ID NO: 2601007 - RNA, 19 nt, Homo sapiens
  misc_RNA (1)...(19): siRNA sense strand
acugaaaugguauaaggaa

SEQ ID NO: 2601008 - RNA, 19 nt, Homo sapiens
  misc_RNA (1)...(19): siRNA sense strand
gcuuagucaaagaaggcau

SEQ ID NO: 2601009 - RNA, 19 nt, Homo sapiens
  misc_RNA (1)...(19): siRNA sense strand
aagcugauguucugagcga

SEQ ID NO: 2601010 - RNA, 19 nt, Homo sapiens
  misc_RNA (1)...(19): siRNA sense strand
gcagaagaagaauccgaau

SEQ ID NO: 2601011 - RNA, 19 nt, Homo sapiens
  misc_RNA (1)...(19): siRNA sense strand
agguggugcuuuaugucaa

SEQ ID NO: 2601012 - RNA, 19 nt, Homo sapiens
  misc_RNA (1)...(19): siRNA sense strand
cucuacaggcucaagauua

SEQ ID NO: 2601013 - RNA, 19 nt, Homo sapiens
  misc_RNA (1)...(19): siRNA sense strand
acagacagaguguggauca

SEQ ID NO: 2601014 - RNA, 19 nt, Homo sapiens
  misc_RNA (1)...(19): siRNA sense strand
ggaagaacuuguugcagag

SEQ ID NO: 2601015 - RNA, 19 nt, Homo sapiens
  misc_RNA (1)...(19): siRNA sense strand
gcuuaaugaggcuggugau

SEQ ID NO: 2601016 - RNA, 19 nt, Homo sapiens
  misc_RNA (1)...(19): siRNA sense strand
gaguggaacaagaaggaag

SEQ ID NO: 2601017 - RNA, 19 nt, Homo sapiens
  misc_RNA (1)...(19): siRNA sense strand
acaugagcaucaagggcau

SEQ ID NO: 2601018 - RNA, 19 nt, Homo sapiens
  misc_RNA (1)...(19): siRNA sense strand
agcaggaggaggaagacaa

SEQ ID NO: 2601019 - RNA, 19 nt, Homo sapiens
  misc_RNA (1)...(19): siRNA sense strand
uguuggaggcccugugcaa

SEQ ID NO: 2601020 - RNA, 19 nt, Homo sapiens
  misc_RNA (1)...(19): siRNA sense strand
aggaggaggaagacaacga

SEQ ID NO: 2601021 - RNA, 19 nt, Homo sapiens
  misc_RNA (1)...(19): siRNA sense strand
aggaagacaacgacgagga

SEQ ID NO: 2601022 - RNA, 19 nt, Homo sapiens
  misc_RNA (1)...(19): siRNA sense strand
uaggugaagccguggacau

SEQ ID NO: 2601023 - RNA, 19 nt, Homo sapiens
  misc_RNA (1)...(19): siRNA sense strand
cauugaaggaauaaagguu

SEQ ID NO: 2601024 - RNA, 19 nt, Homo sapiens
  misc_RNA (1)...(19): siRNA sense strand
auaaagguuucgaaggcau

SEQ ID NO: 2601025 - RNA, 19 nt, Homo sapiens
  misc_RNA (1)...(19): siRNA sense strand
gaauaaagguuucgaaggc

SEQ ID NO: 2601026 - RNA, 19 nt, Homo sapiens
  misc_RNA (1)...(19): siRNA sense strand
gcugauaggaauaccaacu

SEQ ID NO: 2601027 - RNA, 19 nt, Homo sapiens
  misc_RNA (1)...(19): siRNA sense strand
cugacaaaguugaagagga

SEQ ID NO: 2601028 - RNA, 19 nt, Homo sapiens
  misc_RNA (1)...(19): siRNA sense strand
ucccaaggaaggagaggaa

SEQ ID NO: 2601029 - RNA, 19 nt, Homo sapiens
  misc_RNA (1)...(19): siRNA sense strand
ggaagaggagagaggagca

SEQ ID NO: 2601030 - RNA, 19 nt, Homo sapiens
  misc_RNA (1)...(19): siRNA sense strand
gagcagaugcccagggaag

SEQ ID NO: 2601031 - RNA, 19 nt, Homo sapiens
  misc_RNA (1)...(19): siRNA sense strand
acuucaaagggcugacaaa

SEQ ID NO: 2601032 - RNA, 19 nt, Homo sapiens
  misc_RNA (1)...(19): siRNA sense strand
ccuucagggcaauggagaa

SEQ ID NO: 2601033 - RNA, 19 nt, Homo sapiens
  misc_RNA (1)...(19): siRNA sense strand
gggcaauggagaagcugca

SEQ ID NO: 2601034 - RNA, 19 nt, Homo sapiens
  misc_RNA (1)...(19): siRNA sense strand
aggaaggagaggaagagga

SEQ ID NO: 2601035 - RNA, 19 nt, Homo sapiens
  misc_RNA (1)...(19): siRNA sense strand
guaucagggccgaagacuu

SEQ ID NO: 2601036 - RNA, 19 nt, Homo sapiens
  misc_RNA (1)...(19): siRNA sense strand
ccagagaaccaguuggaag

SEQ ID NO: 2601037 - RNA, 19 nt, Homo sapiens
  misc_RNA (1)...(19): siRNA sense strand
cacuacggcuccagggaca

SEQ ID NO: 2601038 - RNA, 19 nt, Homo sapiens
  misc_RNA (1)...(19): siRNA sense strand
gagaggaagaggagagagg

SEQ ID NO: 2601039 - RNA, 19 nt, Homo sapiens
  misc_RNA (1)...(19): siRNA sense strand
cgacaagaaaccaggggaa

SEQ ID NO: 2601040 - RNA, 19 nt, Homo sapiens
  misc_RNA (1)...(19): siRNA sense strand
aauuaagaggcaugcuaaa

SEQ ID NO: 2601041 - RNA, 19 nt, Homo sapiens
  misc_RNA (1)...(19): siRNA sense strand
aaucaagcacagacgacaa

SEQ ID NO: 2601042 - RNA, 19 nt, Homo sapiens
  misc_RNA (1)...(19): siRNA sense strand
gggccagaagcuagcugaa

SEQ ID NO: 2601043 - RNA, 19 nt, Homo sapiens
  misc_RNA (1)...(19): siRNA sense strand
uuacgaggguucuugggaa

SEQ ID NO: 2601044 - RNA, 19 nt, Homo sapiens
  misc_RNA (1)...(19): siRNA sense strand
uacgaggguucuugggaau

SEQ ID NO: 2601045 - RNA, 19 nt, Homo sapiens
  misc_RNA (1)...(19): siRNA sense strand
cauuaugacugauggugua

SEQ ID NO: 2601046 - RNA, 19 nt, Homo sapiens
  misc_RNA (1)...(19): siRNA sense strand
caaaggacccucuugauua

SEQ ID NO: 2601047 - RNA, 19 nt, Homo sapiens
  misc_RNA (1)...(19): siRNA sense strand
gaaucaguguguugggcau

SEQ ID NO: 2601048 - RNA, 19 nt, Homo sapiens
  misc_RNA (1)...(19): siRNA sense strand
ccaaaggacccucuugauu

SEQ ID NO: 2601049 - RNA, 19 nt, Homo sapiens
  misc_RNA (1)...(19): siRNA sense strand
gaacuugaucguuggggaa

SEQ ID NO: 2601050 - RNA, 19 nt, Homo sapiens
  misc_RNA (1)...(19): siRNA sense strand
uuacgaggguucuugggaa

SEQ ID NO: 2601051 - RNA, 19 nt, Homo sapiens
  misc_RNA (1)...(19): siRNA sense strand
uacgaggguucuugggaau

SEQ ID NO: 2601052 - RNA, 19 nt, Homo sapiens
  misc_RNA (1)...(19): siRNA sense strand
cuugauuacagcacaggaa

SEQ ID NO: 2601053 - RNA, 19 nt, Homo sapiens
  misc_RNA (1)...(19): siRNA sense strand
uuacgaggguucuugggaa

SEQ ID NO: 2601054 - RNA, 19 nt, Homo sapiens
  misc_RNA (1)...(19): siRNA sense strand
uacgaggguucuugggaau

SEQ ID NO: 2601055 - RNA, 19 nt, Homo sapiens
  misc_RNA (1)...(19): siRNA sense strand
uuacgaggguucuugggaa

SEQ ID NO: 2601056 - RNA, 19 nt, Homo sapiens
  misc_RNA (1)...(19): siRNA sense strand
uacgaggguucuugggaau

SEQ ID NO: 2601057 - RNA, 19 nt, Homo sapiens
  misc_RNA (1)...(19): siRNA sense strand
gccagauagagcaaguaaa

SEQ ID NO: 2601058 - RNA, 19 nt, Homo sapiens
  misc_RNA (1)...(19): siRNA sense strand
cagcaaaagcucaagaaga

SEQ ID NO: 2601059 - RNA, 19 nt, Homo sapiens
  misc_RNA (1)...(19): siRNA sense strand
gcaaagaguaagacggcag

SEQ ID NO: 2601060 - RNA, 19 nt, Homo sapiens
  misc_RNA (1)...(19): siRNA sense strand
gcaaguuucaggcgcacaa

SEQ ID NO: 2601061 - RNA, 19 nt, Homo sapiens
  misc_RNA (1)...(19): siRNA sense strand
gaguaagacggcagcggca

SEQ ID NO: 2601062 - RNA, 19 nt, Homo sapiens
  misc_RNA (1)...(19): siRNA sense strand
ccacaugucacuuagccaa

SEQ ID NO: 2601063 - RNA, 19 nt, Homo sapiens
  misc_RNA (1)...(19): siRNA sense strand
gcaacgucuucgagggcuu

SEQ ID NO: 2601064 - RNA, 19 nt, Homo sapiens
  misc_RNA (1)...(19): siRNA sense strand
caacaucucuucuggguca

SEQ ID NO: 2601065 - RNA, 19 nt, Homo sapiens
  misc_RNA (1)...(19): siRNA sense strand
ugacagucccacagaccaa

SEQ ID NO: 2601066 - RNA, 19 nt, Homo sapiens
  misc_RNA (1)...(19): siRNA sense strand
auauuaugagggagaagaa

SEQ ID NO: 2601067 - RNA, 19 nt, Homo sapiens
  misc_RNA (1)...(19): siRNA sense strand
cucuauucuuuguggcuua

SEQ ID NO: 2601068 - RNA, 19 nt, Homo sapiens
  misc_RNA (1)...(19): siRNA sense strand
gggcaaucagcuuggaacu

SEQ ID NO: 2601069 - RNA, 19 nt, Homo sapiens
  misc_RNA (1)...(19): siRNA sense strand
acacaaaucuccuggcuug

SEQ ID NO: 2601070 - RNA, 19 nt, Homo sapiens
  misc_RNA (1)...(19): siRNA sense strand
ugguguacaugcuggccua

SEQ ID NO: 2601071 - RNA, 19 nt, Homo sapiens
  misc_RNA (1)...(19): siRNA sense strand
ggaaggagagcguggagcu

SEQ ID NO: 2601072 - RNA, 19 nt, Homo sapiens
  misc_RNA (1)...(19): siRNA sense strand
aguacagcaucauuagcaa

SEQ ID NO: 2601073 - RNA, 19 nt, Homo sapiens
  misc_RNA (1)...(19): siRNA sense strand
agacuaugguccuaaggca

SEQ ID NO: 2601074 - RNA, 19 nt, Homo sapiens
  misc_RNA (1)...(19): siRNA sense strand
ccaacaaggaugaagcuga

SEQ ID NO: 2601075 - RNA, 19 nt, Homo sapiens
  misc_RNA (1)...(19): siRNA sense strand
ucaaaacagucgagcggaa

SEQ ID NO: 2601076 - RNA, 19 nt, Homo sapiens
  misc_RNA (1)...(19): siRNA sense strand
cggugaagcuggaggagag

SEQ ID NO: 2601077 - RNA, 19 nt, Homo sapiens
  misc_RNA (1)...(19): siRNA sense strand
gagagagcaccaaaggcua

SEQ ID NO: 2601078 - RNA, 19 nt, Homo sapiens
  misc_RNA (1)...(19): siRNA sense strand
uggcacagcauaugcggua

SEQ ID NO: 2601079 - RNA, 19 nt, Homo sapiens
  misc_RNA (1)...(19): siRNA sense strand
gcagggacaaccaggguga

SEQ ID NO: 2601080 - RNA, 19 nt, Homo sapiens
  misc_RNA (1)...(19): siRNA sense strand
gugaaaagggucaagcaau

SEQ ID NO: 2601081 - RNA, 19 nt, Homo sapiens
  misc_RNA (1)...(19): siRNA sense strand
gaagaugauuauaucgcca

SEQ ID NO: 2601082 - RNA, 19 nt, Homo sapiens
  misc_RNA (1)...(19): siRNA sense strand
caggaaagcaggugggacc

SEQ ID NO: 2601083 - RNA, 19 nt, Homo sapiens
  misc_RNA (1)...(19): siRNA sense strand
gcggaauguggaagaugau

SEQ ID NO: 2601084 - RNA, 19 nt, Homo sapiens
  misc_RNA (1)...(19): siRNA sense strand
ggagagagcaccaaaggcu

SEQ ID NO: 2601085 - RNA, 19 nt, Homo sapiens
  misc_RNA (1)...(19): siRNA sense strand
ccggagaagaggaagcagu

SEQ ID NO: 2601086 - RNA, 19 nt, Homo sapiens
  misc_RNA (1)...(19): siRNA sense strand
ucgucuacuaugugggaga

SEQ ID NO: 2601087 - RNA, 19 nt, Homo sapiens
  misc_RNA (1)...(19): siRNA sense strand
acagacugccggugaccaa

SEQ ID NO: 2601088 - RNA, 19 nt, Homo sapiens
  misc_RNA (1)...(19): siRNA sense strand
cuacugaaaugaauggcaa

SEQ ID NO: 2601089 - RNA, 19 nt, Homo sapiens
  misc_RNA (1)...(19): siRNA sense strand
gaaagaagauucaggagug

SEQ ID NO: 2601090 - RNA, 19 nt, Homo sapiens
  misc_RNA (1)...(19): siRNA sense strand
augaagacaacaagcaauu

SEQ ID NO: 2601091 - RNA, 19 nt, Homo sapiens
  misc_RNA (1)...(19): siRNA sense strand
agaaagaagauucaggagu

SEQ ID NO: 2601092 - RNA, 19 nt, Homo sapiens
  misc_RNA (1)...(19): siRNA sense strand
cuaugaagacaacaagcaa

SEQ ID NO: 2601093 - RNA, 19 nt, Homo sapiens
  misc_RNA (1)...(19): siRNA sense strand
aaccauaaauucaacguga

SEQ ID NO: 2601094 - RNA, 19 nt, Homo sapiens
  misc_RNA (1)...(19): siRNA sense strand
aggaaaugauccagcgcua

SEQ ID NO: 2601095 - RNA, 19 nt, Homo sapiens
  misc_RNA (1)...(19): siRNA sense strand
cguuugaacugguggguga

SEQ ID NO: 2601096 - RNA, 19 nt, Homo sapiens
  misc_RNA (1)...(19): siRNA sense strand
ccagcagaguccagggcaa

SEQ ID NO: 2601097 - RNA, 19 nt, Homo sapiens
  misc_RNA (1)...(19): siRNA sense strand
gcugaaaguacuugaggau

SEQ ID NO: 2601098 - RNA, 19 nt, Homo sapiens
  misc_RNA (1)...(19): siRNA sense strand
ccauagucgucguggcaga

SEQ ID NO: 2601099 - RNA, 19 nt, Homo sapiens
  misc_RNA (1)...(19): siRNA sense strand
aggagaagucaaagcgaga

SEQ ID NO: 2601100 - RNA, 19 nt, Homo sapiens
  misc_RNA (1)...(19): siRNA sense strand
gggacuugaugcugcggaa

SEQ ID NO: 2601101 - RNA, 19 nt, Homo sapiens
  misc_RNA (1)...(19): siRNA sense strand
cuggagaagaagaagaaaa

SEQ ID NO: 2601102 - RNA, 19 nt, Homo sapiens
  misc_RNA (1)...(19): siRNA sense strand
aggagaauaccaaggaaca

SEQ ID NO: 2601103 - RNA, 19 nt, Homo sapiens
  misc_RNA (1)...(19): siRNA sense strand
agacacuggagaagaagaa

SEQ ID NO: 2601104 - RNA, 19 nt, Homo sapiens
  misc_RNA (1)...(19): siRNA sense strand
ugguauacacagaagauga

SEQ ID NO: 2601105 - RNA, 19 nt, Homo sapiens
  misc_RNA (1)...(19): siRNA sense strand
cggcggaaggagaagucaa

SEQ ID NO: 2601106 - RNA, 19 nt, Homo sapiens
  misc_RNA (1)...(19): siRNA sense strand
cgggagaaggacaagaaga

SEQ ID NO: 2601107 - RNA, 19 nt, Homo sapiens
  misc_RNA (1)...(19): siRNA sense strand
gaugaauggcagaaggagu

SEQ ID NO: 2601108 - RNA, 19 nt, Homo sapiens
  misc_RNA (1)...(19): siRNA sense strand
uggagaagggaguugagaa

SEQ ID NO: 2601109 - RNA, 19 nt, Homo sapiens
  misc_RNA (1)...(19): siRNA sense strand
auggacacccugagacaaa

SEQ ID NO: 2601110 - RNA, 19 nt, Homo sapiens
  misc_RNA (1)...(19): siRNA sense strand
aggcagagaggaagaucau

SEQ ID NO: 2601111 - RNA, 19 nt, Homo sapiens
  misc_RNA (1)...(19): siRNA sense strand
gagaaggaagcguugaaaa

SEQ ID NO: 2601112 - RNA, 19 nt, Homo sapiens
  misc_RNA (1)...(19): siRNA sense strand
agggaagaacugaggagga

SEQ ID NO: 2601113 - RNA, 19 nt, Homo sapiens
  misc_RNA (1)...(19): siRNA sense strand
gaauaaagagucagggcug

SEQ ID NO: 2601114 - RNA, 19 nt, Homo sapiens
  misc_RNA (1)...(19): siRNA sense strand
ggcaaagaugauagugaca

SEQ ID NO: 2601115 - RNA, 19 nt, Homo sapiens
  misc_RNA (1)...(19): siRNA sense strand
gagaucgggagaaggacaa

SEQ ID NO: 2601116 - RNA, 19 nt, Homo sapiens
  misc_RNA (1)...(19): siRNA sense strand
gaaggaaagaauugggaug

SEQ ID NO: 2601117 - RNA, 19 nt, Homo sapiens
  misc_RNA (1)...(19): siRNA sense strand
acagcagaauaaagaguca

SEQ ID NO: 2601118 - RNA, 19 nt, Homo sapiens
  misc_RNA (1)...(19): siRNA sense strand
aguauaagcugcugcccuu

SEQ ID NO: 2601119 - RNA, 19 nt, Homo sapiens
  misc_RNA (1)...(19): siRNA sense strand
cuguauacaaugaagacuu

SEQ ID NO: 2601120 - RNA, 19 nt, Homo sapiens
  misc_RNA (1)...(19): siRNA sense strand
gagcagaaggagaauacca

SEQ ID NO: 2601121 - RNA, 19 nt, Homo sapiens
  misc_RNA (1)...(19): siRNA sense strand
cugaagagcuggaagggug

SEQ ID NO: 2601122 - RNA, 19 nt, Homo sapiens
  misc_RNA (1)...(19): siRNA sense strand
cagcaaggguucaaagccu

SEQ ID NO: 2601123 - RNA, 19 nt, Homo sapiens
  misc_RNA (1)...(19): siRNA sense strand
gaacagaagcagaaggagg

SEQ ID NO: 2601124 - RNA, 19 nt, Homo sapiens
  misc_RNA (1)...(19): siRNA sense strand
acacagaagaugaauggca

SEQ ID NO: 2601125 - RNA, 19 nt, Homo sapiens
  misc_RNA (1)...(19): siRNA sense strand
gggcaaagaugauagugac

SEQ ID NO: 2601126 - RNA, 19 nt, Homo sapiens
  misc_RNA (1)...(19): siRNA sense strand
ccgcagcuucauagagaga

SEQ ID NO: 2601127 - RNA, 19 nt, Homo sapiens
  misc_RNA (1)...(19): siRNA sense strand
uggcagaaggaguggaaug

SEQ ID NO: 2601128 - RNA, 19 nt, Homo sapiens
  misc_RNA (1)...(19): siRNA sense strand
accaguaucaggaggaaau

SEQ ID NO: 2601129 - RNA, 19 nt, Homo sapiens
  misc_RNA (1)...(19): siRNA sense strand
agaagcagaaggaggcaga

SEQ ID NO: 2601130 - RNA, 19 nt, Homo sapiens
  misc_RNA (1)...(19): siRNA sense strand
agucaaagcgagaucggga

SEQ ID NO: 2601131 - RNA, 19 nt, Homo sapiens
  misc_RNA (1)...(19): siRNA sense strand
cgagaucgggagaaggaca

SEQ ID NO: 2601132 - RNA, 19 nt, Homo sapiens
  misc_RNA (1)...(19): siRNA sense strand
gaacugaggaggagggagc

SEQ ID NO: 2601133 - RNA, 19 nt, Homo sapiens
  misc_RNA (1)...(19): siRNA sense strand
acacuggagaagaagaaga

SEQ ID NO: 2601134 - RNA, 19 nt, Homo sapiens
  misc_RNA (1)...(19): siRNA sense strand
cagcagaguccagggcaau

SEQ ID NO: 2601135 - RNA, 19 nt, Homo sapiens
  misc_RNA (1)...(19): siRNA sense strand
cuauggacacccugagaca

SEQ ID NO: 2601136 - RNA, 19 nt, Homo sapiens
  misc_RNA (1)...(19): siRNA sense strand
cacuggagaagaagaagaa

SEQ ID NO: 2601137 - RNA, 19 nt, Homo sapiens
  misc_RNA (1)...(19): siRNA sense strand
agcagacacagcagaauaa

SEQ ID NO: 2601138 - RNA, 19 nt, Homo sapiens
  misc_RNA (1)...(19): siRNA sense strand
cagaagaugaauggcagaa

SEQ ID NO: 2601139 - RNA, 19 nt, Homo sapiens
  misc_RNA (1)...(19): siRNA sense strand
aagcagcggcacugagaca

SEQ ID NO: 2601140 - RNA, 19 nt, Homo sapiens
  misc_RNA (1)...(19): siRNA sense strand
gggaagaacugaggaggag

SEQ ID NO: 2601141 - RNA, 19 nt, Homo sapiens
  misc_RNA (1)...(19): siRNA sense strand
uggcugauuccuauagcaa

SEQ ID NO: 2601142 - RNA, 19 nt, Homo sapiens
  misc_RNA (1)...(19): siRNA sense strand
ccauauuauugcaggaaga

SEQ ID NO: 2601143 - RNA, 19 nt, Homo sapiens
  misc_RNA (1)...(19): siRNA sense strand
caaacaacuuauaagggaa

SEQ ID NO: 2601144 - RNA, 19 nt, Homo sapiens
  misc_RNA (1)...(19): siRNA sense strand
uaugaagagcugaaggaaa

SEQ ID NO: 2601145 - RNA, 19 nt, Homo sapiens
  misc_RNA (1)...(19): siRNA sense strand
gagaauaagcugaaggaug

SEQ ID NO: 2601146 - RNA, 19 nt, Homo sapiens
  misc_RNA (1)...(19): siRNA sense strand
ccaggauauuacacagaaa

SEQ ID NO: 2601147 - RNA, 19 nt, Homo sapiens
  misc_RNA (1)...(19): siRNA sense strand
auguaaugcuugaagauga

SEQ ID NO: 2601148 - RNA, 19 nt, Homo sapiens
  misc_RNA (1)...(19): siRNA sense strand
uuacuuaagacuaggagaa

SEQ ID NO: 2601149 - RNA, 19 nt, Homo sapiens
  misc_RNA (1)...(19): siRNA sense strand
caggaagauuaaugguuau

SEQ ID NO: 2601150 - RNA, 19 nt, Homo sapiens
  misc_RNA (1)...(19): siRNA sense strand
cguuaugccuagcaaacaa

SEQ ID NO: 2601151 - RNA, 19 nt, Homo sapiens
  misc_RNA (1)...(19): siRNA sense strand
acacaaaaggaauggcuaa

SEQ ID NO: 2601152 - RNA, 19 nt, Homo sapiens
  misc_RNA (1)...(19): siRNA sense strand
ggaacagaagaucggcaaa

SEQ ID NO: 2601153 - RNA, 19 nt, Homo sapiens
  misc_RNA (1)...(19): siRNA sense strand
aaaugagaugccugagaaa

SEQ ID NO: 2601154 - RNA, 19 nt, Homo sapiens
  misc_RNA (1)...(19): siRNA sense strand
gcuauguucuggaaggaga

SEQ ID NO: 2601155 - RNA, 19 nt, Homo sapiens
  misc_RNA (1)...(19): siRNA sense strand
aguauuagcauuuggacuu

SEQ ID NO: 2601156 - RNA, 19 nt, Homo sapiens
  misc_RNA (1)...(19): siRNA sense strand
augccaugguccaggauau

SEQ ID NO: 2601157 - RNA, 19 nt, Homo sapiens
  misc_RNA (1)...(19): siRNA sense strand
agacaauguucuaguuacu

SEQ ID NO: 2601158 - RNA, 19 nt, Homo sapiens
  misc_RNA (1)...(19): siRNA sense strand
agaaggaacuuacugggua

SEQ ID NO: 2601159 - RNA, 19 nt, Homo sapiens
  misc_RNA (1)...(19): siRNA sense strand
cauacaaagggacggagaa

SEQ ID NO: 2601160 - RNA, 19 nt, Homo sapiens
  misc_RNA (1)...(19): siRNA sense strand
uguucuggaaggagacaaa

SEQ ID NO: 2601161 - RNA, 19 nt, Homo sapiens
  misc_RNA (1)...(19): siRNA sense strand
acaaacaacuuauaaggga

SEQ ID NO: 2601162 - RNA, 19 nt, Homo sapiens
  misc_RNA (1)...(19): siRNA sense strand
auacaaagggacggagaau

SEQ ID NO: 2601163 - RNA, 19 nt, Homo sapiens
  misc_RNA (1)...(19): siRNA sense strand
ccagaggaguauuacccaa

SEQ ID NO: 2601164 - RNA, 19 nt, Homo sapiens
  misc_RNA (1)...(19): siRNA sense strand
gauccagaagauagaguca

SEQ ID NO: 2601165 - RNA, 19 nt, Homo sapiens
  misc_RNA (1)...(19): siRNA sense strand
gcaccauauuauugcagga

SEQ ID NO: 2601166 - RNA, 19 nt, Homo sapiens
  misc_RNA (1)...(19): siRNA sense strand
caguaguguugaugaguac

SEQ ID NO: 2601167 - RNA, 19 nt, Homo sapiens
  misc_RNA (1)...(19): siRNA sense strand
cuuaacugccaucaagaaa

SEQ ID NO: 2601168 - RNA, 19 nt, Homo sapiens
  misc_RNA (1)...(19): siRNA sense strand
cuuaagacuaggagaauuc

SEQ ID NO: 2601169 - RNA, 19 nt, Homo sapiens
  misc_RNA (1)...(19): siRNA sense strand
uguaaugcuugaagaugau

SEQ ID NO: 2601170 - RNA, 19 nt, Homo sapiens
  misc_RNA (1)...(19): siRNA sense strand
acuuaagacuaggagaauu

SEQ ID NO: 2601171 - RNA, 19 nt, Homo sapiens
  misc_RNA (1)...(19): siRNA sense strand
caaugauccagaagauaga

SEQ ID NO: 2601172 - RNA, 19 nt, Homo sapiens
  misc_RNA (1)...(19): siRNA sense strand
caccaaaacacaaaaggaa

SEQ ID NO: 2601173 - RNA, 19 nt, Homo sapiens
  misc_RNA (1)...(19): siRNA sense strand
agaugauguucgauguuca

SEQ ID NO: 2601174 - RNA, 19 nt, Homo sapiens
  misc_RNA (1)...(19): siRNA sense strand
uggaacagaagaucggcaa

SEQ ID NO: 2601175 - RNA, 19 nt, Homo sapiens
  misc_RNA (1)...(19): siRNA sense strand
cuuugaaaugucaggugua

SEQ ID NO: 2601176 - RNA, 19 nt, Homo sapiens
  misc_RNA (1)...(19): siRNA sense strand
cggagaauaagcugaagga

SEQ ID NO: 2601177 - RNA, 19 nt, Homo sapiens
  misc_RNA (1)...(19): siRNA sense strand
ggggaaaacguuaugccua

SEQ ID NO: 2601178 - RNA, 19 nt, Homo sapiens
  misc_RNA (1)...(19): siRNA sense strand
agcaaacaaaggagacaau

SEQ ID NO: 2601179 - RNA, 19 nt, Homo sapiens
  misc_RNA (1)...(19): siRNA sense strand
aagacuaggagaauucaaa

SEQ ID NO: 2601180 - RNA, 19 nt, Homo sapiens
  misc_RNA (1)...(19): siRNA sense strand
gaguauuagcauuuggacu

SEQ ID NO: 2601181 - RNA, 19 nt, Homo sapiens
  misc_RNA (1)...(19): siRNA sense strand
agaaauuugcgcaccauau

SEQ ID NO: 2601182 - RNA, 19 nt, Homo sapiens
  misc_RNA (1)...(19): siRNA sense strand
gaaauuacaaugauccaga

SEQ ID NO: 2601183 - RNA, 19 nt, Homo sapiens
  misc_RNA (1)...(19): siRNA sense strand
guaucuuacaauuggacuu

SEQ ID NO: 2601184 - RNA, 19 nt, Homo sapiens
  misc_RNA (1)...(19): siRNA sense strand
gggagaugaaugugcgaaa

SEQ ID NO: 2601185 - RNA, 19 nt, Homo sapiens
  misc_RNA (1)...(19): siRNA sense strand
cagaaguagaagaggguga

SEQ ID NO: 2601186 - RNA, 19 nt, Homo sapiens
  misc_RNA (1)...(19): siRNA sense strand
gaaaagaguuuguugggaa

SEQ ID NO: 2601187 - RNA, 19 nt, Homo sapiens
  misc_RNA (1)...(19): siRNA sense strand
cggaacacgaagaaguaaa

SEQ ID NO: 2601188 - RNA, 19 nt, Homo sapiens
  misc_RNA (1)...(19): siRNA sense strand
ccagauguggugagggcua

SEQ ID NO: 2601189 - RNA, 19 nt, Homo sapiens
  misc_RNA (1)...(19): siRNA sense strand
aguucagaugcuagagaua

SEQ ID NO: 2601190 - RNA, 19 nt, Homo sapiens
  misc_RNA (1)...(19): siRNA sense strand
caggaucguuggugggaca

SEQ ID NO: 2601191 - RNA, 19 nt, Homo sapiens
  misc_RNA (1)...(19): siRNA sense strand
cagaaaugagccagagacu

SEQ ID NO: 2601192 - RNA, 19 nt, Homo sapiens
  misc_RNA (1)...(19): siRNA sense strand
cugacaaacuauaugcuga

SEQ ID NO: 2601193 - RNA, 19 nt, Homo sapiens
  misc_RNA (1)...(19): siRNA sense strand
guggugagggcuaggaaaa

SEQ ID NO: 2601194 - RNA, 19 nt, Homo sapiens
  misc_RNA (1)...(19): siRNA sense strand
cuguucauuaugugagaua

SEQ ID NO: 2601195 - RNA, 19 nt, Homo sapiens
  misc_RNA (1)...(19): siRNA sense strand
aggauuuggagcacugaaa

SEQ ID NO: 2601196 - RNA, 19 nt, Homo sapiens
  misc_RNA (1)...(19): siRNA sense strand
ggacagaaguagaagaggg

SEQ ID NO: 2601197 - RNA, 19 nt, Homo sapiens
  misc_RNA (1)...(19): siRNA sense strand
ccuuuggaguaacaauaaa

SEQ ID NO: 2601198 - RNA, 19 nt, Homo sapiens
  misc_RNA (1)...(19): siRNA sense strand
gggugacucuggaggacca

SEQ ID NO: 2601199 - RNA, 19 nt, Homo sapiens
  misc_RNA (1)...(19): siRNA sense strand
acgaagaaguaaaacucua

SEQ ID NO: 2601200 - RNA, 19 nt, Homo sapiens
  misc_RNA (1)...(19): siRNA sense strand
cguuggugggacagaagua

SEQ ID NO: 2601201 - RNA, 19 nt, Homo sapiens
  misc_RNA (1)...(19): siRNA sense strand
ucaaaaucaucuucgacaa

SEQ ID NO: 2601202 - RNA, 19 nt, Homo sapiens
  misc_RNA (1)...(19): siRNA sense strand
gaggaacggagguggacau

SEQ ID NO: 2601203 - RNA, 19 nt, Homo sapiens
  misc_RNA (1)...(19): siRNA sense strand
ggaacagaugagugaagca

SEQ ID NO: 2601204 - RNA, 19 nt, Homo sapiens
  misc_RNA (1)...(19): siRNA sense strand
caaaguagccauuaaccga

SEQ ID NO: 2601205 - RNA, 19 nt, Homo sapiens
  misc_RNA (1)...(19): siRNA sense strand
ugggaaagcuguauggcaa

SEQ ID NO: 2601206 - RNA, 19 nt, Homo sapiens
  misc_RNA (1)...(19): siRNA sense strand
ugguaggaagagaaagaaa

SEQ ID NO: 2601207 - RNA, 19 nt, Homo sapiens
  misc_RNA (1)...(19): siRNA sense strand
gcuucaagaacaugugcaa

SEQ ID NO: 2601208 - RNA, 19 nt, Homo sapiens
  misc_RNA (1)...(19): siRNA sense strand
gagcaguuguccauggaga

SEQ ID NO: 2601209 - RNA, 19 nt, Homo sapiens
  misc_RNA (1)...(19): siRNA sense strand
agaaggagguggugagggu

SEQ ID NO: 2601210 - RNA, 19 nt, Homo sapiens
  misc_RNA (1)...(19): siRNA sense strand
gccaaaaggagaagcgaau

SEQ ID NO: 2601211 - RNA, 19 nt, Homo sapiens
  misc_RNA (1)...(19): siRNA sense strand
aaaccaaaugucugggcua

SEQ ID NO: 2601212 - RNA, 19 nt, Homo sapiens
  misc_RNA (1)...(19): siRNA sense strand
gggaacaacagcaggccuu

SEQ ID NO: 2601213 - RNA, 19 nt, Homo sapiens
  misc_RNA (1)...(19): siRNA sense strand
cugccaugauguccggaaa

SEQ ID NO: 2601214 - RNA, 19 nt, Homo sapiens
  misc_RNA (1)...(19): siRNA sense strand
gccaagaccuucaagcaga

SEQ ID NO: 2601215 - RNA, 19 nt, Homo sapiens
  misc_RNA (1)...(19): siRNA sense strand
cagcaaggucugcagccaa

SEQ ID NO: 2601216 - RNA, 19 nt, Homo sapiens
  misc_RNA (1)...(19): siRNA sense strand
uuugguaggaagagaaaga

SEQ ID NO: 2601217 - RNA, 19 nt, Homo sapiens
  misc_RNA (1)...(19): siRNA sense strand
agaaagaaacggaccagca

SEQ ID NO: 2601218 - RNA, 19 nt, Homo sapiens
  misc_RNA (1)...(19): siRNA sense strand
aggaagagaaagaaacgga

SEQ ID NO: 2601219 - RNA, 19 nt, Homo sapiens
  misc_RNA (1)...(19): siRNA sense strand
agccaggaaaugaucgaaa

SEQ ID NO: 2601220 - RNA, 19 nt, Homo sapiens
  misc_RNA (1)...(19): siRNA sense strand
caaaaggagaagcgaauca

SEQ ID NO: 2601221 - RNA, 19 nt, Homo sapiens
  misc_RNA (1)...(19): siRNA sense strand
ccaccugagucaaggaccu

SEQ ID NO: 2601222 - RNA, 19 nt, Homo sapiens
  misc_RNA (1)...(19): siRNA sense strand
ccagugaccucgaggagcu

SEQ ID NO: 2601223 - RNA, 19 nt, Homo sapiens
  misc_RNA (1)...(19): siRNA sense strand
caaaauaacuccaaagcag

SEQ ID NO: 2601224 - RNA, 19 nt, Homo sapiens
  misc_RNA (1)...(19): siRNA sense strand
caaaagagcuagaagccuu

SEQ ID NO: 2601225 - RNA, 19 nt, Homo sapiens
  misc_RNA (1)...(19): siRNA sense strand
cuuuauaggaacagcuuca

SEQ ID NO: 2601226 - RNA, 19 nt, Homo sapiens
  misc_RNA (1)...(19): siRNA sense strand
aggagcaccuggagcgcau

SEQ ID NO: 2601227 - RNA, 19 nt, Homo sapiens
  misc_RNA (1)...(19): siRNA sense strand
gauucacuuuauaggaaca

SEQ ID NO: 2601228 - RNA, 19 nt, Homo sapiens
  misc_RNA (1)...(19): siRNA sense strand
guauaauccuuuugggaau

SEQ ID NO: 2601229 - RNA, 19 nt, Homo sapiens
  misc_RNA (1)...(19): siRNA sense strand
guuuaaucaagaugagcua

SEQ ID NO: 2601230 - RNA, 19 nt, Homo sapiens
  misc_RNA (1)...(19): siRNA sense strand
gagcuagcauugauggaga

SEQ ID NO: 2601231 - RNA, 19 nt, Homo sapiens
  misc_RNA (1)...(19): siRNA sense strand
acaaaauguuggaugaaga

SEQ ID NO: 2601232 - RNA, 19 nt, Homo sapiens
  misc_RNA (1)...(19): siRNA sense strand
cgacacaaguagugaggug

SEQ ID NO: 2601233 - RNA, 19 nt, Homo sapiens
  misc_RNA (1)...(19): siRNA sense strand
aaauguuggaugaagagaa

SEQ ID NO: 2601234 - RNA, 19 nt, Homo sapiens
  misc_RNA (1)...(19): siRNA sense strand
gguaaaaugguguccaaau

SEQ ID NO: 2601235 - RNA, 19 nt, Homo sapiens
  misc_RNA (1)...(19): siRNA sense strand
ggguuaauaauguguuuga

SEQ ID NO: 2601236 - RNA, 19 nt, Homo sapiens
  misc_RNA (1)...(19): siRNA sense strand
gcuguuaaaugaaugcaga

SEQ ID NO: 2601237 - RNA, 19 nt, Homo sapiens
  misc_RNA (1)...(19): siRNA sense strand
ucaucaagacagucaucaa

SEQ ID NO: 2601238 - RNA, 19 nt, Homo sapiens
  misc_RNA (1)...(19): siRNA sense strand
gggaguacacccaaaacaa

SEQ ID NO: 2601239 - RNA, 19 nt, Homo sapiens
  misc_RNA (1)...(19): siRNA sense strand
aaaacaagaaggaggcaga

SEQ ID NO: 2601240 - RNA, 19 nt, Homo sapiens
  misc_RNA (1)...(19): siRNA sense strand
cuaucauggcagaaggaaa

SEQ ID NO: 2601241 - RNA, 19 nt, Homo sapiens
  misc_RNA (1)...(19): siRNA sense strand
aggaauuggcauugaaaau

SEQ ID NO: 2601242 - RNA, 19 nt, Homo sapiens
  misc_RNA (1)...(19): siRNA sense strand
agaaagucaacaaaggaau

SEQ ID NO: 2601243 - RNA, 19 nt, Homo sapiens
  misc_RNA (1)...(19): siRNA sense strand
ugccaugaacauauagaaa

SEQ ID NO: 2601244 - RNA, 19 nt, Homo sapiens
  misc_RNA (1)...(19): siRNA sense strand
gggcuguggcauaugaaga

SEQ ID NO: 2601245 - RNA, 19 nt, Homo sapiens
  misc_RNA (1)...(19): siRNA sense strand
acaccagcagguugauaaa

SEQ ID NO: 2601246 - RNA, 19 nt, Homo sapiens
  misc_RNA (1)...(19): siRNA sense strand
caaaauaguccgaugccau

SEQ ID NO: 2601247 - RNA, 19 nt, Homo sapiens
  misc_RNA (1)...(19): siRNA sense strand
caugaagaugucugcagaa

SEQ ID NO: 2601248 - RNA, 19 nt, Homo sapiens
  misc_RNA (1)...(19): siRNA sense strand
aggaacugauuuagagaau

SEQ ID NO: 2601249 - RNA, 19 nt, Homo sapiens
  misc_RNA (1)...(19): siRNA sense strand
caguguguauaaugggaaa

SEQ ID NO: 2601250 - RNA, 19 nt, Homo sapiens
  misc_RNA (1)...(19): siRNA sense strand
gggaaauaagcaagaucau

SEQ ID NO: 2601251 - RNA, 19 nt, Homo sapiens
  misc_RNA (1)...(19): siRNA sense strand
gcauuaauuuauugggugu

SEQ ID NO: 2601252 - RNA, 19 nt, Homo sapiens
  misc_RNA (1)...(19): siRNA sense strand
cagcaguaaacucggcaua

SEQ ID NO: 2601253 - RNA, 19 nt, Homo sapiens
  misc_RNA (1)...(19): siRNA sense strand
accuagaaguggcaauaaa

SEQ ID NO: 2601254 - RNA, 19 nt, Homo sapiens
  misc_RNA (1)...(19): siRNA sense strand
agaaguggcaauaaagaau

SEQ ID NO: 2601255 - RNA, 19 nt, Homo sapiens
  misc_RNA (1)...(19): siRNA sense strand
ccaauaucccgaaaggaau

SEQ ID NO: 2601256 - RNA, 19 nt, Homo sapiens
  misc_RNA (1)...(19): siRNA sense strand
cggaaaggugguugcugua

SEQ ID NO: 2601257 - RNA, 19 nt, Homo sapiens
  misc_RNA (1)...(19): siRNA sense strand
cccacauguuuaaggacaa

SEQ ID NO: 2601258 - RNA, 19 nt, Homo sapiens
  misc_RNA (1)...(19): siRNA sense strand
uguuagaagaagcaagauu

SEQ ID NO: 2601259 - RNA, 19 nt, Homo sapiens
  misc_RNA (1)...(19): siRNA sense strand
accaauaucccgaaaggaa

SEQ ID NO: 2601260 - RNA, 19 nt, Homo sapiens
  misc_RNA (1)...(19): siRNA sense strand
ggaauuaaccugagagugg

SEQ ID NO: 2601261 - RNA, 19 nt, Homo sapiens
  misc_RNA (1)...(19): siRNA sense strand
uagaaguggcaauaaagaa

SEQ ID NO: 2601262 - RNA, 19 nt, Homo sapiens
  misc_RNA (1)...(19): siRNA sense strand
uggacugauugaugauauu

SEQ ID NO: 2601263 - RNA, 19 nt, Homo sapiens
  misc_RNA (1)...(19): siRNA sense strand
cugagggauuguuaggauu

SEQ ID NO: 2601264 - RNA, 19 nt, Homo sapiens
  misc_RNA (1)...(19): siRNA sense strand
gcaagaucauagaggagcu

SEQ ID NO: 2601265 - RNA, 19 nt, Homo sapiens
  misc_RNA (1)...(19): siRNA sense strand
gugcuaaucugaaaggugu

SEQ ID NO: 2601266 - RNA, 19 nt, Homo sapiens
  misc_RNA (1)...(19): siRNA sense strand
guauaaugggaaaggugga

SEQ ID NO: 2601267 - RNA, 19 nt, Homo sapiens
  misc_RNA (1)...(19): siRNA sense strand
acacagacuggcugacauu

SEQ ID NO: 2601268 - RNA, 19 nt, Homo sapiens
  misc_RNA (1)...(19): siRNA sense strand
gcccacauguuuaaggaca

SEQ ID NO: 2601269 - RNA, 19 nt, Homo sapiens
  misc_RNA (1)...(19): siRNA sense strand
uugaagaacuguaaccuca

SEQ ID NO: 2601270 - RNA, 19 nt, Homo sapiens
  misc_RNA (1)...(19): siRNA sense strand
acaaaggugucuggggaaa

SEQ ID NO: 2601271 - RNA, 19 nt, Homo sapiens
  misc_RNA (1)...(19): siRNA sense strand
cugagaggguccaacguga

SEQ ID NO: 2601272 - RNA, 19 nt, Homo sapiens
  misc_RNA (1)...(19): siRNA sense strand
caguaaacucggcauaaaa

SEQ ID NO: 2601273 - RNA, 19 nt, Homo sapiens
  misc_RNA (1)...(19): siRNA sense strand
acaacuacacggagcacuu

SEQ ID NO: 2601274 - RNA, 19 nt, Homo sapiens
  misc_RNA (1)...(19): siRNA sense strand
acggaaaggugguugcugu

SEQ ID NO: 2601275 - RNA, 19 nt, Homo sapiens
  misc_RNA (1)...(19): siRNA sense strand
ccgcuguaaucuugcacau

SEQ ID NO: 2601276 - RNA, 19 nt, Homo sapiens
  misc_RNA (1)...(19): siRNA sense strand
gguccaacgugaagggagc

SEQ ID NO: 2601277 - RNA, 19 nt, Homo sapiens
  misc_RNA (1)...(19): siRNA sense strand
acagacuggcugacauuaa

SEQ ID NO: 2601278 - RNA, 19 nt, Homo sapiens
  misc_RNA (1)...(19): siRNA sense strand
guauugacucauugauuga

SEQ ID NO: 2601279 - RNA, 19 nt, Homo sapiens
  misc_RNA (1)...(19): siRNA sense strand
acaccuagaaguggcaaua

SEQ ID NO: 2601280 - RNA, 19 nt, Homo sapiens
  misc_RNA (1)...(19): siRNA sense strand
gugcaaaucuugaacgagc

SEQ ID NO: 2601281 - RNA, 19 nt, Homo sapiens
  misc_RNA (1)...(19): siRNA sense strand
cgacauguuccgagaugca

SEQ ID NO: 2601282 - RNA, 19 nt, Homo sapiens
  misc_RNA (1)...(19): siRNA sense strand
gguacgacauguuccgaga

SEQ ID NO: 2601283 - RNA, 19 nt, Homo sapiens
  misc_RNA (1)...(19): siRNA sense strand
aagaaggucugguacgaca

SEQ ID NO: 2601284 - RNA, 19 nt, Homo sapiens
  misc_RNA (1)...(19): siRNA sense strand
aggccaagaaggucuggua

SEQ ID NO: 2601285 - RNA, 19 nt, Homo sapiens
  misc_RNA (1)...(19): siRNA sense strand
cuggaggacuggcuggaga

SEQ ID NO: 2601286 - RNA, 19 nt, Homo sapiens
  misc_RNA (1)...(19): siRNA sense strand
cggaauugguacaagccau

SEQ ID NO: 2601287 - RNA, 19 nt, Homo sapiens
  misc_RNA (1)...(19): siRNA sense strand
gaaugaaagaacuggagga

SEQ ID NO: 2601288 - RNA, 19 nt, Homo sapiens
  misc_RNA (1)...(19): siRNA sense strand
gcgugagagcagaagguga

SEQ ID NO: 2601289 - RNA, 19 nt, Homo sapiens
  misc_RNA (1)...(19): siRNA sense strand
caaucaagaaagaguuaca

SEQ ID NO: 2601290 - RNA, 19 nt, Homo sapiens
  misc_RNA (1)...(19): siRNA sense strand
gauaacgagugaugagcca

SEQ ID NO: 2601291 - RNA, 19 nt, Homo sapiens
  misc_RNA (1)...(19): siRNA sense strand
caugaaagaaugaaagaac

SEQ ID NO: 2601292 - RNA, 19 nt, Homo sapiens
  misc_RNA (1)...(19): siRNA sense strand
ccuuaugauagccaagaua

SEQ ID NO: 2601293 - RNA, 19 nt, Homo sapiens
  misc_RNA (1)...(19): siRNA sense strand
cugcagagauccaucccaa

SEQ ID NO: 2601294 - RNA, 19 nt, Homo sapiens
  misc_RNA (1)...(19): siRNA sense strand
gcagcggaaccgagaaaca

SEQ ID NO: 2601295 - RNA, 19 nt, Homo sapiens
  misc_RNA (1)...(19): siRNA sense strand
auaaccaagacaagguaaa

SEQ ID NO: 2601296 - RNA, 19 nt, Homo sapiens
  misc_RNA (1)...(19): siRNA sense strand
cuuaaaucauccggacaaa

SEQ ID NO: 2601297 - RNA, 19 nt, Homo sapiens
  misc_RNA (1)...(19): siRNA sense strand
gugcgaaaugacugugaau

SEQ ID NO: 2601298 - RNA, 19 nt, Homo sapiens
  misc_RNA (1)...(19): siRNA sense strand
ggaaaagaaaccacaaaca

SEQ ID NO: 2601299 - RNA, 19 nt, Homo sapiens
  misc_RNA (1)...(19): siRNA sense strand
gugaacugcgaguggaaca

SEQ ID NO: 2601300 - RNA, 19 nt, Homo sapiens
  misc_RNA (1)...(19): siRNA sense strand
ucuggauauccuaaagaaa

SEQ ID NO: 2601301 - RNA, 19 nt, Homo sapiens
  misc_RNA (1)...(19): siRNA sense strand
cccuuaaucaugaaagaau

SEQ ID NO: 2601302 - RNA, 19 nt, Homo sapiens
  misc_RNA (1)...(19): siRNA sense strand
aaccaagauuugauugcaa

SEQ ID NO: 2601303 - RNA, 19 nt, Homo sapiens
  misc_RNA (1)...(19): siRNA sense strand
aguaauugugguugcguga

SEQ ID NO: 2601304 - RNA, 19 nt, Homo sapiens
  misc_RNA (1)...(19): siRNA sense strand
ugauucauguagcuggaaa

SEQ ID NO: 2601305 - RNA, 19 nt, Homo sapiens
  misc_RNA (1)...(19): siRNA sense strand
agugcaagacugugcucaa

SEQ ID NO: 2601306 - RNA, 19 nt, Homo sapiens
  misc_RNA (1)...(19): siRNA sense strand
ugaacaaucaagaaagagu

SEQ ID NO: 2601307 - RNA, 19 nt, Homo sapiens
  misc_RNA (1)...(19): siRNA sense strand
ccuuuguggaucagugcaa

SEQ ID NO: 2601308 - RNA, 19 nt, Homo sapiens
  misc_RNA (1)...(19): siRNA sense strand
gauucauguagcuggaaaa

SEQ ID NO: 2601309 - RNA, 19 nt, Homo sapiens
  misc_RNA (1)...(19): siRNA sense strand
cagaauucaaucaggaacu

SEQ ID NO: 2601310 - RNA, 19 nt, Homo sapiens
  misc_RNA (1)...(19): siRNA sense strand
ucauagaugcuuaccaaaa

SEQ ID NO: 2601311 - RNA, 19 nt, Homo sapiens
  misc_RNA (1)...(19): siRNA sense strand
ucgugaacugcgaguggaa

SEQ ID NO: 2601312 - RNA, 19 nt, Homo sapiens
  misc_RNA (1)...(19): siRNA sense strand
caugcugaguugauugcaa

SEQ ID NO: 2601313 - RNA, 19 nt, Homo sapiens
  misc_RNA (1)...(19): siRNA sense strand
uggauauccuaaagaaauc

SEQ ID NO: 2601314 - RNA, 19 nt, Homo sapiens
  misc_RNA (1)...(19): siRNA sense strand
ggagaaacccuuugcccaa

SEQ ID NO: 2601315 - RNA, 19 nt, Homo sapiens
  misc_RNA (1)...(19): siRNA sense strand
ccacagaagguuaagguga

SEQ ID NO: 2601316 - RNA, 19 nt, Homo sapiens
  misc_RNA (1)...(19): siRNA sense strand
aggaggaggaggaggaaga

SEQ ID NO: 2601317 - RNA, 19 nt, Homo sapiens
  misc_RNA (1)...(19): siRNA sense strand
aggaggaggaggaagaaaa

SEQ ID NO: 2601318 - RNA, 19 nt, Homo sapiens
  misc_RNA (1)...(19): siRNA sense strand
gugaggaggaggaggagga

SEQ ID NO: 2601319 - RNA, 19 nt, Homo sapiens
  misc_RNA (1)...(19): siRNA sense strand
gggaagaacauuuacacca

SEQ ID NO: 2601320 - RNA, 19 nt, Homo sapiens
  misc_RNA (1)...(19): siRNA sense strand
caagugaggaggaggagga

SEQ ID NO: 2601321 - RNA, 19 nt, Homo sapiens
  misc_RNA (1)...(19): siRNA sense strand
ccaaaaggccaggcagaaa

SEQ ID NO: 2601322 - RNA, 19 nt, Homo sapiens
  misc_RNA (1)...(19): siRNA sense strand
cugaagaaaguguccguga

SEQ ID NO: 2601323 - RNA, 19 nt, Homo sapiens
  misc_RNA (1)...(19): siRNA sense strand
gaggaggaggaggaagaaa

SEQ ID NO: 2601324 - RNA, 19 nt, Homo sapiens
  misc_RNA (1)...(19): siRNA sense strand
gauucagcacccagaaaca

SEQ ID NO: 2601325 - RNA, 19 nt, Homo sapiens
  misc_RNA (1)...(19): siRNA sense strand
cauaccaguuggaagcaga

SEQ ID NO: 2601326 - RNA, 19 nt, Homo sapiens
  misc_RNA (1)...(19): siRNA sense strand
gggagaaggaggcggcauu

SEQ ID NO: 2601327 - RNA, 19 nt, Homo sapiens
  misc_RNA (1)...(19): siRNA sense strand
cccuagaguccaagagaau

SEQ ID NO: 2601328 - RNA, 19 nt, Homo sapiens
  misc_RNA (1)...(19): siRNA sense strand
ugaaaaggcagcagauaua

SEQ ID NO: 2601329 - RNA, 19 nt, Homo sapiens
  misc_RNA (1)...(19): siRNA sense strand
ggucagaaaucagauauaa

SEQ ID NO: 2601330 - RNA, 19 nt, Homo sapiens
  misc_RNA (1)...(19): siRNA sense strand
gugaaaaggcagcagauau

SEQ ID NO: 2601331 - RNA, 19 nt, Homo sapiens
  misc_RNA (1)...(19): siRNA sense strand
cacugcaaguugaggacaa

SEQ ID NO: 2601332 - RNA, 19 nt, Homo sapiens
  misc_RNA (1)...(19): siRNA sense strand
aggucagaaaucagauaua

SEQ ID NO: 2601333 - RNA, 19 nt, Homo sapiens
  misc_RNA (1)...(19): siRNA sense strand
ccaagagaauccuggugau

SEQ ID NO: 2601334 - RNA, 19 nt, Homo sapiens
  misc_RNA (1)...(19): siRNA sense strand
gggaagaagcacagaccac

SEQ ID NO: 2601335 - RNA, 19 nt, Homo sapiens
  misc_RNA (1)...(19): siRNA sense strand
agauauagcaccagggcag

SEQ ID NO: 2601336 - RNA, 19 nt, Homo sapiens
  misc_RNA (1)...(19): siRNA sense strand
augcacagcaggagacaca

SEQ ID NO: 2601337 - RNA, 19 nt, Homo sapiens
  misc_RNA (1)...(19): siRNA sense strand
gaaaucagauauaaccaga

SEQ ID NO: 2601338 - RNA, 19 nt, Homo sapiens
  misc_RNA (1)...(19): siRNA sense strand
ccucaguuccucaaagaca

SEQ ID NO: 2601339 - RNA, 19 nt, Homo sapiens
  misc_RNA (1)...(19): siRNA sense strand
gcaccagggcagacacuca

SEQ ID NO: 2601340 - RNA, 19 nt, Homo sapiens
  misc_RNA (1)...(19): siRNA sense strand
agacagaccuccaugccca

SEQ ID NO: 2601341 - RNA, 19 nt, Homo sapiens
  misc_RNA (1)...(19): siRNA sense strand
gcgggcaugagaagaacaa

SEQ ID NO: 2601342 - RNA, 19 nt, Homo sapiens
  misc_RNA (1)...(19): siRNA sense strand
ugauagaagacgagaagca

SEQ ID NO: 2601343 - RNA, 19 nt, Homo sapiens
  misc_RNA (1)...(19): siRNA sense strand
gaggagggcaagaggguga

SEQ ID NO: 2601344 - RNA, 19 nt, Homo sapiens
  misc_RNA (1)...(19): siRNA sense strand
ggcaagagggugaggaacu

SEQ ID NO: 2601345 - RNA, 19 nt, Homo sapiens
  misc_RNA (1)...(19): siRNA sense strand
agggcaagagggugaggaa

SEQ ID NO: 2601346 - RNA, 19 nt, Homo sapiens
  misc_RNA (1)...(19): siRNA sense strand
auuccaaggccaagaccua

SEQ ID NO: 2601347 - RNA, 19 nt, Homo sapiens
  misc_RNA (1)...(19): siRNA sense strand
gcgaggugauagaagacga

SEQ ID NO: 2601348 - RNA, 19 nt, Homo sapiens
  misc_RNA (1)...(19): siRNA sense strand
uguucagagagguggauau

SEQ ID NO: 2601349 - RNA, 19 nt, Homo sapiens
  misc_RNA (1)...(19): siRNA sense strand
ggcccgaacaagacaggaa

SEQ ID NO: 2601350 - RNA, 19 nt, Homo sapiens
  misc_RNA (1)...(19): siRNA sense strand
aggugauagaagacgagaa

SEQ ID NO: 2601351 - RNA, 19 nt, Homo sapiens
  misc_RNA (1)...(19): siRNA sense strand
aggccaagaccuacuggaa

SEQ ID NO: 2601352 - RNA, 19 nt, Homo sapiens
  misc_RNA (1)...(19): siRNA sense strand
ucgacauaacggaggacuu

SEQ ID NO: 2601353 - RNA, 19 nt, Homo sapiens
  misc_RNA (1)...(19): siRNA sense strand
ucauaaggaaagagaacaa

SEQ ID NO: 2601354 - RNA, 19 nt, Homo sapiens
  misc_RNA (1)...(19): siRNA sense strand
aagagaaacuggaggcaga

SEQ ID NO: 2601355 - RNA, 19 nt, Homo sapiens
  misc_RNA (1)...(19): siRNA sense strand
gcuuggaagaacucagaaa

SEQ ID NO: 2601356 - RNA, 19 nt, Homo sapiens
  misc_RNA (1)...(19): siRNA sense strand
guuugguccaguagagaaa

SEQ ID NO: 2601357 - RNA, 19 nt, Homo sapiens
  misc_RNA (1)...(19): siRNA sense strand
ccagagaagcugaugcaga

SEQ ID NO: 2601358 - RNA, 19 nt, Homo sapiens
  misc_RNA (1)...(19): siRNA sense strand
acagagaacaggaggaacu

SEQ ID NO: 2601359 - RNA, 19 nt, Homo sapiens
  misc_RNA (1)...(19): siRNA sense strand
aggaagaaaugauccgaca

SEQ ID NO: 2601360 - RNA, 19 nt, Homo sapiens
  misc_RNA (1)...(19): siRNA sense strand
cuguugugguuguggauga

SEQ ID NO: 2601361 - RNA, 19 nt, Homo sapiens
  misc_RNA (1)...(19): siRNA sense strand
ggaaagagaacaaccacca

SEQ ID NO: 2601362 - RNA, 19 nt, Homo sapiens
  misc_RNA (1)...(19): siRNA sense strand
gcucuugaugaaauggaaa

SEQ ID NO: 2601363 - RNA, 19 nt, Homo sapiens
  misc_RNA (1)...(19): siRNA sense strand
uggaaaagcagcagcguga

SEQ ID NO: 2601364 - RNA, 19 nt, Homo sapiens
  misc_RNA (1)...(19): siRNA sense strand
uaucauaaggaaagagaac

SEQ ID NO: 2601365 - RNA, 19 nt, Homo sapiens
  misc_RNA (1)...(19): siRNA sense strand
agccaaacuacauggaaaa

SEQ ID NO: 2601366 - RNA, 19 nt, Homo sapiens
  misc_RNA (1)...(19): siRNA sense strand
aagcagagcuggacggcac

SEQ ID NO: 2601367 - RNA, 19 nt, Homo sapiens
  misc_RNA (1)...(19): siRNA sense strand
ggcgacagcaagagggcuu

SEQ ID NO: 2601368 - RNA, 19 nt, Homo sapiens
  misc_RNA (1)...(19): siRNA sense strand
acucagacgcuuggaagaa

SEQ ID NO: 2601369 - RNA, 19 nt, Homo sapiens
  misc_RNA (1)...(19): siRNA sense strand
uaaaagaaaauguggcuga

SEQ ID NO: 2601370 - RNA, 19 nt, Homo sapiens
  misc_RNA (1)...(19): siRNA sense strand
agaaacuggaggcagaaau

SEQ ID NO: 2601371 - RNA, 19 nt, Homo sapiens
  misc_RNA (1)...(19): siRNA sense strand
gagaagccaaagagaaacu

SEQ ID NO: 2601372 - RNA, 19 nt, Homo sapiens
  misc_RNA (1)...(19): siRNA sense strand
ggugaaaaugcguggaaua

SEQ ID NO: 2601373 - RNA, 19 nt, Homo sapiens
  misc_RNA (1)...(19): siRNA sense strand
aggacaaggaguagaugaa

SEQ ID NO: 2601374 - RNA, 19 nt, Homo sapiens
  misc_RNA (1)...(19): siRNA sense strand
uguagaaggcaaagcgcua

SEQ ID NO: 2601375 - RNA, 19 nt, Homo sapiens
  misc_RNA (1)...(19): siRNA sense strand
gugucuuaguugugaguca

SEQ ID NO: 2601376 - RNA, 19 nt, Homo sapiens
  misc_RNA (1)...(19): siRNA sense strand
aggaaggaagagaaguuaa

SEQ ID NO: 2601377 - RNA, 19 nt, Homo sapiens
  misc_RNA (1)...(19): siRNA sense strand
agaaaauaauccaaggaca

SEQ ID NO: 2601378 - RNA, 19 nt, Homo sapiens
  misc_RNA (1)...(19): siRNA sense strand
ggccaaagcagccagggaa

SEQ ID NO: 2601379 - RNA, 19 nt, Homo sapiens
  misc_RNA (1)...(19): siRNA sense strand
cuucuuuggcagagauauu

SEQ ID NO: 2601380 - RNA, 19 nt, Homo sapiens
  misc_RNA (1)...(19): siRNA sense strand
cuaagugagcugagggcca

SEQ ID NO: 2601381 - RNA, 19 nt, Homo sapiens
  misc_RNA (1)...(19): siRNA sense strand
gaggagagacgcuggacca

SEQ ID NO: 2601382 - RNA, 19 nt, Homo sapiens
  misc_RNA (1)...(19): siRNA sense strand
aggaagagaaguuaaacca

SEQ ID NO: 2601383 - RNA, 19 nt, Homo sapiens
  misc_RNA (1)...(19): siRNA sense strand
ucauaaacuuugaggaagg

SEQ ID NO: 2601384 - RNA, 19 nt, Homo sapiens
  misc_RNA (1)...(19): siRNA sense strand
agugaucucaugaggacaa

SEQ ID NO: 2601385 - RNA, 19 nt, Homo sapiens
  misc_RNA (1)...(19): siRNA sense strand
uguccggcauggagaaaca

SEQ ID NO: 2601386 - RNA, 19 nt, Homo sapiens
  misc_RNA (1)...(19): siRNA sense strand
guuaauucagacagcggua

SEQ ID NO: 2601387 - RNA, 19 nt, Homo sapiens
  misc_RNA (1)...(19): siRNA sense strand
gaagagaaguuaaaccaac

SEQ ID NO: 2601388 - RNA, 19 nt, Homo sapiens
  misc_RNA (1)...(19): siRNA sense strand
agacuucgggaaaggaaau

SEQ ID NO: 2601389 - RNA, 19 nt, Homo sapiens
  misc_RNA (1)...(19): siRNA sense strand
cuuugaggaaggaagagaa

SEQ ID NO: 2601390 - RNA, 19 nt, Homo sapiens
  misc_RNA (1)...(19): siRNA sense strand
augagaagucuguuugauu

SEQ ID NO: 2601391 - RNA, 19 nt, Homo sapiens
  misc_RNA (1)...(19): siRNA sense strand
aggcucaggcagugggcaa

SEQ ID NO: 2601392 - RNA, 19 nt, Homo sapiens
  misc_RNA (1)...(19): siRNA sense strand
ggcaaggccuucagccaga

SEQ ID NO: 2601393 - RNA, 19 nt, Homo sapiens
  misc_RNA (1)...(19): siRNA sense strand
ucggugaucuacugggaga

SEQ ID NO: 2601394 - RNA, 19 nt, Homo sapiens
  misc_RNA (1)...(19): siRNA sense strand
auugaacagcagagaaaca

SEQ ID NO: 2601395 - RNA, 19 nt, Homo sapiens
  misc_RNA (1)...(19): siRNA sense strand
ccgacuucuugauggaaau

SEQ ID NO: 2601396 - RNA, 19 nt, Homo sapiens
  misc_RNA (1)...(19): siRNA sense strand
cuucgugguuugugugaca

SEQ ID NO: 2601397 - RNA, 19 nt, Homo sapiens
  misc_RNA (1)...(19): siRNA sense strand
ucugguucaccuagagaaa

SEQ ID NO: 2601398 - RNA, 19 nt, Homo sapiens
  misc_RNA (1)...(19): siRNA sense strand
cguggaauuaaguguggua

SEQ ID NO: 2601399 - RNA, 19 nt, Homo sapiens
  misc_RNA (1)...(19): siRNA sense strand
gugacaacauggaaccuga

SEQ ID NO: 2601400 - RNA, 19 nt, Homo sapiens
  misc_RNA (1)...(19): siRNA sense strand
aggcaaaggcugugaaaga

SEQ ID NO: 2601401 - RNA, 19 nt, Homo sapiens
  misc_RNA (1)...(19): siRNA sense strand
gggaugaagaagaggauuu

SEQ ID NO: 2601402 - RNA, 19 nt, Homo sapiens
  misc_RNA (1)...(19): siRNA sense strand
agacagagggugaacgaaa

SEQ ID NO: 2601403 - RNA, 19 nt, Homo sapiens
  misc_RNA (1)...(19): siRNA sense strand
uuguagagaaagugagaua

SEQ ID NO: 2601404 - RNA, 19 nt, Homo sapiens
  misc_RNA (1)...(19): siRNA sense strand
ugaaagaaguaaaggagga

SEQ ID NO: 2601405 - RNA, 19 nt, Homo sapiens
  misc_RNA (1)...(19): siRNA sense strand
ucugaggauuguagagaaa

SEQ ID NO: 2601406 - RNA, 19 nt, Homo sapiens
  misc_RNA (1)...(19): siRNA sense strand
cuucaaagacccagaguga

SEQ ID NO: 2601407 - RNA, 19 nt, Homo sapiens
  misc_RNA (1)...(19): siRNA sense strand
agacaaacacugaacuaaa

SEQ ID NO: 2601408 - RNA, 19 nt, Homo sapiens
  misc_RNA (1)...(19): siRNA sense strand
aaguaaaggaggaugacaa

SEQ ID NO: 2601409 - RNA, 19 nt, Homo sapiens
  misc_RNA (1)...(19): siRNA sense strand
aaccaaaggaggagaagaa

SEQ ID NO: 2601410 - RNA, 19 nt, Homo sapiens
  misc_RNA (1)...(19): siRNA sense strand
aagaagaaguaaagaagga

SEQ ID NO: 2601411 - RNA, 19 nt, Homo sapiens
  misc_RNA (1)...(19): siRNA sense strand
guuauugaagagagggaaa

SEQ ID NO: 2601412 - RNA, 19 nt, Homo sapiens
  misc_RNA (1)...(19): siRNA sense strand
ugaaggaaccucagggcaa

SEQ ID NO: 2601413 - RNA, 19 nt, Homo sapiens
  misc_RNA (1)...(19): siRNA sense strand
aagugaaacuccaaguaaa

SEQ ID NO: 2601414 - RNA, 19 nt, Homo sapiens
  misc_RNA (1)...(19): siRNA sense strand
ccucagagauugaaaacaa

SEQ ID NO: 2601415 - RNA, 19 nt, Homo sapiens
  misc_RNA (1)...(19): siRNA sense strand
acauugaagaugaggagaa

SEQ ID NO: 2601416 - RNA, 19 nt, Homo sapiens
  misc_RNA (1)...(19): siRNA sense strand
ucauaaacaacaaggagaa

SEQ ID NO: 2601417 - RNA, 19 nt, Homo sapiens
  misc_RNA (1)...(19): siRNA sense strand
gaacuaaaagaaaggguaa

SEQ ID NO: 2601418 - RNA, 19 nt, Homo sapiens
  misc_RNA (1)...(19): siRNA sense strand
ucagaaagugugugaagaa

SEQ ID NO: 2601419 - RNA, 19 nt, Homo sapiens
  misc_RNA (1)...(19): siRNA sense strand
cauugaagaugaggagaaa

SEQ ID NO: 2601420 - RNA, 19 nt, Homo sapiens
  misc_RNA (1)...(19): siRNA sense strand
guuaugaggcagaaggcaa

SEQ ID NO: 2601421 - RNA, 19 nt, Homo sapiens
  misc_RNA (1)...(19): siRNA sense strand
ucaccaacacaaugagaaa

SEQ ID NO: 2601422 - RNA, 19 nt, Homo sapiens
  misc_RNA (1)...(19): siRNA sense strand
gggaaauucagcuggaaga

SEQ ID NO: 2601423 - RNA, 19 nt, Homo sapiens
  misc_RNA (1)...(19): siRNA sense strand
ggugguugguaguggguuu

SEQ ID NO: 2601424 - RNA, 19 nt, Homo sapiens
  misc_RNA (1)...(19): siRNA sense strand
acaagaaauauguggauga

SEQ ID NO: 2601425 - RNA, 19 nt, Homo sapiens
  misc_RNA (1)...(19): siRNA sense strand
uugaagaugaggagaaauu

SEQ ID NO: 2601426 - RNA, 19 nt, Homo sapiens
  misc_RNA (1)...(19): siRNA sense strand
ggauaaugccaauaaccaa

SEQ ID NO: 2601427 - RNA, 19 nt, Homo sapiens
  misc_RNA (1)...(19): siRNA sense strand
cugauaagccuaagcagaa

SEQ ID NO: 2601428 - RNA, 19 nt, Homo sapiens
  misc_RNA (1)...(19): siRNA sense strand
cgcaagaaacgaagggaga

SEQ ID NO: 2601429 - RNA, 19 nt, Homo sapiens
  misc_RNA (1)...(19): siRNA sense strand
agagugagcuaaagcgcaa

SEQ ID NO: 2601430 - RNA, 19 nt, Homo sapiens
  misc_RNA (1)...(19): siRNA sense strand
aaucaagcucucugggaaa

SEQ ID NO: 2601431 - RNA, 19 nt, Homo sapiens
  misc_RNA (1)...(19): siRNA sense strand
cagacgaaagcgagaggaa

SEQ ID NO: 2601432 - RNA, 19 nt, Homo sapiens
  misc_RNA (1)...(19): siRNA sense strand
aggacaaagaggauggcaa

SEQ ID NO: 2601433 - RNA, 19 nt, Homo sapiens
  misc_RNA (1)...(19): siRNA sense strand
gacgaaagcgagaggaaga

SEQ ID NO: 2601434 - RNA, 19 nt, Homo sapiens
  misc_RNA (1)...(19): siRNA sense strand
ucucagaaguugguagaaa

SEQ ID NO: 2601435 - RNA, 19 nt, Homo sapiens
  misc_RNA (1)...(19): siRNA sense strand
acuuaaagguagaggagcu

SEQ ID NO: 2601436 - RNA, 19 nt, Homo sapiens
  misc_RNA (1)...(19): siRNA sense strand
agacaauagggcuggauau

SEQ ID NO: 2601437 - RNA, 19 nt, Homo sapiens
  misc_RNA (1)...(19): siRNA sense strand
cagaagaggcagaaaagaa

SEQ ID NO: 2601438 - RNA, 19 nt, Homo sapiens
  misc_RNA (1)...(19): siRNA sense strand
aaggaggagaagaaagaaa

SEQ ID NO: 2601439 - RNA, 19 nt, Homo sapiens
  misc_RNA (1)...(19): siRNA sense strand
guagagaaagugagauaga

SEQ ID NO: 2601440 - RNA, 19 nt, Homo sapiens
  misc_RNA (1)...(19): siRNA sense strand
aggcagaauccguaccaaa

SEQ ID NO: 2601441 - RNA, 19 nt, Homo sapiens
  misc_RNA (1)...(19): siRNA sense strand
agaaaguaguaaggacaaa

SEQ ID NO: 2601442 - RNA, 19 nt, Homo sapiens
  misc_RNA (1)...(19): siRNA sense strand
agaaagugagauagagaca

SEQ ID NO: 2601443 - RNA, 19 nt, Homo sapiens
  misc_RNA (1)...(19): siRNA sense strand
cuagaaaguaguaaggaca

SEQ ID NO: 2601444 - RNA, 19 nt, Homo sapiens
  misc_RNA (1)...(19): siRNA sense strand
ggguaaaggagcugucuga

SEQ ID NO: 2601445 - RNA, 19 nt, Homo sapiens
  misc_RNA (1)...(19): siRNA sense strand
acaagauacaccugugaaa

SEQ ID NO: 2601446 - RNA, 19 nt, Homo sapiens
  misc_RNA (1)...(19): siRNA sense strand
aaggagaaaugcugcgcaa

SEQ ID NO: 2601447 - RNA, 19 nt, Homo sapiens
  misc_RNA (1)...(19): siRNA sense strand
ggaaauggucaguuguaga

SEQ ID NO: 2601448 - RNA, 19 nt, Homo sapiens
  misc_RNA (1)...(19): siRNA sense strand
agagaaagugagauagaga

SEQ ID NO: 2601449 - RNA, 19 nt, Homo sapiens
  misc_RNA (1)...(19): siRNA sense strand
uguuagauauacagugcaa

SEQ ID NO: 2601450 - RNA, 19 nt, Homo sapiens
  misc_RNA (1)...(19): siRNA sense strand
gaagaaguaaagaaggaau

SEQ ID NO: 2601451 - RNA, 19 nt, Homo sapiens
  misc_RNA (1)...(19): siRNA sense strand
ccauaaagcgcacugacaa

SEQ ID NO: 2601452 - RNA, 19 nt, Homo sapiens
  misc_RNA (1)...(19): siRNA sense strand
aagaaguaaaggaggauga

SEQ ID NO: 2601453 - RNA, 19 nt, Homo sapiens
  misc_RNA (1)...(19): siRNA sense strand
gagaaaaguuccuugguga

SEQ ID NO: 2601454 - RNA, 19 nt, Homo sapiens
  misc_RNA (1)...(19): siRNA sense strand
gaaugaugccugaggaagu

SEQ ID NO: 2601455 - RNA, 19 nt, Homo sapiens
  misc_RNA (1)...(19): siRNA sense strand
gaacagaacggaaucgaga

SEQ ID NO: 2601456 - RNA, 19 nt, Homo sapiens
  misc_RNA (1)...(19): siRNA sense strand
acagaacggaaucgagaaa

SEQ ID NO: 2601457 - RNA, 19 nt, Homo sapiens
  misc_RNA (1)...(19): siRNA sense strand
gugagaaaccaaaggagga

SEQ ID NO: 2601458 - RNA, 19 nt, Homo sapiens
  misc_RNA (1)...(19): siRNA sense strand
gagcgaaguaggagcuuga

SEQ ID NO: 2601459 - RNA, 19 nt, Homo sapiens
  misc_RNA (1)...(19): siRNA sense strand
gauacaugugggagggaga

SEQ ID NO: 2601460 - RNA, 19 nt, Homo sapiens
  misc_RNA (1)...(19): siRNA sense strand
agguaguccacaagagcaa

SEQ ID NO: 2601461 - RNA, 19 nt, Homo sapiens
  misc_RNA (1)...(19): siRNA sense strand
cucaaacucaagagagaaa

SEQ ID NO: 2601462 - RNA, 19 nt, Homo sapiens
  misc_RNA (1)...(19): siRNA sense strand
gauaaugccaauaaccaaa

SEQ ID NO: 2601463 - RNA, 19 nt, Homo sapiens
  misc_RNA (1)...(19): siRNA sense strand
cagaagucuuuaagugaca

SEQ ID NO: 2601464 - RNA, 19 nt, Homo sapiens
  misc_RNA (1)...(19): siRNA sense strand
cagaagcacuggagcuaca

SEQ ID NO: 2601465 - RNA, 19 nt, Homo sapiens
  misc_RNA (1)...(19): siRNA sense strand
aggaaugaugccugaggaa

SEQ ID NO: 2601466 - RNA, 19 nt, Homo sapiens
  misc_RNA (1)...(19): siRNA sense strand
aggaagaggaggagcgaag

SEQ ID NO: 2601467 - RNA, 19 nt, Homo sapiens
  misc_RNA (1)...(19): siRNA sense strand
uggcucagaucuugggaau

SEQ ID NO: 2601468 - RNA, 19 nt, Homo sapiens
  misc_RNA (1)...(19): siRNA sense strand
guauuaugaugcuggcaau

SEQ ID NO: 2601469 - RNA, 19 nt, Homo sapiens
  misc_RNA (1)...(19): siRNA sense strand
cugagaaauuagaagacca

SEQ ID NO: 2601470 - RNA, 19 nt, Homo sapiens
  misc_RNA (1)...(19): siRNA sense strand
ugagaaauuagaagaccaa

SEQ ID NO: 2601471 - RNA, 19 nt, Homo sapiens
  misc_RNA (1)...(19): siRNA sense strand
ugaaaagcccauugcaaaa

SEQ ID NO: 2601472 - RNA, 19 nt, Homo sapiens
  misc_RNA (1)...(19): siRNA sense strand
ucugguggcccuagggaaa

SEQ ID NO: 2601473 - RNA, 19 nt, Homo sapiens
  misc_RNA (1)...(19): siRNA sense strand
gguggauauugaagggaua

SEQ ID NO: 2601474 - RNA, 19 nt, Homo sapiens
  misc_RNA (1)...(19): siRNA sense strand
cugcagaagauaaggaaau

SEQ ID NO: 2601475 - RNA, 19 nt, Homo sapiens
  misc_RNA (1)...(19): siRNA sense strand
aguccaagccaaagacaaa

SEQ ID NO: 2601476 - RNA, 19 nt, Homo sapiens
  misc_RNA (1)...(19): siRNA sense strand
ggaaggagaucaaggggaa

SEQ ID NO: 2601477 - RNA, 19 nt, Homo sapiens
  misc_RNA (1)...(19): siRNA sense strand
acuuaaagcagaagaugaa

SEQ ID NO: 2601478 - RNA, 19 nt, Homo sapiens
  misc_RNA (1)...(19): siRNA sense strand
ccaugaacuuaaagcagaa

SEQ ID NO: 2601479 - RNA, 19 nt, Homo sapiens
  misc_RNA (1)...(19): siRNA sense strand
aagaagacaccuuggaaau

SEQ ID NO: 2601480 - RNA, 19 nt, Homo sapiens
  misc_RNA (1)...(19): siRNA sense strand
ccucugaucaugauggaaa

SEQ ID NO: 2601481 - RNA, 19 nt, Homo sapiens
  misc_RNA (1)...(19): siRNA sense strand
ccucacaguccaagccaaa

SEQ ID NO: 2601482 - RNA, 19 nt, Homo sapiens
  misc_RNA (1)...(19): siRNA sense strand
cuggaaaugagaagggaca

SEQ ID NO: 2601483 - RNA, 19 nt, Homo sapiens
  misc_RNA (1)...(19): siRNA sense strand
guugauuggcagaguggaa

SEQ ID NO: 2601484 - RNA, 19 nt, Homo sapiens
  misc_RNA (1)...(19): siRNA sense strand
uugcaaaacuaaaggauga

SEQ ID NO: 2601485 - RNA, 19 nt, Homo sapiens
  misc_RNA (1)...(19): siRNA sense strand
agccagugaugguggaaau

SEQ ID NO: 2601486 - RNA, 19 nt, Homo sapiens
  misc_RNA (1)...(19): siRNA sense strand
aaagaagacaccuuggaaa

SEQ ID NO: 2601487 - RNA, 19 nt, Homo sapiens
  misc_RNA (1)...(19): siRNA sense strand
ugguauugauggagucauu

SEQ ID NO: 2601488 - RNA, 19 nt, Homo sapiens
  misc_RNA (1)...(19): siRNA sense strand
cagaaaucaucuacaacau

SEQ ID NO: 2601489 - RNA, 19 nt, Homo sapiens
  misc_RNA (1)...(19): siRNA sense strand
agacaguucagaagagaga

SEQ ID NO: 2601490 - RNA, 19 nt, Homo sapiens
  misc_RNA (1)...(19): siRNA sense strand
aggagaauuauuaggaaca

SEQ ID NO: 2601491 - RNA, 19 nt, Homo sapiens
  misc_RNA (1)...(19): siRNA sense strand
ccuaagaauggcacaauau

SEQ ID NO: 2601492 - RNA, 19 nt, Homo sapiens
  misc_RNA (1)...(19): siRNA sense strand
ccagaaaagaauaaagaca

SEQ ID NO: 2601493 - RNA, 19 nt, Homo sapiens
  misc_RNA (1)...(19): siRNA sense strand
aggaugaacauuugcauau

SEQ ID NO: 2601494 - RNA, 19 nt, Homo sapiens
  misc_RNA (1)...(19): siRNA sense strand
cuguauuguuccagaaaau

SEQ ID NO: 2601495 - RNA, 19 nt, Homo sapiens
  misc_RNA (1)...(19): siRNA sense strand
uagaaagcaaugagaacau

SEQ ID NO: 2601496 - RNA, 19 nt, Homo sapiens
  misc_RNA (1)...(19): siRNA sense strand
ggguggauauugaagggau

SEQ ID NO: 2601497 - RNA, 19 nt, Homo sapiens
  misc_RNA (1)...(19): siRNA sense strand
gugguaauucacagaacaa

SEQ ID NO: 2601498 - RNA, 19 nt, Homo sapiens
  misc_RNA (1)...(19): siRNA sense strand
cagaaagugcucagacuca

SEQ ID NO: 2601499 - RNA, 19 nt, Homo sapiens
  misc_RNA (1)...(19): siRNA sense strand
ggaauagaagauaugaaca

SEQ ID NO: 2601500 - RNA, 19 nt, Homo sapiens
  misc_RNA (1)...(19): siRNA sense strand
ugauaauccaccaguguuu

SEQ ID NO: 2601501 - RNA, 19 nt, Homo sapiens
  misc_RNA (1)...(19): siRNA sense strand
augcagaaaucaucuacaa

SEQ ID NO: 2601502 - RNA, 19 nt, Homo sapiens
  misc_RNA (1)...(19): siRNA sense strand
cguauggagaauugaccua

SEQ ID NO: 2601503 - RNA, 19 nt, Homo sapiens
  misc_RNA (1)...(19): siRNA sense strand
uauugaagggauagaugaa

SEQ ID NO: 2601504 - RNA, 19 nt, Homo sapiens
  misc_RNA (1)...(19): siRNA sense strand
uggaaugucuuaugaucau

SEQ ID NO: 2601505 - RNA, 19 nt, Homo sapiens
  misc_RNA (1)...(19): siRNA sense strand
cuuagaaagcaaugagaac

SEQ ID NO: 2601506 - RNA, 19 nt, Homo sapiens
  misc_RNA (1)...(19): siRNA sense strand
uuuaguggagauaggaaua

SEQ ID NO: 2601507 - RNA, 19 nt, Homo sapiens
  misc_RNA (1)...(19): siRNA sense strand
acaacaucaucucuggaaa

SEQ ID NO: 2601508 - RNA, 19 nt, Homo sapiens
  misc_RNA (1)...(19): siRNA sense strand
uguccaagcuucagaugca

SEQ ID NO: 2601509 - RNA, 19 nt, Homo sapiens
  misc_RNA (1)...(19): siRNA sense strand
aagccaaagacaaagguga

SEQ ID NO: 2601510 - RNA, 19 nt, Homo sapiens
  misc_RNA (1)...(19): siRNA sense strand
ccagaggauaaaugagcau

SEQ ID NO: 2601511 - RNA, 19 nt, Homo sapiens
  misc_RNA (1)...(19): siRNA sense strand
acuuagaaagcaaugagaa

SEQ ID NO: 2601512 - RNA, 19 nt, Homo sapiens
  misc_RNA (1)...(19): siRNA sense strand
cuuuaguggagauaggaau

SEQ ID NO: 2601513 - RNA, 19 nt, Homo sapiens
  misc_RNA (1)...(19): siRNA sense strand
uagaugaauuugagcccau

SEQ ID NO: 2601514 - RNA, 19 nt, Homo sapiens
  misc_RNA (1)...(19): siRNA sense strand
agaugcagaugcugguauu

SEQ ID NO: 2601515 - RNA, 19 nt, Homo sapiens
  misc_RNA (1)...(19): siRNA sense strand
uggagaaggauauugucaa

SEQ ID NO: 2601516 - RNA, 19 nt, Homo sapiens
  misc_RNA (1)...(19): siRNA sense strand
gccaugaacuuaaagcaga

SEQ ID NO: 2601517 - RNA, 19 nt, Homo sapiens
  misc_RNA (1)...(19): siRNA sense strand
agcaaaugaccgugacaca

SEQ ID NO: 2601518 - RNA, 19 nt, Homo sapiens
  misc_RNA (1)...(19): siRNA sense strand
cgaccaugcaccucaguuu

SEQ ID NO: 2601519 - RNA, 19 nt, Homo sapiens
  misc_RNA (1)...(19): siRNA sense strand
agccaaagacaaaggugau

SEQ ID NO: 2601520 - RNA, 19 nt, Homo sapiens
  misc_RNA (1)...(19): siRNA sense strand
uucagaagagagaggcaaa

SEQ ID NO: 2601521 - RNA, 19 nt, Homo sapiens
  misc_RNA (1)...(19): siRNA sense strand
cuccauugauccuaagaau

SEQ ID NO: 2601522 - RNA, 19 nt, Homo sapiens
  misc_RNA (1)...(19): siRNA sense strand
ggucacaugcagaaaucau

SEQ ID NO: 2601523 - RNA, 19 nt, Homo sapiens
  misc_RNA (1)...(19): siRNA sense strand
cuucagaugcagaaaagaa

SEQ ID NO: 2601524 - RNA, 19 nt, Homo sapiens
  misc_RNA (1)...(19): siRNA sense strand
aagaauaaagacagacagu

SEQ ID NO: 2601525 - RNA, 19 nt, Homo sapiens
  misc_RNA (1)...(19): siRNA sense strand
cuacacagagggagcacuu

SEQ ID NO: 2601526 - RNA, 19 nt, Homo sapiens
  misc_RNA (1)...(19): siRNA sense strand
ugaagggauagaugaauuu

SEQ ID NO: 2601527 - RNA, 19 nt, Homo sapiens
  misc_RNA (1)...(19): siRNA sense strand
gcuggaugucaaugauaau

SEQ ID NO: 2601528 - RNA, 19 nt, Homo sapiens
  misc_RNA (1)...(19): siRNA sense strand
guucagaagagagaggcaa

SEQ ID NO: 2601529 - RNA, 19 nt, Homo sapiens
  misc_RNA (1)...(19): siRNA sense strand
ugagagaaggagaauuauu

SEQ ID NO: 2601530 - RNA, 19 nt, Homo sapiens
  misc_RNA (1)...(19): siRNA sense strand
gaagauaaggaaauccaga

SEQ ID NO: 2601531 - RNA, 19 nt, Homo sapiens
  misc_RNA (1)...(19): siRNA sense strand
gaaacugaugugaugguga

SEQ ID NO: 2601532 - RNA, 19 nt, Homo sapiens
  misc_RNA (1)...(19): siRNA sense strand
uaagcaaauccuugacuau

SEQ ID NO: 2601533 - RNA, 19 nt, Homo sapiens
  misc_RNA (1)...(19): siRNA sense strand
aaguguaauuggaggaaga

SEQ ID NO: 2601534 - RNA, 19 nt, Homo sapiens
  misc_RNA (1)...(19): siRNA sense strand
caaagaaacaggauggaca

SEQ ID NO: 2601535 - RNA, 19 nt, Homo sapiens
  misc_RNA (1)...(19): siRNA sense strand
acgacuuacuggugccaaa

SEQ ID NO: 2601536 - RNA, 19 nt, Homo sapiens
  misc_RNA (1)...(19): siRNA sense strand
ggaaaguguaauuggagga

SEQ ID NO: 2601537 - RNA, 19 nt, Homo sapiens
  misc_RNA (1)...(19): siRNA sense strand
ccaaaagguuucagagagu

SEQ ID NO: 2601538 - RNA, 19 nt, Homo sapiens
  misc_RNA (1)...(19): siRNA sense strand
gaaugaaauuagaagcagu

SEQ ID NO: 2601539 - RNA, 19 nt, Homo sapiens
  misc_RNA (1)...(19): siRNA sense strand
uggaggaagauuaagacua

SEQ ID NO: 2601540 - RNA, 19 nt, Homo sapiens
  misc_RNA (1)...(19): siRNA sense strand
aggaaugaaauuagaagca

SEQ ID NO: 2601541 - RNA, 19 nt, Homo sapiens
  misc_RNA (1)...(19): siRNA sense strand
guaugaagaaagcgaagau

SEQ ID NO: 2601542 - RNA, 19 nt, Homo sapiens
  misc_RNA (1)...(19): siRNA sense strand
gggaaugguucaaggaagg

SEQ ID NO: 2601543 - RNA, 19 nt, Homo sapiens
  misc_RNA (1)...(19): siRNA sense strand
cuucuggauugcuggaauu

SEQ ID NO: 2601544 - RNA, 19 nt, Homo sapiens
  misc_RNA (1)...(19): siRNA sense strand
aagacuaguguaugaagaa

SEQ ID NO: 2601545 - RNA, 19 nt, Homo sapiens
  misc_RNA (1)...(19): siRNA sense strand
agaaaaugugagaguagaa

SEQ ID NO: 2601546 - RNA, 19 nt, Homo sapiens
  misc_RNA (1)...(19): siRNA sense strand
gaguaugaucaguggguag

SEQ ID NO: 2601547 - RNA, 19 nt, Homo sapiens
  misc_RNA (1)...(19): siRNA sense strand
uuagaaaggugcuagcuga

SEQ ID NO: 2601548 - RNA, 19 nt, Homo sapiens
  misc_RNA (1)...(19): siRNA sense strand
uggaugggaagaagaguau

SEQ ID NO: 2601549 - RNA, 19 nt, Homo sapiens
  misc_RNA (1)...(19): siRNA sense strand
gggugauaucucagaaaau

SEQ ID NO: 2601550 - RNA, 19 nt, Homo sapiens
  misc_RNA (1)...(19): siRNA sense strand
cggauuucguguaggaaug

SEQ ID NO: 2601551 - RNA, 19 nt, Homo sapiens
  misc_RNA (1)...(19): siRNA sense strand
ucacaguguaaguugguau

SEQ ID NO: 2601552 - RNA, 19 nt, Homo sapiens
  misc_RNA (1)...(19): siRNA sense strand
ugagaguagaagugguuga

SEQ ID NO: 2601553 - RNA, 19 nt, Homo sapiens
  misc_RNA (1)...(19): siRNA sense strand
ggauggacauuuugauaca

SEQ ID NO: 2601554 - RNA, 19 nt, Homo sapiens
  misc_RNA (1)...(19): siRNA sense strand
gaucgauggcucagaagca

SEQ ID NO: 2601555 - RNA, 19 nt, Homo sapiens
  misc_RNA (1)...(19): siRNA sense strand
gugcaauauaugugguucu

SEQ ID NO: 2601556 - RNA, 19 nt, Homo sapiens
  misc_RNA (1)...(19): siRNA sense strand
ccuagaacuauucagcaua

SEQ ID NO: 2601557 - RNA, 19 nt, Homo sapiens
  misc_RNA (1)...(19): siRNA sense strand
gugguugacaagaggcauu

SEQ ID NO: 2601558 - RNA, 19 nt, Homo sapiens
  misc_RNA (1)...(19): siRNA sense strand
aaagaaacaggauggacau

SEQ ID NO: 2601559 - RNA, 19 nt, Homo sapiens
  misc_RNA (1)...(19): siRNA sense strand
uuugacuaccucagggaaa

SEQ ID NO: 2601560 - RNA, 19 nt, Homo sapiens
  misc_RNA (1)...(19): siRNA sense strand
caugagaguagaagugguu

SEQ ID NO: 2601561 - RNA, 19 nt, Homo sapiens
  misc_RNA (1)...(19): siRNA sense strand
ugaaauuagaagcaguaga

SEQ ID NO: 2601562 - RNA, 19 nt, Homo sapiens
  misc_RNA (1)...(19): siRNA sense strand
auggaugggaagaagagua

SEQ ID NO: 2601563 - RNA, 19 nt, Homo sapiens
  misc_RNA (1)...(19): siRNA sense strand
aguagaaguucccaauaca

SEQ ID NO: 2601564 - RNA, 19 nt, Homo sapiens
  misc_RNA (1)...(19): siRNA sense strand
agauagaacagaugacuuc

SEQ ID NO: 2601565 - RNA, 19 nt, Homo sapiens
  misc_RNA (1)...(19): siRNA sense strand
aauuagaagcaguagaucu

SEQ ID NO: 2601566 - RNA, 19 nt, Homo sapiens
  misc_RNA (1)...(19): siRNA sense strand
caauacagacugcagccua

SEQ ID NO: 2601567 - RNA, 19 nt, Homo sapiens
  misc_RNA (1)...(19): siRNA sense strand
aaaugugagaguagaaguu

SEQ ID NO: 2601568 - RNA, 19 nt, Homo sapiens
  misc_RNA (1)...(19): siRNA sense strand
ugaaauuggaagcuauaga

SEQ ID NO: 2601569 - RNA, 19 nt, Homo sapiens
  misc_RNA (1)...(19): siRNA sense strand
caggauggauggcggguca

SEQ ID NO: 2601570 - RNA, 19 nt, Homo sapiens
  misc_RNA (1)...(19): siRNA sense strand
cagaugagauugagcaggu

SEQ ID NO: 2601571 - RNA, 19 nt, Homo sapiens
  misc_RNA (1)...(19): siRNA sense strand
aagaaaguugugaaggaga

SEQ ID NO: 2601572 - RNA, 19 nt, Homo sapiens
  misc_RNA (1)...(19): siRNA sense strand
ugggauucuucguuggauu

SEQ ID NO: 2601573 - RNA, 19 nt, Homo sapiens
  misc_RNA (1)...(19): siRNA sense strand
gaagauuuucaaagaggaa

SEQ ID NO: 2601574 - RNA, 19 nt, Homo sapiens
  misc_RNA (1)...(19): siRNA sense strand
uguaaugaccacagggaaa

SEQ ID NO: 2601575 - RNA, 19 nt, Homo sapiens
  misc_RNA (1)...(19): siRNA sense strand
gaauggaagucuuuggcua

SEQ ID NO: 2601576 - RNA, 19 nt, Homo sapiens
  misc_RNA (1)...(19): siRNA sense strand
cagacuaaacagagaggau

SEQ ID NO: 2601577 - RNA, 19 nt, Homo sapiens
  misc_RNA (1)...(19): siRNA sense strand
gcuuaggaauccagcgcuu

SEQ ID NO: 2601578 - RNA, 19 nt, Homo sapiens
  misc_RNA (1)...(19): siRNA sense strand
caauaaaggcagauggcgu

SEQ ID NO: 2601579 - RNA, 19 nt, Homo sapiens
  misc_RNA (1)...(19): siRNA sense strand
agucugugcucuaaggaau

SEQ ID NO: 2601580 - RNA, 19 nt, Homo sapiens
  misc_RNA (1)...(19): siRNA sense strand
aggcagauggcgucacaaa

SEQ ID NO: 2601581 - RNA, 19 nt, Homo sapiens
  misc_RNA (1)...(19): siRNA sense strand
ccuuguaauugcuuaggaa

SEQ ID NO: 2601582 - RNA, 19 nt, Homo sapiens
  misc_RNA (1)...(19): siRNA sense strand
cguuggaggaugugagcga

SEQ ID NO: 2601583 - RNA, 19 nt, Homo sapiens
  misc_RNA (1)...(19): siRNA sense strand
gugguaugucuguguguaa

SEQ ID NO: 2601584 - RNA, 19 nt, Homo sapiens
  misc_RNA (1)...(19): siRNA sense strand
aauggaagucuuuggcuaa

SEQ ID NO: 2601585 - RNA, 19 nt, Homo sapiens
  misc_RNA (1)...(19): siRNA sense strand
ccuccuugguaaaguauau

SEQ ID NO: 2601586 - RNA, 19 nt, Homo sapiens
  misc_RNA (1)...(19): siRNA sense strand
uguuaucauuuguguggaa

SEQ ID NO: 2601587 - RNA, 19 nt, Homo sapiens
  misc_RNA (1)...(19): siRNA sense strand
cagggaaagccgagaaaug

SEQ ID NO: 2601588 - RNA, 19 nt, Homo sapiens
  misc_RNA (1)...(19): siRNA sense strand
gcaugaagcaagacgguac

SEQ ID NO: 2601589 - RNA, 19 nt, Homo sapiens
  misc_RNA (1)...(19): siRNA sense strand
ggaaaauggagaagccaca

SEQ ID NO: 2601590 - RNA, 19 nt, Homo sapiens
  misc_RNA (1)...(19): siRNA sense strand
gguucaaucuuaugaucca

SEQ ID NO: 2601591 - RNA, 19 nt, Homo sapiens
  misc_RNA (1)...(19): siRNA sense strand
aaacagacuuagcagcgua

SEQ ID NO: 2601592 - RNA, 19 nt, Homo sapiens
  misc_RNA (1)...(19): siRNA sense strand
ccacagggaaagccgagaa

SEQ ID NO: 2601593 - RNA, 19 nt, Homo sapiens
  misc_RNA (1)...(19): siRNA sense strand
guaccacauacuugggaau

SEQ ID NO: 2601594 - RNA, 19 nt, Homo sapiens
  misc_RNA (1)...(19): siRNA sense strand
aaagaauuuccuugccaua

SEQ ID NO: 2601595 - RNA, 19 nt, Homo sapiens
  misc_RNA (1)...(19): siRNA sense strand
cccuaaacaaccugaucua

SEQ ID NO: 2601596 - RNA, 19 nt, Homo sapiens
  misc_RNA (1)...(19): siRNA sense strand
gcaauauacuguuacgauc

SEQ ID NO: 2601597 - RNA, 19 nt, Homo sapiens
  misc_RNA (1)...(19): siRNA sense strand
gcuuauucacagauguuau

SEQ ID NO: 2601598 - RNA, 19 nt, Homo sapiens
  misc_RNA (1)...(19): siRNA sense strand
guuuauacuggaaagguga

SEQ ID NO: 2601599 - RNA, 19 nt, Homo sapiens
  misc_RNA (1)...(19): siRNA sense strand
cuuaugauccagaaaccaa

SEQ ID NO: 2601600 - RNA, 19 nt, Homo sapiens
  misc_RNA (1)...(19): siRNA sense strand
acauucagccgucaggaaa

SEQ ID NO: 2601601 - RNA, 19 nt, Homo sapiens
  misc_RNA (1)...(19): siRNA sense strand
cgaaaacauacuccagaua

SEQ ID NO: 2601602 - RNA, 19 nt, Homo sapiens
  misc_RNA (1)...(19): siRNA sense strand
guuugugauugguggagga

SEQ ID NO: 2601603 - RNA, 19 nt, Homo sapiens
  misc_RNA (1)...(19): siRNA sense strand
ugugauugguggaggaccu

SEQ ID NO: 2601604 - RNA, 19 nt, Homo sapiens
  misc_RNA (1)...(19): siRNA sense strand
uggagaagccacagacacu

SEQ ID NO: 2601605 - RNA, 19 nt, Homo sapiens
  misc_RNA (1)...(19): siRNA sense strand
auauugggacgcagacuaa

SEQ ID NO: 2601606 - RNA, 19 nt, Homo sapiens
  misc_RNA (1)...(19): siRNA sense strand
uauaacagcuguaucccua

SEQ ID NO: 2601607 - RNA, 19 nt, Homo sapiens
  misc_RNA (1)...(19): siRNA sense strand
gcuccugacacaugugaga

SEQ ID NO: 2601608 - RNA, 19 nt, Homo sapiens
  misc_RNA (1)...(19): siRNA sense strand
ggaccaauugauccagaau

SEQ ID NO: 2601609 - RNA, 19 nt, Homo sapiens
  misc_RNA (1)...(19): siRNA sense strand
gcgaguuggaggauuuaau

SEQ ID NO: 2601610 - RNA, 19 nt, Homo sapiens
  misc_RNA (1)...(19): siRNA sense strand
cagacuuagcagcguagaa

SEQ ID NO: 2601611 - RNA, 19 nt, Homo sapiens
  misc_RNA (1)...(19): siRNA sense strand
gacuaaacagagaggaucu

SEQ ID NO: 2601612 - RNA, 19 nt, Homo sapiens
  misc_RNA (1)...(19): siRNA sense strand
gcgcagacuucgagagcga

SEQ ID NO: 2601613 - RNA, 19 nt, Homo sapiens
  misc_RNA (1)...(19): siRNA sense strand
aggacgagggcgaggaauu

SEQ ID NO: 2601614 - RNA, 19 nt, Homo sapiens
  misc_RNA (1)...(19): siRNA sense strand
cccaacagcucgaggagga

SEQ ID NO: 2601615 - RNA, 19 nt, Homo sapiens
  misc_RNA (1)...(19): siRNA sense strand
gcccaauggaggaggagga

SEQ ID NO: 2601616 - RNA, 19 nt, Homo sapiens
  misc_RNA (1)...(19): siRNA sense strand
ucugagaacaagagaacca

SEQ ID NO: 2601617 - RNA, 19 nt, Homo sapiens
  misc_RNA (1)...(19): siRNA sense strand
uugaagaagccgacaagau

SEQ ID NO: 2601618 - RNA, 19 nt, Homo sapiens
  misc_RNA (1)...(19): siRNA sense strand
aggaggaggcccagccaau

SEQ ID NO: 2601619 - RNA, 19 nt, Homo sapiens
  misc_RNA (1)...(19): siRNA sense strand
cugaguuguccgagcugua

SEQ ID NO: 2601620 - RNA, 19 nt, Homo sapiens
  misc_RNA (1)...(19): siRNA sense strand
guguauugaaugugggaaa

SEQ ID NO: 2601621 - RNA, 19 nt, Homo sapiens
  misc_RNA (1)...(19): siRNA sense strand
gugcagugaaugugggaga

SEQ ID NO: 2601622 - RNA, 19 nt, Homo sapiens
  misc_RNA (1)...(19): siRNA sense strand
gugcagugaguguggaaaa

SEQ ID NO: 2601623 - RNA, 19 nt, Homo sapiens
  misc_RNA (1)...(19): siRNA sense strand
acuccauauucaugagaga

SEQ ID NO: 2601624 - RNA, 19 nt, Homo sapiens
  misc_RNA (1)...(19): siRNA sense strand
acucuggagcaaagcguua

SEQ ID NO: 2601625 - RNA, 19 nt, Homo sapiens
  misc_RNA (1)...(19): siRNA sense strand
acgugaugcuggagaccuu

SEQ ID NO: 2601626 - RNA, 19 nt, Homo sapiens
  misc_RNA (1)...(19): siRNA sense strand
ucucauuaaccacaggaaa

SEQ ID NO: 2601627 - RNA, 19 nt, Homo sapiens
  misc_RNA (1)...(19): siRNA sense strand
cauuaaacacaggaggauu

SEQ ID NO: 2601628 - RNA, 19 nt, Homo sapiens
  misc_RNA (1)...(19): siRNA sense strand
aagaacaaguccugccuca

SEQ ID NO: 2601629 - RNA, 19 nt, Homo sapiens
  misc_RNA (1)...(19): siRNA sense strand
acccagaagagaucacaaa

SEQ ID NO: 2601630 - RNA, 19 nt, Homo sapiens
  misc_RNA (1)...(19): siRNA sense strand
cagugugaccuuugaagau

SEQ ID NO: 2601631 - RNA, 19 nt, Homo sapiens
  misc_RNA (1)...(19): siRNA sense strand
agagaugccuguaccguga

SEQ ID NO: 2601632 - RNA, 19 nt, Homo sapiens
  misc_RNA (1)...(19): siRNA sense strand
ccuuaugaguguggggaau

SEQ ID NO: 2601633 - RNA, 19 nt, Homo sapiens
  misc_RNA (1)...(19): siRNA sense strand
cugaaguggaggagggugu

SEQ ID NO: 2601634 - RNA, 19 nt, Homo sapiens
  misc_RNA (1)...(19): siRNA sense strand
gaugaggagaagaagccaa

SEQ ID NO: 2601635 - RNA, 19 nt, Homo sapiens
  misc_RNA (1)...(19): siRNA sense strand
aaaugagaauggagcccua

SEQ ID NO: 2601636 - RNA, 19 nt, Homo sapiens
  misc_RNA (1)...(19): siRNA sense strand
gggauggcauggagggucu

SEQ ID NO: 2601637 - RNA, 19 nt, Homo sapiens
  misc_RNA (1)...(19): siRNA sense strand
gugcaaacccauagggcag

SEQ ID NO: 2601638 - RNA, 19 nt, Homo sapiens
  misc_RNA (1)...(19): siRNA sense strand
cuaaaguccaggagaccau

SEQ ID NO: 2601639 - RNA, 19 nt, Homo sapiens
  misc_RNA (1)...(19): siRNA sense strand
cccggaacuuggugcagaa

SEQ ID NO: 2601640 - RNA, 19 nt, Homo sapiens
  misc_RNA (1)...(19): siRNA sense strand
ugggaagacuauuuggagu

SEQ ID NO: 2601641 - RNA, 19 nt, Homo sapiens
  misc_RNA (1)...(19): siRNA sense strand
ggguaauuguuauggaaaa

SEQ ID NO: 2601642 - RNA, 19 nt, Homo sapiens
  misc_RNA (1)...(19): siRNA sense strand
aguucauacuggaaagaaa

SEQ ID NO: 2601643 - RNA, 19 nt, Homo sapiens
  misc_RNA (1)...(19): siRNA sense strand
auguaaagaauguggaaga

SEQ ID NO: 2601644 - RNA, 19 nt, Homo sapiens
  misc_RNA (1)...(19): siRNA sense strand
guguaaggaaugugggaga

SEQ ID NO: 2601645 - RNA, 19 nt, Homo sapiens
  misc_RNA (1)...(19): siRNA sense strand
guggaagauccuuuagaaa

SEQ ID NO: 2601646 - RNA, 19 nt, Homo sapiens
  misc_RNA (1)...(19): siRNA sense strand
auggaaacucugugagaau

SEQ ID NO: 2601647 - RNA, 19 nt, Homo sapiens
  misc_RNA (1)...(19): siRNA sense strand
cccuaugaauguaaggaau

SEQ ID NO: 2601648 - RNA, 19 nt, Homo sapiens
  misc_RNA (1)...(19): siRNA sense strand
caauagaucuucaacgcuu

SEQ ID NO: 2601649 - RNA, 19 nt, Homo sapiens
  misc_RNA (1)...(19): siRNA sense strand
ugaaauucucaauggaaga

SEQ ID NO: 2601650 - RNA, 19 nt, Homo sapiens
  misc_RNA (1)...(19): siRNA sense strand
guucauacuggaaagaaau

SEQ ID NO: 2601651 - RNA, 19 nt, Homo sapiens
  misc_RNA (1)...(19): siRNA sense strand
auguacggaaugugggaaa

SEQ ID NO: 2601652 - RNA, 19 nt, Homo sapiens
  misc_RNA (1)...(19): siRNA sense strand
auguaaggaauguggccaa

SEQ ID NO: 2601653 - RNA, 19 nt, Homo sapiens
  misc_RNA (1)...(19): siRNA sense strand
caggaaugugagagagcca

SEQ ID NO: 2601654 - RNA, 19 nt, Homo sapiens
  misc_RNA (1)...(19): siRNA sense strand
uggaauaaaaccacacaaa

SEQ ID NO: 2601655 - RNA, 19 nt, Homo sapiens
  misc_RNA (1)...(19): siRNA sense strand
cuucagaaugggaaauaca

SEQ ID NO: 2601656 - RNA, 19 nt, Homo sapiens
  misc_RNA (1)...(19): siRNA sense strand
cccuaucaguguaaggaau

SEQ ID NO: 2601657 - RNA, 19 nt, Homo sapiens
  misc_RNA (1)...(19): siRNA sense strand
aggguaauuguuauggaaa

SEQ ID NO: 2601658 - RNA, 19 nt, Homo sapiens
  misc_RNA (1)...(19): siRNA sense strand
aagaacucacacuggaaua

SEQ ID NO: 2601659 - RNA, 19 nt, Homo sapiens
  misc_RNA (1)...(19): siRNA sense strand
uguaaagaauguggaagau

SEQ ID NO: 2601660 - RNA, 19 nt, Homo sapiens
  misc_RNA (1)...(19): siRNA sense strand
gcucagaauggagggaaca

SEQ ID NO: 2601661 - RNA, 19 nt, Homo sapiens
  misc_RNA (1)...(19): siRNA sense strand
caccuuaacuccaggccuu

SEQ ID NO: 2601662 - RNA, 19 nt, Homo sapiens
  misc_RNA (1)...(19): siRNA sense strand
gggauacaaaugcagacaa

SEQ ID NO: 2601663 - RNA, 19 nt, Homo sapiens
  misc_RNA (1)...(19): siRNA sense strand
cagaauggagggaacacuu

SEQ ID NO: 2601664 - RNA, 19 nt, Homo sapiens
  misc_RNA (1)...(19): siRNA sense strand
agacaauucaagugaucaa

SEQ ID NO: 2601665 - RNA, 19 nt, Homo sapiens
  misc_RNA (1)...(19): siRNA sense strand
cuucaugaucagaaaguuu

SEQ ID NO: 2601666 - RNA, 19 nt, Homo sapiens
  misc_RNA (1)...(19): siRNA sense strand
ggggacaggccaaagaaaa

SEQ ID NO: 2601667 - RNA, 19 nt, Homo sapiens
  misc_RNA (1)...(19): siRNA sense strand
gguuaauggucauggucac

SEQ ID NO: 2601668 - RNA, 19 nt, Homo sapiens
  misc_RNA (1)...(19): siRNA sense strand
gugccagaggccugcuaaa

SEQ ID NO: 2601669 - RNA, 19 nt, Homo sapiens
  misc_RNA (1)...(19): siRNA sense strand
cgacaaaaccauugggguc

SEQ ID NO: 2601670 - RNA, 19 nt, Homo sapiens
  misc_RNA (1)...(19): siRNA sense strand
gguccaugccagagugauc

SEQ ID NO: 2601671 - RNA, 19 nt, Homo sapiens
  misc_RNA (1)...(19): siRNA sense strand
augaaaagaaacuggccaa

SEQ ID NO: 2601672 - RNA, 19 nt, Homo sapiens
  misc_RNA (1)...(19): siRNA sense strand
gguauuggauggaaugaua

SEQ ID NO: 2601673 - RNA, 19 nt, Homo sapiens
  misc_RNA (1)...(19): siRNA sense strand
ugaauacagugcagaaaua

SEQ ID NO: 2601674 - RNA, 19 nt, Homo sapiens
  misc_RNA (1)...(19): siRNA sense strand
ugaacaguguggagcguua

SEQ ID NO: 2601675 - RNA, 19 nt, Homo sapiens
  misc_RNA (1)...(19): siRNA sense strand
cuagagagaaugaaugaaa

SEQ ID NO: 2601676 - RNA, 19 nt, Homo sapiens
  misc_RNA (1)...(19): siRNA sense strand
ucgaguaggugauguuaaa

SEQ ID NO: 2601677 - RNA, 19 nt, Homo sapiens
  misc_RNA (1)...(19): siRNA sense strand
gcaccaaugacgacaacaa

SEQ ID NO: 2601678 - RNA, 19 nt, Homo sapiens
  misc_RNA (1)...(19): siRNA sense strand
ggauucagcuggcaugaua

SEQ ID NO: 2601679 - RNA, 19 nt, Homo sapiens
  misc_RNA (1)...(19): siRNA sense strand
uguccagcauugaaagaua

SEQ ID NO: 2601680 - RNA, 19 nt, Homo sapiens
  misc_RNA (1)...(19): siRNA sense strand
ucgcuaugaauuuggaaua

SEQ ID NO: 2601681 - RNA, 19 nt, Homo sapiens
  misc_RNA (1)...(19): siRNA sense strand
aggagaacuuuaugccuua

SEQ ID NO: 2601682 - RNA, 19 nt, Homo sapiens
  misc_RNA (1)...(19): siRNA sense strand
uggauaguguggagaugua

SEQ ID NO: 2601683 - RNA, 19 nt, Homo sapiens
  misc_RNA (1)...(19): siRNA sense strand
gauacaaauacuuggacuu

SEQ ID NO: 2601684 - RNA, 19 nt, Homo sapiens
  misc_RNA (1)...(19): siRNA sense strand
cagaaugacucuuggauug

SEQ ID NO: 2601685 - RNA, 19 nt, Homo sapiens
  misc_RNA (1)...(19): siRNA sense strand
gaaagaaccuagaacagga

SEQ ID NO: 2601686 - RNA, 19 nt, Homo sapiens
  misc_RNA (1)...(19): siRNA sense strand
gcuggaauccugauacaaa

SEQ ID NO: 2601687 - RNA, 19 nt, Homo sapiens
  misc_RNA (1)...(19): siRNA sense strand
cagcgguauuggauggaau

SEQ ID NO: 2601688 - RNA, 19 nt, Homo sapiens
  misc_RNA (1)...(19): siRNA sense strand
cgaccuacaugcuugcuaa

SEQ ID NO: 2601689 - RNA, 19 nt, Homo sapiens
  misc_RNA (1)...(19): siRNA sense strand
cuacaugcuugcuaacuua

SEQ ID NO: 2601690 - RNA, 19 nt, Homo sapiens
  misc_RNA (1)...(19): siRNA sense strand
ccaaugacgacaacaagaa

SEQ ID NO: 2601691 - RNA, 19 nt, Homo sapiens
  misc_RNA (1)...(19): siRNA sense strand
ucagauacguggcuggauu

SEQ ID NO: 2601692 - RNA, 19 nt, Homo sapiens
  misc_RNA (1)...(19): siRNA sense strand
gaaugaaagccgaaguacu

SEQ ID NO: 2601693 - RNA, 19 nt, Homo sapiens
  misc_RNA (1)...(19): siRNA sense strand
uugugcaguaggagggaaa

SEQ ID NO: 2601694 - RNA, 19 nt, Homo sapiens
  misc_RNA (1)...(19): siRNA sense strand
cugcuguaaucgauaacua

SEQ ID NO: 2601695 - RNA, 19 nt, Homo sapiens
  misc_RNA (1)...(19): siRNA sense strand
gagaaugaaugaaagccga

SEQ ID NO: 2601696 - RNA, 19 nt, Homo sapiens
  misc_RNA (1)...(19): siRNA sense strand
caggagaacuuuaugccuu

SEQ ID NO: 2601697 - RNA, 19 nt, Homo sapiens
  misc_RNA (1)...(19): siRNA sense strand
gggucuuccuaucugaaua

SEQ ID NO: 2601698 - RNA, 19 nt, Homo sapiens
  misc_RNA (1)...(19): siRNA sense strand
ugacaucauucuucgagua

SEQ ID NO: 2601699 - RNA, 19 nt, Homo sapiens
  misc_RNA (1)...(19): siRNA sense strand
uggacuguguguagaccaa

SEQ ID NO: 2601700 - RNA, 19 nt, Homo sapiens
  misc_RNA (1)...(19): siRNA sense strand
cugaauacagugcagaaau

SEQ ID NO: 2601701 - RNA, 19 nt, Homo sapiens
  misc_RNA (1)...(19): siRNA sense strand
cauuagagucuuggaucaa

SEQ ID NO: 2601702 - RNA, 19 nt, Homo sapiens
  misc_RNA (1)...(19): siRNA sense strand
gaauuuggaauaugcguuu

SEQ ID NO: 2601703 - RNA, 19 nt, Homo sapiens
  misc_RNA (1)...(19): siRNA sense strand
aguacuugcaggagaacuu

SEQ ID NO: 2601704 - RNA, 19 nt, Homo sapiens
  misc_RNA (1)...(19): siRNA sense strand
augcugacuuggaugaaau

SEQ ID NO: 2601705 - RNA, 19 nt, Homo sapiens
  misc_RNA (1)...(19): siRNA sense strand
acuaaauacauaugccaga

SEQ ID NO: 2601706 - RNA, 19 nt, Homo sapiens
  misc_RNA (1)...(19): siRNA sense strand
aaugaaagaaccuagaaca

SEQ ID NO: 2601707 - RNA, 19 nt, Homo sapiens
  misc_RNA (1)...(19): siRNA sense strand
aaacauuccucgcuaugaa

SEQ ID NO: 2601708 - RNA, 19 nt, Homo sapiens
  misc_RNA (1)...(19): siRNA sense strand
aggaguuggugcugcugua

SEQ ID NO: 2601709 - RNA, 19 nt, Homo sapiens
  misc_RNA (1)...(19): siRNA sense strand
ccuaaacauuccucgcuau

SEQ ID NO: 2601710 - RNA, 19 nt, Homo sapiens
  misc_RNA (1)...(19): siRNA sense strand
cuggaauccugauacaaau

SEQ ID NO: 2601711 - RNA, 19 nt, Homo sapiens
  misc_RNA (1)...(19): siRNA sense strand
agaaugaaugaaagccgaa

SEQ ID NO: 2601712 - RNA, 19 nt, Homo sapiens
  misc_RNA (1)...(19): siRNA sense strand
aggugguuaugauggacaa

SEQ ID NO: 2601713 - RNA, 19 nt, Homo sapiens
  misc_RNA (1)...(19): siRNA sense strand
guuacuaaacaguguacga

SEQ ID NO: 2601714 - RNA, 19 nt, Homo sapiens
  misc_RNA (1)...(19): siRNA sense strand
augaaugaaagccgaagua

SEQ ID NO: 2601715 - RNA, 19 nt, Homo sapiens
  misc_RNA (1)...(19): siRNA sense strand
uggacauaauggagucuca

SEQ ID NO: 2601716 - RNA, 19 nt, Homo sapiens
  misc_RNA (1)...(19): siRNA sense strand
cuagacuauaugaagcaaa

SEQ ID NO: 2601717 - RNA, 19 nt, Homo sapiens
  misc_RNA (1)...(19): siRNA sense strand
ucagaaugacucuuggauu

SEQ ID NO: 2601718 - RNA, 19 nt, Homo sapiens
  misc_RNA (1)...(19): siRNA sense strand
uguuauaggugguauugca

SEQ ID NO: 2601719 - RNA, 19 nt, Homo sapiens
  misc_RNA (1)...(19): siRNA sense strand
ucgcugcaacuuuggguua

SEQ ID NO: 2601720 - RNA, 19 nt, Homo sapiens
  misc_RNA (1)...(19): siRNA sense strand
cauugaagauagagccgaa

SEQ ID NO: 2601721 - RNA, 19 nt, Homo sapiens
  misc_RNA (1)...(19): siRNA sense strand
acgagaaagagaugaaaau

SEQ ID NO: 2601722 - RNA, 19 nt, Homo sapiens
  misc_RNA (1)...(19): siRNA sense strand
acagcuacauucaaggcaa

SEQ ID NO: 2601723 - RNA, 19 nt, Homo sapiens
  misc_RNA (1)...(19): siRNA sense strand
uuuuaagggaagauggaaa

SEQ ID NO: 2601724 - RNA, 19 nt, Homo sapiens
  misc_RNA (1)...(19): siRNA sense strand
cuuuagagucagaugucuu

SEQ ID NO: 2601725 - RNA, 19 nt, Homo sapiens
  misc_RNA (1)...(19): siRNA sense strand
uuuaagggaagauggaaaa

SEQ ID NO: 2601726 - RNA, 19 nt, Homo sapiens
  misc_RNA (1)...(19): siRNA sense strand
aaaacgagaaagagaugaa

SEQ ID NO: 2601727 - RNA, 19 nt, Homo sapiens
  misc_RNA (1)...(19): siRNA sense strand
cugcggacaccgaggucaa

SEQ ID NO: 2601728 - RNA, 19 nt, Homo sapiens
  misc_RNA (1)...(19): siRNA sense strand
cauuaugacucgaagcucu

SEQ ID NO: 2601729 - RNA, 19 nt, Homo sapiens
  misc_RNA (1)...(19): siRNA sense strand
gaagaggcgcugaaggagu

SEQ ID NO: 2601730 - RNA, 19 nt, Homo sapiens
  misc_RNA (1)...(19): siRNA sense strand
gcugaggagcauugagaag

SEQ ID NO: 2601731 - RNA, 19 nt, Homo sapiens
  misc_RNA (1)...(19): siRNA sense strand
ccucuggcucuguggaaga

SEQ ID NO: 2601732 - RNA, 19 nt, Homo sapiens
  misc_RNA (1)...(19): siRNA sense strand
gguccaagggccauggcuu

SEQ ID NO: 2601733 - RNA, 19 nt, Homo sapiens
  misc_RNA (1)...(19): siRNA sense strand
gcaccaagcaugagaccug

SEQ ID NO: 2601734 - RNA, 19 nt, Homo sapiens
  misc_RNA (1)...(19): siRNA sense strand
uggaauucccacagaguau

SEQ ID NO: 2601735 - RNA, 19 nt, Homo sapiens
  misc_RNA (1)...(19): siRNA sense strand
gaacguggcucuaagggau

SEQ ID NO: 2601736 - RNA, 19 nt, Homo sapiens
  misc_RNA (1)...(19): siRNA sense strand
aaaugguaacucaggguaa

SEQ ID NO: 2601737 - RNA, 19 nt, Homo sapiens
  misc_RNA (1)...(19): siRNA sense strand
uggcaaaauccuagaugua

SEQ ID NO: 2601738 - RNA, 19 nt, Homo sapiens
  misc_RNA (1)...(19): siRNA sense strand
gcagacagaagguggagca

SEQ ID NO: 2601739 - RNA, 19 nt, Homo sapiens
  misc_RNA (1)...(19): siRNA sense strand
gagcacagacagacggcca

SEQ ID NO: 2601740 - RNA, 19 nt, Homo sapiens
  misc_RNA (1)...(19): siRNA sense strand
gggagaaauuacacggcac

SEQ ID NO: 2601741 - RNA, 19 nt, Homo sapiens
  misc_RNA (1)...(19): siRNA sense strand
gcucuaagggauucggguu

SEQ ID NO: 2601742 - RNA, 19 nt, Homo sapiens
  misc_RNA (1)...(19): siRNA sense strand
gccguaaaaucgaggugaa

SEQ ID NO: 2601743 - RNA, 19 nt, Homo sapiens
  misc_RNA (1)...(19): siRNA sense strand
agaugugucccuaggcaau

SEQ ID NO: 2601744 - RNA, 19 nt, Homo sapiens
  misc_RNA (1)...(19): siRNA sense strand
aaccaggagccgacaacaa

SEQ ID NO: 2601745 - RNA, 19 nt, Homo sapiens
  misc_RNA (1)...(19): siRNA sense strand
cagaugugucccuaggcaa

SEQ ID NO: 2601746 - RNA, 19 nt, Homo sapiens
  misc_RNA (1)...(19): siRNA sense strand
ccaccaaagaagaagaaaa

SEQ ID NO: 2601747 - RNA, 19 nt, Homo sapiens
  misc_RNA (1)...(19): siRNA sense strand
ggagacaagcugaagcgaa

SEQ ID NO: 2601748 - RNA, 19 nt, Homo sapiens
  misc_RNA (1)...(19): siRNA sense strand
cucaaggacagcagaacua

SEQ ID NO: 2601749 - RNA, 19 nt, Homo sapiens
  misc_RNA (1)...(19): siRNA sense strand
auguagaaagaaaggccaa

SEQ ID NO: 2601750 - RNA, 19 nt, Homo sapiens
  misc_RNA (1)...(19): siRNA sense strand
gucagaaaugcuuggaauu

SEQ ID NO: 2601751 - RNA, 19 nt, Homo sapiens
  misc_RNA (1)...(19): siRNA sense strand
uuaugaaugcacaggaaaa

SEQ ID NO: 2601752 - RNA, 19 nt, Homo sapiens
  misc_RNA (1)...(19): siRNA sense strand
cuuaugaaugcacaggaaa

SEQ ID NO: 2601753 - RNA, 19 nt, Homo sapiens
  misc_RNA (1)...(19): siRNA sense strand
aucagagagugaagaaaca

SEQ ID NO: 2601754 - RNA, 19 nt, Homo sapiens
  misc_RNA (1)...(19): siRNA sense strand
uggaccaggaugagagaaa

SEQ ID NO: 2601755 - RNA, 19 nt, Homo sapiens
  misc_RNA (1)...(19): siRNA sense strand
aggaagaggaggaggagga

SEQ ID NO: 2601756 - RNA, 19 nt, Homo sapiens
  misc_RNA (1)...(19): siRNA sense strand
aggaggagguggaggagga

SEQ ID NO: 2601757 - RNA, 19 nt, Homo sapiens
  misc_RNA (1)...(19): siRNA sense strand
augaugaagaggaggaaga

SEQ ID NO: 2601758 - RNA, 19 nt, Homo sapiens
  misc_RNA (1)...(19): siRNA sense strand
gggcagaaguucaucagga

SEQ ID NO: 2601759 - RNA, 19 nt, Homo sapiens
  misc_RNA (1)...(19): siRNA sense strand
ggacgaagucgcuggagca

SEQ ID NO: 2601760 - RNA, 19 nt, Homo sapiens
  misc_RNA (1)...(19): siRNA sense strand
aggaggaagaggaggagga

SEQ ID NO: 2601761 - RNA, 19 nt, Homo sapiens
  misc_RNA (1)...(19): siRNA sense strand
gagaugaugaagaggagga

SEQ ID NO: 2601762 - RNA, 19 nt, Homo sapiens
  misc_RNA (1)...(19): siRNA sense strand
ggggagaagacgacagaga

SEQ ID NO: 2601763 - RNA, 19 nt, Homo sapiens
  misc_RNA (1)...(19): siRNA sense strand
aagaggaggaagaggagga

SEQ ID NO: 2601764 - RNA, 19 nt, Homo sapiens
  misc_RNA (1)...(19): siRNA sense strand
aggaggaggagguggagga

SEQ ID NO: 2601765 - RNA, 19 nt, Homo sapiens
  misc_RNA (1)...(19): siRNA sense strand
augaagaggaggaagagga

SEQ ID NO: 2601766 - RNA, 19 nt, Homo sapiens
  misc_RNA (1)...(19): siRNA sense strand
caguggaagugcaggccga

SEQ ID NO: 2601767 - RNA, 19 nt, Homo sapiens
  misc_RNA (1)...(19): siRNA sense strand
aagaagggcuuuaaccaga

SEQ ID NO: 2601768 - RNA, 19 nt, Homo sapiens
  misc_RNA (1)...(19): siRNA sense strand
gaggacaucuucacggaga

SEQ ID NO: 2601769 - RNA, 19 nt, Homo sapiens
  misc_RNA (1)...(19): siRNA sense strand
aggagguggaggaggacuu

SEQ ID NO: 2601770 - RNA, 19 nt, Homo sapiens
  misc_RNA (1)...(19): siRNA sense strand
guggaggaggacuuggaaa

SEQ ID NO: 2601771 - RNA, 19 nt, Homo sapiens
  misc_RNA (1)...(19): siRNA sense strand
aggaggaggaggaggugga

SEQ ID NO: 2601772 - RNA, 19 nt, Homo sapiens
  misc_RNA (1)...(19): siRNA sense strand
cugcaggcggugggagaaa

SEQ ID NO: 2601773 - RNA, 19 nt, Homo sapiens
  misc_RNA (1)...(19): siRNA sense strand
ccaaauccaagaagggcuu

SEQ ID NO: 2601774 - RNA, 19 nt, Homo sapiens
  misc_RNA (1)...(19): siRNA sense strand
gggagaugaugaagaggag

SEQ ID NO: 2601775 - RNA, 19 nt, Homo sapiens
  misc_RNA (1)...(19): siRNA sense strand
agaucaaaguggacaaggu

SEQ ID NO: 2601776 - RNA, 19 nt, Homo sapiens
  misc_RNA (1)...(19): siRNA sense strand
acugcaggcuacaggccaa

SEQ ID NO: 2601777 - RNA, 19 nt, Homo sapiens
  misc_RNA (1)...(19): siRNA sense strand
ccugaguggagaugaggau

SEQ ID NO: 2601778 - RNA, 19 nt, Homo sapiens
  misc_RNA (1)...(19): siRNA sense strand
cgcagaucaaaguggacaa

SEQ ID NO: 2601779 - RNA, 19 nt, Homo sapiens
  misc_RNA (1)...(19): siRNA sense strand
cucuaacacuacagauuau

SEQ ID NO: 2601780 - RNA, 19 nt, Homo sapiens
  misc_RNA (1)...(19): siRNA sense strand
acgcuaaaccugacagaag

SEQ ID NO: 2601781 - RNA, 19 nt, Homo sapiens
  misc_RNA (1)...(19): siRNA sense strand
cagauuagcacaucgcaga

SEQ ID NO: 2601782 - RNA, 19 nt, Homo sapiens
  misc_RNA (1)...(19): siRNA sense strand
ggaagcaggaggagcugga

SEQ ID NO: 2601783 - RNA, 19 nt, Homo sapiens
  misc_RNA (1)...(19): siRNA sense strand
caaagaauguagagccuga

SEQ ID NO: 2601784 - RNA, 19 nt, Homo sapiens
  misc_RNA (1)...(19): siRNA sense strand
agaaugugcucaaagggaa

SEQ ID NO: 2601785 - RNA, 19 nt, Homo sapiens
  misc_RNA (1)...(19): siRNA sense strand
cggugaaaccugggaagaa

SEQ ID NO: 2601786 - RNA, 19 nt, Homo sapiens
  misc_RNA (1)...(19): siRNA sense strand
guuuaaaagaacaaggcua

SEQ ID NO: 2601787 - RNA, 19 nt, Homo sapiens
  misc_RNA (1)...(19): siRNA sense strand
ugaaaggagaaguggaugu

SEQ ID NO: 2601788 - RNA, 19 nt, Homo sapiens
  misc_RNA (1)...(19): siRNA sense strand
agaacaaggcuaugaucca

SEQ ID NO: 2601789 - RNA, 19 nt, Homo sapiens
  misc_RNA (1)...(19): siRNA sense strand
cugggaagaaugugcucaa

SEQ ID NO: 2601790 - RNA, 19 nt, Homo sapiens
  misc_RNA (1)...(19): siRNA sense strand
ccaucuggugggauacaaa

SEQ ID NO: 2601791 - RNA, 19 nt, Homo sapiens
  misc_RNA (1)...(19): siRNA sense strand
uggugggauacaaaggaaa

SEQ ID NO: 2601792 - RNA, 19 nt, Homo sapiens
  misc_RNA (1)...(19): siRNA sense strand
gaaaguugggaguggguuc

SEQ ID NO: 2601793 - RNA, 19 nt, Homo sapiens
  misc_RNA (1)...(19): siRNA sense strand
cccagaacuacgaggccua

SEQ ID NO: 2601794 - RNA, 19 nt, Homo sapiens
  misc_RNA (1)...(19): siRNA sense strand
cauccaccacaaagagaaa

SEQ ID NO: 2601795 - RNA, 19 nt, Homo sapiens
  misc_RNA (1)...(19): siRNA sense strand
cuggauggaaagacagcaa

SEQ ID NO: 2601796 - RNA, 19 nt, Homo sapiens
  misc_RNA (1)...(19): siRNA sense strand
ccuccugaaauaugaguuu

SEQ ID NO: 2601797 - RNA, 19 nt, Homo sapiens
  misc_RNA (1)...(19): siRNA sense strand
ccaggaaugugcccaaauu

SEQ ID NO: 2601798 - RNA, 19 nt, Homo sapiens
  misc_RNA (1)...(19): siRNA sense strand
caaauuuggacuagcucau

SEQ ID NO: 2601799 - RNA, 19 nt, Homo sapiens
  misc_RNA (1)...(19): siRNA sense strand
ggaacaaggcgcugggagu

SEQ ID NO: 2601800 - RNA, 19 nt, Homo sapiens
  misc_RNA (1)...(19): siRNA sense strand
gggagauggcaaaggcgaa

SEQ ID NO: 2601801 - RNA, 19 nt, Homo sapiens
  misc_RNA (1)...(19): siRNA sense strand
gaggcaaaucgaagggaga

SEQ ID NO: 2601802 - RNA, 19 nt, Homo sapiens
  misc_RNA (1)...(19): siRNA sense strand
agggagagugguugagauu

SEQ ID NO: 2601803 - RNA, 19 nt, Homo sapiens
  misc_RNA (1)...(19): siRNA sense strand
ugacagacacagaacgaga

SEQ ID NO: 2601804 - RNA, 19 nt, Homo sapiens
  misc_RNA (1)...(19): siRNA sense strand
caggaaaaucagcgacuaa

SEQ ID NO: 2601805 - RNA, 19 nt, Homo sapiens
  misc_RNA (1)...(19): siRNA sense strand
uuccagacuccaagagaua

SEQ ID NO: 2601806 - RNA, 19 nt, Homo sapiens
  misc_RNA (1)...(19): siRNA sense strand
cuggaacacaggaaagauu

SEQ ID NO: 2601807 - RNA, 19 nt, Homo sapiens
  misc_RNA (1)...(19): siRNA sense strand
acugaagaacguccagaaa

SEQ ID NO: 2601808 - RNA, 19 nt, Homo sapiens
  misc_RNA (1)...(19): siRNA sense strand
cagaacgagaccagauaga

SEQ ID NO: 2601809 - RNA, 19 nt, Homo sapiens
  misc_RNA (1)...(19): siRNA sense strand
aagagauauucacggaaaa

SEQ ID NO: 2601810 - RNA, 19 nt, Homo sapiens
  misc_RNA (1)...(19): siRNA sense strand
ucugaauaugggaggauga

SEQ ID NO: 2601811 - RNA, 19 nt, Homo sapiens
  misc_RNA (1)...(19): siRNA sense strand
ccgugaagacgcggaacaa

SEQ ID NO: 2601812 - RNA, 19 nt, Homo sapiens
  misc_RNA (1)...(19): siRNA sense strand
aagagugguggauaagaaa

SEQ ID NO: 2601813 - RNA, 19 nt, Homo sapiens
  misc_RNA (1)...(19): siRNA sense strand
aaucgaagggagagugguu

SEQ ID NO: 2601814 - RNA, 19 nt, Homo sapiens
  misc_RNA (1)...(19): siRNA sense strand
uggcaaacugagagauuuu

SEQ ID NO: 2601815 - RNA, 19 nt, Homo sapiens
  misc_RNA (1)...(19): siRNA sense strand
ccagacuccaagagauauu

SEQ ID NO: 2601816 - RNA, 19 nt, Homo sapiens
  misc_RNA (1)...(19): siRNA sense strand
cugaagaacguccagaaaa

SEQ ID NO: 2601817 - RNA, 19 nt, Homo sapiens
  misc_RNA (1)...(19): siRNA sense strand
guuaaaagagugguggaua

SEQ ID NO: 2601818 - RNA, 19 nt, Homo sapiens
  misc_RNA (1)...(19): siRNA sense strand
ggaccuguucagaagcaau

SEQ ID NO: 2601819 - RNA, 19 nt, Homo sapiens
  misc_RNA (1)...(19): siRNA sense strand
acaaauuuauacaggguga

SEQ ID NO: 2601820 - RNA, 19 nt, Homo sapiens
  misc_RNA (1)...(19): siRNA sense strand
auugaaugguacagagaga

SEQ ID NO: 2601821 - RNA, 19 nt, Homo sapiens
  misc_RNA (1)...(19): siRNA sense strand
caguaauguuuauggacca

SEQ ID NO: 2601822 - RNA, 19 nt, Homo sapiens
  misc_RNA (1)...(19): siRNA sense strand
auuuauacagggugacaua

SEQ ID NO: 2601823 - RNA, 19 nt, Homo sapiens
  misc_RNA (1)...(19): siRNA sense strand
cuacagcacaacaggaaau

SEQ ID NO: 2601824 - RNA, 19 nt, Homo sapiens
  misc_RNA (1)...(19): siRNA sense strand
ugaaugguacagagagaau

SEQ ID NO: 2601825 - RNA, 19 nt, Homo sapiens
  misc_RNA (1)...(19): siRNA sense strand
acuggaagaauguggaaaa

SEQ ID NO: 2601826 - RNA, 19 nt, Homo sapiens
  misc_RNA (1)...(19): siRNA sense strand
ggaaaauuggguugauuau

SEQ ID NO: 2601827 - RNA, 19 nt, Homo sapiens
  misc_RNA (1)...(19): siRNA sense strand
agucuuacugggaacaaua

SEQ ID NO: 2601828 - RNA, 19 nt, Homo sapiens
  misc_RNA (1)...(19): siRNA sense strand
accuaaagugccuuggaaa

SEQ ID NO: 2601829 - RNA, 19 nt, Homo sapiens
  misc_RNA (1)...(19): siRNA sense strand
uggcagucuugauaaggaa

SEQ ID NO: 2601830 - RNA, 19 nt, Homo sapiens
  misc_RNA (1)...(19): siRNA sense strand
gggucagggcuucaaacaa

SEQ ID NO: 2601831 - RNA, 19 nt, Homo sapiens
  misc_RNA (1)...(19): siRNA sense strand
ccuaaagugccuuggaaag

SEQ ID NO: 2601832 - RNA, 19 nt, Homo sapiens
  misc_RNA (1)...(19): siRNA sense strand
cuacaaauuuauacagggu

SEQ ID NO: 2601833 - RNA, 19 nt, Homo sapiens
  misc_RNA (1)...(19): siRNA sense strand
ugaaguauaugguggcagu

SEQ ID NO: 2601834 - RNA, 19 nt, Homo sapiens
  misc_RNA (1)...(19): siRNA sense strand
uggaaaauuggguugauua

SEQ ID NO: 2601835 - RNA, 19 nt, Homo sapiens
  misc_RNA (1)...(19): siRNA sense strand
gcuacagcacaacaggaaa

SEQ ID NO: 2601836 - RNA, 19 nt, Homo sapiens
  misc_RNA (1)...(19): siRNA sense strand
ccuuuaugcuacugauguu

SEQ ID NO: 2601837 - RNA, 19 nt, Homo sapiens
  misc_RNA (1)...(19): siRNA sense strand
aagcuggauuacugugcaa

SEQ ID NO: 2601838 - RNA, 19 nt, Homo sapiens
  misc_RNA (1)...(19): siRNA sense strand
uguuaauguuuauggcacu

SEQ ID NO: 2601839 - RNA, 19 nt, Homo sapiens
  misc_RNA (1)...(19): siRNA sense strand
caucacaagaagcaguaau

SEQ ID NO: 2601840 - RNA, 19 nt, Homo sapiens
  misc_RNA (1)...(19): siRNA sense strand
agaaaauacgcaagaggaa

SEQ ID NO: 2601841 - RNA, 19 nt, Homo sapiens
  misc_RNA (1)...(19): siRNA sense strand
ugggagaccuacugcggaa

SEQ ID NO: 2601842 - RNA, 19 nt, Homo sapiens
  misc_RNA (1)...(19): siRNA sense strand
cccucaacauugugggaga

SEQ ID NO: 2601843 - RNA, 19 nt, Homo sapiens
  misc_RNA (1)...(19): siRNA sense strand
cuggaaaccaucaaggaga

SEQ ID NO: 2601844 - RNA, 19 nt, Homo sapiens
  misc_RNA (1)...(19): siRNA sense strand
aggagaaguuugaagugca

SEQ ID NO: 2601845 - RNA, 19 nt, Homo sapiens
  misc_RNA (1)...(19): siRNA sense strand
aaggaugaagccagagauu

SEQ ID NO: 2601846 - RNA, 19 nt, Homo sapiens
  misc_RNA (1)...(19): siRNA sense strand
acugaaggaugaagccaga

SEQ ID NO: 2601847 - RNA, 19 nt, Homo sapiens
  misc_RNA (1)...(19): siRNA sense strand
aagcugaauuggagacgca

SEQ ID NO: 2601848 - RNA, 19 nt, Homo sapiens
  misc_RNA (1)...(19): siRNA sense strand
aggaggaagaagcuaacua

SEQ ID NO: 2601849 - RNA, 19 nt, Homo sapiens
  misc_RNA (1)...(19): siRNA sense strand
caggagggaagccgagaau

SEQ ID NO: 2601850 - RNA, 19 nt, Homo sapiens
  misc_RNA (1)...(19): siRNA sense strand
caaacagagggcagaaaau

SEQ ID NO: 2601851 - RNA, 19 nt, Homo sapiens
  misc_RNA (1)...(19): siRNA sense strand
cuacaaacagagggcagaa

SEQ ID NO: 2601852 - RNA, 19 nt, Homo sapiens
  misc_RNA (1)...(19): siRNA sense strand
gggcagaaaauacgcaaga

SEQ ID NO: 2601853 - RNA, 19 nt, Homo sapiens
  misc_RNA (1)...(19): siRNA sense strand
cagaaauacaucagagagc

SEQ ID NO: 2601854 - RNA, 19 nt, Homo sapiens
  misc_RNA (1)...(19): siRNA sense strand
ccagcgugccuuuggguga

SEQ ID NO: 2601855 - RNA, 19 nt, Homo sapiens
  misc_RNA (1)...(19): siRNA sense strand
ggugauaagggguuggaca

SEQ ID NO: 2601856 - RNA, 19 nt, Homo sapiens
  misc_RNA (1)...(19): siRNA sense strand
aaaucaaggucaagaggca

SEQ ID NO: 2601857 - RNA, 19 nt, Homo sapiens
  misc_RNA (1)...(19): siRNA sense strand
cgguucagcuggaaggcuu

SEQ ID NO: 2601858 - RNA, 19 nt, Homo sapiens
  misc_RNA (1)...(19): siRNA sense strand
gcaggaaugaggaugcaga

SEQ ID NO: 2601859 - RNA, 19 nt, Homo sapiens
  misc_RNA (1)...(19): siRNA sense strand
aucaaggucaagaggcaaa

SEQ ID NO: 2601860 - RNA, 19 nt, Homo sapiens
  misc_RNA (1)...(19): siRNA sense strand
ggaaagagagagaagccaa

SEQ ID NO: 2601861 - RNA, 19 nt, Homo sapiens
  misc_RNA (1)...(19): siRNA sense strand
gggaagaaagagaagaaaa

SEQ ID NO: 2601862 - RNA, 19 nt, Homo sapiens
  misc_RNA (1)...(19): siRNA sense strand
aagaagagauugaagcuca

SEQ ID NO: 2601863 - RNA, 19 nt, Homo sapiens
  misc_RNA (1)...(19): siRNA sense strand
cgggaaagagaguggcaga

SEQ ID NO: 2601864 - RNA, 19 nt, Homo sapiens
  misc_RNA (1)...(19): siRNA sense strand
acacugugaaagagcgaaa

SEQ ID NO: 2601865 - RNA, 19 nt, Homo sapiens
  misc_RNA (1)...(19): siRNA sense strand
gcuggaaauuaaaaggaaa

SEQ ID NO: 2601866 - RNA, 19 nt, Homo sapiens
  misc_RNA (1)...(19): siRNA sense strand
caaauagagaagagagacu

SEQ ID NO: 2601867 - RNA, 19 nt, Homo sapiens
  misc_RNA (1)...(19): siRNA sense strand
caaugaaacucuuugcaga

SEQ ID NO: 2601868 - RNA, 19 nt, Homo sapiens
  misc_RNA (1)...(19): siRNA sense strand
caauuguagaggaggauga

SEQ ID NO: 2601869 - RNA, 19 nt, Homo sapiens
  misc_RNA (1)...(19): siRNA sense strand
gggaaagagaguggcagaa

SEQ ID NO: 2601870 - RNA, 19 nt, Homo sapiens
  misc_RNA (1)...(19): siRNA sense strand
aaggaaacgacaaagggaa

SEQ ID NO: 2601871 - RNA, 19 nt, Homo sapiens
  misc_RNA (1)...(19): siRNA sense strand
aacaaauagagaagagaga

SEQ ID NO: 2601872 - RNA, 19 nt, Homo sapiens
  misc_RNA (1)...(19): siRNA sense strand
aagccaaacgggaaagaga

SEQ ID NO: 2601873 - RNA, 19 nt, Homo sapiens
  misc_RNA (1)...(19): siRNA sense strand
aggugaaacaaauagagaa

SEQ ID NO: 2601874 - RNA, 19 nt, Homo sapiens
  misc_RNA (1)...(19): siRNA sense strand
uuaaaaggaaagagagaga

SEQ ID NO: 2601875 - RNA, 19 nt, Homo sapiens
  misc_RNA (1)...(19): siRNA sense strand
ggcgaaacuuccaagccaa

SEQ ID NO: 2601876 - RNA, 19 nt, Homo sapiens
  misc_RNA (1)...(19): siRNA sense strand
auguaauucaggcaggaaa

SEQ ID NO: 2601877 - RNA, 19 nt, Homo sapiens
  misc_RNA (1)...(19): siRNA sense strand
caauuaaagaaggaaggaa

SEQ ID NO: 2601878 - RNA, 19 nt, Homo sapiens
  misc_RNA (1)...(19): siRNA sense strand
cuuuugaagcuguggacaa

SEQ ID NO: 2601879 - RNA, 19 nt, Homo sapiens
  misc_RNA (1)...(19): siRNA sense strand
aggggaagaaagagaagaa

SEQ ID NO: 2601880 - RNA, 19 nt, Homo sapiens
  misc_RNA (1)...(19): siRNA sense strand
ccuucuacagugaggugaa

SEQ ID NO: 2601881 - RNA, 19 nt, Homo sapiens
  misc_RNA (1)...(19): siRNA sense strand
aggaaaagaauacguggaa

SEQ ID NO: 2601882 - RNA, 19 nt, Homo sapiens
  misc_RNA (1)...(19): siRNA sense strand
aagccaaagagaugcauga

SEQ ID NO: 2601883 - RNA, 19 nt, Homo sapiens
  misc_RNA (1)...(19): siRNA sense strand
uccugaaguuacagaugaa

SEQ ID NO: 2601884 - RNA, 19 nt, Homo sapiens
  misc_RNA (1)...(19): siRNA sense strand
uguaauucaggcaggaaaa

SEQ ID NO: 2601885 - RNA, 19 nt, Homo sapiens
  misc_RNA (1)...(19): siRNA sense strand
cugaaguuacagaugaaga

SEQ ID NO: 2601886 - RNA, 19 nt, Homo sapiens
  misc_RNA (1)...(19): siRNA sense strand
cagaagaaguaguaguuaa

SEQ ID NO: 2601887 - RNA, 19 nt, Homo sapiens
  misc_RNA (1)...(19): siRNA sense strand
aaguaaagcuagaaggauu

SEQ ID NO: 2601888 - RNA, 19 nt, Homo sapiens
  misc_RNA (1)...(19): siRNA sense strand
ccaaagagggugagaaaca

SEQ ID NO: 2601889 - RNA, 19 nt, Homo sapiens
  misc_RNA (1)...(19): siRNA sense strand
gcccaaagagggugagaaa

SEQ ID NO: 2601890 - RNA, 19 nt, Homo sapiens
  misc_RNA (1)...(19): siRNA sense strand
aaagauaccucaagcauaa

SEQ ID NO: 2601891 - RNA, 19 nt, Homo sapiens
  misc_RNA (1)...(19): siRNA sense strand
aguuaaagcgcuugacaua

SEQ ID NO: 2601892 - RNA, 19 nt, Homo sapiens
  misc_RNA (1)...(19): siRNA sense strand
aagaagacguacagaagaa

SEQ ID NO: 2601893 - RNA, 19 nt, Homo sapiens
  misc_RNA (1)...(19): siRNA sense strand
acuaaaggaugaugagauu

SEQ ID NO: 2601894 - RNA, 19 nt, Homo sapiens
  misc_RNA (1)...(19): siRNA sense strand
aagagaauguugugguuua

SEQ ID NO: 2601895 - RNA, 19 nt, Homo sapiens
  misc_RNA (1)...(19): siRNA sense strand
guuuggaaguguagaagaa

SEQ ID NO: 2601896 - RNA, 19 nt, Homo sapiens
  misc_RNA (1)...(19): siRNA sense strand
cuuauuaacacauggguaa

SEQ ID NO: 2601897 - RNA, 19 nt, Homo sapiens
  misc_RNA (1)...(19): siRNA sense strand
gcaaaggaaugguguuauu

SEQ ID NO: 2601898 - RNA, 19 nt, Homo sapiens
  misc_RNA (1)...(19): siRNA sense strand
acuaaaagaguguggaaaa

SEQ ID NO: 2601899 - RNA, 19 nt, Homo sapiens
  misc_RNA (1)...(19): siRNA sense strand
gcaagaugguaaagguaca

SEQ ID NO: 2601900 - RNA, 19 nt, Homo sapiens
  misc_RNA (1)...(19): siRNA sense strand
ugaaauagcugaugaccuu

SEQ ID NO: 2601901 - RNA, 19 nt, Homo sapiens
  misc_RNA (1)...(19): siRNA sense strand
ggauagaguuuaccgaauu

SEQ ID NO: 2601902 - RNA, 19 nt, Homo sapiens
  misc_RNA (1)...(19): siRNA sense strand
ggaggaaagcaguggcgaa

SEQ ID NO: 2601903 - RNA, 19 nt, Homo sapiens
  misc_RNA (1)...(19): siRNA sense strand
caacaaagaacuagaaaug

SEQ ID NO: 2601904 - RNA, 19 nt, Homo sapiens
  misc_RNA (1)...(19): siRNA sense strand
cgaugaaccagaagaagua

SEQ ID NO: 2601905 - RNA, 19 nt, Homo sapiens
  misc_RNA (1)...(19): siRNA sense strand
guauagggauggaagaaaa

SEQ ID NO: 2601906 - RNA, 19 nt, Homo sapiens
  misc_RNA (1)...(19): siRNA sense strand
gagcauguugagaaagaaa

SEQ ID NO: 2601907 - RNA, 19 nt, Homo sapiens
  misc_RNA (1)...(19): siRNA sense strand
caaagaagcaacuaagaau

SEQ ID NO: 2601908 - RNA, 19 nt, Homo sapiens
  misc_RNA (1)...(19): siRNA sense strand
ggaagaagcauuuaaacuu

SEQ ID NO: 2601909 - RNA, 19 nt, Homo sapiens
  misc_RNA (1)...(19): siRNA sense strand
cagcaaaggaaugguguua

SEQ ID NO: 2601910 - RNA, 19 nt, Homo sapiens
  misc_RNA (1)...(19): siRNA sense strand
ggacuaaagaagacguaca

SEQ ID NO: 2601911 - RNA, 19 nt, Homo sapiens
  misc_RNA (1)...(19): siRNA sense strand
cuaaagaagacguacagaa

SEQ ID NO: 2601912 - RNA, 19 nt, Homo sapiens
  misc_RNA (1)...(19): siRNA sense strand
gcuaagagaaccuguauuu

SEQ ID NO: 2601913 - RNA, 19 nt, Homo sapiens
  misc_RNA (1)...(19): siRNA sense strand
ugguaaagguacagguagu

SEQ ID NO: 2601914 - RNA, 19 nt, Homo sapiens
  misc_RNA (1)...(19): siRNA sense strand
aaucagaaguaaagcuaga

SEQ ID NO: 2601915 - RNA, 19 nt, Homo sapiens
  misc_RNA (1)...(19): siRNA sense strand
gcuaaucacuugugggacu

SEQ ID NO: 2601916 - RNA, 19 nt, Homo sapiens
  misc_RNA (1)...(19): siRNA sense strand
aagacaaacuacuggugaa

SEQ ID NO: 2601917 - RNA, 19 nt, Homo sapiens
  misc_RNA (1)...(19): siRNA sense strand
ucaacaaaggguucagaaa

SEQ ID NO: 2601918 - RNA, 19 nt, Homo sapiens
  misc_RNA (1)...(19): siRNA sense strand
ccaaagaagcaacuaagaa

SEQ ID NO: 2601919 - RNA, 19 nt, Homo sapiens
  misc_RNA (1)...(19): siRNA sense strand
uggaagaaaaggugguaua

SEQ ID NO: 2601920 - RNA, 19 nt, Homo sapiens
  misc_RNA (1)...(19): siRNA sense strand
ccaccuugcaagaugguaa

SEQ ID NO: 2601921 - RNA, 19 nt, Homo sapiens
  misc_RNA (1)...(19): siRNA sense strand
uuuagagcauguugagaaa

SEQ ID NO: 2601922 - RNA, 19 nt, Homo sapiens
  misc_RNA (1)...(19): siRNA sense strand
gaaacacugucuucagaaa

SEQ ID NO: 2601923 - RNA, 19 nt, Homo sapiens
  misc_RNA (1)...(19): siRNA sense strand
gcaccagaaggaaggcaua

SEQ ID NO: 2601924 - RNA, 19 nt, Homo sapiens
  misc_RNA (1)...(19): siRNA sense strand
ucaaguaacugaugacaca

SEQ ID NO: 2601925 - RNA, 19 nt, Homo sapiens
  misc_RNA (1)...(19): siRNA sense strand
uuaaagcgcuugacauaaa

SEQ ID NO: 2601926 - RNA, 19 nt, Homo sapiens
  misc_RNA (1)...(19): siRNA sense strand
cgaugaagcacauaaaaua

SEQ ID NO: 2601927 - RNA, 19 nt, Homo sapiens
  misc_RNA (1)...(19): siRNA sense strand
acaaagaagaaaugcccua

SEQ ID NO: 2601928 - RNA, 19 nt, Homo sapiens
  misc_RNA (1)...(19): siRNA sense strand
agacaaacuacuggugaaa

SEQ ID NO: 2601929 - RNA, 19 nt, Homo sapiens
  misc_RNA (1)...(19): siRNA sense strand
ugaagauuauccagaagaa

SEQ ID NO: 2601930 - RNA, 19 nt, Homo sapiens
  misc_RNA (1)...(19): siRNA sense strand
ggauacgacuugugccuuu

SEQ ID NO: 2601931 - RNA, 19 nt, Homo sapiens
  misc_RNA (1)...(19): siRNA sense strand
guagaagaacuuuguacua

SEQ ID NO: 2601932 - RNA, 19 nt, Homo sapiens
  misc_RNA (1)...(19): siRNA sense strand
cuuuagagcauguugagaa

SEQ ID NO: 2601933 - RNA, 19 nt, Homo sapiens
  misc_RNA (1)...(19): siRNA sense strand
ggaccauauugaucaagua

SEQ ID NO: 2601934 - RNA, 19 nt, Homo sapiens
  misc_RNA (1)...(19): siRNA sense strand
caagaucucuccaguauaa

SEQ ID NO: 2601935 - RNA, 19 nt, Homo sapiens
  misc_RNA (1)...(19): siRNA sense strand
caaaggguccugaagauua

SEQ ID NO: 2601936 - RNA, 19 nt, Homo sapiens
  misc_RNA (1)...(19): siRNA sense strand
gugcagauccugaaguuau

SEQ ID NO: 2601937 - RNA, 19 nt, Homo sapiens
  misc_RNA (1)...(19): siRNA sense strand
ucaaauacccaguagugua

SEQ ID NO: 2601938 - RNA, 19 nt, Homo sapiens
  misc_RNA (1)...(19): siRNA sense strand
cagcaacuuucaagcuuua

SEQ ID NO: 2601939 - RNA, 19 nt, Homo sapiens
  misc_RNA (1)...(19): siRNA sense strand
gccuuuacaagaagaaaua

SEQ ID NO: 2601940 - RNA, 19 nt, Homo sapiens
  misc_RNA (1)...(19): siRNA sense strand
agacgaugaaccagaagaa

SEQ ID NO: 2601941 - RNA, 19 nt, Homo sapiens
  misc_RNA (1)...(19): siRNA sense strand
acagggagaugaugaauuu

SEQ ID NO: 2601942 - RNA, 19 nt, Homo sapiens
  misc_RNA (1)...(19): siRNA sense strand
guugaugccauuugugaaa

SEQ ID NO: 2601943 - RNA, 19 nt, Homo sapiens
  misc_RNA (1)...(19): siRNA sense strand
gccaagaguuuguguggga

SEQ ID NO: 2601944 - RNA, 19 nt, Homo sapiens
  misc_RNA (1)...(19): siRNA sense strand
ccauauugaucaaguaacu

SEQ ID NO: 2601945 - RNA, 19 nt, Homo sapiens
  misc_RNA (1)...(19): siRNA sense strand
guauaaaggugaauguuac

SEQ ID NO: 2601946 - RNA, 19 nt, Homo sapiens
  misc_RNA (1)...(19): siRNA sense strand
cggcagaggcuacaaauga

SEQ ID NO: 2601947 - RNA, 19 nt, Homo sapiens
  misc_RNA (1)...(19): siRNA sense strand
ggguaaaagaauucaucaa

SEQ ID NO: 2601948 - RNA, 19 nt, Homo sapiens
  misc_RNA (1)...(19): siRNA sense strand
acuuuaagacauugcgaau

SEQ ID NO: 2601949 - RNA, 19 nt, Homo sapiens
  misc_RNA (1)...(19): siRNA sense strand
gcuugaugugguagaagaa

SEQ ID NO: 2601950 - RNA, 19 nt, Homo sapiens
  misc_RNA (1)...(19): siRNA sense strand
gaaagaggccaaagaagca

SEQ ID NO: 2601951 - RNA, 19 nt, Homo sapiens
  misc_RNA (1)...(19): siRNA sense strand
uggcgaagaugaagaugau

SEQ ID NO: 2601952 - RNA, 19 nt, Homo sapiens
  misc_RNA (1)...(19): siRNA sense strand
caaauacccaguaguguaa

SEQ ID NO: 2601953 - RNA, 19 nt, Homo sapiens
  misc_RNA (1)...(19): siRNA sense strand
guagaagaaucucacuaua

SEQ ID NO: 2601954 - RNA, 19 nt, Homo sapiens
  misc_RNA (1)...(19): siRNA sense strand
gauaugugaaagaggccaa

SEQ ID NO: 2601955 - RNA, 19 nt, Homo sapiens
  misc_RNA (1)...(19): siRNA sense strand
ugagaaagacgaugaacca

SEQ ID NO: 2601956 - RNA, 19 nt, Homo sapiens
  misc_RNA (1)...(19): siRNA sense strand
ccagaaaccucaaucggau

SEQ ID NO: 2601957 - RNA, 19 nt, Homo sapiens
  misc_RNA (1)...(19): siRNA sense strand
cugaaaacuuaauggcaau

SEQ ID NO: 2601958 - RNA, 19 nt, Homo sapiens
  misc_RNA (1)...(19): siRNA sense strand
aguagguggugucgguuua

SEQ ID NO: 2601959 - RNA, 19 nt, Homo sapiens
  misc_RNA (1)...(19): siRNA sense strand
ggcgaagccuccaaguaua

SEQ ID NO: 2601960 - RNA, 19 nt, Homo sapiens
  misc_RNA (1)...(19): siRNA sense strand
aaacaaguccagcugguua

SEQ ID NO: 2601961 - RNA, 19 nt, Homo sapiens
  misc_RNA (1)...(19): siRNA sense strand
gauggaagaaucuggaaaa

SEQ ID NO: 2601962 - RNA, 19 nt, Homo sapiens
  misc_RNA (1)...(19): siRNA sense strand
uggauagaguuuaccgaau

SEQ ID NO: 2601963 - RNA, 19 nt, Homo sapiens
  misc_RNA (1)...(19): siRNA sense strand
auaaagaguuccugaugga

SEQ ID NO: 2601964 - RNA, 19 nt, Homo sapiens
  misc_RNA (1)...(19): siRNA sense strand
ccauaacaaaugaaaguca

SEQ ID NO: 2601965 - RNA, 19 nt, Homo sapiens
  misc_RNA (1)...(19): siRNA sense strand
aagaaaugcccuaaauuga

SEQ ID NO: 2601966 - RNA, 19 nt, Homo sapiens
  misc_RNA (1)...(19): siRNA sense strand
acacauggguaaaagaauu

SEQ ID NO: 2601967 - RNA, 19 nt, Homo sapiens
  misc_RNA (1)...(19): siRNA sense strand
cagucagucuuuagagcau

SEQ ID NO: 2601968 - RNA, 19 nt, Homo sapiens
  misc_RNA (1)...(19): siRNA sense strand
gaaaauagcuuguguggcu

SEQ ID NO: 2601969 - RNA, 19 nt, Homo sapiens
  misc_RNA (1)...(19): siRNA sense strand
gaaacaauuugaugcuuca

SEQ ID NO: 2601970 - RNA, 19 nt, Homo sapiens
  misc_RNA (1)...(19): siRNA sense strand
agcaaaggguccugaagau

SEQ ID NO: 2601971 - RNA, 19 nt, Homo sapiens
  misc_RNA (1)...(19): siRNA sense strand
uguaaagcguggaaaagaa

SEQ ID NO: 2601972 - RNA, 19 nt, Homo sapiens
  misc_RNA (1)...(19): siRNA sense strand
acacauugauggaagaauc

SEQ ID NO: 2601973 - RNA, 19 nt, Homo sapiens
  misc_RNA (1)...(19): siRNA sense strand
uagagcauguugagaaaga

SEQ ID NO: 2601974 - RNA, 19 nt, Homo sapiens
  misc_RNA (1)...(19): siRNA sense strand
ggacauggaggaaagacuu

SEQ ID NO: 2601975 - RNA, 19 nt, Homo sapiens
  misc_RNA (1)...(19): siRNA sense strand
aauccuauuacuagagcaa

SEQ ID NO: 2601976 - RNA, 19 nt, Homo sapiens
  misc_RNA (1)...(19): siRNA sense strand
ucugaaaacuuaauggcaa

SEQ ID NO: 2601977 - RNA, 19 nt, Homo sapiens
  misc_RNA (1)...(19): siRNA sense strand
acaggaaauuugugucuuu

SEQ ID NO: 2601978 - RNA, 19 nt, Homo sapiens
  misc_RNA (1)...(19): siRNA sense strand
uugugggacuguagaggaa

SEQ ID NO: 2601979 - RNA, 19 nt, Homo sapiens
  misc_RNA (1)...(19): siRNA sense strand
cuguuaaagaagagcuuga

SEQ ID NO: 2601980 - RNA, 19 nt, Homo sapiens
  misc_RNA (1)...(19): siRNA sense strand
uagaucaacuaaaggauga

SEQ ID NO: 2601981 - RNA, 19 nt, Homo sapiens
  misc_RNA (1)...(19): siRNA sense strand
agaaagacgaugaaccaga

SEQ ID NO: 2601982 - RNA, 19 nt, Homo sapiens
  misc_RNA (1)...(19): siRNA sense strand
agaacagggagaugaugaa

SEQ ID NO: 2601983 - RNA, 19 nt, Homo sapiens
  misc_RNA (1)...(19): siRNA sense strand
ugauggaagaaucuggaaa

SEQ ID NO: 2601984 - RNA, 19 nt, Homo sapiens
  misc_RNA (1)...(19): siRNA sense strand
ggaacaacaaagaacuaga

SEQ ID NO: 2601985 - RNA, 19 nt, Homo sapiens
  misc_RNA (1)...(19): siRNA sense strand
aggccaaagaagcaacuaa

SEQ ID NO: 2601986 - RNA, 19 nt, Homo sapiens
  misc_RNA (1)...(19): siRNA sense strand
gagaaagcggagagaggau

SEQ ID NO: 2601987 - RNA, 19 nt, Homo sapiens
  misc_RNA (1)...(19): siRNA sense strand
gaugagaagucgauccaga

SEQ ID NO: 2601988 - RNA, 19 nt, Homo sapiens
  misc_RNA (1)...(19): siRNA sense strand
acauaaacucguuagucaa

SEQ ID NO: 2601989 - RNA, 19 nt, Homo sapiens
  misc_RNA (1)...(19): siRNA sense strand
ggaaagagcuggaaaggcc

SEQ ID NO: 2601990 - RNA, 19 nt, Homo sapiens
  misc_RNA (1)...(19): siRNA sense strand
acaaggaaagagcuggaaa

SEQ ID NO: 2601991 - RNA, 19 nt, Homo sapiens
  misc_RNA (1)...(19): siRNA sense strand
caucauuggcucugggauc

SEQ ID NO: 2601992 - RNA, 19 nt, Homo sapiens
  misc_RNA (1)...(19): siRNA sense strand
aggcgguggcugugacauu

SEQ ID NO: 2601993 - RNA, 19 nt, Homo sapiens
  misc_RNA (1)...(19): siRNA sense strand
ccuaccugauggaggccua

SEQ ID NO: 2601994 - RNA, 19 nt, Homo sapiens
  misc_RNA (1)...(19): siRNA sense strand
uccucaaaucguugugaaa

SEQ ID NO: 2601995 - RNA, 19 nt, Homo sapiens
  misc_RNA (1)...(19): siRNA sense strand
agaagucgauccagagcca

SEQ ID NO: 2601996 - RNA, 19 nt, Homo sapiens
  misc_RNA (1)...(19): siRNA sense strand
cugagaaagcggagagagg

SEQ ID NO: 2601997 - RNA, 19 nt, Homo sapiens
  misc_RNA (1)...(19): siRNA sense strand
guuuggaugggcucagaaa

SEQ ID NO: 2601998 - RNA, 19 nt, Homo sapiens
  misc_RNA (1)...(19): siRNA sense strand
cagcaagagaaguagaaau

SEQ ID NO: 2601999 - RNA, 19 nt, Homo sapiens
  misc_RNA (1)...(19): siRNA sense strand
ugcuaaaggaguugggauu

SEQ ID NO: 2602000 - RNA, 19 nt, Homo sapiens
  misc_RNA (1)...(19): siRNA sense strand
guacuacagaagaggaaau

SEQ ID NO: 2602001 - RNA, 19 nt, Homo sapiens
  misc_RNA (1)...(19): siRNA sense strand
ucuuagaaugugaacguaa

SEQ ID NO: 2602002 - RNA, 19 nt, Homo sapiens
  misc_RNA (1)...(19): siRNA sense strand
aaguaaaagcugaagagaa

SEQ ID NO: 2602003 - RNA, 19 nt, Homo sapiens
  misc_RNA (1)...(19): siRNA sense strand
cagagaggagggugcuaaa

SEQ ID NO: 2602004 - RNA, 19 nt, Homo sapiens
  misc_RNA (1)...(19): siRNA sense strand
cauagaaacacuuaggcuu

SEQ ID NO: 2602005 - RNA, 19 nt, Homo sapiens
  misc_RNA (1)...(19): siRNA sense strand
cuacagaagaggaaaucca

SEQ ID NO: 2602006 - RNA, 19 nt, Homo sapiens
  misc_RNA (1)...(19): siRNA sense strand
uggaauuacaugaaugaca

SEQ ID NO: 2602007 - RNA, 19 nt, Homo sapiens
  misc_RNA (1)...(19): siRNA sense strand
cgaucgaggucaagaacac

SEQ ID NO: 2602008 - RNA, 19 nt, Homo sapiens
  misc_RNA (1)...(19): siRNA sense strand
cagugaaagcccucgaaga

SEQ ID NO: 2602009 - RNA, 19 nt, Homo sapiens
  misc_RNA (1)...(19): siRNA sense strand
agaaaagacagcaagagaa

SEQ ID NO: 2602010 - RNA, 19 nt, Homo sapiens
  misc_RNA (1)...(19): siRNA sense strand
ccuugcagcuagagcacuu

SEQ ID NO: 2602011 - RNA, 19 nt, Homo sapiens
  misc_RNA (1)...(19): siRNA sense strand
ugguacuacagaagaggaa

SEQ ID NO: 2602012 - RNA, 19 nt, Homo sapiens
  misc_RNA (1)...(19): siRNA sense strand
ccgccaguuaagaggaaaa

SEQ ID NO: 2602013 - RNA, 19 nt, Homo sapiens
  misc_RNA (1)...(19): siRNA sense strand
guguaagaaaagacagcaa

SEQ ID NO: 2602014 - RNA, 19 nt, Homo sapiens
  misc_RNA (1)...(19): siRNA sense strand
gagaaguagaaauagcaga

SEQ ID NO: 2602015 - RNA, 19 nt, Homo sapiens
  misc_RNA (1)...(19): siRNA sense strand
uagcagaagugcaagucga

SEQ ID NO: 2602016 - RNA, 19 nt, Homo sapiens
  misc_RNA (1)...(19): siRNA sense strand
ugacagucuucgaaccaau

SEQ ID NO: 2602017 - RNA, 19 nt, Homo sapiens
  misc_RNA (1)...(19): siRNA sense strand
agcuagagcacuucagauu

SEQ ID NO: 2602018 - RNA, 19 nt, Homo sapiens
  misc_RNA (1)...(19): siRNA sense strand
gcugaagagaaaucaccaa

SEQ ID NO: 2602019 - RNA, 19 nt, Homo sapiens
  misc_RNA (1)...(19): siRNA sense strand
aagaaaagacagcaagaga

SEQ ID NO: 2602020 - RNA, 19 nt, Homo sapiens
  misc_RNA (1)...(19): siRNA sense strand
aaguagaaauagcagaagu

SEQ ID NO: 2602021 - RNA, 19 nt, Homo sapiens
  misc_RNA (1)...(19): siRNA sense strand
guucaaacagacaugguca

SEQ ID NO: 2602022 - RNA, 19 nt, Homo sapiens
  misc_RNA (1)...(19): siRNA sense strand
gcggagucgaucuggaaca

SEQ ID NO: 2602023 - RNA, 19 nt, Homo sapiens
  misc_RNA (1)...(19): siRNA sense strand
gugcuaaaggaguugggau

SEQ ID NO: 2602024 - RNA, 19 nt, Homo sapiens
  misc_RNA (1)...(19): siRNA sense strand
ccuuacaagaagccaaauu

SEQ ID NO: 2602025 - RNA, 19 nt, Homo sapiens
  misc_RNA (1)...(19): siRNA sense strand
acucagaugcagccaagaa

SEQ ID NO: 2602026 - RNA, 19 nt, Homo sapiens
  misc_RNA (1)...(19): siRNA sense strand
cagaugcagccaagaaaca

SEQ ID NO: 2602027 - RNA, 19 nt, Homo sapiens
  misc_RNA (1)...(19): siRNA sense strand
caaccagagacuauagcau

SEQ ID NO: 2602028 - RNA, 19 nt, Homo sapiens
  misc_RNA (1)...(19): siRNA sense strand
caagagaaguaaaagcuga

SEQ ID NO: 2602029 - RNA, 19 nt, Homo sapiens
  misc_RNA (1)...(19): siRNA sense strand
agaaugugaacguaaucaa

SEQ ID NO: 2602030 - RNA, 19 nt, Homo sapiens
  misc_RNA (1)...(19): siRNA sense strand
cuucagauuccguugccaa

SEQ ID NO: 2602031 - RNA, 19 nt, Homo sapiens
  misc_RNA (1)...(19): siRNA sense strand
caagcauaccagagaugau

SEQ ID NO: 2602032 - RNA, 19 nt, Homo sapiens
  misc_RNA (1)...(19): siRNA sense strand
uggcagucgcucaggacau

SEQ ID NO: 2602033 - RNA, 19 nt, Homo sapiens
  misc_RNA (1)...(19): siRNA sense strand
gaggauagacaacaggcuu

SEQ ID NO: 2602034 - RNA, 19 nt, Homo sapiens
  misc_RNA (1)...(19): siRNA sense strand
agaagaagcuacagggaga

SEQ ID NO: 2602035 - RNA, 19 nt, Homo sapiens
  misc_RNA (1)...(19): siRNA sense strand
ggcagaaacuugaagcaca

SEQ ID NO: 2602036 - RNA, 19 nt, Homo sapiens
  misc_RNA (1)...(19): siRNA sense strand
agucagagcaacagaggga

SEQ ID NO: 2602037 - RNA, 19 nt, Homo sapiens
  misc_RNA (1)...(19): siRNA sense strand
ggacuauaucacagcugaa

SEQ ID NO: 2602038 - RNA, 19 nt, Homo sapiens
  misc_RNA (1)...(19): siRNA sense strand
ucagagcaacagagggaga

SEQ ID NO: 2602039 - RNA, 19 nt, Homo sapiens
  misc_RNA (1)...(19): siRNA sense strand
acagggagaaguggagaaa

SEQ ID NO: 2602040 - RNA, 19 nt, Homo sapiens
  misc_RNA (1)...(19): siRNA sense strand
cauaagaagagcagcaaaa

SEQ ID NO: 2602041 - RNA, 19 nt, Homo sapiens
  misc_RNA (1)...(19): siRNA sense strand
uggaaaagacagaaaacaa

SEQ ID NO: 2602042 - RNA, 19 nt, Homo sapiens
  misc_RNA (1)...(19): siRNA sense strand
aagugagagaaguggcaua

SEQ ID NO: 2602043 - RNA, 19 nt, Homo sapiens
  misc_RNA (1)...(19): siRNA sense strand
uggcauaagaagagcagca

SEQ ID NO: 2602044 - RNA, 19 nt, Homo sapiens
  misc_RNA (1)...(19): siRNA sense strand
uuacaaacgaacuggugaa

SEQ ID NO: 2602045 - RNA, 19 nt, Homo sapiens
  misc_RNA (1)...(19): siRNA sense strand
ccaaaauucuagaugcaau

SEQ ID NO: 2602046 - RNA, 19 nt, Homo sapiens
  misc_RNA (1)...(19): siRNA sense strand
ugggccagauggagaacaa

SEQ ID NO: 2602047 - RNA, 19 nt, Homo sapiens
  misc_RNA (1)...(19): siRNA sense strand
aguuauuguagcaccgaaa

SEQ ID NO: 2602048 - RNA, 19 nt, Homo sapiens
  misc_RNA (1)...(19): siRNA sense strand
gaaaauugguggaaggaug

SEQ ID NO: 2602049 - RNA, 19 nt, Homo sapiens
  misc_RNA (1)...(19): siRNA sense strand
aauccauggaguuuaguua

SEQ ID NO: 2602050 - RNA, 19 nt, Homo sapiens
  misc_RNA (1)...(19): siRNA sense strand
ugguaauuguuucagaaga

SEQ ID NO: 2602051 - RNA, 19 nt, Homo sapiens
  misc_RNA (1)...(19): siRNA sense strand
acaacaauuuggaugaacu

SEQ ID NO: 2602052 - RNA, 19 nt, Homo sapiens
  misc_RNA (1)...(19): siRNA sense strand
gaugccaaacaguggguau

SEQ ID NO: 2602053 - RNA, 19 nt, Homo sapiens
  misc_RNA (1)...(19): siRNA sense strand
agugagagaaguggcauaa

SEQ ID NO: 2602054 - RNA, 19 nt, Homo sapiens
  misc_RNA (1)...(19): siRNA sense strand
aagagaaugccaugaaaau

SEQ ID NO: 2602055 - RNA, 19 nt, Homo sapiens
  misc_RNA (1)...(19): siRNA sense strand
augcuauaaucaugacaga

SEQ ID NO: 2602056 - RNA, 19 nt, Homo sapiens
  misc_RNA (1)...(19): siRNA sense strand
caguaaaggaggagaauau

SEQ ID NO: 2602057 - RNA, 19 nt, Homo sapiens
  misc_RNA (1)...(19): siRNA sense strand
uguaauaaccaaagagcaa

SEQ ID NO: 2602058 - RNA, 19 nt, Homo sapiens
  misc_RNA (1)...(19): siRNA sense strand
uagugaaggaagagagaaa

SEQ ID NO: 2602059 - RNA, 19 nt, Homo sapiens
  misc_RNA (1)...(19): siRNA sense strand
gcaacuaaacauagggaau

SEQ ID NO: 2602060 - RNA, 19 nt, Homo sapiens
  misc_RNA (1)...(19): siRNA sense strand
aguagaaauggaagagaaa

SEQ ID NO: 2602061 - RNA, 19 nt, Homo sapiens
  misc_RNA (1)...(19): siRNA sense strand
uggcaugcuuggagacaaa

SEQ ID NO: 2602062 - RNA, 19 nt, Homo sapiens
  misc_RNA (1)...(19): siRNA sense strand
ugucagugaugaagguaaa

SEQ ID NO: 2602063 - RNA, 19 nt, Homo sapiens
  misc_RNA (1)...(19): siRNA sense strand
uagcaaaagagaagggaaa

SEQ ID NO: 2602064 - RNA, 19 nt, Homo sapiens
  misc_RNA (1)...(19): siRNA sense strand
aaguagaaauggaagagaa

SEQ ID NO: 2602065 - RNA, 19 nt, Homo sapiens
  misc_RNA (1)...(19): siRNA sense strand
cagcaacaucugagaacaa

SEQ ID NO: 2602066 - RNA, 19 nt, Homo sapiens
  misc_RNA (1)...(19): siRNA sense strand
gaacaggaaaagugaaaua

SEQ ID NO: 2602067 - RNA, 19 nt, Homo sapiens
  misc_RNA (1)...(19): siRNA sense strand
caguuauaguucagaagaa

SEQ ID NO: 2602068 - RNA, 19 nt, Homo sapiens
  misc_RNA (1)...(19): siRNA sense strand
aacgagauguauagagaaa

SEQ ID NO: 2602069 - RNA, 19 nt, Homo sapiens
  misc_RNA (1)...(19): siRNA sense strand
gugacaaagggaauagaaa

SEQ ID NO: 2602070 - RNA, 19 nt, Homo sapiens
  misc_RNA (1)...(19): siRNA sense strand
aggaauaauauccgacaua

SEQ ID NO: 2602071 - RNA, 19 nt, Homo sapiens
  misc_RNA (1)...(19): siRNA sense strand
cagaaaauagaguggauaa

SEQ ID NO: 2602072 - RNA, 19 nt, Homo sapiens
  misc_RNA (1)...(19): siRNA sense strand
ugacaaagggaauagaaau

SEQ ID NO: 2602073 - RNA, 19 nt, Homo sapiens
  misc_RNA (1)...(19): siRNA sense strand
agacaacaucuguggaaau

SEQ ID NO: 2602074 - RNA, 19 nt, Homo sapiens
  misc_RNA (1)...(19): siRNA sense strand
agaaaagucaaaagggaaa

SEQ ID NO: 2602075 - RNA, 19 nt, Homo sapiens
  misc_RNA (1)...(19): siRNA sense strand
agauaauugccuugacuua

SEQ ID NO: 2602076 - RNA, 19 nt, Homo sapiens
  misc_RNA (1)...(19): siRNA sense strand
agagaaaggagaaaggaga

SEQ ID NO: 2602077 - RNA, 19 nt, Homo sapiens
  misc_RNA (1)...(19): siRNA sense strand
ggaacuuaauaaagaggau

SEQ ID NO: 2602078 - RNA, 19 nt, Homo sapiens
  misc_RNA (1)...(19): siRNA sense strand
gcucguuaguuuaaaggaa

SEQ ID NO: 2602079 - RNA, 19 nt, Homo sapiens
  misc_RNA (1)...(19): siRNA sense strand
ucauagaggagcuggagaa

SEQ ID NO: 2602080 - RNA, 19 nt, Homo sapiens
  misc_RNA (1)...(19): siRNA sense strand
aaacagugacaaagggaau

SEQ ID NO: 2602081 - RNA, 19 nt, Homo sapiens
  misc_RNA (1)...(19): siRNA sense strand
uugaagaaucgcugauaua

SEQ ID NO: 2602082 - RNA, 19 nt, Homo sapiens
  misc_RNA (1)...(19): siRNA sense strand
ucauagaaaagcagagaaa

SEQ ID NO: 2602083 - RNA, 19 nt, Homo sapiens
  misc_RNA (1)...(19): siRNA sense strand
uaaagaagcuugugcggau

SEQ ID NO: 2602084 - RNA, 19 nt, Homo sapiens
  misc_RNA (1)...(19): siRNA sense strand
ucauaauucugaaggaaca

SEQ ID NO: 2602085 - RNA, 19 nt, Homo sapiens
  misc_RNA (1)...(19): siRNA sense strand
ggacaagacaauuccggaa

SEQ ID NO: 2602086 - RNA, 19 nt, Homo sapiens
  misc_RNA (1)...(19): siRNA sense strand
agaaguaacgagauguaua

SEQ ID NO: 2602087 - RNA, 19 nt, Homo sapiens
  misc_RNA (1)...(19): siRNA sense strand
gagaaaagucaaaagggaa

SEQ ID NO: 2602088 - RNA, 19 nt, Homo sapiens
  misc_RNA (1)...(19): siRNA sense strand
caguggaguuggagguaca

SEQ ID NO: 2602089 - RNA, 19 nt, Homo sapiens
  misc_RNA (1)...(19): siRNA sense strand
uguuggaagauguggcaaa

SEQ ID NO: 2602090 - RNA, 19 nt, Homo sapiens
  misc_RNA (1)...(19): siRNA sense strand
aggaagacauagaagagau

SEQ ID NO: 2602091 - RNA, 19 nt, Homo sapiens
  misc_RNA (1)...(19): siRNA sense strand
cgagauguauagagaaaau

SEQ ID NO: 2602092 - RNA, 19 nt, Homo sapiens
  misc_RNA (1)...(19): siRNA sense strand
caucaagucuacaagaaaa

SEQ ID NO: 2602093 - RNA, 19 nt, Homo sapiens
  misc_RNA (1)...(19): siRNA sense strand
gcaaaagagaggaaaguca

SEQ ID NO: 2602094 - RNA, 19 nt, Homo sapiens
  misc_RNA (1)...(19): siRNA sense strand
uguagaaugaccacagaaa

SEQ ID NO: 2602095 - RNA, 19 nt, Homo sapiens
  misc_RNA (1)...(19): siRNA sense strand
cauugaagugagagaauca

SEQ ID NO: 2602096 - RNA, 19 nt, Homo sapiens
  misc_RNA (1)...(19): siRNA sense strand
caagaaacacaaucagcaa

SEQ ID NO: 2602097 - RNA, 19 nt, Homo sapiens
  misc_RNA (1)...(19): siRNA sense strand
auagaaaagcagagaaaga

SEQ ID NO: 2602098 - RNA, 19 nt, Homo sapiens
  misc_RNA (1)...(19): siRNA sense strand
cugaaugcccagugaauga

SEQ ID NO: 2602099 - RNA, 19 nt, Homo sapiens
  misc_RNA (1)...(19): siRNA sense strand
gguacuuacacaagaaaca

SEQ ID NO: 2602100 - RNA, 19 nt, Homo sapiens
  misc_RNA (1)...(19): siRNA sense strand
uaauagucagcuugagaaa

SEQ ID NO: 2602101 - RNA, 19 nt, Homo sapiens
  misc_RNA (1)...(19): siRNA sense strand
gaugauaaaacaaggacua

SEQ ID NO: 2602102 - RNA, 19 nt, Homo sapiens
  misc_RNA (1)...(19): siRNA sense strand
uauucagagucaaggaaau

SEQ ID NO: 2602103 - RNA, 19 nt, Homo sapiens
  misc_RNA (1)...(19): siRNA sense strand
uuuagaugcuggagauuau

SEQ ID NO: 2602104 - RNA, 19 nt, Homo sapiens
  misc_RNA (1)...(19): siRNA sense strand
ccaacaucuuagucgcaaa

SEQ ID NO: 2602105 - RNA, 19 nt, Homo sapiens
  misc_RNA (1)...(19): siRNA sense strand
auaugaaagugcugcaaga

SEQ ID NO: 2602106 - RNA, 19 nt, Homo sapiens
  misc_RNA (1)...(19): siRNA sense strand
ucacugaaaucuagaucau

SEQ ID NO: 2602107 - RNA, 19 nt, Homo sapiens
  misc_RNA (1)...(19): siRNA sense strand
gaggaaagucauuuagcau

SEQ ID NO: 2602108 - RNA, 19 nt, Homo sapiens
  misc_RNA (1)...(19): siRNA sense strand
cuguaauacugauagugaa

SEQ ID NO: 2602109 - RNA, 19 nt, Homo sapiens
  misc_RNA (1)...(19): siRNA sense strand
aaaggagaaaggagagcaa

SEQ ID NO: 2602110 - RNA, 19 nt, Homo sapiens
  misc_RNA (1)...(19): siRNA sense strand
agagaugacuuaugagacu

SEQ ID NO: 2602111 - RNA, 19 nt, Homo sapiens
  misc_RNA (1)...(19): siRNA sense strand
acaucaagucuacaagaaa

SEQ ID NO: 2602112 - RNA, 19 nt, Homo sapiens
  misc_RNA (1)...(19): siRNA sense strand
aagaacgguuuauggaaau

SEQ ID NO: 2602113 - RNA, 19 nt, Homo sapiens
  misc_RNA (1)...(19): siRNA sense strand
uuucagaaguucagugcau

SEQ ID NO: 2602114 - RNA, 19 nt, Homo sapiens
  misc_RNA (1)...(19): siRNA sense strand
ugugaagaugugaagauua

SEQ ID NO: 2602115 - RNA, 19 nt, Homo sapiens
  misc_RNA (1)...(19): siRNA sense strand
ucgcugauauauaggaaga

SEQ ID NO: 2602116 - RNA, 19 nt, Homo sapiens
  misc_RNA (1)...(19): siRNA sense strand
gauaaauaugagcugcaaa

SEQ ID NO: 2602117 - RNA, 19 nt, Homo sapiens
  misc_RNA (1)...(19): siRNA sense strand
ucaaagaagcuacugacaa

SEQ ID NO: 2602118 - RNA, 19 nt, Homo sapiens
  misc_RNA (1)...(19): siRNA sense strand
aggaacaggaaaagugaaa

SEQ ID NO: 2602119 - RNA, 19 nt, Homo sapiens
  misc_RNA (1)...(19): siRNA sense strand
agaaucagagugugaacaa

SEQ ID NO: 2602120 - RNA, 19 nt, Homo sapiens
  misc_RNA (1)...(19): siRNA sense strand
gaagauuaaaugcagcaaa

SEQ ID NO: 2602121 - RNA, 19 nt, Homo sapiens
  misc_RNA (1)...(19): siRNA sense strand
agugaaacuggaucagaaa

SEQ ID NO: 2602122 - RNA, 19 nt, Homo sapiens
  misc_RNA (1)...(19): siRNA sense strand
ccauacauugauugagaau

SEQ ID NO: 2602123 - RNA, 19 nt, Homo sapiens
  misc_RNA (1)...(19): siRNA sense strand
acaaagugaaacuggauca

SEQ ID NO: 2602124 - RNA, 19 nt, Homo sapiens
  misc_RNA (1)...(19): siRNA sense strand
acuguuaucaagaggguuu

SEQ ID NO: 2602125 - RNA, 19 nt, Homo sapiens
  misc_RNA (1)...(19): siRNA sense strand
ugugauaaugaguggauaa

SEQ ID NO: 2602126 - RNA, 19 nt, Homo sapiens
  misc_RNA (1)...(19): siRNA sense strand
acuucaagacagagcuuaa

SEQ ID NO: 2602127 - RNA, 19 nt, Homo sapiens
  misc_RNA (1)...(19): siRNA sense strand
cgauaagcuuuguuggguu

SEQ ID NO: 2602128 - RNA, 19 nt, Homo sapiens
  misc_RNA (1)...(19): siRNA sense strand
cucaauggagagaaggaaa

SEQ ID NO: 2602129 - RNA, 19 nt, Homo sapiens
  misc_RNA (1)...(19): siRNA sense strand
acacagaaugcuaucgaau

SEQ ID NO: 2602130 - RNA, 19 nt, Homo sapiens
  misc_RNA (1)...(19): siRNA sense strand
caaaagaaauggaggcuuc

SEQ ID NO: 2602131 - RNA, 19 nt, Homo sapiens
  misc_RNA (1)...(19): siRNA sense strand
uggaaagugaagaauggaa

SEQ ID NO: 2602132 - RNA, 19 nt, Homo sapiens
  misc_RNA (1)...(19): siRNA sense strand
agaauggaauccuugggaa

SEQ ID NO: 2602133 - RNA, 19 nt, Homo sapiens
  misc_RNA (1)...(19): siRNA sense strand
gaauggaauccuugggaag

SEQ ID NO: 2602134 - RNA, 19 nt, Homo sapiens
  misc_RNA (1)...(19): siRNA sense strand
augccuugcuucagaguga

SEQ ID NO: 2602135 - RNA, 19 nt, Homo sapiens
  misc_RNA (1)...(19): siRNA sense strand
gccuuuaggaguagcaaca

SEQ ID NO: 2602136 - RNA, 19 nt, Homo sapiens
  misc_RNA (1)...(19): siRNA sense strand
auggagagaaggaaaguca

SEQ ID NO: 2602137 - RNA, 19 nt, Homo sapiens
  misc_RNA (1)...(19): siRNA sense strand
ucuccguugaugugaauaa

SEQ ID NO: 2602138 - RNA, 19 nt, Homo sapiens
  misc_RNA (1)...(19): siRNA sense strand
gcucaauggagagaaggaa

SEQ ID NO: 2602139 - RNA, 19 nt, Homo sapiens
  misc_RNA (1)...(19): siRNA sense strand
cugcaugaugagaggccau

SEQ ID NO: 2602140 - RNA, 19 nt, Homo sapiens
  misc_RNA (1)...(19): siRNA sense strand
aucaagaacuggaaggaac

SEQ ID NO: 2602141 - RNA, 19 nt, Homo sapiens
  misc_RNA (1)...(19): siRNA sense strand
ggaauacaucugugcacca

SEQ ID NO: 2602142 - RNA, 19 nt, Homo sapiens
  misc_RNA (1)...(19): siRNA sense strand
gauucgucuaauugggaaa

SEQ ID NO: 2602143 - RNA, 19 nt, Homo sapiens
  misc_RNA (1)...(19): siRNA sense strand
aaguggaauugcuggguca

SEQ ID NO: 2602144 - RNA, 19 nt, Homo sapiens
  misc_RNA (1)...(19): siRNA sense strand
cgucuaauugggaaaauaa

SEQ ID NO: 2602145 - RNA, 19 nt, Homo sapiens
  misc_RNA (1)...(19): siRNA sense strand
ccgaagggcagaagcgcua

SEQ ID NO: 2602146 - RNA, 19 nt, Homo sapiens
  misc_RNA (1)...(19): siRNA sense strand
uggcaguggacgagaugua

SEQ ID NO: 2602147 - RNA, 19 nt, Homo sapiens
  misc_RNA (1)...(19): siRNA sense strand
augaugacuuugagaccaa

SEQ ID NO: 2602148 - RNA, 19 nt, Homo sapiens
  misc_RNA (1)...(19): siRNA sense strand
gggcaaauguggaaugcuc

SEQ ID NO: 2602149 - RNA, 19 nt, Homo sapiens
  misc_RNA (1)...(19): siRNA sense strand
gauagaaacuuccaggugu

SEQ ID NO: 2602150 - RNA, 19 nt, Homo sapiens
  misc_RNA (1)...(19): siRNA sense strand
uuggcgaggaggaggagaa

SEQ ID NO: 2602151 - RNA, 19 nt, Homo sapiens
  misc_RNA (1)...(19): siRNA sense strand
ccgcgguguucaagcgcuu

SEQ ID NO: 2602152 - RNA, 19 nt, Homo sapiens
  misc_RNA (1)...(19): siRNA sense strand
cuuuaaaggccaagaaggu

SEQ ID NO: 2602153 - RNA, 19 nt, Homo sapiens
  misc_RNA (1)...(19): siRNA sense strand
cgccuaaagcugaagccaa

SEQ ID NO: 2602154 - RNA, 19 nt, Homo sapiens
  misc_RNA (1)...(19): siRNA sense strand
ccgaaagugaagaaggaag

SEQ ID NO: 2602155 - RNA, 19 nt, Homo sapiens
  misc_RNA (1)...(19): siRNA sense strand
ggagaaacaagcuugacca

SEQ ID NO: 2602156 - RNA, 19 nt, Homo sapiens
  misc_RNA (1)...(19): siRNA sense strand
cuguggauguuaaagccaa

SEQ ID NO: 2602157 - RNA, 19 nt, Homo sapiens
  misc_RNA (1)...(19): siRNA sense strand
gggaaaauuuggagcuaua

SEQ ID NO: 2602158 - RNA, 19 nt, Homo sapiens
  misc_RNA (1)...(19): siRNA sense strand
gugcauaaggguaggagua

SEQ ID NO: 2602159 - RNA, 19 nt, Homo sapiens
  misc_RNA (1)...(19): siRNA sense strand
cgaaauaggcaggagguaa

SEQ ID NO: 2602160 - RNA, 19 nt, Homo sapiens
  misc_RNA (1)...(19): siRNA sense strand
gagaaauaugcgaggaaga

SEQ ID NO: 2602161 - RNA, 19 nt, Homo sapiens
  misc_RNA (1)...(19): siRNA sense strand
guuuauugugguagagaaa

SEQ ID NO: 2602162 - RNA, 19 nt, Homo sapiens
  misc_RNA (1)...(19): siRNA sense strand
caguaaauccuauggacaa

SEQ ID NO: 2602163 - RNA, 19 nt, Homo sapiens
  misc_RNA (1)...(19): siRNA sense strand
gagugaagauggaagaaaa

SEQ ID NO: 2602164 - RNA, 19 nt, Homo sapiens
  misc_RNA (1)...(19): siRNA sense strand
ccaaagaugcaaagaugaa

SEQ ID NO: 2602165 - RNA, 19 nt, Homo sapiens
  misc_RNA (1)...(19): siRNA sense strand
acauaaagggaauggagaa

SEQ ID NO: 2602166 - RNA, 19 nt, Homo sapiens
  misc_RNA (1)...(19): siRNA sense strand
aagcaguggugaagaauau

SEQ ID NO: 2602167 - RNA, 19 nt, Homo sapiens
  misc_RNA (1)...(19): siRNA sense strand
cugaaacagacgagaggaa

SEQ ID NO: 2602168 - RNA, 19 nt, Homo sapiens
  misc_RNA (1)...(19): siRNA sense strand
agaggaacguggaaugaaa

SEQ ID NO: 2602169 - RNA, 19 nt, Homo sapiens
  misc_RNA (1)...(19): siRNA sense strand
cauaaagggaauggagaaa

SEQ ID NO: 2602170 - RNA, 19 nt, Homo sapiens
  misc_RNA (1)...(19): siRNA sense strand
ggaguuaagcaguggugaa

SEQ ID NO: 2602171 - RNA, 19 nt, Homo sapiens
  misc_RNA (1)...(19): siRNA sense strand
ggguaggaguagaugccaa

SEQ ID NO: 2602172 - RNA, 19 nt, Homo sapiens
  misc_RNA (1)...(19): siRNA sense strand
gggaaugaaaucagagcau

SEQ ID NO: 2602173 - RNA, 19 nt, Homo sapiens
  misc_RNA (1)...(19): siRNA sense strand
ugaagaaggccuugugaau

SEQ ID NO: 2602174 - RNA, 19 nt, Homo sapiens
  misc_RNA (1)...(19): siRNA sense strand
ugacaaaaguggagcuaga

SEQ ID NO: 2602175 - RNA, 19 nt, Homo sapiens
  misc_RNA (1)...(19): siRNA sense strand
gagaauacgagaaaggaca

SEQ ID NO: 2602176 - RNA, 19 nt, Homo sapiens
  misc_RNA (1)...(19): siRNA sense strand
ucgcaaaauugaugagaau

SEQ ID NO: 2602177 - RNA, 19 nt, Homo sapiens
  misc_RNA (1)...(19): siRNA sense strand
cagaaacagcucaggaauu

SEQ ID NO: 2602178 - RNA, 19 nt, Homo sapiens
  misc_RNA (1)...(19): siRNA sense strand
aggauacaaaggagaaaua

SEQ ID NO: 2602179 - RNA, 19 nt, Homo sapiens
  misc_RNA (1)...(19): siRNA sense strand
cguguuaacuacagcaauu

SEQ ID NO: 2602180 - RNA, 19 nt, Homo sapiens
  misc_RNA (1)...(19): siRNA sense strand
caauggaaauggagagugu

SEQ ID NO: 2602181 - RNA, 19 nt, Homo sapiens
  misc_RNA (1)...(19): siRNA sense strand
acaaucagauacaggcaaa

SEQ ID NO: 2602182 - RNA, 19 nt, Homo sapiens
  misc_RNA (1)...(19): siRNA sense strand
ggacaaguauacuggcuga

SEQ ID NO: 2602183 - RNA, 19 nt, Homo sapiens
  misc_RNA (1)...(19): siRNA sense strand
uuuaugagacagagcgaaa

SEQ ID NO: 2602184 - RNA, 19 nt, Homo sapiens
  misc_RNA (1)...(19): siRNA sense strand
caaaguaccuaucggguga

SEQ ID NO: 2602185 - RNA, 19 nt, Homo sapiens
  misc_RNA (1)...(19): siRNA sense strand
aggagaaauaugcgaggaa

SEQ ID NO: 2602186 - RNA, 19 nt, Homo sapiens
  misc_RNA (1)...(19): siRNA sense strand
ggagauggugggagagcau

SEQ ID NO: 2602187 - RNA, 19 nt, Homo sapiens
  misc_RNA (1)...(19): siRNA sense strand
auacgaugcugaugggcaa

SEQ ID NO: 2602188 - RNA, 19 nt, Homo sapiens
  misc_RNA (1)...(19): siRNA sense strand
uagaaagaggaaagaagua

SEQ ID NO: 2602189 - RNA, 19 nt, Homo sapiens
  misc_RNA (1)...(19): siRNA sense strand
ggaauuuauggcagaagaa

SEQ ID NO: 2602190 - RNA, 19 nt, Homo sapiens
  misc_RNA (1)...(19): siRNA sense strand
ccggagagcacaaugcaaa

SEQ ID NO: 2602191 - RNA, 19 nt, Homo sapiens
  misc_RNA (1)...(19): siRNA sense strand
gaacuugggcugaugggaa

SEQ ID NO: 2602192 - RNA, 19 nt, Homo sapiens
  misc_RNA (1)...(19): siRNA sense strand
caaugauggagaugguuua

SEQ ID NO: 2602193 - RNA, 19 nt, Homo sapiens
  misc_RNA (1)...(19): siRNA sense strand
cgggaaacuccguuaguau

SEQ ID NO: 2602194 - RNA, 19 nt, Homo sapiens
  misc_RNA (1)...(19): siRNA sense strand
augaaauccuaaaggcaau

SEQ ID NO: 2602195 - RNA, 19 nt, Homo sapiens
  misc_RNA (1)...(19): siRNA sense strand
gaauaugaccagaguggga

SEQ ID NO: 2602196 - RNA, 19 nt, Homo sapiens
  misc_RNA (1)...(19): siRNA sense strand
agcuauaccuacuuagaaa

SEQ ID NO: 2602197 - RNA, 19 nt, Homo sapiens
  misc_RNA (1)...(19): siRNA sense strand
cuucagugccaauggacaa

SEQ ID NO: 2602198 - RNA, 19 nt, Homo sapiens
  misc_RNA (1)...(19): siRNA sense strand
gcagauauaaugaagugaa

SEQ ID NO: 2602199 - RNA, 19 nt, Homo sapiens
  misc_RNA (1)...(19): siRNA sense strand
aggaagaccuggugcucau

SEQ ID NO: 2602200 - RNA, 19 nt, Homo sapiens
  misc_RNA (1)...(19): siRNA sense strand
gggaauuuauggcagaaga

SEQ ID NO: 2602201 - RNA, 19 nt, Homo sapiens
  misc_RNA (1)...(19): siRNA sense strand
agugugaacuccagaaaca

SEQ ID NO: 2602202 - RNA, 19 nt, Homo sapiens
  misc_RNA (1)...(19): siRNA sense strand
uacaauagccagaguagaa

SEQ ID NO: 2602203 - RNA, 19 nt, Homo sapiens
  misc_RNA (1)...(19): siRNA sense strand
ccuuauugccauggaguua

SEQ ID NO: 2602204 - RNA, 19 nt, Homo sapiens
  misc_RNA (1)...(19): siRNA sense strand
cauaguaacagcugauauu

SEQ ID NO: 2602205 - RNA, 19 nt, Homo sapiens
  misc_RNA (1)...(19): siRNA sense strand
guggagauaacuuggacaa

SEQ ID NO: 2602206 - RNA, 19 nt, Homo sapiens
  misc_RNA (1)...(19): siRNA sense strand
ucaaauuccucauuggcaa

SEQ ID NO: 2602207 - RNA, 19 nt, Homo sapiens
  misc_RNA (1)...(19): siRNA sense strand
ggcgauagacacuggagaa

SEQ ID NO: 2602208 - RNA, 19 nt, Homo sapiens
  misc_RNA (1)...(19): siRNA sense strand
ggaauggagaauacgagaa

SEQ ID NO: 2602209 - RNA, 19 nt, Homo sapiens
  misc_RNA (1)...(19): siRNA sense strand
gccaaugcaaagauggaaa

SEQ ID NO: 2602210 - RNA, 19 nt, Homo sapiens
  misc_RNA (1)...(19): siRNA sense strand
gcaguaaauccuauggaca

SEQ ID NO: 2602211 - RNA, 19 nt, Homo sapiens
  misc_RNA (1)...(19): siRNA sense strand
ccucggaaauguucgaauu

SEQ ID NO: 2602212 - RNA, 19 nt, Homo sapiens
  misc_RNA (1)...(19): siRNA sense strand
cggcagaggaaggagcaaa

SEQ ID NO: 2602213 - RNA, 19 nt, Homo sapiens
  misc_RNA (1)...(19): siRNA sense strand
caccagauuaggagaaauu

SEQ ID NO: 2602214 - RNA, 19 nt, Homo sapiens
  misc_RNA (1)...(19): siRNA sense strand
gcaaaguauaccacagaca

SEQ ID NO: 2602215 - RNA, 19 nt, Homo sapiens
  misc_RNA (1)...(19): siRNA sense strand
guuacuagccuaugugauu

SEQ ID NO: 2602216 - RNA, 19 nt, Homo sapiens
  misc_RNA (1)...(19): siRNA sense strand
caaccaauugcaauggaaa

SEQ ID NO: 2602217 - RNA, 19 nt, Homo sapiens
  misc_RNA (1)...(19): siRNA sense strand
uauuauaggaguagccaau

SEQ ID NO: 2602218 - RNA, 19 nt, Homo sapiens
  misc_RNA (1)...(19): siRNA sense strand
cagcaauggaguccugaaa

SEQ ID NO: 2602219 - RNA, 19 nt, Homo sapiens
  misc_RNA (1)...(19): siRNA sense strand
cuguugaaugggaggacua

SEQ ID NO: 2602220 - RNA, 19 nt, Homo sapiens
  misc_RNA (1)...(19): siRNA sense strand
cugugugauucgaggccaa

SEQ ID NO: 2602221 - RNA, 19 nt, Homo sapiens
  misc_RNA (1)...(19): siRNA sense strand
agguuguacaggaggaaau

SEQ ID NO: 2602222 - RNA, 19 nt, Homo sapiens
  misc_RNA (1)...(19): siRNA sense strand
cagaagaaauacagaaaga

SEQ ID NO: 2602223 - RNA, 19 nt, Homo sapiens
  misc_RNA (1)...(19): siRNA sense strand
gcaaauaacaucagcaaca

SEQ ID NO: 2602224 - RNA, 19 nt, Homo sapiens
  misc_RNA (1)...(19): siRNA sense strand
gguuagauguacuuggaaa

SEQ ID NO: 2602225 - RNA, 19 nt, Homo sapiens
  misc_RNA (1)...(19): siRNA sense strand
ccuuaugacuccagaggaa

SEQ ID NO: 2602226 - RNA, 19 nt, Homo sapiens
  misc_RNA (1)...(19): siRNA sense strand
gggauuggaucuugagcaa

SEQ ID NO: 2602227 - RNA, 19 nt, Homo sapiens
  misc_RNA (1)...(19): siRNA sense strand
guacugaagacuuggauaa

SEQ ID NO: 2602228 - RNA, 19 nt, Homo sapiens
  misc_RNA (1)...(19): siRNA sense strand
agaaagaaauucaggacuu

SEQ ID NO: 2602229 - RNA, 19 nt, Homo sapiens
  misc_RNA (1)...(19): siRNA sense strand
ggaagaaccuuuauggaga

SEQ ID NO: 2602230 - RNA, 19 nt, Homo sapiens
  misc_RNA (1)...(19): siRNA sense strand
ugaugaagcuggaagaaau

SEQ ID NO: 2602231 - RNA, 19 nt, Homo sapiens
  misc_RNA (1)...(19): siRNA sense strand
ccacagaaggagaggccua

SEQ ID NO: 2602232 - RNA, 19 nt, Homo sapiens
  misc_RNA (1)...(19): siRNA sense strand
uuacaauggacaaggaaua

SEQ ID NO: 2602233 - RNA, 19 nt, Homo sapiens
  misc_RNA (1)...(19): siRNA sense strand
aggucaagauagagaaaga

SEQ ID NO: 2602234 - RNA, 19 nt, Homo sapiens
  misc_RNA (1)...(19): siRNA sense strand
aauuaguccuggugaaaua

SEQ ID NO: 2602235 - RNA, 19 nt, Homo sapiens
  misc_RNA (1)...(19): siRNA sense strand
ugacaaaggcagacaguga

SEQ ID NO: 2602236 - RNA, 19 nt, Homo sapiens
  misc_RNA (1)...(19): siRNA sense strand
gcucaacaguaaagaucaa

SEQ ID NO: 2602237 - RNA, 19 nt, Homo sapiens
  misc_RNA (1)...(19): siRNA sense strand
ggagaagacucuagauguu

SEQ ID NO: 2602238 - RNA, 19 nt, Homo sapiens
  misc_RNA (1)...(19): siRNA sense strand
gcagaaagaagaagauaca

SEQ ID NO: 2602239 - RNA, 19 nt, Homo sapiens
  misc_RNA (1)...(19): siRNA sense strand
agugguagaucuuggguua

SEQ ID NO: 2602240 - RNA, 19 nt, Homo sapiens
  misc_RNA (1)...(19): siRNA sense strand
cagagaaggaauugagaga

SEQ ID NO: 2602241 - RNA, 19 nt, Homo sapiens
  misc_RNA (1)...(19): siRNA sense strand
ccauuaaggugaagcccaa

SEQ ID NO: 2602242 - RNA, 19 nt, Homo sapiens
  misc_RNA (1)...(19): siRNA sense strand
gagaacagcuacaggacuu

SEQ ID NO: 2602243 - RNA, 19 nt, Homo sapiens
  misc_RNA (1)...(19): siRNA sense strand
agaugaaagaugugcuaua

SEQ ID NO: 2602244 - RNA, 19 nt, Homo sapiens
  misc_RNA (1)...(19): siRNA sense strand
ggaaauguggcuuuagaua

SEQ ID NO: 2602245 - RNA, 19 nt, Homo sapiens
  misc_RNA (1)...(19): siRNA sense strand
acuagaaguuggcgagauu

SEQ ID NO: 2602246 - RNA, 19 nt, Homo sapiens
  misc_RNA (1)...(19): siRNA sense strand
cagagaaaagagagggaaa

SEQ ID NO: 2602247 - RNA, 19 nt, Homo sapiens
  misc_RNA (1)...(19): siRNA sense strand
ggauggagauaaaaggaaa

SEQ ID NO: 2602248 - RNA, 19 nt, Homo sapiens
  misc_RNA (1)...(19): siRNA sense strand
uguccaaaguagacggcaa

SEQ ID NO: 2602249 - RNA, 19 nt, Homo sapiens
  misc_RNA (1)...(19): siRNA sense strand
gugaagaaucagacaaaga

SEQ ID NO: 2602250 - RNA, 19 nt, Homo sapiens
  misc_RNA (1)...(19): siRNA sense strand
gauuggaucuugagcaaau

SEQ ID NO: 2602251 - RNA, 19 nt, Homo sapiens
  misc_RNA (1)...(19): siRNA sense strand
ggaagaaauuaaggagaga

SEQ ID NO: 2602252 - RNA, 19 nt, Homo sapiens
  misc_RNA (1)...(19): siRNA sense strand
gcuagaaaaucuuggagaa

SEQ ID NO: 2602253 - RNA, 19 nt, Homo sapiens
  misc_RNA (1)...(19): siRNA sense strand
acuuaagguagaagcgaaa

SEQ ID NO: 2602254 - RNA, 19 nt, Homo sapiens
  misc_RNA (1)...(19): siRNA sense strand
cgucuaaggaaauggaaaa

SEQ ID NO: 2602255 - RNA, 19 nt, Homo sapiens
  misc_RNA (1)...(19): siRNA sense strand
cagagaaguuuaagggcca

SEQ ID NO: 2602256 - RNA, 19 nt, Homo sapiens
  misc_RNA (1)...(19): siRNA sense strand
ggauugcaacauagaaaua

SEQ ID NO: 2602257 - RNA, 19 nt, Homo sapiens
  misc_RNA (1)...(19): siRNA sense strand
ggucgacgaugguggaaau

SEQ ID NO: 2602258 - RNA, 19 nt, Homo sapiens
  misc_RNA (1)...(19): siRNA sense strand
caacuggaguggaagaaau

SEQ ID NO: 2602259 - RNA, 19 nt, Homo sapiens
  misc_RNA (1)...(19): siRNA sense strand
gcaacagaaauaacggaaa

SEQ ID NO: 2602260 - RNA, 19 nt, Homo sapiens
  misc_RNA (1)...(19): siRNA sense strand
aggugaagaaucagacaaa

SEQ ID NO: 2602261 - RNA, 19 nt, Homo sapiens
  misc_RNA (1)...(19): siRNA sense strand
ucacagauguugauccaaa

SEQ ID NO: 2602262 - RNA, 19 nt, Homo sapiens
  misc_RNA (1)...(19): siRNA sense strand
gaauggaagcuaaaguuaa

SEQ ID NO: 2602263 - RNA, 19 nt, Homo sapiens
  misc_RNA (1)...(19): siRNA sense strand
aggcagaagaaauggaaca

SEQ ID NO: 2602264 - RNA, 19 nt, Homo sapiens
  misc_RNA (1)...(19): siRNA sense strand
gcugaaagaagacggacaa

SEQ ID NO: 2602265 - RNA, 19 nt, Homo sapiens
  misc_RNA (1)...(19): siRNA sense strand
gaaauguggcuuuagauaa

SEQ ID NO: 2602266 - RNA, 19 nt, Homo sapiens
  misc_RNA (1)...(19): siRNA sense strand
uggaauuaguccuggugaa

SEQ ID NO: 2602267 - RNA, 19 nt, Homo sapiens
  misc_RNA (1)...(19): siRNA sense strand
agaaagagcuaucccgaau

SEQ ID NO: 2602268 - RNA, 19 nt, Homo sapiens
  misc_RNA (1)...(19): siRNA sense strand
gagcaaauaacaucagcaa

SEQ ID NO: 2602269 - RNA, 19 nt, Homo sapiens
  misc_RNA (1)...(19): siRNA sense strand
cuuaaauccuccaguaauu

SEQ ID NO: 2602270 - RNA, 19 nt, Homo sapiens
  misc_RNA (1)...(19): siRNA sense strand
agugaaaccaagaguacaa

SEQ ID NO: 2602271 - RNA, 19 nt, Homo sapiens
  misc_RNA (1)...(19): siRNA sense strand
acaagagacaggugaaauu

SEQ ID NO: 2602272 - RNA, 19 nt, Homo sapiens
  misc_RNA (1)...(19): siRNA sense strand
ggaauggaagcuaaaguua

SEQ ID NO: 2602273 - RNA, 19 nt, Homo sapiens
  misc_RNA (1)...(19): siRNA sense strand
guaucuugguggauguaaa

SEQ ID NO: 2602274 - RNA, 19 nt, Homo sapiens
  misc_RNA (1)...(19): siRNA sense strand
gucuaaagucucagaagaa

SEQ ID NO: 2602275 - RNA, 19 nt, Homo sapiens
  misc_RNA (1)...(19): siRNA sense strand
gguuugagacagcaggaua

SEQ ID NO: 2602276 - RNA, 19 nt, Homo sapiens
  misc_RNA (1)...(19): siRNA sense strand
agacuguaagagugagaaa

SEQ ID NO: 2602277 - RNA, 19 nt, Homo sapiens
  misc_RNA (1)...(19): siRNA sense strand
gaaggaauugagagagcaa

SEQ ID NO: 2602278 - RNA, 19 nt, Homo sapiens
  misc_RNA (1)...(19): siRNA sense strand
ugacacggcaacagaaaua

SEQ ID NO: 2602279 - RNA, 19 nt, Homo sapiens
  misc_RNA (1)...(19): siRNA sense strand
gggaaagguuuggcagcaa

SEQ ID NO: 2602280 - RNA, 19 nt, Homo sapiens
  misc_RNA (1)...(19): siRNA sense strand
ucgaaaaguccuugauuua

SEQ ID NO: 2602281 - RNA, 19 nt, Homo sapiens
  misc_RNA (1)...(19): siRNA sense strand
agagcaacaucgagaauga

SEQ ID NO: 2602282 - RNA, 19 nt, Homo sapiens
  misc_RNA (1)...(19): siRNA sense strand
acugaagggaauaaaguaa

SEQ ID NO: 2602283 - RNA, 19 nt, Homo sapiens
  misc_RNA (1)...(19): siRNA sense strand
aggcgaguguuguguauaa

SEQ ID NO: 2602284 - RNA, 19 nt, Homo sapiens
  misc_RNA (1)...(19): siRNA sense strand
gagcaaguauuaaguauga

SEQ ID NO: 2602285 - RNA, 19 nt, Homo sapiens
  misc_RNA (1)...(19): siRNA sense strand
cagauguggucauggagua

SEQ ID NO: 2602286 - RNA, 19 nt, Homo sapiens
  misc_RNA (1)...(19): siRNA sense strand
uuuaacaacuggaguggaa

SEQ ID NO: 2602287 - RNA, 19 nt, Homo sapiens
  misc_RNA (1)...(19): siRNA sense strand
cagcaugguaugugcaaau

SEQ ID NO: 2602288 - RNA, 19 nt, Homo sapiens
  misc_RNA (1)...(19): siRNA sense strand
ggagauaaaaggaaaacua

SEQ ID NO: 2602289 - RNA, 19 nt, Homo sapiens
  misc_RNA (1)...(19): siRNA sense strand
gggaagauguuuaaggaug

SEQ ID NO: 2602290 - RNA, 19 nt, Homo sapiens
  misc_RNA (1)...(19): siRNA sense strand
agaaagaaugaccaagaua

SEQ ID NO: 2602291 - RNA, 19 nt, Homo sapiens
  misc_RNA (1)...(19): siRNA sense strand
gauauuuacuugagggaac

SEQ ID NO: 2602292 - RNA, 19 nt, Homo sapiens
  misc_RNA (1)...(19): siRNA sense strand
ccagaaaguuugucaggca

SEQ ID NO: 2602293 - RNA, 19 nt, Homo sapiens
  misc_RNA (1)...(19): siRNA sense strand
ggucauggaguaacauaaa

SEQ ID NO: 2602294 - RNA, 19 nt, Homo sapiens
  misc_RNA (1)...(19): siRNA sense strand
uggauaaggcauaugacaa

SEQ ID NO: 2602295 - RNA, 19 nt, Homo sapiens
  misc_RNA (1)...(19): siRNA sense strand
ggauaaagugaaaccaaga

SEQ ID NO: 2602296 - RNA, 19 nt, Homo sapiens
  misc_RNA (1)...(19): siRNA sense strand
ggguuuaaucagaguugaa

SEQ ID NO: 2602297 - RNA, 19 nt, Homo sapiens
  misc_RNA (1)...(19): siRNA sense strand
cagaaauaacggaaagcuu

SEQ ID NO: 2602298 - RNA, 19 nt, Homo sapiens
  misc_RNA (1)...(19): siRNA sense strand
augcaaacauccagauaca

SEQ ID NO: 2602299 - RNA, 19 nt, Homo sapiens
  misc_RNA (1)...(19): siRNA sense strand
cugacuuacuugagaauca

SEQ ID NO: 2602300 - RNA, 19 nt, Homo sapiens
  misc_RNA (1)...(19): siRNA sense strand
ucucaaagaacaagaagau

SEQ ID NO: 2602301 - RNA, 19 nt, Homo sapiens
  misc_RNA (1)...(19): siRNA sense strand
agucaaggcuggccaaauu

SEQ ID NO: 2602302 - RNA, 19 nt, Homo sapiens
  misc_RNA (1)...(19): siRNA sense strand
ggaagauagccaagagcca

SEQ ID NO: 2602303 - RNA, 19 nt, Homo sapiens
  misc_RNA (1)...(19): siRNA sense strand
acacaaugaaagugaagau

SEQ ID NO: 2602304 - RNA, 19 nt, Homo sapiens
  misc_RNA (1)...(19): siRNA sense strand
ucgagaaguaccaggcuau

SEQ ID NO: 2602305 - RNA, 19 nt, Homo sapiens
  misc_RNA (1)...(19): siRNA sense strand
ggauuggacaagcaggcaa

SEQ ID NO: 2602306 - RNA, 19 nt, Homo sapiens
  misc_RNA (1)...(19): siRNA sense strand
uggaaaacaggcaggauuu

SEQ ID NO: 2602307 - RNA, 19 nt, Homo sapiens
  misc_RNA (1)...(19): siRNA sense strand
ggagcaagcuggagcguga

SEQ ID NO: 2602308 - RNA, 19 nt, Homo sapiens
  misc_RNA (1)...(19): siRNA sense strand
gcacaauggcagcgagcuu

SEQ ID NO: 2602309 - RNA, 19 nt, Homo sapiens
  misc_RNA (1)...(19): siRNA sense strand
ccacggaggcugaggacau

SEQ ID NO: 2602310 - RNA, 19 nt, Homo sapiens
  misc_RNA (1)...(19): siRNA sense strand
gggaggagaaacuggaaau

SEQ ID NO: 2602311 - RNA, 19 nt, Homo sapiens
  misc_RNA (1)...(19): siRNA sense strand
caagauccacagagggaaa

SEQ ID NO: 2602312 - RNA, 19 nt, Homo sapiens
  misc_RNA (1)...(19): siRNA sense strand
gaugaagauggaagugaaa

SEQ ID NO: 2602313 - RNA, 19 nt, Homo sapiens
  misc_RNA (1)...(19): siRNA sense strand
ccaagaaauccaaguccaa

SEQ ID NO: 2602314 - RNA, 19 nt, Homo sapiens
  misc_RNA (1)...(19): siRNA sense strand
guauaaaccggaagguaca

SEQ ID NO: 2602315 - RNA, 19 nt, Homo sapiens
  misc_RNA (1)...(19): siRNA sense strand
ugaagauggaagugaaaca

SEQ ID NO: 2602316 - RNA, 19 nt, Homo sapiens
  misc_RNA (1)...(19): siRNA sense strand
agucuguacuggagaugua

SEQ ID NO: 2602317 - RNA, 19 nt, Homo sapiens
  misc_RNA (1)...(19): siRNA sense strand
uugcaaagcauccgacuaa

SEQ ID NO: 2602318 - RNA, 19 nt, Homo sapiens
  misc_RNA (1)...(19): siRNA sense strand
uuaaugaaccuguggaaaa

SEQ ID NO: 2602319 - RNA, 19 nt, Homo sapiens
  misc_RNA (1)...(19): siRNA sense strand
gguauaaaccggaagguac

SEQ ID NO: 2602320 - RNA, 19 nt, Homo sapiens
  misc_RNA (1)...(19): siRNA sense strand
ggaucagucgggaggagaa

SEQ ID NO: 2602321 - RNA, 19 nt, Homo sapiens
  misc_RNA (1)...(19): siRNA sense strand
caguauuacauccaagaua

SEQ ID NO: 2602322 - RNA, 19 nt, Homo sapiens
  misc_RNA (1)...(19): siRNA sense strand
cgaugaaauacuacgauga

SEQ ID NO: 2602323 - RNA, 19 nt, Homo sapiens
  misc_RNA (1)...(19): siRNA sense strand
gcuacaagacagggaaauu

SEQ ID NO: 2602324 - RNA, 19 nt, Homo sapiens
  misc_RNA (1)...(19): siRNA sense strand
uggaaauugcugugggcuu

SEQ ID NO: 2602325 - RNA, 19 nt, Homo sapiens
  misc_RNA (1)...(19): siRNA sense strand
gugagacacuagagcuaau

SEQ ID NO: 2602326 - RNA, 19 nt, Homo sapiens
  misc_RNA (1)...(19): siRNA sense strand
gcagaguggccuaggcuca

SEQ ID NO: 2602327 - RNA, 19 nt, Homo sapiens
  misc_RNA (1)...(19): siRNA sense strand
ccuuaaugaaccuguggaa

SEQ ID NO: 2602328 - RNA, 19 nt, Homo sapiens
  misc_RNA (1)...(19): siRNA sense strand
aggaugagucugucaacaa

SEQ ID NO: 2602329 - RNA, 19 nt, Homo sapiens
  misc_RNA (1)...(19): siRNA sense strand
ccauagaaggggagcaaga

SEQ ID NO: 2602330 - RNA, 19 nt, Homo sapiens
  misc_RNA (1)...(19): siRNA sense strand
ggucaauggagcugucuuu

SEQ ID NO: 2602331 - RNA, 19 nt, Homo sapiens
  misc_RNA (1)...(19): siRNA sense strand
gugccaagauucuggggaa

SEQ ID NO: 2602332 - RNA, 19 nt, Homo sapiens
  misc_RNA (1)...(19): siRNA sense strand
cagaagagagugacagcga

SEQ ID NO: 2602333 - RNA, 19 nt, Homo sapiens
  misc_RNA (1)...(19): siRNA sense strand
ugaagaacaucaaggccuu

SEQ ID NO: 2602334 - RNA, 19 nt, Homo sapiens
  misc_RNA (1)...(19): siRNA sense strand
ccuuuggcccugaggacua

SEQ ID NO: 2602335 - RNA, 19 nt, Homo sapiens
  misc_RNA (1)...(19): siRNA sense strand
guauuugcccugaucgaaa

SEQ ID NO: 2602336 - RNA, 19 nt, Homo sapiens
  misc_RNA (1)...(19): siRNA sense strand
agaaagucucugaggaagu

SEQ ID NO: 2602337 - RNA, 19 nt, Homo sapiens
  misc_RNA (1)...(19): siRNA sense strand
ggagggagguguaccggau

SEQ ID NO: 2602338 - RNA, 19 nt, Homo sapiens
  misc_RNA (1)...(19): siRNA sense strand
ugauagaaggugaagacca

SEQ ID NO: 2602339 - RNA, 19 nt, Homo sapiens
  misc_RNA (1)...(19): siRNA sense strand
augggaagguugaacgaga

SEQ ID NO: 2602340 - RNA, 19 nt, Homo sapiens
  misc_RNA (1)...(19): siRNA sense strand
gagaugagcucuuguuugu

SEQ ID NO: 2602341 - RNA, 19 nt, Homo sapiens
  misc_RNA (1)...(19): siRNA sense strand
ggcaagauccacagaggga

SEQ ID NO: 2602342 - RNA, 19 nt, Homo sapiens
  misc_RNA (1)...(19): siRNA sense strand
cgggaggagaaacuggaaa

SEQ ID NO: 2602343 - RNA, 19 nt, Homo sapiens
  misc_RNA (1)...(19): siRNA sense strand
ccacagaaaugaagcagag

SEQ ID NO: 2602344 - RNA, 19 nt, Homo sapiens
  misc_RNA (1)...(19): siRNA sense strand
gggaaagagauucgauauc

SEQ ID NO: 2602345 - RNA, 19 nt, Homo sapiens
  misc_RNA (1)...(19): siRNA sense strand
cacuagagcuaaugcuaca

SEQ ID NO: 2602346 - RNA, 19 nt, Homo sapiens
  misc_RNA (1)...(19): siRNA sense strand
agagaacccacgaggauga

SEQ ID NO: 2602347 - RNA, 19 nt, Homo sapiens
  misc_RNA (1)...(19): siRNA sense strand
uggcuacaagacagggaaa

SEQ ID NO: 2602348 - RNA, 19 nt, Homo sapiens
  misc_RNA (1)...(19): siRNA sense strand
gugccaucucagagcuuaa

SEQ ID NO: 2602349 - RNA, 19 nt, Homo sapiens
  misc_RNA (1)...(19): siRNA sense strand
cagccaacugugccagaaa

SEQ ID NO: 2602350 - RNA, 19 nt, Homo sapiens
  misc_RNA (1)...(19): siRNA sense strand
cguaagauuggcagccgaa

SEQ ID NO: 2602351 - RNA, 19 nt, Homo sapiens
  misc_RNA (1)...(19): siRNA sense strand
ggucguacaucuaugagga

SEQ ID NO: 2602352 - RNA, 19 nt, Homo sapiens
  misc_RNA (1)...(19): siRNA sense strand
agguauaaaccggaaggua

SEQ ID NO: 2602353 - RNA, 19 nt, Homo sapiens
  misc_RNA (1)...(19): siRNA sense strand
gaucagucgggaggagaaa

SEQ ID NO: 2602354 - RNA, 19 nt, Homo sapiens
  misc_RNA (1)...(19): siRNA sense strand
cccugggaguggagcacaa

SEQ ID NO: 2602355 - RNA, 19 nt, Homo sapiens
  misc_RNA (1)...(19): siRNA sense strand
aagauaggagggaggugua

SEQ ID NO: 2602356 - RNA, 19 nt, Homo sapiens
  misc_RNA (1)...(19): siRNA sense strand
gugaagagugccaacauga

SEQ ID NO: 2602357 - RNA, 19 nt, Homo sapiens
  misc_RNA (1)...(19): siRNA sense strand
aggaggucauccagccaua

SEQ ID NO: 2602358 - RNA, 19 nt, Homo sapiens
  misc_RNA (1)...(19): siRNA sense strand
gugcagaagaccacaaugu

SEQ ID NO: 2602359 - RNA, 19 nt, Homo sapiens
  misc_RNA (1)...(19): siRNA sense strand
cugcucaacuccaugacua

SEQ ID NO: 2602360 - RNA, 19 nt, Homo sapiens
  misc_RNA (1)...(19): siRNA sense strand
cagaagaugaagauggaag

SEQ ID NO: 2602361 - RNA, 19 nt, Homo sapiens
  misc_RNA (1)...(19): siRNA sense strand
ggcagcgagcuuuggauua

SEQ ID NO: 2602362 - RNA, 19 nt, Homo sapiens
  misc_RNA (1)...(19): siRNA sense strand
ccaggagaaccaugacaau

SEQ ID NO: 2602363 - RNA, 19 nt, Homo sapiens
  misc_RNA (1)...(19): siRNA sense strand
aauccaaguccaagccaau

SEQ ID NO: 2602364 - RNA, 19 nt, Homo sapiens
  misc_RNA (1)...(19): siRNA sense strand
cuuaaugaaccuguggaaa

SEQ ID NO: 2602365 - RNA, 19 nt, Homo sapiens
  misc_RNA (1)...(19): siRNA sense strand
aggaaugcaaccugauaga

SEQ ID NO: 2602366 - RNA, 19 nt, Homo sapiens
  misc_RNA (1)...(19): siRNA sense strand
ccagugagggcgagaguac

SEQ ID NO: 2602367 - RNA, 19 nt, Homo sapiens
  misc_RNA (1)...(19): siRNA sense strand
gaguaaaagcuucuaauga

SEQ ID NO: 2602368 - RNA, 19 nt, Homo sapiens
  misc_RNA (1)...(19): siRNA sense strand
agauugucaucaugcuuua

SEQ ID NO: 2602369 - RNA, 19 nt, Homo sapiens
  misc_RNA (1)...(19): siRNA sense strand
gacucaaauccuagagcga

SEQ ID NO: 2602370 - RNA, 19 nt, Homo sapiens
  misc_RNA (1)...(19): siRNA sense strand
uugaggaugaggaggauga

SEQ ID NO: 2602371 - RNA, 19 nt, Homo sapiens
  misc_RNA (1)...(19): siRNA sense strand
ggaacaacguuuaaugaau

SEQ ID NO: 2602372 - RNA, 19 nt, Homo sapiens
  misc_RNA (1)...(19): siRNA sense strand
cagaauuaucagugaagaa

SEQ ID NO: 2602373 - RNA, 19 nt, Homo sapiens
  misc_RNA (1)...(19): siRNA sense strand
cuaggaaacaccagaauua

SEQ ID NO: 2602374 - RNA, 19 nt, Homo sapiens
  misc_RNA (1)...(19): siRNA sense strand
uucuauggcuugagaguaa

SEQ ID NO: 2602375 - RNA, 19 nt, Homo sapiens
  misc_RNA (1)...(19): siRNA sense strand
gaaauuagaugcuggggaa

SEQ ID NO: 2602376 - RNA, 19 nt, Homo sapiens
  misc_RNA (1)...(19): siRNA sense strand
uuaaauggcucacgggcua

SEQ ID NO: 2602377 - RNA, 19 nt, Homo sapiens
  misc_RNA (1)...(19): siRNA sense strand
ccaaacaaacgcagcauuu

SEQ ID NO: 2602378 - RNA, 19 nt, Homo sapiens
  misc_RNA (1)...(19): siRNA sense strand
ccuucuguguugugggaau

SEQ ID NO: 2602379 - RNA, 19 nt, Homo sapiens
  misc_RNA (1)...(19): siRNA sense strand
ccucuaaaccuuugcccua

SEQ ID NO: 2602380 - RNA, 19 nt, Homo sapiens
  misc_RNA (1)...(19): siRNA sense strand
agauguuccuuuagaguca

SEQ ID NO: 2602381 - RNA, 19 nt, Homo sapiens
  misc_RNA (1)...(19): siRNA sense strand
ccuuuagagucaaugagaa

SEQ ID NO: 2602382 - RNA, 19 nt, Homo sapiens
  misc_RNA (1)...(19): siRNA sense strand
gggaacaacguuuaaugaa

SEQ ID NO: 2602383 - RNA, 19 nt, Homo sapiens
  misc_RNA (1)...(19): siRNA sense strand
auaaaggcaaagugaagaa

SEQ ID NO: 2602384 - RNA, 19 nt, Homo sapiens
  misc_RNA (1)...(19): siRNA sense strand
aggaauggaaagaguggau

SEQ ID NO: 2602385 - RNA, 19 nt, Homo sapiens
  misc_RNA (1)...(19): siRNA sense strand
ugaugaaucuucugacaca

SEQ ID NO: 2602386 - RNA, 19 nt, Homo sapiens
  misc_RNA (1)...(19): siRNA sense strand
gggcuacuguaaagcauau

SEQ ID NO: 2602387 - RNA, 19 nt, Homo sapiens
  misc_RNA (1)...(19): siRNA sense strand
ucagugauccuuacagaaa

SEQ ID NO: 2602388 - RNA, 19 nt, Homo sapiens
  misc_RNA (1)...(19): siRNA sense strand
ugacacaccuggagcaacu

SEQ ID NO: 2602389 - RNA, 19 nt, Homo sapiens
  misc_RNA (1)...(19): siRNA sense strand
uaaugggaauuuaccgaaa

SEQ ID NO: 2602390 - RNA, 19 nt, Homo sapiens
  misc_RNA (1)...(19): siRNA sense strand
acacauauuuggacugcga

SEQ ID NO: 2602391 - RNA, 19 nt, Homo sapiens
  misc_RNA (1)...(19): siRNA sense strand
guagaaagauacaaagcac

SEQ ID NO: 2602392 - RNA, 19 nt, Homo sapiens
  misc_RNA (1)...(19): siRNA sense strand
agugaagaagcucaagaaa

SEQ ID NO: 2602393 - RNA, 19 nt, Homo sapiens
  misc_RNA (1)...(19): siRNA sense strand
cuuuagagucaaugagaac

SEQ ID NO: 2602394 - RNA, 19 nt, Homo sapiens
  misc_RNA (1)...(19): siRNA sense strand
acuauaaaggcaaagugaa

SEQ ID NO: 2602395 - RNA, 19 nt, Homo sapiens
  misc_RNA (1)...(19): siRNA sense strand
gaugaugaaucuucugaca

SEQ ID NO: 2602396 - RNA, 19 nt, Homo sapiens
  misc_RNA (1)...(19): siRNA sense strand
gcauuuauauacaguccau

SEQ ID NO: 2602397 - RNA, 19 nt, Homo sapiens
  misc_RNA (1)...(19): siRNA sense strand
ccauuggcucucuaggaaa

SEQ ID NO: 2602398 - RNA, 19 nt, Homo sapiens
  misc_RNA (1)...(19): siRNA sense strand
aguaaaacuccuagaacca

SEQ ID NO: 2602399 - RNA, 19 nt, Homo sapiens
  misc_RNA (1)...(19): siRNA sense strand
aacacagucacgaggauaa

SEQ ID NO: 2602400 - RNA, 19 nt, Homo sapiens
  misc_RNA (1)...(19): siRNA sense strand
cuucuguguugugggaaua

SEQ ID NO: 2602401 - RNA, 19 nt, Homo sapiens
  misc_RNA (1)...(19): siRNA sense strand
cuguaagacuuuaacccau

SEQ ID NO: 2602402 - RNA, 19 nt, Homo sapiens
  misc_RNA (1)...(19): siRNA sense strand
uguaucacaguaugagaaa

SEQ ID NO: 2602403 - RNA, 19 nt, Homo sapiens
  misc_RNA (1)...(19): siRNA sense strand
gggacauccugaaguucuu

SEQ ID NO: 2602404 - RNA, 19 nt, Homo sapiens
  misc_RNA (1)...(19): siRNA sense strand
gaacaacguuuaaugaaug

SEQ ID NO: 2602405 - RNA, 19 nt, Homo sapiens
  misc_RNA (1)...(19): siRNA sense strand
aaacaaacgcagcauuuau

SEQ ID NO: 2602406 - RNA, 19 nt, Homo sapiens
  misc_RNA (1)...(19): siRNA sense strand
ggaaacaccagaauuauca

SEQ ID NO: 2602407 - RNA, 19 nt, Homo sapiens
  misc_RNA (1)...(19): siRNA sense strand
caaagaacccagugcuugu

SEQ ID NO: 2602408 - RNA, 19 nt, Homo sapiens
  misc_RNA (1)...(19): siRNA sense strand
guuuaaugaaugaagccuu

SEQ ID NO: 2602409 - RNA, 19 nt, Homo sapiens
  misc_RNA (1)...(19): siRNA sense strand
acaccagaauuaucaguga

SEQ ID NO: 2602410 - RNA, 19 nt, Homo sapiens
  misc_RNA (1)...(19): siRNA sense strand
caccagaauuaucagugaa

SEQ ID NO: 2602411 - RNA, 19 nt, Homo sapiens
  misc_RNA (1)...(19): siRNA sense strand
agugauccuuacagaaaga

SEQ ID NO: 2602412 - RNA, 19 nt, Homo sapiens
  misc_RNA (1)...(19): siRNA sense strand
gggaagacaaagaggacaa

SEQ ID NO: 2602413 - RNA, 19 nt, Homo sapiens
  misc_RNA (1)...(19): siRNA sense strand
cagaagaggaagaacgaaa

SEQ ID NO: 2602414 - RNA, 19 nt, Homo sapiens
  misc_RNA (1)...(19): siRNA sense strand
ggugaauuuaugagggaaa

SEQ ID NO: 2602415 - RNA, 19 nt, Homo sapiens
  misc_RNA (1)...(19): siRNA sense strand
cagagaaagcagugaaaga

SEQ ID NO: 2602416 - RNA, 19 nt, Homo sapiens
  misc_RNA (1)...(19): siRNA sense strand
uggaaauagaggacgaaua

SEQ ID NO: 2602417 - RNA, 19 nt, Homo sapiens
  misc_RNA (1)...(19): siRNA sense strand
agaggaagaacgaaagaaa

SEQ ID NO: 2602418 - RNA, 19 nt, Homo sapiens
  misc_RNA (1)...(19): siRNA sense strand
ggcaagacucagagagauu

SEQ ID NO: 2602419 - RNA, 19 nt, Homo sapiens
  misc_RNA (1)...(19): siRNA sense strand
gcaaaagaucaguuagaaa

SEQ ID NO: 2602420 - RNA, 19 nt, Homo sapiens
  misc_RNA (1)...(19): siRNA sense strand
acgaaagaaacgaggaaga

SEQ ID NO: 2602421 - RNA, 19 nt, Homo sapiens
  misc_RNA (1)...(19): siRNA sense strand
aagaaagagggaagacaaa

SEQ ID NO: 2602422 - RNA, 19 nt, Homo sapiens
  misc_RNA (1)...(19): siRNA sense strand
gggauggagacaacagaaa

SEQ ID NO: 2602423 - RNA, 19 nt, Homo sapiens
  misc_RNA (1)...(19): siRNA sense strand
augcagaacguguuggaaa

SEQ ID NO: 2602424 - RNA, 19 nt, Homo sapiens
  misc_RNA (1)...(19): siRNA sense strand
ccagaaaacaucaggaauu

SEQ ID NO: 2602425 - RNA, 19 nt, Homo sapiens
  misc_RNA (1)...(19): siRNA sense strand
aggaagaacagcaugcuaa

SEQ ID NO: 2602426 - RNA, 19 nt, Homo sapiens
  misc_RNA (1)...(19): siRNA sense strand
ggugaagaauagaacccaa

SEQ ID NO: 2602427 - RNA, 19 nt, Homo sapiens
  misc_RNA (1)...(19): siRNA sense strand
uggcugaagcugagauuau

SEQ ID NO: 2602428 - RNA, 19 nt, Homo sapiens
  misc_RNA (1)...(19): siRNA sense strand
agccaguguuauugugaaa

SEQ ID NO: 2602429 - RNA, 19 nt, Homo sapiens
  misc_RNA (1)...(19): siRNA sense strand
ucaacaacucagagaaaca

SEQ ID NO: 2602430 - RNA, 19 nt, Homo sapiens
  misc_RNA (1)...(19): siRNA sense strand
gaaaagaagaauuggcuga

SEQ ID NO: 2602431 - RNA, 19 nt, Homo sapiens
  misc_RNA (1)...(19): siRNA sense strand
ugcagaacguguuggaaau

SEQ ID NO: 2602432 - RNA, 19 nt, Homo sapiens
  misc_RNA (1)...(19): siRNA sense strand
uagccauggaggagagauu

SEQ ID NO: 2602433 - RNA, 19 nt, Homo sapiens
  misc_RNA (1)...(19): siRNA sense strand
agaauagaacccaaggaau

SEQ ID NO: 2602434 - RNA, 19 nt, Homo sapiens
  misc_RNA (1)...(19): siRNA sense strand
uguuggaaauagaggacga

SEQ ID NO: 2602435 - RNA, 19 nt, Homo sapiens
  misc_RNA (1)...(19): siRNA sense strand
cagugaaagauuaugaaca

SEQ ID NO: 2602436 - RNA, 19 nt, Homo sapiens
  misc_RNA (1)...(19): siRNA sense strand
aggaagaguuacagacuac

SEQ ID NO: 2602437 - RNA, 19 nt, Homo sapiens
  misc_RNA (1)...(19): siRNA sense strand
cgaggaagaaagagggaag

SEQ ID NO: 2602438 - RNA, 19 nt, Homo sapiens
  misc_RNA (1)...(19): siRNA sense strand
gagcaaaagaucaguuaga

SEQ ID NO: 2602439 - RNA, 19 nt, Homo sapiens
  misc_RNA (1)...(19): siRNA sense strand
uuauuauccuuguggagua

SEQ ID NO: 2602440 - RNA, 19 nt, Homo sapiens
  misc_RNA (1)...(19): siRNA sense strand
cuauuguacuggagcuuau

SEQ ID NO: 2602441 - RNA, 19 nt, Homo sapiens
  misc_RNA (1)...(19): siRNA sense strand
aagaauagaacccaaggaa

SEQ ID NO: 2602442 - RNA, 19 nt, Homo sapiens
  misc_RNA (1)...(19): siRNA sense strand
caauuaugauguggagcua

SEQ ID NO: 2602443 - RNA, 19 nt, Homo sapiens
  misc_RNA (1)...(19): siRNA sense strand
gcaucuagguggcggcagu

SEQ ID NO: 2602444 - RNA, 19 nt, Homo sapiens
  misc_RNA (1)...(19): siRNA sense strand
uaauaacagagcugaacua

SEQ ID NO: 2602445 - RNA, 19 nt, Homo sapiens
  misc_RNA (1)...(19): siRNA sense strand
gugauagucaugugcgaau

SEQ ID NO: 2602446 - RNA, 19 nt, Homo sapiens
  misc_RNA (1)...(19): siRNA sense strand
aaucuuagagcguggaaaa

SEQ ID NO: 2602447 - RNA, 19 nt, Homo sapiens
  misc_RNA (1)...(19): siRNA sense strand
aggaaacgauucaugaaca

SEQ ID NO: 2602448 - RNA, 19 nt, Homo sapiens
  misc_RNA (1)...(19): siRNA sense strand
caguguuuguuguggauca

SEQ ID NO: 2602449 - RNA, 19 nt, Homo sapiens
  misc_RNA (1)...(19): siRNA sense strand
cccuaaaagagaugaacaa

SEQ ID NO: 2602450 - RNA, 19 nt, Homo sapiens
  misc_RNA (1)...(19): siRNA sense strand
cagagaaacaucaaagagu

SEQ ID NO: 2602451 - RNA, 19 nt, Homo sapiens
  misc_RNA (1)...(19): siRNA sense strand
gagaaacaucaaagagucu

SEQ ID NO: 2602452 - RNA, 19 nt, Homo sapiens
  misc_RNA (1)...(19): siRNA sense strand
guggaaacucucugcaaaa

SEQ ID NO: 2602453 - RNA, 19 nt, Homo sapiens
  misc_RNA (1)...(19): siRNA sense strand
gauuacagauuuuggugaa

SEQ ID NO: 2602454 - RNA, 19 nt, Homo sapiens
  misc_RNA (1)...(19): siRNA sense strand
ucuaaaucauuguggccuu

SEQ ID NO: 2602455 - RNA, 19 nt, Homo sapiens
  misc_RNA (1)...(19): siRNA sense strand
acgaaagucagguucuaaa

SEQ ID NO: 2602456 - RNA, 19 nt, Homo sapiens
  misc_RNA (1)...(19): siRNA sense strand
gcuuaguagccauggagga

SEQ ID NO: 2602457 - RNA, 19 nt, Homo sapiens
  misc_RNA (1)...(19): siRNA sense strand
cgauggaagucuugagguc

SEQ ID NO: 2602458 - RNA, 19 nt, Homo sapiens
  misc_RNA (1)...(19): siRNA sense strand
ugacagaagaagauguguu

SEQ ID NO: 2602459 - RNA, 19 nt, Homo sapiens
  misc_RNA (1)...(19): siRNA sense strand
aagaauuggcugaagcuga

SEQ ID NO: 2602460 - RNA, 19 nt, Homo sapiens
  misc_RNA (1)...(19): siRNA sense strand
agugaaggauguggaggaa

SEQ ID NO: 2602461 - RNA, 19 nt, Homo sapiens
  misc_RNA (1)...(19): siRNA sense strand
aagaaacgaggaagaaaga

SEQ ID NO: 2602462 - RNA, 19 nt, Homo sapiens
  misc_RNA (1)...(19): siRNA sense strand
auaacagagcugaacuaua

SEQ ID NO: 2602463 - RNA, 19 nt, Homo sapiens
  misc_RNA (1)...(19): siRNA sense strand
agaacguguuggaaauaga

SEQ ID NO: 2602464 - RNA, 19 nt, Homo sapiens
  misc_RNA (1)...(19): siRNA sense strand
agacaacagaaaauggaaa

SEQ ID NO: 2602465 - RNA, 19 nt, Homo sapiens
  misc_RNA (1)...(19): siRNA sense strand
ggaaugaauuagaaacccu

SEQ ID NO: 2602466 - RNA, 19 nt, Homo sapiens
  misc_RNA (1)...(19): siRNA sense strand
agaggacaagucagagaaa

SEQ ID NO: 2602467 - RNA, 19 nt, Homo sapiens
  misc_RNA (1)...(19): siRNA sense strand
acaaagaugcacauguaga

SEQ ID NO: 2602468 - RNA, 19 nt, Homo sapiens
  misc_RNA (1)...(19): siRNA sense strand
gauguaaauaguagaccuu

SEQ ID NO: 2602469 - RNA, 19 nt, Homo sapiens
  misc_RNA (1)...(19): siRNA sense strand
ggacucaagaagaccaaaa

SEQ ID NO: 2602470 - RNA, 19 nt, Homo sapiens
  misc_RNA (1)...(19): siRNA sense strand
guaucuaccucaaaggcua

SEQ ID NO: 2602471 - RNA, 19 nt, Homo sapiens
  misc_RNA (1)...(19): siRNA sense strand
ugauagacugcuuuagaaa

SEQ ID NO: 2602472 - RNA, 19 nt, Homo sapiens
  misc_RNA (1)...(19): siRNA sense strand
cgucaagauccguuugcaa

SEQ ID NO: 2602473 - RNA, 19 nt, Homo sapiens
  misc_RNA (1)...(19): siRNA sense strand
uuagaaagauacugcguga

SEQ ID NO: 2602474 - RNA, 19 nt, Homo sapiens
  misc_RNA (1)...(19): siRNA sense strand
uggcaaaggagaaguaacu

SEQ ID NO: 2602475 - RNA, 19 nt, Homo sapiens
  misc_RNA (1)...(19): siRNA sense strand
uuaagaaagugcuacgcua

SEQ ID NO: 2602476 - RNA, 19 nt, Homo sapiens
  misc_RNA (1)...(19): siRNA sense strand
ggaaagauguugaagugac

SEQ ID NO: 2602477 - RNA, 19 nt, Homo sapiens
  misc_RNA (1)...(19): siRNA sense strand
gcgugaagaaggaccaaaa

SEQ ID NO: 2602478 - RNA, 19 nt, Homo sapiens
  misc_RNA (1)...(19): siRNA sense strand
augcagaaccaacgaucaa

SEQ ID NO: 2602479 - RNA, 19 nt, Homo sapiens
  misc_RNA (1)...(19): siRNA sense strand
gcacaaagaugguucgguc

SEQ ID NO: 2602480 - RNA, 19 nt, Homo sapiens
  misc_RNA (1)...(19): siRNA sense strand
ggcuauugguggaggccca

SEQ ID NO: 2602481 - RNA, 19 nt, Homo sapiens
  misc_RNA (1)...(19): siRNA sense strand
gaguaaaacccaugggauc

SEQ ID NO: 2602482 - RNA, 19 nt, Homo sapiens
  misc_RNA (1)...(19): siRNA sense strand
caaagcuggcaaaggagaa

SEQ ID NO: 2602483 - RNA, 19 nt, Homo sapiens
  misc_RNA (1)...(19): siRNA sense strand
agaaagaucuauagcacuc

SEQ ID NO: 2602484 - RNA, 19 nt, Homo sapiens
  misc_RNA (1)...(19): siRNA sense strand
cagaaauuuggucagguua

SEQ ID NO: 2602485 - RNA, 19 nt, Homo sapiens
  misc_RNA (1)...(19): siRNA sense strand
acgaauugcuacagcgaug

SEQ ID NO: 2602486 - RNA, 19 nt, Homo sapiens
  misc_RNA (1)...(19): siRNA sense strand
uagcagacauugaacggau

SEQ ID NO: 2602487 - RNA, 19 nt, Homo sapiens
  misc_RNA (1)...(19): siRNA sense strand
uggaaauacaacuggagca

SEQ ID NO: 2602488 - RNA, 19 nt, Homo sapiens
  misc_RNA (1)...(19): siRNA sense strand
ggaucagaccaaagaugga

SEQ ID NO: 2602489 - RNA, 19 nt, Homo sapiens
  misc_RNA (1)...(19): siRNA sense strand
gaccaaaagcucuguggaa

SEQ ID NO: 2602490 - RNA, 19 nt, Homo sapiens
  misc_RNA (1)...(19): siRNA sense strand
aagauguugaagugacuaa

SEQ ID NO: 2602491 - RNA, 19 nt, Homo sapiens
  misc_RNA (1)...(19): siRNA sense strand
ggucccacuugcagcagaa

SEQ ID NO: 2602492 - RNA, 19 nt, Homo sapiens
  misc_RNA (1)...(19): siRNA sense strand
ccaagguggcuuuaaccaa

SEQ ID NO: 2602493 - RNA, 19 nt, Homo sapiens
  misc_RNA (1)...(19): siRNA sense strand
gcggagugauagacugcuu

SEQ ID NO: 2602494 - RNA, 19 nt, Homo sapiens
  misc_RNA (1)...(19): siRNA sense strand
gggagaacucauguauaaa

SEQ ID NO: 2602495 - RNA, 19 nt, Homo sapiens
  misc_RNA (1)...(19): siRNA sense strand
ggcagaaggccucagguga

SEQ ID NO: 2602496 - RNA, 19 nt, Homo sapiens
  misc_RNA (1)...(19): siRNA sense strand
cuacauugauuuuggagga

SEQ ID NO: 2602497 - RNA, 19 nt, Homo sapiens
  misc_RNA (1)...(19): siRNA sense strand
ccaggaaagauguugaagu

SEQ ID NO: 2602498 - RNA, 19 nt, Homo sapiens
  misc_RNA (1)...(19): siRNA sense strand
cauugauuuuggaggagua

SEQ ID NO: 2602499 - RNA, 19 nt, Homo sapiens
  misc_RNA (1)...(19): siRNA sense strand
uugcagggauugaaaacaa

SEQ ID NO: 2602500 - RNA, 19 nt, Homo sapiens
  misc_RNA (1)...(19): siRNA sense strand
cucaaaggcuauuggugga

SEQ ID NO: 2602501 - RNA, 19 nt, Homo sapiens
  misc_RNA (1)...(19): siRNA sense strand
cauaaaacuuacagugaac

SEQ ID NO: 2602502 - RNA, 19 nt, Homo sapiens
  misc_RNA (1)...(19): siRNA sense strand
aaugaagaugggcagguua

SEQ ID NO: 2602503 - RNA, 19 nt, Homo sapiens
  misc_RNA (1)...(19): siRNA sense strand
gcuuuaaccaagagagcag

SEQ ID NO: 2602504 - RNA, 19 nt, Homo sapiens
  misc_RNA (1)...(19): siRNA sense strand
caaaggagcaagaaagcca

SEQ ID NO: 2602505 - RNA, 19 nt, Homo sapiens
  misc_RNA (1)...(19): siRNA sense strand
gcaagaaagccaagagacg

SEQ ID NO: 2602506 - RNA, 19 nt, Homo sapiens
  misc_RNA (1)...(19): siRNA sense strand
ugcuggaaagugagacaaa

SEQ ID NO: 2602507 - RNA, 19 nt, Homo sapiens
  misc_RNA (1)...(19): siRNA sense strand
gugagacaaaggagcaaga

SEQ ID NO: 2602508 - RNA, 19 nt, Homo sapiens
  misc_RNA (1)...(19): siRNA sense strand
aagagacgggagagucaaa

SEQ ID NO: 2602509 - RNA, 19 nt, Homo sapiens
  misc_RNA (1)...(19): siRNA sense strand
ggauaagguuacacgggua

SEQ ID NO: 2602510 - RNA, 19 nt, Homo sapiens
  misc_RNA (1)...(19): siRNA sense strand
caaucuggaaagagagaaa

SEQ ID NO: 2602511 - RNA, 19 nt, Homo sapiens
  misc_RNA (1)...(19): siRNA sense strand
cagcaaaggaaguggucau

SEQ ID NO: 2602512 - RNA, 19 nt, Homo sapiens
  misc_RNA (1)...(19): siRNA sense strand
ugaagaagacauugagaga

SEQ ID NO: 2602513 - RNA, 19 nt, Homo sapiens
  misc_RNA (1)...(19): siRNA sense strand
gagaacaguaacaagaaua

SEQ ID NO: 2602514 - RNA, 19 nt, Homo sapiens
  misc_RNA (1)...(19): siRNA sense strand
ugaagaggaaggagagauu

SEQ ID NO: 2602515 - RNA, 19 nt, Homo sapiens
  misc_RNA (1)...(19): siRNA sense strand
caggaguuguugagagaga

SEQ ID NO: 2602516 - RNA, 19 nt, Homo sapiens
  misc_RNA (1)...(19): siRNA sense strand
acaaaguauaacaggcaaa

SEQ ID NO: 2602517 - RNA, 19 nt, Homo sapiens
  misc_RNA (1)...(19): siRNA sense strand
gagaagacucagaagguga

SEQ ID NO: 2602518 - RNA, 19 nt, Homo sapiens
  misc_RNA (1)...(19): siRNA sense strand
ggaucagauauuagaagua

SEQ ID NO: 2602519 - RNA, 19 nt, Homo sapiens
  misc_RNA (1)...(19): siRNA sense strand
ccugaagagauuugaagaa

SEQ ID NO: 2602520 - RNA, 19 nt, Homo sapiens
  misc_RNA (1)...(19): siRNA sense strand
cugaagaggaugaagauca

SEQ ID NO: 2602521 - RNA, 19 nt, Homo sapiens
  misc_RNA (1)...(19): siRNA sense strand
gcagcaggccugugaacaa

SEQ ID NO: 2602522 - RNA, 19 nt, Homo sapiens
  misc_RNA (1)...(19): siRNA sense strand
gaacaaagguggaugacug

SEQ ID NO: 2602523 - RNA, 19 nt, Homo sapiens
  misc_RNA (1)...(19): siRNA sense strand
gccgaaagcaguagccuaa

SEQ ID NO: 2602524 - RNA, 19 nt, Homo sapiens
  misc_RNA (1)...(19): siRNA sense strand
ugacagcauaguaggauua

SEQ ID NO: 2602525 - RNA, 19 nt, Homo sapiens
  misc_RNA (1)...(19): siRNA sense strand
acagaguucuccaaggaaa

SEQ ID NO: 2602526 - RNA, 19 nt, Homo sapiens
  misc_RNA (1)...(19): siRNA sense strand
gcacaaaguauaacaggca

SEQ ID NO: 2602527 - RNA, 19 nt, Homo sapiens
  misc_RNA (1)...(19): siRNA sense strand
ccgaagacgacgacgauga

SEQ ID NO: 2602528 - RNA, 19 nt, Homo sapiens
  misc_RNA (1)...(19): siRNA sense strand
ugucaaaagcuauggaaau

SEQ ID NO: 2602529 - RNA, 19 nt, Homo sapiens
  misc_RNA (1)...(19): siRNA sense strand
acaacugaguggaagguau

SEQ ID NO: 2602530 - RNA, 19 nt, Homo sapiens
  misc_RNA (1)...(19): siRNA sense strand
ggaaacaaaccuagggaug

SEQ ID NO: 2602531 - RNA, 19 nt, Homo sapiens
  misc_RNA (1)...(19): siRNA sense strand
cugaguggguugccagaaa

SEQ ID NO: 2602532 - RNA, 19 nt, Homo sapiens
  misc_RNA (1)...(19): siRNA sense strand
gguuacacggguaguauua

SEQ ID NO: 2602533 - RNA, 19 nt, Homo sapiens
  misc_RNA (1)...(19): siRNA sense strand
gcgaacgaccugggagaaa

SEQ ID NO: 2602534 - RNA, 19 nt, Homo sapiens
  misc_RNA (1)...(19): siRNA sense strand
cggaagaaagugcccguaa

SEQ ID NO: 2602535 - RNA, 19 nt, Homo sapiens
  misc_RNA (1)...(19): siRNA sense strand
gggaguaaucaaacaaaga

SEQ ID NO: 2602536 - RNA, 19 nt, Homo sapiens
  misc_RNA (1)...(19): siRNA sense strand
gaaagguggcaguggcaau

SEQ ID NO: 2602537 - RNA, 19 nt, Homo sapiens
  misc_RNA (1)...(19): siRNA sense strand
accuaaggcuguugaauau

SEQ ID NO: 2602538 - RNA, 19 nt, Homo sapiens
  misc_RNA (1)...(19): siRNA sense strand
caagauugucagaagagaa

SEQ ID NO: 2602539 - RNA, 19 nt, Homo sapiens
  misc_RNA (1)...(19): siRNA sense strand
aagauugucagaagagaaa

SEQ ID NO: 2602540 - RNA, 19 nt, Homo sapiens
  misc_RNA (1)...(19): siRNA sense strand
ugucagaagagaaaagaaa

SEQ ID NO: 2602541 - RNA, 19 nt, Homo sapiens
  misc_RNA (1)...(19): siRNA sense strand
agaugaugacauugaacaa

SEQ ID NO: 2602542 - RNA, 19 nt, Homo sapiens
  misc_RNA (1)...(19): siRNA sense strand
cuaccauggacaaagaaua

SEQ ID NO: 2602543 - RNA, 19 nt, Homo sapiens
  misc_RNA (1)...(19): siRNA sense strand
aguaaggacacuacagcaa

SEQ ID NO: 2602544 - RNA, 19 nt, Homo sapiens
  misc_RNA (1)...(19): siRNA sense strand
ggaggaugaagaugaacaa

SEQ ID NO: 2602545 - RNA, 19 nt, Homo sapiens
  misc_RNA (1)...(19): siRNA sense strand
ugaaaggagugaugagaac

SEQ ID NO: 2602546 - RNA, 19 nt, Homo sapiens
  misc_RNA (1)...(19): siRNA sense strand
gagagauuguuauggugaa

SEQ ID NO: 2602547 - RNA, 19 nt, Homo sapiens
  misc_RNA (1)...(19): siRNA sense strand
gcuacaucaugaucaguaa

SEQ ID NO: 2602548 - RNA, 19 nt, Homo sapiens
  misc_RNA (1)...(19): siRNA sense strand
ccgaggaggaugaagauga

SEQ ID NO: 2602549 - RNA, 19 nt, Homo sapiens
  misc_RNA (1)...(19): siRNA sense strand
cagcaagauuacugccgua

SEQ ID NO: 2602550 - RNA, 19 nt, Homo sapiens
  misc_RNA (1)...(19): siRNA sense strand
gagcagggacauugugaga

SEQ ID NO: 2602551 - RNA, 19 nt, Homo sapiens
  misc_RNA (1)...(19): siRNA sense strand
uagagagagccuugaacaa

SEQ ID NO: 2602552 - RNA, 19 nt, Homo sapiens
  misc_RNA (1)...(19): siRNA sense strand
cgacgaugaagaagacauu

SEQ ID NO: 2602553 - RNA, 19 nt, Homo sapiens
  misc_RNA (1)...(19): siRNA sense strand
aagcagaaauacugugcau

SEQ ID NO: 2602554 - RNA, 19 nt, Homo sapiens
  misc_RNA (1)...(19): siRNA sense strand
caaccaacacauugccuaa

SEQ ID NO: 2602555 - RNA, 19 nt, Homo sapiens
  misc_RNA (1)...(19): siRNA sense strand
ggacacuacagcaaaggaa

SEQ ID NO: 2602556 - RNA, 19 nt, Homo sapiens
  misc_RNA (1)...(19): siRNA sense strand
ccaccgaggaggaugaaga

SEQ ID NO: 2602557 - RNA, 19 nt, Homo sapiens
  misc_RNA (1)...(19): siRNA sense strand
ggguaguacaaaugcaaca

SEQ ID NO: 2602558 - RNA, 19 nt, Homo sapiens
  misc_RNA (1)...(19): siRNA sense strand
ggaagugagaacaguaaca

SEQ ID NO: 2602559 - RNA, 19 nt, Homo sapiens
  misc_RNA (1)...(19): siRNA sense strand
ggaaggaacaagcugaaaa

SEQ ID NO: 2602560 - RNA, 19 nt, Homo sapiens
  misc_RNA (1)...(19): siRNA sense strand
cagcugaagaggaugaaga

SEQ ID NO: 2602561 - RNA, 19 nt, Homo sapiens
  misc_RNA (1)...(19): siRNA sense strand
cggaagaagaaauggcgga

SEQ ID NO: 2602562 - RNA, 19 nt, Homo sapiens
  misc_RNA (1)...(19): siRNA sense strand
agauggaaaagcagaaaua

SEQ ID NO: 2602563 - RNA, 19 nt, Homo sapiens
  misc_RNA (1)...(19): siRNA sense strand
ugaucgaacuggaacaaga

SEQ ID NO: 2602564 - RNA, 19 nt, Homo sapiens
  misc_RNA (1)...(19): siRNA sense strand
caacugaguggaagguauu

SEQ ID NO: 2602565 - RNA, 19 nt, Homo sapiens
  misc_RNA (1)...(19): siRNA sense strand
cagccaggguaguacaaau

SEQ ID NO: 2602566 - RNA, 19 nt, Homo sapiens
  misc_RNA (1)...(19): siRNA sense strand
gggaugggcaggauggaga

SEQ ID NO: 2602567 - RNA, 19 nt, Homo sapiens
  misc_RNA (1)...(19): siRNA sense strand
agacauugagagagcauca

SEQ ID NO: 2602568 - RNA, 19 nt, Homo sapiens
  misc_RNA (1)...(19): siRNA sense strand
gagacugccuagagaagga

SEQ ID NO: 2602569 - RNA, 19 nt, Homo sapiens
  misc_RNA (1)...(19): siRNA sense strand
aagaauacaugaaaggagu

SEQ ID NO: 2602570 - RNA, 19 nt, Homo sapiens
  misc_RNA (1)...(19): siRNA sense strand
agagauuguuauggugaaa

SEQ ID NO: 2602571 - RNA, 19 nt, Homo sapiens
  misc_RNA (1)...(19): siRNA sense strand
caacauggaaacagaaacu

SEQ ID NO: 2602572 - RNA, 19 nt, Homo sapiens
  misc_RNA (1)...(19): siRNA sense strand
aagcuaaggaugauugcaa

SEQ ID NO: 2602573 - RNA, 19 nt, Homo sapiens
  misc_RNA (1)...(19): siRNA sense strand
ugaagaaggaaguuuggaa

SEQ ID NO: 2602574 - RNA, 19 nt, Homo sapiens
  misc_RNA (1)...(19): siRNA sense strand
cuguugaccuauaggacuu

SEQ ID NO: 2602575 - RNA, 19 nt, Homo sapiens
  misc_RNA (1)...(19): siRNA sense strand
aggaaauauaagugagaca

SEQ ID NO: 2602576 - RNA, 19 nt, Homo sapiens
  misc_RNA (1)...(19): siRNA sense strand
agguauaagcucugugaau

SEQ ID NO: 2602577 - RNA, 19 nt, Homo sapiens
  misc_RNA (1)...(19): siRNA sense strand
gggaauauggccauggcaa

SEQ ID NO: 2602578 - RNA, 19 nt, Homo sapiens
  misc_RNA (1)...(19): siRNA sense strand
agaaacaaauggaggagca

SEQ ID NO: 2602579 - RNA, 19 nt, Homo sapiens
  misc_RNA (1)...(19): siRNA sense strand
augaaaagccucaaggaaa

SEQ ID NO: 2602580 - RNA, 19 nt, Homo sapiens
  misc_RNA (1)...(19): siRNA sense strand
cuuucaagaaguaagguaa

SEQ ID NO: 2602581 - RNA, 19 nt, Homo sapiens
  misc_RNA (1)...(19): siRNA sense strand
gcaacuagucucauggaca

SEQ ID NO: 2602582 - RNA, 19 nt, Homo sapiens
  misc_RNA (1)...(19): siRNA sense strand
cauagaaacaaauggagga

SEQ ID NO: 2602583 - RNA, 19 nt, Homo sapiens
  misc_RNA (1)...(19): siRNA sense strand
ccuuuagucaguagaucua

SEQ ID NO: 2602584 - RNA, 19 nt, Homo sapiens
  misc_RNA (1)...(19): siRNA sense strand
ggaauauggccauggcaac

SEQ ID NO: 2602585 - RNA, 19 nt, Homo sapiens
  misc_RNA (1)...(19): siRNA sense strand
guaaaugcaggaaugggua

SEQ ID NO: 2602586 - RNA, 19 nt, Homo sapiens
  misc_RNA (1)...(19): siRNA sense strand
auguucagugggaggauua

SEQ ID NO: 2602587 - RNA, 19 nt, Homo sapiens
  misc_RNA (1)...(19): siRNA sense strand
agaaacagguauaagcucu

SEQ ID NO: 2602588 - RNA, 19 nt, Homo sapiens
  misc_RNA (1)...(19): siRNA sense strand
gguaaaugcaggaaugggu

SEQ ID NO: 2602589 - RNA, 19 nt, Homo sapiens
  misc_RNA (1)...(19): siRNA sense strand
gaauaugaugccagggaaa

SEQ ID NO: 2602590 - RNA, 19 nt, Homo sapiens
  misc_RNA (1)...(19): siRNA sense strand
ccgaacaggugaagcaaaa

SEQ ID NO: 2602591 - RNA, 19 nt, Homo sapiens
  misc_RNA (1)...(19): siRNA sense strand
ggucauuaaaagaggagaa

SEQ ID NO: 2602592 - RNA, 19 nt, Homo sapiens
  misc_RNA (1)...(19): siRNA sense strand
ucgaauggaaggagauauu

SEQ ID NO: 2602593 - RNA, 19 nt, Homo sapiens
  misc_RNA (1)...(19): siRNA sense strand
agauaagaauccuguguca

SEQ ID NO: 2602594 - RNA, 19 nt, Homo sapiens
  misc_RNA (1)...(19): siRNA sense strand
accaagaagaggaggauga

SEQ ID NO: 2602595 - RNA, 19 nt, Homo sapiens
  misc_RNA (1)...(19): siRNA sense strand
gucaaguacaagaggaauu

SEQ ID NO: 2602596 - RNA, 19 nt, Homo sapiens
  misc_RNA (1)...(19): siRNA sense strand
ugauacuacagcugaaaua

SEQ ID NO: 2602597 - RNA, 19 nt, Homo sapiens
  misc_RNA (1)...(19): siRNA sense strand
agauauuggaaaugcagaa

SEQ ID NO: 2602598 - RNA, 19 nt, Homo sapiens
  misc_RNA (1)...(19): siRNA sense strand
ggaguauguauuaguguau

SEQ ID NO: 2602599 - RNA, 19 nt, Homo sapiens
  misc_RNA (1)...(19): siRNA sense strand
cuguacagccauugugaau

SEQ ID NO: 2602600 - RNA, 19 nt, Homo sapiens
  misc_RNA (1)...(19): siRNA sense strand
gguaguuggaagaaacauu

SEQ ID NO: 2602601 - RNA, 19 nt, Homo sapiens
  misc_RNA (1)...(19): siRNA sense strand
augucaaguacaagaggaa

SEQ ID NO: 2602602 - RNA, 19 nt, Homo sapiens
  misc_RNA (1)...(19): siRNA sense strand
ugagaaaccuggugcucca

SEQ ID NO: 2602603 - RNA, 19 nt, Homo sapiens
  misc_RNA (1)...(19): siRNA sense strand
gcucgaauggaaggagaua

SEQ ID NO: 2602604 - RNA, 19 nt, Homo sapiens
  misc_RNA (1)...(19): siRNA sense strand
ccuagagauucauggggaa

SEQ ID NO: 2602605 - RNA, 19 nt, Homo sapiens
  misc_RNA (1)...(19): siRNA sense strand
gggacaauuaucagaggca

SEQ ID NO: 2602606 - RNA, 19 nt, Homo sapiens
  misc_RNA (1)...(19): siRNA sense strand
ggaugaaggcuugggaguu

SEQ ID NO: 2602607 - RNA, 19 nt, Homo sapiens
  misc_RNA (1)...(19): siRNA sense strand
uggaaggagauauugacaa

SEQ ID NO: 2602608 - RNA, 19 nt, Homo sapiens
  misc_RNA (1)...(19): siRNA sense strand
aagcagcaucaaagaaauu

SEQ ID NO: 2602609 - RNA, 19 nt, Homo sapiens
  misc_RNA (1)...(19): siRNA sense strand
aggagauauugacaagcaa

SEQ ID NO: 2602610 - RNA, 19 nt, Homo sapiens
  misc_RNA (1)...(19): siRNA sense strand
cugguuaugucaagcaaga

SEQ ID NO: 2602611 - RNA, 19 nt, Homo sapiens
  misc_RNA (1)...(19): siRNA sense strand
aagaggaggaugaaggcuu

SEQ ID NO: 2602612 - RNA, 19 nt, Homo sapiens
  misc_RNA (1)...(19): siRNA sense strand
ucuaaaagccuuauaccaa

SEQ ID NO: 2602613 - RNA, 19 nt, Homo sapiens
  misc_RNA (1)...(19): siRNA sense strand
cugugaaggaguauguauu

SEQ ID NO: 2602614 - RNA, 19 nt, Homo sapiens
  misc_RNA (1)...(19): siRNA sense strand
acuuaaagggugccgaaca

SEQ ID NO: 2602615 - RNA, 19 nt, Homo sapiens
  misc_RNA (1)...(19): siRNA sense strand
ugauaacuguggucggaca

SEQ ID NO: 2602616 - RNA, 19 nt, Homo sapiens
  misc_RNA (1)...(19): siRNA sense strand
ugaauaugaugccagggaa

SEQ ID NO: 2602617 - RNA, 19 nt, Homo sapiens
  misc_RNA (1)...(19): siRNA sense strand
gugccgaacaggugaagca

SEQ ID NO: 2602618 - RNA, 19 nt, Homo sapiens
  misc_RNA (1)...(19): siRNA sense strand
aggaugaaggcuugggagu

SEQ ID NO: 2602619 - RNA, 19 nt, Homo sapiens
  misc_RNA (1)...(19): siRNA sense strand
gggccuuacuauacaucau

SEQ ID NO: 2602620 - RNA, 19 nt, Homo sapiens
  misc_RNA (1)...(19): siRNA sense strand
ccagaaacuuaaagggugc

SEQ ID NO: 2602621 - RNA, 19 nt, Homo sapiens
  misc_RNA (1)...(19): siRNA sense strand
acacagugggaccuaaaua

SEQ ID NO: 2602622 - RNA, 19 nt, Homo sapiens
  misc_RNA (1)...(19): siRNA sense strand
gggccugauuugaaggaag

SEQ ID NO: 2602623 - RNA, 19 nt, Homo sapiens
  misc_RNA (1)...(19): siRNA sense strand
ucacacagugggaccuaaa

SEQ ID NO: 2602624 - RNA, 19 nt, Homo sapiens
  misc_RNA (1)...(19): siRNA sense strand
cguucaaaggugucaacau

SEQ ID NO: 2602625 - RNA, 19 nt, Homo sapiens
  misc_RNA (1)...(19): siRNA sense strand
aaacuuaaagggugccgaa

SEQ ID NO: 2602626 - RNA, 19 nt, Homo sapiens
  misc_RNA (1)...(19): siRNA sense strand
ugucaucaauucugcaaaa

SEQ ID NO: 2602627 - RNA, 19 nt, Homo sapiens
  misc_RNA (1)...(19): siRNA sense strand
aagaauccugugucagaaa

SEQ ID NO: 2602628 - RNA, 19 nt, Homo sapiens
  misc_RNA (1)...(19): siRNA sense strand
gcaaaagagcagucaaugu

SEQ ID NO: 2602629 - RNA, 19 nt, Homo sapiens
  misc_RNA (1)...(19): siRNA sense strand
uggugguaguuggaagaaa

SEQ ID NO: 2602630 - RNA, 19 nt, Homo sapiens
  misc_RNA (1)...(19): siRNA sense strand
uuacugaacuguacagcca

SEQ ID NO: 2602631 - RNA, 19 nt, Homo sapiens
  misc_RNA (1)...(19): siRNA sense strand
gauggugguaguuggaaga

SEQ ID NO: 2602632 - RNA, 19 nt, Homo sapiens
  misc_RNA (1)...(19): siRNA sense strand
gagcagagauccaggccau

SEQ ID NO: 2602633 - RNA, 19 nt, Homo sapiens
  misc_RNA (1)...(19): siRNA sense strand
ggacaagggugcaggcaac

SEQ ID NO: 2602634 - RNA, 19 nt, Homo sapiens
  misc_RNA (1)...(19): siRNA sense strand
cuuuggagccugugugaaa

SEQ ID NO: 2602635 - RNA, 19 nt, Homo sapiens
  misc_RNA (1)...(19): siRNA sense strand
acucagagaacaagaucua

SEQ ID NO: 2602636 - RNA, 19 nt, Homo sapiens
  misc_RNA (1)...(19): siRNA sense strand
ccguggacucagagaacaa

SEQ ID NO: 2602637 - RNA, 19 nt, Homo sapiens
  misc_RNA (1)...(19): siRNA sense strand
gaguagaggcccugucaau

SEQ ID NO: 2602638 - RNA, 19 nt, Homo sapiens
  misc_RNA (1)...(19): siRNA sense strand
gagaagagacccucaucua

SEQ ID NO: 2602639 - RNA, 19 nt, Homo sapiens
  misc_RNA (1)...(19): siRNA sense strand
cggccugaguguagggagu

SEQ ID NO: 2602640 - RNA, 19 nt, Homo sapiens
  misc_RNA (1)...(19): siRNA sense strand
acuaccacguggaguguua

SEQ ID NO: 2602641 - RNA, 19 nt, Homo sapiens
  misc_RNA (1)...(19): siRNA sense strand
agccggaagcugagaggaa

SEQ ID NO: 2602642 - RNA, 19 nt, Homo sapiens
  misc_RNA (1)...(19): siRNA sense strand
guaaauucaucgaggaccu

SEQ ID NO: 2602643 - RNA, 19 nt, Homo sapiens
  misc_RNA (1)...(19): siRNA sense strand
ccgcaggagcagagaucca

SEQ ID NO: 2602644 - RNA, 19 nt, Homo sapiens
  misc_RNA (1)...(19): siRNA sense strand
gaggaaacucgcagggugu

SEQ ID NO: 2602645 - RNA, 19 nt, Homo sapiens
  misc_RNA (1)...(19): siRNA sense strand
ccggaagcugagaggaaaa

SEQ ID NO: 2602646 - RNA, 19 nt, Homo sapiens
  misc_RNA (1)...(19): siRNA sense strand
gggaaguugugggcagcaa

SEQ ID NO: 2602647 - RNA, 19 nt, Homo sapiens
  misc_RNA (1)...(19): siRNA sense strand
ccucacucauggagacuau

SEQ ID NO: 2602648 - RNA, 19 nt, Homo sapiens
  misc_RNA (1)...(19): siRNA sense strand
gugaagaggcuggagaaga

SEQ ID NO: 2602649 - RNA, 19 nt, Homo sapiens
  misc_RNA (1)...(19): siRNA sense strand
uggucagaauaguggcauu

SEQ ID NO: 2602650 - RNA, 19 nt, Homo sapiens
  misc_RNA (1)...(19): siRNA sense strand
acgugaagaggcuggagaa

SEQ ID NO: 2602651 - RNA, 19 nt, Homo sapiens
  misc_RNA (1)...(19): siRNA sense strand
ugucaacggcaaaguguuu

SEQ ID NO: 2602652 - RNA, 19 nt, Homo sapiens
  misc_RNA (1)...(19): siRNA sense strand
uggacaagggugcaggcaa

SEQ ID NO: 2602653 - RNA, 19 nt, Homo sapiens
  misc_RNA (1)...(19): siRNA sense strand
ccaccaagauggccaaaau

SEQ ID NO: 2602654 - RNA, 19 nt, Homo sapiens
  misc_RNA (1)...(19): siRNA sense strand
gacugugguuccagggaga

SEQ ID NO: 2602655 - RNA, 19 nt, Homo sapiens
  misc_RNA (1)...(19): siRNA sense strand
agaacaagaucuacugugu

SEQ ID NO: 2602656 - RNA, 19 nt, Homo sapiens
  misc_RNA (1)...(19): siRNA sense strand
ugaagaggcuggagaagag

SEQ ID NO: 2602657 - RNA, 19 nt, Homo sapiens
  misc_RNA (1)...(19): siRNA sense strand
cgagaagccaacaggccuu

SEQ ID NO: 2602658 - RNA, 19 nt, Homo sapiens
  misc_RNA (1)...(19): siRNA sense strand
ggacaucugaucauggaca

SEQ ID NO: 2602659 - RNA, 19 nt, Homo sapiens
  misc_RNA (1)...(19): siRNA sense strand
gcaacaaccccgaguuuga

SEQ ID NO: 2602660 - RNA, 19 nt, Homo sapiens
  misc_RNA (1)...(19): siRNA sense strand
ccaguaaauucaucgagga

SEQ ID NO: 2602661 - RNA, 19 nt, Homo sapiens
  misc_RNA (1)...(19): siRNA sense strand
gccggaagcugagaggaaa

SEQ ID NO: 2602662 - RNA, 19 nt, Homo sapiens
  misc_RNA (1)...(19): siRNA sense strand
cggaguugucagagaggau

SEQ ID NO: 2602663 - RNA, 19 nt, Homo sapiens
  misc_RNA (1)...(19): siRNA sense strand
gaggaaauggcucgggaga

SEQ ID NO: 2602664 - RNA, 19 nt, Homo sapiens
  misc_RNA (1)...(19): siRNA sense strand
agauuauccgggaggagua

SEQ ID NO: 2602665 - RNA, 19 nt, Homo sapiens
  misc_RNA (1)...(19): siRNA sense strand
ggagaaggucagcgugcau

SEQ ID NO: 2602666 - RNA, 19 nt, Homo sapiens
  misc_RNA (1)...(19): siRNA sense strand
ccaacaucauugaggcgau

SEQ ID NO: 2602667 - RNA, 19 nt, Homo sapiens
  misc_RNA (1)...(19): siRNA sense strand
cgaagaccauccuggccaa

SEQ ID NO: 2602668 - RNA, 19 nt, Homo sapiens
  misc_RNA (1)...(19): siRNA sense strand
guugacauccggaggccua

SEQ ID NO: 2602669 - RNA, 19 nt, Homo sapiens
  misc_RNA (1)...(19): siRNA sense strand
gagucaacaaggugaucau

SEQ ID NO: 2602670 - RNA, 19 nt, Homo sapiens
  misc_RNA (1)...(19): siRNA sense strand
cuggaagggacaauggaga

SEQ ID NO: 2602671 - RNA, 19 nt, Homo sapiens
  misc_RNA (1)...(19): siRNA sense strand
ucaugaaauggcugugaau

SEQ ID NO: 2602672 - RNA, 19 nt, Homo sapiens
  misc_RNA (1)...(19): siRNA sense strand
ggaaauggcucgggagacc

SEQ ID NO: 2602673 - RNA, 19 nt, Homo sapiens
  misc_RNA (1)...(19): siRNA sense strand
acaucauugaggcgauuaa

SEQ ID NO: 2602674 - RNA, 19 nt, Homo sapiens
  misc_RNA (1)...(19): siRNA sense strand
gguagaggggagagguaga

SEQ ID NO: 2602675 - RNA, 19 nt, Homo sapiens
  misc_RNA (1)...(19): siRNA sense strand
ccgaagaagcagagggcau

SEQ ID NO: 2602676 - RNA, 19 nt, Homo sapiens
  misc_RNA (1)...(19): siRNA sense strand
ccgcaaggguucuggcagu

SEQ ID NO: 2602677 - RNA, 19 nt, Homo sapiens
  misc_RNA (1)...(19): siRNA sense strand
ccagaacaguugugccuau

SEQ ID NO: 2602678 - RNA, 19 nt, Homo sapiens
  misc_RNA (1)...(19): siRNA sense strand
gcacagaggacauacggau

SEQ ID NO: 2602679 - RNA, 19 nt, Homo sapiens
  misc_RNA (1)...(19): siRNA sense strand
gugaggagucuuugcgaga

SEQ ID NO: 2602680 - RNA, 19 nt, Homo sapiens
  misc_RNA (1)...(19): siRNA sense strand
ggaacaggugcauggcgaa

SEQ ID NO: 2602681 - RNA, 19 nt, Homo sapiens
  misc_RNA (1)...(19): siRNA sense strand
cagcgagggaacugguuau

SEQ ID NO: 2602682 - RNA, 19 nt, Homo sapiens
  misc_RNA (1)...(19): siRNA sense strand
uggaacaggugcauggcga

SEQ ID NO: 2602683 - RNA, 19 nt, Homo sapiens
  misc_RNA (1)...(19): siRNA sense strand
ucucaggcacagaggacau

SEQ ID NO: 2602684 - RNA, 19 nt, Homo sapiens
  misc_RNA (1)...(19): siRNA sense strand
auucagaaggagcaagaga

SEQ ID NO: 2602685 - RNA, 19 nt, Homo sapiens
  misc_RNA (1)...(19): siRNA sense strand
guggagaagaagaagauaa

SEQ ID NO: 2602686 - RNA, 19 nt, Homo sapiens
  misc_RNA (1)...(19): siRNA sense strand
guguaaaugaagaagguau

SEQ ID NO: 2602687 - RNA, 19 nt, Homo sapiens
  misc_RNA (1)...(19): siRNA sense strand
gaguaguggagaagaagaa

SEQ ID NO: 2602688 - RNA, 19 nt, Homo sapiens
  misc_RNA (1)...(19): siRNA sense strand
ucggaguaguggagaagaa

SEQ ID NO: 2602689 - RNA, 19 nt, Homo sapiens
  misc_RNA (1)...(19): siRNA sense strand
agaaacagucugaggacau

SEQ ID NO: 2602690 - RNA, 19 nt, Homo sapiens
  misc_RNA (1)...(19): siRNA sense strand
uuguaaaagugaagccaua

SEQ ID NO: 2602691 - RNA, 19 nt, Homo sapiens
  misc_RNA (1)...(19): siRNA sense strand
agaugaaaugagucacaaa

SEQ ID NO: 2602692 - RNA, 19 nt, Homo sapiens
  misc_RNA (1)...(19): siRNA sense strand
ggaaguggucgaugggcuu

SEQ ID NO: 2602693 - RNA, 19 nt, Homo sapiens
  misc_RNA (1)...(19): siRNA sense strand
gugaagaagaggaccacuu

SEQ ID NO: 2602694 - RNA, 19 nt, Homo sapiens
  misc_RNA (1)...(19): siRNA sense strand
cgagaggaagugagugaga

SEQ ID NO: 2602695 - RNA, 19 nt, Homo sapiens
  misc_RNA (1)...(19): siRNA sense strand
gaaugaaaaugguugguga

SEQ ID NO: 2602696 - RNA, 19 nt, Homo sapiens
  misc_RNA (1)...(19): siRNA sense strand
cauacaagugacuacgaaa

SEQ ID NO: 2602697 - RNA, 19 nt, Homo sapiens
  misc_RNA (1)...(19): siRNA sense strand
ccucuugucuauaagggaa

SEQ ID NO: 2602698 - RNA, 19 nt, Homo sapiens
  misc_RNA (1)...(19): siRNA sense strand
aguuacagagaaaggaaau

SEQ ID NO: 2602699 - RNA, 19 nt, Homo sapiens
  misc_RNA (1)...(19): siRNA sense strand
ggcucggaguaguggagaa

SEQ ID NO: 2602700 - RNA, 19 nt, Homo sapiens
  misc_RNA (1)...(19): siRNA sense strand
aguuauagcagcaggaaug

SEQ ID NO: 2602701 - RNA, 19 nt, Homo sapiens
  misc_RNA (1)...(19): siRNA sense strand
gauacauuccucagaaaca

SEQ ID NO: 2602702 - RNA, 19 nt, Homo sapiens
  misc_RNA (1)...(19): siRNA sense strand
cggaaguggucgaugggcu

SEQ ID NO: 2602703 - RNA, 19 nt, Homo sapiens
  misc_RNA (1)...(19): siRNA sense strand
aggaagugagugagaucuu

SEQ ID NO: 2602704 - RNA, 19 nt, Homo sapiens
  misc_RNA (1)...(19): siRNA sense strand
ucuuagaugaaaugaguca

SEQ ID NO: 2602705 - RNA, 19 nt, Homo sapiens
  misc_RNA (1)...(19): siRNA sense strand
gcagaugacaccaggguuc

SEQ ID NO: 2602706 - RNA, 19 nt, Homo sapiens
  misc_RNA (1)...(19): siRNA sense strand
ugauaauaaaccugcugaa

SEQ ID NO: 2602707 - RNA, 19 nt, Homo sapiens
  misc_RNA (1)...(19): siRNA sense strand
caguuauagcagcaggaau

SEQ ID NO: 2602708 - RNA, 19 nt, Homo sapiens
  misc_RNA (1)...(19): siRNA sense strand
gguucaggaaagaggaugu

SEQ ID NO: 2602709 - RNA, 19 nt, Homo sapiens
  misc_RNA (1)...(19): siRNA sense strand
ggaaacacacuaaaggacu

SEQ ID NO: 2602710 - RNA, 19 nt, Homo sapiens
  misc_RNA (1)...(19): siRNA sense strand
guuacagagaaaggaaaua

SEQ ID NO: 2602711 - RNA, 19 nt, Homo sapiens
  misc_RNA (1)...(19): siRNA sense strand
ugucaaagaccaggugauu

SEQ ID NO: 2602712 - RNA, 19 nt, Homo sapiens
  misc_RNA (1)...(19): siRNA sense strand
ccucaugugcucagcuuau

SEQ ID NO: 2602713 - RNA, 19 nt, Homo sapiens
  misc_RNA (1)...(19): siRNA sense strand
ucaggaaagaggaugucua

SEQ ID NO: 2602714 - RNA, 19 nt, Homo sapiens
  misc_RNA (1)...(19): siRNA sense strand
ugagugaagaagaggacca

SEQ ID NO: 2602715 - RNA, 19 nt, Homo sapiens
  misc_RNA (1)...(19): siRNA sense strand
cgaucaagguaccucucaa

SEQ ID NO: 2602716 - RNA, 19 nt, Homo sapiens
  misc_RNA (1)...(19): siRNA sense strand
guguguaaaugaagaaggu

SEQ ID NO: 2602717 - RNA, 19 nt, Homo sapiens
  misc_RNA (1)...(19): siRNA sense strand
aagaagguauucagaaacu

SEQ ID NO: 2602718 - RNA, 19 nt, Homo sapiens
  misc_RNA (1)...(19): siRNA sense strand
cuauguuacggaaugguua

SEQ ID NO: 2602719 - RNA, 19 nt, Homo sapiens
  misc_RNA (1)...(19): siRNA sense strand
gguguguguaaaugaagaa

SEQ ID NO: 2602720 - RNA, 19 nt, Homo sapiens
  misc_RNA (1)...(19): siRNA sense strand
acaccaggguucaggaaag

SEQ ID NO: 2602721 - RNA, 19 nt, Homo sapiens
  misc_RNA (1)...(19): siRNA sense strand
aaggaaauacuguguuaga

SEQ ID NO: 2602722 - RNA, 19 nt, Homo sapiens
  misc_RNA (1)...(19): siRNA sense strand
uccgagaggaagugaguga

SEQ ID NO: 2602723 - RNA, 19 nt, Homo sapiens
  misc_RNA (1)...(19): siRNA sense strand
cuuuggagauccuguguca

SEQ ID NO: 2602724 - RNA, 19 nt, Homo sapiens
  misc_RNA (1)...(19): siRNA sense strand
caagugacuacgaaagaca

SEQ ID NO: 2602725 - RNA, 19 nt, Homo sapiens
  misc_RNA (1)...(19): siRNA sense strand
uaagacaccaauaggaaaa

SEQ ID NO: 2602726 - RNA, 19 nt, Homo sapiens
  misc_RNA (1)...(19): siRNA sense strand
ugguuaugcuccuguugaa

SEQ ID NO: 2602727 - RNA, 19 nt, Homo sapiens
  misc_RNA (1)...(19): siRNA sense strand
ggaguaguggagaagaaga

SEQ ID NO: 2602728 - RNA, 19 nt, Homo sapiens
  misc_RNA (1)...(19): siRNA sense strand
gaaaaugguuggugagcug

SEQ ID NO: 2602729 - RNA, 19 nt, Homo sapiens
  misc_RNA (1)...(19): siRNA sense strand
ugaaaguggacuccggaga

SEQ ID NO: 2602730 - RNA, 19 nt, Homo sapiens
  misc_RNA (1)...(19): siRNA sense strand
uaguuacagagaaaggaaa

SEQ ID NO: 2602731 - RNA, 19 nt, Homo sapiens
  misc_RNA (1)...(19): siRNA sense strand
ccacaaccaaauuagaaga

SEQ ID NO: 2602732 - RNA, 19 nt, Homo sapiens
  misc_RNA (1)...(19): siRNA sense strand
cgaagguguguguaaauga

SEQ ID NO: 2602733 - RNA, 19 nt, Homo sapiens
  misc_RNA (1)...(19): siRNA sense strand
agacaauggagaagggcuu

SEQ ID NO: 2602734 - RNA, 19 nt, Homo sapiens
  misc_RNA (1)...(19): siRNA sense strand
cugaagugacugagacaau

SEQ ID NO: 2602735 - RNA, 19 nt, Homo sapiens
  misc_RNA (1)...(19): siRNA sense strand
uggaacagcuacagaggga

SEQ ID NO: 2602736 - RNA, 19 nt, Homo sapiens
  misc_RNA (1)...(19): siRNA sense strand
ggcccuggcagaugggaaa

SEQ ID NO: 2602737 - RNA, 19 nt, Homo sapiens
  misc_RNA (1)...(19): siRNA sense strand
cuacagagggauuacgaga

SEQ ID NO: 2602738 - RNA, 19 nt, Homo sapiens
  misc_RNA (1)...(19): siRNA sense strand
agcucaaccuaguggucaa

SEQ ID NO: 2602739 - RNA, 19 nt, Homo sapiens
  misc_RNA (1)...(19): siRNA sense strand
uagaagaaggcgaggccca

SEQ ID NO: 2602740 - RNA, 19 nt, Homo sapiens
  misc_RNA (1)...(19): siRNA sense strand
gcggagugucagaggacua

SEQ ID NO: 2602741 - RNA, 19 nt, Homo sapiens
  misc_RNA (1)...(19): siRNA sense strand
cagaagaggaagaggccuu

SEQ ID NO: 2602742 - RNA, 19 nt, Homo sapiens
  misc_RNA (1)...(19): siRNA sense strand
uggauaagauuguggacca

SEQ ID NO: 2602743 - RNA, 19 nt, Homo sapiens
  misc_RNA (1)...(19): siRNA sense strand
ggucagggcaccaagggaa

SEQ ID NO: 2602744 - RNA, 19 nt, Homo sapiens
  misc_RNA (1)...(19): siRNA sense strand
aggaagaggccuuggucca

SEQ ID NO: 2602745 - RNA, 19 nt, Homo sapiens
  misc_RNA (1)...(19): siRNA sense strand
aguuaaugcagguguauga

SEQ ID NO: 2602746 - RNA, 19 nt, Homo sapiens
  misc_RNA (1)...(19): siRNA sense strand
agaaccaggcugaguggaa

SEQ ID NO: 2602747 - RNA, 19 nt, Homo sapiens
  misc_RNA (1)...(19): siRNA sense strand
ggauauauacagacccaca

SEQ ID NO: 2602748 - RNA, 19 nt, Homo sapiens
  misc_RNA (1)...(19): siRNA sense strand
ccuuuauugugcugggaca

SEQ ID NO: 2602749 - RNA, 19 nt, Homo sapiens
  misc_RNA (1)...(19): siRNA sense strand
gaggauauauacagaccca

SEQ ID NO: 2602750 - RNA, 19 nt, Homo sapiens
  misc_RNA (1)...(19): siRNA sense strand
acagaaaugacaaggcuca

SEQ ID NO: 2602751 - RNA, 19 nt, Homo sapiens
  misc_RNA (1)...(19): siRNA sense strand
cuuuugacucggagggaaa

SEQ ID NO: 2602752 - RNA, 19 nt, Homo sapiens
  misc_RNA (1)...(19): siRNA sense strand
cgggauuauuggagcuacu

SEQ ID NO: 2602753 - RNA, 19 nt, Homo sapiens
  misc_RNA (1)...(19): siRNA sense strand
augacaaggcucaggaguu

SEQ ID NO: 2602754 - RNA, 19 nt, Homo sapiens
  misc_RNA (1)...(19): siRNA sense strand
ccgagaucaaggcggacaa

SEQ ID NO: 2602755 - RNA, 19 nt, Homo sapiens
  misc_RNA (1)...(19): siRNA sense strand
ccaccaaacgggacagacu

SEQ ID NO: 2602756 - RNA, 19 nt, Homo sapiens
  misc_RNA (1)...(19): siRNA sense strand
cggccaagaaagaguccuu

SEQ ID NO: 2602757 - RNA, 19 nt, Homo sapiens
  misc_RNA (1)...(19): siRNA sense strand
gaagaaaccagaagccagu

SEQ ID NO: 2602758 - RNA, 19 nt, Homo sapiens
  misc_RNA (1)...(19): siRNA sense strand
agaucaaggcggacaagga

SEQ ID NO: 2602759 - RNA, 19 nt, Homo sapiens
  misc_RNA (1)...(19): siRNA sense strand
cggacaaggagaagggguu

SEQ ID NO: 2602760 - RNA, 19 nt, Homo sapiens
  misc_RNA (1)...(19): siRNA sense strand
ccuucaaucacaacgggaa

SEQ ID NO: 2602761 - RNA, 19 nt, Homo sapiens
  misc_RNA (1)...(19): siRNA sense strand
gugcagagaagaaaccaga

SEQ ID NO: 2602762 - RNA, 19 nt, Homo sapiens
  misc_RNA (1)...(19): siRNA sense strand
gagggaaauuacaugcuga

SEQ ID NO: 2602763 - RNA, 19 nt, Homo sapiens
  misc_RNA (1)...(19): siRNA sense strand
cccagugugcagagaagaa

SEQ ID NO: 2602764 - RNA, 19 nt, Homo sapiens
  misc_RNA (1)...(19): siRNA sense strand
ccaugaagcagcagcucca

SEQ ID NO: 2602765 - RNA, 19 nt, Homo sapiens
  misc_RNA (1)...(19): siRNA sense strand
gacugaagaaagaggagca

SEQ ID NO: 2602766 - RNA, 19 nt, Homo sapiens
  misc_RNA (1)...(19): siRNA sense strand
augaaaagcuagaggaaau

SEQ ID NO: 2602767 - RNA, 19 nt, Homo sapiens
  misc_RNA (1)...(19): siRNA sense strand
ugaagaaauuagugggcuu

SEQ ID NO: 2602768 - RNA, 19 nt, Homo sapiens
  misc_RNA (1)...(19): siRNA sense strand
gcaaaagacuuguaggaga

SEQ ID NO: 2602769 - RNA, 19 nt, Homo sapiens
  misc_RNA (1)...(19): siRNA sense strand
gaagaaaggcguauggcau

SEQ ID NO: 2602770 - RNA, 19 nt, Homo sapiens
  misc_RNA (1)...(19): siRNA sense strand
cgggaaagucauaaacaau

SEQ ID NO: 2602771 - RNA, 19 nt, Homo sapiens
  misc_RNA (1)...(19): siRNA sense strand
cuagauaugaagagaauca

SEQ ID NO: 2602772 - RNA, 19 nt, Homo sapiens
  misc_RNA (1)...(19): siRNA sense strand
ucgugagagauguggauaa

SEQ ID NO: 2602773 - RNA, 19 nt, Homo sapiens
  misc_RNA (1)...(19): siRNA sense strand
gguugagccuagaaagaca

SEQ ID NO: 2602774 - RNA, 19 nt, Homo sapiens
  misc_RNA (1)...(19): siRNA sense strand
gcaacaacgaguagccaau

SEQ ID NO: 2602775 - RNA, 19 nt, Homo sapiens
  misc_RNA (1)...(19): siRNA sense strand
gugaaggaagccacagaaa

SEQ ID NO: 2602776 - RNA, 19 nt, Homo sapiens
  misc_RNA (1)...(19): siRNA sense strand
agcuagauaugaagagaau

SEQ ID NO: 2602777 - RNA, 19 nt, Homo sapiens
  misc_RNA (1)...(19): siRNA sense strand
cuagaggaaauaaaggaaa

SEQ ID NO: 2602778 - RNA, 19 nt, Homo sapiens
  misc_RNA (1)...(19): siRNA sense strand
agacaaaagcugaccguau

SEQ ID NO: 2602779 - RNA, 19 nt, Homo sapiens
  misc_RNA (1)...(19): siRNA sense strand
gcuagaggaaauaaaggaa

SEQ ID NO: 2602780 - RNA, 19 nt, Homo sapiens
  misc_RNA (1)...(19): siRNA sense strand
uugugugaguugagaguuu

SEQ ID NO: 2602781 - RNA, 19 nt, Homo sapiens
  misc_RNA (1)...(19): siRNA sense strand
gagaagaaaagguuaacaa

SEQ ID NO: 2602782 - RNA, 19 nt, Homo sapiens
  misc_RNA (1)...(19): siRNA sense strand
gcagaaaauaaauggaaca

SEQ ID NO: 2602783 - RNA, 19 nt, Homo sapiens
  misc_RNA (1)...(19): siRNA sense strand
acuagaauccaaaggaaaa

SEQ ID NO: 2602784 - RNA, 19 nt, Homo sapiens
  misc_RNA (1)...(19): siRNA sense strand
cguauugaccaguugacaa

SEQ ID NO: 2602785 - RNA, 19 nt, Homo sapiens
  misc_RNA (1)...(19): siRNA sense strand
acaacaugaccuugaaaga

SEQ ID NO: 2602786 - RNA, 19 nt, Homo sapiens
  misc_RNA (1)...(19): siRNA sense strand
cagcuagauaugaagagaa

SEQ ID NO: 2602787 - RNA, 19 nt, Homo sapiens
  misc_RNA (1)...(19): siRNA sense strand
uacuagaauccaaaggaaa

SEQ ID NO: 2602788 - RNA, 19 nt, Homo sapiens
  misc_RNA (1)...(19): siRNA sense strand
gggaaauaucgcucuguuu

SEQ ID NO: 2602789 - RNA, 19 nt, Homo sapiens
  misc_RNA (1)...(19): siRNA sense strand
uggcaaucccauagcucaa

SEQ ID NO: 2602790 - RNA, 19 nt, Homo sapiens
  misc_RNA (1)...(19): siRNA sense strand
cggaagaagaaaggcguau

SEQ ID NO: 2602791 - RNA, 19 nt, Homo sapiens
  misc_RNA (1)...(19): siRNA sense strand
cagguugagccuagaaaga

SEQ ID NO: 2602792 - RNA, 19 nt, Homo sapiens
  misc_RNA (1)...(19): siRNA sense strand
aggaagagaagaagcggga

SEQ ID NO: 2602793 - RNA, 19 nt, Homo sapiens
  misc_RNA (1)...(19): siRNA sense strand
agucauagaaauucgcaau

SEQ ID NO: 2602794 - RNA, 19 nt, Homo sapiens
  misc_RNA (1)...(19): siRNA sense strand
aaauaaagacacaucguca

SEQ ID NO: 2602795 - RNA, 19 nt, Homo sapiens
  misc_RNA (1)...(19): siRNA sense strand
agagaaucacggaagaaga

SEQ ID NO: 2602796 - RNA, 19 nt, Homo sapiens
  misc_RNA (1)...(19): siRNA sense strand
aaggagaagaaaagguuaa

SEQ ID NO: 2602797 - RNA, 19 nt, Homo sapiens
  misc_RNA (1)...(19): siRNA sense strand
ggaacagaggugacacaga

SEQ ID NO: 2602798 - RNA, 19 nt, Homo sapiens
  misc_RNA (1)...(19): siRNA sense strand
aggaaauccaguugucaau

SEQ ID NO: 2602799 - RNA, 19 nt, Homo sapiens
  misc_RNA (1)...(19): siRNA sense strand
cguccaagugcuuccuaaa

SEQ ID NO: 2602800 - RNA, 19 nt, Homo sapiens
  misc_RNA (1)...(19): siRNA sense strand
aaggaaauccaguugucaa

SEQ ID NO: 2602801 - RNA, 19 nt, Homo sapiens
  misc_RNA (1)...(19): siRNA sense strand
cagaggugacacagaauga

SEQ ID NO: 2602802 - RNA, 19 nt, Homo sapiens
  misc_RNA (1)...(19): siRNA sense strand
ugguauuaucaacgaagaa

SEQ ID NO: 2602803 - RNA, 19 nt, Homo sapiens
  misc_RNA (1)...(19): siRNA sense strand
gauaauggcugaaaggcuc

SEQ ID NO: 2602804 - RNA, 19 nt, Homo sapiens
  misc_RNA (1)...(19): siRNA sense strand
gagucaugguacaaacaca

SEQ ID NO: 2602805 - RNA, 19 nt, Homo sapiens
  misc_RNA (1)...(19): siRNA sense strand
ucauugagcucguuaggga

SEQ ID NO: 2602806 - RNA, 19 nt, Homo sapiens
  misc_RNA (1)...(19): siRNA sense strand
gcguauggcaucuguuuua

SEQ ID NO: 2602807 - RNA, 19 nt, Homo sapiens
  misc_RNA (1)...(19): siRNA sense strand
uaaugaaaagcuagaggaa

SEQ ID NO: 2602808 - RNA, 19 nt, Homo sapiens
  misc_RNA (1)...(19): siRNA sense strand
cgguagacuuuuacaacau

SEQ ID NO: 2602809 - RNA, 19 nt, Homo sapiens
  misc_RNA (1)...(19): siRNA sense strand
cagcaaaagacuuguagga

SEQ ID NO: 2602810 - RNA, 19 nt, Homo sapiens
  misc_RNA (1)...(19): siRNA sense strand
auauagaagaccuugugaa

SEQ ID NO: 2602811 - RNA, 19 nt, Homo sapiens
  misc_RNA (1)...(19): siRNA sense strand
ugauaaccagauugaagaa

SEQ ID NO: 2602812 - RNA, 19 nt, Homo sapiens
  misc_RNA (1)...(19): siRNA sense strand
cuuggaucuucauggaaau

SEQ ID NO: 2602813 - RNA, 19 nt, Homo sapiens
  misc_RNA (1)...(19): siRNA sense strand
caacgugaacugcgggcuu

SEQ ID NO: 2602814 - RNA, 19 nt, Homo sapiens
  misc_RNA (1)...(19): siRNA sense strand
aaaaugaggcuuugcagaa

SEQ ID NO: 2602815 - RNA, 19 nt, Homo sapiens
  misc_RNA (1)...(19): siRNA sense strand
agggaugcagucauagaaa

SEQ ID NO: 2602816 - RNA, 19 nt, Homo sapiens
  misc_RNA (1)...(19): siRNA sense strand
aggcaaggugaucauauua

SEQ ID NO: 2602817 - RNA, 19 nt, Homo sapiens
  misc_RNA (1)...(19): siRNA sense strand
ggaaauaaaggaaaagaag

SEQ ID NO: 2602818 - RNA, 19 nt, Homo sapiens
  misc_RNA (1)...(19): siRNA sense strand
uggauaauggagaaagaaa

SEQ ID NO: 2602819 - RNA, 19 nt, Homo sapiens
  misc_RNA (1)...(19): siRNA sense strand
gggaaagccuucugccgaa

SEQ ID NO: 2602820 - RNA, 19 nt, Homo sapiens
  misc_RNA (1)...(19): siRNA sense strand
cauucacacaggagagaaa

SEQ ID NO: 2602821 - RNA, 19 nt, Homo sapiens
  misc_RNA (1)...(19): siRNA sense strand
cccuauaaaugcagugaau

SEQ ID NO: 2602822 - RNA, 19 nt, Homo sapiens
  misc_RNA (1)...(19): siRNA sense strand
gauucacacgggagagaaa

SEQ ID NO: 2602823 - RNA, 19 nt, Homo sapiens
  misc_RNA (1)...(19): siRNA sense strand
cuauaaaugcagugaaugu

SEQ ID NO: 2602824 - RNA, 19 nt, Homo sapiens
  misc_RNA (1)...(19): siRNA sense strand
guaaaagugaagacaguaa

SEQ ID NO: 2602825 - RNA, 19 nt, Homo sapiens
  misc_RNA (1)...(19): siRNA sense strand
augacaaggcuuaccgaaa

SEQ ID NO: 2602826 - RNA, 19 nt, Homo sapiens
  misc_RNA (1)...(19): siRNA sense strand
gugcuauacaacugggaau

SEQ ID NO: 2602827 - RNA, 19 nt, Homo sapiens
  misc_RNA (1)...(19): siRNA sense strand
auuuagacucaguagguaa

SEQ ID NO: 2602828 - RNA, 19 nt, Homo sapiens
  misc_RNA (1)...(19): siRNA sense strand
cugagcaaguugauggcua

SEQ ID NO: 2602829 - RNA, 19 nt, Homo sapiens
  misc_RNA (1)...(19): siRNA sense strand
aggaaugugaugcuggaaa

SEQ ID NO: 2602830 - RNA, 19 nt, Homo sapiens
  misc_RNA (1)...(19): siRNA sense strand
caguaaaagugaagacagu

SEQ ID NO: 2602831 - RNA, 19 nt, Homo sapiens
  misc_RNA (1)...(19): siRNA sense strand
auguuaucaaugugggaaa

SEQ ID NO: 2602832 - RNA, 19 nt, Homo sapiens
  misc_RNA (1)...(19): siRNA sense strand
augcagugaaugugggaga

SEQ ID NO: 2602833 - RNA, 19 nt, Homo sapiens
  misc_RNA (1)...(19): siRNA sense strand
gauugaaaugcuugaagau

SEQ ID NO: 2602834 - RNA, 19 nt, Homo sapiens
  misc_RNA (1)...(19): siRNA sense strand
caauuuacacugaggagga

SEQ ID NO: 2602835 - RNA, 19 nt, Homo sapiens
  misc_RNA (1)...(19): siRNA sense strand
caaagaugugguuguggaa

SEQ ID NO: 2602836 - RNA, 19 nt, Homo sapiens
  misc_RNA (1)...(19): siRNA sense strand
cacaggaaccagugacauu

SEQ ID NO: 2602837 - RNA, 19 nt, Homo sapiens
  misc_RNA (1)...(19): siRNA sense strand
uggaauucagcaaggaaga

SEQ ID NO: 2602838 - RNA, 19 nt, Homo sapiens
  misc_RNA (1)...(19): siRNA sense strand
gaaagaaauaccaaggaag

SEQ ID NO: 2602839 - RNA, 19 nt, Homo sapiens
  misc_RNA (1)...(19): siRNA sense strand
ugggaauuccuucaagaaa

SEQ ID NO: 2602840 - RNA, 19 nt, Homo sapiens
  misc_RNA (1)...(19): siRNA sense strand
acgugaacaaagagagguu

SEQ ID NO: 2602841 - RNA, 19 nt, Homo sapiens
  misc_RNA (1)...(19): siRNA sense strand
agacucaguagguaagcaa

SEQ ID NO: 2602842 - RNA, 19 nt, Homo sapiens
  misc_RNA (1)...(19): siRNA sense strand
agacaguaauaauccaaca

SEQ ID NO: 2602843 - RNA, 19 nt, Homo sapiens
  misc_RNA (1)...(19): siRNA sense strand
guuauauaggaaccagaaa

SEQ ID NO: 2602844 - RNA, 19 nt, Homo sapiens
  misc_RNA (1)...(19): siRNA sense strand
aagcaauaaauguggaaag

SEQ ID NO: 2602845 - RNA, 19 nt, Homo sapiens
  misc_RNA (1)...(19): siRNA sense strand
ucaaagaugugguugugga

SEQ ID NO: 2602846 - RNA, 19 nt, Homo sapiens
  misc_RNA (1)...(19): siRNA sense strand
ggcugagaccagagauuca

SEQ ID NO: 2602847 - RNA, 19 nt, Homo sapiens
  misc_RNA (1)...(19): siRNA sense strand
cauucaaagaugugguugu

SEQ ID NO: 2602848 - RNA, 19 nt, Homo sapiens
  misc_RNA (1)...(19): siRNA sense strand
caucaaggagaaaaugaaa

SEQ ID NO: 2602849 - RNA, 19 nt, Homo sapiens
  misc_RNA (1)...(19): siRNA sense strand
auaccaaggaagacuauuu

SEQ ID NO: 2602850 - RNA, 19 nt, Homo sapiens
  misc_RNA (1)...(19): siRNA sense strand
gcaucaaggagaaaaugaa

SEQ ID NO: 2602851 - RNA, 19 nt, Homo sapiens
  misc_RNA (1)...(19): siRNA sense strand
acucaguagguaagcaaca

SEQ ID NO: 2602852 - RNA, 19 nt, Homo sapiens
  misc_RNA (1)...(19): siRNA sense strand
gggacauaaauuugccaca

SEQ ID NO: 2602853 - RNA, 19 nt, Homo sapiens
  misc_RNA (1)...(19): siRNA sense strand
aggagcugcugaagggcaa

SEQ ID NO: 2602854 - RNA, 19 nt, Homo sapiens
  misc_RNA (1)...(19): siRNA sense strand
ccaaagaaucgucggguac

SEQ ID NO: 2602855 - RNA, 19 nt, Homo sapiens
  misc_RNA (1)...(19): siRNA sense strand
ccaccaaauugaaagagca

SEQ ID NO: 2602856 - RNA, 19 nt, Homo sapiens
  misc_RNA (1)...(19): siRNA sense strand
accaaagaaucgucgggua

SEQ ID NO: 2602857 - RNA, 19 nt, Homo sapiens
  misc_RNA (1)...(19): siRNA sense strand
ccacaagaggacagcgcca

SEQ ID NO: 2602858 - RNA, 19 nt, Homo sapiens
  misc_RNA (1)...(19): siRNA sense strand
cuguggaguacaaggguga

SEQ ID NO: 2602859 - RNA, 19 nt, Homo sapiens
  misc_RNA (1)...(19): siRNA sense strand
aggagaucgggcagagaau

SEQ ID NO: 2602860 - RNA, 19 nt, Homo sapiens
  misc_RNA (1)...(19): siRNA sense strand
aagagcagcugcacggcua

SEQ ID NO: 2602861 - RNA, 19 nt, Homo sapiens
  misc_RNA (1)...(19): siRNA sense strand
agguggaagaauucaguuu

SEQ ID NO: 2602862 - RNA, 19 nt, Homo sapiens
  misc_RNA (1)...(19): siRNA sense strand
ccaaauugaaagagcagcu

SEQ ID NO: 2602863 - RNA, 19 nt, Homo sapiens
  misc_RNA (1)...(19): siRNA sense strand
gguaagagcuucagccaga

SEQ ID NO: 2602864 - RNA, 19 nt, Homo sapiens
  misc_RNA (1)...(19): siRNA sense strand
aguccaugcaggagagaaa

SEQ ID NO: 2602865 - RNA, 19 nt, Homo sapiens
  misc_RNA (1)...(19): siRNA sense strand
ggaaacuguucaagggaca

SEQ ID NO: 2602866 - RNA, 19 nt, Homo sapiens
  misc_RNA (1)...(19): siRNA sense strand
agugcauacaggagagaaa

SEQ ID NO: 2602867 - RNA, 19 nt, Homo sapiens
  misc_RNA (1)...(19): siRNA sense strand
augugaagacugugguaaa

SEQ ID NO: 2602868 - RNA, 19 nt, Homo sapiens
  misc_RNA (1)...(19): siRNA sense strand
gagaaaucaaccuggagaa

SEQ ID NO: 2602869 - RNA, 19 nt, Homo sapiens
  misc_RNA (1)...(19): siRNA sense strand
gguaagaagcuguacggau

SEQ ID NO: 2602870 - RNA, 19 nt, Homo sapiens
  misc_RNA (1)...(19): siRNA sense strand
caguaagaguucaaagcuu

SEQ ID NO: 2602871 - RNA, 19 nt, Homo sapiens
  misc_RNA (1)...(19): siRNA sense strand
gguaaggguuucagccaga

SEQ ID NO: 2602872 - RNA, 19 nt, Homo sapiens
  misc_RNA (1)...(19): siRNA sense strand
agacuaugguagagaaauc

SEQ ID NO: 2602873 - RNA, 19 nt, Homo sapiens
  misc_RNA (1)...(19): siRNA sense strand
caagacuaugguagagaaa

SEQ ID NO: 2602874 - RNA, 19 nt, Homo sapiens
  misc_RNA (1)...(19): siRNA sense strand
gcuacaaaucccaagaaga

SEQ ID NO: 2602875 - RNA, 19 nt, Homo sapiens
  misc_RNA (1)...(19): siRNA sense strand
uguaugagaaucagaacua

SEQ ID NO: 2602876 - RNA, 19 nt, Homo sapiens
  misc_RNA (1)...(19): siRNA sense strand
uuacaugggaggaguggaa

SEQ ID NO: 2602877 - RNA, 19 nt, Homo sapiens
  misc_RNA (1)...(19): siRNA sense strand
aaucagaacuauggggaaa

SEQ ID NO: 2602878 - RNA, 19 nt, Homo sapiens
  misc_RNA (1)...(19): siRNA sense strand
guacuguggauguaauaaa

SEQ ID NO: 2602879 - RNA, 19 nt, Homo sapiens
  misc_RNA (1)...(19): siRNA sense strand
guaagaagcuguacggaug

SEQ ID NO: 2602880 - RNA, 19 nt, Homo sapiens
  misc_RNA (1)...(19): siRNA sense strand
aguccacacagaagagaaa

SEQ ID NO: 2602881 - RNA, 19 nt, Homo sapiens
  misc_RNA (1)...(19): siRNA sense strand
cgugaauauuauaagggau

SEQ ID NO: 2602882 - RNA, 19 nt, Homo sapiens
  misc_RNA (1)...(19): siRNA sense strand
cauuugaagaugugacuau

SEQ ID NO: 2602883 - RNA, 19 nt, Homo sapiens
  misc_RNA (1)...(19): siRNA sense strand
agaaaucaaccuggagaaa

SEQ ID NO: 2602884 - RNA, 19 nt, Homo sapiens
  misc_RNA (1)...(19): siRNA sense strand
caauaaucauagaagagga

SEQ ID NO: 2602885 - RNA, 19 nt, Homo sapiens
  misc_RNA (1)...(19): siRNA sense strand
aaauguaaucaguguggua

SEQ ID NO: 2602886 - RNA, 19 nt, Homo sapiens
  misc_RNA (1)...(19): siRNA sense strand
gguuaauacucuccacaca

SEQ ID NO: 2602887 - RNA, 19 nt, Homo sapiens
  misc_RNA (1)...(19): siRNA sense strand
ggagaaaaccucugucaau

SEQ ID NO: 2602888 - RNA, 19 nt, Homo sapiens
  misc_RNA (1)...(19): siRNA sense strand
gguuucagccagagcucaa

SEQ ID NO: 2602889 - RNA, 19 nt, Homo sapiens
  misc_RNA (1)...(19): siRNA sense strand
cuacaugagugguucacau

SEQ ID NO: 2602890 - RNA, 19 nt, Homo sapiens
  misc_RNA (1)...(19): siRNA sense strand
ugguaaagguuucagucau

SEQ ID NO: 2602891 - RNA, 19 nt, Homo sapiens
  misc_RNA (1)...(19): siRNA sense strand
ucuucgaauucaucaguua

SEQ ID NO: 2602892 - RNA, 19 nt, Homo sapiens
  misc_RNA (1)...(19): siRNA sense strand
aggucaugugggagaacua

SEQ ID NO: 2602893 - RNA, 19 nt, Homo sapiens
  misc_RNA (1)...(19): siRNA sense strand
ugauaaagaccucaguaga

SEQ ID NO: 2602894 - RNA, 19 nt, Homo sapiens
  misc_RNA (1)...(19): siRNA sense strand
ccucaguagaaauucauua

SEQ ID NO: 2602895 - RNA, 19 nt, Homo sapiens
  misc_RNA (1)...(19): siRNA sense strand
gguccauacaggagagaag

SEQ ID NO: 2602896 - RNA, 19 nt, Homo sapiens
  misc_RNA (1)...(19): siRNA sense strand
ggcaguaacauuugaagau

SEQ ID NO: 2602897 - RNA, 19 nt, Homo sapiens
  misc_RNA (1)...(19): siRNA sense strand
ccuuacaaaugccgugaau

SEQ ID NO: 2602898 - RNA, 19 nt, Homo sapiens
  misc_RNA (1)...(19): siRNA sense strand
ugagagauucaauggaaga

SEQ ID NO: 2602899 - RNA, 19 nt, Homo sapiens
  misc_RNA (1)...(19): siRNA sense strand
uguauagacauccaagaaa

SEQ ID NO: 2602900 - RNA, 19 nt, Homo sapiens
  misc_RNA (1)...(19): siRNA sense strand
ccuuggcaguccuuagaaa

SEQ ID NO: 2602901 - RNA, 19 nt, Homo sapiens
  misc_RNA (1)...(19): siRNA sense strand
acaugggaggaguggaaau

SEQ ID NO: 2602902 - RNA, 19 nt, Homo sapiens
  misc_RNA (1)...(19): siRNA sense strand
auauaagugugaugagugu

SEQ ID NO: 2602903 - RNA, 19 nt, Homo sapiens
  misc_RNA (1)...(19): siRNA sense strand
ucaaagaguccaugcagga

SEQ ID NO: 2602904 - RNA, 19 nt, Homo sapiens
  misc_RNA (1)...(19): siRNA sense strand
agggaggucaugugggaga

SEQ ID NO: 2602905 - RNA, 19 nt, Homo sapiens
  misc_RNA (1)...(19): siRNA sense strand
ucuucaaauucaucagaga

SEQ ID NO: 2602906 - RNA, 19 nt, Homo sapiens
  misc_RNA (1)...(19): siRNA sense strand
gcuaagugugguaaagguu

SEQ ID NO: 2602907 - RNA, 19 nt, Homo sapiens
  misc_RNA (1)...(19): siRNA sense strand
uggaaugagagcuacaaau

SEQ ID NO: 2602908 - RNA, 19 nt, Homo sapiens
  misc_RNA (1)...(19): siRNA sense strand
aggagagaaaccuuauaaa

SEQ ID NO: 2602909 - RNA, 19 nt, Homo sapiens
  misc_RNA (1)...(19): siRNA sense strand
cccuauaaaugucaugauu

SEQ ID NO: 2602910 - RNA, 19 nt, Homo sapiens
  misc_RNA (1)...(19): siRNA sense strand
acaaaucccaagaagaaaa

SEQ ID NO: 2602911 - RNA, 19 nt, Homo sapiens
  misc_RNA (1)...(19): siRNA sense strand
cgaugauucuaaagggaaa

SEQ ID NO: 2602912 - RNA, 19 nt, Homo sapiens
  misc_RNA (1)...(19): siRNA sense strand
aggaagaagacaagacaau

SEQ ID NO: 2602913 - RNA, 19 nt, Homo sapiens
  misc_RNA (1)...(19): siRNA sense strand
accaaugagaauagggaaa

SEQ ID NO: 2602914 - RNA, 19 nt, Homo sapiens
  misc_RNA (1)...(19): siRNA sense strand
cagaugaggaagaagacaa

SEQ ID NO: 2602915 - RNA, 19 nt, Homo sapiens
  misc_RNA (1)...(19): siRNA sense strand
cggaugaugaagaggaaca

SEQ ID NO: 2602916 - RNA, 19 nt, Homo sapiens
  misc_RNA (1)...(19): siRNA sense strand
ggaacagaagagaaaguau

SEQ ID NO: 2602917 - RNA, 19 nt, Homo sapiens
  misc_RNA (1)...(19): siRNA sense strand
caauguuggcagaaagaau

SEQ ID NO: 2602918 - RNA, 19 nt, Homo sapiens
  misc_RNA (1)...(19): siRNA sense strand
uagacuggauagagaaaca

SEQ ID NO: 2602919 - RNA, 19 nt, Homo sapiens
  misc_RNA (1)...(19): siRNA sense strand
ggaaagagguggagauccc

SEQ ID NO: 2602920 - RNA, 19 nt, Homo sapiens
  misc_RNA (1)...(19): siRNA sense strand
aggaagaacaggaagaugu

SEQ ID NO: 2602921 - RNA, 19 nt, Homo sapiens
  misc_RNA (1)...(19): siRNA sense strand
auuacaaacagcugggaau

SEQ ID NO: 2602922 - RNA, 19 nt, Homo sapiens
  misc_RNA (1)...(19): siRNA sense strand
cuaccaaauuaaagagaug

SEQ ID NO: 2602923 - RNA, 19 nt, Homo sapiens
  misc_RNA (1)...(19): siRNA sense strand
ggacaucugcucagggcau

SEQ ID NO: 2602924 - RNA, 19 nt, Homo sapiens
  misc_RNA (1)...(19): siRNA sense strand
cuauauucuuggugaucuu

SEQ ID NO: 2602925 - RNA, 19 nt, Homo sapiens
  misc_RNA (1)...(19): siRNA sense strand
gaggaacagaagagaaagu

SEQ ID NO: 2602926 - RNA, 19 nt, Homo sapiens
  misc_RNA (1)...(19): siRNA sense strand
guggaaaggaacaacucua

SEQ ID NO: 2602927 - RNA, 19 nt, Homo sapiens
  misc_RNA (1)...(19): siRNA sense strand
gaggaagaagacaagacaa

SEQ ID NO: 2602928 - RNA, 19 nt, Homo sapiens
  misc_RNA (1)...(19): siRNA sense strand
aagacaauguuggcagaaa

SEQ ID NO: 2602929 - RNA, 19 nt, Homo sapiens
  misc_RNA (1)...(19): siRNA sense strand
ggguuugggaagaggaugu

SEQ ID NO: 2602930 - RNA, 19 nt, Homo sapiens
  misc_RNA (1)...(19): siRNA sense strand
aacaggaagaugugaacaa

SEQ ID NO: 2602931 - RNA, 19 nt, Homo sapiens
  misc_RNA (1)...(19): siRNA sense strand
gaaaguaugugcuugcaga

SEQ ID NO: 2602932 - RNA, 19 nt, Homo sapiens
  misc_RNA (1)...(19): siRNA sense strand
guaugauggacuugacuuu

SEQ ID NO: 2602933 - RNA, 19 nt, Homo sapiens
  misc_RNA (1)...(19): siRNA sense strand
gcuauggguugcagcgcau

SEQ ID NO: 2602934 - RNA, 19 nt, Homo sapiens
  misc_RNA (1)...(19): siRNA sense strand
aauagacuggauagagaaa

SEQ ID NO: 2602935 - RNA, 19 nt, Homo sapiens
  misc_RNA (1)...(19): siRNA sense strand
guaccaaagauucgcccaa

SEQ ID NO: 2602936 - RNA, 19 nt, Homo sapiens
  misc_RNA (1)...(19): siRNA sense strand
cuaaagggaaagaggugga

SEQ ID NO: 2602937 - RNA, 19 nt, Homo sapiens
  misc_RNA (1)...(19): siRNA sense strand
ccgcagguggaaaggaaca

SEQ ID NO: 2602938 - RNA, 19 nt, Homo sapiens
  misc_RNA (1)...(19): siRNA sense strand
gagauguguaccaaagauu

SEQ ID NO: 2602939 - RNA, 19 nt, Homo sapiens
  misc_RNA (1)...(19): siRNA sense strand
uggaagaccucaauggaac

SEQ ID NO: 2602940 - RNA, 19 nt, Homo sapiens
  misc_RNA (1)...(19): siRNA sense strand
aagaacaggaagaugugaa

SEQ ID NO: 2602941 - RNA, 19 nt, Homo sapiens
  misc_RNA (1)...(19): siRNA sense strand
agucacaagcuuauugaau

SEQ ID NO: 2602942 - RNA, 19 nt, Homo sapiens
  misc_RNA (1)...(19): siRNA sense strand
aagccagaguggacuacua

SEQ ID NO: 2602943 - RNA, 19 nt, Homo sapiens
  misc_RNA (1)...(19): siRNA sense strand
aagggaaagagguggagau

SEQ ID NO: 2602944 - RNA, 19 nt, Homo sapiens
  misc_RNA (1)...(19): siRNA sense strand
ggugaaauuacuaaccgua

SEQ ID NO: 2602945 - RNA, 19 nt, Homo sapiens
  misc_RNA (1)...(19): siRNA sense strand
aggaggaaauagacuggau

SEQ ID NO: 2602946 - RNA, 19 nt, Homo sapiens
  misc_RNA (1)...(19): siRNA sense strand
augaugaagaggaacagaa

SEQ ID NO: 2602947 - RNA, 19 nt, Homo sapiens
  misc_RNA (1)...(19): siRNA sense strand
acaagacaauguuggcaga

SEQ ID NO: 2602948 - RNA, 19 nt, Homo sapiens
  misc_RNA (1)...(19): siRNA sense strand
ugguacagcaacagacaga

SEQ ID NO: 2602949 - RNA, 19 nt, Homo sapiens
  misc_RNA (1)...(19): siRNA sense strand
gugaaauuacuaaccguau

SEQ ID NO: 2602950 - RNA, 19 nt, Homo sapiens
  misc_RNA (1)...(19): siRNA sense strand
agacaauguuggcagaaag

SEQ ID NO: 2602951 - RNA, 19 nt, Homo sapiens
  misc_RNA (1)...(19): siRNA sense strand
ucgacuugguacagcaaca

SEQ ID NO: 2602952 - RNA, 19 nt, Homo sapiens
  misc_RNA (1)...(19): siRNA sense strand
agacaggugaaauuacuaa

SEQ ID NO: 2602953 - RNA, 19 nt, Homo sapiens
  misc_RNA (1)...(19): siRNA sense strand
caugcuuguuuaugaucaa

SEQ ID NO: 2602954 - RNA, 19 nt, Homo sapiens
  misc_RNA (1)...(19): siRNA sense strand
ggaccaaugagaauaggga

SEQ ID NO: 2602955 - RNA, 19 nt, Homo sapiens
  misc_RNA (1)...(19): siRNA sense strand
acucugacccaucuagaaa

SEQ ID NO: 2602956 - RNA, 19 nt, Homo sapiens
  misc_RNA (1)...(19): siRNA sense strand
aggaaauagacuggauaga

SEQ ID NO: 2602957 - RNA, 19 nt, Homo sapiens
  misc_RNA (1)...(19): siRNA sense strand
aaauagacuggauagagaa

SEQ ID NO: 2602958 - RNA, 19 nt, Homo sapiens
  misc_RNA (1)...(19): siRNA sense strand
cgugcacagaggagaguga

SEQ ID NO: 2602959 - RNA, 19 nt, Homo sapiens
  misc_RNA (1)...(19): siRNA sense strand
aagcuauauucuuggugau

SEQ ID NO: 2602960 - RNA, 19 nt, Homo sapiens
  misc_RNA (1)...(19): siRNA sense strand
acgaugauucuaaagggaa

SEQ ID NO: 2602961 - RNA, 19 nt, Homo sapiens
  misc_RNA (1)...(19): siRNA sense strand
ucuacuggcauuuggaaga

SEQ ID NO: 2602962 - RNA, 19 nt, Homo sapiens
  misc_RNA (1)...(19): siRNA sense strand
ccaaugagaauagggaaaa

SEQ ID NO: 2602963 - RNA, 19 nt, Homo sapiens
  misc_RNA (1)...(19): siRNA sense strand
ugaaagagcugcagcggga

SEQ ID NO: 2602964 - RNA, 19 nt, Homo sapiens
  misc_RNA (1)...(19): siRNA sense strand
aaagagaagucaagggaac

SEQ ID NO: 2602965 - RNA, 19 nt, Homo sapiens
  misc_RNA (1)...(19): siRNA sense strand
ccaacgauauggaggacga

SEQ ID NO: 2602966 - RNA, 19 nt, Homo sapiens
  misc_RNA (1)...(19): siRNA sense strand
cugaaaggucugguggaua

SEQ ID NO: 2602967 - RNA, 19 nt, Homo sapiens
  misc_RNA (1)...(19): siRNA sense strand
auccagaagauuugaagaa

SEQ ID NO: 2602968 - RNA, 19 nt, Homo sapiens
  misc_RNA (1)...(19): siRNA sense strand
cuguagauaacaauagcaa

SEQ ID NO: 2602969 - RNA, 19 nt, Homo sapiens
  misc_RNA (1)...(19): siRNA sense strand
uguucagaucacaggcaaa

SEQ ID NO: 2602970 - RNA, 19 nt, Homo sapiens
  misc_RNA (1)...(19): siRNA sense strand
ccguuggccucuugagcau

SEQ ID NO: 2602971 - RNA, 19 nt, Homo sapiens
  misc_RNA (1)...(19): siRNA sense strand
ccuucaaaccuggggaaaa

SEQ ID NO: 2602972 - RNA, 19 nt, Homo sapiens
  misc_RNA (1)...(19): siRNA sense strand
gcuucugagugauagcaau

SEQ ID NO: 2602973 - RNA, 19 nt, Homo sapiens
  misc_RNA (1)...(19): siRNA sense strand
cuucuguggauguaguuua

SEQ ID NO: 2602974 - RNA, 19 nt, Homo sapiens
  misc_RNA (1)...(19): siRNA sense strand
cggcacaaaugaugaggca

SEQ ID NO: 2602975 - RNA, 19 nt, Homo sapiens
  misc_RNA (1)...(19): siRNA sense strand
ccagaacacaaaagagcua

SEQ ID NO: 2602976 - RNA, 19 nt, Homo sapiens
  misc_RNA (1)...(19): siRNA sense strand
guuuggauacagcuggaaa

SEQ ID NO: 2602977 - RNA, 19 nt, Homo sapiens
  misc_RNA (1)...(19): siRNA sense strand
ccgagaaagugcugagggu

SEQ ID NO: 2602978 - RNA, 19 nt, Homo sapiens
  misc_RNA (1)...(19): siRNA sense strand
ccuucugacuggugcucua

SEQ ID NO: 2602979 - RNA, 19 nt, Homo sapiens
  misc_RNA (1)...(19): siRNA sense strand
cguugcagggaguggagaa

SEQ ID NO: 2602980 - RNA, 19 nt, Homo sapiens
  misc_RNA (1)...(19): siRNA sense strand
aagaugacccucagcgaga

SEQ ID NO: 2602981 - RNA, 19 nt, Homo sapiens
  misc_RNA (1)...(19): siRNA sense strand
aaggguuccuauuggacaa

SEQ ID NO: 2602982 - RNA, 19 nt, Homo sapiens
  misc_RNA (1)...(19): siRNA sense strand
ucaucaaagucgagggaga

SEQ ID NO: 2602983 - RNA, 19 nt, Homo sapiens
  misc_RNA (1)...(19): siRNA sense strand
guguaaucaaugugggaaa

SEQ ID NO: 2602984 - RNA, 19 nt, Homo sapiens
  misc_RNA (1)...(19): siRNA sense strand
ccguaugaauguagugaau

SEQ ID NO: 2602985 - RNA, 19 nt, Homo sapiens
  misc_RNA (1)...(19): siRNA sense strand
ccuuaugaauguagugaau

SEQ ID NO: 2602986 - RNA, 19 nt, Homo sapiens
  misc_RNA (1)...(19): siRNA sense strand
gggaaauccuuuagccaga

SEQ ID NO: 2602987 - RNA, 19 nt, Homo sapiens
  misc_RNA (1)...(19): siRNA sense strand
ggaaagucauucaggcaga

SEQ ID NO: 2602988 - RNA, 19 nt, Homo sapiens
  misc_RNA (1)...(19): siRNA sense strand
gggaaauccuucagccaga

SEQ ID NO: 2602989 - RNA, 19 nt, Homo sapiens
  misc_RNA (1)...(19): siRNA sense strand
auguaaucaaugugggaaa

SEQ ID NO: 2602990 - RNA, 19 nt, Homo sapiens
  misc_RNA (1)...(19): siRNA sense strand
aacucauacuggagagaaa

SEQ ID NO: 2602991 - RNA, 19 nt, Homo sapiens
  misc_RNA (1)...(19): siRNA sense strand
aacucauacuggagagaaa

SEQ ID NO: 2602992 - RNA, 19 nt, Homo sapiens
  misc_RNA (1)...(19): siRNA sense strand
aacucauacuggagagaaa

SEQ ID NO: 2602993 - RNA, 19 nt, Homo sapiens
  misc_RNA (1)...(19): siRNA sense strand
acuucaaagcagaggauuu

SEQ ID NO: 2602994 - RNA, 19 nt, Homo sapiens
  misc_RNA (1)...(19): siRNA sense strand
gcauggaagagcaggauga

SEQ ID NO: 2602995 - RNA, 19 nt, Homo sapiens
  misc_RNA (1)...(19): siRNA sense strand
uggagaagcaacaggaaaa

SEQ ID NO: 2602996 - RNA, 19 nt, Homo sapiens
  misc_RNA (1)...(19): siRNA sense strand
augcaaucagugugggaaa

SEQ ID NO: 2602997 - RNA, 19 nt, Homo sapiens
  misc_RNA (1)...(19): siRNA sense strand
auguaaucagugugggaaa

SEQ ID NO: 2602998 - RNA, 19 nt, Homo sapiens
  misc_RNA (1)...(19): siRNA sense strand
auguaaucagugugggaaa

SEQ ID NO: 2602999 - RNA, 19 nt, Homo sapiens
  misc_RNA (1)...(19): siRNA sense strand
auguaaucagugugggaaa

SEQ ID NO: 2603000 - RNA, 19 nt, Homo sapiens
  misc_RNA (1)...(19): siRNA sense strand
gauuaaugagaaugagaca

SEQ ID NO: 2603001 - RNA, 19 nt, Homo sapiens
  misc_RNA (1)...(19): siRNA sense strand
ccauaaugaacaacagaga

SEQ ID NO: 2603002 - RNA, 19 nt, Homo sapiens
  misc_RNA (1)...(19): siRNA sense strand
aagaaguggaugauuguaa

SEQ ID NO: 2603003 - RNA, 19 nt, Homo sapiens
  misc_RNA (1)...(19): siRNA sense strand
aacucauacugaagagaaa

SEQ ID NO: 2603004 - RNA, 19 nt, Homo sapiens
  misc_RNA (1)...(19): siRNA sense strand
uguaaagaccaguuggaga

SEQ ID NO: 2603005 - RNA, 19 nt, Homo sapiens
  misc_RNA (1)...(19): siRNA sense strand
caucaaagucgagggagaa

SEQ ID NO: 2603006 - RNA, 19 nt, Homo sapiens
  misc_RNA (1)...(19): siRNA sense strand
guuauaaacuuguugcuca

SEQ ID NO: 2603007 - RNA, 19 nt, Homo sapiens
  misc_RNA (1)...(19): siRNA sense strand
cugcaaaagugaugaaacu

SEQ ID NO: 2603008 - RNA, 19 nt, Homo sapiens
  misc_RNA (1)...(19): siRNA sense strand
gggaaauccuucagcugga

SEQ ID NO: 2603009 - RNA, 19 nt, Homo sapiens
  misc_RNA (1)...(19): siRNA sense strand
gggaaauccuucagcugga

SEQ ID NO: 2603010 - RNA, 19 nt, Homo sapiens
  misc_RNA (1)...(19): siRNA sense strand
aacucacacuggagagaaa

SEQ ID NO: 2603011 - RNA, 19 nt, Homo sapiens
  misc_RNA (1)...(19): siRNA sense strand
caugugaagaaguggauga

SEQ ID NO: 2603012 - RNA, 19 nt, Homo sapiens
  misc_RNA (1)...(19): siRNA sense strand
caaucaguguggaaaguca

SEQ ID NO: 2603013 - RNA, 19 nt, Homo sapiens
  misc_RNA (1)...(19): siRNA sense strand
ucauucaggcagagcuaua

SEQ ID NO: 2603014 - RNA, 19 nt, Homo sapiens
  misc_RNA (1)...(19): siRNA sense strand
acucaaaggaaagcaguua

SEQ ID NO: 2603015 - RNA, 19 nt, Homo sapiens
  misc_RNA (1)...(19): siRNA sense strand
gcucagaggacccuggaca

SEQ ID NO: 2603016 - RNA, 19 nt, Homo sapiens
  misc_RNA (1)...(19): siRNA sense strand
ugaugaagaaccagcuaau

SEQ ID NO: 2603017 - RNA, 19 nt, Homo sapiens
  misc_RNA (1)...(19): siRNA sense strand
gaaugcaaucaguguggaa

SEQ ID NO: 2603018 - RNA, 19 nt, Homo sapiens
  misc_RNA (1)...(19): siRNA sense strand
agucauucaggcagagcua

SEQ ID NO: 2603019 - RNA, 19 nt, Homo sapiens
  misc_RNA (1)...(19): siRNA sense strand
cagcuaauggagugaagau

SEQ ID NO: 2603020 - RNA, 19 nt, Homo sapiens
  misc_RNA (1)...(19): siRNA sense strand
gaauguaaucaguguggga

SEQ ID NO: 2603021 - RNA, 19 nt, Homo sapiens
  misc_RNA (1)...(19): siRNA sense strand
gaauguaaucaguguggga

SEQ ID NO: 2603022 - RNA, 19 nt, Homo sapiens
  misc_RNA (1)...(19): siRNA sense strand
gaauguaaucaguguggga

SEQ ID NO: 2603023 - RNA, 19 nt, Homo sapiens
  misc_RNA (1)...(19): siRNA sense strand
cuuauuaggcaucaggcaa

SEQ ID NO: 2603024 - RNA, 19 nt, Homo sapiens
  misc_RNA (1)...(19): siRNA sense strand
aauucauggaggaggaaaa

SEQ ID NO: 2603025 - RNA, 19 nt, Homo sapiens
  misc_RNA (1)...(19): siRNA sense strand
gagaacucacacaggagaa

SEQ ID NO: 2603026 - RNA, 19 nt, Homo sapiens
  misc_RNA (1)...(19): siRNA sense strand
uuggagaagcaacaggaaa

SEQ ID NO: 2603027 - RNA, 19 nt, Homo sapiens
  misc_RNA (1)...(19): siRNA sense strand
auguagugaauguggaaaa

SEQ ID NO: 2603028 - RNA, 19 nt, Homo sapiens
  misc_RNA (1)...(19): siRNA sense strand
ugggaaauccuuuagucaa

SEQ ID NO: 2603029 - RNA, 19 nt, Homo sapiens
  misc_RNA (1)...(19): siRNA sense strand
auguagugaauguggaaaa

SEQ ID NO: 2603030 - RNA, 19 nt, Homo sapiens
  misc_RNA (1)...(19): siRNA sense strand
ccucaagagauuaucauca

SEQ ID NO: 2603031 - RNA, 19 nt, Homo sapiens
  misc_RNA (1)...(19): siRNA sense strand
gauucaacuucaaagcaga

SEQ ID NO: 2603032 - RNA, 19 nt, Homo sapiens
  misc_RNA (1)...(19): siRNA sense strand
acauguauucaguguggaa

SEQ ID NO: 2603033 - RNA, 19 nt, Homo sapiens
  misc_RNA (1)...(19): siRNA sense strand
cauaaugaacaacagagaa

SEQ ID NO: 2603034 - RNA, 19 nt, Homo sapiens
  misc_RNA (1)...(19): siRNA sense strand
uuguuaugcaucagagaau

SEQ ID NO: 2603035 - RNA, 19 nt, Homo sapiens
  misc_RNA (1)...(19): siRNA sense strand
agaaagguuuacaagggau

SEQ ID NO: 2603036 - RNA, 19 nt, Homo sapiens
  misc_RNA (1)...(19): siRNA sense strand
uggaggagagcauggaaga

SEQ ID NO: 2603037 - RNA, 19 nt, Homo sapiens
  misc_RNA (1)...(19): siRNA sense strand
agugaagauagaaagguuu

SEQ ID NO: 2603038 - RNA, 19 nt, Homo sapiens
  misc_RNA (1)...(19): siRNA sense strand
cgauggagcccuuggugaa

SEQ ID NO: 2603039 - RNA, 19 nt, Homo sapiens
  misc_RNA (1)...(19): siRNA sense strand
cggccagagauaaggaaga

SEQ ID NO: 2603040 - RNA, 19 nt, Homo sapiens
  misc_RNA (1)...(19): siRNA sense strand
guccaaucggccagagaua

SEQ ID NO: 2603041 - RNA, 19 nt, Homo sapiens
  misc_RNA (1)...(19): siRNA sense strand
ccguauaucuuucggguag

SEQ ID NO: 2603042 - RNA, 19 nt, Homo sapiens
  misc_RNA (1)...(19): siRNA sense strand
uugccaaagacgaggaguu

SEQ ID NO: 2603043 - RNA, 19 nt, Homo sapiens
  misc_RNA (1)...(19): siRNA sense strand
agcagaaccuugaagccua

SEQ ID NO: 2603044 - RNA, 19 nt, Homo sapiens
  misc_RNA (1)...(19): siRNA sense strand
ccucuagaucccacaacaa

SEQ ID NO: 2603045 - RNA, 19 nt, Homo sapiens
  misc_RNA (1)...(19): siRNA sense strand
gcaaugaguccuucaggga

SEQ ID NO: 2603046 - RNA, 19 nt, Homo sapiens
  misc_RNA (1)...(19): siRNA sense strand
gcaaagaccagcagcagcu

SEQ ID NO: 2603047 - RNA, 19 nt, Homo sapiens
  misc_RNA (1)...(19): siRNA sense strand
ggcacaugaccucgcauaa

SEQ ID NO: 2603048 - RNA, 19 nt, Homo sapiens
  misc_RNA (1)...(19): siRNA sense strand
gcgcagagcucauggccaa

SEQ ID NO: 2603049 - RNA, 19 nt, Homo sapiens
  misc_RNA (1)...(19): siRNA sense strand
agaugaaauuccagggaga

SEQ ID NO: 2603050 - RNA, 19 nt, Homo sapiens
  misc_RNA (1)...(19): siRNA sense strand
augaagaggaugaggauga

SEQ ID NO: 2603051 - RNA, 19 nt, Homo sapiens
  misc_RNA (1)...(19): siRNA sense strand
cggagaagaagaagaugaa

SEQ ID NO: 2603052 - RNA, 19 nt, Homo sapiens
  misc_RNA (1)...(19): siRNA sense strand
ccuugaaagccauggaaau

SEQ ID NO: 2603053 - RNA, 19 nt, Homo sapiens
  misc_RNA (1)...(19): siRNA sense strand
aggaugaagaagaggaaga

SEQ ID NO: 2603054 - RNA, 19 nt, Homo sapiens
  misc_RNA (1)...(19): siRNA sense strand
auggaaaugaccuggaaua

SEQ ID NO: 2603055 - RNA, 19 nt, Homo sapiens
  misc_RNA (1)...(19): siRNA sense strand
ccgaagaccaaaagcgaua

SEQ ID NO: 2603056 - RNA, 19 nt, Homo sapiens
  misc_RNA (1)...(19): siRNA sense strand
ccaaaagagcugaggagau

SEQ ID NO: 2603057 - RNA, 19 nt, Homo sapiens
  misc_RNA (1)...(19): siRNA sense strand
ccggagaagaagaagauga

SEQ ID NO: 2603058 - RNA, 19 nt, Homo sapiens
  misc_RNA (1)...(19): siRNA sense strand
augaagaagaggaagauga

SEQ ID NO: 2603059 - RNA, 19 nt, Homo sapiens
  misc_RNA (1)...(19): siRNA sense strand
cugagaagaagaaggccaa

SEQ ID NO: 2603060 - RNA, 19 nt, Homo sapiens
  misc_RNA (1)...(19): siRNA sense strand
uggaaaugaccuggaauaa

SEQ ID NO: 2603061 - RNA, 19 nt, Homo sapiens
  misc_RNA (1)...(19): siRNA sense strand
ggacaaguuugacgggcga

SEQ ID NO: 2603062 - RNA, 19 nt, Homo sapiens
  misc_RNA (1)...(19): siRNA sense strand
ccgaggaggaugaugaaga

SEQ ID NO: 2603063 - RNA, 19 nt, Homo sapiens
  misc_RNA (1)...(19): siRNA sense strand
cgaggaugaagaagaggaa

SEQ ID NO: 2603064 - RNA, 19 nt, Homo sapiens
  misc_RNA (1)...(19): siRNA sense strand
aggaugacgaugaggauga

SEQ ID NO: 2603065 - RNA, 19 nt, Homo sapiens
  misc_RNA (1)...(19): siRNA sense strand
cagcauauaaagaguacau

SEQ ID NO: 2603066 - RNA, 19 nt, Homo sapiens
  misc_RNA (1)...(19): siRNA sense strand
ucacacauggacugggaaa

SEQ ID NO: 2603067 - RNA, 19 nt, Homo sapiens
  misc_RNA (1)...(19): siRNA sense strand
aggaugaugaagaggauga

SEQ ID NO: 2603068 - RNA, 19 nt, Homo sapiens
  misc_RNA (1)...(19): siRNA sense strand
aggcucagucggagaggaa

SEQ ID NO: 2603069 - RNA, 19 nt, Homo sapiens
  misc_RNA (1)...(19): siRNA sense strand
gguacacccacgagaagaa

SEQ ID NO: 2603070 - RNA, 19 nt, Homo sapiens
  misc_RNA (1)...(19): siRNA sense strand
cgaaggaggugaaggacuc

SEQ ID NO: 2603071 - RNA, 19 nt, Homo sapiens
  misc_RNA (1)...(19): siRNA sense strand
gugaaggccuugaaagcca

SEQ ID NO: 2603072 - RNA, 19 nt, Homo sapiens
  misc_RNA (1)...(19): siRNA sense strand
aggacgaggaugaagaaga

SEQ ID NO: 2603073 - RNA, 19 nt, Homo sapiens
  misc_RNA (1)...(19): siRNA sense strand
augagaaugaagaggauga

SEQ ID NO: 2603074 - RNA, 19 nt, Homo sapiens
  misc_RNA (1)...(19): siRNA sense strand
augacgaggacgaggauga

SEQ ID NO: 2603075 - RNA, 19 nt, Homo sapiens
  misc_RNA (1)...(19): siRNA sense strand
aagaggaagaugaugagaa

SEQ ID NO: 2603076 - RNA, 19 nt, Homo sapiens
  misc_RNA (1)...(19): siRNA sense strand
agagagagaaacaggaguu

SEQ ID NO: 2603077 - RNA, 19 nt, Homo sapiens
  misc_RNA (1)...(19): siRNA sense strand
agaaagauuacgaggugga

SEQ ID NO: 2603078 - RNA, 19 nt, Homo sapiens
  misc_RNA (1)...(19): siRNA sense strand
uggaaaagaaggagaaacu

SEQ ID NO: 2603079 - RNA, 19 nt, Homo sapiens
  misc_RNA (1)...(19): siRNA sense strand
ccaaaagcgauaugagaga

SEQ ID NO: 2603080 - RNA, 19 nt, Homo sapiens
  misc_RNA (1)...(19): siRNA sense strand
uuucuaaugaggugaggaa

SEQ ID NO: 2603081 - RNA, 19 nt, Homo sapiens
  misc_RNA (1)...(19): siRNA sense strand
cuggaaugcaugaagaaca

SEQ ID NO: 2603082 - RNA, 19 nt, Homo sapiens
  misc_RNA (1)...(19): siRNA sense strand
gggaugagaaugaagagga

SEQ ID NO: 2603083 - RNA, 19 nt, Homo sapiens
  misc_RNA (1)...(19): siRNA sense strand
ccacuacgaaggaggugaa

SEQ ID NO: 2603084 - RNA, 19 nt, Homo sapiens
  misc_RNA (1)...(19): siRNA sense strand
gggccaaguaugcgaaacu

SEQ ID NO: 2603085 - RNA, 19 nt, Homo sapiens
  misc_RNA (1)...(19): siRNA sense strand
ggagaucaugagagacuau

SEQ ID NO: 2603086 - RNA, 19 nt, Homo sapiens
  misc_RNA (1)...(19): siRNA sense strand
aagacgacgacgaggauga

SEQ ID NO: 2603087 - RNA, 19 nt, Homo sapiens
  misc_RNA (1)...(19): siRNA sense strand
aggaguacgaggagaucau

SEQ ID NO: 2603088 - RNA, 19 nt, Homo sapiens
  misc_RNA (1)...(19): siRNA sense strand
acaucagugaggaggguau

SEQ ID NO: 2603089 - RNA, 19 nt, Homo sapiens
  misc_RNA (1)...(19): siRNA sense strand
ucuaaugaggugaggaagu

SEQ ID NO: 2603090 - RNA, 19 nt, Homo sapiens
  misc_RNA (1)...(19): siRNA sense strand
agaaggagaaggacgccua

SEQ ID NO: 2603091 - RNA, 19 nt, Homo sapiens
  misc_RNA (1)...(19): siRNA sense strand
acaagaagugugaucagaa

SEQ ID NO: 2603092 - RNA, 19 nt, Homo sapiens
  misc_RNA (1)...(19): siRNA sense strand
agaaugaagaggaugacga

SEQ ID NO: 2603093 - RNA, 19 nt, Homo sapiens
  misc_RNA (1)...(19): siRNA sense strand
ggaugaagauaaugagucc

SEQ ID NO: 2603094 - RNA, 19 nt, Homo sapiens
  misc_RNA (1)...(19): siRNA sense strand
guucaaaaccaccgaauca

SEQ ID NO: 2603095 - RNA, 19 nt, Homo sapiens
  misc_RNA (1)...(19): siRNA sense strand
aauaaacguaagagcauga

SEQ ID NO: 2603096 - RNA, 19 nt, Homo sapiens
  misc_RNA (1)...(19): siRNA sense strand
aagaagaaggccaaguaca

SEQ ID NO: 2603097 - RNA, 19 nt, Homo sapiens
  misc_RNA (1)...(19): siRNA sense strand
aggaugacgaggacgaaga

SEQ ID NO: 2603098 - RNA, 19 nt, Homo sapiens
  misc_RNA (1)...(19): siRNA sense strand
ccaagaaauacaaggagcu

SEQ ID NO: 2603099 - RNA, 19 nt, Homo sapiens
  misc_RNA (1)...(19): siRNA sense strand
augaagaggaugacgagga

SEQ ID NO: 2603100 - RNA, 19 nt, Homo sapiens
  misc_RNA (1)...(19): siRNA sense strand
cggaaggaguacgaggaga

SEQ ID NO: 2603101 - RNA, 19 nt, Homo sapiens
  misc_RNA (1)...(19): siRNA sense strand
gcauauaaagaguacaucu

SEQ ID NO: 2603102 - RNA, 19 nt, Homo sapiens
  misc_RNA (1)...(19): siRNA sense strand
cgaagaagauguccgguca

SEQ ID NO: 2603103 - RNA, 19 nt, Homo sapiens
  misc_RNA (1)...(19): siRNA sense strand
gccgagaaucccggagaaa

SEQ ID NO: 2603104 - RNA, 19 nt, Homo sapiens
  misc_RNA (1)...(19): siRNA sense strand
aaguuaagcacgcagaaaa

SEQ ID NO: 2603105 - RNA, 19 nt, Homo sapiens
  misc_RNA (1)...(19): siRNA sense strand
cauaaagacuuguugggua

SEQ ID NO: 2603106 - RNA, 19 nt, Homo sapiens
  misc_RNA (1)...(19): siRNA sense strand
cugaagaagugguggccuu

SEQ ID NO: 2603107 - RNA, 19 nt, Homo sapiens
  misc_RNA (1)...(19): siRNA sense strand
gcacagaaugcguugagga

SEQ ID NO: 2603108 - RNA, 19 nt, Homo sapiens
  misc_RNA (1)...(19): siRNA sense strand
ccuacaaauguuagagacu

SEQ ID NO: 2603109 - RNA, 19 nt, Homo sapiens
  misc_RNA (1)...(19): siRNA sense strand
cagccacaauugaggacau

SEQ ID NO: 2603110 - RNA, 19 nt, Homo sapiens
  misc_RNA (1)...(19): siRNA sense strand
uuucagauccagagagagu

SEQ ID NO: 2603111 - RNA, 19 nt, Homo sapiens
  misc_RNA (1)...(19): siRNA sense strand
gggucgaaggaacggagaa

SEQ ID NO: 2603112 - RNA, 19 nt, Homo sapiens
  misc_RNA (1)...(19): siRNA sense strand
cagaaugcguugaggaagc

SEQ ID NO: 2603113 - RNA, 19 nt, Homo sapiens
  misc_RNA (1)...(19): siRNA sense strand
ggagaugccuuuauccaga

SEQ ID NO: 2603114 - RNA, 19 nt, Homo sapiens
  misc_RNA (1)...(19): siRNA sense strand
caguacuaccucagcaauu

SEQ ID NO: 2603115 - RNA, 19 nt, Homo sapiens
  misc_RNA (1)...(19): siRNA sense strand
aaaacaugaaggacagaua

SEQ ID NO: 2603116 - RNA, 19 nt, Homo sapiens
  misc_RNA (1)...(19): siRNA sense strand
ggacagagcauuuauggcu

SEQ ID NO: 2603117 - RNA, 19 nt, Homo sapiens
  misc_RNA (1)...(19): siRNA sense strand
agaaacugaaugugagcaa

SEQ ID NO: 2603118 - RNA, 19 nt, Homo sapiens
  misc_RNA (1)...(19): siRNA sense strand
ggaucgagcacaucgggaa

SEQ ID NO: 2603119 - RNA, 19 nt, Homo sapiens
  misc_RNA (1)...(19): siRNA sense strand
uugaagacaugauuggcua

SEQ ID NO: 2603120 - RNA, 19 nt, Homo sapiens
  misc_RNA (1)...(19): siRNA sense strand
ucacagagaaggagacgca

SEQ ID NO: 2603121 - RNA, 19 nt, Homo sapiens
  misc_RNA (1)...(19): siRNA sense strand
ggcauuacguguuggagga

SEQ ID NO: 2603122 - RNA, 19 nt, Homo sapiens
  misc_RNA (1)...(19): siRNA sense strand
gggcauuccugauucccua

SEQ ID NO: 2603123 - RNA, 19 nt, Homo sapiens
  misc_RNA (1)...(19): siRNA sense strand
auuugaaggcauuggcuau

SEQ ID NO: 2603124 - RNA, 19 nt, Homo sapiens
  misc_RNA (1)...(19): siRNA sense strand
gggcaugaguggaacacag

SEQ ID NO: 2603125 - RNA, 19 nt, Homo sapiens
  misc_RNA (1)...(19): siRNA sense strand
cacaagugaagguggcauu

SEQ ID NO: 2603126 - RNA, 19 nt, Homo sapiens
  misc_RNA (1)...(19): siRNA sense strand
ccugugggcaugaguggaa

SEQ ID NO: 2603127 - RNA, 19 nt, Homo sapiens
  misc_RNA (1)...(19): siRNA sense strand
ugaguggaacacagagaau

SEQ ID NO: 2603128 - RNA, 19 nt, Homo sapiens
  misc_RNA (1)...(19): siRNA sense strand
acguguuggaggaaaguuu

SEQ ID NO: 2603129 - RNA, 19 nt, Homo sapiens
  misc_RNA (1)...(19): siRNA sense strand
augcaacacaggugauuga

SEQ ID NO: 2603130 - RNA, 19 nt, Homo sapiens
  misc_RNA (1)...(19): siRNA sense strand
acugcaacacagagggcaa

SEQ ID NO: 2603131 - RNA, 19 nt, Homo sapiens
  misc_RNA (1)...(19): siRNA sense strand
ucgcaucaucucugcuaaa

SEQ ID NO: 2603132 - RNA, 19 nt, Homo sapiens
  misc_RNA (1)...(19): siRNA sense strand
agacauugagagugauaaa

SEQ ID NO: 2603133 - RNA, 19 nt, Homo sapiens
  misc_RNA (1)...(19): siRNA sense strand
ccuaucagacagugguaaa

SEQ ID NO: 2603134 - RNA, 19 nt, Homo sapiens
  misc_RNA (1)...(19): siRNA sense strand
caaugauggcucuggaaau

SEQ ID NO: 2603135 - RNA, 19 nt, Homo sapiens
  misc_RNA (1)...(19): siRNA sense strand
ucaagauagauuugggaau

SEQ ID NO: 2603136 - RNA, 19 nt, Homo sapiens
  misc_RNA (1)...(19): siRNA sense strand
ucgugguauuugugauaaa

SEQ ID NO: 2603137 - RNA, 19 nt, Homo sapiens
  misc_RNA (1)...(19): siRNA sense strand
ugguaaaugucacuggcaa

SEQ ID NO: 2603138 - RNA, 19 nt, Homo sapiens
  misc_RNA (1)...(19): siRNA sense strand
ccgaaucccgggagaagaa

SEQ ID NO: 2603139 - RNA, 19 nt, Homo sapiens
  misc_RNA (1)...(19): siRNA sense strand
ccagacauugagagugaua

SEQ ID NO: 2603140 - RNA, 19 nt, Homo sapiens
  misc_RNA (1)...(19): siRNA sense strand
uuggagugguguuuggaaa

SEQ ID NO: 2603141 - RNA, 19 nt, Homo sapiens
  misc_RNA (1)...(19): siRNA sense strand
ggacaauagaugagucaag

SEQ ID NO: 2603142 - RNA, 19 nt, Homo sapiens
  misc_RNA (1)...(19): siRNA sense strand
agaagaaccgcgagugcau

SEQ ID NO: 2603143 - RNA, 19 nt, Homo sapiens
  misc_RNA (1)...(19): siRNA sense strand
ccgugaggguguaugugaa

SEQ ID NO: 2603144 - RNA, 19 nt, Homo sapiens
  misc_RNA (1)...(19): siRNA sense strand
ggagagcccuggaagccaa

SEQ ID NO: 2603145 - RNA, 19 nt, Homo sapiens
  misc_RNA (1)...(19): siRNA sense strand
ggacuauaccagaggagcu

SEQ ID NO: 2603146 - RNA, 19 nt, Homo sapiens
  misc_RNA (1)...(19): siRNA sense strand
cuucgugguauuugugaua

SEQ ID NO: 2603147 - RNA, 19 nt, Homo sapiens
  misc_RNA (1)...(19): siRNA sense strand
gggagcaauuaugggacaa

SEQ ID NO: 2603148 - RNA, 19 nt, Homo sapiens
  misc_RNA (1)...(19): siRNA sense strand
ggucguuucaagauagauu

SEQ ID NO: 2603149 - RNA, 19 nt, Homo sapiens
  misc_RNA (1)...(19): siRNA sense strand
agauuaugccuguggagga

SEQ ID NO: 2603150 - RNA, 19 nt, Homo sapiens
  misc_RNA (1)...(19): siRNA sense strand
cggagaauugucagcaaaa

SEQ ID NO: 2603151 - RNA, 19 nt, Homo sapiens
  misc_RNA (1)...(19): siRNA sense strand
gugauaaagccugaagauu

SEQ ID NO: 2603152 - RNA, 19 nt, Homo sapiens
  misc_RNA (1)...(19): siRNA sense strand
gguaaaugucacuggcaac

SEQ ID NO: 2603153 - RNA, 19 nt, Homo sapiens
  misc_RNA (1)...(19): siRNA sense strand
ccaggaaggaccggagaau

SEQ ID NO: 2603154 - RNA, 19 nt, Homo sapiens
  misc_RNA (1)...(19): siRNA sense strand
cgcuacagaagaaggauuu

SEQ ID NO: 2603155 - RNA, 19 nt, Homo sapiens
  misc_RNA (1)...(19): siRNA sense strand
auuaaaguggugucugaaa

SEQ ID NO: 2603156 - RNA, 19 nt, Homo sapiens
  misc_RNA (1)...(19): siRNA sense strand
agggagcaauuaugggaca

SEQ ID NO: 2603157 - RNA, 19 nt, Homo sapiens
  misc_RNA (1)...(19): siRNA sense strand
cuggaaauaugguggcauc

SEQ ID NO: 2603158 - RNA, 19 nt, Homo sapiens
  misc_RNA (1)...(19): siRNA sense strand
acaucuuugcuguggagua

SEQ ID NO: 2603159 - RNA, 19 nt, Homo sapiens
  misc_RNA (1)...(19): siRNA sense strand
guucauuaucugagguuuc

SEQ ID NO: 2603160 - RNA, 19 nt, Homo sapiens
  misc_RNA (1)...(19): siRNA sense strand
cccuaaagcaagaggagga

SEQ ID NO: 2603161 - RNA, 19 nt, Homo sapiens
  misc_RNA (1)...(19): siRNA sense strand
gaguaaaugaacuggacca

SEQ ID NO: 2603162 - RNA, 19 nt, Homo sapiens
  misc_RNA (1)...(19): siRNA sense strand
ugagcuaauacgagggaga

SEQ ID NO: 2603163 - RNA, 19 nt, Homo sapiens
  misc_RNA (1)...(19): siRNA sense strand
acuauaaagcaauuggcaa

SEQ ID NO: 2603164 - RNA, 19 nt, Homo sapiens
  misc_RNA (1)...(19): siRNA sense strand
gcaaaauaggagagggaac

SEQ ID NO: 2603165 - RNA, 19 nt, Homo sapiens
  misc_RNA (1)...(19): siRNA sense strand
uggcaaaauaggagaggga

SEQ ID NO: 2603166 - RNA, 19 nt, Homo sapiens
  misc_RNA (1)...(19): siRNA sense strand
cggccuaugucauggaacu

SEQ ID NO: 2603167 - RNA, 19 nt, Homo sapiens
  misc_RNA (1)...(19): siRNA sense strand
aacuaaagcuuucgggagu

SEQ ID NO: 2603168 - RNA, 19 nt, Homo sapiens
  misc_RNA (1)...(19): siRNA sense strand
cuaugaucccgaugagaga

SEQ ID NO: 2603169 - RNA, 19 nt, Homo sapiens
  misc_RNA (1)...(19): siRNA sense strand
auggaauauuucacagaga

SEQ ID NO: 2603170 - RNA, 19 nt, Homo sapiens
  misc_RNA (1)...(19): siRNA sense strand
caguaacagcugccagauu

SEQ ID NO: 2603171 - RNA, 19 nt, Homo sapiens
  misc_RNA (1)...(19): siRNA sense strand
cauguaaacaaaugaagca

SEQ ID NO: 2603172 - RNA, 19 nt, Homo sapiens
  misc_RNA (1)...(19): siRNA sense strand
uggaacugcccaaacuaaa

SEQ ID NO: 2603173 - RNA, 19 nt, Homo sapiens
  misc_RNA (1)...(19): siRNA sense strand
ccaaagaagccacugggaa

SEQ ID NO: 2603174 - RNA, 19 nt, Homo sapiens
  misc_RNA (1)...(19): siRNA sense strand
aggaagaagagcugaagga

SEQ ID NO: 2603175 - RNA, 19 nt, Homo sapiens
  misc_RNA (1)...(19): siRNA sense strand
gaagaagagcugaaggaac

SEQ ID NO: 2603176 - RNA, 19 nt, Homo sapiens
  misc_RNA (1)...(19): siRNA sense strand
caugcaaguaauuggagaa

SEQ ID NO: 2603177 - RNA, 19 nt, Homo sapiens
  misc_RNA (1)...(19): siRNA sense strand
ggauuaucucaaugaucua

SEQ ID NO: 2603178 - RNA, 19 nt, Homo sapiens
  misc_RNA (1)...(19): siRNA sense strand
ugaaggaacauuugagcca

SEQ ID NO: 2603179 - RNA, 19 nt, Homo sapiens
  misc_RNA (1)...(19): siRNA sense strand
ucauuaaggagcugauaca

SEQ ID NO: 2603180 - RNA, 19 nt, Homo sapiens
  misc_RNA (1)...(19): siRNA sense strand
cagaaaaggauuaucucaa

SEQ ID NO: 2603181 - RNA, 19 nt, Homo sapiens
  misc_RNA (1)...(19): siRNA sense strand
ggaugauggcaaagcggga

SEQ ID NO: 2603182 - RNA, 19 nt, Homo sapiens
  misc_RNA (1)...(19): siRNA sense strand
acauugaguccgugcauca

SEQ ID NO: 2603183 - RNA, 19 nt, Homo sapiens
  misc_RNA (1)...(19): siRNA sense strand
gcacauaguauacuggagu

SEQ ID NO: 2603184 - RNA, 19 nt, Homo sapiens
  misc_RNA (1)...(19): siRNA sense strand
ccaugcaaguaauuggaga

SEQ ID NO: 2603185 - RNA, 19 nt, Homo sapiens
  misc_RNA (1)...(19): siRNA sense strand
guguuagggaagugguuca

SEQ ID NO: 2603186 - RNA, 19 nt, Homo sapiens
  misc_RNA (1)...(19): siRNA sense strand
ucucaaugaucuagagcug

SEQ ID NO: 2603187 - RNA, 19 nt, Homo sapiens
  misc_RNA (1)...(19): siRNA sense strand
augaugaagcacauaguau

SEQ ID NO: 2603188 - RNA, 19 nt, Homo sapiens
  misc_RNA (1)...(19): siRNA sense strand
uggcaaagcgggaaaagau

SEQ ID NO: 2603189 - RNA, 19 nt, Homo sapiens
  misc_RNA (1)...(19): siRNA sense strand
gggaaagaaaacaugguca

SEQ ID NO: 2603190 - RNA, 19 nt, Homo sapiens
  misc_RNA (1)...(19): siRNA sense strand
agaaauguuuacaagccaa

SEQ ID NO: 2603191 - RNA, 19 nt, Homo sapiens
  misc_RNA (1)...(19): siRNA sense strand
cagaaggauccgugccaga

SEQ ID NO: 2603192 - RNA, 19 nt, Homo sapiens
  misc_RNA (1)...(19): siRNA sense strand
cagaaauguuuacaagcca

SEQ ID NO: 2603193 - RNA, 19 nt, Homo sapiens
  misc_RNA (1)...(19): siRNA sense strand
acauggaaucaaaguguca

SEQ ID NO: 2603194 - RNA, 19 nt, Homo sapiens
  misc_RNA (1)...(19): siRNA sense strand
acagaaaguggaagagaaa

SEQ ID NO: 2603195 - RNA, 19 nt, Homo sapiens
  misc_RNA (1)...(19): siRNA sense strand
aagugaaggacaaggaaua

SEQ ID NO: 2603196 - RNA, 19 nt, Homo sapiens
  misc_RNA (1)...(19): siRNA sense strand
aaggaaagagagaaggaaa

SEQ ID NO: 2603197 - RNA, 19 nt, Homo sapiens
  misc_RNA (1)...(19): siRNA sense strand
gaguaaaguucuuagcaga

SEQ ID NO: 2603198 - RNA, 19 nt, Homo sapiens
  misc_RNA (1)...(19): siRNA sense strand
agaagaaaauggagaaaga

SEQ ID NO: 2603199 - RNA, 19 nt, Homo sapiens
  misc_RNA (1)...(19): siRNA sense strand
aggaaagagagaaggaaaa

SEQ ID NO: 2603200 - RNA, 19 nt, Homo sapiens
  misc_RNA (1)...(19): siRNA sense strand
gugaugaagacgagaauga

SEQ ID NO: 2603201 - RNA, 19 nt, Homo sapiens
  misc_RNA (1)...(19): siRNA sense strand
ggacaaggaauaugggcuu

SEQ ID NO: 2603202 - RNA, 19 nt, Homo sapiens
  misc_RNA (1)...(19): siRNA sense strand
ccuagagagagaagacaaa

SEQ ID NO: 2603203 - RNA, 19 nt, Homo sapiens
  misc_RNA (1)...(19): siRNA sense strand
acuuuauaguugugggauu

SEQ ID NO: 2603204 - RNA, 19 nt, Homo sapiens
  misc_RNA (1)...(19): siRNA sense strand
cgaucaaggaggcagauua

SEQ ID NO: 2603205 - RNA, 19 nt, Homo sapiens
  misc_RNA (1)...(19): siRNA sense strand
aaggagaaagagaaggaaa

SEQ ID NO: 2603206 - RNA, 19 nt, Homo sapiens
  misc_RNA (1)...(19): siRNA sense strand
aaggagaaagagaaggaaa

SEQ ID NO: 2603207 - RNA, 19 nt, Homo sapiens
  misc_RNA (1)...(19): siRNA sense strand
aagaaaaggaaaaggagaa

SEQ ID NO: 2603208 - RNA, 19 nt, Homo sapiens
  misc_RNA (1)...(19): siRNA sense strand
ggaaaagaaggaagaagaa

SEQ ID NO: 2603209 - RNA, 19 nt, Homo sapiens
  misc_RNA (1)...(19): siRNA sense strand
aaagagaaggaaagagaga

SEQ ID NO: 2603210 - RNA, 19 nt, Homo sapiens
  misc_RNA (1)...(19): siRNA sense strand
uagaagaagaacugaauga

SEQ ID NO: 2603211 - RNA, 19 nt, Homo sapiens
  misc_RNA (1)...(19): siRNA sense strand
ccaguaacacuaacggaaa

SEQ ID NO: 2603212 - RNA, 19 nt, Homo sapiens
  misc_RNA (1)...(19): siRNA sense strand
agaaggaagaagaagaaaa

SEQ ID NO: 2603213 - RNA, 19 nt, Homo sapiens
  misc_RNA (1)...(19): siRNA sense strand
ggaacaagucagcgagcca

SEQ ID NO: 2603214 - RNA, 19 nt, Homo sapiens
  misc_RNA (1)...(19): siRNA sense strand
caguaacacuaacggaaau

SEQ ID NO: 2603215 - RNA, 19 nt, Homo sapiens
  misc_RNA (1)...(19): siRNA sense strand
aagaguuccuagagagaga

SEQ ID NO: 2603216 - RNA, 19 nt, Homo sapiens
  misc_RNA (1)...(19): siRNA sense strand
ggaaaauauggcugaacaa

SEQ ID NO: 2603217 - RNA, 19 nt, Homo sapiens
  misc_RNA (1)...(19): siRNA sense strand
ugaugaaggcaaugaugaa

SEQ ID NO: 2603218 - RNA, 19 nt, Homo sapiens
  misc_RNA (1)...(19): siRNA sense strand
caacaguaucugagaaugu

SEQ ID NO: 2603219 - RNA, 19 nt, Homo sapiens
  misc_RNA (1)...(19): siRNA sense strand
acgagaaugaugaaggcaa

SEQ ID NO: 2603220 - RNA, 19 nt, Homo sapiens
  misc_RNA (1)...(19): siRNA sense strand
cggaagaggauauagcaga

SEQ ID NO: 2603221 - RNA, 19 nt, Homo sapiens
  misc_RNA (1)...(19): siRNA sense strand
cuacaaaaccugaauggaa

SEQ ID NO: 2603222 - RNA, 19 nt, Homo sapiens
  misc_RNA (1)...(19): siRNA sense strand
auaagaaacacgagaacca

SEQ ID NO: 2603223 - RNA, 19 nt, Homo sapiens
  misc_RNA (1)...(19): siRNA sense strand
gguuagacagaaaguggaa

SEQ ID NO: 2603224 - RNA, 19 nt, Homo sapiens
  misc_RNA (1)...(19): siRNA sense strand
aggaaaaggagaaagagaa

SEQ ID NO: 2603225 - RNA, 19 nt, Homo sapiens
  misc_RNA (1)...(19): siRNA sense strand
gagcacccaaggagagaaa

SEQ ID NO: 2603226 - RNA, 19 nt, Homo sapiens
  misc_RNA (1)...(19): siRNA sense strand
agaagauuccgauaagaaa

SEQ ID NO: 2603227 - RNA, 19 nt, Homo sapiens
  misc_RNA (1)...(19): siRNA sense strand
gggaagcgggagugaugaa

SEQ ID NO: 2603228 - RNA, 19 nt, Homo sapiens
  misc_RNA (1)...(19): siRNA sense strand
aagaagauuccgauaagaa

SEQ ID NO: 2603229 - RNA, 19 nt, Homo sapiens
  misc_RNA (1)...(19): siRNA sense strand
ccgauaagaaacacgagaa

SEQ ID NO: 2603230 - RNA, 19 nt, Homo sapiens
  misc_RNA (1)...(19): siRNA sense strand
ugguaauggaagugaagau

SEQ ID NO: 2603231 - RNA, 19 nt, Homo sapiens
  misc_RNA (1)...(19): siRNA sense strand
ccauggaagagcugaauga

SEQ ID NO: 2603232 - RNA, 19 nt, Homo sapiens
  misc_RNA (1)...(19): siRNA sense strand
agacaaugaggaugaugaa

SEQ ID NO: 2603233 - RNA, 19 nt, Homo sapiens
  misc_RNA (1)...(19): siRNA sense strand
acaaugaggaugaugaaga

SEQ ID NO: 2603234 - RNA, 19 nt, Homo sapiens
  misc_RNA (1)...(19): siRNA sense strand
guuauggaguugauggaga

SEQ ID NO: 2603235 - RNA, 19 nt, Homo sapiens
  misc_RNA (1)...(19): siRNA sense strand
ggagagaaaaccaaguaaa

SEQ ID NO: 2603236 - RNA, 19 nt, Homo sapiens
  misc_RNA (1)...(19): siRNA sense strand
cuuuauaguugugggauuu

SEQ ID NO: 2603237 - RNA, 19 nt, Homo sapiens
  misc_RNA (1)...(19): siRNA sense strand
gaguugauggagagaguga

SEQ ID NO: 2603238 - RNA, 19 nt, Homo sapiens
  misc_RNA (1)...(19): siRNA sense strand
uggaaaagaaggaagaaga

SEQ ID NO: 2603239 - RNA, 19 nt, Homo sapiens
  misc_RNA (1)...(19): siRNA sense strand
gugaggacgcugaugaaau

SEQ ID NO: 2603240 - RNA, 19 nt, Homo sapiens
  misc_RNA (1)...(19): siRNA sense strand
gaaggaagaagaagaaaau

SEQ ID NO: 2603241 - RNA, 19 nt, Homo sapiens
  misc_RNA (1)...(19): siRNA sense strand
ugcaagaagaagaagagua

SEQ ID NO: 2603242 - RNA, 19 nt, Homo sapiens
  misc_RNA (1)...(19): siRNA sense strand
uggaguugauggagagagu

SEQ ID NO: 2603243 - RNA, 19 nt, Homo sapiens
  misc_RNA (1)...(19): siRNA sense strand
caccagaacccaagaagau

SEQ ID NO: 2603244 - RNA, 19 nt, Homo sapiens
  misc_RNA (1)...(19): siRNA sense strand
aguaaagagaaaagggaga

SEQ ID NO: 2603245 - RNA, 19 nt, Homo sapiens
  misc_RNA (1)...(19): siRNA sense strand
gagacaaugaggaugauga

SEQ ID NO: 2603246 - RNA, 19 nt, Homo sapiens
  misc_RNA (1)...(19): siRNA sense strand
uggaguagccuuuggagau

SEQ ID NO: 2603247 - RNA, 19 nt, Homo sapiens
  misc_RNA (1)...(19): siRNA sense strand
cccaagaagauuccgauaa

SEQ ID NO: 2603248 - RNA, 19 nt, Homo sapiens
  misc_RNA (1)...(19): siRNA sense strand
ggaacuggagacaaugaaa

SEQ ID NO: 2603249 - RNA, 19 nt, Homo sapiens
  misc_RNA (1)...(19): siRNA sense strand
ccuguauguuccuggagua

SEQ ID NO: 2603250 - RNA, 19 nt, Homo sapiens
  misc_RNA (1)...(19): siRNA sense strand
ucguaaacuuaugcggaaa

SEQ ID NO: 2603251 - RNA, 19 nt, Homo sapiens
  misc_RNA (1)...(19): siRNA sense strand
gugugauaccuguaaacua

SEQ ID NO: 2603252 - RNA, 19 nt, Homo sapiens
  misc_RNA (1)...(19): siRNA sense strand
ggagugaugaagacgagaa

SEQ ID NO: 2603253 - RNA, 19 nt, Homo sapiens
  misc_RNA (1)...(19): siRNA sense strand
ccuaccagauggaaccaaa

SEQ ID NO: 2603254 - RNA, 19 nt, Homo sapiens
  misc_RNA (1)...(19): siRNA sense strand
acagaaaguggaagagaaa

SEQ ID NO: 2603255 - RNA, 19 nt, Homo sapiens
  misc_RNA (1)...(19): siRNA sense strand
aagugaaggacaaggaaua

SEQ ID NO: 2603256 - RNA, 19 nt, Homo sapiens
  misc_RNA (1)...(19): siRNA sense strand
aaggaaagagagaaggaaa

SEQ ID NO: 2603257 - RNA, 19 nt, Homo sapiens
  misc_RNA (1)...(19): siRNA sense strand
gaguaaaguucuuagcaga

SEQ ID NO: 2603258 - RNA, 19 nt, Homo sapiens
  misc_RNA (1)...(19): siRNA sense strand
agaagaaaauggagaaaga

SEQ ID NO: 2603259 - RNA, 19 nt, Homo sapiens
  misc_RNA (1)...(19): siRNA sense strand
aggaaagagagaaggaaaa

SEQ ID NO: 2603260 - RNA, 19 nt, Homo sapiens
  misc_RNA (1)...(19): siRNA sense strand
gugaugaagacgagaauga

SEQ ID NO: 2603261 - RNA, 19 nt, Homo sapiens
  misc_RNA (1)...(19): siRNA sense strand
ggacaaggaauaugggcuu

SEQ ID NO: 2603262 - RNA, 19 nt, Homo sapiens
  misc_RNA (1)...(19): siRNA sense strand
ccuagagagagaagacaaa

SEQ ID NO: 2603263 - RNA, 19 nt, Homo sapiens
  misc_RNA (1)...(19): siRNA sense strand
acuuuauaguugugggauu

SEQ ID NO: 2603264 - RNA, 19 nt, Homo sapiens
  misc_RNA (1)...(19): siRNA sense strand
cgaucaaggaggcagauua

SEQ ID NO: 2603265 - RNA, 19 nt, Homo sapiens
  misc_RNA (1)...(19): siRNA sense strand
aaggagaaagagaaggaaa

SEQ ID NO: 2603266 - RNA, 19 nt, Homo sapiens
  misc_RNA (1)...(19): siRNA sense strand
aagaaaaggaaaaggagaa

SEQ ID NO: 2603267 - RNA, 19 nt, Homo sapiens
  misc_RNA (1)...(19): siRNA sense strand
ggaaaagaaggaagaagaa

SEQ ID NO: 2603268 - RNA, 19 nt, Homo sapiens
  misc_RNA (1)...(19): siRNA sense strand
aaagagaaggaaagagaga

SEQ ID NO: 2603269 - RNA, 19 nt, Homo sapiens
  misc_RNA (1)...(19): siRNA sense strand
uagaagaagaacugaauga

SEQ ID NO: 2603270 - RNA, 19 nt, Homo sapiens
  misc_RNA (1)...(19): siRNA sense strand
ccaguaacacuaacggaaa

SEQ ID NO: 2603271 - RNA, 19 nt, Homo sapiens
  misc_RNA (1)...(19): siRNA sense strand
agaaggaagaagaagaaaa

SEQ ID NO: 2603272 - RNA, 19 nt, Homo sapiens
  misc_RNA (1)...(19): siRNA sense strand
ggaacaagucagcgagcca

SEQ ID NO: 2603273 - RNA, 19 nt, Homo sapiens
  misc_RNA (1)...(19): siRNA sense strand
caguaacacuaacggaaau

SEQ ID NO: 2603274 - RNA, 19 nt, Homo sapiens
  misc_RNA (1)...(19): siRNA sense strand
aagaguuccuagagagaga

SEQ ID NO: 2603275 - RNA, 19 nt, Homo sapiens
  misc_RNA (1)...(19): siRNA sense strand
ggaaaauauggcugaacaa

SEQ ID NO: 2603276 - RNA, 19 nt, Homo sapiens
  misc_RNA (1)...(19): siRNA sense strand
ugaugaaggcaaugaugaa

SEQ ID NO: 2603277 - RNA, 19 nt, Homo sapiens
  misc_RNA (1)...(19): siRNA sense strand
caacaguaucugagaaugu

SEQ ID NO: 2603278 - RNA, 19 nt, Homo sapiens
  misc_RNA (1)...(19): siRNA sense strand
acgagaaugaugaaggcaa

SEQ ID NO: 2603279 - RNA, 19 nt, Homo sapiens
  misc_RNA (1)...(19): siRNA sense strand
cggaagaggauauagcaga

SEQ ID NO: 2603280 - RNA, 19 nt, Homo sapiens
  misc_RNA (1)...(19): siRNA sense strand
cuacaaaaccugaauggaa

SEQ ID NO: 2603281 - RNA, 19 nt, Homo sapiens
  misc_RNA (1)...(19): siRNA sense strand
auaagaaacacgagaacca

SEQ ID NO: 2603282 - RNA, 19 nt, Homo sapiens
  misc_RNA (1)...(19): siRNA sense strand
gguuagacagaaaguggaa

SEQ ID NO: 2603283 - RNA, 19 nt, Homo sapiens
  misc_RNA (1)...(19): siRNA sense strand
aggaaaaggagaaagagaa

SEQ ID NO: 2603284 - RNA, 19 nt, Homo sapiens
  misc_RNA (1)...(19): siRNA sense strand
gagcacccaaggagagaaa

SEQ ID NO: 2603285 - RNA, 19 nt, Homo sapiens
  misc_RNA (1)...(19): siRNA sense strand
agaagauuccgauaagaaa

SEQ ID NO: 2603286 - RNA, 19 nt, Homo sapiens
  misc_RNA (1)...(19): siRNA sense strand
gggaagcgggagugaugaa

SEQ ID NO: 2603287 - RNA, 19 nt, Homo sapiens
  misc_RNA (1)...(19): siRNA sense strand
aagaagauuccgauaagaa

SEQ ID NO: 2603288 - RNA, 19 nt, Homo sapiens
  misc_RNA (1)...(19): siRNA sense strand
ccgauaagaaacacgagaa

SEQ ID NO: 2603289 - RNA, 19 nt, Homo sapiens
  misc_RNA (1)...(19): siRNA sense strand
ugguaauggaagugaagau

SEQ ID NO: 2603290 - RNA, 19 nt, Homo sapiens
  misc_RNA (1)...(19): siRNA sense strand
ccauggaagagcugaauga

SEQ ID NO: 2603291 - RNA, 19 nt, Homo sapiens
  misc_RNA (1)...(19): siRNA sense strand
agacaaugaggaugaugaa

SEQ ID NO: 2603292 - RNA, 19 nt, Homo sapiens
  misc_RNA (1)...(19): siRNA sense strand
acaaugaggaugaugaaga

SEQ ID NO: 2603293 - RNA, 19 nt, Homo sapiens
  misc_RNA (1)...(19): siRNA sense strand
guuauggaguugauggaga

SEQ ID NO: 2603294 - RNA, 19 nt, Homo sapiens
  misc_RNA (1)...(19): siRNA sense strand
ggagagaaaaccaaguaaa

SEQ ID NO: 2603295 - RNA, 19 nt, Homo sapiens
  misc_RNA (1)...(19): siRNA sense strand
cuuuauaguugugggauuu

SEQ ID NO: 2603296 - RNA, 19 nt, Homo sapiens
  misc_RNA (1)...(19): siRNA sense strand
gaguugauggagagaguga

SEQ ID NO: 2603297 - RNA, 19 nt, Homo sapiens
  misc_RNA (1)...(19): siRNA sense strand
uggaaaagaaggaagaaga

SEQ ID NO: 2603298 - RNA, 19 nt, Homo sapiens
  misc_RNA (1)...(19): siRNA sense strand
gugaggacgcugaugaaau

SEQ ID NO: 2603299 - RNA, 19 nt, Homo sapiens
  misc_RNA (1)...(19): siRNA sense strand
gaaggaagaagaagaaaau

SEQ ID NO: 2603300 - RNA, 19 nt, Homo sapiens
  misc_RNA (1)...(19): siRNA sense strand
ugcaagaagaagaagagua

SEQ ID NO: 2603301 - RNA, 19 nt, Homo sapiens
  misc_RNA (1)...(19): siRNA sense strand
uggaguugauggagagagu

SEQ ID NO: 2603302 - RNA, 19 nt, Homo sapiens
  misc_RNA (1)...(19): siRNA sense strand
caccagaacccaagaagau

SEQ ID NO: 2603303 - RNA, 19 nt, Homo sapiens
  misc_RNA (1)...(19): siRNA sense strand
aguaaagagaaaagggaga

SEQ ID NO: 2603304 - RNA, 19 nt, Homo sapiens
  misc_RNA (1)...(19): siRNA sense strand
gagacaaugaggaugauga

SEQ ID NO: 2603305 - RNA, 19 nt, Homo sapiens
  misc_RNA (1)...(19): siRNA sense strand
uggaguagccuuuggagau

SEQ ID NO: 2603306 - RNA, 19 nt, Homo sapiens
  misc_RNA (1)...(19): siRNA sense strand
cccaagaagauuccgauaa

SEQ ID NO: 2603307 - RNA, 19 nt, Homo sapiens
  misc_RNA (1)...(19): siRNA sense strand
ggaacuggagacaaugaaa

SEQ ID NO: 2603308 - RNA, 19 nt, Homo sapiens
  misc_RNA (1)...(19): siRNA sense strand
ccuguauguuccuggagua

SEQ ID NO: 2603309 - RNA, 19 nt, Homo sapiens
  misc_RNA (1)...(19): siRNA sense strand
ucguaaacuuaugcggaaa

SEQ ID NO: 2603310 - RNA, 19 nt, Homo sapiens
  misc_RNA (1)...(19): siRNA sense strand
gugugauaccuguaaacua

SEQ ID NO: 2603311 - RNA, 19 nt, Homo sapiens
  misc_RNA (1)...(19): siRNA sense strand
ggagugaugaagacgagaa

SEQ ID NO: 2603312 - RNA, 19 nt, Homo sapiens
  misc_RNA (1)...(19): siRNA sense strand
ccuaccagauggaaccaaa

SEQ ID NO: 2603313 - RNA, 19 nt, Homo sapiens
  misc_RNA (1)...(19): siRNA sense strand
aagcagaacucauggggau

SEQ ID NO: 2603314 - RNA, 19 nt, Homo sapiens
  misc_RNA (1)...(19): siRNA sense strand
gaagggaaguuuaaggaca

SEQ ID NO: 2603315 - RNA, 19 nt, Homo sapiens
  misc_RNA (1)...(19): siRNA sense strand
cugcagggcccaaggucaa

SEQ ID NO: 2603316 - RNA, 19 nt, Homo sapiens
  misc_RNA (1)...(19): siRNA sense strand
ugacauacacacaguugaa

SEQ ID NO: 2603317 - RNA, 19 nt, Homo sapiens
  misc_RNA (1)...(19): siRNA sense strand
ugaaaucagaagagacagu

SEQ ID NO: 2603318 - RNA, 19 nt, Homo sapiens
  misc_RNA (1)...(19): siRNA sense strand
gcccaaggucaacggaaca

SEQ ID NO: 2603319 - RNA, 19 nt, Homo sapiens
  misc_RNA (1)...(19): siRNA sense strand
augaaaagcuggagugaca

SEQ ID NO: 2603320 - RNA, 19 nt, Homo sapiens
  misc_RNA (1)...(19): siRNA sense strand
gcucaaauaccaagggaag

SEQ ID NO: 2603321 - RNA, 19 nt, Homo sapiens
  misc_RNA (1)...(19): siRNA sense strand
gaaaaggaguucugcccaa

SEQ ID NO: 2603322 - RNA, 19 nt, Homo sapiens
  misc_RNA (1)...(19): siRNA sense strand
ggacuuggguggaugguuc

SEQ ID NO: 2603323 - RNA, 19 nt, Homo sapiens
  misc_RNA (1)...(19): siRNA sense strand
ggaaguuguucaaaugcca

SEQ ID NO: 2603324 - RNA, 19 nt, Homo sapiens
  misc_RNA (1)...(19): siRNA sense strand
gccauuaaggaaagcaaaa

SEQ ID NO: 2603325 - RNA, 19 nt, Homo sapiens
  misc_RNA (1)...(19): siRNA sense strand
gugacguugcacugguaua

SEQ ID NO: 2603326 - RNA, 19 nt, Homo sapiens
  misc_RNA (1)...(19): siRNA sense strand
cucagggaguauugcuaaa

SEQ ID NO: 2603327 - RNA, 19 nt, Homo sapiens
  misc_RNA (1)...(19): siRNA sense strand
ggcucaaauaccaagggaa

SEQ ID NO: 2603328 - RNA, 19 nt, Homo sapiens
  misc_RNA (1)...(19): siRNA sense strand
cuacguauggauugggcuu

SEQ ID NO: 2603329 - RNA, 19 nt, Homo sapiens
  misc_RNA (1)...(19): siRNA sense strand
ccaaguuguuugugggcuu

SEQ ID NO: 2603330 - RNA, 19 nt, Homo sapiens
  misc_RNA (1)...(19): siRNA sense strand
ccgacugcaucguggguga

SEQ ID NO: 2603331 - RNA, 19 nt, Homo sapiens
  misc_RNA (1)...(19): siRNA sense strand
ggcuuuagcuccauggaca

SEQ ID NO: 2603332 - RNA, 19 nt, Homo sapiens
  misc_RNA (1)...(19): siRNA sense strand
ccaacagccugaagccaga

SEQ ID NO: 2603333 - RNA, 19 nt, Homo sapiens
  misc_RNA (1)...(19): siRNA sense strand
ccacagauuugcaggacag

SEQ ID NO: 2603334 - RNA, 19 nt, Homo sapiens
  misc_RNA (1)...(19): siRNA sense strand
uggagauguggcugagcua

SEQ ID NO: 2603335 - RNA, 19 nt, Homo sapiens
  misc_RNA (1)...(19): siRNA sense strand
ucuacagccuggagggcca

SEQ ID NO: 2603336 - RNA, 19 nt, Homo sapiens
  misc_RNA (1)...(19): siRNA sense strand
cccaggaugagaauggaaa

SEQ ID NO: 2603337 - RNA, 19 nt, Homo sapiens
  misc_RNA (1)...(19): siRNA sense strand
ccugaauccguucgaguau

SEQ ID NO: 2603338 - RNA, 19 nt, Homo sapiens
  misc_RNA (1)...(19): siRNA sense strand
cguucgaguauuacauauu

SEQ ID NO: 2603339 - RNA, 19 nt, Homo sapiens
  misc_RNA (1)...(19): siRNA sense strand
ccaaguuguuugugggcuu

SEQ ID NO: 2603340 - RNA, 19 nt, Homo sapiens
  misc_RNA (1)...(19): siRNA sense strand
ccgacugcaucguggguga

SEQ ID NO: 2603341 - RNA, 19 nt, Homo sapiens
  misc_RNA (1)...(19): siRNA sense strand
ggcuuuagcuccauggaca

SEQ ID NO: 2603342 - RNA, 19 nt, Homo sapiens
  misc_RNA (1)...(19): siRNA sense strand
ccaacagccugaagccaga

SEQ ID NO: 2603343 - RNA, 19 nt, Homo sapiens
  misc_RNA (1)...(19): siRNA sense strand
ccacagauuugcaggacag

SEQ ID NO: 2603344 - RNA, 19 nt, Homo sapiens
  misc_RNA (1)...(19): siRNA sense strand
uggagauguggcugagcua

SEQ ID NO: 2603345 - RNA, 19 nt, Homo sapiens
  misc_RNA (1)...(19): siRNA sense strand
ucuacagccuggagggcca

SEQ ID NO: 2603346 - RNA, 19 nt, Homo sapiens
  misc_RNA (1)...(19): siRNA sense strand
cccaggaugagaauggaaa

SEQ ID NO: 2603347 - RNA, 19 nt, Homo sapiens
  misc_RNA (1)...(19): siRNA sense strand
acaauggcacagugggauu

SEQ ID NO: 2603348 - RNA, 19 nt, Homo sapiens
  misc_RNA (1)...(19): siRNA sense strand
ugacaauguauccggugaa

SEQ ID NO: 2603349 - RNA, 19 nt, Homo sapiens
  misc_RNA (1)...(19): siRNA sense strand
uuguuauguugcuggaauu

SEQ ID NO: 2603350 - RNA, 19 nt, Homo sapiens
  misc_RNA (1)...(19): siRNA sense strand
auacaauggcacaguggga

SEQ ID NO: 2603351 - RNA, 19 nt, Homo sapiens
  misc_RNA (1)...(19): siRNA sense strand
gaauaaaagcaucugggau

SEQ ID NO: 2603352 - RNA, 19 nt, Homo sapiens
  misc_RNA (1)...(19): siRNA sense strand
cugcagggcccaaggucaa

SEQ ID NO: 2603353 - RNA, 19 nt, Homo sapiens
  misc_RNA (1)...(19): siRNA sense strand
aggaaacagaacagcgaau

SEQ ID NO: 2603354 - RNA, 19 nt, Homo sapiens
  misc_RNA (1)...(19): siRNA sense strand
accaagagucugcaggaaa

SEQ ID NO: 2603355 - RNA, 19 nt, Homo sapiens
  misc_RNA (1)...(19): siRNA sense strand
ugacauacacacaguugaa

SEQ ID NO: 2603356 - RNA, 19 nt, Homo sapiens
  misc_RNA (1)...(19): siRNA sense strand
caucgugaucauaggucua

SEQ ID NO: 2603357 - RNA, 19 nt, Homo sapiens
  misc_RNA (1)...(19): siRNA sense strand
gcaggaaacagaacagcga

SEQ ID NO: 2603358 - RNA, 19 nt, Homo sapiens
  misc_RNA (1)...(19): siRNA sense strand
ugaaaucagaagagacagu

SEQ ID NO: 2603359 - RNA, 19 nt, Homo sapiens
  misc_RNA (1)...(19): siRNA sense strand
ggaccaagagucugcagga

SEQ ID NO: 2603360 - RNA, 19 nt, Homo sapiens
  misc_RNA (1)...(19): siRNA sense strand
gcccaaggucaacggaaca

SEQ ID NO: 2603361 - RNA, 19 nt, Homo sapiens
  misc_RNA (1)...(19): siRNA sense strand
ugucaagagccgaaggaau

SEQ ID NO: 2603362 - RNA, 19 nt, Homo sapiens
  misc_RNA (1)...(19): siRNA sense strand
agaaguuaaaggagagauu

SEQ ID NO: 2603363 - RNA, 19 nt, Homo sapiens
  misc_RNA (1)...(19): siRNA sense strand
ccugaagacaagaaagcaa

SEQ ID NO: 2603364 - RNA, 19 nt, Homo sapiens
  misc_RNA (1)...(19): siRNA sense strand
ccuagagaaccgagcggaa

SEQ ID NO: 2603365 - RNA, 19 nt, Homo sapiens
  misc_RNA (1)...(19): siRNA sense strand
ccaacagccuccugcgaga

SEQ ID NO: 2603366 - RNA, 19 nt, Homo sapiens
  misc_RNA (1)...(19): siRNA sense strand
aggagagauugcucguaaa

SEQ ID NO: 2603367 - RNA, 19 nt, Homo sapiens
  misc_RNA (1)...(19): siRNA sense strand
gaaccgagcggaacgggaa

SEQ ID NO: 2603368 - RNA, 19 nt, Homo sapiens
  misc_RNA (1)...(19): siRNA sense strand
auccagaaguuaaaggaga

SEQ ID NO: 2603369 - RNA, 19 nt, Homo sapiens
  misc_RNA (1)...(19): siRNA sense strand
aaacaugucaagagccgaa

SEQ ID NO: 2603370 - RNA, 19 nt, Homo sapiens
  misc_RNA (1)...(19): siRNA sense strand
agaacagaaagaugugaau

SEQ ID NO: 2603371 - RNA, 19 nt, Homo sapiens
  misc_RNA (1)...(19): siRNA sense strand
cggaacgggaaaucagcaa

SEQ ID NO: 2603372 - RNA, 19 nt, Homo sapiens
  misc_RNA (1)...(19): siRNA sense strand
cugaagacaagaaagcaau

SEQ ID NO: 2603373 - RNA, 19 nt, Homo sapiens
  misc_RNA (1)...(19): siRNA sense strand
gcacuagugauucgcggua

SEQ ID NO: 2603374 - RNA, 19 nt, Homo sapiens
  misc_RNA (1)...(19): siRNA sense strand
aagaaagcaauacgaucaa

SEQ ID NO: 2603375 - RNA, 19 nt, Homo sapiens
  misc_RNA (1)...(19): siRNA sense strand
gagaagagcaagagcguca

SEQ ID NO: 2603376 - RNA, 19 nt, Homo sapiens
  misc_RNA (1)...(19): siRNA sense strand
gaggaaugagagagaccaa

SEQ ID NO: 2603377 - RNA, 19 nt, Homo sapiens
  misc_RNA (1)...(19): siRNA sense strand
uuuacaaggagaagagcaa

SEQ ID NO: 2603378 - RNA, 19 nt, Homo sapiens
  misc_RNA (1)...(19): siRNA sense strand
ccagacgaggagugaggaa

SEQ ID NO: 2603379 - RNA, 19 nt, Homo sapiens
  misc_RNA (1)...(19): siRNA sense strand
aggcgaucgaggagugcaa

SEQ ID NO: 2603380 - RNA, 19 nt, Homo sapiens
  misc_RNA (1)...(19): siRNA sense strand
aggagugaggaaugagaga

SEQ ID NO: 2603381 - RNA, 19 nt, Homo sapiens
  misc_RNA (1)...(19): siRNA sense strand
gcucacagcuacaagggaa

SEQ ID NO: 2603382 - RNA, 19 nt, Homo sapiens
  misc_RNA (1)...(19): siRNA sense strand
gaucaaaacaaguaggcaa

SEQ ID NO: 2603383 - RNA, 19 nt, Homo sapiens
  misc_RNA (1)...(19): siRNA sense strand
cuucaacaguacagagcau

SEQ ID NO: 2603384 - RNA, 19 nt, Homo sapiens
  misc_RNA (1)...(19): siRNA sense strand
gaaucagacacuuggaaaa

SEQ ID NO: 2603385 - RNA, 19 nt, Homo sapiens
  misc_RNA (1)...(19): siRNA sense strand
gggaaagaaaagaugaaga

SEQ ID NO: 2603386 - RNA, 19 nt, Homo sapiens
  misc_RNA (1)...(19): siRNA sense strand
gcgucagccuagaagcaau

SEQ ID NO: 2603387 - RNA, 19 nt, Homo sapiens
  misc_RNA (1)...(19): siRNA sense strand
agaugaagaaggaacugaa

SEQ ID NO: 2603388 - RNA, 19 nt, Homo sapiens
  misc_RNA (1)...(19): siRNA sense strand
aguacuucuuccugggauu

SEQ ID NO: 2603389 - RNA, 19 nt, Homo sapiens
  misc_RNA (1)...(19): siRNA sense strand
ggcagaaaccaaaaugaaa

SEQ ID NO: 2603390 - RNA, 19 nt, Homo sapiens
  misc_RNA (1)...(19): siRNA sense strand
ccuagaagcaauggcgauu

SEQ ID NO: 2603391 - RNA, 19 nt, Homo sapiens
  misc_RNA (1)...(19): siRNA sense strand
acaacaacaacauggcuau

SEQ ID NO: 2603392 - RNA, 19 nt, Homo sapiens
  misc_RNA (1)...(19): siRNA sense strand
acaacauggcuaugcuaau

SEQ ID NO: 2603393 - RNA, 19 nt, Homo sapiens
  misc_RNA (1)...(19): siRNA sense strand
aaaggaugucugugcggaa

SEQ ID NO: 2603394 - RNA, 19 nt, Homo sapiens
  misc_RNA (1)...(19): siRNA sense strand
cauugaaaacacaagcaaa

SEQ ID NO: 2603395 - RNA, 19 nt, Homo sapiens
  misc_RNA (1)...(19): siRNA sense strand
cggaaaacaacaacaacau

SEQ ID NO: 2603396 - RNA, 19 nt, Homo sapiens
  misc_RNA (1)...(19): siRNA sense strand
cucacagcuacaagggaaa

SEQ ID NO: 2603397 - RNA, 19 nt, Homo sapiens
  misc_RNA (1)...(19): siRNA sense strand
gaaaagaugaagaaggaac

SEQ ID NO: 2603398 - RNA, 19 nt, Homo sapiens
  misc_RNA (1)...(19): siRNA sense strand
aagaaguagagaagagaga

SEQ ID NO: 2603399 - RNA, 19 nt, Homo sapiens
  misc_RNA (1)...(19): siRNA sense strand
aagcaguaguagugagucu

SEQ ID NO: 2603400 - RNA, 19 nt, Homo sapiens
  misc_RNA (1)...(19): siRNA sense strand
guuggaaccuccugggcau

SEQ ID NO: 2603401 - RNA, 19 nt, Homo sapiens
  misc_RNA (1)...(19): siRNA sense strand
gagauuaugucaacggacu

SEQ ID NO: 2603402 - RNA, 19 nt, Homo sapiens
  misc_RNA (1)...(19): siRNA sense strand
uggcacuuaaucagggaaa

SEQ ID NO: 2603403 - RNA, 19 nt, Homo sapiens
  misc_RNA (1)...(19): siRNA sense strand
gaaguggguuacuggguca

SEQ ID NO: 2603404 - RNA, 19 nt, Homo sapiens
  misc_RNA (1)...(19): siRNA sense strand
gguuacugggucagaugaa

SEQ ID NO: 2603405 - RNA, 19 nt, Homo sapiens
  misc_RNA (1)...(19): siRNA sense strand
ccauuuaccaggagaugca

SEQ ID NO: 2603406 - RNA, 19 nt, Homo sapiens
  misc_RNA (1)...(19): siRNA sense strand
aaggagaaacucaagucaa

SEQ ID NO: 2603407 - RNA, 19 nt, Homo sapiens
  misc_RNA (1)...(19): siRNA sense strand
uuaccaagcgaaggagaaa

SEQ ID NO: 2603408 - RNA, 19 nt, Homo sapiens
  misc_RNA (1)...(19): siRNA sense strand
cgaguggugagaaggagaa

SEQ ID NO: 2603409 - RNA, 19 nt, Homo sapiens
  misc_RNA (1)...(19): siRNA sense strand
cagaacaaauacuggcaac

SEQ ID NO: 2603410 - RNA, 19 nt, Homo sapiens
  misc_RNA (1)...(19): siRNA sense strand
agcuaaaggaagcagaaca

SEQ ID NO: 2603411 - RNA, 19 nt, Homo sapiens
  misc_RNA (1)...(19): siRNA sense strand
aagcgaaggagaaacucaa

SEQ ID NO: 2603412 - RNA, 19 nt, Homo sapiens
  misc_RNA (1)...(19): siRNA sense strand
ccacaguauccauggcagu

SEQ ID NO: 2603413 - RNA, 19 nt, Homo sapiens
  misc_RNA (1)...(19): siRNA sense strand
ccaaaucauaguagugacu

SEQ ID NO: 2603414 - RNA, 19 nt, Homo sapiens
  misc_RNA (1)...(19): siRNA sense strand
ggaagaggcugguggacga

SEQ ID NO: 2603415 - RNA, 19 nt, Homo sapiens
  misc_RNA (1)...(19): siRNA sense strand
cuucgaagguacauggcau

SEQ ID NO: 2603416 - RNA, 19 nt, Homo sapiens
  misc_RNA (1)...(19): siRNA sense strand
gaccuaaagucauguggca

SEQ ID NO: 2603417 - RNA, 19 nt, Homo sapiens
  misc_RNA (1)...(19): siRNA sense strand
ccgaauuacagaagacgaa

SEQ ID NO: 2603418 - RNA, 19 nt, Homo sapiens
  misc_RNA (1)...(19): siRNA sense strand
aggacauggcagagggaga

SEQ ID NO: 2603419 - RNA, 19 nt, Homo sapiens
  misc_RNA (1)...(19): siRNA sense strand
acgaagaggcagccaacaa

SEQ ID NO: 2603420 - RNA, 19 nt, Homo sapiens
  misc_RNA (1)...(19): siRNA sense strand
aaagauaaauccugggcca

SEQ ID NO: 2603421 - RNA, 19 nt, Homo sapiens
  misc_RNA (1)...(19): siRNA sense strand
gcuuuagagauaagucaaa

SEQ ID NO: 2603422 - RNA, 19 nt, Homo sapiens
  misc_RNA (1)...(19): siRNA sense strand
gggccaacuggaugaggua

SEQ ID NO: 2603423 - RNA, 19 nt, Homo sapiens
  misc_RNA (1)...(19): siRNA sense strand
gaaagugaauccagggaac

SEQ ID NO: 2603424 - RNA, 19 nt, Homo sapiens
  misc_RNA (1)...(19): siRNA sense strand
ggagcuguagagugggaaa

SEQ ID NO: 2603425 - RNA, 19 nt, Homo sapiens
  misc_RNA (1)...(19): siRNA sense strand
aggacagugcaguggacaa

SEQ ID NO: 2603426 - RNA, 19 nt, Homo sapiens
  misc_RNA (1)...(19): siRNA sense strand
ggcuuuagcgauaggucaa

SEQ ID NO: 2603427 - RNA, 19 nt, Homo sapiens
  misc_RNA (1)...(19): siRNA sense strand
aaccaaagccagagaucca

SEQ ID NO: 2603428 - RNA, 19 nt, Homo sapiens
  misc_RNA (1)...(19): siRNA sense strand
aauaaaaggacauggcaga

SEQ ID NO: 2603429 - RNA, 19 nt, Homo sapiens
  misc_RNA (1)...(19): siRNA sense strand
uggcagagggagauuucaa

SEQ ID NO: 2603430 - RNA, 19 nt, Homo sapiens
  misc_RNA (1)...(19): siRNA sense strand
gggcuuuagcaauaaguca

SEQ ID NO: 2603431 - RNA, 19 nt, Homo sapiens
  misc_RNA (1)...(19): siRNA sense strand
gggcuuuagcaauaaguca

SEQ ID NO: 2603432 - RNA, 19 nt, Homo sapiens
  misc_RNA (1)...(19): siRNA sense strand
gaguauggaaugaggcauc

SEQ ID NO: 2603433 - RNA, 19 nt, Homo sapiens
  misc_RNA (1)...(19): siRNA sense strand
gucaacauguagaacgcaa

SEQ ID NO: 2603434 - RNA, 19 nt, Homo sapiens
  misc_RNA (1)...(19): siRNA sense strand
gggcuuuagcgauagguca

SEQ ID NO: 2603435 - RNA, 19 nt, Homo sapiens
  misc_RNA (1)...(19): siRNA sense strand
gggcuuuagagauaaguca

SEQ ID NO: 2603436 - RNA, 19 nt, Homo sapiens
  misc_RNA (1)...(19): siRNA sense strand
agaaagugaauccagggaa

SEQ ID NO: 2603437 - RNA, 19 nt, Homo sapiens
  misc_RNA (1)...(19): siRNA sense strand
gggccgaauuacagaagac

SEQ ID NO: 2603438 - RNA, 19 nt, Homo sapiens
  misc_RNA (1)...(19): siRNA sense strand
caaguggaagaaagaggaa

SEQ ID NO: 2603439 - RNA, 19 nt, Homo sapiens
  misc_RNA (1)...(19): siRNA sense strand
gaaagaggaaccaaagcca

SEQ ID NO: 2603440 - RNA, 19 nt, Homo sapiens
  misc_RNA (1)...(19): siRNA sense strand
aagaggaaccaaagccaga

SEQ ID NO: 2603441 - RNA, 19 nt, Homo sapiens
  misc_RNA (1)...(19): siRNA sense strand
gaauaauggaagaagaguc

SEQ ID NO: 2603442 - RNA, 19 nt, Homo sapiens
  misc_RNA (1)...(19): siRNA sense strand
acaagguuucaguguuaaa

SEQ ID NO: 2603443 - RNA, 19 nt, Homo sapiens
  misc_RNA (1)...(19): siRNA sense strand
gggagaagcucuacgucug

SEQ ID NO: 2603444 - RNA, 19 nt, Homo sapiens
  misc_RNA (1)...(19): siRNA sense strand
augaauacggccaggaacu

SEQ ID NO: 2603445 - RNA, 19 nt, Homo sapiens
  misc_RNA (1)...(19): siRNA sense strand
ugaaacaacaacuggaacu

SEQ ID NO: 2603446 - RNA, 19 nt, Homo sapiens
  misc_RNA (1)...(19): siRNA sense strand
aguuggacauugagcagau

SEQ ID NO: 2603447 - RNA, 19 nt, Homo sapiens
  misc_RNA (1)...(19): siRNA sense strand
cgaggauuguggcaggaga

SEQ ID NO: 2603448 - RNA, 19 nt, Homo sapiens
  misc_RNA (1)...(19): siRNA sense strand
agaaagagguggagagccu

SEQ ID NO: 2603449 - RNA, 19 nt, Homo sapiens
  misc_RNA (1)...(19): siRNA sense strand
gggacgugccacagaugaa

SEQ ID NO: 2603450 - RNA, 19 nt, Homo sapiens
  misc_RNA (1)...(19): siRNA sense strand
ccgaccugaugaagaacaa

SEQ ID NO: 2603451 - RNA, 19 nt, Homo sapiens
  misc_RNA (1)...(19): siRNA sense strand
agaugaagaaagaggugga

SEQ ID NO: 2603452 - RNA, 19 nt, Homo sapiens
  misc_RNA (1)...(19): siRNA sense strand
cgagagucgaaaaggaaaa

SEQ ID NO: 2603453 - RNA, 19 nt, Homo sapiens
  misc_RNA (1)...(19): siRNA sense strand
gggccuacccacaggagau

SEQ ID NO: 2603454 - RNA, 19 nt, Homo sapiens
  misc_RNA (1)...(19): siRNA sense strand
agaaacugccugaggagga

SEQ ID NO: 2603455 - RNA, 19 nt, Homo sapiens
  misc_RNA (1)...(19): siRNA sense strand
ugacauaggggaagccaau

SEQ ID NO: 2603456 - RNA, 19 nt, Homo sapiens
  misc_RNA (1)...(19): siRNA sense strand
cugcaugaccggauagucu

SEQ ID NO: 2603457 - RNA, 19 nt, Homo sapiens
  misc_RNA (1)...(19): siRNA sense strand
cagcagaacaagugggcga

SEQ ID NO: 2603458 - RNA, 19 nt, Homo sapiens
  misc_RNA (1)...(19): siRNA sense strand
gcucaggaggugaaggaga

SEQ ID NO: 2603459 - RNA, 19 nt, Homo sapiens
  misc_RNA (1)...(19): siRNA sense strand
ccgugaaggagcugugcaa

SEQ ID NO: 2603460 - RNA, 19 nt, Homo sapiens
  misc_RNA (1)...(19): siRNA sense strand
gagcaauugaagaggaucu

SEQ ID NO: 2603461 - RNA, 19 nt, Homo sapiens
  misc_RNA (1)...(19): siRNA sense strand
gagugaagcuggaggcccu

SEQ ID NO: 2603462 - RNA, 19 nt, Homo sapiens
  misc_RNA (1)...(19): siRNA sense strand
ccgagcaauugaagaggau

SEQ ID NO: 2603463 - RNA, 19 nt, Homo sapiens
  misc_RNA (1)...(19): siRNA sense strand
augcacagaaccagaacua

SEQ ID NO: 2603464 - RNA, 19 nt, Homo sapiens
  misc_RNA (1)...(19): siRNA sense strand
ccaaggaacacgugcagga

SEQ ID NO: 2603465 - RNA, 19 nt, Homo sapiens
  misc_RNA (1)...(19): siRNA sense strand
ugaaggagaucuugccuga

SEQ ID NO: 2603466 - RNA, 19 nt, Homo sapiens
  misc_RNA (1)...(19): siRNA sense strand
ggucaaaggaggaaccaug

SEQ ID NO: 2603467 - RNA, 19 nt, Homo sapiens
  misc_RNA (1)...(19): siRNA sense strand
cugugcagccugaggucaa

SEQ ID NO: 2603468 - RNA, 19 nt, Homo sapiens
  misc_RNA (1)...(19): siRNA sense strand
gcaacaacaacaacggcau

SEQ ID NO: 2603469 - RNA, 19 nt, Homo sapiens
  misc_RNA (1)...(19): siRNA sense strand
gugaaagacaccggagaca

SEQ ID NO: 2603470 - RNA, 19 nt, Homo sapiens
  misc_RNA (1)...(19): siRNA sense strand
cggacaagggcuucaacuu

SEQ ID NO: 2603471 - RNA, 19 nt, Homo sapiens
  misc_RNA (1)...(19): siRNA sense strand
ggcuggugcacuacagaua

SEQ ID NO: 2603472 - RNA, 19 nt, Homo sapiens
  misc_RNA (1)...(19): siRNA sense strand
uggaggaguacaucagcaa

SEQ ID NO: 2603473 - RNA, 19 nt, Homo sapiens
  misc_RNA (1)...(19): siRNA sense strand
acuuccugguggugaacaa

SEQ ID NO: 2603474 - RNA, 19 nt, Homo sapiens
  misc_RNA (1)...(19): siRNA sense strand
cggaugaggcgcugguugu

SEQ ID NO: 2603475 - RNA, 19 nt, Homo sapiens
  misc_RNA (1)...(19): siRNA sense strand
acgggaaugucaaggucau

SEQ ID NO: 2603476 - RNA, 19 nt, Homo sapiens
  misc_RNA (1)...(19): siRNA sense strand
ugaagaggaucucgcgcau

SEQ ID NO: 2603477 - RNA, 19 nt, Homo sapiens
  misc_RNA (1)...(19): siRNA sense strand
caggccaguucgagagcga

SEQ ID NO: 2603478 - RNA, 19 nt, Homo sapiens
  misc_RNA (1)...(19): siRNA sense strand
ugggaaaaccauagagaac

SEQ ID NO: 2603479 - RNA, 19 nt, Homo sapiens
  misc_RNA (1)...(19): siRNA sense strand
uggugaacaaggagcgcau

SEQ ID NO: 2603480 - RNA, 19 nt, Homo sapiens
  misc_RNA (1)...(19): siRNA sense strand
ggagagagaagaagcccaa

SEQ ID NO: 2603481 - RNA, 19 nt, Homo sapiens
  misc_RNA (1)...(19): siRNA sense strand
gagaagaagcccaaaggca

SEQ ID NO: 2603482 - RNA, 19 nt, Homo sapiens
  misc_RNA (1)...(19): siRNA sense strand
acaagaaauugcuacggaa

SEQ ID NO: 2603483 - RNA, 19 nt, Homo sapiens
  misc_RNA (1)...(19): siRNA sense strand
gcccaaaggcaguacaaaa

SEQ ID NO: 2603484 - RNA, 19 nt, Homo sapiens
  misc_RNA (1)...(19): siRNA sense strand
ugaacagauacaagccaaa

SEQ ID NO: 2603485 - RNA, 19 nt, Homo sapiens
  misc_RNA (1)...(19): siRNA sense strand
aaagaaggcucaaacguca

SEQ ID NO: 2603486 - RNA, 19 nt, Homo sapiens
  misc_RNA (1)...(19): siRNA sense strand
cacaagaagaauaugaaca

SEQ ID NO: 2603487 - RNA, 19 nt, Homo sapiens
  misc_RNA (1)...(19): siRNA sense strand
uagcugaagaggaaagaca

SEQ ID NO: 2603488 - RNA, 19 nt, Homo sapiens
  misc_RNA (1)...(19): siRNA sense strand
aagaauucgagaggagaaa

SEQ ID NO: 2603489 - RNA, 19 nt, Homo sapiens
  misc_RNA (1)...(19): siRNA sense strand
gaggaaagacauaggaagc

SEQ ID NO: 2603490 - RNA, 19 nt, Homo sapiens
  misc_RNA (1)...(19): siRNA sense strand
gggacaaggcuuugcuuuu

SEQ ID NO: 2603491 - RNA, 19 nt, Homo sapiens
  misc_RNA (1)...(19): siRNA sense strand
augaacagauacaagccaa

SEQ ID NO: 2603492 - RNA, 19 nt, Homo sapiens
  misc_RNA (1)...(19): siRNA sense strand
agaucgauacccagauaau

SEQ ID NO: 2603493 - RNA, 19 nt, Homo sapiens
  misc_RNA (1)...(19): siRNA sense strand
acauaggaagcaagcaaga

SEQ ID NO: 2603494 - RNA, 19 nt, Homo sapiens
  misc_RNA (1)...(19): siRNA sense strand
gaagaagcccaaaggcagu

SEQ ID NO: 2603495 - RNA, 19 nt, Homo sapiens
  misc_RNA (1)...(19): siRNA sense strand
caggaauaagaaugugaga

SEQ ID NO: 2603496 - RNA, 19 nt, Homo sapiens
  misc_RNA (1)...(19): siRNA sense strand
ggaaggaaaagaaggcuca

SEQ ID NO: 2603497 - RNA, 19 nt, Homo sapiens
  misc_RNA (1)...(19): siRNA sense strand
aaggaaaugaugauggaau

SEQ ID NO: 2603498 - RNA, 19 nt, Homo sapiens
  misc_RNA (1)...(19): siRNA sense strand
augaagaugaggagcaaga

SEQ ID NO: 2603499 - RNA, 19 nt, Homo sapiens
  misc_RNA (1)...(19): siRNA sense strand
cgucaaaccagggcugaaa

SEQ ID NO: 2603500 - RNA, 19 nt, Homo sapiens
  misc_RNA (1)...(19): siRNA sense strand
cugaugaagaugaggagca

SEQ ID NO: 2603501 - RNA, 19 nt, Homo sapiens
  misc_RNA (1)...(19): siRNA sense strand
agugcuuguaaguggaaua

SEQ ID NO: 2603502 - RNA, 19 nt, Homo sapiens
  misc_RNA (1)...(19): siRNA sense strand
gaauaauaccagaguggcu

SEQ ID NO: 2603503 - RNA, 19 nt, Homo sapiens
  misc_RNA (1)...(19): siRNA sense strand
augaggagcaagaugacaa

SEQ ID NO: 2603504 - RNA, 19 nt, Homo sapiens
  misc_RNA (1)...(19): siRNA sense strand
ugauggaauaccagaccaa

SEQ ID NO: 2603505 - RNA, 19 nt, Homo sapiens
  misc_RNA (1)...(19): siRNA sense strand
gcaucuugcugcugggaac

SEQ ID NO: 2603506 - RNA, 19 nt, Homo sapiens
  misc_RNA (1)...(19): siRNA sense strand
aauaccagaccaagagaau

SEQ ID NO: 2603507 - RNA, 19 nt, Homo sapiens
  misc_RNA (1)...(19): siRNA sense strand
auaucaaugcccaaacaaa

SEQ ID NO: 2603508 - RNA, 19 nt, Homo sapiens
  misc_RNA (1)...(19): siRNA sense strand
gaugaaccguuacgucaaa

SEQ ID NO: 2603509 - RNA, 19 nt, Homo sapiens
  misc_RNA (1)...(19): siRNA sense strand
ccucuuugaaauuguggaa

SEQ ID NO: 2603510 - RNA, 19 nt, Homo sapiens
  misc_RNA (1)...(19): siRNA sense strand
augaagagugguaucgauu

SEQ ID NO: 2603511 - RNA, 19 nt, Homo sapiens
  misc_RNA (1)...(19): siRNA sense strand
gcugcugggaacagagaca

SEQ ID NO: 2603512 - RNA, 19 nt, Homo sapiens
  misc_RNA (1)...(19): siRNA sense strand
gguaucgauugcaagaaaa

SEQ ID NO: 2603513 - RNA, 19 nt, Homo sapiens
  misc_RNA (1)...(19): siRNA sense strand
aggagaauaucgugcgcau

SEQ ID NO: 2603514 - RNA, 19 nt, Homo sapiens
  misc_RNA (1)...(19): siRNA sense strand
acgugagccugcagggcaa

SEQ ID NO: 2603515 - RNA, 19 nt, Homo sapiens
  misc_RNA (1)...(19): siRNA sense strand
ucgucaagcugcuggccaa

SEQ ID NO: 2603516 - RNA, 19 nt, Homo sapiens
  misc_RNA (1)...(19): siRNA sense strand
cugaugacgaagugaaaga

SEQ ID NO: 2603517 - RNA, 19 nt, Homo sapiens
  misc_RNA (1)...(19): siRNA sense strand
gagaagaacgccucgguca

SEQ ID NO: 2603518 - RNA, 19 nt, Homo sapiens
  misc_RNA (1)...(19): siRNA sense strand
agaagaacgccucggucaa

SEQ ID NO: 2603519 - RNA, 19 nt, Homo sapiens
  misc_RNA (1)...(19): siRNA sense strand
gugucaacgccaaggauga

SEQ ID NO: 2603520 - RNA, 19 nt, Homo sapiens
  misc_RNA (1)...(19): siRNA sense strand
acucggaggugguggagga

SEQ ID NO: 2603521 - RNA, 19 nt, Homo sapiens
  misc_RNA (1)...(19): siRNA sense strand
acgccaaggaugaggacca

SEQ ID NO: 2603522 - RNA, 19 nt, Homo sapiens
  misc_RNA (1)...(19): siRNA sense strand
cggucaacgagguggacuu

SEQ ID NO: 2603523 - RNA, 19 nt, Homo sapiens
  misc_RNA (1)...(19): siRNA sense strand
agaagauggagauggccaa

SEQ ID NO: 2603524 - RNA, 19 nt, Homo sapiens
  misc_RNA (1)...(19): siRNA sense strand
gcgcggaagaucaguguca

SEQ ID NO: 2603525 - RNA, 19 nt, Homo sapiens
  misc_RNA (1)...(19): siRNA sense strand
agaagaagcuuguggaugc

SEQ ID NO: 2603526 - RNA, 19 nt, Homo sapiens
  misc_RNA (1)...(19): siRNA sense strand
gugaaaagccugaugacga

SEQ ID NO: 2603527 - RNA, 19 nt, Homo sapiens
  misc_RNA (1)...(19): siRNA sense strand
agaagaagccguuugcaga

SEQ ID NO: 2603528 - RNA, 19 nt, Homo sapiens
  misc_RNA (1)...(19): siRNA sense strand
cguuugcagaugagaagaa

SEQ ID NO: 2603529 - RNA, 19 nt, Homo sapiens
  misc_RNA (1)...(19): siRNA sense strand
gccugaugacgaagugaaa

SEQ ID NO: 2603530 - RNA, 19 nt, Homo sapiens
  misc_RNA (1)...(19): siRNA sense strand
ugaagguggugaagggcca

SEQ ID NO: 2603531 - RNA, 19 nt, Homo sapiens
  misc_RNA (1)...(19): siRNA sense strand
ccagagcgcaucagggaga

SEQ ID NO: 2603532 - RNA, 19 nt, Homo sapiens
  misc_RNA (1)...(19): siRNA sense strand
accgaggaccugugugaaa

SEQ ID NO: 2603533 - RNA, 19 nt, Homo sapiens
  misc_RNA (1)...(19): siRNA sense strand
gcuucgggcagguguacaa

SEQ ID NO: 2603534 - RNA, 19 nt, Homo sapiens
  misc_RNA (1)...(19): siRNA sense strand
uugcagaugagaagaacau

SEQ ID NO: 2603535 - RNA, 19 nt, Homo sapiens
  misc_RNA (1)...(19): siRNA sense strand
ugacgaagugaaagaaacu

SEQ ID NO: 2603536 - RNA, 19 nt, Homo sapiens
  misc_RNA (1)...(19): siRNA sense strand
cagacguccagaagaagaa

SEQ ID NO: 2603537 - RNA, 19 nt, Homo sapiens
  misc_RNA (1)...(19): siRNA sense strand
gagaagaacauccugcaca

SEQ ID NO: 2603538 - RNA, 19 nt, Homo sapiens
  misc_RNA (1)...(19): siRNA sense strand
ggcugcuguuggagaagaa

SEQ ID NO: 2603539 - RNA, 19 nt, Homo sapiens
  misc_RNA (1)...(19): siRNA sense strand
aagccaagaagauggagau

SEQ ID NO: 2603540 - RNA, 19 nt, Homo sapiens
  misc_RNA (1)...(19): siRNA sense strand
cgaccaaccagaaaggcua

SEQ ID NO: 2603541 - RNA, 19 nt, Homo sapiens
  misc_RNA (1)...(19): siRNA sense strand
ggaaacaggccguggcuag

SEQ ID NO: 2603542 - RNA, 19 nt, Homo sapiens
  misc_RNA (1)...(19): siRNA sense strand
uggcuagagaagagcgaga

SEQ ID NO: 2603543 - RNA, 19 nt, Homo sapiens
  misc_RNA (1)...(19): siRNA sense strand
ccaaugugcuguucgccua

SEQ ID NO: 2603544 - RNA, 19 nt, Homo sapiens
  misc_RNA (1)...(19): siRNA sense strand
uagagaagagcgagaucau

SEQ ID NO: 2603545 - RNA, 19 nt, Homo sapiens
  misc_RNA (1)...(19): siRNA sense strand
augaagacgcauuggaaau

SEQ ID NO: 2603546 - RNA, 19 nt, Homo sapiens
  misc_RNA (1)...(19): siRNA sense strand
gcuuaaggaacuagagagu

SEQ ID NO: 2603547 - RNA, 19 nt, Homo sapiens
  misc_RNA (1)...(19): siRNA sense strand
ugacauagaugaagacgca

SEQ ID NO: 2603548 - RNA, 19 nt, Homo sapiens
  misc_RNA (1)...(19): siRNA sense strand
guguguuggauuugacaua

SEQ ID NO: 2603549 - RNA, 19 nt, Homo sapiens
  misc_RNA (1)...(19): siRNA sense strand
acauagaugaagacgcauu

SEQ ID NO: 2603550 - RNA, 19 nt, Homo sapiens
  misc_RNA (1)...(19): siRNA sense strand
uggauuugacauagaugaa

SEQ ID NO: 2603551 - RNA, 19 nt, Homo sapiens
  misc_RNA (1)...(19): siRNA sense strand
aaaauaaagucguugcaga

SEQ ID NO: 2603552 - RNA, 19 nt, Homo sapiens
  misc_RNA (1)...(19): siRNA sense strand
agaucuaggaugugguugu

SEQ ID NO: 2603553 - RNA, 19 nt, Homo sapiens
  misc_RNA (1)...(19): siRNA sense strand
cggaugagguucagggcuu

SEQ ID NO: 2603554 - RNA, 19 nt, Homo sapiens
  misc_RNA (1)...(19): siRNA sense strand
ggacaguggccaagcagga

SEQ ID NO: 2603555 - RNA, 19 nt, Homo sapiens
  misc_RNA (1)...(19): siRNA sense strand
cuucaagagcccagaggca

SEQ ID NO: 2603556 - RNA, 19 nt, Homo sapiens
  misc_RNA (1)...(19): siRNA sense strand
gugaaauuguugacgccuu

SEQ ID NO: 2603557 - RNA, 19 nt, Homo sapiens
  misc_RNA (1)...(19): siRNA sense strand
gggagaaguuugugcugcu

SEQ ID NO: 2603558 - RNA, 19 nt, Homo sapiens
  misc_RNA (1)...(19): siRNA sense strand
ugagaaaccuggaggccga

SEQ ID NO: 2603559 - RNA, 19 nt, Homo sapiens
  misc_RNA (1)...(19): siRNA sense strand
uaucacagaugcugcgcaa

SEQ ID NO: 2603560 - RNA, 19 nt, Homo sapiens
  misc_RNA (1)...(19): siRNA sense strand
ccagugugguugaggucau

SEQ ID NO: 2603561 - RNA, 19 nt, Homo sapiens
  misc_RNA (1)...(19): siRNA sense strand
ccacagacaccauccggaa

SEQ ID NO: 2603562 - RNA, 19 nt, Homo sapiens
  misc_RNA (1)...(19): siRNA sense strand
ugugcagaggccagggaaa

SEQ ID NO: 2603563 - RNA, 19 nt, Homo sapiens
  misc_RNA (1)...(19): siRNA sense strand
agauggaggaugagaugga

SEQ ID NO: 2603564 - RNA, 19 nt, Homo sapiens
  misc_RNA (1)...(19): siRNA sense strand
cggaaguuuaccuagacaa

SEQ ID NO: 2603565 - RNA, 19 nt, Homo sapiens
  misc_RNA (1)...(19): siRNA sense strand
acgugaaggugcagggccu

SEQ ID NO: 2603566 - RNA, 19 nt, Homo sapiens
  misc_RNA (1)...(19): siRNA sense strand
ugaagaacgauuuccggaa

SEQ ID NO: 2603567 - RNA, 19 nt, Homo sapiens
  misc_RNA (1)...(19): siRNA sense strand
gcgcaagagcguggagacu

SEQ ID NO: 2603568 - RNA, 19 nt, Homo sapiens
  misc_RNA (1)...(19): siRNA sense strand
agcaauauccagaagcuau

SEQ ID NO: 2603569 - RNA, 19 nt, Homo sapiens
  misc_RNA (1)...(19): siRNA sense strand
agacggacauggugcggca

SEQ ID NO: 2603570 - RNA, 19 nt, Homo sapiens
  misc_RNA (1)...(19): siRNA sense strand
ccgccaaagagguguccuu

SEQ ID NO: 2603571 - RNA, 19 nt, Homo sapiens
  misc_RNA (1)...(19): siRNA sense strand
gcgugaggccauugagaau

SEQ ID NO: 2603572 - RNA, 19 nt, Homo sapiens
  misc_RNA (1)...(19): siRNA sense strand
auacagaaacugaaggaga

SEQ ID NO: 2603573 - RNA, 19 nt, Homo sapiens
  misc_RNA (1)...(19): siRNA sense strand
ugaucaagaaacaggaauu

SEQ ID NO: 2603574 - RNA, 19 nt, Homo sapiens
  misc_RNA (1)...(19): siRNA sense strand
gaauaagagagcugcccua

SEQ ID NO: 2603575 - RNA, 19 nt, Homo sapiens
  misc_RNA (1)...(19): siRNA sense strand
ggcacaaacugacgggaca

SEQ ID NO: 2603576 - RNA, 19 nt, Homo sapiens
  misc_RNA (1)...(19): siRNA sense strand
aggaauuggcccaggaguu

SEQ ID NO: 2603577 - RNA, 19 nt, Homo sapiens
  misc_RNA (1)...(19): siRNA sense strand
gggaaggggaagaaggaga

SEQ ID NO: 2603578 - RNA, 19 nt, Homo sapiens
  misc_RNA (1)...(19): siRNA sense strand
aggaugaacugcuggagga

SEQ ID NO: 2603579 - RNA, 19 nt, Homo sapiens
  misc_RNA (1)...(19): siRNA sense strand
ccaagaaguaugggaccaa

SEQ ID NO: 2603580 - RNA, 19 nt, Homo sapiens
  misc_RNA (1)...(19): siRNA sense strand
cacuaaagcaguuggcuga

SEQ ID NO: 2603581 - RNA, 19 nt, Homo sapiens
  misc_RNA (1)...(19): siRNA sense strand
cugaggacggauugggcaa

SEQ ID NO: 2603582 - RNA, 19 nt, Homo sapiens
  misc_RNA (1)...(19): siRNA sense strand
uagaggagcuggagcagga

SEQ ID NO: 2603583 - RNA, 19 nt, Homo sapiens
  misc_RNA (1)...(19): siRNA sense strand
gaagaaggagaaagggcca

SEQ ID NO: 2603584 - RNA, 19 nt, Homo sapiens
  misc_RNA (1)...(19): siRNA sense strand
gagaugauguggaugagga

SEQ ID NO: 2603585 - RNA, 19 nt, Homo sapiens
  misc_RNA (1)...(19): siRNA sense strand
agaaacugaaggagacaga

SEQ ID NO: 2603586 - RNA, 19 nt, Homo sapiens
  misc_RNA (1)...(19): siRNA sense strand
agcuggagcaggaggaauu

SEQ ID NO: 2603587 - RNA, 19 nt, Homo sapiens
  misc_RNA (1)...(19): siRNA sense strand
cucccaaaguggaugaaga

SEQ ID NO: 2603588 - RNA, 19 nt, Homo sapiens
  misc_RNA (1)...(19): siRNA sense strand
uguuaaaugugggcgacaa

SEQ ID NO: 2603589 - RNA, 19 nt, Homo sapiens
  misc_RNA (1)...(19): siRNA sense strand
augauguggaugaggauga

SEQ ID NO: 2603590 - RNA, 19 nt, Homo sapiens
  misc_RNA (1)...(19): siRNA sense strand
ggaccaagaauaagagagc

SEQ ID NO: 2603591 - RNA, 19 nt, Homo sapiens
  misc_RNA (1)...(19): siRNA sense strand
uugacaagguagaugaacu

SEQ ID NO: 2603592 - RNA, 19 nt, Homo sapiens
  misc_RNA (1)...(19): siRNA sense strand
aagaugaagaagcacuaaa

SEQ ID NO: 2603593 - RNA, 19 nt, Homo sapiens
  misc_RNA (1)...(19): siRNA sense strand
gccaagaaguaugggacca

SEQ ID NO: 2603594 - RNA, 19 nt, Homo sapiens
  misc_RNA (1)...(19): siRNA sense strand
aagcaauacagaaacugaa

SEQ ID NO: 2603595 - RNA, 19 nt, Homo sapiens
  misc_RNA (1)...(19): siRNA sense strand
cuacaggcuuugcggagga

SEQ ID NO: 2603596 - RNA, 19 nt, Homo sapiens
  misc_RNA (1)...(19): siRNA sense strand
gggugauggaggaguaaaa

SEQ ID NO: 2603597 - RNA, 19 nt, Homo sapiens
  misc_RNA (1)...(19): siRNA sense strand
aggagaaacagauggcauu

SEQ ID NO: 2603598 - RNA, 19 nt, Homo sapiens
  misc_RNA (1)...(19): siRNA sense strand
gccuauuguuggaagaaaa

SEQ ID NO: 2603599 - RNA, 19 nt, Homo sapiens
  misc_RNA (1)...(19): siRNA sense strand
ccaaagaggaacaaggaag

SEQ ID NO: 2603600 - RNA, 19 nt, Homo sapiens
  misc_RNA (1)...(19): siRNA sense strand
ccaacuuaaagcagggaga

SEQ ID NO: 2603601 - RNA, 19 nt, Homo sapiens
  misc_RNA (1)...(19): siRNA sense strand
acuuaaagaccuugguguu

SEQ ID NO: 2603602 - RNA, 19 nt, Homo sapiens
  misc_RNA (1)...(19): siRNA sense strand
uguuagacucagaagaaaa

SEQ ID NO: 2603603 - RNA, 19 nt, Homo sapiens
  misc_RNA (1)...(19): siRNA sense strand
gguugugggugauggagga

SEQ ID NO: 2603604 - RNA, 19 nt, Homo sapiens
  misc_RNA (1)...(19): siRNA sense strand
aagcauuccaaucaagaaa

SEQ ID NO: 2603605 - RNA, 19 nt, Homo sapiens
  misc_RNA (1)...(19): siRNA sense strand
gcagaagauuuuaugguga

SEQ ID NO: 2603606 - RNA, 19 nt, Homo sapiens
  misc_RNA (1)...(19): siRNA sense strand
gcucugggguuguggguga

SEQ ID NO: 2603607 - RNA, 19 nt, Homo sapiens
  misc_RNA (1)...(19): siRNA sense strand
cagguaaacucaaugcaca

SEQ ID NO: 2603608 - RNA, 19 nt, Homo sapiens
  misc_RNA (1)...(19): siRNA sense strand
uggacaaagcaaaggagca

SEQ ID NO: 2603609 - RNA, 19 nt, Homo sapiens
  misc_RNA (1)...(19): siRNA sense strand
aagcaaaggagcauggcca

SEQ ID NO: 2603610 - RNA, 19 nt, Homo sapiens
  misc_RNA (1)...(19): siRNA sense strand
ucacacaccuucauggaga

SEQ ID NO: 2603611 - RNA, 19 nt, Homo sapiens
  misc_RNA (1)...(19): siRNA sense strand
gguacaaaccaguugccuu

SEQ ID NO: 2603612 - RNA, 19 nt, Homo sapiens
  misc_RNA (1)...(19): siRNA sense strand
acuuaaagcagggagaauu

SEQ ID NO: 2603613 - RNA, 19 nt, Homo sapiens
  misc_RNA (1)...(19): siRNA sense strand
gaugaugcccagauggaca

SEQ ID NO: 2603614 - RNA, 19 nt, Homo sapiens
  misc_RNA (1)...(19): siRNA sense strand
gggagggaacacagacaca

SEQ ID NO: 2603615 - RNA, 19 nt, Homo sapiens
  misc_RNA (1)...(19): siRNA sense strand
cuguuagacucagaagaaa

SEQ ID NO: 2603616 - RNA, 19 nt, Homo sapiens
  misc_RNA (1)...(19): siRNA sense strand
gcccagauggacaaagcaa

SEQ ID NO: 2603617 - RNA, 19 nt, Homo sapiens
  misc_RNA (1)...(19): siRNA sense strand
aaggagaaacagauggcau

SEQ ID NO: 2603618 - RNA, 19 nt, Homo sapiens
  misc_RNA (1)...(19): siRNA sense strand
acuaaaagaauuugcgcau

SEQ ID NO: 2603619 - RNA, 19 nt, Homo sapiens
  misc_RNA (1)...(19): siRNA sense strand
gcacagaaacuuaaagacc

SEQ ID NO: 2603620 - RNA, 19 nt, Homo sapiens
  misc_RNA (1)...(19): siRNA sense strand
gugcaaagaggcugguucu

SEQ ID NO: 2603621 - RNA, 19 nt, Homo sapiens
  misc_RNA (1)...(19): siRNA sense strand
aaaucugcauauuggguga

SEQ ID NO: 2603622 - RNA, 19 nt, Homo sapiens
  misc_RNA (1)...(19): siRNA sense strand
cccagauggacaaagcaaa

SEQ ID NO: 2603623 - RNA, 19 nt, Homo sapiens
  misc_RNA (1)...(19): siRNA sense strand
gguuauggcuuuagagcac

SEQ ID NO: 2603624 - RNA, 19 nt, Homo sapiens
  misc_RNA (1)...(19): siRNA sense strand
uugacaugguagagaccua

SEQ ID NO: 2603625 - RNA, 19 nt, Homo sapiens
  misc_RNA (1)...(19): siRNA sense strand
cuuuagagcaccugaagau

SEQ ID NO: 2603626 - RNA, 19 nt, Homo sapiens
  misc_RNA (1)...(19): siRNA sense strand
ugacaaaucuuccaaggga

SEQ ID NO: 2603627 - RNA, 19 nt, Homo sapiens
  misc_RNA (1)...(19): siRNA sense strand
ggcagagcaauguuggaaa

SEQ ID NO: 2603628 - RNA, 19 nt, Homo sapiens
  misc_RNA (1)...(19): siRNA sense strand
acaaaucuuccaagggaca

SEQ ID NO: 2603629 - RNA, 19 nt, Homo sapiens
  misc_RNA (1)...(19): siRNA sense strand
gggacaucuuuuaaaacaa

SEQ ID NO: 2603630 - RNA, 19 nt, Homo sapiens
  misc_RNA (1)...(19): siRNA sense strand
caguguaacaggaagucuu

SEQ ID NO: 2603631 - RNA, 19 nt, Homo sapiens
  misc_RNA (1)...(19): siRNA sense strand
ugcaggaaguagagcgguu

SEQ ID NO: 2603632 - RNA, 19 nt, Homo sapiens
  misc_RNA (1)...(19): siRNA sense strand
cuguaagugcugugaccuu

SEQ ID NO: 2603633 - RNA, 19 nt, Homo sapiens
  misc_RNA (1)...(19): siRNA sense strand
acccaagcccggaggacau

SEQ ID NO: 2603634 - RNA, 19 nt, Homo sapiens
  misc_RNA (1)...(19): siRNA sense strand
cugcggugcuagagcgacu

SEQ ID NO: 2603635 - RNA, 19 nt, Homo sapiens
  misc_RNA (1)...(19): siRNA sense strand
aggaacuugaagagaacau

SEQ ID NO: 2603636 - RNA, 19 nt, Homo sapiens
  misc_RNA (1)...(19): siRNA sense strand
cagcagaggaaguuggaga

SEQ ID NO: 2603637 - RNA, 19 nt, Homo sapiens
  misc_RNA (1)...(19): siRNA sense strand
gagauaacucugaaggaca

SEQ ID NO: 2603638 - RNA, 19 nt, Homo sapiens
  misc_RNA (1)...(19): siRNA sense strand
gggcaugaacgcaggcaga

SEQ ID NO: 2603639 - RNA, 19 nt, Homo sapiens
  misc_RNA (1)...(19): siRNA sense strand
ugccagagggugugaacaa

SEQ ID NO: 2603640 - RNA, 19 nt, Homo sapiens
  misc_RNA (1)...(19): siRNA sense strand
ggucaaagacaauggcuug

SEQ ID NO: 2603641 - RNA, 19 nt, Homo sapiens
  misc_RNA (1)...(19): siRNA sense strand
gcugaagaagagagaagca

SEQ ID NO: 2603642 - RNA, 19 nt, Homo sapiens
  misc_RNA (1)...(19): siRNA sense strand
gugaagguuugcacggaca

SEQ ID NO: 2603643 - RNA, 19 nt, Homo sapiens
  misc_RNA (1)...(19): siRNA sense strand
ucaaaacucuagagcgcua

SEQ ID NO: 2603644 - RNA, 19 nt, Homo sapiens
  misc_RNA (1)...(19): siRNA sense strand
gagagaagcaaguacgacu

SEQ ID NO: 2603645 - RNA, 19 nt, Homo sapiens
  misc_RNA (1)...(19): siRNA sense strand
cugaagaagagagaagcaa

SEQ ID NO: 2603646 - RNA, 19 nt, Homo sapiens
  misc_RNA (1)...(19): siRNA sense strand
cagaccaggaagaaaucaa

SEQ ID NO: 2603647 - RNA, 19 nt, Homo sapiens
  misc_RNA (1)...(19): siRNA sense strand
ggaagaaaucaaaacucua

SEQ ID NO: 2603648 - RNA, 19 nt, Homo sapiens
  misc_RNA (1)...(19): siRNA sense strand
ucgcugaagaagagagaag

SEQ ID NO: 2603649 - RNA, 19 nt, Homo sapiens
  misc_RNA (1)...(19): siRNA sense strand
ucacucugaaggaggcaua

SEQ ID NO: 2603650 - RNA, 19 nt, Homo sapiens
  misc_RNA (1)...(19): siRNA sense strand
gguccuagcaagaagggaa

SEQ ID NO: 2603651 - RNA, 19 nt, Homo sapiens
  misc_RNA (1)...(19): siRNA sense strand
ggaagaaggcuguggagag

SEQ ID NO: 2603652 - RNA, 19 nt, Homo sapiens
  misc_RNA (1)...(19): siRNA sense strand
uggagguauuggaagagaa

SEQ ID NO: 2603653 - RNA, 19 nt, Homo sapiens
  misc_RNA (1)...(19): siRNA sense strand
caaacagcagagagcacaa

SEQ ID NO: 2603654 - RNA, 19 nt, Homo sapiens
  misc_RNA (1)...(19): siRNA sense strand
ugucaguggaacaagaauu

SEQ ID NO: 2603655 - RNA, 19 nt, Homo sapiens
  misc_RNA (1)...(19): siRNA sense strand
aagaaaaggaucacaaaca

SEQ ID NO: 2603656 - RNA, 19 nt, Homo sapiens
  misc_RNA (1)...(19): siRNA sense strand
gagaaacgggccugagcca

SEQ ID NO: 2603657 - RNA, 19 nt, Homo sapiens
  misc_RNA (1)...(19): siRNA sense strand
ccuaaagaggagaaaguag

SEQ ID NO: 2603658 - RNA, 19 nt, Homo sapiens
  misc_RNA (1)...(19): siRNA sense strand
ccucagaagucauggccag

SEQ ID NO: 2603659 - RNA, 19 nt, Homo sapiens
  misc_RNA (1)...(19): siRNA sense strand
agagagcaucaaaggaaaa

SEQ ID NO: 2603660 - RNA, 19 nt, Homo sapiens
  misc_RNA (1)...(19): siRNA sense strand
uugagaugccucugagaca

SEQ ID NO: 2603661 - RNA, 19 nt, Homo sapiens
  misc_RNA (1)...(19): siRNA sense strand
aagccaggaacaagauauu

SEQ ID NO: 2603662 - RNA, 19 nt, Homo sapiens
  misc_RNA (1)...(19): siRNA sense strand
cugaagaggaggaggagga

SEQ ID NO: 2603663 - RNA, 19 nt, Homo sapiens
  misc_RNA (1)...(19): siRNA sense strand
aggagaaggaggaggagau

SEQ ID NO: 2603664 - RNA, 19 nt, Homo sapiens
  misc_RNA (1)...(19): siRNA sense strand
aggaaaugucacugccaaa

SEQ ID NO: 2603665 - RNA, 19 nt, Homo sapiens
  misc_RNA (1)...(19): siRNA sense strand
ccacugaagaggaggagga

SEQ ID NO: 2603666 - RNA, 19 nt, Homo sapiens
  misc_RNA (1)...(19): siRNA sense strand
gcacugaggagaaggagga

SEQ ID NO: 2603667 - RNA, 19 nt, Homo sapiens
  misc_RNA (1)...(19): siRNA sense strand
aggaggaggaagaggagca

SEQ ID NO: 2603668 - RNA, 19 nt, Homo sapiens
  misc_RNA (1)...(19): siRNA sense strand
gaggaaaugucacugccaa

SEQ ID NO: 2603669 - RNA, 19 nt, Homo sapiens
  misc_RNA (1)...(19): siRNA sense strand
uggcgaaacuguuggccca

SEQ ID NO: 2603670 - RNA, 19 nt, Homo sapiens
  misc_RNA (1)...(19): siRNA sense strand
cugaggagaaggaggagga

SEQ ID NO: 2603671 - RNA, 19 nt, Homo sapiens
  misc_RNA (1)...(19): siRNA sense strand
ccauugagguugaggccac

SEQ ID NO: 2603672 - RNA, 19 nt, Homo sapiens
  misc_RNA (1)...(19): siRNA sense strand
uugcacuggugguggugaa

SEQ ID NO: 2603673 - RNA, 19 nt, Homo sapiens
  misc_RNA (1)...(19): siRNA sense strand
aggaggaggaggaagagga

SEQ ID NO: 2603674 - RNA, 19 nt, Homo sapiens
  misc_RNA (1)...(19): siRNA sense strand
ccacaauggcacugaggag

SEQ ID NO: 2603675 - RNA, 19 nt, Homo sapiens
  misc_RNA (1)...(19): siRNA sense strand
uggagcagucagagggcaa

SEQ ID NO: 2603676 - RNA, 19 nt, Homo sapiens
  misc_RNA (1)...(19): siRNA sense strand
cggugguagugacgggauu

SEQ ID NO: 2603677 - RNA, 19 nt, Homo sapiens
  misc_RNA (1)...(19): siRNA sense strand
acauggaugcugugugcaa

SEQ ID NO: 2603678 - RNA, 19 nt, Homo sapiens
  misc_RNA (1)...(19): siRNA sense strand
gcuacaaggggcuggacaa

SEQ ID NO: 2603679 - RNA, 19 nt, Homo sapiens
  misc_RNA (1)...(19): siRNA sense strand
guggacacaacaagggcua

SEQ ID NO: 2603680 - RNA, 19 nt, Homo sapiens
  misc_RNA (1)...(19): siRNA sense strand
cugaggaagaugaggaaga

SEQ ID NO: 2603681 - RNA, 19 nt, Homo sapiens
  misc_RNA (1)...(19): siRNA sense strand
agaacaagaggcagaggaa

SEQ ID NO: 2603682 - RNA, 19 nt, Homo sapiens
  misc_RNA (1)...(19): siRNA sense strand
uagcagaacaagaggcaga

SEQ ID NO: 2603683 - RNA, 19 nt, Homo sapiens
  misc_RNA (1)...(19): siRNA sense strand
aggaagaugaggaagaaga

SEQ ID NO: 2603684 - RNA, 19 nt, Homo sapiens
  misc_RNA (1)...(19): siRNA sense strand
ccaagaugguccagcacau

SEQ ID NO: 2603685 - RNA, 19 nt, Homo sapiens
  misc_RNA (1)...(19): siRNA sense strand
agauagaagaggugccaga

SEQ ID NO: 2603686 - RNA, 19 nt, Homo sapiens
  misc_RNA (1)...(19): siRNA sense strand
ggccaaagaggaagaggau

SEQ ID NO: 2603687 - RNA, 19 nt, Homo sapiens
  misc_RNA (1)...(19): siRNA sense strand
ccaagaaagccgaccgcau

SEQ ID NO: 2603688 - RNA, 19 nt, Homo sapiens
  misc_RNA (1)...(19): siRNA sense strand
gggaagcaauuuaagcgaa

SEQ ID NO: 2603689 - RNA, 19 nt, Homo sapiens
  misc_RNA (1)...(19): siRNA sense strand
aggaugaggaugaggacga

SEQ ID NO: 2603690 - RNA, 19 nt, Homo sapiens
  misc_RNA (1)...(19): siRNA sense strand
ggaagaagacggugaggac

SEQ ID NO: 2603691 - RNA, 19 nt, Homo sapiens
  misc_RNA (1)...(19): siRNA sense strand
ggacgaggcaagaggcgau

SEQ ID NO: 2603692 - RNA, 19 nt, Homo sapiens
  misc_RNA (1)...(19): siRNA sense strand
ucagaaagucaaucagaau

SEQ ID NO: 2603693 - RNA, 19 nt, Homo sapiens
  misc_RNA (1)...(19): siRNA sense strand
ccacagacuacgacagcuu

SEQ ID NO: 2603694 - RNA, 19 nt, Homo sapiens
  misc_RNA (1)...(19): siRNA sense strand
acgaggacacugaggaaga

SEQ ID NO: 2603695 - RNA, 19 nt, Homo sapiens
  misc_RNA (1)...(19): siRNA sense strand
gaacagaccacuaucccaa

SEQ ID NO: 2603696 - RNA, 19 nt, Homo sapiens
  misc_RNA (1)...(19): siRNA sense strand
ugaaagaucauguggccau

SEQ ID NO: 2603697 - RNA, 19 nt, Homo sapiens
  misc_RNA (1)...(19): siRNA sense strand
cgaaagaagcauccagagu

SEQ ID NO: 2603698 - RNA, 19 nt, Homo sapiens
  misc_RNA (1)...(19): siRNA sense strand
ggacaggaaagaaagggau

SEQ ID NO: 2603699 - RNA, 19 nt, Homo sapiens
  misc_RNA (1)...(19): siRNA sense strand
caguauugcgauaagguuu

SEQ ID NO: 2603700 - RNA, 19 nt, Homo sapiens
  misc_RNA (1)...(19): siRNA sense strand
ggaacaugaaccagaaacu

SEQ ID NO: 2603701 - RNA, 19 nt, Homo sapiens
  misc_RNA (1)...(19): siRNA sense strand
ugauaaaggggacaggaaa

SEQ ID NO: 2603702 - RNA, 19 nt, Homo sapiens
  misc_RNA (1)...(19): siRNA sense strand
gcgaagugcauaucaccaa

SEQ ID NO: 2603703 - RNA, 19 nt, Homo sapiens
  misc_RNA (1)...(19): siRNA sense strand
aguauugcgauaagguuua

SEQ ID NO: 2603704 - RNA, 19 nt, Homo sapiens
  misc_RNA (1)...(19): siRNA sense strand
uaggcagacuggaggccaa

SEQ ID NO: 2603705 - RNA, 19 nt, Homo sapiens
  misc_RNA (1)...(19): siRNA sense strand
uggugugaggagugcaaua

SEQ ID NO: 2603706 - RNA, 19 nt, Homo sapiens
  misc_RNA (1)...(19): siRNA sense strand
gacaggaaagaaagggauu

SEQ ID NO: 2603707 - RNA, 19 nt, Homo sapiens
  misc_RNA (1)...(19): siRNA sense strand
acuggaggccaaagaggaa

SEQ ID NO: 2603708 - RNA, 19 nt, Homo sapiens
  misc_RNA (1)...(19): siRNA sense strand
aagcaguacagcagcaaga

SEQ ID NO: 2603709 - RNA, 19 nt, Homo sapiens
  misc_RNA (1)...(19): siRNA sense strand
ucaugacauuucugaggaa

SEQ ID NO: 2603710 - RNA, 19 nt, Homo sapiens
  misc_RNA (1)...(19): siRNA sense strand
uucgagagcaagagaagaa

SEQ ID NO: 2603711 - RNA, 19 nt, Homo sapiens
  misc_RNA (1)...(19): siRNA sense strand
augagaaacuagauguguu

SEQ ID NO: 2603712 - RNA, 19 nt, Homo sapiens
  misc_RNA (1)...(19): siRNA sense strand
aaagagugacgaugggaca

SEQ ID NO: 2603713 - RNA, 19 nt, Homo sapiens
  misc_RNA (1)...(19): siRNA sense strand
cggaagcagcgaagugcau

SEQ ID NO: 2603714 - RNA, 19 nt, Homo sapiens
  misc_RNA (1)...(19): siRNA sense strand
caaccagaacagaccacua

SEQ ID NO: 2603715 - RNA, 19 nt, Homo sapiens
  misc_RNA (1)...(19): siRNA sense strand
gggacaggaaagaaaggga

SEQ ID NO: 2603716 - RNA, 19 nt, Homo sapiens
  misc_RNA (1)...(19): siRNA sense strand
aggccaaagaggaagagga

SEQ ID NO: 2603717 - RNA, 19 nt, Homo sapiens
  misc_RNA (1)...(19): siRNA sense strand
aagacaaacuacgggaaca

SEQ ID NO: 2603718 - RNA, 19 nt, Homo sapiens
  misc_RNA (1)...(19): siRNA sense strand
aaaggaaaguucuucgaga

SEQ ID NO: 2603719 - RNA, 19 nt, Homo sapiens
  misc_RNA (1)...(19): siRNA sense strand
aggaacugaagguguggua

SEQ ID NO: 2603720 - RNA, 19 nt, Homo sapiens
  misc_RNA (1)...(19): siRNA sense strand
augaggaagaagacgguga

SEQ ID NO: 2603721 - RNA, 19 nt, Homo sapiens
  misc_RNA (1)...(19): siRNA sense strand
cgagagcaagagaagaauu

SEQ ID NO: 2603722 - RNA, 19 nt, Homo sapiens
  misc_RNA (1)...(19): siRNA sense strand
caauuuaagcgaaaagaca

SEQ ID NO: 2603723 - RNA, 19 nt, Homo sapiens
  misc_RNA (1)...(19): siRNA sense strand
acaugaagauagaagaggu

SEQ ID NO: 2603724 - RNA, 19 nt, Homo sapiens
  misc_RNA (1)...(19): siRNA sense strand
gagcagaaccugguggcuu

SEQ ID NO: 2603725 - RNA, 19 nt, Homo sapiens
  misc_RNA (1)...(19): siRNA sense strand
gcgauucgguccaggucga

SEQ ID NO: 2603726 - RNA, 19 nt, Homo sapiens
  misc_RNA (1)...(19): siRNA sense strand
gaagcagcgaagugcauau

SEQ ID NO: 2603727 - RNA, 19 nt, Homo sapiens
  misc_RNA (1)...(19): siRNA sense strand
gugcauaucaccaaaccau

SEQ ID NO: 2603728 - RNA, 19 nt, Homo sapiens
  misc_RNA (1)...(19): siRNA sense strand
agaggaagaggaugaggau

SEQ ID NO: 2603729 - RNA, 19 nt, Homo sapiens
  misc_RNA (1)...(19): siRNA sense strand
cugaggaagaugaggaaga

SEQ ID NO: 2603730 - RNA, 19 nt, Homo sapiens
  misc_RNA (1)...(19): siRNA sense strand
agaacaagaggcagaggaa

SEQ ID NO: 2603731 - RNA, 19 nt, Homo sapiens
  misc_RNA (1)...(19): siRNA sense strand
uagcagaacaagaggcaga

SEQ ID NO: 2603732 - RNA, 19 nt, Homo sapiens
  misc_RNA (1)...(19): siRNA sense strand
aggaagaugaggaagaaga

SEQ ID NO: 2603733 - RNA, 19 nt, Homo sapiens
  misc_RNA (1)...(19): siRNA sense strand
ccaagaugguccagcacau

SEQ ID NO: 2603734 - RNA, 19 nt, Homo sapiens
  misc_RNA (1)...(19): siRNA sense strand
agauagaagaggugccaga

SEQ ID NO: 2603735 - RNA, 19 nt, Homo sapiens
  misc_RNA (1)...(19): siRNA sense strand
ggccaaagaggaagaggau

SEQ ID NO: 2603736 - RNA, 19 nt, Homo sapiens
  misc_RNA (1)...(19): siRNA sense strand
ccaagaaagccgaccgcau

SEQ ID NO: 2603737 - RNA, 19 nt, Homo sapiens
  misc_RNA (1)...(19): siRNA sense strand
gggaagcaauuuaagcgaa

SEQ ID NO: 2603738 - RNA, 19 nt, Homo sapiens
  misc_RNA (1)...(19): siRNA sense strand
aggaugaggaugaggacga

SEQ ID NO: 2603739 - RNA, 19 nt, Homo sapiens
  misc_RNA (1)...(19): siRNA sense strand
ggaagaagacggugaggac

SEQ ID NO: 2603740 - RNA, 19 nt, Homo sapiens
  misc_RNA (1)...(19): siRNA sense strand
ggacgaggcaagaggcgau

SEQ ID NO: 2603741 - RNA, 19 nt, Homo sapiens
  misc_RNA (1)...(19): siRNA sense strand
ucagaaagucaaucagaau

SEQ ID NO: 2603742 - RNA, 19 nt, Homo sapiens
  misc_RNA (1)...(19): siRNA sense strand
ccacagacuacgacagcuu

SEQ ID NO: 2603743 - RNA, 19 nt, Homo sapiens
  misc_RNA (1)...(19): siRNA sense strand
acgaggacacugaggaaga

SEQ ID NO: 2603744 - RNA, 19 nt, Homo sapiens
  misc_RNA (1)...(19): siRNA sense strand
gaacagaccacuaucccaa

SEQ ID NO: 2603745 - RNA, 19 nt, Homo sapiens
  misc_RNA (1)...(19): siRNA sense strand
ugaaagaucauguggccau

SEQ ID NO: 2603746 - RNA, 19 nt, Homo sapiens
  misc_RNA (1)...(19): siRNA sense strand
cgaaagaagcauccagagu

SEQ ID NO: 2603747 - RNA, 19 nt, Homo sapiens
  misc_RNA (1)...(19): siRNA sense strand
ggacaggaaagaaagggau

SEQ ID NO: 2603748 - RNA, 19 nt, Homo sapiens
  misc_RNA (1)...(19): siRNA sense strand
caguauugcgauaagguuu

SEQ ID NO: 2603749 - RNA, 19 nt, Homo sapiens
  misc_RNA (1)...(19): siRNA sense strand
ggaacaugaaccagaaacu

SEQ ID NO: 2603750 - RNA, 19 nt, Homo sapiens
  misc_RNA (1)...(19): siRNA sense strand
ugauaaaggggacaggaaa

SEQ ID NO: 2603751 - RNA, 19 nt, Homo sapiens
  misc_RNA (1)...(19): siRNA sense strand
gcgaagugcauaucaccaa

SEQ ID NO: 2603752 - RNA, 19 nt, Homo sapiens
  misc_RNA (1)...(19): siRNA sense strand
aguauugcgauaagguuua

SEQ ID NO: 2603753 - RNA, 19 nt, Homo sapiens
  misc_RNA (1)...(19): siRNA sense strand
uaggcagacuggaggccaa

SEQ ID NO: 2603754 - RNA, 19 nt, Homo sapiens
  misc_RNA (1)...(19): siRNA sense strand
uggugugaggagugcaaua

SEQ ID NO: 2603755 - RNA, 19 nt, Homo sapiens
  misc_RNA (1)...(19): siRNA sense strand
gacaggaaagaaagggauu

SEQ ID NO: 2603756 - RNA, 19 nt, Homo sapiens
  misc_RNA (1)...(19): siRNA sense strand
acuggaggccaaagaggaa

SEQ ID NO: 2603757 - RNA, 19 nt, Homo sapiens
  misc_RNA (1)...(19): siRNA sense strand
aagcaguacagcagcaaga

SEQ ID NO: 2603758 - RNA, 19 nt, Homo sapiens
  misc_RNA (1)...(19): siRNA sense strand
ucaugacauuucugaggaa

SEQ ID NO: 2603759 - RNA, 19 nt, Homo sapiens
  misc_RNA (1)...(19): siRNA sense strand
uucgagagcaagagaagaa

SEQ ID NO: 2603760 - RNA, 19 nt, Homo sapiens
  misc_RNA (1)...(19): siRNA sense strand
augagaaacuagauguguu

SEQ ID NO: 2603761 - RNA, 19 nt, Homo sapiens
  misc_RNA (1)...(19): siRNA sense strand
aaagagugacgaugggaca

SEQ ID NO: 2603762 - RNA, 19 nt, Homo sapiens
  misc_RNA (1)...(19): siRNA sense strand
cggaagcagcgaagugcau

SEQ ID NO: 2603763 - RNA, 19 nt, Homo sapiens
  misc_RNA (1)...(19): siRNA sense strand
caaccagaacagaccacua

SEQ ID NO: 2603764 - RNA, 19 nt, Homo sapiens
  misc_RNA (1)...(19): siRNA sense strand
gggacaggaaagaaaggga

SEQ ID NO: 2603765 - RNA, 19 nt, Homo sapiens
  misc_RNA (1)...(19): siRNA sense strand
aggccaaagaggaagagga

SEQ ID NO: 2603766 - RNA, 19 nt, Homo sapiens
  misc_RNA (1)...(19): siRNA sense strand
aagacaaacuacgggaaca

SEQ ID NO: 2603767 - RNA, 19 nt, Homo sapiens
  misc_RNA (1)...(19): siRNA sense strand
aaaggaaaguucuucgaga

SEQ ID NO: 2603768 - RNA, 19 nt, Homo sapiens
  misc_RNA (1)...(19): siRNA sense strand
aggaacugaagguguggua

SEQ ID NO: 2603769 - RNA, 19 nt, Homo sapiens
  misc_RNA (1)...(19): siRNA sense strand
augaggaagaagacgguga

SEQ ID NO: 2603770 - RNA, 19 nt, Homo sapiens
  misc_RNA (1)...(19): siRNA sense strand
cgagagcaagagaagaauu

SEQ ID NO: 2603771 - RNA, 19 nt, Homo sapiens
  misc_RNA (1)...(19): siRNA sense strand
caauuuaagcgaaaagaca

SEQ ID NO: 2603772 - RNA, 19 nt, Homo sapiens
  misc_RNA (1)...(19): siRNA sense strand
acaugaagauagaagaggu

SEQ ID NO: 2603773 - RNA, 19 nt, Homo sapiens
  misc_RNA (1)...(19): siRNA sense strand
gagcagaaccugguggcuu

SEQ ID NO: 2603774 - RNA, 19 nt, Homo sapiens
  misc_RNA (1)...(19): siRNA sense strand
gcgauucgguccaggucga

SEQ ID NO: 2603775 - RNA, 19 nt, Homo sapiens
  misc_RNA (1)...(19): siRNA sense strand
gaagcagcgaagugcauau

SEQ ID NO: 2603776 - RNA, 19 nt, Homo sapiens
  misc_RNA (1)...(19): siRNA sense strand
gugcauaucaccaaaccau

SEQ ID NO: 2603777 - RNA, 19 nt, Homo sapiens
  misc_RNA (1)...(19): siRNA sense strand
agaggaagaggaugaggau

SEQ ID NO: 2603778 - RNA, 19 nt, Homo sapiens
  misc_RNA (1)...(19): siRNA sense strand
cugaggaagaugaggaaga

SEQ ID NO: 2603779 - RNA, 19 nt, Homo sapiens
  misc_RNA (1)...(19): siRNA sense strand
agaacaagaggcagaggaa

SEQ ID NO: 2603780 - RNA, 19 nt, Homo sapiens
  misc_RNA (1)...(19): siRNA sense strand
uagcagaacaagaggcaga

SEQ ID NO: 2603781 - RNA, 19 nt, Homo sapiens
  misc_RNA (1)...(19): siRNA sense strand
aggaagaugaggaagaaga

SEQ ID NO: 2603782 - RNA, 19 nt, Homo sapiens
  misc_RNA (1)...(19): siRNA sense strand
ccaagaugguccagcacau

SEQ ID NO: 2603783 - RNA, 19 nt, Homo sapiens
  misc_RNA (1)...(19): siRNA sense strand
agauagaagaggugccaga

SEQ ID NO: 2603784 - RNA, 19 nt, Homo sapiens
  misc_RNA (1)...(19): siRNA sense strand
ggccaaagaggaagaggau

SEQ ID NO: 2603785 - RNA, 19 nt, Homo sapiens
  misc_RNA (1)...(19): siRNA sense strand
ccaagaaagccgaccgcau

SEQ ID NO: 2603786 - RNA, 19 nt, Homo sapiens
  misc_RNA (1)...(19): siRNA sense strand
gggaagcaauuuaagcgaa

SEQ ID NO: 2603787 - RNA, 19 nt, Homo sapiens
  misc_RNA (1)...(19): siRNA sense strand
aggaugaggaugaggacga

SEQ ID NO: 2603788 - RNA, 19 nt, Homo sapiens
  misc_RNA (1)...(19): siRNA sense strand
ggaagaagacggugaggac

SEQ ID NO: 2603789 - RNA, 19 nt, Homo sapiens
  misc_RNA (1)...(19): siRNA sense strand
ggacgaggcaagaggcgau

SEQ ID NO: 2603790 - RNA, 19 nt, Homo sapiens
  misc_RNA (1)...(19): siRNA sense strand
ucagaaagucaaucagaau

SEQ ID NO: 2603791 - RNA, 19 nt, Homo sapiens
  misc_RNA (1)...(19): siRNA sense strand
ccacagacuacgacagcuu

SEQ ID NO: 2603792 - RNA, 19 nt, Homo sapiens
  misc_RNA (1)...(19): siRNA sense strand
acgaggacacugaggaaga

SEQ ID NO: 2603793 - RNA, 19 nt, Homo sapiens
  misc_RNA (1)...(19): siRNA sense strand
gaacagaccacuaucccaa

SEQ ID NO: 2603794 - RNA, 19 nt, Homo sapiens
  misc_RNA (1)...(19): siRNA sense strand
ugaaagaucauguggccau

SEQ ID NO: 2603795 - RNA, 19 nt, Homo sapiens
  misc_RNA (1)...(19): siRNA sense strand
cgaaagaagcauccagagu

SEQ ID NO: 2603796 - RNA, 19 nt, Homo sapiens
  misc_RNA (1)...(19): siRNA sense strand
ggacaggaaagaaagggau

SEQ ID NO: 2603797 - RNA, 19 nt, Homo sapiens
  misc_RNA (1)...(19): siRNA sense strand
caguauugcgauaagguuu

SEQ ID NO: 2603798 - RNA, 19 nt, Homo sapiens
  misc_RNA (1)...(19): siRNA sense strand
ggaacaugaaccagaaacu

SEQ ID NO: 2603799 - RNA, 19 nt, Homo sapiens
  misc_RNA (1)...(19): siRNA sense strand
ugauaaaggggacaggaaa

SEQ ID NO: 2603800 - RNA, 19 nt, Homo sapiens
  misc_RNA (1)...(19): siRNA sense strand
gcgaagugcauaucaccaa

SEQ ID NO: 2603801 - RNA, 19 nt, Homo sapiens
  misc_RNA (1)...(19): siRNA sense strand
aguauugcgauaagguuua

SEQ ID NO: 2603802 - RNA, 19 nt, Homo sapiens
  misc_RNA (1)...(19): siRNA sense strand
uaggcagacuggaggccaa

SEQ ID NO: 2603803 - RNA, 19 nt, Homo sapiens
  misc_RNA (1)...(19): siRNA sense strand
uggugugaggagugcaaua

SEQ ID NO: 2603804 - RNA, 19 nt, Homo sapiens
  misc_RNA (1)...(19): siRNA sense strand
gacaggaaagaaagggauu

SEQ ID NO: 2603805 - RNA, 19 nt, Homo sapiens
  misc_RNA (1)...(19): siRNA sense strand
acuggaggccaaagaggaa

SEQ ID NO: 2603806 - RNA, 19 nt, Homo sapiens
  misc_RNA (1)...(19): siRNA sense strand
aagcaguacagcagcaaga

SEQ ID NO: 2603807 - RNA, 19 nt, Homo sapiens
  misc_RNA (1)...(19): siRNA sense strand
ucaugacauuucugaggaa

SEQ ID NO: 2603808 - RNA, 19 nt, Homo sapiens
  misc_RNA (1)...(19): siRNA sense strand
uucgagagcaagagaagaa

SEQ ID NO: 2603809 - RNA, 19 nt, Homo sapiens
  misc_RNA (1)...(19): siRNA sense strand
augagaaacuagauguguu

SEQ ID NO: 2603810 - RNA, 19 nt, Homo sapiens
  misc_RNA (1)...(19): siRNA sense strand
aaagagugacgaugggaca

SEQ ID NO: 2603811 - RNA, 19 nt, Homo sapiens
  misc_RNA (1)...(19): siRNA sense strand
cggaagcagcgaagugcau

SEQ ID NO: 2603812 - RNA, 19 nt, Homo sapiens
  misc_RNA (1)...(19): siRNA sense strand
caaccagaacagaccacua

SEQ ID NO: 2603813 - RNA, 19 nt, Homo sapiens
  misc_RNA (1)...(19): siRNA sense strand
gggacaggaaagaaaggga

SEQ ID NO: 2603814 - RNA, 19 nt, Homo sapiens
  misc_RNA (1)...(19): siRNA sense strand
aggccaaagaggaagagga

SEQ ID NO: 2603815 - RNA, 19 nt, Homo sapiens
  misc_RNA (1)...(19): siRNA sense strand
aagacaaacuacgggaaca

SEQ ID NO: 2603816 - RNA, 19 nt, Homo sapiens
  misc_RNA (1)...(19): siRNA sense strand
aaaggaaaguucuucgaga

SEQ ID NO: 2603817 - RNA, 19 nt, Homo sapiens
  misc_RNA (1)...(19): siRNA sense strand
aggaacugaagguguggua

SEQ ID NO: 2603818 - RNA, 19 nt, Homo sapiens
  misc_RNA (1)...(19): siRNA sense strand
augaggaagaagacgguga

SEQ ID NO: 2603819 - RNA, 19 nt, Homo sapiens
  misc_RNA (1)...(19): siRNA sense strand
cgagagcaagagaagaauu

SEQ ID NO: 2603820 - RNA, 19 nt, Homo sapiens
  misc_RNA (1)...(19): siRNA sense strand
caauuuaagcgaaaagaca

SEQ ID NO: 2603821 - RNA, 19 nt, Homo sapiens
  misc_RNA (1)...(19): siRNA sense strand
acaugaagauagaagaggu

SEQ ID NO: 2603822 - RNA, 19 nt, Homo sapiens
  misc_RNA (1)...(19): siRNA sense strand
gagcagaaccugguggcuu

SEQ ID NO: 2603823 - RNA, 19 nt, Homo sapiens
  misc_RNA (1)...(19): siRNA sense strand
gcgauucgguccaggucga

SEQ ID NO: 2603824 - RNA, 19 nt, Homo sapiens
  misc_RNA (1)...(19): siRNA sense strand
gaagcagcgaagugcauau

SEQ ID NO: 2603825 - RNA, 19 nt, Homo sapiens
  misc_RNA (1)...(19): siRNA sense strand
gugcauaucaccaaaccau

SEQ ID NO: 2603826 - RNA, 19 nt, Homo sapiens
  misc_RNA (1)...(19): siRNA sense strand
agaggaagaggaugaggau

SEQ ID NO: 2603827 - RNA, 19 nt, Homo sapiens
  misc_RNA (1)...(19): siRNA sense strand
cugaggaagaugaggaaga

SEQ ID NO: 2603828 - RNA, 19 nt, Homo sapiens
  misc_RNA (1)...(19): siRNA sense strand
agaacaagaggcagaggaa

SEQ ID NO: 2603829 - RNA, 19 nt, Homo sapiens
  misc_RNA (1)...(19): siRNA sense strand
uagcagaacaagaggcaga

SEQ ID NO: 2603830 - RNA, 19 nt, Homo sapiens
  misc_RNA (1)...(19): siRNA sense strand
aggaagaugaggaagaaga

SEQ ID NO: 2603831 - RNA, 19 nt, Homo sapiens
  misc_RNA (1)...(19): siRNA sense strand
ccaagaugguccagcacau

SEQ ID NO: 2603832 - RNA, 19 nt, Homo sapiens
  misc_RNA (1)...(19): siRNA sense strand
agauagaagaggugccaga

SEQ ID NO: 2603833 - RNA, 19 nt, Homo sapiens
  misc_RNA (1)...(19): siRNA sense strand
ggccaaagaggaagaggau

SEQ ID NO: 2603834 - RNA, 19 nt, Homo sapiens
  misc_RNA (1)...(19): siRNA sense strand
ccaagaaagccgaccgcau

SEQ ID NO: 2603835 - RNA, 19 nt, Homo sapiens
  misc_RNA (1)...(19): siRNA sense strand
gggaagcaauuuaagcgaa

SEQ ID NO: 2603836 - RNA, 19 nt, Homo sapiens
  misc_RNA (1)...(19): siRNA sense strand
aggaugaggaugaggacga

SEQ ID NO: 2603837 - RNA, 19 nt, Homo sapiens
  misc_RNA (1)...(19): siRNA sense strand
ggaagaagacggugaggac

SEQ ID NO: 2603838 - RNA, 19 nt, Homo sapiens
  misc_RNA (1)...(19): siRNA sense strand
ggacgaggcaagaggcgau

SEQ ID NO: 2603839 - RNA, 19 nt, Homo sapiens
  misc_RNA (1)...(19): siRNA sense strand
ucagaaagucaaucagaau

SEQ ID NO: 2603840 - RNA, 19 nt, Homo sapiens
  misc_RNA (1)...(19): siRNA sense strand
ccacagacuacgacagcuu

SEQ ID NO: 2603841 - RNA, 19 nt, Homo sapiens
  misc_RNA (1)...(19): siRNA sense strand
acgaggacacugaggaaga

SEQ ID NO: 2603842 - RNA, 19 nt, Homo sapiens
  misc_RNA (1)...(19): siRNA sense strand
gaacagaccacuaucccaa

SEQ ID NO: 2603843 - RNA, 19 nt, Homo sapiens
  misc_RNA (1)...(19): siRNA sense strand
ugaaagaucauguggccau

SEQ ID NO: 2603844 - RNA, 19 nt, Homo sapiens
  misc_RNA (1)...(19): siRNA sense strand
cgaaagaagcauccagagu

SEQ ID NO: 2603845 - RNA, 19 nt, Homo sapiens
  misc_RNA (1)...(19): siRNA sense strand
ggacaggaaagaaagggau

SEQ ID NO: 2603846 - RNA, 19 nt, Homo sapiens
  misc_RNA (1)...(19): siRNA sense strand
caguauugcgauaagguuu

SEQ ID NO: 2603847 - RNA, 19 nt, Homo sapiens
  misc_RNA (1)...(19): siRNA sense strand
ggaacaugaaccagaaacu

SEQ ID NO: 2603848 - RNA, 19 nt, Homo sapiens
  misc_RNA (1)...(19): siRNA sense strand
ugauaaaggggacaggaaa

SEQ ID NO: 2603849 - RNA, 19 nt, Homo sapiens
  misc_RNA (1)...(19): siRNA sense strand
gcgaagugcauaucaccaa

SEQ ID NO: 2603850 - RNA, 19 nt, Homo sapiens
  misc_RNA (1)...(19): siRNA sense strand
aguauugcgauaagguuua

SEQ ID NO: 2603851 - RNA, 19 nt, Homo sapiens
  misc_RNA (1)...(19): siRNA sense strand
uaggcagacuggaggccaa

SEQ ID NO: 2603852 - RNA, 19 nt, Homo sapiens
  misc_RNA (1)...(19): siRNA sense strand
uggugugaggagugcaaua

SEQ ID NO: 2603853 - RNA, 19 nt, Homo sapiens
  misc_RNA (1)...(19): siRNA sense strand
gacaggaaagaaagggauu

SEQ ID NO: 2603854 - RNA, 19 nt, Homo sapiens
  misc_RNA (1)...(19): siRNA sense strand
acuggaggccaaagaggaa

SEQ ID NO: 2603855 - RNA, 19 nt, Homo sapiens
  misc_RNA (1)...(19): siRNA sense strand
aagcaguacagcagcaaga

SEQ ID NO: 2603856 - RNA, 19 nt, Homo sapiens
  misc_RNA (1)...(19): siRNA sense strand
ucaugacauuucugaggaa

SEQ ID NO: 2603857 - RNA, 19 nt, Homo sapiens
  misc_RNA (1)...(19): siRNA sense strand
uucgagagcaagagaagaa

SEQ ID NO: 2603858 - RNA, 19 nt, Homo sapiens
  misc_RNA (1)...(19): siRNA sense strand
augagaaacuagauguguu

SEQ ID NO: 2603859 - RNA, 19 nt, Homo sapiens
  misc_RNA (1)...(19): siRNA sense strand
aaagagugacgaugggaca

SEQ ID NO: 2603860 - RNA, 19 nt, Homo sapiens
  misc_RNA (1)...(19): siRNA sense strand
cggaagcagcgaagugcau

SEQ ID NO: 2603861 - RNA, 19 nt, Homo sapiens
  misc_RNA (1)...(19): siRNA sense strand
caaccagaacagaccacua

SEQ ID NO: 2603862 - RNA, 19 nt, Homo sapiens
  misc_RNA (1)...(19): siRNA sense strand
gggacaggaaagaaaggga

SEQ ID NO: 2603863 - RNA, 19 nt, Homo sapiens
  misc_RNA (1)...(19): siRNA sense strand
aggccaaagaggaagagga

SEQ ID NO: 2603864 - RNA, 19 nt, Homo sapiens
  misc_RNA (1)...(19): siRNA sense strand
aagacaaacuacgggaaca

SEQ ID NO: 2603865 - RNA, 19 nt, Homo sapiens
  misc_RNA (1)...(19): siRNA sense strand
aaaggaaaguucuucgaga

SEQ ID NO: 2603866 - RNA, 19 nt, Homo sapiens
  misc_RNA (1)...(19): siRNA sense strand
aggaacugaagguguggua

SEQ ID NO: 2603867 - RNA, 19 nt, Homo sapiens
  misc_RNA (1)...(19): siRNA sense strand
augaggaagaagacgguga

SEQ ID NO: 2603868 - RNA, 19 nt, Homo sapiens
  misc_RNA (1)...(19): siRNA sense strand
cgagagcaagagaagaauu

SEQ ID NO: 2603869 - RNA, 19 nt, Homo sapiens
  misc_RNA (1)...(19): siRNA sense strand
caauuuaagcgaaaagaca

SEQ ID NO: 2603870 - RNA, 19 nt, Homo sapiens
  misc_RNA (1)...(19): siRNA sense strand
acaugaagauagaagaggu

SEQ ID NO: 2603871 - RNA, 19 nt, Homo sapiens
  misc_RNA (1)...(19): siRNA sense strand
gagcagaaccugguggcuu

SEQ ID NO: 2603872 - RNA, 19 nt, Homo sapiens
  misc_RNA (1)...(19): siRNA sense strand
gcgauucgguccaggucga

SEQ ID NO: 2603873 - RNA, 19 nt, Homo sapiens
  misc_RNA (1)...(19): siRNA sense strand
gaagcagcgaagugcauau

SEQ ID NO: 2603874 - RNA, 19 nt, Homo sapiens
  misc_RNA (1)...(19): siRNA sense strand
gugcauaucaccaaaccau

SEQ ID NO: 2603875 - RNA, 19 nt, Homo sapiens
  misc_RNA (1)...(19): siRNA sense strand
agaggaagaggaugaggau

SEQ ID NO: 2603876 - RNA, 19 nt, Homo sapiens
  misc_RNA (1)...(19): siRNA sense strand
aggugaggcauuagcuaaa

SEQ ID NO: 2603877 - RNA, 19 nt, Homo sapiens
  misc_RNA (1)...(19): siRNA sense strand
caucuagcaaagaggacaa

SEQ ID NO: 2603878 - RNA, 19 nt, Homo sapiens
  misc_RNA (1)...(19): siRNA sense strand
aggaaaaggaaccaaguua

SEQ ID NO: 2603879 - RNA, 19 nt, Homo sapiens
  misc_RNA (1)...(19): siRNA sense strand
caugaagcugggagaagaa

SEQ ID NO: 2603880 - RNA, 19 nt, Homo sapiens
  misc_RNA (1)...(19): siRNA sense strand
ugaugaagucagagccaga

SEQ ID NO: 2603881 - RNA, 19 nt, Homo sapiens
  misc_RNA (1)...(19): siRNA sense strand
agaucgugaaagaggcuua

SEQ ID NO: 2603882 - RNA, 19 nt, Homo sapiens
  misc_RNA (1)...(19): siRNA sense strand
ugaaagaggcuuacccaga

SEQ ID NO: 2603883 - RNA, 19 nt, Homo sapiens
  misc_RNA (1)...(19): siRNA sense strand
gagccaugaagcugggaga

SEQ ID NO: 2603884 - RNA, 19 nt, Homo sapiens
  misc_RNA (1)...(19): siRNA sense strand
acucaugaagaucgugaaa

SEQ ID NO: 2603885 - RNA, 19 nt, Homo sapiens
  misc_RNA (1)...(19): siRNA sense strand
ccgccuagagaaaggugua

SEQ ID NO: 2603886 - RNA, 19 nt, Homo sapiens
  misc_RNA (1)...(19): siRNA sense strand
cagacaacaugcugggaug

SEQ ID NO: 2603887 - RNA, 19 nt, Homo sapiens
  misc_RNA (1)...(19): siRNA sense strand
caagggacuaucaggaaaa

SEQ ID NO: 2603888 - RNA, 19 nt, Homo sapiens
  misc_RNA (1)...(19): siRNA sense strand
cugcaaagagccaggcauc

SEQ ID NO: 2603889 - RNA, 19 nt, Homo sapiens
  misc_RNA (1)...(19): siRNA sense strand
aggugaggcauuagcuaaa

SEQ ID NO: 2603890 - RNA, 19 nt, Homo sapiens
  misc_RNA (1)...(19): siRNA sense strand
caucuagcaaagaggacaa

SEQ ID NO: 2603891 - RNA, 19 nt, Homo sapiens
  misc_RNA (1)...(19): siRNA sense strand
caugaagcugggagaagaa

SEQ ID NO: 2603892 - RNA, 19 nt, Homo sapiens
  misc_RNA (1)...(19): siRNA sense strand
ugaugaagucagagccaga

SEQ ID NO: 2603893 - RNA, 19 nt, Homo sapiens
  misc_RNA (1)...(19): siRNA sense strand
agaucgugaaagaggcuua

SEQ ID NO: 2603894 - RNA, 19 nt, Homo sapiens
  misc_RNA (1)...(19): siRNA sense strand
ugaaagaggcuuacccaga

SEQ ID NO: 2603895 - RNA, 19 nt, Homo sapiens
  misc_RNA (1)...(19): siRNA sense strand
gagccaugaagcugggaga

SEQ ID NO: 2603896 - RNA, 19 nt, Homo sapiens
  misc_RNA (1)...(19): siRNA sense strand
acucaugaagaucgugaaa

SEQ ID NO: 2603897 - RNA, 19 nt, Homo sapiens
  misc_RNA (1)...(19): siRNA sense strand
ccgccuagagaaaggugua

SEQ ID NO: 2603898 - RNA, 19 nt, Homo sapiens
  misc_RNA (1)...(19): siRNA sense strand
cagacaacaugcugggaug

SEQ ID NO: 2603899 - RNA, 19 nt, Homo sapiens
  misc_RNA (1)...(19): siRNA sense strand
caagggacuaucaggaaaa

SEQ ID NO: 2603900 - RNA, 19 nt, Homo sapiens
  misc_RNA (1)...(19): siRNA sense strand
cugcaaagagccaggcauc

SEQ ID NO: 2603901 - RNA, 19 nt, Homo sapiens
  misc_RNA (1)...(19): siRNA sense strand
aggugaggcauuagcuaaa

SEQ ID NO: 2603902 - RNA, 19 nt, Homo sapiens
  misc_RNA (1)...(19): siRNA sense strand
caucuagcaaagaggacaa

SEQ ID NO: 2603903 - RNA, 19 nt, Homo sapiens
  misc_RNA (1)...(19): siRNA sense strand
aggaaaaggaaccaaguua

SEQ ID NO: 2603904 - RNA, 19 nt, Homo sapiens
  misc_RNA (1)...(19): siRNA sense strand
caugaagcugggagaagaa

SEQ ID NO: 2603905 - RNA, 19 nt, Homo sapiens
  misc_RNA (1)...(19): siRNA sense strand
ugaugaagucagagccaga

SEQ ID NO: 2603906 - RNA, 19 nt, Homo sapiens
  misc_RNA (1)...(19): siRNA sense strand
agaucgugaaagaggcuua

SEQ ID NO: 2603907 - RNA, 19 nt, Homo sapiens
  misc_RNA (1)...(19): siRNA sense strand
ugaaagaggcuuacccaga

SEQ ID NO: 2603908 - RNA, 19 nt, Homo sapiens
  misc_RNA (1)...(19): siRNA sense strand
gagccaugaagcugggaga

SEQ ID NO: 2603909 - RNA, 19 nt, Homo sapiens
  misc_RNA (1)...(19): siRNA sense strand
acucaugaagaucgugaaa

SEQ ID NO: 2603910 - RNA, 19 nt, Homo sapiens
  misc_RNA (1)...(19): siRNA sense strand
ccgccuagagaaaggugua

SEQ ID NO: 2603911 - RNA, 19 nt, Homo sapiens
  misc_RNA (1)...(19): siRNA sense strand
cagacaacaugcugggaug

SEQ ID NO: 2603912 - RNA, 19 nt, Homo sapiens
  misc_RNA (1)...(19): siRNA sense strand
caagggacuaucaggaaaa

SEQ ID NO: 2603913 - RNA, 19 nt, Homo sapiens
  misc_RNA (1)...(19): siRNA sense strand
cugcaaagagccaggcauc

SEQ ID NO: 2603914 - RNA, 19 nt, Homo sapiens
  misc_RNA (1)...(19): siRNA sense strand
augcggaggaugaggagaa

SEQ ID NO: 2603915 - RNA, 19 nt, Homo sapiens
  misc_RNA (1)...(19): siRNA sense strand
acuacaguaucgugggaca

SEQ ID NO: 2603916 - RNA, 19 nt, Homo sapiens
  misc_RNA (1)...(19): siRNA sense strand
gaggaugaggagaaugaca

SEQ ID NO: 2603917 - RNA, 19 nt, Homo sapiens
  misc_RNA (1)...(19): siRNA sense strand
cgaggaugucagauguaaa

SEQ ID NO: 2603918 - RNA, 19 nt, Homo sapiens
  misc_RNA (1)...(19): siRNA sense strand
agaacauaucucagaaaga

SEQ ID NO: 2603919 - RNA, 19 nt, Homo sapiens
  misc_RNA (1)...(19): siRNA sense strand
aaguccaagagcagcgaaa

SEQ ID NO: 2603920 - RNA, 19 nt, Homo sapiens
  misc_RNA (1)...(19): siRNA sense strand
cagucagcuaguaggcaua

SEQ ID NO: 2603921 - RNA, 19 nt, Homo sapiens
  misc_RNA (1)...(19): siRNA sense strand
aggcaucacauguuggcaa

SEQ ID NO: 2603922 - RNA, 19 nt, Homo sapiens
  misc_RNA (1)...(19): siRNA sense strand
gauaaagaccaaauggaug

SEQ ID NO: 2603923 - RNA, 19 nt, Homo sapiens
  misc_RNA (1)...(19): siRNA sense strand
aauauuagguggagccaac

SEQ ID NO: 2603924 - RNA, 19 nt, Homo sapiens
  misc_RNA (1)...(19): siRNA sense strand
cauguuagccacagagcca

SEQ ID NO: 2603925 - RNA, 19 nt, Homo sapiens
  misc_RNA (1)...(19): siRNA sense strand
uuaucauuccugagaggua

SEQ ID NO: 2603926 - RNA, 19 nt, Homo sapiens
  misc_RNA (1)...(19): siRNA sense strand
ccagucagcuaguaggcau

SEQ ID NO: 2603927 - RNA, 19 nt, Homo sapiens
  misc_RNA (1)...(19): siRNA sense strand
cguuucugcugcuggacaa

SEQ ID NO: 2603928 - RNA, 19 nt, Homo sapiens
  misc_RNA (1)...(19): siRNA sense strand
uggacgagcugcacggcuu

SEQ ID NO: 2603929 - RNA, 19 nt, Homo sapiens
  misc_RNA (1)...(19): siRNA sense strand
uggacgacguggagcucau

SEQ ID NO: 2603930 - RNA, 19 nt, Homo sapiens
  misc_RNA (1)...(19): siRNA sense strand
ggguguguguccuacgcaa

SEQ ID NO: 2603931 - RNA, 19 nt, Homo sapiens
  misc_RNA (1)...(19): siRNA sense strand
gguguguguccuacgcaaa

SEQ ID NO: 2603932 - RNA, 19 nt, Homo sapiens
  misc_RNA (1)...(19): siRNA sense strand
cugauaaagcugagaccaa

SEQ ID NO: 2603933 - RNA, 19 nt, Homo sapiens
  misc_RNA (1)...(19): siRNA sense strand
caagaauaacccuggaaaa

SEQ ID NO: 2603934 - RNA, 19 nt, Homo sapiens
  misc_RNA (1)...(19): siRNA sense strand
ccagaggaguauuuggaga

SEQ ID NO: 2603935 - RNA, 19 nt, Homo sapiens
  misc_RNA (1)...(19): siRNA sense strand
ggaaugagcgggaaaggca

SEQ ID NO: 2603936 - RNA, 19 nt, Homo sapiens
  misc_RNA (1)...(19): siRNA sense strand
ggaaaaggaaugagcggga

SEQ ID NO: 2603937 - RNA, 19 nt, Homo sapiens
  misc_RNA (1)...(19): siRNA sense strand
uggagaagcgacucagcaa

SEQ ID NO: 2603938 - RNA, 19 nt, Homo sapiens
  misc_RNA (1)...(19): siRNA sense strand
aaaaggaaugagcgggaaa

SEQ ID NO: 2603939 - RNA, 19 nt, Homo sapiens
  misc_RNA (1)...(19): siRNA sense strand
ccuucuaucuggagcccau

SEQ ID NO: 2603940 - RNA, 19 nt, Homo sapiens
  misc_RNA (1)...(19): siRNA sense strand
gcgacucagcaaaguggaa

SEQ ID NO: 2603941 - RNA, 19 nt, Homo sapiens
  misc_RNA (1)...(19): siRNA sense strand
acucucuuauccugggaaa

SEQ ID NO: 2603942 - RNA, 19 nt, Homo sapiens
  misc_RNA (1)...(19): siRNA sense strand
gaaugagagaagagaagaa

SEQ ID NO: 2603943 - RNA, 19 nt, Homo sapiens
  misc_RNA (1)...(19): siRNA sense strand
gggcauaugcacaggccaa

SEQ ID NO: 2603944 - RNA, 19 nt, Homo sapiens
  misc_RNA (1)...(19): siRNA sense strand
gaaacuaccuggaggccau

SEQ ID NO: 2603945 - RNA, 19 nt, Homo sapiens
  misc_RNA (1)...(19): siRNA sense strand
gaggaguacaaguggaauu

SEQ ID NO: 2603946 - RNA, 19 nt, Homo sapiens
  misc_RNA (1)...(19): siRNA sense strand
ugaaauaaaccgagccuca

SEQ ID NO: 2603947 - RNA, 19 nt, Homo sapiens
  misc_RNA (1)...(19): siRNA sense strand
acauaggagaacagggcua

SEQ ID NO: 2603948 - RNA, 19 nt, Homo sapiens
  misc_RNA (1)...(19): siRNA sense strand
gcuggugaacuguggguua

SEQ ID NO: 2603949 - RNA, 19 nt, Homo sapiens
  misc_RNA (1)...(19): siRNA sense strand
ggacaaguugccuggagaa

SEQ ID NO: 2603950 - RNA, 19 nt, Homo sapiens
  misc_RNA (1)...(19): siRNA sense strand
gcagaaugagagaagagaa

SEQ ID NO: 2603951 - RNA, 19 nt, Homo sapiens
  misc_RNA (1)...(19): siRNA sense strand
acaagauaguaacggacaa

SEQ ID NO: 2603952 - RNA, 19 nt, Homo sapiens
  misc_RNA (1)...(19): siRNA sense strand
uggaacaggcagagggcuu

SEQ ID NO: 2603953 - RNA, 19 nt, Homo sapiens
  misc_RNA (1)...(19): siRNA sense strand
ccaccagacccgacagaau

SEQ ID NO: 2603954 - RNA, 19 nt, Homo sapiens
  misc_RNA (1)...(19): siRNA sense strand
guuaagaaugagaagguca

SEQ ID NO: 2603955 - RNA, 19 nt, Homo sapiens
  misc_RNA (1)...(19): siRNA sense strand
cagcaggaguggacgacuu

SEQ ID NO: 2603956 - RNA, 19 nt, Homo sapiens
  misc_RNA (1)...(19): siRNA sense strand
aggaagauuuacagaagga

SEQ ID NO: 2603957 - RNA, 19 nt, Homo sapiens
  misc_RNA (1)...(19): siRNA sense strand
ggaugauagauaauggaau

SEQ ID NO: 2603958 - RNA, 19 nt, Homo sapiens
  misc_RNA (1)...(19): siRNA sense strand
uggagacauuguagagauu

SEQ ID NO: 2603959 - RNA, 19 nt, Homo sapiens
  misc_RNA (1)...(19): siRNA sense strand
aagcagcggaugauagaua

SEQ ID NO: 2603960 - RNA, 19 nt, Homo sapiens
  misc_RNA (1)...(19): siRNA sense strand
cagaagagcucgugcacuc

SEQ ID NO: 2603961 - RNA, 19 nt, Homo sapiens
  misc_RNA (1)...(19): siRNA sense strand
agauaguaacggacaaaga

SEQ ID NO: 2603962 - RNA, 19 nt, Homo sapiens
  misc_RNA (1)...(19): siRNA sense strand
cccuugaccuaguggaauu

SEQ ID NO: 2603963 - RNA, 19 nt, Homo sapiens
  misc_RNA (1)...(19): siRNA sense strand
ggguuaagaaugagaaggu

SEQ ID NO: 2603964 - RNA, 19 nt, Homo sapiens
  misc_RNA (1)...(19): siRNA sense strand
cagaaugagagaagagaag

SEQ ID NO: 2603965 - RNA, 19 nt, Homo sapiens
  misc_RNA (1)...(19): siRNA sense strand
agaauauggcggagcuaca

SEQ ID NO: 2603966 - RNA, 19 nt, Homo sapiens
  misc_RNA (1)...(19): siRNA sense strand
ggacgaagauggugugcag

SEQ ID NO: 2603967 - RNA, 19 nt, Homo sapiens
  misc_RNA (1)...(19): siRNA sense strand
acaaagagcccgaccgagu

SEQ ID NO: 2603968 - RNA, 19 nt, Homo sapiens
  misc_RNA (1)...(19): siRNA sense strand
gagaagagaagaauggacu

SEQ ID NO: 2603969 - RNA, 19 nt, Homo sapiens
  misc_RNA (1)...(19): siRNA sense strand
caagauaguaacggacaaa

SEQ ID NO: 2603970 - RNA, 19 nt, Homo sapiens
  misc_RNA (1)...(19): siRNA sense strand
ggacaaagagcccgaccga

SEQ ID NO: 2603971 - RNA, 19 nt, Homo sapiens
  misc_RNA (1)...(19): siRNA sense strand
ggagaagaacuguagucau

SEQ ID NO: 2603972 - RNA, 19 nt, Homo sapiens
  misc_RNA (1)...(19): siRNA sense strand
gaacuuucuaugaugcaaa

SEQ ID NO: 2603973 - RNA, 19 nt, Homo sapiens
  misc_RNA (1)...(19): siRNA sense strand
ccucaauucgacaggauca

SEQ ID NO: 2603974 - RNA, 19 nt, Homo sapiens
  misc_RNA (1)...(19): siRNA sense strand
uggaggaguacaaguggaa

SEQ ID NO: 2603975 - RNA, 19 nt, Homo sapiens
  misc_RNA (1)...(19): siRNA sense strand
uuaccaaguggaaggagaa

SEQ ID NO: 2603976 - RNA, 19 nt, Homo sapiens
  misc_RNA (1)...(19): siRNA sense strand
ccaugaaaggcuugcagau

SEQ ID NO: 2603977 - RNA, 19 nt, Homo sapiens
  misc_RNA (1)...(19): siRNA sense strand
augaugagcuaguugugaa

SEQ ID NO: 2603978 - RNA, 19 nt, Homo sapiens
  misc_RNA (1)...(19): siRNA sense strand
aagugguggugcagaauga

SEQ ID NO: 2603979 - RNA, 19 nt, Homo sapiens
  misc_RNA (1)...(19): siRNA sense strand
gaucugugcgagagcgaga

SEQ ID NO: 2603980 - RNA, 19 nt, Homo sapiens
  misc_RNA (1)...(19): siRNA sense strand
cccagagagcacugauuaa

SEQ ID NO: 2603981 - RNA, 19 nt, Homo sapiens
  misc_RNA (1)...(19): siRNA sense strand
gaaagguaucuguggacca

SEQ ID NO: 2603982 - RNA, 19 nt, Homo sapiens
  misc_RNA (1)...(19): siRNA sense strand
guauauuggccguggggau

SEQ ID NO: 2603983 - RNA, 19 nt, Homo sapiens
  misc_RNA (1)...(19): siRNA sense strand
ucacguuggcagugcagaa

SEQ ID NO: 2603984 - RNA, 19 nt, Homo sapiens
  misc_RNA (1)...(19): siRNA sense strand
aaaucauagugcagcccaa

SEQ ID NO: 2603985 - RNA, 19 nt, Homo sapiens
  misc_RNA (1)...(19): siRNA sense strand
uaauggaauugguguggau

SEQ ID NO: 2603986 - RNA, 19 nt, Homo sapiens
  misc_RNA (1)...(19): siRNA sense strand
gcucgugcacucugagauu

SEQ ID NO: 2603987 - RNA, 19 nt, Homo sapiens
  misc_RNA (1)...(19): siRNA sense strand
gguuuggguuuguacaaga

SEQ ID NO: 2603988 - RNA, 19 nt, Homo sapiens
  misc_RNA (1)...(19): siRNA sense strand
ucagcagcuccuugggaua

SEQ ID NO: 2603989 - RNA, 19 nt, Homo sapiens
  misc_RNA (1)...(19): siRNA sense strand
uggguuuguacaagauaaa

SEQ ID NO: 2603990 - RNA, 19 nt, Homo sapiens
  misc_RNA (1)...(19): siRNA sense strand
cuaccucagcacaaggaaa

SEQ ID NO: 2603991 - RNA, 19 nt, Homo sapiens
  misc_RNA (1)...(19): siRNA sense strand
cucgagauguccuggagaa

SEQ ID NO: 2603992 - RNA, 19 nt, Homo sapiens
  misc_RNA (1)...(19): siRNA sense strand
cugaggaggaggaccagua

SEQ ID NO: 2603993 - RNA, 19 nt, Homo sapiens
  misc_RNA (1)...(19): siRNA sense strand
agacacaggcgauggccau

SEQ ID NO: 2603994 - RNA, 19 nt, Homo sapiens
  misc_RNA (1)...(19): siRNA sense strand
gggcagaugucagugguga

SEQ ID NO: 2603995 - RNA, 19 nt, Homo sapiens
  misc_RNA (1)...(19): siRNA sense strand
cgacaggagggacgaagau

SEQ ID NO: 2603996 - RNA, 19 nt, Homo sapiens
  misc_RNA (1)...(19): siRNA sense strand
cugaaggauaagaugauca

SEQ ID NO: 2603997 - RNA, 19 nt, Homo sapiens
  misc_RNA (1)...(19): siRNA sense strand
cagacgaggacgaguggca

SEQ ID NO: 2603998 - RNA, 19 nt, Homo sapiens
  misc_RNA (1)...(19): siRNA sense strand
cuggugaacuguggguuaa

SEQ ID NO: 2603999 - RNA, 19 nt, Homo sapiens
  misc_RNA (1)...(19): siRNA sense strand
ugcaaaaucuguugaugaa

SEQ ID NO: 2604000 - RNA, 19 nt, Homo sapiens
  misc_RNA (1)...(19): siRNA sense strand
aauccuaggacccagaaua

SEQ ID NO: 2604001 - RNA, 19 nt, Homo sapiens
  misc_RNA (1)...(19): siRNA sense strand
acaaagugacgcugaagga

SEQ ID NO: 2604002 - RNA, 19 nt, Homo sapiens
  misc_RNA (1)...(19): siRNA sense strand
uccacaaacuccagugaca

SEQ ID NO: 2604003 - RNA, 19 nt, Homo sapiens
  misc_RNA (1)...(19): siRNA sense strand
ggaccuucaucuacggcuu

SEQ ID NO: 2604004 - RNA, 19 nt, Homo sapiens
  misc_RNA (1)...(19): siRNA sense strand
ccaguuaccuguauggcga

SEQ ID NO: 2604005 - RNA, 19 nt, Homo sapiens
  misc_RNA (1)...(19): siRNA sense strand
uuuacaaagugguggugca

SEQ ID NO: 2604006 - RNA, 19 nt, Homo sapiens
  misc_RNA (1)...(19): siRNA sense strand
guguggauuuggugugcau

SEQ ID NO: 2604007 - RNA, 19 nt, Homo sapiens
  misc_RNA (1)...(19): siRNA sense strand
cuaugaagucuaaggccaa

SEQ ID NO: 2604008 - RNA, 19 nt, Homo sapiens
  misc_RNA (1)...(19): siRNA sense strand
ucuaagaagcccagcucaa

SEQ ID NO: 2604009 - RNA, 19 nt, Homo sapiens
  misc_RNA (1)...(19): siRNA sense strand
ggaaaaggaaugugggguu

SEQ ID NO: 2604010 - RNA, 19 nt, Homo sapiens
  misc_RNA (1)...(19): siRNA sense strand
gcuccuuguuugaugaaaa

SEQ ID NO: 2604011 - RNA, 19 nt, Homo sapiens
  misc_RNA (1)...(19): siRNA sense strand
cccaaagaauggaaagcca

SEQ ID NO: 2604012 - RNA, 19 nt, Homo sapiens
  misc_RNA (1)...(19): siRNA sense strand
ccuacaguucucaaggaaa

SEQ ID NO: 2604013 - RNA, 19 nt, Homo sapiens
  misc_RNA (1)...(19): siRNA sense strand
acuaugaagucuaaggcca

SEQ ID NO: 2604014 - RNA, 19 nt, Homo sapiens
  misc_RNA (1)...(19): siRNA sense strand
agugaaaucuuaauagcca

SEQ ID NO: 2604015 - RNA, 19 nt, Homo sapiens
  misc_RNA (1)...(19): siRNA sense strand
ccuguggaaacgugggcaa

SEQ ID NO: 2604016 - RNA, 19 nt, Homo sapiens
  misc_RNA (1)...(19): siRNA sense strand
gcuggagaguucaugguga

SEQ ID NO: 2604017 - RNA, 19 nt, Homo sapiens
  misc_RNA (1)...(19): siRNA sense strand
caaagaauggaaagccaga

SEQ ID NO: 2604018 - RNA, 19 nt, Homo sapiens
  misc_RNA (1)...(19): siRNA sense strand
ccacauggagcccagggua

SEQ ID NO: 2604019 - RNA, 19 nt, Homo sapiens
  misc_RNA (1)...(19): siRNA sense strand
ucaucaaguccgagggcau

SEQ ID NO: 2604020 - RNA, 19 nt, Homo sapiens
  misc_RNA (1)...(19): siRNA sense strand
cuaaggagguggaggcggu

SEQ ID NO: 2604021 - RNA, 19 nt, Homo sapiens
  misc_RNA (1)...(19): siRNA sense strand
aguccgagggcaugaucaa

SEQ ID NO: 2604022 - RNA, 19 nt, Homo sapiens
  misc_RNA (1)...(19): siRNA sense strand
acauaaugcgcguggugca

SEQ ID NO: 2604023 - RNA, 19 nt, Homo sapiens
  misc_RNA (1)...(19): siRNA sense strand
cugcacagguccucggcaa

SEQ ID NO: 2604024 - RNA, 19 nt, Homo sapiens
  misc_RNA (1)...(19): siRNA sense strand
uagcaagauauaugggaga

SEQ ID NO: 2604025 - RNA, 19 nt, Homo sapiens
  misc_RNA (1)...(19): siRNA sense strand
agugaaagaagccggaaga

SEQ ID NO: 2604026 - RNA, 19 nt, Homo sapiens
  misc_RNA (1)...(19): siRNA sense strand
gugaaagagaacccaggaa

SEQ ID NO: 2604027 - RNA, 19 nt, Homo sapiens
  misc_RNA (1)...(19): siRNA sense strand
caguuugagaugugggcuu

SEQ ID NO: 2604028 - RNA, 19 nt, Homo sapiens
  misc_RNA (1)...(19): siRNA sense strand
ugaagauaaucgaucccaa

SEQ ID NO: 2604029 - RNA, 19 nt, Homo sapiens
  misc_RNA (1)...(19): siRNA sense strand
gagccagggaagcaaggaa

SEQ ID NO: 2604030 - RNA, 19 nt, Homo sapiens
  misc_RNA (1)...(19): siRNA sense strand
aagaaaacgcugcgaccua

SEQ ID NO: 2604031 - RNA, 19 nt, Homo sapiens
  misc_RNA (1)...(19): siRNA sense strand
gguccucggcaaagcgauu

SEQ ID NO: 2604032 - RNA, 19 nt, Homo sapiens
  misc_RNA (1)...(19): siRNA sense strand
cgguguaugcgcaagugaa

SEQ ID NO: 2604033 - RNA, 19 nt, Homo sapiens
  misc_RNA (1)...(19): siRNA sense strand
cggagaagcugcacagguc

SEQ ID NO: 2604034 - RNA, 19 nt, Homo sapiens
  misc_RNA (1)...(19): siRNA sense strand
ccauggaaguugagcccaa

SEQ ID NO: 2604035 - RNA, 19 nt, Homo sapiens
  misc_RNA (1)...(19): siRNA sense strand
acagaaugaccgagaacau

SEQ ID NO: 2604036 - RNA, 19 nt, Homo sapiens
  misc_RNA (1)...(19): siRNA sense strand
ggagagaagagguugcaga

SEQ ID NO: 2604037 - RNA, 19 nt, Homo sapiens
  misc_RNA (1)...(19): siRNA sense strand
agaagagguugcagaggga

SEQ ID NO: 2604038 - RNA, 19 nt, Homo sapiens
  misc_RNA (1)...(19): siRNA sense strand
caagcuaagaagaagaaaa

SEQ ID NO: 2604039 - RNA, 19 nt, Homo sapiens
  misc_RNA (1)...(19): siRNA sense strand
ccuuuaccagagagagaaa

SEQ ID NO: 2604040 - RNA, 19 nt, Homo sapiens
  misc_RNA (1)...(19): siRNA sense strand
ggacaaaucagcuggcuuc

SEQ ID NO: 2604041 - RNA, 19 nt, Homo sapiens
  misc_RNA (1)...(19): siRNA sense strand
gggagaagucugagcaggu

SEQ ID NO: 2604042 - RNA, 19 nt, Homo sapiens
  misc_RNA (1)...(19): siRNA sense strand
cugcgaagguggaagccca

SEQ ID NO: 2604043 - RNA, 19 nt, Homo sapiens
  misc_RNA (1)...(19): siRNA sense strand
aauuggaggaugaagaaga

SEQ ID NO: 2604044 - RNA, 19 nt, Homo sapiens
  misc_RNA (1)...(19): siRNA sense strand
gccuacagucagugugcaa

SEQ ID NO: 2604045 - RNA, 19 nt, Homo sapiens
  misc_RNA (1)...(19): siRNA sense strand
cagacgagaccaaagccaa

SEQ ID NO: 2604046 - RNA, 19 nt, Homo sapiens
  misc_RNA (1)...(19): siRNA sense strand
agaacaugaaggagugcuu

SEQ ID NO: 2604047 - RNA, 19 nt, Homo sapiens
  misc_RNA (1)...(19): siRNA sense strand
aagagguugcagagggaga

SEQ ID NO: 2604048 - RNA, 19 nt, Homo sapiens
  misc_RNA (1)...(19): siRNA sense strand
caacaaugacccauggugu

SEQ ID NO: 2604049 - RNA, 19 nt, Homo sapiens
  misc_RNA (1)...(19): siRNA sense strand
caugcuuaagucugggaaa

SEQ ID NO: 2604050 - RNA, 19 nt, Homo sapiens
  misc_RNA (1)...(19): siRNA sense strand
uggacaagaacaaccgcua

SEQ ID NO: 2604051 - RNA, 19 nt, Homo sapiens
  misc_RNA (1)...(19): siRNA sense strand
aggaaaccauucaccgcaa

SEQ ID NO: 2604052 - RNA, 19 nt, Homo sapiens
  misc_RNA (1)...(19): siRNA sense strand
agucagugugcaacaacaa

SEQ ID NO: 2604053 - RNA, 19 nt, Homo sapiens
  misc_RNA (1)...(19): siRNA sense strand
gauuauugucggagggcag

SEQ ID NO: 2604054 - RNA, 19 nt, Homo sapiens
  misc_RNA (1)...(19): siRNA sense strand
agggcauggagguggucaa

SEQ ID NO: 2604055 - RNA, 19 nt, Homo sapiens
  misc_RNA (1)...(19): siRNA sense strand
aagccaacuggaugaggua

SEQ ID NO: 2604056 - RNA, 19 nt, Homo sapiens
  misc_RNA (1)...(19): siRNA sense strand
gcauaugagaagucaacca

SEQ ID NO: 2604057 - RNA, 19 nt, Homo sapiens
  misc_RNA (1)...(19): siRNA sense strand
gaaucagaaucacuggcua

SEQ ID NO: 2604058 - RNA, 19 nt, Homo sapiens
  misc_RNA (1)...(19): siRNA sense strand
uauccaaagagguaaucaa

SEQ ID NO: 2604059 - RNA, 19 nt, Homo sapiens
  misc_RNA (1)...(19): siRNA sense strand
gggugaaauuacagagacc

SEQ ID NO: 2604060 - RNA, 19 nt, Homo sapiens
  misc_RNA (1)...(19): siRNA sense strand
ucguuuaucuguauggaga

SEQ ID NO: 2604061 - RNA, 19 nt, Homo sapiens
  misc_RNA (1)...(19): siRNA sense strand
ccuuugugauagaggccau

SEQ ID NO: 2604062 - RNA, 19 nt, Homo sapiens
  misc_RNA (1)...(19): siRNA sense strand
ggcugguguuccuggacua

SEQ ID NO: 2604063 - RNA, 19 nt, Homo sapiens
  misc_RNA (1)...(19): siRNA sense strand
acuggaagaggauggagaa

SEQ ID NO: 2604064 - RNA, 19 nt, Homo sapiens
  misc_RNA (1)...(19): siRNA sense strand
aggaggaggaagaugacga

SEQ ID NO: 2604065 - RNA, 19 nt, Homo sapiens
  misc_RNA (1)...(19): siRNA sense strand
caugggaaccggaggaaaa

SEQ ID NO: 2604066 - RNA, 19 nt, Homo sapiens
  misc_RNA (1)...(19): siRNA sense strand
agggagagggagcgagaga

SEQ ID NO: 2604067 - RNA, 19 nt, Homo sapiens
  misc_RNA (1)...(19): siRNA sense strand
cgagaaagggagagggagc

SEQ ID NO: 2604068 - RNA, 19 nt, Homo sapiens
  misc_RNA (1)...(19): siRNA sense strand
aagcgcaggccaaggcaaa

SEQ ID NO: 2604069 - RNA, 19 nt, Homo sapiens
  misc_RNA (1)...(19): siRNA sense strand
cgggagcgggaucgagaaa

SEQ ID NO: 2604070 - RNA, 19 nt, Homo sapiens
  misc_RNA (1)...(19): siRNA sense strand
gggaaagagagauggagcu

SEQ ID NO: 2604071 - RNA, 19 nt, Homo sapiens
  misc_RNA (1)...(19): siRNA sense strand
uggaagggauggucgcaga

SEQ ID NO: 2604072 - RNA, 19 nt, Homo sapiens
  misc_RNA (1)...(19): siRNA sense strand
gcacaugggaaccggagga

SEQ ID NO: 2604073 - RNA, 19 nt, Homo sapiens
  misc_RNA (1)...(19): siRNA sense strand
acggaaaggacgcauggaa

SEQ ID NO: 2604074 - RNA, 19 nt, Homo sapiens
  misc_RNA (1)...(19): siRNA sense strand
gagaguaccucaagggcag

SEQ ID NO: 2604075 - RNA, 19 nt, Homo sapiens
  misc_RNA (1)...(19): siRNA sense strand
ggaaaguaacacggaccaa

SEQ ID NO: 2604076 - RNA, 19 nt, Homo sapiens
  misc_RNA (1)...(19): siRNA sense strand
gcaggaagcuggacgacac

SEQ ID NO: 2604077 - RNA, 19 nt, Homo sapiens
  misc_RNA (1)...(19): siRNA sense strand
uggagaaggugguggucac

SEQ ID NO: 2604078 - RNA, 19 nt, Homo sapiens
  misc_RNA (1)...(19): siRNA sense strand
acagaggcccuuaggcgaa

SEQ ID NO: 2604079 - RNA, 19 nt, Homo sapiens
  misc_RNA (1)...(19): siRNA sense strand
cgggaucgagaaagggaga

SEQ ID NO: 2604080 - RNA, 19 nt, Homo sapiens
  misc_RNA (1)...(19): siRNA sense strand
agagggagcgagagaggga

SEQ ID NO: 2604081 - RNA, 19 nt, Homo sapiens
  misc_RNA (1)...(19): siRNA sense strand
ggagaguaccucaagggca

SEQ ID NO: 2604082 - RNA, 19 nt, Homo sapiens
  misc_RNA (1)...(19): siRNA sense strand
aaagggagagggagcgaga

SEQ ID NO: 2604083 - RNA, 19 nt, Homo sapiens
  misc_RNA (1)...(19): siRNA sense strand
gugauaaagcacagggcug

SEQ ID NO: 2604084 - RNA, 19 nt, Homo sapiens
  misc_RNA (1)...(19): siRNA sense strand
ggugaagaacagucagcaa

SEQ ID NO: 2604085 - RNA, 19 nt, Homo sapiens
  misc_RNA (1)...(19): siRNA sense strand
gaaacuagaugauggccau

SEQ ID NO: 2604086 - RNA, 19 nt, Homo sapiens
  misc_RNA (1)...(19): siRNA sense strand
gaucaguggccgacagcga

SEQ ID NO: 2604087 - RNA, 19 nt, Homo sapiens
  misc_RNA (1)...(19): siRNA sense strand
agguguuagugaugggcau

SEQ ID NO: 2604088 - RNA, 19 nt, Homo sapiens
  misc_RNA (1)...(19): siRNA sense strand
gaguguuuguggauggaca

SEQ ID NO: 2604089 - RNA, 19 nt, Homo sapiens
  misc_RNA (1)...(19): siRNA sense strand
gcacauuaaagguggcaug

SEQ ID NO: 2604090 - RNA, 19 nt, Homo sapiens
  misc_RNA (1)...(19): siRNA sense strand
aaagauaaauggagaccuc

SEQ ID NO: 2604091 - RNA, 19 nt, Homo sapiens
  misc_RNA (1)...(19): siRNA sense strand
gcagagagcagaugggaca

SEQ ID NO: 2604092 - RNA, 19 nt, Homo sapiens
  misc_RNA (1)...(19): siRNA sense strand
ucgaaauggagaaggugaa

SEQ ID NO: 2604093 - RNA, 19 nt, Homo sapiens
  misc_RNA (1)...(19): siRNA sense strand
gagaaauucaggaggccau

SEQ ID NO: 2604094 - RNA, 19 nt, Homo sapiens
  misc_RNA (1)...(19): siRNA sense strand
cagaaaucccggaggagca

SEQ ID NO: 2604095 - RNA, 19 nt, Homo sapiens
  misc_RNA (1)...(19): siRNA sense strand
ggacaaaugcugacgcgga

SEQ ID NO: 2604096 - RNA, 19 nt, Homo sapiens
  misc_RNA (1)...(19): siRNA sense strand
augcugaacuagagaagga

SEQ ID NO: 2604097 - RNA, 19 nt, Homo sapiens
  misc_RNA (1)...(19): siRNA sense strand
uggaggaugacaaggagaa

SEQ ID NO: 2604098 - RNA, 19 nt, Homo sapiens
  misc_RNA (1)...(19): siRNA sense strand
aggagaagauggugggcac

SEQ ID NO: 2604099 - RNA, 19 nt, Homo sapiens
  misc_RNA (1)...(19): siRNA sense strand
cugcagaaaucccggagga

SEQ ID NO: 2604100 - RNA, 19 nt, Homo sapiens
  misc_RNA (1)...(19): siRNA sense strand
augcagaacagacggaaaa

SEQ ID NO: 2604101 - RNA, 19 nt, Homo sapiens
  misc_RNA (1)...(19): siRNA sense strand
gaggagaugcuaugggagu

SEQ ID NO: 2604102 - RNA, 19 nt, Homo sapiens
  misc_RNA (1)...(19): siRNA sense strand
agacaguggaccagcacau

SEQ ID NO: 2604103 - RNA, 19 nt, Homo sapiens
  misc_RNA (1)...(19): siRNA sense strand
gcaaaguggacaugcccau

SEQ ID NO: 2604104 - RNA, 19 nt, Homo sapiens
  misc_RNA (1)...(19): siRNA sense strand
aggaugacaaggagaagau

SEQ ID NO: 2604105 - RNA, 19 nt, Homo sapiens
  misc_RNA (1)...(19): siRNA sense strand
gggcuugaaguauggaaaa

SEQ ID NO: 2604106 - RNA, 19 nt, Homo sapiens
  misc_RNA (1)...(19): siRNA sense strand
auggaaggguagaugacau

SEQ ID NO: 2604107 - RNA, 19 nt, Homo sapiens
  misc_RNA (1)...(19): siRNA sense strand
uggaaggguagaugacauu

SEQ ID NO: 2604108 - RNA, 19 nt, Homo sapiens
  misc_RNA (1)...(19): siRNA sense strand
agggccagcagcagaguua

SEQ ID NO: 2604109 - RNA, 19 nt, Homo sapiens
  misc_RNA (1)...(19): siRNA sense strand
cagcagagcauuacccaca

SEQ ID NO: 2604110 - RNA, 19 nt, Homo sapiens
  misc_RNA (1)...(19): siRNA sense strand
cagaugacauguaugcaga

SEQ ID NO: 2604111 - RNA, 19 nt, Homo sapiens
  misc_RNA (1)...(19): siRNA sense strand
gacggaaaauccagagaau

SEQ ID NO: 2604112 - RNA, 19 nt, Homo sapiens
  misc_RNA (1)...(19): siRNA sense strand
gacaaaugcugacgcggau

SEQ ID NO: 2604113 - RNA, 19 nt, Homo sapiens
  misc_RNA (1)...(19): siRNA sense strand
gcauauacacagacagcac

SEQ ID NO: 2604114 - RNA, 19 nt, Homo sapiens
  misc_RNA (1)...(19): siRNA sense strand
cuguggcagaguugaauua

SEQ ID NO: 2604115 - RNA, 19 nt, Homo sapiens
  misc_RNA (1)...(19): siRNA sense strand
augaagagguagugcagac

SEQ ID NO: 2604116 - RNA, 19 nt, Homo sapiens
  misc_RNA (1)...(19): siRNA sense strand
uauugaagacaguggacca

SEQ ID NO: 2604117 - RNA, 19 nt, Homo sapiens
  misc_RNA (1)...(19): siRNA sense strand
uaugcagaacagacggaaa

SEQ ID NO: 2604118 - RNA, 19 nt, Homo sapiens
  misc_RNA (1)...(19): siRNA sense strand
ggaagcucgaaauggagaa

SEQ ID NO: 2604119 - RNA, 19 nt, Homo sapiens
  misc_RNA (1)...(19): siRNA sense strand
agaaaguuacagaugacau

SEQ ID NO: 2604120 - RNA, 19 nt, Homo sapiens
  misc_RNA (1)...(19): siRNA sense strand
ccaccaguguucagccaca

SEQ ID NO: 2604121 - RNA, 19 nt, Homo sapiens
  misc_RNA (1)...(19): siRNA sense strand
cagaagaagggcuugaagu

SEQ ID NO: 2604122 - RNA, 19 nt, Homo sapiens
  misc_RNA (1)...(19): siRNA sense strand
augaaguucugaaggaugu

SEQ ID NO: 2604123 - RNA, 19 nt, Homo sapiens
  misc_RNA (1)...(19): siRNA sense strand
gcagagagcagaugggaca

SEQ ID NO: 2604124 - RNA, 19 nt, Homo sapiens
  misc_RNA (1)...(19): siRNA sense strand
ucgaaauggagaaggugaa

SEQ ID NO: 2604125 - RNA, 19 nt, Homo sapiens
  misc_RNA (1)...(19): siRNA sense strand
gagaaauucaggaggccau

SEQ ID NO: 2604126 - RNA, 19 nt, Homo sapiens
  misc_RNA (1)...(19): siRNA sense strand
cagaaaucccggaggagca

SEQ ID NO: 2604127 - RNA, 19 nt, Homo sapiens
  misc_RNA (1)...(19): siRNA sense strand
ggacaaaugcugacgcgga

SEQ ID NO: 2604128 - RNA, 19 nt, Homo sapiens
  misc_RNA (1)...(19): siRNA sense strand
augcugaacuagagaagga

SEQ ID NO: 2604129 - RNA, 19 nt, Homo sapiens
  misc_RNA (1)...(19): siRNA sense strand
uggaggaugacaaggagaa

SEQ ID NO: 2604130 - RNA, 19 nt, Homo sapiens
  misc_RNA (1)...(19): siRNA sense strand
aggagaagauggugggcac

SEQ ID NO: 2604131 - RNA, 19 nt, Homo sapiens
  misc_RNA (1)...(19): siRNA sense strand
cugcagaaaucccggagga

SEQ ID NO: 2604132 - RNA, 19 nt, Homo sapiens
  misc_RNA (1)...(19): siRNA sense strand
augcagaacagacggaaaa

SEQ ID NO: 2604133 - RNA, 19 nt, Homo sapiens
  misc_RNA (1)...(19): siRNA sense strand
gaggagaugcuaugggagu

SEQ ID NO: 2604134 - RNA, 19 nt, Homo sapiens
  misc_RNA (1)...(19): siRNA sense strand
agacaguggaccagcacau

SEQ ID NO: 2604135 - RNA, 19 nt, Homo sapiens
  misc_RNA (1)...(19): siRNA sense strand
gcaaaguggacaugcccau

SEQ ID NO: 2604136 - RNA, 19 nt, Homo sapiens
  misc_RNA (1)...(19): siRNA sense strand
aggaugacaaggagaagau

SEQ ID NO: 2604137 - RNA, 19 nt, Homo sapiens
  misc_RNA (1)...(19): siRNA sense strand
gggcuugaaguauggaaaa

SEQ ID NO: 2604138 - RNA, 19 nt, Homo sapiens
  misc_RNA (1)...(19): siRNA sense strand
auggaaggguagaugacau

SEQ ID NO: 2604139 - RNA, 19 nt, Homo sapiens
  misc_RNA (1)...(19): siRNA sense strand
uggaaggguagaugacauu

SEQ ID NO: 2604140 - RNA, 19 nt, Homo sapiens
  misc_RNA (1)...(19): siRNA sense strand
agggccagcagcagaguua

SEQ ID NO: 2604141 - RNA, 19 nt, Homo sapiens
  misc_RNA (1)...(19): siRNA sense strand
cagcagagcauuacccaca

SEQ ID NO: 2604142 - RNA, 19 nt, Homo sapiens
  misc_RNA (1)...(19): siRNA sense strand
cagaugacauguaugcaga

SEQ ID NO: 2604143 - RNA, 19 nt, Homo sapiens
  misc_RNA (1)...(19): siRNA sense strand
gacggaaaauccagagaau

SEQ ID NO: 2604144 - RNA, 19 nt, Homo sapiens
  misc_RNA (1)...(19): siRNA sense strand
gacaaaugcugacgcggau

SEQ ID NO: 2604145 - RNA, 19 nt, Homo sapiens
  misc_RNA (1)...(19): siRNA sense strand
gcauauacacagacagcac

SEQ ID NO: 2604146 - RNA, 19 nt, Homo sapiens
  misc_RNA (1)...(19): siRNA sense strand
cuguggcagaguugaauua

SEQ ID NO: 2604147 - RNA, 19 nt, Homo sapiens
  misc_RNA (1)...(19): siRNA sense strand
augaagagguagugcagac

SEQ ID NO: 2604148 - RNA, 19 nt, Homo sapiens
  misc_RNA (1)...(19): siRNA sense strand
uauugaagacaguggacca

SEQ ID NO: 2604149 - RNA, 19 nt, Homo sapiens
  misc_RNA (1)...(19): siRNA sense strand
uaugcagaacagacggaaa

SEQ ID NO: 2604150 - RNA, 19 nt, Homo sapiens
  misc_RNA (1)...(19): siRNA sense strand
ggaagcucgaaauggagaa

SEQ ID NO: 2604151 - RNA, 19 nt, Homo sapiens
  misc_RNA (1)...(19): siRNA sense strand
agaaaguuacagaugacau

SEQ ID NO: 2604152 - RNA, 19 nt, Homo sapiens
  misc_RNA (1)...(19): siRNA sense strand
ccaccaguguucagccaca

SEQ ID NO: 2604153 - RNA, 19 nt, Homo sapiens
  misc_RNA (1)...(19): siRNA sense strand
cagaagaagggcuugaagu

SEQ ID NO: 2604154 - RNA, 19 nt, Homo sapiens
  misc_RNA (1)...(19): siRNA sense strand
augaaguucugaaggaugu

SEQ ID NO: 2604155 - RNA, 19 nt, Homo sapiens
  misc_RNA (1)...(19): siRNA sense strand
guguaaugaaugugggaaa

SEQ ID NO: 2604156 - RNA, 19 nt, Homo sapiens
  misc_RNA (1)...(19): siRNA sense strand
cugcaaugaaugugggaaa

SEQ ID NO: 2604157 - RNA, 19 nt, Homo sapiens
  misc_RNA (1)...(19): siRNA sense strand
augcaaugaaugugggaaa

SEQ ID NO: 2604158 - RNA, 19 nt, Homo sapiens
  misc_RNA (1)...(19): siRNA sense strand
augucaagaaugugggaaa

SEQ ID NO: 2604159 - RNA, 19 nt, Homo sapiens
  misc_RNA (1)...(19): siRNA sense strand
auguaaugagugugggaaa

SEQ ID NO: 2604160 - RNA, 19 nt, Homo sapiens
  misc_RNA (1)...(19): siRNA sense strand
agacuagaccacagagcaa

SEQ ID NO: 2604161 - RNA, 19 nt, Homo sapiens
  misc_RNA (1)...(19): siRNA sense strand
augugaugcuggagaacua

SEQ ID NO: 2604162 - RNA, 19 nt, Homo sapiens
  misc_RNA (1)...(19): siRNA sense strand
aaggaaaucaggagagaca

SEQ ID NO: 2604163 - RNA, 19 nt, Homo sapiens
  misc_RNA (1)...(19): siRNA sense strand
aacucauacuggagagaaa

SEQ ID NO: 2604164 - RNA, 19 nt, Homo sapiens
  misc_RNA (1)...(19): siRNA sense strand
uuuccaaaccugagagcua

SEQ ID NO: 2604165 - RNA, 19 nt, Homo sapiens
  misc_RNA (1)...(19): siRNA sense strand
auguaaugauuguggugaa

SEQ ID NO: 2604166 - RNA, 19 nt, Homo sapiens
  misc_RNA (1)...(19): siRNA sense strand
ggcugaaaugccugagaaa

SEQ ID NO: 2604167 - RNA, 19 nt, Homo sapiens
  misc_RNA (1)...(19): siRNA sense strand
uagagaaucagcaaggaaa

SEQ ID NO: 2604168 - RNA, 19 nt, Homo sapiens
  misc_RNA (1)...(19): siRNA sense strand
gggaaaagcuuuaagugca

SEQ ID NO: 2604169 - RNA, 19 nt, Homo sapiens
  misc_RNA (1)...(19): siRNA sense strand
aggagagacauuugagaga

SEQ ID NO: 2604170 - RNA, 19 nt, Homo sapiens
  misc_RNA (1)...(19): siRNA sense strand
cugaggaaacagaccauaa

SEQ ID NO: 2604171 - RNA, 19 nt, Homo sapiens
  misc_RNA (1)...(19): siRNA sense strand
aauaauagacagacugaca

SEQ ID NO: 2604172 - RNA, 19 nt, Homo sapiens
  misc_RNA (1)...(19): siRNA sense strand
aacucauaccggagagaaa

SEQ ID NO: 2604173 - RNA, 19 nt, Homo sapiens
  misc_RNA (1)...(19): siRNA sense strand
acaacuuggagaauggaaa

SEQ ID NO: 2604174 - RNA, 19 nt, Homo sapiens
  misc_RNA (1)...(19): siRNA sense strand
aaauguagcgaguguggaa

SEQ ID NO: 2604175 - RNA, 19 nt, Homo sapiens
  misc_RNA (1)...(19): siRNA sense strand
cuuuagauguaaugagugu

SEQ ID NO: 2604176 - RNA, 19 nt, Homo sapiens
  misc_RNA (1)...(19): siRNA sense strand
agagaaucagcaaggaaau

SEQ ID NO: 2604177 - RNA, 19 nt, Homo sapiens
  misc_RNA (1)...(19): siRNA sense strand
accauaagcaugauguaua

SEQ ID NO: 2604178 - RNA, 19 nt, Homo sapiens
  misc_RNA (1)...(19): siRNA sense strand
gcaugauguauacuggaaa

SEQ ID NO: 2604179 - RNA, 19 nt, Homo sapiens
  misc_RNA (1)...(19): siRNA sense strand
uugcaacacaucagagaau

SEQ ID NO: 2604180 - RNA, 19 nt, Homo sapiens
  misc_RNA (1)...(19): siRNA sense strand
uguaaugagugugggaaaa

SEQ ID NO: 2604181 - RNA, 19 nt, Homo sapiens
  misc_RNA (1)...(19): siRNA sense strand
augcagugaauguggaaaa

SEQ ID NO: 2604182 - RNA, 19 nt, Homo sapiens
  misc_RNA (1)...(19): siRNA sense strand
cccuaugaguguaaugaau

SEQ ID NO: 2604183 - RNA, 19 nt, Homo sapiens
  misc_RNA (1)...(19): siRNA sense strand
agacagacugacacggaau

SEQ ID NO: 2604184 - RNA, 19 nt, Homo sapiens
  misc_RNA (1)...(19): siRNA sense strand
caugauguauacuggaaaa

SEQ ID NO: 2604185 - RNA, 19 nt, Homo sapiens
  misc_RNA (1)...(19): siRNA sense strand
cccuauaccugcaaugaau

SEQ ID NO: 2604186 - RNA, 19 nt, Homo sapiens
  misc_RNA (1)...(19): siRNA sense strand
uaacuaaacaccagagaac

SEQ ID NO: 2604187 - RNA, 19 nt, Homo sapiens
  misc_RNA (1)...(19): siRNA sense strand
gggaaagguuuuaaucgaa

SEQ ID NO: 2604188 - RNA, 19 nt, Homo sapiens
  misc_RNA (1)...(19): siRNA sense strand
cauucaaggauguggccau

SEQ ID NO: 2604189 - RNA, 19 nt, Homo sapiens
  misc_RNA (1)...(19): siRNA sense strand
gggaaaucuuuuagccaca

SEQ ID NO: 2604190 - RNA, 19 nt, Homo sapiens
  misc_RNA (1)...(19): siRNA sense strand
aauucacguuggagagaga

SEQ ID NO: 2604191 - RNA, 19 nt, Homo sapiens
  misc_RNA (1)...(19): siRNA sense strand
ugugaaaauugguuagaga

SEQ ID NO: 2604192 - RNA, 19 nt, Homo sapiens
  misc_RNA (1)...(19): siRNA sense strand
cagcaaggaaaucaggaga

SEQ ID NO: 2604193 - RNA, 19 nt, Homo sapiens
  misc_RNA (1)...(19): siRNA sense strand
gggaaaaccuucagccgga

SEQ ID NO: 2604194 - RNA, 19 nt, Homo sapiens
  misc_RNA (1)...(19): siRNA sense strand
uguaaugaaugugggaaaa

SEQ ID NO: 2604195 - RNA, 19 nt, Homo sapiens
  misc_RNA (1)...(19): siRNA sense strand
gaauucacucucugaggaa

SEQ ID NO: 2604196 - RNA, 19 nt, Homo sapiens
  misc_RNA (1)...(19): siRNA sense strand
agagcuacaacuuggagaa

SEQ ID NO: 2604197 - RNA, 19 nt, Homo sapiens
  misc_RNA (1)...(19): siRNA sense strand
caacuuggagaauggaaaa

SEQ ID NO: 2604198 - RNA, 19 nt, Homo sapiens
  misc_RNA (1)...(19): siRNA sense strand
ggagaauggaaaagaacca

SEQ ID NO: 2604199 - RNA, 19 nt, Homo sapiens
  misc_RNA (1)...(19): siRNA sense strand
uugcaauaauagacagacu

SEQ ID NO: 2604200 - RNA, 19 nt, Homo sapiens
  misc_RNA (1)...(19): siRNA sense strand
gagacagauuuggcugaaa

SEQ ID NO: 2604201 - RNA, 19 nt, Homo sapiens
  misc_RNA (1)...(19): siRNA sense strand
agaaacccuaugaguguaa

SEQ ID NO: 2604202 - RNA, 19 nt, Homo sapiens
  misc_RNA (1)...(19): siRNA sense strand
gcuaaacaucaaagaauuc

SEQ ID NO: 2604203 - RNA, 19 nt, Homo sapiens
  misc_RNA (1)...(19): siRNA sense strand
cccaggaaacagugacauu

SEQ ID NO: 2604204 - RNA, 19 nt, Homo sapiens
  misc_RNA (1)...(19): siRNA sense strand
cagagaacucauacuagaa

SEQ ID NO: 2604205 - RNA, 19 nt, Homo sapiens
  misc_RNA (1)...(19): siRNA sense strand
agagaauucacguuggaga

SEQ ID NO: 2604206 - RNA, 19 nt, Homo sapiens
  misc_RNA (1)...(19): siRNA sense strand
gaaaagaaccauugaagcu

SEQ ID NO: 2604207 - RNA, 19 nt, Homo sapiens
  misc_RNA (1)...(19): siRNA sense strand
gcacagaagagggagaagu

SEQ ID NO: 2604208 - RNA, 19 nt, Homo sapiens
  misc_RNA (1)...(19): siRNA sense strand
guuugauccaacagaaaua

SEQ ID NO: 2604209 - RNA, 19 nt, Homo sapiens
  misc_RNA (1)...(19): siRNA sense strand
ggauagaaauugaacagaa

SEQ ID NO: 2604210 - RNA, 19 nt, Homo sapiens
  misc_RNA (1)...(19): siRNA sense strand
guuaaagagaggauagaaa

SEQ ID NO: 2604211 - RNA, 19 nt, Homo sapiens
  misc_RNA (1)...(19): siRNA sense strand
gcgagaaguuguagcagaa

SEQ ID NO: 2604212 - RNA, 19 nt, Homo sapiens
  misc_RNA (1)...(19): siRNA sense strand
ggaauugacuucuuggaaa

SEQ ID NO: 2604213 - RNA, 19 nt, Homo sapiens
  misc_RNA (1)...(19): siRNA sense strand
augcgaaacaauugagaaa

SEQ ID NO: 2604214 - RNA, 19 nt, Homo sapiens
  misc_RNA (1)...(19): siRNA sense strand
gcuggaaacagauggauaa

SEQ ID NO: 2604215 - RNA, 19 nt, Homo sapiens
  misc_RNA (1)...(19): siRNA sense strand
uaggaaaggccaagggcaa

SEQ ID NO: 2604216 - RNA, 19 nt, Homo sapiens
  misc_RNA (1)...(19): siRNA sense strand
cagaguguauggugaauua

SEQ ID NO: 2604217 - RNA, 19 nt, Homo sapiens
  misc_RNA (1)...(19): siRNA sense strand
ugaauaugcugcacaauua

SEQ ID NO: 2604218 - RNA, 19 nt, Homo sapiens
  misc_RNA (1)...(19): siRNA sense strand
gcacagaguguauggugaa

SEQ ID NO: 2604219 - RNA, 19 nt, Homo sapiens
  misc_RNA (1)...(19): siRNA sense strand
ugagaaaucugguuaagaa

SEQ ID NO: 2604220 - RNA, 19 nt, Homo sapiens
  misc_RNA (1)...(19): siRNA sense strand
gcacaacagaguuaugaaa

SEQ ID NO: 2604221 - RNA, 19 nt, Homo sapiens
  misc_RNA (1)...(19): siRNA sense strand
gcgaaacaauugagaaauc

SEQ ID NO: 2604222 - RNA, 19 nt, Homo sapiens
  misc_RNA (1)...(19): siRNA sense strand
ucucugaagucgaaggcaa

SEQ ID NO: 2604223 - RNA, 19 nt, Homo sapiens
  misc_RNA (1)...(19): siRNA sense strand
ggaaagauaugccaaauuu

SEQ ID NO: 2604224 - RNA, 19 nt, Homo sapiens
  misc_RNA (1)...(19): siRNA sense strand
aggcaaaacaggugggaga

SEQ ID NO: 2604225 - RNA, 19 nt, Homo sapiens
  misc_RNA (1)...(19): siRNA sense strand
acauuauagaggaggacaa

SEQ ID NO: 2604226 - RNA, 19 nt, Homo sapiens
  misc_RNA (1)...(19): siRNA sense strand
gaaaucugguuaagaagua

SEQ ID NO: 2604227 - RNA, 19 nt, Homo sapiens
  misc_RNA (1)...(19): siRNA sense strand
acaacagaguuaugaaaga

SEQ ID NO: 2604228 - RNA, 19 nt, Homo sapiens
  misc_RNA (1)...(19): siRNA sense strand
acgaaaagcucaacaauau

SEQ ID NO: 2604229 - RNA, 19 nt, Homo sapiens
  misc_RNA (1)...(19): siRNA sense strand
agaaagaaucagaccaaaa

SEQ ID NO: 2604230 - RNA, 19 nt, Homo sapiens
  misc_RNA (1)...(19): siRNA sense strand
aagacauagcagugacaua

SEQ ID NO: 2604231 - RNA, 19 nt, Homo sapiens
  misc_RNA (1)...(19): siRNA sense strand
ugaacuuaacagagaacua

SEQ ID NO: 2604232 - RNA, 19 nt, Homo sapiens
  misc_RNA (1)...(19): siRNA sense strand
ugaacagaacuaugcgaaa

SEQ ID NO: 2604233 - RNA, 19 nt, Homo sapiens
  misc_RNA (1)...(19): siRNA sense strand
gaugaagagccacgguuua

SEQ ID NO: 2604234 - RNA, 19 nt, Homo sapiens
  misc_RNA (1)...(19): siRNA sense strand
aagagaauguagagaggca

SEQ ID NO: 2604235 - RNA, 19 nt, Homo sapiens
  misc_RNA (1)...(19): siRNA sense strand
gcauauggccgaugaaaau

SEQ ID NO: 2604236 - RNA, 19 nt, Homo sapiens
  misc_RNA (1)...(19): siRNA sense strand
acgagaaaguccugaggga

SEQ ID NO: 2604237 - RNA, 19 nt, Homo sapiens
  misc_RNA (1)...(19): siRNA sense strand
gagaaaguccugagggaag

SEQ ID NO: 2604238 - RNA, 19 nt, Homo sapiens
  misc_RNA (1)...(19): siRNA sense strand
ccacaguaggaaaggccaa

SEQ ID NO: 2604239 - RNA, 19 nt, Homo sapiens
  misc_RNA (1)...(19): siRNA sense strand
ggaaacagauggauaauag

SEQ ID NO: 2604240 - RNA, 19 nt, Homo sapiens
  misc_RNA (1)...(19): siRNA sense strand
ccaccagaacagagacgua

SEQ ID NO: 2604241 - RNA, 19 nt, Homo sapiens
  misc_RNA (1)...(19): siRNA sense strand
gagaaguuguagcagaaga

SEQ ID NO: 2604242 - RNA, 19 nt, Homo sapiens
  misc_RNA (1)...(19): siRNA sense strand
gugggaagauggaugccaa

SEQ ID NO: 2604243 - RNA, 19 nt, Homo sapiens
  misc_RNA (1)...(19): siRNA sense strand
ggacaaaggugacggaugg

SEQ ID NO: 2604244 - RNA, 19 nt, Homo sapiens
  misc_RNA (1)...(19): siRNA sense strand
agaaguuguagcagaagaa

SEQ ID NO: 2604245 - RNA, 19 nt, Homo sapiens
  misc_RNA (1)...(19): siRNA sense strand
aaaugaauaugcugcacaa

SEQ ID NO: 2604246 - RNA, 19 nt, Homo sapiens
  misc_RNA (1)...(19): siRNA sense strand
gggaucaguucgacagcuu

SEQ ID NO: 2604247 - RNA, 19 nt, Homo sapiens
  misc_RNA (1)...(19): siRNA sense strand
gcacggagcugugggauca

SEQ ID NO: 2604248 - RNA, 19 nt, Homo sapiens
  misc_RNA (1)...(19): siRNA sense strand
gauagaaauugaacagaac

SEQ ID NO: 2604249 - RNA, 19 nt, Homo sapiens
  misc_RNA (1)...(19): siRNA sense strand
ccaaacagcaguugaaucu

SEQ ID NO: 2604250 - RNA, 19 nt, Homo sapiens
  misc_RNA (1)...(19): siRNA sense strand
aggaaaggccaagggcaaa

SEQ ID NO: 2604251 - RNA, 19 nt, Homo sapiens
  misc_RNA (1)...(19): siRNA sense strand
acaagcaacuacaagaaau

SEQ ID NO: 2604252 - RNA, 19 nt, Homo sapiens
  misc_RNA (1)...(19): siRNA sense strand
gagaauguagagaggcaga

SEQ ID NO: 2604253 - RNA, 19 nt, Homo sapiens
  misc_RNA (1)...(19): siRNA sense strand
auccaaagaugaagagcca

SEQ ID NO: 2604254 - RNA, 19 nt, Homo sapiens
  misc_RNA (1)...(19): siRNA sense strand
cgagaaaguccugagggaa

SEQ ID NO: 2604255 - RNA, 19 nt, Homo sapiens
  misc_RNA (1)...(19): siRNA sense strand
uagcaaugaaagaagguga

SEQ ID NO: 2604256 - RNA, 19 nt, Homo sapiens
  misc_RNA (1)...(19): siRNA sense strand
ggauaaugauacuaaugca

SEQ ID NO: 2604257 - RNA, 19 nt, Homo sapiens
  misc_RNA (1)...(19): siRNA sense strand
caauugagaaaucugguua

SEQ ID NO: 2604258 - RNA, 19 nt, Homo sapiens
  misc_RNA (1)...(19): siRNA sense strand
ccaaaaccacaguaggaaa

SEQ ID NO: 2604259 - RNA, 19 nt, Homo sapiens
  misc_RNA (1)...(19): siRNA sense strand
cucugaagucgaaggcaaa

SEQ ID NO: 2604260 - RNA, 19 nt, Homo sapiens
  misc_RNA (1)...(19): siRNA sense strand
cauuauagaggaggacaaa

SEQ ID NO: 2604261 - RNA, 19 nt, Homo sapiens
  misc_RNA (1)...(19): siRNA sense strand
ggagaacaacauaaacauu

SEQ ID NO: 2604262 - RNA, 19 nt, Homo sapiens
  misc_RNA (1)...(19): siRNA sense strand
agugaguguuacagaggau

SEQ ID NO: 2604263 - RNA, 19 nt, Homo sapiens
  misc_RNA (1)...(19): siRNA sense strand
gaauugacuucuuggaaag

SEQ ID NO: 2604264 - RNA, 19 nt, Homo sapiens
  misc_RNA (1)...(19): siRNA sense strand
gaauguagagaggcagaaa

SEQ ID NO: 2604265 - RNA, 19 nt, Homo sapiens
  misc_RNA (1)...(19): siRNA sense strand
gggcccagcacuagaagau

SEQ ID NO: 2604266 - RNA, 19 nt, Homo sapiens
  misc_RNA (1)...(19): siRNA sense strand
aagagaggauagaaauuga

SEQ ID NO: 2604267 - RNA, 19 nt, Homo sapiens
  misc_RNA (1)...(19): siRNA sense strand
aggccaaacagcaguugaa

SEQ ID NO: 2604268 - RNA, 19 nt, Homo sapiens
  misc_RNA (1)...(19): siRNA sense strand
uggaaagauaugccaaauu

SEQ ID NO: 2604269 - RNA, 19 nt, Homo sapiens
  misc_RNA (1)...(19): siRNA sense strand
gggaauugacuucuuggaa

SEQ ID NO: 2604270 - RNA, 19 nt, Homo sapiens
  misc_RNA (1)...(19): siRNA sense strand
caacagaguuaugaaagau

SEQ ID NO: 2604271 - RNA, 19 nt, Homo sapiens
  misc_RNA (1)...(19): siRNA sense strand
caaaggugacggauggaca

SEQ ID NO: 2604272 - RNA, 19 nt, Homo sapiens
  misc_RNA (1)...(19): siRNA sense strand
gaaagagaauguagagagg

SEQ ID NO: 2604273 - RNA, 19 nt, Homo sapiens
  misc_RNA (1)...(19): siRNA sense strand
cauuugaagauuacaguca

SEQ ID NO: 2604274 - RNA, 19 nt, Homo sapiens
  misc_RNA (1)...(19): siRNA sense strand
agaugaagagccacgguuu

SEQ ID NO: 2604275 - RNA, 19 nt, Homo sapiens
  misc_RNA (1)...(19): siRNA sense strand
acucucaaauggugguaga

SEQ ID NO: 2604276 - RNA, 19 nt, Homo sapiens
  misc_RNA (1)...(19): siRNA sense strand
agaacuacagaaagaauca

SEQ ID NO: 2604277 - RNA, 19 nt, Homo sapiens
  misc_RNA (1)...(19): siRNA sense strand
acaagagcucggagacaga

SEQ ID NO: 2604278 - RNA, 19 nt, Homo sapiens
  misc_RNA (1)...(19): siRNA sense strand
guuaaaugacuaugcagga

SEQ ID NO: 2604279 - RNA, 19 nt, Homo sapiens
  misc_RNA (1)...(19): siRNA sense strand
aagcauacacaauggggaa

SEQ ID NO: 2604280 - RNA, 19 nt, Homo sapiens
  misc_RNA (1)...(19): siRNA sense strand
acauaaugaagguacucua

SEQ ID NO: 2604281 - RNA, 19 nt, Homo sapiens
  misc_RNA (1)...(19): siRNA sense strand
gggaaaugcuuuagccaca

SEQ ID NO: 2604282 - RNA, 19 nt, Homo sapiens
  misc_RNA (1)...(19): siRNA sense strand
gugcaacgaaugugggaaa

SEQ ID NO: 2604283 - RNA, 19 nt, Homo sapiens
  misc_RNA (1)...(19): siRNA sense strand
ggaaauguguucaaggaga

SEQ ID NO: 2604284 - RNA, 19 nt, Homo sapiens
  misc_RNA (1)...(19): siRNA sense strand
ccuuauaagugcaacgaau

SEQ ID NO: 2604285 - RNA, 19 nt, Homo sapiens
  misc_RNA (1)...(19): siRNA sense strand
augcauagaauguggaaaa

SEQ ID NO: 2604286 - RNA, 19 nt, Homo sapiens
  misc_RNA (1)...(19): siRNA sense strand
ccuuaugugugcagugaau

SEQ ID NO: 2604287 - RNA, 19 nt, Homo sapiens
  misc_RNA (1)...(19): siRNA sense strand
guguaaggaguguggaaaa

SEQ ID NO: 2604288 - RNA, 19 nt, Homo sapiens
  misc_RNA (1)...(19): siRNA sense strand
gugcagugaauguggaaaa

SEQ ID NO: 2604289 - RNA, 19 nt, Homo sapiens
  misc_RNA (1)...(19): siRNA sense strand
uugcggugaugaagggaaa

SEQ ID NO: 2604290 - RNA, 19 nt, Homo sapiens
  misc_RNA (1)...(19): siRNA sense strand
augcagcgaaugugggaaa

SEQ ID NO: 2604291 - RNA, 19 nt, Homo sapiens
  misc_RNA (1)...(19): siRNA sense strand
cugcagugaauguggaaaa

SEQ ID NO: 2604292 - RNA, 19 nt, Homo sapiens
  misc_RNA (1)...(19): siRNA sense strand
ggagaaaagccuuacguau

SEQ ID NO: 2604293 - RNA, 19 nt, Homo sapiens
  misc_RNA (1)...(19): siRNA sense strand
uugaggaggcacagagauu

SEQ ID NO: 2604294 - RNA, 19 nt, Homo sapiens
  misc_RNA (1)...(19): siRNA sense strand
aguucacacuggagaaaga

SEQ ID NO: 2604295 - RNA, 19 nt, Homo sapiens
  misc_RNA (1)...(19): siRNA sense strand
guguggugaaugugguaaa

SEQ ID NO: 2604296 - RNA, 19 nt, Homo sapiens
  misc_RNA (1)...(19): siRNA sense strand
gggaaauucuuuagccgca

SEQ ID NO: 2604297 - RNA, 19 nt, Homo sapiens
  misc_RNA (1)...(19): siRNA sense strand
gggaggaagggauggacuu

SEQ ID NO: 2604298 - RNA, 19 nt, Homo sapiens
  misc_RNA (1)...(19): siRNA sense strand
guguguaaggaguguggaa

SEQ ID NO: 2604299 - RNA, 19 nt, Homo sapiens
  misc_RNA (1)...(19): siRNA sense strand
augugaugcuggagaacuu

SEQ ID NO: 2604300 - RNA, 19 nt, Homo sapiens
  misc_RNA (1)...(19): siRNA sense strand
agccauaacucuagccuca

SEQ ID NO: 2604301 - RNA, 19 nt, Homo sapiens
  misc_RNA (1)...(19): siRNA sense strand
gggcuguguaggagaagau

SEQ ID NO: 2604302 - RNA, 19 nt, Homo sapiens
  misc_RNA (1)...(19): siRNA sense strand
ccuuaugaguguggugaau

SEQ ID NO: 2604303 - RNA, 19 nt, Homo sapiens
  misc_RNA (1)...(19): siRNA sense strand
augccuaccauguggaaau

SEQ ID NO: 2604304 - RNA, 19 nt, Homo sapiens
  misc_RNA (1)...(19): siRNA sense strand
cuuauugagcacuggagaa

SEQ ID NO: 2604305 - RNA, 19 nt, Homo sapiens
  misc_RNA (1)...(19): siRNA sense strand
gcaaaugugggaaggccuu

SEQ ID NO: 2604306 - RNA, 19 nt, Homo sapiens
  misc_RNA (1)...(19): siRNA sense strand
ccucauuaaacaucggaga

SEQ ID NO: 2604307 - RNA, 19 nt, Homo sapiens
  misc_RNA (1)...(19): siRNA sense strand
ugggaaagccuauagcaga

SEQ ID NO: 2604308 - RNA, 19 nt, Homo sapiens
  misc_RNA (1)...(19): siRNA sense strand
aguucacacuggagcaaga

SEQ ID NO: 2604309 - RNA, 19 nt, Homo sapiens
  misc_RNA (1)...(19): siRNA sense strand
cuguagaaggagugucaca

SEQ ID NO: 2604310 - RNA, 19 nt, Homo sapiens
  misc_RNA (1)...(19): siRNA sense strand
gagcaaagccuuaugagug

SEQ ID NO: 2604311 - RNA, 19 nt, Homo sapiens
  misc_RNA (1)...(19): siRNA sense strand
agaaagagcucacgagugc

SEQ ID NO: 2604312 - RNA, 19 nt, Homo sapiens
  misc_RNA (1)...(19): siRNA sense strand
gugcagugaaugugggaag

SEQ ID NO: 2604313 - RNA, 19 nt, Homo sapiens
  misc_RNA (1)...(19): siRNA sense strand
gugcagugaaugugggaag

SEQ ID NO: 2604314 - RNA, 19 nt, Homo sapiens
  misc_RNA (1)...(19): siRNA sense strand
gcgaaugugggaaagccua

SEQ ID NO: 2604315 - RNA, 19 nt, Homo sapiens
  misc_RNA (1)...(19): siRNA sense strand
uuauuguacaccagagaau

SEQ ID NO: 2604316 - RNA, 19 nt, Homo sapiens
  misc_RNA (1)...(19): siRNA sense strand
aggauguguucguguacuu

SEQ ID NO: 2604317 - RNA, 19 nt, Homo sapiens
  misc_RNA (1)...(19): siRNA sense strand
ccuuacguaugcagcgaau

SEQ ID NO: 2604318 - RNA, 19 nt, Homo sapiens
  misc_RNA (1)...(19): siRNA sense strand
gugaagagcuguacagucc

SEQ ID NO: 2604319 - RNA, 19 nt, Homo sapiens
  misc_RNA (1)...(19): siRNA sense strand
gagaauucacacuggagca

SEQ ID NO: 2604320 - RNA, 19 nt, Homo sapiens
  misc_RNA (1)...(19): siRNA sense strand
agagauuccuguaccguga

SEQ ID NO: 2604321 - RNA, 19 nt, Homo sapiens
  misc_RNA (1)...(19): siRNA sense strand
cagaaauuucacacuggaa

SEQ ID NO: 2604322 - RNA, 19 nt, Homo sapiens
  misc_RNA (1)...(19): siRNA sense strand
gcucagcaucagagaguuc

SEQ ID NO: 2604323 - RNA, 19 nt, Homo sapiens
  misc_RNA (1)...(19): siRNA sense strand
gugguaaauucuucagcca

SEQ ID NO: 2604324 - RNA, 19 nt, Homo sapiens
  misc_RNA (1)...(19): siRNA sense strand
gauaauucacacuggagca

SEQ ID NO: 2604325 - RNA, 19 nt, Homo sapiens
  misc_RNA (1)...(19): siRNA sense strand
ggaaauucuuuagccgcaa

SEQ ID NO: 2604326 - RNA, 19 nt, Homo sapiens
  misc_RNA (1)...(19): siRNA sense strand
ggaaaagaccagaaagaaa

SEQ ID NO: 2604327 - RNA, 19 nt, Homo sapiens
  misc_RNA (1)...(19): siRNA sense strand
ccaucaagguuaugagcaa

SEQ ID NO: 2604328 - RNA, 19 nt, Homo sapiens
  misc_RNA (1)...(19): siRNA sense strand
gauacagagaccagagaaa

SEQ ID NO: 2604329 - RNA, 19 nt, Homo sapiens
  misc_RNA (1)...(19): siRNA sense strand
ugacaagugcugaaggaaa

SEQ ID NO: 2604330 - RNA, 19 nt, Homo sapiens
  misc_RNA (1)...(19): siRNA sense strand
cagaagaucaaguggaaau

SEQ ID NO: 2604331 - RNA, 19 nt, Homo sapiens
  misc_RNA (1)...(19): siRNA sense strand
gugaagaugaugaggucaa

SEQ ID NO: 2604332 - RNA, 19 nt, Homo sapiens
  misc_RNA (1)...(19): siRNA sense strand
aagcuaaugcauugagaaa

SEQ ID NO: 2604333 - RNA, 19 nt, Homo sapiens
  misc_RNA (1)...(19): siRNA sense strand
cagaaaucaaguagcaaua

SEQ ID NO: 2604334 - RNA, 19 nt, Homo sapiens
  misc_RNA (1)...(19): siRNA sense strand
ugagaaaagcugaaagaaa

SEQ ID NO: 2604335 - RNA, 19 nt, Homo sapiens
  misc_RNA (1)...(19): siRNA sense strand
ccaagaaaaugaugagcua

SEQ ID NO: 2604336 - RNA, 19 nt, Homo sapiens
  misc_RNA (1)...(19): siRNA sense strand
gcgacaaauaagagagcuu

SEQ ID NO: 2604337 - RNA, 19 nt, Homo sapiens
  misc_RNA (1)...(19): siRNA sense strand
cagccaaacacaaggaaaa

SEQ ID NO: 2604338 - RNA, 19 nt, Homo sapiens
  misc_RNA (1)...(19): siRNA sense strand
gacaagugcugaaggaaaa

SEQ ID NO: 2604339 - RNA, 19 nt, Homo sapiens
  misc_RNA (1)...(19): siRNA sense strand
ggaguaaagauguagaaaa

SEQ ID NO: 2604340 - RNA, 19 nt, Homo sapiens
  misc_RNA (1)...(19): siRNA sense strand
gggaaaaccaggagcuaau

SEQ ID NO: 2604341 - RNA, 19 nt, Homo sapiens
  misc_RNA (1)...(19): siRNA sense strand
gagaagaauggaaaagaaa

SEQ ID NO: 2604342 - RNA, 19 nt, Homo sapiens
  misc_RNA (1)...(19): siRNA sense strand
acauaaaggaaaugcauga

SEQ ID NO: 2604343 - RNA, 19 nt, Homo sapiens
  misc_RNA (1)...(19): siRNA sense strand
agugaaagcagcagugauu

SEQ ID NO: 2604344 - RNA, 19 nt, Homo sapiens
  misc_RNA (1)...(19): siRNA sense strand
agacauugcuguuagccaa

SEQ ID NO: 2604345 - RNA, 19 nt, Homo sapiens
  misc_RNA (1)...(19): siRNA sense strand
aggaaauauuagacacaga

SEQ ID NO: 2604346 - RNA, 19 nt, Homo sapiens
  misc_RNA (1)...(19): siRNA sense strand
gguuaugagcaauguguuu

SEQ ID NO: 2604347 - RNA, 19 nt, Homo sapiens
  misc_RNA (1)...(19): siRNA sense strand
gguaaagacauuaacugaa

SEQ ID NO: 2604348 - RNA, 19 nt, Homo sapiens
  misc_RNA (1)...(19): siRNA sense strand
ggcagagagaagagaagaa

SEQ ID NO: 2604349 - RNA, 19 nt, Homo sapiens
  misc_RNA (1)...(19): siRNA sense strand
gaaaagaaauguuggagca

SEQ ID NO: 2604350 - RNA, 19 nt, Homo sapiens
  misc_RNA (1)...(19): siRNA sense strand
auuuaaagcugcgaagaaa

SEQ ID NO: 2604351 - RNA, 19 nt, Homo sapiens
  misc_RNA (1)...(19): siRNA sense strand
agaagaacacauaaaggaa

SEQ ID NO: 2604352 - RNA, 19 nt, Homo sapiens
  misc_RNA (1)...(19): siRNA sense strand
acuagagucaacagagaaa

SEQ ID NO: 2604353 - RNA, 19 nt, Homo sapiens
  misc_RNA (1)...(19): siRNA sense strand
ccagaaagaaagugaucca

SEQ ID NO: 2604354 - RNA, 19 nt, Homo sapiens
  misc_RNA (1)...(19): siRNA sense strand
ggaagaaggcaguggcaug

SEQ ID NO: 2604355 - RNA, 19 nt, Homo sapiens
  misc_RNA (1)...(19): siRNA sense strand
aauuuaaagcugcgaagaa

SEQ ID NO: 2604356 - RNA, 19 nt, Homo sapiens
  misc_RNA (1)...(19): siRNA sense strand
acaagcaggcagacaauaa

SEQ ID NO: 2604357 - RNA, 19 nt, Homo sapiens
  misc_RNA (1)...(19): siRNA sense strand
ggaaggaacugcaggagcu

SEQ ID NO: 2604358 - RNA, 19 nt, Homo sapiens
  misc_RNA (1)...(19): siRNA sense strand
agagaaggcacuacaacua

SEQ ID NO: 2604359 - RNA, 19 nt, Homo sapiens
  misc_RNA (1)...(19): siRNA sense strand
caacaagaagauacagaga

SEQ ID NO: 2604360 - RNA, 19 nt, Homo sapiens
  misc_RNA (1)...(19): siRNA sense strand
gcugggaggaugugaguga

SEQ ID NO: 2604361 - RNA, 19 nt, Homo sapiens
  misc_RNA (1)...(19): siRNA sense strand
uggaaaguaacaagaguuu

SEQ ID NO: 2604362 - RNA, 19 nt, Homo sapiens
  misc_RNA (1)...(19): siRNA sense strand
cguuaaugguuucacagaa

SEQ ID NO: 2604363 - RNA, 19 nt, Homo sapiens
  misc_RNA (1)...(19): siRNA sense strand
ccagaaaucaaguagcaau

SEQ ID NO: 2604364 - RNA, 19 nt, Homo sapiens
  misc_RNA (1)...(19): siRNA sense strand
acuaaagagccaagaaaau

SEQ ID NO: 2604365 - RNA, 19 nt, Homo sapiens
  misc_RNA (1)...(19): siRNA sense strand
caaaagaagaauugcaaga

SEQ ID NO: 2604366 - RNA, 19 nt, Homo sapiens
  misc_RNA (1)...(19): siRNA sense strand
aaaugaagcaauugcagua

SEQ ID NO: 2604367 - RNA, 19 nt, Homo sapiens
  misc_RNA (1)...(19): siRNA sense strand
caucaugacaagugcugaa

SEQ ID NO: 2604368 - RNA, 19 nt, Homo sapiens
  misc_RNA (1)...(19): siRNA sense strand
gaugaggucaagaggagua

SEQ ID NO: 2604369 - RNA, 19 nt, Homo sapiens
  misc_RNA (1)...(19): siRNA sense strand
gacaaguggcagaagcuaa

SEQ ID NO: 2604370 - RNA, 19 nt, Homo sapiens
  misc_RNA (1)...(19): siRNA sense strand
cagacaagcaggcagacaa

SEQ ID NO: 2604371 - RNA, 19 nt, Homo sapiens
  misc_RNA (1)...(19): siRNA sense strand
cagacaauaaagaagcuaa

SEQ ID NO: 2604372 - RNA, 19 nt, Homo sapiens
  misc_RNA (1)...(19): siRNA sense strand
guaucaagaauaagugaga

SEQ ID NO: 2604373 - RNA, 19 nt, Homo sapiens
  misc_RNA (1)...(19): siRNA sense strand
acaacuaugaccaagguua

SEQ ID NO: 2604374 - RNA, 19 nt, Homo sapiens
  misc_RNA (1)...(19): siRNA sense strand
acgauaugauuguaagaca

SEQ ID NO: 2604375 - RNA, 19 nt, Homo sapiens
  misc_RNA (1)...(19): siRNA sense strand
ugggaggaugugagugaaa

SEQ ID NO: 2604376 - RNA, 19 nt, Homo sapiens
  misc_RNA (1)...(19): siRNA sense strand
cuugaaggacagagucuua

SEQ ID NO: 2604377 - RNA, 19 nt, Homo sapiens
  misc_RNA (1)...(19): siRNA sense strand
uguagaaacaucccagaaa

SEQ ID NO: 2604378 - RNA, 19 nt, Homo sapiens
  misc_RNA (1)...(19): siRNA sense strand
gcaaaagaguucacauaca

SEQ ID NO: 2604379 - RNA, 19 nt, Homo sapiens
  misc_RNA (1)...(19): siRNA sense strand
gagaaacuaaagauagcaa

SEQ ID NO: 2604380 - RNA, 19 nt, Homo sapiens
  misc_RNA (1)...(19): siRNA sense strand
gaaaauaaagagagcagau

SEQ ID NO: 2604381 - RNA, 19 nt, Homo sapiens
  misc_RNA (1)...(19): siRNA sense strand
agagaagaauggaaaagaa

SEQ ID NO: 2604382 - RNA, 19 nt, Homo sapiens
  misc_RNA (1)...(19): siRNA sense strand
ugaucaacccaauggagaa

SEQ ID NO: 2604383 - RNA, 19 nt, Homo sapiens
  misc_RNA (1)...(19): siRNA sense strand
caagaauaagugagacuga

SEQ ID NO: 2604384 - RNA, 19 nt, Homo sapiens
  misc_RNA (1)...(19): siRNA sense strand
agaauaagugagacugaau

SEQ ID NO: 2604385 - RNA, 19 nt, Homo sapiens
  misc_RNA (1)...(19): siRNA sense strand
acaggagaaacuaaagaua

SEQ ID NO: 2604386 - RNA, 19 nt, Homo sapiens
  misc_RNA (1)...(19): siRNA sense strand
cuucaaggagcauggauuu

SEQ ID NO: 2604387 - RNA, 19 nt, Homo sapiens
  misc_RNA (1)...(19): siRNA sense strand
agguaaagacauuaacuga

SEQ ID NO: 2604388 - RNA, 19 nt, Homo sapiens
  misc_RNA (1)...(19): siRNA sense strand
ugugguaaggcgacaaaua

SEQ ID NO: 2604389 - RNA, 19 nt, Homo sapiens
  misc_RNA (1)...(19): siRNA sense strand
aggaauaccagcaggccuu

SEQ ID NO: 2604390 - RNA, 19 nt, Homo sapiens
  misc_RNA (1)...(19): siRNA sense strand
gugcaguggcagucgucua

SEQ ID NO: 2604391 - RNA, 19 nt, Homo sapiens
  misc_RNA (1)...(19): siRNA sense strand
gcaucgguuucuauggcaa

SEQ ID NO: 2604392 - RNA, 19 nt, Homo sapiens
  misc_RNA (1)...(19): siRNA sense strand
uugaagagcucgagcggaa

SEQ ID NO: 2604393 - RNA, 19 nt, Homo sapiens
  misc_RNA (1)...(19): siRNA sense strand
uguaagaagcggaggaaaa

SEQ ID NO: 2604394 - RNA, 19 nt, Homo sapiens
  misc_RNA (1)...(19): siRNA sense strand
uggauguguuugugagaaa

SEQ ID NO: 2604395 - RNA, 19 nt, Homo sapiens
  misc_RNA (1)...(19): siRNA sense strand
gagcggaaauacuggaaaa

SEQ ID NO: 2604396 - RNA, 19 nt, Homo sapiens
  misc_RNA (1)...(19): siRNA sense strand
gguuaagagagaugaugua

SEQ ID NO: 2604397 - RNA, 19 nt, Homo sapiens
  misc_RNA (1)...(19): siRNA sense strand
aguacaacauacagaagaa

SEQ ID NO: 2604398 - RNA, 19 nt, Homo sapiens
  misc_RNA (1)...(19): siRNA sense strand
gagccaugcacgaggaaga

SEQ ID NO: 2604399 - RNA, 19 nt, Homo sapiens
  misc_RNA (1)...(19): siRNA sense strand
ggaugaggaggaagaacaa

SEQ ID NO: 2604400 - RNA, 19 nt, Homo sapiens
  misc_RNA (1)...(19): siRNA sense strand
agagaaagagguuaagcaa

SEQ ID NO: 2604401 - RNA, 19 nt, Homo sapiens
  misc_RNA (1)...(19): siRNA sense strand
gcugaagaaauauggaauu

SEQ ID NO: 2604402 - RNA, 19 nt, Homo sapiens
  misc_RNA (1)...(19): siRNA sense strand
ugagaaaguuccagccaga

SEQ ID NO: 2604403 - RNA, 19 nt, Homo sapiens
  misc_RNA (1)...(19): siRNA sense strand
ccguuaaugcugaagaaau

SEQ ID NO: 2604404 - RNA, 19 nt, Homo sapiens
  misc_RNA (1)...(19): siRNA sense strand
agaaaguuccagccagaaa

SEQ ID NO: 2604405 - RNA, 19 nt, Homo sapiens
  misc_RNA (1)...(19): siRNA sense strand
aagauagccaauagcgaua

SEQ ID NO: 2604406 - RNA, 19 nt, Homo sapiens
  misc_RNA (1)...(19): siRNA sense strand
aggaggaugaggaggaaga

SEQ ID NO: 2604407 - RNA, 19 nt, Homo sapiens
  misc_RNA (1)...(19): siRNA sense strand
aggaugaggaggaagaaca

SEQ ID NO: 2604408 - RNA, 19 nt, Homo sapiens
  misc_RNA (1)...(19): siRNA sense strand
gaauagggacaaagaggca

SEQ ID NO: 2604409 - RNA, 19 nt, Homo sapiens
  misc_RNA (1)...(19): siRNA sense strand
aagcaagguuugucaacau

SEQ ID NO: 2604410 - RNA, 19 nt, Homo sapiens
  misc_RNA (1)...(19): siRNA sense strand
gguuaagcaagaaaagaaa

SEQ ID NO: 2604411 - RNA, 19 nt, Homo sapiens
  misc_RNA (1)...(19): siRNA sense strand
aacuagaagaggaggauga

SEQ ID NO: 2604412 - RNA, 19 nt, Homo sapiens
  misc_RNA (1)...(19): siRNA sense strand
ggcagagguugcagaugaa

SEQ ID NO: 2604413 - RNA, 19 nt, Homo sapiens
  misc_RNA (1)...(19): siRNA sense strand
aggaagaggcugaggagac

SEQ ID NO: 2604414 - RNA, 19 nt, Homo sapiens
  misc_RNA (1)...(19): siRNA sense strand
cauguugaugaguggaaua

SEQ ID NO: 2604415 - RNA, 19 nt, Homo sapiens
  misc_RNA (1)...(19): siRNA sense strand
ggacaaagaggcaccgagu

SEQ ID NO: 2604416 - RNA, 19 nt, Homo sapiens
  misc_RNA (1)...(19): siRNA sense strand
ccacaggaggugagucaga

SEQ ID NO: 2604417 - RNA, 19 nt, Homo sapiens
  misc_RNA (1)...(19): siRNA sense strand
cagagguugcagaugaaua

SEQ ID NO: 2604418 - RNA, 19 nt, Homo sapiens
  misc_RNA (1)...(19): siRNA sense strand
uaaucagaacuguggaaau

SEQ ID NO: 2604419 - RNA, 19 nt, Homo sapiens
  misc_RNA (1)...(19): siRNA sense strand
aagaggaggaugaggagga

SEQ ID NO: 2604420 - RNA, 19 nt, Homo sapiens
  misc_RNA (1)...(19): siRNA sense strand
cugaggacauagugagcca

SEQ ID NO: 2604421 - RNA, 19 nt, Homo sapiens
  misc_RNA (1)...(19): siRNA sense strand
cugagaaggaauucaauga

SEQ ID NO: 2604422 - RNA, 19 nt, Homo sapiens
  misc_RNA (1)...(19): siRNA sense strand
ccaaggagcucaucgggca

SEQ ID NO: 2604423 - RNA, 19 nt, Homo sapiens
  misc_RNA (1)...(19): siRNA sense strand
acuuugaggcugagaagga

SEQ ID NO: 2604424 - RNA, 19 nt, Homo sapiens
  misc_RNA (1)...(19): siRNA sense strand
agaagaaagccaugacugu

SEQ ID NO: 2604425 - RNA, 19 nt, Homo sapiens
  misc_RNA (1)...(19): siRNA sense strand
gcaagauagccaauagcga

SEQ ID NO: 2604426 - RNA, 19 nt, Homo sapiens
  misc_RNA (1)...(19): siRNA sense strand
cgaaacuucaguagauaca

SEQ ID NO: 2604427 - RNA, 19 nt, Homo sapiens
  misc_RNA (1)...(19): siRNA sense strand
acucugaaucccagugcua

SEQ ID NO: 2604428 - RNA, 19 nt, Homo sapiens
  misc_RNA (1)...(19): siRNA sense strand
cccuagaagagaauaagaa

SEQ ID NO: 2604429 - RNA, 19 nt, Homo sapiens
  misc_RNA (1)...(19): siRNA sense strand
agaaagaaguccgguggau

SEQ ID NO: 2604430 - RNA, 19 nt, Homo sapiens
  misc_RNA (1)...(19): siRNA sense strand
caucacugcaggccagaaa

SEQ ID NO: 2604431 - RNA, 19 nt, Homo sapiens
  misc_RNA (1)...(19): siRNA sense strand
uagaagaggaggaugagga

SEQ ID NO: 2604432 - RNA, 19 nt, Homo sapiens
  misc_RNA (1)...(19): siRNA sense strand
gaagagaauaagaagucca

SEQ ID NO: 2604433 - RNA, 19 nt, Homo sapiens
  misc_RNA (1)...(19): siRNA sense strand
gcaagaaaagaaacggcaa

SEQ ID NO: 2604434 - RNA, 19 nt, Homo sapiens
  misc_RNA (1)...(19): siRNA sense strand
aggauggagaggaaggaga

SEQ ID NO: 2604435 - RNA, 19 nt, Homo sapiens
  misc_RNA (1)...(19): siRNA sense strand
caguaugagaugacggagu

SEQ ID NO: 2604436 - RNA, 19 nt, Homo sapiens
  misc_RNA (1)...(19): siRNA sense strand
aggaauucaaugagaccau

SEQ ID NO: 2604437 - RNA, 19 nt, Homo sapiens
  misc_RNA (1)...(19): siRNA sense strand
agguuaagcaagaaaagaa

SEQ ID NO: 2604438 - RNA, 19 nt, Homo sapiens
  misc_RNA (1)...(19): siRNA sense strand
ggaaaaggagagugggauc

SEQ ID NO: 2604439 - RNA, 19 nt, Homo sapiens
  misc_RNA (1)...(19): siRNA sense strand
gugaagaucuccauggaug

SEQ ID NO: 2604440 - RNA, 19 nt, Homo sapiens
  misc_RNA (1)...(19): siRNA sense strand
auguauacacacuggauga

SEQ ID NO: 2604441 - RNA, 19 nt, Homo sapiens
  misc_RNA (1)...(19): siRNA sense strand
ggaagauuauauugagccu

SEQ ID NO: 2604442 - RNA, 19 nt, Homo sapiens
  misc_RNA (1)...(19): siRNA sense strand
acauggaccucuacagcau

SEQ ID NO: 2604443 - RNA, 19 nt, Homo sapiens
  misc_RNA (1)...(19): siRNA sense strand
uggaaagcugggaaggaca

SEQ ID NO: 2604444 - RNA, 19 nt, Homo sapiens
  misc_RNA (1)...(19): siRNA sense strand
gcgacaaucuuuauccuga

SEQ ID NO: 2604445 - RNA, 19 nt, Homo sapiens
  misc_RNA (1)...(19): siRNA sense strand
cagagaaagagguuaagca

SEQ ID NO: 2604446 - RNA, 19 nt, Homo sapiens
  misc_RNA (1)...(19): siRNA sense strand
gugcagaugugaaugguac

SEQ ID NO: 2604447 - RNA, 19 nt, Homo sapiens
  misc_RNA (1)...(19): siRNA sense strand
augucaaacuagaagagga

SEQ ID NO: 2604448 - RNA, 19 nt, Homo sapiens
  misc_RNA (1)...(19): siRNA sense strand
gugcuaggauaaugaccuu

SEQ ID NO: 2604449 - RNA, 19 nt, Homo sapiens
  misc_RNA (1)...(19): siRNA sense strand
guucgagaguuccgcaaga

SEQ ID NO: 2604450 - RNA, 19 nt, Homo sapiens
  misc_RNA (1)...(19): siRNA sense strand
caagauagccaauagcgau

SEQ ID NO: 2604451 - RNA, 19 nt, Homo sapiens
  misc_RNA (1)...(19): siRNA sense strand
gagaggaaggagaccugaa

SEQ ID NO: 2604452 - RNA, 19 nt, Homo sapiens
  misc_RNA (1)...(19): siRNA sense strand
gcagggucacugugggaga

SEQ ID NO: 2604453 - RNA, 19 nt, Homo sapiens
  misc_RNA (1)...(19): siRNA sense strand
uugaagagcucgagcggaa

SEQ ID NO: 2604454 - RNA, 19 nt, Homo sapiens
  misc_RNA (1)...(19): siRNA sense strand
uguaagaagcggaggaaaa

SEQ ID NO: 2604455 - RNA, 19 nt, Homo sapiens
  misc_RNA (1)...(19): siRNA sense strand
uggauguguuugugagaaa

SEQ ID NO: 2604456 - RNA, 19 nt, Homo sapiens
  misc_RNA (1)...(19): siRNA sense strand
gagcggaaauacuggaaaa

SEQ ID NO: 2604457 - RNA, 19 nt, Homo sapiens
  misc_RNA (1)...(19): siRNA sense strand
gguuaagagagaugaugua

SEQ ID NO: 2604458 - RNA, 19 nt, Homo sapiens
  misc_RNA (1)...(19): siRNA sense strand
aguacaacauacagaagaa

SEQ ID NO: 2604459 - RNA, 19 nt, Homo sapiens
  misc_RNA (1)...(19): siRNA sense strand
gagccaugcacgaggaaga

SEQ ID NO: 2604460 - RNA, 19 nt, Homo sapiens
  misc_RNA (1)...(19): siRNA sense strand
ggaugaggaggaagaacaa

SEQ ID NO: 2604461 - RNA, 19 nt, Homo sapiens
  misc_RNA (1)...(19): siRNA sense strand
agagaaagagguuaagcaa

SEQ ID NO: 2604462 - RNA, 19 nt, Homo sapiens
  misc_RNA (1)...(19): siRNA sense strand
gcugaagaaauauggaauu

SEQ ID NO: 2604463 - RNA, 19 nt, Homo sapiens
  misc_RNA (1)...(19): siRNA sense strand
ugagaaaguuccagccaga

SEQ ID NO: 2604464 - RNA, 19 nt, Homo sapiens
  misc_RNA (1)...(19): siRNA sense strand
ccguuaaugcugaagaaau

SEQ ID NO: 2604465 - RNA, 19 nt, Homo sapiens
  misc_RNA (1)...(19): siRNA sense strand
agaaaguuccagccagaaa

SEQ ID NO: 2604466 - RNA, 19 nt, Homo sapiens
  misc_RNA (1)...(19): siRNA sense strand
aagauagccaauagcgaua

SEQ ID NO: 2604467 - RNA, 19 nt, Homo sapiens
  misc_RNA (1)...(19): siRNA sense strand
aggaggaugaggaggaaga

SEQ ID NO: 2604468 - RNA, 19 nt, Homo sapiens
  misc_RNA (1)...(19): siRNA sense strand
aggaugaggaggaagaaca

SEQ ID NO: 2604469 - RNA, 19 nt, Homo sapiens
  misc_RNA (1)...(19): siRNA sense strand
gaauagggacaaagaggca

SEQ ID NO: 2604470 - RNA, 19 nt, Homo sapiens
  misc_RNA (1)...(19): siRNA sense strand
aagcaagguuugucaacau

SEQ ID NO: 2604471 - RNA, 19 nt, Homo sapiens
  misc_RNA (1)...(19): siRNA sense strand
gguuaagcaagaaaagaaa

SEQ ID NO: 2604472 - RNA, 19 nt, Homo sapiens
  misc_RNA (1)...(19): siRNA sense strand
aacuagaagaggaggauga

SEQ ID NO: 2604473 - RNA, 19 nt, Homo sapiens
  misc_RNA (1)...(19): siRNA sense strand
ggcagagguugcagaugaa

SEQ ID NO: 2604474 - RNA, 19 nt, Homo sapiens
  misc_RNA (1)...(19): siRNA sense strand
aggaagaggcugaggagac

SEQ ID NO: 2604475 - RNA, 19 nt, Homo sapiens
  misc_RNA (1)...(19): siRNA sense strand
cauguugaugaguggaaua

SEQ ID NO: 2604476 - RNA, 19 nt, Homo sapiens
  misc_RNA (1)...(19): siRNA sense strand
ggacaaagaggcaccgagu

SEQ ID NO: 2604477 - RNA, 19 nt, Homo sapiens
  misc_RNA (1)...(19): siRNA sense strand
ccacaggaggugagucaga

SEQ ID NO: 2604478 - RNA, 19 nt, Homo sapiens
  misc_RNA (1)...(19): siRNA sense strand
cagagguugcagaugaaua

SEQ ID NO: 2604479 - RNA, 19 nt, Homo sapiens
  misc_RNA (1)...(19): siRNA sense strand
uaaucagaacuguggaaau

SEQ ID NO: 2604480 - RNA, 19 nt, Homo sapiens
  misc_RNA (1)...(19): siRNA sense strand
aagaggaggaugaggagga

SEQ ID NO: 2604481 - RNA, 19 nt, Homo sapiens
  misc_RNA (1)...(19): siRNA sense strand
cugaggacauagugagcca

SEQ ID NO: 2604482 - RNA, 19 nt, Homo sapiens
  misc_RNA (1)...(19): siRNA sense strand
cugagaaggaauucaauga

SEQ ID NO: 2604483 - RNA, 19 nt, Homo sapiens
  misc_RNA (1)...(19): siRNA sense strand
ccaaggagcucaucgggca

SEQ ID NO: 2604484 - RNA, 19 nt, Homo sapiens
  misc_RNA (1)...(19): siRNA sense strand
acuuugaggcugagaagga

SEQ ID NO: 2604485 - RNA, 19 nt, Homo sapiens
  misc_RNA (1)...(19): siRNA sense strand
agaagaaagccaugacugu

SEQ ID NO: 2604486 - RNA, 19 nt, Homo sapiens
  misc_RNA (1)...(19): siRNA sense strand
gcaagauagccaauagcga

SEQ ID NO: 2604487 - RNA, 19 nt, Homo sapiens
  misc_RNA (1)...(19): siRNA sense strand
cgaaacuucaguagauaca

SEQ ID NO: 2604488 - RNA, 19 nt, Homo sapiens
  misc_RNA (1)...(19): siRNA sense strand
acucugaaucccagugcua

SEQ ID NO: 2604489 - RNA, 19 nt, Homo sapiens
  misc_RNA (1)...(19): siRNA sense strand
cccuagaagagaauaagaa

SEQ ID NO: 2604490 - RNA, 19 nt, Homo sapiens
  misc_RNA (1)...(19): siRNA sense strand
agaaagaaguccgguggau

SEQ ID NO: 2604491 - RNA, 19 nt, Homo sapiens
  misc_RNA (1)...(19): siRNA sense strand
caucacugcaggccagaaa

SEQ ID NO: 2604492 - RNA, 19 nt, Homo sapiens
  misc_RNA (1)...(19): siRNA sense strand
uagaagaggaggaugagga

SEQ ID NO: 2604493 - RNA, 19 nt, Homo sapiens
  misc_RNA (1)...(19): siRNA sense strand
gaagagaauaagaagucca

SEQ ID NO: 2604494 - RNA, 19 nt, Homo sapiens
  misc_RNA (1)...(19): siRNA sense strand
gcaagaaaagaaacggcaa

SEQ ID NO: 2604495 - RNA, 19 nt, Homo sapiens
  misc_RNA (1)...(19): siRNA sense strand
aggauggagaggaaggaga

SEQ ID NO: 2604496 - RNA, 19 nt, Homo sapiens
  misc_RNA (1)...(19): siRNA sense strand
caguaugagaugacggagu

SEQ ID NO: 2604497 - RNA, 19 nt, Homo sapiens
  misc_RNA (1)...(19): siRNA sense strand
aggaauucaaugagaccau

SEQ ID NO: 2604498 - RNA, 19 nt, Homo sapiens
  misc_RNA (1)...(19): siRNA sense strand
agguuaagcaagaaaagaa

SEQ ID NO: 2604499 - RNA, 19 nt, Homo sapiens
  misc_RNA (1)...(19): siRNA sense strand
ggaaaaggagagugggauc

SEQ ID NO: 2604500 - RNA, 19 nt, Homo sapiens
  misc_RNA (1)...(19): siRNA sense strand
gugaagaucuccauggaug

SEQ ID NO: 2604501 - RNA, 19 nt, Homo sapiens
  misc_RNA (1)...(19): siRNA sense strand
auguauacacacuggauga

SEQ ID NO: 2604502 - RNA, 19 nt, Homo sapiens
  misc_RNA (1)...(19): siRNA sense strand
ggaagauuauauugagccu

SEQ ID NO: 2604503 - RNA, 19 nt, Homo sapiens
  misc_RNA (1)...(19): siRNA sense strand
acauggaccucuacagcau

SEQ ID NO: 2604504 - RNA, 19 nt, Homo sapiens
  misc_RNA (1)...(19): siRNA sense strand
uggaaagcugggaaggaca

SEQ ID NO: 2604505 - RNA, 19 nt, Homo sapiens
  misc_RNA (1)...(19): siRNA sense strand
gcgacaaucuuuauccuga

SEQ ID NO: 2604506 - RNA, 19 nt, Homo sapiens
  misc_RNA (1)...(19): siRNA sense strand
cagagaaagagguuaagca

SEQ ID NO: 2604507 - RNA, 19 nt, Homo sapiens
  misc_RNA (1)...(19): siRNA sense strand
gugcagaugugaaugguac

SEQ ID NO: 2604508 - RNA, 19 nt, Homo sapiens
  misc_RNA (1)...(19): siRNA sense strand
augucaaacuagaagagga

SEQ ID NO: 2604509 - RNA, 19 nt, Homo sapiens
  misc_RNA (1)...(19): siRNA sense strand
gugcuaggauaaugaccuu

SEQ ID NO: 2604510 - RNA, 19 nt, Homo sapiens
  misc_RNA (1)...(19): siRNA sense strand
guucgagaguuccgcaaga

SEQ ID NO: 2604511 - RNA, 19 nt, Homo sapiens
  misc_RNA (1)...(19): siRNA sense strand
caagauagccaauagcgau

SEQ ID NO: 2604512 - RNA, 19 nt, Homo sapiens
  misc_RNA (1)...(19): siRNA sense strand
gagaggaaggagaccugaa

SEQ ID NO: 2604513 - RNA, 19 nt, Homo sapiens
  misc_RNA (1)...(19): siRNA sense strand
gcagggucacugugggaga

SEQ ID NO: 2604514 - RNA, 19 nt, Homo sapiens
  misc_RNA (1)...(19): siRNA sense strand
gggauuaaauucuuggaga

SEQ ID NO: 2604515 - RNA, 19 nt, Homo sapiens
  misc_RNA (1)...(19): siRNA sense strand
ggauuaaauucuuggagac

SEQ ID NO: 2604516 - RNA, 19 nt, Homo sapiens
  misc_RNA (1)...(19): siRNA sense strand
ucagaaacauugaagagca

SEQ ID NO: 2604517 - RNA, 19 nt, Homo sapiens
  misc_RNA (1)...(19): siRNA sense strand
agcaauugacuaugggauu

SEQ ID NO: 2604518 - RNA, 19 nt, Homo sapiens
  misc_RNA (1)...(19): siRNA sense strand
cgcaaaauccagugcaaau

SEQ ID NO: 2604519 - RNA, 19 nt, Homo sapiens
  misc_RNA (1)...(19): siRNA sense strand
cgaucaaagaagaccaguu

SEQ ID NO: 2604520 - RNA, 19 nt, Homo sapiens
  misc_RNA (1)...(19): siRNA sense strand
acagaggagccaugggcau

SEQ ID NO: 2604521 - RNA, 19 nt, Homo sapiens
  misc_RNA (1)...(19): siRNA sense strand
gaaagaaugauccugggua

SEQ ID NO: 2604522 - RNA, 19 nt, Homo sapiens
  misc_RNA (1)...(19): siRNA sense strand
cagcaauucagcaggagca

SEQ ID NO: 2604523 - RNA, 19 nt, Homo sapiens
  misc_RNA (1)...(19): siRNA sense strand
ccagugaaaauaacagaaa

SEQ ID NO: 2604524 - RNA, 19 nt, Homo sapiens
  misc_RNA (1)...(19): siRNA sense strand
gaaaauaacagaaaaccga

SEQ ID NO: 2604525 - RNA, 19 nt, Homo sapiens
  misc_RNA (1)...(19): siRNA sense strand
aggcagugcuggaaggaca

SEQ ID NO: 2604526 - RNA, 19 nt, Homo sapiens
  misc_RNA (1)...(19): siRNA sense strand
uggaaggagguguggagaa

SEQ ID NO: 2604527 - RNA, 19 nt, Homo sapiens
  misc_RNA (1)...(19): siRNA sense strand
ccuacgaagcagaggacuu

SEQ ID NO: 2604528 - RNA, 19 nt, Homo sapiens
  misc_RNA (1)...(19): siRNA sense strand
ggaugaaggaugacgagca

SEQ ID NO: 2604529 - RNA, 19 nt, Homo sapiens
  misc_RNA (1)...(19): siRNA sense strand
gugaagaagagcccagcaa

SEQ ID NO: 2604530 - RNA, 19 nt, Homo sapiens
  misc_RNA (1)...(19): siRNA sense strand
cgugaagcuacaugagauu

SEQ ID NO: 2604531 - RNA, 19 nt, Homo sapiens
  misc_RNA (1)...(19): siRNA sense strand
ccucucagcucaauggcaa

SEQ ID NO: 2604532 - RNA, 19 nt, Homo sapiens
  misc_RNA (1)...(19): siRNA sense strand
aggaugagcucaaaagcaa

SEQ ID NO: 2604533 - RNA, 19 nt, Homo sapiens
  misc_RNA (1)...(19): siRNA sense strand
ccaugugugagaugauaaa

SEQ ID NO: 2604534 - RNA, 19 nt, Homo sapiens
  misc_RNA (1)...(19): siRNA sense strand
aggagaagcaccugggcga

SEQ ID NO: 2604535 - RNA, 19 nt, Homo sapiens
  misc_RNA (1)...(19): siRNA sense strand
gcgagggaucauugaccaa

SEQ ID NO: 2604536 - RNA, 19 nt, Homo sapiens
  misc_RNA (1)...(19): siRNA sense strand
cuuuggaggaugagcucaa

SEQ ID NO: 2604537 - RNA, 19 nt, Homo sapiens
  misc_RNA (1)...(19): siRNA sense strand
agacaaugaaggagacauc

SEQ ID NO: 2604538 - RNA, 19 nt, Homo sapiens
  misc_RNA (1)...(19): siRNA sense strand
gggacggagcugacaucua

SEQ ID NO: 2604539 - RNA, 19 nt, Homo sapiens
  misc_RNA (1)...(19): siRNA sense strand
ucauggaggaggagggcca

SEQ ID NO: 2604540 - RNA, 19 nt, Homo sapiens
  misc_RNA (1)...(19): siRNA sense strand
gguuugaggacuuugccaa

SEQ ID NO: 2604541 - RNA, 19 nt, Homo sapiens
  misc_RNA (1)...(19): siRNA sense strand
gagacggacaccuggucaa

SEQ ID NO: 2604542 - RNA, 19 nt, Homo sapiens
  misc_RNA (1)...(19): siRNA sense strand
cggaagaagugucugacgu

SEQ ID NO: 2604543 - RNA, 19 nt, Homo sapiens
  misc_RNA (1)...(19): siRNA sense strand
ugaaggaugacgagcacau

SEQ ID NO: 2604544 - RNA, 19 nt, Homo sapiens
  misc_RNA (1)...(19): siRNA sense strand
gggccuacagagacggaca

SEQ ID NO: 2604545 - RNA, 19 nt, Homo sapiens
  misc_RNA (1)...(19): siRNA sense strand
aggagcagcuggaggcagu

SEQ ID NO: 2604546 - RNA, 19 nt, Homo sapiens
  misc_RNA (1)...(19): siRNA sense strand
cuguggugcugcuggguca

SEQ ID NO: 2604547 - RNA, 19 nt, Homo sapiens
  misc_RNA (1)...(19): siRNA sense strand
ggaccucaccgauggccua

SEQ ID NO: 2604548 - RNA, 19 nt, Homo sapiens
  misc_RNA (1)...(19): siRNA sense strand
ccaucuggcuccaacguga

SEQ ID NO: 2604549 - RNA, 19 nt, Homo sapiens
  misc_RNA (1)...(19): siRNA sense strand
acagaaagaaagugcugga

SEQ ID NO: 2604550 - RNA, 19 nt, Homo sapiens
  misc_RNA (1)...(19): siRNA sense strand
uggagaaggaagacugcau

SEQ ID NO: 2604551 - RNA, 19 nt, Homo sapiens
  misc_RNA (1)...(19): siRNA sense strand
aaggagguguggagaagca

SEQ ID NO: 2604552 - RNA, 19 nt, Homo sapiens
  misc_RNA (1)...(19): siRNA sense strand
ggggagaaguggagagagg

SEQ ID NO: 2604553 - RNA, 19 nt, Homo sapiens
  misc_RNA (1)...(19): siRNA sense strand
agaaguggagagagggcca

SEQ ID NO: 2604554 - RNA, 19 nt, Homo sapiens
  misc_RNA (1)...(19): siRNA sense strand
gccgagacaaugaaggaga

SEQ ID NO: 2604555 - RNA, 19 nt, Homo sapiens
  misc_RNA (1)...(19): siRNA sense strand
ugacauggcuccugggcug

SEQ ID NO: 2604556 - RNA, 19 nt, Homo sapiens
  misc_RNA (1)...(19): siRNA sense strand
augcagaaccauugaucaa

SEQ ID NO: 2604557 - RNA, 19 nt, Homo sapiens
  misc_RNA (1)...(19): siRNA sense strand
gugugauggcuuuggcuaa

SEQ ID NO: 2604558 - RNA, 19 nt, Homo sapiens
  misc_RNA (1)...(19): siRNA sense strand
accuguugcuuuagacaaa

SEQ ID NO: 2604559 - RNA, 19 nt, Homo sapiens
  misc_RNA (1)...(19): siRNA sense strand
cauaguagcuguucaggca

SEQ ID NO: 2604560 - RNA, 19 nt, Homo sapiens
  misc_RNA (1)...(19): siRNA sense strand
cugguaaugcuuaaggcaa

SEQ ID NO: 2604561 - RNA, 19 nt, Homo sapiens
  misc_RNA (1)...(19): siRNA sense strand
uuucaagauucaagaucga

SEQ ID NO: 2604562 - RNA, 19 nt, Homo sapiens
  misc_RNA (1)...(19): siRNA sense strand
cagaccacagacugggaaa

SEQ ID NO: 2604563 - RNA, 19 nt, Homo sapiens
  misc_RNA (1)...(19): siRNA sense strand
cagaagaugugcuggcuga

SEQ ID NO: 2604564 - RNA, 19 nt, Homo sapiens
  misc_RNA (1)...(19): siRNA sense strand
aggaggaguccgugcagaa

SEQ ID NO: 2604565 - RNA, 19 nt, Homo sapiens
  misc_RNA (1)...(19): siRNA sense strand
ggaggaagacccugagcga

SEQ ID NO: 2604566 - RNA, 19 nt, Homo sapiens
  misc_RNA (1)...(19): siRNA sense strand
ggaagacgcuguuugccaa

SEQ ID NO: 2604567 - RNA, 19 nt, Homo sapiens
  misc_RNA (1)...(19): siRNA sense strand
agaaugagaugcugcgagu

SEQ ID NO: 2604568 - RNA, 19 nt, Homo sapiens
  misc_RNA (1)...(19): siRNA sense strand
gggaagacgcuguuugcca

SEQ ID NO: 2604569 - RNA, 19 nt, Homo sapiens
  misc_RNA (1)...(19): siRNA sense strand
uggcacagaugcaggagca

SEQ ID NO: 2604570 - RNA, 19 nt, Homo sapiens
  misc_RNA (1)...(19): siRNA sense strand
gaaggaaagcagcgccuga

SEQ ID NO: 2604571 - RNA, 19 nt, Homo sapiens
  misc_RNA (1)...(19): siRNA sense strand
ccaaggacaaauggagcaa

SEQ ID NO: 2604572 - RNA, 19 nt, Homo sapiens
  misc_RNA (1)...(19): siRNA sense strand
gggcccaguaucaagacaa

SEQ ID NO: 2604573 - RNA, 19 nt, Homo sapiens
  misc_RNA (1)...(19): siRNA sense strand
gagauggagcugcggcaca

SEQ ID NO: 2604574 - RNA, 19 nt, Homo sapiens
  misc_RNA (1)...(19): siRNA sense strand
gcaacaaguucaugcuggu

SEQ ID NO: 2604575 - RNA, 19 nt, Homo sapiens
  misc_RNA (1)...(19): siRNA sense strand
aggaggaggcagaggaacu

SEQ ID NO: 2604576 - RNA, 19 nt, Homo sapiens
  misc_RNA (1)...(19): siRNA sense strand
ccaagaagaucccagccua

SEQ ID NO: 2604577 - RNA, 19 nt, Homo sapiens
  misc_RNA (1)...(19): siRNA sense strand
gcaaagaaacacuggacac

SEQ ID NO: 2604578 - RNA, 19 nt, Homo sapiens
  misc_RNA (1)...(19): siRNA sense strand
acuggagaguggauaucaa

SEQ ID NO: 2604579 - RNA, 19 nt, Homo sapiens
  misc_RNA (1)...(19): siRNA sense strand
ucaccguggagcugagcaa

SEQ ID NO: 2604580 - RNA, 19 nt, Homo sapiens
  misc_RNA (1)...(19): siRNA sense strand
uggacuggagaguggauau

SEQ ID NO: 2604581 - RNA, 19 nt, Homo sapiens
  misc_RNA (1)...(19): siRNA sense strand
cgaacauugaguagagcca

SEQ ID NO: 2604582 - RNA, 19 nt, Homo sapiens
  misc_RNA (1)...(19): siRNA sense strand
aaagugaggaagaagaaaa

SEQ ID NO: 2604583 - RNA, 19 nt, Homo sapiens
  misc_RNA (1)...(19): siRNA sense strand
ucuaaauggagcacugcaa

SEQ ID NO: 2604584 - RNA, 19 nt, Homo sapiens
  misc_RNA (1)...(19): siRNA sense strand
aaaugagaguucuggggaa

SEQ ID NO: 2604585 - RNA, 19 nt, Homo sapiens
  misc_RNA (1)...(19): siRNA sense strand
gacuaaaacaguuaaggaa

SEQ ID NO: 2604586 - RNA, 19 nt, Homo sapiens
  misc_RNA (1)...(19): siRNA sense strand
gugaggaagaagaaaauau

SEQ ID NO: 2604587 - RNA, 19 nt, Homo sapiens
  misc_RNA (1)...(19): siRNA sense strand
agaccauguuugugugcaa

SEQ ID NO: 2604588 - RNA, 19 nt, Homo sapiens
  misc_RNA (1)...(19): siRNA sense strand
gagaacaccaguaaggaga

SEQ ID NO: 2604589 - RNA, 19 nt, Homo sapiens
  misc_RNA (1)...(19): siRNA sense strand
guaaggagacagagccaga

SEQ ID NO: 2604590 - RNA, 19 nt, Homo sapiens
  misc_RNA (1)...(19): siRNA sense strand
guuuagagguuaaggagcu

SEQ ID NO: 2604591 - RNA, 19 nt, Homo sapiens
  misc_RNA (1)...(19): siRNA sense strand
caggguuguaugaguguaa

SEQ ID NO: 2604592 - RNA, 19 nt, Homo sapiens
  misc_RNA (1)...(19): siRNA sense strand
ggggcaaacgagaagauaa

SEQ ID NO: 2604593 - RNA, 19 nt, Homo sapiens
  misc_RNA (1)...(19): siRNA sense strand
ucagaaggcaggaaggcau

SEQ ID NO: 2604594 - RNA, 19 nt, Homo sapiens
  misc_RNA (1)...(19): siRNA sense strand
caguaaggagacagagcca

SEQ ID NO: 2604595 - RNA, 19 nt, Homo sapiens
  misc_RNA (1)...(19): siRNA sense strand
ugggauggcgcaagaucaa

SEQ ID NO: 2604596 - RNA, 19 nt, Homo sapiens
  misc_RNA (1)...(19): siRNA sense strand
ggaccaucuuggagaggcu

SEQ ID NO: 2604597 - RNA, 19 nt, Homo sapiens
  misc_RNA (1)...(19): siRNA sense strand
gggcaaagugggcacgaga

SEQ ID NO: 2604598 - RNA, 19 nt, Homo sapiens
  misc_RNA (1)...(19): siRNA sense strand
ugaagagaacagagagacu

SEQ ID NO: 2604599 - RNA, 19 nt, Homo sapiens
  misc_RNA (1)...(19): siRNA sense strand
agcagauauuugaagagaa

SEQ ID NO: 2604600 - RNA, 19 nt, Homo sapiens
  misc_RNA (1)...(19): siRNA sense strand
uuugaagagaacagagaga

SEQ ID NO: 2604601 - RNA, 19 nt, Homo sapiens
  misc_RNA (1)...(19): siRNA sense strand
gagacaaggcucugcagga

SEQ ID NO: 2604602 - RNA, 19 nt, Homo sapiens
  misc_RNA (1)...(19): siRNA sense strand
gcucaaaccugaaagacga

SEQ ID NO: 2604603 - RNA, 19 nt, Homo sapiens
  misc_RNA (1)...(19): siRNA sense strand
gagcugugagcgagggcaa

SEQ ID NO: 2604604 - RNA, 19 nt, Homo sapiens
  misc_RNA (1)...(19): siRNA sense strand
cagaagaacaaaaggauga

SEQ ID NO: 2604605 - RNA, 19 nt, Homo sapiens
  misc_RNA (1)...(19): siRNA sense strand
cuggagaagcugaagauca

SEQ ID NO: 2604606 - RNA, 19 nt, Homo sapiens
  misc_RNA (1)...(19): siRNA sense strand
ugccaauaaugcagaucaa

SEQ ID NO: 2604607 - RNA, 19 nt, Homo sapiens
  misc_RNA (1)...(19): siRNA sense strand
uggcgaagcacgaggccuu

SEQ ID NO: 2604608 - RNA, 19 nt, Homo sapiens
  misc_RNA (1)...(19): siRNA sense strand
agguggaggacguggacau

SEQ ID NO: 2604609 - RNA, 19 nt, Homo sapiens
  misc_RNA (1)...(19): siRNA sense strand
ugggacacgucaaaggcua

SEQ ID NO: 2604610 - RNA, 19 nt, Homo sapiens
  misc_RNA (1)...(19): siRNA sense strand
aguugguaaagaaaggaaa

SEQ ID NO: 2604611 - RNA, 19 nt, Homo sapiens
  misc_RNA (1)...(19): siRNA sense strand
agcacugcacagagaguaa

SEQ ID NO: 2604612 - RNA, 19 nt, Homo sapiens
  misc_RNA (1)...(19): siRNA sense strand
aggcuauguuugacagcga

SEQ ID NO: 2604613 - RNA, 19 nt, Homo sapiens
  misc_RNA (1)...(19): siRNA sense strand
gcucauuuaaggugcacuu

SEQ ID NO: 2604614 - RNA, 19 nt, Homo sapiens
  misc_RNA (1)...(19): siRNA sense strand
guugguaaagaaaggaaaa

SEQ ID NO: 2604615 - RNA, 19 nt, Homo sapiens
  misc_RNA (1)...(19): siRNA sense strand
uaaccagagcugugagcga

SEQ ID NO: 2604616 - RNA, 19 nt, Homo sapiens
  misc_RNA (1)...(19): siRNA sense strand
gcaugcuguuucuggugaa

SEQ ID NO: 2604617 - RNA, 19 nt, Homo sapiens
  misc_RNA (1)...(19): siRNA sense strand
aggaagaagaagaagaaga

SEQ ID NO: 2604618 - RNA, 19 nt, Homo sapiens
  misc_RNA (1)...(19): siRNA sense strand
cggaaaagagaaagaagaa

SEQ ID NO: 2604619 - RNA, 19 nt, Homo sapiens
  misc_RNA (1)...(19): siRNA sense strand
agaaagaagaagagcagga

SEQ ID NO: 2604620 - RNA, 19 nt, Homo sapiens
  misc_RNA (1)...(19): siRNA sense strand
aggaggaagaagaagaaga

SEQ ID NO: 2604621 - RNA, 19 nt, Homo sapiens
  misc_RNA (1)...(19): siRNA sense strand
aagaagaagggcaaggaga

SEQ ID NO: 2604622 - RNA, 19 nt, Homo sapiens
  misc_RNA (1)...(19): siRNA sense strand
aggagaaggcggaagcaca

SEQ ID NO: 2604623 - RNA, 19 nt, Homo sapiens
  misc_RNA (1)...(19): siRNA sense strand
aaggacaagaggaggaaga

SEQ ID NO: 2604624 - RNA, 19 nt, Homo sapiens
  misc_RNA (1)...(19): siRNA sense strand
aagaagaagaagaagagga

SEQ ID NO: 2604625 - RNA, 19 nt, Homo sapiens
  misc_RNA (1)...(19): siRNA sense strand
aagaggaggaagaagaaga

SEQ ID NO: 2604626 - RNA, 19 nt, Homo sapiens
  misc_RNA (1)...(19): siRNA sense strand
aagaagaagagcaggaaag

SEQ ID NO: 2604627 - RNA, 19 nt, Homo sapiens
  misc_RNA (1)...(19): siRNA sense strand
aagagaaagaagaagagca

SEQ ID NO: 2604628 - RNA, 19 nt, Homo sapiens
  misc_RNA (1)...(19): siRNA sense strand
agagaaagaagaagagcag

SEQ ID NO: 2604629 - RNA, 19 nt, Homo sapiens
  misc_RNA (1)...(19): siRNA sense strand
aggaagaagaagaagaaga

SEQ ID NO: 2604630 - RNA, 19 nt, Homo sapiens
  misc_RNA (1)...(19): siRNA sense strand
cggaaaagagaaagaagaa

SEQ ID NO: 2604631 - RNA, 19 nt, Homo sapiens
  misc_RNA (1)...(19): siRNA sense strand
agaaagaagaagagcagga

SEQ ID NO: 2604632 - RNA, 19 nt, Homo sapiens
  misc_RNA (1)...(19): siRNA sense strand
aggaggaagaagaagaaga

SEQ ID NO: 2604633 - RNA, 19 nt, Homo sapiens
  misc_RNA (1)...(19): siRNA sense strand
aagaagaagggcaaggaga

SEQ ID NO: 2604634 - RNA, 19 nt, Homo sapiens
  misc_RNA (1)...(19): siRNA sense strand
aggagaaggcggaagcaca

SEQ ID NO: 2604635 - RNA, 19 nt, Homo sapiens
  misc_RNA (1)...(19): siRNA sense strand
aaggacaagaggaggaaga

SEQ ID NO: 2604636 - RNA, 19 nt, Homo sapiens
  misc_RNA (1)...(19): siRNA sense strand
aagaagaagaagaagagga

SEQ ID NO: 2604637 - RNA, 19 nt, Homo sapiens
  misc_RNA (1)...(19): siRNA sense strand
aagaggaggaagaagaaga

SEQ ID NO: 2604638 - RNA, 19 nt, Homo sapiens
  misc_RNA (1)...(19): siRNA sense strand
aagaagaagagcaggaaag

SEQ ID NO: 2604639 - RNA, 19 nt, Homo sapiens
  misc_RNA (1)...(19): siRNA sense strand
aagagaaagaagaagagca

SEQ ID NO: 2604640 - RNA, 19 nt, Homo sapiens
  misc_RNA (1)...(19): siRNA sense strand
agagaaagaagaagagcag

SEQ ID NO: 2604641 - RNA, 19 nt, Homo sapiens
  misc_RNA (1)...(19): siRNA sense strand
gaaagaggccaguuggaga

SEQ ID NO: 2604642 - RNA, 19 nt, Homo sapiens
  misc_RNA (1)...(19): siRNA sense strand
agauagugcugcugcucaa

SEQ ID NO: 2604643 - RNA, 19 nt, Homo sapiens
  misc_RNA (1)...(19): siRNA sense strand
agauauuccgugagaugua

SEQ ID NO: 2604644 - RNA, 19 nt, Homo sapiens
  misc_RNA (1)...(19): siRNA sense strand
aagaaugcuuuguggaacu

SEQ ID NO: 2604645 - RNA, 19 nt, Homo sapiens
  misc_RNA (1)...(19): siRNA sense strand
gugagauguaugugcguuu

SEQ ID NO: 2604646 - RNA, 19 nt, Homo sapiens
  misc_RNA (1)...(19): siRNA sense strand
auauaggacaacuggguau

SEQ ID NO: 2604647 - RNA, 19 nt, Homo sapiens
  misc_RNA (1)...(19): siRNA sense strand
guuuaugcaccuaaggauu

SEQ ID NO: 2604648 - RNA, 19 nt, Homo sapiens
  misc_RNA (1)...(19): siRNA sense strand
ggguuuaauucaaguucca

SEQ ID NO: 2604649 - RNA, 19 nt, Homo sapiens
  misc_RNA (1)...(19): siRNA sense strand
acaacuggguauagaugau

SEQ ID NO: 2604650 - RNA, 19 nt, Homo sapiens
  misc_RNA (1)...(19): siRNA sense strand
uguauuaugagcagcuuaa

SEQ ID NO: 2604651 - RNA, 19 nt, Homo sapiens
  misc_RNA (1)...(19): siRNA sense strand
gccaguuggagaacagaaa

SEQ ID NO: 2604652 - RNA, 19 nt, Homo sapiens
  misc_RNA (1)...(19): siRNA sense strand
augagcagcuuaagaccaa

SEQ ID NO: 2604653 - RNA, 19 nt, Homo sapiens
  misc_RNA (1)...(19): siRNA sense strand
caguuggagaacagaaaga

SEQ ID NO: 2604654 - RNA, 19 nt, Homo sapiens
  misc_RNA (1)...(19): siRNA sense strand
uaucagguugggagaagaa

SEQ ID NO: 2604655 - RNA, 19 nt, Homo sapiens
  misc_RNA (1)...(19): siRNA sense strand
ucauuuaaguggaugguuc

SEQ ID NO: 2604656 - RNA, 19 nt, Homo sapiens
  misc_RNA (1)...(19): siRNA sense strand
cuuuguggaacuuggcuua

SEQ ID NO: 2604657 - RNA, 19 nt, Homo sapiens
  misc_RNA (1)...(19): siRNA sense strand
ugaaguugacagcaagcaa

SEQ ID NO: 2604658 - RNA, 19 nt, Homo sapiens
  misc_RNA (1)...(19): siRNA sense strand
acuaggacuggaagaauau

SEQ ID NO: 2604659 - RNA, 19 nt, Homo sapiens
  misc_RNA (1)...(19): siRNA sense strand
uggagaacagaaagaacuu

SEQ ID NO: 2604660 - RNA, 19 nt, Homo sapiens
  misc_RNA (1)...(19): siRNA sense strand
aggauuuucuugagguauu

SEQ ID NO: 2604661 - RNA, 19 nt, Homo sapiens
  misc_RNA (1)...(19): siRNA sense strand
cugaauugaaagaaugcuu

SEQ ID NO: 2604662 - RNA, 19 nt, Homo sapiens
  misc_RNA (1)...(19): siRNA sense strand
agaaagaaucagaggugaa

SEQ ID NO: 2604663 - RNA, 19 nt, Homo sapiens
  misc_RNA (1)...(19): siRNA sense strand
gggaagaaguggaccucga

SEQ ID NO: 2604664 - RNA, 19 nt, Homo sapiens
  misc_RNA (1)...(19): siRNA sense strand
auucaaaguggaagcuaaa

SEQ ID NO: 2604665 - RNA, 19 nt, Homo sapiens
  misc_RNA (1)...(19): siRNA sense strand
caggagaugaugagguuau

SEQ ID NO: 2604666 - RNA, 19 nt, Homo sapiens
  misc_RNA (1)...(19): siRNA sense strand
cccaagaaauuguugaaaa

SEQ ID NO: 2604667 - RNA, 19 nt, Homo sapiens
  misc_RNA (1)...(19): siRNA sense strand
ccggauggucuuuggagaa

SEQ ID NO: 2604668 - RNA, 19 nt, Homo sapiens
  misc_RNA (1)...(19): siRNA sense strand
caguguauccagagaccaa

SEQ ID NO: 2604669 - RNA, 19 nt, Homo sapiens
  misc_RNA (1)...(19): siRNA sense strand
aagaaacuacugaggaaau

SEQ ID NO: 2604670 - RNA, 19 nt, Homo sapiens
  misc_RNA (1)...(19): siRNA sense strand
aggaagaggcaagaaauaa

SEQ ID NO: 2604671 - RNA, 19 nt, Homo sapiens
  misc_RNA (1)...(19): siRNA sense strand
aggaaauggaauacaacau

SEQ ID NO: 2604672 - RNA, 19 nt, Homo sapiens
  misc_RNA (1)...(19): siRNA sense strand
acuagaagaaagagaaugu

SEQ ID NO: 2604673 - RNA, 19 nt, Homo sapiens
  misc_RNA (1)...(19): siRNA sense strand
aagaaguggaccucgauua

SEQ ID NO: 2604674 - RNA, 19 nt, Homo sapiens
  misc_RNA (1)...(19): siRNA sense strand
cccaguagucagaaagaau

SEQ ID NO: 2604675 - RNA, 19 nt, Homo sapiens
  misc_RNA (1)...(19): siRNA sense strand
cuaagacauuggcuggaaa

SEQ ID NO: 2604676 - RNA, 19 nt, Homo sapiens
  misc_RNA (1)...(19): siRNA sense strand
ugaacuagaagaaagagaa

SEQ ID NO: 2604677 - RNA, 19 nt, Homo sapiens
  misc_RNA (1)...(19): siRNA sense strand
gugcugaggcuguggucau

SEQ ID NO: 2604678 - RNA, 19 nt, Homo sapiens
  misc_RNA (1)...(19): siRNA sense strand
cuucuuggcaucagaggaa

SEQ ID NO: 2604679 - RNA, 19 nt, Homo sapiens
  misc_RNA (1)...(19): siRNA sense strand
cuuugaaacaggagaugau

SEQ ID NO: 2604680 - RNA, 19 nt, Homo sapiens
  misc_RNA (1)...(19): siRNA sense strand
gugcacagcgccaaggaau

SEQ ID NO: 2604681 - RNA, 19 nt, Homo sapiens
  misc_RNA (1)...(19): siRNA sense strand
agggagaacggauuugaaa

SEQ ID NO: 2604682 - RNA, 19 nt, Homo sapiens
  misc_RNA (1)...(19): siRNA sense strand
gacaauuacacaauggauu

SEQ ID NO: 2604683 - RNA, 19 nt, Homo sapiens
  misc_RNA (1)...(19): siRNA sense strand
gcugaauauuucuagagau

SEQ ID NO: 2604684 - RNA, 19 nt, Homo sapiens
  misc_RNA (1)...(19): siRNA sense strand
ccaagaaauuguugaaaag

SEQ ID NO: 2604685 - RNA, 19 nt, Homo sapiens
  misc_RNA (1)...(19): siRNA sense strand
cagcaaaauaugguagaaa

SEQ ID NO: 2604686 - RNA, 19 nt, Homo sapiens
  misc_RNA (1)...(19): siRNA sense strand
augaaaucugccugugaaa

SEQ ID NO: 2604687 - RNA, 19 nt, Homo sapiens
  misc_RNA (1)...(19): siRNA sense strand
ucaaagguuucgagauacu

SEQ ID NO: 2604688 - RNA, 19 nt, Homo sapiens
  misc_RNA (1)...(19): siRNA sense strand
cugaacuagaagaaagaga

SEQ ID NO: 2604689 - RNA, 19 nt, Homo sapiens
  misc_RNA (1)...(19): siRNA sense strand
aaauguaauagcugaccua

SEQ ID NO: 2604690 - RNA, 19 nt, Homo sapiens
  misc_RNA (1)...(19): siRNA sense strand
ugccaauagaacagaaaca

SEQ ID NO: 2604691 - RNA, 19 nt, Homo sapiens
  misc_RNA (1)...(19): siRNA sense strand
cacacaaggugaggagaau

SEQ ID NO: 2604692 - RNA, 19 nt, Homo sapiens
  misc_RNA (1)...(19): siRNA sense strand
aaagaaacuacugaggaaa

SEQ ID NO: 2604693 - RNA, 19 nt, Homo sapiens
  misc_RNA (1)...(19): siRNA sense strand
gucccucaguggagaacaa

SEQ ID NO: 2604694 - RNA, 19 nt, Homo sapiens
  misc_RNA (1)...(19): siRNA sense strand
cagaaagaaucagagguga

SEQ ID NO: 2604695 - RNA, 19 nt, Homo sapiens
  misc_RNA (1)...(19): siRNA sense strand
aagaaauaaagcugggacu

SEQ ID NO: 2604696 - RNA, 19 nt, Homo sapiens
  misc_RNA (1)...(19): siRNA sense strand
cuggaaauguaauagcuga

SEQ ID NO: 2604697 - RNA, 19 nt, Homo sapiens
  misc_RNA (1)...(19): siRNA sense strand
cugugaaccugaacuagaa

SEQ ID NO: 2604698 - RNA, 19 nt, Homo sapiens
  misc_RNA (1)...(19): siRNA sense strand
cagaggaagugcugaggcu

SEQ ID NO: 2604699 - RNA, 19 nt, Homo sapiens
  misc_RNA (1)...(19): siRNA sense strand
agaacggauuugaaacaca

SEQ ID NO: 2604700 - RNA, 19 nt, Homo sapiens
  misc_RNA (1)...(19): siRNA sense strand
aagcuuggcaacagaaaca

SEQ ID NO: 2604701 - RNA, 19 nt, Homo sapiens
  misc_RNA (1)...(19): siRNA sense strand
ugcacagcgccaaggaaua

SEQ ID NO: 2604702 - RNA, 19 nt, Homo sapiens
  misc_RNA (1)...(19): siRNA sense strand
cugaagaaaggcauacgaa

SEQ ID NO: 2604703 - RNA, 19 nt, Homo sapiens
  misc_RNA (1)...(19): siRNA sense strand
acaacauccucguaaacuu

SEQ ID NO: 2604704 - RNA, 19 nt, Homo sapiens
  misc_RNA (1)...(19): siRNA sense strand
cgaugauccucugggaaga

SEQ ID NO: 2604705 - RNA, 19 nt, Homo sapiens
  misc_RNA (1)...(19): siRNA sense strand
ugcaggaagaggcaagaaa

SEQ ID NO: 2604706 - RNA, 19 nt, Homo sapiens
  misc_RNA (1)...(19): siRNA sense strand
gguguuuauagcagcacaa

SEQ ID NO: 2604707 - RNA, 19 nt, Homo sapiens
  misc_RNA (1)...(19): siRNA sense strand
uguuauagaugggagcaau

SEQ ID NO: 2604708 - RNA, 19 nt, Homo sapiens
  misc_RNA (1)...(19): siRNA sense strand
ggaagcuuggcaacagaaa

SEQ ID NO: 2604709 - RNA, 19 nt, Homo sapiens
  misc_RNA (1)...(19): siRNA sense strand
cgccaaggaauauauuaaa

SEQ ID NO: 2604710 - RNA, 19 nt, Homo sapiens
  misc_RNA (1)...(19): siRNA sense strand
aggcauacgaagaagcagu

SEQ ID NO: 2604711 - RNA, 19 nt, Homo sapiens
  misc_RNA (1)...(19): siRNA sense strand
agaauuugugaaugaguca

SEQ ID NO: 2604712 - RNA, 19 nt, Homo sapiens
  misc_RNA (1)...(19): siRNA sense strand
gauuagaggaguuucuuca

SEQ ID NO: 2604713 - RNA, 19 nt, Homo sapiens
  misc_RNA (1)...(19): siRNA sense strand
gaggaagugcugaggcugu

SEQ ID NO: 2604714 - RNA, 19 nt, Homo sapiens
  misc_RNA (1)...(19): siRNA sense strand
cauuaagguguauggacca

SEQ ID NO: 2604715 - RNA, 19 nt, Homo sapiens
  misc_RNA (1)...(19): siRNA sense strand
caaagaaaacacaggcuca

SEQ ID NO: 2604716 - RNA, 19 nt, Homo sapiens
  misc_RNA (1)...(19): siRNA sense strand
ugacaagacuggaacgcuu

SEQ ID NO: 2604717 - RNA, 19 nt, Homo sapiens
  misc_RNA (1)...(19): siRNA sense strand
agauaguggauguggugaa

SEQ ID NO: 2604718 - RNA, 19 nt, Homo sapiens
  misc_RNA (1)...(19): siRNA sense strand
cgucaggguuugagucaca

SEQ ID NO: 2604719 - RNA, 19 nt, Homo sapiens
  misc_RNA (1)...(19): siRNA sense strand
agacauugcuggaggaggu

SEQ ID NO: 2604720 - RNA, 19 nt, Homo sapiens
  misc_RNA (1)...(19): siRNA sense strand
agaaauacucagugggucu

SEQ ID NO: 2604721 - RNA, 19 nt, Homo sapiens
  misc_RNA (1)...(19): siRNA sense strand
aagaaauccaggaagaaau

SEQ ID NO: 2604722 - RNA, 19 nt, Homo sapiens
  misc_RNA (1)...(19): siRNA sense strand
gcuacaaccgggugaccaa

SEQ ID NO: 2604723 - RNA, 19 nt, Homo sapiens
  misc_RNA (1)...(19): siRNA sense strand
agucucgaguccugggaaa

SEQ ID NO: 2604724 - RNA, 19 nt, Homo sapiens
  misc_RNA (1)...(19): siRNA sense strand
ccugagaaggauggagaua

SEQ ID NO: 2604725 - RNA, 19 nt, Homo sapiens
  misc_RNA (1)...(19): siRNA sense strand
cagacaaugcaguuaacaa

SEQ ID NO: 2604726 - RNA, 19 nt, Homo sapiens
  misc_RNA (1)...(19): siRNA sense strand
auuaagagguacacagcuu

SEQ ID NO: 2604727 - RNA, 19 nt, Homo sapiens
  misc_RNA (1)...(19): siRNA sense strand
ccagugaaccucaggcaau

SEQ ID NO: 2604728 - RNA, 19 nt, Homo sapiens
  misc_RNA (1)...(19): siRNA sense strand
acuugaacuuagaugggaa

SEQ ID NO: 2604729 - RNA, 19 nt, Homo sapiens
  misc_RNA (1)...(19): siRNA sense strand
agucugagauaguggaugu

SEQ ID NO: 2604730 - RNA, 19 nt, Homo sapiens
  misc_RNA (1)...(19): siRNA sense strand
auguugagaaggugacuaa

SEQ ID NO: 2604731 - RNA, 19 nt, Homo sapiens
  misc_RNA (1)...(19): siRNA sense strand
cgggauagcaauggaaaga

SEQ ID NO: 2604732 - RNA, 19 nt, Homo sapiens
  misc_RNA (1)...(19): siRNA sense strand
cugagaaggauggagauaa

SEQ ID NO: 2604733 - RNA, 19 nt, Homo sapiens
  misc_RNA (1)...(19): siRNA sense strand
gugaagauuguguguguga

SEQ ID NO: 2604734 - RNA, 19 nt, Homo sapiens
  misc_RNA (1)...(19): siRNA sense strand
aggcagacaaugcaguuaa

SEQ ID NO: 2604735 - RNA, 19 nt, Homo sapiens
  misc_RNA (1)...(19): siRNA sense strand
ugugggaaucagugggaau

SEQ ID NO: 2604736 - RNA, 19 nt, Homo sapiens
  misc_RNA (1)...(19): siRNA sense strand
aagagguggcagugggaga

SEQ ID NO: 2604737 - RNA, 19 nt, Homo sapiens
  misc_RNA (1)...(19): siRNA sense strand
guugaagaacauugaggau

SEQ ID NO: 2604738 - RNA, 19 nt, Homo sapiens
  misc_RNA (1)...(19): siRNA sense strand
aguacagcguguugacauu

SEQ ID NO: 2604739 - RNA, 19 nt, Homo sapiens
  misc_RNA (1)...(19): siRNA sense strand
caugcaaacacgugaaguu

SEQ ID NO: 2604740 - RNA, 19 nt, Homo sapiens
  misc_RNA (1)...(19): siRNA sense strand
ggaacaggucucaugguga

SEQ ID NO: 2604741 - RNA, 19 nt, Homo sapiens
  misc_RNA (1)...(19): siRNA sense strand
aaaccuuaaugaagagcuu

SEQ ID NO: 2604742 - RNA, 19 nt, Homo sapiens
  misc_RNA (1)...(19): siRNA sense strand
ggaaagaggcugaacgagc

SEQ ID NO: 2604743 - RNA, 19 nt, Homo sapiens
  misc_RNA (1)...(19): siRNA sense strand
ggugaaaagaacugguaca

SEQ ID NO: 2604744 - RNA, 19 nt, Homo sapiens
  misc_RNA (1)...(19): siRNA sense strand
cugcacugaccuugggaau

SEQ ID NO: 2604745 - RNA, 19 nt, Homo sapiens
  misc_RNA (1)...(19): siRNA sense strand
ccuguauauuauugagcuu

SEQ ID NO: 2604746 - RNA, 19 nt, Homo sapiens
  misc_RNA (1)...(19): siRNA sense strand
ucuccaacaggaagauaua

SEQ ID NO: 2604747 - RNA, 19 nt, Homo sapiens
  misc_RNA (1)...(19): siRNA sense strand
gcaucaaagagauuguaga

SEQ ID NO: 2604748 - RNA, 19 nt, Homo sapiens
  misc_RNA (1)...(19): siRNA sense strand
ccucagauaauuuuggaua

SEQ ID NO: 2604749 - RNA, 19 nt, Homo sapiens
  misc_RNA (1)...(19): siRNA sense strand
agcuugggcaggugaaaua

SEQ ID NO: 2604750 - RNA, 19 nt, Homo sapiens
  misc_RNA (1)...(19): siRNA sense strand
uguuacuguuugucugaaa

SEQ ID NO: 2604751 - RNA, 19 nt, Homo sapiens
  misc_RNA (1)...(19): siRNA sense strand
caugauacuguguugacaa

SEQ ID NO: 2604752 - RNA, 19 nt, Homo sapiens
  misc_RNA (1)...(19): siRNA sense strand
cuugaacuuagaugggaaa

SEQ ID NO: 2604753 - RNA, 19 nt, Homo sapiens
  misc_RNA (1)...(19): siRNA sense strand
caacaaauuccgcgacaac

SEQ ID NO: 2604754 - RNA, 19 nt, Homo sapiens
  misc_RNA (1)...(19): siRNA sense strand
gcaucaacgccuuggucca

SEQ ID NO: 2604755 - RNA, 19 nt, Homo sapiens
  misc_RNA (1)...(19): siRNA sense strand
gaaguauacucaagcccuu

SEQ ID NO: 2604756 - RNA, 19 nt, Homo sapiens
  misc_RNA (1)...(19): siRNA sense strand
cgccuuuguuaauggauuu

SEQ ID NO: 2604757 - RNA, 19 nt, Homo sapiens
  misc_RNA (1)...(19): siRNA sense strand
agauaugagaggacaggca

SEQ ID NO: 2604758 - RNA, 19 nt, Homo sapiens
  misc_RNA (1)...(19): siRNA sense strand
gcuuaugacaccaccaaaa

SEQ ID NO: 2604759 - RNA, 19 nt, Homo sapiens
  misc_RNA (1)...(19): siRNA sense strand
guggugaagaagcggguga

SEQ ID NO: 2604760 - RNA, 19 nt, Homo sapiens
  misc_RNA (1)...(19): siRNA sense strand
cggagcuguuagucaggaa

SEQ ID NO: 2604761 - RNA, 19 nt, Homo sapiens
  misc_RNA (1)...(19): siRNA sense strand
ucauaaacugggacacaga

SEQ ID NO: 2604762 - RNA, 19 nt, Homo sapiens
  misc_RNA (1)...(19): siRNA sense strand
auaaacugggacacagaua

SEQ ID NO: 2604763 - RNA, 19 nt, Homo sapiens
  misc_RNA (1)...(19): siRNA sense strand
gcgccaacgaugucgggau

SEQ ID NO: 2604764 - RNA, 19 nt, Homo sapiens
  misc_RNA (1)...(19): siRNA sense strand
ucccagaauuggcaagaga

SEQ ID NO: 2604765 - RNA, 19 nt, Homo sapiens
  misc_RNA (1)...(19): siRNA sense strand
gcacacuucugguugggau

SEQ ID NO: 2604766 - RNA, 19 nt, Homo sapiens
  misc_RNA (1)...(19): siRNA sense strand
uagaagauuuuaagcgaca

SEQ ID NO: 2604767 - RNA, 19 nt, Homo sapiens
  misc_RNA (1)...(19): siRNA sense strand
gauaugagaggacaggcaa

SEQ ID NO: 2604768 - RNA, 19 nt, Homo sapiens
  misc_RNA (1)...(19): siRNA sense strand
caacuaugguccugagcuc

SEQ ID NO: 2604769 - RNA, 19 nt, Homo sapiens
  misc_RNA (1)...(19): siRNA sense strand
uuaaaauacgucaggguuu

SEQ ID NO: 2604770 - RNA, 19 nt, Homo sapiens
  misc_RNA (1)...(19): siRNA sense strand
cugaaaggcaauagagaaa

SEQ ID NO: 2604771 - RNA, 19 nt, Homo sapiens
  misc_RNA (1)...(19): siRNA sense strand
gagaagaaaaggagaguaa

SEQ ID NO: 2604772 - RNA, 19 nt, Homo sapiens
  misc_RNA (1)...(19): siRNA sense strand
ccuuauggguacagaggaa

SEQ ID NO: 2604773 - RNA, 19 nt, Homo sapiens
  misc_RNA (1)...(19): siRNA sense strand
guggaaaggccuagcacua

SEQ ID NO: 2604774 - RNA, 19 nt, Homo sapiens
  misc_RNA (1)...(19): siRNA sense strand
aauuagaggcagaggaaga

SEQ ID NO: 2604775 - RNA, 19 nt, Homo sapiens
  misc_RNA (1)...(19): siRNA sense strand
ggaucaagaaagcaggaaa

SEQ ID NO: 2604776 - RNA, 19 nt, Homo sapiens
  misc_RNA (1)...(19): siRNA sense strand
aggaagagccagaggaguu

SEQ ID NO: 2604777 - RNA, 19 nt, Homo sapiens
  misc_RNA (1)...(19): siRNA sense strand
cguauguauucuagagauu

SEQ ID NO: 2604778 - RNA, 19 nt, Homo sapiens
  misc_RNA (1)...(19): siRNA sense strand
gcaaggaagaaaaggaaua

SEQ ID NO: 2604779 - RNA, 19 nt, Homo sapiens
  misc_RNA (1)...(19): siRNA sense strand
aaggagaguaagaaggaaa

SEQ ID NO: 2604780 - RNA, 19 nt, Homo sapiens
  misc_RNA (1)...(19): siRNA sense strand
aggaaagagaagaagaauu

SEQ ID NO: 2604781 - RNA, 19 nt, Homo sapiens
  misc_RNA (1)...(19): siRNA sense strand
cagaaauaauagaggaaug

SEQ ID NO: 2604782 - RNA, 19 nt, Homo sapiens
  misc_RNA (1)...(19): siRNA sense strand
aggaagaggucgugguacu

SEQ ID NO: 2604783 - RNA, 19 nt, Homo sapiens
  misc_RNA (1)...(19): siRNA sense strand
gaucaagaaagcaggaaaa

SEQ ID NO: 2604784 - RNA, 19 nt, Homo sapiens
  misc_RNA (1)...(19): siRNA sense strand
agacagaggauuauagaca

SEQ ID NO: 2604785 - RNA, 19 nt, Homo sapiens
  misc_RNA (1)...(19): siRNA sense strand
aggaagggguagaggguau

SEQ ID NO: 2604786 - RNA, 19 nt, Homo sapiens
  misc_RNA (1)...(19): siRNA sense strand
ugauggauuuagagaagaa

SEQ ID NO: 2604787 - RNA, 19 nt, Homo sapiens
  misc_RNA (1)...(19): siRNA sense strand
aagaagagaccauggaaaa

SEQ ID NO: 2604788 - RNA, 19 nt, Homo sapiens
  misc_RNA (1)...(19): siRNA sense strand
gugauaaagagucuggaaa

SEQ ID NO: 2604789 - RNA, 19 nt, Homo sapiens
  misc_RNA (1)...(19): siRNA sense strand
ugauaaagagucuggaaaa

SEQ ID NO: 2604790 - RNA, 19 nt, Homo sapiens
  misc_RNA (1)...(19): siRNA sense strand
agauaagcacaaagaagaa

SEQ ID NO: 2604791 - RNA, 19 nt, Homo sapiens
  misc_RNA (1)...(19): siRNA sense strand
cuacaaaagauaagcacaa

SEQ ID NO: 2604792 - RNA, 19 nt, Homo sapiens
  misc_RNA (1)...(19): siRNA sense strand
ccaaaagauuacaaggaau

SEQ ID NO: 2604793 - RNA, 19 nt, Homo sapiens
  misc_RNA (1)...(19): siRNA sense strand
ucaucauguuaaagagcaa

SEQ ID NO: 2604794 - RNA, 19 nt, Homo sapiens
  misc_RNA (1)...(19): siRNA sense strand
aggcagaggaagagccaga

SEQ ID NO: 2604795 - RNA, 19 nt, Homo sapiens
  misc_RNA (1)...(19): siRNA sense strand
cgucgcgauuacagaaaua

SEQ ID NO: 2604796 - RNA, 19 nt, Homo sapiens
  misc_RNA (1)...(19): siRNA sense strand
ucacauucuucaaggucaa

SEQ ID NO: 2604797 - RNA, 19 nt, Homo sapiens
  misc_RNA (1)...(19): siRNA sense strand
acuuaaagagacuggauau

SEQ ID NO: 2604798 - RNA, 19 nt, Homo sapiens
  misc_RNA (1)...(19): siRNA sense strand
caguaaagaaagaaacuca

SEQ ID NO: 2604799 - RNA, 19 nt, Homo sapiens
  misc_RNA (1)...(19): siRNA sense strand
ucaaggaggaggagguaga

SEQ ID NO: 2604800 - RNA, 19 nt, Homo sapiens
  misc_RNA (1)...(19): siRNA sense strand
ccaaagagcaagaaguacu

SEQ ID NO: 2604801 - RNA, 19 nt, Homo sapiens
  misc_RNA (1)...(19): siRNA sense strand
gaagaaaaggagaguaaga

SEQ ID NO: 2604802 - RNA, 19 nt, Homo sapiens
  misc_RNA (1)...(19): siRNA sense strand
ggguagaggguauuaucaa

SEQ ID NO: 2604803 - RNA, 19 nt, Homo sapiens
  misc_RNA (1)...(19): siRNA sense strand
cuaaauggacucaugacaa

SEQ ID NO: 2604804 - RNA, 19 nt, Homo sapiens
  misc_RNA (1)...(19): siRNA sense strand
acugaaaggcaauagagaa

SEQ ID NO: 2604805 - RNA, 19 nt, Homo sapiens
  misc_RNA (1)...(19): siRNA sense strand
caauagagaaagugaugga

SEQ ID NO: 2604806 - RNA, 19 nt, Homo sapiens
  misc_RNA (1)...(19): siRNA sense strand
uccaagggcuccagggaau

SEQ ID NO: 2604807 - RNA, 19 nt, Homo sapiens
  misc_RNA (1)...(19): siRNA sense strand
agaguaagaaggaaagaga

SEQ ID NO: 2604808 - RNA, 19 nt, Homo sapiens
  misc_RNA (1)...(19): siRNA sense strand
aggaaugggauccagaaua

SEQ ID NO: 2604809 - RNA, 19 nt, Homo sapiens
  misc_RNA (1)...(19): siRNA sense strand
ggauaaagaggcuucaaaa

SEQ ID NO: 2604810 - RNA, 19 nt, Homo sapiens
  misc_RNA (1)...(19): siRNA sense strand
gaguaagaaggaaagagaa

SEQ ID NO: 2604811 - RNA, 19 nt, Homo sapiens
  misc_RNA (1)...(19): siRNA sense strand
cagucuaguucucgaucaa

SEQ ID NO: 2604812 - RNA, 19 nt, Homo sapiens
  misc_RNA (1)...(19): siRNA sense strand
ugggauuguugaagaugaa

SEQ ID NO: 2604813 - RNA, 19 nt, Homo sapiens
  misc_RNA (1)...(19): siRNA sense strand
agaacauaguacucggcaa

SEQ ID NO: 2604814 - RNA, 19 nt, Homo sapiens
  misc_RNA (1)...(19): siRNA sense strand
aggaggaggagguagauau

SEQ ID NO: 2604815 - RNA, 19 nt, Homo sapiens
  misc_RNA (1)...(19): siRNA sense strand
ccggaauacugaggaggaa

SEQ ID NO: 2604816 - RNA, 19 nt, Homo sapiens
  misc_RNA (1)...(19): siRNA sense strand
cugucaagaaggagcaaga

SEQ ID NO: 2604817 - RNA, 19 nt, Homo sapiens
  misc_RNA (1)...(19): siRNA sense strand
aagaaaaucaaaagggaga

SEQ ID NO: 2604818 - RNA, 19 nt, Homo sapiens
  misc_RNA (1)...(19): siRNA sense strand
ucaaagauccagaagcaga

SEQ ID NO: 2604819 - RNA, 19 nt, Homo sapiens
  misc_RNA (1)...(19): siRNA sense strand
cagagaugaugguguggau

SEQ ID NO: 2604820 - RNA, 19 nt, Homo sapiens
  misc_RNA (1)...(19): siRNA sense strand
gauaauaguccuagaucac

SEQ ID NO: 2604821 - RNA, 19 nt, Homo sapiens
  misc_RNA (1)...(19): siRNA sense strand
acgaagaaguccugcaaag

SEQ ID NO: 2604822 - RNA, 19 nt, Homo sapiens
  misc_RNA (1)...(19): siRNA sense strand
gggcagagggagaauggga

SEQ ID NO: 2604823 - RNA, 19 nt, Homo sapiens
  misc_RNA (1)...(19): siRNA sense strand
gagcagguaaagucugaaa

SEQ ID NO: 2604824 - RNA, 19 nt, Homo sapiens
  misc_RNA (1)...(19): siRNA sense strand
ucaaaaugauagcgaguga

SEQ ID NO: 2604825 - RNA, 19 nt, Homo sapiens
  misc_RNA (1)...(19): siRNA sense strand
aguaagaaggaaagagaag

SEQ ID NO: 2604826 - RNA, 19 nt, Homo sapiens
  misc_RNA (1)...(19): siRNA sense strand
agaaggaaagagaagaaga

SEQ ID NO: 2604827 - RNA, 19 nt, Homo sapiens
  misc_RNA (1)...(19): siRNA sense strand
aggaggagguagauaucau

SEQ ID NO: 2604828 - RNA, 19 nt, Homo sapiens
  misc_RNA (1)...(19): siRNA sense strand
ggucugguucuguuggaaa

SEQ ID NO: 2604829 - RNA, 19 nt, Homo sapiens
  misc_RNA (1)...(19): siRNA sense strand
ucuucaaggucaaagucua

SEQ ID NO: 2604830 - RNA, 19 nt, Homo sapiens
  misc_RNA (1)...(19): siRNA sense strand
ggaggaaccgaaagauaca

SEQ ID NO: 2604831 - RNA, 19 nt, Homo sapiens
  misc_RNA (1)...(19): siRNA sense strand
aagaaguccugcaaagaca

SEQ ID NO: 2604832 - RNA, 19 nt, Homo sapiens
  misc_RNA (1)...(19): siRNA sense strand
cuggauauguaguggaaag

SEQ ID NO: 2604833 - RNA, 19 nt, Homo sapiens
  misc_RNA (1)...(19): siRNA sense strand
ucacaaagacuauaggcaa

SEQ ID NO: 2604834 - RNA, 19 nt, Homo sapiens
  misc_RNA (1)...(19): siRNA sense strand
cuuuaagagugguguggau

SEQ ID NO: 2604835 - RNA, 19 nt, Homo sapiens
  misc_RNA (1)...(19): siRNA sense strand
cucacaugaucgagaggaa

SEQ ID NO: 2604836 - RNA, 19 nt, Homo sapiens
  misc_RNA (1)...(19): siRNA sense strand
gugaauagcauccugggua

SEQ ID NO: 2604837 - RNA, 19 nt, Homo sapiens
  misc_RNA (1)...(19): siRNA sense strand
ucgagaggaagcaaggaaa

SEQ ID NO: 2604838 - RNA, 19 nt, Homo sapiens
  misc_RNA (1)...(19): siRNA sense strand
ggugaaaagaagaugccua

SEQ ID NO: 2604839 - RNA, 19 nt, Homo sapiens
  misc_RNA (1)...(19): siRNA sense strand
uggccaaugauuugaaaga

SEQ ID NO: 2604840 - RNA, 19 nt, Homo sapiens
  misc_RNA (1)...(19): siRNA sense strand
gagcuuaacuacuuaggga

SEQ ID NO: 2604841 - RNA, 19 nt, Homo sapiens
  misc_RNA (1)...(19): siRNA sense strand
gggaagaaaaggauugaga

SEQ ID NO: 2604842 - RNA, 19 nt, Homo sapiens
  misc_RNA (1)...(19): siRNA sense strand
cuggaaagggugaaaagaa

SEQ ID NO: 2604843 - RNA, 19 nt, Homo sapiens
  misc_RNA (1)...(19): siRNA sense strand
aguuuggaucucagaacaa

SEQ ID NO: 2604844 - RNA, 19 nt, Homo sapiens
  misc_RNA (1)...(19): siRNA sense strand
gaagaaaaggauugagaac

SEQ ID NO: 2604845 - RNA, 19 nt, Homo sapiens
  misc_RNA (1)...(19): siRNA sense strand
aggcaauaauggagaccag

SEQ ID NO: 2604846 - RNA, 19 nt, Homo sapiens
  misc_RNA (1)...(19): siRNA sense strand
accugggccugguggauaa

SEQ ID NO: 2604847 - RNA, 19 nt, Homo sapiens
  misc_RNA (1)...(19): siRNA sense strand
gauauggugguguggguga

SEQ ID NO: 2604848 - RNA, 19 nt, Homo sapiens
  misc_RNA (1)...(19): siRNA sense strand
gaguggaauuggugaggag

SEQ ID NO: 2604849 - RNA, 19 nt, Homo sapiens
  misc_RNA (1)...(19): siRNA sense strand
gaagagugcaugagcugga

SEQ ID NO: 2604850 - RNA, 19 nt, Homo sapiens
  misc_RNA (1)...(19): siRNA sense strand
ggagaauucccuagcugga

SEQ ID NO: 2604851 - RNA, 19 nt, Homo sapiens
  misc_RNA (1)...(19): siRNA sense strand
ggaaagggugaaaagaaga

SEQ ID NO: 2604852 - RNA, 19 nt, Homo sapiens
  misc_RNA (1)...(19): siRNA sense strand
ggcauuggguggaggagca

SEQ ID NO: 2604853 - RNA, 19 nt, Homo sapiens
  misc_RNA (1)...(19): siRNA sense strand
uuaugaggaagaagugaaa

SEQ ID NO: 2604854 - RNA, 19 nt, Homo sapiens
  misc_RNA (1)...(19): siRNA sense strand
gcuauugcuaagaaaggaa

SEQ ID NO: 2604855 - RNA, 19 nt, Homo sapiens
  misc_RNA (1)...(19): siRNA sense strand
aauaaucggaaguagacaa

SEQ ID NO: 2604856 - RNA, 19 nt, Homo sapiens
  misc_RNA (1)...(19): siRNA sense strand
ccggaaguaauuagagcuu

SEQ ID NO: 2604857 - RNA, 19 nt, Homo sapiens
  misc_RNA (1)...(19): siRNA sense strand
aggaagcauuacagaacga

SEQ ID NO: 2604858 - RNA, 19 nt, Homo sapiens
  misc_RNA (1)...(19): siRNA sense strand
ccauggauuuuaugaggaa

SEQ ID NO: 2604859 - RNA, 19 nt, Homo sapiens
  misc_RNA (1)...(19): siRNA sense strand
agaucagauucguccacaa

SEQ ID NO: 2604860 - RNA, 19 nt, Homo sapiens
  misc_RNA (1)...(19): siRNA sense strand
uuguucaggcagagagcua

SEQ ID NO: 2604861 - RNA, 19 nt, Homo sapiens
  misc_RNA (1)...(19): siRNA sense strand
agaaggaagacaauggcau

SEQ ID NO: 2604862 - RNA, 19 nt, Homo sapiens
  misc_RNA (1)...(19): siRNA sense strand
aaaauuggacagaggggaa

SEQ ID NO: 2604863 - RNA, 19 nt, Homo sapiens
  misc_RNA (1)...(19): siRNA sense strand
cacaaagagaugggcauaa

SEQ ID NO: 2604864 - RNA, 19 nt, Homo sapiens
  misc_RNA (1)...(19): siRNA sense strand
aggaaugguugaagagguc

SEQ ID NO: 2604865 - RNA, 19 nt, Homo sapiens
  misc_RNA (1)...(19): siRNA sense strand
ugcuacaacuucuggaaaa

SEQ ID NO: 2604866 - RNA, 19 nt, Homo sapiens
  misc_RNA (1)...(19): siRNA sense strand
gcagaauuuacuacagcau

SEQ ID NO: 2604867 - RNA, 19 nt, Homo sapiens
  misc_RNA (1)...(19): siRNA sense strand
uggaggaagcauuacagaa

SEQ ID NO: 2604868 - RNA, 19 nt, Homo sapiens
  misc_RNA (1)...(19): siRNA sense strand
acaucaaacaggauuguca

SEQ ID NO: 2604869 - RNA, 19 nt, Homo sapiens
  misc_RNA (1)...(19): siRNA sense strand
ccguggauggcgaggacaa

SEQ ID NO: 2604870 - RNA, 19 nt, Homo sapiens
  misc_RNA (1)...(19): siRNA sense strand
ccaucaaugaggagaaguu

SEQ ID NO: 2604871 - RNA, 19 nt, Homo sapiens
  misc_RNA (1)...(19): siRNA sense strand
gcguagaagcugaguugca

SEQ ID NO: 2604872 - RNA, 19 nt, Homo sapiens
  misc_RNA (1)...(19): siRNA sense strand
ggacuguacugcugccgua

SEQ ID NO: 2604873 - RNA, 19 nt, Homo sapiens
  misc_RNA (1)...(19): siRNA sense strand
acaagaagacagugguacu

SEQ ID NO: 2604874 - RNA, 19 nt, Homo sapiens
  misc_RNA (1)...(19): siRNA sense strand
cuuggaugaugguguggaa

SEQ ID NO: 2604875 - RNA, 19 nt, Homo sapiens
  misc_RNA (1)...(19): siRNA sense strand
uggaugaugguguggaaca

SEQ ID NO: 2604876 - RNA, 19 nt, Homo sapiens
  misc_RNA (1)...(19): siRNA sense strand
ucaaggagcugcugcggga

SEQ ID NO: 2604877 - RNA, 19 nt, Homo sapiens
  misc_RNA (1)...(19): siRNA sense strand
aaguuggaccugaguggua

SEQ ID NO: 2604878 - RNA, 19 nt, Homo sapiens
  misc_RNA (1)...(19): siRNA sense strand
ggccuagcacugagagcau

SEQ ID NO: 2604879 - RNA, 19 nt, Homo sapiens
  misc_RNA (1)...(19): siRNA sense strand
cagaagaacucaaagcaga

SEQ ID NO: 2604880 - RNA, 19 nt, Homo sapiens
  misc_RNA (1)...(19): siRNA sense strand
ccacugugucauugggaaa

SEQ ID NO: 2604881 - RNA, 19 nt, Homo sapiens
  misc_RNA (1)...(19): siRNA sense strand
cccaagaagaacuggaaaa

SEQ ID NO: 2604882 - RNA, 19 nt, Homo sapiens
  misc_RNA (1)...(19): siRNA sense strand
ccaaguaccagcugggcau

SEQ ID NO: 2604883 - RNA, 19 nt, Homo sapiens
  misc_RNA (1)...(19): siRNA sense strand
gagcaguggcauagccuga

SEQ ID NO: 2604884 - RNA, 19 nt, Homo sapiens
  misc_RNA (1)...(19): siRNA sense strand
gcgccaagaaggagcccau

SEQ ID NO: 2604885 - RNA, 19 nt, Homo sapiens
  misc_RNA (1)...(19): siRNA sense strand
gugaggaugaaguugaaau

SEQ ID NO: 2604886 - RNA, 19 nt, Homo sapiens
  misc_RNA (1)...(19): siRNA sense strand
ccuauaaccccgacgacua

SEQ ID NO: 2604887 - RNA, 19 nt, Homo sapiens
  misc_RNA (1)...(19): siRNA sense strand
ccguguuugaggagcgcua

SEQ ID NO: 2604888 - RNA, 19 nt, Homo sapiens
  misc_RNA (1)...(19): siRNA sense strand
ugucagaagugcuacgagu

SEQ ID NO: 2604889 - RNA, 19 nt, Homo sapiens
  misc_RNA (1)...(19): siRNA sense strand
agccugacgcggaggauuu

SEQ ID NO: 2604890 - RNA, 19 nt, Homo sapiens
  misc_RNA (1)...(19): siRNA sense strand
gcagugacaaggaugguga

SEQ ID NO: 2604891 - RNA, 19 nt, Homo sapiens
  misc_RNA (1)...(19): siRNA sense strand
agaugugagccaagguuca

SEQ ID NO: 2604892 - RNA, 19 nt, Homo sapiens
  misc_RNA (1)...(19): siRNA sense strand
agauauugcaacuggguaa

SEQ ID NO: 2604893 - RNA, 19 nt, Homo sapiens
  misc_RNA (1)...(19): siRNA sense strand
aggaaguaguugacgauga

SEQ ID NO: 2604894 - RNA, 19 nt, Homo sapiens
  misc_RNA (1)...(19): siRNA sense strand
ucacugaaggagagaagaa

SEQ ID NO: 2604895 - RNA, 19 nt, Homo sapiens
  misc_RNA (1)...(19): siRNA sense strand
gaagaguuugauugggaaa

SEQ ID NO: 2604896 - RNA, 19 nt, Homo sapiens
  misc_RNA (1)...(19): siRNA sense strand
cugaagaagagaaguauca

SEQ ID NO: 2604897 - RNA, 19 nt, Homo sapiens
  misc_RNA (1)...(19): siRNA sense strand
guuagaacuggaagaacua

SEQ ID NO: 2604898 - RNA, 19 nt, Homo sapiens
  misc_RNA (1)...(19): siRNA sense strand
cagcaauauucaggagaga

SEQ ID NO: 2604899 - RNA, 19 nt, Homo sapiens
  misc_RNA (1)...(19): siRNA sense strand
augaaggccuacagggaca

SEQ ID NO: 2604900 - RNA, 19 nt, Homo sapiens
  misc_RNA (1)...(19): siRNA sense strand
guugaaucugcauggaaua

SEQ ID NO: 2604901 - RNA, 19 nt, Homo sapiens
  misc_RNA (1)...(19): siRNA sense strand
cagaacaagaugaacucaa

SEQ ID NO: 2604902 - RNA, 19 nt, Homo sapiens
  misc_RNA (1)...(19): siRNA sense strand
ugugaagagguaucagaaa

SEQ ID NO: 2604903 - RNA, 19 nt, Homo sapiens
  misc_RNA (1)...(19): siRNA sense strand
uguugaaucugcauggaau

SEQ ID NO: 2604904 - RNA, 19 nt, Homo sapiens
  misc_RNA (1)...(19): siRNA sense strand
uggaaaagagucaggaaca

SEQ ID NO: 2604905 - RNA, 19 nt, Homo sapiens
  misc_RNA (1)...(19): siRNA sense strand
agaaaauccaggacagcaa

SEQ ID NO: 2604906 - RNA, 19 nt, Homo sapiens
  misc_RNA (1)...(19): siRNA sense strand
aaacgaagacucaggcuca

SEQ ID NO: 2604907 - RNA, 19 nt, Homo sapiens
  misc_RNA (1)...(19): siRNA sense strand
ugguuugagacuuggacua

SEQ ID NO: 2604908 - RNA, 19 nt, Homo sapiens
  misc_RNA (1)...(19): siRNA sense strand
ggaagaacuagaagcagca

SEQ ID NO: 2604909 - RNA, 19 nt, Homo sapiens
  misc_RNA (1)...(19): siRNA sense strand
cugaggaaguaguugacga

SEQ ID NO: 2604910 - RNA, 19 nt, Homo sapiens
  misc_RNA (1)...(19): siRNA sense strand
ggaugaacugagugauguu

SEQ ID NO: 2604911 - RNA, 19 nt, Homo sapiens
  misc_RNA (1)...(19): siRNA sense strand
cugaaggagagaagaaugu

SEQ ID NO: 2604912 - RNA, 19 nt, Homo sapiens
  misc_RNA (1)...(19): siRNA sense strand
gcauggaauaucaggaaac

SEQ ID NO: 2604913 - RNA, 19 nt, Homo sapiens
  misc_RNA (1)...(19): siRNA sense strand
ccacuauggauuuggaaac

SEQ ID NO: 2604914 - RNA, 19 nt, Homo sapiens
  misc_RNA (1)...(19): siRNA sense strand
aaguauaauccuuggugga

SEQ ID NO: 2604915 - RNA, 19 nt, Homo sapiens
  misc_RNA (1)...(19): siRNA sense strand
cugcauggaauaucaggaa

SEQ ID NO: 2604916 - RNA, 19 nt, Homo sapiens
  misc_RNA (1)...(19): siRNA sense strand
augaagaguuugauuggga

SEQ ID NO: 2604917 - RNA, 19 nt, Homo sapiens
  misc_RNA (1)...(19): siRNA sense strand
guguguggauucagaaagu

SEQ ID NO: 2604918 - RNA, 19 nt, Homo sapiens
  misc_RNA (1)...(19): siRNA sense strand
ugaugaaggccuacaggga

SEQ ID NO: 2604919 - RNA, 19 nt, Homo sapiens
  misc_RNA (1)...(19): siRNA sense strand
ugaagaguuugauugggaa

SEQ ID NO: 2604920 - RNA, 19 nt, Homo sapiens
  misc_RNA (1)...(19): siRNA sense strand
gagaaguaucagcuacgaa

SEQ ID NO: 2604921 - RNA, 19 nt, Homo sapiens
  misc_RNA (1)...(19): siRNA sense strand
uuaaagugucuccuggaua

SEQ ID NO: 2604922 - RNA, 19 nt, Homo sapiens
  misc_RNA (1)...(19): siRNA sense strand
aggaagucucccuuacaaa

SEQ ID NO: 2604923 - RNA, 19 nt, Homo sapiens
  misc_RNA (1)...(19): siRNA sense strand
ugaagagguaucagaaagu

SEQ ID NO: 2604924 - RNA, 19 nt, Homo sapiens
  misc_RNA (1)...(19): siRNA sense strand
gccacuauggauuuggaaa

SEQ ID NO: 2604925 - RNA, 19 nt, Homo sapiens
  misc_RNA (1)...(19): siRNA sense strand
gcggagaagagguggauuu

SEQ ID NO: 2604926 - RNA, 19 nt, Homo sapiens
  misc_RNA (1)...(19): siRNA sense strand
agaaauagugagcaggaua

SEQ ID NO: 2604927 - RNA, 19 nt, Homo sapiens
  misc_RNA (1)...(19): siRNA sense strand
gaacaguuugaaagggaaa

SEQ ID NO: 2604928 - RNA, 19 nt, Homo sapiens
  misc_RNA (1)...(19): siRNA sense strand
guguaauaaugaagcagaa

SEQ ID NO: 2604929 - RNA, 19 nt, Homo sapiens
  misc_RNA (1)...(19): siRNA sense strand
aggaagaagaggaagauga

SEQ ID NO: 2604930 - RNA, 19 nt, Homo sapiens
  misc_RNA (1)...(19): siRNA sense strand
cugaggaagaagaggaaga

SEQ ID NO: 2604931 - RNA, 19 nt, Homo sapiens
  misc_RNA (1)...(19): siRNA sense strand
agcaaagugugguguguaa

SEQ ID NO: 2604932 - RNA, 19 nt, Homo sapiens
  misc_RNA (1)...(19): siRNA sense strand
ucaaauaguguuacggcaa

SEQ ID NO: 2604933 - RNA, 19 nt, Homo sapiens
  misc_RNA (1)...(19): siRNA sense strand
aagaagaggaagaugaaaa

SEQ ID NO: 2604934 - RNA, 19 nt, Homo sapiens
  misc_RNA (1)...(19): siRNA sense strand
uggacuauauugaggaaca

SEQ ID NO: 2604935 - RNA, 19 nt, Homo sapiens
  misc_RNA (1)...(19): siRNA sense strand
ucagacaauuugaggaaca

SEQ ID NO: 2604936 - RNA, 19 nt, Homo sapiens
  misc_RNA (1)...(19): siRNA sense strand
aguuugaaagggaaagaaa

SEQ ID NO: 2604937 - RNA, 19 nt, Homo sapiens
  misc_RNA (1)...(19): siRNA sense strand
augaagaugaagagaauga

SEQ ID NO: 2604938 - RNA, 19 nt, Homo sapiens
  misc_RNA (1)...(19): siRNA sense strand
ucauuugguagaagagaaa

SEQ ID NO: 2604939 - RNA, 19 nt, Homo sapiens
  misc_RNA (1)...(19): siRNA sense strand
aagaaaucaaggaggaaga

SEQ ID NO: 2604940 - RNA, 19 nt, Homo sapiens
  misc_RNA (1)...(19): siRNA sense strand
aaucauagaaggagaaacu

SEQ ID NO: 2604941 - RNA, 19 nt, Homo sapiens
  misc_RNA (1)...(19): siRNA sense strand
aaucagacaauuugaggaa

SEQ ID NO: 2604942 - RNA, 19 nt, Homo sapiens
  misc_RNA (1)...(19): siRNA sense strand
ggaacaguuugaaagggaa

SEQ ID NO: 2604943 - RNA, 19 nt, Homo sapiens
  misc_RNA (1)...(19): siRNA sense strand
ggauucuaguagcaagaua

SEQ ID NO: 2604944 - RNA, 19 nt, Homo sapiens
  misc_RNA (1)...(19): siRNA sense strand
ggaagacaugaaagagcaa

SEQ ID NO: 2604945 - RNA, 19 nt, Homo sapiens
  misc_RNA (1)...(19): siRNA sense strand
caaaagaugaaaagagaga

SEQ ID NO: 2604946 - RNA, 19 nt, Homo sapiens
  misc_RNA (1)...(19): siRNA sense strand
augaaaagcuggaacauau

SEQ ID NO: 2604947 - RNA, 19 nt, Homo sapiens
  misc_RNA (1)...(19): siRNA sense strand
aaucaaggaggaagaagaa

SEQ ID NO: 2604948 - RNA, 19 nt, Homo sapiens
  misc_RNA (1)...(19): siRNA sense strand
gggaauuugaagaagcauu

SEQ ID NO: 2604949 - RNA, 19 nt, Homo sapiens
  misc_RNA (1)...(19): siRNA sense strand
agaaaggcacauuguuaaa

SEQ ID NO: 2604950 - RNA, 19 nt, Homo sapiens
  misc_RNA (1)...(19): siRNA sense strand
acaugaaagagcaagaaau

SEQ ID NO: 2604951 - RNA, 19 nt, Homo sapiens
  misc_RNA (1)...(19): siRNA sense strand
ccacaagcuggaagaauga

SEQ ID NO: 2604952 - RNA, 19 nt, Homo sapiens
  misc_RNA (1)...(19): siRNA sense strand
ggucagauguuacagccaa

SEQ ID NO: 2604953 - RNA, 19 nt, Homo sapiens
  misc_RNA (1)...(19): siRNA sense strand
aaaucaaggaggaagaaga

SEQ ID NO: 2604954 - RNA, 19 nt, Homo sapiens
  misc_RNA (1)...(19): siRNA sense strand
augaagagaaugaagauga

SEQ ID NO: 2604955 - RNA, 19 nt, Homo sapiens
  misc_RNA (1)...(19): siRNA sense strand
ucaacaaaauggaaggaau

SEQ ID NO: 2604956 - RNA, 19 nt, Homo sapiens
  misc_RNA (1)...(19): siRNA sense strand
uuggaaagccagagcugaa

SEQ ID NO: 2604957 - RNA, 19 nt, Homo sapiens
  misc_RNA (1)...(19): siRNA sense strand
ucaaggaggaagaagaaga

SEQ ID NO: 2604958 - RNA, 19 nt, Homo sapiens
  misc_RNA (1)...(19): siRNA sense strand
aauuagagcagcuguggaa

SEQ ID NO: 2604959 - RNA, 19 nt, Homo sapiens
  misc_RNA (1)...(19): siRNA sense strand
aggaacaguuugaaaggga

SEQ ID NO: 2604960 - RNA, 19 nt, Homo sapiens
  misc_RNA (1)...(19): siRNA sense strand
acauggaggucuggagcaa

SEQ ID NO: 2604961 - RNA, 19 nt, Homo sapiens
  misc_RNA (1)...(19): siRNA sense strand
gguuaaggaagcagauguu

SEQ ID NO: 2604962 - RNA, 19 nt, Homo sapiens
  misc_RNA (1)...(19): siRNA sense strand
ugaagaugaauuuggaaga

SEQ ID NO: 2604963 - RNA, 19 nt, Homo sapiens
  misc_RNA (1)...(19): siRNA sense strand
caucacaucaugaagaaau

SEQ ID NO: 2604964 - RNA, 19 nt, Homo sapiens
  misc_RNA (1)...(19): siRNA sense strand
uugagaaugaagaggaaga

SEQ ID NO: 2604965 - RNA, 19 nt, Homo sapiens
  misc_RNA (1)...(19): siRNA sense strand
cuggaaucaaauaguguua

SEQ ID NO: 2604966 - RNA, 19 nt, Homo sapiens
  misc_RNA (1)...(19): siRNA sense strand
ugauaaaugggaagagcca

SEQ ID NO: 2604967 - RNA, 19 nt, Homo sapiens
  misc_RNA (1)...(19): siRNA sense strand
aggaagaagaagauggugu

SEQ ID NO: 2604968 - RNA, 19 nt, Homo sapiens
  misc_RNA (1)...(19): siRNA sense strand
cagaagaaaaucagacaau

SEQ ID NO: 2604969 - RNA, 19 nt, Homo sapiens
  misc_RNA (1)...(19): siRNA sense strand
guuugaaagggaaagaaau

SEQ ID NO: 2604970 - RNA, 19 nt, Homo sapiens
  misc_RNA (1)...(19): siRNA sense strand
agaaagaacaauuagagca

SEQ ID NO: 2604971 - RNA, 19 nt, Homo sapiens
  misc_RNA (1)...(19): siRNA sense strand
agugaaaguaacagagacu

SEQ ID NO: 2604972 - RNA, 19 nt, Homo sapiens
  misc_RNA (1)...(19): siRNA sense strand
uuccagugcuugaggagua

SEQ ID NO: 2604973 - RNA, 19 nt, Homo sapiens
  misc_RNA (1)...(19): siRNA sense strand
caguuuagauuuuggucaa

SEQ ID NO: 2604974 - RNA, 19 nt, Homo sapiens
  misc_RNA (1)...(19): siRNA sense strand
gaagcaaauuaaagaugca

SEQ ID NO: 2604975 - RNA, 19 nt, Homo sapiens
  misc_RNA (1)...(19): siRNA sense strand
aagagguggauuugguuaa

SEQ ID NO: 2604976 - RNA, 19 nt, Homo sapiens
  misc_RNA (1)...(19): siRNA sense strand
ugaacagguuaaugaacuu

SEQ ID NO: 2604977 - RNA, 19 nt, Homo sapiens
  misc_RNA (1)...(19): siRNA sense strand
agaaugaagaugaacccaa

SEQ ID NO: 2604978 - RNA, 19 nt, Homo sapiens
  misc_RNA (1)...(19): siRNA sense strand
ccagaagauaucaagaaaa

SEQ ID NO: 2604979 - RNA, 19 nt, Homo sapiens
  misc_RNA (1)...(19): siRNA sense strand
auggaaggccggugaccaa

SEQ ID NO: 2604980 - RNA, 19 nt, Homo sapiens
  misc_RNA (1)...(19): siRNA sense strand
uauuaaugccagugaaagu

SEQ ID NO: 2604981 - RNA, 19 nt, Homo sapiens
  misc_RNA (1)...(19): siRNA sense strand
gaagaugaacccaagguca

SEQ ID NO: 2604982 - RNA, 19 nt, Homo sapiens
  misc_RNA (1)...(19): siRNA sense strand
ggucauucagaaggagaaa

SEQ ID NO: 2604983 - RNA, 19 nt, Homo sapiens
  misc_RNA (1)...(19): siRNA sense strand
acagagaguacaagaaaau

SEQ ID NO: 2604984 - RNA, 19 nt, Homo sapiens
  misc_RNA (1)...(19): siRNA sense strand
uggcuggacuucuggaaaa

SEQ ID NO: 2604985 - RNA, 19 nt, Homo sapiens
  misc_RNA (1)...(19): siRNA sense strand
ccguggugauagugaagau

SEQ ID NO: 2604986 - RNA, 19 nt, Homo sapiens
  misc_RNA (1)...(19): siRNA sense strand
ucagaguguugguguucaa

SEQ ID NO: 2604987 - RNA, 19 nt, Homo sapiens
  misc_RNA (1)...(19): siRNA sense strand
cugccaauccaaagguauu

SEQ ID NO: 2604988 - RNA, 19 nt, Homo sapiens
  misc_RNA (1)...(19): siRNA sense strand
uguuucugauggugauaaa

SEQ ID NO: 2604989 - RNA, 19 nt, Homo sapiens
  misc_RNA (1)...(19): siRNA sense strand
agaucauccuuuaguucaa

SEQ ID NO: 2604990 - RNA, 19 nt, Homo sapiens
  misc_RNA (1)...(19): siRNA sense strand
uggacagaaauaagagaau

SEQ ID NO: 2604991 - RNA, 19 nt, Homo sapiens
  misc_RNA (1)...(19): siRNA sense strand
cguccgauccuuuggaaca

SEQ ID NO: 2604992 - RNA, 19 nt, Homo sapiens
  misc_RNA (1)...(19): siRNA sense strand
cgugaagcuuccaggacca

SEQ ID NO: 2604993 - RNA, 19 nt, Homo sapiens
  misc_RNA (1)...(19): siRNA sense strand
ggagcauggaggcgcacaa

SEQ ID NO: 2604994 - RNA, 19 nt, Homo sapiens
  misc_RNA (1)...(19): siRNA sense strand
uugcgaagagagaguguau

SEQ ID NO: 2604995 - RNA, 19 nt, Homo sapiens
  misc_RNA (1)...(19): siRNA sense strand
ccucacuugcgaagagaga

SEQ ID NO: 2604996 - RNA, 19 nt, Homo sapiens
  misc_RNA (1)...(19): siRNA sense strand
cgcacaacauccucagcaa

SEQ ID NO: 2604997 - RNA, 19 nt, Homo sapiens
  misc_RNA (1)...(19): siRNA sense strand
cuauacacagaaugggauu

SEQ ID NO: 2604998 - RNA, 19 nt, Homo sapiens
  misc_RNA (1)...(19): siRNA sense strand
acauggagaacgagaucga

SEQ ID NO: 2604999 - RNA, 19 nt, Homo sapiens
  misc_RNA (1)...(19): siRNA sense strand
caucuaagaaagagggaca

SEQ ID NO: 2605000 - RNA, 19 nt, Homo sapiens
  misc_RNA (1)...(19): siRNA sense strand
cuucaggaacagaaagaaa

SEQ ID NO: 2605001 - RNA, 19 nt, Homo sapiens
  misc_RNA (1)...(19): siRNA sense strand
acugauaaauagagacaga

SEQ ID NO: 2605002 - RNA, 19 nt, Homo sapiens
  misc_RNA (1)...(19): siRNA sense strand
ggguggaaguauucagcua

SEQ ID NO: 2605003 - RNA, 19 nt, Homo sapiens
  misc_RNA (1)...(19): siRNA sense strand
ggacugauaaauagagaca

SEQ ID NO: 2605004 - RNA, 19 nt, Homo sapiens
  misc_RNA (1)...(19): siRNA sense strand
aagaaauaaccaagcacaa

SEQ ID NO: 2605005 - RNA, 19 nt, Homo sapiens
  misc_RNA (1)...(19): siRNA sense strand
caaaauacgagcugaacaa

SEQ ID NO: 2605006 - RNA, 19 nt, Homo sapiens
  misc_RNA (1)...(19): siRNA sense strand
acucaaagaggauggaaca

SEQ ID NO: 2605007 - RNA, 19 nt, Homo sapiens
  misc_RNA (1)...(19): siRNA sense strand
cugaaaaccugaaaggauu

SEQ ID NO: 2605008 - RNA, 19 nt, Homo sapiens
  misc_RNA (1)...(19): siRNA sense strand
ugggaaugguauagaacga

SEQ ID NO: 2605009 - RNA, 19 nt, Homo sapiens
  misc_RNA (1)...(19): siRNA sense strand
gcacaaaaggaaagagcca

SEQ ID NO: 2605010 - RNA, 19 nt, Homo sapiens
  misc_RNA (1)...(19): siRNA sense strand
guaaauuccuucaggccuu

SEQ ID NO: 2605011 - RNA, 19 nt, Homo sapiens
  misc_RNA (1)...(19): siRNA sense strand
aaggaaagagccaaauaaa

SEQ ID NO: 2605012 - RNA, 19 nt, Homo sapiens
  misc_RNA (1)...(19): siRNA sense strand
acaaaaggaaagagccaaa

SEQ ID NO: 2605013 - RNA, 19 nt, Homo sapiens
  misc_RNA (1)...(19): siRNA sense strand
agacagaagaacugagauc

SEQ ID NO: 2605014 - RNA, 19 nt, Homo sapiens
  misc_RNA (1)...(19): siRNA sense strand
gguuaaacaaagugcucuu

SEQ ID NO: 2605015 - RNA, 19 nt, Homo sapiens
  misc_RNA (1)...(19): siRNA sense strand
cuggauacuuucuguaaau

SEQ ID NO: 2605016 - RNA, 19 nt, Homo sapiens
  misc_RNA (1)...(19): siRNA sense strand
ucucuaaacaacaggauga

SEQ ID NO: 2605017 - RNA, 19 nt, Homo sapiens
  misc_RNA (1)...(19): siRNA sense strand
cgguuaagucguugcugua

SEQ ID NO: 2605018 - RNA, 19 nt, Homo sapiens
  misc_RNA (1)...(19): siRNA sense strand
ggaaugguauagaacgaga

SEQ ID NO: 2605019 - RNA, 19 nt, Homo sapiens
  misc_RNA (1)...(19): siRNA sense strand
guggaaacucucuaaacaa

SEQ ID NO: 2605020 - RNA, 19 nt, Homo sapiens
  misc_RNA (1)...(19): siRNA sense strand
gcacgagcaaauaaagaau

SEQ ID NO: 2605021 - RNA, 19 nt, Homo sapiens
  misc_RNA (1)...(19): siRNA sense strand
uguaaauccuaaucggaga

SEQ ID NO: 2605022 - RNA, 19 nt, Homo sapiens
  misc_RNA (1)...(19): siRNA sense strand
aggaaagagccaaauaaaa

SEQ ID NO: 2605023 - RNA, 19 nt, Homo sapiens
  misc_RNA (1)...(19): siRNA sense strand
ucugcucacuauagagaaa

SEQ ID NO: 2605024 - RNA, 19 nt, Homo sapiens
  misc_RNA (1)...(19): siRNA sense strand
guugagagaaagugaagga

SEQ ID NO: 2605025 - RNA, 19 nt, Homo sapiens
  misc_RNA (1)...(19): siRNA sense strand
agcaacacauccagguuua

SEQ ID NO: 2605026 - RNA, 19 nt, Homo sapiens
  misc_RNA (1)...(19): siRNA sense strand
uaggcuaaauaguaagcaa

SEQ ID NO: 2605027 - RNA, 19 nt, Homo sapiens
  misc_RNA (1)...(19): siRNA sense strand
acgauuagcagcaguucaa

SEQ ID NO: 2605028 - RNA, 19 nt, Homo sapiens
  misc_RNA (1)...(19): siRNA sense strand
ugguauagaacgagaaccu

SEQ ID NO: 2605029 - RNA, 19 nt, Homo sapiens
  misc_RNA (1)...(19): siRNA sense strand
aggaugaaacccauaaauu

SEQ ID NO: 2605030 - RNA, 19 nt, Homo sapiens
  misc_RNA (1)...(19): siRNA sense strand
ugaagauggcucuaggcua

SEQ ID NO: 2605031 - RNA, 19 nt, Homo sapiens
  misc_RNA (1)...(19): siRNA sense strand
cuaaauaguaagcaacuga

SEQ ID NO: 2605032 - RNA, 19 nt, Homo sapiens
  misc_RNA (1)...(19): siRNA sense strand
ccgaauuuaugauccacaa

SEQ ID NO: 2605033 - RNA, 19 nt, Homo sapiens
  misc_RNA (1)...(19): siRNA sense strand
caucaagaauaucacgaca

SEQ ID NO: 2605034 - RNA, 19 nt, Homo sapiens
  misc_RNA (1)...(19): siRNA sense strand
gagucauggcuucgaaaga

SEQ ID NO: 2605035 - RNA, 19 nt, Homo sapiens
  misc_RNA (1)...(19): siRNA sense strand
aaauacagccaaacagaga

SEQ ID NO: 2605036 - RNA, 19 nt, Homo sapiens
  misc_RNA (1)...(19): siRNA sense strand
aagacugguugaugaguga

SEQ ID NO: 2605037 - RNA, 19 nt, Homo sapiens
  misc_RNA (1)...(19): siRNA sense strand
agagaaaggggaagcagaa

SEQ ID NO: 2605038 - RNA, 19 nt, Homo sapiens
  misc_RNA (1)...(19): siRNA sense strand
ccuggagguuaaugcaaau

SEQ ID NO: 2605039 - RNA, 19 nt, Homo sapiens
  misc_RNA (1)...(19): siRNA sense strand
caauggaggcugaaagucu

SEQ ID NO: 2605040 - RNA, 19 nt, Homo sapiens
  misc_RNA (1)...(19): siRNA sense strand
ccaauaacauagaucgucu

SEQ ID NO: 2605041 - RNA, 19 nt, Homo sapiens
  misc_RNA (1)...(19): siRNA sense strand
uaaugcaaauacagccaaa

SEQ ID NO: 2605042 - RNA, 19 nt, Homo sapiens
  misc_RNA (1)...(19): siRNA sense strand
gguugaugcugcagagccu

SEQ ID NO: 2605043 - RNA, 19 nt, Homo sapiens
  misc_RNA (1)...(19): siRNA sense strand
gaacaguggcucacagacu

SEQ ID NO: 2605044 - RNA, 19 nt, Homo sapiens
  misc_RNA (1)...(19): siRNA sense strand
gguggaaguauucagcuaa

SEQ ID NO: 2605045 - RNA, 19 nt, Homo sapiens
  misc_RNA (1)...(19): siRNA sense strand
cuacaaugcugggguuaaa

SEQ ID NO: 2605046 - RNA, 19 nt, Homo sapiens
  misc_RNA (1)...(19): siRNA sense strand
ggaacaguacccagcucua

SEQ ID NO: 2605047 - RNA, 19 nt, Homo sapiens
  misc_RNA (1)...(19): siRNA sense strand
aggacugagugguguggau

SEQ ID NO: 2605048 - RNA, 19 nt, Homo sapiens
  misc_RNA (1)...(19): siRNA sense strand
gguugaagcuguaccucca

SEQ ID NO: 2605049 - RNA, 19 nt, Homo sapiens
  misc_RNA (1)...(19): siRNA sense strand
ugaacagauugcugggagu

SEQ ID NO: 2605050 - RNA, 19 nt, Homo sapiens
  misc_RNA (1)...(19): siRNA sense strand
caaacagagaggacacaga

SEQ ID NO: 2605051 - RNA, 19 nt, Homo sapiens
  misc_RNA (1)...(19): siRNA sense strand
ccuuacagauuuggaucaa

SEQ ID NO: 2605052 - RNA, 19 nt, Homo sapiens
  misc_RNA (1)...(19): siRNA sense strand
uuguguaguuagugagacu

SEQ ID NO: 2605053 - RNA, 19 nt, Homo sapiens
  misc_RNA (1)...(19): siRNA sense strand
uggacauucugcuggaaca

SEQ ID NO: 2605054 - RNA, 19 nt, Homo sapiens
  misc_RNA (1)...(19): siRNA sense strand
ccuggauacuuucuguaaa

SEQ ID NO: 2605055 - RNA, 19 nt, Homo sapiens
  misc_RNA (1)...(19): siRNA sense strand
ucaaagagcucucggcaca

SEQ ID NO: 2605056 - RNA, 19 nt, Homo sapiens
  misc_RNA (1)...(19): siRNA sense strand
cugcagaaaaggaaggaca

SEQ ID NO: 2605057 - RNA, 19 nt, Homo sapiens
  misc_RNA (1)...(19): siRNA sense strand
ggaagaagcugccaggcuc

SEQ ID NO: 2605058 - RNA, 19 nt, Homo sapiens
  misc_RNA (1)...(19): siRNA sense strand
ccaccaagaagaaggccaa

SEQ ID NO: 2605059 - RNA, 19 nt, Homo sapiens
  misc_RNA (1)...(19): siRNA sense strand
ccguguaccugcagagcau

SEQ ID NO: 2605060 - RNA, 19 nt, Homo sapiens
  misc_RNA (1)...(19): siRNA sense strand
agguccaagcggaaagaua

SEQ ID NO: 2605061 - RNA, 19 nt, Homo sapiens
  misc_RNA (1)...(19): siRNA sense strand
gaucgauauucgugcgguu

SEQ ID NO: 2605062 - RNA, 19 nt, Homo sapiens
  misc_RNA (1)...(19): siRNA sense strand
ccauguacugugaggccaa

SEQ ID NO: 2605063 - RNA, 19 nt, Homo sapiens
  misc_RNA (1)...(19): siRNA sense strand
guccaagcggaaagauaaa

SEQ ID NO: 2605064 - RNA, 19 nt, Homo sapiens
  misc_RNA (1)...(19): siRNA sense strand
aggugaaggagaaccgcaa

SEQ ID NO: 2605065 - RNA, 19 nt, Homo sapiens
  misc_RNA (1)...(19): siRNA sense strand
ccuaccagucugugaaaca

SEQ ID NO: 2605066 - RNA, 19 nt, Homo sapiens
  misc_RNA (1)...(19): siRNA sense strand
ggaagaagcugucgugguc

SEQ ID NO: 2605067 - RNA, 19 nt, Homo sapiens
  misc_RNA (1)...(19): siRNA sense strand
ccaagaacgcgcuggugca

SEQ ID NO: 2605068 - RNA, 19 nt, Homo sapiens
  misc_RNA (1)...(19): siRNA sense strand
gguuaaaagaagguggcua

SEQ ID NO: 2605069 - RNA, 19 nt, Homo sapiens
  misc_RNA (1)...(19): siRNA sense strand
cccgggaagaguacagaua

SEQ ID NO: 2605070 - RNA, 19 nt, Homo sapiens
  misc_RNA (1)...(19): siRNA sense strand
ggggaaauauuaaucggua

SEQ ID NO: 2605071 - RNA, 19 nt, Homo sapiens
  misc_RNA (1)...(19): siRNA sense strand
ggggaauauuaaucgguau

SEQ ID NO: 2605072 - RNA, 19 nt, Homo sapiens
  misc_RNA (1)...(19): siRNA sense strand
gcaucgguguuguggagga

SEQ ID NO: 2605073 - RNA, 19 nt, Homo sapiens
  misc_RNA (1)...(19): siRNA sense strand
ucgguguuguggaggagaa

SEQ ID NO: 2605074 - RNA, 19 nt, Homo sapiens
  misc_RNA (1)...(19): siRNA sense strand
guguuguggaggagaaagu

SEQ ID NO: 2605075 - RNA, 19 nt, Homo sapiens
  misc_RNA (1)...(19): siRNA sense strand
ccugaggauccuuggcaga

SEQ ID NO: 2605076 - RNA, 19 nt, Homo sapiens
  misc_RNA (1)...(19): siRNA sense strand
gggaauauuaaucgguauc

SEQ ID NO: 2605077 - RNA, 19 nt, Homo sapiens
  misc_RNA (1)...(19): siRNA sense strand
gaauauucaucuauaccca

SEQ ID NO: 2605078 - RNA, 19 nt, Homo sapiens
  misc_RNA (1)...(19): siRNA sense strand
aggagaaguuagugaccua

SEQ ID NO: 2605079 - RNA, 19 nt, Homo sapiens
  misc_RNA (1)...(19): siRNA sense strand
cugaagaaauugaacguga

SEQ ID NO: 2605080 - RNA, 19 nt, Homo sapiens
  misc_RNA (1)...(19): siRNA sense strand
ccaaaagaggucuggaaaa

SEQ ID NO: 2605081 - RNA, 19 nt, Homo sapiens
  misc_RNA (1)...(19): siRNA sense strand
agaaacauuaagaggagaa

SEQ ID NO: 2605082 - RNA, 19 nt, Homo sapiens
  misc_RNA (1)...(19): siRNA sense strand
gggauugguuggaacaaaa

SEQ ID NO: 2605083 - RNA, 19 nt, Homo sapiens
  misc_RNA (1)...(19): siRNA sense strand
gcgcugaagcuguggcuga

SEQ ID NO: 2605084 - RNA, 19 nt, Homo sapiens
  misc_RNA (1)...(19): siRNA sense strand
agacaaaugauuccagcaa

SEQ ID NO: 2605085 - RNA, 19 nt, Homo sapiens
  misc_RNA (1)...(19): siRNA sense strand
agccaacagagaagaaaua

SEQ ID NO: 2605086 - RNA, 19 nt, Homo sapiens
  misc_RNA (1)...(19): siRNA sense strand
auuaauugcugaagaggga

SEQ ID NO: 2605087 - RNA, 19 nt, Homo sapiens
  misc_RNA (1)...(19): siRNA sense strand
aagcuguggcugauggaaa

SEQ ID NO: 2605088 - RNA, 19 nt, Homo sapiens
  misc_RNA (1)...(19): siRNA sense strand
agucagagggaaugcagua

SEQ ID NO: 2605089 - RNA, 19 nt, Homo sapiens
  misc_RNA (1)...(19): siRNA sense strand
ggaaaauacuguuugcaga

SEQ ID NO: 2605090 - RNA, 19 nt, Homo sapiens
  misc_RNA (1)...(19): siRNA sense strand
acgagaggucuuagcuaua

SEQ ID NO: 2605091 - RNA, 19 nt, Homo sapiens
  misc_RNA (1)...(19): siRNA sense strand
gagccaacagagaagaaau

SEQ ID NO: 2605092 - RNA, 19 nt, Homo sapiens
  misc_RNA (1)...(19): siRNA sense strand
cagcuuaugcauacaggaa

SEQ ID NO: 2605093 - RNA, 19 nt, Homo sapiens
  misc_RNA (1)...(19): siRNA sense strand
aaggaacagucauggaaaa

SEQ ID NO: 2605094 - RNA, 19 nt, Homo sapiens
  misc_RNA (1)...(19): siRNA sense strand
aagagggauuccagaaaca

SEQ ID NO: 2605095 - RNA, 19 nt, Homo sapiens
  misc_RNA (1)...(19): siRNA sense strand
uuauggaacagcuggcaaa

SEQ ID NO: 2605096 - RNA, 19 nt, Homo sapiens
  misc_RNA (1)...(19): siRNA sense strand
ccagaaacauuaagaggag

SEQ ID NO: 2605097 - RNA, 19 nt, Homo sapiens
  misc_RNA (1)...(19): siRNA sense strand
uaguauguuucgaaccaaa

SEQ ID NO: 2605098 - RNA, 19 nt, Homo sapiens
  misc_RNA (1)...(19): siRNA sense strand
cagagggaaugcaguaaaa

SEQ ID NO: 2605099 - RNA, 19 nt, Homo sapiens
  misc_RNA (1)...(19): siRNA sense strand
gcuuaugcauacaggaauc

SEQ ID NO: 2605100 - RNA, 19 nt, Homo sapiens
  misc_RNA (1)...(19): siRNA sense strand
cuauuauacugaagugguu

SEQ ID NO: 2605101 - RNA, 19 nt, Homo sapiens
  misc_RNA (1)...(19): siRNA sense strand
acagagaagaaauaaccaa

SEQ ID NO: 2605102 - RNA, 19 nt, Homo sapiens
  misc_RNA (1)...(19): siRNA sense strand
ugcccaaaggagagaguuu

SEQ ID NO: 2605103 - RNA, 19 nt, Homo sapiens
  misc_RNA (1)...(19): siRNA sense strand
uaauugcugaagagggaaa

SEQ ID NO: 2605104 - RNA, 19 nt, Homo sapiens
  misc_RNA (1)...(19): siRNA sense strand
cauuagcaucaaaggaaaa

SEQ ID NO: 2605105 - RNA, 19 nt, Homo sapiens
  misc_RNA (1)...(19): siRNA sense strand
uguaagagggauuccagaa

SEQ ID NO: 2605106 - RNA, 19 nt, Homo sapiens
  misc_RNA (1)...(19): siRNA sense strand
guuugaaagaaguacauga

SEQ ID NO: 2605107 - RNA, 19 nt, Homo sapiens
  misc_RNA (1)...(19): siRNA sense strand
aggucuuagcuauagauaa

SEQ ID NO: 2605108 - RNA, 19 nt, Homo sapiens
  misc_RNA (1)...(19): siRNA sense strand
uuuguugggaucagaaaua

SEQ ID NO: 2605109 - RNA, 19 nt, Homo sapiens
  misc_RNA (1)...(19): siRNA sense strand
ugaacaacugguagcaaaa

SEQ ID NO: 2605110 - RNA, 19 nt, Homo sapiens
  misc_RNA (1)...(19): siRNA sense strand
cagagaaggagaaguuagu

SEQ ID NO: 2605111 - RNA, 19 nt, Homo sapiens
  misc_RNA (1)...(19): siRNA sense strand
uguugggaucagaaauaaa

SEQ ID NO: 2605112 - RNA, 19 nt, Homo sapiens
  misc_RNA (1)...(19): siRNA sense strand
ugggauugguuggaacaaa

SEQ ID NO: 2605113 - RNA, 19 nt, Homo sapiens
  misc_RNA (1)...(19): siRNA sense strand
uaccagagaaggagaaguu

SEQ ID NO: 2605114 - RNA, 19 nt, Homo sapiens
  misc_RNA (1)...(19): siRNA sense strand
cagaauuuggagacucuua

SEQ ID NO: 2605115 - RNA, 19 nt, Homo sapiens
  misc_RNA (1)...(19): siRNA sense strand
ucgagaagcccuuuugaaa

SEQ ID NO: 2605116 - RNA, 19 nt, Homo sapiens
  misc_RNA (1)...(19): siRNA sense strand
agggauuccagaaacauua

SEQ ID NO: 2605117 - RNA, 19 nt, Homo sapiens
  misc_RNA (1)...(19): siRNA sense strand
aggagaaguuagugaccua

SEQ ID NO: 2605118 - RNA, 19 nt, Homo sapiens
  misc_RNA (1)...(19): siRNA sense strand
cugaagaaauugaacguga

SEQ ID NO: 2605119 - RNA, 19 nt, Homo sapiens
  misc_RNA (1)...(19): siRNA sense strand
ccaaaagaggucuggaaaa

SEQ ID NO: 2605120 - RNA, 19 nt, Homo sapiens
  misc_RNA (1)...(19): siRNA sense strand
agaaacauuaagaggagaa

SEQ ID NO: 2605121 - RNA, 19 nt, Homo sapiens
  misc_RNA (1)...(19): siRNA sense strand
gggauugguuggaacaaaa

SEQ ID NO: 2605122 - RNA, 19 nt, Homo sapiens
  misc_RNA (1)...(19): siRNA sense strand
gcgcugaagcuguggcuga

SEQ ID NO: 2605123 - RNA, 19 nt, Homo sapiens
  misc_RNA (1)...(19): siRNA sense strand
agacaaaugauuccagcaa

SEQ ID NO: 2605124 - RNA, 19 nt, Homo sapiens
  misc_RNA (1)...(19): siRNA sense strand
agccaacagagaagaaaua

SEQ ID NO: 2605125 - RNA, 19 nt, Homo sapiens
  misc_RNA (1)...(19): siRNA sense strand
auuaauugcugaagaggga

SEQ ID NO: 2605126 - RNA, 19 nt, Homo sapiens
  misc_RNA (1)...(19): siRNA sense strand
aagcuguggcugauggaaa

SEQ ID NO: 2605127 - RNA, 19 nt, Homo sapiens
  misc_RNA (1)...(19): siRNA sense strand
agucagagggaaugcagua

SEQ ID NO: 2605128 - RNA, 19 nt, Homo sapiens
  misc_RNA (1)...(19): siRNA sense strand
ggaaaauacuguuugcaga

SEQ ID NO: 2605129 - RNA, 19 nt, Homo sapiens
  misc_RNA (1)...(19): siRNA sense strand
acgagaggucuuagcuaua

SEQ ID NO: 2605130 - RNA, 19 nt, Homo sapiens
  misc_RNA (1)...(19): siRNA sense strand
gagccaacagagaagaaau

SEQ ID NO: 2605131 - RNA, 19 nt, Homo sapiens
  misc_RNA (1)...(19): siRNA sense strand
cagcuuaugcauacaggaa

SEQ ID NO: 2605132 - RNA, 19 nt, Homo sapiens
  misc_RNA (1)...(19): siRNA sense strand
aaggaacagucauggaaaa

SEQ ID NO: 2605133 - RNA, 19 nt, Homo sapiens
  misc_RNA (1)...(19): siRNA sense strand
aagagggauuccagaaaca

SEQ ID NO: 2605134 - RNA, 19 nt, Homo sapiens
  misc_RNA (1)...(19): siRNA sense strand
uuauggaacagcuggcaaa

SEQ ID NO: 2605135 - RNA, 19 nt, Homo sapiens
  misc_RNA (1)...(19): siRNA sense strand
ccagaaacauuaagaggag

SEQ ID NO: 2605136 - RNA, 19 nt, Homo sapiens
  misc_RNA (1)...(19): siRNA sense strand
uaguauguuucgaaccaaa

SEQ ID NO: 2605137 - RNA, 19 nt, Homo sapiens
  misc_RNA (1)...(19): siRNA sense strand
cagagggaaugcaguaaaa

SEQ ID NO: 2605138 - RNA, 19 nt, Homo sapiens
  misc_RNA (1)...(19): siRNA sense strand
gcuuaugcauacaggaauc

SEQ ID NO: 2605139 - RNA, 19 nt, Homo sapiens
  misc_RNA (1)...(19): siRNA sense strand
cuauuauacugaagugguu

SEQ ID NO: 2605140 - RNA, 19 nt, Homo sapiens
  misc_RNA (1)...(19): siRNA sense strand
acagagaagaaauaaccaa

SEQ ID NO: 2605141 - RNA, 19 nt, Homo sapiens
  misc_RNA (1)...(19): siRNA sense strand
ugcccaaaggagagaguuu

SEQ ID NO: 2605142 - RNA, 19 nt, Homo sapiens
  misc_RNA (1)...(19): siRNA sense strand
uaauugcugaagagggaaa

SEQ ID NO: 2605143 - RNA, 19 nt, Homo sapiens
  misc_RNA (1)...(19): siRNA sense strand
cauuagcaucaaaggaaaa

SEQ ID NO: 2605144 - RNA, 19 nt, Homo sapiens
  misc_RNA (1)...(19): siRNA sense strand
uguaagagggauuccagaa

SEQ ID NO: 2605145 - RNA, 19 nt, Homo sapiens
  misc_RNA (1)...(19): siRNA sense strand
guuugaaagaaguacauga

SEQ ID NO: 2605146 - RNA, 19 nt, Homo sapiens
  misc_RNA (1)...(19): siRNA sense strand
aggucuuagcuauagauaa

SEQ ID NO: 2605147 - RNA, 19 nt, Homo sapiens
  misc_RNA (1)...(19): siRNA sense strand
uuuguugggaucagaaaua

SEQ ID NO: 2605148 - RNA, 19 nt, Homo sapiens
  misc_RNA (1)...(19): siRNA sense strand
ugaacaacugguagcaaaa

SEQ ID NO: 2605149 - RNA, 19 nt, Homo sapiens
  misc_RNA (1)...(19): siRNA sense strand
cagagaaggagaaguuagu

SEQ ID NO: 2605150 - RNA, 19 nt, Homo sapiens
  misc_RNA (1)...(19): siRNA sense strand
uguugggaucagaaauaaa

SEQ ID NO: 2605151 - RNA, 19 nt, Homo sapiens
  misc_RNA (1)...(19): siRNA sense strand
ugggauugguuggaacaaa

SEQ ID NO: 2605152 - RNA, 19 nt, Homo sapiens
  misc_RNA (1)...(19): siRNA sense strand
uaccagagaaggagaaguu

SEQ ID NO: 2605153 - RNA, 19 nt, Homo sapiens
  misc_RNA (1)...(19): siRNA sense strand
cagaauuuggagacucuua

SEQ ID NO: 2605154 - RNA, 19 nt, Homo sapiens
  misc_RNA (1)...(19): siRNA sense strand
ucgagaagcccuuuugaaa

SEQ ID NO: 2605155 - RNA, 19 nt, Homo sapiens
  misc_RNA (1)...(19): siRNA sense strand
agggauuccagaaacauua

SEQ ID NO: 2605156 - RNA, 19 nt, Homo sapiens
  misc_RNA (1)...(19): siRNA sense strand
ggaauuauguucaugggaa

SEQ ID NO: 2605157 - RNA, 19 nt, Homo sapiens
  misc_RNA (1)...(19): siRNA sense strand
agucagaaacaauaggauu

SEQ ID NO: 2605158 - RNA, 19 nt, Homo sapiens
  misc_RNA (1)...(19): siRNA sense strand
uggaguugcuguuggaaaa

SEQ ID NO: 2605159 - RNA, 19 nt, Homo sapiens
  misc_RNA (1)...(19): siRNA sense strand
cugcaauauuggaucaaca

SEQ ID NO: 2605160 - RNA, 19 nt, Homo sapiens
  misc_RNA (1)...(19): siRNA sense strand
caaaagucuaucagaguua

SEQ ID NO: 2605161 - RNA, 19 nt, Homo sapiens
  misc_RNA (1)...(19): siRNA sense strand
uugaagaggaccauagaau

SEQ ID NO: 2605162 - RNA, 19 nt, Homo sapiens
  misc_RNA (1)...(19): siRNA sense strand
ccuuuugaguuuagagcua

SEQ ID NO: 2605163 - RNA, 19 nt, Homo sapiens
  misc_RNA (1)...(19): siRNA sense strand
aagccagagauuugagauu

SEQ ID NO: 2605164 - RNA, 19 nt, Homo sapiens
  misc_RNA (1)...(19): siRNA sense strand
gaauuauguucaugggaag

SEQ ID NO: 2605165 - RNA, 19 nt, Homo sapiens
  misc_RNA (1)...(19): siRNA sense strand
ucauuaaucuggacagcca

SEQ ID NO: 2605166 - RNA, 19 nt, Homo sapiens
  misc_RNA (1)...(19): siRNA sense strand
ccucagacuggauggacuu

SEQ ID NO: 2605167 - RNA, 19 nt, Homo sapiens
  misc_RNA (1)...(19): siRNA sense strand
ugaguaucacagucagaaa

SEQ ID NO: 2605168 - RNA, 19 nt, Homo sapiens
  misc_RNA (1)...(19): siRNA sense strand
uaucacagucagaaacaau

SEQ ID NO: 2605169 - RNA, 19 nt, Homo sapiens
  misc_RNA (1)...(19): siRNA sense strand
gcacauuuuacuacagaau

SEQ ID NO: 2605170 - RNA, 19 nt, Homo sapiens
  misc_RNA (1)...(19): siRNA sense strand
ugggauugaccaugcagaa

SEQ ID NO: 2605171 - RNA, 19 nt, Homo sapiens
  misc_RNA (1)...(19): siRNA sense strand
auggaguugcuguuggaaa

SEQ ID NO: 2605172 - RNA, 19 nt, Homo sapiens
  misc_RNA (1)...(19): siRNA sense strand
ggauggacuuggaucagga

SEQ ID NO: 2605173 - RNA, 19 nt, Homo sapiens
  misc_RNA (1)...(19): siRNA sense strand
gagaagaggcggaaggcuu

SEQ ID NO: 2605174 - RNA, 19 nt, Homo sapiens
  misc_RNA (1)...(19): siRNA sense strand
uggaagaccuggaggagca

SEQ ID NO: 2605175 - RNA, 19 nt, Homo sapiens
  misc_RNA (1)...(19): siRNA sense strand
gcuuugaccugcuggguga

SEQ ID NO: 2605176 - RNA, 19 nt, Homo sapiens
  misc_RNA (1)...(19): siRNA sense strand
ucacugagucugagggcuu

SEQ ID NO: 2605177 - RNA, 19 nt, Homo sapiens
  misc_RNA (1)...(19): siRNA sense strand
uggacaagaacaaggccaa

SEQ ID NO: 2605178 - RNA, 19 nt, Homo sapiens
  misc_RNA (1)...(19): siRNA sense strand
gcuucaacuggcugggcaa

SEQ ID NO: 2605179 - RNA, 19 nt, Homo sapiens
  misc_RNA (1)...(19): siRNA sense strand
gugaaccugaagugagcaa

SEQ ID NO: 2605180 - RNA, 19 nt, Homo sapiens
  misc_RNA (1)...(19): siRNA sense strand
ggcaacggaaccugggcua

SEQ ID NO: 2605181 - RNA, 19 nt, Homo sapiens
  misc_RNA (1)...(19): siRNA sense strand
gcaagaagcuuuccggcaa

SEQ ID NO: 2605182 - RNA, 19 nt, Homo sapiens
  misc_RNA (1)...(19): siRNA sense strand
ugguaaugaucgaccgaau

SEQ ID NO: 2605183 - RNA, 19 nt, Homo sapiens
  misc_RNA (1)...(19): siRNA sense strand
uggauaaacagcuggccaa

SEQ ID NO: 2605184 - RNA, 19 nt, Homo sapiens
  misc_RNA (1)...(19): siRNA sense strand
ccguggaggacgagcugua

SEQ ID NO: 2605185 - RNA, 19 nt, Homo sapiens
  misc_RNA (1)...(19): siRNA sense strand
cggagaugguaaugaucga

SEQ ID NO: 2605186 - RNA, 19 nt, Homo sapiens
  misc_RNA (1)...(19): siRNA sense strand
ccaccacgcucaaugggaa

SEQ ID NO: 2605187 - RNA, 19 nt, Homo sapiens
  misc_RNA (1)...(19): siRNA sense strand
ggcugcaguaugagagcaa

SEQ ID NO: 2605188 - RNA, 19 nt, Homo sapiens
  misc_RNA (1)...(19): siRNA sense strand
cgcaagaccuaccgcgaga

SEQ ID NO: 2605189 - RNA, 19 nt, Homo sapiens
  misc_RNA (1)...(19): siRNA sense strand
gggccugggcaaugugaca

SEQ ID NO: 2605190 - RNA, 19 nt, Homo sapiens
  misc_RNA (1)...(19): siRNA sense strand
ccucagcggagaugguaau

SEQ ID NO: 2605191 - RNA, 19 nt, Homo sapiens
  misc_RNA (1)...(19): siRNA sense strand
ccacccuugccuuggauaa

SEQ ID NO: 2605192 - RNA, 19 nt, Homo sapiens
  misc_RNA (1)...(19): siRNA sense strand
uguucauucaggaggagaa

SEQ ID NO: 2605193 - RNA, 19 nt, Homo sapiens
  misc_RNA (1)...(19): siRNA sense strand
cugcagagcgccaucgaca

SEQ ID NO: 2605194 - RNA, 19 nt, Homo sapiens
  misc_RNA (1)...(19): siRNA sense strand
ggacagugcugcuugccua

SEQ ID NO: 2605195 - RNA, 19 nt, Homo sapiens
  misc_RNA (1)...(19): siRNA sense strand
cugucaggacggagacuua

SEQ ID NO: 2605196 - RNA, 19 nt, Homo sapiens
  misc_RNA (1)...(19): siRNA sense strand
ccuuaagugcacagaauca

SEQ ID NO: 2605197 - RNA, 19 nt, Homo sapiens
  misc_RNA (1)...(19): siRNA sense strand
ggagaaugcuguuaccuga

SEQ ID NO: 2605198 - RNA, 19 nt, Homo sapiens
  misc_RNA (1)...(19): siRNA sense strand
acccagggacagaggaaga

SEQ ID NO: 2605199 - RNA, 19 nt, Homo sapiens
  misc_RNA (1)...(19): siRNA sense strand
aaacaauucugaccggaga

SEQ ID NO: 2605200 - RNA, 19 nt, Homo sapiens
  misc_RNA (1)...(19): siRNA sense strand
cuuccaaacccaagccuga

SEQ ID NO: 2605201 - RNA, 19 nt, Homo sapiens
  misc_RNA (1)...(19): siRNA sense strand
ccuaaaaggaagcgcaaua

SEQ ID NO: 2605202 - RNA, 19 nt, Homo sapiens
  misc_RNA (1)...(19): siRNA sense strand
uggcaaugauggaacgaau

SEQ ID NO: 2605203 - RNA, 19 nt, Homo sapiens
  misc_RNA (1)...(19): siRNA sense strand
agacauuaucacagagaca

SEQ ID NO: 2605204 - RNA, 19 nt, Homo sapiens
  misc_RNA (1)...(19): siRNA sense strand
gauugggauagcagagaaa

SEQ ID NO: 2605205 - RNA, 19 nt, Homo sapiens
  misc_RNA (1)...(19): siRNA sense strand
acacaagagaacaggcauu

SEQ ID NO: 2605206 - RNA, 19 nt, Homo sapiens
  misc_RNA (1)...(19): siRNA sense strand
agacauugaaagcggguau

SEQ ID NO: 2605207 - RNA, 19 nt, Homo sapiens
  misc_RNA (1)...(19): siRNA sense strand
augaagaacaugagaaacu

SEQ ID NO: 2605208 - RNA, 19 nt, Homo sapiens
  misc_RNA (1)...(19): siRNA sense strand
cugucaaaguggagacguu

SEQ ID NO: 2605209 - RNA, 19 nt, Homo sapiens
  misc_RNA (1)...(19): siRNA sense strand
guauagaggaugaugagga

SEQ ID NO: 2605210 - RNA, 19 nt, Homo sapiens
  misc_RNA (1)...(19): siRNA sense strand
aggaugaugaggaggguca

SEQ ID NO: 2605211 - RNA, 19 nt, Homo sapiens
  misc_RNA (1)...(19): siRNA sense strand
ugguagauauguuaggaga

SEQ ID NO: 2605212 - RNA, 19 nt, Homo sapiens
  misc_RNA (1)...(19): siRNA sense strand
uggcaaaguuguagagugc

SEQ ID NO: 2605213 - RNA, 19 nt, Homo sapiens
  misc_RNA (1)...(19): siRNA sense strand
acgaauauuaggacccaua

SEQ ID NO: 2605214 - RNA, 19 nt, Homo sapiens
  misc_RNA (1)...(19): siRNA sense strand
gguccuugaaugagcgaga

SEQ ID NO: 2605215 - RNA, 19 nt, Homo sapiens
  misc_RNA (1)...(19): siRNA sense strand
ugaugaacgcacacugaaa

SEQ ID NO: 2605216 - RNA, 19 nt, Homo sapiens
  misc_RNA (1)...(19): siRNA sense strand
cgcaauagacacuguucaa

SEQ ID NO: 2605217 - RNA, 19 nt, Homo sapiens
  misc_RNA (1)...(19): siRNA sense strand
cguucuaagagcaagauau

SEQ ID NO: 2605218 - RNA, 19 nt, Homo sapiens
  misc_RNA (1)...(19): siRNA sense strand
gauaugaaaucguggacac

SEQ ID NO: 2605219 - RNA, 19 nt, Homo sapiens
  misc_RNA (1)...(19): siRNA sense strand
ggaguauagaggaugauga

SEQ ID NO: 2605220 - RNA, 19 nt, Homo sapiens
  misc_RNA (1)...(19): siRNA sense strand
ggagacguucuaagagcaa

SEQ ID NO: 2605221 - RNA, 19 nt, Homo sapiens
  misc_RNA (1)...(19): siRNA sense strand
auacagaucugaagccuga

SEQ ID NO: 2605222 - RNA, 19 nt, Homo sapiens
  misc_RNA (1)...(19): siRNA sense strand
cuugaaugagcgagauuau

SEQ ID NO: 2605223 - RNA, 19 nt, Homo sapiens
  misc_RNA (1)...(19): siRNA sense strand
ccggagauacguugacgaa

SEQ ID NO: 2605224 - RNA, 19 nt, Homo sapiens
  misc_RNA (1)...(19): siRNA sense strand
augaaaucguggacacuuu

SEQ ID NO: 2605225 - RNA, 19 nt, Homo sapiens
  misc_RNA (1)...(19): siRNA sense strand
guggaagucacaagcggaa

SEQ ID NO: 2605226 - RNA, 19 nt, Homo sapiens
  misc_RNA (1)...(19): siRNA sense strand
acgaauacaggaaugacua

SEQ ID NO: 2605227 - RNA, 19 nt, Homo sapiens
  misc_RNA (1)...(19): siRNA sense strand
augacuacugugaaggaua

SEQ ID NO: 2605228 - RNA, 19 nt, Homo sapiens
  misc_RNA (1)...(19): siRNA sense strand
aguaaagagcaccuggcaa

SEQ ID NO: 2605229 - RNA, 19 nt, Homo sapiens
  misc_RNA (1)...(19): siRNA sense strand
caugcauguagcagugaaa

SEQ ID NO: 2605230 - RNA, 19 nt, Homo sapiens
  misc_RNA (1)...(19): siRNA sense strand
gcuagaaugguuugaucau

SEQ ID NO: 2605231 - RNA, 19 nt, Homo sapiens
  misc_RNA (1)...(19): siRNA sense strand
cuuuggaagugcaacguau

SEQ ID NO: 2605232 - RNA, 19 nt, Homo sapiens
  misc_RNA (1)...(19): siRNA sense strand
aggaaugacuacugugaag

SEQ ID NO: 2605233 - RNA, 19 nt, Homo sapiens
  misc_RNA (1)...(19): siRNA sense strand
ugcaaaccguugaaggaau

SEQ ID NO: 2605234 - RNA, 19 nt, Homo sapiens
  misc_RNA (1)...(19): siRNA sense strand
acauuaucacagagacauu

SEQ ID NO: 2605235 - RNA, 19 nt, Homo sapiens
  misc_RNA (1)...(19): siRNA sense strand
ggaaaagauccaggaguau

SEQ ID NO: 2605236 - RNA, 19 nt, Homo sapiens
  misc_RNA (1)...(19): siRNA sense strand
uguuugaacuacugggacu

SEQ ID NO: 2605237 - RNA, 19 nt, Homo sapiens
  misc_RNA (1)...(19): siRNA sense strand
gcacacaagagaacaggca

SEQ ID NO: 2605238 - RNA, 19 nt, Homo sapiens
  misc_RNA (1)...(19): siRNA sense strand
gugcaacguaugaugauga

SEQ ID NO: 2605239 - RNA, 19 nt, Homo sapiens
  misc_RNA (1)...(19): siRNA sense strand
ucgaagagccaccgaagga

SEQ ID NO: 2605240 - RNA, 19 nt, Homo sapiens
  misc_RNA (1)...(19): siRNA sense strand
cuacagagcucccgagguc

SEQ ID NO: 2605241 - RNA, 19 nt, Homo sapiens
  misc_RNA (1)...(19): siRNA sense strand
cuaagagcaagauaugaaa

SEQ ID NO: 2605242 - RNA, 19 nt, Homo sapiens
  misc_RNA (1)...(19): siRNA sense strand
cagaaauccaaguauuaga

SEQ ID NO: 2605243 - RNA, 19 nt, Homo sapiens
  misc_RNA (1)...(19): siRNA sense strand
agucacaagcggaagagga

SEQ ID NO: 2605244 - RNA, 19 nt, Homo sapiens
  misc_RNA (1)...(19): siRNA sense strand
acaugaaacuauugggaca

SEQ ID NO: 2605245 - RNA, 19 nt, Homo sapiens
  misc_RNA (1)...(19): siRNA sense strand
aagaagauuaugagaggaa

SEQ ID NO: 2605246 - RNA, 19 nt, Homo sapiens
  misc_RNA (1)...(19): siRNA sense strand
cuguaaagaaugaagagua

SEQ ID NO: 2605247 - RNA, 19 nt, Homo sapiens
  misc_RNA (1)...(19): siRNA sense strand
agauugaggccuugaagaa

SEQ ID NO: 2605248 - RNA, 19 nt, Homo sapiens
  misc_RNA (1)...(19): siRNA sense strand
ccagcauaagagagaaaua

SEQ ID NO: 2605249 - RNA, 19 nt, Homo sapiens
  misc_RNA (1)...(19): siRNA sense strand
acaaaagauuaguggaaga

SEQ ID NO: 2605250 - RNA, 19 nt, Homo sapiens
  misc_RNA (1)...(19): siRNA sense strand
gaagauuaugagaggaaaa

SEQ ID NO: 2605251 - RNA, 19 nt, Homo sapiens
  misc_RNA (1)...(19): siRNA sense strand
cacagaaacaacaggcaaa

SEQ ID NO: 2605252 - RNA, 19 nt, Homo sapiens
  misc_RNA (1)...(19): siRNA sense strand
ugucaaacacagucagauu

SEQ ID NO: 2605253 - RNA, 19 nt, Homo sapiens
  misc_RNA (1)...(19): siRNA sense strand
ugaguuaauacaaggcaaa

SEQ ID NO: 2605254 - RNA, 19 nt, Homo sapiens
  misc_RNA (1)...(19): siRNA sense strand
gcuagaaaccagugccuga

SEQ ID NO: 2605255 - RNA, 19 nt, Homo sapiens
  misc_RNA (1)...(19): siRNA sense strand
ccuugaagaaccugagaca

SEQ ID NO: 2605256 - RNA, 19 nt, Homo sapiens
  misc_RNA (1)...(19): siRNA sense strand
uguaaagaaugaagaguac

SEQ ID NO: 2605257 - RNA, 19 nt, Homo sapiens
  misc_RNA (1)...(19): siRNA sense strand
aaccagugccugaaagaaa

SEQ ID NO: 2605258 - RNA, 19 nt, Homo sapiens
  misc_RNA (1)...(19): siRNA sense strand
aaacggagauugaggccuu

SEQ ID NO: 2605259 - RNA, 19 nt, Homo sapiens
  misc_RNA (1)...(19): siRNA sense strand
aguaaauucaacaggaaca

SEQ ID NO: 2605260 - RNA, 19 nt, Homo sapiens
  misc_RNA (1)...(19): siRNA sense strand
aaagauuaguggaagacau

SEQ ID NO: 2605261 - RNA, 19 nt, Homo sapiens
  misc_RNA (1)...(19): siRNA sense strand
accaaguacuggacagaau

SEQ ID NO: 2605262 - RNA, 19 nt, Homo sapiens
  misc_RNA (1)...(19): siRNA sense strand
gggaaagugacaaugcaau

SEQ ID NO: 2605263 - RNA, 19 nt, Homo sapiens
  misc_RNA (1)...(19): siRNA sense strand
cgaugaugauugcguaaca

SEQ ID NO: 2605264 - RNA, 19 nt, Homo sapiens
  misc_RNA (1)...(19): siRNA sense strand
gcauguugacuuuguacaa

SEQ ID NO: 2605265 - RNA, 19 nt, Homo sapiens
  misc_RNA (1)...(19): siRNA sense strand
cugaguuaauacaaggcaa

SEQ ID NO: 2605266 - RNA, 19 nt, Homo sapiens
  misc_RNA (1)...(19): siRNA sense strand
ggaucaugcaagauuacaa

SEQ ID NO: 2605267 - RNA, 19 nt, Homo sapiens
  misc_RNA (1)...(19): siRNA sense strand
ccaagaaggcucggggaaa

SEQ ID NO: 2605268 - RNA, 19 nt, Homo sapiens
  misc_RNA (1)...(19): siRNA sense strand
agaaccagcauaagagaga

SEQ ID NO: 2605269 - RNA, 19 nt, Homo sapiens
  misc_RNA (1)...(19): siRNA sense strand
ucacagaaacaacaggcaa

SEQ ID NO: 2605270 - RNA, 19 nt, Homo sapiens
  misc_RNA (1)...(19): siRNA sense strand
gcccagaagacuaaagcuu

SEQ ID NO: 2605271 - RNA, 19 nt, Homo sapiens
  misc_RNA (1)...(19): siRNA sense strand
aaccagcauaagagagaaa

SEQ ID NO: 2605272 - RNA, 19 nt, Homo sapiens
  misc_RNA (1)...(19): siRNA sense strand
caguggaauuggaucucaa

SEQ ID NO: 2605273 - RNA, 19 nt, Homo sapiens
  misc_RNA (1)...(19): siRNA sense strand
aaaauuauguggcgggauu

SEQ ID NO: 2605274 - RNA, 19 nt, Homo sapiens
  misc_RNA (1)...(19): siRNA sense strand
gcucaguggaauuggaucu

SEQ ID NO: 2605275 - RNA, 19 nt, Homo sapiens
  misc_RNA (1)...(19): siRNA sense strand
cuauauaauuucccaggau

SEQ ID NO: 2605276 - RNA, 19 nt, Homo sapiens
  misc_RNA (1)...(19): siRNA sense strand
auuagugaauccagaucaa

SEQ ID NO: 2605277 - RNA, 19 nt, Homo sapiens
  misc_RNA (1)...(19): siRNA sense strand
cuaccaugugcuagagaca

SEQ ID NO: 2605278 - RNA, 19 nt, Homo sapiens
  misc_RNA (1)...(19): siRNA sense strand
aggcagauguuuggagcau

SEQ ID NO: 2605279 - RNA, 19 nt, Homo sapiens
  misc_RNA (1)...(19): siRNA sense strand
uggagagaugguagcuaua

SEQ ID NO: 2605280 - RNA, 19 nt, Homo sapiens
  misc_RNA (1)...(19): siRNA sense strand
acagucagauuuugggaaa

SEQ ID NO: 2605281 - RNA, 19 nt, Homo sapiens
  misc_RNA (1)...(19): siRNA sense strand
uugaagaaccugagacauc

SEQ ID NO: 2605282 - RNA, 19 nt, Homo sapiens
  misc_RNA (1)...(19): siRNA sense strand
guugaguggcaaagcaaga

SEQ ID NO: 2605283 - RNA, 19 nt, Homo sapiens
  misc_RNA (1)...(19): siRNA sense strand
uggcaaagcaagaauccuu

SEQ ID NO: 2605284 - RNA, 19 nt, Homo sapiens
  misc_RNA (1)...(19): siRNA sense strand
ccugaaagaaacuccaauu

SEQ ID NO: 2605285 - RNA, 19 nt, Homo sapiens
  misc_RNA (1)...(19): siRNA sense strand
ugggaaagugacaaugcaa

SEQ ID NO: 2605286 - RNA, 19 nt, Homo sapiens
  misc_RNA (1)...(19): siRNA sense strand
auucaugguucuugaguac

SEQ ID NO: 2605287 - RNA, 19 nt, Homo sapiens
  misc_RNA (1)...(19): siRNA sense strand
gaugauaauguaauggcuu

SEQ ID NO: 2605288 - RNA, 19 nt, Homo sapiens
  misc_RNA (1)...(19): siRNA sense strand
aggcaaacaauggaggauu

SEQ ID NO: 2605289 - RNA, 19 nt, Homo sapiens
  misc_RNA (1)...(19): siRNA sense strand
ggucaaacuugccugccau

SEQ ID NO: 2605290 - RNA, 19 nt, Homo sapiens
  misc_RNA (1)...(19): siRNA sense strand
agccaaagacuccaguuaa

SEQ ID NO: 2605291 - RNA, 19 nt, Homo sapiens
  misc_RNA (1)...(19): siRNA sense strand
acgccaaaucguuacacua

SEQ ID NO: 2605292 - RNA, 19 nt, Homo sapiens
  misc_RNA (1)...(19): siRNA sense strand
acaagaagauuaugagagg

SEQ ID NO: 2605293 - RNA, 19 nt, Homo sapiens
  misc_RNA (1)...(19): siRNA sense strand
agaagauuaugagaggaaa

SEQ ID NO: 2605294 - RNA, 19 nt, Homo sapiens
  misc_RNA (1)...(19): siRNA sense strand
gaaaauaugauguucccaa

SEQ ID NO: 2605295 - RNA, 19 nt, Homo sapiens
  misc_RNA (1)...(19): siRNA sense strand
acuccagccuuaugcagaa

SEQ ID NO: 2605296 - RNA, 19 nt, Homo sapiens
  misc_RNA (1)...(19): siRNA sense strand
gagaagagaggauggacca

SEQ ID NO: 2605297 - RNA, 19 nt, Homo sapiens
  misc_RNA (1)...(19): siRNA sense strand
cagcgagagaagagaggau

SEQ ID NO: 2605298 - RNA, 19 nt, Homo sapiens
  misc_RNA (1)...(19): siRNA sense strand
gcuccaggauaaaggcaca

SEQ ID NO: 2605299 - RNA, 19 nt, Homo sapiens
  misc_RNA (1)...(19): siRNA sense strand
uggacuguguggaaggcaa

SEQ ID NO: 2605300 - RNA, 19 nt, Homo sapiens
  misc_RNA (1)...(19): siRNA sense strand
aggcagggcuguuugggau

SEQ ID NO: 2605301 - RNA, 19 nt, Homo sapiens
  misc_RNA (1)...(19): siRNA sense strand
ccaaggaugcucagggacu

SEQ ID NO: 2605302 - RNA, 19 nt, Homo sapiens
  misc_RNA (1)...(19): siRNA sense strand
ucuucaacgugcuggagau

SEQ ID NO: 2605303 - RNA, 19 nt, Homo sapiens
  misc_RNA (1)...(19): siRNA sense strand
aggaagaggaggagaggga

SEQ ID NO: 2605304 - RNA, 19 nt, Homo sapiens
  misc_RNA (1)...(19): siRNA sense strand
gagcaaucuggcugggaaa

SEQ ID NO: 2605305 - RNA, 19 nt, Homo sapiens
  misc_RNA (1)...(19): siRNA sense strand
aggaagaggaagaggagga

SEQ ID NO: 2605306 - RNA, 19 nt, Homo sapiens
  misc_RNA (1)...(19): siRNA sense strand
aggaggaagaagaggaaga

SEQ ID NO: 2605307 - RNA, 19 nt, Homo sapiens
  misc_RNA (1)...(19): siRNA sense strand
gaagaggaggagagggaga

SEQ ID NO: 2605308 - RNA, 19 nt, Homo sapiens
  misc_RNA (1)...(19): siRNA sense strand
agaaacaagaggaggagga

SEQ ID NO: 2605309 - RNA, 19 nt, Homo sapiens
  misc_RNA (1)...(19): siRNA sense strand
gaacauagacugugaggug

SEQ ID NO: 2605310 - RNA, 19 nt, Homo sapiens
  misc_RNA (1)...(19): siRNA sense strand
aggaagaagaggaagagga

SEQ ID NO: 2605311 - RNA, 19 nt, Homo sapiens
  misc_RNA (1)...(19): siRNA sense strand
aggagagggagaaggaaga

SEQ ID NO: 2605312 - RNA, 19 nt, Homo sapiens
  misc_RNA (1)...(19): siRNA sense strand
ggagcaaucuggcugggaa

SEQ ID NO: 2605313 - RNA, 19 nt, Homo sapiens
  misc_RNA (1)...(19): siRNA sense strand
cggagaugcaggagaagca

SEQ ID NO: 2605314 - RNA, 19 nt, Homo sapiens
  misc_RNA (1)...(19): siRNA sense strand
gggaagaggaggaagagcu

SEQ ID NO: 2605315 - RNA, 19 nt, Homo sapiens
  misc_RNA (1)...(19): siRNA sense strand
uagagaaacaagaggagga

SEQ ID NO: 2605316 - RNA, 19 nt, Homo sapiens
  misc_RNA (1)...(19): siRNA sense strand
ugaacaugacagagaacau

SEQ ID NO: 2605317 - RNA, 19 nt, Homo sapiens
  misc_RNA (1)...(19): siRNA sense strand
aggaggaggaagaggagga

SEQ ID NO: 2605318 - RNA, 19 nt, Homo sapiens
  misc_RNA (1)...(19): siRNA sense strand
cggacguguucgaggagga

SEQ ID NO: 2605319 - RNA, 19 nt, Homo sapiens
  misc_RNA (1)...(19): siRNA sense strand
aagaagaagccaagccuca

SEQ ID NO: 2605320 - RNA, 19 nt, Homo sapiens
  misc_RNA (1)...(19): siRNA sense strand
aagaggaggaagagcugaa

SEQ ID NO: 2605321 - RNA, 19 nt, Homo sapiens
  misc_RNA (1)...(19): siRNA sense strand
agaggaggaagaagaggaa

SEQ ID NO: 2605322 - RNA, 19 nt, Homo sapiens
  misc_RNA (1)...(19): siRNA sense strand
gagaggaggaagaagagga

SEQ ID NO: 2605323 - RNA, 19 nt, Homo sapiens
  misc_RNA (1)...(19): siRNA sense strand
caucagguguggaggugga

SEQ ID NO: 2605324 - RNA, 19 nt, Homo sapiens
  misc_RNA (1)...(19): siRNA sense strand
ucugggaagaggaggaaga

SEQ ID NO: 2605325 - RNA, 19 nt, Homo sapiens
  misc_RNA (1)...(19): siRNA sense strand
ggguagaguucgaggcucc

SEQ ID NO: 2605326 - RNA, 19 nt, Homo sapiens
  misc_RNA (1)...(19): siRNA sense strand
guguggagguggagagcag

SEQ ID NO: 2605327 - RNA, 19 nt, Homo sapiens
  misc_RNA (1)...(19): siRNA sense strand
ccaccagccaagaggcaga

SEQ ID NO: 2605328 - RNA, 19 nt, Homo sapiens
  misc_RNA (1)...(19): siRNA sense strand
aggaggagagggagaagga

SEQ ID NO: 2605329 - RNA, 19 nt, Homo sapiens
  misc_RNA (1)...(19): siRNA sense strand
gcgaagagaaugaagaguc

SEQ ID NO: 2605330 - RNA, 19 nt, Homo sapiens
  misc_RNA (1)...(19): siRNA sense strand
gaggagagggagaaggaag

SEQ ID NO: 2605331 - RNA, 19 nt, Homo sapiens
  misc_RNA (1)...(19): siRNA sense strand
aggaagagcugaaugacuc

SEQ ID NO: 2605332 - RNA, 19 nt, Homo sapiens
  misc_RNA (1)...(19): siRNA sense strand
acauagacugugagguguu

SEQ ID NO: 2605333 - RNA, 19 nt, Homo sapiens
  misc_RNA (1)...(19): siRNA sense strand
cgaggaagccacugcagga

SEQ ID NO: 2605334 - RNA, 19 nt, Homo sapiens
  misc_RNA (1)...(19): siRNA sense strand
ucaugacacuggugggcga

SEQ ID NO: 2605335 - RNA, 19 nt, Homo sapiens
  misc_RNA (1)...(19): siRNA sense strand
gcgagaaggagcagcaccu

SEQ ID NO: 2605336 - RNA, 19 nt, Homo sapiens
  misc_RNA (1)...(19): siRNA sense strand
cuguuagggcugaagaaua

SEQ ID NO: 2605337 - RNA, 19 nt, Homo sapiens
  misc_RNA (1)...(19): siRNA sense strand
uggagauggacaaggaaga

SEQ ID NO: 2605338 - RNA, 19 nt, Homo sapiens
  misc_RNA (1)...(19): siRNA sense strand
cugagaagggccuguacaa

SEQ ID NO: 2605339 - RNA, 19 nt, Homo sapiens
  misc_RNA (1)...(19): siRNA sense strand
uggaaaggcuguuggcauc

SEQ ID NO: 2605340 - RNA, 19 nt, Homo sapiens
  misc_RNA (1)...(19): siRNA sense strand
ggauucuggagauggacaa

SEQ ID NO: 2605341 - RNA, 19 nt, Homo sapiens
  misc_RNA (1)...(19): siRNA sense strand
agauggacaaggaagagaa

SEQ ID NO: 2605342 - RNA, 19 nt, Homo sapiens
  misc_RNA (1)...(19): siRNA sense strand
auggaaaggcuguuggcau

SEQ ID NO: 2605343 - RNA, 19 nt, Homo sapiens
  misc_RNA (1)...(19): siRNA sense strand
aaacaaagucccugagcag

SEQ ID NO: 2605344 - RNA, 19 nt, Homo sapiens
  misc_RNA (1)...(19): siRNA sense strand
gcaaguaucaggaggacuc

SEQ ID NO: 2605345 - RNA, 19 nt, Homo sapiens
  misc_RNA (1)...(19): siRNA sense strand
gaaacaaagucccugagca

SEQ ID NO: 2605346 - RNA, 19 nt, Homo sapiens
  misc_RNA (1)...(19): siRNA sense strand
gcgacuaugaggagcagca

SEQ ID NO: 2605347 - RNA, 19 nt, Homo sapiens
  misc_RNA (1)...(19): siRNA sense strand
ccgaacagggcuuggcaaa

SEQ ID NO: 2605348 - RNA, 19 nt, Homo sapiens
  misc_RNA (1)...(19): siRNA sense strand
augcagaacuagagcgcuu

SEQ ID NO: 2605349 - RNA, 19 nt, Homo sapiens
  misc_RNA (1)...(19): siRNA sense strand
ugaugaagcacaaggguca

SEQ ID NO: 2605350 - RNA, 19 nt, Homo sapiens
  misc_RNA (1)...(19): siRNA sense strand
gugucaugccucaaagaaa

SEQ ID NO: 2605351 - RNA, 19 nt, Homo sapiens
  misc_RNA (1)...(19): siRNA sense strand
guggaggccuuaagggaga

SEQ ID NO: 2605352 - RNA, 19 nt, Homo sapiens
  misc_RNA (1)...(19): siRNA sense strand
guguugaggcugcuggaaa

SEQ ID NO: 2605353 - RNA, 19 nt, Homo sapiens
  misc_RNA (1)...(19): siRNA sense strand
cgugaaaccccaagggauu

SEQ ID NO: 2605354 - RNA, 19 nt, Homo sapiens
  misc_RNA (1)...(19): siRNA sense strand
agaagaaagcccugaucau

SEQ ID NO: 2605355 - RNA, 19 nt, Homo sapiens
  misc_RNA (1)...(19): siRNA sense strand
acgcgugccgagaggaaua

SEQ ID NO: 2605356 - RNA, 19 nt, Homo sapiens
  misc_RNA (1)...(19): siRNA sense strand
cauccagacucuagaggca

SEQ ID NO: 2605357 - RNA, 19 nt, Homo sapiens
  misc_RNA (1)...(19): siRNA sense strand
gguuagauguugaagaggu

SEQ ID NO: 2605358 - RNA, 19 nt, Homo sapiens
  misc_RNA (1)...(19): siRNA sense strand
ccaaagaggcuuaggucag

SEQ ID NO: 2605359 - RNA, 19 nt, Homo sapiens
  misc_RNA (1)...(19): siRNA sense strand
aggucagacuguucagcaa

SEQ ID NO: 2605360 - RNA, 19 nt, Homo sapiens
  misc_RNA (1)...(19): siRNA sense strand
ccgcaaguuagaacagcua

SEQ ID NO: 2605361 - RNA, 19 nt, Homo sapiens
  misc_RNA (1)...(19): siRNA sense strand
cuugaacaucugugaagaa

SEQ ID NO: 2605362 - RNA, 19 nt, Homo sapiens
  misc_RNA (1)...(19): siRNA sense strand
uggugguggacgugggcaa

SEQ ID NO: 2605363 - RNA, 19 nt, Homo sapiens
  misc_RNA (1)...(19): siRNA sense strand
gcaaguuagaacagcuaga

SEQ ID NO: 2605364 - RNA, 19 nt, Homo sapiens
  misc_RNA (1)...(19): siRNA sense strand
gccauauggaagugugcua

SEQ ID NO: 2605365 - RNA, 19 nt, Homo sapiens
  misc_RNA (1)...(19): siRNA sense strand
ccaaggaagaaaagcaauu

SEQ ID NO: 2605366 - RNA, 19 nt, Homo sapiens
  misc_RNA (1)...(19): siRNA sense strand
gcugcuggaaacagugaua

SEQ ID NO: 2605367 - RNA, 19 nt, Homo sapiens
  misc_RNA (1)...(19): siRNA sense strand
caaccguguaucuggacaa

SEQ ID NO: 2605368 - RNA, 19 nt, Homo sapiens
  misc_RNA (1)...(19): siRNA sense strand
agaaggugaaggaggcaga

SEQ ID NO: 2605369 - RNA, 19 nt, Homo sapiens
  misc_RNA (1)...(19): siRNA sense strand
ggucauagugcacccggaa

SEQ ID NO: 2605370 - RNA, 19 nt, Homo sapiens
  misc_RNA (1)...(19): siRNA sense strand
cggugaucucuguguggaa

SEQ ID NO: 2605371 - RNA, 19 nt, Homo sapiens
  misc_RNA (1)...(19): siRNA sense strand
ccguguaucuggacaaacu

SEQ ID NO: 2605372 - RNA, 19 nt, Homo sapiens
  misc_RNA (1)...(19): siRNA sense strand
agaacagggccuuggagga

SEQ ID NO: 2605373 - RNA, 19 nt, Homo sapiens
  misc_RNA (1)...(19): siRNA sense strand
agacuuugagcaagaccaa

SEQ ID NO: 2605374 - RNA, 19 nt, Homo sapiens
  misc_RNA (1)...(19): siRNA sense strand
cgccaaacccuguugcaga

SEQ ID NO: 2605375 - RNA, 19 nt, Homo sapiens
  misc_RNA (1)...(19): siRNA sense strand
aguccauugcugagggcau

SEQ ID NO: 2605376 - RNA, 19 nt, Homo sapiens
  misc_RNA (1)...(19): siRNA sense strand
aaauaaaguccuugcaggu

SEQ ID NO: 2605377 - RNA, 19 nt, Homo sapiens
  misc_RNA (1)...(19): siRNA sense strand
gcguauaguacaugauaau

SEQ ID NO: 2605378 - RNA, 19 nt, Homo sapiens
  misc_RNA (1)...(19): siRNA sense strand
ugaagagagcggagaggaa

SEQ ID NO: 2605379 - RNA, 19 nt, Homo sapiens
  misc_RNA (1)...(19): siRNA sense strand
aguaggagcuccaggguga

SEQ ID NO: 2605380 - RNA, 19 nt, Homo sapiens
  misc_RNA (1)...(19): siRNA sense strand
ccauuaugauagugagcau

SEQ ID NO: 2605381 - RNA, 19 nt, Homo sapiens
  misc_RNA (1)...(19): siRNA sense strand
agaugaugaccuaaagaaa

SEQ ID NO: 2605382 - RNA, 19 nt, Homo sapiens
  misc_RNA (1)...(19): siRNA sense strand
aggaagaugaugaccuaaa

SEQ ID NO: 2605383 - RNA, 19 nt, Homo sapiens
  misc_RNA (1)...(19): siRNA sense strand
cagaggaaacccaggaaaa

SEQ ID NO: 2605384 - RNA, 19 nt, Homo sapiens
  misc_RNA (1)...(19): siRNA sense strand
ccgaagaggcugaggagcu

SEQ ID NO: 2605385 - RNA, 19 nt, Homo sapiens
  misc_RNA (1)...(19): siRNA sense strand
aaacacaagaagaagagaa

SEQ ID NO: 2605386 - RNA, 19 nt, Homo sapiens
  misc_RNA (1)...(19): siRNA sense strand
agaaagaaguugcagagca

SEQ ID NO: 2605387 - RNA, 19 nt, Homo sapiens
  misc_RNA (1)...(19): siRNA sense strand
gugugaagaacaugccaaa

SEQ ID NO: 2605388 - RNA, 19 nt, Homo sapiens
  misc_RNA (1)...(19): siRNA sense strand
guggaaccgugaaggguga

SEQ ID NO: 2605389 - RNA, 19 nt, Homo sapiens
  misc_RNA (1)...(19): siRNA sense strand
gauaauuucuugagaggag

SEQ ID NO: 2605390 - RNA, 19 nt, Homo sapiens
  misc_RNA (1)...(19): siRNA sense strand
gacacguucuggaggacaa

SEQ ID NO: 2605391 - RNA, 19 nt, Homo sapiens
  misc_RNA (1)...(19): siRNA sense strand
ccacguuggccuugaagau

SEQ ID NO: 2605392 - RNA, 19 nt, Homo sapiens
  misc_RNA (1)...(19): siRNA sense strand
agagagagacagagauuuu

SEQ ID NO: 2605393 - RNA, 19 nt, Homo sapiens
  misc_RNA (1)...(19): siRNA sense strand
gugagaaagaaguugcaga

SEQ ID NO: 2605394 - RNA, 19 nt, Homo sapiens
  misc_RNA (1)...(19): siRNA sense strand
cgccagagagagacagaga

SEQ ID NO: 2605395 - RNA, 19 nt, Homo sapiens
  misc_RNA (1)...(19): siRNA sense strand
cagaaacaucaguuggaca

SEQ ID NO: 2605396 - RNA, 19 nt, Homo sapiens
  misc_RNA (1)...(19): siRNA sense strand
ugacauuacacaucagaca

SEQ ID NO: 2605397 - RNA, 19 nt, Homo sapiens
  misc_RNA (1)...(19): siRNA sense strand
aauugaaccaggaggacuu

SEQ ID NO: 2605398 - RNA, 19 nt, Homo sapiens
  misc_RNA (1)...(19): siRNA sense strand
gaagagaaggcguggaccu

SEQ ID NO: 2605399 - RNA, 19 nt, Homo sapiens
  misc_RNA (1)...(19): siRNA sense strand
gagaggaaccagaggacuc

SEQ ID NO: 2605400 - RNA, 19 nt, Homo sapiens
  misc_RNA (1)...(19): siRNA sense strand
cgggaaacccucagauauc

SEQ ID NO: 2605401 - RNA, 19 nt, Homo sapiens
  misc_RNA (1)...(19): siRNA sense strand
ccggcauacguuuaggaaa

SEQ ID NO: 2605402 - RNA, 19 nt, Homo sapiens
  misc_RNA (1)...(19): siRNA sense strand
uggaaacugaauuggaaga

SEQ ID NO: 2605403 - RNA, 19 nt, Homo sapiens
  misc_RNA (1)...(19): siRNA sense strand
cgggcagaaucucgucaaa

SEQ ID NO: 2605404 - RNA, 19 nt, Homo sapiens
  misc_RNA (1)...(19): siRNA sense strand
ccaaguuugcagauggaca

SEQ ID NO: 2605405 - RNA, 19 nt, Homo sapiens
  misc_RNA (1)...(19): siRNA sense strand
uggaauugaaccaggagga

SEQ ID NO: 2605406 - RNA, 19 nt, Homo sapiens
  misc_RNA (1)...(19): siRNA sense strand
guaaagaaccagaaugcac

SEQ ID NO: 2605407 - RNA, 19 nt, Homo sapiens
  misc_RNA (1)...(19): siRNA sense strand
cagcaauacagcagugauc

SEQ ID NO: 2605408 - RNA, 19 nt, Homo sapiens
  misc_RNA (1)...(19): siRNA sense strand
cugaauuggaagacccauu

SEQ ID NO: 2605409 - RNA, 19 nt, Homo sapiens
  misc_RNA (1)...(19): siRNA sense strand
gaguugucagauagaggaa

SEQ ID NO: 2605410 - RNA, 19 nt, Homo sapiens
  misc_RNA (1)...(19): siRNA sense strand
ccuugagccgagaggugaa

SEQ ID NO: 2605411 - RNA, 19 nt, Homo sapiens
  misc_RNA (1)...(19): siRNA sense strand
cacacacacuauagcacaa

SEQ ID NO: 2605412 - RNA, 19 nt, Homo sapiens
  misc_RNA (1)...(19): siRNA sense strand
caguaaagaaccagaaugc

SEQ ID NO: 2605413 - RNA, 19 nt, Homo sapiens
  misc_RNA (1)...(19): siRNA sense strand
gugaacagugcgcuaacaa

SEQ ID NO: 2605414 - RNA, 19 nt, Homo sapiens
  misc_RNA (1)...(19): siRNA sense strand
ucaccgaguuugaggggaa

SEQ ID NO: 2605415 - RNA, 19 nt, Homo sapiens
  misc_RNA (1)...(19): siRNA sense strand
aggaauuggucuggaacuu

SEQ ID NO: 2605416 - RNA, 19 nt, Homo sapiens
  misc_RNA (1)...(19): siRNA sense strand
aaguggacgugcuggugaa

SEQ ID NO: 2605417 - RNA, 19 nt, Homo sapiens
  misc_RNA (1)...(19): siRNA sense strand
gugaugagucgguggccca

SEQ ID NO: 2605418 - RNA, 19 nt, Homo sapiens
  misc_RNA (1)...(19): siRNA sense strand
ucuaaagagaucagagaaa

SEQ ID NO: 2605419 - RNA, 19 nt, Homo sapiens
  misc_RNA (1)...(19): siRNA sense strand
aggaggaggaggagguaau

SEQ ID NO: 2605420 - RNA, 19 nt, Homo sapiens
  misc_RNA (1)...(19): siRNA sense strand
ccuuaagcauucagcagaa

SEQ ID NO: 2605421 - RNA, 19 nt, Homo sapiens
  misc_RNA (1)...(19): siRNA sense strand
auacagaaggaguggguca

SEQ ID NO: 2605422 - RNA, 19 nt, Homo sapiens
  misc_RNA (1)...(19): siRNA sense strand
ucggauugggacagagaaa

SEQ ID NO: 2605423 - RNA, 19 nt, Homo sapiens
  misc_RNA (1)...(19): siRNA sense strand
uugaagaaacugaagagaa

SEQ ID NO: 2605424 - RNA, 19 nt, Homo sapiens
  misc_RNA (1)...(19): siRNA sense strand
cggcagugcucuugugcga

SEQ ID NO: 2605425 - RNA, 19 nt, Homo sapiens
  misc_RNA (1)...(19): siRNA sense strand
gcuuccggguggagaguuu

SEQ ID NO: 2605426 - RNA, 19 nt, Homo sapiens
  misc_RNA (1)...(19): siRNA sense strand
ggaagauugaccagaggau

SEQ ID NO: 2605427 - RNA, 19 nt, Homo sapiens
  misc_RNA (1)...(19): siRNA sense strand
aggaggaggaggaggagga

SEQ ID NO: 2605428 - RNA, 19 nt, Homo sapiens
  misc_RNA (1)...(19): siRNA sense strand
agauggaggaggaggagga

SEQ ID NO: 2605429 - RNA, 19 nt, Homo sapiens
  misc_RNA (1)...(19): siRNA sense strand
ccacaagaggaagcagaaa

SEQ ID NO: 2605430 - RNA, 19 nt, Homo sapiens
  misc_RNA (1)...(19): siRNA sense strand
uggaggaggaggaggagga

SEQ ID NO: 2605431 - RNA, 19 nt, Homo sapiens
  misc_RNA (1)...(19): siRNA sense strand
aagcacggucaguaggaua

SEQ ID NO: 2605432 - RNA, 19 nt, Homo sapiens
  misc_RNA (1)...(19): siRNA sense strand
gcucauuauucccagccaa

SEQ ID NO: 2605433 - RNA, 19 nt, Homo sapiens
  misc_RNA (1)...(19): siRNA sense strand
acaagaggaggaaggaaga

SEQ ID NO: 2605434 - RNA, 19 nt, Homo sapiens
  misc_RNA (1)...(19): siRNA sense strand
aggagauggaggaggagga

SEQ ID NO: 2605435 - RNA, 19 nt, Homo sapiens
  misc_RNA (1)...(19): siRNA sense strand
cauuugaauauguugggaa

SEQ ID NO: 2605436 - RNA, 19 nt, Homo sapiens
  misc_RNA (1)...(19): siRNA sense strand
cagauuucgcuuugaugaa

SEQ ID NO: 2605437 - RNA, 19 nt, Homo sapiens
  misc_RNA (1)...(19): siRNA sense strand
uggaauucccucaggagau

SEQ ID NO: 2605438 - RNA, 19 nt, Homo sapiens
  misc_RNA (1)...(19): siRNA sense strand
ucacaguaaacgaccacaa

SEQ ID NO: 2605439 - RNA, 19 nt, Homo sapiens
  misc_RNA (1)...(19): siRNA sense strand
acagagaaaucaagaggac

SEQ ID NO: 2605440 - RNA, 19 nt, Homo sapiens
  misc_RNA (1)...(19): siRNA sense strand
guuagaauauguaagggca

SEQ ID NO: 2605441 - RNA, 19 nt, Homo sapiens
  misc_RNA (1)...(19): siRNA sense strand
ggguggagaguuuguucua

SEQ ID NO: 2605442 - RNA, 19 nt, Homo sapiens
  misc_RNA (1)...(19): siRNA sense strand
acugaagagaaaugguuau

SEQ ID NO: 2605443 - RNA, 19 nt, Homo sapiens
  misc_RNA (1)...(19): siRNA sense strand
agcaaauugucacaguaaa

SEQ ID NO: 2605444 - RNA, 19 nt, Homo sapiens
  misc_RNA (1)...(19): siRNA sense strand
cucaggagauggaggagga

SEQ ID NO: 2605445 - RNA, 19 nt, Homo sapiens
  misc_RNA (1)...(19): siRNA sense strand
augcaaccaucuaaagaga

SEQ ID NO: 2605446 - RNA, 19 nt, Homo sapiens
  misc_RNA (1)...(19): siRNA sense strand
uuugaaacuuacucggauu

SEQ ID NO: 2605447 - RNA, 19 nt, Homo sapiens
  misc_RNA (1)...(19): siRNA sense strand
agagaaaucaagaggacag

SEQ ID NO: 2605448 - RNA, 19 nt, Homo sapiens
  misc_RNA (1)...(19): siRNA sense strand
aaaccuucuucuuggugaa

SEQ ID NO: 2605449 - RNA, 19 nt, Homo sapiens
  misc_RNA (1)...(19): siRNA sense strand
gguuaucuucacuggaaaa

SEQ ID NO: 2605450 - RNA, 19 nt, Homo sapiens
  misc_RNA (1)...(19): siRNA sense strand
acaagaggaagcagaaagu

SEQ ID NO: 2605451 - RNA, 19 nt, Homo sapiens
  misc_RNA (1)...(19): siRNA sense strand
cuuguauacaugcuagaaa

SEQ ID NO: 2605452 - RNA, 19 nt, Homo sapiens
  misc_RNA (1)...(19): siRNA sense strand
ggagaaagcuauugcacag

SEQ ID NO: 2605453 - RNA, 19 nt, Homo sapiens
  misc_RNA (1)...(19): siRNA sense strand
gcugagaagcugauggagu

SEQ ID NO: 2605454 - RNA, 19 nt, Homo sapiens
  misc_RNA (1)...(19): siRNA sense strand
ggguaaugacgcugagaag

SEQ ID NO: 2605455 - RNA, 19 nt, Homo sapiens
  misc_RNA (1)...(19): siRNA sense strand
aggaggaacucgaggagcu

SEQ ID NO: 2605456 - RNA, 19 nt, Homo sapiens
  misc_RNA (1)...(19): siRNA sense strand
ucaacaucacagagggaga

SEQ ID NO: 2605457 - RNA, 19 nt, Homo sapiens
  misc_RNA (1)...(19): siRNA sense strand
gcucagaggaggaacucga

SEQ ID NO: 2605458 - RNA, 19 nt, Homo sapiens
  misc_RNA (1)...(19): siRNA sense strand
augugaggauugagcugaa

SEQ ID NO: 2605459 - RNA, 19 nt, Homo sapiens
  misc_RNA (1)...(19): siRNA sense strand
gcacagaacgcagugggua

SEQ ID NO: 2605460 - RNA, 19 nt, Homo sapiens
  misc_RNA (1)...(19): siRNA sense strand
cgacacccacagaggaaaa

SEQ ID NO: 2605461 - RNA, 19 nt, Homo sapiens
  misc_RNA (1)...(19): siRNA sense strand
ugcugguguugcugaaaua

SEQ ID NO: 2605462 - RNA, 19 nt, Homo sapiens
  misc_RNA (1)...(19): siRNA sense strand
guucaacaucacagaggga

SEQ ID NO: 2605463 - RNA, 19 nt, Homo sapiens
  misc_RNA (1)...(19): siRNA sense strand
cgguggagucugaaagauc

SEQ ID NO: 2605464 - RNA, 19 nt, Homo sapiens
  misc_RNA (1)...(19): siRNA sense strand
ccagugugguugugccuga

SEQ ID NO: 2605465 - RNA, 19 nt, Homo sapiens
  misc_RNA (1)...(19): siRNA sense strand
cagaaguagugcagggaga

SEQ ID NO: 2605466 - RNA, 19 nt, Homo sapiens
  misc_RNA (1)...(19): siRNA sense strand
ggaaagagcuacuugcuga

SEQ ID NO: 2605467 - RNA, 19 nt, Homo sapiens
  misc_RNA (1)...(19): siRNA sense strand
acccgaaacccuaggaaga

SEQ ID NO: 2605468 - RNA, 19 nt, Homo sapiens
  misc_RNA (1)...(19): siRNA sense strand
acaagaaacuggugguggu

SEQ ID NO: 2605469 - RNA, 19 nt, Homo sapiens
  misc_RNA (1)...(19): siRNA sense strand
gugaccaauuacugggaga

SEQ ID NO: 2605470 - RNA, 19 nt, Homo sapiens
  misc_RNA (1)...(19): siRNA sense strand
ccgcgcacuuugacggcaa

SEQ ID NO: 2605471 - RNA, 19 nt, Homo sapiens
  misc_RNA (1)...(19): siRNA sense strand
gcaaaggggagguggagga

SEQ ID NO: 2605472 - RNA, 19 nt, Homo sapiens
  misc_RNA (1)...(19): siRNA sense strand
gagaacaucaagaagcuga

SEQ ID NO: 2605473 - RNA, 19 nt, Homo sapiens
  misc_RNA (1)...(19): siRNA sense strand
gaagcugacggcagggaga

SEQ ID NO: 2605474 - RNA, 19 nt, Homo sapiens
  misc_RNA (1)...(19): siRNA sense strand
agaaagccccagacggaaa

SEQ ID NO: 2605475 - RNA, 19 nt, Homo sapiens
  misc_RNA (1)...(19): siRNA sense strand
uguauuaugucuuggcaga

SEQ ID NO: 2605476 - RNA, 19 nt, Homo sapiens
  misc_RNA (1)...(19): siRNA sense strand
ggcaggaagucauuggcuu

SEQ ID NO: 2605477 - RNA, 19 nt, Homo sapiens
  misc_RNA (1)...(19): siRNA sense strand
cugggaagguggaagaaaa

SEQ ID NO: 2605478 - RNA, 19 nt, Homo sapiens
  misc_RNA (1)...(19): siRNA sense strand
cagacaccuggaagggaaa

SEQ ID NO: 2605479 - RNA, 19 nt, Homo sapiens
  misc_RNA (1)...(19): siRNA sense strand
caucaaacaacauaagcca

SEQ ID NO: 2605480 - RNA, 19 nt, Homo sapiens
  misc_RNA (1)...(19): siRNA sense strand
gagacuugggagaaccuaa

SEQ ID NO: 2605481 - RNA, 19 nt, Homo sapiens
  misc_RNA (1)...(19): siRNA sense strand
uggcguugugugugggauu

SEQ ID NO: 2605482 - RNA, 19 nt, Homo sapiens
  misc_RNA (1)...(19): siRNA sense strand
ucgcagaagccuaaggaca

SEQ ID NO: 2605483 - RNA, 19 nt, Homo sapiens
  misc_RNA (1)...(19): siRNA sense strand
ccaacaaguucaugaccga

SEQ ID NO: 2605484 - RNA, 19 nt, Homo sapiens
  misc_RNA (1)...(19): siRNA sense strand
gcagaucaucaaagggaga

SEQ ID NO: 2605485 - RNA, 19 nt, Homo sapiens
  misc_RNA (1)...(19): siRNA sense strand
uggagagggaagaguggaa

SEQ ID NO: 2605486 - RNA, 19 nt, Homo sapiens
  misc_RNA (1)...(19): siRNA sense strand
gagagggaagaguggaaau

SEQ ID NO: 2605487 - RNA, 19 nt, Homo sapiens
  misc_RNA (1)...(19): siRNA sense strand
uggugaaacgugaugaauu

SEQ ID NO: 2605488 - RNA, 19 nt, Homo sapiens
  misc_RNA (1)...(19): siRNA sense strand
ccacaagagaguuggcugu

SEQ ID NO: 2605489 - RNA, 19 nt, Homo sapiens
  misc_RNA (1)...(19): siRNA sense strand
ugauaugauucgucgcaga

SEQ ID NO: 2605490 - RNA, 19 nt, Homo sapiens
  misc_RNA (1)...(19): siRNA sense strand
gagcaaucaagcagaucau

SEQ ID NO: 2605491 - RNA, 19 nt, Homo sapiens
  misc_RNA (1)...(19): siRNA sense strand
gcaucuuggugaaacguga

SEQ ID NO: 2605492 - RNA, 19 nt, Homo sapiens
  misc_RNA (1)...(19): siRNA sense strand
uuguaaagaaugacgacau

SEQ ID NO: 2605493 - RNA, 19 nt, Homo sapiens
  misc_RNA (1)...(19): siRNA sense strand
uggacuggcugacggagaa

SEQ ID NO: 2605494 - RNA, 19 nt, Homo sapiens
  misc_RNA (1)...(19): siRNA sense strand
gagacaugccccagaaaga

SEQ ID NO: 2605495 - RNA, 19 nt, Homo sapiens
  misc_RNA (1)...(19): siRNA sense strand
ccucagagauaucgagcag

SEQ ID NO: 2605496 - RNA, 19 nt, Homo sapiens
  misc_RNA (1)...(19): siRNA sense strand
cauacacagaauugggaga

SEQ ID NO: 2605497 - RNA, 19 nt, Homo sapiens
  misc_RNA (1)...(19): siRNA sense strand
ccagcgaggagguggaugu

SEQ ID NO: 2605498 - RNA, 19 nt, Homo sapiens
  misc_RNA (1)...(19): siRNA sense strand
cgcgaaagcggcugcucaa

SEQ ID NO: 2605499 - RNA, 19 nt, Homo sapiens
  misc_RNA (1)...(19): siRNA sense strand
cucccuaauaacagagaau

SEQ ID NO: 2605500 - RNA, 19 nt, Homo sapiens
  misc_RNA (1)...(19): siRNA sense strand
ggacaagaaaacugggaaa

SEQ ID NO: 2605501 - RNA, 19 nt, Homo sapiens
  misc_RNA (1)...(19): siRNA sense strand
aaguaggagccgagauaaa

SEQ ID NO: 2605502 - RNA, 19 nt, Homo sapiens
  misc_RNA (1)...(19): siRNA sense strand
caguaaaggaaaaggauga

SEQ ID NO: 2605503 - RNA, 19 nt, Homo sapiens
  misc_RNA (1)...(19): siRNA sense strand
ccuaagaagcacagcagca

SEQ ID NO: 2605504 - RNA, 19 nt, Homo sapiens
  misc_RNA (1)...(19): siRNA sense strand
agauaaaucccauaggcau

SEQ ID NO: 2605505 - RNA, 19 nt, Homo sapiens
  misc_RNA (1)...(19): siRNA sense strand
cuaaggacucagaagaaau

SEQ ID NO: 2605506 - RNA, 19 nt, Homo sapiens
  misc_RNA (1)...(19): siRNA sense strand
aggagaaacccaagcacga

SEQ ID NO: 2605507 - RNA, 19 nt, Homo sapiens
  misc_RNA (1)...(19): siRNA sense strand
acauuaaucucgugcggga

SEQ ID NO: 2605508 - RNA, 19 nt, Homo sapiens
  misc_RNA (1)...(19): siRNA sense strand
ugaagaaggagaaacccaa

SEQ ID NO: 2605509 - RNA, 19 nt, Homo sapiens
  misc_RNA (1)...(19): siRNA sense strand
aacccaagcacgagcacaa

SEQ ID NO: 2605510 - RNA, 19 nt, Homo sapiens
  misc_RNA (1)...(19): siRNA sense strand
gcaagaacucagagagagc

SEQ ID NO: 2605511 - RNA, 19 nt, Homo sapiens
  misc_RNA (1)...(19): siRNA sense strand
gggagcugaagaaggagaa

SEQ ID NO: 2605512 - RNA, 19 nt, Homo sapiens
  misc_RNA (1)...(19): siRNA sense strand
gagauaaaucccauaggca

SEQ ID NO: 2605513 - RNA, 19 nt, Homo sapiens
  misc_RNA (1)...(19): siRNA sense strand
agaaauagaugaugugacc

SEQ ID NO: 2605514 - RNA, 19 nt, Homo sapiens
  misc_RNA (1)...(19): siRNA sense strand
ugaaugaacgagaggucca

SEQ ID NO: 2605515 - RNA, 19 nt, Homo sapiens
  misc_RNA (1)...(19): siRNA sense strand
aagaccaggauuagggaca

SEQ ID NO: 2605516 - RNA, 19 nt, Homo sapiens
  misc_RNA (1)...(19): siRNA sense strand
guauaaugggcguucugaa

SEQ ID NO: 2605517 - RNA, 19 nt, Homo sapiens
  misc_RNA (1)...(19): siRNA sense strand
uaugaagaccagaggagca

SEQ ID NO: 2605518 - RNA, 19 nt, Homo sapiens
  misc_RNA (1)...(19): siRNA sense strand
gauaagguguccuggcacu

SEQ ID NO: 2605519 - RNA, 19 nt, Homo sapiens
  misc_RNA (1)...(19): siRNA sense strand
gcacaauucuggccgucga

SEQ ID NO: 2605520 - RNA, 19 nt, Homo sapiens
  misc_RNA (1)...(19): siRNA sense strand
cugaagaaggagaaaccca

SEQ ID NO: 2605521 - RNA, 19 nt, Homo sapiens
  misc_RNA (1)...(19): siRNA sense strand
cuaaggugaagcugaucaa

SEQ ID NO: 2605522 - RNA, 19 nt, Homo sapiens
  misc_RNA (1)...(19): siRNA sense strand
acaaguacgaggagugcaa

SEQ ID NO: 2605523 - RNA, 19 nt, Homo sapiens
  misc_RNA (1)...(19): siRNA sense strand
cggacugcccacagauaaa

SEQ ID NO: 2605524 - RNA, 19 nt, Homo sapiens
  misc_RNA (1)...(19): siRNA sense strand
acugaagaccggcgagaau

SEQ ID NO: 2605525 - RNA, 19 nt, Homo sapiens
  misc_RNA (1)...(19): siRNA sense strand
auaagaugucucagggcaa

SEQ ID NO: 2605526 - RNA, 19 nt, Homo sapiens
  misc_RNA (1)...(19): siRNA sense strand
ggugcagcgaugaggaaga

SEQ ID NO: 2605527 - RNA, 19 nt, Homo sapiens
  misc_RNA (1)...(19): siRNA sense strand
ggacagaagaccacgcacu

SEQ ID NO: 2605528 - RNA, 19 nt, Homo sapiens
  misc_RNA (1)...(19): siRNA sense strand
agcaagaacuccagccuga

SEQ ID NO: 2605529 - RNA, 19 nt, Homo sapiens
  misc_RNA (1)...(19): siRNA sense strand
aggaagaccacgcggagga

SEQ ID NO: 2605530 - RNA, 19 nt, Homo sapiens
  misc_RNA (1)...(19): siRNA sense strand
ccaaggacacggagcacga

SEQ ID NO: 2605531 - RNA, 19 nt, Homo sapiens
  misc_RNA (1)...(19): siRNA sense strand
aggcgcugguucaggagaa

SEQ ID NO: 2605532 - RNA, 19 nt, Homo sapiens
  misc_RNA (1)...(19): siRNA sense strand
gugacaucgagaagcacaa

SEQ ID NO: 2605533 - RNA, 19 nt, Homo sapiens
  misc_RNA (1)...(19): siRNA sense strand
cauucacuuucaagaacaa

SEQ ID NO: 2605534 - RNA, 19 nt, Homo sapiens
  misc_RNA (1)...(19): siRNA sense strand
cuuucaagaacaaguguga

SEQ ID NO: 2605535 - RNA, 19 nt, Homo sapiens
  misc_RNA (1)...(19): siRNA sense strand
agagggaggagcagcaaaa

SEQ ID NO: 2605536 - RNA, 19 nt, Homo sapiens
  misc_RNA (1)...(19): siRNA sense strand
uguaacuaccagagguuca

SEQ ID NO: 2605537 - RNA, 19 nt, Homo sapiens
  misc_RNA (1)...(19): siRNA sense strand
gcaacgaaucaaauggcca

SEQ ID NO: 2605538 - RNA, 19 nt, Homo sapiens
  misc_RNA (1)...(19): siRNA sense strand
agugugacaucgagaagca

SEQ ID NO: 2605539 - RNA, 19 nt, Homo sapiens
  misc_RNA (1)...(19): siRNA sense strand
gggccaucaagcacgcaaa

SEQ ID NO: 2605540 - RNA, 19 nt, Homo sapiens
  misc_RNA (1)...(19): siRNA sense strand
acuuaagacuucugaggga

SEQ ID NO: 2605541 - RNA, 19 nt, Homo sapiens
  misc_RNA (1)...(19): siRNA sense strand
uggcugugcaugagaagaa

SEQ ID NO: 2605542 - RNA, 19 nt, Homo sapiens
  misc_RNA (1)...(19): siRNA sense strand
agaccaucuuuguccgaaa

SEQ ID NO: 2605543 - RNA, 19 nt, Homo sapiens
  misc_RNA (1)...(19): siRNA sense strand
gguucaacuuagcaaucaa

SEQ ID NO: 2605544 - RNA, 19 nt, Homo sapiens
  misc_RNA (1)...(19): siRNA sense strand
gagcacaguccauggcuga

SEQ ID NO: 2605545 - RNA, 19 nt, Homo sapiens
  misc_RNA (1)...(19): siRNA sense strand
guuugaugccuuuguggaa

SEQ ID NO: 2605546 - RNA, 19 nt, Homo sapiens
  misc_RNA (1)...(19): siRNA sense strand
aggcugaccaggagagacu

SEQ ID NO: 2605547 - RNA, 19 nt, Homo sapiens
  misc_RNA (1)...(19): siRNA sense strand
ggauauacccuuugccaug

SEQ ID NO: 2605548 - RNA, 19 nt, Homo sapiens
  misc_RNA (1)...(19): siRNA sense strand
agguuacacaugaagcaaa

SEQ ID NO: 2605549 - RNA, 19 nt, Homo sapiens
  misc_RNA (1)...(19): siRNA sense strand
gacaguucguguugggaca

SEQ ID NO: 2605550 - RNA, 19 nt, Homo sapiens
  misc_RNA (1)...(19): siRNA sense strand
auuuggagcuggaggauac

SEQ ID NO: 2605551 - RNA, 19 nt, Homo sapiens
  misc_RNA (1)...(19): siRNA sense strand
cuauaggcucuccaggaaa

SEQ ID NO: 2605552 - RNA, 19 nt, Homo sapiens
  misc_RNA (1)...(19): siRNA sense strand
uggugaggacacuggagua

SEQ ID NO: 2605553 - RNA, 19 nt, Homo sapiens
  misc_RNA (1)...(19): siRNA sense strand
acagaauuaacuuggcauu

SEQ ID NO: 2605554 - RNA, 19 nt, Homo sapiens
  misc_RNA (1)...(19): siRNA sense strand
acauauggaaagugagaaa

SEQ ID NO: 2605555 - RNA, 19 nt, Homo sapiens
  misc_RNA (1)...(19): siRNA sense strand
ccgaagagcuugaugagga

SEQ ID NO: 2605556 - RNA, 19 nt, Homo sapiens
  misc_RNA (1)...(19): siRNA sense strand
aagaaauggaacagaaaca

SEQ ID NO: 2605557 - RNA, 19 nt, Homo sapiens
  misc_RNA (1)...(19): siRNA sense strand
agaaggaguugcaagccaa

SEQ ID NO: 2605558 - RNA, 19 nt, Homo sapiens
  misc_RNA (1)...(19): siRNA sense strand
acuuggugcuugagaauca

SEQ ID NO: 2605559 - RNA, 19 nt, Homo sapiens
  misc_RNA (1)...(19): siRNA sense strand
aaacuuaacaggagccaga

SEQ ID NO: 2605560 - RNA, 19 nt, Homo sapiens
  misc_RNA (1)...(19): siRNA sense strand
ucaccgaagauguggccaa

SEQ ID NO: 2605561 - RNA, 19 nt, Homo sapiens
  misc_RNA (1)...(19): siRNA sense strand
gaacagaaacauagagagg

SEQ ID NO: 2605562 - RNA, 19 nt, Homo sapiens
  misc_RNA (1)...(19): siRNA sense strand
gagaagaacggauagcuga

SEQ ID NO: 2605563 - RNA, 19 nt, Homo sapiens
  misc_RNA (1)...(19): siRNA sense strand
agaagaacggauagcugaa

SEQ ID NO: 2605564 - RNA, 19 nt, Homo sapiens
  misc_RNA (1)...(19): siRNA sense strand
aagaaagcugcauuggaaa

SEQ ID NO: 2605565 - RNA, 19 nt, Homo sapiens
  misc_RNA (1)...(19): siRNA sense strand
agaaagcugcauuggaaaa

SEQ ID NO: 2605566 - RNA, 19 nt, Homo sapiens
  misc_RNA (1)...(19): siRNA sense strand
uagagauaauacaggcaga

SEQ ID NO: 2605567 - RNA, 19 nt, Homo sapiens
  misc_RNA (1)...(19): siRNA sense strand
cgcaaagagaagaaggagu

SEQ ID NO: 2605568 - RNA, 19 nt, Homo sapiens
  misc_RNA (1)...(19): siRNA sense strand
gggaaaagaaagcugcauu

SEQ ID NO: 2605569 - RNA, 19 nt, Homo sapiens
  misc_RNA (1)...(19): siRNA sense strand
ugcaaagccauguggaaga

SEQ ID NO: 2605570 - RNA, 19 nt, Homo sapiens
  misc_RNA (1)...(19): siRNA sense strand
ugcauauggcuuaggagaa

SEQ ID NO: 2605571 - RNA, 19 nt, Homo sapiens
  misc_RNA (1)...(19): siRNA sense strand
aagaaugacaagaagagga

SEQ ID NO: 2605572 - RNA, 19 nt, Homo sapiens
  misc_RNA (1)...(19): siRNA sense strand
agcuagacaguuagaaauu

SEQ ID NO: 2605573 - RNA, 19 nt, Homo sapiens
  misc_RNA (1)...(19): siRNA sense strand
cuguauguauaaagccauu

SEQ ID NO: 2605574 - RNA, 19 nt, Homo sapiens
  misc_RNA (1)...(19): siRNA sense strand
gcugaagcugaaauugaaa

SEQ ID NO: 2605575 - RNA, 19 nt, Homo sapiens
  misc_RNA (1)...(19): siRNA sense strand
aaauauuggcagcuagaca

SEQ ID NO: 2605576 - RNA, 19 nt, Homo sapiens
  misc_RNA (1)...(19): siRNA sense strand
aagaaggaguugcaagcca

SEQ ID NO: 2605577 - RNA, 19 nt, Homo sapiens
  misc_RNA (1)...(19): siRNA sense strand
cugugaagauauuguaaac

SEQ ID NO: 2605578 - RNA, 19 nt, Homo sapiens
  misc_RNA (1)...(19): siRNA sense strand
uggaacagaaacauagaga

SEQ ID NO: 2605579 - RNA, 19 nt, Homo sapiens
  misc_RNA (1)...(19): siRNA sense strand
aaagagacgggaaaagaaa

SEQ ID NO: 2605580 - RNA, 19 nt, Homo sapiens
  misc_RNA (1)...(19): siRNA sense strand
aagccaaaauucagggcau

SEQ ID NO: 2605581 - RNA, 19 nt, Homo sapiens
  misc_RNA (1)...(19): siRNA sense strand
augcauauggcuuaggaga

SEQ ID NO: 2605582 - RNA, 19 nt, Homo sapiens
  misc_RNA (1)...(19): siRNA sense strand
cccaagaaugacaagaaga

SEQ ID NO: 2605583 - RNA, 19 nt, Homo sapiens
  misc_RNA (1)...(19): siRNA sense strand
agaaacauagagaggaacu

SEQ ID NO: 2605584 - RNA, 19 nt, Homo sapiens
  misc_RNA (1)...(19): siRNA sense strand
acagagaagucgagggaag

SEQ ID NO: 2605585 - RNA, 19 nt, Homo sapiens
  misc_RNA (1)...(19): siRNA sense strand
ccucagaagaagauaccaa

SEQ ID NO: 2605586 - RNA, 19 nt, Homo sapiens
  misc_RNA (1)...(19): siRNA sense strand
gugugugguccaugggaaa

SEQ ID NO: 2605587 - RNA, 19 nt, Homo sapiens
  misc_RNA (1)...(19): siRNA sense strand
ccacagagaagucgaggga

SEQ ID NO: 2605588 - RNA, 19 nt, Homo sapiens
  misc_RNA (1)...(19): siRNA sense strand
agucgagggaagaggauca

SEQ ID NO: 2605589 - RNA, 19 nt, Homo sapiens
  misc_RNA (1)...(19): siRNA sense strand
agacacagaugguuggguu

SEQ ID NO: 2605590 - RNA, 19 nt, Homo sapiens
  misc_RNA (1)...(19): siRNA sense strand
cagcaaaagaggccaaaau

SEQ ID NO: 2605591 - RNA, 19 nt, Homo sapiens
  misc_RNA (1)...(19): siRNA sense strand
ggugugugguccaugggaa

SEQ ID NO: 2605592 - RNA, 19 nt, Homo sapiens
  misc_RNA (1)...(19): siRNA sense strand
agaaaagcaagaagggaga

SEQ ID NO: 2605593 - RNA, 19 nt, Homo sapiens
  misc_RNA (1)...(19): siRNA sense strand
aguaaagugcucugcccua

SEQ ID NO: 2605594 - RNA, 19 nt, Homo sapiens
  misc_RNA (1)...(19): siRNA sense strand
gcacagcaaaagaggccaa

SEQ ID NO: 2605595 - RNA, 19 nt, Homo sapiens
  misc_RNA (1)...(19): siRNA sense strand
cggacaaaacugaggauua

SEQ ID NO: 2605596 - RNA, 19 nt, Homo sapiens
  misc_RNA (1)...(19): siRNA sense strand
gcucaaggaauaagcgcaa

SEQ ID NO: 2605597 - RNA, 19 nt, Homo sapiens
  misc_RNA (1)...(19): siRNA sense strand
ugaagaaugagaaggacaa

SEQ ID NO: 2605598 - RNA, 19 nt, Homo sapiens
  misc_RNA (1)...(19): siRNA sense strand
ggucauauugauagagcuu

SEQ ID NO: 2605599 - RNA, 19 nt, Homo sapiens
  misc_RNA (1)...(19): siRNA sense strand
cgguauagggcucaaggaa

SEQ ID NO: 2605600 - RNA, 19 nt, Homo sapiens
  misc_RNA (1)...(19): siRNA sense strand
gaacggaacuuacaggaga

SEQ ID NO: 2605601 - RNA, 19 nt, Homo sapiens
  misc_RNA (1)...(19): siRNA sense strand
cugaagaaugagaaggaca

SEQ ID NO: 2605602 - RNA, 19 nt, Homo sapiens
  misc_RNA (1)...(19): siRNA sense strand
gauaagagcauuuccgaca

SEQ ID NO: 2605603 - RNA, 19 nt, Homo sapiens
  misc_RNA (1)...(19): siRNA sense strand
aggaguacaugaacagcaa

SEQ ID NO: 2605604 - RNA, 19 nt, Homo sapiens
  misc_RNA (1)...(19): siRNA sense strand
cugcugagacugagggcau

SEQ ID NO: 2605605 - RNA, 19 nt, Homo sapiens
  misc_RNA (1)...(19): siRNA sense strand
aaggagaggcugaagaaca

SEQ ID NO: 2605606 - RNA, 19 nt, Homo sapiens
  misc_RNA (1)...(19): siRNA sense strand
gcaccagcugggagaguuu

SEQ ID NO: 2605607 - RNA, 19 nt, Homo sapiens
  misc_RNA (1)...(19): siRNA sense strand
gaggauuaccuguggcuga

SEQ ID NO: 2605608 - RNA, 19 nt, Homo sapiens
  misc_RNA (1)...(19): siRNA sense strand
gaaucaggaaaguguggaa

SEQ ID NO: 2605609 - RNA, 19 nt, Homo sapiens
  misc_RNA (1)...(19): siRNA sense strand
ccgcaauccaacaaggaga

SEQ ID NO: 2605610 - RNA, 19 nt, Homo sapiens
  misc_RNA (1)...(19): siRNA sense strand
ggaacuuacaggagaucca

SEQ ID NO: 2605611 - RNA, 19 nt, Homo sapiens
  misc_RNA (1)...(19): siRNA sense strand
caauguugguugaguggga

SEQ ID NO: 2605612 - RNA, 19 nt, Homo sapiens
  misc_RNA (1)...(19): siRNA sense strand
gcauggaguuugucaggca

SEQ ID NO: 2605613 - RNA, 19 nt, Homo sapiens
  misc_RNA (1)...(19): siRNA sense strand
agaaagauagucaaggaga

SEQ ID NO: 2605614 - RNA, 19 nt, Homo sapiens
  misc_RNA (1)...(19): siRNA sense strand
agagaaugacggaaguaga

SEQ ID NO: 2605615 - RNA, 19 nt, Homo sapiens
  misc_RNA (1)...(19): siRNA sense strand
auggagagguggaaggcca

SEQ ID NO: 2605616 - RNA, 19 nt, Homo sapiens
  misc_RNA (1)...(19): siRNA sense strand
gauaaguuuacuagugaca

SEQ ID NO: 2605617 - RNA, 19 nt, Homo sapiens
  misc_RNA (1)...(19): siRNA sense strand
agugggagcaagugaaaca

SEQ ID NO: 2605618 - RNA, 19 nt, Homo sapiens
  misc_RNA (1)...(19): siRNA sense strand
ggaacaauacagaucccua

SEQ ID NO: 2605619 - RNA, 19 nt, Homo sapiens
  misc_RNA (1)...(19): siRNA sense strand
aguugaaccaaguguguuu

SEQ ID NO: 2605620 - RNA, 19 nt, Homo sapiens
  misc_RNA (1)...(19): siRNA sense strand
ggaccaugguaaaacaaau

SEQ ID NO: 2605621 - RNA, 19 nt, Homo sapiens
  misc_RNA (1)...(19): siRNA sense strand
ggaugagaaagauagucaa

SEQ ID NO: 2605622 - RNA, 19 nt, Homo sapiens
  misc_RNA (1)...(19): siRNA sense strand
ucggcauggcugaggagua

SEQ ID NO: 2605623 - RNA, 19 nt, Homo sapiens
  misc_RNA (1)...(19): siRNA sense strand
ucaaggaauaagcgcaaau

SEQ ID NO: 2605624 - RNA, 19 nt, Homo sapiens
  misc_RNA (1)...(19): siRNA sense strand
cgaguaucauaguggucau

SEQ ID NO: 2605625 - RNA, 19 nt, Homo sapiens
  misc_RNA (1)...(19): siRNA sense strand
ugguaaaacaaaugacaga

SEQ ID NO: 2605626 - RNA, 19 nt, Homo sapiens
  misc_RNA (1)...(19): siRNA sense strand
cguagggcccucaggaaca

SEQ ID NO: 2605627 - RNA, 19 nt, Homo sapiens
  misc_RNA (1)...(19): siRNA sense strand
aaggaauaagcgcaaauaa

SEQ ID NO: 2605628 - RNA, 19 nt, Homo sapiens
  misc_RNA (1)...(19): siRNA sense strand
ucucacaguuccagaagca

SEQ ID NO: 2605629 - RNA, 19 nt, Homo sapiens
  misc_RNA (1)...(19): siRNA sense strand
ucgauaugauucuugggaa

SEQ ID NO: 2605630 - RNA, 19 nt, Homo sapiens
  misc_RNA (1)...(19): siRNA sense strand
aguagaaagccuggaguca

SEQ ID NO: 2605631 - RNA, 19 nt, Homo sapiens
  misc_RNA (1)...(19): siRNA sense strand
acaagguacuggagcugau

SEQ ID NO: 2605632 - RNA, 19 nt, Homo sapiens
  misc_RNA (1)...(19): siRNA sense strand
ugacggaaguagaaagccu

SEQ ID NO: 2605633 - RNA, 19 nt, Homo sapiens
  misc_RNA (1)...(19): siRNA sense strand
gucgaagcucucuggauaa

SEQ ID NO: 2605634 - RNA, 19 nt, Homo sapiens
  misc_RNA (1)...(19): siRNA sense strand
agcaguuguuggaagacua

SEQ ID NO: 2605635 - RNA, 19 nt, Homo sapiens
  misc_RNA (1)...(19): siRNA sense strand
ucuugggaaacuagagaau

SEQ ID NO: 2605636 - RNA, 19 nt, Homo sapiens
  misc_RNA (1)...(19): siRNA sense strand
caaaguugcuucuguggca

SEQ ID NO: 2605637 - RNA, 19 nt, Homo sapiens
  misc_RNA (1)...(19): siRNA sense strand
ugugaaggacacugacauu

SEQ ID NO: 2605638 - RNA, 19 nt, Homo sapiens
  misc_RNA (1)...(19): siRNA sense strand
gagugaaguggcggacaaa

SEQ ID NO: 2605639 - RNA, 19 nt, Homo sapiens
  misc_RNA (1)...(19): siRNA sense strand
ccgcuucacagguaguuaa

SEQ ID NO: 2605640 - RNA, 19 nt, Homo sapiens
  misc_RNA (1)...(19): siRNA sense strand
gcgcugugugagugagcuu

SEQ ID NO: 2605641 - RNA, 19 nt, Homo sapiens
  misc_RNA (1)...(19): siRNA sense strand
cggcagaugucaaggcguc

SEQ ID NO: 2605642 - RNA, 19 nt, Homo sapiens
  misc_RNA (1)...(19): siRNA sense strand
gaaauuugcaucaggccca

SEQ ID NO: 2605643 - RNA, 19 nt, Homo sapiens
  misc_RNA (1)...(19): siRNA sense strand
cugacaagguacuggagcu

SEQ ID NO: 2605644 - RNA, 19 nt, Homo sapiens
  misc_RNA (1)...(19): siRNA sense strand
augcgaggcuggugcagau

SEQ ID NO: 2605645 - RNA, 19 nt, Homo sapiens
  misc_RNA (1)...(19): siRNA sense strand
aagaagaagaggagagagu

SEQ ID NO: 2605646 - RNA, 19 nt, Homo sapiens
  misc_RNA (1)...(19): siRNA sense strand
uggcaagugagguggaaga

SEQ ID NO: 2605647 - RNA, 19 nt, Homo sapiens
  misc_RNA (1)...(19): siRNA sense strand
cuucuaaaggacuuggaua

SEQ ID NO: 2605648 - RNA, 19 nt, Homo sapiens
  misc_RNA (1)...(19): siRNA sense strand
ccuaaaacacggaaagaca

SEQ ID NO: 2605649 - RNA, 19 nt, Homo sapiens
  misc_RNA (1)...(19): siRNA sense strand
uugcaaacuaugauggaau

SEQ ID NO: 2605650 - RNA, 19 nt, Homo sapiens
  misc_RNA (1)...(19): siRNA sense strand
uuguguugucagagaauaa

SEQ ID NO: 2605651 - RNA, 19 nt, Homo sapiens
  misc_RNA (1)...(19): siRNA sense strand
gaguaaaacagaugcauca

SEQ ID NO: 2605652 - RNA, 19 nt, Homo sapiens
  misc_RNA (1)...(19): siRNA sense strand
uucuaaaggacuuggauau

SEQ ID NO: 2605653 - RNA, 19 nt, Homo sapiens
  misc_RNA (1)...(19): siRNA sense strand
augaagaaggucuggcauu

SEQ ID NO: 2605654 - RNA, 19 nt, Homo sapiens
  misc_RNA (1)...(19): siRNA sense strand
agaguuaaugacugggaau

SEQ ID NO: 2605655 - RNA, 19 nt, Homo sapiens
  misc_RNA (1)...(19): siRNA sense strand
agaagaggagagaguaaaa

SEQ ID NO: 2605656 - RNA, 19 nt, Homo sapiens
  misc_RNA (1)...(19): siRNA sense strand
cauuacuacaggaagaaau

SEQ ID NO: 2605657 - RNA, 19 nt, Homo sapiens
  misc_RNA (1)...(19): siRNA sense strand
cagaugaagagcaugucaa

SEQ ID NO: 2605658 - RNA, 19 nt, Homo sapiens
  misc_RNA (1)...(19): siRNA sense strand
aguuaaugacugggaauau

SEQ ID NO: 2605659 - RNA, 19 nt, Homo sapiens
  misc_RNA (1)...(19): siRNA sense strand
gugagguggaagaagaaga

SEQ ID NO: 2605660 - RNA, 19 nt, Homo sapiens
  misc_RNA (1)...(19): siRNA sense strand
uggaagaagaagaggagag

SEQ ID NO: 2605661 - RNA, 19 nt, Homo sapiens
  misc_RNA (1)...(19): siRNA sense strand
gaaagaaauuuuggcgcua

SEQ ID NO: 2605662 - RNA, 19 nt, Homo sapiens
  misc_RNA (1)...(19): siRNA sense strand
aaagaguaccagagaccau

SEQ ID NO: 2605663 - RNA, 19 nt, Homo sapiens
  misc_RNA (1)...(19): siRNA sense strand
gcuacaacagugugaaacu

SEQ ID NO: 2605664 - RNA, 19 nt, Homo sapiens
  misc_RNA (1)...(19): siRNA sense strand
auggaaagggcacgagaca

SEQ ID NO: 2605665 - RNA, 19 nt, Homo sapiens
  misc_RNA (1)...(19): siRNA sense strand
ucugaaagucccucccaaa

SEQ ID NO: 2605666 - RNA, 19 nt, Homo sapiens
  misc_RNA (1)...(19): siRNA sense strand
uugucagagaauaagguua

SEQ ID NO: 2605667 - RNA, 19 nt, Homo sapiens
  misc_RNA (1)...(19): siRNA sense strand
aagugagguggaagaagaa

SEQ ID NO: 2605668 - RNA, 19 nt, Homo sapiens
  misc_RNA (1)...(19): siRNA sense strand
uugcuacaacagugugaaa

SEQ ID NO: 2605669 - RNA, 19 nt, Homo sapiens
  misc_RNA (1)...(19): siRNA sense strand
auaagaaacuggaugcauc

SEQ ID NO: 2605670 - RNA, 19 nt, Homo sapiens
  misc_RNA (1)...(19): siRNA sense strand
ccuacaaggcagagaaucu

SEQ ID NO: 2605671 - RNA, 19 nt, Homo sapiens
  misc_RNA (1)...(19): siRNA sense strand
ccguagaaaucaaggcugu

SEQ ID NO: 2605672 - RNA, 19 nt, Homo sapiens
  misc_RNA (1)...(19): siRNA sense strand
cgcuggugguggagaaauu

SEQ ID NO: 2605673 - RNA, 19 nt, Homo sapiens
  misc_RNA (1)...(19): siRNA sense strand
ucaugaacagcgagaagaa

SEQ ID NO: 2605674 - RNA, 19 nt, Homo sapiens
  misc_RNA (1)...(19): siRNA sense strand
uggaagaggaccaggagca

SEQ ID NO: 2605675 - RNA, 19 nt, Homo sapiens
  misc_RNA (1)...(19): siRNA sense strand
gggaggacauggaagagga

SEQ ID NO: 2605676 - RNA, 19 nt, Homo sapiens
  misc_RNA (1)...(19): siRNA sense strand
gcaucaggcuggaggaccu

SEQ ID NO: 2605677 - RNA, 19 nt, Homo sapiens
  misc_RNA (1)...(19): siRNA sense strand
acuacaacaaggaggauga

SEQ ID NO: 2605678 - RNA, 19 nt, Homo sapiens
  misc_RNA (1)...(19): siRNA sense strand
ggaaguuggugcacggcga

SEQ ID NO: 2605679 - RNA, 19 nt, Homo sapiens
  misc_RNA (1)...(19): siRNA sense strand
augacaagaagaaggaaaa

SEQ ID NO: 2605680 - RNA, 19 nt, Homo sapiens
  misc_RNA (1)...(19): siRNA sense strand
acaacaaggaggaugacau

SEQ ID NO: 2605681 - RNA, 19 nt, Homo sapiens
  misc_RNA (1)...(19): siRNA sense strand
ccuacauguuuguucgcaa

SEQ ID NO: 2605682 - RNA, 19 nt, Homo sapiens
  misc_RNA (1)...(19): siRNA sense strand
aggacauggaagaggacca

SEQ ID NO: 2605683 - RNA, 19 nt, Homo sapiens
  misc_RNA (1)...(19): siRNA sense strand
ccaacuacaacaaggagga

SEQ ID NO: 2605684 - RNA, 19 nt, Homo sapiens
  misc_RNA (1)...(19): siRNA sense strand
ccaacaagccagugacccu

SEQ ID NO: 2605685 - RNA, 19 nt, Homo sapiens
  misc_RNA (1)...(19): siRNA sense strand
acagcgaugacaagaagaa

SEQ ID NO: 2605686 - RNA, 19 nt, Homo sapiens
  misc_RNA (1)...(19): siRNA sense strand
cugccagcccagcaagaua

SEQ ID NO: 2605687 - RNA, 19 nt, Homo sapiens
  misc_RNA (1)...(19): siRNA sense strand
cuaucaacuuccaccagaa

SEQ ID NO: 2605688 - RNA, 19 nt, Homo sapiens
  misc_RNA (1)...(19): siRNA sense strand
ucacaaaucagcaucguca

SEQ ID NO: 2605689 - RNA, 19 nt, Homo sapiens
  misc_RNA (1)...(19): siRNA sense strand
gugcuaucugggagaauca

SEQ ID NO: 2605690 - RNA, 19 nt, Homo sapiens
  misc_RNA (1)...(19): siRNA sense strand
agcugugugcagaggauua

SEQ ID NO: 2605691 - RNA, 19 nt, Homo sapiens
  misc_RNA (1)...(19): siRNA sense strand
caucaggagcggugcccuu

SEQ ID NO: 2605692 - RNA, 19 nt, Homo sapiens
  misc_RNA (1)...(19): siRNA sense strand
agaaagauucagagaccaa

SEQ ID NO: 2605693 - RNA, 19 nt, Homo sapiens
  misc_RNA (1)...(19): siRNA sense strand
cgaagagaagagagagaga

SEQ ID NO: 2605694 - RNA, 19 nt, Homo sapiens
  misc_RNA (1)...(19): siRNA sense strand
aagagaagagagagagaga

SEQ ID NO: 2605695 - RNA, 19 nt, Homo sapiens
  misc_RNA (1)...(19): siRNA sense strand
ggaacaacuaggagcugaa

SEQ ID NO: 2605696 - RNA, 19 nt, Homo sapiens
  misc_RNA (1)...(19): siRNA sense strand
cgugaacgcaagaggagaa

SEQ ID NO: 2605697 - RNA, 19 nt, Homo sapiens
  misc_RNA (1)...(19): siRNA sense strand
cagaggaaguuuaucggaa

SEQ ID NO: 2605698 - RNA, 19 nt, Homo sapiens
  misc_RNA (1)...(19): siRNA sense strand
gaagaaagggagaagcuga

SEQ ID NO: 2605699 - RNA, 19 nt, Homo sapiens
  misc_RNA (1)...(19): siRNA sense strand
caagaaaagauuagcagaa

SEQ ID NO: 2605700 - RNA, 19 nt, Homo sapiens
  misc_RNA (1)...(19): siRNA sense strand
aaagagaagcagaggaagu

SEQ ID NO: 2605701 - RNA, 19 nt, Homo sapiens
  misc_RNA (1)...(19): siRNA sense strand
agauaggagcagagaacga

SEQ ID NO: 2605702 - RNA, 19 nt, Homo sapiens
  misc_RNA (1)...(19): siRNA sense strand
cagcaaaggcagaacgugu

SEQ ID NO: 2605703 - RNA, 19 nt, Homo sapiens
  misc_RNA (1)...(19): siRNA sense strand
agaagagauuagugcugaa

SEQ ID NO: 2605704 - RNA, 19 nt, Homo sapiens
  misc_RNA (1)...(19): siRNA sense strand
aauggaugaaguagagaaa

SEQ ID NO: 2605705 - RNA, 19 nt, Homo sapiens
  misc_RNA (1)...(19): siRNA sense strand
gagagagaagaaagggaga

SEQ ID NO: 2605706 - RNA, 19 nt, Homo sapiens
  misc_RNA (1)...(19): siRNA sense strand
agagauaggagcagagaac

SEQ ID NO: 2605707 - RNA, 19 nt, Homo sapiens
  misc_RNA (1)...(19): siRNA sense strand
guagagaaagcacgggcaa

SEQ ID NO: 2605708 - RNA, 19 nt, Homo sapiens
  misc_RNA (1)...(19): siRNA sense strand
gaacgauccaagaggagau

SEQ ID NO: 2605709 - RNA, 19 nt, Homo sapiens
  misc_RNA (1)...(19): siRNA sense strand
cauccaaagaacaagauuu

SEQ ID NO: 2605710 - RNA, 19 nt, Homo sapiens
  misc_RNA (1)...(19): siRNA sense strand
guagaacagaaguggccaa

SEQ ID NO: 2605711 - RNA, 19 nt, Homo sapiens
  misc_RNA (1)...(19): siRNA sense strand
aaguaauggaugaaguaga

SEQ ID NO: 2605712 - RNA, 19 nt, Homo sapiens
  misc_RNA (1)...(19): siRNA sense strand
ugagagugcuaauggcaga

SEQ ID NO: 2605713 - RNA, 19 nt, Homo sapiens
  misc_RNA (1)...(19): siRNA sense strand
ccagaaaguaauggaugaa

SEQ ID NO: 2605714 - RNA, 19 nt, Homo sapiens
  misc_RNA (1)...(19): siRNA sense strand
uagcugagaagcaggagaa

SEQ ID NO: 2605715 - RNA, 19 nt, Homo sapiens
  misc_RNA (1)...(19): siRNA sense strand
gcaucaugugacagagaca

SEQ ID NO: 2605716 - RNA, 19 nt, Homo sapiens
  misc_RNA (1)...(19): siRNA sense strand
agaaacucaagaagagauu

SEQ ID NO: 2605717 - RNA, 19 nt, Homo sapiens
  misc_RNA (1)...(19): siRNA sense strand
aaauaagagagaagcuuga

SEQ ID NO: 2605718 - RNA, 19 nt, Homo sapiens
  misc_RNA (1)...(19): siRNA sense strand
agauugugaucguagaaca

SEQ ID NO: 2605719 - RNA, 19 nt, Homo sapiens
  misc_RNA (1)...(19): siRNA sense strand
cggcugaaacgaagagaag

SEQ ID NO: 2605720 - RNA, 19 nt, Homo sapiens
  misc_RNA (1)...(19): siRNA sense strand
aacgaagagaagagagaga

SEQ ID NO: 2605721 - RNA, 19 nt, Homo sapiens
  misc_RNA (1)...(19): siRNA sense strand
gagagagagaagaaaggga

SEQ ID NO: 2605722 - RNA, 19 nt, Homo sapiens
  misc_RNA (1)...(19): siRNA sense strand
aagagagaagcuugaagaa

SEQ ID NO: 2605723 - RNA, 19 nt, Homo sapiens
  misc_RNA (1)...(19): siRNA sense strand
ggagaaaagaaaccaggaa

SEQ ID NO: 2605724 - RNA, 19 nt, Homo sapiens
  misc_RNA (1)...(19): siRNA sense strand
cugaagggaauguggagga

SEQ ID NO: 2605725 - RNA, 19 nt, Homo sapiens
  misc_RNA (1)...(19): siRNA sense strand
gagagagagagagaagaaa

SEQ ID NO: 2605726 - RNA, 19 nt, Homo sapiens
  misc_RNA (1)...(19): siRNA sense strand
aaagaaagauucagagacc

SEQ ID NO: 2605727 - RNA, 19 nt, Homo sapiens
  misc_RNA (1)...(19): siRNA sense strand
uaaagagagucguagcuga

SEQ ID NO: 2605728 - RNA, 19 nt, Homo sapiens
  misc_RNA (1)...(19): siRNA sense strand
agggagaagcugaggaggu

SEQ ID NO: 2605729 - RNA, 19 nt, Homo sapiens
  misc_RNA (1)...(19): siRNA sense strand
gagaaugucugaaagucca

SEQ ID NO: 2605730 - RNA, 19 nt, Homo sapiens
  misc_RNA (1)...(19): siRNA sense strand
agagagaagaaagggagaa

SEQ ID NO: 2605731 - RNA, 19 nt, Homo sapiens
  misc_RNA (1)...(19): siRNA sense strand
cuuuaagagcggauuauga

SEQ ID NO: 2605732 - RNA, 19 nt, Homo sapiens
  misc_RNA (1)...(19): siRNA sense strand
uggaugaaguagagaaagc

SEQ ID NO: 2605733 - RNA, 19 nt, Homo sapiens
  misc_RNA (1)...(19): siRNA sense strand
gcugaaacgaagagaagag

SEQ ID NO: 2605734 - RNA, 19 nt, Homo sapiens
  misc_RNA (1)...(19): siRNA sense strand
uggcuuuaagagcggauua

SEQ ID NO: 2605735 - RNA, 19 nt, Homo sapiens
  misc_RNA (1)...(19): siRNA sense strand
aagggaauguggaggaauc

SEQ ID NO: 2605736 - RNA, 19 nt, Homo sapiens
  misc_RNA (1)...(19): siRNA sense strand
agagagaagcuugaagaau

SEQ ID NO: 2605737 - RNA, 19 nt, Homo sapiens
  misc_RNA (1)...(19): siRNA sense strand
caaaagaaagauucagaga

SEQ ID NO: 2605738 - RNA, 19 nt, Homo sapiens
  misc_RNA (1)...(19): siRNA sense strand
uagagaaagcacgggcaaa

SEQ ID NO: 2605739 - RNA, 19 nt, Homo sapiens
  misc_RNA (1)...(19): siRNA sense strand
agaagcaggagaaaagaaa

SEQ ID NO: 2605740 - RNA, 19 nt, Homo sapiens
  misc_RNA (1)...(19): siRNA sense strand
cuagaauggaucuuggaga

SEQ ID NO: 2605741 - RNA, 19 nt, Homo sapiens
  misc_RNA (1)...(19): siRNA sense strand
caggaguucaagagacaga

SEQ ID NO: 2605742 - RNA, 19 nt, Homo sapiens
  misc_RNA (1)...(19): siRNA sense strand
uggaggaaucccagaaagu

SEQ ID NO: 2605743 - RNA, 19 nt, Homo sapiens
  misc_RNA (1)...(19): siRNA sense strand
ucuuggagaaugucugaaa

SEQ ID NO: 2605744 - RNA, 19 nt, Homo sapiens
  misc_RNA (1)...(19): siRNA sense strand
gacagagacaggaguucaa

SEQ ID NO: 2605745 - RNA, 19 nt, Homo sapiens
  misc_RNA (1)...(19): siRNA sense strand
gaaaagauuagcagaaacu

SEQ ID NO: 2605746 - RNA, 19 nt, Homo sapiens
  misc_RNA (1)...(19): siRNA sense strand
aagauuagcagaaacucaa

SEQ ID NO: 2605747 - RNA, 19 nt, Homo sapiens
  misc_RNA (1)...(19): siRNA sense strand
uagccaagguggaacaacu

SEQ ID NO: 2605748 - RNA, 19 nt, Homo sapiens
  misc_RNA (1)...(19): siRNA sense strand
acagaguaugcaagaguca

SEQ ID NO: 2605749 - RNA, 19 nt, Homo sapiens
  misc_RNA (1)...(19): siRNA sense strand
gagucguagcugagaagca

SEQ ID NO: 2605750 - RNA, 19 nt, Homo sapiens
  misc_RNA (1)...(19): siRNA sense strand
gcugagaagcaggagaaaa

SEQ ID NO: 2605751 - RNA, 19 nt, Homo sapiens
  misc_RNA (1)...(19): siRNA sense strand
cggagauacaacucgucaa

SEQ ID NO: 2605752 - RNA, 19 nt, Homo sapiens
  misc_RNA (1)...(19): siRNA sense strand
agagagucguagcugagaa

SEQ ID NO: 2605753 - RNA, 19 nt, Homo sapiens
  misc_RNA (1)...(19): siRNA sense strand
ucucaauauggcuggguaa

SEQ ID NO: 2605754 - RNA, 19 nt, Homo sapiens
  misc_RNA (1)...(19): siRNA sense strand
ccgcguacaugcuggcaga

SEQ ID NO: 2605755 - RNA, 19 nt, Homo sapiens
  misc_RNA (1)...(19): siRNA sense strand
gaaagauaugcaagagcca

SEQ ID NO: 2605756 - RNA, 19 nt, Homo sapiens
  misc_RNA (1)...(19): siRNA sense strand
caguagaguuccuggacac

SEQ ID NO: 2605757 - RNA, 19 nt, Homo sapiens
  misc_RNA (1)...(19): siRNA sense strand
cugcagggaaagaagugaa

SEQ ID NO: 2605758 - RNA, 19 nt, Homo sapiens
  misc_RNA (1)...(19): siRNA sense strand
cagucaucuuauaugcuaa

SEQ ID NO: 2605759 - RNA, 19 nt, Homo sapiens
  misc_RNA (1)...(19): siRNA sense strand
caauauguuuggaccgcga

SEQ ID NO: 2605760 - RNA, 19 nt, Homo sapiens
  misc_RNA (1)...(19): siRNA sense strand
agggaaagaagugaagaau

SEQ ID NO: 2605761 - RNA, 19 nt, Homo sapiens
  misc_RNA (1)...(19): siRNA sense strand
cugcagagacuaugaaaau

SEQ ID NO: 2605762 - RNA, 19 nt, Homo sapiens
  misc_RNA (1)...(19): siRNA sense strand
agaagagauugcugagacu

SEQ ID NO: 2605763 - RNA, 19 nt, Homo sapiens
  misc_RNA (1)...(19): siRNA sense strand
agaugagggcuguggagau

SEQ ID NO: 2605764 - RNA, 19 nt, Homo sapiens
  misc_RNA (1)...(19): siRNA sense strand
ggaaagagaugagggcugu

SEQ ID NO: 2605765 - RNA, 19 nt, Homo sapiens
  misc_RNA (1)...(19): siRNA sense strand
aaccagacaaagagccaaa

SEQ ID NO: 2605766 - RNA, 19 nt, Homo sapiens
  misc_RNA (1)...(19): siRNA sense strand
aggaaagagaugagggcug

SEQ ID NO: 2605767 - RNA, 19 nt, Homo sapiens
  misc_RNA (1)...(19): siRNA sense strand
uuucagugcugcagagacu

SEQ ID NO: 2605768 - RNA, 19 nt, Homo sapiens
  misc_RNA (1)...(19): siRNA sense strand
aggaagaccuggggagaca

SEQ ID NO: 2605769 - RNA, 19 nt, Homo sapiens
  misc_RNA (1)...(19): siRNA sense strand
ggagcugaggacagugauu

SEQ ID NO: 2605770 - RNA, 19 nt, Homo sapiens
  misc_RNA (1)...(19): siRNA sense strand
gagaauauauggcuggaca

SEQ ID NO: 2605771 - RNA, 19 nt, Homo sapiens
  misc_RNA (1)...(19): siRNA sense strand
gagaauacuguguggcuga

SEQ ID NO: 2605772 - RNA, 19 nt, Homo sapiens
  misc_RNA (1)...(19): siRNA sense strand
ggaagaugguugaagugga

SEQ ID NO: 2605773 - RNA, 19 nt, Homo sapiens
  misc_RNA (1)...(19): siRNA sense strand
gcucaagaggagaacaaga

SEQ ID NO: 2605774 - RNA, 19 nt, Homo sapiens
  misc_RNA (1)...(19): siRNA sense strand
aagcucaagaggagaacaa

SEQ ID NO: 2605775 - RNA, 19 nt, Homo sapiens
  misc_RNA (1)...(19): siRNA sense strand
gcuuguaccuacugcaaaa

SEQ ID NO: 2605776 - RNA, 19 nt, Homo sapiens
  misc_RNA (1)...(19): siRNA sense strand
aauauuugcaagaggaaga

SEQ ID NO: 2605777 - RNA, 19 nt, Homo sapiens
  misc_RNA (1)...(19): siRNA sense strand
acuaaacacgccagaggaa

SEQ ID NO: 2605778 - RNA, 19 nt, Homo sapiens
  misc_RNA (1)...(19): siRNA sense strand
cagaaaugggcuugggaac

SEQ ID NO: 2605779 - RNA, 19 nt, Homo sapiens
  misc_RNA (1)...(19): siRNA sense strand
aggacuaccuuaagggacu

SEQ ID NO: 2605780 - RNA, 19 nt, Homo sapiens
  misc_RNA (1)...(19): siRNA sense strand
ggcuuauggcagagauauu

SEQ ID NO: 2605781 - RNA, 19 nt, Homo sapiens
  misc_RNA (1)...(19): siRNA sense strand
cugugagacugcuggguca

SEQ ID NO: 2605782 - RNA, 19 nt, Homo sapiens
  misc_RNA (1)...(19): siRNA sense strand
gaaaggauguugucccgaa

SEQ ID NO: 2605783 - RNA, 19 nt, Homo sapiens
  misc_RNA (1)...(19): siRNA sense strand
ccgaagguacgaaggcgaa

SEQ ID NO: 2605784 - RNA, 19 nt, Homo sapiens
  misc_RNA (1)...(19): siRNA sense strand
ugaugaacuaguagauaga

SEQ ID NO: 2605785 - RNA, 19 nt, Homo sapiens
  misc_RNA (1)...(19): siRNA sense strand
ccuucugcauccugugaua

SEQ ID NO: 2605786 - RNA, 19 nt, Homo sapiens
  misc_RNA (1)...(19): siRNA sense strand
ggaaaugaaaagagaauac

SEQ ID NO: 2605787 - RNA, 19 nt, Homo sapiens
  misc_RNA (1)...(19): siRNA sense strand
acagcguacucauggaaau

SEQ ID NO: 2605788 - RNA, 19 nt, Homo sapiens
  misc_RNA (1)...(19): siRNA sense strand
aguuccagcacaagugaaa

SEQ ID NO: 2605789 - RNA, 19 nt, Homo sapiens
  misc_RNA (1)...(19): siRNA sense strand
cucaagaggagaacaagaa

SEQ ID NO: 2605790 - RNA, 19 nt, Homo sapiens
  misc_RNA (1)...(19): siRNA sense strand
caagaggagaacaagaaaa

SEQ ID NO: 2605791 - RNA, 19 nt, Homo sapiens
  misc_RNA (1)...(19): siRNA sense strand
gagacugcugggucagaaa

SEQ ID NO: 2605792 - RNA, 19 nt, Homo sapiens
  misc_RNA (1)...(19): siRNA sense strand
uugccgaagauuaggaaga

SEQ ID NO: 2605793 - RNA, 19 nt, Homo sapiens
  misc_RNA (1)...(19): siRNA sense strand
augaaagggcagccaguau

SEQ ID NO: 2605794 - RNA, 19 nt, Homo sapiens
  misc_RNA (1)...(19): siRNA sense strand
cuucaaaagaguaguggau

SEQ ID NO: 2605795 - RNA, 19 nt, Homo sapiens
  misc_RNA (1)...(19): siRNA sense strand
uuggauuugccgaagauua

SEQ ID NO: 2605796 - RNA, 19 nt, Homo sapiens
  misc_RNA (1)...(19): siRNA sense strand
gauuggugaaagacaacaa

SEQ ID NO: 2605797 - RNA, 19 nt, Homo sapiens
  misc_RNA (1)...(19): siRNA sense strand
ugaagugauuccugaggga

SEQ ID NO: 2605798 - RNA, 19 nt, Homo sapiens
  misc_RNA (1)...(19): siRNA sense strand
gcaaaggacaaaagaucuu

SEQ ID NO: 2605799 - RNA, 19 nt, Homo sapiens
  misc_RNA (1)...(19): siRNA sense strand
ggacuucagaaaugggcuu

SEQ ID NO: 2605800 - RNA, 19 nt, Homo sapiens
  misc_RNA (1)...(19): siRNA sense strand
caguuauccaauugaugaa

SEQ ID NO: 2605801 - RNA, 19 nt, Homo sapiens
  misc_RNA (1)...(19): siRNA sense strand
aagaggagaacaagaaaau

SEQ ID NO: 2605802 - RNA, 19 nt, Homo sapiens
  misc_RNA (1)...(19): siRNA sense strand
uauuccaggcauacagaaa

SEQ ID NO: 2605803 - RNA, 19 nt, Homo sapiens
  misc_RNA (1)...(19): siRNA sense strand
gauucaaaaccacaagaua

SEQ ID NO: 2605804 - RNA, 19 nt, Homo sapiens
  misc_RNA (1)...(19): siRNA sense strand
cuaaacacgccagaggaaa

SEQ ID NO: 2605805 - RNA, 19 nt, Homo sapiens
  misc_RNA (1)...(19): siRNA sense strand
cagccaagaucaagcccaa

SEQ ID NO: 2605806 - RNA, 19 nt, Homo sapiens
  misc_RNA (1)...(19): siRNA sense strand
caaagaagccggaugcaca

SEQ ID NO: 2605807 - RNA, 19 nt, Homo sapiens
  misc_RNA (1)...(19): siRNA sense strand
aggcggaagacgauguuaa

SEQ ID NO: 2605808 - RNA, 19 nt, Homo sapiens
  misc_RNA (1)...(19): siRNA sense strand
uggauaaggcugacgccaa

SEQ ID NO: 2605809 - RNA, 19 nt, Homo sapiens
  misc_RNA (1)...(19): siRNA sense strand
aggaggaggagaaagacaa

SEQ ID NO: 2605810 - RNA, 19 nt, Homo sapiens
  misc_RNA (1)...(19): siRNA sense strand
ggacggguauccaggccaa

SEQ ID NO: 2605811 - RNA, 19 nt, Homo sapiens
  misc_RNA (1)...(19): siRNA sense strand
ggauaaaguacuaaaggac

SEQ ID NO: 2605812 - RNA, 19 nt, Homo sapiens
  misc_RNA (1)...(19): siRNA sense strand
ggaaagagguggcaaccgu

SEQ ID NO: 2605813 - RNA, 19 nt, Homo sapiens
  misc_RNA (1)...(19): siRNA sense strand
ccagccaggaggaggagaa

SEQ ID NO: 2605814 - RNA, 19 nt, Homo sapiens
  misc_RNA (1)...(19): siRNA sense strand
augaagaaugugaagguca

SEQ ID NO: 2605815 - RNA, 19 nt, Homo sapiens
  misc_RNA (1)...(19): siRNA sense strand
gcucaagcgggguggagaa

SEQ ID NO: 2605816 - RNA, 19 nt, Homo sapiens
  misc_RNA (1)...(19): siRNA sense strand
cggaagacgauguuaagca

SEQ ID NO: 2605817 - RNA, 19 nt, Homo sapiens
  misc_RNA (1)...(19): siRNA sense strand
aggaugaggcggaagacga

SEQ ID NO: 2605818 - RNA, 19 nt, Homo sapiens
  misc_RNA (1)...(19): siRNA sense strand
ccgcugggugguuaggaaa

SEQ ID NO: 2605819 - RNA, 19 nt, Homo sapiens
  misc_RNA (1)...(19): siRNA sense strand
guaaaggaaaccaugccaa

SEQ ID NO: 2605820 - RNA, 19 nt, Homo sapiens
  misc_RNA (1)...(19): siRNA sense strand
uacuauggccugagggaca

SEQ ID NO: 2605821 - RNA, 19 nt, Homo sapiens
  misc_RNA (1)...(19): siRNA sense strand
acguauuccucgaagcuga

SEQ ID NO: 2605822 - RNA, 19 nt, Homo sapiens
  misc_RNA (1)...(19): siRNA sense strand
caggaggaggagaaagaca

SEQ ID NO: 2605823 - RNA, 19 nt, Homo sapiens
  misc_RNA (1)...(19): siRNA sense strand
gaggaggagcccauggaca

SEQ ID NO: 2605824 - RNA, 19 nt, Homo sapiens
  misc_RNA (1)...(19): siRNA sense strand
agaucaagcccaagcagca

SEQ ID NO: 2605825 - RNA, 19 nt, Homo sapiens
  misc_RNA (1)...(19): siRNA sense strand
ggauaaggcugacgccaag

SEQ ID NO: 2605826 - RNA, 19 nt, Homo sapiens
  misc_RNA (1)...(19): siRNA sense strand
acuggguggugaagaguga

SEQ ID NO: 2605827 - RNA, 19 nt, Homo sapiens
  misc_RNA (1)...(19): siRNA sense strand
gauaaaguacuaaaggacu

SEQ ID NO: 2605828 - RNA, 19 nt, Homo sapiens
  misc_RNA (1)...(19): siRNA sense strand
gcagcagaagguagagcuu

SEQ ID NO: 2605829 - RNA, 19 nt, Homo sapiens
  misc_RNA (1)...(19): siRNA sense strand
ccggaugagcagaaggugu

SEQ ID NO: 2605830 - RNA, 19 nt, Homo sapiens
  misc_RNA (1)...(19): siRNA sense strand
agaagaagcacgcagagga

SEQ ID NO: 2605831 - RNA, 19 nt, Homo sapiens
  misc_RNA (1)...(19): siRNA sense strand
ucaguaaacaggaggugga

SEQ ID NO: 2605832 - RNA, 19 nt, Homo sapiens
  misc_RNA (1)...(19): siRNA sense strand
ggaucaaggaggagcccgu

SEQ ID NO: 2605833 - RNA, 19 nt, Homo sapiens
  misc_RNA (1)...(19): siRNA sense strand
aagcaggagcuguggaaau

SEQ ID NO: 2605834 - RNA, 19 nt, Homo sapiens
  misc_RNA (1)...(19): siRNA sense strand
cucugaagguggauagcaa

SEQ ID NO: 2605835 - RNA, 19 nt, Homo sapiens
  misc_RNA (1)...(19): siRNA sense strand
acaaugugcuagaggccuu

SEQ ID NO: 2605836 - RNA, 19 nt, Homo sapiens
  misc_RNA (1)...(19): siRNA sense strand
ccuacaggauugagacgga

SEQ ID NO: 2605837 - RNA, 19 nt, Homo sapiens
  misc_RNA (1)...(19): siRNA sense strand
uggaaauauacgaucgaca

SEQ ID NO: 2605838 - RNA, 19 nt, Homo sapiens
  misc_RNA (1)...(19): siRNA sense strand
uggucgagcgaauggcaaa

SEQ ID NO: 2605839 - RNA, 19 nt, Homo sapiens
  misc_RNA (1)...(19): siRNA sense strand
gguaccguguggaaggcua

SEQ ID NO: 2605840 - RNA, 19 nt, Homo sapiens
  misc_RNA (1)...(19): siRNA sense strand
cuuuguaaauggagagguc

SEQ ID NO: 2605841 - RNA, 19 nt, Homo sapiens
  misc_RNA (1)...(19): siRNA sense strand
uugcuauguugaugagaaa

SEQ ID NO: 2605842 - RNA, 19 nt, Homo sapiens
  misc_RNA (1)...(19): siRNA sense strand
ccucauugggccagagaca

SEQ ID NO: 2605843 - RNA, 19 nt, Homo sapiens
  misc_RNA (1)...(19): siRNA sense strand
cauaaaagauagagugacu

SEQ ID NO: 2605844 - RNA, 19 nt, Homo sapiens
  misc_RNA (1)...(19): siRNA sense strand
acaacagggacaagaagaa

SEQ ID NO: 2605845 - RNA, 19 nt, Homo sapiens
  misc_RNA (1)...(19): siRNA sense strand
gcguguuggauuugaagaa

SEQ ID NO: 2605846 - RNA, 19 nt, Homo sapiens
  misc_RNA (1)...(19): siRNA sense strand
cugcagauucuuugcgcua

SEQ ID NO: 2605847 - RNA, 19 nt, Homo sapiens
  misc_RNA (1)...(19): siRNA sense strand
gcaaacaccugguuggagu

SEQ ID NO: 2605848 - RNA, 19 nt, Homo sapiens
  misc_RNA (1)...(19): siRNA sense strand
caaacagacaggugcccaa

SEQ ID NO: 2605849 - RNA, 19 nt, Homo sapiens
  misc_RNA (1)...(19): siRNA sense strand
gccagaggauugaagccaa

SEQ ID NO: 2605850 - RNA, 19 nt, Homo sapiens
  misc_RNA (1)...(19): siRNA sense strand
gaggaggaucuaaagaaaa

SEQ ID NO: 2605851 - RNA, 19 nt, Homo sapiens
  misc_RNA (1)...(19): siRNA sense strand
aagcaguggagcagcguga

SEQ ID NO: 2605852 - RNA, 19 nt, Homo sapiens
  misc_RNA (1)...(19): siRNA sense strand
acauggaagcaaacagaca

SEQ ID NO: 2605853 - RNA, 19 nt, Homo sapiens
  misc_RNA (1)...(19): siRNA sense strand
cauuaagcgcucagucauu

SEQ ID NO: 2605854 - RNA, 19 nt, Homo sapiens
  misc_RNA (1)...(19): siRNA sense strand
cuugcuauguugaugagaa

SEQ ID NO: 2605855 - RNA, 19 nt, Homo sapiens
  misc_RNA (1)...(19): siRNA sense strand
ccaagauagcauagaaccu

SEQ ID NO: 2605856 - RNA, 19 nt, Homo sapiens
  misc_RNA (1)...(19): siRNA sense strand
augaaaaugaagccagaua

SEQ ID NO: 2605857 - RNA, 19 nt, Homo sapiens
  misc_RNA (1)...(19): siRNA sense strand
caaagcuaaacgagugaau

SEQ ID NO: 2605858 - RNA, 19 nt, Homo sapiens
  misc_RNA (1)...(19): siRNA sense strand
gugcagacaucaaggacug

SEQ ID NO: 2605859 - RNA, 19 nt, Homo sapiens
  misc_RNA (1)...(19): siRNA sense strand
aagcaguagugauggcagu

SEQ ID NO: 2605860 - RNA, 19 nt, Homo sapiens
  misc_RNA (1)...(19): siRNA sense strand
ugacaugggaacugcagau

SEQ ID NO: 2605861 - RNA, 19 nt, Homo sapiens
  misc_RNA (1)...(19): siRNA sense strand
gacacagauuggagagaag

SEQ ID NO: 2605862 - RNA, 19 nt, Homo sapiens
  misc_RNA (1)...(19): siRNA sense strand
agaugaaaaugaagccaga

SEQ ID NO: 2605863 - RNA, 19 nt, Homo sapiens
  misc_RNA (1)...(19): siRNA sense strand
auccaaaacuuaagacaga

SEQ ID NO: 2605864 - RNA, 19 nt, Homo sapiens
  misc_RNA (1)...(19): siRNA sense strand
ucauugggccagagacaca

SEQ ID NO: 2605865 - RNA, 19 nt, Homo sapiens
  misc_RNA (1)...(19): siRNA sense strand
ggucagaaggggaaagaaa

SEQ ID NO: 2605866 - RNA, 19 nt, Homo sapiens
  misc_RNA (1)...(19): siRNA sense strand
gugcacugauagagggaau

SEQ ID NO: 2605867 - RNA, 19 nt, Homo sapiens
  misc_RNA (1)...(19): siRNA sense strand
gcaauugaacaaagggcua

SEQ ID NO: 2605868 - RNA, 19 nt, Homo sapiens
  misc_RNA (1)...(19): siRNA sense strand
gaggaagguuguuggccaa

SEQ ID NO: 2605869 - RNA, 19 nt, Homo sapiens
  misc_RNA (1)...(19): siRNA sense strand
gacaaaagucaauggauaa

SEQ ID NO: 2605870 - RNA, 19 nt, Homo sapiens
  misc_RNA (1)...(19): siRNA sense strand
uuacaaagcacgaggagca

SEQ ID NO: 2605871 - RNA, 19 nt, Homo sapiens
  misc_RNA (1)...(19): siRNA sense strand
agaacaagaaguaggcauu

SEQ ID NO: 2605872 - RNA, 19 nt, Homo sapiens
  misc_RNA (1)...(19): siRNA sense strand
gugcaaaggugauggacac

SEQ ID NO: 2605873 - RNA, 19 nt, Homo sapiens
  misc_RNA (1)...(19): siRNA sense strand
agucaauggauaaguagaa

SEQ ID NO: 2605874 - RNA, 19 nt, Homo sapiens
  misc_RNA (1)...(19): siRNA sense strand
cuuccaagauaaagaacuu

SEQ ID NO: 2605875 - RNA, 19 nt, Homo sapiens
  misc_RNA (1)...(19): siRNA sense strand
agcaagaaaaugugagaaa

SEQ ID NO: 2605876 - RNA, 19 nt, Homo sapiens
  misc_RNA (1)...(19): siRNA sense strand
agauaaagaacuucgauca

SEQ ID NO: 2605877 - RNA, 19 nt, Homo sapiens
  misc_RNA (1)...(19): siRNA sense strand
agaauuaagagcaugguau

SEQ ID NO: 2605878 - RNA, 19 nt, Homo sapiens
  misc_RNA (1)...(19): siRNA sense strand
cgaggaagguuguuggcca

SEQ ID NO: 2605879 - RNA, 19 nt, Homo sapiens
  misc_RNA (1)...(19): siRNA sense strand
ccgaagagaacgaacagau

SEQ ID NO: 2605880 - RNA, 19 nt, Homo sapiens
  misc_RNA (1)...(19): siRNA sense strand
ccacaagauuuagggccaa

SEQ ID NO: 2605881 - RNA, 19 nt, Homo sapiens
  misc_RNA (1)...(19): siRNA sense strand
agcuagaggccgaagagaa

SEQ ID NO: 2605882 - RNA, 19 nt, Homo sapiens
  misc_RNA (1)...(19): siRNA sense strand
cuugaacagacuagaaauu

SEQ ID NO: 2605883 - RNA, 19 nt, Homo sapiens
  misc_RNA (1)...(19): siRNA sense strand
aagaagaauuagaagccca

SEQ ID NO: 2605884 - RNA, 19 nt, Homo sapiens
  misc_RNA (1)...(19): siRNA sense strand
agagcaugguauagcaaca

SEQ ID NO: 2605885 - RNA, 19 nt, Homo sapiens
  misc_RNA (1)...(19): siRNA sense strand
auccaagaccagugacuua

SEQ ID NO: 2605886 - RNA, 19 nt, Homo sapiens
  misc_RNA (1)...(19): siRNA sense strand
acgccagggugcacugaua

SEQ ID NO: 2605887 - RNA, 19 nt, Homo sapiens
  misc_RNA (1)...(19): siRNA sense strand
gcuagaggccgaagagaac

SEQ ID NO: 2605888 - RNA, 19 nt, Homo sapiens
  misc_RNA (1)...(19): siRNA sense strand
ugcuagaccacaagauuua

SEQ ID NO: 2605889 - RNA, 19 nt, Homo sapiens
  misc_RNA (1)...(19): siRNA sense strand
gcuauuuggacgagaguuc

SEQ ID NO: 2605890 - RNA, 19 nt, Homo sapiens
  misc_RNA (1)...(19): siRNA sense strand
aagaaugggaagaacuauu

SEQ ID NO: 2605891 - RNA, 19 nt, Homo sapiens
  misc_RNA (1)...(19): siRNA sense strand
caauaaggcagaaggggau

SEQ ID NO: 2605892 - RNA, 19 nt, Homo sapiens
  misc_RNA (1)...(19): siRNA sense strand
aaagagaaauccaagacca

SEQ ID NO: 2605893 - RNA, 19 nt, Homo sapiens
  misc_RNA (1)...(19): siRNA sense strand
ccugauuaauuuuggaaga

SEQ ID NO: 2605894 - RNA, 19 nt, Homo sapiens
  misc_RNA (1)...(19): siRNA sense strand
agaagaauuagaagcccaa

SEQ ID NO: 2605895 - RNA, 19 nt, Homo sapiens
  misc_RNA (1)...(19): siRNA sense strand
cuauaggaaagaaugggaa

SEQ ID NO: 2605896 - RNA, 19 nt, Homo sapiens
  misc_RNA (1)...(19): siRNA sense strand
uaggaaagaaugggaagaa

SEQ ID NO: 2605897 - RNA, 19 nt, Homo sapiens
  misc_RNA (1)...(19): siRNA sense strand
accacaagauuuagggcca

SEQ ID NO: 2605898 - RNA, 19 nt, Homo sapiens
  misc_RNA (1)...(19): siRNA sense strand
gauccaaagagaaauccaa

SEQ ID NO: 2605899 - RNA, 19 nt, Homo sapiens
  misc_RNA (1)...(19): siRNA sense strand
cagcaaaacuaugggcaga

SEQ ID NO: 2605900 - RNA, 19 nt, Homo sapiens
  misc_RNA (1)...(19): siRNA sense strand
ggauaaguagaauugaaga

SEQ ID NO: 2605901 - RNA, 19 nt, Homo sapiens
  misc_RNA (1)...(19): siRNA sense strand
aagaacaagaaguaggcau

SEQ ID NO: 2605902 - RNA, 19 nt, Homo sapiens
  misc_RNA (1)...(19): siRNA sense strand
gcaugguauagcaacauua

SEQ ID NO: 2605903 - RNA, 19 nt, Homo sapiens
  misc_RNA (1)...(19): siRNA sense strand
cuggaugccaugugcaaau

SEQ ID NO: 2605904 - RNA, 19 nt, Homo sapiens
  misc_RNA (1)...(19): siRNA sense strand
cuggaggagauucaaauaa

SEQ ID NO: 2605905 - RNA, 19 nt, Homo sapiens
  misc_RNA (1)...(19): siRNA sense strand
agauuuagggccaacaauu

SEQ ID NO: 2605906 - RNA, 19 nt, Homo sapiens
  misc_RNA (1)...(19): siRNA sense strand
cuuagagauccaaagagaa

SEQ ID NO: 2605907 - RNA, 19 nt, Homo sapiens
  misc_RNA (1)...(19): siRNA sense strand
caauugaacaaagggcuaa

SEQ ID NO: 2605908 - RNA, 19 nt, Homo sapiens
  misc_RNA (1)...(19): siRNA sense strand
ugggaagaacuauuuguaa

SEQ ID NO: 2605909 - RNA, 19 nt, Homo sapiens
  misc_RNA (1)...(19): siRNA sense strand
ugucuugaacccugaguau

SEQ ID NO: 2605910 - RNA, 19 nt, Homo sapiens
  misc_RNA (1)...(19): siRNA sense strand
aaagcaugccugugcaauu

SEQ ID NO: 2605911 - RNA, 19 nt, Homo sapiens
  misc_RNA (1)...(19): siRNA sense strand
ugaaugaccuggaugccau

SEQ ID NO: 2605912 - RNA, 19 nt, Homo sapiens
  misc_RNA (1)...(19): siRNA sense strand
gcccagugaggaaaugaaa

SEQ ID NO: 2605913 - RNA, 19 nt, Homo sapiens
  misc_RNA (1)...(19): siRNA sense strand
augcuuugaucucuaguaa

SEQ ID NO: 2605914 - RNA, 19 nt, Homo sapiens
  misc_RNA (1)...(19): siRNA sense strand
aacaaagggcuaaguucua

SEQ ID NO: 2605915 - RNA, 19 nt, Homo sapiens
  misc_RNA (1)...(19): siRNA sense strand
ggucagaaggggaaagaaa

SEQ ID NO: 2605916 - RNA, 19 nt, Homo sapiens
  misc_RNA (1)...(19): siRNA sense strand
gugcacugauagagggaau

SEQ ID NO: 2605917 - RNA, 19 nt, Homo sapiens
  misc_RNA (1)...(19): siRNA sense strand
gcaauugaacaaagggcua

SEQ ID NO: 2605918 - RNA, 19 nt, Homo sapiens
  misc_RNA (1)...(19): siRNA sense strand
gaggaagguuguuggccaa

SEQ ID NO: 2605919 - RNA, 19 nt, Homo sapiens
  misc_RNA (1)...(19): siRNA sense strand
gacaaaagucaauggauaa

SEQ ID NO: 2605920 - RNA, 19 nt, Homo sapiens
  misc_RNA (1)...(19): siRNA sense strand
uuacaaagcacgaggagca

SEQ ID NO: 2605921 - RNA, 19 nt, Homo sapiens
  misc_RNA (1)...(19): siRNA sense strand
agaacaagaaguaggcauu

SEQ ID NO: 2605922 - RNA, 19 nt, Homo sapiens
  misc_RNA (1)...(19): siRNA sense strand
gugcaaaggugauggacac

SEQ ID NO: 2605923 - RNA, 19 nt, Homo sapiens
  misc_RNA (1)...(19): siRNA sense strand
agucaauggauaaguagaa

SEQ ID NO: 2605924 - RNA, 19 nt, Homo sapiens
  misc_RNA (1)...(19): siRNA sense strand
cuuccaagauaaagaacuu

SEQ ID NO: 2605925 - RNA, 19 nt, Homo sapiens
  misc_RNA (1)...(19): siRNA sense strand
agcaagaaaaugugagaaa

SEQ ID NO: 2605926 - RNA, 19 nt, Homo sapiens
  misc_RNA (1)...(19): siRNA sense strand
agauaaagaacuucgauca

SEQ ID NO: 2605927 - RNA, 19 nt, Homo sapiens
  misc_RNA (1)...(19): siRNA sense strand
agaauuaagagcaugguau

SEQ ID NO: 2605928 - RNA, 19 nt, Homo sapiens
  misc_RNA (1)...(19): siRNA sense strand
cgaggaagguuguuggcca

SEQ ID NO: 2605929 - RNA, 19 nt, Homo sapiens
  misc_RNA (1)...(19): siRNA sense strand
ccgaagagaacgaacagau

SEQ ID NO: 2605930 - RNA, 19 nt, Homo sapiens
  misc_RNA (1)...(19): siRNA sense strand
ccacaagauuuagggccaa

SEQ ID NO: 2605931 - RNA, 19 nt, Homo sapiens
  misc_RNA (1)...(19): siRNA sense strand
agcuagaggccgaagagaa

SEQ ID NO: 2605932 - RNA, 19 nt, Homo sapiens
  misc_RNA (1)...(19): siRNA sense strand
cuugaacagacuagaaauu

SEQ ID NO: 2605933 - RNA, 19 nt, Homo sapiens
  misc_RNA (1)...(19): siRNA sense strand
aagaagaauuagaagccca

SEQ ID NO: 2605934 - RNA, 19 nt, Homo sapiens
  misc_RNA (1)...(19): siRNA sense strand
agagcaugguauagcaaca

SEQ ID NO: 2605935 - RNA, 19 nt, Homo sapiens
  misc_RNA (1)...(19): siRNA sense strand
auccaagaccagugacuua

SEQ ID NO: 2605936 - RNA, 19 nt, Homo sapiens
  misc_RNA (1)...(19): siRNA sense strand
acgccagggugcacugaua

SEQ ID NO: 2605937 - RNA, 19 nt, Homo sapiens
  misc_RNA (1)...(19): siRNA sense strand
gcuagaggccgaagagaac

SEQ ID NO: 2605938 - RNA, 19 nt, Homo sapiens
  misc_RNA (1)...(19): siRNA sense strand
ugcuagaccacaagauuua

SEQ ID NO: 2605939 - RNA, 19 nt, Homo sapiens
  misc_RNA (1)...(19): siRNA sense strand
gcuauuuggacgagaguuc

SEQ ID NO: 2605940 - RNA, 19 nt, Homo sapiens
  misc_RNA (1)...(19): siRNA sense strand
aagaaugggaagaacuauu

SEQ ID NO: 2605941 - RNA, 19 nt, Homo sapiens
  misc_RNA (1)...(19): siRNA sense strand
caauaaggcagaaggggau

SEQ ID NO: 2605942 - RNA, 19 nt, Homo sapiens
  misc_RNA (1)...(19): siRNA sense strand
aaagagaaauccaagacca

SEQ ID NO: 2605943 - RNA, 19 nt, Homo sapiens
  misc_RNA (1)...(19): siRNA sense strand
ccugauuaauuuuggaaga

SEQ ID NO: 2605944 - RNA, 19 nt, Homo sapiens
  misc_RNA (1)...(19): siRNA sense strand
agaagaauuagaagcccaa

SEQ ID NO: 2605945 - RNA, 19 nt, Homo sapiens
  misc_RNA (1)...(19): siRNA sense strand
cuauaggaaagaaugggaa

SEQ ID NO: 2605946 - RNA, 19 nt, Homo sapiens
  misc_RNA (1)...(19): siRNA sense strand
uaggaaagaaugggaagaa

SEQ ID NO: 2605947 - RNA, 19 nt, Homo sapiens
  misc_RNA (1)...(19): siRNA sense strand
accacaagauuuagggcca

SEQ ID NO: 2605948 - RNA, 19 nt, Homo sapiens
  misc_RNA (1)...(19): siRNA sense strand
gauccaaagagaaauccaa

SEQ ID NO: 2605949 - RNA, 19 nt, Homo sapiens
  misc_RNA (1)...(19): siRNA sense strand
cagcaaaacuaugggcaga

SEQ ID NO: 2605950 - RNA, 19 nt, Homo sapiens
  misc_RNA (1)...(19): siRNA sense strand
ggauaaguagaauugaaga

SEQ ID NO: 2605951 - RNA, 19 nt, Homo sapiens
  misc_RNA (1)...(19): siRNA sense strand
aagaacaagaaguaggcau

SEQ ID NO: 2605952 - RNA, 19 nt, Homo sapiens
  misc_RNA (1)...(19): siRNA sense strand
gcaugguauagcaacauua

SEQ ID NO: 2605953 - RNA, 19 nt, Homo sapiens
  misc_RNA (1)...(19): siRNA sense strand
cuggaugccaugugcaaau

SEQ ID NO: 2605954 - RNA, 19 nt, Homo sapiens
  misc_RNA (1)...(19): siRNA sense strand
cuggaggagauucaaauaa

SEQ ID NO: 2605955 - RNA, 19 nt, Homo sapiens
  misc_RNA (1)...(19): siRNA sense strand
agauuuagggccaacaauu

SEQ ID NO: 2605956 - RNA, 19 nt, Homo sapiens
  misc_RNA (1)...(19): siRNA sense strand
cuuagagauccaaagagaa

SEQ ID NO: 2605957 - RNA, 19 nt, Homo sapiens
  misc_RNA (1)...(19): siRNA sense strand
caauugaacaaagggcuaa

SEQ ID NO: 2605958 - RNA, 19 nt, Homo sapiens
  misc_RNA (1)...(19): siRNA sense strand
ugggaagaacuauuuguaa

SEQ ID NO: 2605959 - RNA, 19 nt, Homo sapiens
  misc_RNA (1)...(19): siRNA sense strand
ugucuugaacccugaguau

SEQ ID NO: 2605960 - RNA, 19 nt, Homo sapiens
  misc_RNA (1)...(19): siRNA sense strand
aaagcaugccugugcaauu

SEQ ID NO: 2605961 - RNA, 19 nt, Homo sapiens
  misc_RNA (1)...(19): siRNA sense strand
ugaaugaccuggaugccau

SEQ ID NO: 2605962 - RNA, 19 nt, Homo sapiens
  misc_RNA (1)...(19): siRNA sense strand
gcccagugaggaaaugaaa

SEQ ID NO: 2605963 - RNA, 19 nt, Homo sapiens
  misc_RNA (1)...(19): siRNA sense strand
augcuuugaucucuaguaa

SEQ ID NO: 2605964 - RNA, 19 nt, Homo sapiens
  misc_RNA (1)...(19): siRNA sense strand
aacaaagggcuaaguucua

SEQ ID NO: 2605965 - RNA, 19 nt, Homo sapiens
  misc_RNA (1)...(19): siRNA sense strand
gggaaaguguccagcggaa

SEQ ID NO: 2605966 - RNA, 19 nt, Homo sapiens
  misc_RNA (1)...(19): siRNA sense strand
uggucaaaccggagagaau

SEQ ID NO: 2605967 - RNA, 19 nt, Homo sapiens
  misc_RNA (1)...(19): siRNA sense strand
caguaaggaagguggaaau

SEQ ID NO: 2605968 - RNA, 19 nt, Homo sapiens
  misc_RNA (1)...(19): siRNA sense strand
acaaagaacauuaaggaga

SEQ ID NO: 2605969 - RNA, 19 nt, Homo sapiens
  misc_RNA (1)...(19): siRNA sense strand
ccaaaguggucguggugga

SEQ ID NO: 2605970 - RNA, 19 nt, Homo sapiens
  misc_RNA (1)...(19): siRNA sense strand
gggaaaacgaggaugagaa

SEQ ID NO: 2605971 - RNA, 19 nt, Homo sapiens
  misc_RNA (1)...(19): siRNA sense strand
cagaaacagcacagcggaa

SEQ ID NO: 2605972 - RNA, 19 nt, Homo sapiens
  misc_RNA (1)...(19): siRNA sense strand
ggaccuuaaagaagaaaca

SEQ ID NO: 2605973 - RNA, 19 nt, Homo sapiens
  misc_RNA (1)...(19): siRNA sense strand
agaaacaggcauagaucuu

SEQ ID NO: 2605974 - RNA, 19 nt, Homo sapiens
  misc_RNA (1)...(19): siRNA sense strand
aagccaagguggaagagau

SEQ ID NO: 2605975 - RNA, 19 nt, Homo sapiens
  misc_RNA (1)...(19): siRNA sense strand
agaacaaagucaaguccau

SEQ ID NO: 2605976 - RNA, 19 nt, Homo sapiens
  misc_RNA (1)...(19): siRNA sense strand
ccacaaagaguauaagcga

SEQ ID NO: 2605977 - RNA, 19 nt, Homo sapiens
  misc_RNA (1)...(19): siRNA sense strand
aagaugaugcuguggagaa

SEQ ID NO: 2605978 - RNA, 19 nt, Homo sapiens
  misc_RNA (1)...(19): siRNA sense strand
aggugaagcauuuguauau

SEQ ID NO: 2605979 - RNA, 19 nt, Homo sapiens
  misc_RNA (1)...(19): siRNA sense strand
gcaguaaggaagguggaaa

SEQ ID NO: 2605980 - RNA, 19 nt, Homo sapiens
  misc_RNA (1)...(19): siRNA sense strand
ccggagagaaugacaugaa

SEQ ID NO: 2605981 - RNA, 19 nt, Homo sapiens
  misc_RNA (1)...(19): siRNA sense strand
agaagagggcucagaacuu

SEQ ID NO: 2605982 - RNA, 19 nt, Homo sapiens
  misc_RNA (1)...(19): siRNA sense strand
gaacaaacggagacggaag

SEQ ID NO: 2605983 - RNA, 19 nt, Homo sapiens
  misc_RNA (1)...(19): siRNA sense strand
aguugaaauccaugugaau

SEQ ID NO: 2605984 - RNA, 19 nt, Homo sapiens
  misc_RNA (1)...(19): siRNA sense strand
acgccgugucucagggaua

SEQ ID NO: 2605985 - RNA, 19 nt, Homo sapiens
  misc_RNA (1)...(19): siRNA sense strand
cuguaaaaccaauagcaaa

SEQ ID NO: 2605986 - RNA, 19 nt, Homo sapiens
  misc_RNA (1)...(19): siRNA sense strand
ggagagaaugacaugaaca

SEQ ID NO: 2605987 - RNA, 19 nt, Homo sapiens
  misc_RNA (1)...(19): siRNA sense strand
cagcugggugggacagaaa

SEQ ID NO: 2605988 - RNA, 19 nt, Homo sapiens
  misc_RNA (1)...(19): siRNA sense strand
auuccaagcucaaguccaa

SEQ ID NO: 2605989 - RNA, 19 nt, Homo sapiens
  misc_RNA (1)...(19): siRNA sense strand
ucagcugacgguagggaaa

SEQ ID NO: 2605990 - RNA, 19 nt, Homo sapiens
  misc_RNA (1)...(19): siRNA sense strand
ccauaucaguauucgccaa

SEQ ID NO: 2605991 - RNA, 19 nt, Homo sapiens
  misc_RNA (1)...(19): siRNA sense strand
uggaaggguucagaagaaa

SEQ ID NO: 2605992 - RNA, 19 nt, Homo sapiens
  misc_RNA (1)...(19): siRNA sense strand
ugacaugaacaaacggaga

SEQ ID NO: 2605993 - RNA, 19 nt, Homo sapiens
  misc_RNA (1)...(19): siRNA sense strand
caagagugugggagcagua

SEQ ID NO: 2605994 - RNA, 19 nt, Homo sapiens
  misc_RNA (1)...(19): siRNA sense strand
gccaaagcccugugguaca

SEQ ID NO: 2605995 - RNA, 19 nt, Homo sapiens
  misc_RNA (1)...(19): siRNA sense strand
aagccaaagcccuguggua

SEQ ID NO: 2605996 - RNA, 19 nt, Homo sapiens
  misc_RNA (1)...(19): siRNA sense strand
ugugguacaaauuggauaa

SEQ ID NO: 2605997 - RNA, 19 nt, Homo sapiens
  misc_RNA (1)...(19): siRNA sense strand
cggaagccaagguggaaga

SEQ ID NO: 2605998 - RNA, 19 nt, Homo sapiens
  misc_RNA (1)...(19): siRNA sense strand
gcugcuggcugaaagggaa

SEQ ID NO: 2605999 - RNA, 19 nt, Homo sapiens
  misc_RNA (1)...(19): siRNA sense strand
augaaugaucacagaccua

SEQ ID NO: 2606000 - RNA, 19 nt, Homo sapiens
  misc_RNA (1)...(19): siRNA sense strand
gcgcacugccauugaacuu

SEQ ID NO: 2606001 - RNA, 19 nt, Homo sapiens
  misc_RNA (1)...(19): siRNA sense strand
ccuuagacuuugccaugaa

SEQ ID NO: 2606002 - RNA, 19 nt, Homo sapiens
  misc_RNA (1)...(19): siRNA sense strand
caggugaagcauuuguaua

SEQ ID NO: 2606003 - RNA, 19 nt, Homo sapiens
  misc_RNA (1)...(19): siRNA sense strand
gggcucagaacuuggccaa

SEQ ID NO: 2606004 - RNA, 19 nt, Homo sapiens
  misc_RNA (1)...(19): siRNA sense strand
aaguggucgugguggagaa

SEQ ID NO: 2606005 - RNA, 19 nt, Homo sapiens
  misc_RNA (1)...(19): siRNA sense strand
ccggagaacaucaacaaga

SEQ ID NO: 2606006 - RNA, 19 nt, Homo sapiens
  misc_RNA (1)...(19): siRNA sense strand
ggaaggguucagaagaaaa

SEQ ID NO: 2606007 - RNA, 19 nt, Homo sapiens
  misc_RNA (1)...(19): siRNA sense strand
agccaagguggaagagauu

SEQ ID NO: 2606008 - RNA, 19 nt, Homo sapiens
  misc_RNA (1)...(19): siRNA sense strand
gugcggagaacgugaacca

SEQ ID NO: 2606009 - RNA, 19 nt, Homo sapiens
  misc_RNA (1)...(19): siRNA sense strand
cugcagacuuugccaccaa

SEQ ID NO: 2606010 - RNA, 19 nt, Homo sapiens
  misc_RNA (1)...(19): siRNA sense strand
ugcagcaaguggaggaaaa

SEQ ID NO: 2606011 - RNA, 19 nt, Homo sapiens
  misc_RNA (1)...(19): siRNA sense strand
cugcuggcugaaagggaaa

SEQ ID NO: 2606012 - RNA, 19 nt, Homo sapiens
  misc_RNA (1)...(19): siRNA sense strand
caacaagaacuuugagcag

SEQ ID NO: 2606013 - RNA, 19 nt, Homo sapiens
  misc_RNA (1)...(19): siRNA sense strand
uggucaaucuguacaugaa

SEQ ID NO: 2606014 - RNA, 19 nt, Homo sapiens
  misc_RNA (1)...(19): siRNA sense strand
aaagagaggaggaggcaac

SEQ ID NO: 2606015 - RNA, 19 nt, Homo sapiens
  misc_RNA (1)...(19): siRNA sense strand
gaguauaagcgagggaagu

SEQ ID NO: 2606016 - RNA, 19 nt, Homo sapiens
  misc_RNA (1)...(19): siRNA sense strand
augaugcuguggagaacaa

SEQ ID NO: 2606017 - RNA, 19 nt, Homo sapiens
  misc_RNA (1)...(19): siRNA sense strand
acagcuugcuugagccauu

SEQ ID NO: 2606018 - RNA, 19 nt, Homo sapiens
  misc_RNA (1)...(19): siRNA sense strand
gugugggagcaguaaggaa

SEQ ID NO: 2606019 - RNA, 19 nt, Homo sapiens
  misc_RNA (1)...(19): siRNA sense strand
aagucaaguccauggcgaa

SEQ ID NO: 2606020 - RNA, 19 nt, Homo sapiens
  misc_RNA (1)...(19): siRNA sense strand
gagccaagucugaccuaca

SEQ ID NO: 2606021 - RNA, 19 nt, Homo sapiens
  misc_RNA (1)...(19): siRNA sense strand
gaacuuggccaacagggaa

SEQ ID NO: 2606022 - RNA, 19 nt, Homo sapiens
  misc_RNA (1)...(19): siRNA sense strand
ucacuaaggagcuggagca

SEQ ID NO: 2606023 - RNA, 19 nt, Homo sapiens
  misc_RNA (1)...(19): siRNA sense strand
guucccacaaagaguauaa

SEQ ID NO: 2606024 - RNA, 19 nt, Homo sapiens
  misc_RNA (1)...(19): siRNA sense strand
acgacuacaucgacacaga

SEQ ID NO: 2606025 - RNA, 19 nt, Homo sapiens
  misc_RNA (1)...(19): siRNA sense strand
cugucaaccucuccaggaa

SEQ ID NO: 2606026 - RNA, 19 nt, Homo sapiens
  misc_RNA (1)...(19): siRNA sense strand
ggaaaguguccagcggaau

SEQ ID NO: 2606027 - RNA, 19 nt, Homo sapiens
  misc_RNA (1)...(19): siRNA sense strand
cagcggaagccaaggugga

SEQ ID NO: 2606028 - RNA, 19 nt, Homo sapiens
  misc_RNA (1)...(19): siRNA sense strand
aguuugaguuugacgucau

SEQ ID NO: 2606029 - RNA, 19 nt, Homo sapiens
  misc_RNA (1)...(19): siRNA sense strand
acgagaaagaggugauaga

SEQ ID NO: 2606030 - RNA, 19 nt, Homo sapiens
  misc_RNA (1)...(19): siRNA sense strand
uggacgaggacgaggauga

SEQ ID NO: 2606031 - RNA, 19 nt, Homo sapiens
  misc_RNA (1)...(19): siRNA sense strand
acccagaugcgguggaauu

SEQ ID NO: 2606032 - RNA, 19 nt, Homo sapiens
  misc_RNA (1)...(19): siRNA sense strand
uuuaagaaggcgaaugcaa

SEQ ID NO: 2606033 - RNA, 19 nt, Homo sapiens
  misc_RNA (1)...(19): siRNA sense strand
aagagaacauccaggacca

SEQ ID NO: 2606034 - RNA, 19 nt, Homo sapiens
  misc_RNA (1)...(19): siRNA sense strand
augcaaugcuggacgagga

SEQ ID NO: 2606035 - RNA, 19 nt, Homo sapiens
  misc_RNA (1)...(19): siRNA sense strand
gagaaagaggugauagaug

SEQ ID NO: 2606036 - RNA, 19 nt, Homo sapiens
  misc_RNA (1)...(19): siRNA sense strand
aggaugagcguguggacga

SEQ ID NO: 2606037 - RNA, 19 nt, Homo sapiens
  misc_RNA (1)...(19): siRNA sense strand
gagaugggcuuuccggaga

SEQ ID NO: 2606038 - RNA, 19 nt, Homo sapiens
  misc_RNA (1)...(19): siRNA sense strand
ccgaaaacauugcuagcau

SEQ ID NO: 2606039 - RNA, 19 nt, Homo sapiens
  misc_RNA (1)...(19): siRNA sense strand
cagaccaacaugagagacu

SEQ ID NO: 2606040 - RNA, 19 nt, Homo sapiens
  misc_RNA (1)...(19): siRNA sense strand
cgacgagaaagaggugaua

SEQ ID NO: 2606041 - RNA, 19 nt, Homo sapiens
  misc_RNA (1)...(19): siRNA sense strand
aggacgaggaugagcgugu

SEQ ID NO: 2606042 - RNA, 19 nt, Homo sapiens
  misc_RNA (1)...(19): siRNA sense strand
gggccugaccaacccgaaa

SEQ ID NO: 2606043 - RNA, 19 nt, Homo sapiens
  misc_RNA (1)...(19): siRNA sense strand
agauauggaaagaaggaaa

SEQ ID NO: 2606044 - RNA, 19 nt, Homo sapiens
  misc_RNA (1)...(19): siRNA sense strand
gugacuuggaagaggacaa

SEQ ID NO: 2606045 - RNA, 19 nt, Homo sapiens
  misc_RNA (1)...(19): siRNA sense strand
agaaaggagcaaagcaaca

SEQ ID NO: 2606046 - RNA, 19 nt, Homo sapiens
  misc_RNA (1)...(19): siRNA sense strand
aagauuugcaggagcuaaa

SEQ ID NO: 2606047 - RNA, 19 nt, Homo sapiens
  misc_RNA (1)...(19): siRNA sense strand
aagaauaagaaaggagcaa

SEQ ID NO: 2606048 - RNA, 19 nt, Homo sapiens
  misc_RNA (1)...(19): siRNA sense strand
cauugaugcaagagaugaa

SEQ ID NO: 2606049 - RNA, 19 nt, Homo sapiens
  misc_RNA (1)...(19): siRNA sense strand
ggaaaagacaagaaaagau

SEQ ID NO: 2606050 - RNA, 19 nt, Homo sapiens
  misc_RNA (1)...(19): siRNA sense strand
gagaaaaugugaaaagcga

SEQ ID NO: 2606051 - RNA, 19 nt, Homo sapiens
  misc_RNA (1)...(19): siRNA sense strand
gaagaaaaggaaaagacaa

SEQ ID NO: 2606052 - RNA, 19 nt, Homo sapiens
  misc_RNA (1)...(19): siRNA sense strand
agaagagaaagaagaugaa

SEQ ID NO: 2606053 - RNA, 19 nt, Homo sapiens
  misc_RNA (1)...(19): siRNA sense strand
ugacuucaaagcagggaaa

SEQ ID NO: 2606054 - RNA, 19 nt, Homo sapiens
  misc_RNA (1)...(19): siRNA sense strand
aauugaagaaggaugacaa

SEQ ID NO: 2606055 - RNA, 19 nt, Homo sapiens
  misc_RNA (1)...(19): siRNA sense strand
ggcugaaaauggugaaaga

SEQ ID NO: 2606056 - RNA, 19 nt, Homo sapiens
  misc_RNA (1)...(19): siRNA sense strand
aggaugacaagaagaaaga

SEQ ID NO: 2606057 - RNA, 19 nt, Homo sapiens
  misc_RNA (1)...(19): siRNA sense strand
agaagaaagauuugcagga

SEQ ID NO: 2606058 - RNA, 19 nt, Homo sapiens
  misc_RNA (1)...(19): siRNA sense strand
cgguuugaagaauaagaaa

SEQ ID NO: 2606059 - RNA, 19 nt, Homo sapiens
  misc_RNA (1)...(19): siRNA sense strand
aagaucuaauugagagaga

SEQ ID NO: 2606060 - RNA, 19 nt, Homo sapiens
  misc_RNA (1)...(19): siRNA sense strand
cuuucgguuugaagaauaa

SEQ ID NO: 2606061 - RNA, 19 nt, Homo sapiens
  misc_RNA (1)...(19): siRNA sense strand
agaagaucuaauugagaga

SEQ ID NO: 2606062 - RNA, 19 nt, Homo sapiens
  misc_RNA (1)...(19): siRNA sense strand
agggaaagcacuagugauc

SEQ ID NO: 2606063 - RNA, 19 nt, Homo sapiens
  misc_RNA (1)...(19): siRNA sense strand
agugaguguaaaugacaua

SEQ ID NO: 2606064 - RNA, 19 nt, Homo sapiens
  misc_RNA (1)...(19): siRNA sense strand
gagaugaagaacuugaaaa

SEQ ID NO: 2606065 - RNA, 19 nt, Homo sapiens
  misc_RNA (1)...(19): siRNA sense strand
gagagagcguucugcccua

SEQ ID NO: 2606066 - RNA, 19 nt, Homo sapiens
  misc_RNA (1)...(19): siRNA sense strand
ucgugaaguguuugaauuu

SEQ ID NO: 2606067 - RNA, 19 nt, Homo sapiens
  misc_RNA (1)...(19): siRNA sense strand
agaaagauuugcaggagcu

SEQ ID NO: 2606068 - RNA, 19 nt, Homo sapiens
  misc_RNA (1)...(19): siRNA sense strand
agaauaagaaaggagcaaa

SEQ ID NO: 2606069 - RNA, 19 nt, Homo sapiens
  misc_RNA (1)...(19): siRNA sense strand
ggaagaaaaggaaaagaca

SEQ ID NO: 2606070 - RNA, 19 nt, Homo sapiens
  misc_RNA (1)...(19): siRNA sense strand
gguugaugauucagugagu

SEQ ID NO: 2606071 - RNA, 19 nt, Homo sapiens
  misc_RNA (1)...(19): siRNA sense strand
acuuucgguuugaagaaua

SEQ ID NO: 2606072 - RNA, 19 nt, Homo sapiens
  misc_RNA (1)...(19): siRNA sense strand
gaagaauaagaaaggagca

SEQ ID NO: 2606073 - RNA, 19 nt, Homo sapiens
  misc_RNA (1)...(19): siRNA sense strand
gggugauauuugcauguau

SEQ ID NO: 2606074 - RNA, 19 nt, Homo sapiens
  misc_RNA (1)...(19): siRNA sense strand
gccuggaagaaaaggaaaa

SEQ ID NO: 2606075 - RNA, 19 nt, Homo sapiens
  misc_RNA (1)...(19): siRNA sense strand
cuggagagaaaaugugaaa

SEQ ID NO: 2606076 - RNA, 19 nt, Homo sapiens
  misc_RNA (1)...(19): siRNA sense strand
ugaacaagaagcacgguga

SEQ ID NO: 2606077 - RNA, 19 nt, Homo sapiens
  misc_RNA (1)...(19): siRNA sense strand
acuaaaggagauaagugua

SEQ ID NO: 2606078 - RNA, 19 nt, Homo sapiens
  misc_RNA (1)...(19): siRNA sense strand
ugugaaaagcgaaguguuu

SEQ ID NO: 2606079 - RNA, 19 nt, Homo sapiens
  misc_RNA (1)...(19): siRNA sense strand
ugaugcaagagaugaagaa

SEQ ID NO: 2606080 - RNA, 19 nt, Homo sapiens
  misc_RNA (1)...(19): siRNA sense strand
gguccaaauguuaccaaaa

SEQ ID NO: 2606081 - RNA, 19 nt, Homo sapiens
  misc_RNA (1)...(19): siRNA sense strand
ggagagaaaaugugaaaag

SEQ ID NO: 2606082 - RNA, 19 nt, Homo sapiens
  misc_RNA (1)...(19): siRNA sense strand
cggugaggcggaaaagaaa

SEQ ID NO: 2606083 - RNA, 19 nt, Homo sapiens
  misc_RNA (1)...(19): siRNA sense strand
ccagggaacagguggugau

SEQ ID NO: 2606084 - RNA, 19 nt, Homo sapiens
  misc_RNA (1)...(19): siRNA sense strand
aagagauguagaugaaaca

SEQ ID NO: 2606085 - RNA, 19 nt, Homo sapiens
  misc_RNA (1)...(19): siRNA sense strand
ugaaaauggugaaagaagu

SEQ ID NO: 2606086 - RNA, 19 nt, Homo sapiens
  misc_RNA (1)...(19): siRNA sense strand
guaaaggugcagaucccaa

SEQ ID NO: 2606087 - RNA, 19 nt, Homo sapiens
  misc_RNA (1)...(19): siRNA sense strand
uggauaauugggaugagaa

SEQ ID NO: 2606088 - RNA, 19 nt, Homo sapiens
  misc_RNA (1)...(19): siRNA sense strand
uguagaugaaacagguauu

SEQ ID NO: 2606089 - RNA, 19 nt, Homo sapiens
  misc_RNA (1)...(19): siRNA sense strand
gcugaaaagaaauugaaga

SEQ ID NO: 2606090 - RNA, 19 nt, Homo sapiens
  misc_RNA (1)...(19): siRNA sense strand
caguguacuaaaggagaua

SEQ ID NO: 2606091 - RNA, 19 nt, Homo sapiens
  misc_RNA (1)...(19): siRNA sense strand
gaugagacacaguggcaga

SEQ ID NO: 2606092 - RNA, 19 nt, Homo sapiens
  misc_RNA (1)...(19): siRNA sense strand
gggugcaggaggagcuaga

SEQ ID NO: 2606093 - RNA, 19 nt, Homo sapiens
  misc_RNA (1)...(19): siRNA sense strand
cugacaagauucugcagga

SEQ ID NO: 2606094 - RNA, 19 nt, Homo sapiens
  misc_RNA (1)...(19): siRNA sense strand
cugggcagcuggauggcua

SEQ ID NO: 2606095 - RNA, 19 nt, Homo sapiens
  misc_RNA (1)...(19): siRNA sense strand
gaaucaagaaugagagcca

SEQ ID NO: 2606096 - RNA, 19 nt, Homo sapiens
  misc_RNA (1)...(19): siRNA sense strand
ggguaguggaaguggcaga

SEQ ID NO: 2606097 - RNA, 19 nt, Homo sapiens
  misc_RNA (1)...(19): siRNA sense strand
uggaaagaguuaucgguga

SEQ ID NO: 2606098 - RNA, 19 nt, Homo sapiens
  misc_RNA (1)...(19): siRNA sense strand
uggaggaauuacaggacau

SEQ ID NO: 2606099 - RNA, 19 nt, Homo sapiens
  misc_RNA (1)...(19): siRNA sense strand
aggaauuacaggacaugaa

SEQ ID NO: 2606100 - RNA, 19 nt, Homo sapiens
  misc_RNA (1)...(19): siRNA sense strand
acacgaagaaguagcccua

SEQ ID NO: 2606101 - RNA, 19 nt, Homo sapiens
  misc_RNA (1)...(19): siRNA sense strand
gcaaaauguacacgaagaa

SEQ ID NO: 2606102 - RNA, 19 nt, Homo sapiens
  misc_RNA (1)...(19): siRNA sense strand
ugauaaacaacaagugcuu

SEQ ID NO: 2606103 - RNA, 19 nt, Homo sapiens
  misc_RNA (1)...(19): siRNA sense strand
aggcauaucgggugcugaa

SEQ ID NO: 2606104 - RNA, 19 nt, Homo sapiens
  misc_RNA (1)...(19): siRNA sense strand
ccuugaacugccagaagaa

SEQ ID NO: 2606105 - RNA, 19 nt, Homo sapiens
  misc_RNA (1)...(19): siRNA sense strand
gcuuuauacuggaaggaac

SEQ ID NO: 2606106 - RNA, 19 nt, Homo sapiens
  misc_RNA (1)...(19): siRNA sense strand
cuggaauagacaugaccaa

SEQ ID NO: 2606107 - RNA, 19 nt, Homo sapiens
  misc_RNA (1)...(19): siRNA sense strand
ggaaagaguuaucggugac

SEQ ID NO: 2606108 - RNA, 19 nt, Homo sapiens
  misc_RNA (1)...(19): siRNA sense strand
gugaaauuguugaagugga

SEQ ID NO: 2606109 - RNA, 19 nt, Homo sapiens
  misc_RNA (1)...(19): siRNA sense strand
aguggaaguggcagagauu

SEQ ID NO: 2606110 - RNA, 19 nt, Homo sapiens
  misc_RNA (1)...(19): siRNA sense strand
uguugaaguggaugaagaa

SEQ ID NO: 2606111 - RNA, 19 nt, Homo sapiens
  misc_RNA (1)...(19): siRNA sense strand
ccuaagauauuauggcugu

SEQ ID NO: 2606112 - RNA, 19 nt, Homo sapiens
  misc_RNA (1)...(19): siRNA sense strand
uuguugaaguggaugaaga

SEQ ID NO: 2606113 - RNA, 19 nt, Homo sapiens
  misc_RNA (1)...(19): siRNA sense strand
acuucgugacgcugagaua

SEQ ID NO: 2606114 - RNA, 19 nt, Homo sapiens
  misc_RNA (1)...(19): siRNA sense strand
cagaccaauuggagagaag

SEQ ID NO: 2606115 - RNA, 19 nt, Homo sapiens
  misc_RNA (1)...(19): siRNA sense strand
agguggaaguggcugaaaa

SEQ ID NO: 2606116 - RNA, 19 nt, Homo sapiens
  misc_RNA (1)...(19): siRNA sense strand
cugaaaaguaucuugacua

SEQ ID NO: 2606117 - RNA, 19 nt, Homo sapiens
  misc_RNA (1)...(19): siRNA sense strand
acauugagaaguuggcaga

SEQ ID NO: 2606118 - RNA, 19 nt, Homo sapiens
  misc_RNA (1)...(19): siRNA sense strand
uggaaguggcugaaaagua

SEQ ID NO: 2606119 - RNA, 19 nt, Homo sapiens
  misc_RNA (1)...(19): siRNA sense strand
uuauuaaccuugugccuga

SEQ ID NO: 2606120 - RNA, 19 nt, Homo sapiens
  misc_RNA (1)...(19): siRNA sense strand
gggaguuauauuucaguga

SEQ ID NO: 2606121 - RNA, 19 nt, Homo sapiens
  misc_RNA (1)...(19): siRNA sense strand
aaauauggcuuccaggcau

SEQ ID NO: 2606122 - RNA, 19 nt, Homo sapiens
  misc_RNA (1)...(19): siRNA sense strand
aggacacgugacuggaaua

SEQ ID NO: 2606123 - RNA, 19 nt, Homo sapiens
  misc_RNA (1)...(19): siRNA sense strand
auggcaacauugagaaguu

SEQ ID NO: 2606124 - RNA, 19 nt, Homo sapiens
  misc_RNA (1)...(19): siRNA sense strand
aacuaauguuugaugccaa

SEQ ID NO: 2606125 - RNA, 19 nt, Homo sapiens
  misc_RNA (1)...(19): siRNA sense strand
uggcagaggcuggaaucaa

SEQ ID NO: 2606126 - RNA, 19 nt, Homo sapiens
  misc_RNA (1)...(19): siRNA sense strand
auaaacaacaagugcuuca

SEQ ID NO: 2606127 - RNA, 19 nt, Homo sapiens
  misc_RNA (1)...(19): siRNA sense strand
gaccaauuggagagaaguu

SEQ ID NO: 2606128 - RNA, 19 nt, Homo sapiens
  misc_RNA (1)...(19): siRNA sense strand
cugcuguugccaagggaaa

SEQ ID NO: 2606129 - RNA, 19 nt, Homo sapiens
  misc_RNA (1)...(19): siRNA sense strand
ggaggauauccguguucaa

SEQ ID NO: 2606130 - RNA, 19 nt, Homo sapiens
  misc_RNA (1)...(19): siRNA sense strand
caucuuugucuacgagaau

SEQ ID NO: 2606131 - RNA, 19 nt, Homo sapiens
  misc_RNA (1)...(19): siRNA sense strand
cuggcaauuucgagagaac

SEQ ID NO: 2606132 - RNA, 19 nt, Homo sapiens
  misc_RNA (1)...(19): siRNA sense strand
agccugaugaggaggauau

SEQ ID NO: 2606133 - RNA, 19 nt, Homo sapiens
  misc_RNA (1)...(19): siRNA sense strand
ccccaugcccugagagaau

SEQ ID NO: 2606134 - RNA, 19 nt, Homo sapiens
  misc_RNA (1)...(19): siRNA sense strand
gcuuaaacucggugguaca

SEQ ID NO: 2606135 - RNA, 19 nt, Homo sapiens
  misc_RNA (1)...(19): siRNA sense strand
aagccaaagcagaggaaga

SEQ ID NO: 2606136 - RNA, 19 nt, Homo sapiens
  misc_RNA (1)...(19): siRNA sense strand
aggcugaggaagagaguga

SEQ ID NO: 2606137 - RNA, 19 nt, Homo sapiens
  misc_RNA (1)...(19): siRNA sense strand
agaagaguggcgacagaaa

SEQ ID NO: 2606138 - RNA, 19 nt, Homo sapiens
  misc_RNA (1)...(19): siRNA sense strand
ggagcaugccaaagcacaa

SEQ ID NO: 2606139 - RNA, 19 nt, Homo sapiens
  misc_RNA (1)...(19): siRNA sense strand
gggaagaagaguggcgaca

SEQ ID NO: 2606140 - RNA, 19 nt, Homo sapiens
  misc_RNA (1)...(19): siRNA sense strand
ggggugaggcugaggaaga

SEQ ID NO: 2606141 - RNA, 19 nt, Homo sapiens
  misc_RNA (1)...(19): siRNA sense strand
ggaucaggagcaugccaaa

SEQ ID NO: 2606142 - RNA, 19 nt, Homo sapiens
  misc_RNA (1)...(19): siRNA sense strand
ccuuguaugugaagaaacu

SEQ ID NO: 2606143 - RNA, 19 nt, Homo sapiens
  misc_RNA (1)...(19): siRNA sense strand
aagaaaagacacagaagau

SEQ ID NO: 2606144 - RNA, 19 nt, Homo sapiens
  misc_RNA (1)...(19): siRNA sense strand
aagaagaagcucuaguaca

SEQ ID NO: 2606145 - RNA, 19 nt, Homo sapiens
  misc_RNA (1)...(19): siRNA sense strand
accuggaagcugagaagaa

SEQ ID NO: 2606146 - RNA, 19 nt, Homo sapiens
  misc_RNA (1)...(19): siRNA sense strand
ccaaaagcagaaagaguuu

SEQ ID NO: 2606147 - RNA, 19 nt, Homo sapiens
  misc_RNA (1)...(19): siRNA sense strand
augugaagaaacugcuaaa

SEQ ID NO: 2606148 - RNA, 19 nt, Homo sapiens
  misc_RNA (1)...(19): siRNA sense strand
aagaagaugaugaacccaa

SEQ ID NO: 2606149 - RNA, 19 nt, Homo sapiens
  misc_RNA (1)...(19): siRNA sense strand
guagcuuagcacugcauaa

SEQ ID NO: 2606150 - RNA, 19 nt, Homo sapiens
  misc_RNA (1)...(19): siRNA sense strand
gguacauaaagaagaugau

SEQ ID NO: 2606151 - RNA, 19 nt, Homo sapiens
  misc_RNA (1)...(19): siRNA sense strand
uuucaagucaagaguaaga

SEQ ID NO: 2606152 - RNA, 19 nt, Homo sapiens
  misc_RNA (1)...(19): siRNA sense strand
aagaguggcgacagaaaga

SEQ ID NO: 2606153 - RNA, 19 nt, Homo sapiens
  misc_RNA (1)...(19): siRNA sense strand
gaacugaggcaacgggaag

SEQ ID NO: 2606154 - RNA, 19 nt, Homo sapiens
  misc_RNA (1)...(19): siRNA sense strand
agccaaagcagaggaagaa

SEQ ID NO: 2606155 - RNA, 19 nt, Homo sapiens
  misc_RNA (1)...(19): siRNA sense strand
ccagaaagccaaagcagag

SEQ ID NO: 2606156 - RNA, 19 nt, Homo sapiens
  misc_RNA (1)...(19): siRNA sense strand
ccucagucaucaaaagaaa

SEQ ID NO: 2606157 - RNA, 19 nt, Homo sapiens
  misc_RNA (1)...(19): siRNA sense strand
aguggaaauaacugcauua

SEQ ID NO: 2606158 - RNA, 19 nt, Homo sapiens
  misc_RNA (1)...(19): siRNA sense strand
cugcauuauggcugcuuua

SEQ ID NO: 2606159 - RNA, 19 nt, Homo sapiens
  misc_RNA (1)...(19): siRNA sense strand
caggaaaggaucaggacuc

SEQ ID NO: 2606160 - RNA, 19 nt, Homo sapiens
  misc_RNA (1)...(19): siRNA sense strand
agaauuuguuucauggcuu

SEQ ID NO: 2606161 - RNA, 19 nt, Homo sapiens
  misc_RNA (1)...(19): siRNA sense strand
caaacaucugguaagacaa

SEQ ID NO: 2606162 - RNA, 19 nt, Homo sapiens
  misc_RNA (1)...(19): siRNA sense strand
agaagauggaaauggaugu

SEQ ID NO: 2606163 - RNA, 19 nt, Homo sapiens
  misc_RNA (1)...(19): siRNA sense strand
gccuccaacuugugggcua

SEQ ID NO: 2606164 - RNA, 19 nt, Homo sapiens
  misc_RNA (1)...(19): siRNA sense strand
ccaacuacuacgaugccua

SEQ ID NO: 2606165 - RNA, 19 nt, Homo sapiens
  misc_RNA (1)...(19): siRNA sense strand
ccugcucaucccagagaaa

SEQ ID NO: 2606166 - RNA, 19 nt, Homo sapiens
  misc_RNA (1)...(19): siRNA sense strand
aagucaagagugaguucaa

SEQ ID NO: 2606167 - RNA, 19 nt, Homo sapiens
  misc_RNA (1)...(19): siRNA sense strand
ugaaauuugagauuggaga

SEQ ID NO: 2606168 - RNA, 19 nt, Homo sapiens
  misc_RNA (1)...(19): siRNA sense strand
caagaggagccuaggggaa

SEQ ID NO: 2606169 - RNA, 19 nt, Homo sapiens
  misc_RNA (1)...(19): siRNA sense strand
ggguugcggacgaggauca

SEQ ID NO: 2606170 - RNA, 19 nt, Homo sapiens
  misc_RNA (1)...(19): siRNA sense strand
gggucaaggaaggcagcaa

SEQ ID NO: 2606171 - RNA, 19 nt, Homo sapiens
  misc_RNA (1)...(19): siRNA sense strand
gcaagcugcuggagggaga

SEQ ID NO: 2606172 - RNA, 19 nt, Homo sapiens
  misc_RNA (1)...(19): siRNA sense strand
agguggagcugcaggccaa

SEQ ID NO: 2606173 - RNA, 19 nt, Homo sapiens
  misc_RNA (1)...(19): siRNA sense strand
cggcaauugcagaggcuga

SEQ ID NO: 2606174 - RNA, 19 nt, Homo sapiens
  misc_RNA (1)...(19): siRNA sense strand
ggggaugaccugaggaaca

SEQ ID NO: 2606175 - RNA, 19 nt, Homo sapiens
  misc_RNA (1)...(19): siRNA sense strand
ugaacaagguggagcugca

SEQ ID NO: 2606176 - RNA, 19 nt, Homo sapiens
  misc_RNA (1)...(19): siRNA sense strand
aggaguagguagugguuuu

SEQ ID NO: 2606177 - RNA, 19 nt, Homo sapiens
  misc_RNA (1)...(19): siRNA sense strand
cuacaagucugguggugga

SEQ ID NO: 2606178 - RNA, 19 nt, Homo sapiens
  misc_RNA (1)...(19): siRNA sense strand
uggcagaggaguagguagu

SEQ ID NO: 2606179 - RNA, 19 nt, Homo sapiens
  misc_RNA (1)...(19): siRNA sense strand
aggaacaccaagagugaga

SEQ ID NO: 2606180 - RNA, 19 nt, Homo sapiens
  misc_RNA (1)...(19): siRNA sense strand
ggucaguggcaguggcagu

SEQ ID NO: 2606181 - RNA, 19 nt, Homo sapiens
  misc_RNA (1)...(19): siRNA sense strand
uggcuuuggugguggcaga

SEQ ID NO: 2606182 - RNA, 19 nt, Homo sapiens
  misc_RNA (1)...(19): siRNA sense strand
ggagcaagucugaagcuga

SEQ ID NO: 2606183 - RNA, 19 nt, Homo sapiens
  misc_RNA (1)...(19): siRNA sense strand
uggcaguagccguggaguu

SEQ ID NO: 2606184 - RNA, 19 nt, Homo sapiens
  misc_RNA (1)...(19): siRNA sense strand
gugcaggaugucuggagaa

SEQ ID NO: 2606185 - RNA, 19 nt, Homo sapiens
  misc_RNA (1)...(19): siRNA sense strand
uggugguggcagaggagua

SEQ ID NO: 2606186 - RNA, 19 nt, Homo sapiens
  misc_RNA (1)...(19): siRNA sense strand
agaucaagacccucaacaa

SEQ ID NO: 2606187 - RNA, 19 nt, Homo sapiens
  misc_RNA (1)...(19): siRNA sense strand
acaccaagagugagaucau

SEQ ID NO: 2606188 - RNA, 19 nt, Homo sapiens
  misc_RNA (1)...(19): siRNA sense strand
ucaagaagcagaaugccaa

SEQ ID NO: 2606189 - RNA, 19 nt, Homo sapiens
  misc_RNA (1)...(19): siRNA sense strand
gggaacagaucaagacccu

SEQ ID NO: 2606190 - RNA, 19 nt, Homo sapiens
  misc_RNA (1)...(19): siRNA sense strand
aagaaauccuucaguggca

SEQ ID NO: 2606191 - RNA, 19 nt, Homo sapiens
  misc_RNA (1)...(19): siRNA sense strand
gaacagaucaagacccuca

SEQ ID NO: 2606192 - RNA, 19 nt, Homo sapiens
  misc_RNA (1)...(19): siRNA sense strand
agaacaagguccuggagac

SEQ ID NO: 2606193 - RNA, 19 nt, Homo sapiens
  misc_RNA (1)...(19): siRNA sense strand
uggcuauggagguggcuuu

SEQ ID NO: 2606194 - RNA, 19 nt, Homo sapiens
  misc_RNA (1)...(19): siRNA sense strand
gagauugcccagaggagca

SEQ ID NO: 2606195 - RNA, 19 nt, Homo sapiens
  misc_RNA (1)...(19): siRNA sense strand
cuacagaaggcuaaggaug

SEQ ID NO: 2606196 - RNA, 19 nt, Homo sapiens
  misc_RNA (1)...(19): siRNA sense strand
caacaaacgcacugccgca

SEQ ID NO: 2606197 - RNA, 19 nt, Homo sapiens
  misc_RNA (1)...(19): siRNA sense strand
agggagagcugaaaagcau

SEQ ID NO: 2606198 - RNA, 19 nt, Homo sapiens
  misc_RNA (1)...(19): siRNA sense strand
uggcuuugcagguggcuau

SEQ ID NO: 2606199 - RNA, 19 nt, Homo sapiens
  misc_RNA (1)...(19): siRNA sense strand
cuuuggugguccuggugua

SEQ ID NO: 2606200 - RNA, 19 nt, Homo sapiens
  misc_RNA (1)...(19): siRNA sense strand
gggaaauggaagaucgauu

SEQ ID NO: 2606201 - RNA, 19 nt, Homo sapiens
  misc_RNA (1)...(19): siRNA sense strand
gaauauuaugagagagcuu

SEQ ID NO: 2606202 - RNA, 19 nt, Homo sapiens
  misc_RNA (1)...(19): siRNA sense strand
uggaacagcuggagcgcau

SEQ ID NO: 2606203 - RNA, 19 nt, Homo sapiens
  misc_RNA (1)...(19): siRNA sense strand
ugaaagaagaauugaacca

SEQ ID NO: 2606204 - RNA, 19 nt, Homo sapiens
  misc_RNA (1)...(19): siRNA sense strand
cauaauuaaaggugcagaa

SEQ ID NO: 2606205 - RNA, 19 nt, Homo sapiens
  misc_RNA (1)...(19): siRNA sense strand
ugaaaauguugcagggaga

SEQ ID NO: 2606206 - RNA, 19 nt, Homo sapiens
  misc_RNA (1)...(19): siRNA sense strand
aagaaauccuuaagggcga

SEQ ID NO: 2606207 - RNA, 19 nt, Homo sapiens
  misc_RNA (1)...(19): siRNA sense strand
ggacaauguggcagcugaa

SEQ ID NO: 2606208 - RNA, 19 nt, Homo sapiens
  misc_RNA (1)...(19): siRNA sense strand
ccaguauggauguggagaa

SEQ ID NO: 2606209 - RNA, 19 nt, Homo sapiens
  misc_RNA (1)...(19): siRNA sense strand
agagggaagagguuggaaa

SEQ ID NO: 2606210 - RNA, 19 nt, Homo sapiens
  misc_RNA (1)...(19): siRNA sense strand
ugaggaaggagaaggaaga

SEQ ID NO: 2606211 - RNA, 19 nt, Homo sapiens
  misc_RNA (1)...(19): siRNA sense strand
agaauuagagauugaguca

SEQ ID NO: 2606212 - RNA, 19 nt, Homo sapiens
  misc_RNA (1)...(19): siRNA sense strand
cuuccgaucuagaguacaa

SEQ ID NO: 2606213 - RNA, 19 nt, Homo sapiens
  misc_RNA (1)...(19): siRNA sense strand
caguauggauguggagaau

SEQ ID NO: 2606214 - RNA, 19 nt, Homo sapiens
  misc_RNA (1)...(19): siRNA sense strand
aagcauaauuaaaggugca

SEQ ID NO: 2606215 - RNA, 19 nt, Homo sapiens
  misc_RNA (1)...(19): siRNA sense strand
ccaagaagacacugaggca

SEQ ID NO: 2606216 - RNA, 19 nt, Homo sapiens
  misc_RNA (1)...(19): siRNA sense strand
gaaggaugagauugagaau

SEQ ID NO: 2606217 - RNA, 19 nt, Homo sapiens
  misc_RNA (1)...(19): siRNA sense strand
aagaacacgcauuggauau

SEQ ID NO: 2606218 - RNA, 19 nt, Homo sapiens
  misc_RNA (1)...(19): siRNA sense strand
guuauaacuuccugaggga

SEQ ID NO: 2606219 - RNA, 19 nt, Homo sapiens
  misc_RNA (1)...(19): siRNA sense strand
aggccagagcuguguuuaa

SEQ ID NO: 2606220 - RNA, 19 nt, Homo sapiens
  misc_RNA (1)...(19): siRNA sense strand
guggagugaaggugccaaa

SEQ ID NO: 2606221 - RNA, 19 nt, Homo sapiens
  misc_RNA (1)...(19): siRNA sense strand
augagagagcuuugagaga

SEQ ID NO: 2606222 - RNA, 19 nt, Homo sapiens
  misc_RNA (1)...(19): siRNA sense strand
gagagucagcagaggcauu

SEQ ID NO: 2606223 - RNA, 19 nt, Homo sapiens
  misc_RNA (1)...(19): siRNA sense strand
augcggagauuaaggcuau

SEQ ID NO: 2606224 - RNA, 19 nt, Homo sapiens
  misc_RNA (1)...(19): siRNA sense strand
agauugagucacagacaga

SEQ ID NO: 2606225 - RNA, 19 nt, Homo sapiens
  misc_RNA (1)...(19): siRNA sense strand
acugaauuguuuagagacu

SEQ ID NO: 2606226 - RNA, 19 nt, Homo sapiens
  misc_RNA (1)...(19): siRNA sense strand
gggacaauguggcagcuga

SEQ ID NO: 2606227 - RNA, 19 nt, Homo sapiens
  misc_RNA (1)...(19): siRNA sense strand
gagaauauuaugagagagc

SEQ ID NO: 2606228 - RNA, 19 nt, Homo sapiens
  misc_RNA (1)...(19): siRNA sense strand
aaggcgagaauuagagauu

SEQ ID NO: 2606229 - RNA, 19 nt, Homo sapiens
  misc_RNA (1)...(19): siRNA sense strand
uguggcaaggcgagaauua

SEQ ID NO: 2606230 - RNA, 19 nt, Homo sapiens
  misc_RNA (1)...(19): siRNA sense strand
agagcagccuacaacgaaa

SEQ ID NO: 2606231 - RNA, 19 nt, Homo sapiens
  misc_RNA (1)...(19): siRNA sense strand
ggcgaacauaagagaauau

SEQ ID NO: 2606232 - RNA, 19 nt, Homo sapiens
  misc_RNA (1)...(19): siRNA sense strand
aauacaagcaguugagugu

SEQ ID NO: 2606233 - RNA, 19 nt, Homo sapiens
  misc_RNA (1)...(19): siRNA sense strand
cauuuaagaaggaugagau

SEQ ID NO: 2606234 - RNA, 19 nt, Homo sapiens
  misc_RNA (1)...(19): siRNA sense strand
auggaaagacgauguucaa

SEQ ID NO: 2606235 - RNA, 19 nt, Homo sapiens
  misc_RNA (1)...(19): siRNA sense strand
aggccauguggaaguguua

SEQ ID NO: 2606236 - RNA, 19 nt, Homo sapiens
  misc_RNA (1)...(19): siRNA sense strand
uacaaaauccagagaagaa

SEQ ID NO: 2606237 - RNA, 19 nt, Homo sapiens
  misc_RNA (1)...(19): siRNA sense strand
aggagaaggaagaauuuga

SEQ ID NO: 2606238 - RNA, 19 nt, Homo sapiens
  misc_RNA (1)...(19): siRNA sense strand
auggcgaacauaagagaau

SEQ ID NO: 2606239 - RNA, 19 nt, Homo sapiens
  misc_RNA (1)...(19): siRNA sense strand
ucaaggaagacuuuaucaa

SEQ ID NO: 2606240 - RNA, 19 nt, Homo sapiens
  misc_RNA (1)...(19): siRNA sense strand
cgaaacaagccaaagcagu

SEQ ID NO: 2606241 - RNA, 19 nt, Homo sapiens
  misc_RNA (1)...(19): siRNA sense strand
gcuuggaaagauuuacuaa

SEQ ID NO: 2606242 - RNA, 19 nt, Homo sapiens
  misc_RNA (1)...(19): siRNA sense strand
aggugcugaucgagucaaa

SEQ ID NO: 2606243 - RNA, 19 nt, Homo sapiens
  misc_RNA (1)...(19): siRNA sense strand
agaggcauuuguagcuaaa

SEQ ID NO: 2606244 - RNA, 19 nt, Homo sapiens
  misc_RNA (1)...(19): siRNA sense strand
aggcauuuguagcuaaaca

SEQ ID NO: 2606245 - RNA, 19 nt, Homo sapiens
  misc_RNA (1)...(19): siRNA sense strand
ucaggaacgcauagaagau

SEQ ID NO: 2606246 - RNA, 19 nt, Homo sapiens
  misc_RNA (1)...(19): siRNA sense strand
ugucagaaugccaauacaa

SEQ ID NO: 2606247 - RNA, 19 nt, Homo sapiens
  misc_RNA (1)...(19): siRNA sense strand
gauccggagaagaagaaca

SEQ ID NO: 2606248 - RNA, 19 nt, Homo sapiens
  misc_RNA (1)...(19): siRNA sense strand
agauaauucaggaacgcau

SEQ ID NO: 2606249 - RNA, 19 nt, Homo sapiens
  misc_RNA (1)...(19): siRNA sense strand
cggaauuggaacagcugga

SEQ ID NO: 2606250 - RNA, 19 nt, Homo sapiens
  misc_RNA (1)...(19): siRNA sense strand
ccugcaauauggcgaacau

SEQ ID NO: 2606251 - RNA, 19 nt, Homo sapiens
  misc_RNA (1)...(19): siRNA sense strand
ggacagaucuacuggcgag

SEQ ID NO: 2606252 - RNA, 19 nt, Homo sapiens
  misc_RNA (1)...(19): siRNA sense strand
gggagagucagcagaggca

SEQ ID NO: 2606253 - RNA, 19 nt, Homo sapiens
  misc_RNA (1)...(19): siRNA sense strand
gcuacuaaaacucgacuua

SEQ ID NO: 2606254 - RNA, 19 nt, Homo sapiens
  misc_RNA (1)...(19): siRNA sense strand
ccuucaggcucuacacaca

SEQ ID NO: 2606255 - RNA, 19 nt, Homo sapiens
  misc_RNA (1)...(19): siRNA sense strand
ggaaguggcaguagcugga

SEQ ID NO: 2606256 - RNA, 19 nt, Homo sapiens
  misc_RNA (1)...(19): siRNA sense strand
gcuuuaaguggaugggaaa

SEQ ID NO: 2606257 - RNA, 19 nt, Homo sapiens
  misc_RNA (1)...(19): siRNA sense strand
gacuaauagcagaagguaa

SEQ ID NO: 2606258 - RNA, 19 nt, Homo sapiens
  misc_RNA (1)...(19): siRNA sense strand
gcgugaacagggagacaaa

SEQ ID NO: 2606259 - RNA, 19 nt, Homo sapiens
  misc_RNA (1)...(19): siRNA sense strand
ucagaaacuacgauggaaa

SEQ ID NO: 2606260 - RNA, 19 nt, Homo sapiens
  misc_RNA (1)...(19): siRNA sense strand
ggcuuuaaguggaugggaa

SEQ ID NO: 2606261 - RNA, 19 nt, Homo sapiens
  misc_RNA (1)...(19): siRNA sense strand
ccgaauggaguuugggaca

SEQ ID NO: 2606262 - RNA, 19 nt, Homo sapiens
  misc_RNA (1)...(19): siRNA sense strand
cgauaaagggauuucucaa

SEQ ID NO: 2606263 - RNA, 19 nt, Homo sapiens
  misc_RNA (1)...(19): siRNA sense strand
gcuaauagaccaggggaaa

SEQ ID NO: 2606264 - RNA, 19 nt, Homo sapiens
  misc_RNA (1)...(19): siRNA sense strand
acuuaaagcagaaaggcau

SEQ ID NO: 2606265 - RNA, 19 nt, Homo sapiens
  misc_RNA (1)...(19): siRNA sense strand
ggguagcagcagaagguuu

SEQ ID NO: 2606266 - RNA, 19 nt, Homo sapiens
  misc_RNA (1)...(19): siRNA sense strand
ccaaacagcuaauagacca

SEQ ID NO: 2606267 - RNA, 19 nt, Homo sapiens
  misc_RNA (1)...(19): siRNA sense strand
ggaaagagaagaaccagga

SEQ ID NO: 2606268 - RNA, 19 nt, Homo sapiens
  misc_RNA (1)...(19): siRNA sense strand
aaagcaagacaguggugaa

SEQ ID NO: 2606269 - RNA, 19 nt, Homo sapiens
  misc_RNA (1)...(19): siRNA sense strand
guuauaaggucuauuggga

SEQ ID NO: 2606270 - RNA, 19 nt, Homo sapiens
  misc_RNA (1)...(19): siRNA sense strand
ggaccuuacaacuggcuau

SEQ ID NO: 2606271 - RNA, 19 nt, Homo sapiens
  misc_RNA (1)...(19): siRNA sense strand
cagaaacuacgauggaaaa

SEQ ID NO: 2606272 - RNA, 19 nt, Homo sapiens
  misc_RNA (1)...(19): siRNA sense strand
gaacagugauccugagcag

SEQ ID NO: 2606273 - RNA, 19 nt, Homo sapiens
  misc_RNA (1)...(19): siRNA sense strand
agggauuucucaagcuauu

SEQ ID NO: 2606274 - RNA, 19 nt, Homo sapiens
  misc_RNA (1)...(19): siRNA sense strand
ggauaauggagcucagauc

SEQ ID NO: 2606275 - RNA, 19 nt, Homo sapiens
  misc_RNA (1)...(19): siRNA sense strand
ccagaauuguuuuagcuaa

SEQ ID NO: 2606276 - RNA, 19 nt, Homo sapiens
  misc_RNA (1)...(19): siRNA sense strand
gggagacaaaggugaaguu

SEQ ID NO: 2606277 - RNA, 19 nt, Homo sapiens
  misc_RNA (1)...(19): siRNA sense strand
guaugaaugacuugaccau

SEQ ID NO: 2606278 - RNA, 19 nt, Homo sapiens
  misc_RNA (1)...(19): siRNA sense strand
acagggagacaaaggugaa

SEQ ID NO: 2606279 - RNA, 19 nt, Homo sapiens
  misc_RNA (1)...(19): siRNA sense strand
gggaaaggugucuugacuu

SEQ ID NO: 2606280 - RNA, 19 nt, Homo sapiens
  misc_RNA (1)...(19): siRNA sense strand
gcuuguggcaaauuugaaa

SEQ ID NO: 2606281 - RNA, 19 nt, Homo sapiens
  misc_RNA (1)...(19): siRNA sense strand
ggauacaugugcugcccuu

SEQ ID NO: 2606282 - RNA, 19 nt, Homo sapiens
  misc_RNA (1)...(19): siRNA sense strand
gcagaagguaauaaagaag

SEQ ID NO: 2606283 - RNA, 19 nt, Homo sapiens
  misc_RNA (1)...(19): siRNA sense strand
ugauagccaaccugauaaa

SEQ ID NO: 2606284 - RNA, 19 nt, Homo sapiens
  misc_RNA (1)...(19): siRNA sense strand
ugauagacuugcuguggca

SEQ ID NO: 2606285 - RNA, 19 nt, Homo sapiens
  misc_RNA (1)...(19): siRNA sense strand
cuaauagaccaggggaaaa

SEQ ID NO: 2606286 - RNA, 19 nt, Homo sapiens
  misc_RNA (1)...(19): siRNA sense strand
cagcagaagguuugcccga

SEQ ID NO: 2606287 - RNA, 19 nt, Homo sapiens
  misc_RNA (1)...(19): siRNA sense strand
cuuggaaagagaagaacca

SEQ ID NO: 2606288 - RNA, 19 nt, Homo sapiens
  misc_RNA (1)...(19): siRNA sense strand
aggccauuuauguggagua

SEQ ID NO: 2606289 - RNA, 19 nt, Homo sapiens
  misc_RNA (1)...(19): siRNA sense strand
uggaagugauagagggcac

SEQ ID NO: 2606290 - RNA, 19 nt, Homo sapiens
  misc_RNA (1)...(19): siRNA sense strand
augaggagaaugaggaguu

SEQ ID NO: 2606291 - RNA, 19 nt, Homo sapiens
  misc_RNA (1)...(19): siRNA sense strand
uugagggauaugaggagaa

SEQ ID NO: 2606292 - RNA, 19 nt, Homo sapiens
  misc_RNA (1)...(19): siRNA sense strand
uggagguggaagugauaga

SEQ ID NO: 2606293 - RNA, 19 nt, Homo sapiens
  misc_RNA (1)...(19): siRNA sense strand
auugagaccuggagggaga

SEQ ID NO: 2606294 - RNA, 19 nt, Homo sapiens
  misc_RNA (1)...(19): siRNA sense strand
ugggagaagcccugaggaa

SEQ ID NO: 2606295 - RNA, 19 nt, Homo sapiens
  misc_RNA (1)...(19): siRNA sense strand
gggaugacgaacugcggaa

SEQ ID NO: 2606296 - RNA, 19 nt, Homo sapiens
  misc_RNA (1)...(19): siRNA sense strand
ggcagaagucgguggagga

SEQ ID NO: 2606297 - RNA, 19 nt, Homo sapiens
  misc_RNA (1)...(19): siRNA sense strand
cugcacugccuguggucaa

SEQ ID NO: 2606298 - RNA, 19 nt, Homo sapiens
  misc_RNA (1)...(19): siRNA sense strand
ccuacaaccaccuggacau

SEQ ID NO: 2606299 - RNA, 19 nt, Homo sapiens
  misc_RNA (1)...(19): siRNA sense strand
agaccuggagggagaucua

SEQ ID NO: 2606300 - RNA, 19 nt, Homo sapiens
  misc_RNA (1)...(19): siRNA sense strand
cacuaugucuggagggagu

SEQ ID NO: 2606301 - RNA, 19 nt, Homo sapiens
  misc_RNA (1)...(19): siRNA sense strand
cagaaagaauccgugggaa

SEQ ID NO: 2606302 - RNA, 19 nt, Homo sapiens
  misc_RNA (1)...(19): siRNA sense strand
uggacaugagugugggaga

SEQ ID NO: 2606303 - RNA, 19 nt, Homo sapiens
  misc_RNA (1)...(19): siRNA sense strand
cugaggaagaggacacuau

SEQ ID NO: 2606304 - RNA, 19 nt, Homo sapiens
  misc_RNA (1)...(19): siRNA sense strand
ccagcagcucagaaagaau

SEQ ID NO: 2606305 - RNA, 19 nt, Homo sapiens
  misc_RNA (1)...(19): siRNA sense strand
ccucuaugggacagcaaga

SEQ ID NO: 2606306 - RNA, 19 nt, Homo sapiens
  misc_RNA (1)...(19): siRNA sense strand
cuaugagauugaacaacau

SEQ ID NO: 2606307 - RNA, 19 nt, Homo sapiens
  misc_RNA (1)...(19): siRNA sense strand
cuguauuauucaaggcuua

SEQ ID NO: 2606308 - RNA, 19 nt, Homo sapiens
  misc_RNA (1)...(19): siRNA sense strand
uuucagagucggagaggaa

SEQ ID NO: 2606309 - RNA, 19 nt, Homo sapiens
  misc_RNA (1)...(19): siRNA sense strand
gcuacaaauaccuggagaa

SEQ ID NO: 2606310 - RNA, 19 nt, Homo sapiens
  misc_RNA (1)...(19): siRNA sense strand
ccaagaagaucuagagacc

SEQ ID NO: 2606311 - RNA, 19 nt, Homo sapiens
  misc_RNA (1)...(19): siRNA sense strand
augucaaggaggagaugaa

SEQ ID NO: 2606312 - RNA, 19 nt, Homo sapiens
  misc_RNA (1)...(19): siRNA sense strand
gcagaugacaugaugcgua

SEQ ID NO: 2606313 - RNA, 19 nt, Homo sapiens
  misc_RNA (1)...(19): siRNA sense strand
aagcugaaguccugagcga

SEQ ID NO: 2606314 - RNA, 19 nt, Homo sapiens
  misc_RNA (1)...(19): siRNA sense strand
cagcaaaagccaacgcuau

SEQ ID NO: 2606315 - RNA, 19 nt, Homo sapiens
  misc_RNA (1)...(19): siRNA sense strand
ucguaaggagcuccagaaa

SEQ ID NO: 2606316 - RNA, 19 nt, Homo sapiens
  misc_RNA (1)...(19): siRNA sense strand
gauaacagacugauggaac

SEQ ID NO: 2606317 - RNA, 19 nt, Homo sapiens
  misc_RNA (1)...(19): siRNA sense strand
auuuggaagcaguagcuaa

SEQ ID NO: 2606318 - RNA, 19 nt, Homo sapiens
  misc_RNA (1)...(19): siRNA sense strand
ucuucuggcuaauggaaca

SEQ ID NO: 2606319 - RNA, 19 nt, Homo sapiens
  misc_RNA (1)...(19): siRNA sense strand
auaacagacugauggaacu

SEQ ID NO: 2606320 - RNA, 19 nt, Homo sapiens
  misc_RNA (1)...(19): siRNA sense strand
guacacuggcagaugacau

SEQ ID NO: 2606321 - RNA, 19 nt, Homo sapiens
  misc_RNA (1)...(19): siRNA sense strand
ucagagucggagaggaaca

SEQ ID NO: 2606322 - RNA, 19 nt, Homo sapiens
  misc_RNA (1)...(19): siRNA sense strand
agcugcaagucuucggaaa

SEQ ID NO: 2606323 - RNA, 19 nt, Homo sapiens
  misc_RNA (1)...(19): siRNA sense strand
aaguaaaguuggaugagaa

SEQ ID NO: 2606324 - RNA, 19 nt, Homo sapiens
  misc_RNA (1)...(19): siRNA sense strand
gggaagagggagaggaguu

SEQ ID NO: 2606325 - RNA, 19 nt, Homo sapiens
  misc_RNA (1)...(19): siRNA sense strand
gcugaauaacagugggcaa

SEQ ID NO: 2606326 - RNA, 19 nt, Homo sapiens
  misc_RNA (1)...(19): siRNA sense strand
guauauaaagccagggaca

SEQ ID NO: 2606327 - RNA, 19 nt, Homo sapiens
  misc_RNA (1)...(19): siRNA sense strand
ggaaaggaguccaaggguu

SEQ ID NO: 2606328 - RNA, 19 nt, Homo sapiens
  misc_RNA (1)...(19): siRNA sense strand
guuguuaacaugaaggaaa

SEQ ID NO: 2606329 - RNA, 19 nt, Homo sapiens
  misc_RNA (1)...(19): siRNA sense strand
ugaagaaagagaaggaaca

SEQ ID NO: 2606330 - RNA, 19 nt, Homo sapiens
  misc_RNA (1)...(19): siRNA sense strand
aaguagaaguccugcauau

SEQ ID NO: 2606331 - RNA, 19 nt, Homo sapiens
  misc_RNA (1)...(19): siRNA sense strand
agaaagaagacaaacagaa

SEQ ID NO: 2606332 - RNA, 19 nt, Homo sapiens
  misc_RNA (1)...(19): siRNA sense strand
auauaaagccagggacaaa

SEQ ID NO: 2606333 - RNA, 19 nt, Homo sapiens
  misc_RNA (1)...(19): siRNA sense strand
aggaaauugucacagauaa

SEQ ID NO: 2606334 - RNA, 19 nt, Homo sapiens
  misc_RNA (1)...(19): siRNA sense strand
uaauggaaggauuggaaua

SEQ ID NO: 2606335 - RNA, 19 nt, Homo sapiens
  misc_RNA (1)...(19): siRNA sense strand
ccacaaugccacaggagga

SEQ ID NO: 2606336 - RNA, 19 nt, Homo sapiens
  misc_RNA (1)...(19): siRNA sense strand
cugaauaacagugggcaaa

SEQ ID NO: 2606337 - RNA, 19 nt, Homo sapiens
  misc_RNA (1)...(19): siRNA sense strand
cugaaagaggagauuguua

SEQ ID NO: 2606338 - RNA, 19 nt, Homo sapiens
  misc_RNA (1)...(19): siRNA sense strand
cggcauaaguccaaacacu

SEQ ID NO: 2606339 - RNA, 19 nt, Homo sapiens
  misc_RNA (1)...(19): siRNA sense strand
ugccaugaguuguggagua

SEQ ID NO: 2606340 - RNA, 19 nt, Homo sapiens
  misc_RNA (1)...(19): siRNA sense strand
gugaauuggcaguguuauu

SEQ ID NO: 2606341 - RNA, 19 nt, Homo sapiens
  misc_RNA (1)...(19): siRNA sense strand
agaaggaaccuauggccaa

SEQ ID NO: 2606342 - RNA, 19 nt, Homo sapiens
  misc_RNA (1)...(19): siRNA sense strand
acaaugagaaagagggcuu

SEQ ID NO: 2606343 - RNA, 19 nt, Homo sapiens
  misc_RNA (1)...(19): siRNA sense strand
aucuaaacacagagguaaa

SEQ ID NO: 2606344 - RNA, 19 nt, Homo sapiens
  misc_RNA (1)...(19): siRNA sense strand
gagacagaaacaucagaaa

SEQ ID NO: 2606345 - RNA, 19 nt, Homo sapiens
  misc_RNA (1)...(19): siRNA sense strand
uggacaaguuugacauuau

SEQ ID NO: 2606346 - RNA, 19 nt, Homo sapiens
  misc_RNA (1)...(19): siRNA sense strand
ccaugaaaccgaagaagca

SEQ ID NO: 2606347 - RNA, 19 nt, Homo sapiens
  misc_RNA (1)...(19): siRNA sense strand
aaacuagaccgaagggaga

SEQ ID NO: 2606348 - RNA, 19 nt, Homo sapiens
  misc_RNA (1)...(19): siRNA sense strand
acaucuaaacacagaggua

SEQ ID NO: 2606349 - RNA, 19 nt, Homo sapiens
  misc_RNA (1)...(19): siRNA sense strand
gcacagggaacaagagacu

SEQ ID NO: 2606350 - RNA, 19 nt, Homo sapiens
  misc_RNA (1)...(19): siRNA sense strand
gacuagacaaugagaaaga

SEQ ID NO: 2606351 - RNA, 19 nt, Homo sapiens
  misc_RNA (1)...(19): siRNA sense strand
ugacaagaacagugggcca

SEQ ID NO: 2606352 - RNA, 19 nt, Homo sapiens
  misc_RNA (1)...(19): siRNA sense strand
uggagaaagaagacaaaca

SEQ ID NO: 2606353 - RNA, 19 nt, Homo sapiens
  misc_RNA (1)...(19): siRNA sense strand
cagcugaaucaaagugaau

SEQ ID NO: 2606354 - RNA, 19 nt, Homo sapiens
  misc_RNA (1)...(19): siRNA sense strand
gagaagaccaggaaagaac

SEQ ID NO: 2606355 - RNA, 19 nt, Homo sapiens
  misc_RNA (1)...(19): siRNA sense strand
cacaaagaccggaguaaaa

SEQ ID NO: 2606356 - RNA, 19 nt, Homo sapiens
  misc_RNA (1)...(19): siRNA sense strand
ggaaacgcuguguggacaa

SEQ ID NO: 2606357 - RNA, 19 nt, Homo sapiens
  misc_RNA (1)...(19): siRNA sense strand
uggcaguucucuugaguca

SEQ ID NO: 2606358 - RNA, 19 nt, Homo sapiens
  misc_RNA (1)...(19): siRNA sense strand
caagaaaaguccuggaagu

SEQ ID NO: 2606359 - RNA, 19 nt, Homo sapiens
  misc_RNA (1)...(19): siRNA sense strand
caguagaggcuaaggauuc

SEQ ID NO: 2606360 - RNA, 19 nt, Homo sapiens
  misc_RNA (1)...(19): siRNA sense strand
acacaacagcugaaucaaa

SEQ ID NO: 2606361 - RNA, 19 nt, Homo sapiens
  misc_RNA (1)...(19): siRNA sense strand
acaguucaguagaggcuaa

SEQ ID NO: 2606362 - RNA, 19 nt, Homo sapiens
  misc_RNA (1)...(19): siRNA sense strand
caggagaacuaguggcucu

SEQ ID NO: 2606363 - RNA, 19 nt, Homo sapiens
  misc_RNA (1)...(19): siRNA sense strand
agaaacuaccucagggaca

SEQ ID NO: 2606364 - RNA, 19 nt, Homo sapiens
  misc_RNA (1)...(19): siRNA sense strand
caccaggccuugagaccaa

SEQ ID NO: 2606365 - RNA, 19 nt, Homo sapiens
  misc_RNA (1)...(19): siRNA sense strand
gaaacaggguucagugcca

SEQ ID NO: 2606366 - RNA, 19 nt, Homo sapiens
  misc_RNA (1)...(19): siRNA sense strand
gggacaaagacacaggaga

SEQ ID NO: 2606367 - RNA, 19 nt, Homo sapiens
  misc_RNA (1)...(19): siRNA sense strand
agacagaaacaucagaaaa

SEQ ID NO: 2606368 - RNA, 19 nt, Homo sapiens
  misc_RNA (1)...(19): siRNA sense strand
caugaguuguggaguaaga

SEQ ID NO: 2606369 - RNA, 19 nt, Homo sapiens
  misc_RNA (1)...(19): siRNA sense strand
ugggauuauuggagaagga

SEQ ID NO: 2606370 - RNA, 19 nt, Homo sapiens
  misc_RNA (1)...(19): siRNA sense strand
aggugagacuagacaauga

SEQ ID NO: 2606371 - RNA, 19 nt, Homo sapiens
  misc_RNA (1)...(19): siRNA sense strand
ucgaaggcgucuacgagaa

SEQ ID NO: 2606372 - RNA, 19 nt, Homo sapiens
  misc_RNA (1)...(19): siRNA sense strand
caggcagucuggaggaaaa

SEQ ID NO: 2606373 - RNA, 19 nt, Homo sapiens
  misc_RNA (1)...(19): siRNA sense strand
ccuugagaccaauggagua

SEQ ID NO: 2606374 - RNA, 19 nt, Homo sapiens
  misc_RNA (1)...(19): siRNA sense strand
guucgaaugaggagacuga

SEQ ID NO: 2606375 - RNA, 19 nt, Homo sapiens
  misc_RNA (1)...(19): siRNA sense strand
gaaggugagacuagacaau

SEQ ID NO: 2606376 - RNA, 19 nt, Homo sapiens
  misc_RNA (1)...(19): siRNA sense strand
aaagcuaaacagaccgaaa

SEQ ID NO: 2606377 - RNA, 19 nt, Homo sapiens
  misc_RNA (1)...(19): siRNA sense strand
gaaaggaguccaaggguuc

SEQ ID NO: 2606378 - RNA, 19 nt, Homo sapiens
  misc_RNA (1)...(19): siRNA sense strand
guuugacauuauugggauu

SEQ ID NO: 2606379 - RNA, 19 nt, Homo sapiens
  misc_RNA (1)...(19): siRNA sense strand
aaggaaauugucacagaua

SEQ ID NO: 2606380 - RNA, 19 nt, Homo sapiens
  misc_RNA (1)...(19): siRNA sense strand
cugugaagaaagagaagga

SEQ ID NO: 2606381 - RNA, 19 nt, Homo sapiens
  misc_RNA (1)...(19): siRNA sense strand
cuccagaaccaaaggcaau

SEQ ID NO: 2606382 - RNA, 19 nt, Homo sapiens
  misc_RNA (1)...(19): siRNA sense strand
cgggauauuaaguguucua

SEQ ID NO: 2606383 - RNA, 19 nt, Homo sapiens
  misc_RNA (1)...(19): siRNA sense strand
ccgaagaagcaauaucgaa

SEQ ID NO: 2606384 - RNA, 19 nt, Homo sapiens
  misc_RNA (1)...(19): siRNA sense strand
gaugaaaacccaagagcca

SEQ ID NO: 2606385 - RNA, 19 nt, Homo sapiens
  misc_RNA (1)...(19): siRNA sense strand
ggacuuacuaaaagcuaaa

SEQ ID NO: 2606386 - RNA, 19 nt, Homo sapiens
  misc_RNA (1)...(19): siRNA sense strand
ggagaagaccaggaaagaa

SEQ ID NO: 2606387 - RNA, 19 nt, Homo sapiens
  misc_RNA (1)...(19): siRNA sense strand
auucagguuuggagucuaa

SEQ ID NO: 2606388 - RNA, 19 nt, Homo sapiens
  misc_RNA (1)...(19): siRNA sense strand
agaaagagcugaagagcag

SEQ ID NO: 2606389 - RNA, 19 nt, Homo sapiens
  misc_RNA (1)...(19): siRNA sense strand
guuggaagaaagagagaga

SEQ ID NO: 2606390 - RNA, 19 nt, Homo sapiens
  misc_RNA (1)...(19): siRNA sense strand
gggaaaaggagaaggugau

SEQ ID NO: 2606391 - RNA, 19 nt, Homo sapiens
  misc_RNA (1)...(19): siRNA sense strand
cuucaagaacugugcaaaa

SEQ ID NO: 2606392 - RNA, 19 nt, Homo sapiens
  misc_RNA (1)...(19): siRNA sense strand
aagcugaagaagagaggau

SEQ ID NO: 2606393 - RNA, 19 nt, Homo sapiens
  misc_RNA (1)...(19): siRNA sense strand
ggggaaaaggagaagguga

SEQ ID NO: 2606394 - RNA, 19 nt, Homo sapiens
  misc_RNA (1)...(19): siRNA sense strand
ccgccaaccuugaugcaga

SEQ ID NO: 2606395 - RNA, 19 nt, Homo sapiens
  misc_RNA (1)...(19): siRNA sense strand
gaagaaagagagagagcug

SEQ ID NO: 2606396 - RNA, 19 nt, Homo sapiens
  misc_RNA (1)...(19): siRNA sense strand
ugaccagaagaaagacaaa

SEQ ID NO: 2606397 - RNA, 19 nt, Homo sapiens
  misc_RNA (1)...(19): siRNA sense strand
gagaaggugauuugagcca

SEQ ID NO: 2606398 - RNA, 19 nt, Homo sapiens
  misc_RNA (1)...(19): siRNA sense strand
aagaaagagcugaagagca

SEQ ID NO: 2606399 - RNA, 19 nt, Homo sapiens
  misc_RNA (1)...(19): siRNA sense strand
augaggaagaugaagauuu

SEQ ID NO: 2606400 - RNA, 19 nt, Homo sapiens
  misc_RNA (1)...(19): siRNA sense strand
gaaaacauucugagcggaa

SEQ ID NO: 2606401 - RNA, 19 nt, Homo sapiens
  misc_RNA (1)...(19): siRNA sense strand
gugcaaaagguguagauga

SEQ ID NO: 2606402 - RNA, 19 nt, Homo sapiens
  misc_RNA (1)...(19): siRNA sense strand
guuaaaagaaggugggaug

SEQ ID NO: 2606403 - RNA, 19 nt, Homo sapiens
  misc_RNA (1)...(19): siRNA sense strand
uggaaggggaaaaggagaa

SEQ ID NO: 2606404 - RNA, 19 nt, Homo sapiens
  misc_RNA (1)...(19): siRNA sense strand
gaguuggaagaaagagaga

SEQ ID NO: 2606405 - RNA, 19 nt, Homo sapiens
  misc_RNA (1)...(19): siRNA sense strand
cucuaacagaugaggaaga

SEQ ID NO: 2606406 - RNA, 19 nt, Homo sapiens
  misc_RNA (1)...(19): siRNA sense strand
gcugaagaagagaggauuc

SEQ ID NO: 2606407 - RNA, 19 nt, Homo sapiens
  misc_RNA (1)...(19): siRNA sense strand
ucaggagagaguuggaaga

SEQ ID NO: 2606408 - RNA, 19 nt, Homo sapiens
  misc_RNA (1)...(19): siRNA sense strand
gauaaaauacagacagacu

SEQ ID NO: 2606409 - RNA, 19 nt, Homo sapiens
  misc_RNA (1)...(19): siRNA sense strand
ucuugaaagcagaguugaa

SEQ ID NO: 2606410 - RNA, 19 nt, Homo sapiens
  misc_RNA (1)...(19): siRNA sense strand
cuguaauguuucuguggau

SEQ ID NO: 2606411 - RNA, 19 nt, Homo sapiens
  misc_RNA (1)...(19): siRNA sense strand
ccaaacgugaaaaggaaaa

SEQ ID NO: 2606412 - RNA, 19 nt, Homo sapiens
  misc_RNA (1)...(19): siRNA sense strand
uguugaagccauugaaagu

SEQ ID NO: 2606413 - RNA, 19 nt, Homo sapiens
  misc_RNA (1)...(19): siRNA sense strand
acuccucgcuguugggcaa

SEQ ID NO: 2606414 - RNA, 19 nt, Homo sapiens
  misc_RNA (1)...(19): siRNA sense strand
cagaagugggcgagcaugu

SEQ ID NO: 2606415 - RNA, 19 nt, Homo sapiens
  misc_RNA (1)...(19): siRNA sense strand
agauaacggauuugggaua

SEQ ID NO: 2606416 - RNA, 19 nt, Homo sapiens
  misc_RNA (1)...(19): siRNA sense strand
cauuugaagcggagaaaga

SEQ ID NO: 2606417 - RNA, 19 nt, Homo sapiens
  misc_RNA (1)...(19): siRNA sense strand
aggaggaggaggaggaaga

SEQ ID NO: 2606418 - RNA, 19 nt, Homo sapiens
  misc_RNA (1)...(19): siRNA sense strand
agaaagaacccaagccaga

SEQ ID NO: 2606419 - RNA, 19 nt, Homo sapiens
  misc_RNA (1)...(19): siRNA sense strand
ggaaaggggacgagagcau

SEQ ID NO: 2606420 - RNA, 19 nt, Homo sapiens
  misc_RNA (1)...(19): siRNA sense strand
ccaucaaagauaacggauu

SEQ ID NO: 2606421 - RNA, 19 nt, Homo sapiens
  misc_RNA (1)...(19): siRNA sense strand
gccaaaugcugcugcccaa

SEQ ID NO: 2606422 - RNA, 19 nt, Homo sapiens
  misc_RNA (1)...(19): siRNA sense strand
gcaagaagcaacagagcac

SEQ ID NO: 2606423 - RNA, 19 nt, Homo sapiens
  misc_RNA (1)...(19): siRNA sense strand
ucacaaggauccugccaga

SEQ ID NO: 2606424 - RNA, 19 nt, Homo sapiens
  misc_RNA (1)...(19): siRNA sense strand
agacccauguaaaggagaa

SEQ ID NO: 2606425 - RNA, 19 nt, Homo sapiens
  misc_RNA (1)...(19): siRNA sense strand
ccaccagccuugaugccaa

SEQ ID NO: 2606426 - RNA, 19 nt, Homo sapiens
  misc_RNA (1)...(19): siRNA sense strand
agccaagucuucagugcaa

SEQ ID NO: 2606427 - RNA, 19 nt, Homo sapiens
  misc_RNA (1)...(19): siRNA sense strand
uggcaguggagguggcaga

SEQ ID NO: 2606428 - RNA, 19 nt, Homo sapiens
  misc_RNA (1)...(19): siRNA sense strand
ugagagaccaggaggagga

SEQ ID NO: 2606429 - RNA, 19 nt, Homo sapiens
  misc_RNA (1)...(19): siRNA sense strand
agucauuugaagcggagaa

SEQ ID NO: 2606430 - RNA, 19 nt, Homo sapiens
  misc_RNA (1)...(19): siRNA sense strand
gggauaaagcccaaacacu

SEQ ID NO: 2606431 - RNA, 19 nt, Homo sapiens
  misc_RNA (1)...(19): siRNA sense strand
ggauaaagcccaaacacuc

SEQ ID NO: 2606432 - RNA, 19 nt, Homo sapiens
  misc_RNA (1)...(19): siRNA sense strand
ggaugaggugccuguggaa

SEQ ID NO: 2606433 - RNA, 19 nt, Homo sapiens
  misc_RNA (1)...(19): siRNA sense strand
cugccaaccuccugcccaa

SEQ ID NO: 2606434 - RNA, 19 nt, Homo sapiens
  misc_RNA (1)...(19): siRNA sense strand
caacaguauuggagagucc

SEQ ID NO: 2606435 - RNA, 19 nt, Homo sapiens
  misc_RNA (1)...(19): siRNA sense strand
cacuaaagagaguucuaaa

SEQ ID NO: 2606436 - RNA, 19 nt, Homo sapiens
  misc_RNA (1)...(19): siRNA sense strand
cagcaaaggcucaccgucu

SEQ ID NO: 2606437 - RNA, 19 nt, Homo sapiens
  misc_RNA (1)...(19): siRNA sense strand
ccgcaacaaccaugacaca

SEQ ID NO: 2606438 - RNA, 19 nt, Homo sapiens
  misc_RNA (1)...(19): siRNA sense strand
agagaauggacuggaagaa

SEQ ID NO: 2606439 - RNA, 19 nt, Homo sapiens
  misc_RNA (1)...(19): siRNA sense strand
gcacagcacugcaggcauc

SEQ ID NO: 2606440 - RNA, 19 nt, Homo sapiens
  misc_RNA (1)...(19): siRNA sense strand
acgcauuugccuuagagaa

SEQ ID NO: 2606441 - RNA, 19 nt, Homo sapiens
  misc_RNA (1)...(19): siRNA sense strand
gagaccaggaggaggagga

SEQ ID NO: 2606442 - RNA, 19 nt, Homo sapiens
  misc_RNA (1)...(19): siRNA sense strand
augaggugccuguggaaga

SEQ ID NO: 2606443 - RNA, 19 nt, Homo sapiens
  misc_RNA (1)...(19): siRNA sense strand
agacaggcaagaagcaaca

SEQ ID NO: 2606444 - RNA, 19 nt, Homo sapiens
  misc_RNA (1)...(19): siRNA sense strand
ggacagcuccacagcccaa

SEQ ID NO: 2606445 - RNA, 19 nt, Homo sapiens
  misc_RNA (1)...(19): siRNA sense strand
ucccaaagugagaaucaaa

SEQ ID NO: 2606446 - RNA, 19 nt, Homo sapiens
  misc_RNA (1)...(19): siRNA sense strand
cccauggagacuagagaga

SEQ ID NO: 2606447 - RNA, 19 nt, Homo sapiens
  misc_RNA (1)...(19): siRNA sense strand
gcaaagacggagccagcca

SEQ ID NO: 2606448 - RNA, 19 nt, Homo sapiens
  misc_RNA (1)...(19): siRNA sense strand
cagccacagcuuacacaaa

SEQ ID NO: 2606449 - RNA, 19 nt, Homo sapiens
  misc_RNA (1)...(19): siRNA sense strand
uuccagaucgggagagcua

SEQ ID NO: 2606450 - RNA, 19 nt, Homo sapiens
  misc_RNA (1)...(19): siRNA sense strand
aggaggaggaggaagagga

SEQ ID NO: 2606451 - RNA, 19 nt, Homo sapiens
  misc_RNA (1)...(19): siRNA sense strand
auaacggauuugggauaaa

SEQ ID NO: 2606452 - RNA, 19 nt, Homo sapiens
  misc_RNA (1)...(19): siRNA sense strand
ccagcaggaacacgagcaa

SEQ ID NO: 2606453 - RNA, 19 nt, Homo sapiens
  misc_RNA (1)...(19): siRNA sense strand
gagaagagccugagccagc

SEQ ID NO: 2606454 - RNA, 19 nt, Homo sapiens
  misc_RNA (1)...(19): siRNA sense strand
gggaaagcggagugagaau

SEQ ID NO: 2606455 - RNA, 19 nt, Homo sapiens
  misc_RNA (1)...(19): siRNA sense strand
ucucaagacagaagagcaa

SEQ ID NO: 2606456 - RNA, 19 nt, Homo sapiens
  misc_RNA (1)...(19): siRNA sense strand
gcauagaacuccaugagga

SEQ ID NO: 2606457 - RNA, 19 nt, Homo sapiens
  misc_RNA (1)...(19): siRNA sense strand
augcagucuugaugggaaa

SEQ ID NO: 2606458 - RNA, 19 nt, Homo sapiens
  misc_RNA (1)...(19): siRNA sense strand
aggaagaagccguggugga

SEQ ID NO: 2606459 - RNA, 19 nt, Homo sapiens
  misc_RNA (1)...(19): siRNA sense strand
guggagaacaagaagccaa

SEQ ID NO: 2606460 - RNA, 19 nt, Homo sapiens
  misc_RNA (1)...(19): siRNA sense strand
agaugcuggcugagggcaa

SEQ ID NO: 2606461 - RNA, 19 nt, Homo sapiens
  misc_RNA (1)...(19): siRNA sense strand
cugcugaaggagaugacaa

SEQ ID NO: 2606462 - RNA, 19 nt, Homo sapiens
  misc_RNA (1)...(19): siRNA sense strand
augagaaggacgaguacuu

SEQ ID NO: 2606463 - RNA, 19 nt, Homo sapiens
  misc_RNA (1)...(19): siRNA sense strand
augggaaagcggagugaga

SEQ ID NO: 2606464 - RNA, 19 nt, Homo sapiens
  misc_RNA (1)...(19): siRNA sense strand
ugcugaaggagaugacaaa

SEQ ID NO: 2606465 - RNA, 19 nt, Homo sapiens
  misc_RNA (1)...(19): siRNA sense strand
aguacuuacagcagcuaaa

SEQ ID NO: 2606466 - RNA, 19 nt, Homo sapiens
  misc_RNA (1)...(19): siRNA sense strand
ucaagacagaagagcaaau

SEQ ID NO: 2606467 - RNA, 19 nt, Homo sapiens
  misc_RNA (1)...(19): siRNA sense strand
agaaagagacguucccaga

SEQ ID NO: 2606468 - RNA, 19 nt, Homo sapiens
  misc_RNA (1)...(19): siRNA sense strand
agacagaagagcaaaucca

SEQ ID NO: 2606469 - RNA, 19 nt, Homo sapiens
  misc_RNA (1)...(19): siRNA sense strand
gcaaagaugugguggcugg

SEQ ID NO: 2606470 - RNA, 19 nt, Homo sapiens
  misc_RNA (1)...(19): siRNA sense strand
augaggagggccagaguga

SEQ ID NO: 2606471 - RNA, 19 nt, Homo sapiens
  misc_RNA (1)...(19): siRNA sense strand
gcucacuguuuauggagga

SEQ ID NO: 2606472 - RNA, 19 nt, Homo sapiens
  misc_RNA (1)...(19): siRNA sense strand
aggaagugacucugcccaa

SEQ ID NO: 2606473 - RNA, 19 nt, Homo sapiens
  misc_RNA (1)...(19): siRNA sense strand
ugugggaccucgagagcca

SEQ ID NO: 2606474 - RNA, 19 nt, Homo sapiens
  misc_RNA (1)...(19): siRNA sense strand
cugacuggaccaagugcaa

SEQ ID NO: 2606475 - RNA, 19 nt, Homo sapiens
  misc_RNA (1)...(19): siRNA sense strand
uggaggaugaggagggcca

SEQ ID NO: 2606476 - RNA, 19 nt, Homo sapiens
  misc_RNA (1)...(19): siRNA sense strand
aauacauggaugagaagga

SEQ ID NO: 2606477 - RNA, 19 nt, Homo sapiens
  misc_RNA (1)...(19): siRNA sense strand
cuggacaagcagacaguga

SEQ ID NO: 2606478 - RNA, 19 nt, Homo sapiens
  misc_RNA (1)...(19): siRNA sense strand
agggugacgagaaggaaga

SEQ ID NO: 2606479 - RNA, 19 nt, Homo sapiens
  misc_RNA (1)...(19): siRNA sense strand
caaucuucucuguggcuua

SEQ ID NO: 2606480 - RNA, 19 nt, Homo sapiens
  misc_RNA (1)...(19): siRNA sense strand
acugcuaaggagagaucaa

SEQ ID NO: 2606481 - RNA, 19 nt, Homo sapiens
  misc_RNA (1)...(19): siRNA sense strand
cugaaauaggauccaguau

SEQ ID NO: 2606482 - RNA, 19 nt, Homo sapiens
  misc_RNA (1)...(19): siRNA sense strand
guuuagcaacaaaguggaa

SEQ ID NO: 2606483 - RNA, 19 nt, Homo sapiens
  misc_RNA (1)...(19): siRNA sense strand
aggaauaugcugaaggaaa

SEQ ID NO: 2606484 - RNA, 19 nt, Homo sapiens
  misc_RNA (1)...(19): siRNA sense strand
acaaagaucaagagagaau

SEQ ID NO: 2606485 - RNA, 19 nt, Homo sapiens
  misc_RNA (1)...(19): siRNA sense strand
auacaaagcaauaggaaga

SEQ ID NO: 2606486 - RNA, 19 nt, Homo sapiens
  misc_RNA (1)...(19): siRNA sense strand
ugaaagaagacauggaaaa

SEQ ID NO: 2606487 - RNA, 19 nt, Homo sapiens
  misc_RNA (1)...(19): siRNA sense strand
ggugaagaauaacgagcaa

SEQ ID NO: 2606488 - RNA, 19 nt, Homo sapiens
  misc_RNA (1)...(19): siRNA sense strand
gugcaaagacaaaaggaaa

SEQ ID NO: 2606489 - RNA, 19 nt, Homo sapiens
  misc_RNA (1)...(19): siRNA sense strand
gcugaaggaaauugacaaa

SEQ ID NO: 2606490 - RNA, 19 nt, Homo sapiens
  misc_RNA (1)...(19): siRNA sense strand
gagagaauuacuugggaau

SEQ ID NO: 2606491 - RNA, 19 nt, Homo sapiens
  misc_RNA (1)...(19): siRNA sense strand
guaugaagauggagggaag

SEQ ID NO: 2606492 - RNA, 19 nt, Homo sapiens
  misc_RNA (1)...(19): siRNA sense strand
uuguaaagcuuguggucau

SEQ ID NO: 2606493 - RNA, 19 nt, Homo sapiens
  misc_RNA (1)...(19): siRNA sense strand
cuuuaaagaagaagagcuu

SEQ ID NO: 2606494 - RNA, 19 nt, Homo sapiens
  misc_RNA (1)...(19): siRNA sense strand
cugaaagaagacauggaaa

SEQ ID NO: 2606495 - RNA, 19 nt, Homo sapiens
  misc_RNA (1)...(19): siRNA sense strand
ggaaaauggcucugcacua

SEQ ID NO: 2606496 - RNA, 19 nt, Homo sapiens
  misc_RNA (1)...(19): siRNA sense strand
guguuugaaagcaggaaua

SEQ ID NO: 2606497 - RNA, 19 nt, Homo sapiens
  misc_RNA (1)...(19): siRNA sense strand
agagagaauuacuugggaa

SEQ ID NO: 2606498 - RNA, 19 nt, Homo sapiens
  misc_RNA (1)...(19): siRNA sense strand
ccaugaaaucugaugauga

SEQ ID NO: 2606499 - RNA, 19 nt, Homo sapiens
  misc_RNA (1)...(19): siRNA sense strand
ccguugaaccagacaagaa

SEQ ID NO: 2606500 - RNA, 19 nt, Homo sapiens
  misc_RNA (1)...(19): siRNA sense strand
auacauucguagaguucaa

SEQ ID NO: 2606501 - RNA, 19 nt, Homo sapiens
  misc_RNA (1)...(19): siRNA sense strand
guuuagaccagcugaaaga

SEQ ID NO: 2606502 - RNA, 19 nt, Homo sapiens
  misc_RNA (1)...(19): siRNA sense strand
cagaaggaucucaaggaau

SEQ ID NO: 2606503 - RNA, 19 nt, Homo sapiens
  misc_RNA (1)...(19): siRNA sense strand
acaaauuauccuacagaga

SEQ ID NO: 2606504 - RNA, 19 nt, Homo sapiens
  misc_RNA (1)...(19): siRNA sense strand
cagaagacugggaugacua

SEQ ID NO: 2606505 - RNA, 19 nt, Homo sapiens
  misc_RNA (1)...(19): siRNA sense strand
uuaaagaagaagagcuuga

SEQ ID NO: 2606506 - RNA, 19 nt, Homo sapiens
  misc_RNA (1)...(19): siRNA sense strand
uaacaagaaacgugaagau

SEQ ID NO: 2606507 - RNA, 19 nt, Homo sapiens
  misc_RNA (1)...(19): siRNA sense strand
uagugcaccuguugggaaa

SEQ ID NO: 2606508 - RNA, 19 nt, Homo sapiens
  misc_RNA (1)...(19): siRNA sense strand
uacaaagauuccagagaga

SEQ ID NO: 2606509 - RNA, 19 nt, Homo sapiens
  misc_RNA (1)...(19): siRNA sense strand
acacaagaggugaagccaa

SEQ ID NO: 2606510 - RNA, 19 nt, Homo sapiens
  misc_RNA (1)...(19): siRNA sense strand
aggacauucugaaggaaga

SEQ ID NO: 2606511 - RNA, 19 nt, Homo sapiens
  misc_RNA (1)...(19): siRNA sense strand
cacuuugaauacugggaaa

SEQ ID NO: 2606512 - RNA, 19 nt, Homo sapiens
  misc_RNA (1)...(19): siRNA sense strand
cuugguugcuggugaagaa

SEQ ID NO: 2606513 - RNA, 19 nt, Homo sapiens
  misc_RNA (1)...(19): siRNA sense strand
caucagagagaccuggaaa

SEQ ID NO: 2606514 - RNA, 19 nt, Homo sapiens
  misc_RNA (1)...(19): siRNA sense strand
agagaacacaagaggugaa

SEQ ID NO: 2606515 - RNA, 19 nt, Homo sapiens
  misc_RNA (1)...(19): siRNA sense strand
ugucagauguguaagcaga

SEQ ID NO: 2606516 - RNA, 19 nt, Homo sapiens
  misc_RNA (1)...(19): siRNA sense strand
gaucuauguguaucagaaa

SEQ ID NO: 2606517 - RNA, 19 nt, Homo sapiens
  misc_RNA (1)...(19): siRNA sense strand
uugaauacugggaaagaau

SEQ ID NO: 2606518 - RNA, 19 nt, Homo sapiens
  misc_RNA (1)...(19): siRNA sense strand
aagauaacccuguaccaaa

SEQ ID NO: 2606519 - RNA, 19 nt, Homo sapiens
  misc_RNA (1)...(19): siRNA sense strand
caaagauuccagagagacu

SEQ ID NO: 2606520 - RNA, 19 nt, Homo sapiens
  misc_RNA (1)...(19): siRNA sense strand
agucagaauugguccacuu

SEQ ID NO: 2606521 - RNA, 19 nt, Homo sapiens
  misc_RNA (1)...(19): siRNA sense strand
gauuggaguguguuugaaa

SEQ ID NO: 2606522 - RNA, 19 nt, Homo sapiens
  misc_RNA (1)...(19): siRNA sense strand
ugaaacagugcaaagacaa

SEQ ID NO: 2606523 - RNA, 19 nt, Homo sapiens
  misc_RNA (1)...(19): siRNA sense strand
cagcaguugcagaaauauu

SEQ ID NO: 2606524 - RNA, 19 nt, Homo sapiens
  misc_RNA (1)...(19): siRNA sense strand
ucucauugaaacagugcaa

SEQ ID NO: 2606525 - RNA, 19 nt, Homo sapiens
  misc_RNA (1)...(19): siRNA sense strand
gguccuuagacauuguaaa

SEQ ID NO: 2606526 - RNA, 19 nt, Homo sapiens
  misc_RNA (1)...(19): siRNA sense strand
uugaaacagugcaaagaca

SEQ ID NO: 2606527 - RNA, 19 nt, Homo sapiens
  misc_RNA (1)...(19): siRNA sense strand
agaagaugccuuuguuuau

SEQ ID NO: 2606528 - RNA, 19 nt, Homo sapiens
  misc_RNA (1)...(19): siRNA sense strand
acaaaugcauguugguagu

SEQ ID NO: 2606529 - RNA, 19 nt, Homo sapiens
  misc_RNA (1)...(19): siRNA sense strand
cacuuuagagauagggcaa

SEQ ID NO: 2606530 - RNA, 19 nt, Homo sapiens
  misc_RNA (1)...(19): siRNA sense strand
agauagggcaaucggugaa

SEQ ID NO: 2606531 - RNA, 19 nt, Homo sapiens
  misc_RNA (1)...(19): siRNA sense strand
gaacuaacaagaaacguga

SEQ ID NO: 2606532 - RNA, 19 nt, Homo sapiens
  misc_RNA (1)...(19): siRNA sense strand
uuacaugcacaaugggauu

SEQ ID NO: 2606533 - RNA, 19 nt, Homo sapiens
  misc_RNA (1)...(19): siRNA sense strand
ccuacaaagauuccagaga

SEQ ID NO: 2606534 - RNA, 19 nt, Homo sapiens
  misc_RNA (1)...(19): siRNA sense strand
gagauagggcaaucgguga

SEQ ID NO: 2606535 - RNA, 19 nt, Homo sapiens
  misc_RNA (1)...(19): siRNA sense strand
cuguaccaaacaagaaaua

SEQ ID NO: 2606536 - RNA, 19 nt, Homo sapiens
  misc_RNA (1)...(19): siRNA sense strand
gaucagcagcccagacaca

SEQ ID NO: 2606537 - RNA, 19 nt, Homo sapiens
  misc_RNA (1)...(19): siRNA sense strand
gaggugaagccaaggaacu

SEQ ID NO: 2606538 - RNA, 19 nt, Homo sapiens
  misc_RNA (1)...(19): siRNA sense strand
gcugauggaacgaggucaa

SEQ ID NO: 2606539 - RNA, 19 nt, Homo sapiens
  misc_RNA (1)...(19): siRNA sense strand
ugggaaaagauuaaggaaa

SEQ ID NO: 2606540 - RNA, 19 nt, Homo sapiens
  misc_RNA (1)...(19): siRNA sense strand
ccacugaguucuuccggaa

SEQ ID NO: 2606541 - RNA, 19 nt, Homo sapiens
  misc_RNA (1)...(19): siRNA sense strand
gggacaucuucgaaagcuu

SEQ ID NO: 2606542 - RNA, 19 nt, Homo sapiens
  misc_RNA (1)...(19): siRNA sense strand
agauuaaggaaauuggaga

SEQ ID NO: 2606543 - RNA, 19 nt, Homo sapiens
  misc_RNA (1)...(19): siRNA sense strand
gcuucauggagcagccuaa

SEQ ID NO: 2606544 - RNA, 19 nt, Homo sapiens
  misc_RNA (1)...(19): siRNA sense strand
aaggaggccgucugggaaa

SEQ ID NO: 2606545 - RNA, 19 nt, Homo sapiens
  misc_RNA (1)...(19): siRNA sense strand
aaauggagaaggaggcuga

SEQ ID NO: 2606546 - RNA, 19 nt, Homo sapiens
  misc_RNA (1)...(19): siRNA sense strand
gaacggaaggagggcggaa

SEQ ID NO: 2606547 - RNA, 19 nt, Homo sapiens
  misc_RNA (1)...(19): siRNA sense strand
cgagagaggguuugggaca

SEQ ID NO: 2606548 - RNA, 19 nt, Homo sapiens
  misc_RNA (1)...(19): siRNA sense strand
accagaagcaggaggagaa

SEQ ID NO: 2606549 - RNA, 19 nt, Homo sapiens
  misc_RNA (1)...(19): siRNA sense strand
aaugaugacagguggaaau

SEQ ID NO: 2606550 - RNA, 19 nt, Homo sapiens
  misc_RNA (1)...(19): siRNA sense strand
ucacuuaggucuugggucu

SEQ ID NO: 2606551 - RNA, 19 nt, Homo sapiens
  misc_RNA (1)...(19): siRNA sense strand
ggaugaaugcccaggagca

SEQ ID NO: 2606552 - RNA, 19 nt, Homo sapiens
  misc_RNA (1)...(19): siRNA sense strand
ucgcaguggcacagaauga

SEQ ID NO: 2606553 - RNA, 19 nt, Homo sapiens
  misc_RNA (1)...(19): siRNA sense strand
ggaggugagcagaggggaa

SEQ ID NO: 2606554 - RNA, 19 nt, Homo sapiens
  misc_RNA (1)...(19): siRNA sense strand
aggagcagcuggagcggau

SEQ ID NO: 2606555 - RNA, 19 nt, Homo sapiens
  misc_RNA (1)...(19): siRNA sense strand
cagaaauggcucagaagcu

SEQ ID NO: 2606556 - RNA, 19 nt, Homo sapiens
  misc_RNA (1)...(19): siRNA sense strand
gaaugaugacagguggaaa

SEQ ID NO: 2606557 - RNA, 19 nt, Homo sapiens
  misc_RNA (1)...(19): siRNA sense strand
agauagaccagaagcagga

SEQ ID NO: 2606558 - RNA, 19 nt, Homo sapiens
  misc_RNA (1)...(19): siRNA sense strand
caggagcgagagaggguuu

SEQ ID NO: 2606559 - RNA, 19 nt, Homo sapiens
  misc_RNA (1)...(19): siRNA sense strand
aggaggagaaggagcaacu

SEQ ID NO: 2606560 - RNA, 19 nt, Homo sapiens
  misc_RNA (1)...(19): siRNA sense strand
aggagaaggagcaacuaga

SEQ ID NO: 2606561 - RNA, 19 nt, Homo sapiens
  misc_RNA (1)...(19): siRNA sense strand
acagcaacaaagagagaaa

SEQ ID NO: 2606562 - RNA, 19 nt, Homo sapiens
  misc_RNA (1)...(19): siRNA sense strand
aguacaggcauguggacaa

SEQ ID NO: 2606563 - RNA, 19 nt, Homo sapiens
  misc_RNA (1)...(19): siRNA sense strand
ggauguauugggugagaca

SEQ ID NO: 2606564 - RNA, 19 nt, Homo sapiens
  misc_RNA (1)...(19): siRNA sense strand
agacagaaguacaggcaug

SEQ ID NO: 2606565 - RNA, 19 nt, Homo sapiens
  misc_RNA (1)...(19): siRNA sense strand
uuuauaaggacguagacaa

SEQ ID NO: 2606566 - RNA, 19 nt, Homo sapiens
  misc_RNA (1)...(19): siRNA sense strand
ggagaaagacagggaacca

SEQ ID NO: 2606567 - RNA, 19 nt, Homo sapiens
  misc_RNA (1)...(19): siRNA sense strand
uuacagaagccgagaccca

SEQ ID NO: 2606568 - RNA, 19 nt, Homo sapiens
  misc_RNA (1)...(19): siRNA sense strand
ugguggaggaugagauuga

SEQ ID NO: 2606569 - RNA, 19 nt, Homo sapiens
  misc_RNA (1)...(19): siRNA sense strand
agccauucgaugaggacua

SEQ ID NO: 2606570 - RNA, 19 nt, Homo sapiens
  misc_RNA (1)...(19): siRNA sense strand
cagauggagugaagcggau

SEQ ID NO: 2606571 - RNA, 19 nt, Homo sapiens
  misc_RNA (1)...(19): siRNA sense strand
ucagcaaacaggacgggaa

SEQ ID NO: 2606572 - RNA, 19 nt, Homo sapiens
  misc_RNA (1)...(19): siRNA sense strand
ucucagaagauacccgaaa

SEQ ID NO: 2606573 - RNA, 19 nt, Homo sapiens
  misc_RNA (1)...(19): siRNA sense strand
ggaaccagcaauuugggua

SEQ ID NO: 2606574 - RNA, 19 nt, Homo sapiens
  misc_RNA (1)...(19): siRNA sense strand
ucgaugaggacuaucuaaa

SEQ ID NO: 2606575 - RNA, 19 nt, Homo sapiens
  misc_RNA (1)...(19): siRNA sense strand
agaaacaagacuggagaga

SEQ ID NO: 2606576 - RNA, 19 nt, Homo sapiens
  misc_RNA (1)...(19): siRNA sense strand
cggaagguuggcuggauau

SEQ ID NO: 2606577 - RNA, 19 nt, Homo sapiens
  misc_RNA (1)...(19): siRNA sense strand
acguagacaaguuuggcaa

SEQ ID NO: 2606578 - RNA, 19 nt, Homo sapiens
  misc_RNA (1)...(19): siRNA sense strand
cugaacagacagaaguaca

SEQ ID NO: 2606579 - RNA, 19 nt, Homo sapiens
  misc_RNA (1)...(19): siRNA sense strand
ccaaugaaguuaugccucu

SEQ ID NO: 2606580 - RNA, 19 nt, Homo sapiens
  misc_RNA (1)...(19): siRNA sense strand
auguauugggugagacaca

SEQ ID NO: 2606581 - RNA, 19 nt, Homo sapiens
  misc_RNA (1)...(19): siRNA sense strand
agcaacaaagagagaaaca

SEQ ID NO: 2606582 - RNA, 19 nt, Homo sapiens
  misc_RNA (1)...(19): siRNA sense strand
gggcugaaguggcugcgau

SEQ ID NO: 2606583 - RNA, 19 nt, Homo sapiens
  misc_RNA (1)...(19): siRNA sense strand
ggaccagaaaugaggagcu

SEQ ID NO: 2606584 - RNA, 19 nt, Homo sapiens
  misc_RNA (1)...(19): siRNA sense strand
aggaagaacuguugcccaa

SEQ ID NO: 2606585 - RNA, 19 nt, Homo sapiens
  misc_RNA (1)...(19): siRNA sense strand
gggauuguaaagaggaaga

SEQ ID NO: 2606586 - RNA, 19 nt, Homo sapiens
  misc_RNA (1)...(19): siRNA sense strand
uguuauagccggagcaaac

SEQ ID NO: 2606587 - RNA, 19 nt, Homo sapiens
  misc_RNA (1)...(19): siRNA sense strand
auaaauacggagacaucaa

SEQ ID NO: 2606588 - RNA, 19 nt, Homo sapiens
  misc_RNA (1)...(19): siRNA sense strand
cuuuauaaauacggagaca

SEQ ID NO: 2606589 - RNA, 19 nt, Homo sapiens
  misc_RNA (1)...(19): siRNA sense strand
ggacaaaucuggggaggca

SEQ ID NO: 2606590 - RNA, 19 nt, Homo sapiens
  misc_RNA (1)...(19): siRNA sense strand
gaagaaggcugguugggaa

SEQ ID NO: 2606591 - RNA, 19 nt, Homo sapiens
  misc_RNA (1)...(19): siRNA sense strand
aagcaaaacaggaaggaaa

SEQ ID NO: 2606592 - RNA, 19 nt, Homo sapiens
  misc_RNA (1)...(19): siRNA sense strand
augccauugucaagaguaa

SEQ ID NO: 2606593 - RNA, 19 nt, Homo sapiens
  misc_RNA (1)...(19): siRNA sense strand
gugaugacgaacagaguga

SEQ ID NO: 2606594 - RNA, 19 nt, Homo sapiens
  misc_RNA (1)...(19): siRNA sense strand
cggaaggugaagcgaguga

SEQ ID NO: 2606595 - RNA, 19 nt, Homo sapiens
  misc_RNA (1)...(19): siRNA sense strand
agagaaagccacagacgca

SEQ ID NO: 2606596 - RNA, 19 nt, Homo sapiens
  misc_RNA (1)...(19): siRNA sense strand
gugaaacagaugaacaaaa

SEQ ID NO: 2606597 - RNA, 19 nt, Homo sapiens
  misc_RNA (1)...(19): siRNA sense strand
guguguagcagcagugaca

SEQ ID NO: 2606598 - RNA, 19 nt, Homo sapiens
  misc_RNA (1)...(19): siRNA sense strand
agauuggagcuaugagaga

SEQ ID NO: 2606599 - RNA, 19 nt, Homo sapiens
  misc_RNA (1)...(19): siRNA sense strand
acaucaagaggaagcggaa

SEQ ID NO: 2606600 - RNA, 19 nt, Homo sapiens
  misc_RNA (1)...(19): siRNA sense strand
aaaacaggaaggaaagaaa

SEQ ID NO: 2606601 - RNA, 19 nt, Homo sapiens
  misc_RNA (1)...(19): siRNA sense strand
aggaaagaaaggauggagu

SEQ ID NO: 2606602 - RNA, 19 nt, Homo sapiens
  misc_RNA (1)...(19): siRNA sense strand
caggaaggaaagaaaggau

SEQ ID NO: 2606603 - RNA, 19 nt, Homo sapiens
  misc_RNA (1)...(19): siRNA sense strand
gagaauacucccuggaccu

SEQ ID NO: 2606604 - RNA, 19 nt, Homo sapiens
  misc_RNA (1)...(19): siRNA sense strand
aaggauggagugugaaaca

SEQ ID NO: 2606605 - RNA, 19 nt, Homo sapiens
  misc_RNA (1)...(19): siRNA sense strand
ggcggaaggugaagcgagu

SEQ ID NO: 2606606 - RNA, 19 nt, Homo sapiens
  misc_RNA (1)...(19): siRNA sense strand
ggaaagaaaggauggagug

SEQ ID NO: 2606607 - RNA, 19 nt, Homo sapiens
  misc_RNA (1)...(19): siRNA sense strand
caucaagaggaagcggaaa

SEQ ID NO: 2606608 - RNA, 19 nt, Homo sapiens
  misc_RNA (1)...(19): siRNA sense strand
cacuaaggacugucgagaa

SEQ ID NO: 2606609 - RNA, 19 nt, Homo sapiens
  misc_RNA (1)...(19): siRNA sense strand
gugugaaucagcagaaaau

SEQ ID NO: 2606610 - RNA, 19 nt, Homo sapiens
  misc_RNA (1)...(19): siRNA sense strand
uaccaaugaugaagggcga

SEQ ID NO: 2606611 - RNA, 19 nt, Homo sapiens
  misc_RNA (1)...(19): siRNA sense strand
aagaaaagagcccuggaua

SEQ ID NO: 2606612 - RNA, 19 nt, Homo sapiens
  misc_RNA (1)...(19): siRNA sense strand
gaagaaggcugguugggaa

SEQ ID NO: 2606613 - RNA, 19 nt, Homo sapiens
  misc_RNA (1)...(19): siRNA sense strand
aagcaaaacaggaaggaaa

SEQ ID NO: 2606614 - RNA, 19 nt, Homo sapiens
  misc_RNA (1)...(19): siRNA sense strand
augccauugucaagaguaa

SEQ ID NO: 2606615 - RNA, 19 nt, Homo sapiens
  misc_RNA (1)...(19): siRNA sense strand
gugaugacgaacagaguga

SEQ ID NO: 2606616 - RNA, 19 nt, Homo sapiens
  misc_RNA (1)...(19): siRNA sense strand
cggaaggugaagcgaguga

SEQ ID NO: 2606617 - RNA, 19 nt, Homo sapiens
  misc_RNA (1)...(19): siRNA sense strand
agagaaagccacagacgca

SEQ ID NO: 2606618 - RNA, 19 nt, Homo sapiens
  misc_RNA (1)...(19): siRNA sense strand
gugaaacagaugaacaaaa

SEQ ID NO: 2606619 - RNA, 19 nt, Homo sapiens
  misc_RNA (1)...(19): siRNA sense strand
guguguagcagcagugaca

SEQ ID NO: 2606620 - RNA, 19 nt, Homo sapiens
  misc_RNA (1)...(19): siRNA sense strand
agauuggagcuaugagaga

SEQ ID NO: 2606621 - RNA, 19 nt, Homo sapiens
  misc_RNA (1)...(19): siRNA sense strand
acaucaagaggaagcggaa

SEQ ID NO: 2606622 - RNA, 19 nt, Homo sapiens
  misc_RNA (1)...(19): siRNA sense strand
aaaacaggaaggaaagaaa

SEQ ID NO: 2606623 - RNA, 19 nt, Homo sapiens
  misc_RNA (1)...(19): siRNA sense strand
aggaaagaaaggauggagu

SEQ ID NO: 2606624 - RNA, 19 nt, Homo sapiens
  misc_RNA (1)...(19): siRNA sense strand
caggaaggaaagaaaggau

SEQ ID NO: 2606625 - RNA, 19 nt, Homo sapiens
  misc_RNA (1)...(19): siRNA sense strand
gagaauacucccuggaccu

SEQ ID NO: 2606626 - RNA, 19 nt, Homo sapiens
  misc_RNA (1)...(19): siRNA sense strand
aaggauggagugugaaaca

SEQ ID NO: 2606627 - RNA, 19 nt, Homo sapiens
  misc_RNA (1)...(19): siRNA sense strand
ggcggaaggugaagcgagu

SEQ ID NO: 2606628 - RNA, 19 nt, Homo sapiens
  misc_RNA (1)...(19): siRNA sense strand
ggaaagaaaggauggagug

SEQ ID NO: 2606629 - RNA, 19 nt, Homo sapiens
  misc_RNA (1)...(19): siRNA sense strand
caucaagaggaagcggaaa

SEQ ID NO: 2606630 - RNA, 19 nt, Homo sapiens
  misc_RNA (1)...(19): siRNA sense strand
cacuaaggacugucgagaa

SEQ ID NO: 2606631 - RNA, 19 nt, Homo sapiens
  misc_RNA (1)...(19): siRNA sense strand
gugugaaucagcagaaaau

SEQ ID NO: 2606632 - RNA, 19 nt, Homo sapiens
  misc_RNA (1)...(19): siRNA sense strand
uaccaaugaugaagggcga

SEQ ID NO: 2606633 - RNA, 19 nt, Homo sapiens
  misc_RNA (1)...(19): siRNA sense strand
aagaaaagagcccuggaua

SEQ ID NO: 2606634 - RNA, 19 nt, Homo sapiens
  misc_RNA (1)...(19): siRNA sense strand
aucuauagccugaggaaca

SEQ ID NO: 2606635 - RNA, 19 nt, Homo sapiens
  misc_RNA (1)...(19): siRNA sense strand
acuccgugaucaugagcaa

SEQ ID NO: 2606636 - RNA, 19 nt, Homo sapiens
  misc_RNA (1)...(19): siRNA sense strand
ucgugauccugcugggcaa

SEQ ID NO: 2606637 - RNA, 19 nt, Homo sapiens
  misc_RNA (1)...(19): siRNA sense strand
ccaugggagcagacaaaga

SEQ ID NO: 2606638 - RNA, 19 nt, Homo sapiens
  misc_RNA (1)...(19): siRNA sense strand
aggagacugcugagaccaa

SEQ ID NO: 2606639 - RNA, 19 nt, Homo sapiens
  misc_RNA (1)...(19): siRNA sense strand
ggaaagugaauguggccaa

SEQ ID NO: 2606640 - RNA, 19 nt, Homo sapiens
  misc_RNA (1)...(19): siRNA sense strand
aggcauuguaugagaggaa

SEQ ID NO: 2606641 - RNA, 19 nt, Homo sapiens
  misc_RNA (1)...(19): siRNA sense strand
cugaacaaauaaaggaaga

SEQ ID NO: 2606642 - RNA, 19 nt, Homo sapiens
  misc_RNA (1)...(19): siRNA sense strand
caaaggaaaugcaggcaga

SEQ ID NO: 2606643 - RNA, 19 nt, Homo sapiens
  misc_RNA (1)...(19): siRNA sense strand
cgagaugacuucagggucu

SEQ ID NO: 2606644 - RNA, 19 nt, Homo sapiens
  misc_RNA (1)...(19): siRNA sense strand
aaaugaagaaggacaacaa

SEQ ID NO: 2606645 - RNA, 19 nt, Homo sapiens
  misc_RNA (1)...(19): siRNA sense strand
gcauuguaugagaggaaau

SEQ ID NO: 2606646 - RNA, 19 nt, Homo sapiens
  misc_RNA (1)...(19): siRNA sense strand
ccuuaaacaugguggcugu

SEQ ID NO: 2606647 - RNA, 19 nt, Homo sapiens
  misc_RNA (1)...(19): siRNA sense strand
aggacaacaauuugcauua

SEQ ID NO: 2606648 - RNA, 19 nt, Homo sapiens
  misc_RNA (1)...(19): siRNA sense strand
uaucauaaacauaggcaca

SEQ ID NO: 2606649 - RNA, 19 nt, Homo sapiens
  misc_RNA (1)...(19): siRNA sense strand
ccaaaacuguccagggcua

SEQ ID NO: 2606650 - RNA, 19 nt, Homo sapiens
  misc_RNA (1)...(19): siRNA sense strand
ggucagaaaaugaaaguga

SEQ ID NO: 2606651 - RNA, 19 nt, Homo sapiens
  misc_RNA (1)...(19): siRNA sense strand
caguauaugaugaagcuau

SEQ ID NO: 2606652 - RNA, 19 nt, Homo sapiens
  misc_RNA (1)...(19): siRNA sense strand
ucagagaguucaaggagga

SEQ ID NO: 2606653 - RNA, 19 nt, Homo sapiens
  misc_RNA (1)...(19): siRNA sense strand
ggguguuggcaaagaauca

SEQ ID NO: 2606654 - RNA, 19 nt, Homo sapiens
  misc_RNA (1)...(19): siRNA sense strand
uggugaaacagaaggugaa

SEQ ID NO: 2606655 - RNA, 19 nt, Homo sapiens
  misc_RNA (1)...(19): siRNA sense strand
uaguugagucuguuggaaa

SEQ ID NO: 2606656 - RNA, 19 nt, Homo sapiens
  misc_RNA (1)...(19): siRNA sense strand
acggaacugucuagaagaa

SEQ ID NO: 2606657 - RNA, 19 nt, Homo sapiens
  misc_RNA (1)...(19): siRNA sense strand
uugaaaugggcaugaagaa

SEQ ID NO: 2606658 - RNA, 19 nt, Homo sapiens
  misc_RNA (1)...(19): siRNA sense strand
uugcaaaugaagaaggaca

SEQ ID NO: 2606659 - RNA, 19 nt, Homo sapiens
  misc_RNA (1)...(19): siRNA sense strand
agggaaaacaugcaaaaua

SEQ ID NO: 2606660 - RNA, 19 nt, Homo sapiens
  misc_RNA (1)...(19): siRNA sense strand
ugcaaaugaagaaggacaa

SEQ ID NO: 2606661 - RNA, 19 nt, Homo sapiens
  misc_RNA (1)...(19): siRNA sense strand
agaaaggagaagcaaauau

SEQ ID NO: 2606662 - RNA, 19 nt, Homo sapiens
  misc_RNA (1)...(19): siRNA sense strand
accaagcaacguagggaaa

SEQ ID NO: 2606663 - RNA, 19 nt, Homo sapiens
  misc_RNA (1)...(19): siRNA sense strand
ccaugaaggaauuugccua

SEQ ID NO: 2606664 - RNA, 19 nt, Homo sapiens
  misc_RNA (1)...(19): siRNA sense strand
acaaauaaaggaagacagu

SEQ ID NO: 2606665 - RNA, 19 nt, Homo sapiens
  misc_RNA (1)...(19): siRNA sense strand
acaugguggcuguaauaaa

SEQ ID NO: 2606666 - RNA, 19 nt, Homo sapiens
  misc_RNA (1)...(19): siRNA sense strand
cuauggaacuaauugucaa

SEQ ID NO: 2606667 - RNA, 19 nt, Homo sapiens
  misc_RNA (1)...(19): siRNA sense strand
ugucaaacuugcaaaucau

SEQ ID NO: 2606668 - RNA, 19 nt, Homo sapiens
  misc_RNA (1)...(19): siRNA sense strand
aggaaaugcaggcagauga

SEQ ID NO: 2606669 - RNA, 19 nt, Homo sapiens
  misc_RNA (1)...(19): siRNA sense strand
uguugaagauccugcauca

SEQ ID NO: 2606670 - RNA, 19 nt, Homo sapiens
  misc_RNA (1)...(19): siRNA sense strand
cuggagacccugaacaaau

SEQ ID NO: 2606671 - RNA, 19 nt, Homo sapiens
  misc_RNA (1)...(19): siRNA sense strand
caagauggucagagaguuc

SEQ ID NO: 2606672 - RNA, 19 nt, Homo sapiens
  misc_RNA (1)...(19): siRNA sense strand
auggagaaguggcagaaaa

SEQ ID NO: 2606673 - RNA, 19 nt, Homo sapiens
  misc_RNA (1)...(19): siRNA sense strand
auaugaaggcauuguauga

SEQ ID NO: 2606674 - RNA, 19 nt, Homo sapiens
  misc_RNA (1)...(19): siRNA sense strand
guuccaaagccaauugauu

SEQ ID NO: 2606675 - RNA, 19 nt, Homo sapiens
  misc_RNA (1)...(19): siRNA sense strand
ggugaaacagaaggugaaa

SEQ ID NO: 2606676 - RNA, 19 nt, Homo sapiens
  misc_RNA (1)...(19): siRNA sense strand
uggaacucauaaaugguua

SEQ ID NO: 2606677 - RNA, 19 nt, Homo sapiens
  misc_RNA (1)...(19): siRNA sense strand
cagagauguuaaaugcauu

SEQ ID NO: 2606678 - RNA, 19 nt, Homo sapiens
  misc_RNA (1)...(19): siRNA sense strand
ugcagaaaggagaagcaaa

SEQ ID NO: 2606679 - RNA, 19 nt, Homo sapiens
  misc_RNA (1)...(19): siRNA sense strand
guggcuacacaaaggaaau

SEQ ID NO: 2606680 - RNA, 19 nt, Homo sapiens
  misc_RNA (1)...(19): siRNA sense strand
aaaugaaagugaacggaac

SEQ ID NO: 2606681 - RNA, 19 nt, Homo sapiens
  misc_RNA (1)...(19): siRNA sense strand
gcucugacgaguaugaaga

SEQ ID NO: 2606682 - RNA, 19 nt, Homo sapiens
  misc_RNA (1)...(19): siRNA sense strand
gguugacaaaugcaggaua

SEQ ID NO: 2606683 - RNA, 19 nt, Homo sapiens
  misc_RNA (1)...(19): siRNA sense strand
cagauggagaaguggcaga

SEQ ID NO: 2606684 - RNA, 19 nt, Homo sapiens
  misc_RNA (1)...(19): siRNA sense strand
caguauagaacaagaacuc

SEQ ID NO: 2606685 - RNA, 19 nt, Homo sapiens
  misc_RNA (1)...(19): siRNA sense strand
aggaauuugccuauaugaa

SEQ ID NO: 2606686 - RNA, 19 nt, Homo sapiens
  misc_RNA (1)...(19): siRNA sense strand
augcaguggucauggaacu

SEQ ID NO: 2606687 - RNA, 19 nt, Homo sapiens
  misc_RNA (1)...(19): siRNA sense strand
gcugauucauggagauuuu

SEQ ID NO: 2606688 - RNA, 19 nt, Homo sapiens
  misc_RNA (1)...(19): siRNA sense strand
cugacgaguaugaagauga

SEQ ID NO: 2606689 - RNA, 19 nt, Homo sapiens
  misc_RNA (1)...(19): siRNA sense strand
augaagaaggacaacaauu

SEQ ID NO: 2606690 - RNA, 19 nt, Homo sapiens
  misc_RNA (1)...(19): siRNA sense strand
agaagagagugcugaugca

SEQ ID NO: 2606691 - RNA, 19 nt, Homo sapiens
  misc_RNA (1)...(19): siRNA sense strand
aaggauaucaggagagaag

SEQ ID NO: 2606692 - RNA, 19 nt, Homo sapiens
  misc_RNA (1)...(19): siRNA sense strand
caguuuaucagaagagagu

SEQ ID NO: 2606693 - RNA, 19 nt, Homo sapiens
  misc_RNA (1)...(19): siRNA sense strand
ggcaagauggucagagagu

SEQ ID NO: 2606694 - RNA, 19 nt, Homo sapiens
  misc_RNA (1)...(19): siRNA sense strand
gaagaaaaugugggagcua

SEQ ID NO: 2606695 - RNA, 19 nt, Homo sapiens
  misc_RNA (1)...(19): siRNA sense strand
acaacaggcaagaugguca

SEQ ID NO: 2606696 - RNA, 19 nt, Homo sapiens
  misc_RNA (1)...(19): siRNA sense strand
acucauagcuugggagcgu

SEQ ID NO: 2606697 - RNA, 19 nt, Homo sapiens
  misc_RNA (1)...(19): siRNA sense strand
ggcaaguaguugagucugu

SEQ ID NO: 2606698 - RNA, 19 nt, Homo sapiens
  misc_RNA (1)...(19): siRNA sense strand
agggcuaucgguugacaaa

SEQ ID NO: 2606699 - RNA, 19 nt, Homo sapiens
  misc_RNA (1)...(19): siRNA sense strand
agauacaccauguugaaga

SEQ ID NO: 2606700 - RNA, 19 nt, Homo sapiens
  misc_RNA (1)...(19): siRNA sense strand
uagaagaaucagagggcug

SEQ ID NO: 2606701 - RNA, 19 nt, Homo sapiens
  misc_RNA (1)...(19): siRNA sense strand
caugaaggaauuugccuau

SEQ ID NO: 2606702 - RNA, 19 nt, Homo sapiens
  misc_RNA (1)...(19): siRNA sense strand
guugaaaugggcaugaaga

SEQ ID NO: 2606703 - RNA, 19 nt, Homo sapiens
  misc_RNA (1)...(19): siRNA sense strand
cauauaugccacagaucaa

SEQ ID NO: 2606704 - RNA, 19 nt, Homo sapiens
  misc_RNA (1)...(19): siRNA sense strand
cugcuuuggaagaaauaaa

SEQ ID NO: 2606705 - RNA, 19 nt, Homo sapiens
  misc_RNA (1)...(19): siRNA sense strand
augaggaggaagaggauga

SEQ ID NO: 2606706 - RNA, 19 nt, Homo sapiens
  misc_RNA (1)...(19): siRNA sense strand
uuaagaagauacagaggca

SEQ ID NO: 2606707 - RNA, 19 nt, Homo sapiens
  misc_RNA (1)...(19): siRNA sense strand
augauuaugaggaggaaga

SEQ ID NO: 2606708 - RNA, 19 nt, Homo sapiens
  misc_RNA (1)...(19): siRNA sense strand
aggaggaagaggaugaaga

SEQ ID NO: 2606709 - RNA, 19 nt, Homo sapiens
  misc_RNA (1)...(19): siRNA sense strand
aaguaaaacaccagaguca

SEQ ID NO: 2606710 - RNA, 19 nt, Homo sapiens
  misc_RNA (1)...(19): siRNA sense strand
gggaugauuaugaggagga

SEQ ID NO: 2606711 - RNA, 19 nt, Homo sapiens
  misc_RNA (1)...(19): siRNA sense strand
cauaaguguaccagaagau

SEQ ID NO: 2606712 - RNA, 19 nt, Homo sapiens
  misc_RNA (1)...(19): siRNA sense strand
acaaagaagucaucccuga

SEQ ID NO: 2606713 - RNA, 19 nt, Homo sapiens
  misc_RNA (1)...(19): siRNA sense strand
gaaguggagcaaaggaaaa

SEQ ID NO: 2606714 - RNA, 19 nt, Homo sapiens
  misc_RNA (1)...(19): siRNA sense strand
caguaaugaaguggagcaa

SEQ ID NO: 2606715 - RNA, 19 nt, Homo sapiens
  misc_RNA (1)...(19): siRNA sense strand
agauacagaggcagcaaau

SEQ ID NO: 2606716 - RNA, 19 nt, Homo sapiens
  misc_RNA (1)...(19): siRNA sense strand
ccgauuuaaaugugcgaca

SEQ ID NO: 2606717 - RNA, 19 nt, Homo sapiens
  misc_RNA (1)...(19): siRNA sense strand
augaaguggagcaaaggaa

SEQ ID NO: 2606718 - RNA, 19 nt, Homo sapiens
  misc_RNA (1)...(19): siRNA sense strand
augggaauucugauaguaa

SEQ ID NO: 2606719 - RNA, 19 nt, Homo sapiens
  misc_RNA (1)...(19): siRNA sense strand
agaccaacuuaauagacau

SEQ ID NO: 2606720 - RNA, 19 nt, Homo sapiens
  misc_RNA (1)...(19): siRNA sense strand
cguacauccaaccgauuua

SEQ ID NO: 2606721 - RNA, 19 nt, Homo sapiens
  misc_RNA (1)...(19): siRNA sense strand
aagaggaugaagaagguga

SEQ ID NO: 2606722 - RNA, 19 nt, Homo sapiens
  misc_RNA (1)...(19): siRNA sense strand
aggaugaagaaggugauua

SEQ ID NO: 2606723 - RNA, 19 nt, Homo sapiens
  misc_RNA (1)...(19): siRNA sense strand
aggugauuaugaagaagau

SEQ ID NO: 2606724 - RNA, 19 nt, Homo sapiens
  misc_RNA (1)...(19): siRNA sense strand
cgguaagagugguggagga

SEQ ID NO: 2606725 - RNA, 19 nt, Homo sapiens
  misc_RNA (1)...(19): siRNA sense strand
acgagugccuggagaacaa

SEQ ID NO: 2606726 - RNA, 19 nt, Homo sapiens
  misc_RNA (1)...(19): siRNA sense strand
gccaagaaccagagagacu

SEQ ID NO: 2606727 - RNA, 19 nt, Homo sapiens
  misc_RNA (1)...(19): siRNA sense strand
caucgaugaauguggaaau

SEQ ID NO: 2606728 - RNA, 19 nt, Homo sapiens
  misc_RNA (1)...(19): siRNA sense strand
ccaaaaugaggaaggacaa

SEQ ID NO: 2606729 - RNA, 19 nt, Homo sapiens
  misc_RNA (1)...(19): siRNA sense strand
uggaggugacagagagcaa

SEQ ID NO: 2606730 - RNA, 19 nt, Homo sapiens
  misc_RNA (1)...(19): siRNA sense strand
uggccaagaaccagagaga

SEQ ID NO: 2606731 - RNA, 19 nt, Homo sapiens
  misc_RNA (1)...(19): siRNA sense strand
ggagcugccuugagcgaga

SEQ ID NO: 2606732 - RNA, 19 nt, Homo sapiens
  misc_RNA (1)...(19): siRNA sense strand
cugcaagaaaggauuuaaa

SEQ ID NO: 2606733 - RNA, 19 nt, Homo sapiens
  misc_RNA (1)...(19): siRNA sense strand
aaguguaaccuuuaagcua

SEQ ID NO: 2606734 - RNA, 19 nt, Homo sapiens
  misc_RNA (1)...(19): siRNA sense strand
cuguugaguuugagcuuga

SEQ ID NO: 2606735 - RNA, 19 nt, Homo sapiens
  misc_RNA (1)...(19): siRNA sense strand
ccacaguacaagaugcaca

SEQ ID NO: 2606736 - RNA, 19 nt, Homo sapiens
  misc_RNA (1)...(19): siRNA sense strand
cuauuaugauggagcacga

SEQ ID NO: 2606737 - RNA, 19 nt, Homo sapiens
  misc_RNA (1)...(19): siRNA sense strand
aaugaagggaacagcgcua

SEQ ID NO: 2606738 - RNA, 19 nt, Homo sapiens
  misc_RNA (1)...(19): siRNA sense strand
gaauaaggaucacggcugu

SEQ ID NO: 2606739 - RNA, 19 nt, Homo sapiens
  misc_RNA (1)...(19): siRNA sense strand
ggacauuucuacaacacca

SEQ ID NO: 2606740 - RNA, 19 nt, Homo sapiens
  misc_RNA (1)...(19): siRNA sense strand
uuugaauauuccaggcaau

SEQ ID NO: 2606741 - RNA, 19 nt, Homo sapiens
  misc_RNA (1)...(19): siRNA sense strand
gggaacagcgcuagagggu

SEQ ID NO: 2606742 - RNA, 19 nt, Homo sapiens
  misc_RNA (1)...(19): siRNA sense strand
ggaacauaccagccugaau

SEQ ID NO: 2606743 - RNA, 19 nt, Homo sapiens
  misc_RNA (1)...(19): siRNA sense strand
uugaagacauaguucgaga

SEQ ID NO: 2606744 - RNA, 19 nt, Homo sapiens
  misc_RNA (1)...(19): siRNA sense strand
gggaaggcaggcaguguga

SEQ ID NO: 2606745 - RNA, 19 nt, Homo sapiens
  misc_RNA (1)...(19): siRNA sense strand
accaaugagugcagcauca

SEQ ID NO: 2606746 - RNA, 19 nt, Homo sapiens
  misc_RNA (1)...(19): siRNA sense strand
guuugaauauuccaggcaa

SEQ ID NO: 2606747 - RNA, 19 nt, Homo sapiens
  misc_RNA (1)...(19): siRNA sense strand
ggaugggaagacauguaaa

SEQ ID NO: 2606748 - RNA, 19 nt, Homo sapiens
  misc_RNA (1)...(19): siRNA sense strand
cagcacuaccagagaagca

SEQ ID NO: 2606749 - RNA, 19 nt, Homo sapiens
  misc_RNA (1)...(19): siRNA sense strand
gcuuggaauaugucugaau

SEQ ID NO: 2606750 - RNA, 19 nt, Homo sapiens
  misc_RNA (1)...(19): siRNA sense strand
cgauacagccgauggccca

SEQ ID NO: 2606751 - RNA, 19 nt, Homo sapiens
  misc_RNA (1)...(19): siRNA sense strand
cuguaaggauacuucgaca

SEQ ID NO: 2606752 - RNA, 19 nt, Homo sapiens
  misc_RNA (1)...(19): siRNA sense strand
ccgcaauggagguugugau

SEQ ID NO: 2606753 - RNA, 19 nt, Homo sapiens
  misc_RNA (1)...(19): siRNA sense strand
gcuaaaugaaggcaagugu

SEQ ID NO: 2606754 - RNA, 19 nt, Homo sapiens
  misc_RNA (1)...(19): siRNA sense strand
ccaagcaccccuaaggaaa

SEQ ID NO: 2606755 - RNA, 19 nt, Homo sapiens
  misc_RNA (1)...(19): siRNA sense strand
uggacgagugccuggagaa

SEQ ID NO: 2606756 - RNA, 19 nt, Homo sapiens
  misc_RNA (1)...(19): siRNA sense strand
cgagaagcggcuccguaaa

SEQ ID NO: 2606757 - RNA, 19 nt, Homo sapiens
  misc_RNA (1)...(19): siRNA sense strand
ugucaacaauggaggcugu

SEQ ID NO: 2606758 - RNA, 19 nt, Homo sapiens
  misc_RNA (1)...(19): siRNA sense strand
gaagagggccugagcugca

SEQ ID NO: 2606759 - RNA, 19 nt, Homo sapiens
  misc_RNA (1)...(19): siRNA sense strand
ggauaggaccugugaccac

SEQ ID NO: 2606760 - RNA, 19 nt, Homo sapiens
  misc_RNA (1)...(19): siRNA sense strand
ucguaaagcgaaccgagaa

SEQ ID NO: 2606761 - RNA, 19 nt, Homo sapiens
  misc_RNA (1)...(19): siRNA sense strand
cggaaaaccucuucaucca

SEQ ID NO: 2606762 - RNA, 19 nt, Homo sapiens
  misc_RNA (1)...(19): siRNA sense strand
agacauaguucgagauggc

SEQ ID NO: 2606763 - RNA, 19 nt, Homo sapiens
  misc_RNA (1)...(19): siRNA sense strand
gcucuaugcaucugagaac

SEQ ID NO: 2606764 - RNA, 19 nt, Homo sapiens
  misc_RNA (1)...(19): siRNA sense strand
gggauaaacgggugaaacg

SEQ ID NO: 2606765 - RNA, 19 nt, Homo sapiens
  misc_RNA (1)...(19): siRNA sense strand
ccaaagagcuggaccgaga

SEQ ID NO: 2606766 - RNA, 19 nt, Homo sapiens
  misc_RNA (1)...(19): siRNA sense strand
cggacgagaaugagaacau

SEQ ID NO: 2606767 - RNA, 19 nt, Homo sapiens
  misc_RNA (1)...(19): siRNA sense strand
guucgaagucucagcggua

SEQ ID NO: 2606768 - RNA, 19 nt, Homo sapiens
  misc_RNA (1)...(19): siRNA sense strand
gugcugaucugcaggccaa

SEQ ID NO: 2606769 - RNA, 19 nt, Homo sapiens
  misc_RNA (1)...(19): siRNA sense strand
uaaagaagcaggaugcauu

SEQ ID NO: 2606770 - RNA, 19 nt, Homo sapiens
  misc_RNA (1)...(19): siRNA sense strand
ccuucgaggcggacgagaa

SEQ ID NO: 2606771 - RNA, 19 nt, Homo sapiens
  misc_RNA (1)...(19): siRNA sense strand
ggauauguagcgaggagga

SEQ ID NO: 2606772 - RNA, 19 nt, Homo sapiens
  misc_RNA (1)...(19): siRNA sense strand
aggaacgcgcuaaggcaaa

SEQ ID NO: 2606773 - RNA, 19 nt, Homo sapiens
  misc_RNA (1)...(19): siRNA sense strand
acgacuaaagcaagccaaa

SEQ ID NO: 2606774 - RNA, 19 nt, Homo sapiens
  misc_RNA (1)...(19): siRNA sense strand
gaggaacgcgcuaaggcaa

SEQ ID NO: 2606775 - RNA, 19 nt, Homo sapiens
  misc_RNA (1)...(19): siRNA sense strand
uggagcaagccaagaaaga

SEQ ID NO: 2606776 - RNA, 19 nt, Homo sapiens
  misc_RNA (1)...(19): siRNA sense strand
gaagcaaaguucaagcgau

SEQ ID NO: 2606777 - RNA, 19 nt, Homo sapiens
  misc_RNA (1)...(19): siRNA sense strand
agguggaagcaaaguucaa

SEQ ID NO: 2606778 - RNA, 19 nt, Homo sapiens
  misc_RNA (1)...(19): siRNA sense strand
uggcuaggcagcuggaaga

SEQ ID NO: 2606779 - RNA, 19 nt, Homo sapiens
  misc_RNA (1)...(19): siRNA sense strand
gaacaauaucagaaagcug

SEQ ID NO: 2606780 - RNA, 19 nt, Homo sapiens
  misc_RNA (1)...(19): siRNA sense strand
aggcaaagcaccuggcuag

SEQ ID NO: 2606781 - RNA, 19 nt, Homo sapiens
  misc_RNA (1)...(19): siRNA sense strand
gcgcuaaggcaaagcaccu

SEQ ID NO: 2606782 - RNA, 19 nt, Homo sapiens
  misc_RNA (1)...(19): siRNA sense strand
gagcaguuaaccagagcca

SEQ ID NO: 2606783 - RNA, 19 nt, Homo sapiens
  misc_RNA (1)...(19): siRNA sense strand
uggaagagaaagaccgagu

SEQ ID NO: 2606784 - RNA, 19 nt, Homo sapiens
  misc_RNA (1)...(19): siRNA sense strand
guucaagcgauaugagucu

SEQ ID NO: 2606785 - RNA, 19 nt, Homo sapiens
  misc_RNA (1)...(19): siRNA sense strand
cuucaguguuaccgugaga

SEQ ID NO: 2606786 - RNA, 19 nt, Homo sapiens
  misc_RNA (1)...(19): siRNA sense strand
gaauauacagcuugggcaa

SEQ ID NO: 2606787 - RNA, 19 nt, Homo sapiens
  misc_RNA (1)...(19): siRNA sense strand
agauuaauacugaggaaca

SEQ ID NO: 2606788 - RNA, 19 nt, Homo sapiens
  misc_RNA (1)...(19): siRNA sense strand
agaaaagacaggacauaaa

SEQ ID NO: 2606789 - RNA, 19 nt, Homo sapiens
  misc_RNA (1)...(19): siRNA sense strand
aggaauauacagaggaucu

SEQ ID NO: 2606790 - RNA, 19 nt, Homo sapiens
  misc_RNA (1)...(19): siRNA sense strand
cagaaaacucccagaucua

SEQ ID NO: 2606791 - RNA, 19 nt, Homo sapiens
  misc_RNA (1)...(19): siRNA sense strand
cuaaagagguaccagcaga

SEQ ID NO: 2606792 - RNA, 19 nt, Homo sapiens
  misc_RNA (1)...(19): siRNA sense strand
gggauauaugugcugguaa

SEQ ID NO: 2606793 - RNA, 19 nt, Homo sapiens
  misc_RNA (1)...(19): siRNA sense strand
acgagaaguccaaggggaa

SEQ ID NO: 2606794 - RNA, 19 nt, Homo sapiens
  misc_RNA (1)...(19): siRNA sense strand
gagguuaucuugugggauc

SEQ ID NO: 2606795 - RNA, 19 nt, Homo sapiens
  misc_RNA (1)...(19): siRNA sense strand
acuugaugcuacacaggaa

SEQ ID NO: 2606796 - RNA, 19 nt, Homo sapiens
  misc_RNA (1)...(19): siRNA sense strand
gggcauaugacuacccuga

SEQ ID NO: 2606797 - RNA, 19 nt, Homo sapiens
  misc_RNA (1)...(19): siRNA sense strand
cugauaagagucaagaaaa

SEQ ID NO: 2606798 - RNA, 19 nt, Homo sapiens
  misc_RNA (1)...(19): siRNA sense strand
gggcaaugguagauggugg

SEQ ID NO: 2606799 - RNA, 19 nt, Homo sapiens
  misc_RNA (1)...(19): siRNA sense strand
cagcuugggcaaugguaga

SEQ ID NO: 2606800 - RNA, 19 nt, Homo sapiens
  misc_RNA (1)...(19): siRNA sense strand
auguaaagaaugugggaaa

SEQ ID NO: 2606801 - RNA, 19 nt, Homo sapiens
  misc_RNA (1)...(19): siRNA sense strand
auguaaagcaguugggaaa

SEQ ID NO: 2606802 - RNA, 19 nt, Homo sapiens
  misc_RNA (1)...(19): siRNA sense strand
auguaaacaaugugggaaa

SEQ ID NO: 2606803 - RNA, 19 nt, Homo sapiens
  misc_RNA (1)...(19): siRNA sense strand
gacucauaguggagagaaa

SEQ ID NO: 2606804 - RNA, 19 nt, Homo sapiens
  misc_RNA (1)...(19): siRNA sense strand
auguaaacagugugggaaa

SEQ ID NO: 2606805 - RNA, 19 nt, Homo sapiens
  misc_RNA (1)...(19): siRNA sense strand
auguaaacagugugggaaa

SEQ ID NO: 2606806 - RNA, 19 nt, Homo sapiens
  misc_RNA (1)...(19): siRNA sense strand
auguaaacagugugggaaa

SEQ ID NO: 2606807 - RNA, 19 nt, Homo sapiens
  misc_RNA (1)...(19): siRNA sense strand
auguaaacgauguggcaaa

SEQ ID NO: 2606808 - RNA, 19 nt, Homo sapiens
  misc_RNA (1)...(19): siRNA sense strand
ugugaaaguagaagaggua

SEQ ID NO: 2606809 - RNA, 19 nt, Homo sapiens
  misc_RNA (1)...(19): siRNA sense strand
aaguagaagagguagcaaa

SEQ ID NO: 2606810 - RNA, 19 nt, Homo sapiens
  misc_RNA (1)...(19): siRNA sense strand
ggagaaaccacuagccaga

SEQ ID NO: 2606811 - RNA, 19 nt, Homo sapiens
  misc_RNA (1)...(19): siRNA sense strand
aacucauacuggagagaaa

SEQ ID NO: 2606812 - RNA, 19 nt, Homo sapiens
  misc_RNA (1)...(19): siRNA sense strand
gucacacacuggagagaaa

SEQ ID NO: 2606813 - RNA, 19 nt, Homo sapiens
  misc_RNA (1)...(19): siRNA sense strand
acagaaaccaaaugaguau

SEQ ID NO: 2606814 - RNA, 19 nt, Homo sapiens
  misc_RNA (1)...(19): siRNA sense strand
gaguguaaacagugucaua

SEQ ID NO: 2606815 - RNA, 19 nt, Homo sapiens
  misc_RNA (1)...(19): siRNA sense strand
guguaaacagugucauaaa

SEQ ID NO: 2606816 - RNA, 19 nt, Homo sapiens
  misc_RNA (1)...(19): siRNA sense strand
gacucaugcuggacagaaa

SEQ ID NO: 2606817 - RNA, 19 nt, Homo sapiens
  misc_RNA (1)...(19): siRNA sense strand
augcaaacaauguggaaaa

SEQ ID NO: 2606818 - RNA, 19 nt, Homo sapiens
  misc_RNA (1)...(19): siRNA sense strand
gaauguaaacuaugcggua

SEQ ID NO: 2606819 - RNA, 19 nt, Homo sapiens
  misc_RNA (1)...(19): siRNA sense strand
caguaaauuucgaaugcau

SEQ ID NO: 2606820 - RNA, 19 nt, Homo sapiens
  misc_RNA (1)...(19): siRNA sense strand
auguaaacuaugcgguaaa

SEQ ID NO: 2606821 - RNA, 19 nt, Homo sapiens
  misc_RNA (1)...(19): siRNA sense strand
uugaagaugaccacagaaa

SEQ ID NO: 2606822 - RNA, 19 nt, Homo sapiens
  misc_RNA (1)...(19): siRNA sense strand
aguagaagagguagcaaau

SEQ ID NO: 2606823 - RNA, 19 nt, Homo sapiens
  misc_RNA (1)...(19): siRNA sense strand
gaguguaagcaauguggua

SEQ ID NO: 2606824 - RNA, 19 nt, Homo sapiens
  misc_RNA (1)...(19): siRNA sense strand
cccuaugaauguaaagaau

SEQ ID NO: 2606825 - RNA, 19 nt, Homo sapiens
  misc_RNA (1)...(19): siRNA sense strand
caauguaaacaauguggaa

SEQ ID NO: 2606826 - RNA, 19 nt, Homo sapiens
  misc_RNA (1)...(19): siRNA sense strand
ccuuaugaaugcaaacaau

SEQ ID NO: 2606827 - RNA, 19 nt, Homo sapiens
  misc_RNA (1)...(19): siRNA sense strand
ugcucauacuggaaagaaa

SEQ ID NO: 2606828 - RNA, 19 nt, Homo sapiens
  misc_RNA (1)...(19): siRNA sense strand
gacucauaugggagagaaa

SEQ ID NO: 2606829 - RNA, 19 nt, Homo sapiens
  misc_RNA (1)...(19): siRNA sense strand
ccacagaaaccaggggaaa

SEQ ID NO: 2606830 - RNA, 19 nt, Homo sapiens
  misc_RNA (1)...(19): siRNA sense strand
aacucacacuggagagaaa

SEQ ID NO: 2606831 - RNA, 19 nt, Homo sapiens
  misc_RNA (1)...(19): siRNA sense strand
auguaaacaguguggaaaa

SEQ ID NO: 2606832 - RNA, 19 nt, Homo sapiens
  misc_RNA (1)...(19): siRNA sense strand
gacucacaaugcagagaaa

SEQ ID NO: 2606833 - RNA, 19 nt, Homo sapiens
  misc_RNA (1)...(19): siRNA sense strand
cuuucgagcacauguaaua

SEQ ID NO: 2606834 - RNA, 19 nt, Homo sapiens
  misc_RNA (1)...(19): siRNA sense strand
ccauaugaauguaaacgau

SEQ ID NO: 2606835 - RNA, 19 nt, Homo sapiens
  misc_RNA (1)...(19): siRNA sense strand
cuuaauaggcacaugagau

SEQ ID NO: 2606836 - RNA, 19 nt, Homo sapiens
  misc_RNA (1)...(19): siRNA sense strand
gugggaaagccuucagauu

SEQ ID NO: 2606837 - RNA, 19 nt, Homo sapiens
  misc_RNA (1)...(19): siRNA sense strand
ccguaucaauguaaacaau

SEQ ID NO: 2606838 - RNA, 19 nt, Homo sapiens
  misc_RNA (1)...(19): siRNA sense strand
ccacuagccagaugccaaa

SEQ ID NO: 2606839 - RNA, 19 nt, Homo sapiens
  misc_RNA (1)...(19): siRNA sense strand
ucaaagacaugaaaggacu

SEQ ID NO: 2606840 - RNA, 19 nt, Homo sapiens
  misc_RNA (1)...(19): siRNA sense strand
ucaaagacaugaaaggacu

SEQ ID NO: 2606841 - RNA, 19 nt, Homo sapiens
  misc_RNA (1)...(19): siRNA sense strand
gucauaugguugagagacu

SEQ ID NO: 2606842 - RNA, 19 nt, Homo sapiens
  misc_RNA (1)...(19): siRNA sense strand
gaauguaaacaguguggga

SEQ ID NO: 2606843 - RNA, 19 nt, Homo sapiens
  misc_RNA (1)...(19): siRNA sense strand
gaauguaaacaguguggga

SEQ ID NO: 2606844 - RNA, 19 nt, Homo sapiens
  misc_RNA (1)...(19): siRNA sense strand
gugguaaagccuucaguuu

SEQ ID NO: 2606845 - RNA, 19 nt, Homo sapiens
  misc_RNA (1)...(19): siRNA sense strand
gaauguaaacaguguggga

SEQ ID NO: 2606846 - RNA, 19 nt, Homo sapiens
  misc_RNA (1)...(19): siRNA sense strand
ucgcaaacaugaaagaacu

SEQ ID NO: 2606847 - RNA, 19 nt, Homo sapiens
  misc_RNA (1)...(19): siRNA sense strand
cagucaaauucgauugcau

SEQ ID NO: 2606848 - RNA, 19 nt, Homo sapiens
  misc_RNA (1)...(19): siRNA sense strand
agguagcaaauguggagaa

SEQ ID NO: 2606849 - RNA, 19 nt, Homo sapiens
  misc_RNA (1)...(19): siRNA sense strand
uagcaaauguggagaaacc

SEQ ID NO: 2606850 - RNA, 19 nt, Homo sapiens
  misc_RNA (1)...(19): siRNA sense strand
ccugguuugucuaggaaaa

SEQ ID NO: 2606851 - RNA, 19 nt, Homo sapiens
  misc_RNA (1)...(19): siRNA sense strand
aagaacucauauuggagaa

SEQ ID NO: 2606852 - RNA, 19 nt, Homo sapiens
  misc_RNA (1)...(19): siRNA sense strand
ccuuaugaguguaaacagu

SEQ ID NO: 2606853 - RNA, 19 nt, Homo sapiens
  misc_RNA (1)...(19): siRNA sense strand
cuucauuucuuccaguaaa

SEQ ID NO: 2606854 - RNA, 19 nt, Homo sapiens
  misc_RNA (1)...(19): siRNA sense strand
ccacaugaaugcagcuuuu

SEQ ID NO: 2606855 - RNA, 19 nt, Homo sapiens
  misc_RNA (1)...(19): siRNA sense strand
gaguaucaggaauaugaaa

SEQ ID NO: 2606856 - RNA, 19 nt, Homo sapiens
  misc_RNA (1)...(19): siRNA sense strand
aggaaagagcggugggcca

SEQ ID NO: 2606857 - RNA, 19 nt, Homo sapiens
  misc_RNA (1)...(19): siRNA sense strand
ggaaagagcggugggccaa

SEQ ID NO: 2606858 - RNA, 19 nt, Homo sapiens
  misc_RNA (1)...(19): siRNA sense strand
gaguacagcugguggugac

SEQ ID NO: 2606859 - RNA, 19 nt, Homo sapiens
  misc_RNA (1)...(19): siRNA sense strand
uggccaugcuggugcaagu

SEQ ID NO: 2606860 - RNA, 19 nt, Homo sapiens
  misc_RNA (1)...(19): siRNA sense strand
aggcacaauuguagguuca

SEQ ID NO: 2606861 - RNA, 19 nt, Homo sapiens
  misc_RNA (1)...(19): siRNA sense strand
gugaagagauuaugggccu

SEQ ID NO: 2606862 - RNA, 19 nt, Homo sapiens
  misc_RNA (1)...(19): siRNA sense strand
ggacaaggaugaaccgacu

SEQ ID NO: 2606863 - RNA, 19 nt, Homo sapiens
  misc_RNA (1)...(19): siRNA sense strand
gagaaaugguguuuggaug

SEQ ID NO: 2606864 - RNA, 19 nt, Homo sapiens
  misc_RNA (1)...(19): siRNA sense strand
acaagaucgccaagaagaa

SEQ ID NO: 2606865 - RNA, 19 nt, Homo sapiens
  misc_RNA (1)...(19): siRNA sense strand
cuucagaaccuguacaaaa

SEQ ID NO: 2606866 - RNA, 19 nt, Homo sapiens
  misc_RNA (1)...(19): siRNA sense strand
cugccaaccacguggaaaa

SEQ ID NO: 2606867 - RNA, 19 nt, Homo sapiens
  misc_RNA (1)...(19): siRNA sense strand
cuaggguagcacaggguua

SEQ ID NO: 2606868 - RNA, 19 nt, Homo sapiens
  misc_RNA (1)...(19): siRNA sense strand
gcaucagugaagagauuau

SEQ ID NO: 2606869 - RNA, 19 nt, Homo sapiens
  misc_RNA (1)...(19): siRNA sense strand
ggauuauacuccacagcca

SEQ ID NO: 2606870 - RNA, 19 nt, Homo sapiens
  misc_RNA (1)...(19): siRNA sense strand
ggagacuacccgaaagaca

SEQ ID NO: 2606871 - RNA, 19 nt, Homo sapiens
  misc_RNA (1)...(19): siRNA sense strand
cugaugaggaggaggacca

SEQ ID NO: 2606872 - RNA, 19 nt, Homo sapiens
  misc_RNA (1)...(19): siRNA sense strand
cagccagggacaaggauga

SEQ ID NO: 2606873 - RNA, 19 nt, Homo sapiens
  misc_RNA (1)...(19): siRNA sense strand
caacguuggcauaggcaca

SEQ ID NO: 2606874 - RNA, 19 nt, Homo sapiens
  misc_RNA (1)...(19): siRNA sense strand
ugacacaaugacugaagaa

SEQ ID NO: 2606875 - RNA, 19 nt, Homo sapiens
  misc_RNA (1)...(19): siRNA sense strand
ccacaacauugaaggugca

SEQ ID NO: 2606876 - RNA, 19 nt, Homo sapiens
  misc_RNA (1)...(19): siRNA sense strand
ugggugaagcaaaugauaa

SEQ ID NO: 2606877 - RNA, 19 nt, Homo sapiens
  misc_RNA (1)...(19): siRNA sense strand
agagaaaucuuaaaccuga

SEQ ID NO: 2606878 - RNA, 19 nt, Homo sapiens
  misc_RNA (1)...(19): siRNA sense strand
gaugagaacgagcggcaga

SEQ ID NO: 2606879 - RNA, 19 nt, Homo sapiens
  misc_RNA (1)...(19): siRNA sense strand
uguaaguggcccuagggua

SEQ ID NO: 2606880 - RNA, 19 nt, Homo sapiens
  misc_RNA (1)...(19): siRNA sense strand
agcaaaugauaaaccgcaa

SEQ ID NO: 2606881 - RNA, 19 nt, Homo sapiens
  misc_RNA (1)...(19): siRNA sense strand
cgccgaagaacuuggauca

SEQ ID NO: 2606882 - RNA, 19 nt, Homo sapiens
  misc_RNA (1)...(19): siRNA sense strand
aggagaggccaguguugua

SEQ ID NO: 2606883 - RNA, 19 nt, Homo sapiens
  misc_RNA (1)...(19): siRNA sense strand
ccgcugaugaggaggagga

SEQ ID NO: 2606884 - RNA, 19 nt, Homo sapiens
  misc_RNA (1)...(19): siRNA sense strand
ugaacaaaauccugggcuu

SEQ ID NO: 2606885 - RNA, 19 nt, Homo sapiens
  misc_RNA (1)...(19): siRNA sense strand
ucuuaucaccagugucaua

SEQ ID NO: 2606886 - RNA, 19 nt, Homo sapiens
  misc_RNA (1)...(19): siRNA sense strand
guaaguggcccuaggguag

SEQ ID NO: 2606887 - RNA, 19 nt, Homo sapiens
  misc_RNA (1)...(19): siRNA sense strand
gcaaaugauaaaccgcaau

SEQ ID NO: 2606888 - RNA, 19 nt, Homo sapiens
  misc_RNA (1)...(19): siRNA sense strand
gaagaaaaggugcgaucau

SEQ ID NO: 2606889 - RNA, 19 nt, Homo sapiens
  misc_RNA (1)...(19): siRNA sense strand
agcaagaaguagaggagca

SEQ ID NO: 2606890 - RNA, 19 nt, Homo sapiens
  misc_RNA (1)...(19): siRNA sense strand
cuggagaagggauggaaau

SEQ ID NO: 2606891 - RNA, 19 nt, Homo sapiens
  misc_RNA (1)...(19): siRNA sense strand
cagagguccugguggguga

SEQ ID NO: 2606892 - RNA, 19 nt, Homo sapiens
  misc_RNA (1)...(19): siRNA sense strand
ugaggauggaggagcuaaa

SEQ ID NO: 2606893 - RNA, 19 nt, Homo sapiens
  misc_RNA (1)...(19): siRNA sense strand
aggaaguucgacugcauaa

SEQ ID NO: 2606894 - RNA, 19 nt, Homo sapiens
  misc_RNA (1)...(19): siRNA sense strand
ccuggagaagggauggaaa

SEQ ID NO: 2606895 - RNA, 19 nt, Homo sapiens
  misc_RNA (1)...(19): siRNA sense strand
uguugcugcuggagaagaa

SEQ ID NO: 2606896 - RNA, 19 nt, Homo sapiens
  misc_RNA (1)...(19): siRNA sense strand
gcagcaaagguguggaaac

SEQ ID NO: 2606897 - RNA, 19 nt, Homo sapiens
  misc_RNA (1)...(19): siRNA sense strand
aggagcaggacauggagaa

SEQ ID NO: 2606898 - RNA, 19 nt, Homo sapiens
  misc_RNA (1)...(19): siRNA sense strand
gggaggaguuugacaggcu

SEQ ID NO: 2606899 - RNA, 19 nt, Homo sapiens
  misc_RNA (1)...(19): siRNA sense strand
auguaacuucugaggacaa

SEQ ID NO: 2606900 - RNA, 19 nt, Homo sapiens
  misc_RNA (1)...(19): siRNA sense strand
gcucaggcauggaaggaag

SEQ ID NO: 2606901 - RNA, 19 nt, Homo sapiens
  misc_RNA (1)...(19): siRNA sense strand
aggcagcaaagguguggaa

SEQ ID NO: 2606902 - RNA, 19 nt, Homo sapiens
  misc_RNA (1)...(19): siRNA sense strand
gguugaggucugagauuuu

SEQ ID NO: 2606903 - RNA, 19 nt, Homo sapiens
  misc_RNA (1)...(19): siRNA sense strand
gcuaugauccuuaagcuga

SEQ ID NO: 2606904 - RNA, 19 nt, Homo sapiens
  misc_RNA (1)...(19): siRNA sense strand
cuguugagaaaguggaagu

SEQ ID NO: 2606905 - RNA, 19 nt, Homo sapiens
  misc_RNA (1)...(19): siRNA sense strand
gcugaaagcgugauggaga

SEQ ID NO: 2606906 - RNA, 19 nt, Homo sapiens
  misc_RNA (1)...(19): siRNA sense strand
ccaccgaguuugaggccau

SEQ ID NO: 2606907 - RNA, 19 nt, Homo sapiens
  misc_RNA (1)...(19): siRNA sense strand
acgcagagcggaaggagca

SEQ ID NO: 2606908 - RNA, 19 nt, Homo sapiens
  misc_RNA (1)...(19): siRNA sense strand
accuagaagagauggucaa

SEQ ID NO: 2606909 - RNA, 19 nt, Homo sapiens
  misc_RNA (1)...(19): siRNA sense strand
cgcaaggacuggaaggauc

SEQ ID NO: 2606910 - RNA, 19 nt, Homo sapiens
  misc_RNA (1)...(19): siRNA sense strand
aggccaagauccacgcuga

SEQ ID NO: 2606911 - RNA, 19 nt, Homo sapiens
  misc_RNA (1)...(19): siRNA sense strand
acgaaguccacguggcuga

SEQ ID NO: 2606912 - RNA, 19 nt, Homo sapiens
  misc_RNA (1)...(19): siRNA sense strand
aagcaauaaaggagaaaga

SEQ ID NO: 2606913 - RNA, 19 nt, Homo sapiens
  misc_RNA (1)...(19): siRNA sense strand
cagaaagcaauaaaggaga

SEQ ID NO: 2606914 - RNA, 19 nt, Homo sapiens
  misc_RNA (1)...(19): siRNA sense strand
gcacggacaugaagcgcga

SEQ ID NO: 2606915 - RNA, 19 nt, Homo sapiens
  misc_RNA (1)...(19): siRNA sense strand
acaugaagcgcgaguacga

SEQ ID NO: 2606916 - RNA, 19 nt, Homo sapiens
  misc_RNA (1)...(19): siRNA sense strand
caguguguucagaaagcaa

SEQ ID NO: 2606917 - RNA, 19 nt, Homo sapiens
  misc_RNA (1)...(19): siRNA sense strand
aggaaguggcugaaagcua

SEQ ID NO: 2606918 - RNA, 19 nt, Homo sapiens
  misc_RNA (1)...(19): siRNA sense strand
gcagaaaggaaaagggaga

SEQ ID NO: 2606919 - RNA, 19 nt, Homo sapiens
  misc_RNA (1)...(19): siRNA sense strand
cuaaagauucucagggcau

SEQ ID NO: 2606920 - RNA, 19 nt, Homo sapiens
  misc_RNA (1)...(19): siRNA sense strand
aagcaaaggcugaagagca

SEQ ID NO: 2606921 - RNA, 19 nt, Homo sapiens
  misc_RNA (1)...(19): siRNA sense strand
acagauaaacagauggaca

SEQ ID NO: 2606922 - RNA, 19 nt, Homo sapiens
  misc_RNA (1)...(19): siRNA sense strand
aaucaagaggagugaauga

SEQ ID NO: 2606923 - RNA, 19 nt, Homo sapiens
  misc_RNA (1)...(19): siRNA sense strand
ggagaaagcaugaagaggu

SEQ ID NO: 2606924 - RNA, 19 nt, Homo sapiens
  misc_RNA (1)...(19): siRNA sense strand
gagcugaggaaguggcuga

SEQ ID NO: 2606925 - RNA, 19 nt, Homo sapiens
  misc_RNA (1)...(19): siRNA sense strand
gauacgaaugagaagacaa

SEQ ID NO: 2606926 - RNA, 19 nt, Homo sapiens
  misc_RNA (1)...(19): siRNA sense strand
gagaagacaaguuuggaca

SEQ ID NO: 2606927 - RNA, 19 nt, Homo sapiens
  misc_RNA (1)...(19): siRNA sense strand
gucuggaagcugagaaauu

SEQ ID NO: 2606928 - RNA, 19 nt, Homo sapiens
  misc_RNA (1)...(19): siRNA sense strand
ugaaucaagaggagugaau

SEQ ID NO: 2606929 - RNA, 19 nt, Homo sapiens
  misc_RNA (1)...(19): siRNA sense strand
gaggagugaaugagagcca

SEQ ID NO: 2606930 - RNA, 19 nt, Homo sapiens
  misc_RNA (1)...(19): siRNA sense strand
agauaaacagauggacaaa

SEQ ID NO: 2606931 - RNA, 19 nt, Homo sapiens
  misc_RNA (1)...(19): siRNA sense strand
gcuaaagauucucagggca

SEQ ID NO: 2606932 - RNA, 19 nt, Homo sapiens
  misc_RNA (1)...(19): siRNA sense strand
gggaaugccuuucugcaga

SEQ ID NO: 2606933 - RNA, 19 nt, Homo sapiens
  misc_RNA (1)...(19): siRNA sense strand
aauuuauagagcugaggaa

SEQ ID NO: 2606934 - RNA, 19 nt, Homo sapiens
  misc_RNA (1)...(19): siRNA sense strand
acgaaugagaagacaaguu

SEQ ID NO: 2606935 - RNA, 19 nt, Homo sapiens
  misc_RNA (1)...(19): siRNA sense strand
augucuggaagcugagaaa

SEQ ID NO: 2606936 - RNA, 19 nt, Homo sapiens
  misc_RNA (1)...(19): siRNA sense strand
ggagugaaugagagccaca

SEQ ID NO: 2606937 - RNA, 19 nt, Homo sapiens
  misc_RNA (1)...(19): siRNA sense strand
aaaggaaaagggagaacaa

SEQ ID NO: 2606938 - RNA, 19 nt, Homo sapiens
  misc_RNA (1)...(19): siRNA sense strand
ggaccaucuuggaggcuac

SEQ ID NO: 2606939 - RNA, 19 nt, Homo sapiens
  misc_RNA (1)...(19): siRNA sense strand
uguuaugucuggaagcuga

SEQ ID NO: 2606940 - RNA, 19 nt, Homo sapiens
  misc_RNA (1)...(19): siRNA sense strand
cuggaagcugagaaauuua

SEQ ID NO: 2606941 - RNA, 19 nt, Homo sapiens
  misc_RNA (1)...(19): siRNA sense strand
agacgaaaacucugcggaa

SEQ ID NO: 2606942 - RNA, 19 nt, Homo sapiens
  misc_RNA (1)...(19): siRNA sense strand
uuacgaaauuagaacgacu

SEQ ID NO: 2606943 - RNA, 19 nt, Homo sapiens
  misc_RNA (1)...(19): siRNA sense strand
gcacagacauagaugacga

SEQ ID NO: 2606944 - RNA, 19 nt, Homo sapiens
  misc_RNA (1)...(19): siRNA sense strand
agauguggaccgugugaaa

SEQ ID NO: 2606945 - RNA, 19 nt, Homo sapiens
  misc_RNA (1)...(19): siRNA sense strand
cggcagauuucucagggaa

SEQ ID NO: 2606946 - RNA, 19 nt, Homo sapiens
  misc_RNA (1)...(19): siRNA sense strand
acauagaugacgaggagga

SEQ ID NO: 2606947 - RNA, 19 nt, Homo sapiens
  misc_RNA (1)...(19): siRNA sense strand
cccugaaagaugugaaaga

SEQ ID NO: 2606948 - RNA, 19 nt, Homo sapiens
  misc_RNA (1)...(19): siRNA sense strand
gaaagaaucuauaugguac

SEQ ID NO: 2606949 - RNA, 19 nt, Homo sapiens
  misc_RNA (1)...(19): siRNA sense strand
ccugaauggaacaaaguuu

SEQ ID NO: 2606950 - RNA, 19 nt, Homo sapiens
  misc_RNA (1)...(19): siRNA sense strand
acgaggaggaugaagauga

SEQ ID NO: 2606951 - RNA, 19 nt, Homo sapiens
  misc_RNA (1)...(19): siRNA sense strand
gaugaagaugacaaggaau

SEQ ID NO: 2606952 - RNA, 19 nt, Homo sapiens
  misc_RNA (1)...(19): siRNA sense strand
aggaggaugaagaugacaa

SEQ ID NO: 2606953 - RNA, 19 nt, Homo sapiens
  misc_RNA (1)...(19): siRNA sense strand
gcgaaagaaagcagauuac

SEQ ID NO: 2606954 - RNA, 19 nt, Homo sapiens
  misc_RNA (1)...(19): siRNA sense strand
gcuuguuggaguuaggcaa

SEQ ID NO: 2606955 - RNA, 19 nt, Homo sapiens
  misc_RNA (1)...(19): siRNA sense strand
uggcauuguugcugaucuu

SEQ ID NO: 2606956 - RNA, 19 nt, Homo sapiens
  misc_RNA (1)...(19): siRNA sense strand
acauugaaguguggggaaa

SEQ ID NO: 2606957 - RNA, 19 nt, Homo sapiens
  misc_RNA (1)...(19): siRNA sense strand
ggaguuaggcaaugaccga

SEQ ID NO: 2606958 - RNA, 19 nt, Homo sapiens
  misc_RNA (1)...(19): siRNA sense strand
gaaagcaaguauuaggacu

SEQ ID NO: 2606959 - RNA, 19 nt, Homo sapiens
  misc_RNA (1)...(19): siRNA sense strand
acuauggcaauauggaaua

SEQ ID NO: 2606960 - RNA, 19 nt, Homo sapiens
  misc_RNA (1)...(19): siRNA sense strand
uuagcagaccucagcgaaa

SEQ ID NO: 2606961 - RNA, 19 nt, Homo sapiens
  misc_RNA (1)...(19): siRNA sense strand
ugaaagaugugaaagacgu

SEQ ID NO: 2606962 - RNA, 19 nt, Homo sapiens
  misc_RNA (1)...(19): siRNA sense strand
caagagauguggaccgugu

SEQ ID NO: 2606963 - RNA, 19 nt, Homo sapiens
  misc_RNA (1)...(19): siRNA sense strand
agacauagaugacgaggag

SEQ ID NO: 2606964 - RNA, 19 nt, Homo sapiens
  misc_RNA (1)...(19): siRNA sense strand
cacuauggcaauauggaau

SEQ ID NO: 2606965 - RNA, 19 nt, Homo sapiens
  misc_RNA (1)...(19): siRNA sense strand
uggaagugacaguguuuga

SEQ ID NO: 2606966 - RNA, 19 nt, Homo sapiens
  misc_RNA (1)...(19): siRNA sense strand
aaagaaucacuauggcaau

SEQ ID NO: 2606967 - RNA, 19 nt, Homo sapiens
  misc_RNA (1)...(19): siRNA sense strand
aggaugaagaugacaagga

SEQ ID NO: 2606968 - RNA, 19 nt, Homo sapiens
  misc_RNA (1)...(19): siRNA sense strand
uacaauagcauucgcggua

SEQ ID NO: 2606969 - RNA, 19 nt, Homo sapiens
  misc_RNA (1)...(19): siRNA sense strand
augacgaggaggaugaaga

SEQ ID NO: 2606970 - RNA, 19 nt, Homo sapiens
  misc_RNA (1)...(19): siRNA sense strand
ggaagaagaacaagcgagu

SEQ ID NO: 2606971 - RNA, 19 nt, Homo sapiens
  misc_RNA (1)...(19): siRNA sense strand
agaacaagcgagugagcau

SEQ ID NO: 2606972 - RNA, 19 nt, Homo sapiens
  misc_RNA (1)...(19): siRNA sense strand
cuggagaaggagaggauga

SEQ ID NO: 2606973 - RNA, 19 nt, Homo sapiens
  misc_RNA (1)...(19): siRNA sense strand
aauuuuagauggaggagaa

SEQ ID NO: 2606974 - RNA, 19 nt, Homo sapiens
  misc_RNA (1)...(19): siRNA sense strand
uuuagauggaggagaagaa

SEQ ID NO: 2606975 - RNA, 19 nt, Homo sapiens
  misc_RNA (1)...(19): siRNA sense strand
agaccuggaagaagaacaa

SEQ ID NO: 2606976 - RNA, 19 nt, Homo sapiens
  misc_RNA (1)...(19): siRNA sense strand
ccugcugagucgagguuau

SEQ ID NO: 2606977 - RNA, 19 nt, Homo sapiens
  misc_RNA (1)...(19): siRNA sense strand
aaagaugagcugaagucaa

SEQ ID NO: 2606978 - RNA, 19 nt, Homo sapiens
  misc_RNA (1)...(19): siRNA sense strand
aggaugaugcggagguuca

SEQ ID NO: 2606979 - RNA, 19 nt, Homo sapiens
  misc_RNA (1)...(19): siRNA sense strand
ucagacagguguugagcca

SEQ ID NO: 2606980 - RNA, 19 nt, Homo sapiens
  misc_RNA (1)...(19): siRNA sense strand
cugaacuaguggcagaauu

SEQ ID NO: 2606981 - RNA, 19 nt, Homo sapiens
  misc_RNA (1)...(19): siRNA sense strand
agacagguguugagccagu

SEQ ID NO: 2606982 - RNA, 19 nt, Homo sapiens
  misc_RNA (1)...(19): siRNA sense strand
gguucaggaaacuguggaa

SEQ ID NO: 2606983 - RNA, 19 nt, Homo sapiens
  misc_RNA (1)...(19): siRNA sense strand
ggaacagaugauugcacau

SEQ ID NO: 2606984 - RNA, 19 nt, Homo sapiens
  misc_RNA (1)...(19): siRNA sense strand
cccaggaagugcagcgcuu

SEQ ID NO: 2606985 - RNA, 19 nt, Homo sapiens
  misc_RNA (1)...(19): siRNA sense strand
cagcaugccagcagcuaga

SEQ ID NO: 2606986 - RNA, 19 nt, Homo sapiens
  misc_RNA (1)...(19): siRNA sense strand
cgucaaaagcugucgaaac

SEQ ID NO: 2606987 - RNA, 19 nt, Homo sapiens
  misc_RNA (1)...(19): siRNA sense strand
ccucugacuucgugcaacu

SEQ ID NO: 2606988 - RNA, 19 nt, Homo sapiens
  misc_RNA (1)...(19): siRNA sense strand
ggaagaagaacaagcgagu

SEQ ID NO: 2606989 - RNA, 19 nt, Homo sapiens
  misc_RNA (1)...(19): siRNA sense strand
agaacaagcgagugagcau

SEQ ID NO: 2606990 - RNA, 19 nt, Homo sapiens
  misc_RNA (1)...(19): siRNA sense strand
cuggagaaggagaggauga

SEQ ID NO: 2606991 - RNA, 19 nt, Homo sapiens
  misc_RNA (1)...(19): siRNA sense strand
aauuuuagauggaggagaa

SEQ ID NO: 2606992 - RNA, 19 nt, Homo sapiens
  misc_RNA (1)...(19): siRNA sense strand
uuuagauggaggagaagaa

SEQ ID NO: 2606993 - RNA, 19 nt, Homo sapiens
  misc_RNA (1)...(19): siRNA sense strand
agaccuggaagaagaacaa

SEQ ID NO: 2606994 - RNA, 19 nt, Homo sapiens
  misc_RNA (1)...(19): siRNA sense strand
ccugcugagucgagguuau

SEQ ID NO: 2606995 - RNA, 19 nt, Homo sapiens
  misc_RNA (1)...(19): siRNA sense strand
aaagaugagcugaagucaa

SEQ ID NO: 2606996 - RNA, 19 nt, Homo sapiens
  misc_RNA (1)...(19): siRNA sense strand
aggaugaugcggagguuca

SEQ ID NO: 2606997 - RNA, 19 nt, Homo sapiens
  misc_RNA (1)...(19): siRNA sense strand
ucagacagguguugagcca

SEQ ID NO: 2606998 - RNA, 19 nt, Homo sapiens
  misc_RNA (1)...(19): siRNA sense strand
cugaacuaguggcagaauu

SEQ ID NO: 2606999 - RNA, 19 nt, Homo sapiens
  misc_RNA (1)...(19): siRNA sense strand
agacagguguugagccagu

SEQ ID NO: 2607000 - RNA, 19 nt, Homo sapiens
  misc_RNA (1)...(19): siRNA sense strand
gguucaggaaacuguggaa

SEQ ID NO: 2607001 - RNA, 19 nt, Homo sapiens
  misc_RNA (1)...(19): siRNA sense strand
ggaacagaugauugcacau

SEQ ID NO: 2607002 - RNA, 19 nt, Homo sapiens
  misc_RNA (1)...(19): siRNA sense strand
cccaggaagugcagcgcuu

SEQ ID NO: 2607003 - RNA, 19 nt, Homo sapiens
  misc_RNA (1)...(19): siRNA sense strand
cagcaugccagcagcuaga

SEQ ID NO: 2607004 - RNA, 19 nt, Homo sapiens
  misc_RNA (1)...(19): siRNA sense strand
cgucaaaagcugucgaaac

SEQ ID NO: 2607005 - RNA, 19 nt, Homo sapiens
  misc_RNA (1)...(19): siRNA sense strand
ccucugacuucgugcaacu

SEQ ID NO: 2607006 - RNA, 19 nt, Homo sapiens
  misc_RNA (1)...(19): siRNA sense strand
ccuaaggaagagagagaaa

SEQ ID NO: 2607007 - RNA, 19 nt, Homo sapiens
  misc_RNA (1)...(19): siRNA sense strand
ggaugaaacacuagugcau

SEQ ID NO: 2607008 - RNA, 19 nt, Homo sapiens
  misc_RNA (1)...(19): siRNA sense strand
cagacaaguuacugaacau

SEQ ID NO: 2607009 - RNA, 19 nt, Homo sapiens
  misc_RNA (1)...(19): siRNA sense strand
ugacagaagaacaacuaaa

SEQ ID NO: 2607010 - RNA, 19 nt, Homo sapiens
  misc_RNA (1)...(19): siRNA sense strand
caccuaaggaagagagaga

SEQ ID NO: 2607011 - RNA, 19 nt, Homo sapiens
  misc_RNA (1)...(19): siRNA sense strand
cuaagaagguguaugcaga

SEQ ID NO: 2607012 - RNA, 19 nt, Homo sapiens
  misc_RNA (1)...(19): siRNA sense strand
ccuauagaaaguugguuua

SEQ ID NO: 2607013 - RNA, 19 nt, Homo sapiens
  misc_RNA (1)...(19): siRNA sense strand
ggaguagaauugaacguga

SEQ ID NO: 2607014 - RNA, 19 nt, Homo sapiens
  misc_RNA (1)...(19): siRNA sense strand
cuguggaagcugaagaaau

SEQ ID NO: 2607015 - RNA, 19 nt, Homo sapiens
  misc_RNA (1)...(19): siRNA sense strand
cugccagagcaaagaggaa

SEQ ID NO: 2607016 - RNA, 19 nt, Homo sapiens
  misc_RNA (1)...(19): siRNA sense strand
gaaugaagauguucgacca

SEQ ID NO: 2607017 - RNA, 19 nt, Homo sapiens
  misc_RNA (1)...(19): siRNA sense strand
uggaacagguggaugagau

SEQ ID NO: 2607018 - RNA, 19 nt, Homo sapiens
  misc_RNA (1)...(19): siRNA sense strand
uuuagaagaagcagaagaa

SEQ ID NO: 2607019 - RNA, 19 nt, Homo sapiens
  misc_RNA (1)...(19): siRNA sense strand
guuuagaagaagcagaaga

SEQ ID NO: 2607020 - RNA, 19 nt, Homo sapiens
  misc_RNA (1)...(19): siRNA sense strand
agagcaaagaggaaauauu

SEQ ID NO: 2607021 - RNA, 19 nt, Homo sapiens
  misc_RNA (1)...(19): siRNA sense strand
aagcagaagaaacaguuaa

SEQ ID NO: 2607022 - RNA, 19 nt, Homo sapiens
  misc_RNA (1)...(19): siRNA sense strand
auauggaacagguggauga

SEQ ID NO: 2607023 - RNA, 19 nt, Homo sapiens
  misc_RNA (1)...(19): siRNA sense strand
cagguuuaugugagauuaa

SEQ ID NO: 2607024 - RNA, 19 nt, Homo sapiens
  misc_RNA (1)...(19): siRNA sense strand
uagaagaagcagaagaaac

SEQ ID NO: 2607025 - RNA, 19 nt, Homo sapiens
  misc_RNA (1)...(19): siRNA sense strand
cgaccacacaucagagaca

SEQ ID NO: 2607026 - RNA, 19 nt, Homo sapiens
  misc_RNA (1)...(19): siRNA sense strand
acaccaagagcaggagaaa

SEQ ID NO: 2607027 - RNA, 19 nt, Homo sapiens
  misc_RNA (1)...(19): siRNA sense strand
ugguuuagaagaagcagaa

SEQ ID NO: 2607028 - RNA, 19 nt, Homo sapiens
  misc_RNA (1)...(19): siRNA sense strand
acaagaagcacaccggaau

SEQ ID NO: 2607029 - RNA, 19 nt, Homo sapiens
  misc_RNA (1)...(19): siRNA sense strand
aaaccaucgaagaaugaaa

SEQ ID NO: 2607030 - RNA, 19 nt, Homo sapiens
  misc_RNA (1)...(19): siRNA sense strand
cccuauagaaaguugguuu

SEQ ID NO: 2607031 - RNA, 19 nt, Homo sapiens
  misc_RNA (1)...(19): siRNA sense strand
gccagagcaaagaggaaau

SEQ ID NO: 2607032 - RNA, 19 nt, Homo sapiens
  misc_RNA (1)...(19): siRNA sense strand
gaggcugagaacacggaaa

SEQ ID NO: 2607033 - RNA, 19 nt, Homo sapiens
  misc_RNA (1)...(19): siRNA sense strand
gccacugacagaagaacaa

SEQ ID NO: 2607034 - RNA, 19 nt, Homo sapiens
  misc_RNA (1)...(19): siRNA sense strand
cagucaaaucaaauccaaa

SEQ ID NO: 2607035 - RNA, 19 nt, Homo sapiens
  misc_RNA (1)...(19): siRNA sense strand
cugagaacacggaaagcuu

SEQ ID NO: 2607036 - RNA, 19 nt, Homo sapiens
  misc_RNA (1)...(19): siRNA sense strand
aagaagacugggaaguauu

SEQ ID NO: 2607037 - RNA, 19 nt, Homo sapiens
  misc_RNA (1)...(19): siRNA sense strand
aaauggaacgucaggauca

SEQ ID NO: 2607038 - RNA, 19 nt, Homo sapiens
  misc_RNA (1)...(19): siRNA sense strand
aagaaacaguuaaucguga

SEQ ID NO: 2607039 - RNA, 19 nt, Homo sapiens
  misc_RNA (1)...(19): siRNA sense strand
ccuucaaaacggaguagaa

SEQ ID NO: 2607040 - RNA, 19 nt, Homo sapiens
  misc_RNA (1)...(19): siRNA sense strand
agauagugguuauucauca

SEQ ID NO: 2607041 - RNA, 19 nt, Homo sapiens
  misc_RNA (1)...(19): siRNA sense strand
gggaaguauuugaccccua

SEQ ID NO: 2607042 - RNA, 19 nt, Homo sapiens
  misc_RNA (1)...(19): siRNA sense strand
gguaguuaugaaaugacaa

SEQ ID NO: 2607043 - RNA, 19 nt, Homo sapiens
  misc_RNA (1)...(19): siRNA sense strand
aguagaauugaacgugaua

SEQ ID NO: 2607044 - RNA, 19 nt, Homo sapiens
  misc_RNA (1)...(19): siRNA sense strand
caacgcacugccagagcaa

SEQ ID NO: 2607045 - RNA, 19 nt, Homo sapiens
  misc_RNA (1)...(19): siRNA sense strand
aggaagcacaccuaaggaa

SEQ ID NO: 2607046 - RNA, 19 nt, Homo sapiens
  misc_RNA (1)...(19): siRNA sense strand
gaucagauucuccaggaca

SEQ ID NO: 2607047 - RNA, 19 nt, Homo sapiens
  misc_RNA (1)...(19): siRNA sense strand
accacaagccuuugcauau

SEQ ID NO: 2607048 - RNA, 19 nt, Homo sapiens
  misc_RNA (1)...(19): siRNA sense strand
acauuacagcagagaggaa

SEQ ID NO: 2607049 - RNA, 19 nt, Homo sapiens
  misc_RNA (1)...(19): siRNA sense strand
gcaaguagggcgaacagga

SEQ ID NO: 2607050 - RNA, 19 nt, Homo sapiens
  misc_RNA (1)...(19): siRNA sense strand
gaacaggaaugaagucgca

SEQ ID NO: 2607051 - RNA, 19 nt, Homo sapiens
  misc_RNA (1)...(19): siRNA sense strand
aggcuaauguccagaccca

SEQ ID NO: 2607052 - RNA, 19 nt, Homo sapiens
  misc_RNA (1)...(19): siRNA sense strand
cugggaacagacaaagaaa

SEQ ID NO: 2607053 - RNA, 19 nt, Homo sapiens
  misc_RNA (1)...(19): siRNA sense strand
augcaaagcuccuacagca

SEQ ID NO: 2607054 - RNA, 19 nt, Homo sapiens
  misc_RNA (1)...(19): siRNA sense strand
auuuuggagcagagggaaa

SEQ ID NO: 2607055 - RNA, 19 nt, Homo sapiens
  misc_RNA (1)...(19): siRNA sense strand
gagaguuaguuaaacggua

SEQ ID NO: 2607056 - RNA, 19 nt, Homo sapiens
  misc_RNA (1)...(19): siRNA sense strand
ugggauaggaauauggaca

SEQ ID NO: 2607057 - RNA, 19 nt, Homo sapiens
  misc_RNA (1)...(19): siRNA sense strand
gaaagcagcagcaagggaa

SEQ ID NO: 2607058 - RNA, 19 nt, Homo sapiens
  misc_RNA (1)...(19): siRNA sense strand
aguuaaacgguaucaagaa

SEQ ID NO: 2607059 - RNA, 19 nt, Homo sapiens
  misc_RNA (1)...(19): siRNA sense strand
aggauggaacagaagaaau

SEQ ID NO: 2607060 - RNA, 19 nt, Homo sapiens
  misc_RNA (1)...(19): siRNA sense strand
aauucguucccaagagaaa

SEQ ID NO: 2607061 - RNA, 19 nt, Homo sapiens
  misc_RNA (1)...(19): siRNA sense strand
ggccaugcaguuuggacaa

SEQ ID NO: 2607062 - RNA, 19 nt, Homo sapiens
  misc_RNA (1)...(19): siRNA sense strand
cagaaaagucucauguaga

SEQ ID NO: 2607063 - RNA, 19 nt, Homo sapiens
  misc_RNA (1)...(19): siRNA sense strand
cugaggaagauaaacagaa

SEQ ID NO: 2607064 - RNA, 19 nt, Homo sapiens
  misc_RNA (1)...(19): siRNA sense strand
acagacuaaagaaggcaaa

SEQ ID NO: 2607065 - RNA, 19 nt, Homo sapiens
  misc_RNA (1)...(19): siRNA sense strand
augccuuccauuagauaaa

SEQ ID NO: 2607066 - RNA, 19 nt, Homo sapiens
  misc_RNA (1)...(19): siRNA sense strand
caucccuagccaaggcaaa

SEQ ID NO: 2607067 - RNA, 19 nt, Homo sapiens
  misc_RNA (1)...(19): siRNA sense strand
agaaagugaaggauggaac

SEQ ID NO: 2607068 - RNA, 19 nt, Homo sapiens
  misc_RNA (1)...(19): siRNA sense strand
agaaugagcugcagcgcaa

SEQ ID NO: 2607069 - RNA, 19 nt, Homo sapiens
  misc_RNA (1)...(19): siRNA sense strand
gagcagaagcuguuggaga

SEQ ID NO: 2607070 - RNA, 19 nt, Homo sapiens
  misc_RNA (1)...(19): siRNA sense strand
gcaagaagaacgaggcgga

SEQ ID NO: 2607071 - RNA, 19 nt, Homo sapiens
  misc_RNA (1)...(19): siRNA sense strand
ucaagaagcucaaccggua

SEQ ID NO: 2607072 - RNA, 19 nt, Homo sapiens
  misc_RNA (1)...(19): siRNA sense strand
gaggagaaggagaagguga

SEQ ID NO: 2607073 - RNA, 19 nt, Homo sapiens
  misc_RNA (1)...(19): siRNA sense strand
gcuggaggucugugagaau

SEQ ID NO: 2607074 - RNA, 19 nt, Homo sapiens
  misc_RNA (1)...(19): siRNA sense strand
agacggaggugaacgccaa

SEQ ID NO: 2607075 - RNA, 19 nt, Homo sapiens
  misc_RNA (1)...(19): siRNA sense strand
cagacaagcccaaggagca

SEQ ID NO: 2607076 - RNA, 19 nt, Homo sapiens
  misc_RNA (1)...(19): siRNA sense strand
uggaaggaggagaaggaga

SEQ ID NO: 2607077 - RNA, 19 nt, Homo sapiens
  misc_RNA (1)...(19): siRNA sense strand
aggagaaggagaaggugau

SEQ ID NO: 2607078 - RNA, 19 nt, Homo sapiens
  misc_RNA (1)...(19): siRNA sense strand
ccaaaaugggcaagagcga

SEQ ID NO: 2607079 - RNA, 19 nt, Homo sapiens
  misc_RNA (1)...(19): siRNA sense strand
aggaccugcuggagaccaa

SEQ ID NO: 2607080 - RNA, 19 nt, Homo sapiens
  misc_RNA (1)...(19): siRNA sense strand
ucguguggaaggaggagaa

SEQ ID NO: 2607081 - RNA, 19 nt, Homo sapiens
  misc_RNA (1)...(19): siRNA sense strand
gaggugaacgccaaggcua

SEQ ID NO: 2607082 - RNA, 19 nt, Homo sapiens
  misc_RNA (1)...(19): siRNA sense strand
uguggaaggaggagaagga

SEQ ID NO: 2607083 - RNA, 19 nt, Homo sapiens
  misc_RNA (1)...(19): siRNA sense strand
aggcacagcugaaggacac

SEQ ID NO: 2607084 - RNA, 19 nt, Homo sapiens
  misc_RNA (1)...(19): siRNA sense strand
agaagcuguuggagaggga

SEQ ID NO: 2607085 - RNA, 19 nt, Homo sapiens
  misc_RNA (1)...(19): siRNA sense strand
agucccagacggaggugaa

SEQ ID NO: 2607086 - RNA, 19 nt, Homo sapiens
  misc_RNA (1)...(19): siRNA sense strand
gcagagaacuucagcguca

SEQ ID NO: 2607087 - RNA, 19 nt, Homo sapiens
  misc_RNA (1)...(19): siRNA sense strand
ccagauugugaaagagaaa

SEQ ID NO: 2607088 - RNA, 19 nt, Homo sapiens
  misc_RNA (1)...(19): siRNA sense strand
cagaaaggaaugagcucaa

SEQ ID NO: 2607089 - RNA, 19 nt, Homo sapiens
  misc_RNA (1)...(19): siRNA sense strand
gcagcaggcacgagaggaa

SEQ ID NO: 2607090 - RNA, 19 nt, Homo sapiens
  misc_RNA (1)...(19): siRNA sense strand
ggaaaagaugacaaagaaa

SEQ ID NO: 2607091 - RNA, 19 nt, Homo sapiens
  misc_RNA (1)...(19): siRNA sense strand
gcgacagaaucgaggcaca

SEQ ID NO: 2607092 - RNA, 19 nt, Homo sapiens
  misc_RNA (1)...(19): siRNA sense strand
cguuaaaggaggaaaauau

SEQ ID NO: 2607093 - RNA, 19 nt, Homo sapiens
  misc_RNA (1)...(19): siRNA sense strand
uggcguaccaaaugggaaa

SEQ ID NO: 2607094 - RNA, 19 nt, Homo sapiens
  misc_RNA (1)...(19): siRNA sense strand
agguggaaguccugaaaga

SEQ ID NO: 2607095 - RNA, 19 nt, Homo sapiens
  misc_RNA (1)...(19): siRNA sense strand
caucagagagagagagagu

SEQ ID NO: 2607096 - RNA, 19 nt, Homo sapiens
  misc_RNA (1)...(19): siRNA sense strand
ccaaaugggaaaacaauaa

SEQ ID NO: 2607097 - RNA, 19 nt, Homo sapiens
  misc_RNA (1)...(19): siRNA sense strand
ggaagaggaugaaggcagu

SEQ ID NO: 2607098 - RNA, 19 nt, Homo sapiens
  misc_RNA (1)...(19): siRNA sense strand
cgccaaacuccgacaggaa

SEQ ID NO: 2607099 - RNA, 19 nt, Homo sapiens
  misc_RNA (1)...(19): siRNA sense strand
gcgaacagggauuuagcaa

SEQ ID NO: 2607100 - RNA, 19 nt, Homo sapiens
  misc_RNA (1)...(19): siRNA sense strand
gaaacaauaauuuggcgua

SEQ ID NO: 2607101 - RNA, 19 nt, Homo sapiens
  misc_RNA (1)...(19): siRNA sense strand
agacguuaaaggaggaaaa

SEQ ID NO: 2607102 - RNA, 19 nt, Homo sapiens
  misc_RNA (1)...(19): siRNA sense strand
ucagagaagcgcugugcaa

SEQ ID NO: 2607103 - RNA, 19 nt, Homo sapiens
  misc_RNA (1)...(19): siRNA sense strand
agcuggaauuugugggcua

SEQ ID NO: 2607104 - RNA, 19 nt, Homo sapiens
  misc_RNA (1)...(19): siRNA sense strand
aagaaucaagagaggaaau

SEQ ID NO: 2607105 - RNA, 19 nt, Homo sapiens
  misc_RNA (1)...(19): siRNA sense strand
gcuagaaucucuuugcaga

SEQ ID NO: 2607106 - RNA, 19 nt, Homo sapiens
  misc_RNA (1)...(19): siRNA sense strand
cgacagaaucgaggcacaa

SEQ ID NO: 2607107 - RNA, 19 nt, Homo sapiens
  misc_RNA (1)...(19): siRNA sense strand
gagaacaggaauuugguga

SEQ ID NO: 2607108 - RNA, 19 nt, Homo sapiens
  misc_RNA (1)...(19): siRNA sense strand
agggaagagcacauugaua

SEQ ID NO: 2607109 - RNA, 19 nt, Homo sapiens
  misc_RNA (1)...(19): siRNA sense strand
ugcaaauggcugaagagaa

SEQ ID NO: 2607110 - RNA, 19 nt, Homo sapiens
  misc_RNA (1)...(19): siRNA sense strand
gggugaaagcagauauguu

SEQ ID NO: 2607111 - RNA, 19 nt, Homo sapiens
  misc_RNA (1)...(19): siRNA sense strand
aaauaaaacuggaacgguu

SEQ ID NO: 2607112 - RNA, 19 nt, Homo sapiens
  misc_RNA (1)...(19): siRNA sense strand
agagaagcgcugugcaaaa

SEQ ID NO: 2607113 - RNA, 19 nt, Homo sapiens
  misc_RNA (1)...(19): siRNA sense strand
agcaagauucagagugcaa

SEQ ID NO: 2607114 - RNA, 19 nt, Homo sapiens
  misc_RNA (1)...(19): siRNA sense strand
agaacgacguaaagaagca

SEQ ID NO: 2607115 - RNA, 19 nt, Homo sapiens
  misc_RNA (1)...(19): siRNA sense strand
auaacagagaacaggaauu

SEQ ID NO: 2607116 - RNA, 19 nt, Homo sapiens
  misc_RNA (1)...(19): siRNA sense strand
ugcaacaggaacaaagaaa

SEQ ID NO: 2607117 - RNA, 19 nt, Homo sapiens
  misc_RNA (1)...(19): siRNA sense strand
aaaugaaacagcaggaagu

SEQ ID NO: 2607118 - RNA, 19 nt, Homo sapiens
  misc_RNA (1)...(19): siRNA sense strand
ggcacaaauacgaacaaau

SEQ ID NO: 2607119 - RNA, 19 nt, Homo sapiens
  misc_RNA (1)...(19): siRNA sense strand
ccaucaaagcggccaucaa

SEQ ID NO: 2607120 - RNA, 19 nt, Homo sapiens
  misc_RNA (1)...(19): siRNA sense strand
caauggaagaagcuggaau

SEQ ID NO: 2607121 - RNA, 19 nt, Homo sapiens
  misc_RNA (1)...(19): siRNA sense strand
gcauacugcacgcaagaau

SEQ ID NO: 2607122 - RNA, 19 nt, Homo sapiens
  misc_RNA (1)...(19): siRNA sense strand
ggcacgagaggaagaagaa

SEQ ID NO: 2607123 - RNA, 19 nt, Homo sapiens
  misc_RNA (1)...(19): siRNA sense strand
ucaaugagaagguggaagu

SEQ ID NO: 2607124 - RNA, 19 nt, Homo sapiens
  misc_RNA (1)...(19): siRNA sense strand
ucagagugcaacaggaaca

SEQ ID NO: 2607125 - RNA, 19 nt, Homo sapiens
  misc_RNA (1)...(19): siRNA sense strand
aauggaagaagcuggaauu

SEQ ID NO: 2607126 - RNA, 19 nt, Homo sapiens
  misc_RNA (1)...(19): siRNA sense strand
agcaggaaguacaacuaaa

SEQ ID NO: 2607127 - RNA, 19 nt, Homo sapiens
  misc_RNA (1)...(19): siRNA sense strand
guaaagaagcaacugcaca

SEQ ID NO: 2607128 - RNA, 19 nt, Homo sapiens
  misc_RNA (1)...(19): siRNA sense strand
gcggcagaaguuugaaauu

SEQ ID NO: 2607129 - RNA, 19 nt, Homo sapiens
  misc_RNA (1)...(19): siRNA sense strand
auucagagugcaacaggaa

SEQ ID NO: 2607130 - RNA, 19 nt, Homo sapiens
  misc_RNA (1)...(19): siRNA sense strand
aggaagaagaacgacguaa

SEQ ID NO: 2607131 - RNA, 19 nt, Homo sapiens
  misc_RNA (1)...(19): siRNA sense strand
ucagacaggaaauggaaaa

SEQ ID NO: 2607132 - RNA, 19 nt, Homo sapiens
  misc_RNA (1)...(19): siRNA sense strand
guaccaaaugggaaaacaa

SEQ ID NO: 2607133 - RNA, 19 nt, Homo sapiens
  misc_RNA (1)...(19): siRNA sense strand
gcccagauugugaaagaga

SEQ ID NO: 2607134 - RNA, 19 nt, Homo sapiens
  misc_RNA (1)...(19): siRNA sense strand
aggaguguucagaagcaaa

SEQ ID NO: 2607135 - RNA, 19 nt, Homo sapiens
  misc_RNA (1)...(19): siRNA sense strand
guaaggaacugcaacagca

SEQ ID NO: 2607136 - RNA, 19 nt, Homo sapiens
  misc_RNA (1)...(19): siRNA sense strand
aggcacgagaggaagaaga

SEQ ID NO: 2607137 - RNA, 19 nt, Homo sapiens
  misc_RNA (1)...(19): siRNA sense strand
ccaaacuccgacaggaaaa

SEQ ID NO: 2607138 - RNA, 19 nt, Homo sapiens
  misc_RNA (1)...(19): siRNA sense strand
aauaaaacuggaacgguua

SEQ ID NO: 2607139 - RNA, 19 nt, Homo sapiens
  misc_RNA (1)...(19): siRNA sense strand
agaaauugcugaagacaca

SEQ ID NO: 2607140 - RNA, 19 nt, Homo sapiens
  misc_RNA (1)...(19): siRNA sense strand
cagugaagcugauagcaua

SEQ ID NO: 2607141 - RNA, 19 nt, Homo sapiens
  misc_RNA (1)...(19): siRNA sense strand
uagcauagacagugaucaa

SEQ ID NO: 2607142 - RNA, 19 nt, Homo sapiens
  misc_RNA (1)...(19): siRNA sense strand
gcucauaugcuaagacaga

SEQ ID NO: 2607143 - RNA, 19 nt, Homo sapiens
  misc_RNA (1)...(19): siRNA sense strand
cugaagacacaguggauau

SEQ ID NO: 2607144 - RNA, 19 nt, Homo sapiens
  misc_RNA (1)...(19): siRNA sense strand
agacagugaucaagaagau

SEQ ID NO: 2607145 - RNA, 19 nt, Homo sapiens
  misc_RNA (1)...(19): siRNA sense strand
ccagggaucugaagaggua

SEQ ID NO: 2607146 - RNA, 19 nt, Homo sapiens
  misc_RNA (1)...(19): siRNA sense strand
cagugaagccagccgaaua

SEQ ID NO: 2607147 - RNA, 19 nt, Homo sapiens
  misc_RNA (1)...(19): siRNA sense strand
agucaaagaaauugcugaa

SEQ ID NO: 2607148 - RNA, 19 nt, Homo sapiens
  misc_RNA (1)...(19): siRNA sense strand
ucaaagaaauugcugaaga

SEQ ID NO: 2607149 - RNA, 19 nt, Homo sapiens
  misc_RNA (1)...(19): siRNA sense strand
agaaaguagucgcagugaa

SEQ ID NO: 2607150 - RNA, 19 nt, Homo sapiens
  misc_RNA (1)...(19): siRNA sense strand
acaugaagcucuaggcagu

SEQ ID NO: 2607151 - RNA, 19 nt, Homo sapiens
  misc_RNA (1)...(19): siRNA sense strand
cgagagaacuuaaagcgau

SEQ ID NO: 2607152 - RNA, 19 nt, Homo sapiens
  misc_RNA (1)...(19): siRNA sense strand
acauaaucgcaaaguggaa

SEQ ID NO: 2607153 - RNA, 19 nt, Homo sapiens
  misc_RNA (1)...(19): siRNA sense strand
cagccgaauacuagaugaa

SEQ ID NO: 2607154 - RNA, 19 nt, Homo sapiens
  misc_RNA (1)...(19): siRNA sense strand
gccgaauacuagaugaaga

SEQ ID NO: 2607155 - RNA, 19 nt, Homo sapiens
  misc_RNA (1)...(19): siRNA sense strand
acuuggauguuguggguga

SEQ ID NO: 2607156 - RNA, 19 nt, Homo sapiens
  misc_RNA (1)...(19): siRNA sense strand
gaagacagcuggagugaug

SEQ ID NO: 2607157 - RNA, 19 nt, Homo sapiens
  misc_RNA (1)...(19): siRNA sense strand
gaucagacauggagaggug

SEQ ID NO: 2607158 - RNA, 19 nt, Homo sapiens
  misc_RNA (1)...(19): siRNA sense strand
cugaagagguacccugcaa

SEQ ID NO: 2607159 - RNA, 19 nt, Homo sapiens
  misc_RNA (1)...(19): siRNA sense strand
uggauuggcuacugcaaau

SEQ ID NO: 2607160 - RNA, 19 nt, Homo sapiens
  misc_RNA (1)...(19): siRNA sense strand
aagaaguggcccugauuau

SEQ ID NO: 2607161 - RNA, 19 nt, Homo sapiens
  misc_RNA (1)...(19): siRNA sense strand
gcauagacagugaucaaga

SEQ ID NO: 2607162 - RNA, 19 nt, Homo sapiens
  misc_RNA (1)...(19): siRNA sense strand
guuuaaacgacuucagcau

SEQ ID NO: 2607163 - RNA, 19 nt, Homo sapiens
  misc_RNA (1)...(19): siRNA sense strand
acccauauuugucaggaua

SEQ ID NO: 2607164 - RNA, 19 nt, Homo sapiens
  misc_RNA (1)...(19): siRNA sense strand
gauuaugcgugaaaagcua

SEQ ID NO: 2607165 - RNA, 19 nt, Homo sapiens
  misc_RNA (1)...(19): siRNA sense strand
caaagaaauugcugaagac

SEQ ID NO: 2607166 - RNA, 19 nt, Homo sapiens
  misc_RNA (1)...(19): siRNA sense strand
cuugagugcugcugagcuu

SEQ ID NO: 2607167 - RNA, 19 nt, Homo sapiens
  misc_RNA (1)...(19): siRNA sense strand
ugagaaagccucugcacca

SEQ ID NO: 2607168 - RNA, 19 nt, Homo sapiens
  misc_RNA (1)...(19): siRNA sense strand
cugauagcauagacaguga

SEQ ID NO: 2607169 - RNA, 19 nt, Homo sapiens
  misc_RNA (1)...(19): siRNA sense strand
gugaaacacuccugugcca

SEQ ID NO: 2607170 - RNA, 19 nt, Homo sapiens
  misc_RNA (1)...(19): siRNA sense strand
gcuauggaguggaagccuu

SEQ ID NO: 2607171 - RNA, 19 nt, Homo sapiens
  misc_RNA (1)...(19): siRNA sense strand
cugcaaaugggaagccaga

SEQ ID NO: 2607172 - RNA, 19 nt, Homo sapiens
  misc_RNA (1)...(19): siRNA sense strand
gaaaguagucgcagugaag

SEQ ID NO: 2607173 - RNA, 19 nt, Homo sapiens
  misc_RNA (1)...(19): siRNA sense strand
cagaagaaguggcccugau

SEQ ID NO: 2607174 - RNA, 19 nt, Homo sapiens
  misc_RNA (1)...(19): siRNA sense strand
cauagacagugaucaagaa

SEQ ID NO: 2607175 - RNA, 19 nt, Homo sapiens
  misc_RNA (1)...(19): siRNA sense strand
caguugaaggaacggagaa

SEQ ID NO: 2607176 - RNA, 19 nt, Homo sapiens
  misc_RNA (1)...(19): siRNA sense strand
gcaaaugggaagccagaac

SEQ ID NO: 2607177 - RNA, 19 nt, Homo sapiens
  misc_RNA (1)...(19): siRNA sense strand
gaggugacccugacaguga

SEQ ID NO: 2607178 - RNA, 19 nt, Homo sapiens
  misc_RNA (1)...(19): siRNA sense strand
gcugaagacacaguggaua

SEQ ID NO: 2607179 - RNA, 19 nt, Homo sapiens
  misc_RNA (1)...(19): siRNA sense strand
cagcagaagaaguggcccu

SEQ ID NO: 2607180 - RNA, 19 nt, Homo sapiens
  misc_RNA (1)...(19): siRNA sense strand
ucucagaguggauuggcua

SEQ ID NO: 2607181 - RNA, 19 nt, Homo sapiens
  misc_RNA (1)...(19): siRNA sense strand
cgaaucagguucucuucaa

SEQ ID NO: 2607182 - RNA, 19 nt, Homo sapiens
  misc_RNA (1)...(19): siRNA sense strand
agagguacccugcaacaaa

SEQ ID NO: 2607183 - RNA, 19 nt, Homo sapiens
  misc_RNA (1)...(19): siRNA sense strand
acagugaagcugauagcau

SEQ ID NO: 2607184 - RNA, 19 nt, Homo sapiens
  misc_RNA (1)...(19): siRNA sense strand
agacacugccuuacccaua

SEQ ID NO: 2607185 - RNA, 19 nt, Homo sapiens
  misc_RNA (1)...(19): siRNA sense strand
ugucuacacagcagaagaa

SEQ ID NO: 2607186 - RNA, 19 nt, Homo sapiens
  misc_RNA (1)...(19): siRNA sense strand
cagagggacuuuuggccaa

SEQ ID NO: 2607187 - RNA, 19 nt, Homo sapiens
  misc_RNA (1)...(19): siRNA sense strand
gacgauaccgccagcgcua

SEQ ID NO: 2607188 - RNA, 19 nt, Homo sapiens
  misc_RNA (1)...(19): siRNA sense strand
aguugaaggaacggagaau

SEQ ID NO: 2607189 - RNA, 19 nt, Homo sapiens
  misc_RNA (1)...(19): siRNA sense strand
aggcagaggagaugcugaa

SEQ ID NO: 2607190 - RNA, 19 nt, Homo sapiens
  misc_RNA (1)...(19): siRNA sense strand
aagaagaaaccucgggcca

SEQ ID NO: 2607191 - RNA, 19 nt, Homo sapiens
  misc_RNA (1)...(19): siRNA sense strand
gaagauugguuucgaccca

SEQ ID NO: 2607192 - RNA, 19 nt, Homo sapiens
  misc_RNA (1)...(19): siRNA sense strand
ugaggugagcagcaggaaa

SEQ ID NO: 2607193 - RNA, 19 nt, Homo sapiens
  misc_RNA (1)...(19): siRNA sense strand
gcaccgucgucauggcaca

SEQ ID NO: 2607194 - RNA, 19 nt, Homo sapiens
  misc_RNA (1)...(19): siRNA sense strand
ccaagagacugcaugguac

SEQ ID NO: 2607195 - RNA, 19 nt, Homo sapiens
  misc_RNA (1)...(19): siRNA sense strand
ucgucauggcacagggaca

SEQ ID NO: 2607196 - RNA, 19 nt, Homo sapiens
  misc_RNA (1)...(19): siRNA sense strand
gagaagaagauccgagcca

SEQ ID NO: 2607197 - RNA, 19 nt, Homo sapiens
  misc_RNA (1)...(19): siRNA sense strand
cagcagaacguguacgaga

SEQ ID NO: 2607198 - RNA, 19 nt, Homo sapiens
  misc_RNA (1)...(19): siRNA sense strand
acuuuaaggacgaggacga

SEQ ID NO: 2607199 - RNA, 19 nt, Homo sapiens
  misc_RNA (1)...(19): siRNA sense strand
aggacaagcugaaggugca

SEQ ID NO: 2607200 - RNA, 19 nt, Homo sapiens
  misc_RNA (1)...(19): siRNA sense strand
aggacgaggacgaggacga

SEQ ID NO: 2607201 - RNA, 19 nt, Homo sapiens
  misc_RNA (1)...(19): siRNA sense strand
ucgaguucuuccagagcaa

SEQ ID NO: 2607202 - RNA, 19 nt, Homo sapiens
  misc_RNA (1)...(19): siRNA sense strand
gcacagccaacguggguga

SEQ ID NO: 2607203 - RNA, 19 nt, Homo sapiens
  misc_RNA (1)...(19): siRNA sense strand
cagaagguggagaagaaga

SEQ ID NO: 2607204 - RNA, 19 nt, Homo sapiens
  misc_RNA (1)...(19): siRNA sense strand
agaagguggagaagaagau

SEQ ID NO: 2607205 - RNA, 19 nt, Homo sapiens
  misc_RNA (1)...(19): siRNA sense strand
ugaaggugcacaugcggaa

SEQ ID NO: 2607206 - RNA, 19 nt, Homo sapiens
  misc_RNA (1)...(19): siRNA sense strand
gacaagaugcagaaggcua

SEQ ID NO: 2607207 - RNA, 19 nt, Homo sapiens
  misc_RNA (1)...(19): siRNA sense strand
ggaugguacuucugcgaga

SEQ ID NO: 2607208 - RNA, 19 nt, Homo sapiens
  misc_RNA (1)...(19): siRNA sense strand
cuacaaaauccacgaaaau

SEQ ID NO: 2607209 - RNA, 19 nt, Homo sapiens
  misc_RNA (1)...(19): siRNA sense strand
gagggaagcaacugacaau

SEQ ID NO: 2607210 - RNA, 19 nt, Homo sapiens
  misc_RNA (1)...(19): siRNA sense strand
ucuacaaaauccacgaaaa

SEQ ID NO: 2607211 - RNA, 19 nt, Homo sapiens
  misc_RNA (1)...(19): siRNA sense strand
uaauggaagaacagcacaa

SEQ ID NO: 2607212 - RNA, 19 nt, Homo sapiens
  misc_RNA (1)...(19): siRNA sense strand
auguagaaacaaugaggau

SEQ ID NO: 2607213 - RNA, 19 nt, Homo sapiens
  misc_RNA (1)...(19): siRNA sense strand
gaacaaugacccaggacuc

SEQ ID NO: 2607214 - RNA, 19 nt, Homo sapiens
  misc_RNA (1)...(19): siRNA sense strand
ggaagcaacugacaaugua

SEQ ID NO: 2607215 - RNA, 19 nt, Homo sapiens
  misc_RNA (1)...(19): siRNA sense strand
aaggauugguucuuggaga

SEQ ID NO: 2607216 - RNA, 19 nt, Homo sapiens
  misc_RNA (1)...(19): siRNA sense strand
cugguuuaauaauggaaga

SEQ ID NO: 2607217 - RNA, 19 nt, Homo sapiens
  misc_RNA (1)...(19): siRNA sense strand
gagaggugauggaaccaga

SEQ ID NO: 2607218 - RNA, 19 nt, Homo sapiens
  misc_RNA (1)...(19): siRNA sense strand
agaguuacccagugcccaa

SEQ ID NO: 2607219 - RNA, 19 nt, Homo sapiens
  misc_RNA (1)...(19): siRNA sense strand
ggaugaaucugaugcggaa

SEQ ID NO: 2607220 - RNA, 19 nt, Homo sapiens
  misc_RNA (1)...(19): siRNA sense strand
agaaagauuuagauggcuu

SEQ ID NO: 2607221 - RNA, 19 nt, Homo sapiens
  misc_RNA (1)...(19): siRNA sense strand
gugagucaguggugggaga

SEQ ID NO: 2607222 - RNA, 19 nt, Homo sapiens
  misc_RNA (1)...(19): siRNA sense strand
ccauggaagaaaugcagaa

SEQ ID NO: 2607223 - RNA, 19 nt, Homo sapiens
  misc_RNA (1)...(19): siRNA sense strand
agaacaaagcugugguuuu

SEQ ID NO: 2607224 - RNA, 19 nt, Homo sapiens
  misc_RNA (1)...(19): siRNA sense strand
ugacccagaggcagguaaa

SEQ ID NO: 2607225 - RNA, 19 nt, Homo sapiens
  misc_RNA (1)...(19): siRNA sense strand
uugugcaauucuugggauu

SEQ ID NO: 2607226 - RNA, 19 nt, Homo sapiens
  misc_RNA (1)...(19): siRNA sense strand
uacagaagaaagugaguca

SEQ ID NO: 2607227 - RNA, 19 nt, Homo sapiens
  misc_RNA (1)...(19): siRNA sense strand
gcacaguggucaaggccuu

SEQ ID NO: 2607228 - RNA, 19 nt, Homo sapiens
  misc_RNA (1)...(19): siRNA sense strand
gcaccaaguaccagcgcuu

SEQ ID NO: 2607229 - RNA, 19 nt, Homo sapiens
  misc_RNA (1)...(19): siRNA sense strand
gcuucaugcccguggacau

SEQ ID NO: 2607230 - RNA, 19 nt, Homo sapiens
  misc_RNA (1)...(19): siRNA sense strand
cuacagagcaagagcaccu

SEQ ID NO: 2607231 - RNA, 19 nt, Homo sapiens
  misc_RNA (1)...(19): siRNA sense strand
ggacagcgauaguagccuu

SEQ ID NO: 2607232 - RNA, 19 nt, Homo sapiens
  misc_RNA (1)...(19): siRNA sense strand
ucgcucaacuggagggagu

SEQ ID NO: 2607233 - RNA, 19 nt, Homo sapiens
  misc_RNA (1)...(19): siRNA sense strand
gggacguucugcagcccua

SEQ ID NO: 2607234 - RNA, 19 nt, Homo sapiens
  misc_RNA (1)...(19): siRNA sense strand
cgggcaagauccuggugga

SEQ ID NO: 2607235 - RNA, 19 nt, Homo sapiens
  misc_RNA (1)...(19): siRNA sense strand
uggucaaccuggcagucaa

SEQ ID NO: 2607236 - RNA, 19 nt, Homo sapiens
  misc_RNA (1)...(19): siRNA sense strand
gcacaguggucaaggccuu

SEQ ID NO: 2607237 - RNA, 19 nt, Homo sapiens
  misc_RNA (1)...(19): siRNA sense strand
gcaccaaguaccagcgcuu

SEQ ID NO: 2607238 - RNA, 19 nt, Homo sapiens
  misc_RNA (1)...(19): siRNA sense strand
gcuucaugcccguggacau

SEQ ID NO: 2607239 - RNA, 19 nt, Homo sapiens
  misc_RNA (1)...(19): siRNA sense strand
cuacagagcaagagcaccu

SEQ ID NO: 2607240 - RNA, 19 nt, Homo sapiens
  misc_RNA (1)...(19): siRNA sense strand
ggacagcgauaguagccuu

SEQ ID NO: 2607241 - RNA, 19 nt, Homo sapiens
  misc_RNA (1)...(19): siRNA sense strand
ucgcucaacuggagggagu

SEQ ID NO: 2607242 - RNA, 19 nt, Homo sapiens
  misc_RNA (1)...(19): siRNA sense strand
gggacguucugcagcccua

SEQ ID NO: 2607243 - RNA, 19 nt, Homo sapiens
  misc_RNA (1)...(19): siRNA sense strand
cgggcaagauccuggugga

SEQ ID NO: 2607244 - RNA, 19 nt, Homo sapiens
  misc_RNA (1)...(19): siRNA sense strand
uggucaaccuggcagucaa

SEQ ID NO: 2607245 - RNA, 19 nt, Homo sapiens
  misc_RNA (1)...(19): siRNA sense strand
gcacaguggucaaggccuu

SEQ ID NO: 2607246 - RNA, 19 nt, Homo sapiens
  misc_RNA (1)...(19): siRNA sense strand
gcaccaaguaccagcgcuu

SEQ ID NO: 2607247 - RNA, 19 nt, Homo sapiens
  misc_RNA (1)...(19): siRNA sense strand
ugccagaagagauggacaa

SEQ ID NO: 2607248 - RNA, 19 nt, Homo sapiens
  misc_RNA (1)...(19): siRNA sense strand
gcuucaugcccguggacau

SEQ ID NO: 2607249 - RNA, 19 nt, Homo sapiens
  misc_RNA (1)...(19): siRNA sense strand
ccaaaaugccagaagagau

SEQ ID NO: 2607250 - RNA, 19 nt, Homo sapiens
  misc_RNA (1)...(19): siRNA sense strand
cuacagagcaagagcaccu

SEQ ID NO: 2607251 - RNA, 19 nt, Homo sapiens
  misc_RNA (1)...(19): siRNA sense strand
ggacagcgauaguagccuu

SEQ ID NO: 2607252 - RNA, 19 nt, Homo sapiens
  misc_RNA (1)...(19): siRNA sense strand
ucgcucaacuggagggagu

SEQ ID NO: 2607253 - RNA, 19 nt, Homo sapiens
  misc_RNA (1)...(19): siRNA sense strand
gggacguucugcagcccua

SEQ ID NO: 2607254 - RNA, 19 nt, Homo sapiens
  misc_RNA (1)...(19): siRNA sense strand
cgggcaagauccuggugga

SEQ ID NO: 2607255 - RNA, 19 nt, Homo sapiens
  misc_RNA (1)...(19): siRNA sense strand
uggucaaccuggcagucaa

SEQ ID NO: 2607256 - RNA, 19 nt, Homo sapiens
  misc_RNA (1)...(19): siRNA sense strand
cguagaaagcccaggaaac

SEQ ID NO: 2607257 - RNA, 19 nt, Homo sapiens
  misc_RNA (1)...(19): siRNA sense strand
caaggauggagaugagcaa

SEQ ID NO: 2607258 - RNA, 19 nt, Homo sapiens
  misc_RNA (1)...(19): siRNA sense strand
aagccaggcaguagaggaa

SEQ ID NO: 2607259 - RNA, 19 nt, Homo sapiens
  misc_RNA (1)...(19): siRNA sense strand
guaaauaagaugcaggaag

SEQ ID NO: 2607260 - RNA, 19 nt, Homo sapiens
  misc_RNA (1)...(19): siRNA sense strand
aggcaguagaggaaacauu

SEQ ID NO: 2607261 - RNA, 19 nt, Homo sapiens
  misc_RNA (1)...(19): siRNA sense strand
agaccuaugagcaggagaa

SEQ ID NO: 2607262 - RNA, 19 nt, Homo sapiens
  misc_RNA (1)...(19): siRNA sense strand
aggagaugccauugcugaa

SEQ ID NO: 2607263 - RNA, 19 nt, Homo sapiens
  misc_RNA (1)...(19): siRNA sense strand
uggaggaucuggaggguga

SEQ ID NO: 2607264 - RNA, 19 nt, Homo sapiens
  misc_RNA (1)...(19): siRNA sense strand
ggaaaggcuccuauggcaa

SEQ ID NO: 2607265 - RNA, 19 nt, Homo sapiens
  misc_RNA (1)...(19): siRNA sense strand
gggaaaggcuccuauggca

SEQ ID NO: 2607266 - RNA, 19 nt, Homo sapiens
  misc_RNA (1)...(19): siRNA sense strand
gggcccaguuuaacgggaa

SEQ ID NO: 2607267 - RNA, 19 nt, Homo sapiens
  misc_RNA (1)...(19): siRNA sense strand
agacagacauccuggccca

SEQ ID NO: 2607268 - RNA, 19 nt, Homo sapiens
  misc_RNA (1)...(19): siRNA sense strand
ggcccaguuuaacgggaaa

SEQ ID NO: 2607269 - RNA, 19 nt, Homo sapiens
  misc_RNA (1)...(19): siRNA sense strand
ggauggaucaggugccaga

SEQ ID NO: 2607270 - RNA, 19 nt, Homo sapiens
  misc_RNA (1)...(19): siRNA sense strand
ccuuugacgagguggacau

SEQ ID NO: 2607271 - RNA, 19 nt, Homo sapiens
  misc_RNA (1)...(19): siRNA sense strand
uggacauggcucacagauu

SEQ ID NO: 2607272 - RNA, 19 nt, Homo sapiens
  misc_RNA (1)...(19): siRNA sense strand
gcauggagccagacccuga

SEQ ID NO: 2607273 - RNA, 19 nt, Homo sapiens
  misc_RNA (1)...(19): siRNA sense strand
ccuaagaagucgaaggcca

SEQ ID NO: 2607274 - RNA, 19 nt, Homo sapiens
  misc_RNA (1)...(19): siRNA sense strand
ggcagaagguggaggagga

SEQ ID NO: 2607275 - RNA, 19 nt, Homo sapiens
  misc_RNA (1)...(19): siRNA sense strand
aggugaagcugaagcguga

SEQ ID NO: 2607276 - RNA, 19 nt, Homo sapiens
  misc_RNA (1)...(19): siRNA sense strand
ccaagaagauggaggaggu

SEQ ID NO: 2607277 - RNA, 19 nt, Homo sapiens
  misc_RNA (1)...(19): siRNA sense strand
agaagguggaggaggacaa

SEQ ID NO: 2607278 - RNA, 19 nt, Homo sapiens
  misc_RNA (1)...(19): siRNA sense strand
agaagaaggaagaggagca

SEQ ID NO: 2607279 - RNA, 19 nt, Homo sapiens
  misc_RNA (1)...(19): siRNA sense strand
gagaagaagaagaaggaag

SEQ ID NO: 2607280 - RNA, 19 nt, Homo sapiens
  misc_RNA (1)...(19): siRNA sense strand
gagcaagagaagaaagcca

SEQ ID NO: 2607281 - RNA, 19 nt, Homo sapiens
  misc_RNA (1)...(19): siRNA sense strand
gaggagaagaagaagcaga

SEQ ID NO: 2607282 - RNA, 19 nt, Homo sapiens
  misc_RNA (1)...(19): siRNA sense strand
agaagaaggaagagcagca

SEQ ID NO: 2607283 - RNA, 19 nt, Homo sapiens
  misc_RNA (1)...(19): siRNA sense strand
cugagaaggccaaggagga

SEQ ID NO: 2607284 - RNA, 19 nt, Homo sapiens
  misc_RNA (1)...(19): siRNA sense strand
cgacggaagaagagacgga

SEQ ID NO: 2607285 - RNA, 19 nt, Homo sapiens
  misc_RNA (1)...(19): siRNA sense strand
gaggagaaggccaagaaaa

SEQ ID NO: 2607286 - RNA, 19 nt, Homo sapiens
  misc_RNA (1)...(19): siRNA sense strand
ugguguggcuugaggagau

SEQ ID NO: 2607287 - RNA, 19 nt, Homo sapiens
  misc_RNA (1)...(19): siRNA sense strand
aagaggaggccgagcgcau

SEQ ID NO: 2607288 - RNA, 19 nt, Homo sapiens
  misc_RNA (1)...(19): siRNA sense strand
acuaagaagcccgaggaua

SEQ ID NO: 2607289 - RNA, 19 nt, Homo sapiens
  misc_RNA (1)...(19): siRNA sense strand
agccagagcugaugcccaa

SEQ ID NO: 2607290 - RNA, 19 nt, Homo sapiens
  misc_RNA (1)...(19): siRNA sense strand
aggagaagaagaagaagga

SEQ ID NO: 2607291 - RNA, 19 nt, Homo sapiens
  misc_RNA (1)...(19): siRNA sense strand
gcaggaagcaggaagagga

SEQ ID NO: 2607292 - RNA, 19 nt, Homo sapiens
  misc_RNA (1)...(19): siRNA sense strand
agaagaagaaggaagagga

SEQ ID NO: 2607293 - RNA, 19 nt, Homo sapiens
  misc_RNA (1)...(19): siRNA sense strand
ccaaggagaaggagcggca

SEQ ID NO: 2607294 - RNA, 19 nt, Homo sapiens
  misc_RNA (1)...(19): siRNA sense strand
agaaggaagaggagcagga

SEQ ID NO: 2607295 - RNA, 19 nt, Homo sapiens
  misc_RNA (1)...(19): siRNA sense strand
aggaagagcagcagcgucu

SEQ ID NO: 2607296 - RNA, 19 nt, Homo sapiens
  misc_RNA (1)...(19): siRNA sense strand
ggauggaucugaauagcga

SEQ ID NO: 2607297 - RNA, 19 nt, Homo sapiens
  misc_RNA (1)...(19): siRNA sense strand
cacuggacuuggaggauau

SEQ ID NO: 2607298 - RNA, 19 nt, Homo sapiens
  misc_RNA (1)...(19): siRNA sense strand
agaagaagaaggaagagca

SEQ ID NO: 2607299 - RNA, 19 nt, Homo sapiens
  misc_RNA (1)...(19): siRNA sense strand
agauggacccagagagcca

SEQ ID NO: 2607300 - RNA, 19 nt, Homo sapiens
  misc_RNA (1)...(19): siRNA sense strand
gagaagacugagaaggcca

SEQ ID NO: 2607301 - RNA, 19 nt, Homo sapiens
  misc_RNA (1)...(19): siRNA sense strand
cugcagaagaagaaggaag

SEQ ID NO: 2607302 - RNA, 19 nt, Homo sapiens
  misc_RNA (1)...(19): siRNA sense strand
gcauggaccccaaggagaa

SEQ ID NO: 2607303 - RNA, 19 nt, Homo sapiens
  misc_RNA (1)...(19): siRNA sense strand
aggagaagaagaagcagau

SEQ ID NO: 2607304 - RNA, 19 nt, Homo sapiens
  misc_RNA (1)...(19): siRNA sense strand
cggccaagaagauggagga

SEQ ID NO: 2607305 - RNA, 19 nt, Homo sapiens
  misc_RNA (1)...(19): siRNA sense strand
gauaauaaggacuuggugu

SEQ ID NO: 2607306 - RNA, 19 nt, Homo sapiens
  misc_RNA (1)...(19): siRNA sense strand
agaagauggaggaggugga

SEQ ID NO: 2607307 - RNA, 19 nt, Homo sapiens
  misc_RNA (1)...(19): siRNA sense strand
aggcuaagcggcuggcaga

SEQ ID NO: 2607308 - RNA, 19 nt, Homo sapiens
  misc_RNA (1)...(19): siRNA sense strand
aggagcagcugcagaggga

SEQ ID NO: 2607309 - RNA, 19 nt, Homo sapiens
  misc_RNA (1)...(19): siRNA sense strand
gaagaaagccaaggaggca

SEQ ID NO: 2607310 - RNA, 19 nt, Homo sapiens
  misc_RNA (1)...(19): siRNA sense strand
agcagaugaaggaggagaa

SEQ ID NO: 2607311 - RNA, 19 nt, Homo sapiens
  misc_RNA (1)...(19): siRNA sense strand
ugcagaagaagaaggaaga

SEQ ID NO: 2607312 - RNA, 19 nt, Homo sapiens
  misc_RNA (1)...(19): siRNA sense strand
cuggaggagaagaagaaga

SEQ ID NO: 2607313 - RNA, 19 nt, Homo sapiens
  misc_RNA (1)...(19): siRNA sense strand
cgcagaaagucucggagca

SEQ ID NO: 2607314 - RNA, 19 nt, Homo sapiens
  misc_RNA (1)...(19): siRNA sense strand
augaaggaggagaagaaga

SEQ ID NO: 2607315 - RNA, 19 nt, Homo sapiens
  misc_RNA (1)...(19): siRNA sense strand
acggaagaagagacggauu

SEQ ID NO: 2607316 - RNA, 19 nt, Homo sapiens
  misc_RNA (1)...(19): siRNA sense strand
aggaggaagcgcagcuaca

SEQ ID NO: 2607317 - RNA, 19 nt, Homo sapiens
  misc_RNA (1)...(19): siRNA sense strand
cagaggaaccagaugcuca

SEQ ID NO: 2607318 - RNA, 19 nt, Homo sapiens
  misc_RNA (1)...(19): siRNA sense strand
aagucuuagcccagaagua

SEQ ID NO: 2607319 - RNA, 19 nt, Homo sapiens
  misc_RNA (1)...(19): siRNA sense strand
aguccuuuauuaagcgcaa

SEQ ID NO: 2607320 - RNA, 19 nt, Homo sapiens
  misc_RNA (1)...(19): siRNA sense strand
uggccaaacaggaaagugu

SEQ ID NO: 2607321 - RNA, 19 nt, Homo sapiens
  misc_RNA (1)...(19): siRNA sense strand
gaaaguugguucugagcag

SEQ ID NO: 2607322 - RNA, 19 nt, Homo sapiens
  misc_RNA (1)...(19): siRNA sense strand
aggaggagaagaagaagca

SEQ ID NO: 2607323 - RNA, 19 nt, Homo sapiens
  misc_RNA (1)...(19): siRNA sense strand
gcgucuaagcucaggauug

SEQ ID NO: 2607324 - RNA, 19 nt, Homo sapiens
  misc_RNA (1)...(19): siRNA sense strand
cagggcagcaagaggccaa

SEQ ID NO: 2607325 - RNA, 19 nt, Homo sapiens
  misc_RNA (1)...(19): siRNA sense strand
ugagugagcuggacgagga

SEQ ID NO: 2607326 - RNA, 19 nt, Homo sapiens
  misc_RNA (1)...(19): siRNA sense strand
gagcagaugaaggaggaga

SEQ ID NO: 2607327 - RNA, 19 nt, Homo sapiens
  misc_RNA (1)...(19): siRNA sense strand
ucaccagagaauucagcaa

SEQ ID NO: 2607328 - RNA, 19 nt, Homo sapiens
  misc_RNA (1)...(19): siRNA sense strand
cuacaguggucggggagaa

SEQ ID NO: 2607329 - RNA, 19 nt, Homo sapiens
  misc_RNA (1)...(19): siRNA sense strand
gaagacugccgaagagcca

SEQ ID NO: 2607330 - RNA, 19 nt, Homo sapiens
  misc_RNA (1)...(19): siRNA sense strand
gaggaugcacguaggcuca

SEQ ID NO: 2607331 - RNA, 19 nt, Homo sapiens
  misc_RNA (1)...(19): siRNA sense strand
aggagguguuugagaccaa

SEQ ID NO: 2607332 - RNA, 19 nt, Homo sapiens
  misc_RNA (1)...(19): siRNA sense strand
ggaacaugagcaaggcaga

SEQ ID NO: 2607333 - RNA, 19 nt, Homo sapiens
  misc_RNA (1)...(19): siRNA sense strand
agaugaagacacugcugaa

SEQ ID NO: 2607334 - RNA, 19 nt, Homo sapiens
  misc_RNA (1)...(19): siRNA sense strand
gcucaguggcucaugccua

SEQ ID NO: 2607335 - RNA, 19 nt, Homo sapiens
  misc_RNA (1)...(19): siRNA sense strand
cgugcaggaacaugagcaa

SEQ ID NO: 2607336 - RNA, 19 nt, Homo sapiens
  misc_RNA (1)...(19): siRNA sense strand
gcaaaggcaaggaacccua

SEQ ID NO: 2607337 - RNA, 19 nt, Homo sapiens
  misc_RNA (1)...(19): siRNA sense strand
caauauugcuacuucgcuu

SEQ ID NO: 2607338 - RNA, 19 nt, Homo sapiens
  misc_RNA (1)...(19): siRNA sense strand
gaaaagcacauuaggguca

SEQ ID NO: 2607339 - RNA, 19 nt, Homo sapiens
  misc_RNA (1)...(19): siRNA sense strand
cuccaaggaacuuaagcaa

SEQ ID NO: 2607340 - RNA, 19 nt, Homo sapiens
  misc_RNA (1)...(19): siRNA sense strand
gauaaucaggccaggcuca

SEQ ID NO: 2607341 - RNA, 19 nt, Homo sapiens
  misc_RNA (1)...(19): siRNA sense strand
cauuagauggagagaagau

SEQ ID NO: 2607342 - RNA, 19 nt, Homo sapiens
  misc_RNA (1)...(19): siRNA sense strand
cuucacaaagaguuggaaa

SEQ ID NO: 2607343 - RNA, 19 nt, Homo sapiens
  misc_RNA (1)...(19): siRNA sense strand
guucuguuucaaaggaaua

SEQ ID NO: 2607344 - RNA, 19 nt, Homo sapiens
  misc_RNA (1)...(19): siRNA sense strand
ccguauaccugauuggugu

SEQ ID NO: 2607345 - RNA, 19 nt, Homo sapiens
  misc_RNA (1)...(19): siRNA sense strand
ugaucugaagcgaggacua

SEQ ID NO: 2607346 - RNA, 19 nt, Homo sapiens
  misc_RNA (1)...(19): siRNA sense strand
cggaaggugucuuagagga

SEQ ID NO: 2607347 - RNA, 19 nt, Homo sapiens
  misc_RNA (1)...(19): siRNA sense strand
agagaauuugguagucaua

SEQ ID NO: 2607348 - RNA, 19 nt, Homo sapiens
  misc_RNA (1)...(19): siRNA sense strand
gcuaaagaacagagccuuc

SEQ ID NO: 2607349 - RNA, 19 nt, Homo sapiens
  misc_RNA (1)...(19): siRNA sense strand
ugggagaggccuuuaccaa

SEQ ID NO: 2607350 - RNA, 19 nt, Homo sapiens
  misc_RNA (1)...(19): siRNA sense strand
cagagauucaguuguggaa

SEQ ID NO: 2607351 - RNA, 19 nt, Homo sapiens
  misc_RNA (1)...(19): siRNA sense strand
agcaacuagcagagaauuu

SEQ ID NO: 2607352 - RNA, 19 nt, Homo sapiens
  misc_RNA (1)...(19): siRNA sense strand
gagcauuacaagauauacu

SEQ ID NO: 2607353 - RNA, 19 nt, Homo sapiens
  misc_RNA (1)...(19): siRNA sense strand
cguucuguuucaaaggaau

SEQ ID NO: 2607354 - RNA, 19 nt, Homo sapiens
  misc_RNA (1)...(19): siRNA sense strand
uggagcauuacaagauaua

SEQ ID NO: 2607355 - RNA, 19 nt, Homo sapiens
  misc_RNA (1)...(19): siRNA sense strand
gaggaaaagcucuucacaa

SEQ ID NO: 2607356 - RNA, 19 nt, Homo sapiens
  misc_RNA (1)...(19): siRNA sense strand
gcuugcagaaauaagguau

SEQ ID NO: 2607357 - RNA, 19 nt, Homo sapiens
  misc_RNA (1)...(19): siRNA sense strand
aggaauaagaacagagagu

SEQ ID NO: 2607358 - RNA, 19 nt, Homo sapiens
  misc_RNA (1)...(19): siRNA sense strand
ccuugaagaaaguccuaaa

SEQ ID NO: 2607359 - RNA, 19 nt, Homo sapiens
  misc_RNA (1)...(19): siRNA sense strand
aaguaaacaaguauggaga

SEQ ID NO: 2607360 - RNA, 19 nt, Homo sapiens
  misc_RNA (1)...(19): siRNA sense strand
caacagaggaagaaaggag

SEQ ID NO: 2607361 - RNA, 19 nt, Homo sapiens
  misc_RNA (1)...(19): siRNA sense strand
cgcagaaugcaaugaugaa

SEQ ID NO: 2607362 - RNA, 19 nt, Homo sapiens
  misc_RNA (1)...(19): siRNA sense strand
gguucagaucugugccuuu

SEQ ID NO: 2607363 - RNA, 19 nt, Homo sapiens
  misc_RNA (1)...(19): siRNA sense strand
cggcggauugacagaagua

SEQ ID NO: 2607364 - RNA, 19 nt, Homo sapiens
  misc_RNA (1)...(19): siRNA sense strand
gggagguuauggaggugga

SEQ ID NO: 2607365 - RNA, 19 nt, Homo sapiens
  misc_RNA (1)...(19): siRNA sense strand
acagaaguaugauuggaga

SEQ ID NO: 2607366 - RNA, 19 nt, Homo sapiens
  misc_RNA (1)...(19): siRNA sense strand
ccauagaaguuguagguca

SEQ ID NO: 2607367 - RNA, 19 nt, Homo sapiens
  misc_RNA (1)...(19): siRNA sense strand
aagaagaaagagagaggaa

SEQ ID NO: 2607368 - RNA, 19 nt, Homo sapiens
  misc_RNA (1)...(19): siRNA sense strand
acuaaaauucggugggaaa

SEQ ID NO: 2607369 - RNA, 19 nt, Homo sapiens
  misc_RNA (1)...(19): siRNA sense strand
ugucagaacaagaagauau

SEQ ID NO: 2607370 - RNA, 19 nt, Homo sapiens
  misc_RNA (1)...(19): siRNA sense strand
aagaaagagugguggagca

SEQ ID NO: 2607371 - RNA, 19 nt, Homo sapiens
  misc_RNA (1)...(19): siRNA sense strand
aguagauguucaagaaaga

SEQ ID NO: 2607372 - RNA, 19 nt, Homo sapiens
  misc_RNA (1)...(19): siRNA sense strand
cauugaugguggugguauu

SEQ ID NO: 2607373 - RNA, 19 nt, Homo sapiens
  misc_RNA (1)...(19): siRNA sense strand
aagaaagaagaaagagaga

SEQ ID NO: 2607374 - RNA, 19 nt, Homo sapiens
  misc_RNA (1)...(19): siRNA sense strand
agaaagagagaggaagaaa

SEQ ID NO: 2607375 - RNA, 19 nt, Homo sapiens
  misc_RNA (1)...(19): siRNA sense strand
caggaagaaagaagaaaga

SEQ ID NO: 2607376 - RNA, 19 nt, Homo sapiens
  misc_RNA (1)...(19): siRNA sense strand
cauccaaagaagugcauuu

SEQ ID NO: 2607377 - RNA, 19 nt, Homo sapiens
  misc_RNA (1)...(19): siRNA sense strand
cuuuagaagagcugauaau

SEQ ID NO: 2607378 - RNA, 19 nt, Homo sapiens
  misc_RNA (1)...(19): siRNA sense strand
agcaagaaguucaaggaga

SEQ ID NO: 2607379 - RNA, 19 nt, Homo sapiens
  misc_RNA (1)...(19): siRNA sense strand
auguugaaguccagagaca

SEQ ID NO: 2607380 - RNA, 19 nt, Homo sapiens
  misc_RNA (1)...(19): siRNA sense strand
auuaauuucuggugcacaa

SEQ ID NO: 2607381 - RNA, 19 nt, Homo sapiens
  misc_RNA (1)...(19): siRNA sense strand
auucgaggcuauagagaca

SEQ ID NO: 2607382 - RNA, 19 nt, Homo sapiens
  misc_RNA (1)...(19): siRNA sense strand
agagacacgaggagaaauu

SEQ ID NO: 2607383 - RNA, 19 nt, Homo sapiens
  misc_RNA (1)...(19): siRNA sense strand
ccgaauguuugaucagcaa

SEQ ID NO: 2607384 - RNA, 19 nt, Homo sapiens
  misc_RNA (1)...(19): siRNA sense strand
ccauaagccuagaggaccu

SEQ ID NO: 2607385 - RNA, 19 nt, Homo sapiens
  misc_RNA (1)...(19): siRNA sense strand
cagauaagcaagaaguuca

SEQ ID NO: 2607386 - RNA, 19 nt, Homo sapiens
  misc_RNA (1)...(19): siRNA sense strand
ccagagacacgaggagaaa

SEQ ID NO: 2607387 - RNA, 19 nt, Homo sapiens
  misc_RNA (1)...(19): siRNA sense strand
ggagaguuguggaaggguu

SEQ ID NO: 2607388 - RNA, 19 nt, Homo sapiens
  misc_RNA (1)...(19): siRNA sense strand
cgagcaggaaggaggaaaa

SEQ ID NO: 2607389 - RNA, 19 nt, Homo sapiens
  misc_RNA (1)...(19): siRNA sense strand
gguauuaauuucuggugca

SEQ ID NO: 2607390 - RNA, 19 nt, Homo sapiens
  misc_RNA (1)...(19): siRNA sense strand
ggaucaucaaguuggcuua

SEQ ID NO: 2607391 - RNA, 19 nt, Homo sapiens
  misc_RNA (1)...(19): siRNA sense strand
ccauuugaggaacgaguaa

SEQ ID NO: 2607392 - RNA, 19 nt, Homo sapiens
  misc_RNA (1)...(19): siRNA sense strand
ggaagaaaggcgaagguug

SEQ ID NO: 2607393 - RNA, 19 nt, Homo sapiens
  misc_RNA (1)...(19): siRNA sense strand
cagaggaaugccugaagaa

SEQ ID NO: 2607394 - RNA, 19 nt, Homo sapiens
  misc_RNA (1)...(19): siRNA sense strand
augaagaugcuuaugacaa

SEQ ID NO: 2607395 - RNA, 19 nt, Homo sapiens
  misc_RNA (1)...(19): siRNA sense strand
cucagaugcuugugggaga

SEQ ID NO: 2607396 - RNA, 19 nt, Homo sapiens
  misc_RNA (1)...(19): siRNA sense strand
ugaacaaugaccugggaga

SEQ ID NO: 2607397 - RNA, 19 nt, Homo sapiens
  misc_RNA (1)...(19): siRNA sense strand
cccuagacccugaggugua

SEQ ID NO: 2607398 - RNA, 19 nt, Homo sapiens
  misc_RNA (1)...(19): siRNA sense strand
acgaagacgauguggagga

SEQ ID NO: 2607399 - RNA, 19 nt, Homo sapiens
  misc_RNA (1)...(19): siRNA sense strand
cguuuuaacuguuggcgaa

SEQ ID NO: 2607400 - RNA, 19 nt, Homo sapiens
  misc_RNA (1)...(19): siRNA sense strand
aaugagaaugcuugaagua

SEQ ID NO: 2607401 - RNA, 19 nt, Homo sapiens
  misc_RNA (1)...(19): siRNA sense strand
agaaguucgagaagaauau

SEQ ID NO: 2607402 - RNA, 19 nt, Homo sapiens
  misc_RNA (1)...(19): siRNA sense strand
cauacagauggaacagaaa

SEQ ID NO: 2607403 - RNA, 19 nt, Homo sapiens
  misc_RNA (1)...(19): siRNA sense strand
acucaggaagaaagaagaa

SEQ ID NO: 2607404 - RNA, 19 nt, Homo sapiens
  misc_RNA (1)...(19): siRNA sense strand
gaggcuauagagacagaaa

SEQ ID NO: 2607405 - RNA, 19 nt, Homo sapiens
  misc_RNA (1)...(19): siRNA sense strand
cugaaugcacuguuguuaa

SEQ ID NO: 2607406 - RNA, 19 nt, Homo sapiens
  misc_RNA (1)...(19): siRNA sense strand
gaaagaagaaagagagagg

SEQ ID NO: 2607407 - RNA, 19 nt, Homo sapiens
  misc_RNA (1)...(19): siRNA sense strand
cagcaagaaauucagguau

SEQ ID NO: 2607408 - RNA, 19 nt, Homo sapiens
  misc_RNA (1)...(19): siRNA sense strand
gcauuugaucgcugugcua

SEQ ID NO: 2607409 - RNA, 19 nt, Homo sapiens
  misc_RNA (1)...(19): siRNA sense strand
uuucagaguauuggaguua

SEQ ID NO: 2607410 - RNA, 19 nt, Homo sapiens
  misc_RNA (1)...(19): siRNA sense strand
guuaauagagaguagaugu

SEQ ID NO: 2607411 - RNA, 19 nt, Homo sapiens
  misc_RNA (1)...(19): siRNA sense strand
aggaacgaguaaagaucuu

SEQ ID NO: 2607412 - RNA, 19 nt, Homo sapiens
  misc_RNA (1)...(19): siRNA sense strand
agauaagcaagaaguucaa

SEQ ID NO: 2607413 - RNA, 19 nt, Homo sapiens
  misc_RNA (1)...(19): siRNA sense strand
ccgcaugaugguacccaaa

SEQ ID NO: 2607414 - RNA, 19 nt, Homo sapiens
  misc_RNA (1)...(19): siRNA sense strand
ccauacaugauaacgaauu

SEQ ID NO: 2607415 - RNA, 19 nt, Homo sapiens
  misc_RNA (1)...(19): siRNA sense strand
gagacagaaaacagcaaua

SEQ ID NO: 2607416 - RNA, 19 nt, Homo sapiens
  misc_RNA (1)...(19): siRNA sense strand
caugauucacaauggguau

SEQ ID NO: 2607417 - RNA, 19 nt, Homo sapiens
  misc_RNA (1)...(19): siRNA sense strand
gucauuuauucgaggcuau

SEQ ID NO: 2607418 - RNA, 19 nt, Homo sapiens
  misc_RNA (1)...(19): siRNA sense strand
gugaaaauguugaagucca

SEQ ID NO: 2607419 - RNA, 19 nt, Homo sapiens
  misc_RNA (1)...(19): siRNA sense strand
aagaaagagagaggaagaa

SEQ ID NO: 2607420 - RNA, 19 nt, Homo sapiens
  misc_RNA (1)...(19): siRNA sense strand
cggugaucccauagaaguu

SEQ ID NO: 2607421 - RNA, 19 nt, Homo sapiens
  misc_RNA (1)...(19): siRNA sense strand
uggcuuauccagaaaccaa

SEQ ID NO: 2607422 - RNA, 19 nt, Homo sapiens
  misc_RNA (1)...(19): siRNA sense strand
ggaacagaaaagauggauu

SEQ ID NO: 2607423 - RNA, 19 nt, Homo sapiens
  misc_RNA (1)...(19): siRNA sense strand
cugagguguauaagaauuu

SEQ ID NO: 2607424 - RNA, 19 nt, Homo sapiens
  misc_RNA (1)...(19): siRNA sense strand
aaacuauucaggaggcuau

SEQ ID NO: 2607425 - RNA, 19 nt, Homo sapiens
  misc_RNA (1)...(19): siRNA sense strand
gauggaucugagagacuua

SEQ ID NO: 2607426 - RNA, 19 nt, Homo sapiens
  misc_RNA (1)...(19): siRNA sense strand
ucgaguuccuauagcaaaa

SEQ ID NO: 2607427 - RNA, 19 nt, Homo sapiens
  misc_RNA (1)...(19): siRNA sense strand
augccagguuucugagaca

SEQ ID NO: 2607428 - RNA, 19 nt, Homo sapiens
  misc_RNA (1)...(19): siRNA sense strand
gcgagcaggaaggaggaaa

SEQ ID NO: 2607429 - RNA, 19 nt, Homo sapiens
  misc_RNA (1)...(19): siRNA sense strand
aauagagaguagauguuca

SEQ ID NO: 2607430 - RNA, 19 nt, Homo sapiens
  misc_RNA (1)...(19): siRNA sense strand
ugaggaggagagugaagaa

SEQ ID NO: 2607431 - RNA, 19 nt, Homo sapiens
  misc_RNA (1)...(19): siRNA sense strand
cugaagaagcuggacacaa

SEQ ID NO: 2607432 - RNA, 19 nt, Homo sapiens
  misc_RNA (1)...(19): siRNA sense strand
ccauagaaguuguagguca

SEQ ID NO: 2607433 - RNA, 19 nt, Homo sapiens
  misc_RNA (1)...(19): siRNA sense strand
aagaagaaagagagaggaa

SEQ ID NO: 2607434 - RNA, 19 nt, Homo sapiens
  misc_RNA (1)...(19): siRNA sense strand
acuaaaauucggugggaaa

SEQ ID NO: 2607435 - RNA, 19 nt, Homo sapiens
  misc_RNA (1)...(19): siRNA sense strand
ugucagaacaagaagauau

SEQ ID NO: 2607436 - RNA, 19 nt, Homo sapiens
  misc_RNA (1)...(19): siRNA sense strand
aagaaagagugguggagca

SEQ ID NO: 2607437 - RNA, 19 nt, Homo sapiens
  misc_RNA (1)...(19): siRNA sense strand
aguagauguucaagaaaga

SEQ ID NO: 2607438 - RNA, 19 nt, Homo sapiens
  misc_RNA (1)...(19): siRNA sense strand
cauugaugguggugguauu

SEQ ID NO: 2607439 - RNA, 19 nt, Homo sapiens
  misc_RNA (1)...(19): siRNA sense strand
aagaaagaagaaagagaga

SEQ ID NO: 2607440 - RNA, 19 nt, Homo sapiens
  misc_RNA (1)...(19): siRNA sense strand
agaaagagagaggaagaaa

SEQ ID NO: 2607441 - RNA, 19 nt, Homo sapiens
  misc_RNA (1)...(19): siRNA sense strand
caggaagaaagaagaaaga

SEQ ID NO: 2607442 - RNA, 19 nt, Homo sapiens
  misc_RNA (1)...(19): siRNA sense strand
cauccaaagaagugcauuu

SEQ ID NO: 2607443 - RNA, 19 nt, Homo sapiens
  misc_RNA (1)...(19): siRNA sense strand
cuuuagaagagcugauaau

SEQ ID NO: 2607444 - RNA, 19 nt, Homo sapiens
  misc_RNA (1)...(19): siRNA sense strand
agcaagaaguucaaggaga

SEQ ID NO: 2607445 - RNA, 19 nt, Homo sapiens
  misc_RNA (1)...(19): siRNA sense strand
auguugaaguccagagaca

SEQ ID NO: 2607446 - RNA, 19 nt, Homo sapiens
  misc_RNA (1)...(19): siRNA sense strand
auuaauuucuggugcacaa

SEQ ID NO: 2607447 - RNA, 19 nt, Homo sapiens
  misc_RNA (1)...(19): siRNA sense strand
auucgaggcuauagagaca

SEQ ID NO: 2607448 - RNA, 19 nt, Homo sapiens
  misc_RNA (1)...(19): siRNA sense strand
agagacacgaggagaaauu

SEQ ID NO: 2607449 - RNA, 19 nt, Homo sapiens
  misc_RNA (1)...(19): siRNA sense strand
ccgaauguuugaucagcaa

SEQ ID NO: 2607450 - RNA, 19 nt, Homo sapiens
  misc_RNA (1)...(19): siRNA sense strand
ccauaagccuagaggaccu

SEQ ID NO: 2607451 - RNA, 19 nt, Homo sapiens
  misc_RNA (1)...(19): siRNA sense strand
cagauaagcaagaaguuca

SEQ ID NO: 2607452 - RNA, 19 nt, Homo sapiens
  misc_RNA (1)...(19): siRNA sense strand
ccagagacacgaggagaaa

SEQ ID NO: 2607453 - RNA, 19 nt, Homo sapiens
  misc_RNA (1)...(19): siRNA sense strand
ggagaguuguggaaggguu

SEQ ID NO: 2607454 - RNA, 19 nt, Homo sapiens
  misc_RNA (1)...(19): siRNA sense strand
cgagcaggaaggaggaaaa

SEQ ID NO: 2607455 - RNA, 19 nt, Homo sapiens
  misc_RNA (1)...(19): siRNA sense strand
gguauuaauuucuggugca

SEQ ID NO: 2607456 - RNA, 19 nt, Homo sapiens
  misc_RNA (1)...(19): siRNA sense strand
ggaucaucaaguuggcuua

SEQ ID NO: 2607457 - RNA, 19 nt, Homo sapiens
  misc_RNA (1)...(19): siRNA sense strand
ccauuugaggaacgaguaa

SEQ ID NO: 2607458 - RNA, 19 nt, Homo sapiens
  misc_RNA (1)...(19): siRNA sense strand
ggaagaaaggcgaagguug

SEQ ID NO: 2607459 - RNA, 19 nt, Homo sapiens
  misc_RNA (1)...(19): siRNA sense strand
cagaggaaugccugaagaa

SEQ ID NO: 2607460 - RNA, 19 nt, Homo sapiens
  misc_RNA (1)...(19): siRNA sense strand
augaagaugcuuaugacaa

SEQ ID NO: 2607461 - RNA, 19 nt, Homo sapiens
  misc_RNA (1)...(19): siRNA sense strand
cucagaugcuugugggaga

SEQ ID NO: 2607462 - RNA, 19 nt, Homo sapiens
  misc_RNA (1)...(19): siRNA sense strand
ugaacaaugaccugggaga

SEQ ID NO: 2607463 - RNA, 19 nt, Homo sapiens
  misc_RNA (1)...(19): siRNA sense strand
cccuagacccugaggugua

SEQ ID NO: 2607464 - RNA, 19 nt, Homo sapiens
  misc_RNA (1)...(19): siRNA sense strand
acgaagacgauguggagga

SEQ ID NO: 2607465 - RNA, 19 nt, Homo sapiens
  misc_RNA (1)...(19): siRNA sense strand
cguuuuaacuguuggcgaa

SEQ ID NO: 2607466 - RNA, 19 nt, Homo sapiens
  misc_RNA (1)...(19): siRNA sense strand
aaugagaaugcuugaagua

SEQ ID NO: 2607467 - RNA, 19 nt, Homo sapiens
  misc_RNA (1)...(19): siRNA sense strand
agaaguucgagaagaauau

SEQ ID NO: 2607468 - RNA, 19 nt, Homo sapiens
  misc_RNA (1)...(19): siRNA sense strand
cauacagauggaacagaaa

SEQ ID NO: 2607469 - RNA, 19 nt, Homo sapiens
  misc_RNA (1)...(19): siRNA sense strand
acucaggaagaaagaagaa

SEQ ID NO: 2607470 - RNA, 19 nt, Homo sapiens
  misc_RNA (1)...(19): siRNA sense strand
gaggcuauagagacagaaa

SEQ ID NO: 2607471 - RNA, 19 nt, Homo sapiens
  misc_RNA (1)...(19): siRNA sense strand
cugaaugcacuguuguuaa

SEQ ID NO: 2607472 - RNA, 19 nt, Homo sapiens
  misc_RNA (1)...(19): siRNA sense strand
gaaagaagaaagagagagg

SEQ ID NO: 2607473 - RNA, 19 nt, Homo sapiens
  misc_RNA (1)...(19): siRNA sense strand
cagcaagaaauucagguau

SEQ ID NO: 2607474 - RNA, 19 nt, Homo sapiens
  misc_RNA (1)...(19): siRNA sense strand
gcauuugaucgcugugcua

SEQ ID NO: 2607475 - RNA, 19 nt, Homo sapiens
  misc_RNA (1)...(19): siRNA sense strand
uuucagaguauuggaguua

SEQ ID NO: 2607476 - RNA, 19 nt, Homo sapiens
  misc_RNA (1)...(19): siRNA sense strand
guuaauagagaguagaugu

SEQ ID NO: 2607477 - RNA, 19 nt, Homo sapiens
  misc_RNA (1)...(19): siRNA sense strand
aggaacgaguaaagaucuu

SEQ ID NO: 2607478 - RNA, 19 nt, Homo sapiens
  misc_RNA (1)...(19): siRNA sense strand
agauaagcaagaaguucaa

SEQ ID NO: 2607479 - RNA, 19 nt, Homo sapiens
  misc_RNA (1)...(19): siRNA sense strand
ccgcaugaugguacccaaa

SEQ ID NO: 2607480 - RNA, 19 nt, Homo sapiens
  misc_RNA (1)...(19): siRNA sense strand
ccauacaugauaacgaauu

SEQ ID NO: 2607481 - RNA, 19 nt, Homo sapiens
  misc_RNA (1)...(19): siRNA sense strand
gagacagaaaacagcaaua

SEQ ID NO: 2607482 - RNA, 19 nt, Homo sapiens
  misc_RNA (1)...(19): siRNA sense strand
caugauucacaauggguau

SEQ ID NO: 2607483 - RNA, 19 nt, Homo sapiens
  misc_RNA (1)...(19): siRNA sense strand
gucauuuauucgaggcuau

SEQ ID NO: 2607484 - RNA, 19 nt, Homo sapiens
  misc_RNA (1)...(19): siRNA sense strand
gugaaaauguugaagucca

SEQ ID NO: 2607485 - RNA, 19 nt, Homo sapiens
  misc_RNA (1)...(19): siRNA sense strand
aagaaagagagaggaagaa

SEQ ID NO: 2607486 - RNA, 19 nt, Homo sapiens
  misc_RNA (1)...(19): siRNA sense strand
cggugaucccauagaaguu

SEQ ID NO: 2607487 - RNA, 19 nt, Homo sapiens
  misc_RNA (1)...(19): siRNA sense strand
uggcuuauccagaaaccaa

SEQ ID NO: 2607488 - RNA, 19 nt, Homo sapiens
  misc_RNA (1)...(19): siRNA sense strand
ggaacagaaaagauggauu

SEQ ID NO: 2607489 - RNA, 19 nt, Homo sapiens
  misc_RNA (1)...(19): siRNA sense strand
cugagguguauaagaauuu

SEQ ID NO: 2607490 - RNA, 19 nt, Homo sapiens
  misc_RNA (1)...(19): siRNA sense strand
aaacuauucaggaggcuau

SEQ ID NO: 2607491 - RNA, 19 nt, Homo sapiens
  misc_RNA (1)...(19): siRNA sense strand
gauggaucugagagacuua

SEQ ID NO: 2607492 - RNA, 19 nt, Homo sapiens
  misc_RNA (1)...(19): siRNA sense strand
ucgaguuccuauagcaaaa

SEQ ID NO: 2607493 - RNA, 19 nt, Homo sapiens
  misc_RNA (1)...(19): siRNA sense strand
augccagguuucugagaca

SEQ ID NO: 2607494 - RNA, 19 nt, Homo sapiens
  misc_RNA (1)...(19): siRNA sense strand
gcgagcaggaaggaggaaa

SEQ ID NO: 2607495 - RNA, 19 nt, Homo sapiens
  misc_RNA (1)...(19): siRNA sense strand
aauagagaguagauguuca

SEQ ID NO: 2607496 - RNA, 19 nt, Homo sapiens
  misc_RNA (1)...(19): siRNA sense strand
ugaggaggagagugaagaa

SEQ ID NO: 2607497 - RNA, 19 nt, Homo sapiens
  misc_RNA (1)...(19): siRNA sense strand
cugaagaagcuggacacaa

SEQ ID NO: 2607498 - RNA, 19 nt, Homo sapiens
  misc_RNA (1)...(19): siRNA sense strand
ggacagagggagaugccaa

SEQ ID NO: 2607499 - RNA, 19 nt, Homo sapiens
  misc_RNA (1)...(19): siRNA sense strand
aggagaaagaggaaggaga

SEQ ID NO: 2607500 - RNA, 19 nt, Homo sapiens
  misc_RNA (1)...(19): siRNA sense strand
ggagaaaucacgagcagga

SEQ ID NO: 2607501 - RNA, 19 nt, Homo sapiens
  misc_RNA (1)...(19): siRNA sense strand
gauccuggacagagggaga

SEQ ID NO: 2607502 - RNA, 19 nt, Homo sapiens
  misc_RNA (1)...(19): siRNA sense strand
gagaauggcucuuugccuu

SEQ ID NO: 2607503 - RNA, 19 nt, Homo sapiens
  misc_RNA (1)...(19): siRNA sense strand
aaggagaagcagucagaga

SEQ ID NO: 2607504 - RNA, 19 nt, Homo sapiens
  misc_RNA (1)...(19): siRNA sense strand
caauuuacgaagaugucaa

SEQ ID NO: 2607505 - RNA, 19 nt, Homo sapiens
  misc_RNA (1)...(19): siRNA sense strand
gcaaaggaugccagggauc

SEQ ID NO: 2607506 - RNA, 19 nt, Homo sapiens
  misc_RNA (1)...(19): siRNA sense strand
ucaagguguaucagggcaa

SEQ ID NO: 2607507 - RNA, 19 nt, Homo sapiens
  misc_RNA (1)...(19): siRNA sense strand
gaucugaaaaccaggagaa

SEQ ID NO: 2607508 - RNA, 19 nt, Homo sapiens
  misc_RNA (1)...(19): siRNA sense strand
cugaaaaccaggagaaauc

SEQ ID NO: 2607509 - RNA, 19 nt, Homo sapiens
  misc_RNA (1)...(19): siRNA sense strand
gagaccagucccaaggaau

SEQ ID NO: 2607510 - RNA, 19 nt, Homo sapiens
  misc_RNA (1)...(19): siRNA sense strand
uugauaaaguugagaaacc

SEQ ID NO: 2607511 - RNA, 19 nt, Homo sapiens
  misc_RNA (1)...(19): siRNA sense strand
cgucacaagaaccugcaua

SEQ ID NO: 2607512 - RNA, 19 nt, Homo sapiens
  misc_RNA (1)...(19): siRNA sense strand
gccgcaaagagcuggagaa

SEQ ID NO: 2607513 - RNA, 19 nt, Homo sapiens
  misc_RNA (1)...(19): siRNA sense strand
uguguguggaggagaaaga

SEQ ID NO: 2607514 - RNA, 19 nt, Homo sapiens
  misc_RNA (1)...(19): siRNA sense strand
agagagugacagugagaaa

SEQ ID NO: 2607515 - RNA, 19 nt, Homo sapiens
  misc_RNA (1)...(19): siRNA sense strand
cagugaaacgggagagcaa

SEQ ID NO: 2607516 - RNA, 19 nt, Homo sapiens
  misc_RNA (1)...(19): siRNA sense strand
acaaagcaguaaaggaaaa

SEQ ID NO: 2607517 - RNA, 19 nt, Homo sapiens
  misc_RNA (1)...(19): siRNA sense strand
gugaaacgggagagcaaaa

SEQ ID NO: 2607518 - RNA, 19 nt, Homo sapiens
  misc_RNA (1)...(19): siRNA sense strand
cagaaaaggccuuggagca

SEQ ID NO: 2607519 - RNA, 19 nt, Homo sapiens
  misc_RNA (1)...(19): siRNA sense strand
aggcguuuacugagauuaa

SEQ ID NO: 2607520 - RNA, 19 nt, Homo sapiens
  misc_RNA (1)...(19): siRNA sense strand
augagcaguuugaggaaaa

SEQ ID NO: 2607521 - RNA, 19 nt, Homo sapiens
  misc_RNA (1)...(19): siRNA sense strand
aagcuauagacaugagauu

SEQ ID NO: 2607522 - RNA, 19 nt, Homo sapiens
  misc_RNA (1)...(19): siRNA sense strand
gaggaaaacaagcaguuaa

SEQ ID NO: 2607523 - RNA, 19 nt, Homo sapiens
  misc_RNA (1)...(19): siRNA sense strand
gggauauaauagaagcagu

SEQ ID NO: 2607524 - RNA, 19 nt, Homo sapiens
  misc_RNA (1)...(19): siRNA sense strand
gugagaaaguucagccacu

SEQ ID NO: 2607525 - RNA, 19 nt, Homo sapiens
  misc_RNA (1)...(19): siRNA sense strand
gagaagaagcuggaggcau

SEQ ID NO: 2607526 - RNA, 19 nt, Homo sapiens
  misc_RNA (1)...(19): siRNA sense strand
gugcaaagacuaugagcag

SEQ ID NO: 2607527 - RNA, 19 nt, Homo sapiens
  misc_RNA (1)...(19): siRNA sense strand
ugaacauggauccaagaaa

SEQ ID NO: 2607528 - RNA, 19 nt, Homo sapiens
  misc_RNA (1)...(19): siRNA sense strand
aggaaaagaaaggguguaa

SEQ ID NO: 2607529 - RNA, 19 nt, Homo sapiens
  misc_RNA (1)...(19): siRNA sense strand
aguaccagcaccaguguaa

SEQ ID NO: 2607530 - RNA, 19 nt, Homo sapiens
  misc_RNA (1)...(19): siRNA sense strand
acaccuaaaaucagcaaaa

SEQ ID NO: 2607531 - RNA, 19 nt, Homo sapiens
  misc_RNA (1)...(19): siRNA sense strand
uguaaaugugggcgugcua

SEQ ID NO: 2607532 - RNA, 19 nt, Homo sapiens
  misc_RNA (1)...(19): siRNA sense strand
ucuuacaugccgaggccaa

SEQ ID NO: 2607533 - RNA, 19 nt, Homo sapiens
  misc_RNA (1)...(19): siRNA sense strand
aguuaagcauccuagugaa

SEQ ID NO: 2607534 - RNA, 19 nt, Homo sapiens
  misc_RNA (1)...(19): siRNA sense strand
ucagagagugacagugaga

SEQ ID NO: 2607535 - RNA, 19 nt, Homo sapiens
  misc_RNA (1)...(19): siRNA sense strand
gugcuguguuugcggacau

SEQ ID NO: 2607536 - RNA, 19 nt, Homo sapiens
  misc_RNA (1)...(19): siRNA sense strand
uguaaaggcaagaaaauga

SEQ ID NO: 2607537 - RNA, 19 nt, Homo sapiens
  misc_RNA (1)...(19): siRNA sense strand
gcaacuccgaagauagcaa

SEQ ID NO: 2607538 - RNA, 19 nt, Homo sapiens
  misc_RNA (1)...(19): siRNA sense strand
aagacaaagcaguaaagga

SEQ ID NO: 2607539 - RNA, 19 nt, Homo sapiens
  misc_RNA (1)...(19): siRNA sense strand
ggaaaagaaaggguguaaa

SEQ ID NO: 2607540 - RNA, 19 nt, Homo sapiens
  misc_RNA (1)...(19): siRNA sense strand
cuaugagcaguuugaggaa

SEQ ID NO: 2607541 - RNA, 19 nt, Homo sapiens
  misc_RNA (1)...(19): siRNA sense strand
ccuagugaacugcuacaaa

SEQ ID NO: 2607542 - RNA, 19 nt, Homo sapiens
  misc_RNA (1)...(19): siRNA sense strand
gggaaaagcauucugggua

SEQ ID NO: 2607543 - RNA, 19 nt, Homo sapiens
  misc_RNA (1)...(19): siRNA sense strand
gcgaaguauguguuccaaa

SEQ ID NO: 2607544 - RNA, 19 nt, Homo sapiens
  misc_RNA (1)...(19): siRNA sense strand
ccacaguugcaaagaggca

SEQ ID NO: 2607545 - RNA, 19 nt, Homo sapiens
  misc_RNA (1)...(19): siRNA sense strand
gcuacauaacggaggaaga

SEQ ID NO: 2607546 - RNA, 19 nt, Homo sapiens
  misc_RNA (1)...(19): siRNA sense strand
gcgaacaacaucaggagga

SEQ ID NO: 2607547 - RNA, 19 nt, Homo sapiens
  misc_RNA (1)...(19): siRNA sense strand
ggaugguguucguaagcau

SEQ ID NO: 2607548 - RNA, 19 nt, Homo sapiens
  misc_RNA (1)...(19): siRNA sense strand
cuucaaggaaauagcccaa

SEQ ID NO: 2607549 - RNA, 19 nt, Homo sapiens
  misc_RNA (1)...(19): siRNA sense strand
caacauaccuagaccucca

SEQ ID NO: 2607550 - RNA, 19 nt, Homo sapiens
  misc_RNA (1)...(19): siRNA sense strand
ggaaauagcccaaggggac

SEQ ID NO: 2607551 - RNA, 19 nt, Homo sapiens
  misc_RNA (1)...(19): siRNA sense strand
ucgaaaugagaaugcacaa

SEQ ID NO: 2607552 - RNA, 19 nt, Homo sapiens
  misc_RNA (1)...(19): siRNA sense strand
cuguguuguagcuggguua

SEQ ID NO: 2607553 - RNA, 19 nt, Homo sapiens
  misc_RNA (1)...(19): siRNA sense strand
guaaaaggaaagauugcaa

SEQ ID NO: 2607554 - RNA, 19 nt, Homo sapiens
  misc_RNA (1)...(19): siRNA sense strand
cucaaaaggaggaagaauu

SEQ ID NO: 2607555 - RNA, 19 nt, Homo sapiens
  misc_RNA (1)...(19): siRNA sense strand
cuuccaacacagaggagau

SEQ ID NO: 2607556 - RNA, 19 nt, Homo sapiens
  misc_RNA (1)...(19): siRNA sense strand
guaccaaaugaugaagaaa

SEQ ID NO: 2607557 - RNA, 19 nt, Homo sapiens
  misc_RNA (1)...(19): siRNA sense strand
gggauuuauaguugcugua

SEQ ID NO: 2607558 - RNA, 19 nt, Homo sapiens
  misc_RNA (1)...(19): siRNA sense strand
ugaaaagcaugaagagagu

SEQ ID NO: 2607559 - RNA, 19 nt, Homo sapiens
  misc_RNA (1)...(19): siRNA sense strand
ccaacacagaggagaucau

SEQ ID NO: 2607560 - RNA, 19 nt, Homo sapiens
  misc_RNA (1)...(19): siRNA sense strand
aacaacaucaggaggagaa

SEQ ID NO: 2607561 - RNA, 19 nt, Homo sapiens
  misc_RNA (1)...(19): siRNA sense strand
acguugaugaggauggcua

SEQ ID NO: 2607562 - RNA, 19 nt, Homo sapiens
  misc_RNA (1)...(19): siRNA sense strand
ugggaauaccaguaacaga

SEQ ID NO: 2607563 - RNA, 19 nt, Homo sapiens
  misc_RNA (1)...(19): siRNA sense strand
cauugacuuccgagaguau

SEQ ID NO: 2607564 - RNA, 19 nt, Homo sapiens
  misc_RNA (1)...(19): siRNA sense strand
acauaacggaggaagaguu

SEQ ID NO: 2607565 - RNA, 19 nt, Homo sapiens
  misc_RNA (1)...(19): siRNA sense strand
gggugaauaaugagggaga

SEQ ID NO: 2607566 - RNA, 19 nt, Homo sapiens
  misc_RNA (1)...(19): siRNA sense strand
cgggagaaguugcuggaga

SEQ ID NO: 2607567 - RNA, 19 nt, Homo sapiens
  misc_RNA (1)...(19): siRNA sense strand
cagauaaugacgugcggaa

SEQ ID NO: 2607568 - RNA, 19 nt, Homo sapiens
  misc_RNA (1)...(19): siRNA sense strand
uggugaaggaggagcucaa

SEQ ID NO: 2607569 - RNA, 19 nt, Homo sapiens
  misc_RNA (1)...(19): siRNA sense strand
aggaguuuaagaagggaaa

SEQ ID NO: 2607570 - RNA, 19 nt, Homo sapiens
  misc_RNA (1)...(19): siRNA sense strand
ucuaugaggugaugggcau

SEQ ID NO: 2607571 - RNA, 19 nt, Homo sapiens
  misc_RNA (1)...(19): siRNA sense strand
aggguaaaguggaggugga

SEQ ID NO: 2607572 - RNA, 19 nt, Homo sapiens
  misc_RNA (1)...(19): siRNA sense strand
aggauaucauagaggagau

SEQ ID NO: 2607573 - RNA, 19 nt, Homo sapiens
  misc_RNA (1)...(19): siRNA sense strand
gagauuaucaagucggaga

SEQ ID NO: 2607574 - RNA, 19 nt, Homo sapiens
  misc_RNA (1)...(19): siRNA sense strand
aguuugaugagaagaacaa

SEQ ID NO: 2607575 - RNA, 19 nt, Homo sapiens
  misc_RNA (1)...(19): siRNA sense strand
cggagaugcgggugaagau

SEQ ID NO: 2607576 - RNA, 19 nt, Homo sapiens
  misc_RNA (1)...(19): siRNA sense strand
ugacugacuucgaggagca

SEQ ID NO: 2607577 - RNA, 19 nt, Homo sapiens
  misc_RNA (1)...(19): siRNA sense strand
gggagaaguugcuggagac

SEQ ID NO: 2607578 - RNA, 19 nt, Homo sapiens
  misc_RNA (1)...(19): siRNA sense strand
agcugaaguuugaugagaa

SEQ ID NO: 2607579 - RNA, 19 nt, Homo sapiens
  misc_RNA (1)...(19): siRNA sense strand
uggagguggagguugguaa

SEQ ID NO: 2607580 - RNA, 19 nt, Homo sapiens
  misc_RNA (1)...(19): siRNA sense strand
cuacacugacaaucggaaa

SEQ ID NO: 2607581 - RNA, 19 nt, Homo sapiens
  misc_RNA (1)...(19): siRNA sense strand
ccgagagcgcagugacuuu

SEQ ID NO: 2607582 - RNA, 19 nt, Homo sapiens
  misc_RNA (1)...(19): siRNA sense strand
ggauggaggagcuggccuu

SEQ ID NO: 2607583 - RNA, 19 nt, Homo sapiens
  misc_RNA (1)...(19): siRNA sense strand
caccagaaggagagagaac

SEQ ID NO: 2607584 - RNA, 19 nt, Homo sapiens
  misc_RNA (1)...(19): siRNA sense strand
guaaaguggagguggaggu

SEQ ID NO: 2607585 - RNA, 19 nt, Homo sapiens
  misc_RNA (1)...(19): siRNA sense strand
gaggaguuuaagaagggaa

SEQ ID NO: 2607586 - RNA, 19 nt, Homo sapiens
  misc_RNA (1)...(19): siRNA sense strand
caguagcgauuuugaggaa

SEQ ID NO: 2607587 - RNA, 19 nt, Homo sapiens
  misc_RNA (1)...(19): siRNA sense strand
uugucacgcuggaggauau

SEQ ID NO: 2607588 - RNA, 19 nt, Homo sapiens
  misc_RNA (1)...(19): siRNA sense strand
cuguacagcagcagcaaca

SEQ ID NO: 2607589 - RNA, 19 nt, Homo sapiens
  misc_RNA (1)...(19): siRNA sense strand
cgguucuggaggaguuuaa

SEQ ID NO: 2607590 - RNA, 19 nt, Homo sapiens
  misc_RNA (1)...(19): siRNA sense strand
agaucacacggcagcaaua

SEQ ID NO: 2607591 - RNA, 19 nt, Homo sapiens
  misc_RNA (1)...(19): siRNA sense strand
ggauaucauagaggagauu

SEQ ID NO: 2607592 - RNA, 19 nt, Homo sapiens
  misc_RNA (1)...(19): siRNA sense strand
ccgcagaccccuacaguga

SEQ ID NO: 2607593 - RNA, 19 nt, Homo sapiens
  misc_RNA (1)...(19): siRNA sense strand
cgggcaaaauagagaaaua

SEQ ID NO: 2607594 - RNA, 19 nt, Homo sapiens
  misc_RNA (1)...(19): siRNA sense strand
uuaaagaagaagugggaga

SEQ ID NO: 2607595 - RNA, 19 nt, Homo sapiens
  misc_RNA (1)...(19): siRNA sense strand
agaaugggaaugugggaaa

SEQ ID NO: 2607596 - RNA, 19 nt, Homo sapiens
  misc_RNA (1)...(19): siRNA sense strand
gagacagggaagagaagua

SEQ ID NO: 2607597 - RNA, 19 nt, Homo sapiens
  misc_RNA (1)...(19): siRNA sense strand
acaaagaaucuaaaggaga

SEQ ID NO: 2607598 - RNA, 19 nt, Homo sapiens
  misc_RNA (1)...(19): siRNA sense strand
ggagauggagaaugagaau

SEQ ID NO: 2607599 - RNA, 19 nt, Homo sapiens
  misc_RNA (1)...(19): siRNA sense strand
agggagaaguggucaaaga

SEQ ID NO: 2607600 - RNA, 19 nt, Homo sapiens
  misc_RNA (1)...(19): siRNA sense strand
auggagaagaagagaagua

SEQ ID NO: 2607601 - RNA, 19 nt, Homo sapiens
  misc_RNA (1)...(19): siRNA sense strand
caucaaggacggugaggau

SEQ ID NO: 2607602 - RNA, 19 nt, Homo sapiens
  misc_RNA (1)...(19): siRNA sense strand
acacagaugcuucgggcaa

SEQ ID NO: 2607603 - RNA, 19 nt, Homo sapiens
  misc_RNA (1)...(19): siRNA sense strand
ucuuuaaaucuaagggcaa

SEQ ID NO: 2607604 - RNA, 19 nt, Homo sapiens
  misc_RNA (1)...(19): siRNA sense strand
gauaaagagaaaucgguau

SEQ ID NO: 2607605 - RNA, 19 nt, Homo sapiens
  misc_RNA (1)...(19): siRNA sense strand
aaaugagaguagacgaaau

SEQ ID NO: 2607606 - RNA, 19 nt, Homo sapiens
  misc_RNA (1)...(19): siRNA sense strand
ggguggaagaguugcagaa

SEQ ID NO: 2607607 - RNA, 19 nt, Homo sapiens
  misc_RNA (1)...(19): siRNA sense strand
agaaaggaaacaaguggaa

SEQ ID NO: 2607608 - RNA, 19 nt, Homo sapiens
  misc_RNA (1)...(19): siRNA sense strand
gggagggagaaguggucaa

SEQ ID NO: 2607609 - RNA, 19 nt, Homo sapiens
  misc_RNA (1)...(19): siRNA sense strand
aaaggaaacaaguggaaaa

SEQ ID NO: 2607610 - RNA, 19 nt, Homo sapiens
  misc_RNA (1)...(19): siRNA sense strand
aagaacaagucaucggcua

SEQ ID NO: 2607611 - RNA, 19 nt, Homo sapiens
  misc_RNA (1)...(19): siRNA sense strand
cugaagaagcuaagacgau

SEQ ID NO: 2607612 - RNA, 19 nt, Homo sapiens
  misc_RNA (1)...(19): siRNA sense strand
ggaaauaggcccaggucag

SEQ ID NO: 2607613 - RNA, 19 nt, Homo sapiens
  misc_RNA (1)...(19): siRNA sense strand
gggaagagaaguaaggaag

SEQ ID NO: 2607614 - RNA, 19 nt, Homo sapiens
  misc_RNA (1)...(19): siRNA sense strand
gaagaaacaaacauggaga

SEQ ID NO: 2607615 - RNA, 19 nt, Homo sapiens
  misc_RNA (1)...(19): siRNA sense strand
gagccaaagcugaccaaga

SEQ ID NO: 2607616 - RNA, 19 nt, Homo sapiens
  misc_RNA (1)...(19): siRNA sense strand
gaagaguugcagaaaggaa

SEQ ID NO: 2607617 - RNA, 19 nt, Homo sapiens
  misc_RNA (1)...(19): siRNA sense strand
gugcagacuccgaugaaga

SEQ ID NO: 2607618 - RNA, 19 nt, Homo sapiens
  misc_RNA (1)...(19): siRNA sense strand
augaugaggaugaggauga

SEQ ID NO: 2607619 - RNA, 19 nt, Homo sapiens
  misc_RNA (1)...(19): siRNA sense strand
cugcaaguauggaagccaa

SEQ ID NO: 2607620 - RNA, 19 nt, Homo sapiens
  misc_RNA (1)...(19): siRNA sense strand
aagaguugcagaaaggaaa

SEQ ID NO: 2607621 - RNA, 19 nt, Homo sapiens
  misc_RNA (1)...(19): siRNA sense strand
agggaagagaaguaaggaa

SEQ ID NO: 2607622 - RNA, 19 nt, Homo sapiens
  misc_RNA (1)...(19): siRNA sense strand
aagagaaguaacaccgaaa

SEQ ID NO: 2607623 - RNA, 19 nt, Homo sapiens
  misc_RNA (1)...(19): siRNA sense strand
acaaaugagcugaaagcca

SEQ ID NO: 2607624 - RNA, 19 nt, Homo sapiens
  misc_RNA (1)...(19): siRNA sense strand
agauaaagagaaaucggua

SEQ ID NO: 2607625 - RNA, 19 nt, Homo sapiens
  misc_RNA (1)...(19): siRNA sense strand
gcaacuaugaugaaggcuu

SEQ ID NO: 2607626 - RNA, 19 nt, Homo sapiens
  misc_RNA (1)...(19): siRNA sense strand
gcugaaaccaagaagcuga

SEQ ID NO: 2607627 - RNA, 19 nt, Homo sapiens
  misc_RNA (1)...(19): siRNA sense strand
guggaagaacagauaaaga

SEQ ID NO: 2607628 - RNA, 19 nt, Homo sapiens
  misc_RNA (1)...(19): siRNA sense strand
cugaacaggcuuaagauga

SEQ ID NO: 2607629 - RNA, 19 nt, Homo sapiens
  misc_RNA (1)...(19): siRNA sense strand
acacaaggaucuaugggca

SEQ ID NO: 2607630 - RNA, 19 nt, Homo sapiens
  misc_RNA (1)...(19): siRNA sense strand
ggaucuaugggcaagcaaa

SEQ ID NO: 2607631 - RNA, 19 nt, Homo sapiens
  misc_RNA (1)...(19): siRNA sense strand
aagaaacaaacauggagaa

SEQ ID NO: 2607632 - RNA, 19 nt, Homo sapiens
  misc_RNA (1)...(19): siRNA sense strand
agguuaagagugagguuca

SEQ ID NO: 2607633 - RNA, 19 nt, Homo sapiens
  misc_RNA (1)...(19): siRNA sense strand
gguuaagagugagguucaa

SEQ ID NO: 2607634 - RNA, 19 nt, Homo sapiens
  misc_RNA (1)...(19): siRNA sense strand
cacaaggaucuaugggcaa

SEQ ID NO: 2607635 - RNA, 19 nt, Homo sapiens
  misc_RNA (1)...(19): siRNA sense strand
agacaacaccuuugcugaa

SEQ ID NO: 2607636 - RNA, 19 nt, Homo sapiens
  misc_RNA (1)...(19): siRNA sense strand
cuacauuugacucggagaa

SEQ ID NO: 2607637 - RNA, 19 nt, Homo sapiens
  misc_RNA (1)...(19): siRNA sense strand
gaagagaaguaacaccgaa

SEQ ID NO: 2607638 - RNA, 19 nt, Homo sapiens
  misc_RNA (1)...(19): siRNA sense strand
agaacaagucaucggcuau

SEQ ID NO: 2607639 - RNA, 19 nt, Homo sapiens
  misc_RNA (1)...(19): siRNA sense strand
cggcaauggaccucacuau

SEQ ID NO: 2607640 - RNA, 19 nt, Homo sapiens
  misc_RNA (1)...(19): siRNA sense strand
uguuaaagaagaaguggga

SEQ ID NO: 2607641 - RNA, 19 nt, Homo sapiens
  misc_RNA (1)...(19): siRNA sense strand
ggacccugacuguguuaaa

SEQ ID NO: 2607642 - RNA, 19 nt, Homo sapiens
  misc_RNA (1)...(19): siRNA sense strand
gaucuaugggcaagcaaaa

SEQ ID NO: 2607643 - RNA, 19 nt, Homo sapiens
  misc_RNA (1)...(19): siRNA sense strand
aggaagugccuuggaggaa

SEQ ID NO: 2607644 - RNA, 19 nt, Homo sapiens
  misc_RNA (1)...(19): siRNA sense strand
gagaaguaaggaaggucau

SEQ ID NO: 2607645 - RNA, 19 nt, Homo sapiens
  misc_RNA (1)...(19): siRNA sense strand
acuccgaugaagaugauaa

SEQ ID NO: 2607646 - RNA, 19 nt, Homo sapiens
  misc_RNA (1)...(19): siRNA sense strand
aaaccaagaagcugaggau

SEQ ID NO: 2607647 - RNA, 19 nt, Homo sapiens
  misc_RNA (1)...(19): siRNA sense strand
ccauuuaauagacggcaau

SEQ ID NO: 2607648 - RNA, 19 nt, Homo sapiens
  misc_RNA (1)...(19): siRNA sense strand
caaagcugaccaagaagaa

SEQ ID NO: 2607649 - RNA, 19 nt, Homo sapiens
  misc_RNA (1)...(19): siRNA sense strand
gaguagacgaaaucuggaa

SEQ ID NO: 2607650 - RNA, 19 nt, Homo sapiens
  misc_RNA (1)...(19): siRNA sense strand
cggaacagcagcacugaga

SEQ ID NO: 2607651 - RNA, 19 nt, Homo sapiens
  misc_RNA (1)...(19): siRNA sense strand
cucccaaagcaaugaagaa

SEQ ID NO: 2607652 - RNA, 19 nt, Homo sapiens
  misc_RNA (1)...(19): siRNA sense strand
gcaaggaaggucaacgaga

SEQ ID NO: 2607653 - RNA, 19 nt, Homo sapiens
  misc_RNA (1)...(19): siRNA sense strand
uggccagaguagcaaggaa

SEQ ID NO: 2607654 - RNA, 19 nt, Homo sapiens
  misc_RNA (1)...(19): siRNA sense strand
gaguagcaaggaaggucaa

SEQ ID NO: 2607655 - RNA, 19 nt, Homo sapiens
  misc_RNA (1)...(19): siRNA sense strand
gcaaggaaggucaacgaga

SEQ ID NO: 2607656 - RNA, 19 nt, Homo sapiens
  misc_RNA (1)...(19): siRNA sense strand
uggccagaguagcaaggaa

SEQ ID NO: 2607657 - RNA, 19 nt, Homo sapiens
  misc_RNA (1)...(19): siRNA sense strand
gaguagcaaggaaggucaa

SEQ ID NO: 2607658 - RNA, 19 nt, Homo sapiens
  misc_RNA (1)...(19): siRNA sense strand
auguaaagaauguggcaaa

SEQ ID NO: 2607659 - RNA, 19 nt, Homo sapiens
  misc_RNA (1)...(19): siRNA sense strand
aauucauaccggagagaaa

SEQ ID NO: 2607660 - RNA, 19 nt, Homo sapiens
  misc_RNA (1)...(19): siRNA sense strand
gagaaauguguuagagcuu

SEQ ID NO: 2607661 - RNA, 19 nt, Homo sapiens
  misc_RNA (1)...(19): siRNA sense strand
augugaagaaugugguaaa

SEQ ID NO: 2607662 - RNA, 19 nt, Homo sapiens
  misc_RNA (1)...(19): siRNA sense strand
auguaaagaaugucgcaaa

SEQ ID NO: 2607663 - RNA, 19 nt, Homo sapiens
  misc_RNA (1)...(19): siRNA sense strand
augugaagaauguggcaaa

SEQ ID NO: 2607664 - RNA, 19 nt, Homo sapiens
  misc_RNA (1)...(19): siRNA sense strand
augugaagaauguggcaaa

SEQ ID NO: 2607665 - RNA, 19 nt, Homo sapiens
  misc_RNA (1)...(19): siRNA sense strand
augugaagaauguggcaaa

SEQ ID NO: 2607666 - RNA, 19 nt, Homo sapiens
  misc_RNA (1)...(19): siRNA sense strand
guaaacagcacaaaggaga

SEQ ID NO: 2607667 - RNA, 19 nt, Homo sapiens
  misc_RNA (1)...(19): siRNA sense strand
auguagagaaucuggcaaa

SEQ ID NO: 2607668 - RNA, 19 nt, Homo sapiens
  misc_RNA (1)...(19): siRNA sense strand
uguaaagaaugucgcaaaa

SEQ ID NO: 2607669 - RNA, 19 nt, Homo sapiens
  misc_RNA (1)...(19): siRNA sense strand
auguggagaauguggcaaa

SEQ ID NO: 2607670 - RNA, 19 nt, Homo sapiens
  misc_RNA (1)...(19): siRNA sense strand
cccuaagaagauauagaaa

SEQ ID NO: 2607671 - RNA, 19 nt, Homo sapiens
  misc_RNA (1)...(19): siRNA sense strand
acguuaugaaugugaagaa

SEQ ID NO: 2607672 - RNA, 19 nt, Homo sapiens
  misc_RNA (1)...(19): siRNA sense strand
ucuacaaaugugaagcaua

SEQ ID NO: 2607673 - RNA, 19 nt, Homo sapiens
  misc_RNA (1)...(19): siRNA sense strand
augugaagaaugcggcaaa

SEQ ID NO: 2607674 - RNA, 19 nt, Homo sapiens
  misc_RNA (1)...(19): siRNA sense strand
cauucauacuggagagaag

SEQ ID NO: 2607675 - RNA, 19 nt, Homo sapiens
  misc_RNA (1)...(19): siRNA sense strand
uggccagagcagaacauaa

SEQ ID NO: 2607676 - RNA, 19 nt, Homo sapiens
  misc_RNA (1)...(19): siRNA sense strand
augugaagcauauggaaga

SEQ ID NO: 2607677 - RNA, 19 nt, Homo sapiens
  misc_RNA (1)...(19): siRNA sense strand
cggcaaagcuuuuaaccga

SEQ ID NO: 2607678 - RNA, 19 nt, Homo sapiens
  misc_RNA (1)...(19): siRNA sense strand
aggagauuauaguggacuu

SEQ ID NO: 2607679 - RNA, 19 nt, Homo sapiens
  misc_RNA (1)...(19): siRNA sense strand
cguuaugaaugugaagaau

SEQ ID NO: 2607680 - RNA, 19 nt, Homo sapiens
  misc_RNA (1)...(19): siRNA sense strand
cuggagagaagcuguacaa

SEQ ID NO: 2607681 - RNA, 19 nt, Homo sapiens
  misc_RNA (1)...(19): siRNA sense strand
augugaggaauguggcaaa

SEQ ID NO: 2607682 - RNA, 19 nt, Homo sapiens
  misc_RNA (1)...(19): siRNA sense strand
acaugagaugguagcuaaa

SEQ ID NO: 2607683 - RNA, 19 nt, Homo sapiens
  misc_RNA (1)...(19): siRNA sense strand
ccccacaaauguagagaau

SEQ ID NO: 2607684 - RNA, 19 nt, Homo sapiens
  misc_RNA (1)...(19): siRNA sense strand
ccuacaaaugugagaaaug

SEQ ID NO: 2607685 - RNA, 19 nt, Homo sapiens
  misc_RNA (1)...(19): siRNA sense strand
ccuacaaaugugaggaaug

SEQ ID NO: 2607686 - RNA, 19 nt, Homo sapiens
  misc_RNA (1)...(19): siRNA sense strand
cggagagaaacguuaugaa

SEQ ID NO: 2607687 - RNA, 19 nt, Homo sapiens
  misc_RNA (1)...(19): siRNA sense strand
aagaaaaggcuguaaaagu

SEQ ID NO: 2607688 - RNA, 19 nt, Homo sapiens
  misc_RNA (1)...(19): siRNA sense strand
gcuguacaaaugugaagaa

SEQ ID NO: 2607689 - RNA, 19 nt, Homo sapiens
  misc_RNA (1)...(19): siRNA sense strand
aauucauaguggagagaag

SEQ ID NO: 2607690 - RNA, 19 nt, Homo sapiens
  misc_RNA (1)...(19): siRNA sense strand
guuaagaaaaggcuguaaa

SEQ ID NO: 2607691 - RNA, 19 nt, Homo sapiens
  misc_RNA (1)...(19): siRNA sense strand
gagaauucauaguggagag

SEQ ID NO: 2607692 - RNA, 19 nt, Homo sapiens
  misc_RNA (1)...(19): siRNA sense strand
gccuuuaacugguccucaa

SEQ ID NO: 2607693 - RNA, 19 nt, Homo sapiens
  misc_RNA (1)...(19): siRNA sense strand
acucuacaaaugugaagaa

SEQ ID NO: 2607694 - RNA, 19 nt, Homo sapiens
  misc_RNA (1)...(19): siRNA sense strand
caaaggagauuauagugga

SEQ ID NO: 2607695 - RNA, 19 nt, Homo sapiens
  misc_RNA (1)...(19): siRNA sense strand
agacaugagaugguagcua

SEQ ID NO: 2607696 - RNA, 19 nt, Homo sapiens
  misc_RNA (1)...(19): siRNA sense strand
ggauaugagaauuuacagu

SEQ ID NO: 2607697 - RNA, 19 nt, Homo sapiens
  misc_RNA (1)...(19): siRNA sense strand
ccauauugguguuggacga

SEQ ID NO: 2607698 - RNA, 19 nt, Homo sapiens
  misc_RNA (1)...(19): siRNA sense strand
gaguaaugcaacaguggaa

SEQ ID NO: 2607699 - RNA, 19 nt, Homo sapiens
  misc_RNA (1)...(19): siRNA sense strand
aaauaugaaaccaggcaaa

SEQ ID NO: 2607700 - RNA, 19 nt, Homo sapiens
  misc_RNA (1)...(19): siRNA sense strand
caauaaaggaaauguggau

SEQ ID NO: 2607701 - RNA, 19 nt, Homo sapiens
  misc_RNA (1)...(19): siRNA sense strand
cuugaagagcauugacaua

SEQ ID NO: 2607702 - RNA, 19 nt, Homo sapiens
  misc_RNA (1)...(19): siRNA sense strand
agagaagaacaaaggauau

SEQ ID NO: 2607703 - RNA, 19 nt, Homo sapiens
  misc_RNA (1)...(19): siRNA sense strand
ccgcagucagagagagcaa

SEQ ID NO: 2607704 - RNA, 19 nt, Homo sapiens
  misc_RNA (1)...(19): siRNA sense strand
gggaaguugcugaaguuau

SEQ ID NO: 2607705 - RNA, 19 nt, Homo sapiens
  misc_RNA (1)...(19): siRNA sense strand
ggggaaaacagaaggggau

SEQ ID NO: 2607706 - RNA, 19 nt, Homo sapiens
  misc_RNA (1)...(19): siRNA sense strand
gcacaggacaaguagcaga

SEQ ID NO: 2607707 - RNA, 19 nt, Homo sapiens
  misc_RNA (1)...(19): siRNA sense strand
uguaauugccagugaagga

SEQ ID NO: 2607708 - RNA, 19 nt, Homo sapiens
  misc_RNA (1)...(19): siRNA sense strand
ccacaaagauuuaggaggc

SEQ ID NO: 2607709 - RNA, 19 nt, Homo sapiens
  misc_RNA (1)...(19): siRNA sense strand
gccauguaucagagagcaa

SEQ ID NO: 2607710 - RNA, 19 nt, Homo sapiens
  misc_RNA (1)...(19): siRNA sense strand
gggucugaguaaugcaaca

SEQ ID NO: 2607711 - RNA, 19 nt, Homo sapiens
  misc_RNA (1)...(19): siRNA sense strand
ugguagauuugaauggaga

SEQ ID NO: 2607712 - RNA, 19 nt, Homo sapiens
  misc_RNA (1)...(19): siRNA sense strand
caagagaagaacaaaggau

SEQ ID NO: 2607713 - RNA, 19 nt, Homo sapiens
  misc_RNA (1)...(19): siRNA sense strand
guaaaccagcauugggcua

SEQ ID NO: 2607714 - RNA, 19 nt, Homo sapiens
  misc_RNA (1)...(19): siRNA sense strand
cgaagaauucaguacaaaa

SEQ ID NO: 2607715 - RNA, 19 nt, Homo sapiens
  misc_RNA (1)...(19): siRNA sense strand
ggauaugacagaugugacu

SEQ ID NO: 2607716 - RNA, 19 nt, Homo sapiens
  misc_RNA (1)...(19): siRNA sense strand
cagugaaggauuuagcaau

SEQ ID NO: 2607717 - RNA, 19 nt, Homo sapiens
  misc_RNA (1)...(19): siRNA sense strand
aauaccaggcucagcgaua

SEQ ID NO: 2607718 - RNA, 19 nt, Homo sapiens
  misc_RNA (1)...(19): siRNA sense strand
cccgaagaauucaguacaa

SEQ ID NO: 2607719 - RNA, 19 nt, Homo sapiens
  misc_RNA (1)...(19): siRNA sense strand
acuucaacaucguggcaga

SEQ ID NO: 2607720 - RNA, 19 nt, Homo sapiens
  misc_RNA (1)...(19): siRNA sense strand
agucagagagagcaaggua

SEQ ID NO: 2607721 - RNA, 19 nt, Homo sapiens
  misc_RNA (1)...(19): siRNA sense strand
aaggaaauguggauggugu

SEQ ID NO: 2607722 - RNA, 19 nt, Homo sapiens
  misc_RNA (1)...(19): siRNA sense strand
acagugacaaugugggcua

SEQ ID NO: 2607723 - RNA, 19 nt, Homo sapiens
  misc_RNA (1)...(19): siRNA sense strand
aggcagaacuuucggggau

SEQ ID NO: 2607724 - RNA, 19 nt, Homo sapiens
  misc_RNA (1)...(19): siRNA sense strand
gacaaguagcagauaucaa

SEQ ID NO: 2607725 - RNA, 19 nt, Homo sapiens
  misc_RNA (1)...(19): siRNA sense strand
guaucagagagcaaaggaa

SEQ ID NO: 2607726 - RNA, 19 nt, Homo sapiens
  misc_RNA (1)...(19): siRNA sense strand
augaagaauaccaggcuca

SEQ ID NO: 2607727 - RNA, 19 nt, Homo sapiens
  misc_RNA (1)...(19): siRNA sense strand
uggauggugugcagaucaa

SEQ ID NO: 2607728 - RNA, 19 nt, Homo sapiens
  misc_RNA (1)...(19): siRNA sense strand
gaucaacagaaguccguau

SEQ ID NO: 2607729 - RNA, 19 nt, Homo sapiens
  misc_RNA (1)...(19): siRNA sense strand
cagacaaggaaaugauagu

SEQ ID NO: 2607730 - RNA, 19 nt, Homo sapiens
  misc_RNA (1)...(19): siRNA sense strand
ccagugaaggauuuagcaa

SEQ ID NO: 2607731 - RNA, 19 nt, Homo sapiens
  misc_RNA (1)...(19): siRNA sense strand
uguuguuauuucaggucua

SEQ ID NO: 2607732 - RNA, 19 nt, Homo sapiens
  misc_RNA (1)...(19): siRNA sense strand
guggagaaauaugaggcua

SEQ ID NO: 2607733 - RNA, 19 nt, Homo sapiens
  misc_RNA (1)...(19): siRNA sense strand
cuucaaauacagacaagga

SEQ ID NO: 2607734 - RNA, 19 nt, Homo sapiens
  misc_RNA (1)...(19): siRNA sense strand
ugggaaagccaucugaaga

SEQ ID NO: 2607735 - RNA, 19 nt, Homo sapiens
  misc_RNA (1)...(19): siRNA sense strand
gagcaagagaagaacaaag

SEQ ID NO: 2607736 - RNA, 19 nt, Homo sapiens
  misc_RNA (1)...(19): siRNA sense strand
gcacauggucacugguauc

SEQ ID NO: 2607737 - RNA, 19 nt, Homo sapiens
  misc_RNA (1)...(19): siRNA sense strand
ucuucacaccggagaacua

SEQ ID NO: 2607738 - RNA, 19 nt, Homo sapiens
  misc_RNA (1)...(19): siRNA sense strand
ucccuguacagaagagaua

SEQ ID NO: 2607739 - RNA, 19 nt, Homo sapiens
  misc_RNA (1)...(19): siRNA sense strand
ccuguacagaagagauaau

SEQ ID NO: 2607740 - RNA, 19 nt, Homo sapiens
  misc_RNA (1)...(19): siRNA sense strand
caaauaugaaaccaggcaa

SEQ ID NO: 2607741 - RNA, 19 nt, Homo sapiens
  misc_RNA (1)...(19): siRNA sense strand
uugagcaagagaagaacaa

SEQ ID NO: 2607742 - RNA, 19 nt, Homo sapiens
  misc_RNA (1)...(19): siRNA sense strand
acgcaagagaaguggcuau

SEQ ID NO: 2607743 - RNA, 19 nt, Homo sapiens
  misc_RNA (1)...(19): siRNA sense strand
gguccgugguuguggucau

SEQ ID NO: 2607744 - RNA, 19 nt, Homo sapiens
  misc_RNA (1)...(19): siRNA sense strand
caguagaagagacgcaaga

SEQ ID NO: 2607745 - RNA, 19 nt, Homo sapiens
  misc_RNA (1)...(19): siRNA sense strand
uggaauuagcaguguacau

SEQ ID NO: 2607746 - RNA, 19 nt, Homo sapiens
  misc_RNA (1)...(19): siRNA sense strand
uaucaagaugccagcacaa

SEQ ID NO: 2607747 - RNA, 19 nt, Homo sapiens
  misc_RNA (1)...(19): siRNA sense strand
auggaagagcugaugagua

SEQ ID NO: 2607748 - RNA, 19 nt, Homo sapiens
  misc_RNA (1)...(19): siRNA sense strand
ccucaguagaagagacgca

SEQ ID NO: 2607749 - RNA, 19 nt, Homo sapiens
  misc_RNA (1)...(19): siRNA sense strand
ccuaguaaugacugggaua

SEQ ID NO: 2607750 - RNA, 19 nt, Homo sapiens
  misc_RNA (1)...(19): siRNA sense strand
gauauuuacuacugggcca

SEQ ID NO: 2607751 - RNA, 19 nt, Homo sapiens
  misc_RNA (1)...(19): siRNA sense strand
cuaaagaacaucugcagca

SEQ ID NO: 2607752 - RNA, 19 nt, Homo sapiens
  misc_RNA (1)...(19): siRNA sense strand
agaggggaauguuggaaaa

SEQ ID NO: 2607753 - RNA, 19 nt, Homo sapiens
  misc_RNA (1)...(19): siRNA sense strand
gagagcagaaagaggggaa

SEQ ID NO: 2607754 - RNA, 19 nt, Homo sapiens
  misc_RNA (1)...(19): siRNA sense strand
gagcaaguuuccaggagga

SEQ ID NO: 2607755 - RNA, 19 nt, Homo sapiens
  misc_RNA (1)...(19): siRNA sense strand
aggccaugcuggagagaag

SEQ ID NO: 2607756 - RNA, 19 nt, Homo sapiens
  misc_RNA (1)...(19): siRNA sense strand
ggguacagauuguggagcu

SEQ ID NO: 2607757 - RNA, 19 nt, Homo sapiens
  misc_RNA (1)...(19): siRNA sense strand
ggcaaauucucuuggccca

SEQ ID NO: 2607758 - RNA, 19 nt, Homo sapiens
  misc_RNA (1)...(19): siRNA sense strand
ucaccgauguggacgccaa

SEQ ID NO: 2607759 - RNA, 19 nt, Homo sapiens
  misc_RNA (1)...(19): siRNA sense strand
cagccuuggccauguggaa

SEQ ID NO: 2607760 - RNA, 19 nt, Homo sapiens
  misc_RNA (1)...(19): siRNA sense strand
caccagaggaacauggaca

SEQ ID NO: 2607761 - RNA, 19 nt, Homo sapiens
  misc_RNA (1)...(19): siRNA sense strand
gggaguuuggguugaacau

SEQ ID NO: 2607762 - RNA, 19 nt, Homo sapiens
  misc_RNA (1)...(19): siRNA sense strand
cugagaaggaagaggagga

SEQ ID NO: 2607763 - RNA, 19 nt, Homo sapiens
  misc_RNA (1)...(19): siRNA sense strand
aggaagaggaggaagcuga

SEQ ID NO: 2607764 - RNA, 19 nt, Homo sapiens
  misc_RNA (1)...(19): siRNA sense strand
gagcaaguuuccaggagga

SEQ ID NO: 2607765 - RNA, 19 nt, Homo sapiens
  misc_RNA (1)...(19): siRNA sense strand
aggccaugcuggagagaag

SEQ ID NO: 2607766 - RNA, 19 nt, Homo sapiens
  misc_RNA (1)...(19): siRNA sense strand
ggguacagauuguggagcu

SEQ ID NO: 2607767 - RNA, 19 nt, Homo sapiens
  misc_RNA (1)...(19): siRNA sense strand
ggcaaauucucuuggccca

SEQ ID NO: 2607768 - RNA, 19 nt, Homo sapiens
  misc_RNA (1)...(19): siRNA sense strand
ucaccgauguggacgccaa

SEQ ID NO: 2607769 - RNA, 19 nt, Homo sapiens
  misc_RNA (1)...(19): siRNA sense strand
cagccuuggccauguggaa

SEQ ID NO: 2607770 - RNA, 19 nt, Homo sapiens
  misc_RNA (1)...(19): siRNA sense strand
caccagaggaacauggaca

SEQ ID NO: 2607771 - RNA, 19 nt, Homo sapiens
  misc_RNA (1)...(19): siRNA sense strand
gggaguuuggguugaacau

SEQ ID NO: 2607772 - RNA, 19 nt, Homo sapiens
  misc_RNA (1)...(19): siRNA sense strand
ggaccaaacagcaggaaga

SEQ ID NO: 2607773 - RNA, 19 nt, Homo sapiens
  misc_RNA (1)...(19): siRNA sense strand
guaugaagaaagagagaga

SEQ ID NO: 2607774 - RNA, 19 nt, Homo sapiens
  misc_RNA (1)...(19): siRNA sense strand
caauagagucaauggagaa

SEQ ID NO: 2607775 - RNA, 19 nt, Homo sapiens
  misc_RNA (1)...(19): siRNA sense strand
gcaaaguaugcuauggaaa

SEQ ID NO: 2607776 - RNA, 19 nt, Homo sapiens
  misc_RNA (1)...(19): siRNA sense strand
acucagaauucuagcauau

SEQ ID NO: 2607777 - RNA, 19 nt, Homo sapiens
  misc_RNA (1)...(19): siRNA sense strand
cuggaaaagucuagagauu

SEQ ID NO: 2607778 - RNA, 19 nt, Homo sapiens
  misc_RNA (1)...(19): siRNA sense strand
uggaugaagaagagcauaa

SEQ ID NO: 2607779 - RNA, 19 nt, Homo sapiens
  misc_RNA (1)...(19): siRNA sense strand
aaguagaacagaagaagaa

SEQ ID NO: 2607780 - RNA, 19 nt, Homo sapiens
  misc_RNA (1)...(19): siRNA sense strand
agaaagaggaaguagaaca

SEQ ID NO: 2607781 - RNA, 19 nt, Homo sapiens
  misc_RNA (1)...(19): siRNA sense strand
ucuggaggauggaggaaua

SEQ ID NO: 2607782 - RNA, 19 nt, Homo sapiens
  misc_RNA (1)...(19): siRNA sense strand
cgacguggguaauggaaaa

SEQ ID NO: 2607783 - RNA, 19 nt, Homo sapiens
  misc_RNA (1)...(19): siRNA sense strand
caaagaaagacuugcaaaa

SEQ ID NO: 2607784 - RNA, 19 nt, Homo sapiens
  misc_RNA (1)...(19): siRNA sense strand
gauugaaggaagcagguaa

SEQ ID NO: 2607785 - RNA, 19 nt, Homo sapiens
  misc_RNA (1)...(19): siRNA sense strand
ccuggaaacacaagaacaa

SEQ ID NO: 2607786 - RNA, 19 nt, Homo sapiens
  misc_RNA (1)...(19): siRNA sense strand
aggaaguagaacagaagaa

SEQ ID NO: 2607787 - RNA, 19 nt, Homo sapiens
  misc_RNA (1)...(19): siRNA sense strand
agagauagaagauggaaga

SEQ ID NO: 2607788 - RNA, 19 nt, Homo sapiens
  misc_RNA (1)...(19): siRNA sense strand
gagaacaaauagagcacca

SEQ ID NO: 2607789 - RNA, 19 nt, Homo sapiens
  misc_RNA (1)...(19): siRNA sense strand
cauuacaguuugaagaaga

SEQ ID NO: 2607790 - RNA, 19 nt, Homo sapiens
  misc_RNA (1)...(19): siRNA sense strand
caggagaaacagaaagaga

SEQ ID NO: 2607791 - RNA, 19 nt, Homo sapiens
  misc_RNA (1)...(19): siRNA sense strand
gaggacauagagagggaua

SEQ ID NO: 2607792 - RNA, 19 nt, Homo sapiens
  misc_RNA (1)...(19): siRNA sense strand
augaagacacccaaggaaa

SEQ ID NO: 2607793 - RNA, 19 nt, Homo sapiens
  misc_RNA (1)...(19): siRNA sense strand
aagccaaacuggaugaaga

SEQ ID NO: 2607794 - RNA, 19 nt, Homo sapiens
  misc_RNA (1)...(19): siRNA sense strand
aaacaagaacugaaggaca

SEQ ID NO: 2607795 - RNA, 19 nt, Homo sapiens
  misc_RNA (1)...(19): siRNA sense strand
cacaagaacaagagauaga

SEQ ID NO: 2607796 - RNA, 19 nt, Homo sapiens
  misc_RNA (1)...(19): siRNA sense strand
agauggaaauguuaaggaa

SEQ ID NO: 2607797 - RNA, 19 nt, Homo sapiens
  misc_RNA (1)...(19): siRNA sense strand
aagaagucucugauagaaa

SEQ ID NO: 2607798 - RNA, 19 nt, Homo sapiens
  misc_RNA (1)...(19): siRNA sense strand
caaaguaugcuauggaaaa

SEQ ID NO: 2607799 - RNA, 19 nt, Homo sapiens
  misc_RNA (1)...(19): siRNA sense strand
gcaaacacugagaaguuaa

SEQ ID NO: 2607800 - RNA, 19 nt, Homo sapiens
  misc_RNA (1)...(19): siRNA sense strand
aacacaagaacaagagaua

SEQ ID NO: 2607801 - RNA, 19 nt, Homo sapiens
  misc_RNA (1)...(19): siRNA sense strand
augcagaagggaugagauu

SEQ ID NO: 2607802 - RNA, 19 nt, Homo sapiens
  misc_RNA (1)...(19): siRNA sense strand
gggaugagauugaaggaag

SEQ ID NO: 2607803 - RNA, 19 nt, Homo sapiens
  misc_RNA (1)...(19): siRNA sense strand
cuuccugaccagagacaaa

SEQ ID NO: 2607804 - RNA, 19 nt, Homo sapiens
  misc_RNA (1)...(19): siRNA sense strand
aacaagaacugaaggacau

SEQ ID NO: 2607805 - RNA, 19 nt, Homo sapiens
  misc_RNA (1)...(19): siRNA sense strand
aagaggaaguagaacagaa

SEQ ID NO: 2607806 - RNA, 19 nt, Homo sapiens
  misc_RNA (1)...(19): siRNA sense strand
gaagaggcucaaagaacaa

SEQ ID NO: 2607807 - RNA, 19 nt, Homo sapiens
  misc_RNA (1)...(19): siRNA sense strand
ggagaauagaagacugaga

SEQ ID NO: 2607808 - RNA, 19 nt, Homo sapiens
  misc_RNA (1)...(19): siRNA sense strand
aagcacaacuccugcaaau

SEQ ID NO: 2607809 - RNA, 19 nt, Homo sapiens
  misc_RNA (1)...(19): siRNA sense strand
aggagaaagaauucaacaa

SEQ ID NO: 2607810 - RNA, 19 nt, Homo sapiens
  misc_RNA (1)...(19): siRNA sense strand
ucuacaacgagcagauaua

SEQ ID NO: 2607811 - RNA, 19 nt, Homo sapiens
  misc_RNA (1)...(19): siRNA sense strand
acaauagagucaauggaga

SEQ ID NO: 2607812 - RNA, 19 nt, Homo sapiens
  misc_RNA (1)...(19): siRNA sense strand
ggaaaacagugaucagaau

SEQ ID NO: 2607813 - RNA, 19 nt, Homo sapiens
  misc_RNA (1)...(19): siRNA sense strand
auggaaaguugguagguca

SEQ ID NO: 2607814 - RNA, 19 nt, Homo sapiens
  misc_RNA (1)...(19): siRNA sense strand
gcaucaacaucaaugaaca

SEQ ID NO: 2607815 - RNA, 19 nt, Homo sapiens
  misc_RNA (1)...(19): siRNA sense strand
acaucaaugaacagagaau

SEQ ID NO: 2607816 - RNA, 19 nt, Homo sapiens
  misc_RNA (1)...(19): siRNA sense strand
aggcaguaguaaaugaaga

SEQ ID NO: 2607817 - RNA, 19 nt, Homo sapiens
  misc_RNA (1)...(19): siRNA sense strand
gugaaaagagcucaagaaa

SEQ ID NO: 2607818 - RNA, 19 nt, Homo sapiens
  misc_RNA (1)...(19): siRNA sense strand
gaaauaaguggcauggaga

SEQ ID NO: 2607819 - RNA, 19 nt, Homo sapiens
  misc_RNA (1)...(19): siRNA sense strand
agacuaacuauauggagua

SEQ ID NO: 2607820 - RNA, 19 nt, Homo sapiens
  misc_RNA (1)...(19): siRNA sense strand
cuauagacacccugaaaca

SEQ ID NO: 2607821 - RNA, 19 nt, Homo sapiens
  misc_RNA (1)...(19): siRNA sense strand
aaagaaacccuuaggcuga

SEQ ID NO: 2607822 - RNA, 19 nt, Homo sapiens
  misc_RNA (1)...(19): siRNA sense strand
ggauuuagcaggaucugaa

SEQ ID NO: 2607823 - RNA, 19 nt, Homo sapiens
  misc_RNA (1)...(19): siRNA sense strand
ugaaauuccgagaggauca

SEQ ID NO: 2607824 - RNA, 19 nt, Homo sapiens
  misc_RNA (1)...(19): siRNA sense strand
aauaaguggcauggagaaa

SEQ ID NO: 2607825 - RNA, 19 nt, Homo sapiens
  misc_RNA (1)...(19): siRNA sense strand
uggcaaaaguacagaaacu

SEQ ID NO: 2607826 - RNA, 19 nt, Homo sapiens
  misc_RNA (1)...(19): siRNA sense strand
agaagcaggaaguggauau

SEQ ID NO: 2607827 - RNA, 19 nt, Homo sapiens
  misc_RNA (1)...(19): siRNA sense strand
cuggaaagucagcaguuaa

SEQ ID NO: 2607828 - RNA, 19 nt, Homo sapiens
  misc_RNA (1)...(19): siRNA sense strand
agaucaaagcuggaagaaa

SEQ ID NO: 2607829 - RNA, 19 nt, Homo sapiens
  misc_RNA (1)...(19): siRNA sense strand
gaggagaauagaagacuga

SEQ ID NO: 2607830 - RNA, 19 nt, Homo sapiens
  misc_RNA (1)...(19): siRNA sense strand
uugcaaacacugagaaguu

SEQ ID NO: 2607831 - RNA, 19 nt, Homo sapiens
  misc_RNA (1)...(19): siRNA sense strand
ggaaaaggcagcuagaauu

SEQ ID NO: 2607832 - RNA, 19 nt, Homo sapiens
  misc_RNA (1)...(19): siRNA sense strand
auaagaaaguuguagcuga

SEQ ID NO: 2607833 - RNA, 19 nt, Homo sapiens
  misc_RNA (1)...(19): siRNA sense strand
guuucagaucuaugagcaa

SEQ ID NO: 2607834 - RNA, 19 nt, Homo sapiens
  misc_RNA (1)...(19): siRNA sense strand
acauacaagcuuugcccaa

SEQ ID NO: 2607835 - RNA, 19 nt, Homo sapiens
  misc_RNA (1)...(19): siRNA sense strand
gggccuucccagauuuaaa

SEQ ID NO: 2607836 - RNA, 19 nt, Homo sapiens
  misc_RNA (1)...(19): siRNA sense strand
uugagagacauuaucgaaa

SEQ ID NO: 2607837 - RNA, 19 nt, Homo sapiens
  misc_RNA (1)...(19): siRNA sense strand
aaagagcggcugaggcgua

SEQ ID NO: 2607838 - RNA, 19 nt, Homo sapiens
  misc_RNA (1)...(19): siRNA sense strand
acgcagacacaguuggcau

SEQ ID NO: 2607839 - RNA, 19 nt, Homo sapiens
  misc_RNA (1)...(19): siRNA sense strand
uaucgaaagucguaccuga

SEQ ID NO: 2607840 - RNA, 19 nt, Homo sapiens
  misc_RNA (1)...(19): siRNA sense strand
ccucaaagguccugacaau

SEQ ID NO: 2607841 - RNA, 19 nt, Homo sapiens
  misc_RNA (1)...(19): siRNA sense strand
caaaggagaacgagaccua

SEQ ID NO: 2607842 - RNA, 19 nt, Homo sapiens
  misc_RNA (1)...(19): siRNA sense strand
ggagauagaucgcagacga

SEQ ID NO: 2607843 - RNA, 19 nt, Homo sapiens
  misc_RNA (1)...(19): siRNA sense strand
aagaaggauuccaaggaga

SEQ ID NO: 2607844 - RNA, 19 nt, Homo sapiens
  misc_RNA (1)...(19): siRNA sense strand
gggaaggcagaguuugaaa

SEQ ID NO: 2607845 - RNA, 19 nt, Homo sapiens
  misc_RNA (1)...(19): siRNA sense strand
agaccaaaggagaacgaga

SEQ ID NO: 2607846 - RNA, 19 nt, Homo sapiens
  misc_RNA (1)...(19): siRNA sense strand
aggcagaguuugaaaagau

SEQ ID NO: 2607847 - RNA, 19 nt, Homo sapiens
  misc_RNA (1)...(19): siRNA sense strand
agaccuaaucuaugcauuu

SEQ ID NO: 2607848 - RNA, 19 nt, Homo sapiens
  misc_RNA (1)...(19): siRNA sense strand
cagggaaggcagaguuuga

SEQ ID NO: 2607849 - RNA, 19 nt, Homo sapiens
  misc_RNA (1)...(19): siRNA sense strand
cggacuuccuguuugaaau

SEQ ID NO: 2607850 - RNA, 19 nt, Homo sapiens
  misc_RNA (1)...(19): siRNA sense strand
ccaaauuuuaugagaccaa

SEQ ID NO: 2607851 - RNA, 19 nt, Homo sapiens
  misc_RNA (1)...(19): siRNA sense strand
uuaugagaccaaaggagaa

SEQ ID NO: 2607852 - RNA, 19 nt, Homo sapiens
  misc_RNA (1)...(19): siRNA sense strand
caugguagccgccuagaaa

SEQ ID NO: 2607853 - RNA, 19 nt, Homo sapiens
  misc_RNA (1)...(19): siRNA sense strand
cuuuuggaaucgugcgaaa

SEQ ID NO: 2607854 - RNA, 19 nt, Homo sapiens
  misc_RNA (1)...(19): siRNA sense strand
agaaggauuccaaggagau

SEQ ID NO: 2607855 - RNA, 19 nt, Homo sapiens
  misc_RNA (1)...(19): siRNA sense strand
agacauccuuguucggaga

SEQ ID NO: 2607856 - RNA, 19 nt, Homo sapiens
  misc_RNA (1)...(19): siRNA sense strand
ccacccaagagcagggcuu

SEQ ID NO: 2607857 - RNA, 19 nt, Homo sapiens
  misc_RNA (1)...(19): siRNA sense strand
ggacuuccuguuugaaauu

SEQ ID NO: 2607858 - RNA, 19 nt, Homo sapiens
  misc_RNA (1)...(19): siRNA sense strand
ggacgcaacuucuugguca

SEQ ID NO: 2607859 - RNA, 19 nt, Homo sapiens
  misc_RNA (1)...(19): siRNA sense strand
ggaugcuggcugugaccaa

SEQ ID NO: 2607860 - RNA, 19 nt, Homo sapiens
  misc_RNA (1)...(19): siRNA sense strand
acacuaaguuugugggaag

SEQ ID NO: 2607861 - RNA, 19 nt, Homo sapiens
  misc_RNA (1)...(19): siRNA sense strand
agcauaugaaaguggauua

SEQ ID NO: 2607862 - RNA, 19 nt, Homo sapiens
  misc_RNA (1)...(19): siRNA sense strand
aguaaucuaucgaggagca

SEQ ID NO: 2607863 - RNA, 19 nt, Homo sapiens
  misc_RNA (1)...(19): siRNA sense strand
aggaaguagaccaggcgau

SEQ ID NO: 2607864 - RNA, 19 nt, Homo sapiens
  misc_RNA (1)...(19): siRNA sense strand
cagguuugggagagaugaa

SEQ ID NO: 2607865 - RNA, 19 nt, Homo sapiens
  misc_RNA (1)...(19): siRNA sense strand
aaguaaaauggcugcuaua

SEQ ID NO: 2607866 - RNA, 19 nt, Homo sapiens
  misc_RNA (1)...(19): siRNA sense strand
gaaacaagcugaagaagaa

SEQ ID NO: 2607867 - RNA, 19 nt, Homo sapiens
  misc_RNA (1)...(19): siRNA sense strand
gugaauagauguuugguua

SEQ ID NO: 2607868 - RNA, 19 nt, Homo sapiens
  misc_RNA (1)...(19): siRNA sense strand
gaggaaacauccaguaaua

SEQ ID NO: 2607869 - RNA, 19 nt, Homo sapiens
  misc_RNA (1)...(19): siRNA sense strand
gcacauauuuacuggaaga

SEQ ID NO: 2607870 - RNA, 19 nt, Homo sapiens
  misc_RNA (1)...(19): siRNA sense strand
aagaaacaguggaggcaua

SEQ ID NO: 2607871 - RNA, 19 nt, Homo sapiens
  misc_RNA (1)...(19): siRNA sense strand
gauuagaguccaugauuaa

SEQ ID NO: 2607872 - RNA, 19 nt, Homo sapiens
  misc_RNA (1)...(19): siRNA sense strand
agaagaagagagaaggaaa

SEQ ID NO: 2607873 - RNA, 19 nt, Homo sapiens
  misc_RNA (1)...(19): siRNA sense strand
ggauuagaguccaugauua

SEQ ID NO: 2607874 - RNA, 19 nt, Homo sapiens
  misc_RNA (1)...(19): siRNA sense strand
ggaaacaagcugaagaaga

SEQ ID NO: 2607875 - RNA, 19 nt, Homo sapiens
  misc_RNA (1)...(19): siRNA sense strand
cagaagauauggauggauu

SEQ ID NO: 2607876 - RNA, 19 nt, Homo sapiens
  misc_RNA (1)...(19): siRNA sense strand
ggaagaaacuacaacaaca

SEQ ID NO: 2607877 - RNA, 19 nt, Homo sapiens
  misc_RNA (1)...(19): siRNA sense strand
uggugaagaugaagaggaa

SEQ ID NO: 2607878 - RNA, 19 nt, Homo sapiens
  misc_RNA (1)...(19): siRNA sense strand
aaacaaagaucgaauguca

SEQ ID NO: 2607879 - RNA, 19 nt, Homo sapiens
  misc_RNA (1)...(19): siRNA sense strand
aggacgaggugcaggaaau

SEQ ID NO: 2607880 - RNA, 19 nt, Homo sapiens
  misc_RNA (1)...(19): siRNA sense strand
gcaaagaaaaguugacuaa

SEQ ID NO: 2607881 - RNA, 19 nt, Homo sapiens
  misc_RNA (1)...(19): siRNA sense strand
cuaaacaagcauugaggaa

SEQ ID NO: 2607882 - RNA, 19 nt, Homo sapiens
  misc_RNA (1)...(19): siRNA sense strand
gugcaggaaaugugugaaa

SEQ ID NO: 2607883 - RNA, 19 nt, Homo sapiens
  misc_RNA (1)...(19): siRNA sense strand
gaagaagagagaaggaaaa

SEQ ID NO: 2607884 - RNA, 19 nt, Homo sapiens
  misc_RNA (1)...(19): siRNA sense strand
acuaauugcuauggagaaa

SEQ ID NO: 2607885 - RNA, 19 nt, Homo sapiens
  misc_RNA (1)...(19): siRNA sense strand
gaaacuuggugaagaugaa

SEQ ID NO: 2607886 - RNA, 19 nt, Homo sapiens
  misc_RNA (1)...(19): siRNA sense strand
cagcaggugaugaaagaaa

SEQ ID NO: 2607887 - RNA, 19 nt, Homo sapiens
  misc_RNA (1)...(19): siRNA sense strand
gguuacagaugcagaauca

SEQ ID NO: 2607888 - RNA, 19 nt, Homo sapiens
  misc_RNA (1)...(19): siRNA sense strand
ccaguaaagaaauaggaaa

SEQ ID NO: 2607889 - RNA, 19 nt, Homo sapiens
  misc_RNA (1)...(19): siRNA sense strand
cuucaguagugaugaggaa

SEQ ID NO: 2607890 - RNA, 19 nt, Homo sapiens
  misc_RNA (1)...(19): siRNA sense strand
agucaaggauuacaagaua

SEQ ID NO: 2607891 - RNA, 19 nt, Homo sapiens
  misc_RNA (1)...(19): siRNA sense strand
ggaaaagagaggaagaaau

SEQ ID NO: 2607892 - RNA, 19 nt, Homo sapiens
  misc_RNA (1)...(19): siRNA sense strand
gagaggaagaaaucagaaa

SEQ ID NO: 2607893 - RNA, 19 nt, Homo sapiens
  misc_RNA (1)...(19): siRNA sense strand
gagccuugcuguugaggaa

SEQ ID NO: 2607894 - RNA, 19 nt, Homo sapiens
  misc_RNA (1)...(19): siRNA sense strand
caacaugaaugggaagaaa

SEQ ID NO: 2607895 - RNA, 19 nt, Homo sapiens
  misc_RNA (1)...(19): siRNA sense strand
aagaggagaucaagaagua

SEQ ID NO: 2607896 - RNA, 19 nt, Homo sapiens
  misc_RNA (1)...(19): siRNA sense strand
guggaaggcuuguguguuu

SEQ ID NO: 2607897 - RNA, 19 nt, Homo sapiens
  misc_RNA (1)...(19): siRNA sense strand
ggcuaugagaugugauaua

SEQ ID NO: 2607898 - RNA, 19 nt, Homo sapiens
  misc_RNA (1)...(19): siRNA sense strand
gagaaaagacgguuacaaa

SEQ ID NO: 2607899 - RNA, 19 nt, Homo sapiens
  misc_RNA (1)...(19): siRNA sense strand
gaggagaucaagaaguaaa

SEQ ID NO: 2607900 - RNA, 19 nt, Homo sapiens
  misc_RNA (1)...(19): siRNA sense strand
aagaagaggaucagcggaa

SEQ ID NO: 2607901 - RNA, 19 nt, Homo sapiens
  misc_RNA (1)...(19): siRNA sense strand
ccagaaauuuggugccauu

SEQ ID NO: 2607902 - RNA, 19 nt, Homo sapiens
  misc_RNA (1)...(19): siRNA sense strand
aaagaaacuuggugaagau

SEQ ID NO: 2607903 - RNA, 19 nt, Homo sapiens
  misc_RNA (1)...(19): siRNA sense strand
gcggaaacaagcugaagaa

SEQ ID NO: 2607904 - RNA, 19 nt, Homo sapiens
  misc_RNA (1)...(19): siRNA sense strand
gacaaguacuaaugaagaa

SEQ ID NO: 2607905 - RNA, 19 nt, Homo sapiens
  misc_RNA (1)...(19): siRNA sense strand
ugaauaugcuccagauuau

SEQ ID NO: 2607906 - RNA, 19 nt, Homo sapiens
  misc_RNA (1)...(19): siRNA sense strand
agaauuaguaccucagaua

SEQ ID NO: 2607907 - RNA, 19 nt, Homo sapiens
  misc_RNA (1)...(19): siRNA sense strand
caaacaaaggcauggaaga

SEQ ID NO: 2607908 - RNA, 19 nt, Homo sapiens
  misc_RNA (1)...(19): siRNA sense strand
ggauagcaaugguuacuaa

SEQ ID NO: 2607909 - RNA, 19 nt, Homo sapiens
  misc_RNA (1)...(19): siRNA sense strand
acaagaagcuaagaagaaa

SEQ ID NO: 2607910 - RNA, 19 nt, Homo sapiens
  misc_RNA (1)...(19): siRNA sense strand
gaagcuaagaagaaagaau

SEQ ID NO: 2607911 - RNA, 19 nt, Homo sapiens
  misc_RNA (1)...(19): siRNA sense strand
caaagacaauccagaaauu

SEQ ID NO: 2607912 - RNA, 19 nt, Homo sapiens
  misc_RNA (1)...(19): siRNA sense strand
aaacaaaggcauggaagaa

SEQ ID NO: 2607913 - RNA, 19 nt, Homo sapiens
  misc_RNA (1)...(19): siRNA sense strand
gaagaaacuacaacaacaa

SEQ ID NO: 2607914 - RNA, 19 nt, Homo sapiens
  misc_RNA (1)...(19): siRNA sense strand
gaguaaacaaagaucgaau

SEQ ID NO: 2607915 - RNA, 19 nt, Homo sapiens
  misc_RNA (1)...(19): siRNA sense strand
cgaaaacuguacagcaaaa

SEQ ID NO: 2607916 - RNA, 19 nt, Homo sapiens
  misc_RNA (1)...(19): siRNA sense strand
cugaagaagaagagagaag

SEQ ID NO: 2607917 - RNA, 19 nt, Homo sapiens
  misc_RNA (1)...(19): siRNA sense strand
ggacaguucuccaguauca

SEQ ID NO: 2607918 - RNA, 19 nt, Homo sapiens
  misc_RNA (1)...(19): siRNA sense strand
gguauuggcaggauagcaa

SEQ ID NO: 2607919 - RNA, 19 nt, Homo sapiens
  misc_RNA (1)...(19): siRNA sense strand
gcuaacaaagaaugcauaa

SEQ ID NO: 2607920 - RNA, 19 nt, Homo sapiens
  misc_RNA (1)...(19): siRNA sense strand
aaagaaaguggaagccaaa

SEQ ID NO: 2607921 - RNA, 19 nt, Homo sapiens
  misc_RNA (1)...(19): siRNA sense strand
gcguguuacaauuaagaaa

SEQ ID NO: 2607922 - RNA, 19 nt, Homo sapiens
  misc_RNA (1)...(19): siRNA sense strand
gcaggaaaugugugaaaca

SEQ ID NO: 2607923 - RNA, 19 nt, Homo sapiens
  misc_RNA (1)...(19): siRNA sense strand
gcuuccaagucaacaaaua

SEQ ID NO: 2607924 - RNA, 19 nt, Homo sapiens
  misc_RNA (1)...(19): siRNA sense strand
aacaagaagcuaagaagaa

SEQ ID NO: 2607925 - RNA, 19 nt, Homo sapiens
  misc_RNA (1)...(19): siRNA sense strand
gacagaaagaagaggauca

SEQ ID NO: 2607926 - RNA, 19 nt, Homo sapiens
  misc_RNA (1)...(19): siRNA sense strand
gagaaggaaaagagaggaa

SEQ ID NO: 2607927 - RNA, 19 nt, Homo sapiens
  misc_RNA (1)...(19): siRNA sense strand
aagaaagcauucagcagaa

SEQ ID NO: 2607928 - RNA, 19 nt, Homo sapiens
  misc_RNA (1)...(19): siRNA sense strand
aaacaaaucagcaugacaa

SEQ ID NO: 2607929 - RNA, 19 nt, Homo sapiens
  misc_RNA (1)...(19): siRNA sense strand
gugauauaguacagaagau

SEQ ID NO: 2607930 - RNA, 19 nt, Homo sapiens
  misc_RNA (1)...(19): siRNA sense strand
augaaugggaagaaagcaa

SEQ ID NO: 2607931 - RNA, 19 nt, Homo sapiens
  misc_RNA (1)...(19): siRNA sense strand
gugaagaugaagaggaacu

SEQ ID NO: 2607932 - RNA, 19 nt, Homo sapiens
  misc_RNA (1)...(19): siRNA sense strand
gaugaaagaaagcaaagaa

SEQ ID NO: 2607933 - RNA, 19 nt, Homo sapiens
  misc_RNA (1)...(19): siRNA sense strand
cuuaaauauuccaggacca

SEQ ID NO: 2607934 - RNA, 19 nt, Homo sapiens
  misc_RNA (1)...(19): siRNA sense strand
aggaaagacagaaagaaga

SEQ ID NO: 2607935 - RNA, 19 nt, Homo sapiens
  misc_RNA (1)...(19): siRNA sense strand
ugauaguggaggaggcauu

SEQ ID NO: 2607936 - RNA, 19 nt, Homo sapiens
  misc_RNA (1)...(19): siRNA sense strand
caacaagaagcuaagaaga

SEQ ID NO: 2607937 - RNA, 19 nt, Homo sapiens
  misc_RNA (1)...(19): siRNA sense strand
agaagauauggauggauua

SEQ ID NO: 2607938 - RNA, 19 nt, Homo sapiens
  misc_RNA (1)...(19): siRNA sense strand
gcauugaggaagcagcaaa

SEQ ID NO: 2607939 - RNA, 19 nt, Homo sapiens
  misc_RNA (1)...(19): siRNA sense strand
gcaauggagcuuuguaaau

SEQ ID NO: 2607940 - RNA, 19 nt, Homo sapiens
  misc_RNA (1)...(19): siRNA sense strand
gaagaaguugcuauggaua

SEQ ID NO: 2607941 - RNA, 19 nt, Homo sapiens
  misc_RNA (1)...(19): siRNA sense strand
gauacagaauccaaaguuu

SEQ ID NO: 2607942 - RNA, 19 nt, Homo sapiens
  misc_RNA (1)...(19): siRNA sense strand
gaagaaagaaucuguuaga

SEQ ID NO: 2607943 - RNA, 19 nt, Homo sapiens
  misc_RNA (1)...(19): siRNA sense strand
gaaccaaggacgaggugca

SEQ ID NO: 2607944 - RNA, 19 nt, Homo sapiens
  misc_RNA (1)...(19): siRNA sense strand
cauugaacuucgaggacca

SEQ ID NO: 2607945 - RNA, 19 nt, Homo sapiens
  misc_RNA (1)...(19): siRNA sense strand
ugauucuagucaaggauua

SEQ ID NO: 2607946 - RNA, 19 nt, Homo sapiens
  misc_RNA (1)...(19): siRNA sense strand
gucaaggauuacaagauaa

SEQ ID NO: 2607947 - RNA, 19 nt, Homo sapiens
  misc_RNA (1)...(19): siRNA sense strand
aagaacagcaggugaugaa

SEQ ID NO: 2607948 - RNA, 19 nt, Homo sapiens
  misc_RNA (1)...(19): siRNA sense strand
ggugaugaaagaaagcaaa

SEQ ID NO: 2607949 - RNA, 19 nt, Homo sapiens
  misc_RNA (1)...(19): siRNA sense strand
augaggaagaggaggaaga

SEQ ID NO: 2607950 - RNA, 19 nt, Homo sapiens
  misc_RNA (1)...(19): siRNA sense strand
gagaagaacuacuuaaauc

SEQ ID NO: 2607951 - RNA, 19 nt, Homo sapiens
  misc_RNA (1)...(19): siRNA sense strand
ggucauacuccuccauuua

SEQ ID NO: 2607952 - RNA, 19 nt, Homo sapiens
  misc_RNA (1)...(19): siRNA sense strand
agaggaacuaucugaauua

SEQ ID NO: 2607953 - RNA, 19 nt, Homo sapiens
  misc_RNA (1)...(19): siRNA sense strand
ucucaaaucaggaagaaca

SEQ ID NO: 2607954 - RNA, 19 nt, Homo sapiens
  misc_RNA (1)...(19): siRNA sense strand
cagaugaggaagaggagga

SEQ ID NO: 2607955 - RNA, 19 nt, Homo sapiens
  misc_RNA (1)...(19): siRNA sense strand
ccgaaaagcgcacgagaca

SEQ ID NO: 2607956 - RNA, 19 nt, Homo sapiens
  misc_RNA (1)...(19): siRNA sense strand
gagcagauccgcagggaca

SEQ ID NO: 2607957 - RNA, 19 nt, Homo sapiens
  misc_RNA (1)...(19): siRNA sense strand
acgacauggugcagagcaa

SEQ ID NO: 2607958 - RNA, 19 nt, Homo sapiens
  misc_RNA (1)...(19): siRNA sense strand
gaacaagaaaggaccggua

SEQ ID NO: 2607959 - RNA, 19 nt, Homo sapiens
  misc_RNA (1)...(19): siRNA sense strand
guuacaaccaccugggcaa

SEQ ID NO: 2607960 - RNA, 19 nt, Homo sapiens
  misc_RNA (1)...(19): siRNA sense strand
ggacaaagucauagugcug

SEQ ID NO: 2607961 - RNA, 19 nt, Homo sapiens
  misc_RNA (1)...(19): siRNA sense strand
aggagguguccaagagcaa

SEQ ID NO: 2607962 - RNA, 19 nt, Homo sapiens
  misc_RNA (1)...(19): siRNA sense strand
agagcaacgugguggacga

SEQ ID NO: 2607963 - RNA, 19 nt, Homo sapiens
  misc_RNA (1)...(19): siRNA sense strand
cguacgugggugacagcaa

SEQ ID NO: 2607964 - RNA, 19 nt, Homo sapiens
  misc_RNA (1)...(19): siRNA sense strand
aggccaucgaggcgcaaua

SEQ ID NO: 2607965 - RNA, 19 nt, Homo sapiens
  misc_RNA (1)...(19): siRNA sense strand
gaguauaccucggagcuga

SEQ ID NO: 2607966 - RNA, 19 nt, Homo sapiens
  misc_RNA (1)...(19): siRNA sense strand
ucaucaaguaugugccgua

SEQ ID NO: 2607967 - RNA, 19 nt, Homo sapiens
  misc_RNA (1)...(19): siRNA sense strand
agucagaugcagagguaga

SEQ ID NO: 2607968 - RNA, 19 nt, Homo sapiens
  misc_RNA (1)...(19): siRNA sense strand
cgauaaugaggcugcguau

SEQ ID NO: 2607969 - RNA, 19 nt, Homo sapiens
  misc_RNA (1)...(19): siRNA sense strand
ggaaaucacugaagagcuc

SEQ ID NO: 2607970 - RNA, 19 nt, Homo sapiens
  misc_RNA (1)...(19): siRNA sense strand
guacuuaccuucugcgcuu

SEQ ID NO: 2607971 - RNA, 19 nt, Homo sapiens
  misc_RNA (1)...(19): siRNA sense strand
uagaaugugaccugagcaa

SEQ ID NO: 2607972 - RNA, 19 nt, Homo sapiens
  misc_RNA (1)...(19): siRNA sense strand
uugcagagaccgagaggca

SEQ ID NO: 2607973 - RNA, 19 nt, Homo sapiens
  misc_RNA (1)...(19): siRNA sense strand
uguccaaagaggaagagau

SEQ ID NO: 2607974 - RNA, 19 nt, Homo sapiens
  misc_RNA (1)...(19): siRNA sense strand
ugacaagcacugugaccga

SEQ ID NO: 2607975 - RNA, 19 nt, Homo sapiens
  misc_RNA (1)...(19): siRNA sense strand
guugagagaucgagggcga

SEQ ID NO: 2607976 - RNA, 19 nt, Homo sapiens
  misc_RNA (1)...(19): siRNA sense strand
gggaaacaauacuggcuga

SEQ ID NO: 2607977 - RNA, 19 nt, Homo sapiens
  misc_RNA (1)...(19): siRNA sense strand
gcuguaaugcagugggaga

SEQ ID NO: 2607978 - RNA, 19 nt, Homo sapiens
  misc_RNA (1)...(19): siRNA sense strand
acacagagcugcugcccau

SEQ ID NO: 2607979 - RNA, 19 nt, Homo sapiens
  misc_RNA (1)...(19): siRNA sense strand
gggagaaguaaaagauuau

SEQ ID NO: 2607980 - RNA, 19 nt, Homo sapiens
  misc_RNA (1)...(19): siRNA sense strand
gucgaaagcaugaaggaca

SEQ ID NO: 2607981 - RNA, 19 nt, Homo sapiens
  misc_RNA (1)...(19): siRNA sense strand
gcguuaaccggcagcagaa

SEQ ID NO: 2607982 - RNA, 19 nt, Homo sapiens
  misc_RNA (1)...(19): siRNA sense strand
ccaggaugaauuuggagaa

SEQ ID NO: 2607983 - RNA, 19 nt, Homo sapiens
  misc_RNA (1)...(19): siRNA sense strand
augcagugggagaaguaaa

SEQ ID NO: 2607984 - RNA, 19 nt, Homo sapiens
  misc_RNA (1)...(19): siRNA sense strand
cugaguucaaccugggaaa

SEQ ID NO: 2607985 - RNA, 19 nt, Homo sapiens
  misc_RNA (1)...(19): siRNA sense strand
uggaagacagagaaggaca

SEQ ID NO: 2607986 - RNA, 19 nt, Homo sapiens
  misc_RNA (1)...(19): siRNA sense strand
cuguauggagaaagaauga

SEQ ID NO: 2607987 - RNA, 19 nt, Homo sapiens
  misc_RNA (1)...(19): siRNA sense strand
gugccaucauccuggaaga

SEQ ID NO: 2607988 - RNA, 19 nt, Homo sapiens
  misc_RNA (1)...(19): siRNA sense strand
agaaauccugcaugagcaa

SEQ ID NO: 2607989 - RNA, 19 nt, Homo sapiens
  misc_RNA (1)...(19): siRNA sense strand
cuguguggcuguauggaga

SEQ ID NO: 2607990 - RNA, 19 nt, Homo sapiens
  misc_RNA (1)...(19): siRNA sense strand
agacaguggcagucaagau

SEQ ID NO: 2607991 - RNA, 19 nt, Homo sapiens
  misc_RNA (1)...(19): siRNA sense strand
cagaaauccugcaugagca

SEQ ID NO: 2607992 - RNA, 19 nt, Homo sapiens
  misc_RNA (1)...(19): siRNA sense strand
ggcaagacgcggaagcuca

SEQ ID NO: 2607993 - RNA, 19 nt, Homo sapiens
  misc_RNA (1)...(19): siRNA sense strand
cuuggaagacagagaagga

SEQ ID NO: 2607994 - RNA, 19 nt, Homo sapiens
  misc_RNA (1)...(19): siRNA sense strand
aguaaaagauuaugagccu

SEQ ID NO: 2607995 - RNA, 19 nt, Homo sapiens
  misc_RNA (1)...(19): siRNA sense strand
cagucaagaucuuucccua

SEQ ID NO: 2607996 - RNA, 19 nt, Homo sapiens
  misc_RNA (1)...(19): siRNA sense strand
cuguggaugaccuggcuaa

SEQ ID NO: 2607997 - RNA, 19 nt, Homo sapiens
  misc_RNA (1)...(19): siRNA sense strand
cuguaaugcagugggagaa

SEQ ID NO: 2607998 - RNA, 19 nt, Homo sapiens
  misc_RNA (1)...(19): siRNA sense strand
gcagaacacuucagagcag

SEQ ID NO: 2607999 - RNA, 19 nt, Homo sapiens
  misc_RNA (1)...(19): siRNA sense strand
cugaugagugcaaugacaa

SEQ ID NO: 2608000 - RNA, 19 nt, Homo sapiens
  misc_RNA (1)...(19): siRNA sense strand
ggcuguauggagaaagaau

SEQ ID NO: 2608001 - RNA, 19 nt, Homo sapiens
  misc_RNA (1)...(19): siRNA sense strand
aggcaaaauucaaagguaa

SEQ ID NO: 2608002 - RNA, 19 nt, Homo sapiens
  misc_RNA (1)...(19): siRNA sense strand
augaaguugcggagaauaa

SEQ ID NO: 2608003 - RNA, 19 nt, Homo sapiens
  misc_RNA (1)...(19): siRNA sense strand
auucaaagguaaaggucau

SEQ ID NO: 2608004 - RNA, 19 nt, Homo sapiens
  misc_RNA (1)...(19): siRNA sense strand
uggaaagaaggcaggcaaa

SEQ ID NO: 2608005 - RNA, 19 nt, Homo sapiens
  misc_RNA (1)...(19): siRNA sense strand
aagccuaacagaagagcaa

SEQ ID NO: 2608006 - RNA, 19 nt, Homo sapiens
  misc_RNA (1)...(19): siRNA sense strand
acaacgaagaauugagaga

SEQ ID NO: 2608007 - RNA, 19 nt, Homo sapiens
  misc_RNA (1)...(19): siRNA sense strand
agguaaaggucaugaggcu

SEQ ID NO: 2608008 - RNA, 19 nt, Homo sapiens
  misc_RNA (1)...(19): siRNA sense strand
ugaugaagagucaggaaau

SEQ ID NO: 2608009 - RNA, 19 nt, Homo sapiens
  misc_RNA (1)...(19): siRNA sense strand
ggcaaaauucaaagguaaa

SEQ ID NO: 2608010 - RNA, 19 nt, Homo sapiens
  misc_RNA (1)...(19): siRNA sense strand
gaaauaaacaacuggccuu

SEQ ID NO: 2608011 - RNA, 19 nt, Homo sapiens
  misc_RNA (1)...(19): siRNA sense strand
ugaguuaaguagaagccua

SEQ ID NO: 2608012 - RNA, 19 nt, Homo sapiens
  misc_RNA (1)...(19): siRNA sense strand
cuggaugcucagagauuaa

SEQ ID NO: 2608013 - RNA, 19 nt, Homo sapiens
  misc_RNA (1)...(19): siRNA sense strand
aaguagaagccuaacagaa

SEQ ID NO: 2608014 - RNA, 19 nt, Homo sapiens
  misc_RNA (1)...(19): siRNA sense strand
acaagauggugaaggaacu

SEQ ID NO: 2608015 - RNA, 19 nt, Homo sapiens
  misc_RNA (1)...(19): siRNA sense strand
guaaaggucaugaggcuga

SEQ ID NO: 2608016 - RNA, 19 nt, Homo sapiens
  misc_RNA (1)...(19): siRNA sense strand
cuuuaaaugaagaggaaac

SEQ ID NO: 2608017 - RNA, 19 nt, Homo sapiens
  misc_RNA (1)...(19): siRNA sense strand
ugaugaaguugcggagaau

SEQ ID NO: 2608018 - RNA, 19 nt, Homo sapiens
  misc_RNA (1)...(19): siRNA sense strand
aggaaacacugcuggacca

SEQ ID NO: 2608019 - RNA, 19 nt, Homo sapiens
  misc_RNA (1)...(19): siRNA sense strand
uagucagacccuaggaaau

SEQ ID NO: 2608020 - RNA, 19 nt, Homo sapiens
  misc_RNA (1)...(19): siRNA sense strand
acacgguugaagagguuaa

SEQ ID NO: 2608021 - RNA, 19 nt, Homo sapiens
  misc_RNA (1)...(19): siRNA sense strand
gugaaggaacugagccuga

SEQ ID NO: 2608022 - RNA, 19 nt, Homo sapiens
  misc_RNA (1)...(19): siRNA sense strand
cagagagacaagaugguga

SEQ ID NO: 2608023 - RNA, 19 nt, Homo sapiens
  misc_RNA (1)...(19): siRNA sense strand
aggcugaagacuugaagau

SEQ ID NO: 2608024 - RNA, 19 nt, Homo sapiens
  misc_RNA (1)...(19): siRNA sense strand
aggaggagucaaauggauu

SEQ ID NO: 2608025 - RNA, 19 nt, Homo sapiens
  misc_RNA (1)...(19): siRNA sense strand
cagaaauauuacugaagcu

SEQ ID NO: 2608026 - RNA, 19 nt, Homo sapiens
  misc_RNA (1)...(19): siRNA sense strand
agagagacaagauggugaa

SEQ ID NO: 2608027 - RNA, 19 nt, Homo sapiens
  misc_RNA (1)...(19): siRNA sense strand
acgaagaauugagagaaau

SEQ ID NO: 2608028 - RNA, 19 nt, Homo sapiens
  misc_RNA (1)...(19): siRNA sense strand
uccaaagagaacaguuaaa

SEQ ID NO: 2608029 - RNA, 19 nt, Homo sapiens
  misc_RNA (1)...(19): siRNA sense strand
aggagaauggcgugauuga

SEQ ID NO: 2608030 - RNA, 19 nt, Homo sapiens
  misc_RNA (1)...(19): siRNA sense strand
ccuaccagauuaugagcau

SEQ ID NO: 2608031 - RNA, 19 nt, Homo sapiens
  misc_RNA (1)...(19): siRNA sense strand
agagcaacaacgaagaauu

SEQ ID NO: 2608032 - RNA, 19 nt, Homo sapiens
  misc_RNA (1)...(19): siRNA sense strand
aucaaaaggaggagucaaa

SEQ ID NO: 2608033 - RNA, 19 nt, Homo sapiens
  misc_RNA (1)...(19): siRNA sense strand
gauuaaacgaagacauucu

SEQ ID NO: 2608034 - RNA, 19 nt, Homo sapiens
  misc_RNA (1)...(19): siRNA sense strand
uuggaaagaaggcaggcaa

SEQ ID NO: 2608035 - RNA, 19 nt, Homo sapiens
  misc_RNA (1)...(19): siRNA sense strand
auuaugagcauguagaaga

SEQ ID NO: 2608036 - RNA, 19 nt, Homo sapiens
  misc_RNA (1)...(19): siRNA sense strand
gucaaauggauuaaacgaa

SEQ ID NO: 2608037 - RNA, 19 nt, Homo sapiens
  misc_RNA (1)...(19): siRNA sense strand
gaaauauacccaagcugga

SEQ ID NO: 2608038 - RNA, 19 nt, Homo sapiens
  misc_RNA (1)...(19): siRNA sense strand
gccuaacagaagagcaaca

SEQ ID NO: 2608039 - RNA, 19 nt, Homo sapiens
  misc_RNA (1)...(19): siRNA sense strand
gcauguauuugauaaggca

SEQ ID NO: 2608040 - RNA, 19 nt, Homo sapiens
  misc_RNA (1)...(19): siRNA sense strand
agucaaauggauuaaacga

SEQ ID NO: 2608041 - RNA, 19 nt, Homo sapiens
  misc_RNA (1)...(19): siRNA sense strand
cagaagagcaacaacgaag

SEQ ID NO: 2608042 - RNA, 19 nt, Homo sapiens
  misc_RNA (1)...(19): siRNA sense strand
auggaaucagcaagagaaa

SEQ ID NO: 2608043 - RNA, 19 nt, Homo sapiens
  misc_RNA (1)...(19): siRNA sense strand
ggacuugagggcagcgaga

SEQ ID NO: 2608044 - RNA, 19 nt, Homo sapiens
  misc_RNA (1)...(19): siRNA sense strand
ccaagaagagcguggcgga

SEQ ID NO: 2608045 - RNA, 19 nt, Homo sapiens
  misc_RNA (1)...(19): siRNA sense strand
agauggaaucagcaagaga

SEQ ID NO: 2608046 - RNA, 19 nt, Homo sapiens
  misc_RNA (1)...(19): siRNA sense strand
agagcguggcggagagcau

SEQ ID NO: 2608047 - RNA, 19 nt, Homo sapiens
  misc_RNA (1)...(19): siRNA sense strand
aggcaagaggcaaggagaa

SEQ ID NO: 2608048 - RNA, 19 nt, Homo sapiens
  misc_RNA (1)...(19): siRNA sense strand
ccaagaggcaagaggcaag

SEQ ID NO: 2608049 - RNA, 19 nt, Homo sapiens
  misc_RNA (1)...(19): siRNA sense strand
gaggcaagaggcaaggaga

SEQ ID NO: 2608050 - RNA, 19 nt, Homo sapiens
  misc_RNA (1)...(19): siRNA sense strand
cggaagaaggacuggaaaa

SEQ ID NO: 2608051 - RNA, 19 nt, Homo sapiens
  misc_RNA (1)...(19): siRNA sense strand
acgacgugccugaggacaa

SEQ ID NO: 2608052 - RNA, 19 nt, Homo sapiens
  misc_RNA (1)...(19): siRNA sense strand
ccaaagaggccuucgccau

SEQ ID NO: 2608053 - RNA, 19 nt, Homo sapiens
  misc_RNA (1)...(19): siRNA sense strand
acgaggaggaaguggccua

SEQ ID NO: 2608054 - RNA, 19 nt, Homo sapiens
  misc_RNA (1)...(19): siRNA sense strand
ucaucaucuuugagggcau

SEQ ID NO: 2608055 - RNA, 19 nt, Homo sapiens
  misc_RNA (1)...(19): siRNA sense strand
ccgcaucaucccaggcauu

SEQ ID NO: 2608056 - RNA, 19 nt, Homo sapiens
  misc_RNA (1)...(19): siRNA sense strand
aggaacaggccgcacacaa

SEQ ID NO: 2608057 - RNA, 19 nt, Homo sapiens
  misc_RNA (1)...(19): siRNA sense strand
ccggaagaaggacuggaaa

SEQ ID NO: 2608058 - RNA, 19 nt, Homo sapiens
  misc_RNA (1)...(19): siRNA sense strand
ggcaggacuaugcgggcaa

SEQ ID NO: 2608059 - RNA, 19 nt, Homo sapiens
  misc_RNA (1)...(19): siRNA sense strand
caaugaacacggcacgcaa

SEQ ID NO: 2608060 - RNA, 19 nt, Homo sapiens
  misc_RNA (1)...(19): siRNA sense strand
cugagcagcagcaggaaca

SEQ ID NO: 2608061 - RNA, 19 nt, Homo sapiens
  misc_RNA (1)...(19): siRNA sense strand
gagcgugaacucagcguca

SEQ ID NO: 2608062 - RNA, 19 nt, Homo sapiens
  misc_RNA (1)...(19): siRNA sense strand
acucaguggccuaugcauu

SEQ ID NO: 2608063 - RNA, 19 nt, Homo sapiens
  misc_RNA (1)...(19): siRNA sense strand
uggucaugguggagagcau

SEQ ID NO: 2608064 - RNA, 19 nt, Homo sapiens
  misc_RNA (1)...(19): siRNA sense strand
ugguuguggaagaagauaa

SEQ ID NO: 2608065 - RNA, 19 nt, Homo sapiens
  misc_RNA (1)...(19): siRNA sense strand
cugcauuacuagcguacau

SEQ ID NO: 2608066 - RNA, 19 nt, Homo sapiens
  misc_RNA (1)...(19): siRNA sense strand
aguuaaugugguuguggaa

SEQ ID NO: 2608067 - RNA, 19 nt, Homo sapiens
  misc_RNA (1)...(19): siRNA sense strand
ugacaacugugcagggagu

SEQ ID NO: 2608068 - RNA, 19 nt, Homo sapiens
  misc_RNA (1)...(19): siRNA sense strand
ucucaaacaucaaggcaac

SEQ ID NO: 2608069 - RNA, 19 nt, Homo sapiens
  misc_RNA (1)...(19): siRNA sense strand
agaaauggggugauagauu

SEQ ID NO: 2608070 - RNA, 19 nt, Homo sapiens
  misc_RNA (1)...(19): siRNA sense strand
cuuuauuuggagagcgauu

SEQ ID NO: 2608071 - RNA, 19 nt, Homo sapiens
  misc_RNA (1)...(19): siRNA sense strand
caguagugauguugugacu

SEQ ID NO: 2608072 - RNA, 19 nt, Homo sapiens
  misc_RNA (1)...(19): siRNA sense strand
uggaagaagauaaaccaca

SEQ ID NO: 2608073 - RNA, 19 nt, Homo sapiens
  misc_RNA (1)...(19): siRNA sense strand
agccauuguuucugaagau

SEQ ID NO: 2608074 - RNA, 19 nt, Homo sapiens
  misc_RNA (1)...(19): siRNA sense strand
caauggaacuucugggcaa

SEQ ID NO: 2608075 - RNA, 19 nt, Homo sapiens
  misc_RNA (1)...(19): siRNA sense strand
aauccggagccaagagaaa

SEQ ID NO: 2608076 - RNA, 19 nt, Homo sapiens
  misc_RNA (1)...(19): siRNA sense strand
gauuauuugcugagcucaa

SEQ ID NO: 2608077 - RNA, 19 nt, Homo sapiens
  misc_RNA (1)...(19): siRNA sense strand
gcgagauccugaagggcga

SEQ ID NO: 2608078 - RNA, 19 nt, Homo sapiens
  misc_RNA (1)...(19): siRNA sense strand
caaaggauaaggaggccau

SEQ ID NO: 2608079 - RNA, 19 nt, Homo sapiens
  misc_RNA (1)...(19): siRNA sense strand
gcaacaugaucaauggaac

SEQ ID NO: 2608080 - RNA, 19 nt, Homo sapiens
  misc_RNA (1)...(19): siRNA sense strand
aguggaacgggcugagcaa

SEQ ID NO: 2608081 - RNA, 19 nt, Homo sapiens
  misc_RNA (1)...(19): siRNA sense strand
aagcuaauguacaaggagu

SEQ ID NO: 2608082 - RNA, 19 nt, Homo sapiens
  misc_RNA (1)...(19): siRNA sense strand
cagaaauuauugaggagca

SEQ ID NO: 2608083 - RNA, 19 nt, Homo sapiens
  misc_RNA (1)...(19): siRNA sense strand
gugaagaacuugauccuga

SEQ ID NO: 2608084 - RNA, 19 nt, Homo sapiens
  misc_RNA (1)...(19): siRNA sense strand
gguuguuccaguagauaaa

SEQ ID NO: 2608085 - RNA, 19 nt, Homo sapiens
  misc_RNA (1)...(19): siRNA sense strand
agugaugaggagagacuaa

SEQ ID NO: 2608086 - RNA, 19 nt, Homo sapiens
  misc_RNA (1)...(19): siRNA sense strand
agauaagaaaguugugaca

SEQ ID NO: 2608087 - RNA, 19 nt, Homo sapiens
  misc_RNA (1)...(19): siRNA sense strand
ugaagaugaaacagagaga

SEQ ID NO: 2608088 - RNA, 19 nt, Homo sapiens
  misc_RNA (1)...(19): siRNA sense strand
uugaggagcaucuggcaaa

SEQ ID NO: 2608089 - RNA, 19 nt, Homo sapiens
  misc_RNA (1)...(19): siRNA sense strand
acagaagcagccagagaau

SEQ ID NO: 2608090 - RNA, 19 nt, Homo sapiens
  misc_RNA (1)...(19): siRNA sense strand
agaaauuauugaggagcau

SEQ ID NO: 2608091 - RNA, 19 nt, Homo sapiens
  misc_RNA (1)...(19): siRNA sense strand
agacaauaguugaggcugc

SEQ ID NO: 2608092 - RNA, 19 nt, Homo sapiens
  misc_RNA (1)...(19): siRNA sense strand
ugauauccuugcuggaaaa

SEQ ID NO: 2608093 - RNA, 19 nt, Homo sapiens
  misc_RNA (1)...(19): siRNA sense strand
cgugaagaugaaacagaga

SEQ ID NO: 2608094 - RNA, 19 nt, Homo sapiens
  misc_RNA (1)...(19): siRNA sense strand
ccgagagcucccugaaaca

SEQ ID NO: 2608095 - RNA, 19 nt, Homo sapiens
  misc_RNA (1)...(19): siRNA sense strand
caagugaugaggagagacu

SEQ ID NO: 2608096 - RNA, 19 nt, Homo sapiens
  misc_RNA (1)...(19): siRNA sense strand
agagaauuugcaagacaau

SEQ ID NO: 2608097 - RNA, 19 nt, Homo sapiens
  misc_RNA (1)...(19): siRNA sense strand
agacaauacucuagggaca

SEQ ID NO: 2608098 - RNA, 19 nt, Homo sapiens
  misc_RNA (1)...(19): siRNA sense strand
aggaaagaagagugggaaa

SEQ ID NO: 2608099 - RNA, 19 nt, Homo sapiens
  misc_RNA (1)...(19): siRNA sense strand
cagaaauggaacacagaca

SEQ ID NO: 2608100 - RNA, 19 nt, Homo sapiens
  misc_RNA (1)...(19): siRNA sense strand
cagcuuuaaucgaugggaa

SEQ ID NO: 2608101 - RNA, 19 nt, Homo sapiens
  misc_RNA (1)...(19): siRNA sense strand
guaaauaaugccagccuga

SEQ ID NO: 2608102 - RNA, 19 nt, Homo sapiens
  misc_RNA (1)...(19): siRNA sense strand
gggagaauaaguuggcuga

SEQ ID NO: 2608103 - RNA, 19 nt, Homo sapiens
  misc_RNA (1)...(19): siRNA sense strand
ccuucgaccaggagucaaa

SEQ ID NO: 2608104 - RNA, 19 nt, Homo sapiens
  misc_RNA (1)...(19): siRNA sense strand
ggacagaaaucucuuggga

SEQ ID NO: 2608105 - RNA, 19 nt, Homo sapiens
  misc_RNA (1)...(19): siRNA sense strand
ggacuuaccuucacccaga

SEQ ID NO: 2608106 - RNA, 19 nt, Homo sapiens
  misc_RNA (1)...(19): siRNA sense strand
agaaggugaaugagaagau

SEQ ID NO: 2608107 - RNA, 19 nt, Homo sapiens
  misc_RNA (1)...(19): siRNA sense strand
cguacugugaccuaggaaa

SEQ ID NO: 2608108 - RNA, 19 nt, Homo sapiens
  misc_RNA (1)...(19): siRNA sense strand
cagggaaagcaucaggcaa

SEQ ID NO: 2608109 - RNA, 19 nt, Homo sapiens
  misc_RNA (1)...(19): siRNA sense strand
cuaucuaccagaaggugaa

SEQ ID NO: 2608110 - RNA, 19 nt, Homo sapiens
  misc_RNA (1)...(19): siRNA sense strand
aggugaaugagaagauuga

SEQ ID NO: 2608111 - RNA, 19 nt, Homo sapiens
  misc_RNA (1)...(19): siRNA sense strand
agggaaagcaucaggcaac

SEQ ID NO: 2608112 - RNA, 19 nt, Homo sapiens
  misc_RNA (1)...(19): siRNA sense strand
gucuuguaguggaguggaa

SEQ ID NO: 2608113 - RNA, 19 nt, Homo sapiens
  misc_RNA (1)...(19): siRNA sense strand
ggucuguaacuauggacuu

SEQ ID NO: 2608114 - RNA, 19 nt, Homo sapiens
  misc_RNA (1)...(19): siRNA sense strand
acaggaaagaagaguggga

SEQ ID NO: 2608115 - RNA, 19 nt, Homo sapiens
  misc_RNA (1)...(19): siRNA sense strand
cugcuaaggaugucuucaa

SEQ ID NO: 2608116 - RNA, 19 nt, Homo sapiens
  misc_RNA (1)...(19): siRNA sense strand
gaaaccaaauauaaggucu

SEQ ID NO: 2608117 - RNA, 19 nt, Homo sapiens
  misc_RNA (1)...(19): siRNA sense strand
augcuggauuguagaacuu

SEQ ID NO: 2608118 - RNA, 19 nt, Homo sapiens
  misc_RNA (1)...(19): siRNA sense strand
uggcaaacuuuauggcuga

SEQ ID NO: 2608119 - RNA, 19 nt, Homo sapiens
  misc_RNA (1)...(19): siRNA sense strand
caucugggcucuauggcua

SEQ ID NO: 2608120 - RNA, 19 nt, Homo sapiens
  misc_RNA (1)...(19): siRNA sense strand
agaaaagaaugguggaaag

SEQ ID NO: 2608121 - RNA, 19 nt, Homo sapiens
  misc_RNA (1)...(19): siRNA sense strand
ccaaauaucuccuggucug

SEQ ID NO: 2608122 - RNA, 19 nt, Homo sapiens
  misc_RNA (1)...(19): siRNA sense strand
cccaagugguguucgucaa

SEQ ID NO: 2608123 - RNA, 19 nt, Homo sapiens
  misc_RNA (1)...(19): siRNA sense strand
aagaaaagaaugguggaaa

SEQ ID NO: 2608124 - RNA, 19 nt, Homo sapiens
  misc_RNA (1)...(19): siRNA sense strand
gcaugcugccauaggauca

SEQ ID NO: 2608125 - RNA, 19 nt, Homo sapiens
  misc_RNA (1)...(19): siRNA sense strand
aaucuauaccagugggagu

SEQ ID NO: 2608126 - RNA, 19 nt, Homo sapiens
  misc_RNA (1)...(19): siRNA sense strand
cugugauaauccauggaca

SEQ ID NO: 2608127 - RNA, 19 nt, Homo sapiens
  misc_RNA (1)...(19): siRNA sense strand
aguuacuuauccugaagaa

SEQ ID NO: 2608128 - RNA, 19 nt, Homo sapiens
  misc_RNA (1)...(19): siRNA sense strand
uguaagaggugcuacgaga

SEQ ID NO: 2608129 - RNA, 19 nt, Homo sapiens
  misc_RNA (1)...(19): siRNA sense strand
uggucaacgcgcugggcaa

SEQ ID NO: 2608130 - RNA, 19 nt, Homo sapiens
  misc_RNA (1)...(19): siRNA sense strand
gagcugaagaagcggcuga

SEQ ID NO: 2608131 - RNA, 19 nt, Homo sapiens
  misc_RNA (1)...(19): siRNA sense strand
ccaaaggccugggcaagua

SEQ ID NO: 2608132 - RNA, 19 nt, Homo sapiens
  misc_RNA (1)...(19): siRNA sense strand
ccaugugauugaaggcgau

SEQ ID NO: 2608133 - RNA, 19 nt, Homo sapiens
  misc_RNA (1)...(19): siRNA sense strand
gcaauaugucggacgccuu

SEQ ID NO: 2608134 - RNA, 19 nt, Homo sapiens
  misc_RNA (1)...(19): siRNA sense strand
ugucggacgccuuggccaa

SEQ ID NO: 2608135 - RNA, 19 nt, Homo sapiens
  misc_RNA (1)...(19): siRNA sense strand
uuguggaguucgacaugaa

SEQ ID NO: 2608136 - RNA, 19 nt, Homo sapiens
  misc_RNA (1)...(19): siRNA sense strand
cgaaggagauucagaggca

SEQ ID NO: 2608137 - RNA, 19 nt, Homo sapiens
  misc_RNA (1)...(19): siRNA sense strand
gguccugagcagugagaga

SEQ ID NO: 2608138 - RNA, 19 nt, Homo sapiens
  misc_RNA (1)...(19): siRNA sense strand
cguccaaggcggagaaucu

SEQ ID NO: 2608139 - RNA, 19 nt, Homo sapiens
  misc_RNA (1)...(19): siRNA sense strand
gcucagagguggagugcuc

SEQ ID NO: 2608140 - RNA, 19 nt, Homo sapiens
  misc_RNA (1)...(19): siRNA sense strand
agucagaacuccagcacca

SEQ ID NO: 2608141 - RNA, 19 nt, Homo sapiens
  misc_RNA (1)...(19): siRNA sense strand
gacaagggcuggaggagga

SEQ ID NO: 2608142 - RNA, 19 nt, Homo sapiens
  misc_RNA (1)...(19): siRNA sense strand
gggaaggacacguacgaca

SEQ ID NO: 2608143 - RNA, 19 nt, Homo sapiens
  misc_RNA (1)...(19): siRNA sense strand
agacggauuucgaaggaga

SEQ ID NO: 2608144 - RNA, 19 nt, Homo sapiens
  misc_RNA (1)...(19): siRNA sense strand
cuggcaaauuugauagaga

SEQ ID NO: 2608145 - RNA, 19 nt, Homo sapiens
  misc_RNA (1)...(19): siRNA sense strand
gguccaucuucaagggcuu

SEQ ID NO: 2608146 - RNA, 19 nt, Homo sapiens
  misc_RNA (1)...(19): siRNA sense strand
ggaguuaccuggagggcag

SEQ ID NO: 2608147 - RNA, 19 nt, Homo sapiens
  misc_RNA (1)...(19): siRNA sense strand
gcaucgugucucagaucaa

SEQ ID NO: 2608148 - RNA, 19 nt, Homo sapiens
  misc_RNA (1)...(19): siRNA sense strand
acaucuguccugugagcua

SEQ ID NO: 2608149 - RNA, 19 nt, Homo sapiens
  misc_RNA (1)...(19): siRNA sense strand
caaacaaggucgacucgga

SEQ ID NO: 2608150 - RNA, 19 nt, Homo sapiens
  misc_RNA (1)...(19): siRNA sense strand
ggacagcaaacaaggucga

SEQ ID NO: 2608151 - RNA, 19 nt, Homo sapiens
  misc_RNA (1)...(19): siRNA sense strand
aggaauuaaaagacggauu

SEQ ID NO: 2608152 - RNA, 19 nt, Homo sapiens
  misc_RNA (1)...(19): siRNA sense strand
auuuaauggcuuugggauu

SEQ ID NO: 2608153 - RNA, 19 nt, Homo sapiens
  misc_RNA (1)...(19): siRNA sense strand
aguugugguuccugguaua

SEQ ID NO: 2608154 - RNA, 19 nt, Homo sapiens
  misc_RNA (1)...(19): siRNA sense strand
caaagaucuaauaggguuu

SEQ ID NO: 2608155 - RNA, 19 nt, Homo sapiens
  misc_RNA (1)...(19): siRNA sense strand
cauuagugguguuguacau

SEQ ID NO: 2608156 - RNA, 19 nt, Homo sapiens
  misc_RNA (1)...(19): siRNA sense strand
caaugaugucaaagaucua

SEQ ID NO: 2608157 - RNA, 19 nt, Homo sapiens
  misc_RNA (1)...(19): siRNA sense strand
ucaaagaucuaauaggguu

SEQ ID NO: 2608158 - RNA, 19 nt, Homo sapiens
  misc_RNA (1)...(19): siRNA sense strand
cagugguuguggagacauu

SEQ ID NO: 2608159 - RNA, 19 nt, Homo sapiens
  misc_RNA (1)...(19): siRNA sense strand
uggcacaaaugauggcuga

SEQ ID NO: 2608160 - RNA, 19 nt, Homo sapiens
  misc_RNA (1)...(19): siRNA sense strand
acucaaguuugcagaacca

SEQ ID NO: 2608161 - RNA, 19 nt, Homo sapiens
  misc_RNA (1)...(19): siRNA sense strand
ccucagugauuggagacaa

SEQ ID NO: 2608162 - RNA, 19 nt, Homo sapiens
  misc_RNA (1)...(19): siRNA sense strand
uggaaugguguuuggcgua

SEQ ID NO: 2608163 - RNA, 19 nt, Homo sapiens
  misc_RNA (1)...(19): siRNA sense strand
cuguauaagugcaucaacu

SEQ ID NO: 2608164 - RNA, 19 nt, Homo sapiens
  misc_RNA (1)...(19): siRNA sense strand
augaagacuggcuggaaaa

SEQ ID NO: 2608165 - RNA, 19 nt, Homo sapiens
  misc_RNA (1)...(19): siRNA sense strand
aagacuggcuggaaaacaa

SEQ ID NO: 2608166 - RNA, 19 nt, Homo sapiens
  misc_RNA (1)...(19): siRNA sense strand
aguccagcagcuaaggaua

SEQ ID NO: 2608167 - RNA, 19 nt, Homo sapiens
  misc_RNA (1)...(19): siRNA sense strand
guuacuaaugugcaagauu

SEQ ID NO: 2608168 - RNA, 19 nt, Homo sapiens
  misc_RNA (1)...(19): siRNA sense strand
ucucaggagcucuggcuau

SEQ ID NO: 2608169 - RNA, 19 nt, Homo sapiens
  misc_RNA (1)...(19): siRNA sense strand
cauuauuuauccuggagca

SEQ ID NO: 2608170 - RNA, 19 nt, Homo sapiens
  misc_RNA (1)...(19): siRNA sense strand
gcggcagguucgaagggaa

SEQ ID NO: 2608171 - RNA, 19 nt, Homo sapiens
  misc_RNA (1)...(19): siRNA sense strand
gagcaacucuggugaggga

SEQ ID NO: 2608172 - RNA, 19 nt, Homo sapiens
  misc_RNA (1)...(19): siRNA sense strand
acacagaggcagacgacga

SEQ ID NO: 2608173 - RNA, 19 nt, Homo sapiens
  misc_RNA (1)...(19): siRNA sense strand
cuguacaauuugauaguca

SEQ ID NO: 2608174 - RNA, 19 nt, Homo sapiens
  misc_RNA (1)...(19): siRNA sense strand
gguucgaagggaaguaaga

SEQ ID NO: 2608175 - RNA, 19 nt, Homo sapiens
  misc_RNA (1)...(19): siRNA sense strand
agaaacagauggaagugca

SEQ ID NO: 2608176 - RNA, 19 nt, Homo sapiens
  misc_RNA (1)...(19): siRNA sense strand
ugagaagaauuuauggagu

SEQ ID NO: 2608177 - RNA, 19 nt, Homo sapiens
  misc_RNA (1)...(19): siRNA sense strand
aguaagaaacagauggaag

SEQ ID NO: 2608178 - RNA, 19 nt, Homo sapiens
  misc_RNA (1)...(19): siRNA sense strand
guuaaaacuggcugaagaa

SEQ ID NO: 2608179 - RNA, 19 nt, Homo sapiens
  misc_RNA (1)...(19): siRNA sense strand
uguuaaaacuggcugaaga

SEQ ID NO: 2608180 - RNA, 19 nt, Homo sapiens
  misc_RNA (1)...(19): siRNA sense strand
agggaugaugagaagaauu

SEQ ID NO: 2608181 - RNA, 19 nt, Homo sapiens
  misc_RNA (1)...(19): siRNA sense strand
uggugagggaugaugagaa

SEQ ID NO: 2608182 - RNA, 19 nt, Homo sapiens
  misc_RNA (1)...(19): siRNA sense strand
aggcagacgacgacagaac

SEQ ID NO: 2608183 - RNA, 19 nt, Homo sapiens
  misc_RNA (1)...(19): siRNA sense strand
gaggaguggcagaagcuca

SEQ ID NO: 2608184 - RNA, 19 nt, Homo sapiens
  misc_RNA (1)...(19): siRNA sense strand
aggaguggcagaagcucaa

SEQ ID NO: 2608185 - RNA, 19 nt, Homo sapiens
  misc_RNA (1)...(19): siRNA sense strand
uucgaagggaaguaagaaa

SEQ ID NO: 2608186 - RNA, 19 nt, Homo sapiens
  misc_RNA (1)...(19): siRNA sense strand
ggccaaagacucagaggag

SEQ ID NO: 2608187 - RNA, 19 nt, Homo sapiens
  misc_RNA (1)...(19): siRNA sense strand
gaaacagauggaagugcau

SEQ ID NO: 2608188 - RNA, 19 nt, Homo sapiens
  misc_RNA (1)...(19): siRNA sense strand
ucaucaaggugcugggaac

SEQ ID NO: 2608189 - RNA, 19 nt, Homo sapiens
  misc_RNA (1)...(19): siRNA sense strand
aggacaagagguucaagaa

SEQ ID NO: 2608190 - RNA, 19 nt, Homo sapiens
  misc_RNA (1)...(19): siRNA sense strand
cgugacagcgggaagguga

SEQ ID NO: 2608191 - RNA, 19 nt, Homo sapiens
  misc_RNA (1)...(19): siRNA sense strand
auauugugaggcugagaua

SEQ ID NO: 2608192 - RNA, 19 nt, Homo sapiens
  misc_RNA (1)...(19): siRNA sense strand
uggacaaagguguucaaau

SEQ ID NO: 2608193 - RNA, 19 nt, Homo sapiens
  misc_RNA (1)...(19): siRNA sense strand
acuccaguggcgagaagaa

SEQ ID NO: 2608194 - RNA, 19 nt, Homo sapiens
  misc_RNA (1)...(19): siRNA sense strand
cguagccacucuaggccaa

SEQ ID NO: 2608195 - RNA, 19 nt, Homo sapiens
  misc_RNA (1)...(19): siRNA sense strand
uggcuuacacggacaucaa

SEQ ID NO: 2608196 - RNA, 19 nt, Homo sapiens
  misc_RNA (1)...(19): siRNA sense strand
ccagggaacuagucgccau

SEQ ID NO: 2608197 - RNA, 19 nt, Homo sapiens
  misc_RNA (1)...(19): siRNA sense strand
gagacgaugccgcaggaga

SEQ ID NO: 2608198 - RNA, 19 nt, Homo sapiens
  misc_RNA (1)...(19): siRNA sense strand
acacaucagcccagcgcua

SEQ ID NO: 2608199 - RNA, 19 nt, Homo sapiens
  misc_RNA (1)...(19): siRNA sense strand
gcaucgugcaccagaucaa

SEQ ID NO: 2608200 - RNA, 19 nt, Homo sapiens
  misc_RNA (1)...(19): siRNA sense strand
cagccgaauuggaugcgua

SEQ ID NO: 2608201 - RNA, 19 nt, Homo sapiens
  misc_RNA (1)...(19): siRNA sense strand
ggacuucagaaaugggaca

SEQ ID NO: 2608202 - RNA, 19 nt, Homo sapiens
  misc_RNA (1)...(19): siRNA sense strand
augcuaagaaggucgcaaa

SEQ ID NO: 2608203 - RNA, 19 nt, Homo sapiens
  misc_RNA (1)...(19): siRNA sense strand
ggccuggcuuugugggcaa

SEQ ID NO: 2608204 - RNA, 19 nt, Homo sapiens
  misc_RNA (1)...(19): siRNA sense strand
ggaagauggccgagagauu

SEQ ID NO: 2608205 - RNA, 19 nt, Homo sapiens
  misc_RNA (1)...(19): siRNA sense strand
gguguaaaguugaggcaau

SEQ ID NO: 2608206 - RNA, 19 nt, Homo sapiens
  misc_RNA (1)...(19): siRNA sense strand
ccuugaugcugaugagaaa

SEQ ID NO: 2608207 - RNA, 19 nt, Homo sapiens
  misc_RNA (1)...(19): siRNA sense strand
ggacaaagagagugagcca

SEQ ID NO: 2608208 - RNA, 19 nt, Homo sapiens
  misc_RNA (1)...(19): siRNA sense strand
cagcagaggaagugaaaca

SEQ ID NO: 2608209 - RNA, 19 nt, Homo sapiens
  misc_RNA (1)...(19): siRNA sense strand
ggucgagaguacagaagaa

SEQ ID NO: 2608210 - RNA, 19 nt, Homo sapiens
  misc_RNA (1)...(19): siRNA sense strand
gcugauagaaauuggagaa

SEQ ID NO: 2608211 - RNA, 19 nt, Homo sapiens
  misc_RNA (1)...(19): siRNA sense strand
acagaaaguuacagaggau

SEQ ID NO: 2608212 - RNA, 19 nt, Homo sapiens
  misc_RNA (1)...(19): siRNA sense strand
augaagaaguugaugaaga

SEQ ID NO: 2608213 - RNA, 19 nt, Homo sapiens
  misc_RNA (1)...(19): siRNA sense strand
gagaugaagaugaagaaau

SEQ ID NO: 2608214 - RNA, 19 nt, Homo sapiens
  misc_RNA (1)...(19): siRNA sense strand
ggcuaaagcuggugagaag

SEQ ID NO: 2608215 - RNA, 19 nt, Homo sapiens
  misc_RNA (1)...(19): siRNA sense strand
cuguaaugauacugaagaa

SEQ ID NO: 2608216 - RNA, 19 nt, Homo sapiens
  misc_RNA (1)...(19): siRNA sense strand
gaagagaaauacagggacu

SEQ ID NO: 2608217 - RNA, 19 nt, Homo sapiens
  misc_RNA (1)...(19): siRNA sense strand
ugguaaagcacgcaauaaa

SEQ ID NO: 2608218 - RNA, 19 nt, Homo sapiens
  misc_RNA (1)...(19): siRNA sense strand
agucuaagccaguggaaaa

SEQ ID NO: 2608219 - RNA, 19 nt, Homo sapiens
  misc_RNA (1)...(19): siRNA sense strand
augaagaaauugauggaga

SEQ ID NO: 2608220 - RNA, 19 nt, Homo sapiens
  misc_RNA (1)...(19): siRNA sense strand
uuaacaaggcauugacaaa

SEQ ID NO: 2608221 - RNA, 19 nt, Homo sapiens
  misc_RNA (1)...(19): siRNA sense strand
cuaaauacggggaaagaaa

SEQ ID NO: 2608222 - RNA, 19 nt, Homo sapiens
  misc_RNA (1)...(19): siRNA sense strand
acaaauugaucauggacau

SEQ ID NO: 2608223 - RNA, 19 nt, Homo sapiens
  misc_RNA (1)...(19): siRNA sense strand
ccgaagugaaucugagcaa

SEQ ID NO: 2608224 - RNA, 19 nt, Homo sapiens
  misc_RNA (1)...(19): siRNA sense strand
guacagaagaagagcagga

SEQ ID NO: 2608225 - RNA, 19 nt, Homo sapiens
  misc_RNA (1)...(19): siRNA sense strand
ugaagaaauugauggagau

SEQ ID NO: 2608226 - RNA, 19 nt, Homo sapiens
  misc_RNA (1)...(19): siRNA sense strand
agucaaacagcuaaugaaa

SEQ ID NO: 2608227 - RNA, 19 nt, Homo sapiens
  misc_RNA (1)...(19): siRNA sense strand
gggcaauggaguuugaaga

SEQ ID NO: 2608228 - RNA, 19 nt, Homo sapiens
  misc_RNA (1)...(19): siRNA sense strand
gggagaugaagaugaagaa

SEQ ID NO: 2608229 - RNA, 19 nt, Homo sapiens
  misc_RNA (1)...(19): siRNA sense strand
ucagaaagccucagcaaaa

SEQ ID NO: 2608230 - RNA, 19 nt, Homo sapiens
  misc_RNA (1)...(19): siRNA sense strand
auacaaaggaagggagauu

SEQ ID NO: 2608231 - RNA, 19 nt, Homo sapiens
  misc_RNA (1)...(19): siRNA sense strand
cgaucaugagaaagauaaa

SEQ ID NO: 2608232 - RNA, 19 nt, Homo sapiens
  misc_RNA (1)...(19): siRNA sense strand
caagaacacagcagagcaa

SEQ ID NO: 2608233 - RNA, 19 nt, Homo sapiens
  misc_RNA (1)...(19): siRNA sense strand
ggaaagaugccaaguucau

SEQ ID NO: 2608234 - RNA, 19 nt, Homo sapiens
  misc_RNA (1)...(19): siRNA sense strand
guuaaauacucggcugaaa

SEQ ID NO: 2608235 - RNA, 19 nt, Homo sapiens
  misc_RNA (1)...(19): siRNA sense strand
ggaucaaaccucacugcaa

SEQ ID NO: 2608236 - RNA, 19 nt, Homo sapiens
  misc_RNA (1)...(19): siRNA sense strand
guauuuaaguugggaaaca

SEQ ID NO: 2608237 - RNA, 19 nt, Homo sapiens
  misc_RNA (1)...(19): siRNA sense strand
guugauaugugaagagcca

SEQ ID NO: 2608238 - RNA, 19 nt, Homo sapiens
  misc_RNA (1)...(19): siRNA sense strand
cagauaaagcuguagacuu

SEQ ID NO: 2608239 - RNA, 19 nt, Homo sapiens
  misc_RNA (1)...(19): siRNA sense strand
guggauuuggugaaagaaa

SEQ ID NO: 2608240 - RNA, 19 nt, Homo sapiens
  misc_RNA (1)...(19): siRNA sense strand
cuucagaggcacagaaagu

SEQ ID NO: 2608241 - RNA, 19 nt, Homo sapiens
  misc_RNA (1)...(19): siRNA sense strand
ucaccaaacaggagcucaa

SEQ ID NO: 2608242 - RNA, 19 nt, Homo sapiens
  misc_RNA (1)...(19): siRNA sense strand
gaaaggaaaagaugguaaa

SEQ ID NO: 2608243 - RNA, 19 nt, Homo sapiens
  misc_RNA (1)...(19): siRNA sense strand
ccgaacaacauuaagucaa

SEQ ID NO: 2608244 - RNA, 19 nt, Homo sapiens
  misc_RNA (1)...(19): siRNA sense strand
agacuuaaauccagaccuu

SEQ ID NO: 2608245 - RNA, 19 nt, Homo sapiens
  misc_RNA (1)...(19): siRNA sense strand
uguacaaacugcuugaaau

SEQ ID NO: 2608246 - RNA, 19 nt, Homo sapiens
  misc_RNA (1)...(19): siRNA sense strand
ggagaaaacaagucaaaca

SEQ ID NO: 2608247 - RNA, 19 nt, Homo sapiens
  misc_RNA (1)...(19): siRNA sense strand
cuuguuggcuugaaguaaa

SEQ ID NO: 2608248 - RNA, 19 nt, Homo sapiens
  misc_RNA (1)...(19): siRNA sense strand
gcagaucaugugugagcua

SEQ ID NO: 2608249 - RNA, 19 nt, Homo sapiens
  misc_RNA (1)...(19): siRNA sense strand
cuaccgaucaugagaaaga

SEQ ID NO: 2608250 - RNA, 19 nt, Homo sapiens
  misc_RNA (1)...(19): siRNA sense strand
guuguaaucccaauggaaa

SEQ ID NO: 2608251 - RNA, 19 nt, Homo sapiens
  misc_RNA (1)...(19): siRNA sense strand
ugaugaugguauuggcuau

SEQ ID NO: 2608252 - RNA, 19 nt, Homo sapiens
  misc_RNA (1)...(19): siRNA sense strand
augaggaauuugaugagaa

SEQ ID NO: 2608253 - RNA, 19 nt, Homo sapiens
  misc_RNA (1)...(19): siRNA sense strand
cugagcagcugcagaaaca

SEQ ID NO: 2608254 - RNA, 19 nt, Homo sapiens
  misc_RNA (1)...(19): siRNA sense strand
cugauaucauuguggguca

SEQ ID NO: 2608255 - RNA, 19 nt, Homo sapiens
  misc_RNA (1)...(19): siRNA sense strand
aaugaaacagcaagacuua

SEQ ID NO: 2608256 - RNA, 19 nt, Homo sapiens
  misc_RNA (1)...(19): siRNA sense strand
agaaaggaaaagaugguaa

SEQ ID NO: 2608257 - RNA, 19 nt, Homo sapiens
  misc_RNA (1)...(19): siRNA sense strand
aaagacaagaggaauguaa

SEQ ID NO: 2608258 - RNA, 19 nt, Homo sapiens
  misc_RNA (1)...(19): siRNA sense strand
cuuaugaggaucaguacaa

SEQ ID NO: 2608259 - RNA, 19 nt, Homo sapiens
  misc_RNA (1)...(19): siRNA sense strand
cggaguggauuuggugaaa

SEQ ID NO: 2608260 - RNA, 19 nt, Homo sapiens
  misc_RNA (1)...(19): siRNA sense strand
uacagaggauggagaacaa

SEQ ID NO: 2608261 - RNA, 19 nt, Homo sapiens
  misc_RNA (1)...(19): siRNA sense strand
caauaaagacaagaggaau

SEQ ID NO: 2608262 - RNA, 19 nt, Homo sapiens
  misc_RNA (1)...(19): siRNA sense strand
agaaauggguugagcccga

SEQ ID NO: 2608263 - RNA, 19 nt, Homo sapiens
  misc_RNA (1)...(19): siRNA sense strand
ggaacugggugguggagca

SEQ ID NO: 2608264 - RNA, 19 nt, Homo sapiens
  misc_RNA (1)...(19): siRNA sense strand
cugagaggaaggaggaaga

SEQ ID NO: 2608265 - RNA, 19 nt, Homo sapiens
  misc_RNA (1)...(19): siRNA sense strand
gaucagaggucccuggagu

SEQ ID NO: 2608266 - RNA, 19 nt, Homo sapiens
  misc_RNA (1)...(19): siRNA sense strand
gaaaguaccaucaaagcga

SEQ ID NO: 2608267 - RNA, 19 nt, Homo sapiens
  misc_RNA (1)...(19): siRNA sense strand
ugggcaauauuuaagggaa

SEQ ID NO: 2608268 - RNA, 19 nt, Homo sapiens
  misc_RNA (1)...(19): siRNA sense strand
ggaaggaggaagaggaugc

SEQ ID NO: 2608269 - RNA, 19 nt, Homo sapiens
  misc_RNA (1)...(19): siRNA sense strand
acacugaauuucugggaag

SEQ ID NO: 2608270 - RNA, 19 nt, Homo sapiens
  misc_RNA (1)...(19): siRNA sense strand
agaggaaggaggaagagga

SEQ ID NO: 2608271 - RNA, 19 nt, Homo sapiens
  misc_RNA (1)...(19): siRNA sense strand
guucugaauuuaaggaggu

SEQ ID NO: 2608272 - RNA, 19 nt, Homo sapiens
  misc_RNA (1)...(19): siRNA sense strand
gcgcuaugagagugggaaa

SEQ ID NO: 2608273 - RNA, 19 nt, Homo sapiens
  misc_RNA (1)...(19): siRNA sense strand
augaagagaugauggccaa

SEQ ID NO: 2608274 - RNA, 19 nt, Homo sapiens
  misc_RNA (1)...(19): siRNA sense strand
ccgcagaacucuaauggca

SEQ ID NO: 2608275 - RNA, 19 nt, Homo sapiens
  misc_RNA (1)...(19): siRNA sense strand
gggaaauauggcuaugaga

SEQ ID NO: 2608276 - RNA, 19 nt, Homo sapiens
  misc_RNA (1)...(19): siRNA sense strand
cgguguaugaagagaugau

SEQ ID NO: 2608277 - RNA, 19 nt, Homo sapiens
  misc_RNA (1)...(19): siRNA sense strand
uguuacauccggugaucaa

SEQ ID NO: 2608278 - RNA, 19 nt, Homo sapiens
  misc_RNA (1)...(19): siRNA sense strand
gcaauggcguggacggugu

SEQ ID NO: 2608279 - RNA, 19 nt, Homo sapiens
  misc_RNA (1)...(19): siRNA sense strand
aauauggcuaugagaguau

SEQ ID NO: 2608280 - RNA, 19 nt, Homo sapiens
  misc_RNA (1)...(19): siRNA sense strand
gaucaugggucuagacgug

SEQ ID NO: 2608281 - RNA, 19 nt, Homo sapiens
  misc_RNA (1)...(19): siRNA sense strand
gcucuauagauguggcuaa

SEQ ID NO: 2608282 - RNA, 19 nt, Homo sapiens
  misc_RNA (1)...(19): siRNA sense strand
aauucagaggagugggaua

SEQ ID NO: 2608283 - RNA, 19 nt, Homo sapiens
  misc_RNA (1)...(19): siRNA sense strand
agacagauggagagaagca

SEQ ID NO: 2608284 - RNA, 19 nt, Homo sapiens
  misc_RNA (1)...(19): siRNA sense strand
agauggaagaggugcaaaa

SEQ ID NO: 2608285 - RNA, 19 nt, Homo sapiens
  misc_RNA (1)...(19): siRNA sense strand
auucagaggagugggauaa

SEQ ID NO: 2608286 - RNA, 19 nt, Homo sapiens
  misc_RNA (1)...(19): siRNA sense strand
gggaugagauggaagaggu

SEQ ID NO: 2608287 - RNA, 19 nt, Homo sapiens
  misc_RNA (1)...(19): siRNA sense strand
caagagaccugaugcggga

SEQ ID NO: 2608288 - RNA, 19 nt, Homo sapiens
  misc_RNA (1)...(19): siRNA sense strand
uccuaaaguucgugaaucu

SEQ ID NO: 2608289 - RNA, 19 nt, Homo sapiens
  misc_RNA (1)...(19): siRNA sense strand
gagagaucacagaugaauu

SEQ ID NO: 2608290 - RNA, 19 nt, Homo sapiens
  misc_RNA (1)...(19): siRNA sense strand
guuacgauuuacuggucaa

SEQ ID NO: 2608291 - RNA, 19 nt, Homo sapiens
  misc_RNA (1)...(19): siRNA sense strand
aggagagaucacagaugaa

SEQ ID NO: 2608292 - RNA, 19 nt, Homo sapiens
  misc_RNA (1)...(19): siRNA sense strand
agacaacaccucaggaacu

SEQ ID NO: 2608293 - RNA, 19 nt, Homo sapiens
  misc_RNA (1)...(19): siRNA sense strand
cagaagaauaugaaugucu

SEQ ID NO: 2608294 - RNA, 19 nt, Homo sapiens
  misc_RNA (1)...(19): siRNA sense strand
ucaugagggaugugauaga

SEQ ID NO: 2608295 - RNA, 19 nt, Homo sapiens
  misc_RNA (1)...(19): siRNA sense strand
acuuaagagauuugagaac

SEQ ID NO: 2608296 - RNA, 19 nt, Homo sapiens
  misc_RNA (1)...(19): siRNA sense strand
uggaaaagacauaaaggau

SEQ ID NO: 2608297 - RNA, 19 nt, Homo sapiens
  misc_RNA (1)...(19): siRNA sense strand
uaugaaugucuuaagggaa

SEQ ID NO: 2608298 - RNA, 19 nt, Homo sapiens
  misc_RNA (1)...(19): siRNA sense strand
gaccaguacagaaagacaa

SEQ ID NO: 2608299 - RNA, 19 nt, Homo sapiens
  misc_RNA (1)...(19): siRNA sense strand
auugcuaggucaugauauu

SEQ ID NO: 2608300 - RNA, 19 nt, Homo sapiens
  misc_RNA (1)...(19): siRNA sense strand
agacauaaaggaugauaac

SEQ ID NO: 2608301 - RNA, 19 nt, Homo sapiens
  misc_RNA (1)...(19): siRNA sense strand
gcacaugcuaagacggagu

SEQ ID NO: 2608302 - RNA, 19 nt, Homo sapiens
  misc_RNA (1)...(19): siRNA sense strand
augaugaagacuugguaga

SEQ ID NO: 2608303 - RNA, 19 nt, Homo sapiens
  misc_RNA (1)...(19): siRNA sense strand
cugugaaguaccaaccaaa

SEQ ID NO: 2608304 - RNA, 19 nt, Homo sapiens
  misc_RNA (1)...(19): siRNA sense strand
ccuuggcaccugugaggaa

SEQ ID NO: 2608305 - RNA, 19 nt, Homo sapiens
  misc_RNA (1)...(19): siRNA sense strand
ccucaggaacuuaagagau

SEQ ID NO: 2608306 - RNA, 19 nt, Homo sapiens
  misc_RNA (1)...(19): siRNA sense strand
uggcaauuguaaauagguu

SEQ ID NO: 2608307 - RNA, 19 nt, Homo sapiens
  misc_RNA (1)...(19): siRNA sense strand
gcaaacaacuggagacucg

SEQ ID NO: 2608308 - RNA, 19 nt, Homo sapiens
  misc_RNA (1)...(19): siRNA sense strand
ggcaauuguaaauagguuu

SEQ ID NO: 2608309 - RNA, 19 nt, Homo sapiens
  misc_RNA (1)...(19): siRNA sense strand
uaaaagaaaacaccggaaa

SEQ ID NO: 2608310 - RNA, 19 nt, Homo sapiens
  misc_RNA (1)...(19): siRNA sense strand
acuggagacucguggcaca

SEQ ID NO: 2608311 - RNA, 19 nt, Homo sapiens
  misc_RNA (1)...(19): siRNA sense strand
cucuauagauguggcuaaa

SEQ ID NO: 2608312 - RNA, 19 nt, Homo sapiens
  misc_RNA (1)...(19): siRNA sense strand
agucauuugcacacaguau

SEQ ID NO: 2608313 - RNA, 19 nt, Homo sapiens
  misc_RNA (1)...(19): siRNA sense strand
aaacuaaccuuucagcgua

SEQ ID NO: 2608314 - RNA, 19 nt, Homo sapiens
  misc_RNA (1)...(19): siRNA sense strand
ggaagaggugcaaaagcaa

SEQ ID NO: 2608315 - RNA, 19 nt, Homo sapiens
  misc_RNA (1)...(19): siRNA sense strand
uuaaguggcagcagggaca

SEQ ID NO: 2608316 - RNA, 19 nt, Homo sapiens
  misc_RNA (1)...(19): siRNA sense strand
ugaaauuaugaaagccaga

SEQ ID NO: 2608317 - RNA, 19 nt, Homo sapiens
  misc_RNA (1)...(19): siRNA sense strand
aggagugggauaaacuuaa

SEQ ID NO: 2608318 - RNA, 19 nt, Homo sapiens
  misc_RNA (1)...(19): siRNA sense strand
uguaaacacagcuuggaau

SEQ ID NO: 2608319 - RNA, 19 nt, Homo sapiens
  misc_RNA (1)...(19): siRNA sense strand
cagaaggggcagaggauga

SEQ ID NO: 2608320 - RNA, 19 nt, Homo sapiens
  misc_RNA (1)...(19): siRNA sense strand
cgaagaagccaccagccaa

SEQ ID NO: 2608321 - RNA, 19 nt, Homo sapiens
  misc_RNA (1)...(19): siRNA sense strand
gggcagaggaugaacugga

SEQ ID NO: 2608322 - RNA, 19 nt, Homo sapiens
  misc_RNA (1)...(19): siRNA sense strand
agaaaggagucgaagaagc

SEQ ID NO: 2608323 - RNA, 19 nt, Homo sapiens
  misc_RNA (1)...(19): siRNA sense strand
ugggagaccaggaggagaa

SEQ ID NO: 2608324 - RNA, 19 nt, Homo sapiens
  misc_RNA (1)...(19): siRNA sense strand
cggugcaaguggagcaaga

SEQ ID NO: 2608325 - RNA, 19 nt, Homo sapiens
  misc_RNA (1)...(19): siRNA sense strand
cuguagaguugccggaaca

SEQ ID NO: 2608326 - RNA, 19 nt, Homo sapiens
  misc_RNA (1)...(19): siRNA sense strand
cggaacagguggaugccau

SEQ ID NO: 2608327 - RNA, 19 nt, Homo sapiens
  misc_RNA (1)...(19): siRNA sense strand
gcgcgaaccaaguggcuga

SEQ ID NO: 2608328 - RNA, 19 nt, Homo sapiens
  misc_RNA (1)...(19): siRNA sense strand
agaucguugugcagggauu

SEQ ID NO: 2608329 - RNA, 19 nt, Homo sapiens
  misc_RNA (1)...(19): siRNA sense strand
uggaauggcgccugggcuu

SEQ ID NO: 2608330 - RNA, 19 nt, Homo sapiens
  misc_RNA (1)...(19): siRNA sense strand
acacggacguuucaggaga

SEQ ID NO: 2608331 - RNA, 19 nt, Homo sapiens
  misc_RNA (1)...(19): siRNA sense strand
ugagcugccuggagggcuu

SEQ ID NO: 2608332 - RNA, 19 nt, Homo sapiens
  misc_RNA (1)...(19): siRNA sense strand
cuacaaagugggagaccag

SEQ ID NO: 2608333 - RNA, 19 nt, Homo sapiens
  misc_RNA (1)...(19): siRNA sense strand
gaaauuagccugagcacug

SEQ ID NO: 2608334 - RNA, 19 nt, Homo sapiens
  misc_RNA (1)...(19): siRNA sense strand
agauaagccccaaggaaga

SEQ ID NO: 2608335 - RNA, 19 nt, Homo sapiens
  misc_RNA (1)...(19): siRNA sense strand
ccacugggguuaaagggaa

SEQ ID NO: 2608336 - RNA, 19 nt, Homo sapiens
  misc_RNA (1)...(19): siRNA sense strand
ccaacauggagcagggaag

SEQ ID NO: 2608337 - RNA, 19 nt, Homo sapiens
  misc_RNA (1)...(19): siRNA sense strand
cagggacacaagaggaaaa

SEQ ID NO: 2608338 - RNA, 19 nt, Homo sapiens
  misc_RNA (1)...(19): siRNA sense strand
ggagacaacuacaggguca

SEQ ID NO: 2608339 - RNA, 19 nt, Homo sapiens
  misc_RNA (1)...(19): siRNA sense strand
gggccaucuacgugggaga

SEQ ID NO: 2608340 - RNA, 19 nt, Homo sapiens
  misc_RNA (1)...(19): siRNA sense strand
ccauagugaagaaggaacu

SEQ ID NO: 2608341 - RNA, 19 nt, Homo sapiens
  misc_RNA (1)...(19): siRNA sense strand
aagcaagcgggaaaggcaa

SEQ ID NO: 2608342 - RNA, 19 nt, Homo sapiens
  misc_RNA (1)...(19): siRNA sense strand
ugaaauugcuggagcuggu

SEQ ID NO: 2608343 - RNA, 19 nt, Homo sapiens
  misc_RNA (1)...(19): siRNA sense strand
aagccauagugaagaagga

SEQ ID NO: 2608344 - RNA, 19 nt, Homo sapiens
  misc_RNA (1)...(19): siRNA sense strand
ggccagaccaagaccgaga

SEQ ID NO: 2608345 - RNA, 19 nt, Homo sapiens
  misc_RNA (1)...(19): siRNA sense strand
gaagcaagcgggaaaggca

SEQ ID NO: 2608346 - RNA, 19 nt, Homo sapiens
  misc_RNA (1)...(19): siRNA sense strand
cagaggaguugguggggca

SEQ ID NO: 2608347 - RNA, 19 nt, Homo sapiens
  misc_RNA (1)...(19): siRNA sense strand
gugacaacugcgagcacuu

SEQ ID NO: 2608348 - RNA, 19 nt, Homo sapiens
  misc_RNA (1)...(19): siRNA sense strand
ucgugaaccaucugcgcua

SEQ ID NO: 2608349 - RNA, 19 nt, Homo sapiens
  misc_RNA (1)...(19): siRNA sense strand
gcauguugagauuuggaaa

SEQ ID NO: 2608350 - RNA, 19 nt, Homo sapiens
  misc_RNA (1)...(19): siRNA sense strand
ccacaguauuuauggcagu

SEQ ID NO: 2608351 - RNA, 19 nt, Homo sapiens
  misc_RNA (1)...(19): siRNA sense strand
ggagcaacaaugugggacu

SEQ ID NO: 2608352 - RNA, 19 nt, Homo sapiens
  misc_RNA (1)...(19): siRNA sense strand
uggaugugucuuugcuaaa

SEQ ID NO: 2608353 - RNA, 19 nt, Homo sapiens
  misc_RNA (1)...(19): siRNA sense strand
agacuuauguuucaggcau

SEQ ID NO: 2608354 - RNA, 19 nt, Homo sapiens
  misc_RNA (1)...(19): siRNA sense strand
cauguugagauuuggaaaa

SEQ ID NO: 2608355 - RNA, 19 nt, Homo sapiens
  misc_RNA (1)...(19): siRNA sense strand
uggauuucuagguggagua

SEQ ID NO: 2608356 - RNA, 19 nt, Homo sapiens
  misc_RNA (1)...(19): siRNA sense strand
aggcagacgaugagcacua

SEQ ID NO: 2608357 - RNA, 19 nt, Homo sapiens
  misc_RNA (1)...(19): siRNA sense strand
gugugguggugcuggacaa

SEQ ID NO: 2608358 - RNA, 19 nt, Homo sapiens
  misc_RNA (1)...(19): siRNA sense strand
gugacaguuuggagggcuu

SEQ ID NO: 2608359 - RNA, 19 nt, Homo sapiens
  misc_RNA (1)...(19): siRNA sense strand
ccaagaagcuagugcagac

SEQ ID NO: 2608360 - RNA, 19 nt, Homo sapiens
  misc_RNA (1)...(19): siRNA sense strand
ucuacaacccagagaacau

SEQ ID NO: 2608361 - RNA, 19 nt, Homo sapiens
  misc_RNA (1)...(19): siRNA sense strand
acguagugguucagcccua

SEQ ID NO: 2608362 - RNA, 19 nt, Homo sapiens
  misc_RNA (1)...(19): siRNA sense strand
acaagagccugcagaggau

SEQ ID NO: 2608363 - RNA, 19 nt, Homo sapiens
  misc_RNA (1)...(19): siRNA sense strand
gggaacggaaguuggccaa

SEQ ID NO: 2608364 - RNA, 19 nt, Homo sapiens
  misc_RNA (1)...(19): siRNA sense strand
ucaacaucauccagggaga

SEQ ID NO: 2608365 - RNA, 19 nt, Homo sapiens
  misc_RNA (1)...(19): siRNA sense strand
gcggauucucccaggguga

SEQ ID NO: 2608366 - RNA, 19 nt, Homo sapiens
  misc_RNA (1)...(19): siRNA sense strand
aggacaacuuugaugagau

SEQ ID NO: 2608367 - RNA, 19 nt, Homo sapiens
  misc_RNA (1)...(19): siRNA sense strand
gguucgaguucuggaaaca

SEQ ID NO: 2608368 - RNA, 19 nt, Homo sapiens
  misc_RNA (1)...(19): siRNA sense strand
ggaacauggaggaggagcu

SEQ ID NO: 2608369 - RNA, 19 nt, Homo sapiens
  misc_RNA (1)...(19): siRNA sense strand
cucaagaggcugacgcaga

SEQ ID NO: 2608370 - RNA, 19 nt, Homo sapiens
  misc_RNA (1)...(19): siRNA sense strand
ucauagaccgagaagcaga

SEQ ID NO: 2608371 - RNA, 19 nt, Homo sapiens
  misc_RNA (1)...(19): siRNA sense strand
agucaaagaagaggagaaa

SEQ ID NO: 2608372 - RNA, 19 nt, Homo sapiens
  misc_RNA (1)...(19): siRNA sense strand
aguagaaagcauagcagaa

SEQ ID NO: 2608373 - RNA, 19 nt, Homo sapiens
  misc_RNA (1)...(19): siRNA sense strand
aagucaaagaagaggagaa

SEQ ID NO: 2608374 - RNA, 19 nt, Homo sapiens
  misc_RNA (1)...(19): siRNA sense strand
agacacuggcucaggaauu

SEQ ID NO: 2608375 - RNA, 19 nt, Homo sapiens
  misc_RNA (1)...(19): siRNA sense strand
guggugaaaugcaaggcaa

SEQ ID NO: 2608376 - RNA, 19 nt, Homo sapiens
  misc_RNA (1)...(19): siRNA sense strand
aaguggaaguagaaagcau

SEQ ID NO: 2608377 - RNA, 19 nt, Homo sapiens
  misc_RNA (1)...(19): siRNA sense strand
ggaaagaugccuugccacu

SEQ ID NO: 2608378 - RNA, 19 nt, Homo sapiens
  misc_RNA (1)...(19): siRNA sense strand
aagaacaagacauguggaa

SEQ ID NO: 2608379 - RNA, 19 nt, Homo sapiens
  misc_RNA (1)...(19): siRNA sense strand
cucaaggcguuguggaaaa

SEQ ID NO: 2608380 - RNA, 19 nt, Homo sapiens
  misc_RNA (1)...(19): siRNA sense strand
aaggaaaaguggccugaaa

SEQ ID NO: 2608381 - RNA, 19 nt, Homo sapiens
  misc_RNA (1)...(19): siRNA sense strand
cccuaaaguggaaguagaa

SEQ ID NO: 2608382 - RNA, 19 nt, Homo sapiens
  misc_RNA (1)...(19): siRNA sense strand
agaagaggagaaaggauga

SEQ ID NO: 2608383 - RNA, 19 nt, Homo sapiens
  misc_RNA (1)...(19): siRNA sense strand
cugaaaucgcacaagucaa

SEQ ID NO: 2608384 - RNA, 19 nt, Homo sapiens
  misc_RNA (1)...(19): siRNA sense strand
gaacaagacauguggaacc

SEQ ID NO: 2608385 - RNA, 19 nt, Homo sapiens
  misc_RNA (1)...(19): siRNA sense strand
aguggaaguagaaagcaua

SEQ ID NO: 2608386 - RNA, 19 nt, Homo sapiens
  misc_RNA (1)...(19): siRNA sense strand
ggaugaaguaucuggugca

SEQ ID NO: 2608387 - RNA, 19 nt, Homo sapiens
  misc_RNA (1)...(19): siRNA sense strand
agcaguaaucuaaggaaaa

SEQ ID NO: 2608388 - RNA, 19 nt, Homo sapiens
  misc_RNA (1)...(19): siRNA sense strand
ggaaugggcauguggcgga

SEQ ID NO: 2608389 - RNA, 19 nt, Homo sapiens
  misc_RNA (1)...(19): siRNA sense strand
gaaccaaauucucugagga

SEQ ID NO: 2608390 - RNA, 19 nt, Homo sapiens
  misc_RNA (1)...(19): siRNA sense strand
aaagaagaggagaaaggau

SEQ ID NO: 2608391 - RNA, 19 nt, Homo sapiens
  misc_RNA (1)...(19): siRNA sense strand
aggaaaaguggccugaaaa

SEQ ID NO: 2608392 - RNA, 19 nt, Homo sapiens
  misc_RNA (1)...(19): siRNA sense strand
cacucaaggcguuguggaa

SEQ ID NO: 2608393 - RNA, 19 nt, Homo sapiens
  misc_RNA (1)...(19): siRNA sense strand
aagaagaggagaaaggaug

SEQ ID NO: 2608394 - RNA, 19 nt, Homo sapiens
  misc_RNA (1)...(19): siRNA sense strand
aucuauaggaagugcaaaa

SEQ ID NO: 2608395 - RNA, 19 nt, Homo sapiens
  misc_RNA (1)...(19): siRNA sense strand
cauuacaggcucugaucuu

SEQ ID NO: 2608396 - RNA, 19 nt, Homo sapiens
  misc_RNA (1)...(19): siRNA sense strand
gcucgggguuucagagaca

SEQ ID NO: 2608397 - RNA, 19 nt, Homo sapiens
  misc_RNA (1)...(19): siRNA sense strand
ggugcagagaauuacuaaa

SEQ ID NO: 2608398 - RNA, 19 nt, Homo sapiens
  misc_RNA (1)...(19): siRNA sense strand
gugcagaaagucaguggca

SEQ ID NO: 2608399 - RNA, 19 nt, Homo sapiens
  misc_RNA (1)...(19): siRNA sense strand
cugaaugagauaaagaaga

SEQ ID NO: 2608400 - RNA, 19 nt, Homo sapiens
  misc_RNA (1)...(19): siRNA sense strand
acauagaucugguagcuca

SEQ ID NO: 2608401 - RNA, 19 nt, Homo sapiens
  misc_RNA (1)...(19): siRNA sense strand
ggccaagcugugugaagaa

SEQ ID NO: 2608402 - RNA, 19 nt, Homo sapiens
  misc_RNA (1)...(19): siRNA sense strand
gauggagacucaagcccaa

SEQ ID NO: 2608403 - RNA, 19 nt, Homo sapiens
  misc_RNA (1)...(19): siRNA sense strand
cugaaaggaaucaugguca

SEQ ID NO: 2608404 - RNA, 19 nt, Homo sapiens
  misc_RNA (1)...(19): siRNA sense strand
agcaucacucugagaauaa

SEQ ID NO: 2608405 - RNA, 19 nt, Homo sapiens
  misc_RNA (1)...(19): siRNA sense strand
augaauagcgaguucucaa

SEQ ID NO: 2608406 - RNA, 19 nt, Homo sapiens
  misc_RNA (1)...(19): siRNA sense strand
ggaugaacugaaaggaauc

SEQ ID NO: 2608407 - RNA, 19 nt, Homo sapiens
  misc_RNA (1)...(19): siRNA sense strand
auaaagaagagguuccaga

SEQ ID NO: 2608408 - RNA, 19 nt, Homo sapiens
  misc_RNA (1)...(19): siRNA sense strand
augaagaaccucaagcuca

SEQ ID NO: 2608409 - RNA, 19 nt, Homo sapiens
  misc_RNA (1)...(19): siRNA sense strand
gccucaagaaggagaacaa

SEQ ID NO: 2608410 - RNA, 19 nt, Homo sapiens
  misc_RNA (1)...(19): siRNA sense strand
gcaaagaggagaaggagcu

SEQ ID NO: 2608411 - RNA, 19 nt, Homo sapiens
  misc_RNA (1)...(19): siRNA sense strand
ccgugggcaaagaggagaa

SEQ ID NO: 2608412 - RNA, 19 nt, Homo sapiens
  misc_RNA (1)...(19): siRNA sense strand
aagaaggagaacaagauga

SEQ ID NO: 2608413 - RNA, 19 nt, Homo sapiens
  misc_RNA (1)...(19): siRNA sense strand
ugggcaaagaggagaagga

SEQ ID NO: 2608414 - RNA, 19 nt, Homo sapiens
  misc_RNA (1)...(19): siRNA sense strand
cgguaaccagucucagaaa

SEQ ID NO: 2608415 - RNA, 19 nt, Homo sapiens
  misc_RNA (1)...(19): siRNA sense strand
ggaacaagugcgcagacga

SEQ ID NO: 2608416 - RNA, 19 nt, Homo sapiens
  misc_RNA (1)...(19): siRNA sense strand
acaagugcgcagacgagaa

SEQ ID NO: 2608417 - RNA, 19 nt, Homo sapiens
  misc_RNA (1)...(19): siRNA sense strand
gaucgcagggcuauggcaa

SEQ ID NO: 2608418 - RNA, 19 nt, Homo sapiens
  misc_RNA (1)...(19): siRNA sense strand
aggaaagugcugaggaaau

SEQ ID NO: 2608419 - RNA, 19 nt, Homo sapiens
  misc_RNA (1)...(19): siRNA sense strand
uguaaaaggaggaggagua

SEQ ID NO: 2608420 - RNA, 19 nt, Homo sapiens
  misc_RNA (1)...(19): siRNA sense strand
ugugacaaacaguggcaaa

SEQ ID NO: 2608421 - RNA, 19 nt, Homo sapiens
  misc_RNA (1)...(19): siRNA sense strand
gaacaaaaucugaagagga

SEQ ID NO: 2608422 - RNA, 19 nt, Homo sapiens
  misc_RNA (1)...(19): siRNA sense strand
cgggauacuuugauggcca

SEQ ID NO: 2608423 - RNA, 19 nt, Homo sapiens
  misc_RNA (1)...(19): siRNA sense strand
acaagaacuagcaaagcaa

SEQ ID NO: 2608424 - RNA, 19 nt, Homo sapiens
  misc_RNA (1)...(19): siRNA sense strand
agacaagaaaugcaggaca

SEQ ID NO: 2608425 - RNA, 19 nt, Homo sapiens
  misc_RNA (1)...(19): siRNA sense strand
cccaaauugcagugucaua

SEQ ID NO: 2608426 - RNA, 19 nt, Homo sapiens
  misc_RNA (1)...(19): siRNA sense strand
caggaaagugcugaggaaa

SEQ ID NO: 2608427 - RNA, 19 nt, Homo sapiens
  misc_RNA (1)...(19): siRNA sense strand
ccuugacacuauauggaau

SEQ ID NO: 2608428 - RNA, 19 nt, Homo sapiens
  misc_RNA (1)...(19): siRNA sense strand
cuugacacuauauggaaua

SEQ ID NO: 2608429 - RNA, 19 nt, Homo sapiens
  misc_RNA (1)...(19): siRNA sense strand
aaaaggaggaggaguacaa

SEQ ID NO: 2608430 - RNA, 19 nt, Homo sapiens
  misc_RNA (1)...(19): siRNA sense strand
cuccagacucuccgggaua

SEQ ID NO: 2608431 - RNA, 19 nt, Homo sapiens
  misc_RNA (1)...(19): siRNA sense strand
cugagauagagacagauaa

SEQ ID NO: 2608432 - RNA, 19 nt, Homo sapiens
  misc_RNA (1)...(19): siRNA sense strand
guaucaacagaccaggaaa

SEQ ID NO: 2608433 - RNA, 19 nt, Homo sapiens
  misc_RNA (1)...(19): siRNA sense strand
gaauguaaaaggaggagga

SEQ ID NO: 2608434 - RNA, 19 nt, Homo sapiens
  misc_RNA (1)...(19): siRNA sense strand
aggaggaguacaagggucu

SEQ ID NO: 2608435 - RNA, 19 nt, Homo sapiens
  misc_RNA (1)...(19): siRNA sense strand
gaagaggacuagagagcga

SEQ ID NO: 2608436 - RNA, 19 nt, Homo sapiens
  misc_RNA (1)...(19): siRNA sense strand
aggaaaagcaagugaccau

SEQ ID NO: 2608437 - RNA, 19 nt, Homo sapiens
  misc_RNA (1)...(19): siRNA sense strand
ccaucuguugccagggaaa

SEQ ID NO: 2608438 - RNA, 19 nt, Homo sapiens
  misc_RNA (1)...(19): siRNA sense strand
gggcaauacagcugcaucu

SEQ ID NO: 2608439 - RNA, 19 nt, Homo sapiens
  misc_RNA (1)...(19): siRNA sense strand
aggaagaggacuagagagc

SEQ ID NO: 2608440 - RNA, 19 nt, Homo sapiens
  misc_RNA (1)...(19): siRNA sense strand
gcauguucuuacugcucaa

SEQ ID NO: 2608441 - RNA, 19 nt, Homo sapiens
  misc_RNA (1)...(19): siRNA sense strand
ccgucuagacacugcaaca

SEQ ID NO: 2608442 - RNA, 19 nt, Homo sapiens
  misc_RNA (1)...(19): siRNA sense strand
gcggauacgggaaggucca

SEQ ID NO: 2608443 - RNA, 19 nt, Homo sapiens
  misc_RNA (1)...(19): siRNA sense strand
ggaagaagaucgaggagaa

SEQ ID NO: 2608444 - RNA, 19 nt, Homo sapiens
  misc_RNA (1)...(19): siRNA sense strand
caagaaaggcaaagagaaa

SEQ ID NO: 2608445 - RNA, 19 nt, Homo sapiens
  misc_RNA (1)...(19): siRNA sense strand
gauaaagaguccacagaaa

SEQ ID NO: 2608446 - RNA, 19 nt, Homo sapiens
  misc_RNA (1)...(19): siRNA sense strand
gagaagaagaagagagaga

SEQ ID NO: 2608447 - RNA, 19 nt, Homo sapiens
  misc_RNA (1)...(19): siRNA sense strand
gaagaagaagagagagaaa

SEQ ID NO: 2608448 - RNA, 19 nt, Homo sapiens
  misc_RNA (1)...(19): siRNA sense strand
uguacaaagaggagagaaa

SEQ ID NO: 2608449 - RNA, 19 nt, Homo sapiens
  misc_RNA (1)...(19): siRNA sense strand
ggacauuccugcuaagaaa

SEQ ID NO: 2608450 - RNA, 19 nt, Homo sapiens
  misc_RNA (1)...(19): siRNA sense strand
ccucaaaauuagagaagaa

SEQ ID NO: 2608451 - RNA, 19 nt, Homo sapiens
  misc_RNA (1)...(19): siRNA sense strand
agacaaaaccagaaagaua

SEQ ID NO: 2608452 - RNA, 19 nt, Homo sapiens
  misc_RNA (1)...(19): siRNA sense strand
gagaaagaccguucgaaua

SEQ ID NO: 2608453 - RNA, 19 nt, Homo sapiens
  misc_RNA (1)...(19): siRNA sense strand
ccaaagauaaagugaacaa

SEQ ID NO: 2608454 - RNA, 19 nt, Homo sapiens
  misc_RNA (1)...(19): siRNA sense strand
gggaaagagaagaaggaga

SEQ ID NO: 2608455 - RNA, 19 nt, Homo sapiens
  misc_RNA (1)...(19): siRNA sense strand
ccagaaagauacaaagaga

SEQ ID NO: 2608456 - RNA, 19 nt, Homo sapiens
  misc_RNA (1)...(19): siRNA sense strand
gcaaagacaaagaaaggaa

SEQ ID NO: 2608457 - RNA, 19 nt, Homo sapiens
  misc_RNA (1)...(19): siRNA sense strand
aagagaaggccgagaagaa

SEQ ID NO: 2608458 - RNA, 19 nt, Homo sapiens
  misc_RNA (1)...(19): siRNA sense strand
ggaugaagcaaauggagaa

SEQ ID NO: 2608459 - RNA, 19 nt, Homo sapiens
  misc_RNA (1)...(19): siRNA sense strand
gaggagagcucgacggaga

SEQ ID NO: 2608460 - RNA, 19 nt, Homo sapiens
  misc_RNA (1)...(19): siRNA sense strand
ugacauagaagaugagcua

SEQ ID NO: 2608461 - RNA, 19 nt, Homo sapiens
  misc_RNA (1)...(19): siRNA sense strand
agauaaggcuauacuguua

SEQ ID NO: 2608462 - RNA, 19 nt, Homo sapiens
  misc_RNA (1)...(19): siRNA sense strand
aggaaagagcagacugaaa

SEQ ID NO: 2608463 - RNA, 19 nt, Homo sapiens
  misc_RNA (1)...(19): siRNA sense strand
gagagaaccuuccaagaaa

SEQ ID NO: 2608464 - RNA, 19 nt, Homo sapiens
  misc_RNA (1)...(19): siRNA sense strand
acaaggagaagaaggauaa

SEQ ID NO: 2608465 - RNA, 19 nt, Homo sapiens
  misc_RNA (1)...(19): siRNA sense strand
agagaagacuccaacgaua

SEQ ID NO: 2608466 - RNA, 19 nt, Homo sapiens
  misc_RNA (1)...(19): siRNA sense strand
gagaagacuccaacgauaa

SEQ ID NO: 2608467 - RNA, 19 nt, Homo sapiens
  misc_RNA (1)...(19): siRNA sense strand
agaaagaccguucgaauaa

SEQ ID NO: 2608468 - RNA, 19 nt, Homo sapiens
  misc_RNA (1)...(19): siRNA sense strand
gagagaucgcugaaggaaa

SEQ ID NO: 2608469 - RNA, 19 nt, Homo sapiens
  misc_RNA (1)...(19): siRNA sense strand
gagagaaagaagaaaucaa

SEQ ID NO: 2608470 - RNA, 19 nt, Homo sapiens
  misc_RNA (1)...(19): siRNA sense strand
cugagaagcugaaagagaa

SEQ ID NO: 2608471 - RNA, 19 nt, Homo sapiens
  misc_RNA (1)...(19): siRNA sense strand
caaggacggugcagagaaa

SEQ ID NO: 2608472 - RNA, 19 nt, Homo sapiens
  misc_RNA (1)...(19): siRNA sense strand
ggagaagcagacugggaaa

SEQ ID NO: 2608473 - RNA, 19 nt, Homo sapiens
  misc_RNA (1)...(19): siRNA sense strand
cggugaaggaggacagcaa

SEQ ID NO: 2608474 - RNA, 19 nt, Homo sapiens
  misc_RNA (1)...(19): siRNA sense strand
caacaugaaagcugacaua

SEQ ID NO: 2608475 - RNA, 19 nt, Homo sapiens
  misc_RNA (1)...(19): siRNA sense strand
agaagaagagagagaaaca

SEQ ID NO: 2608476 - RNA, 19 nt, Homo sapiens
  misc_RNA (1)...(19): siRNA sense strand
gaagagaaacuuagcaaaa

SEQ ID NO: 2608477 - RNA, 19 nt, Homo sapiens
  misc_RNA (1)...(19): siRNA sense strand
cugcagagcucgagccuga

SEQ ID NO: 2608478 - RNA, 19 nt, Homo sapiens
  misc_RNA (1)...(19): siRNA sense strand
gaaaggaaggagaagacaa

SEQ ID NO: 2608479 - RNA, 19 nt, Homo sapiens
  misc_RNA (1)...(19): siRNA sense strand
aagagaagggcgaagauua

SEQ ID NO: 2608480 - RNA, 19 nt, Homo sapiens
  misc_RNA (1)...(19): siRNA sense strand
cgacaagcaccuauugaaa

SEQ ID NO: 2608481 - RNA, 19 nt, Homo sapiens
  misc_RNA (1)...(19): siRNA sense strand
gaggagagaaagaagaaau

SEQ ID NO: 2608482 - RNA, 19 nt, Homo sapiens
  misc_RNA (1)...(19): siRNA sense strand
acaaagagaagucggacaa

SEQ ID NO: 2608483 - RNA, 19 nt, Homo sapiens
  misc_RNA (1)...(19): siRNA sense strand
augccaaacugaaggagaa

SEQ ID NO: 2608484 - RNA, 19 nt, Homo sapiens
  misc_RNA (1)...(19): siRNA sense strand
ggaagaggauuaagaagga

SEQ ID NO: 2608485 - RNA, 19 nt, Homo sapiens
  misc_RNA (1)...(19): siRNA sense strand
cgaaagaaggacagggacu

SEQ ID NO: 2608486 - RNA, 19 nt, Homo sapiens
  misc_RNA (1)...(19): siRNA sense strand
ccugagaagcugaaagaga

SEQ ID NO: 2608487 - RNA, 19 nt, Homo sapiens
  misc_RNA (1)...(19): siRNA sense strand
aaaggaaggagaagacaaa

SEQ ID NO: 2608488 - RNA, 19 nt, Homo sapiens
  misc_RNA (1)...(19): siRNA sense strand
gagaagaaggagaaggcuu

SEQ ID NO: 2608489 - RNA, 19 nt, Homo sapiens
  misc_RNA (1)...(19): siRNA sense strand
ugaaagagaaggagaggca

SEQ ID NO: 2608490 - RNA, 19 nt, Homo sapiens
  misc_RNA (1)...(19): siRNA sense strand
agaagaugagcuagauaaa

SEQ ID NO: 2608491 - RNA, 19 nt, Homo sapiens
  misc_RNA (1)...(19): siRNA sense strand
ccaaacugaaggagaaauu

SEQ ID NO: 2608492 - RNA, 19 nt, Homo sapiens
  misc_RNA (1)...(19): siRNA sense strand
ggaagaagggucuggacau

SEQ ID NO: 2608493 - RNA, 19 nt, Homo sapiens
  misc_RNA (1)...(19): siRNA sense strand
gccaagagcugaaguugaa

SEQ ID NO: 2608494 - RNA, 19 nt, Homo sapiens
  misc_RNA (1)...(19): siRNA sense strand
agagagaaacacagggaga

SEQ ID NO: 2608495 - RNA, 19 nt, Homo sapiens
  misc_RNA (1)...(19): siRNA sense strand
agagaaacacagggagaaa

SEQ ID NO: 2608496 - RNA, 19 nt, Homo sapiens
  misc_RNA (1)...(19): siRNA sense strand
gugacagacuacagggaca

SEQ ID NO: 2608497 - RNA, 19 nt, Homo sapiens
  misc_RNA (1)...(19): siRNA sense strand
gcgacaugguggagaagca

SEQ ID NO: 2608498 - RNA, 19 nt, Homo sapiens
  misc_RNA (1)...(19): siRNA sense strand
cggcacaaggagaggauga

SEQ ID NO: 2608499 - RNA, 19 nt, Homo sapiens
  misc_RNA (1)...(19): siRNA sense strand
gcagcgacaugguggagaa

SEQ ID NO: 2608500 - RNA, 19 nt, Homo sapiens
  misc_RNA (1)...(19): siRNA sense strand
agaagaaggagaaggcuuu

SEQ ID NO: 2608501 - RNA, 19 nt, Homo sapiens
  misc_RNA (1)...(19): siRNA sense strand
acauagaagaugagcuaga

SEQ ID NO: 2608502 - RNA, 19 nt, Homo sapiens
  misc_RNA (1)...(19): siRNA sense strand
aaggagaggaugaagcaaa

SEQ ID NO: 2608503 - RNA, 19 nt, Homo sapiens
  misc_RNA (1)...(19): siRNA sense strand
gaagagaaucaaagacaca

SEQ ID NO: 2608504 - RNA, 19 nt, Homo sapiens
  misc_RNA (1)...(19): siRNA sense strand
ccugagaggcagaaggaca

SEQ ID NO: 2608505 - RNA, 19 nt, Homo sapiens
  misc_RNA (1)...(19): siRNA sense strand
agacaaggcuaaaagcaaa

SEQ ID NO: 2608506 - RNA, 19 nt, Homo sapiens
  misc_RNA (1)...(19): siRNA sense strand
aagagaagaagaagagaga

SEQ ID NO: 2608507 - RNA, 19 nt, Homo sapiens
  misc_RNA (1)...(19): siRNA sense strand
cgcugaagccagugaggaa

SEQ ID NO: 2608508 - RNA, 19 nt, Homo sapiens
  misc_RNA (1)...(19): siRNA sense strand
ggaaagagcagacugaaaa

SEQ ID NO: 2608509 - RNA, 19 nt, Homo sapiens
  misc_RNA (1)...(19): siRNA sense strand
gacaagaagaggagagagu

SEQ ID NO: 2608510 - RNA, 19 nt, Homo sapiens
  misc_RNA (1)...(19): siRNA sense strand
gagagaaggagaagaagga

SEQ ID NO: 2608511 - RNA, 19 nt, Homo sapiens
  misc_RNA (1)...(19): siRNA sense strand
gauaaggaaaggaaggaga

SEQ ID NO: 2608512 - RNA, 19 nt, Homo sapiens
  misc_RNA (1)...(19): siRNA sense strand
cagaaagauacaaagagaa

SEQ ID NO: 2608513 - RNA, 19 nt, Homo sapiens
  misc_RNA (1)...(19): siRNA sense strand
cacaaggagaagaaggaua

SEQ ID NO: 2608514 - RNA, 19 nt, Homo sapiens
  misc_RNA (1)...(19): siRNA sense strand
ccugagcggaagaggauua

SEQ ID NO: 2608515 - RNA, 19 nt, Homo sapiens
  misc_RNA (1)...(19): siRNA sense strand
aaagagaaauccagugaca

SEQ ID NO: 2608516 - RNA, 19 nt, Homo sapiens
  misc_RNA (1)...(19): siRNA sense strand
agaaaucaauccuggaaaa

SEQ ID NO: 2608517 - RNA, 19 nt, Homo sapiens
  misc_RNA (1)...(19): siRNA sense strand
agaagaaagagaagggcga

SEQ ID NO: 2608518 - RNA, 19 nt, Homo sapiens
  misc_RNA (1)...(19): siRNA sense strand
ggcuauacuguuagagaau

SEQ ID NO: 2608519 - RNA, 19 nt, Homo sapiens
  misc_RNA (1)...(19): siRNA sense strand
agagaaagaccguucgaau

SEQ ID NO: 2608520 - RNA, 19 nt, Homo sapiens
  misc_RNA (1)...(19): siRNA sense strand
gaagaugagcaacgggaau

SEQ ID NO: 2608521 - RNA, 19 nt, Homo sapiens
  misc_RNA (1)...(19): siRNA sense strand
aggagaggaugaagcaaau

SEQ ID NO: 2608522 - RNA, 19 nt, Homo sapiens
  misc_RNA (1)...(19): siRNA sense strand
caaaagagaaggagaagau

SEQ ID NO: 2608523 - RNA, 19 nt, Homo sapiens
  misc_RNA (1)...(19): siRNA sense strand
ggucauaaacgguggggau

SEQ ID NO: 2608524 - RNA, 19 nt, Homo sapiens
  misc_RNA (1)...(19): siRNA sense strand
aagaagcgaaagaaagaaa

SEQ ID NO: 2608525 - RNA, 19 nt, Homo sapiens
  misc_RNA (1)...(19): siRNA sense strand
cuauacuguuagagaauga

SEQ ID NO: 2608526 - RNA, 19 nt, Homo sapiens
  misc_RNA (1)...(19): siRNA sense strand
gagaagaaggauaaagagu

SEQ ID NO: 2608527 - RNA, 19 nt, Homo sapiens
  misc_RNA (1)...(19): siRNA sense strand
gccaagcagcagaaggaaa

SEQ ID NO: 2608528 - RNA, 19 nt, Homo sapiens
  misc_RNA (1)...(19): siRNA sense strand
agagaucgcugaaggaaaa

SEQ ID NO: 2608529 - RNA, 19 nt, Homo sapiens
  misc_RNA (1)...(19): siRNA sense strand
gaaagaaggacagggacua

SEQ ID NO: 2608530 - RNA, 19 nt, Homo sapiens
  misc_RNA (1)...(19): siRNA sense strand
cugagaggcagaaggacaa

SEQ ID NO: 2608531 - RNA, 19 nt, Homo sapiens
  misc_RNA (1)...(19): siRNA sense strand
ucaaagagcucaucagcga

SEQ ID NO: 2608532 - RNA, 19 nt, Homo sapiens
  misc_RNA (1)...(19): siRNA sense strand
cugaagagaaucaaagaca

SEQ ID NO: 2608533 - RNA, 19 nt, Homo sapiens
  misc_RNA (1)...(19): siRNA sense strand
gagaguggcuucaaggaca

SEQ ID NO: 2608534 - RNA, 19 nt, Homo sapiens
  misc_RNA (1)...(19): siRNA sense strand
aggaaggacgggaggccua

SEQ ID NO: 2608535 - RNA, 19 nt, Homo sapiens
  misc_RNA (1)...(19): siRNA sense strand
aagcggaacccguggaaga

SEQ ID NO: 2608536 - RNA, 19 nt, Homo sapiens
  misc_RNA (1)...(19): siRNA sense strand
gauaaagugaacaagagaa

SEQ ID NO: 2608537 - RNA, 19 nt, Homo sapiens
  misc_RNA (1)...(19): siRNA sense strand
ccaagaacccagagccaca

SEQ ID NO: 2608538 - RNA, 19 nt, Homo sapiens
  misc_RNA (1)...(19): siRNA sense strand
cgauauugccugguaguaa

SEQ ID NO: 2608539 - RNA, 19 nt, Homo sapiens
  misc_RNA (1)...(19): siRNA sense strand
cggacagacaauuggaaaa

SEQ ID NO: 2608540 - RNA, 19 nt, Homo sapiens
  misc_RNA (1)...(19): siRNA sense strand
aggagaagaaggauaaaga

SEQ ID NO: 2608541 - RNA, 19 nt, Homo sapiens
  misc_RNA (1)...(19): siRNA sense strand
cugccgaagacaaggcuaa

SEQ ID NO: 2608542 - RNA, 19 nt, Homo sapiens
  misc_RNA (1)...(19): siRNA sense strand
guaaggagccacaggagga

SEQ ID NO: 2608543 - RNA, 19 nt, Homo sapiens
  misc_RNA (1)...(19): siRNA sense strand
uugugggacuuaugggcaa

SEQ ID NO: 2608544 - RNA, 19 nt, Homo sapiens
  misc_RNA (1)...(19): siRNA sense strand
cggaugugaaucaagagaa

SEQ ID NO: 2608545 - RNA, 19 nt, Homo sapiens
  misc_RNA (1)...(19): siRNA sense strand
gugcaagaaaggaaguaaa

SEQ ID NO: 2608546 - RNA, 19 nt, Homo sapiens
  misc_RNA (1)...(19): siRNA sense strand
gggaaaggguucaguggca

SEQ ID NO: 2608547 - RNA, 19 nt, Homo sapiens
  misc_RNA (1)...(19): siRNA sense strand
uguagaagaacaagagaau

SEQ ID NO: 2608548 - RNA, 19 nt, Homo sapiens
  misc_RNA (1)...(19): siRNA sense strand
caaacagguuaaaggaaaa

SEQ ID NO: 2608549 - RNA, 19 nt, Homo sapiens
  misc_RNA (1)...(19): siRNA sense strand
cuaaagaaaaggagaagaa

SEQ ID NO: 2608550 - RNA, 19 nt, Homo sapiens
  misc_RNA (1)...(19): siRNA sense strand
agaaugaagagaaggaaga

SEQ ID NO: 2608551 - RNA, 19 nt, Homo sapiens
  misc_RNA (1)...(19): siRNA sense strand
ccuuaaacaagcacugaaa

SEQ ID NO: 2608552 - RNA, 19 nt, Homo sapiens
  misc_RNA (1)...(19): siRNA sense strand
gugaauucuacccgggaaa

SEQ ID NO: 2608553 - RNA, 19 nt, Homo sapiens
  misc_RNA (1)...(19): siRNA sense strand
cuguagaagaacaagagaa

SEQ ID NO: 2608554 - RNA, 19 nt, Homo sapiens
  misc_RNA (1)...(19): siRNA sense strand
caguauuauccuaagcuua

SEQ ID NO: 2608555 - RNA, 19 nt, Homo sapiens
  misc_RNA (1)...(19): siRNA sense strand
augaagagaaggaagaaaa

SEQ ID NO: 2608556 - RNA, 19 nt, Homo sapiens
  misc_RNA (1)...(19): siRNA sense strand
aaacaaacaccgauggcuu

SEQ ID NO: 2608557 - RNA, 19 nt, Homo sapiens
  misc_RNA (1)...(19): siRNA sense strand
cugaaggggaggaagaaaa

SEQ ID NO: 2608558 - RNA, 19 nt, Homo sapiens
  misc_RNA (1)...(19): siRNA sense strand
ggacaaguuaggugagaag

SEQ ID NO: 2608559 - RNA, 19 nt, Homo sapiens
  misc_RNA (1)...(19): siRNA sense strand
agaacagauaacuggcaaa

SEQ ID NO: 2608560 - RNA, 19 nt, Homo sapiens
  misc_RNA (1)...(19): siRNA sense strand
aggaugaagaugaagauga

SEQ ID NO: 2608561 - RNA, 19 nt, Homo sapiens
  misc_RNA (1)...(19): siRNA sense strand
aguauguccuagagaauca

SEQ ID NO: 2608562 - RNA, 19 nt, Homo sapiens
  misc_RNA (1)...(19): siRNA sense strand
augagaaagaucagucuaa

SEQ ID NO: 2608563 - RNA, 19 nt, Homo sapiens
  misc_RNA (1)...(19): siRNA sense strand
ccuaagagaagguugcaga

SEQ ID NO: 2608564 - RNA, 19 nt, Homo sapiens
  misc_RNA (1)...(19): siRNA sense strand
gaaaaggagaagaaaguga

SEQ ID NO: 2608565 - RNA, 19 nt, Homo sapiens
  misc_RNA (1)...(19): siRNA sense strand
agaauuaaauagaggaguc

SEQ ID NO: 2608566 - RNA, 19 nt, Homo sapiens
  misc_RNA (1)...(19): siRNA sense strand
gggccaguuagaacagaua

SEQ ID NO: 2608567 - RNA, 19 nt, Homo sapiens
  misc_RNA (1)...(19): siRNA sense strand
aagaauggguggauggaac

SEQ ID NO: 2608568 - RNA, 19 nt, Homo sapiens
  misc_RNA (1)...(19): siRNA sense strand
cugagaaugaagagaagga

SEQ ID NO: 2608569 - RNA, 19 nt, Homo sapiens
  misc_RNA (1)...(19): siRNA sense strand
agucuaaagaaaaggagaa

SEQ ID NO: 2608570 - RNA, 19 nt, Homo sapiens
  misc_RNA (1)...(19): siRNA sense strand
aagaaaaggagaagaaagu

SEQ ID NO: 2608571 - RNA, 19 nt, Homo sapiens
  misc_RNA (1)...(19): siRNA sense strand
cggacaaguuaggugagaa

SEQ ID NO: 2608572 - RNA, 19 nt, Homo sapiens
  misc_RNA (1)...(19): siRNA sense strand
ccucagaaauccagaaaac

SEQ ID NO: 2608573 - RNA, 19 nt, Homo sapiens
  misc_RNA (1)...(19): siRNA sense strand
cuacagucucaucaggaaa

SEQ ID NO: 2608574 - RNA, 19 nt, Homo sapiens
  misc_RNA (1)...(19): siRNA sense strand
cuagagaugaggaugaaga

SEQ ID NO: 2608575 - RNA, 19 nt, Homo sapiens
  misc_RNA (1)...(19): siRNA sense strand
gagucaucaaacagguuaa

SEQ ID NO: 2608576 - RNA, 19 nt, Homo sapiens
  misc_RNA (1)...(19): siRNA sense strand
cgaaaauacaucauccaua

SEQ ID NO: 2608577 - RNA, 19 nt, Homo sapiens
  misc_RNA (1)...(19): siRNA sense strand
auucuagagaugaggauga

SEQ ID NO: 2608578 - RNA, 19 nt, Homo sapiens
  misc_RNA (1)...(19): siRNA sense strand
ggguuaucuccuuaaacaa

SEQ ID NO: 2608579 - RNA, 19 nt, Homo sapiens
  misc_RNA (1)...(19): siRNA sense strand
ugaagaugaagaugaguca

SEQ ID NO: 2608580 - RNA, 19 nt, Homo sapiens
  misc_RNA (1)...(19): siRNA sense strand
auccagaaccacaaguaaa

SEQ ID NO: 2608581 - RNA, 19 nt, Homo sapiens
  misc_RNA (1)...(19): siRNA sense strand
aaaggagaagaaagugaaa

SEQ ID NO: 2608582 - RNA, 19 nt, Homo sapiens
  misc_RNA (1)...(19): siRNA sense strand
gcagagagcaguagagagg

SEQ ID NO: 2608583 - RNA, 19 nt, Homo sapiens
  misc_RNA (1)...(19): siRNA sense strand
ggaagaaaagccagaacca

SEQ ID NO: 2608584 - RNA, 19 nt, Homo sapiens
  misc_RNA (1)...(19): siRNA sense strand
acauaaguucagaggaauc

SEQ ID NO: 2608585 - RNA, 19 nt, Homo sapiens
  misc_RNA (1)...(19): siRNA sense strand
agaacaagagaaugaaacu

SEQ ID NO: 2608586 - RNA, 19 nt, Homo sapiens
  misc_RNA (1)...(19): siRNA sense strand
gucccaagauggaugcaau

SEQ ID NO: 2608587 - RNA, 19 nt, Homo sapiens
  misc_RNA (1)...(19): siRNA sense strand
gaauuaaauagaggaguca

SEQ ID NO: 2608588 - RNA, 19 nt, Homo sapiens
  misc_RNA (1)...(19): siRNA sense strand
cuaagagaagguugcagaa

SEQ ID NO: 2608589 - RNA, 19 nt, Homo sapiens
  misc_RNA (1)...(19): siRNA sense strand
ccacuguagaagaacaaga

SEQ ID NO: 2608590 - RNA, 19 nt, Homo sapiens
  misc_RNA (1)...(19): siRNA sense strand
gagaaugaagagaaggaag

SEQ ID NO: 2608591 - RNA, 19 nt, Homo sapiens
  misc_RNA (1)...(19): siRNA sense strand
aaugaagagaaggaagaaa

SEQ ID NO: 2608592 - RNA, 19 nt, Homo sapiens
  misc_RNA (1)...(19): siRNA sense strand
uagccagggcccagaaaca

SEQ ID NO: 2608593 - RNA, 19 nt, Homo sapiens
  misc_RNA (1)...(19): siRNA sense strand
aauaagucuucugaggaaa

SEQ ID NO: 2608594 - RNA, 19 nt, Homo sapiens
  misc_RNA (1)...(19): siRNA sense strand
acaauuccuuccugggcua

SEQ ID NO: 2608595 - RNA, 19 nt, Homo sapiens
  misc_RNA (1)...(19): siRNA sense strand
gaagauagcaccaugccga

SEQ ID NO: 2608596 - RNA, 19 nt, Homo sapiens
  misc_RNA (1)...(19): siRNA sense strand
uagaacagauaacuggcaa

SEQ ID NO: 2608597 - RNA, 19 nt, Homo sapiens
  misc_RNA (1)...(19): siRNA sense strand
aagaaaagccagaaccaga

SEQ ID NO: 2608598 - RNA, 19 nt, Homo sapiens
  misc_RNA (1)...(19): siRNA sense strand
gguucagaaaucaagaaaa

SEQ ID NO: 2608599 - RNA, 19 nt, Homo sapiens
  misc_RNA (1)...(19): siRNA sense strand
ggcaaauccaccaugaaga

SEQ ID NO: 2608600 - RNA, 19 nt, Homo sapiens
  misc_RNA (1)...(19): siRNA sense strand
aaccagugcaagaaaggaa

SEQ ID NO: 2608601 - RNA, 19 nt, Homo sapiens
  misc_RNA (1)...(19): siRNA sense strand
ccugaagaggaaagggaaa

SEQ ID NO: 2608602 - RNA, 19 nt, Homo sapiens
  misc_RNA (1)...(19): siRNA sense strand
aaauaguagacgaggaaga

SEQ ID NO: 2608603 - RNA, 19 nt, Homo sapiens
  misc_RNA (1)...(19): siRNA sense strand
cagaaagucuaaagggagu

SEQ ID NO: 2608604 - RNA, 19 nt, Homo sapiens
  misc_RNA (1)...(19): siRNA sense strand
gucuaaagggaguggaaau

SEQ ID NO: 2608605 - RNA, 19 nt, Homo sapiens
  misc_RNA (1)...(19): siRNA sense strand
cagcagaaauaguagacga

SEQ ID NO: 2608606 - RNA, 19 nt, Homo sapiens
  misc_RNA (1)...(19): siRNA sense strand
cagaaauaguagacgagga

SEQ ID NO: 2608607 - RNA, 19 nt, Homo sapiens
  misc_RNA (1)...(19): siRNA sense strand
gaagauggagagaaggcaa

SEQ ID NO: 2608608 - RNA, 19 nt, Homo sapiens
  misc_RNA (1)...(19): siRNA sense strand
cuucaggagccgugcacua

SEQ ID NO: 2608609 - RNA, 19 nt, Homo sapiens
  misc_RNA (1)...(19): siRNA sense strand
aguuguuaauacagaggua

SEQ ID NO: 2608610 - RNA, 19 nt, Homo sapiens
  misc_RNA (1)...(19): siRNA sense strand
cugagcaagucgaggagau

SEQ ID NO: 2608611 - RNA, 19 nt, Homo sapiens
  misc_RNA (1)...(19): siRNA sense strand
aggaaaacuuguugagagu

SEQ ID NO: 2608612 - RNA, 19 nt, Homo sapiens
  misc_RNA (1)...(19): siRNA sense strand
aagauggagagaaggcaaa

SEQ ID NO: 2608613 - RNA, 19 nt, Homo sapiens
  misc_RNA (1)...(19): siRNA sense strand
augcagaacagaaagaaga

SEQ ID NO: 2608614 - RNA, 19 nt, Homo sapiens
  misc_RNA (1)...(19): siRNA sense strand
cagaaguccaagaagauga

SEQ ID NO: 2608615 - RNA, 19 nt, Homo sapiens
  misc_RNA (1)...(19): siRNA sense strand
uaguagacgaggaagaaga

SEQ ID NO: 2608616 - RNA, 19 nt, Homo sapiens
  misc_RNA (1)...(19): siRNA sense strand
acgaggaagaagauggaga

SEQ ID NO: 2608617 - RNA, 19 nt, Homo sapiens
  misc_RNA (1)...(19): siRNA sense strand
aggcaaacaaggaugcaga

SEQ ID NO: 2608618 - RNA, 19 nt, Homo sapiens
  misc_RNA (1)...(19): siRNA sense strand
cagaacagaaagaagacuu

SEQ ID NO: 2608619 - RNA, 19 nt, Homo sapiens
  misc_RNA (1)...(19): siRNA sense strand
ccgaugaggagaaugguga

SEQ ID NO: 2608620 - RNA, 19 nt, Homo sapiens
  misc_RNA (1)...(19): siRNA sense strand
cauuccaaauagugaugaa

SEQ ID NO: 2608621 - RNA, 19 nt, Homo sapiens
  misc_RNA (1)...(19): siRNA sense strand
aggaagaagauggagagaa

SEQ ID NO: 2608622 - RNA, 19 nt, Homo sapiens
  misc_RNA (1)...(19): siRNA sense strand
cgaucagaggccagcagaa

SEQ ID NO: 2608623 - RNA, 19 nt, Homo sapiens
  misc_RNA (1)...(19): siRNA sense strand
guggacaagaugaggcuga

SEQ ID NO: 2608624 - RNA, 19 nt, Homo sapiens
  misc_RNA (1)...(19): siRNA sense strand
uuacuuggacauaggagaa

SEQ ID NO: 2608625 - RNA, 19 nt, Homo sapiens
  misc_RNA (1)...(19): siRNA sense strand
cugaagaggaaagggaaaa

SEQ ID NO: 2608626 - RNA, 19 nt, Homo sapiens
  misc_RNA (1)...(19): siRNA sense strand
caaauagugaugaaggcau

SEQ ID NO: 2608627 - RNA, 19 nt, Homo sapiens
  misc_RNA (1)...(19): siRNA sense strand
acauaggagaaaucaagaa

SEQ ID NO: 2608628 - RNA, 19 nt, Homo sapiens
  misc_RNA (1)...(19): siRNA sense strand
caagaaaagaccaauggaa

SEQ ID NO: 2608629 - RNA, 19 nt, Homo sapiens
  misc_RNA (1)...(19): siRNA sense strand
aagucuaaagggaguggaa

SEQ ID NO: 2608630 - RNA, 19 nt, Homo sapiens
  misc_RNA (1)...(19): siRNA sense strand
aguccaagaagaugaagau

SEQ ID NO: 2608631 - RNA, 19 nt, Homo sapiens
  misc_RNA (1)...(19): siRNA sense strand
uuucaaagcuggagcagag

SEQ ID NO: 2608632 - RNA, 19 nt, Homo sapiens
  misc_RNA (1)...(19): siRNA sense strand
aggagcuggcaguggacaa

SEQ ID NO: 2608633 - RNA, 19 nt, Homo sapiens
  misc_RNA (1)...(19): siRNA sense strand
ccucauaaacccagcuucu

SEQ ID NO: 2608634 - RNA, 19 nt, Homo sapiens
  misc_RNA (1)...(19): siRNA sense strand
guggagcagaguuggagaa

SEQ ID NO: 2608635 - RNA, 19 nt, Homo sapiens
  misc_RNA (1)...(19): siRNA sense strand
augaagauacucagguuga

SEQ ID NO: 2608636 - RNA, 19 nt, Homo sapiens
  misc_RNA (1)...(19): siRNA sense strand
guccagaagaaaaugaaaa

SEQ ID NO: 2608637 - RNA, 19 nt, Homo sapiens
  misc_RNA (1)...(19): siRNA sense strand
agaaaagaccaauggaagu

SEQ ID NO: 2608638 - RNA, 19 nt, Homo sapiens
  misc_RNA (1)...(19): siRNA sense strand
ggaaggagguagggaggcu

SEQ ID NO: 2608639 - RNA, 19 nt, Homo sapiens
  misc_RNA (1)...(19): siRNA sense strand
agcagaaguccaagaagau

SEQ ID NO: 2608640 - RNA, 19 nt, Homo sapiens
  misc_RNA (1)...(19): siRNA sense strand
aagaagaugaagauacuca

SEQ ID NO: 2608641 - RNA, 19 nt, Homo sapiens
  misc_RNA (1)...(19): siRNA sense strand
aagaaagucucaaggagcu

SEQ ID NO: 2608642 - RNA, 19 nt, Homo sapiens
  misc_RNA (1)...(19): siRNA sense strand
ucaaagaccaccaaggcca

SEQ ID NO: 2608643 - RNA, 19 nt, Homo sapiens
  misc_RNA (1)...(19): siRNA sense strand
uggugaccuugaagaggaa

SEQ ID NO: 2608644 - RNA, 19 nt, Homo sapiens
  misc_RNA (1)...(19): siRNA sense strand
gaaagaaagucucaaggag

SEQ ID NO: 2608645 - RNA, 19 nt, Homo sapiens
  misc_RNA (1)...(19): siRNA sense strand
augaagaagaagagggaaa

SEQ ID NO: 2608646 - RNA, 19 nt, Homo sapiens
  misc_RNA (1)...(19): siRNA sense strand
agaccaaagucgagcgguu

SEQ ID NO: 2608647 - RNA, 19 nt, Homo sapiens
  misc_RNA (1)...(19): siRNA sense strand
cuucaaaucaggauggcaa

SEQ ID NO: 2608648 - RNA, 19 nt, Homo sapiens
  misc_RNA (1)...(19): siRNA sense strand
cgugaagagaggaaugaga

SEQ ID NO: 2608649 - RNA, 19 nt, Homo sapiens
  misc_RNA (1)...(19): siRNA sense strand
acaguggagaagaaaguaa

SEQ ID NO: 2608650 - RNA, 19 nt, Homo sapiens
  misc_RNA (1)...(19): siRNA sense strand
uggucuaaccugaagaaaa

SEQ ID NO: 2608651 - RNA, 19 nt, Homo sapiens
  misc_RNA (1)...(19): siRNA sense strand
uugugacaguggagaagaa

SEQ ID NO: 2608652 - RNA, 19 nt, Homo sapiens
  misc_RNA (1)...(19): siRNA sense strand
aaauugugacaguggagaa

SEQ ID NO: 2608653 - RNA, 19 nt, Homo sapiens
  misc_RNA (1)...(19): siRNA sense strand
aaaugaagaagaagaggga

SEQ ID NO: 2608654 - RNA, 19 nt, Homo sapiens
  misc_RNA (1)...(19): siRNA sense strand
gagaucgugaagagaggaa

SEQ ID NO: 2608655 - RNA, 19 nt, Homo sapiens
  misc_RNA (1)...(19): siRNA sense strand
acaacguuaaugugguaua

SEQ ID NO: 2608656 - RNA, 19 nt, Homo sapiens
  misc_RNA (1)...(19): siRNA sense strand
gggagagagaagaggccaa

SEQ ID NO: 2608657 - RNA, 19 nt, Homo sapiens
  misc_RNA (1)...(19): siRNA sense strand
gcgucaucaucguguguaa

SEQ ID NO: 2608658 - RNA, 19 nt, Homo sapiens
  misc_RNA (1)...(19): siRNA sense strand
agaaauacccgcagcccaa

SEQ ID NO: 2608659 - RNA, 19 nt, Homo sapiens
  misc_RNA (1)...(19): siRNA sense strand
uggagaagacugacggcua

SEQ ID NO: 2608660 - RNA, 19 nt, Homo sapiens
  misc_RNA (1)...(19): siRNA sense strand
gcaagaccgugcugggcaa

SEQ ID NO: 2608661 - RNA, 19 nt, Homo sapiens
  misc_RNA (1)...(19): siRNA sense strand
cugccaaccucaagagcau

SEQ ID NO: 2608662 - RNA, 19 nt, Homo sapiens
  misc_RNA (1)...(19): siRNA sense strand
aggagaugauggacagaga

SEQ ID NO: 2608663 - RNA, 19 nt, Homo sapiens
  misc_RNA (1)...(19): siRNA sense strand
cgagagacagagaagaaau

SEQ ID NO: 2608664 - RNA, 19 nt, Homo sapiens
  misc_RNA (1)...(19): siRNA sense strand
agaugaagcgggagcucua

SEQ ID NO: 2608665 - RNA, 19 nt, Homo sapiens
  misc_RNA (1)...(19): siRNA sense strand
aggaagaggaggaggcugu

SEQ ID NO: 2608666 - RNA, 19 nt, Homo sapiens
  misc_RNA (1)...(19): siRNA sense strand
gugccaagcaggagaagca

SEQ ID NO: 2608667 - RNA, 19 nt, Homo sapiens
  misc_RNA (1)...(19): siRNA sense strand
cccaaagggcagaagaaga

SEQ ID NO: 2608668 - RNA, 19 nt, Homo sapiens
  misc_RNA (1)...(19): siRNA sense strand
cauccaaggagcaugacaa

SEQ ID NO: 2608669 - RNA, 19 nt, Homo sapiens
  misc_RNA (1)...(19): siRNA sense strand
aggaggaggaggaggagga

SEQ ID NO: 2608670 - RNA, 19 nt, Homo sapiens
  misc_RNA (1)...(19): siRNA sense strand
aggaggaggaggaggagga

SEQ ID NO: 2608671 - RNA, 19 nt, Homo sapiens
  misc_RNA (1)...(19): siRNA sense strand
aagaagaagaagaucguca

SEQ ID NO: 2608672 - RNA, 19 nt, Homo sapiens
  misc_RNA (1)...(19): siRNA sense strand
aggaggaguuguacgccaa

SEQ ID NO: 2608673 - RNA, 19 nt, Homo sapiens
  misc_RNA (1)...(19): siRNA sense strand
agaagaagaagaucgucaa

SEQ ID NO: 2608674 - RNA, 19 nt, Homo sapiens
  misc_RNA (1)...(19): siRNA sense strand
gcuacgagaacaagcccua

SEQ ID NO: 2608675 - RNA, 19 nt, Homo sapiens
  misc_RNA (1)...(19): siRNA sense strand
aggacagggaggaagaaga

SEQ ID NO: 2608676 - RNA, 19 nt, Homo sapiens
  misc_RNA (1)...(19): siRNA sense strand
cugaggacagggaggaaga

SEQ ID NO: 2608677 - RNA, 19 nt, Homo sapiens
  misc_RNA (1)...(19): siRNA sense strand
ccaccaaccucaucagcga

SEQ ID NO: 2608678 - RNA, 19 nt, Homo sapiens
  misc_RNA (1)...(19): siRNA sense strand
ugaagcagcugcagcccaa

SEQ ID NO: 2608679 - RNA, 19 nt, Homo sapiens
  misc_RNA (1)...(19): siRNA sense strand
ccauuauguucgaggagcu

SEQ ID NO: 2608680 - RNA, 19 nt, Homo sapiens
  misc_RNA (1)...(19): siRNA sense strand
ggaaaggagcggcagccau

SEQ ID NO: 2608681 - RNA, 19 nt, Homo sapiens
  misc_RNA (1)...(19): siRNA sense strand
ggaagcugcucaaggccuu

SEQ ID NO: 2608682 - RNA, 19 nt, Homo sapiens
  misc_RNA (1)...(19): siRNA sense strand
agggaggcacuguggagua

SEQ ID NO: 2608683 - RNA, 19 nt, Homo sapiens
  misc_RNA (1)...(19): siRNA sense strand
aggaggugucggugaugaa

SEQ ID NO: 2608684 - RNA, 19 nt, Homo sapiens
  misc_RNA (1)...(19): siRNA sense strand
aggcagagcuguuugcgga

SEQ ID NO: 2608685 - RNA, 19 nt, Homo sapiens
  misc_RNA (1)...(19): siRNA sense strand
aguacagcccugaggacau

SEQ ID NO: 2608686 - RNA, 19 nt, Homo sapiens
  misc_RNA (1)...(19): siRNA sense strand
gcgucuucguggagcagau

SEQ ID NO: 2608687 - RNA, 19 nt, Homo sapiens
  misc_RNA (1)...(19): siRNA sense strand
cguuuuagaagaaggaaga

SEQ ID NO: 2608688 - RNA, 19 nt, Homo sapiens
  misc_RNA (1)...(19): siRNA sense strand
cuggagcaguucagcguau

SEQ ID NO: 2608689 - RNA, 19 nt, Homo sapiens
  misc_RNA (1)...(19): siRNA sense strand
acagugaggaagaggagga

SEQ ID NO: 2608690 - RNA, 19 nt, Homo sapiens
  misc_RNA (1)...(19): siRNA sense strand
ggagaagacugacggcuac

SEQ ID NO: 2608691 - RNA, 19 nt, Homo sapiens
  misc_RNA (1)...(19): siRNA sense strand
gcacuguggaguaugccaa

SEQ ID NO: 2608692 - RNA, 19 nt, Homo sapiens
  misc_RNA (1)...(19): siRNA sense strand
aguccgacagugaggaaga

SEQ ID NO: 2608693 - RNA, 19 nt, Homo sapiens
  misc_RNA (1)...(19): siRNA sense strand
cugaaggaggugucgguga

SEQ ID NO: 2608694 - RNA, 19 nt, Homo sapiens
  misc_RNA (1)...(19): siRNA sense strand
cccaaggagaugauggaca

SEQ ID NO: 2608695 - RNA, 19 nt, Homo sapiens
  misc_RNA (1)...(19): siRNA sense strand
ccaaggagaugauggacag

SEQ ID NO: 2608696 - RNA, 19 nt, Homo sapiens
  misc_RNA (1)...(19): siRNA sense strand
ucaccaagaaguacaauca

SEQ ID NO: 2608697 - RNA, 19 nt, Homo sapiens
  misc_RNA (1)...(19): siRNA sense strand
uggaggacaucuaugccaa

SEQ ID NO: 2608698 - RNA, 19 nt, Homo sapiens
  misc_RNA (1)...(19): siRNA sense strand
ccaacaucuucaucaucaa

SEQ ID NO: 2608699 - RNA, 19 nt, Homo sapiens
  misc_RNA (1)...(19): siRNA sense strand
ccgagagacagagaagaaa

SEQ ID NO: 2608700 - RNA, 19 nt, Homo sapiens
  misc_RNA (1)...(19): siRNA sense strand
uggaguaugccaacgagaa

SEQ ID NO: 2608701 - RNA, 19 nt, Homo sapiens
  misc_RNA (1)...(19): siRNA sense strand
gaggaggaguuguacgcca

SEQ ID NO: 2608702 - RNA, 19 nt, Homo sapiens
  misc_RNA (1)...(19): siRNA sense strand
acgcagacgcuguugcaga

SEQ ID NO: 2608703 - RNA, 19 nt, Homo sapiens
  misc_RNA (1)...(19): siRNA sense strand
gcaucuucgggcugggcua

SEQ ID NO: 2608704 - RNA, 19 nt, Homo sapiens
  misc_RNA (1)...(19): siRNA sense strand
uguuugaguccgacaguga

SEQ ID NO: 2608705 - RNA, 19 nt, Homo sapiens
  misc_RNA (1)...(19): siRNA sense strand
gcaacuuccucaccaagaa

SEQ ID NO: 2608706 - RNA, 19 nt, Homo sapiens
  misc_RNA (1)...(19): siRNA sense strand
aggagcagcaggagcauca

SEQ ID NO: 2608707 - RNA, 19 nt, Homo sapiens
  misc_RNA (1)...(19): siRNA sense strand
ggauagaggagaagucccu

SEQ ID NO: 2608708 - RNA, 19 nt, Homo sapiens
  misc_RNA (1)...(19): siRNA sense strand
gcuucugggccuuugggaa

SEQ ID NO: 2608709 - RNA, 19 nt, Homo sapiens
  misc_RNA (1)...(19): siRNA sense strand
gagaggauguucaaccaga

SEQ ID NO: 2608710 - RNA, 19 nt, Homo sapiens
  misc_RNA (1)...(19): siRNA sense strand
ggacaaagcugcaggcuca

SEQ ID NO: 2608711 - RNA, 19 nt, Homo sapiens
  misc_RNA (1)...(19): siRNA sense strand
ucgugaagaucgugaggca

SEQ ID NO: 2608712 - RNA, 19 nt, Homo sapiens
  misc_RNA (1)...(19): siRNA sense strand
gcaccuaugaguucggcaa

SEQ ID NO: 2608713 - RNA, 19 nt, Homo sapiens
  misc_RNA (1)...(19): siRNA sense strand
gguucaggccgaaggacca

SEQ ID NO: 2608714 - RNA, 19 nt, Homo sapiens
  misc_RNA (1)...(19): siRNA sense strand
ccucuguaccugugcccaa

SEQ ID NO: 2608715 - RNA, 19 nt, Homo sapiens
  misc_RNA (1)...(19): siRNA sense strand
ugguaaagacccaacgcca

SEQ ID NO: 2608716 - RNA, 19 nt, Homo sapiens
  misc_RNA (1)...(19): siRNA sense strand
gaaugaaauuucugggaca

SEQ ID NO: 2608717 - RNA, 19 nt, Homo sapiens
  misc_RNA (1)...(19): siRNA sense strand
ugguacaaggaaagggaaa

SEQ ID NO: 2608718 - RNA, 19 nt, Homo sapiens
  misc_RNA (1)...(19): siRNA sense strand
aggaaagugaggaaagaga

SEQ ID NO: 2608719 - RNA, 19 nt, Homo sapiens
  misc_RNA (1)...(19): siRNA sense strand
aggcuaaauccuggaauaa

SEQ ID NO: 2608720 - RNA, 19 nt, Homo sapiens
  misc_RNA (1)...(19): siRNA sense strand
agggaaacaaccacauaaa

SEQ ID NO: 2608721 - RNA, 19 nt, Homo sapiens
  misc_RNA (1)...(19): siRNA sense strand
cuuuauucuuagaggcaga

SEQ ID NO: 2608722 - RNA, 19 nt, Homo sapiens
  misc_RNA (1)...(19): siRNA sense strand
aggacaaacaaacgcacaa

SEQ ID NO: 2608723 - RNA, 19 nt, Homo sapiens
  misc_RNA (1)...(19): siRNA sense strand
aguagugaucagcaagaua

SEQ ID NO: 2608724 - RNA, 19 nt, Homo sapiens
  misc_RNA (1)...(19): siRNA sense strand
agucaaagaaaucccacaa

SEQ ID NO: 2608725 - RNA, 19 nt, Homo sapiens
  misc_RNA (1)...(19): siRNA sense strand
aggaaagagacacuaagaa

SEQ ID NO: 2608726 - RNA, 19 nt, Homo sapiens
  misc_RNA (1)...(19): siRNA sense strand
auacaggagaggacaaaca

SEQ ID NO: 2608727 - RNA, 19 nt, Homo sapiens
  misc_RNA (1)...(19): siRNA sense strand
cuaagaaaaccaaaaggaa

SEQ ID NO: 2608728 - RNA, 19 nt, Homo sapiens
  misc_RNA (1)...(19): siRNA sense strand
ccacagauauaacagcaga

SEQ ID NO: 2608729 - RNA, 19 nt, Homo sapiens
  misc_RNA (1)...(19): siRNA sense strand
cccugaagaauuugaaaca

SEQ ID NO: 2608730 - RNA, 19 nt, Homo sapiens
  misc_RNA (1)...(19): siRNA sense strand
cagugaugguuuugaugaa

SEQ ID NO: 2608731 - RNA, 19 nt, Homo sapiens
  misc_RNA (1)...(19): siRNA sense strand
cgcaaacacaagaagucaa

SEQ ID NO: 2608732 - RNA, 19 nt, Homo sapiens
  misc_RNA (1)...(19): siRNA sense strand
ggaaagggaaacaaccaca

SEQ ID NO: 2608733 - RNA, 19 nt, Homo sapiens
  misc_RNA (1)...(19): siRNA sense strand
ggcuucugguacaaggaaa

SEQ ID NO: 2608734 - RNA, 19 nt, Homo sapiens
  misc_RNA (1)...(19): siRNA sense strand
gggaguacccaguggagca

SEQ ID NO: 2608735 - RNA, 19 nt, Homo sapiens
  misc_RNA (1)...(19): siRNA sense strand
aagucuacaucgagcgaga

SEQ ID NO: 2608736 - RNA, 19 nt, Homo sapiens
  misc_RNA (1)...(19): siRNA sense strand
agcuacaauuugaaagaga

SEQ ID NO: 2608737 - RNA, 19 nt, Homo sapiens
  misc_RNA (1)...(19): siRNA sense strand
gcaguaaaggugacgacga

SEQ ID NO: 2608738 - RNA, 19 nt, Homo sapiens
  misc_RNA (1)...(19): siRNA sense strand
ccaguggagcagaugacaa

SEQ ID NO: 2608739 - RNA, 19 nt, Homo sapiens
  misc_RNA (1)...(19): siRNA sense strand
ucaaaauggaagaagauga

SEQ ID NO: 2608740 - RNA, 19 nt, Homo sapiens
  misc_RNA (1)...(19): siRNA sense strand
cuuucaaaauggaagaaga

SEQ ID NO: 2608741 - RNA, 19 nt, Homo sapiens
  misc_RNA (1)...(19): siRNA sense strand
aggauuagaaaccgcaauu

SEQ ID NO: 2608742 - RNA, 19 nt, Homo sapiens
  misc_RNA (1)...(19): siRNA sense strand
agaaagccucaaagggcaa

SEQ ID NO: 2608743 - RNA, 19 nt, Homo sapiens
  misc_RNA (1)...(19): siRNA sense strand
gugucuacguguuuggaga

SEQ ID NO: 2608744 - RNA, 19 nt, Homo sapiens
  misc_RNA (1)...(19): siRNA sense strand
aguguuugcuuaugggaca

SEQ ID NO: 2608745 - RNA, 19 nt, Homo sapiens
  misc_RNA (1)...(19): siRNA sense strand
ugucaggcauugaggagca

SEQ ID NO: 2608746 - RNA, 19 nt, Homo sapiens
  misc_RNA (1)...(19): siRNA sense strand
aagaaagccucaaagggca

SEQ ID NO: 2608747 - RNA, 19 nt, Homo sapiens
  misc_RNA (1)...(19): siRNA sense strand
gcccaauguuagagagcug

SEQ ID NO: 2608748 - RNA, 19 nt, Homo sapiens
  misc_RNA (1)...(19): siRNA sense strand
caguguugcuggaggcucu

SEQ ID NO: 2608749 - RNA, 19 nt, Homo sapiens
  misc_RNA (1)...(19): siRNA sense strand
cugagagggcugagagcaa

SEQ ID NO: 2608750 - RNA, 19 nt, Homo sapiens
  misc_RNA (1)...(19): siRNA sense strand
cagcaagauuauuggagaa

SEQ ID NO: 2608751 - RNA, 19 nt, Homo sapiens
  misc_RNA (1)...(19): siRNA sense strand
gggaaauaguuuuggaauu

SEQ ID NO: 2608752 - RNA, 19 nt, Homo sapiens
  misc_RNA (1)...(19): siRNA sense strand
cagaaaugauugugguaga

SEQ ID NO: 2608753 - RNA, 19 nt, Homo sapiens
  misc_RNA (1)...(19): siRNA sense strand
ccaaauuagcugauagaau

SEQ ID NO: 2608754 - RNA, 19 nt, Homo sapiens
  misc_RNA (1)...(19): siRNA sense strand
cugaugauguggagguuaa

SEQ ID NO: 2608755 - RNA, 19 nt, Homo sapiens
  misc_RNA (1)...(19): siRNA sense strand
cccauaaaguugaggaaga

SEQ ID NO: 2608756 - RNA, 19 nt, Homo sapiens
  misc_RNA (1)...(19): siRNA sense strand
aguagaaccugguagcaaa

SEQ ID NO: 2608757 - RNA, 19 nt, Homo sapiens
  misc_RNA (1)...(19): siRNA sense strand
cugugaaagacgagggaga

SEQ ID NO: 2608758 - RNA, 19 nt, Homo sapiens
  misc_RNA (1)...(19): siRNA sense strand
gguuuaagaucgacagcuu

SEQ ID NO: 2608759 - RNA, 19 nt, Homo sapiens
  misc_RNA (1)...(19): siRNA sense strand
gagaaauuguuaugguaca

SEQ ID NO: 2608760 - RNA, 19 nt, Homo sapiens
  misc_RNA (1)...(19): siRNA sense strand
gugaaagacgagggagaaa

SEQ ID NO: 2608761 - RNA, 19 nt, Homo sapiens
  misc_RNA (1)...(19): siRNA sense strand
gagcacgcuaugagagaua

SEQ ID NO: 2608762 - RNA, 19 nt, Homo sapiens
  misc_RNA (1)...(19): siRNA sense strand
auacaaagaugaaugguca

SEQ ID NO: 2608763 - RNA, 19 nt, Homo sapiens
  misc_RNA (1)...(19): siRNA sense strand
gggaaaaguuaccaagcaa

SEQ ID NO: 2608764 - RNA, 19 nt, Homo sapiens
  misc_RNA (1)...(19): siRNA sense strand
guauuagagccuucagaaa

SEQ ID NO: 2608765 - RNA, 19 nt, Homo sapiens
  misc_RNA (1)...(19): siRNA sense strand
ugaagagguuugaggacau

SEQ ID NO: 2608766 - RNA, 19 nt, Homo sapiens
  misc_RNA (1)...(19): siRNA sense strand
acgaagaggaagaugaaga

SEQ ID NO: 2608767 - RNA, 19 nt, Homo sapiens
  misc_RNA (1)...(19): siRNA sense strand
agacagaugaggagaaguu

SEQ ID NO: 2608768 - RNA, 19 nt, Homo sapiens
  misc_RNA (1)...(19): siRNA sense strand
agagaaugccaaagauaau

SEQ ID NO: 2608769 - RNA, 19 nt, Homo sapiens
  misc_RNA (1)...(19): siRNA sense strand
caagcaaauacgagaaaca

SEQ ID NO: 2608770 - RNA, 19 nt, Homo sapiens
  misc_RNA (1)...(19): siRNA sense strand
acuccaaaguagaugguuu

SEQ ID NO: 2608771 - RNA, 19 nt, Homo sapiens
  misc_RNA (1)...(19): siRNA sense strand
aggaagaugaagagauuga

SEQ ID NO: 2608772 - RNA, 19 nt, Homo sapiens
  misc_RNA (1)...(19): siRNA sense strand
ccaagaagcuauaugagga

SEQ ID NO: 2608773 - RNA, 19 nt, Homo sapiens
  misc_RNA (1)...(19): siRNA sense strand
guagcaagacucagaggaa

SEQ ID NO: 2608774 - RNA, 19 nt, Homo sapiens
  misc_RNA (1)...(19): siRNA sense strand
gaacagacaucacaggaga

SEQ ID NO: 2608775 - RNA, 19 nt, Homo sapiens
  misc_RNA (1)...(19): siRNA sense strand
aaguugaggaagagggaga

SEQ ID NO: 2608776 - RNA, 19 nt, Homo sapiens
  misc_RNA (1)...(19): siRNA sense strand
ugaggaagagggagaaauu

SEQ ID NO: 2608777 - RNA, 19 nt, Homo sapiens
  misc_RNA (1)...(19): siRNA sense strand
aguaaagacaccacagcua

SEQ ID NO: 2608778 - RNA, 19 nt, Homo sapiens
  misc_RNA (1)...(19): siRNA sense strand
cauuguaaaccaagagaca

SEQ ID NO: 2608779 - RNA, 19 nt, Homo sapiens
  misc_RNA (1)...(19): siRNA sense strand
agagaagaaaugaggacau

SEQ ID NO: 2608780 - RNA, 19 nt, Homo sapiens
  misc_RNA (1)...(19): siRNA sense strand
aggaugacgaagaggaaga

SEQ ID NO: 2608781 - RNA, 19 nt, Homo sapiens
  misc_RNA (1)...(19): siRNA sense strand
uuguaaaccaagagacauu

SEQ ID NO: 2608782 - RNA, 19 nt, Homo sapiens
  misc_RNA (1)...(19): siRNA sense strand
cuccaaaguagaugguuua

SEQ ID NO: 2608783 - RNA, 19 nt, Homo sapiens
  misc_RNA (1)...(19): siRNA sense strand
aggagaaguuccagaugau

SEQ ID NO: 2608784 - RNA, 19 nt, Homo sapiens
  misc_RNA (1)...(19): siRNA sense strand
gguuugaggacauuguaaa

SEQ ID NO: 2608785 - RNA, 19 nt, Homo sapiens
  misc_RNA (1)...(19): siRNA sense strand
auaucaagacugugaaaga

SEQ ID NO: 2608786 - RNA, 19 nt, Homo sapiens
  misc_RNA (1)...(19): siRNA sense strand
uggaagauacaaagaugaa

SEQ ID NO: 2608787 - RNA, 19 nt, Homo sapiens
  misc_RNA (1)...(19): siRNA sense strand
cagacaaucccgaagaaga

SEQ ID NO: 2608788 - RNA, 19 nt, Homo sapiens
  misc_RNA (1)...(19): siRNA sense strand
agacaaucccgaagaagau

SEQ ID NO: 2608789 - RNA, 19 nt, Homo sapiens
  misc_RNA (1)...(19): siRNA sense strand
cuauuaacuuacaggacau

SEQ ID NO: 2608790 - RNA, 19 nt, Homo sapiens
  misc_RNA (1)...(19): siRNA sense strand
auuuagugauggaggccua

SEQ ID NO: 2608791 - RNA, 19 nt, Homo sapiens
  misc_RNA (1)...(19): siRNA sense strand
caucuagaaacauggcaaa

SEQ ID NO: 2608792 - RNA, 19 nt, Homo sapiens
  misc_RNA (1)...(19): siRNA sense strand
gguaagcaguuuggaggaa

SEQ ID NO: 2608793 - RNA, 19 nt, Homo sapiens
  misc_RNA (1)...(19): siRNA sense strand
ugccaaagauaaugaagau

SEQ ID NO: 2608794 - RNA, 19 nt, Homo sapiens
  misc_RNA (1)...(19): siRNA sense strand
gagugagguaggagaugua

SEQ ID NO: 2608795 - RNA, 19 nt, Homo sapiens
  misc_RNA (1)...(19): siRNA sense strand
ugagaagggauuugguauu

SEQ ID NO: 2608796 - RNA, 19 nt, Homo sapiens
  misc_RNA (1)...(19): siRNA sense strand
accaagaauuuaagugaga

SEQ ID NO: 2608797 - RNA, 19 nt, Homo sapiens
  misc_RNA (1)...(19): siRNA sense strand
ugaugaugacauugaacaa

SEQ ID NO: 2608798 - RNA, 19 nt, Homo sapiens
  misc_RNA (1)...(19): siRNA sense strand
aucgacagcuuaagagaua

SEQ ID NO: 2608799 - RNA, 19 nt, Homo sapiens
  misc_RNA (1)...(19): siRNA sense strand
ccguugaaauuuugaggaa

SEQ ID NO: 2608800 - RNA, 19 nt, Homo sapiens
  misc_RNA (1)...(19): siRNA sense strand
ugacgaagaggaagaugaa

SEQ ID NO: 2608801 - RNA, 19 nt, Homo sapiens
  misc_RNA (1)...(19): siRNA sense strand
gcaugugccaggagauauu

SEQ ID NO: 2608802 - RNA, 19 nt, Homo sapiens
  misc_RNA (1)...(19): siRNA sense strand
aguagaugauugucaguuu

SEQ ID NO: 2608803 - RNA, 19 nt, Homo sapiens
  misc_RNA (1)...(19): siRNA sense strand
agaaauuccugccagacaa

SEQ ID NO: 2608804 - RNA, 19 nt, Homo sapiens
  misc_RNA (1)...(19): siRNA sense strand
ccagcaagauuauuggaga

SEQ ID NO: 2608805 - RNA, 19 nt, Homo sapiens
  misc_RNA (1)...(19): siRNA sense strand
uggaaugguuuaagaucga

SEQ ID NO: 2608806 - RNA, 19 nt, Homo sapiens
  misc_RNA (1)...(19): siRNA sense strand
gaguagaaccugguagcaa

SEQ ID NO: 2608807 - RNA, 19 nt, Homo sapiens
  misc_RNA (1)...(19): siRNA sense strand
ggaacaucagcuuagauua

SEQ ID NO: 2608808 - RNA, 19 nt, Homo sapiens
  misc_RNA (1)...(19): siRNA sense strand
gugaaaggcuccauggucu

SEQ ID NO: 2608809 - RNA, 19 nt, Homo sapiens
  misc_RNA (1)...(19): siRNA sense strand
cuuaauggagggagugaga

SEQ ID NO: 2608810 - RNA, 19 nt, Homo sapiens
  misc_RNA (1)...(19): siRNA sense strand
agagcaggcuggagcuauu

SEQ ID NO: 2608811 - RNA, 19 nt, Homo sapiens
  misc_RNA (1)...(19): siRNA sense strand
cagccuuaauggagggagu

SEQ ID NO: 2608812 - RNA, 19 nt, Homo sapiens
  misc_RNA (1)...(19): siRNA sense strand
gugagaagggauuugguau

SEQ ID NO: 2608813 - RNA, 19 nt, Homo sapiens
  misc_RNA (1)...(19): siRNA sense strand
gaucagauuauggaaguaa

SEQ ID NO: 2608814 - RNA, 19 nt, Homo sapiens
  misc_RNA (1)...(19): siRNA sense strand
cagcaugugccaggagaua

SEQ ID NO: 2608815 - RNA, 19 nt, Homo sapiens
  misc_RNA (1)...(19): siRNA sense strand
acucagaggaacuugggaa

SEQ ID NO: 2608816 - RNA, 19 nt, Homo sapiens
  misc_RNA (1)...(19): siRNA sense strand
acuacuacacagagacuaa

SEQ ID NO: 2608817 - RNA, 19 nt, Homo sapiens
  misc_RNA (1)...(19): siRNA sense strand
gugaaugcugacauagaaa

SEQ ID NO: 2608818 - RNA, 19 nt, Homo sapiens
  misc_RNA (1)...(19): siRNA sense strand
gggaagaacuugguggacu

SEQ ID NO: 2608819 - RNA, 19 nt, Homo sapiens
  misc_RNA (1)...(19): siRNA sense strand
agaaaagguuaaccagaau

SEQ ID NO: 2608820 - RNA, 19 nt, Homo sapiens
  misc_RNA (1)...(19): siRNA sense strand
ugucauugaaacuugcaaa

SEQ ID NO: 2608821 - RNA, 19 nt, Homo sapiens
  misc_RNA (1)...(19): siRNA sense strand
ggucacugcaugugguaca

SEQ ID NO: 2608822 - RNA, 19 nt, Homo sapiens
  misc_RNA (1)...(19): siRNA sense strand
ggaagaaguacccgggugu

SEQ ID NO: 2608823 - RNA, 19 nt, Homo sapiens
  misc_RNA (1)...(19): siRNA sense strand
ccucaaaguccgaugccaa

SEQ ID NO: 2608824 - RNA, 19 nt, Homo sapiens
  misc_RNA (1)...(19): siRNA sense strand
ugaacaaacugcuggccaa

SEQ ID NO: 2608825 - RNA, 19 nt, Homo sapiens
  misc_RNA (1)...(19): siRNA sense strand
gaaggaagaugaaagccaa

SEQ ID NO: 2608826 - RNA, 19 nt, Homo sapiens
  misc_RNA (1)...(19): siRNA sense strand
aggugaaggaggagaucau

SEQ ID NO: 2608827 - RNA, 19 nt, Homo sapiens
  misc_RNA (1)...(19): siRNA sense strand
gaagacaagugauggagca

SEQ ID NO: 2608828 - RNA, 19 nt, Homo sapiens
  misc_RNA (1)...(19): siRNA sense strand
gagaagaguccaacggcca

SEQ ID NO: 2608829 - RNA, 19 nt, Homo sapiens
  misc_RNA (1)...(19): siRNA sense strand
agaaggaagaugaaagcca

SEQ ID NO: 2608830 - RNA, 19 nt, Homo sapiens
  misc_RNA (1)...(19): siRNA sense strand
augaaagccaaauggaaga

SEQ ID NO: 2608831 - RNA, 19 nt, Homo sapiens
  misc_RNA (1)...(19): siRNA sense strand
ucgugaaagggcugaagua

SEQ ID NO: 2608832 - RNA, 19 nt, Homo sapiens
  misc_RNA (1)...(19): siRNA sense strand
gaugaaagccaaauggaag

SEQ ID NO: 2608833 - RNA, 19 nt, Homo sapiens
  misc_RNA (1)...(19): siRNA sense strand
aggcaggagcugaguggga

SEQ ID NO: 2608834 - RNA, 19 nt, Homo sapiens
  misc_RNA (1)...(19): siRNA sense strand
caaguaaagaagaggcaac

SEQ ID NO: 2608835 - RNA, 19 nt, Homo sapiens
  misc_RNA (1)...(19): siRNA sense strand
agagaagacaagugaugga

SEQ ID NO: 2608836 - RNA, 19 nt, Homo sapiens
  misc_RNA (1)...(19): siRNA sense strand
cugcuggccaagaggagaa

SEQ ID NO: 2608837 - RNA, 19 nt, Homo sapiens
  misc_RNA (1)...(19): siRNA sense strand
aaggaagaugaaagccaaa

SEQ ID NO: 2608838 - RNA, 19 nt, Homo sapiens
  misc_RNA (1)...(19): siRNA sense strand
gacaagugauggagcagca

SEQ ID NO: 2608839 - RNA, 19 nt, Homo sapiens
  misc_RNA (1)...(19): siRNA sense strand
gaaagaagaaccucggcca

SEQ ID NO: 2608840 - RNA, 19 nt, Homo sapiens
  misc_RNA (1)...(19): siRNA sense strand
acaaggugaaggaggagau

SEQ ID NO: 2608841 - RNA, 19 nt, Homo sapiens
  misc_RNA (1)...(19): siRNA sense strand
ccgccaggucuacggcuua

SEQ ID NO: 2608842 - RNA, 19 nt, Homo sapiens
  misc_RNA (1)...(19): siRNA sense strand
gcacaaagcaauagaggac

SEQ ID NO: 2608843 - RNA, 19 nt, Homo sapiens
  misc_RNA (1)...(19): siRNA sense strand
ggaacaacuacaagcacaa

SEQ ID NO: 2608844 - RNA, 19 nt, Homo sapiens
  misc_RNA (1)...(19): siRNA sense strand
ccgaaaacuugcugaugaa

SEQ ID NO: 2608845 - RNA, 19 nt, Homo sapiens
  misc_RNA (1)...(19): siRNA sense strand
gauuuggaagugagugaaa

SEQ ID NO: 2608846 - RNA, 19 nt, Homo sapiens
  misc_RNA (1)...(19): siRNA sense strand
uugacgagcaacaggauaa

SEQ ID NO: 2608847 - RNA, 19 nt, Homo sapiens
  misc_RNA (1)...(19): siRNA sense strand
ccaacucaggagaaagaaa

SEQ ID NO: 2608848 - RNA, 19 nt, Homo sapiens
  misc_RNA (1)...(19): siRNA sense strand
cuggaagaaacuagaaaca

SEQ ID NO: 2608849 - RNA, 19 nt, Homo sapiens
  misc_RNA (1)...(19): siRNA sense strand
acaaagcaauagaggacga

SEQ ID NO: 2608850 - RNA, 19 nt, Homo sapiens
  misc_RNA (1)...(19): siRNA sense strand
auuagaaggccgcuaguaa

SEQ ID NO: 2608851 - RNA, 19 nt, Homo sapiens
  misc_RNA (1)...(19): siRNA sense strand
aggaagaucucgacccaga

SEQ ID NO: 2608852 - RNA, 19 nt, Homo sapiens
  misc_RNA (1)...(19): siRNA sense strand
cagaaaacccaguugagaa

SEQ ID NO: 2608853 - RNA, 19 nt, Homo sapiens
  misc_RNA (1)...(19): siRNA sense strand
aaaggaaagaaauggaaga

SEQ ID NO: 2608854 - RNA, 19 nt, Homo sapiens
  misc_RNA (1)...(19): siRNA sense strand
cugauuuggaagugaguga

SEQ ID NO: 2608855 - RNA, 19 nt, Homo sapiens
  misc_RNA (1)...(19): siRNA sense strand
cagauaaguucacagccaa

SEQ ID NO: 2608856 - RNA, 19 nt, Homo sapiens
  misc_RNA (1)...(19): siRNA sense strand
ucagauaaguucacagcca

SEQ ID NO: 2608857 - RNA, 19 nt, Homo sapiens
  misc_RNA (1)...(19): siRNA sense strand
acuccaggacaaugauaaa

SEQ ID NO: 2608858 - RNA, 19 nt, Homo sapiens
  misc_RNA (1)...(19): siRNA sense strand
aggaacaacuacaagcaca

SEQ ID NO: 2608859 - RNA, 19 nt, Homo sapiens
  misc_RNA (1)...(19): siRNA sense strand
cuacagcacagaaggaaca

SEQ ID NO: 2608860 - RNA, 19 nt, Homo sapiens
  misc_RNA (1)...(19): siRNA sense strand
aucaaguucuagaggaauu

SEQ ID NO: 2608861 - RNA, 19 nt, Homo sapiens
  misc_RNA (1)...(19): siRNA sense strand
gaaacgaacucaugcugga

SEQ ID NO: 2608862 - RNA, 19 nt, Homo sapiens
  misc_RNA (1)...(19): siRNA sense strand
agaaugaaaaugaggauga

SEQ ID NO: 2608863 - RNA, 19 nt, Homo sapiens
  misc_RNA (1)...(19): siRNA sense strand
gguuugaagaagcaaguga

SEQ ID NO: 2608864 - RNA, 19 nt, Homo sapiens
  misc_RNA (1)...(19): siRNA sense strand
aaggagacagugaaacaaa

SEQ ID NO: 2608865 - RNA, 19 nt, Homo sapiens
  misc_RNA (1)...(19): siRNA sense strand
ggaagaaacuagaaacacc

SEQ ID NO: 2608866 - RNA, 19 nt, Homo sapiens
  misc_RNA (1)...(19): siRNA sense strand
acggagaaaagaaaggaaa

SEQ ID NO: 2608867 - RNA, 19 nt, Homo sapiens
  misc_RNA (1)...(19): siRNA sense strand
ugaaaaugaggaugaggaa

SEQ ID NO: 2608868 - RNA, 19 nt, Homo sapiens
  misc_RNA (1)...(19): siRNA sense strand
gcacaauaaaacugaacuu

SEQ ID NO: 2608869 - RNA, 19 nt, Homo sapiens
  misc_RNA (1)...(19): siRNA sense strand
caccagaaggagacaguga

SEQ ID NO: 2608870 - RNA, 19 nt, Homo sapiens
  misc_RNA (1)...(19): siRNA sense strand
agcaauagaggacgaggaa

SEQ ID NO: 2608871 - RNA, 19 nt, Homo sapiens
  misc_RNA (1)...(19): siRNA sense strand
aaggaaagaaauggaagaa

SEQ ID NO: 2608872 - RNA, 19 nt, Homo sapiens
  misc_RNA (1)...(19): siRNA sense strand
auugcaaaucugaggguca

SEQ ID NO: 2608873 - RNA, 19 nt, Homo sapiens
  misc_RNA (1)...(19): siRNA sense strand
caaaauaucaggaaggagu

SEQ ID NO: 2608874 - RNA, 19 nt, Homo sapiens
  misc_RNA (1)...(19): siRNA sense strand
ggagaaaagaaaggaaaga

SEQ ID NO: 2608875 - RNA, 19 nt, Homo sapiens
  misc_RNA (1)...(19): siRNA sense strand
aggaaagaaauggaagaau

SEQ ID NO: 2608876 - RNA, 19 nt, Homo sapiens
  misc_RNA (1)...(19): siRNA sense strand
agaugaauggagcaguaua

SEQ ID NO: 2608877 - RNA, 19 nt, Homo sapiens
  misc_RNA (1)...(19): siRNA sense strand
ugacagugaugaugaccca

SEQ ID NO: 2608878 - RNA, 19 nt, Homo sapiens
  misc_RNA (1)...(19): siRNA sense strand
cauuagaagagucaaggau

SEQ ID NO: 2608879 - RNA, 19 nt, Homo sapiens
  misc_RNA (1)...(19): siRNA sense strand
acgagcaacaggauaacaa

SEQ ID NO: 2608880 - RNA, 19 nt, Homo sapiens
  misc_RNA (1)...(19): siRNA sense strand
gagaaaagaaaggaaagaa

SEQ ID NO: 2608881 - RNA, 19 nt, Homo sapiens
  misc_RNA (1)...(19): siRNA sense strand
acaucaucucccacagaaa

SEQ ID NO: 2608882 - RNA, 19 nt, Homo sapiens
  misc_RNA (1)...(19): siRNA sense strand
gaaacauccaccagggacu

SEQ ID NO: 2608883 - RNA, 19 nt, Homo sapiens
  misc_RNA (1)...(19): siRNA sense strand
cugaccgguuggaggguga

SEQ ID NO: 2608884 - RNA, 19 nt, Homo sapiens
  misc_RNA (1)...(19): siRNA sense strand
aagcaauagaggacgagga

SEQ ID NO: 2608885 - RNA, 19 nt, Homo sapiens
  misc_RNA (1)...(19): siRNA sense strand
auuagaagagucaaggauu

SEQ ID NO: 2608886 - RNA, 19 nt, Homo sapiens
  misc_RNA (1)...(19): siRNA sense strand
agauacuccagcugaacaa

SEQ ID NO: 2608887 - RNA, 19 nt, Homo sapiens
  misc_RNA (1)...(19): siRNA sense strand
caaaccagggacaggugaa

SEQ ID NO: 2608888 - RNA, 19 nt, Homo sapiens
  misc_RNA (1)...(19): siRNA sense strand
cuucugugguuaacaaaca

SEQ ID NO: 2608889 - RNA, 19 nt, Homo sapiens
  misc_RNA (1)...(19): siRNA sense strand
caguauagcaucaaguucu

SEQ ID NO: 2608890 - RNA, 19 nt, Homo sapiens
  misc_RNA (1)...(19): siRNA sense strand
acgaacucaugcuggaaga

SEQ ID NO: 2608891 - RNA, 19 nt, Homo sapiens
  misc_RNA (1)...(19): siRNA sense strand
acgaaguagaggaugauua

SEQ ID NO: 2608892 - RNA, 19 nt, Homo sapiens
  misc_RNA (1)...(19): siRNA sense strand
agucaaaacaagaagacaa

SEQ ID NO: 2608893 - RNA, 19 nt, Homo sapiens
  misc_RNA (1)...(19): siRNA sense strand
uaaagaagcuccuaggaca

SEQ ID NO: 2608894 - RNA, 19 nt, Homo sapiens
  misc_RNA (1)...(19): siRNA sense strand
agaugaugaugaagaugaa

SEQ ID NO: 2608895 - RNA, 19 nt, Homo sapiens
  misc_RNA (1)...(19): siRNA sense strand
agaaauguuaagagagcau

SEQ ID NO: 2608896 - RNA, 19 nt, Homo sapiens
  misc_RNA (1)...(19): siRNA sense strand
aguucagggaaguggcaaa

SEQ ID NO: 2608897 - RNA, 19 nt, Homo sapiens
  misc_RNA (1)...(19): siRNA sense strand
gcagaaauguuaagagagc

SEQ ID NO: 2608898 - RNA, 19 nt, Homo sapiens
  misc_RNA (1)...(19): siRNA sense strand
gcuacugcuuccagagaca

SEQ ID NO: 2608899 - RNA, 19 nt, Homo sapiens
  misc_RNA (1)...(19): siRNA sense strand
gaauaaaugguguugcaga

SEQ ID NO: 2608900 - RNA, 19 nt, Homo sapiens
  misc_RNA (1)...(19): siRNA sense strand
gaugauaaacaauggcuca

SEQ ID NO: 2608901 - RNA, 19 nt, Homo sapiens
  misc_RNA (1)...(19): siRNA sense strand
gaacaguguaccaaggcau

SEQ ID NO: 2608902 - RNA, 19 nt, Homo sapiens
  misc_RNA (1)...(19): siRNA sense strand
ggaugaaagaagcaggagu

SEQ ID NO: 2608903 - RNA, 19 nt, Homo sapiens
  misc_RNA (1)...(19): siRNA sense strand
cagucaaaugugaaggaca

SEQ ID NO: 2608904 - RNA, 19 nt, Homo sapiens
  misc_RNA (1)...(19): siRNA sense strand
acauacaaggacaguuuaa

SEQ ID NO: 2608905 - RNA, 19 nt, Homo sapiens
  misc_RNA (1)...(19): siRNA sense strand
gcucaaggugucagccgua

SEQ ID NO: 2608906 - RNA, 19 nt, Homo sapiens
  misc_RNA (1)...(19): siRNA sense strand
guguugacagauauggaaa

SEQ ID NO: 2608907 - RNA, 19 nt, Homo sapiens
  misc_RNA (1)...(19): siRNA sense strand
gucaaaacaagaagacaaa

SEQ ID NO: 2608908 - RNA, 19 nt, Homo sapiens
  misc_RNA (1)...(19): siRNA sense strand
aggcuuacacacaggauga

SEQ ID NO: 2608909 - RNA, 19 nt, Homo sapiens
  misc_RNA (1)...(19): siRNA sense strand
guuuaacagacuugauaca

SEQ ID NO: 2608910 - RNA, 19 nt, Homo sapiens
  misc_RNA (1)...(19): siRNA sense strand
aauaaugaguggugcuacu

SEQ ID NO: 2608911 - RNA, 19 nt, Homo sapiens
  misc_RNA (1)...(19): siRNA sense strand
ggaugaugaagacgauauu

SEQ ID NO: 2608912 - RNA, 19 nt, Homo sapiens
  misc_RNA (1)...(19): siRNA sense strand
uugaagaugaugaugaaga

SEQ ID NO: 2608913 - RNA, 19 nt, Homo sapiens
  misc_RNA (1)...(19): siRNA sense strand
ugaugaagaugaaggggau

SEQ ID NO: 2608914 - RNA, 19 nt, Homo sapiens
  misc_RNA (1)...(19): siRNA sense strand
agugcaaacuagaauauca

SEQ ID NO: 2608915 - RNA, 19 nt, Homo sapiens
  misc_RNA (1)...(19): siRNA sense strand
aggaugaugaagacgauau

SEQ ID NO: 2608916 - RNA, 19 nt, Homo sapiens
  misc_RNA (1)...(19): siRNA sense strand
ugaugaugaugguggugau

SEQ ID NO: 2608917 - RNA, 19 nt, Homo sapiens
  misc_RNA (1)...(19): siRNA sense strand
augaauggacugaugauga

SEQ ID NO: 2608918 - RNA, 19 nt, Homo sapiens
  misc_RNA (1)...(19): siRNA sense strand
augaugaggaugaugaaga

SEQ ID NO: 2608919 - RNA, 19 nt, Homo sapiens
  misc_RNA (1)...(19): siRNA sense strand
ggcaugugucuuaggaaaa

SEQ ID NO: 2608920 - RNA, 19 nt, Homo sapiens
  misc_RNA (1)...(19): siRNA sense strand
augacaaggaagucggaca

SEQ ID NO: 2608921 - RNA, 19 nt, Homo sapiens
  misc_RNA (1)...(19): siRNA sense strand
augcauugcucaagauucu

SEQ ID NO: 2608922 - RNA, 19 nt, Homo sapiens
  misc_RNA (1)...(19): siRNA sense strand
ggaguagaccauaggcagu

SEQ ID NO: 2608923 - RNA, 19 nt, Homo sapiens
  misc_RNA (1)...(19): siRNA sense strand
aggaagucggacaguggaa

SEQ ID NO: 2608924 - RNA, 19 nt, Homo sapiens
  misc_RNA (1)...(19): siRNA sense strand
ugugugaugaagaugguua

SEQ ID NO: 2608925 - RNA, 19 nt, Homo sapiens
  misc_RNA (1)...(19): siRNA sense strand
auuagucaccggaggcuua

SEQ ID NO: 2608926 - RNA, 19 nt, Homo sapiens
  misc_RNA (1)...(19): siRNA sense strand
agucagagcucagaagcau

SEQ ID NO: 2608927 - RNA, 19 nt, Homo sapiens
  misc_RNA (1)...(19): siRNA sense strand
ugaaagaagcaggaguaga

SEQ ID NO: 2608928 - RNA, 19 nt, Homo sapiens
  misc_RNA (1)...(19): siRNA sense strand
caguacaagcagaaauguu

SEQ ID NO: 2608929 - RNA, 19 nt, Homo sapiens
  misc_RNA (1)...(19): siRNA sense strand
ccgagacgaaguagaggau

SEQ ID NO: 2608930 - RNA, 19 nt, Homo sapiens
  misc_RNA (1)...(19): siRNA sense strand
acacacaggaugaaagaag

SEQ ID NO: 2608931 - RNA, 19 nt, Homo sapiens
  misc_RNA (1)...(19): siRNA sense strand
auaucaggcaugugucuua

SEQ ID NO: 2608932 - RNA, 19 nt, Homo sapiens
  misc_RNA (1)...(19): siRNA sense strand
aagaaugaacaguguacca

SEQ ID NO: 2608933 - RNA, 19 nt, Homo sapiens
  misc_RNA (1)...(19): siRNA sense strand
gugcagaggacguggugau

SEQ ID NO: 2608934 - RNA, 19 nt, Homo sapiens
  misc_RNA (1)...(19): siRNA sense strand
ggaucaaaccugacagcca

SEQ ID NO: 2608935 - RNA, 19 nt, Homo sapiens
  misc_RNA (1)...(19): siRNA sense strand
gggaagaguccggaggaga

SEQ ID NO: 2608936 - RNA, 19 nt, Homo sapiens
  misc_RNA (1)...(19): siRNA sense strand
acggaagaccggaggcagu

SEQ ID NO: 2608937 - RNA, 19 nt, Homo sapiens
  misc_RNA (1)...(19): siRNA sense strand
cagccagcgaggaggaguu

SEQ ID NO: 2608938 - RNA, 19 nt, Homo sapiens
  misc_RNA (1)...(19): siRNA sense strand
gaucauacgucuuggcaua

SEQ ID NO: 2608939 - RNA, 19 nt, Homo sapiens
  misc_RNA (1)...(19): siRNA sense strand
ggaaagaacucgagaggcu

SEQ ID NO: 2608940 - RNA, 19 nt, Homo sapiens
  misc_RNA (1)...(19): siRNA sense strand
cggcaugagagaaggcaua

SEQ ID NO: 2608941 - RNA, 19 nt, Homo sapiens
  misc_RNA (1)...(19): siRNA sense strand
uagaaaagcaggagguaaa

SEQ ID NO: 2608942 - RNA, 19 nt, Homo sapiens
  misc_RNA (1)...(19): siRNA sense strand
ggaacgaaugcuagagauu

SEQ ID NO: 2608943 - RNA, 19 nt, Homo sapiens
  misc_RNA (1)...(19): siRNA sense strand
guccaaagaaguacagaaa

SEQ ID NO: 2608944 - RNA, 19 nt, Homo sapiens
  misc_RNA (1)...(19): siRNA sense strand
cgaccaaagggaagaaaga

SEQ ID NO: 2608945 - RNA, 19 nt, Homo sapiens
  misc_RNA (1)...(19): siRNA sense strand
ccaucaaggcaaagaucua

SEQ ID NO: 2608946 - RNA, 19 nt, Homo sapiens
  misc_RNA (1)...(19): siRNA sense strand
gaugaauacgaaaggcaaa

SEQ ID NO: 2608947 - RNA, 19 nt, Homo sapiens
  misc_RNA (1)...(19): siRNA sense strand
cgaucuuauucaauggaaa

SEQ ID NO: 2608948 - RNA, 19 nt, Homo sapiens
  misc_RNA (1)...(19): siRNA sense strand
agggaacguuggauagaaa

SEQ ID NO: 2608949 - RNA, 19 nt, Homo sapiens
  misc_RNA (1)...(19): siRNA sense strand
agguaggaaugauggacaa

SEQ ID NO: 2608950 - RNA, 19 nt, Homo sapiens
  misc_RNA (1)...(19): siRNA sense strand
caaaggucaaagagaauaa

SEQ ID NO: 2608951 - RNA, 19 nt, Homo sapiens
  misc_RNA (1)...(19): siRNA sense strand
agaccagacuugaggcgua

SEQ ID NO: 2608952 - RNA, 19 nt, Homo sapiens
  misc_RNA (1)...(19): siRNA sense strand
auugaaagugagaguguaa

SEQ ID NO: 2608953 - RNA, 19 nt, Homo sapiens
  misc_RNA (1)...(19): siRNA sense strand
gcgaauaccugauagcaca

SEQ ID NO: 2608954 - RNA, 19 nt, Homo sapiens
  misc_RNA (1)...(19): siRNA sense strand
uggaauugguguaguauca

SEQ ID NO: 2608955 - RNA, 19 nt, Homo sapiens
  misc_RNA (1)...(19): siRNA sense strand
cauuuaaguuauagggacu

SEQ ID NO: 2608956 - RNA, 19 nt, Homo sapiens
  misc_RNA (1)...(19): siRNA sense strand
cagcauuauuagaugauga

SEQ ID NO: 2608957 - RNA, 19 nt, Homo sapiens
  misc_RNA (1)...(19): siRNA sense strand
ggagagaggaagaguacca

SEQ ID NO: 2608958 - RNA, 19 nt, Homo sapiens
  misc_RNA (1)...(19): siRNA sense strand
gcuacagcucagaaggaaa

SEQ ID NO: 2608959 - RNA, 19 nt, Homo sapiens
  misc_RNA (1)...(19): siRNA sense strand
aggagaagucauaggcauu

SEQ ID NO: 2608960 - RNA, 19 nt, Homo sapiens
  misc_RNA (1)...(19): siRNA sense strand
ggcaaaggagagaggaaga

SEQ ID NO: 2608961 - RNA, 19 nt, Homo sapiens
  misc_RNA (1)...(19): siRNA sense strand
agugagaguguaagugaaa

SEQ ID NO: 2608962 - RNA, 19 nt, Homo sapiens
  misc_RNA (1)...(19): siRNA sense strand
ggaggaaagaugacugaau

SEQ ID NO: 2608963 - RNA, 19 nt, Homo sapiens
  misc_RNA (1)...(19): siRNA sense strand
gguacaaacuucagacgca

SEQ ID NO: 2608964 - RNA, 19 nt, Homo sapiens
  misc_RNA (1)...(19): siRNA sense strand
agggacagcuggagguaga

SEQ ID NO: 2608965 - RNA, 19 nt, Homo sapiens
  misc_RNA (1)...(19): siRNA sense strand
aagggaagaaagagaggaa

SEQ ID NO: 2608966 - RNA, 19 nt, Homo sapiens
  misc_RNA (1)...(19): siRNA sense strand
caggagaagucauaggcau

SEQ ID NO: 2608967 - RNA, 19 nt, Homo sapiens
  misc_RNA (1)...(19): siRNA sense strand
uggaaagcagagaugaaua

SEQ ID NO: 2608968 - RNA, 19 nt, Homo sapiens
  misc_RNA (1)...(19): siRNA sense strand
ccagauacuuuuagaugaa

SEQ ID NO: 2608969 - RNA, 19 nt, Homo sapiens
  misc_RNA (1)...(19): siRNA sense strand
uguggaaagcagagaugaa

SEQ ID NO: 2608970 - RNA, 19 nt, Homo sapiens
  misc_RNA (1)...(19): siRNA sense strand
caguaaagccacaacccua

SEQ ID NO: 2608971 - RNA, 19 nt, Homo sapiens
  misc_RNA (1)...(19): siRNA sense strand
cauuugaggaaguguacaa

SEQ ID NO: 2608972 - RNA, 19 nt, Homo sapiens
  misc_RNA (1)...(19): siRNA sense strand
acugaacaaugcaaggaaa

SEQ ID NO: 2608973 - RNA, 19 nt, Homo sapiens
  misc_RNA (1)...(19): siRNA sense strand
ucuaaaagauggaagugua

SEQ ID NO: 2608974 - RNA, 19 nt, Homo sapiens
  misc_RNA (1)...(19): siRNA sense strand
acaugauggucgagaucuu

SEQ ID NO: 2608975 - RNA, 19 nt, Homo sapiens
  misc_RNA (1)...(19): siRNA sense strand
aaggcaaaggagagaggaa

SEQ ID NO: 2608976 - RNA, 19 nt, Homo sapiens
  misc_RNA (1)...(19): siRNA sense strand
ccaccaaauaucuuacaaa

SEQ ID NO: 2608977 - RNA, 19 nt, Homo sapiens
  misc_RNA (1)...(19): siRNA sense strand
ugcaaaggucaaagagaau

SEQ ID NO: 2608978 - RNA, 19 nt, Homo sapiens
  misc_RNA (1)...(19): siRNA sense strand
ccauuauucuccagauaga

SEQ ID NO: 2608979 - RNA, 19 nt, Homo sapiens
  misc_RNA (1)...(19): siRNA sense strand
aaguguaccucgagauuca

SEQ ID NO: 2608980 - RNA, 19 nt, Homo sapiens
  misc_RNA (1)...(19): siRNA sense strand
ggaucgaccaucaaggcaa

SEQ ID NO: 2608981 - RNA, 19 nt, Homo sapiens
  misc_RNA (1)...(19): siRNA sense strand
gaauggaagacuacugcaa

SEQ ID NO: 2608982 - RNA, 19 nt, Homo sapiens
  misc_RNA (1)...(19): siRNA sense strand
caacauuaucagugccaga

SEQ ID NO: 2608983 - RNA, 19 nt, Homo sapiens
  misc_RNA (1)...(19): siRNA sense strand
cagcagauagacagccaua

SEQ ID NO: 2608984 - RNA, 19 nt, Homo sapiens
  misc_RNA (1)...(19): siRNA sense strand
ucuuagaccaggugaugaa

SEQ ID NO: 2608985 - RNA, 19 nt, Homo sapiens
  misc_RNA (1)...(19): siRNA sense strand
acaauuagccgaauggaca

SEQ ID NO: 2608986 - RNA, 19 nt, Homo sapiens
  misc_RNA (1)...(19): siRNA sense strand
aaucaaagaaaggcgguaa

SEQ ID NO: 2608987 - RNA, 19 nt, Homo sapiens
  misc_RNA (1)...(19): siRNA sense strand
ccacauuugaggaagugua

SEQ ID NO: 2608988 - RNA, 19 nt, Homo sapiens
  misc_RNA (1)...(19): siRNA sense strand
uggcagggauugugaagca

SEQ ID NO: 2608989 - RNA, 19 nt, Homo sapiens
  misc_RNA (1)...(19): siRNA sense strand
gcaguucagaggaggaauu

SEQ ID NO: 2608990 - RNA, 19 nt, Homo sapiens
  misc_RNA (1)...(19): siRNA sense strand
agaugaauacgaaaggcaa

SEQ ID NO: 2608991 - RNA, 19 nt, Homo sapiens
  misc_RNA (1)...(19): siRNA sense strand
cuugaagguuguaggagga

SEQ ID NO: 2608992 - RNA, 19 nt, Homo sapiens
  misc_RNA (1)...(19): siRNA sense strand
gaauauucacaguaugcua

SEQ ID NO: 2608993 - RNA, 19 nt, Homo sapiens
  misc_RNA (1)...(19): siRNA sense strand
uugugaugauguugagauu

SEQ ID NO: 2608994 - RNA, 19 nt, Homo sapiens
  misc_RNA (1)...(19): siRNA sense strand
auguugagauugaaaguga

SEQ ID NO: 2608995 - RNA, 19 nt, Homo sapiens
  misc_RNA (1)...(19): siRNA sense strand
aggaaagaugacugaauca

SEQ ID NO: 2608996 - RNA, 19 nt, Homo sapiens
  misc_RNA (1)...(19): siRNA sense strand
agggaagaugggaggccaa

SEQ ID NO: 2608997 - RNA, 19 nt, Homo sapiens
  misc_RNA (1)...(19): siRNA sense strand
gccacaacccuaugaagaa

SEQ ID NO: 2608998 - RNA, 19 nt, Homo sapiens
  misc_RNA (1)...(19): siRNA sense strand
cugaacaaugcaaggaaaa

SEQ ID NO: 2608999 - RNA, 19 nt, Homo sapiens
  misc_RNA (1)...(19): siRNA sense strand
cgagaggaagaaagugaau

SEQ ID NO: 2609000 - RNA, 19 nt, Homo sapiens
  misc_RNA (1)...(19): siRNA sense strand
ccagauagagacagucauu

SEQ ID NO: 2609001 - RNA, 19 nt, Homo sapiens
  misc_RNA (1)...(19): siRNA sense strand
cccuaaaggcaaagaaacu

SEQ ID NO: 2609002 - RNA, 19 nt, Homo sapiens
  misc_RNA (1)...(19): siRNA sense strand
gucccuaaaggcaaagaaa

SEQ ID NO: 2609003 - RNA, 19 nt, Homo sapiens
  misc_RNA (1)...(19): siRNA sense strand
acugauugaaggaaagaaa

SEQ ID NO: 2609004 - RNA, 19 nt, Homo sapiens
  misc_RNA (1)...(19): siRNA sense strand
ucccaaaauuguagagauu

SEQ ID NO: 2609005 - RNA, 19 nt, Homo sapiens
  misc_RNA (1)...(19): siRNA sense strand
aagacgaauacuuggaaau

SEQ ID NO: 2609006 - RNA, 19 nt, Homo sapiens
  misc_RNA (1)...(19): siRNA sense strand
ccgucagcgaggugagcaa

SEQ ID NO: 2609007 - RNA, 19 nt, Homo sapiens
  misc_RNA (1)...(19): siRNA sense strand
cgguuggcuuugugaguga

SEQ ID NO: 2609008 - RNA, 19 nt, Homo sapiens
  misc_RNA (1)...(19): siRNA sense strand
acuuggaaauucagggcau

SEQ ID NO: 2609009 - RNA, 19 nt, Homo sapiens
  misc_RNA (1)...(19): siRNA sense strand
gggaacaauauuagccuca

SEQ ID NO: 2609010 - RNA, 19 nt, Homo sapiens
  misc_RNA (1)...(19): siRNA sense strand
ccauuaaugaagggaacaa

SEQ ID NO: 2609011 - RNA, 19 nt, Homo sapiens
  misc_RNA (1)...(19): siRNA sense strand
cuuugugagugaagacgaa

SEQ ID NO: 2609012 - RNA, 19 nt, Homo sapiens
  misc_RNA (1)...(19): siRNA sense strand
acgguuacuuggagacaca

SEQ ID NO: 2609013 - RNA, 19 nt, Homo sapiens
  misc_RNA (1)...(19): siRNA sense strand
cugaacaugacuaugggaa

SEQ ID NO: 2609014 - RNA, 19 nt, Homo sapiens
  misc_RNA (1)...(19): siRNA sense strand
uuucagaagccaaggguac

SEQ ID NO: 2609015 - RNA, 19 nt, Homo sapiens
  misc_RNA (1)...(19): siRNA sense strand
ggaagugccucguggucgu

SEQ ID NO: 2609016 - RNA, 19 nt, Homo sapiens
  misc_RNA (1)...(19): siRNA sense strand
uggcuaaaccgcagcacca

SEQ ID NO: 2609017 - RNA, 19 nt, Homo sapiens
  misc_RNA (1)...(19): siRNA sense strand
guacggagaguaaagguca

SEQ ID NO: 2609018 - RNA, 19 nt, Homo sapiens
  misc_RNA (1)...(19): siRNA sense strand
agaacguggauguguauga

SEQ ID NO: 2609019 - RNA, 19 nt, Homo sapiens
  misc_RNA (1)...(19): siRNA sense strand
aguuagagaagcagaagaa

SEQ ID NO: 2609020 - RNA, 19 nt, Homo sapiens
  misc_RNA (1)...(19): siRNA sense strand
ccuagaaagagaacgacaa

SEQ ID NO: 2609021 - RNA, 19 nt, Homo sapiens
  misc_RNA (1)...(19): siRNA sense strand
gagaagcagaagaaggaau

SEQ ID NO: 2609022 - RNA, 19 nt, Homo sapiens
  misc_RNA (1)...(19): siRNA sense strand
aagcaacagcagagccaua

SEQ ID NO: 2609023 - RNA, 19 nt, Homo sapiens
  misc_RNA (1)...(19): siRNA sense strand
gaaacugagaccuggagaa

SEQ ID NO: 2609024 - RNA, 19 nt, Homo sapiens
  misc_RNA (1)...(19): siRNA sense strand
acaguaaagcuuugugcaa

SEQ ID NO: 2609025 - RNA, 19 nt, Homo sapiens
  misc_RNA (1)...(19): siRNA sense strand
uuggaauacaugcgaaaua

SEQ ID NO: 2609026 - RNA, 19 nt, Homo sapiens
  misc_RNA (1)...(19): siRNA sense strand
agauuaugcuugggugaua

SEQ ID NO: 2609027 - RNA, 19 nt, Homo sapiens
  misc_RNA (1)...(19): siRNA sense strand
gcgaaauaugauaaagcau

SEQ ID NO: 2609028 - RNA, 19 nt, Homo sapiens
  misc_RNA (1)...(19): siRNA sense strand
agugugaauuggaggcauu

SEQ ID NO: 2609029 - RNA, 19 nt, Homo sapiens
  misc_RNA (1)...(19): siRNA sense strand
gggaaggauggaagcaaaa

SEQ ID NO: 2609030 - RNA, 19 nt, Homo sapiens
  misc_RNA (1)...(19): siRNA sense strand
aguaguuuguguugggauu

SEQ ID NO: 2609031 - RNA, 19 nt, Homo sapiens
  misc_RNA (1)...(19): siRNA sense strand
gauacaagaaagggagaau

SEQ ID NO: 2609032 - RNA, 19 nt, Homo sapiens
  misc_RNA (1)...(19): siRNA sense strand
aaacugagaccuggagaaa

SEQ ID NO: 2609033 - RNA, 19 nt, Homo sapiens
  misc_RNA (1)...(19): siRNA sense strand
gaagaaagaaacagcagca

SEQ ID NO: 2609034 - RNA, 19 nt, Homo sapiens
  misc_RNA (1)...(19): siRNA sense strand
caucugucuuagagaaaca

SEQ ID NO: 2609035 - RNA, 19 nt, Homo sapiens
  misc_RNA (1)...(19): siRNA sense strand
agucaaaaccaccagaaaa

SEQ ID NO: 2609036 - RNA, 19 nt, Homo sapiens
  misc_RNA (1)...(19): siRNA sense strand
aauuggaauacaugcgaaa

SEQ ID NO: 2609037 - RNA, 19 nt, Homo sapiens
  misc_RNA (1)...(19): siRNA sense strand
gggaaguccacaagcccua

SEQ ID NO: 2609038 - RNA, 19 nt, Homo sapiens
  misc_RNA (1)...(19): siRNA sense strand
agaaguuagagaagcagaa

SEQ ID NO: 2609039 - RNA, 19 nt, Homo sapiens
  misc_RNA (1)...(19): siRNA sense strand
agacuuuacaggaugaauu

SEQ ID NO: 2609040 - RNA, 19 nt, Homo sapiens
  misc_RNA (1)...(19): siRNA sense strand
uggagaaacagaaguuaga

SEQ ID NO: 2609041 - RNA, 19 nt, Homo sapiens
  misc_RNA (1)...(19): siRNA sense strand
augcaagaguuggaagcaa

SEQ ID NO: 2609042 - RNA, 19 nt, Homo sapiens
  misc_RNA (1)...(19): siRNA sense strand
aggaaacgcaugcaagcua

SEQ ID NO: 2609043 - RNA, 19 nt, Homo sapiens
  misc_RNA (1)...(19): siRNA sense strand
acaggaugaauuugggcaa

SEQ ID NO: 2609044 - RNA, 19 nt, Homo sapiens
  misc_RNA (1)...(19): siRNA sense strand
gaggauucaggcagaagaa

SEQ ID NO: 2609045 - RNA, 19 nt, Homo sapiens
  misc_RNA (1)...(19): siRNA sense strand
gccgaaauggagaggacau

SEQ ID NO: 2609046 - RNA, 19 nt, Homo sapiens
  misc_RNA (1)...(19): siRNA sense strand
aacagaaguuagagaagca

SEQ ID NO: 2609047 - RNA, 19 nt, Homo sapiens
  misc_RNA (1)...(19): siRNA sense strand
gaaagcaacagcagagcca

SEQ ID NO: 2609048 - RNA, 19 nt, Homo sapiens
  misc_RNA (1)...(19): siRNA sense strand
augaggaaucaaagcacaa

SEQ ID NO: 2609049 - RNA, 19 nt, Homo sapiens
  misc_RNA (1)...(19): siRNA sense strand
gaacuauuuuggugcacaa

SEQ ID NO: 2609050 - RNA, 19 nt, Homo sapiens
  misc_RNA (1)...(19): siRNA sense strand
aagcagaagaaggaauuaa

SEQ ID NO: 2609051 - RNA, 19 nt, Homo sapiens
  misc_RNA (1)...(19): siRNA sense strand
agaacgacaacaugaucaa

SEQ ID NO: 2609052 - RNA, 19 nt, Homo sapiens
  misc_RNA (1)...(19): siRNA sense strand
caugaagaagaacaggaaa

SEQ ID NO: 2609053 - RNA, 19 nt, Homo sapiens
  misc_RNA (1)...(19): siRNA sense strand
uugaacaggaguauaacaa

SEQ ID NO: 2609054 - RNA, 19 nt, Homo sapiens
  misc_RNA (1)...(19): siRNA sense strand
augaagaagaacaggaaag

SEQ ID NO: 2609055 - RNA, 19 nt, Homo sapiens
  misc_RNA (1)...(19): siRNA sense strand
cugaaagacaaguuggagu

SEQ ID NO: 2609056 - RNA, 19 nt, Homo sapiens
  misc_RNA (1)...(19): siRNA sense strand
agcagaagaaggaauuaaa

SEQ ID NO: 2609057 - RNA, 19 nt, Homo sapiens
  misc_RNA (1)...(19): siRNA sense strand
ucccaaugcaagaagaauu

SEQ ID NO: 2609058 - RNA, 19 nt, Homo sapiens
  misc_RNA (1)...(19): siRNA sense strand
gguaaaaguaagaaguugu

SEQ ID NO: 2609059 - RNA, 19 nt, Homo sapiens
  misc_RNA (1)...(19): siRNA sense strand
aguaaagcuuugugcaaug

SEQ ID NO: 2609060 - RNA, 19 nt, Homo sapiens
  misc_RNA (1)...(19): siRNA sense strand
cuuacagacuuuacaggau

SEQ ID NO: 2609061 - RNA, 19 nt, Homo sapiens
  misc_RNA (1)...(19): siRNA sense strand
aagcaaaagccaaccaaau

SEQ ID NO: 2609062 - RNA, 19 nt, Homo sapiens
  misc_RNA (1)...(19): siRNA sense strand
acgacaacaugaucaaaca

SEQ ID NO: 2609063 - RNA, 19 nt, Homo sapiens
  misc_RNA (1)...(19): siRNA sense strand
gauucaggcagaagaaagu

SEQ ID NO: 2609064 - RNA, 19 nt, Homo sapiens
  misc_RNA (1)...(19): siRNA sense strand
caggaguauaacaaacuua

SEQ ID NO: 2609065 - RNA, 19 nt, Homo sapiens
  misc_RNA (1)...(19): siRNA sense strand
cuugaugaagaaagaaaca

SEQ ID NO: 2609066 - RNA, 19 nt, Homo sapiens
  misc_RNA (1)...(19): siRNA sense strand
uugagaggauucaggcaga

SEQ ID NO: 2609067 - RNA, 19 nt, Homo sapiens
  misc_RNA (1)...(19): siRNA sense strand
cagauacaagaaagggaga

SEQ ID NO: 2609068 - RNA, 19 nt, Homo sapiens
  misc_RNA (1)...(19): siRNA sense strand
cgaaauaugauaaagcaug

SEQ ID NO: 2609069 - RNA, 19 nt, Homo sapiens
  misc_RNA (1)...(19): siRNA sense strand
gcaagaguuggaagcaaaa

SEQ ID NO: 2609070 - RNA, 19 nt, Homo sapiens
  misc_RNA (1)...(19): siRNA sense strand
aagccaaccaaauaacuaa

SEQ ID NO: 2609071 - RNA, 19 nt, Homo sapiens
  misc_RNA (1)...(19): siRNA sense strand
ccuuaauagugaucuacga

SEQ ID NO: 2609072 - RNA, 19 nt, Homo sapiens
  misc_RNA (1)...(19): siRNA sense strand
aaaaccuugucuagagaaa

SEQ ID NO: 2609073 - RNA, 19 nt, Homo sapiens
  misc_RNA (1)...(19): siRNA sense strand
aguuagagaagcagaagaa

SEQ ID NO: 2609074 - RNA, 19 nt, Homo sapiens
  misc_RNA (1)...(19): siRNA sense strand
ccuagaaagagaacgacaa

SEQ ID NO: 2609075 - RNA, 19 nt, Homo sapiens
  misc_RNA (1)...(19): siRNA sense strand
gagaagcagaagaaggaau

SEQ ID NO: 2609076 - RNA, 19 nt, Homo sapiens
  misc_RNA (1)...(19): siRNA sense strand
aagcaacagcagagccaua

SEQ ID NO: 2609077 - RNA, 19 nt, Homo sapiens
  misc_RNA (1)...(19): siRNA sense strand
gaaacugagaccuggagaa

SEQ ID NO: 2609078 - RNA, 19 nt, Homo sapiens
  misc_RNA (1)...(19): siRNA sense strand
acaguaaagcuuugugcaa

SEQ ID NO: 2609079 - RNA, 19 nt, Homo sapiens
  misc_RNA (1)...(19): siRNA sense strand
uuggaauacaugcgaaaua

SEQ ID NO: 2609080 - RNA, 19 nt, Homo sapiens
  misc_RNA (1)...(19): siRNA sense strand
agauuaugcuugggugaua

SEQ ID NO: 2609081 - RNA, 19 nt, Homo sapiens
  misc_RNA (1)...(19): siRNA sense strand
gcgaaauaugauaaagcau

SEQ ID NO: 2609082 - RNA, 19 nt, Homo sapiens
  misc_RNA (1)...(19): siRNA sense strand
agugugaauuggaggcauu

SEQ ID NO: 2609083 - RNA, 19 nt, Homo sapiens
  misc_RNA (1)...(19): siRNA sense strand
gggaaggauggaagcaaaa

SEQ ID NO: 2609084 - RNA, 19 nt, Homo sapiens
  misc_RNA (1)...(19): siRNA sense strand
aguaguuuguguugggauu

SEQ ID NO: 2609085 - RNA, 19 nt, Homo sapiens
  misc_RNA (1)...(19): siRNA sense strand
gauacaagaaagggagaau

SEQ ID NO: 2609086 - RNA, 19 nt, Homo sapiens
  misc_RNA (1)...(19): siRNA sense strand
aaacugagaccuggagaaa

SEQ ID NO: 2609087 - RNA, 19 nt, Homo sapiens
  misc_RNA (1)...(19): siRNA sense strand
gaagaaagaaacagcagca

SEQ ID NO: 2609088 - RNA, 19 nt, Homo sapiens
  misc_RNA (1)...(19): siRNA sense strand
caucugucuuagagaaaca

SEQ ID NO: 2609089 - RNA, 19 nt, Homo sapiens
  misc_RNA (1)...(19): siRNA sense strand
agucaaaaccaccagaaaa

SEQ ID NO: 2609090 - RNA, 19 nt, Homo sapiens
  misc_RNA (1)...(19): siRNA sense strand
aauuggaauacaugcgaaa

SEQ ID NO: 2609091 - RNA, 19 nt, Homo sapiens
  misc_RNA (1)...(19): siRNA sense strand
gggaaguccacaagcccua

SEQ ID NO: 2609092 - RNA, 19 nt, Homo sapiens
  misc_RNA (1)...(19): siRNA sense strand
agaaguuagagaagcagaa

SEQ ID NO: 2609093 - RNA, 19 nt, Homo sapiens
  misc_RNA (1)...(19): siRNA sense strand
agacuuuacaggaugaauu

SEQ ID NO: 2609094 - RNA, 19 nt, Homo sapiens
  misc_RNA (1)...(19): siRNA sense strand
uggagaaacagaaguuaga

SEQ ID NO: 2609095 - RNA, 19 nt, Homo sapiens
  misc_RNA (1)...(19): siRNA sense strand
augcaagaguuggaagcaa

SEQ ID NO: 2609096 - RNA, 19 nt, Homo sapiens
  misc_RNA (1)...(19): siRNA sense strand
aggaaacgcaugcaagcua

SEQ ID NO: 2609097 - RNA, 19 nt, Homo sapiens
  misc_RNA (1)...(19): siRNA sense strand
acaggaugaauuugggcaa

SEQ ID NO: 2609098 - RNA, 19 nt, Homo sapiens
  misc_RNA (1)...(19): siRNA sense strand
gaggauucaggcagaagaa

SEQ ID NO: 2609099 - RNA, 19 nt, Homo sapiens
  misc_RNA (1)...(19): siRNA sense strand
gccgaaauggagaggacau

SEQ ID NO: 2609100 - RNA, 19 nt, Homo sapiens
  misc_RNA (1)...(19): siRNA sense strand
aacagaaguuagagaagca

SEQ ID NO: 2609101 - RNA, 19 nt, Homo sapiens
  misc_RNA (1)...(19): siRNA sense strand
gaaagcaacagcagagcca

SEQ ID NO: 2609102 - RNA, 19 nt, Homo sapiens
  misc_RNA (1)...(19): siRNA sense strand
augaggaaucaaagcacaa

SEQ ID NO: 2609103 - RNA, 19 nt, Homo sapiens
  misc_RNA (1)...(19): siRNA sense strand
gaacuauuuuggugcacaa

SEQ ID NO: 2609104 - RNA, 19 nt, Homo sapiens
  misc_RNA (1)...(19): siRNA sense strand
aagcagaagaaggaauuaa

SEQ ID NO: 2609105 - RNA, 19 nt, Homo sapiens
  misc_RNA (1)...(19): siRNA sense strand
agaacgacaacaugaucaa

SEQ ID NO: 2609106 - RNA, 19 nt, Homo sapiens
  misc_RNA (1)...(19): siRNA sense strand
caugaagaagaacaggaaa

SEQ ID NO: 2609107 - RNA, 19 nt, Homo sapiens
  misc_RNA (1)...(19): siRNA sense strand
uugaacaggaguauaacaa

SEQ ID NO: 2609108 - RNA, 19 nt, Homo sapiens
  misc_RNA (1)...(19): siRNA sense strand
augaagaagaacaggaaag

SEQ ID NO: 2609109 - RNA, 19 nt, Homo sapiens
  misc_RNA (1)...(19): siRNA sense strand
cugaaagacaaguuggagu

SEQ ID NO: 2609110 - RNA, 19 nt, Homo sapiens
  misc_RNA (1)...(19): siRNA sense strand
agcagaagaaggaauuaaa

SEQ ID NO: 2609111 - RNA, 19 nt, Homo sapiens
  misc_RNA (1)...(19): siRNA sense strand
ucccaaugcaagaagaauu

SEQ ID NO: 2609112 - RNA, 19 nt, Homo sapiens
  misc_RNA (1)...(19): siRNA sense strand
gguaaaaguaagaaguugu

SEQ ID NO: 2609113 - RNA, 19 nt, Homo sapiens
  misc_RNA (1)...(19): siRNA sense strand
aguaaagcuuugugcaaug

SEQ ID NO: 2609114 - RNA, 19 nt, Homo sapiens
  misc_RNA (1)...(19): siRNA sense strand
cuuacagacuuuacaggau

SEQ ID NO: 2609115 - RNA, 19 nt, Homo sapiens
  misc_RNA (1)...(19): siRNA sense strand
aagcaaaagccaaccaaau

SEQ ID NO: 2609116 - RNA, 19 nt, Homo sapiens
  misc_RNA (1)...(19): siRNA sense strand
acgacaacaugaucaaaca

SEQ ID NO: 2609117 - RNA, 19 nt, Homo sapiens
  misc_RNA (1)...(19): siRNA sense strand
gauucaggcagaagaaagu

SEQ ID NO: 2609118 - RNA, 19 nt, Homo sapiens
  misc_RNA (1)...(19): siRNA sense strand
caggaguauaacaaacuua

SEQ ID NO: 2609119 - RNA, 19 nt, Homo sapiens
  misc_RNA (1)...(19): siRNA sense strand
cuugaugaagaaagaaaca

SEQ ID NO: 2609120 - RNA, 19 nt, Homo sapiens
  misc_RNA (1)...(19): siRNA sense strand
uugagaggauucaggcaga

SEQ ID NO: 2609121 - RNA, 19 nt, Homo sapiens
  misc_RNA (1)...(19): siRNA sense strand
cagauacaagaaagggaga

SEQ ID NO: 2609122 - RNA, 19 nt, Homo sapiens
  misc_RNA (1)...(19): siRNA sense strand
cgaaauaugauaaagcaug

SEQ ID NO: 2609123 - RNA, 19 nt, Homo sapiens
  misc_RNA (1)...(19): siRNA sense strand
gcaagaguuggaagcaaaa

SEQ ID NO: 2609124 - RNA, 19 nt, Homo sapiens
  misc_RNA (1)...(19): siRNA sense strand
aagccaaccaaauaacuaa

SEQ ID NO: 2609125 - RNA, 19 nt, Homo sapiens
  misc_RNA (1)...(19): siRNA sense strand
ccuuaauagugaucuacga

SEQ ID NO: 2609126 - RNA, 19 nt, Homo sapiens
  misc_RNA (1)...(19): siRNA sense strand
aaaaccuugucuagagaaa

SEQ ID NO: 2609127 - RNA, 19 nt, Homo sapiens
  misc_RNA (1)...(19): siRNA sense strand
uggaggaaugcuuggagaa

SEQ ID NO: 2609128 - RNA, 19 nt, Homo sapiens
  misc_RNA (1)...(19): siRNA sense strand
gagaagacuuugaacugca

SEQ ID NO: 2609129 - RNA, 19 nt, Homo sapiens
  misc_RNA (1)...(19): siRNA sense strand
cgggcagguaugagaugua

SEQ ID NO: 2609130 - RNA, 19 nt, Homo sapiens
  misc_RNA (1)...(19): siRNA sense strand
gaaagaaagcucaccagga

SEQ ID NO: 2609131 - RNA, 19 nt, Homo sapiens
  misc_RNA (1)...(19): siRNA sense strand
ggacagaauuugcugaguc

SEQ ID NO: 2609132 - RNA, 19 nt, Homo sapiens
  misc_RNA (1)...(19): siRNA sense strand
agagaagcuuccuuggaca

SEQ ID NO: 2609133 - RNA, 19 nt, Homo sapiens
  misc_RNA (1)...(19): siRNA sense strand
cauagacgcauaaaggcua

SEQ ID NO: 2609134 - RNA, 19 nt, Homo sapiens
  misc_RNA (1)...(19): siRNA sense strand
cgauaggagcacucagcga

SEQ ID NO: 2609135 - RNA, 19 nt, Homo sapiens
  misc_RNA (1)...(19): siRNA sense strand
agguacugguagagaacaa

SEQ ID NO: 2609136 - RNA, 19 nt, Homo sapiens
  misc_RNA (1)...(19): siRNA sense strand
ccauaguagucuagugucu

SEQ ID NO: 2609137 - RNA, 19 nt, Homo sapiens
  misc_RNA (1)...(19): siRNA sense strand
guugauuaauacaggacau

SEQ ID NO: 2609138 - RNA, 19 nt, Homo sapiens
  misc_RNA (1)...(19): siRNA sense strand
gguacaauaaguagagcca

SEQ ID NO: 2609139 - RNA, 19 nt, Homo sapiens
  misc_RNA (1)...(19): siRNA sense strand
acccaaugcuagaggacca

SEQ ID NO: 2609140 - RNA, 19 nt, Homo sapiens
  misc_RNA (1)...(19): siRNA sense strand
gcccagucccagaaacaaa

SEQ ID NO: 2609141 - RNA, 19 nt, Homo sapiens
  misc_RNA (1)...(19): siRNA sense strand
auaaguagagccaggaaga

SEQ ID NO: 2609142 - RNA, 19 nt, Homo sapiens
  misc_RNA (1)...(19): siRNA sense strand
aaguugaaaagcagagaaa

SEQ ID NO: 2609143 - RNA, 19 nt, Homo sapiens
  misc_RNA (1)...(19): siRNA sense strand
uggucuacauggaggcaca

SEQ ID NO: 2609144 - RNA, 19 nt, Homo sapiens
  misc_RNA (1)...(19): siRNA sense strand
cugaggaggaaguugaaaa

SEQ ID NO: 2609145 - RNA, 19 nt, Homo sapiens
  misc_RNA (1)...(19): siRNA sense strand
guugaaaagcagagaaauc

SEQ ID NO: 2609146 - RNA, 19 nt, Homo sapiens
  misc_RNA (1)...(19): siRNA sense strand
gucaaagagaacagaagau

SEQ ID NO: 2609147 - RNA, 19 nt, Homo sapiens
  misc_RNA (1)...(19): siRNA sense strand
ggaagcugcaguuggccaa

SEQ ID NO: 2609148 - RNA, 19 nt, Homo sapiens
  misc_RNA (1)...(19): siRNA sense strand
ucagaaagcacugggucaa

SEQ ID NO: 2609149 - RNA, 19 nt, Homo sapiens
  misc_RNA (1)...(19): siRNA sense strand
ccuuacgaucugugacaau

SEQ ID NO: 2609150 - RNA, 19 nt, Homo sapiens
  misc_RNA (1)...(19): siRNA sense strand
uguuaaagucauugcuguu

SEQ ID NO: 2609151 - RNA, 19 nt, Homo sapiens
  misc_RNA (1)...(19): siRNA sense strand
uggaauggucugagguucu

SEQ ID NO: 2609152 - RNA, 19 nt, Homo sapiens
  misc_RNA (1)...(19): siRNA sense strand
ugguagagaacaaguuuua

SEQ ID NO: 2609153 - RNA, 19 nt, Homo sapiens
  misc_RNA (1)...(19): siRNA sense strand
ucuccugaccugacugaaa

SEQ ID NO: 2609154 - RNA, 19 nt, Homo sapiens
  misc_RNA (1)...(19): siRNA sense strand
gcacugggucaaagagaac

SEQ ID NO: 2609155 - RNA, 19 nt, Homo sapiens
  misc_RNA (1)...(19): siRNA sense strand
agucauugcuguuugccau

SEQ ID NO: 2609156 - RNA, 19 nt, Homo sapiens
  misc_RNA (1)...(19): siRNA sense strand
gacaaaggaucaaaggaag

SEQ ID NO: 2609157 - RNA, 19 nt, Homo sapiens
  misc_RNA (1)...(19): siRNA sense strand
gguugugugcagagagaac

SEQ ID NO: 2609158 - RNA, 19 nt, Homo sapiens
  misc_RNA (1)...(19): siRNA sense strand
cugcgagacuaaagugaaa

SEQ ID NO: 2609159 - RNA, 19 nt, Homo sapiens
  misc_RNA (1)...(19): siRNA sense strand
acauacaaauuuaggguca

SEQ ID NO: 2609160 - RNA, 19 nt, Homo sapiens
  misc_RNA (1)...(19): siRNA sense strand
caaugaaggaggagaaagu

SEQ ID NO: 2609161 - RNA, 19 nt, Homo sapiens
  misc_RNA (1)...(19): siRNA sense strand
auucagaaacagagaucaa

SEQ ID NO: 2609162 - RNA, 19 nt, Homo sapiens
  misc_RNA (1)...(19): siRNA sense strand
cagcagaauaccauacaaa

SEQ ID NO: 2609163 - RNA, 19 nt, Homo sapiens
  misc_RNA (1)...(19): siRNA sense strand
aggagagcgucaaggacaa

SEQ ID NO: 2609164 - RNA, 19 nt, Homo sapiens
  misc_RNA (1)...(19): siRNA sense strand
agauaaugggauuggauuu

SEQ ID NO: 2609165 - RNA, 19 nt, Homo sapiens
  misc_RNA (1)...(19): siRNA sense strand
cggaugaggaccagcaauu

SEQ ID NO: 2609166 - RNA, 19 nt, Homo sapiens
  misc_RNA (1)...(19): siRNA sense strand
gguucaaagcaguggcaca

SEQ ID NO: 2609167 - RNA, 19 nt, Homo sapiens
  misc_RNA (1)...(19): siRNA sense strand
cgucaaggacaauguggaa

SEQ ID NO: 2609168 - RNA, 19 nt, Homo sapiens
  misc_RNA (1)...(19): siRNA sense strand
gaauauaaacggaugagga

SEQ ID NO: 2609169 - RNA, 19 nt, Homo sapiens
  misc_RNA (1)...(19): siRNA sense strand
uaucaagaccugagggcuu

SEQ ID NO: 2609170 - RNA, 19 nt, Homo sapiens
  misc_RNA (1)...(19): siRNA sense strand
cagaaugaugacagaagua

SEQ ID NO: 2609171 - RNA, 19 nt, Homo sapiens
  misc_RNA (1)...(19): siRNA sense strand
aggaggagaaagugaauuu

SEQ ID NO: 2609172 - RNA, 19 nt, Homo sapiens
  misc_RNA (1)...(19): siRNA sense strand
gagaaagugaauuuagcaa

SEQ ID NO: 2609173 - RNA, 19 nt, Homo sapiens
  misc_RNA (1)...(19): siRNA sense strand
gcauguuauuacagcagaa

SEQ ID NO: 2609174 - RNA, 19 nt, Homo sapiens
  misc_RNA (1)...(19): siRNA sense strand
uguuauuacagcagaagaa

SEQ ID NO: 2609175 - RNA, 19 nt, Homo sapiens
  misc_RNA (1)...(19): siRNA sense strand
cuauaaaauccggggaaaa

SEQ ID NO: 2609176 - RNA, 19 nt, Homo sapiens
  misc_RNA (1)...(19): siRNA sense strand
uuugggaaguggaggaaau

SEQ ID NO: 2609177 - RNA, 19 nt, Homo sapiens
  misc_RNA (1)...(19): siRNA sense strand
gcuauaaaauccggggaaa

SEQ ID NO: 2609178 - RNA, 19 nt, Homo sapiens
  misc_RNA (1)...(19): siRNA sense strand
caacaauuuuggaguggua

SEQ ID NO: 2609179 - RNA, 19 nt, Homo sapiens
  misc_RNA (1)...(19): siRNA sense strand
ccucaggaugguuuggaaa

SEQ ID NO: 2609180 - RNA, 19 nt, Homo sapiens
  misc_RNA (1)...(19): siRNA sense strand
ccagaaacuugguggaccu

SEQ ID NO: 2609181 - RNA, 19 nt, Homo sapiens
  misc_RNA (1)...(19): siRNA sense strand
auggaaaccuggaacauau

SEQ ID NO: 2609182 - RNA, 19 nt, Homo sapiens
  misc_RNA (1)...(19): siRNA sense strand
gauucaagccaguuauaau

SEQ ID NO: 2609183 - RNA, 19 nt, Homo sapiens
  misc_RNA (1)...(19): siRNA sense strand
agucuggagauguagaaua

SEQ ID NO: 2609184 - RNA, 19 nt, Homo sapiens
  misc_RNA (1)...(19): siRNA sense strand
gaggagagcgucaaggaca

SEQ ID NO: 2609185 - RNA, 19 nt, Homo sapiens
  misc_RNA (1)...(19): siRNA sense strand
augcuaaaguggacguaca

SEQ ID NO: 2609186 - RNA, 19 nt, Homo sapiens
  misc_RNA (1)...(19): siRNA sense strand
cgacagagguccuucagca

SEQ ID NO: 2609187 - RNA, 19 nt, Homo sapiens
  misc_RNA (1)...(19): siRNA sense strand
uguagcagauaaugggauu

SEQ ID NO: 2609188 - RNA, 19 nt, Homo sapiens
  misc_RNA (1)...(19): siRNA sense strand
acagauuccucuaggcaca

SEQ ID NO: 2609189 - RNA, 19 nt, Homo sapiens
  misc_RNA (1)...(19): siRNA sense strand
agugaauggugguggaaug

SEQ ID NO: 2609190 - RNA, 19 nt, Homo sapiens
  misc_RNA (1)...(19): siRNA sense strand
ccaaagcugaggugcgcua

SEQ ID NO: 2609191 - RNA, 19 nt, Homo sapiens
  misc_RNA (1)...(19): siRNA sense strand
acaucuaacugcaggaaac

SEQ ID NO: 2609192 - RNA, 19 nt, Homo sapiens
  misc_RNA (1)...(19): siRNA sense strand
gggaaauacaucugcgaag

SEQ ID NO: 2609193 - RNA, 19 nt, Homo sapiens
  misc_RNA (1)...(19): siRNA sense strand
guucagacuuggcaccuua

SEQ ID NO: 2609194 - RNA, 19 nt, Homo sapiens
  misc_RNA (1)...(19): siRNA sense strand
uuucagaggcugcaaacaa

SEQ ID NO: 2609195 - RNA, 19 nt, Homo sapiens
  misc_RNA (1)...(19): siRNA sense strand
cgaccaacagauagugaca

SEQ ID NO: 2609196 - RNA, 19 nt, Homo sapiens
  misc_RNA (1)...(19): siRNA sense strand
agacuaaagugaaacgugu

SEQ ID NO: 2609197 - RNA, 19 nt, Homo sapiens
  misc_RNA (1)...(19): siRNA sense strand
accaacagauagugacaau

SEQ ID NO: 2609198 - RNA, 19 nt, Homo sapiens
  misc_RNA (1)...(19): siRNA sense strand
gguugcagacggagacuuu

SEQ ID NO: 2609199 - RNA, 19 nt, Homo sapiens
  misc_RNA (1)...(19): siRNA sense strand
gaucagauaugaacgggca

SEQ ID NO: 2609200 - RNA, 19 nt, Homo sapiens
  misc_RNA (1)...(19): siRNA sense strand
cucaggagcaagucagaua

SEQ ID NO: 2609201 - RNA, 19 nt, Homo sapiens
  misc_RNA (1)...(19): siRNA sense strand
ggggaaaauggcuggaaca

SEQ ID NO: 2609202 - RNA, 19 nt, Homo sapiens
  misc_RNA (1)...(19): siRNA sense strand
gcuugaaccuggagccugu

SEQ ID NO: 2609203 - RNA, 19 nt, Homo sapiens
  misc_RNA (1)...(19): siRNA sense strand
aggcaaggauggugggcug

SEQ ID NO: 2609204 - RNA, 19 nt, Homo sapiens
  misc_RNA (1)...(19): siRNA sense strand
ugaaggaggagaaagugaa

SEQ ID NO: 2609205 - RNA, 19 nt, Homo sapiens
  misc_RNA (1)...(19): siRNA sense strand
ugaugaucugcgagacuaa

SEQ ID NO: 2609206 - RNA, 19 nt, Homo sapiens
  misc_RNA (1)...(19): siRNA sense strand
acgggcagaugguggacua

SEQ ID NO: 2609207 - RNA, 19 nt, Homo sapiens
  misc_RNA (1)...(19): siRNA sense strand
caaugcagucaauggaauu

SEQ ID NO: 2609208 - RNA, 19 nt, Homo sapiens
  misc_RNA (1)...(19): siRNA sense strand
gggaaacaagucuggagau

SEQ ID NO: 2609209 - RNA, 19 nt, Homo sapiens
  misc_RNA (1)...(19): siRNA sense strand
aagagagaugguucagaaa

SEQ ID NO: 2609210 - RNA, 19 nt, Homo sapiens
  misc_RNA (1)...(19): siRNA sense strand
gguucgagucccaggaagu

SEQ ID NO: 2609211 - RNA, 19 nt, Homo sapiens
  misc_RNA (1)...(19): siRNA sense strand
cguacauuccaucaaguaa

SEQ ID NO: 2609212 - RNA, 19 nt, Homo sapiens
  misc_RNA (1)...(19): siRNA sense strand
ggauguuguagaagguuca

SEQ ID NO: 2609213 - RNA, 19 nt, Homo sapiens
  misc_RNA (1)...(19): siRNA sense strand
gcagauaaugggauuggau

SEQ ID NO: 2609214 - RNA, 19 nt, Homo sapiens
  misc_RNA (1)...(19): siRNA sense strand
auacaaaagcagagacagu

SEQ ID NO: 2609215 - RNA, 19 nt, Homo sapiens
  misc_RNA (1)...(19): siRNA sense strand
gugcaaaaggccugaaaua

SEQ ID NO: 2609216 - RNA, 19 nt, Homo sapiens
  misc_RNA (1)...(19): siRNA sense strand
ggacaaggcuacugcagca

SEQ ID NO: 2609217 - RNA, 19 nt, Homo sapiens
  misc_RNA (1)...(19): siRNA sense strand
uggcaaaaguggaagguga

SEQ ID NO: 2609218 - RNA, 19 nt, Homo sapiens
  misc_RNA (1)...(19): siRNA sense strand
cguccuacucccagaacua

SEQ ID NO: 2609219 - RNA, 19 nt, Homo sapiens
  misc_RNA (1)...(19): siRNA sense strand
cugaagaaaagcaugaaaa

SEQ ID NO: 2609220 - RNA, 19 nt, Homo sapiens
  misc_RNA (1)...(19): siRNA sense strand
cggaagaggaagcaagacu

SEQ ID NO: 2609221 - RNA, 19 nt, Homo sapiens
  misc_RNA (1)...(19): siRNA sense strand
ggaaaauguccugaagaaa

SEQ ID NO: 2609222 - RNA, 19 nt, Homo sapiens
  misc_RNA (1)...(19): siRNA sense strand
agaggaaggaggaggugau

SEQ ID NO: 2609223 - RNA, 19 nt, Homo sapiens
  misc_RNA (1)...(19): siRNA sense strand
cuauaaagggcgacggaag

SEQ ID NO: 2609224 - RNA, 19 nt, Homo sapiens
  misc_RNA (1)...(19): siRNA sense strand
ucgacaauccaaagauaau

SEQ ID NO: 2609225 - RNA, 19 nt, Homo sapiens
  misc_RNA (1)...(19): siRNA sense strand
agauguugugagagaauuu

SEQ ID NO: 2609226 - RNA, 19 nt, Homo sapiens
  misc_RNA (1)...(19): siRNA sense strand
cagcauucauuuuggaaga

SEQ ID NO: 2609227 - RNA, 19 nt, Homo sapiens
  misc_RNA (1)...(19): siRNA sense strand
caacaagugugcucgcaga

SEQ ID NO: 2609228 - RNA, 19 nt, Homo sapiens
  misc_RNA (1)...(19): siRNA sense strand
gaagaaagcuuuugcugga

SEQ ID NO: 2609229 - RNA, 19 nt, Homo sapiens
  misc_RNA (1)...(19): siRNA sense strand
aaguagagucaaaggaucu

SEQ ID NO: 2609230 - RNA, 19 nt, Homo sapiens
  misc_RNA (1)...(19): siRNA sense strand
ccaacauauucaguggaua

SEQ ID NO: 2609231 - RNA, 19 nt, Homo sapiens
  misc_RNA (1)...(19): siRNA sense strand
ggcaaaaguggaaggugaa

SEQ ID NO: 2609232 - RNA, 19 nt, Homo sapiens
  misc_RNA (1)...(19): siRNA sense strand
ggaaguaaguccuggugag

SEQ ID NO: 2609233 - RNA, 19 nt, Homo sapiens
  misc_RNA (1)...(19): siRNA sense strand
caugaaugguaugaaacaa

SEQ ID NO: 2609234 - RNA, 19 nt, Homo sapiens
  misc_RNA (1)...(19): siRNA sense strand
ccugauuaguggauuacau

SEQ ID NO: 2609235 - RNA, 19 nt, Homo sapiens
  misc_RNA (1)...(19): siRNA sense strand
ucucagaguagacaagcaa

SEQ ID NO: 2609236 - RNA, 19 nt, Homo sapiens
  misc_RNA (1)...(19): siRNA sense strand
gagcuuaucuacacggacu

SEQ ID NO: 2609237 - RNA, 19 nt, Homo sapiens
  misc_RNA (1)...(19): siRNA sense strand
cuguaugaggagaucggaa

SEQ ID NO: 2609238 - RNA, 19 nt, Homo sapiens
  misc_RNA (1)...(19): siRNA sense strand
ucagaguagacaagcaaaa

SEQ ID NO: 2609239 - RNA, 19 nt, Homo sapiens
  misc_RNA (1)...(19): siRNA sense strand
ccucugaccaagauuacaa

SEQ ID NO: 2609240 - RNA, 19 nt, Homo sapiens
  misc_RNA (1)...(19): siRNA sense strand
uggaaucccagaugagaga

SEQ ID NO: 2609241 - RNA, 19 nt, Homo sapiens
  misc_RNA (1)...(19): siRNA sense strand
gaguuucggccuaagggua

SEQ ID NO: 2609242 - RNA, 19 nt, Homo sapiens
  misc_RNA (1)...(19): siRNA sense strand
uuaauuugcuugauggguu

SEQ ID NO: 2609243 - RNA, 19 nt, Homo sapiens
  misc_RNA (1)...(19): siRNA sense strand
ggucaaagacugggcgguu

SEQ ID NO: 2609244 - RNA, 19 nt, Homo sapiens
  misc_RNA (1)...(19): siRNA sense strand
agagaguguaucugggaau

SEQ ID NO: 2609245 - RNA, 19 nt, Homo sapiens
  misc_RNA (1)...(19): siRNA sense strand
gcgaagaguuugggcagga

SEQ ID NO: 2609246 - RNA, 19 nt, Homo sapiens
  misc_RNA (1)...(19): siRNA sense strand
caguaauggcugaugggca

SEQ ID NO: 2609247 - RNA, 19 nt, Homo sapiens
  misc_RNA (1)...(19): siRNA sense strand
aguaauggcugaugggcac

SEQ ID NO: 2609248 - RNA, 19 nt, Homo sapiens
  misc_RNA (1)...(19): siRNA sense strand
gcaugcaagaauacaguca

SEQ ID NO: 2609249 - RNA, 19 nt, Homo sapiens
  misc_RNA (1)...(19): siRNA sense strand
uggcagacagugaagacau

SEQ ID NO: 2609250 - RNA, 19 nt, Homo sapiens
  misc_RNA (1)...(19): siRNA sense strand
aguuugggcaggagacaga

SEQ ID NO: 2609251 - RNA, 19 nt, Homo sapiens
  misc_RNA (1)...(19): siRNA sense strand
guauaaagcccuggagcaa

SEQ ID NO: 2609252 - RNA, 19 nt, Homo sapiens
  misc_RNA (1)...(19): siRNA sense strand
agaggaaauucaagagaga

SEQ ID NO: 2609253 - RNA, 19 nt, Homo sapiens
  misc_RNA (1)...(19): siRNA sense strand
ccgcagagaaacugaaaga

SEQ ID NO: 2609254 - RNA, 19 nt, Homo sapiens
  misc_RNA (1)...(19): siRNA sense strand
caccaugacaggagugaaa

SEQ ID NO: 2609255 - RNA, 19 nt, Homo sapiens
  misc_RNA (1)...(19): siRNA sense strand
aggcaagcacugugaggaa

SEQ ID NO: 2609256 - RNA, 19 nt, Homo sapiens
  misc_RNA (1)...(19): siRNA sense strand
ccugauagaaggagacuuu

SEQ ID NO: 2609257 - RNA, 19 nt, Homo sapiens
  misc_RNA (1)...(19): siRNA sense strand
ggauggagucacaaguaua

SEQ ID NO: 2609258 - RNA, 19 nt, Homo sapiens
  misc_RNA (1)...(19): siRNA sense strand
cguuagaacuggaccggau

SEQ ID NO: 2609259 - RNA, 19 nt, Homo sapiens
  misc_RNA (1)...(19): siRNA sense strand
gggaagauuucucugggua

SEQ ID NO: 2609260 - RNA, 19 nt, Homo sapiens
  misc_RNA (1)...(19): siRNA sense strand
ggaaaaugacaguggcgua

SEQ ID NO: 2609261 - RNA, 19 nt, Homo sapiens
  misc_RNA (1)...(19): siRNA sense strand
uuguggaacuggaugauaa

SEQ ID NO: 2609262 - RNA, 19 nt, Homo sapiens
  misc_RNA (1)...(19): siRNA sense strand
ugagcaaguccaagagcaa

SEQ ID NO: 2609263 - RNA, 19 nt, Homo sapiens
  misc_RNA (1)...(19): siRNA sense strand
uuaccaggcuacaaggaaa

SEQ ID NO: 2609264 - RNA, 19 nt, Homo sapiens
  misc_RNA (1)...(19): siRNA sense strand
gcaacaaguggaagagguu

SEQ ID NO: 2609265 - RNA, 19 nt, Homo sapiens
  misc_RNA (1)...(19): siRNA sense strand
ccagaaucagagagaguuu

SEQ ID NO: 2609266 - RNA, 19 nt, Homo sapiens
  misc_RNA (1)...(19): siRNA sense strand
gcuuaaucaugaagaaacu

SEQ ID NO: 2609267 - RNA, 19 nt, Homo sapiens
  misc_RNA (1)...(19): siRNA sense strand
ugauagaagaagccacaaa

SEQ ID NO: 2609268 - RNA, 19 nt, Homo sapiens
  misc_RNA (1)...(19): siRNA sense strand
agauuauauugcugagaca

SEQ ID NO: 2609269 - RNA, 19 nt, Homo sapiens
  misc_RNA (1)...(19): siRNA sense strand
uggcaagguugguaguuau

SEQ ID NO: 2609270 - RNA, 19 nt, Homo sapiens
  misc_RNA (1)...(19): siRNA sense strand
gcagagaagaaaucagaca

SEQ ID NO: 2609271 - RNA, 19 nt, Homo sapiens
  misc_RNA (1)...(19): siRNA sense strand
ugagaaugugauagaagaa

SEQ ID NO: 2609272 - RNA, 19 nt, Homo sapiens
  misc_RNA (1)...(19): siRNA sense strand
ucagagagaguuuggacaa

SEQ ID NO: 2609273 - RNA, 19 nt, Homo sapiens
  misc_RNA (1)...(19): siRNA sense strand
gggcuggaugugagaagua

SEQ ID NO: 2609274 - RNA, 19 nt, Homo sapiens
  misc_RNA (1)...(19): siRNA sense strand
ggaagauuucucuggguau

SEQ ID NO: 2609275 - RNA, 19 nt, Homo sapiens
  misc_RNA (1)...(19): siRNA sense strand
uugaagagucagaagauuu

SEQ ID NO: 2609276 - RNA, 19 nt, Homo sapiens
  misc_RNA (1)...(19): siRNA sense strand
augaaugguuugacaguga

SEQ ID NO: 2609277 - RNA, 19 nt, Homo sapiens
  misc_RNA (1)...(19): siRNA sense strand
gagagcaacaaguggaaga

SEQ ID NO: 2609278 - RNA, 19 nt, Homo sapiens
  misc_RNA (1)...(19): siRNA sense strand
ucaugaagaaacugacuua

SEQ ID NO: 2609279 - RNA, 19 nt, Homo sapiens
  misc_RNA (1)...(19): siRNA sense strand
agccaauguugaagaguca

SEQ ID NO: 2609280 - RNA, 19 nt, Homo sapiens
  misc_RNA (1)...(19): siRNA sense strand
cuccaaagucaaagaccaa

SEQ ID NO: 2609281 - RNA, 19 nt, Homo sapiens
  misc_RNA (1)...(19): siRNA sense strand
gguugguaguuauguggaa

SEQ ID NO: 2609282 - RNA, 19 nt, Homo sapiens
  misc_RNA (1)...(19): siRNA sense strand
guaugagagcagugagcuu

SEQ ID NO: 2609283 - RNA, 19 nt, Homo sapiens
  misc_RNA (1)...(19): siRNA sense strand
aggccagaggagaguauua

SEQ ID NO: 2609284 - RNA, 19 nt, Homo sapiens
  misc_RNA (1)...(19): siRNA sense strand
gggaagcaguacagggaag

SEQ ID NO: 2609285 - RNA, 19 nt, Homo sapiens
  misc_RNA (1)...(19): siRNA sense strand
aucaguaacuucagagauu

SEQ ID NO: 2609286 - RNA, 19 nt, Homo sapiens
  misc_RNA (1)...(19): siRNA sense strand
gguaaagccagauaugcaa

SEQ ID NO: 2609287 - RNA, 19 nt, Homo sapiens
  misc_RNA (1)...(19): siRNA sense strand
aacaaguggaagagguuua

SEQ ID NO: 2609288 - RNA, 19 nt, Homo sapiens
  misc_RNA (1)...(19): siRNA sense strand
cuugguagaagauggauua

SEQ ID NO: 2609289 - RNA, 19 nt, Homo sapiens
  misc_RNA (1)...(19): siRNA sense strand
aauauuugacggugguuua

SEQ ID NO: 2609290 - RNA, 19 nt, Homo sapiens
  misc_RNA (1)...(19): siRNA sense strand
gguucagggucugggcaaa

SEQ ID NO: 2609291 - RNA, 19 nt, Homo sapiens
  misc_RNA (1)...(19): siRNA sense strand
uugagaaugcugugaagua

SEQ ID NO: 2609292 - RNA, 19 nt, Homo sapiens
  misc_RNA (1)...(19): siRNA sense strand
ggagaguauuagcaaugaa

SEQ ID NO: 2609293 - RNA, 19 nt, Homo sapiens
  misc_RNA (1)...(19): siRNA sense strand
ugauauuuguccugauaga

SEQ ID NO: 2609294 - RNA, 19 nt, Homo sapiens
  misc_RNA (1)...(19): siRNA sense strand
ugccaaugauccugaguuu

SEQ ID NO: 2609295 - RNA, 19 nt, Homo sapiens
  misc_RNA (1)...(19): siRNA sense strand
ccacaaaaccagcagguga

SEQ ID NO: 2609296 - RNA, 19 nt, Homo sapiens
  misc_RNA (1)...(19): siRNA sense strand
ccuccaaagucaaagacca

SEQ ID NO: 2609297 - RNA, 19 nt, Homo sapiens
  misc_RNA (1)...(19): siRNA sense strand
ccacccugcuagaggauga

SEQ ID NO: 2609298 - RNA, 19 nt, Homo sapiens
  misc_RNA (1)...(19): siRNA sense strand
gcaagcacugugaggaauu

SEQ ID NO: 2609299 - RNA, 19 nt, Homo sapiens
  misc_RNA (1)...(19): siRNA sense strand
gggcugagcagagaagaaa

SEQ ID NO: 2609300 - RNA, 19 nt, Homo sapiens
  misc_RNA (1)...(19): siRNA sense strand
ccaccagcaccuugaagaa

SEQ ID NO: 2609301 - RNA, 19 nt, Homo sapiens
  misc_RNA (1)...(19): siRNA sense strand
uguggaacauagaagcuua

SEQ ID NO: 2609302 - RNA, 19 nt, Homo sapiens
  misc_RNA (1)...(19): siRNA sense strand
ccaacaagguggaaaacca

SEQ ID NO: 2609303 - RNA, 19 nt, Homo sapiens
  misc_RNA (1)...(19): siRNA sense strand
agaagauggauuagccaau

SEQ ID NO: 2609304 - RNA, 19 nt, Homo sapiens
  misc_RNA (1)...(19): siRNA sense strand
ugguuuagguucagggucu

SEQ ID NO: 2609305 - RNA, 19 nt, Homo sapiens
  misc_RNA (1)...(19): siRNA sense strand
uguacaugauucuggaaga

SEQ ID NO: 2609306 - RNA, 19 nt, Homo sapiens
  misc_RNA (1)...(19): siRNA sense strand
ggauaggcacagauuacua

SEQ ID NO: 2609307 - RNA, 19 nt, Homo sapiens
  misc_RNA (1)...(19): siRNA sense strand
ggcacaaauuuuagugaau

SEQ ID NO: 2609308 - RNA, 19 nt, Homo sapiens
  misc_RNA (1)...(19): siRNA sense strand
ugacggugguuuagguuca

SEQ ID NO: 2609309 - RNA, 19 nt, Homo sapiens
  misc_RNA (1)...(19): siRNA sense strand
agagaagaaaucagacaga

SEQ ID NO: 2609310 - RNA, 19 nt, Homo sapiens
  misc_RNA (1)...(19): siRNA sense strand
agaaacugacuuaugcaaa

SEQ ID NO: 2609311 - RNA, 19 nt, Homo sapiens
  misc_RNA (1)...(19): siRNA sense strand
ugacaguggcguagauguu

SEQ ID NO: 2609312 - RNA, 19 nt, Homo sapiens
  misc_RNA (1)...(19): siRNA sense strand
cuuugaaaucuuaggagua

SEQ ID NO: 2609313 - RNA, 19 nt, Homo sapiens
  misc_RNA (1)...(19): siRNA sense strand
gcaccauguuugagcucau

SEQ ID NO: 2609314 - RNA, 19 nt, Homo sapiens
  misc_RNA (1)...(19): siRNA sense strand
gcuauuuuauugugagcaa

SEQ ID NO: 2609315 - RNA, 19 nt, Homo sapiens
  misc_RNA (1)...(19): siRNA sense strand
uagcacagauaaugggcau

SEQ ID NO: 2609316 - RNA, 19 nt, Homo sapiens
  misc_RNA (1)...(19): siRNA sense strand
ucacugaaguccuuggaga

SEQ ID NO: 2609317 - RNA, 19 nt, Homo sapiens
  misc_RNA (1)...(19): siRNA sense strand
cacugaaguccuuggagaa

SEQ ID NO: 2609318 - RNA, 19 nt, Homo sapiens
  misc_RNA (1)...(19): siRNA sense strand
cugugaauuaucugggaau

SEQ ID NO: 2609319 - RNA, 19 nt, Homo sapiens
  misc_RNA (1)...(19): siRNA sense strand
cacaagaggcauugagauc

SEQ ID NO: 2609320 - RNA, 19 nt, Homo sapiens
  misc_RNA (1)...(19): siRNA sense strand
ccaucagguuucuggggaa

SEQ ID NO: 2609321 - RNA, 19 nt, Homo sapiens
  misc_RNA (1)...(19): siRNA sense strand
agauaaugggcauguacuu

SEQ ID NO: 2609322 - RNA, 19 nt, Homo sapiens
  misc_RNA (1)...(19): siRNA sense strand
aaguggaugcuuuggaaga

SEQ ID NO: 2609323 - RNA, 19 nt, Homo sapiens
  misc_RNA (1)...(19): siRNA sense strand
uggaauaaucaucgucaca

SEQ ID NO: 2609324 - RNA, 19 nt, Homo sapiens
  misc_RNA (1)...(19): siRNA sense strand
cgccaauuguuuaaagacu

SEQ ID NO: 2609325 - RNA, 19 nt, Homo sapiens
  misc_RNA (1)...(19): siRNA sense strand
ucuggaaacagcugaucua

SEQ ID NO: 2609326 - RNA, 19 nt, Homo sapiens
  misc_RNA (1)...(19): siRNA sense strand
cuauaugcuaccaaggaga

SEQ ID NO: 2609327 - RNA, 19 nt, Homo sapiens
  misc_RNA (1)...(19): siRNA sense strand
gugcggagcuccagcauua

SEQ ID NO: 2609328 - RNA, 19 nt, Homo sapiens
  misc_RNA (1)...(19): siRNA sense strand
cagcauuagcggugaaauc

SEQ ID NO: 2609329 - RNA, 19 nt, Homo sapiens
  misc_RNA (1)...(19): siRNA sense strand
aagacaaagaugaccaaga

SEQ ID NO: 2609330 - RNA, 19 nt, Homo sapiens
  misc_RNA (1)...(19): siRNA sense strand
caacaccacccaugggaga

SEQ ID NO: 2609331 - RNA, 19 nt, Homo sapiens
  misc_RNA (1)...(19): siRNA sense strand
acaagugcuucaugggcau

SEQ ID NO: 2609332 - RNA, 19 nt, Homo sapiens
  misc_RNA (1)...(19): siRNA sense strand
ugacaggcaccgugggcaa

SEQ ID NO: 2609333 - RNA, 19 nt, Homo sapiens
  misc_RNA (1)...(19): siRNA sense strand
gagcuaagcagauggcaga

SEQ ID NO: 2609334 - RNA, 19 nt, Homo sapiens
  misc_RNA (1)...(19): siRNA sense strand
acucaucagaagugggaga

SEQ ID NO: 2609335 - RNA, 19 nt, Homo sapiens
  misc_RNA (1)...(19): siRNA sense strand
aucaacagcaagagagcua

SEQ ID NO: 2609336 - RNA, 19 nt, Homo sapiens
  misc_RNA (1)...(19): siRNA sense strand
cugccaaagcccagccaau

SEQ ID NO: 2609337 - RNA, 19 nt, Homo sapiens
  misc_RNA (1)...(19): siRNA sense strand
uaagcagauggcagagaaa

SEQ ID NO: 2609338 - RNA, 19 nt, Homo sapiens
  misc_RNA (1)...(19): siRNA sense strand
ggaacagcucugacgccaa

SEQ ID NO: 2609339 - RNA, 19 nt, Homo sapiens
  misc_RNA (1)...(19): siRNA sense strand
cagcacaggcacuggacca

SEQ ID NO: 2609340 - RNA, 19 nt, Homo sapiens
  misc_RNA (1)...(19): siRNA sense strand
gccaauuaaaggagccaga

SEQ ID NO: 2609341 - RNA, 19 nt, Homo sapiens
  misc_RNA (1)...(19): siRNA sense strand
caucagaagugggagacca

SEQ ID NO: 2609342 - RNA, 19 nt, Homo sapiens
  misc_RNA (1)...(19): siRNA sense strand
ggucaaacgagcagcacag

SEQ ID NO: 2609343 - RNA, 19 nt, Homo sapiens
  misc_RNA (1)...(19): siRNA sense strand
cagguuagcaucaggagga

SEQ ID NO: 2609344 - RNA, 19 nt, Homo sapiens
  misc_RNA (1)...(19): siRNA sense strand
ggauaaaguaauugagaga

SEQ ID NO: 2609345 - RNA, 19 nt, Homo sapiens
  misc_RNA (1)...(19): siRNA sense strand
ggacacaaauugagcuuaa

SEQ ID NO: 2609346 - RNA, 19 nt, Homo sapiens
  misc_RNA (1)...(19): siRNA sense strand
guuuacagaaagagagaaa

SEQ ID NO: 2609347 - RNA, 19 nt, Homo sapiens
  misc_RNA (1)...(19): siRNA sense strand
gcacaaugcaggaggacau

SEQ ID NO: 2609348 - RNA, 19 nt, Homo sapiens
  misc_RNA (1)...(19): siRNA sense strand
gaacuaucaaagagggaaa

SEQ ID NO: 2609349 - RNA, 19 nt, Homo sapiens
  misc_RNA (1)...(19): siRNA sense strand
augaagaaccagagaguau

SEQ ID NO: 2609350 - RNA, 19 nt, Homo sapiens
  misc_RNA (1)...(19): siRNA sense strand
guagaaaugaagucagaaa

SEQ ID NO: 2609351 - RNA, 19 nt, Homo sapiens
  misc_RNA (1)...(19): siRNA sense strand
ggguagagcaagaaauaau

SEQ ID NO: 2609352 - RNA, 19 nt, Homo sapiens
  misc_RNA (1)...(19): siRNA sense strand
agaggaaacaagagaaauu

SEQ ID NO: 2609353 - RNA, 19 nt, Homo sapiens
  misc_RNA (1)...(19): siRNA sense strand
uguuacaagucuauggaaa

SEQ ID NO: 2609354 - RNA, 19 nt, Homo sapiens
  misc_RNA (1)...(19): siRNA sense strand
ccguugaaauggaggauga

SEQ ID NO: 2609355 - RNA, 19 nt, Homo sapiens
  misc_RNA (1)...(19): siRNA sense strand
cagaagaaucagagaacca

SEQ ID NO: 2609356 - RNA, 19 nt, Homo sapiens
  misc_RNA (1)...(19): siRNA sense strand
ugaaagaugcugagaagau

SEQ ID NO: 2609357 - RNA, 19 nt, Homo sapiens
  misc_RNA (1)...(19): siRNA sense strand
cagagagaugucagagaaa

SEQ ID NO: 2609358 - RNA, 19 nt, Homo sapiens
  misc_RNA (1)...(19): siRNA sense strand
ucagaaagacaguggauga

SEQ ID NO: 2609359 - RNA, 19 nt, Homo sapiens
  misc_RNA (1)...(19): siRNA sense strand
acccaaaguaauagugaua

SEQ ID NO: 2609360 - RNA, 19 nt, Homo sapiens
  misc_RNA (1)...(19): siRNA sense strand
ugaacuuagugaaggacaa

SEQ ID NO: 2609361 - RNA, 19 nt, Homo sapiens
  misc_RNA (1)...(19): siRNA sense strand
guauacaaugggacagaaa

SEQ ID NO: 2609362 - RNA, 19 nt, Homo sapiens
  misc_RNA (1)...(19): siRNA sense strand
ucagaggaaacaagagaaa

SEQ ID NO: 2609363 - RNA, 19 nt, Homo sapiens
  misc_RNA (1)...(19): siRNA sense strand
agaaacuggaguaaagaaa

SEQ ID NO: 2609364 - RNA, 19 nt, Homo sapiens
  misc_RNA (1)...(19): siRNA sense strand
cugacaaaccuuaaugaua

SEQ ID NO: 2609365 - RNA, 19 nt, Homo sapiens
  misc_RNA (1)...(19): siRNA sense strand
aguuaaaggcacuaaggua

SEQ ID NO: 2609366 - RNA, 19 nt, Homo sapiens
  misc_RNA (1)...(19): siRNA sense strand
cagaaauuaugaagguaga

SEQ ID NO: 2609367 - RNA, 19 nt, Homo sapiens
  misc_RNA (1)...(19): siRNA sense strand
auguaagacuauuggaaca

SEQ ID NO: 2609368 - RNA, 19 nt, Homo sapiens
  misc_RNA (1)...(19): siRNA sense strand
acagaaagagagaaaggaa

SEQ ID NO: 2609369 - RNA, 19 nt, Homo sapiens
  misc_RNA (1)...(19): siRNA sense strand
caacaaaaccuaagaagau

SEQ ID NO: 2609370 - RNA, 19 nt, Homo sapiens
  misc_RNA (1)...(19): siRNA sense strand
ggaugaagaaccagagagu

SEQ ID NO: 2609371 - RNA, 19 nt, Homo sapiens
  misc_RNA (1)...(19): siRNA sense strand
gggugaacuuagugaagga

SEQ ID NO: 2609372 - RNA, 19 nt, Homo sapiens
  misc_RNA (1)...(19): siRNA sense strand
ccuacguguuagaaauaaa

SEQ ID NO: 2609373 - RNA, 19 nt, Homo sapiens
  misc_RNA (1)...(19): siRNA sense strand
caaaagaaucucugaguau

SEQ ID NO: 2609374 - RNA, 19 nt, Homo sapiens
  misc_RNA (1)...(19): siRNA sense strand
cuucaaguuuacagaaaga

SEQ ID NO: 2609375 - RNA, 19 nt, Homo sapiens
  misc_RNA (1)...(19): siRNA sense strand
gguaaagucaauaagaaca

SEQ ID NO: 2609376 - RNA, 19 nt, Homo sapiens
  misc_RNA (1)...(19): siRNA sense strand
acucaggagacuagaauuu

SEQ ID NO: 2609377 - RNA, 19 nt, Homo sapiens
  misc_RNA (1)...(19): siRNA sense strand
caguaauacaagaugaaga

SEQ ID NO: 2609378 - RNA, 19 nt, Homo sapiens
  misc_RNA (1)...(19): siRNA sense strand
auucagaggacuuggaaaa

SEQ ID NO: 2609379 - RNA, 19 nt, Homo sapiens
  misc_RNA (1)...(19): siRNA sense strand
caaacaaccaauacaacaa

SEQ ID NO: 2609380 - RNA, 19 nt, Homo sapiens
  misc_RNA (1)...(19): siRNA sense strand
gaucagaagaaucagagaa

SEQ ID NO: 2609381 - RNA, 19 nt, Homo sapiens
  misc_RNA (1)...(19): siRNA sense strand
uuaugaagguagaugaaga

SEQ ID NO: 2609382 - RNA, 19 nt, Homo sapiens
  misc_RNA (1)...(19): siRNA sense strand
guguagauauugacagcau

SEQ ID NO: 2609383 - RNA, 19 nt, Homo sapiens
  misc_RNA (1)...(19): siRNA sense strand
augaagaagaggugaaguu

SEQ ID NO: 2609384 - RNA, 19 nt, Homo sapiens
  misc_RNA (1)...(19): siRNA sense strand
caauaagaacacagacuga

SEQ ID NO: 2609385 - RNA, 19 nt, Homo sapiens
  misc_RNA (1)...(19): siRNA sense strand
caauauuuguucagcccaa

SEQ ID NO: 2609386 - RNA, 19 nt, Homo sapiens
  misc_RNA (1)...(19): siRNA sense strand
ugucauacaggaagaagaa

SEQ ID NO: 2609387 - RNA, 19 nt, Homo sapiens
  misc_RNA (1)...(19): siRNA sense strand
uuguaaugucuguggcuaa

SEQ ID NO: 2609388 - RNA, 19 nt, Homo sapiens
  misc_RNA (1)...(19): siRNA sense strand
ucacagaggaaauguaaga

SEQ ID NO: 2609389 - RNA, 19 nt, Homo sapiens
  misc_RNA (1)...(19): siRNA sense strand
aaguguugccuuuggauaa

SEQ ID NO: 2609390 - RNA, 19 nt, Homo sapiens
  misc_RNA (1)...(19): siRNA sense strand
ggauaaaauagaagagaac

SEQ ID NO: 2609391 - RNA, 19 nt, Homo sapiens
  misc_RNA (1)...(19): siRNA sense strand
auacaaugggacagaaaga

SEQ ID NO: 2609392 - RNA, 19 nt, Homo sapiens
  misc_RNA (1)...(19): siRNA sense strand
aguagaaacuggaguaaag

SEQ ID NO: 2609393 - RNA, 19 nt, Homo sapiens
  misc_RNA (1)...(19): siRNA sense strand
uagaugaagaagaggugaa

SEQ ID NO: 2609394 - RNA, 19 nt, Homo sapiens
  misc_RNA (1)...(19): siRNA sense strand
gggcaagugauuaggaugu

SEQ ID NO: 2609395 - RNA, 19 nt, Homo sapiens
  misc_RNA (1)...(19): siRNA sense strand
agaaacaacuaaagugacu

SEQ ID NO: 2609396 - RNA, 19 nt, Homo sapiens
  misc_RNA (1)...(19): siRNA sense strand
uuaaggaaguaaagguaca

SEQ ID NO: 2609397 - RNA, 19 nt, Homo sapiens
  misc_RNA (1)...(19): siRNA sense strand
uuaaaggcacuaagguaaa

SEQ ID NO: 2609398 - RNA, 19 nt, Homo sapiens
  misc_RNA (1)...(19): siRNA sense strand
aaaccuaagaagauggauu

SEQ ID NO: 2609399 - RNA, 19 nt, Homo sapiens
  misc_RNA (1)...(19): siRNA sense strand
gagcaagaaauaaugucaa

SEQ ID NO: 2609400 - RNA, 19 nt, Homo sapiens
  misc_RNA (1)...(19): siRNA sense strand
cuaaagugacuaugcagaa

SEQ ID NO: 2609401 - RNA, 19 nt, Homo sapiens
  misc_RNA (1)...(19): siRNA sense strand
gagagaugucagagaaaau

SEQ ID NO: 2609402 - RNA, 19 nt, Homo sapiens
  misc_RNA (1)...(19): siRNA sense strand
ggcuaaggaugaagaacca

SEQ ID NO: 2609403 - RNA, 19 nt, Homo sapiens
  misc_RNA (1)...(19): siRNA sense strand
gaaccagagaguauggauu

SEQ ID NO: 2609404 - RNA, 19 nt, Homo sapiens
  misc_RNA (1)...(19): siRNA sense strand
ccgcagcuccguugauaaa

SEQ ID NO: 2609405 - RNA, 19 nt, Homo sapiens
  misc_RNA (1)...(19): siRNA sense strand
cugugaagagcuagaaaca

SEQ ID NO: 2609406 - RNA, 19 nt, Homo sapiens
  misc_RNA (1)...(19): siRNA sense strand
uggaagaagagaacccuaa

SEQ ID NO: 2609407 - RNA, 19 nt, Homo sapiens
  misc_RNA (1)...(19): siRNA sense strand
gugauuaggaugucccaua

SEQ ID NO: 2609408 - RNA, 19 nt, Homo sapiens
  misc_RNA (1)...(19): siRNA sense strand
cuagaaacaacuaaaguga

SEQ ID NO: 2609409 - RNA, 19 nt, Homo sapiens
  misc_RNA (1)...(19): siRNA sense strand
aggacaaacccaaaguaau

SEQ ID NO: 2609410 - RNA, 19 nt, Homo sapiens
  misc_RNA (1)...(19): siRNA sense strand
gauauggaucggacacaaa

SEQ ID NO: 2609411 - RNA, 19 nt, Homo sapiens
  misc_RNA (1)...(19): siRNA sense strand
gcagaaaggaucagcuuaa

SEQ ID NO: 2609412 - RNA, 19 nt, Homo sapiens
  misc_RNA (1)...(19): siRNA sense strand
gcugaagggaggagucaua

SEQ ID NO: 2609413 - RNA, 19 nt, Homo sapiens
  misc_RNA (1)...(19): siRNA sense strand
uauugaagauguuggagaa

SEQ ID NO: 2609414 - RNA, 19 nt, Homo sapiens
  misc_RNA (1)...(19): siRNA sense strand
gagaaugaguuuuggguca

SEQ ID NO: 2609415 - RNA, 19 nt, Homo sapiens
  misc_RNA (1)...(19): siRNA sense strand
acagagaaguuggcagaaa

SEQ ID NO: 2609416 - RNA, 19 nt, Homo sapiens
  misc_RNA (1)...(19): siRNA sense strand
gcuaugaagggcagaaaca

SEQ ID NO: 2609417 - RNA, 19 nt, Homo sapiens
  misc_RNA (1)...(19): siRNA sense strand
aauuugaacuccucaguaa

SEQ ID NO: 2609418 - RNA, 19 nt, Homo sapiens
  misc_RNA (1)...(19): siRNA sense strand
acacagagaaguuggcaga

SEQ ID NO: 2609419 - RNA, 19 nt, Homo sapiens
  misc_RNA (1)...(19): siRNA sense strand
ccaacgagggacugaagaa

SEQ ID NO: 2609420 - RNA, 19 nt, Homo sapiens
  misc_RNA (1)...(19): siRNA sense strand
acaccggacucuaacgaua

SEQ ID NO: 2609421 - RNA, 19 nt, Homo sapiens
  misc_RNA (1)...(19): siRNA sense strand
uaugaagggcagaaacaaa

SEQ ID NO: 2609422 - RNA, 19 nt, Homo sapiens
  misc_RNA (1)...(19): siRNA sense strand
ugaagauguuggagaaugu

SEQ ID NO: 2609423 - RNA, 19 nt, Homo sapiens
  misc_RNA (1)...(19): siRNA sense strand
ucuuaaacaugaaggaacu

SEQ ID NO: 2609424 - RNA, 19 nt, Homo sapiens
  misc_RNA (1)...(19): siRNA sense strand
guaaagugccauugaagca

SEQ ID NO: 2609425 - RNA, 19 nt, Homo sapiens
  misc_RNA (1)...(19): siRNA sense strand
gggaaugcuucacuggcua

SEQ ID NO: 2609426 - RNA, 19 nt, Homo sapiens
  misc_RNA (1)...(19): siRNA sense strand
guugaggagaccugagaau

SEQ ID NO: 2609427 - RNA, 19 nt, Homo sapiens
  misc_RNA (1)...(19): siRNA sense strand
guaucaagccaaagaccau

SEQ ID NO: 2609428 - RNA, 19 nt, Homo sapiens
  misc_RNA (1)...(19): siRNA sense strand
gccuagaauacuauggaau

SEQ ID NO: 2609429 - RNA, 19 nt, Homo sapiens
  misc_RNA (1)...(19): siRNA sense strand
ugaggagaccugagaauga

SEQ ID NO: 2609430 - RNA, 19 nt, Homo sapiens
  misc_RNA (1)...(19): siRNA sense strand
acucaagagcacacagaga

SEQ ID NO: 2609431 - RNA, 19 nt, Homo sapiens
  misc_RNA (1)...(19): siRNA sense strand
ucaaaaggcaccugaggaa

SEQ ID NO: 2609432 - RNA, 19 nt, Homo sapiens
  misc_RNA (1)...(19): siRNA sense strand
cgguagauugccagagcuu

SEQ ID NO: 2609433 - RNA, 19 nt, Homo sapiens
  misc_RNA (1)...(19): siRNA sense strand
ggauugggccagucuuaaa

SEQ ID NO: 2609434 - RNA, 19 nt, Homo sapiens
  misc_RNA (1)...(19): siRNA sense strand
gcuacaacucuaagacuca

SEQ ID NO: 2609435 - RNA, 19 nt, Homo sapiens
  misc_RNA (1)...(19): siRNA sense strand
cagaacagguacuucaaaa

SEQ ID NO: 2609436 - RNA, 19 nt, Homo sapiens
  misc_RNA (1)...(19): siRNA sense strand
cagcagaacagguacuuca

SEQ ID NO: 2609437 - RNA, 19 nt, Homo sapiens
  misc_RNA (1)...(19): siRNA sense strand
gauuugaauuggcugguga

SEQ ID NO: 2609438 - RNA, 19 nt, Homo sapiens
  misc_RNA (1)...(19): siRNA sense strand
acgagggacugaagaaguu

SEQ ID NO: 2609439 - RNA, 19 nt, Homo sapiens
  misc_RNA (1)...(19): siRNA sense strand
cauccagccuagaauacua

SEQ ID NO: 2609440 - RNA, 19 nt, Homo sapiens
  misc_RNA (1)...(19): siRNA sense strand
agaaguuggcagaaaggau

SEQ ID NO: 2609441 - RNA, 19 nt, Homo sapiens
  misc_RNA (1)...(19): siRNA sense strand
ggaucagcuuaaucagaga

SEQ ID NO: 2609442 - RNA, 19 nt, Homo sapiens
  misc_RNA (1)...(19): siRNA sense strand
ggauuuauguaucaagcca

SEQ ID NO: 2609443 - RNA, 19 nt, Homo sapiens
  misc_RNA (1)...(19): siRNA sense strand
aauaucuacccauggaaua

SEQ ID NO: 2609444 - RNA, 19 nt, Homo sapiens
  misc_RNA (1)...(19): siRNA sense strand
gggaggaugugguauuuca

SEQ ID NO: 2609445 - RNA, 19 nt, Homo sapiens
  misc_RNA (1)...(19): siRNA sense strand
ucaagagcccuguggcauu

SEQ ID NO: 2609446 - RNA, 19 nt, Homo sapiens
  misc_RNA (1)...(19): siRNA sense strand
acagcaggcuucaggacuu

SEQ ID NO: 2609447 - RNA, 19 nt, Homo sapiens
  misc_RNA (1)...(19): siRNA sense strand
gagcugaaauaugcuaaua

SEQ ID NO: 2609448 - RNA, 19 nt, Homo sapiens
  misc_RNA (1)...(19): siRNA sense strand
uggcaggguccuauuuaua

SEQ ID NO: 2609449 - RNA, 19 nt, Homo sapiens
  misc_RNA (1)...(19): siRNA sense strand
aggaacugguggcaggaca

SEQ ID NO: 2609450 - RNA, 19 nt, Homo sapiens
  misc_RNA (1)...(19): siRNA sense strand
ccauugaagcaugaauaua

SEQ ID NO: 2609451 - RNA, 19 nt, Homo sapiens
  misc_RNA (1)...(19): siRNA sense strand
caucaauaccguuccuuau

SEQ ID NO: 2609452 - RNA, 19 nt, Homo sapiens
  misc_RNA (1)...(19): siRNA sense strand
cagagaaguuggcagaaag

SEQ ID NO: 2609453 - RNA, 19 nt, Homo sapiens
  misc_RNA (1)...(19): siRNA sense strand
ugaagggaggagucauaua

SEQ ID NO: 2609454 - RNA, 19 nt, Homo sapiens
  misc_RNA (1)...(19): siRNA sense strand
auauugaagauguuggaga

SEQ ID NO: 2609455 - RNA, 19 nt, Homo sapiens
  misc_RNA (1)...(19): siRNA sense strand
acgauagaguugaggagac

SEQ ID NO: 2609456 - RNA, 19 nt, Homo sapiens
  misc_RNA (1)...(19): siRNA sense strand
gcaucgugcuacaacucua

SEQ ID NO: 2609457 - RNA, 19 nt, Homo sapiens
  misc_RNA (1)...(19): siRNA sense strand
cuuagaaaccaacgaggga

SEQ ID NO: 2609458 - RNA, 19 nt, Homo sapiens
  misc_RNA (1)...(19): siRNA sense strand
ggagaaugucacaaccaca

SEQ ID NO: 2609459 - RNA, 19 nt, Homo sapiens
  misc_RNA (1)...(19): siRNA sense strand
caaccacaugauugggauu

SEQ ID NO: 2609460 - RNA, 19 nt, Homo sapiens
  misc_RNA (1)...(19): siRNA sense strand
gggcauagcugaugagaac

SEQ ID NO: 2609461 - RNA, 19 nt, Homo sapiens
  misc_RNA (1)...(19): siRNA sense strand
ccgacaaggaugugaagaa

SEQ ID NO: 2609462 - RNA, 19 nt, Homo sapiens
  misc_RNA (1)...(19): siRNA sense strand
ugaagaaguuccuggagua

SEQ ID NO: 2609463 - RNA, 19 nt, Homo sapiens
  misc_RNA (1)...(19): siRNA sense strand
gggcaaacaccgacccaaa

SEQ ID NO: 2609464 - RNA, 19 nt, Homo sapiens
  misc_RNA (1)...(19): siRNA sense strand
ucaacaaacuggacgaaau

SEQ ID NO: 2609465 - RNA, 19 nt, Homo sapiens
  misc_RNA (1)...(19): siRNA sense strand
acaaggaugugaagaacaa

SEQ ID NO: 2609466 - RNA, 19 nt, Homo sapiens
  misc_RNA (1)...(19): siRNA sense strand
gagaacggcuggcaggaaa

SEQ ID NO: 2609467 - RNA, 19 nt, Homo sapiens
  misc_RNA (1)...(19): siRNA sense strand
caagaaagccgcagugaca

SEQ ID NO: 2609468 - RNA, 19 nt, Homo sapiens
  misc_RNA (1)...(19): siRNA sense strand
caggagagcaagcaagaaa

SEQ ID NO: 2609469 - RNA, 19 nt, Homo sapiens
  misc_RNA (1)...(19): siRNA sense strand
caacagaccaucagugcaa

SEQ ID NO: 2609470 - RNA, 19 nt, Homo sapiens
  misc_RNA (1)...(19): siRNA sense strand
agaccaaccuggaugagaa

SEQ ID NO: 2609471 - RNA, 19 nt, Homo sapiens
  misc_RNA (1)...(19): siRNA sense strand
agaccaagguggaaggcga

SEQ ID NO: 2609472 - RNA, 19 nt, Homo sapiens
  misc_RNA (1)...(19): siRNA sense strand
gcuccaagcuucagcaguu

SEQ ID NO: 2609473 - RNA, 19 nt, Homo sapiens
  misc_RNA (1)...(19): siRNA sense strand
uggaugaggcagugcacaa

SEQ ID NO: 2609474 - RNA, 19 nt, Homo sapiens
  misc_RNA (1)...(19): siRNA sense strand
gcaacacgcugauggugaa

SEQ ID NO: 2609475 - RNA, 19 nt, Homo sapiens
  misc_RNA (1)...(19): siRNA sense strand
gagaagagccuguaccaca

SEQ ID NO: 2609476 - RNA, 19 nt, Homo sapiens
  misc_RNA (1)...(19): siRNA sense strand
gugacaaggcaaagagacu

SEQ ID NO: 2609477 - RNA, 19 nt, Homo sapiens
  misc_RNA (1)...(19): siRNA sense strand
cgauacaagacccgaguuu

SEQ ID NO: 2609478 - RNA, 19 nt, Homo sapiens
  misc_RNA (1)...(19): siRNA sense strand
ggcagugauugcugggaau

SEQ ID NO: 2609479 - RNA, 19 nt, Homo sapiens
  misc_RNA (1)...(19): siRNA sense strand
gcaugauggucuucaggau

SEQ ID NO: 2609480 - RNA, 19 nt, Homo sapiens
  misc_RNA (1)...(19): siRNA sense strand
gcgagaagaucaaaguacu

SEQ ID NO: 2609481 - RNA, 19 nt, Homo sapiens
  misc_RNA (1)...(19): siRNA sense strand
ucagauggcucucaacaaa

SEQ ID NO: 2609482 - RNA, 19 nt, Homo sapiens
  misc_RNA (1)...(19): siRNA sense strand
ggguugaugcuccggcaaa

SEQ ID NO: 2609483 - RNA, 19 nt, Homo sapiens
  misc_RNA (1)...(19): siRNA sense strand
gcaagggcgagaagaucaa

SEQ ID NO: 2609484 - RNA, 19 nt, Homo sapiens
  misc_RNA (1)...(19): siRNA sense strand
agaucaaaguacuuagcau

SEQ ID NO: 2609485 - RNA, 19 nt, Homo sapiens
  misc_RNA (1)...(19): siRNA sense strand
uggaggagauggaguacga

SEQ ID NO: 2609486 - RNA, 19 nt, Homo sapiens
  misc_RNA (1)...(19): siRNA sense strand
cgagaagaucaaaguacuu

SEQ ID NO: 2609487 - RNA, 19 nt, Homo sapiens
  misc_RNA (1)...(19): siRNA sense strand
ccucgguggauguggaaga

SEQ ID NO: 2609488 - RNA, 19 nt, Homo sapiens
  misc_RNA (1)...(19): siRNA sense strand
gcgagagccugcaggaugu

SEQ ID NO: 2609489 - RNA, 19 nt, Homo sapiens
  misc_RNA (1)...(19): siRNA sense strand
ccacagugccagcgagugu

SEQ ID NO: 2609490 - RNA, 19 nt, Homo sapiens
  misc_RNA (1)...(19): siRNA sense strand
aagcuuaauggaugggauu

SEQ ID NO: 2609491 - RNA, 19 nt, Homo sapiens
  misc_RNA (1)...(19): siRNA sense strand
augagaagcagcuggccaa

SEQ ID NO: 2609492 - RNA, 19 nt, Homo sapiens
  misc_RNA (1)...(19): siRNA sense strand
cgacaagcgaggacgagga

SEQ ID NO: 2609493 - RNA, 19 nt, Homo sapiens
  misc_RNA (1)...(19): siRNA sense strand
uggcagugauugcugggaa

SEQ ID NO: 2609494 - RNA, 19 nt, Homo sapiens
  misc_RNA (1)...(19): siRNA sense strand
ugagcaagggcgagaagau

SEQ ID NO: 2609495 - RNA, 19 nt, Homo sapiens
  misc_RNA (1)...(19): siRNA sense strand
gauuacaucauuaaggaga

SEQ ID NO: 2609496 - RNA, 19 nt, Homo sapiens
  misc_RNA (1)...(19): siRNA sense strand
ggauguggaagauggcgaa

SEQ ID NO: 2609497 - RNA, 19 nt, Homo sapiens
  misc_RNA (1)...(19): siRNA sense strand
cggaccugcaccagacaaa

SEQ ID NO: 2609498 - RNA, 19 nt, Homo sapiens
  misc_RNA (1)...(19): siRNA sense strand
gcaugaccgcacugcauaa

SEQ ID NO: 2609499 - RNA, 19 nt, Homo sapiens
  misc_RNA (1)...(19): siRNA sense strand
uggccaaguugcacacgaa

SEQ ID NO: 2609500 - RNA, 19 nt, Homo sapiens
  misc_RNA (1)...(19): siRNA sense strand
cggacauggaugaggcagu

SEQ ID NO: 2609501 - RNA, 19 nt, Homo sapiens
  misc_RNA (1)...(19): siRNA sense strand
ugaagaacaacaacggaca

SEQ ID NO: 2609502 - RNA, 19 nt, Homo sapiens
  misc_RNA (1)...(19): siRNA sense strand
gcucaauguccgucccaga

SEQ ID NO: 2609503 - RNA, 19 nt, Homo sapiens
  misc_RNA (1)...(19): siRNA sense strand
gaucaaaguacuuagcauc

SEQ ID NO: 2609504 - RNA, 19 nt, Homo sapiens
  misc_RNA (1)...(19): siRNA sense strand
gcagaagaugacagaccuu

SEQ ID NO: 2609505 - RNA, 19 nt, Homo sapiens
  misc_RNA (1)...(19): siRNA sense strand
gggagcgauuacaucauua

SEQ ID NO: 2609506 - RNA, 19 nt, Homo sapiens
  misc_RNA (1)...(19): siRNA sense strand
gcucagaguccgacagcuc

SEQ ID NO: 2609507 - RNA, 19 nt, Homo sapiens
  misc_RNA (1)...(19): siRNA sense strand
gccuggaagaaguggcgaa

SEQ ID NO: 2609508 - RNA, 19 nt, Homo sapiens
  misc_RNA (1)...(19): siRNA sense strand
gcgauuacaucauuaagga

SEQ ID NO: 2609509 - RNA, 19 nt, Homo sapiens
  misc_RNA (1)...(19): siRNA sense strand
cgacagguggugaacauga

SEQ ID NO: 2609510 - RNA, 19 nt, Homo sapiens
  misc_RNA (1)...(19): siRNA sense strand
ccaaguucgacguggcuga

SEQ ID NO: 2609511 - RNA, 19 nt, Homo sapiens
  misc_RNA (1)...(19): siRNA sense strand
agaaguuccuggaguaugu

SEQ ID NO: 2609512 - RNA, 19 nt, Homo sapiens
  misc_RNA (1)...(19): siRNA sense strand
ucauuaaggagaagacagu

SEQ ID NO: 2609513 - RNA, 19 nt, Homo sapiens
  misc_RNA (1)...(19): siRNA sense strand
ggcagaauguggugaaggu

SEQ ID NO: 2609514 - RNA, 19 nt, Homo sapiens
  misc_RNA (1)...(19): siRNA sense strand
ggcaacacgcugaugguga

SEQ ID NO: 2609515 - RNA, 19 nt, Homo sapiens
  misc_RNA (1)...(19): siRNA sense strand
uggugaagguggugauggu

SEQ ID NO: 2609516 - RNA, 19 nt, Homo sapiens
  misc_RNA (1)...(19): siRNA sense strand
gaagaaguuccuggaguau

SEQ ID NO: 2609517 - RNA, 19 nt, Homo sapiens
  misc_RNA (1)...(19): siRNA sense strand
ggucaaaggucguguuggc

SEQ ID NO: 2609518 - RNA, 19 nt, Homo sapiens
  misc_RNA (1)...(19): siRNA sense strand
agacaauaguggaguuuga

SEQ ID NO: 2609519 - RNA, 19 nt, Homo sapiens
  misc_RNA (1)...(19): siRNA sense strand
acauuaaucugcaggagaa

SEQ ID NO: 2609520 - RNA, 19 nt, Homo sapiens
  misc_RNA (1)...(19): siRNA sense strand
uuacaaugcugaagacaau

SEQ ID NO: 2609521 - RNA, 19 nt, Homo sapiens
  misc_RNA (1)...(19): siRNA sense strand
uggcaacuguggugagauu

SEQ ID NO: 2609522 - RNA, 19 nt, Homo sapiens
  misc_RNA (1)...(19): siRNA sense strand
aaugagaacuucaagacaa

SEQ ID NO: 2609523 - RNA, 19 nt, Homo sapiens
  misc_RNA (1)...(19): siRNA sense strand
ggugguaccugaagaugaa

SEQ ID NO: 2609524 - RNA, 19 nt, Homo sapiens
  misc_RNA (1)...(19): siRNA sense strand
cugaagacaaugagaacuu

SEQ ID NO: 2609525 - RNA, 19 nt, Homo sapiens
  misc_RNA (1)...(19): siRNA sense strand
gggacagccuucagugaca

SEQ ID NO: 2609526 - RNA, 19 nt, Homo sapiens
  misc_RNA (1)...(19): siRNA sense strand
cuuacaaugcugaagacaa

SEQ ID NO: 2609527 - RNA, 19 nt, Homo sapiens
  misc_RNA (1)...(19): siRNA sense strand
guggugagauuucggacaa

SEQ ID NO: 2609528 - RNA, 19 nt, Homo sapiens
  misc_RNA (1)...(19): siRNA sense strand
augagaacuucaagacaau

SEQ ID NO: 2609529 - RNA, 19 nt, Homo sapiens
  misc_RNA (1)...(19): siRNA sense strand
ggacugacuaugaugaaaa

SEQ ID NO: 2609530 - RNA, 19 nt, Homo sapiens
  misc_RNA (1)...(19): siRNA sense strand
aagcugugugcaagagaaa

SEQ ID NO: 2609531 - RNA, 19 nt, Homo sapiens
  misc_RNA (1)...(19): siRNA sense strand
gagaaggacuggacugacu

SEQ ID NO: 2609532 - RNA, 19 nt, Homo sapiens
  misc_RNA (1)...(19): siRNA sense strand
aagccacgcuggagaacau

SEQ ID NO: 2609533 - RNA, 19 nt, Homo sapiens
  misc_RNA (1)...(19): siRNA sense strand
cggugguaccugaagauga

SEQ ID NO: 2609534 - RNA, 19 nt, Homo sapiens
  misc_RNA (1)...(19): siRNA sense strand
cggacaaguggcaguacau

SEQ ID NO: 2609535 - RNA, 19 nt, Homo sapiens
  misc_RNA (1)...(19): siRNA sense strand
agaaaauuccaucgagauu

SEQ ID NO: 2609536 - RNA, 19 nt, Homo sapiens
  misc_RNA (1)...(19): siRNA sense strand
agagaaaauuccaucgaga

SEQ ID NO: 2609537 - RNA, 19 nt, Homo sapiens
  misc_RNA (1)...(19): siRNA sense strand
ucaagacaauaguggaguu

SEQ ID NO: 2609538 - RNA, 19 nt, Homo sapiens
  misc_RNA (1)...(19): siRNA sense strand
cugauaagguagaguauaa

SEQ ID NO: 2609539 - RNA, 19 nt, Homo sapiens
  misc_RNA (1)...(19): siRNA sense strand
agagaagacugaagaguua

SEQ ID NO: 2609540 - RNA, 19 nt, Homo sapiens
  misc_RNA (1)...(19): siRNA sense strand
ggacauacaucgaguucua

SEQ ID NO: 2609541 - RNA, 19 nt, Homo sapiens
  misc_RNA (1)...(19): siRNA sense strand
gaaagaugcuggaggaaca

SEQ ID NO: 2609542 - RNA, 19 nt, Homo sapiens
  misc_RNA (1)...(19): siRNA sense strand
gaagauagauguggagaaa

SEQ ID NO: 2609543 - RNA, 19 nt, Homo sapiens
  misc_RNA (1)...(19): siRNA sense strand
gaagaauggcuuaaagaua

SEQ ID NO: 2609544 - RNA, 19 nt, Homo sapiens
  misc_RNA (1)...(19): siRNA sense strand
agauagauguggagaaaca

SEQ ID NO: 2609545 - RNA, 19 nt, Homo sapiens
  misc_RNA (1)...(19): siRNA sense strand
gcaucaagcaggugguuaa

SEQ ID NO: 2609546 - RNA, 19 nt, Homo sapiens
  misc_RNA (1)...(19): siRNA sense strand
guugaaauccugagagcaa

SEQ ID NO: 2609547 - RNA, 19 nt, Homo sapiens
  misc_RNA (1)...(19): siRNA sense strand
gaaugaacaagcugagaaa

SEQ ID NO: 2609548 - RNA, 19 nt, Homo sapiens
  misc_RNA (1)...(19): siRNA sense strand
gcucugagacggugguaaa

SEQ ID NO: 2609549 - RNA, 19 nt, Homo sapiens
  misc_RNA (1)...(19): siRNA sense strand
aggagaagcugauugauaa

SEQ ID NO: 2609550 - RNA, 19 nt, Homo sapiens
  misc_RNA (1)...(19): siRNA sense strand
cugaaauagccaaggacua

SEQ ID NO: 2609551 - RNA, 19 nt, Homo sapiens
  misc_RNA (1)...(19): siRNA sense strand
aagaauacaugaaggaaga

SEQ ID NO: 2609552 - RNA, 19 nt, Homo sapiens
  misc_RNA (1)...(19): siRNA sense strand
uggaagagaaauuggcaaa

SEQ ID NO: 2609553 - RNA, 19 nt, Homo sapiens
  misc_RNA (1)...(19): siRNA sense strand
gauaagaacuugcagaaca

SEQ ID NO: 2609554 - RNA, 19 nt, Homo sapiens
  misc_RNA (1)...(19): siRNA sense strand
gggcagaacaugggcgaua

SEQ ID NO: 2609555 - RNA, 19 nt, Homo sapiens
  misc_RNA (1)...(19): siRNA sense strand
cugaaaugguagagacuca

SEQ ID NO: 2609556 - RNA, 19 nt, Homo sapiens
  misc_RNA (1)...(19): siRNA sense strand
aguuaaaucugcaaagcaa

SEQ ID NO: 2609557 - RNA, 19 nt, Homo sapiens
  misc_RNA (1)...(19): siRNA sense strand
gggaagagauacagggaug

SEQ ID NO: 2609558 - RNA, 19 nt, Homo sapiens
  misc_RNA (1)...(19): siRNA sense strand
caugaaagacagagugauu

SEQ ID NO: 2609559 - RNA, 19 nt, Homo sapiens
  misc_RNA (1)...(19): siRNA sense strand
gagcaggacaaguggcuua

SEQ ID NO: 2609560 - RNA, 19 nt, Homo sapiens
  misc_RNA (1)...(19): siRNA sense strand
aggaauucaugaagcauaa

SEQ ID NO: 2609561 - RNA, 19 nt, Homo sapiens
  misc_RNA (1)...(19): siRNA sense strand
cgggaaugcuggaguauga

SEQ ID NO: 2609562 - RNA, 19 nt, Homo sapiens
  misc_RNA (1)...(19): siRNA sense strand
ugacaauaguagucgguuu

SEQ ID NO: 2609563 - RNA, 19 nt, Homo sapiens
  misc_RNA (1)...(19): siRNA sense strand
agagagaagacgaggccaa

SEQ ID NO: 2609564 - RNA, 19 nt, Homo sapiens
  misc_RNA (1)...(19): siRNA sense strand
ugaaagacagagugauuaa

SEQ ID NO: 2609565 - RNA, 19 nt, Homo sapiens
  misc_RNA (1)...(19): siRNA sense strand
aaagugaagucaaguguaa

SEQ ID NO: 2609566 - RNA, 19 nt, Homo sapiens
  misc_RNA (1)...(19): siRNA sense strand
ggaugaagaauguuuguua

SEQ ID NO: 2609567 - RNA, 19 nt, Homo sapiens
  misc_RNA (1)...(19): siRNA sense strand
gagcuuuccuucagcgaua

SEQ ID NO: 2609568 - RNA, 19 nt, Homo sapiens
  misc_RNA (1)...(19): siRNA sense strand
gcaagcaggucaagacaau

SEQ ID NO: 2609569 - RNA, 19 nt, Homo sapiens
  misc_RNA (1)...(19): siRNA sense strand
aaacgggaaaugagagaaa

SEQ ID NO: 2609570 - RNA, 19 nt, Homo sapiens
  misc_RNA (1)...(19): siRNA sense strand
aggaaggaacacaaagaaa

SEQ ID NO: 2609571 - RNA, 19 nt, Homo sapiens
  misc_RNA (1)...(19): siRNA sense strand
ggaaacacagaaagaacaa

SEQ ID NO: 2609572 - RNA, 19 nt, Homo sapiens
  misc_RNA (1)...(19): siRNA sense strand
cagaaggauugcuaugaaa

SEQ ID NO: 2609573 - RNA, 19 nt, Homo sapiens
  misc_RNA (1)...(19): siRNA sense strand
ccucaggacccaaggagua

SEQ ID NO: 2609574 - RNA, 19 nt, Homo sapiens
  misc_RNA (1)...(19): siRNA sense strand
ccucaaaagcuguauaaua

SEQ ID NO: 2609575 - RNA, 19 nt, Homo sapiens
  misc_RNA (1)...(19): siRNA sense strand
agaagauagauguggagaa

SEQ ID NO: 2609576 - RNA, 19 nt, Homo sapiens
  misc_RNA (1)...(19): siRNA sense strand
cugcaaagcaagucaucaa

SEQ ID NO: 2609577 - RNA, 19 nt, Homo sapiens
  misc_RNA (1)...(19): siRNA sense strand
gguucaaugauuacaguua

SEQ ID NO: 2609578 - RNA, 19 nt, Homo sapiens
  misc_RNA (1)...(19): siRNA sense strand
aggaagaacggcaaagaau

SEQ ID NO: 2609579 - RNA, 19 nt, Homo sapiens
  misc_RNA (1)...(19): siRNA sense strand
gaaguuauucagagaagaa

SEQ ID NO: 2609580 - RNA, 19 nt, Homo sapiens
  misc_RNA (1)...(19): siRNA sense strand
cugagaaaaugaaaggaaa

SEQ ID NO: 2609581 - RNA, 19 nt, Homo sapiens
  misc_RNA (1)...(19): siRNA sense strand
gagaagaggaauucaugaa

SEQ ID NO: 2609582 - RNA, 19 nt, Homo sapiens
  misc_RNA (1)...(19): siRNA sense strand
ugauguggcuauacgaaua

SEQ ID NO: 2609583 - RNA, 19 nt, Homo sapiens
  misc_RNA (1)...(19): siRNA sense strand
gcacuuugcugauaaggua

SEQ ID NO: 2609584 - RNA, 19 nt, Homo sapiens
  misc_RNA (1)...(19): siRNA sense strand
aggagaaggggaagagaua

SEQ ID NO: 2609585 - RNA, 19 nt, Homo sapiens
  misc_RNA (1)...(19): siRNA sense strand
uggaagaucuggaacauuu

SEQ ID NO: 2609586 - RNA, 19 nt, Homo sapiens
  misc_RNA (1)...(19): siRNA sense strand
cagaauaagaauugcuuga

SEQ ID NO: 2609587 - RNA, 19 nt, Homo sapiens
  misc_RNA (1)...(19): siRNA sense strand
aggaggagguaucgaaaga

SEQ ID NO: 2609588 - RNA, 19 nt, Homo sapiens
  misc_RNA (1)...(19): siRNA sense strand
gaagaucagaacaaagaaa

SEQ ID NO: 2609589 - RNA, 19 nt, Homo sapiens
  misc_RNA (1)...(19): siRNA sense strand
aaggagaagcugauugaua

SEQ ID NO: 2609590 - RNA, 19 nt, Homo sapiens
  misc_RNA (1)...(19): siRNA sense strand
gaucaagucaagacacuaa

SEQ ID NO: 2609591 - RNA, 19 nt, Homo sapiens
  misc_RNA (1)...(19): siRNA sense strand
ucaccgaggccguuggaaa

SEQ ID NO: 2609592 - RNA, 19 nt, Homo sapiens
  misc_RNA (1)...(19): siRNA sense strand
ggcgaaauuacgaggagaa

SEQ ID NO: 2609593 - RNA, 19 nt, Homo sapiens
  misc_RNA (1)...(19): siRNA sense strand
aagcaagacaauuggaaaa

SEQ ID NO: 2609594 - RNA, 19 nt, Homo sapiens
  misc_RNA (1)...(19): siRNA sense strand
gcauuagugcacagagcua

SEQ ID NO: 2609595 - RNA, 19 nt, Homo sapiens
  misc_RNA (1)...(19): siRNA sense strand
gugaagguuuccuggagaa

SEQ ID NO: 2609596 - RNA, 19 nt, Homo sapiens
  misc_RNA (1)...(19): siRNA sense strand
auaccaaagagaaggagaa

SEQ ID NO: 2609597 - RNA, 19 nt, Homo sapiens
  misc_RNA (1)...(19): siRNA sense strand
gaauuagacaugaaagaca

SEQ ID NO: 2609598 - RNA, 19 nt, Homo sapiens
  misc_RNA (1)...(19): siRNA sense strand
guacagcggagaagaggaa

SEQ ID NO: 2609599 - RNA, 19 nt, Homo sapiens
  misc_RNA (1)...(19): siRNA sense strand
gaaguuacccuuugaauuu

SEQ ID NO: 2609600 - RNA, 19 nt, Homo sapiens
  misc_RNA (1)...(19): siRNA sense strand
uuggaagucugcugaaaua

SEQ ID NO: 2609601 - RNA, 19 nt, Homo sapiens
  misc_RNA (1)...(19): siRNA sense strand
auucagaacuggaaacaca

SEQ ID NO: 2609602 - RNA, 19 nt, Homo sapiens
  misc_RNA (1)...(19): siRNA sense strand
ccaaagagaaggagaagcu

SEQ ID NO: 2609603 - RNA, 19 nt, Homo sapiens
  misc_RNA (1)...(19): siRNA sense strand
gaggaauucaugaagcaua

SEQ ID NO: 2609604 - RNA, 19 nt, Homo sapiens
  misc_RNA (1)...(19): siRNA sense strand
acuucauuguggagagaau

SEQ ID NO: 2609605 - RNA, 19 nt, Homo sapiens
  misc_RNA (1)...(19): siRNA sense strand
guauaaaugugaagguuuc

SEQ ID NO: 2609606 - RNA, 19 nt, Homo sapiens
  misc_RNA (1)...(19): siRNA sense strand
aaaugaggauggagaacuu

SEQ ID NO: 2609607 - RNA, 19 nt, Homo sapiens
  misc_RNA (1)...(19): siRNA sense strand
gaaaggaaaacuagaagaa

SEQ ID NO: 2609608 - RNA, 19 nt, Homo sapiens
  misc_RNA (1)...(19): siRNA sense strand
ugugaaugaucgagcugaa

SEQ ID NO: 2609609 - RNA, 19 nt, Homo sapiens
  misc_RNA (1)...(19): siRNA sense strand
cuacagaguuggugacaag

SEQ ID NO: 2609610 - RNA, 19 nt, Homo sapiens
  misc_RNA (1)...(19): siRNA sense strand
caaacuggaacaagaagaa

SEQ ID NO: 2609611 - RNA, 19 nt, Homo sapiens
  misc_RNA (1)...(19): siRNA sense strand
ccauaaucauucagaagca

SEQ ID NO: 2609612 - RNA, 19 nt, Homo sapiens
  misc_RNA (1)...(19): siRNA sense strand
cuaaauagccgggaggauu

SEQ ID NO: 2609613 - RNA, 19 nt, Homo sapiens
  misc_RNA (1)...(19): siRNA sense strand
gcucuuugaugauguacaa

SEQ ID NO: 2609614 - RNA, 19 nt, Homo sapiens
  misc_RNA (1)...(19): siRNA sense strand
uggagaaacagaagcaaga

SEQ ID NO: 2609615 - RNA, 19 nt, Homo sapiens
  misc_RNA (1)...(19): siRNA sense strand
ggaggaaggaacacaaaga

SEQ ID NO: 2609616 - RNA, 19 nt, Homo sapiens
  misc_RNA (1)...(19): siRNA sense strand
aauuaaagcucucaaggau

SEQ ID NO: 2609617 - RNA, 19 nt, Homo sapiens
  misc_RNA (1)...(19): siRNA sense strand
aagauaagaacuugcagaa

SEQ ID NO: 2609618 - RNA, 19 nt, Homo sapiens
  misc_RNA (1)...(19): siRNA sense strand
gagcuggggauguggaaaa

SEQ ID NO: 2609619 - RNA, 19 nt, Homo sapiens
  misc_RNA (1)...(19): siRNA sense strand
acaagcagauggccagaaa

SEQ ID NO: 2609620 - RNA, 19 nt, Homo sapiens
  misc_RNA (1)...(19): siRNA sense strand
ggaugcuguggaagagaaa

SEQ ID NO: 2609621 - RNA, 19 nt, Homo sapiens
  misc_RNA (1)...(19): siRNA sense strand
cugcaauacaagagagaag

SEQ ID NO: 2609622 - RNA, 19 nt, Homo sapiens
  misc_RNA (1)...(19): siRNA sense strand
uaguagucgguuugggaaa

SEQ ID NO: 2609623 - RNA, 19 nt, Homo sapiens
  misc_RNA (1)...(19): siRNA sense strand
agauugaagcuuugaacuu

SEQ ID NO: 2609624 - RNA, 19 nt, Homo sapiens
  misc_RNA (1)...(19): siRNA sense strand
ccaaauaucucuuucaagu

SEQ ID NO: 2609625 - RNA, 19 nt, Homo sapiens
  misc_RNA (1)...(19): siRNA sense strand
cagaagaggcauacaagca

SEQ ID NO: 2609626 - RNA, 19 nt, Homo sapiens
  misc_RNA (1)...(19): siRNA sense strand
cuuacaggguccagcguuu

SEQ ID NO: 2609627 - RNA, 19 nt, Homo sapiens
  misc_RNA (1)...(19): siRNA sense strand
ggauggagaacuuugguuu

SEQ ID NO: 2609628 - RNA, 19 nt, Homo sapiens
  misc_RNA (1)...(19): siRNA sense strand
cagaauuggagaaacagaa

SEQ ID NO: 2609629 - RNA, 19 nt, Homo sapiens
  misc_RNA (1)...(19): siRNA sense strand
cagcaacgcucacguggaa

SEQ ID NO: 2609630 - RNA, 19 nt, Homo sapiens
  misc_RNA (1)...(19): siRNA sense strand
ucaucaagccaaacagcaa

SEQ ID NO: 2609631 - RNA, 19 nt, Homo sapiens
  misc_RNA (1)...(19): siRNA sense strand
gagaaacuucgauuggaua

SEQ ID NO: 2609632 - RNA, 19 nt, Homo sapiens
  misc_RNA (1)...(19): siRNA sense strand
cagcaaacugugaggaaag

SEQ ID NO: 2609633 - RNA, 19 nt, Homo sapiens
  misc_RNA (1)...(19): siRNA sense strand
gagaagaaaaugacaucaa

SEQ ID NO: 2609634 - RNA, 19 nt, Homo sapiens
  misc_RNA (1)...(19): siRNA sense strand
agaaauuggcaaagcuuca

SEQ ID NO: 2609635 - RNA, 19 nt, Homo sapiens
  misc_RNA (1)...(19): siRNA sense strand
agaacuggaaacacagaaa

SEQ ID NO: 2609636 - RNA, 19 nt, Homo sapiens
  misc_RNA (1)...(19): siRNA sense strand
aagaacaaauacagcugaa

SEQ ID NO: 2609637 - RNA, 19 nt, Homo sapiens
  misc_RNA (1)...(19): siRNA sense strand
gugacaagguccugcgacu

SEQ ID NO: 2609638 - RNA, 19 nt, Homo sapiens
  misc_RNA (1)...(19): siRNA sense strand
cagcagaacuccuaaacaa

SEQ ID NO: 2609639 - RNA, 19 nt, Homo sapiens
  misc_RNA (1)...(19): siRNA sense strand
guugaagaccauugaaaua

SEQ ID NO: 2609640 - RNA, 19 nt, Homo sapiens
  misc_RNA (1)...(19): siRNA sense strand
cuuaaugacaagacagaaa

SEQ ID NO: 2609641 - RNA, 19 nt, Homo sapiens
  misc_RNA (1)...(19): siRNA sense strand
ucaagaagagaaugagaaa

SEQ ID NO: 2609642 - RNA, 19 nt, Homo sapiens
  misc_RNA (1)...(19): siRNA sense strand
ggaaaagacuggcacaaua

SEQ ID NO: 2609643 - RNA, 19 nt, Homo sapiens
  misc_RNA (1)...(19): siRNA sense strand
uauaaaggcccaagacuua

SEQ ID NO: 2609644 - RNA, 19 nt, Homo sapiens
  misc_RNA (1)...(19): siRNA sense strand
gcugagaagugguaucuua

SEQ ID NO: 2609645 - RNA, 19 nt, Homo sapiens
  misc_RNA (1)...(19): siRNA sense strand
ccgagaauuauuagaacaa

SEQ ID NO: 2609646 - RNA, 19 nt, Homo sapiens
  misc_RNA (1)...(19): siRNA sense strand
aaucaaagaucugaggaaa

SEQ ID NO: 2609647 - RNA, 19 nt, Homo sapiens
  misc_RNA (1)...(19): siRNA sense strand
cuacaaaugcacuggauga

SEQ ID NO: 2609648 - RNA, 19 nt, Homo sapiens
  misc_RNA (1)...(19): siRNA sense strand
agaagucacuggaggagaa

SEQ ID NO: 2609649 - RNA, 19 nt, Homo sapiens
  misc_RNA (1)...(19): siRNA sense strand
gcacauggcugaaaaggaa

SEQ ID NO: 2609650 - RNA, 19 nt, Homo sapiens
  misc_RNA (1)...(19): siRNA sense strand
ccaagaagaaugaccaaau

SEQ ID NO: 2609651 - RNA, 19 nt, Homo sapiens
  misc_RNA (1)...(19): siRNA sense strand
aaaucaaagaucugaggaa

SEQ ID NO: 2609652 - RNA, 19 nt, Homo sapiens
  misc_RNA (1)...(19): siRNA sense strand
acuugaaaaccgagaauua

SEQ ID NO: 2609653 - RNA, 19 nt, Homo sapiens
  misc_RNA (1)...(19): siRNA sense strand
acuuaaugaagguggaaca

SEQ ID NO: 2609654 - RNA, 19 nt, Homo sapiens
  misc_RNA (1)...(19): siRNA sense strand
gguugaagaccauugaaau

SEQ ID NO: 2609655 - RNA, 19 nt, Homo sapiens
  misc_RNA (1)...(19): siRNA sense strand
ccuuaaagagugaguuuca

SEQ ID NO: 2609656 - RNA, 19 nt, Homo sapiens
  misc_RNA (1)...(19): siRNA sense strand
gaagaaugaccaaaucaaa

SEQ ID NO: 2609657 - RNA, 19 nt, Homo sapiens
  misc_RNA (1)...(19): siRNA sense strand
gauuacaagcugugguuca

SEQ ID NO: 2609658 - RNA, 19 nt, Homo sapiens
  misc_RNA (1)...(19): siRNA sense strand
gcugaaaaggaauuagaaa

SEQ ID NO: 2609659 - RNA, 19 nt, Homo sapiens
  misc_RNA (1)...(19): siRNA sense strand
uaucgaaacaugaaagaga

SEQ ID NO: 2609660 - RNA, 19 nt, Homo sapiens
  misc_RNA (1)...(19): siRNA sense strand
cugaaguccucaauggauu

SEQ ID NO: 2609661 - RNA, 19 nt, Homo sapiens
  misc_RNA (1)...(19): siRNA sense strand
gaagagaaugagaaauuga

SEQ ID NO: 2609662 - RNA, 19 nt, Homo sapiens
  misc_RNA (1)...(19): siRNA sense strand
agaagacacuuaaugacaa

SEQ ID NO: 2609663 - RNA, 19 nt, Homo sapiens
  misc_RNA (1)...(19): siRNA sense strand
uuauaaaggcccaagacuu

SEQ ID NO: 2609664 - RNA, 19 nt, Homo sapiens
  misc_RNA (1)...(19): siRNA sense strand
cagaagacacuuaaugaca

SEQ ID NO: 2609665 - RNA, 19 nt, Homo sapiens
  misc_RNA (1)...(19): siRNA sense strand
aaacagcagcuuaucgaaa

SEQ ID NO: 2609666 - RNA, 19 nt, Homo sapiens
  misc_RNA (1)...(19): siRNA sense strand
agaagaaugaccaaaucaa

SEQ ID NO: 2609667 - RNA, 19 nt, Homo sapiens
  misc_RNA (1)...(19): siRNA sense strand
agguugaagaccauugaaa

SEQ ID NO: 2609668 - RNA, 19 nt, Homo sapiens
  misc_RNA (1)...(19): siRNA sense strand
caaaugcacuggaugaaaa

SEQ ID NO: 2609669 - RNA, 19 nt, Homo sapiens
  misc_RNA (1)...(19): siRNA sense strand
ucgaaacaugaaagagauu

SEQ ID NO: 2609670 - RNA, 19 nt, Homo sapiens
  misc_RNA (1)...(19): siRNA sense strand
aucaaagaucugaggaaaa

SEQ ID NO: 2609671 - RNA, 19 nt, Homo sapiens
  misc_RNA (1)...(19): siRNA sense strand
gcccaagacuuaaguaacu

SEQ ID NO: 2609672 - RNA, 19 nt, Homo sapiens
  misc_RNA (1)...(19): siRNA sense strand
aggcccaagacuuaaguaa

SEQ ID NO: 2609673 - RNA, 19 nt, Homo sapiens
  misc_RNA (1)...(19): siRNA sense strand
uugaaauacaggcuacaaa

SEQ ID NO: 2609674 - RNA, 19 nt, Homo sapiens
  misc_RNA (1)...(19): siRNA sense strand
agauuuacagcuugaucaa

SEQ ID NO: 2609675 - RNA, 19 nt, Homo sapiens
  misc_RNA (1)...(19): siRNA sense strand
caaagagaggcuugagacu

SEQ ID NO: 2609676 - RNA, 19 nt, Homo sapiens
  misc_RNA (1)...(19): siRNA sense strand
agagcaggcugguggagga

SEQ ID NO: 2609677 - RNA, 19 nt, Homo sapiens
  misc_RNA (1)...(19): siRNA sense strand
ggaugaaaagucaaaacua

SEQ ID NO: 2609678 - RNA, 19 nt, Homo sapiens
  misc_RNA (1)...(19): siRNA sense strand
cugagaagugguaucuuaa

SEQ ID NO: 2609679 - RNA, 19 nt, Homo sapiens
  misc_RNA (1)...(19): siRNA sense strand
uaaugaagguggaacagca

SEQ ID NO: 2609680 - RNA, 19 nt, Homo sapiens
  misc_RNA (1)...(19): siRNA sense strand
gaaacaugaaagagauucu

SEQ ID NO: 2609681 - RNA, 19 nt, Homo sapiens
  misc_RNA (1)...(19): siRNA sense strand
gaagugguaucuuaagcua

SEQ ID NO: 2609682 - RNA, 19 nt, Homo sapiens
  misc_RNA (1)...(19): siRNA sense strand
ugaaauacaggcuacaaau

SEQ ID NO: 2609683 - RNA, 19 nt, Homo sapiens
  misc_RNA (1)...(19): siRNA sense strand
cuaaaugagcaccaucaaa

SEQ ID NO: 2609684 - RNA, 19 nt, Homo sapiens
  misc_RNA (1)...(19): siRNA sense strand
ugaagguggaacagcagaa

SEQ ID NO: 2609685 - RNA, 19 nt, Homo sapiens
  misc_RNA (1)...(19): siRNA sense strand
gaacagcagaacuccuaaa

SEQ ID NO: 2609686 - RNA, 19 nt, Homo sapiens
  misc_RNA (1)...(19): siRNA sense strand
gagaaugagaaauugaagu

SEQ ID NO: 2609687 - RNA, 19 nt, Homo sapiens
  misc_RNA (1)...(19): siRNA sense strand
ccauugaaauacaggcuac

SEQ ID NO: 2609688 - RNA, 19 nt, Homo sapiens
  misc_RNA (1)...(19): siRNA sense strand
acaauaugaaccugaagau

SEQ ID NO: 2609689 - RNA, 19 nt, Homo sapiens
  misc_RNA (1)...(19): siRNA sense strand
uauuagaacaaguugcaga

SEQ ID NO: 2609690 - RNA, 19 nt, Homo sapiens
  misc_RNA (1)...(19): siRNA sense strand
acugcaagauuuacagcuu

SEQ ID NO: 2609691 - RNA, 19 nt, Homo sapiens
  misc_RNA (1)...(19): siRNA sense strand
gaguuucagaagacacuua

SEQ ID NO: 2609692 - RNA, 19 nt, Homo sapiens
  misc_RNA (1)...(19): siRNA sense strand
agaaugaccaaaucaaaga

SEQ ID NO: 2609693 - RNA, 19 nt, Homo sapiens
  misc_RNA (1)...(19): siRNA sense strand
ccuaauaucucaaguagaa

SEQ ID NO: 2609694 - RNA, 19 nt, Homo sapiens
  misc_RNA (1)...(19): siRNA sense strand
gcgggagacuugagaagaa

SEQ ID NO: 2609695 - RNA, 19 nt, Homo sapiens
  misc_RNA (1)...(19): siRNA sense strand
ggacauuauuggaugcuau

SEQ ID NO: 2609696 - RNA, 19 nt, Homo sapiens
  misc_RNA (1)...(19): siRNA sense strand
cugauaaauccuacaguga

SEQ ID NO: 2609697 - RNA, 19 nt, Homo sapiens
  misc_RNA (1)...(19): siRNA sense strand
cgggagacuugagaagaaa

SEQ ID NO: 2609698 - RNA, 19 nt, Homo sapiens
  misc_RNA (1)...(19): siRNA sense strand
aguagaaggucaucagguu

SEQ ID NO: 2609699 - RNA, 19 nt, Homo sapiens
  misc_RNA (1)...(19): siRNA sense strand
uaacaauauuucagaggcu

SEQ ID NO: 2609700 - RNA, 19 nt, Homo sapiens
  misc_RNA (1)...(19): siRNA sense strand
gaagaaaggccauggaagg

SEQ ID NO: 2609701 - RNA, 19 nt, Homo sapiens
  misc_RNA (1)...(19): siRNA sense strand
gcaaaugacacuucaauuc

SEQ ID NO: 2609702 - RNA, 19 nt, Homo sapiens
  misc_RNA (1)...(19): siRNA sense strand
acaauauuucagaggcuuu

SEQ ID NO: 2609703 - RNA, 19 nt, Homo sapiens
  misc_RNA (1)...(19): siRNA sense strand
guagaaggucaucagguuu

SEQ ID NO: 2609704 - RNA, 19 nt, Homo sapiens
  misc_RNA (1)...(19): siRNA sense strand
gagaagaaaggccauggaa

SEQ ID NO: 2609705 - RNA, 19 nt, Homo sapiens
  misc_RNA (1)...(19): siRNA sense strand
cagcaaacaaagcaguuca

SEQ ID NO: 2609706 - RNA, 19 nt, Homo sapiens
  misc_RNA (1)...(19): siRNA sense strand
uaucucaaguagaagguca

SEQ ID NO: 2609707 - RNA, 19 nt, Homo sapiens
  misc_RNA (1)...(19): siRNA sense strand
uguugauccauuucagaua

SEQ ID NO: 2609708 - RNA, 19 nt, Homo sapiens
  misc_RNA (1)...(19): siRNA sense strand
agauacuuguggcagcaaa

SEQ ID NO: 2609709 - RNA, 19 nt, Homo sapiens
  misc_RNA (1)...(19): siRNA sense strand
ggaaagauccaaaggagua

SEQ ID NO: 2609710 - RNA, 19 nt, Homo sapiens
  misc_RNA (1)...(19): siRNA sense strand
gcacaggagcagagaucaa

SEQ ID NO: 2609711 - RNA, 19 nt, Homo sapiens
  misc_RNA (1)...(19): siRNA sense strand
gaaacgacgaugugaucaa

SEQ ID NO: 2609712 - RNA, 19 nt, Homo sapiens
  misc_RNA (1)...(19): siRNA sense strand
cugaggaacuccagggcau

SEQ ID NO: 2609713 - RNA, 19 nt, Homo sapiens
  misc_RNA (1)...(19): siRNA sense strand
ggacaaggauggcuacuuu

SEQ ID NO: 2609714 - RNA, 19 nt, Homo sapiens
  misc_RNA (1)...(19): siRNA sense strand
ggucaauggcacaggagca

SEQ ID NO: 2609715 - RNA, 19 nt, Homo sapiens
  misc_RNA (1)...(19): siRNA sense strand
gagaggugguaaaggcauu

SEQ ID NO: 2609716 - RNA, 19 nt, Homo sapiens
  misc_RNA (1)...(19): siRNA sense strand
cagagaaggaccucaagua

SEQ ID NO: 2609717 - RNA, 19 nt, Homo sapiens
  misc_RNA (1)...(19): siRNA sense strand
ggcuauggccagucugaaa

SEQ ID NO: 2609718 - RNA, 19 nt, Homo sapiens
  misc_RNA (1)...(19): siRNA sense strand
ccaaaaggcaugaaaauca

SEQ ID NO: 2609719 - RNA, 19 nt, Homo sapiens
  misc_RNA (1)...(19): siRNA sense strand
gaagacagcugcaucagaa

SEQ ID NO: 2609720 - RNA, 19 nt, Homo sapiens
  misc_RNA (1)...(19): siRNA sense strand
gcauggacaaggauggcua

SEQ ID NO: 2609721 - RNA, 19 nt, Homo sapiens
  misc_RNA (1)...(19): siRNA sense strand
ugacagagaaggaccucaa

SEQ ID NO: 2609722 - RNA, 19 nt, Homo sapiens
  misc_RNA (1)...(19): siRNA sense strand
ggugacugcuccauacaaa

SEQ ID NO: 2609723 - RNA, 19 nt, Homo sapiens
  misc_RNA (1)...(19): siRNA sense strand
gaagaaacgacgaugugau

SEQ ID NO: 2609724 - RNA, 19 nt, Homo sapiens
  misc_RNA (1)...(19): siRNA sense strand
ggacaauccugagaagaca

SEQ ID NO: 2609725 - RNA, 19 nt, Homo sapiens
  misc_RNA (1)...(19): siRNA sense strand
ccaaagacgguuucuggaa

SEQ ID NO: 2609726 - RNA, 19 nt, Homo sapiens
  misc_RNA (1)...(19): siRNA sense strand
gaaagauccaaaggaguaa

SEQ ID NO: 2609727 - RNA, 19 nt, Homo sapiens
  misc_RNA (1)...(19): siRNA sense strand
ccaaaggaguaaauugcga

SEQ ID NO: 2609728 - RNA, 19 nt, Homo sapiens
  misc_RNA (1)...(19): siRNA sense strand
cacaacugcaugaggacaa

SEQ ID NO: 2609729 - RNA, 19 nt, Homo sapiens
  misc_RNA (1)...(19): siRNA sense strand
ccugaauacucucuccaaa

SEQ ID NO: 2609730 - RNA, 19 nt, Homo sapiens
  misc_RNA (1)...(19): siRNA sense strand
gagcacaacugcaugagga

SEQ ID NO: 2609731 - RNA, 19 nt, Homo sapiens
  misc_RNA (1)...(19): siRNA sense strand
gagcagagaucaaguggag

SEQ ID NO: 2609732 - RNA, 19 nt, Homo sapiens
  misc_RNA (1)...(19): siRNA sense strand
uuguggaugaugagggcaa

SEQ ID NO: 2609733 - RNA, 19 nt, Homo sapiens
  misc_RNA (1)...(19): siRNA sense strand
cuacagagcacaacugcau

SEQ ID NO: 2609734 - RNA, 19 nt, Homo sapiens
  misc_RNA (1)...(19): siRNA sense strand
cgaguugaugccaaaguua

SEQ ID NO: 2609735 - RNA, 19 nt, Homo sapiens
  misc_RNA (1)...(19): siRNA sense strand
ccaaaguuauccugaauac

SEQ ID NO: 2609736 - RNA, 19 nt, Homo sapiens
  misc_RNA (1)...(19): siRNA sense strand
ccaagauggucgagcacuc

SEQ ID NO: 2609737 - RNA, 19 nt, Homo sapiens
  misc_RNA (1)...(19): siRNA sense strand
gcagcuacggacuggguuu

SEQ ID NO: 2609738 - RNA, 19 nt, Homo sapiens
  misc_RNA (1)...(19): siRNA sense strand
gcuuugaggagcuggggaa

SEQ ID NO: 2609739 - RNA, 19 nt, Homo sapiens
  misc_RNA (1)...(19): siRNA sense strand
cugaauacucucuccaaau

SEQ ID NO: 2609740 - RNA, 19 nt, Homo sapiens
  misc_RNA (1)...(19): siRNA sense strand
ucaauugcuauuuggacaa

SEQ ID NO: 2609741 - RNA, 19 nt, Homo sapiens
  misc_RNA (1)...(19): siRNA sense strand
acgugagggagaaguggaa

SEQ ID NO: 2609742 - RNA, 19 nt, Homo sapiens
  misc_RNA (1)...(19): siRNA sense strand
caaaaggcaugaaaaucaa

SEQ ID NO: 2609743 - RNA, 19 nt, Homo sapiens
  misc_RNA (1)...(19): siRNA sense strand
ugagaagacagcugcauca

SEQ ID NO: 2609744 - RNA, 19 nt, Homo sapiens
  misc_RNA (1)...(19): siRNA sense strand
gagcaugugaaaaggguga

SEQ ID NO: 2609745 - RNA, 19 nt, Homo sapiens
  misc_RNA (1)...(19): siRNA sense strand
acagaaugaugcugguacu

SEQ ID NO: 2609746 - RNA, 19 nt, Homo sapiens
  misc_RNA (1)...(19): siRNA sense strand
augugcagauuguggauga

SEQ ID NO: 2609747 - RNA, 19 nt, Homo sapiens
  misc_RNA (1)...(19): siRNA sense strand
ggaauguugccguccguau

SEQ ID NO: 2609748 - RNA, 19 nt, Homo sapiens
  misc_RNA (1)...(19): siRNA sense strand
gcagagaucaaguggagcu

SEQ ID NO: 2609749 - RNA, 19 nt, Homo sapiens
  misc_RNA (1)...(19): siRNA sense strand
gaguugaugccaaaguuau

SEQ ID NO: 2609750 - RNA, 19 nt, Homo sapiens
  misc_RNA (1)...(19): siRNA sense strand
cgaaaugaaauaagggauu

SEQ ID NO: 2609751 - RNA, 19 nt, Homo sapiens
  misc_RNA (1)...(19): siRNA sense strand
ggacuacgguugucagaaa

SEQ ID NO: 2609752 - RNA, 19 nt, Homo sapiens
  misc_RNA (1)...(19): siRNA sense strand
gagaaaugcuguuaccaua

SEQ ID NO: 2609753 - RNA, 19 nt, Homo sapiens
  misc_RNA (1)...(19): siRNA sense strand
ugacacaacuguaugauaa

SEQ ID NO: 2609754 - RNA, 19 nt, Homo sapiens
  misc_RNA (1)...(19): siRNA sense strand
ggacagauguuacaagauu

SEQ ID NO: 2609755 - RNA, 19 nt, Homo sapiens
  misc_RNA (1)...(19): siRNA sense strand
caggaaugauuaugaggaa

SEQ ID NO: 2609756 - RNA, 19 nt, Homo sapiens
  misc_RNA (1)...(19): siRNA sense strand
gaacauaaauugcguagau

SEQ ID NO: 2609757 - RNA, 19 nt, Homo sapiens
  misc_RNA (1)...(19): siRNA sense strand
gagaauacgcugaaugaga

SEQ ID NO: 2609758 - RNA, 19 nt, Homo sapiens
  misc_RNA (1)...(19): siRNA sense strand
ccaaacugcugguggcaau

SEQ ID NO: 2609759 - RNA, 19 nt, Homo sapiens
  misc_RNA (1)...(19): siRNA sense strand
ccaaagacuaucugcuaua

SEQ ID NO: 2609760 - RNA, 19 nt, Homo sapiens
  misc_RNA (1)...(19): siRNA sense strand
agaagaaucucguaaucaa

SEQ ID NO: 2609761 - RNA, 19 nt, Homo sapiens
  misc_RNA (1)...(19): siRNA sense strand
ugacgagccucuugacaaa

SEQ ID NO: 2609762 - RNA, 19 nt, Homo sapiens
  misc_RNA (1)...(19): siRNA sense strand
cuacaaugaggauaagaaa

SEQ ID NO: 2609763 - RNA, 19 nt, Homo sapiens
  misc_RNA (1)...(19): siRNA sense strand
gagaagaacugcaguccuu

SEQ ID NO: 2609764 - RNA, 19 nt, Homo sapiens
  misc_RNA (1)...(19): siRNA sense strand
uagcaaaucaugaagacaa

SEQ ID NO: 2609765 - RNA, 19 nt, Homo sapiens
  misc_RNA (1)...(19): siRNA sense strand
gggaggugaaggaggagaa

SEQ ID NO: 2609766 - RNA, 19 nt, Homo sapiens
  misc_RNA (1)...(19): siRNA sense strand
gcgacaagggugacuauua

SEQ ID NO: 2609767 - RNA, 19 nt, Homo sapiens
  misc_RNA (1)...(19): siRNA sense strand
gguaugaaggguuggaaga

SEQ ID NO: 2609768 - RNA, 19 nt, Homo sapiens
  misc_RNA (1)...(19): siRNA sense strand
gggauuauuagaagaaaga

SEQ ID NO: 2609769 - RNA, 19 nt, Homo sapiens
  misc_RNA (1)...(19): siRNA sense strand
ugaacuuagugcugauuua

SEQ ID NO: 2609770 - RNA, 19 nt, Homo sapiens
  misc_RNA (1)...(19): siRNA sense strand
cuucuuauucuguggauua

SEQ ID NO: 2609771 - RNA, 19 nt, Homo sapiens
  misc_RNA (1)...(19): siRNA sense strand
agcaaaucaugaagacaaa

SEQ ID NO: 2609772 - RNA, 19 nt, Homo sapiens
  misc_RNA (1)...(19): siRNA sense strand
agacagaagaugcaaagua

SEQ ID NO: 2609773 - RNA, 19 nt, Homo sapiens
  misc_RNA (1)...(19): siRNA sense strand
gggaugauuuggucagaca

SEQ ID NO: 2609774 - RNA, 19 nt, Homo sapiens
  misc_RNA (1)...(19): siRNA sense strand
gaaacagaagagagaugaa

SEQ ID NO: 2609775 - RNA, 19 nt, Homo sapiens
  misc_RNA (1)...(19): siRNA sense strand
cgacaagggugacuauuau

SEQ ID NO: 2609776 - RNA, 19 nt, Homo sapiens
  misc_RNA (1)...(19): siRNA sense strand
gauccaauucugagagcau

SEQ ID NO: 2609777 - RNA, 19 nt, Homo sapiens
  misc_RNA (1)...(19): siRNA sense strand
ggugacuauuauaugguua

SEQ ID NO: 2609778 - RNA, 19 nt, Homo sapiens
  misc_RNA (1)...(19): siRNA sense strand
caucaaaaggcaaggucaa

SEQ ID NO: 2609779 - RNA, 19 nt, Homo sapiens
  misc_RNA (1)...(19): siRNA sense strand
cagguuucgucuugauaua

SEQ ID NO: 2609780 - RNA, 19 nt, Homo sapiens
  misc_RNA (1)...(19): siRNA sense strand
aggcaaggucaaacggcaa

SEQ ID NO: 2609781 - RNA, 19 nt, Homo sapiens
  misc_RNA (1)...(19): siRNA sense strand
agaaacuaauggaacgaau

SEQ ID NO: 2609782 - RNA, 19 nt, Homo sapiens
  misc_RNA (1)...(19): siRNA sense strand
ggaaugauuaugaggaacu

SEQ ID NO: 2609783 - RNA, 19 nt, Homo sapiens
  misc_RNA (1)...(19): siRNA sense strand
caucguaacaacuaugaaa

SEQ ID NO: 2609784 - RNA, 19 nt, Homo sapiens
  misc_RNA (1)...(19): siRNA sense strand
guaagaagauaaugacugu

SEQ ID NO: 2609785 - RNA, 19 nt, Homo sapiens
  misc_RNA (1)...(19): siRNA sense strand
cgagcaaaauuauggcuua

SEQ ID NO: 2609786 - RNA, 19 nt, Homo sapiens
  misc_RNA (1)...(19): siRNA sense strand
uagaugugcuugggagaaa

SEQ ID NO: 2609787 - RNA, 19 nt, Homo sapiens
  misc_RNA (1)...(19): siRNA sense strand
auuugaaacagaagagaga

SEQ ID NO: 2609788 - RNA, 19 nt, Homo sapiens
  misc_RNA (1)...(19): siRNA sense strand
ccgaaaugaaauaagggau

SEQ ID NO: 2609789 - RNA, 19 nt, Homo sapiens
  misc_RNA (1)...(19): siRNA sense strand
agacaaagaauggaaguuu

SEQ ID NO: 2609790 - RNA, 19 nt, Homo sapiens
  misc_RNA (1)...(19): siRNA sense strand
ucaggugacuugaacauaa

SEQ ID NO: 2609791 - RNA, 19 nt, Homo sapiens
  misc_RNA (1)...(19): siRNA sense strand
gaaacuaauggaacgaauu

SEQ ID NO: 2609792 - RNA, 19 nt, Homo sapiens
  misc_RNA (1)...(19): siRNA sense strand
ccugaguauucaacaacua

SEQ ID NO: 2609793 - RNA, 19 nt, Homo sapiens
  misc_RNA (1)...(19): siRNA sense strand
gaacagcaaagcaaugaua

SEQ ID NO: 2609794 - RNA, 19 nt, Homo sapiens
  misc_RNA (1)...(19): siRNA sense strand
cguagaugugcuugggaga

SEQ ID NO: 2609795 - RNA, 19 nt, Homo sapiens
  misc_RNA (1)...(19): siRNA sense strand
ggagaaaugcuguuaccau

SEQ ID NO: 2609796 - RNA, 19 nt, Homo sapiens
  misc_RNA (1)...(19): siRNA sense strand
ggaaguuauucuaaaccau

SEQ ID NO: 2609797 - RNA, 19 nt, Homo sapiens
  misc_RNA (1)...(19): siRNA sense strand
aggugaaggaggagaauac

SEQ ID NO: 2609798 - RNA, 19 nt, Homo sapiens
  misc_RNA (1)...(19): siRNA sense strand
agaauacgcugaaugagaa

SEQ ID NO: 2609799 - RNA, 19 nt, Homo sapiens
  misc_RNA (1)...(19): siRNA sense strand
gcuuucaguugauagcaaa

SEQ ID NO: 2609800 - RNA, 19 nt, Homo sapiens
  misc_RNA (1)...(19): siRNA sense strand
uaacagaggaggauccaau

SEQ ID NO: 2609801 - RNA, 19 nt, Homo sapiens
  misc_RNA (1)...(19): siRNA sense strand
ggccagcccuugaaagaau

SEQ ID NO: 2609802 - RNA, 19 nt, Homo sapiens
  misc_RNA (1)...(19): siRNA sense strand
ucaaagugguugcucacaa

SEQ ID NO: 2609803 - RNA, 19 nt, Homo sapiens
  misc_RNA (1)...(19): siRNA sense strand
aagauuuagcuauggagaa

SEQ ID NO: 2609804 - RNA, 19 nt, Homo sapiens
  misc_RNA (1)...(19): siRNA sense strand
caggugacuugaacauaaa

SEQ ID NO: 2609805 - RNA, 19 nt, Homo sapiens
  misc_RNA (1)...(19): siRNA sense strand
uaucauucauggagcauca

SEQ ID NO: 2609806 - RNA, 19 nt, Homo sapiens
  misc_RNA (1)...(19): siRNA sense strand
aggagaauacgcugaauga

SEQ ID NO: 2609807 - RNA, 19 nt, Homo sapiens
  misc_RNA (1)...(19): siRNA sense strand
agaaaugcuguuaccauaa

SEQ ID NO: 2609808 - RNA, 19 nt, Homo sapiens
  misc_RNA (1)...(19): siRNA sense strand
augaaggguuggaagacuu

SEQ ID NO: 2609809 - RNA, 19 nt, Homo sapiens
  misc_RNA (1)...(19): siRNA sense strand
gaagagagaugaaaacuau

SEQ ID NO: 2609810 - RNA, 19 nt, Homo sapiens
  misc_RNA (1)...(19): siRNA sense strand
ucugagagcauuugaacuu

SEQ ID NO: 2609811 - RNA, 19 nt, Homo sapiens
  misc_RNA (1)...(19): siRNA sense strand
cauaaaagcuuucaguuga

SEQ ID NO: 2609812 - RNA, 19 nt, Homo sapiens
  misc_RNA (1)...(19): siRNA sense strand
gugacgagccucuugacaa

SEQ ID NO: 2609813 - RNA, 19 nt, Homo sapiens
  misc_RNA (1)...(19): siRNA sense strand
ugauuuggucagacauuaa

SEQ ID NO: 2609814 - RNA, 19 nt, Homo sapiens
  misc_RNA (1)...(19): siRNA sense strand
ccuuagcgcauguggcaau

SEQ ID NO: 2609815 - RNA, 19 nt, Homo sapiens
  misc_RNA (1)...(19): siRNA sense strand
ugacaaacggggauuauua

SEQ ID NO: 2609816 - RNA, 19 nt, Homo sapiens
  misc_RNA (1)...(19): siRNA sense strand
aggaugugcgggaggugaa

SEQ ID NO: 2609817 - RNA, 19 nt, Homo sapiens
  misc_RNA (1)...(19): siRNA sense strand
gguuucgucuugauauaua

SEQ ID NO: 2609818 - RNA, 19 nt, Homo sapiens
  misc_RNA (1)...(19): siRNA sense strand
gacacaacuguaugauaaa

SEQ ID NO: 2609819 - RNA, 19 nt, Homo sapiens
  misc_RNA (1)...(19): siRNA sense strand
ggauauacuucaaaggagc

SEQ ID NO: 2609820 - RNA, 19 nt, Homo sapiens
  misc_RNA (1)...(19): siRNA sense strand
ucaaaggagcagaaggacu

SEQ ID NO: 2609821 - RNA, 19 nt, Homo sapiens
  misc_RNA (1)...(19): siRNA sense strand
aaacagaagagagaugaaa

SEQ ID NO: 2609822 - RNA, 19 nt, Homo sapiens
  misc_RNA (1)...(19): siRNA sense strand
auuuagcuauggagaagaa

SEQ ID NO: 2609823 - RNA, 19 nt, Homo sapiens
  misc_RNA (1)...(19): siRNA sense strand
augaagacaaagaauggaa

SEQ ID NO: 2609824 - RNA, 19 nt, Homo sapiens
  misc_RNA (1)...(19): siRNA sense strand
ucuacaaugaggauaagaa

SEQ ID NO: 2609825 - RNA, 19 nt, Homo sapiens
  misc_RNA (1)...(19): siRNA sense strand
aaggauagccuccggcauu

SEQ ID NO: 2609826 - RNA, 19 nt, Homo sapiens
  misc_RNA (1)...(19): siRNA sense strand
agaaagaguuugucuccca

SEQ ID NO: 2609827 - RNA, 19 nt, Homo sapiens
  misc_RNA (1)...(19): siRNA sense strand
agaagagagaugaaaacua

SEQ ID NO: 2609828 - RNA, 19 nt, Homo sapiens
  misc_RNA (1)...(19): siRNA sense strand
aauccugaguauucaacaa

SEQ ID NO: 2609829 - RNA, 19 nt, Homo sapiens
  misc_RNA (1)...(19): siRNA sense strand
auucuaaaccauacgucua

SEQ ID NO: 2609830 - RNA, 19 nt, Homo sapiens
  misc_RNA (1)...(19): siRNA sense strand
ggaaggauugggaugcauu

SEQ ID NO: 2609831 - RNA, 19 nt, Homo sapiens
  misc_RNA (1)...(19): siRNA sense strand
caccaaagacuaucugcua

SEQ ID NO: 2609832 - RNA, 19 nt, Homo sapiens
  misc_RNA (1)...(19): siRNA sense strand
gcaaaguacagaucaggca

SEQ ID NO: 2609833 - RNA, 19 nt, Homo sapiens
  misc_RNA (1)...(19): siRNA sense strand
cauuucugcuguugcuuaa

SEQ ID NO: 2609834 - RNA, 19 nt, Homo sapiens
  misc_RNA (1)...(19): siRNA sense strand
ggucagacauuaaaagacu

SEQ ID NO: 2609835 - RNA, 19 nt, Homo sapiens
  misc_RNA (1)...(19): siRNA sense strand
gacagauguuacaagauuu

SEQ ID NO: 2609836 - RNA, 19 nt, Homo sapiens
  misc_RNA (1)...(19): siRNA sense strand
ggauguugcaccugucauu

SEQ ID NO: 2609837 - RNA, 19 nt, Homo sapiens
  misc_RNA (1)...(19): siRNA sense strand
gauaaugacuguuuugaca

SEQ ID NO: 2609838 - RNA, 19 nt, Homo sapiens
  misc_RNA (1)...(19): siRNA sense strand
ucacacaccuuuuaugaaa

SEQ ID NO: 2609839 - RNA, 19 nt, Homo sapiens
  misc_RNA (1)...(19): siRNA sense strand
ggcaaggucaaacggcaaa

SEQ ID NO: 2609840 - RNA, 19 nt, Homo sapiens
  misc_RNA (1)...(19): siRNA sense strand
caguuuaaaggaauggaga

SEQ ID NO: 2609841 - RNA, 19 nt, Homo sapiens
  misc_RNA (1)...(19): siRNA sense strand
agaucaggcaacuguggaa

SEQ ID NO: 2609842 - RNA, 19 nt, Homo sapiens
  misc_RNA (1)...(19): siRNA sense strand
gaaugauuaugaggaacua

SEQ ID NO: 2609843 - RNA, 19 nt, Homo sapiens
  misc_RNA (1)...(19): siRNA sense strand
cauuaaaagacucugguau

SEQ ID NO: 2609844 - RNA, 19 nt, Homo sapiens
  misc_RNA (1)...(19): siRNA sense strand
auguauacaaccagcucua

SEQ ID NO: 2609845 - RNA, 19 nt, Homo sapiens
  misc_RNA (1)...(19): siRNA sense strand
caaaucaugaagacaaaga

SEQ ID NO: 2609846 - RNA, 19 nt, Homo sapiens
  misc_RNA (1)...(19): siRNA sense strand
gaguaaagugggagauaaa

SEQ ID NO: 2609847 - RNA, 19 nt, Homo sapiens
  misc_RNA (1)...(19): siRNA sense strand
gagaaaaggaagagcaaaa

SEQ ID NO: 2609848 - RNA, 19 nt, Homo sapiens
  misc_RNA (1)...(19): siRNA sense strand
ggacgaacaacgaaagaaa

SEQ ID NO: 2609849 - RNA, 19 nt, Homo sapiens
  misc_RNA (1)...(19): siRNA sense strand
agaagaaguuugagaggau

SEQ ID NO: 2609850 - RNA, 19 nt, Homo sapiens
  misc_RNA (1)...(19): siRNA sense strand
ggguaguggcagugaacaa

SEQ ID NO: 2609851 - RNA, 19 nt, Homo sapiens
  misc_RNA (1)...(19): siRNA sense strand
cagaaaugaugcaaagaau

SEQ ID NO: 2609852 - RNA, 19 nt, Homo sapiens
  misc_RNA (1)...(19): siRNA sense strand
acaaacaaguacucagaaa

SEQ ID NO: 2609853 - RNA, 19 nt, Homo sapiens
  misc_RNA (1)...(19): siRNA sense strand
gaggagaguuugaugaauu

SEQ ID NO: 2609854 - RNA, 19 nt, Homo sapiens
  misc_RNA (1)...(19): siRNA sense strand
caacaggcucggaaagaaa

SEQ ID NO: 2609855 - RNA, 19 nt, Homo sapiens
  misc_RNA (1)...(19): siRNA sense strand
ggagagaggaucugauaau

SEQ ID NO: 2609856 - RNA, 19 nt, Homo sapiens
  misc_RNA (1)...(19): siRNA sense strand
gggccaagcaagagcaaga

SEQ ID NO: 2609857 - RNA, 19 nt, Homo sapiens
  misc_RNA (1)...(19): siRNA sense strand
gcaaacaagaugaagaaga

SEQ ID NO: 2609858 - RNA, 19 nt, Homo sapiens
  misc_RNA (1)...(19): siRNA sense strand
uggcuagagauaagggaaa

SEQ ID NO: 2609859 - RNA, 19 nt, Homo sapiens
  misc_RNA (1)...(19): siRNA sense strand
ccauaauacagaaguggaa

SEQ ID NO: 2609860 - RNA, 19 nt, Homo sapiens
  misc_RNA (1)...(19): siRNA sense strand
agauagaggcucagaacau

SEQ ID NO: 2609861 - RNA, 19 nt, Homo sapiens
  misc_RNA (1)...(19): siRNA sense strand
uaaagaacaggaagagaaa

SEQ ID NO: 2609862 - RNA, 19 nt, Homo sapiens
  misc_RNA (1)...(19): siRNA sense strand
auacagaaguggaagcuau

SEQ ID NO: 2609863 - RNA, 19 nt, Homo sapiens
  misc_RNA (1)...(19): siRNA sense strand
gagaugaaguuaucaguau

SEQ ID NO: 2609864 - RNA, 19 nt, Homo sapiens
  misc_RNA (1)...(19): siRNA sense strand
ucgugaagcucgugaugua

SEQ ID NO: 2609865 - RNA, 19 nt, Homo sapiens
  misc_RNA (1)...(19): siRNA sense strand
ccgaugagaaccagaacaa

SEQ ID NO: 2609866 - RNA, 19 nt, Homo sapiens
  misc_RNA (1)...(19): siRNA sense strand
uuaaagaacaggaagagaa

SEQ ID NO: 2609867 - RNA, 19 nt, Homo sapiens
  misc_RNA (1)...(19): siRNA sense strand
cgauguuccuccagagauu

SEQ ID NO: 2609868 - RNA, 19 nt, Homo sapiens
  misc_RNA (1)...(19): siRNA sense strand
uaagaagggaggagaguuu

SEQ ID NO: 2609869 - RNA, 19 nt, Homo sapiens
  misc_RNA (1)...(19): siRNA sense strand
acgcaaacaagaugaagaa

SEQ ID NO: 2609870 - RNA, 19 nt, Homo sapiens
  misc_RNA (1)...(19): siRNA sense strand
ggugagagaaagaagaaaa

SEQ ID NO: 2609871 - RNA, 19 nt, Homo sapiens
  misc_RNA (1)...(19): siRNA sense strand
cuucaaguguggcaaguua

SEQ ID NO: 2609872 - RNA, 19 nt, Homo sapiens
  misc_RNA (1)...(19): siRNA sense strand
gcaacaaaagagaagaaaa

SEQ ID NO: 2609873 - RNA, 19 nt, Homo sapiens
  misc_RNA (1)...(19): siRNA sense strand
gggcagaagaaguuugaga

SEQ ID NO: 2609874 - RNA, 19 nt, Homo sapiens
  misc_RNA (1)...(19): siRNA sense strand
ccaaguaagagaagcaaca

SEQ ID NO: 2609875 - RNA, 19 nt, Homo sapiens
  misc_RNA (1)...(19): siRNA sense strand
ccucagaagaucaagaaaa

SEQ ID NO: 2609876 - RNA, 19 nt, Homo sapiens
  misc_RNA (1)...(19): siRNA sense strand
ugaggaggguggugagaga

SEQ ID NO: 2609877 - RNA, 19 nt, Homo sapiens
  misc_RNA (1)...(19): siRNA sense strand
cagaugacuugcuuggaua

SEQ ID NO: 2609878 - RNA, 19 nt, Homo sapiens
  misc_RNA (1)...(19): siRNA sense strand
gagaaaaggaaaagcguca

SEQ ID NO: 2609879 - RNA, 19 nt, Homo sapiens
  misc_RNA (1)...(19): siRNA sense strand
caccaaaagcagagaagaa

SEQ ID NO: 2609880 - RNA, 19 nt, Homo sapiens
  misc_RNA (1)...(19): siRNA sense strand
ggaugaggauaaacuuaaa

SEQ ID NO: 2609881 - RNA, 19 nt, Homo sapiens
  misc_RNA (1)...(19): siRNA sense strand
aagaagagaagaaagggua

SEQ ID NO: 2609882 - RNA, 19 nt, Homo sapiens
  misc_RNA (1)...(19): siRNA sense strand
cuccaucaaugaagggaaa

SEQ ID NO: 2609883 - RNA, 19 nt, Homo sapiens
  misc_RNA (1)...(19): siRNA sense strand
uggccaaggcucuggaaau

SEQ ID NO: 2609884 - RNA, 19 nt, Homo sapiens
  misc_RNA (1)...(19): siRNA sense strand
gggucauugcuuugugaaa

SEQ ID NO: 2609885 - RNA, 19 nt, Homo sapiens
  misc_RNA (1)...(19): siRNA sense strand
cuaauuauguugacugcua

SEQ ID NO: 2609886 - RNA, 19 nt, Homo sapiens
  misc_RNA (1)...(19): siRNA sense strand
aggaggguggugagagaaa

SEQ ID NO: 2609887 - RNA, 19 nt, Homo sapiens
  misc_RNA (1)...(19): siRNA sense strand
gaacaugggucagaugaua

SEQ ID NO: 2609888 - RNA, 19 nt, Homo sapiens
  misc_RNA (1)...(19): siRNA sense strand
ggauugaauuggcacaaau

SEQ ID NO: 2609889 - RNA, 19 nt, Homo sapiens
  misc_RNA (1)...(19): siRNA sense strand
aguacuuaaugcugugaaa

SEQ ID NO: 2609890 - RNA, 19 nt, Homo sapiens
  misc_RNA (1)...(19): siRNA sense strand
gggaggagaguuugaugaa

SEQ ID NO: 2609891 - RNA, 19 nt, Homo sapiens
  misc_RNA (1)...(19): siRNA sense strand
aagaaaggguaguggcagu

SEQ ID NO: 2609892 - RNA, 19 nt, Homo sapiens
  misc_RNA (1)...(19): siRNA sense strand
gagaagacauccaaaggga

SEQ ID NO: 2609893 - RNA, 19 nt, Homo sapiens
  misc_RNA (1)...(19): siRNA sense strand
gcacauagauacuucaguu

SEQ ID NO: 2609894 - RNA, 19 nt, Homo sapiens
  misc_RNA (1)...(19): siRNA sense strand
gcaaguuacaggaaugcaa

SEQ ID NO: 2609895 - RNA, 19 nt, Homo sapiens
  misc_RNA (1)...(19): siRNA sense strand
cggaugaggauaaacuuaa

SEQ ID NO: 2609896 - RNA, 19 nt, Homo sapiens
  misc_RNA (1)...(19): siRNA sense strand
gcaauuuggacuauagaga

SEQ ID NO: 2609897 - RNA, 19 nt, Homo sapiens
  misc_RNA (1)...(19): siRNA sense strand
ugaacaagaaggugaagau

SEQ ID NO: 2609898 - RNA, 19 nt, Homo sapiens
  misc_RNA (1)...(19): siRNA sense strand
ccaaaagcagagaagaaaa

SEQ ID NO: 2609899 - RNA, 19 nt, Homo sapiens
  misc_RNA (1)...(19): siRNA sense strand
ucaggaagauuaugaccaa

SEQ ID NO: 2609900 - RNA, 19 nt, Homo sapiens
  misc_RNA (1)...(19): siRNA sense strand
aggagaaagugcaggccga

SEQ ID NO: 2609901 - RNA, 19 nt, Homo sapiens
  misc_RNA (1)...(19): siRNA sense strand
gcagugaacaagaagguga

SEQ ID NO: 2609902 - RNA, 19 nt, Homo sapiens
  misc_RNA (1)...(19): siRNA sense strand
gaugaugaugaaacagaaa

SEQ ID NO: 2609903 - RNA, 19 nt, Homo sapiens
  misc_RNA (1)...(19): siRNA sense strand
guauugaaccauuuggcaa

SEQ ID NO: 2609904 - RNA, 19 nt, Homo sapiens
  misc_RNA (1)...(19): siRNA sense strand
ugaagaaggucacagaaca

SEQ ID NO: 2609905 - RNA, 19 nt, Homo sapiens
  misc_RNA (1)...(19): siRNA sense strand
gaagacauccaaagggaga

SEQ ID NO: 2609906 - RNA, 19 nt, Homo sapiens
  misc_RNA (1)...(19): siRNA sense strand
aagaaagcauugcguacua

SEQ ID NO: 2609907 - RNA, 19 nt, Homo sapiens
  misc_RNA (1)...(19): siRNA sense strand
acucuucggaugaggauaa

SEQ ID NO: 2609908 - RNA, 19 nt, Homo sapiens
  misc_RNA (1)...(19): siRNA sense strand
gagcauuacuauaacgcca

SEQ ID NO: 2609909 - RNA, 19 nt, Homo sapiens
  misc_RNA (1)...(19): siRNA sense strand
ugaguaaagugggagauaa

SEQ ID NO: 2609910 - RNA, 19 nt, Homo sapiens
  misc_RNA (1)...(19): siRNA sense strand
ggaaguucguuuaggaaug

SEQ ID NO: 2609911 - RNA, 19 nt, Homo sapiens
  misc_RNA (1)...(19): siRNA sense strand
gggcccaguauguggagaa

SEQ ID NO: 2609912 - RNA, 19 nt, Homo sapiens
  misc_RNA (1)...(19): siRNA sense strand
ccuacuugagggugacaaa

SEQ ID NO: 2609913 - RNA, 19 nt, Homo sapiens
  misc_RNA (1)...(19): siRNA sense strand
acacugaaguuguacucua

SEQ ID NO: 2609914 - RNA, 19 nt, Homo sapiens
  misc_RNA (1)...(19): siRNA sense strand
caaacaaguacucagaaau

SEQ ID NO: 2609915 - RNA, 19 nt, Homo sapiens
  misc_RNA (1)...(19): siRNA sense strand
ccauccacacagagugaua

SEQ ID NO: 2609916 - RNA, 19 nt, Homo sapiens
  misc_RNA (1)...(19): siRNA sense strand
cagagaaaaggaagagcaa

SEQ ID NO: 2609917 - RNA, 19 nt, Homo sapiens
  misc_RNA (1)...(19): siRNA sense strand
caacaaaagagaagaaaag

SEQ ID NO: 2609918 - RNA, 19 nt, Homo sapiens
  misc_RNA (1)...(19): siRNA sense strand
ccaagggccauuugaagaa

SEQ ID NO: 2609919 - RNA, 19 nt, Homo sapiens
  misc_RNA (1)...(19): siRNA sense strand
cuuagaacagacugauaua

SEQ ID NO: 2609920 - RNA, 19 nt, Homo sapiens
  misc_RNA (1)...(19): siRNA sense strand
ugaccuaccuauauccaaa

SEQ ID NO: 2609921 - RNA, 19 nt, Homo sapiens
  misc_RNA (1)...(19): siRNA sense strand
agaagaaggaucugaugau

SEQ ID NO: 2609922 - RNA, 19 nt, Homo sapiens
  misc_RNA (1)...(19): siRNA sense strand
uggcacaaaucuuagaaca

SEQ ID NO: 2609923 - RNA, 19 nt, Homo sapiens
  misc_RNA (1)...(19): siRNA sense strand
aggagaguuugaugaauuu

SEQ ID NO: 2609924 - RNA, 19 nt, Homo sapiens
  misc_RNA (1)...(19): siRNA sense strand
gcacaaaucuuagaacaga

SEQ ID NO: 2609925 - RNA, 19 nt, Homo sapiens
  misc_RNA (1)...(19): siRNA sense strand
gagcaaaagcaguacauca

SEQ ID NO: 2609926 - RNA, 19 nt, Homo sapiens
  misc_RNA (1)...(19): siRNA sense strand
aggaacagcaacagcaaca

SEQ ID NO: 2609927 - RNA, 19 nt, Homo sapiens
  misc_RNA (1)...(19): siRNA sense strand
uaaugaggguucuggccaa

SEQ ID NO: 2609928 - RNA, 19 nt, Homo sapiens
  misc_RNA (1)...(19): siRNA sense strand
aauacuacaagcaaggaaa

SEQ ID NO: 2609929 - RNA, 19 nt, Homo sapiens
  misc_RNA (1)...(19): siRNA sense strand
guuggaagcagcacguaua

SEQ ID NO: 2609930 - RNA, 19 nt, Homo sapiens
  misc_RNA (1)...(19): siRNA sense strand
guauacaauggccgauaaa

SEQ ID NO: 2609931 - RNA, 19 nt, Homo sapiens
  misc_RNA (1)...(19): siRNA sense strand
gaaaugaugcaaagaaucu

SEQ ID NO: 2609932 - RNA, 19 nt, Homo sapiens
  misc_RNA (1)...(19): siRNA sense strand
gaaaagagguggugguggu

SEQ ID NO: 2609933 - RNA, 19 nt, Homo sapiens
  misc_RNA (1)...(19): siRNA sense strand
cagugaacaagaaggugaa

SEQ ID NO: 2609934 - RNA, 19 nt, Homo sapiens
  misc_RNA (1)...(19): siRNA sense strand
acucagacgaggacgaaca

SEQ ID NO: 2609935 - RNA, 19 nt, Homo sapiens
  misc_RNA (1)...(19): siRNA sense strand
gaaaugaaucggaaccaga

SEQ ID NO: 2609936 - RNA, 19 nt, Homo sapiens
  misc_RNA (1)...(19): siRNA sense strand
cggaaguucguuuaggaau

SEQ ID NO: 2609937 - RNA, 19 nt, Homo sapiens
  misc_RNA (1)...(19): siRNA sense strand
gaagaaguuugagaggaua

SEQ ID NO: 2609938 - RNA, 19 nt, Homo sapiens
  misc_RNA (1)...(19): siRNA sense strand
caaacaagaugaagaagag

SEQ ID NO: 2609939 - RNA, 19 nt, Homo sapiens
  misc_RNA (1)...(19): siRNA sense strand
uggugagacugaagcaaca

SEQ ID NO: 2609940 - RNA, 19 nt, Homo sapiens
  misc_RNA (1)...(19): siRNA sense strand
gagaagaaggaucugauga

SEQ ID NO: 2609941 - RNA, 19 nt, Homo sapiens
  misc_RNA (1)...(19): siRNA sense strand
uugcuuuggcgcuggaaua

SEQ ID NO: 2609942 - RNA, 19 nt, Homo sapiens
  misc_RNA (1)...(19): siRNA sense strand
guugaagcuuggauugaau

SEQ ID NO: 2609943 - RNA, 19 nt, Homo sapiens
  misc_RNA (1)...(19): siRNA sense strand
aagaaguuugagaggauau

SEQ ID NO: 2609944 - RNA, 19 nt, Homo sapiens
  misc_RNA (1)...(19): siRNA sense strand
aaaguaaucugaaggaagu

SEQ ID NO: 2609945 - RNA, 19 nt, Homo sapiens
  misc_RNA (1)...(19): siRNA sense strand
ugacacugaugaugaccua

SEQ ID NO: 2609946 - RNA, 19 nt, Homo sapiens
  misc_RNA (1)...(19): siRNA sense strand
cagcagacacugagcaaca

SEQ ID NO: 2609947 - RNA, 19 nt, Homo sapiens
  misc_RNA (1)...(19): siRNA sense strand
gaguauggcucgcugugaa

SEQ ID NO: 2609948 - RNA, 19 nt, Homo sapiens
  misc_RNA (1)...(19): siRNA sense strand
gacaucaggaggaggacaa

SEQ ID NO: 2609949 - RNA, 19 nt, Homo sapiens
  misc_RNA (1)...(19): siRNA sense strand
gaggaagcuucguucagaa

SEQ ID NO: 2609950 - RNA, 19 nt, Homo sapiens
  misc_RNA (1)...(19): siRNA sense strand
ugacagaagaaaucgcuuu

SEQ ID NO: 2609951 - RNA, 19 nt, Homo sapiens
  misc_RNA (1)...(19): siRNA sense strand
gggcuuguagagugaucaa

SEQ ID NO: 2609952 - RNA, 19 nt, Homo sapiens
  misc_RNA (1)...(19): siRNA sense strand
ucacaguacaugccagcua

SEQ ID NO: 2609953 - RNA, 19 nt, Homo sapiens
  misc_RNA (1)...(19): siRNA sense strand
acuugaggcugcugacaga

SEQ ID NO: 2609954 - RNA, 19 nt, Homo sapiens
  misc_RNA (1)...(19): siRNA sense strand
uggucuccaucuugaauaa

SEQ ID NO: 2609955 - RNA, 19 nt, Homo sapiens
  misc_RNA (1)...(19): siRNA sense strand
aggaggaggacaagccaga

SEQ ID NO: 2609956 - RNA, 19 nt, Homo sapiens
  misc_RNA (1)...(19): siRNA sense strand
acacugagcaacaagauca

SEQ ID NO: 2609957 - RNA, 19 nt, Homo sapiens
  misc_RNA (1)...(19): siRNA sense strand
ccacucagaugaauucuua

SEQ ID NO: 2609958 - RNA, 19 nt, Homo sapiens
  misc_RNA (1)...(19): siRNA sense strand
agcuaaacuuguauggcuu

SEQ ID NO: 2609959 - RNA, 19 nt, Homo sapiens
  misc_RNA (1)...(19): siRNA sense strand
ugucaagucugcaccaaga

SEQ ID NO: 2609960 - RNA, 19 nt, Homo sapiens
  misc_RNA (1)...(19): siRNA sense strand
caagacaucaggaggagga

SEQ ID NO: 2609961 - RNA, 19 nt, Homo sapiens
  misc_RNA (1)...(19): siRNA sense strand
aguugcagucagagaccua

SEQ ID NO: 2609962 - RNA, 19 nt, Homo sapiens
  misc_RNA (1)...(19): siRNA sense strand
ggcaugaagugaagagaaa

SEQ ID NO: 2609963 - RNA, 19 nt, Homo sapiens
  misc_RNA (1)...(19): siRNA sense strand
ggaaaguggugaaggcaca

SEQ ID NO: 2609964 - RNA, 19 nt, Homo sapiens
  misc_RNA (1)...(19): siRNA sense strand
ccgucgaagugaaggaaau

SEQ ID NO: 2609965 - RNA, 19 nt, Homo sapiens
  misc_RNA (1)...(19): siRNA sense strand
cugaagaagccgaguaaca

SEQ ID NO: 2609966 - RNA, 19 nt, Homo sapiens
  misc_RNA (1)...(19): siRNA sense strand
acaaaucgcuuuacaagaa

SEQ ID NO: 2609967 - RNA, 19 nt, Homo sapiens
  misc_RNA (1)...(19): siRNA sense strand
uguaacaggaagacagcaa

SEQ ID NO: 2609968 - RNA, 19 nt, Homo sapiens
  misc_RNA (1)...(19): siRNA sense strand
ucggaaaugccuacacaaa

SEQ ID NO: 2609969 - RNA, 19 nt, Homo sapiens
  misc_RNA (1)...(19): siRNA sense strand
ucuccacucucuagaaaua

SEQ ID NO: 2609970 - RNA, 19 nt, Homo sapiens
  misc_RNA (1)...(19): siRNA sense strand
aggcaugaagugaagagaa

SEQ ID NO: 2609971 - RNA, 19 nt, Homo sapiens
  misc_RNA (1)...(19): siRNA sense strand
ggaaaugccuacacaaauc

SEQ ID NO: 2609972 - RNA, 19 nt, Homo sapiens
  misc_RNA (1)...(19): siRNA sense strand
cggaaaugccuacacaaau

SEQ ID NO: 2609973 - RNA, 19 nt, Homo sapiens
  misc_RNA (1)...(19): siRNA sense strand
guaacaggcaugaagugaa

SEQ ID NO: 2609974 - RNA, 19 nt, Homo sapiens
  misc_RNA (1)...(19): siRNA sense strand
gcauggcuauggugaggaa

SEQ ID NO: 2609975 - RNA, 19 nt, Homo sapiens
  misc_RNA (1)...(19): siRNA sense strand
gcuaaugaccacacuauuu

SEQ ID NO: 2609976 - RNA, 19 nt, Homo sapiens
  misc_RNA (1)...(19): siRNA sense strand
gugaagagaaaucgcugua

SEQ ID NO: 2609977 - RNA, 19 nt, Homo sapiens
  misc_RNA (1)...(19): siRNA sense strand
aggcuaggcugcugcugua

SEQ ID NO: 2609978 - RNA, 19 nt, Homo sapiens
  misc_RNA (1)...(19): siRNA sense strand
gaacuggaaccaacgagaa

SEQ ID NO: 2609979 - RNA, 19 nt, Homo sapiens
  misc_RNA (1)...(19): siRNA sense strand
ggaaguuggccgucgaagu

SEQ ID NO: 2609980 - RNA, 19 nt, Homo sapiens
  misc_RNA (1)...(19): siRNA sense strand
aagagaaaucgcuguaaca

SEQ ID NO: 2609981 - RNA, 19 nt, Homo sapiens
  misc_RNA (1)...(19): siRNA sense strand
ggaagacagcaaagcagau

SEQ ID NO: 2609982 - RNA, 19 nt, Homo sapiens
  misc_RNA (1)...(19): siRNA sense strand
gacauucaguucucggaaa

SEQ ID NO: 2609983 - RNA, 19 nt, Homo sapiens
  misc_RNA (1)...(19): siRNA sense strand
aacuggaaccaacgagaaa

SEQ ID NO: 2609984 - RNA, 19 nt, Homo sapiens
  misc_RNA (1)...(19): siRNA sense strand
cuucucagcaaaucggaaa

SEQ ID NO: 2609985 - RNA, 19 nt, Homo sapiens
  misc_RNA (1)...(19): siRNA sense strand
cucugaagaagccgaguaa

SEQ ID NO: 2609986 - RNA, 19 nt, Homo sapiens
  misc_RNA (1)...(19): siRNA sense strand
cagucaaguucccuaucaa

SEQ ID NO: 2609987 - RNA, 19 nt, Homo sapiens
  misc_RNA (1)...(19): siRNA sense strand
caugaagugaagagaaauc

SEQ ID NO: 2609988 - RNA, 19 nt, Homo sapiens
  misc_RNA (1)...(19): siRNA sense strand
gaagugaaggaaaugguga

SEQ ID NO: 2609989 - RNA, 19 nt, Homo sapiens
  misc_RNA (1)...(19): siRNA sense strand
ccaaagagguuacuucaaa

SEQ ID NO: 2609990 - RNA, 19 nt, Homo sapiens
  misc_RNA (1)...(19): siRNA sense strand
agacagaugaugcuggaaa

SEQ ID NO: 2609991 - RNA, 19 nt, Homo sapiens
  misc_RNA (1)...(19): siRNA sense strand
gcucagugugcgaaauuua

SEQ ID NO: 2609992 - RNA, 19 nt, Homo sapiens
  misc_RNA (1)...(19): siRNA sense strand
gagguuacuucaaagacaa

SEQ ID NO: 2609993 - RNA, 19 nt, Homo sapiens
  misc_RNA (1)...(19): siRNA sense strand
caaaauaacacaucgggaa

SEQ ID NO: 2609994 - RNA, 19 nt, Homo sapiens
  misc_RNA (1)...(19): siRNA sense strand
gugcgaaauuuauugauga

SEQ ID NO: 2609995 - RNA, 19 nt, Homo sapiens
  misc_RNA (1)...(19): siRNA sense strand
gacagaugaugcuggaaau

SEQ ID NO: 2609996 - RNA, 19 nt, Homo sapiens
  misc_RNA (1)...(19): siRNA sense strand
gaauaugccaaguaucuaa

SEQ ID NO: 2609997 - RNA, 19 nt, Homo sapiens
  misc_RNA (1)...(19): siRNA sense strand
aauaugaacacuuccgaaa

SEQ ID NO: 2609998 - RNA, 19 nt, Homo sapiens
  misc_RNA (1)...(19): siRNA sense strand
ggaauuugugcaauguuua

SEQ ID NO: 2609999 - RNA, 19 nt, Homo sapiens
  misc_RNA (1)...(19): siRNA sense strand
gaaaggagcuggugaaugc

SEQ ID NO: 2610000 - RNA, 19 nt, Homo sapiens
  misc_RNA (1)...(19): siRNA sense strand
ggaguuggaauuugugcaa

SEQ ID NO: 2610001 - RNA, 19 nt, Homo sapiens
  misc_RNA (1)...(19): siRNA sense strand
aaaauaacacaucgggaaa

SEQ ID NO: 2610002 - RNA, 19 nt, Homo sapiens
  misc_RNA (1)...(19): siRNA sense strand
cagaauaugccaaguaucu

SEQ ID NO: 2610003 - RNA, 19 nt, Homo sapiens
  misc_RNA (1)...(19): siRNA sense strand
gcggaugcgccuucagcaa

SEQ ID NO: 2610004 - RNA, 19 nt, Homo sapiens
  misc_RNA (1)...(19): siRNA sense strand
uaaaguacccucaguguuu

SEQ ID NO: 2610005 - RNA, 19 nt, Homo sapiens
  misc_RNA (1)...(19): siRNA sense strand
uggaaaucgacuucgguuu

SEQ ID NO: 2610006 - RNA, 19 nt, Homo sapiens
  misc_RNA (1)...(19): siRNA sense strand
uggaauuugugcaauguuu

SEQ ID NO: 2610007 - RNA, 19 nt, Homo sapiens
  misc_RNA (1)...(19): siRNA sense strand
agaugaugcuggaaaucga

SEQ ID NO: 2610008 - RNA, 19 nt, Homo sapiens
  misc_RNA (1)...(19): siRNA sense strand
agagguuacuucaaagaca

SEQ ID NO: 2610009 - RNA, 19 nt, Homo sapiens
  misc_RNA (1)...(19): siRNA sense strand
ggagacagaugaugcugga

SEQ ID NO: 2610010 - RNA, 19 nt, Homo sapiens
  misc_RNA (1)...(19): siRNA sense strand
gugaaugcucagugugcga

SEQ ID NO: 2610011 - RNA, 19 nt, Homo sapiens
  misc_RNA (1)...(19): siRNA sense strand
cagagcagcaacagcaaaa

SEQ ID NO: 2610012 - RNA, 19 nt, Homo sapiens
  misc_RNA (1)...(19): siRNA sense strand
cuucaguggugcuggguca

SEQ ID NO: 2610013 - RNA, 19 nt, Homo sapiens
  misc_RNA (1)...(19): siRNA sense strand
gaacagaagcucagggacc

SEQ ID NO: 2610014 - RNA, 19 nt, Homo sapiens
  misc_RNA (1)...(19): siRNA sense strand
ccucaagcgcuccaguaaa

SEQ ID NO: 2610015 - RNA, 19 nt, Homo sapiens
  misc_RNA (1)...(19): siRNA sense strand
cugcuacagaagaaacaaa

SEQ ID NO: 2610016 - RNA, 19 nt, Homo sapiens
  misc_RNA (1)...(19): siRNA sense strand
cgccacaguccucagguaa

SEQ ID NO: 2610017 - RNA, 19 nt, Homo sapiens
  misc_RNA (1)...(19): siRNA sense strand
caacagaacuugaacacua

SEQ ID NO: 2610018 - RNA, 19 nt, Homo sapiens
  misc_RNA (1)...(19): siRNA sense strand
gcaccagaguccugaaauu

SEQ ID NO: 2610019 - RNA, 19 nt, Homo sapiens
  misc_RNA (1)...(19): siRNA sense strand
gagcagaagaagaauacaa

SEQ ID NO: 2610020 - RNA, 19 nt, Homo sapiens
  misc_RNA (1)...(19): siRNA sense strand
cagaagaagaauacaaaca

SEQ ID NO: 2610021 - RNA, 19 nt, Homo sapiens
  misc_RNA (1)...(19): siRNA sense strand
gcguaaagaaaguggaaag

SEQ ID NO: 2610022 - RNA, 19 nt, Homo sapiens
  misc_RNA (1)...(19): siRNA sense strand
gcugagcagaagaagaaua

SEQ ID NO: 2610023 - RNA, 19 nt, Homo sapiens
  misc_RNA (1)...(19): siRNA sense strand
agaagaauacaaacagcaa

SEQ ID NO: 2610024 - RNA, 19 nt, Homo sapiens
  misc_RNA (1)...(19): siRNA sense strand
aaagagcagcguaaagaaa

SEQ ID NO: 2610025 - RNA, 19 nt, Homo sapiens
  misc_RNA (1)...(19): siRNA sense strand
acgaagaggacccagcaua

SEQ ID NO: 2610026 - RNA, 19 nt, Homo sapiens
  misc_RNA (1)...(19): siRNA sense strand
cuacgagguauuucaguua

SEQ ID NO: 2610027 - RNA, 19 nt, Homo sapiens
  misc_RNA (1)...(19): siRNA sense strand
cagcguaaagaaaguggaa

SEQ ID NO: 2610028 - RNA, 19 nt, Homo sapiens
  misc_RNA (1)...(19): siRNA sense strand
cguaaagaaaguggaaaga

SEQ ID NO: 2610029 - RNA, 19 nt, Homo sapiens
  misc_RNA (1)...(19): siRNA sense strand
ugaugguggaagagaguga

SEQ ID NO: 2610030 - RNA, 19 nt, Homo sapiens
  misc_RNA (1)...(19): siRNA sense strand
guaaagaaaguggaaagaa

SEQ ID NO: 2610031 - RNA, 19 nt, Homo sapiens
  misc_RNA (1)...(19): siRNA sense strand
gcaauguggcaauggacga

SEQ ID NO: 2610032 - RNA, 19 nt, Homo sapiens
  misc_RNA (1)...(19): siRNA sense strand
ucaguaacuacgagguauu

SEQ ID NO: 2610033 - RNA, 19 nt, Homo sapiens
  misc_RNA (1)...(19): siRNA sense strand
gaaagagcagcguaaagaa

SEQ ID NO: 2610034 - RNA, 19 nt, Homo sapiens
  misc_RNA (1)...(19): siRNA sense strand
caaacagcaauguggcaau

SEQ ID NO: 2610035 - RNA, 19 nt, Homo sapiens
  misc_RNA (1)...(19): siRNA sense strand
uggcaauggacgaagagga

SEQ ID NO: 2610036 - RNA, 19 nt, Homo sapiens
  misc_RNA (1)...(19): siRNA sense strand
gggcaacagaacuugaaca

SEQ ID NO: 2610037 - RNA, 19 nt, Homo sapiens
  misc_RNA (1)...(19): siRNA sense strand
ucacggaggagcagauuga

SEQ ID NO: 2610038 - RNA, 19 nt, Homo sapiens
  misc_RNA (1)...(19): siRNA sense strand
aucugaaagagcagcguaa

SEQ ID NO: 2610039 - RNA, 19 nt, Homo sapiens
  misc_RNA (1)...(19): siRNA sense strand
uaaacacagcucugggcaa

SEQ ID NO: 2610040 - RNA, 19 nt, Homo sapiens
  misc_RNA (1)...(19): siRNA sense strand
agcagaagaagaauacaaa

SEQ ID NO: 2610041 - RNA, 19 nt, Homo sapiens
  misc_RNA (1)...(19): siRNA sense strand
ucucaguaacuacgaggua

SEQ ID NO: 2610042 - RNA, 19 nt, Homo sapiens
  misc_RNA (1)...(19): siRNA sense strand
ggaagugaaggaugccaau

SEQ ID NO: 2610043 - RNA, 19 nt, Homo sapiens
  misc_RNA (1)...(19): siRNA sense strand
gcugaugguggaagagagu

SEQ ID NO: 2610044 - RNA, 19 nt, Homo sapiens
  misc_RNA (1)...(19): siRNA sense strand
gaagaauacaaacagcaau

SEQ ID NO: 2610045 - RNA, 19 nt, Homo sapiens
  misc_RNA (1)...(19): siRNA sense strand
gcauauaguuggaaagaga

SEQ ID NO: 2610046 - RNA, 19 nt, Homo sapiens
  misc_RNA (1)...(19): siRNA sense strand
aaauagaaauggagaccaa

SEQ ID NO: 2610047 - RNA, 19 nt, Homo sapiens
  misc_RNA (1)...(19): siRNA sense strand
ggauagaauacaugaauga

SEQ ID NO: 2610048 - RNA, 19 nt, Homo sapiens
  misc_RNA (1)...(19): siRNA sense strand
gcaucgaaaugguguaauu

SEQ ID NO: 2610049 - RNA, 19 nt, Homo sapiens
  misc_RNA (1)...(19): siRNA sense strand
caacaggcuacaagaauua

SEQ ID NO: 2610050 - RNA, 19 nt, Homo sapiens
  misc_RNA (1)...(19): siRNA sense strand
ccacaaggauuccggucua

SEQ ID NO: 2610051 - RNA, 19 nt, Homo sapiens
  misc_RNA (1)...(19): siRNA sense strand
ccaacaggcuacaagaauu

SEQ ID NO: 2610052 - RNA, 19 nt, Homo sapiens
  misc_RNA (1)...(19): siRNA sense strand
cuacacagcggaaggcaaa

SEQ ID NO: 2610053 - RNA, 19 nt, Homo sapiens
  misc_RNA (1)...(19): siRNA sense strand
cuucaaggaaagagaauca

SEQ ID NO: 2610054 - RNA, 19 nt, Homo sapiens
  misc_RNA (1)...(19): siRNA sense strand
cgccaaaguccauaugaaa

SEQ ID NO: 2610055 - RNA, 19 nt, Homo sapiens
  misc_RNA (1)...(19): siRNA sense strand
gcaaauauaucuucaagga

SEQ ID NO: 2610056 - RNA, 19 nt, Homo sapiens
  misc_RNA (1)...(19): siRNA sense strand
agaguggaauagugugaaa

SEQ ID NO: 2610057 - RNA, 19 nt, Homo sapiens
  misc_RNA (1)...(19): siRNA sense strand
ccaaaguccauaugaaaga

SEQ ID NO: 2610058 - RNA, 19 nt, Homo sapiens
  misc_RNA (1)...(19): siRNA sense strand
aagaagaugaagaggacuu

SEQ ID NO: 2610059 - RNA, 19 nt, Homo sapiens
  misc_RNA (1)...(19): siRNA sense strand
ccguagacagcuuuggaaa

SEQ ID NO: 2610060 - RNA, 19 nt, Homo sapiens
  misc_RNA (1)...(19): siRNA sense strand
aggaggaaguacuggcgaa

SEQ ID NO: 2610061 - RNA, 19 nt, Homo sapiens
  misc_RNA (1)...(19): siRNA sense strand
ggccggaauuacaggaaga

SEQ ID NO: 2610062 - RNA, 19 nt, Homo sapiens
  misc_RNA (1)...(19): siRNA sense strand
ggaagaauccaguccaaga

SEQ ID NO: 2610063 - RNA, 19 nt, Homo sapiens
  misc_RNA (1)...(19): siRNA sense strand
caggaagaauccaguccaa

SEQ ID NO: 2610064 - RNA, 19 nt, Homo sapiens
  misc_RNA (1)...(19): siRNA sense strand
auagugaaagaguggaaua

SEQ ID NO: 2610065 - RNA, 19 nt, Homo sapiens
  misc_RNA (1)...(19): siRNA sense strand
cuaucaacaugaagaagau

SEQ ID NO: 2610066 - RNA, 19 nt, Homo sapiens
  misc_RNA (1)...(19): siRNA sense strand
uaauagugaaagaguggaa

SEQ ID NO: 2610067 - RNA, 19 nt, Homo sapiens
  misc_RNA (1)...(19): siRNA sense strand
acgccaaaguccauaugaa

SEQ ID NO: 2610068 - RNA, 19 nt, Homo sapiens
  misc_RNA (1)...(19): siRNA sense strand
uaaugauauuccugggaga

SEQ ID NO: 2610069 - RNA, 19 nt, Homo sapiens
  misc_RNA (1)...(19): siRNA sense strand
cggaauuacaggaagaauc

SEQ ID NO: 2610070 - RNA, 19 nt, Homo sapiens
  misc_RNA (1)...(19): siRNA sense strand
gcgaagugcuccauggauc

SEQ ID NO: 2610071 - RNA, 19 nt, Homo sapiens
  misc_RNA (1)...(19): siRNA sense strand
ggaagaaaauagaaaugga

SEQ ID NO: 2610072 - RNA, 19 nt, Homo sapiens
  misc_RNA (1)...(19): siRNA sense strand
acagcaguguaaagaggaa

SEQ ID NO: 2610073 - RNA, 19 nt, Homo sapiens
  misc_RNA (1)...(19): siRNA sense strand
ugaagaagaugaagaggac

SEQ ID NO: 2610074 - RNA, 19 nt, Homo sapiens
  misc_RNA (1)...(19): siRNA sense strand
aguggagaugccagggaua

SEQ ID NO: 2610075 - RNA, 19 nt, Homo sapiens
  misc_RNA (1)...(19): siRNA sense strand
cccuaaagcugaauucaau

SEQ ID NO: 2610076 - RNA, 19 nt, Homo sapiens
  misc_RNA (1)...(19): siRNA sense strand
augaagaagaugaagagga

SEQ ID NO: 2610077 - RNA, 19 nt, Homo sapiens
  misc_RNA (1)...(19): siRNA sense strand
ggauguucuuuacgccaaa

SEQ ID NO: 2610078 - RNA, 19 nt, Homo sapiens
  misc_RNA (1)...(19): siRNA sense strand
aagaauuaguugaucgagu

SEQ ID NO: 2610079 - RNA, 19 nt, Homo sapiens
  misc_RNA (1)...(19): siRNA sense strand
guccacagcuuauaagauu

SEQ ID NO: 2610080 - RNA, 19 nt, Homo sapiens
  misc_RNA (1)...(19): siRNA sense strand
ccuaucaacaugaagaaga

SEQ ID NO: 2610081 - RNA, 19 nt, Homo sapiens
  misc_RNA (1)...(19): siRNA sense strand
gcuacaagaauuaguugau

SEQ ID NO: 2610082 - RNA, 19 nt, Homo sapiens
  misc_RNA (1)...(19): siRNA sense strand
ucaacaugaagaagaugaa

SEQ ID NO: 2610083 - RNA, 19 nt, Homo sapiens
  misc_RNA (1)...(19): siRNA sense strand
ggggacacuaggaagaaaa

SEQ ID NO: 2610084 - RNA, 19 nt, Homo sapiens
  misc_RNA (1)...(19): siRNA sense strand
cgaagugcuccauggauca

SEQ ID NO: 2610085 - RNA, 19 nt, Homo sapiens
  misc_RNA (1)...(19): siRNA sense strand
aaagaguggaauaguguga

SEQ ID NO: 2610086 - RNA, 19 nt, Homo sapiens
  misc_RNA (1)...(19): siRNA sense strand
aggaagagauccagcagac

SEQ ID NO: 2610087 - RNA, 19 nt, Homo sapiens
  misc_RNA (1)...(19): siRNA sense strand
gaagagauccagcagacau

SEQ ID NO: 2610088 - RNA, 19 nt, Homo sapiens
  misc_RNA (1)...(19): siRNA sense strand
caaggaaagagaaucauuu

SEQ ID NO: 2610089 - RNA, 19 nt, Homo sapiens
  misc_RNA (1)...(19): siRNA sense strand
gcaugguggauguucuuua

SEQ ID NO: 2610090 - RNA, 19 nt, Homo sapiens
  misc_RNA (1)...(19): siRNA sense strand
gaagaauccaguccaagaa

SEQ ID NO: 2610091 - RNA, 19 nt, Homo sapiens
  misc_RNA (1)...(19): siRNA sense strand
guguaaagaggaauucauu

SEQ ID NO: 2610092 - RNA, 19 nt, Homo sapiens
  misc_RNA (1)...(19): siRNA sense strand
aagauuugauggccggaau

SEQ ID NO: 2610093 - RNA, 19 nt, Homo sapiens
  misc_RNA (1)...(19): siRNA sense strand
ggaaagaccccaaugcuga

SEQ ID NO: 2610094 - RNA, 19 nt, Homo sapiens
  misc_RNA (1)...(19): siRNA sense strand
ccaaauggcugaagguauu

SEQ ID NO: 2610095 - RNA, 19 nt, Homo sapiens
  misc_RNA (1)...(19): siRNA sense strand
agacaaauccugaguauau

SEQ ID NO: 2610096 - RNA, 19 nt, Homo sapiens
  misc_RNA (1)...(19): siRNA sense strand
gcagaaacguauugaaguu

SEQ ID NO: 2610097 - RNA, 19 nt, Homo sapiens
  misc_RNA (1)...(19): siRNA sense strand
cggcggaaauucaagcaua

SEQ ID NO: 2610098 - RNA, 19 nt, Homo sapiens
  misc_RNA (1)...(19): siRNA sense strand
caguauacaagaugggaau

SEQ ID NO: 2610099 - RNA, 19 nt, Homo sapiens
  misc_RNA (1)...(19): siRNA sense strand
ccacaucacagcaggcaaa

SEQ ID NO: 2610100 - RNA, 19 nt, Homo sapiens
  misc_RNA (1)...(19): siRNA sense strand
ggcugaagguauugauauu

SEQ ID NO: 2610101 - RNA, 19 nt, Homo sapiens
  misc_RNA (1)...(19): siRNA sense strand
cuguaaaacucuugcagaa

SEQ ID NO: 2610102 - RNA, 19 nt, Homo sapiens
  misc_RNA (1)...(19): siRNA sense strand
caaaagagguaaaugaaca

SEQ ID NO: 2610103 - RNA, 19 nt, Homo sapiens
  misc_RNA (1)...(19): siRNA sense strand
aauaugagaugaugccaaa

SEQ ID NO: 2610104 - RNA, 19 nt, Homo sapiens
  misc_RNA (1)...(19): siRNA sense strand
aagaauggguccagggauc

SEQ ID NO: 2610105 - RNA, 19 nt, Homo sapiens
  misc_RNA (1)...(19): siRNA sense strand
uggcuaugcuugugaaguu

SEQ ID NO: 2610106 - RNA, 19 nt, Homo sapiens
  misc_RNA (1)...(19): siRNA sense strand
uaagacaaauccugaguau

SEQ ID NO: 2610107 - RNA, 19 nt, Homo sapiens
  misc_RNA (1)...(19): siRNA sense strand
ggucaaaauccuccuaaaa

SEQ ID NO: 2610108 - RNA, 19 nt, Homo sapiens
  misc_RNA (1)...(19): siRNA sense strand
caagagacaucuaccaaga

SEQ ID NO: 2610109 - RNA, 19 nt, Homo sapiens
  misc_RNA (1)...(19): siRNA sense strand
gguaaaugaacaaacacau

SEQ ID NO: 2610110 - RNA, 19 nt, Homo sapiens
  misc_RNA (1)...(19): siRNA sense strand
ccuuauggcccucaaacaa

SEQ ID NO: 2610111 - RNA, 19 nt, Homo sapiens
  misc_RNA (1)...(19): siRNA sense strand
acuucuaacugauggcuau

SEQ ID NO: 2610112 - RNA, 19 nt, Homo sapiens
  misc_RNA (1)...(19): siRNA sense strand
aagaugaaggacaggaaga

SEQ ID NO: 2610113 - RNA, 19 nt, Homo sapiens
  misc_RNA (1)...(19): siRNA sense strand
auucaggcguguaagacaa

SEQ ID NO: 2610114 - RNA, 19 nt, Homo sapiens
  misc_RNA (1)...(19): siRNA sense strand
gccaaacacuggaccaauu

SEQ ID NO: 2610115 - RNA, 19 nt, Homo sapiens
  misc_RNA (1)...(19): siRNA sense strand
aaauaugagaugaugccaa

SEQ ID NO: 2610116 - RNA, 19 nt, Homo sapiens
  misc_RNA (1)...(19): siRNA sense strand
agagguaaaugaacaaaca

SEQ ID NO: 2610117 - RNA, 19 nt, Homo sapiens
  misc_RNA (1)...(19): siRNA sense strand
gcaaaugaugcaauuggua

SEQ ID NO: 2610118 - RNA, 19 nt, Homo sapiens
  misc_RNA (1)...(19): siRNA sense strand
cuaccaagauuauacucaa

SEQ ID NO: 2610119 - RNA, 19 nt, Homo sapiens
  misc_RNA (1)...(19): siRNA sense strand
ggaaauucaagcauacauu

SEQ ID NO: 2610120 - RNA, 19 nt, Homo sapiens
  misc_RNA (1)...(19): siRNA sense strand
uccaaauggcugaagguau

SEQ ID NO: 2610121 - RNA, 19 nt, Homo sapiens
  misc_RNA (1)...(19): siRNA sense strand
gaaacguauugaaguuaga

SEQ ID NO: 2610122 - RNA, 19 nt, Homo sapiens
  misc_RNA (1)...(19): siRNA sense strand
cagaagaccugguggugcu

SEQ ID NO: 2610123 - RNA, 19 nt, Homo sapiens
  misc_RNA (1)...(19): siRNA sense strand
uggcguucgucgaguguuu

SEQ ID NO: 2610124 - RNA, 19 nt, Homo sapiens
  misc_RNA (1)...(19): siRNA sense strand
caggauucauucucacaaa

SEQ ID NO: 2610125 - RNA, 19 nt, Homo sapiens
  misc_RNA (1)...(19): siRNA sense strand
gaaguuagaugccaaaaua

SEQ ID NO: 2610126 - RNA, 19 nt, Homo sapiens
  misc_RNA (1)...(19): siRNA sense strand
uugugaaguuagaugccaa

SEQ ID NO: 2610127 - RNA, 19 nt, Homo sapiens
  misc_RNA (1)...(19): siRNA sense strand
caaaugaugcaauugguau

SEQ ID NO: 2610128 - RNA, 19 nt, Homo sapiens
  misc_RNA (1)...(19): siRNA sense strand
caggcaaacucucagucaa

SEQ ID NO: 2610129 - RNA, 19 nt, Homo sapiens
  misc_RNA (1)...(19): siRNA sense strand
gcauacauuuggagaggac

SEQ ID NO: 2610130 - RNA, 19 nt, Homo sapiens
  misc_RNA (1)...(19): siRNA sense strand
agguaaaugaacaaacaca

SEQ ID NO: 2610131 - RNA, 19 nt, Homo sapiens
  misc_RNA (1)...(19): siRNA sense strand
aaagcaagccgguuccaaa

SEQ ID NO: 2610132 - RNA, 19 nt, Homo sapiens
  misc_RNA (1)...(19): siRNA sense strand
guccagggaucgagcuaca

SEQ ID NO: 2610133 - RNA, 19 nt, Homo sapiens
  misc_RNA (1)...(19): siRNA sense strand
accugguggugcuggguaa

SEQ ID NO: 2610134 - RNA, 19 nt, Homo sapiens
  misc_RNA (1)...(19): siRNA sense strand
agauuauacucaagacucu

SEQ ID NO: 2610135 - RNA, 19 nt, Homo sapiens
  misc_RNA (1)...(19): siRNA sense strand
ggagaugccuucauaugau

SEQ ID NO: 2610136 - RNA, 19 nt, Homo sapiens
  misc_RNA (1)...(19): siRNA sense strand
acaaaagaccagccuguaa

SEQ ID NO: 2610137 - RNA, 19 nt, Homo sapiens
  misc_RNA (1)...(19): siRNA sense strand
caacaagaugucaauugaa

SEQ ID NO: 2610138 - RNA, 19 nt, Homo sapiens
  misc_RNA (1)...(19): siRNA sense strand
ggguccagggaucgagcua

SEQ ID NO: 2610139 - RNA, 19 nt, Homo sapiens
  misc_RNA (1)...(19): siRNA sense strand
cagaaacguauugaaguua

SEQ ID NO: 2610140 - RNA, 19 nt, Homo sapiens
  misc_RNA (1)...(19): siRNA sense strand
uuuuaaugcuucugccaaa

SEQ ID NO: 2610141 - RNA, 19 nt, Homo sapiens
  misc_RNA (1)...(19): siRNA sense strand
gaauauggguuaaggcaaa

SEQ ID NO: 2610142 - RNA, 19 nt, Homo sapiens
  misc_RNA (1)...(19): siRNA sense strand
uggaaugaauggaagaaua

SEQ ID NO: 2610143 - RNA, 19 nt, Homo sapiens
  misc_RNA (1)...(19): siRNA sense strand
ucauacaggaagugggaaa

SEQ ID NO: 2610144 - RNA, 19 nt, Homo sapiens
  misc_RNA (1)...(19): siRNA sense strand
ggaaugaauggaagaauau

SEQ ID NO: 2610145 - RNA, 19 nt, Homo sapiens
  misc_RNA (1)...(19): siRNA sense strand
uggcauagugacagcuaaa

SEQ ID NO: 2610146 - RNA, 19 nt, Homo sapiens
  misc_RNA (1)...(19): siRNA sense strand
gugaaaucauacaggaagu

SEQ ID NO: 2610147 - RNA, 19 nt, Homo sapiens
  misc_RNA (1)...(19): siRNA sense strand
aauggaagaauauggguua

SEQ ID NO: 2610148 - RNA, 19 nt, Homo sapiens
  misc_RNA (1)...(19): siRNA sense strand
ggagauaguauuuggaaug

SEQ ID NO: 2610149 - RNA, 19 nt, Homo sapiens
  misc_RNA (1)...(19): siRNA sense strand
acacaugacgucagaucaa

SEQ ID NO: 2610150 - RNA, 19 nt, Homo sapiens
  misc_RNA (1)...(19): siRNA sense strand
agaauauggguuaaggcaa

SEQ ID NO: 2610151 - RNA, 19 nt, Homo sapiens
  misc_RNA (1)...(19): siRNA sense strand
uggagauaguauuuggaau

SEQ ID NO: 2610152 - RNA, 19 nt, Homo sapiens
  misc_RNA (1)...(19): siRNA sense strand
auuugaaggugcaacuaaa

SEQ ID NO: 2610153 - RNA, 19 nt, Homo sapiens
  misc_RNA (1)...(19): siRNA sense strand
acuaaaagaaacagaccaa

SEQ ID NO: 2610154 - RNA, 19 nt, Homo sapiens
  misc_RNA (1)...(19): siRNA sense strand
aguugauguuggagggagu

SEQ ID NO: 2610155 - RNA, 19 nt, Homo sapiens
  misc_RNA (1)...(19): siRNA sense strand
gcgguauguuccaguaaaa

SEQ ID NO: 2610156 - RNA, 19 nt, Homo sapiens
  misc_RNA (1)...(19): siRNA sense strand
agaccaugugauuggcaua

SEQ ID NO: 2610157 - RNA, 19 nt, Homo sapiens
  misc_RNA (1)...(19): siRNA sense strand
ggguggacucucagcagaa

SEQ ID NO: 2610158 - RNA, 19 nt, Homo sapiens
  misc_RNA (1)...(19): siRNA sense strand
guuugugguugcuaauaaa

SEQ ID NO: 2610159 - RNA, 19 nt, Homo sapiens
  misc_RNA (1)...(19): siRNA sense strand
auaaagacauggaaccaga

SEQ ID NO: 2610160 - RNA, 19 nt, Homo sapiens
  misc_RNA (1)...(19): siRNA sense strand
ggagauauauucaaaguug

SEQ ID NO: 2610161 - RNA, 19 nt, Homo sapiens
  misc_RNA (1)...(19): siRNA sense strand
aguuugugguugcuaauaa

SEQ ID NO: 2610162 - RNA, 19 nt, Homo sapiens
  misc_RNA (1)...(19): siRNA sense strand
caaaugugcagguuggaga

SEQ ID NO: 2610163 - RNA, 19 nt, Homo sapiens
  misc_RNA (1)...(19): siRNA sense strand
gaauggaagaauauggguu

SEQ ID NO: 2610164 - RNA, 19 nt, Homo sapiens
  misc_RNA (1)...(19): siRNA sense strand
ugacgucagaucaaagaaa

SEQ ID NO: 2610165 - RNA, 19 nt, Homo sapiens
  misc_RNA (1)...(19): siRNA sense strand
ugugauuggcauagugaca

SEQ ID NO: 2610166 - RNA, 19 nt, Homo sapiens
  misc_RNA (1)...(19): siRNA sense strand
gcuaauaaagacauggaac

SEQ ID NO: 2610167 - RNA, 19 nt, Homo sapiens
  misc_RNA (1)...(19): siRNA sense strand
agacauggaaccagagaug

SEQ ID NO: 2610168 - RNA, 19 nt, Homo sapiens
  misc_RNA (1)...(19): siRNA sense strand
cagcuguggacgagccaau

SEQ ID NO: 2610169 - RNA, 19 nt, Homo sapiens
  misc_RNA (1)...(19): siRNA sense strand
uaaagugacucugggcuua

SEQ ID NO: 2610170 - RNA, 19 nt, Homo sapiens
  misc_RNA (1)...(19): siRNA sense strand
uugugaaaucauacaggaa

SEQ ID NO: 2610171 - RNA, 19 nt, Homo sapiens
  misc_RNA (1)...(19): siRNA sense strand
guauuuggaaugaauggaa

SEQ ID NO: 2610172 - RNA, 19 nt, Homo sapiens
  misc_RNA (1)...(19): siRNA sense strand
uuuagaagcuugugaacac

SEQ ID NO: 2610173 - RNA, 19 nt, Homo sapiens
  misc_RNA (1)...(19): siRNA sense strand
cauuugaaggugcaacuaa

SEQ ID NO: 2610174 - RNA, 19 nt, Homo sapiens
  misc_RNA (1)...(19): siRNA sense strand
auggaagaauauggguuaa

SEQ ID NO: 2610175 - RNA, 19 nt, Homo sapiens
  misc_RNA (1)...(19): siRNA sense strand
uuaaagugacucugggcuu

SEQ ID NO: 2610176 - RNA, 19 nt, Homo sapiens
  misc_RNA (1)...(19): siRNA sense strand
cagcagaagcgguauguuc

SEQ ID NO: 2610177 - RNA, 19 nt, Homo sapiens
  misc_RNA (1)...(19): siRNA sense strand
aaagaugaguggauggaaa

SEQ ID NO: 2610178 - RNA, 19 nt, Homo sapiens
  misc_RNA (1)...(19): siRNA sense strand
ggagaaguuucgaauggaa

SEQ ID NO: 2610179 - RNA, 19 nt, Homo sapiens
  misc_RNA (1)...(19): siRNA sense strand
ggaaacacuugaugaacga

SEQ ID NO: 2610180 - RNA, 19 nt, Homo sapiens
  misc_RNA (1)...(19): siRNA sense strand
ccgaugaaaucacgaaaga

SEQ ID NO: 2610181 - RNA, 19 nt, Homo sapiens
  misc_RNA (1)...(19): siRNA sense strand
ucacagagauggagcguac

SEQ ID NO: 2610182 - RNA, 19 nt, Homo sapiens
  misc_RNA (1)...(19): siRNA sense strand
acacaaaccgguaucuuua

SEQ ID NO: 2610183 - RNA, 19 nt, Homo sapiens
  misc_RNA (1)...(19): siRNA sense strand
ucacgaaagaugaguggau

SEQ ID NO: 2610184 - RNA, 19 nt, Homo sapiens
  misc_RNA (1)...(19): siRNA sense strand
uggaaaagcucaauaacuu

SEQ ID NO: 2610185 - RNA, 19 nt, Homo sapiens
  misc_RNA (1)...(19): siRNA sense strand
agaugauacugaaagguca

SEQ ID NO: 2610186 - RNA, 19 nt, Homo sapiens
  misc_RNA (1)...(19): siRNA sense strand
cgagagugccucacagaga

SEQ ID NO: 2610187 - RNA, 19 nt, Homo sapiens
  misc_RNA (1)...(19): siRNA sense strand
uuaaggaagcagcggagaa

SEQ ID NO: 2610188 - RNA, 19 nt, Homo sapiens
  misc_RNA (1)...(19): siRNA sense strand
ggcagaagguguggaguga

SEQ ID NO: 2610189 - RNA, 19 nt, Homo sapiens
  misc_RNA (1)...(19): siRNA sense strand
aggaagcagcggagaaguu

SEQ ID NO: 2610190 - RNA, 19 nt, Homo sapiens
  misc_RNA (1)...(19): siRNA sense strand
gagaaguuucgaauggaau

SEQ ID NO: 2610191 - RNA, 19 nt, Homo sapiens
  misc_RNA (1)...(19): siRNA sense strand
aaucgaaccuaguguggau

SEQ ID NO: 2610192 - RNA, 19 nt, Homo sapiens
  misc_RNA (1)...(19): siRNA sense strand
cagaagguguggagugaag

SEQ ID NO: 2610193 - RNA, 19 nt, Homo sapiens
  misc_RNA (1)...(19): siRNA sense strand
uggcaaaauuacugaaacu

SEQ ID NO: 2610194 - RNA, 19 nt, Homo sapiens
  misc_RNA (1)...(19): siRNA sense strand
ggaccagaagaaaguaaaa

SEQ ID NO: 2610195 - RNA, 19 nt, Homo sapiens
  misc_RNA (1)...(19): siRNA sense strand
gaugaaaucacgaaagaug

SEQ ID NO: 2610196 - RNA, 19 nt, Homo sapiens
  misc_RNA (1)...(19): siRNA sense strand
cgaaucaagauccgggaga

SEQ ID NO: 2610197 - RNA, 19 nt, Homo sapiens
  misc_RNA (1)...(19): siRNA sense strand
augcagaggcagaaggugu

SEQ ID NO: 2610198 - RNA, 19 nt, Homo sapiens
  misc_RNA (1)...(19): siRNA sense strand
ugaacuaccuggucacaga

SEQ ID NO: 2610199 - RNA, 19 nt, Homo sapiens
  misc_RNA (1)...(19): siRNA sense strand
ucuggaaacacuugaugaa

SEQ ID NO: 2610200 - RNA, 19 nt, Homo sapiens
  misc_RNA (1)...(19): siRNA sense strand
ggauggaaaagcucaauaa

SEQ ID NO: 2610201 - RNA, 19 nt, Homo sapiens
  misc_RNA (1)...(19): siRNA sense strand
gaaucaagauccgggagau

SEQ ID NO: 2610202 - RNA, 19 nt, Homo sapiens
  misc_RNA (1)...(19): siRNA sense strand
aagaugaguggauggaaaa

SEQ ID NO: 2610203 - RNA, 19 nt, Homo sapiens
  misc_RNA (1)...(19): siRNA sense strand
agguguggagugaaguuaa

SEQ ID NO: 2610204 - RNA, 19 nt, Homo sapiens
  misc_RNA (1)...(19): siRNA sense strand
ccucagcaagggugugauu

SEQ ID NO: 2610205 - RNA, 19 nt, Homo sapiens
  misc_RNA (1)...(19): siRNA sense strand
ucagcaagggugugauuga

SEQ ID NO: 2610206 - RNA, 19 nt, Homo sapiens
  misc_RNA (1)...(19): siRNA sense strand
ggacaaaguguuagaggua

SEQ ID NO: 2610207 - RNA, 19 nt, Homo sapiens
  misc_RNA (1)...(19): siRNA sense strand
cagcaaaggaauagaaauu

SEQ ID NO: 2610208 - RNA, 19 nt, Homo sapiens
  misc_RNA (1)...(19): siRNA sense strand
gaguaaaguuaaugaguga

SEQ ID NO: 2610209 - RNA, 19 nt, Homo sapiens
  misc_RNA (1)...(19): siRNA sense strand
cggaagagcucuaugggaa

SEQ ID NO: 2610210 - RNA, 19 nt, Homo sapiens
  misc_RNA (1)...(19): siRNA sense strand
guaaugaagaacagagaaa

SEQ ID NO: 2610211 - RNA, 19 nt, Homo sapiens
  misc_RNA (1)...(19): siRNA sense strand
agucaaagcugcacugaaa

SEQ ID NO: 2610212 - RNA, 19 nt, Homo sapiens
  misc_RNA (1)...(19): siRNA sense strand
gcacacaguaagaaagaua

SEQ ID NO: 2610213 - RNA, 19 nt, Homo sapiens
  misc_RNA (1)...(19): siRNA sense strand
gcacauacaguacgagaaa

SEQ ID NO: 2610214 - RNA, 19 nt, Homo sapiens
  misc_RNA (1)...(19): siRNA sense strand
gguuaauagagcaagauaa

SEQ ID NO: 2610215 - RNA, 19 nt, Homo sapiens
  misc_RNA (1)...(19): siRNA sense strand
caggaaagugauugugaaa

SEQ ID NO: 2610216 - RNA, 19 nt, Homo sapiens
  misc_RNA (1)...(19): siRNA sense strand
aagaaaagacugugacaaa

SEQ ID NO: 2610217 - RNA, 19 nt, Homo sapiens
  misc_RNA (1)...(19): siRNA sense strand
acaaaguguuagagguaca

SEQ ID NO: 2610218 - RNA, 19 nt, Homo sapiens
  misc_RNA (1)...(19): siRNA sense strand
aagaaguggugcuagauaa

SEQ ID NO: 2610219 - RNA, 19 nt, Homo sapiens
  misc_RNA (1)...(19): siRNA sense strand
ugaguuaaguaaagccaaa

SEQ ID NO: 2610220 - RNA, 19 nt, Homo sapiens
  misc_RNA (1)...(19): siRNA sense strand
ggaacaugcugacggaaga

SEQ ID NO: 2610221 - RNA, 19 nt, Homo sapiens
  misc_RNA (1)...(19): siRNA sense strand
aagccaaauauucgagaaa

SEQ ID NO: 2610222 - RNA, 19 nt, Homo sapiens
  misc_RNA (1)...(19): siRNA sense strand
uggcaaggacggagagcuu

SEQ ID NO: 2610223 - RNA, 19 nt, Homo sapiens
  misc_RNA (1)...(19): siRNA sense strand
ccuggaaguugcaaacaaa

SEQ ID NO: 2610224 - RNA, 19 nt, Homo sapiens
  misc_RNA (1)...(19): siRNA sense strand
ggaacacauuucagcuuua

SEQ ID NO: 2610225 - RNA, 19 nt, Homo sapiens
  misc_RNA (1)...(19): siRNA sense strand
cagaaaugauugaagccau

SEQ ID NO: 2610226 - RNA, 19 nt, Homo sapiens
  misc_RNA (1)...(19): siRNA sense strand
cccaagaaguggugcuaga

SEQ ID NO: 2610227 - RNA, 19 nt, Homo sapiens
  misc_RNA (1)...(19): siRNA sense strand
ggaaaugcacacaguaaga

SEQ ID NO: 2610228 - RNA, 19 nt, Homo sapiens
  misc_RNA (1)...(19): siRNA sense strand
ucucauguauggaaguaaa

SEQ ID NO: 2610229 - RNA, 19 nt, Homo sapiens
  misc_RNA (1)...(19): siRNA sense strand
ggaugaaaugaaacagauu

SEQ ID NO: 2610230 - RNA, 19 nt, Homo sapiens
  misc_RNA (1)...(19): siRNA sense strand
uguuagagguacagccaga

SEQ ID NO: 2610231 - RNA, 19 nt, Homo sapiens
  misc_RNA (1)...(19): siRNA sense strand
ugacaaauauggaaggaag

SEQ ID NO: 2610232 - RNA, 19 nt, Homo sapiens
  misc_RNA (1)...(19): siRNA sense strand
accacagauugcagagaua

SEQ ID NO: 2610233 - RNA, 19 nt, Homo sapiens
  misc_RNA (1)...(19): siRNA sense strand
aaaaggaagcugugauuaa

SEQ ID NO: 2610234 - RNA, 19 nt, Homo sapiens
  misc_RNA (1)...(19): siRNA sense strand
ggaaagugauugugaaaac

SEQ ID NO: 2610235 - RNA, 19 nt, Homo sapiens
  misc_RNA (1)...(19): siRNA sense strand
ucaguaugguaaugaagaa

SEQ ID NO: 2610236 - RNA, 19 nt, Homo sapiens
  misc_RNA (1)...(19): siRNA sense strand
uuaaaggccacgugaggaa

SEQ ID NO: 2610237 - RNA, 19 nt, Homo sapiens
  misc_RNA (1)...(19): siRNA sense strand
caucagccaucguggagua

SEQ ID NO: 2610238 - RNA, 19 nt, Homo sapiens
  misc_RNA (1)...(19): siRNA sense strand
auggaaaugcacacaguaa

SEQ ID NO: 2610239 - RNA, 19 nt, Homo sapiens
  misc_RNA (1)...(19): siRNA sense strand
cugaaaagcuugauuccua

SEQ ID NO: 2610240 - RNA, 19 nt, Homo sapiens
  misc_RNA (1)...(19): siRNA sense strand
ucauugaaguucugcaaaa

SEQ ID NO: 2610241 - RNA, 19 nt, Homo sapiens
  misc_RNA (1)...(19): siRNA sense strand
gaugaaagaaaaugggaga

SEQ ID NO: 2610242 - RNA, 19 nt, Homo sapiens
  misc_RNA (1)...(19): siRNA sense strand
gcagagauaaucagaaguu

SEQ ID NO: 2610243 - RNA, 19 nt, Homo sapiens
  misc_RNA (1)...(19): siRNA sense strand
acgagaaaucauugaaguu

SEQ ID NO: 2610244 - RNA, 19 nt, Homo sapiens
  misc_RNA (1)...(19): siRNA sense strand
ucaccgaacucuggacaaa

SEQ ID NO: 2610245 - RNA, 19 nt, Homo sapiens
  misc_RNA (1)...(19): siRNA sense strand
aagaauugcgagaugauuu

SEQ ID NO: 2610246 - RNA, 19 nt, Homo sapiens
  misc_RNA (1)...(19): siRNA sense strand
agaugauuugguugaguua

SEQ ID NO: 2610247 - RNA, 19 nt, Homo sapiens
  misc_RNA (1)...(19): siRNA sense strand
aaccugaaguccugggcua

SEQ ID NO: 2610248 - RNA, 19 nt, Homo sapiens
  misc_RNA (1)...(19): siRNA sense strand
caagaaguggugcuagaua

SEQ ID NO: 2610249 - RNA, 19 nt, Homo sapiens
  misc_RNA (1)...(19): siRNA sense strand
uuguagagcauguugguau

SEQ ID NO: 2610250 - RNA, 19 nt, Homo sapiens
  misc_RNA (1)...(19): siRNA sense strand
aagcaccagcaaaggaaua

SEQ ID NO: 2610251 - RNA, 19 nt, Homo sapiens
  misc_RNA (1)...(19): siRNA sense strand
ggaagguccuauuguacuu

SEQ ID NO: 2610252 - RNA, 19 nt, Homo sapiens
  misc_RNA (1)...(19): siRNA sense strand
caaugaagacuuauguuga

SEQ ID NO: 2610253 - RNA, 19 nt, Homo sapiens
  misc_RNA (1)...(19): siRNA sense strand
ccaaaaggaagcugugauu

SEQ ID NO: 2610254 - RNA, 19 nt, Homo sapiens
  misc_RNA (1)...(19): siRNA sense strand
aaacaaagucaaagcugca

SEQ ID NO: 2610255 - RNA, 19 nt, Homo sapiens
  misc_RNA (1)...(19): siRNA sense strand
acaggaaagugauugugaa

SEQ ID NO: 2610256 - RNA, 19 nt, Homo sapiens
  misc_RNA (1)...(19): siRNA sense strand
ugguaaugaagaacagaga

SEQ ID NO: 2610257 - RNA, 19 nt, Homo sapiens
  misc_RNA (1)...(19): siRNA sense strand
uggaaguaaaccacagauu

SEQ ID NO: 2610258 - RNA, 19 nt, Homo sapiens
  misc_RNA (1)...(19): siRNA sense strand
cuagcauaguaaaugacaa

SEQ ID NO: 2610259 - RNA, 19 nt, Homo sapiens
  misc_RNA (1)...(19): siRNA sense strand
gcaaggacggagagcuuca

SEQ ID NO: 2610260 - RNA, 19 nt, Homo sapiens
  misc_RNA (1)...(19): siRNA sense strand
gaagugguuaauagagcaa

SEQ ID NO: 2610261 - RNA, 19 nt, Homo sapiens
  misc_RNA (1)...(19): siRNA sense strand
uguaaaucgaggugccauu

SEQ ID NO: 2610262 - RNA, 19 nt, Homo sapiens
  misc_RNA (1)...(19): siRNA sense strand
ccagcaaaggaauagaaau

SEQ ID NO: 2610263 - RNA, 19 nt, Homo sapiens
  misc_RNA (1)...(19): siRNA sense strand
gguaaugaagaacagagaa

SEQ ID NO: 2610264 - RNA, 19 nt, Homo sapiens
  misc_RNA (1)...(19): siRNA sense strand
uaagaaagauacagagguc

SEQ ID NO: 2610265 - RNA, 19 nt, Homo sapiens
  misc_RNA (1)...(19): siRNA sense strand
gaaaagacugugacaaaga

SEQ ID NO: 2610266 - RNA, 19 nt, Homo sapiens
  misc_RNA (1)...(19): siRNA sense strand
cccaaggacaggaaaguga

SEQ ID NO: 2610267 - RNA, 19 nt, Homo sapiens
  misc_RNA (1)...(19): siRNA sense strand
gcaagaacacgcccaagaa

SEQ ID NO: 2610268 - RNA, 19 nt, Homo sapiens
  misc_RNA (1)...(19): siRNA sense strand
agugguuaauagagcaaga

SEQ ID NO: 2610269 - RNA, 19 nt, Homo sapiens
  misc_RNA (1)...(19): siRNA sense strand
ugggagauuuuaagaagaa

SEQ ID NO: 2610270 - RNA, 19 nt, Homo sapiens
  misc_RNA (1)...(19): siRNA sense strand
gagaugauuugguugaguu

SEQ ID NO: 2610271 - RNA, 19 nt, Homo sapiens
  misc_RNA (1)...(19): siRNA sense strand
guacgcauacaaugacaaa

SEQ ID NO: 2610272 - RNA, 19 nt, Homo sapiens
  misc_RNA (1)...(19): siRNA sense strand
acauacaguacgagaaauc

SEQ ID NO: 2610273 - RNA, 19 nt, Homo sapiens
  misc_RNA (1)...(19): siRNA sense strand
acacaguaagaaagauaca

SEQ ID NO: 2610274 - RNA, 19 nt, Homo sapiens
  misc_RNA (1)...(19): siRNA sense strand
ggacggagagcuucacauu

SEQ ID NO: 2610275 - RNA, 19 nt, Homo sapiens
  misc_RNA (1)...(19): siRNA sense strand
aaaugcacacaguaagaaa

SEQ ID NO: 2610276 - RNA, 19 nt, Homo sapiens
  misc_RNA (1)...(19): siRNA sense strand
cgauucaacucgugugauc

SEQ ID NO: 2610277 - RNA, 19 nt, Homo sapiens
  misc_RNA (1)...(19): siRNA sense strand
ccaucguggaguacgcaua

SEQ ID NO: 2610278 - RNA, 19 nt, Homo sapiens
  misc_RNA (1)...(19): siRNA sense strand
gggaacacauuucagcuuu

SEQ ID NO: 2610279 - RNA, 19 nt, Homo sapiens
  misc_RNA (1)...(19): siRNA sense strand
acucauuggugcauaaagu

SEQ ID NO: 2610280 - RNA, 19 nt, Homo sapiens
  misc_RNA (1)...(19): siRNA sense strand
agaaaugauugaagccauc

SEQ ID NO: 2610281 - RNA, 19 nt, Homo sapiens
  misc_RNA (1)...(19): siRNA sense strand
gugaaaacaaugaagacuu

SEQ ID NO: 2610282 - RNA, 19 nt, Homo sapiens
  misc_RNA (1)...(19): siRNA sense strand
gaaagaaaaugggagagaa

SEQ ID NO: 2610283 - RNA, 19 nt, Homo sapiens
  misc_RNA (1)...(19): siRNA sense strand
gcuucacauugcagaacau

SEQ ID NO: 2610284 - RNA, 19 nt, Homo sapiens
  misc_RNA (1)...(19): siRNA sense strand
ugguuaauagagcaagaua

SEQ ID NO: 2610285 - RNA, 19 nt, Homo sapiens
  misc_RNA (1)...(19): siRNA sense strand
ugaagaauugcgagaugau

SEQ ID NO: 2610286 - RNA, 19 nt, Homo sapiens
  misc_RNA (1)...(19): siRNA sense strand
ccauuuuggagcagaggaa

SEQ ID NO: 2610287 - RNA, 19 nt, Homo sapiens
  misc_RNA (1)...(19): siRNA sense strand
ggaagagcucuaugggaac

SEQ ID NO: 2610288 - RNA, 19 nt, Homo sapiens
  misc_RNA (1)...(19): siRNA sense strand
guccugggcuaguguaaau

SEQ ID NO: 2610289 - RNA, 19 nt, Homo sapiens
  misc_RNA (1)...(19): siRNA sense strand
uggaguacgcauacaauga

SEQ ID NO: 2610290 - RNA, 19 nt, Homo sapiens
  misc_RNA (1)...(19): siRNA sense strand
gagcauguugguaugaaga

SEQ ID NO: 2610291 - RNA, 19 nt, Homo sapiens
  misc_RNA (1)...(19): siRNA sense strand
ggaaagaaaggcaagcaca

SEQ ID NO: 2610292 - RNA, 19 nt, Homo sapiens
  misc_RNA (1)...(19): siRNA sense strand
gcaugaauuauguggacca

SEQ ID NO: 2610293 - RNA, 19 nt, Homo sapiens
  misc_RNA (1)...(19): siRNA sense strand
uggccguggucauuggaaa

SEQ ID NO: 2610294 - RNA, 19 nt, Homo sapiens
  misc_RNA (1)...(19): siRNA sense strand
ggacaguguagcagaucca

SEQ ID NO: 2610295 - RNA, 19 nt, Homo sapiens
  misc_RNA (1)...(19): siRNA sense strand
agggaaugguggagggguu

SEQ ID NO: 2610296 - RNA, 19 nt, Homo sapiens
  misc_RNA (1)...(19): siRNA sense strand
gguagaagaagguuacuca

SEQ ID NO: 2610297 - RNA, 19 nt, Homo sapiens
  misc_RNA (1)...(19): siRNA sense strand
agaugguauucaagacaga

SEQ ID NO: 2610298 - RNA, 19 nt, Homo sapiens
  misc_RNA (1)...(19): siRNA sense strand
agaacgugcccgugcccaa

SEQ ID NO: 2610299 - RNA, 19 nt, Homo sapiens
  misc_RNA (1)...(19): siRNA sense strand
ccgaagacgaugacgcagu

SEQ ID NO: 2610300 - RNA, 19 nt, Homo sapiens
  misc_RNA (1)...(19): siRNA sense strand
gggcaugaauuauguggac

SEQ ID NO: 2610301 - RNA, 19 nt, Homo sapiens
  misc_RNA (1)...(19): siRNA sense strand
gugaagaguauaagaguau

SEQ ID NO: 2610302 - RNA, 19 nt, Homo sapiens
  misc_RNA (1)...(19): siRNA sense strand
gccaagagguagugaugaa

SEQ ID NO: 2610303 - RNA, 19 nt, Homo sapiens
  misc_RNA (1)...(19): siRNA sense strand
ggugaagaguauaagagua

SEQ ID NO: 2610304 - RNA, 19 nt, Homo sapiens
  misc_RNA (1)...(19): siRNA sense strand
ggucagcauucgauauaaa

SEQ ID NO: 2610305 - RNA, 19 nt, Homo sapiens
  misc_RNA (1)...(19): siRNA sense strand
guguauggcugcugcuuua

SEQ ID NO: 2610306 - RNA, 19 nt, Homo sapiens
  misc_RNA (1)...(19): siRNA sense strand
cuucaaagaccaugcauau

SEQ ID NO: 2610307 - RNA, 19 nt, Homo sapiens
  misc_RNA (1)...(19): siRNA sense strand
gcuuaugugccaagaggua

SEQ ID NO: 2610308 - RNA, 19 nt, Homo sapiens
  misc_RNA (1)...(19): siRNA sense strand
caauaaaguuagcccauuu

SEQ ID NO: 2610309 - RNA, 19 nt, Homo sapiens
  misc_RNA (1)...(19): siRNA sense strand
cggaggagagaguggaauu

SEQ ID NO: 2610310 - RNA, 19 nt, Homo sapiens
  misc_RNA (1)...(19): siRNA sense strand
ggagacucauuuagauuua

SEQ ID NO: 2610311 - RNA, 19 nt, Homo sapiens
  misc_RNA (1)...(19): siRNA sense strand
cauuacaggcauuggcuua

SEQ ID NO: 2610312 - RNA, 19 nt, Homo sapiens
  misc_RNA (1)...(19): siRNA sense strand
gcacaaacucagaucccaa

SEQ ID NO: 2610313 - RNA, 19 nt, Homo sapiens
  misc_RNA (1)...(19): siRNA sense strand
augcagaaguuuugggcua

SEQ ID NO: 2610314 - RNA, 19 nt, Homo sapiens
  misc_RNA (1)...(19): siRNA sense strand
ggaauggaaaacugagaaa

SEQ ID NO: 2610315 - RNA, 19 nt, Homo sapiens
  misc_RNA (1)...(19): siRNA sense strand
gaauuagccaugaaggauu

SEQ ID NO: 2610316 - RNA, 19 nt, Homo sapiens
  misc_RNA (1)...(19): siRNA sense strand
aagauuaugccaacaguua

SEQ ID NO: 2610317 - RNA, 19 nt, Homo sapiens
  misc_RNA (1)...(19): siRNA sense strand
gaugguggcuggagguaca

SEQ ID NO: 2610318 - RNA, 19 nt, Homo sapiens
  misc_RNA (1)...(19): siRNA sense strand
cagaauuagccaugaagga

SEQ ID NO: 2610319 - RNA, 19 nt, Homo sapiens
  misc_RNA (1)...(19): siRNA sense strand
ccaacaguuaagaaguaaa

SEQ ID NO: 2610320 - RNA, 19 nt, Homo sapiens
  misc_RNA (1)...(19): siRNA sense strand
cugcagaauuagccaugaa

SEQ ID NO: 2610321 - RNA, 19 nt, Homo sapiens
  misc_RNA (1)...(19): siRNA sense strand
ugccaacaguuaagaagua

SEQ ID NO: 2610322 - RNA, 19 nt, Homo sapiens
  misc_RNA (1)...(19): siRNA sense strand
cuaagauucuggucaauau

SEQ ID NO: 2610323 - RNA, 19 nt, Homo sapiens
  misc_RNA (1)...(19): siRNA sense strand
ccacuaaaggcacaggaau

SEQ ID NO: 2610324 - RNA, 19 nt, Homo sapiens
  misc_RNA (1)...(19): siRNA sense strand
acugguuggugaagaguau

SEQ ID NO: 2610325 - RNA, 19 nt, Homo sapiens
  misc_RNA (1)...(19): siRNA sense strand
cauuggggcugcagaauua

SEQ ID NO: 2610326 - RNA, 19 nt, Homo sapiens
  misc_RNA (1)...(19): siRNA sense strand
gggcccaaaucaugcagua

SEQ ID NO: 2610327 - RNA, 19 nt, Homo sapiens
  misc_RNA (1)...(19): siRNA sense strand
cugaaacugcuuugaauuu

SEQ ID NO: 2610328 - RNA, 19 nt, Homo sapiens
  misc_RNA (1)...(19): siRNA sense strand
gcuggaagaauaugaacau

SEQ ID NO: 2610329 - RNA, 19 nt, Homo sapiens
  misc_RNA (1)...(19): siRNA sense strand
gagcucaugcugugggaga

SEQ ID NO: 2610330 - RNA, 19 nt, Homo sapiens
  misc_RNA (1)...(19): siRNA sense strand
ggagagaguggaauuguuu

SEQ ID NO: 2610331 - RNA, 19 nt, Homo sapiens
  misc_RNA (1)...(19): siRNA sense strand
uguccaaaucagauaucaa

SEQ ID NO: 2610332 - RNA, 19 nt, Homo sapiens
  misc_RNA (1)...(19): siRNA sense strand
aggcauuggcuuagugacu

SEQ ID NO: 2610333 - RNA, 19 nt, Homo sapiens
  misc_RNA (1)...(19): siRNA sense strand
ugcuggugcuggaagaaua

SEQ ID NO: 2610334 - RNA, 19 nt, Homo sapiens
  misc_RNA (1)...(19): siRNA sense strand
gcauaggcgaguugucauu

SEQ ID NO: 2610335 - RNA, 19 nt, Homo sapiens
  misc_RNA (1)...(19): siRNA sense strand
ggcuacugguguugcaauu

SEQ ID NO: 2610336 - RNA, 19 nt, Homo sapiens
  misc_RNA (1)...(19): siRNA sense strand
gcuauggacucucagguga

SEQ ID NO: 2610337 - RNA, 19 nt, Homo sapiens
  misc_RNA (1)...(19): siRNA sense strand
gcaauuggcaugggaauga

SEQ ID NO: 2610338 - RNA, 19 nt, Homo sapiens
  misc_RNA (1)...(19): siRNA sense strand
ucccuaagauucuggucaa

SEQ ID NO: 2610339 - RNA, 19 nt, Homo sapiens
  misc_RNA (1)...(19): siRNA sense strand
auuuauagcccauggugau

SEQ ID NO: 2610340 - RNA, 19 nt, Homo sapiens
  misc_RNA (1)...(19): siRNA sense strand
gaguauaagaguaucccuu

SEQ ID NO: 2610341 - RNA, 19 nt, Homo sapiens
  misc_RNA (1)...(19): siRNA sense strand
cacuaaaggcacaggaaug

SEQ ID NO: 2610342 - RNA, 19 nt, Homo sapiens
  misc_RNA (1)...(19): siRNA sense strand
gugugcagccugaggagau

SEQ ID NO: 2610343 - RNA, 19 nt, Homo sapiens
  misc_RNA (1)...(19): siRNA sense strand
ugguuggugaagaguauaa

SEQ ID NO: 2610344 - RNA, 19 nt, Homo sapiens
  misc_RNA (1)...(19): siRNA sense strand
uugcaauuggcaugggaau

SEQ ID NO: 2610345 - RNA, 19 nt, Homo sapiens
  misc_RNA (1)...(19): siRNA sense strand
aaugauuccucuugaaguu

SEQ ID NO: 2610346 - RNA, 19 nt, Homo sapiens
  misc_RNA (1)...(19): siRNA sense strand
ggaaaacugagaaaagauu

SEQ ID NO: 2610347 - RNA, 19 nt, Homo sapiens
  misc_RNA (1)...(19): siRNA sense strand
gauuuauagcccaugguga

SEQ ID NO: 2610348 - RNA, 19 nt, Homo sapiens
  misc_RNA (1)...(19): siRNA sense strand
guuaagaaguaaaaggaag

SEQ ID NO: 2610349 - RNA, 19 nt, Homo sapiens
  misc_RNA (1)...(19): siRNA sense strand
gauauaaacucaagggccc

SEQ ID NO: 2610350 - RNA, 19 nt, Homo sapiens
  misc_RNA (1)...(19): siRNA sense strand
cuuuaaaccuggauuguuc

SEQ ID NO: 2610351 - RNA, 19 nt, Homo sapiens
  misc_RNA (1)...(19): siRNA sense strand
aaucagauaucaaguccau

SEQ ID NO: 2610352 - RNA, 19 nt, Homo sapiens
  misc_RNA (1)...(19): siRNA sense strand
ccuaagauucuggucaaua

SEQ ID NO: 2610353 - RNA, 19 nt, Homo sapiens
  misc_RNA (1)...(19): siRNA sense strand
gccaacaguuaagaaguaa

SEQ ID NO: 2610354 - RNA, 19 nt, Homo sapiens
  misc_RNA (1)...(19): siRNA sense strand
ccacauuagcuuguuauua

SEQ ID NO: 2610355 - RNA, 19 nt, Homo sapiens
  misc_RNA (1)...(19): siRNA sense strand
agauuaugccaacaguuaa

SEQ ID NO: 2610356 - RNA, 19 nt, Homo sapiens
  misc_RNA (1)...(19): siRNA sense strand
guucaaagcucaugauaaa

SEQ ID NO: 2610357 - RNA, 19 nt, Homo sapiens
  misc_RNA (1)...(19): siRNA sense strand
gcaacuaaguggauugaaa

SEQ ID NO: 2610358 - RNA, 19 nt, Homo sapiens
  misc_RNA (1)...(19): siRNA sense strand
aagcaaaguugaugaaaga

SEQ ID NO: 2610359 - RNA, 19 nt, Homo sapiens
  misc_RNA (1)...(19): siRNA sense strand
cagaugagcuuaagaauau

SEQ ID NO: 2610360 - RNA, 19 nt, Homo sapiens
  misc_RNA (1)...(19): siRNA sense strand
uuacaaagcuacagcaauu

SEQ ID NO: 2610361 - RNA, 19 nt, Homo sapiens
  misc_RNA (1)...(19): siRNA sense strand
ggaaaugggugauaugcaa

SEQ ID NO: 2610362 - RNA, 19 nt, Homo sapiens
  misc_RNA (1)...(19): siRNA sense strand
ccaauaaacuugagacacu

SEQ ID NO: 2610363 - RNA, 19 nt, Homo sapiens
  misc_RNA (1)...(19): siRNA sense strand
ccagaugagcuuaagaaua

SEQ ID NO: 2610364 - RNA, 19 nt, Homo sapiens
  misc_RNA (1)...(19): siRNA sense strand
cagcauagaugguccaaau

SEQ ID NO: 2610365 - RNA, 19 nt, Homo sapiens
  misc_RNA (1)...(19): siRNA sense strand
gugaaaucucauagcauaa

SEQ ID NO: 2610366 - RNA, 19 nt, Homo sapiens
  misc_RNA (1)...(19): siRNA sense strand
ucugagaacuugaagcaua

SEQ ID NO: 2610367 - RNA, 19 nt, Homo sapiens
  misc_RNA (1)...(19): siRNA sense strand
ugaaugugaugaagacaaa

SEQ ID NO: 2610368 - RNA, 19 nt, Homo sapiens
  misc_RNA (1)...(19): siRNA sense strand
caaugaagacucaggaaga

SEQ ID NO: 2610369 - RNA, 19 nt, Homo sapiens
  misc_RNA (1)...(19): siRNA sense strand
gaacuuggauuuagcauau

SEQ ID NO: 2610370 - RNA, 19 nt, Homo sapiens
  misc_RNA (1)...(19): siRNA sense strand
gcacagaaaaucaaaguua

SEQ ID NO: 2610371 - RNA, 19 nt, Homo sapiens
  misc_RNA (1)...(19): siRNA sense strand
gaacaaguacuucgacaua

SEQ ID NO: 2610372 - RNA, 19 nt, Homo sapiens
  misc_RNA (1)...(19): siRNA sense strand
caggcaaauuauagucaaa

SEQ ID NO: 2610373 - RNA, 19 nt, Homo sapiens
  misc_RNA (1)...(19): siRNA sense strand
ccgaagagccaaauauaau

SEQ ID NO: 2610374 - RNA, 19 nt, Homo sapiens
  misc_RNA (1)...(19): siRNA sense strand
gcaaaguugaugaaagaga

SEQ ID NO: 2610375 - RNA, 19 nt, Homo sapiens
  misc_RNA (1)...(19): siRNA sense strand
ggauauugugcuuggaaca

SEQ ID NO: 2610376 - RNA, 19 nt, Homo sapiens
  misc_RNA (1)...(19): siRNA sense strand
gguacaaccugaaggacca

SEQ ID NO: 2610377 - RNA, 19 nt, Homo sapiens
  misc_RNA (1)...(19): siRNA sense strand
gguuaauaucaguagaaga

SEQ ID NO: 2610378 - RNA, 19 nt, Homo sapiens
  misc_RNA (1)...(19): siRNA sense strand
aguuggaucuguugugaaa

SEQ ID NO: 2610379 - RNA, 19 nt, Homo sapiens
  misc_RNA (1)...(19): siRNA sense strand
ugaaaugguugaagaagga

SEQ ID NO: 2610380 - RNA, 19 nt, Homo sapiens
  misc_RNA (1)...(19): siRNA sense strand
gcuaauggcuacaguuuua

SEQ ID NO: 2610381 - RNA, 19 nt, Homo sapiens
  misc_RNA (1)...(19): siRNA sense strand
ugugaaaucucauagcaua

SEQ ID NO: 2610382 - RNA, 19 nt, Homo sapiens
  misc_RNA (1)...(19): siRNA sense strand
caaccagagaucauggaaa

SEQ ID NO: 2610383 - RNA, 19 nt, Homo sapiens
  misc_RNA (1)...(19): siRNA sense strand
gaaacugagcacuuggaaa

SEQ ID NO: 2610384 - RNA, 19 nt, Homo sapiens
  misc_RNA (1)...(19): siRNA sense strand
caaaguugaugaaagagaa

SEQ ID NO: 2610385 - RNA, 19 nt, Homo sapiens
  misc_RNA (1)...(19): siRNA sense strand
cacaauagcaaucagaaua

SEQ ID NO: 2610386 - RNA, 19 nt, Homo sapiens
  misc_RNA (1)...(19): siRNA sense strand
ugacuuagguauuuccaaa

SEQ ID NO: 2610387 - RNA, 19 nt, Homo sapiens
  misc_RNA (1)...(19): siRNA sense strand
ugaugaagacaaagaugaa

SEQ ID NO: 2610388 - RNA, 19 nt, Homo sapiens
  misc_RNA (1)...(19): siRNA sense strand
ggugugaagaccucagaaa

SEQ ID NO: 2610389 - RNA, 19 nt, Homo sapiens
  misc_RNA (1)...(19): siRNA sense strand
cugagaacuugaagcauau

SEQ ID NO: 2610390 - RNA, 19 nt, Homo sapiens
  misc_RNA (1)...(19): siRNA sense strand
acacaauagcaaucagaau

SEQ ID NO: 2610391 - RNA, 19 nt, Homo sapiens
  misc_RNA (1)...(19): siRNA sense strand
ggaaacaaguauccuaauu

SEQ ID NO: 2610392 - RNA, 19 nt, Homo sapiens
  misc_RNA (1)...(19): siRNA sense strand
cuacagcaauugacagcua

SEQ ID NO: 2610393 - RNA, 19 nt, Homo sapiens
  misc_RNA (1)...(19): siRNA sense strand
aguucaaagcucaugauaa

SEQ ID NO: 2610394 - RNA, 19 nt, Homo sapiens
  misc_RNA (1)...(19): siRNA sense strand
caucauuguacgagaaguu

SEQ ID NO: 2610395 - RNA, 19 nt, Homo sapiens
  misc_RNA (1)...(19): siRNA sense strand
aaacugagcacuuggaaaa

SEQ ID NO: 2610396 - RNA, 19 nt, Homo sapiens
  misc_RNA (1)...(19): siRNA sense strand
cugaaguacuugagcaacu

SEQ ID NO: 2610397 - RNA, 19 nt, Homo sapiens
  misc_RNA (1)...(19): siRNA sense strand
gauacaaaggaaacagauu

SEQ ID NO: 2610398 - RNA, 19 nt, Homo sapiens
  misc_RNA (1)...(19): siRNA sense strand
aguacaauccagcgacaaa

SEQ ID NO: 2610399 - RNA, 19 nt, Homo sapiens
  misc_RNA (1)...(19): siRNA sense strand
uaaugaaauaccagagaga

SEQ ID NO: 2610400 - RNA, 19 nt, Homo sapiens
  misc_RNA (1)...(19): siRNA sense strand
aaacaagagauucgaguga

SEQ ID NO: 2610401 - RNA, 19 nt, Homo sapiens
  misc_RNA (1)...(19): siRNA sense strand
gggaacuggaugucagcaa

SEQ ID NO: 2610402 - RNA, 19 nt, Homo sapiens
  misc_RNA (1)...(19): siRNA sense strand
gccugaaguacuugagcaa

SEQ ID NO: 2610403 - RNA, 19 nt, Homo sapiens
  misc_RNA (1)...(19): siRNA sense strand
gcuauguggcucucagaua

SEQ ID NO: 2610404 - RNA, 19 nt, Homo sapiens
  misc_RNA (1)...(19): siRNA sense strand
gcuaauagacugacuuuua

SEQ ID NO: 2610405 - RNA, 19 nt, Homo sapiens
  misc_RNA (1)...(19): siRNA sense strand
agagauuggaagcuggaaa

SEQ ID NO: 2610406 - RNA, 19 nt, Homo sapiens
  misc_RNA (1)...(19): siRNA sense strand
gcuuaagaauauggucaaa

SEQ ID NO: 2610407 - RNA, 19 nt, Homo sapiens
  misc_RNA (1)...(19): siRNA sense strand
gaaaccacaugaagaucaa

SEQ ID NO: 2610408 - RNA, 19 nt, Homo sapiens
  misc_RNA (1)...(19): siRNA sense strand
uaaauaaagaugugggugu

SEQ ID NO: 2610409 - RNA, 19 nt, Homo sapiens
  misc_RNA (1)...(19): siRNA sense strand
gcaguaacucgaaguacaa

SEQ ID NO: 2610410 - RNA, 19 nt, Homo sapiens
  misc_RNA (1)...(19): siRNA sense strand
ccuuauuaaucucagggaa

SEQ ID NO: 2610411 - RNA, 19 nt, Homo sapiens
  misc_RNA (1)...(19): siRNA sense strand
cuucauugugggaggaaca

SEQ ID NO: 2610412 - RNA, 19 nt, Homo sapiens
  misc_RNA (1)...(19): siRNA sense strand
agaugaaguuacacacaau

SEQ ID NO: 2610413 - RNA, 19 nt, Homo sapiens
  misc_RNA (1)...(19): siRNA sense strand
uauggagauuggagggcua

SEQ ID NO: 2610414 - RNA, 19 nt, Homo sapiens
  misc_RNA (1)...(19): siRNA sense strand
agaucagagagcacagaaa

SEQ ID NO: 2610415 - RNA, 19 nt, Homo sapiens
  misc_RNA (1)...(19): siRNA sense strand
augaaauaccagagagaac

SEQ ID NO: 2610416 - RNA, 19 nt, Homo sapiens
  misc_RNA (1)...(19): siRNA sense strand
ccucgugacuggagagaac

SEQ ID NO: 2610417 - RNA, 19 nt, Homo sapiens
  misc_RNA (1)...(19): siRNA sense strand
acaaguacuucgacauauu

SEQ ID NO: 2610418 - RNA, 19 nt, Homo sapiens
  misc_RNA (1)...(19): siRNA sense strand
gagcuuaagaauaugguca

SEQ ID NO: 2610419 - RNA, 19 nt, Homo sapiens
  misc_RNA (1)...(19): siRNA sense strand
aaacaguucaacagaggaa

SEQ ID NO: 2610420 - RNA, 19 nt, Homo sapiens
  misc_RNA (1)...(19): siRNA sense strand
agacucuauaggaggguua

SEQ ID NO: 2610421 - RNA, 19 nt, Homo sapiens
  misc_RNA (1)...(19): siRNA sense strand
cuauguggcucucagauaa

SEQ ID NO: 2610422 - RNA, 19 nt, Homo sapiens
  misc_RNA (1)...(19): siRNA sense strand
cagccaaguacaaccguua

SEQ ID NO: 2610423 - RNA, 19 nt, Homo sapiens
  misc_RNA (1)...(19): siRNA sense strand
ucgacauauugaagccaaa

SEQ ID NO: 2610424 - RNA, 19 nt, Homo sapiens
  misc_RNA (1)...(19): siRNA sense strand
ugaaaaggauccagaacuu

SEQ ID NO: 2610425 - RNA, 19 nt, Homo sapiens
  misc_RNA (1)...(19): siRNA sense strand
agacugacccagcuggaaa

SEQ ID NO: 2610426 - RNA, 19 nt, Homo sapiens
  misc_RNA (1)...(19): siRNA sense strand
guacagaagaucagugaac

SEQ ID NO: 2610427 - RNA, 19 nt, Homo sapiens
  misc_RNA (1)...(19): siRNA sense strand
cagauuaacuaaacuccaa

SEQ ID NO: 2610428 - RNA, 19 nt, Homo sapiens
  misc_RNA (1)...(19): siRNA sense strand
ugaggaaucugaagaacuu

SEQ ID NO: 2610429 - RNA, 19 nt, Homo sapiens
  misc_RNA (1)...(19): siRNA sense strand
ggaaacagauucuuuauca

SEQ ID NO: 2610430 - RNA, 19 nt, Homo sapiens
  misc_RNA (1)...(19): siRNA sense strand
gagaacaaguacuucgaca

SEQ ID NO: 2610431 - RNA, 19 nt, Homo sapiens
  misc_RNA (1)...(19): siRNA sense strand
caugaagaucaacaagaua

SEQ ID NO: 2610432 - RNA, 19 nt, Homo sapiens
  misc_RNA (1)...(19): siRNA sense strand
ccaaauagaccaugccagu

SEQ ID NO: 2610433 - RNA, 19 nt, Homo sapiens
  misc_RNA (1)...(19): siRNA sense strand
gaaauaccagagagaacua

SEQ ID NO: 2610434 - RNA, 19 nt, Homo sapiens
  misc_RNA (1)...(19): siRNA sense strand
ggagaugcgaccaccauua

SEQ ID NO: 2610435 - RNA, 19 nt, Homo sapiens
  misc_RNA (1)...(19): siRNA sense strand
gcaaucagaauaacagcaa

SEQ ID NO: 2610436 - RNA, 19 nt, Homo sapiens
  misc_RNA (1)...(19): siRNA sense strand
caacagaggaaaaguucaa

SEQ ID NO: 2610437 - RNA, 19 nt, Homo sapiens
  misc_RNA (1)...(19): siRNA sense strand
caaacaaaauccccaaaua

SEQ ID NO: 2610438 - RNA, 19 nt, Homo sapiens
  misc_RNA (1)...(19): siRNA sense strand
acuccaaauauuagagcuu

SEQ ID NO: 2610439 - RNA, 19 nt, Homo sapiens
  misc_RNA (1)...(19): siRNA sense strand
ugagauuaguccugggagu

SEQ ID NO: 2610440 - RNA, 19 nt, Homo sapiens
  misc_RNA (1)...(19): siRNA sense strand
cgaagagccaaauauaaua

SEQ ID NO: 2610441 - RNA, 19 nt, Homo sapiens
  misc_RNA (1)...(19): siRNA sense strand
gugaugaagacaaagauga

SEQ ID NO: 2610442 - RNA, 19 nt, Homo sapiens
  misc_RNA (1)...(19): siRNA sense strand
augaagagaccaaugaaga

SEQ ID NO: 2610443 - RNA, 19 nt, Homo sapiens
  misc_RNA (1)...(19): siRNA sense strand
acaugaagaucaacaagau

SEQ ID NO: 2610444 - RNA, 19 nt, Homo sapiens
  misc_RNA (1)...(19): siRNA sense strand
cagaugaaguuacacacaa

SEQ ID NO: 2610445 - RNA, 19 nt, Homo sapiens
  misc_RNA (1)...(19): siRNA sense strand
gggaagaacuccuccaaug

SEQ ID NO: 2610446 - RNA, 19 nt, Homo sapiens
  misc_RNA (1)...(19): siRNA sense strand
gagauuggaagcuggaaaa

SEQ ID NO: 2610447 - RNA, 19 nt, Homo sapiens
  misc_RNA (1)...(19): siRNA sense strand
agacaaagaugaaagggag

SEQ ID NO: 2610448 - RNA, 19 nt, Homo sapiens
  misc_RNA (1)...(19): siRNA sense strand
ggcaagaagaugaaaauuu

SEQ ID NO: 2610449 - RNA, 19 nt, Homo sapiens
  misc_RNA (1)...(19): siRNA sense strand
ccucagcagccaaguacaa

SEQ ID NO: 2610450 - RNA, 19 nt, Homo sapiens
  misc_RNA (1)...(19): siRNA sense strand
acgagaaguuuccucauaa

SEQ ID NO: 2610451 - RNA, 19 nt, Homo sapiens
  misc_RNA (1)...(19): siRNA sense strand
agaauggaauacaggaguu

SEQ ID NO: 2610452 - RNA, 19 nt, Homo sapiens
  misc_RNA (1)...(19): siRNA sense strand
ggauuugggaaguaacgaa

SEQ ID NO: 2610453 - RNA, 19 nt, Homo sapiens
  misc_RNA (1)...(19): siRNA sense strand
uaaaagaugaagagaccaa

SEQ ID NO: 2610454 - RNA, 19 nt, Homo sapiens
  misc_RNA (1)...(19): siRNA sense strand
ugucacuacucuugauuau

SEQ ID NO: 2610455 - RNA, 19 nt, Homo sapiens
  misc_RNA (1)...(19): siRNA sense strand
cuagagaccuugauguuaa

SEQ ID NO: 2610456 - RNA, 19 nt, Homo sapiens
  misc_RNA (1)...(19): siRNA sense strand
gauacuaauucaucagcaa

SEQ ID NO: 2610457 - RNA, 19 nt, Homo sapiens
  misc_RNA (1)...(19): siRNA sense strand
agucauaacucuggaaaga

SEQ ID NO: 2610458 - RNA, 19 nt, Homo sapiens
  misc_RNA (1)...(19): siRNA sense strand
ggaaagaccacuaagaugu

SEQ ID NO: 2610459 - RNA, 19 nt, Homo sapiens
  misc_RNA (1)...(19): siRNA sense strand
ggaauacuuaagucagaua

SEQ ID NO: 2610460 - RNA, 19 nt, Homo sapiens
  misc_RNA (1)...(19): siRNA sense strand
ggguguugauuuugagauu

SEQ ID NO: 2610461 - RNA, 19 nt, Homo sapiens
  misc_RNA (1)...(19): siRNA sense strand
aaaugaaagccgugaugau

SEQ ID NO: 2610462 - RNA, 19 nt, Homo sapiens
  misc_RNA (1)...(19): siRNA sense strand
cagcagaagauacuaauuu

SEQ ID NO: 2610463 - RNA, 19 nt, Homo sapiens
  misc_RNA (1)...(19): siRNA sense strand
ccacuaagauguaacuguu

SEQ ID NO: 2610464 - RNA, 19 nt, Homo sapiens
  misc_RNA (1)...(19): siRNA sense strand
uggaaguucuauucaguuu

SEQ ID NO: 2610465 - RNA, 19 nt, Homo sapiens
  misc_RNA (1)...(19): siRNA sense strand
ccuugaggauuacugauaa

SEQ ID NO: 2610466 - RNA, 19 nt, Homo sapiens
  misc_RNA (1)...(19): siRNA sense strand
ugauaaugugggucgagaa

SEQ ID NO: 2610467 - RNA, 19 nt, Homo sapiens
  misc_RNA (1)...(19): siRNA sense strand
agauguaacuguuguuguu

SEQ ID NO: 2610468 - RNA, 19 nt, Homo sapiens
  misc_RNA (1)...(19): siRNA sense strand
gauuggaauacuuaaguca

SEQ ID NO: 2610469 - RNA, 19 nt, Homo sapiens
  misc_RNA (1)...(19): siRNA sense strand
ccaauucccuagagaccuu

SEQ ID NO: 2610470 - RNA, 19 nt, Homo sapiens
  misc_RNA (1)...(19): siRNA sense strand
gaaagaccacuaagaugua

SEQ ID NO: 2610471 - RNA, 19 nt, Homo sapiens
  misc_RNA (1)...(19): siRNA sense strand
uuggaauacuuaagucaga

SEQ ID NO: 2610472 - RNA, 19 nt, Homo sapiens
  misc_RNA (1)...(19): siRNA sense strand
aguugauccuguagagaaa

SEQ ID NO: 2610473 - RNA, 19 nt, Homo sapiens
  misc_RNA (1)...(19): siRNA sense strand
cuugaaggacugauggcaa

SEQ ID NO: 2610474 - RNA, 19 nt, Homo sapiens
  misc_RNA (1)...(19): siRNA sense strand
cagaaauacccaaacccua

SEQ ID NO: 2610475 - RNA, 19 nt, Homo sapiens
  misc_RNA (1)...(19): siRNA sense strand
ggaaaguugcacagccaca

SEQ ID NO: 2610476 - RNA, 19 nt, Homo sapiens
  misc_RNA (1)...(19): siRNA sense strand
cuggaaaguugcacagcca

SEQ ID NO: 2610477 - RNA, 19 nt, Homo sapiens
  misc_RNA (1)...(19): siRNA sense strand
ccacagacuucucagcaca

SEQ ID NO: 2610478 - RNA, 19 nt, Homo sapiens
  misc_RNA (1)...(19): siRNA sense strand
gguuucaguagaugagaga

SEQ ID NO: 2610479 - RNA, 19 nt, Homo sapiens
  misc_RNA (1)...(19): siRNA sense strand
uggugcagcaagaacgaaa

SEQ ID NO: 2610480 - RNA, 19 nt, Homo sapiens
  misc_RNA (1)...(19): siRNA sense strand
gugaaaggaguuagccuca

SEQ ID NO: 2610481 - RNA, 19 nt, Homo sapiens
  misc_RNA (1)...(19): siRNA sense strand
cgaaaacauaugugcaaga

SEQ ID NO: 2610482 - RNA, 19 nt, Homo sapiens
  misc_RNA (1)...(19): siRNA sense strand
uuucaguagaugagagacu

SEQ ID NO: 2610483 - RNA, 19 nt, Homo sapiens
  misc_RNA (1)...(19): siRNA sense strand
aguaaaggccgagaagcaa

SEQ ID NO: 2610484 - RNA, 19 nt, Homo sapiens
  misc_RNA (1)...(19): siRNA sense strand
cagagaagugaucgugaca

SEQ ID NO: 2610485 - RNA, 19 nt, Homo sapiens
  misc_RNA (1)...(19): siRNA sense strand
cauaaggacuccaauggca

SEQ ID NO: 2610486 - RNA, 19 nt, Homo sapiens
  misc_RNA (1)...(19): siRNA sense strand
caacagaaaugaaggagga

SEQ ID NO: 2610487 - RNA, 19 nt, Homo sapiens
  misc_RNA (1)...(19): siRNA sense strand
caguauugcugauggccaa

SEQ ID NO: 2610488 - RNA, 19 nt, Homo sapiens
  misc_RNA (1)...(19): siRNA sense strand
agacaugauuggaccggaa

SEQ ID NO: 2610489 - RNA, 19 nt, Homo sapiens
  misc_RNA (1)...(19): siRNA sense strand
aagaaagagagaagcaaau

SEQ ID NO: 2610490 - RNA, 19 nt, Homo sapiens
  misc_RNA (1)...(19): siRNA sense strand
cagaaaugaaggaggaauc

SEQ ID NO: 2610491 - RNA, 19 nt, Homo sapiens
  misc_RNA (1)...(19): siRNA sense strand
uggugaaguuuggaagaaa

SEQ ID NO: 2610492 - RNA, 19 nt, Homo sapiens
  misc_RNA (1)...(19): siRNA sense strand
aaauagggugugugaguau

SEQ ID NO: 2610493 - RNA, 19 nt, Homo sapiens
  misc_RNA (1)...(19): siRNA sense strand
cccuagaaauacugcagaa

SEQ ID NO: 2610494 - RNA, 19 nt, Homo sapiens
  misc_RNA (1)...(19): siRNA sense strand
aggaggaaucuguaaagaa

SEQ ID NO: 2610495 - RNA, 19 nt, Homo sapiens
  misc_RNA (1)...(19): siRNA sense strand
cgucauagaaacugaugca

SEQ ID NO: 2610496 - RNA, 19 nt, Homo sapiens
  misc_RNA (1)...(19): siRNA sense strand
ucauagaaacugaugcaga

SEQ ID NO: 2610497 - RNA, 19 nt, Homo sapiens
  misc_RNA (1)...(19): siRNA sense strand
gggcagugucaaugagaac

SEQ ID NO: 2610498 - RNA, 19 nt, Homo sapiens
  misc_RNA (1)...(19): siRNA sense strand
cuguaaagaaacaccagua

SEQ ID NO: 2610499 - RNA, 19 nt, Homo sapiens
  misc_RNA (1)...(19): siRNA sense strand
ccuagaaauacugcagaaa

SEQ ID NO: 2610500 - RNA, 19 nt, Homo sapiens
  misc_RNA (1)...(19): siRNA sense strand
gugugggacuugugggcca

SEQ ID NO: 2610501 - RNA, 19 nt, Homo sapiens
  misc_RNA (1)...(19): siRNA sense strand
aaucaagggguguggaauu

SEQ ID NO: 2610502 - RNA, 19 nt, Homo sapiens
  misc_RNA (1)...(19): siRNA sense strand
ucaaggacauuguugguga

SEQ ID NO: 2610503 - RNA, 19 nt, Homo sapiens
  misc_RNA (1)...(19): siRNA sense strand
ugacaugcgaagaugccaa

SEQ ID NO: 2610504 - RNA, 19 nt, Homo sapiens
  misc_RNA (1)...(19): siRNA sense strand
gagugauauuuaagcaacu

SEQ ID NO: 2610505 - RNA, 19 nt, Homo sapiens
  misc_RNA (1)...(19): siRNA sense strand
cuuugaugauggaugccaa

SEQ ID NO: 2610506 - RNA, 19 nt, Homo sapiens
  misc_RNA (1)...(19): siRNA sense strand
cagaaaagggcguggugca

SEQ ID NO: 2610507 - RNA, 19 nt, Homo sapiens
  misc_RNA (1)...(19): siRNA sense strand
cugcauagauuucagguac

SEQ ID NO: 2610508 - RNA, 19 nt, Homo sapiens
  misc_RNA (1)...(19): siRNA sense strand
caggaugacaugcgaagau

SEQ ID NO: 2610509 - RNA, 19 nt, Homo sapiens
  misc_RNA (1)...(19): siRNA sense strand
aggcgaaggcccugcaguu

SEQ ID NO: 2610510 - RNA, 19 nt, Homo sapiens
  misc_RNA (1)...(19): siRNA sense strand
gggaaagccugucuggaag

SEQ ID NO: 2610511 - RNA, 19 nt, Homo sapiens
  misc_RNA (1)...(19): siRNA sense strand
aguucaagccauuguggau

SEQ ID NO: 2610512 - RNA, 19 nt, Homo sapiens
  misc_RNA (1)...(19): siRNA sense strand
gugaugauccagcgggcuu

SEQ ID NO: 2610513 - RNA, 19 nt, Homo sapiens
  misc_RNA (1)...(19): siRNA sense strand
uuaccuucacucugggaaa

SEQ ID NO: 2610514 - RNA, 19 nt, Homo sapiens
  misc_RNA (1)...(19): siRNA sense strand
aggaggaugcccuagaaau

SEQ ID NO: 2610515 - RNA, 19 nt, Homo sapiens
  misc_RNA (1)...(19): siRNA sense strand
caacagaaaugaaggagga

SEQ ID NO: 2610516 - RNA, 19 nt, Homo sapiens
  misc_RNA (1)...(19): siRNA sense strand
caguauugcugauggccaa

SEQ ID NO: 2610517 - RNA, 19 nt, Homo sapiens
  misc_RNA (1)...(19): siRNA sense strand
agacaugauuggaccggaa

SEQ ID NO: 2610518 - RNA, 19 nt, Homo sapiens
  misc_RNA (1)...(19): siRNA sense strand
aagaaagagagaagcaaau

SEQ ID NO: 2610519 - RNA, 19 nt, Homo sapiens
  misc_RNA (1)...(19): siRNA sense strand
cagaaaugaaggaggaauc

SEQ ID NO: 2610520 - RNA, 19 nt, Homo sapiens
  misc_RNA (1)...(19): siRNA sense strand
uggugaaguuuggaagaaa

SEQ ID NO: 2610521 - RNA, 19 nt, Homo sapiens
  misc_RNA (1)...(19): siRNA sense strand
aaauagggugugugaguau

SEQ ID NO: 2610522 - RNA, 19 nt, Homo sapiens
  misc_RNA (1)...(19): siRNA sense strand
cccuagaaauacugcagaa

SEQ ID NO: 2610523 - RNA, 19 nt, Homo sapiens
  misc_RNA (1)...(19): siRNA sense strand
aggaggaaucuguaaagaa

SEQ ID NO: 2610524 - RNA, 19 nt, Homo sapiens
  misc_RNA (1)...(19): siRNA sense strand
cgucauagaaacugaugca

SEQ ID NO: 2610525 - RNA, 19 nt, Homo sapiens
  misc_RNA (1)...(19): siRNA sense strand
ucauagaaacugaugcaga

SEQ ID NO: 2610526 - RNA, 19 nt, Homo sapiens
  misc_RNA (1)...(19): siRNA sense strand
gggcagugucaaugagaac

SEQ ID NO: 2610527 - RNA, 19 nt, Homo sapiens
  misc_RNA (1)...(19): siRNA sense strand
cuguaaagaaacaccagua

SEQ ID NO: 2610528 - RNA, 19 nt, Homo sapiens
  misc_RNA (1)...(19): siRNA sense strand
ccuagaaauacugcagaaa

SEQ ID NO: 2610529 - RNA, 19 nt, Homo sapiens
  misc_RNA (1)...(19): siRNA sense strand
gugugggacuugugggcca

SEQ ID NO: 2610530 - RNA, 19 nt, Homo sapiens
  misc_RNA (1)...(19): siRNA sense strand
aaucaagggguguggaauu

SEQ ID NO: 2610531 - RNA, 19 nt, Homo sapiens
  misc_RNA (1)...(19): siRNA sense strand
ucaaggacauuguugguga

SEQ ID NO: 2610532 - RNA, 19 nt, Homo sapiens
  misc_RNA (1)...(19): siRNA sense strand
ugacaugcgaagaugccaa

SEQ ID NO: 2610533 - RNA, 19 nt, Homo sapiens
  misc_RNA (1)...(19): siRNA sense strand
gagugauauuuaagcaacu

SEQ ID NO: 2610534 - RNA, 19 nt, Homo sapiens
  misc_RNA (1)...(19): siRNA sense strand
cuuugaugauggaugccaa

SEQ ID NO: 2610535 - RNA, 19 nt, Homo sapiens
  misc_RNA (1)...(19): siRNA sense strand
cagaaaagggcguggugca

SEQ ID NO: 2610536 - RNA, 19 nt, Homo sapiens
  misc_RNA (1)...(19): siRNA sense strand
cugcauagauuucagguac

SEQ ID NO: 2610537 - RNA, 19 nt, Homo sapiens
  misc_RNA (1)...(19): siRNA sense strand
caggaugacaugcgaagau

SEQ ID NO: 2610538 - RNA, 19 nt, Homo sapiens
  misc_RNA (1)...(19): siRNA sense strand
aggcgaaggcccugcaguu

SEQ ID NO: 2610539 - RNA, 19 nt, Homo sapiens
  misc_RNA (1)...(19): siRNA sense strand
gggaaagccugucuggaag

SEQ ID NO: 2610540 - RNA, 19 nt, Homo sapiens
  misc_RNA (1)...(19): siRNA sense strand
aguucaagccauuguggau

SEQ ID NO: 2610541 - RNA, 19 nt, Homo sapiens
  misc_RNA (1)...(19): siRNA sense strand
gugaugauccagcgggcuu

SEQ ID NO: 2610542 - RNA, 19 nt, Homo sapiens
  misc_RNA (1)...(19): siRNA sense strand
uuaccuucacucugggaaa

SEQ ID NO: 2610543 - RNA, 19 nt, Homo sapiens
  misc_RNA (1)...(19): siRNA sense strand
aggaggaugcccuagaaau

SEQ ID NO: 2610544 - RNA, 19 nt, Homo sapiens
  misc_RNA (1)...(19): siRNA sense strand
cgauagaggaggagaacaa

SEQ ID NO: 2610545 - RNA, 19 nt, Homo sapiens
  misc_RNA (1)...(19): siRNA sense strand
augcagaggcugaagauaa

SEQ ID NO: 2610546 - RNA, 19 nt, Homo sapiens
  misc_RNA (1)...(19): siRNA sense strand
uggcaaugucccaggauaa

SEQ ID NO: 2610547 - RNA, 19 nt, Homo sapiens
  misc_RNA (1)...(19): siRNA sense strand
ccgaaauagaaguggauga

SEQ ID NO: 2610548 - RNA, 19 nt, Homo sapiens
  misc_RNA (1)...(19): siRNA sense strand
ggaugaagaaauaaaggaa

SEQ ID NO: 2610549 - RNA, 19 nt, Homo sapiens
  misc_RNA (1)...(19): siRNA sense strand
ggaagacagaggaggagaa

SEQ ID NO: 2610550 - RNA, 19 nt, Homo sapiens
  misc_RNA (1)...(19): siRNA sense strand
uggaaaaggccaaggggaa

SEQ ID NO: 2610551 - RNA, 19 nt, Homo sapiens
  misc_RNA (1)...(19): siRNA sense strand
ccaagagacagaaggagaa

SEQ ID NO: 2610552 - RNA, 19 nt, Homo sapiens
  misc_RNA (1)...(19): siRNA sense strand
agacgauagaggaggagaa

SEQ ID NO: 2610553 - RNA, 19 nt, Homo sapiens
  misc_RNA (1)...(19): siRNA sense strand
cugaagaacucaugaccau

SEQ ID NO: 2610554 - RNA, 19 nt, Homo sapiens
  misc_RNA (1)...(19): siRNA sense strand
aggaggagaaagagaaaga

SEQ ID NO: 2610555 - RNA, 19 nt, Homo sapiens
  misc_RNA (1)...(19): siRNA sense strand
caaaagaacaagagaaguu

SEQ ID NO: 2610556 - RNA, 19 nt, Homo sapiens
  misc_RNA (1)...(19): siRNA sense strand
gccaagagacagaaggaga

SEQ ID NO: 2610557 - RNA, 19 nt, Homo sapiens
  misc_RNA (1)...(19): siRNA sense strand
cugaugacaaugaaaguaa

SEQ ID NO: 2610558 - RNA, 19 nt, Homo sapiens
  misc_RNA (1)...(19): siRNA sense strand
gcacauuggacuuaagcau

SEQ ID NO: 2610559 - RNA, 19 nt, Homo sapiens
  misc_RNA (1)...(19): siRNA sense strand
ccaacaagccacagagucu

SEQ ID NO: 2610560 - RNA, 19 nt, Homo sapiens
  misc_RNA (1)...(19): siRNA sense strand
agaggaggagaaagagaaa

SEQ ID NO: 2610561 - RNA, 19 nt, Homo sapiens
  misc_RNA (1)...(19): siRNA sense strand
gaugaagaaauuaggcauu

SEQ ID NO: 2610562 - RNA, 19 nt, Homo sapiens
  misc_RNA (1)...(19): siRNA sense strand
cugaaaagagggagaccaa

SEQ ID NO: 2610563 - RNA, 19 nt, Homo sapiens
  misc_RNA (1)...(19): siRNA sense strand
ugugagaacaggugugauu

SEQ ID NO: 2610564 - RNA, 19 nt, Homo sapiens
  misc_RNA (1)...(19): siRNA sense strand
gggaaaggaggcaaaccaa

SEQ ID NO: 2610565 - RNA, 19 nt, Homo sapiens
  misc_RNA (1)...(19): siRNA sense strand
ugauaaaaccuauggauga

SEQ ID NO: 2610566 - RNA, 19 nt, Homo sapiens
  misc_RNA (1)...(19): siRNA sense strand
aucaagagcucauggucaa

SEQ ID NO: 2610567 - RNA, 19 nt, Homo sapiens
  misc_RNA (1)...(19): siRNA sense strand
cagaggaggagaaagagaa

SEQ ID NO: 2610568 - RNA, 19 nt, Homo sapiens
  misc_RNA (1)...(19): siRNA sense strand
ggagaaagagaaagaccca

SEQ ID NO: 2610569 - RNA, 19 nt, Homo sapiens
  misc_RNA (1)...(19): siRNA sense strand
ugaaagagcuggcaggucu

SEQ ID NO: 2610570 - RNA, 19 nt, Homo sapiens
  misc_RNA (1)...(19): siRNA sense strand
aacaagagaaguuuggaaa

SEQ ID NO: 2610571 - RNA, 19 nt, Homo sapiens
  misc_RNA (1)...(19): siRNA sense strand
ccuuaaaauugaagcagau

SEQ ID NO: 2610572 - RNA, 19 nt, Homo sapiens
  misc_RNA (1)...(19): siRNA sense strand
agacaagauugaugauucu

SEQ ID NO: 2610573 - RNA, 19 nt, Homo sapiens
  misc_RNA (1)...(19): siRNA sense strand
ucucauacaaacagugcaa

SEQ ID NO: 2610574 - RNA, 19 nt, Homo sapiens
  misc_RNA (1)...(19): siRNA sense strand
uggcaguaaugacggaaga

SEQ ID NO: 2610575 - RNA, 19 nt, Homo sapiens
  misc_RNA (1)...(19): siRNA sense strand
uuccaaauccagugaaauu

SEQ ID NO: 2610576 - RNA, 19 nt, Homo sapiens
  misc_RNA (1)...(19): siRNA sense strand
gcagaaaauggcugggaca

SEQ ID NO: 2610577 - RNA, 19 nt, Homo sapiens
  misc_RNA (1)...(19): siRNA sense strand
ggaaaaggccaaggggaau

SEQ ID NO: 2610578 - RNA, 19 nt, Homo sapiens
  misc_RNA (1)...(19): siRNA sense strand
aaaccaaaguuaucgacau

SEQ ID NO: 2610579 - RNA, 19 nt, Homo sapiens
  misc_RNA (1)...(19): siRNA sense strand
aagaagacccugaacugaa

SEQ ID NO: 2610580 - RNA, 19 nt, Homo sapiens
  misc_RNA (1)...(19): siRNA sense strand
gauaaaaccuauggaugaa

SEQ ID NO: 2610581 - RNA, 19 nt, Homo sapiens
  misc_RNA (1)...(19): siRNA sense strand
ugucaaaagaacaagagaa

SEQ ID NO: 2610582 - RNA, 19 nt, Homo sapiens
  misc_RNA (1)...(19): siRNA sense strand
agaaagacccagugagcuc

SEQ ID NO: 2610583 - RNA, 19 nt, Homo sapiens
  misc_RNA (1)...(19): siRNA sense strand
gauagggugugauggccaa

SEQ ID NO: 2610584 - RNA, 19 nt, Homo sapiens
  misc_RNA (1)...(19): siRNA sense strand
ggaaaguaucaaacaggca

SEQ ID NO: 2610585 - RNA, 19 nt, Homo sapiens
  misc_RNA (1)...(19): siRNA sense strand
gugacaggacagaggacga

SEQ ID NO: 2610586 - RNA, 19 nt, Homo sapiens
  misc_RNA (1)...(19): siRNA sense strand
cuuuaaugcacuuggggaa

SEQ ID NO: 2610587 - RNA, 19 nt, Homo sapiens
  misc_RNA (1)...(19): siRNA sense strand
gaccaggcccacaggacaa

SEQ ID NO: 2610588 - RNA, 19 nt, Homo sapiens
  misc_RNA (1)...(19): siRNA sense strand
acaagagaaguuuggaaaa

SEQ ID NO: 2610589 - RNA, 19 nt, Homo sapiens
  misc_RNA (1)...(19): siRNA sense strand
gaccaagagggcugggaca

SEQ ID NO: 2610590 - RNA, 19 nt, Homo sapiens
  misc_RNA (1)...(19): siRNA sense strand
ccacgugacaggaaacuau

SEQ ID NO: 2610591 - RNA, 19 nt, Homo sapiens
  misc_RNA (1)...(19): siRNA sense strand
acugaacaaacaagagcua

SEQ ID NO: 2610592 - RNA, 19 nt, Homo sapiens
  misc_RNA (1)...(19): siRNA sense strand
ugaaaguaacucugaaagu

SEQ ID NO: 2610593 - RNA, 19 nt, Homo sapiens
  misc_RNA (1)...(19): siRNA sense strand
gaggaggaagauagcgaga

SEQ ID NO: 2610594 - RNA, 19 nt, Homo sapiens
  misc_RNA (1)...(19): siRNA sense strand
aaagaagagaacagcugaa

SEQ ID NO: 2610595 - RNA, 19 nt, Homo sapiens
  misc_RNA (1)...(19): siRNA sense strand
gcagaauuuugaagcauau

SEQ ID NO: 2610596 - RNA, 19 nt, Homo sapiens
  misc_RNA (1)...(19): siRNA sense strand
ggaagaggguagugaccug

SEQ ID NO: 2610597 - RNA, 19 nt, Homo sapiens
  misc_RNA (1)...(19): siRNA sense strand
agagaacagcugaagauca

SEQ ID NO: 2610598 - RNA, 19 nt, Homo sapiens
  misc_RNA (1)...(19): siRNA sense strand
cccgcaucgucgagaaaua

SEQ ID NO: 2610599 - RNA, 19 nt, Homo sapiens
  misc_RNA (1)...(19): siRNA sense strand
cugccaaugcucagaagaa

SEQ ID NO: 2610600 - RNA, 19 nt, Homo sapiens
  misc_RNA (1)...(19): siRNA sense strand
acagagagagcuuggaaaa

SEQ ID NO: 2610601 - RNA, 19 nt, Homo sapiens
  misc_RNA (1)...(19): siRNA sense strand
agugaugacaacagagaga

SEQ ID NO: 2610602 - RNA, 19 nt, Homo sapiens
  misc_RNA (1)...(19): siRNA sense strand
uggggaaagucaagaaaau

SEQ ID NO: 2610603 - RNA, 19 nt, Homo sapiens
  misc_RNA (1)...(19): siRNA sense strand
gggaaagaguagugguagg

SEQ ID NO: 2610604 - RNA, 19 nt, Homo sapiens
  misc_RNA (1)...(19): siRNA sense strand
caggagagcugcuucguga

SEQ ID NO: 2610605 - RNA, 19 nt, Homo sapiens
  misc_RNA (1)...(19): siRNA sense strand
aaagaguagugguaggagu

SEQ ID NO: 2610606 - RNA, 19 nt, Homo sapiens
  misc_RNA (1)...(19): siRNA sense strand
ggggaaagucaagaaaaua

SEQ ID NO: 2610607 - RNA, 19 nt, Homo sapiens
  misc_RNA (1)...(19): siRNA sense strand
aaggaagaacccagauuca

SEQ ID NO: 2610608 - RNA, 19 nt, Homo sapiens
  misc_RNA (1)...(19): siRNA sense strand
agagcugcuucgugaugaa

SEQ ID NO: 2610609 - RNA, 19 nt, Homo sapiens
  misc_RNA (1)...(19): siRNA sense strand
ucaagaagcaugauggaca

SEQ ID NO: 2610610 - RNA, 19 nt, Homo sapiens
  misc_RNA (1)...(19): siRNA sense strand
ggacagagauuguugcaag

SEQ ID NO: 2610611 - RNA, 19 nt, Homo sapiens
  misc_RNA (1)...(19): siRNA sense strand
ggauauuauuagcguggga

SEQ ID NO: 2610612 - RNA, 19 nt, Homo sapiens
  misc_RNA (1)...(19): siRNA sense strand
cagaaguagaagcggcauu

SEQ ID NO: 2610613 - RNA, 19 nt, Homo sapiens
  misc_RNA (1)...(19): siRNA sense strand
gcaaauucguggugcagcu

SEQ ID NO: 2610614 - RNA, 19 nt, Homo sapiens
  misc_RNA (1)...(19): siRNA sense strand
caggaaagguucagaccag

SEQ ID NO: 2610615 - RNA, 19 nt, Homo sapiens
  misc_RNA (1)...(19): siRNA sense strand
gaacaauacccuaaagguc

SEQ ID NO: 2610616 - RNA, 19 nt, Homo sapiens
  misc_RNA (1)...(19): siRNA sense strand
cccuaaaggucuugggagc

SEQ ID NO: 2610617 - RNA, 19 nt, Homo sapiens
  misc_RNA (1)...(19): siRNA sense strand
caucaaguauuuuggggau

SEQ ID NO: 2610618 - RNA, 19 nt, Homo sapiens
  misc_RNA (1)...(19): siRNA sense strand
ccaccauggacgaggaaca

SEQ ID NO: 2610619 - RNA, 19 nt, Homo sapiens
  misc_RNA (1)...(19): siRNA sense strand
agaucaauuucgaggacuu

SEQ ID NO: 2610620 - RNA, 19 nt, Homo sapiens
  misc_RNA (1)...(19): siRNA sense strand
guaaaguggucgaggagcu

SEQ ID NO: 2610621 - RNA, 19 nt, Homo sapiens
  misc_RNA (1)...(19): siRNA sense strand
aggagcugcugucgggaaa

SEQ ID NO: 2610622 - RNA, 19 nt, Homo sapiens
  misc_RNA (1)...(19): siRNA sense strand
ccucacaucuagaaggagu

SEQ ID NO: 2610623 - RNA, 19 nt, Homo sapiens
  misc_RNA (1)...(19): siRNA sense strand
cgaaauguaaaguggucga

SEQ ID NO: 2610624 - RNA, 19 nt, Homo sapiens
  misc_RNA (1)...(19): siRNA sense strand
gagcugucccggaaggaga

SEQ ID NO: 2610625 - RNA, 19 nt, Homo sapiens
  misc_RNA (1)...(19): siRNA sense strand
cuaccauucgcaaggagaa

SEQ ID NO: 2610626 - RNA, 19 nt, Homo sapiens
  misc_RNA (1)...(19): siRNA sense strand
gaacaaagcagcagcggga

SEQ ID NO: 2610627 - RNA, 19 nt, Homo sapiens
  misc_RNA (1)...(19): siRNA sense strand
aaauacaccuugaagcuga

SEQ ID NO: 2610628 - RNA, 19 nt, Homo sapiens
  misc_RNA (1)...(19): siRNA sense strand
acaugaagguggacggaga

SEQ ID NO: 2610629 - RNA, 19 nt, Homo sapiens
  misc_RNA (1)...(19): siRNA sense strand
gcggcaugagcuugggaaa

SEQ ID NO: 2610630 - RNA, 19 nt, Homo sapiens
  misc_RNA (1)...(19): siRNA sense strand
gaaaauugaucuagggaag

SEQ ID NO: 2610631 - RNA, 19 nt, Homo sapiens
  misc_RNA (1)...(19): siRNA sense strand
gccagaagaugcaggagca

SEQ ID NO: 2610632 - RNA, 19 nt, Homo sapiens
  misc_RNA (1)...(19): siRNA sense strand
agaugcaggagcagaagaa

SEQ ID NO: 2610633 - RNA, 19 nt, Homo sapiens
  misc_RNA (1)...(19): siRNA sense strand
cuguaacaccugugaagau

SEQ ID NO: 2610634 - RNA, 19 nt, Homo sapiens
  misc_RNA (1)...(19): siRNA sense strand
ccauggauguggccggaga

SEQ ID NO: 2610635 - RNA, 19 nt, Homo sapiens
  misc_RNA (1)...(19): siRNA sense strand
gcuauggugcugaggcaga

SEQ ID NO: 2610636 - RNA, 19 nt, Homo sapiens
  misc_RNA (1)...(19): siRNA sense strand
cugcuauggugcugaggca

SEQ ID NO: 2610637 - RNA, 19 nt, Homo sapiens
  misc_RNA (1)...(19): siRNA sense strand
ugaagcaguucgaugccua

SEQ ID NO: 2610638 - RNA, 19 nt, Homo sapiens
  misc_RNA (1)...(19): siRNA sense strand
ccagaagaaaauugaucua

SEQ ID NO: 2610639 - RNA, 19 nt, Homo sapiens
  misc_RNA (1)...(19): siRNA sense strand
ccacggaggugcauccuga

SEQ ID NO: 2610640 - RNA, 19 nt, Homo sapiens
  misc_RNA (1)...(19): siRNA sense strand
gcauaucgccguagaggcu

SEQ ID NO: 2610641 - RNA, 19 nt, Homo sapiens
  misc_RNA (1)...(19): siRNA sense strand
cuucaagaacccagauacu

SEQ ID NO: 2610642 - RNA, 19 nt, Homo sapiens
  misc_RNA (1)...(19): siRNA sense strand
acaugaagguggacggaga

SEQ ID NO: 2610643 - RNA, 19 nt, Homo sapiens
  misc_RNA (1)...(19): siRNA sense strand
gcggcaugagcuugggaaa

SEQ ID NO: 2610644 - RNA, 19 nt, Homo sapiens
  misc_RNA (1)...(19): siRNA sense strand
gaaaauugaucuagggaag

SEQ ID NO: 2610645 - RNA, 19 nt, Homo sapiens
  misc_RNA (1)...(19): siRNA sense strand
gccagaagaugcaggagca

SEQ ID NO: 2610646 - RNA, 19 nt, Homo sapiens
  misc_RNA (1)...(19): siRNA sense strand
agaugcaggagcagaagaa

SEQ ID NO: 2610647 - RNA, 19 nt, Homo sapiens
  misc_RNA (1)...(19): siRNA sense strand
cuguaacaccugugaagau

SEQ ID NO: 2610648 - RNA, 19 nt, Homo sapiens
  misc_RNA (1)...(19): siRNA sense strand
ccauggauguggccggaga

SEQ ID NO: 2610649 - RNA, 19 nt, Homo sapiens
  misc_RNA (1)...(19): siRNA sense strand
gcuauggugcugaggcaga

SEQ ID NO: 2610650 - RNA, 19 nt, Homo sapiens
  misc_RNA (1)...(19): siRNA sense strand
cugcuauggugcugaggca

SEQ ID NO: 2610651 - RNA, 19 nt, Homo sapiens
  misc_RNA (1)...(19): siRNA sense strand
ugaagcaguucgaugccua

SEQ ID NO: 2610652 - RNA, 19 nt, Homo sapiens
  misc_RNA (1)...(19): siRNA sense strand
ccagaagaaaauugaucua

SEQ ID NO: 2610653 - RNA, 19 nt, Homo sapiens
  misc_RNA (1)...(19): siRNA sense strand
ccacggaggugcauccuga

SEQ ID NO: 2610654 - RNA, 19 nt, Homo sapiens
  misc_RNA (1)...(19): siRNA sense strand
gcauaucgccguagaggcu

SEQ ID NO: 2610655 - RNA, 19 nt, Homo sapiens
  misc_RNA (1)...(19): siRNA sense strand
cuucaagaacccagauacu

SEQ ID NO: 2610656 - RNA, 19 nt, Homo sapiens
  misc_RNA (1)...(19): siRNA sense strand
gauugggagaagagguuaa

SEQ ID NO: 2610657 - RNA, 19 nt, Homo sapiens
  misc_RNA (1)...(19): siRNA sense strand
agucuaagauggaugggau

SEQ ID NO: 2610658 - RNA, 19 nt, Homo sapiens
  misc_RNA (1)...(19): siRNA sense strand
ggacaaaggcauuggugag

SEQ ID NO: 2610659 - RNA, 19 nt, Homo sapiens
  misc_RNA (1)...(19): siRNA sense strand
uagccaugcggcagagaaa

SEQ ID NO: 2610660 - RNA, 19 nt, Homo sapiens
  misc_RNA (1)...(19): siRNA sense strand
aggaauucaccuggagaaa

SEQ ID NO: 2610661 - RNA, 19 nt, Homo sapiens
  misc_RNA (1)...(19): siRNA sense strand
acuugaugguuaaagagaa

SEQ ID NO: 2610662 - RNA, 19 nt, Homo sapiens
  misc_RNA (1)...(19): siRNA sense strand
uuugaaaguuggaguggga

SEQ ID NO: 2610663 - RNA, 19 nt, Homo sapiens
  misc_RNA (1)...(19): siRNA sense strand
gagaagagguuaaugggga

SEQ ID NO: 2610664 - RNA, 19 nt, Homo sapiens
  misc_RNA (1)...(19): siRNA sense strand
agaagagguuaauggggaa

SEQ ID NO: 2610665 - RNA, 19 nt, Homo sapiens
  misc_RNA (1)...(19): siRNA sense strand
gcucagugguaccuggaca

SEQ ID NO: 2610666 - RNA, 19 nt, Homo sapiens
  misc_RNA (1)...(19): siRNA sense strand
aggcaaccaccaagggaga

SEQ ID NO: 2610667 - RNA, 19 nt, Homo sapiens
  misc_RNA (1)...(19): siRNA sense strand
ccagcaagcuucugcagga

SEQ ID NO: 2610668 - RNA, 19 nt, Homo sapiens
  misc_RNA (1)...(19): siRNA sense strand
gaaugagcagauugggaga

SEQ ID NO: 2610669 - RNA, 19 nt, Homo sapiens
  misc_RNA (1)...(19): siRNA sense strand
cuugaugguuaaagagaac

SEQ ID NO: 2610670 - RNA, 19 nt, Homo sapiens
  misc_RNA (1)...(19): siRNA sense strand
ggagaugcuucaagaggcu

SEQ ID NO: 2610671 - RNA, 19 nt, Homo sapiens
  misc_RNA (1)...(19): siRNA sense strand
gcaacagaaucucagcaga

SEQ ID NO: 2610672 - RNA, 19 nt, Homo sapiens
  misc_RNA (1)...(19): siRNA sense strand
caagcuaaucuguggagga

SEQ ID NO: 2610673 - RNA, 19 nt, Homo sapiens
  misc_RNA (1)...(19): siRNA sense strand
guguguggcaagagagacu

SEQ ID NO: 2610674 - RNA, 19 nt, Homo sapiens
  misc_RNA (1)...(19): siRNA sense strand
gguuaauggggaagcaaca

SEQ ID NO: 2610675 - RNA, 19 nt, Homo sapiens
  misc_RNA (1)...(19): siRNA sense strand
ccagaaucuccaaugaaaa

SEQ ID NO: 2610676 - RNA, 19 nt, Homo sapiens
  misc_RNA (1)...(19): siRNA sense strand
cagugauggcaauaagaaa

SEQ ID NO: 2610677 - RNA, 19 nt, Homo sapiens
  misc_RNA (1)...(19): siRNA sense strand
cuacaguuugugaggagaa

SEQ ID NO: 2610678 - RNA, 19 nt, Homo sapiens
  misc_RNA (1)...(19): siRNA sense strand
cagaaggacuagacccaga

SEQ ID NO: 2610679 - RNA, 19 nt, Homo sapiens
  misc_RNA (1)...(19): siRNA sense strand
ugauggcgaaagugagaaa

SEQ ID NO: 2610680 - RNA, 19 nt, Homo sapiens
  misc_RNA (1)...(19): siRNA sense strand
acuacaggaaagugaagua

SEQ ID NO: 2610681 - RNA, 19 nt, Homo sapiens
  misc_RNA (1)...(19): siRNA sense strand
aagugaaguaucagcagaa

SEQ ID NO: 2610682 - RNA, 19 nt, Homo sapiens
  misc_RNA (1)...(19): siRNA sense strand
gugaaguaucagcagaaaa

SEQ ID NO: 2610683 - RNA, 19 nt, Homo sapiens
  misc_RNA (1)...(19): siRNA sense strand
ccugauggcgaaagugaga

SEQ ID NO: 2610684 - RNA, 19 nt, Homo sapiens
  misc_RNA (1)...(19): siRNA sense strand
gugaggagaaacuggcaga

SEQ ID NO: 2610685 - RNA, 19 nt, Homo sapiens
  misc_RNA (1)...(19): siRNA sense strand
aggacuagacccagaucuu

SEQ ID NO: 2610686 - RNA, 19 nt, Homo sapiens
  misc_RNA (1)...(19): siRNA sense strand
gugagaaaacuguagaaga

SEQ ID NO: 2610687 - RNA, 19 nt, Homo sapiens
  misc_RNA (1)...(19): siRNA sense strand
ccucaaauucagugcaaaa

SEQ ID NO: 2610688 - RNA, 19 nt, Homo sapiens
  misc_RNA (1)...(19): siRNA sense strand
gagaaagaccugaggcgca

SEQ ID NO: 2610689 - RNA, 19 nt, Homo sapiens
  misc_RNA (1)...(19): siRNA sense strand
ggaugaaggcgucgcggau

SEQ ID NO: 2610690 - RNA, 19 nt, Homo sapiens
  misc_RNA (1)...(19): siRNA sense strand
agaaagaccugaggcgcau

SEQ ID NO: 2610691 - RNA, 19 nt, Homo sapiens
  misc_RNA (1)...(19): siRNA sense strand
aagcagaucaaguucgaga

SEQ ID NO: 2610692 - RNA, 19 nt, Homo sapiens
  misc_RNA (1)...(19): siRNA sense strand
ggaaaggagcagagacgca

SEQ ID NO: 2610693 - RNA, 19 nt, Homo sapiens
  misc_RNA (1)...(19): siRNA sense strand
uccuaaagucacauagcaa

SEQ ID NO: 2610694 - RNA, 19 nt, Homo sapiens
  misc_RNA (1)...(19): siRNA sense strand
gccuugagagggaaagcaa

SEQ ID NO: 2610695 - RNA, 19 nt, Homo sapiens
  misc_RNA (1)...(19): siRNA sense strand
gggaagaguacgagaccca

SEQ ID NO: 2610696 - RNA, 19 nt, Homo sapiens
  misc_RNA (1)...(19): siRNA sense strand
auucaaucacccugagaua

SEQ ID NO: 2610697 - RNA, 19 nt, Homo sapiens
  misc_RNA (1)...(19): siRNA sense strand
cuggcuggguauacagaaa

SEQ ID NO: 2610698 - RNA, 19 nt, Homo sapiens
  misc_RNA (1)...(19): siRNA sense strand
gcucuaugaacuuugggaa

SEQ ID NO: 2610699 - RNA, 19 nt, Homo sapiens
  misc_RNA (1)...(19): siRNA sense strand
cugaauaugaagaccuuga

SEQ ID NO: 2610700 - RNA, 19 nt, Homo sapiens
  misc_RNA (1)...(19): siRNA sense strand
ccaaauuugugaagcagcu

SEQ ID NO: 2610701 - RNA, 19 nt, Homo sapiens
  misc_RNA (1)...(19): siRNA sense strand
gaggcagaaagaagcacua

SEQ ID NO: 2610702 - RNA, 19 nt, Homo sapiens
  misc_RNA (1)...(19): siRNA sense strand
ugaacuugaggcagaaaga

SEQ ID NO: 2610703 - RNA, 19 nt, Homo sapiens
  misc_RNA (1)...(19): siRNA sense strand
ggaugcugcuggagcggaa

SEQ ID NO: 2610704 - RNA, 19 nt, Homo sapiens
  misc_RNA (1)...(19): siRNA sense strand
acgacaaggcgcuaggcua

SEQ ID NO: 2610705 - RNA, 19 nt, Homo sapiens
  misc_RNA (1)...(19): siRNA sense strand
cgacaaggcgcuaggcuac

SEQ ID NO: 2610706 - RNA, 19 nt, Homo sapiens
  misc_RNA (1)...(19): siRNA sense strand
gcacaagggccaagagacg

SEQ ID NO: 2610707 - RNA, 19 nt, Homo sapiens
  misc_RNA (1)...(19): siRNA sense strand
ggagaaaaggggcugguau

SEQ ID NO: 2610708 - RNA, 19 nt, Homo sapiens
  misc_RNA (1)...(19): siRNA sense strand
gccaggaagaagaggagga

SEQ ID NO: 2610709 - RNA, 19 nt, Homo sapiens
  misc_RNA (1)...(19): siRNA sense strand
ggauauggccauuggaacc

SEQ ID NO: 2610710 - RNA, 19 nt, Homo sapiens
  misc_RNA (1)...(19): siRNA sense strand
ucaucgacgaccuggacua

SEQ ID NO: 2610711 - RNA, 19 nt, Homo sapiens
  misc_RNA (1)...(19): siRNA sense strand
cugcuggagcggaaggaca

SEQ ID NO: 2610712 - RNA, 19 nt, Homo sapiens
  misc_RNA (1)...(19): siRNA sense strand
ccucaaugccugggccaau

SEQ ID NO: 2610713 - RNA, 19 nt, Homo sapiens
  misc_RNA (1)...(19): siRNA sense strand
gcguacugcacaagggcca

SEQ ID NO: 2610714 - RNA, 19 nt, Homo sapiens
  misc_RNA (1)...(19): siRNA sense strand
cgaaagccauguugccaga

SEQ ID NO: 2610715 - RNA, 19 nt, Homo sapiens
  misc_RNA (1)...(19): siRNA sense strand
cggcugaagaacaacaaca

SEQ ID NO: 2610716 - RNA, 19 nt, Homo sapiens
  misc_RNA (1)...(19): siRNA sense strand
acgccaaggucguggucgu

SEQ ID NO: 2610717 - RNA, 19 nt, Homo sapiens
  misc_RNA (1)...(19): siRNA sense strand
acaacagacaagugugcau

SEQ ID NO: 2610718 - RNA, 19 nt, Homo sapiens
  misc_RNA (1)...(19): siRNA sense strand
cgaaagccauguugccaga

SEQ ID NO: 2610719 - RNA, 19 nt, Homo sapiens
  misc_RNA (1)...(19): siRNA sense strand
cggcugaagaacaacaaca

SEQ ID NO: 2610720 - RNA, 19 nt, Homo sapiens
  misc_RNA (1)...(19): siRNA sense strand
acgccaaggucguggucgu

SEQ ID NO: 2610721 - RNA, 19 nt, Homo sapiens
  misc_RNA (1)...(19): siRNA sense strand
acaacagacaagugugcau

SEQ ID NO: 2610722 - RNA, 19 nt, Homo sapiens
  misc_RNA (1)...(19): siRNA sense strand
ggaaagaucuggagagcgu

SEQ ID NO: 2610723 - RNA, 19 nt, Homo sapiens
  misc_RNA (1)...(19): siRNA sense strand
gugucaaggugcuggaaga

SEQ ID NO: 2610724 - RNA, 19 nt, Homo sapiens
  misc_RNA (1)...(19): siRNA sense strand
agggaaggaugcaggagaa

SEQ ID NO: 2610725 - RNA, 19 nt, Homo sapiens
  misc_RNA (1)...(19): siRNA sense strand
gcauggaggaacuggagaa

SEQ ID NO: 2610726 - RNA, 19 nt, Homo sapiens
  misc_RNA (1)...(19): siRNA sense strand
gagcagaggaggaggcagu

SEQ ID NO: 2610727 - RNA, 19 nt, Homo sapiens
  misc_RNA (1)...(19): siRNA sense strand
gggcaagaaaucagggagu

SEQ ID NO: 2610728 - RNA, 19 nt, Homo sapiens
  misc_RNA (1)...(19): siRNA sense strand
aggagaaggaggugaagau

SEQ ID NO: 2610729 - RNA, 19 nt, Homo sapiens
  misc_RNA (1)...(19): siRNA sense strand
aggccaugcuucugaggaa

SEQ ID NO: 2610730 - RNA, 19 nt, Homo sapiens
  misc_RNA (1)...(19): siRNA sense strand
ccacagugcugaagccaca

SEQ ID NO: 2610731 - RNA, 19 nt, Homo sapiens
  misc_RNA (1)...(19): siRNA sense strand
agaagaaccugguggccuu

SEQ ID NO: 2610732 - RNA, 19 nt, Homo sapiens
  misc_RNA (1)...(19): siRNA sense strand
ggagaaagccugaggaacc

SEQ ID NO: 2610733 - RNA, 19 nt, Homo sapiens
  misc_RNA (1)...(19): siRNA sense strand
ggcccuggacugugggaaa

SEQ ID NO: 2610734 - RNA, 19 nt, Homo sapiens
  misc_RNA (1)...(19): siRNA sense strand
gaaaggaagugcagagccu

SEQ ID NO: 2610735 - RNA, 19 nt, Homo sapiens
  misc_RNA (1)...(19): siRNA sense strand
agacagagauggaacagga

SEQ ID NO: 2610736 - RNA, 19 nt, Homo sapiens
  misc_RNA (1)...(19): siRNA sense strand
gcucagaaacuccaggcaa

SEQ ID NO: 2610737 - RNA, 19 nt, Homo sapiens
  misc_RNA (1)...(19): siRNA sense strand
agggcuggguggaggagaa

SEQ ID NO: 2610738 - RNA, 19 nt, Homo sapiens
  misc_RNA (1)...(19): siRNA sense strand
cugaggaagucaagaucau

SEQ ID NO: 2610739 - RNA, 19 nt, Homo sapiens
  misc_RNA (1)...(19): siRNA sense strand
ugaagcaaguacaggaaca

SEQ ID NO: 2610740 - RNA, 19 nt, Homo sapiens
  misc_RNA (1)...(19): siRNA sense strand
ggaagcaggauguggcaga

SEQ ID NO: 2610741 - RNA, 19 nt, Homo sapiens
  misc_RNA (1)...(19): siRNA sense strand
ccacacaaauccaacgaca

SEQ ID NO: 2610742 - RNA, 19 nt, Homo sapiens
  misc_RNA (1)...(19): siRNA sense strand
uggaggugcaggcgggaaa

SEQ ID NO: 2610743 - RNA, 19 nt, Homo sapiens
  misc_RNA (1)...(19): siRNA sense strand
ugucagagcuggagggcug

SEQ ID NO: 2610744 - RNA, 19 nt, Homo sapiens
  misc_RNA (1)...(19): siRNA sense strand
cucagaaacuccaggcaau

SEQ ID NO: 2610745 - RNA, 19 nt, Homo sapiens
  misc_RNA (1)...(19): siRNA sense strand
uggcagaagugguggagcu

SEQ ID NO: 2610746 - RNA, 19 nt, Homo sapiens
  misc_RNA (1)...(19): siRNA sense strand
agaacaucguggacggaga

SEQ ID NO: 2610747 - RNA, 19 nt, Homo sapiens
  misc_RNA (1)...(19): siRNA sense strand
gcagagauauccugggaac

SEQ ID NO: 2610748 - RNA, 19 nt, Homo sapiens
  misc_RNA (1)...(19): siRNA sense strand
ggccaggagcugaagguuu

SEQ ID NO: 2610749 - RNA, 19 nt, Homo sapiens
  misc_RNA (1)...(19): siRNA sense strand
uggaagagacccagaagca

SEQ ID NO: 2610750 - RNA, 19 nt, Homo sapiens
  misc_RNA (1)...(19): siRNA sense strand
agaggaagcagguggcaga

SEQ ID NO: 2610751 - RNA, 19 nt, Homo sapiens
  misc_RNA (1)...(19): siRNA sense strand
acaagaugcuggaguggga

SEQ ID NO: 2610752 - RNA, 19 nt, Homo sapiens
  misc_RNA (1)...(19): siRNA sense strand
aagacaacucccagaagaa

SEQ ID NO: 2610753 - RNA, 19 nt, Homo sapiens
  misc_RNA (1)...(19): siRNA sense strand
uugcaaaguuucagcacca

SEQ ID NO: 2610754 - RNA, 19 nt, Homo sapiens
  misc_RNA (1)...(19): siRNA sense strand
gggcgaguuuccauggcaa

SEQ ID NO: 2610755 - RNA, 19 nt, Homo sapiens
  misc_RNA (1)...(19): siRNA sense strand
gcucgguggaagagguaga

SEQ ID NO: 2610756 - RNA, 19 nt, Homo sapiens
  misc_RNA (1)...(19): siRNA sense strand
guguaugcccugaggaagu

SEQ ID NO: 2610757 - RNA, 19 nt, Homo sapiens
  misc_RNA (1)...(19): siRNA sense strand
gcccaaaacucaaagccaa

SEQ ID NO: 2610758 - RNA, 19 nt, Homo sapiens
  misc_RNA (1)...(19): siRNA sense strand
uggaggugcugcaggccaa

SEQ ID NO: 2610759 - RNA, 19 nt, Homo sapiens
  misc_RNA (1)...(19): siRNA sense strand
cugagaagcaagugggaag

SEQ ID NO: 2610760 - RNA, 19 nt, Homo sapiens
  misc_RNA (1)...(19): siRNA sense strand
gcguauguuagaagagcau

SEQ ID NO: 2610761 - RNA, 19 nt, Homo sapiens
  misc_RNA (1)...(19): siRNA sense strand
uggccuuggaggaggguuu

SEQ ID NO: 2610762 - RNA, 19 nt, Homo sapiens
  misc_RNA (1)...(19): siRNA sense strand
agguguaugcccugaggaa

SEQ ID NO: 2610763 - RNA, 19 nt, Homo sapiens
  misc_RNA (1)...(19): siRNA sense strand
cugcccuggcugugggaaa

SEQ ID NO: 2610764 - RNA, 19 nt, Homo sapiens
  misc_RNA (1)...(19): siRNA sense strand
cccagaagaagguggccaa

SEQ ID NO: 2610765 - RNA, 19 nt, Homo sapiens
  misc_RNA (1)...(19): siRNA sense strand
ggaagagaaguuugcccaa

SEQ ID NO: 2610766 - RNA, 19 nt, Homo sapiens
  misc_RNA (1)...(19): siRNA sense strand
ggaugagagugaaggagcu

SEQ ID NO: 2610767 - RNA, 19 nt, Homo sapiens
  misc_RNA (1)...(19): siRNA sense strand
aguuguggcuggagaagca

SEQ ID NO: 2610768 - RNA, 19 nt, Homo sapiens
  misc_RNA (1)...(19): siRNA sense strand
uccaaaguguggucguaaa

SEQ ID NO: 2610769 - RNA, 19 nt, Homo sapiens
  misc_RNA (1)...(19): siRNA sense strand
ccagaagcaggcagccaaa

SEQ ID NO: 2610770 - RNA, 19 nt, Homo sapiens
  misc_RNA (1)...(19): siRNA sense strand
acuucuugcugcagggaca

SEQ ID NO: 2610771 - RNA, 19 nt, Homo sapiens
  misc_RNA (1)...(19): siRNA sense strand
ccuggggaccugagagaua

SEQ ID NO: 2610772 - RNA, 19 nt, Homo sapiens
  misc_RNA (1)...(19): siRNA sense strand
aggagaagacuuucaccaa

SEQ ID NO: 2610773 - RNA, 19 nt, Homo sapiens
  misc_RNA (1)...(19): siRNA sense strand
gggacgccgacgaggaaau

SEQ ID NO: 2610774 - RNA, 19 nt, Homo sapiens
  misc_RNA (1)...(19): siRNA sense strand
gcugaagcaaguacaggaa

SEQ ID NO: 2610775 - RNA, 19 nt, Homo sapiens
  misc_RNA (1)...(19): siRNA sense strand
acgaagcagcugagagcga

SEQ ID NO: 2610776 - RNA, 19 nt, Homo sapiens
  misc_RNA (1)...(19): siRNA sense strand
ggggugagcugcaagacaa

SEQ ID NO: 2610777 - RNA, 19 nt, Homo sapiens
  misc_RNA (1)...(19): siRNA sense strand
gggucaucauucugcguuu

SEQ ID NO: 2610778 - RNA, 19 nt, Homo sapiens
  misc_RNA (1)...(19): siRNA sense strand
cggaagacagccagcuaca

SEQ ID NO: 2610779 - RNA, 19 nt, Homo sapiens
  misc_RNA (1)...(19): siRNA sense strand
ggaaacacgaggagcugga

SEQ ID NO: 2610780 - RNA, 19 nt, Homo sapiens
  misc_RNA (1)...(19): siRNA sense strand
guauguuagaagagcauca

SEQ ID NO: 2610781 - RNA, 19 nt, Homo sapiens
  misc_RNA (1)...(19): siRNA sense strand
agagagaccuggaagcguu

SEQ ID NO: 2610782 - RNA, 19 nt, Homo sapiens
  misc_RNA (1)...(19): siRNA sense strand
caaaggagcagcuggagca

SEQ ID NO: 2610783 - RNA, 19 nt, Homo sapiens
  misc_RNA (1)...(19): siRNA sense strand
gcucaguggagaagaugga

SEQ ID NO: 2610784 - RNA, 19 nt, Homo sapiens
  misc_RNA (1)...(19): siRNA sense strand
gggccacauucgcaagcua

SEQ ID NO: 2610785 - RNA, 19 nt, Homo sapiens
  misc_RNA (1)...(19): siRNA sense strand
cugaaugagugcacgacca

SEQ ID NO: 2610786 - RNA, 19 nt, Homo sapiens
  misc_RNA (1)...(19): siRNA sense strand
ccuuaaggaugcagagcag

SEQ ID NO: 2610787 - RNA, 19 nt, Homo sapiens
  misc_RNA (1)...(19): siRNA sense strand
cagagaguguccaggcuca

SEQ ID NO: 2610788 - RNA, 19 nt, Homo sapiens
  misc_RNA (1)...(19): siRNA sense strand
agauguaaccaguggaaau

SEQ ID NO: 2610789 - RNA, 19 nt, Homo sapiens
  misc_RNA (1)...(19): siRNA sense strand
aagagaaagcagaguugaa

SEQ ID NO: 2610790 - RNA, 19 nt, Homo sapiens
  misc_RNA (1)...(19): siRNA sense strand
agucauuaccuuauggaau

SEQ ID NO: 2610791 - RNA, 19 nt, Homo sapiens
  misc_RNA (1)...(19): siRNA sense strand
agccaaggaauuugugaaa

SEQ ID NO: 2610792 - RNA, 19 nt, Homo sapiens
  misc_RNA (1)...(19): siRNA sense strand
uugcugaagccaaggaauu

SEQ ID NO: 2610793 - RNA, 19 nt, Homo sapiens
  misc_RNA (1)...(19): siRNA sense strand
augaauugucagaagaaca

SEQ ID NO: 2610794 - RNA, 19 nt, Homo sapiens
  misc_RNA (1)...(19): siRNA sense strand
ugaugaauugucagaagaa

SEQ ID NO: 2610795 - RNA, 19 nt, Homo sapiens
  misc_RNA (1)...(19): siRNA sense strand
ccugcgaacgagaaauuaa

SEQ ID NO: 2610796 - RNA, 19 nt, Homo sapiens
  misc_RNA (1)...(19): siRNA sense strand
ucauaagggcagaucugaa

SEQ ID NO: 2610797 - RNA, 19 nt, Homo sapiens
  misc_RNA (1)...(19): siRNA sense strand
aagacauagcaaaggacau

SEQ ID NO: 2610798 - RNA, 19 nt, Homo sapiens
  misc_RNA (1)...(19): siRNA sense strand
aaacaaucaaccagaacca

SEQ ID NO: 2610799 - RNA, 19 nt, Homo sapiens
  misc_RNA (1)...(19): siRNA sense strand
ggauccugcgaacgagaaa

SEQ ID NO: 2610800 - RNA, 19 nt, Homo sapiens
  misc_RNA (1)...(19): siRNA sense strand
ggaucugaagacauagcaa

SEQ ID NO: 2610801 - RNA, 19 nt, Homo sapiens
  misc_RNA (1)...(19): siRNA sense strand
gugaaacaauguaguccca

SEQ ID NO: 2610802 - RNA, 19 nt, Homo sapiens
  misc_RNA (1)...(19): siRNA sense strand
agagaggagaccaaccuaa

SEQ ID NO: 2610803 - RNA, 19 nt, Homo sapiens
  misc_RNA (1)...(19): siRNA sense strand
gggaagaaacagagcaaaa

SEQ ID NO: 2610804 - RNA, 19 nt, Homo sapiens
  misc_RNA (1)...(19): siRNA sense strand
agaaccaauuagagggaaa

SEQ ID NO: 2610805 - RNA, 19 nt, Homo sapiens
  misc_RNA (1)...(19): siRNA sense strand
ggauaaagagaaagcagaa

SEQ ID NO: 2610806 - RNA, 19 nt, Homo sapiens
  misc_RNA (1)...(19): siRNA sense strand
agucaaggauaaagaagaa

SEQ ID NO: 2610807 - RNA, 19 nt, Homo sapiens
  misc_RNA (1)...(19): siRNA sense strand
agagaggagcaaagagaaa

SEQ ID NO: 2610808 - RNA, 19 nt, Homo sapiens
  misc_RNA (1)...(19): siRNA sense strand
ugaagaaacaugaggaaga

SEQ ID NO: 2610809 - RNA, 19 nt, Homo sapiens
  misc_RNA (1)...(19): siRNA sense strand
agggaaagguggaggaagu

SEQ ID NO: 2610810 - RNA, 19 nt, Homo sapiens
  misc_RNA (1)...(19): siRNA sense strand
ggaauauugacuagugaaa

SEQ ID NO: 2610811 - RNA, 19 nt, Homo sapiens
  misc_RNA (1)...(19): siRNA sense strand
caacaacaaucuagggaca

SEQ ID NO: 2610812 - RNA, 19 nt, Homo sapiens
  misc_RNA (1)...(19): siRNA sense strand
aagcagaaguucagcggaa

SEQ ID NO: 2610813 - RNA, 19 nt, Homo sapiens
  misc_RNA (1)...(19): siRNA sense strand
ugguagaaguggaaagaca

SEQ ID NO: 2610814 - RNA, 19 nt, Homo sapiens
  misc_RNA (1)...(19): siRNA sense strand
caaugaagaccuugaacaa

SEQ ID NO: 2610815 - RNA, 19 nt, Homo sapiens
  misc_RNA (1)...(19): siRNA sense strand
aagacuaaccaguggauua

SEQ ID NO: 2610816 - RNA, 19 nt, Homo sapiens
  misc_RNA (1)...(19): siRNA sense strand
gauuagaacuacaggcuga

SEQ ID NO: 2610817 - RNA, 19 nt, Homo sapiens
  misc_RNA (1)...(19): siRNA sense strand
aagaagaaauugugcaaca

SEQ ID NO: 2610818 - RNA, 19 nt, Homo sapiens
  misc_RNA (1)...(19): siRNA sense strand
aagcggaaguagaggauuu

SEQ ID NO: 2610819 - RNA, 19 nt, Homo sapiens
  misc_RNA (1)...(19): siRNA sense strand
aaacaaacggcuugggauu

SEQ ID NO: 2610820 - RNA, 19 nt, Homo sapiens
  misc_RNA (1)...(19): siRNA sense strand
ucgacauacuagagagcua

SEQ ID NO: 2610821 - RNA, 19 nt, Homo sapiens
  misc_RNA (1)...(19): siRNA sense strand
uuggagagacaaagagaaa

SEQ ID NO: 2610822 - RNA, 19 nt, Homo sapiens
  misc_RNA (1)...(19): siRNA sense strand
acaaggaagaagugaagaa

SEQ ID NO: 2610823 - RNA, 19 nt, Homo sapiens
  misc_RNA (1)...(19): siRNA sense strand
cacaagauuuggagagaca

SEQ ID NO: 2610824 - RNA, 19 nt, Homo sapiens
  misc_RNA (1)...(19): siRNA sense strand
ugaagaacuccaaaggaaa

SEQ ID NO: 2610825 - RNA, 19 nt, Homo sapiens
  misc_RNA (1)...(19): siRNA sense strand
gcuaauauugagcaggaaa

SEQ ID NO: 2610826 - RNA, 19 nt, Homo sapiens
  misc_RNA (1)...(19): siRNA sense strand
ggaacagacaguagcagaa

SEQ ID NO: 2610827 - RNA, 19 nt, Homo sapiens
  misc_RNA (1)...(19): siRNA sense strand
gagaaauuacggauagcaa

SEQ ID NO: 2610828 - RNA, 19 nt, Homo sapiens
  misc_RNA (1)...(19): siRNA sense strand
gagggaagaaacagagcaa

SEQ ID NO: 2610829 - RNA, 19 nt, Homo sapiens
  misc_RNA (1)...(19): siRNA sense strand
ugauauugccagaagacaa

SEQ ID NO: 2610830 - RNA, 19 nt, Homo sapiens
  misc_RNA (1)...(19): siRNA sense strand
cguuaaagcaaauggagga

SEQ ID NO: 2610831 - RNA, 19 nt, Homo sapiens
  misc_RNA (1)...(19): siRNA sense strand
aaggagaacauucgaauaa

SEQ ID NO: 2610832 - RNA, 19 nt, Homo sapiens
  misc_RNA (1)...(19): siRNA sense strand
gcuaaagacacaaguugaa

SEQ ID NO: 2610833 - RNA, 19 nt, Homo sapiens
  misc_RNA (1)...(19): siRNA sense strand
aaacauuggagauggaauu

SEQ ID NO: 2610834 - RNA, 19 nt, Homo sapiens
  misc_RNA (1)...(19): siRNA sense strand
ggaauuagucaaggauaaa

SEQ ID NO: 2610835 - RNA, 19 nt, Homo sapiens
  misc_RNA (1)...(19): siRNA sense strand
caaaucacuagaagagaaa

SEQ ID NO: 2610836 - RNA, 19 nt, Homo sapiens
  misc_RNA (1)...(19): siRNA sense strand
uuagagagaaagaggaaau

SEQ ID NO: 2610837 - RNA, 19 nt, Homo sapiens
  misc_RNA (1)...(19): siRNA sense strand
uggaggaaguagaccuaaa

SEQ ID NO: 2610838 - RNA, 19 nt, Homo sapiens
  misc_RNA (1)...(19): siRNA sense strand
gucagagauuugaaggaaa

SEQ ID NO: 2610839 - RNA, 19 nt, Homo sapiens
  misc_RNA (1)...(19): siRNA sense strand
cggaaguagaggauuuaaa

SEQ ID NO: 2610840 - RNA, 19 nt, Homo sapiens
  misc_RNA (1)...(19): siRNA sense strand
gguagaaguggaaagacaa

SEQ ID NO: 2610841 - RNA, 19 nt, Homo sapiens
  misc_RNA (1)...(19): siRNA sense strand
ucagcuggauaaagagaaa

SEQ ID NO: 2610842 - RNA, 19 nt, Homo sapiens
  misc_RNA (1)...(19): siRNA sense strand
ugaagaagaaauugugcaa

SEQ ID NO: 2610843 - RNA, 19 nt, Homo sapiens
  misc_RNA (1)...(19): siRNA sense strand
gaaagaggaaauugaucaa

SEQ ID NO: 2610844 - RNA, 19 nt, Homo sapiens
  misc_RNA (1)...(19): siRNA sense strand
aauuaaagggccuggaaga

SEQ ID NO: 2610845 - RNA, 19 nt, Homo sapiens
  misc_RNA (1)...(19): siRNA sense strand
agaacaaguuucaugaaga

SEQ ID NO: 2610846 - RNA, 19 nt, Homo sapiens
  misc_RNA (1)...(19): siRNA sense strand
ccagagaggagcaaagaga

SEQ ID NO: 2610847 - RNA, 19 nt, Homo sapiens
  misc_RNA (1)...(19): siRNA sense strand
acuuagagagaaagaggaa

SEQ ID NO: 2610848 - RNA, 19 nt, Homo sapiens
  misc_RNA (1)...(19): siRNA sense strand
aagaacaaguggagucuau

SEQ ID NO: 2610849 - RNA, 19 nt, Homo sapiens
  misc_RNA (1)...(19): siRNA sense strand
ccagaagacaaguugaaau

SEQ ID NO: 2610850 - RNA, 19 nt, Homo sapiens
  misc_RNA (1)...(19): siRNA sense strand
gguaaguuggagucaauua

SEQ ID NO: 2610851 - RNA, 19 nt, Homo sapiens
  misc_RNA (1)...(19): siRNA sense strand
cgaaacaaguuaaaagaga

SEQ ID NO: 2610852 - RNA, 19 nt, Homo sapiens
  misc_RNA (1)...(19): siRNA sense strand
gaucauugucagagagaac

SEQ ID NO: 2610853 - RNA, 19 nt, Homo sapiens
  misc_RNA (1)...(19): siRNA sense strand
aacugaugcugcagagaaa

SEQ ID NO: 2610854 - RNA, 19 nt, Homo sapiens
  misc_RNA (1)...(19): siRNA sense strand
acaguuuaguggagcuuua

SEQ ID NO: 2610855 - RNA, 19 nt, Homo sapiens
  misc_RNA (1)...(19): siRNA sense strand
caacagagagagaacaaaa

SEQ ID NO: 2610856 - RNA, 19 nt, Homo sapiens
  misc_RNA (1)...(19): siRNA sense strand
caggaaaaguucuccaaaa

SEQ ID NO: 2610857 - RNA, 19 nt, Homo sapiens
  misc_RNA (1)...(19): siRNA sense strand
ccaguggauuacagggcaa

SEQ ID NO: 2610858 - RNA, 19 nt, Homo sapiens
  misc_RNA (1)...(19): siRNA sense strand
agaaauuacggauagcaaa

SEQ ID NO: 2610859 - RNA, 19 nt, Homo sapiens
  misc_RNA (1)...(19): siRNA sense strand
ugcagaagauggaggccua

SEQ ID NO: 2610860 - RNA, 19 nt, Homo sapiens
  misc_RNA (1)...(19): siRNA sense strand
agaaagaaccacaggaaaa

SEQ ID NO: 2610861 - RNA, 19 nt, Homo sapiens
  misc_RNA (1)...(19): siRNA sense strand
gcaaagaggcagagcacca

SEQ ID NO: 2610862 - RNA, 19 nt, Homo sapiens
  misc_RNA (1)...(19): siRNA sense strand
gggcaaaaggcaaaaguaa

SEQ ID NO: 2610863 - RNA, 19 nt, Homo sapiens
  misc_RNA (1)...(19): siRNA sense strand
aaguuuggccagugggaaa

SEQ ID NO: 2610864 - RNA, 19 nt, Homo sapiens
  misc_RNA (1)...(19): siRNA sense strand
aagaaagaaccacaggaaa

SEQ ID NO: 2610865 - RNA, 19 nt, Homo sapiens
  misc_RNA (1)...(19): siRNA sense strand
auaacaugguagaaggaga

SEQ ID NO: 2610866 - RNA, 19 nt, Homo sapiens
  misc_RNA (1)...(19): siRNA sense strand
cauacaacuuugagccaga

SEQ ID NO: 2610867 - RNA, 19 nt, Homo sapiens
  misc_RNA (1)...(19): siRNA sense strand
gaguggaaccgcuggccaa

SEQ ID NO: 2610868 - RNA, 19 nt, Homo sapiens
  misc_RNA (1)...(19): siRNA sense strand
augcaaaggacuauaacau

SEQ ID NO: 2610869 - RNA, 19 nt, Homo sapiens
  misc_RNA (1)...(19): siRNA sense strand
gagacuuuguuuauggcaa

SEQ ID NO: 2610870 - RNA, 19 nt, Homo sapiens
  misc_RNA (1)...(19): siRNA sense strand
aaagagaacucaaaggcca

SEQ ID NO: 2610871 - RNA, 19 nt, Homo sapiens
  misc_RNA (1)...(19): siRNA sense strand
gcgagggaaggaagaacaa

SEQ ID NO: 2610872 - RNA, 19 nt, Homo sapiens
  misc_RNA (1)...(19): siRNA sense strand
ggaggaaaugggaggagca

SEQ ID NO: 2610873 - RNA, 19 nt, Homo sapiens
  misc_RNA (1)...(19): siRNA sense strand
cauggaaaccacagggcuu

SEQ ID NO: 2610874 - RNA, 19 nt, Homo sapiens
  misc_RNA (1)...(19): siRNA sense strand
ccacaugugcaaagaggca

SEQ ID NO: 2610875 - RNA, 19 nt, Homo sapiens
  misc_RNA (1)...(19): siRNA sense strand
cuguggaugcaaaggacua

SEQ ID NO: 2610876 - RNA, 19 nt, Homo sapiens
  misc_RNA (1)...(19): siRNA sense strand
gggauguacauuuguucaa

SEQ ID NO: 2610877 - RNA, 19 nt, Homo sapiens
  misc_RNA (1)...(19): siRNA sense strand
ccaaagaagggauggaccu

SEQ ID NO: 2610878 - RNA, 19 nt, Homo sapiens
  misc_RNA (1)...(19): siRNA sense strand
auggcaagcuggaggcuca

SEQ ID NO: 2610879 - RNA, 19 nt, Homo sapiens
  misc_RNA (1)...(19): siRNA sense strand
ggcaaaaggcaaaaguaau

SEQ ID NO: 2610880 - RNA, 19 nt, Homo sapiens
  misc_RNA (1)...(19): siRNA sense strand
aaucaagagcugggaguuu

SEQ ID NO: 2610881 - RNA, 19 nt, Homo sapiens
  misc_RNA (1)...(19): siRNA sense strand
cccagaaacuagagaggcu

SEQ ID NO: 2610882 - RNA, 19 nt, Homo sapiens
  misc_RNA (1)...(19): siRNA sense strand
guucguacagccauggaaa

SEQ ID NO: 2610883 - RNA, 19 nt, Homo sapiens
  misc_RNA (1)...(19): siRNA sense strand
ugugagagcaagaacaaga

SEQ ID NO: 2610884 - RNA, 19 nt, Homo sapiens
  misc_RNA (1)...(19): siRNA sense strand
ccagaagcauugauggacu

SEQ ID NO: 2610885 - RNA, 19 nt, Homo sapiens
  misc_RNA (1)...(19): siRNA sense strand
ccaacuaugaauggugaaa

SEQ ID NO: 2610886 - RNA, 19 nt, Homo sapiens
  misc_RNA (1)...(19): siRNA sense strand
ggaaaugggaggagcagug

SEQ ID NO: 2610887 - RNA, 19 nt, Homo sapiens
  misc_RNA (1)...(19): siRNA sense strand
aggagagagacuuuguuua

SEQ ID NO: 2610888 - RNA, 19 nt, Homo sapiens
  misc_RNA (1)...(19): siRNA sense strand
agugaggaguguuuggaca

SEQ ID NO: 2610889 - RNA, 19 nt, Homo sapiens
  misc_RNA (1)...(19): siRNA sense strand
ggaugguguucuggaaaga

SEQ ID NO: 2610890 - RNA, 19 nt, Homo sapiens
  misc_RNA (1)...(19): siRNA sense strand
guuacaagagagaggaaug

SEQ ID NO: 2610891 - RNA, 19 nt, Homo sapiens
  misc_RNA (1)...(19): siRNA sense strand
auguugaguuguaagccaa

SEQ ID NO: 2610892 - RNA, 19 nt, Homo sapiens
  misc_RNA (1)...(19): siRNA sense strand
caggaugguguucuggaaa

SEQ ID NO: 2610893 - RNA, 19 nt, Homo sapiens
  misc_RNA (1)...(19): siRNA sense strand
gggagauggcagagcuaag

SEQ ID NO: 2610894 - RNA, 19 nt, Homo sapiens
  misc_RNA (1)...(19): siRNA sense strand
ucaagagcugggaguuuaa

SEQ ID NO: 2610895 - RNA, 19 nt, Homo sapiens
  misc_RNA (1)...(19): siRNA sense strand
agaaagaaacagauggaga

SEQ ID NO: 2610896 - RNA, 19 nt, Homo sapiens
  misc_RNA (1)...(19): siRNA sense strand
aggaaagguuauuugucaa

SEQ ID NO: 2610897 - RNA, 19 nt, Homo sapiens
  misc_RNA (1)...(19): siRNA sense strand
cucaaaugauacuuggaaa

SEQ ID NO: 2610898 - RNA, 19 nt, Homo sapiens
  misc_RNA (1)...(19): siRNA sense strand
cugaagagaaagaaacaga

SEQ ID NO: 2610899 - RNA, 19 nt, Homo sapiens
  misc_RNA (1)...(19): siRNA sense strand
cuacaaggaaaggaggaaa

SEQ ID NO: 2610900 - RNA, 19 nt, Homo sapiens
  misc_RNA (1)...(19): siRNA sense strand
aaggaaaggaggaaagagu

SEQ ID NO: 2610901 - RNA, 19 nt, Homo sapiens
  misc_RNA (1)...(19): siRNA sense strand
uguaaucaggacaaagaaa

SEQ ID NO: 2610902 - RNA, 19 nt, Homo sapiens
  misc_RNA (1)...(19): siRNA sense strand
cgcaaagucuucaaggaga

SEQ ID NO: 2610903 - RNA, 19 nt, Homo sapiens
  misc_RNA (1)...(19): siRNA sense strand
aggaaaggaggaaagagua

SEQ ID NO: 2610904 - RNA, 19 nt, Homo sapiens
  misc_RNA (1)...(19): siRNA sense strand
gcuacaaggaaaggaggaa

SEQ ID NO: 2610905 - RNA, 19 nt, Homo sapiens
  misc_RNA (1)...(19): siRNA sense strand
agagaaagaaacagaugga

SEQ ID NO: 2610906 - RNA, 19 nt, Homo sapiens
  misc_RNA (1)...(19): siRNA sense strand
caguuaaagcacuacaaau

SEQ ID NO: 2610907 - RNA, 19 nt, Homo sapiens
  misc_RNA (1)...(19): siRNA sense strand
cauuggagagagugguauu

SEQ ID NO: 2610908 - RNA, 19 nt, Homo sapiens
  misc_RNA (1)...(19): siRNA sense strand
gaauaaauugaguaccaca

SEQ ID NO: 2610909 - RNA, 19 nt, Homo sapiens
  misc_RNA (1)...(19): siRNA sense strand
uugcaagaauguaguaacu

SEQ ID NO: 2610910 - RNA, 19 nt, Homo sapiens
  misc_RNA (1)...(19): siRNA sense strand
aaaggaggaaagaguaaau

SEQ ID NO: 2610911 - RNA, 19 nt, Homo sapiens
  misc_RNA (1)...(19): siRNA sense strand
cgcacaagacuuaguuuau

SEQ ID NO: 2610912 - RNA, 19 nt, Homo sapiens
  misc_RNA (1)...(19): siRNA sense strand
ucaucuaacugaaaaggaa

SEQ ID NO: 2610913 - RNA, 19 nt, Homo sapiens
  misc_RNA (1)...(19): siRNA sense strand
aacuuaaacgagucaguaa

SEQ ID NO: 2610914 - RNA, 19 nt, Homo sapiens
  misc_RNA (1)...(19): siRNA sense strand
uugaagagguccugagcuc

SEQ ID NO: 2610915 - RNA, 19 nt, Homo sapiens
  misc_RNA (1)...(19): siRNA sense strand
aauuugcuccagagaauaa

SEQ ID NO: 2610916 - RNA, 19 nt, Homo sapiens
  misc_RNA (1)...(19): siRNA sense strand
gagugguauuaugguguaa

SEQ ID NO: 2610917 - RNA, 19 nt, Homo sapiens
  misc_RNA (1)...(19): siRNA sense strand
aggaggaaagaguaaauga

SEQ ID NO: 2610918 - RNA, 19 nt, Homo sapiens
  misc_RNA (1)...(19): siRNA sense strand
acuuaaacgagucaguaau

SEQ ID NO: 2610919 - RNA, 19 nt, Homo sapiens
  misc_RNA (1)...(19): siRNA sense strand
cauuaaagaucaugugacc

SEQ ID NO: 2610920 - RNA, 19 nt, Homo sapiens
  misc_RNA (1)...(19): siRNA sense strand
gagccauggacauuggaga

SEQ ID NO: 2610921 - RNA, 19 nt, Homo sapiens
  misc_RNA (1)...(19): siRNA sense strand
aagauggacucgugggcau

SEQ ID NO: 2610922 - RNA, 19 nt, Homo sapiens
  misc_RNA (1)...(19): siRNA sense strand
aggaauacgagaaggccuu

SEQ ID NO: 2610923 - RNA, 19 nt, Homo sapiens
  misc_RNA (1)...(19): siRNA sense strand
ccaaggaacuggagcggcu

SEQ ID NO: 2610924 - RNA, 19 nt, Homo sapiens
  misc_RNA (1)...(19): siRNA sense strand
gcaaggaggaacagcggga

SEQ ID NO: 2610925 - RNA, 19 nt, Homo sapiens
  misc_RNA (1)...(19): siRNA sense strand
ccaaagggagcaaggagga

SEQ ID NO: 2610926 - RNA, 19 nt, Homo sapiens
  misc_RNA (1)...(19): siRNA sense strand
ucgaggagcugcugcccaa

SEQ ID NO: 2610927 - RNA, 19 nt, Homo sapiens
  misc_RNA (1)...(19): siRNA sense strand
ggcucaaggaauacgagaa

SEQ ID NO: 2610928 - RNA, 19 nt, Homo sapiens
  misc_RNA (1)...(19): siRNA sense strand
aaggaggaacagcgggauu

SEQ ID NO: 2610929 - RNA, 19 nt, Homo sapiens
  misc_RNA (1)...(19): siRNA sense strand
cagcaggcucgguguccaa

SEQ ID NO: 2610930 - RNA, 19 nt, Homo sapiens
  misc_RNA (1)...(19): siRNA sense strand
uggaggaagaagaggccaa

SEQ ID NO: 2610931 - RNA, 19 nt, Homo sapiens
  misc_RNA (1)...(19): siRNA sense strand
caauuggagcaguggagaa

SEQ ID NO: 2610932 - RNA, 19 nt, Homo sapiens
  misc_RNA (1)...(19): siRNA sense strand
cggaagcugcacauggaaa

SEQ ID NO: 2610933 - RNA, 19 nt, Homo sapiens
  misc_RNA (1)...(19): siRNA sense strand
gcugaaugaaagugaaaau

SEQ ID NO: 2610934 - RNA, 19 nt, Homo sapiens
  misc_RNA (1)...(19): siRNA sense strand
ugauugacucccagaacaa

SEQ ID NO: 2610935 - RNA, 19 nt, Homo sapiens
  misc_RNA (1)...(19): siRNA sense strand
ugcaauaaaggaagaaaca

SEQ ID NO: 2610936 - RNA, 19 nt, Homo sapiens
  misc_RNA (1)...(19): siRNA sense strand
aguggagacauuaggagaa

SEQ ID NO: 2610937 - RNA, 19 nt, Homo sapiens
  misc_RNA (1)...(19): siRNA sense strand
aauuggagcaguggagaaa

SEQ ID NO: 2610938 - RNA, 19 nt, Homo sapiens
  misc_RNA (1)...(19): siRNA sense strand
gaaacagaauauauggaac

SEQ ID NO: 2610939 - RNA, 19 nt, Homo sapiens
  misc_RNA (1)...(19): siRNA sense strand
ucgucuggaggaagagaua

SEQ ID NO: 2610940 - RNA, 19 nt, Homo sapiens
  misc_RNA (1)...(19): siRNA sense strand
ucuuguuggcuuagaauuu

SEQ ID NO: 2610941 - RNA, 19 nt, Homo sapiens
  misc_RNA (1)...(19): siRNA sense strand
uguaagaaaggcagcggau

SEQ ID NO: 2610942 - RNA, 19 nt, Homo sapiens
  misc_RNA (1)...(19): siRNA sense strand
uugugcaaguggagacauu

SEQ ID NO: 2610943 - RNA, 19 nt, Homo sapiens
  misc_RNA (1)...(19): siRNA sense strand
uggagaaagacgugggccu

SEQ ID NO: 2610944 - RNA, 19 nt, Homo sapiens
  misc_RNA (1)...(19): siRNA sense strand
aggcugcaauaaaggaaga

SEQ ID NO: 2610945 - RNA, 19 nt, Homo sapiens
  misc_RNA (1)...(19): siRNA sense strand
aggccaauucuaagcaaaa

SEQ ID NO: 2610946 - RNA, 19 nt, Homo sapiens
  misc_RNA (1)...(19): siRNA sense strand
agcuaagaaagguguggaa

SEQ ID NO: 2610947 - RNA, 19 nt, Homo sapiens
  misc_RNA (1)...(19): siRNA sense strand
cugcaauaaaggaagaaac

SEQ ID NO: 2610948 - RNA, 19 nt, Homo sapiens
  misc_RNA (1)...(19): siRNA sense strand
gucuggaggaagagauaga

SEQ ID NO: 2610949 - RNA, 19 nt, Homo sapiens
  misc_RNA (1)...(19): siRNA sense strand
gguuuugauuggucagauu

SEQ ID NO: 2610950 - RNA, 19 nt, Homo sapiens
  misc_RNA (1)...(19): siRNA sense strand
aaauccugaucuugggaau

SEQ ID NO: 2610951 - RNA, 19 nt, Homo sapiens
  misc_RNA (1)...(19): siRNA sense strand
ucgaaaacuacgagcacaa

SEQ ID NO: 2610952 - RNA, 19 nt, Homo sapiens
  misc_RNA (1)...(19): siRNA sense strand
agaccaacgcugagaccuu

SEQ ID NO: 2610953 - RNA, 19 nt, Homo sapiens
  misc_RNA (1)...(19): siRNA sense strand
uggaggaggaugagcgcuu

SEQ ID NO: 2610954 - RNA, 19 nt, Homo sapiens
  misc_RNA (1)...(19): siRNA sense strand
uugucaagauccugcgcua

SEQ ID NO: 2610955 - RNA, 19 nt, Homo sapiens
  misc_RNA (1)...(19): siRNA sense strand
gcaccaaagaccugcagga

SEQ ID NO: 2610956 - RNA, 19 nt, Homo sapiens
  misc_RNA (1)...(19): siRNA sense strand
uguugcagcuggaggagga

SEQ ID NO: 2610957 - RNA, 19 nt, Homo sapiens
  misc_RNA (1)...(19): siRNA sense strand
agaaugagguguugcagcu

SEQ ID NO: 2610958 - RNA, 19 nt, Homo sapiens
  misc_RNA (1)...(19): siRNA sense strand
ucgaaaacuacgagcacaa

SEQ ID NO: 2610959 - RNA, 19 nt, Homo sapiens
  misc_RNA (1)...(19): siRNA sense strand
agaccaacgcugagaccuu

SEQ ID NO: 2610960 - RNA, 19 nt, Homo sapiens
  misc_RNA (1)...(19): siRNA sense strand
uggaggaggaugagcgcuu

SEQ ID NO: 2610961 - RNA, 19 nt, Homo sapiens
  misc_RNA (1)...(19): siRNA sense strand
uugucaagauccugcgcua

SEQ ID NO: 2610962 - RNA, 19 nt, Homo sapiens
  misc_RNA (1)...(19): siRNA sense strand
gcaccaaagaccugcagga

SEQ ID NO: 2610963 - RNA, 19 nt, Homo sapiens
  misc_RNA (1)...(19): siRNA sense strand
uguugcagcuggaggagga

SEQ ID NO: 2610964 - RNA, 19 nt, Homo sapiens
  misc_RNA (1)...(19): siRNA sense strand
agaaugagguguugcagcu

SEQ ID NO: 2610965 - RNA, 19 nt, Homo sapiens
  misc_RNA (1)...(19): siRNA sense strand
gcacgaaguuggaggaggc

SEQ ID NO: 2610966 - RNA, 19 nt, Homo sapiens
  misc_RNA (1)...(19): siRNA sense strand
caagaaaacucuaggaacc

SEQ ID NO: 2610967 - RNA, 19 nt, Homo sapiens
  misc_RNA (1)...(19): siRNA sense strand
ggaaagaguuaucgggcua

SEQ ID NO: 2610968 - RNA, 19 nt, Homo sapiens
  misc_RNA (1)...(19): siRNA sense strand
gaacaugaauuuaaggaga

SEQ ID NO: 2610969 - RNA, 19 nt, Homo sapiens
  misc_RNA (1)...(19): siRNA sense strand
ccaaagugaaagaggaaga

SEQ ID NO: 2610970 - RNA, 19 nt, Homo sapiens
  misc_RNA (1)...(19): siRNA sense strand
gaguauauaaacagaggaa

SEQ ID NO: 2610971 - RNA, 19 nt, Homo sapiens
  misc_RNA (1)...(19): siRNA sense strand
ggccaaagugaaagaggaa

SEQ ID NO: 2610972 - RNA, 19 nt, Homo sapiens
  misc_RNA (1)...(19): siRNA sense strand
aggaagaggaagagccauu

SEQ ID NO: 2610973 - RNA, 19 nt, Homo sapiens
  misc_RNA (1)...(19): siRNA sense strand
agugaaagaggaagaggaa

SEQ ID NO: 2610974 - RNA, 19 nt, Homo sapiens
  misc_RNA (1)...(19): siRNA sense strand
gccaguaagaggagaaaga

SEQ ID NO: 2610975 - RNA, 19 nt, Homo sapiens
  misc_RNA (1)...(19): siRNA sense strand
aggagaaagaggcggaaaa

SEQ ID NO: 2610976 - RNA, 19 nt, Homo sapiens
  misc_RNA (1)...(19): siRNA sense strand
uggcagacguugugcgguu

SEQ ID NO: 2610977 - RNA, 19 nt, Homo sapiens
  misc_RNA (1)...(19): siRNA sense strand
guauggaagagguagaauu

SEQ ID NO: 2610978 - RNA, 19 nt, Homo sapiens
  misc_RNA (1)...(19): siRNA sense strand
ggaaaauauugcuguccaa

SEQ ID NO: 2610979 - RNA, 19 nt, Homo sapiens
  misc_RNA (1)...(19): siRNA sense strand
cgaaguugcugaaaggcuu

SEQ ID NO: 2610980 - RNA, 19 nt, Homo sapiens
  misc_RNA (1)...(19): siRNA sense strand
agaaggcaucagagauaaa

SEQ ID NO: 2610981 - RNA, 19 nt, Homo sapiens
  misc_RNA (1)...(19): siRNA sense strand
gggcauaguaacuuagcuu

SEQ ID NO: 2610982 - RNA, 19 nt, Homo sapiens
  misc_RNA (1)...(19): siRNA sense strand
acacacacuauuacggaaa

SEQ ID NO: 2610983 - RNA, 19 nt, Homo sapiens
  misc_RNA (1)...(19): siRNA sense strand
ggcaagagauuuuggccaa

SEQ ID NO: 2610984 - RNA, 19 nt, Homo sapiens
  misc_RNA (1)...(19): siRNA sense strand
cuacaggaagaaucagaaa

SEQ ID NO: 2610985 - RNA, 19 nt, Homo sapiens
  misc_RNA (1)...(19): siRNA sense strand
gguggugugagcagaauaa

SEQ ID NO: 2610986 - RNA, 19 nt, Homo sapiens
  misc_RNA (1)...(19): siRNA sense strand
cagauagacaaaggagaaa

SEQ ID NO: 2610987 - RNA, 19 nt, Homo sapiens
  misc_RNA (1)...(19): siRNA sense strand
gggaugaguuucugcggca

SEQ ID NO: 2610988 - RNA, 19 nt, Homo sapiens
  misc_RNA (1)...(19): siRNA sense strand
acuauuacggaaagaggaa

SEQ ID NO: 2610989 - RNA, 19 nt, Homo sapiens
  misc_RNA (1)...(19): siRNA sense strand
gggcugcucaacagggaua

SEQ ID NO: 2610990 - RNA, 19 nt, Homo sapiens
  misc_RNA (1)...(19): siRNA sense strand
acaaacaaguuauuggcau

SEQ ID NO: 2610991 - RNA, 19 nt, Homo sapiens
  misc_RNA (1)...(19): siRNA sense strand
ggaaaauugcagugguuca

SEQ ID NO: 2610992 - RNA, 19 nt, Homo sapiens
  misc_RNA (1)...(19): siRNA sense strand
ccacagagucaguuaugau

SEQ ID NO: 2610993 - RNA, 19 nt, Homo sapiens
  misc_RNA (1)...(19): siRNA sense strand
aauuaagcugggaagauua

SEQ ID NO: 2610994 - RNA, 19 nt, Homo sapiens
  misc_RNA (1)...(19): siRNA sense strand
ccggcaaaccuguaucaaa

SEQ ID NO: 2610995 - RNA, 19 nt, Homo sapiens
  misc_RNA (1)...(19): siRNA sense strand
acugaauucugccggcaaa

SEQ ID NO: 2610996 - RNA, 19 nt, Homo sapiens
  misc_RNA (1)...(19): siRNA sense strand
ucgccgagcacgaguauau

SEQ ID NO: 2610997 - RNA, 19 nt, Homo sapiens
  misc_RNA (1)...(19): siRNA sense strand
gaggaaaauugcagugguu

SEQ ID NO: 2610998 - RNA, 19 nt, Homo sapiens
  misc_RNA (1)...(19): siRNA sense strand
guucaagaaugcauggacu

SEQ ID NO: 2610999 - RNA, 19 nt, Homo sapiens
  misc_RNA (1)...(19): siRNA sense strand
acaugaagcucgaggcggu

SEQ ID NO: 2611000 - RNA, 19 nt, Homo sapiens
  misc_RNA (1)...(19): siRNA sense strand
aggaagaauugcugagcug

SEQ ID NO: 2611001 - RNA, 19 nt, Homo sapiens
  misc_RNA (1)...(19): siRNA sense strand
gguagaauuaagcugggaa

SEQ ID NO: 2611002 - RNA, 19 nt, Homo sapiens
  misc_RNA (1)...(19): siRNA sense strand
ggggugaagaugaggauga

SEQ ID NO: 2611003 - RNA, 19 nt, Homo sapiens
  misc_RNA (1)...(19): siRNA sense strand
guacuuacaaagaccaaau

SEQ ID NO: 2611004 - RNA, 19 nt, Homo sapiens
  misc_RNA (1)...(19): siRNA sense strand
gaggagaaagaggcggaaa

SEQ ID NO: 2611005 - RNA, 19 nt, Homo sapiens
  misc_RNA (1)...(19): siRNA sense strand
uggccaaagugaaagagga

SEQ ID NO: 2611006 - RNA, 19 nt, Homo sapiens
  misc_RNA (1)...(19): siRNA sense strand
ucgggcuacuguugagaua

SEQ ID NO: 2611007 - RNA, 19 nt, Homo sapiens
  misc_RNA (1)...(19): siRNA sense strand
acaaagacucuguguggca

SEQ ID NO: 2611008 - RNA, 19 nt, Homo sapiens
  misc_RNA (1)...(19): siRNA sense strand
cguuaauuucugaacauga

SEQ ID NO: 2611009 - RNA, 19 nt, Homo sapiens
  misc_RNA (1)...(19): siRNA sense strand
gggaaguccuaaaagccaa

SEQ ID NO: 2611010 - RNA, 19 nt, Homo sapiens
  misc_RNA (1)...(19): siRNA sense strand
caccaaaggaaauaaggau

SEQ ID NO: 2611011 - RNA, 19 nt, Homo sapiens
  misc_RNA (1)...(19): siRNA sense strand
caagaauauuccuagacca

SEQ ID NO: 2611012 - RNA, 19 nt, Homo sapiens
  misc_RNA (1)...(19): siRNA sense strand
caucacauagagaggauca

SEQ ID NO: 2611013 - RNA, 19 nt, Homo sapiens
  misc_RNA (1)...(19): siRNA sense strand
ugguggaaauggaugacuu

SEQ ID NO: 2611014 - RNA, 19 nt, Homo sapiens
  misc_RNA (1)...(19): siRNA sense strand
agaauuaagcugggaagau

SEQ ID NO: 2611015 - RNA, 19 nt, Homo sapiens
  misc_RNA (1)...(19): siRNA sense strand
guagaaaacauuggaggaa

SEQ ID NO: 2611016 - RNA, 19 nt, Homo sapiens
  misc_RNA (1)...(19): siRNA sense strand
acaugaaauuggaagcugu

SEQ ID NO: 2611017 - RNA, 19 nt, Homo sapiens
  misc_RNA (1)...(19): siRNA sense strand
ccgagcacgaguauauaaa

SEQ ID NO: 2611018 - RNA, 19 nt, Homo sapiens
  misc_RNA (1)...(19): siRNA sense strand
agccaaauauaaaggaaag

SEQ ID NO: 2611019 - RNA, 19 nt, Homo sapiens
  misc_RNA (1)...(19): siRNA sense strand
ggguggugugagcagaaua

SEQ ID NO: 2611020 - RNA, 19 nt, Homo sapiens
  misc_RNA (1)...(19): siRNA sense strand
gcuacguuaugaaggacuu

SEQ ID NO: 2611021 - RNA, 19 nt, Homo sapiens
  misc_RNA (1)...(19): siRNA sense strand
cuuacaaagaccaaauaca

SEQ ID NO: 2611022 - RNA, 19 nt, Homo sapiens
  misc_RNA (1)...(19): siRNA sense strand
cugguauggaagagguaga

SEQ ID NO: 2611023 - RNA, 19 nt, Homo sapiens
  misc_RNA (1)...(19): siRNA sense strand
gcaggaugagcuacaggaa

SEQ ID NO: 2611024 - RNA, 19 nt, Homo sapiens
  misc_RNA (1)...(19): siRNA sense strand
ggaugaagcuggagguggc

SEQ ID NO: 2611025 - RNA, 19 nt, Homo sapiens
  misc_RNA (1)...(19): siRNA sense strand
ccugagaccuacuggguug

SEQ ID NO: 2611026 - RNA, 19 nt, Homo sapiens
  misc_RNA (1)...(19): siRNA sense strand
ucaacagggauaugagcuu

SEQ ID NO: 2611027 - RNA, 19 nt, Homo sapiens
  misc_RNA (1)...(19): siRNA sense strand
aaaugaagcugaguggcaa

SEQ ID NO: 2611028 - RNA, 19 nt, Homo sapiens
  misc_RNA (1)...(19): siRNA sense strand
ggacaaagacucugugugg

SEQ ID NO: 2611029 - RNA, 19 nt, Homo sapiens
  misc_RNA (1)...(19): siRNA sense strand
gcauaguaacuuagcuugu

SEQ ID NO: 2611030 - RNA, 19 nt, Homo sapiens
  misc_RNA (1)...(19): siRNA sense strand
gcuccauuagcaagaauau

SEQ ID NO: 2611031 - RNA, 19 nt, Homo sapiens
  misc_RNA (1)...(19): siRNA sense strand
acacaaagaagaugggaga

SEQ ID NO: 2611032 - RNA, 19 nt, Homo sapiens
  misc_RNA (1)...(19): siRNA sense strand
ugaucaaggcuaaggaaau

SEQ ID NO: 2611033 - RNA, 19 nt, Homo sapiens
  misc_RNA (1)...(19): siRNA sense strand
acaaagaagaugggagaau

SEQ ID NO: 2611034 - RNA, 19 nt, Homo sapiens
  misc_RNA (1)...(19): siRNA sense strand
ucacagaagaugagaccau

SEQ ID NO: 2611035 - RNA, 19 nt, Homo sapiens
  misc_RNA (1)...(19): siRNA sense strand
cuguaggaauuguagguau

SEQ ID NO: 2611036 - RNA, 19 nt, Homo sapiens
  misc_RNA (1)...(19): siRNA sense strand
uguagguauugaaaggaaa

SEQ ID NO: 2611037 - RNA, 19 nt, Homo sapiens
  misc_RNA (1)...(19): siRNA sense strand
cgucaugguaauugagcuu

SEQ ID NO: 2611038 - RNA, 19 nt, Homo sapiens
  misc_RNA (1)...(19): siRNA sense strand
cucacaaggaagaggaaau

SEQ ID NO: 2611039 - RNA, 19 nt, Homo sapiens
  misc_RNA (1)...(19): siRNA sense strand
ggaauugggaagagugcca

SEQ ID NO: 2611040 - RNA, 19 nt, Homo sapiens
  misc_RNA (1)...(19): siRNA sense strand
aauccuacuugcugagaau

SEQ ID NO: 2611041 - RNA, 19 nt, Homo sapiens
  misc_RNA (1)...(19): siRNA sense strand
aaacuaaugaucaaggcua

SEQ ID NO: 2611042 - RNA, 19 nt, Homo sapiens
  misc_RNA (1)...(19): siRNA sense strand
uaucagaggaaaugacaca

SEQ ID NO: 2611043 - RNA, 19 nt, Homo sapiens
  misc_RNA (1)...(19): siRNA sense strand
uugaaaggaaacuggaaga

SEQ ID NO: 2611044 - RNA, 19 nt, Homo sapiens
  misc_RNA (1)...(19): siRNA sense strand
auggcgaggagaagauaaa

SEQ ID NO: 2611045 - RNA, 19 nt, Homo sapiens
  misc_RNA (1)...(19): siRNA sense strand
ccuuugaagaccucagcaa

SEQ ID NO: 2611046 - RNA, 19 nt, Homo sapiens
  misc_RNA (1)...(19): siRNA sense strand
ccgugaugacucaguggaa

SEQ ID NO: 2611047 - RNA, 19 nt, Homo sapiens
  misc_RNA (1)...(19): siRNA sense strand
uauuuaugacacagagcua

SEQ ID NO: 2611048 - RNA, 19 nt, Homo sapiens
  misc_RNA (1)...(19): siRNA sense strand
uaacaaagaaccuggccca

SEQ ID NO: 2611049 - RNA, 19 nt, Homo sapiens
  misc_RNA (1)...(19): siRNA sense strand
uuguagguauugaaaggaa

SEQ ID NO: 2611050 - RNA, 19 nt, Homo sapiens
  misc_RNA (1)...(19): siRNA sense strand
cagagaaaccuacggcuca

SEQ ID NO: 2611051 - RNA, 19 nt, Homo sapiens
  misc_RNA (1)...(19): siRNA sense strand
gugccaaaauagugguuca

SEQ ID NO: 2611052 - RNA, 19 nt, Homo sapiens
  misc_RNA (1)...(19): siRNA sense strand
augaucaaggcuaaggaaa

SEQ ID NO: 2611053 - RNA, 19 nt, Homo sapiens
  misc_RNA (1)...(19): siRNA sense strand
gagaaugggaauagcuaac

SEQ ID NO: 2611054 - RNA, 19 nt, Homo sapiens
  misc_RNA (1)...(19): siRNA sense strand
ucuacgauggcgaggagaa

SEQ ID NO: 2611055 - RNA, 19 nt, Homo sapiens
  misc_RNA (1)...(19): siRNA sense strand
aagaacaggcggcuggaau

SEQ ID NO: 2611056 - RNA, 19 nt, Homo sapiens
  misc_RNA (1)...(19): siRNA sense strand
ugagaaugggaauagcuaa

SEQ ID NO: 2611057 - RNA, 19 nt, Homo sapiens
  misc_RNA (1)...(19): siRNA sense strand
ggcguuuaucagaggaaau

SEQ ID NO: 2611058 - RNA, 19 nt, Homo sapiens
  misc_RNA (1)...(19): siRNA sense strand
cugagaaugggaauagcua

SEQ ID NO: 2611059 - RNA, 19 nt, Homo sapiens
  misc_RNA (1)...(19): siRNA sense strand
caccagaagauuuagugaa

SEQ ID NO: 2611060 - RNA, 19 nt, Homo sapiens
  misc_RNA (1)...(19): siRNA sense strand
uuaaagacaaacaagguga

SEQ ID NO: 2611061 - RNA, 19 nt, Homo sapiens
  misc_RNA (1)...(19): siRNA sense strand
caguggaaggccugcguuu

SEQ ID NO: 2611062 - RNA, 19 nt, Homo sapiens
  misc_RNA (1)...(19): siRNA sense strand
aggaauuguagguauugaa

SEQ ID NO: 2611063 - RNA, 19 nt, Homo sapiens
  misc_RNA (1)...(19): siRNA sense strand
aggcuaaggaaauggugga

SEQ ID NO: 2611064 - RNA, 19 nt, Homo sapiens
  misc_RNA (1)...(19): siRNA sense strand
ugguagaaauguuggaaaa

SEQ ID NO: 2611065 - RNA, 19 nt, Homo sapiens
  misc_RNA (1)...(19): siRNA sense strand
uuggaaaagaagaggaaaa

SEQ ID NO: 2611066 - RNA, 19 nt, Homo sapiens
  misc_RNA (1)...(19): siRNA sense strand
gcucaugaaaacaggguaa

SEQ ID NO: 2611067 - RNA, 19 nt, Homo sapiens
  misc_RNA (1)...(19): siRNA sense strand
gaugcaaagaaaugggaau

SEQ ID NO: 2611068 - RNA, 19 nt, Homo sapiens
  misc_RNA (1)...(19): siRNA sense strand
ggugacaguaagaaagcaa

SEQ ID NO: 2611069 - RNA, 19 nt, Homo sapiens
  misc_RNA (1)...(19): siRNA sense strand
gccugaaauucuauggcaa

SEQ ID NO: 2611070 - RNA, 19 nt, Homo sapiens
  misc_RNA (1)...(19): siRNA sense strand
uuuaaucaguggagcggaa

SEQ ID NO: 2611071 - RNA, 19 nt, Homo sapiens
  misc_RNA (1)...(19): siRNA sense strand
acaaaguggcagacaugaa

SEQ ID NO: 2611072 - RNA, 19 nt, Homo sapiens
  misc_RNA (1)...(19): siRNA sense strand
gaaauaaacacuaaugcca

SEQ ID NO: 2611073 - RNA, 19 nt, Homo sapiens
  misc_RNA (1)...(19): siRNA sense strand
ugggaaugccugaagucaa

SEQ ID NO: 2611074 - RNA, 19 nt, Homo sapiens
  misc_RNA (1)...(19): siRNA sense strand
guggaaucuuguagaagga

SEQ ID NO: 2611075 - RNA, 19 nt, Homo sapiens
  misc_RNA (1)...(19): siRNA sense strand
ucaaccaagaagaggaaaa

SEQ ID NO: 2611076 - RNA, 19 nt, Homo sapiens
  misc_RNA (1)...(19): siRNA sense strand
cgguuuaacaggugacagu

SEQ ID NO: 2611077 - RNA, 19 nt, Homo sapiens
  misc_RNA (1)...(19): siRNA sense strand
agaggaaaaugguagaaau

SEQ ID NO: 2611078 - RNA, 19 nt, Homo sapiens
  misc_RNA (1)...(19): siRNA sense strand
aguaaagaacaguccaaaa

SEQ ID NO: 2611079 - RNA, 19 nt, Homo sapiens
  misc_RNA (1)...(19): siRNA sense strand
gucgguugguacagauaaa

SEQ ID NO: 2611080 - RNA, 19 nt, Homo sapiens
  misc_RNA (1)...(19): siRNA sense strand
uggaguguggcuagacaaa

SEQ ID NO: 2611081 - RNA, 19 nt, Homo sapiens
  misc_RNA (1)...(19): siRNA sense strand
ggcuagacaaaguggcaga

SEQ ID NO: 2611082 - RNA, 19 nt, Homo sapiens
  misc_RNA (1)...(19): siRNA sense strand
uugaaauuccagagcauca

SEQ ID NO: 2611083 - RNA, 19 nt, Homo sapiens
  misc_RNA (1)...(19): siRNA sense strand
ccaucuuuacucugugaaa

SEQ ID NO: 2611084 - RNA, 19 nt, Homo sapiens
  misc_RNA (1)...(19): siRNA sense strand
caguaagaaagcaacaaaa

SEQ ID NO: 2611085 - RNA, 19 nt, Homo sapiens
  misc_RNA (1)...(19): siRNA sense strand
ugacaguaagaaagcaaca

SEQ ID NO: 2611086 - RNA, 19 nt, Homo sapiens
  misc_RNA (1)...(19): siRNA sense strand
cuguacacccggagcccaa

SEQ ID NO: 2611087 - RNA, 19 nt, Homo sapiens
  misc_RNA (1)...(19): siRNA sense strand
cuggagaugaagaaguuau

SEQ ID NO: 2611088 - RNA, 19 nt, Homo sapiens
  misc_RNA (1)...(19): siRNA sense strand
uguggaagcuuaagcagga

SEQ ID NO: 2611089 - RNA, 19 nt, Homo sapiens
  misc_RNA (1)...(19): siRNA sense strand
gguacaauaacuugccuga

SEQ ID NO: 2611090 - RNA, 19 nt, Homo sapiens
  misc_RNA (1)...(19): siRNA sense strand
acuuuaagaacguggaauc

SEQ ID NO: 2611091 - RNA, 19 nt, Homo sapiens
  misc_RNA (1)...(19): siRNA sense strand
aucaaaauguggaagcuua

SEQ ID NO: 2611092 - RNA, 19 nt, Homo sapiens
  misc_RNA (1)...(19): siRNA sense strand
ucaaaauguggaagcuuaa

SEQ ID NO: 2611093 - RNA, 19 nt, Homo sapiens
  misc_RNA (1)...(19): siRNA sense strand
gaaaacaggguaaaggaca

SEQ ID NO: 2611094 - RNA, 19 nt, Homo sapiens
  misc_RNA (1)...(19): siRNA sense strand
aaaacaggguaaaggacau

SEQ ID NO: 2611095 - RNA, 19 nt, Homo sapiens
  misc_RNA (1)...(19): siRNA sense strand
uaaguaaagaacaguccaa

SEQ ID NO: 2611096 - RNA, 19 nt, Homo sapiens
  misc_RNA (1)...(19): siRNA sense strand
gggcagaaggaaagaagaa

SEQ ID NO: 2611097 - RNA, 19 nt, Homo sapiens
  misc_RNA (1)...(19): siRNA sense strand
gggccagcuuugaggauaa

SEQ ID NO: 2611098 - RNA, 19 nt, Homo sapiens
  misc_RNA (1)...(19): siRNA sense strand
cagaagaaacacagaaaga

SEQ ID NO: 2611099 - RNA, 19 nt, Homo sapiens
  misc_RNA (1)...(19): siRNA sense strand
gggacgugcacaagggaaa

SEQ ID NO: 2611100 - RNA, 19 nt, Homo sapiens
  misc_RNA (1)...(19): siRNA sense strand
aagcagaagaggaggaaaa

SEQ ID NO: 2611101 - RNA, 19 nt, Homo sapiens
  misc_RNA (1)...(19): siRNA sense strand
ucgaacagucagugggaua

SEQ ID NO: 2611102 - RNA, 19 nt, Homo sapiens
  misc_RNA (1)...(19): siRNA sense strand
ugaugaaagcagugaagaa

SEQ ID NO: 2611103 - RNA, 19 nt, Homo sapiens
  misc_RNA (1)...(19): siRNA sense strand
guuuaaaugagaaggagaa

SEQ ID NO: 2611104 - RNA, 19 nt, Homo sapiens
  misc_RNA (1)...(19): siRNA sense strand
gggcaucaaacgacggaaa

SEQ ID NO: 2611105 - RNA, 19 nt, Homo sapiens
  misc_RNA (1)...(19): siRNA sense strand
cagaauaugaugaaggaga

SEQ ID NO: 2611106 - RNA, 19 nt, Homo sapiens
  misc_RNA (1)...(19): siRNA sense strand
augaagaggcuauuagaaa

SEQ ID NO: 2611107 - RNA, 19 nt, Homo sapiens
  misc_RNA (1)...(19): siRNA sense strand
ggaagaagacucagaaaau

SEQ ID NO: 2611108 - RNA, 19 nt, Homo sapiens
  misc_RNA (1)...(19): siRNA sense strand
aggcuaaggaccagaagaa

SEQ ID NO: 2611109 - RNA, 19 nt, Homo sapiens
  misc_RNA (1)...(19): siRNA sense strand
gaaaccagugggugagaaa

SEQ ID NO: 2611110 - RNA, 19 nt, Homo sapiens
  misc_RNA (1)...(19): siRNA sense strand
gaucaaaggcugcuggaga

SEQ ID NO: 2611111 - RNA, 19 nt, Homo sapiens
  misc_RNA (1)...(19): siRNA sense strand
gugcauagucagaagauga

SEQ ID NO: 2611112 - RNA, 19 nt, Homo sapiens
  misc_RNA (1)...(19): siRNA sense strand
cagaaggaccucaggaaga

SEQ ID NO: 2611113 - RNA, 19 nt, Homo sapiens
  misc_RNA (1)...(19): siRNA sense strand
ugaugagaccagugauaua

SEQ ID NO: 2611114 - RNA, 19 nt, Homo sapiens
  misc_RNA (1)...(19): siRNA sense strand
agagaaagaaguuaaggaa

SEQ ID NO: 2611115 - RNA, 19 nt, Homo sapiens
  misc_RNA (1)...(19): siRNA sense strand
gcaucagacuaaaggcgaa

SEQ ID NO: 2611116 - RNA, 19 nt, Homo sapiens
  misc_RNA (1)...(19): siRNA sense strand
aagccaauccugaggcaaa

SEQ ID NO: 2611117 - RNA, 19 nt, Homo sapiens
  misc_RNA (1)...(19): siRNA sense strand
acucaggauuugaagacaa

SEQ ID NO: 2611118 - RNA, 19 nt, Homo sapiens
  misc_RNA (1)...(19): siRNA sense strand
gggauuuagaggagguuau

SEQ ID NO: 2611119 - RNA, 19 nt, Homo sapiens
  misc_RNA (1)...(19): siRNA sense strand
cagaagaugaggagcucua

SEQ ID NO: 2611120 - RNA, 19 nt, Homo sapiens
  misc_RNA (1)...(19): siRNA sense strand
caauagugguaguggugau

SEQ ID NO: 2611121 - RNA, 19 nt, Homo sapiens
  misc_RNA (1)...(19): siRNA sense strand
aagacaaagaagcgauuaa

SEQ ID NO: 2611122 - RNA, 19 nt, Homo sapiens
  misc_RNA (1)...(19): siRNA sense strand
uauagauaaucaagggcua

SEQ ID NO: 2611123 - RNA, 19 nt, Homo sapiens
  misc_RNA (1)...(19): siRNA sense strand
cagaagauaaugaagaaga

SEQ ID NO: 2611124 - RNA, 19 nt, Homo sapiens
  misc_RNA (1)...(19): siRNA sense strand
gugaauuugugcagaacuu

SEQ ID NO: 2611125 - RNA, 19 nt, Homo sapiens
  misc_RNA (1)...(19): siRNA sense strand
gaagaaagugccaagaaaa

SEQ ID NO: 2611126 - RNA, 19 nt, Homo sapiens
  misc_RNA (1)...(19): siRNA sense strand
uguugaaaccaguggguga

SEQ ID NO: 2611127 - RNA, 19 nt, Homo sapiens
  misc_RNA (1)...(19): siRNA sense strand
caacugaagaagacaaaga

SEQ ID NO: 2611128 - RNA, 19 nt, Homo sapiens
  misc_RNA (1)...(19): siRNA sense strand
gggucagaggauauagaua

SEQ ID NO: 2611129 - RNA, 19 nt, Homo sapiens
  misc_RNA (1)...(19): siRNA sense strand
ugacagaagauaaugaaga

SEQ ID NO: 2611130 - RNA, 19 nt, Homo sapiens
  misc_RNA (1)...(19): siRNA sense strand
gcccauggcaucagacuaa

SEQ ID NO: 2611131 - RNA, 19 nt, Homo sapiens
  misc_RNA (1)...(19): siRNA sense strand
gcugaaucgcgcagaauuu

SEQ ID NO: 2611132 - RNA, 19 nt, Homo sapiens
  misc_RNA (1)...(19): siRNA sense strand
ggaacugguuucuuggcaa

SEQ ID NO: 2611133 - RNA, 19 nt, Homo sapiens
  misc_RNA (1)...(19): siRNA sense strand
acucaaagaggaagaagau

SEQ ID NO: 2611134 - RNA, 19 nt, Homo sapiens
  misc_RNA (1)...(19): siRNA sense strand
ccugugaauuugugcagaa

SEQ ID NO: 2611135 - RNA, 19 nt, Homo sapiens
  misc_RNA (1)...(19): siRNA sense strand
ccagagugaccgugugaau

SEQ ID NO: 2611136 - RNA, 19 nt, Homo sapiens
  misc_RNA (1)...(19): siRNA sense strand
cagaaaaugaagaggcuau

SEQ ID NO: 2611137 - RNA, 19 nt, Homo sapiens
  misc_RNA (1)...(19): siRNA sense strand
agugagcaguggucagaaa

SEQ ID NO: 2611138 - RNA, 19 nt, Homo sapiens
  misc_RNA (1)...(19): siRNA sense strand
ggaagaugauaaagaugca

SEQ ID NO: 2611139 - RNA, 19 nt, Homo sapiens
  misc_RNA (1)...(19): siRNA sense strand
cuucaagcauaauaagcaa

SEQ ID NO: 2611140 - RNA, 19 nt, Homo sapiens
  misc_RNA (1)...(19): siRNA sense strand
uggagauagugaugaugaa

SEQ ID NO: 2611141 - RNA, 19 nt, Homo sapiens
  misc_RNA (1)...(19): siRNA sense strand
gcuaggagacgaagaagau

SEQ ID NO: 2611142 - RNA, 19 nt, Homo sapiens
  misc_RNA (1)...(19): siRNA sense strand
gaauaugaugaaggagaaa

SEQ ID NO: 2611143 - RNA, 19 nt, Homo sapiens
  misc_RNA (1)...(19): siRNA sense strand
aggagaagcugaagcggca

SEQ ID NO: 2611144 - RNA, 19 nt, Homo sapiens
  misc_RNA (1)...(19): siRNA sense strand
gaggaagaagacucagaaa

SEQ ID NO: 2611145 - RNA, 19 nt, Homo sapiens
  misc_RNA (1)...(19): siRNA sense strand
ugaagaggcuauuagaaaa

SEQ ID NO: 2611146 - RNA, 19 nt, Homo sapiens
  misc_RNA (1)...(19): siRNA sense strand
cagccaaggucuuagcaga

SEQ ID NO: 2611147 - RNA, 19 nt, Homo sapiens
  misc_RNA (1)...(19): siRNA sense strand
agagaaaauugaaggagau

SEQ ID NO: 2611148 - RNA, 19 nt, Homo sapiens
  misc_RNA (1)...(19): siRNA sense strand
ugaagaaggccaaggagca

SEQ ID NO: 2611149 - RNA, 19 nt, Homo sapiens
  misc_RNA (1)...(19): siRNA sense strand
augaagaagaagaugauga

SEQ ID NO: 2611150 - RNA, 19 nt, Homo sapiens
  misc_RNA (1)...(19): siRNA sense strand
gaguucaguaugaggguuu

SEQ ID NO: 2611151 - RNA, 19 nt, Homo sapiens
  misc_RNA (1)...(19): siRNA sense strand
cauaauaagcaacugaaga

SEQ ID NO: 2611152 - RNA, 19 nt, Homo sapiens
  misc_RNA (1)...(19): siRNA sense strand
cuaaggaccagaagaaaca

SEQ ID NO: 2611153 - RNA, 19 nt, Homo sapiens
  misc_RNA (1)...(19): siRNA sense strand
ugaugaucuuaaaggagaa

SEQ ID NO: 2611154 - RNA, 19 nt, Homo sapiens
  misc_RNA (1)...(19): siRNA sense strand
auuugaaggugcugugauu

SEQ ID NO: 2611155 - RNA, 19 nt, Homo sapiens
  misc_RNA (1)...(19): siRNA sense strand
cuggaauggugcauggaga

SEQ ID NO: 2611156 - RNA, 19 nt, Homo sapiens
  misc_RNA (1)...(19): siRNA sense strand
aucaaaggcugcuggagaa

SEQ ID NO: 2611157 - RNA, 19 nt, Homo sapiens
  misc_RNA (1)...(19): siRNA sense strand
uggagaagguaguaaagca

SEQ ID NO: 2611158 - RNA, 19 nt, Homo sapiens
  misc_RNA (1)...(19): siRNA sense strand
aggaagaagacucagaaaa

SEQ ID NO: 2611159 - RNA, 19 nt, Homo sapiens
  misc_RNA (1)...(19): siRNA sense strand
acagagaguguaagcacaa

SEQ ID NO: 2611160 - RNA, 19 nt, Homo sapiens
  misc_RNA (1)...(19): siRNA sense strand
augaacaguaucagagauu

SEQ ID NO: 2611161 - RNA, 19 nt, Homo sapiens
  misc_RNA (1)...(19): siRNA sense strand
gguucuggacggaaguuua

SEQ ID NO: 2611162 - RNA, 19 nt, Homo sapiens
  misc_RNA (1)...(19): siRNA sense strand
uggaauggugcauggagaa

SEQ ID NO: 2611163 - RNA, 19 nt, Homo sapiens
  misc_RNA (1)...(19): siRNA sense strand
cggcucuagugaugaggaa

SEQ ID NO: 2611164 - RNA, 19 nt, Homo sapiens
  misc_RNA (1)...(19): siRNA sense strand
augaaaugucugaagauga

SEQ ID NO: 2611165 - RNA, 19 nt, Homo sapiens
  misc_RNA (1)...(19): siRNA sense strand
gggaagaacaaaugggaga

SEQ ID NO: 2611166 - RNA, 19 nt, Homo sapiens
  misc_RNA (1)...(19): siRNA sense strand
acaacaucgaugagggcaa

SEQ ID NO: 2611167 - RNA, 19 nt, Homo sapiens
  misc_RNA (1)...(19): siRNA sense strand
cccugaaggucguggagau

SEQ ID NO: 2611168 - RNA, 19 nt, Homo sapiens
  misc_RNA (1)...(19): siRNA sense strand
cugaaggacaugugggugu

SEQ ID NO: 2611169 - RNA, 19 nt, Homo sapiens
  misc_RNA (1)...(19): siRNA sense strand
uggacugcuucgaggucua

SEQ ID NO: 2611170 - RNA, 19 nt, Homo sapiens
  misc_RNA (1)...(19): siRNA sense strand
augacaugcugaaggacau

SEQ ID NO: 2611171 - RNA, 19 nt, Homo sapiens
  misc_RNA (1)...(19): siRNA sense strand
aguccaaguacgcggucaa

SEQ ID NO: 2611172 - RNA, 19 nt, Homo sapiens
  misc_RNA (1)...(19): siRNA sense strand
gggaagcggaucaugguga

SEQ ID NO: 2611173 - RNA, 19 nt, Homo sapiens
  misc_RNA (1)...(19): siRNA sense strand
ccuucgaggucuuugacau

SEQ ID NO: 2611174 - RNA, 19 nt, Homo sapiens
  misc_RNA (1)...(19): siRNA sense strand
gcuccagcauagucgucaa

SEQ ID NO: 2611175 - RNA, 19 nt, Homo sapiens
  misc_RNA (1)...(19): siRNA sense strand
aaguggaagaagaggagca

SEQ ID NO: 2611176 - RNA, 19 nt, Homo sapiens
  misc_RNA (1)...(19): siRNA sense strand
uuguagaagaacugggaaa

SEQ ID NO: 2611177 - RNA, 19 nt, Homo sapiens
  misc_RNA (1)...(19): siRNA sense strand
agucuauggcagagaauuu

SEQ ID NO: 2611178 - RNA, 19 nt, Homo sapiens
  misc_RNA (1)...(19): siRNA sense strand
gaaaagaauacaaaggcaa

SEQ ID NO: 2611179 - RNA, 19 nt, Homo sapiens
  misc_RNA (1)...(19): siRNA sense strand
ggaaaagaauacaaaggca

SEQ ID NO: 2611180 - RNA, 19 nt, Homo sapiens
  misc_RNA (1)...(19): siRNA sense strand
auguauuggaugaacgaau

SEQ ID NO: 2611181 - RNA, 19 nt, Homo sapiens
  misc_RNA (1)...(19): siRNA sense strand
aggaugaacuggaggaagc

SEQ ID NO: 2611182 - RNA, 19 nt, Homo sapiens
  misc_RNA (1)...(19): siRNA sense strand
aauugaagucuauggcaga

SEQ ID NO: 2611183 - RNA, 19 nt, Homo sapiens
  misc_RNA (1)...(19): siRNA sense strand
ucaauggagccgagcccaa

SEQ ID NO: 2611184 - RNA, 19 nt, Homo sapiens
  misc_RNA (1)...(19): siRNA sense strand
agcaagagcuggagcgaga

SEQ ID NO: 2611185 - RNA, 19 nt, Homo sapiens
  misc_RNA (1)...(19): siRNA sense strand
agguggaugaagagagaua

SEQ ID NO: 2611186 - RNA, 19 nt, Homo sapiens
  misc_RNA (1)...(19): siRNA sense strand
ggaagaacaucgaugcacu

SEQ ID NO: 2611187 - RNA, 19 nt, Homo sapiens
  misc_RNA (1)...(19): siRNA sense strand
guguggacaagguggauga

SEQ ID NO: 2611188 - RNA, 19 nt, Homo sapiens
  misc_RNA (1)...(19): siRNA sense strand
gaugaagagagauacgaca

SEQ ID NO: 2611189 - RNA, 19 nt, Homo sapiens
  misc_RNA (1)...(19): siRNA sense strand
accaagaacaucacggaga

SEQ ID NO: 2611190 - RNA, 19 nt, Homo sapiens
  misc_RNA (1)...(19): siRNA sense strand
gagauacgacauagaggca

SEQ ID NO: 2611191 - RNA, 19 nt, Homo sapiens
  misc_RNA (1)...(19): siRNA sense strand
uguuaauccuggagccaau

SEQ ID NO: 2611192 - RNA, 19 nt, Homo sapiens
  misc_RNA (1)...(19): siRNA sense strand
aagugaugguuuaaggcaa

SEQ ID NO: 2611193 - RNA, 19 nt, Homo sapiens
  misc_RNA (1)...(19): siRNA sense strand
gguuuaaggcaaagggaag

SEQ ID NO: 2611194 - RNA, 19 nt, Homo sapiens
  misc_RNA (1)...(19): siRNA sense strand
gggauguacuagauggcga

SEQ ID NO: 2611195 - RNA, 19 nt, Homo sapiens
  misc_RNA (1)...(19): siRNA sense strand
ugguuuaaggcaaagggaa

SEQ ID NO: 2611196 - RNA, 19 nt, Homo sapiens
  misc_RNA (1)...(19): siRNA sense strand
guuaauuuauucugggaag

SEQ ID NO: 2611197 - RNA, 19 nt, Homo sapiens
  misc_RNA (1)...(19): siRNA sense strand
ugccagaaaucaacgccaa

SEQ ID NO: 2611198 - RNA, 19 nt, Homo sapiens
  misc_RNA (1)...(19): siRNA sense strand
gguuaauuuauucugggaa

SEQ ID NO: 2611199 - RNA, 19 nt, Homo sapiens
  misc_RNA (1)...(19): siRNA sense strand
gugaaauuaaggagagaau

SEQ ID NO: 2611200 - RNA, 19 nt, Homo sapiens
  misc_RNA (1)...(19): siRNA sense strand
aggcaaagaagauggaaga

SEQ ID NO: 2611201 - RNA, 19 nt, Homo sapiens
  misc_RNA (1)...(19): siRNA sense strand
aggcagaggaagaguucaa

SEQ ID NO: 2611202 - RNA, 19 nt, Homo sapiens
  misc_RNA (1)...(19): siRNA sense strand
agaugaacgauuugaacaa

SEQ ID NO: 2611203 - RNA, 19 nt, Homo sapiens
  misc_RNA (1)...(19): siRNA sense strand
ccuugaagagugagaguga

SEQ ID NO: 2611204 - RNA, 19 nt, Homo sapiens
  misc_RNA (1)...(19): siRNA sense strand
cuguaaggaccauggaaau

SEQ ID NO: 2611205 - RNA, 19 nt, Homo sapiens
  misc_RNA (1)...(19): siRNA sense strand
aggaggaaauagagaagga

SEQ ID NO: 2611206 - RNA, 19 nt, Homo sapiens
  misc_RNA (1)...(19): siRNA sense strand
gggaaaugagcaagcugaa

SEQ ID NO: 2611207 - RNA, 19 nt, Homo sapiens
  misc_RNA (1)...(19): siRNA sense strand
aagugaaggaucugaacaa

SEQ ID NO: 2611208 - RNA, 19 nt, Homo sapiens
  misc_RNA (1)...(19): siRNA sense strand
uguacaaggaccugaagaa

SEQ ID NO: 2611209 - RNA, 19 nt, Homo sapiens
  misc_RNA (1)...(19): siRNA sense strand
agauggaagacaaggaaaa

SEQ ID NO: 2611210 - RNA, 19 nt, Homo sapiens
  misc_RNA (1)...(19): siRNA sense strand
aagacaaggaaaaggauaa

SEQ ID NO: 2611211 - RNA, 19 nt, Homo sapiens
  misc_RNA (1)...(19): siRNA sense strand
uugaagagugagagugaau

SEQ ID NO: 2611212 - RNA, 19 nt, Homo sapiens
  misc_RNA (1)...(19): siRNA sense strand
aagacaauucugagaucaa

SEQ ID NO: 2611213 - RNA, 19 nt, Homo sapiens
  misc_RNA (1)...(19): siRNA sense strand
cuggagaggcaaagaagau

SEQ ID NO: 2611214 - RNA, 19 nt, Homo sapiens
  misc_RNA (1)...(19): siRNA sense strand
ucgccaagcaggugcagaa

SEQ ID NO: 2611215 - RNA, 19 nt, Homo sapiens
  misc_RNA (1)...(19): siRNA sense strand
ccaccagagaagccaguaa

SEQ ID NO: 2611216 - RNA, 19 nt, Homo sapiens
  misc_RNA (1)...(19): siRNA sense strand
cuguagaaaccaaagauga

SEQ ID NO: 2611217 - RNA, 19 nt, Homo sapiens
  misc_RNA (1)...(19): siRNA sense strand
gcaaacuggagaagcaaca

SEQ ID NO: 2611218 - RNA, 19 nt, Homo sapiens
  misc_RNA (1)...(19): siRNA sense strand
caaccaaagaagagagccu

SEQ ID NO: 2611219 - RNA, 19 nt, Homo sapiens
  misc_RNA (1)...(19): siRNA sense strand
agaucugaaccaagaacua

SEQ ID NO: 2611220 - RNA, 19 nt, Homo sapiens
  misc_RNA (1)...(19): siRNA sense strand
cuuccuuagugcagucaaa

SEQ ID NO: 2611221 - RNA, 19 nt, Homo sapiens
  misc_RNA (1)...(19): siRNA sense strand
cagugaaauuaaggagaga

SEQ ID NO: 2611222 - RNA, 19 nt, Homo sapiens
  misc_RNA (1)...(19): siRNA sense strand
ucuacagggaaaugagcaa

SEQ ID NO: 2611223 - RNA, 19 nt, Homo sapiens
  misc_RNA (1)...(19): siRNA sense strand
ucagaaacccugcaggaga

SEQ ID NO: 2611224 - RNA, 19 nt, Homo sapiens
  misc_RNA (1)...(19): siRNA sense strand
aggccaaagaaaaugaaaa

SEQ ID NO: 2611225 - RNA, 19 nt, Homo sapiens
  misc_RNA (1)...(19): siRNA sense strand
augaggagcugaaggccau

SEQ ID NO: 2611226 - RNA, 19 nt, Homo sapiens
  misc_RNA (1)...(19): siRNA sense strand
aaauagagaaggaaggauc

SEQ ID NO: 2611227 - RNA, 19 nt, Homo sapiens
  misc_RNA (1)...(19): siRNA sense strand
gaagacaaggaaaaggaua

SEQ ID NO: 2611228 - RNA, 19 nt, Homo sapiens
  misc_RNA (1)...(19): siRNA sense strand
aggagaaacuggcugacca

SEQ ID NO: 2611229 - RNA, 19 nt, Homo sapiens
  misc_RNA (1)...(19): siRNA sense strand
aagaggaggaaauagagaa

SEQ ID NO: 2611230 - RNA, 19 nt, Homo sapiens
  misc_RNA (1)...(19): siRNA sense strand
ggggaaagcuguagaaacc

SEQ ID NO: 2611231 - RNA, 19 nt, Homo sapiens
  misc_RNA (1)...(19): siRNA sense strand
acuccugaggccaaagaaa

SEQ ID NO: 2611232 - RNA, 19 nt, Homo sapiens
  misc_RNA (1)...(19): siRNA sense strand
aagacuacgaggagaaacu

SEQ ID NO: 2611233 - RNA, 19 nt, Homo sapiens
  misc_RNA (1)...(19): siRNA sense strand
aagauggaagacaaggaaa

SEQ ID NO: 2611234 - RNA, 19 nt, Homo sapiens
  misc_RNA (1)...(19): siRNA sense strand
ccugaagaacuuuguacuu

SEQ ID NO: 2611235 - RNA, 19 nt, Homo sapiens
  misc_RNA (1)...(19): siRNA sense strand
ggacuaugacagugcccga

SEQ ID NO: 2611236 - RNA, 19 nt, Homo sapiens
  misc_RNA (1)...(19): siRNA sense strand
ucaacaaagcccagacugu

SEQ ID NO: 2611237 - RNA, 19 nt, Homo sapiens
  misc_RNA (1)...(19): siRNA sense strand
gagcaaacuggagaagcaa

SEQ ID NO: 2611238 - RNA, 19 nt, Homo sapiens
  misc_RNA (1)...(19): siRNA sense strand
caacauuccaauaaagucu

SEQ ID NO: 2611239 - RNA, 19 nt, Homo sapiens
  misc_RNA (1)...(19): siRNA sense strand
uaagaacuccugaggccaa

SEQ ID NO: 2611240 - RNA, 19 nt, Homo sapiens
  misc_RNA (1)...(19): siRNA sense strand
gugaaauuaaggagagaau

SEQ ID NO: 2611241 - RNA, 19 nt, Homo sapiens
  misc_RNA (1)...(19): siRNA sense strand
aggcaaagaagauggaaga

SEQ ID NO: 2611242 - RNA, 19 nt, Homo sapiens
  misc_RNA (1)...(19): siRNA sense strand
aggcagaggaagaguucaa

SEQ ID NO: 2611243 - RNA, 19 nt, Homo sapiens
  misc_RNA (1)...(19): siRNA sense strand
agaugaacgauuugaacaa

SEQ ID NO: 2611244 - RNA, 19 nt, Homo sapiens
  misc_RNA (1)...(19): siRNA sense strand
ccuugaagagugagaguga

SEQ ID NO: 2611245 - RNA, 19 nt, Homo sapiens
  misc_RNA (1)...(19): siRNA sense strand
cuguaaggaccauggaaau

SEQ ID NO: 2611246 - RNA, 19 nt, Homo sapiens
  misc_RNA (1)...(19): siRNA sense strand
aggaggaaauagagaagga

SEQ ID NO: 2611247 - RNA, 19 nt, Homo sapiens
  misc_RNA (1)...(19): siRNA sense strand
gggaaaugagcaagcugaa

SEQ ID NO: 2611248 - RNA, 19 nt, Homo sapiens
  misc_RNA (1)...(19): siRNA sense strand
aagugaaggaucugaacaa

SEQ ID NO: 2611249 - RNA, 19 nt, Homo sapiens
  misc_RNA (1)...(19): siRNA sense strand
uguacaaggaccugaagaa

SEQ ID NO: 2611250 - RNA, 19 nt, Homo sapiens
  misc_RNA (1)...(19): siRNA sense strand
agauggaagacaaggaaaa

SEQ ID NO: 2611251 - RNA, 19 nt, Homo sapiens
  misc_RNA (1)...(19): siRNA sense strand
aagacaaggaaaaggauaa

SEQ ID NO: 2611252 - RNA, 19 nt, Homo sapiens
  misc_RNA (1)...(19): siRNA sense strand
uugaagagugagagugaau

SEQ ID NO: 2611253 - RNA, 19 nt, Homo sapiens
  misc_RNA (1)...(19): siRNA sense strand
aagacaauucugagaucaa

SEQ ID NO: 2611254 - RNA, 19 nt, Homo sapiens
  misc_RNA (1)...(19): siRNA sense strand
cuggagaggcaaagaagau

SEQ ID NO: 2611255 - RNA, 19 nt, Homo sapiens
  misc_RNA (1)...(19): siRNA sense strand
ucgccaagcaggugcagaa

SEQ ID NO: 2611256 - RNA, 19 nt, Homo sapiens
  misc_RNA (1)...(19): siRNA sense strand
ccaccagagaagccaguaa

SEQ ID NO: 2611257 - RNA, 19 nt, Homo sapiens
  misc_RNA (1)...(19): siRNA sense strand
cuguagaaaccaaagauga

SEQ ID NO: 2611258 - RNA, 19 nt, Homo sapiens
  misc_RNA (1)...(19): siRNA sense strand
gcaaacuggagaagcaaca

SEQ ID NO: 2611259 - RNA, 19 nt, Homo sapiens
  misc_RNA (1)...(19): siRNA sense strand
caaccaaagaagagagccu

SEQ ID NO: 2611260 - RNA, 19 nt, Homo sapiens
  misc_RNA (1)...(19): siRNA sense strand
agaucugaaccaagaacua

SEQ ID NO: 2611261 - RNA, 19 nt, Homo sapiens
  misc_RNA (1)...(19): siRNA sense strand
cuuccuuagugcagucaaa

SEQ ID NO: 2611262 - RNA, 19 nt, Homo sapiens
  misc_RNA (1)...(19): siRNA sense strand
cagugaaauuaaggagaga

SEQ ID NO: 2611263 - RNA, 19 nt, Homo sapiens
  misc_RNA (1)...(19): siRNA sense strand
ucuacagggaaaugagcaa

SEQ ID NO: 2611264 - RNA, 19 nt, Homo sapiens
  misc_RNA (1)...(19): siRNA sense strand
ucagaaacccugcaggaga

SEQ ID NO: 2611265 - RNA, 19 nt, Homo sapiens
  misc_RNA (1)...(19): siRNA sense strand
aggccaaagaaaaugaaaa

SEQ ID NO: 2611266 - RNA, 19 nt, Homo sapiens
  misc_RNA (1)...(19): siRNA sense strand
augaggagcugaaggccau

SEQ ID NO: 2611267 - RNA, 19 nt, Homo sapiens
  misc_RNA (1)...(19): siRNA sense strand
aaauagagaaggaaggauc

SEQ ID NO: 2611268 - RNA, 19 nt, Homo sapiens
  misc_RNA (1)...(19): siRNA sense strand
gaagacaaggaaaaggaua

SEQ ID NO: 2611269 - RNA, 19 nt, Homo sapiens
  misc_RNA (1)...(19): siRNA sense strand
aggagaaacuggcugacca

SEQ ID NO: 2611270 - RNA, 19 nt, Homo sapiens
  misc_RNA (1)...(19): siRNA sense strand
aagaggaggaaauagagaa

SEQ ID NO: 2611271 - RNA, 19 nt, Homo sapiens
  misc_RNA (1)...(19): siRNA sense strand
ggggaaagcuguagaaacc

SEQ ID NO: 2611272 - RNA, 19 nt, Homo sapiens
  misc_RNA (1)...(19): siRNA sense strand
acuccugaggccaaagaaa

SEQ ID NO: 2611273 - RNA, 19 nt, Homo sapiens
  misc_RNA (1)...(19): siRNA sense strand
aagacuacgaggagaaacu

SEQ ID NO: 2611274 - RNA, 19 nt, Homo sapiens
  misc_RNA (1)...(19): siRNA sense strand
aagauggaagacaaggaaa

SEQ ID NO: 2611275 - RNA, 19 nt, Homo sapiens
  misc_RNA (1)...(19): siRNA sense strand
ccugaagaacuuuguacuu

SEQ ID NO: 2611276 - RNA, 19 nt, Homo sapiens
  misc_RNA (1)...(19): siRNA sense strand
ggacuaugacagugcccga

SEQ ID NO: 2611277 - RNA, 19 nt, Homo sapiens
  misc_RNA (1)...(19): siRNA sense strand
ucaacaaagcccagacugu

SEQ ID NO: 2611278 - RNA, 19 nt, Homo sapiens
  misc_RNA (1)...(19): siRNA sense strand
gagcaaacuggagaagcaa

SEQ ID NO: 2611279 - RNA, 19 nt, Homo sapiens
  misc_RNA (1)...(19): siRNA sense strand
caacauuccaauaaagucu

SEQ ID NO: 2611280 - RNA, 19 nt, Homo sapiens
  misc_RNA (1)...(19): siRNA sense strand
uaagaacuccugaggccaa

SEQ ID NO: 2611281 - RNA, 19 nt, Homo sapiens
  misc_RNA (1)...(19): siRNA sense strand
acaucuagacuaagagaaa

SEQ ID NO: 2611282 - RNA, 19 nt, Homo sapiens
  misc_RNA (1)...(19): siRNA sense strand
aggaaaugcaagaggugau

SEQ ID NO: 2611283 - RNA, 19 nt, Homo sapiens
  misc_RNA (1)...(19): siRNA sense strand
ugucaagcagagaaggaaa

SEQ ID NO: 2611284 - RNA, 19 nt, Homo sapiens
  misc_RNA (1)...(19): siRNA sense strand
ucaaagaugugcaggagca

SEQ ID NO: 2611285 - RNA, 19 nt, Homo sapiens
  misc_RNA (1)...(19): siRNA sense strand
aggaugugaaccaggauaa

SEQ ID NO: 2611286 - RNA, 19 nt, Homo sapiens
  misc_RNA (1)...(19): siRNA sense strand
uggaaugcugggagagauu

SEQ ID NO: 2611287 - RNA, 19 nt, Homo sapiens
  misc_RNA (1)...(19): siRNA sense strand
gcauaauucugcugccaca

SEQ ID NO: 2611288 - RNA, 19 nt, Homo sapiens
  misc_RNA (1)...(19): siRNA sense strand
agaaauaacaccuggccca

SEQ ID NO: 2611289 - RNA, 19 nt, Homo sapiens
  misc_RNA (1)...(19): siRNA sense strand
auacaagguuacaaagcau

SEQ ID NO: 2611290 - RNA, 19 nt, Homo sapiens
  misc_RNA (1)...(19): siRNA sense strand
gguaauuuccccaggacua

SEQ ID NO: 2611291 - RNA, 19 nt, Homo sapiens
  misc_RNA (1)...(19): siRNA sense strand
cuuaggacacugugaauau

SEQ ID NO: 2611292 - RNA, 19 nt, Homo sapiens
  misc_RNA (1)...(19): siRNA sense strand
ccaguaauacaguggccaa

SEQ ID NO: 2611293 - RNA, 19 nt, Homo sapiens
  misc_RNA (1)...(19): siRNA sense strand
cgguggaggaugugaacca

SEQ ID NO: 2611294 - RNA, 19 nt, Homo sapiens
  misc_RNA (1)...(19): siRNA sense strand
agaaagaggcugugauggu

SEQ ID NO: 2611295 - RNA, 19 nt, Homo sapiens
  misc_RNA (1)...(19): siRNA sense strand
augcaagaggugauagauu

SEQ ID NO: 2611296 - RNA, 19 nt, Homo sapiens
  misc_RNA (1)...(19): siRNA sense strand
ccauggugacugagcagaa

SEQ ID NO: 2611297 - RNA, 19 nt, Homo sapiens
  misc_RNA (1)...(19): siRNA sense strand
guuccgaagagaaggccaa

SEQ ID NO: 2611298 - RNA, 19 nt, Homo sapiens
  misc_RNA (1)...(19): siRNA sense strand
aagcagagaaggaaacaca

SEQ ID NO: 2611299 - RNA, 19 nt, Homo sapiens
  misc_RNA (1)...(19): siRNA sense strand
ggaaauggguacauggcuc

SEQ ID NO: 2611300 - RNA, 19 nt, Homo sapiens
  misc_RNA (1)...(19): siRNA sense strand
acuaagagaaagaggcugu

SEQ ID NO: 2611301 - RNA, 19 nt, Homo sapiens
  misc_RNA (1)...(19): siRNA sense strand
cagcaauuccugagcacca

SEQ ID NO: 2611302 - RNA, 19 nt, Homo sapiens
  misc_RNA (1)...(19): siRNA sense strand
gguccaagcagaaggugca

SEQ ID NO: 2611303 - RNA, 19 nt, Homo sapiens
  misc_RNA (1)...(19): siRNA sense strand
caggauaacaaaaccaaaa

SEQ ID NO: 2611304 - RNA, 19 nt, Homo sapiens
  misc_RNA (1)...(19): siRNA sense strand
uggagaggcgugagaacuu

SEQ ID NO: 2611305 - RNA, 19 nt, Homo sapiens
  misc_RNA (1)...(19): siRNA sense strand
ggcaaggaugagaagggua

SEQ ID NO: 2611306 - RNA, 19 nt, Homo sapiens
  misc_RNA (1)...(19): siRNA sense strand
acucaaaggcagccacaca

SEQ ID NO: 2611307 - RNA, 19 nt, Homo sapiens
  misc_RNA (1)...(19): siRNA sense strand
gcauacagauccagcugca

SEQ ID NO: 2611308 - RNA, 19 nt, Homo sapiens
  misc_RNA (1)...(19): siRNA sense strand
ggucuggugagcagcuaua

SEQ ID NO: 2611309 - RNA, 19 nt, Homo sapiens
  misc_RNA (1)...(19): siRNA sense strand
caauguuacagcugaugaa

SEQ ID NO: 2611310 - RNA, 19 nt, Homo sapiens
  misc_RNA (1)...(19): siRNA sense strand
gcagagaagccuugauccu

SEQ ID NO: 2611311 - RNA, 19 nt, Homo sapiens
  misc_RNA (1)...(19): siRNA sense strand
ccguuggugacaaggcaua

SEQ ID NO: 2611312 - RNA, 19 nt, Homo sapiens
  misc_RNA (1)...(19): siRNA sense strand
auacaauguuacagcugau

SEQ ID NO: 2611313 - RNA, 19 nt, Homo sapiens
  misc_RNA (1)...(19): siRNA sense strand
cagcucgagugaugagaca

SEQ ID NO: 2611314 - RNA, 19 nt, Homo sapiens
  misc_RNA (1)...(19): siRNA sense strand
augugaaccaggauaacaa

SEQ ID NO: 2611315 - RNA, 19 nt, Homo sapiens
  misc_RNA (1)...(19): siRNA sense strand
ccauaaagccugagaucgc

SEQ ID NO: 2611316 - RNA, 19 nt, Homo sapiens
  misc_RNA (1)...(19): siRNA sense strand
gcuuaggacacugugaaua

SEQ ID NO: 2611317 - RNA, 19 nt, Homo sapiens
  misc_RNA (1)...(19): siRNA sense strand
ccaaaauaccccuuccaaa

SEQ ID NO: 2611318 - RNA, 19 nt, Homo sapiens
  misc_RNA (1)...(19): siRNA sense strand
aggcagcacccaagggcuu

SEQ ID NO: 2611319 - RNA, 19 nt, Homo sapiens
  misc_RNA (1)...(19): siRNA sense strand
gcuaaaagaacugaacaua

SEQ ID NO: 2611320 - RNA, 19 nt, Homo sapiens
  misc_RNA (1)...(19): siRNA sense strand
augagaaggguaugaacuu

SEQ ID NO: 2611321 - RNA, 19 nt, Homo sapiens
  misc_RNA (1)...(19): siRNA sense strand
ggucaguggccuggcauau

SEQ ID NO: 2611322 - RNA, 19 nt, Homo sapiens
  misc_RNA (1)...(19): siRNA sense strand
cugaaacuuaagacgcaua

SEQ ID NO: 2611323 - RNA, 19 nt, Homo sapiens
  misc_RNA (1)...(19): siRNA sense strand
ccgaagagaaggccaaaau

SEQ ID NO: 2611324 - RNA, 19 nt, Homo sapiens
  misc_RNA (1)...(19): siRNA sense strand
agaacuuccugcauggaga

SEQ ID NO: 2611325 - RNA, 19 nt, Homo sapiens
  misc_RNA (1)...(19): siRNA sense strand
ugagaauaaagaagccuau

SEQ ID NO: 2611326 - RNA, 19 nt, Homo sapiens
  misc_RNA (1)...(19): siRNA sense strand
ccgacauccagcagggcau

SEQ ID NO: 2611327 - RNA, 19 nt, Homo sapiens
  misc_RNA (1)...(19): siRNA sense strand
ggccauaaagccugagauc

SEQ ID NO: 2611328 - RNA, 19 nt, Homo sapiens
  misc_RNA (1)...(19): siRNA sense strand
cugcaaauuuuacggauca

SEQ ID NO: 2611329 - RNA, 19 nt, Homo sapiens
  misc_RNA (1)...(19): siRNA sense strand
gcagaaggcaggagccaug

SEQ ID NO: 2611330 - RNA, 19 nt, Homo sapiens
  misc_RNA (1)...(19): siRNA sense strand
ugagcagcuauauggauaa

SEQ ID NO: 2611331 - RNA, 19 nt, Homo sapiens
  misc_RNA (1)...(19): siRNA sense strand
acccagaguuugcacgcua

SEQ ID NO: 2611332 - RNA, 19 nt, Homo sapiens
  misc_RNA (1)...(19): siRNA sense strand
cggacauagucguggauca

SEQ ID NO: 2611333 - RNA, 19 nt, Homo sapiens
  misc_RNA (1)...(19): siRNA sense strand
cugacagaguggaggucua

SEQ ID NO: 2611334 - RNA, 19 nt, Homo sapiens
  misc_RNA (1)...(19): siRNA sense strand
acuacaaggaggagaaguu

SEQ ID NO: 2611335 - RNA, 19 nt, Homo sapiens
  misc_RNA (1)...(19): siRNA sense strand
aguuccaggccgagacaaa

SEQ ID NO: 2611336 - RNA, 19 nt, Homo sapiens
  misc_RNA (1)...(19): siRNA sense strand
aggagaaguuugaggacag

SEQ ID NO: 2611337 - RNA, 19 nt, Homo sapiens
  misc_RNA (1)...(19): siRNA sense strand
gccaugaagaagaaagaca

SEQ ID NO: 2611338 - RNA, 19 nt, Homo sapiens
  misc_RNA (1)...(19): siRNA sense strand
ccacggacauccugcccaa

SEQ ID NO: 2611339 - RNA, 19 nt, Homo sapiens
  misc_RNA (1)...(19): siRNA sense strand
gugaguuugacaagaagaa

SEQ ID NO: 2611340 - RNA, 19 nt, Homo sapiens
  misc_RNA (1)...(19): siRNA sense strand
gaggagaaguuugaggaca

SEQ ID NO: 2611341 - RNA, 19 nt, Homo sapiens
  misc_RNA (1)...(19): siRNA sense strand
agaccaaggccacggacau

SEQ ID NO: 2611342 - RNA, 19 nt, Homo sapiens
  misc_RNA (1)...(19): siRNA sense strand
ggucaaaggccuuccugga

SEQ ID NO: 2611343 - RNA, 19 nt, Homo sapiens
  misc_RNA (1)...(19): siRNA sense strand
gaguuagaaccgggacaaa

SEQ ID NO: 2611344 - RNA, 19 nt, Homo sapiens
  misc_RNA (1)...(19): siRNA sense strand
aggccaugaagaagaaaga

SEQ ID NO: 2611345 - RNA, 19 nt, Homo sapiens
  misc_RNA (1)...(19): siRNA sense strand
gggaguuagaaccgggaca

SEQ ID NO: 2611346 - RNA, 19 nt, Homo sapiens
  misc_RNA (1)...(19): siRNA sense strand
augaggaguucuaccgcua

SEQ ID NO: 2611347 - RNA, 19 nt, Homo sapiens
  misc_RNA (1)...(19): siRNA sense strand
ucuucauugaccagaguaa

SEQ ID NO: 2611348 - RNA, 19 nt, Homo sapiens
  misc_RNA (1)...(19): siRNA sense strand
ccagcgaugccuuggaaaa

SEQ ID NO: 2611349 - RNA, 19 nt, Homo sapiens
  misc_RNA (1)...(19): siRNA sense strand
uggaucagauauacgagaa

SEQ ID NO: 2611350 - RNA, 19 nt, Homo sapiens
  misc_RNA (1)...(19): siRNA sense strand
uaucagagaaggagacgga

SEQ ID NO: 2611351 - RNA, 19 nt, Homo sapiens
  misc_RNA (1)...(19): siRNA sense strand
gcagcaagaucaucggcca

SEQ ID NO: 2611352 - RNA, 19 nt, Homo sapiens
  misc_RNA (1)...(19): siRNA sense strand
ugguaacgaaguacagcaa

SEQ ID NO: 2611353 - RNA, 19 nt, Homo sapiens
  misc_RNA (1)...(19): siRNA sense strand
aauggaaggcggaugaaca

SEQ ID NO: 2611354 - RNA, 19 nt, Homo sapiens
  misc_RNA (1)...(19): siRNA sense strand
cagagaaggagacggagga

SEQ ID NO: 2611355 - RNA, 19 nt, Homo sapiens
  misc_RNA (1)...(19): siRNA sense strand
agauucacuugcagaccaa

SEQ ID NO: 2611356 - RNA, 19 nt, Homo sapiens
  misc_RNA (1)...(19): siRNA sense strand
gguucuggaguguuugaaa

SEQ ID NO: 2611357 - RNA, 19 nt, Homo sapiens
  misc_RNA (1)...(19): siRNA sense strand
augcugagaaguaugcaaa

SEQ ID NO: 2611358 - RNA, 19 nt, Homo sapiens
  misc_RNA (1)...(19): siRNA sense strand
agcaggaggucaaggagga

SEQ ID NO: 2611359 - RNA, 19 nt, Homo sapiens
  misc_RNA (1)...(19): siRNA sense strand
caugaagaagaaagacaca

SEQ ID NO: 2611360 - RNA, 19 nt, Homo sapiens
  misc_RNA (1)...(19): siRNA sense strand
uggccaagacccaggagga

SEQ ID NO: 2611361 - RNA, 19 nt, Homo sapiens
  misc_RNA (1)...(19): siRNA sense strand
cagagagcgugcaggguuc

SEQ ID NO: 2611362 - RNA, 19 nt, Homo sapiens
  misc_RNA (1)...(19): siRNA sense strand
gagaaaggcaccaucacca

SEQ ID NO: 2611363 - RNA, 19 nt, Homo sapiens
  misc_RNA (1)...(19): siRNA sense strand
agaaggagacggaggagcu

SEQ ID NO: 2611364 - RNA, 19 nt, Homo sapiens
  misc_RNA (1)...(19): siRNA sense strand
uugaauggaaggcggauga

SEQ ID NO: 2611365 - RNA, 19 nt, Homo sapiens
  misc_RNA (1)...(19): siRNA sense strand
ccucgaaaguaaagcccaa

SEQ ID NO: 2611366 - RNA, 19 nt, Homo sapiens
  misc_RNA (1)...(19): siRNA sense strand
auagaagggcugacggaaa

SEQ ID NO: 2611367 - RNA, 19 nt, Homo sapiens
  misc_RNA (1)...(19): siRNA sense strand
ccuagaauuccuugacaaa

SEQ ID NO: 2611368 - RNA, 19 nt, Homo sapiens
  misc_RNA (1)...(19): siRNA sense strand
ugugaauggcagauggaua

SEQ ID NO: 2611369 - RNA, 19 nt, Homo sapiens
  misc_RNA (1)...(19): siRNA sense strand
ccaaaggcgugaaggagga

SEQ ID NO: 2611370 - RNA, 19 nt, Homo sapiens
  misc_RNA (1)...(19): siRNA sense strand
cugaaguguuagaaagcuu

SEQ ID NO: 2611371 - RNA, 19 nt, Homo sapiens
  misc_RNA (1)...(19): siRNA sense strand
gugaacugcuuuagaaaau

SEQ ID NO: 2611372 - RNA, 19 nt, Homo sapiens
  misc_RNA (1)...(19): siRNA sense strand
uggcagauggauaaaggaa

SEQ ID NO: 2611373 - RNA, 19 nt, Homo sapiens
  misc_RNA (1)...(19): siRNA sense strand
ggauaaaggaagacgaagc

SEQ ID NO: 2611374 - RNA, 19 nt, Homo sapiens
  misc_RNA (1)...(19): siRNA sense strand
aggcaaaucccaggaggaa

SEQ ID NO: 2611375 - RNA, 19 nt, Homo sapiens
  misc_RNA (1)...(19): siRNA sense strand
uacuaaaggucacggaaca

SEQ ID NO: 2611376 - RNA, 19 nt, Homo sapiens
  misc_RNA (1)...(19): siRNA sense strand
ugaacaaagcagcugaauu

SEQ ID NO: 2611377 - RNA, 19 nt, Homo sapiens
  misc_RNA (1)...(19): siRNA sense strand
gaugaagacuguucggcga

SEQ ID NO: 2611378 - RNA, 19 nt, Homo sapiens
  misc_RNA (1)...(19): siRNA sense strand
cccuagaauuccuugacaa

SEQ ID NO: 2611379 - RNA, 19 nt, Homo sapiens
  misc_RNA (1)...(19): siRNA sense strand
cuagcugaaggaagagaaa

SEQ ID NO: 2611380 - RNA, 19 nt, Homo sapiens
  misc_RNA (1)...(19): siRNA sense strand
guacagaaugacaugugaa

SEQ ID NO: 2611381 - RNA, 19 nt, Homo sapiens
  misc_RNA (1)...(19): siRNA sense strand
aggcacuauuagaggcuga

SEQ ID NO: 2611382 - RNA, 19 nt, Homo sapiens
  misc_RNA (1)...(19): siRNA sense strand
gaacaaugcuucaacacgu

SEQ ID NO: 2611383 - RNA, 19 nt, Homo sapiens
  misc_RNA (1)...(19): siRNA sense strand
guacauaauagaagggcug

SEQ ID NO: 2611384 - RNA, 19 nt, Homo sapiens
  misc_RNA (1)...(19): siRNA sense strand
cugaaacgguggugcagca

SEQ ID NO: 2611385 - RNA, 19 nt, Homo sapiens
  misc_RNA (1)...(19): siRNA sense strand
aauuaugucacuaggucua

SEQ ID NO: 2611386 - RNA, 19 nt, Homo sapiens
  misc_RNA (1)...(19): siRNA sense strand
acagagacgacauggcauu

SEQ ID NO: 2611387 - RNA, 19 nt, Homo sapiens
  misc_RNA (1)...(19): siRNA sense strand
uaucgaauguguaugguga

SEQ ID NO: 2611388 - RNA, 19 nt, Homo sapiens
  misc_RNA (1)...(19): siRNA sense strand
ggaaacuagcugaaggaag

SEQ ID NO: 2611389 - RNA, 19 nt, Homo sapiens
  misc_RNA (1)...(19): siRNA sense strand
uccugaaagcugucaauaa

SEQ ID NO: 2611390 - RNA, 19 nt, Homo sapiens
  misc_RNA (1)...(19): siRNA sense strand
aaauuugccaacaaggaaa

SEQ ID NO: 2611391 - RNA, 19 nt, Homo sapiens
  misc_RNA (1)...(19): siRNA sense strand
gcuuuaaauuggccaggga

SEQ ID NO: 2611392 - RNA, 19 nt, Homo sapiens
  misc_RNA (1)...(19): siRNA sense strand
ggauacuuggcuuugguua

SEQ ID NO: 2611393 - RNA, 19 nt, Homo sapiens
  misc_RNA (1)...(19): siRNA sense strand
cuuugauagugaagcacau

SEQ ID NO: 2611394 - RNA, 19 nt, Homo sapiens
  misc_RNA (1)...(19): siRNA sense strand
uagugaagcacaugcaaaa

SEQ ID NO: 2611395 - RNA, 19 nt, Homo sapiens
  misc_RNA (1)...(19): siRNA sense strand
aacucaggaaggugggaaa

SEQ ID NO: 2611396 - RNA, 19 nt, Homo sapiens
  misc_RNA (1)...(19): siRNA sense strand
auggauaaaggaagacgaa

SEQ ID NO: 2611397 - RNA, 19 nt, Homo sapiens
  misc_RNA (1)...(19): siRNA sense strand
uggcuuugguuaagaaucu

SEQ ID NO: 2611398 - RNA, 19 nt, Homo sapiens
  misc_RNA (1)...(19): siRNA sense strand
gaggcaaaucccaggagga

SEQ ID NO: 2611399 - RNA, 19 nt, Homo sapiens
  misc_RNA (1)...(19): siRNA sense strand
acuaaaggucacggaacaa

SEQ ID NO: 2611400 - RNA, 19 nt, Homo sapiens
  misc_RNA (1)...(19): siRNA sense strand
aagacgaagcuauggagau

SEQ ID NO: 2611401 - RNA, 19 nt, Homo sapiens
  misc_RNA (1)...(19): siRNA sense strand
uguguauggugauguagaa

SEQ ID NO: 2611402 - RNA, 19 nt, Homo sapiens
  misc_RNA (1)...(19): siRNA sense strand
uuuaaauuggccagggaga

SEQ ID NO: 2611403 - RNA, 19 nt, Homo sapiens
  misc_RNA (1)...(19): siRNA sense strand
uacagaaugacaugugaaa

SEQ ID NO: 2611404 - RNA, 19 nt, Homo sapiens
  misc_RNA (1)...(19): siRNA sense strand
guuggaaugagaugugaau

SEQ ID NO: 2611405 - RNA, 19 nt, Homo sapiens
  misc_RNA (1)...(19): siRNA sense strand
cugcagaaacaauggcaaa

SEQ ID NO: 2611406 - RNA, 19 nt, Homo sapiens
  misc_RNA (1)...(19): siRNA sense strand
agauguagaaguagagaau

SEQ ID NO: 2611407 - RNA, 19 nt, Homo sapiens
  misc_RNA (1)...(19): siRNA sense strand
aggaagaagaagaagauga

SEQ ID NO: 2611408 - RNA, 19 nt, Homo sapiens
  misc_RNA (1)...(19): siRNA sense strand
ucuauaagcaagaggaaaa

SEQ ID NO: 2611409 - RNA, 19 nt, Homo sapiens
  misc_RNA (1)...(19): siRNA sense strand
aaucuauaguggaaggaau

SEQ ID NO: 2611410 - RNA, 19 nt, Homo sapiens
  misc_RNA (1)...(19): siRNA sense strand
aaggaaucauagaggaaga

SEQ ID NO: 2611411 - RNA, 19 nt, Homo sapiens
  misc_RNA (1)...(19): siRNA sense strand
gaaucauagaggaagaaga

SEQ ID NO: 2611412 - RNA, 19 nt, Homo sapiens
  misc_RNA (1)...(19): siRNA sense strand
uggcaaaagacguuggcaa

SEQ ID NO: 2611413 - RNA, 19 nt, Homo sapiens
  misc_RNA (1)...(19): siRNA sense strand
gcaaugugguugaagccau

SEQ ID NO: 2611414 - RNA, 19 nt, Homo sapiens
  misc_RNA (1)...(19): siRNA sense strand
aaugaaacuggcaaggaua

SEQ ID NO: 2611415 - RNA, 19 nt, Homo sapiens
  misc_RNA (1)...(19): siRNA sense strand
guguugauagauuggauaa

SEQ ID NO: 2611416 - RNA, 19 nt, Homo sapiens
  misc_RNA (1)...(19): siRNA sense strand
ggcaaaagacguuggcaau

SEQ ID NO: 2611417 - RNA, 19 nt, Homo sapiens
  misc_RNA (1)...(19): siRNA sense strand
cggcugguuccgaggcuua

SEQ ID NO: 2611418 - RNA, 19 nt, Homo sapiens
  misc_RNA (1)...(19): siRNA sense strand
agucaaacagugugaagga

SEQ ID NO: 2611419 - RNA, 19 nt, Homo sapiens
  misc_RNA (1)...(19): siRNA sense strand
aggaauuacaaguccagaa

SEQ ID NO: 2611420 - RNA, 19 nt, Homo sapiens
  misc_RNA (1)...(19): siRNA sense strand
uagaggaagaagaagaaga

SEQ ID NO: 2611421 - RNA, 19 nt, Homo sapiens
  misc_RNA (1)...(19): siRNA sense strand
aagaagaagaagaugagga

SEQ ID NO: 2611422 - RNA, 19 nt, Homo sapiens
  misc_RNA (1)...(19): siRNA sense strand
agucuauaagcaagaggaa

SEQ ID NO: 2611423 - RNA, 19 nt, Homo sapiens
  misc_RNA (1)...(19): siRNA sense strand
cugcgaagucauggugaaa

SEQ ID NO: 2611424 - RNA, 19 nt, Homo sapiens
  misc_RNA (1)...(19): siRNA sense strand
cucaaaaucuauaguggaa

SEQ ID NO: 2611425 - RNA, 19 nt, Homo sapiens
  misc_RNA (1)...(19): siRNA sense strand
caagagugguucagagggu

SEQ ID NO: 2611426 - RNA, 19 nt, Homo sapiens
  misc_RNA (1)...(19): siRNA sense strand
gcacuuaauagcaugcaga

SEQ ID NO: 2611427 - RNA, 19 nt, Homo sapiens
  misc_RNA (1)...(19): siRNA sense strand
ugaggaaggaagugagucu

SEQ ID NO: 2611428 - RNA, 19 nt, Homo sapiens
  misc_RNA (1)...(19): siRNA sense strand
uggauaaagaucugaccau

SEQ ID NO: 2611429 - RNA, 19 nt, Homo sapiens
  misc_RNA (1)...(19): siRNA sense strand
aggaaggaagugagucuau

SEQ ID NO: 2611430 - RNA, 19 nt, Homo sapiens
  misc_RNA (1)...(19): siRNA sense strand
ccauggaagauguagaagu

SEQ ID NO: 2611431 - RNA, 19 nt, Homo sapiens
  misc_RNA (1)...(19): siRNA sense strand
ggauuguagcuuuggaucu

SEQ ID NO: 2611432 - RNA, 19 nt, Homo sapiens
  misc_RNA (1)...(19): siRNA sense strand
agaaguagagaaugaaacu

SEQ ID NO: 2611433 - RNA, 19 nt, Homo sapiens
  misc_RNA (1)...(19): siRNA sense strand
ucugcgaagucauggugaa

SEQ ID NO: 2611434 - RNA, 19 nt, Homo sapiens
  misc_RNA (1)...(19): siRNA sense strand
aagaagaagaugaggaagg

SEQ ID NO: 2611435 - RNA, 19 nt, Homo sapiens
  misc_RNA (1)...(19): siRNA sense strand
gucuauaagcaagaggaaa

SEQ ID NO: 2611436 - RNA, 19 nt, Homo sapiens
  misc_RNA (1)...(19): siRNA sense strand
ggaaagagccauugggugu

SEQ ID NO: 2611437 - RNA, 19 nt, Homo sapiens
  misc_RNA (1)...(19): siRNA sense strand
guguaaggugcgcaagaaa

SEQ ID NO: 2611438 - RNA, 19 nt, Homo sapiens
  misc_RNA (1)...(19): siRNA sense strand
acauugaugaagauggaaa

SEQ ID NO: 2611439 - RNA, 19 nt, Homo sapiens
  misc_RNA (1)...(19): siRNA sense strand
gcggaagaggagacgacua

SEQ ID NO: 2611440 - RNA, 19 nt, Homo sapiens
  misc_RNA (1)...(19): siRNA sense strand
gagacgacuaauagaccaa

SEQ ID NO: 2611441 - RNA, 19 nt, Homo sapiens
  misc_RNA (1)...(19): siRNA sense strand
gacuaauagaccaagaaaa

SEQ ID NO: 2611442 - RNA, 19 nt, Homo sapiens
  misc_RNA (1)...(19): siRNA sense strand
ccuucagaguaaagugguu

SEQ ID NO: 2611443 - RNA, 19 nt, Homo sapiens
  misc_RNA (1)...(19): siRNA sense strand
uuuauuaccuguaugguga

SEQ ID NO: 2611444 - RNA, 19 nt, Homo sapiens
  misc_RNA (1)...(19): siRNA sense strand
ggguguuugaaucuagaaa

SEQ ID NO: 2611445 - RNA, 19 nt, Homo sapiens
  misc_RNA (1)...(19): siRNA sense strand
acuuauugccuguccagua

SEQ ID NO: 2611446 - RNA, 19 nt, Homo sapiens
  misc_RNA (1)...(19): siRNA sense strand
uaacagaucuaaugcggaa

SEQ ID NO: 2611447 - RNA, 19 nt, Homo sapiens
  misc_RNA (1)...(19): siRNA sense strand
gggaaaaugaagaacuuaa

SEQ ID NO: 2611448 - RNA, 19 nt, Homo sapiens
  misc_RNA (1)...(19): siRNA sense strand
gagaaaaccuggaaggacu

SEQ ID NO: 2611449 - RNA, 19 nt, Homo sapiens
  misc_RNA (1)...(19): siRNA sense strand
aggugauccuggaacaaua

SEQ ID NO: 2611450 - RNA, 19 nt, Homo sapiens
  misc_RNA (1)...(19): siRNA sense strand
agucaauuccugaggcuuu

SEQ ID NO: 2611451 - RNA, 19 nt, Homo sapiens
  misc_RNA (1)...(19): siRNA sense strand
uuuaaaagcugggaagaaa

SEQ ID NO: 2611452 - RNA, 19 nt, Homo sapiens
  misc_RNA (1)...(19): siRNA sense strand
ccugauuucuacugggaca

SEQ ID NO: 2611453 - RNA, 19 nt, Homo sapiens
  misc_RNA (1)...(19): siRNA sense strand
gccgaagaguuaaggucau

SEQ ID NO: 2611454 - RNA, 19 nt, Homo sapiens
  misc_RNA (1)...(19): siRNA sense strand
ggggaaaucaaguuaaauu

SEQ ID NO: 2611455 - RNA, 19 nt, Homo sapiens
  misc_RNA (1)...(19): siRNA sense strand
cggugaacucuuugcucua

SEQ ID NO: 2611456 - RNA, 19 nt, Homo sapiens
  misc_RNA (1)...(19): siRNA sense strand
uguggaaaauucugcaaaa

SEQ ID NO: 2611457 - RNA, 19 nt, Homo sapiens
  misc_RNA (1)...(19): siRNA sense strand
uuggaaugugaaagacaaa

SEQ ID NO: 2611458 - RNA, 19 nt, Homo sapiens
  misc_RNA (1)...(19): siRNA sense strand
ucaucuguaucaauggaaa

SEQ ID NO: 2611459 - RNA, 19 nt, Homo sapiens
  misc_RNA (1)...(19): siRNA sense strand
uggugauggguguggaaaa

SEQ ID NO: 2611460 - RNA, 19 nt, Homo sapiens
  misc_RNA (1)...(19): siRNA sense strand
uagcauuggccgaagaguu

SEQ ID NO: 2611461 - RNA, 19 nt, Homo sapiens
  misc_RNA (1)...(19): siRNA sense strand
caugaaauccuuugguacu

SEQ ID NO: 2611462 - RNA, 19 nt, Homo sapiens
  misc_RNA (1)...(19): siRNA sense strand
ggugaagagaccacuaaaa

SEQ ID NO: 2611463 - RNA, 19 nt, Homo sapiens
  misc_RNA (1)...(19): siRNA sense strand
cugaaugagaagagggcac

SEQ ID NO: 2611464 - RNA, 19 nt, Homo sapiens
  misc_RNA (1)...(19): siRNA sense strand
cauggaacuaacagaucua

SEQ ID NO: 2611465 - RNA, 19 nt, Homo sapiens
  misc_RNA (1)...(19): siRNA sense strand
acagcuagugguuugaaua

SEQ ID NO: 2611466 - RNA, 19 nt, Homo sapiens
  misc_RNA (1)...(19): siRNA sense strand
caauauucuucuucaggga

SEQ ID NO: 2611467 - RNA, 19 nt, Homo sapiens
  misc_RNA (1)...(19): siRNA sense strand
aguuaaauucagagcugga

SEQ ID NO: 2611468 - RNA, 19 nt, Homo sapiens
  misc_RNA (1)...(19): siRNA sense strand
ggugauggguguggaaaau

SEQ ID NO: 2611469 - RNA, 19 nt, Homo sapiens
  misc_RNA (1)...(19): siRNA sense strand
cuaugaaaucgcacuggua

SEQ ID NO: 2611470 - RNA, 19 nt, Homo sapiens
  misc_RNA (1)...(19): siRNA sense strand
cuaaaagcauccaggacca

SEQ ID NO: 2611471 - RNA, 19 nt, Homo sapiens
  misc_RNA (1)...(19): siRNA sense strand
cgggaauggcagaguaaca

SEQ ID NO: 2611472 - RNA, 19 nt, Homo sapiens
  misc_RNA (1)...(19): siRNA sense strand
agguuauagagauggaaua

SEQ ID NO: 2611473 - RNA, 19 nt, Homo sapiens
  misc_RNA (1)...(19): siRNA sense strand
uggcagaguaacaugcaaa

SEQ ID NO: 2611474 - RNA, 19 nt, Homo sapiens
  misc_RNA (1)...(19): siRNA sense strand
uguaguuccagcugagaaa

SEQ ID NO: 2611475 - RNA, 19 nt, Homo sapiens
  misc_RNA (1)...(19): siRNA sense strand
uggacgacuccgaggaaca

SEQ ID NO: 2611476 - RNA, 19 nt, Homo sapiens
  misc_RNA (1)...(19): siRNA sense strand
agccauagugggauagauu

SEQ ID NO: 2611477 - RNA, 19 nt, Homo sapiens
  misc_RNA (1)...(19): siRNA sense strand
aagcuaaagaugaaagacu

SEQ ID NO: 2611478 - RNA, 19 nt, Homo sapiens
  misc_RNA (1)...(19): siRNA sense strand
gaacacaggagcaugcaca

SEQ ID NO: 2611479 - RNA, 19 nt, Homo sapiens
  misc_RNA (1)...(19): siRNA sense strand
aacuguagcaagagccaua

SEQ ID NO: 2611480 - RNA, 19 nt, Homo sapiens
  misc_RNA (1)...(19): siRNA sense strand
gcuaaagaugaaagacucu

SEQ ID NO: 2611481 - RNA, 19 nt, Homo sapiens
  misc_RNA (1)...(19): siRNA sense strand
ccauagugggauagauugu

SEQ ID NO: 2611482 - RNA, 19 nt, Homo sapiens
  misc_RNA (1)...(19): siRNA sense strand
agcaagagccauaguggga

SEQ ID NO: 2611483 - RNA, 19 nt, Homo sapiens
  misc_RNA (1)...(19): siRNA sense strand
cgguggaggaggagagcaa

SEQ ID NO: 2611484 - RNA, 19 nt, Homo sapiens
  misc_RNA (1)...(19): siRNA sense strand
ggaaaucgguggaggagga

SEQ ID NO: 2611485 - RNA, 19 nt, Homo sapiens
  misc_RNA (1)...(19): siRNA sense strand
ggaaggaguuugugcccaa

SEQ ID NO: 2611486 - RNA, 19 nt, Homo sapiens
  misc_RNA (1)...(19): siRNA sense strand
ggacugaagcuguuguuaa

SEQ ID NO: 2611487 - RNA, 19 nt, Homo sapiens
  misc_RNA (1)...(19): siRNA sense strand
ugguaaagaggaugaauau

SEQ ID NO: 2611488 - RNA, 19 nt, Homo sapiens
  misc_RNA (1)...(19): siRNA sense strand
cugguaaagaggaugaaua

SEQ ID NO: 2611489 - RNA, 19 nt, Homo sapiens
  misc_RNA (1)...(19): siRNA sense strand
ugaaauuguccauggaaga

SEQ ID NO: 2611490 - RNA, 19 nt, Homo sapiens
  misc_RNA (1)...(19): siRNA sense strand
cggcaaaagcaccuggaaa

SEQ ID NO: 2611491 - RNA, 19 nt, Homo sapiens
  misc_RNA (1)...(19): siRNA sense strand
cauuauguuuagagacaga

SEQ ID NO: 2611492 - RNA, 19 nt, Homo sapiens
  misc_RNA (1)...(19): siRNA sense strand
ggcaaaagcaccuggaaau

SEQ ID NO: 2611493 - RNA, 19 nt, Homo sapiens
  misc_RNA (1)...(19): siRNA sense strand
caucaaaaguauccaacaa

SEQ ID NO: 2611494 - RNA, 19 nt, Homo sapiens
  misc_RNA (1)...(19): siRNA sense strand
aggcgaauuuacaaaggaa

SEQ ID NO: 2611495 - RNA, 19 nt, Homo sapiens
  misc_RNA (1)...(19): siRNA sense strand
uguauaugaacgaggaaga

SEQ ID NO: 2611496 - RNA, 19 nt, Homo sapiens
  misc_RNA (1)...(19): siRNA sense strand
ugacagaggacgagaaggu

SEQ ID NO: 2611497 - RNA, 19 nt, Homo sapiens
  misc_RNA (1)...(19): siRNA sense strand
cuggaaauugaaagaacua

SEQ ID NO: 2611498 - RNA, 19 nt, Homo sapiens
  misc_RNA (1)...(19): siRNA sense strand
acuaaagcgggcaaaguua

SEQ ID NO: 2611499 - RNA, 19 nt, Homo sapiens
  misc_RNA (1)...(19): siRNA sense strand
caggacaguuccaggcaau

SEQ ID NO: 2611500 - RNA, 19 nt, Homo sapiens
  misc_RNA (1)...(19): siRNA sense strand
augcugaaaggaugggaaa

SEQ ID NO: 2611501 - RNA, 19 nt, Homo sapiens
  misc_RNA (1)...(19): siRNA sense strand
gacugaagcuguuguuaau

SEQ ID NO: 2611502 - RNA, 19 nt, Homo sapiens
  misc_RNA (1)...(19): siRNA sense strand
acaaagucacagauagauu

SEQ ID NO: 2611503 - RNA, 19 nt, Homo sapiens
  misc_RNA (1)...(19): siRNA sense strand
ucaaauaucaggaaggagu

SEQ ID NO: 2611504 - RNA, 19 nt, Homo sapiens
  misc_RNA (1)...(19): siRNA sense strand
guuuacaaagucacagaua

SEQ ID NO: 2611505 - RNA, 19 nt, Homo sapiens
  misc_RNA (1)...(19): siRNA sense strand
gagccagaucacagcuuua

SEQ ID NO: 2611506 - RNA, 19 nt, Homo sapiens
  misc_RNA (1)...(19): siRNA sense strand
ugucaaacgugcggccaaa

SEQ ID NO: 2611507 - RNA, 19 nt, Homo sapiens
  misc_RNA (1)...(19): siRNA sense strand
gagaaagcacgcugagcca

SEQ ID NO: 2611508 - RNA, 19 nt, Homo sapiens
  misc_RNA (1)...(19): siRNA sense strand
uaaauaugacagaggacga

SEQ ID NO: 2611509 - RNA, 19 nt, Homo sapiens
  misc_RNA (1)...(19): siRNA sense strand
ccgaggugcgggugucaaa

SEQ ID NO: 2611510 - RNA, 19 nt, Homo sapiens
  misc_RNA (1)...(19): siRNA sense strand
cagccuaccacuacaggaa

SEQ ID NO: 2611511 - RNA, 19 nt, Homo sapiens
  misc_RNA (1)...(19): siRNA sense strand
guggaggaggagagcaaaa

SEQ ID NO: 2611512 - RNA, 19 nt, Homo sapiens
  misc_RNA (1)...(19): siRNA sense strand
gugucaaacgugcggccaa

SEQ ID NO: 2611513 - RNA, 19 nt, Homo sapiens
  misc_RNA (1)...(19): siRNA sense strand
ggucaccaaagaauggaaa

SEQ ID NO: 2611514 - RNA, 19 nt, Homo sapiens
  misc_RNA (1)...(19): siRNA sense strand
guggaggaggcgcuggaaa

SEQ ID NO: 2611515 - RNA, 19 nt, Homo sapiens
  misc_RNA (1)...(19): siRNA sense strand
cugaaaaugcugaaaggau

SEQ ID NO: 2611516 - RNA, 19 nt, Homo sapiens
  misc_RNA (1)...(19): siRNA sense strand
gcguccaucacuugagcaa

SEQ ID NO: 2611517 - RNA, 19 nt, Homo sapiens
  misc_RNA (1)...(19): siRNA sense strand
agcuuaaagaugaggcaga

SEQ ID NO: 2611518 - RNA, 19 nt, Homo sapiens
  misc_RNA (1)...(19): siRNA sense strand
ucacaaaggauucagacca

SEQ ID NO: 2611519 - RNA, 19 nt, Homo sapiens
  misc_RNA (1)...(19): siRNA sense strand
caucuuugaaggagaacga

SEQ ID NO: 2611520 - RNA, 19 nt, Homo sapiens
  misc_RNA (1)...(19): siRNA sense strand
ucauaauguggcuguggaa

SEQ ID NO: 2611521 - RNA, 19 nt, Homo sapiens
  misc_RNA (1)...(19): siRNA sense strand
agcugaaauaguugcuaaa

SEQ ID NO: 2611522 - RNA, 19 nt, Homo sapiens
  misc_RNA (1)...(19): siRNA sense strand
ucuacaucuuugaaggaga

SEQ ID NO: 2611523 - RNA, 19 nt, Homo sapiens
  misc_RNA (1)...(19): siRNA sense strand
ccuggaaauugaaagaacu

SEQ ID NO: 2611524 - RNA, 19 nt, Homo sapiens
  misc_RNA (1)...(19): siRNA sense strand
cccuaaaaugaaagaagaa

SEQ ID NO: 2611525 - RNA, 19 nt, Homo sapiens
  misc_RNA (1)...(19): siRNA sense strand
gaauagaaguccucccugu

SEQ ID NO: 2611526 - RNA, 19 nt, Homo sapiens
  misc_RNA (1)...(19): siRNA sense strand
gucagaaguuaguuauaca

SEQ ID NO: 2611527 - RNA, 19 nt, Homo sapiens
  misc_RNA (1)...(19): siRNA sense strand
gauuaucucacaaaggauu

SEQ ID NO: 2611528 - RNA, 19 nt, Homo sapiens
  misc_RNA (1)...(19): siRNA sense strand
ucauaggcgaauuuacaaa

SEQ ID NO: 2611529 - RNA, 19 nt, Homo sapiens
  misc_RNA (1)...(19): siRNA sense strand
agaaccugguaaagaggau

SEQ ID NO: 2611530 - RNA, 19 nt, Homo sapiens
  misc_RNA (1)...(19): siRNA sense strand
cauggaaggcaaaggucga

SEQ ID NO: 2611531 - RNA, 19 nt, Homo sapiens
  misc_RNA (1)...(19): siRNA sense strand
agaacuaccaaauggcuga

SEQ ID NO: 2611532 - RNA, 19 nt, Homo sapiens
  misc_RNA (1)...(19): siRNA sense strand
ugaaagaagaaacaaggga

SEQ ID NO: 2611533 - RNA, 19 nt, Homo sapiens
  misc_RNA (1)...(19): siRNA sense strand
gacaaauagaccuggaugu

SEQ ID NO: 2611534 - RNA, 19 nt, Homo sapiens
  misc_RNA (1)...(19): siRNA sense strand
ccuucugggcccuggucaa

SEQ ID NO: 2611535 - RNA, 19 nt, Homo sapiens
  misc_RNA (1)...(19): siRNA sense strand
uguagauagucccgugaga

SEQ ID NO: 2611536 - RNA, 19 nt, Homo sapiens
  misc_RNA (1)...(19): siRNA sense strand
aguuaaucucagagcuauu

SEQ ID NO: 2611537 - RNA, 19 nt, Homo sapiens
  misc_RNA (1)...(19): siRNA sense strand
ucaucagcuuagaaggauu

SEQ ID NO: 2611538 - RNA, 19 nt, Homo sapiens
  misc_RNA (1)...(19): siRNA sense strand
guucaucagcuuagaagga

SEQ ID NO: 2611539 - RNA, 19 nt, Homo sapiens
  misc_RNA (1)...(19): siRNA sense strand
gcuuagaaggauuugcaca

SEQ ID NO: 2611540 - RNA, 19 nt, Homo sapiens
  misc_RNA (1)...(19): siRNA sense strand
ggacaacauugccagcuuu

SEQ ID NO: 2611541 - RNA, 19 nt, Homo sapiens
  misc_RNA (1)...(19): siRNA sense strand
cugcagagccguggagcuu

SEQ ID NO: 2611542 - RNA, 19 nt, Homo sapiens
  misc_RNA (1)...(19): siRNA sense strand
auggcaaaguguuggggaa

SEQ ID NO: 2611543 - RNA, 19 nt, Homo sapiens
  misc_RNA (1)...(19): siRNA sense strand
agggucagcgggaggagaa

SEQ ID NO: 2611544 - RNA, 19 nt, Homo sapiens
  misc_RNA (1)...(19): siRNA sense strand
gugcaagcgcguaggaaca

SEQ ID NO: 2611545 - RNA, 19 nt, Homo sapiens
  misc_RNA (1)...(19): siRNA sense strand
gggaagaucaagagagcug

SEQ ID NO: 2611546 - RNA, 19 nt, Homo sapiens
  misc_RNA (1)...(19): siRNA sense strand
ugaauuucgagcagguuaa

SEQ ID NO: 2611547 - RNA, 19 nt, Homo sapiens
  misc_RNA (1)...(19): siRNA sense strand
aggagaaggaaucggcauu

SEQ ID NO: 2611548 - RNA, 19 nt, Homo sapiens
  misc_RNA (1)...(19): siRNA sense strand
aggacuuaccacugggcaa

SEQ ID NO: 2611549 - RNA, 19 nt, Homo sapiens
  misc_RNA (1)...(19): siRNA sense strand
uggacauccuguugugcaa

SEQ ID NO: 2611550 - RNA, 19 nt, Homo sapiens
  misc_RNA (1)...(19): siRNA sense strand
ugggcaagcuucaaggaca

SEQ ID NO: 2611551 - RNA, 19 nt, Homo sapiens
  misc_RNA (1)...(19): siRNA sense strand
cacuauggucaccgagaaa

SEQ ID NO: 2611552 - RNA, 19 nt, Homo sapiens
  misc_RNA (1)...(19): siRNA sense strand
augcagaacacuaugguca

SEQ ID NO: 2611553 - RNA, 19 nt, Homo sapiens
  misc_RNA (1)...(19): siRNA sense strand
gacaacaucuggagaggca

SEQ ID NO: 2611554 - RNA, 19 nt, Homo sapiens
  misc_RNA (1)...(19): siRNA sense strand
ccaugaaggccuugcugau

SEQ ID NO: 2611555 - RNA, 19 nt, Homo sapiens
  misc_RNA (1)...(19): siRNA sense strand
ucuuaucaucaguguguua

SEQ ID NO: 2611556 - RNA, 19 nt, Homo sapiens
  misc_RNA (1)...(19): siRNA sense strand
cugaauuucgagcagguua

SEQ ID NO: 2611557 - RNA, 19 nt, Homo sapiens
  misc_RNA (1)...(19): siRNA sense strand
gggagaggauuaucagcca

SEQ ID NO: 2611558 - RNA, 19 nt, Homo sapiens
  misc_RNA (1)...(19): siRNA sense strand
cauccagccuuauggcgaa

SEQ ID NO: 2611559 - RNA, 19 nt, Homo sapiens
  misc_RNA (1)...(19): siRNA sense strand
gcaucacaggaaagggaca

SEQ ID NO: 2611560 - RNA, 19 nt, Homo sapiens
  misc_RNA (1)...(19): siRNA sense strand
agcagcaaguggaggacau

SEQ ID NO: 2611561 - RNA, 19 nt, Homo sapiens
  misc_RNA (1)...(19): siRNA sense strand
caugcaggcaacaacgaaa

SEQ ID NO: 2611562 - RNA, 19 nt, Homo sapiens
  misc_RNA (1)...(19): siRNA sense strand
caucacaggaaagggacaa

SEQ ID NO: 2611563 - RNA, 19 nt, Homo sapiens
  misc_RNA (1)...(19): siRNA sense strand
auauaaguuuggagagaca

SEQ ID NO: 2611564 - RNA, 19 nt, Homo sapiens
  misc_RNA (1)...(19): siRNA sense strand
auagagaagaaguggaaca

SEQ ID NO: 2611565 - RNA, 19 nt, Homo sapiens
  misc_RNA (1)...(19): siRNA sense strand
gcacuguggacuugggaga

SEQ ID NO: 2611566 - RNA, 19 nt, Homo sapiens
  misc_RNA (1)...(19): siRNA sense strand
gaguguaucuggaagccua

SEQ ID NO: 2611567 - RNA, 19 nt, Homo sapiens
  misc_RNA (1)...(19): siRNA sense strand
acaucaaaguaaaggagca

SEQ ID NO: 2611568 - RNA, 19 nt, Homo sapiens
  misc_RNA (1)...(19): siRNA sense strand
gaaaauugguuguugcuga

SEQ ID NO: 2611569 - RNA, 19 nt, Homo sapiens
  misc_RNA (1)...(19): siRNA sense strand
gacaaagugaagaagaaca

SEQ ID NO: 2611570 - RNA, 19 nt, Homo sapiens
  misc_RNA (1)...(19): siRNA sense strand
ugggagaugccaaggacau

SEQ ID NO: 2611571 - RNA, 19 nt, Homo sapiens
  misc_RNA (1)...(19): siRNA sense strand
aggagaagaaccagcaguu

SEQ ID NO: 2611572 - RNA, 19 nt, Homo sapiens
  misc_RNA (1)...(19): siRNA sense strand
ccagaaaauagcucagaau

SEQ ID NO: 2611573 - RNA, 19 nt, Homo sapiens
  misc_RNA (1)...(19): siRNA sense strand
uguugcugauagagaagaa

SEQ ID NO: 2611574 - RNA, 19 nt, Homo sapiens
  misc_RNA (1)...(19): siRNA sense strand
aggagcagucuuuggaaaa

SEQ ID NO: 2611575 - RNA, 19 nt, Homo sapiens
  misc_RNA (1)...(19): siRNA sense strand
aagugaagaagaacagaca

SEQ ID NO: 2611576 - RNA, 19 nt, Homo sapiens
  misc_RNA (1)...(19): siRNA sense strand
agaaaauagcucagaaucu

SEQ ID NO: 2611577 - RNA, 19 nt, Homo sapiens
  misc_RNA (1)...(19): siRNA sense strand
gagccgacgaccagaaaau

SEQ ID NO: 2611578 - RNA, 19 nt, Homo sapiens
  misc_RNA (1)...(19): siRNA sense strand
aggaggaaggcgaggccaa

SEQ ID NO: 2611579 - RNA, 19 nt, Homo sapiens
  misc_RNA (1)...(19): siRNA sense strand
aggaagaggaugcgggaug

SEQ ID NO: 2611580 - RNA, 19 nt, Homo sapiens
  misc_RNA (1)...(19): siRNA sense strand
gaggaggagaagaggccau

SEQ ID NO: 2611581 - RNA, 19 nt, Homo sapiens
  misc_RNA (1)...(19): siRNA sense strand
gugacaaagccaacagcca

SEQ ID NO: 2611582 - RNA, 19 nt, Homo sapiens
  misc_RNA (1)...(19): siRNA sense strand
ugacaaagccaacagccau

SEQ ID NO: 2611583 - RNA, 19 nt, Homo sapiens
  misc_RNA (1)...(19): siRNA sense strand
gaguccgugcgcagggaua

SEQ ID NO: 2611584 - RNA, 19 nt, Homo sapiens
  misc_RNA (1)...(19): siRNA sense strand
cuuacgugucccaggguau

SEQ ID NO: 2611585 - RNA, 19 nt, Homo sapiens
  misc_RNA (1)...(19): siRNA sense strand
ccgcauugaaggagagaau

SEQ ID NO: 2611586 - RNA, 19 nt, Homo sapiens
  misc_RNA (1)...(19): siRNA sense strand
gcuuaauaauuguuggcaa

SEQ ID NO: 2611587 - RNA, 19 nt, Homo sapiens
  misc_RNA (1)...(19): siRNA sense strand
gugcccagcaagagauuaa

SEQ ID NO: 2611588 - RNA, 19 nt, Homo sapiens
  misc_RNA (1)...(19): siRNA sense strand
gcaagagauuaaagaugca

SEQ ID NO: 2611589 - RNA, 19 nt, Homo sapiens
  misc_RNA (1)...(19): siRNA sense strand
cuuaauaauuguuggcaag

SEQ ID NO: 2611590 - RNA, 19 nt, Homo sapiens
  misc_RNA (1)...(19): siRNA sense strand
cagcaagagauuaaagaug

SEQ ID NO: 2611591 - RNA, 19 nt, Homo sapiens
  misc_RNA (1)...(19): siRNA sense strand
agagauuaaagaugcagua

SEQ ID NO: 2611592 - RNA, 19 nt, Homo sapiens
  misc_RNA (1)...(19): siRNA sense strand
acgaagaggcaguaagaaa

SEQ ID NO: 2611593 - RNA, 19 nt, Homo sapiens
  misc_RNA (1)...(19): siRNA sense strand
uaacagaagucaaagggaa

SEQ ID NO: 2611594 - RNA, 19 nt, Homo sapiens
  misc_RNA (1)...(19): siRNA sense strand
cauuauaggaggcuggaaa

SEQ ID NO: 2611595 - RNA, 19 nt, Homo sapiens
  misc_RNA (1)...(19): siRNA sense strand
guagaaagguauaacccaa

SEQ ID NO: 2611596 - RNA, 19 nt, Homo sapiens
  misc_RNA (1)...(19): siRNA sense strand
cagacagaugcaagagaua

SEQ ID NO: 2611597 - RNA, 19 nt, Homo sapiens
  misc_RNA (1)...(19): siRNA sense strand
gguuauuggagguguguca

SEQ ID NO: 2611598 - RNA, 19 nt, Homo sapiens
  misc_RNA (1)...(19): siRNA sense strand
cgaagaggcaguaagaaaa

SEQ ID NO: 2611599 - RNA, 19 nt, Homo sapiens
  misc_RNA (1)...(19): siRNA sense strand
gaauauacaaucuggcaca

SEQ ID NO: 2611600 - RNA, 19 nt, Homo sapiens
  misc_RNA (1)...(19): siRNA sense strand
ccacaaagugauucaggau

SEQ ID NO: 2611601 - RNA, 19 nt, Homo sapiens
  misc_RNA (1)...(19): siRNA sense strand
gcggagaggaagaggugga

SEQ ID NO: 2611602 - RNA, 19 nt, Homo sapiens
  misc_RNA (1)...(19): siRNA sense strand
cuauagcauuggaggacau

SEQ ID NO: 2611603 - RNA, 19 nt, Homo sapiens
  misc_RNA (1)...(19): siRNA sense strand
gaacaugaggcgagugcca

SEQ ID NO: 2611604 - RNA, 19 nt, Homo sapiens
  misc_RNA (1)...(19): siRNA sense strand
cugauaugauacggagaaa

SEQ ID NO: 2611605 - RNA, 19 nt, Homo sapiens
  misc_RNA (1)...(19): siRNA sense strand
agagauacuuugaagaacu

SEQ ID NO: 2611606 - RNA, 19 nt, Homo sapiens
  misc_RNA (1)...(19): siRNA sense strand
caucgaaggagcagccauu

SEQ ID NO: 2611607 - RNA, 19 nt, Homo sapiens
  misc_RNA (1)...(19): siRNA sense strand
cugacgcaguggagagaca

SEQ ID NO: 2611608 - RNA, 19 nt, Homo sapiens
  misc_RNA (1)...(19): siRNA sense strand
gaucaugguuauuggaggu

SEQ ID NO: 2611609 - RNA, 19 nt, Homo sapiens
  misc_RNA (1)...(19): siRNA sense strand
cguguauguugcuggauca

SEQ ID NO: 2611610 - RNA, 19 nt, Homo sapiens
  misc_RNA (1)...(19): siRNA sense strand
gcucuauagcauuggagga

SEQ ID NO: 2611611 - RNA, 19 nt, Homo sapiens
  misc_RNA (1)...(19): siRNA sense strand
cuaaaacuguagaaaggua

SEQ ID NO: 2611612 - RNA, 19 nt, Homo sapiens
  misc_RNA (1)...(19): siRNA sense strand
uccaaaugucuguggucaa

SEQ ID NO: 2611613 - RNA, 19 nt, Homo sapiens
  misc_RNA (1)...(19): siRNA sense strand
cgacacaguggaagccgua

SEQ ID NO: 2611614 - RNA, 19 nt, Homo sapiens
  misc_RNA (1)...(19): siRNA sense strand
uagaaagguauaacccaaa

SEQ ID NO: 2611615 - RNA, 19 nt, Homo sapiens
  misc_RNA (1)...(19): siRNA sense strand
agguauaacccaaauuuga

SEQ ID NO: 2611616 - RNA, 19 nt, Homo sapiens
  misc_RNA (1)...(19): siRNA sense strand
ccguaaucgaguacaugua

SEQ ID NO: 2611617 - RNA, 19 nt, Homo sapiens
  misc_RNA (1)...(19): siRNA sense strand
gugucaaguuggucgcuga

SEQ ID NO: 2611618 - RNA, 19 nt, Homo sapiens
  misc_RNA (1)...(19): siRNA sense strand
uggaugugaucaugguuau

SEQ ID NO: 2611619 - RNA, 19 nt, Homo sapiens
  misc_RNA (1)...(19): siRNA sense strand
ugaugaggacagaugggua

SEQ ID NO: 2611620 - RNA, 19 nt, Homo sapiens
  misc_RNA (1)...(19): siRNA sense strand
gacagaugcaagagauaca

SEQ ID NO: 2611621 - RNA, 19 nt, Homo sapiens
  misc_RNA (1)...(19): siRNA sense strand
gguaaaucugccacauauu

SEQ ID NO: 2611622 - RNA, 19 nt, Homo sapiens
  misc_RNA (1)...(19): siRNA sense strand
ggagccaggguuugcuaaa

SEQ ID NO: 2611623 - RNA, 19 nt, Homo sapiens
  misc_RNA (1)...(19): siRNA sense strand
cuccagaaguccuaagcau

SEQ ID NO: 2611624 - RNA, 19 nt, Homo sapiens
  misc_RNA (1)...(19): siRNA sense strand
gagagagauacuuugaaga

SEQ ID NO: 2611625 - RNA, 19 nt, Homo sapiens
  misc_RNA (1)...(19): siRNA sense strand
ggacuauuuaagugaaugu

SEQ ID NO: 2611626 - RNA, 19 nt, Homo sapiens
  misc_RNA (1)...(19): siRNA sense strand
uguuuauaauccugagcuu

SEQ ID NO: 2611627 - RNA, 19 nt, Homo sapiens
  misc_RNA (1)...(19): siRNA sense strand
ucgagaugucaaagcacua

SEQ ID NO: 2611628 - RNA, 19 nt, Homo sapiens
  misc_RNA (1)...(19): siRNA sense strand
aguugauucugaagagguu

SEQ ID NO: 2611629 - RNA, 19 nt, Homo sapiens
  misc_RNA (1)...(19): siRNA sense strand
ugcugaagagagagagaga

SEQ ID NO: 2611630 - RNA, 19 nt, Homo sapiens
  misc_RNA (1)...(19): siRNA sense strand
uacuggagauggagagcau

SEQ ID NO: 2611631 - RNA, 19 nt, Homo sapiens
  misc_RNA (1)...(19): siRNA sense strand
gcauuggaggacauggcaa

SEQ ID NO: 2611632 - RNA, 19 nt, Homo sapiens
  misc_RNA (1)...(19): siRNA sense strand
gagauggagagcauggaga

SEQ ID NO: 2611633 - RNA, 19 nt, Homo sapiens
  misc_RNA (1)...(19): siRNA sense strand
augagauccuugaaagcuu

SEQ ID NO: 2611634 - RNA, 19 nt, Homo sapiens
  misc_RNA (1)...(19): siRNA sense strand
gggcugaggcugagaaaac

SEQ ID NO: 2611635 - RNA, 19 nt, Homo sapiens
  misc_RNA (1)...(19): siRNA sense strand
gggaaagaggugcuggagu

SEQ ID NO: 2611636 - RNA, 19 nt, Homo sapiens
  misc_RNA (1)...(19): siRNA sense strand
ggugugagcucuuugacca

SEQ ID NO: 2611637 - RNA, 19 nt, Homo sapiens
  misc_RNA (1)...(19): siRNA sense strand
ugcuggaguaucuggguaa

SEQ ID NO: 2611638 - RNA, 19 nt, Homo sapiens
  misc_RNA (1)...(19): siRNA sense strand
guuugugguucuagcagau

SEQ ID NO: 2611639 - RNA, 19 nt, Homo sapiens
  misc_RNA (1)...(19): siRNA sense strand
aggcaagcuggaauagauu

SEQ ID NO: 2611640 - RNA, 19 nt, Homo sapiens
  misc_RNA (1)...(19): siRNA sense strand
cugaagaaacuaagaacaa

SEQ ID NO: 2611641 - RNA, 19 nt, Homo sapiens
  misc_RNA (1)...(19): siRNA sense strand
agucagaugcacaggauaa

SEQ ID NO: 2611642 - RNA, 19 nt, Homo sapiens
  misc_RNA (1)...(19): siRNA sense strand
cauacauacucuaggguga

SEQ ID NO: 2611643 - RNA, 19 nt, Homo sapiens
  misc_RNA (1)...(19): siRNA sense strand
caguugaaacacaaagaua

SEQ ID NO: 2611644 - RNA, 19 nt, Homo sapiens
  misc_RNA (1)...(19): siRNA sense strand
gauuaaagaguaaggggaa

SEQ ID NO: 2611645 - RNA, 19 nt, Homo sapiens
  misc_RNA (1)...(19): siRNA sense strand
aagcacaccaagaggaaau

SEQ ID NO: 2611646 - RNA, 19 nt, Homo sapiens
  misc_RNA (1)...(19): siRNA sense strand
aggaaauggcugagcagga

SEQ ID NO: 2611647 - RNA, 19 nt, Homo sapiens
  misc_RNA (1)...(19): siRNA sense strand
uuaucgaaguugugaguca

SEQ ID NO: 2611648 - RNA, 19 nt, Homo sapiens
  misc_RNA (1)...(19): siRNA sense strand
ugacauuggaacagacuuu

SEQ ID NO: 2611649 - RNA, 19 nt, Homo sapiens
  misc_RNA (1)...(19): siRNA sense strand
cagaccacucuaaggaaua

SEQ ID NO: 2611650 - RNA, 19 nt, Homo sapiens
  misc_RNA (1)...(19): siRNA sense strand
ugguuguugucauggauaa

SEQ ID NO: 2611651 - RNA, 19 nt, Homo sapiens
  misc_RNA (1)...(19): siRNA sense strand
agaucaaccuuauguucaa

SEQ ID NO: 2611652 - RNA, 19 nt, Homo sapiens
  misc_RNA (1)...(19): siRNA sense strand
cccaaaagaagcagaaaau

SEQ ID NO: 2611653 - RNA, 19 nt, Homo sapiens
  misc_RNA (1)...(19): siRNA sense strand
cuuuacagccuuaugcaaa

SEQ ID NO: 2611654 - RNA, 19 nt, Homo sapiens
  misc_RNA (1)...(19): siRNA sense strand
ugacuguagaagaagcaaa

SEQ ID NO: 2611655 - RNA, 19 nt, Homo sapiens
  misc_RNA (1)...(19): siRNA sense strand
gaagaagcaaagaggucau

SEQ ID NO: 2611656 - RNA, 19 nt, Homo sapiens
  misc_RNA (1)...(19): siRNA sense strand
cugugaaauuauucgauga

SEQ ID NO: 2611657 - RNA, 19 nt, Homo sapiens
  misc_RNA (1)...(19): siRNA sense strand
acaccuaguuucagaccuu

SEQ ID NO: 2611658 - RNA, 19 nt, Homo sapiens
  misc_RNA (1)...(19): siRNA sense strand
gcuacuuaaauuagagcuu

SEQ ID NO: 2611659 - RNA, 19 nt, Homo sapiens
  misc_RNA (1)...(19): siRNA sense strand
agaaaggauggauaagcua

SEQ ID NO: 2611660 - RNA, 19 nt, Homo sapiens
  misc_RNA (1)...(19): siRNA sense strand
uacagggauuaaagaguaa

SEQ ID NO: 2611661 - RNA, 19 nt, Homo sapiens
  misc_RNA (1)...(19): siRNA sense strand
ccccaaaagaagcagaaaa

SEQ ID NO: 2611662 - RNA, 19 nt, Homo sapiens
  misc_RNA (1)...(19): siRNA sense strand
auguaauucugcuggugaa

SEQ ID NO: 2611663 - RNA, 19 nt, Homo sapiens
  misc_RNA (1)...(19): siRNA sense strand
cauuaaacagguagcagau

SEQ ID NO: 2611664 - RNA, 19 nt, Homo sapiens
  misc_RNA (1)...(19): siRNA sense strand
aaguggaacgugugaaaca

SEQ ID NO: 2611665 - RNA, 19 nt, Homo sapiens
  misc_RNA (1)...(19): siRNA sense strand
acauuaaacagguagcaga

SEQ ID NO: 2611666 - RNA, 19 nt, Homo sapiens
  misc_RNA (1)...(19): siRNA sense strand
ggaagaagaguacagguca

SEQ ID NO: 2611667 - RNA, 19 nt, Homo sapiens
  misc_RNA (1)...(19): siRNA sense strand
aaaggauggauaagcuaaa

SEQ ID NO: 2611668 - RNA, 19 nt, Homo sapiens
  misc_RNA (1)...(19): siRNA sense strand
caaaagaagcagaaaaucu

SEQ ID NO: 2611669 - RNA, 19 nt, Homo sapiens
  misc_RNA (1)...(19): siRNA sense strand
ggaacaaaucaugaagaga

SEQ ID NO: 2611670 - RNA, 19 nt, Homo sapiens
  misc_RNA (1)...(19): siRNA sense strand
auuaaagaguaaggggaaa

SEQ ID NO: 2611671 - RNA, 19 nt, Homo sapiens
  misc_RNA (1)...(19): siRNA sense strand
uuucacaaguguuaccaaa

SEQ ID NO: 2611672 - RNA, 19 nt, Homo sapiens
  misc_RNA (1)...(19): siRNA sense strand
cugccaaaguggaacgugu

SEQ ID NO: 2611673 - RNA, 19 nt, Homo sapiens
  misc_RNA (1)...(19): siRNA sense strand
cuuuaguagaugacaauga

SEQ ID NO: 2611674 - RNA, 19 nt, Homo sapiens
  misc_RNA (1)...(19): siRNA sense strand
agaaacgacaaccaggaua

SEQ ID NO: 2611675 - RNA, 19 nt, Homo sapiens
  misc_RNA (1)...(19): siRNA sense strand
uggcugagcaggagucgua

SEQ ID NO: 2611676 - RNA, 19 nt, Homo sapiens
  misc_RNA (1)...(19): siRNA sense strand
cauucaaacucuagauccu

SEQ ID NO: 2611677 - RNA, 19 nt, Homo sapiens
  misc_RNA (1)...(19): siRNA sense strand
gggaagaagaguacagguc

SEQ ID NO: 2611678 - RNA, 19 nt, Homo sapiens
  misc_RNA (1)...(19): siRNA sense strand
uggaaaauauucagagucu

SEQ ID NO: 2611679 - RNA, 19 nt, Homo sapiens
  misc_RNA (1)...(19): siRNA sense strand
cuuaagcaccaguccauaa

SEQ ID NO: 2611680 - RNA, 19 nt, Homo sapiens
  misc_RNA (1)...(19): siRNA sense strand
ccuuuaugcuaccaggauu

SEQ ID NO: 2611681 - RNA, 19 nt, Homo sapiens
  misc_RNA (1)...(19): siRNA sense strand
cuuuaugcuaccaggauuu

SEQ ID NO: 2611682 - RNA, 19 nt, Homo sapiens
  misc_RNA (1)...(19): siRNA sense strand
uaaacagguagcagaucaa

SEQ ID NO: 2611683 - RNA, 19 nt, Homo sapiens
  misc_RNA (1)...(19): siRNA sense strand
gguuuuggacaguaaauua

SEQ ID NO: 2611684 - RNA, 19 nt, Homo sapiens
  misc_RNA (1)...(19): siRNA sense strand
acucaucaaccuaucaaua

SEQ ID NO: 2611685 - RNA, 19 nt, Homo sapiens
  misc_RNA (1)...(19): siRNA sense strand
gaguuggcugcuagaacaa

SEQ ID NO: 2611686 - RNA, 19 nt, Homo sapiens
  misc_RNA (1)...(19): siRNA sense strand
augaagagauaguuccaca

SEQ ID NO: 2611687 - RNA, 19 nt, Homo sapiens
  misc_RNA (1)...(19): siRNA sense strand
aggaaaacaaacugcaauu

SEQ ID NO: 2611688 - RNA, 19 nt, Homo sapiens
  misc_RNA (1)...(19): siRNA sense strand
gaagaagaguacaggucag

SEQ ID NO: 2611689 - RNA, 19 nt, Homo sapiens
  misc_RNA (1)...(19): siRNA sense strand
ggaacgugugaaacaggaa

SEQ ID NO: 2611690 - RNA, 19 nt, Homo sapiens
  misc_RNA (1)...(19): siRNA sense strand
cuaaugugacuguagaaga

SEQ ID NO: 2611691 - RNA, 19 nt, Homo sapiens
  misc_RNA (1)...(19): siRNA sense strand
guucauuuacagggauuaa

SEQ ID NO: 2611692 - RNA, 19 nt, Homo sapiens
  misc_RNA (1)...(19): siRNA sense strand
ugaaacugaagcugccaaa

SEQ ID NO: 2611693 - RNA, 19 nt, Homo sapiens
  misc_RNA (1)...(19): siRNA sense strand
ggauuaaagaguaagggga

SEQ ID NO: 2611694 - RNA, 19 nt, Homo sapiens
  misc_RNA (1)...(19): siRNA sense strand
uggugaagcuuuggauaca

SEQ ID NO: 2611695 - RNA, 19 nt, Homo sapiens
  misc_RNA (1)...(19): siRNA sense strand
aagcuauccaggacagaau

SEQ ID NO: 2611696 - RNA, 19 nt, Homo sapiens
  misc_RNA (1)...(19): siRNA sense strand
ggggaaggcugcagaccaa

SEQ ID NO: 2611697 - RNA, 19 nt, Homo sapiens
  misc_RNA (1)...(19): siRNA sense strand
gaugcuuggaggugaagaa

SEQ ID NO: 2611698 - RNA, 19 nt, Homo sapiens
  misc_RNA (1)...(19): siRNA sense strand
ggugggaggugcauggcau

SEQ ID NO: 2611699 - RNA, 19 nt, Homo sapiens
  misc_RNA (1)...(19): siRNA sense strand
ucucuaagauuguggugca

SEQ ID NO: 2611700 - RNA, 19 nt, Homo sapiens
  misc_RNA (1)...(19): siRNA sense strand
ggugaagaagcgaggccca

SEQ ID NO: 2611701 - RNA, 19 nt, Homo sapiens
  misc_RNA (1)...(19): siRNA sense strand
gugaagaagcgaggcccaa

SEQ ID NO: 2611702 - RNA, 19 nt, Homo sapiens
  misc_RNA (1)...(19): siRNA sense strand
gugaagacgaauaugaucu

SEQ ID NO: 2611703 - RNA, 19 nt, Homo sapiens
  misc_RNA (1)...(19): siRNA sense strand
cggugauugcaaauaacua

SEQ ID NO: 2611704 - RNA, 19 nt, Homo sapiens
  misc_RNA (1)...(19): siRNA sense strand
aguuagaagagaauggaau

SEQ ID NO: 2611705 - RNA, 19 nt, Homo sapiens
  misc_RNA (1)...(19): siRNA sense strand
agguggauuuggagcacua

SEQ ID NO: 2611706 - RNA, 19 nt, Homo sapiens
  misc_RNA (1)...(19): siRNA sense strand
ugaugaugcuggagggucu

SEQ ID NO: 2611707 - RNA, 19 nt, Homo sapiens
  misc_RNA (1)...(19): siRNA sense strand
agagaauggaauugaaguu

SEQ ID NO: 2611708 - RNA, 19 nt, Homo sapiens
  misc_RNA (1)...(19): siRNA sense strand
cccuggacuugaaggacaa

SEQ ID NO: 2611709 - RNA, 19 nt, Homo sapiens
  misc_RNA (1)...(19): siRNA sense strand
ucuuuaagcaucaggcaga

SEQ ID NO: 2611710 - RNA, 19 nt, Homo sapiens
  misc_RNA (1)...(19): siRNA sense strand
aggacugugcaaagaggaa

SEQ ID NO: 2611711 - RNA, 19 nt, Homo sapiens
  misc_RNA (1)...(19): siRNA sense strand
ugauggagguguuugacga

SEQ ID NO: 2611712 - RNA, 19 nt, Homo sapiens
  misc_RNA (1)...(19): siRNA sense strand
ugaaggagaaugaagacca

SEQ ID NO: 2611713 - RNA, 19 nt, Homo sapiens
  misc_RNA (1)...(19): siRNA sense strand
cagaacaagcccauggagu

SEQ ID NO: 2611714 - RNA, 19 nt, Homo sapiens
  misc_RNA (1)...(19): siRNA sense strand
aagcauaaguugcggcaga

SEQ ID NO: 2611715 - RNA, 19 nt, Homo sapiens
  misc_RNA (1)...(19): siRNA sense strand
ccucuuaccuugcgggcua

SEQ ID NO: 2611716 - RNA, 19 nt, Homo sapiens
  misc_RNA (1)...(19): siRNA sense strand
cguccaagaucgugcgcau

SEQ ID NO: 2611717 - RNA, 19 nt, Homo sapiens
  misc_RNA (1)...(19): siRNA sense strand
gugagaagcaggugagcca

SEQ ID NO: 2611718 - RNA, 19 nt, Homo sapiens
  misc_RNA (1)...(19): siRNA sense strand
acguggugcugaagggcaa

SEQ ID NO: 2611719 - RNA, 19 nt, Homo sapiens
  misc_RNA (1)...(19): siRNA sense strand
ggagagaugccaaggcgau

SEQ ID NO: 2611720 - RNA, 19 nt, Homo sapiens
  misc_RNA (1)...(19): siRNA sense strand
gagagguauuaucgagaca

SEQ ID NO: 2611721 - RNA, 19 nt, Homo sapiens
  misc_RNA (1)...(19): siRNA sense strand
auacaugccaagugaucaa

SEQ ID NO: 2611722 - RNA, 19 nt, Homo sapiens
  misc_RNA (1)...(19): siRNA sense strand
ccaaacaagugucugccua

SEQ ID NO: 2611723 - RNA, 19 nt, Homo sapiens
  misc_RNA (1)...(19): siRNA sense strand
acaucaaugagcugacuaa

SEQ ID NO: 2611724 - RNA, 19 nt, Homo sapiens
  misc_RNA (1)...(19): siRNA sense strand
gcacugcugucgacggcaa

SEQ ID NO: 2611725 - RNA, 19 nt, Homo sapiens
  misc_RNA (1)...(19): siRNA sense strand
aaagauaagcugcuggaca

SEQ ID NO: 2611726 - RNA, 19 nt, Homo sapiens
  misc_RNA (1)...(19): siRNA sense strand
acaaacugcucuacgccaa

SEQ ID NO: 2611727 - RNA, 19 nt, Homo sapiens
  misc_RNA (1)...(19): siRNA sense strand
aggacaagcucauccguca

SEQ ID NO: 2611728 - RNA, 19 nt, Homo sapiens
  misc_RNA (1)...(19): siRNA sense strand
ccgaccucaucgagaagaa

SEQ ID NO: 2611729 - RNA, 19 nt, Homo sapiens
  misc_RNA (1)...(19): siRNA sense strand
gcugaggagcugagcaagu

SEQ ID NO: 2611730 - RNA, 19 nt, Homo sapiens
  misc_RNA (1)...(19): siRNA sense strand
gugccuucguggugacaga

SEQ ID NO: 2611731 - RNA, 19 nt, Homo sapiens
  misc_RNA (1)...(19): siRNA sense strand
gcauaaguugcggcagaaa

SEQ ID NO: 2611732 - RNA, 19 nt, Homo sapiens
  misc_RNA (1)...(19): siRNA sense strand
ugacuaaccacauggacga

SEQ ID NO: 2611733 - RNA, 19 nt, Homo sapiens
  misc_RNA (1)...(19): siRNA sense strand
ggaugaccucuuugagaca

SEQ ID NO: 2611734 - RNA, 19 nt, Homo sapiens
  misc_RNA (1)...(19): siRNA sense strand
gugccaguuuguaaggaga

SEQ ID NO: 2611735 - RNA, 19 nt, Homo sapiens
  misc_RNA (1)...(19): siRNA sense strand
gugacagacaccacgcuua

SEQ ID NO: 2611736 - RNA, 19 nt, Homo sapiens
  misc_RNA (1)...(19): siRNA sense strand
aagauaagcugcuggacac

SEQ ID NO: 2611737 - RNA, 19 nt, Homo sapiens
  misc_RNA (1)...(19): siRNA sense strand
gcucccacguggugcugaa

SEQ ID NO: 2611738 - RNA, 19 nt, Homo sapiens
  misc_RNA (1)...(19): siRNA sense strand
gcguguguccggagaacga

SEQ ID NO: 2611739 - RNA, 19 nt, Homo sapiens
  misc_RNA (1)...(19): siRNA sense strand
agucgggccagaagaacua

SEQ ID NO: 2611740 - RNA, 19 nt, Homo sapiens
  misc_RNA (1)...(19): siRNA sense strand
aagacaagcuggugcgcaa

SEQ ID NO: 2611741 - RNA, 19 nt, Homo sapiens
  misc_RNA (1)...(19): siRNA sense strand
aggaagaagaagaggagcu

SEQ ID NO: 2611742 - RNA, 19 nt, Homo sapiens
  misc_RNA (1)...(19): siRNA sense strand
cgaggaugacugugagcga

SEQ ID NO: 2611743 - RNA, 19 nt, Homo sapiens
  misc_RNA (1)...(19): siRNA sense strand
agggugaggaagaagaaga

SEQ ID NO: 2611744 - RNA, 19 nt, Homo sapiens
  misc_RNA (1)...(19): siRNA sense strand
ccuaugaggaggaggaggu

SEQ ID NO: 2611745 - RNA, 19 nt, Homo sapiens
  misc_RNA (1)...(19): siRNA sense strand
gugaggaagaagaagagga

SEQ ID NO: 2611746 - RNA, 19 nt, Homo sapiens
  misc_RNA (1)...(19): siRNA sense strand
ccgcaaggacgaugcacca

SEQ ID NO: 2611747 - RNA, 19 nt, Homo sapiens
  misc_RNA (1)...(19): siRNA sense strand
cugaugacgaugaggagga

SEQ ID NO: 2611748 - RNA, 19 nt, Homo sapiens
  misc_RNA (1)...(19): siRNA sense strand
ugaccuaugaggaggagga

SEQ ID NO: 2611749 - RNA, 19 nt, Homo sapiens
  misc_RNA (1)...(19): siRNA sense strand
gggcagugggcuagaagcu

SEQ ID NO: 2611750 - RNA, 19 nt, Homo sapiens
  misc_RNA (1)...(19): siRNA sense strand
ugaagauccacaugcggaa

SEQ ID NO: 2611751 - RNA, 19 nt, Homo sapiens
  misc_RNA (1)...(19): siRNA sense strand
gaauuugccuauacagcca

SEQ ID NO: 2611752 - RNA, 19 nt, Homo sapiens
  misc_RNA (1)...(19): siRNA sense strand
ggaugaccugauugggauu

SEQ ID NO: 2611753 - RNA, 19 nt, Homo sapiens
  misc_RNA (1)...(19): siRNA sense strand
gggcuuucgccaaggagga

SEQ ID NO: 2611754 - RNA, 19 nt, Homo sapiens
  misc_RNA (1)...(19): siRNA sense strand
agacugagcuccagggcgu

SEQ ID NO: 2611755 - RNA, 19 nt, Homo sapiens
  misc_RNA (1)...(19): siRNA sense strand
accugaagaugaaggguga

SEQ ID NO: 2611756 - RNA, 19 nt, Homo sapiens
  misc_RNA (1)...(19): siRNA sense strand
gugcgugaguaccgggaga

SEQ ID NO: 2611757 - RNA, 19 nt, Homo sapiens
  misc_RNA (1)...(19): siRNA sense strand
ucuccugcgaagagcgaaa

SEQ ID NO: 2611758 - RNA, 19 nt, Homo sapiens
  misc_RNA (1)...(19): siRNA sense strand
cagagcaggccgaacgcua

SEQ ID NO: 2611759 - RNA, 19 nt, Homo sapiens
  misc_RNA (1)...(19): siRNA sense strand
aggagggcucggaggagaa

SEQ ID NO: 2611760 - RNA, 19 nt, Homo sapiens
  misc_RNA (1)...(19): siRNA sense strand
guauugagcagaaaagcaa

SEQ ID NO: 2611761 - RNA, 19 nt, Homo sapiens
  misc_RNA (1)...(19): siRNA sense strand
ccgaacgcuaugaggacau

SEQ ID NO: 2611762 - RNA, 19 nt, Homo sapiens
  misc_RNA (1)...(19): siRNA sense strand
ccacuuucgacgaggccau

SEQ ID NO: 2611763 - RNA, 19 nt, Homo sapiens
  misc_RNA (1)...(19): siRNA sense strand
uggacgagaaauagauaaa

SEQ ID NO: 2611764 - RNA, 19 nt, Homo sapiens
  misc_RNA (1)...(19): siRNA sense strand
acaucaaaggcaagaaauu

SEQ ID NO: 2611765 - RNA, 19 nt, Homo sapiens
  misc_RNA (1)...(19): siRNA sense strand
gguuggaaauagugggauc

SEQ ID NO: 2611766 - RNA, 19 nt, Homo sapiens
  misc_RNA (1)...(19): siRNA sense strand
ggaaauagugggauccuga

SEQ ID NO: 2611767 - RNA, 19 nt, Homo sapiens
  misc_RNA (1)...(19): siRNA sense strand
gucaacagguacuggaaaa

SEQ ID NO: 2611768 - RNA, 19 nt, Homo sapiens
  misc_RNA (1)...(19): siRNA sense strand
cagcaauaugugaagagau

SEQ ID NO: 2611769 - RNA, 19 nt, Homo sapiens
  misc_RNA (1)...(19): siRNA sense strand
caauaugugaagagaucca

SEQ ID NO: 2611770 - RNA, 19 nt, Homo sapiens
  misc_RNA (1)...(19): siRNA sense strand
gcaacugugaccaggacau

SEQ ID NO: 2611771 - RNA, 19 nt, Homo sapiens
  misc_RNA (1)...(19): siRNA sense strand
ggugaagacuggagggacc

SEQ ID NO: 2611772 - RNA, 19 nt, Homo sapiens
  misc_RNA (1)...(19): siRNA sense strand
ccgcaagaacacagggaaa

SEQ ID NO: 2611773 - RNA, 19 nt, Homo sapiens
  misc_RNA (1)...(19): siRNA sense strand
gggagaugccugaagggaa

SEQ ID NO: 2611774 - RNA, 19 nt, Homo sapiens
  misc_RNA (1)...(19): siRNA sense strand
ccuugaagucuauggaaaa

SEQ ID NO: 2611775 - RNA, 19 nt, Homo sapiens
  misc_RNA (1)...(19): siRNA sense strand
ggagaugccugaagggaac

SEQ ID NO: 2611776 - RNA, 19 nt, Homo sapiens
  misc_RNA (1)...(19): siRNA sense strand
ugacuuuccugcagcgcua

SEQ ID NO: 2611777 - RNA, 19 nt, Homo sapiens
  misc_RNA (1)...(19): siRNA sense strand
gcaaccuagagcagagcaa

SEQ ID NO: 2611778 - RNA, 19 nt, Homo sapiens
  misc_RNA (1)...(19): siRNA sense strand
gcgacauggagaacgaauu

SEQ ID NO: 2611779 - RNA, 19 nt, Homo sapiens
  misc_RNA (1)...(19): siRNA sense strand
gcuacgacuucgaggccga

SEQ ID NO: 2611780 - RNA, 19 nt, Homo sapiens
  misc_RNA (1)...(19): siRNA sense strand
cagagcaaggagagacaga

SEQ ID NO: 2611781 - RNA, 19 nt, Homo sapiens
  misc_RNA (1)...(19): siRNA sense strand
gcuacaucgucgugggcgu

SEQ ID NO: 2611782 - RNA, 19 nt, Homo sapiens
  misc_RNA (1)...(19): siRNA sense strand
gugcuuaccucgguggcaa

SEQ ID NO: 2611783 - RNA, 19 nt, Homo sapiens
  misc_RNA (1)...(19): siRNA sense strand
agaaaaugggccaggaaua

SEQ ID NO: 2611784 - RNA, 19 nt, Homo sapiens
  misc_RNA (1)...(19): siRNA sense strand
augaaguacccguguaaua

SEQ ID NO: 2611785 - RNA, 19 nt, Homo sapiens
  misc_RNA (1)...(19): siRNA sense strand
uggaaagccaacagagaau

SEQ ID NO: 2611786 - RNA, 19 nt, Homo sapiens
  misc_RNA (1)...(19): siRNA sense strand
caucaguagaacucagaaa

SEQ ID NO: 2611787 - RNA, 19 nt, Homo sapiens
  misc_RNA (1)...(19): siRNA sense strand
acucaucaccagagcuuaa

SEQ ID NO: 2611788 - RNA, 19 nt, Homo sapiens
  misc_RNA (1)...(19): siRNA sense strand
accaaaagcuuuacggauu

SEQ ID NO: 2611789 - RNA, 19 nt, Homo sapiens
  misc_RNA (1)...(19): siRNA sense strand
aauaaugauuccagccaga

SEQ ID NO: 2611790 - RNA, 19 nt, Homo sapiens
  misc_RNA (1)...(19): siRNA sense strand
ccuacaaucaguucagaau

SEQ ID NO: 2611791 - RNA, 19 nt, Homo sapiens
  misc_RNA (1)...(19): siRNA sense strand
acucagaaacucaauggaa

SEQ ID NO: 2611792 - RNA, 19 nt, Homo sapiens
  misc_RNA (1)...(19): siRNA sense strand
ccuaacaauggaaagaauu

SEQ ID NO: 2611793 - RNA, 19 nt, Homo sapiens
  misc_RNA (1)...(19): siRNA sense strand
gcguggaaacuuuggggaa

SEQ ID NO: 2611794 - RNA, 19 nt, Homo sapiens
  misc_RNA (1)...(19): siRNA sense strand
acuauaaucaguuggacau

SEQ ID NO: 2611795 - RNA, 19 nt, Homo sapiens
  misc_RNA (1)...(19): siRNA sense strand
cagaaugucuugagccugu

SEQ ID NO: 2611796 - RNA, 19 nt, Homo sapiens
  misc_RNA (1)...(19): siRNA sense strand
ccuccaagaagacaacaaa

SEQ ID NO: 2611797 - RNA, 19 nt, Homo sapiens
  misc_RNA (1)...(19): siRNA sense strand
ggaaggauggggaaaacaa

SEQ ID NO: 2611798 - RNA, 19 nt, Homo sapiens
  misc_RNA (1)...(19): siRNA sense strand
cuugagagcagaaagugaa

SEQ ID NO: 2611799 - RNA, 19 nt, Homo sapiens
  misc_RNA (1)...(19): siRNA sense strand
agauacuagaugaggaguu

SEQ ID NO: 2611800 - RNA, 19 nt, Homo sapiens
  misc_RNA (1)...(19): siRNA sense strand
accuaacaauggaaagaau

SEQ ID NO: 2611801 - RNA, 19 nt, Homo sapiens
  misc_RNA (1)...(19): siRNA sense strand
gaguagggaacaucaucaa

SEQ ID NO: 2611802 - RNA, 19 nt, Homo sapiens
  misc_RNA (1)...(19): siRNA sense strand
gaaacucaauggaaagcca

SEQ ID NO: 2611803 - RNA, 19 nt, Homo sapiens
  misc_RNA (1)...(19): siRNA sense strand
auggaaagccaacagagaa

SEQ ID NO: 2611804 - RNA, 19 nt, Homo sapiens
  misc_RNA (1)...(19): siRNA sense strand
aauggaaagccaacagaga

SEQ ID NO: 2611805 - RNA, 19 nt, Homo sapiens
  misc_RNA (1)...(19): siRNA sense strand
acagaaaggccggaugcua

SEQ ID NO: 2611806 - RNA, 19 nt, Homo sapiens
  misc_RNA (1)...(19): siRNA sense strand
cuaauggaucagaacguau

SEQ ID NO: 2611807 - RNA, 19 nt, Homo sapiens
  misc_RNA (1)...(19): siRNA sense strand
gucaauuaacagaugaaca

SEQ ID NO: 2611808 - RNA, 19 nt, Homo sapiens
  misc_RNA (1)...(19): siRNA sense strand
gcagaaaaugggccaggaa

SEQ ID NO: 2611809 - RNA, 19 nt, Homo sapiens
  misc_RNA (1)...(19): siRNA sense strand
gcguuagcuuuaagggcaa

SEQ ID NO: 2611810 - RNA, 19 nt, Homo sapiens
  misc_RNA (1)...(19): siRNA sense strand
gcauaucaagugaggaaaa

SEQ ID NO: 2611811 - RNA, 19 nt, Homo sapiens
  misc_RNA (1)...(19): siRNA sense strand
gguuccaguauuagacaaa

SEQ ID NO: 2611812 - RNA, 19 nt, Homo sapiens
  misc_RNA (1)...(19): siRNA sense strand
aaggaagauagaauggaaa

SEQ ID NO: 2611813 - RNA, 19 nt, Homo sapiens
  misc_RNA (1)...(19): siRNA sense strand
aggaagauagaauggaaaa

SEQ ID NO: 2611814 - RNA, 19 nt, Homo sapiens
  misc_RNA (1)...(19): siRNA sense strand
ugaagaagcagauggccau

SEQ ID NO: 2611815 - RNA, 19 nt, Homo sapiens
  misc_RNA (1)...(19): siRNA sense strand
gcaaagaaguuaucccaac

SEQ ID NO: 2611816 - RNA, 19 nt, Homo sapiens
  misc_RNA (1)...(19): siRNA sense strand
augaagaagcagauggcca

SEQ ID NO: 2611817 - RNA, 19 nt, Homo sapiens
  misc_RNA (1)...(19): siRNA sense strand
ggugaaauaaugaaggaag

SEQ ID NO: 2611818 - RNA, 19 nt, Homo sapiens
  misc_RNA (1)...(19): siRNA sense strand
ggagggaauugauguggga

SEQ ID NO: 2611819 - RNA, 19 nt, Homo sapiens
  misc_RNA (1)...(19): siRNA sense strand
uguucagcaaguagauaaa

SEQ ID NO: 2611820 - RNA, 19 nt, Homo sapiens
  misc_RNA (1)...(19): siRNA sense strand
guauugggaugcagaggga

SEQ ID NO: 2611821 - RNA, 19 nt, Homo sapiens
  misc_RNA (1)...(19): siRNA sense strand
ccaacaaagaagaguuuac

SEQ ID NO: 2611822 - RNA, 19 nt, Homo sapiens
  misc_RNA (1)...(19): siRNA sense strand
cuuuagugacauugaacuu

SEQ ID NO: 2611823 - RNA, 19 nt, Homo sapiens
  misc_RNA (1)...(19): siRNA sense strand
ucuggaagacaguggcauu

SEQ ID NO: 2611824 - RNA, 19 nt, Homo sapiens
  misc_RNA (1)...(19): siRNA sense strand
gguuaggaacucagcgacu

SEQ ID NO: 2611825 - RNA, 19 nt, Homo sapiens
  misc_RNA (1)...(19): siRNA sense strand
uggaaaggcaaacggaguu

SEQ ID NO: 2611826 - RNA, 19 nt, Homo sapiens
  misc_RNA (1)...(19): siRNA sense strand
uggaagaaugcaugcagau

SEQ ID NO: 2611827 - RNA, 19 nt, Homo sapiens
  misc_RNA (1)...(19): siRNA sense strand
auaaauggugaggaagaaa

SEQ ID NO: 2611828 - RNA, 19 nt, Homo sapiens
  misc_RNA (1)...(19): siRNA sense strand
ccacacuccaccaggauca

SEQ ID NO: 2611829 - RNA, 19 nt, Homo sapiens
  misc_RNA (1)...(19): siRNA sense strand
aggaaggcaaagaaguuau

SEQ ID NO: 2611830 - RNA, 19 nt, Homo sapiens
  misc_RNA (1)...(19): siRNA sense strand
ggaacgaagugguagagca

SEQ ID NO: 2611831 - RNA, 19 nt, Homo sapiens
  misc_RNA (1)...(19): siRNA sense strand
acgaagugguagagcacga

SEQ ID NO: 2611832 - RNA, 19 nt, Homo sapiens
  misc_RNA (1)...(19): siRNA sense strand
ggguggaguuggacagcca

SEQ ID NO: 2611833 - RNA, 19 nt, Homo sapiens
  misc_RNA (1)...(19): siRNA sense strand
ggcucuacgucgacagaau

SEQ ID NO: 2611834 - RNA, 19 nt, Homo sapiens
  misc_RNA (1)...(19): siRNA sense strand
uggagaaagaguuagaaaa

SEQ ID NO: 2611835 - RNA, 19 nt, Homo sapiens
  misc_RNA (1)...(19): siRNA sense strand
uggugagcgccaagagcua

SEQ ID NO: 2611836 - RNA, 19 nt, Homo sapiens
  misc_RNA (1)...(19): siRNA sense strand
ggguggucaaaguggagaa

SEQ ID NO: 2611837 - RNA, 19 nt, Homo sapiens
  misc_RNA (1)...(19): siRNA sense strand
gugggaacgaagugguaga

SEQ ID NO: 2611838 - RNA, 19 nt, Homo sapiens
  misc_RNA (1)...(19): siRNA sense strand
gaacgaagugguagagcac

SEQ ID NO: 2611839 - RNA, 19 nt, Homo sapiens
  misc_RNA (1)...(19): siRNA sense strand
ccuuagcagcugaaaugaa

SEQ ID NO: 2611840 - RNA, 19 nt, Homo sapiens
  misc_RNA (1)...(19): siRNA sense strand
cggaaacagacaaauccaa

SEQ ID NO: 2611841 - RNA, 19 nt, Homo sapiens
  misc_RNA (1)...(19): siRNA sense strand
augaagaggagacgacaca

SEQ ID NO: 2611842 - RNA, 19 nt, Homo sapiens
  misc_RNA (1)...(19): siRNA sense strand
guaaacugcuggaagccca

SEQ ID NO: 2611843 - RNA, 19 nt, Homo sapiens
  misc_RNA (1)...(19): siRNA sense strand
caguguacccugcuggaau

SEQ ID NO: 2611844 - RNA, 19 nt, Homo sapiens
  misc_RNA (1)...(19): siRNA sense strand
cggcaaagcucuauggaag

SEQ ID NO: 2611845 - RNA, 19 nt, Homo sapiens
  misc_RNA (1)...(19): siRNA sense strand
cacaagugcaggagagaau

SEQ ID NO: 2611846 - RNA, 19 nt, Homo sapiens
  misc_RNA (1)...(19): siRNA sense strand
ccugguguuuguugggaaa

SEQ ID NO: 2611847 - RNA, 19 nt, Homo sapiens
  misc_RNA (1)...(19): siRNA sense strand
augaauacgaugaccuaaa

SEQ ID NO: 2611848 - RNA, 19 nt, Homo sapiens
  misc_RNA (1)...(19): siRNA sense strand
gaaucgacgaacaggaaaa

SEQ ID NO: 2611849 - RNA, 19 nt, Homo sapiens
  misc_RNA (1)...(19): siRNA sense strand
acgaugaccuaaagcaaaa

SEQ ID NO: 2611850 - RNA, 19 nt, Homo sapiens
  misc_RNA (1)...(19): siRNA sense strand
auacagaucugcaggagca

SEQ ID NO: 2611851 - RNA, 19 nt, Homo sapiens
  misc_RNA (1)...(19): siRNA sense strand
acguuuaacccgaagguca

SEQ ID NO: 2611852 - RNA, 19 nt, Homo sapiens
  misc_RNA (1)...(19): siRNA sense strand
gaacauaucuggaccaccu

SEQ ID NO: 2611853 - RNA, 19 nt, Homo sapiens
  misc_RNA (1)...(19): siRNA sense strand
cguuuaacccgaaggucau

SEQ ID NO: 2611854 - RNA, 19 nt, Homo sapiens
  misc_RNA (1)...(19): siRNA sense strand
agaccauccagguugauaa

SEQ ID NO: 2611855 - RNA, 19 nt, Homo sapiens
  misc_RNA (1)...(19): siRNA sense strand
cggaaaggcaugacuggga

SEQ ID NO: 2611856 - RNA, 19 nt, Homo sapiens
  misc_RNA (1)...(19): siRNA sense strand
auacgaugaccuaaagcaa

SEQ ID NO: 2611857 - RNA, 19 nt, Homo sapiens
  misc_RNA (1)...(19): siRNA sense strand
gccaaugagaugacgccaa

SEQ ID NO: 2611858 - RNA, 19 nt, Homo sapiens
  misc_RNA (1)...(19): siRNA sense strand
aggaauuaccuuugacagu

SEQ ID NO: 2611859 - RNA, 19 nt, Homo sapiens
  misc_RNA (1)...(19): siRNA sense strand
guuuguugggaaaggaauu

SEQ ID NO: 2611860 - RNA, 19 nt, Homo sapiens
  misc_RNA (1)...(19): siRNA sense strand
uggaaagcugagagagacu

SEQ ID NO: 2611861 - RNA, 19 nt, Homo sapiens
  misc_RNA (1)...(19): siRNA sense strand
gcaugaaggcaaagaaaac

SEQ ID NO: 2611862 - RNA, 19 nt, Homo sapiens
  misc_RNA (1)...(19): siRNA sense strand
gcgugaugaccaacaaaga

SEQ ID NO: 2611863 - RNA, 19 nt, Homo sapiens
  misc_RNA (1)...(19): siRNA sense strand
aggaacaggcaaugggauc

SEQ ID NO: 2611864 - RNA, 19 nt, Homo sapiens
  misc_RNA (1)...(19): siRNA sense strand
acaaagaugaaguucccua

SEQ ID NO: 2611865 - RNA, 19 nt, Homo sapiens
  misc_RNA (1)...(19): siRNA sense strand
gcaacuauaugcucagcca

SEQ ID NO: 2611866 - RNA, 19 nt, Homo sapiens
  misc_RNA (1)...(19): siRNA sense strand
ugacaugggaggagcugca

SEQ ID NO: 2611867 - RNA, 19 nt, Homo sapiens
  misc_RNA (1)...(19): siRNA sense strand
aauagagcuuggagggaaa

SEQ ID NO: 2611868 - RNA, 19 nt, Homo sapiens
  misc_RNA (1)...(19): siRNA sense strand
acaugcugcucgagagaaa

SEQ ID NO: 2611869 - RNA, 19 nt, Homo sapiens
  misc_RNA (1)...(19): siRNA sense strand
gcaacugauuaaaggccaa

SEQ ID NO: 2611870 - RNA, 19 nt, Homo sapiens
  misc_RNA (1)...(19): siRNA sense strand
caauagagcuuggagggaa

SEQ ID NO: 2611871 - RNA, 19 nt, Homo sapiens
  misc_RNA (1)...(19): siRNA sense strand
gcauacuguggcagagaua

SEQ ID NO: 2611872 - RNA, 19 nt, Homo sapiens
  misc_RNA (1)...(19): siRNA sense strand
agaauagauuguacggcaa

SEQ ID NO: 2611873 - RNA, 19 nt, Homo sapiens
  misc_RNA (1)...(19): siRNA sense strand
aguaaauacaaccgugaua

SEQ ID NO: 2611874 - RNA, 19 nt, Homo sapiens
  misc_RNA (1)...(19): siRNA sense strand
cagaauagauuguacggca

SEQ ID NO: 2611875 - RNA, 19 nt, Homo sapiens
  misc_RNA (1)...(19): siRNA sense strand
gcuuggagggaaaggauau

SEQ ID NO: 2611876 - RNA, 19 nt, Homo sapiens
  misc_RNA (1)...(19): siRNA sense strand
auguaaagggauugucuaa

SEQ ID NO: 2611877 - RNA, 19 nt, Homo sapiens
  misc_RNA (1)...(19): siRNA sense strand
acaugauaagcaaggauaa

SEQ ID NO: 2611878 - RNA, 19 nt, Homo sapiens
  misc_RNA (1)...(19): siRNA sense strand
cagucagacaggaaauaaa

SEQ ID NO: 2611879 - RNA, 19 nt, Homo sapiens
  misc_RNA (1)...(19): siRNA sense strand
ucucaauauuccugauaga

SEQ ID NO: 2611880 - RNA, 19 nt, Homo sapiens
  misc_RNA (1)...(19): siRNA sense strand
agcaaggauaauuggaaua

SEQ ID NO: 2611881 - RNA, 19 nt, Homo sapiens
  misc_RNA (1)...(19): siRNA sense strand
aggaaguugcucaggauuu

SEQ ID NO: 2611882 - RNA, 19 nt, Homo sapiens
  misc_RNA (1)...(19): siRNA sense strand
ggagaaauaccaaacccaa

SEQ ID NO: 2611883 - RNA, 19 nt, Homo sapiens
  misc_RNA (1)...(19): siRNA sense strand
caauagaggaaguugcuca

SEQ ID NO: 2611884 - RNA, 19 nt, Homo sapiens
  misc_RNA (1)...(19): siRNA sense strand
ugauaaaaccccuaagaga

SEQ ID NO: 2611885 - RNA, 19 nt, Homo sapiens
  misc_RNA (1)...(19): siRNA sense strand
gcuuuuauaugaugaggaa

SEQ ID NO: 2611886 - RNA, 19 nt, Homo sapiens
  misc_RNA (1)...(19): siRNA sense strand
agggaaaggauaugcacca

SEQ ID NO: 2611887 - RNA, 19 nt, Homo sapiens
  misc_RNA (1)...(19): siRNA sense strand
auuaugaggacguuaggaa

SEQ ID NO: 2611888 - RNA, 19 nt, Homo sapiens
  misc_RNA (1)...(19): siRNA sense strand
uagaugagauucuuggaga

SEQ ID NO: 2611889 - RNA, 19 nt, Homo sapiens
  misc_RNA (1)...(19): siRNA sense strand
aggauuuggauuugaggau

SEQ ID NO: 2611890 - RNA, 19 nt, Homo sapiens
  misc_RNA (1)...(19): siRNA sense strand
augacuacaugauaagcaa

SEQ ID NO: 2611891 - RNA, 19 nt, Homo sapiens
  misc_RNA (1)...(19): siRNA sense strand
uggaacgaguuuuggaaau

SEQ ID NO: 2611892 - RNA, 19 nt, Homo sapiens
  misc_RNA (1)...(19): siRNA sense strand
ggaaauguucaucuggaca

SEQ ID NO: 2611893 - RNA, 19 nt, Homo sapiens
  misc_RNA (1)...(19): siRNA sense strand
guaugcaguaggugaugaa

SEQ ID NO: 2611894 - RNA, 19 nt, Homo sapiens
  misc_RNA (1)...(19): siRNA sense strand
agcuaaugcuccuaccaaa

SEQ ID NO: 2611895 - RNA, 19 nt, Homo sapiens
  misc_RNA (1)...(19): siRNA sense strand
gcuaaugcuccuaccaaaa

SEQ ID NO: 2611896 - RNA, 19 nt, Homo sapiens
  misc_RNA (1)...(19): siRNA sense strand
caugauaagcaaggauaau

SEQ ID NO: 2611897 - RNA, 19 nt, Homo sapiens
  misc_RNA (1)...(19): siRNA sense strand
agguggauuuggaugguga

SEQ ID NO: 2611898 - RNA, 19 nt, Homo sapiens
  misc_RNA (1)...(19): siRNA sense strand
gcagcugcuagcaaggaaa

SEQ ID NO: 2611899 - RNA, 19 nt, Homo sapiens
  misc_RNA (1)...(19): siRNA sense strand
ugugucaaugcaagagaaa

SEQ ID NO: 2611900 - RNA, 19 nt, Homo sapiens
  misc_RNA (1)...(19): siRNA sense strand
ugucagugauaaagaugca

SEQ ID NO: 2611901 - RNA, 19 nt, Homo sapiens
  misc_RNA (1)...(19): siRNA sense strand
uggacgaagaagcagcuaa

SEQ ID NO: 2611902 - RNA, 19 nt, Homo sapiens
  misc_RNA (1)...(19): siRNA sense strand
augaugaggaagacacaau

SEQ ID NO: 2611903 - RNA, 19 nt, Homo sapiens
  misc_RNA (1)...(19): siRNA sense strand
uaugaggacguuaggaaga

SEQ ID NO: 2611904 - RNA, 19 nt, Homo sapiens
  misc_RNA (1)...(19): siRNA sense strand
cuguaaaggauuuguagaa

SEQ ID NO: 2611905 - RNA, 19 nt, Homo sapiens
  misc_RNA (1)...(19): siRNA sense strand
caggaaagcuuguggcucu

SEQ ID NO: 2611906 - RNA, 19 nt, Homo sapiens
  misc_RNA (1)...(19): siRNA sense strand
ucauggaucaacagggaaa

SEQ ID NO: 2611907 - RNA, 19 nt, Homo sapiens
  misc_RNA (1)...(19): siRNA sense strand
cguuuauguagguggagaa

SEQ ID NO: 2611908 - RNA, 19 nt, Homo sapiens
  misc_RNA (1)...(19): siRNA sense strand
cagaagaagugguuccuga

SEQ ID NO: 2611909 - RNA, 19 nt, Homo sapiens
  misc_RNA (1)...(19): siRNA sense strand
cuacagugcaggagcccaa

SEQ ID NO: 2611910 - RNA, 19 nt, Homo sapiens
  misc_RNA (1)...(19): siRNA sense strand
ugcaguuauugaugagaaa

SEQ ID NO: 2611911 - RNA, 19 nt, Homo sapiens
  misc_RNA (1)...(19): siRNA sense strand
cuugcuagauagacagauu

SEQ ID NO: 2611912 - RNA, 19 nt, Homo sapiens
  misc_RNA (1)...(19): siRNA sense strand
agucaauuauucaggaagu

SEQ ID NO: 2611913 - RNA, 19 nt, Homo sapiens
  misc_RNA (1)...(19): siRNA sense strand
uggagguuauauagaagaa

SEQ ID NO: 2611914 - RNA, 19 nt, Homo sapiens
  misc_RNA (1)...(19): siRNA sense strand
aguuaagguuggaaagaug

SEQ ID NO: 2611915 - RNA, 19 nt, Homo sapiens
  misc_RNA (1)...(19): siRNA sense strand
caggaaguugcaagagauu

SEQ ID NO: 2611916 - RNA, 19 nt, Homo sapiens
  misc_RNA (1)...(19): siRNA sense strand
aacagauagaagagagcaa

SEQ ID NO: 2611917 - RNA, 19 nt, Homo sapiens
  misc_RNA (1)...(19): siRNA sense strand
uaaaaggggacuuggcaua

SEQ ID NO: 2611918 - RNA, 19 nt, Homo sapiens
  misc_RNA (1)...(19): siRNA sense strand
caucauggaucaacaggga

SEQ ID NO: 2611919 - RNA, 19 nt, Homo sapiens
  misc_RNA (1)...(19): siRNA sense strand
uugcaagagauuacagaga

SEQ ID NO: 2611920 - RNA, 19 nt, Homo sapiens
  misc_RNA (1)...(19): siRNA sense strand
gaguuugcucacagaguau

SEQ ID NO: 2611921 - RNA, 19 nt, Homo sapiens
  misc_RNA (1)...(19): siRNA sense strand
ggaucaacagggaaagguu

SEQ ID NO: 2611922 - RNA, 19 nt, Homo sapiens
  misc_RNA (1)...(19): siRNA sense strand
uuauagaggaccacgaaca

SEQ ID NO: 2611923 - RNA, 19 nt, Homo sapiens
  misc_RNA (1)...(19): siRNA sense strand
gaacauaugcagaagagac

SEQ ID NO: 2611924 - RNA, 19 nt, Homo sapiens
  misc_RNA (1)...(19): siRNA sense strand
ugauauggucgucuguaaa

SEQ ID NO: 2611925 - RNA, 19 nt, Homo sapiens
  misc_RNA (1)...(19): siRNA sense strand
aagacaugguccaguuuau

SEQ ID NO: 2611926 - RNA, 19 nt, Homo sapiens
  misc_RNA (1)...(19): siRNA sense strand
gcagagauugaaaagaaua

SEQ ID NO: 2611927 - RNA, 19 nt, Homo sapiens
  misc_RNA (1)...(19): siRNA sense strand
ccugaguaugugacacuaa

SEQ ID NO: 2611928 - RNA, 19 nt, Homo sapiens
  misc_RNA (1)...(19): siRNA sense strand
acauaaauaccuugcugau

SEQ ID NO: 2611929 - RNA, 19 nt, Homo sapiens
  misc_RNA (1)...(19): siRNA sense strand
cgauaugaagugucuaaaa

SEQ ID NO: 2611930 - RNA, 19 nt, Homo sapiens
  misc_RNA (1)...(19): siRNA sense strand
uugcaguuauugaugagaa

SEQ ID NO: 2611931 - RNA, 19 nt, Homo sapiens
  misc_RNA (1)...(19): siRNA sense strand
aguagaagcccaaggaggu

SEQ ID NO: 2611932 - RNA, 19 nt, Homo sapiens
  misc_RNA (1)...(19): siRNA sense strand
cagcaguggaggaucugua

SEQ ID NO: 2611933 - RNA, 19 nt, Homo sapiens
  misc_RNA (1)...(19): siRNA sense strand
cccaaggauguauuagaaa

SEQ ID NO: 2611934 - RNA, 19 nt, Homo sapiens
  misc_RNA (1)...(19): siRNA sense strand
gcaagagauuacagagacc

SEQ ID NO: 2611935 - RNA, 19 nt, Homo sapiens
  misc_RNA (1)...(19): siRNA sense strand
gcccagcaguggaggaucu

SEQ ID NO: 2611936 - RNA, 19 nt, Homo sapiens
  misc_RNA (1)...(19): siRNA sense strand
cacagauggagguuauaua

SEQ ID NO: 2611937 - RNA, 19 nt, Homo sapiens
  misc_RNA (1)...(19): siRNA sense strand
accaagaacagauagaaga

SEQ ID NO: 2611938 - RNA, 19 nt, Homo sapiens
  misc_RNA (1)...(19): siRNA sense strand
aagaugggcuggaaggcaa

SEQ ID NO: 2611939 - RNA, 19 nt, Homo sapiens
  misc_RNA (1)...(19): siRNA sense strand
acggaaguuugaugagcau

SEQ ID NO: 2611940 - RNA, 19 nt, Homo sapiens
  misc_RNA (1)...(19): siRNA sense strand
cagacuugacccuggauga

SEQ ID NO: 2611941 - RNA, 19 nt, Homo sapiens
  misc_RNA (1)...(19): siRNA sense strand
ggauccaggaggaacucaa

SEQ ID NO: 2611942 - RNA, 19 nt, Homo sapiens
  misc_RNA (1)...(19): siRNA sense strand
uggacgagaucgaggagcu

SEQ ID NO: 2611943 - RNA, 19 nt, Homo sapiens
  misc_RNA (1)...(19): siRNA sense strand
aagaaaagaagcagaagaa

SEQ ID NO: 2611944 - RNA, 19 nt, Homo sapiens
  misc_RNA (1)...(19): siRNA sense strand
agaagaacaagcaggaaaa

SEQ ID NO: 2611945 - RNA, 19 nt, Homo sapiens
  misc_RNA (1)...(19): siRNA sense strand
cauuacaggcugaagaaaa

SEQ ID NO: 2611946 - RNA, 19 nt, Homo sapiens
  misc_RNA (1)...(19): siRNA sense strand
aaauauucucccaggaaaa

SEQ ID NO: 2611947 - RNA, 19 nt, Homo sapiens
  misc_RNA (1)...(19): siRNA sense strand
aagagagaagaaagaacaa

SEQ ID NO: 2611948 - RNA, 19 nt, Homo sapiens
  misc_RNA (1)...(19): siRNA sense strand
aagccaaguuugaugcaga

SEQ ID NO: 2611949 - RNA, 19 nt, Homo sapiens
  misc_RNA (1)...(19): siRNA sense strand
agaagaagaacaagcagga

SEQ ID NO: 2611950 - RNA, 19 nt, Homo sapiens
  misc_RNA (1)...(19): siRNA sense strand
aagcagaagaagcugaaaa

SEQ ID NO: 2611951 - RNA, 19 nt, Homo sapiens
  misc_RNA (1)...(19): siRNA sense strand
cagauuacggcgaggagca

SEQ ID NO: 2611952 - RNA, 19 nt, Homo sapiens
  misc_RNA (1)...(19): siRNA sense strand
ucuuggaggaugcuggaaa

SEQ ID NO: 2611953 - RNA, 19 nt, Homo sapiens
  misc_RNA (1)...(19): siRNA sense strand
cagaagaagcugaaaagca

SEQ ID NO: 2611954 - RNA, 19 nt, Homo sapiens
  misc_RNA (1)...(19): siRNA sense strand
cuauaauccugcugaccca

SEQ ID NO: 2611955 - RNA, 19 nt, Homo sapiens
  misc_RNA (1)...(19): siRNA sense strand
gucugaggcuggagaaaau

SEQ ID NO: 2611956 - RNA, 19 nt, Homo sapiens
  misc_RNA (1)...(19): siRNA sense strand
auuacaggcugaagaaaau

SEQ ID NO: 2611957 - RNA, 19 nt, Homo sapiens
  misc_RNA (1)...(19): siRNA sense strand
agaagagagaagaaagaac

SEQ ID NO: 2611958 - RNA, 19 nt, Homo sapiens
  misc_RNA (1)...(19): siRNA sense strand
aagaaaaggaugaaagaag

SEQ ID NO: 2611959 - RNA, 19 nt, Homo sapiens
  misc_RNA (1)...(19): siRNA sense strand
cagcaaauaugcaaggaga

SEQ ID NO: 2611960 - RNA, 19 nt, Homo sapiens
  misc_RNA (1)...(19): siRNA sense strand
ccguaaguguagacaaaga

SEQ ID NO: 2611961 - RNA, 19 nt, Homo sapiens
  misc_RNA (1)...(19): siRNA sense strand
ccacuaaagucaaaggcca

SEQ ID NO: 2611962 - RNA, 19 nt, Homo sapiens
  misc_RNA (1)...(19): siRNA sense strand
aaacaagacaacagagcga

SEQ ID NO: 2611963 - RNA, 19 nt, Homo sapiens
  misc_RNA (1)...(19): siRNA sense strand
agauaaaggugaauuggca

SEQ ID NO: 2611964 - RNA, 19 nt, Homo sapiens
  misc_RNA (1)...(19): siRNA sense strand
cagacaaauaauugacaga

SEQ ID NO: 2611965 - RNA, 19 nt, Homo sapiens
  misc_RNA (1)...(19): siRNA sense strand
ucaaggaagacuagagguu

SEQ ID NO: 2611966 - RNA, 19 nt, Homo sapiens
  misc_RNA (1)...(19): siRNA sense strand
uuaccuugcacuagauaaa

SEQ ID NO: 2611967 - RNA, 19 nt, Homo sapiens
  misc_RNA (1)...(19): siRNA sense strand
ugagaaggacagagccaau

SEQ ID NO: 2611968 - RNA, 19 nt, Homo sapiens
  misc_RNA (1)...(19): siRNA sense strand
caauaaacauccugagcag

SEQ ID NO: 2611969 - RNA, 19 nt, Homo sapiens
  misc_RNA (1)...(19): siRNA sense strand
uguucaaaugcaauggaua

SEQ ID NO: 2611970 - RNA, 19 nt, Homo sapiens
  misc_RNA (1)...(19): siRNA sense strand
aaggaagacuagagguucu

SEQ ID NO: 2611971 - RNA, 19 nt, Homo sapiens
  misc_RNA (1)...(19): siRNA sense strand
gcaugagcgccauuguaaa

SEQ ID NO: 2611972 - RNA, 19 nt, Homo sapiens
  misc_RNA (1)...(19): siRNA sense strand
ccuccuggguuaugcucaa

SEQ ID NO: 2611973 - RNA, 19 nt, Homo sapiens
  misc_RNA (1)...(19): siRNA sense strand
guucaaaugcaauggauag

SEQ ID NO: 2611974 - RNA, 19 nt, Homo sapiens
  misc_RNA (1)...(19): siRNA sense strand
gauucugggcugugaagau

SEQ ID NO: 2611975 - RNA, 19 nt, Homo sapiens
  misc_RNA (1)...(19): siRNA sense strand
cacuaaagucaaaggccau

SEQ ID NO: 2611976 - RNA, 19 nt, Homo sapiens
  misc_RNA (1)...(19): siRNA sense strand
ugcacuagauaaaggugaa

SEQ ID NO: 2611977 - RNA, 19 nt, Homo sapiens
  misc_RNA (1)...(19): siRNA sense strand
cagcugggccugauagaca

SEQ ID NO: 2611978 - RNA, 19 nt, Homo sapiens
  misc_RNA (1)...(19): siRNA sense strand
gaugagaucuaugaggcaa

SEQ ID NO: 2611979 - RNA, 19 nt, Homo sapiens
  misc_RNA (1)...(19): siRNA sense strand
agaucuaugaggcaauaaa

SEQ ID NO: 2611980 - RNA, 19 nt, Homo sapiens
  misc_RNA (1)...(19): siRNA sense strand
acaagacaacagagcgaca

SEQ ID NO: 2611981 - RNA, 19 nt, Homo sapiens
  misc_RNA (1)...(19): siRNA sense strand
guguagacaaagagcccau

SEQ ID NO: 2611982 - RNA, 19 nt, Homo sapiens
  misc_RNA (1)...(19): siRNA sense strand
cugcaggaauguuacugaa

SEQ ID NO: 2611983 - RNA, 19 nt, Homo sapiens
  misc_RNA (1)...(19): siRNA sense strand
cagucuuguucaaaugcaa

SEQ ID NO: 2611984 - RNA, 19 nt, Homo sapiens
  misc_RNA (1)...(19): siRNA sense strand
ugcccaacccacagacaua

SEQ ID NO: 2611985 - RNA, 19 nt, Homo sapiens
  misc_RNA (1)...(19): siRNA sense strand
agagaagacggcagagaac

SEQ ID NO: 2611986 - RNA, 19 nt, Homo sapiens
  misc_RNA (1)...(19): siRNA sense strand
gugaauuggcacuagcuga

SEQ ID NO: 2611987 - RNA, 19 nt, Homo sapiens
  misc_RNA (1)...(19): siRNA sense strand
ccaauaaacaagacaacag

SEQ ID NO: 2611988 - RNA, 19 nt, Homo sapiens
  misc_RNA (1)...(19): siRNA sense strand
gcugguggccacuggucaa

SEQ ID NO: 2611989 - RNA, 19 nt, Homo sapiens
  misc_RNA (1)...(19): siRNA sense strand
cuguaaugcagaagacgga

SEQ ID NO: 2611990 - RNA, 19 nt, Homo sapiens
  misc_RNA (1)...(19): siRNA sense strand
acggcagagaacaggaaau

SEQ ID NO: 2611991 - RNA, 19 nt, Homo sapiens
  misc_RNA (1)...(19): siRNA sense strand
acucaacagucuuggaaaa

SEQ ID NO: 2611992 - RNA, 19 nt, Homo sapiens
  misc_RNA (1)...(19): siRNA sense strand
uggaaauaccgcaaagaca

SEQ ID NO: 2611993 - RNA, 19 nt, Homo sapiens
  misc_RNA (1)...(19): siRNA sense strand
gccacagcaugaagggcaa

SEQ ID NO: 2611994 - RNA, 19 nt, Homo sapiens
  misc_RNA (1)...(19): siRNA sense strand
ccgaaguguggauggauga

SEQ ID NO: 2611995 - RNA, 19 nt, Homo sapiens
  misc_RNA (1)...(19): siRNA sense strand
acaggaaguaugugcccua

SEQ ID NO: 2611996 - RNA, 19 nt, Homo sapiens
  misc_RNA (1)...(19): siRNA sense strand
ggcaaccagcuguggaaau

SEQ ID NO: 2611997 - RNA, 19 nt, Homo sapiens
  misc_RNA (1)...(19): siRNA sense strand
cugcagugaaagugaccau

SEQ ID NO: 2611998 - RNA, 19 nt, Homo sapiens
  misc_RNA (1)...(19): siRNA sense strand
ggauggaugaguacgcaga

SEQ ID NO: 2611999 - RNA, 19 nt, Homo sapiens
  misc_RNA (1)...(19): siRNA sense strand
gugaaagugaccauaggau

SEQ ID NO: 2612000 - RNA, 19 nt, Homo sapiens
  misc_RNA (1)...(19): siRNA sense strand
acucaacagucuuggaaaa

SEQ ID NO: 2612001 - RNA, 19 nt, Homo sapiens
  misc_RNA (1)...(19): siRNA sense strand
uggaaauaccgcaaagaca

SEQ ID NO: 2612002 - RNA, 19 nt, Homo sapiens
  misc_RNA (1)...(19): siRNA sense strand
gccacagcaugaagggcaa

SEQ ID NO: 2612003 - RNA, 19 nt, Homo sapiens
  misc_RNA (1)...(19): siRNA sense strand
ccgaaguguggauggauga

SEQ ID NO: 2612004 - RNA, 19 nt, Homo sapiens
  misc_RNA (1)...(19): siRNA sense strand
acaggaaguaugugcccua

SEQ ID NO: 2612005 - RNA, 19 nt, Homo sapiens
  misc_RNA (1)...(19): siRNA sense strand
ggcaaccagcuguggaaau

SEQ ID NO: 2612006 - RNA, 19 nt, Homo sapiens
  misc_RNA (1)...(19): siRNA sense strand
cugcagugaaagugaccau

SEQ ID NO: 2612007 - RNA, 19 nt, Homo sapiens
  misc_RNA (1)...(19): siRNA sense strand
ggauggaugaguacgcaga

SEQ ID NO: 2612008 - RNA, 19 nt, Homo sapiens
  misc_RNA (1)...(19): siRNA sense strand
gugaaagugaccauaggau

SEQ ID NO: 2612009 - RNA, 19 nt, Homo sapiens
  misc_RNA (1)...(19): siRNA sense strand
gggacaagauguugcgcau

SEQ ID NO: 2612010 - RNA, 19 nt, Homo sapiens
  misc_RNA (1)...(19): siRNA sense strand
ccaagaagucagaggagga

SEQ ID NO: 2612011 - RNA, 19 nt, Homo sapiens
  misc_RNA (1)...(19): siRNA sense strand
acaaauuugaggagcuuaa

SEQ ID NO: 2612012 - RNA, 19 nt, Homo sapiens
  misc_RNA (1)...(19): siRNA sense strand
gaauuauacuacaggcaca

SEQ ID NO: 2612013 - RNA, 19 nt, Homo sapiens
  misc_RNA (1)...(19): siRNA sense strand
cguacaaguaugagaugau

SEQ ID NO: 2612014 - RNA, 19 nt, Homo sapiens
  misc_RNA (1)...(19): siRNA sense strand
ccacaaauuugaggagcuu

SEQ ID NO: 2612015 - RNA, 19 nt, Homo sapiens
  misc_RNA (1)...(19): siRNA sense strand
accgacaguuggagguaua

SEQ ID NO: 2612016 - RNA, 19 nt, Homo sapiens
  misc_RNA (1)...(19): siRNA sense strand
cccacaagucuaugaagaa

SEQ ID NO: 2612017 - RNA, 19 nt, Homo sapiens
  misc_RNA (1)...(19): siRNA sense strand
gguuugaauccuauuacaa

SEQ ID NO: 2612018 - RNA, 19 nt, Homo sapiens
  misc_RNA (1)...(19): siRNA sense strand
agaacaucgaacugaacaa

SEQ ID NO: 2612019 - RNA, 19 nt, Homo sapiens
  misc_RNA (1)...(19): siRNA sense strand
cugaugaaguacagcagca

SEQ ID NO: 2612020 - RNA, 19 nt, Homo sapiens
  misc_RNA (1)...(19): siRNA sense strand
cugaagaagaugggacaga

SEQ ID NO: 2612021 - RNA, 19 nt, Homo sapiens
  misc_RNA (1)...(19): siRNA sense strand
uggaccaagcugacugaaa

SEQ ID NO: 2612022 - RNA, 19 nt, Homo sapiens
  misc_RNA (1)...(19): siRNA sense strand
agucaguaccgcuguaaga

SEQ ID NO: 2612023 - RNA, 19 nt, Homo sapiens
  misc_RNA (1)...(19): siRNA sense strand
aguaugaacagcaaaccua

SEQ ID NO: 2612024 - RNA, 19 nt, Homo sapiens
  misc_RNA (1)...(19): siRNA sense strand
ggagauuacuaccaggcca

SEQ ID NO: 2612025 - RNA, 19 nt, Homo sapiens
  misc_RNA (1)...(19): siRNA sense strand
gggagaaauauggggacaa

SEQ ID NO: 2612026 - RNA, 19 nt, Homo sapiens
  misc_RNA (1)...(19): siRNA sense strand
ccuauuacaacuacugcaa

SEQ ID NO: 2612027 - RNA, 19 nt, Homo sapiens
  misc_RNA (1)...(19): siRNA sense strand
gauaaggacaugauccaca

SEQ ID NO: 2612028 - RNA, 19 nt, Homo sapiens
  misc_RNA (1)...(19): siRNA sense strand
ucuacaaaaugcuugguua

SEQ ID NO: 2612029 - RNA, 19 nt, Homo sapiens
  misc_RNA (1)...(19): siRNA sense strand
gagauuacuaccaggccau

SEQ ID NO: 2612030 - RNA, 19 nt, Homo sapiens
  misc_RNA (1)...(19): siRNA sense strand
cugaacaagaagaguaugu

SEQ ID NO: 2612031 - RNA, 19 nt, Homo sapiens
  misc_RNA (1)...(19): siRNA sense strand
agaagucagaggaggagau

SEQ ID NO: 2612032 - RNA, 19 nt, Homo sapiens
  misc_RNA (1)...(19): siRNA sense strand
uagacaaauccaacaucaa

SEQ ID NO: 2612033 - RNA, 19 nt, Homo sapiens
  misc_RNA (1)...(19): siRNA sense strand
cccugaagaagaugggaca

SEQ ID NO: 2612034 - RNA, 19 nt, Homo sapiens
  misc_RNA (1)...(19): siRNA sense strand
ugauaugcacacaggagau

SEQ ID NO: 2612035 - RNA, 19 nt, Homo sapiens
  misc_RNA (1)...(19): siRNA sense strand
acccacaagucuaugaaga

SEQ ID NO: 2612036 - RNA, 19 nt, Homo sapiens
  misc_RNA (1)...(19): siRNA sense strand
ggagaaggagcaugggcaa

SEQ ID NO: 2612037 - RNA, 19 nt, Homo sapiens
  misc_RNA (1)...(19): siRNA sense strand
ggcaagagcuucagccaga

SEQ ID NO: 2612038 - RNA, 19 nt, Homo sapiens
  misc_RNA (1)...(19): siRNA sense strand
gugcacugugugugggaaa

SEQ ID NO: 2612039 - RNA, 19 nt, Homo sapiens
  misc_RNA (1)...(19): siRNA sense strand
gggagaaggagcaugggca

SEQ ID NO: 2612040 - RNA, 19 nt, Homo sapiens
  misc_RNA (1)...(19): siRNA sense strand
ggaugaacugcaagaaacu

SEQ ID NO: 2612041 - RNA, 19 nt, Homo sapiens
  misc_RNA (1)...(19): siRNA sense strand
aauaauaccuccaaccuga

SEQ ID NO: 2612042 - RNA, 19 nt, Homo sapiens
  misc_RNA (1)...(19): siRNA sense strand
cugaauguggcaagagcuu

SEQ ID NO: 2612043 - RNA, 19 nt, Homo sapiens
  misc_RNA (1)...(19): siRNA sense strand
caagagagccugucggaug

SEQ ID NO: 2612044 - RNA, 19 nt, Homo sapiens
  misc_RNA (1)...(19): siRNA sense strand
cggccauaccgcugugaca

SEQ ID NO: 2612045 - RNA, 19 nt, Homo sapiens
  misc_RNA (1)...(19): siRNA sense strand
aagccauggcagaaaguca

SEQ ID NO: 2612046 - RNA, 19 nt, Homo sapiens
  misc_RNA (1)...(19): siRNA sense strand
ggaugaacuugcuuggcua

SEQ ID NO: 2612047 - RNA, 19 nt, Homo sapiens
  misc_RNA (1)...(19): siRNA sense strand
gcaaagagggucccgggaa

SEQ ID NO: 2612048 - RNA, 19 nt, Homo sapiens
  misc_RNA (1)...(19): siRNA sense strand
gaauaauggccaaagccuu

SEQ ID NO: 2612049 - RNA, 19 nt, Homo sapiens
  misc_RNA (1)...(19): siRNA sense strand
aaacacagcuacuugguga

SEQ ID NO: 2612050 - RNA, 19 nt, Homo sapiens
  misc_RNA (1)...(19): siRNA sense strand
cuacuuggugaguuggaaa

SEQ ID NO: 2612051 - RNA, 19 nt, Homo sapiens
  misc_RNA (1)...(19): siRNA sense strand
ucaaacgaauaauggccaa

SEQ ID NO: 2612052 - RNA, 19 nt, Homo sapiens
  misc_RNA (1)...(19): siRNA sense strand
ccuuuagucgcuauagaaa

SEQ ID NO: 2612053 - RNA, 19 nt, Homo sapiens
  misc_RNA (1)...(19): siRNA sense strand
cacugauggacguuggaaa

SEQ ID NO: 2612054 - RNA, 19 nt, Homo sapiens
  misc_RNA (1)...(19): siRNA sense strand
uuguugaagacauuggaua

SEQ ID NO: 2612055 - RNA, 19 nt, Homo sapiens
  misc_RNA (1)...(19): siRNA sense strand
caaagagggucccgggaag

SEQ ID NO: 2612056 - RNA, 19 nt, Homo sapiens
  misc_RNA (1)...(19): siRNA sense strand
ggaaacaccuucugagacc

SEQ ID NO: 2612057 - RNA, 19 nt, Homo sapiens
  misc_RNA (1)...(19): siRNA sense strand
ucgauguguguuaagaaua

SEQ ID NO: 2612058 - RNA, 19 nt, Homo sapiens
  misc_RNA (1)...(19): siRNA sense strand
aagccagaucacugaguau

SEQ ID NO: 2612059 - RNA, 19 nt, Homo sapiens
  misc_RNA (1)...(19): siRNA sense strand
agccaaacuuccugaccuu

SEQ ID NO: 2612060 - RNA, 19 nt, Homo sapiens
  misc_RNA (1)...(19): siRNA sense strand
gcgucaacccggugcucua

SEQ ID NO: 2612061 - RNA, 19 nt, Homo sapiens
  misc_RNA (1)...(19): siRNA sense strand
aggagaaagcugagcagau

SEQ ID NO: 2612062 - RNA, 19 nt, Homo sapiens
  misc_RNA (1)...(19): siRNA sense strand
gggauuaugccaaggagca

SEQ ID NO: 2612063 - RNA, 19 nt, Homo sapiens
  misc_RNA (1)...(19): siRNA sense strand
gggccauggaggacaguga

SEQ ID NO: 2612064 - RNA, 19 nt, Homo sapiens
  misc_RNA (1)...(19): siRNA sense strand
cggcagugaagcagagcga

SEQ ID NO: 2612065 - RNA, 19 nt, Homo sapiens
  misc_RNA (1)...(19): siRNA sense strand
gcugcaacacggaguucaa

SEQ ID NO: 2612066 - RNA, 19 nt, Homo sapiens
  misc_RNA (1)...(19): siRNA sense strand
cuuaacaagaaggagaaua

SEQ ID NO: 2612067 - RNA, 19 nt, Homo sapiens
  misc_RNA (1)...(19): siRNA sense strand
gcagugaagcagagcgaug

SEQ ID NO: 2612068 - RNA, 19 nt, Homo sapiens
  misc_RNA (1)...(19): siRNA sense strand
cugaggaaguagacagaau

SEQ ID NO: 2612069 - RNA, 19 nt, Homo sapiens
  misc_RNA (1)...(19): siRNA sense strand
aagaagugaugcuggaaaa

SEQ ID NO: 2612070 - RNA, 19 nt, Homo sapiens
  misc_RNA (1)...(19): siRNA sense strand
gggcgaggcuuuagcagga

SEQ ID NO: 2612071 - RNA, 19 nt, Homo sapiens
  misc_RNA (1)...(19): siRNA sense strand
ggcugaagcagaagaucaa

SEQ ID NO: 2612072 - RNA, 19 nt, Homo sapiens
  misc_RNA (1)...(19): siRNA sense strand
acaaagaagugaugcugga

SEQ ID NO: 2612073 - RNA, 19 nt, Homo sapiens
  misc_RNA (1)...(19): siRNA sense strand
aaucaaagccagaagucca

SEQ ID NO: 2612074 - RNA, 19 nt, Homo sapiens
  misc_RNA (1)...(19): siRNA sense strand
aggcagaguggaagagacu

SEQ ID NO: 2612075 - RNA, 19 nt, Homo sapiens
  misc_RNA (1)...(19): siRNA sense strand
agaagaucaacgaguggaa

SEQ ID NO: 2612076 - RNA, 19 nt, Homo sapiens
  misc_RNA (1)...(19): siRNA sense strand
gugaaaagucagagcucau

SEQ ID NO: 2612077 - RNA, 19 nt, Homo sapiens
  misc_RNA (1)...(19): siRNA sense strand
gggcgaggcuuuagcugca

SEQ ID NO: 2612078 - RNA, 19 nt, Homo sapiens
  misc_RNA (1)...(19): siRNA sense strand
gagaaaucguuuaugugca

SEQ ID NO: 2612079 - RNA, 19 nt, Homo sapiens
  misc_RNA (1)...(19): siRNA sense strand
caaguauugcggugaucaa

SEQ ID NO: 2612080 - RNA, 19 nt, Homo sapiens
  misc_RNA (1)...(19): siRNA sense strand
gcuuuauaguugagucagu

SEQ ID NO: 2612081 - RNA, 19 nt, Homo sapiens
  misc_RNA (1)...(19): siRNA sense strand
ccauugugggcgaggcuuu

SEQ ID NO: 2612082 - RNA, 19 nt, Homo sapiens
  misc_RNA (1)...(19): siRNA sense strand
gcuuuuaaccagaagucaa

SEQ ID NO: 2612083 - RNA, 19 nt, Homo sapiens
  misc_RNA (1)...(19): siRNA sense strand
gcccagaggaucagccaca

SEQ ID NO: 2612084 - RNA, 19 nt, Homo sapiens
  misc_RNA (1)...(19): siRNA sense strand
guuccagagaccaccaaua

SEQ ID NO: 2612085 - RNA, 19 nt, Homo sapiens
  misc_RNA (1)...(19): siRNA sense strand
gcaggaagucacagcucau

SEQ ID NO: 2612086 - RNA, 19 nt, Homo sapiens
  misc_RNA (1)...(19): siRNA sense strand
gugcagccauugugggcga

SEQ ID NO: 2612087 - RNA, 19 nt, Homo sapiens
  misc_RNA (1)...(19): siRNA sense strand
aggacacacacaagggaga

SEQ ID NO: 2612088 - RNA, 19 nt, Homo sapiens
  misc_RNA (1)...(19): siRNA sense strand
augcaagcucugaggaagu

SEQ ID NO: 2612089 - RNA, 19 nt, Homo sapiens
  misc_RNA (1)...(19): siRNA sense strand
ggagaaaccuuaugugugc

SEQ ID NO: 2612090 - RNA, 19 nt, Homo sapiens
  misc_RNA (1)...(19): siRNA sense strand
aggcuuuauaguugaguca

SEQ ID NO: 2612091 - RNA, 19 nt, Homo sapiens
  misc_RNA (1)...(19): siRNA sense strand
ccaagaugagcuacacaau

SEQ ID NO: 2612092 - RNA, 19 nt, Homo sapiens
  misc_RNA (1)...(19): siRNA sense strand
acauggaggauuugggaga

SEQ ID NO: 2612093 - RNA, 19 nt, Homo sapiens
  misc_RNA (1)...(19): siRNA sense strand
auggaggauuugggagaua

SEQ ID NO: 2612094 - RNA, 19 nt, Homo sapiens
  misc_RNA (1)...(19): siRNA sense strand
acgaagagacuggagacaa

SEQ ID NO: 2612095 - RNA, 19 nt, Homo sapiens
  misc_RNA (1)...(19): siRNA sense strand
uaccauugcugcugggaca

SEQ ID NO: 2612096 - RNA, 19 nt, Homo sapiens
  misc_RNA (1)...(19): siRNA sense strand
cuucacauccagaaagaca

SEQ ID NO: 2612097 - RNA, 19 nt, Homo sapiens
  misc_RNA (1)...(19): siRNA sense strand
cuuuugacauggaggauuu

SEQ ID NO: 2612098 - RNA, 19 nt, Homo sapiens
  misc_RNA (1)...(19): siRNA sense strand
guuuagaggaagaggaaga

SEQ ID NO: 2612099 - RNA, 19 nt, Homo sapiens
  misc_RNA (1)...(19): siRNA sense strand
cagcaaagccaaagcgguu

SEQ ID NO: 2612100 - RNA, 19 nt, Homo sapiens
  misc_RNA (1)...(19): siRNA sense strand
aggaagaggaagaaaauuu

SEQ ID NO: 2612101 - RNA, 19 nt, Homo sapiens
  misc_RNA (1)...(19): siRNA sense strand
aggaagaaaauuuggaaga

SEQ ID NO: 2612102 - RNA, 19 nt, Homo sapiens
  misc_RNA (1)...(19): siRNA sense strand
uagaggaagaggaagaaaa

SEQ ID NO: 2612103 - RNA, 19 nt, Homo sapiens
  misc_RNA (1)...(19): siRNA sense strand
cgucauagcacuugaaaac

SEQ ID NO: 2612104 - RNA, 19 nt, Homo sapiens
  misc_RNA (1)...(19): siRNA sense strand
auguuuagaggaagaggaa

SEQ ID NO: 2612105 - RNA, 19 nt, Homo sapiens
  misc_RNA (1)...(19): siRNA sense strand
aggaagucagugagaggau

SEQ ID NO: 2612106 - RNA, 19 nt, Homo sapiens
  misc_RNA (1)...(19): siRNA sense strand
uguugaaaccaaaggucuu

SEQ ID NO: 2612107 - RNA, 19 nt, Homo sapiens
  misc_RNA (1)...(19): siRNA sense strand
cuugaaugugggucagcaa

SEQ ID NO: 2612108 - RNA, 19 nt, Homo sapiens
  misc_RNA (1)...(19): siRNA sense strand
aagacuugaauguggguca

SEQ ID NO: 2612109 - RNA, 19 nt, Homo sapiens
  misc_RNA (1)...(19): siRNA sense strand
ggaagaagguggagguggu

SEQ ID NO: 2612110 - RNA, 19 nt, Homo sapiens
  misc_RNA (1)...(19): siRNA sense strand
aggauaaagaaauggagaa

SEQ ID NO: 2612111 - RNA, 19 nt, Homo sapiens
  misc_RNA (1)...(19): siRNA sense strand
aagaaauggagaagagcuu

SEQ ID NO: 2612112 - RNA, 19 nt, Homo sapiens
  misc_RNA (1)...(19): siRNA sense strand
agaagaaggagcggagcaa

SEQ ID NO: 2612113 - RNA, 19 nt, Homo sapiens
  misc_RNA (1)...(19): siRNA sense strand
gugaaaaggaagaagacga

SEQ ID NO: 2612114 - RNA, 19 nt, Homo sapiens
  misc_RNA (1)...(19): siRNA sense strand
aaaaggaagaagacgauaa

SEQ ID NO: 2612115 - RNA, 19 nt, Homo sapiens
  misc_RNA (1)...(19): siRNA sense strand
aggacgaagaugaauggaa

SEQ ID NO: 2612116 - RNA, 19 nt, Homo sapiens
  misc_RNA (1)...(19): siRNA sense strand
ggguucaggcaaugcaaau

SEQ ID NO: 2612117 - RNA, 19 nt, Homo sapiens
  misc_RNA (1)...(19): siRNA sense strand
agguggaggugguggugga

SEQ ID NO: 2612118 - RNA, 19 nt, Homo sapiens
  misc_RNA (1)...(19): siRNA sense strand
agccggaaggauaaagaaa

SEQ ID NO: 2612119 - RNA, 19 nt, Homo sapiens
  misc_RNA (1)...(19): siRNA sense strand
agggacaagaagaagaaga

SEQ ID NO: 2612120 - RNA, 19 nt, Homo sapiens
  misc_RNA (1)...(19): siRNA sense strand
auggaaagaauuggagcaa

SEQ ID NO: 2612121 - RNA, 19 nt, Homo sapiens
  misc_RNA (1)...(19): siRNA sense strand
aagaagaaggagcggagca

SEQ ID NO: 2612122 - RNA, 19 nt, Homo sapiens
  misc_RNA (1)...(19): siRNA sense strand
uggacaacuucuuugccaa

SEQ ID NO: 2612123 - RNA, 19 nt, Homo sapiens
  misc_RNA (1)...(19): siRNA sense strand
aaggauaaagaaauggaga

SEQ ID NO: 2612124 - RNA, 19 nt, Homo sapiens
  misc_RNA (1)...(19): siRNA sense strand
acgaagaugaauggaaaga

SEQ ID NO: 2612125 - RNA, 19 nt, Homo sapiens
  misc_RNA (1)...(19): siRNA sense strand
aagcugaucuugaagcgaa

SEQ ID NO: 2612126 - RNA, 19 nt, Homo sapiens
  misc_RNA (1)...(19): siRNA sense strand
agcugaucuugaagcgaaa

SEQ ID NO: 2612127 - RNA, 19 nt, Homo sapiens
  misc_RNA (1)...(19): siRNA sense strand
cuaugcuguuuguggucaa

SEQ ID NO: 2612128 - RNA, 19 nt, Homo sapiens
  misc_RNA (1)...(19): siRNA sense strand
ugguuuuacugcauagaua

SEQ ID NO: 2612129 - RNA, 19 nt, Homo sapiens
  misc_RNA (1)...(19): siRNA sense strand
cagaacaagcccagggacu

SEQ ID NO: 2612130 - RNA, 19 nt, Homo sapiens
  misc_RNA (1)...(19): siRNA sense strand
aggugaagaaccagcucaa

SEQ ID NO: 2612131 - RNA, 19 nt, Homo sapiens
  misc_RNA (1)...(19): siRNA sense strand
gcagagagauccaggcuca

SEQ ID NO: 2612132 - RNA, 19 nt, Homo sapiens
  misc_RNA (1)...(19): siRNA sense strand
cggucuuguuccagggcaa

SEQ ID NO: 2612133 - RNA, 19 nt, Homo sapiens
  misc_RNA (1)...(19): siRNA sense strand
gccagaucggcuagggaua

SEQ ID NO: 2612134 - RNA, 19 nt, Homo sapiens
  misc_RNA (1)...(19): siRNA sense strand
uggcagaagcagauggacu

SEQ ID NO: 2612135 - RNA, 19 nt, Homo sapiens
  misc_RNA (1)...(19): siRNA sense strand
cugaugaagcugaggcacu

SEQ ID NO: 2612136 - RNA, 19 nt, Homo sapiens
  misc_RNA (1)...(19): siRNA sense strand
ugaacagggccaaacggaa

SEQ ID NO: 2612137 - RNA, 19 nt, Homo sapiens
  misc_RNA (1)...(19): siRNA sense strand
augggaagauccuggcaga

SEQ ID NO: 2612138 - RNA, 19 nt, Homo sapiens
  misc_RNA (1)...(19): siRNA sense strand
gauaaaagcaacagagaaa

SEQ ID NO: 2612139 - RNA, 19 nt, Homo sapiens
  misc_RNA (1)...(19): siRNA sense strand
ggaacaaggugcagaaaau

SEQ ID NO: 2612140 - RNA, 19 nt, Homo sapiens
  misc_RNA (1)...(19): siRNA sense strand
cagugagacucgacaguaa

SEQ ID NO: 2612141 - RNA, 19 nt, Homo sapiens
  misc_RNA (1)...(19): siRNA sense strand
agacguagugggagauaaa

SEQ ID NO: 2612142 - RNA, 19 nt, Homo sapiens
  misc_RNA (1)...(19): siRNA sense strand
guguuauggucgugcauua

SEQ ID NO: 2612143 - RNA, 19 nt, Homo sapiens
  misc_RNA (1)...(19): siRNA sense strand
acauaaaugcuaaggauga

SEQ ID NO: 2612144 - RNA, 19 nt, Homo sapiens
  misc_RNA (1)...(19): siRNA sense strand
uuacagugguauuggaaau

SEQ ID NO: 2612145 - RNA, 19 nt, Homo sapiens
  misc_RNA (1)...(19): siRNA sense strand
gccaaagaggauagauuua

SEQ ID NO: 2612146 - RNA, 19 nt, Homo sapiens
  misc_RNA (1)...(19): siRNA sense strand
auagagacguagugggaga

SEQ ID NO: 2612147 - RNA, 19 nt, Homo sapiens
  misc_RNA (1)...(19): siRNA sense strand
ccauauacaguguguuuaa

SEQ ID NO: 2612148 - RNA, 19 nt, Homo sapiens
  misc_RNA (1)...(19): siRNA sense strand
cgguaaaucaguuggcuau

SEQ ID NO: 2612149 - RNA, 19 nt, Homo sapiens
  misc_RNA (1)...(19): siRNA sense strand
ccucauuggcuuaggcauu

SEQ ID NO: 2612150 - RNA, 19 nt, Homo sapiens
  misc_RNA (1)...(19): siRNA sense strand
gcauacugaaggagcauua

SEQ ID NO: 2612151 - RNA, 19 nt, Homo sapiens
  misc_RNA (1)...(19): siRNA sense strand
gagcagacccaaaggacuu

SEQ ID NO: 2612152 - RNA, 19 nt, Homo sapiens
  misc_RNA (1)...(19): siRNA sense strand
cugaaggagcauuagguua

SEQ ID NO: 2612153 - RNA, 19 nt, Homo sapiens
  misc_RNA (1)...(19): siRNA sense strand
agacaguguuaaagcaaga

SEQ ID NO: 2612154 - RNA, 19 nt, Homo sapiens
  misc_RNA (1)...(19): siRNA sense strand
cugcacaaguggaugguau

SEQ ID NO: 2612155 - RNA, 19 nt, Homo sapiens
  misc_RNA (1)...(19): siRNA sense strand
acagcaaauccuaggcaaa

SEQ ID NO: 2612156 - RNA, 19 nt, Homo sapiens
  misc_RNA (1)...(19): siRNA sense strand
gcucaauaccagaugauca

SEQ ID NO: 2612157 - RNA, 19 nt, Homo sapiens
  misc_RNA (1)...(19): siRNA sense strand
cagccaaagaggauagauu

SEQ ID NO: 2612158 - RNA, 19 nt, Homo sapiens
  misc_RNA (1)...(19): siRNA sense strand
gagauguguuacagaaaga

SEQ ID NO: 2612159 - RNA, 19 nt, Homo sapiens
  misc_RNA (1)...(19): siRNA sense strand
aguguuaaagcaagagaaa

SEQ ID NO: 2612160 - RNA, 19 nt, Homo sapiens
  misc_RNA (1)...(19): siRNA sense strand
ggauuaacauacugguuca

SEQ ID NO: 2612161 - RNA, 19 nt, Homo sapiens
  misc_RNA (1)...(19): siRNA sense strand
gaauaaugaaacucagcaa

SEQ ID NO: 2612162 - RNA, 19 nt, Homo sapiens
  misc_RNA (1)...(19): siRNA sense strand
cauuaagagcagacccaaa

SEQ ID NO: 2612163 - RNA, 19 nt, Homo sapiens
  misc_RNA (1)...(19): siRNA sense strand
gagcauuggaacugaauca

SEQ ID NO: 2612164 - RNA, 19 nt, Homo sapiens
  misc_RNA (1)...(19): siRNA sense strand
guuguagauuaguggaaau

SEQ ID NO: 2612165 - RNA, 19 nt, Homo sapiens
  misc_RNA (1)...(19): siRNA sense strand
auaccgaaguugcagaaua

SEQ ID NO: 2612166 - RNA, 19 nt, Homo sapiens
  misc_RNA (1)...(19): siRNA sense strand
gcaaauauaaggaggcugu

SEQ ID NO: 2612167 - RNA, 19 nt, Homo sapiens
  misc_RNA (1)...(19): siRNA sense strand
ugaaggagcauuagguuau

SEQ ID NO: 2612168 - RNA, 19 nt, Homo sapiens
  misc_RNA (1)...(19): siRNA sense strand
cuagagaugcaaucagaaa

SEQ ID NO: 2612169 - RNA, 19 nt, Homo sapiens
  misc_RNA (1)...(19): siRNA sense strand
gcugaaacucucugcacaa

SEQ ID NO: 2612170 - RNA, 19 nt, Homo sapiens
  misc_RNA (1)...(19): siRNA sense strand
gcauuaaagcauuacaaga

SEQ ID NO: 2612171 - RNA, 19 nt, Homo sapiens
  misc_RNA (1)...(19): siRNA sense strand
cucugaagaucguagauaa

SEQ ID NO: 2612172 - RNA, 19 nt, Homo sapiens
  misc_RNA (1)...(19): siRNA sense strand
gcaaaaugggccuggcuua

SEQ ID NO: 2612173 - RNA, 19 nt, Homo sapiens
  misc_RNA (1)...(19): siRNA sense strand
cagagauguguuacagaaa

SEQ ID NO: 2612174 - RNA, 19 nt, Homo sapiens
  misc_RNA (1)...(19): siRNA sense strand
uuaaggaguugcuggagaa

SEQ ID NO: 2612175 - RNA, 19 nt, Homo sapiens
  misc_RNA (1)...(19): siRNA sense strand
ggugaauaugauaaagcua

SEQ ID NO: 2612176 - RNA, 19 nt, Homo sapiens
  misc_RNA (1)...(19): siRNA sense strand
ucaaacacaaagacaguaa

SEQ ID NO: 2612177 - RNA, 19 nt, Homo sapiens
  misc_RNA (1)...(19): siRNA sense strand
agauaagauuccuagugaa

SEQ ID NO: 2612178 - RNA, 19 nt, Homo sapiens
  misc_RNA (1)...(19): siRNA sense strand
uggcagaagcccaagucaa

SEQ ID NO: 2612179 - RNA, 19 nt, Homo sapiens
  misc_RNA (1)...(19): siRNA sense strand
gguuaugcguauugggucu

SEQ ID NO: 2612180 - RNA, 19 nt, Homo sapiens
  misc_RNA (1)...(19): siRNA sense strand
uggaaagagugguauauca

SEQ ID NO: 2612181 - RNA, 19 nt, Homo sapiens
  misc_RNA (1)...(19): siRNA sense strand
ggaccagaauaaugaaacu

SEQ ID NO: 2612182 - RNA, 19 nt, Homo sapiens
  misc_RNA (1)...(19): siRNA sense strand
gcgguaaaucaguuggcua

SEQ ID NO: 2612183 - RNA, 19 nt, Homo sapiens
  misc_RNA (1)...(19): siRNA sense strand
uuauugacgugcugguaaa

SEQ ID NO: 2612184 - RNA, 19 nt, Homo sapiens
  misc_RNA (1)...(19): siRNA sense strand
ggauacauauaugggcaaa

SEQ ID NO: 2612185 - RNA, 19 nt, Homo sapiens
  misc_RNA (1)...(19): siRNA sense strand
gcguauugggucugcacaa

SEQ ID NO: 2612186 - RNA, 19 nt, Homo sapiens
  misc_RNA (1)...(19): siRNA sense strand
aauaagaaauuacggcaga

SEQ ID NO: 2612187 - RNA, 19 nt, Homo sapiens
  misc_RNA (1)...(19): siRNA sense strand
ucguggauguuauaggaaa

SEQ ID NO: 2612188 - RNA, 19 nt, Homo sapiens
  misc_RNA (1)...(19): siRNA sense strand
gagcuugaagauauggaaa

SEQ ID NO: 2612189 - RNA, 19 nt, Homo sapiens
  misc_RNA (1)...(19): siRNA sense strand
ggacuucaauuguugggaa

SEQ ID NO: 2612190 - RNA, 19 nt, Homo sapiens
  misc_RNA (1)...(19): siRNA sense strand
gcagaaacaggcagcaaca

SEQ ID NO: 2612191 - RNA, 19 nt, Homo sapiens
  misc_RNA (1)...(19): siRNA sense strand
ugaacaacacucagccaaa

SEQ ID NO: 2612192 - RNA, 19 nt, Homo sapiens
  misc_RNA (1)...(19): siRNA sense strand
aagcagaaguggugugaug

SEQ ID NO: 2612193 - RNA, 19 nt, Homo sapiens
  misc_RNA (1)...(19): siRNA sense strand
gcaggaacaaggugcagaa

SEQ ID NO: 2612194 - RNA, 19 nt, Homo sapiens
  misc_RNA (1)...(19): siRNA sense strand
cagaaggguuaaaggaaag

SEQ ID NO: 2612195 - RNA, 19 nt, Homo sapiens
  misc_RNA (1)...(19): siRNA sense strand
ccugugaaggaaugauaaa

SEQ ID NO: 2612196 - RNA, 19 nt, Homo sapiens
  misc_RNA (1)...(19): siRNA sense strand
gcaacaugaaugaucuuaa

SEQ ID NO: 2612197 - RNA, 19 nt, Homo sapiens
  misc_RNA (1)...(19): siRNA sense strand
cuuucacaauguuggguua

SEQ ID NO: 2612198 - RNA, 19 nt, Homo sapiens
  misc_RNA (1)...(19): siRNA sense strand
ugaauuagagccagaccaa

SEQ ID NO: 2612199 - RNA, 19 nt, Homo sapiens
  misc_RNA (1)...(19): siRNA sense strand
cugcugaauuagagccaga

SEQ ID NO: 2612200 - RNA, 19 nt, Homo sapiens
  misc_RNA (1)...(19): siRNA sense strand
ggacuaucuacaagcagaa

SEQ ID NO: 2612201 - RNA, 19 nt, Homo sapiens
  misc_RNA (1)...(19): siRNA sense strand
cauacugguucauggguga

SEQ ID NO: 2612202 - RNA, 19 nt, Homo sapiens
  misc_RNA (1)...(19): siRNA sense strand
aggaguugcuggagaaauc

SEQ ID NO: 2612203 - RNA, 19 nt, Homo sapiens
  misc_RNA (1)...(19): siRNA sense strand
cugucacgcugaugauaaa

SEQ ID NO: 2612204 - RNA, 19 nt, Homo sapiens
  misc_RNA (1)...(19): siRNA sense strand
gcugguaaacaaugccaaa

SEQ ID NO: 2612205 - RNA, 19 nt, Homo sapiens
  misc_RNA (1)...(19): siRNA sense strand
cgaauaaauccgcggacga

SEQ ID NO: 2612206 - RNA, 19 nt, Homo sapiens
  misc_RNA (1)...(19): siRNA sense strand
gcacacaagcagcagguca

SEQ ID NO: 2612207 - RNA, 19 nt, Homo sapiens
  misc_RNA (1)...(19): siRNA sense strand
cacacaagcagcaggucaa

SEQ ID NO: 2612208 - RNA, 19 nt, Homo sapiens
  misc_RNA (1)...(19): siRNA sense strand
ugagaaagugacagaagca

SEQ ID NO: 2612209 - RNA, 19 nt, Homo sapiens
  misc_RNA (1)...(19): siRNA sense strand
gaucaugcauccaacguca

SEQ ID NO: 2612210 - RNA, 19 nt, Homo sapiens
  misc_RNA (1)...(19): siRNA sense strand
ucaaguacaccaugcacaa

SEQ ID NO: 2612211 - RNA, 19 nt, Homo sapiens
  misc_RNA (1)...(19): siRNA sense strand
agugaggacugaagggaac

SEQ ID NO: 2612212 - RNA, 19 nt, Homo sapiens
  misc_RNA (1)...(19): siRNA sense strand
aggacugaagggaacgaaa

SEQ ID NO: 2612213 - RNA, 19 nt, Homo sapiens
  misc_RNA (1)...(19): siRNA sense strand
gauaauaaugccuggacgu

SEQ ID NO: 2612214 - RNA, 19 nt, Homo sapiens
  misc_RNA (1)...(19): siRNA sense strand
aagugaggacugaagggaa

SEQ ID NO: 2612215 - RNA, 19 nt, Homo sapiens
  misc_RNA (1)...(19): siRNA sense strand
agaagcaggaguugcauau

SEQ ID NO: 2612216 - RNA, 19 nt, Homo sapiens
  misc_RNA (1)...(19): siRNA sense strand
acacaaaggagcaucacca

SEQ ID NO: 2612217 - RNA, 19 nt, Homo sapiens
  misc_RNA (1)...(19): siRNA sense strand
cagacuuagaagaccuuaa

SEQ ID NO: 2612218 - RNA, 19 nt, Homo sapiens
  misc_RNA (1)...(19): siRNA sense strand
cagccaaaugccagacuga

SEQ ID NO: 2612219 - RNA, 19 nt, Homo sapiens
  misc_RNA (1)...(19): siRNA sense strand
gcguuugcguggaagacga

SEQ ID NO: 2612220 - RNA, 19 nt, Homo sapiens
  misc_RNA (1)...(19): siRNA sense strand
gcauacagcuguuacccga

SEQ ID NO: 2612221 - RNA, 19 nt, Homo sapiens
  misc_RNA (1)...(19): siRNA sense strand
ugcuaaagccaaaggagaa

SEQ ID NO: 2612222 - RNA, 19 nt, Homo sapiens
  misc_RNA (1)...(19): siRNA sense strand
aggauaagcgaguggacau

SEQ ID NO: 2612223 - RNA, 19 nt, Homo sapiens
  misc_RNA (1)...(19): siRNA sense strand
agguguaugcgguggacua

SEQ ID NO: 2612224 - RNA, 19 nt, Homo sapiens
  misc_RNA (1)...(19): siRNA sense strand
ccacaaaugccaugggcgu

SEQ ID NO: 2612225 - RNA, 19 nt, Homo sapiens
  misc_RNA (1)...(19): siRNA sense strand
uggacuauccugagcggua

SEQ ID NO: 2612226 - RNA, 19 nt, Homo sapiens
  misc_RNA (1)...(19): siRNA sense strand
gagccaagcgcaaagccaa

SEQ ID NO: 2612227 - RNA, 19 nt, Homo sapiens
  misc_RNA (1)...(19): siRNA sense strand
gagaagaagcuguugcacu

SEQ ID NO: 2612228 - RNA, 19 nt, Homo sapiens
  misc_RNA (1)...(19): siRNA sense strand
caggaagacaccaggaagu

SEQ ID NO: 2612229 - RNA, 19 nt, Homo sapiens
  misc_RNA (1)...(19): siRNA sense strand
gggaacaagaccugcgcca

SEQ ID NO: 2612230 - RNA, 19 nt, Homo sapiens
  misc_RNA (1)...(19): siRNA sense strand
uugcuaaagccaaaggaga

SEQ ID NO: 2612231 - RNA, 19 nt, Homo sapiens
  misc_RNA (1)...(19): siRNA sense strand
caucaagguucaagguccu

SEQ ID NO: 2612232 - RNA, 19 nt, Homo sapiens
  misc_RNA (1)...(19): siRNA sense strand
gcucagggagagggaacaa

SEQ ID NO: 2612233 - RNA, 19 nt, Homo sapiens
  misc_RNA (1)...(19): siRNA sense strand
augaaaacucgguggugua

SEQ ID NO: 2612234 - RNA, 19 nt, Homo sapiens
  misc_RNA (1)...(19): siRNA sense strand
cuccgauguuucaggaaga

SEQ ID NO: 2612235 - RNA, 19 nt, Homo sapiens
  misc_RNA (1)...(19): siRNA sense strand
auagaaacacugagagaaa

SEQ ID NO: 2612236 - RNA, 19 nt, Homo sapiens
  misc_RNA (1)...(19): siRNA sense strand
gacuagaacagcugggaaa

SEQ ID NO: 2612237 - RNA, 19 nt, Homo sapiens
  misc_RNA (1)...(19): siRNA sense strand
agaugcacuucgagagaaa

SEQ ID NO: 2612238 - RNA, 19 nt, Homo sapiens
  misc_RNA (1)...(19): siRNA sense strand
ugaacaaggcacagaagaa

SEQ ID NO: 2612239 - RNA, 19 nt, Homo sapiens
  misc_RNA (1)...(19): siRNA sense strand
agauuaagauacuggaaca

SEQ ID NO: 2612240 - RNA, 19 nt, Homo sapiens
  misc_RNA (1)...(19): siRNA sense strand
ggcaggaauuggaggaaaa

SEQ ID NO: 2612241 - RNA, 19 nt, Homo sapiens
  misc_RNA (1)...(19): siRNA sense strand
gagaaaauucagagagaca

SEQ ID NO: 2612242 - RNA, 19 nt, Homo sapiens
  misc_RNA (1)...(19): siRNA sense strand
uggaaauggcacagaaaca

SEQ ID NO: 2612243 - RNA, 19 nt, Homo sapiens
  misc_RNA (1)...(19): siRNA sense strand
aaucaaaggcucaguaaaa

SEQ ID NO: 2612244 - RNA, 19 nt, Homo sapiens
  misc_RNA (1)...(19): siRNA sense strand
acaagaaaauucagagcua

SEQ ID NO: 2612245 - RNA, 19 nt, Homo sapiens
  misc_RNA (1)...(19): siRNA sense strand
ugcagaagcaagagugaaa

SEQ ID NO: 2612246 - RNA, 19 nt, Homo sapiens
  misc_RNA (1)...(19): siRNA sense strand
ggcaugaagcgaacagaaa

SEQ ID NO: 2612247 - RNA, 19 nt, Homo sapiens
  misc_RNA (1)...(19): siRNA sense strand
cagaauguaccgagaugaa

SEQ ID NO: 2612248 - RNA, 19 nt, Homo sapiens
  misc_RNA (1)...(19): siRNA sense strand
ugucuuaaucauuggcaaa

SEQ ID NO: 2612249 - RNA, 19 nt, Homo sapiens
  misc_RNA (1)...(19): siRNA sense strand
cgauaagcuugaaagugaa

SEQ ID NO: 2612250 - RNA, 19 nt, Homo sapiens
  misc_RNA (1)...(19): siRNA sense strand
gcagauauaaagagagacu

SEQ ID NO: 2612251 - RNA, 19 nt, Homo sapiens
  misc_RNA (1)...(19): siRNA sense strand
gcgaacagaaagucgacaa

SEQ ID NO: 2612252 - RNA, 19 nt, Homo sapiens
  misc_RNA (1)...(19): siRNA sense strand
auucagagagacagauuaa

SEQ ID NO: 2612253 - RNA, 19 nt, Homo sapiens
  misc_RNA (1)...(19): siRNA sense strand
aagcaagagugaaagacau

SEQ ID NO: 2612254 - RNA, 19 nt, Homo sapiens
  misc_RNA (1)...(19): siRNA sense strand
aggagaacgagcugaagaa

SEQ ID NO: 2612255 - RNA, 19 nt, Homo sapiens
  misc_RNA (1)...(19): siRNA sense strand
aauugaggccuuagaacaa

SEQ ID NO: 2612256 - RNA, 19 nt, Homo sapiens
  misc_RNA (1)...(19): siRNA sense strand
aggcacagaagaaguuaaa

SEQ ID NO: 2612257 - RNA, 19 nt, Homo sapiens
  misc_RNA (1)...(19): siRNA sense strand
aggcaggaauuggaggaaa

SEQ ID NO: 2612258 - RNA, 19 nt, Homo sapiens
  misc_RNA (1)...(19): siRNA sense strand
agugaagucagcagauaua

SEQ ID NO: 2612259 - RNA, 19 nt, Homo sapiens
  misc_RNA (1)...(19): siRNA sense strand
cgcacauauucaagaggua

SEQ ID NO: 2612260 - RNA, 19 nt, Homo sapiens
  misc_RNA (1)...(19): siRNA sense strand
gagagaaagcagucagagu

SEQ ID NO: 2612261 - RNA, 19 nt, Homo sapiens
  misc_RNA (1)...(19): siRNA sense strand
gguugagauucuugaaaau

SEQ ID NO: 2612262 - RNA, 19 nt, Homo sapiens
  misc_RNA (1)...(19): siRNA sense strand
ggaucuaaugaaggagaaa

SEQ ID NO: 2612263 - RNA, 19 nt, Homo sapiens
  misc_RNA (1)...(19): siRNA sense strand
auccagaacuagugaacuu

SEQ ID NO: 2612264 - RNA, 19 nt, Homo sapiens
  misc_RNA (1)...(19): siRNA sense strand
caguuagaaucccuagaaa

SEQ ID NO: 2612265 - RNA, 19 nt, Homo sapiens
  misc_RNA (1)...(19): siRNA sense strand
acuuuagagaacagcaaua

SEQ ID NO: 2612266 - RNA, 19 nt, Homo sapiens
  misc_RNA (1)...(19): siRNA sense strand
uauugaagcuagagaugga

SEQ ID NO: 2612267 - RNA, 19 nt, Homo sapiens
  misc_RNA (1)...(19): siRNA sense strand
gacuuauagaugagagaga

SEQ ID NO: 2612268 - RNA, 19 nt, Homo sapiens
  misc_RNA (1)...(19): siRNA sense strand
auggaaauggaacgagaua

SEQ ID NO: 2612269 - RNA, 19 nt, Homo sapiens
  misc_RNA (1)...(19): siRNA sense strand
gagugaaagacauugaaaa

SEQ ID NO: 2612270 - RNA, 19 nt, Homo sapiens
  misc_RNA (1)...(19): siRNA sense strand
aagcuaagcaagauugaau

SEQ ID NO: 2612271 - RNA, 19 nt, Homo sapiens
  misc_RNA (1)...(19): siRNA sense strand
agaaacaaaguauggauga

SEQ ID NO: 2612272 - RNA, 19 nt, Homo sapiens
  misc_RNA (1)...(19): siRNA sense strand
cuuccaaaauccugaaaau

SEQ ID NO: 2612273 - RNA, 19 nt, Homo sapiens
  misc_RNA (1)...(19): siRNA sense strand
agagagacuacaugauauu

SEQ ID NO: 2612274 - RNA, 19 nt, Homo sapiens
  misc_RNA (1)...(19): siRNA sense strand
cagaagcaagagugaaaga

SEQ ID NO: 2612275 - RNA, 19 nt, Homo sapiens
  misc_RNA (1)...(19): siRNA sense strand
aguuagaaucccuagaaaa

SEQ ID NO: 2612276 - RNA, 19 nt, Homo sapiens
  misc_RNA (1)...(19): siRNA sense strand
cuuagaacugcgaaggaau

SEQ ID NO: 2612277 - RNA, 19 nt, Homo sapiens
  misc_RNA (1)...(19): siRNA sense strand
auauggaaauggaacgaga

SEQ ID NO: 2612278 - RNA, 19 nt, Homo sapiens
  misc_RNA (1)...(19): siRNA sense strand
acuuagagauggaaaauca

SEQ ID NO: 2612279 - RNA, 19 nt, Homo sapiens
  misc_RNA (1)...(19): siRNA sense strand
agucagagucgauaagcuu

SEQ ID NO: 2612280 - RNA, 19 nt, Homo sapiens
  misc_RNA (1)...(19): siRNA sense strand
agauauaaagagagacuac

SEQ ID NO: 2612281 - RNA, 19 nt, Homo sapiens
  misc_RNA (1)...(19): siRNA sense strand
ugaagucagcagauauaaa

SEQ ID NO: 2612282 - RNA, 19 nt, Homo sapiens
  misc_RNA (1)...(19): siRNA sense strand
acaaaguauggaugaauca

SEQ ID NO: 2612283 - RNA, 19 nt, Homo sapiens
  misc_RNA (1)...(19): siRNA sense strand
aggaucuaaugaaggagaa

SEQ ID NO: 2612284 - RNA, 19 nt, Homo sapiens
  misc_RNA (1)...(19): siRNA sense strand
gguaacucauaaucaggaa

SEQ ID NO: 2612285 - RNA, 19 nt, Homo sapiens
  misc_RNA (1)...(19): siRNA sense strand
aacagaaagucgacaacau

SEQ ID NO: 2612286 - RNA, 19 nt, Homo sapiens
  misc_RNA (1)...(19): siRNA sense strand
caagaguugaggaauuaaa

SEQ ID NO: 2612287 - RNA, 19 nt, Homo sapiens
  misc_RNA (1)...(19): siRNA sense strand
uggcaacgcuguuuggcua

SEQ ID NO: 2612288 - RNA, 19 nt, Homo sapiens
  misc_RNA (1)...(19): siRNA sense strand
gggaaagucugcuggcaac

SEQ ID NO: 2612289 - RNA, 19 nt, Homo sapiens
  misc_RNA (1)...(19): siRNA sense strand
ugggaaagucugcuggcaa

SEQ ID NO: 2612290 - RNA, 19 nt, Homo sapiens
  misc_RNA (1)...(19): siRNA sense strand
cuggagcaaagcugggaaa

SEQ ID NO: 2612291 - RNA, 19 nt, Homo sapiens
  misc_RNA (1)...(19): siRNA sense strand
uggcagcagaaguaacaaa

SEQ ID NO: 2612292 - RNA, 19 nt, Homo sapiens
  misc_RNA (1)...(19): siRNA sense strand
ccggagacggggacgaaaa

SEQ ID NO: 2612293 - RNA, 19 nt, Homo sapiens
  misc_RNA (1)...(19): siRNA sense strand
gcuucacugugcuggacaa

SEQ ID NO: 2612294 - RNA, 19 nt, Homo sapiens
  misc_RNA (1)...(19): siRNA sense strand
gguuacuggcagcgcagaa

SEQ ID NO: 2612295 - RNA, 19 nt, Homo sapiens
  misc_RNA (1)...(19): siRNA sense strand
ccuuuaucacaguagcaua

SEQ ID NO: 2612296 - RNA, 19 nt, Homo sapiens
  misc_RNA (1)...(19): siRNA sense strand
cuaaacagagauaagacau

SEQ ID NO: 2612297 - RNA, 19 nt, Homo sapiens
  misc_RNA (1)...(19): siRNA sense strand
cgacacaaauccagccuca

SEQ ID NO: 2612298 - RNA, 19 nt, Homo sapiens
  misc_RNA (1)...(19): siRNA sense strand
ccggaauggcgcaugauga

SEQ ID NO: 2612299 - RNA, 19 nt, Homo sapiens
  misc_RNA (1)...(19): siRNA sense strand
ccaccggaagagaaagcaa

SEQ ID NO: 2612300 - RNA, 19 nt, Homo sapiens
  misc_RNA (1)...(19): siRNA sense strand
cagcaagcccagacaacca

SEQ ID NO: 2612301 - RNA, 19 nt, Homo sapiens
  misc_RNA (1)...(19): siRNA sense strand
gcuuauaucccgcugcaga

SEQ ID NO: 2612302 - RNA, 19 nt, Homo sapiens
  misc_RNA (1)...(19): siRNA sense strand
cgaaggagcuccagcaagc

SEQ ID NO: 2612303 - RNA, 19 nt, Homo sapiens
  misc_RNA (1)...(19): siRNA sense strand
guuucugcauaaagaccaa

SEQ ID NO: 2612304 - RNA, 19 nt, Homo sapiens
  misc_RNA (1)...(19): siRNA sense strand
cagaaaucgacgugguaau

SEQ ID NO: 2612305 - RNA, 19 nt, Homo sapiens
  misc_RNA (1)...(19): siRNA sense strand
ccaaaauacaagugaauca

SEQ ID NO: 2612306 - RNA, 19 nt, Homo sapiens
  misc_RNA (1)...(19): siRNA sense strand
acucaaggcugcaggcugu

SEQ ID NO: 2612307 - RNA, 19 nt, Homo sapiens
  misc_RNA (1)...(19): siRNA sense strand
agacacgauuagaagagau

SEQ ID NO: 2612308 - RNA, 19 nt, Homo sapiens
  misc_RNA (1)...(19): siRNA sense strand
acuaaugucuauaaagcca

SEQ ID NO: 2612309 - RNA, 19 nt, Homo sapiens
  misc_RNA (1)...(19): siRNA sense strand
cguccauguccgcgcacaa

SEQ ID NO: 2612310 - RNA, 19 nt, Homo sapiens
  misc_RNA (1)...(19): siRNA sense strand
cuacagaaaucgacguggu

SEQ ID NO: 2612311 - RNA, 19 nt, Homo sapiens
  misc_RNA (1)...(19): siRNA sense strand
cuauauuagcgacaggaga

SEQ ID NO: 2612312 - RNA, 19 nt, Homo sapiens
  misc_RNA (1)...(19): siRNA sense strand
ccaaauacccaauccggga

SEQ ID NO: 2612313 - RNA, 19 nt, Homo sapiens
  misc_RNA (1)...(19): siRNA sense strand
ccaucaugugacuggaaga

SEQ ID NO: 2612314 - RNA, 19 nt, Homo sapiens
  misc_RNA (1)...(19): siRNA sense strand
uguuaaagaagaagcauca

SEQ ID NO: 2612315 - RNA, 19 nt, Homo sapiens
  misc_RNA (1)...(19): siRNA sense strand
ccuuagaagcggacuuaau

SEQ ID NO: 2612316 - RNA, 19 nt, Homo sapiens
  misc_RNA (1)...(19): siRNA sense strand
cuguagaagaacuuaagaa

SEQ ID NO: 2612317 - RNA, 19 nt, Homo sapiens
  misc_RNA (1)...(19): siRNA sense strand
cgauccaauauccgagaaa

SEQ ID NO: 2612318 - RNA, 19 nt, Homo sapiens
  misc_RNA (1)...(19): siRNA sense strand
auccaauauccgagaaauu

SEQ ID NO: 2612319 - RNA, 19 nt, Homo sapiens
  misc_RNA (1)...(19): siRNA sense strand
gggcuucacagguggaaaa

SEQ ID NO: 2612320 - RNA, 19 nt, Homo sapiens
  misc_RNA (1)...(19): siRNA sense strand
ugugaauguugaagaggga

SEQ ID NO: 2612321 - RNA, 19 nt, Homo sapiens
  misc_RNA (1)...(19): siRNA sense strand
agaagaagcaucagcagca

SEQ ID NO: 2612322 - RNA, 19 nt, Homo sapiens
  misc_RNA (1)...(19): siRNA sense strand
cugaagagaaugauagauc

SEQ ID NO: 2612323 - RNA, 19 nt, Homo sapiens
  misc_RNA (1)...(19): siRNA sense strand
augaagaaacuuugcuaca

SEQ ID NO: 2612324 - RNA, 19 nt, Homo sapiens
  misc_RNA (1)...(19): siRNA sense strand
cagcaggagaagauugaca

SEQ ID NO: 2612325 - RNA, 19 nt, Homo sapiens
  misc_RNA (1)...(19): siRNA sense strand
aaacagaaaaugauggaga

SEQ ID NO: 2612326 - RNA, 19 nt, Homo sapiens
  misc_RNA (1)...(19): siRNA sense strand
uguugaagagggaaccaaa

SEQ ID NO: 2612327 - RNA, 19 nt, Homo sapiens
  misc_RNA (1)...(19): siRNA sense strand
gagaaguaucaaaggugca

SEQ ID NO: 2612328 - RNA, 19 nt, Homo sapiens
  misc_RNA (1)...(19): siRNA sense strand
uuugaaaguccgaaaggau

SEQ ID NO: 2612329 - RNA, 19 nt, Homo sapiens
  misc_RNA (1)...(19): siRNA sense strand
gaacuuagccaacugguca

SEQ ID NO: 2612330 - RNA, 19 nt, Homo sapiens
  misc_RNA (1)...(19): siRNA sense strand
agaaaaugauggagaagcu

SEQ ID NO: 2612331 - RNA, 19 nt, Homo sapiens
  misc_RNA (1)...(19): siRNA sense strand
cugaaauuccucaagauca

SEQ ID NO: 2612332 - RNA, 19 nt, Homo sapiens
  misc_RNA (1)...(19): siRNA sense strand
agaucaaaaugcugcagaa

SEQ ID NO: 2612333 - RNA, 19 nt, Homo sapiens
  misc_RNA (1)...(19): siRNA sense strand
cuuaauugaacuuagccaa

SEQ ID NO: 2612334 - RNA, 19 nt, Homo sapiens
  misc_RNA (1)...(19): siRNA sense strand
uaucaaugcaggacguaca

SEQ ID NO: 2612335 - RNA, 19 nt, Homo sapiens
  misc_RNA (1)...(19): siRNA sense strand
uccgagaaauugagaaacu

SEQ ID NO: 2612336 - RNA, 19 nt, Homo sapiens
  misc_RNA (1)...(19): siRNA sense strand
agauccuguuaaagaagaa

SEQ ID NO: 2612337 - RNA, 19 nt, Homo sapiens
  misc_RNA (1)...(19): siRNA sense strand
agaagaacuuaagaagcaa

SEQ ID NO: 2612338 - RNA, 19 nt, Homo sapiens
  misc_RNA (1)...(19): siRNA sense strand
gggaaaccuuagaagcgga

SEQ ID NO: 2612339 - RNA, 19 nt, Homo sapiens
  misc_RNA (1)...(19): siRNA sense strand
cugugguucuugugggaaa

SEQ ID NO: 2612340 - RNA, 19 nt, Homo sapiens
  misc_RNA (1)...(19): siRNA sense strand
ggauacagcuggacaggca

SEQ ID NO: 2612341 - RNA, 19 nt, Homo sapiens
  misc_RNA (1)...(19): siRNA sense strand
aguguauggaagaggcuaa

SEQ ID NO: 2612342 - RNA, 19 nt, Homo sapiens
  misc_RNA (1)...(19): siRNA sense strand
ggaaagaaaaggaggcagu

SEQ ID NO: 2612343 - RNA, 19 nt, Homo sapiens
  misc_RNA (1)...(19): siRNA sense strand
caguacuggccauggagaa

SEQ ID NO: 2612344 - RNA, 19 nt, Homo sapiens
  misc_RNA (1)...(19): siRNA sense strand
gggaagagugccaugacca

SEQ ID NO: 2612345 - RNA, 19 nt, Homo sapiens
  misc_RNA (1)...(19): siRNA sense strand
acgggagauacguaggaaa

SEQ ID NO: 2612346 - RNA, 19 nt, Homo sapiens
  misc_RNA (1)...(19): siRNA sense strand
ccguauugaugaugagccu

SEQ ID NO: 2612347 - RNA, 19 nt, Homo sapiens
  misc_RNA (1)...(19): siRNA sense strand
aguacuggccauggagaaa

SEQ ID NO: 2612348 - RNA, 19 nt, Homo sapiens
  misc_RNA (1)...(19): siRNA sense strand
ccaccauugaagaugcuua

SEQ ID NO: 2612349 - RNA, 19 nt, Homo sapiens
  misc_RNA (1)...(19): siRNA sense strand
aguacaaacuagugaugcu

SEQ ID NO: 2612350 - RNA, 19 nt, Homo sapiens
  misc_RNA (1)...(19): siRNA sense strand
gcuuauuuaucgaguccga

SEQ ID NO: 2612351 - RNA, 19 nt, Homo sapiens
  misc_RNA (1)...(19): siRNA sense strand
cgggagauacguaggaaag

SEQ ID NO: 2612352 - RNA, 19 nt, Homo sapiens
  misc_RNA (1)...(19): siRNA sense strand
ccggaagaagaaagauuca

SEQ ID NO: 2612353 - RNA, 19 nt, Homo sapiens
  misc_RNA (1)...(19): siRNA sense strand
cagaaaaggaagagggaua

SEQ ID NO: 2612354 - RNA, 19 nt, Homo sapiens
  misc_RNA (1)...(19): siRNA sense strand
cagaagaaagagaggugaa

SEQ ID NO: 2612355 - RNA, 19 nt, Homo sapiens
  misc_RNA (1)...(19): siRNA sense strand
acaagguauuugagagaca

SEQ ID NO: 2612356 - RNA, 19 nt, Homo sapiens
  misc_RNA (1)...(19): siRNA sense strand
gugagagucaagaaagaaa

SEQ ID NO: 2612357 - RNA, 19 nt, Homo sapiens
  misc_RNA (1)...(19): siRNA sense strand
ucagcauggaggaggauaa

SEQ ID NO: 2612358 - RNA, 19 nt, Homo sapiens
  misc_RNA (1)...(19): siRNA sense strand
gaaagagaggugaaggaga

SEQ ID NO: 2612359 - RNA, 19 nt, Homo sapiens
  misc_RNA (1)...(19): siRNA sense strand
cuccagaagcucagaagaa

SEQ ID NO: 2612360 - RNA, 19 nt, Homo sapiens
  misc_RNA (1)...(19): siRNA sense strand
cuaaagaagcccuugguga

SEQ ID NO: 2612361 - RNA, 19 nt, Homo sapiens
  misc_RNA (1)...(19): siRNA sense strand
ggggcaaggucaagcacaa

SEQ ID NO: 2612362 - RNA, 19 nt, Homo sapiens
  misc_RNA (1)...(19): siRNA sense strand
aagaaagagaggugaagga

SEQ ID NO: 2612363 - RNA, 19 nt, Homo sapiens
  misc_RNA (1)...(19): siRNA sense strand
ccaacaugucugugggcuu

SEQ ID NO: 2612364 - RNA, 19 nt, Homo sapiens
  misc_RNA (1)...(19): siRNA sense strand
ggauagacuucgagaccag

SEQ ID NO: 2612365 - RNA, 19 nt, Homo sapiens
  misc_RNA (1)...(19): siRNA sense strand
aggauaagacagugccaga

SEQ ID NO: 2612366 - RNA, 19 nt, Homo sapiens
  misc_RNA (1)...(19): siRNA sense strand
cgagagauugccagaguca

SEQ ID NO: 2612367 - RNA, 19 nt, Homo sapiens
  misc_RNA (1)...(19): siRNA sense strand
gggagguggugauggagca

SEQ ID NO: 2612368 - RNA, 19 nt, Homo sapiens
  misc_RNA (1)...(19): siRNA sense strand
aagcacaacuggagcagca

SEQ ID NO: 2612369 - RNA, 19 nt, Homo sapiens
  misc_RNA (1)...(19): siRNA sense strand
guuacuacagugagaguca

SEQ ID NO: 2612370 - RNA, 19 nt, Homo sapiens
  misc_RNA (1)...(19): siRNA sense strand
agagaaucaucguggaaac

SEQ ID NO: 2612371 - RNA, 19 nt, Homo sapiens
  misc_RNA (1)...(19): siRNA sense strand
ccagaacagcacaagguau

SEQ ID NO: 2612372 - RNA, 19 nt, Homo sapiens
  misc_RNA (1)...(19): siRNA sense strand
cugcucagaaggagaaaga

SEQ ID NO: 2612373 - RNA, 19 nt, Homo sapiens
  misc_RNA (1)...(19): siRNA sense strand
gagaguaguuauagacccu

SEQ ID NO: 2612374 - RNA, 19 nt, Homo sapiens
  misc_RNA (1)...(19): siRNA sense strand
cuacaagauccauaggcau

SEQ ID NO: 2612375 - RNA, 19 nt, Homo sapiens
  misc_RNA (1)...(19): siRNA sense strand
gcauaaagauagggaggug

SEQ ID NO: 2612376 - RNA, 19 nt, Homo sapiens
  misc_RNA (1)...(19): siRNA sense strand
cuacagugagagucaagaa

SEQ ID NO: 2612377 - RNA, 19 nt, Homo sapiens
  misc_RNA (1)...(19): siRNA sense strand
acccuaaggcuguggcauu

SEQ ID NO: 2612378 - RNA, 19 nt, Homo sapiens
  misc_RNA (1)...(19): siRNA sense strand
agaucccacuggagagaau

SEQ ID NO: 2612379 - RNA, 19 nt, Homo sapiens
  misc_RNA (1)...(19): siRNA sense strand
guacaguaguccuuggugu

SEQ ID NO: 2612380 - RNA, 19 nt, Homo sapiens
  misc_RNA (1)...(19): siRNA sense strand
ggcuguggcauuuggagaa

SEQ ID NO: 2612381 - RNA, 19 nt, Homo sapiens
  misc_RNA (1)...(19): siRNA sense strand
ggagcagccaggaguguca

SEQ ID NO: 2612382 - RNA, 19 nt, Homo sapiens
  misc_RNA (1)...(19): siRNA sense strand
gccugaaagcccagaagga

SEQ ID NO: 2612383 - RNA, 19 nt, Homo sapiens
  misc_RNA (1)...(19): siRNA sense strand
agacagugccagagaggag

SEQ ID NO: 2612384 - RNA, 19 nt, Homo sapiens
  misc_RNA (1)...(19): siRNA sense strand
agccaggagugaaggacca

SEQ ID NO: 2612385 - RNA, 19 nt, Homo sapiens
  misc_RNA (1)...(19): siRNA sense strand
gugaaggagaaaagaacau

SEQ ID NO: 2612386 - RNA, 19 nt, Homo sapiens
  misc_RNA (1)...(19): siRNA sense strand
agagaaacccagugaggag

SEQ ID NO: 2612387 - RNA, 19 nt, Homo sapiens
  misc_RNA (1)...(19): siRNA sense strand
gguacaugucccagagcaa

SEQ ID NO: 2612388 - RNA, 19 nt, Homo sapiens
  misc_RNA (1)...(19): siRNA sense strand
cggaaguggagguggcuga

SEQ ID NO: 2612389 - RNA, 19 nt, Homo sapiens
  misc_RNA (1)...(19): siRNA sense strand
gcugacgagcugcuggaaa

SEQ ID NO: 2612390 - RNA, 19 nt, Homo sapiens
  misc_RNA (1)...(19): siRNA sense strand
uggagaaggcggaagugga

SEQ ID NO: 2612391 - RNA, 19 nt, Homo sapiens
  misc_RNA (1)...(19): siRNA sense strand
ccaacaucguggagcgcua

SEQ ID NO: 2612392 - RNA, 19 nt, Homo sapiens
  misc_RNA (1)...(19): siRNA sense strand
gcgagaaguucccuggcaa

SEQ ID NO: 2612393 - RNA, 19 nt, Homo sapiens
  misc_RNA (1)...(19): siRNA sense strand
agcagaaaguccagcgcua

SEQ ID NO: 2612394 - RNA, 19 nt, Homo sapiens
  misc_RNA (1)...(19): siRNA sense strand
agagggagcugaaggacca

SEQ ID NO: 2612395 - RNA, 19 nt, Homo sapiens
  misc_RNA (1)...(19): siRNA sense strand
ccauuguggcuuacggcaa

SEQ ID NO: 2612396 - RNA, 19 nt, Homo sapiens
  misc_RNA (1)...(19): siRNA sense strand
agguggugguggcggagaa

SEQ ID NO: 2612397 - RNA, 19 nt, Homo sapiens
  misc_RNA (1)...(19): siRNA sense strand
ucgacgagcugcagaggga

SEQ ID NO: 2612398 - RNA, 19 nt, Homo sapiens
  misc_RNA (1)...(19): siRNA sense strand
uagaggagcuggaggcgga

SEQ ID NO: 2612399 - RNA, 19 nt, Homo sapiens
  misc_RNA (1)...(19): siRNA sense strand
gacaacuggcggagaccaa

SEQ ID NO: 2612400 - RNA, 19 nt, Homo sapiens
  misc_RNA (1)...(19): siRNA sense strand
cagaaaguccagcgcuaca

SEQ ID NO: 2612401 - RNA, 19 nt, Homo sapiens
  misc_RNA (1)...(19): siRNA sense strand
aaacaugggagaaggccaa

SEQ ID NO: 2612402 - RNA, 19 nt, Homo sapiens
  misc_RNA (1)...(19): siRNA sense strand
ccucaaagauagaauggcu

SEQ ID NO: 2612403 - RNA, 19 nt, Homo sapiens
  misc_RNA (1)...(19): siRNA sense strand
ggacaaggagcauccaaga

SEQ ID NO: 2612404 - RNA, 19 nt, Homo sapiens
  misc_RNA (1)...(19): siRNA sense strand
caaugaagaaaguaggacu

SEQ ID NO: 2612405 - RNA, 19 nt, Homo sapiens
  misc_RNA (1)...(19): siRNA sense strand
ugggacuggaggaggaauu

SEQ ID NO: 2612406 - RNA, 19 nt, Homo sapiens
  misc_RNA (1)...(19): siRNA sense strand
gguacccauuauugagaau

SEQ ID NO: 2612407 - RNA, 19 nt, Homo sapiens
  misc_RNA (1)...(19): siRNA sense strand
gagaauacaccugaggaga

SEQ ID NO: 2612408 - RNA, 19 nt, Homo sapiens
  misc_RNA (1)...(19): siRNA sense strand
caagauaccugaucccaga

SEQ ID NO: 2612409 - RNA, 19 nt, Homo sapiens
  misc_RNA (1)...(19): siRNA sense strand
gaaacaugggagaaggcca

SEQ ID NO: 2612410 - RNA, 19 nt, Homo sapiens
  misc_RNA (1)...(19): siRNA sense strand
cgccaucgaagaagcuaaa

SEQ ID NO: 2612411 - RNA, 19 nt, Homo sapiens
  misc_RNA (1)...(19): siRNA sense strand
acaagugaaaggaggaaaa

SEQ ID NO: 2612412 - RNA, 19 nt, Homo sapiens
  misc_RNA (1)...(19): siRNA sense strand
acuucauaauggagaccaa

SEQ ID NO: 2612413 - RNA, 19 nt, Homo sapiens
  misc_RNA (1)...(19): siRNA sense strand
aggaaaucaagcaaggcaa

SEQ ID NO: 2612414 - RNA, 19 nt, Homo sapiens
  misc_RNA (1)...(19): siRNA sense strand
agugaaaggaggaaaauau

SEQ ID NO: 2612415 - RNA, 19 nt, Homo sapiens
  misc_RNA (1)...(19): siRNA sense strand
ccacaagugaaaggaggaa

SEQ ID NO: 2612416 - RNA, 19 nt, Homo sapiens
  misc_RNA (1)...(19): siRNA sense strand
acucaggacaucugcagaa

SEQ ID NO: 2612417 - RNA, 19 nt, Homo sapiens
  misc_RNA (1)...(19): siRNA sense strand
accacaaacaggugcaaau

SEQ ID NO: 2612418 - RNA, 19 nt, Homo sapiens
  misc_RNA (1)...(19): siRNA sense strand
ccgugugaucuuuguacaa

SEQ ID NO: 2612419 - RNA, 19 nt, Homo sapiens
  misc_RNA (1)...(19): siRNA sense strand
ccuacaaccgugugaucuu

SEQ ID NO: 2612420 - RNA, 19 nt, Homo sapiens
  misc_RNA (1)...(19): siRNA sense strand
cagcccaacaacagggaca

SEQ ID NO: 2612421 - RNA, 19 nt, Homo sapiens
  misc_RNA (1)...(19): siRNA sense strand
ccuuaaccaagaugccaaa

SEQ ID NO: 2612422 - RNA, 19 nt, Homo sapiens
  misc_RNA (1)...(19): siRNA sense strand
cgggaaaauccaaggcuua

SEQ ID NO: 2612423 - RNA, 19 nt, Homo sapiens
  misc_RNA (1)...(19): siRNA sense strand
cagagaagacgaaggcaga

SEQ ID NO: 2612424 - RNA, 19 nt, Homo sapiens
  misc_RNA (1)...(19): siRNA sense strand
ggauuuggccagucaggaa

SEQ ID NO: 2612425 - RNA, 19 nt, Homo sapiens
  misc_RNA (1)...(19): siRNA sense strand
ggacagaacauguuggaug

SEQ ID NO: 2612426 - RNA, 19 nt, Homo sapiens
  misc_RNA (1)...(19): siRNA sense strand
auggaugauuggccagaaa

SEQ ID NO: 2612427 - RNA, 19 nt, Homo sapiens
  misc_RNA (1)...(19): siRNA sense strand
cgaagagauuuaucagcuu

SEQ ID NO: 2612428 - RNA, 19 nt, Homo sapiens
  misc_RNA (1)...(19): siRNA sense strand
gugcuaugguccuggcuga

SEQ ID NO: 2612429 - RNA, 19 nt, Homo sapiens
  misc_RNA (1)...(19): siRNA sense strand
gagcauggaugauuggcca

SEQ ID NO: 2612430 - RNA, 19 nt, Homo sapiens
  misc_RNA (1)...(19): siRNA sense strand
auucauggcuguuggagca

SEQ ID NO: 2612431 - RNA, 19 nt, Homo sapiens
  misc_RNA (1)...(19): siRNA sense strand
cagauguauuugcagagaa

SEQ ID NO: 2612432 - RNA, 19 nt, Homo sapiens
  misc_RNA (1)...(19): siRNA sense strand
ugaggagauacuugaagaa

SEQ ID NO: 2612433 - RNA, 19 nt, Homo sapiens
  misc_RNA (1)...(19): siRNA sense strand
gcgaagagauuuaucagcu

SEQ ID NO: 2612434 - RNA, 19 nt, Homo sapiens
  misc_RNA (1)...(19): siRNA sense strand
gauaucaacuauuuggcuu

SEQ ID NO: 2612435 - RNA, 19 nt, Homo sapiens
  misc_RNA (1)...(19): siRNA sense strand
gaaauugagucugugggaa

SEQ ID NO: 2612436 - RNA, 19 nt, Homo sapiens
  misc_RNA (1)...(19): siRNA sense strand
ucagcuuaacucagauaaa

SEQ ID NO: 2612437 - RNA, 19 nt, Homo sapiens
  misc_RNA (1)...(19): siRNA sense strand
ccgcggugucauggagaaa

SEQ ID NO: 2612438 - RNA, 19 nt, Homo sapiens
  misc_RNA (1)...(19): siRNA sense strand
ggaagcaccucgaggacag

SEQ ID NO: 2612439 - RNA, 19 nt, Homo sapiens
  misc_RNA (1)...(19): siRNA sense strand
agauguauuugcagagaag

SEQ ID NO: 2612440 - RNA, 19 nt, Homo sapiens
  misc_RNA (1)...(19): siRNA sense strand
gcagagaagacgaaggcag

SEQ ID NO: 2612441 - RNA, 19 nt, Homo sapiens
  misc_RNA (1)...(19): siRNA sense strand
ugaagaagaaguuugcaga

SEQ ID NO: 2612442 - RNA, 19 nt, Homo sapiens
  misc_RNA (1)...(19): siRNA sense strand
cgggaaaauccaaggcuua

SEQ ID NO: 2612443 - RNA, 19 nt, Homo sapiens
  misc_RNA (1)...(19): siRNA sense strand
ggauuuggccagucaggaa

SEQ ID NO: 2612444 - RNA, 19 nt, Homo sapiens
  misc_RNA (1)...(19): siRNA sense strand
ggacagaacauguuggaug

SEQ ID NO: 2612445 - RNA, 19 nt, Homo sapiens
  misc_RNA (1)...(19): siRNA sense strand
gugcuaugguccuggcuga

SEQ ID NO: 2612446 - RNA, 19 nt, Homo sapiens
  misc_RNA (1)...(19): siRNA sense strand
auucauggcuguuggagca

SEQ ID NO: 2612447 - RNA, 19 nt, Homo sapiens
  misc_RNA (1)...(19): siRNA sense strand
gauaucaacuauuuggcuu

SEQ ID NO: 2612448 - RNA, 19 nt, Homo sapiens
  misc_RNA (1)...(19): siRNA sense strand
gaaauugagucugugggaa

SEQ ID NO: 2612449 - RNA, 19 nt, Homo sapiens
  misc_RNA (1)...(19): siRNA sense strand
ccgcggugucauggagaaa

SEQ ID NO: 2612450 - RNA, 19 nt, Homo sapiens
  misc_RNA (1)...(19): siRNA sense strand
ggaagcaccucgaggacag

SEQ ID NO: 2612451 - RNA, 19 nt, Homo sapiens
  misc_RNA (1)...(19): siRNA sense strand
gaacgggacaagaggguca

SEQ ID NO: 2612452 - RNA, 19 nt, Homo sapiens
  misc_RNA (1)...(19): siRNA sense strand
cgguacaaagugagcacau

SEQ ID NO: 2612453 - RNA, 19 nt, Homo sapiens
  misc_RNA (1)...(19): siRNA sense strand
augaagaaccgcagaucca

SEQ ID NO: 2612454 - RNA, 19 nt, Homo sapiens
  misc_RNA (1)...(19): siRNA sense strand
ggagcaacauauaggcaac

SEQ ID NO: 2612455 - RNA, 19 nt, Homo sapiens
  misc_RNA (1)...(19): siRNA sense strand
aggagaaugugauccgaga

SEQ ID NO: 2612456 - RNA, 19 nt, Homo sapiens
  misc_RNA (1)...(19): siRNA sense strand
ccaucacuguggagcaaca

SEQ ID NO: 2612457 - RNA, 19 nt, Homo sapiens
  misc_RNA (1)...(19): siRNA sense strand
acaauaucccugaggagca

SEQ ID NO: 2612458 - RNA, 19 nt, Homo sapiens
  misc_RNA (1)...(19): siRNA sense strand
ggauauucgcaugggccua

SEQ ID NO: 2612459 - RNA, 19 nt, Homo sapiens
  misc_RNA (1)...(19): siRNA sense strand
agacagaugugcugaggcu

SEQ ID NO: 2612460 - RNA, 19 nt, Homo sapiens
  misc_RNA (1)...(19): siRNA sense strand
guccauucaaaccgagaaa

SEQ ID NO: 2612461 - RNA, 19 nt, Homo sapiens
  misc_RNA (1)...(19): siRNA sense strand
cagccugagaagagagucu

SEQ ID NO: 2612462 - RNA, 19 nt, Homo sapiens
  misc_RNA (1)...(19): siRNA sense strand
gaaagaagauugaucgcaa

SEQ ID NO: 2612463 - RNA, 19 nt, Homo sapiens
  misc_RNA (1)...(19): siRNA sense strand
ucgcaaucccagagugaaa

SEQ ID NO: 2612464 - RNA, 19 nt, Homo sapiens
  misc_RNA (1)...(19): siRNA sense strand
aggaggaggaggaggagaa

SEQ ID NO: 2612465 - RNA, 19 nt, Homo sapiens
  misc_RNA (1)...(19): siRNA sense strand
aggaaagagaggaggagga

SEQ ID NO: 2612466 - RNA, 19 nt, Homo sapiens
  misc_RNA (1)...(19): siRNA sense strand
agaaauagaagacaggcaa

SEQ ID NO: 2612467 - RNA, 19 nt, Homo sapiens
  misc_RNA (1)...(19): siRNA sense strand
ucgugaaggauuuggcuaa

SEQ ID NO: 2612468 - RNA, 19 nt, Homo sapiens
  misc_RNA (1)...(19): siRNA sense strand
aggcagaggaggaggaaag

SEQ ID NO: 2612469 - RNA, 19 nt, Homo sapiens
  misc_RNA (1)...(19): siRNA sense strand
cgacgaaaauggagaugau

SEQ ID NO: 2612470 - RNA, 19 nt, Homo sapiens
  misc_RNA (1)...(19): siRNA sense strand
caaaaugcaaagagagcua

SEQ ID NO: 2612471 - RNA, 19 nt, Homo sapiens
  misc_RNA (1)...(19): siRNA sense strand
agaaaauagcacugaagaa

SEQ ID NO: 2612472 - RNA, 19 nt, Homo sapiens
  misc_RNA (1)...(19): siRNA sense strand
aaagagaggaggaggagga

SEQ ID NO: 2612473 - RNA, 19 nt, Homo sapiens
  misc_RNA (1)...(19): siRNA sense strand
aggcaaaagcuaaagagaa

SEQ ID NO: 2612474 - RNA, 19 nt, Homo sapiens
  misc_RNA (1)...(19): siRNA sense strand
agccaauacuugaggacca

SEQ ID NO: 2612475 - RNA, 19 nt, Homo sapiens
  misc_RNA (1)...(19): siRNA sense strand
aggaggaggaggaggcaca

SEQ ID NO: 2612476 - RNA, 19 nt, Homo sapiens
  misc_RNA (1)...(19): siRNA sense strand
ugaaagagaagcugaaaau

SEQ ID NO: 2612477 - RNA, 19 nt, Homo sapiens
  misc_RNA (1)...(19): siRNA sense strand
ugauagaagaccugaaagu

SEQ ID NO: 2612478 - RNA, 19 nt, Homo sapiens
  misc_RNA (1)...(19): siRNA sense strand
cagugaaagagaagcugaa

SEQ ID NO: 2612479 - RNA, 19 nt, Homo sapiens
  misc_RNA (1)...(19): siRNA sense strand
gguugaggccuuugcaaaa

SEQ ID NO: 2612480 - RNA, 19 nt, Homo sapiens
  misc_RNA (1)...(19): siRNA sense strand
agcuaaagagaaagaaaga

SEQ ID NO: 2612481 - RNA, 19 nt, Homo sapiens
  misc_RNA (1)...(19): siRNA sense strand
agagugaaacacagagaga

SEQ ID NO: 2612482 - RNA, 19 nt, Homo sapiens
  misc_RNA (1)...(19): siRNA sense strand
acgaugaggacgacgaaga

SEQ ID NO: 2612483 - RNA, 19 nt, Homo sapiens
  misc_RNA (1)...(19): siRNA sense strand
gguagaugaggcugagaca

SEQ ID NO: 2612484 - RNA, 19 nt, Homo sapiens
  misc_RNA (1)...(19): siRNA sense strand
uggcauucgugcaggaguu

SEQ ID NO: 2612485 - RNA, 19 nt, Homo sapiens
  misc_RNA (1)...(19): siRNA sense strand
ggaaugaaguacagagugg

SEQ ID NO: 2612486 - RNA, 19 nt, Homo sapiens
  misc_RNA (1)...(19): siRNA sense strand
gugaaagagaagcugaaaa

SEQ ID NO: 2612487 - RNA, 19 nt, Homo sapiens
  misc_RNA (1)...(19): siRNA sense strand
aggccagguucgugaaguu

SEQ ID NO: 2612488 - RNA, 19 nt, Homo sapiens
  misc_RNA (1)...(19): siRNA sense strand
aggagaaugccgaugauga

SEQ ID NO: 2612489 - RNA, 19 nt, Homo sapiens
  misc_RNA (1)...(19): siRNA sense strand
auagaagaccugaaaguca

SEQ ID NO: 2612490 - RNA, 19 nt, Homo sapiens
  misc_RNA (1)...(19): siRNA sense strand
aggaugaugcuguaaagaa

SEQ ID NO: 2612491 - RNA, 19 nt, Homo sapiens
  misc_RNA (1)...(19): siRNA sense strand
agugaaacacagagagaag

SEQ ID NO: 2612492 - RNA, 19 nt, Homo sapiens
  misc_RNA (1)...(19): siRNA sense strand
gagaaguucagaagagcca

SEQ ID NO: 2612493 - RNA, 19 nt, Homo sapiens
  misc_RNA (1)...(19): siRNA sense strand
cauucgugcaggaguuaaa

SEQ ID NO: 2612494 - RNA, 19 nt, Homo sapiens
  misc_RNA (1)...(19): siRNA sense strand
agccaaaauuagaagaaga

SEQ ID NO: 2612495 - RNA, 19 nt, Homo sapiens
  misc_RNA (1)...(19): siRNA sense strand
aggaggaggcacagaucau

SEQ ID NO: 2612496 - RNA, 19 nt, Homo sapiens
  misc_RNA (1)...(19): siRNA sense strand
gagacgaggaggauggcga

SEQ ID NO: 2612497 - RNA, 19 nt, Homo sapiens
  misc_RNA (1)...(19): siRNA sense strand
agcugaaaauguugcgaaa

SEQ ID NO: 2612498 - RNA, 19 nt, Homo sapiens
  misc_RNA (1)...(19): siRNA sense strand
aagaaauagaagacaggca

SEQ ID NO: 2612499 - RNA, 19 nt, Homo sapiens
  misc_RNA (1)...(19): siRNA sense strand
aagaaagaacugauuccaa

SEQ ID NO: 2612500 - RNA, 19 nt, Homo sapiens
  misc_RNA (1)...(19): siRNA sense strand
gcuaaagagaaagaaagaa

SEQ ID NO: 2612501 - RNA, 19 nt, Homo sapiens
  misc_RNA (1)...(19): siRNA sense strand
agaucaaaaugcaaagaga

SEQ ID NO: 2612502 - RNA, 19 nt, Homo sapiens
  misc_RNA (1)...(19): siRNA sense strand
aggaggaaagagaggagga

SEQ ID NO: 2612503 - RNA, 19 nt, Homo sapiens
  misc_RNA (1)...(19): siRNA sense strand
gaaaauguugcgaaaggaa

SEQ ID NO: 2612504 - RNA, 19 nt, Homo sapiens
  misc_RNA (1)...(19): siRNA sense strand
cuguaaagaaagaacugau

SEQ ID NO: 2612505 - RNA, 19 nt, Homo sapiens
  misc_RNA (1)...(19): siRNA sense strand
gcacugaagaacaggcucu

SEQ ID NO: 2612506 - RNA, 19 nt, Homo sapiens
  misc_RNA (1)...(19): siRNA sense strand
ccagagugaaacacagaga

SEQ ID NO: 2612507 - RNA, 19 nt, Homo sapiens
  misc_RNA (1)...(19): siRNA sense strand
aguucguaaagaagagcaa

SEQ ID NO: 2612508 - RNA, 19 nt, Homo sapiens
  misc_RNA (1)...(19): siRNA sense strand
caccagaacucuuggagcu

SEQ ID NO: 2612509 - RNA, 19 nt, Homo sapiens
  misc_RNA (1)...(19): siRNA sense strand
agguuaaggaugagcugga

SEQ ID NO: 2612510 - RNA, 19 nt, Homo sapiens
  misc_RNA (1)...(19): siRNA sense strand
ggaggaggugcuagcccua

SEQ ID NO: 2612511 - RNA, 19 nt, Homo sapiens
  misc_RNA (1)...(19): siRNA sense strand
gguucgugaaguucguaaa

SEQ ID NO: 2612512 - RNA, 19 nt, Homo sapiens
  misc_RNA (1)...(19): siRNA sense strand
ccggcaaagcaaagaaauu

SEQ ID NO: 2612513 - RNA, 19 nt, Homo sapiens
  misc_RNA (1)...(19): siRNA sense strand
guuuaugacggguacgaaa

SEQ ID NO: 2612514 - RNA, 19 nt, Homo sapiens
  misc_RNA (1)...(19): siRNA sense strand
cggccugcauggaggaaca

SEQ ID NO: 2612515 - RNA, 19 nt, Homo sapiens
  misc_RNA (1)...(19): siRNA sense strand
caagagaagcugcuggaga

SEQ ID NO: 2612516 - RNA, 19 nt, Homo sapiens
  misc_RNA (1)...(19): siRNA sense strand
agaccauggaugugcggaa

SEQ ID NO: 2612517 - RNA, 19 nt, Homo sapiens
  misc_RNA (1)...(19): siRNA sense strand
gccuacagguggagcgcau

SEQ ID NO: 2612518 - RNA, 19 nt, Homo sapiens
  misc_RNA (1)...(19): siRNA sense strand
gaagauuggugguuggaac

SEQ ID NO: 2612519 - RNA, 19 nt, Homo sapiens
  misc_RNA (1)...(19): siRNA sense strand
ccauuggaguugagugacu

SEQ ID NO: 2612520 - RNA, 19 nt, Homo sapiens
  misc_RNA (1)...(19): siRNA sense strand
caccauuggaguugaguga

SEQ ID NO: 2612521 - RNA, 19 nt, Homo sapiens
  misc_RNA (1)...(19): siRNA sense strand
aguaugacaaagaagggaa

SEQ ID NO: 2612522 - RNA, 19 nt, Homo sapiens
  misc_RNA (1)...(19): siRNA sense strand
ucuggaaccuggugcaaaa

SEQ ID NO: 2612523 - RNA, 19 nt, Homo sapiens
  misc_RNA (1)...(19): siRNA sense strand
cagccaaggagaaagcaga

SEQ ID NO: 2612524 - RNA, 19 nt, Homo sapiens
  misc_RNA (1)...(19): siRNA sense strand
aggagaaagcagaugccau

SEQ ID NO: 2612525 - RNA, 19 nt, Homo sapiens
  misc_RNA (1)...(19): siRNA sense strand
acuuuauccuggagcccaa

SEQ ID NO: 2612526 - RNA, 19 nt, Homo sapiens
  misc_RNA (1)...(19): siRNA sense strand
uugaggaggcccugggaca

SEQ ID NO: 2612527 - RNA, 19 nt, Homo sapiens
  misc_RNA (1)...(19): siRNA sense strand
uguugagugaggugggauu

SEQ ID NO: 2612528 - RNA, 19 nt, Homo sapiens
  misc_RNA (1)...(19): siRNA sense strand
acaaucaauaccaggucaa

SEQ ID NO: 2612529 - RNA, 19 nt, Homo sapiens
  misc_RNA (1)...(19): siRNA sense strand
uggagauacagcuggccaa

SEQ ID NO: 2612530 - RNA, 19 nt, Homo sapiens
  misc_RNA (1)...(19): siRNA sense strand
ugcuggaguuggagauaca

SEQ ID NO: 2612531 - RNA, 19 nt, Homo sapiens
  misc_RNA (1)...(19): siRNA sense strand
gugcaaaagacaaccucaa

SEQ ID NO: 2612532 - RNA, 19 nt, Homo sapiens
  misc_RNA (1)...(19): siRNA sense strand
cuaagaguuccaacagcaa

SEQ ID NO: 2612533 - RNA, 19 nt, Homo sapiens
  misc_RNA (1)...(19): siRNA sense strand
uggagcugcuggaggccaa

SEQ ID NO: 2612534 - RNA, 19 nt, Homo sapiens
  misc_RNA (1)...(19): siRNA sense strand
caguggaagcugcgggcaa

SEQ ID NO: 2612535 - RNA, 19 nt, Homo sapiens
  misc_RNA (1)...(19): siRNA sense strand
acgaagagguugacaccca

SEQ ID NO: 2612536 - RNA, 19 nt, Homo sapiens
  misc_RNA (1)...(19): siRNA sense strand
ggugaagcccguuggcaga

SEQ ID NO: 2612537 - RNA, 19 nt, Homo sapiens
  misc_RNA (1)...(19): siRNA sense strand
ucgaguacaucguggcaca

SEQ ID NO: 2612538 - RNA, 19 nt, Homo sapiens
  misc_RNA (1)...(19): siRNA sense strand
aggaugacgaagagguuga

SEQ ID NO: 2612539 - RNA, 19 nt, Homo sapiens
  misc_RNA (1)...(19): siRNA sense strand
uggauuaugaggagaacga

SEQ ID NO: 2612540 - RNA, 19 nt, Homo sapiens
  misc_RNA (1)...(19): siRNA sense strand
uccagauuguagagaggaa

SEQ ID NO: 2612541 - RNA, 19 nt, Homo sapiens
  misc_RNA (1)...(19): siRNA sense strand
agaccaagccucuggccau

SEQ ID NO: 2612542 - RNA, 19 nt, Homo sapiens
  misc_RNA (1)...(19): siRNA sense strand
gcaacuaucgcaaggggaa

SEQ ID NO: 2612543 - RNA, 19 nt, Homo sapiens
  misc_RNA (1)...(19): siRNA sense strand
aggaguucuucucggcuaa

SEQ ID NO: 2612544 - RNA, 19 nt, Homo sapiens
  misc_RNA (1)...(19): siRNA sense strand
ucguggauuaugaggagaa

SEQ ID NO: 2612545 - RNA, 19 nt, Homo sapiens
  misc_RNA (1)...(19): siRNA sense strand
cagauuguagagaggaaga

SEQ ID NO: 2612546 - RNA, 19 nt, Homo sapiens
  misc_RNA (1)...(19): siRNA sense strand
gcucggaggaugagaagcu

SEQ ID NO: 2612547 - RNA, 19 nt, Homo sapiens
  misc_RNA (1)...(19): siRNA sense strand
acgagcagcuggagcgagu

SEQ ID NO: 2612548 - RNA, 19 nt, Homo sapiens
  misc_RNA (1)...(19): siRNA sense strand
agugccagauggagaccaa

SEQ ID NO: 2612549 - RNA, 19 nt, Homo sapiens
  misc_RNA (1)...(19): siRNA sense strand
caggaguucuucucggcua

SEQ ID NO: 2612550 - RNA, 19 nt, Homo sapiens
  misc_RNA (1)...(19): siRNA sense strand
agaccaacgaggugugcga

SEQ ID NO: 2612551 - RNA, 19 nt, Homo sapiens
  misc_RNA (1)...(19): siRNA sense strand
ucgagguggaugacagcua

SEQ ID NO: 2612552 - RNA, 19 nt, Homo sapiens
  misc_RNA (1)...(19): siRNA sense strand
ccauauuaagcuugagaaa

SEQ ID NO: 2612553 - RNA, 19 nt, Homo sapiens
  misc_RNA (1)...(19): siRNA sense strand
agguaauguuccugguaaa

SEQ ID NO: 2612554 - RNA, 19 nt, Homo sapiens
  misc_RNA (1)...(19): siRNA sense strand
guguagugaaugugggaaa

SEQ ID NO: 2612555 - RNA, 19 nt, Homo sapiens
  misc_RNA (1)...(19): siRNA sense strand
auguaguggaugugggaaa

SEQ ID NO: 2612556 - RNA, 19 nt, Homo sapiens
  misc_RNA (1)...(19): siRNA sense strand
augcagugaaugugggaaa

SEQ ID NO: 2612557 - RNA, 19 nt, Homo sapiens
  misc_RNA (1)...(19): siRNA sense strand
augugaugcuggagaacua

SEQ ID NO: 2612558 - RNA, 19 nt, Homo sapiens
  misc_RNA (1)...(19): siRNA sense strand
gauugaagagagagguaau

SEQ ID NO: 2612559 - RNA, 19 nt, Homo sapiens
  misc_RNA (1)...(19): siRNA sense strand
aggagaagagccauggaua

SEQ ID NO: 2612560 - RNA, 19 nt, Homo sapiens
  misc_RNA (1)...(19): siRNA sense strand
acuuaaugaccaucagaaa

SEQ ID NO: 2612561 - RNA, 19 nt, Homo sapiens
  misc_RNA (1)...(19): siRNA sense strand
auguaaucagugugggaaa

SEQ ID NO: 2612562 - RNA, 19 nt, Homo sapiens
  misc_RNA (1)...(19): siRNA sense strand
gaagauaacuuacagggau

SEQ ID NO: 2612563 - RNA, 19 nt, Homo sapiens
  misc_RNA (1)...(19): siRNA sense strand
gaauguaaugaguguggaa

SEQ ID NO: 2612564 - RNA, 19 nt, Homo sapiens
  misc_RNA (1)...(19): siRNA sense strand
ggagcaaggagaagagcca

SEQ ID NO: 2612565 - RNA, 19 nt, Homo sapiens
  misc_RNA (1)...(19): siRNA sense strand
gaauccaggaagaggaaaa

SEQ ID NO: 2612566 - RNA, 19 nt, Homo sapiens
  misc_RNA (1)...(19): siRNA sense strand
auggauaguagaaggagaa

SEQ ID NO: 2612567 - RNA, 19 nt, Homo sapiens
  misc_RNA (1)...(19): siRNA sense strand
ucagagaauucauaggaga

SEQ ID NO: 2612568 - RNA, 19 nt, Homo sapiens
  misc_RNA (1)...(19): siRNA sense strand
aagcuaugcaagaaugaaa

SEQ ID NO: 2612569 - RNA, 19 nt, Homo sapiens
  misc_RNA (1)...(19): siRNA sense strand
gacccacacaggagagaaa

SEQ ID NO: 2612570 - RNA, 19 nt, Homo sapiens
  misc_RNA (1)...(19): siRNA sense strand
cauggauaguagaaggaga

SEQ ID NO: 2612571 - RNA, 19 nt, Homo sapiens
  misc_RNA (1)...(19): siRNA sense strand
cuggcaaacugaugaccua

SEQ ID NO: 2612572 - RNA, 19 nt, Homo sapiens
  misc_RNA (1)...(19): siRNA sense strand
uugucaugacugugggaaa

SEQ ID NO: 2612573 - RNA, 19 nt, Homo sapiens
  misc_RNA (1)...(19): siRNA sense strand
gggaaaugcuucugccgca

SEQ ID NO: 2612574 - RNA, 19 nt, Homo sapiens
  misc_RNA (1)...(19): siRNA sense strand
ugaugaauguaguggaugu

SEQ ID NO: 2612575 - RNA, 19 nt, Homo sapiens
  misc_RNA (1)...(19): siRNA sense strand
gcaaguuggagcaaggaga

SEQ ID NO: 2612576 - RNA, 19 nt, Homo sapiens
  misc_RNA (1)...(19): siRNA sense strand
gacucacacaggagagaaa

SEQ ID NO: 2612577 - RNA, 19 nt, Homo sapiens
  misc_RNA (1)...(19): siRNA sense strand
cugauugaagagagaggua

SEQ ID NO: 2612578 - RNA, 19 nt, Homo sapiens
  misc_RNA (1)...(19): siRNA sense strand
cagacaucucauauggaaa

SEQ ID NO: 2612579 - RNA, 19 nt, Homo sapiens
  misc_RNA (1)...(19): siRNA sense strand
cccuaugaaugcagugaau

SEQ ID NO: 2612580 - RNA, 19 nt, Homo sapiens
  misc_RNA (1)...(19): siRNA sense strand
gggaagaacuuuuaccaga

SEQ ID NO: 2612581 - RNA, 19 nt, Homo sapiens
  misc_RNA (1)...(19): siRNA sense strand
cccuauaaguggaauggau

SEQ ID NO: 2612582 - RNA, 19 nt, Homo sapiens
  misc_RNA (1)...(19): siRNA sense strand
gggaaaaccuucucgcaga

SEQ ID NO: 2612583 - RNA, 19 nt, Homo sapiens
  misc_RNA (1)...(19): siRNA sense strand
aagaaugaaagcugaugaa

SEQ ID NO: 2612584 - RNA, 19 nt, Homo sapiens
  misc_RNA (1)...(19): siRNA sense strand
uggagaaaccuuuugaaua

SEQ ID NO: 2612585 - RNA, 19 nt, Homo sapiens
  misc_RNA (1)...(19): siRNA sense strand
auguaaugaguguggaaaa

SEQ ID NO: 2612586 - RNA, 19 nt, Homo sapiens
  misc_RNA (1)...(19): siRNA sense strand
gaauguaaucaguguggga

SEQ ID NO: 2612587 - RNA, 19 nt, Homo sapiens
  misc_RNA (1)...(19): siRNA sense strand
ucaacagccaucagagaau

SEQ ID NO: 2612588 - RNA, 19 nt, Homo sapiens
  misc_RNA (1)...(19): siRNA sense strand
agacaucucauauggaaau

SEQ ID NO: 2612589 - RNA, 19 nt, Homo sapiens
  misc_RNA (1)...(19): siRNA sense strand
gugggaaauccuucuguaa

SEQ ID NO: 2612590 - RNA, 19 nt, Homo sapiens
  misc_RNA (1)...(19): siRNA sense strand
auucauaggagaggcaaua

SEQ ID NO: 2612591 - RNA, 19 nt, Homo sapiens
  misc_RNA (1)...(19): siRNA sense strand
uaguagugauggaagcuau

SEQ ID NO: 2612592 - RNA, 19 nt, Homo sapiens
  misc_RNA (1)...(19): siRNA sense strand
ugauggaagcuaugcaaga

SEQ ID NO: 2612593 - RNA, 19 nt, Homo sapiens
  misc_RNA (1)...(19): siRNA sense strand
cccuaugaauguaguuauu

SEQ ID NO: 2612594 - RNA, 19 nt, Homo sapiens
  misc_RNA (1)...(19): siRNA sense strand
ugucaugacugugggaaaa

SEQ ID NO: 2612595 - RNA, 19 nt, Homo sapiens
  misc_RNA (1)...(19): siRNA sense strand
ggauaguagaaggagaauu

SEQ ID NO: 2612596 - RNA, 19 nt, Homo sapiens
  misc_RNA (1)...(19): siRNA sense strand
gacccugauugaagagaga

SEQ ID NO: 2612597 - RNA, 19 nt, Homo sapiens
  misc_RNA (1)...(19): siRNA sense strand
cuggagaacuacagcaauc

SEQ ID NO: 2612598 - RNA, 19 nt, Homo sapiens
  misc_RNA (1)...(19): siRNA sense strand
guuaaucacauggaagaaa

SEQ ID NO: 2612599 - RNA, 19 nt, Homo sapiens
  misc_RNA (1)...(19): siRNA sense strand
auauggaaaugaagcccua

SEQ ID NO: 2612600 - RNA, 19 nt, Homo sapiens
  misc_RNA (1)...(19): siRNA sense strand
cuaugaaugcagugaaugu

SEQ ID NO: 2612601 - RNA, 19 nt, Homo sapiens
  misc_RNA (1)...(19): siRNA sense strand
ugggaaauccuucuguaaa

SEQ ID NO: 2612602 - RNA, 19 nt, Homo sapiens
  misc_RNA (1)...(19): siRNA sense strand
cccuaugaguguacugaau

SEQ ID NO: 2612603 - RNA, 19 nt, Homo sapiens
  misc_RNA (1)...(19): siRNA sense strand
cucugugacucaugugaaa

SEQ ID NO: 2612604 - RNA, 19 nt, Homo sapiens
  misc_RNA (1)...(19): siRNA sense strand
gaauauauugaaugccaga

SEQ ID NO: 2612605 - RNA, 19 nt, Homo sapiens
  misc_RNA (1)...(19): siRNA sense strand
ccguaugaauguaaugagu

SEQ ID NO: 2612606 - RNA, 19 nt, Homo sapiens
  misc_RNA (1)...(19): siRNA sense strand
guguacugaauguggaaaa

SEQ ID NO: 2612607 - RNA, 19 nt, Homo sapiens
  misc_RNA (1)...(19): siRNA sense strand
augaccuaauagagagaau

SEQ ID NO: 2612608 - RNA, 19 nt, Homo sapiens
  misc_RNA (1)...(19): siRNA sense strand
aagauaacuuacagggaug

SEQ ID NO: 2612609 - RNA, 19 nt, Homo sapiens
  misc_RNA (1)...(19): siRNA sense strand
uguaaucagugugggaaau

SEQ ID NO: 2612610 - RNA, 19 nt, Homo sapiens
  misc_RNA (1)...(19): siRNA sense strand
guaaugaaugugggaagaa

SEQ ID NO: 2612611 - RNA, 19 nt, Homo sapiens
  misc_RNA (1)...(19): siRNA sense strand
augcaagaaugaaagcuga

SEQ ID NO: 2612612 - RNA, 19 nt, Homo sapiens
  misc_RNA (1)...(19): siRNA sense strand
ggaaaugcuucugccgcaa

SEQ ID NO: 2612613 - RNA, 19 nt, Homo sapiens
  misc_RNA (1)...(19): siRNA sense strand
aacucauucaggagagaaa

SEQ ID NO: 2612614 - RNA, 19 nt, Homo sapiens
  misc_RNA (1)...(19): siRNA sense strand
uggcugagcaugagagcau

SEQ ID NO: 2612615 - RNA, 19 nt, Homo sapiens
  misc_RNA (1)...(19): siRNA sense strand
ugacaaagaaagugaggac

SEQ ID NO: 2612616 - RNA, 19 nt, Homo sapiens
  misc_RNA (1)...(19): siRNA sense strand
ggacaaagccauugcucuc

SEQ ID NO: 2612617 - RNA, 19 nt, Homo sapiens
  misc_RNA (1)...(19): siRNA sense strand
ggaaacggacccagcguca

SEQ ID NO: 2612618 - RNA, 19 nt, Homo sapiens
  misc_RNA (1)...(19): siRNA sense strand
cugugaagauggggagaaa

SEQ ID NO: 2612619 - RNA, 19 nt, Homo sapiens
  misc_RNA (1)...(19): siRNA sense strand
aggaggugagcgagaagaa

SEQ ID NO: 2612620 - RNA, 19 nt, Homo sapiens
  misc_RNA (1)...(19): siRNA sense strand
gggaagaugaagugagcug

SEQ ID NO: 2612621 - RNA, 19 nt, Homo sapiens
  misc_RNA (1)...(19): siRNA sense strand
guggaggagcugagaagca

SEQ ID NO: 2612622 - RNA, 19 nt, Homo sapiens
  misc_RNA (1)...(19): siRNA sense strand
gaagagaaccagagagugg

SEQ ID NO: 2612623 - RNA, 19 nt, Homo sapiens
  misc_RNA (1)...(19): siRNA sense strand
gcuacagagaacuagggaa

SEQ ID NO: 2612624 - RNA, 19 nt, Homo sapiens
  misc_RNA (1)...(19): siRNA sense strand
ugaagugagcugugagacu

SEQ ID NO: 2612625 - RNA, 19 nt, Homo sapiens
  misc_RNA (1)...(19): siRNA sense strand
gaagaagucauaugcccua

SEQ ID NO: 2612626 - RNA, 19 nt, Homo sapiens
  misc_RNA (1)...(19): siRNA sense strand
ccuagauggaaaagaagaa

SEQ ID NO: 2612627 - RNA, 19 nt, Homo sapiens
  misc_RNA (1)...(19): siRNA sense strand
cagaaaaccccauggcuca

SEQ ID NO: 2612628 - RNA, 19 nt, Homo sapiens
  misc_RNA (1)...(19): siRNA sense strand
acgaaggaggauuuggcua

SEQ ID NO: 2612629 - RNA, 19 nt, Homo sapiens
  misc_RNA (1)...(19): siRNA sense strand
gcuuuagcuucaaggagca

SEQ ID NO: 2612630 - RNA, 19 nt, Homo sapiens
  misc_RNA (1)...(19): siRNA sense strand
acugaggaggugagcgaga

SEQ ID NO: 2612631 - RNA, 19 nt, Homo sapiens
  misc_RNA (1)...(19): siRNA sense strand
ccuaauaaaucgacucauu

SEQ ID NO: 2612632 - RNA, 19 nt, Homo sapiens
  misc_RNA (1)...(19): siRNA sense strand
gugaaauugaggugaugaa

SEQ ID NO: 2612633 - RNA, 19 nt, Homo sapiens
  misc_RNA (1)...(19): siRNA sense strand
agauggacacauugacaaa

SEQ ID NO: 2612634 - RNA, 19 nt, Homo sapiens
  misc_RNA (1)...(19): siRNA sense strand
gugguauaacagacagaaa

SEQ ID NO: 2612635 - RNA, 19 nt, Homo sapiens
  misc_RNA (1)...(19): siRNA sense strand
cgggaaugaaguuucgaaa

SEQ ID NO: 2612636 - RNA, 19 nt, Homo sapiens
  misc_RNA (1)...(19): siRNA sense strand
agguaacagaugugaccaa

SEQ ID NO: 2612637 - RNA, 19 nt, Homo sapiens
  misc_RNA (1)...(19): siRNA sense strand
cuacuagagacucgggaau

SEQ ID NO: 2612638 - RNA, 19 nt, Homo sapiens
  misc_RNA (1)...(19): siRNA sense strand
gggccuccucugagcgaaa

SEQ ID NO: 2612639 - RNA, 19 nt, Homo sapiens
  misc_RNA (1)...(19): siRNA sense strand
ugguauaacagacagaaau

SEQ ID NO: 2612640 - RNA, 19 nt, Homo sapiens
  misc_RNA (1)...(19): siRNA sense strand
aaggcaggauugugguaau

SEQ ID NO: 2612641 - RNA, 19 nt, Homo sapiens
  misc_RNA (1)...(19): siRNA sense strand
gcaaagaacauccuggugu

SEQ ID NO: 2612642 - RNA, 19 nt, Homo sapiens
  misc_RNA (1)...(19): siRNA sense strand
gguucaggugcuacagaau

SEQ ID NO: 2612643 - RNA, 19 nt, Homo sapiens
  misc_RNA (1)...(19): siRNA sense strand
ggaugugacaguucagcau

SEQ ID NO: 2612644 - RNA, 19 nt, Homo sapiens
  misc_RNA (1)...(19): siRNA sense strand
uugacaaagagcuguguau

SEQ ID NO: 2612645 - RNA, 19 nt, Homo sapiens
  misc_RNA (1)...(19): siRNA sense strand
gguaaugccaggagguggu

SEQ ID NO: 2612646 - RNA, 19 nt, Homo sapiens
  misc_RNA (1)...(19): siRNA sense strand
agaugaaagcagagaucaa

SEQ ID NO: 2612647 - RNA, 19 nt, Homo sapiens
  misc_RNA (1)...(19): siRNA sense strand
ugucauaacuauuggcacu

SEQ ID NO: 2612648 - RNA, 19 nt, Homo sapiens
  misc_RNA (1)...(19): siRNA sense strand
caguagagacauuugccaa

SEQ ID NO: 2612649 - RNA, 19 nt, Homo sapiens
  misc_RNA (1)...(19): siRNA sense strand
acauguuggcccugaaauu

SEQ ID NO: 2612650 - RNA, 19 nt, Homo sapiens
  misc_RNA (1)...(19): siRNA sense strand
gcagcuaugugaaaggcau

SEQ ID NO: 2612651 - RNA, 19 nt, Homo sapiens
  misc_RNA (1)...(19): siRNA sense strand
cgacagacauguuggcccu

SEQ ID NO: 2612652 - RNA, 19 nt, Homo sapiens
  misc_RNA (1)...(19): siRNA sense strand
ucuuuuggcuugauggaaa

SEQ ID NO: 2612653 - RNA, 19 nt, Homo sapiens
  misc_RNA (1)...(19): siRNA sense strand
gguuggaauucaugcagca

SEQ ID NO: 2612654 - RNA, 19 nt, Homo sapiens
  misc_RNA (1)...(19): siRNA sense strand
gcuccgugaagcuggacaa

SEQ ID NO: 2612655 - RNA, 19 nt, Homo sapiens
  misc_RNA (1)...(19): siRNA sense strand
ggaacagaugagagauucu

SEQ ID NO: 2612656 - RNA, 19 nt, Homo sapiens
  misc_RNA (1)...(19): siRNA sense strand
gggcuuuauaucugauuga

SEQ ID NO: 2612657 - RNA, 19 nt, Homo sapiens
  misc_RNA (1)...(19): siRNA sense strand
aguagagacauuugccaau

SEQ ID NO: 2612658 - RNA, 19 nt, Homo sapiens
  misc_RNA (1)...(19): siRNA sense strand
gcuuuauaucugauugaga

SEQ ID NO: 2612659 - RNA, 19 nt, Homo sapiens
  misc_RNA (1)...(19): siRNA sense strand
ccguaagauuccuggaguu

SEQ ID NO: 2612660 - RNA, 19 nt, Homo sapiens
  misc_RNA (1)...(19): siRNA sense strand
gauacaacauugaacggau

SEQ ID NO: 2612661 - RNA, 19 nt, Homo sapiens
  misc_RNA (1)...(19): siRNA sense strand
agaaauuggggcagaagua

SEQ ID NO: 2612662 - RNA, 19 nt, Homo sapiens
  misc_RNA (1)...(19): siRNA sense strand
gggcagaaguaucgagugg

SEQ ID NO: 2612663 - RNA, 19 nt, Homo sapiens
  misc_RNA (1)...(19): siRNA sense strand
cucagagaucagaggcuua

SEQ ID NO: 2612664 - RNA, 19 nt, Homo sapiens
  misc_RNA (1)...(19): siRNA sense strand
gggaagcaaaagaaaacaa

SEQ ID NO: 2612665 - RNA, 19 nt, Homo sapiens
  misc_RNA (1)...(19): siRNA sense strand
ggauccaagauuugaacga

SEQ ID NO: 2612666 - RNA, 19 nt, Homo sapiens
  misc_RNA (1)...(19): siRNA sense strand
ugcuuaguacagagaguaa

SEQ ID NO: 2612667 - RNA, 19 nt, Homo sapiens
  misc_RNA (1)...(19): siRNA sense strand
auccaagauuugaacgauu

SEQ ID NO: 2612668 - RNA, 19 nt, Homo sapiens
  misc_RNA (1)...(19): siRNA sense strand
auguauaaccgauugugua

SEQ ID NO: 2612669 - RNA, 19 nt, Homo sapiens
  misc_RNA (1)...(19): siRNA sense strand
ccgauuguguaauggcuga

SEQ ID NO: 2612670 - RNA, 19 nt, Homo sapiens
  misc_RNA (1)...(19): siRNA sense strand
acaaaggaaccuaugcaga

SEQ ID NO: 2612671 - RNA, 19 nt, Homo sapiens
  misc_RNA (1)...(19): siRNA sense strand
aggcuuaaagaaaaggaua

SEQ ID NO: 2612672 - RNA, 19 nt, Homo sapiens
  misc_RNA (1)...(19): siRNA sense strand
aagaaggaucccagcgcau

SEQ ID NO: 2612673 - RNA, 19 nt, Homo sapiens
  misc_RNA (1)...(19): siRNA sense strand
gcagaaguaucgaguggcu

SEQ ID NO: 2612674 - RNA, 19 nt, Homo sapiens
  misc_RNA (1)...(19): siRNA sense strand
aggauauggaugaaagaaa

SEQ ID NO: 2612675 - RNA, 19 nt, Homo sapiens
  misc_RNA (1)...(19): siRNA sense strand
gaucauagcaagagcggau

SEQ ID NO: 2612676 - RNA, 19 nt, Homo sapiens
  misc_RNA (1)...(19): siRNA sense strand
gguaaauacuacauagcca

SEQ ID NO: 2612677 - RNA, 19 nt, Homo sapiens
  misc_RNA (1)...(19): siRNA sense strand
cagagacggcagauggaaa

SEQ ID NO: 2612678 - RNA, 19 nt, Homo sapiens
  misc_RNA (1)...(19): siRNA sense strand
ccaaugugguccugcggua

SEQ ID NO: 2612679 - RNA, 19 nt, Homo sapiens
  misc_RNA (1)...(19): siRNA sense strand
agaaagaaggacaugaaca

SEQ ID NO: 2612680 - RNA, 19 nt, Homo sapiens
  misc_RNA (1)...(19): siRNA sense strand
cugaaagcagccaggaaca

SEQ ID NO: 2612681 - RNA, 19 nt, Homo sapiens
  misc_RNA (1)...(19): siRNA sense strand
agcuaaugguggcagaaau

SEQ ID NO: 2612682 - RNA, 19 nt, Homo sapiens
  misc_RNA (1)...(19): siRNA sense strand
ggcgaaagucauagaccga

SEQ ID NO: 2612683 - RNA, 19 nt, Homo sapiens
  misc_RNA (1)...(19): siRNA sense strand
aauggaagaagguggcgaa

SEQ ID NO: 2612684 - RNA, 19 nt, Homo sapiens
  misc_RNA (1)...(19): siRNA sense strand
aaauacauguccagggucu

SEQ ID NO: 2612685 - RNA, 19 nt, Homo sapiens
  misc_RNA (1)...(19): siRNA sense strand
ucuuauauaacaaggcuga

SEQ ID NO: 2612686 - RNA, 19 nt, Homo sapiens
  misc_RNA (1)...(19): siRNA sense strand
cagcuaaugguggcagaaa

SEQ ID NO: 2612687 - RNA, 19 nt, Homo sapiens
  misc_RNA (1)...(19): siRNA sense strand
uugacaaccagcagugcaa

SEQ ID NO: 2612688 - RNA, 19 nt, Homo sapiens
  misc_RNA (1)...(19): siRNA sense strand
ccuuaaacuauuggagaaa

SEQ ID NO: 2612689 - RNA, 19 nt, Homo sapiens
  misc_RNA (1)...(19): siRNA sense strand
cagaaagcaaggaaggaga

SEQ ID NO: 2612690 - RNA, 19 nt, Homo sapiens
  misc_RNA (1)...(19): siRNA sense strand
gcaaagaauuacaacguac

SEQ ID NO: 2612691 - RNA, 19 nt, Homo sapiens
  misc_RNA (1)...(19): siRNA sense strand
cguaugaaucuaugacauu

SEQ ID NO: 2612692 - RNA, 19 nt, Homo sapiens
  misc_RNA (1)...(19): siRNA sense strand
ccagauuggaacugugaau

SEQ ID NO: 2612693 - RNA, 19 nt, Homo sapiens
  misc_RNA (1)...(19): siRNA sense strand
cugcagauaacuaugacaa

SEQ ID NO: 2612694 - RNA, 19 nt, Homo sapiens
  misc_RNA (1)...(19): siRNA sense strand
augacaggcuaaugcacaa

SEQ ID NO: 2612695 - RNA, 19 nt, Homo sapiens
  misc_RNA (1)...(19): siRNA sense strand
caucagauuucaauggacu

SEQ ID NO: 2612696 - RNA, 19 nt, Homo sapiens
  misc_RNA (1)...(19): siRNA sense strand
ucguaugaaucuaugacau

SEQ ID NO: 2612697 - RNA, 19 nt, Homo sapiens
  misc_RNA (1)...(19): siRNA sense strand
auagcaaggaauauggcaa

SEQ ID NO: 2612698 - RNA, 19 nt, Homo sapiens
  misc_RNA (1)...(19): siRNA sense strand
gccaaguauagcaaggaau

SEQ ID NO: 2612699 - RNA, 19 nt, Homo sapiens
  misc_RNA (1)...(19): siRNA sense strand
ggaacuagauucuggucug

SEQ ID NO: 2612700 - RNA, 19 nt, Homo sapiens
  misc_RNA (1)...(19): siRNA sense strand
acgaaguggccgagguaau

SEQ ID NO: 2612701 - RNA, 19 nt, Homo sapiens
  misc_RNA (1)...(19): siRNA sense strand
uugcauugccuguggaaca

SEQ ID NO: 2612702 - RNA, 19 nt, Homo sapiens
  misc_RNA (1)...(19): siRNA sense strand
gcgccaggucacagaguca

SEQ ID NO: 2612703 - RNA, 19 nt, Homo sapiens
  misc_RNA (1)...(19): siRNA sense strand
agaucgaggaagacaguga

SEQ ID NO: 2612704 - RNA, 19 nt, Homo sapiens
  misc_RNA (1)...(19): siRNA sense strand
ccaacgagaaggucgccaa

SEQ ID NO: 2612705 - RNA, 19 nt, Homo sapiens
  misc_RNA (1)...(19): siRNA sense strand
gagaaggucgccaaggaga

SEQ ID NO: 2612706 - RNA, 19 nt, Homo sapiens
  misc_RNA (1)...(19): siRNA sense strand
ggaaagggaagaucgagga

SEQ ID NO: 2612707 - RNA, 19 nt, Homo sapiens
  misc_RNA (1)...(19): siRNA sense strand
aggugcugaugaugauuaa

SEQ ID NO: 2612708 - RNA, 19 nt, Homo sapiens
  misc_RNA (1)...(19): siRNA sense strand
gguuaaucgccuuagaaau

SEQ ID NO: 2612709 - RNA, 19 nt, Homo sapiens
  misc_RNA (1)...(19): siRNA sense strand
uugugaagaacgagaucaa

SEQ ID NO: 2612710 - RNA, 19 nt, Homo sapiens
  misc_RNA (1)...(19): siRNA sense strand
agguuaaucgccuuagaaa

SEQ ID NO: 2612711 - RNA, 19 nt, Homo sapiens
  misc_RNA (1)...(19): siRNA sense strand
cuuagaaauggcaaagauu

SEQ ID NO: 2612712 - RNA, 19 nt, Homo sapiens
  misc_RNA (1)...(19): siRNA sense strand
acuacuaccugcaggcaca

SEQ ID NO: 2612713 - RNA, 19 nt, Homo sapiens
  misc_RNA (1)...(19): siRNA sense strand
ccaacaagcugguggccug

SEQ ID NO: 2612714 - RNA, 19 nt, Homo sapiens
  misc_RNA (1)...(19): siRNA sense strand
ccugcuauguggaggagga

SEQ ID NO: 2612715 - RNA, 19 nt, Homo sapiens
  misc_RNA (1)...(19): siRNA sense strand
gcauuggaaacccgagcaa

SEQ ID NO: 2612716 - RNA, 19 nt, Homo sapiens
  misc_RNA (1)...(19): siRNA sense strand
gcacaauuauuucacgcuu

SEQ ID NO: 2612717 - RNA, 19 nt, Homo sapiens
  misc_RNA (1)...(19): siRNA sense strand
ugguggaccgggagaauga

SEQ ID NO: 2612718 - RNA, 19 nt, Homo sapiens
  misc_RNA (1)...(19): siRNA sense strand
ucgccuuagaaauggcaaa

SEQ ID NO: 2612719 - RNA, 19 nt, Homo sapiens
  misc_RNA (1)...(19): siRNA sense strand
agaccauacccuaggaaau

SEQ ID NO: 2612720 - RNA, 19 nt, Homo sapiens
  misc_RNA (1)...(19): siRNA sense strand
uggcugaaggcgagaggaa

SEQ ID NO: 2612721 - RNA, 19 nt, Homo sapiens
  misc_RNA (1)...(19): siRNA sense strand
ccucaauggcugaaggcga

SEQ ID NO: 2612722 - RNA, 19 nt, Homo sapiens
  misc_RNA (1)...(19): siRNA sense strand
uuguauugcacgaggaaga

SEQ ID NO: 2612723 - RNA, 19 nt, Homo sapiens
  misc_RNA (1)...(19): siRNA sense strand
aggccagcauaaaggacua

SEQ ID NO: 2612724 - RNA, 19 nt, Homo sapiens
  misc_RNA (1)...(19): siRNA sense strand
gcucaugaaugucugccaa

SEQ ID NO: 2612725 - RNA, 19 nt, Homo sapiens
  misc_RNA (1)...(19): siRNA sense strand
aggaagacagcccuggaaa

SEQ ID NO: 2612726 - RNA, 19 nt, Homo sapiens
  misc_RNA (1)...(19): siRNA sense strand
ugacauuuguauugcacga

SEQ ID NO: 2612727 - RNA, 19 nt, Homo sapiens
  misc_RNA (1)...(19): siRNA sense strand
auaaaggacuauaaggauc

SEQ ID NO: 2612728 - RNA, 19 nt, Homo sapiens
  misc_RNA (1)...(19): siRNA sense strand
aaguuugaggccagcauaa

SEQ ID NO: 2612729 - RNA, 19 nt, Homo sapiens
  misc_RNA (1)...(19): siRNA sense strand
aagcagaaaugaauccaca

SEQ ID NO: 2612730 - RNA, 19 nt, Homo sapiens
  misc_RNA (1)...(19): siRNA sense strand
ccuuccagcuguugagcca

SEQ ID NO: 2612731 - RNA, 19 nt, Homo sapiens
  misc_RNA (1)...(19): siRNA sense strand
cagcuggaacagauagaca

SEQ ID NO: 2612732 - RNA, 19 nt, Homo sapiens
  misc_RNA (1)...(19): siRNA sense strand
cuucagagagcaaaauuaa

SEQ ID NO: 2612733 - RNA, 19 nt, Homo sapiens
  misc_RNA (1)...(19): siRNA sense strand
aggugaaacucuaugacau

SEQ ID NO: 2612734 - RNA, 19 nt, Homo sapiens
  misc_RNA (1)...(19): siRNA sense strand
ccaagaagcaguagagggu

SEQ ID NO: 2612735 - RNA, 19 nt, Homo sapiens
  misc_RNA (1)...(19): siRNA sense strand
ugucagaaggguugggcau

SEQ ID NO: 2612736 - RNA, 19 nt, Homo sapiens
  misc_RNA (1)...(19): siRNA sense strand
acucuaugacauugagcaa

SEQ ID NO: 2612737 - RNA, 19 nt, Homo sapiens
  misc_RNA (1)...(19): siRNA sense strand
gaugaagaagauugggaca

SEQ ID NO: 2612738 - RNA, 19 nt, Homo sapiens
  misc_RNA (1)...(19): siRNA sense strand
ggcuaguggaggaaggaau

SEQ ID NO: 2612739 - RNA, 19 nt, Homo sapiens
  misc_RNA (1)...(19): siRNA sense strand
auguuaagcuacugcgaca

SEQ ID NO: 2612740 - RNA, 19 nt, Homo sapiens
  misc_RNA (1)...(19): siRNA sense strand
gcauaaaacauguccuaca

SEQ ID NO: 2612741 - RNA, 19 nt, Homo sapiens
  misc_RNA (1)...(19): siRNA sense strand
caguggagucauugggcga

SEQ ID NO: 2612742 - RNA, 19 nt, Homo sapiens
  misc_RNA (1)...(19): siRNA sense strand
cugaugacccggagcacuu

SEQ ID NO: 2612743 - RNA, 19 nt, Homo sapiens
  misc_RNA (1)...(19): siRNA sense strand
cugagaagguuaaccagga

SEQ ID NO: 2612744 - RNA, 19 nt, Homo sapiens
  misc_RNA (1)...(19): siRNA sense strand
uaaggaacgcccuggaaaa

SEQ ID NO: 2612745 - RNA, 19 nt, Homo sapiens
  misc_RNA (1)...(19): siRNA sense strand
acagauacagcgaaggcau

SEQ ID NO: 2612746 - RNA, 19 nt, Homo sapiens
  misc_RNA (1)...(19): siRNA sense strand
gcucugugucugugggaaa

SEQ ID NO: 2612747 - RNA, 19 nt, Homo sapiens
  misc_RNA (1)...(19): siRNA sense strand
uggugaaguuggagauaga

SEQ ID NO: 2612748 - RNA, 19 nt, Homo sapiens
  misc_RNA (1)...(19): siRNA sense strand
cugacagaacuaaggaaua

SEQ ID NO: 2612749 - RNA, 19 nt, Homo sapiens
  misc_RNA (1)...(19): siRNA sense strand
ugugaaugcucaagauaau

SEQ ID NO: 2612750 - RNA, 19 nt, Homo sapiens
  misc_RNA (1)...(19): siRNA sense strand
gaaaguauauaaaggacga

SEQ ID NO: 2612751 - RNA, 19 nt, Homo sapiens
  misc_RNA (1)...(19): siRNA sense strand
uggcaagagcauugaccua

SEQ ID NO: 2612752 - RNA, 19 nt, Homo sapiens
  misc_RNA (1)...(19): siRNA sense strand
uguaaauguaaguggugaa

SEQ ID NO: 2612753 - RNA, 19 nt, Homo sapiens
  misc_RNA (1)...(19): siRNA sense strand
augaagacaacaugacaaa

SEQ ID NO: 2612754 - RNA, 19 nt, Homo sapiens
  misc_RNA (1)...(19): siRNA sense strand
ccgaaauaguagcagcuuu

SEQ ID NO: 2612755 - RNA, 19 nt, Homo sapiens
  misc_RNA (1)...(19): siRNA sense strand
ggaaauucucacuggcgaa

SEQ ID NO: 2612756 - RNA, 19 nt, Homo sapiens
  misc_RNA (1)...(19): siRNA sense strand
auauacagcagguuggaua

SEQ ID NO: 2612757 - RNA, 19 nt, Homo sapiens
  misc_RNA (1)...(19): siRNA sense strand
cauccaaauaucaggaaca

SEQ ID NO: 2612758 - RNA, 19 nt, Homo sapiens
  misc_RNA (1)...(19): siRNA sense strand
auauaaaggacgaugcaga

SEQ ID NO: 2612759 - RNA, 19 nt, Homo sapiens
  misc_RNA (1)...(19): siRNA sense strand
aggacgaugcagaaauaaa

SEQ ID NO: 2612760 - RNA, 19 nt, Homo sapiens
  misc_RNA (1)...(19): siRNA sense strand
gcagcaaagcagaugugaa

SEQ ID NO: 2612761 - RNA, 19 nt, Homo sapiens
  misc_RNA (1)...(19): siRNA sense strand
auacacacccauugacaaa

SEQ ID NO: 2612762 - RNA, 19 nt, Homo sapiens
  misc_RNA (1)...(19): siRNA sense strand
cggcagcagacauggcuua

SEQ ID NO: 2612763 - RNA, 19 nt, Homo sapiens
  misc_RNA (1)...(19): siRNA sense strand
uuaaauuaccgcacugaaa

SEQ ID NO: 2612764 - RNA, 19 nt, Homo sapiens
  misc_RNA (1)...(19): siRNA sense strand
uagcaguuuacaaggauaa

SEQ ID NO: 2612765 - RNA, 19 nt, Homo sapiens
  misc_RNA (1)...(19): siRNA sense strand
ugacaaaagagaaggcaga

SEQ ID NO: 2612766 - RNA, 19 nt, Homo sapiens
  misc_RNA (1)...(19): siRNA sense strand
gaugaagacaacaugacaa

SEQ ID NO: 2612767 - RNA, 19 nt, Homo sapiens
  misc_RNA (1)...(19): siRNA sense strand
ccaagucagauguggauau

SEQ ID NO: 2612768 - RNA, 19 nt, Homo sapiens
  misc_RNA (1)...(19): siRNA sense strand
acugaugaauggaagaaaa

SEQ ID NO: 2612769 - RNA, 19 nt, Homo sapiens
  misc_RNA (1)...(19): siRNA sense strand
ccaccuagcaucugcaaaa

SEQ ID NO: 2612770 - RNA, 19 nt, Homo sapiens
  misc_RNA (1)...(19): siRNA sense strand
caaauaucaggaacagaaa

SEQ ID NO: 2612771 - RNA, 19 nt, Homo sapiens
  misc_RNA (1)...(19): siRNA sense strand
ccaaacuuguacugaugaa

SEQ ID NO: 2612772 - RNA, 19 nt, Homo sapiens
  misc_RNA (1)...(19): siRNA sense strand
guugcaacauggagcuaau

SEQ ID NO: 2612773 - RNA, 19 nt, Homo sapiens
  misc_RNA (1)...(19): siRNA sense strand
cugaaguugucaugaaguu

SEQ ID NO: 2612774 - RNA, 19 nt, Homo sapiens
  misc_RNA (1)...(19): siRNA sense strand
auuaagaagucguuucgaa

SEQ ID NO: 2612775 - RNA, 19 nt, Homo sapiens
  misc_RNA (1)...(19): siRNA sense strand
ugucaauauucaagaugca

SEQ ID NO: 2612776 - RNA, 19 nt, Homo sapiens
  misc_RNA (1)...(19): siRNA sense strand
aggaaaacaucuucaguga

SEQ ID NO: 2612777 - RNA, 19 nt, Homo sapiens
  misc_RNA (1)...(19): siRNA sense strand
ggauaauggagcugauaug

SEQ ID NO: 2612778 - RNA, 19 nt, Homo sapiens
  misc_RNA (1)...(19): siRNA sense strand
gagucauguggcagcauua

SEQ ID NO: 2612779 - RNA, 19 nt, Homo sapiens
  misc_RNA (1)...(19): siRNA sense strand
ugucuuuggaggagaugaa

SEQ ID NO: 2612780 - RNA, 19 nt, Homo sapiens
  misc_RNA (1)...(19): siRNA sense strand
augugaaugcucaagauaa

SEQ ID NO: 2612781 - RNA, 19 nt, Homo sapiens
  misc_RNA (1)...(19): siRNA sense strand
guuaaguaucugcugcaaa

SEQ ID NO: 2612782 - RNA, 19 nt, Homo sapiens
  misc_RNA (1)...(19): siRNA sense strand
uugaaguugccaaggaaau

SEQ ID NO: 2612783 - RNA, 19 nt, Homo sapiens
  misc_RNA (1)...(19): siRNA sense strand
ccuaagagcuggauugccu

SEQ ID NO: 2612784 - RNA, 19 nt, Homo sapiens
  misc_RNA (1)...(19): siRNA sense strand
ggacgaugcagaaauaaaa

SEQ ID NO: 2612785 - RNA, 19 nt, Homo sapiens
  misc_RNA (1)...(19): siRNA sense strand
cauuuguggaggcaagaaa

SEQ ID NO: 2612786 - RNA, 19 nt, Homo sapiens
  misc_RNA (1)...(19): siRNA sense strand
ucaagauaaugaagaccau

SEQ ID NO: 2612787 - RNA, 19 nt, Homo sapiens
  misc_RNA (1)...(19): siRNA sense strand
cgaauuggaauaugcucua

SEQ ID NO: 2612788 - RNA, 19 nt, Homo sapiens
  misc_RNA (1)...(19): siRNA sense strand
aggcaagaaaucacauauu

SEQ ID NO: 2612789 - RNA, 19 nt, Homo sapiens
  misc_RNA (1)...(19): siRNA sense strand
guaccuauggcaagagcau

SEQ ID NO: 2612790 - RNA, 19 nt, Homo sapiens
  misc_RNA (1)...(19): siRNA sense strand
caaaagagaaggcagauau

SEQ ID NO: 2612791 - RNA, 19 nt, Homo sapiens
  misc_RNA (1)...(19): siRNA sense strand
gggaaauucucacuggcga

SEQ ID NO: 2612792 - RNA, 19 nt, Homo sapiens
  misc_RNA (1)...(19): siRNA sense strand
gcauuauaagagaccacaa

SEQ ID NO: 2612793 - RNA, 19 nt, Homo sapiens
  misc_RNA (1)...(19): siRNA sense strand
cuacaauggcaaauuugaa

SEQ ID NO: 2612794 - RNA, 19 nt, Homo sapiens
  misc_RNA (1)...(19): siRNA sense strand
gggaagauuaaaagcauga

SEQ ID NO: 2612795 - RNA, 19 nt, Homo sapiens
  misc_RNA (1)...(19): siRNA sense strand
gggaaaguauauaaaggac

SEQ ID NO: 2612796 - RNA, 19 nt, Homo sapiens
  misc_RNA (1)...(19): siRNA sense strand
gauuauuggcucagguucu

SEQ ID NO: 2612797 - RNA, 19 nt, Homo sapiens
  misc_RNA (1)...(19): siRNA sense strand
ccaaaggcauggaguaccu

SEQ ID NO: 2612798 - RNA, 19 nt, Homo sapiens
  misc_RNA (1)...(19): siRNA sense strand
ggaugaagacaacaugaca

SEQ ID NO: 2612799 - RNA, 19 nt, Homo sapiens
  misc_RNA (1)...(19): siRNA sense strand
uuucugaaguugucaugaa

SEQ ID NO: 2612800 - RNA, 19 nt, Homo sapiens
  misc_RNA (1)...(19): siRNA sense strand
caucuucagcucucagaaa

SEQ ID NO: 2612801 - RNA, 19 nt, Homo sapiens
  misc_RNA (1)...(19): siRNA sense strand
auacgaggguggaacgcau

SEQ ID NO: 2612802 - RNA, 19 nt, Homo sapiens
  misc_RNA (1)...(19): siRNA sense strand
ccuuacaccuggcaugcua

SEQ ID NO: 2612803 - RNA, 19 nt, Homo sapiens
  misc_RNA (1)...(19): siRNA sense strand
gcauggaguaccuucacaa

SEQ ID NO: 2612804 - RNA, 19 nt, Homo sapiens
  misc_RNA (1)...(19): siRNA sense strand
cugcagaggcugaggaaau

SEQ ID NO: 2612805 - RNA, 19 nt, Homo sapiens
  misc_RNA (1)...(19): siRNA sense strand
aagaagagucagaaggaaa

SEQ ID NO: 2612806 - RNA, 19 nt, Homo sapiens
  misc_RNA (1)...(19): siRNA sense strand
cguaaagaagggagaggua

SEQ ID NO: 2612807 - RNA, 19 nt, Homo sapiens
  misc_RNA (1)...(19): siRNA sense strand
cggcggagcugcuggaaaa

SEQ ID NO: 2612808 - RNA, 19 nt, Homo sapiens
  misc_RNA (1)...(19): siRNA sense strand
gaaagaggcugaaacgcaa

SEQ ID NO: 2612809 - RNA, 19 nt, Homo sapiens
  misc_RNA (1)...(19): siRNA sense strand
augcaagagucaagcagaa

SEQ ID NO: 2612810 - RNA, 19 nt, Homo sapiens
  misc_RNA (1)...(19): siRNA sense strand
gugaacgugcuguggaaua

SEQ ID NO: 2612811 - RNA, 19 nt, Homo sapiens
  misc_RNA (1)...(19): siRNA sense strand
augaugaaauggaaggaau

SEQ ID NO: 2612812 - RNA, 19 nt, Homo sapiens
  misc_RNA (1)...(19): siRNA sense strand
cagcauugcaguugaccua

SEQ ID NO: 2612813 - RNA, 19 nt, Homo sapiens
  misc_RNA (1)...(19): siRNA sense strand
cugacaaggaacugagaga

SEQ ID NO: 2612814 - RNA, 19 nt, Homo sapiens
  misc_RNA (1)...(19): siRNA sense strand
ugaugaaauggaaggaauu

SEQ ID NO: 2612815 - RNA, 19 nt, Homo sapiens
  misc_RNA (1)...(19): siRNA sense strand
cugaggaaauauuagagaa

SEQ ID NO: 2612816 - RNA, 19 nt, Homo sapiens
  misc_RNA (1)...(19): siRNA sense strand
aaagaaggguguuuggaga

SEQ ID NO: 2612817 - RNA, 19 nt, Homo sapiens
  misc_RNA (1)...(19): siRNA sense strand
aggaaauauuagagaacac

SEQ ID NO: 2612818 - RNA, 19 nt, Homo sapiens
  misc_RNA (1)...(19): siRNA sense strand
ugguaaagaagccgaaaga

SEQ ID NO: 2612819 - RNA, 19 nt, Homo sapiens
  misc_RNA (1)...(19): siRNA sense strand
ggcugaaacgcaaagguua

SEQ ID NO: 2612820 - RNA, 19 nt, Homo sapiens
  misc_RNA (1)...(19): siRNA sense strand
ccgaaagagccucgauuca

SEQ ID NO: 2612821 - RNA, 19 nt, Homo sapiens
  misc_RNA (1)...(19): siRNA sense strand
cugugaacgugcuguggaa

SEQ ID NO: 2612822 - RNA, 19 nt, Homo sapiens
  misc_RNA (1)...(19): siRNA sense strand
aggcauucauaguaguaau

SEQ ID NO: 2612823 - RNA, 19 nt, Homo sapiens
  misc_RNA (1)...(19): siRNA sense strand
gaauauaugugaaugcagu

SEQ ID NO: 2612824 - RNA, 19 nt, Homo sapiens
  misc_RNA (1)...(19): siRNA sense strand
ugaaagaggcugaaacgca

SEQ ID NO: 2612825 - RNA, 19 nt, Homo sapiens
  misc_RNA (1)...(19): siRNA sense strand
uaucugaaguuuugggaau

SEQ ID NO: 2612826 - RNA, 19 nt, Homo sapiens
  misc_RNA (1)...(19): siRNA sense strand
agaagagucagaaggaaaa

SEQ ID NO: 2612827 - RNA, 19 nt, Homo sapiens
  misc_RNA (1)...(19): siRNA sense strand
guaaagaagccgaaagagc

SEQ ID NO: 2612828 - RNA, 19 nt, Homo sapiens
  misc_RNA (1)...(19): siRNA sense strand
gauacguaaagaagggaga

SEQ ID NO: 2612829 - RNA, 19 nt, Homo sapiens
  misc_RNA (1)...(19): siRNA sense strand
cuugaaacucuuaagaaca

SEQ ID NO: 2612830 - RNA, 19 nt, Homo sapiens
  misc_RNA (1)...(19): siRNA sense strand
gcuguguguucuugacaau

SEQ ID NO: 2612831 - RNA, 19 nt, Homo sapiens
  misc_RNA (1)...(19): siRNA sense strand
acuuggaaaccuuugauua

SEQ ID NO: 2612832 - RNA, 19 nt, Homo sapiens
  misc_RNA (1)...(19): siRNA sense strand
guguagugcuggacuggau

SEQ ID NO: 2612833 - RNA, 19 nt, Homo sapiens
  misc_RNA (1)...(19): siRNA sense strand
ugacgaaugggaagagcuu

SEQ ID NO: 2612834 - RNA, 19 nt, Homo sapiens
  misc_RNA (1)...(19): siRNA sense strand
acgcauuuauggagaauuc

SEQ ID NO: 2612835 - RNA, 19 nt, Homo sapiens
  misc_RNA (1)...(19): siRNA sense strand
ccuugugguagcaggagaa

SEQ ID NO: 2612836 - RNA, 19 nt, Homo sapiens
  misc_RNA (1)...(19): siRNA sense strand
gggaagagcuuucuagcag

SEQ ID NO: 2612837 - RNA, 19 nt, Homo sapiens
  misc_RNA (1)...(19): siRNA sense strand
guguuuggagauuguguua

SEQ ID NO: 2612838 - RNA, 19 nt, Homo sapiens
  misc_RNA (1)...(19): siRNA sense strand
acauggugacuaaggauau

SEQ ID NO: 2612839 - RNA, 19 nt, Homo sapiens
  misc_RNA (1)...(19): siRNA sense strand
cguccuugccaaagaagau

SEQ ID NO: 2612840 - RNA, 19 nt, Homo sapiens
  misc_RNA (1)...(19): siRNA sense strand
acuugaaacucuuaagaac

SEQ ID NO: 2612841 - RNA, 19 nt, Homo sapiens
  misc_RNA (1)...(19): siRNA sense strand
ugccaaagaagaugguaca

SEQ ID NO: 2612842 - RNA, 19 nt, Homo sapiens
  misc_RNA (1)...(19): siRNA sense strand
uaaagaagggagagguaac

SEQ ID NO: 2612843 - RNA, 19 nt, Homo sapiens
  misc_RNA (1)...(19): siRNA sense strand
ggacauuauuccaugcaag

SEQ ID NO: 2612844 - RNA, 19 nt, Homo sapiens
  misc_RNA (1)...(19): siRNA sense strand
ugaggaaauauuagagaac

SEQ ID NO: 2612845 - RNA, 19 nt, Homo sapiens
  misc_RNA (1)...(19): siRNA sense strand
gugacgcauuuauggagaa

SEQ ID NO: 2612846 - RNA, 19 nt, Homo sapiens
  misc_RNA (1)...(19): siRNA sense strand
agaagaugguacacuugaa

SEQ ID NO: 2612847 - RNA, 19 nt, Homo sapiens
  misc_RNA (1)...(19): siRNA sense strand
cuguggaauauaugugaau

SEQ ID NO: 2612848 - RNA, 19 nt, Homo sapiens
  misc_RNA (1)...(19): siRNA sense strand
ggaauggaugcuggugaaa

SEQ ID NO: 2612849 - RNA, 19 nt, Homo sapiens
  misc_RNA (1)...(19): siRNA sense strand
uguucuugacaaugugaaa

SEQ ID NO: 2612850 - RNA, 19 nt, Homo sapiens
  misc_RNA (1)...(19): siRNA sense strand
cagaaaucauaaaugccuu

SEQ ID NO: 2612851 - RNA, 19 nt, Homo sapiens
  misc_RNA (1)...(19): siRNA sense strand
gugaugaaagugacgcauu

SEQ ID NO: 2612852 - RNA, 19 nt, Homo sapiens
  misc_RNA (1)...(19): siRNA sense strand
cauugaacaugcuggaauc

SEQ ID NO: 2612853 - RNA, 19 nt, Homo sapiens
  misc_RNA (1)...(19): siRNA sense strand
agucaagcagaaaucauaa

SEQ ID NO: 2612854 - RNA, 19 nt, Homo sapiens
  misc_RNA (1)...(19): siRNA sense strand
caaggaacugagagagacu

SEQ ID NO: 2612855 - RNA, 19 nt, Homo sapiens
  misc_RNA (1)...(19): siRNA sense strand
gacauggugacuaaggaua

SEQ ID NO: 2612856 - RNA, 19 nt, Homo sapiens
  misc_RNA (1)...(19): siRNA sense strand
aggaacugagagagacuau

SEQ ID NO: 2612857 - RNA, 19 nt, Homo sapiens
  misc_RNA (1)...(19): siRNA sense strand
cugcagaggcugaggaaau

SEQ ID NO: 2612858 - RNA, 19 nt, Homo sapiens
  misc_RNA (1)...(19): siRNA sense strand
aagaagagucagaaggaaa

SEQ ID NO: 2612859 - RNA, 19 nt, Homo sapiens
  misc_RNA (1)...(19): siRNA sense strand
cguaaagaagggagaggua

SEQ ID NO: 2612860 - RNA, 19 nt, Homo sapiens
  misc_RNA (1)...(19): siRNA sense strand
cggcggagcugcuggaaaa

SEQ ID NO: 2612861 - RNA, 19 nt, Homo sapiens
  misc_RNA (1)...(19): siRNA sense strand
gaaagaggcugaaacgcaa

SEQ ID NO: 2612862 - RNA, 19 nt, Homo sapiens
  misc_RNA (1)...(19): siRNA sense strand
augcaagagucaagcagaa

SEQ ID NO: 2612863 - RNA, 19 nt, Homo sapiens
  misc_RNA (1)...(19): siRNA sense strand
gugaacgugcuguggaaua

SEQ ID NO: 2612864 - RNA, 19 nt, Homo sapiens
  misc_RNA (1)...(19): siRNA sense strand
augaugaaauggaaggaau

SEQ ID NO: 2612865 - RNA, 19 nt, Homo sapiens
  misc_RNA (1)...(19): siRNA sense strand
cagcauugcaguugaccua

SEQ ID NO: 2612866 - RNA, 19 nt, Homo sapiens
  misc_RNA (1)...(19): siRNA sense strand
cugacaaggaacugagaga

SEQ ID NO: 2612867 - RNA, 19 nt, Homo sapiens
  misc_RNA (1)...(19): siRNA sense strand
ugaugaaauggaaggaauu

SEQ ID NO: 2612868 - RNA, 19 nt, Homo sapiens
  misc_RNA (1)...(19): siRNA sense strand
cugaggaaauauuagagaa

SEQ ID NO: 2612869 - RNA, 19 nt, Homo sapiens
  misc_RNA (1)...(19): siRNA sense strand
aaagaaggguguuuggaga

SEQ ID NO: 2612870 - RNA, 19 nt, Homo sapiens
  misc_RNA (1)...(19): siRNA sense strand
aggaaauauuagagaacac

SEQ ID NO: 2612871 - RNA, 19 nt, Homo sapiens
  misc_RNA (1)...(19): siRNA sense strand
ugguaaagaagccgaaaga

SEQ ID NO: 2612872 - RNA, 19 nt, Homo sapiens
  misc_RNA (1)...(19): siRNA sense strand
ggcugaaacgcaaagguua

SEQ ID NO: 2612873 - RNA, 19 nt, Homo sapiens
  misc_RNA (1)...(19): siRNA sense strand
ccgaaagagccucgauuca

SEQ ID NO: 2612874 - RNA, 19 nt, Homo sapiens
  misc_RNA (1)...(19): siRNA sense strand
cugugaacgugcuguggaa

SEQ ID NO: 2612875 - RNA, 19 nt, Homo sapiens
  misc_RNA (1)...(19): siRNA sense strand
aggcauucauaguaguaau

SEQ ID NO: 2612876 - RNA, 19 nt, Homo sapiens
  misc_RNA (1)...(19): siRNA sense strand
gaauauaugugaaugcagu

SEQ ID NO: 2612877 - RNA, 19 nt, Homo sapiens
  misc_RNA (1)...(19): siRNA sense strand
ugaaagaggcugaaacgca

SEQ ID NO: 2612878 - RNA, 19 nt, Homo sapiens
  misc_RNA (1)...(19): siRNA sense strand
uaucugaaguuuugggaau

SEQ ID NO: 2612879 - RNA, 19 nt, Homo sapiens
  misc_RNA (1)...(19): siRNA sense strand
agaagagucagaaggaaaa

SEQ ID NO: 2612880 - RNA, 19 nt, Homo sapiens
  misc_RNA (1)...(19): siRNA sense strand
guaaagaagccgaaagagc

SEQ ID NO: 2612881 - RNA, 19 nt, Homo sapiens
  misc_RNA (1)...(19): siRNA sense strand
gauacguaaagaagggaga

SEQ ID NO: 2612882 - RNA, 19 nt, Homo sapiens
  misc_RNA (1)...(19): siRNA sense strand
cuugaaacucuuaagaaca

SEQ ID NO: 2612883 - RNA, 19 nt, Homo sapiens
  misc_RNA (1)...(19): siRNA sense strand
gcuguguguucuugacaau

SEQ ID NO: 2612884 - RNA, 19 nt, Homo sapiens
  misc_RNA (1)...(19): siRNA sense strand
acuuggaaaccuuugauua

SEQ ID NO: 2612885 - RNA, 19 nt, Homo sapiens
  misc_RNA (1)...(19): siRNA sense strand
guguagugcuggacuggau

SEQ ID NO: 2612886 - RNA, 19 nt, Homo sapiens
  misc_RNA (1)...(19): siRNA sense strand
ugacgaaugggaagagcuu

SEQ ID NO: 2612887 - RNA, 19 nt, Homo sapiens
  misc_RNA (1)...(19): siRNA sense strand
acgcauuuauggagaauuc

SEQ ID NO: 2612888 - RNA, 19 nt, Homo sapiens
  misc_RNA (1)...(19): siRNA sense strand
ccuugugguagcaggagaa

SEQ ID NO: 2612889 - RNA, 19 nt, Homo sapiens
  misc_RNA (1)...(19): siRNA sense strand
gggaagagcuuucuagcag

SEQ ID NO: 2612890 - RNA, 19 nt, Homo sapiens
  misc_RNA (1)...(19): siRNA sense strand
guguuuggagauuguguua

SEQ ID NO: 2612891 - RNA, 19 nt, Homo sapiens
  misc_RNA (1)...(19): siRNA sense strand
cguccuugccaaagaagau

SEQ ID NO: 2612892 - RNA, 19 nt, Homo sapiens
  misc_RNA (1)...(19): siRNA sense strand
acuugaaacucuuaagaac

SEQ ID NO: 2612893 - RNA, 19 nt, Homo sapiens
  misc_RNA (1)...(19): siRNA sense strand
acauggugacuaaggauau

SEQ ID NO: 2612894 - RNA, 19 nt, Homo sapiens
  misc_RNA (1)...(19): siRNA sense strand
ugccaaagaagaugguaca

SEQ ID NO: 2612895 - RNA, 19 nt, Homo sapiens
  misc_RNA (1)...(19): siRNA sense strand
uaaagaagggagagguaac

SEQ ID NO: 2612896 - RNA, 19 nt, Homo sapiens
  misc_RNA (1)...(19): siRNA sense strand
ggacauuauuccaugcaag

SEQ ID NO: 2612897 - RNA, 19 nt, Homo sapiens
  misc_RNA (1)...(19): siRNA sense strand
ugaggaaauauuagagaac

SEQ ID NO: 2612898 - RNA, 19 nt, Homo sapiens
  misc_RNA (1)...(19): siRNA sense strand
gugacgcauuuauggagaa

SEQ ID NO: 2612899 - RNA, 19 nt, Homo sapiens
  misc_RNA (1)...(19): siRNA sense strand
agaagaugguacacuugaa

SEQ ID NO: 2612900 - RNA, 19 nt, Homo sapiens
  misc_RNA (1)...(19): siRNA sense strand
cuguggaauauaugugaau

SEQ ID NO: 2612901 - RNA, 19 nt, Homo sapiens
  misc_RNA (1)...(19): siRNA sense strand
ggaauggaugcuggugaaa

SEQ ID NO: 2612902 - RNA, 19 nt, Homo sapiens
  misc_RNA (1)...(19): siRNA sense strand
uguucuugacaaugugaaa

SEQ ID NO: 2612903 - RNA, 19 nt, Homo sapiens
  misc_RNA (1)...(19): siRNA sense strand
cagaaaucauaaaugccuu

SEQ ID NO: 2612904 - RNA, 19 nt, Homo sapiens
  misc_RNA (1)...(19): siRNA sense strand
gugaugaaagugacgcauu

SEQ ID NO: 2612905 - RNA, 19 nt, Homo sapiens
  misc_RNA (1)...(19): siRNA sense strand
cauugaacaugcuggaauc

SEQ ID NO: 2612906 - RNA, 19 nt, Homo sapiens
  misc_RNA (1)...(19): siRNA sense strand
agucaagcagaaaucauaa

SEQ ID NO: 2612907 - RNA, 19 nt, Homo sapiens
  misc_RNA (1)...(19): siRNA sense strand
caaggaacugagagagacu

SEQ ID NO: 2612908 - RNA, 19 nt, Homo sapiens
  misc_RNA (1)...(19): siRNA sense strand
aggaacugagagagacuau

SEQ ID NO: 2612909 - RNA, 19 nt, Homo sapiens
  misc_RNA (1)...(19): siRNA sense strand
gacauggugacuaaggaua

SEQ ID NO: 2612910 - RNA, 19 nt, Homo sapiens
  misc_RNA (1)...(19): siRNA sense strand
ggcugaagacucugggcaa

SEQ ID NO: 2612911 - RNA, 19 nt, Homo sapiens
  misc_RNA (1)...(19): siRNA sense strand
acggauucaucaacaggaa

SEQ ID NO: 2612912 - RNA, 19 nt, Homo sapiens
  misc_RNA (1)...(19): siRNA sense strand
ccuuaaaugagaagagugu

SEQ ID NO: 2612913 - RNA, 19 nt, Homo sapiens
  misc_RNA (1)...(19): siRNA sense strand
cagaaagaacuguuggcuu

SEQ ID NO: 2612914 - RNA, 19 nt, Homo sapiens
  misc_RNA (1)...(19): siRNA sense strand
cauguuuacuggugaaaau

SEQ ID NO: 2612915 - RNA, 19 nt, Homo sapiens
  misc_RNA (1)...(19): siRNA sense strand
acauguaacaagaauccaa

SEQ ID NO: 2612916 - RNA, 19 nt, Homo sapiens
  misc_RNA (1)...(19): siRNA sense strand
cgucaaugcagaaacgacu

SEQ ID NO: 2612917 - RNA, 19 nt, Homo sapiens
  misc_RNA (1)...(19): siRNA sense strand
gauacaaacuauaugggaa

SEQ ID NO: 2612918 - RNA, 19 nt, Homo sapiens
  misc_RNA (1)...(19): siRNA sense strand
ugucuaagaaagagagcuu

SEQ ID NO: 2612919 - RNA, 19 nt, Homo sapiens
  misc_RNA (1)...(19): siRNA sense strand
ugugaagagugaugagcau

SEQ ID NO: 2612920 - RNA, 19 nt, Homo sapiens
  misc_RNA (1)...(19): siRNA sense strand
caauagaauuugucccaga

SEQ ID NO: 2612921 - RNA, 19 nt, Homo sapiens
  misc_RNA (1)...(19): siRNA sense strand
aagacaaaacugagggcaa

SEQ ID NO: 2612922 - RNA, 19 nt, Homo sapiens
  misc_RNA (1)...(19): siRNA sense strand
ggggagaggcagcugaaaa

SEQ ID NO: 2612923 - RNA, 19 nt, Homo sapiens
  misc_RNA (1)...(19): siRNA sense strand
caugagaaggaccaggaaa

SEQ ID NO: 2612924 - RNA, 19 nt, Homo sapiens
  misc_RNA (1)...(19): siRNA sense strand
uguacaagcccuuugggaa

SEQ ID NO: 2612925 - RNA, 19 nt, Homo sapiens
  misc_RNA (1)...(19): siRNA sense strand
gcaaagagcaaacagcuga

SEQ ID NO: 2612926 - RNA, 19 nt, Homo sapiens
  misc_RNA (1)...(19): siRNA sense strand
gcuuaaugaaacagaaauc

SEQ ID NO: 2612927 - RNA, 19 nt, Homo sapiens
  misc_RNA (1)...(19): siRNA sense strand
uggugauagaguuuggaaa

SEQ ID NO: 2612928 - RNA, 19 nt, Homo sapiens
  misc_RNA (1)...(19): siRNA sense strand
guacaagcccuuugggaag

SEQ ID NO: 2612929 - RNA, 19 nt, Homo sapiens
  misc_RNA (1)...(19): siRNA sense strand
gaaggaagcagcugggacu

SEQ ID NO: 2612930 - RNA, 19 nt, Homo sapiens
  misc_RNA (1)...(19): siRNA sense strand
gaacaaaggugaucccaug

SEQ ID NO: 2612931 - RNA, 19 nt, Homo sapiens
  misc_RNA (1)...(19): siRNA sense strand
cccaauaaggagauagcau

SEQ ID NO: 2612932 - RNA, 19 nt, Homo sapiens
  misc_RNA (1)...(19): siRNA sense strand
agacacugcaugagaagga

SEQ ID NO: 2612933 - RNA, 19 nt, Homo sapiens
  misc_RNA (1)...(19): siRNA sense strand
ucucagggaauuagggcuu

SEQ ID NO: 2612934 - RNA, 19 nt, Homo sapiens
  misc_RNA (1)...(19): siRNA sense strand
agaauuugucccagaagau

SEQ ID NO: 2612935 - RNA, 19 nt, Homo sapiens
  misc_RNA (1)...(19): siRNA sense strand
ucucauaucaugugcuaca

SEQ ID NO: 2612936 - RNA, 19 nt, Homo sapiens
  misc_RNA (1)...(19): siRNA sense strand
cagcuacaucaguggguga

SEQ ID NO: 2612937 - RNA, 19 nt, Homo sapiens
  misc_RNA (1)...(19): siRNA sense strand
aaacagaaggggagaggca

SEQ ID NO: 2612938 - RNA, 19 nt, Homo sapiens
  misc_RNA (1)...(19): siRNA sense strand
ccgaaugaugacuggacga

SEQ ID NO: 2612939 - RNA, 19 nt, Homo sapiens
  misc_RNA (1)...(19): siRNA sense strand
agaaauuagugguagcuag

SEQ ID NO: 2612940 - RNA, 19 nt, Homo sapiens
  misc_RNA (1)...(19): siRNA sense strand
augagaaggaccaggaaac

SEQ ID NO: 2612941 - RNA, 19 nt, Homo sapiens
  misc_RNA (1)...(19): siRNA sense strand
aaagaagaacaaaggugau

SEQ ID NO: 2612942 - RNA, 19 nt, Homo sapiens
  misc_RNA (1)...(19): siRNA sense strand
gcaucuaguaaauggauac

SEQ ID NO: 2612943 - RNA, 19 nt, Homo sapiens
  misc_RNA (1)...(19): siRNA sense strand
aggguaaacagcuguguga

SEQ ID NO: 2612944 - RNA, 19 nt, Homo sapiens
  misc_RNA (1)...(19): siRNA sense strand
gcugguggaaggaggguau

SEQ ID NO: 2612945 - RNA, 19 nt, Homo sapiens
  misc_RNA (1)...(19): siRNA sense strand
guaugaugcaggugccaga

SEQ ID NO: 2612946 - RNA, 19 nt, Homo sapiens
  misc_RNA (1)...(19): siRNA sense strand
cugccuacucagagcucua

SEQ ID NO: 2612947 - RNA, 19 nt, Homo sapiens
  misc_RNA (1)...(19): siRNA sense strand
ugugcagccuccugggaau

SEQ ID NO: 2612948 - RNA, 19 nt, Homo sapiens
  misc_RNA (1)...(19): siRNA sense strand
gauugaaagugaagaguau

SEQ ID NO: 2612949 - RNA, 19 nt, Homo sapiens
  misc_RNA (1)...(19): siRNA sense strand
agaagaagaugaaggagaa

SEQ ID NO: 2612950 - RNA, 19 nt, Homo sapiens
  misc_RNA (1)...(19): siRNA sense strand
cagaggaaauagagcauua

SEQ ID NO: 2612951 - RNA, 19 nt, Homo sapiens
  misc_RNA (1)...(19): siRNA sense strand
gacuagagcuggagaagaa

SEQ ID NO: 2612952 - RNA, 19 nt, Homo sapiens
  misc_RNA (1)...(19): siRNA sense strand
ugaagaauuuacugggaaa

SEQ ID NO: 2612953 - RNA, 19 nt, Homo sapiens
  misc_RNA (1)...(19): siRNA sense strand
gagaagaagaugaaggaga

SEQ ID NO: 2612954 - RNA, 19 nt, Homo sapiens
  misc_RNA (1)...(19): siRNA sense strand
acauaaacaccgagcuaaa

SEQ ID NO: 2612955 - RNA, 19 nt, Homo sapiens
  misc_RNA (1)...(19): siRNA sense strand
ccacaaagcuucaugacau

SEQ ID NO: 2612956 - RNA, 19 nt, Homo sapiens
  misc_RNA (1)...(19): siRNA sense strand
gaacauaaacaccgagcua

SEQ ID NO: 2612957 - RNA, 19 nt, Homo sapiens
  misc_RNA (1)...(19): siRNA sense strand
gacaagaacuacugaaauu

SEQ ID NO: 2612958 - RNA, 19 nt, Homo sapiens
  misc_RNA (1)...(19): siRNA sense strand
augaagaucuagagaaaca

SEQ ID NO: 2612959 - RNA, 19 nt, Homo sapiens
  misc_RNA (1)...(19): siRNA sense strand
gaaaauuggcagaggcuaa

SEQ ID NO: 2612960 - RNA, 19 nt, Homo sapiens
  misc_RNA (1)...(19): siRNA sense strand
aaucagagcuaccaagaaa

SEQ ID NO: 2612961 - RNA, 19 nt, Homo sapiens
  misc_RNA (1)...(19): siRNA sense strand
caagaagagacaagaacua

SEQ ID NO: 2612962 - RNA, 19 nt, Homo sapiens
  misc_RNA (1)...(19): siRNA sense strand
ugacugaaauggagcgauu

SEQ ID NO: 2612963 - RNA, 19 nt, Homo sapiens
  misc_RNA (1)...(19): siRNA sense strand
ugaaagaacuccagcagau

SEQ ID NO: 2612964 - RNA, 19 nt, Homo sapiens
  misc_RNA (1)...(19): siRNA sense strand
caucaauuaccgaggagaa

SEQ ID NO: 2612965 - RNA, 19 nt, Homo sapiens
  misc_RNA (1)...(19): siRNA sense strand
gcacagaccuggaggcucu

SEQ ID NO: 2612966 - RNA, 19 nt, Homo sapiens
  misc_RNA (1)...(19): siRNA sense strand
gagacaagaacuacugaaa

SEQ ID NO: 2612967 - RNA, 19 nt, Homo sapiens
  misc_RNA (1)...(19): siRNA sense strand
agaccagagcagaggaaau

SEQ ID NO: 2612968 - RNA, 19 nt, Homo sapiens
  misc_RNA (1)...(19): siRNA sense strand
uuacuaagguucaggauga

SEQ ID NO: 2612969 - RNA, 19 nt, Homo sapiens
  misc_RNA (1)...(19): siRNA sense strand
gaacuuuaucagaggaaga

SEQ ID NO: 2612970 - RNA, 19 nt, Homo sapiens
  misc_RNA (1)...(19): siRNA sense strand
uaucagaggaagauugaaa

SEQ ID NO: 2612971 - RNA, 19 nt, Homo sapiens
  misc_RNA (1)...(19): siRNA sense strand
ucuucaucguugugagaaa

SEQ ID NO: 2612972 - RNA, 19 nt, Homo sapiens
  misc_RNA (1)...(19): siRNA sense strand
gggcagugguggaagaagu

SEQ ID NO: 2612973 - RNA, 19 nt, Homo sapiens
  misc_RNA (1)...(19): siRNA sense strand
aagaauagugagcaggaaa

SEQ ID NO: 2612974 - RNA, 19 nt, Homo sapiens
  misc_RNA (1)...(19): siRNA sense strand
agaggaagauugaaaguga

SEQ ID NO: 2612975 - RNA, 19 nt, Homo sapiens
  misc_RNA (1)...(19): siRNA sense strand
uacauuaccuggugaaaua

SEQ ID NO: 2612976 - RNA, 19 nt, Homo sapiens
  misc_RNA (1)...(19): siRNA sense strand
cugcagaugaccaguauaa

SEQ ID NO: 2612977 - RNA, 19 nt, Homo sapiens
  misc_RNA (1)...(19): siRNA sense strand
cuuuagaacugaagccauu

SEQ ID NO: 2612978 - RNA, 19 nt, Homo sapiens
  misc_RNA (1)...(19): siRNA sense strand
gacaagaacaggauggaau

SEQ ID NO: 2612979 - RNA, 19 nt, Homo sapiens
  misc_RNA (1)...(19): siRNA sense strand
gcagaugauggcagauuua

SEQ ID NO: 2612980 - RNA, 19 nt, Homo sapiens
  misc_RNA (1)...(19): siRNA sense strand
cguaaagagaugacuagaa

SEQ ID NO: 2612981 - RNA, 19 nt, Homo sapiens
  misc_RNA (1)...(19): siRNA sense strand
gcucaagaagcuaaggauu

SEQ ID NO: 2612982 - RNA, 19 nt, Homo sapiens
  misc_RNA (1)...(19): siRNA sense strand
cugcagaacuccuggucau

SEQ ID NO: 2612983 - RNA, 19 nt, Homo sapiens
  misc_RNA (1)...(19): siRNA sense strand
augugaaacugcugaagua

SEQ ID NO: 2612984 - RNA, 19 nt, Homo sapiens
  misc_RNA (1)...(19): siRNA sense strand
guuuggagugugagauuaa

SEQ ID NO: 2612985 - RNA, 19 nt, Homo sapiens
  misc_RNA (1)...(19): siRNA sense strand
gcucaagaagagacaagaa

SEQ ID NO: 2612986 - RNA, 19 nt, Homo sapiens
  misc_RNA (1)...(19): siRNA sense strand
gaaagaggauauggugaua

SEQ ID NO: 2612987 - RNA, 19 nt, Homo sapiens
  misc_RNA (1)...(19): siRNA sense strand
ggaggaagucagcggucaa

SEQ ID NO: 2612988 - RNA, 19 nt, Homo sapiens
  misc_RNA (1)...(19): siRNA sense strand
agaugaaggagaagaggau

SEQ ID NO: 2612989 - RNA, 19 nt, Homo sapiens
  misc_RNA (1)...(19): siRNA sense strand
gcucagaagaggcacgcaa

SEQ ID NO: 2612990 - RNA, 19 nt, Homo sapiens
  misc_RNA (1)...(19): siRNA sense strand
guuuaagguuguugcauca

SEQ ID NO: 2612991 - RNA, 19 nt, Homo sapiens
  misc_RNA (1)...(19): siRNA sense strand
ugacugaggaggacagcaa

SEQ ID NO: 2612992 - RNA, 19 nt, Homo sapiens
  misc_RNA (1)...(19): siRNA sense strand
gaauaguuguucugaggau

SEQ ID NO: 2612993 - RNA, 19 nt, Homo sapiens
  misc_RNA (1)...(19): siRNA sense strand
agaaagaggauauggugau

SEQ ID NO: 2612994 - RNA, 19 nt, Homo sapiens
  misc_RNA (1)...(19): siRNA sense strand
agacagaggcaaccacaaa

SEQ ID NO: 2612995 - RNA, 19 nt, Homo sapiens
  misc_RNA (1)...(19): siRNA sense strand
cugcaagacauguuaacua

SEQ ID NO: 2612996 - RNA, 19 nt, Homo sapiens
  misc_RNA (1)...(19): siRNA sense strand
aagcaguacaagaggauga

SEQ ID NO: 2612997 - RNA, 19 nt, Homo sapiens
  misc_RNA (1)...(19): siRNA sense strand
gaggaagauugaaagugaa

SEQ ID NO: 2612998 - RNA, 19 nt, Homo sapiens
  misc_RNA (1)...(19): siRNA sense strand
ucaggaaaguaauguacaa

SEQ ID NO: 2612999 - RNA, 19 nt, Homo sapiens
  misc_RNA (1)...(19): siRNA sense strand
aggaaagcgucuacagcau

SEQ ID NO: 2613000 - RNA, 19 nt, Homo sapiens
  misc_RNA (1)...(19): siRNA sense strand
ccacaugaauauucuguuu

SEQ ID NO: 2613001 - RNA, 19 nt, Homo sapiens
  misc_RNA (1)...(19): siRNA sense strand
cugcagagggugaggagga

SEQ ID NO: 2613002 - RNA, 19 nt, Homo sapiens
  misc_RNA (1)...(19): siRNA sense strand
gaacuaaucaagaugguca

SEQ ID NO: 2613003 - RNA, 19 nt, Homo sapiens
  misc_RNA (1)...(19): siRNA sense strand
ccguauuauaagcagguua

SEQ ID NO: 2613004 - RNA, 19 nt, Homo sapiens
  misc_RNA (1)...(19): siRNA sense strand
ugguguggcuaaugagcua

SEQ ID NO: 2613005 - RNA, 19 nt, Homo sapiens
  misc_RNA (1)...(19): siRNA sense strand
ccaaugaagaucuagagaa

SEQ ID NO: 2613006 - RNA, 19 nt, Homo sapiens
  misc_RNA (1)...(19): siRNA sense strand
ugaaauagacauugacagu

SEQ ID NO: 2613007 - RNA, 19 nt, Homo sapiens
  misc_RNA (1)...(19): siRNA sense strand
ucuuuuagcaauagggaaa

SEQ ID NO: 2613008 - RNA, 19 nt, Homo sapiens
  misc_RNA (1)...(19): siRNA sense strand
gcugauggccacagguuau

SEQ ID NO: 2613009 - RNA, 19 nt, Homo sapiens
  misc_RNA (1)...(19): siRNA sense strand
cugaagaaguuuaagguug

SEQ ID NO: 2613010 - RNA, 19 nt, Homo sapiens
  misc_RNA (1)...(19): siRNA sense strand
cagaaagaggauaugguga

SEQ ID NO: 2613011 - RNA, 19 nt, Homo sapiens
  misc_RNA (1)...(19): siRNA sense strand
gcagaaacucuagaggaaa

SEQ ID NO: 2613012 - RNA, 19 nt, Homo sapiens
  misc_RNA (1)...(19): siRNA sense strand
auugagaagccaaggaaaa

SEQ ID NO: 2613013 - RNA, 19 nt, Homo sapiens
  misc_RNA (1)...(19): siRNA sense strand
cugcagagggugugaagga

SEQ ID NO: 2613014 - RNA, 19 nt, Homo sapiens
  misc_RNA (1)...(19): siRNA sense strand
augccaagcugcuggugaa

SEQ ID NO: 2613015 - RNA, 19 nt, Homo sapiens
  misc_RNA (1)...(19): siRNA sense strand
uaucagaggcaguggagga

SEQ ID NO: 2613016 - RNA, 19 nt, Homo sapiens
  misc_RNA (1)...(19): siRNA sense strand
gaccagagcagaggaaaua

SEQ ID NO: 2613017 - RNA, 19 nt, Homo sapiens
  misc_RNA (1)...(19): siRNA sense strand
aggauauggugauaagaca

SEQ ID NO: 2613018 - RNA, 19 nt, Homo sapiens
  misc_RNA (1)...(19): siRNA sense strand
agggaaaggagcagaugau

SEQ ID NO: 2613019 - RNA, 19 nt, Homo sapiens
  misc_RNA (1)...(19): siRNA sense strand
cugcagugcuuguucagaa

SEQ ID NO: 2613020 - RNA, 19 nt, Homo sapiens
  misc_RNA (1)...(19): siRNA sense strand
aguacaagaggaugaagua

SEQ ID NO: 2613021 - RNA, 19 nt, Homo sapiens
  misc_RNA (1)...(19): siRNA sense strand
cagaaguauugcugagaac

SEQ ID NO: 2613022 - RNA, 19 nt, Homo sapiens
  misc_RNA (1)...(19): siRNA sense strand
uggagaacaaggaaggauu

SEQ ID NO: 2613023 - RNA, 19 nt, Homo sapiens
  misc_RNA (1)...(19): siRNA sense strand
gauguuaagugucaaguuu

SEQ ID NO: 2613024 - RNA, 19 nt, Homo sapiens
  misc_RNA (1)...(19): siRNA sense strand
cguuguagacggaaguuau

SEQ ID NO: 2613025 - RNA, 19 nt, Homo sapiens
  misc_RNA (1)...(19): siRNA sense strand
acuauagccuccagaucua

SEQ ID NO: 2613026 - RNA, 19 nt, Homo sapiens
  misc_RNA (1)...(19): siRNA sense strand
gagaguucuuucaggauca

SEQ ID NO: 2613027 - RNA, 19 nt, Homo sapiens
  misc_RNA (1)...(19): siRNA sense strand
aagccauaguggagagaaa

SEQ ID NO: 2613028 - RNA, 19 nt, Homo sapiens
  misc_RNA (1)...(19): siRNA sense strand
auguagagaaugugggaaa

SEQ ID NO: 2613029 - RNA, 19 nt, Homo sapiens
  misc_RNA (1)...(19): siRNA sense strand
augcagugaaugugggaaa

SEQ ID NO: 2613030 - RNA, 19 nt, Homo sapiens
  misc_RNA (1)...(19): siRNA sense strand
uguuauuggaggauggaaa

SEQ ID NO: 2613031 - RNA, 19 nt, Homo sapiens
  misc_RNA (1)...(19): siRNA sense strand
ucuaagaauucauacgcaa

SEQ ID NO: 2613032 - RNA, 19 nt, Homo sapiens
  misc_RNA (1)...(19): siRNA sense strand
ugggaaucaagaugggaaa

SEQ ID NO: 2613033 - RNA, 19 nt, Homo sapiens
  misc_RNA (1)...(19): siRNA sense strand
gaauauacagaaugcgaca

SEQ ID NO: 2613034 - RNA, 19 nt, Homo sapiens
  misc_RNA (1)...(19): siRNA sense strand
gagcaaaucucuuacccuu

SEQ ID NO: 2613035 - RNA, 19 nt, Homo sapiens
  misc_RNA (1)...(19): siRNA sense strand
cagacuuguaauagagaga

SEQ ID NO: 2613036 - RNA, 19 nt, Homo sapiens
  misc_RNA (1)...(19): siRNA sense strand
ccuuacacgacaucagaua

SEQ ID NO: 2613037 - RNA, 19 nt, Homo sapiens
  misc_RNA (1)...(19): siRNA sense strand
caaccaguaacaauggaaa

SEQ ID NO: 2613038 - RNA, 19 nt, Homo sapiens
  misc_RNA (1)...(19): siRNA sense strand
ccguaugaauguaugaacu

SEQ ID NO: 2613039 - RNA, 19 nt, Homo sapiens
  misc_RNA (1)...(19): siRNA sense strand
ucucauucaccaucagaaa

SEQ ID NO: 2613040 - RNA, 19 nt, Homo sapiens
  misc_RNA (1)...(19): siRNA sense strand
aagccauacuggagagaag

SEQ ID NO: 2613041 - RNA, 19 nt, Homo sapiens
  misc_RNA (1)...(19): siRNA sense strand
aguuuagaaaugcaggaaa

SEQ ID NO: 2613042 - RNA, 19 nt, Homo sapiens
  misc_RNA (1)...(19): siRNA sense strand
agagaauaaaugguggaaa

SEQ ID NO: 2613043 - RNA, 19 nt, Homo sapiens
  misc_RNA (1)...(19): siRNA sense strand
agaauucauacgcaagaaa

SEQ ID NO: 2613044 - RNA, 19 nt, Homo sapiens
  misc_RNA (1)...(19): siRNA sense strand
cagccuucaaccagagcaa

SEQ ID NO: 2613045 - RNA, 19 nt, Homo sapiens
  misc_RNA (1)...(19): siRNA sense strand
ucucaugaagagugggcau

SEQ ID NO: 2613046 - RNA, 19 nt, Homo sapiens
  misc_RNA (1)...(19): siRNA sense strand
gggaaggccuuuagccaug

SEQ ID NO: 2613047 - RNA, 19 nt, Homo sapiens
  misc_RNA (1)...(19): siRNA sense strand
cacucacacgggagagaaa

SEQ ID NO: 2613048 - RNA, 19 nt, Homo sapiens
  misc_RNA (1)...(19): siRNA sense strand
agagaaugugggaaagcuu

SEQ ID NO: 2613049 - RNA, 19 nt, Homo sapiens
  misc_RNA (1)...(19): siRNA sense strand
aucuauacaugcagugaau

SEQ ID NO: 2613050 - RNA, 19 nt, Homo sapiens
  misc_RNA (1)...(19): siRNA sense strand
cccuaugaaugucgugaau

SEQ ID NO: 2613051 - RNA, 19 nt, Homo sapiens
  misc_RNA (1)...(19): siRNA sense strand
agaauaaaugguggaaaga

SEQ ID NO: 2613052 - RNA, 19 nt, Homo sapiens
  misc_RNA (1)...(19): siRNA sense strand
ggagaauucauacaggaga

SEQ ID NO: 2613053 - RNA, 19 nt, Homo sapiens
  misc_RNA (1)...(19): siRNA sense strand
auacaggagagaagcccua

SEQ ID NO: 2613054 - RNA, 19 nt, Homo sapiens
  misc_RNA (1)...(19): siRNA sense strand
cgugaaugugggaagacuu

SEQ ID NO: 2613055 - RNA, 19 nt, Homo sapiens
  misc_RNA (1)...(19): siRNA sense strand
ugaucauguuauuggagga

SEQ ID NO: 2613056 - RNA, 19 nt, Homo sapiens
  misc_RNA (1)...(19): siRNA sense strand
uggaauauacagaaugcga

SEQ ID NO: 2613057 - RNA, 19 nt, Homo sapiens
  misc_RNA (1)...(19): siRNA sense strand
aggaugugaugguccagaa

SEQ ID NO: 2613058 - RNA, 19 nt, Homo sapiens
  misc_RNA (1)...(19): siRNA sense strand
gggacuuauacaaggaugu

SEQ ID NO: 2613059 - RNA, 19 nt, Homo sapiens
  misc_RNA (1)...(19): siRNA sense strand
aagccauaguggagagaaa

SEQ ID NO: 2613060 - RNA, 19 nt, Homo sapiens
  misc_RNA (1)...(19): siRNA sense strand
auguagagaaugugggaaa

SEQ ID NO: 2613061 - RNA, 19 nt, Homo sapiens
  misc_RNA (1)...(19): siRNA sense strand
augcagugaaugugggaaa

SEQ ID NO: 2613062 - RNA, 19 nt, Homo sapiens
  misc_RNA (1)...(19): siRNA sense strand
uguuauuggaggauggaaa

SEQ ID NO: 2613063 - RNA, 19 nt, Homo sapiens
  misc_RNA (1)...(19): siRNA sense strand
ucuaagaauucauacgcaa

SEQ ID NO: 2613064 - RNA, 19 nt, Homo sapiens
  misc_RNA (1)...(19): siRNA sense strand
ugggaaucaagaugggaaa

SEQ ID NO: 2613065 - RNA, 19 nt, Homo sapiens
  misc_RNA (1)...(19): siRNA sense strand
gaauauacagaaugcgaca

SEQ ID NO: 2613066 - RNA, 19 nt, Homo sapiens
  misc_RNA (1)...(19): siRNA sense strand
gagcaaaucucuuacccuu

SEQ ID NO: 2613067 - RNA, 19 nt, Homo sapiens
  misc_RNA (1)...(19): siRNA sense strand
cagacuuguaauagagaga

SEQ ID NO: 2613068 - RNA, 19 nt, Homo sapiens
  misc_RNA (1)...(19): siRNA sense strand
ccuuacacgacaucagaua

SEQ ID NO: 2613069 - RNA, 19 nt, Homo sapiens
  misc_RNA (1)...(19): siRNA sense strand
ccguaugaauguaugaacu

SEQ ID NO: 2613070 - RNA, 19 nt, Homo sapiens
  misc_RNA (1)...(19): siRNA sense strand
ucucauucaccaucagaaa

SEQ ID NO: 2613071 - RNA, 19 nt, Homo sapiens
  misc_RNA (1)...(19): siRNA sense strand
aagccauacuggagagaag

SEQ ID NO: 2613072 - RNA, 19 nt, Homo sapiens
  misc_RNA (1)...(19): siRNA sense strand
agagaauaaaugguggaaa

SEQ ID NO: 2613073 - RNA, 19 nt, Homo sapiens
  misc_RNA (1)...(19): siRNA sense strand
agaauucauacgcaagaaa

SEQ ID NO: 2613074 - RNA, 19 nt, Homo sapiens
  misc_RNA (1)...(19): siRNA sense strand
cagccuucaaccagagcaa

SEQ ID NO: 2613075 - RNA, 19 nt, Homo sapiens
  misc_RNA (1)...(19): siRNA sense strand
gggaaggccuuuagccaug

SEQ ID NO: 2613076 - RNA, 19 nt, Homo sapiens
  misc_RNA (1)...(19): siRNA sense strand
cacucacacgggagagaaa

SEQ ID NO: 2613077 - RNA, 19 nt, Homo sapiens
  misc_RNA (1)...(19): siRNA sense strand
agagaaugugggaaagcuu

SEQ ID NO: 2613078 - RNA, 19 nt, Homo sapiens
  misc_RNA (1)...(19): siRNA sense strand
ucucaugaagagugggcau

SEQ ID NO: 2613079 - RNA, 19 nt, Homo sapiens
  misc_RNA (1)...(19): siRNA sense strand
aucuauacaugcagugaau

SEQ ID NO: 2613080 - RNA, 19 nt, Homo sapiens
  misc_RNA (1)...(19): siRNA sense strand
cccuaugaaugucgugaau

SEQ ID NO: 2613081 - RNA, 19 nt, Homo sapiens
  misc_RNA (1)...(19): siRNA sense strand
agaauaaaugguggaaaga

SEQ ID NO: 2613082 - RNA, 19 nt, Homo sapiens
  misc_RNA (1)...(19): siRNA sense strand
ggagaauucauacaggaga

SEQ ID NO: 2613083 - RNA, 19 nt, Homo sapiens
  misc_RNA (1)...(19): siRNA sense strand
auacaggagagaagcccua

SEQ ID NO: 2613084 - RNA, 19 nt, Homo sapiens
  misc_RNA (1)...(19): siRNA sense strand
cgugaaugugggaagacuu

SEQ ID NO: 2613085 - RNA, 19 nt, Homo sapiens
  misc_RNA (1)...(19): siRNA sense strand
ugaucauguuauuggagga

SEQ ID NO: 2613086 - RNA, 19 nt, Homo sapiens
  misc_RNA (1)...(19): siRNA sense strand
uggaauauacagaaugcga

SEQ ID NO: 2613087 - RNA, 19 nt, Homo sapiens
  misc_RNA (1)...(19): siRNA sense strand
aggaugugaugguccagaa

SEQ ID NO: 2613088 - RNA, 19 nt, Homo sapiens
  misc_RNA (1)...(19): siRNA sense strand
gggacuuauacaaggaugu

SEQ ID NO: 2613089 - RNA, 19 nt, Homo sapiens
  misc_RNA (1)...(19): siRNA sense strand
ugggagaacuggaggcaga

SEQ ID NO: 2613090 - RNA, 19 nt, Homo sapiens
  misc_RNA (1)...(19): siRNA sense strand
cugugaacguccugaacaa

SEQ ID NO: 2613091 - RNA, 19 nt, Homo sapiens
  misc_RNA (1)...(19): siRNA sense strand
gagggauguuucagcgcaa

SEQ ID NO: 2613092 - RNA, 19 nt, Homo sapiens
  misc_RNA (1)...(19): siRNA sense strand
ccuacguggacgaggucaa

SEQ ID NO: 2613093 - RNA, 19 nt, Homo sapiens
  misc_RNA (1)...(19): siRNA sense strand
cagucacgucugaggcaua

SEQ ID NO: 2613094 - RNA, 19 nt, Homo sapiens
  misc_RNA (1)...(19): siRNA sense strand
cuguggaggaggaugacua

SEQ ID NO: 2613095 - RNA, 19 nt, Homo sapiens
  misc_RNA (1)...(19): siRNA sense strand
gcaacaggacagagggcgu

SEQ ID NO: 2613096 - RNA, 19 nt, Homo sapiens
  misc_RNA (1)...(19): siRNA sense strand
agaacuggaggcagaagaa

SEQ ID NO: 2613097 - RNA, 19 nt, Homo sapiens
  misc_RNA (1)...(19): siRNA sense strand
ucacagggaaucaggacau

SEQ ID NO: 2613098 - RNA, 19 nt, Homo sapiens
  misc_RNA (1)...(19): siRNA sense strand
ggacucagcaccuggcaga

SEQ ID NO: 2613099 - RNA, 19 nt, Homo sapiens
  misc_RNA (1)...(19): siRNA sense strand
ccaucaccguacagcgcaa

SEQ ID NO: 2613100 - RNA, 19 nt, Homo sapiens
  misc_RNA (1)...(19): siRNA sense strand
augugguggugguggugaa

SEQ ID NO: 2613101 - RNA, 19 nt, Homo sapiens
  misc_RNA (1)...(19): siRNA sense strand
acuggaggcagaagaagaa

SEQ ID NO: 2613102 - RNA, 19 nt, Homo sapiens
  misc_RNA (1)...(19): siRNA sense strand
uggacgaggucaacagcga

SEQ ID NO: 2613103 - RNA, 19 nt, Homo sapiens
  misc_RNA (1)...(19): siRNA sense strand
gaucaagggcaccgccaga

SEQ ID NO: 2613104 - RNA, 19 nt, Homo sapiens
  misc_RNA (1)...(19): siRNA sense strand
agaugaaccggucgaucaa

SEQ ID NO: 2613105 - RNA, 19 nt, Homo sapiens
  misc_RNA (1)...(19): siRNA sense strand
ccaccaagaaugagucgga

SEQ ID NO: 2613106 - RNA, 19 nt, Homo sapiens
  misc_RNA (1)...(19): siRNA sense strand
cuucaauaccacagcagca

SEQ ID NO: 2613107 - RNA, 19 nt, Homo sapiens
  misc_RNA (1)...(19): siRNA sense strand
cauagacagugcagaguua

SEQ ID NO: 2613108 - RNA, 19 nt, Homo sapiens
  misc_RNA (1)...(19): siRNA sense strand
gaugaaacaugcaaagcua

SEQ ID NO: 2613109 - RNA, 19 nt, Homo sapiens
  misc_RNA (1)...(19): siRNA sense strand
caacagauaugauguggaa

SEQ ID NO: 2613110 - RNA, 19 nt, Homo sapiens
  misc_RNA (1)...(19): siRNA sense strand
ccggaagucagcagggaaa

SEQ ID NO: 2613111 - RNA, 19 nt, Homo sapiens
  misc_RNA (1)...(19): siRNA sense strand
augcaaagcuagccacaua

SEQ ID NO: 2613112 - RNA, 19 nt, Homo sapiens
  misc_RNA (1)...(19): siRNA sense strand
gagagcagcuugaauguua

SEQ ID NO: 2613113 - RNA, 19 nt, Homo sapiens
  misc_RNA (1)...(19): siRNA sense strand
gcuacuaagagaaggaaaa

SEQ ID NO: 2613114 - RNA, 19 nt, Homo sapiens
  misc_RNA (1)...(19): siRNA sense strand
cccaggagcuugugaagaa

SEQ ID NO: 2613115 - RNA, 19 nt, Homo sapiens
  misc_RNA (1)...(19): siRNA sense strand
acagauaugauguggaaau

SEQ ID NO: 2613116 - RNA, 19 nt, Homo sapiens
  misc_RNA (1)...(19): siRNA sense strand
cgaaaugugggcagaguau

SEQ ID NO: 2613117 - RNA, 19 nt, Homo sapiens
  misc_RNA (1)...(19): siRNA sense strand
ccaccagggcgaagaagaa

SEQ ID NO: 2613118 - RNA, 19 nt, Homo sapiens
  misc_RNA (1)...(19): siRNA sense strand
gauauugaugggagagcua

SEQ ID NO: 2613119 - RNA, 19 nt, Homo sapiens
  misc_RNA (1)...(19): siRNA sense strand
cugaagcugaagaggaaua

SEQ ID NO: 2613120 - RNA, 19 nt, Homo sapiens
  misc_RNA (1)...(19): siRNA sense strand
ccuggaaauaccaaggaaa

SEQ ID NO: 2613121 - RNA, 19 nt, Homo sapiens
  misc_RNA (1)...(19): siRNA sense strand
ccaaauguucugugcagua

SEQ ID NO: 2613122 - RNA, 19 nt, Homo sapiens
  misc_RNA (1)...(19): siRNA sense strand
gggcgaagaagaaggacca

SEQ ID NO: 2613123 - RNA, 19 nt, Homo sapiens
  misc_RNA (1)...(19): siRNA sense strand
uaucugggcuguugugaaa

SEQ ID NO: 2613124 - RNA, 19 nt, Homo sapiens
  misc_RNA (1)...(19): siRNA sense strand
ggacugaagcugaagagga

SEQ ID NO: 2613125 - RNA, 19 nt, Homo sapiens
  misc_RNA (1)...(19): siRNA sense strand
cuggaaauaccaaggaaaa

SEQ ID NO: 2613126 - RNA, 19 nt, Homo sapiens
  misc_RNA (1)...(19): siRNA sense strand
ugggagagcuacuaagaga

SEQ ID NO: 2613127 - RNA, 19 nt, Homo sapiens
  misc_RNA (1)...(19): siRNA sense strand
agguacagguggaaaggau

SEQ ID NO: 2613128 - RNA, 19 nt, Homo sapiens
  misc_RNA (1)...(19): siRNA sense strand
ggcuguaaaugaugaaaca

SEQ ID NO: 2613129 - RNA, 19 nt, Homo sapiens
  misc_RNA (1)...(19): siRNA sense strand
cagaugaacucguuggguu

SEQ ID NO: 2613130 - RNA, 19 nt, Homo sapiens
  misc_RNA (1)...(19): siRNA sense strand
gggagccucucaaggaaua

SEQ ID NO: 2613131 - RNA, 19 nt, Homo sapiens
  misc_RNA (1)...(19): siRNA sense strand
cgaagaagaaggaccacuu

SEQ ID NO: 2613132 - RNA, 19 nt, Homo sapiens
  misc_RNA (1)...(19): siRNA sense strand
ggaagaagcaggugucgca

SEQ ID NO: 2613133 - RNA, 19 nt, Homo sapiens
  misc_RNA (1)...(19): siRNA sense strand
uuguaugagcagagagcuu

SEQ ID NO: 2613134 - RNA, 19 nt, Homo sapiens
  misc_RNA (1)...(19): siRNA sense strand
ccaguguaguaacaggaua

SEQ ID NO: 2613135 - RNA, 19 nt, Homo sapiens
  misc_RNA (1)...(19): siRNA sense strand
ccaaaaggcuguaaaugau

SEQ ID NO: 2613136 - RNA, 19 nt, Homo sapiens
  misc_RNA (1)...(19): siRNA sense strand
gaagaaggaccacuugaua

SEQ ID NO: 2613137 - RNA, 19 nt, Homo sapiens
  misc_RNA (1)...(19): siRNA sense strand
gggagagcuacuaagagaa

SEQ ID NO: 2613138 - RNA, 19 nt, Homo sapiens
  misc_RNA (1)...(19): siRNA sense strand
gggaagaguccuguagaga

SEQ ID NO: 2613139 - RNA, 19 nt, Homo sapiens
  misc_RNA (1)...(19): siRNA sense strand
aaaggaugagggagguuaa

SEQ ID NO: 2613140 - RNA, 19 nt, Homo sapiens
  misc_RNA (1)...(19): siRNA sense strand
ggaaaugacagaugaacuc

SEQ ID NO: 2613141 - RNA, 19 nt, Homo sapiens
  misc_RNA (1)...(19): siRNA sense strand
guacagguggaaaggauga

SEQ ID NO: 2613142 - RNA, 19 nt, Homo sapiens
  misc_RNA (1)...(19): siRNA sense strand
cugcagugucugaguccua

SEQ ID NO: 2613143 - RNA, 19 nt, Homo sapiens
  misc_RNA (1)...(19): siRNA sense strand
gcagagaacuccuaugaac

SEQ ID NO: 2613144 - RNA, 19 nt, Homo sapiens
  misc_RNA (1)...(19): siRNA sense strand
gcacaaacucaccugcaau

SEQ ID NO: 2613145 - RNA, 19 nt, Homo sapiens
  misc_RNA (1)...(19): siRNA sense strand
caguugaaugaaagcacaa

SEQ ID NO: 2613146 - RNA, 19 nt, Homo sapiens
  misc_RNA (1)...(19): siRNA sense strand
gguaaagcaucaucucgaa

SEQ ID NO: 2613147 - RNA, 19 nt, Homo sapiens
  misc_RNA (1)...(19): siRNA sense strand
aagccaagguacaggugga

SEQ ID NO: 2613148 - RNA, 19 nt, Homo sapiens
  misc_RNA (1)...(19): siRNA sense strand
gaaaggaugagggagguua

SEQ ID NO: 2613149 - RNA, 19 nt, Homo sapiens
  misc_RNA (1)...(19): siRNA sense strand
cugggauauugaugggaga

SEQ ID NO: 2613150 - RNA, 19 nt, Homo sapiens
  misc_RNA (1)...(19): siRNA sense strand
aggagugaguuuccacaua

SEQ ID NO: 2613151 - RNA, 19 nt, Homo sapiens
  misc_RNA (1)...(19): siRNA sense strand
gcagagagcuugugucccu

SEQ ID NO: 2613152 - RNA, 19 nt, Homo sapiens
  misc_RNA (1)...(19): siRNA sense strand
guggaaaggaugagggagg

SEQ ID NO: 2613153 - RNA, 19 nt, Homo sapiens
  misc_RNA (1)...(19): siRNA sense strand
uguaguaacaggauaggau

SEQ ID NO: 2613154 - RNA, 19 nt, Homo sapiens
  misc_RNA (1)...(19): siRNA sense strand
ccacauagacagugcagag

SEQ ID NO: 2613155 - RNA, 19 nt, Homo sapiens
  misc_RNA (1)...(19): siRNA sense strand
guugugaaaccuggaaaua

SEQ ID NO: 2613156 - RNA, 19 nt, Homo sapiens
  misc_RNA (1)...(19): siRNA sense strand
ggaagcuccagaagaaaga

SEQ ID NO: 2613157 - RNA, 19 nt, Homo sapiens
  misc_RNA (1)...(19): siRNA sense strand
gcagggaaacgcagagaac

SEQ ID NO: 2613158 - RNA, 19 nt, Homo sapiens
  misc_RNA (1)...(19): siRNA sense strand
gcuaccaaccugagccuuu

SEQ ID NO: 2613159 - RNA, 19 nt, Homo sapiens
  misc_RNA (1)...(19): siRNA sense strand
uggaaaugacagaugaacu

SEQ ID NO: 2613160 - RNA, 19 nt, Homo sapiens
  misc_RNA (1)...(19): siRNA sense strand
accuaaagccauauuggaa

SEQ ID NO: 2613161 - RNA, 19 nt, Homo sapiens
  misc_RNA (1)...(19): siRNA sense strand
cgguaaagcaucaucucga

SEQ ID NO: 2613162 - RNA, 19 nt, Homo sapiens
  misc_RNA (1)...(19): siRNA sense strand
aagaaggaccacuugauau

SEQ ID NO: 2613163 - RNA, 19 nt, Homo sapiens
  misc_RNA (1)...(19): siRNA sense strand
agggaaacgcagagaacuc

SEQ ID NO: 2613164 - RNA, 19 nt, Homo sapiens
  misc_RNA (1)...(19): siRNA sense strand
guaaagcaucaucucgaaa

SEQ ID NO: 2613165 - RNA, 19 nt, Homo sapiens
  misc_RNA (1)...(19): siRNA sense strand
gcuugaauguuaaaaccaa

SEQ ID NO: 2613166 - RNA, 19 nt, Homo sapiens
  misc_RNA (1)...(19): siRNA sense strand
ggaaaggaugagggagguu

SEQ ID NO: 2613167 - RNA, 19 nt, Homo sapiens
  misc_RNA (1)...(19): siRNA sense strand
gggaggccucugucaguua

SEQ ID NO: 2613168 - RNA, 19 nt, Homo sapiens
  misc_RNA (1)...(19): siRNA sense strand
uugaaugaaagcacaacaa

SEQ ID NO: 2613169 - RNA, 19 nt, Homo sapiens
  misc_RNA (1)...(19): siRNA sense strand
ucgcaugacuuccuggaga

SEQ ID NO: 2613170 - RNA, 19 nt, Homo sapiens
  misc_RNA (1)...(19): siRNA sense strand
caacgauccaccagggcga

SEQ ID NO: 2613171 - RNA, 19 nt, Homo sapiens
  misc_RNA (1)...(19): siRNA sense strand
agaacagcugggagaguua

SEQ ID NO: 2613172 - RNA, 19 nt, Homo sapiens
  misc_RNA (1)...(19): siRNA sense strand
cagaaagagaugcaggauu

SEQ ID NO: 2613173 - RNA, 19 nt, Homo sapiens
  misc_RNA (1)...(19): siRNA sense strand
acucaacagagaaggcaaa

SEQ ID NO: 2613174 - RNA, 19 nt, Homo sapiens
  misc_RNA (1)...(19): siRNA sense strand
agggagauacugagaguga

SEQ ID NO: 2613175 - RNA, 19 nt, Homo sapiens
  misc_RNA (1)...(19): siRNA sense strand
ggaugauggaacuaacaaa

SEQ ID NO: 2613176 - RNA, 19 nt, Homo sapiens
  misc_RNA (1)...(19): siRNA sense strand
gagaagucacagacggaau

SEQ ID NO: 2613177 - RNA, 19 nt, Homo sapiens
  misc_RNA (1)...(19): siRNA sense strand
aguugaaccaggagaauga

SEQ ID NO: 2613178 - RNA, 19 nt, Homo sapiens
  misc_RNA (1)...(19): siRNA sense strand
cguauuugcuguuggcaca

SEQ ID NO: 2613179 - RNA, 19 nt, Homo sapiens
  misc_RNA (1)...(19): siRNA sense strand
cugaagaugaugaagauga

SEQ ID NO: 2613180 - RNA, 19 nt, Homo sapiens
  misc_RNA (1)...(19): siRNA sense strand
agugagugaucaagugcaa

SEQ ID NO: 2613181 - RNA, 19 nt, Homo sapiens
  misc_RNA (1)...(19): siRNA sense strand
ugaugaggccagugaguga

SEQ ID NO: 2613182 - RNA, 19 nt, Homo sapiens
  misc_RNA (1)...(19): siRNA sense strand
caaagaagccacaagcaca

SEQ ID NO: 2613183 - RNA, 19 nt, Homo sapiens
  misc_RNA (1)...(19): siRNA sense strand
ugaauuacaucauugggaa

SEQ ID NO: 2613184 - RNA, 19 nt, Homo sapiens
  misc_RNA (1)...(19): siRNA sense strand
gggagaagucacagacgga

SEQ ID NO: 2613185 - RNA, 19 nt, Homo sapiens
  misc_RNA (1)...(19): siRNA sense strand
ucgcugaauuugaggaugu

SEQ ID NO: 2613186 - RNA, 19 nt, Homo sapiens
  misc_RNA (1)...(19): siRNA sense strand
ggaggacauaguagaguau

SEQ ID NO: 2613187 - RNA, 19 nt, Homo sapiens
  misc_RNA (1)...(19): siRNA sense strand
uggaagggcaggaugaaaa

SEQ ID NO: 2613188 - RNA, 19 nt, Homo sapiens
  misc_RNA (1)...(19): siRNA sense strand
ccaugaaugaugaagacau

SEQ ID NO: 2613189 - RNA, 19 nt, Homo sapiens
  misc_RNA (1)...(19): siRNA sense strand
aggucagccuuuaaagcua

SEQ ID NO: 2613190 - RNA, 19 nt, Homo sapiens
  misc_RNA (1)...(19): siRNA sense strand
caaaggauauggaggcacu

SEQ ID NO: 2613191 - RNA, 19 nt, Homo sapiens
  misc_RNA (1)...(19): siRNA sense strand
gauacuucuucuagcaaaa

SEQ ID NO: 2613192 - RNA, 19 nt, Homo sapiens
  misc_RNA (1)...(19): siRNA sense strand
acaucauugggaagaauaa

SEQ ID NO: 2613193 - RNA, 19 nt, Homo sapiens
  misc_RNA (1)...(19): siRNA sense strand
cagauacccaggagggaga

SEQ ID NO: 2613194 - RNA, 19 nt, Homo sapiens
  misc_RNA (1)...(19): siRNA sense strand
ggaaagccuuggugcgacu

SEQ ID NO: 2613195 - RNA, 19 nt, Homo sapiens
  misc_RNA (1)...(19): siRNA sense strand
ggagauacugagagugaac

SEQ ID NO: 2613196 - RNA, 19 nt, Homo sapiens
  misc_RNA (1)...(19): siRNA sense strand
gcaaagacaggaagcagca

SEQ ID NO: 2613197 - RNA, 19 nt, Homo sapiens
  misc_RNA (1)...(19): siRNA sense strand
ggaugaaaaccaagaagga

SEQ ID NO: 2613198 - RNA, 19 nt, Homo sapiens
  misc_RNA (1)...(19): siRNA sense strand
caggaaaguugaaccagga

SEQ ID NO: 2613199 - RNA, 19 nt, Homo sapiens
  misc_RNA (1)...(19): siRNA sense strand
acagacggaaugauggaua

SEQ ID NO: 2613200 - RNA, 19 nt, Homo sapiens
  misc_RNA (1)...(19): siRNA sense strand
accauaugaugaugaagaa

SEQ ID NO: 2613201 - RNA, 19 nt, Homo sapiens
  misc_RNA (1)...(19): siRNA sense strand
cuagaaauuuugaugguga

SEQ ID NO: 2613202 - RNA, 19 nt, Homo sapiens
  misc_RNA (1)...(19): siRNA sense strand
agaugcaggauuugaguga

SEQ ID NO: 2613203 - RNA, 19 nt, Homo sapiens
  misc_RNA (1)...(19): siRNA sense strand
augcaggauuugagugagu

SEQ ID NO: 2613204 - RNA, 19 nt, Homo sapiens
  misc_RNA (1)...(19): siRNA sense strand
aaaucaaagugaaagccau

SEQ ID NO: 2613205 - RNA, 19 nt, Homo sapiens
  misc_RNA (1)...(19): siRNA sense strand
augaaaaccaagaaggaga

SEQ ID NO: 2613206 - RNA, 19 nt, Homo sapiens
  misc_RNA (1)...(19): siRNA sense strand
ggaaaguugaaccaggaga

SEQ ID NO: 2613207 - RNA, 19 nt, Homo sapiens
  misc_RNA (1)...(19): siRNA sense strand
aguuggaagggcaggauga

SEQ ID NO: 2613208 - RNA, 19 nt, Homo sapiens
  misc_RNA (1)...(19): siRNA sense strand
ugauaaugacuucgcugaa

SEQ ID NO: 2613209 - RNA, 19 nt, Homo sapiens
  misc_RNA (1)...(19): siRNA sense strand
aaaccaagaaggagauuuu

SEQ ID NO: 2613210 - RNA, 19 nt, Homo sapiens
  misc_RNA (1)...(19): siRNA sense strand
gagugaaccauaugaugau

SEQ ID NO: 2613211 - RNA, 19 nt, Homo sapiens
  misc_RNA (1)...(19): siRNA sense strand
agauacuucuucuagcaaa

SEQ ID NO: 2613212 - RNA, 19 nt, Homo sapiens
  misc_RNA (1)...(19): siRNA sense strand
gcaggauuugagugaguuu

SEQ ID NO: 2613213 - RNA, 19 nt, Homo sapiens
  misc_RNA (1)...(19): siRNA sense strand
uggaaaagaagcaaaugaa

SEQ ID NO: 2613214 - RNA, 19 nt, Homo sapiens
  misc_RNA (1)...(19): siRNA sense strand
cuguggaguuggaagggca

SEQ ID NO: 2613215 - RNA, 19 nt, Homo sapiens
  misc_RNA (1)...(19): siRNA sense strand
aaugaugaagacauggaua

SEQ ID NO: 2613216 - RNA, 19 nt, Homo sapiens
  misc_RNA (1)...(19): siRNA sense strand
agauaagaaccgugcccga

SEQ ID NO: 2613217 - RNA, 19 nt, Homo sapiens
  misc_RNA (1)...(19): siRNA sense strand
gugcccgaguagaagagaa

SEQ ID NO: 2613218 - RNA, 19 nt, Homo sapiens
  misc_RNA (1)...(19): siRNA sense strand
ugagugaucaagugcaaau

SEQ ID NO: 2613219 - RNA, 19 nt, Homo sapiens
  misc_RNA (1)...(19): siRNA sense strand
agugaguuuuguagugaua

SEQ ID NO: 2613220 - RNA, 19 nt, Homo sapiens
  misc_RNA (1)...(19): siRNA sense strand
acagagaaggcaaacaaaa

SEQ ID NO: 2613221 - RNA, 19 nt, Homo sapiens
  misc_RNA (1)...(19): siRNA sense strand
gggagcuuuuggagagcaa

SEQ ID NO: 2613222 - RNA, 19 nt, Homo sapiens
  misc_RNA (1)...(19): siRNA sense strand
aggagaaugagcacaucua

SEQ ID NO: 2613223 - RNA, 19 nt, Homo sapiens
  misc_RNA (1)...(19): siRNA sense strand
aagaugaagaugaggaaau

SEQ ID NO: 2613224 - RNA, 19 nt, Homo sapiens
  misc_RNA (1)...(19): siRNA sense strand
gaaacaaacccaaagccaa

SEQ ID NO: 2613225 - RNA, 19 nt, Homo sapiens
  misc_RNA (1)...(19): siRNA sense strand
aggaaaugguugacaugau

SEQ ID NO: 2613226 - RNA, 19 nt, Homo sapiens
  misc_RNA (1)...(19): siRNA sense strand
agaagaugaagaugaggaa

SEQ ID NO: 2613227 - RNA, 19 nt, Homo sapiens
  misc_RNA (1)...(19): siRNA sense strand
cggaaggauaugaugaaaa

SEQ ID NO: 2613228 - RNA, 19 nt, Homo sapiens
  misc_RNA (1)...(19): siRNA sense strand
ugguugacaugaugaacaa

SEQ ID NO: 2613229 - RNA, 19 nt, Homo sapiens
  misc_RNA (1)...(19): siRNA sense strand
augaaagugaagaggauga

SEQ ID NO: 2613230 - RNA, 19 nt, Homo sapiens
  misc_RNA (1)...(19): siRNA sense strand
gaaaauuaauggaaggguu

SEQ ID NO: 2613231 - RNA, 19 nt, Homo sapiens
  misc_RNA (1)...(19): siRNA sense strand
aggcaguuuauauggauua

SEQ ID NO: 2613232 - RNA, 19 nt, Homo sapiens
  misc_RNA (1)...(19): siRNA sense strand
agaaugaagcaaaagguaa

SEQ ID NO: 2613233 - RNA, 19 nt, Homo sapiens
  misc_RNA (1)...(19): siRNA sense strand
gaaugaagcaaaagguaau

SEQ ID NO: 2613234 - RNA, 19 nt, Homo sapiens
  misc_RNA (1)...(19): siRNA sense strand
cuaauuguggagugguaaa

SEQ ID NO: 2613235 - RNA, 19 nt, Homo sapiens
  misc_RNA (1)...(19): siRNA sense strand
augacaugcuggcuggaaa

SEQ ID NO: 2613236 - RNA, 19 nt, Homo sapiens
  misc_RNA (1)...(19): siRNA sense strand
aaguggagaaugaagcaaa

SEQ ID NO: 2613237 - RNA, 19 nt, Homo sapiens
  misc_RNA (1)...(19): siRNA sense strand
uggaugaagaagaugaaga

SEQ ID NO: 2613238 - RNA, 19 nt, Homo sapiens
  misc_RNA (1)...(19): siRNA sense strand
uugaaagagaagauaguga

SEQ ID NO: 2613239 - RNA, 19 nt, Homo sapiens
  misc_RNA (1)...(19): siRNA sense strand
ggguggaugaagaagauga

SEQ ID NO: 2613240 - RNA, 19 nt, Homo sapiens
  misc_RNA (1)...(19): siRNA sense strand
guugcaaaggacugggaau

SEQ ID NO: 2613241 - RNA, 19 nt, Homo sapiens
  misc_RNA (1)...(19): siRNA sense strand
uugcaaaggacugggaauu

SEQ ID NO: 2613242 - RNA, 19 nt, Homo sapiens
  misc_RNA (1)...(19): siRNA sense strand
gagacuacuaagcggaaaa

SEQ ID NO: 2613243 - RNA, 19 nt, Homo sapiens
  misc_RNA (1)...(19): siRNA sense strand
gggaaaacaaauccuaaaa

SEQ ID NO: 2613244 - RNA, 19 nt, Homo sapiens
  misc_RNA (1)...(19): siRNA sense strand
gguggaugaagaagaugaa

SEQ ID NO: 2613245 - RNA, 19 nt, Homo sapiens
  misc_RNA (1)...(19): siRNA sense strand
ccucaaaagaagccaguuu

SEQ ID NO: 2613246 - RNA, 19 nt, Homo sapiens
  misc_RNA (1)...(19): siRNA sense strand
aguuaauuccugugcauca

SEQ ID NO: 2613247 - RNA, 19 nt, Homo sapiens
  misc_RNA (1)...(19): siRNA sense strand
guuugaaagagaagauagu

SEQ ID NO: 2613248 - RNA, 19 nt, Homo sapiens
  misc_RNA (1)...(19): siRNA sense strand
gugacucagaaguggagaa

SEQ ID NO: 2613249 - RNA, 19 nt, Homo sapiens
  misc_RNA (1)...(19): siRNA sense strand
uauuucagguugaugggaa

SEQ ID NO: 2613250 - RNA, 19 nt, Homo sapiens
  misc_RNA (1)...(19): siRNA sense strand
gugcaucaagugagagguu

SEQ ID NO: 2613251 - RNA, 19 nt, Homo sapiens
  misc_RNA (1)...(19): siRNA sense strand
aagagaagauagugaggag

SEQ ID NO: 2613252 - RNA, 19 nt, Homo sapiens
  misc_RNA (1)...(19): siRNA sense strand
aagaugaggaaaugguuga

SEQ ID NO: 2613253 - RNA, 19 nt, Homo sapiens
  misc_RNA (1)...(19): siRNA sense strand
uggauuaagcauugccaca

SEQ ID NO: 2613254 - RNA, 19 nt, Homo sapiens
  misc_RNA (1)...(19): siRNA sense strand
gagguuugaaagagaagau

SEQ ID NO: 2613255 - RNA, 19 nt, Homo sapiens
  misc_RNA (1)...(19): siRNA sense strand
gagaagauagugaggagcu

SEQ ID NO: 2613256 - RNA, 19 nt, Homo sapiens
  misc_RNA (1)...(19): siRNA sense strand
aguggagaaugaagcaaaa

SEQ ID NO: 2613257 - RNA, 19 nt, Homo sapiens
  misc_RNA (1)...(19): siRNA sense strand
ccacgaguacccacagcaa

SEQ ID NO: 2613258 - RNA, 19 nt, Homo sapiens
  misc_RNA (1)...(19): siRNA sense strand
aagugagagguuugaaaga

SEQ ID NO: 2613259 - RNA, 19 nt, Homo sapiens
  misc_RNA (1)...(19): siRNA sense strand
acugauuggaagcaugaaa

SEQ ID NO: 2613260 - RNA, 19 nt, Homo sapiens
  misc_RNA (1)...(19): siRNA sense strand
agaaacaaacccaaagcca

SEQ ID NO: 2613261 - RNA, 19 nt, Homo sapiens
  misc_RNA (1)...(19): siRNA sense strand
aaucgguuucggaaggaua

SEQ ID NO: 2613262 - RNA, 19 nt, Homo sapiens
  misc_RNA (1)...(19): siRNA sense strand
gggaugugaacucaaggaa

SEQ ID NO: 2613263 - RNA, 19 nt, Homo sapiens
  misc_RNA (1)...(19): siRNA sense strand
gcuuggaggagcuggucuu

SEQ ID NO: 2613264 - RNA, 19 nt, Homo sapiens
  misc_RNA (1)...(19): siRNA sense strand
augaggaaaugguugacau

SEQ ID NO: 2613265 - RNA, 19 nt, Homo sapiens
  misc_RNA (1)...(19): siRNA sense strand
guguaggagagaagagaaa

SEQ ID NO: 2613266 - RNA, 19 nt, Homo sapiens
  misc_RNA (1)...(19): siRNA sense strand
augcuuugguggaggauau

SEQ ID NO: 2613267 - RNA, 19 nt, Homo sapiens
  misc_RNA (1)...(19): siRNA sense strand
ggagagaagagaaagcuca

SEQ ID NO: 2613268 - RNA, 19 nt, Homo sapiens
  misc_RNA (1)...(19): siRNA sense strand
cuauggaaaagaaggaaaa

SEQ ID NO: 2613269 - RNA, 19 nt, Homo sapiens
  misc_RNA (1)...(19): siRNA sense strand
cccugaaccagaagugaaa

SEQ ID NO: 2613270 - RNA, 19 nt, Homo sapiens
  misc_RNA (1)...(19): siRNA sense strand
gggauuugauguuggucca

SEQ ID NO: 2613271 - RNA, 19 nt, Homo sapiens
  misc_RNA (1)...(19): siRNA sense strand
gcuauggaaaagaaggaaa

SEQ ID NO: 2613272 - RNA, 19 nt, Homo sapiens
  misc_RNA (1)...(19): siRNA sense strand
gcauauuuaaagaaggagu

SEQ ID NO: 2613273 - RNA, 19 nt, Homo sapiens
  misc_RNA (1)...(19): siRNA sense strand
ggagauucgaaauggacca

SEQ ID NO: 2613274 - RNA, 19 nt, Homo sapiens
  misc_RNA (1)...(19): siRNA sense strand
guuuggaauuggaaggcaa

SEQ ID NO: 2613275 - RNA, 19 nt, Homo sapiens
  misc_RNA (1)...(19): siRNA sense strand
uugaagagaagguggccaa

SEQ ID NO: 2613276 - RNA, 19 nt, Homo sapiens
  misc_RNA (1)...(19): siRNA sense strand
ggugaaaggaccagaggcu

SEQ ID NO: 2613277 - RNA, 19 nt, Homo sapiens
  misc_RNA (1)...(19): siRNA sense strand
acagauaagaacaaaccaa

SEQ ID NO: 2613278 - RNA, 19 nt, Homo sapiens
  misc_RNA (1)...(19): siRNA sense strand
cagccaaggcacugguaca

SEQ ID NO: 2613279 - RNA, 19 nt, Homo sapiens
  misc_RNA (1)...(19): siRNA sense strand
ugaaauggcuaaacaggca

SEQ ID NO: 2613280 - RNA, 19 nt, Homo sapiens
  misc_RNA (1)...(19): siRNA sense strand
ccucaauugcguaggacca

SEQ ID NO: 2613281 - RNA, 19 nt, Homo sapiens
  misc_RNA (1)...(19): siRNA sense strand
augagaaagcugcagacaa

SEQ ID NO: 2613282 - RNA, 19 nt, Homo sapiens
  misc_RNA (1)...(19): siRNA sense strand
cagaguaauuugagaaaac

SEQ ID NO: 2613283 - RNA, 19 nt, Homo sapiens
  misc_RNA (1)...(19): siRNA sense strand
ggucaaggauacagccaag

SEQ ID NO: 2613284 - RNA, 19 nt, Homo sapiens
  misc_RNA (1)...(19): siRNA sense strand
caguaugcugcguauguaa

SEQ ID NO: 2613285 - RNA, 19 nt, Homo sapiens
  misc_RNA (1)...(19): siRNA sense strand
ccucauucacgcugacauu

SEQ ID NO: 2613286 - RNA, 19 nt, Homo sapiens
  misc_RNA (1)...(19): siRNA sense strand
guuuuggagaucagaguaa

SEQ ID NO: 2613287 - RNA, 19 nt, Homo sapiens
  misc_RNA (1)...(19): siRNA sense strand
aacuaaugcaacugaagua

SEQ ID NO: 2613288 - RNA, 19 nt, Homo sapiens
  misc_RNA (1)...(19): siRNA sense strand
cuuugugagguuuggaauu

SEQ ID NO: 2613289 - RNA, 19 nt, Homo sapiens
  misc_RNA (1)...(19): siRNA sense strand
cggcaaaggaucaugguca

SEQ ID NO: 2613290 - RNA, 19 nt, Homo sapiens
  misc_RNA (1)...(19): siRNA sense strand
acuuaugauuguggagaaa

SEQ ID NO: 2613291 - RNA, 19 nt, Homo sapiens
  misc_RNA (1)...(19): siRNA sense strand
agaauggaaaggaggaauu

SEQ ID NO: 2613292 - RNA, 19 nt, Homo sapiens
  misc_RNA (1)...(19): siRNA sense strand
aagagaauguggaagguca

SEQ ID NO: 2613293 - RNA, 19 nt, Homo sapiens
  misc_RNA (1)...(19): siRNA sense strand
cuacuuuggaggagggaca

SEQ ID NO: 2613294 - RNA, 19 nt, Homo sapiens
  misc_RNA (1)...(19): siRNA sense strand
guggaauggagaauauaaa

SEQ ID NO: 2613295 - RNA, 19 nt, Homo sapiens
  misc_RNA (1)...(19): siRNA sense strand
cuauaagaucuucggguuu

SEQ ID NO: 2613296 - RNA, 19 nt, Homo sapiens
  misc_RNA (1)...(19): siRNA sense strand
uggaaaacacuuaugguaa

SEQ ID NO: 2613297 - RNA, 19 nt, Homo sapiens
  misc_RNA (1)...(19): siRNA sense strand
guugaaagagaauguggaa

SEQ ID NO: 2613298 - RNA, 19 nt, Homo sapiens
  misc_RNA (1)...(19): siRNA sense strand
agagaaagcugcaggaguc

SEQ ID NO: 2613299 - RNA, 19 nt, Homo sapiens
  misc_RNA (1)...(19): siRNA sense strand
cuguggagcaggugcgcua

SEQ ID NO: 2613300 - RNA, 19 nt, Homo sapiens
  misc_RNA (1)...(19): siRNA sense strand
gugcggauuuacagcgauu

SEQ ID NO: 2613301 - RNA, 19 nt, Homo sapiens
  misc_RNA (1)...(19): siRNA sense strand
ggaaaauagugaacggacu

SEQ ID NO: 2613302 - RNA, 19 nt, Homo sapiens
  misc_RNA (1)...(19): siRNA sense strand
ccagugaugagaauggaaa

SEQ ID NO: 2613303 - RNA, 19 nt, Homo sapiens
  misc_RNA (1)...(19): siRNA sense strand
gugaaacaaaggugaacuu

SEQ ID NO: 2613304 - RNA, 19 nt, Homo sapiens
  misc_RNA (1)...(19): siRNA sense strand
ccuggauagaagaggucaa

SEQ ID NO: 2613305 - RNA, 19 nt, Homo sapiens
  misc_RNA (1)...(19): siRNA sense strand
agaucaacuuccugguaca

SEQ ID NO: 2613306 - RNA, 19 nt, Homo sapiens
  misc_RNA (1)...(19): siRNA sense strand
cugagaaacaccaggaugu

SEQ ID NO: 2613307 - RNA, 19 nt, Homo sapiens
  misc_RNA (1)...(19): siRNA sense strand
ggaacgugaccauggcuau

SEQ ID NO: 2613308 - RNA, 19 nt, Homo sapiens
  misc_RNA (1)...(19): siRNA sense strand
ccuugauguuaucgcgcua

SEQ ID NO: 2613309 - RNA, 19 nt, Homo sapiens
  misc_RNA (1)...(19): siRNA sense strand
acuagugaucucauggaaa

SEQ ID NO: 2613310 - RNA, 19 nt, Homo sapiens
  misc_RNA (1)...(19): siRNA sense strand
auuucaagcugguugucaa

SEQ ID NO: 2613311 - RNA, 19 nt, Homo sapiens
  misc_RNA (1)...(19): siRNA sense strand
ggugaaugaggcacaguau

SEQ ID NO: 2613312 - RNA, 19 nt, Homo sapiens
  misc_RNA (1)...(19): siRNA sense strand
gaagaagagaaaugggaug

SEQ ID NO: 2613313 - RNA, 19 nt, Homo sapiens
  misc_RNA (1)...(19): siRNA sense strand
ccucacagccagaacauca

SEQ ID NO: 2613314 - RNA, 19 nt, Homo sapiens
  misc_RNA (1)...(19): siRNA sense strand
cucacaggcuccaggguuu

SEQ ID NO: 2613315 - RNA, 19 nt, Homo sapiens
  misc_RNA (1)...(19): siRNA sense strand
gaaacauggaaaagaucaa

SEQ ID NO: 2613316 - RNA, 19 nt, Homo sapiens
  misc_RNA (1)...(19): siRNA sense strand
cucucaaacugguggcaga

SEQ ID NO: 2613317 - RNA, 19 nt, Homo sapiens
  misc_RNA (1)...(19): siRNA sense strand
ucuauaagaucuucggguu

SEQ ID NO: 2613318 - RNA, 19 nt, Homo sapiens
  misc_RNA (1)...(19): siRNA sense strand
gagaauggaaaggaggaau

SEQ ID NO: 2613319 - RNA, 19 nt, Homo sapiens
  misc_RNA (1)...(19): siRNA sense strand
gggacaauauggaccucau

SEQ ID NO: 2613320 - RNA, 19 nt, Homo sapiens
  misc_RNA (1)...(19): siRNA sense strand
auggaaaggaggaauuauu

SEQ ID NO: 2613321 - RNA, 19 nt, Homo sapiens
  misc_RNA (1)...(19): siRNA sense strand
acaccuccguaguggguau

SEQ ID NO: 2613322 - RNA, 19 nt, Homo sapiens
  misc_RNA (1)...(19): siRNA sense strand
gcuacccagcucagaguaa

SEQ ID NO: 2613323 - RNA, 19 nt, Homo sapiens
  misc_RNA (1)...(19): siRNA sense strand
cagagaaagcugcaggagu

SEQ ID NO: 2613324 - RNA, 19 nt, Homo sapiens
  misc_RNA (1)...(19): siRNA sense strand
gagaauauaaagcagcaca

SEQ ID NO: 2613325 - RNA, 19 nt, Homo sapiens
  misc_RNA (1)...(19): siRNA sense strand
cugagagucgugaaacaaa

SEQ ID NO: 2613326 - RNA, 19 nt, Homo sapiens
  misc_RNA (1)...(19): siRNA sense strand
cuauaugaccggagcugga

SEQ ID NO: 2613327 - RNA, 19 nt, Homo sapiens
  misc_RNA (1)...(19): siRNA sense strand
ucacagguggaauggagaa

SEQ ID NO: 2613328 - RNA, 19 nt, Homo sapiens
  misc_RNA (1)...(19): siRNA sense strand
uacuuaugauuguggagaa

SEQ ID NO: 2613329 - RNA, 19 nt, Homo sapiens
  misc_RNA (1)...(19): siRNA sense strand
cagcaaacugggcaacgaa

SEQ ID NO: 2613330 - RNA, 19 nt, Homo sapiens
  misc_RNA (1)...(19): siRNA sense strand
ccgcagaagacuacacugu

SEQ ID NO: 2613331 - RNA, 19 nt, Homo sapiens
  misc_RNA (1)...(19): siRNA sense strand
guaccuagcaggagaagac

SEQ ID NO: 2613332 - RNA, 19 nt, Homo sapiens
  misc_RNA (1)...(19): siRNA sense strand
ucaucaaagccaaagggau

SEQ ID NO: 2613333 - RNA, 19 nt, Homo sapiens
  misc_RNA (1)...(19): siRNA sense strand
aagaagagaaaugggauga

SEQ ID NO: 2613334 - RNA, 19 nt, Homo sapiens
  misc_RNA (1)...(19): siRNA sense strand
acagaauccuggcgcacuu

SEQ ID NO: 2613335 - RNA, 19 nt, Homo sapiens
  misc_RNA (1)...(19): siRNA sense strand
auauaaagcagcacaccuu

SEQ ID NO: 2613336 - RNA, 19 nt, Homo sapiens
  misc_RNA (1)...(19): siRNA sense strand
gcauaagcaacgagauggu

SEQ ID NO: 2613337 - RNA, 19 nt, Homo sapiens
  misc_RNA (1)...(19): siRNA sense strand
cugaagaagaccuggaauu

SEQ ID NO: 2613338 - RNA, 19 nt, Homo sapiens
  misc_RNA (1)...(19): siRNA sense strand
uggaagauucagagcuuaa
